United States Patent Application Publication US 2005/0287570 A1 - sequence listing, part 12

SEQ ID NO: 282969 - DNA, 25 bp, Artificial
  Probe
cctgatgactaagtactaggataca

SEQ ID NO: 282970 - DNA, 25 bp, Artificial
  Probe
ccttcacattggtgaagccctgcac

SEQ ID NO: 282971 - DNA, 25 bp, Artificial
  Probe
taaaggagtttgttccttcacattg

SEQ ID NO: 282972 - DNA, 25 bp, Artificial
  Probe
tccttctcaagtagtgccaagccct

SEQ ID NO: 282973 - DNA, 25 bp, Artificial
  Probe
ttcagacatggttcttctaagcagt

SEQ ID NO: 282974 - DNA, 25 bp, Artificial
  Probe
ttgactttgctgctgctattgagtc

SEQ ID NO: 282975 - DNA, 25 bp, Artificial
  Probe
gtgaagccctgcactctgttttatt

SEQ ID NO: 282976 - DNA, 25 bp, Artificial
  Probe
gaaatcccaaagcacatccccagtg

SEQ ID NO: 282977 - DNA, 25 bp, Artificial
  Probe
atcagattgactttgctgctgctat

SEQ ID NO: 282978 - DNA, 25 bp, Artificial
  Probe
tgtcataccgtgtctaagagaatga

SEQ ID NO: 282979 - DNA, 25 bp, Artificial
  Probe
cttctcaagtagtgccaagccctga

SEQ ID NO: 282980 - DNA, 25 bp, Artificial
  Probe
tcacagagtcatctgccttcgcctt

SEQ ID NO: 282981 - DNA, 25 bp, Artificial
  Probe
gttttcacagagtcatctgccttcg

SEQ ID NO: 282982 - DNA, 25 bp, Artificial
  Probe
agtttgttccttcacattggtgaag

SEQ ID NO: 282983 - DNA, 25 bp, Artificial
  Probe
ccttctcaagtagtgccaagccctg

SEQ ID NO: 282984 - DNA, 25 bp, Artificial
  Probe
cttcagtcttagaaatgtcataccg

SEQ ID NO: 282985 - DNA, 25 bp, Artificial
  Probe
tctatcagattgactttgctgctgc

SEQ ID NO: 282986 - DNA, 25 bp, Artificial
  Probe
tggttcttctaagcagtttatccct

SEQ ID NO: 282987 - DNA, 25 bp, Artificial
  Probe
ttcacattggtgaagccctgcactc

SEQ ID NO: 282988 - DNA, 25 bp, Artificial
  Probe
ctgtcagggagtgtctatcagattg

SEQ ID NO: 282989 - DNA, 25 bp, Artificial
  Probe
agtgccaagccctgatgactaagta

SEQ ID NO: 282990 - DNA, 25 bp, Artificial
  Probe
cagattgactttgctgctgctattg

SEQ ID NO: 282991 - DNA, 25 bp, Artificial
  Probe
tccaggactgtcagggagtgtctat

SEQ ID NO: 282992 - DNA, 25 bp, Artificial
  Probe
ggactgtcagggagtgtctatcaga

SEQ ID NO: 282993 - DNA, 25 bp, Artificial
  Probe
ggtgaagccctgcactctgttttat

SEQ ID NO: 282994 - DNA, 25 bp, Artificial
  Probe
ctgctattgagtctttcctgggttt

SEQ ID NO: 282995 - DNA, 25 bp, Artificial
  Probe
aaggagtttgttccttcacattggt

SEQ ID NO: 282996 - DNA, 25 bp, Artificial
  Probe
aggtccttctcaagtagtgccaagc

SEQ ID NO: 282997 - DNA, 25 bp, Artificial
  Probe
caagtagtgccaagccctgatgact

SEQ ID NO: 282998 - DNA, 25 bp, Artificial
  Probe
tgctgctgctattgagtctttcctg

SEQ ID NO: 282999 - DNA, 25 bp, Artificial
  Probe
ctaagcagtttatccctgagatttt

SEQ ID NO: 283000 - DNA, 25 bp, Artificial
  Probe
gtcgacgtggacacccgatgcagta

SEQ ID NO: 283001 - DNA, 25 bp, Artificial
  Probe
gaaggaaggcgtgtttcctggactc

SEQ ID NO: 283002 - DNA, 25 bp, Artificial
  Probe
cgtggacacccgatgcagtattctg

SEQ ID NO: 283003 - DNA, 25 bp, Artificial
  Probe
gtgaatgtccagagttacttggatc

SEQ ID NO: 283004 - DNA, 25 bp, Artificial
  Probe
ctgtatctacagtcatggtgaactg

SEQ ID NO: 283005 - DNA, 25 bp, Artificial
  Probe
gagcccactcagacgctgtgaagac

SEQ ID NO: 283006 - DNA, 25 bp, Artificial
  Probe
taccttgaaaacatggaagtcgacg

SEQ ID NO: 283007 - DNA, 25 bp, Artificial
  Probe
gtttcctggactcatccccattctg

SEQ ID NO: 283008 - DNA, 25 bp, Artificial
  Probe
actaatgactgttgccaggtggatg

SEQ ID NO: 283009 - DNA, 25 bp, Artificial
  Probe
tgagatcaactatagcctcattttg

SEQ ID NO: 283010 - DNA, 25 bp, Artificial
  Probe
tccagcaaagtggatggcagctgca

SEQ ID NO: 283011 - DNA, 25 bp, Artificial
  Probe
gacccttcagactagacatccagca

SEQ ID NO: 283012 - DNA, 25 bp, Artificial
  Probe
caccatcatcaatgggaaggaaggc

SEQ ID NO: 283013 - DNA, 25 bp, Artificial
  Probe
ataacactgtatctacagtcatggt

SEQ ID NO: 283014 - DNA, 25 bp, Artificial
  Probe
accatcctgactacaagcaagacag

SEQ ID NO: 283015 - DNA, 25 bp, Artificial
  Probe
gagtttattgcaaaccatcctgact

SEQ ID NO: 283016 - DNA, 25 bp, Artificial
  Probe
gcaaaccatcctgactacaagcaag

SEQ ID NO: 283017 - DNA, 25 bp, Artificial
  Probe
gtgactagaagcttccttcagtagg

SEQ ID NO: 283018 - DNA, 25 bp, Artificial
  Probe
atgagcatagacaccatcatcaatg

SEQ ID NO: 283019 - DNA, 25 bp, Artificial
  Probe
gaggtaaaagcgacccttcagacta

SEQ ID NO: 283020 - DNA, 25 bp, Artificial
  Probe
cagagttacttggatcaggctttag

SEQ ID NO: 283021 - DNA, 25 bp, Artificial
  Probe
gctcatgagcatagacaccatcatc

SEQ ID NO: 283022 - DNA, 25 bp, Artificial
  Probe
tggatggcagctgcagccctgaccc

SEQ ID NO: 283023 - DNA, 25 bp, Artificial
  Probe
tgaagaccaagatggcctacagtgt

SEQ ID NO: 283024 - DNA, 25 bp, Artificial
  Probe
cgatgcagtattctgaactacctga

SEQ ID NO: 283025 - DNA, 25 bp, Artificial
  Probe
aagtggatggcagctgcagccctga

SEQ ID NO: 283026 - DNA, 25 bp, Artificial
  Probe
ccgagcccactcagacgctgtgaag

SEQ ID NO: 283027 - DNA, 25 bp, Artificial
  Probe
agaactaatgactgttgccaggtgg

SEQ ID NO: 283028 - DNA, 25 bp, Artificial
  Probe
ccttcagtaggtgaatctgagtttg

SEQ ID NO: 283029 - DNA, 25 bp, Artificial
  Probe
ctgaactcctaccttgaaaacatgg

SEQ ID NO: 283030 - DNA, 25 bp, Artificial
  Probe
gagatcaactatagcctcattttga

SEQ ID NO: 283031 - DNA, 25 bp, Artificial
  Probe
cagtgttccagttgcccacaagtga

SEQ ID NO: 283032 - DNA, 25 bp, Artificial
  Probe
cccacaagtgactagaagcttcctt

SEQ ID NO: 283033 - DNA, 25 bp, Artificial
  Probe
gtattctgaactacctgaagctaat

SEQ ID NO: 283034 - DNA, 25 bp, Artificial
  Probe
accaagatggcctacagtgttccag

SEQ ID NO: 283035 - DNA, 25 bp, Artificial
  Probe
cttggatcaggctttagaaaagcga

SEQ ID NO: 283036 - DNA, 25 bp, Artificial
  Probe
ctacaagcaagacagtgtaataact

SEQ ID NO: 283037 - DNA, 25 bp, Artificial
  Probe
aaagcgacccttcagactagacatc

SEQ ID NO: 283038 - DNA, 25 bp, Artificial
  Probe
ccactcagacgctgtgaagaccaag

SEQ ID NO: 283039 - DNA, 25 bp, Artificial
  Probe
aacatggaagtcgacgtggacaccc

SEQ ID NO: 283040 - DNA, 25 bp, Artificial
  Probe
taacactgtatctacagtcatggtg

SEQ ID NO: 283041 - DNA, 25 bp, Artificial
  Probe
ctacctgaagctaattaagaagaga

SEQ ID NO: 283042 - DNA, 25 bp, Artificial
  Probe
tctgaactacctgaagctaattaag

SEQ ID NO: 283043 - DNA, 25 bp, Artificial
  Probe
gtgaagaccaagatggcctacagtg

SEQ ID NO: 283044 - DNA, 25 bp, Artificial
  Probe
cgctgtgaagaccaagatggcctac

SEQ ID NO: 283045 - DNA, 25 bp, Artificial
  Probe
ttccagttgcccacaagtgactaga

SEQ ID NO: 283046 - DNA, 25 bp, Artificial
  Probe
tcacatgaatgtcaacccacagcag

SEQ ID NO: 283047 - DNA, 25 bp, Artificial
  Probe
agacaaagcaactttagtttcaagg

SEQ ID NO: 283048 - DNA, 25 bp, Artificial
  Probe
accataactctgtaactcctgagtg

SEQ ID NO: 283049 - DNA, 25 bp, Artificial
  Probe
cagaactaaaggaccagatgacaga

SEQ ID NO: 283050 - DNA, 25 bp, Artificial
  Probe
gcccccttagggtgcagagctcaac

SEQ ID NO: 283051 - DNA, 25 bp, Artificial
  Probe
gcttgttttgtacctgggtctcgtt

SEQ ID NO: 283052 - DNA, 25 bp, Artificial
  Probe
gtttctggcccctgggcaattttgt

SEQ ID NO: 283053 - DNA, 25 bp, Artificial
  Probe
gtcttaagggagtgcgcatctttga

SEQ ID NO: 283054 - DNA, 25 bp, Artificial
  Probe
ttattgtcagcgtgggtctggctct

SEQ ID NO: 283055 - DNA, 25 bp, Artificial
  Probe
ctgagagagccacgtttgggtttta

SEQ ID NO: 283056 - DNA, 25 bp, Artificial
  Probe
taggacatcctcctcacatgaatgt

SEQ ID NO: 283057 - DNA, 25 bp, Artificial
  Probe
tttaagagagccatgttagaggctc

SEQ ID NO: 283058 - DNA, 25 bp, Artificial
  Probe
cgtattgtaattagctctgttggca

SEQ ID NO: 283059 - DNA, 25 bp, Artificial
  Probe
tggactttcgtattgtaattagctc

SEQ ID NO: 283060 - DNA, 25 bp, Artificial
  Probe
acatgaatgtcaacccacagcagcc

SEQ ID NO: 283061 - DNA, 25 bp, Artificial
  Probe
atgatgatgctgctgccaaaattat

SEQ ID NO: 283062 - DNA, 25 bp, Artificial
  Probe
ggagtgcgcatctttgaagctgatc

SEQ ID NO: 283063 - DNA, 25 bp, Artificial
  Probe
agcctaagcaaatgagacggaggga

SEQ ID NO: 283064 - DNA, 25 bp, Artificial
  Probe
ctgttgcttgttttgtacctgggtc

SEQ ID NO: 283065 - DNA, 25 bp, Artificial
  Probe
ctcagaggtttggactttcgtattg

SEQ ID NO: 283066 - DNA, 25 bp, Artificial
  Probe
gtctcgttttactagaccatctctg

SEQ ID NO: 283067 - DNA, 25 bp, Artificial
  Probe
aggactacagaaagtacctgatttg

SEQ ID NO: 283068 - DNA, 25 bp, Artificial
  Probe
tcagcgtgggtctggctcttggttc

SEQ ID NO: 283069 - DNA, 25 bp, Artificial
  Probe
gattgcaattctcagaggtttggac

SEQ ID NO: 283070 - DNA, 25 bp, Artificial
  Probe
tccatataaggcaaagtaggagctg

SEQ ID NO: 283071 - DNA, 25 bp, Artificial
  Probe
ggcaattttgtaccttgtaattatc

SEQ ID NO: 283072 - DNA, 25 bp, Artificial
  Probe
ccaacatgatgcagtaggtgagaag

SEQ ID NO: 283073 - DNA, 25 bp, Artificial
  Probe
ctaggacatcctcctcacatgaatg

SEQ ID NO: 283074 - DNA, 25 bp, Artificial
  Probe
actttcgtattgtaattagctctgt

SEQ ID NO: 283075 - DNA, 25 bp, Artificial
  Probe
ccctctaaggttacatgtgcgctta

SEQ ID NO: 283076 - DNA, 25 bp, Artificial
  Probe
aaccaacatgatgcagtaggtgaga

SEQ ID NO: 283077 - DNA, 25 bp, Artificial
  Probe
tattaatagcaagtttctggcccct

SEQ ID NO: 283078 - DNA, 25 bp, Artificial
  Probe
ccgtaagcagagttctgaagcaagt

SEQ ID NO: 283079 - DNA, 25 bp, Artificial
  Probe
gtccccttaggatgcatagctgccc

SEQ ID NO: 283080 - DNA, 25 bp, Artificial
  Probe
gtgacttgtcactcctgccaaaaat

SEQ ID NO: 283081 - DNA, 25 bp, Artificial
  Probe
tatacatccatataaggcaaagtag

SEQ ID NO: 283082 - DNA, 25 bp, Artificial
  Probe
ctttgaagctgatctgttaatactt

SEQ ID NO: 283083 - DNA, 25 bp, Artificial
  Probe
agaattggccttctaggacatcctc

SEQ ID NO: 283084 - DNA, 25 bp, Artificial
  Probe
ggtctgtgaaccattcaaacaacat

SEQ ID NO: 283085 - DNA, 25 bp, Artificial
  Probe
agaggctcacacgttagcttgaaag

SEQ ID NO: 283086 - DNA, 25 bp, Artificial
  Probe
cagcagccagcctaagcaaatgaga

SEQ ID NO: 283087 - DNA, 25 bp, Artificial
  Probe
caaagtaggagctgtccccttagga

SEQ ID NO: 283088 - DNA, 25 bp, Artificial
  Probe
aaatgatgatgctgctgccaaaatt

SEQ ID NO: 283089 - DNA, 25 bp, Artificial
  Probe
gcacttgaaccagattatagattta

SEQ ID NO: 283090 - DNA, 25 bp, Artificial
  Probe
caaatgagacggagggactgtactc

SEQ ID NO: 283091 - DNA, 25 bp, Artificial
  Probe
ttggccttctaggacatcctcctca

SEQ ID NO: 283092 - DNA, 25 bp, Artificial
  Probe
agactatcctatggaaagctatact

SEQ ID NO: 283093 - DNA, 25 bp, Artificial
  Probe
ttcattcaacacaactcccacattt

SEQ ID NO: 283094 - DNA, 25 bp, Artificial
  Probe
ctctggtttaatatctgatgatttt

SEQ ID NO: 283095 - DNA, 25 bp, Artificial
  Probe
caactcccacatttctttcaggaac

SEQ ID NO: 283096 - DNA, 25 bp, Artificial
  Probe
gatgattttcctagatgagaaatta

SEQ ID NO: 283097 - DNA, 25 bp, Artificial
  Probe
gattttcctagatgagaaattacaa

SEQ ID NO: 283098 - DNA, 25 bp, Artificial
  Probe
cacaactcccacatttctttcagga

SEQ ID NO: 283099 - DNA, 25 bp, Artificial
  Probe
atgattttcctagatgagaaattac

SEQ ID NO: 283100 - DNA, 25 bp, Artificial
  Probe
catttctttcaggaacaacattgcc

SEQ ID NO: 283101 - DNA, 25 bp, Artificial
  Probe
aaagactatcctatggaaagctata

SEQ ID NO: 283102 - DNA, 25 bp, Artificial
  Probe
tatctgatgattttcctagatgaga

SEQ ID NO: 283103 - DNA, 25 bp, Artificial
  Probe
tctgatgattttcctagatgagaaa

SEQ ID NO: 283104 - DNA, 25 bp, Artificial
  Probe
tcccacatttctttcaggaacaaca

SEQ ID NO: 283105 - DNA, 25 bp, Artificial
  Probe
agatgaacttcattcaacacaactc

SEQ ID NO: 283106 - DNA, 25 bp, Artificial
  Probe
tgatgattttcctagatgagaaatt

SEQ ID NO: 283107 - DNA, 25 bp, Artificial
  Probe
tgattttcctagatgagaaattaca

SEQ ID NO: 283108 - DNA, 25 bp, Artificial
  Probe
tctttcaggaacaacattgccaaac

SEQ ID NO: 283109 - DNA, 25 bp, Artificial
  Probe
cttcattcaacacaactcccacatt

SEQ ID NO: 283110 - DNA, 25 bp, Artificial
  Probe
aactcccacatttctttcaggaaca

SEQ ID NO: 283111 - DNA, 25 bp, Artificial
  Probe
cattcaacacaactcccacatttct

SEQ ID NO: 283112 - DNA, 25 bp, Artificial
  Probe
aaaaagactatcctatggaaagcta

SEQ ID NO: 283113 - DNA, 25 bp, Artificial
  Probe
gagtaagtctctggtttaatatctg

SEQ ID NO: 283114 - DNA, 25 bp, Artificial
  Probe
aatatctgatgattttcctagatga

SEQ ID NO: 283115 - DNA, 25 bp, Artificial
  Probe
gagatgaacttcattcaacacaact

SEQ ID NO: 283116 - DNA, 25 bp, Artificial
  Probe
aagactatcctatggaaagctatac

SEQ ID NO: 283117 - DNA, 25 bp, Artificial
  Probe
acttcattcaacacaactcccacat

SEQ ID NO: 283118 - DNA, 25 bp, Artificial
  Probe
ttttcctagatgagaaattacaaag

SEQ ID NO: 283119 - DNA, 25 bp, Artificial
  Probe
actcccacatttctttcaggaacaa

SEQ ID NO: 283120 - DNA, 25 bp, Artificial
  Probe
taatatctgatgattttcctagatg

SEQ ID NO: 283121 - DNA, 25 bp, Artificial
  Probe
aaaaaagactatcctatggaaagct

SEQ ID NO: 283122 - DNA, 25 bp, Artificial
  Probe
agtaagtctctggtttaatatctga

SEQ ID NO: 283123 - DNA, 25 bp, Artificial
  Probe
ctttcaggaacaacattgccaaacg

SEQ ID NO: 283124 - DNA, 25 bp, Artificial
  Probe
gaaaaaaagactatcctatggaaag

SEQ ID NO: 283125 - DNA, 25 bp, Artificial
  Probe
actatcctatggaaagctatactaa

SEQ ID NO: 283126 - DNA, 25 bp, Artificial
  Probe
ctgatgattttcctagatgagaaat

SEQ ID NO: 283127 - DNA, 25 bp, Artificial
  Probe
ccacatttctttcaggaacaacatt

SEQ ID NO: 283128 - DNA, 25 bp, Artificial
  Probe
agagtaagtctctggtttaatatct

SEQ ID NO: 283129 - DNA, 25 bp, Artificial
  Probe
atgaacttcattcaacacaactccc

SEQ ID NO: 283130 - DNA, 25 bp, Artificial
  Probe
agtctctggtttaatatctgatgat

SEQ ID NO: 283131 - DNA, 25 bp, Artificial
  Probe
cacatttctttcaggaacaacattg

SEQ ID NO: 283132 - DNA, 25 bp, Artificial
  Probe
gaacttcattcaacacaactcccac

SEQ ID NO: 283133 - DNA, 25 bp, Artificial
  Probe
cccacatttctttcaggaacaacat

SEQ ID NO: 283134 - DNA, 25 bp, Artificial
  Probe
tctctggtttaatatctgatgattt

SEQ ID NO: 283135 - DNA, 25 bp, Artificial
  Probe
taagtctctggtttaatatctgatg

SEQ ID NO: 283136 - DNA, 25 bp, Artificial
  Probe
ctatcctatggaaagctatactaaa

SEQ ID NO: 283137 - DNA, 25 bp, Artificial
  Probe
gactatcctatggaaagctatacta

SEQ ID NO: 283138 - DNA, 25 bp, Artificial
  Probe
acacggaggagaacgccagatcatt

SEQ ID NO: 283139 - DNA, 25 bp, Artificial
  Probe
aaacgaagacaaacgccattcacag

SEQ ID NO: 283140 - DNA, 25 bp, Artificial
  Probe
gacaaacgccattcacagggcacat

SEQ ID NO: 283141 - DNA, 25 bp, Artificial
  Probe
ctcaagacacggaggagaacgccag

SEQ ID NO: 283142 - DNA, 25 bp, Artificial
  Probe
gcccctcaagacacggaggagaacg

SEQ ID NO: 283143 - DNA, 25 bp, Artificial
  Probe
tctctgatgagatgaacacgattct

SEQ ID NO: 283144 - DNA, 25 bp, Artificial
  Probe
cagggcacattcaccagtgactaca

SEQ ID NO: 283145 - DNA, 25 bp, Artificial
  Probe
aaggcagctggcagcatgcccctca

SEQ ID NO: 283146 - DNA, 25 bp, Artificial
  Probe
gtacaaggcagctggcagcatgccc

SEQ ID NO: 283147 - DNA, 25 bp, Artificial
  Probe
acaccaagaggaaccggaacaacat

SEQ ID NO: 283148 - DNA, 25 bp, Artificial
  Probe
gattcaaaccaagatcactgacaag

SEQ ID NO: 283149 - DNA, 25 bp, Artificial
  Probe
cttctctgatgagatgaacacgatt

SEQ ID NO: 283150 - DNA, 25 bp, Artificial
  Probe
ctggtacaaggcagctggcagcatg

SEQ ID NO: 283151 - DNA, 25 bp, Artificial
  Probe
tgaacaccaagaggaaccggaacaa

SEQ ID NO: 283152 - DNA, 25 bp, Artificial
  Probe
ttgtgcagtggttgatgaacaccaa

SEQ ID NO: 283153 - DNA, 25 bp, Artificial
  Probe
cagcttcccagacagaaccacttga

SEQ ID NO: 283154 - DNA, 25 bp, Artificial
  Probe
ggttgatgaacaccaagaggaaccg

SEQ ID NO: 283155 - DNA, 25 bp, Artificial
  Probe
gctgattcaaaccaagatcactgac

SEQ ID NO: 283156 - DNA, 25 bp, Artificial
  Probe
tgctgatggatccttctctgatgag

SEQ ID NO: 283157 - DNA, 25 bp, Artificial
  Probe
ttttgtgcagtggttgatgaacacc

SEQ ID NO: 283158 - DNA, 25 bp, Artificial
  Probe
caaacgccattcacagggcacattc

SEQ ID NO: 283159 - DNA, 25 bp, Artificial
  Probe
aggagaacgccagatcattcccagc

SEQ ID NO: 283160 - DNA, 25 bp, Artificial
  Probe
gaacacgattctcgataaccttgcc

SEQ ID NO: 283161 - DNA, 25 bp, Artificial
  Probe
cattcacagggcacattcaccagtg

SEQ ID NO: 283162 - DNA, 25 bp, Artificial
  Probe
gcagctggcagcatgcccctcaaga

SEQ ID NO: 283163 - DNA, 25 bp, Artificial
  Probe
gccgtgctcaagattttgtgcagtg

SEQ ID NO: 283164 - DNA, 25 bp, Artificial
  Probe
cgtgctcaagattttgtgcagtggt

SEQ ID NO: 283165 - DNA, 25 bp, Artificial
  Probe
aagacaaacgccattcacagggcac

SEQ ID NO: 283166 - DNA, 25 bp, Artificial
  Probe
agatcattcccagcttcccagacag

SEQ ID NO: 283167 - DNA, 25 bp, Artificial
  Probe
atgaacaccaagaggaaccggaaca

SEQ ID NO: 283168 - DNA, 25 bp, Artificial
  Probe
tcccgccgtgctcaagattttgtgc

SEQ ID NO: 283169 - DNA, 25 bp, Artificial
  Probe
ccagacagaaccacttgaagaccct

SEQ ID NO: 283170 - DNA, 25 bp, Artificial
  Probe
aatgctggtacaaggcagctggcag

SEQ ID NO: 283171 - DNA, 25 bp, Artificial
  Probe
aacgccattcacagggcacattcac

SEQ ID NO: 283172 - DNA, 25 bp, Artificial
  Probe
ggaaccggaacaacattgccaaacg

SEQ ID NO: 283173 - DNA, 25 bp, Artificial
  Probe
ccgtttacatcgtggctggattgtt

SEQ ID NO: 283174 - DNA, 25 bp, Artificial
  Probe
tgagatgaacacgattctcgataac

SEQ ID NO: 283175 - DNA, 25 bp, Artificial
  Probe
tcaagacacggaggagaacgccaga

SEQ ID NO: 283176 - DNA, 25 bp, Artificial
  Probe
gcacattcaccagtgactacagcaa

SEQ ID NO: 283177 - DNA, 25 bp, Artificial
  Probe
gcatgcccctcaagacacggaggag

SEQ ID NO: 283178 - DNA, 25 bp, Artificial
  Probe
agaacgccagatcattcccagcttc

SEQ ID NO: 283179 - DNA, 25 bp, Artificial
  Probe
tcaactggctgattcaaaccaagat

SEQ ID NO: 283180 - DNA, 25 bp, Artificial
  Probe
tcccagacagaaccacttgaagacc

SEQ ID NO: 283181 - DNA, 25 bp, Artificial
  Probe
gtttgtaatgctggtacaaggcagc

SEQ ID NO: 283182 - DNA, 25 bp, Artificial
  Probe
atggatccttctctgatgagatgaa

SEQ ID NO: 283183 - DNA, 25 bp, Artificial
  Probe
tgatgaacaccaagaggaaccggaa

SEQ ID NO: 283184 - DNA, 25 bp, Artificial
  Probe
tctgttgctttcagggaagatgaga

SEQ ID NO: 283185 - DNA, 25 bp, Artificial
  Probe
gttgagtttcctttggtctctgttg

SEQ ID NO: 283186 - DNA, 25 bp, Artificial
  Probe
tctctgttgctttcagggaagatga

SEQ ID NO: 283187 - DNA, 25 bp, Artificial
  Probe
cccgttgagtttcctttggtctctg

SEQ ID NO: 283188 - DNA, 25 bp, Artificial
  Probe
tcctttggtctctgttgctttcagg

SEQ ID NO: 283189 - DNA, 25 bp, Artificial
  Probe
cctttggtctctgttgctttcaggg

SEQ ID NO: 283190 - DNA, 25 bp, Artificial
  Probe
acccgcctcctcggtaggaagcatg

SEQ ID NO: 283191 - DNA, 25 bp, Artificial
  Probe
gagtttcctttggtctctgttgctt

SEQ ID NO: 283192 - DNA, 25 bp, Artificial
  Probe
ctttggtctctgttgctttcaggga

SEQ ID NO: 283193 - DNA, 25 bp, Artificial
  Probe
cctcctcggtaggaagcatgtggga

SEQ ID NO: 283194 - DNA, 25 bp, Artificial
  Probe
ccgttgagtttcctttggtctctgt

SEQ ID NO: 283195 - DNA, 25 bp, Artificial
  Probe
ccgcctcctcggtaggaagcatgtg

SEQ ID NO: 283196 - DNA, 25 bp, Artificial
  Probe
agtttcctttggtctctgttgcttt

SEQ ID NO: 283197 - DNA, 25 bp, Artificial
  Probe
tggtctctgttgctttcagggaaga

SEQ ID NO: 283198 - DNA, 25 bp, Artificial
  Probe
ttggtctctgttgctttcagggaag

SEQ ID NO: 283199 - DNA, 25 bp, Artificial
  Probe
ggtctctgttgctttcagggaagat

SEQ ID NO: 283200 - DNA, 25 bp, Artificial
  Probe
gtttcctttggtctctgttgctttc

SEQ ID NO: 283201 - DNA, 25 bp, Artificial
  Probe
gcctcctcggtaggaagcatgtggg

SEQ ID NO: 283202 - DNA, 25 bp, Artificial
  Probe
tgttgctttcagggaagatgagagg

SEQ ID NO: 283203 - DNA, 25 bp, Artificial
  Probe
tttcctttggtctctgttgctttca

SEQ ID NO: 283204 - DNA, 25 bp, Artificial
  Probe
cgttgagtttcctttggtctctgtt

SEQ ID NO: 283205 - DNA, 25 bp, Artificial
  Probe
tgagtttcctttggtctctgttgct

SEQ ID NO: 283206 - DNA, 25 bp, Artificial
  Probe
gtctctgttgctttcagggaagatg

SEQ ID NO: 283207 - DNA, 25 bp, Artificial
  Probe
ttcctttggtctctgttgctttcag

SEQ ID NO: 283208 - DNA, 25 bp, Artificial
  Probe
cgcctcctcggtaggaagcatgtgg

SEQ ID NO: 283209 - DNA, 25 bp, Artificial
  Probe
ttgagtttcctttggtctctgttgc

SEQ ID NO: 283210 - DNA, 25 bp, Artificial
  Probe
ctgttgctttcagggaagatgagag

SEQ ID NO: 283211 - DNA, 25 bp, Artificial
  Probe
cccgcctcctcggtaggaagcatgt

SEQ ID NO: 283212 - DNA, 25 bp, Artificial
  Probe
ctctgttgctttcagggaagatgag

SEQ ID NO: 283213 - DNA, 25 bp, Artificial
  Probe
ctggtcctgggaatttcccactctg

SEQ ID NO: 283214 - DNA, 25 bp, Artificial
  Probe
ccaacatgttttctgtgaaaacgga

SEQ ID NO: 283215 - DNA, 25 bp, Artificial
  Probe
ggagctaaactaccagctatcccca

SEQ ID NO: 283216 - DNA, 25 bp, Artificial
  Probe
gagcctaagcctaattacctttgcc

SEQ ID NO: 283217 - DNA, 25 bp, Artificial
  Probe
tcgccctacgggtcattgagagaaa

SEQ ID NO: 283218 - DNA, 25 bp, Artificial
  Probe
ccaggctgtcgctacatcactgaac

SEQ ID NO: 283219 - DNA, 25 bp, Artificial
  Probe
gatttggtgaccaggctgtcgctac

SEQ ID NO: 283220 - DNA, 25 bp, Artificial
  Probe
ttttctgtgaaaacggagctaaact

SEQ ID NO: 283221 - DNA, 25 bp, Artificial
  Probe
ctgggaattccaaatacctgctgga

SEQ ID NO: 283222 - DNA, 25 bp, Artificial
  Probe
ttgggaagctgtcttcaggccaaca

SEQ ID NO: 283223 - DNA, 25 bp, Artificial
  Probe
cctacgggtcattgagagaaataaa

SEQ ID NO: 283224 - DNA, 25 bp, Artificial
  Probe
ccgtgactgtaatcgccctacgggt

SEQ ID NO: 283225 - DNA, 25 bp, Artificial
  Probe
actctgggaattccaaatacctgct

SEQ ID NO: 283226 - DNA, 25 bp, Artificial
  Probe
ctgtaatcgccctacgggtcattga

SEQ ID NO: 283227 - DNA, 25 bp, Artificial
  Probe
tcgtctctctgcagcctcctaaagt

SEQ ID NO: 283228 - DNA, 25 bp, Artificial
  Probe
tgcccctggtcctgggaatttccca

SEQ ID NO: 283229 - DNA, 25 bp, Artificial
  Probe
gtcctgggaatttcccactctggga

SEQ ID NO: 283230 - DNA, 25 bp, Artificial
  Probe
aacaggagcctaagcctaattacct

SEQ ID NO: 283231 - DNA, 25 bp, Artificial
  Probe
tctgcgtctgtcgtctctctgcagc

SEQ ID NO: 283232 - DNA, 25 bp, Artificial
  Probe
gtcgctacatcactgaacctctgct

SEQ ID NO: 283233 - DNA, 25 bp, Artificial
  Probe
ataatgctgatttggtgaccaggct

SEQ ID NO: 283234 - DNA, 25 bp, Artificial
  Probe
gaacaaaaggcagtccacaacccta

SEQ ID NO: 283235 - DNA, 25 bp, Artificial
  Probe
taagcctaattacctttgcccctgg

SEQ ID NO: 283236 - DNA, 25 bp, Artificial
  Probe
tgtaatcgccctacgggtcattgag

SEQ ID NO: 283237 - DNA, 25 bp, Artificial
  Probe
ttcaggccaacatgttttctgtgaa

SEQ ID NO: 283238 - DNA, 25 bp, Artificial
  Probe
tgaagtctgcgtctgtcgtctctct

SEQ ID NO: 283239 - DNA, 25 bp, Artificial
  Probe
tccccggaaacaggagcctaagcct

SEQ ID NO: 283240 - DNA, 25 bp, Artificial
  Probe
acggagctaaactaccagctatccc

SEQ ID NO: 283241 - DNA, 25 bp, Artificial
  Probe
tacctttgcccctggtcctgggaat

SEQ ID NO: 283242 - DNA, 25 bp, Artificial
  Probe
gaaacaggagcctaagcctaattac

SEQ ID NO: 283243 - DNA, 25 bp, Artificial
  Probe
gaagctgtcttcaggccaacatgtt

SEQ ID NO: 283244 - DNA, 25 bp, Artificial
  Probe
tctccccggaaacaggagcctaagc

SEQ ID NO: 283245 - DNA, 25 bp, Artificial
  Probe
tgtcgtctctctgcagcctcctaaa

SEQ ID NO: 283246 - DNA, 25 bp, Artificial
  Probe
gtgaccaggctgtcgctacatcact

SEQ ID NO: 283247 - DNA, 25 bp, Artificial
  Probe
agcgttgggaagctgtcttcaggcc

SEQ ID NO: 283248 - DNA, 25 bp, Artificial
  Probe
ccactctgggaattccaaatacctg

SEQ ID NO: 283249 - DNA, 25 bp, Artificial
  Probe
tggtgaccaggctgtcgctacatca

SEQ ID NO: 283250 - DNA, 25 bp, Artificial
  Probe
aacatgttttctgtgaaaacggagc

SEQ ID NO: 283251 - DNA, 25 bp, Artificial
  Probe
catgttttctgtgaaaacggagcta

SEQ ID NO: 283252 - DNA, 25 bp, Artificial
  Probe
caggccaacatgttttctgtgaaaa

SEQ ID NO: 283253 - DNA, 25 bp, Artificial
  Probe
ccacgggagccgtgactgtaatcgc

SEQ ID NO: 283254 - DNA, 25 bp, Artificial
  Probe
ggagcctaagcctaattacctttgc

SEQ ID NO: 283255 - DNA, 25 bp, Artificial
  Probe
tgtcttcaggccaacatgttttctg

SEQ ID NO: 283256 - DNA, 25 bp, Artificial
  Probe
aaacggagctaaactaccagctatc

SEQ ID NO: 283257 - DNA, 25 bp, Artificial
  Probe
tgcgtctgtcgtctctctgcagcct

SEQ ID NO: 283258 - DNA, 25 bp, Artificial
  Probe
cgttgggaagctgtcttcaggccaa

SEQ ID NO: 283259 - DNA, 25 bp, Artificial
  Probe
gtaacccagtgcagcgcatctcggc

SEQ ID NO: 283260 - DNA, 25 bp, Artificial
  Probe
tctcggcagaggaggccttgcagca

SEQ ID NO: 283261 - DNA, 25 bp, Artificial
  Probe
accggatgtcctctttggggccaag

SEQ ID NO: 283262 - DNA, 25 bp, Artificial
  Probe
ggaggccttgcagcacccctatttc

SEQ ID NO: 283263 - DNA, 25 bp, Artificial
  Probe
catctcggcagaggaggccttgcag

SEQ ID NO: 283264 - DNA, 25 bp, Artificial
  Probe
gaggccttgcagcacccctatttct

SEQ ID NO: 283265 - DNA, 25 bp, Artificial
  Probe
gcccaccggatgtcctctttggggc

SEQ ID NO: 283266 - DNA, 25 bp, Artificial
  Probe
cggatgtcctctttggggccaagct

SEQ ID NO: 283267 - DNA, 25 bp, Artificial
  Probe
tctttggggccaagctgtactccac

SEQ ID NO: 283268 - DNA, 25 bp, Artificial
  Probe
aagtgtaacccagtgcagcgcatct

SEQ ID NO: 283269 - DNA, 25 bp, Artificial
  Probe
cagaggaggccttgcagcaccccta

SEQ ID NO: 283270 - DNA, 25 bp, Artificial
  Probe
cagtgcagcgcatctcggcagagga

SEQ ID NO: 283271 - DNA, 25 bp, Artificial
  Probe
ccggatgtcctctttggggccaagc

SEQ ID NO: 283272 - DNA, 25 bp, Artificial
  Probe
ggatgtcctctttggggccaagctg

SEQ ID NO: 283273 - DNA, 25 bp, Artificial
  Probe
aggaggccttgcagcacccctattt

SEQ ID NO: 283274 - DNA, 25 bp, Artificial
  Probe
gaagtgtaacccagtgcagcgcatc

SEQ ID NO: 283275 - DNA, 25 bp, Artificial
  Probe
ctctttggggccaagctgtactcca

SEQ ID NO: 283276 - DNA, 25 bp, Artificial
  Probe
gggcctgacctatttaagcctccct

SEQ ID NO: 283277 - DNA, 25 bp, Artificial
  Probe
gcccaaactcaatgccacggggaga

SEQ ID NO: 283278 - DNA, 25 bp, Artificial
  Probe
cgcatctcggcagaggaggccttgc

SEQ ID NO: 283279 - DNA, 25 bp, Artificial
  Probe
ggatgaccagctgaagaggatcttt

SEQ ID NO: 283280 - DNA, 25 bp, Artificial
  Probe
tggggcctgacctatttaagcctcc

SEQ ID NO: 283281 - DNA, 25 bp, Artificial
  Probe
gcatctcggcagaggaggccttgca

SEQ ID NO: 283282 - DNA, 25 bp, Artificial
  Probe
tgtaacccagtgcagcgcatctcgg

SEQ ID NO: 283283 - DNA, 25 bp, Artificial
  Probe
ccaccggatgtcctctttggggcca

SEQ ID NO: 283284 - DNA, 25 bp, Artificial
  Probe
ccagtgcagcgcatctcggcagagg

SEQ ID NO: 283285 - DNA, 25 bp, Artificial
  Probe
caccggatgtcctctttggggccaa

SEQ ID NO: 283286 - DNA, 25 bp, Artificial
  Probe
ctttggggccaagctgtactccacg

SEQ ID NO: 283287 - DNA, 25 bp, Artificial
  Probe
agtgtaacccagtgcagcgcatctc

SEQ ID NO: 283288 - DNA, 25 bp, Artificial
  Probe
atctcggcagaggaggccttgcagc

SEQ ID NO: 283289 - DNA, 25 bp, Artificial
  Probe
gtgtaacccagtgcagcgcatctcg

SEQ ID NO: 283290 - DNA, 25 bp, Artificial
  Probe
gatgaccagctgaagaggatctttc

SEQ ID NO: 283291 - DNA, 25 bp, Artificial
  Probe
acagaagagcatttttccagcgaac

SEQ ID NO: 283292 - DNA, 25 bp, Artificial
  Probe
ccaaatactttgttagaagacagaa

SEQ ID NO: 283293 - DNA, 25 bp, Artificial
  Probe
tttttgtcatccagcgaggcttaca

SEQ ID NO: 283294 - DNA, 25 bp, Artificial
  Probe
atcaacccattgtcttgactgtatg

SEQ ID NO: 283295 - DNA, 25 bp, Artificial
  Probe
aagacatttaacagagctgtattca

SEQ ID NO: 283296 - DNA, 25 bp, Artificial
  Probe
ccagcgaggcttacagaattttctg

SEQ ID NO: 283297 - DNA, 25 bp, Artificial
  Probe
gacactggcttgtgaagcttttttg

SEQ ID NO: 283298 - DNA, 25 bp, Artificial
  Probe
cctgcttatctgataatgaggctgc

SEQ ID NO: 283299 - DNA, 25 bp, Artificial
  Probe
ttaaacacgggctcagtcaaattga

SEQ ID NO: 283300 - DNA, 25 bp, Artificial
  Probe
gagcatttttccagcgaacaaacta

SEQ ID NO: 283301 - DNA, 25 bp, Artificial
  Probe
acatgtatagcacatatttgcatga

SEQ ID NO: 283302 - DNA, 25 bp, Artificial
  Probe
aagacatgggtcctcaaaactgtgt

SEQ ID NO: 283303 - DNA, 25 bp, Artificial
  Probe
ttgaagtcaatttccgaaacaagta

SEQ ID NO: 283304 - DNA, 25 bp, Artificial
  Probe
acattttcctgtatgctttactggt

SEQ ID NO: 283305 - DNA, 25 bp, Artificial
  Probe
tgtcatccagcgaggcttacagaat

SEQ ID NO: 283306 - DNA, 25 bp, Artificial
  Probe
gacgtaaagtctctttctactaatg

SEQ ID NO: 283307 - DNA, 25 bp, Artificial
  Probe
cctgatcaagagtctaagtttcata

SEQ ID NO: 283308 - DNA, 25 bp, Artificial
  Probe
ggctcagtcaaattgacaagctaac

SEQ ID NO: 283309 - DNA, 25 bp, Artificial
  Probe
cattgggctctttaataagcatata

SEQ ID NO: 283310 - DNA, 25 bp, Artificial
  Probe
ggctgcctgaaattttgtggtaatc

SEQ ID NO: 283311 - DNA, 25 bp, Artificial
  Probe
ttatctgataatgaggctgcctgaa

SEQ ID NO: 283312 - DNA, 25 bp, Artificial
  Probe
atccagcgaggcttacagaattttc

SEQ ID NO: 283313 - DNA, 25 bp, Artificial
  Probe
taattctcctgatcaagagtctaag

SEQ ID NO: 283314 - DNA, 25 bp, Artificial
  Probe
gtcctcaaaactgtgtaccagttca

SEQ ID NO: 283315 - DNA, 25 bp, Artificial
  Probe
attgacaagctaacatctgacactg

SEQ ID NO: 283316 - DNA, 25 bp, Artificial
  Probe
gtctctttctactaatgctttgaag

SEQ ID NO: 283317 - DNA, 25 bp, Artificial
  Probe
ttatgaacctgcttatctgataatg

SEQ ID NO: 283318 - DNA, 25 bp, Artificial
  Probe
gtgtaccagttcattaattctcctg

SEQ ID NO: 283319 - DNA, 25 bp, Artificial
  Probe
atttgatacatttaaacacgggctc

SEQ ID NO: 283320 - DNA, 25 bp, Artificial
  Probe
tattcattgggctctttaataagca

SEQ ID NO: 283321 - DNA, 25 bp, Artificial
  Probe
agctgtattcattgggctctttaat

SEQ ID NO: 283322 - DNA, 25 bp, Artificial
  Probe
actaatgctttgaagtcaatttccg

SEQ ID NO: 283323 - DNA, 25 bp, Artificial
  Probe
cggatcccatcaacccattgtcttg

SEQ ID NO: 283324 - DNA, 25 bp, Artificial
  Probe
tacatgtatagcacatatttgcatg

SEQ ID NO: 283325 - DNA, 25 bp, Artificial
  Probe
gttcattaattctcctgatcaagag

SEQ ID NO: 283326 - DNA, 25 bp, Artificial
  Probe
gctttgaagtcaatttccgaaacaa

SEQ ID NO: 283327 - DNA, 25 bp, Artificial
  Probe
ctaatgctttgaagtcaatttccga

SEQ ID NO: 283328 - DNA, 25 bp, Artificial
  Probe
tgtggtaatctcaaacatttgatac

SEQ ID NO: 283329 - DNA, 25 bp, Artificial
  Probe
tgcctgaaattttgtggtaatctca

SEQ ID NO: 283330 - DNA, 25 bp, Artificial
  Probe
actggtttcttgtttgtgcgcatta

SEQ ID NO: 283331 - DNA, 25 bp, Artificial
  Probe
aacattttcctgtatgctttactgg

SEQ ID NO: 283332 - DNA, 25 bp, Artificial
  Probe
atacatttaaacacgggctcagtca

SEQ ID NO: 283333 - DNA, 25 bp, Artificial
  Probe
taccaaatactttgttagaagacag

SEQ ID NO: 283334 - DNA, 25 bp, Artificial
  Probe
gtgcaacccattatgaacctgctta

SEQ ID NO: 283335 - DNA, 25 bp, Artificial
  Probe
tatgtgcaacccattatgaacctgc

SEQ ID NO: 283336 - DNA, 25 bp, Artificial
  Probe
gtttcttgtttgtgcgcattaaagc

SEQ ID NO: 283337 - DNA, 25 bp, Artificial
  Probe
tcactttggtcacattgataggtac

SEQ ID NO: 283338 - DNA, 25 bp, Artificial
  Probe
tgtgggcacccgtgtataaaggaaa

SEQ ID NO: 283339 - DNA, 25 bp, Artificial
  Probe
tggatcactttggtcacattgatag

SEQ ID NO: 283340 - DNA, 25 bp, Artificial
  Probe
actatgctgtgttttgacatcacga

SEQ ID NO: 283341 - DNA, 25 bp, Artificial
  Probe
cactgtttaacttgggaggacagct

SEQ ID NO: 283342 - DNA, 25 bp, Artificial
  Probe
ttttactgacgctgttgatggacta

SEQ ID NO: 283343 - DNA, 25 bp, Artificial
  Probe
aacattgtgttctgtggatcacttt

SEQ ID NO: 283344 - DNA, 25 bp, Artificial
  Probe
tcacgattcttgtatggggaatgtc

SEQ ID NO: 283345 - DNA, 25 bp, Artificial
  Probe
gacgctgttgatggactatgctgtg

SEQ ID NO: 283346 - DNA, 25 bp, Artificial
  Probe
cctcaaagcctgtgggcacccgtgt

SEQ ID NO: 283347 - DNA, 25 bp, Artificial
  Probe
gcacccgtgtataaaggaaagtcct

SEQ ID NO: 283348 - DNA, 25 bp, Artificial
  Probe
gtccttgggatgtgttctcctatgt

SEQ ID NO: 283349 - DNA, 25 bp, Artificial
  Probe
atggactatgctgtgttttgacatc

SEQ ID NO: 283350 - DNA, 25 bp, Artificial
  Probe
aggaagtgttctcctcaaagcctgt

SEQ ID NO: 283351 - DNA, 25 bp, Artificial
  Probe
accacacttttactgacgctgttga

SEQ ID NO: 283352 - DNA, 25 bp, Artificial
  Probe
ccttgggatgtgttctcctatgtcc

SEQ ID NO: 283353 - DNA, 25 bp, Artificial
  Probe
aaggaagtgttctcctcaaagcctg

SEQ ID NO: 283354 - DNA, 25 bp, Artificial
  Probe
tcacattgataggtaccactgttta

SEQ ID NO: 283355 - DNA, 25 bp, Artificial
  Probe
aaagtccttgggatgtgttctccta

SEQ ID NO: 283356 - DNA, 25 bp, Artificial
  Probe
aagtccttgggatgtgttctcctat

SEQ ID NO: 283357 - DNA, 25 bp, Artificial
  Probe
acattgataggtaccactgtttaac

SEQ ID NO: 283358 - DNA, 25 bp, Artificial
  Probe
gaaacattgtgttctgtggatcact

SEQ ID NO: 283359 - DNA, 25 bp, Artificial
  Probe
ctgtggatcactttggtcacattga

SEQ ID NO: 283360 - DNA, 25 bp, Artificial
  Probe
tgttctcctcaaagcctgtgggcac

SEQ ID NO: 283361 - DNA, 25 bp, Artificial
  Probe
cacacttttactgacgctgttgatg

SEQ ID NO: 283362 - DNA, 25 bp, Artificial
  Probe
taccactgtttaacttgggaggaca

SEQ ID NO: 283363 - DNA, 25 bp, Artificial
  Probe
ggaagtgttctcctcaaagcctgtg

SEQ ID NO: 283364 - DNA, 25 bp, Artificial
  Probe
ttactgacgctgttgatggactatg

SEQ ID NO: 283365 - DNA, 25 bp, Artificial
  Probe
ggatgtgttctcctatgtcccctct

SEQ ID NO: 283366 - DNA, 25 bp, Artificial
  Probe
aagcctgtgggcacccgtgtataaa

SEQ ID NO: 283367 - DNA, 25 bp, Artificial
  Probe
taggtaccactgtttaacttgggag

SEQ ID NO: 283368 - DNA, 25 bp, Artificial
  Probe
gataggtaccactgtttaacttggg

SEQ ID NO: 283369 - DNA, 25 bp, Artificial
  Probe
cattgtgttctgtggatcactttgg

SEQ ID NO: 283370 - DNA, 25 bp, Artificial
  Probe
ttggtcacattgataggtaccactg

SEQ ID NO: 283371 - DNA, 25 bp, Artificial
  Probe
acattgtgttctgtggatcactttg

SEQ ID NO: 283372 - DNA, 25 bp, Artificial
  Probe
cgctgttgatggactatgctgtgtt

SEQ ID NO: 283373 - DNA, 25 bp, Artificial
  Probe
gttttgacatcacgattcttgtatg

SEQ ID NO: 283374 - DNA, 25 bp, Artificial
  Probe
ttgtgttctgtggatcactttggtc

SEQ ID NO: 283375 - DNA, 25 bp, Artificial
  Probe
aaccacacttttactgacgctgttg

SEQ ID NO: 283376 - DNA, 25 bp, Artificial
  Probe
gtgttctcctcaaagcctgtgggca

SEQ ID NO: 283377 - DNA, 25 bp, Artificial
  Probe
catcacgattcttgtatggggaatg

SEQ ID NO: 283378 - DNA, 25 bp, Artificial
  Probe
gatcactttggtcacattgataggt

SEQ ID NO: 283379 - DNA, 25 bp, Artificial
  Probe
gtgttttgacatcacgattcttgta

SEQ ID NO: 283380 - DNA, 25 bp, Artificial
  Probe
acacttttactgacgctgttgatgg

SEQ ID NO: 283381 - DNA, 25 bp, Artificial
  Probe
accactgtttaacttgggaggacag

SEQ ID NO: 283382 - DNA, 25 bp, Artificial
  Probe
tgggcacccgtgtataaaggaaagt

SEQ ID NO: 283383 - DNA, 25 bp, Artificial
  Probe
atggcagactgatcagggaccatta

SEQ ID NO: 283384 - DNA, 25 bp, Artificial
  Probe
tggcagactgatcagggaccattaa

SEQ ID NO: 283385 - DNA, 25 bp, Artificial
  Probe
caccttgaaagacaattatgactcc

SEQ ID NO: 283386 - DNA, 25 bp, Artificial
  Probe
ccttctgaagagcaggccatggact

SEQ ID NO: 283387 - DNA, 25 bp, Artificial
  Probe
cattcatcccagaactaaaaatcaa

SEQ ID NO: 283388 - DNA, 25 bp, Artificial
  Probe
attatgactccttctgaagagcagg

SEQ ID NO: 283389 - DNA, 25 bp, Artificial
  Probe
ctcaccttgaaagacaattatgact

SEQ ID NO: 283390 - DNA, 25 bp, Artificial
  Probe
tatgactccttctgaagagcaggcc

SEQ ID NO: 283391 - DNA, 25 bp, Artificial
  Probe
gaaaatggatcctcaccttgaaaga

SEQ ID NO: 283392 - DNA, 25 bp, Artificial
  Probe
tgactccttctgaagagcaggccat

SEQ ID NO: 283393 - DNA, 25 bp, Artificial
  Probe
tggatcctcaccttgaaagacaatt

SEQ ID NO: 283394 - DNA, 25 bp, Artificial
  Probe
aagacaattatgactccttctgaag

SEQ ID NO: 283395 - DNA, 25 bp, Artificial
  Probe
ttctgaagagcaggccatggactaa

SEQ ID NO: 283396 - DNA, 25 bp, Artificial
  Probe
agacaattatgactccttctgaaga

SEQ ID NO: 283397 - DNA, 25 bp, Artificial
  Probe
ctcatctaatttaatctctctgggt

SEQ ID NO: 283398 - DNA, 25 bp, Artificial
  Probe
tactgcacatctcatctaatttaat

SEQ ID NO: 283399 - DNA, 25 bp, Artificial
  Probe
tccttctgaagagcaggccatggac

SEQ ID NO: 283400 - DNA, 25 bp, Artificial
  Probe
gactccttctgaagagcaggccatg

SEQ ID NO: 283401 - DNA, 25 bp, Artificial
  Probe
tgcatggcagactgatcagggacca

SEQ ID NO: 283402 - DNA, 25 bp, Artificial
  Probe
ggatcctcaccttgaaagacaatta

SEQ ID NO: 283403 - DNA, 25 bp, Artificial
  Probe
cccagaactaaaaatcaatgtgaaa

SEQ ID NO: 283404 - DNA, 25 bp, Artificial
  Probe
aatggatcctcaccttgaaagacaa

SEQ ID NO: 283405 - DNA, 25 bp, Artificial
  Probe
atcattcatcccagaactaaaaatc

SEQ ID NO: 283406 - DNA, 25 bp, Artificial
  Probe
atcctcaccttgaaagacaattatg

SEQ ID NO: 283407 - DNA, 25 bp, Artificial
  Probe
cacatctcatctaatttaatctctc

SEQ ID NO: 283408 - DNA, 25 bp, Artificial
  Probe
caattatgactccttctgaagagca

SEQ ID NO: 283409 - DNA, 25 bp, Artificial
  Probe
actccttctgaagagcaggccatgg

SEQ ID NO: 283410 - DNA, 25 bp, Artificial
  Probe
aattatgactccttctgaagagcag

SEQ ID NO: 283411 - DNA, 25 bp, Artificial
  Probe
ctgcacatctcatctaatttaatct

SEQ ID NO: 283412 - DNA, 25 bp, Artificial
  Probe
aaagacaattatgactccttctgaa

SEQ ID NO: 283413 - DNA, 25 bp, Artificial
  Probe
aaaatggatcctcaccttgaaagac

SEQ ID NO: 283414 - DNA, 25 bp, Artificial
  Probe
atgactccttctgaagagcaggcca

SEQ ID NO: 283415 - DNA, 25 bp, Artificial
  Probe
tcttaatcattcatcccagaactaa

SEQ ID NO: 283416 - DNA, 25 bp, Artificial
  Probe
catggcagactgatcagggaccatt

SEQ ID NO: 283417 - DNA, 25 bp, Artificial
  Probe
atcccagaactaaaaatcaatgtga

SEQ ID NO: 283418 - DNA, 25 bp, Artificial
  Probe
cttctgaagagcaggccatggacta

SEQ ID NO: 283419 - DNA, 25 bp, Artificial
  Probe
ctccttctgaagagcaggccatgga

SEQ ID NO: 283420 - DNA, 25 bp, Artificial
  Probe
ttatgactccttctgaagagcaggc

SEQ ID NO: 283421 - DNA, 25 bp, Artificial
  Probe
tgaaaatggatcctcaccttgaaag

SEQ ID NO: 283422 - DNA, 25 bp, Artificial
  Probe
gcatggcagactgatcagggaccat

SEQ ID NO: 283423 - DNA, 25 bp, Artificial
  Probe
acaattatgactccttctgaagagc

SEQ ID NO: 283424 - DNA, 25 bp, Artificial
  Probe
ggcagactgatcagggaccattaat

SEQ ID NO: 283425 - DNA, 25 bp, Artificial
  Probe
gacaattatgactccttctgaagag

SEQ ID NO: 283426 - DNA, 25 bp, Artificial
  Probe
atggatcctcaccttgaaagacaat

SEQ ID NO: 283427 - DNA, 25 bp, Artificial
  Probe
gatcctcaccttgaaagacaattat

SEQ ID NO: 283428 - DNA, 25 bp, Artificial
  Probe
aaatggatcctcaccttgaaagaca

SEQ ID NO: 283429 - DNA, 25 bp, Artificial
  Probe
tggcaacaggccaggccctggcaga

SEQ ID NO: 283430 - DNA, 25 bp, Artificial
  Probe
gtggcagcaacagagctactgaagc

SEQ ID NO: 283431 - DNA, 25 bp, Artificial
  Probe
gagtagccgtggtcaggaaccacct

SEQ ID NO: 283432 - DNA, 25 bp, Artificial
  Probe
cttcgtcatggcaacaggccaggcc

SEQ ID NO: 283433 - DNA, 25 bp, Artificial
  Probe
gatgggcaggatcgacccttctcct

SEQ ID NO: 283434 - DNA, 25 bp, Artificial
  Probe
aacagagctactgaagcgagaatcc

SEQ ID NO: 283435 - DNA, 25 bp, Artificial
  Probe
cagatgcctgccagatggaaccaga

SEQ ID NO: 283436 - DNA, 25 bp, Artificial
  Probe
gcccagggagccttgagcccaaagt

SEQ ID NO: 283437 - DNA, 25 bp, Artificial
  Probe
taccagcaagaagcaggacttggca

SEQ ID NO: 283438 - DNA, 25 bp, Artificial
  Probe
cgtggtcaggaaccacctcaaccag

SEQ ID NO: 283439 - DNA, 25 bp, Artificial
  Probe
tcctcagtagccagctgcatggact

SEQ ID NO: 283440 - DNA, 25 bp, Artificial
  Probe
ccagcaagaagcaggacttggcagg

SEQ ID NO: 283441 - DNA, 25 bp, Artificial
  Probe
gaggactagactccttagcagcaga

SEQ ID NO: 283442 - DNA, 25 bp, Artificial
  Probe
agccgtggtcaggaaccacctcaac

SEQ ID NO: 283443 - DNA, 25 bp, Artificial
  Probe
gtggtcaggaaccacctcaaccagg

SEQ ID NO: 283444 - DNA, 25 bp, Artificial
  Probe
actgagtagccgtggtcaggaacca

SEQ ID NO: 283445 - DNA, 25 bp, Artificial
  Probe
agtcgaggtggcagcaacagagcta

SEQ ID NO: 283446 - DNA, 25 bp, Artificial
  Probe
gggcctctgtggtcactcacaaagg

SEQ ID NO: 283447 - DNA, 25 bp, Artificial
  Probe
ctgcatggactgagtagccgtggtc

SEQ ID NO: 283448 - DNA, 25 bp, Artificial
  Probe
caggccctggcagatgcctgccaga

SEQ ID NO: 283449 - DNA, 25 bp, Artificial
  Probe
ctactgaagcgagaatccccaaagg

SEQ ID NO: 283450 - DNA, 25 bp, Artificial
  Probe
ctaacttcgtcatggcaacaggcca

SEQ ID NO: 283451 - DNA, 25 bp, Artificial
  Probe
ccttctccttaccagcaagaagcag

SEQ ID NO: 283452 - DNA, 25 bp, Artificial
  Probe
cgtcatggcaacaggccaggccctg

SEQ ID NO: 283453 - DNA, 25 bp, Artificial
  Probe
aagacccttattgctccaggtgtga

SEQ ID NO: 283454 - DNA, 25 bp, Artificial
  Probe
cttggcagggcctctgtggtcactc

SEQ ID NO: 283455 - DNA, 25 bp, Artificial
  Probe
ccatggatgggcaggatcgaccctt

SEQ ID NO: 283456 - DNA, 25 bp, Artificial
  Probe
caagaagcaggacttggcagggcct

SEQ ID NO: 283457 - DNA, 25 bp, Artificial
  Probe
tgcatggactgagtagccgtggtca

SEQ ID NO: 283458 - DNA, 25 bp, Artificial
  Probe
ttattgctccaggtgtgaggcctat

SEQ ID NO: 283459 - DNA, 25 bp, Artificial
  Probe
tcgaggtggcagcaacagagctact

SEQ ID NO: 283460 - DNA, 25 bp, Artificial
  Probe
ccaaaaagacccttattgctccagg

SEQ ID NO: 283461 - DNA, 25 bp, Artificial
  Probe
aggaggactagactccttagcagca

SEQ ID NO: 283462 - DNA, 25 bp, Artificial
  Probe
tgccagatggaaccagaggaagtcg

SEQ ID NO: 283463 - DNA, 25 bp, Artificial
  Probe
cctcagtagccagctgcatggactg

SEQ ID NO: 283464 - DNA, 25 bp, Artificial
  Probe
tgggcaggatcgacccttctcctta

SEQ ID NO: 283465 - DNA, 25 bp, Artificial
  Probe
cagtagccagctgcatggactgagt

SEQ ID NO: 283466 - DNA, 25 bp, Artificial
  Probe
ccttaccagcaagaagcaggacttg

SEQ ID NO: 283467 - DNA, 25 bp, Artificial
  Probe
ctggttcgaggaggactagactcct

SEQ ID NO: 283468 - DNA, 25 bp, Artificial
  Probe
attgctccaggtgtgaggcctatac

SEQ ID NO: 283469 - DNA, 25 bp, Artificial
  Probe
gctccaggtgtgaggcctatacaga

SEQ ID NO: 283470 - DNA, 25 bp, Artificial
  Probe
cctctgtggtcactcacaaaggcct

SEQ ID NO: 283471 - DNA, 25 bp, Artificial
  Probe
ccagatggaaccagaggaagtcgag

SEQ ID NO: 283472 - DNA, 25 bp, Artificial
  Probe
ctgaagcgagaatccccaaagggcg

SEQ ID NO: 283473 - DNA, 25 bp, Artificial
  Probe
cagggagccttgagcccaaagtcct

SEQ ID NO: 283474 - DNA, 25 bp, Artificial
  Probe
cagctgcatggactgagtagccgtg

SEQ ID NO: 283475 - DNA, 25 bp, Artificial
  Probe
atcctggactgagaaatgtaccatt

SEQ ID NO: 283476 - DNA, 25 bp, Artificial
  Probe
aagaccattgtggaaacattattac

SEQ ID NO: 283477 - DNA, 25 bp, Artificial
  Probe
ctaacaaacaggatgtcgctggggc

SEQ ID NO: 283478 - DNA, 25 bp, Artificial
  Probe
tgctgcggaaggagctggtatattc

SEQ ID NO: 283479 - DNA, 25 bp, Artificial
  Probe
cttcgagatgccttactcttgattt

SEQ ID NO: 283480 - DNA, 25 bp, Artificial
  Probe
attctgtggcaaatttaagtgatcc

SEQ ID NO: 283481 - DNA, 25 bp, Artificial
  Probe
acacagtgaacttgcgaagttgtta

SEQ ID NO: 283482 - DNA, 25 bp, Artificial
  Probe
tgctcgaagtggtatggggctctac

SEQ ID NO: 283483 - DNA, 25 bp, Artificial
  Probe
cacaaattaagaccattgtggaaac

SEQ ID NO: 283484 - DNA, 25 bp, Artificial
  Probe
cagcagttgtttcgagcttatggtt

SEQ ID NO: 283485 - DNA, 25 bp, Artificial
  Probe
gctgcggaaggagctggtatattca

SEQ ID NO: 283486 - DNA, 25 bp, Artificial
  Probe
tgtcgctggggcactttcggttgaa

SEQ ID NO: 283487 - DNA, 25 bp, Artificial
  Probe
cgtatgaatcctggactgagaaatg

SEQ ID NO: 283488 - DNA, 25 bp, Artificial
  Probe
tcgctggggcactttcggttgaaga

SEQ ID NO: 283489 - DNA, 25 bp, Artificial
  Probe
gttgcttgattctattgcagcagtt

SEQ ID NO: 283490 - DNA, 25 bp, Artificial
  Probe
acaggatgtcgctggggcactttcg

SEQ ID NO: 283491 - DNA, 25 bp, Artificial
  Probe
gctggggcactttcggttgaagaaa

SEQ ID NO: 283492 - DNA, 25 bp, Artificial
  Probe
agatgccttactcttgatttttgct

SEQ ID NO: 283493 - DNA, 25 bp, Artificial
  Probe
ttagtgaagcacacagtgaacttgc

SEQ ID NO: 283494 - DNA, 25 bp, Artificial
  Probe
attcagggctgtgatgctcgaagtg

SEQ ID NO: 283495 - DNA, 25 bp, Artificial
  Probe
agaacttcgagatgccttactcttg

SEQ ID NO: 283496 - DNA, 25 bp, Artificial
  Probe
ggctgtcccggcaacttgtggctgc

SEQ ID NO: 283497 - DNA, 25 bp, Artificial
  Probe
ggatgttgcttgattctattgcagc

SEQ ID NO: 283498 - DNA, 25 bp, Artificial
  Probe
tgattctattgcagcagttgtttcg

SEQ ID NO: 283499 - DNA, 25 bp, Artificial
  Probe
atgaatcctggactgagaaatgtac

SEQ ID NO: 283500 - DNA, 25 bp, Artificial
  Probe
gttgacagcagtcacagagacagaa

SEQ ID NO: 283501 - DNA, 25 bp, Artificial
  Probe
gcactttcggttgaagaaatcaccg

SEQ ID NO: 283502 - DNA, 25 bp, Artificial
  Probe
ggttggactggctgtcccggcaact

SEQ ID NO: 283503 - DNA, 25 bp, Artificial
  Probe
tcgagatgccttactcttgattttt

SEQ ID NO: 283504 - DNA, 25 bp, Artificial
  Probe
tgctaacaaacaggatgtcgctggg

SEQ ID NO: 283505 - DNA, 25 bp, Artificial
  Probe
atttgttgttgacagcagtcacaga

SEQ ID NO: 283506 - DNA, 25 bp, Artificial
  Probe
tgtacgtatgaatcctggactgaga

SEQ ID NO: 283507 - DNA, 25 bp, Artificial
  Probe
ctattgcagcagttgtttcgagctt

SEQ ID NO: 283508 - DNA, 25 bp, Artificial
  Probe
ttgctaacaaacaggatgtcgctgg

SEQ ID NO: 283509 - DNA, 25 bp, Artificial
  Probe
agcagtcacagagacagaattagtg

SEQ ID NO: 283510 - DNA, 25 bp, Artificial
  Probe
gtgaagcacacagtgaacttgcgaa

SEQ ID NO: 283511 - DNA, 25 bp, Artificial
  Probe
gatgccttactcttgatttttgcta

SEQ ID NO: 283512 - DNA, 25 bp, Artificial
  Probe
aattagtgaagcacacagtgaactt

SEQ ID NO: 283513 - DNA, 25 bp, Artificial
  Probe
gctggtatattcagggctgtgatgc

SEQ ID NO: 283514 - DNA, 25 bp, Artificial
  Probe
ttggactggctgtcccggcaacttg

SEQ ID NO: 283515 - DNA, 25 bp, Artificial
  Probe
gggcactttcggttgaagaaatcac

SEQ ID NO: 283516 - DNA, 25 bp, Artificial
  Probe
gtcccggcaacttgtggctgccgga

SEQ ID NO: 283517 - DNA, 25 bp, Artificial
  Probe
tatattcagggctgtgatgctcgaa

SEQ ID NO: 283518 - DNA, 25 bp, Artificial
  Probe
taacaaacaggatgtcgctggggca

SEQ ID NO: 283519 - DNA, 25 bp, Artificial
  Probe
gtatttgttgttgacagcagtcaca

SEQ ID NO: 283520 - DNA, 25 bp, Artificial
  Probe
atgctcgaagtggtatggggctcta

SEQ ID NO: 283521 - DNA, 25 bp, Artificial
  Probe
cccttctcaaaaaggctgggtcgtg

SEQ ID NO: 283522 - DNA, 25 bp, Artificial
  Probe
ccagcaggtctgaaagcacaagaag

SEQ ID NO: 283523 - DNA, 25 bp, Artificial
  Probe
gcagggacctgaagcctcagtttcc

SEQ ID NO: 283524 - DNA, 25 bp, Artificial
  Probe
gtcaaaccagcaggtctgaaagcac

SEQ ID NO: 283525 - DNA, 25 bp, Artificial
  Probe
agggacccctaatgcagggacctga

SEQ ID NO: 283526 - DNA, 25 bp, Artificial
  Probe
cctaatgcagggacctgaagcctca

SEQ ID NO: 283527 - DNA, 25 bp, Artificial
  Probe
gcacacatggtcaaaccagcaggtc

SEQ ID NO: 283528 - DNA, 25 bp, Artificial
  Probe
gtgagggacccctaatgcagggacc

SEQ ID NO: 283529 - DNA, 25 bp, Artificial
  Probe
cagcctctgtaggtagagctgcccc

SEQ ID NO: 283530 - DNA, 25 bp, Artificial
  Probe
actcccagaatcttgtacctgtgtt

SEQ ID NO: 283531 - DNA, 25 bp, Artificial
  Probe
gacccctaatgcagggacctgaagc

SEQ ID NO: 283532 - DNA, 25 bp, Artificial
  Probe
cacacatggtcaaaccagcaggtct

SEQ ID NO: 283533 - DNA, 25 bp, Artificial
  Probe
accaggcacacatggtcaaaccagc

SEQ ID NO: 283534 - DNA, 25 bp, Artificial
  Probe
cacagaacagcctctgtaggtagag

SEQ ID NO: 283535 - DNA, 25 bp, Artificial
  Probe
tgaagcctcagtttccccatcttgc

SEQ ID NO: 283536 - DNA, 25 bp, Artificial
  Probe
tggctgctttctttggtactcttcc

SEQ ID NO: 283537 - DNA, 25 bp, Artificial
  Probe
ctgaaagcacaagaagctggggcag

SEQ ID NO: 283538 - DNA, 25 bp, Artificial
  Probe
acagaacagcctctgtaggtagagc

SEQ ID NO: 283539 - DNA, 25 bp, Artificial
  Probe
aaccagcaggtctgaaagcacaaga

SEQ ID NO: 283540 - DNA, 25 bp, Artificial
  Probe
cacacaggcagtgtatcagaggaaa

SEQ ID NO: 283541 - DNA, 25 bp, Artificial
  Probe
aactcccagaatcttgtacctgtgt

SEQ ID NO: 283542 - DNA, 25 bp, Artificial
  Probe
atggtcaaaccagcaggtctgaaag

SEQ ID NO: 283543 - DNA, 25 bp, Artificial
  Probe
atgcagggacctgaagcctcagttt

SEQ ID NO: 283544 - DNA, 25 bp, Artificial
  Probe
cccagaatcttgtacctgtgttggg

SEQ ID NO: 283545 - DNA, 25 bp, Artificial
  Probe
aacagcctctgtaggtagagctgcc

SEQ ID NO: 283546 - DNA, 25 bp, Artificial
  Probe
tcttgtacctgtgttggggctgcag

SEQ ID NO: 283547 - DNA, 25 bp, Artificial
  Probe
tgagggacccctaatgcagggacct

SEQ ID NO: 283548 - DNA, 25 bp, Artificial
  Probe
taatgcagggacctgaagcctcagt

SEQ ID NO: 283549 - DNA, 25 bp, Artificial
  Probe
acatggtcaaaccagcaggtctgaa

SEQ ID NO: 283550 - DNA, 25 bp, Artificial
  Probe
cccaccgtagctgtgacgtgttgta

SEQ ID NO: 283551 - DNA, 25 bp, Artificial
  Probe
tctgaaagcacaagaagctggggca

SEQ ID NO: 283552 - DNA, 25 bp, Artificial
  Probe
tcccagaatcttgtacctgtgttgg

SEQ ID NO: 283553 - DNA, 25 bp, Artificial
  Probe
ctaatgcagggacctgaagcctcag

SEQ ID NO: 283554 - DNA, 25 bp, Artificial
  Probe
accgtagctgtgacgtgttgtagtt

SEQ ID NO: 283555 - DNA, 25 bp, Artificial
  Probe
tcccaccgtagctgtgacgtgttgt

SEQ ID NO: 283556 - DNA, 25 bp, Artificial
  Probe
aggcacacatggtcaaaccagcagg

SEQ ID NO: 283557 - DNA, 25 bp, Artificial
  Probe
ggacctgaagcctcagtttccccat

SEQ ID NO: 283558 - DNA, 25 bp, Artificial
  Probe
acagcctctgtaggtagagctgccc

SEQ ID NO: 283559 - DNA, 25 bp, Artificial
  Probe
gtggctgctttctttggtactcttc

SEQ ID NO: 283560 - DNA, 25 bp, Artificial
  Probe
gctgctttctttggtactcttccca

SEQ ID NO: 283561 - DNA, 25 bp, Artificial
  Probe
accagcaggtctgaaagcacaagaa

SEQ ID NO: 283562 - DNA, 25 bp, Artificial
  Probe
ccaccgtagctgtgacgtgttgtag

SEQ ID NO: 283563 - DNA, 25 bp, Artificial
  Probe
gaatcttgtacctgtgttggggctg

SEQ ID NO: 283564 - DNA, 25 bp, Artificial
  Probe
ccacacaggcagtgtatcagaggaa

SEQ ID NO: 283565 - DNA, 25 bp, Artificial
  Probe
ctgaagcctcagtttccccatcttg

SEQ ID NO: 283566 - DNA, 25 bp, Artificial
  Probe
gtccacacaggcagtgtatcagagg

SEQ ID NO: 283567 - DNA, 25 bp, Artificial
  Probe
tggagaagcccctgcgcacattgat

SEQ ID NO: 283568 - DNA, 25 bp, Artificial
  Probe
ctctaagctctctgggagctgcctc

SEQ ID NO: 283569 - DNA, 25 bp, Artificial
  Probe
tccagcgtgcttgctaacttccctt

SEQ ID NO: 283570 - DNA, 25 bp, Artificial
  Probe
ttctctaagctctctgggagctgcc

SEQ ID NO: 283571 - DNA, 25 bp, Artificial
  Probe
tgccctccttgctccgaggagaagc

SEQ ID NO: 283572 - DNA, 25 bp, Artificial
  Probe
ccctgcgcacattgatgcacgggca

SEQ ID NO: 283573 - DNA, 25 bp, Artificial
  Probe
gcctgggcgacgaagccatccactg

SEQ ID NO: 283574 - DNA, 25 bp, Artificial
  Probe
ctgggagctgcctccgggttccttg

SEQ ID NO: 283575 - DNA, 25 bp, Artificial
  Probe
tgatgcacgggcaaggtgtatgcac

SEQ ID NO: 283576 - DNA, 25 bp, Artificial
  Probe
tgcttgctaacttcccttggctccg

SEQ ID NO: 283577 - DNA, 25 bp, Artificial
  Probe
gaaatcgaagccatccaagaaagcc

SEQ ID NO: 283578 - DNA, 25 bp, Artificial
  Probe
ccacttgcgccctgggcttggggat

SEQ ID NO: 283579 - DNA, 25 bp, Artificial
  Probe
tccaagaaagcctgcagacctctga

SEQ ID NO: 283580 - DNA, 25 bp, Artificial
  Probe
caagaaagcctgcagacctctgaca

SEQ ID NO: 283581 - DNA, 25 bp, Artificial
  Probe
aagctctctgggagctgcctccggg

SEQ ID NO: 283582 - DNA, 25 bp, Artificial
  Probe
tggctgcggttgttgtgccacttgc

SEQ ID NO: 283583 - DNA, 25 bp, Artificial
  Probe
ctgtcggaaatcgaagccatccaag

SEQ ID NO: 283584 - DNA, 25 bp, Artificial
  Probe
ctctctgggagctgcctccgggttc

SEQ ID NO: 283585 - DNA, 25 bp, Artificial
  Probe
ggctcgctctgctccagcgtgcttg

SEQ ID NO: 283586 - DNA, 25 bp, Artificial
  Probe
tgtggctcaggcatgcgctgctacc

SEQ ID NO: 283587 - DNA, 25 bp, Artificial
  Probe
gcacattgatgcacgggcaaggtgt

SEQ ID NO: 283588 - DNA, 25 bp, Artificial
  Probe
ccttgctccgaggagaagctggcgc

SEQ ID NO: 283589 - DNA, 25 bp, Artificial
  Probe
tgttgtgccacttgcgccctgggct

SEQ ID NO: 283590 - DNA, 25 bp, Artificial
  Probe
tccttgctccgaggagaagctggcg

SEQ ID NO: 283591 - DNA, 25 bp, Artificial
  Probe
tcgctctccgggtctggttctctaa

SEQ ID NO: 283592 - DNA, 25 bp, Artificial
  Probe
ctggttctctaagctctctgggagc

SEQ ID NO: 283593 - DNA, 25 bp, Artificial
  Probe
cggagctgtcggaaatcgaagccat

SEQ ID NO: 283594 - DNA, 25 bp, Artificial
  Probe
ccacgctgtggctcaggcatgcgct

SEQ ID NO: 283595 - DNA, 25 bp, Artificial
  Probe
atcgaagccatccaagaaagcctgc

SEQ ID NO: 283596 - DNA, 25 bp, Artificial
  Probe
gcccctgcgcacattgatgcacggg

SEQ ID NO: 283597 - DNA, 25 bp, Artificial
  Probe
cgagcctgggcgacgaagccatcca

SEQ ID NO: 283598 - DNA, 25 bp, Artificial
  Probe
gcgcacattgatgcacgggcaaggt

SEQ ID NO: 283599 - DNA, 25 bp, Artificial
  Probe
aaagcctgcagacctctgacaagga

SEQ ID NO: 283600 - DNA, 25 bp, Artificial
  Probe
gcctgcagacctctgacaaggatga

SEQ ID NO: 283601 - DNA, 25 bp, Artificial
  Probe
gcctggctgcggttgttgtgccact

SEQ ID NO: 283602 - DNA, 25 bp, Artificial
  Probe
ggttgttgtgccacttgcgccctgg

SEQ ID NO: 283603 - DNA, 25 bp, Artificial
  Probe
gtgtatgcacggagctgtcggaaat

SEQ ID NO: 283604 - DNA, 25 bp, Artificial
  Probe
gccatccaagaaagcctgcagacct

SEQ ID NO: 283605 - DNA, 25 bp, Artificial
  Probe
ggtctggttctctaagctctctggg

SEQ ID NO: 283606 - DNA, 25 bp, Artificial
  Probe
tctgctccagcgtgcttgctaactt

SEQ ID NO: 283607 - DNA, 25 bp, Artificial
  Probe
gaaagcctgcagacctctgacaagg

SEQ ID NO: 283608 - DNA, 25 bp, Artificial
  Probe
tcgctctgctccagcgtgcttgcta

SEQ ID NO: 283609 - DNA, 25 bp, Artificial
  Probe
acgctgtggctcaggcatgcgctgc

SEQ ID NO: 283610 - DNA, 25 bp, Artificial
  Probe
tgcacggagctgtcggaaatcgaag

SEQ ID NO: 283611 - DNA, 25 bp, Artificial
  Probe
tgctccagcgtgcttgctaacttcc

SEQ ID NO: 283612 - DNA, 25 bp, Artificial
  Probe
aagcccctgcgcacattgatgcacg

SEQ ID NO: 283613 - DNA, 25 bp, Artificial
  Probe
ctctgtcttaaaagaattcgaaggt

SEQ ID NO: 283614 - DNA, 25 bp, Artificial
  Probe
ttagtcgtattctgttgttcagtcc

SEQ ID NO: 283615 - DNA, 25 bp, Artificial
  Probe
attctgttgttcagtcctctgcact

SEQ ID NO: 283616 - DNA, 25 bp, Artificial
  Probe
tgccttactgcctctgtcttaaaag

SEQ ID NO: 283617 - DNA, 25 bp, Artificial
  Probe
ttgttcagtcctctgcactgagaat

SEQ ID NO: 283618 - DNA, 25 bp, Artificial
  Probe
gccttactgcctctgtcttaaaaga

SEQ ID NO: 283619 - DNA, 25 bp, Artificial
  Probe
tttctgttctcaacgcagtgattcc

SEQ ID NO: 283620 - DNA, 25 bp, Artificial
  Probe
ttcctgtctgccttactgcctctgt

SEQ ID NO: 283621 - DNA, 25 bp, Artificial
  Probe
gacagttcagagcagggcagagtat

SEQ ID NO: 283622 - DNA, 25 bp, Artificial
  Probe
cagagtattcagctcggggacagga

SEQ ID NO: 283623 - DNA, 25 bp, Artificial
  Probe
tttcatatcgaacaagagacccctg

SEQ ID NO: 283624 - DNA, 25 bp, Artificial
  Probe
acagttcagagcagggcagagtatt

SEQ ID NO: 283625 - DNA, 25 bp, Artificial
  Probe
catatcgaacaagagacccctgtct

SEQ ID NO: 283626 - DNA, 25 bp, Artificial
  Probe
ttcagctcggggacaggattctgag

SEQ ID NO: 283627 - DNA, 25 bp, Artificial
  Probe
aagagacccctgtctgacagttcag

SEQ ID NO: 283628 - DNA, 25 bp, Artificial
  Probe
actgcctctgtcttaaaagaattcg

SEQ ID NO: 283629 - DNA, 25 bp, Artificial
  Probe
cagtcctctgcactgagaatcgctt

SEQ ID NO: 283630 - DNA, 25 bp, Artificial
  Probe
caataggttcttttagtcgtattct

SEQ ID NO: 283631 - DNA, 25 bp, Artificial
  Probe
tcagctcggggacaggattctgaga

SEQ ID NO: 283632 - DNA, 25 bp, Artificial
  Probe
catcaataggttcttttagtcgtat

SEQ ID NO: 283633 - DNA, 25 bp, Artificial
  Probe
cctctgcactgagaatcgctttctg

SEQ ID NO: 283634 - DNA, 25 bp, Artificial
  Probe
tcaataggttcttttagtcgtattc

SEQ ID NO: 283635 - DNA, 25 bp, Artificial
  Probe
actgagaatcgctttctgttctcaa

SEQ ID NO: 283636 - DNA, 25 bp, Artificial
  Probe
atcgaacaagagacccctgtctgac

SEQ ID NO: 283637 - DNA, 25 bp, Artificial
  Probe
aacgcagtgattcctgtctgcctta

SEQ ID NO: 283638 - DNA, 25 bp, Artificial
  Probe
acaagagacccctgtctgacagttc

SEQ ID NO: 283639 - DNA, 25 bp, Artificial
  Probe
gcctctgtcttaaaagaattcgaag

SEQ ID NO: 283640 - DNA, 25 bp, Artificial
  Probe
agtcgtattctgttgttcagtcctc

SEQ ID NO: 283641 - DNA, 25 bp, Artificial
  Probe
cgcagtgattcctgtctgccttact

SEQ ID NO: 283642 - DNA, 25 bp, Artificial
  Probe
gtgattcctgtctgccttactgcct

SEQ ID NO: 283643 - DNA, 25 bp, Artificial
  Probe
tcaacgcagtgattcctgtctgcct

SEQ ID NO: 283644 - DNA, 25 bp, Artificial
  Probe
tcatatcgaacaagagacccctgtc

SEQ ID NO: 283645 - DNA, 25 bp, Artificial
  Probe
tatcgaacaagagacccctgtctga

SEQ ID NO: 283646 - DNA, 25 bp, Artificial
  Probe
tgttctcaacgcagtgattcctgtc

SEQ ID NO: 283647 - DNA, 25 bp, Artificial
  Probe
gctttctgttctcaacgcagtgatt

SEQ ID NO: 283648 - DNA, 25 bp, Artificial
  Probe
ctgcactgagaatcgctttctgttc

SEQ ID NO: 283649 - DNA, 25 bp, Artificial
  Probe
ctctgcactgagaatcgctttctgt

SEQ ID NO: 283650 - DNA, 25 bp, Artificial
  Probe
cccatcaataggttcttttagtcgt

SEQ ID NO: 283651 - DNA, 25 bp, Artificial
  Probe
aatcgctttctgttctcaacgcagt

SEQ ID NO: 283652 - DNA, 25 bp, Artificial
  Probe
tgtctgccttactgcctctgtctta

SEQ ID NO: 283653 - DNA, 25 bp, Artificial
  Probe
agagtattcagctcggggacaggat

SEQ ID NO: 283654 - DNA, 25 bp, Artificial
  Probe
acccctgtctgacagttcagagcag

SEQ ID NO: 283655 - DNA, 25 bp, Artificial
  Probe
gtattctgttgttcagtcctctgca

SEQ ID NO: 283656 - DNA, 25 bp, Artificial
  Probe
ctgtctgacagttcagagcagggca

SEQ ID NO: 283657 - DNA, 25 bp, Artificial
  Probe
gtctgacagttcagagcagggcaga

SEQ ID NO: 283658 - DNA, 25 bp, Artificial
  Probe
gattctgagaggaagccagagagca

SEQ ID NO: 283659 - DNA, 25 bp, Artificial
  Probe
cttgcacagaaatgaacctgaggag

SEQ ID NO: 283660 - DNA, 25 bp, Artificial
  Probe
ggcgctgtctttcaggaaatttgca

SEQ ID NO: 283661 - DNA, 25 bp, Artificial
  Probe
tttgggcgctgtctttcaggaaatt

SEQ ID NO: 283662 - DNA, 25 bp, Artificial
  Probe
gccttgatgtttctaatgtgtaaac

SEQ ID NO: 283663 - DNA, 25 bp, Artificial
  Probe
gccaacagaacattttagggaatcc

SEQ ID NO: 283664 - DNA, 25 bp, Artificial
  Probe
ctatttgggcgctgtctttcaggaa

SEQ ID NO: 283665 - DNA, 25 bp, Artificial
  Probe
tatgacgtttttatacttcgaatgc

SEQ ID NO: 283666 - DNA, 25 bp, Artificial
  Probe
ccatacttgcacagaaatgaacctg

SEQ ID NO: 283667 - DNA, 25 bp, Artificial
  Probe
gacaggaaaccatacttgcacagaa

SEQ ID NO: 283668 - DNA, 25 bp, Artificial
  Probe
tctcagatgctcagcgtcctaacat

SEQ ID NO: 283669 - DNA, 25 bp, Artificial
  Probe
tgcacagaaatgaacctgaggagag

SEQ ID NO: 283670 - DNA, 25 bp, Artificial
  Probe
gcgctgtctttcaggaaatttgcat

SEQ ID NO: 283671 - DNA, 25 bp, Artificial
  Probe
agatgctcagcgtcctaacatcaat

SEQ ID NO: 283672 - DNA, 25 bp, Artificial
  Probe
gaaaccatacttgcacagaaatgaa

SEQ ID NO: 283673 - DNA, 25 bp, Artificial
  Probe
ggaaaccatacttgcacagaaatga

SEQ ID NO: 283674 - DNA, 25 bp, Artificial
  Probe
aagacaggaaaccatacttgcacag

SEQ ID NO: 283675 - DNA, 25 bp, Artificial
  Probe
caacgggaggcaatgactgactctc

SEQ ID NO: 283676 - DNA, 25 bp, Artificial
  Probe
gctcagcgtcctaacatcaatagtt

SEQ ID NO: 283677 - DNA, 25 bp, Artificial
  Probe
ctctccaaagtaagacaggaaacca

SEQ ID NO: 283678 - DNA, 25 bp, Artificial
  Probe
tatttgggcgctgtctttcaggaaa

SEQ ID NO: 283679 - DNA, 25 bp, Artificial
  Probe
actgactctcagatgctcagcgtcc

SEQ ID NO: 283680 - DNA, 25 bp, Artificial
  Probe
ttcccagccaacagaacattttagg

SEQ ID NO: 283681 - DNA, 25 bp, Artificial
  Probe
taaacttcaatgtttcaaggatgtc

SEQ ID NO: 283682 - DNA, 25 bp, Artificial
  Probe
gctgtctttcaggaaatttgcatgt

SEQ ID NO: 283683 - DNA, 25 bp, Artificial
  Probe
tacaagagactatttgggcgctgtc

SEQ ID NO: 283684 - DNA, 25 bp, Artificial
  Probe
aggaaaccatacttgcacagaaatg

SEQ ID NO: 283685 - DNA, 25 bp, Artificial
  Probe
gatgctcagcgtcctaacatcaata

SEQ ID NO: 283686 - DNA, 25 bp, Artificial
  Probe
actctcagatgctcagcgtcctaac

SEQ ID NO: 283687 - DNA, 25 bp, Artificial
  Probe
tacttgcacagaaatgaacctgagg

SEQ ID NO: 283688 - DNA, 25 bp, Artificial
  Probe
tcccagccaacagaacattttaggg

SEQ ID NO: 283689 - DNA, 25 bp, Artificial
  Probe
cagccaacagaacattttagggaat

SEQ ID NO: 283690 - DNA, 25 bp, Artificial
  Probe
ttcaatgtttcaaggatgtcccctt

SEQ ID NO: 283691 - DNA, 25 bp, Artificial
  Probe
tacctctccaaagtaagacaggaaa

SEQ ID NO: 283692 - DNA, 25 bp, Artificial
  Probe
tctacaagagactatttgggcgctg

SEQ ID NO: 283693 - DNA, 25 bp, Artificial
  Probe
ggggctacctctccaaagtaagaca

SEQ ID NO: 283694 - DNA, 25 bp, Artificial
  Probe
gacgtttttatacttcgaatgccat

SEQ ID NO: 283695 - DNA, 25 bp, Artificial
  Probe
tgacgtttttatacttcgaatgcca

SEQ ID NO: 283696 - DNA, 25 bp, Artificial
  Probe
ccttgatgtttctaatgtgtaaact

SEQ ID NO: 283697 - DNA, 25 bp, Artificial
  Probe
gactctcagatgctcagcgtcctaa

SEQ ID NO: 283698 - DNA, 25 bp, Artificial
  Probe
tcaatgtttcaaggatgtcccctta

SEQ ID NO: 283699 - DNA, 25 bp, Artificial
  Probe
ctacctctccaaagtaagacaggaa

SEQ ID NO: 283700 - DNA, 25 bp, Artificial
  Probe
ctgtctttcaggaaatttgcatgtt

SEQ ID NO: 283701 - DNA, 25 bp, Artificial
  Probe
caagagactatttgggcgctgtctt

SEQ ID NO: 283702 - DNA, 25 bp, Artificial
  Probe
cttcaatgtttcaaggatgtcccct

SEQ ID NO: 283703 - DNA, 25 bp, Artificial
  Probe
atgtttcaaggatgtccccttaata

SEQ ID NO: 283704 - DNA, 25 bp, Artificial
  Probe
aacattttagggaatccctgtgatg

SEQ ID NO: 283705 - DNA, 25 bp, Artificial
  Probe
gcaaaagcactgcaaactgaaatct

SEQ ID NO: 283706 - DNA, 25 bp, Artificial
  Probe
tccgtctcacctagtaatacatagg

SEQ ID NO: 283707 - DNA, 25 bp, Artificial
  Probe
tgaattttagcgtgcactgtctttc

SEQ ID NO: 283708 - DNA, 25 bp, Artificial
  Probe
tgctacgttcgcttggggtacgttg

SEQ ID NO: 283709 - DNA, 25 bp, Artificial
  Probe
gatccgtgcccaactctcctttggt

SEQ ID NO: 283710 - DNA, 25 bp, Artificial
  Probe
gtcttattcgctgaatctcacgaag

SEQ ID NO: 283711 - DNA, 25 bp, Artificial
  Probe
tgtgggtcactgaatgtgtttctcc

SEQ ID NO: 283712 - DNA, 25 bp, Artificial
  Probe
agactgagcaagatacctttgagca

SEQ ID NO: 283713 - DNA, 25 bp, Artificial
  Probe
ttcaaacctgcaaggcaagttaagt

SEQ ID NO: 283714 - DNA, 25 bp, Artificial
  Probe
ctgcaaactgaaatctgtgagtgtt

SEQ ID NO: 283715 - DNA, 25 bp, Artificial
  Probe
aacctgcaaggcaagttaagttaga

SEQ ID NO: 283716 - DNA, 25 bp, Artificial
  Probe
ctgttagactgagcaagataccttt

SEQ ID NO: 283717 - DNA, 25 bp, Artificial
  Probe
taaaggggcatcattagcctttgat

SEQ ID NO: 283718 - DNA, 25 bp, Artificial
  Probe
gcccaactctcctttggttattgta

SEQ ID NO: 283719 - DNA, 25 bp, Artificial
  Probe
gtcactgaatgtgtttctccgtctc

SEQ ID NO: 283720 - DNA, 25 bp, Artificial
  Probe
accctatgtgggtcactgaatgtgt

SEQ ID NO: 283721 - DNA, 25 bp, Artificial
  Probe
tatcgataggggtcttattcgctga

SEQ ID NO: 283722 - DNA, 25 bp, Artificial
  Probe
aaagcactgcaaactgaaatctgtg

SEQ ID NO: 283723 - DNA, 25 bp, Artificial
  Probe
taataccctatgtgggtcactgaat

SEQ ID NO: 283724 - DNA, 25 bp, Artificial
  Probe
tattcgctgaatctcacgaagaaaa

SEQ ID NO: 283725 - DNA, 25 bp, Artificial
  Probe
cctatctttatctgtgaggaggttt

SEQ ID NO: 283726 - DNA, 25 bp, Artificial
  Probe
tgaatgtgtttctccgtctcaccta

SEQ ID NO: 283727 - DNA, 25 bp, Artificial
  Probe
taggggtcttattcgctgaatctca

SEQ ID NO: 283728 - DNA, 25 bp, Artificial
  Probe
gtgtttctccgtctcacctagtaat

SEQ ID NO: 283729 - DNA, 25 bp, Artificial
  Probe
gcatcattagcctttgattcacgta

SEQ ID NO: 283730 - DNA, 25 bp, Artificial
  Probe
gcctttgattcacgtataacttagt

SEQ ID NO: 283731 - DNA, 25 bp, Artificial
  Probe
gagctgttagactgagcaagatacc

SEQ ID NO: 283732 - DNA, 25 bp, Artificial
  Probe
ctagtaatacataggtcctacgatc

SEQ ID NO: 283733 - DNA, 25 bp, Artificial
  Probe
acctgcaaggcaagttaagttagaa

SEQ ID NO: 283734 - DNA, 25 bp, Artificial
  Probe
aggggcatcattagcctttgattca

SEQ ID NO: 283735 - DNA, 25 bp, Artificial
  Probe
tgtgtttctccgtctcacctagtaa

SEQ ID NO: 283736 - DNA, 25 bp, Artificial
  Probe
acaagagctgttagactgagcaaga

SEQ ID NO: 283737 - DNA, 25 bp, Artificial
  Probe
aatttgaattttagcgtgcactgtc

SEQ ID NO: 283738 - DNA, 25 bp, Artificial
  Probe
gtctcacctagtaatacataggtcc

SEQ ID NO: 283739 - DNA, 25 bp, Artificial
  Probe
gatctaataccctatgtgggtcact

SEQ ID NO: 283740 - DNA, 25 bp, Artificial
  Probe
agcctttgattcacgtataacttag

SEQ ID NO: 283741 - DNA, 25 bp, Artificial
  Probe
caacgatctaataccctatgtgggt

SEQ ID NO: 283742 - DNA, 25 bp, Artificial
  Probe
tgtgtgctacgttcgcttggggtac

SEQ ID NO: 283743 - DNA, 25 bp, Artificial
  Probe
ctatgtgggtcactgaatgtgtttc

SEQ ID NO: 283744 - DNA, 25 bp, Artificial
  Probe
aaaggtatacagctgtgtgctacgt

SEQ ID NO: 283745 - DNA, 25 bp, Artificial
  Probe
ttcacgtataacttagtacaaaagg

SEQ ID NO: 283746 - DNA, 25 bp, Artificial
  Probe
ctgtgtgctacgttcgcttggggta

SEQ ID NO: 283747 - DNA, 25 bp, Artificial
  Probe
taggtcctacgatccgtgcccaact

SEQ ID NO: 283748 - DNA, 25 bp, Artificial
  Probe
ggtcttattcgctgaatctcacgaa

SEQ ID NO: 283749 - DNA, 25 bp, Artificial
  Probe
cagctgtgtgctacgttcgcttggg

SEQ ID NO: 283750 - DNA, 25 bp, Artificial
  Probe
gtccaacgatctaataccctatgtg

SEQ ID NO: 283751 - DNA, 25 bp, Artificial
  Probe
acaagcttctcaccaaaactcagta

SEQ ID NO: 283752 - DNA, 25 bp, Artificial
  Probe
acacttcttctgtgtgtagtcgtgc

SEQ ID NO: 283753 - DNA, 25 bp, Artificial
  Probe
cacttcttctgtgtgtagtcgtgcc

SEQ ID NO: 283754 - DNA, 25 bp, Artificial
  Probe
actcagtaccatatttccacgcctc

SEQ ID NO: 283755 - DNA, 25 bp, Artificial
  Probe
ctcaccaaaactcagtaccatattt

SEQ ID NO: 283756 - DNA, 25 bp, Artificial
  Probe
aaaactcagtaccatatttccacgc

SEQ ID NO: 283757 - DNA, 25 bp, Artificial
  Probe
aactcagtaccatatttccacgcct

SEQ ID NO: 283758 - DNA, 25 bp, Artificial
  Probe
aagcttctcaccaaaactcagtacc

SEQ ID NO: 283759 - DNA, 25 bp, Artificial
  Probe
gcttctcaccaaaactcagtaccat

SEQ ID NO: 283760 - DNA, 25 bp, Artificial
  Probe
tcaccaaaactcagtaccatatttc

SEQ ID NO: 283761 - DNA, 25 bp, Artificial
  Probe
tctcaccaaaactcagtaccatatt

SEQ ID NO: 283762 - DNA, 25 bp, Artificial
  Probe
tcagtaccatatttccacgcctctc

SEQ ID NO: 283763 - DNA, 25 bp, Artificial
  Probe
ttctcaccaaaactcagtaccatat

SEQ ID NO: 283764 - DNA, 25 bp, Artificial
  Probe
atatttccacgcctctctttactcc

SEQ ID NO: 283765 - DNA, 25 bp, Artificial
  Probe
cagtaccatatttccacgcctctct

SEQ ID NO: 283766 - DNA, 25 bp, Artificial
  Probe
cttctcaccaaaactcagtaccata

SEQ ID NO: 283767 - DNA, 25 bp, Artificial
  Probe
cgcctctctttactccccagaatga

SEQ ID NO: 283768 - DNA, 25 bp, Artificial
  Probe
caccaaaactcagtaccatatttcc

SEQ ID NO: 283769 - DNA, 25 bp, Artificial
  Probe
agtaccatatttccacgcctctctt

SEQ ID NO: 283770 - DNA, 25 bp, Artificial
  Probe
aaactcagtaccatatttccacgcc

SEQ ID NO: 283771 - DNA, 25 bp, Artificial
  Probe
aacacttcttctgtgtgtagtcgtg

SEQ ID NO: 283772 - DNA, 25 bp, Artificial
  Probe
caaaactcagtaccatatttccacg

SEQ ID NO: 283773 - DNA, 25 bp, Artificial
  Probe
caagcttctcaccaaaactcagtac

SEQ ID NO: 283774 - DNA, 25 bp, Artificial
  Probe
gtaccatatttccacgcctctcttt

SEQ ID NO: 283775 - DNA, 25 bp, Artificial
  Probe
gcctctctttactccccagaatgag

SEQ ID NO: 283776 - DNA, 25 bp, Artificial
  Probe
accaaaactcagtaccatatttcca

SEQ ID NO: 283777 - DNA, 25 bp, Artificial
  Probe
agcttctcaccaaaactcagtacca

SEQ ID NO: 283778 - DNA, 25 bp, Artificial
  Probe
ccaaaactcagtaccatatttccac

SEQ ID NO: 283779 - DNA, 25 bp, Artificial
  Probe
ccatatttccacgcctctctttact

SEQ ID NO: 283780 - DNA, 25 bp, Artificial
  Probe
ctcagtaccatatttccacgcctct

SEQ ID NO: 283781 - DNA, 25 bp, Artificial
  Probe
taccatatttccacgcctctcttta

SEQ ID NO: 283782 - DNA, 25 bp, Artificial
  Probe
tcaggcagctctggtacaaatgtga

SEQ ID NO: 283783 - DNA, 25 bp, Artificial
  Probe
gttacgtacttggtgcacccagaga

SEQ ID NO: 283784 - DNA, 25 bp, Artificial
  Probe
tcctttaccaaaatgggagaattga

SEQ ID NO: 283785 - DNA, 25 bp, Artificial
  Probe
tggatactgagagtctcctttacca

SEQ ID NO: 283786 - DNA, 25 bp, Artificial
  Probe
tttgttctggttacgtacttggtgc

SEQ ID NO: 283787 - DNA, 25 bp, Artificial
  Probe
gaatgagatcttccaagatccacaa

SEQ ID NO: 283788 - DNA, 25 bp, Artificial
  Probe
acgtggtgatgttcccatgttttgt

SEQ ID NO: 283789 - DNA, 25 bp, Artificial
  Probe
ttcgctagcagctgtggcccttgga

SEQ ID NO: 283790 - DNA, 25 bp, Artificial
  Probe
ttttttccaatcacagtgttacgtg

SEQ ID NO: 283791 - DNA, 25 bp, Artificial
  Probe
attgtatttcgctagcagctgtggc

SEQ ID NO: 283792 - DNA, 25 bp, Artificial
  Probe
tgacttatcatagcattgcatgtaa

SEQ ID NO: 283793 - DNA, 25 bp, Artificial
  Probe
tgcacccagagaaaattgtatttcg

SEQ ID NO: 283794 - DNA, 25 bp, Artificial
  Probe
gagtctcctttaccaaaatgggaga

SEQ ID NO: 283795 - DNA, 25 bp, Artificial
  Probe
attgtgtgaaacacttcttctgtgt

SEQ ID NO: 283796 - DNA, 25 bp, Artificial
  Probe
tcagtgtatttcaggcagctctggt

SEQ ID NO: 283797 - DNA, 25 bp, Artificial
  Probe
cgtacttggtgcacccagagaaaat

SEQ ID NO: 283798 - DNA, 25 bp, Artificial
  Probe
tcctctttgtcatcttgtgtcactg

SEQ ID NO: 283799 - DNA, 25 bp, Artificial
  Probe
tacgtacttggtgcacccagagaaa

SEQ ID NO: 283800 - DNA, 25 bp, Artificial
  Probe
cctttcagaggtgatttagttgcgt

SEQ ID NO: 283801 - DNA, 25 bp, Artificial
  Probe
gtctcctttaccaaaatgggagaat

SEQ ID NO: 283802 - DNA, 25 bp, Artificial
  Probe
ctttgtcatcttgtgtcactgcctt

SEQ ID NO: 283803 - DNA, 25 bp, Artificial
  Probe
agaatgagatcttccaagatccaca

SEQ ID NO: 283804 - DNA, 25 bp, Artificial
  Probe
tgtgtcactgcctttcagaggtgat

SEQ ID NO: 283805 - DNA, 25 bp, Artificial
  Probe
ccagaatgagatcttccaagatcca

SEQ ID NO: 283806 - DNA, 25 bp, Artificial
  Probe
tgaaatcagtgtatttcaggcagct

SEQ ID NO: 283807 - DNA, 25 bp, Artificial
  Probe
gatactgagagtctcctttaccaaa

SEQ ID NO: 283808 - DNA, 25 bp, Artificial
  Probe
agcattgcatgtaatacctaaattg

SEQ ID NO: 283809 - DNA, 25 bp, Artificial
  Probe
atcacagtgttacgtggtgatgttc

SEQ ID NO: 283810 - DNA, 25 bp, Artificial
  Probe
gtaatacctaaattgtgtgaaacac

SEQ ID NO: 283811 - DNA, 25 bp, Artificial
  Probe
atcttgtgtcactgcctttcagagg

SEQ ID NO: 283812 - DNA, 25 bp, Artificial
  Probe
ggcagctctggtacaaatgtgatag

SEQ ID NO: 283813 - DNA, 25 bp, Artificial
  Probe
tttcaggcagctctggtacaaatgt

SEQ ID NO: 283814 - DNA, 25 bp, Artificial
  Probe
acttgatttgttctggttacgtact

SEQ ID NO: 283815 - DNA, 25 bp, Artificial
  Probe
cccttggatactgagagtctccttt

SEQ ID NO: 283816 - DNA, 25 bp, Artificial
  Probe
tccaatcacagtgttacgtggtgat

SEQ ID NO: 283817 - DNA, 25 bp, Artificial
  Probe
cagctgtggcccttggatactgaga

SEQ ID NO: 283818 - DNA, 25 bp, Artificial
  Probe
tgaatgagacgcatccttgagaccc

SEQ ID NO: 283819 - DNA, 25 bp, Artificial
  Probe
cgctagcagctgtggcccttggata

SEQ ID NO: 283820 - DNA, 25 bp, Artificial
  Probe
cattgcatgtaatacctaaattgtg

SEQ ID NO: 283821 - DNA, 25 bp, Artificial
  Probe
ttgtcatcttgtgtcactgcctttc

SEQ ID NO: 283822 - DNA, 25 bp, Artificial
  Probe
aactgacttatcatagcattgcatg

SEQ ID NO: 283823 - DNA, 25 bp, Artificial
  Probe
actgagagtctcctttaccaaaatg

SEQ ID NO: 283824 - DNA, 25 bp, Artificial
  Probe
tcactgcctttcagaggtgatttag

SEQ ID NO: 283825 - DNA, 25 bp, Artificial
  Probe
tttgtatgctgaatgagacgcatcc

SEQ ID NO: 283826 - DNA, 25 bp, Artificial
  Probe
cttggtgcacccagagaaaattgta

SEQ ID NO: 283827 - DNA, 25 bp, Artificial
  Probe
cagctctggtacaaatgtgatagtg

SEQ ID NO: 283828 - DNA, 25 bp, Artificial
  Probe
gaacgacccaggaaaaggcaattat

SEQ ID NO: 283829 - DNA, 25 bp, Artificial
  Probe
ccagtatgtggcaggcaacttcccc

SEQ ID NO: 283830 - DNA, 25 bp, Artificial
  Probe
gagatgagaacgacccaggaaaagg

SEQ ID NO: 283831 - DNA, 25 bp, Artificial
  Probe
aggcgggctggcagaattccattcg

SEQ ID NO: 283832 - DNA, 25 bp, Artificial
  Probe
tatgtggcaggcaacttccccttct

SEQ ID NO: 283833 - DNA, 25 bp, Artificial
  Probe
tgagaacgacccaggaaaaggcaat

SEQ ID NO: 283834 - DNA, 25 bp, Artificial
  Probe
ttctacaagcgcacgaaggcgggct

SEQ ID NO: 283835 - DNA, 25 bp, Artificial
  Probe
aggcaattattggatgctggaccca

SEQ ID NO: 283836 - DNA, 25 bp, Artificial
  Probe
gcttcaagaaggtgcccagagatga

SEQ ID NO: 283837 - DNA, 25 bp, Artificial
  Probe
tgacgctcagccagatctaccagta

SEQ ID NO: 283838 - DNA, 25 bp, Artificial
  Probe
ttccccttctacaagcgcacgaagg

SEQ ID NO: 283839 - DNA, 25 bp, Artificial
  Probe
gagaacgacccaggaaaaggcaatt

SEQ ID NO: 283840 - DNA, 25 bp, Artificial
  Probe
gcaggttgacgctcagccagatcta

SEQ ID NO: 283841 - DNA, 25 bp, Artificial
  Probe
caattattggatgctggacccaaac

SEQ ID NO: 283842 - DNA, 25 bp, Artificial
  Probe
cgctcatcgccatggccattcaaag

SEQ ID NO: 283843 - DNA, 25 bp, Artificial
  Probe
acgacccaggaaaaggcaattattg

SEQ ID NO: 283844 - DNA, 25 bp, Artificial
  Probe
agccagatctaccagtatgtggcag

SEQ ID NO: 283845 - DNA, 25 bp, Artificial
  Probe
gacccaaactgtgagaagatgttcg

SEQ ID NO: 283846 - DNA, 25 bp, Artificial
  Probe
gattgcttcaagaaggtgcccagag

SEQ ID NO: 283847 - DNA, 25 bp, Artificial
  Probe
gccgcgtcgcaggttgacgctcagc

SEQ ID NO: 283848 - DNA, 25 bp, Artificial
  Probe
atggccattcaaagcgcgccgcgtc

SEQ ID NO: 283849 - DNA, 25 bp, Artificial
  Probe
cctgtcactcaatgattgcttcaag

SEQ ID NO: 283850 - DNA, 25 bp, Artificial
  Probe
ccagatctaccagtatgtggcaggc

SEQ ID NO: 283851 - DNA, 25 bp, Artificial
  Probe
aggtgcccagagatgagaacgaccc

SEQ ID NO: 283852 - DNA, 25 bp, Artificial
  Probe
catggccattcaaagcgcgccgcgt

SEQ ID NO: 283853 - DNA, 25 bp, Artificial
  Probe
aggttgacgctcagccagatctacc

SEQ ID NO: 283854 - DNA, 25 bp, Artificial
  Probe
tgcttcaagaaggtgcccagagatg

SEQ ID NO: 283855 - DNA, 25 bp, Artificial
  Probe
tctaccagtatgtggcaggcaactt

SEQ ID NO: 283856 - DNA, 25 bp, Artificial
  Probe
gcgccgcgtcgcaggttgacgctca

SEQ ID NO: 283857 - DNA, 25 bp, Artificial
  Probe
aagatgttcgacaatgggaacttca

SEQ ID NO: 283858 - DNA, 25 bp, Artificial
  Probe
agaaggtgcccagagatgagaacga

SEQ ID NO: 283859 - DNA, 25 bp, Artificial
  Probe
acgaaggcgggctggcagaattcca

SEQ ID NO: 283860 - DNA, 25 bp, Artificial
  Probe
attggatgctggacccaaactgtga

SEQ ID NO: 283861 - DNA, 25 bp, Artificial
  Probe
tggcaggcaacttccccttctacaa

SEQ ID NO: 283862 - DNA, 25 bp, Artificial
  Probe
actcaatgattgcttcaagaaggtg

SEQ ID NO: 283863 - DNA, 25 bp, Artificial
  Probe
gatgctggacccaaactgtgagaag

SEQ ID NO: 283864 - DNA, 25 bp, Artificial
  Probe
cgtcgcaggttgacgctcagccaga

SEQ ID NO: 283865 - DNA, 25 bp, Artificial
  Probe
atcgccatggccattcaaagcgcgc

SEQ ID NO: 283866 - DNA, 25 bp, Artificial
  Probe
ttcgacaatgggaacttcagaagga

SEQ ID NO: 283867 - DNA, 25 bp, Artificial
  Probe
acccaaactgtgagaagatgttcga

SEQ ID NO: 283868 - DNA, 25 bp, Artificial
  Probe
tctacaagcgcacgaaggcgggctg

SEQ ID NO: 283869 - DNA, 25 bp, Artificial
  Probe
gtgcccagagatgagaacgacccag

SEQ ID NO: 283870 - DNA, 25 bp, Artificial
  Probe
gacgctcagccagatctaccagtat

SEQ ID NO: 283871 - DNA, 25 bp, Artificial
  Probe
caatgattgcttcaagaaggtgccc

SEQ ID NO: 283872 - DNA, 25 bp, Artificial
  Probe
gatctaccagtatgtggcaggcaac

SEQ ID NO: 283873 - DNA, 25 bp, Artificial
  Probe
cgcgtcgcaggttgacgctcagcca

SEQ ID NO: 283874 - DNA, 25 bp, Artificial
  Probe
cgcagtccgaggatattggctgacc

SEQ ID NO: 283875 - DNA, 25 bp, Artificial
  Probe
ccttcccattggatcagaatcagaa

SEQ ID NO: 283876 - DNA, 25 bp, Artificial
  Probe
agtatgcccgggatgtgggcctcaa

SEQ ID NO: 283877 - DNA, 25 bp, Artificial
  Probe
gcagcgactgcatggcctcaatggg

SEQ ID NO: 283878 - DNA, 25 bp, Artificial
  Probe
tacctttatggcttctggcccttcc

SEQ ID NO: 283879 - DNA, 25 bp, Artificial
  Probe
atacctgccttcatggcccggggtg

SEQ ID NO: 283880 - DNA, 25 bp, Artificial
  Probe
tctgcaatcagatctacctttatgg

SEQ ID NO: 283881 - DNA, 25 bp, Artificial
  Probe
tgcgcctgctgcacgcagtccgagg

SEQ ID NO: 283882 - DNA, 25 bp, Artificial
  Probe
aggacctagtgaatgccacgtggcg

SEQ ID NO: 283883 - DNA, 25 bp, Artificial
  Probe
cctcagtcatccagcgggcctttga

SEQ ID NO: 283884 - DNA, 25 bp, Artificial
  Probe
attatgacagcctcaagtatggcta

SEQ ID NO: 283885 - DNA, 25 bp, Artificial
  Probe
tttgaggacctagtgaatgccacgt

SEQ ID NO: 283886 - DNA, 25 bp, Artificial
  Probe
atgcccgggatgtgggcctcaagac

SEQ ID NO: 283887 - DNA, 25 bp, Artificial
  Probe
tgggtcaatgctctcatcctgaagc

SEQ ID NO: 283888 - DNA, 25 bp, Artificial
  Probe
ccctcaagagcctacatgaacaggg

SEQ ID NO: 283889 - DNA, 25 bp, Artificial
  Probe
cccattggatcagaatcagaacccc

SEQ ID NO: 283890 - DNA, 25 bp, Artificial
  Probe
ggagaagctactgcagcgactgcat

SEQ ID NO: 283891 - DNA, 25 bp, Artificial
  Probe
tggatacctgccttcatggcccggg

SEQ ID NO: 283892 - DNA, 25 bp, Artificial
  Probe
atcagaatcagaaccccgtcaagta

SEQ ID NO: 283893 - DNA, 25 bp, Artificial
  Probe
agaagctactgcagcgactgcatgg

SEQ ID NO: 283894 - DNA, 25 bp, Artificial
  Probe
gcacgcagtccgaggatattggctg

SEQ ID NO: 283895 - DNA, 25 bp, Artificial
  Probe
gtcaacgtacgcacagcttaccctt

SEQ ID NO: 283896 - DNA, 25 bp, Artificial
  Probe
gtaccactattatgacagcctcaag

SEQ ID NO: 283897 - DNA, 25 bp, Artificial
  Probe
atccagcgggcctttgaggacctag

SEQ ID NO: 283898 - DNA, 25 bp, Artificial
  Probe
ctggccacacgcttctgcaatcaga

SEQ ID NO: 283899 - DNA, 25 bp, Artificial
  Probe
ccttggaattcaaggccctcaagag

SEQ ID NO: 283900 - DNA, 25 bp, Artificial
  Probe
cactattatgacagcctcaagtatg

SEQ ID NO: 283901 - DNA, 25 bp, Artificial
  Probe
cacaccatgcccttggaattcaagg

SEQ ID NO: 283902 - DNA, 25 bp, Artificial
  Probe
tgctgcacgcagtccgaggatattg

SEQ ID NO: 283903 - DNA, 25 bp, Artificial
  Probe
caatgggagcatactgtggatacct

SEQ ID NO: 283904 - DNA, 25 bp, Artificial
  Probe
tagtgaccatgaacccctcagtcat

SEQ ID NO: 283905 - DNA, 25 bp, Artificial
  Probe
gagcatactgtggatacctgccttc

SEQ ID NO: 283906 - DNA, 25 bp, Artificial
  Probe
gactgcatggcctcaatgggagcat

SEQ ID NO: 283907 - DNA, 25 bp, Artificial
  Probe
gcctacatgaacagggggcattgaa

SEQ ID NO: 283908 - DNA, 25 bp, Artificial
  Probe
tgatgtacaccctggccacacgctt

SEQ ID NO: 283909 - DNA, 25 bp, Artificial
  Probe
ggatcagaatcagaaccccgtcaag

SEQ ID NO: 283910 - DNA, 25 bp, Artificial
  Probe
aattcaaggccctcaagagcctaca

SEQ ID NO: 283911 - DNA, 25 bp, Artificial
  Probe
gtcaagtaccactattatgacagcc

SEQ ID NO: 283912 - DNA, 25 bp, Artificial
  Probe
gccacacgcttctgcaatcagatct

SEQ ID NO: 283913 - DNA, 25 bp, Artificial
  Probe
ccatgtcaacgtacgcacagcttac

SEQ ID NO: 283914 - DNA, 25 bp, Artificial
  Probe
ggatgtgggcctcaagactgaccta

SEQ ID NO: 283915 - DNA, 25 bp, Artificial
  Probe
cagttcaggagtatgcccgggatgt

SEQ ID NO: 283916 - DNA, 25 bp, Artificial
  Probe
ggcattgaaactgactgtcggccag

SEQ ID NO: 283917 - DNA, 25 bp, Artificial
  Probe
catactgtggatacctgccttcatg

SEQ ID NO: 283918 - DNA, 25 bp, Artificial
  Probe
ccgtcaagtaccactattatgacag

SEQ ID NO: 283919 - DNA, 25 bp, Artificial
  Probe
acagcctcaagtatggctacacctc

SEQ ID NO: 283920 - DNA, 25 bp, Artificial
  Probe
tcactactgcaacattaggaatgtc

SEQ ID NO: 283921 - DNA, 25 bp, Artificial
  Probe
gtcactactgcaacattaggaatgt

SEQ ID NO: 283922 - DNA, 25 bp, Artificial
  Probe
gaaaatgtcactactgcaacattag

SEQ ID NO: 283923 - DNA, 25 bp, Artificial
  Probe
atgtgttcatggggacttaaggaaa

SEQ ID NO: 283924 - DNA, 25 bp, Artificial
  Probe
tgtcactactgcaacattaggaatg

SEQ ID NO: 283925 - DNA, 25 bp, Artificial
  Probe
aagcaatgtgttcatggggacttaa

SEQ ID NO: 283926 - DNA, 25 bp, Artificial
  Probe
aaatgtcactactgcaacattagga

SEQ ID NO: 283927 - DNA, 25 bp, Artificial
  Probe
aatgtcactactgcaacattaggaa

SEQ ID NO: 283928 - DNA, 25 bp, Artificial
  Probe
gtgttcatggggacttaaggaaaat

SEQ ID NO: 283929 - DNA, 25 bp, Artificial
  Probe
cactactgcaacattaggaatgtcc

SEQ ID NO: 283930 - DNA, 25 bp, Artificial
  Probe
gcaatgtgttcatggggacttaagg

SEQ ID NO: 283931 - DNA, 25 bp, Artificial
  Probe
aaagcaatgtgttcatggggactta

SEQ ID NO: 283932 - DNA, 25 bp, Artificial
  Probe
acaaaagcaatgtgttcatggggac

SEQ ID NO: 283933 - DNA, 25 bp, Artificial
  Probe
tactgcaacattaggaatgtcctgc

SEQ ID NO: 283934 - DNA, 25 bp, Artificial
  Probe
aaaagcaatgtgttcatggggactt

SEQ ID NO: 283935 - DNA, 25 bp, Artificial
  Probe
tgtgttcatggggacttaaggaaaa

SEQ ID NO: 283936 - DNA, 25 bp, Artificial
  Probe
aatgtgttcatggggacttaaggaa

SEQ ID NO: 283937 - DNA, 25 bp, Artificial
  Probe
aaaatgtcactactgcaacattagg

SEQ ID NO: 283938 - DNA, 25 bp, Artificial
  Probe
atgtcactactgcaacattaggaat

SEQ ID NO: 283939 - DNA, 25 bp, Artificial
  Probe
caaaagcaatgtgttcatggggact

SEQ ID NO: 283940 - DNA, 25 bp, Artificial
  Probe
caatgtgttcatggggacttaagga

SEQ ID NO: 283941 - DNA, 25 bp, Artificial
  Probe
tgttcatggggacttaaggaaaatg

SEQ ID NO: 283942 - DNA, 25 bp, Artificial
  Probe
gttcatggggacttaaggaaaatgt

SEQ ID NO: 283943 - DNA, 25 bp, Artificial
  Probe
ggaaaatgtcactactgcaacatta

SEQ ID NO: 283944 - DNA, 25 bp, Artificial
  Probe
agcaatgtgttcatggggacttaag

SEQ ID NO: 283945 - DNA, 25 bp, Artificial
  Probe
ctactgcaacattaggaatgtcctg

SEQ ID NO: 283946 - DNA, 25 bp, Artificial
  Probe
actactgcaacattaggaatgtcct

SEQ ID NO: 283947 - DNA, 25 bp, Artificial
  Probe
tgttcggtgagttggggtataccac

SEQ ID NO: 283948 - DNA, 25 bp, Artificial
  Probe
aagtccatgactccacttgactttg

SEQ ID NO: 283949 - DNA, 25 bp, Artificial
  Probe
agtccatgactccacttgactttgg

SEQ ID NO: 283950 - DNA, 25 bp, Artificial
  Probe
cataaagcacacacttagtgccctg

SEQ ID NO: 283951 - DNA, 25 bp, Artificial
  Probe
cagtcgtatgcgaattgaaaacaga

SEQ ID NO: 283952 - DNA, 25 bp, Artificial
  Probe
tgtgtaaacatcacaccaccagtcg

SEQ ID NO: 283953 - DNA, 25 bp, Artificial
  Probe
gccagctccaagagcggccataaga

SEQ ID NO: 283954 - DNA, 25 bp, Artificial
  Probe
gtatcataaagcacacacttagtgc

SEQ ID NO: 283955 - DNA, 25 bp, Artificial
  Probe
atctctctgtaatggtgagccatgg

SEQ ID NO: 283956 - DNA, 25 bp, Artificial
  Probe
tcacaccaccagtcgtatgcgaatt

SEQ ID NO: 283957 - DNA, 25 bp, Artificial
  Probe
ttggggtataccacgactatggtgg

SEQ ID NO: 283958 - DNA, 25 bp, Artificial
  Probe
agccagctccaagagcggccataag

SEQ ID NO: 283959 - DNA, 25 bp, Artificial
  Probe
ccacgactatggtgggaaaaaccat

SEQ ID NO: 283960 - DNA, 25 bp, Artificial
  Probe
tacgatggtgtatctctctgtaatg

SEQ ID NO: 283961 - DNA, 25 bp, Artificial
  Probe
gtccatgactccacttgactttgga

SEQ ID NO: 283962 - DNA, 25 bp, Artificial
  Probe
gtatctctctgtaatggtgagccat

SEQ ID NO: 283963 - DNA, 25 bp, Artificial
  Probe
acacatacgatggtgtatctctctg

SEQ ID NO: 283964 - DNA, 25 bp, Artificial
  Probe
gacacatacgatggtgtatctctct

SEQ ID NO: 283965 - DNA, 25 bp, Artificial
  Probe
gagaaacaagccagctccaagagcg

SEQ ID NO: 283966 - DNA, 25 bp, Artificial
  Probe
gtgtaaacatcacaccaccagtcgt

SEQ ID NO: 283967 - DNA, 25 bp, Artificial
  Probe
ccaagagcggccataagaaacagaa

SEQ ID NO: 283968 - DNA, 25 bp, Artificial
  Probe
gaaacaagccagctccaagagcggc

SEQ ID NO: 283969 - DNA, 25 bp, Artificial
  Probe
tataccacgactatggtgggaaaaa

SEQ ID NO: 283970 - DNA, 25 bp, Artificial
  Probe
ctgccctgctgtatcataaagcaca

SEQ ID NO: 283971 - DNA, 25 bp, Artificial
  Probe
cgatggtgtatctctctgtaatggt

SEQ ID NO: 283972 - DNA, 25 bp, Artificial
  Probe
gctgtatcataaagcacacacttag

SEQ ID NO: 283973 - DNA, 25 bp, Artificial
  Probe
acaagccagctccaagagcggccat

SEQ ID NO: 283974 - DNA, 25 bp, Artificial
  Probe
gggtataccacgactatggtgggaa

SEQ ID NO: 283975 - DNA, 25 bp, Artificial
  Probe
accaccagtcgtatgcgaattgaaa

SEQ ID NO: 283976 - DNA, 25 bp, Artificial
  Probe
ggtgtatctctctgtaatggtgagc

SEQ ID NO: 283977 - DNA, 25 bp, Artificial
  Probe
atcacaccaccagtcgtatgcgaat

SEQ ID NO: 283978 - DNA, 25 bp, Artificial
  Probe
tctgccctgctgtatcataaagcac

SEQ ID NO: 283979 - DNA, 25 bp, Artificial
  Probe
acaccaccagtcgtatgcgaattga

SEQ ID NO: 283980 - DNA, 25 bp, Artificial
  Probe
agcaagtccatgactccacttgact

SEQ ID NO: 283981 - DNA, 25 bp, Artificial
  Probe
aaaggacacatacgatggtgtatct

SEQ ID NO: 283982 - DNA, 25 bp, Artificial
  Probe
tccatgactccacttgactttggaa

SEQ ID NO: 283983 - DNA, 25 bp, Artificial
  Probe
ggacacatacgatggtgtatctctc

SEQ ID NO: 283984 - DNA, 25 bp, Artificial
  Probe
ctctgtaatggtgagccatggtgca

SEQ ID NO: 283985 - DNA, 25 bp, Artificial
  Probe
gcaagtccatgactccacttgactt

SEQ ID NO: 283986 - DNA, 25 bp, Artificial
  Probe
tgtatcataaagcacacacttagtg

SEQ ID NO: 283987 - DNA, 25 bp, Artificial
  Probe
acgatggtgtatctctctgtaatgg

SEQ ID NO: 283988 - DNA, 25 bp, Artificial
  Probe
catacgatggtgtatctctctgtaa

SEQ ID NO: 283989 - DNA, 25 bp, Artificial
  Probe
ccaccagtcgtatgcgaattgaaaa

SEQ ID NO: 283990 - DNA, 25 bp, Artificial
  Probe
gtataccacgactatggtgggaaaa

SEQ ID NO: 283991 - DNA, 25 bp, Artificial
  Probe
aaggacacatacgatggtgtatctc

SEQ ID NO: 283992 - DNA, 25 bp, Artificial
  Probe
gccctgctgtatcataaagcacaca

SEQ ID NO: 283993 - DNA, 25 bp, Artificial
  Probe
ttctgtgccacctgtgctggggccg

SEQ ID NO: 283994 - DNA, 25 bp, Artificial
  Probe
ccccagtggctatctattagacttg

SEQ ID NO: 283995 - DNA, 25 bp, Artificial
  Probe
cagagctgtagtgtgagctactact

SEQ ID NO: 283996 - DNA, 25 bp, Artificial
  Probe
aatgggccaggattcaagaactgct

SEQ ID NO: 283997 - DNA, 25 bp, Artificial
  Probe
caacaactgtgctgcaaaacatgta

SEQ ID NO: 283998 - DNA, 25 bp, Artificial
  Probe
agaactgctccagctgccccagtgg

SEQ ID NO: 283999 - DNA, 25 bp, Artificial
  Probe
tacttggaccactctttagagggtg

SEQ ID NO: 284000 - DNA, 25 bp, Artificial
  Probe
cagctgccccagtggctatctatta

SEQ ID NO: 284001 - DNA, 25 bp, Artificial
  Probe
gttcctgtagacttatagattattc

SEQ ID NO: 284002 - DNA, 25 bp, Artificial
  Probe
gtacagagctgtagtgtgagctact

SEQ ID NO: 284003 - DNA, 25 bp, Artificial
  Probe
tgtgctgcaaaacatgtacattcca

SEQ ID NO: 284004 - DNA, 25 bp, Artificial
  Probe
atgcaatgggccaggattcaagaac

SEQ ID NO: 284005 - DNA, 25 bp, Artificial
  Probe
cagtggctatctattagacttggga

SEQ ID NO: 284006 - DNA, 25 bp, Artificial
  Probe
tgtattaactgcaccgagggttatg

SEQ ID NO: 284007 - DNA, 25 bp, Artificial
  Probe
aactgtgctgcaaaacatgtacatt

SEQ ID NO: 284008 - DNA, 25 bp, Artificial
  Probe
gatacaagtcctgcaagagatgtga

SEQ ID NO: 284009 - DNA, 25 bp, Artificial
  Probe
tgccccagtggctatctattagact

SEQ ID NO: 284010 - DNA, 25 bp, Artificial
  Probe
gattcaagaactgctccagctgccc

SEQ ID NO: 284011 - DNA, 25 bp, Artificial
  Probe
cagatgggagccatctgcaaggatg

SEQ ID NO: 284012 - DNA, 25 bp, Artificial
  Probe
gtagtgtgagctactacttggacca

SEQ ID NO: 284013 - DNA, 25 bp, Artificial
  Probe
cttgacatgcaatgggccaggattc

SEQ ID NO: 284014 - DNA, 25 bp, Artificial
  Probe
aggattcaagaactgctccagctgc

SEQ ID NO: 284015 - DNA, 25 bp, Artificial
  Probe
gaaagttctacaacaactgtgctgc

SEQ ID NO: 284016 - DNA, 25 bp, Artificial
  Probe
gatgtgataacagctgcttgacatg

SEQ ID NO: 284017 - DNA, 25 bp, Artificial
  Probe
acaactgtgctgcaaaacatgtaca

SEQ ID NO: 284018 - DNA, 25 bp, Artificial
  Probe
ggtggatacaagtcctgcaagagat

SEQ ID NO: 284019 - DNA, 25 bp, Artificial
  Probe
atgtgataacagctgcttgacatgc

SEQ ID NO: 284020 - DNA, 25 bp, Artificial
  Probe
gttctacaacaactgtgctgcaaaa

SEQ ID NO: 284021 - DNA, 25 bp, Artificial
  Probe
gtcctgcaagagatgtgataacagc

SEQ ID NO: 284022 - DNA, 25 bp, Artificial
  Probe
ggatgtattaactgcaccgagggtt

SEQ ID NO: 284023 - DNA, 25 bp, Artificial
  Probe
catccctgttcctgtagacttatag

SEQ ID NO: 284024 - DNA, 25 bp, Artificial
  Probe
ctgcaaaacatgtacattccaaggc

SEQ ID NO: 284025 - DNA, 25 bp, Artificial
  Probe
agtggtcacgattgccagccctgcc

SEQ ID NO: 284026 - DNA, 25 bp, Artificial
  Probe
ctctctctatctcaagtttgtgcag

SEQ ID NO: 284027 - DNA, 25 bp, Artificial
  Probe
catctgcaaggatgcaacggaagag

SEQ ID NO: 284028 - DNA, 25 bp, Artificial
  Probe
gcaaaacatgtacattccaaggctg

SEQ ID NO: 284029 - DNA, 25 bp, Artificial
  Probe
ttaactgcaccgagggttatgtcat

SEQ ID NO: 284030 - DNA, 25 bp, Artificial
  Probe
ggccggagccgatggatgtattaac

SEQ ID NO: 284031 - DNA, 25 bp, Artificial
  Probe
ctgtgctgcaaaacatgtacattcc

SEQ ID NO: 284032 - DNA, 25 bp, Artificial
  Probe
tacaacaactgtgctgcaaaacatg

SEQ ID NO: 284033 - DNA, 25 bp, Artificial
  Probe
ctgcaccgagggttatgtcatggag

SEQ ID NO: 284034 - DNA, 25 bp, Artificial
  Probe
acaagtcctgcaagagatgtgataa

SEQ ID NO: 284035 - DNA, 25 bp, Artificial
  Probe
cgcttctgtgccacctgtgctgggg

SEQ ID NO: 284036 - DNA, 25 bp, Artificial
  Probe
aacatgtacattccaaggctgagca

SEQ ID NO: 284037 - DNA, 25 bp, Artificial
  Probe
tccagctgccccagtggctatctat

SEQ ID NO: 284038 - DNA, 25 bp, Artificial
  Probe
ccggagccgatggatgtattaactg

SEQ ID NO: 284039 - DNA, 25 bp, Artificial
  Probe
tccaatgctatggagtacaagaaga

SEQ ID NO: 284040 - DNA, 25 bp, Artificial
  Probe
ccagccagatgtgaaggacgaagaa

SEQ ID NO: 284041 - DNA, 25 bp, Artificial
  Probe
cagtccaatgctatggagtacaaga

SEQ ID NO: 284042 - DNA, 25 bp, Artificial
  Probe
aacagtccaatgctatggagtacaa

SEQ ID NO: 284043 - DNA, 25 bp, Artificial
  Probe
gtggtctacattctgactgtagcgt

SEQ ID NO: 284044 - DNA, 25 bp, Artificial
  Probe
ctgaagagcgtccatggctttgggt

SEQ ID NO: 284045 - DNA, 25 bp, Artificial
  Probe
tggctttgggtggtctacattctga

SEQ ID NO: 284046 - DNA, 25 bp, Artificial
  Probe
agcgtccatggctttgggtggtcta

SEQ ID NO: 284047 - DNA, 25 bp, Artificial
  Probe
ctttgggtggtctacattctgactg

SEQ ID NO: 284048 - DNA, 25 bp, Artificial
  Probe
agctgaagagcgtccatggctttgg

SEQ ID NO: 284049 - DNA, 25 bp, Artificial
  Probe
tggtctacattctgactgtagcgtt

SEQ ID NO: 284050 - DNA, 25 bp, Artificial
  Probe
ttgccagtgttccttgtgatcctct

SEQ ID NO: 284051 - DNA, 25 bp, Artificial
  Probe
agtccaatgctatggagtacaagaa

SEQ ID NO: 284052 - DNA, 25 bp, Artificial
  Probe
ccaatgctatggagtacaagaagac

SEQ ID NO: 284053 - DNA, 25 bp, Artificial
  Probe
tctacattctgactgtagcgttgcc

SEQ ID NO: 284054 - DNA, 25 bp, Artificial
  Probe
agtgttccttgtgatcctcttctgc

SEQ ID NO: 284055 - DNA, 25 bp, Artificial
  Probe
catggctttgggtggtctacattct

SEQ ID NO: 284056 - DNA, 25 bp, Artificial
  Probe
gaaagaaacagtccaatgctatgga

SEQ ID NO: 284057 - DNA, 25 bp, Artificial
  Probe
tgttccttgtgatcctcttctgctg

SEQ ID NO: 284058 - DNA, 25 bp, Artificial
  Probe
gtccaatgctatggagtacaagaag

SEQ ID NO: 284059 - DNA, 25 bp, Artificial
  Probe
gaaacagtccaatgctatggagtac

SEQ ID NO: 284060 - DNA, 25 bp, Artificial
  Probe
tgccagtgttccttgtgatcctctt

SEQ ID NO: 284061 - DNA, 25 bp, Artificial
  Probe
ctacattctgactgtagcgttgcca

SEQ ID NO: 284062 - DNA, 25 bp, Artificial
  Probe
cgttgccagtgttccttgtgatcct

SEQ ID NO: 284063 - DNA, 25 bp, Artificial
  Probe
cccagccagatgtgaaggacgaaga

SEQ ID NO: 284064 - DNA, 25 bp, Artificial
  Probe
gggtggtctacattctgactgtagc

SEQ ID NO: 284065 - DNA, 25 bp, Artificial
  Probe
tgtagcgttgccagtgttccttgtg

SEQ ID NO: 284066 - DNA, 25 bp, Artificial
  Probe
agcgttgccagtgttccttgtgatc

SEQ ID NO: 284067 - DNA, 25 bp, Artificial
  Probe
cgtccatggctttgggtggtctaca

SEQ ID NO: 284068 - DNA, 25 bp, Artificial
  Probe
caatgctatggagtacaagaagaca

SEQ ID NO: 284069 - DNA, 25 bp, Artificial
  Probe
gttgccagtgttccttgtgatcctc

SEQ ID NO: 284070 - DNA, 25 bp, Artificial
  Probe
gcgtccatggctttgggtggtctac

SEQ ID NO: 284071 - DNA, 25 bp, Artificial
  Probe
tttgggtggtctacattctgactgt

SEQ ID NO: 284072 - DNA, 25 bp, Artificial
  Probe
ttgggtggtctacattctgactgta

SEQ ID NO: 284073 - DNA, 25 bp, Artificial
  Probe
acagtccaatgctatggagtacaag

SEQ ID NO: 284074 - DNA, 25 bp, Artificial
  Probe
gccagtgttccttgtgatcctcttc

SEQ ID NO: 284075 - DNA, 25 bp, Artificial
  Probe
tgactgtagcgttgccagtgttcct

SEQ ID NO: 284076 - DNA, 25 bp, Artificial
  Probe
gctttgggtggtctacattctgact

SEQ ID NO: 284077 - DNA, 25 bp, Artificial
  Probe
ctgactgtagcgttgccagtgttcc

SEQ ID NO: 284078 - DNA, 25 bp, Artificial
  Probe
tgggtggtctacattctgactgtag

SEQ ID NO: 284079 - DNA, 25 bp, Artificial
  Probe
gtctacattctgactgtagcgttgc

SEQ ID NO: 284080 - DNA, 25 bp, Artificial
  Probe
tacattctgactgtagcgttgccag

SEQ ID NO: 284081 - DNA, 25 bp, Artificial
  Probe
tagcgttgccagtgttccttgtgat

SEQ ID NO: 284082 - DNA, 25 bp, Artificial
  Probe
gtgttccttgtgatcctcttctgct

SEQ ID NO: 284083 - DNA, 25 bp, Artificial
  Probe
ggtctacattctgactgtagcgttg

SEQ ID NO: 284084 - DNA, 25 bp, Artificial
  Probe
cattctgactgtagcgttgccagtg

SEQ ID NO: 284085 - DNA, 25 bp, Artificial
  Probe
ttgcctgtcatgagaagctgcatga

SEQ ID NO: 284086 - DNA, 25 bp, Artificial
  Probe
ggaaagttgatctttgcctgtcatg

SEQ ID NO: 284087 - DNA, 25 bp, Artificial
  Probe
gaggacctggacacaaaccaggaca

SEQ ID NO: 284088 - DNA, 25 bp, Artificial
  Probe
gcttactaaatgaccttggttctgg

SEQ ID NO: 284089 - DNA, 25 bp, Artificial
  Probe
ggacatcctgacaccctgaacaagg

SEQ ID NO: 284090 - DNA, 25 bp, Artificial
  Probe
ttgatctttgcctgtcatgagaagc

SEQ ID NO: 284091 - DNA, 25 bp, Artificial
  Probe
gctgccaaaacaggatctcagctgg

SEQ ID NO: 284092 - DNA, 25 bp, Artificial
  Probe
aaggacttgccaaattttctgaaga

SEQ ID NO: 284093 - DNA, 25 bp, Artificial
  Probe
atcctgacaccctgaacaaggcgga

SEQ ID NO: 284094 - DNA, 25 bp, Artificial
  Probe
ggacctggacacaaaccaggacaat

SEQ ID NO: 284095 - DNA, 25 bp, Artificial
  Probe
ctgcccaaccaagtctaaagggaat

SEQ ID NO: 284096 - DNA, 25 bp, Artificial
  Probe
gcccaaccaagtctaaagggaatag

SEQ ID NO: 284097 - DNA, 25 bp, Artificial
  Probe
gacatcatggaggacctggacacaa

SEQ ID NO: 284098 - DNA, 25 bp, Artificial
  Probe
agtatggacatcctgacaccctgaa

SEQ ID NO: 284099 - DNA, 25 bp, Artificial
  Probe
aagatggctgccaaaacaggatctc

SEQ ID NO: 284100 - DNA, 25 bp, Artificial
  Probe
aggacctggacacaaaccaggacaa

SEQ ID NO: 284101 - DNA, 25 bp, Artificial
  Probe
atctgcccaaccaagtctaaaggga

SEQ ID NO: 284102 - DNA, 25 bp, Artificial
  Probe
acttgccaaattttctgaagaggga

SEQ ID NO: 284103 - DNA, 25 bp, Artificial
  Probe
actaaatgaccttggttctggggct

SEQ ID NO: 284104 - DNA, 25 bp, Artificial
  Probe
tggacatcctgacaccctgaacaag

SEQ ID NO: 284105 - DNA, 25 bp, Artificial
  Probe
agacatcatggaggacctggacaca

SEQ ID NO: 284106 - DNA, 25 bp, Artificial
  Probe
aatagcttactaaatgaccttggtt

SEQ ID NO: 284107 - DNA, 25 bp, Artificial
  Probe
cacggcaaaggctgtgggaagtaat

SEQ ID NO: 284108 - DNA, 25 bp, Artificial
  Probe
tctttgcctgtcatgagaagctgca

SEQ ID NO: 284109 - DNA, 25 bp, Artificial
  Probe
atggctgccaaaacaggatctcagc

SEQ ID NO: 284110 - DNA, 25 bp, Artificial
  Probe
aacaggatctcagctggagcgcagc

SEQ ID NO: 284111 - DNA, 25 bp, Artificial
  Probe
ggctgccaaaacaggatctcagctg

SEQ ID NO: 284112 - DNA, 25 bp, Artificial
  Probe
acctggacacaaaccaggacaatca

SEQ ID NO: 284113 - DNA, 25 bp, Artificial
  Probe
atcatggaggacctggacacaaacc

SEQ ID NO: 284114 - DNA, 25 bp, Artificial
  Probe
ttactaaatgaccttggttctgggg

SEQ ID NO: 284115 - DNA, 25 bp, Artificial
  Probe
taaggacttgccaaattttctgaag

SEQ ID NO: 284116 - DNA, 25 bp, Artificial
  Probe
tgatctttgcctgtcatgagaagct

SEQ ID NO: 284117 - DNA, 25 bp, Artificial
  Probe
tatggacatcctgacaccctgaaca

SEQ ID NO: 284118 - DNA, 25 bp, Artificial
  Probe
gacaccctgaacaaggcggaattca

SEQ ID NO: 284119 - DNA, 25 bp, Artificial
  Probe
aaagttgatctttgcctgtcatgag

SEQ ID NO: 284120 - DNA, 25 bp, Artificial
  Probe
caggatctcagctggagcgcagcat

SEQ ID NO: 284121 - DNA, 25 bp, Artificial
  Probe
aagtatggacatcctgacaccctga

SEQ ID NO: 284122 - DNA, 25 bp, Artificial
  Probe
tcctgacaccctgaacaaggcggaa

SEQ ID NO: 284123 - DNA, 25 bp, Artificial
  Probe
acatctgcccaaccaagtctaaagg

SEQ ID NO: 284124 - DNA, 25 bp, Artificial
  Probe
tttgcctgtcatgagaagctgcatg

SEQ ID NO: 284125 - DNA, 25 bp, Artificial
  Probe
gatctttgcctgtcatgagaagctg

SEQ ID NO: 284126 - DNA, 25 bp, Artificial
  Probe
gatggctgccaaaacaggatctcag

SEQ ID NO: 284127 - DNA, 25 bp, Artificial
  Probe
acaccctgaacaaggcggaattcaa

SEQ ID NO: 284128 - DNA, 25 bp, Artificial
  Probe
atagcttactaaatgaccttggttc

SEQ ID NO: 284129 - DNA, 25 bp, Artificial
  Probe
ccaaaacaggatctcagctggagcg

SEQ ID NO: 284130 - DNA, 25 bp, Artificial
  Probe
catggaggacctggacacaaaccag

SEQ ID NO: 284131 - DNA, 25 bp, Artificial
  Probe
agatgtagcctgtgccccagaacaa

SEQ ID NO: 284132 - DNA, 25 bp, Artificial
  Probe
tctgttaagcctcctctcggggaag

SEQ ID NO: 284133 - DNA, 25 bp, Artificial
  Probe
taacacccttacttagtagtgagga

SEQ ID NO: 284134 - DNA, 25 bp, Artificial
  Probe
actgacatgaaccaggttccagagg

SEQ ID NO: 284135 - DNA, 25 bp, Artificial
  Probe
cctgtgccccagaacaagctttctt

SEQ ID NO: 284136 - DNA, 25 bp, Artificial
  Probe
gctcccggcagttggttctggtgac

SEQ ID NO: 284137 - DNA, 25 bp, Artificial
  Probe
ctgacatgaaccaggttccagaggc

SEQ ID NO: 284138 - DNA, 25 bp, Artificial
  Probe
gttggttctggtgacactgacatga

SEQ ID NO: 284139 - DNA, 25 bp, Artificial
  Probe
ggggctgccactgagcacacacact

SEQ ID NO: 284140 - DNA, 25 bp, Artificial
  Probe
tggttctggtgacactgacatgaac

SEQ ID NO: 284141 - DNA, 25 bp, Artificial
  Probe
catctcctgtagctcccggcagttg

SEQ ID NO: 284142 - DNA, 25 bp, Artificial
  Probe
gcctgtgccccagaacaagctttct

SEQ ID NO: 284143 - DNA, 25 bp, Artificial
  Probe
atctcctgtagctcccggcagttgg

SEQ ID NO: 284144 - DNA, 25 bp, Artificial
  Probe
aaatgtgaccagttcaaattatgtc

SEQ ID NO: 284145 - DNA, 25 bp, Artificial
  Probe
cccggcagttggttctggtgacact

SEQ ID NO: 284146 - DNA, 25 bp, Artificial
  Probe
ctggtgacactgacatgaaccaggt

SEQ ID NO: 284147 - DNA, 25 bp, Artificial
  Probe
cagttggttctggtgacactgacat

SEQ ID NO: 284148 - DNA, 25 bp, Artificial
  Probe
ctcccggcagttggttctggtgaca

SEQ ID NO: 284149 - DNA, 25 bp, Artificial
  Probe
cactccagccataggcctgttcttt

SEQ ID NO: 284150 - DNA, 25 bp, Artificial
  Probe
ttcctttctgaaaaatgtgaccagt

SEQ ID NO: 284151 - DNA, 25 bp, Artificial
  Probe
acatgaaccaggttccagaggctca

SEQ ID NO: 284152 - DNA, 25 bp, Artificial
  Probe
catgaaccaggttccagaggctcac

SEQ ID NO: 284153 - DNA, 25 bp, Artificial
  Probe
ggtgacactgacatgaaccaggttc

SEQ ID NO: 284154 - DNA, 25 bp, Artificial
  Probe
tagctcccggcagttggttctggtg

SEQ ID NO: 284155 - DNA, 25 bp, Artificial
  Probe
gacactgacatgaaccaggttccag

SEQ ID NO: 284156 - DNA, 25 bp, Artificial
  Probe
gaaccaggttccagaggctcacacc

SEQ ID NO: 284157 - DNA, 25 bp, Artificial
  Probe
ggatcatctcaccttttctggttcc

SEQ ID NO: 284158 - DNA, 25 bp, Artificial
  Probe
gcagttggttctggtgacactgaca

SEQ ID NO: 284159 - DNA, 25 bp, Artificial
  Probe
gagggccatctcctgtagctcccgg

SEQ ID NO: 284160 - DNA, 25 bp, Artificial
  Probe
tgacatgaaccaggttccagaggct

SEQ ID NO: 284161 - DNA, 25 bp, Artificial
  Probe
acactgacatgaaccaggttccaga

SEQ ID NO: 284162 - DNA, 25 bp, Artificial
  Probe
ctgtgccccagaacaagctttcttt

SEQ ID NO: 284163 - DNA, 25 bp, Artificial
  Probe
gtagctcccggcagttggttctggt

SEQ ID NO: 284164 - DNA, 25 bp, Artificial
  Probe
agcctgtgccccagaacaagctttc

SEQ ID NO: 284165 - DNA, 25 bp, Artificial
  Probe
ggcagttggttctggtgacactgac

SEQ ID NO: 284166 - DNA, 25 bp, Artificial
  Probe
aatgtgaccagttcaaattatgtcc

SEQ ID NO: 284167 - DNA, 25 bp, Artificial
  Probe
tcctttctgaaaaatgtgaccagtt

SEQ ID NO: 284168 - DNA, 25 bp, Artificial
  Probe
gagatgtagcctgtgccccagaaca

SEQ ID NO: 284169 - DNA, 25 bp, Artificial
  Probe
actggatcatctcaccttttctggt

SEQ ID NO: 284170 - DNA, 25 bp, Artificial
  Probe
tgactggatcatctcaccttttctg

SEQ ID NO: 284171 - DNA, 25 bp, Artificial
  Probe
ttggttctggtgacactgacatgaa

SEQ ID NO: 284172 - DNA, 25 bp, Artificial
  Probe
ctaacacccttacttagtagtgagg

SEQ ID NO: 284173 - DNA, 25 bp, Artificial
  Probe
ctctgttaagcctcctctcggggaa

SEQ ID NO: 284174 - DNA, 25 bp, Artificial
  Probe
gttctggtgacactgacatgaacca

SEQ ID NO: 284175 - DNA, 25 bp, Artificial
  Probe
atgaaccaggttccagaggctcaca

SEQ ID NO: 284176 - DNA, 25 bp, Artificial
  Probe
ttctggtgacactgacatgaaccag

SEQ ID NO: 284177 - DNA, 25 bp, Artificial
  Probe
catctagaagcgaccatagcttcgt

SEQ ID NO: 284178 - DNA, 25 bp, Artificial
  Probe
tctcatggtgactcagacagcatcc

SEQ ID NO: 284179 - DNA, 25 bp, Artificial
  Probe
atctagaagcgaccatagcttcgtg

SEQ ID NO: 284180 - DNA, 25 bp, Artificial
  Probe
agacagcatccctgagcttgcttga

SEQ ID NO: 284181 - DNA, 25 bp, Artificial
  Probe
ctcccaggacagatagatggtacaa

SEQ ID NO: 284182 - DNA, 25 bp, Artificial
  Probe
ttgttccacattggagacagataga

SEQ ID NO: 284183 - DNA, 25 bp, Artificial
  Probe
tcccaggacagatagatggtacaac

SEQ ID NO: 284184 - DNA, 25 bp, Artificial
  Probe
gcgaccatagcttcgtgtcagatgc

SEQ ID NO: 284185 - DNA, 25 bp, Artificial
  Probe
atggtacaactctggctggaggttg

SEQ ID NO: 284186 - DNA, 25 bp, Artificial
  Probe
gttccacattggagacagatagata

SEQ ID NO: 284187 - DNA, 25 bp, Artificial
  Probe
gaccatagcttcgtgtcagatgcct

SEQ ID NO: 284188 - DNA, 25 bp, Artificial
  Probe
agcatccctgagcttgcttgactca

SEQ ID NO: 284189 - DNA, 25 bp, Artificial
  Probe
tccacattggagacagatagataga

SEQ ID NO: 284190 - DNA, 25 bp, Artificial
  Probe
ctggaggttgtttggctgttttctc

SEQ ID NO: 284191 - DNA, 25 bp, Artificial
  Probe
agcttgcttgactcagtagagaaaa

SEQ ID NO: 284192 - DNA, 25 bp, Artificial
  Probe
catccctgagcttgcttgactcagt

SEQ ID NO: 284193 - DNA, 25 bp, Artificial
  Probe
tacaactctggctggaggttgtttg

SEQ ID NO: 284194 - DNA, 25 bp, Artificial
  Probe
tagcttcgtgtcagatgcctaccct

SEQ ID NO: 284195 - DNA, 25 bp, Artificial
  Probe
cctcccaggacagatagatggtaca

SEQ ID NO: 284196 - DNA, 25 bp, Artificial
  Probe
caactctggctggaggttgtttggc

SEQ ID NO: 284197 - DNA, 25 bp, Artificial
  Probe
cttttgttattgttccacattggag

SEQ ID NO: 284198 - DNA, 25 bp, Artificial
  Probe
gtgacatctagaagcgaccatagct

SEQ ID NO: 284199 - DNA, 25 bp, Artificial
  Probe
aactctggctggaggttgtttggct

SEQ ID NO: 284200 - DNA, 25 bp, Artificial
  Probe
actcagacagcatccctgagcttgc

SEQ ID NO: 284201 - DNA, 25 bp, Artificial
  Probe
atggtgactcagacagcatccctga

SEQ ID NO: 284202 - DNA, 25 bp, Artificial
  Probe
atagatggtacaactctggctggag

SEQ ID NO: 284203 - DNA, 25 bp, Artificial
  Probe
tttgttattgttccacattggagac

SEQ ID NO: 284204 - DNA, 25 bp, Artificial
  Probe
gacagcatccctgagcttgcttgac

SEQ ID NO: 284205 - DNA, 25 bp, Artificial
  Probe
gatggtacaactctggctggaggtt

SEQ ID NO: 284206 - DNA, 25 bp, Artificial
  Probe
catagcttcgtgtcagatgcctacc

SEQ ID NO: 284207 - DNA, 25 bp, Artificial
  Probe
tttctcatggtgactcagacagcat

SEQ ID NO: 284208 - DNA, 25 bp, Artificial
  Probe
agcttcgtgtcagatgcctaccctc

SEQ ID NO: 284209 - DNA, 25 bp, Artificial
  Probe
tgtttggctgttttctcatggtgac

SEQ ID NO: 284210 - DNA, 25 bp, Artificial
  Probe
acttttgttattgttccacattgga

SEQ ID NO: 284211 - DNA, 25 bp, Artificial
  Probe
ctagaagcgaccatagcttcgtgtc

SEQ ID NO: 284212 - DNA, 25 bp, Artificial
  Probe
gttattgttccacattggagacaga

SEQ ID NO: 284213 - DNA, 25 bp, Artificial
  Probe
ctgtgacatctagaagcgaccatag

SEQ ID NO: 284214 - DNA, 25 bp, Artificial
  Probe
tgactcagacagcatccctgagctt

SEQ ID NO: 284215 - DNA, 25 bp, Artificial
  Probe
tgttttctcatggtgactcagacag

SEQ ID NO: 284216 - DNA, 25 bp, Artificial
  Probe
tagaagcgaccatagcttcgtgtca

SEQ ID NO: 284217 - DNA, 25 bp, Artificial
  Probe
ttgttattgttccacattggagaca

SEQ ID NO: 284218 - DNA, 25 bp, Artificial
  Probe
ttggctgttttctcatggtgactca

SEQ ID NO: 284219 - DNA, 25 bp, Artificial
  Probe
gctgttttctcatggtgactcagac

SEQ ID NO: 284220 - DNA, 25 bp, Artificial
  Probe
cttgcttgactcagtagagaaaatg

SEQ ID NO: 284221 - DNA, 25 bp, Artificial
  Probe
catggtgactcagacagcatccctg

SEQ ID NO: 284222 - DNA, 25 bp, Artificial
  Probe
ctgagcttgcttgactcagtagaga

SEQ ID NO: 284223 - DNA, 25 bp, Artificial
  Probe
cgagactcagggtgaaatggtcaac

SEQ ID NO: 284224 - DNA, 25 bp, Artificial
  Probe
aaggccgaatccagcgccagctaga

SEQ ID NO: 284225 - DNA, 25 bp, Artificial
  Probe
attacgtggagcacgccaaggaaga

SEQ ID NO: 284226 - DNA, 25 bp, Artificial
  Probe
tacgaaggacccagcactcagtgct

SEQ ID NO: 284227 - DNA, 25 bp, Artificial
  Probe
acagatcctgtttcgggagcgaagc

SEQ ID NO: 284228 - DNA, 25 bp, Artificial
  Probe
aacgtggtgaactccgtagattacg

SEQ ID NO: 284229 - DNA, 25 bp, Artificial
  Probe
aaggacccagcactcagtgctgtca

SEQ ID NO: 284230 - DNA, 25 bp, Artificial
  Probe
tacaatgaagcacagatcctgtttc

SEQ ID NO: 284231 - DNA, 25 bp, Artificial
  Probe
gcacgccaaggaagagactaagaaa

SEQ ID NO: 284232 - DNA, 25 bp, Artificial
  Probe
aatggtcaacaacattgagagaaac

SEQ ID NO: 284233 - DNA, 25 bp, Artificial
  Probe
agcgccagctagagatcactgggag

SEQ ID NO: 284234 - DNA, 25 bp, Artificial
  Probe
gccgtccatcttcatctcggacatt

SEQ ID NO: 284235 - DNA, 25 bp, Artificial
  Probe
tggatatggccatgtttgtcgagac

SEQ ID NO: 284236 - DNA, 25 bp, Artificial
  Probe
catcaaataccagagcaaggccaga

SEQ ID NO: 284237 - DNA, 25 bp, Artificial
  Probe
gtggatctgcggatacgaaggaccc

SEQ ID NO: 284238 - DNA, 25 bp, Artificial
  Probe
gacccagcactcagtgctgtcacgg

SEQ ID NO: 284239 - DNA, 25 bp, Artificial
  Probe
tatatcagattcacagattactagg

SEQ ID NO: 284240 - DNA, 25 bp, Artificial
  Probe
gaaacgtggtgaactccgtagatta

SEQ ID NO: 284241 - DNA, 25 bp, Artificial
  Probe
agattactaggcaagctctcaatga

SEQ ID NO: 284242 - DNA, 25 bp, Artificial
  Probe
tcacagattactaggcaagctctca

SEQ ID NO: 284243 - DNA, 25 bp, Artificial
  Probe
ggaggaccaccactgacgaggagct

SEQ ID NO: 284244 - DNA, 25 bp, Artificial
  Probe
tcctgtttcgggagcgaagcaaagg

SEQ ID NO: 284245 - DNA, 25 bp, Artificial
  Probe
agcgggaagccgtccatcttcatct

SEQ ID NO: 284246 - DNA, 25 bp, Artificial
  Probe
agatcactgggaggaccaccactga

SEQ ID NO: 284247 - DNA, 25 bp, Artificial
  Probe
tggtgaactccgtagattacgtgga

SEQ ID NO: 284248 - DNA, 25 bp, Artificial
  Probe
tatggccatgtttgtcgagactcag

SEQ ID NO: 284249 - DNA, 25 bp, Artificial
  Probe
acgccacaaagacatcatgaagctg

SEQ ID NO: 284250 - DNA, 25 bp, Artificial
  Probe
acttcagtggatctgcggatacgaa

SEQ ID NO: 284251 - DNA, 25 bp, Artificial
  Probe
ccaccactgacgaggagctggagga

SEQ ID NO: 284252 - DNA, 25 bp, Artificial
  Probe
caaataccagagcaaggccagacgg

SEQ ID NO: 284253 - DNA, 25 bp, Artificial
  Probe
aagcaaaggccgaatccagcgccag

SEQ ID NO: 284254 - DNA, 25 bp, Artificial
  Probe
ctgggaggaccaccactgacgagga

SEQ ID NO: 284255 - DNA, 25 bp, Artificial
  Probe
tcgagtcacgccacaaagacatcat

SEQ ID NO: 284256 - DNA, 25 bp, Artificial
  Probe
cgtagattacgtggagcacgccaag

SEQ ID NO: 284257 - DNA, 25 bp, Artificial
  Probe
tgagatcgagtcacgccacaaagac

SEQ ID NO: 284258 - DNA, 25 bp, Artificial
  Probe
tttcgggagcgaagcaaaggccgaa

SEQ ID NO: 284259 - DNA, 25 bp, Artificial
  Probe
cagcgccagctagagatcactggga

SEQ ID NO: 284260 - DNA, 25 bp, Artificial
  Probe
cgtcatgacagaatacaatgaagca

SEQ ID NO: 284261 - DNA, 25 bp, Artificial
  Probe
tggtcaacaacattgagagaaacgt

SEQ ID NO: 284262 - DNA, 25 bp, Artificial
  Probe
ctgcggatacgaaggacccagcact

SEQ ID NO: 284263 - DNA, 25 bp, Artificial
  Probe
gtggagcacgccaaggaagagacta

SEQ ID NO: 284264 - DNA, 25 bp, Artificial
  Probe
ctcagtgctgtcacggaagtttgtg

SEQ ID NO: 284265 - DNA, 25 bp, Artificial
  Probe
catgtttgtcgagactcagggtgaa

SEQ ID NO: 284266 - DNA, 25 bp, Artificial
  Probe
gagatcactgggaggaccaccactg

SEQ ID NO: 284267 - DNA, 25 bp, Artificial
  Probe
caaaggccgaatccagcgccagcta

SEQ ID NO: 284268 - DNA, 25 bp, Artificial
  Probe
cggatacgaaggacccagcactcag

SEQ ID NO: 284269 - DNA, 25 bp, Artificial
  Probe
ctctgtcaacggagtccatcgaaag

SEQ ID NO: 284270 - DNA, 25 bp, Artificial
  Probe
ggattgcccatatcacgcctctatg

SEQ ID NO: 284271 - DNA, 25 bp, Artificial
  Probe
cccgattcaagttcacgtcacactg

SEQ ID NO: 284272 - DNA, 25 bp, Artificial
  Probe
gggacgcctggcaaagccaaatgtg

SEQ ID NO: 284273 - DNA, 25 bp, Artificial
  Probe
caacggagtccatcgaaagactccc

SEQ ID NO: 284274 - DNA, 25 bp, Artificial
  Probe
agaaccaaccacgaggctgacgact

SEQ ID NO: 284275 - DNA, 25 bp, Artificial
  Probe
gcctcgtgttgagacgtcccgtgcg

SEQ ID NO: 284276 - DNA, 25 bp, Artificial
  Probe
cctggcaaagccaaatgtggttttt

SEQ ID NO: 284277 - DNA, 25 bp, Artificial
  Probe
agcattacagaaccaaccacgaggc

SEQ ID NO: 284278 - DNA, 25 bp, Artificial
  Probe
ccggcctcgtgttgagacgtcccgt

SEQ ID NO: 284279 - DNA, 25 bp, Artificial
  Probe
gtatttggaaccacattgtaccaaa

SEQ ID NO: 284280 - DNA, 25 bp, Artificial
  Probe
gacgcctggcaaagccaaatgtggt

SEQ ID NO: 284281 - DNA, 25 bp, Artificial
  Probe
gtccatcgaaagactccctgtgtat

SEQ ID NO: 284282 - DNA, 25 bp, Artificial
  Probe
gtttatcccccgattcaagttcacg

SEQ ID NO: 284283 - DNA, 25 bp, Artificial
  Probe
ctggcaaagccaaatgtggtttttg

SEQ ID NO: 284284 - DNA, 25 bp, Artificial
  Probe
tccagggagacctaaagctgtattc

SEQ ID NO: 284285 - DNA, 25 bp, Artificial
  Probe
ccatcgaaagactccctgtgtataa

SEQ ID NO: 284286 - DNA, 25 bp, Artificial
  Probe
ctgtcaacggagtccatcgaaagac

SEQ ID NO: 284287 - DNA, 25 bp, Artificial
  Probe
gtacttccagggagacctaaagctg

SEQ ID NO: 284288 - DNA, 25 bp, Artificial
  Probe
aaggctctgtcaacggagtccatcg

SEQ ID NO: 284289 - DNA, 25 bp, Artificial
  Probe
tgttccgctgaggaagatcgacaga

SEQ ID NO: 284290 - DNA, 25 bp, Artificial
  Probe
atgtatttggaaccacattgtacca

SEQ ID NO: 284291 - DNA, 25 bp, Artificial
  Probe
ccagggagacctaaagctgtattcc

SEQ ID NO: 284292 - DNA, 25 bp, Artificial
  Probe
cgattcaagttcacgtcacactggg

SEQ ID NO: 284293 - DNA, 25 bp, Artificial
  Probe
agtccatcgaaagactccctgtgta

SEQ ID NO: 284294 - DNA, 25 bp, Artificial
  Probe
ttccgctgaggaagatcgacagact

SEQ ID NO: 284295 - DNA, 25 bp, Artificial
  Probe
taaagctgcctggaagcattacaga

SEQ ID NO: 284296 - DNA, 25 bp, Artificial
  Probe
tatgcacagtacttccagggagacc

SEQ ID NO: 284297 - DNA, 25 bp, Artificial
  Probe
ggacgcctggcaaagccaaatgtgg

SEQ ID NO: 284298 - DNA, 25 bp, Artificial
  Probe
atttggttacggattgcccatatca

SEQ ID NO: 284299 - DNA, 25 bp, Artificial
  Probe
ttcaagttcacgtcacactggggga

SEQ ID NO: 284300 - DNA, 25 bp, Artificial
  Probe
atgcacagtacttccagggagacct

SEQ ID NO: 284301 - DNA, 25 bp, Artificial
  Probe
tgcctggaagcattacagaaccaac

SEQ ID NO: 284302 - DNA, 25 bp, Artificial
  Probe
gaagcattacagaaccaaccacgag

SEQ ID NO: 284303 - DNA, 25 bp, Artificial
  Probe
tgagacgtcccgtgcggtgcccctg

SEQ ID NO: 284304 - DNA, 25 bp, Artificial
  Probe
ttaaggctctgtcaacggagtccat

SEQ ID NO: 284305 - DNA, 25 bp, Artificial
  Probe
ctatattaaggctctgtcaacggag

SEQ ID NO: 284306 - DNA, 25 bp, Artificial
  Probe
cggagtccatcgaaagactccctgt

SEQ ID NO: 284307 - DNA, 25 bp, Artificial
  Probe
gattgcccatatcacgcctctatgc

SEQ ID NO: 284308 - DNA, 25 bp, Artificial
  Probe
tctgtcaacggagtccatcgaaaga

SEQ ID NO: 284309 - DNA, 25 bp, Artificial
  Probe
acatgggacgcctggcaaagccaaa

SEQ ID NO: 284310 - DNA, 25 bp, Artificial
  Probe
cacagtacttccagggagacctaaa

SEQ ID NO: 284311 - DNA, 25 bp, Artificial
  Probe
ctcgtgttgagacgtcccgtgcggt

SEQ ID NO: 284312 - DNA, 25 bp, Artificial
  Probe
tggtgttccgctgaggaagatcgac

SEQ ID NO: 284313 - DNA, 25 bp, Artificial
  Probe
tacggattgcccatatcacgcctct

SEQ ID NO: 284314 - DNA, 25 bp, Artificial
  Probe
ttccagggagacctaaagctgtatt

SEQ ID NO: 284315 - DNA, 25 bp, Artificial
  Probe
ggactttctccagcacagatccttt

SEQ ID NO: 284316 - DNA, 25 bp, Artificial
  Probe
tctccagcacagatcctttgtctag

SEQ ID NO: 284317 - DNA, 25 bp, Artificial
  Probe
cagcacagatcctttgtctagaaaa

SEQ ID NO: 284318 - DNA, 25 bp, Artificial
  Probe
cagttaactggctctgggactttct

SEQ ID NO: 284319 - DNA, 25 bp, Artificial
  Probe
caagctctctcaagtcagacagtta

SEQ ID NO: 284320 - DNA, 25 bp, Artificial
  Probe
aagtcagacagttaactggctctgg

SEQ ID NO: 284321 - DNA, 25 bp, Artificial
  Probe
gcttacttgctctgagcctgccaag

SEQ ID NO: 284322 - DNA, 25 bp, Artificial
  Probe
gatgggacagccatgcttgcagttg

SEQ ID NO: 284323 - DNA, 25 bp, Artificial
  Probe
ggctctgggactttctccagcacag

SEQ ID NO: 284324 - DNA, 25 bp, Artificial
  Probe
acagatcctttgtctagaaaatacg

SEQ ID NO: 284325 - DNA, 25 bp, Artificial
  Probe
cctttgtctagaaaatacggactgt

SEQ ID NO: 284326 - DNA, 25 bp, Artificial
  Probe
gccaagctctctcaagtcagacagt

SEQ ID NO: 284327 - DNA, 25 bp, Artificial
  Probe
actccagcttacttgctctgagcct

SEQ ID NO: 284328 - DNA, 25 bp, Artificial
  Probe
tcaagtcagacagttaactggctct

SEQ ID NO: 284329 - DNA, 25 bp, Artificial
  Probe
gcacagatcctttgtctagaaaata

SEQ ID NO: 284330 - DNA, 25 bp, Artificial
  Probe
aagccaagctctctcaagtcagaca

SEQ ID NO: 284331 - DNA, 25 bp, Artificial
  Probe
agcacagatcctttgtctagaaaat

SEQ ID NO: 284332 - DNA, 25 bp, Artificial
  Probe
gttgtgtctacagcacaatcctgcc

SEQ ID NO: 284333 - DNA, 25 bp, Artificial
  Probe
gttaactggctctgggactttctcc

SEQ ID NO: 284334 - DNA, 25 bp, Artificial
  Probe
ctgggactttctccagcacagatcc

SEQ ID NO: 284335 - DNA, 25 bp, Artificial
  Probe
actggctctgggactttctccagca

SEQ ID NO: 284336 - DNA, 25 bp, Artificial
  Probe
cagatcctttgtctagaaaatacgg

SEQ ID NO: 284337 - DNA, 25 bp, Artificial
  Probe
cagacagttaactggctctgggact

SEQ ID NO: 284338 - DNA, 25 bp, Artificial
  Probe
ttacttgctctgagcctgccaagcc

SEQ ID NO: 284339 - DNA, 25 bp, Artificial
  Probe
tctgggactttctccagcacagatc

SEQ ID NO: 284340 - DNA, 25 bp, Artificial
  Probe
agccatgcttgcagttgtgctagaa

SEQ ID NO: 284341 - DNA, 25 bp, Artificial
  Probe
gactttctccagcacagatcctttg

SEQ ID NO: 284342 - DNA, 25 bp, Artificial
  Probe
ctggctctgggactttctccagcac

SEQ ID NO: 284343 - DNA, 25 bp, Artificial
  Probe
tctcaagtcagacagttaactggct

SEQ ID NO: 284344 - DNA, 25 bp, Artificial
  Probe
ccaagccaagctctctcaagtcaga

SEQ ID NO: 284345 - DNA, 25 bp, Artificial
  Probe
caagtcagacagttaactggctctg

SEQ ID NO: 284346 - DNA, 25 bp, Artificial
  Probe
caggactccagcttacttgctctga

SEQ ID NO: 284347 - DNA, 25 bp, Artificial
  Probe
ttgtgtctacagcacaatcctgccc

SEQ ID NO: 284348 - DNA, 25 bp, Artificial
  Probe
ttcatcacccacagagctgtagcca

SEQ ID NO: 284349 - DNA, 25 bp, Artificial
  Probe
tcctttgtctagaaaatacggactg

SEQ ID NO: 284350 - DNA, 25 bp, Artificial
  Probe
ggactccagcttacttgctctgagc

SEQ ID NO: 284351 - DNA, 25 bp, Artificial
  Probe
agctctctcaagtcagacagttaac

SEQ ID NO: 284352 - DNA, 25 bp, Artificial
  Probe
caagccaagctctctcaagtcagac

SEQ ID NO: 284353 - DNA, 25 bp, Artificial
  Probe
gacagccatgcttgcagttgtgcta

SEQ ID NO: 284354 - DNA, 25 bp, Artificial
  Probe
agatcctttgtctagaaaatacgga

SEQ ID NO: 284355 - DNA, 25 bp, Artificial
  Probe
tgggactttctccagcacagatcct

SEQ ID NO: 284356 - DNA, 25 bp, Artificial
  Probe
cagcttacttgctctgagcctgcca

SEQ ID NO: 284357 - DNA, 25 bp, Artificial
  Probe
ccaagctctctcaagtcagacagtt

SEQ ID NO: 284358 - DNA, 25 bp, Artificial
  Probe
tccagcttacttgctctgagcctgc

SEQ ID NO: 284359 - DNA, 25 bp, Artificial
  Probe
ggacagccatgcttgcagttgtgct

SEQ ID NO: 284360 - DNA, 25 bp, Artificial
  Probe
agtcagacagttaactggctctggg

SEQ ID NO: 284361 - DNA, 25 bp, Artificial
  Probe
ccatgattgcggagcagttgtccat

SEQ ID NO: 284362 - DNA, 25 bp, Artificial
  Probe
tgggaacaacagcaggccctcgtct

SEQ ID NO: 284363 - DNA, 25 bp, Artificial
  Probe
acagtaacgtcatcctgttcccctg

SEQ ID NO: 284364 - DNA, 25 bp, Artificial
  Probe
tgttcccctgggaacaacagcaggc

SEQ ID NO: 284365 - DNA, 25 bp, Artificial
  Probe
tcagggtcatggtaccgttggaacc

SEQ ID NO: 284366 - DNA, 25 bp, Artificial
  Probe
gcaatcgacgccaaaaggagaagag

SEQ ID NO: 284367 - DNA, 25 bp, Artificial
  Probe
ctcctcagggtcatggtaccgttgg

SEQ ID NO: 284368 - DNA, 25 bp, Artificial
  Probe
tcgacgccaaaaggagaagagaatc

SEQ ID NO: 284369 - DNA, 25 bp, Artificial
  Probe
atcgacgccaaaaggagaagagaat

SEQ ID NO: 284370 - DNA, 25 bp, Artificial
  Probe
acgtcatcctgttcccctgggaaca

SEQ ID NO: 284371 - DNA, 25 bp, Artificial
  Probe
gtccacagcaccatgcctggaacag

SEQ ID NO: 284372 - DNA, 25 bp, Artificial
  Probe
tggtctctccctcagggtctctggg

SEQ ID NO: 284373 - DNA, 25 bp, Artificial
  Probe
gggaacaacagcaggccctcgtctc

SEQ ID NO: 284374 - DNA, 25 bp, Artificial
  Probe
attgcggagcagttgtccatggaga

SEQ ID NO: 284375 - DNA, 25 bp, Artificial
  Probe
agtaacgtcatcctgttcccctggg

SEQ ID NO: 284376 - DNA, 25 bp, Artificial
  Probe
cctcagggtcatggtaccgttggaa

SEQ ID NO: 284377 - DNA, 25 bp, Artificial
  Probe
cctaaacccagctcggaagagattt

SEQ ID NO: 284378 - DNA, 25 bp, Artificial
  Probe
accctaaacccagctcggaagagat

SEQ ID NO: 284379 - DNA, 25 bp, Artificial
  Probe
aactcctcagggtcatggtaccgtt

SEQ ID NO: 284380 - DNA, 25 bp, Artificial
  Probe
atgcctggaacagtaacgtcatcct

SEQ ID NO: 284381 - DNA, 25 bp, Artificial
  Probe
atgattgcggagcagttgtccatgg

SEQ ID NO: 284382 - DNA, 25 bp, Artificial
  Probe
cagcaccatgcctggaacagtaacg

SEQ ID NO: 284383 - DNA, 25 bp, Artificial
  Probe
ttgcggagcagttgtccatggagaa

SEQ ID NO: 284384 - DNA, 25 bp, Artificial
  Probe
aagagatttccatgattgcggagca

SEQ ID NO: 284385 - DNA, 25 bp, Artificial
  Probe
tgcctggaacagtaacgtcatcctg

SEQ ID NO: 284386 - DNA, 25 bp, Artificial
  Probe
cctgactttggagaagcgatttcaa

SEQ ID NO: 284387 - DNA, 25 bp, Artificial
  Probe
caatcgacgccaaaaggagaagaga

SEQ ID NO: 284388 - DNA, 25 bp, Artificial
  Probe
aacccagctcggaagagatttccat

SEQ ID NO: 284389 - DNA, 25 bp, Artificial
  Probe
catggtaccgttggaaccatcccgc

SEQ ID NO: 284390 - DNA, 25 bp, Artificial
  Probe
caagataaccctaaacccagctcgg

SEQ ID NO: 284391 - DNA, 25 bp, Artificial
  Probe
gccgcctttaactcctcagggtcat

SEQ ID NO: 284392 - DNA, 25 bp, Artificial
  Probe
ccatgcctggaacagtaacgtcatc

SEQ ID NO: 284393 - DNA, 25 bp, Artificial
  Probe
tggtaccgttggaaccatcccgcct

SEQ ID NO: 284394 - DNA, 25 bp, Artificial
  Probe
atcctgttcccctgggaacaacagc

SEQ ID NO: 284395 - DNA, 25 bp, Artificial
  Probe
cccagctcggaagagatttccatga

SEQ ID NO: 284396 - DNA, 25 bp, Artificial
  Probe
ctttaactcctcagggtcatggtac

SEQ ID NO: 284397 - DNA, 25 bp, Artificial
  Probe
gttcccctgggaacaacagcaggcc

SEQ ID NO: 284398 - DNA, 25 bp, Artificial
  Probe
gtcatggtaccgttggaaccatccc

SEQ ID NO: 284399 - DNA, 25 bp, Artificial
  Probe
cagggtcatggtaccgttggaacca

SEQ ID NO: 284400 - DNA, 25 bp, Artificial
  Probe
gaagagaatcaactgccctgtggcc

SEQ ID NO: 284401 - DNA, 25 bp, Artificial
  Probe
gagatttccatgattgcggagcagt

SEQ ID NO: 284402 - DNA, 25 bp, Artificial
  Probe
taacgtcatcctgttcccctgggaa

SEQ ID NO: 284403 - DNA, 25 bp, Artificial
  Probe
gaacagtaacgtcatcctgttcccc

SEQ ID NO: 284404 - DNA, 25 bp, Artificial
  Probe
gatttccatgattgcggagcagttg

SEQ ID NO: 284405 - DNA, 25 bp, Artificial
  Probe
atgtgtaaactcaagccactgctgg

SEQ ID NO: 284406 - DNA, 25 bp, Artificial
  Probe
tgtgtaaactcaagccactgctgga

SEQ ID NO: 284407 - DNA, 25 bp, Artificial
  Probe
gttcccaagttcaagaacacttgtt

SEQ ID NO: 284408 - DNA, 25 bp, Artificial
  Probe
gacctcagccacaatcctgaactga

SEQ ID NO: 284409 - DNA, 25 bp, Artificial
  Probe
tcacctattggaaaggcattctgcc

SEQ ID NO: 284410 - DNA, 25 bp, Artificial
  Probe
caaattctatgagaagactgaaatc

SEQ ID NO: 284411 - DNA, 25 bp, Artificial
  Probe
cacactgtggccactttcttgtaca

SEQ ID NO: 284412 - DNA, 25 bp, Artificial
  Probe
tcagctcaccggtgggattctggga

SEQ ID NO: 284413 - DNA, 25 bp, Artificial
  Probe
agttttcagctcaccggtgggattc

SEQ ID NO: 284414 - DNA, 25 bp, Artificial
  Probe
aagactgaaatctcgtgtctctacc

SEQ ID NO: 284415 - DNA, 25 bp, Artificial
  Probe
cattctgccattgttagttttcagc

SEQ ID NO: 284416 - DNA, 25 bp, Artificial
  Probe
tcccagcgaaatgtttaactcaggt

SEQ ID NO: 284417 - DNA, 25 bp, Artificial
  Probe
tgatccaaattctatgagaagactg

SEQ ID NO: 284418 - DNA, 25 bp, Artificial
  Probe
ctttaatgtgtaatttcccagcgaa

SEQ ID NO: 284419 - DNA, 25 bp, Artificial
  Probe
ttgctcctggccacagagaagtaca

SEQ ID NO: 284420 - DNA, 25 bp, Artificial
  Probe
cctggccacagagaagtacacacac

SEQ ID NO: 284421 - DNA, 25 bp, Artificial
  Probe
ttttgctcgttgtgccaaactgcaa

SEQ ID NO: 284422 - DNA, 25 bp, Artificial
  Probe
ccaaactgcaagaagggtagttatg

SEQ ID NO: 284423 - DNA, 25 bp, Artificial
  Probe
atgttcccaagttcaagaacacttg

SEQ ID NO: 284424 - DNA, 25 bp, Artificial
  Probe
ctctggccatgttgctccattcacg

SEQ ID NO: 284425 - DNA, 25 bp, Artificial
  Probe
gtgtctctaccaaagccttattttg

SEQ ID NO: 284426 - DNA, 25 bp, Artificial
  Probe
gaccgttcatctttaatgtgtaatt

SEQ ID NO: 284427 - DNA, 25 bp, Artificial
  Probe
taatgtgtaatttcccagcgaaatg

SEQ ID NO: 284428 - DNA, 25 bp, Artificial
  Probe
ggccactttcttgtacatagtcctt

SEQ ID NO: 284429 - DNA, 25 bp, Artificial
  Probe
tgggattctgggacagccttttgct

SEQ ID NO: 284430 - DNA, 25 bp, Artificial
  Probe
gttttgactctgacctcagccacaa

SEQ ID NO: 284431 - DNA, 25 bp, Artificial
  Probe
acagagaagtacacacactgtggcc

SEQ ID NO: 284432 - DNA, 25 bp, Artificial
  Probe
gaaatctcgtgtctctaccaaagcc

SEQ ID NO: 284433 - DNA, 25 bp, Artificial
  Probe
gtgtaatttcccagcgaaatgttta

SEQ ID NO: 284434 - DNA, 25 bp, Artificial
  Probe
ctgtctatccttaggtcctacaaag

SEQ ID NO: 284435 - DNA, 25 bp, Artificial
  Probe
gtactcttttgttgcccacatgttc

SEQ ID NO: 284436 - DNA, 25 bp, Artificial
  Probe
gtacacacactgtggccactttctt

SEQ ID NO: 284437 - DNA, 25 bp, Artificial
  Probe
attggaaaggcattctgccattgtt

SEQ ID NO: 284438 - DNA, 25 bp, Artificial
  Probe
ggaaaggcattctgccattgttagt

SEQ ID NO: 284439 - DNA, 25 bp, Artificial
  Probe
gcactatgaccgttcatctttaatg

SEQ ID NO: 284440 - DNA, 25 bp, Artificial
  Probe
tttcccagcgaaatgtttaactcag

SEQ ID NO: 284441 - DNA, 25 bp, Artificial
  Probe
cctgaactgatccaaattctatgag

SEQ ID NO: 284442 - DNA, 25 bp, Artificial
  Probe
ggattctgggacagccttttgctcg

SEQ ID NO: 284443 - DNA, 25 bp, Artificial
  Probe
cgaaatgtttaactcaggtgtgcat

SEQ ID NO: 284444 - DNA, 25 bp, Artificial
  Probe
tagttatggttttgactctgacctc

SEQ ID NO: 284445 - DNA, 25 bp, Artificial
  Probe
ttgcccacatgttcccaagttcaag

SEQ ID NO: 284446 - DNA, 25 bp, Artificial
  Probe
ctcaccggtgggattctgggacagc

SEQ ID NO: 284447 - DNA, 25 bp, Artificial
  Probe
tgacctcagccacaatcctgaactg

SEQ ID NO: 284448 - DNA, 25 bp, Artificial
  Probe
tcacatgatggctcacctattggaa

SEQ ID NO: 284449 - DNA, 25 bp, Artificial
  Probe
cttttgttgcccacatgttcccaag

SEQ ID NO: 284450 - DNA, 25 bp, Artificial
  Probe
tgggttttcttgtcctgtcccctct

SEQ ID NO: 284451 - DNA, 25 bp, Artificial
  Probe
tgtgggttttcttgtcctgtcccct

SEQ ID NO: 284452 - DNA, 25 bp, Artificial
  Probe
gtctatccttaggtcctacaaagtc

SEQ ID NO: 284453 - DNA, 25 bp, Artificial
  Probe
attaagctacacacaagggccactc

SEQ ID NO: 284454 - DNA, 25 bp, Artificial
  Probe
tttcgcaccagttgtcagaccccag

SEQ ID NO: 284455 - DNA, 25 bp, Artificial
  Probe
caagggccactctaaataagactcc

SEQ ID NO: 284456 - DNA, 25 bp, Artificial
  Probe
agtcaccgaccttgcaaatactgag

SEQ ID NO: 284457 - DNA, 25 bp, Artificial
  Probe
accttgcaaatactgagattggaaa

SEQ ID NO: 284458 - DNA, 25 bp, Artificial
  Probe
aatctgacatgagtcccagagtgga

SEQ ID NO: 284459 - DNA, 25 bp, Artificial
  Probe
ctcaggcctttttaagaggaaatca

SEQ ID NO: 284460 - DNA, 25 bp, Artificial
  Probe
tcaggcctttttaagaggaaatcac

SEQ ID NO: 284461 - DNA, 25 bp, Artificial
  Probe
taatctgacatgagtcccagagtgg

SEQ ID NO: 284462 - DNA, 25 bp, Artificial
  Probe
gacatgagtcccagagtggaacttt

SEQ ID NO: 284463 - DNA, 25 bp, Artificial
  Probe
gcgatttctggcatgattgtccctc

SEQ ID NO: 284464 - DNA, 25 bp, Artificial
  Probe
gcaagcgatttctggcatgattgtc

SEQ ID NO: 284465 - DNA, 25 bp, Artificial
  Probe
ttcgcaccagttgtcagaccccaga

SEQ ID NO: 284466 - DNA, 25 bp, Artificial
  Probe
ctcccatgtgaaagaattgccttga

SEQ ID NO: 284467 - DNA, 25 bp, Artificial
  Probe
agcctgcaagcgatttctggcatga

SEQ ID NO: 284468 - DNA, 25 bp, Artificial
  Probe
gagtcccagagtggaacttttaact

SEQ ID NO: 284469 - DNA, 25 bp, Artificial
  Probe
aaaccattaagctacacacaagggc

SEQ ID NO: 284470 - DNA, 25 bp, Artificial
  Probe
gactccccgagtgtctgggggatat

SEQ ID NO: 284471 - DNA, 25 bp, Artificial
  Probe
ctccccgagtgtctgggggatatat

SEQ ID NO: 284472 - DNA, 25 bp, Artificial
  Probe
agtaatctgacatgagtcccagagt

SEQ ID NO: 284473 - DNA, 25 bp, Artificial
  Probe
tccccgagtgtctgggggatatatt

SEQ ID NO: 284474 - DNA, 25 bp, Artificial
  Probe
aagctacacacaagggccactctaa

SEQ ID NO: 284475 - DNA, 25 bp, Artificial
  Probe
ggaaatcacacaataactgcagatt

SEQ ID NO: 284476 - DNA, 25 bp, Artificial
  Probe
tgagtcccagagtggaacttttaac

SEQ ID NO: 284477 - DNA, 25 bp, Artificial
  Probe
ttaagctacacacaagggccactct

SEQ ID NO: 284478 - DNA, 25 bp, Artificial
  Probe
gtaaaccattaagctacacacaagg

SEQ ID NO: 284479 - DNA, 25 bp, Artificial
  Probe
atctgacatgagtcccagagtggaa

SEQ ID NO: 284480 - DNA, 25 bp, Artificial
  Probe
accattaagctacacacaagggcca

SEQ ID NO: 284481 - DNA, 25 bp, Artificial
  Probe
cacacaagggccactctaaataaga

SEQ ID NO: 284482 - DNA, 25 bp, Artificial
  Probe
cgggaacagcctgcaagcgatttct

SEQ ID NO: 284483 - DNA, 25 bp, Artificial
  Probe
cgatttctggcatgattgtccctcc

SEQ ID NO: 284484 - DNA, 25 bp, Artificial
  Probe
atagagtcggactccccgagtgtct

SEQ ID NO: 284485 - DNA, 25 bp, Artificial
  Probe
cgaccttgcaaatactgagattgga

SEQ ID NO: 284486 - DNA, 25 bp, Artificial
  Probe
caccgaccttgcaaatactgagatt

SEQ ID NO: 284487 - DNA, 25 bp, Artificial
  Probe
aaagtcaccgaccttgcaaatactg

SEQ ID NO: 284488 - DNA, 25 bp, Artificial
  Probe
aggaaatcacacaataactgcagat

SEQ ID NO: 284489 - DNA, 25 bp, Artificial
  Probe
ggatagagtcggactccccgagtgt

SEQ ID NO: 284490 - DNA, 25 bp, Artificial
  Probe
tgctttcgcaccagttgtcagaccc

SEQ ID NO: 284491 - DNA, 25 bp, Artificial
  Probe
agggccactctaaataagactccat

SEQ ID NO: 284492 - DNA, 25 bp, Artificial
  Probe
acatgagtcccagagtggaactttt

SEQ ID NO: 284493 - DNA, 25 bp, Artificial
  Probe
gaacagcctgcaagcgatttctggc

SEQ ID NO: 284494 - DNA, 25 bp, Artificial
  Probe
taaaccattaagctacacacaaggg

SEQ ID NO: 284495 - DNA, 25 bp, Artificial
  Probe
gtcccagagtggaacttttaactca

SEQ ID NO: 284496 - DNA, 25 bp, Artificial
  Probe
gggaacagcctgcaagcgatttctg

SEQ ID NO: 284497 - DNA, 25 bp, Artificial
  Probe
tcccagagtggaacttttaactcag

SEQ ID NO: 284498 - DNA, 25 bp, Artificial
  Probe
cctcccatgtgaaagaattgccttg

SEQ ID NO: 284499 - DNA, 25 bp, Artificial
  Probe
actgctgacacagaaacccctgttc

SEQ ID NO: 284500 - DNA, 25 bp, Artificial
  Probe
tcggtaggctgcatatttggagaac

SEQ ID NO: 284501 - DNA, 25 bp, Artificial
  Probe
actccacagcctgtgacatgtggtc

SEQ ID NO: 284502 - DNA, 25 bp, Artificial
  Probe
actcctagtgagaaaatctggcctg

SEQ ID NO: 284503 - DNA, 25 bp, Artificial
  Probe
gacatcggtactcctagtgagaaaa

SEQ ID NO: 284504 - DNA, 25 bp, Artificial
  Probe
atggtgtagcctcttgttctgagag

SEQ ID NO: 284505 - DNA, 25 bp, Artificial
  Probe
ggaatactccacagcctgtgacatg

SEQ ID NO: 284506 - DNA, 25 bp, Artificial
  Probe
caagattttcaaggacatcggtact

SEQ ID NO: 284507 - DNA, 25 bp, Artificial
  Probe
gtgtagcctcttgttctgagagggc

SEQ ID NO: 284508 - DNA, 25 bp, Artificial
  Probe
gcctggctatagtgagctcccagcc

SEQ ID NO: 284509 - DNA, 25 bp, Artificial
  Probe
agccgtcagctgtaggccatggtgt

SEQ ID NO: 284510 - DNA, 25 bp, Artificial
  Probe
acccctgttccctgggaagtcagat

SEQ ID NO: 284511 - DNA, 25 bp, Artificial
  Probe
aggccatggtgtagcctcttgttct

SEQ ID NO: 284512 - DNA, 25 bp, Artificial
  Probe
tccacagcctgtgacatgtggtcgg

SEQ ID NO: 284513 - DNA, 25 bp, Artificial
  Probe
ctgttccctgggaagtcagatattg

SEQ ID NO: 284514 - DNA, 25 bp, Artificial
  Probe
ctgtaggccatggtgtagcctcttg

SEQ ID NO: 284515 - DNA, 25 bp, Artificial
  Probe
gctaaggaatactccacagcctgtg

SEQ ID NO: 284516 - DNA, 25 bp, Artificial
  Probe
tgttccctgggaagtcagatattga

SEQ ID NO: 284517 - DNA, 25 bp, Artificial
  Probe
ctgcttggtgctaaggaatactcca

SEQ ID NO: 284518 - DNA, 25 bp, Artificial
  Probe
tcggtactcctagtgagaaaatctg

SEQ ID NO: 284519 - DNA, 25 bp, Artificial
  Probe
tactccacagcctgtgacatgtggt

SEQ ID NO: 284520 - DNA, 25 bp, Artificial
  Probe
ttttcaaggacatcggtactcctag

SEQ ID NO: 284521 - DNA, 25 bp, Artificial
  Probe
acgacggagccgtcagctgtaggcc

SEQ ID NO: 284522 - DNA, 25 bp, Artificial
  Probe
atatttggagaactgctgacacaga

SEQ ID NO: 284523 - DNA, 25 bp, Artificial
  Probe
taggctgcatatttggagaactgct

SEQ ID NO: 284524 - DNA, 25 bp, Artificial
  Probe
tggtgtagcctcttgttctgagagg

SEQ ID NO: 284525 - DNA, 25 bp, Artificial
  Probe
atctggcctggctatagtgagctcc

SEQ ID NO: 284526 - DNA, 25 bp, Artificial
  Probe
acggagccgtcagctgtaggccatg

SEQ ID NO: 284527 - DNA, 25 bp, Artificial
  Probe
gctatagtgagctcccagccgtcaa

SEQ ID NO: 284528 - DNA, 25 bp, Artificial
  Probe
aggaatactccacagcctgtgacat

SEQ ID NO: 284529 - DNA, 25 bp, Artificial
  Probe
ccccagaactactgcttggtgctaa

SEQ ID NO: 284530 - DNA, 25 bp, Artificial
  Probe
actgcttggtgctaaggaatactcc

SEQ ID NO: 284531 - DNA, 25 bp, Artificial
  Probe
caaggacatcggtactcctagtgag

SEQ ID NO: 284532 - DNA, 25 bp, Artificial
  Probe
gccgtcagctgtaggccatggtgta

SEQ ID NO: 284533 - DNA, 25 bp, Artificial
  Probe
gttccctgggaagtcagatattgat

SEQ ID NO: 284534 - DNA, 25 bp, Artificial
  Probe
acagcctgtgacatgtggtcggtag

SEQ ID NO: 284535 - DNA, 25 bp, Artificial
  Probe
atttggagaactgctgacacagaaa

SEQ ID NO: 284536 - DNA, 25 bp, Artificial
  Probe
agtgagaaaatctggcctggctata

SEQ ID NO: 284537 - DNA, 25 bp, Artificial
  Probe
gtaggctgcatatttggagaactgc

SEQ ID NO: 284538 - DNA, 25 bp, Artificial
  Probe
ttggagaactgctgacacagaaacc

SEQ ID NO: 284539 - DNA, 25 bp, Artificial
  Probe
cagctgtaggccatggtgtagcctc

SEQ ID NO: 284540 - DNA, 25 bp, Artificial
  Probe
ctcctagtgagaaaatctggcctgg

SEQ ID NO: 284541 - DNA, 25 bp, Artificial
  Probe
cggtaggctgcatatttggagaact

SEQ ID NO: 284542 - DNA, 25 bp, Artificial
  Probe
cgacggagccgtcagctgtaggcca

SEQ ID NO: 284543 - DNA, 25 bp, Artificial
  Probe
catggtgtagcctcttgttctgaga

SEQ ID NO: 284544 - DNA, 25 bp, Artificial
  Probe
attttcaaggacatcggtactccta

SEQ ID NO: 284545 - DNA, 25 bp, Artificial
  Probe
ttagttgtcaaagcaccaacaggac

SEQ ID NO: 284546 - DNA, 25 bp, Artificial
  Probe
tgctgggcttcctaggcagaattca

SEQ ID NO: 284547 - DNA, 25 bp, Artificial
  Probe
ttttagttgtcaaagcaccaacagg

SEQ ID NO: 284548 - DNA, 25 bp, Artificial
  Probe
acccttgccggtaccgatagcactg

SEQ ID NO: 284549 - DNA, 25 bp, Artificial
  Probe
atttacagccagcatagggattcaa

SEQ ID NO: 284550 - DNA, 25 bp, Artificial
  Probe
gacccttgccggtaccgatagcact

SEQ ID NO: 284551 - DNA, 25 bp, Artificial
  Probe
acattgctgggcttcctaggcagaa

SEQ ID NO: 284552 - DNA, 25 bp, Artificial
  Probe
tgaaaagccagtttcaaccactagt

SEQ ID NO: 284553 - DNA, 25 bp, Artificial
  Probe
ccaacaggacattttgggatgtgaa

SEQ ID NO: 284554 - DNA, 25 bp, Artificial
  Probe
agccagctgtggttgaacttgaaaa

SEQ ID NO: 284555 - DNA, 25 bp, Artificial
  Probe
cacgaaactactgtgtaacattgct

SEQ ID NO: 284556 - DNA, 25 bp, Artificial
  Probe
gtgtaacattgctgggcttcctagg

SEQ ID NO: 284557 - DNA, 25 bp, Artificial
  Probe
agcacacttcccaaaagtagcagaa

SEQ ID NO: 284558 - DNA, 25 bp, Artificial
  Probe
tccttgaagctatgagcatttaaaa

SEQ ID NO: 284559 - DNA, 25 bp, Artificial
  Probe
gcaaaaatcttatggcctcaacttg

SEQ ID NO: 284560 - DNA, 25 bp, Artificial
  Probe
gcacacttcccaaaagtagcagaaa

SEQ ID NO: 284561 - DNA, 25 bp, Artificial
  Probe
cattgctgggcttcctaggcagaat

SEQ ID NO: 284562 - DNA, 25 bp, Artificial
  Probe
ttgtcaaagcaccaacaggacattt

SEQ ID NO: 284563 - DNA, 25 bp, Artificial
  Probe
atcttatggcctcaacttggccatt

SEQ ID NO: 284564 - DNA, 25 bp, Artificial
  Probe
ccagctgtggttgaacttgaaaatc

SEQ ID NO: 284565 - DNA, 25 bp, Artificial
  Probe
ttaaggaagccagctgtggttgaac

SEQ ID NO: 284566 - DNA, 25 bp, Artificial
  Probe
ttgtagcacacttcccaaaagtagc

SEQ ID NO: 284567 - DNA, 25 bp, Artificial
  Probe
ttcccaaaagtagcagaaattttga

SEQ ID NO: 284568 - DNA, 25 bp, Artificial
  Probe
ctatttacagccagcatagggattc

SEQ ID NO: 284569 - DNA, 25 bp, Artificial
  Probe
cactggcaatgttaggactggatta

SEQ ID NO: 284570 - DNA, 25 bp, Artificial
  Probe
caaagcaccaacaggacattttggg

SEQ ID NO: 284571 - DNA, 25 bp, Artificial
  Probe
tacagccagcatagggattcaaaag

SEQ ID NO: 284572 - DNA, 25 bp, Artificial
  Probe
aatcttatggcctcaacttggccat

SEQ ID NO: 284573 - DNA, 25 bp, Artificial
  Probe
taaggaagccagctgtggttgaact

SEQ ID NO: 284574 - DNA, 25 bp, Artificial
  Probe
cttcccaaaagtagcagaaattttg

SEQ ID NO: 284575 - DNA, 25 bp, Artificial
  Probe
tgaaaatcagcaaaaatcttatggc

SEQ ID NO: 284576 - DNA, 25 bp, Artificial
  Probe
ttgaaaagccagtttcaaccactag

SEQ ID NO: 284577 - DNA, 25 bp, Artificial
  Probe
ggcttcctaggcagaattcatataa

SEQ ID NO: 284578 - DNA, 25 bp, Artificial
  Probe
actgtgtaacattgctgggcttcct

SEQ ID NO: 284579 - DNA, 25 bp, Artificial
  Probe
attccttgaagctatgagcatttaa

SEQ ID NO: 284580 - DNA, 25 bp, Artificial
  Probe
gttgtcaaagcaccaacaggacatt

SEQ ID NO: 284581 - DNA, 25 bp, Artificial
  Probe
tgccggtaccgatagcactggcaat

SEQ ID NO: 284582 - DNA, 25 bp, Artificial
  Probe
aaactactgtgtaacattgctgggc

SEQ ID NO: 284583 - DNA, 25 bp, Artificial
  Probe
gtcaaagcaccaacaggacattttg

SEQ ID NO: 284584 - DNA, 25 bp, Artificial
  Probe
gcactggcaatgttaggactggatt

SEQ ID NO: 284585 - DNA, 25 bp, Artificial
  Probe
agcactggcaatgttaggactggat

SEQ ID NO: 284586 - DNA, 25 bp, Artificial
  Probe
gctgggcttcctaggcagaattcat

SEQ ID NO: 284587 - DNA, 25 bp, Artificial
  Probe
tgcttgtagcacacttcccaaaagt

SEQ ID NO: 284588 - DNA, 25 bp, Artificial
  Probe
gcttcctaggcagaattcatataaa

SEQ ID NO: 284589 - DNA, 25 bp, Artificial
  Probe
gtaccgatagcactggcaatgttag

SEQ ID NO: 284590 - DNA, 25 bp, Artificial
  Probe
ttatggcctcaacttggccattcag

SEQ ID NO: 284591 - DNA, 25 bp, Artificial
  Probe
tgcctagaggacttctagaagagct

SEQ ID NO: 284592 - DNA, 25 bp, Artificial
  Probe
acttctagaagagctagcccccggg

SEQ ID NO: 284593 - DNA, 25 bp, Artificial
  Probe
aatgtttatcttcctggagttccta

SEQ ID NO: 284594 - DNA, 25 bp, Artificial
  Probe
gtgcaggccagaaatggggcacccc

SEQ ID NO: 284595 - DNA, 25 bp, Artificial
  Probe
gaagctttgcctagaggacttctag

SEQ ID NO: 284596 - DNA, 25 bp, Artificial
  Probe
ccccgggatcctgtttcaagattca

SEQ ID NO: 284597 - DNA, 25 bp, Artificial
  Probe
gcccccgggatcctgtttcaagatt

SEQ ID NO: 284598 - DNA, 25 bp, Artificial
  Probe
aagctttgcctagaggacttctaga

SEQ ID NO: 284599 - DNA, 25 bp, Artificial
  Probe
aggacttctagaagagctagccccc

SEQ ID NO: 284600 - DNA, 25 bp, Artificial
  Probe
acatctgtgacaatgcttggctcgc

SEQ ID NO: 284601 - DNA, 25 bp, Artificial
  Probe
gagtcagaagctttgcctagaggac

SEQ ID NO: 284602 - DNA, 25 bp, Artificial
  Probe
accagtctccggagatggtagcaat

SEQ ID NO: 284603 - DNA, 25 bp, Artificial
  Probe
agagtcagaagctttgcctagagga

SEQ ID NO: 284604 - DNA, 25 bp, Artificial
  Probe
agtcagaagctttgcctagaggact

SEQ ID NO: 284605 - DNA, 25 bp, Artificial
  Probe
cagtctccggagatggtagcaatgt

SEQ ID NO: 284606 - DNA, 25 bp, Artificial
  Probe
tagcaatgtttatcttcctggagtt

SEQ ID NO: 284607 - DNA, 25 bp, Artificial
  Probe
ccaagatctgggtcaaccaacttac

SEQ ID NO: 284608 - DNA, 25 bp, Artificial
  Probe
ccctgcctggactgttgatacgctc

SEQ ID NO: 284609 - DNA, 25 bp, Artificial
  Probe
cctagaggacttctagaagagctag

SEQ ID NO: 284610 - DNA, 25 bp, Artificial
  Probe
tgtttatcttcctggagttcctaac

SEQ ID NO: 284611 - DNA, 25 bp, Artificial
  Probe
gcaatgtttatcttcctggagttcc

SEQ ID NO: 284612 - DNA, 25 bp, Artificial
  Probe
ctataactcgaaatcctcccggagg

SEQ ID NO: 284613 - DNA, 25 bp, Artificial
  Probe
tagcccccgggatcctgtttcaaga

SEQ ID NO: 284614 - DNA, 25 bp, Artificial
  Probe
agcccccgggatcctgtttcaagat

SEQ ID NO: 284615 - DNA, 25 bp, Artificial
  Probe
cctgcctggactgttgatacgctct

SEQ ID NO: 284616 - DNA, 25 bp, Artificial
  Probe
tctagaagagctagcccccgggatc

SEQ ID NO: 284617 - DNA, 25 bp, Artificial
  Probe
ctagcccccgggatcctgtttcaag

SEQ ID NO: 284618 - DNA, 25 bp, Artificial
  Probe
ttgcctagaggacttctagaagagc

SEQ ID NO: 284619 - DNA, 25 bp, Artificial
  Probe
agtctccggagatggtagcaatgtt

SEQ ID NO: 284620 - DNA, 25 bp, Artificial
  Probe
ccagtctccggagatggtagcaatg

SEQ ID NO: 284621 - DNA, 25 bp, Artificial
  Probe
gatctgggtcaaccaacttacccca

SEQ ID NO: 284622 - DNA, 25 bp, Artificial
  Probe
ctagaggacttctagaagagctagc

SEQ ID NO: 284623 - DNA, 25 bp, Artificial
  Probe
ttctagaagagctagcccccgggat

SEQ ID NO: 284624 - DNA, 25 bp, Artificial
  Probe
gactataactcgaaatcctcccgga

SEQ ID NO: 284625 - DNA, 25 bp, Artificial
  Probe
atgtttatcttcctggagttcctaa

SEQ ID NO: 284626 - DNA, 25 bp, Artificial
  Probe
tataactcgaaatcctcccggaggg

SEQ ID NO: 284627 - DNA, 25 bp, Artificial
  Probe
agcaatgtttatcttcctggagttc

SEQ ID NO: 284628 - DNA, 25 bp, Artificial
  Probe
caagatctgggtcaaccaacttacc

SEQ ID NO: 284629 - DNA, 25 bp, Artificial
  Probe
tctccggagatggtagcaatgttta

SEQ ID NO: 284630 - DNA, 25 bp, Artificial
  Probe
ctccggagatggtagcaatgtttat

SEQ ID NO: 284631 - DNA, 25 bp, Artificial
  Probe
gtctccggagatggtagcaatgttt

SEQ ID NO: 284632 - DNA, 25 bp, Artificial
  Probe
gacatctgtgacaatgcttggctcg

SEQ ID NO: 284633 - DNA, 25 bp, Artificial
  Probe
cttctagaagagctagcccccggga

SEQ ID NO: 284634 - DNA, 25 bp, Artificial
  Probe
actataactcgaaatcctcccggag

SEQ ID NO: 284635 - DNA, 25 bp, Artificial
  Probe
agctttgcctagaggacttctagaa

SEQ ID NO: 284636 - DNA, 25 bp, Artificial
  Probe
caatgtttatcttcctggagttcct

SEQ ID NO: 284637 - DNA, 25 bp, Artificial
  Probe
ctgtggatttggtggcctctgaagt

SEQ ID NO: 284638 - DNA, 25 bp, Artificial
  Probe
gcctctgaagtattcttgaacattg

SEQ ID NO: 284639 - DNA, 25 bp, Artificial
  Probe
agtcagaatcctgtggcccatcaca

SEQ ID NO: 284640 - DNA, 25 bp, Artificial
  Probe
ctttgattcctaaaagagtggttct

SEQ ID NO: 284641 - DNA, 25 bp, Artificial
  Probe
aagcttgtgtgcacaatgattatgc

SEQ ID NO: 284642 - DNA, 25 bp, Artificial
  Probe
agtattacatggtaagccttactgg

SEQ ID NO: 284643 - DNA, 25 bp, Artificial
  Probe
cttaaaaagtcagaatcctgtggcc

SEQ ID NO: 284644 - DNA, 25 bp, Artificial
  Probe
agcgtgaatgtgctttgattcctaa

SEQ ID NO: 284645 - DNA, 25 bp, Artificial
  Probe
atcagcagtttttgaacagacaaat

SEQ ID NO: 284646 - DNA, 25 bp, Artificial
  Probe
cttgtgtgcacaatgattatgcaga

SEQ ID NO: 284647 - DNA, 25 bp, Artificial
  Probe
agactgtgaggaaccacacaatgta

SEQ ID NO: 284648 - DNA, 25 bp, Artificial
  Probe
ccaacagtgaacaggaagtgataag

SEQ ID NO: 284649 - DNA, 25 bp, Artificial
  Probe
ccagtattgttgtcacagggataaa

SEQ ID NO: 284650 - DNA, 25 bp, Artificial
  Probe
cctaaacaatttcacctgtagctgg

SEQ ID NO: 284651 - DNA, 25 bp, Artificial
  Probe
atccttgaagccaaatgttctgatt

SEQ ID NO: 284652 - DNA, 25 bp, Artificial
  Probe
cctgctgagtattacatggtaagcc

SEQ ID NO: 284653 - DNA, 25 bp, Artificial
  Probe
tttttaagagcctgtcaaagcgtga

SEQ ID NO: 284654 - DNA, 25 bp, Artificial
  Probe
agcatttggttgcattgttcttctc

SEQ ID NO: 284655 - DNA, 25 bp, Artificial
  Probe
gtagctggttttcagacatggtact

SEQ ID NO: 284656 - DNA, 25 bp, Artificial
  Probe
tcagacatggtactatcaaaaggat

SEQ ID NO: 284657 - DNA, 25 bp, Artificial
  Probe
ggttgcattgttcttctctcattcc

SEQ ID NO: 284658 - DNA, 25 bp, Artificial
  Probe
attcttgaacattgtgttctgtgtc

SEQ ID NO: 284659 - DNA, 25 bp, Artificial
  Probe
cccacacagtgtgtcaagagctagt

SEQ ID NO: 284660 - DNA, 25 bp, Artificial
  Probe
gtcagaatcctgtggcccatcacaa

SEQ ID NO: 284661 - DNA, 25 bp, Artificial
  Probe
aaatttcttgaaaggtccttgctga

SEQ ID NO: 284662 - DNA, 25 bp, Artificial
  Probe
cattctcaggttatggctaggggtg

SEQ ID NO: 284663 - DNA, 25 bp, Artificial
  Probe
gtgtcccaacttctgaattaactcg

SEQ ID NO: 284664 - DNA, 25 bp, Artificial
  Probe
tggtgagtattcaccctctaataga

SEQ ID NO: 284665 - DNA, 25 bp, Artificial
  Probe
gcaataaacctattttcaagatgag

SEQ ID NO: 284666 - DNA, 25 bp, Artificial
  Probe
ctgcacaaagtgtcccaacttctga

SEQ ID NO: 284667 - DNA, 25 bp, Artificial
  Probe
cacaagttctagagaaggggaaagc

SEQ ID NO: 284668 - DNA, 25 bp, Artificial
  Probe
ctggttcacaagttctagagaaggg

SEQ ID NO: 284669 - DNA, 25 bp, Artificial
  Probe
ggcaaatttgccacattctcaggtt

SEQ ID NO: 284670 - DNA, 25 bp, Artificial
  Probe
tattgtattcgattctaaatccgtg

SEQ ID NO: 284671 - DNA, 25 bp, Artificial
  Probe
ttcctaaaagagtggttcttataca

SEQ ID NO: 284672 - DNA, 25 bp, Artificial
  Probe
catcacaaggcaaaggttatcctaa

SEQ ID NO: 284673 - DNA, 25 bp, Artificial
  Probe
tcattatggttcaaatcctgctgag

SEQ ID NO: 284674 - DNA, 25 bp, Artificial
  Probe
cttagttcagtgcaaaaagacttaa

SEQ ID NO: 284675 - DNA, 25 bp, Artificial
  Probe
gctttgattcctaaaagagtggttc

SEQ ID NO: 284676 - DNA, 25 bp, Artificial
  Probe
atcctgtggcccatcacaaggcaaa

SEQ ID NO: 284677 - DNA, 25 bp, Artificial
  Probe
cttgaaaggtccttgctgattgggg

SEQ ID NO: 284678 - DNA, 25 bp, Artificial
  Probe
cttgaagccaaatgttctgatttaa

SEQ ID NO: 284679 - DNA, 25 bp, Artificial
  Probe
ccctctaatagatggacaaaagcag

SEQ ID NO: 284680 - DNA, 25 bp, Artificial
  Probe
atttatcagcagtttttgaacagac

SEQ ID NO: 284681 - DNA, 25 bp, Artificial
  Probe
aaagccaacagtgaacaggaagtga

SEQ ID NO: 284682 - DNA, 25 bp, Artificial
  Probe
ttaaagaccaaaggtgtctacgagt

SEQ ID NO: 284683 - DNA, 25 bp, Artificial
  Probe
tatcctcagctgtggggacactcca

SEQ ID NO: 284684 - DNA, 25 bp, Artificial
  Probe
gaaccagaagcctacctcagaggag

SEQ ID NO: 284685 - DNA, 25 bp, Artificial
  Probe
cagccactcggctatcggcttgacg

SEQ ID NO: 284686 - DNA, 25 bp, Artificial
  Probe
gaaagccgaccagttacagcccgca

SEQ ID NO: 284687 - DNA, 25 bp, Artificial
  Probe
gtccgcttcgccttagagaagagtt

SEQ ID NO: 284688 - DNA, 25 bp, Artificial
  Probe
aggagaaacgcatcaacccttgcag

SEQ ID NO: 284689 - DNA, 25 bp, Artificial
  Probe
tcgagacgaatgtccgcttcgcctt

SEQ ID NO: 284690 - DNA, 25 bp, Artificial
  Probe
actaccttatcctcagctgtgggga

SEQ ID NO: 284691 - DNA, 25 bp, Artificial
  Probe
gccactcggctatcggcttgacggg

SEQ ID NO: 284692 - DNA, 25 bp, Artificial
  Probe
agaagaggaccagcatcgagacgaa

SEQ ID NO: 284693 - DNA, 25 bp, Artificial
  Probe
taccttatcctcagctgtggggaca

SEQ ID NO: 284694 - DNA, 25 bp, Artificial
  Probe
ggaaagccgaccagttacagcccgc

SEQ ID NO: 284695 - DNA, 25 bp, Artificial
  Probe
gggaaagccgaccagttacagcccg

SEQ ID NO: 284696 - DNA, 25 bp, Artificial
  Probe
cgcttcgccttagagaagagtttcc

SEQ ID NO: 284697 - DNA, 25 bp, Artificial
  Probe
gggcgcaggaaccttaccattgtcc

SEQ ID NO: 284698 - DNA, 25 bp, Artificial
  Probe
ctacctcagaggagatcctgctgat

SEQ ID NO: 284699 - DNA, 25 bp, Artificial
  Probe
caaggcagccactcggctatcggct

SEQ ID NO: 284700 - DNA, 25 bp, Artificial
  Probe
agagcagctgcacatggaaaaggaa

SEQ ID NO: 284701 - DNA, 25 bp, Artificial
  Probe
aggccctggcctctggtggaaccct

SEQ ID NO: 284702 - DNA, 25 bp, Artificial
  Probe
tgacgggcctgaaccccagcgcagg

SEQ ID NO: 284703 - DNA, 25 bp, Artificial
  Probe
tcccaagcttctagcagtctgagca

SEQ ID NO: 284704 - DNA, 25 bp, Artificial
  Probe
accattgtcccaagcttctagcagt

SEQ ID NO: 284705 - DNA, 25 bp, Artificial
  Probe
gagaaacgcatcaacccttgcagtg

SEQ ID NO: 284706 - DNA, 25 bp, Artificial
  Probe
agaagagtttcctagcgaaccagaa

SEQ ID NO: 284707 - DNA, 25 bp, Artificial
  Probe
gtctgagcacaacagttactacctt

SEQ ID NO: 284708 - DNA, 25 bp, Artificial
  Probe
gaagagtttcctagcgaaccagaag

SEQ ID NO: 284709 - DNA, 25 bp, Artificial
  Probe
agcagtctgagcacaacagttacta

SEQ ID NO: 284710 - DNA, 25 bp, Artificial
  Probe
ctagcgaaccagaagcctacctcag

SEQ ID NO: 284711 - DNA, 25 bp, Artificial
  Probe
cttctagcagtctgagcacaacagt

SEQ ID NO: 284712 - DNA, 25 bp, Artificial
  Probe
cgaatgtccgcttcgccttagagaa

SEQ ID NO: 284713 - DNA, 25 bp, Artificial
  Probe
acgaatgtccgcttcgccttagaga

SEQ ID NO: 284714 - DNA, 25 bp, Artificial
  Probe
ttcgccttagagaagagtttcctag

SEQ ID NO: 284715 - DNA, 25 bp, Artificial
  Probe
tcggctatcggcttgacgggcctga

SEQ ID NO: 284716 - DNA, 25 bp, Artificial
  Probe
agttactaccttatcctcagctgtg

SEQ ID NO: 284717 - DNA, 25 bp, Artificial
  Probe
ccagcctgggtttcgacgggctgcc

SEQ ID NO: 284718 - DNA, 25 bp, Artificial
  Probe
ttgacgggcctgaaccccagcgcag

SEQ ID NO: 284719 - DNA, 25 bp, Artificial
  Probe
ctcaaggcagccactcggctatcgg

SEQ ID NO: 284720 - DNA, 25 bp, Artificial
  Probe
taccattgtcccaagcttctagcag

SEQ ID NO: 284721 - DNA, 25 bp, Artificial
  Probe
tagcgaaccagaagcctacctcaga

SEQ ID NO: 284722 - DNA, 25 bp, Artificial
  Probe
ggaaccttaccattgtcccaagctt

SEQ ID NO: 284723 - DNA, 25 bp, Artificial
  Probe
accagcatcgagacgaatgtccgct

SEQ ID NO: 284724 - DNA, 25 bp, Artificial
  Probe
gctatcggcttgacgggcctgaacc

SEQ ID NO: 284725 - DNA, 25 bp, Artificial
  Probe
gcttcgccttagagaagagtttcct

SEQ ID NO: 284726 - DNA, 25 bp, Artificial
  Probe
gcatcgagacgaatgtccgcttcgc

SEQ ID NO: 284727 - DNA, 25 bp, Artificial
  Probe
cagagcagctgcacatggaaaagga

SEQ ID NO: 284728 - DNA, 25 bp, Artificial
  Probe
gcagagcagctgcacatggaaaagg

SEQ ID NO: 284729 - DNA, 25 bp, Artificial
  Probe
aggtcaccggcctgcagggtcaatc

SEQ ID NO: 284730 - DNA, 25 bp, Artificial
  Probe
ccgaatttggcttcctttcttggct

SEQ ID NO: 284731 - DNA, 25 bp, Artificial
  Probe
cggcctgcagggtcaatcttgatgt

SEQ ID NO: 284732 - DNA, 25 bp, Artificial
  Probe
tcatatacagatggtgtctagcaat

SEQ ID NO: 284733 - DNA, 25 bp, Artificial
  Probe
tttggcttcctttcttggctctgaa

SEQ ID NO: 284734 - DNA, 25 bp, Artificial
  Probe
agggtcaatcttgatgtcattcgag

SEQ ID NO: 284735 - DNA, 25 bp, Artificial
  Probe
ctgcagggtcaatcttgatgtcatt

SEQ ID NO: 284736 - DNA, 25 bp, Artificial
  Probe
tccgaatttggcttcctttcttggc

SEQ ID NO: 284737 - DNA, 25 bp, Artificial
  Probe
gtcaccggcctgcagggtcaatctt

SEQ ID NO: 284738 - DNA, 25 bp, Artificial
  Probe
ttgtcatatacagatggtgtctagc

SEQ ID NO: 284739 - DNA, 25 bp, Artificial
  Probe
cctgcagggtcaatcttgatgtcat

SEQ ID NO: 284740 - DNA, 25 bp, Artificial
  Probe
ggtcaccggcctgcagggtcaatct

SEQ ID NO: 284741 - DNA, 25 bp, Artificial
  Probe
tcattcgaggccttccgaatttggc

SEQ ID NO: 284742 - DNA, 25 bp, Artificial
  Probe
gtcatatacagatggtgtctagcaa

SEQ ID NO: 284743 - DNA, 25 bp, Artificial
  Probe
tcttgatgtcattcgaggccttccg

SEQ ID NO: 284744 - DNA, 25 bp, Artificial
  Probe
tggtgtctagcaatcacggctgcac

SEQ ID NO: 284745 - DNA, 25 bp, Artificial
  Probe
aatcttgatgtcattcgaggccttc

SEQ ID NO: 284746 - DNA, 25 bp, Artificial
  Probe
cgaggccttccgaatttggcttcct

SEQ ID NO: 284747 - DNA, 25 bp, Artificial
  Probe
tatacagatggtgtctagcaatcac

SEQ ID NO: 284748 - DNA, 25 bp, Artificial
  Probe
tgtctagcaatcacggctgcactcg

SEQ ID NO: 284749 - DNA, 25 bp, Artificial
  Probe
gcctgcagggtcaatcttgatgtca

SEQ ID NO: 284750 - DNA, 25 bp, Artificial
  Probe
tgcagggtcaatcttgatgtcattc

SEQ ID NO: 284751 - DNA, 25 bp, Artificial
  Probe
tcaccggcctgcagggtcaatcttg

SEQ ID NO: 284752 - DNA, 25 bp, Artificial
  Probe
ttgatgtcattcgaggccttccgaa

SEQ ID NO: 284753 - DNA, 25 bp, Artificial
  Probe
catatacagatggtgtctagcaatc

SEQ ID NO: 284754 - DNA, 25 bp, Artificial
  Probe
atacagatggtgtctagcaatcacg

SEQ ID NO: 284755 - DNA, 25 bp, Artificial
  Probe
ggtcaatcttgatgtcattcgaggc

SEQ ID NO: 284756 - DNA, 25 bp, Artificial
  Probe
cgaatttggcttcctttcttggctc

SEQ ID NO: 284757 - DNA, 25 bp, Artificial
  Probe
atggtgtctagcaatcacggctgca

SEQ ID NO: 284758 - DNA, 25 bp, Artificial
  Probe
gatggtgtctagcaatcacggctgc

SEQ ID NO: 284759 - DNA, 25 bp, Artificial
  Probe
gggtcaatcttgatgtcattcgagg

SEQ ID NO: 284760 - DNA, 25 bp, Artificial
  Probe
atcttgatgtcattcgaggccttcc

SEQ ID NO: 284761 - DNA, 25 bp, Artificial
  Probe
tcaatcttgatgtcattcgaggcct

SEQ ID NO: 284762 - DNA, 25 bp, Artificial
  Probe
ggtgtctagcaatcacggctgcact

SEQ ID NO: 284763 - DNA, 25 bp, Artificial
  Probe
atatacagatggtgtctagcaatca

SEQ ID NO: 284764 - DNA, 25 bp, Artificial
  Probe
cattcgaggccttccgaatttggct

SEQ ID NO: 284765 - DNA, 25 bp, Artificial
  Probe
gaatttggcttcctttcttggctct

SEQ ID NO: 284766 - DNA, 25 bp, Artificial
  Probe
ggcctgcagggtcaatcttgatgtc

SEQ ID NO: 284767 - DNA, 25 bp, Artificial
  Probe
tgatgtcattcgaggccttccgaat

SEQ ID NO: 284768 - DNA, 25 bp, Artificial
  Probe
gaggccttccgaatttggcttcctt

SEQ ID NO: 284769 - DNA, 25 bp, Artificial
  Probe
cttgatgtcattcgaggccttccga

SEQ ID NO: 284770 - DNA, 25 bp, Artificial
  Probe
gtcaatcttgatgtcattcgaggcc

SEQ ID NO: 284771 - DNA, 25 bp, Artificial
  Probe
tacagatggtgtctagcaatcacgg

SEQ ID NO: 284772 - DNA, 25 bp, Artificial
  Probe
cagggtcaatcttgatgtcattcga

SEQ ID NO: 284773 - DNA, 25 bp, Artificial
  Probe
gccttccgaatttggcttcctttct

SEQ ID NO: 284774 - DNA, 25 bp, Artificial
  Probe
caatcttgatgtcattcgaggcctt

SEQ ID NO: 284775 - DNA, 25 bp, Artificial
  Probe
ccagtcagtgagtgagcagatcaag

SEQ ID NO: 284776 - DNA, 25 bp, Artificial
  Probe
tcaagaagaactttgccaagagcaa

SEQ ID NO: 284777 - DNA, 25 bp, Artificial
  Probe
aagacccagagaagaggttcacctg

SEQ ID NO: 284778 - DNA, 25 bp, Artificial
  Probe
tgccaaagatttcatacgtcatttg

SEQ ID NO: 284779 - DNA, 25 bp, Artificial
  Probe
gaactttgccaagagcaagtggaag

SEQ ID NO: 284780 - DNA, 25 bp, Artificial
  Probe
aggttcacctgtgagcaggccttgc

SEQ ID NO: 284781 - DNA, 25 bp, Artificial
  Probe
acgacatctctgactctgccaaaga

SEQ ID NO: 284782 - DNA, 25 bp, Artificial
  Probe
aagaggttcacctgtgagcaggcct

SEQ ID NO: 284783 - DNA, 25 bp, Artificial
  Probe
actttgccaagagcaagtggaagca

SEQ ID NO: 284784 - DNA, 25 bp, Artificial
  Probe
tggttcggcacatgaggaagctgca

SEQ ID NO: 284785 - DNA, 25 bp, Artificial
  Probe
gaaagacccagagaagaggttcacc

SEQ ID NO: 284786 - DNA, 25 bp, Artificial
  Probe
gacatctctgactctgccaaagatt

SEQ ID NO: 284787 - DNA, 25 bp, Artificial
  Probe
tggggagtttctgaccccatacttc

SEQ ID NO: 284788 - DNA, 25 bp, Artificial
  Probe
tcacctgtgagcaggccttgcagca

SEQ ID NO: 284789 - DNA, 25 bp, Artificial
  Probe
ctgtggttcggcacatgaggaagct

SEQ ID NO: 284790 - DNA, 25 bp, Artificial
  Probe
agaactttgccaagagcaagtggaa

SEQ ID NO: 284791 - DNA, 25 bp, Artificial
  Probe
gccaaagatttcatacgtcatttga

SEQ ID NO: 284792 - DNA, 25 bp, Artificial
  Probe
accagtcagtgagtgagcagatcaa

SEQ ID NO: 284793 - DNA, 25 bp, Artificial
  Probe
ttcacctgtgagcaggccttgcagc

SEQ ID NO: 284794 - DNA, 25 bp, Artificial
  Probe
tttgccaagagcaagtggaagcaag

SEQ ID NO: 284795 - DNA, 25 bp, Artificial
  Probe
aactttgccaagagcaagtggaagc

SEQ ID NO: 284796 - DNA, 25 bp, Artificial
  Probe
gaagaggttcacctgtgagcaggcc

SEQ ID NO: 284797 - DNA, 25 bp, Artificial
  Probe
cagaactggggagtttctgacccca

SEQ ID NO: 284798 - DNA, 25 bp, Artificial
  Probe
agaggttcacctgtgagcaggcctt

SEQ ID NO: 284799 - DNA, 25 bp, Artificial
  Probe
tcaccccagaactggggagtttctg

SEQ ID NO: 284800 - DNA, 25 bp, Artificial
  Probe
caaagatttcatacgtcatttgatg

SEQ ID NO: 284801 - DNA, 25 bp, Artificial
  Probe
caccagtcagtgagtgagcagatca

SEQ ID NO: 284802 - DNA, 25 bp, Artificial
  Probe
ggttcacctgtgagcaggccttgca

SEQ ID NO: 284803 - DNA, 25 bp, Artificial
  Probe
ggacgacatctctgactctgccaaa

SEQ ID NO: 284804 - DNA, 25 bp, Artificial
  Probe
ggggagtttctgaccccatacttct

SEQ ID NO: 284805 - DNA, 25 bp, Artificial
  Probe
cgacatctctgactctgccaaagat

SEQ ID NO: 284806 - DNA, 25 bp, Artificial
  Probe
ctgactctgccaaagatttcatacg

SEQ ID NO: 284807 - DNA, 25 bp, Artificial
  Probe
gaggttcacctgtgagcaggccttg

SEQ ID NO: 284808 - DNA, 25 bp, Artificial
  Probe
tgactctgccaaagatttcatacgt

SEQ ID NO: 284809 - DNA, 25 bp, Artificial
  Probe
ctttgccaagagcaagtggaagcaa

SEQ ID NO: 284810 - DNA, 25 bp, Artificial
  Probe
gacgacatctctgactctgccaaag

SEQ ID NO: 284811 - DNA, 25 bp, Artificial
  Probe
agaagaggttcacctgtgagcaggc

SEQ ID NO: 284812 - DNA, 25 bp, Artificial
  Probe
ttgccaagagcaagtggaagcaagc

SEQ ID NO: 284813 - DNA, 25 bp, Artificial
  Probe
gtgcagccctggaatccctgaccaa

SEQ ID NO: 284814 - DNA, 25 bp, Artificial
  Probe
aggcctcggatgtggcttccagccc

SEQ ID NO: 284815 - DNA, 25 bp, Artificial
  Probe
tatcgaggagctgagcaacatcaca

SEQ ID NO: 284816 - DNA, 25 bp, Artificial
  Probe
cctgtggccctcagggagcttatcg

SEQ ID NO: 284817 - DNA, 25 bp, Artificial
  Probe
aaccaaaaggcctcggatgtggctt

SEQ ID NO: 284818 - DNA, 25 bp, Artificial
  Probe
gcaacatcacacaagaccagaagac

SEQ ID NO: 284819 - DNA, 25 bp, Artificial
  Probe
tctccagttgcaatgccatccacag

SEQ ID NO: 284820 - DNA, 25 bp, Artificial
  Probe
agaagacttccctgtgcaacagcag

SEQ ID NO: 284821 - DNA, 25 bp, Artificial
  Probe
gggccagtgcggagatccacatctc

SEQ ID NO: 284822 - DNA, 25 bp, Artificial
  Probe
cagctggcgggttctgtgcagccct

SEQ ID NO: 284823 - DNA, 25 bp, Artificial
  Probe
tggcactctgggtgactgcagtcct

SEQ ID NO: 284824 - DNA, 25 bp, Artificial
  Probe
gcgggttctgtgcagccctggaatc

SEQ ID NO: 284825 - DNA, 25 bp, Artificial
  Probe
cgggttctgtgcagccctggaatcc

SEQ ID NO: 284826 - DNA, 25 bp, Artificial
  Probe
caacagcagcatggtatggagcgtg

SEQ ID NO: 284827 - DNA, 25 bp, Artificial
  Probe
ggaatccctgaccaacatctccagt

SEQ ID NO: 284828 - DNA, 25 bp, Artificial
  Probe
accccagggccagtgcggagatcca

SEQ ID NO: 284829 - DNA, 25 bp, Artificial
  Probe
gaccaacatctccagttgcaatgcc

SEQ ID NO: 284830 - DNA, 25 bp, Artificial
  Probe
agctgagcaacatcacacaagacca

SEQ ID NO: 284831 - DNA, 25 bp, Artificial
  Probe
tattgaatggcctctgtaaccaaaa

SEQ ID NO: 284832 - DNA, 25 bp, Artificial
  Probe
acagctggcgggttctgtgcagccc

SEQ ID NO: 284833 - DNA, 25 bp, Artificial
  Probe
ctgaccaacatctccagttgcaatg

SEQ ID NO: 284834 - DNA, 25 bp, Artificial
  Probe
cacacaagaccagaagacttccctg

SEQ ID NO: 284835 - DNA, 25 bp, Artificial
  Probe
ctggctctcgcttgccttggtggtc

SEQ ID NO: 284836 - DNA, 25 bp, Artificial
  Probe
aggacccagaggatattgaatggcc

SEQ ID NO: 284837 - DNA, 25 bp, Artificial
  Probe
gagaccggccctggacatctcagct

SEQ ID NO: 284838 - DNA, 25 bp, Artificial
  Probe
actccaagcaacttttccgctatgg

SEQ ID NO: 284839 - DNA, 25 bp, Artificial
  Probe
caacttttccgctatggccactgag

SEQ ID NO: 284840 - DNA, 25 bp, Artificial
  Probe
tcgaagtagcccagtttatatcaaa

SEQ ID NO: 284841 - DNA, 25 bp, Artificial
  Probe
acttttccgctatggccactgaggg

SEQ ID NO: 284842 - DNA, 25 bp, Artificial
  Probe
tctgtgcagccctggaatccctgac

SEQ ID NO: 284843 - DNA, 25 bp, Artificial
  Probe
ccaaaatcgaagtagcccagtttat

SEQ ID NO: 284844 - DNA, 25 bp, Artificial
  Probe
tggccctcagggagcttatcgagga

SEQ ID NO: 284845 - DNA, 25 bp, Artificial
  Probe
acaagaccagaagacttccctgtgc

SEQ ID NO: 284846 - DNA, 25 bp, Artificial
  Probe
gcttgccttggtggtcttgccaccc

SEQ ID NO: 284847 - DNA, 25 bp, Artificial
  Probe
ccaagcaacttttccgctatggcca

SEQ ID NO: 284848 - DNA, 25 bp, Artificial
  Probe
gtagcccagtttatatcaaaactgc

SEQ ID NO: 284849 - DNA, 25 bp, Artificial
  Probe
tggaatccctgaccaacatctccag

SEQ ID NO: 284850 - DNA, 25 bp, Artificial
  Probe
aaaggcctcggatgtggcttccagc

SEQ ID NO: 284851 - DNA, 25 bp, Artificial
  Probe
ccctcagggagcttatcgaggagct

SEQ ID NO: 284852 - DNA, 25 bp, Artificial
  Probe
cccccagataccaaaatcgaagtag

SEQ ID NO: 284853 - DNA, 25 bp, Artificial
  Probe
tgcagtcctggctctcgcttgcctt

SEQ ID NO: 284854 - DNA, 25 bp, Artificial
  Probe
cccctgtggccctcagggagcttat

SEQ ID NO: 284855 - DNA, 25 bp, Artificial
  Probe
gccatccacaggacccagaggatat

SEQ ID NO: 284856 - DNA, 25 bp, Artificial
  Probe
tctgtaaccaaaaggcctcggatgt

SEQ ID NO: 284857 - DNA, 25 bp, Artificial
  Probe
ggagcttatcgaggagctgagcaac

SEQ ID NO: 284858 - DNA, 25 bp, Artificial
  Probe
aggagctgagcaacatcacacaaga

SEQ ID NO: 284859 - DNA, 25 bp, Artificial
  Probe
gttgtaccctactgtgctcagacag

SEQ ID NO: 284860 - DNA, 25 bp, Artificial
  Probe
aatacttgctgagctgtgccaagct

SEQ ID NO: 284861 - DNA, 25 bp, Artificial
  Probe
cactgtgctgcatgatggtgtggtt

SEQ ID NO: 284862 - DNA, 25 bp, Artificial
  Probe
gctgctgggcgctgctctgaccttt

SEQ ID NO: 284863 - DNA, 25 bp, Artificial
  Probe
tccgggactgagttggactagcgac

SEQ ID NO: 284864 - DNA, 25 bp, Artificial
  Probe
gaccctcatacttagacctgttccg

SEQ ID NO: 284865 - DNA, 25 bp, Artificial
  Probe
ctgcctgtgctctccagcagcagaa

SEQ ID NO: 284866 - DNA, 25 bp, Artificial
  Probe
tacctgttcacgtccgagttgtacc

SEQ ID NO: 284867 - DNA, 25 bp, Artificial
  Probe
gcctgagccaggaggccctgaacaa

SEQ ID NO: 284868 - DNA, 25 bp, Artificial
  Probe
ggcgctggcttctgctggctgccac

SEQ ID NO: 284869 - DNA, 25 bp, Artificial
  Probe
acggcctgactctggacgtgtctgg

SEQ ID NO: 284870 - DNA, 25 bp, Artificial
  Probe
tgctcccactggagttggagtggct

SEQ ID NO: 284871 - DNA, 25 bp, Artificial
  Probe
cacctaaggatggagctgctcctga

SEQ ID NO: 284872 - DNA, 25 bp, Artificial
  Probe
tctgatgtctgcagcctccatcaac

SEQ ID NO: 284873 - DNA, 25 bp, Artificial
  Probe
tggatacttgtctgacaggtttggc

SEQ ID NO: 284874 - DNA, 25 bp, Artificial
  Probe
aaattatggtctacttccttgtgcg

SEQ ID NO: 284875 - DNA, 25 bp, Artificial
  Probe
tgctgcccaaagttgcttacggggg

SEQ ID NO: 284876 - DNA, 25 bp, Artificial
  Probe
ctgtttggggctgtggagctcccct

SEQ ID NO: 284877 - DNA, 25 bp, Artificial
  Probe
ctgctgctggcactggtgggctacc

SEQ ID NO: 284878 - DNA, 25 bp, Artificial
  Probe
ggcacagctgccagagaccatccag

SEQ ID NO: 284879 - DNA, 25 bp, Artificial
  Probe
tgccaagctcaatgggcggcccgtg

SEQ ID NO: 284880 - DNA, 25 bp, Artificial
  Probe
tctgggacgccgtctcacggaggct

SEQ ID NO: 284881 - DNA, 25 bp, Artificial
  Probe
gaaagctttttctgaagctgctttt

SEQ ID NO: 284882 - DNA, 25 bp, Artificial
  Probe
acagctgccagagaccatccaggat

SEQ ID NO: 284883 - DNA, 25 bp, Artificial
  Probe
cagcaccgtcttctggtcgggaggc

SEQ ID NO: 284884 - DNA, 25 bp, Artificial
  Probe
cttcttcattggtgtgctggtggga

SEQ ID NO: 284885 - DNA, 25 bp, Artificial
  Probe
tgcactgcactcctgctgcctgaga

SEQ ID NO: 284886 - DNA, 25 bp, Artificial
  Probe
agacctgttccgaacatctcagctc

SEQ ID NO: 284887 - DNA, 25 bp, Artificial
  Probe
actacatcatgttcgtagtcacccg

SEQ ID NO: 284888 - DNA, 25 bp, Artificial
  Probe
tggagtgaacttttcctactacggc

SEQ ID NO: 284889 - DNA, 25 bp, Artificial
  Probe
atggagtgtggctgttgctgcccaa

SEQ ID NO: 284890 - DNA, 25 bp, Artificial
  Probe
atgttcgtagtcacccgtacactca

SEQ ID NO: 284891 - DNA, 25 bp, Artificial
  Probe
ctgcactcctgctgcctgagacgaa

SEQ ID NO: 284892 - DNA, 25 bp, Artificial
  Probe
agcagaacaacttcccgcagcactg

SEQ ID NO: 284893 - DNA, 25 bp, Artificial
  Probe
ctggggctgaacgtgtaccagacac

SEQ ID NO: 284894 - DNA, 25 bp, Artificial
  Probe
aggctaggggcctctctggcccgac

SEQ ID NO: 284895 - DNA, 25 bp, Artificial
  Probe
ttgtctgacaggtttggcaggcgcc

SEQ ID NO: 284896 - DNA, 25 bp, Artificial
  Probe
ctccacctaaggatggagctgctcc

SEQ ID NO: 284897 - DNA, 25 bp, Artificial
  Probe
tgggccgctgggattctggactccc

SEQ ID NO: 284898 - DNA, 25 bp, Artificial
  Probe
gccctggctggcttcaccatcattg

SEQ ID NO: 284899 - DNA, 25 bp, Artificial
  Probe
ggcttctaacccagggtcgtgtgga

SEQ ID NO: 284900 - DNA, 25 bp, Artificial
  Probe
gcgccggcttctgctggtggcctac

SEQ ID NO: 284901 - DNA, 25 bp, Artificial
  Probe
tgtgtcccaggcatcatcagcatct

SEQ ID NO: 284902 - DNA, 25 bp, Artificial
  Probe
gccggggtcatcagcaccgtcttct

SEQ ID NO: 284903 - DNA, 25 bp, Artificial
  Probe
cagttctccacaggagctgggcaca

SEQ ID NO: 284904 - DNA, 25 bp, Artificial
  Probe
gtcatggatcactgctctggtggtg

SEQ ID NO: 284905 - DNA, 25 bp, Artificial
  Probe
ggttctgtcttttaccatcgcctct

SEQ ID NO: 284906 - DNA, 25 bp, Artificial
  Probe
tcccaatcagggtctctatgtgtag

SEQ ID NO: 284907 - DNA, 25 bp, Artificial
  Probe
gacacagaaaagtcacagtgcagac

SEQ ID NO: 284908 - DNA, 25 bp, Artificial
  Probe
tcagggtctctatgtgtagccaagg

SEQ ID NO: 284909 - DNA, 25 bp, Artificial
  Probe
aagcatgtggccaccatctaccaag

SEQ ID NO: 284910 - DNA, 25 bp, Artificial
  Probe
tgccagaggggattcctagaaagaa

SEQ ID NO: 284911 - DNA, 25 bp, Artificial
  Probe
ccaatgcctccacagtctgtggcta

SEQ ID NO: 284912 - DNA, 25 bp, Artificial
  Probe
gtggccaccatctaccaagaacttt

SEQ ID NO: 284913 - DNA, 25 bp, Artificial
  Probe
ctccccagtgtgagcattacagatg

SEQ ID NO: 284914 - DNA, 25 bp, Artificial
  Probe
tctctgcagcgcaaactgctctgca

SEQ ID NO: 284915 - DNA, 25 bp, Artificial
  Probe
gccaaacatttatcgtgctatttcg

SEQ ID NO: 284916 - DNA, 25 bp, Artificial
  Probe
tataggaaacccaaggctataacaa

SEQ ID NO: 284917 - DNA, 25 bp, Artificial
  Probe
gatagaaaaccaatgcctccacagt

SEQ ID NO: 284918 - DNA, 25 bp, Artificial
  Probe
cagacagacagacacagggaaacag

SEQ ID NO: 284919 - DNA, 25 bp, Artificial
  Probe
tatttggtcaagtcagaaaccaaac

SEQ ID NO: 284920 - DNA, 25 bp, Artificial
  Probe
tctgctgcaaactggccccgtaagg

SEQ ID NO: 284921 - DNA, 25 bp, Artificial
  Probe
aagacacagaaaagtcacagtgcag

SEQ ID NO: 284922 - DNA, 25 bp, Artificial
  Probe
cacagccgccagtcacagtgaagct

SEQ ID NO: 284923 - DNA, 25 bp, Artificial
  Probe
gataccctacaggttgctcctctca

SEQ ID NO: 284924 - DNA, 25 bp, Artificial
  Probe
ggtgccagtaaccacagccgccagt

SEQ ID NO: 284925 - DNA, 25 bp, Artificial
  Probe
tgattgaattaccatcaatacgcag

SEQ ID NO: 284926 - DNA, 25 bp, Artificial
  Probe
cctccggccctcattcagatagaaa

SEQ ID NO: 284927 - DNA, 25 bp, Artificial
  Probe
cacaacacagcatggctcagcttct

SEQ ID NO: 284928 - DNA, 25 bp, Artificial
  Probe
attaattccagtttccctctggccg

SEQ ID NO: 284929 - DNA, 25 bp, Artificial
  Probe
aaactggccccgtaaggactctgtg

SEQ ID NO: 284930 - DNA, 25 bp, Artificial
  Probe
aaggtcagaattcacctccgcttgc

SEQ ID NO: 284931 - DNA, 25 bp, Artificial
  Probe
gtcaggtcaattaattccagtttcc

SEQ ID NO: 284932 - DNA, 25 bp, Artificial
  Probe
ttaataacaacagaaagcatgtggc

SEQ ID NO: 284933 - DNA, 25 bp, Artificial
  Probe
agatagaaaaccaatgcctccacag

SEQ ID NO: 284934 - DNA, 25 bp, Artificial
  Probe
ggactctgtgggtgccagtaaccac

SEQ ID NO: 284935 - DNA, 25 bp, Artificial
  Probe
ccacaggtcaaggtatattgattga

SEQ ID NO: 284936 - DNA, 25 bp, Artificial
  Probe
gcagccttggttaagaaggtcagaa

SEQ ID NO: 284937 - DNA, 25 bp, Artificial
  Probe
gaagctacactaactttggtatctc

SEQ ID NO: 284938 - DNA, 25 bp, Artificial
  Probe
acatttcctctgctgcaaactggcc

SEQ ID NO: 284939 - DNA, 25 bp, Artificial
  Probe
gctacagagcccacagcactagttc

SEQ ID NO: 284940 - DNA, 25 bp, Artificial
  Probe
ggatcagatgccagaggggattcct

SEQ ID NO: 284941 - DNA, 25 bp, Artificial
  Probe
catccggctgcgtgtctcatcctaa

SEQ ID NO: 284942 - DNA, 25 bp, Artificial
  Probe
ggccctcattcagatagaaaaccaa

SEQ ID NO: 284943 - DNA, 25 bp, Artificial
  Probe
taacaacagaaagcatgtggccacc

SEQ ID NO: 284944 - DNA, 25 bp, Artificial
  Probe
tcacatttcctctgctgcaaactgg

SEQ ID NO: 284945 - DNA, 25 bp, Artificial
  Probe
gtgtctcatcctaaaatacactgag

SEQ ID NO: 284946 - DNA, 25 bp, Artificial
  Probe
cccagtgtgagcattacagatgtgt

SEQ ID NO: 284947 - DNA, 25 bp, Artificial
  Probe
cagtctgtggctacagagcccacag

SEQ ID NO: 284948 - DNA, 25 bp, Artificial
  Probe
ccctcaacaaaacagaatgcctgtg

SEQ ID NO: 284949 - DNA, 25 bp, Artificial
  Probe
ttcatcagcccttaaaatggttctg

SEQ ID NO: 284950 - DNA, 25 bp, Artificial
  Probe
ttttgtatgccaaacatttatcgtg

SEQ ID NO: 284951 - DNA, 25 bp, Artificial
  Probe
agcaaggcctgtaggttttgctttt

SEQ ID NO: 284952 - DNA, 25 bp, Artificial
  Probe
tgtgtcctgccctggactcaggctc

SEQ ID NO: 284953 - DNA, 25 bp, Artificial
  Probe
agagctcggcccagcctagcacagg

SEQ ID NO: 284954 - DNA, 25 bp, Artificial
  Probe
ggagcaggctgatgaccaagccctg

SEQ ID NO: 284955 - DNA, 25 bp, Artificial
  Probe
agaggaagacacatcacaggtgtac

SEQ ID NO: 284956 - DNA, 25 bp, Artificial
  Probe
tgtttagggagcaggctgatgacca

SEQ ID NO: 284957 - DNA, 25 bp, Artificial
  Probe
cttttcactagatacaagcccctgg

SEQ ID NO: 284958 - DNA, 25 bp, Artificial
  Probe
ttcagactcagaggaagacacatca

SEQ ID NO: 284959 - DNA, 25 bp, Artificial
  Probe
ttgcgctcttttcactagatacaag

SEQ ID NO: 284960 - DNA, 25 bp, Artificial
  Probe
tccatttatagatgcgtcccaggcc

SEQ ID NO: 284961 - DNA, 25 bp, Artificial
  Probe
catcaactggaaacaaagtggatcc

SEQ ID NO: 284962 - DNA, 25 bp, Artificial
  Probe
tagatgcgtcccaggccagcagagg

SEQ ID NO: 284963 - DNA, 25 bp, Artificial
  Probe
taaggtagggcatcccaacttggcc

SEQ ID NO: 284964 - DNA, 25 bp, Artificial
  Probe
cgtccttcacacagctgttaccaga

SEQ ID NO: 284965 - DNA, 25 bp, Artificial
  Probe
ggccagcagaggagcctctgcccgt

SEQ ID NO: 284966 - DNA, 25 bp, Artificial
  Probe
tttatagatgcgtcccaggccagca

SEQ ID NO: 284967 - DNA, 25 bp, Artificial
  Probe
tgcccgtgcttaattgttccgcctg

SEQ ID NO: 284968 - DNA, 25 bp, Artificial
  Probe
agcctctgcccgtgcttaattgttc

SEQ ID NO: 284969 - DNA, 25 bp, Artificial
  Probe
tcccgccagaagcaaggcctgtagg

SEQ ID NO: 284970 - DNA, 25 bp, Artificial
  Probe
ggcatcccaacttggcctgaactga

SEQ ID NO: 284971 - DNA, 25 bp, Artificial
  Probe
caaggcctgtaggttttgcttttgt

SEQ ID NO: 284972 - DNA, 25 bp, Artificial
  Probe
tgccctggactcaggctctagcatc

SEQ ID NO: 284973 - DNA, 25 bp, Artificial
  Probe
tcccaggccagcagaggagcctctg

SEQ ID NO: 284974 - DNA, 25 bp, Artificial
  Probe
tcactagatacaagcccctggcatg

SEQ ID NO: 284975 - DNA, 25 bp, Artificial
  Probe
ggtgtacctggcagagtctgctcct

SEQ ID NO: 284976 - DNA, 25 bp, Artificial
  Probe
actagcaggtgacttcagtcccctc

SEQ ID NO: 284977 - DNA, 25 bp, Artificial
  Probe
tcctcttaaggtagggcatcccaac

SEQ ID NO: 284978 - DNA, 25 bp, Artificial
  Probe
tgctctcggctgctcttggtcccag

SEQ ID NO: 284979 - DNA, 25 bp, Artificial
  Probe
caaagtggatccatttatagatgcg

SEQ ID NO: 284980 - DNA, 25 bp, Artificial
  Probe
ctcggcccagcctagcacaggtgta

SEQ ID NO: 284981 - DNA, 25 bp, Artificial
  Probe
gtagggcatcccaacttggcctgaa

SEQ ID NO: 284982 - DNA, 25 bp, Artificial
  Probe
gcgtcccaggccagcagaggagcct

SEQ ID NO: 284983 - DNA, 25 bp, Artificial
  Probe
ttaaggtagggcatcccaacttggc

SEQ ID NO: 284984 - DNA, 25 bp, Artificial
  Probe
cagcagtatctgcaagggatgttgt

SEQ ID NO: 284985 - DNA, 25 bp, Artificial
  Probe
ggctgctcttggtcccaggtgccca

SEQ ID NO: 284986 - DNA, 25 bp, Artificial
  Probe
aggtgacttcagtcccctctgctct

SEQ ID NO: 284987 - DNA, 25 bp, Artificial
  Probe
tgttaccagagctcggcccagccta

SEQ ID NO: 284988 - DNA, 25 bp, Artificial
  Probe
gatacaagcccctggcatgtattta

SEQ ID NO: 284989 - DNA, 25 bp, Artificial
  Probe
ggctgatgaccaagccctgagtcac

SEQ ID NO: 284990 - DNA, 25 bp, Artificial
  Probe
ttgtttagggagcaggctgatgacc

SEQ ID NO: 284991 - DNA, 25 bp, Artificial
  Probe
ccgccagaagcaaggcctgtaggtt

SEQ ID NO: 284992 - DNA, 25 bp, Artificial
  Probe
agtggatccatttatagatgcgtcc

SEQ ID NO: 284993 - DNA, 25 bp, Artificial
  Probe
aggccagcagaggagcctctgcccg

SEQ ID NO: 284994 - DNA, 25 bp, Artificial
  Probe
gcgctcttttcactagatacaagcc

SEQ ID NO: 284995 - DNA, 25 bp, Artificial
  Probe
gcaccacaccattcagactcagagg

SEQ ID NO: 284996 - DNA, 25 bp, Artificial
  Probe
cagaggagcctctgcccgtgcttaa

SEQ ID NO: 284997 - DNA, 25 bp, Artificial
  Probe
cctctgcttggctggcgatgcatga

SEQ ID NO: 284998 - DNA, 25 bp, Artificial
  Probe
tcacgacctgggtgcaggcctggta

SEQ ID NO: 284999 - DNA, 25 bp, Artificial
  Probe
cacaggcacagtggtaacccgggag

SEQ ID NO: 285000 - DNA, 25 bp, Artificial
  Probe
tatctagaattcattatagggcagc

SEQ ID NO: 285001 - DNA, 25 bp, Artificial
  Probe
atgagactggtcaaagcctgggtgt

SEQ ID NO: 285002 - DNA, 25 bp, Artificial
  Probe
gcaggcctggtagaggattataaac

SEQ ID NO: 285003 - DNA, 25 bp, Artificial
  Probe
agctaggggcaagcaaggcagatcc

SEQ ID NO: 285004 - DNA, 25 bp, Artificial
  Probe
tcattatagggcagctggattccag

SEQ ID NO: 285005 - DNA, 25 bp, Artificial
  Probe
cctagaggccttggactctgtgtgg

SEQ ID NO: 285006 - DNA, 25 bp, Artificial
  Probe
ggtttcatgttgatttgccagtcag

SEQ ID NO: 285007 - DNA, 25 bp, Artificial
  Probe
taaatgtgatgatcctcagaggtgc

SEQ ID NO: 285008 - DNA, 25 bp, Artificial
  Probe
ttggccacaggcacagtggtaaccc

SEQ ID NO: 285009 - DNA, 25 bp, Artificial
  Probe
gcagcctagagtagagaaggagatc

SEQ ID NO: 285010 - DNA, 25 bp, Artificial
  Probe
ggcagctggattccagtgcccactg

SEQ ID NO: 285011 - DNA, 25 bp, Artificial
  Probe
gaggatggtacatctctgggtgtct

SEQ ID NO: 285012 - DNA, 25 bp, Artificial
  Probe
atctagaattcattatagggcagct

SEQ ID NO: 285013 - DNA, 25 bp, Artificial
  Probe
ctacataggagcagaacatgaagag

SEQ ID NO: 285014 - DNA, 25 bp, Artificial
  Probe
ctgttgaagagtctctcttgatggc

SEQ ID NO: 285015 - DNA, 25 bp, Artificial
  Probe
tccagtgcccactgccctgtgaggg

SEQ ID NO: 285016 - DNA, 25 bp, Artificial
  Probe
tgagactggtcaaagcctgggtgtt

SEQ ID NO: 285017 - DNA, 25 bp, Artificial
  Probe
ctctgggaacttcaggctgggaaag

SEQ ID NO: 285018 - DNA, 25 bp, Artificial
  Probe
tgtcttcctggcaggagaatggtaa

SEQ ID NO: 285019 - DNA, 25 bp, Artificial
  Probe
agtgaaaggggctctgggaacttca

SEQ ID NO: 285020 - DNA, 25 bp, Artificial
  Probe
tttcctagtgaaaggggctctggga

SEQ ID NO: 285021 - DNA, 25 bp, Artificial
  Probe
tccagggcagcctagagtagagaag

SEQ ID NO: 285022 - DNA, 25 bp, Artificial
  Probe
aagcctgggtgttggccacaggcac

SEQ ID NO: 285023 - DNA, 25 bp, Artificial
  Probe
gctgtccagggcagcctagagtaga

SEQ ID NO: 285024 - DNA, 25 bp, Artificial
  Probe
tgggaagcctgagctactgtgagct

SEQ ID NO: 285025 - DNA, 25 bp, Artificial
  Probe
taaactattcaaagggcctctgctt

SEQ ID NO: 285026 - DNA, 25 bp, Artificial
  Probe
ctggcgatgcatgagtgagtgtcaa

SEQ ID NO: 285027 - DNA, 25 bp, Artificial
  Probe
ttcattgtgggtaaccaggtgagca

SEQ ID NO: 285028 - DNA, 25 bp, Artificial
  Probe
aagaccagaaagcttacacacaagg

SEQ ID NO: 285029 - DNA, 25 bp, Artificial
  Probe
agccgtcatttgtaaaatggagcag

SEQ ID NO: 285030 - DNA, 25 bp, Artificial
  Probe
caatcgtggtagttgggaagcctga

SEQ ID NO: 285031 - DNA, 25 bp, Artificial
  Probe
ttataaactattcaaagggcctctg

SEQ ID NO: 285032 - DNA, 25 bp, Artificial
  Probe
gctctgggaacttcaggctgggaaa

SEQ ID NO: 285033 - DNA, 25 bp, Artificial
  Probe
ggataaaaccaaggagccgtcattt

SEQ ID NO: 285034 - DNA, 25 bp, Artificial
  Probe
tgctgaccttttgaaacagaaaggt

SEQ ID NO: 285035 - DNA, 25 bp, Artificial
  Probe
caaagcctgggtgttggccacaggc

SEQ ID NO: 285036 - DNA, 25 bp, Artificial
  Probe
tttccttatggataaaaccaaggag

SEQ ID NO: 285037 - DNA, 25 bp, Artificial
  Probe
agtgagtgtcaatctcccaaatgct

SEQ ID NO: 285038 - DNA, 25 bp, Artificial
  Probe
ccagcatctaatgaagagggtttca

SEQ ID NO: 285039 - DNA, 25 bp, Artificial
  Probe
gtgagcatctcttgcattccctttt

SEQ ID NO: 285040 - DNA, 25 bp, Artificial
  Probe
taaaccagcatctaatgaagagggt

SEQ ID NO: 285041 - DNA, 25 bp, Artificial
  Probe
agtctctcttgatggctggatttaa

SEQ ID NO: 285042 - DNA, 25 bp, Artificial
  Probe
ttccagtgcccactgccctgtgagg

SEQ ID NO: 285043 - DNA, 25 bp, Artificial
  Probe
cctgggatgtggtgctgtgcatctc

SEQ ID NO: 285044 - DNA, 25 bp, Artificial
  Probe
gtgatggccatcattgtgggcacgc

SEQ ID NO: 285045 - DNA, 25 bp, Artificial
  Probe
tgacttctgtattggctcaccagag

SEQ ID NO: 285046 - DNA, 25 bp, Artificial
  Probe
ctgggcctggtcctgcacttcgctg

SEQ ID NO: 285047 - DNA, 25 bp, Artificial
  Probe
gctcaggcagtgtgaatgtgagcat

SEQ ID NO: 285048 - DNA, 25 bp, Artificial
  Probe
aatgtgagcatagacccagcagagg

SEQ ID NO: 285049 - DNA, 25 bp, Artificial
  Probe
tggctcaccagagatgagcttggtg

SEQ ID NO: 285050 - DNA, 25 bp, Artificial
  Probe
atgctctggtgatggccatcattgt

SEQ ID NO: 285051 - DNA, 25 bp, Artificial
  Probe
gcatagacccagcagaggaacctac

SEQ ID NO: 285052 - DNA, 25 bp, Artificial
  Probe
tccatggcctggttctcagccggct

SEQ ID NO: 285053 - DNA, 25 bp, Artificial
  Probe
tggtgatggccatcattgtgggcac

SEQ ID NO: 285054 - DNA, 25 bp, Artificial
  Probe
atccatggcctggttctcagccggc

SEQ ID NO: 285055 - DNA, 25 bp, Artificial
  Probe
tgcatctcaggcaccctggtgtcct

SEQ ID NO: 285056 - DNA, 25 bp, Artificial
  Probe
atgtgagcatagacccagcagagga

SEQ ID NO: 285057 - DNA, 25 bp, Artificial
  Probe
cctgcacttcgctgctgacttctgt

SEQ ID NO: 285058 - DNA, 25 bp, Artificial
  Probe
gctgtgcatctcaggcaccctggtg

SEQ ID NO: 285059 - DNA, 25 bp, Artificial
  Probe
ttctgtattggctcaccagagatga

SEQ ID NO: 285060 - DNA, 25 bp, Artificial
  Probe
agaatgctctggtgatggccatcat

SEQ ID NO: 285061 - DNA, 25 bp, Artificial
  Probe
catggcctggttctcagccggctca

SEQ ID NO: 285062 - DNA, 25 bp, Artificial
  Probe
ctcagccggctcaggcagtgtgaat

SEQ ID NO: 285063 - DNA, 25 bp, Artificial
  Probe
gtgtcctgcgagaatgctctggtga

SEQ ID NO: 285064 - DNA, 25 bp, Artificial
  Probe
agaggaacctacaggcccagctaca

SEQ ID NO: 285065 - DNA, 25 bp, Artificial
  Probe
tggtcctgcacttcgctgctgactt

SEQ ID NO: 285066 - DNA, 25 bp, Artificial
  Probe
ccagcagaggaacctacaggcccag

SEQ ID NO: 285067 - DNA, 25 bp, Artificial
  Probe
gtattggctcaccagagatgagctt

SEQ ID NO: 285068 - DNA, 25 bp, Artificial
  Probe
ccgtagcagacctgctggcaggcct

SEQ ID NO: 285069 - DNA, 25 bp, Artificial
  Probe
ctggtcctgcacttcgctgctgact

SEQ ID NO: 285070 - DNA, 25 bp, Artificial
  Probe
ttctcagccggctcaggcagtgtga

SEQ ID NO: 285071 - DNA, 25 bp, Artificial
  Probe
acttcgctgctgacttctgtattgg

SEQ ID NO: 285072 - DNA, 25 bp, Artificial
  Probe
gtcctgcgagaatgctctggtgatg

SEQ ID NO: 285073 - DNA, 25 bp, Artificial
  Probe
tggccatcattgtgggcacgcctgc

SEQ ID NO: 285074 - DNA, 25 bp, Artificial
  Probe
atcattgtgggcacgcctgccttcc

SEQ ID NO: 285075 - DNA, 25 bp, Artificial
  Probe
cagaggaacctacaggcccagctac

SEQ ID NO: 285076 - DNA, 25 bp, Artificial
  Probe
gatggccatcattgtgggcacgcct

SEQ ID NO: 285077 - DNA, 25 bp, Artificial
  Probe
ctcaggcagtgtgaatgtgagcata

SEQ ID NO: 285078 - DNA, 25 bp, Artificial
  Probe
gcctggtcctgcacttcgctgctga

SEQ ID NO: 285079 - DNA, 25 bp, Artificial
  Probe
caggcaccctggtgtcctgcgagaa

SEQ ID NO: 285080 - DNA, 25 bp, Artificial
  Probe
tgcacttcgctgctgacttctgtat

SEQ ID NO: 285081 - DNA, 25 bp, Artificial
  Probe
accctggtgtcctgcgagaatgctc

SEQ ID NO: 285082 - DNA, 25 bp, Artificial
  Probe
gacccagcagaggaacctacaggcc

SEQ ID NO: 285083 - DNA, 25 bp, Artificial
  Probe
ggcctggtcctgcacttcgctgctg

SEQ ID NO: 285084 - DNA, 25 bp, Artificial
  Probe
ggcctgggcctggtcctgcacttcg

SEQ ID NO: 285085 - DNA, 25 bp, Artificial
  Probe
ggcctggttctcagccggctcaggc

SEQ ID NO: 285086 - DNA, 25 bp, Artificial
  Probe
tggtgtcctgcgagaatgctctggt

SEQ ID NO: 285087 - DNA, 25 bp, Artificial
  Probe
ctggtgatggccatcattgtgggca

SEQ ID NO: 285088 - DNA, 25 bp, Artificial
  Probe
tggcctggttctcagccggctcagg

SEQ ID NO: 285089 - DNA, 25 bp, Artificial
  Probe
ttcagcttccgacctcagctgtgct

SEQ ID NO: 285090 - DNA, 25 bp, Artificial
  Probe
agagctgaatcagtcagaggaagcg

SEQ ID NO: 285091 - DNA, 25 bp, Artificial
  Probe
atggacctcaggaaagccctcctgt

SEQ ID NO: 285092 - DNA, 25 bp, Artificial
  Probe
cgctctgctcattggggccatcctg

SEQ ID NO: 285093 - DNA, 25 bp, Artificial
  Probe
ttaagagcgcccaggcaaaccctgt

SEQ ID NO: 285094 - DNA, 25 bp, Artificial
  Probe
ggggccatcctgtggcgaaaacgac

SEQ ID NO: 285095 - DNA, 25 bp, Artificial
  Probe
cgacctcagctgtgctggctccaga

SEQ ID NO: 285096 - DNA, 25 bp, Artificial
  Probe
gaaggccccagaaagccaggaggac

SEQ ID NO: 285097 - DNA, 25 bp, Artificial
  Probe
gacctcagctgtgctggctccagac

SEQ ID NO: 285098 - DNA, 25 bp, Artificial
  Probe
gagcccacatgatccatgctgagta

SEQ ID NO: 285099 - DNA, 25 bp, Artificial
  Probe
gggaatagccgctctgctcattggg

SEQ ID NO: 285100 - DNA, 25 bp, Artificial
  Probe
gcttccgacctcagctgtgctggct

SEQ ID NO: 285101 - DNA, 25 bp, Artificial
  Probe
cagagctgaatcagtcagaggaagc

SEQ ID NO: 285102 - DNA, 25 bp, Artificial
  Probe
gaacgtgcagagctgaatcagtcag

SEQ ID NO: 285103 - DNA, 25 bp, Artificial
  Probe
ctagccctggccttagggatcctgg

SEQ ID NO: 285104 - DNA, 25 bp, Artificial
  Probe
ggggaccttaagagcgcccaggcaa

SEQ ID NO: 285105 - DNA, 25 bp, Artificial
  Probe
aaccagagcccacatgatccatgct

SEQ ID NO: 285106 - DNA, 25 bp, Artificial
  Probe
gctgaatcagtcagaggaagcggaa

SEQ ID NO: 285107 - DNA, 25 bp, Artificial
  Probe
tcctgtggcgaaaacgacaacccag

SEQ ID NO: 285108 - DNA, 25 bp, Artificial
  Probe
gagccactttcttctccaaccagag

SEQ ID NO: 285109 - DNA, 25 bp, Artificial
  Probe
caccctagccatggacctcaggaaa

SEQ ID NO: 285110 - DNA, 25 bp, Artificial
  Probe
acgtgcagagctgaatcagtcagag

SEQ ID NO: 285111 - DNA, 25 bp, Artificial
  Probe
agccctggccttagggatcctggga

SEQ ID NO: 285112 - DNA, 25 bp, Artificial
  Probe
cctccctgaggtagggcatgaggat

SEQ ID NO: 285113 - DNA, 25 bp, Artificial
  Probe
atccactggataaaagatggcacac

SEQ ID NO: 285114 - DNA, 25 bp, Artificial
  Probe
agccgctctgctcattggggccatc

SEQ ID NO: 285115 - DNA, 25 bp, Artificial
  Probe
gtggcgaaaacgacaacccagactc

SEQ ID NO: 285116 - DNA, 25 bp, Artificial
  Probe
catggacctcaggaaagccctcctg

SEQ ID NO: 285117 - DNA, 25 bp, Artificial
  Probe
cagactcgaggagaggaaggcccca

SEQ ID NO: 285118 - DNA, 25 bp, Artificial
  Probe
aggcaaaccctgtctccttcagctt

SEQ ID NO: 285119 - DNA, 25 bp, Artificial
  Probe
atcagtcagaggaagcggaaatgcc

SEQ ID NO: 285120 - DNA, 25 bp, Artificial
  Probe
agccatggacctcaggaaagccctc

SEQ ID NO: 285121 - DNA, 25 bp, Artificial
  Probe
catcctgtggcgaaaacgacaaccc

SEQ ID NO: 285122 - DNA, 25 bp, Artificial
  Probe
gctgggaacgctagccctggcctta

SEQ ID NO: 285123 - DNA, 25 bp, Artificial
  Probe
cctcagctgtgctggctccagacga

SEQ ID NO: 285124 - DNA, 25 bp, Artificial
  Probe
aatcagtcagaggaagcggaaatgc

SEQ ID NO: 285125 - DNA, 25 bp, Artificial
  Probe
aaacgacaacccagactcgaggaga

SEQ ID NO: 285126 - DNA, 25 bp, Artificial
  Probe
ccccagaaagccaggaggacgagga

SEQ ID NO: 285127 - DNA, 25 bp, Artificial
  Probe
acaacccagactcgaggagaggaag

SEQ ID NO: 285128 - DNA, 25 bp, Artificial
  Probe
gaacgctagccctggccttagggat

SEQ ID NO: 285129 - DNA, 25 bp, Artificial
  Probe
tgcagagctgaatcagtcagaggaa

SEQ ID NO: 285130 - DNA, 25 bp, Artificial
  Probe
ggctgggaacgctagccctggcctt

SEQ ID NO: 285131 - DNA, 25 bp, Artificial
  Probe
ctcattggggccatcctgtggcgaa

SEQ ID NO: 285132 - DNA, 25 bp, Artificial
  Probe
agctgaatcagtcagaggaagcgga

SEQ ID NO: 285133 - DNA, 25 bp, Artificial
  Probe
gcgaaaacgacaacccagactcgag

SEQ ID NO: 285134 - DNA, 25 bp, Artificial
  Probe
aaggccccagaaagccaggaggacg

SEQ ID NO: 285135 - DNA, 25 bp, Artificial
  Probe
attggcaggttacttttactctcaa

SEQ ID NO: 285136 - DNA, 25 bp, Artificial
  Probe
agcaacgtcaccagggacatgctct

SEQ ID NO: 285137 - DNA, 25 bp, Artificial
  Probe
aaggactgatctcttcagtggagtg

SEQ ID NO: 285138 - DNA, 25 bp, Artificial
  Probe
ttggcgtgaacgaaggactgatctc

SEQ ID NO: 285139 - DNA, 25 bp, Artificial
  Probe
gtcctgtcttagatgtacaccctaa

SEQ ID NO: 285140 - DNA, 25 bp, Artificial
  Probe
caaatgcagctgatgttggattggc

SEQ ID NO: 285141 - DNA, 25 bp, Artificial
  Probe
ttatggaggcttgtagggttctcac

SEQ ID NO: 285142 - DNA, 25 bp, Artificial
  Probe
agccagtgctgagaccccagcacaa

SEQ ID NO: 285143 - DNA, 25 bp, Artificial
  Probe
ttggattggcaggttacttttactc

SEQ ID NO: 285144 - DNA, 25 bp, Artificial
  Probe
tatacctgtggctgtgggtcccagc

SEQ ID NO: 285145 - DNA, 25 bp, Artificial
  Probe
atggaggcttgtagggttctcactt

SEQ ID NO: 285146 - DNA, 25 bp, Artificial
  Probe
aactaggaaccaatggacaccatat

SEQ ID NO: 285147 - DNA, 25 bp, Artificial
  Probe
acgtcaccagggacatgctctgcat

SEQ ID NO: 285148 - DNA, 25 bp, Artificial
  Probe
tcttcagtggagtgcccttttggtg

SEQ ID NO: 285149 - DNA, 25 bp, Artificial
  Probe
atgctctgcatcaccgaggagacct

SEQ ID NO: 285150 - DNA, 25 bp, Artificial
  Probe
aaattcagccggtcctgtcttagat

SEQ ID NO: 285151 - DNA, 25 bp, Artificial
  Probe
ggttacttttactctcaagacccag

SEQ ID NO: 285152 - DNA, 25 bp, Artificial
  Probe
acagtgtgagtgttcacatgccctc

SEQ ID NO: 285153 - DNA, 25 bp, Artificial
  Probe
tacctgtggctgtgggtcccagcca

SEQ ID NO: 285154 - DNA, 25 bp, Artificial
  Probe
ccttgggcgagaagggtccaagtat

SEQ ID NO: 285155 - DNA, 25 bp, Artificial
  Probe
catacaaagtacagtgtgagtgttc

SEQ ID NO: 285156 - DNA, 25 bp, Artificial
  Probe
agaagggtccaagtatggcattgac

SEQ ID NO: 285157 - DNA, 25 bp, Artificial
  Probe
cagccggtcctgtcttagatgtaca

SEQ ID NO: 285158 - DNA, 25 bp, Artificial
  Probe
tccaagtatggcattgacgaatatc

SEQ ID NO: 285159 - DNA, 25 bp, Artificial
  Probe
tggcaggttacttttactctcaaga

SEQ ID NO: 285160 - DNA, 25 bp, Artificial
  Probe
tggcgccagtcatcaagttcgataa

SEQ ID NO: 285161 - DNA, 25 bp, Artificial
  Probe
tgtcgccatcgcaaatgcagctgat

SEQ ID NO: 285162 - DNA, 25 bp, Artificial
  Probe
cgcaaatgcagctgatgttggattg

SEQ ID NO: 285163 - DNA, 25 bp, Artificial
  Probe
gcaggttacttttactctcaagacc

SEQ ID NO: 285164 - DNA, 25 bp, Artificial
  Probe
tctgcatcaccgaggagacctttgg

SEQ ID NO: 285165 - DNA, 25 bp, Artificial
  Probe
aggcttgtagggttctcacttcttt

SEQ ID NO: 285166 - DNA, 25 bp, Artificial
  Probe
ctaggaaccaatggacaccatatac

SEQ ID NO: 285167 - DNA, 25 bp, Artificial
  Probe
cagtcatcaagttcgataaagagga

SEQ ID NO: 285168 - DNA, 25 bp, Artificial
  Probe
gcatcaccgaggagacctttgggcc

SEQ ID NO: 285169 - DNA, 25 bp, Artificial
  Probe
accagggacatgctctgcatcaccg

SEQ ID NO: 285170 - DNA, 25 bp, Artificial
  Probe
agggtccaagtatggcattgacgaa

SEQ ID NO: 285171 - DNA, 25 bp, Artificial
  Probe
tgtagggttctcacttctttaataa

SEQ ID NO: 285172 - DNA, 25 bp, Artificial
  Probe
tacaaagtacagtgtgagtgttcac

SEQ ID NO: 285173 - DNA, 25 bp, Artificial
  Probe
cactgcctccatacaaagtacagtg

SEQ ID NO: 285174 - DNA, 25 bp, Artificial
  Probe
cattgacgaatatctagaggtcaaa

SEQ ID NO: 285175 - DNA, 25 bp, Artificial
  Probe
tggattggcaggttacttttactct

SEQ ID NO: 285176 - DNA, 25 bp, Artificial
  Probe
caccatatacctgtggctgtgggtc

SEQ ID NO: 285177 - DNA, 25 bp, Artificial
  Probe
ccaagtatggcattgacgaatatct

SEQ ID NO: 285178 - DNA, 25 bp, Artificial
  Probe
ccatcgcaaatgcagctgatgttgg

SEQ ID NO: 285179 - DNA, 25 bp, Artificial
  Probe
ttatctaactaggaaccaatggaca

SEQ ID NO: 285180 - DNA, 25 bp, Artificial
  Probe
cccttatctaactaggaaccaatgg

SEQ ID NO: 285181 - DNA, 25 bp, Artificial
  Probe
ccgcaagacggtggagcaactgaag

SEQ ID NO: 285182 - DNA, 25 bp, Artificial
  Probe
cacgctaaggatgacccactggtga

SEQ ID NO: 285183 - DNA, 25 bp, Artificial
  Probe
ccttccgcgacaaacgactcttttg

SEQ ID NO: 285184 - DNA, 25 bp, Artificial
  Probe
tcagagaaacagacccagggcatgg

SEQ ID NO: 285185 - DNA, 25 bp, Artificial
  Probe
gagcccccaagatagttttatcctc

SEQ ID NO: 285186 - DNA, 25 bp, Artificial
  Probe
acgctaaggatgacccactggtgac

SEQ ID NO: 285187 - DNA, 25 bp, Artificial
  Probe
cttccgcgacaaacgactcttttgc

SEQ ID NO: 285188 - DNA, 25 bp, Artificial
  Probe
ttccgcgacaaacgactcttttgca

SEQ ID NO: 285189 - DNA, 25 bp, Artificial
  Probe
gagcaactgaagctggaggtgaaca

SEQ ID NO: 285190 - DNA, 25 bp, Artificial
  Probe
ctctgagcccccaagatagttttat

SEQ ID NO: 285191 - DNA, 25 bp, Artificial
  Probe
actgaagctggaggtgaacatcgat

SEQ ID NO: 285192 - DNA, 25 bp, Artificial
  Probe
atgtccaacaacatggccaagatcg

SEQ ID NO: 285193 - DNA, 25 bp, Artificial
  Probe
aggtgaacatcgatcgcatgaaggt

SEQ ID NO: 285194 - DNA, 25 bp, Artificial
  Probe
acatggccaagatcgctgaggcccg

SEQ ID NO: 285195 - DNA, 25 bp, Artificial
  Probe
gactcagagaaacagacccagggca

SEQ ID NO: 285196 - DNA, 25 bp, Artificial
  Probe
atcgatcgcatgaaggtgtcgcagg

SEQ ID NO: 285197 - DNA, 25 bp, Artificial
  Probe
acaacatggccaagatcgctgaggc

SEQ ID NO: 285198 - DNA, 25 bp, Artificial
  Probe
actcagagaaacagacccagggcat

SEQ ID NO: 285199 - DNA, 25 bp, Artificial
  Probe
ggtgaacatcgatcgcatgaaggtg

SEQ ID NO: 285200 - DNA, 25 bp, Artificial
  Probe
aaacgcacgctaaggatgacccact

SEQ ID NO: 285201 - DNA, 25 bp, Artificial
  Probe
ctcccgcgcagaaatatgaatccaa

SEQ ID NO: 285202 - DNA, 25 bp, Artificial
  Probe
catcgatcgcatgaaggtgtcgcag

SEQ ID NO: 285203 - DNA, 25 bp, Artificial
  Probe
ttgcagggattggactcagagaaac

SEQ ID NO: 285204 - DNA, 25 bp, Artificial
  Probe
ctgagcccccaagatagttttatcc

SEQ ID NO: 285205 - DNA, 25 bp, Artificial
  Probe
ccatgtccaacaacatggccaagat

SEQ ID NO: 285206 - DNA, 25 bp, Artificial
  Probe
tccgcgacaaacgactcttttgcac

SEQ ID NO: 285207 - DNA, 25 bp, Artificial
  Probe
attggactcagagaaacagacccag

SEQ ID NO: 285208 - DNA, 25 bp, Artificial
  Probe
acgcacgctaaggatgacccactgg

SEQ ID NO: 285209 - DNA, 25 bp, Artificial
  Probe
atatgaatccaataaacttggtgac

SEQ ID NO: 285210 - DNA, 25 bp, Artificial
  Probe
tcgatcgcatgaaggtgtcgcaggc

SEQ ID NO: 285211 - DNA, 25 bp, Artificial
  Probe
cccgcaagacggtggagcaactgaa

SEQ ID NO: 285212 - DNA, 25 bp, Artificial
  Probe
aacatggccaagatcgctgaggccc

SEQ ID NO: 285213 - DNA, 25 bp, Artificial
  Probe
ccaagatcgctgaggcccgcaagac

SEQ ID NO: 285214 - DNA, 25 bp, Artificial
  Probe
caactgaagctggaggtgaacatcg

SEQ ID NO: 285215 - DNA, 25 bp, Artificial
  Probe
taaggatgacccactggtgactcct

SEQ ID NO: 285216 - DNA, 25 bp, Artificial
  Probe
aacatcgatcgcatgaaggtgtcgc

SEQ ID NO: 285217 - DNA, 25 bp, Artificial
  Probe
tcccgcgcagaaatatgaatccaat

SEQ ID NO: 285218 - DNA, 25 bp, Artificial
  Probe
attcattattgcagggattggactc

SEQ ID NO: 285219 - DNA, 25 bp, Artificial
  Probe
gatgacccactggtgactcctgtcc

SEQ ID NO: 285220 - DNA, 25 bp, Artificial
  Probe
tgcagggattggactcagagaaaca

SEQ ID NO: 285221 - DNA, 25 bp, Artificial
  Probe
tatgaatccaataaacttggtgact

SEQ ID NO: 285222 - DNA, 25 bp, Artificial
  Probe
cgaaacgcacgctaaggatgaccca

SEQ ID NO: 285223 - DNA, 25 bp, Artificial
  Probe
gaatccaataaacttggtgacttgg

SEQ ID NO: 285224 - DNA, 25 bp, Artificial
  Probe
ggccaagatcgctgaggcccgcaag

SEQ ID NO: 285225 - DNA, 25 bp, Artificial
  Probe
tgtccaacaacatggccaagatcgc

SEQ ID NO: 285226 - DNA, 25 bp, Artificial
  Probe
caagacggtggagcaactgaagctg

SEQ ID NO: 285227 - DNA, 25 bp, Artificial
  Probe
acaattcttcggactctgagtgaag

SEQ ID NO: 285228 - DNA, 25 bp, Artificial
  Probe
tccggattcgaataggtctgcacac

SEQ ID NO: 285229 - DNA, 25 bp, Artificial
  Probe
catgcctagatattgcttgtttggt

SEQ ID NO: 285230 - DNA, 25 bp, Artificial
  Probe
gcagcattccaaagaagaaaagcag

SEQ ID NO: 285231 - DNA, 25 bp, Artificial
  Probe
gaccttctggcttgttggaaaaaag

SEQ ID NO: 285232 - DNA, 25 bp, Artificial
  Probe
aaggatattcttcttcttgagcaag

SEQ ID NO: 285233 - DNA, 25 bp, Artificial
  Probe
gtacctttaagatgcgacacatgcc

SEQ ID NO: 285234 - DNA, 25 bp, Artificial
  Probe
gaggagaccttctggcttgttggaa

SEQ ID NO: 285235 - DNA, 25 bp, Artificial
  Probe
ccaccagtgggcaaagatgggcaag

SEQ ID NO: 285236 - DNA, 25 bp, Artificial
  Probe
tggcttgcaaccagcggagattgca

SEQ ID NO: 285237 - DNA, 25 bp, Artificial
  Probe
aatcaacggggctaccataccgaat

SEQ ID NO: 285238 - DNA, 25 bp, Artificial
  Probe
ccttaccatgcctagatattgcttg

SEQ ID NO: 285239 - DNA, 25 bp, Artificial
  Probe
ggcaagtgggtcatggcttgcaacc

SEQ ID NO: 285240 - DNA, 25 bp, Artificial
  Probe
ggcacagaggagaccttctggcttg

SEQ ID NO: 285241 - DNA, 25 bp, Artificial
  Probe
agaacagagctcaagggtaaaggca

SEQ ID NO: 285242 - DNA, 25 bp, Artificial
  Probe
agattgcagcattccaaagaagaaa

SEQ ID NO: 285243 - DNA, 25 bp, Artificial
  Probe
tgtgaatacagcttctcgaatggaa

SEQ ID NO: 285244 - DNA, 25 bp, Artificial
  Probe
cggactctgagtgaaggctatgaag

SEQ ID NO: 285245 - DNA, 25 bp, Artificial
  Probe
gctcattacagatcaaggatattct

SEQ ID NO: 285246 - DNA, 25 bp, Artificial
  Probe
aggtctgcacacagggcctgttgtt

SEQ ID NO: 285247 - DNA, 25 bp, Artificial
  Probe
cagaaaggcagttggtgcgaaacaa

SEQ ID NO: 285248 - DNA, 25 bp, Artificial
  Probe
caaagcaacgctgaagctcattaca

SEQ ID NO: 285249 - DNA, 25 bp, Artificial
  Probe
cagaggtgccagtccggattcgaat

SEQ ID NO: 285250 - DNA, 25 bp, Artificial
  Probe
tctgaggttgcctaatgtccaggga

SEQ ID NO: 285251 - DNA, 25 bp, Artificial
  Probe
ctcgaatggaatcaacggggctacc

SEQ ID NO: 285252 - DNA, 25 bp, Artificial
  Probe
tgaatctcctcttgacaaagcaacg

SEQ ID NO: 285253 - DNA, 25 bp, Artificial
  Probe
gtagagcttcgtggaagaacagagc

SEQ ID NO: 285254 - DNA, 25 bp, Artificial
  Probe
gcacacagggcctgttgttgctgga

SEQ ID NO: 285255 - DNA, 25 bp, Artificial
  Probe
gtgccagtccggattcgaataggtc

SEQ ID NO: 285256 - DNA, 25 bp, Artificial
  Probe
agcttcgtggaagaacagagctcaa

SEQ ID NO: 285257 - DNA, 25 bp, Artificial
  Probe
gcaagtgggtcatggcttgcaacca

SEQ ID NO: 285258 - DNA, 25 bp, Artificial
  Probe
gcatttgaatctcctcttgacaaag

SEQ ID NO: 285259 - DNA, 25 bp, Artificial
  Probe
cttgacaaagcaacgctgaagctca

SEQ ID NO: 285260 - DNA, 25 bp, Artificial
  Probe
gaatgattgttcttctgaggttgcc

SEQ ID NO: 285261 - DNA, 25 bp, Artificial
  Probe
atggaaagaactccagcatttgaat

SEQ ID NO: 285262 - DNA, 25 bp, Artificial
  Probe
caccagtgggcaaagatgggcaagt

SEQ ID NO: 285263 - DNA, 25 bp, Artificial
  Probe
ccagcggagattgcagcattccaaa

SEQ ID NO: 285264 - DNA, 25 bp, Artificial
  Probe
gcgaaacaagccataagatggaaag

SEQ ID NO: 285265 - DNA, 25 bp, Artificial
  Probe
acacagggcctgttgttgctggagt

SEQ ID NO: 285266 - DNA, 25 bp, Artificial
  Probe
tgggtcatggcttgcaaccagcgga

SEQ ID NO: 285267 - DNA, 25 bp, Artificial
  Probe
gctaccataccgaattcatgtcagt

SEQ ID NO: 285268 - DNA, 25 bp, Artificial
  Probe
atcaaggatattcttcttcttgagc

SEQ ID NO: 285269 - DNA, 25 bp, Artificial
  Probe
cataccgaattcatgtcagtctcag

SEQ ID NO: 285270 - DNA, 25 bp, Artificial
  Probe
gaaagaactccagcatttgaatctc

SEQ ID NO: 285271 - DNA, 25 bp, Artificial
  Probe
tgcaaccagcggagattgcagcatt

SEQ ID NO: 285272 - DNA, 25 bp, Artificial
  Probe
atactgtgaatacagcttctcgaat

SEQ ID NO: 285273 - DNA, 25 bp, Artificial
  Probe
gggacaaaccctaggcccctgtctg

SEQ ID NO: 285274 - DNA, 25 bp, Artificial
  Probe
gcagagttctctcaggggccctggc

SEQ ID NO: 285275 - DNA, 25 bp, Artificial
  Probe
tgtgatcttcagatggtgtcattcc

SEQ ID NO: 285276 - DNA, 25 bp, Artificial
  Probe
ctgcaagcttttgagtctgacttga

SEQ ID NO: 285277 - DNA, 25 bp, Artificial
  Probe
cctccacgtggagcaagttaacctt

SEQ ID NO: 285278 - DNA, 25 bp, Artificial
  Probe
caaacagacgctgcattggaatgtg

SEQ ID NO: 285279 - DNA, 25 bp, Artificial
  Probe
ccctggcagccttggccagggacag

SEQ ID NO: 285280 - DNA, 25 bp, Artificial
  Probe
ggggaccaggtcttgctccaccttg

SEQ ID NO: 285281 - DNA, 25 bp, Artificial
  Probe
gggctggagcctgtatctaccctcc

SEQ ID NO: 285282 - DNA, 25 bp, Artificial
  Probe
ctccacgtggagcaagttaaccttt

SEQ ID NO: 285283 - DNA, 25 bp, Artificial
  Probe
gcaagcttttgagtctgacttgagg

SEQ ID NO: 285284 - DNA, 25 bp, Artificial
  Probe
tcttttgtgatcttcagatggtgtc

SEQ ID NO: 285285 - DNA, 25 bp, Artificial
  Probe
tgcaagcttttgagtctgacttgag

SEQ ID NO: 285286 - DNA, 25 bp, Artificial
  Probe
caagcttttgagtctgacttgaggg

SEQ ID NO: 285287 - DNA, 25 bp, Artificial
  Probe
ttgtgatcttcagatggtgtcattc

SEQ ID NO: 285288 - DNA, 25 bp, Artificial
  Probe
tcaaacagacgctgcattggaatgt

SEQ ID NO: 285289 - DNA, 25 bp, Artificial
  Probe
gcaagttaacctttttcatgtaaag

SEQ ID NO: 285290 - DNA, 25 bp, Artificial
  Probe
gatcttcagatggtgtcattccccg

SEQ ID NO: 285291 - DNA, 25 bp, Artificial
  Probe
gtgatcttcagatggtgtcattccc

SEQ ID NO: 285292 - DNA, 25 bp, Artificial
  Probe
ggctggagcctgtatctaccctcca

SEQ ID NO: 285293 - DNA, 25 bp, Artificial
  Probe
tgatcttcagatggtgtcattcccc

SEQ ID NO: 285294 - DNA, 25 bp, Artificial
  Probe
cttttgtgatcttcagatggtgtca

SEQ ID NO: 285295 - DNA, 25 bp, Artificial
  Probe
cagagttctctcaggggccctggca

SEQ ID NO: 285296 - DNA, 25 bp, Artificial
  Probe
gagcaagttaacctttttcatgtaa

SEQ ID NO: 285297 - DNA, 25 bp, Artificial
  Probe
ggaccaggtcttgctccaccttgac

SEQ ID NO: 285298 - DNA, 25 bp, Artificial
  Probe
cctaggcccctgtctgcactggggg

SEQ ID NO: 285299 - DNA, 25 bp, Artificial
  Probe
aacagacgctgcattggaatgtggg

SEQ ID NO: 285300 - DNA, 25 bp, Artificial
  Probe
gggaccaggtcttgctccaccttga

SEQ ID NO: 285301 - DNA, 25 bp, Artificial
  Probe
tctcaggggccctggcagccttggc

SEQ ID NO: 285302 - DNA, 25 bp, Artificial
  Probe
aagagtctcctgaagaccttccaga

SEQ ID NO: 285303 - DNA, 25 bp, Artificial
  Probe
accacagcaggcaacaccgtgtcat

SEQ ID NO: 285304 - DNA, 25 bp, Artificial
  Probe
caacaagtgtcagtttttctcctgt

SEQ ID NO: 285305 - DNA, 25 bp, Artificial
  Probe
gctgcagtgccaacgtgaccagctg

SEQ ID NO: 285306 - DNA, 25 bp, Artificial
  Probe
gacatacgtccttgcctctgctttg

SEQ ID NO: 285307 - DNA, 25 bp, Artificial
  Probe
agaagcagggcgtgaagacagatac

SEQ ID NO: 285308 - DNA, 25 bp, Artificial
  Probe
gaagaccttccagaagacagaggtg

SEQ ID NO: 285309 - DNA, 25 bp, Artificial
  Probe
tttgggtctgtcctgggccagagat

SEQ ID NO: 285310 - DNA, 25 bp, Artificial
  Probe
tctcctgtgaaaagccgtgcaacca

SEQ ID NO: 285311 - DNA, 25 bp, Artificial
  Probe
tattgaaaacctgaaggacgaccca

SEQ ID NO: 285312 - DNA, 25 bp, Artificial
  Probe
cacgaggcaggctgagctacagacc

SEQ ID NO: 285313 - DNA, 25 bp, Artificial
  Probe
agctacagaccctgtcaacatgttt

SEQ ID NO: 285314 - DNA, 25 bp, Artificial
  Probe
gaggcaggctgagctacagaccctg

SEQ ID NO: 285315 - DNA, 25 bp, Artificial
  Probe
acaggtgaccaatgccacccagcaa

SEQ ID NO: 285316 - DNA, 25 bp, Artificial
  Probe
ttgctctttgggtctgtcctgggcc

SEQ ID NO: 285317 - DNA, 25 bp, Artificial
  Probe
acctgaaggacgacccatcatcaaa

SEQ ID NO: 285318 - DNA, 25 bp, Artificial
  Probe
cgtgcaaccagaccacagcaggcaa

SEQ ID NO: 285319 - DNA, 25 bp, Artificial
  Probe
ccctaaagagcaacaagtgtcagtt

SEQ ID NO: 285320 - DNA, 25 bp, Artificial
  Probe
caggctgagctacagaccctgtcaa

SEQ ID NO: 285321 - DNA, 25 bp, Artificial
  Probe
ttctgaagagtctcctgaagacctt

SEQ ID NO: 285322 - DNA, 25 bp, Artificial
  Probe
aacgtgaccagctgcttgtgcctcc

SEQ ID NO: 285323 - DNA, 25 bp, Artificial
  Probe
atgcagctgcagtgccaacgtgacc

SEQ ID NO: 285324 - DNA, 25 bp, Artificial
  Probe
cccatctgatgattgtaccacaccg

SEQ ID NO: 285325 - DNA, 25 bp, Artificial
  Probe
agatgcagcacctcctggggcatcc

SEQ ID NO: 285326 - DNA, 25 bp, Artificial
  Probe
acagcaggcaacaccgtgtcatttc

SEQ ID NO: 285327 - DNA, 25 bp, Artificial
  Probe
cttccaggagggaatgtcacaggtg

SEQ ID NO: 285328 - DNA, 25 bp, Artificial
  Probe
tgtgaaaagccgtgcaaccagacca

SEQ ID NO: 285329 - DNA, 25 bp, Artificial
  Probe
acagaggtgcaagtgcagagaagca

SEQ ID NO: 285330 - DNA, 25 bp, Artificial
  Probe
agaccttccagaagacagaggtgca

SEQ ID NO: 285331 - DNA, 25 bp, Artificial
  Probe
agagtctcctgaagaccttccagaa

SEQ ID NO: 285332 - DNA, 25 bp, Artificial
  Probe
taccttattgaaaacctgaaggacg

SEQ ID NO: 285333 - DNA, 25 bp, Artificial
  Probe
tagttgaaaccctaaagagcaacaa

SEQ ID NO: 285334 - DNA, 25 bp, Artificial
  Probe
attgaaaacctgaaggacgacccat

SEQ ID NO: 285335 - DNA, 25 bp, Artificial
  Probe
gtgaccaatgccacccagcaatcaa

SEQ ID NO: 285336 - DNA, 25 bp, Artificial
  Probe
gaatgtcacaggtgaccaatgccac

SEQ ID NO: 285337 - DNA, 25 bp, Artificial
  Probe
ctgtcctgggccagagatgcagcac

SEQ ID NO: 285338 - DNA, 25 bp, Artificial
  Probe
gctgagctacagaccctgtcaacat

SEQ ID NO: 285339 - DNA, 25 bp, Artificial
  Probe
tgctttgctctttgggtctgtcctg

SEQ ID NO: 285340 - DNA, 25 bp, Artificial
  Probe
tcggcacgaggcaggctgagctaca

SEQ ID NO: 285341 - DNA, 25 bp, Artificial
  Probe
atgcagcacctcctggggcatccaa

SEQ ID NO: 285342 - DNA, 25 bp, Artificial
  Probe
tacgtccttgcctctgctttgctct

SEQ ID NO: 285343 - DNA, 25 bp, Artificial
  Probe
aaacctgaaggacgacccatcatca

SEQ ID NO: 285344 - DNA, 25 bp, Artificial
  Probe
gaaggacgacccatcatcaaaatgc

SEQ ID NO: 285345 - DNA, 25 bp, Artificial
  Probe
tcttaccttattgaaaacctgaagg

SEQ ID NO: 285346 - DNA, 25 bp, Artificial
  Probe
tgtaccacaccgtgcttccaggagg

SEQ ID NO: 285347 - DNA, 25 bp, Artificial
  Probe
tgggccagagatgcagcacctcctg

SEQ ID NO: 285348 - DNA, 25 bp, Artificial
  Probe
aaaggcaggttcaatgcctgcaatt

SEQ ID NO: 285349 - DNA, 25 bp, Artificial
  Probe
tcactcttccctggtggtccgtctg

SEQ ID NO: 285350 - DNA, 25 bp, Artificial
  Probe
agcatgatgcccatgtgctcgtctc

SEQ ID NO: 285351 - DNA, 25 bp, Artificial
  Probe
tgcttccggggcaagagcaagaagc

SEQ ID NO: 285352 - DNA, 25 bp, Artificial
  Probe
tccagcaaaaacacaaaccagctgg

SEQ ID NO: 285353 - DNA, 25 bp, Artificial
  Probe
caagattctggaagggccccctgac

SEQ ID NO: 285354 - DNA, 25 bp, Artificial
  Probe
gtgaagcagctgcagttcactacct

SEQ ID NO: 285355 - DNA, 25 bp, Artificial
  Probe
acaggagcaggtgcaggccactcag

SEQ ID NO: 285356 - DNA, 25 bp, Artificial
  Probe
cggccccatctctgtgatggatttt

SEQ ID NO: 285357 - DNA, 25 bp, Artificial
  Probe
tcccagctctctgctcgcttttgta

SEQ ID NO: 285358 - DNA, 25 bp, Artificial
  Probe
ctgcgacaactagaggaagagaagg

SEQ ID NO: 285359 - DNA, 25 bp, Artificial
  Probe
atgcccatgtgctcgtctccctggg

SEQ ID NO: 285360 - DNA, 25 bp, Artificial
  Probe
ctgtgtacatactccggttgcaccg

SEQ ID NO: 285361 - DNA, 25 bp, Artificial
  Probe
agaaggtggccgatgtgttcaacac

SEQ ID NO: 285362 - DNA, 25 bp, Artificial
  Probe
accctactgaccttccttgatgctg

SEQ ID NO: 285363 - DNA, 25 bp, Artificial
  Probe
gatgggactggctctctgctgcccc

SEQ ID NO: 285364 - DNA, 25 bp, Artificial
  Probe
accaaaggaactctgggaaatggtg

SEQ ID NO: 285365 - DNA, 25 bp, Artificial
  Probe
ttccggggcaagagcaagaagccag

SEQ ID NO: 285366 - DNA, 25 bp, Artificial
  Probe
ctcatgatccagaccctgagtcaat

SEQ ID NO: 285367 - DNA, 25 bp, Artificial
  Probe
ggaggacaggcacctttgtggctct

SEQ ID NO: 285368 - DNA, 25 bp, Artificial
  Probe
agcaccctcttcagagtcatacacg

SEQ ID NO: 285369 - DNA, 25 bp, Artificial
  Probe
cttggctatggaacagctgttacag

SEQ ID NO: 285370 - DNA, 25 bp, Artificial
  Probe
ggagatgcagcctattgtcacagac

SEQ ID NO: 285371 - DNA, 25 bp, Artificial
  Probe
gctgcagttcactacctggccagac

SEQ ID NO: 285372 - DNA, 25 bp, Artificial
  Probe
tggaagcctcactcttccctggtgg

SEQ ID NO: 285373 - DNA, 25 bp, Artificial
  Probe
gcaacacaacaactggctggcccag

SEQ ID NO: 285374 - DNA, 25 bp, Artificial
  Probe
aggagagtggatccaccgggcctca

SEQ ID NO: 285375 - DNA, 25 bp, Artificial
  Probe
gccagaccacagtgtcccggaggct

SEQ ID NO: 285376 - DNA, 25 bp, Artificial
  Probe
ggcaagggacccatcctggtgcatt

SEQ ID NO: 285377 - DNA, 25 bp, Artificial
  Probe
tggccagtggagatgcagcctattg

SEQ ID NO: 285378 - DNA, 25 bp, Artificial
  Probe
acagctgttacagcaagcagggaca

SEQ ID NO: 285379 - DNA, 25 bp, Artificial
  Probe
cctgggcctgcctgataccaaggag

SEQ ID NO: 285380 - DNA, 25 bp, Artificial
  Probe
cgggcctcacactgtccaagggcag

SEQ ID NO: 285381 - DNA, 25 bp, Artificial
  Probe
catgtggtgctgactggctcagccg

SEQ ID NO: 285382 - DNA, 25 bp, Artificial
  Probe
gaccctgagtcaatacatcttcctg

SEQ ID NO: 285383 - DNA, 25 bp, Artificial
  Probe
gtaccgagcaaaaacagaggcgagt

SEQ ID NO: 285384 - DNA, 25 bp, Artificial
  Probe
cagcaagcagggacagagcgcacag

SEQ ID NO: 285385 - DNA, 25 bp, Artificial
  Probe
ctggccagaccacagtgtcccggag

SEQ ID NO: 285386 - DNA, 25 bp, Artificial
  Probe
gtgtgagctcccagctaacacccta

SEQ ID NO: 285387 - DNA, 25 bp, Artificial
  Probe
tgcaggccactcagggcaagggacc

SEQ ID NO: 285388 - DNA, 25 bp, Artificial
  Probe
cttttgtagaactggtacaggagca

SEQ ID NO: 285389 - DNA, 25 bp, Artificial
  Probe
cctgactacaatcagaacagcattg

SEQ ID NO: 285390 - DNA, 25 bp, Artificial
  Probe
atgctgtgggccagtgctgcttccg

SEQ ID NO: 285391 - DNA, 25 bp, Artificial
  Probe
ctcttcagagtcatacacggggaga

SEQ ID NO: 285392 - DNA, 25 bp, Artificial
  Probe
ctcaggagcagttcgccctggtgga

SEQ ID NO: 285393 - DNA, 25 bp, Artificial
  Probe
aggagtgccctgaggatagcatgct

SEQ ID NO: 285394 - DNA, 25 bp, Artificial
  Probe
cacgtcagccgaaacactgtccagg

SEQ ID NO: 285395 - DNA, 25 bp, Artificial
  Probe
atccggactggctttgcaaagctcg

SEQ ID NO: 285396 - DNA, 25 bp, Artificial
  Probe
gagctgctgtcttccctagtgactc

SEQ ID NO: 285397 - DNA, 25 bp, Artificial
  Probe
tgtctgcctgccaccatgagtggta

SEQ ID NO: 285398 - DNA, 25 bp, Artificial
  Probe
gtcagaggtcagaccgaactgaagg

SEQ ID NO: 285399 - DNA, 25 bp, Artificial
  Probe
caggccctgcttagccttgacgaag

SEQ ID NO: 285400 - DNA, 25 bp, Artificial
  Probe
cggtctgcattcagggccctgtgtg

SEQ ID NO: 285401 - DNA, 25 bp, Artificial
  Probe
gacttactggctgacagggaagaca

SEQ ID NO: 285402 - DNA, 25 bp, Artificial
  Probe
agaatccacgtcagccgaaacactg

SEQ ID NO: 285403 - DNA, 25 bp, Artificial
  Probe
agacttactggctgacagggaagac

SEQ ID NO: 285404 - DNA, 25 bp, Artificial
  Probe
acgtcagccgaaacactgtccaggc

SEQ ID NO: 285405 - DNA, 25 bp, Artificial
  Probe
ccctgcttagccttgacgaaggcta

SEQ ID NO: 285406 - DNA, 25 bp, Artificial
  Probe
aatccactggactgccatacagaat

SEQ ID NO: 285407 - DNA, 25 bp, Artificial
  Probe
accatgagtggtatgaggagctgct

SEQ ID NO: 285408 - DNA, 25 bp, Artificial
  Probe
tgtcttccctagtgactctgggggt

SEQ ID NO: 285409 - DNA, 25 bp, Artificial
  Probe
cgaatgtctgcctgccaccatgagt

SEQ ID NO: 285410 - DNA, 25 bp, Artificial
  Probe
ttcaggggacactgggccaggtcct

SEQ ID NO: 285411 - DNA, 25 bp, Artificial
  Probe
gtccatccagcctggagacccatgg

SEQ ID NO: 285412 - DNA, 25 bp, Artificial
  Probe
tgctgtcttccctagtgactctggg

SEQ ID NO: 285413 - DNA, 25 bp, Artificial
  Probe
gactggctttgcaaagctcgccaga

SEQ ID NO: 285414 - DNA, 25 bp, Artificial
  Probe
atccagcctggagacccatggcagg

SEQ ID NO: 285415 - DNA, 25 bp, Artificial
  Probe
cactggactgccatacagaatccac

SEQ ID NO: 285416 - DNA, 25 bp, Artificial
  Probe
gcctggagacccatggcaggaccat

SEQ ID NO: 285417 - DNA, 25 bp, Artificial
  Probe
gctcgccagagtctgctgagccagg

SEQ ID NO: 285418 - DNA, 25 bp, Artificial
  Probe
ccaggtcctgatagcaagtcggtgg

SEQ ID NO: 285419 - DNA, 25 bp, Artificial
  Probe
ggacactgggccaggtcctgatagc

SEQ ID NO: 285420 - DNA, 25 bp, Artificial
  Probe
gcttggaggagacttactggctgac

SEQ ID NO: 285421 - DNA, 25 bp, Artificial
  Probe
ggtatgaggagctgctgtcttccct

SEQ ID NO: 285422 - DNA, 25 bp, Artificial
  Probe
aggtgccaaggcagccaagatgccc

SEQ ID NO: 285423 - DNA, 25 bp, Artificial
  Probe
gagacccatggcaggaccatataaa

SEQ ID NO: 285424 - DNA, 25 bp, Artificial
  Probe
cgaaacactgtccaggccctgctta

SEQ ID NO: 285425 - DNA, 25 bp, Artificial
  Probe
gaaacactgtccaggccctgcttag

SEQ ID NO: 285426 - DNA, 25 bp, Artificial
  Probe
ccatggcaggaccatataaaccaag

SEQ ID NO: 285427 - DNA, 25 bp, Artificial
  Probe
gcaaagctcgccagagtctgctgag

SEQ ID NO: 285428 - DNA, 25 bp, Artificial
  Probe
ttccaggatggaatccactggactg

SEQ ID NO: 285429 - DNA, 25 bp, Artificial
  Probe
taaaccaagaaatccggactggctt

SEQ ID NO: 285430 - DNA, 25 bp, Artificial
  Probe
ggaatccactggactgccatacaga

SEQ ID NO: 285431 - DNA, 25 bp, Artificial
  Probe
ccaggccctgcttagccttgacgaa

SEQ ID NO: 285432 - DNA, 25 bp, Artificial
  Probe
ggcaggaccatataaaccaagaaat

SEQ ID NO: 285433 - DNA, 25 bp, Artificial
  Probe
tccggactggctttgcaaagctcgc

SEQ ID NO: 285434 - DNA, 25 bp, Artificial
  Probe
caagaaatccggactggctttgcaa

SEQ ID NO: 285435 - DNA, 25 bp, Artificial
  Probe
aaattgatgtcagaggtcagaccga

SEQ ID NO: 285436 - DNA, 25 bp, Artificial
  Probe
cctggagacccatggcaggaccata

SEQ ID NO: 285437 - DNA, 25 bp, Artificial
  Probe
gctttgcaaagctcgccagagtctg

SEQ ID NO: 285438 - DNA, 25 bp, Artificial
  Probe
ggtgtccttgcctcctgtcaggaaa

SEQ ID NO: 285439 - DNA, 25 bp, Artificial
  Probe
tagccttgacgaaggctacaaaatt

SEQ ID NO: 285440 - DNA, 25 bp, Artificial
  Probe
gcgcgtactagtgatcgagctcgtc

SEQ ID NO: 285441 - DNA, 25 bp, Artificial
  Probe
cgccacctgtggaatgattcacatc

SEQ ID NO: 285442 - DNA, 25 bp, Artificial
  Probe
agacctgttacgtagaggaaatacg

SEQ ID NO: 285443 - DNA, 25 bp, Artificial
  Probe
tcctagaatgcagctgaagacctgt

SEQ ID NO: 285444 - DNA, 25 bp, Artificial
  Probe
ccacctgtggaatgattcacatcct

SEQ ID NO: 285445 - DNA, 25 bp, Artificial
  Probe
gtactagtgatcgagctcgtcagct

SEQ ID NO: 285446 - DNA, 25 bp, Artificial
  Probe
catgtctcatctagcgatcagcacc

SEQ ID NO: 285447 - DNA, 25 bp, Artificial
  Probe
agtatatgtgttcctagaatgcagc

SEQ ID NO: 285448 - DNA, 25 bp, Artificial
  Probe
acctgttacgtagaggaaatacgag

SEQ ID NO: 285449 - DNA, 25 bp, Artificial
  Probe
cctctcaagttaggaggatacaggc

SEQ ID NO: 285450 - DNA, 25 bp, Artificial
  Probe
ctagcgatcagcaccgcgcgtacta

SEQ ID NO: 285451 - DNA, 25 bp, Artificial
  Probe
gtagatcgttagtccgacatctctc

SEQ ID NO: 285452 - DNA, 25 bp, Artificial
  Probe
atcgttagtccgacatctctcatgt

SEQ ID NO: 285453 - DNA, 25 bp, Artificial
  Probe
tcatctagcgatcagcaccgcgcgt

SEQ ID NO: 285454 - DNA, 25 bp, Artificial
  Probe
aatgcagctgaagacctgttacgta

SEQ ID NO: 285455 - DNA, 25 bp, Artificial
  Probe
atgattcacatcctctcaagttagg

SEQ ID NO: 285456 - DNA, 25 bp, Artificial
  Probe
caccgcgcgtactagtgatcgagct

SEQ ID NO: 285457 - DNA, 25 bp, Artificial
  Probe
tcatgtctcatctagcgatcagcac

SEQ ID NO: 285458 - DNA, 25 bp, Artificial
  Probe
gagaacacttaacaacatgtggggt

SEQ ID NO: 285459 - DNA, 25 bp, Artificial
  Probe
gacatctctcatgtctcatctagcg

SEQ ID NO: 285460 - DNA, 25 bp, Artificial
  Probe
gcgagagattcatcaccttataaca

SEQ ID NO: 285461 - DNA, 25 bp, Artificial
  Probe
agaatgcagctgaagacctgttacg

SEQ ID NO: 285462 - DNA, 25 bp, Artificial
  Probe
ccaaactggcattgagttctataaa

SEQ ID NO: 285463 - DNA, 25 bp, Artificial
  Probe
tctgtagatcgttagtccgacatct

SEQ ID NO: 285464 - DNA, 25 bp, Artificial
  Probe
cacatcctctcaagttaggaggata

SEQ ID NO: 285465 - DNA, 25 bp, Artificial
  Probe
tctggggagtctgatctgtagatcg

SEQ ID NO: 285466 - DNA, 25 bp, Artificial
  Probe
ggtactctggggagtctgatctgta

SEQ ID NO: 285467 - DNA, 25 bp, Artificial
  Probe
tgattcacatcctctcaagttagga

SEQ ID NO: 285468 - DNA, 25 bp, Artificial
  Probe
caaactggcattgagttctataaaa

SEQ ID NO: 285469 - DNA, 25 bp, Artificial
  Probe
gatctgtagatcgttagtccgacat

SEQ ID NO: 285470 - DNA, 25 bp, Artificial
  Probe
gttagtccgacatctctcatgtctc

SEQ ID NO: 285471 - DNA, 25 bp, Artificial
  Probe
tctcatgtctcatctagcgatcagc

SEQ ID NO: 285472 - DNA, 25 bp, Artificial
  Probe
tgcagctgaagacctgttacgtaga

SEQ ID NO: 285473 - DNA, 25 bp, Artificial
  Probe
tcgttagtccgacatctctcatgtc

SEQ ID NO: 285474 - DNA, 25 bp, Artificial
  Probe
cgcgtactagtgatcgagctcgtca

SEQ ID NO: 285475 - DNA, 25 bp, Artificial
  Probe
ggagaacacttaacaacatgtgggg

SEQ ID NO: 285476 - DNA, 25 bp, Artificial
  Probe
attcacatcctctcaagttaggagg

SEQ ID NO: 285477 - DNA, 25 bp, Artificial
  Probe
tggaatgattcacatcctctcaagt

SEQ ID NO: 285478 - DNA, 25 bp, Artificial
  Probe
cagcaccgcgcgtactagtgatcga

SEQ ID NO: 285479 - DNA, 25 bp, Artificial
  Probe
tgcgagagattcatcaccttataac

SEQ ID NO: 285480 - DNA, 25 bp, Artificial
  Probe
ctgaagacctgttacgtagaggaaa

SEQ ID NO: 285481 - DNA, 25 bp, Artificial
  Probe
ggaatgattcacatcctctcaagtt

SEQ ID NO: 285482 - DNA, 25 bp, Artificial
  Probe
ctctcatgtctcatctagcgatcag

SEQ ID NO: 285483 - DNA, 25 bp, Artificial
  Probe
cgtactagtgatcgagctcgtcagc

SEQ ID NO: 285484 - DNA, 25 bp, Artificial
  Probe
gcaaatactaccaaactggcattga

SEQ ID NO: 285485 - DNA, 25 bp, Artificial
  Probe
taccaaactggcattgagttctata

SEQ ID NO: 285486 - DNA, 25 bp, Artificial
  Probe
ttcgccctatagtgagtcgtattac

SEQ ID NO: 285487 - DNA, 25 bp, Artificial
  Probe
ccataccagcagaagacaaagcaga

SEQ ID NO: 285488 - DNA, 25 bp, Artificial
  Probe
gccttgccagcctaaggtgccagag

SEQ ID NO: 285489 - DNA, 25 bp, Artificial
  Probe
cctaaggtgccagagccttgccagc

SEQ ID NO: 285490 - DNA, 25 bp, Artificial
  Probe
tcgccctatagtgagtcgtattaca

SEQ ID NO: 285491 - DNA, 25 bp, Artificial
  Probe
tacacatgctgtgacctccagtctt

SEQ ID NO: 285492 - DNA, 25 bp, Artificial
  Probe
ttgccagcctaaggtgccagagccc

SEQ ID NO: 285493 - DNA, 25 bp, Artificial
  Probe
gtgctacacatgctgtgacctccag

SEQ ID NO: 285494 - DNA, 25 bp, Artificial
  Probe
ccctatagtgagtcgtattacaatt

SEQ ID NO: 285495 - DNA, 25 bp, Artificial
  Probe
cttgtgctacacatgctgtgacctc

SEQ ID NO: 285496 - DNA, 25 bp, Artificial
  Probe
gtgccagagccttgccagcctaagg

SEQ ID NO: 285497 - DNA, 25 bp, Artificial
  Probe
ccttgccagcctaaggtgccagagc

SEQ ID NO: 285498 - DNA, 25 bp, Artificial
  Probe
ttgtgctacacatgctgtgacctcc

SEQ ID NO: 285499 - DNA, 25 bp, Artificial
  Probe
atcaccataccagcagaagacaaag

SEQ ID NO: 285500 - DNA, 25 bp, Artificial
  Probe
accataccagcagaagacaaagcag

SEQ ID NO: 285501 - DNA, 25 bp, Artificial
  Probe
cagagccttgccagcctaaggtgcc

SEQ ID NO: 285502 - DNA, 25 bp, Artificial
  Probe
gcctaaggtgccagagccctgccat

SEQ ID NO: 285503 - DNA, 25 bp, Artificial
  Probe
gcctaaggtgccagagccctgccag

SEQ ID NO: 285504 - DNA, 25 bp, Artificial
  Probe
gcctaaggtgccagagccttgccag

SEQ ID NO: 285505 - DNA, 25 bp, Artificial
  Probe
cctcaagaagttctcgagccactca

SEQ ID NO: 285506 - DNA, 25 bp, Artificial
  Probe
tcctcatcctcaagaagttctcgag

SEQ ID NO: 285507 - DNA, 25 bp, Artificial
  Probe
ctcatcctcaagaagttctcgagcc

SEQ ID NO: 285508 - DNA, 25 bp, Artificial
  Probe
gccctgccagcctaaggtgccagag

SEQ ID NO: 285509 - DNA, 25 bp, Artificial
  Probe
gagtcgtattacaattcactggccg

SEQ ID NO: 285510 - DNA, 25 bp, Artificial
  Probe
tgctgtgacctccagtcttaatcct

SEQ ID NO: 285511 - DNA, 25 bp, Artificial
  Probe
gccagcctaaggtgccagagccctg

SEQ ID NO: 285512 - DNA, 25 bp, Artificial
  Probe
gccagcctaaggtgccagagccttg

SEQ ID NO: 285513 - DNA, 25 bp, Artificial
  Probe
acacatgctgtgacctccagtctta

SEQ ID NO: 285514 - DNA, 25 bp, Artificial
  Probe
ccttgtgctacacatgctgtgacct

SEQ ID NO: 285515 - DNA, 25 bp, Artificial
  Probe
gtcgtattacaattcactggccgtc

SEQ ID NO: 285516 - DNA, 25 bp, Artificial
  Probe
ctaaggtgccagagccttgccagcc

SEQ ID NO: 285517 - DNA, 25 bp, Artificial
  Probe
cacatgctgtgacctccagtcttaa

SEQ ID NO: 285518 - DNA, 25 bp, Artificial
  Probe
acattacccaaagtctcatgaatgg

SEQ ID NO: 285519 - DNA, 25 bp, Artificial
  Probe
atcctcaagaagttctcgagccact

SEQ ID NO: 285520 - DNA, 25 bp, Artificial
  Probe
catcctcaagaagttctcgagccac

SEQ ID NO: 285521 - DNA, 25 bp, Artificial
  Probe
gctgtgacctccagtcttaatcctc

SEQ ID NO: 285522 - DNA, 25 bp, Artificial
  Probe
cttgccagcctaaggtgccagagcc

SEQ ID NO: 285523 - DNA, 25 bp, Artificial
  Probe
gccctatagtgagtcgtattacaat

SEQ ID NO: 285524 - DNA, 25 bp, Artificial
  Probe
cgtattacaattcactggccgtcgt

SEQ ID NO: 285525 - DNA, 25 bp, Artificial
  Probe
ggtgccagagccttgccagcctaag

SEQ ID NO: 285526 - DNA, 25 bp, Artificial
  Probe
gctacacatgctgtgacctccagtc

SEQ ID NO: 285527 - DNA, 25 bp, Artificial
  Probe
caagaagttctcgagccactcaaca

SEQ ID NO: 285528 - DNA, 25 bp, Artificial
  Probe
gtgccagagccctgccagcctaagg

SEQ ID NO: 285529 - DNA, 25 bp, Artificial
  Probe
tgccagcctaaggtgccagagccct

SEQ ID NO: 285530 - DNA, 25 bp, Artificial
  Probe
catgctgtgacctccagtcttaatc

SEQ ID NO: 285531 - DNA, 25 bp, Artificial
  Probe
attcgccctatagtgagtcgtatta

SEQ ID NO: 285532 - DNA, 25 bp, Artificial
  Probe
ccatttatagaatgccatggacgag

SEQ ID NO: 285533 - DNA, 25 bp, Artificial
  Probe
gcagatgtaccgtctgcgaaggtcc

SEQ ID NO: 285534 - DNA, 25 bp, Artificial
  Probe
ctcaaactcttacagcttctggctg

SEQ ID NO: 285535 - DNA, 25 bp, Artificial
  Probe
gaattccgagccagtccatttatag

SEQ ID NO: 285536 - DNA, 25 bp, Artificial
  Probe
gcccttgagccctacgttagcagat

SEQ ID NO: 285537 - DNA, 25 bp, Artificial
  Probe
ccggctcctgcctggaggaattccg

SEQ ID NO: 285538 - DNA, 25 bp, Artificial
  Probe
gttagcagatgtaccgtctgcgaag

SEQ ID NO: 285539 - DNA, 25 bp, Artificial
  Probe
ctaaatccagaaagaatgttcagaa

SEQ ID NO: 285540 - DNA, 25 bp, Artificial
  Probe
gtttacaagtgcaggctctgagggt

SEQ ID NO: 285541 - DNA, 25 bp, Artificial
  Probe
ttttcgtacaaggaaatgagcacgc

SEQ ID NO: 285542 - DNA, 25 bp, Artificial
  Probe
gggacctgcaactactactcaaact

SEQ ID NO: 285543 - DNA, 25 bp, Artificial
  Probe
cagaaaacctattccatcgactgtg

SEQ ID NO: 285544 - DNA, 25 bp, Artificial
  Probe
gtaactttgcatcacgaaatgatta

SEQ ID NO: 285545 - DNA, 25 bp, Artificial
  Probe
accttggtactctgggcagctgctt

SEQ ID NO: 285546 - DNA, 25 bp, Artificial
  Probe
ctgcttacagcgattcaccacaatg

SEQ ID NO: 285547 - DNA, 25 bp, Artificial
  Probe
tgcccatggacatggccccaattac

SEQ ID NO: 285548 - DNA, 25 bp, Artificial
  Probe
aatgattattcatactggctgtcga

SEQ ID NO: 285549 - DNA, 25 bp, Artificial
  Probe
ggaggaattccgagccagtccattt

SEQ ID NO: 285550 - DNA, 25 bp, Artificial
  Probe
ggacatggccccaattactggcaga

SEQ ID NO: 285551 - DNA, 25 bp, Artificial
  Probe
aattactggcagagcccttgagccc

SEQ ID NO: 285552 - DNA, 25 bp, Artificial
  Probe
gagaaaatcataagccgctgtcagg

SEQ ID NO: 285553 - DNA, 25 bp, Artificial
  Probe
tcttacagcttctggctggcttcac

SEQ ID NO: 285554 - DNA, 25 bp, Artificial
  Probe
tcgactgtgaaagctggagacttgg

SEQ ID NO: 285555 - DNA, 25 bp, Artificial
  Probe
gcttcactaaatccagaaagaatgt

SEQ ID NO: 285556 - DNA, 25 bp, Artificial
  Probe
gtgctggacaagctcttgcctcgcc

SEQ ID NO: 285557 - DNA, 25 bp, Artificial
  Probe
atgccattcttattctgtaacgtcg

SEQ ID NO: 285558 - DNA, 25 bp, Artificial
  Probe
ttctttcgttatgtttacaagtgca

SEQ ID NO: 285559 - DNA, 25 bp, Artificial
  Probe
atgagcacgcccatggacaagacct

SEQ ID NO: 285560 - DNA, 25 bp, Artificial
  Probe
ctggcagagcccttgagccctacgt

SEQ ID NO: 285561 - DNA, 25 bp, Artificial
  Probe
tgcctggaggaattccgagccagtc

SEQ ID NO: 285562 - DNA, 25 bp, Artificial
  Probe
ggctgggtttctctctggaaaggtt

SEQ ID NO: 285563 - DNA, 25 bp, Artificial
  Probe
gcagagcccttgagccctacgttag

SEQ ID NO: 285564 - DNA, 25 bp, Artificial
  Probe
cgatgcccatggacatggccccaat

SEQ ID NO: 285565 - DNA, 25 bp, Artificial
  Probe
ttcatactggctgtcgacaccagcc

SEQ ID NO: 285566 - DNA, 25 bp, Artificial
  Probe
ctgagggtgctggacaagctcttgc

SEQ ID NO: 285567 - DNA, 25 bp, Artificial
  Probe
ggtactctgggcagctgcttacagc

SEQ ID NO: 285568 - DNA, 25 bp, Artificial
  Probe
gctgggtttctctctggaaaggttt

SEQ ID NO: 285569 - DNA, 25 bp, Artificial
  Probe
acagcttctggctggcttcactaaa

SEQ ID NO: 285570 - DNA, 25 bp, Artificial
  Probe
atgccatggacgagggacctgcaac

SEQ ID NO: 285571 - DNA, 25 bp, Artificial
  Probe
gtaccgtctgcgaaggtcctgcaat

SEQ ID NO: 285572 - DNA, 25 bp, Artificial
  Probe
agatgtaccgtctgcgaaggtcctg

SEQ ID NO: 285573 - DNA, 25 bp, Artificial
  Probe
aaggaaatgagcacgcccatggaca

SEQ ID NO: 285574 - DNA, 25 bp, Artificial
  Probe
cgataacgtgtgtaactttgcatca

SEQ ID NO: 285575 - DNA, 25 bp, Artificial
  Probe
gctctgagggtgctggacaagctct

SEQ ID NO: 285576 - DNA, 25 bp, Artificial
  Probe
gcttacagcgattcaccacaatgcc

SEQ ID NO: 285577 - DNA, 25 bp, Artificial
  Probe
gctgttcacagtcaaaccactgcta

SEQ ID NO: 285578 - DNA, 25 bp, Artificial
  Probe
gacaacaacaagcttaccagagtac

SEQ ID NO: 285579 - DNA, 25 bp, Artificial
  Probe
aaatcagcagagttgatgcagctag

SEQ ID NO: 285580 - DNA, 25 bp, Artificial
  Probe
gtgggctggcagagcataagtacat

SEQ ID NO: 285581 - DNA, 25 bp, Artificial
  Probe
tcccttacggaattacatcttgatg

SEQ ID NO: 285582 - DNA, 25 bp, Artificial
  Probe
cagagcataagtacatccaggttgt

SEQ ID NO: 285583 - DNA, 25 bp, Artificial
  Probe
aacagcatctctgctgttgacaatg

SEQ ID NO: 285584 - DNA, 25 bp, Artificial
  Probe
acacgcctcatctgagggagcttca

SEQ ID NO: 285585 - DNA, 25 bp, Artificial
  Probe
agagcataagtacatccaggttgtc

SEQ ID NO: 285586 - DNA, 25 bp, Artificial
  Probe
acaagcttaccagagtacctggtgg

SEQ ID NO: 285587 - DNA, 25 bp, Artificial
  Probe
tgacaatggctctctggccaacacg

SEQ ID NO: 285588 - DNA, 25 bp, Artificial
  Probe
agcatctctgctgttgacaatggct

SEQ ID NO: 285589 - DNA, 25 bp, Artificial
  Probe
tacggaattacatcttgatggcaac

SEQ ID NO: 285590 - DNA, 25 bp, Artificial
  Probe
tgctgttgacaatggctctctggcc

SEQ ID NO: 285591 - DNA, 25 bp, Artificial
  Probe
attgagtttcaacagcatctctgct

SEQ ID NO: 285592 - DNA, 25 bp, Artificial
  Probe
tctgctgttgacaatggctctctgg

SEQ ID NO: 285593 - DNA, 25 bp, Artificial
  Probe
cttacggaattacatcttgatggca

SEQ ID NO: 285594 - DNA, 25 bp, Artificial
  Probe
tctctgctgttgacaatggctctct

SEQ ID NO: 285595 - DNA, 25 bp, Artificial
  Probe
gttgacaatggctctctggccaaca

SEQ ID NO: 285596 - DNA, 25 bp, Artificial
  Probe
ggaattacatcttgatggcaacaaa

SEQ ID NO: 285597 - DNA, 25 bp, Artificial
  Probe
cggaattacatcttgatggcaacaa

SEQ ID NO: 285598 - DNA, 25 bp, Artificial
  Probe
acagcatctctgctgttgacaatgg

SEQ ID NO: 285599 - DNA, 25 bp, Artificial
  Probe
ttgacaatggctctctggccaacac

SEQ ID NO: 285600 - DNA, 25 bp, Artificial
  Probe
caacaagcttaccagagtacctggt

SEQ ID NO: 285601 - DNA, 25 bp, Artificial
  Probe
aatcagcagagttgatgcagctagc

SEQ ID NO: 285602 - DNA, 25 bp, Artificial
  Probe
gagtttcaacagcatctctgctgtt

SEQ ID NO: 285603 - DNA, 25 bp, Artificial
  Probe
gagcataagtacatccaggttgtct

SEQ ID NO: 285604 - DNA, 25 bp, Artificial
  Probe
acaacaagcttaccagagtacctgg

SEQ ID NO: 285605 - DNA, 25 bp, Artificial
  Probe
gcatctctgctgttgacaatggctc

SEQ ID NO: 285606 - DNA, 25 bp, Artificial
  Probe
tgagtttcaacagcatctctgctgt

SEQ ID NO: 285607 - DNA, 25 bp, Artificial
  Probe
ggacaacaacaagcttaccagagta

SEQ ID NO: 285608 - DNA, 25 bp, Artificial
  Probe
gacaatggctctctggccaacacgc

SEQ ID NO: 285609 - DNA, 25 bp, Artificial
  Probe
cccttacggaattacatcttgatgg

SEQ ID NO: 285610 - DNA, 25 bp, Artificial
  Probe
gcattgctgataccaatatcaccag

SEQ ID NO: 285611 - DNA, 25 bp, Artificial
  Probe
ctgctgttgacaatggctctctggc

SEQ ID NO: 285612 - DNA, 25 bp, Artificial
  Probe
atctctgctgttgacaatggctctc

SEQ ID NO: 285613 - DNA, 25 bp, Artificial
  Probe
ctctgctgttgacaatggctctctg

SEQ ID NO: 285614 - DNA, 25 bp, Artificial
  Probe
gcttaccagagtacctggtgggctg

SEQ ID NO: 285615 - DNA, 25 bp, Artificial
  Probe
acggaattacatcttgatggcaaca

SEQ ID NO: 285616 - DNA, 25 bp, Artificial
  Probe
ccaacacgcctcatctgagggagct

SEQ ID NO: 285617 - DNA, 25 bp, Artificial
  Probe
cagcatctctgctgttgacaatggc

SEQ ID NO: 285618 - DNA, 25 bp, Artificial
  Probe
ttacggaattacatcttgatggcaa

SEQ ID NO: 285619 - DNA, 25 bp, Artificial
  Probe
cacgcctcatctgagggagcttcac

SEQ ID NO: 285620 - DNA, 25 bp, Artificial
  Probe
ttaccagagtacctggtgggctggc

SEQ ID NO: 285621 - DNA, 25 bp, Artificial
  Probe
ttgagtttcaacagcatctctgctg

SEQ ID NO: 285622 - DNA, 25 bp, Artificial
  Probe
cttaccagagtacctggtgggctgg

SEQ ID NO: 285623 - DNA, 25 bp, Artificial
  Probe
aagcttaccagagtacctggtgggc

SEQ ID NO: 285624 - DNA, 25 bp, Artificial
  Probe
gcccttgaaccaagggtccatggct

SEQ ID NO: 285625 - DNA, 25 bp, Artificial
  Probe
aggcacccttttcttccacggcatg

SEQ ID NO: 285626 - DNA, 25 bp, Artificial
  Probe
aactggcctccctatgtgtggcatg

SEQ ID NO: 285627 - DNA, 25 bp, Artificial
  Probe
caaggacaactatttttcgagagag

SEQ ID NO: 285628 - DNA, 25 bp, Artificial
  Probe
accgatgggtcagaaaggtgccaat

SEQ ID NO: 285629 - DNA, 25 bp, Artificial
  Probe
gcctccctatgtgtggcatgcctgc

SEQ ID NO: 285630 - DNA, 25 bp, Artificial
  Probe
cttcactgtcccataccgatgggtc

SEQ ID NO: 285631 - DNA, 25 bp, Artificial
  Probe
tcactgtcccataccgatgggtcag

SEQ ID NO: 285632 - DNA, 25 bp, Artificial
  Probe
gcagcactcctttgtgcaaaatcta

SEQ ID NO: 285633 - DNA, 25 bp, Artificial
  Probe
ccttaatcctcaggttacaggcaaa

SEQ ID NO: 285634 - DNA, 25 bp, Artificial
  Probe
tcctcaggttacaggcaaacaagcg

SEQ ID NO: 285635 - DNA, 25 bp, Artificial
  Probe
accaagggtccatggcttagggagc

SEQ ID NO: 285636 - DNA, 25 bp, Artificial
  Probe
catgggtagcccttgaaccaagggt

SEQ ID NO: 285637 - DNA, 25 bp, Artificial
  Probe
gtagcccttgaaccaagggtccatg

SEQ ID NO: 285638 - DNA, 25 bp, Artificial
  Probe
gcagattgtcaggtagactgcagtc

SEQ ID NO: 285639 - DNA, 25 bp, Artificial
  Probe
ttcttccacggcatgggtagccctt

SEQ ID NO: 285640 - DNA, 25 bp, Artificial
  Probe
gcatgcctgcccaactagacaaagt

SEQ ID NO: 285641 - DNA, 25 bp, Artificial
  Probe
catggcttagggagcagattgtcag

SEQ ID NO: 285642 - DNA, 25 bp, Artificial
  Probe
aggttacaggcaaacaagcggtgga

SEQ ID NO: 285643 - DNA, 25 bp, Artificial
  Probe
tgaggagacccaaggacaactattt

SEQ ID NO: 285644 - DNA, 25 bp, Artificial
  Probe
tgtcaggtagactgcagtccccact

SEQ ID NO: 285645 - DNA, 25 bp, Artificial
  Probe
agtggccacagagaagaaagcactg

SEQ ID NO: 285646 - DNA, 25 bp, Artificial
  Probe
ctatgtgtggcatgcctgcccaact

SEQ ID NO: 285647 - DNA, 25 bp, Artificial
  Probe
gagacccaaggacaactatttttcg

SEQ ID NO: 285648 - DNA, 25 bp, Artificial
  Probe
aactagacaaagtggccacagagaa

SEQ ID NO: 285649 - DNA, 25 bp, Artificial
  Probe
gtactgccggagaagcaagaaggca

SEQ ID NO: 285650 - DNA, 25 bp, Artificial
  Probe
ctgaggagacccaaggacaactatt

SEQ ID NO: 285651 - DNA, 25 bp, Artificial
  Probe
tcttccacggcatgggtagcccttg

SEQ ID NO: 285652 - DNA, 25 bp, Artificial
  Probe
gtgtggcatgcctgcccaactagac

SEQ ID NO: 285653 - DNA, 25 bp, Artificial
  Probe
gcactcctttgtgcaaaatctacag

SEQ ID NO: 285654 - DNA, 25 bp, Artificial
  Probe
ggacctgaggagacccaaggacaac

SEQ ID NO: 285655 - DNA, 25 bp, Artificial
  Probe
gtcccataccgatgggtcagaaagg

SEQ ID NO: 285656 - DNA, 25 bp, Artificial
  Probe
cctatgtgtggcatgcctgcccaac

SEQ ID NO: 285657 - DNA, 25 bp, Artificial
  Probe
ttgaaccaagggtccatggcttagg

SEQ ID NO: 285658 - DNA, 25 bp, Artificial
  Probe
cataccgatgggtcagaaaggtgcc

SEQ ID NO: 285659 - DNA, 25 bp, Artificial
  Probe
gtgccaatggccttaatcctcaggt

SEQ ID NO: 285660 - DNA, 25 bp, Artificial
  Probe
atggccttaatcctcaggttacagg

SEQ ID NO: 285661 - DNA, 25 bp, Artificial
  Probe
cccttttcttccacggcatgggtag

SEQ ID NO: 285662 - DNA, 25 bp, Artificial
  Probe
ccttgcaggtactgccggagaagca

SEQ ID NO: 285663 - DNA, 25 bp, Artificial
  Probe
agggacctgaggagacccaaggaca

SEQ ID NO: 285664 - DNA, 25 bp, Artificial
  Probe
tgtcccataccgatgggtcagaaag

SEQ ID NO: 285665 - DNA, 25 bp, Artificial
  Probe
gaaaggtgccaatggccttaatcct

SEQ ID NO: 285666 - DNA, 25 bp, Artificial
  Probe
gacaaagtggccacagagaagaaag

SEQ ID NO: 285667 - DNA, 25 bp, Artificial
  Probe
gtgcaaaatctacaggcaccctttt

SEQ ID NO: 285668 - DNA, 25 bp, Artificial
  Probe
ccggtgcagcactcctttgtgcaaa

SEQ ID NO: 285669 - DNA, 25 bp, Artificial
  Probe
aggaatgaaaccttgcaggtactgc

SEQ ID NO: 285670 - DNA, 25 bp, Artificial
  Probe
agaactcagtggtccgtgtgggaca

SEQ ID NO: 285671 - DNA, 25 bp, Artificial
  Probe
tgtgggacaccgtgagatgacactg

SEQ ID NO: 285672 - DNA, 25 bp, Artificial
  Probe
ctgcttccctagaggccagttgaca

SEQ ID NO: 285673 - DNA, 25 bp, Artificial
  Probe
gtaggcagcgccatcccttgggctt

SEQ ID NO: 285674 - DNA, 25 bp, Artificial
  Probe
tccgtgtgggacaccgtgagatgac

SEQ ID NO: 285675 - DNA, 25 bp, Artificial
  Probe
taggcagcgccatcccttgggcttg

SEQ ID NO: 285676 - DNA, 25 bp, Artificial
  Probe
gagtcacctgccttgactgtaggca

SEQ ID NO: 285677 - DNA, 25 bp, Artificial
  Probe
tccctagaggccagttgacatctat

SEQ ID NO: 285678 - DNA, 25 bp, Artificial
  Probe
tgagataatctttacacttgacttg

SEQ ID NO: 285679 - DNA, 25 bp, Artificial
  Probe
tgctcggtgtgtgtctgtaaggaca

SEQ ID NO: 285680 - DNA, 25 bp, Artificial
  Probe
ttcacaattgtgttcaaagtcctga

SEQ ID NO: 285681 - DNA, 25 bp, Artificial
  Probe
tttcacaattgtgttcaaagtcctg

SEQ ID NO: 285682 - DNA, 25 bp, Artificial
  Probe
acaggaaggcgtcgatgctagctat

SEQ ID NO: 285683 - DNA, 25 bp, Artificial
  Probe
ccacagagagtcacctgccttgact

SEQ ID NO: 285684 - DNA, 25 bp, Artificial
  Probe
tataaaaggccaaggcaagtggcat

SEQ ID NO: 285685 - DNA, 25 bp, Artificial
  Probe
gcaaacacagggtctgagataatct

SEQ ID NO: 285686 - DNA, 25 bp, Artificial
  Probe
agttgacatctatttcacaattgtg

SEQ ID NO: 285687 - DNA, 25 bp, Artificial
  Probe
aacacagggtctgagataatcttta

SEQ ID NO: 285688 - DNA, 25 bp, Artificial
  Probe
tatggtcacggtataaaaggccaag

SEQ ID NO: 285689 - DNA, 25 bp, Artificial
  Probe
ctagctatggtcacggtataaaagg

SEQ ID NO: 285690 - DNA, 25 bp, Artificial
  Probe
gagccccacttcaatagctttcgtc

SEQ ID NO: 285691 - DNA, 25 bp, Artificial
  Probe
tctgtaaggacatttccacagagag

SEQ ID NO: 285692 - DNA, 25 bp, Artificial
  Probe
cacctaagggatgtgctcggtgtgt

SEQ ID NO: 285693 - DNA, 25 bp, Artificial
  Probe
ggcagtcacctaagggatgtgctcg

SEQ ID NO: 285694 - DNA, 25 bp, Artificial
  Probe
caagtggcatagacttagggctaga

SEQ ID NO: 285695 - DNA, 25 bp, Artificial
  Probe
agcttacgactgtcccagttggata

SEQ ID NO: 285696 - DNA, 25 bp, Artificial
  Probe
ctcagtggtccgtgtgggacaccgt

SEQ ID NO: 285697 - DNA, 25 bp, Artificial
  Probe
atgagccccacttcaatagctttcg

SEQ ID NO: 285698 - DNA, 25 bp, Artificial
  Probe
ttggatatccccaggaagagaactc

SEQ ID NO: 285699 - DNA, 25 bp, Artificial
  Probe
acttgattgggcagtcacctaaggg

SEQ ID NO: 285700 - DNA, 25 bp, Artificial
  Probe
aaactagctgagcacccacagttca

SEQ ID NO: 285701 - DNA, 25 bp, Artificial
  Probe
atacagtatgacatgggcaggtgtc

SEQ ID NO: 285702 - DNA, 25 bp, Artificial
  Probe
tacagtatgacatgggcaggtgtcc

SEQ ID NO: 285703 - DNA, 25 bp, Artificial
  Probe
tgccttgactgtaggcagcgccatc

SEQ ID NO: 285704 - DNA, 25 bp, Artificial
  Probe
cggtgtgtgtctgtaaggacatttc

SEQ ID NO: 285705 - DNA, 25 bp, Artificial
  Probe
gctttcgtcaactattttgtcacag

SEQ ID NO: 285706 - DNA, 25 bp, Artificial
  Probe
ctatggtcacggtataaaaggccaa

SEQ ID NO: 285707 - DNA, 25 bp, Artificial
  Probe
tgtgccattggaactctggaaggga

SEQ ID NO: 285708 - DNA, 25 bp, Artificial
  Probe
tcccagttggatacagtatgacatg

SEQ ID NO: 285709 - DNA, 25 bp, Artificial
  Probe
tatgacatgggcaggtgtccctcct

SEQ ID NO: 285710 - DNA, 25 bp, Artificial
  Probe
ttgactgtaggcagcgccatccctt

SEQ ID NO: 285711 - DNA, 25 bp, Artificial
  Probe
ggccaaggcaagtggcatagactta

SEQ ID NO: 285712 - DNA, 25 bp, Artificial
  Probe
acttgacttgattgggcagtcacct

SEQ ID NO: 285713 - DNA, 25 bp, Artificial
  Probe
gatatccccaggaagagaactcagt

SEQ ID NO: 285714 - DNA, 25 bp, Artificial
  Probe
tggcatagacttagggctagactag

SEQ ID NO: 285715 - DNA, 25 bp, Artificial
  Probe
ttcagatgtgccattggaactctgg

SEQ ID NO: 285716 - DNA, 25 bp, Artificial
  Probe
gatggcacctgtgcagacagctact

SEQ ID NO: 285717 - DNA, 25 bp, Artificial
  Probe
gcctgcagaatctggatggcacctg

SEQ ID NO: 285718 - DNA, 25 bp, Artificial
  Probe
ccactggatcatcgatacggactac

SEQ ID NO: 285719 - DNA, 25 bp, Artificial
  Probe
gccgcctgcagaatctggatggcac

SEQ ID NO: 285720 - DNA, 25 bp, Artificial
  Probe
aatctggatggcacctgtgcagaca

SEQ ID NO: 285721 - DNA, 25 bp, Artificial
  Probe
tggatcatcgatacggactacgaca

SEQ ID NO: 285722 - DNA, 25 bp, Artificial
  Probe
gatacggactacgacaccttcgctc

SEQ ID NO: 285723 - DNA, 25 bp, Artificial
  Probe
tctggatggcacctgtgcagacagc

SEQ ID NO: 285724 - DNA, 25 bp, Artificial
  Probe
atggcacctgtgcagacagctactc

SEQ ID NO: 285725 - DNA, 25 bp, Artificial
  Probe
gcctcctttctccagcgaggaaacg

SEQ ID NO: 285726 - DNA, 25 bp, Artificial
  Probe
aggaaacgatgaccactggatcatc

SEQ ID NO: 285727 - DNA, 25 bp, Artificial
  Probe
cctgtgcagacagctactcctttgt

SEQ ID NO: 285728 - DNA, 25 bp, Artificial
  Probe
agtactggggtgtagcctcctttct

SEQ ID NO: 285729 - DNA, 25 bp, Artificial
  Probe
tacggactacgacaccttcgctctg

SEQ ID NO: 285730 - DNA, 25 bp, Artificial
  Probe
cctcctttctccagcgaggaaacga

SEQ ID NO: 285731 - DNA, 25 bp, Artificial
  Probe
cacctgtgcagacagctactccttt

SEQ ID NO: 285732 - DNA, 25 bp, Artificial
  Probe
atcgatacggactacgacaccttcg

SEQ ID NO: 285733 - DNA, 25 bp, Artificial
  Probe
actacgacaccttcgctctgcagta

SEQ ID NO: 285734 - DNA, 25 bp, Artificial
  Probe
tttctccagcgaggaaacgatgacc

SEQ ID NO: 285735 - DNA, 25 bp, Artificial
  Probe
ctgcagaatctggatggcacctgtg

SEQ ID NO: 285736 - DNA, 25 bp, Artificial
  Probe
gatgaccactggatcatcgatacgg

SEQ ID NO: 285737 - DNA, 25 bp, Artificial
  Probe
tagcctcctttctccagcgaggaaa

SEQ ID NO: 285738 - DNA, 25 bp, Artificial
  Probe
cgcctgcagaatctggatggcacct

SEQ ID NO: 285739 - DNA, 25 bp, Artificial
  Probe
ggactacgacaccttcgctctgcag

SEQ ID NO: 285740 - DNA, 25 bp, Artificial
  Probe
tcatcgatacggactacgacacctt

SEQ ID NO: 285741 - DNA, 25 bp, Artificial
  Probe
gggtgtagcctcctttctccagcga

SEQ ID NO: 285742 - DNA, 25 bp, Artificial
  Probe
ctccagcgaggaaacgatgaccact

SEQ ID NO: 285743 - DNA, 25 bp, Artificial
  Probe
gaagtactggggtgtagcctccttt

SEQ ID NO: 285744 - DNA, 25 bp, Artificial
  Probe
tgtagcctcctttctccagcgagga

SEQ ID NO: 285745 - DNA, 25 bp, Artificial
  Probe
accactggatcatcgatacggacta

SEQ ID NO: 285746 - DNA, 25 bp, Artificial
  Probe
tcctgccgcctgcagaatctggatg

SEQ ID NO: 285747 - DNA, 25 bp, Artificial
  Probe
caaagcagaccctcaagaaacagtt

SEQ ID NO: 285748 - DNA, 25 bp, Artificial
  Probe
ctggatcatcgatacggactacgac

SEQ ID NO: 285749 - DNA, 25 bp, Artificial
  Probe
gtactggggtgtagcctcctttctc

SEQ ID NO: 285750 - DNA, 25 bp, Artificial
  Probe
ctttctccagcgaggaaacgatgac

SEQ ID NO: 285751 - DNA, 25 bp, Artificial
  Probe
aagcagaccctcaagaaacagtttg

SEQ ID NO: 285752 - DNA, 25 bp, Artificial
  Probe
cgatgaccactggatcatcgatacg

SEQ ID NO: 285753 - DNA, 25 bp, Artificial
  Probe
tggggtgtagcctcctttctccagc

SEQ ID NO: 285754 - DNA, 25 bp, Artificial
  Probe
tgcagaatctggatggcacctgtgc

SEQ ID NO: 285755 - DNA, 25 bp, Artificial
  Probe
gaaacgatgaccactggatcatcga

SEQ ID NO: 285756 - DNA, 25 bp, Artificial
  Probe
ctgtgcagacagctactcctttgtg

SEQ ID NO: 285757 - DNA, 25 bp, Artificial
  Probe
tgcagacagctactcctttgtgttt

SEQ ID NO: 285758 - DNA, 25 bp, Artificial
  Probe
gaccactggatcatcgatacggact

SEQ ID NO: 285759 - DNA, 25 bp, Artificial
  Probe
ggtgtagcctcctttctccagcgag

SEQ ID NO: 285760 - DNA, 25 bp, Artificial
  Probe
gcagaccctcaagaaacagtttgta

SEQ ID NO: 285761 - DNA, 25 bp, Artificial
  Probe
gtgcagacagctactcctttgtgtt

SEQ ID NO: 285762 - DNA, 25 bp, Artificial
  Probe
tatggtgagtcatcgctctggagaa

SEQ ID NO: 285763 - DNA, 25 bp, Artificial
  Probe
ttggggcactctaccaggactttgt

SEQ ID NO: 285764 - DNA, 25 bp, Artificial
  Probe
taccaggactttgtccggaactatc

SEQ ID NO: 285765 - DNA, 25 bp, Artificial
  Probe
agttcacagccaatgtcggcatcca

SEQ ID NO: 285766 - DNA, 25 bp, Artificial
  Probe
ccgatgcatcactggggaccagctt

SEQ ID NO: 285767 - DNA, 25 bp, Artificial
  Probe
caatgtcggcatccagatagtgggt

SEQ ID NO: 285768 - DNA, 25 bp, Artificial
  Probe
cactctaccaggactttgtccggaa

SEQ ID NO: 285769 - DNA, 25 bp, Artificial
  Probe
ctctaccaggactttgtccggaact

SEQ ID NO: 285770 - DNA, 25 bp, Artificial
  Probe
tcgtagtgggactgtgtacaggtca

SEQ ID NO: 285771 - DNA, 25 bp, Artificial
  Probe
cccgatgcatcactggggaccagct

SEQ ID NO: 285772 - DNA, 25 bp, Artificial
  Probe
agtcatcgctctggagaaaccgagg

SEQ ID NO: 285773 - DNA, 25 bp, Artificial
  Probe
tggtgccccatgcagatctgaacgt

SEQ ID NO: 285774 - DNA, 25 bp, Artificial
  Probe
agcttggtccaagttcacagccaat

SEQ ID NO: 285775 - DNA, 25 bp, Artificial
  Probe
gttcacagccaatgtcggcatccag

SEQ ID NO: 285776 - DNA, 25 bp, Artificial
  Probe
ctttgtccggaactatcctgtggtc

SEQ ID NO: 285777 - DNA, 25 bp, Artificial
  Probe
gagtcatcgctctggagaaaccgag

SEQ ID NO: 285778 - DNA, 25 bp, Artificial
  Probe
gatgactgggcagcttggtccaagt

SEQ ID NO: 285779 - DNA, 25 bp, Artificial
  Probe
ctcgtagtgggactgtgtacaggtc

SEQ ID NO: 285780 - DNA, 25 bp, Artificial
  Probe
tcatcgctctggagaaaccgaggac

SEQ ID NO: 285781 - DNA, 25 bp, Artificial
  Probe
gtccaagttcacagccaatgtcggc

SEQ ID NO: 285782 - DNA, 25 bp, Artificial
  Probe
ccccatgcagatctgaacgtctggc

SEQ ID NO: 285783 - DNA, 25 bp, Artificial
  Probe
tggtccaagttcacagccaatgtcg

SEQ ID NO: 285784 - DNA, 25 bp, Artificial
  Probe
aaccccaagcgcatcgagcgggcag

SEQ ID NO: 285785 - DNA, 25 bp, Artificial
  Probe
catgcagatctgaacgtctggcgaa

SEQ ID NO: 285786 - DNA, 25 bp, Artificial
  Probe
gccaatgtcggcatccagatagtgg

SEQ ID NO: 285787 - DNA, 25 bp, Artificial
  Probe
gttcattgcagacctcgtagtggga

SEQ ID NO: 285788 - DNA, 25 bp, Artificial
  Probe
ccccaagcgcatcgagcgggcagtg

SEQ ID NO: 285789 - DNA, 25 bp, Artificial
  Probe
tcactggggaccagcttggggcact

SEQ ID NO: 285790 - DNA, 25 bp, Artificial
  Probe
cagacctcgtagtgggactgtgtac

SEQ ID NO: 285791 - DNA, 25 bp, Artificial
  Probe
tgtcggcatccagatagtgggtgat

SEQ ID NO: 285792 - DNA, 25 bp, Artificial
  Probe
atgcagatctgaacgtctggcgaag

SEQ ID NO: 285793 - DNA, 25 bp, Artificial
  Probe
ccaatgtcggcatccagatagtggg

SEQ ID NO: 285794 - DNA, 25 bp, Artificial
  Probe
tgtccggaactatcctgtggtctcc

SEQ ID NO: 285795 - DNA, 25 bp, Artificial
  Probe
actggggaccagcttggggcactct

SEQ ID NO: 285796 - DNA, 25 bp, Artificial
  Probe
gactttgtccggaactatcctgtgg

SEQ ID NO: 285797 - DNA, 25 bp, Artificial
  Probe
tcacagccaatgtcggcatccagat

SEQ ID NO: 285798 - DNA, 25 bp, Artificial
  Probe
ccagcttggggcactctaccaggac

SEQ ID NO: 285799 - DNA, 25 bp, Artificial
  Probe
cctcgtagtgggactgtgtacaggt

SEQ ID NO: 285800 - DNA, 25 bp, Artificial
  Probe
tcgctctggagaaaccgaggacacg

SEQ ID NO: 285801 - DNA, 25 bp, Artificial
  Probe
aagttcacagccaatgtcggcatcc

SEQ ID NO: 285802 - DNA, 25 bp, Artificial
  Probe
catcactggggaccagcttggggca

SEQ ID NO: 285803 - DNA, 25 bp, Artificial
  Probe
aaccgaggacacgttcattgcagac

SEQ ID NO: 285804 - DNA, 25 bp, Artificial
  Probe
cattgcagacctcgtagtgggactg

SEQ ID NO: 285805 - DNA, 25 bp, Artificial
  Probe
gggcagcttggtccaagttcacagc

SEQ ID NO: 285806 - DNA, 25 bp, Artificial
  Probe
tggggaccagcttggggcactctac

SEQ ID NO: 285807 - DNA, 25 bp, Artificial
  Probe
gggcactctaccaggactttgtccg

SEQ ID NO: 285808 - DNA, 25 bp, Artificial
  Probe
ttgctctgtaggtcccagtgctgcg

SEQ ID NO: 285809 - DNA, 25 bp, Artificial
  Probe
gttccttacagatcgcattttgacg

SEQ ID NO: 285810 - DNA, 25 bp, Artificial
  Probe
ttctaccttttctggcttagtaagt

SEQ ID NO: 285811 - DNA, 25 bp, Artificial
  Probe
gttctctttggttgcattgcatagg

SEQ ID NO: 285812 - DNA, 25 bp, Artificial
  Probe
caccagccagcgagcacattggtca

SEQ ID NO: 285813 - DNA, 25 bp, Artificial
  Probe
gcttcccgctttgtatttagcaacc

SEQ ID NO: 285814 - DNA, 25 bp, Artificial
  Probe
aggtcccagtgctgcgaccctgtgt

SEQ ID NO: 285815 - DNA, 25 bp, Artificial
  Probe
atcaagtgcgtttgccctttccaac

SEQ ID NO: 285816 - DNA, 25 bp, Artificial
  Probe
ccttttctggcttagtaagttatgt

SEQ ID NO: 285817 - DNA, 25 bp, Artificial
  Probe
atgtgttagccttggcctatcggta

SEQ ID NO: 285818 - DNA, 25 bp, Artificial
  Probe
ttagccttggcctatcggtaacatg

SEQ ID NO: 285819 - DNA, 25 bp, Artificial
  Probe
taagttatgtgttagccttggccta

SEQ ID NO: 285820 - DNA, 25 bp, Artificial
  Probe
ttggcctatcggtaacatggtgtgg

SEQ ID NO: 285821 - DNA, 25 bp, Artificial
  Probe
agacatttgggattcttagcccacg

SEQ ID NO: 285822 - DNA, 25 bp, Artificial
  Probe
tatttagcaacctcctgggttcctt

SEQ ID NO: 285823 - DNA, 25 bp, Artificial
  Probe
tgagcaccagccagcgagcacattg

SEQ ID NO: 285824 - DNA, 25 bp, Artificial
  Probe
cacgcccacagaacatggctttgct

SEQ ID NO: 285825 - DNA, 25 bp, Artificial
  Probe
gaaagctcataactgcgtctttcat

SEQ ID NO: 285826 - DNA, 25 bp, Artificial
  Probe
gatgaaagctcataactgcgtcttt

SEQ ID NO: 285827 - DNA, 25 bp, Artificial
  Probe
tgacgttcacggaaaccaatgcctg

SEQ ID NO: 285828 - DNA, 25 bp, Artificial
  Probe
tgagtgttgacgttcacggaaacca

SEQ ID NO: 285829 - DNA, 25 bp, Artificial
  Probe
cagccaatcaagtgcgtttgccctt

SEQ ID NO: 285830 - DNA, 25 bp, Artificial
  Probe
cagcctgggtagttgagtggctttt

SEQ ID NO: 285831 - DNA, 25 bp, Artificial
  Probe
accgcttcccgctttgtatttagca

SEQ ID NO: 285832 - DNA, 25 bp, Artificial
  Probe
gtgttgacgttcacggaaaccaatg

SEQ ID NO: 285833 - DNA, 25 bp, Artificial
  Probe
caacctcctgggttccttacagatc

SEQ ID NO: 285834 - DNA, 25 bp, Artificial
  Probe
agcttccctatcaaaagacatttgg

SEQ ID NO: 285835 - DNA, 25 bp, Artificial
  Probe
cccagtgctgcgaccctgtgtgtgt

SEQ ID NO: 285836 - DNA, 25 bp, Artificial
  Probe
cacggaaaccaatgcctgtggaata

SEQ ID NO: 285837 - DNA, 25 bp, Artificial
  Probe
ctatcaaaagacatttgggattctt

SEQ ID NO: 285838 - DNA, 25 bp, Artificial
  Probe
aagacatttgggattcttagcccac

SEQ ID NO: 285839 - DNA, 25 bp, Artificial
  Probe
gtgcgtttgccctttccaaccttca

SEQ ID NO: 285840 - DNA, 25 bp, Artificial
  Probe
ctgtcagccagcagcctgggtagtt

SEQ ID NO: 285841 - DNA, 25 bp, Artificial
  Probe
cttttccaagttctctttggttgca

SEQ ID NO: 285842 - DNA, 25 bp, Artificial
  Probe
aacttctttgacaactgtcagccag

SEQ ID NO: 285843 - DNA, 25 bp, Artificial
  Probe
accttttctggcttagtaagttatg

SEQ ID NO: 285844 - DNA, 25 bp, Artificial
  Probe
gcttttggggcctggtaatttagct

SEQ ID NO: 285845 - DNA, 25 bp, Artificial
  Probe
gcagagagccttttaggatgaaagc

SEQ ID NO: 285846 - DNA, 25 bp, Artificial
  Probe
cgctttgtatttagcaacctcctgg

SEQ ID NO: 285847 - DNA, 25 bp, Artificial
  Probe
agagagccttttaggatgaaagctc

SEQ ID NO: 285848 - DNA, 25 bp, Artificial
  Probe
tacagtcctacgtgtacgctatact

SEQ ID NO: 285849 - DNA, 25 bp, Artificial
  Probe
ctatcggtaacatggtgtggaaatc

SEQ ID NO: 285850 - DNA, 25 bp, Artificial
  Probe
tgtgtgtgtgtctgtggtcccctgc

SEQ ID NO: 285851 - DNA, 25 bp, Artificial
  Probe
ttgacaactgtcagccagcagcctg

SEQ ID NO: 285852 - DNA, 25 bp, Artificial
  Probe
cttttggggcctggtaatttagctg

SEQ ID NO: 285853 - DNA, 25 bp, Artificial
  Probe
acagaacatggctttgctctgtagg

SEQ ID NO: 285854 - DNA, 25 bp, Artificial
  Probe
gtcgcgccagcaagcggtggggcag

SEQ ID NO: 285855 - DNA, 25 bp, Artificial
  Probe
gcagcccgcagcccaggcggcgccg

SEQ ID NO: 285856 - DNA, 25 bp, Artificial
  Probe
gcccctgtagaagcgatgacagaat

SEQ ID NO: 285857 - DNA, 25 bp, Artificial
  Probe
agcccgcagcccaggcggcgccggc

SEQ ID NO: 285858 - DNA, 25 bp, Artificial
  Probe
cagcaagcggtggggcaggagctcc

SEQ ID NO: 285859 - DNA, 25 bp, Artificial
  Probe
ggggcaggagctcctggattggcag

SEQ ID NO: 285860 - DNA, 25 bp, Artificial
  Probe
caggagctcctggattggcagcccc

SEQ ID NO: 285861 - DNA, 25 bp, Artificial
  Probe
ccgcggacggagcccatgcgccgac

SEQ ID NO: 285862 - DNA, 25 bp, Artificial
  Probe
agcggtggggcaggagctcctggat

SEQ ID NO: 285863 - DNA, 25 bp, Artificial
  Probe
agcccctgtagaagcgatgacagaa

SEQ ID NO: 285864 - DNA, 25 bp, Artificial
  Probe
aggagctcctggattggcagcccct

SEQ ID NO: 285865 - DNA, 25 bp, Artificial
  Probe
ggccgcggacggagcccatgcgccg

SEQ ID NO: 285866 - DNA, 25 bp, Artificial
  Probe
cctgtagaagcgatgacagaataca

SEQ ID NO: 285867 - DNA, 25 bp, Artificial
  Probe
ctggattggcagcccctgtagaagc

SEQ ID NO: 285868 - DNA, 25 bp, Artificial
  Probe
tcgcgccagcaagcggtggggcagg

SEQ ID NO: 285869 - DNA, 25 bp, Artificial
  Probe
ctcctggattggcagcccctgtaga

SEQ ID NO: 285870 - DNA, 25 bp, Artificial
  Probe
caagcggtggggcaggagctcctgg

SEQ ID NO: 285871 - DNA, 25 bp, Artificial
  Probe
tcctggattggcagcccctgtagaa

SEQ ID NO: 285872 - DNA, 25 bp, Artificial
  Probe
cggagcccatgcgccgacccggtcg

SEQ ID NO: 285873 - DNA, 25 bp, Artificial
  Probe
ggagctcctggattggcagcccctg

SEQ ID NO: 285874 - DNA, 25 bp, Artificial
  Probe
gattggcagcccctgtagaagcgat

SEQ ID NO: 285875 - DNA, 25 bp, Artificial
  Probe
atgcgccgacccggtcggcgcccgt

SEQ ID NO: 285876 - DNA, 25 bp, Artificial
  Probe
attggcagcccctgtagaagcgatg

SEQ ID NO: 285877 - DNA, 25 bp, Artificial
  Probe
ggggcagtcgcgccagcaagcggtg

SEQ ID NO: 285878 - DNA, 25 bp, Artificial
  Probe
agctcctggattggcagcccctgta

SEQ ID NO: 285879 - DNA, 25 bp, Artificial
  Probe
cggacggagcccatgcgccgacccg

SEQ ID NO: 285880 - DNA, 25 bp, Artificial
  Probe
cagcccctgtagaagcgatgacaga

SEQ ID NO: 285881 - DNA, 25 bp, Artificial
  Probe
gagctcctggattggcagcccctgt

SEQ ID NO: 285882 - DNA, 25 bp, Artificial
  Probe
cccatgcgccgacccggtcggcgcc

SEQ ID NO: 285883 - DNA, 25 bp, Artificial
  Probe
cgcagcccaggcggcgccggccgcg

SEQ ID NO: 285884 - DNA, 25 bp, Artificial
  Probe
gtggggcaggagctcctggattggc

SEQ ID NO: 285885 - DNA, 25 bp, Artificial
  Probe
cggccccgggggcagtcgcgccagc

SEQ ID NO: 285886 - DNA, 25 bp, Artificial
  Probe
agcccaggcggcgccggccgcggac

SEQ ID NO: 285887 - DNA, 25 bp, Artificial
  Probe
ggcaggagctcctggattggcagcc

SEQ ID NO: 285888 - DNA, 25 bp, Artificial
  Probe
ggcagcccctgtagaagcgatgaca

SEQ ID NO: 285889 - DNA, 25 bp, Artificial
  Probe
ttggcagcccctgtagaagcgatga

SEQ ID NO: 285890 - DNA, 25 bp, Artificial
  Probe
tggcagcccctgtagaagcgatgac

SEQ ID NO: 285891 - DNA, 25 bp, Artificial
  Probe
cccgcagcccaggcggcgccggccg

SEQ ID NO: 285892 - DNA, 25 bp, Artificial
  Probe
cagtcgcgccagcaagcggtggggc

SEQ ID NO: 285893 - DNA, 25 bp, Artificial
  Probe
gagcccatgcgccgacccggtcggc

SEQ ID NO: 285894 - DNA, 25 bp, Artificial
  Probe
cggtggggcaggagctcctggattg

SEQ ID NO: 285895 - DNA, 25 bp, Artificial
  Probe
cggccgcggacggagcccatgcgcc

SEQ ID NO: 285896 - DNA, 25 bp, Artificial
  Probe
gcagcccctgtagaagcgatgacag

SEQ ID NO: 285897 - DNA, 25 bp, Artificial
  Probe
ggattggcagcccctgtagaagcga

SEQ ID NO: 285898 - DNA, 25 bp, Artificial
  Probe
gcaggagctcctggattggcagccc

SEQ ID NO: 285899 - DNA, 25 bp, Artificial
  Probe
gcgccagcaagcggtggggcaggag

SEQ ID NO: 285900 - DNA, 25 bp, Artificial
  Probe
atcaagatacaggtgacctggttct

SEQ ID NO: 285901 - DNA, 25 bp, Artificial
  Probe
tcaatggcaaggagccgtcccgtgg

SEQ ID NO: 285902 - DNA, 25 bp, Artificial
  Probe
atcagcccaccgtaacaatcaaggt

SEQ ID NO: 285903 - DNA, 25 bp, Artificial
  Probe
tggcatcaacccagatgaggctgta

SEQ ID NO: 285904 - DNA, 25 bp, Artificial
  Probe
tcaacccagatgaggctgtagcata

SEQ ID NO: 285905 - DNA, 25 bp, Artificial
  Probe
actgattccgaggaacactgtggtg

SEQ ID NO: 285906 - DNA, 25 bp, Artificial
  Probe
atggtattcttcgagtgacagctga

SEQ ID NO: 285907 - DNA, 25 bp, Artificial
  Probe
gggtacatttgatctgactggaatc

SEQ ID NO: 285908 - DNA, 25 bp, Artificial
  Probe
catgacaaaactgattccgaggaac

SEQ ID NO: 285909 - DNA, 25 bp, Artificial
  Probe
tgtcatgacaaaactgattccgagg

SEQ ID NO: 285910 - DNA, 25 bp, Artificial
  Probe
ttcttcaatggcaaggagccgtccc

SEQ ID NO: 285911 - DNA, 25 bp, Artificial
  Probe
tcatgacaaaactgattccgaggaa

SEQ ID NO: 285912 - DNA, 25 bp, Artificial
  Probe
acatttgatctgactggaatccctc

SEQ ID NO: 285913 - DNA, 25 bp, Artificial
  Probe
gtcctcttacacttggtattgaaac

SEQ ID NO: 285914 - DNA, 25 bp, Artificial
  Probe
agtctcgaatgtaattggaatcttc

SEQ ID NO: 285915 - DNA, 25 bp, Artificial
  Probe
agatacaggtgacctggttctgctt

SEQ ID NO: 285916 - DNA, 25 bp, Artificial
  Probe
caggctggtgtcctctctggtgatc

SEQ ID NO: 285917 - DNA, 25 bp, Artificial
  Probe
tcctctctggtgatcaagatacagg

SEQ ID NO: 285918 - DNA, 25 bp, Artificial
  Probe
aagacaatcaccttctgggtacatt

SEQ ID NO: 285919 - DNA, 25 bp, Artificial
  Probe
tcaccttctgggtacatttgatctg

SEQ ID NO: 285920 - DNA, 25 bp, Artificial
  Probe
cgcctgacccctgaagaaattgaaa

SEQ ID NO: 285921 - DNA, 25 bp, Artificial
  Probe
ctgacccctgaagaaattgaaagga

SEQ ID NO: 285922 - DNA, 25 bp, Artificial
  Probe
gtaattggaatcttcacctcagagt

SEQ ID NO: 285923 - DNA, 25 bp, Artificial
  Probe
ggcatcaacccagatgaggctgtag

SEQ ID NO: 285924 - DNA, 25 bp, Artificial
  Probe
acccctgaagaaattgaaaggatgg

SEQ ID NO: 285925 - DNA, 25 bp, Artificial
  Probe
atatggtgccgctgtccaggctggt

SEQ ID NO: 285926 - DNA, 25 bp, Artificial
  Probe
tggtgtcctctctggtgatcaagat

SEQ ID NO: 285927 - DNA, 25 bp, Artificial
  Probe
agatgaggctgtagcatatggtgcc

SEQ ID NO: 285928 - DNA, 25 bp, Artificial
  Probe
gtgccgctgtccaggctggtgtcct

SEQ ID NO: 285929 - DNA, 25 bp, Artificial
  Probe
ggcaaggagccgtcccgtggcatca

SEQ ID NO: 285930 - DNA, 25 bp, Artificial
  Probe
ctctctggtgatcaagatacaggtg

SEQ ID NO: 285931 - DNA, 25 bp, Artificial
  Probe
ccaaagattcagcagttggtgaaag

SEQ ID NO: 285932 - DNA, 25 bp, Artificial
  Probe
cccgtggcatcaacccagatgaggc

SEQ ID NO: 285933 - DNA, 25 bp, Artificial
  Probe
acaatcaccttctgggtacatttga

SEQ ID NO: 285934 - DNA, 25 bp, Artificial
  Probe
tctgggtacatttgatctgactgga

SEQ ID NO: 285935 - DNA, 25 bp, Artificial
  Probe
aaactgattccgaggaacactgtgg

SEQ ID NO: 285936 - DNA, 25 bp, Artificial
  Probe
tgagttgtaggtgcactgatctgct

SEQ ID NO: 285937 - DNA, 25 bp, Artificial
  Probe
cgtcccgtggcatcaacccagatga

SEQ ID NO: 285938 - DNA, 25 bp, Artificial
  Probe
gacaaaactgattccgaggaacact

SEQ ID NO: 285939 - DNA, 25 bp, Artificial
  Probe
catcaacccagatgaggctgtagca

SEQ ID NO: 285940 - DNA, 25 bp, Artificial
  Probe
tgaatggtattcttcgagtgacagc

SEQ ID NO: 285941 - DNA, 25 bp, Artificial
  Probe
ttcgagtgacagctgaagacaaagg

SEQ ID NO: 285942 - DNA, 25 bp, Artificial
  Probe
ggaacactgtggtgcccaccaagaa

SEQ ID NO: 285943 - DNA, 25 bp, Artificial
  Probe
tgacagctgaagacaaagggacagg

SEQ ID NO: 285944 - DNA, 25 bp, Artificial
  Probe
cgctgtccaggctggtgtcctctct

SEQ ID NO: 285945 - DNA, 25 bp, Artificial
  Probe
atgagttgtaggtgcactgatctgc

SEQ ID NO: 285946 - DNA, 25 bp, Artificial
  Probe
ggtctgtagcctcaaaagtcagaga

SEQ ID NO: 285947 - DNA, 25 bp, Artificial
  Probe
ggagacgttgcagacacccgaaagg

SEQ ID NO: 285948 - DNA, 25 bp, Artificial
  Probe
gcctcaaaagtcagagactttttat

SEQ ID NO: 285949 - DNA, 25 bp, Artificial
  Probe
gtgttatcatgcacaggggacctgg

SEQ ID NO: 285950 - DNA, 25 bp, Artificial
  Probe
ccctccagttagaaaagactgcctg

SEQ ID NO: 285951 - DNA, 25 bp, Artificial
  Probe
gacagccccgggaaaactgaggtat

SEQ ID NO: 285952 - DNA, 25 bp, Artificial
  Probe
tcttactgctactcagaacttggtc

SEQ ID NO: 285953 - DNA, 25 bp, Artificial
  Probe
ctgctactcagaacttggtctgtag

SEQ ID NO: 285954 - DNA, 25 bp, Artificial
  Probe
gtctgtgtgttgtgttatcatgcac

SEQ ID NO: 285955 - DNA, 25 bp, Artificial
  Probe
tgcctggagacgttgcagacacccg

SEQ ID NO: 285956 - DNA, 25 bp, Artificial
  Probe
agaacttggtctgtagcctcaaaag

SEQ ID NO: 285957 - DNA, 25 bp, Artificial
  Probe
gttgtgttatcatgcacaggggacc

SEQ ID NO: 285958 - DNA, 25 bp, Artificial
  Probe
aagactgcctgagcagcccaaaaaa

SEQ ID NO: 285959 - DNA, 25 bp, Artificial
  Probe
cagaacgagccctccagttagaaaa

SEQ ID NO: 285960 - DNA, 25 bp, Artificial
  Probe
aaactgaggtatcttactgctactc

SEQ ID NO: 285961 - DNA, 25 bp, Artificial
  Probe
gatcccagaacgagccctccagtta

SEQ ID NO: 285962 - DNA, 25 bp, Artificial
  Probe
ctactcagaacttggtctgtagcct

SEQ ID NO: 285963 - DNA, 25 bp, Artificial
  Probe
aacttggtctgtagcctcaaaagtc

SEQ ID NO: 285964 - DNA, 25 bp, Artificial
  Probe
tggtctgtagcctcaaaagtcagag

SEQ ID NO: 285965 - DNA, 25 bp, Artificial
  Probe
gagtgcgcctcagacagccccggga

SEQ ID NO: 285966 - DNA, 25 bp, Artificial
  Probe
agactgcctgagcagcccaaaaaac

SEQ ID NO: 285967 - DNA, 25 bp, Artificial
  Probe
acgagccctccagttagaaaagact

SEQ ID NO: 285968 - DNA, 25 bp, Artificial
  Probe
tcccctcttctgtctgtgtgttgtg

SEQ ID NO: 285969 - DNA, 25 bp, Artificial
  Probe
gtagtgctgcaggacaggagcacat

SEQ ID NO: 285970 - DNA, 25 bp, Artificial
  Probe
tttgcagcagcaagaaggccggtgc

SEQ ID NO: 285971 - DNA, 25 bp, Artificial
  Probe
gaacgagccctccagttagaaaaga

SEQ ID NO: 285972 - DNA, 25 bp, Artificial
  Probe
ggactgcctggagacgttgcagaca

SEQ ID NO: 285973 - DNA, 25 bp, Artificial
  Probe
gagccctccagttagaaaagactgc

SEQ ID NO: 285974 - DNA, 25 bp, Artificial
  Probe
tactcagaacttggtctgtagcctc

SEQ ID NO: 285975 - DNA, 25 bp, Artificial
  Probe
gtgcgcctcagacagccccgggaaa

SEQ ID NO: 285976 - DNA, 25 bp, Artificial
  Probe
agaacgagccctccagttagaaaag

SEQ ID NO: 285977 - DNA, 25 bp, Artificial
  Probe
gccctccagttagaaaagactgcct

SEQ ID NO: 285978 - DNA, 25 bp, Artificial
  Probe
cagccccgggaaaactgaggtatct

SEQ ID NO: 285979 - DNA, 25 bp, Artificial
  Probe
tgcgcctcagacagccccgggaaaa

SEQ ID NO: 285980 - DNA, 25 bp, Artificial
  Probe
cctggagacgttgcagacacccgaa

SEQ ID NO: 285981 - DNA, 25 bp, Artificial
  Probe
gttatcatgcacaggggacctggag

SEQ ID NO: 285982 - DNA, 25 bp, Artificial
  Probe
ggtatcttactgctactcagaactt

SEQ ID NO: 285983 - DNA, 25 bp, Artificial
  Probe
ctgtgtgttgtgttatcatgcacag

SEQ ID NO: 285984 - DNA, 25 bp, Artificial
  Probe
tatcttactgctactcagaacttgg

SEQ ID NO: 285985 - DNA, 25 bp, Artificial
  Probe
cccctcttctgtctgtgtgttgtgt

SEQ ID NO: 285986 - DNA, 25 bp, Artificial
  Probe
tgttgtgttatcatgcacaggggac

SEQ ID NO: 285987 - DNA, 25 bp, Artificial
  Probe
tagtgctgcaggacaggagcacatg

SEQ ID NO: 285988 - DNA, 25 bp, Artificial
  Probe
ctgtctgtgtgttgtgttatcatgc

SEQ ID NO: 285989 - DNA, 25 bp, Artificial
  Probe
gcttcccatttgcagcagcaagaag

SEQ ID NO: 285990 - DNA, 25 bp, Artificial
  Probe
cctccagttagaaaagactgcctga

SEQ ID NO: 285991 - DNA, 25 bp, Artificial
  Probe
ttgtgttatcatgcacaggggacct

SEQ ID NO: 285992 - DNA, 25 bp, Artificial
  Probe
gagcaacctgcaaaacatcggaaca

SEQ ID NO: 285993 - DNA, 25 bp, Artificial
  Probe
ccatttcagagatgggcatttccct

SEQ ID NO: 285994 - DNA, 25 bp, Artificial
  Probe
cacgtcaccgcaagatcctttgctg

SEQ ID NO: 285995 - DNA, 25 bp, Artificial
  Probe
tgctgcttgagcaacctgcaaaaca

SEQ ID NO: 285996 - DNA, 25 bp, Artificial
  Probe
ccagagaccctttgcggggctgagc

SEQ ID NO: 285997 - DNA, 25 bp, Artificial
  Probe
aggagcctcccgaggaacagaaaat

SEQ ID NO: 285998 - DNA, 25 bp, Artificial
  Probe
gatcctttgctgcttgagcaacctg

SEQ ID NO: 285999 - DNA, 25 bp, Artificial
  Probe
ttcaacaagcccacaggctatggct

SEQ ID NO: 286000 - DNA, 25 bp, Artificial
  Probe
taccatttcagagatgggcatttcc

SEQ ID NO: 286001 - DNA, 25 bp, Artificial
  Probe
aagcccacaggctatggctccagca

SEQ ID NO: 286002 - DNA, 25 bp, Artificial
  Probe
gcccacaggctatggctccagcatt

SEQ ID NO: 286003 - DNA, 25 bp, Artificial
  Probe
tcaacaagcccacaggctatggctc

SEQ ID NO: 286004 - DNA, 25 bp, Artificial
  Probe
gtacacttgaagaacacaagtagag

SEQ ID NO: 286005 - DNA, 25 bp, Artificial
  Probe
gcaaaacatcggaacacctgccaaa

SEQ ID NO: 286006 - DNA, 25 bp, Artificial
  Probe
gagatgggcatttccctcaatgaaa

SEQ ID NO: 286007 - DNA, 25 bp, Artificial
  Probe
gcttgagcaacctgcaaaacatcgg

SEQ ID NO: 286008 - DNA, 25 bp, Artificial
  Probe
gcaacctgcaaaacatcggaacacc

SEQ ID NO: 286009 - DNA, 25 bp, Artificial
  Probe
cagaaaatgccacgtcaccgcaaga

SEQ ID NO: 286010 - DNA, 25 bp, Artificial
  Probe
aaatgccacgtcaccgcaagatcct

SEQ ID NO: 286011 - DNA, 25 bp, Artificial
  Probe
ttcaataccatttcagagatgggca

SEQ ID NO: 286012 - DNA, 25 bp, Artificial
  Probe
ttcgtgtgtggaccaaggggctttt

SEQ ID NO: 286013 - DNA, 25 bp, Artificial
  Probe
tcaccgcaagatcctttgctgcttg

SEQ ID NO: 286014 - DNA, 25 bp, Artificial
  Probe
acctgcaaaacatcggaacacctgc

SEQ ID NO: 286015 - DNA, 25 bp, Artificial
  Probe
tcgtgtgtggaccaaggggctttta

SEQ ID NO: 286016 - DNA, 25 bp, Artificial
  Probe
caccgcaagatcctttgctgcttga

SEQ ID NO: 286017 - DNA, 25 bp, Artificial
  Probe
aatgagttcaataccatttcagaga

SEQ ID NO: 286018 - DNA, 25 bp, Artificial
  Probe
agcctcccgaggaacagaaaatgcc

SEQ ID NO: 286019 - DNA, 25 bp, Artificial
  Probe
gcttttacttcaacaagcccacagg

SEQ ID NO: 286020 - DNA, 25 bp, Artificial
  Probe
cgtcaccgcaagatcctttgctgct

SEQ ID NO: 286021 - DNA, 25 bp, Artificial
  Probe
gaccagagaccctttgcggggctga

SEQ ID NO: 286022 - DNA, 25 bp, Artificial
  Probe
aagtacacttgaagaacacaagtag

SEQ ID NO: 286023 - DNA, 25 bp, Artificial
  Probe
agccggaccagagaccctttgcggg

SEQ ID NO: 286024 - DNA, 25 bp, Artificial
  Probe
tgggcatttccctcaatgaaataca

SEQ ID NO: 286025 - DNA, 25 bp, Artificial
  Probe
ttgctgcttgagcaacctgcaaaac

SEQ ID NO: 286026 - DNA, 25 bp, Artificial
  Probe
ccacagacgggcattgtggatgagt

SEQ ID NO: 286027 - DNA, 25 bp, Artificial
  Probe
tcagagatgggcatttccctcaatg

SEQ ID NO: 286028 - DNA, 25 bp, Artificial
  Probe
acagaaaatgccacgtcaccgcaag

SEQ ID NO: 286029 - DNA, 25 bp, Artificial
  Probe
tacacttgaagaacacaagtagagg

SEQ ID NO: 286030 - DNA, 25 bp, Artificial
  Probe
ggcttttacttcaacaagcccacag

SEQ ID NO: 286031 - DNA, 25 bp, Artificial
  Probe
ataccatttcagagatgggcatttc

SEQ ID NO: 286032 - DNA, 25 bp, Artificial
  Probe
cctttgctgcttgagcaacctgcaa

SEQ ID NO: 286033 - DNA, 25 bp, Artificial
  Probe
gtgtgtggaccaaggggcttttact

SEQ ID NO: 286034 - DNA, 25 bp, Artificial
  Probe
ctcccgaggaacagaaaatgccacg

SEQ ID NO: 286035 - DNA, 25 bp, Artificial
  Probe
cagagatgggcatttccctcaatga

SEQ ID NO: 286036 - DNA, 25 bp, Artificial
  Probe
ctgcttgagcaacctgcaaaacatc

SEQ ID NO: 286037 - DNA, 25 bp, Artificial
  Probe
aacctgcaaaacatcggaacacctg

SEQ ID NO: 286038 - DNA, 25 bp, Artificial
  Probe
ggcttcccagaggtctctttccagc

SEQ ID NO: 286039 - DNA, 25 bp, Artificial
  Probe
cctgcgtagcagacggtcaagcaga

SEQ ID NO: 286040 - DNA, 25 bp, Artificial
  Probe
catatttgctaatgacagggaatca

SEQ ID NO: 286041 - DNA, 25 bp, Artificial
  Probe
actggcttctgctgcaggtgtgtgt

SEQ ID NO: 286042 - DNA, 25 bp, Artificial
  Probe
cagaggtctctttccagcccactag

SEQ ID NO: 286043 - DNA, 25 bp, Artificial
  Probe
tgtatgcacgccatgtgcccgtgaa

SEQ ID NO: 286044 - DNA, 25 bp, Artificial
  Probe
ggcctggaggatgtggccacccaac

SEQ ID NO: 286045 - DNA, 25 bp, Artificial
  Probe
tgtggtggttgtcacttgggaatcc

SEQ ID NO: 286046 - DNA, 25 bp, Artificial
  Probe
caagggctcattttatgctttcttt

SEQ ID NO: 286047 - DNA, 25 bp, Artificial
  Probe
acatatttgctaatgacagggaatc

SEQ ID NO: 286048 - DNA, 25 bp, Artificial
  Probe
aaatctttccagctgccagtggaga

SEQ ID NO: 286049 - DNA, 25 bp, Artificial
  Probe
tcagcagagctctgactgtgtacct

SEQ ID NO: 286050 - DNA, 25 bp, Artificial
  Probe
tacaaacctctcatctcggcctgga

SEQ ID NO: 286051 - DNA, 25 bp, Artificial
  Probe
cagcagagtatgtccagagaggctt

SEQ ID NO: 286052 - DNA, 25 bp, Artificial
  Probe
tccagctgccagtggagagattccc

SEQ ID NO: 286053 - DNA, 25 bp, Artificial
  Probe
tttggccaagagcagcaacgctggg

SEQ ID NO: 286054 - DNA, 25 bp, Artificial
  Probe
cagatggcagcagagtatgtccaga

SEQ ID NO: 286055 - DNA, 25 bp, Artificial
  Probe
cagtggagagattcccccagaagca

SEQ ID NO: 286056 - DNA, 25 bp, Artificial
  Probe
ctcatctcggcctggaggatgtggc

SEQ ID NO: 286057 - DNA, 25 bp, Artificial
  Probe
cgtcccaagggctcattttatgctt

SEQ ID NO: 286058 - DNA, 25 bp, Artificial
  Probe
cagatgtgaacctggacgtggatga

SEQ ID NO: 286059 - DNA, 25 bp, Artificial
  Probe
acccccaggtcattgatgtggatga

SEQ ID NO: 286060 - DNA, 25 bp, Artificial
  Probe
aggctacagagagaccccatggaat

SEQ ID NO: 286061 - DNA, 25 bp, Artificial
  Probe
ccactagtgtggtggttgtcacttg

SEQ ID NO: 286062 - DNA, 25 bp, Artificial
  Probe
agagtgcagagactacgctactggc

SEQ ID NO: 286063 - DNA, 25 bp, Artificial
  Probe
tctcccttcattattcagatggcag

SEQ ID NO: 286064 - DNA, 25 bp, Artificial
  Probe
caacagatggcctggggaatgtgta

SEQ ID NO: 286065 - DNA, 25 bp, Artificial
  Probe
gtggttgtcacttgggaatccatgg

SEQ ID NO: 286066 - DNA, 25 bp, Artificial
  Probe
cgagcacatgtatgcacgccatgtg

SEQ ID NO: 286067 - DNA, 25 bp, Artificial
  Probe
cccaggtcattgatgtggatgaagt

SEQ ID NO: 286068 - DNA, 25 bp, Artificial
  Probe
cacaatgtacctaggaccctagtct

SEQ ID NO: 286069 - DNA, 25 bp, Artificial
  Probe
cctcccatagtccaagaaggggata

SEQ ID NO: 286070 - DNA, 25 bp, Artificial
  Probe
atgcacgccatgtgcccgtgaacct

SEQ ID NO: 286071 - DNA, 25 bp, Artificial
  Probe
ttggtgacgtgtgtattatgtcccc

SEQ ID NO: 286072 - DNA, 25 bp, Artificial
  Probe
cagctgcctgcgtagcagacggtca

SEQ ID NO: 286073 - DNA, 25 bp, Artificial
  Probe
caaacctctcatctcggcctggagg

SEQ ID NO: 286074 - DNA, 25 bp, Artificial
  Probe
agttgtattcagctacaacacaggt

SEQ ID NO: 286075 - DNA, 25 bp, Artificial
  Probe
tggtgcctgcagatgtgaacctgga

SEQ ID NO: 286076 - DNA, 25 bp, Artificial
  Probe
agagtgcgtgcgagcacatgtatgc

SEQ ID NO: 286077 - DNA, 25 bp, Artificial
  Probe
ccaagagcagcaacgctgggcacca

SEQ ID NO: 286078 - DNA, 25 bp, Artificial
  Probe
tttggtgacgtgtgtattatgtccc

SEQ ID NO: 286079 - DNA, 25 bp, Artificial
  Probe
agattggaagtcctgctactgccaa

SEQ ID NO: 286080 - DNA, 25 bp, Artificial
  Probe
tccaagaaggggataccctgatcca

SEQ ID NO: 286081 - DNA, 25 bp, Artificial
  Probe
gaagtcctgctactgccaagggggt

SEQ ID NO: 286082 - DNA, 25 bp, Artificial
  Probe
agctctgactgtgtacctgtccctc

SEQ ID NO: 286083 - DNA, 25 bp, Artificial
  Probe
ttaataaagccttggtgctcgggaa

SEQ ID NO: 286084 - DNA, 25 bp, Artificial
  Probe
atgagtggcagcagcgttcctctct

SEQ ID NO: 286085 - DNA, 25 bp, Artificial
  Probe
tcaaatgagtcacctgggttctctt

SEQ ID NO: 286086 - DNA, 25 bp, Artificial
  Probe
ctgagtcaattagtgctggatcata

SEQ ID NO: 286087 - DNA, 25 bp, Artificial
  Probe
tggatcatatggtcaaactgtcaag

SEQ ID NO: 286088 - DNA, 25 bp, Artificial
  Probe
caaatgagtggcagcagcgttcctc

SEQ ID NO: 286089 - DNA, 25 bp, Artificial
  Probe
tcattagtccccaaggagagcattc

SEQ ID NO: 286090 - DNA, 25 bp, Artificial
  Probe
tgggtccctgggagagataacaccc

SEQ ID NO: 286091 - DNA, 25 bp, Artificial
  Probe
acaggtgacacaagcaagcaccctc

SEQ ID NO: 286092 - DNA, 25 bp, Artificial
  Probe
gagacagattccagggcactgagtc

SEQ ID NO: 286093 - DNA, 25 bp, Artificial
  Probe
tccactaattgttgggagcacttct

SEQ ID NO: 286094 - DNA, 25 bp, Artificial
  Probe
ggtccctgggagagataacacccaa

SEQ ID NO: 286095 - DNA, 25 bp, Artificial
  Probe
ttccagactggcagtagcctggacc

SEQ ID NO: 286096 - DNA, 25 bp, Artificial
  Probe
caaggggccctggaagacatttttg

SEQ ID NO: 286097 - DNA, 25 bp, Artificial
  Probe
aagctccctggcaaactccctggga

SEQ ID NO: 286098 - DNA, 25 bp, Artificial
  Probe
caattagtgctggatcatatggtca

SEQ ID NO: 286099 - DNA, 25 bp, Artificial
  Probe
ctaattgttgggagcacttcttacg

SEQ ID NO: 286100 - DNA, 25 bp, Artificial
  Probe
gtgctggatcatatggtcaaactgt

SEQ ID NO: 286101 - DNA, 25 bp, Artificial
  Probe
tctatacaggcctcagtgacaggtg

SEQ ID NO: 286102 - DNA, 25 bp, Artificial
  Probe
tgacaggtgacacaagcaagcaccc

SEQ ID NO: 286103 - DNA, 25 bp, Artificial
  Probe
acatcaaatgagtggcagcagcgtt

SEQ ID NO: 286104 - DNA, 25 bp, Artificial
  Probe
taagctgagacagattccagggcac

SEQ ID NO: 286105 - DNA, 25 bp, Artificial
  Probe
gaaagactcttgactaggtgaggca

SEQ ID NO: 286106 - DNA, 25 bp, Artificial
  Probe
agttcaaatgagtcacctgggttct

SEQ ID NO: 286107 - DNA, 25 bp, Artificial
  Probe
tcagtgacaggtgacacaagcaagc

SEQ ID NO: 286108 - DNA, 25 bp, Artificial
  Probe
cagactggcagtagcctggaccaga

SEQ ID NO: 286109 - DNA, 25 bp, Artificial
  Probe
accttggtgatctatacaggcctca

SEQ ID NO: 286110 - DNA, 25 bp, Artificial
  Probe
agcattccagactggcagtagcctg

SEQ ID NO: 286111 - DNA, 25 bp, Artificial
  Probe
tcaattagtgctggatcatatggtc

SEQ ID NO: 286112 - DNA, 25 bp, Artificial
  Probe
ctggcagtagcctggaccagaaaga

SEQ ID NO: 286113 - DNA, 25 bp, Artificial
  Probe
tggtagggaccttggtgatctatac

SEQ ID NO: 286114 - DNA, 25 bp, Artificial
  Probe
gggcactgagtcaattagtgctgga

SEQ ID NO: 286115 - DNA, 25 bp, Artificial
  Probe
gttctgctctttccactaattgttg

SEQ ID NO: 286116 - DNA, 25 bp, Artificial
  Probe
ggagcacttcttacgtagccctccg

SEQ ID NO: 286117 - DNA, 25 bp, Artificial
  Probe
gagataacacccaaggggccctgga

SEQ ID NO: 286118 - DNA, 25 bp, Artificial
  Probe
tgttgggagcacttcttacgtagcc

SEQ ID NO: 286119 - DNA, 25 bp, Artificial
  Probe
acccccaggtcacacatcaaatgag

SEQ ID NO: 286120 - DNA, 25 bp, Artificial
  Probe
atgctaagctgagacagattccagg

SEQ ID NO: 286121 - DNA, 25 bp, Artificial
  Probe
cactgagtcaattagtgctggatca

SEQ ID NO: 286122 - DNA, 25 bp, Artificial
  Probe
atggtcaaactgtcaagagcccacc

SEQ ID NO: 286123 - DNA, 25 bp, Artificial
  Probe
agggaccttggtgatctatacaggc

SEQ ID NO: 286124 - DNA, 25 bp, Artificial
  Probe
gaaatcatgctaagctgagacagat

SEQ ID NO: 286125 - DNA, 25 bp, Artificial
  Probe
aaggagagcattccagactggcagt

SEQ ID NO: 286126 - DNA, 25 bp, Artificial
  Probe
gacacaagcaagcaccctcattagt

SEQ ID NO: 286127 - DNA, 25 bp, Artificial
  Probe
cctgtgggtccctgggagagataac

SEQ ID NO: 286128 - DNA, 25 bp, Artificial
  Probe
agattccagggcactgagtcaatta

SEQ ID NO: 286129 - DNA, 25 bp, Artificial
  Probe
ggtgatctatacaggcctcagtgac

SEQ ID NO: 286130 - DNA, 25 bp, Artificial
  Probe
agacattcggttgcactaaattcct

SEQ ID NO: 286131 - DNA, 25 bp, Artificial
  Probe
ctagtccctgcctcttaagagccga

SEQ ID NO: 286132 - DNA, 25 bp, Artificial
  Probe
ctgaattttggctgctgaagccgtt

SEQ ID NO: 286133 - DNA, 25 bp, Artificial
  Probe
ataatctcgtctaggccattagccc

SEQ ID NO: 286134 - DNA, 25 bp, Artificial
  Probe
tgaatttggcctcctcgaaagcaat

SEQ ID NO: 286135 - DNA, 25 bp, Artificial
  Probe
tcctcgaaagcaatagcaactgggt

SEQ ID NO: 286136 - DNA, 25 bp, Artificial
  Probe
tgttgtagacattcggttgcactaa

SEQ ID NO: 286137 - DNA, 25 bp, Artificial
  Probe
gacattcggttgcactaaattcctc

SEQ ID NO: 286138 - DNA, 25 bp, Artificial
  Probe
agccgttcatttagcaactgtttat

SEQ ID NO: 286139 - DNA, 25 bp, Artificial
  Probe
aaagcaatagcaactgggtggccca

SEQ ID NO: 286140 - DNA, 25 bp, Artificial
  Probe
cgttcatttagcaactgtttatagg

SEQ ID NO: 286141 - DNA, 25 bp, Artificial
  Probe
ttgatgaatggttccttatctccat

SEQ ID NO: 286142 - DNA, 25 bp, Artificial
  Probe
tccctgcctcttaagagccgaaaat

SEQ ID NO: 286143 - DNA, 25 bp, Artificial
  Probe
atttcttcctatgtagcttaagccg

SEQ ID NO: 286144 - DNA, 25 bp, Artificial
  Probe
ctgctgaagccgttcatttagcaac

SEQ ID NO: 286145 - DNA, 25 bp, Artificial
  Probe
tttggctgctgaagccgttcattta

SEQ ID NO: 286146 - DNA, 25 bp, Artificial
  Probe
cgaaagcaatagcaactgggtggcc

SEQ ID NO: 286147 - DNA, 25 bp, Artificial
  Probe
ggttgcactaaattcctctctgaat

SEQ ID NO: 286148 - DNA, 25 bp, Artificial
  Probe
tcctctctgaattttggctgctgaa

SEQ ID NO: 286149 - DNA, 25 bp, Artificial
  Probe
cttcctatgtagcttaagccgcttc

SEQ ID NO: 286150 - DNA, 25 bp, Artificial
  Probe
ctaataatctcgtctaggccattag

SEQ ID NO: 286151 - DNA, 25 bp, Artificial
  Probe
ctatgtagcttaagccgcttccttc

SEQ ID NO: 286152 - DNA, 25 bp, Artificial
  Probe
acagaatctaataatctcgtctagg

SEQ ID NO: 286153 - DNA, 25 bp, Artificial
  Probe
aaattcctctctgaattttggctgc

SEQ ID NO: 286154 - DNA, 25 bp, Artificial
  Probe
gtgttgtagacattcggttgcacta

SEQ ID NO: 286155 - DNA, 25 bp, Artificial
  Probe
agtccctgcctcttaagagccgaaa

SEQ ID NO: 286156 - DNA, 25 bp, Artificial
  Probe
ctgcctcttaagagccgaaaatgca

SEQ ID NO: 286157 - DNA, 25 bp, Artificial
  Probe
gtagacattcggttgcactaaattc

SEQ ID NO: 286158 - DNA, 25 bp, Artificial
  Probe
tctcctagtccctgcctcttaagag

SEQ ID NO: 286159 - DNA, 25 bp, Artificial
  Probe
tggcctcctcgaaagcaatagcaac

SEQ ID NO: 286160 - DNA, 25 bp, Artificial
  Probe
ctcgaaagcaatagcaactgggtgg

SEQ ID NO: 286161 - DNA, 25 bp, Artificial
  Probe
agcttaagccgcttccttcacagaa

SEQ ID NO: 286162 - DNA, 25 bp, Artificial
  Probe
ctctctgaattttggctgctgaagc

SEQ ID NO: 286163 - DNA, 25 bp, Artificial
  Probe
taaattcctctctgaattttggctg

SEQ ID NO: 286164 - DNA, 25 bp, Artificial
  Probe
ttgaatttggcctcctcgaaagcaa

SEQ ID NO: 286165 - DNA, 25 bp, Artificial
  Probe
taataatctcgtctaggccattagc

SEQ ID NO: 286166 - DNA, 25 bp, Artificial
  Probe
atttgttgaatttggcctcctcgaa

SEQ ID NO: 286167 - DNA, 25 bp, Artificial
  Probe
tgatgaatggttccttatctccatt

SEQ ID NO: 286168 - DNA, 25 bp, Artificial
  Probe
tatttgttgaatttggcctcctcga

SEQ ID NO: 286169 - DNA, 25 bp, Artificial
  Probe
aatttggcctcctcgaaagcaatag

SEQ ID NO: 286170 - DNA, 25 bp, Artificial
  Probe
cttgtatttgttgaatttggcctcc

SEQ ID NO: 286171 - DNA, 25 bp, Artificial
  Probe
gaatctaataatctcgtctaggcca

SEQ ID NO: 286172 - DNA, 25 bp, Artificial
  Probe
tcttaagagccgaaaatgcatgggt

SEQ ID NO: 286173 - DNA, 25 bp, Artificial
  Probe
gcttaagccgcttccttcacagaat

SEQ ID NO: 286174 - DNA, 25 bp, Artificial
  Probe
ttcttcctatgtagcttaagccgct

SEQ ID NO: 286175 - DNA, 25 bp, Artificial
  Probe
ttcggttgcactaaattcctctctg

SEQ ID NO: 286176 - DNA, 25 bp, Artificial
  Probe
tattcaattcactggccgtcgttta

SEQ ID NO: 286177 - DNA, 25 bp, Artificial
  Probe
cgccctatagtgagtcgtattcaat

SEQ ID NO: 286178 - DNA, 25 bp, Artificial
  Probe
tcactggccgtcgtttaaaacgtcg

SEQ ID NO: 286179 - DNA, 25 bp, Artificial
  Probe
aggaagcaaataacttcctgtggcc

SEQ ID NO: 286180 - DNA, 25 bp, Artificial
  Probe
ttaacggctggagaaatcccctttg

SEQ ID NO: 286181 - DNA, 25 bp, Artificial
  Probe
cacttaacggctggagaaatcccct

SEQ ID NO: 286182 - DNA, 25 bp, Artificial
  Probe
gcaaataacttcctgtggcccttca

SEQ ID NO: 286183 - DNA, 25 bp, Artificial
  Probe
atttcgcagagttgaaggtcaagcg

SEQ ID NO: 286184 - DNA, 25 bp, Artificial
  Probe
tcgccctatagtgagtcgtattcaa

SEQ ID NO: 286185 - DNA, 25 bp, Artificial
  Probe
atagtgagtcgtattcaattcactg

SEQ ID NO: 286186 - DNA, 25 bp, Artificial
  Probe
gtttgccctgaagacactgcgaaag

SEQ ID NO: 286187 - DNA, 25 bp, Artificial
  Probe
aagtttgccctgaagacactgcgaa

SEQ ID NO: 286188 - DNA, 25 bp, Artificial
  Probe
tcactttgtagaaggtggagacgct

SEQ ID NO: 286189 - DNA, 25 bp, Artificial
  Probe
cccaattcgccctatagtgagtcgt

SEQ ID NO: 286190 - DNA, 25 bp, Artificial
  Probe
gaactaaggtattgcccgtggtatt

SEQ ID NO: 286191 - DNA, 25 bp, Artificial
  Probe
tgagtcgtattcaattcactggccg

SEQ ID NO: 286192 - DNA, 25 bp, Artificial
  Probe
gaagtttgccctgaagacactgcga

SEQ ID NO: 286193 - DNA, 25 bp, Artificial
  Probe
caattcgccctatagtgagtcgtat

SEQ ID NO: 286194 - DNA, 25 bp, Artificial
  Probe
ttccccacgaggtggaatgaagaaa

SEQ ID NO: 286195 - DNA, 25 bp, Artificial
  Probe
aaagctggagctccaccgcggtggc

SEQ ID NO: 286196 - DNA, 25 bp, Artificial
  Probe
agtttgccctgaagacactgcgaaa

SEQ ID NO: 286197 - DNA, 25 bp, Artificial
  Probe
tccccacgaggtggaatgaagaaaa

SEQ ID NO: 286198 - DNA, 25 bp, Artificial
  Probe
ctcactttgtagaaggtggagacgc

SEQ ID NO: 286199 - DNA, 25 bp, Artificial
  Probe
gcggtacccaattcgccctatagtg

SEQ ID NO: 286200 - DNA, 25 bp, Artificial
  Probe
gaagcaaataacttcctgtggccct

SEQ ID NO: 286201 - DNA, 25 bp, Artificial
  Probe
tcgtattcaattcactggccgtcgt

SEQ ID NO: 286202 - DNA, 25 bp, Artificial
  Probe
gagtcgtattcaattcactggccgt

SEQ ID NO: 286203 - DNA, 25 bp, Artificial
  Probe
agaagtttgccctgaagacactgcg

SEQ ID NO: 286204 - DNA, 25 bp, Artificial
  Probe
tgaactaaggtattgcccgtggtat

SEQ ID NO: 286205 - DNA, 25 bp, Artificial
  Probe
cactttgtagaaggtggagacgctg

SEQ ID NO: 286206 - DNA, 25 bp, Artificial
  Probe
cgtattcaattcactggccgtcgtt

SEQ ID NO: 286207 - DNA, 25 bp, Artificial
  Probe
agcaaataacttcctgtggcccttc

SEQ ID NO: 286208 - DNA, 25 bp, Artificial
  Probe
ggagaaatcccctttgcagtgggta

SEQ ID NO: 286209 - DNA, 25 bp, Artificial
  Probe
ggcgcggtacccaattcgccctata

SEQ ID NO: 286210 - DNA, 25 bp, Artificial
  Probe
ggaagcaaataacttcctgtggccc

SEQ ID NO: 286211 - DNA, 25 bp, Artificial
  Probe
gcgcggtacccaattcgccctatag

SEQ ID NO: 286212 - DNA, 25 bp, Artificial
  Probe
aatttcgcagagttgaaggtcaagc

SEQ ID NO: 286213 - DNA, 25 bp, Artificial
  Probe
gccctatagtgagtcgtattcaatt

SEQ ID NO: 286214 - DNA, 25 bp, Artificial
  Probe
gtcgtattcaattcactggccgtcg

SEQ ID NO: 286215 - DNA, 25 bp, Artificial
  Probe
ctatagtgagtcgtattcaattcac

SEQ ID NO: 286216 - DNA, 25 bp, Artificial
  Probe
ccaattcgccctatagtgagtcgta

SEQ ID NO: 286217 - DNA, 25 bp, Artificial
  Probe
tttcgcagagttgaaggtcaagcgc

SEQ ID NO: 286218 - DNA, 25 bp, Artificial
  Probe
agtcgtattcaattcactggccgtc

SEQ ID NO: 286219 - DNA, 25 bp, Artificial
  Probe
cctatagtgagtcgtattcaattca

SEQ ID NO: 286220 - DNA, 25 bp, Artificial
  Probe
gtattcaattcactggccgtcgttt

SEQ ID NO: 286221 - DNA, 25 bp, Artificial
  Probe
attcgccctatagtgagtcgtattc

SEQ ID NO: 286222 - DNA, 25 bp, Artificial
  Probe
caaaagccacgcaaagccaagatga

SEQ ID NO: 286223 - DNA, 25 bp, Artificial
  Probe
agatgactttgctccgaagagagac

SEQ ID NO: 286224 - DNA, 25 bp, Artificial
  Probe
ccaagatgactttgctccgaagaga

SEQ ID NO: 286225 - DNA, 25 bp, Artificial
  Probe
gccaagatgactttgctccgaagag

SEQ ID NO: 286226 - DNA, 25 bp, Artificial
  Probe
gccacgcaaagccaagatgactttg

SEQ ID NO: 286227 - DNA, 25 bp, Artificial
  Probe
ttgctccgaagagagactcccttcc

SEQ ID NO: 286228 - DNA, 25 bp, Artificial
  Probe
gaagagagactcccttccccacatc

SEQ ID NO: 286229 - DNA, 25 bp, Artificial
  Probe
gatgactttgctccgaagagagact

SEQ ID NO: 286230 - DNA, 25 bp, Artificial
  Probe
caaagccaagatgactttgctccga

SEQ ID NO: 286231 - DNA, 25 bp, Artificial
  Probe
aaaacaaaagccacgcaaagccaag

SEQ ID NO: 286232 - DNA, 25 bp, Artificial
  Probe
tttgctccgaagagagactcccttc

SEQ ID NO: 286233 - DNA, 25 bp, Artificial
  Probe
aacaaaagccacgcaaagccaagat

SEQ ID NO: 286234 - DNA, 25 bp, Artificial
  Probe
aaacaaaagccacgcaaagccaaga

SEQ ID NO: 286235 - DNA, 25 bp, Artificial
  Probe
acgcaaagccaagatgactttgctc

SEQ ID NO: 286236 - DNA, 25 bp, Artificial
  Probe
agccaagatgactttgctccgaaga

SEQ ID NO: 286237 - DNA, 25 bp, Artificial
  Probe
caggtgaacaagccctgaaggacgg

SEQ ID NO: 286238 - DNA, 25 bp, Artificial
  Probe
tgctccgaagagagactcccttccc

SEQ ID NO: 286239 - DNA, 25 bp, Artificial
  Probe
ccacgcaaagccaagatgactttgc

SEQ ID NO: 286240 - DNA, 25 bp, Artificial
  Probe
gtgaacaagccctgaaggacggaca

SEQ ID NO: 286241 - DNA, 25 bp, Artificial
  Probe
caaaacaaaagccacgcaaagccaa

SEQ ID NO: 286242 - DNA, 25 bp, Artificial
  Probe
gctccgaagagagactcccttcccc

SEQ ID NO: 286243 - DNA, 25 bp, Artificial
  Probe
gcaaagccaagatgactttgctccg

SEQ ID NO: 286244 - DNA, 25 bp, Artificial
  Probe
gacaaaacaaaagccacgcaaagcc

SEQ ID NO: 286245 - DNA, 25 bp, Artificial
  Probe
aagccacgcaaagccaagatgactt

SEQ ID NO: 286246 - DNA, 25 bp, Artificial
  Probe
tgactttgctccgaagagagactcc

SEQ ID NO: 286247 - DNA, 25 bp, Artificial
  Probe
ggtgaacaagccctgaaggacggac

SEQ ID NO: 286248 - DNA, 25 bp, Artificial
  Probe
aggtgaacaagccctgaaggacgga

SEQ ID NO: 286249 - DNA, 25 bp, Artificial
  Probe
acaaaacaaaagccacgcaaagcca

SEQ ID NO: 286250 - DNA, 25 bp, Artificial
  Probe
cacgcaaagccaagatgactttgct

SEQ ID NO: 286251 - DNA, 25 bp, Artificial
  Probe
acaaaagccacgcaaagccaagatg

SEQ ID NO: 286252 - DNA, 25 bp, Artificial
  Probe
ctttgctccgaagagagactccctt

SEQ ID NO: 286253 - DNA, 25 bp, Artificial
  Probe
aaagccacgcaaagccaagatgact

SEQ ID NO: 286254 - DNA, 25 bp, Artificial
  Probe
atgactttgctccgaagagagactc

SEQ ID NO: 286255 - DNA, 25 bp, Artificial
  Probe
gactttgctccgaagagagactccc

SEQ ID NO: 286256 - DNA, 25 bp, Artificial
  Probe
agccacgcaaagccaagatgacttt

SEQ ID NO: 286257 - DNA, 25 bp, Artificial
  Probe
aagccaagatgactttgctccgaag

SEQ ID NO: 286258 - DNA, 25 bp, Artificial
  Probe
tccgaagagagactcccttccccac

SEQ ID NO: 286259 - DNA, 25 bp, Artificial
  Probe
cgcaaagccaagatgactttgctcc

SEQ ID NO: 286260 - DNA, 25 bp, Artificial
  Probe
ggacaaaacaaaagccacgcaaagc

SEQ ID NO: 286261 - DNA, 25 bp, Artificial
  Probe
ctccgaagagagactcccttcccca

SEQ ID NO: 286262 - DNA, 25 bp, Artificial
  Probe
caagccctgaaggacggacaaaaca

SEQ ID NO: 286263 - DNA, 25 bp, Artificial
  Probe
aaaagccacgcaaagccaagatgac

SEQ ID NO: 286264 - DNA, 25 bp, Artificial
  Probe
caagatgactttgctccgaagagag

SEQ ID NO: 286265 - DNA, 25 bp, Artificial
  Probe
actttgctccgaagagagactccct

SEQ ID NO: 286266 - DNA, 25 bp, Artificial
  Probe
aaagccaagatgactttgctccgaa

SEQ ID NO: 286267 - DNA, 25 bp, Artificial
  Probe
aagatgactttgctccgaagagaga

SEQ ID NO: 286268 - DNA, 25 bp, Artificial
  Probe
gagttacctgccagactgccatggg

SEQ ID NO: 286269 - DNA, 25 bp, Artificial
  Probe
ctagcactagaagcaagttggaaat

SEQ ID NO: 286270 - DNA, 25 bp, Artificial
  Probe
atgagcgcaccagcttcccttgcgt

SEQ ID NO: 286271 - DNA, 25 bp, Artificial
  Probe
tgctggcatccatgcaggtgagaac

SEQ ID NO: 286272 - DNA, 25 bp, Artificial
  Probe
aggtgtgttcagacaggactaagca

SEQ ID NO: 286273 - DNA, 25 bp, Artificial
  Probe
tattcttgagtgtcgctgctgtgtg

SEQ ID NO: 286274 - DNA, 25 bp, Artificial
  Probe
aaagttggaagctggccttaacaga

SEQ ID NO: 286275 - DNA, 25 bp, Artificial
  Probe
cagctttatcactgtgggagattgg

SEQ ID NO: 286276 - DNA, 25 bp, Artificial
  Probe
aacaggattggtgtcagctttatca

SEQ ID NO: 286277 - DNA, 25 bp, Artificial
  Probe
gtcgctgctgtgtgcctctgactgg

SEQ ID NO: 286278 - DNA, 25 bp, Artificial
  Probe
tgtgcctctgactgggtcagtgccc

SEQ ID NO: 286279 - DNA, 25 bp, Artificial
  Probe
cttctacttaaaaagatgttctggt

SEQ ID NO: 286280 - DNA, 25 bp, Artificial
  Probe
gaggatgagcgcaccagcttccctt

SEQ ID NO: 286281 - DNA, 25 bp, Artificial
  Probe
actgccatgggaacatattcttgag

SEQ ID NO: 286282 - DNA, 25 bp, Artificial
  Probe
ggtcagtgccctgctggcatccatg

SEQ ID NO: 286283 - DNA, 25 bp, Artificial
  Probe
catcacttataggaaacaggattgg

SEQ ID NO: 286284 - DNA, 25 bp, Artificial
  Probe
ccttctacttaaaaagatgttctgg

SEQ ID NO: 286285 - DNA, 25 bp, Artificial
  Probe
ttcagacaggactaagcagtcctgg

SEQ ID NO: 286286 - DNA, 25 bp, Artificial
  Probe
gccagactgccatgggaacatattc

SEQ ID NO: 286287 - DNA, 25 bp, Artificial
  Probe
acaggattggtgtcagctttatcac

SEQ ID NO: 286288 - DNA, 25 bp, Artificial
  Probe
tacttaaaaagatgttctggtcacg

SEQ ID NO: 286289 - DNA, 25 bp, Artificial
  Probe
agaagtttatctagcactagaagca

SEQ ID NO: 286290 - DNA, 25 bp, Artificial
  Probe
ctggccttaacagaagtttatctag

SEQ ID NO: 286291 - DNA, 25 bp, Artificial
  Probe
cttgagtgtcgctgctgtgtgcctc

SEQ ID NO: 286292 - DNA, 25 bp, Artificial
  Probe
tacctgccagactgccatgggaaca

SEQ ID NO: 286293 - DNA, 25 bp, Artificial
  Probe
aggtgagaaccaagctgtgaagcat

SEQ ID NO: 286294 - DNA, 25 bp, Artificial
  Probe
tgactgggtcagtgccctgctggca

SEQ ID NO: 286295 - DNA, 25 bp, Artificial
  Probe
tggaagctggccttaacagaagttt

SEQ ID NO: 286296 - DNA, 25 bp, Artificial
  Probe
ttctgagttacctgccagactgcca

SEQ ID NO: 286297 - DNA, 25 bp, Artificial
  Probe
taaagaattttggtacccagctctt

SEQ ID NO: 286298 - DNA, 25 bp, Artificial
  Probe
tgccagactgccatgggaacatatt

SEQ ID NO: 286299 - DNA, 25 bp, Artificial
  Probe
attttggtacccagctcttgttgtg

SEQ ID NO: 286300 - DNA, 25 bp, Artificial
  Probe
gggtcagtgccctgctggcatccat

SEQ ID NO: 286301 - DNA, 25 bp, Artificial
  Probe
ccatgcaggtgagaaccaagctgtg

SEQ ID NO: 286302 - DNA, 25 bp, Artificial
  Probe
catagcatgagttgactgaggacaa

SEQ ID NO: 286303 - DNA, 25 bp, Artificial
  Probe
gtcctggttctgagttacctgccag

SEQ ID NO: 286304 - DNA, 25 bp, Artificial
  Probe
ttgagtgtcgctgctgtgtgcctct

SEQ ID NO: 286305 - DNA, 25 bp, Artificial
  Probe
ctctgactgggtcagtgccctgctg

SEQ ID NO: 286306 - DNA, 25 bp, Artificial
  Probe
ttcatagcatgagttgactgaggac

SEQ ID NO: 286307 - DNA, 25 bp, Artificial
  Probe
ggaacatattcttgagtgtcgctgc

SEQ ID NO: 286308 - DNA, 25 bp, Artificial
  Probe
agacaggtgtgttcagacaggacta

SEQ ID NO: 286309 - DNA, 25 bp, Artificial
  Probe
ccagctcttgttgtgattgaggatg

SEQ ID NO: 286310 - DNA, 25 bp, Artificial
  Probe
acaggactaagcagtcctggttctg

SEQ ID NO: 286311 - DNA, 25 bp, Artificial
  Probe
ctgctgtgtgcctctgactgggtca

SEQ ID NO: 286312 - DNA, 25 bp, Artificial
  Probe
gactgccatgggaacatattcttga

SEQ ID NO: 286313 - DNA, 25 bp, Artificial
  Probe
gtttatctagcactagaagcaagtt

SEQ ID NO: 286314 - DNA, 25 bp, Artificial
  Probe
atctgatgttccacattcaggacaa

SEQ ID NO: 286315 - DNA, 25 bp, Artificial
  Probe
aactggaacctgctggagaagcgga

SEQ ID NO: 286316 - DNA, 25 bp, Artificial
  Probe
tttcaagactatcaactggaacctg

SEQ ID NO: 286317 - DNA, 25 bp, Artificial
  Probe
gcccctgagatcctgcagggcctga

SEQ ID NO: 286318 - DNA, 25 bp, Artificial
  Probe
tccttcagtgacaagaacctcatcg

SEQ ID NO: 286319 - DNA, 25 bp, Artificial
  Probe
cactgcccatgaagaagagtgggtg

SEQ ID NO: 286320 - DNA, 25 bp, Artificial
  Probe
atatatttggggagaaccgggccag

SEQ ID NO: 286321 - DNA, 25 bp, Artificial
  Probe
gagaaaccccaactttccttcagtg

SEQ ID NO: 286322 - DNA, 25 bp, Artificial
  Probe
ccagagttcctgaatgagaaacccc

SEQ ID NO: 286323 - DNA, 25 bp, Artificial
  Probe
atgatgaggacgagctctttgagtc

SEQ ID NO: 286324 - DNA, 25 bp, Artificial
  Probe
cctgtgtgtcattacttgaatgtag

SEQ ID NO: 286325 - DNA, 25 bp, Artificial
  Probe
tgatcgacgatgacgtggagtgcac

SEQ ID NO: 286326 - DNA, 25 bp, Artificial
  Probe
gccatcggagggaaactgtaaatcc

SEQ ID NO: 286327 - DNA, 25 bp, Artificial
  Probe
ttctttgtgatggagttcctcaatg

SEQ ID NO: 286328 - DNA, 25 bp, Artificial
  Probe
tcattttccgtggactggtggtctt

SEQ ID NO: 286329 - DNA, 25 bp, Artificial
  Probe
ctggatcaccaaggagtccaaggac

SEQ ID NO: 286330 - DNA, 25 bp, Artificial
  Probe
agctgagatcatctgcggactgcag

SEQ ID NO: 286331 - DNA, 25 bp, Artificial
  Probe
gactggtgattcctgctgctgcccc

SEQ ID NO: 286332 - DNA, 25 bp, Artificial
  Probe
tcagactacagcaactttgacccag

SEQ ID NO: 286333 - DNA, 25 bp, Artificial
  Probe
cctcggagagtctggctcctgttgg

SEQ ID NO: 286334 - DNA, 25 bp, Artificial
  Probe
tcttcgagagggaccctgccaagag

SEQ ID NO: 286335 - DNA, 25 bp, Artificial
  Probe
ctggcgctcgcctgggagaatccct

SEQ ID NO: 286336 - DNA, 25 bp, Artificial
  Probe
gcagtttctacatggcaaaggcatc

SEQ ID NO: 286337 - DNA, 25 bp, Artificial
  Probe
ggaaactgtaaatcctgtgtgtcat

SEQ ID NO: 286338 - DNA, 25 bp, Artificial
  Probe
acaggaaacatcaggcttcacccct

SEQ ID NO: 286339 - DNA, 25 bp, Artificial
  Probe
gggtcctcctctatgagatgctcat

SEQ ID NO: 286340 - DNA, 25 bp, Artificial
  Probe
ctcatctgtaccttccagaccaagg

SEQ ID NO: 286341 - DNA, 25 bp, Artificial
  Probe
taacaggaaacatcaggcttcaccc

SEQ ID NO: 286342 - DNA, 25 bp, Artificial
  Probe
ccgggctacgttttatgcagctgag

SEQ ID NO: 286343 - DNA, 25 bp, Artificial
  Probe
gtcctcctctatgagatgctcattg

SEQ ID NO: 286344 - DNA, 25 bp, Artificial
  Probe
ctcttcctcggagagtctggctcct

SEQ ID NO: 286345 - DNA, 25 bp, Artificial
  Probe
tctgtgaactgtttgtgaatttgcc

SEQ ID NO: 286346 - DNA, 25 bp, Artificial
  Probe
tctggctcctgttggctgggctcac

SEQ ID NO: 286347 - DNA, 25 bp, Artificial
  Probe
agtaggcccatctgccctggtttgc

SEQ ID NO: 286348 - DNA, 25 bp, Artificial
  Probe
aagagagcacaagctacctgaacca

SEQ ID NO: 286349 - DNA, 25 bp, Artificial
  Probe
cctcttctttgtgatggagttcctc

SEQ ID NO: 286350 - DNA, 25 bp, Artificial
  Probe
ggcttctcctttgtgaaccccaaat

SEQ ID NO: 286351 - DNA, 25 bp, Artificial
  Probe
tgtgaatttgccttccttttgccat

SEQ ID NO: 286352 - DNA, 25 bp, Artificial
  Probe
ggagccgccctttaagcccaaagtg

SEQ ID NO: 286353 - DNA, 25 bp, Artificial
  Probe
tatttggggagaaccgggccagcac

SEQ ID NO: 286354 - DNA, 25 bp, Artificial
  Probe
agtccatccgggtggacacaccaca

SEQ ID NO: 286355 - DNA, 25 bp, Artificial
  Probe
tgggtgactggtgattcctgctgct

SEQ ID NO: 286356 - DNA, 25 bp, Artificial
  Probe
tgcccatgaagaagagtgggtgact

SEQ ID NO: 286357 - DNA, 25 bp, Artificial
  Probe
taatgccccggcagagtaggcccat

SEQ ID NO: 286358 - DNA, 25 bp, Artificial
  Probe
caatgtaatgctggacaaggatggc

SEQ ID NO: 286359 - DNA, 25 bp, Artificial
  Probe
actacccgcgctggatcaccaagga

SEQ ID NO: 286360 - DNA, 25 bp, Artificial
  Probe
taggtctggagtagccgtccaccca

SEQ ID NO: 286361 - DNA, 25 bp, Artificial
  Probe
gtccagactcaccaagatcacagat

SEQ ID NO: 286362 - DNA, 25 bp, Artificial
  Probe
gtttgctctggaattgcacattcct

SEQ ID NO: 286363 - DNA, 25 bp, Artificial
  Probe
gaccagagtttcttccacaagggct

SEQ ID NO: 286364 - DNA, 25 bp, Artificial
  Probe
gtgctaggtctggagtagccgtcca

SEQ ID NO: 286365 - DNA, 25 bp, Artificial
  Probe
aaggccctctttggtccagactcac

SEQ ID NO: 286366 - DNA, 25 bp, Artificial
  Probe
ctgcccggctacctaagagaagaga

SEQ ID NO: 286367 - DNA, 25 bp, Artificial
  Probe
cggctacctaagagaagagaccaga

SEQ ID NO: 286368 - DNA, 25 bp, Artificial
  Probe
cacaagggctggtgccccgaggcac

SEQ ID NO: 286369 - DNA, 25 bp, Artificial
  Probe
cggtttgctctggaattgcacattc

SEQ ID NO: 286370 - DNA, 25 bp, Artificial
  Probe
gctgtccaactgtggcggtttgctc

SEQ ID NO: 286371 - DNA, 25 bp, Artificial
  Probe
gagtttcttccacaagggctggtgc

SEQ ID NO: 286372 - DNA, 25 bp, Artificial
  Probe
aaactctggctgtgcccactggaca

SEQ ID NO: 286373 - DNA, 25 bp, Artificial
  Probe
tcctgcccggctacctaagagaaga

SEQ ID NO: 286374 - DNA, 25 bp, Artificial
  Probe
agagaccagagtttcttccacaagg

SEQ ID NO: 286375 - DNA, 25 bp, Artificial
  Probe
tcccagtgaccagaaggccctcttt

SEQ ID NO: 286376 - DNA, 25 bp, Artificial
  Probe
gcccggctacctaagagaagagacc

SEQ ID NO: 286377 - DNA, 25 bp, Artificial
  Probe
gtggcggtttgctctggaattgcac

SEQ ID NO: 286378 - DNA, 25 bp, Artificial
  Probe
ctgcgtctgctctgtgtgcagtgct

SEQ ID NO: 286379 - DNA, 25 bp, Artificial
  Probe
tgctctgtgtgcagtgctaggtctg

SEQ ID NO: 286380 - DNA, 25 bp, Artificial
  Probe
accagaaggccctctttggtccaga

SEQ ID NO: 286381 - DNA, 25 bp, Artificial
  Probe
cagagtttcttccacaagggctggt

SEQ ID NO: 286382 - DNA, 25 bp, Artificial
  Probe
gaactgcgtctgctctgtgtgcagt

SEQ ID NO: 286383 - DNA, 25 bp, Artificial
  Probe
cgtctgctctgtgtgcagtgctagg

SEQ ID NO: 286384 - DNA, 25 bp, Artificial
  Probe
gctaggtctggagtagccgtccacc

SEQ ID NO: 286385 - DNA, 25 bp, Artificial
  Probe
ctttggtccagactcaccaagatca

SEQ ID NO: 286386 - DNA, 25 bp, Artificial
  Probe
ccagaaggccctctttggtccagac

SEQ ID NO: 286387 - DNA, 25 bp, Artificial
  Probe
aaacccacgaaaactctggctgtgc

SEQ ID NO: 286388 - DNA, 25 bp, Artificial
  Probe
aagagaccagagtttcttccacaag

SEQ ID NO: 286389 - DNA, 25 bp, Artificial
  Probe
ctgctctgtgtgcagtgctaggtct

SEQ ID NO: 286390 - DNA, 25 bp, Artificial
  Probe
ttcctgcccggctacctaagagaag

SEQ ID NO: 286391 - DNA, 25 bp, Artificial
  Probe
aacccacgaaaactctggctgtgcc

SEQ ID NO: 286392 - DNA, 25 bp, Artificial
  Probe
aactgcgtctgctctgtgtgcagtg

SEQ ID NO: 286393 - DNA, 25 bp, Artificial
  Probe
ctgtggcggtttgctctggaattgc

SEQ ID NO: 286394 - DNA, 25 bp, Artificial
  Probe
ttggtccagactcaccaagatcaca

SEQ ID NO: 286395 - DNA, 25 bp, Artificial
  Probe
gcgtctgctctgtgtgcagtgctag

SEQ ID NO: 286396 - DNA, 25 bp, Artificial
  Probe
gtttcttccacaagggctggtgccc

SEQ ID NO: 286397 - DNA, 25 bp, Artificial
  Probe
cagaaggccctctttggtccagact

SEQ ID NO: 286398 - DNA, 25 bp, Artificial
  Probe
ggcggtttgctctggaattgcacat

SEQ ID NO: 286399 - DNA, 25 bp, Artificial
  Probe
ccagtgaccagaaggccctctttgg

SEQ ID NO: 286400 - DNA, 25 bp, Artificial
  Probe
cagtgctaggtctggagtagccgtc

SEQ ID NO: 286401 - DNA, 25 bp, Artificial
  Probe
ttccacaagggctggtgccccgagg

SEQ ID NO: 286402 - DNA, 25 bp, Artificial
  Probe
gagaccagagtttcttccacaaggg

SEQ ID NO: 286403 - DNA, 25 bp, Artificial
  Probe
ctctgtgtgcagtgctaggtctgga

SEQ ID NO: 286404 - DNA, 25 bp, Artificial
  Probe
caactgtggcggtttgctctggaat

SEQ ID NO: 286405 - DNA, 25 bp, Artificial
  Probe
ccacaagggctggtgccccgaggca

SEQ ID NO: 286406 - DNA, 25 bp, Artificial
  Probe
aactgtgggacatcattcaggaaat

SEQ ID NO: 286407 - DNA, 25 bp, Artificial
  Probe
ctttgacagcgcttgcacgatgggt

SEQ ID NO: 286408 - DNA, 25 bp, Artificial
  Probe
ggaaagccaccctttctggcttccg

SEQ ID NO: 286409 - DNA, 25 bp, Artificial
  Probe
ctgtgtgaccaggtagatatttacg

SEQ ID NO: 286410 - DNA, 25 bp, Artificial
  Probe
tcaagccccagatgccatgggaact

SEQ ID NO: 286411 - DNA, 25 bp, Artificial
  Probe
agcatctcaatgagggaacagatga

SEQ ID NO: 286412 - DNA, 25 bp, Artificial
  Probe
ttgcacgatgggtgcctacgacccg

SEQ ID NO: 286413 - DNA, 25 bp, Artificial
  Probe
tctggcttccggaacattcgttgtt

SEQ ID NO: 286414 - DNA, 25 bp, Artificial
  Probe
ccatccaagcgcaagacggacgtgt

SEQ ID NO: 286415 - DNA, 25 bp, Artificial
  Probe
tttgggaaagccaccctttctggct

SEQ ID NO: 286416 - DNA, 25 bp, Artificial
  Probe
tggcaagagttctggggcctccagc

SEQ ID NO: 286417 - DNA, 25 bp, Artificial
  Probe
tgcgctctagggaattttgttggca

SEQ ID NO: 286418 - DNA, 25 bp, Artificial
  Probe
cctggttaccgctgcttgaaggagt

SEQ ID NO: 286419 - DNA, 25 bp, Artificial
  Probe
gagtacctagccaggcacccttatc

SEQ ID NO: 286420 - DNA, 25 bp, Artificial
  Probe
cagcctgcttcctgcgctctaggga

SEQ ID NO: 286421 - DNA, 25 bp, Artificial
  Probe
aagttctttgacagcgcttgcacga

SEQ ID NO: 286422 - DNA, 25 bp, Artificial
  Probe
ccatgggaactgtgggacatcattc

SEQ ID NO: 286423 - DNA, 25 bp, Artificial
  Probe
agatgccatgggaactgtgggacat

SEQ ID NO: 286424 - DNA, 25 bp, Artificial
  Probe
atcatcatgatgacgctgtgtgacc

SEQ ID NO: 286425 - DNA, 25 bp, Artificial
  Probe
ccgctgcttgaaggagtgtttttat

SEQ ID NO: 286426 - DNA, 25 bp, Artificial
  Probe
tggtgaagcatctcaatgagggaac

SEQ ID NO: 286427 - DNA, 25 bp, Artificial
  Probe
accgaggatgggagtccagattctt

SEQ ID NO: 286428 - DNA, 25 bp, Artificial
  Probe
tcattttatggctactctcctggtt

SEQ ID NO: 286429 - DNA, 25 bp, Artificial
  Probe
tgtgggacatcattcaggaaatctc

SEQ ID NO: 286430 - DNA, 25 bp, Artificial
  Probe
ttttgttggcaagagttctggggcc

SEQ ID NO: 286431 - DNA, 25 bp, Artificial
  Probe
agcgcaagacggacgtgtgctatta

SEQ ID NO: 286432 - DNA, 25 bp, Artificial
  Probe
gccccagatgccatgggaactgtgg

SEQ ID NO: 286433 - DNA, 25 bp, Artificial
  Probe
cctccggcatgctgggtatcatcat

SEQ ID NO: 286434 - DNA, 25 bp, Artificial
  Probe
ccatcctccggcatgctgggtatca

SEQ ID NO: 286435 - DNA, 25 bp, Artificial
  Probe
actctcctggttaccgctgcttgaa

SEQ ID NO: 286436 - DNA, 25 bp, Artificial
  Probe
tttacgagttcctcccatccaagcg

SEQ ID NO: 286437 - DNA, 25 bp, Artificial
  Probe
tccaagcgcaagacggacgtgtgct

SEQ ID NO: 286438 - DNA, 25 bp, Artificial
  Probe
gcgcttgcacgatgggtgcctacga

SEQ ID NO: 286439 - DNA, 25 bp, Artificial
  Probe
tcatgatgacgctgtgtgaccaggt

SEQ ID NO: 286440 - DNA, 25 bp, Artificial
  Probe
cctcttcgagaagaatatggtgaag

SEQ ID NO: 286441 - DNA, 25 bp, Artificial
  Probe
ggacatcattcaggaaatctctgca

SEQ ID NO: 286442 - DNA, 25 bp, Artificial
  Probe
cgctctagggaattttgttggcaag

SEQ ID NO: 286443 - DNA, 25 bp, Artificial
  Probe
gaaagccaccctttctggcttccgg

SEQ ID NO: 286444 - DNA, 25 bp, Artificial
  Probe
gcagatctgattcagccaaatcccc

SEQ ID NO: 286445 - DNA, 25 bp, Artificial
  Probe
tgcttcctgcgctctagggaatttt

SEQ ID NO: 286446 - DNA, 25 bp, Artificial
  Probe
ccctttctggcttccggaacattcg

SEQ ID NO: 286447 - DNA, 25 bp, Artificial
  Probe
ccgctcctcttcgagaagaatatgg

SEQ ID NO: 286448 - DNA, 25 bp, Artificial
  Probe
gtgtgctattatcaccaaaagttct

SEQ ID NO: 286449 - DNA, 25 bp, Artificial
  Probe
acggacgtgtgctattatcaccaaa

SEQ ID NO: 286450 - DNA, 25 bp, Artificial
  Probe
tatcaccaaaagttctttgacagcg

SEQ ID NO: 286451 - DNA, 25 bp, Artificial
  Probe
gatgggagtccagattcttgccaca

SEQ ID NO: 286452 - DNA, 25 bp, Artificial
  Probe
cacttctcagctgtaaagctagtgg

SEQ ID NO: 286453 - DNA, 25 bp, Artificial
  Probe
tccaggaccacttctcagctgtaaa

SEQ ID NO: 286454 - DNA, 25 bp, Artificial
  Probe
atagctgtcggcagaacccgagtgt

SEQ ID NO: 286455 - DNA, 25 bp, Artificial
  Probe
gatgctggccacagtccaggaccac

SEQ ID NO: 286456 - DNA, 25 bp, Artificial
  Probe
agcgctactgctcctggattacccg

SEQ ID NO: 286457 - DNA, 25 bp, Artificial
  Probe
aggtgtaccacgagcctcacattgc

SEQ ID NO: 286458 - DNA, 25 bp, Artificial
  Probe
gacatggccatggatagctgtcggc

SEQ ID NO: 286459 - DNA, 25 bp, Artificial
  Probe
ttctcagctgtaaagctagtggggc

SEQ ID NO: 286460 - DNA, 25 bp, Artificial
  Probe
ggccatggatagctgtcggcagaac

SEQ ID NO: 286461 - DNA, 25 bp, Artificial
  Probe
cgccggacaggatctctcttttcct

SEQ ID NO: 286462 - DNA, 25 bp, Artificial
  Probe
acccgccggacaggatctctctttt

SEQ ID NO: 286463 - DNA, 25 bp, Artificial
  Probe
tacctcggttcctgcagcgctactg

SEQ ID NO: 286464 - DNA, 25 bp, Artificial
  Probe
tcttttccttcacaacaacgaggtg

SEQ ID NO: 286465 - DNA, 25 bp, Artificial
  Probe
caacgaggtgtaccacgagcctcac

SEQ ID NO: 286466 - DNA, 25 bp, Artificial
  Probe
agcctcacattgcagatgctggcca

SEQ ID NO: 286467 - DNA, 25 bp, Artificial
  Probe
cagatgctggccacagtccaggacc

SEQ ID NO: 286468 - DNA, 25 bp, Artificial
  Probe
cacaacaacgaggtgtaccacgagc

SEQ ID NO: 286469 - DNA, 25 bp, Artificial
  Probe
gtaccacgagcctcacattgcagat

SEQ ID NO: 286470 - DNA, 25 bp, Artificial
  Probe
tactgctcctggattacccgccgga

SEQ ID NO: 286471 - DNA, 25 bp, Artificial
  Probe
gcctcacattgcagatgctggccac

SEQ ID NO: 286472 - DNA, 25 bp, Artificial
  Probe
cagctgtaaagctagtggggccaga

SEQ ID NO: 286473 - DNA, 25 bp, Artificial
  Probe
cattgcagatgctggccacagtcca

SEQ ID NO: 286474 - DNA, 25 bp, Artificial
  Probe
tcctgcagcgctactgctcctggat

SEQ ID NO: 286475 - DNA, 25 bp, Artificial
  Probe
catggccatggatagctgtcggcag

SEQ ID NO: 286476 - DNA, 25 bp, Artificial
  Probe
ccaggaccacttctcagctgtaaag

SEQ ID NO: 286477 - DNA, 25 bp, Artificial
  Probe
caacaacgaggtgtaccacgagcct

SEQ ID NO: 286478 - DNA, 25 bp, Artificial
  Probe
agtccaggaccacttctcagctgta

SEQ ID NO: 286479 - DNA, 25 bp, Artificial
  Probe
agggacatggccatggatagctgtc

SEQ ID NO: 286480 - DNA, 25 bp, Artificial
  Probe
cgaggtgtaccacgagcctcacatt

SEQ ID NO: 286481 - DNA, 25 bp, Artificial
  Probe
ttccttcacaacaacgaggtgtacc

SEQ ID NO: 286482 - DNA, 25 bp, Artificial
  Probe
tgctcctggattacccgccggacag

SEQ ID NO: 286483 - DNA, 25 bp, Artificial
  Probe
tctcagctgtaaagctagtggggcc

SEQ ID NO: 286484 - DNA, 25 bp, Artificial
  Probe
cgagcctcacattgcagatgctggc

SEQ ID NO: 286485 - DNA, 25 bp, Artificial
  Probe
attacccgccggacaggatctctct

SEQ ID NO: 286486 - DNA, 25 bp, Artificial
  Probe
gcagcgctactgctcctggattacc

SEQ ID NO: 286487 - DNA, 25 bp, Artificial
  Probe
ggacaggatctctcttttccttcac

SEQ ID NO: 286488 - DNA, 25 bp, Artificial
  Probe
cttttccttcacaacaacgaggtgt

SEQ ID NO: 286489 - DNA, 25 bp, Artificial
  Probe
acagtccaggaccacttctcagctg

SEQ ID NO: 286490 - DNA, 25 bp, Artificial
  Probe
acatggccatggatagctgtcggca

SEQ ID NO: 286491 - DNA, 25 bp, Artificial
  Probe
tgctggccacagtccaggaccactt

SEQ ID NO: 286492 - DNA, 25 bp, Artificial
  Probe
ctcacattgcagatgctggccacag

SEQ ID NO: 286493 - DNA, 25 bp, Artificial
  Probe
acattgcagatgctggccacagtcc

SEQ ID NO: 286494 - DNA, 25 bp, Artificial
  Probe
ttcctgcagcgctactgctcctgga

SEQ ID NO: 286495 - DNA, 25 bp, Artificial
  Probe
acaacgaggtgtaccacgagcctca

SEQ ID NO: 286496 - DNA, 25 bp, Artificial
  Probe
catggatagctgtcggcagaacccg

SEQ ID NO: 286497 - DNA, 25 bp, Artificial
  Probe
ccggacaggatctctcttttccttc

SEQ ID NO: 286498 - DNA, 25 bp, Artificial
  Probe
aaacctcagatgcatgatcctctgt

SEQ ID NO: 286499 - DNA, 25 bp, Artificial
  Probe
cagcaggacagagcactagtagtac

SEQ ID NO: 286500 - DNA, 25 bp, Artificial
  Probe
tcaagattcctcagcaggacagagc

SEQ ID NO: 286501 - DNA, 25 bp, Artificial
  Probe
aagacacatgcgtggacaagtccct

SEQ ID NO: 286502 - DNA, 25 bp, Artificial
  Probe
aagacacacagaaggctctccatat

SEQ ID NO: 286503 - DNA, 25 bp, Artificial
  Probe
gttgtctctgattaccatgctgtgg

SEQ ID NO: 286504 - DNA, 25 bp, Artificial
  Probe
cagagcactagtagtacaagctggt

SEQ ID NO: 286505 - DNA, 25 bp, Artificial
  Probe
cacatgcgtggacaagtccctttgt

SEQ ID NO: 286506 - DNA, 25 bp, Artificial
  Probe
acaagctggtctttcaatgccagaa

SEQ ID NO: 286507 - DNA, 25 bp, Artificial
  Probe
ctgatcagaatttttctccaaggtt

SEQ ID NO: 286508 - DNA, 25 bp, Artificial
  Probe
gtaggtatctgtccacacactatta

SEQ ID NO: 286509 - DNA, 25 bp, Artificial
  Probe
acaagtccctttgtgggccaaggct

SEQ ID NO: 286510 - DNA, 25 bp, Artificial
  Probe
tggacaagtccctttgtgggccaag

SEQ ID NO: 286511 - DNA, 25 bp, Artificial
  Probe
atgatcctctgtccaagcgtctgtg

SEQ ID NO: 286512 - DNA, 25 bp, Artificial
  Probe
aaactggttcacaaaagttgtctct

SEQ ID NO: 286513 - DNA, 25 bp, Artificial
  Probe
tagaaaagggtctcccaatagccca

SEQ ID NO: 286514 - DNA, 25 bp, Artificial
  Probe
ctagtagtacaagctggtctttcaa

SEQ ID NO: 286515 - DNA, 25 bp, Artificial
  Probe
ccgtcaagattcctcagcaggacag

SEQ ID NO: 286516 - DNA, 25 bp, Artificial
  Probe
ggttcacaaaagttgtctctgatta

SEQ ID NO: 286517 - DNA, 25 bp, Artificial
  Probe
agtttaaaagacacacagaaggctc

SEQ ID NO: 286518 - DNA, 25 bp, Artificial
  Probe
ctgcccataagtttggtgcagctaa

SEQ ID NO: 286519 - DNA, 25 bp, Artificial
  Probe
tggtaggtatctgtccacacactat

SEQ ID NO: 286520 - DNA, 25 bp, Artificial
  Probe
cataagtttggtgcagctaaaccaa

SEQ ID NO: 286521 - DNA, 25 bp, Artificial
  Probe
ggcccgtcaagattcctcagcagga

SEQ ID NO: 286522 - DNA, 25 bp, Artificial
  Probe
gagtcactctgatcagaatttttct

SEQ ID NO: 286523 - DNA, 25 bp, Artificial
  Probe
tgatcagaatttttctccaaggttg

SEQ ID NO: 286524 - DNA, 25 bp, Artificial
  Probe
ctggtctttcaatgccagaacccac

SEQ ID NO: 286525 - DNA, 25 bp, Artificial
  Probe
aaagttgtctctgattaccatgctg

SEQ ID NO: 286526 - DNA, 25 bp, Artificial
  Probe
cactagtagtacaagctggtctttc

SEQ ID NO: 286527 - DNA, 25 bp, Artificial
  Probe
agcactagtagtacaagctggtctt

SEQ ID NO: 286528 - DNA, 25 bp, Artificial
  Probe
attaagggcccgtcaagattcctca

SEQ ID NO: 286529 - DNA, 25 bp, Artificial
  Probe
attaccatgctgtggtaggtatctg

SEQ ID NO: 286530 - DNA, 25 bp, Artificial
  Probe
tgcgtggacaagtccctttgtgggc

SEQ ID NO: 286531 - DNA, 25 bp, Artificial
  Probe
tgccagaacccacaatagaaggaaa

SEQ ID NO: 286532 - DNA, 25 bp, Artificial
  Probe
tcagatgcatgatcctctgtccaag

SEQ ID NO: 286533 - DNA, 25 bp, Artificial
  Probe
aaggctctccatatcgccgagaact

SEQ ID NO: 286534 - DNA, 25 bp, Artificial
  Probe
atgccagaacccacaatagaaggaa

SEQ ID NO: 286535 - DNA, 25 bp, Artificial
  Probe
atgctgtggtaggtatctgtccaca

SEQ ID NO: 286536 - DNA, 25 bp, Artificial
  Probe
aactggttcacaaaagttgtctctg

SEQ ID NO: 286537 - DNA, 25 bp, Artificial
  Probe
cagaaggctctccatatcgccgaga

SEQ ID NO: 286538 - DNA, 25 bp, Artificial
  Probe
gttcacaaaagttgtctctgattac

SEQ ID NO: 286539 - DNA, 25 bp, Artificial
  Probe
ctctgatcagaatttttctccaagg

SEQ ID NO: 286540 - DNA, 25 bp, Artificial
  Probe
cgtcaagattcctcagcaggacaga

SEQ ID NO: 286541 - DNA, 25 bp, Artificial
  Probe
ctggttcacaaaagttgtctctgat

SEQ ID NO: 286542 - DNA, 25 bp, Artificial
  Probe
acacagaaggctctccatatcgccg

SEQ ID NO: 286543 - DNA, 25 bp, Artificial
  Probe
ttaaaagacacacagaaggctctcc

SEQ ID NO: 286544 - DNA, 25 bp, Artificial
  Probe
agagttccagaaggatccgtgtgaa

SEQ ID NO: 286545 - DNA, 25 bp, Artificial
  Probe
gcaaacccatgttttcaagttaacg

SEQ ID NO: 286546 - DNA, 25 bp, Artificial
  Probe
atagtacatgtatgcacccagccat

SEQ ID NO: 286547 - DNA, 25 bp, Artificial
  Probe
gacaaagatcactgcccgggccatc

SEQ ID NO: 286548 - DNA, 25 bp, Artificial
  Probe
ccttgtgtcatgtggaaactattgt

SEQ ID NO: 286549 - DNA, 25 bp, Artificial
  Probe
caaacagctgcaatgggtttgttct

SEQ ID NO: 286550 - DNA, 25 bp, Artificial
  Probe
ctccatggactatgtaatgaaggac

SEQ ID NO: 286551 - DNA, 25 bp, Artificial
  Probe
aaactagagctcgtgtcttcgtttg

SEQ ID NO: 286552 - DNA, 25 bp, Artificial
  Probe
aacaggatccagtgggctattttat

SEQ ID NO: 286553 - DNA, 25 bp, Artificial
  Probe
attgtttccctgactgccccgcaaa

SEQ ID NO: 286554 - DNA, 25 bp, Artificial
  Probe
tattgacatggctttattagatacc

SEQ ID NO: 286555 - DNA, 25 bp, Artificial
  Probe
gcacccagccatataagtgcacaca

SEQ ID NO: 286556 - DNA, 25 bp, Artificial
  Probe
acactctggaacattccactctgag

SEQ ID NO: 286557 - DNA, 25 bp, Artificial
  Probe
agagtttgagaagtgcgcggcacca

SEQ ID NO: 286558 - DNA, 25 bp, Artificial
  Probe
agctccaggctccatggactatgta

SEQ ID NO: 286559 - DNA, 25 bp, Artificial
  Probe
cttagcctgaaatccacaccaaagg

SEQ ID NO: 286560 - DNA, 25 bp, Artificial
  Probe
gtatagtgcattgtttcaccctttg

SEQ ID NO: 286561 - DNA, 25 bp, Artificial
  Probe
tactcctctgtgatgtccctgccgg

SEQ ID NO: 286562 - DNA, 25 bp, Artificial
  Probe
tattaattggcagtgacccaaatct

SEQ ID NO: 286563 - DNA, 25 bp, Artificial
  Probe
ttaaaagcaggcagctccaggctcc

SEQ ID NO: 286564 - DNA, 25 bp, Artificial
  Probe
gcaagttcagggatacatggacaga

SEQ ID NO: 286565 - DNA, 25 bp, Artificial
  Probe
cacatgactgtatcatttcccagtg

SEQ ID NO: 286566 - DNA, 25 bp, Artificial
  Probe
ggcaccatttaacactctggaacat

SEQ ID NO: 286567 - DNA, 25 bp, Artificial
  Probe
tcttctttgaagaaaactagagctc

SEQ ID NO: 286568 - DNA, 25 bp, Artificial
  Probe
tgccgggcctaccagacatgcacgg

SEQ ID NO: 286569 - DNA, 25 bp, Artificial
  Probe
catacgcatgagtgtacatgtgtgt

SEQ ID NO: 286570 - DNA, 25 bp, Artificial
  Probe
gtgactcatataagctggtttcttt

SEQ ID NO: 286571 - DNA, 25 bp, Artificial
  Probe
gagaaacatcccttagcctgaaatc

SEQ ID NO: 286572 - DNA, 25 bp, Artificial
  Probe
ccatgttttcaagttaacgtgtata

SEQ ID NO: 286573 - DNA, 25 bp, Artificial
  Probe
ctggtgtacagtatttccaagtaaa

SEQ ID NO: 286574 - DNA, 25 bp, Artificial
  Probe
gtcaatgatgcaacttgaggtaatc

SEQ ID NO: 286575 - DNA, 25 bp, Artificial
  Probe
ggtggcttgccatttgctaatttat

SEQ ID NO: 286576 - DNA, 25 bp, Artificial
  Probe
tgtatatttggctgcacgtctttgg

SEQ ID NO: 286577 - DNA, 25 bp, Artificial
  Probe
ggtcccataccctggtcccttgtgt

SEQ ID NO: 286578 - DNA, 25 bp, Artificial
  Probe
tgtcttctttgaagaaaactagagc

SEQ ID NO: 286579 - DNA, 25 bp, Artificial
  Probe
ttgttctgttgagtcagggtttccg

SEQ ID NO: 286580 - DNA, 25 bp, Artificial
  Probe
ggcagtgacccaaatctcttccata

SEQ ID NO: 286581 - DNA, 25 bp, Artificial
  Probe
cacaccaaagggagagttccagaag

SEQ ID NO: 286582 - DNA, 25 bp, Artificial
  Probe
ggctttattagataccatagtgact

SEQ ID NO: 286583 - DNA, 25 bp, Artificial
  Probe
ctgtatttgctattgacatggcttt

SEQ ID NO: 286584 - DNA, 25 bp, Artificial
  Probe
agtgcacacacatacatacgcatga

SEQ ID NO: 286585 - DNA, 25 bp, Artificial
  Probe
ttatttatcccagaggcatctgtat

SEQ ID NO: 286586 - DNA, 25 bp, Artificial
  Probe
caagttcagggatacatggacagag

SEQ ID NO: 286587 - DNA, 25 bp, Artificial
  Probe
ccattttacgattagcaatatgggt

SEQ ID NO: 286588 - DNA, 25 bp, Artificial
  Probe
actgcccgggccatcttcctgagaa

SEQ ID NO: 286589 - DNA, 25 bp, Artificial
  Probe
cctaccagacatgcacggctgcttg

SEQ ID NO: 286590 - DNA, 25 bp, Artificial
  Probe
aagagggcctcctactactactgag

SEQ ID NO: 286591 - DNA, 25 bp, Artificial
  Probe
tgtgctttcttggatgggattttcc

SEQ ID NO: 286592 - DNA, 25 bp, Artificial
  Probe
agcagtcatggcatttagcacttta

SEQ ID NO: 286593 - DNA, 25 bp, Artificial
  Probe
gcctcctactactactgagaagtta

SEQ ID NO: 286594 - DNA, 25 bp, Artificial
  Probe
gttaattcttgacatgtgattctca

SEQ ID NO: 286595 - DNA, 25 bp, Artificial
  Probe
tttcctgccattcatgcaagctgga

SEQ ID NO: 286596 - DNA, 25 bp, Artificial
  Probe
tgctagctcatctctcagtacaaag

SEQ ID NO: 286597 - DNA, 25 bp, Artificial
  Probe
gatacacatgatgcttatctagata

SEQ ID NO: 286598 - DNA, 25 bp, Artificial
  Probe
ctgttatctggatacacatgatgct

SEQ ID NO: 286599 - DNA, 25 bp, Artificial
  Probe
tacatactcaagagggcctcctact

SEQ ID NO: 286600 - DNA, 25 bp, Artificial
  Probe
acggcagctctatgagaataaaccc

SEQ ID NO: 286601 - DNA, 25 bp, Artificial
  Probe
gaataaacccagaaggccctacata

SEQ ID NO: 286602 - DNA, 25 bp, Artificial
  Probe
caaataaagatctcgagcatgatgt

SEQ ID NO: 286603 - DNA, 25 bp, Artificial
  Probe
caccattttgattatttgatggctt

SEQ ID NO: 286604 - DNA, 25 bp, Artificial
  Probe
ttcttggatgggattttcctgccat

SEQ ID NO: 286605 - DNA, 25 bp, Artificial
  Probe
tatcatataaagacccatctggaag

SEQ ID NO: 286606 - DNA, 25 bp, Artificial
  Probe
tacgtggatattttgcctgtcaaat

SEQ ID NO: 286607 - DNA, 25 bp, Artificial
  Probe
tttacctgttatctggatacacatg

SEQ ID NO: 286608 - DNA, 25 bp, Artificial
  Probe
agaataaacccagaaggccctacat

SEQ ID NO: 286609 - DNA, 25 bp, Artificial
  Probe
agttaattcttgacatgtgattctc

SEQ ID NO: 286610 - DNA, 25 bp, Artificial
  Probe
ccatctggaagacttgttaatgaaa

SEQ ID NO: 286611 - DNA, 25 bp, Artificial
  Probe
catggcatttagcactttatgggaa

SEQ ID NO: 286612 - DNA, 25 bp, Artificial
  Probe
ctcgatcatggcaatgagaaaactg

SEQ ID NO: 286613 - DNA, 25 bp, Artificial
  Probe
ctcagtgtatctttacgtggatatt

SEQ ID NO: 286614 - DNA, 25 bp, Artificial
  Probe
ctctatgagaataaacccagaaggc

SEQ ID NO: 286615 - DNA, 25 bp, Artificial
  Probe
taaagatctcgagcatgatgtgttc

SEQ ID NO: 286616 - DNA, 25 bp, Artificial
  Probe
ttatattctgaaacggcagctctat

SEQ ID NO: 286617 - DNA, 25 bp, Artificial
  Probe
aatcccttatattctgaaacggcag

SEQ ID NO: 286618 - DNA, 25 bp, Artificial
  Probe
cgagcatgatgtgttctgtatcatt

SEQ ID NO: 286619 - DNA, 25 bp, Artificial
  Probe
actactactgagaagttaattcttg

SEQ ID NO: 286620 - DNA, 25 bp, Artificial
  Probe
acaatggcaccattttgattatttg

SEQ ID NO: 286621 - DNA, 25 bp, Artificial
  Probe
cacaattgtgctttcttggatggga

SEQ ID NO: 286622 - DNA, 25 bp, Artificial
  Probe
cttttccacaattgtgctttcttgg

SEQ ID NO: 286623 - DNA, 25 bp, Artificial
  Probe
cccaaagcagaacaatggcaccatt

SEQ ID NO: 286624 - DNA, 25 bp, Artificial
  Probe
gttttcaaataaagatctcgagcat

SEQ ID NO: 286625 - DNA, 25 bp, Artificial
  Probe
gattttcctgccattcatgcaagct

SEQ ID NO: 286626 - DNA, 25 bp, Artificial
  Probe
tgtatctttacgtggatattttgcc

SEQ ID NO: 286627 - DNA, 25 bp, Artificial
  Probe
cccagaaggccctacatactcaaga

SEQ ID NO: 286628 - DNA, 25 bp, Artificial
  Probe
ttctgaaacggcagctctatgagaa

SEQ ID NO: 286629 - DNA, 25 bp, Artificial
  Probe
caattaacccaaagcagaacaatgg

SEQ ID NO: 286630 - DNA, 25 bp, Artificial
  Probe
agctcatctctcagtacaaaggaaa

SEQ ID NO: 286631 - DNA, 25 bp, Artificial
  Probe
ggatattttgcctgtcaaatgaact

SEQ ID NO: 286632 - DNA, 25 bp, Artificial
  Probe
ctctcagtacaaaggaaagttacta

SEQ ID NO: 286633 - DNA, 25 bp, Artificial
  Probe
atcattctttatgctgatctcagtg

SEQ ID NO: 286634 - DNA, 25 bp, Artificial
  Probe
tataagcagtcatggcatttagcac

SEQ ID NO: 286635 - DNA, 25 bp, Artificial
  Probe
ggtcatataagcagtcatggcattt

SEQ ID NO: 286636 - DNA, 25 bp, Artificial
  Probe
atattttgagcctaaatcgcttagg

SEQ ID NO: 286637 - DNA, 25 bp, Artificial
  Probe
cactccactgggagagcccacgaag

SEQ ID NO: 286638 - DNA, 25 bp, Artificial
  Probe
tcgggcaagggcagacctcaaccac

SEQ ID NO: 286639 - DNA, 25 bp, Artificial
  Probe
tactactatggtgtagaagaaaccg

SEQ ID NO: 286640 - DNA, 25 bp, Artificial
  Probe
cgggcagcacaagaaccggctccag

SEQ ID NO: 286641 - DNA, 25 bp, Artificial
  Probe
acccaggaggagatcgcacgcggaa

SEQ ID NO: 286642 - DNA, 25 bp, Artificial
  Probe
tgggagaacgcaacgtgcagctcgc

SEQ ID NO: 286643 - DNA, 25 bp, Artificial
  Probe
taaattggttcactgaagactagac

SEQ ID NO: 286644 - DNA, 25 bp, Artificial
  Probe
caagaaccggctccagaggaagagg

SEQ ID NO: 286645 - DNA, 25 bp, Artificial
  Probe
gttcactgaagactagacacaattt

SEQ ID NO: 286646 - DNA, 25 bp, Artificial
  Probe
ctaaatcgcttaggatcaggaattt

SEQ ID NO: 286647 - DNA, 25 bp, Artificial
  Probe
cgctcgcacccaggaggagatcgca

SEQ ID NO: 286648 - DNA, 25 bp, Artificial
  Probe
tccagacactgctggccggaccgga

SEQ ID NO: 286649 - DNA, 25 bp, Artificial
  Probe
cagtttgcaacaattaattgctgaa

SEQ ID NO: 286650 - DNA, 25 bp, Artificial
  Probe
acagcaccaggcaacggggctctca

SEQ ID NO: 286651 - DNA, 25 bp, Artificial
  Probe
ccgaacagtctccagacactgctgg

SEQ ID NO: 286652 - DNA, 25 bp, Artificial
  Probe
tctggagccactgcaagtgagggtc

SEQ ID NO: 286653 - DNA, 25 bp, Artificial
  Probe
gagagtccccagctggccagcagtc

SEQ ID NO: 286654 - DNA, 25 bp, Artificial
  Probe
aggctgccagggacagctctgagca

SEQ ID NO: 286655 - DNA, 25 bp, Artificial
  Probe
ctcacatagggattgttcattttag

SEQ ID NO: 286656 - DNA, 25 bp, Artificial
  Probe
aacatgaacagcagcagccagagtc

SEQ ID NO: 286657 - DNA, 25 bp, Artificial
  Probe
tagaagaaaccgaggacgagtccga

SEQ ID NO: 286658 - DNA, 25 bp, Artificial
  Probe
aacggggctctcaccaggcgcacag

SEQ ID NO: 286659 - DNA, 25 bp, Artificial
  Probe
atcgcacgcggaaggtctggagcca

SEQ ID NO: 286660 - DNA, 25 bp, Artificial
  Probe
tcacaggagggcaggctccagctca

SEQ ID NO: 286661 - DNA, 25 bp, Artificial
  Probe
gccggaccggatccagccgtggaca

SEQ ID NO: 286662 - DNA, 25 bp, Artificial
  Probe
gatccagccgtggacagcagtccgc

SEQ ID NO: 286663 - DNA, 25 bp, Artificial
  Probe
tgggagagcccacgaagaccgccac

SEQ ID NO: 286664 - DNA, 25 bp, Artificial
  Probe
aggagagtccccagctggccagcag

SEQ ID NO: 286665 - DNA, 25 bp, Artificial
  Probe
gccaggcacatcgaatccaggaggg

SEQ ID NO: 286666 - DNA, 25 bp, Artificial
  Probe
gcagtccgcccaacgacatggtgac

SEQ ID NO: 286667 - DNA, 25 bp, Artificial
  Probe
tcccacagtgagagcgaggcctccg

SEQ ID NO: 286668 - DNA, 25 bp, Artificial
  Probe
agcggcagcagcacgaacaagaacg

SEQ ID NO: 286669 - DNA, 25 bp, Artificial
  Probe
ttaacaatgagagcagtttgcaaca

SEQ ID NO: 286670 - DNA, 25 bp, Artificial
  Probe
catggtgactcaaccccgggcagca

SEQ ID NO: 286671 - DNA, 25 bp, Artificial
  Probe
attctggagcccatgccgggatcgg

SEQ ID NO: 286672 - DNA, 25 bp, Artificial
  Probe
agtcttttgtatgcataatgccctg

SEQ ID NO: 286673 - DNA, 25 bp, Artificial
  Probe
ccagccagtccagtgacagcgaagg

SEQ ID NO: 286674 - DNA, 25 bp, Artificial
  Probe
gaacatgaacagcagcagccagagt

SEQ ID NO: 286675 - DNA, 25 bp, Artificial
  Probe
tgctgaaatataacctcacataggg

SEQ ID NO: 286676 - DNA, 25 bp, Artificial
  Probe
gtccgatgcccagcaggggcaccag

SEQ ID NO: 286677 - DNA, 25 bp, Artificial
  Probe
gcagcacgaacaagaacgagaacat

SEQ ID NO: 286678 - DNA, 25 bp, Artificial
  Probe
ctctgttgaaggttctgatggctat

SEQ ID NO: 286679 - DNA, 25 bp, Artificial
  Probe
ggccaggccggctcccacagtgaga

SEQ ID NO: 286680 - DNA, 25 bp, Artificial
  Probe
gcagccagagtccagccagaggcag

SEQ ID NO: 286681 - DNA, 25 bp, Artificial
  Probe
cccgacagagccaggcacatcgaat

SEQ ID NO: 286682 - DNA, 25 bp, Artificial
  Probe
tctaattctcctctacttcatttgt

SEQ ID NO: 286683 - DNA, 25 bp, Artificial
  Probe
gaccctttacacactactgccagga

SEQ ID NO: 286684 - DNA, 25 bp, Artificial
  Probe
attcctaggcacataggagcagata

SEQ ID NO: 286685 - DNA, 25 bp, Artificial
  Probe
gccaggactgctactgaaagatcaa

SEQ ID NO: 286686 - DNA, 25 bp, Artificial
  Probe
acaccctcttctgtctaagctcaag

SEQ ID NO: 286687 - DNA, 25 bp, Artificial
  Probe
tttacacactactgccaggactgct

SEQ ID NO: 286688 - DNA, 25 bp, Artificial
  Probe
taattcctaggcacataggagcaga

SEQ ID NO: 286689 - DNA, 25 bp, Artificial
  Probe
attctgatcttcctttttctctatc

SEQ ID NO: 286690 - DNA, 25 bp, Artificial
  Probe
cctttacacactactgccaggactg

SEQ ID NO: 286691 - DNA, 25 bp, Artificial
  Probe
actactgccaggactgctactgaaa

SEQ ID NO: 286692 - DNA, 25 bp, Artificial
  Probe
ctttacacactactgccaggactgc

SEQ ID NO: 286693 - DNA, 25 bp, Artificial
  Probe
ccctcttctgtctaagctcaaggac

SEQ ID NO: 286694 - DNA, 25 bp, Artificial
  Probe
tcacaacctctaattctcctctact

SEQ ID NO: 286695 - DNA, 25 bp, Artificial
  Probe
ttctgtctaagctcaaggacccttt

SEQ ID NO: 286696 - DNA, 25 bp, Artificial
  Probe
tttagtgtatgtgaaactggaattc

SEQ ID NO: 286697 - DNA, 25 bp, Artificial
  Probe
tcttcctttttctctatcctgcaga

SEQ ID NO: 286698 - DNA, 25 bp, Artificial
  Probe
ttcctaggcacataggagcagataa

SEQ ID NO: 286699 - DNA, 25 bp, Artificial
  Probe
actgccaggactgctactgaaagat

SEQ ID NO: 286700 - DNA, 25 bp, Artificial
  Probe
ttttctctatcctgcagaccaaccc

SEQ ID NO: 286701 - DNA, 25 bp, Artificial
  Probe
ctgtctaagctcaaggaccctttac

SEQ ID NO: 286702 - DNA, 25 bp, Artificial
  Probe
tactgccaggactgctactgaaaga

SEQ ID NO: 286703 - DNA, 25 bp, Artificial
  Probe
tgtctaagctcaaggaccctttaca

SEQ ID NO: 286704 - DNA, 25 bp, Artificial
  Probe
ataattcctaggcacataggagcag

SEQ ID NO: 286705 - DNA, 25 bp, Artificial
  Probe
accctcttctgtctaagctcaagga

SEQ ID NO: 286706 - DNA, 25 bp, Artificial
  Probe
gtctaagctcaaggaccctttacac

SEQ ID NO: 286707 - DNA, 25 bp, Artificial
  Probe
tgccaggactgctactgaaagatca

SEQ ID NO: 286708 - DNA, 25 bp, Artificial
  Probe
ctgccaggactgctactgaaagatc

SEQ ID NO: 286709 - DNA, 25 bp, Artificial
  Probe
caccctcttctgtctaagctcaagg

SEQ ID NO: 286710 - DNA, 25 bp, Artificial
  Probe
tctaagctcaaggaccctttacaca

SEQ ID NO: 286711 - DNA, 25 bp, Artificial
  Probe
ctcttctgtctaagctcaaggaccc

SEQ ID NO: 286712 - DNA, 25 bp, Artificial
  Probe
cactactgccaggactgctactgaa

SEQ ID NO: 286713 - DNA, 25 bp, Artificial
  Probe
aggaccctttacacactactgccag

SEQ ID NO: 286714 - DNA, 25 bp, Artificial
  Probe
ggaccctttacacactactgccagg

SEQ ID NO: 286715 - DNA, 25 bp, Artificial
  Probe
tctgtctaagctcaaggacccttta

SEQ ID NO: 286716 - DNA, 25 bp, Artificial
  Probe
acactactgccaggactgctactga

SEQ ID NO: 286717 - DNA, 25 bp, Artificial
  Probe
tttgttttagtgtatgtgaaactgg

SEQ ID NO: 286718 - DNA, 25 bp, Artificial
  Probe
cttctgtctaagctcaaggaccctt

SEQ ID NO: 286719 - DNA, 25 bp, Artificial
  Probe
aattcctaggcacataggagcagat

SEQ ID NO: 286720 - DNA, 25 bp, Artificial
  Probe
attcatacaccctcttctgtctaag

SEQ ID NO: 286721 - DNA, 25 bp, Artificial
  Probe
aataaaatgtctattcacaacctct

SEQ ID NO: 286722 - DNA, 25 bp, Artificial
  Probe
cctaggcacataggagcagataagg

SEQ ID NO: 286723 - DNA, 25 bp, Artificial
  Probe
tcttctgtctaagctcaaggaccct

SEQ ID NO: 286724 - DNA, 25 bp, Artificial
  Probe
tcctaggcacataggagcagataag

SEQ ID NO: 286725 - DNA, 25 bp, Artificial
  Probe
cctcttctgtctaagctcaaggacc

SEQ ID NO: 286726 - DNA, 25 bp, Artificial
  Probe
acacactactgccaggactgctact

SEQ ID NO: 286727 - DNA, 25 bp, Artificial
  Probe
cacactactgccaggactgctactg

SEQ ID NO: 286728 - DNA, 25 bp, Artificial
  Probe
cttcagcttttgatcattgcttgtc

SEQ ID NO: 286729 - DNA, 25 bp, Artificial
  Probe
ctgagtttctcaagcttgtgtggat

SEQ ID NO: 286730 - DNA, 25 bp, Artificial
  Probe
ttgtcatggttacaattacgttctt

SEQ ID NO: 286731 - DNA, 25 bp, Artificial
  Probe
ctcaagcttgtgtggattttctatg

SEQ ID NO: 286732 - DNA, 25 bp, Artificial
  Probe
tttgatcattgcttgtcatggttac

SEQ ID NO: 286733 - DNA, 25 bp, Artificial
  Probe
agacttcagcctgagtttctcaagc

SEQ ID NO: 286734 - DNA, 25 bp, Artificial
  Probe
ctttgaaaggggatcctttgagctg

SEQ ID NO: 286735 - DNA, 25 bp, Artificial
  Probe
tcctggagacttcagcctgagtttc

SEQ ID NO: 286736 - DNA, 25 bp, Artificial
  Probe
tctttttagaaccaacaaatgctgg

SEQ ID NO: 286737 - DNA, 25 bp, Artificial
  Probe
gatcctttgagctgtgacggagaca

SEQ ID NO: 286738 - DNA, 25 bp, Artificial
  Probe
taagagatacagagctcctggagac

SEQ ID NO: 286739 - DNA, 25 bp, Artificial
  Probe
gatgtcatcacaaggccactctcca

SEQ ID NO: 286740 - DNA, 25 bp, Artificial
  Probe
ttcttgagagcaggtgagtttccag

SEQ ID NO: 286741 - DNA, 25 bp, Artificial
  Probe
ggatcctttgagctgtgacggagac

SEQ ID NO: 286742 - DNA, 25 bp, Artificial
  Probe
gtttctcaagcttgtgtggattttc

SEQ ID NO: 286743 - DNA, 25 bp, Artificial
  Probe
agccactgcttcatcttgccatggc

SEQ ID NO: 286744 - DNA, 25 bp, Artificial
  Probe
agctgtgacggagacagtgatgtca

SEQ ID NO: 286745 - DNA, 25 bp, Artificial
  Probe
ctttgagctgtgacggagacagtga

SEQ ID NO: 286746 - DNA, 25 bp, Artificial
  Probe
agatacagagctcctggagacttca

SEQ ID NO: 286747 - DNA, 25 bp, Artificial
  Probe
ttctcaagcttgtgtggattttcta

SEQ ID NO: 286748 - DNA, 25 bp, Artificial
  Probe
ctgtgacggagacagtgatgtcatc

SEQ ID NO: 286749 - DNA, 25 bp, Artificial
  Probe
gtcatggttacaattacgttcttta

SEQ ID NO: 286750 - DNA, 25 bp, Artificial
  Probe
ccatggccaccaggttcctttgcta

SEQ ID NO: 286751 - DNA, 25 bp, Artificial
  Probe
actctccaccttaagagatacagag

SEQ ID NO: 286752 - DNA, 25 bp, Artificial
  Probe
ttcatcttgccatggccaccaggtt

SEQ ID NO: 286753 - DNA, 25 bp, Artificial
  Probe
gctcctggagacttcagcctgagtt

SEQ ID NO: 286754 - DNA, 25 bp, Artificial
  Probe
gtttcttgagagcaggtgagtttcc

SEQ ID NO: 286755 - DNA, 25 bp, Artificial
  Probe
cctggagacttcagcctgagtttct

SEQ ID NO: 286756 - DNA, 25 bp, Artificial
  Probe
attgcttgtcatggttacaattacg

SEQ ID NO: 286757 - DNA, 25 bp, Artificial
  Probe
gcttttgatcattgcttgtcatggt

SEQ ID NO: 286758 - DNA, 25 bp, Artificial
  Probe
gacagtgatgtcatcacaaggccac

SEQ ID NO: 286759 - DNA, 25 bp, Artificial
  Probe
aaaggggatcctttgagctgtgacg

SEQ ID NO: 286760 - DNA, 25 bp, Artificial
  Probe
attttctatgagtaaagccactgct

SEQ ID NO: 286761 - DNA, 25 bp, Artificial
  Probe
tcattgcttgtcatggttacaatta

SEQ ID NO: 286762 - DNA, 25 bp, Artificial
  Probe
gcttgtcatggttacaattacgttc

SEQ ID NO: 286763 - DNA, 25 bp, Artificial
  Probe
gccatggccaccaggttcctttgct

SEQ ID NO: 286764 - DNA, 25 bp, Artificial
  Probe
tcttgagagcaggtgagtttccaga

SEQ ID NO: 286765 - DNA, 25 bp, Artificial
  Probe
agcttttgatcattgcttgtcatgg

SEQ ID NO: 286766 - DNA, 25 bp, Artificial
  Probe
aaagccactgcttcatcttgccatg

SEQ ID NO: 286767 - DNA, 25 bp, Artificial
  Probe
cagagctcctggagacttcagcctg

SEQ ID NO: 286768 - DNA, 25 bp, Artificial
  Probe
ttcagcctgagtttctcaagcttgt

SEQ ID NO: 286769 - DNA, 25 bp, Artificial
  Probe
gtaaagccactgcttcatcttgcca

SEQ ID NO: 286770 - DNA, 25 bp, Artificial
  Probe
atgagtaaagccactgcttcatctt

SEQ ID NO: 286771 - DNA, 25 bp, Artificial
  Probe
ttctatgagtaaagccactgcttca

SEQ ID NO: 286772 - DNA, 25 bp, Artificial
  Probe
cttcatcttgccatggccaccaggt

SEQ ID NO: 286773 - DNA, 25 bp, Artificial
  Probe
ttttctatgagtaaagccactgctt

SEQ ID NO: 286774 - DNA, 25 bp, Artificial
  Probe
gacctggcccaaaggcagaatgggt

SEQ ID NO: 286775 - DNA, 25 bp, Artificial
  Probe
gatgaactcagagctgggaaagttc

SEQ ID NO: 286776 - DNA, 25 bp, Artificial
  Probe
tgcaaaatggtgctggaggagcctt

SEQ ID NO: 286777 - DNA, 25 bp, Artificial
  Probe
tcgaaagccagttgggaagtaccac

SEQ ID NO: 286778 - DNA, 25 bp, Artificial
  Probe
caatagtcagaaactacccggaagg

SEQ ID NO: 286779 - DNA, 25 bp, Artificial
  Probe
cgactactacgaggatctgacaccc

SEQ ID NO: 286780 - DNA, 25 bp, Artificial
  Probe
gagaataacccagatactccatttg

SEQ ID NO: 286781 - DNA, 25 bp, Artificial
  Probe
tgtgcatagagatactcctgagaat

SEQ ID NO: 286782 - DNA, 25 bp, Artificial
  Probe
tacacaatgtacaatcgaaagccag

SEQ ID NO: 286783 - DNA, 25 bp, Artificial
  Probe
gccatgaacaaggtggcagaagttt

SEQ ID NO: 286784 - DNA, 25 bp, Artificial
  Probe
ctgtgtaaacgcaccgatggttcaa

SEQ ID NO: 286785 - DNA, 25 bp, Artificial
  Probe
ctgttgtgagccagccggaggcctt

SEQ ID NO: 286786 - DNA, 25 bp, Artificial
  Probe
gatactcctgagaataacccagata

SEQ ID NO: 286787 - DNA, 25 bp, Artificial
  Probe
tgatttcacaccagaaaactacgag

SEQ ID NO: 286788 - DNA, 25 bp, Artificial
  Probe
ctccaatgagagtctatgaagtggc

SEQ ID NO: 286789 - DNA, 25 bp, Artificial
  Probe
tagtcagaaactacccggaagggca

SEQ ID NO: 286790 - DNA, 25 bp, Artificial
  Probe
ctacgaggatctgacacccaaggat

SEQ ID NO: 286791 - DNA, 25 bp, Artificial
  Probe
gcaaaatggtgctggaggagcctta

SEQ ID NO: 286792 - DNA, 25 bp, Artificial
  Probe
aacgcaccgatggttcaaataaacg

SEQ ID NO: 286793 - DNA, 25 bp, Artificial
  Probe
agaatgggtggctgcctatctctgc

SEQ ID NO: 286794 - DNA, 25 bp, Artificial
  Probe
aaaccagggccaaggagtggccgct

SEQ ID NO: 286795 - DNA, 25 bp, Artificial
  Probe
cagtgctggacctggcccaaaggca

SEQ ID NO: 286796 - DNA, 25 bp, Artificial
  Probe
aagttttacaagtgcctccaatgag

SEQ ID NO: 286797 - DNA, 25 bp, Artificial
  Probe
tggacctggcccaaaggcagaatgg

SEQ ID NO: 286798 - DNA, 25 bp, Artificial
  Probe
ggcgactttttacacaatgtacaat

SEQ ID NO: 286799 - DNA, 25 bp, Artificial
  Probe
ccagggccaaggagtggccgcttct

SEQ ID NO: 286800 - DNA, 25 bp, Artificial
  Probe
agttggagagactacgcctgacaag

SEQ ID NO: 286801 - DNA, 25 bp, Artificial
  Probe
tgaaccacccaaaggacctggcttt

SEQ ID NO: 286802 - DNA, 25 bp, Artificial
  Probe
gagtggccgcttctgttgtgagcca

SEQ ID NO: 286803 - DNA, 25 bp, Artificial
  Probe
accagaaaactacgagaggatagag

SEQ ID NO: 286804 - DNA, 25 bp, Artificial
  Probe
aagacagcagtgcaaaatggtgctg

SEQ ID NO: 286805 - DNA, 25 bp, Artificial
  Probe
ctgccatgaacaaggtggcagaagt

SEQ ID NO: 286806 - DNA, 25 bp, Artificial
  Probe
aatttgcataagacagcagtgcaaa

SEQ ID NO: 286807 - DNA, 25 bp, Artificial
  Probe
ctcaccgctcagtggggaagacatg

SEQ ID NO: 286808 - DNA, 25 bp, Artificial
  Probe
cccaaaggcagaatgggtggctgcc

SEQ ID NO: 286809 - DNA, 25 bp, Artificial
  Probe
atgaactcagagctgggaaagttcc

SEQ ID NO: 286810 - DNA, 25 bp, Artificial
  Probe
gacaagcttttcactcttatagaag

SEQ ID NO: 286811 - DNA, 25 bp, Artificial
  Probe
tatgaagtggcgactttttacacaa

SEQ ID NO: 286812 - DNA, 25 bp, Artificial
  Probe
tgagccagccggaggccttacttct

SEQ ID NO: 286813 - DNA, 25 bp, Artificial
  Probe
cctatctctgccatgaacaaggtgg

SEQ ID NO: 286814 - DNA, 25 bp, Artificial
  Probe
gcttttcactcttatagaagtagaa

SEQ ID NO: 286815 - DNA, 25 bp, Artificial
  Probe
gactacgcctgacaagcttttcact

SEQ ID NO: 286816 - DNA, 25 bp, Artificial
  Probe
cattcaactgtaaaaatgtcactgg

SEQ ID NO: 286817 - DNA, 25 bp, Artificial
  Probe
gctggaggagccttatttgtgcata

SEQ ID NO: 286818 - DNA, 25 bp, Artificial
  Probe
gaaactacccggaagggcacagagc

SEQ ID NO: 286819 - DNA, 25 bp, Artificial
  Probe
tgtttaggggcctgtgtaaacgcac

SEQ ID NO: 286820 - DNA, 25 bp, Artificial
  Probe
ttcagtgcctggaaaatgaactcgg

SEQ ID NO: 286821 - DNA, 25 bp, Artificial
  Probe
ttttacttgcccaagcaggccacag

SEQ ID NO: 286822 - DNA, 25 bp, Artificial
  Probe
ctcgcatcctgtgttgcactgacgc

SEQ ID NO: 286823 - DNA, 25 bp, Artificial
  Probe
aaatgaactcggagctctgcagcgt

SEQ ID NO: 286824 - DNA, 25 bp, Artificial
  Probe
cagcaactgtggtggaatttctgag

SEQ ID NO: 286825 - DNA, 25 bp, Artificial
  Probe
atcttcagtgcctggaaaatgaact

SEQ ID NO: 286826 - DNA, 25 bp, Artificial
  Probe
gcagcgtgtgttggatttgactcaa

SEQ ID NO: 286827 - DNA, 25 bp, Artificial
  Probe
acttgcccaagcaggccacagaatt

SEQ ID NO: 286828 - DNA, 25 bp, Artificial
  Probe
tttgagtgccaattcgatgatgagc

SEQ ID NO: 286829 - DNA, 25 bp, Artificial
  Probe
gatagccatctgtcaaagcatcatc

SEQ ID NO: 286830 - DNA, 25 bp, Artificial
  Probe
agatggatagccatctgtcaaagca

SEQ ID NO: 286831 - DNA, 25 bp, Artificial
  Probe
ctcctgagagggatcgataattaca

SEQ ID NO: 286832 - DNA, 25 bp, Artificial
  Probe
ctggaaatttcatcagcaatatcag

SEQ ID NO: 286833 - DNA, 25 bp, Artificial
  Probe
cacttcaagccctgcaaaggaaaca

SEQ ID NO: 286834 - DNA, 25 bp, Artificial
  Probe
gaaactccccatgatgctcacgttt

SEQ ID NO: 286835 - DNA, 25 bp, Artificial
  Probe
aattcgatgatgagccagcaactgt

SEQ ID NO: 286836 - DNA, 25 bp, Artificial
  Probe
ttcatcagcaatatcagagtaactg

SEQ ID NO: 286837 - DNA, 25 bp, Artificial
  Probe
agctctgcagcgtgtgttggatttg

SEQ ID NO: 286838 - DNA, 25 bp, Artificial
  Probe
aaaggaaacacagcagcacctggag

SEQ ID NO: 286839 - DNA, 25 bp, Artificial
  Probe
gaaatttcatcagcaatatcagagt

SEQ ID NO: 286840 - DNA, 25 bp, Artificial
  Probe
actcggagctctgcagcgtgtgttg

SEQ ID NO: 286841 - DNA, 25 bp, Artificial
  Probe
gcacctggagcagctgttgctggac

SEQ ID NO: 286842 - DNA, 25 bp, Artificial
  Probe
tcaacaatgactcagtaattatgtg

SEQ ID NO: 286843 - DNA, 25 bp, Artificial
  Probe
ttgtaagccccaagggctcaaaaat

SEQ ID NO: 286844 - DNA, 25 bp, Artificial
  Probe
ctgaaactccccatgatgctcacgt

SEQ ID NO: 286845 - DNA, 25 bp, Artificial
  Probe
caagaatctgaaactccccatgatg

SEQ ID NO: 286846 - DNA, 25 bp, Artificial
  Probe
cccaagcaggccacagaattgaaac

SEQ ID NO: 286847 - DNA, 25 bp, Artificial
  Probe
agaatctgaaactccccatgatgct

SEQ ID NO: 286848 - DNA, 25 bp, Artificial
  Probe
gtcctgcaagcatgtacagcatgca

SEQ ID NO: 286849 - DNA, 25 bp, Artificial
  Probe
atttctgaggagatggatagccatc

SEQ ID NO: 286850 - DNA, 25 bp, Artificial
  Probe
agcaggccacagaattgaaacatct

SEQ ID NO: 286851 - DNA, 25 bp, Artificial
  Probe
ttttgtaactactagtcttcagatg

SEQ ID NO: 286852 - DNA, 25 bp, Artificial
  Probe
gtaactactagtcttcagatgataa

SEQ ID NO: 286853 - DNA, 25 bp, Artificial
  Probe
aatgactcagtaattatgtgcctcc

SEQ ID NO: 286854 - DNA, 25 bp, Artificial
  Probe
cagaattgaaacatcttcagtgcct

SEQ ID NO: 286855 - DNA, 25 bp, Artificial
  Probe
ttcacttggaagacgctggaaattt

SEQ ID NO: 286856 - DNA, 25 bp, Artificial
  Probe
gactcaaagcaaaagctttcacttg

SEQ ID NO: 286857 - DNA, 25 bp, Artificial
  Probe
gaaacatcttcagtgcctggaaaat

SEQ ID NO: 286858 - DNA, 25 bp, Artificial
  Probe
aacacagcagcacctggagcagctg

SEQ ID NO: 286859 - DNA, 25 bp, Artificial
  Probe
tgtacagcatgcagctcgcatcctg

SEQ ID NO: 286860 - DNA, 25 bp, Artificial
  Probe
cgatgatgagccagcaactgtggtg

SEQ ID NO: 286861 - DNA, 25 bp, Artificial
  Probe
tcatcagcaatatcagagtaactgt

SEQ ID NO: 286862 - DNA, 25 bp, Artificial
  Probe
gatttgactcaaagcaaaagctttc

SEQ ID NO: 286863 - DNA, 25 bp, Artificial
  Probe
ccctgcaaaggaaacacagcagcac

SEQ ID NO: 286864 - DNA, 25 bp, Artificial
  Probe
gcttgtcctccttgtcaacagcgca

SEQ ID NO: 286865 - DNA, 25 bp, Artificial
  Probe
tcaagccctgcaaaggaaacacagc

SEQ ID NO: 286866 - DNA, 25 bp, Artificial
  Probe
gctgtcccctgacacagacacatta

SEQ ID NO: 286867 - DNA, 25 bp, Artificial
  Probe
tcagtgacaggctactaaggtaacc

SEQ ID NO: 286868 - DNA, 25 bp, Artificial
  Probe
ctggtgagttcctacattgttattt

SEQ ID NO: 286869 - DNA, 25 bp, Artificial
  Probe
cctgtgtgagctgtcccctgacaca

SEQ ID NO: 286870 - DNA, 25 bp, Artificial
  Probe
gtagcatgcagacatagaagcagga

SEQ ID NO: 286871 - DNA, 25 bp, Artificial
  Probe
gaattcattatttggccactggtct

SEQ ID NO: 286872 - DNA, 25 bp, Artificial
  Probe
ggcgggtccaactatttgtttcctg

SEQ ID NO: 286873 - DNA, 25 bp, Artificial
  Probe
ttggagagaaccaggtcctgtgtga

SEQ ID NO: 286874 - DNA, 25 bp, Artificial
  Probe
acatctgttgcgtggacaagtgaag

SEQ ID NO: 286875 - DNA, 25 bp, Artificial
  Probe
ctgagaaattactcggcgggtccaa

SEQ ID NO: 286876 - DNA, 25 bp, Artificial
  Probe
caagtgaagttccattcataaagtt

SEQ ID NO: 286877 - DNA, 25 bp, Artificial
  Probe
gaagagcttgcctttacagaagatg

SEQ ID NO: 286878 - DNA, 25 bp, Artificial
  Probe
tggcctgagaaattactcggcgggt

SEQ ID NO: 286879 - DNA, 25 bp, Artificial
  Probe
catgcagacatagaagcaggaaaac

SEQ ID NO: 286880 - DNA, 25 bp, Artificial
  Probe
tagaattcattatttggccactggt

SEQ ID NO: 286881 - DNA, 25 bp, Artificial
  Probe
acagaagatggctgcctcttccagg

SEQ ID NO: 286882 - DNA, 25 bp, Artificial
  Probe
tgagctgtcccctgacacagacaca

SEQ ID NO: 286883 - DNA, 25 bp, Artificial
  Probe
aatgtcagtgacaggctactaaggt

SEQ ID NO: 286884 - DNA, 25 bp, Artificial
  Probe
ctcggctgtgaagagcttgccttta

SEQ ID NO: 286885 - DNA, 25 bp, Artificial
  Probe
ctcactcggtaagtagaattcatta

SEQ ID NO: 286886 - DNA, 25 bp, Artificial
  Probe
agttcctacattgttattttgagct

SEQ ID NO: 286887 - DNA, 25 bp, Artificial
  Probe
agatgtctcggctgtgaagagcttg

SEQ ID NO: 286888 - DNA, 25 bp, Artificial
  Probe
tccaggggactgagttaagtccaag

SEQ ID NO: 286889 - DNA, 25 bp, Artificial
  Probe
ctctcatggttggagagaaccaggt

SEQ ID NO: 286890 - DNA, 25 bp, Artificial
  Probe
tactcggcgggtccaactatttgtt

SEQ ID NO: 286891 - DNA, 25 bp, Artificial
  Probe
agcttaatggccacatctgttgcgt

SEQ ID NO: 286892 - DNA, 25 bp, Artificial
  Probe
gctgcctcttccaggggactgagtt

SEQ ID NO: 286893 - DNA, 25 bp, Artificial
  Probe
cattatttggccactggtctccttg

SEQ ID NO: 286894 - DNA, 25 bp, Artificial
  Probe
taagctggagagatgtctcggctgt

SEQ ID NO: 286895 - DNA, 25 bp, Artificial
  Probe
ttactcggcgggtccaactatttgt

SEQ ID NO: 286896 - DNA, 25 bp, Artificial
  Probe
ttgttattttgagcttaatggccac

SEQ ID NO: 286897 - DNA, 25 bp, Artificial
  Probe
acaagtgaagttccattcataaagt

SEQ ID NO: 286898 - DNA, 25 bp, Artificial
  Probe
agttccattcataaagttagatacg

SEQ ID NO: 286899 - DNA, 25 bp, Artificial
  Probe
gagttcctacattgttattttgagc

SEQ ID NO: 286900 - DNA, 25 bp, Artificial
  Probe
gctactaaggtaaccagacacacac

SEQ ID NO: 286901 - DNA, 25 bp, Artificial
  Probe
gtctccttgtttagaaacagaaagg

SEQ ID NO: 286902 - DNA, 25 bp, Artificial
  Probe
ctcttccaggggactgagttaagtc

SEQ ID NO: 286903 - DNA, 25 bp, Artificial
  Probe
tttggtggcctgagaaattactcgg

SEQ ID NO: 286904 - DNA, 25 bp, Artificial
  Probe
aaggtaaccagacacacacccaacg

SEQ ID NO: 286905 - DNA, 25 bp, Artificial
  Probe
ggaatgtcagtgacaggctactaag

SEQ ID NO: 286906 - DNA, 25 bp, Artificial
  Probe
ccaacgcagactaggctcactcggt

SEQ ID NO: 286907 - DNA, 25 bp, Artificial
  Probe
agttaagtccaagcaatacatggta

SEQ ID NO: 286908 - DNA, 25 bp, Artificial
  Probe
tgttgcgtggacaagtgaagttcca

SEQ ID NO: 286909 - DNA, 25 bp, Artificial
  Probe
ttttgagcttaatggccacatctgt

SEQ ID NO: 286910 - DNA, 25 bp, Artificial
  Probe
attttggtggcctgagaaattactc

SEQ ID NO: 286911 - DNA, 25 bp, Artificial
  Probe
ttccattcataaagttagatacgga

SEQ ID NO: 286912 - DNA, 25 bp, Artificial
  Probe
accatagagatcaagtccagcaagc

SEQ ID NO: 286913 - DNA, 25 bp, Artificial
  Probe
tgtactactgtgctagcagtcaagg

SEQ ID NO: 286914 - DNA, 25 bp, Artificial
  Probe
tatctatgaatcagccatgcactgc

SEQ ID NO: 286915 - DNA, 25 bp, Artificial
  Probe
caagaaaatcatttcagcagaatgc

SEQ ID NO: 286916 - DNA, 25 bp, Artificial
  Probe
attctggacagcaagttccatggac

SEQ ID NO: 286917 - DNA, 25 bp, Artificial
  Probe
ccagcaagctaacagattcagctgt

SEQ ID NO: 286918 - DNA, 25 bp, Artificial
  Probe
gcactgcaaacttttctactgtatg

SEQ ID NO: 286919 - DNA, 25 bp, Artificial
  Probe
gcactatctatgaatcagccatgca

SEQ ID NO: 286920 - DNA, 25 bp, Artificial
  Probe
gatcagcactatctatgaatcagcc

SEQ ID NO: 286921 - DNA, 25 bp, Artificial
  Probe
actacaagaagctgggagaagacct

SEQ ID NO: 286922 - DNA, 25 bp, Artificial
  Probe
gaatcagccatgcactgcaaacttt

SEQ ID NO: 286923 - DNA, 25 bp, Artificial
  Probe
gactctggggtcattcagagtccta

SEQ ID NO: 286924 - DNA, 25 bp, Artificial
  Probe
tatgaatcagccatgcactgcaaac

SEQ ID NO: 286925 - DNA, 25 bp, Artificial
  Probe
ctggggtcattcagagtcctagaca

SEQ ID NO: 286926 - DNA, 25 bp, Artificial
  Probe
aacagaaagccagaatgcagtgcac

SEQ ID NO: 286927 - DNA, 25 bp, Artificial
  Probe
cagcactatctatgaatcagccatg

SEQ ID NO: 286928 - DNA, 25 bp, Artificial
  Probe
ctctggggtcattcagagtcctaga

SEQ ID NO: 286929 - DNA, 25 bp, Artificial
  Probe
aacatgtaccatagagatcaagtcc

SEQ ID NO: 286930 - DNA, 25 bp, Artificial
  Probe
agacatctggtcaaaggaaaagaac

SEQ ID NO: 286931 - DNA, 25 bp, Artificial
  Probe
acatctggtcaaaggaaaagaacag

SEQ ID NO: 286932 - DNA, 25 bp, Artificial
  Probe
tcagagtcctagacatctggtcaaa

SEQ ID NO: 286933 - DNA, 25 bp, Artificial
  Probe
gaagacctcaaattcttggtttact

SEQ ID NO: 286934 - DNA, 25 bp, Artificial
  Probe
gctgatcagcactatctatgaatca

SEQ ID NO: 286935 - DNA, 25 bp, Artificial
  Probe
atgtaccatagagatcaagtccagc

SEQ ID NO: 286936 - DNA, 25 bp, Artificial
  Probe
gagaagacctcaaattcttggttta

SEQ ID NO: 286937 - DNA, 25 bp, Artificial
  Probe
gtactacaagaagctgggagaagac

SEQ ID NO: 286938 - DNA, 25 bp, Artificial
  Probe
catagagatcaagtccagcaagcta

SEQ ID NO: 286939 - DNA, 25 bp, Artificial
  Probe
ctatctatgaatcagccatgcactg

SEQ ID NO: 286940 - DNA, 25 bp, Artificial
  Probe
gatcaagtccagcaagctaacagat

SEQ ID NO: 286941 - DNA, 25 bp, Artificial
  Probe
ggagaagacctcaaattcttggttt

SEQ ID NO: 286942 - DNA, 25 bp, Artificial
  Probe
agcactatctatgaatcagccatgc

SEQ ID NO: 286943 - DNA, 25 bp, Artificial
  Probe
tggtttactttcagaatacagacat

SEQ ID NO: 286944 - DNA, 25 bp, Artificial
  Probe
cagaaagccagaatgcagtgcaccc

SEQ ID NO: 286945 - DNA, 25 bp, Artificial
  Probe
ggtttactttcagaatacagacatc

SEQ ID NO: 286946 - DNA, 25 bp, Artificial
  Probe
gtcattcagagtcctagacatctgg

SEQ ID NO: 286947 - DNA, 25 bp, Artificial
  Probe
attcagagtcctagacatctggtca

SEQ ID NO: 286948 - DNA, 25 bp, Artificial
  Probe
ctagacatctggtcaaaggaaaaga

SEQ ID NO: 286949 - DNA, 25 bp, Artificial
  Probe
taccatagagatcaagtccagcaag

SEQ ID NO: 286950 - DNA, 25 bp, Artificial
  Probe
gcaagctaacagattcagctgtgta

SEQ ID NO: 286951 - DNA, 25 bp, Artificial
  Probe
gctaacagattcagctgtgtactac

SEQ ID NO: 286952 - DNA, 25 bp, Artificial
  Probe
ttccatggactctggggtcattcag

SEQ ID NO: 286953 - DNA, 25 bp, Artificial
  Probe
ttttattctggacagcaagttccat

SEQ ID NO: 286954 - DNA, 25 bp, Artificial
  Probe
caagctaacagattcagctgtgtac

SEQ ID NO: 286955 - DNA, 25 bp, Artificial
  Probe
aacagattcagctgtgtactactgt

SEQ ID NO: 286956 - DNA, 25 bp, Artificial
  Probe
tgatcagcactatctatgaatcagc

SEQ ID NO: 286957 - DNA, 25 bp, Artificial
  Probe
ggggtcattcagagtcctagacatc

SEQ ID NO: 286958 - DNA, 25 bp, Artificial
  Probe
tcttgcagccgcttttgtggataca

SEQ ID NO: 286959 - DNA, 25 bp, Artificial
  Probe
gacttctttactgtgtgatcttctg

SEQ ID NO: 286960 - DNA, 25 bp, Artificial
  Probe
caaaccaaggaccaaagttgcttct

SEQ ID NO: 286961 - DNA, 25 bp, Artificial
  Probe
gctctcttaacatcacctctgcagg

SEQ ID NO: 286962 - DNA, 25 bp, Artificial
  Probe
ccagccggcataatacttctttctg

SEQ ID NO: 286963 - DNA, 25 bp, Artificial
  Probe
caggcctaggggattctgccatgta

SEQ ID NO: 286964 - DNA, 25 bp, Artificial
  Probe
ggggattctgccatgtacctctgtg

SEQ ID NO: 286965 - DNA, 25 bp, Artificial
  Probe
cttaacatcacctctgcaggcctag

SEQ ID NO: 286966 - DNA, 25 bp, Artificial
  Probe
atgacagcaatttgaacagggagac

SEQ ID NO: 286967 - DNA, 25 bp, Artificial
  Probe
tccatgttctggtaccagcagaagc

SEQ ID NO: 286968 - DNA, 25 bp, Artificial
  Probe
acatcacctctgcaggcctagggga

SEQ ID NO: 286969 - DNA, 25 bp, Artificial
  Probe
gataacttccaatccagccggcata

SEQ ID NO: 286970 - DNA, 25 bp, Artificial
  Probe
ggaccaaagttgcttctttactact

SEQ ID NO: 286971 - DNA, 25 bp, Artificial
  Probe
ccgcttttgtggatacaatggttat

SEQ ID NO: 286972 - DNA, 25 bp, Artificial
  Probe
ctctgcaggcctaggggattctgcc

SEQ ID NO: 286973 - DNA, 25 bp, Artificial
  Probe
ctgtcttcttgcagccgcttttgtg

SEQ ID NO: 286974 - DNA, 25 bp, Artificial
  Probe
cctctgcaggcctaggggattctgc

SEQ ID NO: 286975 - DNA, 25 bp, Artificial
  Probe
acagcaatttgaacagggagactga

SEQ ID NO: 286976 - DNA, 25 bp, Artificial
  Probe
aaccagtgaatttgatctgttctca

SEQ ID NO: 286977 - DNA, 25 bp, Artificial
  Probe
actactatgacagcaatttgaacag

SEQ ID NO: 286978 - DNA, 25 bp, Artificial
  Probe
ttctgataacttccaatccagccgg

SEQ ID NO: 286979 - DNA, 25 bp, Artificial
  Probe
actatggatcatgattccatgttct

SEQ ID NO: 286980 - DNA, 25 bp, Artificial
  Probe
atggttatgcagaacccaagataca

SEQ ID NO: 286981 - DNA, 25 bp, Artificial
  Probe
gttctggtaccagcagaagccaaac

SEQ ID NO: 286982 - DNA, 25 bp, Artificial
  Probe
tcagactatggatcatgattccatg

SEQ ID NO: 286983 - DNA, 25 bp, Artificial
  Probe
acccaagatacaaggttgcaagagt

SEQ ID NO: 286984 - DNA, 25 bp, Artificial
  Probe
caaggaccaaagttgcttctttact

SEQ ID NO: 286985 - DNA, 25 bp, Artificial
  Probe
gacaaatattcttttcctgttctgg

SEQ ID NO: 286986 - DNA, 25 bp, Artificial
  Probe
gggagactgacacttctgataactt

SEQ ID NO: 286987 - DNA, 25 bp, Artificial
  Probe
tactatgacagcaatttgaacaggg

SEQ ID NO: 286988 - DNA, 25 bp, Artificial
  Probe
aaaccagtgaatttgatctgttctc

SEQ ID NO: 286989 - DNA, 25 bp, Artificial
  Probe
gagactgacacttctgataacttcc

SEQ ID NO: 286990 - DNA, 25 bp, Artificial
  Probe
gttgcttctttactactatgacagc

SEQ ID NO: 286991 - DNA, 25 bp, Artificial
  Probe
ctatggatcatgattccatgttctg

SEQ ID NO: 286992 - DNA, 25 bp, Artificial
  Probe
ctcaaggaccagaagtaggttaaag

SEQ ID NO: 286993 - DNA, 25 bp, Artificial
  Probe
cttttcctgttctggcccttccatg

SEQ ID NO: 286994 - DNA, 25 bp, Artificial
  Probe
aatggttatgcagaacccaagatac

SEQ ID NO: 286995 - DNA, 25 bp, Artificial
  Probe
actgtgtgatcttctgtcttcttgc

SEQ ID NO: 286996 - DNA, 25 bp, Artificial
  Probe
ccagcagaagccaaaccaaggacca

SEQ ID NO: 286997 - DNA, 25 bp, Artificial
  Probe
tgaatttgatctgttctcagactat

SEQ ID NO: 286998 - DNA, 25 bp, Artificial
  Probe
cctaggggattctgccatgtacctc

SEQ ID NO: 286999 - DNA, 25 bp, Artificial
  Probe
gccggcataatacttctttctgctc

SEQ ID NO: 287000 - DNA, 25 bp, Artificial
  Probe
gaagccaaaccaaggaccaaagttg

SEQ ID NO: 287001 - DNA, 25 bp, Artificial
  Probe
agttgcttctttactactatgacag

SEQ ID NO: 287002 - DNA, 25 bp, Artificial
  Probe
ctgttctggcccttccatggatgct

SEQ ID NO: 287003 - DNA, 25 bp, Artificial
  Probe
tatgcagaacccaagatacaaggtt

SEQ ID NO: 287004 - DNA, 25 bp, Artificial
  Probe
gtggccctcaaactcacgctgtagc

SEQ ID NO: 287005 - DNA, 25 bp, Artificial
  Probe
ctgagtggccctcaaactcacgctg

SEQ ID NO: 287006 - DNA, 25 bp, Artificial
  Probe
agtcaaatagacgaggcccagtatt

SEQ ID NO: 287007 - DNA, 25 bp, Artificial
  Probe
agtagaagactcagcactgtacctg

SEQ ID NO: 287008 - DNA, 25 bp, Artificial
  Probe
ctgtagcctgaaaatcagtacttct

SEQ ID NO: 287009 - DNA, 25 bp, Artificial
  Probe
gaatcaacggcctgtcgatcaaata

SEQ ID NO: 287010 - DNA, 25 bp, Artificial
  Probe
tgaattttcttccaggctcttttga

SEQ ID NO: 287011 - DNA, 25 bp, Artificial
  Probe
tgtaaccccgaaaaggatcaccctg

SEQ ID NO: 287012 - DNA, 25 bp, Artificial
  Probe
gagagattctcagctgagtggccct

SEQ ID NO: 287013 - DNA, 25 bp, Artificial
  Probe
taaccccgaaaaggatcaccctgct

SEQ ID NO: 287014 - DNA, 25 bp, Artificial
  Probe
ccaacgtttctctgggccagtgttc

SEQ ID NO: 287015 - DNA, 25 bp, Artificial
  Probe
tctggtatcagcaaaaacagagcaa

SEQ ID NO: 287016 - DNA, 25 bp, Artificial
  Probe
aactcacgctgtagcctgaaaatca

SEQ ID NO: 287017 - DNA, 25 bp, Artificial
  Probe
tttctctgggccagtgttcatgctt

SEQ ID NO: 287018 - DNA, 25 bp, Artificial
  Probe
cacgctgtagcctgaaaatcagtac

SEQ ID NO: 287019 - DNA, 25 bp, Artificial
  Probe
gctgttattcagacgccaagacatt

SEQ ID NO: 287020 - DNA, 25 bp, Artificial
  Probe
agattctcagctgagtggccctcaa

SEQ ID NO: 287021 - DNA, 25 bp, Artificial
  Probe
aggggactcggctctctgttctaga

SEQ ID NO: 287022 - DNA, 25 bp, Artificial
  Probe
gagatgaactgtaaccccgaaaagg

SEQ ID NO: 287023 - DNA, 25 bp, Artificial
  Probe
gctttgtcttgaattttcttccagg

SEQ ID NO: 287024 - DNA, 25 bp, Artificial
  Probe
gtcaaatagacgaggcccagtattt

SEQ ID NO: 287025 - DNA, 25 bp, Artificial
  Probe
tgctgttttctggtatcagcaaaaa

SEQ ID NO: 287026 - DNA, 25 bp, Artificial
  Probe
gttttctggtatcagcaaaaacaga

SEQ ID NO: 287027 - DNA, 25 bp, Artificial
  Probe
gtcttgaattttcttccaggctctt

SEQ ID NO: 287028 - DNA, 25 bp, Artificial
  Probe
tattcagacgccaagacatttgatc

SEQ ID NO: 287029 - DNA, 25 bp, Artificial
  Probe
agacgaggcccagtattttggagag

SEQ ID NO: 287030 - DNA, 25 bp, Artificial
  Probe
ccagcagtcaaatagacgaggccca

SEQ ID NO: 287031 - DNA, 25 bp, Artificial
  Probe
ctgaaaatcagtacttctgaagtag

SEQ ID NO: 287032 - DNA, 25 bp, Artificial
  Probe
agagatgaactgtaaccccgaaaag

SEQ ID NO: 287033 - DNA, 25 bp, Artificial
  Probe
ccgaaaaggatcaccctgctgtttt

SEQ ID NO: 287034 - DNA, 25 bp, Artificial
  Probe
ctttcagaatcaacggcctgtcgat

SEQ ID NO: 287035 - DNA, 25 bp, Artificial
  Probe
cctgaaaatcagtacttctgaagta

SEQ ID NO: 287036 - DNA, 25 bp, Artificial
  Probe
cgccaagacatttgatcaaaatgaa

SEQ ID NO: 287037 - DNA, 25 bp, Artificial
  Probe
gttaaagttcctgatttactttcag

SEQ ID NO: 287038 - DNA, 25 bp, Artificial
  Probe
ctgatttactttcagaatcaacggc

SEQ ID NO: 287039 - DNA, 25 bp, Artificial
  Probe
ctttgtcttgaattttcttccaggc

SEQ ID NO: 287040 - DNA, 25 bp, Artificial
  Probe
ttctcagctgagtggccctcaaact

SEQ ID NO: 287041 - DNA, 25 bp, Artificial
  Probe
tagacgaggcccagtattttggaga

SEQ ID NO: 287042 - DNA, 25 bp, Artificial
  Probe
cagtgttcatgctttgtcttgaatt

SEQ ID NO: 287043 - DNA, 25 bp, Artificial
  Probe
gaattttcttccaggctcttttgat

SEQ ID NO: 287044 - DNA, 25 bp, Artificial
  Probe
tcaaactcacgctgtagcctgaaaa

SEQ ID NO: 287045 - DNA, 25 bp, Artificial
  Probe
tttcttccaggctcttttgatgctg

SEQ ID NO: 287046 - DNA, 25 bp, Artificial
  Probe
aatcagtacttctgaagtagaagac

SEQ ID NO: 287047 - DNA, 25 bp, Artificial
  Probe
aaaggatcaccctgctgttttctgg

SEQ ID NO: 287048 - DNA, 25 bp, Artificial
  Probe
ctgtcgatcaaatagacatggtcaa

SEQ ID NO: 287049 - DNA, 25 bp, Artificial
  Probe
gaagactcagcactgtacctgtgct

SEQ ID NO: 287050 - DNA, 25 bp, Artificial
  Probe
catgcaagggctctgcaaattcggc

SEQ ID NO: 287051 - DNA, 25 bp, Artificial
  Probe
ctggtgcacgatgtgtcgggtcccc

SEQ ID NO: 287052 - DNA, 25 bp, Artificial
  Probe
tctgcagctggtgcacgatgtgtcg

SEQ ID NO: 287053 - DNA, 25 bp, Artificial
  Probe
tggtttggctaaaggatgggcccca

SEQ ID NO: 287054 - DNA, 25 bp, Artificial
  Probe
taagttgtgggctgacacacactgc

SEQ ID NO: 287055 - DNA, 25 bp, Artificial
  Probe
gtatctagctgcttctgccagtgct

SEQ ID NO: 287056 - DNA, 25 bp, Artificial
  Probe
atgaagtcttcaaagccttatatag

SEQ ID NO: 287057 - DNA, 25 bp, Artificial
  Probe
ctccattacattgaaagaagatggc

SEQ ID NO: 287058 - DNA, 25 bp, Artificial
  Probe
aagctgctaaagttcgaattcaaac

SEQ ID NO: 287059 - DNA, 25 bp, Artificial
  Probe
gagacagatcccatacaccatgatg

SEQ ID NO: 287060 - DNA, 25 bp, Artificial
  Probe
gaattcaaacccagcctggctatgc

SEQ ID NO: 287061 - DNA, 25 bp, Artificial
  Probe
cttatatagcaacatacttggtgag

SEQ ID NO: 287062 - DNA, 25 bp, Artificial
  Probe
gtaaaatgccgcatgcaggtggacc

SEQ ID NO: 287063 - DNA, 25 bp, Artificial
  Probe
aaagttcgaattcaaacccagcctg

SEQ ID NO: 287064 - DNA, 25 bp, Artificial
  Probe
ggcttaaatgcgttctacaagggtg

SEQ ID NO: 287065 - DNA, 25 bp, Artificial
  Probe
gccacatctgcagctggtgcacgat

SEQ ID NO: 287066 - DNA, 25 bp, Artificial
  Probe
ctatggaagctgctaaagttcgaat

SEQ ID NO: 287067 - DNA, 25 bp, Artificial
  Probe
gtccccaaaatgtataaagaagaag

SEQ ID NO: 287068 - DNA, 25 bp, Artificial
  Probe
ggctctgcaaattcggcttttatga

SEQ ID NO: 287069 - DNA, 25 bp, Artificial
  Probe
ttcggcttttatgaagtcttcaaag

SEQ ID NO: 287070 - DNA, 25 bp, Artificial
  Probe
tgagggaagctgtccccaaaatgta

SEQ ID NO: 287071 - DNA, 25 bp, Artificial
  Probe
ttcctctggatttagtaaaatgccg

SEQ ID NO: 287072 - DNA, 25 bp, Artificial
  Probe
cggccatcttaggaggatgttctcg

SEQ ID NO: 287073 - DNA, 25 bp, Artificial
  Probe
ctgcttctgccagtgctgagttctt

SEQ ID NO: 287074 - DNA, 25 bp, Artificial
  Probe
ctattccatgcaagggctctgcaaa

SEQ ID NO: 287075 - DNA, 25 bp, Artificial
  Probe
ctttgctgacattgccctggctcct

SEQ ID NO: 287076 - DNA, 25 bp, Artificial
  Probe
tgaggagaacacctatctgtggcgt

SEQ ID NO: 287077 - DNA, 25 bp, Artificial
  Probe
tggctccatgaagtattatgcactg

SEQ ID NO: 287078 - DNA, 25 bp, Artificial
  Probe
cctggctatgccaacacactgaggg

SEQ ID NO: 287079 - DNA, 25 bp, Artificial
  Probe
aatggtttctccattacattgaaag

SEQ ID NO: 287080 - DNA, 25 bp, Artificial
  Probe
acatacttggtgaggagaacaccta

SEQ ID NO: 287081 - DNA, 25 bp, Artificial
  Probe
ctatctgtggcgtacatcactgtat

SEQ ID NO: 287082 - DNA, 25 bp, Artificial
  Probe
gtgcacgatgtgtcgggtccccgca

SEQ ID NO: 287083 - DNA, 25 bp, Artificial
  Probe
attggctattccatgcaagggctct

SEQ ID NO: 287084 - DNA, 25 bp, Artificial
  Probe
atgcgttctacaagggtgttgctcc

SEQ ID NO: 287085 - DNA, 25 bp, Artificial
  Probe
tgcaaattcggcttttatgaagtct

SEQ ID NO: 287086 - DNA, 25 bp, Artificial
  Probe
tagcaacatacttggtgaggagaac

SEQ ID NO: 287087 - DNA, 25 bp, Artificial
  Probe
gaagctgtccccaaaatgtataaag

SEQ ID NO: 287088 - DNA, 25 bp, Artificial
  Probe
tgaagtcttcaaagccttatatagc

SEQ ID NO: 287089 - DNA, 25 bp, Artificial
  Probe
cattgccctggctcctatggaagct

SEQ ID NO: 287090 - DNA, 25 bp, Artificial
  Probe
atctgcagctggtgcacgatgtgtc

SEQ ID NO: 287091 - DNA, 25 bp, Artificial
  Probe
aagccttatatagcaacatacttgg

SEQ ID NO: 287092 - DNA, 25 bp, Artificial
  Probe
aacacctatctgtggcgtacatcac

SEQ ID NO: 287093 - DNA, 25 bp, Artificial
  Probe
gggtcttaagttgtgggctgacaca

SEQ ID NO: 287094 - DNA, 25 bp, Artificial
  Probe
ccctcagaagtacaagggcatattt

SEQ ID NO: 287095 - DNA, 25 bp, Artificial
  Probe
ttcaacgcgccacatctgcagctgg

SEQ ID NO: 287096 - DNA, 25 bp, Artificial
  Probe
ccctctcttgtttcatgtgtatgga

SEQ ID NO: 287097 - DNA, 25 bp, Artificial
  Probe
atggatgtacgctgtcccagtatat

SEQ ID NO: 287098 - DNA, 25 bp, Artificial
  Probe
gtcactgactacctcgcgtatctgg

SEQ ID NO: 287099 - DNA, 25 bp, Artificial
  Probe
ggactctgaatcagccttatacctg

SEQ ID NO: 287100 - DNA, 25 bp, Artificial
  Probe
cagccttatacctgtagttaccctg

SEQ ID NO: 287101 - DNA, 25 bp, Artificial
  Probe
aacctgtttaaaagcaaggactctg

SEQ ID NO: 287102 - DNA, 25 bp, Artificial
  Probe
cgaagaaaagccttttcctcaagtg

SEQ ID NO: 287103 - DNA, 25 bp, Artificial
  Probe
gcttacagtggctgcgatgtccaag

SEQ ID NO: 287104 - DNA, 25 bp, Artificial
  Probe
ggatgtacgctgtcccagtatatgc

SEQ ID NO: 287105 - DNA, 25 bp, Artificial
  Probe
atgtaaagcaggactgcacctggat

SEQ ID NO: 287106 - DNA, 25 bp, Artificial
  Probe
ctgagtcagtacagccagcctgcac

SEQ ID NO: 287107 - DNA, 25 bp, Artificial
  Probe
tctggaagacagtccggcttacagt

SEQ ID NO: 287108 - DNA, 25 bp, Artificial
  Probe
aaagccttttcctcaagtgcggtcg

SEQ ID NO: 287109 - DNA, 25 bp, Artificial
  Probe
ctgccggcagcaaccgttacatgca

SEQ ID NO: 287110 - DNA, 25 bp, Artificial
  Probe
ctgacttggacatggccctgagtca

SEQ ID NO: 287111 - DNA, 25 bp, Artificial
  Probe
ctaaagcgaactaggctgctgggct

SEQ ID NO: 287112 - DNA, 25 bp, Artificial
  Probe
ctggaacaggcctggactctgaatc

SEQ ID NO: 287113 - DNA, 25 bp, Artificial
  Probe
gataccaaaatgaactactgcgtgc

SEQ ID NO: 287114 - DNA, 25 bp, Artificial
  Probe
cagtggctgcgatgtccaagctgtg

SEQ ID NO: 287115 - DNA, 25 bp, Artificial
  Probe
cagctgccggcagcaaccgttacat

SEQ ID NO: 287116 - DNA, 25 bp, Artificial
  Probe
agctgtgcccggtagcagcatatat

SEQ ID NO: 287117 - DNA, 25 bp, Artificial
  Probe
ctgctgggctgctggtggttattca

SEQ ID NO: 287118 - DNA, 25 bp, Artificial
  Probe
aggtacacgaagtgtgcccagctgc

SEQ ID NO: 287119 - DNA, 25 bp, Artificial
  Probe
tatatctggaacaggcctggactct

SEQ ID NO: 287120 - DNA, 25 bp, Artificial
  Probe
ccagaggtacacgaagtgtgcccag

SEQ ID NO: 287121 - DNA, 25 bp, Artificial
  Probe
ctgctggtggttattcatcccctct

SEQ ID NO: 287122 - DNA, 25 bp, Artificial
  Probe
atgtccaagctgtgcccggtagcag

SEQ ID NO: 287123 - DNA, 25 bp, Artificial
  Probe
ttcatgtgtatggatgtacgctgtc

SEQ ID NO: 287124 - DNA, 25 bp, Artificial
  Probe
gcacctggataccaaaatgaactac

SEQ ID NO: 287125 - DNA, 25 bp, Artificial
  Probe
aagtgtgcccagctgccggcagcaa

SEQ ID NO: 287126 - DNA, 25 bp, Artificial
  Probe
tggacatggccctgagtcagtacag

SEQ ID NO: 287127 - DNA, 25 bp, Artificial
  Probe
tgtgtatggatgtacgctgtcccag

SEQ ID NO: 287128 - DNA, 25 bp, Artificial
  Probe
tatatgcactgctccggggagcagg

SEQ ID NO: 287129 - DNA, 25 bp, Artificial
  Probe
agacagtccggcttacagtggctgc

SEQ ID NO: 287130 - DNA, 25 bp, Artificial
  Probe
tccggcttacagtggctgcgatgtc

SEQ ID NO: 287131 - DNA, 25 bp, Artificial
  Probe
tctgaatcagccttatacctgtagt

SEQ ID NO: 287132 - DNA, 25 bp, Artificial
  Probe
cgaagtgtgcccagctgccggcagc

SEQ ID NO: 287133 - DNA, 25 bp, Artificial
  Probe
gactacctcgcgtatctggaagaca

SEQ ID NO: 287134 - DNA, 25 bp, Artificial
  Probe
ctactgcgtgccagaggtacacgaa

SEQ ID NO: 287135 - DNA, 25 bp, Artificial
  Probe
ctctcttgtttcatgtgtatggatg

SEQ ID NO: 287136 - DNA, 25 bp, Artificial
  Probe
ccaaaatgaactactgcgtgccaga

SEQ ID NO: 287137 - DNA, 25 bp, Artificial
  Probe
gtcagtacagccagcctgcacatct

SEQ ID NO: 287138 - DNA, 25 bp, Artificial
  Probe
gaagaaaagccttttcctcaagtgc

SEQ ID NO: 287139 - DNA, 25 bp, Artificial
  Probe
gccttatacctgtagttaccctgga

SEQ ID NO: 287140 - DNA, 25 bp, Artificial
  Probe
gtacacgaagtgtgcccagctgccg

SEQ ID NO: 287141 - DNA, 25 bp, Artificial
  Probe
tttaaaagcaaggactctgacttgg

SEQ ID NO: 287142 - DNA, 25 bp, Artificial
  Probe
gagaattccgcttcggtggagcagc

SEQ ID NO: 287143 - DNA, 25 bp, Artificial
  Probe
accctgaacaacatgcattccgaga

SEQ ID NO: 287144 - DNA, 25 bp, Artificial
  Probe
agaagctgctgtccttccgggtgga

SEQ ID NO: 287145 - DNA, 25 bp, Artificial
  Probe
tcgatttgttctgttcctgtctcaa

SEQ ID NO: 287146 - DNA, 25 bp, Artificial
  Probe
ccgagaagctgctgtccttccgggt

SEQ ID NO: 287147 - DNA, 25 bp, Artificial
  Probe
tactgaggaggagctgggccttttc

SEQ ID NO: 287148 - DNA, 25 bp, Artificial
  Probe
tctctctcctttacgagacgaaaag

SEQ ID NO: 287149 - DNA, 25 bp, Artificial
  Probe
ttactgaggaggagctgggcctttt

SEQ ID NO: 287150 - DNA, 25 bp, Artificial
  Probe
cctgcggaccctgaacaacatgcat

SEQ ID NO: 287151 - DNA, 25 bp, Artificial
  Probe
acggcagtggtacttgtctctgcag

SEQ ID NO: 287152 - DNA, 25 bp, Artificial
  Probe
catgcattccgagaagctgctgtcc

SEQ ID NO: 287153 - DNA, 25 bp, Artificial
  Probe
gcattccgagaagctgctgtccttc

SEQ ID NO: 287154 - DNA, 25 bp, Artificial
  Probe
ggaccctgaacaacatgcattccga

SEQ ID NO: 287155 - DNA, 25 bp, Artificial
  Probe
gatttgttctgttcctgtctcaaat

SEQ ID NO: 287156 - DNA, 25 bp, Artificial
  Probe
ctgggccttttcacggcagtggtac

SEQ ID NO: 287157 - DNA, 25 bp, Artificial
  Probe
agctgggccttttcacggcagtggt

SEQ ID NO: 287158 - DNA, 25 bp, Artificial
  Probe
aagctgctgtccttccgggtggacg

SEQ ID NO: 287159 - DNA, 25 bp, Artificial
  Probe
gaagctgctgtccttccgggtggac

SEQ ID NO: 287160 - DNA, 25 bp, Artificial
  Probe
tccttccgggtggacgcccagtgac

SEQ ID NO: 287161 - DNA, 25 bp, Artificial
  Probe
ttcacggcagtggtacttgtctctg

SEQ ID NO: 287162 - DNA, 25 bp, Artificial
  Probe
cttttcacggcagtggtacttgtct

SEQ ID NO: 287163 - DNA, 25 bp, Artificial
  Probe
agctgctgtccttccgggtggacgc

SEQ ID NO: 287164 - DNA, 25 bp, Artificial
  Probe
ttccgagaagctgctgtccttccgg

SEQ ID NO: 287165 - DNA, 25 bp, Artificial
  Probe
acctgcggaccctgaacaacatgca

SEQ ID NO: 287166 - DNA, 25 bp, Artificial
  Probe
tctctcctttacgagacgaaaagga

SEQ ID NO: 287167 - DNA, 25 bp, Artificial
  Probe
gctgggccttttcacggcagtggta

SEQ ID NO: 287168 - DNA, 25 bp, Artificial
  Probe
aggagctgggccttttcacggcagt

SEQ ID NO: 287169 - DNA, 25 bp, Artificial
  Probe
gtccttccgggtggacgcccagtga

SEQ ID NO: 287170 - DNA, 25 bp, Artificial
  Probe
tgtccttccgggtggacgcccagtg

SEQ ID NO: 287171 - DNA, 25 bp, Artificial
  Probe
cggaccctgaacaacatgcattccg

SEQ ID NO: 287172 - DNA, 25 bp, Artificial
  Probe
gaccctgaacaacatgcattccgag

SEQ ID NO: 287173 - DNA, 25 bp, Artificial
  Probe
cgatttgttctgttcctgtctcaaa

SEQ ID NO: 287174 - DNA, 25 bp, Artificial
  Probe
tgaacaacatgcattccgagaagct

SEQ ID NO: 287175 - DNA, 25 bp, Artificial
  Probe
tgcggaccctgaacaacatgcattc

SEQ ID NO: 287176 - DNA, 25 bp, Artificial
  Probe
tcacggcagtggtacttgtctctgc

SEQ ID NO: 287177 - DNA, 25 bp, Artificial
  Probe
tgcattccgagaagctgctgtcctt

SEQ ID NO: 287178 - DNA, 25 bp, Artificial
  Probe
actgaggaggagctgggccttttca

SEQ ID NO: 287179 - DNA, 25 bp, Artificial
  Probe
ttttcacggcagtggtacttgtctc

SEQ ID NO: 287180 - DNA, 25 bp, Artificial
  Probe
ctgaggaggagctgggccttttcac

SEQ ID NO: 287181 - DNA, 25 bp, Artificial
  Probe
cattccgagaagctgctgtccttcc

SEQ ID NO: 287182 - DNA, 25 bp, Artificial
  Probe
cgagaagctgctgtccttccgggtg

SEQ ID NO: 287183 - DNA, 25 bp, Artificial
  Probe
ccttttcacggcagtggtacttgtc

SEQ ID NO: 287184 - DNA, 25 bp, Artificial
  Probe
cggcagtggtacttgtctctgcaga

SEQ ID NO: 287185 - DNA, 25 bp, Artificial
  Probe
gcggaccctgaacaacatgcattcc

SEQ ID NO: 287186 - DNA, 25 bp, Artificial
  Probe
atgcattccgagaagctgctgtcct

SEQ ID NO: 287187 - DNA, 25 bp, Artificial
  Probe
gaacaacatgcattccgagaagctg

SEQ ID NO: 287188 - DNA, 25 bp, Artificial
  Probe
ccttgctggaactggataaaccttt

SEQ ID NO: 287189 - DNA, 25 bp, Artificial
  Probe
tgcaggttaccgtgaaggaggcaaa

SEQ ID NO: 287190 - DNA, 25 bp, Artificial
  Probe
gggagacaggcttccattcttcagt

SEQ ID NO: 287191 - DNA, 25 bp, Artificial
  Probe
aggcttccattcttcagtaccttag

SEQ ID NO: 287192 - DNA, 25 bp, Artificial
  Probe
ggaaagtcttcaacaaagggagaca

SEQ ID NO: 287193 - DNA, 25 bp, Artificial
  Probe
tcttcagtaccttagagttccactg

SEQ ID NO: 287194 - DNA, 25 bp, Artificial
  Probe
actggttgaccgagccacatgcctt

SEQ ID NO: 287195 - DNA, 25 bp, Artificial
  Probe
atatactaaggtttccaggtatgtc

SEQ ID NO: 287196 - DNA, 25 bp, Artificial
  Probe
catgccttaggtccacaaaattcag

SEQ ID NO: 287197 - DNA, 25 bp, Artificial
  Probe
ataacaacatgttctgtgcaggtta

SEQ ID NO: 287198 - DNA, 25 bp, Artificial
  Probe
gttgaccgagccacatgccttaggt

SEQ ID NO: 287199 - DNA, 25 bp, Artificial
  Probe
tgggggaccccatgttactgaagta

SEQ ID NO: 287200 - DNA, 25 bp, Artificial
  Probe
ctgtcttaaacctggtgataaaatt

SEQ ID NO: 287201 - DNA, 25 bp, Artificial
  Probe
cctcaagtttggttctggttatgtg

SEQ ID NO: 287202 - DNA, 25 bp, Artificial
  Probe
tctgtgttgccaataaggaatatac

SEQ ID NO: 287203 - DNA, 25 bp, Artificial
  Probe
actgctgcccactgtcttaaacctg

SEQ ID NO: 287204 - DNA, 25 bp, Artificial
  Probe
ttaccgtgaaggaggcaaagattca

SEQ ID NO: 287205 - DNA, 25 bp, Artificial
  Probe
gggaccccatgttactgaagtagaa

SEQ ID NO: 287206 - DNA, 25 bp, Artificial
  Probe
gagccacatgccttaggtccacaaa

SEQ ID NO: 287207 - DNA, 25 bp, Artificial
  Probe
aagtttcttaactggcattattagc

SEQ ID NO: 287208 - DNA, 25 bp, Artificial
  Probe
ggcgccatcattaatgaaaaatgga

SEQ ID NO: 287209 - DNA, 25 bp, Artificial
  Probe
catgacattgccttgctggaactgg

SEQ ID NO: 287210 - DNA, 25 bp, Artificial
  Probe
aatatcttcctcaagtttggttctg

SEQ ID NO: 287211 - DNA, 25 bp, Artificial
  Probe
gacaggcttccattcttcagtacct

SEQ ID NO: 287212 - DNA, 25 bp, Artificial
  Probe
gccacatgccttaggtccacaaaat

SEQ ID NO: 287213 - DNA, 25 bp, Artificial
  Probe
aacagctatgtaacacctatctgtg

SEQ ID NO: 287214 - DNA, 25 bp, Artificial
  Probe
acaacatgttctgtgcaggttaccg

SEQ ID NO: 287215 - DNA, 25 bp, Artificial
  Probe
gggacaagtttcttaactggcatta

SEQ ID NO: 287216 - DNA, 25 bp, Artificial
  Probe
ttcttaactggcattattagctggg

SEQ ID NO: 287217 - DNA, 25 bp, Artificial
  Probe
gattgtaactgctgcccactgtctt

SEQ ID NO: 287218 - DNA, 25 bp, Artificial
  Probe
tagtcatgacattgccttgctggaa

SEQ ID NO: 287219 - DNA, 25 bp, Artificial
  Probe
gaccgagccacatgccttaggtcca

SEQ ID NO: 287220 - DNA, 25 bp, Artificial
  Probe
acctatctgtgttgccaataaggaa

SEQ ID NO: 287221 - DNA, 25 bp, Artificial
  Probe
caggttaccgtgaaggaggcaaaga

SEQ ID NO: 287222 - DNA, 25 bp, Artificial
  Probe
ctataacaacatgttctgtgcaggt

SEQ ID NO: 287223 - DNA, 25 bp, Artificial
  Probe
tggattgtaactgctgcccactgtc

SEQ ID NO: 287224 - DNA, 25 bp, Artificial
  Probe
cttaactggcattattagctggggt

SEQ ID NO: 287225 - DNA, 25 bp, Artificial
  Probe
agtcttcaacaaagggagacaggct

SEQ ID NO: 287226 - DNA, 25 bp, Artificial
  Probe
aacacctatctgtgttgccaataag

SEQ ID NO: 287227 - DNA, 25 bp, Artificial
  Probe
ttctgtgcaggttaccgtgaaggag

SEQ ID NO: 287228 - DNA, 25 bp, Artificial
  Probe
gcttccattcttcagtaccttagag

SEQ ID NO: 287229 - DNA, 25 bp, Artificial
  Probe
gccttaggtccacaaaattcagcat

SEQ ID NO: 287230 - DNA, 25 bp, Artificial
  Probe
gctgcccactgtcttaaacctggtg

SEQ ID NO: 287231 - DNA, 25 bp, Artificial
  Probe
gtatagtcatgacattgccttgctg

SEQ ID NO: 287232 - DNA, 25 bp, Artificial
  Probe
gttaccgtgaaggaggcaaagattc

SEQ ID NO: 287233 - DNA, 25 bp, Artificial
  Probe
ttccactggttgaccgagccacatg

SEQ ID NO: 287234 - DNA, 25 bp, Artificial
  Probe
gaacttattggctcttaggagagcg

SEQ ID NO: 287235 - DNA, 25 bp, Artificial
  Probe
gtcaagctctaaagatccatgtctc

SEQ ID NO: 287236 - DNA, 25 bp, Artificial
  Probe
tggctcttaggagagcgaaaaggac

SEQ ID NO: 287237 - DNA, 25 bp, Artificial
  Probe
atgagctaggatgcttccagctaga

SEQ ID NO: 287238 - DNA, 25 bp, Artificial
  Probe
tacgcataggcgtccatactgggcc

SEQ ID NO: 287239 - DNA, 25 bp, Artificial
  Probe
gcgaaaaggacctcctggactcctg

SEQ ID NO: 287240 - DNA, 25 bp, Artificial
  Probe
aatgcgaacttattggctcttagga

SEQ ID NO: 287241 - DNA, 25 bp, Artificial
  Probe
gggcaatggtcactgtgtctccact

SEQ ID NO: 287242 - DNA, 25 bp, Artificial
  Probe
gtaaatacctgtatctagaccagaa

SEQ ID NO: 287243 - DNA, 25 bp, Artificial
  Probe
cttgctgttggtacttggatgggca

SEQ ID NO: 287244 - DNA, 25 bp, Artificial
  Probe
agagcgaaaaggacctcctggactc

SEQ ID NO: 287245 - DNA, 25 bp, Artificial
  Probe
ccatactgggccagtctgtgctggg

SEQ ID NO: 287246 - DNA, 25 bp, Artificial
  Probe
cttattggctcttaggagagcgaaa

SEQ ID NO: 287247 - DNA, 25 bp, Artificial
  Probe
gctcagccttgtacatatgcctgcc

SEQ ID NO: 287248 - DNA, 25 bp, Artificial
  Probe
ccctgccttatctggaagtcatata

SEQ ID NO: 287249 - DNA, 25 bp, Artificial
  Probe
gccttctgtaaatacctgtatctag

SEQ ID NO: 287250 - DNA, 25 bp, Artificial
  Probe
cctgtatctagaccagaatattttg

SEQ ID NO: 287251 - DNA, 25 bp, Artificial
  Probe
gatgccctggatgagctaggatgct

SEQ ID NO: 287252 - DNA, 25 bp, Artificial
  Probe
gactcctgtaaatcccaagcagaca

SEQ ID NO: 287253 - DNA, 25 bp, Artificial
  Probe
ccttatctggaagtcatataagccc

SEQ ID NO: 287254 - DNA, 25 bp, Artificial
  Probe
cagaaacagacgtcatatgagatgg

SEQ ID NO: 287255 - DNA, 25 bp, Artificial
  Probe
atcccaagcagacaatttcttgctg

SEQ ID NO: 287256 - DNA, 25 bp, Artificial
  Probe
tcttgctgttggtacttggatgggc

SEQ ID NO: 287257 - DNA, 25 bp, Artificial
  Probe
tctagaccagaatattttgtccaag

SEQ ID NO: 287258 - DNA, 25 bp, Artificial
  Probe
cccaagcagacaatttcttgctgtt

SEQ ID NO: 287259 - DNA, 25 bp, Artificial
  Probe
caatttcttgctgttggtacttgga

SEQ ID NO: 287260 - DNA, 25 bp, Artificial
  Probe
taatggtcaagctctaaagatccat

SEQ ID NO: 287261 - DNA, 25 bp, Artificial
  Probe
tgccgctcagccttgtacatatgcc

SEQ ID NO: 287262 - DNA, 25 bp, Artificial
  Probe
atgcgaacttattggctcttaggag

SEQ ID NO: 287263 - DNA, 25 bp, Artificial
  Probe
aaggacctcctggactcctgtaaat

SEQ ID NO: 287264 - DNA, 25 bp, Artificial
  Probe
ctaaggttacgcataggcgtccata

SEQ ID NO: 287265 - DNA, 25 bp, Artificial
  Probe
ccagctaaggttacgcataggcgtc

SEQ ID NO: 287266 - DNA, 25 bp, Artificial
  Probe
aaggttacgcataggcgtccatact

SEQ ID NO: 287267 - DNA, 25 bp, Artificial
  Probe
ttatctggaagtcatataagccctc

SEQ ID NO: 287268 - DNA, 25 bp, Artificial
  Probe
aggacctcctggactcctgtaaatc

SEQ ID NO: 287269 - DNA, 25 bp, Artificial
  Probe
ccaaggatgccctggatgagctagg

SEQ ID NO: 287270 - DNA, 25 bp, Artificial
  Probe
atcttggtcctcttcctgccttctg

SEQ ID NO: 287271 - DNA, 25 bp, Artificial
  Probe
aggcgtccatactgggccagtctgt

SEQ ID NO: 287272 - DNA, 25 bp, Artificial
  Probe
ttggtcctcttcctgccttctgtaa

SEQ ID NO: 287273 - DNA, 25 bp, Artificial
  Probe
ggaagtcatataagccctctgccgc

SEQ ID NO: 287274 - DNA, 25 bp, Artificial
  Probe
ccctggatgagctaggatgcttcca

SEQ ID NO: 287275 - DNA, 25 bp, Artificial
  Probe
cttccagctagaactccgtggggat

SEQ ID NO: 287276 - DNA, 25 bp, Artificial
  Probe
ctgtaaatacctgtatctagaccag

SEQ ID NO: 287277 - DNA, 25 bp, Artificial
  Probe
acgaccagctaaggttacgcatagg

SEQ ID NO: 287278 - DNA, 25 bp, Artificial
  Probe
ctcctggactcctgtaaatcccaag

SEQ ID NO: 287279 - DNA, 25 bp, Artificial
  Probe
acttggatgggcaatggtcactgtg

SEQ ID NO: 287280 - DNA, 25 bp, Artificial
  Probe
atccctcaaagatgcccattaaggt

SEQ ID NO: 287281 - DNA, 25 bp, Artificial
  Probe
agtcatcatggatccctgcctgtgg

SEQ ID NO: 287282 - DNA, 25 bp, Artificial
  Probe
cagcacaagccgtgactcttcctgg

SEQ ID NO: 287283 - DNA, 25 bp, Artificial
  Probe
cgctttgagttctccctggatccct

SEQ ID NO: 287284 - DNA, 25 bp, Artificial
  Probe
ccaggaattgcatcgggcagcagtt

SEQ ID NO: 287285 - DNA, 25 bp, Artificial
  Probe
caacgcccaggctccagaacttatt

SEQ ID NO: 287286 - DNA, 25 bp, Artificial
  Probe
aatgtggagtcatcatggatccctg

SEQ ID NO: 287287 - DNA, 25 bp, Artificial
  Probe
aaagcatggacactgacagtctcct

SEQ ID NO: 287288 - DNA, 25 bp, Artificial
  Probe
ctgatcttgcgctccaaaaatggta

SEQ ID NO: 287289 - DNA, 25 bp, Artificial
  Probe
atgaaggtggtcacagccctttgtt

SEQ ID NO: 287290 - DNA, 25 bp, Artificial
  Probe
caaagatgcccattaaggtccccca

SEQ ID NO: 287291 - DNA, 25 bp, Artificial
  Probe
ttcctgggatgttgccctcctagat

SEQ ID NO: 287292 - DNA, 25 bp, Artificial
  Probe
gttctccctggatccctcaaagatg

SEQ ID NO: 287293 - DNA, 25 bp, Artificial
  Probe
tccacaacatttgctgaacgttttg

SEQ ID NO: 287294 - DNA, 25 bp, Artificial
  Probe
cattctcttgtaaacatgtgtgtgg

SEQ ID NO: 287295 - DNA, 25 bp, Artificial
  Probe
gcctttttctgcagggcccaggaat

SEQ ID NO: 287296 - DNA, 25 bp, Artificial
  Probe
ctgggcagcacaagccgtgactctt

SEQ ID NO: 287297 - DNA, 25 bp, Artificial
  Probe
aagtaggtcttcagagaactaggcc

SEQ ID NO: 287298 - DNA, 25 bp, Artificial
  Probe
aaatggtatccacctctacctgaag

SEQ ID NO: 287299 - DNA, 25 bp, Artificial
  Probe
tggtcacagccctttgtttactgcg

SEQ ID NO: 287300 - DNA, 25 bp, Artificial
  Probe
ctaggcctgggcagcacaagccgtg

SEQ ID NO: 287301 - DNA, 25 bp, Artificial
  Probe
tggtatccacctctacctgaagccg

SEQ ID NO: 287302 - DNA, 25 bp, Artificial
  Probe
ccatcttggtgtgtatttggaatac

SEQ ID NO: 287303 - DNA, 25 bp, Artificial
  Probe
gaaggtggtcacagccctttgttta

SEQ ID NO: 287304 - DNA, 25 bp, Artificial
  Probe
gccttgagaaactccattgatttca

SEQ ID NO: 287305 - DNA, 25 bp, Artificial
  Probe
gaagccgctggcttctaggtctgga

SEQ ID NO: 287306 - DNA, 25 bp, Artificial
  Probe
tcaaagatgcccattaaggtccccc

SEQ ID NO: 287307 - DNA, 25 bp, Artificial
  Probe
tgcgctccaaaaatggtatccacct

SEQ ID NO: 287308 - DNA, 25 bp, Artificial
  Probe
gagaaactccattgatttcacatag

SEQ ID NO: 287309 - DNA, 25 bp, Artificial
  Probe
ccctttgtttactgcgctttgagtt

SEQ ID NO: 287310 - DNA, 25 bp, Artificial
  Probe
gagaactaggcctgggcagcacaag

SEQ ID NO: 287311 - DNA, 25 bp, Artificial
  Probe
gggatgttgccctcctagatagaat

SEQ ID NO: 287312 - DNA, 25 bp, Artificial
  Probe
gcccaggaattgcatcgggcagcag

SEQ ID NO: 287313 - DNA, 25 bp, Artificial
  Probe
cgtgactcttcctgggatgttgccc

SEQ ID NO: 287314 - DNA, 25 bp, Artificial
  Probe
ttgagttctccctggatccctcaaa

SEQ ID NO: 287315 - DNA, 25 bp, Artificial
  Probe
tggaatgattcaacgcccaggctcc

SEQ ID NO: 287316 - DNA, 25 bp, Artificial
  Probe
tgtttactgcgctttgagttctccc

SEQ ID NO: 287317 - DNA, 25 bp, Artificial
  Probe
ttctaggtctggaaagtaggtcttc

SEQ ID NO: 287318 - DNA, 25 bp, Artificial
  Probe
tgaacgttttgctgccttgagaaac

SEQ ID NO: 287319 - DNA, 25 bp, Artificial
  Probe
cccagctgatcttgcgctccaaaaa

SEQ ID NO: 287320 - DNA, 25 bp, Artificial
  Probe
cctggatccctcaaagatgcccatt

SEQ ID NO: 287321 - DNA, 25 bp, Artificial
  Probe
cgcccaggctccagaacttatttct

SEQ ID NO: 287322 - DNA, 25 bp, Artificial
  Probe
agaatgtggagtcatcatggatccc

SEQ ID NO: 287323 - DNA, 25 bp, Artificial
  Probe
ctcctagatagaatgtggagtcatc

SEQ ID NO: 287324 - DNA, 25 bp, Artificial
  Probe
cttcagagaactaggcctgggcagc

SEQ ID NO: 287325 - DNA, 25 bp, Artificial
  Probe
actcttcctgggatgttgccctcct

SEQ ID NO: 287326 - DNA, 25 bp, Artificial
  Probe
gcttcactcacacaagcctggtaac

SEQ ID NO: 287327 - DNA, 25 bp, Artificial
  Probe
ggtgtgttttgtcttgcatgtagcc

SEQ ID NO: 287328 - DNA, 25 bp, Artificial
  Probe
ctaagaatcggcaagcccactgctg

SEQ ID NO: 287329 - DNA, 25 bp, Artificial
  Probe
tgcatgtagccctctctgcagaggg

SEQ ID NO: 287330 - DNA, 25 bp, Artificial
  Probe
ggtctcagaagatgctagaggaaac

SEQ ID NO: 287331 - DNA, 25 bp, Artificial
  Probe
acttttagagaagcagtctgaagca

SEQ ID NO: 287332 - DNA, 25 bp, Artificial
  Probe
gaactctaagaatcggcaagcccac

SEQ ID NO: 287333 - DNA, 25 bp, Artificial
  Probe
ctcacacaagcctggtaacatctgg

SEQ ID NO: 287334 - DNA, 25 bp, Artificial
  Probe
cccagcaatgggtcagaggagcaaa

SEQ ID NO: 287335 - DNA, 25 bp, Artificial
  Probe
ccatcctggagtagggataattttg

SEQ ID NO: 287336 - DNA, 25 bp, Artificial
  Probe
ttcatttagggagtctgtcaggaac

SEQ ID NO: 287337 - DNA, 25 bp, Artificial
  Probe
tagggataattttgcccaggagccc

SEQ ID NO: 287338 - DNA, 25 bp, Artificial
  Probe
taagaatcggcaagcccactgctgc

SEQ ID NO: 287339 - DNA, 25 bp, Artificial
  Probe
gacagctgtaagtggtctcagaaga

SEQ ID NO: 287340 - DNA, 25 bp, Artificial
  Probe
tttagagaagcagtctgaagcactg

SEQ ID NO: 287341 - DNA, 25 bp, Artificial
  Probe
ccactgctgccgtctccttaagagt

SEQ ID NO: 287342 - DNA, 25 bp, Artificial
  Probe
agaagcagtctgaagcactgtggag

SEQ ID NO: 287343 - DNA, 25 bp, Artificial
  Probe
caatgggtcagaggagcaaaacgac

SEQ ID NO: 287344 - DNA, 25 bp, Artificial
  Probe
aggaacttgggcaggagtccacact

SEQ ID NO: 287345 - DNA, 25 bp, Artificial
  Probe
tgtcttgcatgtagccctctctgca

SEQ ID NO: 287346 - DNA, 25 bp, Artificial
  Probe
gagcaaaacgacgacagctgtaagt

SEQ ID NO: 287347 - DNA, 25 bp, Artificial
  Probe
catttagggagtctgtcaggaactt

SEQ ID NO: 287348 - DNA, 25 bp, Artificial
  Probe
gagtccacactaagggaagcttact

SEQ ID NO: 287349 - DNA, 25 bp, Artificial
  Probe
cccaggagccccagcaatgggtcag

SEQ ID NO: 287350 - DNA, 25 bp, Artificial
  Probe
tgtagccctctctgcagagggcctg

SEQ ID NO: 287351 - DNA, 25 bp, Artificial
  Probe
catgagaacccctagtttaagactt

SEQ ID NO: 287352 - DNA, 25 bp, Artificial
  Probe
tgtggagatgtggtcccatcgccat

SEQ ID NO: 287353 - DNA, 25 bp, Artificial
  Probe
tctgtcaggaacttgggcaggagtc

SEQ ID NO: 287354 - DNA, 25 bp, Artificial
  Probe
taattttgcccaggagccccagcaa

SEQ ID NO: 287355 - DNA, 25 bp, Artificial
  Probe
ctgtcaggaacttgggcaggagtcc

SEQ ID NO: 287356 - DNA, 25 bp, Artificial
  Probe
caggagccccagcaatgggtcagag

SEQ ID NO: 287357 - DNA, 25 bp, Artificial
  Probe
ctggcttcactcacacaagcctggt

SEQ ID NO: 287358 - DNA, 25 bp, Artificial
  Probe
gaggactcatgagaacccctagttt

SEQ ID NO: 287359 - DNA, 25 bp, Artificial
  Probe
agatgtggtcccatcgccatcctgg

SEQ ID NO: 287360 - DNA, 25 bp, Artificial
  Probe
ctgcagagggcctggcttcactcac

SEQ ID NO: 287361 - DNA, 25 bp, Artificial
  Probe
cccatcgccatcctggagtagggat

SEQ ID NO: 287362 - DNA, 25 bp, Artificial
  Probe
tagtccggctgctggctgagttgta

SEQ ID NO: 287363 - DNA, 25 bp, Artificial
  Probe
agggcctggcttcactcacacaagc

SEQ ID NO: 287364 - DNA, 25 bp, Artificial
  Probe
gatgtggtcccatcgccatcctgga

SEQ ID NO: 287365 - DNA, 25 bp, Artificial
  Probe
cccaaacagtggtgctgggtggaaa

SEQ ID NO: 287366 - DNA, 25 bp, Artificial
  Probe
taagggaagcttacttcccaaacag

SEQ ID NO: 287367 - DNA, 25 bp, Artificial
  Probe
gccctctctgcagagggcctggctt

SEQ ID NO: 287368 - DNA, 25 bp, Artificial
  Probe
ggactcatgagaacccctagtttaa

SEQ ID NO: 287369 - DNA, 25 bp, Artificial
  Probe
agagggcctggcttcactcacacaa

SEQ ID NO: 287370 - DNA, 25 bp, Artificial
  Probe
attttgcccaggagccccagcaatg

SEQ ID NO: 287371 - DNA, 25 bp, Artificial
  Probe
ccttaagagttcatttagggagtct

SEQ ID NO: 287372 - DNA, 25 bp, Artificial
  Probe
gctttttccagctaggcttttttgc

SEQ ID NO: 287373 - DNA, 25 bp, Artificial
  Probe
cacctcaggatcagcctctgggcag

SEQ ID NO: 287374 - DNA, 25 bp, Artificial
  Probe
acatccgctgggaagaagctgcaag

SEQ ID NO: 287375 - DNA, 25 bp, Artificial
  Probe
cagctgacagagatggcctgaagga

SEQ ID NO: 287376 - DNA, 25 bp, Artificial
  Probe
gcaaacattgattctactggaccat

SEQ ID NO: 287377 - DNA, 25 bp, Artificial
  Probe
ggatccagaggatggcagctacttc

SEQ ID NO: 287378 - DNA, 25 bp, Artificial
  Probe
tggatttggggctcaatctgctacc

SEQ ID NO: 287379 - DNA, 25 bp, Artificial
  Probe
ccagagactgccttctgcaaacatt

SEQ ID NO: 287380 - DNA, 25 bp, Artificial
  Probe
caactacctaggaagagctttccag

SEQ ID NO: 287381 - DNA, 25 bp, Artificial
  Probe
ccagctgaagggaccatgacaaggg

SEQ ID NO: 287382 - DNA, 25 bp, Artificial
  Probe
cctgaaggagcaactgaggggatac

SEQ ID NO: 287383 - DNA, 25 bp, Artificial
  Probe
caaggaatttgcttggcctcctcga

SEQ ID NO: 287384 - DNA, 25 bp, Artificial
  Probe
cagtgatgctcaaaatgctaagttg

SEQ ID NO: 287385 - DNA, 25 bp, Artificial
  Probe
gaggatggcagctacttcagtgatg

SEQ ID NO: 287386 - DNA, 25 bp, Artificial
  Probe
tgctcaaaatgctaagttggtagac

SEQ ID NO: 287387 - DNA, 25 bp, Artificial
  Probe
agagatggcctgaaggagcaactga

SEQ ID NO: 287388 - DNA, 25 bp, Artificial
  Probe
gacaagggcggcttccaaggagcaa

SEQ ID NO: 287389 - DNA, 25 bp, Artificial
  Probe
gaccatcaacaagattccctttgtg

SEQ ID NO: 287390 - DNA, 25 bp, Artificial
  Probe
ctctgggcagtctccagcctacttg

SEQ ID NO: 287391 - DNA, 25 bp, Artificial
  Probe
tctgctccaggttctcaaggggaag

SEQ ID NO: 287392 - DNA, 25 bp, Artificial
  Probe
gggcggcttccaaggagcaaaacaa

SEQ ID NO: 287393 - DNA, 25 bp, Artificial
  Probe
agccacctcaggatcagcctctggg

SEQ ID NO: 287394 - DNA, 25 bp, Artificial
  Probe
tgatttttgagcagcatcttctggt

SEQ ID NO: 287395 - DNA, 25 bp, Artificial
  Probe
agcctacttgggatccagaggatgg

SEQ ID NO: 287396 - DNA, 25 bp, Artificial
  Probe
gattctactggaccatcaacaagat

SEQ ID NO: 287397 - DNA, 25 bp, Artificial
  Probe
tccagctaggcttttttgctgattg

SEQ ID NO: 287398 - DNA, 25 bp, Artificial
  Probe
agctgcaaggaatttgcttggcctc

SEQ ID NO: 287399 - DNA, 25 bp, Artificial
  Probe
ggatacatccgctgggaagaagctg

SEQ ID NO: 287400 - DNA, 25 bp, Artificial
  Probe
tgctgattggatttggggctcaatc

SEQ ID NO: 287401 - DNA, 25 bp, Artificial
  Probe
ttgattctactggaccatcaacaag

SEQ ID NO: 287402 - DNA, 25 bp, Artificial
  Probe
gactgccttctgcaaacattgattc

SEQ ID NO: 287403 - DNA, 25 bp, Artificial
  Probe
acagagatggcctgaaggagcaact

SEQ ID NO: 287404 - DNA, 25 bp, Artificial
  Probe
atccgctgggaagaagctgcaagga

SEQ ID NO: 287405 - DNA, 25 bp, Artificial
  Probe
cctaggaagagctttccagtgaacg

SEQ ID NO: 287406 - DNA, 25 bp, Artificial
  Probe
gaaggaactgccagctgaagggacc

SEQ ID NO: 287407 - DNA, 25 bp, Artificial
  Probe
gggaccatgacaagggcggcttcca

SEQ ID NO: 287408 - DNA, 25 bp, Artificial
  Probe
cttctgcaaacattgattctactgg

SEQ ID NO: 287409 - DNA, 25 bp, Artificial
  Probe
caagattccctttgtgcaatttacg

SEQ ID NO: 287410 - DNA, 25 bp, Artificial
  Probe
aaggaatttgcttggcctcctcgaa

SEQ ID NO: 287411 - DNA, 25 bp, Artificial
  Probe
gattccctttgtgcaatttacgtaa

SEQ ID NO: 287412 - DNA, 25 bp, Artificial
  Probe
aggatcagcctctgggcagtctcca

SEQ ID NO: 287413 - DNA, 25 bp, Artificial
  Probe
aagggaccatgacaagggcggcttc

SEQ ID NO: 287414 - DNA, 25 bp, Artificial
  Probe
ctgaaggagcaactgaggggataca

SEQ ID NO: 287415 - DNA, 25 bp, Artificial
  Probe
cagctaggcttttttgctgattgga

SEQ ID NO: 287416 - DNA, 25 bp, Artificial
  Probe
ctaagttggtagactctctgctcca

SEQ ID NO: 287417 - DNA, 25 bp, Artificial
  Probe
tggaccatcaacaagattccctttg

SEQ ID NO: 287418 - DNA, 25 bp, Artificial
  Probe
tggcttttaccttccttaaggtgct

SEQ ID NO: 287419 - DNA, 25 bp, Artificial
  Probe
aaattgatgctttccgagcctccct

SEQ ID NO: 287420 - DNA, 25 bp, Artificial
  Probe
caaagactggccaagctactgtggc

SEQ ID NO: 287421 - DNA, 25 bp, Artificial
  Probe
cagagcccacagttccatggtgggt

SEQ ID NO: 287422 - DNA, 25 bp, Artificial
  Probe
cctgttgactttgtcactgctgaca

SEQ ID NO: 287423 - DNA, 25 bp, Artificial
  Probe
agctgaactactttgccaaggcttt

SEQ ID NO: 287424 - DNA, 25 bp, Artificial
  Probe
tgaagattaccttgcctgttgactt

SEQ ID NO: 287425 - DNA, 25 bp, Artificial
  Probe
tctggtatacctgctggctggatgg

SEQ ID NO: 287426 - DNA, 25 bp, Artificial
  Probe
tctatgtcaatgatgcttttgggac

SEQ ID NO: 287427 - DNA, 25 bp, Artificial
  Probe
tggagattggcacatctctgtatga

SEQ ID NO: 287428 - DNA, 25 bp, Artificial
  Probe
tctctgtatgatgaagagggagcca

SEQ ID NO: 287429 - DNA, 25 bp, Artificial
  Probe
ggactgcacacagagcccacagttc

SEQ ID NO: 287430 - DNA, 25 bp, Artificial
  Probe
ctaaaattgatgctttccgagcctc

SEQ ID NO: 287431 - DNA, 25 bp, Artificial
  Probe
gctgtggctcgagctaagcagattg

SEQ ID NO: 287432 - DNA, 25 bp, Artificial
  Probe
atgcttctgggaacaaggttaaagc

SEQ ID NO: 287433 - DNA, 25 bp, Artificial
  Probe
gctactgtggcctctggtatacctg

SEQ ID NO: 287434 - DNA, 25 bp, Artificial
  Probe
ttaccttgcctgttgactttgtcac

SEQ ID NO: 287435 - DNA, 25 bp, Artificial
  Probe
caaacttggagatgtctatgtcaat

SEQ ID NO: 287436 - DNA, 25 bp, Artificial
  Probe
tgggtgtgaatctgccacagaaggc

SEQ ID NO: 287437 - DNA, 25 bp, Artificial
  Probe
tgtgaatctgccacagaaggctggt

SEQ ID NO: 287438 - DNA, 25 bp, Artificial
  Probe
gcttttaccttccttaaggtgctca

SEQ ID NO: 287439 - DNA, 25 bp, Artificial
  Probe
aggttaaagctgagccagctaaaat

SEQ ID NO: 287440 - DNA, 25 bp, Artificial
  Probe
cactgctgacaaatttgatgagaat

SEQ ID NO: 287441 - DNA, 25 bp, Artificial
  Probe
atctgccacagaaggctggtggatt

SEQ ID NO: 287442 - DNA, 25 bp, Artificial
  Probe
tggagagtccagagcgacccttcct

SEQ ID NO: 287443 - DNA, 25 bp, Artificial
  Probe
agaatgcaaagactggccaagctac

SEQ ID NO: 287444 - DNA, 25 bp, Artificial
  Probe
cttccttaaggtgctcaacaacatg

SEQ ID NO: 287445 - DNA, 25 bp, Artificial
  Probe
gccaagctactgtggcctctggtat

SEQ ID NO: 287446 - DNA, 25 bp, Artificial
  Probe
caatgatgcttttgggactgcacac

SEQ ID NO: 287447 - DNA, 25 bp, Artificial
  Probe
atatgctgaggctgtggctcgagct

SEQ ID NO: 287448 - DNA, 25 bp, Artificial
  Probe
ctggccaagctactgtggcctctgg

SEQ ID NO: 287449 - DNA, 25 bp, Artificial
  Probe
gaatgcaaagactggccaagctact

SEQ ID NO: 287450 - DNA, 25 bp, Artificial
  Probe
gccacagaaggctggtggatttttg

SEQ ID NO: 287451 - DNA, 25 bp, Artificial
  Probe
aactactttgccaaggctttggaga

SEQ ID NO: 287452 - DNA, 25 bp, Artificial
  Probe
agcctccctgtccaaacttggagat

SEQ ID NO: 287453 - DNA, 25 bp, Artificial
  Probe
cttggactgtggtactgagagcagt

SEQ ID NO: 287454 - DNA, 25 bp, Artificial
  Probe
tgcttctgggaacaaggttaaagct

SEQ ID NO: 287455 - DNA, 25 bp, Artificial
  Probe
acacagagcccacagttccatggtg

SEQ ID NO: 287456 - DNA, 25 bp, Artificial
  Probe
ccacagaaggctggtggatttttga

SEQ ID NO: 287457 - DNA, 25 bp, Artificial
  Probe
atgctgaggctgtggctcgagctaa

SEQ ID NO: 287458 - DNA, 25 bp, Artificial
  Probe
tgtgaagattaccttgcctgttgac

SEQ ID NO: 287459 - DNA, 25 bp, Artificial
  Probe
tgagccagctaaaattgatgctttc

SEQ ID NO: 287460 - DNA, 25 bp, Artificial
  Probe
ccgctttcatgtagaggaagaaggg

SEQ ID NO: 287461 - DNA, 25 bp, Artificial
  Probe
aggagctgaactactttgccaaggc

SEQ ID NO: 287462 - DNA, 25 bp, Artificial
  Probe
gactttgtcactgctgacaaatttg

SEQ ID NO: 287463 - DNA, 25 bp, Artificial
  Probe
caacaacatggagattggcacatct

SEQ ID NO: 287464 - DNA, 25 bp, Artificial
  Probe
tctagccacagtctcggtttcggag

SEQ ID NO: 287465 - DNA, 25 bp, Artificial
  Probe
gcaaacttacagatgctgtgggttt

SEQ ID NO: 287466 - DNA, 25 bp, Artificial
  Probe
cttacagatgctgtgggtttacata

SEQ ID NO: 287467 - DNA, 25 bp, Artificial
  Probe
acatggctggatggtatcaagcagg

SEQ ID NO: 287468 - DNA, 25 bp, Artificial
  Probe
ctagccacagtctcggtttcggaga

SEQ ID NO: 287469 - DNA, 25 bp, Artificial
  Probe
tatcaagcagggttctagccacagt

SEQ ID NO: 287470 - DNA, 25 bp, Artificial
  Probe
agctctgcttcatggcccgctgagt

SEQ ID NO: 287471 - DNA, 25 bp, Artificial
  Probe
ttgactttgccctgatattgaccag

SEQ ID NO: 287472 - DNA, 25 bp, Artificial
  Probe
tctgctggagttcacgcacacccga

SEQ ID NO: 287473 - DNA, 25 bp, Artificial
  Probe
ctccctactcatctaagagaagtcg

SEQ ID NO: 287474 - DNA, 25 bp, Artificial
  Probe
ctgatattgaccagaatgtactccg

SEQ ID NO: 287475 - DNA, 25 bp, Artificial
  Probe
gcccacttcgagaccaaccaagagt

SEQ ID NO: 287476 - DNA, 25 bp, Artificial
  Probe
gtctcggtgggcagcaaacttacag

SEQ ID NO: 287477 - DNA, 25 bp, Artificial
  Probe
ttcggagagccctgaatttctcaac

SEQ ID NO: 287478 - DNA, 25 bp, Artificial
  Probe
agaggagctctgctggagttcacgc

SEQ ID NO: 287479 - DNA, 25 bp, Artificial
  Probe
ctgctggagttcacgcacacccgat

SEQ ID NO: 287480 - DNA, 25 bp, Artificial
  Probe
ttgctgtgctgagaccacgggtcag

SEQ ID NO: 287481 - DNA, 25 bp, Artificial
  Probe
tcggtttcggagagccctgaatttc

SEQ ID NO: 287482 - DNA, 25 bp, Artificial
  Probe
aacatggctggatggtatcaagcag

SEQ ID NO: 287483 - DNA, 25 bp, Artificial
  Probe
gaactcaagactattgaccatagca

SEQ ID NO: 287484 - DNA, 25 bp, Artificial
  Probe
tctgcaaaaacatggctggatggta

SEQ ID NO: 287485 - DNA, 25 bp, Artificial
  Probe
ccacttcgagaccaaccaagagtca

SEQ ID NO: 287486 - DNA, 25 bp, Artificial
  Probe
agaactcaagactattgaccatagc

SEQ ID NO: 287487 - DNA, 25 bp, Artificial
  Probe
gggcagcaaacttacagatgctgtg

SEQ ID NO: 287488 - DNA, 25 bp, Artificial
  Probe
atctattgactttgccctgatattg

SEQ ID NO: 287489 - DNA, 25 bp, Artificial
  Probe
atggcccgctgagtgcccacttcga

SEQ ID NO: 287490 - DNA, 25 bp, Artificial
  Probe
tggcccgctgagtgcccacttcgag

SEQ ID NO: 287491 - DNA, 25 bp, Artificial
  Probe
cgctgagtgcccacttcgagaccaa

SEQ ID NO: 287492 - DNA, 25 bp, Artificial
  Probe
atattgaccagaatgtactccgcaa

SEQ ID NO: 287493 - DNA, 25 bp, Artificial
  Probe
aacttacagatgctgtgggtttaca

SEQ ID NO: 287494 - DNA, 25 bp, Artificial
  Probe
gtgtctgcaaaaacatggctggatg

SEQ ID NO: 287495 - DNA, 25 bp, Artificial
  Probe
agctctgctggagttcacgcacacc

SEQ ID NO: 287496 - DNA, 25 bp, Artificial
  Probe
ccttggtctcggtgggcagcaaact

SEQ ID NO: 287497 - DNA, 25 bp, Artificial
  Probe
ccacagtctcggtttcggagagccc

SEQ ID NO: 287498 - DNA, 25 bp, Artificial
  Probe
tctcggtttcggagagccctgaatt

SEQ ID NO: 287499 - DNA, 25 bp, Artificial
  Probe
atggtatcaagcagggttctagcca

SEQ ID NO: 287500 - DNA, 25 bp, Artificial
  Probe
tcaaccttggtctcggtgggcagca

SEQ ID NO: 287501 - DNA, 25 bp, Artificial
  Probe
ctcggtgggcagcaaacttacagat

SEQ ID NO: 287502 - DNA, 25 bp, Artificial
  Probe
acagtctcggtttcggagagccctg

SEQ ID NO: 287503 - DNA, 25 bp, Artificial
  Probe
aagagaagtcgctctcattgctgtg

SEQ ID NO: 287504 - DNA, 25 bp, Artificial
  Probe
gtactccgcaattctttcctgtttg

SEQ ID NO: 287505 - DNA, 25 bp, Artificial
  Probe
tgggcagcaaacttacagatgctgt

SEQ ID NO: 287506 - DNA, 25 bp, Artificial
  Probe
tgaccagaatgtactccgcaattct

SEQ ID NO: 287507 - DNA, 25 bp, Artificial
  Probe
caaccaagagtcaattgagagagga

SEQ ID NO: 287508 - DNA, 25 bp, Artificial
  Probe
ttcatggcccgctgagtgcccactt

SEQ ID NO: 287509 - DNA, 25 bp, Artificial
  Probe
catctaagagaagtcgctctcattg

SEQ ID NO: 287510 - DNA, 25 bp, Artificial
  Probe
gctgattcctgaggaatttttccag

SEQ ID NO: 287511 - DNA, 25 bp, Artificial
  Probe
ggaaaagtacgtcttgggctgattc

SEQ ID NO: 287512 - DNA, 25 bp, Artificial
  Probe
acgtcttgggctgattcctgaggaa

SEQ ID NO: 287513 - DNA, 25 bp, Artificial
  Probe
tcttgggctgattcctgaggaattt

SEQ ID NO: 287514 - DNA, 25 bp, Artificial
  Probe
atcaaggtccatttagtggcttaac

SEQ ID NO: 287515 - DNA, 25 bp, Artificial
  Probe
tacgtcttgggctgattcctgagga

SEQ ID NO: 287516 - DNA, 25 bp, Artificial
  Probe
ctgggcttagcttgtactttctatc

SEQ ID NO: 287517 - DNA, 25 bp, Artificial
  Probe
ggctgattcctgaggaatttttcca

SEQ ID NO: 287518 - DNA, 25 bp, Artificial
  Probe
tttacaggcaacaagggtctttcac

SEQ ID NO: 287519 - DNA, 25 bp, Artificial
  Probe
tgggctgattcctgaggaatttttc

SEQ ID NO: 287520 - DNA, 25 bp, Artificial
  Probe
ttacaggcaacaagggtctttcaca

SEQ ID NO: 287521 - DNA, 25 bp, Artificial
  Probe
aaatgatcaaggtccatttagtggc

SEQ ID NO: 287522 - DNA, 25 bp, Artificial
  Probe
gtcttgggctgattcctgaggaatt

SEQ ID NO: 287523 - DNA, 25 bp, Artificial
  Probe
aatatatgtgattaccccagagacc

SEQ ID NO: 287524 - DNA, 25 bp, Artificial
  Probe
tccaggggttttacaggcaacaagg

SEQ ID NO: 287525 - DNA, 25 bp, Artificial
  Probe
tcaaggtccatttagtggcttaacc

SEQ ID NO: 287526 - DNA, 25 bp, Artificial
  Probe
gatcaaggtccatttagtggcttaa

SEQ ID NO: 287527 - DNA, 25 bp, Artificial
  Probe
cgtcttgggctgattcctgaggaat

SEQ ID NO: 287528 - DNA, 25 bp, Artificial
  Probe
ctgaaatagcactgctttattatga

SEQ ID NO: 287529 - DNA, 25 bp, Artificial
  Probe
gtccaggggttttacaggcaacaag

SEQ ID NO: 287530 - DNA, 25 bp, Artificial
  Probe
aactgggcttagcttgtactttcta

SEQ ID NO: 287531 - DNA, 25 bp, Artificial
  Probe
gcaacaagggtctttcacacaggac

SEQ ID NO: 287532 - DNA, 25 bp, Artificial
  Probe
caacaagggtctttcacacaggaca

SEQ ID NO: 287533 - DNA, 25 bp, Artificial
  Probe
tgatcaaggtccatttagtggctta

SEQ ID NO: 287534 - DNA, 25 bp, Artificial
  Probe
tctgaaatagcactgctttattatg

SEQ ID NO: 287535 - DNA, 25 bp, Artificial
  Probe
tgggcttagcttgtactttctatcc

SEQ ID NO: 287536 - DNA, 25 bp, Artificial
  Probe
ggcaacaagggtctttcacacagga

SEQ ID NO: 287537 - DNA, 25 bp, Artificial
  Probe
ttttacaggcaacaagggtctttca

SEQ ID NO: 287538 - DNA, 25 bp, Artificial
  Probe
ggcttagcttgtactttctatccaa

SEQ ID NO: 287539 - DNA, 25 bp, Artificial
  Probe
actgggcttagcttgtactttctat

SEQ ID NO: 287540 - DNA, 25 bp, Artificial
  Probe
cttgggctgattcctgaggaatttt

SEQ ID NO: 287541 - DNA, 25 bp, Artificial
  Probe
aggcaacaagggtctttcacacagg

SEQ ID NO: 287542 - DNA, 25 bp, Artificial
  Probe
atgatcaaggtccatttagtggctt

SEQ ID NO: 287543 - DNA, 25 bp, Artificial
  Probe
gggcttagcttgtactttctatcca

SEQ ID NO: 287544 - DNA, 25 bp, Artificial
  Probe
aatgatcaaggtccatttagtggct

SEQ ID NO: 287545 - DNA, 25 bp, Artificial
  Probe
gggctgattcctgaggaatttttcc

SEQ ID NO: 287546 - DNA, 25 bp, Artificial
  Probe
ttgctcttctgtatgtgacaacatt

SEQ ID NO: 287547 - DNA, 25 bp, Artificial
  Probe
cttctgtatgtgacaacatttttgt

SEQ ID NO: 287548 - DNA, 25 bp, Artificial
  Probe
tgtgacaacatttttgtacattatg

SEQ ID NO: 287549 - DNA, 25 bp, Artificial
  Probe
agatttttgctcttctgtatgtgac

SEQ ID NO: 287550 - DNA, 25 bp, Artificial
  Probe
ggtggacagtacacctgggacatgg

SEQ ID NO: 287551 - DNA, 25 bp, Artificial
  Probe
tgtatgtgacaacatttttgtacat

SEQ ID NO: 287552 - DNA, 25 bp, Artificial
  Probe
tcttctgtatgtgacaacatttttg

SEQ ID NO: 287553 - DNA, 25 bp, Artificial
  Probe
tggacagtacacctgggacatggca

SEQ ID NO: 287554 - DNA, 25 bp, Artificial
  Probe
tagtccccaatagcgtagatttttg

SEQ ID NO: 287555 - DNA, 25 bp, Artificial
  Probe
tttttgctcttctgtatgtgacaac

SEQ ID NO: 287556 - DNA, 25 bp, Artificial
  Probe
gctcttctgtatgtgacaacatttt

SEQ ID NO: 287557 - DNA, 25 bp, Artificial
  Probe
gatttttgctcttctgtatgtgaca

SEQ ID NO: 287558 - DNA, 25 bp, Artificial
  Probe
ggtcatggtactcaatgaggaagat

SEQ ID NO: 287559 - DNA, 25 bp, Artificial
  Probe
tttgctcttctgtatgtgacaacat

SEQ ID NO: 287560 - DNA, 25 bp, Artificial
  Probe
atagtccccaatagcgtagattttt

SEQ ID NO: 287561 - DNA, 25 bp, Artificial
  Probe
tagatttttgctcttctgtatgtga

SEQ ID NO: 287562 - DNA, 25 bp, Artificial
  Probe
agtacacctgggacatggcaaagca

SEQ ID NO: 287563 - DNA, 25 bp, Artificial
  Probe
ctcttctgtatgtgacaacattttt

SEQ ID NO: 287564 - DNA, 25 bp, Artificial
  Probe
tgctcttctgtatgtgacaacattt

SEQ ID NO: 287565 - DNA, 25 bp, Artificial
  Probe
gggtcatggtactcaatgaggaaga

SEQ ID NO: 287566 - DNA, 25 bp, Artificial
  Probe
gacagtacacctgggacatggcaaa

SEQ ID NO: 287567 - DNA, 25 bp, Artificial
  Probe
ccccaatagcgtagatttttgctct

SEQ ID NO: 287568 - DNA, 25 bp, Artificial
  Probe
tcatggtactcaatgaggaagatga

SEQ ID NO: 287569 - DNA, 25 bp, Artificial
  Probe
catggtactcaatgaggaagatgag

SEQ ID NO: 287570 - DNA, 25 bp, Artificial
  Probe
atagcgtagatttttgctcttctgt

SEQ ID NO: 287571 - DNA, 25 bp, Artificial
  Probe
gtggacagtacacctgggacatggc

SEQ ID NO: 287572 - DNA, 25 bp, Artificial
  Probe
acagtacacctgggacatggcaaag

SEQ ID NO: 287573 - DNA, 25 bp, Artificial
  Probe
tatgtgacaacatttttgtacatta

SEQ ID NO: 287574 - DNA, 25 bp, Artificial
  Probe
cgtagatttttgctcttctgtatgt

SEQ ID NO: 287575 - DNA, 25 bp, Artificial
  Probe
agcgtagatttttgctcttctgtat

SEQ ID NO: 287576 - DNA, 25 bp, Artificial
  Probe
gtcatggtactcaatgaggaagatg

SEQ ID NO: 287577 - DNA, 25 bp, Artificial
  Probe
gtccccaatagcgtagatttttgct

SEQ ID NO: 287578 - DNA, 25 bp, Artificial
  Probe
atggtactcaatgaggaagatgagt

SEQ ID NO: 287579 - DNA, 25 bp, Artificial
  Probe
cagtacacctgggacatggcaaagc

SEQ ID NO: 287580 - DNA, 25 bp, Artificial
  Probe
atttttgctcttctgtatgtgacaa

SEQ ID NO: 287581 - DNA, 25 bp, Artificial
  Probe
tccccaatagcgtagatttttgctc

SEQ ID NO: 287582 - DNA, 25 bp, Artificial
  Probe
gcgtagatttttgctcttctgtatg

SEQ ID NO: 287583 - DNA, 25 bp, Artificial
  Probe
agtccccaatagcgtagatttttgc

SEQ ID NO: 287584 - DNA, 25 bp, Artificial
  Probe
gtagatttttgctcttctgtatgtg

SEQ ID NO: 287585 - DNA, 25 bp, Artificial
  Probe
ttctgtatgtgacaacatttttgta

SEQ ID NO: 287586 - DNA, 25 bp, Artificial
  Probe
gtacacctgggacatggcaaagcat

SEQ ID NO: 287587 - DNA, 25 bp, Artificial
  Probe
ggacagtacacctgggacatggcaa

SEQ ID NO: 287588 - DNA, 25 bp, Artificial
  Probe
cccaatagcgtagatttttgctctt

SEQ ID NO: 287589 - DNA, 25 bp, Artificial
  Probe
ttttgctcttctgtatgtgacaaca

SEQ ID NO: 287590 - DNA, 25 bp, Artificial
  Probe
ataagtagaggcttccaggtcttct

SEQ ID NO: 287591 - DNA, 25 bp, Artificial
  Probe
ccagcatgattagcaagggaagtca

SEQ ID NO: 287592 - DNA, 25 bp, Artificial
  Probe
ctgtaaccttcattcccagccagag

SEQ ID NO: 287593 - DNA, 25 bp, Artificial
  Probe
cttctggcttcagtcagttggaaga

SEQ ID NO: 287594 - DNA, 25 bp, Artificial
  Probe
agactggtcagaaagcaggatgcta

SEQ ID NO: 287595 - DNA, 25 bp, Artificial
  Probe
attcccagccagagctgctccaggg

SEQ ID NO: 287596 - DNA, 25 bp, Artificial
  Probe
aaatcatctcctgaggcctgtcatg

SEQ ID NO: 287597 - DNA, 25 bp, Artificial
  Probe
tctggtctacattccggagccaact

SEQ ID NO: 287598 - DNA, 25 bp, Artificial
  Probe
gacactgctcagcacccagcatgat

SEQ ID NO: 287599 - DNA, 25 bp, Artificial
  Probe
catgggttttgattgcctcacttga

SEQ ID NO: 287600 - DNA, 25 bp, Artificial
  Probe
ttgggaactccctgggtggataagt

SEQ ID NO: 287601 - DNA, 25 bp, Artificial
  Probe
taacaaaatcatctcctgaggcctg

SEQ ID NO: 287602 - DNA, 25 bp, Artificial
  Probe
acccacaaagtttaggagagtgcag

SEQ ID NO: 287603 - DNA, 25 bp, Artificial
  Probe
gtttcagacactgctcagcacccag

SEQ ID NO: 287604 - DNA, 25 bp, Artificial
  Probe
tccctgggtggataagtagaggctt

SEQ ID NO: 287605 - DNA, 25 bp, Artificial
  Probe
agctgtaacaaaatcatctcctgag

SEQ ID NO: 287606 - DNA, 25 bp, Artificial
  Probe
gatattgggaactccctgggtggat

SEQ ID NO: 287607 - DNA, 25 bp, Artificial
  Probe
cagagctgctccagggctggctaac

SEQ ID NO: 287608 - DNA, 25 bp, Artificial
  Probe
cagtcagttggaagagcagtctgaa

SEQ ID NO: 287609 - DNA, 25 bp, Artificial
  Probe
tccagggctggctaactagtttcag

SEQ ID NO: 287610 - DNA, 25 bp, Artificial
  Probe
tgctcagcacccagcatgattagca

SEQ ID NO: 287611 - DNA, 25 bp, Artificial
  Probe
ctggtcctcggaggatattgggaac

SEQ ID NO: 287612 - DNA, 25 bp, Artificial
  Probe
tggcttcagtcagttggaagagcag

SEQ ID NO: 287613 - DNA, 25 bp, Artificial
  Probe
tcctcggaggatattgggaactccc

SEQ ID NO: 287614 - DNA, 25 bp, Artificial
  Probe
agacactgctcagcacccagcatga

SEQ ID NO: 287615 - DNA, 25 bp, Artificial
  Probe
ctgctccagggctggctaactagtt

SEQ ID NO: 287616 - DNA, 25 bp, Artificial
  Probe
ctcctgaggcctgtcatggcagatc

SEQ ID NO: 287617 - DNA, 25 bp, Artificial
  Probe
tgtaaccttcattcccagccagagc

SEQ ID NO: 287618 - DNA, 25 bp, Artificial
  Probe
agagcagtctgaaggagctgtaaca

SEQ ID NO: 287619 - DNA, 25 bp, Artificial
  Probe
aagtcagcctgcaggctctggtcta

SEQ ID NO: 287620 - DNA, 25 bp, Artificial
  Probe
atgtacactggctgcagtctcccac

SEQ ID NO: 287621 - DNA, 25 bp, Artificial
  Probe
aagactggtcagaaagcaggatgct

SEQ ID NO: 287622 - DNA, 25 bp, Artificial
  Probe
aatcatctcctgaggcctgtcatgg

SEQ ID NO: 287623 - DNA, 25 bp, Artificial
  Probe
cacctctgagagacccaggctggtc

SEQ ID NO: 287624 - DNA, 25 bp, Artificial
  Probe
tgctgcacagcatgcctccatgggt

SEQ ID NO: 287625 - DNA, 25 bp, Artificial
  Probe
agacccaggctggtcctcggaggat

SEQ ID NO: 287626 - DNA, 25 bp, Artificial
  Probe
caggatgctatgtacactggctgca

SEQ ID NO: 287627 - DNA, 25 bp, Artificial
  Probe
tgcctccatgggttttgattgcctc

SEQ ID NO: 287628 - DNA, 25 bp, Artificial
  Probe
agcagtctgaaggagctgtaacaaa

SEQ ID NO: 287629 - DNA, 25 bp, Artificial
  Probe
ccaggctggtcctcggaggatattg

SEQ ID NO: 287630 - DNA, 25 bp, Artificial
  Probe
gttttgattgcctcacttgaggagg

SEQ ID NO: 287631 - DNA, 25 bp, Artificial
  Probe
cagccagagctgctccagggctggc

SEQ ID NO: 287632 - DNA, 25 bp, Artificial
  Probe
taccaaatccttggattatctgctg

SEQ ID NO: 287633 - DNA, 25 bp, Artificial
  Probe
ttccaggtcttctggcttcagtcag

SEQ ID NO: 287634 - DNA, 25 bp, Artificial
  Probe
tgctatgtacactggctgcagtctc

SEQ ID NO: 287635 - DNA, 25 bp, Artificial
  Probe
ccacctctgagagacccaggctggt

SEQ ID NO: 287636 - DNA, 25 bp, Artificial
  Probe
gctgtgcctctctgagaggcagatc

SEQ ID NO: 287637 - DNA, 25 bp, Artificial
  Probe
ggtgatgctggaatcccgattccct

SEQ ID NO: 287638 - DNA, 25 bp, Artificial
  Probe
aggatcgagatcgcccactcgctgt

SEQ ID NO: 287639 - DNA, 25 bp, Artificial
  Probe
gtgcctctctgagaggcagatcaaa

SEQ ID NO: 287640 - DNA, 25 bp, Artificial
  Probe
ccggcagcaggtcctggaattagag

SEQ ID NO: 287641 - DNA, 25 bp, Artificial
  Probe
gccggcagcaggtcctggaattaga

SEQ ID NO: 287642 - DNA, 25 bp, Artificial
  Probe
tggtgatgctggaatcccgattccc

SEQ ID NO: 287643 - DNA, 25 bp, Artificial
  Probe
tccggcccgtggcgtcgcgaattgc

SEQ ID NO: 287644 - DNA, 25 bp, Artificial
  Probe
agaaggatcgagatcgcccactcgc

SEQ ID NO: 287645 - DNA, 25 bp, Artificial
  Probe
ggcagcaggtcctggaattagagaa

SEQ ID NO: 287646 - DNA, 25 bp, Artificial
  Probe
aattgccggcagcaggtcctggaat

SEQ ID NO: 287647 - DNA, 25 bp, Artificial
  Probe
aaggatcgagatcgcccactcgctg

SEQ ID NO: 287648 - DNA, 25 bp, Artificial
  Probe
gattccctggtccggcccgtggcgt

SEQ ID NO: 287649 - DNA, 25 bp, Artificial
  Probe
gtgatgctggaatcccgattccctg

SEQ ID NO: 287650 - DNA, 25 bp, Artificial
  Probe
agcaggtcctggaattagagaaaga

SEQ ID NO: 287651 - DNA, 25 bp, Artificial
  Probe
gcaggtcctggaattagagaaagag

SEQ ID NO: 287652 - DNA, 25 bp, Artificial
  Probe
tgctggaatcccgattccctggtcc

SEQ ID NO: 287653 - DNA, 25 bp, Artificial
  Probe
tggaatcccgattccctggtccggc

SEQ ID NO: 287654 - DNA, 25 bp, Artificial
  Probe
cctgacccgaaggagaaggatcgag

SEQ ID NO: 287655 - DNA, 25 bp, Artificial
  Probe
ctcgctgtgcctctctgagaggcag

SEQ ID NO: 287656 - DNA, 25 bp, Artificial
  Probe
cactcgctgtgcctctctgagaggc

SEQ ID NO: 287657 - DNA, 25 bp, Artificial
  Probe
tcgctgtgcctctctgagaggcaga

SEQ ID NO: 287658 - DNA, 25 bp, Artificial
  Probe
tgccggcagcaggtcctggaattag

SEQ ID NO: 287659 - DNA, 25 bp, Artificial
  Probe
gaattgccggcagcaggtcctggaa

SEQ ID NO: 287660 - DNA, 25 bp, Artificial
  Probe
attgccggcagcaggtcctggaatt

SEQ ID NO: 287661 - DNA, 25 bp, Artificial
  Probe
cggcagcaggtcctggaattagaga

SEQ ID NO: 287662 - DNA, 25 bp, Artificial
  Probe
ctggaatcccgattccctggtccgg

SEQ ID NO: 287663 - DNA, 25 bp, Artificial
  Probe
ctgacccgaaggagaaggatcgaga

SEQ ID NO: 287664 - DNA, 25 bp, Artificial
  Probe
gcagcaggtcctggaattagagaaa

SEQ ID NO: 287665 - DNA, 25 bp, Artificial
  Probe
actcgctgtgcctctctgagaggca

SEQ ID NO: 287666 - DNA, 25 bp, Artificial
  Probe
cgctgtgcctctctgagaggcagat

SEQ ID NO: 287667 - DNA, 25 bp, Artificial
  Probe
gcgtcgcgaattgccggcagcaggt

SEQ ID NO: 287668 - DNA, 25 bp, Artificial
  Probe
gtggtgatgctggaatcccgattcc

SEQ ID NO: 287669 - DNA, 25 bp, Artificial
  Probe
gcgaattgccggcagcaggtcctgg

SEQ ID NO: 287670 - DNA, 25 bp, Artificial
  Probe
ccactcgctgtgcctctctgagagg

SEQ ID NO: 287671 - DNA, 25 bp, Artificial
  Probe
ttccctggtccggcccgtggcgtcg

SEQ ID NO: 287672 - DNA, 25 bp, Artificial
  Probe
atcgcccactcgctgtgcctctctg

SEQ ID NO: 287673 - DNA, 25 bp, Artificial
  Probe
tgacccgaaggagaaggatcgagat

SEQ ID NO: 287674 - DNA, 25 bp, Artificial
  Probe
cctggtccggcccgtggcgtcgcga

SEQ ID NO: 287675 - DNA, 25 bp, Artificial
  Probe
atgctggaatcccgattccctggtc

SEQ ID NO: 287676 - DNA, 25 bp, Artificial
  Probe
cgattccctggtccggcccgtggcg

SEQ ID NO: 287677 - DNA, 25 bp, Artificial
  Probe
gctggaatcccgattccctggtccg

SEQ ID NO: 287678 - DNA, 25 bp, Artificial
  Probe
cgaattgccggcagcaggtcctgga

SEQ ID NO: 287679 - DNA, 25 bp, Artificial
  Probe
ttgccggcagcaggtcctggaatta

SEQ ID NO: 287680 - DNA, 25 bp, Artificial
  Probe
cagcaggtcctggaattagagaaag

SEQ ID NO: 287681 - DNA, 25 bp, Artificial
  Probe
tcccgattccctggtccggcccgtg

SEQ ID NO: 287682 - DNA, 25 bp, Artificial
  Probe
cgatgttcctgataatcttgaaagg

SEQ ID NO: 287683 - DNA, 25 bp, Artificial
  Probe
agtcaatggcccttacccgatgttc

SEQ ID NO: 287684 - DNA, 25 bp, Artificial
  Probe
tactgctttaacagagaatctgcag

SEQ ID NO: 287685 - DNA, 25 bp, Artificial
  Probe
ctggagcagcctttccagagccttt

SEQ ID NO: 287686 - DNA, 25 bp, Artificial
  Probe
gcccttacccgatgttcctgataat

SEQ ID NO: 287687 - DNA, 25 bp, Artificial
  Probe
ttacccgatgttcctgataatcttg

SEQ ID NO: 287688 - DNA, 25 bp, Artificial
  Probe
ccccgtgtcaccttagtcacgagag

SEQ ID NO: 287689 - DNA, 25 bp, Artificial
  Probe
tattgccttgtcttctgagctcttg

SEQ ID NO: 287690 - DNA, 25 bp, Artificial
  Probe
ccactgtgagcaggatgccagcaga

SEQ ID NO: 287691 - DNA, 25 bp, Artificial
  Probe
tgctttaacagagaatctgcaggtg

SEQ ID NO: 287692 - DNA, 25 bp, Artificial
  Probe
gagctctgagcgtggctattcctac

SEQ ID NO: 287693 - DNA, 25 bp, Artificial
  Probe
actggagcagcctttccagagcctt

SEQ ID NO: 287694 - DNA, 25 bp, Artificial
  Probe
gtgcctgtagcttccccaaagcagg

SEQ ID NO: 287695 - DNA, 25 bp, Artificial
  Probe
gctgtgagctctgagcgtggctatt

SEQ ID NO: 287696 - DNA, 25 bp, Artificial
  Probe
tggaacccccgtgtcaccttagtca

SEQ ID NO: 287697 - DNA, 25 bp, Artificial
  Probe
tgttcctgataatcttgaaaggttc

SEQ ID NO: 287698 - DNA, 25 bp, Artificial
  Probe
cacagccactgtgagcaggatgcca

SEQ ID NO: 287699 - DNA, 25 bp, Artificial
  Probe
tcctgataatcttgaaaggttcttc

SEQ ID NO: 287700 - DNA, 25 bp, Artificial
  Probe
tctgagcgtggctattcctactcct

SEQ ID NO: 287701 - DNA, 25 bp, Artificial
  Probe
agagcctttgttccagctcagccct

SEQ ID NO: 287702 - DNA, 25 bp, Artificial
  Probe
tcttctgagctcttgctacagtcgc

SEQ ID NO: 287703 - DNA, 25 bp, Artificial
  Probe
tatttcctttcacctggttgggaag

SEQ ID NO: 287704 - DNA, 25 bp, Artificial
  Probe
agcagcctttccagagcctttgttc

SEQ ID NO: 287705 - DNA, 25 bp, Artificial
  Probe
aagtgcaatatttcctttcacctgg

SEQ ID NO: 287706 - DNA, 25 bp, Artificial
  Probe
ctttaacagagaatctgcaggtgtt

SEQ ID NO: 287707 - DNA, 25 bp, Artificial
  Probe
ctgtgagctctgagcgtggctattc

SEQ ID NO: 287708 - DNA, 25 bp, Artificial
  Probe
aggccacagccactgtgagcaggat

SEQ ID NO: 287709 - DNA, 25 bp, Artificial
  Probe
cagcctttccagagcctttgttcca

SEQ ID NO: 287710 - DNA, 25 bp, Artificial
  Probe
ccgatgttcctgataatcttgaaag

SEQ ID NO: 287711 - DNA, 25 bp, Artificial
  Probe
taatcttgaaaggttcttctggaac

SEQ ID NO: 287712 - DNA, 25 bp, Artificial
  Probe
atgccagcagatgtgggatgaagct

SEQ ID NO: 287713 - DNA, 25 bp, Artificial
  Probe
tagtactggagcagcctttccagag

SEQ ID NO: 287714 - DNA, 25 bp, Artificial
  Probe
tactcctcagtgtgcctgtagcttc

SEQ ID NO: 287715 - DNA, 25 bp, Artificial
  Probe
ctgtgagcaggatgccagcagatgt

SEQ ID NO: 287716 - DNA, 25 bp, Artificial
  Probe
tggctattcctactcctcagtgtgc

SEQ ID NO: 287717 - DNA, 25 bp, Artificial
  Probe
tgagctcttgctacagtcgcctttg

SEQ ID NO: 287718 - DNA, 25 bp, Artificial
  Probe
tcaatggcccttacccgatgttcct

SEQ ID NO: 287719 - DNA, 25 bp, Artificial
  Probe
ggcccttacccgatgttcctgataa

SEQ ID NO: 287720 - DNA, 25 bp, Artificial
  Probe
aggcatagtactggagcagcctttc

SEQ ID NO: 287721 - DNA, 25 bp, Artificial
  Probe
gcatagtactggagcagcctttcca

SEQ ID NO: 287722 - DNA, 25 bp, Artificial
  Probe
ccctgtgtggctgtgagctctgagc

SEQ ID NO: 287723 - DNA, 25 bp, Artificial
  Probe
caatatttcctttcacctggttggg

SEQ ID NO: 287724 - DNA, 25 bp, Artificial
  Probe
cccgtgtcaccttagtcacgagagc

SEQ ID NO: 287725 - DNA, 25 bp, Artificial
  Probe
ctcagtgtgcctgtagcttccccaa

SEQ ID NO: 287726 - DNA, 25 bp, Artificial
  Probe
tccaatattgccttgtcttctgagc

SEQ ID NO: 287727 - DNA, 25 bp, Artificial
  Probe
gagcctttgttccagctcagccctt

SEQ ID NO: 287728 - DNA, 25 bp, Artificial
  Probe
agagtcagtgcatcagaacagcata

SEQ ID NO: 287729 - DNA, 25 bp, Artificial
  Probe
atcatttagaacactatggcttaag

SEQ ID NO: 287730 - DNA, 25 bp, Artificial
  Probe
tcagaacactgtccatagaaacagt

SEQ ID NO: 287731 - DNA, 25 bp, Artificial
  Probe
agtcagtgcatcagaacagcatatg

SEQ ID NO: 287732 - DNA, 25 bp, Artificial
  Probe
cagtgtggaaccaacaaccacaata

SEQ ID NO: 287733 - DNA, 25 bp, Artificial
  Probe
ttatctttacatctctaggaatgag

SEQ ID NO: 287734 - DNA, 25 bp, Artificial
  Probe
ctatggcttaagcaatcatgtttat

SEQ ID NO: 287735 - DNA, 25 bp, Artificial
  Probe
gcatatgctttacaagcacatagag

SEQ ID NO: 287736 - DNA, 25 bp, Artificial
  Probe
acactgcggaagcaagatttacaca

SEQ ID NO: 287737 - DNA, 25 bp, Artificial
  Probe
attatagtaaacactgcggaagcaa

SEQ ID NO: 287738 - DNA, 25 bp, Artificial
  Probe
aacactgcggaagcaagatttacac

SEQ ID NO: 287739 - DNA, 25 bp, Artificial
  Probe
ttcaattatagtaaacactgcggaa

SEQ ID NO: 287740 - DNA, 25 bp, Artificial
  Probe
caattatagtaaacactgcggaagc

SEQ ID NO: 287741 - DNA, 25 bp, Artificial
  Probe
tgagagtcagtgcatcagaacagca

SEQ ID NO: 287742 - DNA, 25 bp, Artificial
  Probe
ctgttgtcttcctagtgtgaatatg

SEQ ID NO: 287743 - DNA, 25 bp, Artificial
  Probe
ggtcactcatgtcagaacactgtcc

SEQ ID NO: 287744 - DNA, 25 bp, Artificial
  Probe
aaagccatcatttagaacactatgg

SEQ ID NO: 287745 - DNA, 25 bp, Artificial
  Probe
tcttcctagtgtgaatatgtgttgc

SEQ ID NO: 287746 - DNA, 25 bp, Artificial
  Probe
tatgtgttgcatatgctttacaagc

SEQ ID NO: 287747 - DNA, 25 bp, Artificial
  Probe
ttacaagcacatagagtagacatga

SEQ ID NO: 287748 - DNA, 25 bp, Artificial
  Probe
atgctttacaagcacatagagtaga

SEQ ID NO: 287749 - DNA, 25 bp, Artificial
  Probe
ttgcatatgctttacaagcacatag

SEQ ID NO: 287750 - DNA, 25 bp, Artificial
  Probe
ttaaatgtcaaggtcactcatgtca

SEQ ID NO: 287751 - DNA, 25 bp, Artificial
  Probe
cactatggcttaagcaatcatgttt

SEQ ID NO: 287752 - DNA, 25 bp, Artificial
  Probe
cttcctagtgtgaatatgtgttgca

SEQ ID NO: 287753 - DNA, 25 bp, Artificial
  Probe
gttgcatatgctttacaagcacata

SEQ ID NO: 287754 - DNA, 25 bp, Artificial
  Probe
gtccatagaaacagtgtggaaccaa

SEQ ID NO: 287755 - DNA, 25 bp, Artificial
  Probe
gacatgataactacattgggaggtc

SEQ ID NO: 287756 - DNA, 25 bp, Artificial
  Probe
gtgtggaaccaacaaccacaataaa

SEQ ID NO: 287757 - DNA, 25 bp, Artificial
  Probe
tacagcatatcgatgaagtaacaag

SEQ ID NO: 287758 - DNA, 25 bp, Artificial
  Probe
actcatgtcagaacactgtccatag

SEQ ID NO: 287759 - DNA, 25 bp, Artificial
  Probe
tcaaggtcactcatgtcagaacact

SEQ ID NO: 287760 - DNA, 25 bp, Artificial
  Probe
atatacagcatatcgatgaagtaac

SEQ ID NO: 287761 - DNA, 25 bp, Artificial
  Probe
catgataactacattgggaggtctt

SEQ ID NO: 287762 - DNA, 25 bp, Artificial
  Probe
taaacactgcggaagcaagatttac

SEQ ID NO: 287763 - DNA, 25 bp, Artificial
  Probe
aaatgtacatcgtgggtgtcctgct

SEQ ID NO: 287764 - DNA, 25 bp, Artificial
  Probe
tacaaaatgtacatcgtgggtgtcc

SEQ ID NO: 287765 - DNA, 25 bp, Artificial
  Probe
gaacactatggcttaagcaatcatg

SEQ ID NO: 287766 - DNA, 25 bp, Artificial
  Probe
tttagaacactatggcttaagcaat

SEQ ID NO: 287767 - DNA, 25 bp, Artificial
  Probe
catcagaacagcatatggggaaaga

SEQ ID NO: 287768 - DNA, 25 bp, Artificial
  Probe
gaaagccatcatttagaacactatg

SEQ ID NO: 287769 - DNA, 25 bp, Artificial
  Probe
tgtcaaggtcactcatgtcagaaca

SEQ ID NO: 287770 - DNA, 25 bp, Artificial
  Probe
tatagtaaacactgcggaagcaaga

SEQ ID NO: 287771 - DNA, 25 bp, Artificial
  Probe
atacaaaatgtacatcgtgggtgtc

SEQ ID NO: 287772 - DNA, 25 bp, Artificial
  Probe
gtacatcgtgggtgtcctgcttcat

SEQ ID NO: 287773 - DNA, 25 bp, Artificial
  Probe
tgtgttgcatatgctttacaagcac

SEQ ID NO: 287774 - DNA, 25 bp, Artificial
  Probe
tttgactacagtgatgagaaattcc

SEQ ID NO: 287775 - DNA, 25 bp, Artificial
  Probe
ttaaaacctcttgtcaatccagagg

SEQ ID NO: 287776 - DNA, 25 bp, Artificial
  Probe
ccataggtgatctttttggagcagg

SEQ ID NO: 287777 - DNA, 25 bp, Artificial
  Probe
cattgtcttcagcaatggagaaata

SEQ ID NO: 287778 - DNA, 25 bp, Artificial
  Probe
ttagcatctccttgggcccagttgt

SEQ ID NO: 287779 - DNA, 25 bp, Artificial
  Probe
aatgggtccccgtgtgaccccagct

SEQ ID NO: 287780 - DNA, 25 bp, Artificial
  Probe
acaacgcaggatgtggagttcagag

SEQ ID NO: 287781 - DNA, 25 bp, Artificial
  Probe
gaagttgtttatctgctggaagcac

SEQ ID NO: 287782 - DNA, 25 bp, Artificial
  Probe
aaagtctgaatttaccatggacaac

SEQ ID NO: 287783 - DNA, 25 bp, Artificial
  Probe
atcctgttctatactatctcccggg

SEQ ID NO: 287784 - DNA, 25 bp, Artificial
  Probe
ttgaaattttagcatctccttgggc

SEQ ID NO: 287785 - DNA, 25 bp, Artificial
  Probe
cccagttcaacctggtttattgtct

SEQ ID NO: 287786 - DNA, 25 bp, Artificial
  Probe
ggacatcgacacaaccccagttcaa

SEQ ID NO: 287787 - DNA, 25 bp, Artificial
  Probe
caaacacggcgtttctccctcatgg

SEQ ID NO: 287788 - DNA, 25 bp, Artificial
  Probe
cattcccttgcctcgtaagacaacg

SEQ ID NO: 287789 - DNA, 25 bp, Artificial
  Probe
gatgttcttaatcctgaccagcatt

SEQ ID NO: 287790 - DNA, 25 bp, Artificial
  Probe
cgcgtgattggtagacaccggagac

SEQ ID NO: 287791 - DNA, 25 bp, Artificial
  Probe
aaattactcgcgtgattggtagaca

SEQ ID NO: 287792 - DNA, 25 bp, Artificial
  Probe
gttctatactatctcccgggaatcc

SEQ ID NO: 287793 - DNA, 25 bp, Artificial
  Probe
tttcacacagatgactgagaccctg

SEQ ID NO: 287794 - DNA, 25 bp, Artificial
  Probe
gatgctacctctgaactgtcctaca

SEQ ID NO: 287795 - DNA, 25 bp, Artificial
  Probe
ctccttgggcccagttgtgcagtgc

SEQ ID NO: 287796 - DNA, 25 bp, Artificial
  Probe
tgatctccagtgtcattttccagca

SEQ ID NO: 287797 - DNA, 25 bp, Artificial
  Probe
ggcacaagcgtaatggcatgtctga

SEQ ID NO: 287798 - DNA, 25 bp, Artificial
  Probe
ttcctgaatggcagggatgctacct

SEQ ID NO: 287799 - DNA, 25 bp, Artificial
  Probe
tggagatgttcttaatcctgaccag

SEQ ID NO: 287800 - DNA, 25 bp, Artificial
  Probe
ttagcccgcatggagatgttcttaa

SEQ ID NO: 287801 - DNA, 25 bp, Artificial
  Probe
tgtacctgtaactggcagtccttcc

SEQ ID NO: 287802 - DNA, 25 bp, Artificial
  Probe
aatggcagggatgctacctctgaac

SEQ ID NO: 287803 - DNA, 25 bp, Artificial
  Probe
gagacaacgagttccaccataaaat

SEQ ID NO: 287804 - DNA, 25 bp, Artificial
  Probe
gtaaccctcaggactttattgacta

SEQ ID NO: 287805 - DNA, 25 bp, Artificial
  Probe
gaggacatcgacacaaccccagttc

SEQ ID NO: 287806 - DNA, 25 bp, Artificial
  Probe
ctgctggaagcactgagaaaaacca

SEQ ID NO: 287807 - DNA, 25 bp, Artificial
  Probe
taccacattcccaagggcacaagcg

SEQ ID NO: 287808 - DNA, 25 bp, Artificial
  Probe
ctcatggtcttaaggtctatgggga

SEQ ID NO: 287809 - DNA, 25 bp, Artificial
  Probe
ggtttagcccgcatggagatgttct

SEQ ID NO: 287810 - DNA, 25 bp, Artificial
  Probe
tgtgaaaaaacttcactgttttagc

SEQ ID NO: 287811 - DNA, 25 bp, Artificial
  Probe
tatggaaacaaacacggcgtttctc

SEQ ID NO: 287812 - DNA, 25 bp, Artificial
  Probe
gtgagcaaacaggtcctcctgtcct

SEQ ID NO: 287813 - DNA, 25 bp, Artificial
  Probe
gcagtgcctatcctgttctatacta

SEQ ID NO: 287814 - DNA, 25 bp, Artificial
  Probe
aatatgggcttttgctcttgctgaa

SEQ ID NO: 287815 - DNA, 25 bp, Artificial
  Probe
agttcagaggataccacattcccaa

SEQ ID NO: 287816 - DNA, 25 bp, Artificial
  Probe
ctgccctgcacgatgacaaagaatt

SEQ ID NO: 287817 - DNA, 25 bp, Artificial
  Probe
ttttggagcaggaacagagacaacg

SEQ ID NO: 287818 - DNA, 25 bp, Artificial
  Probe
taaacaggcatcgagcatctctgaa

SEQ ID NO: 287819 - DNA, 25 bp, Artificial
  Probe
aacagagacaacgagttccaccata

SEQ ID NO: 287820 - DNA, 25 bp, Artificial
  Probe
catagtgggtcgtcttgtgtgtctg

SEQ ID NO: 287821 - DNA, 25 bp, Artificial
  Probe
ctgttatacttgaattcaggtcagt

SEQ ID NO: 287822 - DNA, 25 bp, Artificial
  Probe
gaaatatgggcatctttgcgtcaca

SEQ ID NO: 287823 - DNA, 25 bp, Artificial
  Probe
tttgcgtcacacgtgtgtccatagt

SEQ ID NO: 287824 - DNA, 25 bp, Artificial
  Probe
ttctgcttctgaaacgagaatctgg

SEQ ID NO: 287825 - DNA, 25 bp, Artificial
  Probe
tcaggtcagtttcagtatttttcaa

SEQ ID NO: 287826 - DNA, 25 bp, Artificial
  Probe
tctggtaactgcattttctgtccca

SEQ ID NO: 287827 - DNA, 25 bp, Artificial
  Probe
gcgtcacacgtgtgtccatagtggg

SEQ ID NO: 287828 - DNA, 25 bp, Artificial
  Probe
tctttgcgtcacacgtgtgtccata

SEQ ID NO: 287829 - DNA, 25 bp, Artificial
  Probe
aatatgggcatctttgcgtcacacg

SEQ ID NO: 287830 - DNA, 25 bp, Artificial
  Probe
acttgaattcaggtcagtttcagta

SEQ ID NO: 287831 - DNA, 25 bp, Artificial
  Probe
gtccatagtgggtcgtcttgtgtgt

SEQ ID NO: 287832 - DNA, 25 bp, Artificial
  Probe
atacgattgtgagttgtgtcacagc

SEQ ID NO: 287833 - DNA, 25 bp, Artificial
  Probe
ggcatctttgcgtcacacgtgtgtc

SEQ ID NO: 287834 - DNA, 25 bp, Artificial
  Probe
gtcttgtgtgtctgtgcatccacac

SEQ ID NO: 287835 - DNA, 25 bp, Artificial
  Probe
ttctgaaacgagaatctggtaactg

SEQ ID NO: 287836 - DNA, 25 bp, Artificial
  Probe
tcttgtgtgtctgtgcatccacacg

SEQ ID NO: 287837 - DNA, 25 bp, Artificial
  Probe
tcccacgagatatgcaaaagcaatg

SEQ ID NO: 287838 - DNA, 25 bp, Artificial
  Probe
attttctgtcccacgagatatgcaa

SEQ ID NO: 287839 - DNA, 25 bp, Artificial
  Probe
agaatctggtaactgcattttctgt

SEQ ID NO: 287840 - DNA, 25 bp, Artificial
  Probe
gcaagaacaaaccactgtctctgct

SEQ ID NO: 287841 - DNA, 25 bp, Artificial
  Probe
ggaaaaactccaagaagacattttg

SEQ ID NO: 287842 - DNA, 25 bp, Artificial
  Probe
tctgcttctgcttctgaaacgagaa

SEQ ID NO: 287843 - DNA, 25 bp, Artificial
  Probe
actgtctctgcttctgcttctgaaa

SEQ ID NO: 287844 - DNA, 25 bp, Artificial
  Probe
cttctgaaacgagaatctggtaact

SEQ ID NO: 287845 - DNA, 25 bp, Artificial
  Probe
gtgtgtccatagtgggtcgtcttgt

SEQ ID NO: 287846 - DNA, 25 bp, Artificial
  Probe
actgcattttctgtcccacgagata

SEQ ID NO: 287847 - DNA, 25 bp, Artificial
  Probe
gaacaaaccactgtctctgcttctg

SEQ ID NO: 287848 - DNA, 25 bp, Artificial
  Probe
aaacgagaatctggtaactgcattt

SEQ ID NO: 287849 - DNA, 25 bp, Artificial
  Probe
tatgggcatctttgcgtcacacgtg

SEQ ID NO: 287850 - DNA, 25 bp, Artificial
  Probe
aatctggtaactgcattttctgtcc

SEQ ID NO: 287851 - DNA, 25 bp, Artificial
  Probe
ttatacttgaattcaggtcagtttc

SEQ ID NO: 287852 - DNA, 25 bp, Artificial
  Probe
cacttcttgtatattttgctgcatg

SEQ ID NO: 287853 - DNA, 25 bp, Artificial
  Probe
cgattgtgagttgtgtcacagcatt

SEQ ID NO: 287854 - DNA, 25 bp, Artificial
  Probe
gtgtgtctgtgcatccacacggtac

SEQ ID NO: 287855 - DNA, 25 bp, Artificial
  Probe
ctgtctctgcttctgcttctgaaac

SEQ ID NO: 287856 - DNA, 25 bp, Artificial
  Probe
tccatagtgggtcgtcttgtgtgtc

SEQ ID NO: 287857 - DNA, 25 bp, Artificial
  Probe
gtcccacgagatatgcaaaagcaat

SEQ ID NO: 287858 - DNA, 25 bp, Artificial
  Probe
taactgcattttctgtcccacgaga

SEQ ID NO: 287859 - DNA, 25 bp, Artificial
  Probe
tttctgtcccacgagatatgcaaaa

SEQ ID NO: 287860 - DNA, 25 bp, Artificial
  Probe
tgggtcgtcttgtgtgtctgtgcat

SEQ ID NO: 287861 - DNA, 25 bp, Artificial
  Probe
ctgtgcatccacacggtacgtgagc

SEQ ID NO: 287862 - DNA, 25 bp, Artificial
  Probe
aagcaagaacaaaccactgtctctg

SEQ ID NO: 287863 - DNA, 25 bp, Artificial
  Probe
attcaggtcagtttcagtatttttc

SEQ ID NO: 287864 - DNA, 25 bp, Artificial
  Probe
catctttgcgtcacacgtgtgtcca

SEQ ID NO: 287865 - DNA, 25 bp, Artificial
  Probe
tgtctgtgcatccacacggtacgtg

SEQ ID NO: 287866 - DNA, 25 bp, Artificial
  Probe
catctgagagggactggagttcccc

SEQ ID NO: 287867 - DNA, 25 bp, Artificial
  Probe
catgactcatgtagggaagtttctt

SEQ ID NO: 287868 - DNA, 25 bp, Artificial
  Probe
aagccctgggctgtgccatgctctc

SEQ ID NO: 287869 - DNA, 25 bp, Artificial
  Probe
aacttcccacctgtgaagaatgaac

SEQ ID NO: 287870 - DNA, 25 bp, Artificial
  Probe
aactggacctgctgcccatgggcaa

SEQ ID NO: 287871 - DNA, 25 bp, Artificial
  Probe
cgtgggaaaccaaacgcgtaatgat

SEQ ID NO: 287872 - DNA, 25 bp, Artificial
  Probe
aagctgaaaccgtatgcgttgggaa

SEQ ID NO: 287873 - DNA, 25 bp, Artificial
  Probe
tggagttccccgtctgcaggaagaa

SEQ ID NO: 287874 - DNA, 25 bp, Artificial
  Probe
gaaagatcagcttcttggctgagaa

SEQ ID NO: 287875 - DNA, 25 bp, Artificial
  Probe
ggctgagaaacaacttcccacctgt

SEQ ID NO: 287876 - DNA, 25 bp, Artificial
  Probe
actcagttcccatctgagagggact

SEQ ID NO: 287877 - DNA, 25 bp, Artificial
  Probe
tgcgttgggaaccagggtgaactca

SEQ ID NO: 287878 - DNA, 25 bp, Artificial
  Probe
tatgcgttgggaaccagggtgaact

SEQ ID NO: 287879 - DNA, 25 bp, Artificial
  Probe
ttcttggctgagaaacaacttccca

SEQ ID NO: 287880 - DNA, 25 bp, Artificial
  Probe
ttcccatctgagagggactggagtt

SEQ ID NO: 287881 - DNA, 25 bp, Artificial
  Probe
agcgaagctgaaaccgtatgcgttg

SEQ ID NO: 287882 - DNA, 25 bp, Artificial
  Probe
aacccagctcctgagtcaaaacctg

SEQ ID NO: 287883 - DNA, 25 bp, Artificial
  Probe
tgagaaacaacttcccacctgtgaa

SEQ ID NO: 287884 - DNA, 25 bp, Artificial
  Probe
ggaaccagggtgaactcagttccca

SEQ ID NO: 287885 - DNA, 25 bp, Artificial
  Probe
tttcccttgctcatgactcatgtag

SEQ ID NO: 287886 - DNA, 25 bp, Artificial
  Probe
caaacgcgtaatgattgacgataaa

SEQ ID NO: 287887 - DNA, 25 bp, Artificial
  Probe
agaatgaactggacctgctgcccat

SEQ ID NO: 287888 - DNA, 25 bp, Artificial
  Probe
agatcagcttcttggctgagaaaca

SEQ ID NO: 287889 - DNA, 25 bp, Artificial
  Probe
cagcttcttggctgagaaacaactt

SEQ ID NO: 287890 - DNA, 25 bp, Artificial
  Probe
aaaccaaacgcgtaatgattgacga

SEQ ID NO: 287891 - DNA, 25 bp, Artificial
  Probe
tgggcaaccgccatttctcggccat

SEQ ID NO: 287892 - DNA, 25 bp, Artificial
  Probe
catttctcggccatggaagtgtgta

SEQ ID NO: 287893 - DNA, 25 bp, Artificial
  Probe
ccacggtggaatgtgccagaaagat

SEQ ID NO: 287894 - DNA, 25 bp, Artificial
  Probe
aaccgccatttctcggccatggaag

SEQ ID NO: 287895 - DNA, 25 bp, Artificial
  Probe
tcggccatggaagtgtgtagaagcc

SEQ ID NO: 287896 - DNA, 25 bp, Artificial
  Probe
cccgtctgcaggaagaaaggaagga

SEQ ID NO: 287897 - DNA, 25 bp, Artificial
  Probe
agggactggagttccccgtctgcag

SEQ ID NO: 287898 - DNA, 25 bp, Artificial
  Probe
aactcagttcccatctgagagggac

SEQ ID NO: 287899 - DNA, 25 bp, Artificial
  Probe
agttcccatctgagagggactggag

SEQ ID NO: 287900 - DNA, 25 bp, Artificial
  Probe
catgagaactcgatgttcctagggg

SEQ ID NO: 287901 - DNA, 25 bp, Artificial
  Probe
acttcccacctgtgaagaatgaact

SEQ ID NO: 287902 - DNA, 25 bp, Artificial
  Probe
tgagaactcgatgttcctaggggag

SEQ ID NO: 287903 - DNA, 25 bp, Artificial
  Probe
gccagaaagatcagcttcttggctg

SEQ ID NO: 287904 - DNA, 25 bp, Artificial
  Probe
gctgaaaccgtatgcgttgggaacc

SEQ ID NO: 287905 - DNA, 25 bp, Artificial
  Probe
gaagccctgggctgtgccatgctct

SEQ ID NO: 287906 - DNA, 25 bp, Artificial
  Probe
ggtgaactcagttcccatctgagag

SEQ ID NO: 287907 - DNA, 25 bp, Artificial
  Probe
caccgtcggtaatggcatgagaact

SEQ ID NO: 287908 - DNA, 25 bp, Artificial
  Probe
atctgagagggactggagttccccg

SEQ ID NO: 287909 - DNA, 25 bp, Artificial
  Probe
aaccagggtgaactcagttcccatc

SEQ ID NO: 287910 - DNA, 25 bp, Artificial
  Probe
gttgaccacggtggaatgtgccaga

SEQ ID NO: 287911 - DNA, 25 bp, Artificial
  Probe
agggtgaactcagttcccatctgag

SEQ ID NO: 287912 - DNA, 25 bp, Artificial
  Probe
gtcttgctgtcatccccagcggtgc

SEQ ID NO: 287913 - DNA, 25 bp, Artificial
  Probe
ctgttttagccgaaggactcgatgt

SEQ ID NO: 287914 - DNA, 25 bp, Artificial
  Probe
agccagtgggcctggtagcacatgt

SEQ ID NO: 287915 - DNA, 25 bp, Artificial
  Probe
tcaggtctagccagtgggcctggta

SEQ ID NO: 287916 - DNA, 25 bp, Artificial
  Probe
aggcaactcaatgtgcctggggctc

SEQ ID NO: 287917 - DNA, 25 bp, Artificial
  Probe
tggtagcacatgtctgtcctcagcg

SEQ ID NO: 287918 - DNA, 25 bp, Artificial
  Probe
cacagagtcttgctgtcatccccag

SEQ ID NO: 287919 - DNA, 25 bp, Artificial
  Probe
gtgggcctggtagcacatgtctgtc

SEQ ID NO: 287920 - DNA, 25 bp, Artificial
  Probe
gtagcacatgtctgtcctcagcggg

SEQ ID NO: 287921 - DNA, 25 bp, Artificial
  Probe
gggcctggtagcacatgtctgtcct

SEQ ID NO: 287922 - DNA, 25 bp, Artificial
  Probe
ccgaaggactcgatgtggacgtcct

SEQ ID NO: 287923 - DNA, 25 bp, Artificial
  Probe
ggcaactcaatgtgcctggggctcg

SEQ ID NO: 287924 - DNA, 25 bp, Artificial
  Probe
actcaatgtgcctggggctcgttgt

SEQ ID NO: 287925 - DNA, 25 bp, Artificial
  Probe
cgttgtgggcccacagagtcttgct

SEQ ID NO: 287926 - DNA, 25 bp, Artificial
  Probe
cttgtatccatggtactctactcag

SEQ ID NO: 287927 - DNA, 25 bp, Artificial
  Probe
catccccagcggtgcagtgtggcag

SEQ ID NO: 287928 - DNA, 25 bp, Artificial
  Probe
acgtcctcagatatagctaggctaa

SEQ ID NO: 287929 - DNA, 25 bp, Artificial
  Probe
cccttcaggtctagccagtgggcct

SEQ ID NO: 287930 - DNA, 25 bp, Artificial
  Probe
gacttgtatccatggtactctactc

SEQ ID NO: 287931 - DNA, 25 bp, Artificial
  Probe
tgggttctggccacctcggtaactg

SEQ ID NO: 287932 - DNA, 25 bp, Artificial
  Probe
agctgtgggttctggccacctcggt

SEQ ID NO: 287933 - DNA, 25 bp, Artificial
  Probe
ggcccacagagtcttgctgtcatcc

SEQ ID NO: 287934 - DNA, 25 bp, Artificial
  Probe
aaggactcgatgtggacgtcctcag

SEQ ID NO: 287935 - DNA, 25 bp, Artificial
  Probe
tgtttgtaagctgtgggttctggcc

SEQ ID NO: 287936 - DNA, 25 bp, Artificial
  Probe
gtttgtaagctgtgggttctggcca

SEQ ID NO: 287937 - DNA, 25 bp, Artificial
  Probe
cagagtcttgctgtcatccccagcg

SEQ ID NO: 287938 - DNA, 25 bp, Artificial
  Probe
ggcccttcaggtctagccagtgggc

SEQ ID NO: 287939 - DNA, 25 bp, Artificial
  Probe
tggccggcccttcaggtctagccag

SEQ ID NO: 287940 - DNA, 25 bp, Artificial
  Probe
gtatccatggtactctactcagtcc

SEQ ID NO: 287941 - DNA, 25 bp, Artificial
  Probe
ttgtgggcccacagagtcttgctgt

SEQ ID NO: 287942 - DNA, 25 bp, Artificial
  Probe
gttttagccgaaggactcgatgtgg

SEQ ID NO: 287943 - DNA, 25 bp, Artificial
  Probe
tgtatccatggtactctactcagtc

SEQ ID NO: 287944 - DNA, 25 bp, Artificial
  Probe
gaggcaactcaatgtgcctggggct

SEQ ID NO: 287945 - DNA, 25 bp, Artificial
  Probe
aagactactggacttgtatccatgg

SEQ ID NO: 287946 - DNA, 25 bp, Artificial
  Probe
gtaagctgtgggttctggccacctc

SEQ ID NO: 287947 - DNA, 25 bp, Artificial
  Probe
ccggcccttcaggtctagccagtgg

SEQ ID NO: 287948 - DNA, 25 bp, Artificial
  Probe
gaaataaagattcatcccctggcct

SEQ ID NO: 287949 - DNA, 25 bp, Artificial
  Probe
ccagtgggcctggtagcacatgtct

SEQ ID NO: 287950 - DNA, 25 bp, Artificial
  Probe
ggtagcacatgtctgtcctcagcgg

SEQ ID NO: 287951 - DNA, 25 bp, Artificial
  Probe
gcaagactactggacttgtatccat

SEQ ID NO: 287952 - DNA, 25 bp, Artificial
  Probe
gttgtgggcccacagagtcttgctg

SEQ ID NO: 287953 - DNA, 25 bp, Artificial
  Probe
tcgatgtggacgtcctcagatatag

SEQ ID NO: 287954 - DNA, 25 bp, Artificial
  Probe
gctgtcatccccagcggtgcagtgt

SEQ ID NO: 287955 - DNA, 25 bp, Artificial
  Probe
cattgcatacttcttgatggtaata

SEQ ID NO: 287956 - DNA, 25 bp, Artificial
  Probe
ggacttgtatccatggtactctact

SEQ ID NO: 287957 - DNA, 25 bp, Artificial
  Probe
aggactcgatgtggacgtcctcaga

SEQ ID NO: 287958 - DNA, 25 bp, Artificial
  Probe
taaggtacctaagcaatagcatagt

SEQ ID NO: 287959 - DNA, 25 bp, Artificial
  Probe
aggtacctaagcaatagcatagttt

SEQ ID NO: 287960 - DNA, 25 bp, Artificial
  Probe
ttaaaaggccacaatgtggaaaatc

SEQ ID NO: 287961 - DNA, 25 bp, Artificial
  Probe
ctgtgcgaactggacagtcaccctt

SEQ ID NO: 287962 - DNA, 25 bp, Artificial
  Probe
tgtgcgaactggacagtcacccttt

SEQ ID NO: 287963 - DNA, 25 bp, Artificial
  Probe
actcgagactgtgcacactgataga

SEQ ID NO: 287964 - DNA, 25 bp, Artificial
  Probe
tacactgtgcttatgttgtttctaa

SEQ ID NO: 287965 - DNA, 25 bp, Artificial
  Probe
tgggtcattactcgagactgtgcac

SEQ ID NO: 287966 - DNA, 25 bp, Artificial
  Probe
atgttgggtcattactcgagactgt

SEQ ID NO: 287967 - DNA, 25 bp, Artificial
  Probe
gaactggacagtcacccttttgaga

SEQ ID NO: 287968 - DNA, 25 bp, Artificial
  Probe
agactgtgcacactgatagaggaca

SEQ ID NO: 287969 - DNA, 25 bp, Artificial
  Probe
gacacttggtgcttactgatgtgtg

SEQ ID NO: 287970 - DNA, 25 bp, Artificial
  Probe
tataaggtacctaagcaatagcata

SEQ ID NO: 287971 - DNA, 25 bp, Artificial
  Probe
tttatgttgggtcattactcgagac

SEQ ID NO: 287972 - DNA, 25 bp, Artificial
  Probe
cacttggtgcttactgatgtgtgaa

SEQ ID NO: 287973 - DNA, 25 bp, Artificial
  Probe
ttataaggtacctaagcaatagcat

SEQ ID NO: 287974 - DNA, 25 bp, Artificial
  Probe
acactgatagaggacacagagatgg

SEQ ID NO: 287975 - DNA, 25 bp, Artificial
  Probe
ttcttttctagtgacttgtgtgaca

SEQ ID NO: 287976 - DNA, 25 bp, Artificial
  Probe
gtgcacactgatagaggacacagag

SEQ ID NO: 287977 - DNA, 25 bp, Artificial
  Probe
tactcgagactgtgcacactgatag

SEQ ID NO: 287978 - DNA, 25 bp, Artificial
  Probe
aaggtacctaagcaatagcatagtt

SEQ ID NO: 287979 - DNA, 25 bp, Artificial
  Probe
ttatgttgggtcattactcgagact

SEQ ID NO: 287980 - DNA, 25 bp, Artificial
  Probe
tcgagactgtgcacactgatagagg

SEQ ID NO: 287981 - DNA, 25 bp, Artificial
  Probe
gactgtgcgaactggacagtcaccc

SEQ ID NO: 287982 - DNA, 25 bp, Artificial
  Probe
gagactgtgcacactgatagaggac

SEQ ID NO: 287983 - DNA, 25 bp, Artificial
  Probe
ggtacctaagcaatagcatagtttt

SEQ ID NO: 287984 - DNA, 25 bp, Artificial
  Probe
gtacctaagcaatagcatagttttt

SEQ ID NO: 287985 - DNA, 25 bp, Artificial
  Probe
acacttggtgcttactgatgtgtga

SEQ ID NO: 287986 - DNA, 25 bp, Artificial
  Probe
cgaactggacagtcacccttttgag

SEQ ID NO: 287987 - DNA, 25 bp, Artificial
  Probe
tgtgcacactgatagaggacacaga

SEQ ID NO: 287988 - DNA, 25 bp, Artificial
  Probe
aagactgtgcgaactggacagtcac

SEQ ID NO: 287989 - DNA, 25 bp, Artificial
  Probe
gttgggtcattactcgagactgtgc

SEQ ID NO: 287990 - DNA, 25 bp, Artificial
  Probe
aactggacagtcacccttttgagac

SEQ ID NO: 287991 - DNA, 25 bp, Artificial
  Probe
tgcgaactggacagtcacccttttg

SEQ ID NO: 287992 - DNA, 25 bp, Artificial
  Probe
attcttttctagtgacttgtgtgac

SEQ ID NO: 287993 - DNA, 25 bp, Artificial
  Probe
cattactcgagactgtgcacactga

SEQ ID NO: 287994 - DNA, 25 bp, Artificial
  Probe
actgtgcacactgatagaggacaca

SEQ ID NO: 287995 - DNA, 25 bp, Artificial
  Probe
gtcattactcgagactgtgcacact

SEQ ID NO: 287996 - DNA, 25 bp, Artificial
  Probe
gactgtgcacactgatagaggacac

SEQ ID NO: 287997 - DNA, 25 bp, Artificial
  Probe
gtgcgaactggacagtcaccctttt

SEQ ID NO: 287998 - DNA, 25 bp, Artificial
  Probe
ttactcgagactgtgcacactgata

SEQ ID NO: 287999 - DNA, 25 bp, Artificial
  Probe
gggtcattactcgagactgtgcaca

SEQ ID NO: 288000 - DNA, 25 bp, Artificial
  Probe
ggacagtcacccttttgagaccacc

SEQ ID NO: 288001 - DNA, 25 bp, Artificial
  Probe
ctcgagactgtgcacactgatagag

SEQ ID NO: 288002 - DNA, 25 bp, Artificial
  Probe
tgttgggtcattactcgagactgtg

SEQ ID NO: 288003 - DNA, 25 bp, Artificial
  Probe
cacactgatagaggacacagagatg

SEQ ID NO: 288004 - DNA, 25 bp, Artificial
  Probe
agagtctcctggaatcccataccca

SEQ ID NO: 288005 - DNA, 25 bp, Artificial
  Probe
agtatatgtcttcctgacgaagggg

SEQ ID NO: 288006 - DNA, 25 bp, Artificial
  Probe
caacttgttctttatccatgggccc

SEQ ID NO: 288007 - DNA, 25 bp, Artificial
  Probe
aatctcagagaggtggaagaatccc

SEQ ID NO: 288008 - DNA, 25 bp, Artificial
  Probe
ttcctgatcaaggaagacaaagtct

SEQ ID NO: 288009 - DNA, 25 bp, Artificial
  Probe
ccaccgtggagaatgccagagtgaa

SEQ ID NO: 288010 - DNA, 25 bp, Artificial
  Probe
cactgcggccttgaggtggcttgaa

SEQ ID NO: 288011 - DNA, 25 bp, Artificial
  Probe
atactgctatagcagtatagacaaa

SEQ ID NO: 288012 - DNA, 25 bp, Artificial
  Probe
gtcactcagggatccgggagttaat

SEQ ID NO: 288013 - DNA, 25 bp, Artificial
  Probe
ggtcactcagggatccgggagttaa

SEQ ID NO: 288014 - DNA, 25 bp, Artificial
  Probe
actggcgtctggactccagccgtga

SEQ ID NO: 288015 - DNA, 25 bp, Artificial
  Probe
ccatggatcacaatgggaccatgct

SEQ ID NO: 288016 - DNA, 25 bp, Artificial
  Probe
caaagtctgggtgtatcctcctgaa

SEQ ID NO: 288017 - DNA, 25 bp, Artificial
  Probe
agcatccttggctgcagtcaataaa

SEQ ID NO: 288018 - DNA, 25 bp, Artificial
  Probe
ttgggaattgcactgcggccttgag

SEQ ID NO: 288019 - DNA, 25 bp, Artificial
  Probe
cagggtaacaagttcctgagattta

SEQ ID NO: 288020 - DNA, 25 bp, Artificial
  Probe
catatcctgccctggcagaggccat

SEQ ID NO: 288021 - DNA, 25 bp, Artificial
  Probe
agccctgatgggaattagcccagcc

SEQ ID NO: 288022 - DNA, 25 bp, Artificial
  Probe
ttttcctgggatgagaaagtctatc

SEQ ID NO: 288023 - DNA, 25 bp, Artificial
  Probe
tctgggtgtatcctcctgaaaagaa

SEQ ID NO: 288024 - DNA, 25 bp, Artificial
  Probe
tttcctgccctggttcttccaagct

SEQ ID NO: 288025 - DNA, 25 bp, Artificial
  Probe
aggtgccacctatgccttcagtggc

SEQ ID NO: 288026 - DNA, 25 bp, Artificial
  Probe
gcatccttggctgcagtcaataaaa

SEQ ID NO: 288027 - DNA, 25 bp, Artificial
  Probe
gactttgccacaagaacccaaaagg

SEQ ID NO: 288028 - DNA, 25 bp, Artificial
  Probe
ctgccctggcagaggccatggtaaa

SEQ ID NO: 288029 - DNA, 25 bp, Artificial
  Probe
tcagtggctcccactactggcgtct

SEQ ID NO: 288030 - DNA, 25 bp, Artificial
  Probe
ccccatgagaaagttgatggtgccc

SEQ ID NO: 288031 - DNA, 25 bp, Artificial
  Probe
ccaaaaggaacgttcctggcctgct

SEQ ID NO: 288032 - DNA, 25 bp, Artificial
  Probe
agtgaaggtgtcctcttcttccaag

SEQ ID NO: 288033 - DNA, 25 bp, Artificial
  Probe
acaatgggaccatgctgttctttaa

SEQ ID NO: 288034 - DNA, 25 bp, Artificial
  Probe
gcccaatttatactgctatagcagt

SEQ ID NO: 288035 - DNA, 25 bp, Artificial
  Probe
agaatgccagagtgaaggtgtcctc

SEQ ID NO: 288036 - DNA, 25 bp, Artificial
  Probe
ggatccgggagttaatctcagagag

SEQ ID NO: 288037 - DNA, 25 bp, Artificial
  Probe
ccatgctgttctttaaaggggagtt

SEQ ID NO: 288038 - DNA, 25 bp, Artificial
  Probe
cccaccagacgcagctgtggaatgc

SEQ ID NO: 288039 - DNA, 25 bp, Artificial
  Probe
taatctcagagaggtggaagaatcc

SEQ ID NO: 288040 - DNA, 25 bp, Artificial
  Probe
aaatggaactgctcatgggaatagc

SEQ ID NO: 288041 - DNA, 25 bp, Artificial
  Probe
gttcctgagatttaaccccgtcaca

SEQ ID NO: 288042 - DNA, 25 bp, Artificial
  Probe
gaatgccagagtgaaggtgtcctct

SEQ ID NO: 288043 - DNA, 25 bp, Artificial
  Probe
actgctatagcagtatagacaaact

SEQ ID NO: 288044 - DNA, 25 bp, Artificial
  Probe
ccgggatcagccttgataccataga

SEQ ID NO: 288045 - DNA, 25 bp, Artificial
  Probe
ggcactcaagtatatgtcttcctga

SEQ ID NO: 288046 - DNA, 25 bp, Artificial
  Probe
atccgggagttaatctcagagaggt

SEQ ID NO: 288047 - DNA, 25 bp, Artificial
  Probe
cagatcctggcctgtctgcactgct

SEQ ID NO: 288048 - DNA, 25 bp, Artificial
  Probe
ggaagaatcccgtcacctcagtgga

SEQ ID NO: 288049 - DNA, 25 bp, Artificial
  Probe
ggtatccaaagttgttccaagaaga

SEQ ID NO: 288050 - DNA, 25 bp, Artificial
  Probe
ccatgtaccagattaagtatgagga

SEQ ID NO: 288051 - DNA, 25 bp, Artificial
  Probe
gaagcctacatgaacaaggtggagc

SEQ ID NO: 288052 - DNA, 25 bp, Artificial
  Probe
ttgagtcccgcctggaaggactgac

SEQ ID NO: 288053 - DNA, 25 bp, Artificial
  Probe
gaaccgtaacatcagccgcctgcag

SEQ ID NO: 288054 - DNA, 25 bp, Artificial
  Probe
tgctgtccatggacaacagccgctc

SEQ ID NO: 288055 - DNA, 25 bp, Artificial
  Probe
tccggcagatccatgaagaggagat

SEQ ID NO: 288056 - DNA, 25 bp, Artificial
  Probe
ggatctgaagaatgccctgcagaag

SEQ ID NO: 288057 - DNA, 25 bp, Artificial
  Probe
acgtctgtggtgctgtccatggaca

SEQ ID NO: 288058 - DNA, 25 bp, Artificial
  Probe
cggcagatccatgaagaggagatcc

SEQ ID NO: 288059 - DNA, 25 bp, Artificial
  Probe
gagctgaggccgaaaccatgtacca

SEQ ID NO: 288060 - DNA, 25 bp, Artificial
  Probe
agattgacgccctcaaaggccagag

SEQ ID NO: 288061 - DNA, 25 bp, Artificial
  Probe
aagcacggggatgatctacgtcgct

SEQ ID NO: 288062 - DNA, 25 bp, Artificial
  Probe
ccaagctggaggatctgaagaatgc

SEQ ID NO: 288063 - DNA, 25 bp, Artificial
  Probe
cagcagaagacatccaggagcaaca

SEQ ID NO: 288064 - DNA, 25 bp, Artificial
  Probe
gatcaacaagcgtacagagatggag

SEQ ID NO: 288065 - DNA, 25 bp, Artificial
  Probe
atccgtgagctgcagtctcagatct

SEQ ID NO: 288066 - DNA, 25 bp, Artificial
  Probe
tggagcttggcaacatgcagggcct

SEQ ID NO: 288067 - DNA, 25 bp, Artificial
  Probe
gagagttacatcaacaacctccgtc

SEQ ID NO: 288068 - DNA, 25 bp, Artificial
  Probe
agaatgagtttgtcctcatcaagaa

SEQ ID NO: 288069 - DNA, 25 bp, Artificial
  Probe
aaggactgaccgacgagatcaactt

SEQ ID NO: 288070 - DNA, 25 bp, Artificial
  Probe
gcagccgagctgaggccgaaaccat

SEQ ID NO: 288071 - DNA, 25 bp, Artificial
  Probe
agcttggcaacatgcagggcctggt

SEQ ID NO: 288072 - DNA, 25 bp, Artificial
  Probe
ttacatcaacaacctccgtcggcag

SEQ ID NO: 288073 - DNA, 25 bp, Artificial
  Probe
caacaagcgtacagagatggagaat

SEQ ID NO: 288074 - DNA, 25 bp, Artificial
  Probe
gaggagatcgccaaccgcagccgag

SEQ ID NO: 288075 - DNA, 25 bp, Artificial
  Probe
ggaactggccgtgaaggatgccaat

SEQ ID NO: 288076 - DNA, 25 bp, Artificial
  Probe
ctccgtcggcagctggaagccctgg

SEQ ID NO: 288077 - DNA, 25 bp, Artificial
  Probe
cagatctcagacacgtctgtggtgc

SEQ ID NO: 288078 - DNA, 25 bp, Artificial
  Probe
ccctgggccaggagaagctgaagct

SEQ ID NO: 288079 - DNA, 25 bp, Artificial
  Probe
caagctggaggatctgaagaatgcc

SEQ ID NO: 288080 - DNA, 25 bp, Artificial
  Probe
tgacgccctcaaaggccagagggca

SEQ ID NO: 288081 - DNA, 25 bp, Artificial
  Probe
catggacaacatgtttgagagttac

SEQ ID NO: 288082 - DNA, 25 bp, Artificial
  Probe
cgtcgctcgaagacggagatctctg

SEQ ID NO: 288083 - DNA, 25 bp, Artificial
  Probe
ttgctgcaacagcagaagacatcca

SEQ ID NO: 288084 - DNA, 25 bp, Artificial
  Probe
gcctgcaggcggagattgacgccct

SEQ ID NO: 288085 - DNA, 25 bp, Artificial
  Probe
tcctcatcaagaaggatgtggatga

SEQ ID NO: 288086 - DNA, 25 bp, Artificial
  Probe
gatctacgtcgctcgaagacggaga

SEQ ID NO: 288087 - DNA, 25 bp, Artificial
  Probe
tgaacaaggtggagcttgagtcccg

SEQ ID NO: 288088 - DNA, 25 bp, Artificial
  Probe
ccctggacatggacagcatcattgc

SEQ ID NO: 288089 - DNA, 25 bp, Artificial
  Probe
gtgctgtccatggacaacagccgct

SEQ ID NO: 288090 - DNA, 25 bp, Artificial
  Probe
tggagaccaaatggagcttgctgca

SEQ ID NO: 288091 - DNA, 25 bp, Artificial
  Probe
atcgccaaccgcagccgagctgagg

SEQ ID NO: 288092 - DNA, 25 bp, Artificial
  Probe
atgaggaattgcagaccctggctgg

SEQ ID NO: 288093 - DNA, 25 bp, Artificial
  Probe
tgcccagtatgaggagatcgccaac

SEQ ID NO: 288094 - DNA, 25 bp, Artificial
  Probe
aagccctgggccaggagaagctgaa

SEQ ID NO: 288095 - DNA, 25 bp, Artificial
  Probe
acacgtctgtggtgctgtccatgga

SEQ ID NO: 288096 - DNA, 25 bp, Artificial
  Probe
gtcctctgaagtcaaggagatagaa

SEQ ID NO: 288097 - DNA, 25 bp, Artificial
  Probe
tggagcgcaccctggaggagaccaa

SEQ ID NO: 288098 - DNA, 25 bp, Artificial
  Probe
ctgcttcagctgtggcgtccagaaa

SEQ ID NO: 288099 - DNA, 25 bp, Artificial
  Probe
gccagaaccaagagtacaatatcct

SEQ ID NO: 288100 - DNA, 25 bp, Artificial
  Probe
cgccgccttctggaaggagaggaca

SEQ ID NO: 288101 - DNA, 25 bp, Artificial
  Probe
gaggttcaagtcacggaactgagac

SEQ ID NO: 288102 - DNA, 25 bp, Artificial
  Probe
ttcactctggggagctgtaaagggc

SEQ ID NO: 288103 - DNA, 25 bp, Artificial
  Probe
acgttttcactctggggagctgtaa

SEQ ID NO: 288104 - DNA, 25 bp, Artificial
  Probe
cccaactaagcatgaaagagtctct

SEQ ID NO: 288105 - DNA, 25 bp, Artificial
  Probe
tccagaaaccgcatcaatactgtgc

SEQ ID NO: 288106 - DNA, 25 bp, Artificial
  Probe
ctaaacactttggaagcaaaagata

SEQ ID NO: 288107 - DNA, 25 bp, Artificial
  Probe
ggtcgtgtcctctgaagtcaaggag

SEQ ID NO: 288108 - DNA, 25 bp, Artificial
  Probe
tggtagacggcaaggtcgtgtcctc

SEQ ID NO: 288109 - DNA, 25 bp, Artificial
  Probe
gagcgacactgaacgccagaaccaa

SEQ ID NO: 288110 - DNA, 25 bp, Artificial
  Probe
atagagctccagtcccaactaagca

SEQ ID NO: 288111 - DNA, 25 bp, Artificial
  Probe
tgagttccctggaggcccaactgat

SEQ ID NO: 288112 - DNA, 25 bp, Artificial
  Probe
gacataaaaactacagagtaccagc

SEQ ID NO: 288113 - DNA, 25 bp, Artificial
  Probe
tatcctccttgacataaagacccgg

SEQ ID NO: 288114 - DNA, 25 bp, Artificial
  Probe
gcatcaatactgtgcggtgacagtc

SEQ ID NO: 288115 - DNA, 25 bp, Artificial
  Probe
ccctggaggagaccaaggctcgtta

SEQ ID NO: 288116 - DNA, 25 bp, Artificial
  Probe
cctctgaagtcaaggagatagaaga

SEQ ID NO: 288117 - DNA, 25 bp, Artificial
  Probe
ccttgacataaagacccggcttgag

SEQ ID NO: 288118 - DNA, 25 bp, Artificial
  Probe
tacagagtaccagctaaacactttg

SEQ ID NO: 288119 - DNA, 25 bp, Artificial
  Probe
aagcatgaaagagtctctggagcgc

SEQ ID NO: 288120 - DNA, 25 bp, Artificial
  Probe
ccttctggaaggagaggacataaaa

SEQ ID NO: 288121 - DNA, 25 bp, Artificial
  Probe
catccaggaaatgctgagttccctg

SEQ ID NO: 288122 - DNA, 25 bp, Artificial
  Probe
atgcagatccggagcgacactgaac

SEQ ID NO: 288123 - DNA, 25 bp, Artificial
  Probe
gctcgttatgccagccagttggcgg

SEQ ID NO: 288124 - DNA, 25 bp, Artificial
  Probe
ccagaccctggaaatagagctccag

SEQ ID NO: 288125 - DNA, 25 bp, Artificial
  Probe
actgtgcggtgacagtctatttatt

SEQ ID NO: 288126 - DNA, 25 bp, Artificial
  Probe
atactgtgcggtgacagtctattta

SEQ ID NO: 288127 - DNA, 25 bp, Artificial
  Probe
cagttggcggccatccaggaaatgc

SEQ ID NO: 288128 - DNA, 25 bp, Artificial
  Probe
aggaaatgctgagttccctggaggc

SEQ ID NO: 288129 - DNA, 25 bp, Artificial
  Probe
tcagctgtggcgtccagaaaccgca

SEQ ID NO: 288130 - DNA, 25 bp, Artificial
  Probe
ccctggaggcccaactgatgcagat

SEQ ID NO: 288131 - DNA, 25 bp, Artificial
  Probe
aacatataaacagctgccaatgggg

SEQ ID NO: 288132 - DNA, 25 bp, Artificial
  Probe
catataaacagctgccaatggggag

SEQ ID NO: 288133 - DNA, 25 bp, Artificial
  Probe
ggaaatagagctccagtcccaacta

SEQ ID NO: 288134 - DNA, 25 bp, Artificial
  Probe
aactgatgcagatccggagcgacac

SEQ ID NO: 288135 - DNA, 25 bp, Artificial
  Probe
aagagtctctggagcgcaccctgga

SEQ ID NO: 288136 - DNA, 25 bp, Artificial
  Probe
ggagaccaaggctcgttatgccagc

SEQ ID NO: 288137 - DNA, 25 bp, Artificial
  Probe
atataaacgttttcactctggggag

SEQ ID NO: 288138 - DNA, 25 bp, Artificial
  Probe
tggcgtccagaaaccgcatcaatac

SEQ ID NO: 288139 - DNA, 25 bp, Artificial
  Probe
ctgaacgccagaaccaagagtacaa

SEQ ID NO: 288140 - DNA, 25 bp, Artificial
  Probe
ccagtcccaactaagcatgaaagag

SEQ ID NO: 288141 - DNA, 25 bp, Artificial
  Probe
gaggctgcttcagctgtggcgtcca

SEQ ID NO: 288142 - DNA, 25 bp, Artificial
  Probe
ttgcactcagtgcactcaagtgctc

SEQ ID NO: 288143 - DNA, 25 bp, Artificial
  Probe
ttacacgccatctgttggctgtagc

SEQ ID NO: 288144 - DNA, 25 bp, Artificial
  Probe
ctcaagtgctcactgttgtttagtc

SEQ ID NO: 288145 - DNA, 25 bp, Artificial
  Probe
tgttgtttagtcagtaactgctttc

SEQ ID NO: 288146 - DNA, 25 bp, Artificial
  Probe
cagtaactgctttctggtttgaaag

SEQ ID NO: 288147 - DNA, 25 bp, Artificial
  Probe
ctgctttctggtttgaaagatgcag

SEQ ID NO: 288148 - DNA, 25 bp, Artificial
  Probe
gcacagttgcactcagtgcactcaa

SEQ ID NO: 288149 - DNA, 25 bp, Artificial
  Probe
tcagtgacagctccaaacttacacg

SEQ ID NO: 288150 - DNA, 25 bp, Artificial
  Probe
taaggcaccttaagtcagtgacagc

SEQ ID NO: 288151 - DNA, 25 bp, Artificial
  Probe
gacataaggcaccttaagtcagtga

SEQ ID NO: 288152 - DNA, 25 bp, Artificial
  Probe
cactcaagtgctcactgttgtttag

SEQ ID NO: 288153 - DNA, 25 bp, Artificial
  Probe
cacgccatctgttggctgtagctgt

SEQ ID NO: 288154 - DNA, 25 bp, Artificial
  Probe
gcactcagtgcactcaagtgctcac

SEQ ID NO: 288155 - DNA, 25 bp, Artificial
  Probe
cactgttgtttagtcagtaactgct

SEQ ID NO: 288156 - DNA, 25 bp, Artificial
  Probe
tgtcagcctcctcagagcaagtctt

SEQ ID NO: 288157 - DNA, 25 bp, Artificial
  Probe
cagttgcactcagtgcactcaagtg

SEQ ID NO: 288158 - DNA, 25 bp, Artificial
  Probe
ctcctcagagcaagtcttaacagac

SEQ ID NO: 288159 - DNA, 25 bp, Artificial
  Probe
ctgcacagttgcactcagtgcactc

SEQ ID NO: 288160 - DNA, 25 bp, Artificial
  Probe
aacttacacgccatctgttggctgt

SEQ ID NO: 288161 - DNA, 25 bp, Artificial
  Probe
aactgctttctggtttgaaagatgc

SEQ ID NO: 288162 - DNA, 25 bp, Artificial
  Probe
ataaggcaccttaagtcagtgacag

SEQ ID NO: 288163 - DNA, 25 bp, Artificial
  Probe
acttacacgccatctgttggctgta

SEQ ID NO: 288164 - DNA, 25 bp, Artificial
  Probe
ctactgaactgtcagcctcctcaga

SEQ ID NO: 288165 - DNA, 25 bp, Artificial
  Probe
cacagttgcactcagtgcactcaag

SEQ ID NO: 288166 - DNA, 25 bp, Artificial
  Probe
gtcttaacagacttgttccagttat

SEQ ID NO: 288167 - DNA, 25 bp, Artificial
  Probe
ccaccttacattagggaaggctaag

SEQ ID NO: 288168 - DNA, 25 bp, Artificial
  Probe
tgtcacctactgaactgtcagcctc

SEQ ID NO: 288169 - DNA, 25 bp, Artificial
  Probe
atgtcacctactgaactgtcagcct

SEQ ID NO: 288170 - DNA, 25 bp, Artificial
  Probe
gcctcctcagagcaagtcttaacag

SEQ ID NO: 288171 - DNA, 25 bp, Artificial
  Probe
gaactgtcagcctcctcagagcaag

SEQ ID NO: 288172 - DNA, 25 bp, Artificial
  Probe
tcaagtgctcactgttgtttagtca

SEQ ID NO: 288173 - DNA, 25 bp, Artificial
  Probe
tactgaactgtcagcctcctcagag

SEQ ID NO: 288174 - DNA, 25 bp, Artificial
  Probe
ccatctgttggctgtagctgtctgc

SEQ ID NO: 288175 - DNA, 25 bp, Artificial
  Probe
agcaagtcttaacagacttgttcca

SEQ ID NO: 288176 - DNA, 25 bp, Artificial
  Probe
tacatgtcacctactgaactgtcag

SEQ ID NO: 288177 - DNA, 25 bp, Artificial
  Probe
gccctgcacagttgcactcagtgca

SEQ ID NO: 288178 - DNA, 25 bp, Artificial
  Probe
gctgtagctgtctgctcagatcgga

SEQ ID NO: 288179 - DNA, 25 bp, Artificial
  Probe
aacagacttgttccagttatgccca

SEQ ID NO: 288180 - DNA, 25 bp, Artificial
  Probe
tcagagcaagtcttaacagacttgt

SEQ ID NO: 288181 - DNA, 25 bp, Artificial
  Probe
aggcaccttaagtcagtgacagctc

SEQ ID NO: 288182 - DNA, 25 bp, Artificial
  Probe
acataaggcaccttaagtcagtgac

SEQ ID NO: 288183 - DNA, 25 bp, Artificial
  Probe
cttacattagggaaggctaagacat

SEQ ID NO: 288184 - DNA, 25 bp, Artificial
  Probe
actgtcagcctcctcagagcaagtc

SEQ ID NO: 288185 - DNA, 25 bp, Artificial
  Probe
gtgacagctccaaacttacacgcca

SEQ ID NO: 288186 - DNA, 25 bp, Artificial
  Probe
agtgcactcaagtgctcactgttgt

SEQ ID NO: 288187 - DNA, 25 bp, Artificial
  Probe
cactcagtgcactcaagtgctcact

SEQ ID NO: 288188 - DNA, 25 bp, Artificial
  Probe
tgcacgttggccagaaggactgctg

SEQ ID NO: 288189 - DNA, 25 bp, Artificial
  Probe
agacaaagtggtgctaagggaactc

SEQ ID NO: 288190 - DNA, 25 bp, Artificial
  Probe
tcctggcccattgctaggccctgtt

SEQ ID NO: 288191 - DNA, 25 bp, Artificial
  Probe
ccactgtaacgatggtcatccttgt

SEQ ID NO: 288192 - DNA, 25 bp, Artificial
  Probe
gttgacctccattgcttacctgcct

SEQ ID NO: 288193 - DNA, 25 bp, Artificial
  Probe
agccagctacatctgtctctcaaag

SEQ ID NO: 288194 - DNA, 25 bp, Artificial
  Probe
tttccgtccggcagctgtgctacag

SEQ ID NO: 288195 - DNA, 25 bp, Artificial
  Probe
tcagccccttgcactgtatgttcct

SEQ ID NO: 288196 - DNA, 25 bp, Artificial
  Probe
ctggaggacgctgtcaccaaaccag

SEQ ID NO: 288197 - DNA, 25 bp, Artificial
  Probe
ggtagtgggccatcgccagttgcat

SEQ ID NO: 288198 - DNA, 25 bp, Artificial
  Probe
ctaggccctgtttgtgtgttattaa

SEQ ID NO: 288199 - DNA, 25 bp, Artificial
  Probe
tgtgtttgcctgtccctggaggctg

SEQ ID NO: 288200 - DNA, 25 bp, Artificial
  Probe
ctctgcctaaggtaccgtgcctcag

SEQ ID NO: 288201 - DNA, 25 bp, Artificial
  Probe
cacctagagccctgggctttgaaag

SEQ ID NO: 288202 - DNA, 25 bp, Artificial
  Probe
gctttgaaaggcagccttaggacac

SEQ ID NO: 288203 - DNA, 25 bp, Artificial
  Probe
gatgtccagccagactcctaactat

SEQ ID NO: 288204 - DNA, 25 bp, Artificial
  Probe
gtgctacagagacaaagtggtgcta

SEQ ID NO: 288205 - DNA, 25 bp, Artificial
  Probe
attgctaggccctgtttgtgtgtta

SEQ ID NO: 288206 - DNA, 25 bp, Artificial
  Probe
cgttggccagaaggactgctggcct

SEQ ID NO: 288207 - DNA, 25 bp, Artificial
  Probe
ggaactcttaagtagaccgtagcac

SEQ ID NO: 288208 - DNA, 25 bp, Artificial
  Probe
tcctttgggtctcctggcccattgc

SEQ ID NO: 288209 - DNA, 25 bp, Artificial
  Probe
cagctacatctgtctctcaaagatg

SEQ ID NO: 288210 - DNA, 25 bp, Artificial
  Probe
ttttttgactgcacgttggccagaa

SEQ ID NO: 288211 - DNA, 25 bp, Artificial
  Probe
gggcatcatcttacttcccaaaatg

SEQ ID NO: 288212 - DNA, 25 bp, Artificial
  Probe
ggcagccttaggacacactcctctg

SEQ ID NO: 288213 - DNA, 25 bp, Artificial
  Probe
atggcacaggttttgtgggctgtct

SEQ ID NO: 288214 - DNA, 25 bp, Artificial
  Probe
ttacttcccaaaatgtgtttgcctg

SEQ ID NO: 288215 - DNA, 25 bp, Artificial
  Probe
aaggcctatggcacaggttttgtgg

SEQ ID NO: 288216 - DNA, 25 bp, Artificial
  Probe
gtattggtcctttgggtctcctggc

SEQ ID NO: 288217 - DNA, 25 bp, Artificial
  Probe
tcaccaaaccagagctaagaccctg

SEQ ID NO: 288218 - DNA, 25 bp, Artificial
  Probe
cttaggacacactcctctgcctaag

SEQ ID NO: 288219 - DNA, 25 bp, Artificial
  Probe
cgtagcacctagagccctgggcttt

SEQ ID NO: 288220 - DNA, 25 bp, Artificial
  Probe
atctgctggaggacgctgtcaccaa

SEQ ID NO: 288221 - DNA, 25 bp, Artificial
  Probe
aaacctgataattggggcatcatct

SEQ ID NO: 288222 - DNA, 25 bp, Artificial
  Probe
acccaaggcctatggcacaggtttt

SEQ ID NO: 288223 - DNA, 25 bp, Artificial
  Probe
gccatcgccagttgcatctgctgga

SEQ ID NO: 288224 - DNA, 25 bp, Artificial
  Probe
tggcccattgctaggccctgtttgt

SEQ ID NO: 288225 - DNA, 25 bp, Artificial
  Probe
taggacacactcctctgcctaaggt

SEQ ID NO: 288226 - DNA, 25 bp, Artificial
  Probe
gaactgtatccctgagcaggagggt

SEQ ID NO: 288227 - DNA, 25 bp, Artificial
  Probe
cagaaggactgctggcctggcctcc

SEQ ID NO: 288228 - DNA, 25 bp, Artificial
  Probe
tggtagtgggccatcgccagttgca

SEQ ID NO: 288229 - DNA, 25 bp, Artificial
  Probe
ggatgagaactgtatccctgagcag

SEQ ID NO: 288230 - DNA, 25 bp, Artificial
  Probe
tctgcctaaggtaccgtgcctcagc

SEQ ID NO: 288231 - DNA, 25 bp, Artificial
  Probe
ataattggggcatcatcttacttcc

SEQ ID NO: 288232 - DNA, 25 bp, Artificial
  Probe
ggatgtggttgacctccattgctta

SEQ ID NO: 288233 - DNA, 25 bp, Artificial
  Probe
acatctgtctctcaaagatgtccag

SEQ ID NO: 288234 - DNA, 25 bp, Artificial
  Probe
tctggtccctattgcccttcaggga

SEQ ID NO: 288235 - DNA, 25 bp, Artificial
  Probe
aggtggctgcaaggttcccagcagt

SEQ ID NO: 288236 - DNA, 25 bp, Artificial
  Probe
gtgcagatctggtccctattgccct

SEQ ID NO: 288237 - DNA, 25 bp, Artificial
  Probe
tgagcctggccgtctctatggagca

SEQ ID NO: 288238 - DNA, 25 bp, Artificial
  Probe
tcccagcagtgcagatctggtccct

SEQ ID NO: 288239 - DNA, 25 bp, Artificial
  Probe
aaggtggctgcaaggttcccagcag

SEQ ID NO: 288240 - DNA, 25 bp, Artificial
  Probe
tttgcacatgttctgtctgagcctg

SEQ ID NO: 288241 - DNA, 25 bp, Artificial
  Probe
tgcaggagccagtgcagaccacacc

SEQ ID NO: 288242 - DNA, 25 bp, Artificial
  Probe
gtataaacagtcatttgcacatgtt

SEQ ID NO: 288243 - DNA, 25 bp, Artificial
  Probe
ttgatggttcttgtcagcatgttgc

SEQ ID NO: 288244 - DNA, 25 bp, Artificial
  Probe
ttgtcagcatgttgcggttttctag

SEQ ID NO: 288245 - DNA, 25 bp, Artificial
  Probe
aagagcgtttacaactgcgcagctc

SEQ ID NO: 288246 - DNA, 25 bp, Artificial
  Probe
agcctggccgtctctatggagcagg

SEQ ID NO: 288247 - DNA, 25 bp, Artificial
  Probe
gaatggccagtgtccccagtaggag

SEQ ID NO: 288248 - DNA, 25 bp, Artificial
  Probe
cctggccgtctctatggagcagggc

SEQ ID NO: 288249 - DNA, 25 bp, Artificial
  Probe
agatctggtccctattgcccttcag

SEQ ID NO: 288250 - DNA, 25 bp, Artificial
  Probe
agcagtgcagatctggtccctattg

SEQ ID NO: 288251 - DNA, 25 bp, Artificial
  Probe
gcaggagccagtgcagaccacacca

SEQ ID NO: 288252 - DNA, 25 bp, Artificial
  Probe
tctctatggagcagggccccaggga

SEQ ID NO: 288253 - DNA, 25 bp, Artificial
  Probe
agtcatttgcacatgttctgtctga

SEQ ID NO: 288254 - DNA, 25 bp, Artificial
  Probe
tgtataaacagtcatttgcacatgt

SEQ ID NO: 288255 - DNA, 25 bp, Artificial
  Probe
ggtgcaggagccagtgcagaccaca

SEQ ID NO: 288256 - DNA, 25 bp, Artificial
  Probe
gcgcaggctgcttgcctggtgctct

SEQ ID NO: 288257 - DNA, 25 bp, Artificial
  Probe
tcatagtttgatggttcttgtcagc

SEQ ID NO: 288258 - DNA, 25 bp, Artificial
  Probe
aacagtcatttgcacatgttctgtc

SEQ ID NO: 288259 - DNA, 25 bp, Artificial
  Probe
caggaatggccagtgtccccagtag

SEQ ID NO: 288260 - DNA, 25 bp, Artificial
  Probe
catttgcacatgttctgtctgagcc

SEQ ID NO: 288261 - DNA, 25 bp, Artificial
  Probe
gctgcttgcctggtgctctgggttt

SEQ ID NO: 288262 - DNA, 25 bp, Artificial
  Probe
tggttcttgtcagcatgttgcggtt

SEQ ID NO: 288263 - DNA, 25 bp, Artificial
  Probe
cccctgctggaactgaggagcaggt

SEQ ID NO: 288264 - DNA, 25 bp, Artificial
  Probe
atgttctgtctgagcctggccgtct

SEQ ID NO: 288265 - DNA, 25 bp, Artificial
  Probe
cttcccctgctggaactgaggagca

SEQ ID NO: 288266 - DNA, 25 bp, Artificial
  Probe
ggccccagggatctatggcaggaat

SEQ ID NO: 288267 - DNA, 25 bp, Artificial
  Probe
tgcctggtgctctgggtttcatagt

SEQ ID NO: 288268 - DNA, 25 bp, Artificial
  Probe
tctgtctgagcctggccgtctctat

SEQ ID NO: 288269 - DNA, 25 bp, Artificial
  Probe
cagtgtccccagtaggagccggaag

SEQ ID NO: 288270 - DNA, 25 bp, Artificial
  Probe
cgtctctatggagcagggccccagg

SEQ ID NO: 288271 - DNA, 25 bp, Artificial
  Probe
gttttccccttgcttgtataaacag

SEQ ID NO: 288272 - DNA, 25 bp, Artificial
  Probe
gccagtgtccccagtaggagccgga

SEQ ID NO: 288273 - DNA, 25 bp, Artificial
  Probe
ctatggcaggaatggccagtgtccc

SEQ ID NO: 288274 - DNA, 25 bp, Artificial
  Probe
tactatttgttgtgttttcccacgg

SEQ ID NO: 288275 - DNA, 25 bp, Artificial
  Probe
cccagggatctatggcaggaatggc

SEQ ID NO: 288276 - DNA, 25 bp, Artificial
  Probe
gatctatggcaggaatggccagtgt

SEQ ID NO: 288277 - DNA, 25 bp, Artificial
  Probe
catagtttgatggttcttgtcagca

SEQ ID NO: 288278 - DNA, 25 bp, Artificial
  Probe
gcaaggttcccagcagtgcagatct

SEQ ID NO: 288279 - DNA, 25 bp, Artificial
  Probe
cagtgcagatctggtccctattgcc

SEQ ID NO: 288280 - DNA, 25 bp, Artificial
  Probe
gcagccaggcccacaatgctgaaat

SEQ ID NO: 288281 - DNA, 25 bp, Artificial
  Probe
cattgctttggtgtactgggctatg

SEQ ID NO: 288282 - DNA, 25 bp, Artificial
  Probe
atgcatgctgggaagcagcagcctc

SEQ ID NO: 288283 - DNA, 25 bp, Artificial
  Probe
gctgctgctgggacagtgaccagca

SEQ ID NO: 288284 - DNA, 25 bp, Artificial
  Probe
aaaccactggccatttgctgcctct

SEQ ID NO: 288285 - DNA, 25 bp, Artificial
  Probe
gtgctgcagcccaggctccttctag

SEQ ID NO: 288286 - DNA, 25 bp, Artificial
  Probe
atagcaagctcatgccgctgtccca

SEQ ID NO: 288287 - DNA, 25 bp, Artificial
  Probe
aggtgaactctgtgccagaggaagc

SEQ ID NO: 288288 - DNA, 25 bp, Artificial
  Probe
gagtatctccacatcacagccactg

SEQ ID NO: 288289 - DNA, 25 bp, Artificial
  Probe
aagacagtgctcttttctcatccag

SEQ ID NO: 288290 - DNA, 25 bp, Artificial
  Probe
gaactgatctcatatttctccaagg

SEQ ID NO: 288291 - DNA, 25 bp, Artificial
  Probe
cactccaggctctctgaaacacagt

SEQ ID NO: 288292 - DNA, 25 bp, Artificial
  Probe
tatccactgctacagtcatagcaag

SEQ ID NO: 288293 - DNA, 25 bp, Artificial
  Probe
ctgtcccagcctgtgcgagcaggca

SEQ ID NO: 288294 - DNA, 25 bp, Artificial
  Probe
ggtgtactgggctatgtattacctc

SEQ ID NO: 288295 - DNA, 25 bp, Artificial
  Probe
agtcatttgcgaaggacaggggcca

SEQ ID NO: 288296 - DNA, 25 bp, Artificial
  Probe
ctctgggagccgatgtagtaagcag

SEQ ID NO: 288297 - DNA, 25 bp, Artificial
  Probe
tgtcccagcctgtgcgagcaggcag

SEQ ID NO: 288298 - DNA, 25 bp, Artificial
  Probe
cgtgtgctgaattctggaactgcct

SEQ ID NO: 288299 - DNA, 25 bp, Artificial
  Probe
tatgacgactagacccaggtaatca

SEQ ID NO: 288300 - DNA, 25 bp, Artificial
  Probe
tccccacaacctgaggagaactgat

SEQ ID NO: 288301 - DNA, 25 bp, Artificial
  Probe
acaacctgaggagaactgatctcat

SEQ ID NO: 288302 - DNA, 25 bp, Artificial
  Probe
gagtttgctcacctatccactgcta

SEQ ID NO: 288303 - DNA, 25 bp, Artificial
  Probe
aagtgctaggcaagctagctgctgc

SEQ ID NO: 288304 - DNA, 25 bp, Artificial
  Probe
gacagtgaccagcaggaaggcaagt

SEQ ID NO: 288305 - DNA, 25 bp, Artificial
  Probe
gcatgctgggaagcagcagcctcct

SEQ ID NO: 288306 - DNA, 25 bp, Artificial
  Probe
ccacaatgctgaaatggaaggtgtc

SEQ ID NO: 288307 - DNA, 25 bp, Artificial
  Probe
acgctctctggaaaacagcactggg

SEQ ID NO: 288308 - DNA, 25 bp, Artificial
  Probe
tgaattctggaactgcctctgcacc

SEQ ID NO: 288309 - DNA, 25 bp, Artificial
  Probe
tatgagcaagacttgttttgcccta

SEQ ID NO: 288310 - DNA, 25 bp, Artificial
  Probe
tcttttaccccagtcatttgcgaag

SEQ ID NO: 288311 - DNA, 25 bp, Artificial
  Probe
ctgctgggacagtgaccagcaggaa

SEQ ID NO: 288312 - DNA, 25 bp, Artificial
  Probe
agcttggagatgcagcatgaggttc

SEQ ID NO: 288313 - DNA, 25 bp, Artificial
  Probe
gccatgtttgtatgagcaagacttg

SEQ ID NO: 288314 - DNA, 25 bp, Artificial
  Probe
tcacggcagtgctgcagcccaggct

SEQ ID NO: 288315 - DNA, 25 bp, Artificial
  Probe
aaatgtcagctctgtgcaagggcgg

SEQ ID NO: 288316 - DNA, 25 bp, Artificial
  Probe
tctgtgccagaggaagcagcctccc

SEQ ID NO: 288317 - DNA, 25 bp, Artificial
  Probe
gcatgaggttcttccccaaaccact

SEQ ID NO: 288318 - DNA, 25 bp, Artificial
  Probe
tgaccagcaggaaggcaagtgctgt

SEQ ID NO: 288319 - DNA, 25 bp, Artificial
  Probe
aaaccaaaactctgggagccgatgt

SEQ ID NO: 288320 - DNA, 25 bp, Artificial
  Probe
gatctcatatttctccaaggccatg

SEQ ID NO: 288321 - DNA, 25 bp, Artificial
  Probe
aggtgtctgtgagtatctccacatc

SEQ ID NO: 288322 - DNA, 25 bp, Artificial
  Probe
gggcatattcatacttgtctctttt

SEQ ID NO: 288323 - DNA, 25 bp, Artificial
  Probe
ctacacaccattcagtcagcagatg

SEQ ID NO: 288324 - DNA, 25 bp, Artificial
  Probe
aaggcaagtgctgtccgtgtgctga

SEQ ID NO: 288325 - DNA, 25 bp, Artificial
  Probe
gtaatcgatcactcaggatttactc

SEQ ID NO: 288326 - DNA, 25 bp, Artificial
  Probe
gcctcattgacaactgtgccttccg

SEQ ID NO: 288327 - DNA, 25 bp, Artificial
  Probe
ttccgggtggcagtgtggacaatac

SEQ ID NO: 288328 - DNA, 25 bp, Artificial
  Probe
gatgcacatccttcgccaggtcgct

SEQ ID NO: 288329 - DNA, 25 bp, Artificial
  Probe
atcattccaaccacttgggactcag

SEQ ID NO: 288330 - DNA, 25 bp, Artificial
  Probe
cccatcattgccactgacctggaag

SEQ ID NO: 288331 - DNA, 25 bp, Artificial
  Probe
ctatctcacagagaaagtggccctc

SEQ ID NO: 288332 - DNA, 25 bp, Artificial
  Probe
acagcaccccttctttgagcgctgt

SEQ ID NO: 288333 - DNA, 25 bp, Artificial
  Probe
cttccggctctatggacactgggtg

SEQ ID NO: 288334 - DNA, 25 bp, Artificial
  Probe
gaaagtggccctctcagaaaaggaa

SEQ ID NO: 288335 - DNA, 25 bp, Artificial
  Probe
gatgaagttaccttggtacggagct

SEQ ID NO: 288336 - DNA, 25 bp, Artificial
  Probe
tcatcgattcctacgagtcttctag

SEQ ID NO: 288337 - DNA, 25 bp, Artificial
  Probe
ggatgatcgttcaaacaccgtcaaa

SEQ ID NO: 288338 - DNA, 25 bp, Artificial
  Probe
cagcattgtgcctggccttgccatc

SEQ ID NO: 288339 - DNA, 25 bp, Artificial
  Probe
tgaccgctgagcaagccctacagca

SEQ ID NO: 288340 - DNA, 25 bp, Artificial
  Probe
agtgtggacaatactggctgctgga

SEQ ID NO: 288341 - DNA, 25 bp, Artificial
  Probe
gtaaaggcagccagccctggaacct

SEQ ID NO: 288342 - DNA, 25 bp, Artificial
  Probe
cgcatgatcatggaaggccaatatc

SEQ ID NO: 288343 - DNA, 25 bp, Artificial
  Probe
tatcctcctagatgacaatatgcag

SEQ ID NO: 288344 - DNA, 25 bp, Artificial
  Probe
tggctcgccaccattctggcatcga

SEQ ID NO: 288345 - DNA, 25 bp, Artificial
  Probe
ttagccctgccttgccaagtctaca

SEQ ID NO: 288346 - DNA, 25 bp, Artificial
  Probe
ggactccccaggaggagattttctt

SEQ ID NO: 288347 - DNA, 25 bp, Artificial
  Probe
gtcaacaacattgtacatcgagacc

SEQ ID NO: 288348 - DNA, 25 bp, Artificial
  Probe
tgccacacggcgagagatgcacatc

SEQ ID NO: 288349 - DNA, 25 bp, Artificial
  Probe
tgttcacacttctggctggctcgcc

SEQ ID NO: 288350 - DNA, 25 bp, Artificial
  Probe
tggaagggaacctcttcccagcatt

SEQ ID NO: 288351 - DNA, 25 bp, Artificial
  Probe
cgagctactggtgatgagtttgcag

SEQ ID NO: 288352 - DNA, 25 bp, Artificial
  Probe
cctacctacctactctggacttgga

SEQ ID NO: 288353 - DNA, 25 bp, Artificial
  Probe
acctgatgcggaaaggagagctgtt

SEQ ID NO: 288354 - DNA, 25 bp, Artificial
  Probe
ggatatctagcaccagagatcctta

SEQ ID NO: 288355 - DNA, 25 bp, Artificial
  Probe
gcttgtcacagaaaccagcccttta

SEQ ID NO: 288356 - DNA, 25 bp, Artificial
  Probe
cattatgaggtctctgctggaggcg

SEQ ID NO: 288357 - DNA, 25 bp, Artificial
  Probe
aggtgtcagctgaacggctgagtct

SEQ ID NO: 288358 - DNA, 25 bp, Artificial
  Probe
ggtgaactttcttcatgtcaacaac

SEQ ID NO: 288359 - DNA, 25 bp, Artificial
  Probe
ccaggctacggcaaggaagtcgacc

SEQ ID NO: 288360 - DNA, 25 bp, Artificial
  Probe
tggaacctggcgagaagcttcgaga

SEQ ID NO: 288361 - DNA, 25 bp, Artificial
  Probe
ctactctggacttggagatcggggc

SEQ ID NO: 288362 - DNA, 25 bp, Artificial
  Probe
aggcggtgaactttcttcatgtcaa

SEQ ID NO: 288363 - DNA, 25 bp, Artificial
  Probe
aacggctgagtcttgagcagctgga

SEQ ID NO: 288364 - DNA, 25 bp, Artificial
  Probe
aaatgctccatggatgaaacccacc

SEQ ID NO: 288365 - DNA, 25 bp, Artificial
  Probe
ggttctcctgccatttggaacctgg

SEQ ID NO: 288366 - DNA, 25 bp, Artificial
  Probe
cgacctctgggcttgtggggtaatc

SEQ ID NO: 288367 - DNA, 25 bp, Artificial
  Probe
catgtcaacaacattgtacatcgag

SEQ ID NO: 288368 - DNA, 25 bp, Artificial
  Probe
ttctccctgggcaagccacgaagta

SEQ ID NO: 288369 - DNA, 25 bp, Artificial
  Probe
catcaccgcctgtgctgcatctgaa

SEQ ID NO: 288370 - DNA, 25 bp, Artificial
  Probe
acaatatgcagatccgcctttcaga

SEQ ID NO: 288371 - DNA, 25 bp, Artificial
  Probe
tgagagacccctatgcactgcggcc

SEQ ID NO: 288372 - DNA, 25 bp, Artificial
  Probe
aacttcgcggaggagcccatgcgct

SEQ ID NO: 288373 - DNA, 25 bp, Artificial
  Probe
ccgattccgagaacggcgaagagga

SEQ ID NO: 288374 - DNA, 25 bp, Artificial
  Probe
cccttgctcttgaaccctgtgctga

SEQ ID NO: 288375 - DNA, 25 bp, Artificial
  Probe
tgagcatcgagatccccgcggggct

SEQ ID NO: 288376 - DNA, 25 bp, Artificial
  Probe
cgacctgctggagttcgcgctgcag

SEQ ID NO: 288377 - DNA, 25 bp, Artificial
  Probe
acttcgcggaggagcccatgcgctc

SEQ ID NO: 288378 - DNA, 25 bp, Artificial
  Probe
cgcttcggccatgagggcaggacct

SEQ ID NO: 288379 - DNA, 25 bp, Artificial
  Probe
cgtgcacaggcaggatgagcatcga

SEQ ID NO: 288380 - DNA, 25 bp, Artificial
  Probe
ggttgtgctcgctctgctgccgccg

SEQ ID NO: 288381 - DNA, 25 bp, Artificial
  Probe
tgcacaggcaggatgagcatcgaga

SEQ ID NO: 288382 - DNA, 25 bp, Artificial
  Probe
gttcgcgctgcagcacttcacgcgg

SEQ ID NO: 288383 - DNA, 25 bp, Artificial
  Probe
atgcgctccgattccgagaacggcg

SEQ ID NO: 288384 - DNA, 25 bp, Artificial
  Probe
ttcacgcggctgcagcaggagaacg

SEQ ID NO: 288385 - DNA, 25 bp, Artificial
  Probe
ccgacctgctggagttcgcgctgca

SEQ ID NO: 288386 - DNA, 25 bp, Artificial
  Probe
ctcacggagctgctgcagggcttca

SEQ ID NO: 288387 - DNA, 25 bp, Artificial
  Probe
cttcacgcggctgcagcaggagaac

SEQ ID NO: 288388 - DNA, 25 bp, Artificial
  Probe
ccttgctcttgaaccctgtgctgag

SEQ ID NO: 288389 - DNA, 25 bp, Artificial
  Probe
tggagttcgcgctgcagcacttcac

SEQ ID NO: 288390 - DNA, 25 bp, Artificial
  Probe
gagctggagatgctgccaaccctcc

SEQ ID NO: 288391 - DNA, 25 bp, Artificial
  Probe
ccccagtaagggtgtcaacttcgcg

SEQ ID NO: 288392 - DNA, 25 bp, Artificial
  Probe
agttcgcgctgcagcacttcacgcg

SEQ ID NO: 288393 - DNA, 25 bp, Artificial
  Probe
ggagttcgcgctgcagcacttcacg

SEQ ID NO: 288394 - DNA, 25 bp, Artificial
  Probe
gctcacggagctgctgcagggcttc

SEQ ID NO: 288395 - DNA, 25 bp, Artificial
  Probe
gagttcgcgctgcagcacttcacgc

SEQ ID NO: 288396 - DNA, 25 bp, Artificial
  Probe
acctgctggagttcgcgctgcagca

SEQ ID NO: 288397 - DNA, 25 bp, Artificial
  Probe
ccatgcgctccgattccgagaacgg

SEQ ID NO: 288398 - DNA, 25 bp, Artificial
  Probe
aggtgctgaggcaccagcccgccga

SEQ ID NO: 288399 - DNA, 25 bp, Artificial
  Probe
atgagcatcgagatccccgcggggc

SEQ ID NO: 288400 - DNA, 25 bp, Artificial
  Probe
tccccgggttgtgctcgctctgctg

SEQ ID NO: 288401 - DNA, 25 bp, Artificial
  Probe
gccgacctgctggagttcgcgctgc

SEQ ID NO: 288402 - DNA, 25 bp, Artificial
  Probe
tcaacggtgaggaccggacccctcg

SEQ ID NO: 288403 - DNA, 25 bp, Artificial
  Probe
tcacggagctgctgcagggcttcac

SEQ ID NO: 288404 - DNA, 25 bp, Artificial
  Probe
gctccgattccgagaacggcgaaga

SEQ ID NO: 288405 - DNA, 25 bp, Artificial
  Probe
caacttcgcggaggagcccatgcgc

SEQ ID NO: 288406 - DNA, 25 bp, Artificial
  Probe
tcaacttcgcggaggagcccatgcg

SEQ ID NO: 288407 - DNA, 25 bp, Artificial
  Probe
cacaggcaggatgagcatcgagatc

SEQ ID NO: 288408 - DNA, 25 bp, Artificial
  Probe
tcacgcggctgcagcaggagaacga

SEQ ID NO: 288409 - DNA, 25 bp, Artificial
  Probe
cgccgacctgctggagttcgcgctg

SEQ ID NO: 288410 - DNA, 25 bp, Artificial
  Probe
cacggagctgctgcagggcttcacg

SEQ ID NO: 288411 - DNA, 25 bp, Artificial
  Probe
catgcgctccgattccgagaacggc

SEQ ID NO: 288412 - DNA, 25 bp, Artificial
  Probe
gagcccatgcgctccgattccgaga

SEQ ID NO: 288413 - DNA, 25 bp, Artificial
  Probe
ctccgattccgagaacggcgaagag

SEQ ID NO: 288414 - DNA, 25 bp, Artificial
  Probe
tccgattccgagaacggcgaagagg

SEQ ID NO: 288415 - DNA, 25 bp, Artificial
  Probe
cggaggagcccatgcgctccgattc

SEQ ID NO: 288416 - DNA, 25 bp, Artificial
  Probe
gacctgctggagttcgcgctgcagc

SEQ ID NO: 288417 - DNA, 25 bp, Artificial
  Probe
gcccttgctcttgaaccctgtgctg

SEQ ID NO: 288418 - DNA, 25 bp, Artificial
  Probe
aggcaacgtatttctgttctctctg

SEQ ID NO: 288419 - DNA, 25 bp, Artificial
  Probe
aggctgttgtgactcaggaatctgc

SEQ ID NO: 288420 - DNA, 25 bp, Artificial
  Probe
ctgttctctgttactgtagagaaga

SEQ ID NO: 288421 - DNA, 25 bp, Artificial
  Probe
ggaacagttacactcacttgccact

SEQ ID NO: 288422 - DNA, 25 bp, Artificial
  Probe
ggctacatctttctagactgttctc

SEQ ID NO: 288423 - DNA, 25 bp, Artificial
  Probe
cccaattactgttgtcttaaatgtg

SEQ ID NO: 288424 - DNA, 25 bp, Artificial
  Probe
tgcccttaccatcacaggggcgcag

SEQ ID NO: 288425 - DNA, 25 bp, Artificial
  Probe
agtactggggctgttacaaccagta

SEQ ID NO: 288426 - DNA, 25 bp, Artificial
  Probe
gtcccaattactgttgtcttaaatg

SEQ ID NO: 288427 - DNA, 25 bp, Artificial
  Probe
caaggctgcccttaccatcacaggg

SEQ ID NO: 288428 - DNA, 25 bp, Artificial
  Probe
ttactgttgtcttaaatgtggctac

SEQ ID NO: 288429 - DNA, 25 bp, Artificial
  Probe
cttaaatgtggctacatctttctag

SEQ ID NO: 288430 - DNA, 25 bp, Artificial
  Probe
ttgtcttaaatgtggctacatcttt

SEQ ID NO: 288431 - DNA, 25 bp, Artificial
  Probe
gcccttaccatcacaggggcgcaga

SEQ ID NO: 288432 - DNA, 25 bp, Artificial
  Probe
tccaggtgctcctgccagattctca

SEQ ID NO: 288433 - DNA, 25 bp, Artificial
  Probe
gttgtgactcaggaatctgcactca

SEQ ID NO: 288434 - DNA, 25 bp, Artificial
  Probe
tgctcaggggccatttcccaggctg

SEQ ID NO: 288435 - DNA, 25 bp, Artificial
  Probe
caattactgttgtcttaaatgtggc

SEQ ID NO: 288436 - DNA, 25 bp, Artificial
  Probe
gtacagcgtcccaattactgttgtc

SEQ ID NO: 288437 - DNA, 25 bp, Artificial
  Probe
tcaggggccatttcccaggctgttg

SEQ ID NO: 288438 - DNA, 25 bp, Artificial
  Probe
tacctggtggaacagttacactcac

SEQ ID NO: 288439 - DNA, 25 bp, Artificial
  Probe
tcttgtacagcgtcccaattactgt

SEQ ID NO: 288440 - DNA, 25 bp, Artificial
  Probe
gcgtcccaattactgttgtcttaaa

SEQ ID NO: 288441 - DNA, 25 bp, Artificial
  Probe
aggaggcctttccacatggcagtgg

SEQ ID NO: 288442 - DNA, 25 bp, Artificial
  Probe
gactgttctctgttactgtagagaa

SEQ ID NO: 288443 - DNA, 25 bp, Artificial
  Probe
gggccatttcccaggctgttgtgac

SEQ ID NO: 288444 - DNA, 25 bp, Artificial
  Probe
gtaggacaaaaaccactcttgtaca

SEQ ID NO: 288445 - DNA, 25 bp, Artificial
  Probe
ctgcactcaccacattacctggtgg

SEQ ID NO: 288446 - DNA, 25 bp, Artificial
  Probe
ccactcaagtactggggctgttaca

SEQ ID NO: 288447 - DNA, 25 bp, Artificial
  Probe
ggtgctcctgccagattctcaggct

SEQ ID NO: 288448 - DNA, 25 bp, Artificial
  Probe
aaagttgttgtctcaagcaacaaaa

SEQ ID NO: 288449 - DNA, 25 bp, Artificial
  Probe
aggctgcccttaccatcacaggggc

SEQ ID NO: 288450 - DNA, 25 bp, Artificial
  Probe
ggctgcccttaccatcacaggggcg

SEQ ID NO: 288451 - DNA, 25 bp, Artificial
  Probe
acgtatttctgttctctctggtaca

SEQ ID NO: 288452 - DNA, 25 bp, Artificial
  Probe
gactcaggaatctgcactcaccaca

SEQ ID NO: 288453 - DNA, 25 bp, Artificial
  Probe
ccttaccatcacaggggcgcagatt

SEQ ID NO: 288454 - DNA, 25 bp, Artificial
  Probe
gtactggggctgttacaaccagtaa

SEQ ID NO: 288455 - DNA, 25 bp, Artificial
  Probe
ctttctagactgttctctgttactg

SEQ ID NO: 288456 - DNA, 25 bp, Artificial
  Probe
ttctagactgttctctgttactgta

SEQ ID NO: 288457 - DNA, 25 bp, Artificial
  Probe
catttcccaggctgttgtgactcag

SEQ ID NO: 288458 - DNA, 25 bp, Artificial
  Probe
tggaacagttacactcacttgccac

SEQ ID NO: 288459 - DNA, 25 bp, Artificial
  Probe
tctagactgttctctgttactgtag

SEQ ID NO: 288460 - DNA, 25 bp, Artificial
  Probe
gtgctcctgccagattctcaggctc

SEQ ID NO: 288461 - DNA, 25 bp, Artificial
  Probe
aagtactggggctgttacaaccagt

SEQ ID NO: 288462 - DNA, 25 bp, Artificial
  Probe
gacaaaaaccactcttgtacagcgt

SEQ ID NO: 288463 - DNA, 25 bp, Artificial
  Probe
cactcacttgccactcaagtactgg

SEQ ID NO: 288464 - DNA, 25 bp, Artificial
  Probe
ccaaaatgcgtgacatgaggatgga

SEQ ID NO: 288465 - DNA, 25 bp, Artificial
  Probe
gcaacacttaacagggtttgcgtgg

SEQ ID NO: 288466 - DNA, 25 bp, Artificial
  Probe
ctgccaggggtctggcaacacttaa

SEQ ID NO: 288467 - DNA, 25 bp, Artificial
  Probe
gcccatcctgccaggggtctggcaa

SEQ ID NO: 288468 - DNA, 25 bp, Artificial
  Probe
accctggagaggtggagatccttcg

SEQ ID NO: 288469 - DNA, 25 bp, Artificial
  Probe
agctagcctgagtccggatgcacac

SEQ ID NO: 288470 - DNA, 25 bp, Artificial
  Probe
gcctgcgggcaatcatactgtttaa

SEQ ID NO: 288471 - DNA, 25 bp, Artificial
  Probe
acttgcccatcctgccaggggtctg

SEQ ID NO: 288472 - DNA, 25 bp, Artificial
  Probe
tgacagagctagtgtccaaaatgcg

SEQ ID NO: 288473 - DNA, 25 bp, Artificial
  Probe
agccatctttgatcgggtgctgaca

SEQ ID NO: 288474 - DNA, 25 bp, Artificial
  Probe
tgggagccatctttgatcgggtgct

SEQ ID NO: 288475 - DNA, 25 bp, Artificial
  Probe
caccagctagcctgagtccggatgc

SEQ ID NO: 288476 - DNA, 25 bp, Artificial
  Probe
gacctactgcaagcagaagtatcct

SEQ ID NO: 288477 - DNA, 25 bp, Artificial
  Probe
agcttggctgcctgcgggcaatcat

SEQ ID NO: 288478 - DNA, 25 bp, Artificial
  Probe
aaactcagcccattctgcaggcgtg

SEQ ID NO: 288479 - DNA, 25 bp, Artificial
  Probe
ggtgctgacagagctagtgtccaaa

SEQ ID NO: 288480 - DNA, 25 bp, Artificial
  Probe
gctccatcggcctcaagtgtctgga

SEQ ID NO: 288481 - DNA, 25 bp, Artificial
  Probe
aaccatggacaggtgcagagcagga

SEQ ID NO: 288482 - DNA, 25 bp, Artificial
  Probe
gggtttgcgtggtccccaagtcaga

SEQ ID NO: 288483 - DNA, 25 bp, Artificial
  Probe
cctggccacgggtcttcatgtgcac

SEQ ID NO: 288484 - DNA, 25 bp, Artificial
  Probe
atcctgagcagcagggccggtttgc

SEQ ID NO: 288485 - DNA, 25 bp, Artificial
  Probe
tcctgccaggggtctggcaacactt

SEQ ID NO: 288486 - DNA, 25 bp, Artificial
  Probe
gtccaaaatgcgtgacatgaggatg

SEQ ID NO: 288487 - DNA, 25 bp, Artificial
  Probe
tgcgtggtccccaagtcagagcaga

SEQ ID NO: 288488 - DNA, 25 bp, Artificial
  Probe
tctttgatcgggtgctgacagagct

SEQ ID NO: 288489 - DNA, 25 bp, Artificial
  Probe
cgagaaccatggacaggtgcagagc

SEQ ID NO: 288490 - DNA, 25 bp, Artificial
  Probe
cagaagtatcctgagcagcagggcc

SEQ ID NO: 288491 - DNA, 25 bp, Artificial
  Probe
tccaaccctggagaggtggagatcc

SEQ ID NO: 288492 - DNA, 25 bp, Artificial
  Probe
gcaatcatactgtttaacccagacg

SEQ ID NO: 288493 - DNA, 25 bp, Artificial
  Probe
gtcttcatgtgcacagaaactcagc

SEQ ID NO: 288494 - DNA, 25 bp, Artificial
  Probe
caggggtctggcaacacttaacagg

SEQ ID NO: 288495 - DNA, 25 bp, Artificial
  Probe
ccttcgggagaaggtgtatgcctca

SEQ ID NO: 288496 - DNA, 25 bp, Artificial
  Probe
atccttcgggagaaggtgtatgcct

SEQ ID NO: 288497 - DNA, 25 bp, Artificial
  Probe
ccggtttgccaagctgctactacgt

SEQ ID NO: 288498 - DNA, 25 bp, Artificial
  Probe
caagtgtctggagcacctgttcttc

SEQ ID NO: 288499 - DNA, 25 bp, Artificial
  Probe
ctactgcaagcagaagtatcctgag

SEQ ID NO: 288500 - DNA, 25 bp, Artificial
  Probe
gccaagctgctactacgtcttcctg

SEQ ID NO: 288501 - DNA, 25 bp, Artificial
  Probe
gggacttgcccatcctgccaggggt

SEQ ID NO: 288502 - DNA, 25 bp, Artificial
  Probe
aactcagcccattctgcaggcgtgg

SEQ ID NO: 288503 - DNA, 25 bp, Artificial
  Probe
ttgatcgggtgctgacagagctagt

SEQ ID NO: 288504 - DNA, 25 bp, Artificial
  Probe
tagtgtccaaaatgcgtgacatgag

SEQ ID NO: 288505 - DNA, 25 bp, Artificial
  Probe
gcacagaaactcagcccattctgca

SEQ ID NO: 288506 - DNA, 25 bp, Artificial
  Probe
aaggtgtatgcctcactggagacct

SEQ ID NO: 288507 - DNA, 25 bp, Artificial
  Probe
cagggtttgcgtggtccccaagtca

SEQ ID NO: 288508 - DNA, 25 bp, Artificial
  Probe
ggccacgggtcttcatgtgcacaga

SEQ ID NO: 288509 - DNA, 25 bp, Artificial
  Probe
cacgggtcttcatgtgcacagaaac

SEQ ID NO: 288510 - DNA, 25 bp, Artificial
  Probe
gtggcccttcagaggaacccacctg

SEQ ID NO: 288511 - DNA, 25 bp, Artificial
  Probe
tggctttgagcttgtggaggttcct

SEQ ID NO: 288512 - DNA, 25 bp, Artificial
  Probe
gtgcacatctcttcccatcttgagc

SEQ ID NO: 288513 - DNA, 25 bp, Artificial
  Probe
cttgctctgccatacccgtcatgaa

SEQ ID NO: 288514 - DNA, 25 bp, Artificial
  Probe
tctactcctgtgtgcccaagggtgt

SEQ ID NO: 288515 - DNA, 25 bp, Artificial
  Probe
ccatcttgagccatcctgctgattc

SEQ ID NO: 288516 - DNA, 25 bp, Artificial
  Probe
acccgtcatgaaggagatttcctac

SEQ ID NO: 288517 - DNA, 25 bp, Artificial
  Probe
gctgtaagacatgcatccataaccc

SEQ ID NO: 288518 - DNA, 25 bp, Artificial
  Probe
tcccctaagaattccacgctcttgg

SEQ ID NO: 288519 - DNA, 25 bp, Artificial
  Probe
ctgcccaggcccaggatctggatca

SEQ ID NO: 288520 - DNA, 25 bp, Artificial
  Probe
tcctggggaatgttgcaagaagtgc

SEQ ID NO: 288521 - DNA, 25 bp, Artificial
  Probe
gcttctgtcctgaagggaccacaaa

SEQ ID NO: 288522 - DNA, 25 bp, Artificial
  Probe
tgtgggaccggacaatgtgcccaga

SEQ ID NO: 288523 - DNA, 25 bp, Artificial
  Probe
agtgtacgaatggtttccctggact

SEQ ID NO: 288524 - DNA, 25 bp, Artificial
  Probe
aaacggtgcaaagctgaacgcccct

SEQ ID NO: 288525 - DNA, 25 bp, Artificial
  Probe
aaggagatttcctacaatggctgcg

SEQ ID NO: 288526 - DNA, 25 bp, Artificial
  Probe
atggacaacagcacccagctcaatg

SEQ ID NO: 288527 - DNA, 25 bp, Artificial
  Probe
gctgtctgtgccagggcaccgtctg

SEQ ID NO: 288528 - DNA, 25 bp, Artificial
  Probe
tttgctttctgataataaactcagg

SEQ ID NO: 288529 - DNA, 25 bp, Artificial
  Probe
acctgccctgactttgacccaagtg

SEQ ID NO: 288530 - DNA, 25 bp, Artificial
  Probe
gaagtgaacgggttacaccgtgcac

SEQ ID NO: 288531 - DNA, 25 bp, Artificial
  Probe
gggacttttgccatgtactctgccc

SEQ ID NO: 288532 - DNA, 25 bp, Artificial
  Probe
tgtgtgcgtgcacgagaatgctgaa

SEQ ID NO: 288533 - DNA, 25 bp, Artificial
  Probe
tgcccagagagtttggagagcactt

SEQ ID NO: 288534 - DNA, 25 bp, Artificial
  Probe
atgtgccctgcaacatctcctgcag

SEQ ID NO: 288535 - DNA, 25 bp, Artificial
  Probe
ctccatgaacttctgcgctgggtcc

SEQ ID NO: 288536 - DNA, 25 bp, Artificial
  Probe
gctgattctctgagcttccccactt

SEQ ID NO: 288537 - DNA, 25 bp, Artificial
  Probe
tcggagtttctgttccattctttgc

SEQ ID NO: 288538 - DNA, 25 bp, Artificial
  Probe
gcccctcatgtctgctgggattcga

SEQ ID NO: 288539 - DNA, 25 bp, Artificial
  Probe
cggagtttctgttccattctttgct

SEQ ID NO: 288540 - DNA, 25 bp, Artificial
  Probe
atgtcatctcctgtacccatgtgcc

SEQ ID NO: 288541 - DNA, 25 bp, Artificial
  Probe
cagaaaaaccccaacgacaggtgca

SEQ ID NO: 288542 - DNA, 25 bp, Artificial
  Probe
caatgtcatctcctgtacccatgtg

SEQ ID NO: 288543 - DNA, 25 bp, Artificial
  Probe
ctggctatgacgtctgtgtgaagat

SEQ ID NO: 288544 - DNA, 25 bp, Artificial
  Probe
cctcatgtctgctgggattcgaagt

SEQ ID NO: 288545 - DNA, 25 bp, Artificial
  Probe
aagtggtattgtctgccaaccaaag

SEQ ID NO: 288546 - DNA, 25 bp, Artificial
  Probe
atcatgggtgttcttgctgcaggga

SEQ ID NO: 288547 - DNA, 25 bp, Artificial
  Probe
aacgacaggtgcaccttcttcagct

SEQ ID NO: 288548 - DNA, 25 bp, Artificial
  Probe
agaggaccagtgtacgaatggtttc

SEQ ID NO: 288549 - DNA, 25 bp, Artificial
  Probe
gagcactttgaatttgactgcaagg

SEQ ID NO: 288550 - DNA, 25 bp, Artificial
  Probe
gcaccttcttcagctgcatgaaaat

SEQ ID NO: 288551 - DNA, 25 bp, Artificial
  Probe
gaagcctggggagatacagaaaaac

SEQ ID NO: 288552 - DNA, 25 bp, Artificial
  Probe
ctgcaaggactgtgtttgcctggag

SEQ ID NO: 288553 - DNA, 25 bp, Artificial
  Probe
tgagccatagctacacacacatcga

SEQ ID NO: 288554 - DNA, 25 bp, Artificial
  Probe
aagagtgagcacgtgcctgggaaat

SEQ ID NO: 288555 - DNA, 25 bp, Artificial
  Probe
ttttgccatgtactctgcccaggcc

SEQ ID NO: 288556 - DNA, 25 bp, Artificial
  Probe
accctgtttggctctgggcaggaag

SEQ ID NO: 288557 - DNA, 25 bp, Artificial
  Probe
tcagaccccactgtctcagtgtttc

SEQ ID NO: 288558 - DNA, 25 bp, Artificial
  Probe
atgaagccacagtgggcttctctac

SEQ ID NO: 288559 - DNA, 25 bp, Artificial
  Probe
gccctgggtttccaggttgacctct

SEQ ID NO: 288560 - DNA, 25 bp, Artificial
  Probe
gtccttcctgtttccttatgaagaa

SEQ ID NO: 288561 - DNA, 25 bp, Artificial
  Probe
agaaccactggaaagcgcgtggctg

SEQ ID NO: 288562 - DNA, 25 bp, Artificial
  Probe
ggtcaaaactcaaggctggcacaat

SEQ ID NO: 288563 - DNA, 25 bp, Artificial
  Probe
gtgatcacagattgccaagcatacc

SEQ ID NO: 288564 - DNA, 25 bp, Artificial
  Probe
cctcactgtgccactttgtttctgt

SEQ ID NO: 288565 - DNA, 25 bp, Artificial
  Probe
ccttagaatcttaatcattcctggg

SEQ ID NO: 288566 - DNA, 25 bp, Artificial
  Probe
ggaacaggacattctttctgttgtg

SEQ ID NO: 288567 - DNA, 25 bp, Artificial
  Probe
gttgacctctcacttcctcactgtg

SEQ ID NO: 288568 - DNA, 25 bp, Artificial
  Probe
tccctcacaaggattttctgagatg

SEQ ID NO: 288569 - DNA, 25 bp, Artificial
  Probe
ctacactgggtagattctagttttt

SEQ ID NO: 288570 - DNA, 25 bp, Artificial
  Probe
gatggagactacactgggtagattc

SEQ ID NO: 288571 - DNA, 25 bp, Artificial
  Probe
gccactttgtttctgtatctgtaaa

SEQ ID NO: 288572 - DNA, 25 bp, Artificial
  Probe
ctgtgaccacagtgtataggaagta

SEQ ID NO: 288573 - DNA, 25 bp, Artificial
  Probe
taaatctagagaattcctggctcac

SEQ ID NO: 288574 - DNA, 25 bp, Artificial
  Probe
cttaatcattcctgggacttagggg

SEQ ID NO: 288575 - DNA, 25 bp, Artificial
  Probe
cgatgtatgagaaccactggaaagc

SEQ ID NO: 288576 - DNA, 25 bp, Artificial
  Probe
ctgtcagcaagaggtacattagaga

SEQ ID NO: 288577 - DNA, 25 bp, Artificial
  Probe
atgtggagtggtttacctagcctct

SEQ ID NO: 288578 - DNA, 25 bp, Artificial
  Probe
tctctcagggcatggggagtatgta

SEQ ID NO: 288579 - DNA, 25 bp, Artificial
  Probe
ctaagacttaatgctattgaacctg

SEQ ID NO: 288580 - DNA, 25 bp, Artificial
  Probe
tggctgggctgtgaccacagtgtat

SEQ ID NO: 288581 - DNA, 25 bp, Artificial
  Probe
aacatggctgcgatgtatgagaacc

SEQ ID NO: 288582 - DNA, 25 bp, Artificial
  Probe
tcacacgctcattataaggcattag

SEQ ID NO: 288583 - DNA, 25 bp, Artificial
  Probe
cccaggtctatttgtgctggggttg

SEQ ID NO: 288584 - DNA, 25 bp, Artificial
  Probe
ccgtgctgggccttgctacaaggga

SEQ ID NO: 288585 - DNA, 25 bp, Artificial
  Probe
agctcagaaactcagaccccactgt

SEQ ID NO: 288586 - DNA, 25 bp, Artificial
  Probe
acacgctcattataaggcattagga

SEQ ID NO: 288587 - DNA, 25 bp, Artificial
  Probe
tctgatgaagccacagtgggcttct

SEQ ID NO: 288588 - DNA, 25 bp, Artificial
  Probe
tgattctgatgtctattagactttc

SEQ ID NO: 288589 - DNA, 25 bp, Artificial
  Probe
catggctgcgatgtatgagaaccac

SEQ ID NO: 288590 - DNA, 25 bp, Artificial
  Probe
ttattcgggcaatagaaagcccgga

SEQ ID NO: 288591 - DNA, 25 bp, Artificial
  Probe
ggaagttgatgttccttctgtcagc

SEQ ID NO: 288592 - DNA, 25 bp, Artificial
  Probe
aagtaggtaccctgctgtccttcct

SEQ ID NO: 288593 - DNA, 25 bp, Artificial
  Probe
gaaagcccggagtgaaaagccctgg

SEQ ID NO: 288594 - DNA, 25 bp, Artificial
  Probe
tgaccgtttgacaaatacccgaaag

SEQ ID NO: 288595 - DNA, 25 bp, Artificial
  Probe
ctcaaggctggcacaatctgttcga

SEQ ID NO: 288596 - DNA, 25 bp, Artificial
  Probe
gacaaatacccgaaaggtctctcag

SEQ ID NO: 288597 - DNA, 25 bp, Artificial
  Probe
cccgaaaggtctctcagggcatggg

SEQ ID NO: 288598 - DNA, 25 bp, Artificial
  Probe
tgtgtgatcacagattgccaagcat

SEQ ID NO: 288599 - DNA, 25 bp, Artificial
  Probe
tagaaagcccggagtgaaaagccct

SEQ ID NO: 288600 - DNA, 25 bp, Artificial
  Probe
ctagagaattcctggctcacttctt

SEQ ID NO: 288601 - DNA, 25 bp, Artificial
  Probe
tgtttccttatgaagaacctaccag

SEQ ID NO: 288602 - DNA, 25 bp, Artificial
  Probe
gtccagactgaggtgacgacatcac

SEQ ID NO: 288603 - DNA, 25 bp, Artificial
  Probe
taccatgtttacactgaccagtgca

SEQ ID NO: 288604 - DNA, 25 bp, Artificial
  Probe
ccagtgcactcagaaaatcagatta

SEQ ID NO: 288605 - DNA, 25 bp, Artificial
  Probe
acactgaccagtgcactcagaaaat

SEQ ID NO: 288606 - DNA, 25 bp, Artificial
  Probe
tacactgaccagtgcactcagaaaa

SEQ ID NO: 288607 - DNA, 25 bp, Artificial
  Probe
tgggagtctgcagtccagactgagg

SEQ ID NO: 288608 - DNA, 25 bp, Artificial
  Probe
ctgcctcagtgggccccaaaaccgg

SEQ ID NO: 288609 - DNA, 25 bp, Artificial
  Probe
agcaggatgggagtctgcagtccag

SEQ ID NO: 288610 - DNA, 25 bp, Artificial
  Probe
gtaccatgtttacactgaccagtgc

SEQ ID NO: 288611 - DNA, 25 bp, Artificial
  Probe
tgaggtgacgacatcaccaccactc

SEQ ID NO: 288612 - DNA, 25 bp, Artificial
  Probe
tgtttacactgaccagtgcactcag

SEQ ID NO: 288613 - DNA, 25 bp, Artificial
  Probe
agtccagactgaggtgacgacatca

SEQ ID NO: 288614 - DNA, 25 bp, Artificial
  Probe
tttacactgaccagtgcactcagaa

SEQ ID NO: 288615 - DNA, 25 bp, Artificial
  Probe
gaggtgacgacatcaccaccactct

SEQ ID NO: 288616 - DNA, 25 bp, Artificial
  Probe
gatgggagtctgcagtccagactga

SEQ ID NO: 288617 - DNA, 25 bp, Artificial
  Probe
tccagactgaggtgacgacatcacc

SEQ ID NO: 288618 - DNA, 25 bp, Artificial
  Probe
ctgcagtccagactgaggtgacgac

SEQ ID NO: 288619 - DNA, 25 bp, Artificial
  Probe
gatgtaccatgtttacactgaccag

SEQ ID NO: 288620 - DNA, 25 bp, Artificial
  Probe
tgacgacatcaccaccactctccca

SEQ ID NO: 288621 - DNA, 25 bp, Artificial
  Probe
gaccagtgcactcagaaaatcagat

SEQ ID NO: 288622 - DNA, 25 bp, Artificial
  Probe
gagtctgcagtccagactgaggtga

SEQ ID NO: 288623 - DNA, 25 bp, Artificial
  Probe
agtgcactcagaaaatcagattaaa

SEQ ID NO: 288624 - DNA, 25 bp, Artificial
  Probe
gaccagagcaggatgggagtctgca

SEQ ID NO: 288625 - DNA, 25 bp, Artificial
  Probe
gtctgcagtccagactgaggtgacg

SEQ ID NO: 288626 - DNA, 25 bp, Artificial
  Probe
ttacactgaccagtgcactcagaaa

SEQ ID NO: 288627 - DNA, 25 bp, Artificial
  Probe
atgtttacactgaccagtgcactca

SEQ ID NO: 288628 - DNA, 25 bp, Artificial
  Probe
ccagactgaggtgacgacatcacca

SEQ ID NO: 288629 - DNA, 25 bp, Artificial
  Probe
cactgaccagtgcactcagaaaatc

SEQ ID NO: 288630 - DNA, 25 bp, Artificial
  Probe
cagtgcactcagaaaatcagattaa

SEQ ID NO: 288631 - DNA, 25 bp, Artificial
  Probe
accatgtttacactgaccagtgcac

SEQ ID NO: 288632 - DNA, 25 bp, Artificial
  Probe
catgacccactgcctcagtgggccc

SEQ ID NO: 288633 - DNA, 25 bp, Artificial
  Probe
atgtaccatgtttacactgaccagt

SEQ ID NO: 288634 - DNA, 25 bp, Artificial
  Probe
gtgcactcagaaaatcagattaaag

SEQ ID NO: 288635 - DNA, 25 bp, Artificial
  Probe
gcagtccagactgaggtgacgacat

SEQ ID NO: 288636 - DNA, 25 bp, Artificial
  Probe
tgcagtccagactgaggtgacgaca

SEQ ID NO: 288637 - DNA, 25 bp, Artificial
  Probe
aggtgacgacatcaccaccactctc

SEQ ID NO: 288638 - DNA, 25 bp, Artificial
  Probe
atgggagtctgcagtccagactgag

SEQ ID NO: 288639 - DNA, 25 bp, Artificial
  Probe
accagtgcactcagaaaatcagatt

SEQ ID NO: 288640 - DNA, 25 bp, Artificial
  Probe
tctgcagtccagactgaggtgacga

SEQ ID NO: 288641 - DNA, 25 bp, Artificial
  Probe
tgtaccatgtttacactgaccagtg

SEQ ID NO: 288642 - DNA, 25 bp, Artificial
  Probe
catgtttacactgaccagtgcactc

SEQ ID NO: 288643 - DNA, 25 bp, Artificial
  Probe
gtttacactgaccagtgcactcaga

SEQ ID NO: 288644 - DNA, 25 bp, Artificial
  Probe
cagtccagactgaggtgacgacatc

SEQ ID NO: 288645 - DNA, 25 bp, Artificial
  Probe
tgcactcagaaaatcagattaaagt

SEQ ID NO: 288646 - DNA, 25 bp, Artificial
  Probe
ccatgtttacactgaccagtgcact

SEQ ID NO: 288647 - DNA, 25 bp, Artificial
  Probe
ggagtctgcagtccagactgaggtg

SEQ ID NO: 288648 - DNA, 25 bp, Artificial
  Probe
tctctacaaccagagcctgagatcc

SEQ ID NO: 288649 - DNA, 25 bp, Artificial
  Probe
ccgatgctgttgatttgatactttg

SEQ ID NO: 288650 - DNA, 25 bp, Artificial
  Probe
accacacgtccgatgctgttgattt

SEQ ID NO: 288651 - DNA, 25 bp, Artificial
  Probe
attacctcagcctattacagaagtg

SEQ ID NO: 288652 - DNA, 25 bp, Artificial
  Probe
aattagattacagatctgggacaca

SEQ ID NO: 288653 - DNA, 25 bp, Artificial
  Probe
gggaaagcattcttgctctgcacta

SEQ ID NO: 288654 - DNA, 25 bp, Artificial
  Probe
cttgccaaagtggatgaagatgatc

SEQ ID NO: 288655 - DNA, 25 bp, Artificial
  Probe
aagatgcctctcgatgttttgagaa

SEQ ID NO: 288656 - DNA, 25 bp, Artificial
  Probe
aggagcgattcaacagcattacctc

SEQ ID NO: 288657 - DNA, 25 bp, Artificial
  Probe
ccaaggggatcatactcgtgtatga

SEQ ID NO: 288658 - DNA, 25 bp, Artificial
  Probe
ccagaccacacgtccgatgctgttg

SEQ ID NO: 288659 - DNA, 25 bp, Artificial
  Probe
gtgcaagccattgctagaaggggaa

SEQ ID NO: 288660 - DNA, 25 bp, Artificial
  Probe
atgcttcagaagacgctgagcttct

SEQ ID NO: 288661 - DNA, 25 bp, Artificial
  Probe
aaccagagcctgagatcccaccaga

SEQ ID NO: 288662 - DNA, 25 bp, Artificial
  Probe
gcgagttatccaatagcatcctctc

SEQ ID NO: 288663 - DNA, 25 bp, Artificial
  Probe
gtgtatgacatcaccaagaaagaga

SEQ ID NO: 288664 - DNA, 25 bp, Artificial
  Probe
tcttgctctgcactacaatcacgtg

SEQ ID NO: 288665 - DNA, 25 bp, Artificial
  Probe
ctctcgatgttttgagaagcgagtt

SEQ ID NO: 288666 - DNA, 25 bp, Artificial
  Probe
ataagctggactgtgaaacagacag

SEQ ID NO: 288667 - DNA, 25 bp, Artificial
  Probe
ctattacagaagtgccaaggggatc

SEQ ID NO: 288668 - DNA, 25 bp, Artificial
  Probe
tgatactttggagatggtgcaagcc

SEQ ID NO: 288669 - DNA, 25 bp, Artificial
  Probe
atcaccaagaaagagacgttcgatg

SEQ ID NO: 288670 - DNA, 25 bp, Artificial
  Probe
acagaagtgccaaggggatcatact

SEQ ID NO: 288671 - DNA, 25 bp, Artificial
  Probe
cgatgacttgccaaagtggatgaag

SEQ ID NO: 288672 - DNA, 25 bp, Artificial
  Probe
gcgattcaacagcattacctcagcc

SEQ ID NO: 288673 - DNA, 25 bp, Artificial
  Probe
agtgccaaggggatcatactcgtgt

SEQ ID NO: 288674 - DNA, 25 bp, Artificial
  Probe
agtgccaaggacaatttcaacgtgg

SEQ ID NO: 288675 - DNA, 25 bp, Artificial
  Probe
acagacagagaaatctccaggcagc

SEQ ID NO: 288676 - DNA, 25 bp, Artificial
  Probe
tgagatctttctgaaactcgttgat

SEQ ID NO: 288677 - DNA, 25 bp, Artificial
  Probe
atcgataagtatgcttcagaagacg

SEQ ID NO: 288678 - DNA, 25 bp, Artificial
  Probe
ctttctgaaactcgttgatgatatt

SEQ ID NO: 288679 - DNA, 25 bp, Artificial
  Probe
gcacagcagataaccgggatgcggt

SEQ ID NO: 288680 - DNA, 25 bp, Artificial
  Probe
actcgtgtatgacatcaccaagaaa

SEQ ID NO: 288681 - DNA, 25 bp, Artificial
  Probe
actttggagatggtgcaagccattg

SEQ ID NO: 288682 - DNA, 25 bp, Artificial
  Probe
aaagtttgcacagcagataaccggg

SEQ ID NO: 288683 - DNA, 25 bp, Artificial
  Probe
tcagaagacgctgagcttctcctgg

SEQ ID NO: 288684 - DNA, 25 bp, Artificial
  Probe
aagagacgttcgatgacttgccaaa

SEQ ID NO: 288685 - DNA, 25 bp, Artificial
  Probe
ttcagaagacgctgagcttctcctg

SEQ ID NO: 288686 - DNA, 25 bp, Artificial
  Probe
cagagcctgagatcccaccagagct

SEQ ID NO: 288687 - DNA, 25 bp, Artificial
  Probe
tacagaagtgccaaggggatcatac

SEQ ID NO: 288688 - DNA, 25 bp, Artificial
  Probe
gaaagcattcttgctctgcactaca

SEQ ID NO: 288689 - DNA, 25 bp, Artificial
  Probe
gccattgctagaaggggaaagcatt

SEQ ID NO: 288690 - DNA, 25 bp, Artificial
  Probe
cgttcgatgacttgccaaagtggat

SEQ ID NO: 288691 - DNA, 25 bp, Artificial
  Probe
cgataagtatgcttcagaagacgct

SEQ ID NO: 288692 - DNA, 25 bp, Artificial
  Probe
aagctggactgtgaaacagacagag

SEQ ID NO: 288693 - DNA, 25 bp, Artificial
  Probe
ctctctctacaaccagagcctgaga

SEQ ID NO: 288694 - DNA, 25 bp, Artificial
  Probe
gtcagtatgctgatctctccattcc

SEQ ID NO: 288695 - DNA, 25 bp, Artificial
  Probe
cagtatgctgatctctccattcctg

SEQ ID NO: 288696 - DNA, 25 bp, Artificial
  Probe
accctgaacctggaggctagacctg

SEQ ID NO: 288697 - DNA, 25 bp, Artificial
  Probe
cagcaacaagtgctccttgggctga

SEQ ID NO: 288698 - DNA, 25 bp, Artificial
  Probe
cagaatccgattttttgagacaagt

SEQ ID NO: 288699 - DNA, 25 bp, Artificial
  Probe
agaacagcaacaagtgctccttggg

SEQ ID NO: 288700 - DNA, 25 bp, Artificial
  Probe
tgacctgaaagtatctgacaagaag

SEQ ID NO: 288701 - DNA, 25 bp, Artificial
  Probe
cacagaatccgattttttgagacaa

SEQ ID NO: 288702 - DNA, 25 bp, Artificial
  Probe
ttggcccgagagcacagaatccgat

SEQ ID NO: 288703 - DNA, 25 bp, Artificial
  Probe
ctccattcctggttcagggttcggg

SEQ ID NO: 288704 - DNA, 25 bp, Artificial
  Probe
aatgtcagtatgctgatctctccat

SEQ ID NO: 288705 - DNA, 25 bp, Artificial
  Probe
tgctcaagacaggaggccggagatc

SEQ ID NO: 288706 - DNA, 25 bp, Artificial
  Probe
cccgtgacatcttgctcaagacagg

SEQ ID NO: 288707 - DNA, 25 bp, Artificial
  Probe
ggcccgtgacatcttgctcaagaca

SEQ ID NO: 288708 - DNA, 25 bp, Artificial
  Probe
gaatccgattttttgagacaagtgc

SEQ ID NO: 288709 - DNA, 25 bp, Artificial
  Probe
cctattcaccctgaacctggaggct

SEQ ID NO: 288710 - DNA, 25 bp, Artificial
  Probe
cctggcccgtgacatcttgctcaag

SEQ ID NO: 288711 - DNA, 25 bp, Artificial
  Probe
gtgccaaatccagtgtgaatgtgga

SEQ ID NO: 288712 - DNA, 25 bp, Artificial
  Probe
gcaagccctcaagcactgacctgaa

SEQ ID NO: 288713 - DNA, 25 bp, Artificial
  Probe
gacatcttgctcaagacaggaggcc

SEQ ID NO: 288714 - DNA, 25 bp, Artificial
  Probe
gcaacaagtgctccttgggctgagg

SEQ ID NO: 288715 - DNA, 25 bp, Artificial
  Probe
agccctcaagcactgacctgaaagt

SEQ ID NO: 288716 - DNA, 25 bp, Artificial
  Probe
agacaagtgccaaatccagtgtgaa

SEQ ID NO: 288717 - DNA, 25 bp, Artificial
  Probe
ctgacctgaaagtatctgacaagaa

SEQ ID NO: 288718 - DNA, 25 bp, Artificial
  Probe
tcaccctgaacctggaggctagacc

SEQ ID NO: 288719 - DNA, 25 bp, Artificial
  Probe
tccgattttttgagacaagtgccaa

SEQ ID NO: 288720 - DNA, 25 bp, Artificial
  Probe
cccgagagcacagaatccgattttt

SEQ ID NO: 288721 - DNA, 25 bp, Artificial
  Probe
atgctgatctctccattcctggttc

SEQ ID NO: 288722 - DNA, 25 bp, Artificial
  Probe
tctctccattcctggttcagggttc

SEQ ID NO: 288723 - DNA, 25 bp, Artificial
  Probe
ccgtgacatcttgctcaagacagga

SEQ ID NO: 288724 - DNA, 25 bp, Artificial
  Probe
cattaatgtcagtatgctgatctct

SEQ ID NO: 288725 - DNA, 25 bp, Artificial
  Probe
agcactgacctgaaagtatctgaca

SEQ ID NO: 288726 - DNA, 25 bp, Artificial
  Probe
ccgtccaacattaatgtcagtatgc

SEQ ID NO: 288727 - DNA, 25 bp, Artificial
  Probe
ccctgaacctggaggctagacctga

SEQ ID NO: 288728 - DNA, 25 bp, Artificial
  Probe
tcctattcaccctgaacctggaggc

SEQ ID NO: 288729 - DNA, 25 bp, Artificial
  Probe
aatccgattttttgagacaagtgcc

SEQ ID NO: 288730 - DNA, 25 bp, Artificial
  Probe
gagacaagtgccaaatccagtgtga

SEQ ID NO: 288731 - DNA, 25 bp, Artificial
  Probe
caagccctcaagcactgacctgaaa

SEQ ID NO: 288732 - DNA, 25 bp, Artificial
  Probe
ccaacattaatgtcagtatgctgat

SEQ ID NO: 288733 - DNA, 25 bp, Artificial
  Probe
gagagcacagaatccgattttttga

SEQ ID NO: 288734 - DNA, 25 bp, Artificial
  Probe
ctgatctctccattcctggttcagg

SEQ ID NO: 288735 - DNA, 25 bp, Artificial
  Probe
gcactgacctgaaagtatctgacaa

SEQ ID NO: 288736 - DNA, 25 bp, Artificial
  Probe
gcacagaatccgattttttgagaca

SEQ ID NO: 288737 - DNA, 25 bp, Artificial
  Probe
aacattaatgtcagtatgctgatct

SEQ ID NO: 288738 - DNA, 25 bp, Artificial
  Probe
aggttggcccgagagcacagaatcc

SEQ ID NO: 288739 - DNA, 25 bp, Artificial
  Probe
taatgtcagtatgctgatctctcca

SEQ ID NO: 288740 - DNA, 25 bp, Artificial
  Probe
tcgctcagagtcagagtcacatacc

SEQ ID NO: 288741 - DNA, 25 bp, Artificial
  Probe
agtgtgtcctccttcagtccccaga

SEQ ID NO: 288742 - DNA, 25 bp, Artificial
  Probe
tacccctgattctgtatcagtgtgt

SEQ ID NO: 288743 - DNA, 25 bp, Artificial
  Probe
ccaccgttggcatcattgtcaccat

SEQ ID NO: 288744 - DNA, 25 bp, Artificial
  Probe
gtggctgtcttcatacaaagtgagg

SEQ ID NO: 288745 - DNA, 25 bp, Artificial
  Probe
cgctcagagtcagagtcacataccc

SEQ ID NO: 288746 - DNA, 25 bp, Artificial
  Probe
gtcttcatacaaagtgagggcgtct

SEQ ID NO: 288747 - DNA, 25 bp, Artificial
  Probe
gaagtcttttgactcaccgaccaaa

SEQ ID NO: 288748 - DNA, 25 bp, Artificial
  Probe
attctgtatcagtgtgtcctccttc

SEQ ID NO: 288749 - DNA, 25 bp, Artificial
  Probe
ccgttggcatcattgtcaccatcag

SEQ ID NO: 288750 - DNA, 25 bp, Artificial
  Probe
cggtcgctcagagtcagagtcacat

SEQ ID NO: 288751 - DNA, 25 bp, Artificial
  Probe
tctaggcctgccagtggctgtcttc

SEQ ID NO: 288752 - DNA, 25 bp, Artificial
  Probe
agagtcagagtcacatacccctgat

SEQ ID NO: 288753 - DNA, 25 bp, Artificial
  Probe
agaaggcatcagtgggcaacccagt

SEQ ID NO: 288754 - DNA, 25 bp, Artificial
  Probe
ggcatcattgtcaccatcagttggc

SEQ ID NO: 288755 - DNA, 25 bp, Artificial
  Probe
tcagagtcacatacccctgattctg

SEQ ID NO: 288756 - DNA, 25 bp, Artificial
  Probe
tgcgtacgacctacggtgcctgctt

SEQ ID NO: 288757 - DNA, 25 bp, Artificial
  Probe
acccgaggactcatgtatacaccca

SEQ ID NO: 288758 - DNA, 25 bp, Artificial
  Probe
gtgtgtcctccttcagtccccagag

SEQ ID NO: 288759 - DNA, 25 bp, Artificial
  Probe
acctacggtgcctgcttcaggtcca

SEQ ID NO: 288760 - DNA, 25 bp, Artificial
  Probe
tccacccgaggactcatgtatacac

SEQ ID NO: 288761 - DNA, 25 bp, Artificial
  Probe
gtgcgtacgacctacggtgcctgct

SEQ ID NO: 288762 - DNA, 25 bp, Artificial
  Probe
tatcagtgtgtcctccttcagtccc

SEQ ID NO: 288763 - DNA, 25 bp, Artificial
  Probe
ggtgcgtacgacctacggtgcctgc

SEQ ID NO: 288764 - DNA, 25 bp, Artificial
  Probe
ttggcatcattgtcaccatcagttg

SEQ ID NO: 288765 - DNA, 25 bp, Artificial
  Probe
caggccctcctgtgagttagggatg

SEQ ID NO: 288766 - DNA, 25 bp, Artificial
  Probe
tgtttctaggcctgccagtggctgt

SEQ ID NO: 288767 - DNA, 25 bp, Artificial
  Probe
gcatcagtgggcaacccagtgtttt

SEQ ID NO: 288768 - DNA, 25 bp, Artificial
  Probe
cctgccagtggctgtcttcatacaa

SEQ ID NO: 288769 - DNA, 25 bp, Artificial
  Probe
catgggagcaacaggccctcctgtg

SEQ ID NO: 288770 - DNA, 25 bp, Artificial
  Probe
agatgtgtttctaggcctgccagtg

SEQ ID NO: 288771 - DNA, 25 bp, Artificial
  Probe
caccgttggcatcattgtcaccatc

SEQ ID NO: 288772 - DNA, 25 bp, Artificial
  Probe
cttcaggtccagatgtgtttctagg

SEQ ID NO: 288773 - DNA, 25 bp, Artificial
  Probe
tacgacctacggtgcctgcttcagg

SEQ ID NO: 288774 - DNA, 25 bp, Artificial
  Probe
taggcctgccagtggctgtcttcat

SEQ ID NO: 288775 - DNA, 25 bp, Artificial
  Probe
cagatgtgtttctaggcctgccagt

SEQ ID NO: 288776 - DNA, 25 bp, Artificial
  Probe
catcagtgggcaacccagtgttttt

SEQ ID NO: 288777 - DNA, 25 bp, Artificial
  Probe
gtcaccatcagttggcccagggaca

SEQ ID NO: 288778 - DNA, 25 bp, Artificial
  Probe
agcaacaggccctcctgtgagttag

SEQ ID NO: 288779 - DNA, 25 bp, Artificial
  Probe
ctcagagtcagagtcacatacccct

SEQ ID NO: 288780 - DNA, 25 bp, Artificial
  Probe
ggtcgctcagagtcagagtcacata

SEQ ID NO: 288781 - DNA, 25 bp, Artificial
  Probe
acatacccctgattctgtatcagtg

SEQ ID NO: 288782 - DNA, 25 bp, Artificial
  Probe
aggaagtcttttgactcaccgacca

SEQ ID NO: 288783 - DNA, 25 bp, Artificial
  Probe
caggtccagatgtgtttctaggcct

SEQ ID NO: 288784 - DNA, 25 bp, Artificial
  Probe
acggtgcctgcttcaggtccagatg

SEQ ID NO: 288785 - DNA, 25 bp, Artificial
  Probe
tgcctgcttcaggtccagatgtgtt

SEQ ID NO: 288786 - DNA, 25 bp, Artificial
  Probe
actgtctcagctcatcagaaggtgg

SEQ ID NO: 288787 - DNA, 25 bp, Artificial
  Probe
tgcaagctcttaagaatagtggaac

SEQ ID NO: 288788 - DNA, 25 bp, Artificial
  Probe
agccggagtgcaaggcaggctttct

SEQ ID NO: 288789 - DNA, 25 bp, Artificial
  Probe
ttccctcaggctgtgtagagggcag

SEQ ID NO: 288790 - DNA, 25 bp, Artificial
  Probe
tgcaaggcaggctttctggacaaag

SEQ ID NO: 288791 - DNA, 25 bp, Artificial
  Probe
cacacttgtccctagggcctcagta

SEQ ID NO: 288792 - DNA, 25 bp, Artificial
  Probe
ctgggaccagcgtatctctagagct

SEQ ID NO: 288793 - DNA, 25 bp, Artificial
  Probe
tctattcttccctggaatggcctgg

SEQ ID NO: 288794 - DNA, 25 bp, Artificial
  Probe
acaatggctgtgagggacacacaca

SEQ ID NO: 288795 - DNA, 25 bp, Artificial
  Probe
gacctctattcttccctggaatggc

SEQ ID NO: 288796 - DNA, 25 bp, Artificial
  Probe
agaatatctgccactgtctcagctc

SEQ ID NO: 288797 - DNA, 25 bp, Artificial
  Probe
gaatggcctggcacaaattctctgt

SEQ ID NO: 288798 - DNA, 25 bp, Artificial
  Probe
aagctcttaagaatagtggaactgc

SEQ ID NO: 288799 - DNA, 25 bp, Artificial
  Probe
acacttgtccctagggcctcagtac

SEQ ID NO: 288800 - DNA, 25 bp, Artificial
  Probe
atctgccactgtctcagctcatcag

SEQ ID NO: 288801 - DNA, 25 bp, Artificial
  Probe
gggcgcctgggaccagcgtatctct

SEQ ID NO: 288802 - DNA, 25 bp, Artificial
  Probe
tgtccctttcacacttgtccctagg

SEQ ID NO: 288803 - DNA, 25 bp, Artificial
  Probe
gcgcctgggaccagcgtatctctag

SEQ ID NO: 288804 - DNA, 25 bp, Artificial
  Probe
ctttctggacaaagtgctatttcag

SEQ ID NO: 288805 - DNA, 25 bp, Artificial
  Probe
atgtacaatggctgtgagggacaca

SEQ ID NO: 288806 - DNA, 25 bp, Artificial
  Probe
cagccggagtgcaaggcaggctttc

SEQ ID NO: 288807 - DNA, 25 bp, Artificial
  Probe
aaggcaggctttctggacaaagtgc

SEQ ID NO: 288808 - DNA, 25 bp, Artificial
  Probe
cttccctcaggctgtgtagagggca

SEQ ID NO: 288809 - DNA, 25 bp, Artificial
  Probe
tgtctcagctcatcagaaggtggag

SEQ ID NO: 288810 - DNA, 25 bp, Artificial
  Probe
tctctagagctgtggggcttccctc

SEQ ID NO: 288811 - DNA, 25 bp, Artificial
  Probe
tcttccctggaatggcctggcacaa

SEQ ID NO: 288812 - DNA, 25 bp, Artificial
  Probe
accgtcagagccaacccttagaata

SEQ ID NO: 288813 - DNA, 25 bp, Artificial
  Probe
agctgtggggcttccctcaggctgt

SEQ ID NO: 288814 - DNA, 25 bp, Artificial
  Probe
gaatatctgccactgtctcagctca

SEQ ID NO: 288815 - DNA, 25 bp, Artificial
  Probe
agagacacctacagggccctgggga

SEQ ID NO: 288816 - DNA, 25 bp, Artificial
  Probe
ggttctgaaccgtgtggtgcatgca

SEQ ID NO: 288817 - DNA, 25 bp, Artificial
  Probe
cctggaatggcctggcacaaattct

SEQ ID NO: 288818 - DNA, 25 bp, Artificial
  Probe
tggggcttccctcaggctgtgtaga

SEQ ID NO: 288819 - DNA, 25 bp, Artificial
  Probe
aatagtggaactgcacagagacagc

SEQ ID NO: 288820 - DNA, 25 bp, Artificial
  Probe
cacagagacagcaccgtcagagcca

SEQ ID NO: 288821 - DNA, 25 bp, Artificial
  Probe
gcctggcacaaattctctgtccctt

SEQ ID NO: 288822 - DNA, 25 bp, Artificial
  Probe
ccactgtctcagctcatcagaaggt

SEQ ID NO: 288823 - DNA, 25 bp, Artificial
  Probe
caaagtgctatttcagatgtgtcgg

SEQ ID NO: 288824 - DNA, 25 bp, Artificial
  Probe
ggcaggctttctggacaaagtgcta

SEQ ID NO: 288825 - DNA, 25 bp, Artificial
  Probe
cctagggcctcagtacctcctgtat

SEQ ID NO: 288826 - DNA, 25 bp, Artificial
  Probe
catgcaagctcttaagaatagtgga

SEQ ID NO: 288827 - DNA, 25 bp, Artificial
  Probe
acacagggacctctattcttccctg

SEQ ID NO: 288828 - DNA, 25 bp, Artificial
  Probe
ccgtcagagccaacccttagaatat

SEQ ID NO: 288829 - DNA, 25 bp, Artificial
  Probe
cagagccaacccttagaatatctgc

SEQ ID NO: 288830 - DNA, 25 bp, Artificial
  Probe
gtccctttcacacttgtccctaggg

SEQ ID NO: 288831 - DNA, 25 bp, Artificial
  Probe
gagccaacccttagaatatctgcca

SEQ ID NO: 288832 - DNA, 25 bp, Artificial
  Probe
gatcgtatggcgagacctcaggtct

SEQ ID NO: 288833 - DNA, 25 bp, Artificial
  Probe
tggatcatatgctggagccttgaat

SEQ ID NO: 288834 - DNA, 25 bp, Artificial
  Probe
atcgtatggcgagacctcaggtctt

SEQ ID NO: 288835 - DNA, 25 bp, Artificial
  Probe
tgctggagccttgaatgaaaaagcg

SEQ ID NO: 288836 - DNA, 25 bp, Artificial
  Probe
atggcgagacctcaggtctttcgtt

SEQ ID NO: 288837 - DNA, 25 bp, Artificial
  Probe
cgtatggcgagacctcaggtctttc

SEQ ID NO: 288838 - DNA, 25 bp, Artificial
  Probe
aactggatcatatgctggagccttg

SEQ ID NO: 288839 - DNA, 25 bp, Artificial
  Probe
tatcaagccgggagatcgtatggcg

SEQ ID NO: 288840 - DNA, 25 bp, Artificial
  Probe
tcgtatggcgagacctcaggtcttt

SEQ ID NO: 288841 - DNA, 25 bp, Artificial
  Probe
gatcatatgctggagccttgaatga

SEQ ID NO: 288842 - DNA, 25 bp, Artificial
  Probe
ctggatcatatgctggagccttgaa

SEQ ID NO: 288843 - DNA, 25 bp, Artificial
  Probe
tggcgagacctcaggtctttcgttt

SEQ ID NO: 288844 - DNA, 25 bp, Artificial
  Probe
gacctcaggtctttcgtttctccgc

SEQ ID NO: 288845 - DNA, 25 bp, Artificial
  Probe
acctcaggtctttcgtttctccgct

SEQ ID NO: 288846 - DNA, 25 bp, Artificial
  Probe
atcaagccgggagatcgtatggcga

SEQ ID NO: 288847 - DNA, 25 bp, Artificial
  Probe
cgttaacgcgaggtaactggatcat

SEQ ID NO: 288848 - DNA, 25 bp, Artificial
  Probe
tcaggtctttcgtttctccgctctt

SEQ ID NO: 288849 - DNA, 25 bp, Artificial
  Probe
ctcaggtctttcgtttctccgctct

SEQ ID NO: 288850 - DNA, 25 bp, Artificial
  Probe
gagacctcaggtctttcgtttctcc

SEQ ID NO: 288851 - DNA, 25 bp, Artificial
  Probe
ttaacgcgaggtaactggatcatat

SEQ ID NO: 288852 - DNA, 25 bp, Artificial
  Probe
caggtctttcgtttctccgctcttt

SEQ ID NO: 288853 - DNA, 25 bp, Artificial
  Probe
gcgttaacgcgaggtaactggatca

SEQ ID NO: 288854 - DNA, 25 bp, Artificial
  Probe
tatggcgagacctcaggtctttcgt

SEQ ID NO: 288855 - DNA, 25 bp, Artificial
  Probe
ggatcatatgctggagccttgaatg

SEQ ID NO: 288856 - DNA, 25 bp, Artificial
  Probe
atgctggagccttgaatgaaaaagc

SEQ ID NO: 288857 - DNA, 25 bp, Artificial
  Probe
atcatatgctggagccttgaatgaa

SEQ ID NO: 288858 - DNA, 25 bp, Artificial
  Probe
agacctcaggtctttcgtttctccg

SEQ ID NO: 288859 - DNA, 25 bp, Artificial
  Probe
aaagcgcatatcaagccgggagatc

SEQ ID NO: 288860 - DNA, 25 bp, Artificial
  Probe
gcgagacctcaggtctttcgtttct

SEQ ID NO: 288861 - DNA, 25 bp, Artificial
  Probe
cctcaggtctttcgtttctccgctc

SEQ ID NO: 288862 - DNA, 25 bp, Artificial
  Probe
actggatcatatgctggagccttga

SEQ ID NO: 288863 - DNA, 25 bp, Artificial
  Probe
gtaactggatcatatgctggagcct

SEQ ID NO: 288864 - DNA, 25 bp, Artificial
  Probe
gttaacgcgaggtaactggatcata

SEQ ID NO: 288865 - DNA, 25 bp, Artificial
  Probe
ggcgagacctcaggtctttcgtttc

SEQ ID NO: 288866 - DNA, 25 bp, Artificial
  Probe
cgcgttaacgcgaggtaactggatc

SEQ ID NO: 288867 - DNA, 25 bp, Artificial
  Probe
gcgcgttaacgcgaggtaactggat

SEQ ID NO: 288868 - DNA, 25 bp, Artificial
  Probe
acgcgaccaaagagacaaaacgacg

SEQ ID NO: 288869 - DNA, 25 bp, Artificial
  Probe
aagcgcatatcaagccgggagatcg

SEQ ID NO: 288870 - DNA, 25 bp, Artificial
  Probe
ggtaactggatcatatgctggagcc

SEQ ID NO: 288871 - DNA, 25 bp, Artificial
  Probe
gtatggcgagacctcaggtctttcg

SEQ ID NO: 288872 - DNA, 25 bp, Artificial
  Probe
taacgcgaggtaactggatcatatg

SEQ ID NO: 288873 - DNA, 25 bp, Artificial
  Probe
tcatatgctggagccttgaatgaaa

SEQ ID NO: 288874 - DNA, 25 bp, Artificial
  Probe
cgagacctcaggtctttcgtttctc

SEQ ID NO: 288875 - DNA, 25 bp, Artificial
  Probe
tatgctggagccttgaatgaaaaag

SEQ ID NO: 288876 - DNA, 25 bp, Artificial
  Probe
taactggatcatatgctggagcctt

SEQ ID NO: 288877 - DNA, 25 bp, Artificial
  Probe
ccgggagatcgtatggcgagacctc

SEQ ID NO: 288878 - DNA, 25 bp, Artificial
  Probe
atcacagctggcagacacggggacg

SEQ ID NO: 288879 - DNA, 25 bp, Artificial
  Probe
tcctcaggagacactagaaaacatt

SEQ ID NO: 288880 - DNA, 25 bp, Artificial
  Probe
gtgacagtcacacaaatgttctctc

SEQ ID NO: 288881 - DNA, 25 bp, Artificial
  Probe
aggaaaagtcaactcatccacgaag

SEQ ID NO: 288882 - DNA, 25 bp, Artificial
  Probe
ggagctatggagtctgaggtctcct

SEQ ID NO: 288883 - DNA, 25 bp, Artificial
  Probe
tctcttccattgacttcagtatgag

SEQ ID NO: 288884 - DNA, 25 bp, Artificial
  Probe
ttctcttgaggaaaagtcaactcat

SEQ ID NO: 288885 - DNA, 25 bp, Artificial
  Probe
cacgaaggtgcgtgacacttagagg

SEQ ID NO: 288886 - DNA, 25 bp, Artificial
  Probe
gcgtgacacttagaggtggatttgc

SEQ ID NO: 288887 - DNA, 25 bp, Artificial
  Probe
tcagtatgaggagctgcagatcaca

SEQ ID NO: 288888 - DNA, 25 bp, Artificial
  Probe
gacgacctgcgcaacaccaagcagg

SEQ ID NO: 288889 - DNA, 25 bp, Artificial
  Probe
ggtggatttgcttctgcatgtgaca

SEQ ID NO: 288890 - DNA, 25 bp, Artificial
  Probe
ttaatattggacacccatggaagag

SEQ ID NO: 288891 - DNA, 25 bp, Artificial
  Probe
gatgtgtgggaaccatcctggactc

SEQ ID NO: 288892 - DNA, 25 bp, Artificial
  Probe
tgctcgagctgttctctgaacacca

SEQ ID NO: 288893 - DNA, 25 bp, Artificial
  Probe
cagacaaaagtgagtcctgggttag

SEQ ID NO: 288894 - DNA, 25 bp, Artificial
  Probe
agttcccattaatgcgttcaatgct

SEQ ID NO: 288895 - DNA, 25 bp, Artificial
  Probe
actgaagttcccattaatgcgttca

SEQ ID NO: 288896 - DNA, 25 bp, Artificial
  Probe
atgaggagctgcagatcacagctgg

SEQ ID NO: 288897 - DNA, 25 bp, Artificial
  Probe
acggggacgacctgcgcaacaccaa

SEQ ID NO: 288898 - DNA, 25 bp, Artificial
  Probe
agatcaggatgtgtgggaaccatcc

SEQ ID NO: 288899 - DNA, 25 bp, Artificial
  Probe
acccatggaagagaatctggggtgt

SEQ ID NO: 288900 - DNA, 25 bp, Artificial
  Probe
tcttcctgagggagctatggagtct

SEQ ID NO: 288901 - DNA, 25 bp, Artificial
  Probe
cttacagcaaatgtactatacttgg

SEQ ID NO: 288902 - DNA, 25 bp, Artificial
  Probe
catccacgaaggtgcgtgacactta

SEQ ID NO: 288903 - DNA, 25 bp, Artificial
  Probe
tgagtcctgggttagaggcagatca

SEQ ID NO: 288904 - DNA, 25 bp, Artificial
  Probe
gcagacacggggacgacctgcgcaa

SEQ ID NO: 288905 - DNA, 25 bp, Artificial
  Probe
gagaatctggggtgttcttacagca

SEQ ID NO: 288906 - DNA, 25 bp, Artificial
  Probe
ttcctgagggagctatggagtctga

SEQ ID NO: 288907 - DNA, 25 bp, Artificial
  Probe
acgaaggtgcgtgacacttagaggt

SEQ ID NO: 288908 - DNA, 25 bp, Artificial
  Probe
ggactccataagtttctgatttaat

SEQ ID NO: 288909 - DNA, 25 bp, Artificial
  Probe
cagctggcagacacggggacgacct

SEQ ID NO: 288910 - DNA, 25 bp, Artificial
  Probe
gatttgcttctgcatgtgacagtca

SEQ ID NO: 288911 - DNA, 25 bp, Artificial
  Probe
tagaaaacatttcctcttcctgagg

SEQ ID NO: 288912 - DNA, 25 bp, Artificial
  Probe
gtgttcttacagcaaatgtactata

SEQ ID NO: 288913 - DNA, 25 bp, Artificial
  Probe
aacatttcctcttcctgagggagct

SEQ ID NO: 288914 - DNA, 25 bp, Artificial
  Probe
gcgttcaatgctctctctttctctg

SEQ ID NO: 288915 - DNA, 25 bp, Artificial
  Probe
aatgctctctctttctctgctcgag

SEQ ID NO: 288916 - DNA, 25 bp, Artificial
  Probe
tattggacacccatggaagagaatc

SEQ ID NO: 288917 - DNA, 25 bp, Artificial
  Probe
gcagatcacagctggcagacacggg

SEQ ID NO: 288918 - DNA, 25 bp, Artificial
  Probe
acacttagaggtggatttgcttctg

SEQ ID NO: 288919 - DNA, 25 bp, Artificial
  Probe
acagcaaatgtactatacttgggtt

SEQ ID NO: 288920 - DNA, 25 bp, Artificial
  Probe
aggtggatttgcttctgcatgtgac

SEQ ID NO: 288921 - DNA, 25 bp, Artificial
  Probe
atttcctcttcctgagggagctatg

SEQ ID NO: 288922 - DNA, 25 bp, Artificial
  Probe
gcttctgcatgtgacagtcacacaa

SEQ ID NO: 288923 - DNA, 25 bp, Artificial
  Probe
gcagatcaggatgtgtgggaaccat

SEQ ID NO: 288924 - DNA, 25 bp, Artificial
  Probe
cccacggtgacaacatggaacacat

SEQ ID NO: 288925 - DNA, 25 bp, Artificial
  Probe
ggagtggctgacactttgcttgctc

SEQ ID NO: 288926 - DNA, 25 bp, Artificial
  Probe
tgaacatcaccgaagaaattaatga

SEQ ID NO: 288927 - DNA, 25 bp, Artificial
  Probe
cctatgttgtggtcatcaccagttc

SEQ ID NO: 288928 - DNA, 25 bp, Artificial
  Probe
aattgccaatacctcctatgttgtg

SEQ ID NO: 288929 - DNA, 25 bp, Artificial
  Probe
atatggtaaagatccccacggtgac

SEQ ID NO: 288930 - DNA, 25 bp, Artificial
  Probe
ttctggttgaggtggctgcttcttt

SEQ ID NO: 288931 - DNA, 25 bp, Artificial
  Probe
gtaaagatccccacggtgacaacat

SEQ ID NO: 288932 - DNA, 25 bp, Artificial
  Probe
cttatttgcagtgctgatttggtgc

SEQ ID NO: 288933 - DNA, 25 bp, Artificial
  Probe
ttctccaaagatatagcaattttgg

SEQ ID NO: 288934 - DNA, 25 bp, Artificial
  Probe
gcgattatcgcaagatagcacactg

SEQ ID NO: 288935 - DNA, 25 bp, Artificial
  Probe
ttgcttgctctgagcctcttcagag

SEQ ID NO: 288936 - DNA, 25 bp, Artificial
  Probe
gtgcatacgttaatcacagcatcaa

SEQ ID NO: 288937 - DNA, 25 bp, Artificial
  Probe
ttgcagtgctgatttggtgcgtgct

SEQ ID NO: 288938 - DNA, 25 bp, Artificial
  Probe
tcttcagaggtttgcccctggtgca

SEQ ID NO: 288939 - DNA, 25 bp, Artificial
  Probe
cacgctccacagaggcttatttgca

SEQ ID NO: 288940 - DNA, 25 bp, Artificial
  Probe
ggtcatcaccagttccagcttctat

SEQ ID NO: 288941 - DNA, 25 bp, Artificial
  Probe
cttcgatatttcacgctccacagag

SEQ ID NO: 288942 - DNA, 25 bp, Artificial
  Probe
tagcccctcggataagcttaaagga

SEQ ID NO: 288943 - DNA, 25 bp, Artificial
  Probe
gaggtttgcccctggtgcatacgtt

SEQ ID NO: 288944 - DNA, 25 bp, Artificial
  Probe
ttgctctgagcctcttcagaggttt

SEQ ID NO: 288945 - DNA, 25 bp, Artificial
  Probe
caattttggatgactttctgcctct

SEQ ID NO: 288946 - DNA, 25 bp, Artificial
  Probe
cagaggcttatttgcagtgctgatt

SEQ ID NO: 288947 - DNA, 25 bp, Artificial
  Probe
tttttctggttgaggtggctgcttc

SEQ ID NO: 288948 - DNA, 25 bp, Artificial
  Probe
cctcggataagcttaaaggaagagg

SEQ ID NO: 288949 - DNA, 25 bp, Artificial
  Probe
gcaagatagcacactgaacatcacc

SEQ ID NO: 288950 - DNA, 25 bp, Artificial
  Probe
tttgcagtgctgatttggtgcgtgc

SEQ ID NO: 288951 - DNA, 25 bp, Artificial
  Probe
tcgcaagatagcacactgaacatca

SEQ ID NO: 288952 - DNA, 25 bp, Artificial
  Probe
gattatcgcaagatagcacactgaa

SEQ ID NO: 288953 - DNA, 25 bp, Artificial
  Probe
tcaaggcgattatcgcaagatagca

SEQ ID NO: 288954 - DNA, 25 bp, Artificial
  Probe
ttttgcacaggaaaatgttacattc

SEQ ID NO: 288955 - DNA, 25 bp, Artificial
  Probe
ccctcggataagcttaaaggaagag

SEQ ID NO: 288956 - DNA, 25 bp, Artificial
  Probe
accttcaacaagctgaaagcgggtg

SEQ ID NO: 288957 - DNA, 25 bp, Artificial
  Probe
tgacaacatggaacacataccttcg

SEQ ID NO: 288958 - DNA, 25 bp, Artificial
  Probe
agatccccacggtgacaacatggaa

SEQ ID NO: 288959 - DNA, 25 bp, Artificial
  Probe
ctccacagaggcttatttgcagtgc

SEQ ID NO: 288960 - DNA, 25 bp, Artificial
  Probe
gtgacaacatggaacacataccttc

SEQ ID NO: 288961 - DNA, 25 bp, Artificial
  Probe
gcacactgaacatcaccgaagaaat

SEQ ID NO: 288962 - DNA, 25 bp, Artificial
  Probe
tggtgcatacgttaatcacagcatc

SEQ ID NO: 288963 - DNA, 25 bp, Artificial
  Probe
atattcaaggcgattatcgcaagat

SEQ ID NO: 288964 - DNA, 25 bp, Artificial
  Probe
gatatttcacgctccacagaggctt

SEQ ID NO: 288965 - DNA, 25 bp, Artificial
  Probe
gcccctcggataagcttaaaggaag

SEQ ID NO: 288966 - DNA, 25 bp, Artificial
  Probe
ggattcttaacagattctccaaaga

SEQ ID NO: 288967 - DNA, 25 bp, Artificial
  Probe
cctggtgcatacgttaatcacagca

SEQ ID NO: 288968 - DNA, 25 bp, Artificial
  Probe
ctcctatgttgtggtcatcaccagt

SEQ ID NO: 288969 - DNA, 25 bp, Artificial
  Probe
atgtcaaccttcaacaagctgaaag

SEQ ID NO: 288970 - DNA, 25 bp, Artificial
  Probe
aaaccctgtggatgggcagtcacag

SEQ ID NO: 288971 - DNA, 25 bp, Artificial
  Probe
tcaatgctattcaaaccctgtggat

SEQ ID NO: 288972 - DNA, 25 bp, Artificial
  Probe
atcaatgctattcaaaccctgtgga

SEQ ID NO: 288973 - DNA, 25 bp, Artificial
  Probe
ctattcaaaccctgtggatgggcag

SEQ ID NO: 288974 - DNA, 25 bp, Artificial
  Probe
tgcaatcccacaggtaaagatctgg

SEQ ID NO: 288975 - DNA, 25 bp, Artificial
  Probe
acacacgcacgcacagaggctacag

SEQ ID NO: 288976 - DNA, 25 bp, Artificial
  Probe
ccagctccttcctaaaatctgcagg

SEQ ID NO: 288977 - DNA, 25 bp, Artificial
  Probe
caatgctattcaaaccctgtggatg

SEQ ID NO: 288978 - DNA, 25 bp, Artificial
  Probe
ggataaaatctctgcaatcccacag

SEQ ID NO: 288979 - DNA, 25 bp, Artificial
  Probe
tattcaaaccctgtggatgggcagt

SEQ ID NO: 288980 - DNA, 25 bp, Artificial
  Probe
acgcacagaggctacagtggctggt

SEQ ID NO: 288981 - DNA, 25 bp, Artificial
  Probe
gataaaatctctgcaatcccacagg

SEQ ID NO: 288982 - DNA, 25 bp, Artificial
  Probe
cacgcacgcacagaggctacagtgg

SEQ ID NO: 288983 - DNA, 25 bp, Artificial
  Probe
gcaatcccacaggtaaagatctggt

SEQ ID NO: 288984 - DNA, 25 bp, Artificial
  Probe
caatcccacaggtaaagatctggtt

SEQ ID NO: 288985 - DNA, 25 bp, Artificial
  Probe
caaacagacatatgtatgtgtgcgc

SEQ ID NO: 288986 - DNA, 25 bp, Artificial
  Probe
attcaaaccctgtggatgggcagtc

SEQ ID NO: 288987 - DNA, 25 bp, Artificial
  Probe
cagctccttcctaaaatctgcagga

SEQ ID NO: 288988 - DNA, 25 bp, Artificial
  Probe
gcagtcacaggaacatgggggctct

SEQ ID NO: 288989 - DNA, 25 bp, Artificial
  Probe
tgtggatgggcagtcacaggaacat

SEQ ID NO: 288990 - DNA, 25 bp, Artificial
  Probe
cgcacgcacagaggctacagtggct

SEQ ID NO: 288991 - DNA, 25 bp, Artificial
  Probe
cagaggctacagtggctggtgatca

SEQ ID NO: 288992 - DNA, 25 bp, Artificial
  Probe
tcaaaccctgtggatgggcagtcac

SEQ ID NO: 288993 - DNA, 25 bp, Artificial
  Probe
acgcacgcacagaggctacagtggc

SEQ ID NO: 288994 - DNA, 25 bp, Artificial
  Probe
cacacgcacgcacagaggctacagt

SEQ ID NO: 288995 - DNA, 25 bp, Artificial
  Probe
caaaccctgtggatgggcagtcaca

SEQ ID NO: 288996 - DNA, 25 bp, Artificial
  Probe
gatcaatgctattcaaaccctgtgg

SEQ ID NO: 288997 - DNA, 25 bp, Artificial
  Probe
ttcaaaccctgtggatgggcagtca

SEQ ID NO: 288998 - DNA, 25 bp, Artificial
  Probe
cagtcacaggaacatgggggctctg

SEQ ID NO: 288999 - DNA, 25 bp, Artificial
  Probe
tgatcaatgctattcaaaccctgtg

SEQ ID NO: 289000 - DNA, 25 bp, Artificial
  Probe
ctgcaatcccacaggtaaagatctg

SEQ ID NO: 289001 - DNA, 25 bp, Artificial
  Probe
gacatatgtatgtgtgcgcacacac

SEQ ID NO: 289002 - DNA, 25 bp, Artificial
  Probe
acatatgtatgtgtgcgcacacaca

SEQ ID NO: 289003 - DNA, 25 bp, Artificial
  Probe
actgggccttgtaggagtgttcaga

SEQ ID NO: 289004 - DNA, 25 bp, Artificial
  Probe
tctgcaatcccacaggtaaagatct

SEQ ID NO: 289005 - DNA, 25 bp, Artificial
  Probe
agctccttcctaaaatctgcaggat

SEQ ID NO: 289006 - DNA, 25 bp, Artificial
  Probe
cagtggctggtgatcaatgctattc

SEQ ID NO: 289007 - DNA, 25 bp, Artificial
  Probe
aatgctattcaaaccctgtggatgg

SEQ ID NO: 289008 - DNA, 25 bp, Artificial
  Probe
acacgcacgcacagaggctacagtg

SEQ ID NO: 289009 - DNA, 25 bp, Artificial
  Probe
ctctgcaatcccacaggtaaagatc

SEQ ID NO: 289010 - DNA, 25 bp, Artificial
  Probe
cacagaggctacagtggctggtgat

SEQ ID NO: 289011 - DNA, 25 bp, Artificial
  Probe
acagaggctacagtggctggtgatc

SEQ ID NO: 289012 - DNA, 25 bp, Artificial
  Probe
aatcccacaggtaaagatctggttc

SEQ ID NO: 289013 - DNA, 25 bp, Artificial
  Probe
tacagtggctggtgatcaatgctat

SEQ ID NO: 289014 - DNA, 25 bp, Artificial
  Probe
cacaaacagacatatgtatgtgtgc

SEQ ID NO: 289015 - DNA, 25 bp, Artificial
  Probe
acagtggctggtgatcaatgctatt

SEQ ID NO: 289016 - DNA, 25 bp, Artificial
  Probe
caccgtgacgcgagcatgctcggct

SEQ ID NO: 289017 - DNA, 25 bp, Artificial
  Probe
ccactgtttgcaacggccgtgaggt

SEQ ID NO: 289018 - DNA, 25 bp, Artificial
  Probe
gggtgtctttgtgaggcataatgcc

SEQ ID NO: 289019 - DNA, 25 bp, Artificial
  Probe
agcgccaaccttggtcaagggtctg

SEQ ID NO: 289020 - DNA, 25 bp, Artificial
  Probe
ctctgtggtgcttggctgcctcttt

SEQ ID NO: 289021 - DNA, 25 bp, Artificial
  Probe
agggccagcgccaaccttggtcaag

SEQ ID NO: 289022 - DNA, 25 bp, Artificial
  Probe
cagccacagaagaatgtggtgagcc

SEQ ID NO: 289023 - DNA, 25 bp, Artificial
  Probe
atggctgctcccaaacccagcatag

SEQ ID NO: 289024 - DNA, 25 bp, Artificial
  Probe
tctatgtcacctccagtgattatcg

SEQ ID NO: 289025 - DNA, 25 bp, Artificial
  Probe
gtctgtaccttgaggcgcctcggtt

SEQ ID NO: 289026 - DNA, 25 bp, Artificial
  Probe
tcacaggtggccatctgcttggcac

SEQ ID NO: 289027 - DNA, 25 bp, Artificial
  Probe
cagtttgttcccactgtttgcaacg

SEQ ID NO: 289028 - DNA, 25 bp, Artificial
  Probe
aatgtgctcctcatcgcgctctgca

SEQ ID NO: 289029 - DNA, 25 bp, Artificial
  Probe
tcaccaagaccaatcgcattgctcg

SEQ ID NO: 289030 - DNA, 25 bp, Artificial
  Probe
gctgcctctttgcacccaagttgca

SEQ ID NO: 289031 - DNA, 25 bp, Artificial
  Probe
cccgtgtttgccaggcctgggactc

SEQ ID NO: 289032 - DNA, 25 bp, Artificial
  Probe
gctcattgtcgctgcctggctggtg

SEQ ID NO: 289033 - DNA, 25 bp, Artificial
  Probe
gctttgctacattctgctgggcggt

SEQ ID NO: 289034 - DNA, 25 bp, Artificial
  Probe
gaagtggtgacattgcgctgtaacc

SEQ ID NO: 289035 - DNA, 25 bp, Artificial
  Probe
ctcggtttgggtaccgccttctctg

SEQ ID NO: 289036 - DNA, 25 bp, Artificial
  Probe
cttccggtcgggagctttgctacat

SEQ ID NO: 289037 - DNA, 25 bp, Artificial
  Probe
tgtggctgaggacgacaggcccaac

SEQ ID NO: 289038 - DNA, 25 bp, Artificial
  Probe
tctttgtgaggcataatgccacacc

SEQ ID NO: 289039 - DNA, 25 bp, Artificial
  Probe
acactctttgtgttgggtgtctttg

SEQ ID NO: 289040 - DNA, 25 bp, Artificial
  Probe
gtggtggactcaacaacgtcgtcgc

SEQ ID NO: 289041 - DNA, 25 bp, Artificial
  Probe
ggtaccgccttctctgtctgctact

SEQ ID NO: 289042 - DNA, 25 bp, Artificial
  Probe
ggctgcctctttgcacccaagttgc

SEQ ID NO: 289043 - DNA, 25 bp, Artificial
  Probe
agccacagaagaatgtggtgagcca

SEQ ID NO: 289044 - DNA, 25 bp, Artificial
  Probe
aacccccatgcaaaggtgcttccag

SEQ ID NO: 289045 - DNA, 25 bp, Artificial
  Probe
atgtggtgagccaccgggcacctac

SEQ ID NO: 289046 - DNA, 25 bp, Artificial
  Probe
tcgctttgaagatcccacactcctg

SEQ ID NO: 289047 - DNA, 25 bp, Artificial
  Probe
caatcgcattgctcgcatatttggc

SEQ ID NO: 289048 - DNA, 25 bp, Artificial
  Probe
tccttgtagctatgccccgtgtttg

SEQ ID NO: 289049 - DNA, 25 bp, Artificial
  Probe
gcatcatctggctggctttccttcc

SEQ ID NO: 289050 - DNA, 25 bp, Artificial
  Probe
gtaaccaccgtgacgcgagcatgct

SEQ ID NO: 289051 - DNA, 25 bp, Artificial
  Probe
tctgcaatggccagtaactgtcctt

SEQ ID NO: 289052 - DNA, 25 bp, Artificial
  Probe
ggcggtgtcttcctttgctattgta

SEQ ID NO: 289053 - DNA, 25 bp, Artificial
  Probe
aagtgcccggagaacttcaacgaag

SEQ ID NO: 289054 - DNA, 25 bp, Artificial
  Probe
gctctgcacgctctatgccttcaag

SEQ ID NO: 289055 - DNA, 25 bp, Artificial
  Probe
tggggagcctctgcaatggccagta

SEQ ID NO: 289056 - DNA, 25 bp, Artificial
  Probe
ggctggctttccttcctatcttcta

SEQ ID NO: 289057 - DNA, 25 bp, Artificial
  Probe
ctggcctacaatgtgctcctcatcg

SEQ ID NO: 289058 - DNA, 25 bp, Artificial
  Probe
ccagccctttaggtcagaagccaga

SEQ ID NO: 289059 - DNA, 25 bp, Artificial
  Probe
tgcaaaggtgcttccagaccagccc

SEQ ID NO: 289060 - DNA, 25 bp, Artificial
  Probe
tccttacccagtagtttgtcccgtg

SEQ ID NO: 289061 - DNA, 25 bp, Artificial
  Probe
gcctgggtgccctggcgacactctt

SEQ ID NO: 289062 - DNA, 25 bp, Artificial
  Probe
tctgtgattgtgatacgcagttcag

SEQ ID NO: 289063 - DNA, 25 bp, Artificial
  Probe
acaggttcagcgtcagcggaactgc

SEQ ID NO: 289064 - DNA, 25 bp, Artificial
  Probe
tgagcattggtgacagggtctgaca

SEQ ID NO: 289065 - DNA, 25 bp, Artificial
  Probe
ctacaactttctaggctgattttag

SEQ ID NO: 289066 - DNA, 25 bp, Artificial
  Probe
gctccagaacatggaaacagaacaa

SEQ ID NO: 289067 - DNA, 25 bp, Artificial
  Probe
acatatgtcccaacagtgtgcaacg

SEQ ID NO: 289068 - DNA, 25 bp, Artificial
  Probe
accccagaagaatgtggtcacacac

SEQ ID NO: 289069 - DNA, 25 bp, Artificial
  Probe
gtggtcacacacagacttcacctca

SEQ ID NO: 289070 - DNA, 25 bp, Artificial
  Probe
gacagggtcagtctactaaaacgaa

SEQ ID NO: 289071 - DNA, 25 bp, Artificial
  Probe
ttctcatgtttttaggctgttagac

SEQ ID NO: 289072 - DNA, 25 bp, Artificial
  Probe
ataaccattgtttacagagctgagc

SEQ ID NO: 289073 - DNA, 25 bp, Artificial
  Probe
ggtctgacagggtcagtctactaaa

SEQ ID NO: 289074 - DNA, 25 bp, Artificial
  Probe
tgacagggtctgacagggtcagtct

SEQ ID NO: 289075 - DNA, 25 bp, Artificial
  Probe
ggaactgcaaccacctattctcagt

SEQ ID NO: 289076 - DNA, 25 bp, Artificial
  Probe
acagacttcacctcaacaggttcag

SEQ ID NO: 289077 - DNA, 25 bp, Artificial
  Probe
tgttagacaaagtgctcacatgctg

SEQ ID NO: 289078 - DNA, 25 bp, Artificial
  Probe
cagttctcatgtttttaggctgtta

SEQ ID NO: 289079 - DNA, 25 bp, Artificial
  Probe
ggctgattttagtgccctaattaac

SEQ ID NO: 289080 - DNA, 25 bp, Artificial
  Probe
gttcagttctcatgtttttaggctg

SEQ ID NO: 289081 - DNA, 25 bp, Artificial
  Probe
cattgtttacagagctgagcattgg

SEQ ID NO: 289082 - DNA, 25 bp, Artificial
  Probe
acagggtctgacagggtcagtctac

SEQ ID NO: 289083 - DNA, 25 bp, Artificial
  Probe
gaaataaccattgtttacagagctg

SEQ ID NO: 289084 - DNA, 25 bp, Artificial
  Probe
agaatgtggtcacacacagacttca

SEQ ID NO: 289085 - DNA, 25 bp, Artificial
  Probe
ctcaacaggttcagcgtcagcggaa

SEQ ID NO: 289086 - DNA, 25 bp, Artificial
  Probe
taggctgattttagtgccctaatta

SEQ ID NO: 289087 - DNA, 25 bp, Artificial
  Probe
gctcacatgctgctccagaacatgg

SEQ ID NO: 289088 - DNA, 25 bp, Artificial
  Probe
caccacctcatctctgtgattgtga

SEQ ID NO: 289089 - DNA, 25 bp, Artificial
  Probe
agcgtcagcggaactgcaaccacct

SEQ ID NO: 289090 - DNA, 25 bp, Artificial
  Probe
tctcatgtttttaggctgttagaca

SEQ ID NO: 289091 - DNA, 25 bp, Artificial
  Probe
aggttcagcgtcagcggaactgcaa

SEQ ID NO: 289092 - DNA, 25 bp, Artificial
  Probe
gtttacagagctgagcattggtgac

SEQ ID NO: 289093 - DNA, 25 bp, Artificial
  Probe
gtcctctgcaagcacatatgtccca

SEQ ID NO: 289094 - DNA, 25 bp, Artificial
  Probe
caacagtgtgcaacggaagggaagt

SEQ ID NO: 289095 - DNA, 25 bp, Artificial
  Probe
ttttaggctgttagacaaagtgctc

SEQ ID NO: 289096 - DNA, 25 bp, Artificial
  Probe
caagcacatatgtcccaacagtgtg

SEQ ID NO: 289097 - DNA, 25 bp, Artificial
  Probe
tctcagtcctctgcaagcacatatg

SEQ ID NO: 289098 - DNA, 25 bp, Artificial
  Probe
tacagagctgagcattggtgacagg

SEQ ID NO: 289099 - DNA, 25 bp, Artificial
  Probe
ctgagcattggtgacagggtctgac

SEQ ID NO: 289100 - DNA, 25 bp, Artificial
  Probe
tccccaggacatggaaataaccatt

SEQ ID NO: 289101 - DNA, 25 bp, Artificial
  Probe
ttcctatgaagtcttttgtaggttc

SEQ ID NO: 289102 - DNA, 25 bp, Artificial
  Probe
cacatgctgctccagaacatggaaa

SEQ ID NO: 289103 - DNA, 25 bp, Artificial
  Probe
atgtgctacaactttctaggctgat

SEQ ID NO: 289104 - DNA, 25 bp, Artificial
  Probe
attgtgatacgcagttcagttctca

SEQ ID NO: 289105 - DNA, 25 bp, Artificial
  Probe
cttccccaggacatggaaataacca

SEQ ID NO: 289106 - DNA, 25 bp, Artificial
  Probe
tctgcaagcacatatgtcccaacag

SEQ ID NO: 289107 - DNA, 25 bp, Artificial
  Probe
aactttctaggctgattttagtgcc

SEQ ID NO: 289108 - DNA, 25 bp, Artificial
  Probe
gagactgaccattcagatgccggga

SEQ ID NO: 289109 - DNA, 25 bp, Artificial
  Probe
gcagactgcccagattgtgtcacct

SEQ ID NO: 289110 - DNA, 25 bp, Artificial
  Probe
gccagcagcttcatgtcagagttcc

SEQ ID NO: 289111 - DNA, 25 bp, Artificial
  Probe
agactgcccagattgtgtcacctat

SEQ ID NO: 289112 - DNA, 25 bp, Artificial
  Probe
ggcagactgcccagattgtgtcacc

SEQ ID NO: 289113 - DNA, 25 bp, Artificial
  Probe
cttcatgtcagagttccccgggcag

SEQ ID NO: 289114 - DNA, 25 bp, Artificial
  Probe
tcctcagccagcagcttcatgtcag

SEQ ID NO: 289115 - DNA, 25 bp, Artificial
  Probe
gactgaccattcagatgccgggagc

SEQ ID NO: 289116 - DNA, 25 bp, Artificial
  Probe
ttccccgggcagactgcccagattg

SEQ ID NO: 289117 - DNA, 25 bp, Artificial
  Probe
actgaccattcagatgccgggagca

SEQ ID NO: 289118 - DNA, 25 bp, Artificial
  Probe
tgagactgaccattcagatgccggg

SEQ ID NO: 289119 - DNA, 25 bp, Artificial
  Probe
atgccgggagcaaaggtctaaccct

SEQ ID NO: 289120 - DNA, 25 bp, Artificial
  Probe
ggtgagactgaccattcagatgccg

SEQ ID NO: 289121 - DNA, 25 bp, Artificial
  Probe
agccagcagcttcatgtcagagttc

SEQ ID NO: 289122 - DNA, 25 bp, Artificial
  Probe
agcagcttcatgtcagagttccccg

SEQ ID NO: 289123 - DNA, 25 bp, Artificial
  Probe
ctcagccagcagcttcatgtcagag

SEQ ID NO: 289124 - DNA, 25 bp, Artificial
  Probe
ctgtgctggtggtgagactgaccat

SEQ ID NO: 289125 - DNA, 25 bp, Artificial
  Probe
atgtttgcactgctgaaaactaagt

SEQ ID NO: 289126 - DNA, 25 bp, Artificial
  Probe
cagatgccgggagcaaaggtctaac

SEQ ID NO: 289127 - DNA, 25 bp, Artificial
  Probe
gactgcccagattgtgtcacctatc

SEQ ID NO: 289128 - DNA, 25 bp, Artificial
  Probe
agttccccgggcagactgcccagat

SEQ ID NO: 289129 - DNA, 25 bp, Artificial
  Probe
agcttcatgtcagagttccccgggc

SEQ ID NO: 289130 - DNA, 25 bp, Artificial
  Probe
gttccccgggcagactgcccagatt

SEQ ID NO: 289131 - DNA, 25 bp, Artificial
  Probe
cagcagcttcatgtcagagttcccc

SEQ ID NO: 289132 - DNA, 25 bp, Artificial
  Probe
gtgagactgaccattcagatgccgg

SEQ ID NO: 289133 - DNA, 25 bp, Artificial
  Probe
gatgccgggagcaaaggtctaaccc

SEQ ID NO: 289134 - DNA, 25 bp, Artificial
  Probe
aatgtttgcactgctgaaaactaag

SEQ ID NO: 289135 - DNA, 25 bp, Artificial
  Probe
tggtgagactgaccattcagatgcc

SEQ ID NO: 289136 - DNA, 25 bp, Artificial
  Probe
ctgcccagattgtgtcacctatcaa

SEQ ID NO: 289137 - DNA, 25 bp, Artificial
  Probe
tgcactgctgaaaactaagtgtgtc

SEQ ID NO: 289138 - DNA, 25 bp, Artificial
  Probe
ttgcactgctgaaaactaagtgtgt

SEQ ID NO: 289139 - DNA, 25 bp, Artificial
  Probe
gcccagattgtgtcacctatcaaaa

SEQ ID NO: 289140 - DNA, 25 bp, Artificial
  Probe
tttgcactgctgaaaactaagtgtg

SEQ ID NO: 289141 - DNA, 25 bp, Artificial
  Probe
tccccgggcagactgcccagattgt

SEQ ID NO: 289142 - DNA, 25 bp, Artificial
  Probe
ctgaccattcagatgccgggagcaa

SEQ ID NO: 289143 - DNA, 25 bp, Artificial
  Probe
tgaccattcagatgccgggagcaaa

SEQ ID NO: 289144 - DNA, 25 bp, Artificial
  Probe
cagccagcagcttcatgtcagagtt

SEQ ID NO: 289145 - DNA, 25 bp, Artificial
  Probe
tcagatgccgggagcaaaggtctaa

SEQ ID NO: 289146 - DNA, 25 bp, Artificial
  Probe
cagcttcatgtcagagttccccggg

SEQ ID NO: 289147 - DNA, 25 bp, Artificial
  Probe
tgtgctggtggtgagactgaccatt

SEQ ID NO: 289148 - DNA, 25 bp, Artificial
  Probe
ccccgggcagactgcccagattgtg

SEQ ID NO: 289149 - DNA, 25 bp, Artificial
  Probe
gtgctggtggtgagactgaccattc

SEQ ID NO: 289150 - DNA, 25 bp, Artificial
  Probe
tcatgtcagagttccccgggcagac

SEQ ID NO: 289151 - DNA, 25 bp, Artificial
  Probe
cagactgcccagattgtgtcaccta

SEQ ID NO: 289152 - DNA, 25 bp, Artificial
  Probe
gtttgcactgctgaaaactaagtgt

SEQ ID NO: 289153 - DNA, 25 bp, Artificial
  Probe
ccagcagcttcatgtcagagttccc

SEQ ID NO: 289154 - DNA, 25 bp, Artificial
  Probe
gcaaagtcactcagggacacagaca

SEQ ID NO: 289155 - DNA, 25 bp, Artificial
  Probe
agcacagtgtttacaagcttttaaa

SEQ ID NO: 289156 - DNA, 25 bp, Artificial
  Probe
ggcagcctgggcttttgttgttact

SEQ ID NO: 289157 - DNA, 25 bp, Artificial
  Probe
cttgctgtgccctgaatgctggttt

SEQ ID NO: 289158 - DNA, 25 bp, Artificial
  Probe
tttttccattcatggcagacctaag

SEQ ID NO: 289159 - DNA, 25 bp, Artificial
  Probe
tgttcaggtatcaatttgttcctgg

SEQ ID NO: 289160 - DNA, 25 bp, Artificial
  Probe
gtctgttgcaatatgctgttttatc

SEQ ID NO: 289161 - DNA, 25 bp, Artificial
  Probe
cctgggcttttgttgttacttgctg

SEQ ID NO: 289162 - DNA, 25 bp, Artificial
  Probe
ggaaagatctgctccctgtatgtgc

SEQ ID NO: 289163 - DNA, 25 bp, Artificial
  Probe
cagacctaagggttgcctgtgatgt

SEQ ID NO: 289164 - DNA, 25 bp, Artificial
  Probe
actgagcaaagtcactcagggacac

SEQ ID NO: 289165 - DNA, 25 bp, Artificial
  Probe
gacagccttggtattcattccttta

SEQ ID NO: 289166 - DNA, 25 bp, Artificial
  Probe
ctttgttcaggtatcaatttgttcc

SEQ ID NO: 289167 - DNA, 25 bp, Artificial
  Probe
tcaatttgttcctgggtggtctgat

SEQ ID NO: 289168 - DNA, 25 bp, Artificial
  Probe
ctgtgatgtttctcttcagagtcgt

SEQ ID NO: 289169 - DNA, 25 bp, Artificial
  Probe
tatggaaagatctgctccctgtatg

SEQ ID NO: 289170 - DNA, 25 bp, Artificial
  Probe
agggacacagacagccttggtattc

SEQ ID NO: 289171 - DNA, 25 bp, Artificial
  Probe
gcacaggcagcctgggcttttgttg

SEQ ID NO: 289172 - DNA, 25 bp, Artificial
  Probe
ctggtcttcttgagaaggggactaa

SEQ ID NO: 289173 - DNA, 25 bp, Artificial
  Probe
agacctaagggttgcctgtgatgtt

SEQ ID NO: 289174 - DNA, 25 bp, Artificial
  Probe
agatctgctccctgtatgtgccttt

SEQ ID NO: 289175 - DNA, 25 bp, Artificial
  Probe
aaagcttctggtcttcttgagaagg

SEQ ID NO: 289176 - DNA, 25 bp, Artificial
  Probe
atggcagacctaagggttgcctgtg

SEQ ID NO: 289177 - DNA, 25 bp, Artificial
  Probe
tgttacttgctgtgccctgaatgct

SEQ ID NO: 289178 - DNA, 25 bp, Artificial
  Probe
tcctgtcaaagaggaacagcaaatg

SEQ ID NO: 289179 - DNA, 25 bp, Artificial
  Probe
tcaacaaaagcttctggtcttcttg

SEQ ID NO: 289180 - DNA, 25 bp, Artificial
  Probe
caggtatcaatttgttcctgggtgg

SEQ ID NO: 289181 - DNA, 25 bp, Artificial
  Probe
cctgtatgtgcctttctttcagctt

SEQ ID NO: 289182 - DNA, 25 bp, Artificial
  Probe
cccaccgtcagcacagtgtttacaa

SEQ ID NO: 289183 - DNA, 25 bp, Artificial
  Probe
gtgtgcacaggcagcctgggctttt

SEQ ID NO: 289184 - DNA, 25 bp, Artificial
  Probe
tccattcatggcagacctaagggtt

SEQ ID NO: 289185 - DNA, 25 bp, Artificial
  Probe
ctaagggttgcctgtgatgtttctc

SEQ ID NO: 289186 - DNA, 25 bp, Artificial
  Probe
cctgggtggtctgataggtctatta

SEQ ID NO: 289187 - DNA, 25 bp, Artificial
  Probe
gcttttgttgttacttgctgtgccc

SEQ ID NO: 289188 - DNA, 25 bp, Artificial
  Probe
gctccctgtatgtgcctttctttca

SEQ ID NO: 289189 - DNA, 25 bp, Artificial
  Probe
gttgcctgtgatgtttctcttcaga

SEQ ID NO: 289190 - DNA, 25 bp, Artificial
  Probe
gtgcctttctttcagctttctctga

SEQ ID NO: 289191 - DNA, 25 bp, Artificial
  Probe
tggtgcgtctttgttcaggtatcaa

SEQ ID NO: 289192 - DNA, 25 bp, Artificial
  Probe
actcagggacacagacagccttggt

SEQ ID NO: 289193 - DNA, 25 bp, Artificial
  Probe
tcagagtcgtgtgcacaggcagcct

SEQ ID NO: 289194 - DNA, 25 bp, Artificial
  Probe
acacagacagccttggtattcattc

SEQ ID NO: 289195 - DNA, 25 bp, Artificial
  Probe
tcaaactgcgggactgctctgtaca

SEQ ID NO: 289196 - DNA, 25 bp, Artificial
  Probe
ttgttcctgggtggtctgataggtc

SEQ ID NO: 289197 - DNA, 25 bp, Artificial
  Probe
ctgaatgctggtttaactggaaact

SEQ ID NO: 289198 - DNA, 25 bp, Artificial
  Probe
cactcagggacacagacagccttgg

SEQ ID NO: 289199 - DNA, 25 bp, Artificial
  Probe
caacaaaagcttctggtcttcttga

SEQ ID NO: 289200 - DNA, 25 bp, Artificial
  Probe
gctctggctggctacttcaatattg

SEQ ID NO: 289201 - DNA, 25 bp, Artificial
  Probe
cacaagaatgtcaaagccctggccc

SEQ ID NO: 289202 - DNA, 25 bp, Artificial
  Probe
atgcaaatgaacttcaacgttttag

SEQ ID NO: 289203 - DNA, 25 bp, Artificial
  Probe
tttgaccggaagaggctgctgagca

SEQ ID NO: 289204 - DNA, 25 bp, Artificial
  Probe
atgtcaaagccctggccccctttgt

SEQ ID NO: 289205 - DNA, 25 bp, Artificial
  Probe
accatgggttcttcattcaactcag

SEQ ID NO: 289206 - DNA, 25 bp, Artificial
  Probe
gtacataatccacaagcaggcacct

SEQ ID NO: 289207 - DNA, 25 bp, Artificial
  Probe
tgatttactcagagccattaagcag

SEQ ID NO: 289208 - DNA, 25 bp, Artificial
  Probe
tgtgaccttcaagaaaatggaaaca

SEQ ID NO: 289209 - DNA, 25 bp, Artificial
  Probe
atgtgaccttcaagaaaatggaaac

SEQ ID NO: 289210 - DNA, 25 bp, Artificial
  Probe
cagaagacctgatctgtgtatatat

SEQ ID NO: 289211 - DNA, 25 bp, Artificial
  Probe
gttcttatataaccatgggttcttc

SEQ ID NO: 289212 - DNA, 25 bp, Artificial
  Probe
gggttcttcattcaactcagaagac

SEQ ID NO: 289213 - DNA, 25 bp, Artificial
  Probe
gtacgtgctatgcttaaaacattta

SEQ ID NO: 289214 - DNA, 25 bp, Artificial
  Probe
ctcccctggaagatattgctggtga

SEQ ID NO: 289215 - DNA, 25 bp, Artificial
  Probe
taatttctgtacatcccaaaggatg

SEQ ID NO: 289216 - DNA, 25 bp, Artificial
  Probe
ttggttcttatataaccatgggttc

SEQ ID NO: 289217 - DNA, 25 bp, Artificial
  Probe
tagaagccgccctggagaggaaccc

SEQ ID NO: 289218 - DNA, 25 bp, Artificial
  Probe
gaagccgccctggagaggaacccca

SEQ ID NO: 289219 - DNA, 25 bp, Artificial
  Probe
gggcggatatttctctcctggatgt

SEQ ID NO: 289220 - DNA, 25 bp, Artificial
  Probe
ccactagtgagagtttctgttatgt

SEQ ID NO: 289221 - DNA, 25 bp, Artificial
  Probe
ctttgtaccttggttggtagagtct

SEQ ID NO: 289222 - DNA, 25 bp, Artificial
  Probe
atctcggagctctggctggctactt

SEQ ID NO: 289223 - DNA, 25 bp, Artificial
  Probe
ctggtgactgcagtccaggcatgag

SEQ ID NO: 289224 - DNA, 25 bp, Artificial
  Probe
ctgatggatgactctattggcaaca

SEQ ID NO: 289225 - DNA, 25 bp, Artificial
  Probe
ctattggcaacagtagggcggatat

SEQ ID NO: 289226 - DNA, 25 bp, Artificial
  Probe
catcccaaaggatgagaaatgtgac

SEQ ID NO: 289227 - DNA, 25 bp, Artificial
  Probe
ctctagtgacacaagaatgtcaaag

SEQ ID NO: 289228 - DNA, 25 bp, Artificial
  Probe
aggaggtctctagtgacacaagaat

SEQ ID NO: 289229 - DNA, 25 bp, Artificial
  Probe
tggccccctttgtgaagctcctctg

SEQ ID NO: 289230 - DNA, 25 bp, Artificial
  Probe
ctgctgagcaggaaggagctagaac

SEQ ID NO: 289231 - DNA, 25 bp, Artificial
  Probe
gtttctgttatgttcctatggaaac

SEQ ID NO: 289232 - DNA, 25 bp, Artificial
  Probe
caaggttctcatttctcaggtggtg

SEQ ID NO: 289233 - DNA, 25 bp, Artificial
  Probe
acgaagccctgaatcccccaagaga

SEQ ID NO: 289234 - DNA, 25 bp, Artificial
  Probe
gtgtctcacaaatgactgatttact

SEQ ID NO: 289235 - DNA, 25 bp, Artificial
  Probe
aaccctggaatatggctgatggatg

SEQ ID NO: 289236 - DNA, 25 bp, Artificial
  Probe
acacagcagctctggatagtgaatt

SEQ ID NO: 289237 - DNA, 25 bp, Artificial
  Probe
cattcaactcagaagacctgatctg

SEQ ID NO: 289238 - DNA, 25 bp, Artificial
  Probe
ttatatggtaactctttgtaccttg

SEQ ID NO: 289239 - DNA, 25 bp, Artificial
  Probe
cagtccaggcatgagggagctgata

SEQ ID NO: 289240 - DNA, 25 bp, Artificial
  Probe
actgaaacacgaagccctgaatccc

SEQ ID NO: 289241 - DNA, 25 bp, Artificial
  Probe
atattacagcaattcactggactag

SEQ ID NO: 289242 - DNA, 25 bp, Artificial
  Probe
cgcccaaaagcagcagacctactga

SEQ ID NO: 289243 - DNA, 25 bp, Artificial
  Probe
caaatgactgatttactcagagcca

SEQ ID NO: 289244 - DNA, 25 bp, Artificial
  Probe
ggatagaacaactctaatattacag

SEQ ID NO: 289245 - DNA, 25 bp, Artificial
  Probe
aaggagctagaacttcctgagaaca

SEQ ID NO: 289246 - DNA, 25 bp, Artificial
  Probe
gatgaactaggtcaatccagggaca

SEQ ID NO: 289247 - DNA, 25 bp, Artificial
  Probe
cacacccactaccagtgtgcatggg

SEQ ID NO: 289248 - DNA, 25 bp, Artificial
  Probe
cacctaagtgaggaccctacagggt

SEQ ID NO: 289249 - DNA, 25 bp, Artificial
  Probe
agccatgaagccacccaagtagtgg

SEQ ID NO: 289250 - DNA, 25 bp, Artificial
  Probe
tccagccaatgcaggcagcagcagt

SEQ ID NO: 289251 - DNA, 25 bp, Artificial
  Probe
gtatgcattccttctgcactgtccc

SEQ ID NO: 289252 - DNA, 25 bp, Artificial
  Probe
attaaagaatcatgttccctgtgta

SEQ ID NO: 289253 - DNA, 25 bp, Artificial
  Probe
ggctgggtttcgagtttcacactgg

SEQ ID NO: 289254 - DNA, 25 bp, Artificial
  Probe
aaaggtctggtgctctgtcttcccc

SEQ ID NO: 289255 - DNA, 25 bp, Artificial
  Probe
ccctgtgtacatttaagcaaagaaa

SEQ ID NO: 289256 - DNA, 25 bp, Artificial
  Probe
gtcatctacagatggcaggtggaag

SEQ ID NO: 289257 - DNA, 25 bp, Artificial
  Probe
cccaagtagtggagccaggacataa

SEQ ID NO: 289258 - DNA, 25 bp, Artificial
  Probe
ccactcatgacaagccaactgggga

SEQ ID NO: 289259 - DNA, 25 bp, Artificial
  Probe
gaccctacagggtaccttatgctct

SEQ ID NO: 289260 - DNA, 25 bp, Artificial
  Probe
ttcccactcatgacaagccaactgg

SEQ ID NO: 289261 - DNA, 25 bp, Artificial
  Probe
cacctcaaccttttaagggatatgg

SEQ ID NO: 289262 - DNA, 25 bp, Artificial
  Probe
aaatggttctgagctccagcctgtt

SEQ ID NO: 289263 - DNA, 25 bp, Artificial
  Probe
gcagtaacagacttcttagaacctt

SEQ ID NO: 289264 - DNA, 25 bp, Artificial
  Probe
tgtatctaccactacatagggtgac

SEQ ID NO: 289265 - DNA, 25 bp, Artificial
  Probe
gaggaatccttgaagacctgcatca

SEQ ID NO: 289266 - DNA, 25 bp, Artificial
  Probe
ctgacttaacattgggccaacaacg

SEQ ID NO: 289267 - DNA, 25 bp, Artificial
  Probe
catggctagtagagccctgcttgga

SEQ ID NO: 289268 - DNA, 25 bp, Artificial
  Probe
atatggaaaggtctggtgctctgtc

SEQ ID NO: 289269 - DNA, 25 bp, Artificial
  Probe
aatgcaggcagcagcagtaacagac

SEQ ID NO: 289270 - DNA, 25 bp, Artificial
  Probe
gggtagtatgcattccttctgcact

SEQ ID NO: 289271 - DNA, 25 bp, Artificial
  Probe
gaggctaaggctctagccctattac

SEQ ID NO: 289272 - DNA, 25 bp, Artificial
  Probe
tccagggacactagagaggctaagg

SEQ ID NO: 289273 - DNA, 25 bp, Artificial
  Probe
cacactgggtagtatgcattccttc

SEQ ID NO: 289274 - DNA, 25 bp, Artificial
  Probe
acactgtatctaccactacataggg

SEQ ID NO: 289275 - DNA, 25 bp, Artificial
  Probe
agcagcagtaacagacttcttagaa

SEQ ID NO: 289276 - DNA, 25 bp, Artificial
  Probe
taacattgggccaacaacgatcctc

SEQ ID NO: 289277 - DNA, 25 bp, Artificial
  Probe
tcacctcaaccttttaagggatatg

SEQ ID NO: 289278 - DNA, 25 bp, Artificial
  Probe
gctcccagaccctgacttaacattg

SEQ ID NO: 289279 - DNA, 25 bp, Artificial
  Probe
acccactaccagtgtgcatggggag

SEQ ID NO: 289280 - DNA, 25 bp, Artificial
  Probe
agtgaccttcccactcatgacaagc

SEQ ID NO: 289281 - DNA, 25 bp, Artificial
  Probe
agaggctaaggctctagccctatta

SEQ ID NO: 289282 - DNA, 25 bp, Artificial
  Probe
aaagtagccctggaggtgaccacaa

SEQ ID NO: 289283 - DNA, 25 bp, Artificial
  Probe
aggcactctaagtgaccttcccact

SEQ ID NO: 289284 - DNA, 25 bp, Artificial
  Probe
cacccaagtagtggagccaggacat

SEQ ID NO: 289285 - DNA, 25 bp, Artificial
  Probe
ggtaccttatgctctgctcccagac

SEQ ID NO: 289286 - DNA, 25 bp, Artificial
  Probe
ctccattttctccagccaatgcagg

SEQ ID NO: 289287 - DNA, 25 bp, Artificial
  Probe
taaagaatcatgttccctgtgtaca

SEQ ID NO: 289288 - DNA, 25 bp, Artificial
  Probe
attgggccaacaacgatcctcatcc

SEQ ID NO: 289289 - DNA, 25 bp, Artificial
  Probe
atcatgttccctgtgtacatttaag

SEQ ID NO: 289290 - DNA, 25 bp, Artificial
  Probe
atcccccaaagtcatctacagatgg

SEQ ID NO: 289291 - DNA, 25 bp, Artificial
  Probe
gaaagtagccctggaggtgaccaca

SEQ ID NO: 289292 - DNA, 25 bp, Artificial
  Probe
cacattgtgacatgcccaaatcaac

SEQ ID NO: 289293 - DNA, 25 bp, Artificial
  Probe
gcccagggaggactggggaggtgaa

SEQ ID NO: 289294 - DNA, 25 bp, Artificial
  Probe
tacgcacattgtgacatgcccaaat

SEQ ID NO: 289295 - DNA, 25 bp, Artificial
  Probe
ggtggtacgcacattgtgacatgcc

SEQ ID NO: 289296 - DNA, 25 bp, Artificial
  Probe
gggtggtacgcacattgtgacatgc

SEQ ID NO: 289297 - DNA, 25 bp, Artificial
  Probe
acatgcccaaatcaacaacacccct

SEQ ID NO: 289298 - DNA, 25 bp, Artificial
  Probe
gaaagcccagggaggactggggagg

SEQ ID NO: 289299 - DNA, 25 bp, Artificial
  Probe
acgcacattgtgacatgcccaaatc

SEQ ID NO: 289300 - DNA, 25 bp, Artificial
  Probe
gcacattgtgacatgcccaaatcaa

SEQ ID NO: 289301 - DNA, 25 bp, Artificial
  Probe
ccagggtggtacgcacattgtgaca

SEQ ID NO: 289302 - DNA, 25 bp, Artificial
  Probe
tattccagggtggtacgcacattgt

SEQ ID NO: 289303 - DNA, 25 bp, Artificial
  Probe
actgggaacctcctatcttgatacc

SEQ ID NO: 289304 - DNA, 25 bp, Artificial
  Probe
tccagggtggtacgcacattgtgac

SEQ ID NO: 289305 - DNA, 25 bp, Artificial
  Probe
tgacatgcccaaatcaacaacaccc

SEQ ID NO: 289306 - DNA, 25 bp, Artificial
  Probe
ttccagggtggtacgcacattgtga

SEQ ID NO: 289307 - DNA, 25 bp, Artificial
  Probe
gacatgcccaaatcaacaacacccc

SEQ ID NO: 289308 - DNA, 25 bp, Artificial
  Probe
cattgtgacatgcccaaatcaacaa

SEQ ID NO: 289309 - DNA, 25 bp, Artificial
  Probe
tggtacgcacattgtgacatgccca

SEQ ID NO: 289310 - DNA, 25 bp, Artificial
  Probe
gcccaaatcaacaacacccctttga

SEQ ID NO: 289311 - DNA, 25 bp, Artificial
  Probe
aactgggaacctcctatcttgatac

SEQ ID NO: 289312 - DNA, 25 bp, Artificial
  Probe
aggtgaaagcctggcttgtcactgg

SEQ ID NO: 289313 - DNA, 25 bp, Artificial
  Probe
ttgtgacatgcccaaatcaacaaca

SEQ ID NO: 289314 - DNA, 25 bp, Artificial
  Probe
gaactgggaacctcctatcttgata

SEQ ID NO: 289315 - DNA, 25 bp, Artificial
  Probe
tgaaagcctggcttgtcactgggtt

SEQ ID NO: 289316 - DNA, 25 bp, Artificial
  Probe
ctccgtgctggggcagagagacaaa

SEQ ID NO: 289317 - DNA, 25 bp, Artificial
  Probe
gtacgcacattgtgacatgcccaaa

SEQ ID NO: 289318 - DNA, 25 bp, Artificial
  Probe
ccaaatcaacaacacccctttgagg

SEQ ID NO: 289319 - DNA, 25 bp, Artificial
  Probe
atgcccaaatcaacaacaccccttt

SEQ ID NO: 289320 - DNA, 25 bp, Artificial
  Probe
ctgggaacctcctatcttgataccc

SEQ ID NO: 289321 - DNA, 25 bp, Artificial
  Probe
tccgtgctggggcagagagacaaaa

SEQ ID NO: 289322 - DNA, 25 bp, Artificial
  Probe
aagcccagggaggactggggaggtg

SEQ ID NO: 289323 - DNA, 25 bp, Artificial
  Probe
ggaggtgaaagcctggcttgtcact

SEQ ID NO: 289324 - DNA, 25 bp, Artificial
  Probe
ggtgaaagcctggcttgtcactggg

SEQ ID NO: 289325 - DNA, 25 bp, Artificial
  Probe
gtggtacgcacattgtgacatgccc

SEQ ID NO: 289326 - DNA, 25 bp, Artificial
  Probe
tgaactgggaacctcctatcttgat

SEQ ID NO: 289327 - DNA, 25 bp, Artificial
  Probe
agggtggtacgcacattgtgacatg

SEQ ID NO: 289328 - DNA, 25 bp, Artificial
  Probe
cgcacattgtgacatgcccaaatca

SEQ ID NO: 289329 - DNA, 25 bp, Artificial
  Probe
ccagggaggactggggaggtgaaag

SEQ ID NO: 289330 - DNA, 25 bp, Artificial
  Probe
cagggaggactggggaggtgaaagc

SEQ ID NO: 289331 - DNA, 25 bp, Artificial
  Probe
ggtacgcacattgtgacatgcccaa

SEQ ID NO: 289332 - DNA, 25 bp, Artificial
  Probe
ccgtgctggggcagagagacaaaag

SEQ ID NO: 289333 - DNA, 25 bp, Artificial
  Probe
tgcccaaatcaacaacacccctttg

SEQ ID NO: 289334 - DNA, 25 bp, Artificial
  Probe
attccagggtggtacgcacattgtg

SEQ ID NO: 289335 - DNA, 25 bp, Artificial
  Probe
tcaacaacacccctttgaggcagct

SEQ ID NO: 289336 - DNA, 25 bp, Artificial
  Probe
cgtgctggggcagagagacaaaagg

SEQ ID NO: 289337 - DNA, 25 bp, Artificial
  Probe
gaggtgaaagcctggcttgtcactg

SEQ ID NO: 289338 - DNA, 25 bp, Artificial
  Probe
tgtctgatctcaagattcgaaaagg

SEQ ID NO: 289339 - DNA, 25 bp, Artificial
  Probe
ccagcgacgatgaggacattgaccc

SEQ ID NO: 289340 - DNA, 25 bp, Artificial
  Probe
ttgacccctgtgagccgagctcagg

SEQ ID NO: 289341 - DNA, 25 bp, Artificial
  Probe
gtctagcagtaccactggcatggtg

SEQ ID NO: 289342 - DNA, 25 bp, Artificial
  Probe
tcccagcgacgatgaggacattgac

SEQ ID NO: 289343 - DNA, 25 bp, Artificial
  Probe
gccgagctcaggtgggttagccaac

SEQ ID NO: 289344 - DNA, 25 bp, Artificial
  Probe
gtgtcccagcgacgatgaggacatt

SEQ ID NO: 289345 - DNA, 25 bp, Artificial
  Probe
tattatgtctgatctcaagattcga

SEQ ID NO: 289346 - DNA, 25 bp, Artificial
  Probe
attatgtctgatctcaagattcgaa

SEQ ID NO: 289347 - DNA, 25 bp, Artificial
  Probe
tgggcggccgcgaaccatacccagg

SEQ ID NO: 289348 - DNA, 25 bp, Artificial
  Probe
atctcaagattcgaaaaggacactt

SEQ ID NO: 289349 - DNA, 25 bp, Artificial
  Probe
tctagcagtaccactggcatggtgg

SEQ ID NO: 289350 - DNA, 25 bp, Artificial
  Probe
tctgatctcaagattcgaaaaggac

SEQ ID NO: 289351 - DNA, 25 bp, Artificial
  Probe
tagcagtaccactggcatggtggtg

SEQ ID NO: 289352 - DNA, 25 bp, Artificial
  Probe
gatctcaagattcgaaaaggacact

SEQ ID NO: 289353 - DNA, 25 bp, Artificial
  Probe
acattgacccctgtgagccgagctc

SEQ ID NO: 289354 - DNA, 25 bp, Artificial
  Probe
cattgacccctgtgagccgagctca

SEQ ID NO: 289355 - DNA, 25 bp, Artificial
  Probe
gtctgatctcaagattcgaaaagga

SEQ ID NO: 289356 - DNA, 25 bp, Artificial
  Probe
ctgatctcaagattcgaaaaggaca

SEQ ID NO: 289357 - DNA, 25 bp, Artificial
  Probe
attgacccctgtgagccgagctcag

SEQ ID NO: 289358 - DNA, 25 bp, Artificial
  Probe
agtattatgtctgatctcaagattc

SEQ ID NO: 289359 - DNA, 25 bp, Artificial
  Probe
tgtcccagcgacgatgaggacattg

SEQ ID NO: 289360 - DNA, 25 bp, Artificial
  Probe
gacattgacccctgtgagccgagct

SEQ ID NO: 289361 - DNA, 25 bp, Artificial
  Probe
aaaccgggatgaaggctcatatcac

SEQ ID NO: 289362 - DNA, 25 bp, Artificial
  Probe
cccagcgacgatgaggacattgacc

SEQ ID NO: 289363 - DNA, 25 bp, Artificial
  Probe
agccgagctcaggtgggttagccaa

SEQ ID NO: 289364 - DNA, 25 bp, Artificial
  Probe
tgatctcaagattcgaaaaggacac

SEQ ID NO: 289365 - DNA, 25 bp, Artificial
  Probe
cgaaccatacccaggctcggcagag

SEQ ID NO: 289366 - DNA, 25 bp, Artificial
  Probe
atgtctgatctcaagattcgaaaag

SEQ ID NO: 289367 - DNA, 25 bp, Artificial
  Probe
cagcgacgatgaggacattgacccc

SEQ ID NO: 289368 - DNA, 25 bp, Artificial
  Probe
gtcccagcgacgatgaggacattga

SEQ ID NO: 289369 - DNA, 25 bp, Artificial
  Probe
agtctagcagtaccactggcatggt

SEQ ID NO: 289370 - DNA, 25 bp, Artificial
  Probe
gatgaggacattgacccctgtgagc

SEQ ID NO: 289371 - DNA, 25 bp, Artificial
  Probe
ctagcagtaccactggcatggtggt

SEQ ID NO: 289372 - DNA, 25 bp, Artificial
  Probe
gtattatgtctgatctcaagattcg

SEQ ID NO: 289373 - DNA, 25 bp, Artificial
  Probe
atgaggacattgacccctgtgagcc

SEQ ID NO: 289374 - DNA, 25 bp, Artificial
  Probe
ccatacccaggctcggcagaggtga

SEQ ID NO: 289375 - DNA, 25 bp, Artificial
  Probe
ctggccaaggcctgttgtgtgtgtc

SEQ ID NO: 289376 - DNA, 25 bp, Artificial
  Probe
tctgcccaaggattgggcttggacc

SEQ ID NO: 289377 - DNA, 25 bp, Artificial
  Probe
ccgaggtaccagagctgcgtctgtg

SEQ ID NO: 289378 - DNA, 25 bp, Artificial
  Probe
tgtggcaccagctcgctgcaggcgc

SEQ ID NO: 289379 - DNA, 25 bp, Artificial
  Probe
tggtgccgcaagtcccctcgtgagg

SEQ ID NO: 289380 - DNA, 25 bp, Artificial
  Probe
ctgggtctgcccaaggattgggctt

SEQ ID NO: 289381 - DNA, 25 bp, Artificial
  Probe
aggagaaactcctgcctgggtctgc

SEQ ID NO: 289382 - DNA, 25 bp, Artificial
  Probe
gcgtctgtggcaccagctcgctgca

SEQ ID NO: 289383 - DNA, 25 bp, Artificial
  Probe
agtggggctcattcccctggtgccg

SEQ ID NO: 289384 - DNA, 25 bp, Artificial
  Probe
tcgctgccgggcaacgtgcattgct

SEQ ID NO: 289385 - DNA, 25 bp, Artificial
  Probe
accagagctgcgtctgtggcaccag

SEQ ID NO: 289386 - DNA, 25 bp, Artificial
  Probe
caaggattgggcttggacctggcca

SEQ ID NO: 289387 - DNA, 25 bp, Artificial
  Probe
ctttgggtttccagagtcgctggga

SEQ ID NO: 289388 - DNA, 25 bp, Artificial
  Probe
cagtggggctcattcccctggtgcc

SEQ ID NO: 289389 - DNA, 25 bp, Artificial
  Probe
cagagctgcgtctgtggcaccagct

SEQ ID NO: 289390 - DNA, 25 bp, Artificial
  Probe
caaggcctgttgtgtgtgtcgctgc

SEQ ID NO: 289391 - DNA, 25 bp, Artificial
  Probe
ttgggcttggacctggccaaggcct

SEQ ID NO: 289392 - DNA, 25 bp, Artificial
  Probe
tctgtggcaccagctcgctgcaggc

SEQ ID NO: 289393 - DNA, 25 bp, Artificial
  Probe
aggtaccagagctgcgtctgtggca

SEQ ID NO: 289394 - DNA, 25 bp, Artificial
  Probe
attgggcttggacctggccaaggcc

SEQ ID NO: 289395 - DNA, 25 bp, Artificial
  Probe
tgcttcccttcctttgggtttccag

SEQ ID NO: 289396 - DNA, 25 bp, Artificial
  Probe
ctggtgccgcaagtcccctcgtgag

SEQ ID NO: 289397 - DNA, 25 bp, Artificial
  Probe
gccaaggcctgttgtgtgtgtcgct

SEQ ID NO: 289398 - DNA, 25 bp, Artificial
  Probe
caagtcccctcgtgaggagaaactc

SEQ ID NO: 289399 - DNA, 25 bp, Artificial
  Probe
cctgcctgggtctgcccaaggattg

SEQ ID NO: 289400 - DNA, 25 bp, Artificial
  Probe
tcctgcctgggtctgcccaaggatt

SEQ ID NO: 289401 - DNA, 25 bp, Artificial
  Probe
tggacctggccaaggcctgttgtgt

SEQ ID NO: 289402 - DNA, 25 bp, Artificial
  Probe
tgaggagaaactcctgcctgggtct

SEQ ID NO: 289403 - DNA, 25 bp, Artificial
  Probe
tcccctcgtgaggagaaactcctgc

SEQ ID NO: 289404 - DNA, 25 bp, Artificial
  Probe
aaggattgggcttggacctggccaa

SEQ ID NO: 289405 - DNA, 25 bp, Artificial
  Probe
ccctcgtgaggagaaactcctgcct

SEQ ID NO: 289406 - DNA, 25 bp, Artificial
  Probe
cttcctttgggtttccagagtcgct

SEQ ID NO: 289407 - DNA, 25 bp, Artificial
  Probe
agtcccctcgtgaggagaaactcct

SEQ ID NO: 289408 - DNA, 25 bp, Artificial
  Probe
ctgcccaaggattgggcttggacct

SEQ ID NO: 289409 - DNA, 25 bp, Artificial
  Probe
gcaagtcccctcgtgaggagaaact

SEQ ID NO: 289410 - DNA, 25 bp, Artificial
  Probe
ttggacctggccaaggcctgttgtg

SEQ ID NO: 289411 - DNA, 25 bp, Artificial
  Probe
tcctttgggtttccagagtcgctgg

SEQ ID NO: 289412 - DNA, 25 bp, Artificial
  Probe
aacgtgcattgctgggaagccgctg

SEQ ID NO: 289413 - DNA, 25 bp, Artificial
  Probe
aaggcctgttgtgtgtgtcgctgcc

SEQ ID NO: 289414 - DNA, 25 bp, Artificial
  Probe
gcaacgtgcattgctgggaagccgc

SEQ ID NO: 289415 - DNA, 25 bp, Artificial
  Probe
ctcctgcctgggtctgcccaaggat

SEQ ID NO: 289416 - DNA, 25 bp, Artificial
  Probe
ggctcattcccctggtgccgcaagt

SEQ ID NO: 289417 - DNA, 25 bp, Artificial
  Probe
ccgcaagtcccctcgtgaggagaaa

SEQ ID NO: 289418 - DNA, 25 bp, Artificial
  Probe
gaaactcctgcctgggtctgcccaa

SEQ ID NO: 289419 - DNA, 25 bp, Artificial
  Probe
cgcaagtcccctcgtgaggagaaac

SEQ ID NO: 289420 - DNA, 25 bp, Artificial
  Probe
gcaccagctcgctgcaggcgcagag

SEQ ID NO: 289421 - DNA, 25 bp, Artificial
  Probe
ctaaattccatggataaatcctgtg

SEQ ID NO: 289422 - DNA, 25 bp, Artificial
  Probe
tgaagaattcacagctgaaggcctt

SEQ ID NO: 289423 - DNA, 25 bp, Artificial
  Probe
catgtggatgaggacccttaaaaag

SEQ ID NO: 289424 - DNA, 25 bp, Artificial
  Probe
ccatctcagaagattagtgacctga

SEQ ID NO: 289425 - DNA, 25 bp, Artificial
  Probe
gttactgtcaactaaattccatgga

SEQ ID NO: 289426 - DNA, 25 bp, Artificial
  Probe
gtgaaatattcatgcctgtccaaca

SEQ ID NO: 289427 - DNA, 25 bp, Artificial
  Probe
tgactccacaagtttgaagagcaaa

SEQ ID NO: 289428 - DNA, 25 bp, Artificial
  Probe
cttgactccacaagtttgaagagca

SEQ ID NO: 289429 - DNA, 25 bp, Artificial
  Probe
cggggaccctgaggattgcttgact

SEQ ID NO: 289430 - DNA, 25 bp, Artificial
  Probe
taataaacatactatggcgtccctg

SEQ ID NO: 289431 - DNA, 25 bp, Artificial
  Probe
agctcttcagagaatgggcttgaga

SEQ ID NO: 289432 - DNA, 25 bp, Artificial
  Probe
agttactgtcaactaaattccatgg

SEQ ID NO: 289433 - DNA, 25 bp, Artificial
  Probe
ctctgcaacagtgtgtgctagatac

SEQ ID NO: 289434 - DNA, 25 bp, Artificial
  Probe
ctctctgcaacagtgtgtgctagat

SEQ ID NO: 289435 - DNA, 25 bp, Artificial
  Probe
gtggttatgtgtagtcctggctacc

SEQ ID NO: 289436 - DNA, 25 bp, Artificial
  Probe
ggttatgtgtagtcctggctaccgg

SEQ ID NO: 289437 - DNA, 25 bp, Artificial
  Probe
ctatggcgtccctgtagtcatttag

SEQ ID NO: 289438 - DNA, 25 bp, Artificial
  Probe
attcacagctgaaggccttgacttc

SEQ ID NO: 289439 - DNA, 25 bp, Artificial
  Probe
gtagtcctggctaccggggaccctg

SEQ ID NO: 289440 - DNA, 25 bp, Artificial
  Probe
aaattccatggataaatcctgtgta

SEQ ID NO: 289441 - DNA, 25 bp, Artificial
  Probe
ctgtaataaacatactatggcgtcc

SEQ ID NO: 289442 - DNA, 25 bp, Artificial
  Probe
aaatccatgtggatgaggaccctta

SEQ ID NO: 289443 - DNA, 25 bp, Artificial
  Probe
ctcttcagagaatgggcttgagagc

SEQ ID NO: 289444 - DNA, 25 bp, Artificial
  Probe
ctccacaagtttgaagagcaaatgt

SEQ ID NO: 289445 - DNA, 25 bp, Artificial
  Probe
gtaataaacatactatggcgtccct

SEQ ID NO: 289446 - DNA, 25 bp, Artificial
  Probe
agctttccatctcagaagattagtg

SEQ ID NO: 289447 - DNA, 25 bp, Artificial
  Probe
catactatggcgtccctgtagtcat

SEQ ID NO: 289448 - DNA, 25 bp, Artificial
  Probe
tgtagtcctggctaccggggaccct

SEQ ID NO: 289449 - DNA, 25 bp, Artificial
  Probe
gaaatccggtggttatgtgtagtcc

SEQ ID NO: 289450 - DNA, 25 bp, Artificial
  Probe
ccttgacttcaggtatttggaaaat

SEQ ID NO: 289451 - DNA, 25 bp, Artificial
  Probe
caacagtgtgtgctagatacaattg

SEQ ID NO: 289452 - DNA, 25 bp, Artificial
  Probe
tgtagtcatttagttactgtcaact

SEQ ID NO: 289453 - DNA, 25 bp, Artificial
  Probe
agaattcacagctgaaggccttgac

SEQ ID NO: 289454 - DNA, 25 bp, Artificial
  Probe
gaagaattcacagctgaaggccttg

SEQ ID NO: 289455 - DNA, 25 bp, Artificial
  Probe
gtaatcataggcatctaagtgaaca

SEQ ID NO: 289456 - DNA, 25 bp, Artificial
  Probe
tgcttttctctctgcaacagtgtgt

SEQ ID NO: 289457 - DNA, 25 bp, Artificial
  Probe
atccggtggttatgtgtagtcctgg

SEQ ID NO: 289458 - DNA, 25 bp, Artificial
  Probe
ttctctctgcaacagtgtgtgctag

SEQ ID NO: 289459 - DNA, 25 bp, Artificial
  Probe
cagctgaaggccttgacttcaggta

SEQ ID NO: 289460 - DNA, 25 bp, Artificial
  Probe
ctttccatctcagaagattagtgac

SEQ ID NO: 289461 - DNA, 25 bp, Artificial
  Probe
aaatgttatggagctttccatctca

SEQ ID NO: 289462 - DNA, 25 bp, Artificial
  Probe
ccctgtagtcatttagttactgtca

SEQ ID NO: 289463 - DNA, 25 bp, Artificial
  Probe
tccatggataaatcctgtgtaacag

SEQ ID NO: 289464 - DNA, 25 bp, Artificial
  Probe
taccggggaccctgaggattgcttg

SEQ ID NO: 289465 - DNA, 25 bp, Artificial
  Probe
tataaaatccatgtggatgaggacc

SEQ ID NO: 289466 - DNA, 25 bp, Artificial
  Probe
aaatggtgcttttctctctgcaaca

SEQ ID NO: 289467 - DNA, 25 bp, Artificial
  Probe
cccccgagtggcagctaggtctggc

SEQ ID NO: 289468 - DNA, 25 bp, Artificial
  Probe
tggacttacgccacacctctgtgta

SEQ ID NO: 289469 - DNA, 25 bp, Artificial
  Probe
catcatgggatacctggtggactta

SEQ ID NO: 289470 - DNA, 25 bp, Artificial
  Probe
attgtttaccttcattaagtgaggc

SEQ ID NO: 289471 - DNA, 25 bp, Artificial
  Probe
cacctctgtgtatgggagtgtctat

SEQ ID NO: 289472 - DNA, 25 bp, Artificial
  Probe
tatcgtacaggtcattggctttcct

SEQ ID NO: 289473 - DNA, 25 bp, Artificial
  Probe
tcgcccaattgagaggaaataaaca

SEQ ID NO: 289474 - DNA, 25 bp, Artificial
  Probe
tggcagtaggtatcagcttgctctg

SEQ ID NO: 289475 - DNA, 25 bp, Artificial
  Probe
tccagtttagcttctatacatacgg

SEQ ID NO: 289476 - DNA, 25 bp, Artificial
  Probe
gcttttgacgcttctcaaagaccct

SEQ ID NO: 289477 - DNA, 25 bp, Artificial
  Probe
agcagcaggttccatctgcttggcc

SEQ ID NO: 289478 - DNA, 25 bp, Artificial
  Probe
aaactttagagcacaatggatctcg

SEQ ID NO: 289479 - DNA, 25 bp, Artificial
  Probe
gtcctgtgaaatgctttccccttat

SEQ ID NO: 289480 - DNA, 25 bp, Artificial
  Probe
acccatggcccactttttgtgggag

SEQ ID NO: 289481 - DNA, 25 bp, Artificial
  Probe
gggtgttatcgtacaggtcattggc

SEQ ID NO: 289482 - DNA, 25 bp, Artificial
  Probe
cacccatggcccactttttgtggga

SEQ ID NO: 289483 - DNA, 25 bp, Artificial
  Probe
agcctgcctttcttctctgattgtt

SEQ ID NO: 289484 - DNA, 25 bp, Artificial
  Probe
tccactaggagagaacagcgatgat

SEQ ID NO: 289485 - DNA, 25 bp, Artificial
  Probe
tatgtcctaaaatttgacttgtgtc

SEQ ID NO: 289486 - DNA, 25 bp, Artificial
  Probe
tgctattggcccatctactgggggt

SEQ ID NO: 289487 - DNA, 25 bp, Artificial
  Probe
agagaacagcgatgatcctagcagc

SEQ ID NO: 289488 - DNA, 25 bp, Artificial
  Probe
gaacaatgtgcgtgcgaaatcaggg

SEQ ID NO: 289489 - DNA, 25 bp, Artificial
  Probe
gaggacagtgctatttcctgccagg

SEQ ID NO: 289490 - DNA, 25 bp, Artificial
  Probe
tcattggctttccttggctcatggt

SEQ ID NO: 289491 - DNA, 25 bp, Artificial
  Probe
ggccaaagcgaagctgattaaagct

SEQ ID NO: 289492 - DNA, 25 bp, Artificial
  Probe
ctttgccataggaatggtggattcc

SEQ ID NO: 289493 - DNA, 25 bp, Artificial
  Probe
caaagacccttacatcctggtagca

SEQ ID NO: 289494 - DNA, 25 bp, Artificial
  Probe
tgtgacaagttctgcaaggggtgac

SEQ ID NO: 289495 - DNA, 25 bp, Artificial
  Probe
agtcgccatactagagcccacgctg

SEQ ID NO: 289496 - DNA, 25 bp, Artificial
  Probe
tatttttggtcttattggccccaat

SEQ ID NO: 289497 - DNA, 25 bp, Artificial
  Probe
gcttctatacatacgggtttttgct

SEQ ID NO: 289498 - DNA, 25 bp, Artificial
  Probe
tcttcatcgcccaattgagaggaaa

SEQ ID NO: 289499 - DNA, 25 bp, Artificial
  Probe
atctgcttggccaacatgggagtcg

SEQ ID NO: 289500 - DNA, 25 bp, Artificial
  Probe
gacaagcctgcctttcttctctgat

SEQ ID NO: 289501 - DNA, 25 bp, Artificial
  Probe
aagcgtgcaattctaagccaggaat

SEQ ID NO: 289502 - DNA, 25 bp, Artificial
  Probe
agggcgatatctgagcctcacatct

SEQ ID NO: 289503 - DNA, 25 bp, Artificial
  Probe
ccattcctcatcttggccttcttgg

SEQ ID NO: 289504 - DNA, 25 bp, Artificial
  Probe
gaggccttcctactttcttcatcgc

SEQ ID NO: 289505 - DNA, 25 bp, Artificial
  Probe
gaaataaacaactttcttaggcttg

SEQ ID NO: 289506 - DNA, 25 bp, Artificial
  Probe
ctatttcctgccaggccaaagcgaa

SEQ ID NO: 289507 - DNA, 25 bp, Artificial
  Probe
aacagcgatgatcctagcagcgggg

SEQ ID NO: 289508 - DNA, 25 bp, Artificial
  Probe
tgcgtgcgaaatcagggggacaaat

SEQ ID NO: 289509 - DNA, 25 bp, Artificial
  Probe
tctgtgtacctctggctcacaatat

SEQ ID NO: 289510 - DNA, 25 bp, Artificial
  Probe
ttgtgtgggctttgctattggccca

SEQ ID NO: 289511 - DNA, 25 bp, Artificial
  Probe
ctctttggtgtgttggctaacaaga

SEQ ID NO: 289512 - DNA, 25 bp, Artificial
  Probe
ggaccagtctactacagattcaata

SEQ ID NO: 289513 - DNA, 25 bp, Artificial
  Probe
cagttgtcagcctccccttctaact

SEQ ID NO: 289514 - DNA, 25 bp, Artificial
  Probe
aggcagcaagtggagccctggaact

SEQ ID NO: 289515 - DNA, 25 bp, Artificial
  Probe
ttgggacctcttcagttgtcagcct

SEQ ID NO: 289516 - DNA, 25 bp, Artificial
  Probe
gcagcaagtggagccctggaactct

SEQ ID NO: 289517 - DNA, 25 bp, Artificial
  Probe
ttcccaagaggcagcaagtggagcc

SEQ ID NO: 289518 - DNA, 25 bp, Artificial
  Probe
agccctggaactctgagtagtagaa

SEQ ID NO: 289519 - DNA, 25 bp, Artificial
  Probe
ggctagggcttgttccctataacat

SEQ ID NO: 289520 - DNA, 25 bp, Artificial
  Probe
tcccaagaggcagcaagtggagccc

SEQ ID NO: 289521 - DNA, 25 bp, Artificial
  Probe
ctagggcttgttccctataacattc

SEQ ID NO: 289522 - DNA, 25 bp, Artificial
  Probe
ggacctcttcagttgtcagcctccc

SEQ ID NO: 289523 - DNA, 25 bp, Artificial
  Probe
tttcttgggacctcttcagttgtca

SEQ ID NO: 289524 - DNA, 25 bp, Artificial
  Probe
ttcttgggacctcttcagttgtcag

SEQ ID NO: 289525 - DNA, 25 bp, Artificial
  Probe
attttcttgggacctcttcagttgt

SEQ ID NO: 289526 - DNA, 25 bp, Artificial
  Probe
cattttcttgggacctcttcagttg

SEQ ID NO: 289527 - DNA, 25 bp, Artificial
  Probe
ctggaactctgagtagtagaaacca

SEQ ID NO: 289528 - DNA, 25 bp, Artificial
  Probe
tccccaattcccaagaggcagcaag

SEQ ID NO: 289529 - DNA, 25 bp, Artificial
  Probe
agtagtagaaaccaatcctttatat

SEQ ID NO: 289530 - DNA, 25 bp, Artificial
  Probe
ccccaattcccaagaggcagcaagt

SEQ ID NO: 289531 - DNA, 25 bp, Artificial
  Probe
ccaagaggcagcaagtggagccctg

SEQ ID NO: 289532 - DNA, 25 bp, Artificial
  Probe
ggcagcaagtggagccctggaactc

SEQ ID NO: 289533 - DNA, 25 bp, Artificial
  Probe
gggctagggcttgttccctataaca

SEQ ID NO: 289534 - DNA, 25 bp, Artificial
  Probe
tcttgggacctcttcagttgtcagc

SEQ ID NO: 289535 - DNA, 25 bp, Artificial
  Probe
ggagccctggaactctgagtagtag

SEQ ID NO: 289536 - DNA, 25 bp, Artificial
  Probe
cctggaactctgagtagtagaaacc

SEQ ID NO: 289537 - DNA, 25 bp, Artificial
  Probe
tggagccctggaactctgagtagta

SEQ ID NO: 289538 - DNA, 25 bp, Artificial
  Probe
gtggagccctggaactctgagtagt

SEQ ID NO: 289539 - DNA, 25 bp, Artificial
  Probe
ttttcttgggacctcttcagttgtc

SEQ ID NO: 289540 - DNA, 25 bp, Artificial
  Probe
gaaagggctagggcttgttccctat

SEQ ID NO: 289541 - DNA, 25 bp, Artificial
  Probe
gagccctggaactctgagtagtaga

SEQ ID NO: 289542 - DNA, 25 bp, Artificial
  Probe
gctagggcttgttccctataacatt

SEQ ID NO: 289543 - DNA, 25 bp, Artificial
  Probe
cccaagaggcagcaagtggagccct

SEQ ID NO: 289544 - DNA, 25 bp, Artificial
  Probe
gccctggaactctgagtagtagaaa

SEQ ID NO: 289545 - DNA, 25 bp, Artificial
  Probe
agtggagccctggaactctgagtag

SEQ ID NO: 289546 - DNA, 25 bp, Artificial
  Probe
caagtggagccctggaactctgagt

SEQ ID NO: 289547 - DNA, 25 bp, Artificial
  Probe
ccctataacattcacctaagatagg

SEQ ID NO: 289548 - DNA, 25 bp, Artificial
  Probe
gggacctcttcagttgtcagcctcc

SEQ ID NO: 289549 - DNA, 25 bp, Artificial
  Probe
attcccaagaggcagcaagtggagc

SEQ ID NO: 289550 - DNA, 25 bp, Artificial
  Probe
aagtggagccctggaactctgagta

SEQ ID NO: 289551 - DNA, 25 bp, Artificial
  Probe
gggcttgttccctataacattcacc

SEQ ID NO: 289552 - DNA, 25 bp, Artificial
  Probe
ccctggaactctgagtagtagaaac

SEQ ID NO: 289553 - DNA, 25 bp, Artificial
  Probe
cccaattcccaagaggcagcaagtg

SEQ ID NO: 289554 - DNA, 25 bp, Artificial
  Probe
tcattttcttgggacctcttcagtt

SEQ ID NO: 289555 - DNA, 25 bp, Artificial
  Probe
tgggacctcttcagttgtcagcctc

SEQ ID NO: 289556 - DNA, 25 bp, Artificial
  Probe
gcaagtggagccctggaactctgag

SEQ ID NO: 289557 - DNA, 25 bp, Artificial
  Probe
gctccccaattcccaagaggcagca

SEQ ID NO: 289558 - DNA, 25 bp, Artificial
  Probe
cttgggacctcttcagttgtcagcc

SEQ ID NO: 289559 - DNA, 25 bp, Artificial
  Probe
tgggctttgcagtgagtccctgtgc

SEQ ID NO: 289560 - DNA, 25 bp, Artificial
  Probe
tgaaatttctgggcccttttccacg

SEQ ID NO: 289561 - DNA, 25 bp, Artificial
  Probe
cggtctctgcgccagcccaacccca

SEQ ID NO: 289562 - DNA, 25 bp, Artificial
  Probe
ccccatttctgcaaggtcggctgcg

SEQ ID NO: 289563 - DNA, 25 bp, Artificial
  Probe
tctgaatgagcccatcttgtggatt

SEQ ID NO: 289564 - DNA, 25 bp, Artificial
  Probe
atttctgcaaggtcggctgcggccg

SEQ ID NO: 289565 - DNA, 25 bp, Artificial
  Probe
acaggctctgaatgagcccatcttg

SEQ ID NO: 289566 - DNA, 25 bp, Artificial
  Probe
cacaggctctgaatgagcccatctt

SEQ ID NO: 289567 - DNA, 25 bp, Artificial
  Probe
tcagcggtctctgcgccagcccaac

SEQ ID NO: 289568 - DNA, 25 bp, Artificial
  Probe
tgcagtgagtccctgtgcagagatt

SEQ ID NO: 289569 - DNA, 25 bp, Artificial
  Probe
cgtttcagcggtctctgcgccagcc

SEQ ID NO: 289570 - DNA, 25 bp, Artificial
  Probe
caggctctgaatgagcccatcttgt

SEQ ID NO: 289571 - DNA, 25 bp, Artificial
  Probe
accccatttctgcaaggtcggctgc

SEQ ID NO: 289572 - DNA, 25 bp, Artificial
  Probe
tggtctttgacagagctcagaggag

SEQ ID NO: 289573 - DNA, 25 bp, Artificial
  Probe
ggtctttgacagagctcagaggagg

SEQ ID NO: 289574 - DNA, 25 bp, Artificial
  Probe
gggctttgcagtgagtccctgtgca

SEQ ID NO: 289575 - DNA, 25 bp, Artificial
  Probe
aaccccatttctgcaaggtcggctg

SEQ ID NO: 289576 - DNA, 25 bp, Artificial
  Probe
ccagcacaggctctgaatgagccca

SEQ ID NO: 289577 - DNA, 25 bp, Artificial
  Probe
ggctctgaatgagcccatcttgtgg

SEQ ID NO: 289578 - DNA, 25 bp, Artificial
  Probe
ggctttgcagtgagtccctgtgcag

SEQ ID NO: 289579 - DNA, 25 bp, Artificial
  Probe
agcggtctctgcgccagcccaaccc

SEQ ID NO: 289580 - DNA, 25 bp, Artificial
  Probe
tgttccagcacaggctctgaatgag

SEQ ID NO: 289581 - DNA, 25 bp, Artificial
  Probe
agcacaggctctgaatgagcccatc

SEQ ID NO: 289582 - DNA, 25 bp, Artificial
  Probe
catttctgcaaggtcggctgcggcc

SEQ ID NO: 289583 - DNA, 25 bp, Artificial
  Probe
ccatttctgcaaggtcggctgcggc

SEQ ID NO: 289584 - DNA, 25 bp, Artificial
  Probe
ttgcagtgagtccctgtgcagagat

SEQ ID NO: 289585 - DNA, 25 bp, Artificial
  Probe
gccccgtttcagcggtctctgcgcc

SEQ ID NO: 289586 - DNA, 25 bp, Artificial
  Probe
gcagtgagtccctgtgcagagattg

SEQ ID NO: 289587 - DNA, 25 bp, Artificial
  Probe
tctgaaatttctgggcccttttcca

SEQ ID NO: 289588 - DNA, 25 bp, Artificial
  Probe
gctctgaatgagcccatcttgtgga

SEQ ID NO: 289589 - DNA, 25 bp, Artificial
  Probe
tccagcacaggctctgaatgagccc

SEQ ID NO: 289590 - DNA, 25 bp, Artificial
  Probe
ccaaccccatttctgcaaggtcggc

SEQ ID NO: 289591 - DNA, 25 bp, Artificial
  Probe
aggctctgaatgagcccatcttgtg

SEQ ID NO: 289592 - DNA, 25 bp, Artificial
  Probe
cccgtttcagcggtctctgcgccag

SEQ ID NO: 289593 - DNA, 25 bp, Artificial
  Probe
tttgcagtgagtccctgtgcagaga

SEQ ID NO: 289594 - DNA, 25 bp, Artificial
  Probe
ttccagcacaggctctgaatgagcc

SEQ ID NO: 289595 - DNA, 25 bp, Artificial
  Probe
gcggtctctgcgccagcccaacccc

SEQ ID NO: 289596 - DNA, 25 bp, Artificial
  Probe
ttcagcggtctctgcgccagcccaa

SEQ ID NO: 289597 - DNA, 25 bp, Artificial
  Probe
gctttgcagtgagtccctgtgcaga

SEQ ID NO: 289598 - DNA, 25 bp, Artificial
  Probe
ccccgtttcagcggtctctgcgcca

SEQ ID NO: 289599 - DNA, 25 bp, Artificial
  Probe
gcacaggctctgaatgagcccatct

SEQ ID NO: 289600 - DNA, 25 bp, Artificial
  Probe
cagcacaggctctgaatgagcccat

SEQ ID NO: 289601 - DNA, 25 bp, Artificial
  Probe
cccatttctgcaaggtcggctgcgg

SEQ ID NO: 289602 - DNA, 25 bp, Artificial
  Probe
caaccccatttctgcaaggtcggct

SEQ ID NO: 289603 - DNA, 25 bp, Artificial
  Probe
gtttcagcggtctctgcgccagccc

SEQ ID NO: 289604 - DNA, 25 bp, Artificial
  Probe
ctttgcagtgagtccctgtgcagag

SEQ ID NO: 289605 - DNA, 25 bp, Artificial
  Probe
ggtctatcttagactccctttgact

SEQ ID NO: 289606 - DNA, 25 bp, Artificial
  Probe
gaaagcatgacgtcactgtttctgt

SEQ ID NO: 289607 - DNA, 25 bp, Artificial
  Probe
agagccagggattcaactgaggtgc

SEQ ID NO: 289608 - DNA, 25 bp, Artificial
  Probe
atgggacgtgccagggcccatcact

SEQ ID NO: 289609 - DNA, 25 bp, Artificial
  Probe
accatggttgctctgggctcacctc

SEQ ID NO: 289610 - DNA, 25 bp, Artificial
  Probe
ggtgcaccagatagggagcaacaag

SEQ ID NO: 289611 - DNA, 25 bp, Artificial
  Probe
ggcctcagggcctggcctcttggtc

SEQ ID NO: 289612 - DNA, 25 bp, Artificial
  Probe
aaagtagccatacaaacgtagttag

SEQ ID NO: 289613 - DNA, 25 bp, Artificial
  Probe
catacaaacgtagttagcattagaa

SEQ ID NO: 289614 - DNA, 25 bp, Artificial
  Probe
gacaatgttggctcactcctgggtg

SEQ ID NO: 289615 - DNA, 25 bp, Artificial
  Probe
agggcccatcactctctgcagagca

SEQ ID NO: 289616 - DNA, 25 bp, Artificial
  Probe
tgatatggctgcagatcaggcagct

SEQ ID NO: 289617 - DNA, 25 bp, Artificial
  Probe
gttgtggctaggactgctgtgctat

SEQ ID NO: 289618 - DNA, 25 bp, Artificial
  Probe
ggcatcttgtctagggcttaggagc

SEQ ID NO: 289619 - DNA, 25 bp, Artificial
  Probe
gccctgtatcttattgttttaatgc

SEQ ID NO: 289620 - DNA, 25 bp, Artificial
  Probe
aggccacagtgaggaaactgactta

SEQ ID NO: 289621 - DNA, 25 bp, Artificial
  Probe
ctgttcatggcttgtggcaaagggt

SEQ ID NO: 289622 - DNA, 25 bp, Artificial
  Probe
agcaacaaggagcatctgttcatag

SEQ ID NO: 289623 - DNA, 25 bp, Artificial
  Probe
aactgaggtgcagagcagaggttct

SEQ ID NO: 289624 - DNA, 25 bp, Artificial
  Probe
ttctgataggccacagtgaggaaac

SEQ ID NO: 289625 - DNA, 25 bp, Artificial
  Probe
tgctgaggctgctcttgagggacct

SEQ ID NO: 289626 - DNA, 25 bp, Artificial
  Probe
catgccatagaatcaaggttagaaa

SEQ ID NO: 289627 - DNA, 25 bp, Artificial
  Probe
gggatggcatcttgtctagggctta

SEQ ID NO: 289628 - DNA, 25 bp, Artificial
  Probe
aagggtgtgacactttcctagacaa

SEQ ID NO: 289629 - DNA, 25 bp, Artificial
  Probe
agacaatggctaatgggacgtgcca

SEQ ID NO: 289630 - DNA, 25 bp, Artificial
  Probe
cccagctcagccaagtcagtgaact

SEQ ID NO: 289631 - DNA, 25 bp, Artificial
  Probe
cgtcactgtttctgtgtttgagggg

SEQ ID NO: 289632 - DNA, 25 bp, Artificial
  Probe
ccaccacacaggtggctgtgaggtc

SEQ ID NO: 289633 - DNA, 25 bp, Artificial
  Probe
cttaggagcagatggcattgcaatt

SEQ ID NO: 289634 - DNA, 25 bp, Artificial
  Probe
gcagaggttctgtcagtgcccctgc

SEQ ID NO: 289635 - DNA, 25 bp, Artificial
  Probe
atcaggcagctgcaggctcgaccct

SEQ ID NO: 289636 - DNA, 25 bp, Artificial
  Probe
tcataggaaggcttctggccagccc

SEQ ID NO: 289637 - DNA, 25 bp, Artificial
  Probe
agagggctggcatgctgcttgctct

SEQ ID NO: 289638 - DNA, 25 bp, Artificial
  Probe
cagatcaggcagctgcaggctcgac

SEQ ID NO: 289639 - DNA, 25 bp, Artificial
  Probe
ttttaatgctgtgtgctgaggctgc

SEQ ID NO: 289640 - DNA, 25 bp, Artificial
  Probe
tgagaatgctgaaggccctgtatct

SEQ ID NO: 289641 - DNA, 25 bp, Artificial
  Probe
aaatgacccgtgatcccagggggat

SEQ ID NO: 289642 - DNA, 25 bp, Artificial
  Probe
gaggccctctctcagtgtcctgctg

SEQ ID NO: 289643 - DNA, 25 bp, Artificial
  Probe
tgagcacagggcaggactgtcgttc

SEQ ID NO: 289644 - DNA, 25 bp, Artificial
  Probe
gaaatgacccgtgatcccaggggga

SEQ ID NO: 289645 - DNA, 25 bp, Artificial
  Probe
gctaatgggacgtgccagggcccat

SEQ ID NO: 289646 - DNA, 25 bp, Artificial
  Probe
ttgtggctaggactgctgtgctatg

SEQ ID NO: 289647 - DNA, 25 bp, Artificial
  Probe
gtagcatcatcaggatacagggagg

SEQ ID NO: 289648 - DNA, 25 bp, Artificial
  Probe
agactccctttgactctgaaacccg

SEQ ID NO: 289649 - DNA, 25 bp, Artificial
  Probe
cagagcagaggttctgtcagtgccc

SEQ ID NO: 289650 - DNA, 25 bp, Artificial
  Probe
tctagggcttaggagcagatggcat

SEQ ID NO: 289651 - DNA, 25 bp, Artificial
  Probe
gttttccttgtacagttcagttcct

SEQ ID NO: 289652 - DNA, 25 bp, Artificial
  Probe
atcctgtgtcttggacctttctgct

SEQ ID NO: 289653 - DNA, 25 bp, Artificial
  Probe
agaaggggcacatccttctgccttt

SEQ ID NO: 289654 - DNA, 25 bp, Artificial
  Probe
tcagtgcttaatgttttccttgtac

SEQ ID NO: 289655 - DNA, 25 bp, Artificial
  Probe
tacccttggacttgaaatatcctgt

SEQ ID NO: 289656 - DNA, 25 bp, Artificial
  Probe
tttgccatggaacttaaaagtttct

SEQ ID NO: 289657 - DNA, 25 bp, Artificial
  Probe
tctacctcactggtcaagtattaag

SEQ ID NO: 289658 - DNA, 25 bp, Artificial
  Probe
agattttgcagaaggggcacatcct

SEQ ID NO: 289659 - DNA, 25 bp, Artificial
  Probe
ctgtacccttggacttgaaatatcc

SEQ ID NO: 289660 - DNA, 25 bp, Artificial
  Probe
ccatgtatctacctcactggtcaag

SEQ ID NO: 289661 - DNA, 25 bp, Artificial
  Probe
tgtgaatgtggactctctctcactc

SEQ ID NO: 289662 - DNA, 25 bp, Artificial
  Probe
aatatcctgtgtcttggacctttct

SEQ ID NO: 289663 - DNA, 25 bp, Artificial
  Probe
aaggggcacatccttctgccttttt

SEQ ID NO: 289664 - DNA, 25 bp, Artificial
  Probe
acgactcgccactgtagtgtaggct

SEQ ID NO: 289665 - DNA, 25 bp, Artificial
  Probe
cagaaggggcacatccttctgcctt

SEQ ID NO: 289666 - DNA, 25 bp, Artificial
  Probe
tcgccactgtagtgtaggctttcta

SEQ ID NO: 289667 - DNA, 25 bp, Artificial
  Probe
tcctctttgccatggaacttaaaag

SEQ ID NO: 289668 - DNA, 25 bp, Artificial
  Probe
cttcctgtacccttggacttgaaat

SEQ ID NO: 289669 - DNA, 25 bp, Artificial
  Probe
aacacaaacgactcgccactgtagt

SEQ ID NO: 289670 - DNA, 25 bp, Artificial
  Probe
gtatctacctcactggtcaagtatt

SEQ ID NO: 289671 - DNA, 25 bp, Artificial
  Probe
ccacttattcgctcaaatggagtgt

SEQ ID NO: 289672 - DNA, 25 bp, Artificial
  Probe
gaatgtggactctctctcactccac

SEQ ID NO: 289673 - DNA, 25 bp, Artificial
  Probe
ctcactggtcaagtattaaggataa

SEQ ID NO: 289674 - DNA, 25 bp, Artificial
  Probe
tgtagtgtaggctttctactcttta

SEQ ID NO: 289675 - DNA, 25 bp, Artificial
  Probe
catgtatctacctcactggtcaagt

SEQ ID NO: 289676 - DNA, 25 bp, Artificial
  Probe
aaacgactcgccactgtagtgtagg

SEQ ID NO: 289677 - DNA, 25 bp, Artificial
  Probe
gacttgaaatatcctgtgtcttgga

SEQ ID NO: 289678 - DNA, 25 bp, Artificial
  Probe
gaaatatcctgtgtcttggaccttt

SEQ ID NO: 289679 - DNA, 25 bp, Artificial
  Probe
taggctttctactctttaagaacgg

SEQ ID NO: 289680 - DNA, 25 bp, Artificial
  Probe
ttttcttcctgtacccttggacttg

SEQ ID NO: 289681 - DNA, 25 bp, Artificial
  Probe
tcagttcctctttgccatggaactt

SEQ ID NO: 289682 - DNA, 25 bp, Artificial
  Probe
tggacttgaaatatcctgtgtcttg

SEQ ID NO: 289683 - DNA, 25 bp, Artificial
  Probe
gtgcttaatgttttccttgtacagt

SEQ ID NO: 289684 - DNA, 25 bp, Artificial
  Probe
ttaatgttttccttgtacagttcag

SEQ ID NO: 289685 - DNA, 25 bp, Artificial
  Probe
gtacagttcagttcctctttgccat

SEQ ID NO: 289686 - DNA, 25 bp, Artificial
  Probe
cttgtacagttcagttcctctttgc

SEQ ID NO: 289687 - DNA, 25 bp, Artificial
  Probe
ctgctgtgaatgtggactctctctc

SEQ ID NO: 289688 - DNA, 25 bp, Artificial
  Probe
ccactgtagtgtaggctttctactc

SEQ ID NO: 289689 - DNA, 25 bp, Artificial
  Probe
gcttaatgttttccttgtacagttc

SEQ ID NO: 289690 - DNA, 25 bp, Artificial
  Probe
ggggcacatccttctgcctttttta

SEQ ID NO: 289691 - DNA, 25 bp, Artificial
  Probe
tctttgccatggaacttaaaagttt

SEQ ID NO: 289692 - DNA, 25 bp, Artificial
  Probe
gagagagttttcttcctgtaccctt

SEQ ID NO: 289693 - DNA, 25 bp, Artificial
  Probe
gagagttttcttcctgtacccttgg

SEQ ID NO: 289694 - DNA, 25 bp, Artificial
  Probe
gtttccatgtatctacctcactggt

SEQ ID NO: 289695 - DNA, 25 bp, Artificial
  Probe
ggtgtttccatgtatctacctcact

SEQ ID NO: 289696 - DNA, 25 bp, Artificial
  Probe
tttctgctgtgaatgtggactctct

SEQ ID NO: 289697 - DNA, 25 bp, Artificial
  Probe
ttttcttcagaggaaaaactcctgt

SEQ ID NO: 289698 - DNA, 25 bp, Artificial
  Probe
ccaagcgagtttttgggagacagaa

SEQ ID NO: 289699 - DNA, 25 bp, Artificial
  Probe
agattcggaagctggccctggacgt

SEQ ID NO: 289700 - DNA, 25 bp, Artificial
  Probe
tacccaccatcgagctcggctattg

SEQ ID NO: 289701 - DNA, 25 bp, Artificial
  Probe
agatggtgagcattgcctcaacgtg

SEQ ID NO: 289702 - DNA, 25 bp, Artificial
  Probe
tggcccacatccacgagcagtgctg

SEQ ID NO: 289703 - DNA, 25 bp, Artificial
  Probe
taccagaagttaggaccctactact

SEQ ID NO: 289704 - DNA, 25 bp, Artificial
  Probe
tccaggagagccaggcactggccaa

SEQ ID NO: 289705 - DNA, 25 bp, Artificial
  Probe
gtttcccaaagcaaatattactgag

SEQ ID NO: 289706 - DNA, 25 bp, Artificial
  Probe
tcatgccgaaaatggcgacaaaccg

SEQ ID NO: 289707 - DNA, 25 bp, Artificial
  Probe
tggacgtggcccacatccacgagca

SEQ ID NO: 289708 - DNA, 25 bp, Artificial
  Probe
agacagaaattttgcccagttttct

SEQ ID NO: 289709 - DNA, 25 bp, Artificial
  Probe
aggtttaactctgaacccaagcgag

SEQ ID NO: 289710 - DNA, 25 bp, Artificial
  Probe
gaaattctgtcgagcaaaacagcag

SEQ ID NO: 289711 - DNA, 25 bp, Artificial
  Probe
agaattgcaaaaacacatccaggag

SEQ ID NO: 289712 - DNA, 25 bp, Artificial
  Probe
gtgctgcaaactacccaccatcgag

SEQ ID NO: 289713 - DNA, 25 bp, Artificial
  Probe
catcaccagctttctgagggacgaa

SEQ ID NO: 289714 - DNA, 25 bp, Artificial
  Probe
tccacgagcagtgctgccacggcaa

SEQ ID NO: 289715 - DNA, 25 bp, Artificial
  Probe
agggactggccgacatttacattgg

SEQ ID NO: 289716 - DNA, 25 bp, Artificial
  Probe
ttttggagaagtgctcccagtctga

SEQ ID NO: 289717 - DNA, 25 bp, Artificial
  Probe
ccaccatcgagctcggctattgcat

SEQ ID NO: 289718 - DNA, 25 bp, Artificial
  Probe
aagctggccctggacgtggcccaca

SEQ ID NO: 289719 - DNA, 25 bp, Artificial
  Probe
aattcatcttccacaaggatctgtg

SEQ ID NO: 289720 - DNA, 25 bp, Artificial
  Probe
ctggccaaacaaagttgtaatctct

SEQ ID NO: 289721 - DNA, 25 bp, Artificial
  Probe
cgaaatgccaggacaatatggaaga

SEQ ID NO: 289722 - DNA, 25 bp, Artificial
  Probe
cttccagacaaagagagcatcaatg

SEQ ID NO: 289723 - DNA, 25 bp, Artificial
  Probe
ctcaatgagcatgtgtgtgcagtaa

SEQ ID NO: 289724 - DNA, 25 bp, Artificial
  Probe
ggcaagctttcttcatgaatattca

SEQ ID NO: 289725 - DNA, 25 bp, Artificial
  Probe
tgcccagttttcttcagaggaaaaa

SEQ ID NO: 289726 - DNA, 25 bp, Artificial
  Probe
agcaaaacagcagagtgctgcaaac

SEQ ID NO: 289727 - DNA, 25 bp, Artificial
  Probe
gttttcttcagaggaaaaactcctg

SEQ ID NO: 289728 - DNA, 25 bp, Artificial
  Probe
acctgacagggaagatggtgagcat

SEQ ID NO: 289729 - DNA, 25 bp, Artificial
  Probe
agctcagtgaggagaaacggtccgc

SEQ ID NO: 289730 - DNA, 25 bp, Artificial
  Probe
agaggaaaaactcctgtttatggca

SEQ ID NO: 289731 - DNA, 25 bp, Artificial
  Probe
ctcattggctacacgcggaaggctc

SEQ ID NO: 289732 - DNA, 25 bp, Artificial
  Probe
aaatctgttcctcattggctacacg

SEQ ID NO: 289733 - DNA, 25 bp, Artificial
  Probe
ctgatagacctgacagggaagatgg

SEQ ID NO: 289734 - DNA, 25 bp, Artificial
  Probe
acatccacgagcagtgctgccacgg

SEQ ID NO: 289735 - DNA, 25 bp, Artificial
  Probe
gagcattgcctcaacgtgctgccag

SEQ ID NO: 289736 - DNA, 25 bp, Artificial
  Probe
tgaacccaagcgagtttttgggaga

SEQ ID NO: 289737 - DNA, 25 bp, Artificial
  Probe
caaatattactgagattcggaagct

SEQ ID NO: 289738 - DNA, 25 bp, Artificial
  Probe
tgtgaactccggtatcaaccactgc

SEQ ID NO: 289739 - DNA, 25 bp, Artificial
  Probe
ggccgacatttacattggacacttg

SEQ ID NO: 289740 - DNA, 25 bp, Artificial
  Probe
aaggaagcatgctcaatgagcatgt

SEQ ID NO: 289741 - DNA, 25 bp, Artificial
  Probe
gaagctggccctggacgtggcccac

SEQ ID NO: 289742 - DNA, 25 bp, Artificial
  Probe
caaagttgtaatctctaccagaagt

SEQ ID NO: 289743 - DNA, 25 bp, Artificial
  Probe
cagtcctcactggtcattttgggag

SEQ ID NO: 289744 - DNA, 25 bp, Artificial
  Probe
gtaaagccacgtatatctatctgta

SEQ ID NO: 289745 - DNA, 25 bp, Artificial
  Probe
atctatctgtacagtgtgttttaca

SEQ ID NO: 289746 - DNA, 25 bp, Artificial
  Probe
caactgctgtatagagactttattt

SEQ ID NO: 289747 - DNA, 25 bp, Artificial
  Probe
tggtgttaatcacaactgctgtata

SEQ ID NO: 289748 - DNA, 25 bp, Artificial
  Probe
tcctcactggtcattttgggaggca

SEQ ID NO: 289749 - DNA, 25 bp, Artificial
  Probe
gtcctcactggtcattttgggaggc

SEQ ID NO: 289750 - DNA, 25 bp, Artificial
  Probe
ttgatagtacacagtcctcactggt

SEQ ID NO: 289751 - DNA, 25 bp, Artificial
  Probe
cgtatatctatctgtacagtgtgtt

SEQ ID NO: 289752 - DNA, 25 bp, Artificial
  Probe
cacgtatatctatctgtacagtgtg

SEQ ID NO: 289753 - DNA, 25 bp, Artificial
  Probe
tagtacacagtcctcactggtcatt

SEQ ID NO: 289754 - DNA, 25 bp, Artificial
  Probe
tcgtgacgtctgtttaaaagagcta

SEQ ID NO: 289755 - DNA, 25 bp, Artificial
  Probe
tatctatctgtacagtgtgttttac

SEQ ID NO: 289756 - DNA, 25 bp, Artificial
  Probe
gatagtacacagtcctcactggtca

SEQ ID NO: 289757 - DNA, 25 bp, Artificial
  Probe
atttaagtagcatccgttccattgt

SEQ ID NO: 289758 - DNA, 25 bp, Artificial
  Probe
tcttacctcgtgacgtctgtttaaa

SEQ ID NO: 289759 - DNA, 25 bp, Artificial
  Probe
tcacaactgctgtatagagacttta

SEQ ID NO: 289760 - DNA, 25 bp, Artificial
  Probe
atcacaactgctgtatagagacttt

SEQ ID NO: 289761 - DNA, 25 bp, Artificial
  Probe
ggtgttaatcacaactgctgtatag

SEQ ID NO: 289762 - DNA, 25 bp, Artificial
  Probe
cctcgtgacgtctgtttaaaagagc

SEQ ID NO: 289763 - DNA, 25 bp, Artificial
  Probe
acaactgctgtatagagactttatt

SEQ ID NO: 289764 - DNA, 25 bp, Artificial
  Probe
tgtatttaagtagcatccgttccat

SEQ ID NO: 289765 - DNA, 25 bp, Artificial
  Probe
cactggtcattttgggaggcactcc

SEQ ID NO: 289766 - DNA, 25 bp, Artificial
  Probe
aagtagcatccgttccattgtcctt

SEQ ID NO: 289767 - DNA, 25 bp, Artificial
  Probe
tgggaggcactcctgttaggtaaga

SEQ ID NO: 289768 - DNA, 25 bp, Artificial
  Probe
tatttaagtagcatccgttccattg

SEQ ID NO: 289769 - DNA, 25 bp, Artificial
  Probe
aatggtaaagccacgtatatctatc

SEQ ID NO: 289770 - DNA, 25 bp, Artificial
  Probe
ctatctgtacagtgtgttttacatg

SEQ ID NO: 289771 - DNA, 25 bp, Artificial
  Probe
gccacgtatatctatctgtacagtg

SEQ ID NO: 289772 - DNA, 25 bp, Artificial
  Probe
aagccacgtatatctatctgtacag

SEQ ID NO: 289773 - DNA, 25 bp, Artificial
  Probe
acagtcctcactggtcattttggga

SEQ ID NO: 289774 - DNA, 25 bp, Artificial
  Probe
ggaggcactcctgttaggtaagaaa

SEQ ID NO: 289775 - DNA, 25 bp, Artificial
  Probe
acacagtcctcactggtcattttgg

SEQ ID NO: 289776 - DNA, 25 bp, Artificial
  Probe
agtacacagtcctcactggtcattt

SEQ ID NO: 289777 - DNA, 25 bp, Artificial
  Probe
ttacctcgtgacgtctgtttaaaag

SEQ ID NO: 289778 - DNA, 25 bp, Artificial
  Probe
atttgatagtacacagtcctcactg

SEQ ID NO: 289779 - DNA, 25 bp, Artificial
  Probe
gttaatcacaactgctgtatagaga

SEQ ID NO: 289780 - DNA, 25 bp, Artificial
  Probe
taatcacaactgctgtatagagact

SEQ ID NO: 289781 - DNA, 25 bp, Artificial
  Probe
tttgatagtacacagtcctcactgg

SEQ ID NO: 289782 - DNA, 25 bp, Artificial
  Probe
gaggcactcctgttaggtaagaaaa

SEQ ID NO: 289783 - DNA, 25 bp, Artificial
  Probe
agccacgtatatctatctgtacagt

SEQ ID NO: 289784 - DNA, 25 bp, Artificial
  Probe
tacctcgtgacgtctgtttaaaaga

SEQ ID NO: 289785 - DNA, 25 bp, Artificial
  Probe
gtagcatccgttccattgtccttta

SEQ ID NO: 289786 - DNA, 25 bp, Artificial
  Probe
tggtaaagccacgtatatctatctg

SEQ ID NO: 289787 - DNA, 25 bp, Artificial
  Probe
ggtcattttgggaggcactcctgtt

SEQ ID NO: 289788 - DNA, 25 bp, Artificial
  Probe
gtatttaagtagcatccgttccatt

SEQ ID NO: 289789 - DNA, 25 bp, Artificial
  Probe
cagctgaagccctatgttcttcttg

SEQ ID NO: 289790 - DNA, 25 bp, Artificial
  Probe
atctgaccgaacagccaaacagtct

SEQ ID NO: 289791 - DNA, 25 bp, Artificial
  Probe
aaggcccggaatgtgcctgtccggc

SEQ ID NO: 289792 - DNA, 25 bp, Artificial
  Probe
aacgctgtgctttggctgcacacac

SEQ ID NO: 289793 - DNA, 25 bp, Artificial
  Probe
cagctgcctcccagatctgaatgtg

SEQ ID NO: 289794 - DNA, 25 bp, Artificial
  Probe
ggaccgacgggtacccttcaagcag

SEQ ID NO: 289795 - DNA, 25 bp, Artificial
  Probe
tggagactggcttcccttatagcaa

SEQ ID NO: 289796 - DNA, 25 bp, Artificial
  Probe
ctgtgctttggctgcacacacactt

SEQ ID NO: 289797 - DNA, 25 bp, Artificial
  Probe
cattgcctccatgatgggctccact

SEQ ID NO: 289798 - DNA, 25 bp, Artificial
  Probe
gacgggtacccttcaagcagggtat

SEQ ID NO: 289799 - DNA, 25 bp, Artificial
  Probe
gctggataagtcacccatcaaatac

SEQ ID NO: 289800 - DNA, 25 bp, Artificial
  Probe
cagtgcttgtatagcccggaaccca

SEQ ID NO: 289801 - DNA, 25 bp, Artificial
  Probe
tccatgatgggctccactgacatcc

SEQ ID NO: 289802 - DNA, 25 bp, Artificial
  Probe
gtatagcccggaacccagtgatcaa

SEQ ID NO: 289803 - DNA, 25 bp, Artificial
  Probe
ttgcctccatgatgggctccactga

SEQ ID NO: 289804 - DNA, 25 bp, Artificial
  Probe
cttatagcaacagctgcctcccaga

SEQ ID NO: 289805 - DNA, 25 bp, Artificial
  Probe
tgattggtcaatacccggagaccta

SEQ ID NO: 289806 - DNA, 25 bp, Artificial
  Probe
tgtatagcccggaacccagtgatca

SEQ ID NO: 289807 - DNA, 25 bp, Artificial
  Probe
ccctgattggtgtatggtggagact

SEQ ID NO: 289808 - DNA, 25 bp, Artificial
  Probe
tgctttggctgcacacacacttggg

SEQ ID NO: 289809 - DNA, 25 bp, Artificial
  Probe
cggagtcagacagcttcatgaacgc

SEQ ID NO: 289810 - DNA, 25 bp, Artificial
  Probe
acacacttgggcagctgaagcccta

SEQ ID NO: 289811 - DNA, 25 bp, Artificial
  Probe
tgcacacacacttgggcagctgaag

SEQ ID NO: 289812 - DNA, 25 bp, Artificial
  Probe
ctcaaggcccggaatgtgcctgtcc

SEQ ID NO: 289813 - DNA, 25 bp, Artificial
  Probe
gtcaatacccggagacctacagtgc

SEQ ID NO: 289814 - DNA, 25 bp, Artificial
  Probe
gtggagactggcttcccttatagca

SEQ ID NO: 289815 - DNA, 25 bp, Artificial
  Probe
acagcttcatgaacgctgtgctttg

SEQ ID NO: 289816 - DNA, 25 bp, Artificial
  Probe
atcaacattgcctccatgatgggct

SEQ ID NO: 289817 - DNA, 25 bp, Artificial
  Probe
tgtatggtggagactggcttccctt

SEQ ID NO: 289818 - DNA, 25 bp, Artificial
  Probe
ccagtgatcaacattgcctccatga

SEQ ID NO: 289819 - DNA, 25 bp, Artificial
  Probe
gctccactgacatccctgattggtg

SEQ ID NO: 289820 - DNA, 25 bp, Artificial
  Probe
ttggtaagctccaggatctgaccga

SEQ ID NO: 289821 - DNA, 25 bp, Artificial
  Probe
tatagcaacagctgcctcccagatc

SEQ ID NO: 289822 - DNA, 25 bp, Artificial
  Probe
cactgacatccctgattggtgtatg

SEQ ID NO: 289823 - DNA, 25 bp, Artificial
  Probe
cgggtacccttcaagcagggtatgg

SEQ ID NO: 289824 - DNA, 25 bp, Artificial
  Probe
taccgtgccctcaaggcccggaatg

SEQ ID NO: 289825 - DNA, 25 bp, Artificial
  Probe
aggatctgaccgaacagccaaacag

SEQ ID NO: 289826 - DNA, 25 bp, Artificial
  Probe
atgctggataagtcacccatcaaat

SEQ ID NO: 289827 - DNA, 25 bp, Artificial
  Probe
ccctatgttcttcttgagctgggca

SEQ ID NO: 289828 - DNA, 25 bp, Artificial
  Probe
ttgggcagctgaagccctatgttct

SEQ ID NO: 289829 - DNA, 25 bp, Artificial
  Probe
gtcagacagcttcatgaacgctgtg

SEQ ID NO: 289830 - DNA, 25 bp, Artificial
  Probe
gactggcttcccttatagcaacagc

SEQ ID NO: 289831 - DNA, 25 bp, Artificial
  Probe
cctcccagatctgaatgtgtgggag

SEQ ID NO: 289832 - DNA, 25 bp, Artificial
  Probe
gcttcccttatagcaacagctgcct

SEQ ID NO: 289833 - DNA, 25 bp, Artificial
  Probe
agcccggaacccagtgatcaacatt

SEQ ID NO: 289834 - DNA, 25 bp, Artificial
  Probe
accgtgccctcaaggcccggaatgt

SEQ ID NO: 289835 - DNA, 25 bp, Artificial
  Probe
taatcaagtcccatatggtgagcgt

SEQ ID NO: 289836 - DNA, 25 bp, Artificial
  Probe
ctgctaatcaagtcccatatggtga

SEQ ID NO: 289837 - DNA, 25 bp, Artificial
  Probe
acacacagtgaagatttggaaaccc

SEQ ID NO: 289838 - DNA, 25 bp, Artificial
  Probe
tctctgtgcaagtgcccaagatcct

SEQ ID NO: 289839 - DNA, 25 bp, Artificial
  Probe
aactctgcactacttctctggcatg

SEQ ID NO: 289840 - DNA, 25 bp, Artificial
  Probe
gtggctcctgcctgtgttttgagtt

SEQ ID NO: 289841 - DNA, 25 bp, Artificial
  Probe
tgttgtggctcctgcctgtgttttg

SEQ ID NO: 289842 - DNA, 25 bp, Artificial
  Probe
atggcagagatcatctctgtgcaag

SEQ ID NO: 289843 - DNA, 25 bp, Artificial
  Probe
tgttcccttttcagatgtcttctgc

SEQ ID NO: 289844 - DNA, 25 bp, Artificial
  Probe
gtatttcttcaagtctgtgatgatc

SEQ ID NO: 289845 - DNA, 25 bp, Artificial
  Probe
tcccttttcagatgtcttctgcctg

SEQ ID NO: 289846 - DNA, 25 bp, Artificial
  Probe
caagatcctttctgggaaagtcaag

SEQ ID NO: 289847 - DNA, 25 bp, Artificial
  Probe
tccccaagttctatttcctgggctt

SEQ ID NO: 289848 - DNA, 25 bp, Artificial
  Probe
caccttatgccatggcaagtttaga

SEQ ID NO: 289849 - DNA, 25 bp, Artificial
  Probe
atcatctctgtgcaagtgcccaaga

SEQ ID NO: 289850 - DNA, 25 bp, Artificial
  Probe
gcacattttgaatccgctgcgtgtt

SEQ ID NO: 289851 - DNA, 25 bp, Artificial
  Probe
tcagatgtcttctgcctgttatata

SEQ ID NO: 289852 - DNA, 25 bp, Artificial
  Probe
cctttctgggaaagtcaagcccatc

SEQ ID NO: 289853 - DNA, 25 bp, Artificial
  Probe
gaatccgctgcgtgttgtggctcct

SEQ ID NO: 289854 - DNA, 25 bp, Artificial
  Probe
tatttccacacacagtgaagatttg

SEQ ID NO: 289855 - DNA, 25 bp, Artificial
  Probe
gctcctgcctgtgttttgagttttg

SEQ ID NO: 289856 - DNA, 25 bp, Artificial
  Probe
cttttcagatgtcttctgcctgtta

SEQ ID NO: 289857 - DNA, 25 bp, Artificial
  Probe
tcccatatggtgagcgtggactttc

SEQ ID NO: 289858 - DNA, 25 bp, Artificial
  Probe
gtcttctgcctgttatataactctg

SEQ ID NO: 289859 - DNA, 25 bp, Artificial
  Probe
agcgtggactttcctgaaatgatgg

SEQ ID NO: 289860 - DNA, 25 bp, Artificial
  Probe
tgggggaaattcctctactgatgta

SEQ ID NO: 289861 - DNA, 25 bp, Artificial
  Probe
cgctgcgtgttgtggctcctgcctg

SEQ ID NO: 289862 - DNA, 25 bp, Artificial
  Probe
atatggtgagcgtggactttcctga

SEQ ID NO: 289863 - DNA, 25 bp, Artificial
  Probe
cactgtgctgtgtgccaaccaagca

SEQ ID NO: 289864 - DNA, 25 bp, Artificial
  Probe
atcctttctgggaaagtcaagccca

SEQ ID NO: 289865 - DNA, 25 bp, Artificial
  Probe
gtcatgaacatgttccccaagttct

SEQ ID NO: 289866 - DNA, 25 bp, Artificial
  Probe
aatgtttactcaccttatgccatgg

SEQ ID NO: 289867 - DNA, 25 bp, Artificial
  Probe
cgtggactttcctgaaatgatggca

SEQ ID NO: 289868 - DNA, 25 bp, Artificial
  Probe
atgatcttcttgtggcccagtgtca

SEQ ID NO: 289869 - DNA, 25 bp, Artificial
  Probe
gtgctgtgtgccaaccaagcaaatg

SEQ ID NO: 289870 - DNA, 25 bp, Artificial
  Probe
ttatgccatggcaagtttagagagc

SEQ ID NO: 289871 - DNA, 25 bp, Artificial
  Probe
gtgcaagtgcccaagatcctttctg

SEQ ID NO: 289872 - DNA, 25 bp, Artificial
  Probe
ttcctgaaatgatggcagagatcat

SEQ ID NO: 289873 - DNA, 25 bp, Artificial
  Probe
gcgtgttgtggctcctgcctgtgtt

SEQ ID NO: 289874 - DNA, 25 bp, Artificial
  Probe
tcaccttatgccatggcaagtttag

SEQ ID NO: 289875 - DNA, 25 bp, Artificial
  Probe
ttcttgtggcccagtgtcaactgtg

SEQ ID NO: 289876 - DNA, 25 bp, Artificial
  Probe
ttactcaccttatgccatggcaagt

SEQ ID NO: 289877 - DNA, 25 bp, Artificial
  Probe
gtgccaaccaagcaaatgtttactc

SEQ ID NO: 289878 - DNA, 25 bp, Artificial
  Probe
cctcccatggcacattttgaatccg

SEQ ID NO: 289879 - DNA, 25 bp, Artificial
  Probe
ttttgaatccgctgcgtgttgtggc

SEQ ID NO: 289880 - DNA, 25 bp, Artificial
  Probe
atgttccccaagttctatttcctgg

SEQ ID NO: 289881 - DNA, 25 bp, Artificial
  Probe
gtcttcggataacatttatgtccaa

SEQ ID NO: 289882 - DNA, 25 bp, Artificial
  Probe
cgacaccagagaaaaaccgtcttca

SEQ ID NO: 289883 - DNA, 25 bp, Artificial
  Probe
gagagatacccatttctataataag

SEQ ID NO: 289884 - DNA, 25 bp, Artificial
  Probe
gtggtcagtggctggctctcatacc

SEQ ID NO: 289885 - DNA, 25 bp, Artificial
  Probe
catgtcggtggtttatgttgactct

SEQ ID NO: 289886 - DNA, 25 bp, Artificial
  Probe
gacattcatttacagacaccggaac

SEQ ID NO: 289887 - DNA, 25 bp, Artificial
  Probe
ggagccccatcacaatctcacggta

SEQ ID NO: 289888 - DNA, 25 bp, Artificial
  Probe
tttgacattcatttacagacaccgg

SEQ ID NO: 289889 - DNA, 25 bp, Artificial
  Probe
tccgcaactgtgtggtcagtggctg

SEQ ID NO: 289890 - DNA, 25 bp, Artificial
  Probe
caggtcgattaggtggcttcatagg

SEQ ID NO: 289891 - DNA, 25 bp, Artificial
  Probe
aagacaagactttcagaacgacacc

SEQ ID NO: 289892 - DNA, 25 bp, Artificial
  Probe
agacaagacaagactttcagaacga

SEQ ID NO: 289893 - DNA, 25 bp, Artificial
  Probe
ggccaggtcgattaggtggcttcat

SEQ ID NO: 289894 - DNA, 25 bp, Artificial
  Probe
gtccggactacgaaaaatatcacta

SEQ ID NO: 289895 - DNA, 25 bp, Artificial
  Probe
gtccaagataaattcacatggttaa

SEQ ID NO: 289896 - DNA, 25 bp, Artificial
  Probe
caactgtgtggtcagtggctggctc

SEQ ID NO: 289897 - DNA, 25 bp, Artificial
  Probe
gctggctctcatacccactaagata

SEQ ID NO: 289898 - DNA, 25 bp, Artificial
  Probe
atcactaagggtaactttgacattc

SEQ ID NO: 289899 - DNA, 25 bp, Artificial
  Probe
gaacgacaccagagaaaaaccgtct

SEQ ID NO: 289900 - DNA, 25 bp, Artificial
  Probe
gtcgtccggactacgaaaaatatca

SEQ ID NO: 289901 - DNA, 25 bp, Artificial
  Probe
taagatacatcatagctccatgtcg

SEQ ID NO: 289902 - DNA, 25 bp, Artificial
  Probe
catcacaatctcacggtattgcaag

SEQ ID NO: 289903 - DNA, 25 bp, Artificial
  Probe
attcatttacagacaccggaacaag

SEQ ID NO: 289904 - DNA, 25 bp, Artificial
  Probe
gacaccagagaaaaaccgtcttcac

SEQ ID NO: 289905 - DNA, 25 bp, Artificial
  Probe
gtagtcttcggataacatttatgtc

SEQ ID NO: 289906 - DNA, 25 bp, Artificial
  Probe
gatacccatttctataataagtggt

SEQ ID NO: 289907 - DNA, 25 bp, Artificial
  Probe
attgcaagggccaggtcgattaggt

SEQ ID NO: 289908 - DNA, 25 bp, Artificial
  Probe
gacaccggaacaagagagataccca

SEQ ID NO: 289909 - DNA, 25 bp, Artificial
  Probe
gccccatcacaatctcacggtattg

SEQ ID NO: 289910 - DNA, 25 bp, Artificial
  Probe
tcacaaagtacgtaccgtcgtccgg

SEQ ID NO: 289911 - DNA, 25 bp, Artificial
  Probe
atgtccaagataaattcacatggtt

SEQ ID NO: 289912 - DNA, 25 bp, Artificial
  Probe
cgattaggtggcttcataggagacc

SEQ ID NO: 289913 - DNA, 25 bp, Artificial
  Probe
gctccatgtcggtggtttatgttga

SEQ ID NO: 289914 - DNA, 25 bp, Artificial
  Probe
cagtggctggctctcatacccacta

SEQ ID NO: 289915 - DNA, 25 bp, Artificial
  Probe
acaatctcacggtattgcaagggcc

SEQ ID NO: 289916 - DNA, 25 bp, Artificial
  Probe
ggtaactttgacattcatttacaga

SEQ ID NO: 289917 - DNA, 25 bp, Artificial
  Probe
catagctccatgtcggtggtttatg

SEQ ID NO: 289918 - DNA, 25 bp, Artificial
  Probe
tatcactaagggtaactttgacatt

SEQ ID NO: 289919 - DNA, 25 bp, Artificial
  Probe
aggtggcttcataggagaccctccg

SEQ ID NO: 289920 - DNA, 25 bp, Artificial
  Probe
gactacgaaaaatatcactaagggt

SEQ ID NO: 289921 - DNA, 25 bp, Artificial
  Probe
ttatgtccaagataaattcacatgg

SEQ ID NO: 289922 - DNA, 25 bp, Artificial
  Probe
cgtcttcacaaagtacgtaccgtcg

SEQ ID NO: 289923 - DNA, 25 bp, Artificial
  Probe
tacagacaccggaacaagagagata

SEQ ID NO: 289924 - DNA, 25 bp, Artificial
  Probe
cacggtattgcaagggccaggtcga

SEQ ID NO: 289925 - DNA, 25 bp, Artificial
  Probe
tcatttacagacaccggaacaagag

SEQ ID NO: 289926 - DNA, 25 bp, Artificial
  Probe
cctccgcaactgtgtggtcagtggc

SEQ ID NO: 289927 - DNA, 25 bp, Artificial
  Probe
accaacatgcccaaagatgagctgg

SEQ ID NO: 289928 - DNA, 25 bp, Artificial
  Probe
gtgactggaagcaaccaccaaggtc

SEQ ID NO: 289929 - DNA, 25 bp, Artificial
  Probe
cgtctaccggtgtcgggatctggat

SEQ ID NO: 289930 - DNA, 25 bp, Artificial
  Probe
accggtgtcgggatctggatgccta

SEQ ID NO: 289931 - DNA, 25 bp, Artificial
  Probe
ttcttgggtgatcaagtctatccaa

SEQ ID NO: 289932 - DNA, 25 bp, Artificial
  Probe
tgatcaagtctatccaagaaagaaa

SEQ ID NO: 289933 - DNA, 25 bp, Artificial
  Probe
tccgtctaccggtgtcgggatctgg

SEQ ID NO: 289934 - DNA, 25 bp, Artificial
  Probe
ccaaagatgagctggagaggatgct

SEQ ID NO: 289935 - DNA, 25 bp, Artificial
  Probe
acgttgtgactggaagcaaccacca

SEQ ID NO: 289936 - DNA, 25 bp, Artificial
  Probe
aaggagcttccattgctcacccgtg

SEQ ID NO: 289937 - DNA, 25 bp, Artificial
  Probe
tctattgttgtgagcccttcaccaa

SEQ ID NO: 289938 - DNA, 25 bp, Artificial
  Probe
caaaggagacgttgtgactggaagc

SEQ ID NO: 289939 - DNA, 25 bp, Artificial
  Probe
gtgatggtagcgagccacaagactc

SEQ ID NO: 289940 - DNA, 25 bp, Artificial
  Probe
ggcttctgtggtgaaggagcttcca

SEQ ID NO: 289941 - DNA, 25 bp, Artificial
  Probe
tctttgaaggcctacagatctattg

SEQ ID NO: 289942 - DNA, 25 bp, Artificial
  Probe
gctcacccgtgacacaggtgctcat

SEQ ID NO: 289943 - DNA, 25 bp, Artificial
  Probe
acagaagacaacgactgccctgata

SEQ ID NO: 289944 - DNA, 25 bp, Artificial
  Probe
caccaaggtccaaggcgatccagag

SEQ ID NO: 289945 - DNA, 25 bp, Artificial
  Probe
gctattcttgggtgatcaagtctat

SEQ ID NO: 289946 - DNA, 25 bp, Artificial
  Probe
cagccaagtgcctggacagaagaca

SEQ ID NO: 289947 - DNA, 25 bp, Artificial
  Probe
ggactgggtgttggacagtatatcc

SEQ ID NO: 289948 - DNA, 25 bp, Artificial
  Probe
aaagctctttgaaggcctacagatc

SEQ ID NO: 289949 - DNA, 25 bp, Artificial
  Probe
cgatccagagaatcccaggaaaagc

SEQ ID NO: 289950 - DNA, 25 bp, Artificial
  Probe
gaatatcacctgtggccgtgatggt

SEQ ID NO: 289951 - DNA, 25 bp, Artificial
  Probe
gtgttggacagtatatccgtctacc

SEQ ID NO: 289952 - DNA, 25 bp, Artificial
  Probe
ctggtacagaatatcacctgtggcc

SEQ ID NO: 289953 - DNA, 25 bp, Artificial
  Probe
tgcctggacagaagacaacgactgc

SEQ ID NO: 289954 - DNA, 25 bp, Artificial
  Probe
tcgggatctggatgcctacctggta

SEQ ID NO: 289955 - DNA, 25 bp, Artificial
  Probe
aggagcttccattgctcacccgtga

SEQ ID NO: 289956 - DNA, 25 bp, Artificial
  Probe
tggtagcgagccacaagactccaat

SEQ ID NO: 289957 - DNA, 25 bp, Artificial
  Probe
gtatatccgtctaccggtgtcggga

SEQ ID NO: 289958 - DNA, 25 bp, Artificial
  Probe
caggaaaagctctttgaaggcctac

SEQ ID NO: 289959 - DNA, 25 bp, Artificial
  Probe
ctgagtttgtgtgtgaacggacact

SEQ ID NO: 289960 - DNA, 25 bp, Artificial
  Probe
aggtccaaggcgatccagagaatcc

SEQ ID NO: 289961 - DNA, 25 bp, Artificial
  Probe
ggagacgttgtgactggaagcaacc

SEQ ID NO: 289962 - DNA, 25 bp, Artificial
  Probe
attgctcacccgtgacacaggtgct

SEQ ID NO: 289963 - DNA, 25 bp, Artificial
  Probe
ttggacagtatatccgtctaccggt

SEQ ID NO: 289964 - DNA, 25 bp, Artificial
  Probe
tggccgtgatggtagcgagccacaa

SEQ ID NO: 289965 - DNA, 25 bp, Artificial
  Probe
caacgactgccctgatattgggcag

SEQ ID NO: 289966 - DNA, 25 bp, Artificial
  Probe
ttctgtggtgaaggagcttccattg

SEQ ID NO: 289967 - DNA, 25 bp, Artificial
  Probe
gaagacaacgactgccctgatattg

SEQ ID NO: 289968 - DNA, 25 bp, Artificial
  Probe
ggtgatcaagtctatccaagaaaga

SEQ ID NO: 289969 - DNA, 25 bp, Artificial
  Probe
gttgtgagcccttcaccaacatgcc

SEQ ID NO: 289970 - DNA, 25 bp, Artificial
  Probe
ctgccctgatattgggcagctgtgc

SEQ ID NO: 289971 - DNA, 25 bp, Artificial
  Probe
ttgtgctcgtgcagccaagtgcctg

SEQ ID NO: 289972 - DNA, 25 bp, Artificial
  Probe
ctgtgcaagggacgtctagtgatgt

SEQ ID NO: 289973 - DNA, 25 bp, Artificial
  Probe
tggccaaaagttttgcatggaacaa

SEQ ID NO: 289974 - DNA, 25 bp, Artificial
  Probe
atgcctccattacctgcactgtggt

SEQ ID NO: 289975 - DNA, 25 bp, Artificial
  Probe
tcccaggccaagaaaggaagatgta

SEQ ID NO: 289976 - DNA, 25 bp, Artificial
  Probe
ttagagtcattcaacatgaaaaggc

SEQ ID NO: 289977 - DNA, 25 bp, Artificial
  Probe
ctatgtcggaaaccagagataggaa

SEQ ID NO: 289978 - DNA, 25 bp, Artificial
  Probe
atttgtcagaaagatctcagctgga

SEQ ID NO: 289979 - DNA, 25 bp, Artificial
  Probe
acaattacagctccagatagacaag

SEQ ID NO: 289980 - DNA, 25 bp, Artificial
  Probe
ccagacattcctaatgctgccctga

SEQ ID NO: 289981 - DNA, 25 bp, Artificial
  Probe
tcttcatactacgtcagaactcagg

SEQ ID NO: 289982 - DNA, 25 bp, Artificial
  Probe
caaagcacgttgaccgggagttatg

SEQ ID NO: 289983 - DNA, 25 bp, Artificial
  Probe
gagtactgtctactaataaagatca

SEQ ID NO: 289984 - DNA, 25 bp, Artificial
  Probe
ggagtactgtctactaataaagatc

SEQ ID NO: 289985 - DNA, 25 bp, Artificial
  Probe
agctgactctggagattaaacaatt

SEQ ID NO: 289986 - DNA, 25 bp, Artificial
  Probe
gctgatggcagctggagtcccgtac

SEQ ID NO: 289987 - DNA, 25 bp, Artificial
  Probe
tcagatggcacctggcatccccgga

SEQ ID NO: 289988 - DNA, 25 bp, Artificial
  Probe
atctcagctggagcatgcttagggg

SEQ ID NO: 289989 - DNA, 25 bp, Artificial
  Probe
tgatataatgcttacagctacttgc

SEQ ID NO: 289990 - DNA, 25 bp, Artificial
  Probe
taatccattgtgaggctgatggcag

SEQ ID NO: 289991 - DNA, 25 bp, Artificial
  Probe
tttagcaacctttgtaactttggca

SEQ ID NO: 289992 - DNA, 25 bp, Artificial
  Probe
ccaaattcaaatgacgtgaaaatgg

SEQ ID NO: 289993 - DNA, 25 bp, Artificial
  Probe
taaggagatatgctgtccagtacca

SEQ ID NO: 289994 - DNA, 25 bp, Artificial
  Probe
agacccaaagagtgttagagtcatt

SEQ ID NO: 289995 - DNA, 25 bp, Artificial
  Probe
aggaagaagtacctcatgggctttc

SEQ ID NO: 289996 - DNA, 25 bp, Artificial
  Probe
cccggacaccatcatgtcatcagag

SEQ ID NO: 289997 - DNA, 25 bp, Artificial
  Probe
gatgtgagcaggaggtccctaaaga

SEQ ID NO: 289998 - DNA, 25 bp, Artificial
  Probe
cctataaatacaaagactctgtgag

SEQ ID NO: 289999 - DNA, 25 bp, Artificial
  Probe
gacttcacactccttggcaatgcct

SEQ ID NO: 290000 - DNA, 25 bp, Artificial
  Probe
actgaaaatgtcaccatccaatgtg

SEQ ID NO: 290001 - DNA, 25 bp, Artificial
  Probe
ccatgactgtgatttgtcagaaaga

SEQ ID NO: 290002 - DNA, 25 bp, Artificial
  Probe
cagaactcaggttacatatgaatgt

SEQ ID NO: 290003 - DNA, 25 bp, Artificial
  Probe
ctgcactgtggtgaacaaaacagta

SEQ ID NO: 290004 - DNA, 25 bp, Artificial
  Probe
gatattccagacattcctaatgctg

SEQ ID NO: 290005 - DNA, 25 bp, Artificial
  Probe
acgtctgcatttttagcaacctttg

SEQ ID NO: 290006 - DNA, 25 bp, Artificial
  Probe
cagtaggtgtttggagcccaagccc

SEQ ID NO: 290007 - DNA, 25 bp, Artificial
  Probe
gaatggaacctggtacccaaaggtg

SEQ ID NO: 290008 - DNA, 25 bp, Artificial
  Probe
gttatgagcgggtgttctctcaagg

SEQ ID NO: 290009 - DNA, 25 bp, Artificial
  Probe
gctcacggacgttatacaaaatctt

SEQ ID NO: 290010 - DNA, 25 bp, Artificial
  Probe
agtaggtgtttggagcccaagccct

SEQ ID NO: 290011 - DNA, 25 bp, Artificial
  Probe
gacaacgactgtacttacttctttg

SEQ ID NO: 290012 - DNA, 25 bp, Artificial
  Probe
tgattttccgcctgccattgctcac

SEQ ID NO: 290013 - DNA, 25 bp, Artificial
  Probe
tgaaaatggccctggaggtctacaa

SEQ ID NO: 290014 - DNA, 25 bp, Artificial
  Probe
tgttcggagaatggaacctggtacc

SEQ ID NO: 290015 - DNA, 25 bp, Artificial
  Probe
aagccctcctacctgtgaaagaatc

SEQ ID NO: 290016 - DNA, 25 bp, Artificial
  Probe
gatacagactggttggagaggcaac

SEQ ID NO: 290017 - DNA, 25 bp, Artificial
  Probe
gatgtatatccagtgggtactgtgc

SEQ ID NO: 290018 - DNA, 25 bp, Artificial
  Probe
gtgtcatacacatgtcaaaatgata

SEQ ID NO: 290019 - DNA, 25 bp, Artificial
  Probe
acgtcactcaggtgcggacattcta

SEQ ID NO: 290020 - DNA, 25 bp, Artificial
  Probe
ctggaccagtacaactcccagaagc

SEQ ID NO: 290021 - DNA, 25 bp, Artificial
  Probe
ctaatgaagacaacgtcactcaggt

SEQ ID NO: 290022 - DNA, 25 bp, Artificial
  Probe
gcttttcattcagaggaaagcggtc

SEQ ID NO: 290023 - DNA, 25 bp, Artificial
  Probe
actaccagcgcgatggccccatgtg

SEQ ID NO: 290024 - DNA, 25 bp, Artificial
  Probe
ccagcccggacaagatgctccaggg

SEQ ID NO: 290025 - DNA, 25 bp, Artificial
  Probe
gtcaagaatttcactgacgtccacc

SEQ ID NO: 290026 - DNA, 25 bp, Artificial
  Probe
aagcacgggtgctcagcctcctcag

SEQ ID NO: 290027 - DNA, 25 bp, Artificial
  Probe
caccagtaatcatcgctggatggag

SEQ ID NO: 290028 - DNA, 25 bp, Artificial
  Probe
gtgcatgcatgacaaccagggtggt

SEQ ID NO: 290029 - DNA, 25 bp, Artificial
  Probe
ggccgcctttttgcttacccagaca

SEQ ID NO: 290030 - DNA, 25 bp, Artificial
  Probe
tctgcagatgtgaagcgcttcaaca

SEQ ID NO: 290031 - DNA, 25 bp, Artificial
  Probe
gtgaactgtccctaccgtgctcgcg

SEQ ID NO: 290032 - DNA, 25 bp, Artificial
  Probe
ctacggggcccgagtccaggctctt

SEQ ID NO: 290033 - DNA, 25 bp, Artificial
  Probe
agtaatcatcgctggatggagtctc

SEQ ID NO: 290034 - DNA, 25 bp, Artificial
  Probe
acggggcccgagtccaggctcttct

SEQ ID NO: 290035 - DNA, 25 bp, Artificial
  Probe
gagtccaggctcttctggaccagta

SEQ ID NO: 290036 - DNA, 25 bp, Artificial
  Probe
taacctgtaaagcacgggtgctcag

SEQ ID NO: 290037 - DNA, 25 bp, Artificial
  Probe
actcaggtgcggacattctatacga

SEQ ID NO: 290038 - DNA, 25 bp, Artificial
  Probe
agcaccatagccagtgctctgcaga

SEQ ID NO: 290039 - DNA, 25 bp, Artificial
  Probe
cgcgtggccaactaccagcgcgatg

SEQ ID NO: 290040 - DNA, 25 bp, Artificial
  Probe
agaggaaacgcctgtgtgagaacat

SEQ ID NO: 290041 - DNA, 25 bp, Artificial
  Probe
cagcttcagcgcaccagagcagcag

SEQ ID NO: 290042 - DNA, 25 bp, Artificial
  Probe
tgaactgtccctaccgtgctcgcgt

SEQ ID NO: 290043 - DNA, 25 bp, Artificial
  Probe
cggacattctatacgaaggtgttga

SEQ ID NO: 290044 - DNA, 25 bp, Artificial
  Probe
gagaacattgccaaccacctgaaag

SEQ ID NO: 290045 - DNA, 25 bp, Artificial
  Probe
gggcccgagtccaggctcttctgga

SEQ ID NO: 290046 - DNA, 25 bp, Artificial
  Probe
cagggccgcctttttgcttacccag

SEQ ID NO: 290047 - DNA, 25 bp, Artificial
  Probe
accgcctgggaccaaactatctgca

SEQ ID NO: 290048 - DNA, 25 bp, Artificial
  Probe
acgcctgtgtgagaacattgccaac

SEQ ID NO: 290049 - DNA, 25 bp, Artificial
  Probe
tcggccctggagcaccatagccagt

SEQ ID NO: 290050 - DNA, 25 bp, Artificial
  Probe
gtaaagcacgggtgctcagcctcct

SEQ ID NO: 290051 - DNA, 25 bp, Artificial
  Probe
cagcgcaccagagcagcagggctcg

SEQ ID NO: 290052 - DNA, 25 bp, Artificial
  Probe
gaatttcactgacgtccaccctgac

SEQ ID NO: 290053 - DNA, 25 bp, Artificial
  Probe
gtggccaactaccagcgcgatggcc

SEQ ID NO: 290054 - DNA, 25 bp, Artificial
  Probe
atccctcatgaagcagggcacaagc

SEQ ID NO: 290055 - DNA, 25 bp, Artificial
  Probe
ctcagcttttcattcagaggaaagc

SEQ ID NO: 290056 - DNA, 25 bp, Artificial
  Probe
cgcgatggccccatgtgcatgcatg

SEQ ID NO: 290057 - DNA, 25 bp, Artificial
  Probe
acaagatgctccagggccgcctttt

SEQ ID NO: 290058 - DNA, 25 bp, Artificial
  Probe
acctgtgaactgtccctaccgtgct

SEQ ID NO: 290059 - DNA, 25 bp, Artificial
  Probe
agggcacaagcctcaccagtaatca

SEQ ID NO: 290060 - DNA, 25 bp, Artificial
  Probe
ccctcatgaagcagggcacaagcct

SEQ ID NO: 290061 - DNA, 25 bp, Artificial
  Probe
cggacaagatgctccagggccgcct

SEQ ID NO: 290062 - DNA, 25 bp, Artificial
  Probe
ttcattcagaggaaagcggtcaaga

SEQ ID NO: 290063 - DNA, 25 bp, Artificial
  Probe
atgaagcagggcacaagcctcacca

SEQ ID NO: 290064 - DNA, 25 bp, Artificial
  Probe
aacctgtaaagcacgggtgctcagc

SEQ ID NO: 290065 - DNA, 25 bp, Artificial
  Probe
ctcactgacagcaagcagcacagaa

SEQ ID NO: 290066 - DNA, 25 bp, Artificial
  Probe
agctgctgattcagtcagagttccc

SEQ ID NO: 290067 - DNA, 25 bp, Artificial
  Probe
gagctgaagctgctgattcagtcag

SEQ ID NO: 290068 - DNA, 25 bp, Artificial
  Probe
tttcaaaaatatgcagccaaagaag

SEQ ID NO: 290069 - DNA, 25 bp, Artificial
  Probe
aaatctcccgaagaaatgaagagca

SEQ ID NO: 290070 - DNA, 25 bp, Artificial
  Probe
gagcgctaagaaatctcccgaagaa

SEQ ID NO: 290071 - DNA, 25 bp, Artificial
  Probe
cagcaagcagcacagaaaaatgagc

SEQ ID NO: 290072 - DNA, 25 bp, Artificial
  Probe
aggagctccgacaccacctactgat

SEQ ID NO: 290073 - DNA, 25 bp, Artificial
  Probe
ctctggcagcactcactgacagcaa

SEQ ID NO: 290074 - DNA, 25 bp, Artificial
  Probe
cctcctgaaggcttcaagtactcta

SEQ ID NO: 290075 - DNA, 25 bp, Artificial
  Probe
tcactgacagcaagcagcacagaaa

SEQ ID NO: 290076 - DNA, 25 bp, Artificial
  Probe
gaaggagctccgacaccacctactg

SEQ ID NO: 290077 - DNA, 25 bp, Artificial
  Probe
agctgaagctgctgattcagtcaga

SEQ ID NO: 290078 - DNA, 25 bp, Artificial
  Probe
ccaaagatctagctgtgagagcaag

SEQ ID NO: 290079 - DNA, 25 bp, Artificial
  Probe
tcctgaaggcttcaagtactctaga

SEQ ID NO: 290080 - DNA, 25 bp, Artificial
  Probe
aatatgcagccaaagaaggcgatcc

SEQ ID NO: 290081 - DNA, 25 bp, Artificial
  Probe
aggagctgaagctgctgattcagtc

SEQ ID NO: 290082 - DNA, 25 bp, Artificial
  Probe
aagttatcacaatgaagccagaaga

SEQ ID NO: 290083 - DNA, 25 bp, Artificial
  Probe
agatctagctgtgagagcaagatac

SEQ ID NO: 290084 - DNA, 25 bp, Artificial
  Probe
ctgaagctgctgattcagtcagagt

SEQ ID NO: 290085 - DNA, 25 bp, Artificial
  Probe
aggcgatccaaaccagctgtccaag

SEQ ID NO: 290086 - DNA, 25 bp, Artificial
  Probe
gatctagctgtgagagcaagatact

SEQ ID NO: 290087 - DNA, 25 bp, Artificial
  Probe
gaaatctcccgaagaaatgaagagc

SEQ ID NO: 290088 - DNA, 25 bp, Artificial
  Probe
cactgacagcaagcagcacagaaaa

SEQ ID NO: 290089 - DNA, 25 bp, Artificial
  Probe
cacaatgaagccagaagaaggagct

SEQ ID NO: 290090 - DNA, 25 bp, Artificial
  Probe
ctgctgattcagtcagagttcccca

SEQ ID NO: 290091 - DNA, 25 bp, Artificial
  Probe
ctgacagcaagcagcacagaaaaat

SEQ ID NO: 290092 - DNA, 25 bp, Artificial
  Probe
agaaggcgatccaaaccagctgtcc

SEQ ID NO: 290093 - DNA, 25 bp, Artificial
  Probe
ggcagcactcactgacagcaagcag

SEQ ID NO: 290094 - DNA, 25 bp, Artificial
  Probe
ttcaaaaatatgcagccaaagaagg

SEQ ID NO: 290095 - DNA, 25 bp, Artificial
  Probe
gttatcacaatgaagccagaagaag

SEQ ID NO: 290096 - DNA, 25 bp, Artificial
  Probe
agcactcactgacagcaagcagcac

SEQ ID NO: 290097 - DNA, 25 bp, Artificial
  Probe
gaaggcttcaagtactctagacaat

SEQ ID NO: 290098 - DNA, 25 bp, Artificial
  Probe
tgacagcaagcagcacagaaaaatg

SEQ ID NO: 290099 - DNA, 25 bp, Artificial
  Probe
tctcccgaagaaatgaagagcattt

SEQ ID NO: 290100 - DNA, 25 bp, Artificial
  Probe
atcccaaagatctagctgtgagagc

SEQ ID NO: 290101 - DNA, 25 bp, Artificial
  Probe
caaaccagctgtccaaggaggagct

SEQ ID NO: 290102 - DNA, 25 bp, Artificial
  Probe
cgatccaaaccagctgtccaaggag

SEQ ID NO: 290103 - DNA, 25 bp, Artificial
  Probe
cctgaaggcttcaagtactctagac

SEQ ID NO: 290104 - DNA, 25 bp, Artificial
  Probe
ttatcacaatgaagccagaagaagg

SEQ ID NO: 290105 - DNA, 25 bp, Artificial
  Probe
ggcttcaagtactctagacaatctc

SEQ ID NO: 290106 - DNA, 25 bp, Artificial
  Probe
acaatgaagccagaagaaggagctc

SEQ ID NO: 290107 - DNA, 25 bp, Artificial
  Probe
atccaatcccaaagatctagctgtg

SEQ ID NO: 290108 - DNA, 25 bp, Artificial
  Probe
atgcagccaaagaaggcgatccaaa

SEQ ID NO: 290109 - DNA, 25 bp, Artificial
  Probe
cgctaagaaatctcccgaagaaatg

SEQ ID NO: 290110 - DNA, 25 bp, Artificial
  Probe
caaagatctagctgtgagagcaaga

SEQ ID NO: 290111 - DNA, 25 bp, Artificial
  Probe
aggggtctgctgctctcattcttct

SEQ ID NO: 290112 - DNA, 25 bp, Artificial
  Probe
catcagtgggtgtgttctcagtggt

SEQ ID NO: 290113 - DNA, 25 bp, Artificial
  Probe
gcatcatcctttgaattgccccaag

SEQ ID NO: 290114 - DNA, 25 bp, Artificial
  Probe
ttgaattgccccaagtgcaccgtgt

SEQ ID NO: 290115 - DNA, 25 bp, Artificial
  Probe
ctcctgtcacttagcaggagtcaga

SEQ ID NO: 290116 - DNA, 25 bp, Artificial
  Probe
gtggtgtgtctgtacctgaactatt

SEQ ID NO: 290117 - DNA, 25 bp, Artificial
  Probe
tttccattgtgacaaccgaatttcg

SEQ ID NO: 290118 - DNA, 25 bp, Artificial
  Probe
ggcatccatccgtgttgtgaaccca

SEQ ID NO: 290119 - DNA, 25 bp, Artificial
  Probe
tgtttacagccgactttgacatcag

SEQ ID NO: 290120 - DNA, 25 bp, Artificial
  Probe
cattcttctggctgctgtattgttg

SEQ ID NO: 290121 - DNA, 25 bp, Artificial
  Probe
tggttggtgtctaggaagccatgca

SEQ ID NO: 290122 - DNA, 25 bp, Artificial
  Probe
gagtcagaacccttctggtagtcac

SEQ ID NO: 290123 - DNA, 25 bp, Artificial
  Probe
gtctaggaagccatgcatcctctga

SEQ ID NO: 290124 - DNA, 25 bp, Artificial
  Probe
cttacctcctgtcacttagcaggag

SEQ ID NO: 290125 - DNA, 25 bp, Artificial
  Probe
gaaatcgatttctttccattgtgac

SEQ ID NO: 290126 - DNA, 25 bp, Artificial
  Probe
gcagggcatccatccgtgttgtgaa

SEQ ID NO: 290127 - DNA, 25 bp, Artificial
  Probe
gacatcagtgggtgtgttctcagtg

SEQ ID NO: 290128 - DNA, 25 bp, Artificial
  Probe
gtgtctgtacctgaactatttaatg

SEQ ID NO: 290129 - DNA, 25 bp, Artificial
  Probe
tcgaaatcgatttctttccattgtg

SEQ ID NO: 290130 - DNA, 25 bp, Artificial
  Probe
tcagtgtgaggtggtgtttacagcc

SEQ ID NO: 290131 - DNA, 25 bp, Artificial
  Probe
ttttccttctgctgggactgtgtgg

SEQ ID NO: 290132 - DNA, 25 bp, Artificial
  Probe
ctttgacatcagtgggtgtgttctc

SEQ ID NO: 290133 - DNA, 25 bp, Artificial
  Probe
ccatccgtgttgtgaacccagagct

SEQ ID NO: 290134 - DNA, 25 bp, Artificial
  Probe
catcctttgaattgccccaagtgca

SEQ ID NO: 290135 - DNA, 25 bp, Artificial
  Probe
acctggcaccttctgaaaggaaggt

SEQ ID NO: 290136 - DNA, 25 bp, Artificial
  Probe
aaggtgggcttacctcctgtcactt

SEQ ID NO: 290137 - DNA, 25 bp, Artificial
  Probe
cgatttctttccattgtgacaaccg

SEQ ID NO: 290138 - DNA, 25 bp, Artificial
  Probe
ttgtgacaaccgaatttcgcatcat

SEQ ID NO: 290139 - DNA, 25 bp, Artificial
  Probe
tgttctcagtggtgtgtctgtacct

SEQ ID NO: 290140 - DNA, 25 bp, Artificial
  Probe
atcctctgaagaaagaatggcacta

SEQ ID NO: 290141 - DNA, 25 bp, Artificial
  Probe
agtgcaccgtgtttcctctggggga

SEQ ID NO: 290142 - DNA, 25 bp, Artificial
  Probe
tcacctaggagtggttggtgtctag

SEQ ID NO: 290143 - DNA, 25 bp, Artificial
  Probe
gaatttcgcatcatcctttgaattg

SEQ ID NO: 290144 - DNA, 25 bp, Artificial
  Probe
ctctcattcttctggctgctgtatt

SEQ ID NO: 290145 - DNA, 25 bp, Artificial
  Probe
gatttctttccattgtgacaaccga

SEQ ID NO: 290146 - DNA, 25 bp, Artificial
  Probe
tgtattccacttcctgctacctggc

SEQ ID NO: 290147 - DNA, 25 bp, Artificial
  Probe
ggctgctgtattgttgggtttcttc

SEQ ID NO: 290148 - DNA, 25 bp, Artificial
  Probe
caaagctgcttttgtattcagtgtg

SEQ ID NO: 290149 - DNA, 25 bp, Artificial
  Probe
gcaggagtcagaacccttctggtag

SEQ ID NO: 290150 - DNA, 25 bp, Artificial
  Probe
tcttcttttccttctgctgggactg

SEQ ID NO: 290151 - DNA, 25 bp, Artificial
  Probe
ttgccccaagtgcaccgtgtttcct

SEQ ID NO: 290152 - DNA, 25 bp, Artificial
  Probe
ctgggggccaaagctgcttttgtat

SEQ ID NO: 290153 - DNA, 25 bp, Artificial
  Probe
gtgacaaccgaatttcgcatcatcc

SEQ ID NO: 290154 - DNA, 25 bp, Artificial
  Probe
cttgtgcagggcatccatccgtgtt

SEQ ID NO: 290155 - DNA, 25 bp, Artificial
  Probe
ctgctacctggcaccttctgaaagg

SEQ ID NO: 290156 - DNA, 25 bp, Artificial
  Probe
ccaagtgcaccgtgtttcctctggg

SEQ ID NO: 290157 - DNA, 25 bp, Artificial
  Probe
aaggccgtcaccatgccgttcggca

SEQ ID NO: 290158 - DNA, 25 bp, Artificial
  Probe
ggcaacacccacaacaagttcaagc

SEQ ID NO: 290159 - DNA, 25 bp, Artificial
  Probe
ggaacgagcacctgggctacgtgct

SEQ ID NO: 290160 - DNA, 25 bp, Artificial
  Probe
ggcctgcagaagattgaggagatct

SEQ ID NO: 290161 - DNA, 25 bp, Artificial
  Probe
tcatcatgacggtcggctgtgtggc

SEQ ID NO: 290162 - DNA, 25 bp, Artificial
  Probe
cgatgaggagtcctacactgttttc

SEQ ID NO: 290163 - DNA, 25 bp, Artificial
  Probe
caaatactaccctctgaagagcatg

SEQ ID NO: 290164 - DNA, 25 bp, Artificial
  Probe
ggaccgccatggtggcttcaaaccc

SEQ ID NO: 290165 - DNA, 25 bp, Artificial
  Probe
actacaagtcgcaggaggagtaccc

SEQ ID NO: 290166 - DNA, 25 bp, Artificial
  Probe
cctttcatcatgacggtcggctgtg

SEQ ID NO: 290167 - DNA, 25 bp, Artificial
  Probe
caagggcaaatactaccctctgaag

SEQ ID NO: 290168 - DNA, 25 bp, Artificial
  Probe
cgccatggtggcttcaaacccacag

SEQ ID NO: 290169 - DNA, 25 bp, Artificial
  Probe
caacaagttcaagctgaactacaag

SEQ ID NO: 290170 - DNA, 25 bp, Artificial
  Probe
gacctcaaccacgagaacctcaagg

SEQ ID NO: 290171 - DNA, 25 bp, Artificial
  Probe
aaacccacagacaagcataagaccg

SEQ ID NO: 290172 - DNA, 25 bp, Artificial
  Probe
cgacaacaaaagcttcctggtgtgg

SEQ ID NO: 290173 - DNA, 25 bp, Artificial
  Probe
ctatgtgctgagcagccgcgtgcgc

SEQ ID NO: 290174 - DNA, 25 bp, Artificial
  Probe
taagaccgacctcaaccacgagaac

SEQ ID NO: 290175 - DNA, 25 bp, Artificial
  Probe
aagctgtccgtggaagctctcaaca

SEQ ID NO: 290176 - DNA, 25 bp, Artificial
  Probe
cactggccgcagcatcaagggctac

SEQ ID NO: 290177 - DNA, 25 bp, Artificial
  Probe
ctgaactacaagtcgcaggaggagt

SEQ ID NO: 290178 - DNA, 25 bp, Artificial
  Probe
cagacaagcataagaccgacctcaa

SEQ ID NO: 290179 - DNA, 25 bp, Artificial
  Probe
gggtcaccctttcatcatgacggtc

SEQ ID NO: 290180 - DNA, 25 bp, Artificial
  Probe
ccaactatgtgctgagcagccgcgt

SEQ ID NO: 290181 - DNA, 25 bp, Artificial
  Probe
tggtggcttcaaacccacagacaag

SEQ ID NO: 290182 - DNA, 25 bp, Artificial
  Probe
aggtgctgactcctgacctgtacaa

SEQ ID NO: 290183 - DNA, 25 bp, Artificial
  Probe
aggagtacccagacctcagcaaaca

SEQ ID NO: 290184 - DNA, 25 bp, Artificial
  Probe
tccaggaccgccatggtggcttcaa

SEQ ID NO: 290185 - DNA, 25 bp, Artificial
  Probe
tggaacgagcacctgggctacgtgc

SEQ ID NO: 290186 - DNA, 25 bp, Artificial
  Probe
ggaggagtacccagacctcagcaaa

SEQ ID NO: 290187 - DNA, 25 bp, Artificial
  Probe
tgaggagtcctacactgttttcaag

SEQ ID NO: 290188 - DNA, 25 bp, Artificial
  Probe
ccttcatgtggaacgagcacctggg

SEQ ID NO: 290189 - DNA, 25 bp, Artificial
  Probe
ggcttcaaacccacagacaagcata

SEQ ID NO: 290190 - DNA, 25 bp, Artificial
  Probe
tcgcaggaggagtacccagacctca

SEQ ID NO: 290191 - DNA, 25 bp, Artificial
  Probe
agcttcgagacaaggagaccccatc

SEQ ID NO: 290192 - DNA, 25 bp, Artificial
  Probe
gccgcagcatcaagggctacactct

SEQ ID NO: 290193 - DNA, 25 bp, Artificial
  Probe
agggcaaatactaccctctgaagag

SEQ ID NO: 290194 - DNA, 25 bp, Artificial
  Probe
gagcacctgggctacgtgctcacct

SEQ ID NO: 290195 - DNA, 25 bp, Artificial
  Probe
tggccggcgatgaggagtcctacac

SEQ ID NO: 290196 - DNA, 25 bp, Artificial
  Probe
taccctctgaagagcatgacagagc

SEQ ID NO: 290197 - DNA, 25 bp, Artificial
  Probe
gccggcgatgaggagtcctacactg

SEQ ID NO: 290198 - DNA, 25 bp, Artificial
  Probe
tggcatctggcacaacgacaacaaa

SEQ ID NO: 290199 - DNA, 25 bp, Artificial
  Probe
tggagacgatctggaccccaactat

SEQ ID NO: 290200 - DNA, 25 bp, Artificial
  Probe
gaagctctcaacagcctgacaggcg

SEQ ID NO: 290201 - DNA, 25 bp, Artificial
  Probe
caaccacgagaacctcaagggtgga

SEQ ID NO: 290202 - DNA, 25 bp, Artificial
  Probe
ccccttcatgtggaacgagcacctg

SEQ ID NO: 290203 - DNA, 25 bp, Artificial
  Probe
ttgactgtcctcacaggatcactat

SEQ ID NO: 290204 - DNA, 25 bp, Artificial
  Probe
tcagatgctgtccttgactgtcctc

SEQ ID NO: 290205 - DNA, 25 bp, Artificial
  Probe
gctgtccttgactgtcctcacagga

SEQ ID NO: 290206 - DNA, 25 bp, Artificial
  Probe
gatgctgtccttgactgtcctcaca

SEQ ID NO: 290207 - DNA, 25 bp, Artificial
  Probe
tccttgactgtcctcacaggatcac

SEQ ID NO: 290208 - DNA, 25 bp, Artificial
  Probe
ggatggtaactacctacactgtttt

SEQ ID NO: 290209 - DNA, 25 bp, Artificial
  Probe
agataccaagatgcactttgtaaaa

SEQ ID NO: 290210 - DNA, 25 bp, Artificial
  Probe
acttacacctgcactgaaaggactc

SEQ ID NO: 290211 - DNA, 25 bp, Artificial
  Probe
tgatcagatgctgtccttgactgtc

SEQ ID NO: 290212 - DNA, 25 bp, Artificial
  Probe
tgctgtccttgactgtcctcacagg

SEQ ID NO: 290213 - DNA, 25 bp, Artificial
  Probe
aacagactgtatcatgacatgtatt

SEQ ID NO: 290214 - DNA, 25 bp, Artificial
  Probe
acagactgtatcatgacatgtattt

SEQ ID NO: 290215 - DNA, 25 bp, Artificial
  Probe
atgatcagatgctgtccttgactgt

SEQ ID NO: 290216 - DNA, 25 bp, Artificial
  Probe
cagatgctgtccttgactgtcctca

SEQ ID NO: 290217 - DNA, 25 bp, Artificial
  Probe
ccacttacacctgcactgaaaggac

SEQ ID NO: 290218 - DNA, 25 bp, Artificial
  Probe
ccttgactgtcctcacaggatcact

SEQ ID NO: 290219 - DNA, 25 bp, Artificial
  Probe
cagttgaaggatgctctcggaaaat

SEQ ID NO: 290220 - DNA, 25 bp, Artificial
  Probe
ttgtttgctgggtaacagaatcgct

SEQ ID NO: 290221 - DNA, 25 bp, Artificial
  Probe
ttacacctgcactgaaaggactctg

SEQ ID NO: 290222 - DNA, 25 bp, Artificial
  Probe
ccaagatgcactttgtaaaaatctg

SEQ ID NO: 290223 - DNA, 25 bp, Artificial
  Probe
aagataccaagatgcactttgtaaa

SEQ ID NO: 290224 - DNA, 25 bp, Artificial
  Probe
gataccaagatgcactttgtaaaaa

SEQ ID NO: 290225 - DNA, 25 bp, Artificial
  Probe
atgctctcggaaaatagagaaagtc

SEQ ID NO: 290226 - DNA, 25 bp, Artificial
  Probe
atgctgtccttgactgtcctcacag

SEQ ID NO: 290227 - DNA, 25 bp, Artificial
  Probe
ctgtccttgactgtcctcacaggat

SEQ ID NO: 290228 - DNA, 25 bp, Artificial
  Probe
atcagatgctgtccttgactgtcct

SEQ ID NO: 290229 - DNA, 25 bp, Artificial
  Probe
gatggtaactacctacactgtttta

SEQ ID NO: 290230 - DNA, 25 bp, Artificial
  Probe
tccacttacacctgcactgaaagga

SEQ ID NO: 290231 - DNA, 25 bp, Artificial
  Probe
gactgtcctcacaggatcactataa

SEQ ID NO: 290232 - DNA, 25 bp, Artificial
  Probe
acagttgaaggatgctctcggaaaa

SEQ ID NO: 290233 - DNA, 25 bp, Artificial
  Probe
cagactgtatcatgacatgtatttg

SEQ ID NO: 290234 - DNA, 25 bp, Artificial
  Probe
cttacacctgcactgaaaggactct

SEQ ID NO: 290235 - DNA, 25 bp, Artificial
  Probe
cacttacacctgcactgaaaggact

SEQ ID NO: 290236 - DNA, 25 bp, Artificial
  Probe
tgtttgctgggtaacagaatcgctt

SEQ ID NO: 290237 - DNA, 25 bp, Artificial
  Probe
gatcagatgctgtccttgactgtcc

SEQ ID NO: 290238 - DNA, 25 bp, Artificial
  Probe
agatgctgtccttgactgtcctcac

SEQ ID NO: 290239 - DNA, 25 bp, Artificial
  Probe
cttgactgtcctcacaggatcacta

SEQ ID NO: 290240 - DNA, 25 bp, Artificial
  Probe
tgactgtcctcacaggatcactata

SEQ ID NO: 290241 - DNA, 25 bp, Artificial
  Probe
gaagataccaagatgcactttgtaa

SEQ ID NO: 290242 - DNA, 25 bp, Artificial
  Probe
aatagatttgccaactctggctgtt

SEQ ID NO: 290243 - DNA, 25 bp, Artificial
  Probe
gatttgccaactctggctgtttcat

SEQ ID NO: 290244 - DNA, 25 bp, Artificial
  Probe
gccaactctggctgtttcatataaa

SEQ ID NO: 290245 - DNA, 25 bp, Artificial
  Probe
actcaatagatttgccaactctggc

SEQ ID NO: 290246 - DNA, 25 bp, Artificial
  Probe
tttttgactcaatagatttgccaac

SEQ ID NO: 290247 - DNA, 25 bp, Artificial
  Probe
ctctggctgtttcatataaaaaaaa

SEQ ID NO: 290248 - DNA, 25 bp, Artificial
  Probe
ttgccaactctggctgtttcatata

SEQ ID NO: 290249 - DNA, 25 bp, Artificial
  Probe
tcaatagatttgccaactctggctg

SEQ ID NO: 290250 - DNA, 25 bp, Artificial
  Probe
tgactcaatagatttgccaactctg

SEQ ID NO: 290251 - DNA, 25 bp, Artificial
  Probe
agtttttgactcaatagatttgcca

SEQ ID NO: 290252 - DNA, 25 bp, Artificial
  Probe
gtttttgactcaatagatttgccaa

SEQ ID NO: 290253 - DNA, 25 bp, Artificial
  Probe
ccaactctggctgtttcatataaaa

SEQ ID NO: 290254 - DNA, 25 bp, Artificial
  Probe
gactcaatagatttgccaactctgg

SEQ ID NO: 290255 - DNA, 25 bp, Artificial
  Probe
atttgccaactctggctgtttcata

SEQ ID NO: 290256 - DNA, 25 bp, Artificial
  Probe
tctggctgtttcatataaaaaaaaa

SEQ ID NO: 290257 - DNA, 25 bp, Artificial
  Probe
agatttgccaactctggctgtttca

SEQ ID NO: 290258 - DNA, 25 bp, Artificial
  Probe
tttgccaactctggctgtttcatat

SEQ ID NO: 290259 - DNA, 25 bp, Artificial
  Probe
actctggctgtttcatataaaaaaa

SEQ ID NO: 290260 - DNA, 25 bp, Artificial
  Probe
atagatttgccaactctggctgttt

SEQ ID NO: 290261 - DNA, 25 bp, Artificial
  Probe
tttgactcaatagatttgccaactc

SEQ ID NO: 290262 - DNA, 25 bp, Artificial
  Probe
caactctggctgtttcatataaaaa

SEQ ID NO: 290263 - DNA, 25 bp, Artificial
  Probe
caatagatttgccaactctggctgt

SEQ ID NO: 290264 - DNA, 25 bp, Artificial
  Probe
tagatttgccaactctggctgtttc

SEQ ID NO: 290265 - DNA, 25 bp, Artificial
  Probe
ctcaatagatttgccaactctggct

SEQ ID NO: 290266 - DNA, 25 bp, Artificial
  Probe
aactctggctgtttcatataaaaaa

SEQ ID NO: 290267 - DNA, 25 bp, Artificial
  Probe
ttgactcaatagatttgccaactct

SEQ ID NO: 290268 - DNA, 25 bp, Artificial
  Probe
tgccaactctggctgtttcatataa

SEQ ID NO: 290269 - DNA, 25 bp, Artificial
  Probe
ttttgactcaatagatttgccaact

SEQ ID NO: 290270 - DNA, 25 bp, Artificial
  Probe
taagccatcctttggaaggcctaca

SEQ ID NO: 290271 - DNA, 25 bp, Artificial
  Probe
atcagtgcccgcacagtgggttcac

SEQ ID NO: 290272 - DNA, 25 bp, Artificial
  Probe
tgccagggaggaacctaggaaacag

SEQ ID NO: 290273 - DNA, 25 bp, Artificial
  Probe
aaggaagcaggtaccatgggctgcc

SEQ ID NO: 290274 - DNA, 25 bp, Artificial
  Probe
tgggttccacacaggttgtgcccag

SEQ ID NO: 290275 - DNA, 25 bp, Artificial
  Probe
ggaagcaggtaccatgggctgcctc

SEQ ID NO: 290276 - DNA, 25 bp, Artificial
  Probe
tacccatgcacctgccagggaggaa

SEQ ID NO: 290277 - DNA, 25 bp, Artificial
  Probe
catgcacctgccagggaggaaccta

SEQ ID NO: 290278 - DNA, 25 bp, Artificial
  Probe
tctaacagtccagcaggacccttac

SEQ ID NO: 290279 - DNA, 25 bp, Artificial
  Probe
tcagtctttctccaagctctggacc

SEQ ID NO: 290280 - DNA, 25 bp, Artificial
  Probe
tcagtgcccgcacagtgggttcact

SEQ ID NO: 290281 - DNA, 25 bp, Artificial
  Probe
gcctcctgctttacatgcagattca

SEQ ID NO: 290282 - DNA, 25 bp, Artificial
  Probe
gcaggacccttacctgattaccttc

SEQ ID NO: 290283 - DNA, 25 bp, Artificial
  Probe
aagcaggtaccatgggctgcctcct

SEQ ID NO: 290284 - DNA, 25 bp, Artificial
  Probe
tcattctgttccacagtgatctctg

SEQ ID NO: 290285 - DNA, 25 bp, Artificial
  Probe
ccagagcccagctggttcctaagta

SEQ ID NO: 290286 - DNA, 25 bp, Artificial
  Probe
ttctcagtctttctccaagctctgg

SEQ ID NO: 290287 - DNA, 25 bp, Artificial
  Probe
agagcatcccagagcccagctggtt

SEQ ID NO: 290288 - DNA, 25 bp, Artificial
  Probe
gtctttctccaagctctggacccta

SEQ ID NO: 290289 - DNA, 25 bp, Artificial
  Probe
gcccggtctctgtgaatacaattaa

SEQ ID NO: 290290 - DNA, 25 bp, Artificial
  Probe
ggcgtcacttgaagtaactttttgt

SEQ ID NO: 290291 - DNA, 25 bp, Artificial
  Probe
caccagccttcctgagagaccagga

SEQ ID NO: 290292 - DNA, 25 bp, Artificial
  Probe
ccatgggctgcctcctgctttacat

SEQ ID NO: 290293 - DNA, 25 bp, Artificial
  Probe
gttcattctgttccacagtgatctc

SEQ ID NO: 290294 - DNA, 25 bp, Artificial
  Probe
tgatctctgtgtgaatggatgtctc

SEQ ID NO: 290295 - DNA, 25 bp, Artificial
  Probe
cagcaggacccttacctgattacct

SEQ ID NO: 290296 - DNA, 25 bp, Artificial
  Probe
atcccagagcccagctggttcctaa

SEQ ID NO: 290297 - DNA, 25 bp, Artificial
  Probe
taacagtccagcaggacccttacct

SEQ ID NO: 290298 - DNA, 25 bp, Artificial
  Probe
gtgcccgcacagtgggttcactgtt

SEQ ID NO: 290299 - DNA, 25 bp, Artificial
  Probe
gcactttggtatcatccagcctttt

SEQ ID NO: 290300 - DNA, 25 bp, Artificial
  Probe
ccacacaggttgtgcccagggaaag

SEQ ID NO: 290301 - DNA, 25 bp, Artificial
  Probe
cagtccagcaggacccttacctgat

SEQ ID NO: 290302 - DNA, 25 bp, Artificial
  Probe
ttctccacatacgatataaacgagg

SEQ ID NO: 290303 - DNA, 25 bp, Artificial
  Probe
agtgcccgcacagtgggttcactgt

SEQ ID NO: 290304 - DNA, 25 bp, Artificial
  Probe
ggtaccatgggctgcctcctgcttt

SEQ ID NO: 290305 - DNA, 25 bp, Artificial
  Probe
cacagtgatctctgtgtgaatggat

SEQ ID NO: 290306 - DNA, 25 bp, Artificial
  Probe
ctttggaaggcctacatggattttg

SEQ ID NO: 290307 - DNA, 25 bp, Artificial
  Probe
gatctctgtgtgaatggatgtctca

SEQ ID NO: 290308 - DNA, 25 bp, Artificial
  Probe
tgcttgcctttctgtctaacagtcc

SEQ ID NO: 290309 - DNA, 25 bp, Artificial
  Probe
cacctgccagggaggaacctaggaa

SEQ ID NO: 290310 - DNA, 25 bp, Artificial
  Probe
agtctttctccaagctctggaccct

SEQ ID NO: 290311 - DNA, 25 bp, Artificial
  Probe
ccatcctttggaaggcctacatgga

SEQ ID NO: 290312 - DNA, 25 bp, Artificial
  Probe
acagagcatcccagagcccagctgg

SEQ ID NO: 290313 - DNA, 25 bp, Artificial
  Probe
agcattgttggcactttggtatcat

SEQ ID NO: 290314 - DNA, 25 bp, Artificial
  Probe
ctgccagggaggaacctaggaaaca

SEQ ID NO: 290315 - DNA, 25 bp, Artificial
  Probe
ctgctttacatgcagattcactatg

SEQ ID NO: 290316 - DNA, 25 bp, Artificial
  Probe
aggctgactggcttgctaacggtat

SEQ ID NO: 290317 - DNA, 25 bp, Artificial
  Probe
tatgtaaactaattggccctccttg

SEQ ID NO: 290318 - DNA, 25 bp, Artificial
  Probe
gcgaatttgcacttctgtaaatatc

SEQ ID NO: 290319 - DNA, 25 bp, Artificial
  Probe
gcttaaggggctacttttgtagtgc

SEQ ID NO: 290320 - DNA, 25 bp, Artificial
  Probe
accacaaagccatctgcatagctag

SEQ ID NO: 290321 - DNA, 25 bp, Artificial
  Probe
atgtaaactaattggccctccttgt

SEQ ID NO: 290322 - DNA, 25 bp, Artificial
  Probe
gaatctagtttccttgttatcatag

SEQ ID NO: 290323 - DNA, 25 bp, Artificial
  Probe
aaactagctaatgaacggtacctca

SEQ ID NO: 290324 - DNA, 25 bp, Artificial
  Probe
gaaacaaacaaatgactgtccaggc

SEQ ID NO: 290325 - DNA, 25 bp, Artificial
  Probe
aacggtacctcatcgctgcataata

SEQ ID NO: 290326 - DNA, 25 bp, Artificial
  Probe
atcgctgcataatacacttctgttg

SEQ ID NO: 290327 - DNA, 25 bp, Artificial
  Probe
ccttgttatcatagcctggactgca

SEQ ID NO: 290328 - DNA, 25 bp, Artificial
  Probe
ctctgtgggtttgaatctagtttcc

SEQ ID NO: 290329 - DNA, 25 bp, Artificial
  Probe
agcctggactgcaaaaagatccatc

SEQ ID NO: 290330 - DNA, 25 bp, Artificial
  Probe
tatctatgtaagaaccagctcaaga

SEQ ID NO: 290331 - DNA, 25 bp, Artificial
  Probe
accagctcaagaggaatacaacttt

SEQ ID NO: 290332 - DNA, 25 bp, Artificial
  Probe
ccctccgatagctgggctcatcatt

SEQ ID NO: 290333 - DNA, 25 bp, Artificial
  Probe
cggtgcgagcaccacaaagccatct

SEQ ID NO: 290334 - DNA, 25 bp, Artificial
  Probe
cttttgtagtgctttaatccgaatt

SEQ ID NO: 290335 - DNA, 25 bp, Artificial
  Probe
agttgtaaattcacaggtcacagca

SEQ ID NO: 290336 - DNA, 25 bp, Artificial
  Probe
gtaaactagctaatgaacggtacct

SEQ ID NO: 290337 - DNA, 25 bp, Artificial
  Probe
gcttgaaatagctttctgaaacaaa

SEQ ID NO: 290338 - DNA, 25 bp, Artificial
  Probe
caaacaaatgactgtccaggctgga

SEQ ID NO: 290339 - DNA, 25 bp, Artificial
  Probe
gggctacttttgtagtgctttaatc

SEQ ID NO: 290340 - DNA, 25 bp, Artificial
  Probe
gcatatgccactttgtatttatgta

SEQ ID NO: 290341 - DNA, 25 bp, Artificial
  Probe
ctgaaacaaacaaatgactgtccag

SEQ ID NO: 290342 - DNA, 25 bp, Artificial
  Probe
agctagtcacaaatgctgtttttct

SEQ ID NO: 290343 - DNA, 25 bp, Artificial
  Probe
gctttctgaaacaaacaaatgactg

SEQ ID NO: 290344 - DNA, 25 bp, Artificial
  Probe
actgcggactttgaatgttttctca

SEQ ID NO: 290345 - DNA, 25 bp, Artificial
  Probe
caacacgtggatggaactgaagaaa

SEQ ID NO: 290346 - DNA, 25 bp, Artificial
  Probe
aaatgactgtccaggctggagatct

SEQ ID NO: 290347 - DNA, 25 bp, Artificial
  Probe
gtcggctgcttaaggggctactttt

SEQ ID NO: 290348 - DNA, 25 bp, Artificial
  Probe
gactgcaaaaagatccatccagtcc

SEQ ID NO: 290349 - DNA, 25 bp, Artificial
  Probe
agcatatgccactttgtatttatgt

SEQ ID NO: 290350 - DNA, 25 bp, Artificial
  Probe
gactttgaatgttttctcagctcta

SEQ ID NO: 290351 - DNA, 25 bp, Artificial
  Probe
tgtactgcggactttgaatgttttc

SEQ ID NO: 290352 - DNA, 25 bp, Artificial
  Probe
tgcataatacacttctgttggtggg

SEQ ID NO: 290353 - DNA, 25 bp, Artificial
  Probe
gcacttctgtaaatatctatgtaag

SEQ ID NO: 290354 - DNA, 25 bp, Artificial
  Probe
ttggaagcagttgcaacacgtggat

SEQ ID NO: 290355 - DNA, 25 bp, Artificial
  Probe
atttcatgcttgaaatagctttctg

SEQ ID NO: 290356 - DNA, 25 bp, Artificial
  Probe
gctaatgaacggtacctcatcgctg

SEQ ID NO: 290357 - DNA, 25 bp, Artificial
  Probe
tctctgtgggtttgaatctagtttc

SEQ ID NO: 290358 - DNA, 25 bp, Artificial
  Probe
ttgctaacggtatctcctgcagggg

SEQ ID NO: 290359 - DNA, 25 bp, Artificial
  Probe
caaggtgttctttggaagcagttgc

SEQ ID NO: 290360 - DNA, 25 bp, Artificial
  Probe
gcagttgcaacacgtggatggaact

SEQ ID NO: 290361 - DNA, 25 bp, Artificial
  Probe
cttaaggggctacttttgtagtgct

SEQ ID NO: 290362 - DNA, 25 bp, Artificial
  Probe
gctcagggcagctcacagagtgccc

SEQ ID NO: 290363 - DNA, 25 bp, Artificial
  Probe
tctgccttagaagaggctgtggatg

SEQ ID NO: 290364 - DNA, 25 bp, Artificial
  Probe
accacttcttgatataccttggatg

SEQ ID NO: 290365 - DNA, 25 bp, Artificial
  Probe
agggccagggagactggtatcttac

SEQ ID NO: 290366 - DNA, 25 bp, Artificial
  Probe
tggcctggcccttgcttgcctgtgc

SEQ ID NO: 290367 - DNA, 25 bp, Artificial
  Probe
acgcacatcctgaatatacactgtg

SEQ ID NO: 290368 - DNA, 25 bp, Artificial
  Probe
taccattgggcctggccctgaatga

SEQ ID NO: 290369 - DNA, 25 bp, Artificial
  Probe
cccagagaaactgaggctgaaaaat

SEQ ID NO: 290370 - DNA, 25 bp, Artificial
  Probe
ctcccagcagaaggagaagaaagcc

SEQ ID NO: 290371 - DNA, 25 bp, Artificial
  Probe
acagcgccttcacatggctgggcta

SEQ ID NO: 290372 - DNA, 25 bp, Artificial
  Probe
aaagcagggaacacgccaagtcctc

SEQ ID NO: 290373 - DNA, 25 bp, Artificial
  Probe
accacataggaaagcagggaacacg

SEQ ID NO: 290374 - DNA, 25 bp, Artificial
  Probe
tgttagcttggctcgatgcccctct

SEQ ID NO: 290375 - DNA, 25 bp, Artificial
  Probe
agaagaaagccactcagatgcttgc

SEQ ID NO: 290376 - DNA, 25 bp, Artificial
  Probe
gggaaaacaactctaatcctcaagg

SEQ ID NO: 290377 - DNA, 25 bp, Artificial
  Probe
ttgcactgctgagtctgccccttgc

SEQ ID NO: 290378 - DNA, 25 bp, Artificial
  Probe
ttgccattgttctcggtgtgttcat

SEQ ID NO: 290379 - DNA, 25 bp, Artificial
  Probe
tggacccatggctcagggcagctca

SEQ ID NO: 290380 - DNA, 25 bp, Artificial
  Probe
ccctgcaggccctgcagtgttagct

SEQ ID NO: 290381 - DNA, 25 bp, Artificial
  Probe
gctggcttggcctggcccttgcttg

SEQ ID NO: 290382 - DNA, 25 bp, Artificial
  Probe
tagggccagggagactggtatctta

SEQ ID NO: 290383 - DNA, 25 bp, Artificial
  Probe
atcgagttccgcaaggccttcatga

SEQ ID NO: 290384 - DNA, 25 bp, Artificial
  Probe
cagtttggagggttctgggatccaa

SEQ ID NO: 290385 - DNA, 25 bp, Artificial
  Probe
gactggtatcttaccagctctgggg

SEQ ID NO: 290386 - DNA, 25 bp, Artificial
  Probe
atatccagaccctgtctccttggca

SEQ ID NO: 290387 - DNA, 25 bp, Artificial
  Probe
cttggaccagtgttggagttgaagc

SEQ ID NO: 290388 - DNA, 25 bp, Artificial
  Probe
ccccaagagaatctgtaaggagaaa

SEQ ID NO: 290389 - DNA, 25 bp, Artificial
  Probe
ggccttccttgaccttcctcttggg

SEQ ID NO: 290390 - DNA, 25 bp, Artificial
  Probe
tggtatcttaccagctctggggttg

SEQ ID NO: 290391 - DNA, 25 bp, Artificial
  Probe
cccggacctcccttaagacgatgag

SEQ ID NO: 290392 - DNA, 25 bp, Artificial
  Probe
tcttactttataggaaccacatagg

SEQ ID NO: 290393 - DNA, 25 bp, Artificial
  Probe
ggttgttaacatcgtctctcttcca

SEQ ID NO: 290394 - DNA, 25 bp, Artificial
  Probe
gacctcatccctgcaagctgtgggc

SEQ ID NO: 290395 - DNA, 25 bp, Artificial
  Probe
tatagtatcccatggggtttctgta

SEQ ID NO: 290396 - DNA, 25 bp, Artificial
  Probe
ctctacagcgccttcacatggctgg

SEQ ID NO: 290397 - DNA, 25 bp, Artificial
  Probe
caaggccttcatgaagatcttgcac

SEQ ID NO: 290398 - DNA, 25 bp, Artificial
  Probe
gggtgctgggactgctgataccatt

SEQ ID NO: 290399 - DNA, 25 bp, Artificial
  Probe
aagctgtgggcagaaaggcccagat

SEQ ID NO: 290400 - DNA, 25 bp, Artificial
  Probe
gtgattgcaacatcccaccagtcct

SEQ ID NO: 290401 - DNA, 25 bp, Artificial
  Probe
atgcccaatggcaaaacccggacct

SEQ ID NO: 290402 - DNA, 25 bp, Artificial
  Probe
ggtattactatgtcctaccttgtta

SEQ ID NO: 290403 - DNA, 25 bp, Artificial
  Probe
cctaccttgttatagtatcccatgg

SEQ ID NO: 290404 - DNA, 25 bp, Artificial
  Probe
gatgcagcggccttccttgaccttc

SEQ ID NO: 290405 - DNA, 25 bp, Artificial
  Probe
agtgcctctgccttagaagaggctg

SEQ ID NO: 290406 - DNA, 25 bp, Artificial
  Probe
tgttttccactccaactctagtgtg

SEQ ID NO: 290407 - DNA, 25 bp, Artificial
  Probe
ctggatgtggtaacttggggctctt

SEQ ID NO: 290408 - DNA, 25 bp, Artificial
  Probe
gagcgagccctatggccaactctgc

SEQ ID NO: 290409 - DNA, 25 bp, Artificial
  Probe
agagccaggagattccatagcaggg

SEQ ID NO: 290410 - DNA, 25 bp, Artificial
  Probe
agcaagtgattctcttgcctcttct

SEQ ID NO: 290411 - DNA, 25 bp, Artificial
  Probe
tggtgttttggaagccatgacttac

SEQ ID NO: 290412 - DNA, 25 bp, Artificial
  Probe
agcaactgttactactgtacattag

SEQ ID NO: 290413 - DNA, 25 bp, Artificial
  Probe
ctcgaaggacaaacacttgagtttt

SEQ ID NO: 290414 - DNA, 25 bp, Artificial
  Probe
tacagagccccgtggtgttttggaa

SEQ ID NO: 290415 - DNA, 25 bp, Artificial
  Probe
gaggtgttccctaacctgtcttcgt

SEQ ID NO: 290416 - DNA, 25 bp, Artificial
  Probe
tctcggagagcagagacacagtgcc

SEQ ID NO: 290417 - DNA, 25 bp, Artificial
  Probe
ctccatgctggctgggatcttagca

SEQ ID NO: 290418 - DNA, 25 bp, Artificial
  Probe
ggtagcaagtgattctcttgcctct

SEQ ID NO: 290419 - DNA, 25 bp, Artificial
  Probe
cgtgtctgactcaggcgcctggcac

SEQ ID NO: 290420 - DNA, 25 bp, Artificial
  Probe
aacatactcgaaggacaaacacttg

SEQ ID NO: 290421 - DNA, 25 bp, Artificial
  Probe
agaggttgaggtgttccctaacctg

SEQ ID NO: 290422 - DNA, 25 bp, Artificial
  Probe
gtttgcatccgctggtagcaagtga

SEQ ID NO: 290423 - DNA, 25 bp, Artificial
  Probe
gagaaactccaaagtccatgcaaaa

SEQ ID NO: 290424 - DNA, 25 bp, Artificial
  Probe
gactcaggcgcctggcacatttcag

SEQ ID NO: 290425 - DNA, 25 bp, Artificial
  Probe
caagaacatctgtccggcttctaca

SEQ ID NO: 290426 - DNA, 25 bp, Artificial
  Probe
tgcctcttcttgctgtctggggatg

SEQ ID NO: 290427 - DNA, 25 bp, Artificial
  Probe
gaccagcgtccttgttccaaacatt

SEQ ID NO: 290428 - DNA, 25 bp, Artificial
  Probe
tcttcgtttgcatccgctggtagca

SEQ ID NO: 290429 - DNA, 25 bp, Artificial
  Probe
gattctcttgcctcttcttgctgtc

SEQ ID NO: 290430 - DNA, 25 bp, Artificial
  Probe
gcgtccttgttccaaacattccaag

SEQ ID NO: 290431 - DNA, 25 bp, Artificial
  Probe
acacagtgccattcctgagtggcat

SEQ ID NO: 290432 - DNA, 25 bp, Artificial
  Probe
tggctgggatcttagcaagaacatc

SEQ ID NO: 290433 - DNA, 25 bp, Artificial
  Probe
ttgaaaacatactcgaaggacaaac

SEQ ID NO: 290434 - DNA, 25 bp, Artificial
  Probe
ccaggagattccatagcagggcgga

SEQ ID NO: 290435 - DNA, 25 bp, Artificial
  Probe
gaggaccagcgtccttgttccaaac

SEQ ID NO: 290436 - DNA, 25 bp, Artificial
  Probe
ttacatagagcgagccctatggcca

SEQ ID NO: 290437 - DNA, 25 bp, Artificial
  Probe
gatggcctcggacctctcggagagc

SEQ ID NO: 290438 - DNA, 25 bp, Artificial
  Probe
cattgactacagagccccgtggtgt

SEQ ID NO: 290439 - DNA, 25 bp, Artificial
  Probe
gagcagagacacagtgccattcctg

SEQ ID NO: 290440 - DNA, 25 bp, Artificial
  Probe
tatggccaactctgcgctctccatg

SEQ ID NO: 290441 - DNA, 25 bp, Artificial
  Probe
aagtccttagggagtgttcgtgtct

SEQ ID NO: 290442 - DNA, 25 bp, Artificial
  Probe
catctgtccggcttctacagtttct

SEQ ID NO: 290443 - DNA, 25 bp, Artificial
  Probe
actctgcgctctccatgctggctgg

SEQ ID NO: 290444 - DNA, 25 bp, Artificial
  Probe
ttccaagagaggttgaggtgttccc

SEQ ID NO: 290445 - DNA, 25 bp, Artificial
  Probe
gatcttagcaagaacatctgtccgg

SEQ ID NO: 290446 - DNA, 25 bp, Artificial
  Probe
ccgctggtagcaagtgattctcttg

SEQ ID NO: 290447 - DNA, 25 bp, Artificial
  Probe
tggcagaggaccagcgtccttgttc

SEQ ID NO: 290448 - DNA, 25 bp, Artificial
  Probe
caaattgaaaacatactcgaaggac

SEQ ID NO: 290449 - DNA, 25 bp, Artificial
  Probe
gggagaaactccaaagtccatgcaa

SEQ ID NO: 290450 - DNA, 25 bp, Artificial
  Probe
tagagcgagccctatggccaactct

SEQ ID NO: 290451 - DNA, 25 bp, Artificial
  Probe
cacatttcagggagaaactccaaag

SEQ ID NO: 290452 - DNA, 25 bp, Artificial
  Probe
ctgttactactgtacattaggatat

SEQ ID NO: 290453 - DNA, 25 bp, Artificial
  Probe
gccattcctgagtggcatcatccag

SEQ ID NO: 290454 - DNA, 25 bp, Artificial
  Probe
ccccatgaatggaacgagtatccag

SEQ ID NO: 290455 - DNA, 25 bp, Artificial
  Probe
tcagcgaacacctcaagcagcgtcg

SEQ ID NO: 290456 - DNA, 25 bp, Artificial
  Probe
gtccaaaagcctcatgacctcggtc

SEQ ID NO: 290457 - DNA, 25 bp, Artificial
  Probe
acctcggtccccatgaatggaacga

SEQ ID NO: 290458 - DNA, 25 bp, Artificial
  Probe
tcatgacctcggtccccatgaatgg

SEQ ID NO: 290459 - DNA, 25 bp, Artificial
  Probe
accggtgtgaactgctcagcttctt

SEQ ID NO: 290460 - DNA, 25 bp, Artificial
  Probe
aaattgttttcagtcatgcctctgt

SEQ ID NO: 290461 - DNA, 25 bp, Artificial
  Probe
ggagcttgcggattgccctcagcga

SEQ ID NO: 290462 - DNA, 25 bp, Artificial
  Probe
ttaacctggcaaccatgaactcttg

SEQ ID NO: 290463 - DNA, 25 bp, Artificial
  Probe
tgctcaacagaaggaatgggagctt

SEQ ID NO: 290464 - DNA, 25 bp, Artificial
  Probe
gcagaagcaccgagcagtgtgcctt

SEQ ID NO: 290465 - DNA, 25 bp, Artificial
  Probe
tggttgtcatcttcgccctgtgctg

SEQ ID NO: 290466 - DNA, 25 bp, Artificial
  Probe
gtcaccagtccaaaagcctcatgac

SEQ ID NO: 290467 - DNA, 25 bp, Artificial
  Probe
gattacattggcattaacctggcaa

SEQ ID NO: 290468 - DNA, 25 bp, Artificial
  Probe
ttctgcttggttgtcatcttcgccc

SEQ ID NO: 290469 - DNA, 25 bp, Artificial
  Probe
aaacggtcacgcagcagctgcgctc

SEQ ID NO: 290470 - DNA, 25 bp, Artificial
  Probe
ggacagcatgaactaaccctgtgca

SEQ ID NO: 290471 - DNA, 25 bp, Artificial
  Probe
ggttccctcttcacttaagccgaat

SEQ ID NO: 290472 - DNA, 25 bp, Artificial
  Probe
gtgctggttccctcttcacttaagc

SEQ ID NO: 290473 - DNA, 25 bp, Artificial
  Probe
cagcttcttgctgctcatggattac

SEQ ID NO: 290474 - DNA, 25 bp, Artificial
  Probe
tcatggattacattggcattaacct

SEQ ID NO: 290475 - DNA, 25 bp, Artificial
  Probe
ggcaaagaccgtcttctgcttggtt

SEQ ID NO: 290476 - DNA, 25 bp, Artificial
  Probe
ggcaaccatgaactcttgcataaac

SEQ ID NO: 290477 - DNA, 25 bp, Artificial
  Probe
ctgtgagatgctcaacagaaggaat

SEQ ID NO: 290478 - DNA, 25 bp, Artificial
  Probe
gagcttgcggattgccctcagcgaa

SEQ ID NO: 290479 - DNA, 25 bp, Artificial
  Probe
aagaccgtcttctgcttggttgtca

SEQ ID NO: 290480 - DNA, 25 bp, Artificial
  Probe
gaactgctcagcttcttgctgctca

SEQ ID NO: 290481 - DNA, 25 bp, Artificial
  Probe
ttggcattaacctggcaaccatgaa

SEQ ID NO: 290482 - DNA, 25 bp, Artificial
  Probe
gataagaaccggtgtgaactgctca

SEQ ID NO: 290483 - DNA, 25 bp, Artificial
  Probe
atccagtggaagaaccaggagcaga

SEQ ID NO: 290484 - DNA, 25 bp, Artificial
  Probe
tcacttaagccgaattttgaagaaa

SEQ ID NO: 290485 - DNA, 25 bp, Artificial
  Probe
aactgctcagcttcttgctgctcat

SEQ ID NO: 290486 - DNA, 25 bp, Artificial
  Probe
tgcggattgccctcagcgaacacct

SEQ ID NO: 290487 - DNA, 25 bp, Artificial
  Probe
tcaagcagcgtcgagaggtggcaaa

SEQ ID NO: 290488 - DNA, 25 bp, Artificial
  Probe
agtccaaaagcctcatgacctcggt

SEQ ID NO: 290489 - DNA, 25 bp, Artificial
  Probe
agaaccaggagcagaaccacaacac

SEQ ID NO: 290490 - DNA, 25 bp, Artificial
  Probe
aggatgaaacggtcacgcagcagct

SEQ ID NO: 290491 - DNA, 25 bp, Artificial
  Probe
gtgtgcacagcaatcttctataccc

SEQ ID NO: 290492 - DNA, 25 bp, Artificial
  Probe
tggaacgagtatccagtggaagaac

SEQ ID NO: 290493 - DNA, 25 bp, Artificial
  Probe
caccgagcagtgtgccttcgagtcc

SEQ ID NO: 290494 - DNA, 25 bp, Artificial
  Probe
tgtgccttcgagtcccaggatgaaa

SEQ ID NO: 290495 - DNA, 25 bp, Artificial
  Probe
gagcagtgtgccttcgagtcccagg

SEQ ID NO: 290496 - DNA, 25 bp, Artificial
  Probe
gatgctcaacagaaggaatgggagc

SEQ ID NO: 290497 - DNA, 25 bp, Artificial
  Probe
accacaacacagaacggagcagcca

SEQ ID NO: 290498 - DNA, 25 bp, Artificial
  Probe
cacaaggacagcatgaactaaccct

SEQ ID NO: 290499 - DNA, 25 bp, Artificial
  Probe
aacacagaacggagcagccacaagg

SEQ ID NO: 290500 - DNA, 25 bp, Artificial
  Probe
actgcccatgggatatgtggtgtgt

SEQ ID NO: 290501 - DNA, 25 bp, Artificial
  Probe
tcacatgtgacaaaatacggtttgt

SEQ ID NO: 290502 - DNA, 25 bp, Artificial
  Probe
tacctactgagtaggcggtgacttt

SEQ ID NO: 290503 - DNA, 25 bp, Artificial
  Probe
ctttggttctccagaatgtaagaag

SEQ ID NO: 290504 - DNA, 25 bp, Artificial
  Probe
atggctggacatgtgcaatcgtgag

SEQ ID NO: 290505 - DNA, 25 bp, Artificial
  Probe
tacttcgtacttgtgtttgcttaaa

SEQ ID NO: 290506 - DNA, 25 bp, Artificial
  Probe
taaacacattgaatgcgctttactg

SEQ ID NO: 290507 - DNA, 25 bp, Artificial
  Probe
ctttactgcccatgggatatgtggt

SEQ ID NO: 290508 - DNA, 25 bp, Artificial
  Probe
gcccatgggatatgtggtgtgtatc

SEQ ID NO: 290509 - DNA, 25 bp, Artificial
  Probe
gacttgtttggcttataaacacatt

SEQ ID NO: 290510 - DNA, 25 bp, Artificial
  Probe
aaagtttcacgtcttggtgcctttg

SEQ ID NO: 290511 - DNA, 25 bp, Artificial
  Probe
gactgtaactctcacatgtgacaaa

SEQ ID NO: 290512 - DNA, 25 bp, Artificial
  Probe
aactctcacatgtgacaaaatacgg

SEQ ID NO: 290513 - DNA, 25 bp, Artificial
  Probe
cgtacttgtgtttgcttaaacaaag

SEQ ID NO: 290514 - DNA, 25 bp, Artificial
  Probe
aatgcgctttactgcccatgggata

SEQ ID NO: 290515 - DNA, 25 bp, Artificial
  Probe
tccatgttcgggagttggaatgctg

SEQ ID NO: 290516 - DNA, 25 bp, Artificial
  Probe
ttcacgtcttggtgcctttgtgtga

SEQ ID NO: 290517 - DNA, 25 bp, Artificial
  Probe
cttcgtacttgtgtttgcttaaaca

SEQ ID NO: 290518 - DNA, 25 bp, Artificial
  Probe
cacaccttgccgatggctggacatg

SEQ ID NO: 290519 - DNA, 25 bp, Artificial
  Probe
ttggcttataaacacattgaatgcg

SEQ ID NO: 290520 - DNA, 25 bp, Artificial
  Probe
ggttacctactgagtaggcggtgac

SEQ ID NO: 290521 - DNA, 25 bp, Artificial
  Probe
gcttataaacacattgaatgcgctt

SEQ ID NO: 290522 - DNA, 25 bp, Artificial
  Probe
tcaaaagtttcacgtcttggtgcct

SEQ ID NO: 290523 - DNA, 25 bp, Artificial
  Probe
tgtgacacaccttgccgatggctgg

SEQ ID NO: 290524 - DNA, 25 bp, Artificial
  Probe
ggacacgctcacctctagccttaag

SEQ ID NO: 290525 - DNA, 25 bp, Artificial
  Probe
gccgatggctggacatgtgcaatcg

SEQ ID NO: 290526 - DNA, 25 bp, Artificial
  Probe
tctcacatgtgacaaaatacggttt

SEQ ID NO: 290527 - DNA, 25 bp, Artificial
  Probe
gcggtgacttttgtatgctatgaac

SEQ ID NO: 290528 - DNA, 25 bp, Artificial
  Probe
tgccgatggctggacatgtgcaatc

SEQ ID NO: 290529 - DNA, 25 bp, Artificial
  Probe
cgtcttggtgcctttgtgtgacaca

SEQ ID NO: 290530 - DNA, 25 bp, Artificial
  Probe
agggctgagctgagctttggttctc

SEQ ID NO: 290531 - DNA, 25 bp, Artificial
  Probe
ttttgtaaatactgctcgactgtaa

SEQ ID NO: 290532 - DNA, 25 bp, Artificial
  Probe
actgctcgactgtaactctcacatg

SEQ ID NO: 290533 - DNA, 25 bp, Artificial
  Probe
gaggggacacgctcacctctagcct

SEQ ID NO: 290534 - DNA, 25 bp, Artificial
  Probe
acttgtttggcttataaacacattg

SEQ ID NO: 290535 - DNA, 25 bp, Artificial
  Probe
gtaaatactgctcgactgtaactct

SEQ ID NO: 290536 - DNA, 25 bp, Artificial
  Probe
ctgcccatgggatatgtggtgtgta

SEQ ID NO: 290537 - DNA, 25 bp, Artificial
  Probe
gctttactgcccatgggatatgtgg

SEQ ID NO: 290538 - DNA, 25 bp, Artificial
  Probe
tttggcttataaacacattgaatgc

SEQ ID NO: 290539 - DNA, 25 bp, Artificial
  Probe
gagctttggttctccagaatgtaag

SEQ ID NO: 290540 - DNA, 25 bp, Artificial
  Probe
aattttgtaaatactgctcgactgt

SEQ ID NO: 290541 - DNA, 25 bp, Artificial
  Probe
cggtgacttttgtatgctatgaaca

SEQ ID NO: 290542 - DNA, 25 bp, Artificial
  Probe
gtttcaaaagtttcacgtcttggtg

SEQ ID NO: 290543 - DNA, 25 bp, Artificial
  Probe
cttgtgtttgcttaaacaaagtgac

SEQ ID NO: 290544 - DNA, 25 bp, Artificial
  Probe
cattgaatgcgctttactgcccatg

SEQ ID NO: 290545 - DNA, 25 bp, Artificial
  Probe
acaccttgccgatggctggacatgt

SEQ ID NO: 290546 - DNA, 25 bp, Artificial
  Probe
gggaagctccgtgaagaccaacatg

SEQ ID NO: 290547 - DNA, 25 bp, Artificial
  Probe
accgcgtgctgctgggccgacacag

SEQ ID NO: 290548 - DNA, 25 bp, Artificial
  Probe
tcctgacgtcctgcagcagggccgt

SEQ ID NO: 290549 - DNA, 25 bp, Artificial
  Probe
tgtggtccatgagaagtggaacgct

SEQ ID NO: 290550 - DNA, 25 bp, Artificial
  Probe
cttggtggctggagctctcagctgc

SEQ ID NO: 290551 - DNA, 25 bp, Artificial
  Probe
ccagcatgatgtgagcagggtagtt

SEQ ID NO: 290552 - DNA, 25 bp, Artificial
  Probe
acctccagctgcaatggggactccg

SEQ ID NO: 290553 - DNA, 25 bp, Artificial
  Probe
ctaagcaaaggcatctctgtgactg

SEQ ID NO: 290554 - DNA, 25 bp, Artificial
  Probe
acgtcctgcagcagggccgtctgct

SEQ ID NO: 290555 - DNA, 25 bp, Artificial
  Probe
gcccagtggccctgaccagcaagat

SEQ ID NO: 290556 - DNA, 25 bp, Artificial
  Probe
tcaagaggccagtcccaacagctgg

SEQ ID NO: 290557 - DNA, 25 bp, Artificial
  Probe
tccctgcagtacctttcctctggaa

SEQ ID NO: 290558 - DNA, 25 bp, Artificial
  Probe
accgctgcccattgtatcagcaact

SEQ ID NO: 290559 - DNA, 25 bp, Artificial
  Probe
ccaacaactgggttctgaccgctgc

SEQ ID NO: 290560 - DNA, 25 bp, Artificial
  Probe
agcaagatccagacggcttgcctcc

SEQ ID NO: 290561 - DNA, 25 bp, Artificial
  Probe
tgcgggtaccccacttatgaggtcc

SEQ ID NO: 290562 - DNA, 25 bp, Artificial
  Probe
cgtaagccatctgtcttcaccaggg

SEQ ID NO: 290563 - DNA, 25 bp, Artificial
  Probe
aagtggaacgctcaaaagctctcca

SEQ ID NO: 290564 - DNA, 25 bp, Artificial
  Probe
tgtcaccttgggaacgcacggaagg

SEQ ID NO: 290565 - DNA, 25 bp, Artificial
  Probe
ttggctccactctgggctgcaacta

SEQ ID NO: 290566 - DNA, 25 bp, Artificial
  Probe
ctccggcggaccactgaattgccag

SEQ ID NO: 290567 - DNA, 25 bp, Artificial
  Probe
ctctccaacgggaatgacattgccc

SEQ ID NO: 290568 - DNA, 25 bp, Artificial
  Probe
ctccaacgggaatgacattgccctg

SEQ ID NO: 290569 - DNA, 25 bp, Artificial
  Probe
gtggactatgccacctgctccagcg

SEQ ID NO: 290570 - DNA, 25 bp, Artificial
  Probe
ccaggcatctaatggccagtggcag

SEQ ID NO: 290571 - DNA, 25 bp, Artificial
  Probe
ctgcaatggggactccggcggacca

SEQ ID NO: 290572 - DNA, 25 bp, Artificial
  Probe
tcggaatccggctcactggctgttc

SEQ ID NO: 290573 - DNA, 25 bp, Artificial
  Probe
aactcggtgattgcaaagaactaag

SEQ ID NO: 290574 - DNA, 25 bp, Artificial
  Probe
tgcaatggggactccggcggaccac

SEQ ID NO: 290575 - DNA, 25 bp, Artificial
  Probe
ggactccggcggaccactgaattgc

SEQ ID NO: 290576 - DNA, 25 bp, Artificial
  Probe
tccgtgaagaccaacatggtgtgcg

SEQ ID NO: 290577 - DNA, 25 bp, Artificial
  Probe
ggccggctgcagaccaacggagcca

SEQ ID NO: 290578 - DNA, 25 bp, Artificial
  Probe
caactacatcgactggatcaactcg

SEQ ID NO: 290579 - DNA, 25 bp, Artificial
  Probe
ggagctctcagctgcgggtacccca

SEQ ID NO: 290580 - DNA, 25 bp, Artificial
  Probe
ccgtctgctggttgtggactatgcc

SEQ ID NO: 290581 - DNA, 25 bp, Artificial
  Probe
acggtattgtgagctttggctccac

SEQ ID NO: 290582 - DNA, 25 bp, Artificial
  Probe
ggttctgaccgctgcccattgtatc

SEQ ID NO: 290583 - DNA, 25 bp, Artificial
  Probe
gctggtaccattctgccaaacaact

SEQ ID NO: 290584 - DNA, 25 bp, Artificial
  Probe
actctaggacctaccgcgtgctgct

SEQ ID NO: 290585 - DNA, 25 bp, Artificial
  Probe
tggcgacggtgtgacctccagctgc

SEQ ID NO: 290586 - DNA, 25 bp, Artificial
  Probe
ccgctggtaccattctgccaaacaa

SEQ ID NO: 290587 - DNA, 25 bp, Artificial
  Probe
ggaacgcacggaagggacacagtaa

SEQ ID NO: 290588 - DNA, 25 bp, Artificial
  Probe
acctgcggaggctccctggtggcca

SEQ ID NO: 290589 - DNA, 25 bp, Artificial
  Probe
tctaatggccagtggcaggtgcacg

SEQ ID NO: 290590 - DNA, 25 bp, Artificial
  Probe
agtggcaccacacctgcggaggctc

SEQ ID NO: 290591 - DNA, 25 bp, Artificial
  Probe
ccagggtctccaactacatcgactg

SEQ ID NO: 290592 - DNA, 25 bp, Artificial
  Probe
atccctggagctaccagatcctctg

SEQ ID NO: 290593 - DNA, 25 bp, Artificial
  Probe
ggcagcaaagccaagtttgccggca

SEQ ID NO: 290594 - DNA, 25 bp, Artificial
  Probe
tgtctccgtcatccaggcggctcaa

SEQ ID NO: 290595 - DNA, 25 bp, Artificial
  Probe
aagtttgccggcaggtccttcagga

SEQ ID NO: 290596 - DNA, 25 bp, Artificial
  Probe
atccaggcggctcaaggctggccca

SEQ ID NO: 290597 - DNA, 25 bp, Artificial
  Probe
catgtcactgcttccttagatgtcc

SEQ ID NO: 290598 - DNA, 25 bp, Artificial
  Probe
aaccccctggccaagtaaggcatgg

SEQ ID NO: 290599 - DNA, 25 bp, Artificial
  Probe
gcaaagccaagtttgccggcaggtc

SEQ ID NO: 290600 - DNA, 25 bp, Artificial
  Probe
agattggctctgtgaccgagtctct

SEQ ID NO: 290601 - DNA, 25 bp, Artificial
  Probe
agcgcctggccaagtacaatcagat

SEQ ID NO: 290602 - DNA, 25 bp, Artificial
  Probe
gcggctcaaggctggcccagtgctt

SEQ ID NO: 290603 - DNA, 25 bp, Artificial
  Probe
ctctgcaggcgtgtaagctggccca

SEQ ID NO: 290604 - DNA, 25 bp, Artificial
  Probe
gctctgtgaccgagtctctgcaggc

SEQ ID NO: 290605 - DNA, 25 bp, Artificial
  Probe
gcatggaccggagatccctggagct

SEQ ID NO: 290606 - DNA, 25 bp, Artificial
  Probe
ctggagctaccagatcctctgtctc

SEQ ID NO: 290607 - DNA, 25 bp, Artificial
  Probe
ccgagtctctgcaggcgtgtaagct

SEQ ID NO: 290608 - DNA, 25 bp, Artificial
  Probe
agtaaggcatggaccggagatccct

SEQ ID NO: 290609 - DNA, 25 bp, Artificial
  Probe
cctggccaagtaaggcatggaccgg

SEQ ID NO: 290610 - DNA, 25 bp, Artificial
  Probe
ctgcaggcgtgtaagctggcccagt

SEQ ID NO: 290611 - DNA, 25 bp, Artificial
  Probe
agtttgccggcaggtccttcaggaa

SEQ ID NO: 290612 - DNA, 25 bp, Artificial
  Probe
gatccctggagctaccagatcctct

SEQ ID NO: 290613 - DNA, 25 bp, Artificial
  Probe
ctcctgctcaaagtgaaccagattg

SEQ ID NO: 290614 - DNA, 25 bp, Artificial
  Probe
gaccgagtctctgcaggcgtgtaag

SEQ ID NO: 290615 - DNA, 25 bp, Artificial
  Probe
ccaggcggctcaaggctggcccagt

SEQ ID NO: 290616 - DNA, 25 bp, Artificial
  Probe
atggaccggagatccctggagctac

SEQ ID NO: 290617 - DNA, 25 bp, Artificial
  Probe
gagctaccagatcctctgtctccgt

SEQ ID NO: 290618 - DNA, 25 bp, Artificial
  Probe
caaagccaagtttgccggcaggtcc

SEQ ID NO: 290619 - DNA, 25 bp, Artificial
  Probe
tccaggcggctcaaggctggcccag

SEQ ID NO: 290620 - DNA, 25 bp, Artificial
  Probe
accggagatccctggagctaccaga

SEQ ID NO: 290621 - DNA, 25 bp, Artificial
  Probe
ctgtgaccgagtctctgcaggcgtg

SEQ ID NO: 290622 - DNA, 25 bp, Artificial
  Probe
cccatgtcactgcttccttagatgt

SEQ ID NO: 290623 - DNA, 25 bp, Artificial
  Probe
tctccgtcatccaggcggctcaagg

SEQ ID NO: 290624 - DNA, 25 bp, Artificial
  Probe
ttgccggcaggtccttcaggaaccc

SEQ ID NO: 290625 - DNA, 25 bp, Artificial
  Probe
ctggggtgtcatggtgtcccatcga

SEQ ID NO: 290626 - DNA, 25 bp, Artificial
  Probe
aagtaaggcatggaccggagatccc

SEQ ID NO: 290627 - DNA, 25 bp, Artificial
  Probe
agatcctctgtctccgtcatccagg

SEQ ID NO: 290628 - DNA, 25 bp, Artificial
  Probe
cggagatccctggagctaccagatc

SEQ ID NO: 290629 - DNA, 25 bp, Artificial
  Probe
attggctctgtgaccgagtctctgc

SEQ ID NO: 290630 - DNA, 25 bp, Artificial
  Probe
ccaagtaaggcatggaccggagatc

SEQ ID NO: 290631 - DNA, 25 bp, Artificial
  Probe
ggcaggtccttcaggaaccccctgg

SEQ ID NO: 290632 - DNA, 25 bp, Artificial
  Probe
tccctggagctaccagatcctctgt

SEQ ID NO: 290633 - DNA, 25 bp, Artificial
  Probe
tcccatgtcactgcttccttagatg

SEQ ID NO: 290634 - DNA, 25 bp, Artificial
  Probe
ggtgtcatggtgtcccatcgatctg

SEQ ID NO: 290635 - DNA, 25 bp, Artificial
  Probe
tctctgcaggcgtgtaagctggccc

SEQ ID NO: 290636 - DNA, 25 bp, Artificial
  Probe
cctcctgctcaaagtgaaccagatt

SEQ ID NO: 290637 - DNA, 25 bp, Artificial
  Probe
tgaccgagtctctgcaggcgtgtaa

SEQ ID NO: 290638 - DNA, 25 bp, Artificial
  Probe
tttcaaggaaccacaagtatatgta

SEQ ID NO: 290639 - DNA, 25 bp, Artificial
  Probe
ctgatgctggcacattttgctggaa

SEQ ID NO: 290640 - DNA, 25 bp, Artificial
  Probe
acgtacattccaaagaagtttcaag

SEQ ID NO: 290641 - DNA, 25 bp, Artificial
  Probe
agtttcaaggaaccacaagtatatg

SEQ ID NO: 290642 - DNA, 25 bp, Artificial
  Probe
ttcaaggaaccacaagtatatgtat

SEQ ID NO: 290643 - DNA, 25 bp, Artificial
  Probe
tctagccatgctgtgcatgccgctt

SEQ ID NO: 290644 - DNA, 25 bp, Artificial
  Probe
gtacattccaaagaagtttcaagga

SEQ ID NO: 290645 - DNA, 25 bp, Artificial
  Probe
agccatgctgtgcatgccgctttct

SEQ ID NO: 290646 - DNA, 25 bp, Artificial
  Probe
gaagtttcaaggaaccacaagtata

SEQ ID NO: 290647 - DNA, 25 bp, Artificial
  Probe
gtttcaaggaaccacaagtatatgt

SEQ ID NO: 290648 - DNA, 25 bp, Artificial
  Probe
gctggcacattttgctggaaagttt

SEQ ID NO: 290649 - DNA, 25 bp, Artificial
  Probe
ggaaccacaagtatatgtatacaaa

SEQ ID NO: 290650 - DNA, 25 bp, Artificial
  Probe
caaggaaccacaagtatatgtatac

SEQ ID NO: 290651 - DNA, 25 bp, Artificial
  Probe
tgatgctggcacattttgctggaaa

SEQ ID NO: 290652 - DNA, 25 bp, Artificial
  Probe
gctgatgctggcacattttgctgga

SEQ ID NO: 290653 - DNA, 25 bp, Artificial
  Probe
tgctggcacattttgctggaaagtt

SEQ ID NO: 290654 - DNA, 25 bp, Artificial
  Probe
aagtttcaaggaaccacaagtatat

SEQ ID NO: 290655 - DNA, 25 bp, Artificial
  Probe
aggaaccacaagtatatgtatacaa

SEQ ID NO: 290656 - DNA, 25 bp, Artificial
  Probe
gtgcatgccgctttctctgtcgggg

SEQ ID NO: 290657 - DNA, 25 bp, Artificial
  Probe
ctggcacattttgctggaaagtttt

SEQ ID NO: 290658 - DNA, 25 bp, Artificial
  Probe
tgtgcatgccgctttctctgtcggg

SEQ ID NO: 290659 - DNA, 25 bp, Artificial
  Probe
atactgtagcctgatttcatattgt

SEQ ID NO: 290660 - DNA, 25 bp, Artificial
  Probe
ccatgctgtgcatgccgctttctct

SEQ ID NO: 290661 - DNA, 25 bp, Artificial
  Probe
ctagccatgctgtgcatgccgcttt

SEQ ID NO: 290662 - DNA, 25 bp, Artificial
  Probe
tcaaggaaccacaagtatatgtata

SEQ ID NO: 290663 - DNA, 25 bp, Artificial
  Probe
tatactgtagcctgatttcatattg

SEQ ID NO: 290664 - DNA, 25 bp, Artificial
  Probe
tacattccaaagaagtttcaaggaa

SEQ ID NO: 290665 - DNA, 25 bp, Artificial
  Probe
gatgctggcacattttgctggaaag

SEQ ID NO: 290666 - DNA, 25 bp, Artificial
  Probe
tagccatgctgtgcatgccgctttc

SEQ ID NO: 290667 - DNA, 25 bp, Artificial
  Probe
tactgtagcctgatttcatattgta

SEQ ID NO: 290668 - DNA, 25 bp, Artificial
  Probe
gccatgctgtgcatgccgctttctc

SEQ ID NO: 290669 - DNA, 25 bp, Artificial
  Probe
cgtacattccaaagaagtttcaagg

SEQ ID NO: 290670 - DNA, 25 bp, Artificial
  Probe
ttctagccatgctgtgcatgccgct

SEQ ID NO: 290671 - DNA, 25 bp, Artificial
  Probe
atgctggcacattttgctggaaagt

SEQ ID NO: 290672 - DNA, 25 bp, Artificial
  Probe
tccgtgactgaattcaatggagaca

SEQ ID NO: 290673 - DNA, 25 bp, Artificial
  Probe
aaatggtgacaactttcaaaggcat

SEQ ID NO: 290674 - DNA, 25 bp, Artificial
  Probe
ggagacacaatcaccaataccatga

SEQ ID NO: 290675 - DNA, 25 bp, Artificial
  Probe
agtccgtgactgaattcaatggaga

SEQ ID NO: 290676 - DNA, 25 bp, Artificial
  Probe
tggagacacaatcaccaataccatg

SEQ ID NO: 290677 - DNA, 25 bp, Artificial
  Probe
taaagtccgtgactgaattcaatgg

SEQ ID NO: 290678 - DNA, 25 bp, Artificial
  Probe
gggtgacatcgtctacaagagagtc

SEQ ID NO: 290679 - DNA, 25 bp, Artificial
  Probe
aacttctccggcaagtaccaagtgc

SEQ ID NO: 290680 - DNA, 25 bp, Artificial
  Probe
gcataaagtccgtgactgaattcaa

SEQ ID NO: 290681 - DNA, 25 bp, Artificial
  Probe
tcaaaggcataaagtccgtgactga

SEQ ID NO: 290682 - DNA, 25 bp, Artificial
  Probe
tggcctgacagacagagctgttggt

SEQ ID NO: 290683 - DNA, 25 bp, Artificial
  Probe
agcccttcatgaaggcgatgggtct

SEQ ID NO: 290684 - DNA, 25 bp, Artificial
  Probe
tcatgaaggcgatgggtctgcctga

SEQ ID NO: 290685 - DNA, 25 bp, Artificial
  Probe
cataaagtccgtgactgaattcaat

SEQ ID NO: 290686 - DNA, 25 bp, Artificial
  Probe
acagacagagctgttggtggcagct

SEQ ID NO: 290687 - DNA, 25 bp, Artificial
  Probe
caccatcacctatgggtccaaggtg

SEQ ID NO: 290688 - DNA, 25 bp, Artificial
  Probe
ttagacaaggctgtatttcatattc

SEQ ID NO: 290689 - DNA, 25 bp, Artificial
  Probe
tctacaagagagtcagcaagagaat

SEQ ID NO: 290690 - DNA, 25 bp, Artificial
  Probe
gacaactttcaaaggcataaagtcc

SEQ ID NO: 290691 - DNA, 25 bp, Artificial
  Probe
catgacactgggtgacatcgtctac

SEQ ID NO: 290692 - DNA, 25 bp, Artificial
  Probe
actgggtgacatcgtctacaagaga

SEQ ID NO: 290693 - DNA, 25 bp, Artificial
  Probe
ttcatgaaggcgatgggtctgcctg

SEQ ID NO: 290694 - DNA, 25 bp, Artificial
  Probe
cgtctacaagagagtcagcaagaga

SEQ ID NO: 290695 - DNA, 25 bp, Artificial
  Probe
gaaaggaaacctcattgccaccatg

SEQ ID NO: 290696 - DNA, 25 bp, Artificial
  Probe
ggtgacaactttcaaaggcataaag

SEQ ID NO: 290697 - DNA, 25 bp, Artificial
  Probe
gacatcgtctacaagagagtcagca

SEQ ID NO: 290698 - DNA, 25 bp, Artificial
  Probe
aactttgagcccttcatgaaggcga

SEQ ID NO: 290699 - DNA, 25 bp, Artificial
  Probe
accatgaacttctccggcaagtacc

SEQ ID NO: 290700 - DNA, 25 bp, Artificial
  Probe
agacaaggctgtatttcatattctt

SEQ ID NO: 290701 - DNA, 25 bp, Artificial
  Probe
accaataccatgacactgggtgaca

SEQ ID NO: 290702 - DNA, 25 bp, Artificial
  Probe
tcaccaataccatgacactgggtga

SEQ ID NO: 290703 - DNA, 25 bp, Artificial
  Probe
aggaaacctcattgccaccatgaac

SEQ ID NO: 290704 - DNA, 25 bp, Artificial
  Probe
acttctccggcaagtaccaagtgca

SEQ ID NO: 290705 - DNA, 25 bp, Artificial
  Probe
ctccggcaagtaccaagtgcagagc

SEQ ID NO: 290706 - DNA, 25 bp, Artificial
  Probe
tgggtctgcctgaggacctcatcca

SEQ ID NO: 290707 - DNA, 25 bp, Artificial
  Probe
ccggcaagtaccaagtgcagagcca

SEQ ID NO: 290708 - DNA, 25 bp, Artificial
  Probe
actcaccatcacctatgggtccaag

SEQ ID NO: 290709 - DNA, 25 bp, Artificial
  Probe
ataccatgacactgggtgacatcgt

SEQ ID NO: 290710 - DNA, 25 bp, Artificial
  Probe
tggtgacaactttcaaaggcataaa

SEQ ID NO: 290711 - DNA, 25 bp, Artificial
  Probe
ggctgtatttcatattcttttacag

SEQ ID NO: 290712 - DNA, 25 bp, Artificial
  Probe
aaagtccgtgactgaattcaatgga

SEQ ID NO: 290713 - DNA, 25 bp, Artificial
  Probe
actttcaaaggcataaagtccgtga

SEQ ID NO: 290714 - DNA, 25 bp, Artificial
  Probe
atgacactgggtgacatcgtctaca

SEQ ID NO: 290715 - DNA, 25 bp, Artificial
  Probe
gagcccttcatgaaggcgatgggtc

SEQ ID NO: 290716 - DNA, 25 bp, Artificial
  Probe
caatcaccaataccatgacactggg

SEQ ID NO: 290717 - DNA, 25 bp, Artificial
  Probe
agtcaaactcaccatcacctatggg

SEQ ID NO: 290718 - DNA, 25 bp, Artificial
  Probe
agtaaaggtgcccaagaaattatat

SEQ ID NO: 290719 - DNA, 25 bp, Artificial
  Probe
ttgtttacttttagaccaaagattg

SEQ ID NO: 290720 - DNA, 25 bp, Artificial
  Probe
aaatgcacttggtatactaagtatt

SEQ ID NO: 290721 - DNA, 25 bp, Artificial
  Probe
tagcaaatgcacttggtatactaag

SEQ ID NO: 290722 - DNA, 25 bp, Artificial
  Probe
tggattctagcaaatgcacttggta

SEQ ID NO: 290723 - DNA, 25 bp, Artificial
  Probe
ttttagaccaaagattggattctag

SEQ ID NO: 290724 - DNA, 25 bp, Artificial
  Probe
agattggattctagcaaatgcactt

SEQ ID NO: 290725 - DNA, 25 bp, Artificial
  Probe
taaaggtgcccaagaaattatattg

SEQ ID NO: 290726 - DNA, 25 bp, Artificial
  Probe
cgcaggccttgaagaacaacctaaa

SEQ ID NO: 290727 - DNA, 25 bp, Artificial
  Probe
atggatctatctggtggacgcaggc

SEQ ID NO: 290728 - DNA, 25 bp, Artificial
  Probe
tggacgcaggccttgaagaacaacc

SEQ ID NO: 290729 - DNA, 25 bp, Artificial
  Probe
gattctagcaaatgcacttggtata

SEQ ID NO: 290730 - DNA, 25 bp, Artificial
  Probe
gtggacgcaggccttgaagaacaac

SEQ ID NO: 290731 - DNA, 25 bp, Artificial
  Probe
aatgcacttggtatactaagtatta

SEQ ID NO: 290732 - DNA, 25 bp, Artificial
  Probe
ccttgaagaacaacctaaattatga

SEQ ID NO: 290733 - DNA, 25 bp, Artificial
  Probe
aaattatattggccatttattgttt

SEQ ID NO: 290734 - DNA, 25 bp, Artificial
  Probe
atctggtggacgcaggccttgaaga

SEQ ID NO: 290735 - DNA, 25 bp, Artificial
  Probe
ttctagcaaatgcacttggtatact

SEQ ID NO: 290736 - DNA, 25 bp, Artificial
  Probe
ctggtggacgcaggccttgaagaac

SEQ ID NO: 290737 - DNA, 25 bp, Artificial
  Probe
tggccatttattgttttgtcctttt

SEQ ID NO: 290738 - DNA, 25 bp, Artificial
  Probe
tctatctggtggacgcaggccttga

SEQ ID NO: 290739 - DNA, 25 bp, Artificial
  Probe
gatctatctggtggacgcaggcctt

SEQ ID NO: 290740 - DNA, 25 bp, Artificial
  Probe
cttttagaccaaagattggattcta

SEQ ID NO: 290741 - DNA, 25 bp, Artificial
  Probe
gacgcaggccttgaagaacaaccta

SEQ ID NO: 290742 - DNA, 25 bp, Artificial
  Probe
ctagcaaatgcacttggtatactaa

SEQ ID NO: 290743 - DNA, 25 bp, Artificial
  Probe
aagaacaacctaaattatgaagaga

SEQ ID NO: 290744 - DNA, 25 bp, Artificial
  Probe
gccttgaagaacaacctaaattatg

SEQ ID NO: 290745 - DNA, 25 bp, Artificial
  Probe
tggatctatctggtggacgcaggcc

SEQ ID NO: 290746 - DNA, 25 bp, Artificial
  Probe
ggatctatctggtggacgcaggcct

SEQ ID NO: 290747 - DNA, 25 bp, Artificial
  Probe
acaacctaaattatgaagagagttt

SEQ ID NO: 290748 - DNA, 25 bp, Artificial
  Probe
ttgtagtaaaggtgcccaagaaatt

SEQ ID NO: 290749 - DNA, 25 bp, Artificial
  Probe
ggacgcaggccttgaagaacaacct

SEQ ID NO: 290750 - DNA, 25 bp, Artificial
  Probe
agcaaatgcacttggtatactaagt

SEQ ID NO: 290751 - DNA, 25 bp, Artificial
  Probe
tgtttacttttagaccaaagattgg

SEQ ID NO: 290752 - DNA, 25 bp, Artificial
  Probe
tctggtggacgcaggccttgaagaa

SEQ ID NO: 290753 - DNA, 25 bp, Artificial
  Probe
aaggtgcccaagaaattatattggc

SEQ ID NO: 290754 - DNA, 25 bp, Artificial
  Probe
ggattctagcaaatgcacttggtat

SEQ ID NO: 290755 - DNA, 25 bp, Artificial
  Probe
acgcaggccttgaagaacaacctaa

SEQ ID NO: 290756 - DNA, 25 bp, Artificial
  Probe
atctatctggtggacgcaggccttg

SEQ ID NO: 290757 - DNA, 25 bp, Artificial
  Probe
tctagcaaatgcacttggtatacta

SEQ ID NO: 290758 - DNA, 25 bp, Artificial
  Probe
attctagcaaatgcacttggtatac

SEQ ID NO: 290759 - DNA, 25 bp, Artificial
  Probe
tgtagtaaaggtgcccaagaaatta

SEQ ID NO: 290760 - DNA, 25 bp, Artificial
  Probe
acttttagaccaaagattggattct

SEQ ID NO: 290761 - DNA, 25 bp, Artificial
  Probe
caaatgcacttggtatactaagtat

SEQ ID NO: 290762 - DNA, 25 bp, Artificial
  Probe
gccatttattgttttgtccttttct

SEQ ID NO: 290763 - DNA, 25 bp, Artificial
  Probe
gcaaatgcacttggtatactaagta

SEQ ID NO: 290764 - DNA, 25 bp, Artificial
  Probe
cttgcagtgtggacgccacgtcgat

SEQ ID NO: 290765 - DNA, 25 bp, Artificial
  Probe
ggaccacaatggtcagctaccaacc

SEQ ID NO: 290766 - DNA, 25 bp, Artificial
  Probe
gaatgagccgcctctcaaaggtggc

SEQ ID NO: 290767 - DNA, 25 bp, Artificial
  Probe
cacaaatgtctgcttctggtttgta

SEQ ID NO: 290768 - DNA, 25 bp, Artificial
  Probe
tggtcatctcaaaccctgcagcaac

SEQ ID NO: 290769 - DNA, 25 bp, Artificial
  Probe
ctggtttgtacctcctagtttgcga

SEQ ID NO: 290770 - DNA, 25 bp, Artificial
  Probe
acaatggtcagctaccaacccttag

SEQ ID NO: 290771 - DNA, 25 bp, Artificial
  Probe
cgaacgcctgggacaagatttgtaa

SEQ ID NO: 290772 - DNA, 25 bp, Artificial
  Probe
actactggatttgaagctcacattg

SEQ ID NO: 290773 - DNA, 25 bp, Artificial
  Probe
caagacattgacttcctcattgaag

SEQ ID NO: 290774 - DNA, 25 bp, Artificial
  Probe
ttccgcatggtcatctcaaaccctg

SEQ ID NO: 290775 - DNA, 25 bp, Artificial
  Probe
tcatgtggagagcaaaggggactac

SEQ ID NO: 290776 - DNA, 25 bp, Artificial
  Probe
gaaatggtgttcgatgggaagcctc

SEQ ID NO: 290777 - DNA, 25 bp, Artificial
  Probe
accaaactttcagttctctaggtag

SEQ ID NO: 290778 - DNA, 25 bp, Artificial
  Probe
agataaggtcaacttcttccgcatg

SEQ ID NO: 290779 - DNA, 25 bp, Artificial
  Probe
aattctatttctatatcgtggtgtc

SEQ ID NO: 290780 - DNA, 25 bp, Artificial
  Probe
cgcctgggacaagatttgtaatcac

SEQ ID NO: 290781 - DNA, 25 bp, Artificial
  Probe
tgaagaaatcgaacgcctgggacaa

SEQ ID NO: 290782 - DNA, 25 bp, Artificial
  Probe
aggtcaacttcttccgcatggtcat

SEQ ID NO: 290783 - DNA, 25 bp, Artificial
  Probe
acaaggccttgcagtgtggacgcca

SEQ ID NO: 290784 - DNA, 25 bp, Artificial
  Probe
aaggggactactggatttgaagctc

SEQ ID NO: 290785 - DNA, 25 bp, Artificial
  Probe
ctcacattgataagtgtttggagct

SEQ ID NO: 290786 - DNA, 25 bp, Artificial
  Probe
cctgcagcaactcaccaagacattg

SEQ ID NO: 290787 - DNA, 25 bp, Artificial
  Probe
tggcgccagtgattaaagccagaat

SEQ ID NO: 290788 - DNA, 25 bp, Artificial
  Probe
ctagtttgcgagttctggaagacaa

SEQ ID NO: 290789 - DNA, 25 bp, Artificial
  Probe
ttgaagaaatcgaacgcctgggaca

SEQ ID NO: 290790 - DNA, 25 bp, Artificial
  Probe
gtttgttccagagtaattctatttc

SEQ ID NO: 290791 - DNA, 25 bp, Artificial
  Probe
ctgtcctatgacacgggagacaagg

SEQ ID NO: 290792 - DNA, 25 bp, Artificial
  Probe
aaatcgaacgcctgggacaagattt

SEQ ID NO: 290793 - DNA, 25 bp, Artificial
  Probe
tgacacgggagacaaggccttgcag

SEQ ID NO: 290794 - DNA, 25 bp, Artificial
  Probe
tcctcattgaagaaatcgaacgcct

SEQ ID NO: 290795 - DNA, 25 bp, Artificial
  Probe
ctatgacacgggagacaaggccttg

SEQ ID NO: 290796 - DNA, 25 bp, Artificial
  Probe
ctctaggtagacagctaagttgtca

SEQ ID NO: 290797 - DNA, 25 bp, Artificial
  Probe
caacccttaggagataaggtcaact

SEQ ID NO: 290798 - DNA, 25 bp, Artificial
  Probe
agtatgggaccacaatggtcagcta

SEQ ID NO: 290799 - DNA, 25 bp, Artificial
  Probe
gacgccacgtcgatgtctttaaatt

SEQ ID NO: 290800 - DNA, 25 bp, Artificial
  Probe
cgatgggaagcctcagcacacaaat

SEQ ID NO: 290801 - DNA, 25 bp, Artificial
  Probe
ctaagttgtcacaaactgtgtaaat

SEQ ID NO: 290802 - DNA, 25 bp, Artificial
  Probe
gcagcaactcaccaagacattgact

SEQ ID NO: 290803 - DNA, 25 bp, Artificial
  Probe
agctaccaacccttaggagataagg

SEQ ID NO: 290804 - DNA, 25 bp, Artificial
  Probe
agtgtggacgccacgtcgatgtctt

SEQ ID NO: 290805 - DNA, 25 bp, Artificial
  Probe
tcctagtttgcgagttctggaagac

SEQ ID NO: 290806 - DNA, 25 bp, Artificial
  Probe
gcctctcaaaggtggcgccagtgat

SEQ ID NO: 290807 - DNA, 25 bp, Artificial
  Probe
tagacagctaagttgtcacaaactg

SEQ ID NO: 290808 - DNA, 25 bp, Artificial
  Probe
aaaggtggcgccagtgattaaagcc

SEQ ID NO: 290809 - DNA, 25 bp, Artificial
  Probe
ctcatgtggagagcaaaggggacta

SEQ ID NO: 290810 - DNA, 25 bp, Artificial
  Probe
gcctccaagggagttctgaaaaagg

SEQ ID NO: 290811 - DNA, 25 bp, Artificial
  Probe
cctttggctgtgacctgtgtgggaa

SEQ ID NO: 290812 - DNA, 25 bp, Artificial
  Probe
tcagaggtcccgtggagccaatcag

SEQ ID NO: 290813 - DNA, 25 bp, Artificial
  Probe
cgcctccaagggagttctgaaaaag

SEQ ID NO: 290814 - DNA, 25 bp, Artificial
  Probe
agaactctgggcagctgctaaaagg

SEQ ID NO: 290815 - DNA, 25 bp, Artificial
  Probe
aacatagctagaacccgtgttctcc

SEQ ID NO: 290816 - DNA, 25 bp, Artificial
  Probe
accgatgcttttattgagaaagact

SEQ ID NO: 290817 - DNA, 25 bp, Artificial
  Probe
tataagatgcccaagctggcaggtg

SEQ ID NO: 290818 - DNA, 25 bp, Artificial
  Probe
ctaacccccaaaagctatcagtagg

SEQ ID NO: 290819 - DNA, 25 bp, Artificial
  Probe
gtgagaagccccacaaatgccaggt

SEQ ID NO: 290820 - DNA, 25 bp, Artificial
  Probe
acacactttcatccacacaggtgag

SEQ ID NO: 290821 - DNA, 25 bp, Artificial
  Probe
agccaatcagagtgggtgaaacggc

SEQ ID NO: 290822 - DNA, 25 bp, Artificial
  Probe
ggcttccagaggaaggtggatctca

SEQ ID NO: 290823 - DNA, 25 bp, Artificial
  Probe
ctgaagccgggaatcaaatgagatc

SEQ ID NO: 290824 - DNA, 25 bp, Artificial
  Probe
agactgctgacctctttgtcctcca

SEQ ID NO: 290825 - DNA, 25 bp, Artificial
  Probe
tggagcaaaggctgtggcctcaact

SEQ ID NO: 290826 - DNA, 25 bp, Artificial
  Probe
ggaaagtatccctttgaaatcatca

SEQ ID NO: 290827 - DNA, 25 bp, Artificial
  Probe
cccctgtcagtactgtggcaagagg

SEQ ID NO: 290828 - DNA, 25 bp, Artificial
  Probe
ttttgacacttctggagtttttcaa

SEQ ID NO: 290829 - DNA, 25 bp, Artificial
  Probe
atcactcatagcagaaagcacacag

SEQ ID NO: 290830 - DNA, 25 bp, Artificial
  Probe
gagaaagactgacctttctggggag

SEQ ID NO: 290831 - DNA, 25 bp, Artificial
  Probe
atctcaggaggcaccgagagactca

SEQ ID NO: 290832 - DNA, 25 bp, Artificial
  Probe
aactctgggcagctgctaaaagggg

SEQ ID NO: 290833 - DNA, 25 bp, Artificial
  Probe
tgaaaaaggccacacaaacattcga

SEQ ID NO: 290834 - DNA, 25 bp, Artificial
  Probe
tctggagtttttcaagcgtaaacga

SEQ ID NO: 290835 - DNA, 25 bp, Artificial
  Probe
gagcaaaggctgtggcctcaactgc

SEQ ID NO: 290836 - DNA, 25 bp, Artificial
  Probe
cttctcaggccctgagtccagtgtg

SEQ ID NO: 290837 - DNA, 25 bp, Artificial
  Probe
acacaggtttcaagccctttggctg

SEQ ID NO: 290838 - DNA, 25 bp, Artificial
  Probe
caccagaagtcagacatgaagaaac

SEQ ID NO: 290839 - DNA, 25 bp, Artificial
  Probe
cttccagaggaaggtggatctcagg

SEQ ID NO: 290840 - DNA, 25 bp, Artificial
  Probe
tgaaacggcagaggagcagctcctc

SEQ ID NO: 290841 - DNA, 25 bp, Artificial
  Probe
ctgaaaaaggccacacaaacattcg

SEQ ID NO: 290842 - DNA, 25 bp, Artificial
  Probe
cctgccaggagaaggagcaggaaaa

SEQ ID NO: 290843 - DNA, 25 bp, Artificial
  Probe
ccgcattaggtatgggagagccaga

SEQ ID NO: 290844 - DNA, 25 bp, Artificial
  Probe
aggcatcaccgcttgaactttggac

SEQ ID NO: 290845 - DNA, 25 bp, Artificial
  Probe
ccctttggctgtgacctgtgtggga

SEQ ID NO: 290846 - DNA, 25 bp, Artificial
  Probe
ggccacaggttatcagagtaaaaaa

SEQ ID NO: 290847 - DNA, 25 bp, Artificial
  Probe
aaaccgcattaggtatgggagagcc

SEQ ID NO: 290848 - DNA, 25 bp, Artificial
  Probe
cccaagctggcaggtgtggagcaaa

SEQ ID NO: 290849 - DNA, 25 bp, Artificial
  Probe
ccttcccggagctcctggaggagat

SEQ ID NO: 290850 - DNA, 25 bp, Artificial
  Probe
tgtgagggatgtcttccctgcctcc

SEQ ID NO: 290851 - DNA, 25 bp, Artificial
  Probe
gctcatcttggttattccccttcgt

SEQ ID NO: 290852 - DNA, 25 bp, Artificial
  Probe
tctactcattcactcggatacccgg

SEQ ID NO: 290853 - DNA, 25 bp, Artificial
  Probe
gaggtcatccacactgtccacacat

SEQ ID NO: 290854 - DNA, 25 bp, Artificial
  Probe
cgccccttatcatctaggaagaacg

SEQ ID NO: 290855 - DNA, 25 bp, Artificial
  Probe
caaatgccaggtgtgtggcaaagcc

SEQ ID NO: 290856 - DNA, 25 bp, Artificial
  Probe
ggggtttctggcacctacatgacaa

SEQ ID NO: 290857 - DNA, 25 bp, Artificial
  Probe
ctaccatatagtaaattgaggacca

SEQ ID NO: 290858 - DNA, 25 bp, Artificial
  Probe
gagcagatttctactctgctgtctg

SEQ ID NO: 290859 - DNA, 25 bp, Artificial
  Probe
gatgtccacaagaaatagatgtatc

SEQ ID NO: 290860 - DNA, 25 bp, Artificial
  Probe
aatagatgtatcctattgaccctgg

SEQ ID NO: 290861 - DNA, 25 bp, Artificial
  Probe
ctttatattgctttgacagagaaca

SEQ ID NO: 290862 - DNA, 25 bp, Artificial
  Probe
atgtccacaagaaatagatgtatcc

SEQ ID NO: 290863 - DNA, 25 bp, Artificial
  Probe
aggtgttgcagaatcacatgagcat

SEQ ID NO: 290864 - DNA, 25 bp, Artificial
  Probe
acatgatatgcaaggtcaagttctt

SEQ ID NO: 290865 - DNA, 25 bp, Artificial
  Probe
acaatgtctgtaattagtgtttcac

SEQ ID NO: 290866 - DNA, 25 bp, Artificial
  Probe
atagtctatagcattgttctttcag

SEQ ID NO: 290867 - DNA, 25 bp, Artificial
  Probe
ctcctgagctatgatatttacaatg

SEQ ID NO: 290868 - DNA, 25 bp, Artificial
  Probe
ccatttctgccctcattgtagctgt

SEQ ID NO: 290869 - DNA, 25 bp, Artificial
  Probe
ctaagtgttgtgcttgtaaatacac

SEQ ID NO: 290870 - DNA, 25 bp, Artificial
  Probe
caaaggacaggttctatgggcaagg

SEQ ID NO: 290871 - DNA, 25 bp, Artificial
  Probe
tgcccaagtgtaatttagctattgc

SEQ ID NO: 290872 - DNA, 25 bp, Artificial
  Probe
gactgacctgtaatttgtactttca

SEQ ID NO: 290873 - DNA, 25 bp, Artificial
  Probe
aaatgcttaccatctgacaatagtg

SEQ ID NO: 290874 - DNA, 25 bp, Artificial
  Probe
aaactgcacaaaattaaggtgttgc

SEQ ID NO: 290875 - DNA, 25 bp, Artificial
  Probe
gaccaaactttttcaggaaaatgct

SEQ ID NO: 290876 - DNA, 25 bp, Artificial
  Probe
gtcaagttcttgagggctggttatc

SEQ ID NO: 290877 - DNA, 25 bp, Artificial
  Probe
aacacaaatgactaagagcagattt

SEQ ID NO: 290878 - DNA, 25 bp, Artificial
  Probe
tcctattgaccctgggaccttcttt

SEQ ID NO: 290879 - DNA, 25 bp, Artificial
  Probe
tgggggcttccttgtgtattgcgta

SEQ ID NO: 290880 - DNA, 25 bp, Artificial
  Probe
gtctatagcattgttctttcagagg

SEQ ID NO: 290881 - DNA, 25 bp, Artificial
  Probe
tgccacagtatttatggagacggtg

SEQ ID NO: 290882 - DNA, 25 bp, Artificial
  Probe
gactaccatatagtaaattgaggac

SEQ ID NO: 290883 - DNA, 25 bp, Artificial
  Probe
gtaatttgtactttcaatccaagtg

SEQ ID NO: 290884 - DNA, 25 bp, Artificial
  Probe
ttcactttggctatacttatgtgtg

SEQ ID NO: 290885 - DNA, 25 bp, Artificial
  Probe
ttcacccaagaaatccttttgtggg

SEQ ID NO: 290886 - DNA, 25 bp, Artificial
  Probe
ttaaaacaagcctcctgagctatga

SEQ ID NO: 290887 - DNA, 25 bp, Artificial
  Probe
actgtactgtgattttcataacccg

SEQ ID NO: 290888 - DNA, 25 bp, Artificial
  Probe
cttccttgtgtattgcgtaattgat

SEQ ID NO: 290889 - DNA, 25 bp, Artificial
  Probe
attcggcatgaagatgtccacaaga

SEQ ID NO: 290890 - DNA, 25 bp, Artificial
  Probe
tctttatattgctttgacagagaac

SEQ ID NO: 290891 - DNA, 25 bp, Artificial
  Probe
taacccgttgccttttcggtatcag

SEQ ID NO: 290892 - DNA, 25 bp, Artificial
  Probe
gtgattttcataacccgttgccttt

SEQ ID NO: 290893 - DNA, 25 bp, Artificial
  Probe
gagtagctcaaacttcccatttctg

SEQ ID NO: 290894 - DNA, 25 bp, Artificial
  Probe
ctgtctgtgtaggtgtgcactttga

SEQ ID NO: 290895 - DNA, 25 bp, Artificial
  Probe
gtactttcaatccaagtgaatatcg

SEQ ID NO: 290896 - DNA, 25 bp, Artificial
  Probe
tgcagaatcacatgagcataactcc

SEQ ID NO: 290897 - DNA, 25 bp, Artificial
  Probe
tatgcaaggtcaagttcttgagggc

SEQ ID NO: 290898 - DNA, 25 bp, Artificial
  Probe
tgattggtgtatctcagagtagctc

SEQ ID NO: 290899 - DNA, 25 bp, Artificial
  Probe
gacaatagtgactaccatatagtaa

SEQ ID NO: 290900 - DNA, 25 bp, Artificial
  Probe
tcaggaaaatgctgcctcattttta

SEQ ID NO: 290901 - DNA, 25 bp, Artificial
  Probe
aactgcacaaaattaaggtgttgca

SEQ ID NO: 290902 - DNA, 25 bp, Artificial
  Probe
gccagggcttttgaacaggagtgtt

SEQ ID NO: 290903 - DNA, 25 bp, Artificial
  Probe
acttcaaatagagtgtcccagaaga

SEQ ID NO: 290904 - DNA, 25 bp, Artificial
  Probe
ggcttttgaacaggagtgttccaca

SEQ ID NO: 290905 - DNA, 25 bp, Artificial
  Probe
catacttcaaatagagtgtcccaga

SEQ ID NO: 290906 - DNA, 25 bp, Artificial
  Probe
cttttgaacaggagtgttccacaga

SEQ ID NO: 290907 - DNA, 25 bp, Artificial
  Probe
gacacttgggaacttgttatgcagt

SEQ ID NO: 290908 - DNA, 25 bp, Artificial
  Probe
attgaaccatacttcaaatagagtg

SEQ ID NO: 290909 - DNA, 25 bp, Artificial
  Probe
gaaccatacttcaaatagagtgtcc

SEQ ID NO: 290910 - DNA, 25 bp, Artificial
  Probe
tcaaatagagtgtcccagaagaaaa

SEQ ID NO: 290911 - DNA, 25 bp, Artificial
  Probe
acaggagtgttccacagaagtacca

SEQ ID NO: 290912 - DNA, 25 bp, Artificial
  Probe
gaacaggagtgttccacagaagtac

SEQ ID NO: 290913 - DNA, 25 bp, Artificial
  Probe
tgttccacagaagtaccagacatta

SEQ ID NO: 290914 - DNA, 25 bp, Artificial
  Probe
ttcaaatagagtgtcccagaagaaa

SEQ ID NO: 290915 - DNA, 25 bp, Artificial
  Probe
ccagggcttttgaacaggagtgttc

SEQ ID NO: 290916 - DNA, 25 bp, Artificial
  Probe
cttcaaatagagtgtcccagaagaa

SEQ ID NO: 290917 - DNA, 25 bp, Artificial
  Probe
ggacacttgggaacttgttatgcag

SEQ ID NO: 290918 - DNA, 25 bp, Artificial
  Probe
gagtgttccacagaagtaccagaca

SEQ ID NO: 290919 - DNA, 25 bp, Artificial
  Probe
tacttcaaatagagtgtcccagaag

SEQ ID NO: 290920 - DNA, 25 bp, Artificial
  Probe
ttgaaccatacttcaaatagagtgt

SEQ ID NO: 290921 - DNA, 25 bp, Artificial
  Probe
ctggccagggcttttgaacaggagt

SEQ ID NO: 290922 - DNA, 25 bp, Artificial
  Probe
tgaaccatacttcaaatagagtgtc

SEQ ID NO: 290923 - DNA, 25 bp, Artificial
  Probe
gtgttccacagaagtaccagacatt

SEQ ID NO: 290924 - DNA, 25 bp, Artificial
  Probe
acacttgggaacttgttatgcagtc

SEQ ID NO: 290925 - DNA, 25 bp, Artificial
  Probe
aggagtgttccacagaagtaccaga

SEQ ID NO: 290926 - DNA, 25 bp, Artificial
  Probe
gttccacagaagtaccagacattat

SEQ ID NO: 290927 - DNA, 25 bp, Artificial
  Probe
ggagtgttccacagaagtaccagac

SEQ ID NO: 290928 - DNA, 25 bp, Artificial
  Probe
ttgaacaggagtgttccacagaagt

SEQ ID NO: 290929 - DNA, 25 bp, Artificial
  Probe
aacaggagtgttccacagaagtacc

SEQ ID NO: 290930 - DNA, 25 bp, Artificial
  Probe
gggacacttgggaacttgttatgca

SEQ ID NO: 290931 - DNA, 25 bp, Artificial
  Probe
tgaacaggagtgttccacagaagta

SEQ ID NO: 290932 - DNA, 25 bp, Artificial
  Probe
agggcttttgaacaggagtgttcca

SEQ ID NO: 290933 - DNA, 25 bp, Artificial
  Probe
ccatacttcaaatagagtgtcccag

SEQ ID NO: 290934 - DNA, 25 bp, Artificial
  Probe
actggccagggcttttgaacaggag

SEQ ID NO: 290935 - DNA, 25 bp, Artificial
  Probe
agtgttccacagaagtaccagacat

SEQ ID NO: 290936 - DNA, 25 bp, Artificial
  Probe
caggagtgttccacagaagtaccag

SEQ ID NO: 290937 - DNA, 25 bp, Artificial
  Probe
cttgaacctgccttatagcctaggg

SEQ ID NO: 290938 - DNA, 25 bp, Artificial
  Probe
ctataaggtcacaggccagtctacc

SEQ ID NO: 290939 - DNA, 25 bp, Artificial
  Probe
tattcttggcccactgagcctgtgc

SEQ ID NO: 290940 - DNA, 25 bp, Artificial
  Probe
gccacagattttgaagcagtagata

SEQ ID NO: 290941 - DNA, 25 bp, Artificial
  Probe
atcagttcaggattgggaatctaac

SEQ ID NO: 290942 - DNA, 25 bp, Artificial
  Probe
aggtcacaggccagtctaccagcac

SEQ ID NO: 290943 - DNA, 25 bp, Artificial
  Probe
ctgtccctatcgagcctcagatctg

SEQ ID NO: 290944 - DNA, 25 bp, Artificial
  Probe
atccaaactggtcttgaacctgcct

SEQ ID NO: 290945 - DNA, 25 bp, Artificial
  Probe
gtctggtctcactaagttatccaaa

SEQ ID NO: 290946 - DNA, 25 bp, Artificial
  Probe
attgggaatctaacctcacgcctgt

SEQ ID NO: 290947 - DNA, 25 bp, Artificial
  Probe
ttgtcctattcttggcccactgagc

SEQ ID NO: 290948 - DNA, 25 bp, Artificial
  Probe
tagcctagggcctataaggtcacag

SEQ ID NO: 290949 - DNA, 25 bp, Artificial
  Probe
gtcttcaacgcatttgtcatttctg

SEQ ID NO: 290950 - DNA, 25 bp, Artificial
  Probe
gccaggccgcctgtgcagtgatgaa

SEQ ID NO: 290951 - DNA, 25 bp, Artificial
  Probe
actggtcttgaacctgccttatagc

SEQ ID NO: 290952 - DNA, 25 bp, Artificial
  Probe
gagaagtcttcaacgcatttgtcat

SEQ ID NO: 290953 - DNA, 25 bp, Artificial
  Probe
gtcagggagtgtgtgacacgccaca

SEQ ID NO: 290954 - DNA, 25 bp, Artificial
  Probe
agttatccaaactggtcttgaacct

SEQ ID NO: 290955 - DNA, 25 bp, Artificial
  Probe
tgagcagtagcactctgctgccgcg

SEQ ID NO: 290956 - DNA, 25 bp, Artificial
  Probe
tcatttctgagctgcctgcattgtc

SEQ ID NO: 290957 - DNA, 25 bp, Artificial
  Probe
gcccactgagcctgtgcatatatga

SEQ ID NO: 290958 - DNA, 25 bp, Artificial
  Probe
ccaatgagaagtcttcaacgcattt

SEQ ID NO: 290959 - DNA, 25 bp, Artificial
  Probe
atgcaggccaccagtcccttttctt

SEQ ID NO: 290960 - DNA, 25 bp, Artificial
  Probe
tgatgcaggccaccagtcccttttc

SEQ ID NO: 290961 - DNA, 25 bp, Artificial
  Probe
aatgagaagtcttcaacgcatttgt

SEQ ID NO: 290962 - DNA, 25 bp, Artificial
  Probe
ccaaactggtcttgaacctgcctta

SEQ ID NO: 290963 - DNA, 25 bp, Artificial
  Probe
ttctgagctgcctgcattgtcctat

SEQ ID NO: 290964 - DNA, 25 bp, Artificial
  Probe
catgtgagcagtagcactctgctgc

SEQ ID NO: 290965 - DNA, 25 bp, Artificial
  Probe
cttggcccactgagcctgtgcatat

SEQ ID NO: 290966 - DNA, 25 bp, Artificial
  Probe
gggaatctaacctcacgcctgtcca

SEQ ID NO: 290967 - DNA, 25 bp, Artificial
  Probe
gtctcactaagttatccaaactggt

SEQ ID NO: 290968 - DNA, 25 bp, Artificial
  Probe
tctttttcagtctggtctcactaag

SEQ ID NO: 290969 - DNA, 25 bp, Artificial
  Probe
tatcgagcctcagatctgccaggcc

SEQ ID NO: 290970 - DNA, 25 bp, Artificial
  Probe
tggtctcactaagttatccaaactg

SEQ ID NO: 290971 - DNA, 25 bp, Artificial
  Probe
cactaagttatccaaactggtcttg

SEQ ID NO: 290972 - DNA, 25 bp, Artificial
  Probe
aacctgccttatagcctagggccta

SEQ ID NO: 290973 - DNA, 25 bp, Artificial
  Probe
cctatcgagcctcagatctgccagg

SEQ ID NO: 290974 - DNA, 25 bp, Artificial
  Probe
ttagtcagggagtgtgtgacacgcc

SEQ ID NO: 290975 - DNA, 25 bp, Artificial
  Probe
ccacgccacagattttgaagcagta

SEQ ID NO: 290976 - DNA, 25 bp, Artificial
  Probe
aggccgcctgtgcagtgatgaagct

SEQ ID NO: 290977 - DNA, 25 bp, Artificial
  Probe
tctgctgccgcgaggtgttagtcag

SEQ ID NO: 290978 - DNA, 25 bp, Artificial
  Probe
gtagcactctgctgccgcgaggtgt

SEQ ID NO: 290979 - DNA, 25 bp, Artificial
  Probe
aaaccaatgagaagtcttcaacgca

SEQ ID NO: 290980 - DNA, 25 bp, Artificial
  Probe
ccaacagaaaccaatgagaagtctt

SEQ ID NO: 290981 - DNA, 25 bp, Artificial
  Probe
cacatgtgagcagtagcactctgct

SEQ ID NO: 290982 - DNA, 25 bp, Artificial
  Probe
cactgagcctgtgcatatatgacag

SEQ ID NO: 290983 - DNA, 25 bp, Artificial
  Probe
aagaggctttcactgaattcttgcc

SEQ ID NO: 290984 - DNA, 25 bp, Artificial
  Probe
ttcttgccgcgtggttgacatctgc

SEQ ID NO: 290985 - DNA, 25 bp, Artificial
  Probe
attcttgccgcgtggttgacatctg

SEQ ID NO: 290986 - DNA, 25 bp, Artificial
  Probe
agagggaccatgtaccgagcagagg

SEQ ID NO: 290987 - DNA, 25 bp, Artificial
  Probe
catgtaccgagcagagggcaggaag

SEQ ID NO: 290988 - DNA, 25 bp, Artificial
  Probe
tgccgcgtggttgacatctgcagag

SEQ ID NO: 290989 - DNA, 25 bp, Artificial
  Probe
ggaccatgtaccgagcagagggcag

SEQ ID NO: 290990 - DNA, 25 bp, Artificial
  Probe
gccgcgtggttgacatctgcagagg

SEQ ID NO: 290991 - DNA, 25 bp, Artificial
  Probe
ggttgacatctgcagagggaccatg

SEQ ID NO: 290992 - DNA, 25 bp, Artificial
  Probe
agaggctttcactgaattcttgccg

SEQ ID NO: 290993 - DNA, 25 bp, Artificial
  Probe
atgtaccgagcagagggcaggaagt

SEQ ID NO: 290994 - DNA, 25 bp, Artificial
  Probe
catctgcagagggaccatgtaccga

SEQ ID NO: 290995 - DNA, 25 bp, Artificial
  Probe
cagagggaccatgtaccgagcagag

SEQ ID NO: 290996 - DNA, 25 bp, Artificial
  Probe
cttgccgcgtggttgacatctgcag

SEQ ID NO: 290997 - DNA, 25 bp, Artificial
  Probe
tctgcagagggaccatgtaccgagc

SEQ ID NO: 290998 - DNA, 25 bp, Artificial
  Probe
taaataaaaatcttcttcagctcca

SEQ ID NO: 290999 - DNA, 25 bp, Artificial
  Probe
ccgcgtggttgacatctgcagaggg

SEQ ID NO: 291000 - DNA, 25 bp, Artificial
  Probe
cgtggttgacatctgcagagggacc

SEQ ID NO: 291001 - DNA, 25 bp, Artificial
  Probe
gcgtggttgacatctgcagagggac

SEQ ID NO: 291002 - DNA, 25 bp, Artificial
  Probe
agggaccatgtaccgagcagagggc

SEQ ID NO: 291003 - DNA, 25 bp, Artificial
  Probe
agaagaggctttcactgaattcttg

SEQ ID NO: 291004 - DNA, 25 bp, Artificial
  Probe
gtggttgacatctgcagagggacca

SEQ ID NO: 291005 - DNA, 25 bp, Artificial
  Probe
tggttgacatctgcagagggaccat

SEQ ID NO: 291006 - DNA, 25 bp, Artificial
  Probe
tcactgaattcttgccgcgtggttg

SEQ ID NO: 291007 - DNA, 25 bp, Artificial
  Probe
ccgagcagagggcaggaagtcattg

SEQ ID NO: 291008 - DNA, 25 bp, Artificial
  Probe
aaataaaaatcttcttcagctccaa

SEQ ID NO: 291009 - DNA, 25 bp, Artificial
  Probe
atctgcagagggaccatgtaccgag

SEQ ID NO: 291010 - DNA, 25 bp, Artificial
  Probe
tgcagagggaccatgtaccgagcag

SEQ ID NO: 291011 - DNA, 25 bp, Artificial
  Probe
accatgtaccgagcagagggcagga

SEQ ID NO: 291012 - DNA, 25 bp, Artificial
  Probe
ttgccgcgtggttgacatctgcaga

SEQ ID NO: 291013 - DNA, 25 bp, Artificial
  Probe
ctgaattcttgccgcgtggttgaca

SEQ ID NO: 291014 - DNA, 25 bp, Artificial
  Probe
tcttgccgcgtggttgacatctgca

SEQ ID NO: 291015 - DNA, 25 bp, Artificial
  Probe
tttcactgaattcttgccgcgtggt

SEQ ID NO: 291016 - DNA, 25 bp, Artificial
  Probe
gaagaggctttcactgaattcttgc

SEQ ID NO: 291017 - DNA, 25 bp, Artificial
  Probe
tgacatctgcagagggaccatgtac

SEQ ID NO: 291018 - DNA, 25 bp, Artificial
  Probe
aggctttcactgaattcttgccgcg

SEQ ID NO: 291019 - DNA, 25 bp, Artificial
  Probe
aattcttgccgcgtggttgacatct

SEQ ID NO: 291020 - DNA, 25 bp, Artificial
  Probe
ataaataaaaatcttcttcagctcc

SEQ ID NO: 291021 - DNA, 25 bp, Artificial
  Probe
ttgacatctgcagagggaccatgta

SEQ ID NO: 291022 - DNA, 25 bp, Artificial
  Probe
ttcactgaattcttgccgcgtggtt

SEQ ID NO: 291023 - DNA, 25 bp, Artificial
  Probe
gaccatgtaccgagcagagggcagg

SEQ ID NO: 291024 - DNA, 25 bp, Artificial
  Probe
cactgaattcttgccgcgtggttga

SEQ ID NO: 291025 - DNA, 25 bp, Artificial
  Probe
gttgacatctgcagagggaccatgt

SEQ ID NO: 291026 - DNA, 25 bp, Artificial
  Probe
gacatctgcagagggaccatgtacc

SEQ ID NO: 291027 - DNA, 25 bp, Artificial
  Probe
ccatgtaccgagcagagggcaggaa

SEQ ID NO: 291028 - DNA, 25 bp, Artificial
  Probe
ataaaaatcttcttcagctccaaaa

SEQ ID NO: 291029 - DNA, 25 bp, Artificial
  Probe
gtggttgctgtggccttgggttggg

SEQ ID NO: 291030 - DNA, 25 bp, Artificial
  Probe
ttcataggggcattggaacattaaa

SEQ ID NO: 291031 - DNA, 25 bp, Artificial
  Probe
cttttcataggggcattggaacatt

SEQ ID NO: 291032 - DNA, 25 bp, Artificial
  Probe
ttgtggttgctgtggccttgggttg

SEQ ID NO: 291033 - DNA, 25 bp, Artificial
  Probe
ggttgctgtggccttgggttgggac

SEQ ID NO: 291034 - DNA, 25 bp, Artificial
  Probe
ctggggtttcttttcataggggcat

SEQ ID NO: 291035 - DNA, 25 bp, Artificial
  Probe
tgtggccttgggttgggacacagaa

SEQ ID NO: 291036 - DNA, 25 bp, Artificial
  Probe
taggctggggtttcttttcataggg

SEQ ID NO: 291037 - DNA, 25 bp, Artificial
  Probe
aataggctggggtttcttttcatag

SEQ ID NO: 291038 - DNA, 25 bp, Artificial
  Probe
caataggctggggtttcttttcata

SEQ ID NO: 291039 - DNA, 25 bp, Artificial
  Probe
agttgtggttgctgtggccttgggt

SEQ ID NO: 291040 - DNA, 25 bp, Artificial
  Probe
tagttgtggttgctgtggccttggg

SEQ ID NO: 291041 - DNA, 25 bp, Artificial
  Probe
tcttttcataggggcattggaacat

SEQ ID NO: 291042 - DNA, 25 bp, Artificial
  Probe
ggccttgggttgggacacagaaatt

SEQ ID NO: 291043 - DNA, 25 bp, Artificial
  Probe
tggccttgggttgggacacagaaat

SEQ ID NO: 291044 - DNA, 25 bp, Artificial
  Probe
gtggccttgggttgggacacagaaa

SEQ ID NO: 291045 - DNA, 25 bp, Artificial
  Probe
tttcataggggcattggaacattaa

SEQ ID NO: 291046 - DNA, 25 bp, Artificial
  Probe
ctgtggccttgggttgggacacaga

SEQ ID NO: 291047 - DNA, 25 bp, Artificial
  Probe
ttttcataggggcattggaacatta

SEQ ID NO: 291048 - DNA, 25 bp, Artificial
  Probe
gttgtggttgctgtggccttgggtt

SEQ ID NO: 291049 - DNA, 25 bp, Artificial
  Probe
ttgctgtggccttgggttgggacac

SEQ ID NO: 291050 - DNA, 25 bp, Artificial
  Probe
ataggctggggtttcttttcatagg

SEQ ID NO: 291051 - DNA, 25 bp, Artificial
  Probe
gctgtggccttgggttgggacacag

SEQ ID NO: 291052 - DNA, 25 bp, Artificial
  Probe
tggggtttcttttcataggggcatt

SEQ ID NO: 291053 - DNA, 25 bp, Artificial
  Probe
gtttcttttcataggggcattggaa

SEQ ID NO: 291054 - DNA, 25 bp, Artificial
  Probe
tggttgctgtggccttgggttggga

SEQ ID NO: 291055 - DNA, 25 bp, Artificial
  Probe
tgtggttgctgtggccttgggttgg

SEQ ID NO: 291056 - DNA, 25 bp, Artificial
  Probe
tcgaggttggggtggggccatccca

SEQ ID NO: 291057 - DNA, 25 bp, Artificial
  Probe
tgctgtggccttgggttgggacaca

SEQ ID NO: 291058 - DNA, 25 bp, Artificial
  Probe
gctggggtttcttttcataggggca

SEQ ID NO: 291059 - DNA, 25 bp, Artificial
  Probe
gaaatcgaggttggggtggggccat

SEQ ID NO: 291060 - DNA, 25 bp, Artificial
  Probe
tttcttttcataggggcattggaac

SEQ ID NO: 291061 - DNA, 25 bp, Artificial
  Probe
gaggttggggtggggccatcccact

SEQ ID NO: 291062 - DNA, 25 bp, Artificial
  Probe
gggtttcttttcataggggcattgg

SEQ ID NO: 291063 - DNA, 25 bp, Artificial
  Probe
ggtttcttttcataggggcattgga

SEQ ID NO: 291064 - DNA, 25 bp, Artificial
  Probe
ttcttttcataggggcattggaaca

SEQ ID NO: 291065 - DNA, 25 bp, Artificial
  Probe
ccttgggttgggacacagaaattgg

SEQ ID NO: 291066 - DNA, 25 bp, Artificial
  Probe
gccttgggttgggacacagaaattg

SEQ ID NO: 291067 - DNA, 25 bp, Artificial
  Probe
gttgctgtggccttgggttgggaca

SEQ ID NO: 291068 - DNA, 25 bp, Artificial
  Probe
tcggcgcttctgtctagaatatgcc

SEQ ID NO: 291069 - DNA, 25 bp, Artificial
  Probe
cagcaatgccaaatatggataaaca

SEQ ID NO: 291070 - DNA, 25 bp, Artificial
  Probe
cttctgtctagaatatgcctgaaag

SEQ ID NO: 291071 - DNA, 25 bp, Artificial
  Probe
acacattgtactgaattggcagtaa

SEQ ID NO: 291072 - DNA, 25 bp, Artificial
  Probe
cacattgtactgaattggcagtaaa

SEQ ID NO: 291073 - DNA, 25 bp, Artificial
  Probe
cacacattgtactgaattggcagta

SEQ ID NO: 291074 - DNA, 25 bp, Artificial
  Probe
cagggtcggcgcttctgtctagaat

SEQ ID NO: 291075 - DNA, 25 bp, Artificial
  Probe
ggcgcttctgtctagaatatgcctg

SEQ ID NO: 291076 - DNA, 25 bp, Artificial
  Probe
ttcatgctgaataacctgtagttta

SEQ ID NO: 291077 - DNA, 25 bp, Artificial
  Probe
tgttagtcagccatttacagcaatg

SEQ ID NO: 291078 - DNA, 25 bp, Artificial
  Probe
tacagcaatgccaaatatggataaa

SEQ ID NO: 291079 - DNA, 25 bp, Artificial
  Probe
agggtcggcgcttctgtctagaata

SEQ ID NO: 291080 - DNA, 25 bp, Artificial
  Probe
gtcagccatttacagcaatgccaaa

SEQ ID NO: 291081 - DNA, 25 bp, Artificial
  Probe
attcatgctgaataacctgtagttt

SEQ ID NO: 291082 - DNA, 25 bp, Artificial
  Probe
acagcaatgccaaatatggataaac

SEQ ID NO: 291083 - DNA, 25 bp, Artificial
  Probe
catttacagcaatgccaaatatgga

SEQ ID NO: 291084 - DNA, 25 bp, Artificial
  Probe
gccatttacagcaatgccaaatatg

SEQ ID NO: 291085 - DNA, 25 bp, Artificial
  Probe
tctgtctagaatatgcctgaaagga

SEQ ID NO: 291086 - DNA, 25 bp, Artificial
  Probe
agcaatgccaaatatggataaacat

SEQ ID NO: 291087 - DNA, 25 bp, Artificial
  Probe
ttctgtctagaatatgcctgaaagg

SEQ ID NO: 291088 - DNA, 25 bp, Artificial
  Probe
tagtcagccatttacagcaatgcca

SEQ ID NO: 291089 - DNA, 25 bp, Artificial
  Probe
gcttctgtctagaatatgcctgaaa

SEQ ID NO: 291090 - DNA, 25 bp, Artificial
  Probe
ccacacattgtactgaattggcagt

SEQ ID NO: 291091 - DNA, 25 bp, Artificial
  Probe
ccatttacagcaatgccaaatatgg

SEQ ID NO: 291092 - DNA, 25 bp, Artificial
  Probe
cggcgcttctgtctagaatatgcct

SEQ ID NO: 291093 - DNA, 25 bp, Artificial
  Probe
tattcatgctgaataacctgtagtt

SEQ ID NO: 291094 - DNA, 25 bp, Artificial
  Probe
gggtcggcgcttctgtctagaatat

SEQ ID NO: 291095 - DNA, 25 bp, Artificial
  Probe
cgcttctgtctagaatatgcctgaa

SEQ ID NO: 291096 - DNA, 25 bp, Artificial
  Probe
taaatgttagtcagccatttacagc

SEQ ID NO: 291097 - DNA, 25 bp, Artificial
  Probe
agtcagccatttacagcaatgccaa

SEQ ID NO: 291098 - DNA, 25 bp, Artificial
  Probe
ctgtctagaatatgcctgaaaggat

SEQ ID NO: 291099 - DNA, 25 bp, Artificial
  Probe
gtcggcgcttctgtctagaatatgc

SEQ ID NO: 291100 - DNA, 25 bp, Artificial
  Probe
tcatgctgaataacctgtagtttaa

SEQ ID NO: 291101 - DNA, 25 bp, Artificial
  Probe
catgctgaataacctgtagtttaaa

SEQ ID NO: 291102 - DNA, 25 bp, Artificial
  Probe
ggtcggcgcttctgtctagaatatg

SEQ ID NO: 291103 - DNA, 25 bp, Artificial
  Probe
gcgcttctgtctagaatatgcctga

SEQ ID NO: 291104 - DNA, 25 bp, Artificial
  Probe
gttagtcagccatttacagcaatgc

SEQ ID NO: 291105 - DNA, 25 bp, Artificial
  Probe
ttagtcagccatttacagcaatgcc

SEQ ID NO: 291106 - DNA, 25 bp, Artificial
  Probe
gaccagagtccctcacagacagagt

SEQ ID NO: 291107 - DNA, 25 bp, Artificial
  Probe
acctctgcagagacgccccgaggaa

SEQ ID NO: 291108 - DNA, 25 bp, Artificial
  Probe
acctgggtgacctctcagggggtca

SEQ ID NO: 291109 - DNA, 25 bp, Artificial
  Probe
actctggagatgacccccgaggtca

SEQ ID NO: 291110 - DNA, 25 bp, Artificial
  Probe
tacctctgcagagacgccccgagga

SEQ ID NO: 291111 - DNA, 25 bp, Artificial
  Probe
tatacccgctacctgggtgacctct

SEQ ID NO: 291112 - DNA, 25 bp, Artificial
  Probe
aggaacacaaagaccagagtccctc

SEQ ID NO: 291113 - DNA, 25 bp, Artificial
  Probe
gcctggcttttttcaccttcccgag

SEQ ID NO: 291114 - DNA, 25 bp, Artificial
  Probe
gcactgctgacagaggaacacaaag

SEQ ID NO: 291115 - DNA, 25 bp, Artificial
  Probe
gaagattgcgcagaaggccatggcc

SEQ ID NO: 291116 - DNA, 25 bp, Artificial
  Probe
cagatcagcactagttcatcccaga

SEQ ID NO: 291117 - DNA, 25 bp, Artificial
  Probe
cctgctcaacattgagctgtttgag

SEQ ID NO: 291118 - DNA, 25 bp, Artificial
  Probe
gcttttttcaccttcccgagcatcg

SEQ ID NO: 291119 - DNA, 25 bp, Artificial
  Probe
gcatatacccgctacctgggtgacc

SEQ ID NO: 291120 - DNA, 25 bp, Artificial
  Probe
agattgcgcagaaggccatggcctt

SEQ ID NO: 291121 - DNA, 25 bp, Artificial
  Probe
actgctgacagaggaacacaaagac

SEQ ID NO: 291122 - DNA, 25 bp, Artificial
  Probe
tcaggtcctgaagaagattgcgcag

SEQ ID NO: 291123 - DNA, 25 bp, Artificial
  Probe
agatactacctctgcagagacgccc

SEQ ID NO: 291124 - DNA, 25 bp, Artificial
  Probe
cattgagctgtttgaggagctgcag

SEQ ID NO: 291125 - DNA, 25 bp, Artificial
  Probe
aggccatggccttgccaagctctgg

SEQ ID NO: 291126 - DNA, 25 bp, Artificial
  Probe
catggccttgccaagctctggggaa

SEQ ID NO: 291127 - DNA, 25 bp, Artificial
  Probe
gacagagtttcttcgccagaggcct

SEQ ID NO: 291128 - DNA, 25 bp, Artificial
  Probe
ccgctacctgggtgacctctcaggg

SEQ ID NO: 291129 - DNA, 25 bp, Artificial
  Probe
gatcagcactagttcatcccagaca

SEQ ID NO: 291130 - DNA, 25 bp, Artificial
  Probe
cagaggcctgctagcctggttcaag

SEQ ID NO: 291131 - DNA, 25 bp, Artificial
  Probe
agacaccgctcctgcgatgggtcct

SEQ ID NO: 291132 - DNA, 25 bp, Artificial
  Probe
agtttcttcgccagaggcctgctag

SEQ ID NO: 291133 - DNA, 25 bp, Artificial
  Probe
ggcctgctagcctggttcaagatac

SEQ ID NO: 291134 - DNA, 25 bp, Artificial
  Probe
cgccttcctgctcaacattgagctg

SEQ ID NO: 291135 - DNA, 25 bp, Artificial
  Probe
accaagttcaaacagctctatcgtg

SEQ ID NO: 291136 - DNA, 25 bp, Artificial
  Probe
ggtcaggtcctgaagaagattgcgc

SEQ ID NO: 291137 - DNA, 25 bp, Artificial
  Probe
caaagaccagagtccctcacagaca

SEQ ID NO: 291138 - DNA, 25 bp, Artificial
  Probe
agctgcaggcactgctgacagagga

SEQ ID NO: 291139 - DNA, 25 bp, Artificial
  Probe
tcgccagaggcctgctagcctggtt

SEQ ID NO: 291140 - DNA, 25 bp, Artificial
  Probe
agctgtttgaggagctgcaggcact

SEQ ID NO: 291141 - DNA, 25 bp, Artificial
  Probe
cgcagaaggccatggccttgccaag

SEQ ID NO: 291142 - DNA, 25 bp, Artificial
  Probe
tactcatcctgagctgctggtggcc

SEQ ID NO: 291143 - DNA, 25 bp, Artificial
  Probe
gaagaggctaagaccgccttcctgc

SEQ ID NO: 291144 - DNA, 25 bp, Artificial
  Probe
tcctgcgatgggtcctcacactcag

SEQ ID NO: 291145 - DNA, 25 bp, Artificial
  Probe
gctctatcgtgctcgcatgaacact

SEQ ID NO: 291146 - DNA, 25 bp, Artificial
  Probe
cgaggtcaagcacagggtgacagaa

SEQ ID NO: 291147 - DNA, 25 bp, Artificial
  Probe
ttgaggagctgcaggcactgctgac

SEQ ID NO: 291148 - DNA, 25 bp, Artificial
  Probe
tttcttcgccagaggcctgctagcc

SEQ ID NO: 291149 - DNA, 25 bp, Artificial
  Probe
agatgacccccgaggtcaagcacag

SEQ ID NO: 291150 - DNA, 25 bp, Artificial
  Probe
tatcgtgctcgcatgaacactctgg

SEQ ID NO: 291151 - DNA, 25 bp, Artificial
  Probe
atggccttgccaagctctggggaag

SEQ ID NO: 291152 - DNA, 25 bp, Artificial
  Probe
accataagttgtcttgtcactttct

SEQ ID NO: 291153 - DNA, 25 bp, Artificial
  Probe
ataagttgtcttgtcactttctttt

SEQ ID NO: 291154 - DNA, 25 bp, Artificial
  Probe
tgtcttgtcactttctttttatttt

SEQ ID NO: 291155 - DNA, 25 bp, Artificial
  Probe
tcttgtcactttctttttatttttg

SEQ ID NO: 291156 - DNA, 25 bp, Artificial
  Probe
ttttatttttgtaccacattaggat

SEQ ID NO: 291157 - DNA, 25 bp, Artificial
  Probe
attaggatgcattgtcatgcgtatt

SEQ ID NO: 291158 - DNA, 25 bp, Artificial
  Probe
taagttgtcttgtcactttcttttt

SEQ ID NO: 291159 - DNA, 25 bp, Artificial
  Probe
tatttttgtaccacattaggatgca

SEQ ID NO: 291160 - DNA, 25 bp, Artificial
  Probe
ttgtaccacattaggatgcattgtc

SEQ ID NO: 291161 - DNA, 25 bp, Artificial
  Probe
aggatgcattgtcatgcgtattttt

SEQ ID NO: 291162 - DNA, 25 bp, Artificial
  Probe
ttgtcttgtcactttctttttattt

SEQ ID NO: 291163 - DNA, 25 bp, Artificial
  Probe
tttttgtaccacattaggatgcatt

SEQ ID NO: 291164 - DNA, 25 bp, Artificial
  Probe
atttttgtaccacattaggatgcat

SEQ ID NO: 291165 - DNA, 25 bp, Artificial
  Probe
atgcattgtcatgcgtatttttggt

SEQ ID NO: 291166 - DNA, 25 bp, Artificial
  Probe
tctttttatttttgtaccacattag

SEQ ID NO: 291167 - DNA, 25 bp, Artificial
  Probe
ccacattaggatgcattgtcatgcg

SEQ ID NO: 291168 - DNA, 25 bp, Artificial
  Probe
gcattgtcatgcgtatttttggtag

SEQ ID NO: 291169 - DNA, 25 bp, Artificial
  Probe
tttgtaccacattaggatgcattgt

SEQ ID NO: 291170 - DNA, 25 bp, Artificial
  Probe
gtaccacattaggatgcattgtcat

SEQ ID NO: 291171 - DNA, 25 bp, Artificial
  Probe
cattaggatgcattgtcatgcgtat

SEQ ID NO: 291172 - DNA, 25 bp, Artificial
  Probe
taggatgcattgtcatgcgtatttt

SEQ ID NO: 291173 - DNA, 25 bp, Artificial
  Probe
cattgtcatgcgtatttttggtaga

SEQ ID NO: 291174 - DNA, 25 bp, Artificial
  Probe
agtgaccataagttgtcttgtcact

SEQ ID NO: 291175 - DNA, 25 bp, Artificial
  Probe
ttatttttgtaccacattaggatgc

SEQ ID NO: 291176 - DNA, 25 bp, Artificial
  Probe
gaccataagttgtcttgtcactttc

SEQ ID NO: 291177 - DNA, 25 bp, Artificial
  Probe
gatgcattgtcatgcgtatttttgg

SEQ ID NO: 291178 - DNA, 25 bp, Artificial
  Probe
tgaccataagttgtcttgtcacttt

SEQ ID NO: 291179 - DNA, 25 bp, Artificial
  Probe
gtgaccataagttgtcttgtcactt

SEQ ID NO: 291180 - DNA, 25 bp, Artificial
  Probe
accacattaggatgcattgtcatgc

SEQ ID NO: 291181 - DNA, 25 bp, Artificial
  Probe
tttatttttgtaccacattaggatg

SEQ ID NO: 291182 - DNA, 25 bp, Artificial
  Probe
gttgtcttgtcactttctttttatt

SEQ ID NO: 291183 - DNA, 25 bp, Artificial
  Probe
taccacattaggatgcattgtcatg

SEQ ID NO: 291184 - DNA, 25 bp, Artificial
  Probe
agttgtcttgtcactttctttttat

SEQ ID NO: 291185 - DNA, 25 bp, Artificial
  Probe
ggatgcattgtcatgcgtatttttg

SEQ ID NO: 291186 - DNA, 25 bp, Artificial
  Probe
cataagttgtcttgtcactttcttt

SEQ ID NO: 291187 - DNA, 25 bp, Artificial
  Probe
ttttgtaccacattaggatgcattg

SEQ ID NO: 291188 - DNA, 25 bp, Artificial
  Probe
ccataagttgtcttgtcactttctt

SEQ ID NO: 291189 - DNA, 25 bp, Artificial
  Probe
tgcattgtcatgcgtatttttggta

SEQ ID NO: 291190 - DNA, 25 bp, Artificial
  Probe
acattaggatgcattgtcatgcgta

SEQ ID NO: 291191 - DNA, 25 bp, Artificial
  Probe
tgtaccacattaggatgcattgtca

SEQ ID NO: 291192 - DNA, 25 bp, Artificial
  Probe
ttaggatgcattgtcatgcgtattt

SEQ ID NO: 291193 - DNA, 25 bp, Artificial
  Probe
gcgacagccaaggacattgccccta

SEQ ID NO: 291194 - DNA, 25 bp, Artificial
  Probe
caccccgagcgctctgtggtggata

SEQ ID NO: 291195 - DNA, 25 bp, Artificial
  Probe
cccgagcgctctgtggtggatatcg

SEQ ID NO: 291196 - DNA, 25 bp, Artificial
  Probe
tatcgggctgatcaagctcaaacag

SEQ ID NO: 291197 - DNA, 25 bp, Artificial
  Probe
tcaagctcaaacagaaagtgcttgt

SEQ ID NO: 291198 - DNA, 25 bp, Artificial
  Probe
acagaaagtgcttgtcactgagaaa

SEQ ID NO: 291199 - DNA, 25 bp, Artificial
  Probe
ctaccttaacactctatgtggggaa

SEQ ID NO: 291200 - DNA, 25 bp, Artificial
  Probe
agctcaaacagaaagtgcttgtcac

SEQ ID NO: 291201 - DNA, 25 bp, Artificial
  Probe
agaaggtagttctccaccccgagcg

SEQ ID NO: 291202 - DNA, 25 bp, Artificial
  Probe
tcgggctgatcaagctcaaacagaa

SEQ ID NO: 291203 - DNA, 25 bp, Artificial
  Probe
tggatatcgggctgatcaagctcaa

SEQ ID NO: 291204 - DNA, 25 bp, Artificial
  Probe
gctgatcaagctcaaacagaaagtg

SEQ ID NO: 291205 - DNA, 25 bp, Artificial
  Probe
agtgagaatgcgacagccaaggaca

SEQ ID NO: 291206 - DNA, 25 bp, Artificial
  Probe
ggatatcgggctgatcaagctcaaa

SEQ ID NO: 291207 - DNA, 25 bp, Artificial
  Probe
gtgagaatgcgacagccaaggacat

SEQ ID NO: 291208 - DNA, 25 bp, Artificial
  Probe
aacactctatgtggggaaaaaccag

SEQ ID NO: 291209 - DNA, 25 bp, Artificial
  Probe
accccgagcgctctgtggtggatat

SEQ ID NO: 291210 - DNA, 25 bp, Artificial
  Probe
cctaccttaacactctatgtgggga

SEQ ID NO: 291211 - DNA, 25 bp, Artificial
  Probe
acactctatgtggggaaaaaccagc

SEQ ID NO: 291212 - DNA, 25 bp, Artificial
  Probe
tgatcaagctcaaacagaaagtgct

SEQ ID NO: 291213 - DNA, 25 bp, Artificial
  Probe
cagaaagtgcttgtcactgagaaag

SEQ ID NO: 291214 - DNA, 25 bp, Artificial
  Probe
aatgcgacagccaaggacattgccc

SEQ ID NO: 291215 - DNA, 25 bp, Artificial
  Probe
gctcaaacagaaagtgcttgtcact

SEQ ID NO: 291216 - DNA, 25 bp, Artificial
  Probe
atatcgggctgatcaagctcaaaca

SEQ ID NO: 291217 - DNA, 25 bp, Artificial
  Probe
tctgtggtggatatcgggctgatca

SEQ ID NO: 291218 - DNA, 25 bp, Artificial
  Probe
ccctaccttaacactctatgtgggg

SEQ ID NO: 291219 - DNA, 25 bp, Artificial
  Probe
ctgtggtggatatcgggctgatcaa

SEQ ID NO: 291220 - DNA, 25 bp, Artificial
  Probe
cgggctgatcaagctcaaacagaaa

SEQ ID NO: 291221 - DNA, 25 bp, Artificial
  Probe
taccttaacactctatgtggggaaa

SEQ ID NO: 291222 - DNA, 25 bp, Artificial
  Probe
atcgggctgatcaagctcaaacaga

SEQ ID NO: 291223 - DNA, 25 bp, Artificial
  Probe
gatatcgggctgatcaagctcaaac

SEQ ID NO: 291224 - DNA, 25 bp, Artificial
  Probe
ctgatcaagctcaaacagaaagtgc

SEQ ID NO: 291225 - DNA, 25 bp, Artificial
  Probe
gggctgatcaagctcaaacagaaag

SEQ ID NO: 291226 - DNA, 25 bp, Artificial
  Probe
ggctgatcaagctcaaacagaaagt

SEQ ID NO: 291227 - DNA, 25 bp, Artificial
  Probe
ccccgagcgctctgtggtggatatc

SEQ ID NO: 291228 - DNA, 25 bp, Artificial
  Probe
gggaaaaaccagctggtggagattg

SEQ ID NO: 291229 - DNA, 25 bp, Artificial
  Probe
ccagctggtggagattgagaaggta

SEQ ID NO: 291230 - DNA, 25 bp, Artificial
  Probe
ctctgtggtggatatcgggctgatc

SEQ ID NO: 291231 - DNA, 25 bp, Artificial
  Probe
tgagaatgcgacagccaaggacatt

SEQ ID NO: 291232 - DNA, 25 bp, Artificial
  Probe
caagctcaaacagaaagtgcttgtc

SEQ ID NO: 291233 - DNA, 25 bp, Artificial
  Probe
atcaagctcaaacagaaagtgcttg

SEQ ID NO: 291234 - DNA, 25 bp, Artificial
  Probe
cccctaccttaacactctatgtggg

SEQ ID NO: 291235 - DNA, 25 bp, Artificial
  Probe
gatcaagctcaaacagaaagtgctt

SEQ ID NO: 291236 - DNA, 25 bp, Artificial
  Probe
atgcgacagccaaggacattgcccc

SEQ ID NO: 291237 - DNA, 25 bp, Artificial
  Probe
aagctcaaacagaaagtgcttgtca

SEQ ID NO: 291238 - DNA, 25 bp, Artificial
  Probe
tgcgacagccaaggacattgcccct

SEQ ID NO: 291239 - DNA, 25 bp, Artificial
  Probe
gaatccctggatttcttactcctgt

SEQ ID NO: 291240 - DNA, 25 bp, Artificial
  Probe
tctcttattacttcctgtgtaaatg

SEQ ID NO: 291241 - DNA, 25 bp, Artificial
  Probe
ttcttgttgtccttgttggtagtaa

SEQ ID NO: 291242 - DNA, 25 bp, Artificial
  Probe
ttctatttcttgttgtccttgttgg

SEQ ID NO: 291243 - DNA, 25 bp, Artificial
  Probe
ttattacttcctgtgtaaatgctct

SEQ ID NO: 291244 - DNA, 25 bp, Artificial
  Probe
ggaatccctggatttcttactcctg

SEQ ID NO: 291245 - DNA, 25 bp, Artificial
  Probe
atctcttattacttcctgtgtaaat

SEQ ID NO: 291246 - DNA, 25 bp, Artificial
  Probe
tctatttcttgttgtccttgttggt

SEQ ID NO: 291247 - DNA, 25 bp, Artificial
  Probe
ttaattctatttcttgttgtccttg

SEQ ID NO: 291248 - DNA, 25 bp, Artificial
  Probe
atttcttgttgtccttgttggtagt

SEQ ID NO: 291249 - DNA, 25 bp, Artificial
  Probe
taattctatttcttgttgtccttgt

SEQ ID NO: 291250 - DNA, 25 bp, Artificial
  Probe
aattctatttcttgttgtccttgtt

SEQ ID NO: 291251 - DNA, 25 bp, Artificial
  Probe
tatttcttgttgtccttgttggtag

SEQ ID NO: 291252 - DNA, 25 bp, Artificial
  Probe
tttcttgttgtccttgttggtagta

SEQ ID NO: 291253 - DNA, 25 bp, Artificial
  Probe
tcccgtatctcttattacttcctgt

SEQ ID NO: 291254 - DNA, 25 bp, Artificial
  Probe
ctcccgtatctcttattacttcctg

SEQ ID NO: 291255 - DNA, 25 bp, Artificial
  Probe
ctatttcttgttgtccttgttggta

SEQ ID NO: 291256 - DNA, 25 bp, Artificial
  Probe
tcttgttgtccttgttggtagtaag

SEQ ID NO: 291257 - DNA, 25 bp, Artificial
  Probe
cccgtatctcttattacttcctgtg

SEQ ID NO: 291258 - DNA, 25 bp, Artificial
  Probe
ctcttattacttcctgtgtaaatgc

SEQ ID NO: 291259 - DNA, 25 bp, Artificial
  Probe
gtatctcttattacttcctgtgtaa

SEQ ID NO: 291260 - DNA, 25 bp, Artificial
  Probe
tatctcttattacttcctgtgtaaa

SEQ ID NO: 291261 - DNA, 25 bp, Artificial
  Probe
gggaatccctggatttcttactcct

SEQ ID NO: 291262 - DNA, 25 bp, Artificial
  Probe
tttaattctatttcttgttgtcctt

SEQ ID NO: 291263 - DNA, 25 bp, Artificial
  Probe
tcttattacttcctgtgtaaatgct

SEQ ID NO: 291264 - DNA, 25 bp, Artificial
  Probe
tagggaatccctggatttcttactc

SEQ ID NO: 291265 - DNA, 25 bp, Artificial
  Probe
attacttcctgtgtaaatgctctga

SEQ ID NO: 291266 - DNA, 25 bp, Artificial
  Probe
ccgtatctcttattacttcctgtgt

SEQ ID NO: 291267 - DNA, 25 bp, Artificial
  Probe
ttgttgtccttgttggtagtaagag

SEQ ID NO: 291268 - DNA, 25 bp, Artificial
  Probe
tattacttcctgtgtaaatgctctg

SEQ ID NO: 291269 - DNA, 25 bp, Artificial
  Probe
cttgttgtccttgttggtagtaaga

SEQ ID NO: 291270 - DNA, 25 bp, Artificial
  Probe
gtgggatccaatacatatgggaaga

SEQ ID NO: 291271 - DNA, 25 bp, Artificial
  Probe
attctatttcttgttgtccttgttg

SEQ ID NO: 291272 - DNA, 25 bp, Artificial
  Probe
cgtatctcttattacttcctgtgta

SEQ ID NO: 291273 - DNA, 25 bp, Artificial
  Probe
cttattacttcctgtgtaaatgctc

SEQ ID NO: 291274 - DNA, 25 bp, Artificial
  Probe
ttttaattctatttcttgttgtcct

SEQ ID NO: 291275 - DNA, 25 bp, Artificial
  Probe
atagggaatccctggatttcttact

SEQ ID NO: 291276 - DNA, 25 bp, Artificial
  Probe
ttaaaactcagaggatccggaaaca

SEQ ID NO: 291277 - DNA, 25 bp, Artificial
  Probe
aatgagcaggtcgtcaacggcacca

SEQ ID NO: 291278 - DNA, 25 bp, Artificial
  Probe
aaactcagaggatccggaaacactc

SEQ ID NO: 291279 - DNA, 25 bp, Artificial
  Probe
gtattttacgtgacttgtgcacatg

SEQ ID NO: 291280 - DNA, 25 bp, Artificial
  Probe
gcatctggataccattttcaaagct

SEQ ID NO: 291281 - DNA, 25 bp, Artificial
  Probe
agccgaggaggcaagcgtcactgaa

SEQ ID NO: 291282 - DNA, 25 bp, Artificial
  Probe
ccccagcggaggagacaacggagaa

SEQ ID NO: 291283 - DNA, 25 bp, Artificial
  Probe
agcacacagatctatgagctgggac

SEQ ID NO: 291284 - DNA, 25 bp, Artificial
  Probe
caggattattactaccaccagtgaa

SEQ ID NO: 291285 - DNA, 25 bp, Artificial
  Probe
cagtgaaggccctccggaggactcc

SEQ ID NO: 291286 - DNA, 25 bp, Artificial
  Probe
ctgaagcaggtgcagaaggaacaac

SEQ ID NO: 291287 - DNA, 25 bp, Artificial
  Probe
taggcaacgagtacaacactgcgta

SEQ ID NO: 291288 - DNA, 25 bp, Artificial
  Probe
agcttgaattccagatgaacaatgg

SEQ ID NO: 291289 - DNA, 25 bp, Artificial
  Probe
gtctcaaggagcagggaacaatttg

SEQ ID NO: 291290 - DNA, 25 bp, Artificial
  Probe
tacgatgtgtgtagttcctttatca

SEQ ID NO: 291291 - DNA, 25 bp, Artificial
  Probe
cagaaagagcagcacggttgagtat

SEQ ID NO: 291292 - DNA, 25 bp, Artificial
  Probe
aggacgaatacagctactacaaggg

SEQ ID NO: 291293 - DNA, 25 bp, Artificial
  Probe
tccagatgaacaatggctggttttt

SEQ ID NO: 291294 - DNA, 25 bp, Artificial
  Probe
aaagcaaacgcttatctccatcagg

SEQ ID NO: 291295 - DNA, 25 bp, Artificial
  Probe
gagctgaccagttatggcaccacga

SEQ ID NO: 291296 - DNA, 25 bp, Artificial
  Probe
accaggtggaatgcttcgaggttgt

SEQ ID NO: 291297 - DNA, 25 bp, Artificial
  Probe
gaacgggtttcagcagacgaccccg

SEQ ID NO: 291298 - DNA, 25 bp, Artificial
  Probe
taccaccagtgaaggccctccggag

SEQ ID NO: 291299 - DNA, 25 bp, Artificial
  Probe
agcctcgcggggacacttaccgagc

SEQ ID NO: 291300 - DNA, 25 bp, Artificial
  Probe
cagtacatctgaacggctaaggttc

SEQ ID NO: 291301 - DNA, 25 bp, Artificial
  Probe
taaatgaccccttttagagttgcca

SEQ ID NO: 291302 - DNA, 25 bp, Artificial
  Probe
ccaggtggaatgcttcgaggttgtt

SEQ ID NO: 291303 - DNA, 25 bp, Artificial
  Probe
atgacgagaacaacggggagcctcg

SEQ ID NO: 291304 - DNA, 25 bp, Artificial
  Probe
cattttcaaagctcaactcaggaag

SEQ ID NO: 291305 - DNA, 25 bp, Artificial
  Probe
atcctcatgtattttacgtgacttg

SEQ ID NO: 291306 - DNA, 25 bp, Artificial
  Probe
ggaggactccccattctgtctttgc

SEQ ID NO: 291307 - DNA, 25 bp, Artificial
  Probe
ctccatcagggtttaaaactcagag

SEQ ID NO: 291308 - DNA, 25 bp, Artificial
  Probe
cagatctatgagctgggaccaggtg

SEQ ID NO: 291309 - DNA, 25 bp, Artificial
  Probe
ccaccagccagaaagagcagcacgg

SEQ ID NO: 291310 - DNA, 25 bp, Artificial
  Probe
ccctacagataatttgtctctgtga

SEQ ID NO: 291311 - DNA, 25 bp, Artificial
  Probe
tcaactcaggaaggtgcaatatata

SEQ ID NO: 291312 - DNA, 25 bp, Artificial
  Probe
gctgtgtacaccattgctaaccacc

SEQ ID NO: 291313 - DNA, 25 bp, Artificial
  Probe
accgagcttatgaggacgaatacag

SEQ ID NO: 291314 - DNA, 25 bp, Artificial
  Probe
ctatgaaggctacgagggtcaggat

SEQ ID NO: 291315 - DNA, 25 bp, Artificial
  Probe
gtgctgtgtacaccattgctaacca

SEQ ID NO: 291316 - DNA, 25 bp, Artificial
  Probe
ctacaaggggcatggctatgaaggc

SEQ ID NO: 291317 - DNA, 25 bp, Artificial
  Probe
ggctacgagggtcaggattattact

SEQ ID NO: 291318 - DNA, 25 bp, Artificial
  Probe
tgggtctcaaggagcagggaacaat

SEQ ID NO: 291319 - DNA, 25 bp, Artificial
  Probe
ctctttattcagtacatctgaacgg

SEQ ID NO: 291320 - DNA, 25 bp, Artificial
  Probe
gatccggaaacactctttattcagt

SEQ ID NO: 291321 - DNA, 25 bp, Artificial
  Probe
tattaacaacactgtatacgatgtg

SEQ ID NO: 291322 - DNA, 25 bp, Artificial
  Probe
ttagggacctctggtaagaactttg

SEQ ID NO: 291323 - DNA, 25 bp, Artificial
  Probe
gacagtctttttctagcaactcctg

SEQ ID NO: 291324 - DNA, 25 bp, Artificial
  Probe
agtgcatcgccaggaaacattcccc

SEQ ID NO: 291325 - DNA, 25 bp, Artificial
  Probe
agatagaggcccaggcatttttcct

SEQ ID NO: 291326 - DNA, 25 bp, Artificial
  Probe
ctccaggagagttgttcacactttg

SEQ ID NO: 291327 - DNA, 25 bp, Artificial
  Probe
tcattctcagggttggatgagcttt

SEQ ID NO: 291328 - DNA, 25 bp, Artificial
  Probe
gaactttgtaccttacatgccccag

SEQ ID NO: 291329 - DNA, 25 bp, Artificial
  Probe
gacctctggtaagaactttgtacct

SEQ ID NO: 291330 - DNA, 25 bp, Artificial
  Probe
tgtattatctaggagtctcctcagg

SEQ ID NO: 291331 - DNA, 25 bp, Artificial
  Probe
tctaggagtctcctcaggaaacaaa

SEQ ID NO: 291332 - DNA, 25 bp, Artificial
  Probe
ccccactgagacagtctttttctag

SEQ ID NO: 291333 - DNA, 25 bp, Artificial
  Probe
tagggacctctggtaagaactttgt

SEQ ID NO: 291334 - DNA, 25 bp, Artificial
  Probe
gctcactgtctgttcagtgacatca

SEQ ID NO: 291335 - DNA, 25 bp, Artificial
  Probe
gtaagaactttgtaccttacatgcc

SEQ ID NO: 291336 - DNA, 25 bp, Artificial
  Probe
tattgtgcccattcccagctcactg

SEQ ID NO: 291337 - DNA, 25 bp, Artificial
  Probe
ctcctgggagatagaggcccaggca

SEQ ID NO: 291338 - DNA, 25 bp, Artificial
  Probe
tctttttctagcaactcctgggaga

SEQ ID NO: 291339 - DNA, 25 bp, Artificial
  Probe
tctagcaactcctgggagatagagg

SEQ ID NO: 291340 - DNA, 25 bp, Artificial
  Probe
accacaactttcattctcagggttg

SEQ ID NO: 291341 - DNA, 25 bp, Artificial
  Probe
cagtgcatcgccaggaaacattccc

SEQ ID NO: 291342 - DNA, 25 bp, Artificial
  Probe
cactgtctgttcagtgacatcagaa

SEQ ID NO: 291343 - DNA, 25 bp, Artificial
  Probe
aatctgtgtattatctaggagtctc

SEQ ID NO: 291344 - DNA, 25 bp, Artificial
  Probe
atcgccaggaaacattccccactga

SEQ ID NO: 291345 - DNA, 25 bp, Artificial
  Probe
gcaactcctgggagatagaggccca

SEQ ID NO: 291346 - DNA, 25 bp, Artificial
  Probe
gcccaggcatttttccttttatcag

SEQ ID NO: 291347 - DNA, 25 bp, Artificial
  Probe
tgttcagtgacatcagaatcctcca

SEQ ID NO: 291348 - DNA, 25 bp, Artificial
  Probe
gaggcccaggcatttttccttttat

SEQ ID NO: 291349 - DNA, 25 bp, Artificial
  Probe
gttctgtcagccagtgcatcgccag

SEQ ID NO: 291350 - DNA, 25 bp, Artificial
  Probe
cattcccagctcactgtctgttcag

SEQ ID NO: 291351 - DNA, 25 bp, Artificial
  Probe
tctgtgtattatctaggagtctcct

SEQ ID NO: 291352 - DNA, 25 bp, Artificial
  Probe
tatctaggagtctcctcaggaaaca

SEQ ID NO: 291353 - DNA, 25 bp, Artificial
  Probe
ggcccaggcatttttccttttatca

SEQ ID NO: 291354 - DNA, 25 bp, Artificial
  Probe
tctgtcagccagtgcatcgccagga

SEQ ID NO: 291355 - DNA, 25 bp, Artificial
  Probe
gccaggaaacattccccactgagac

SEQ ID NO: 291356 - DNA, 25 bp, Artificial
  Probe
actttcattctcagggttggatgag

SEQ ID NO: 291357 - DNA, 25 bp, Artificial
  Probe
aacttccaggttccattccagtaga

SEQ ID NO: 291358 - DNA, 25 bp, Artificial
  Probe
tgtcagccagtgcatcgccaggaaa

SEQ ID NO: 291359 - DNA, 25 bp, Artificial
  Probe
cattctcagggttggatgagctttt

SEQ ID NO: 291360 - DNA, 25 bp, Artificial
  Probe
tttttctagcaactcctgggagata

SEQ ID NO: 291361 - DNA, 25 bp, Artificial
  Probe
tattatctaggagtctcctcaggaa

SEQ ID NO: 291362 - DNA, 25 bp, Artificial
  Probe
catagttctgtcagccagtgcatcg

SEQ ID NO: 291363 - DNA, 25 bp, Artificial
  Probe
gagacagtctttttctagcaactcc

SEQ ID NO: 291364 - DNA, 25 bp, Artificial
  Probe
tcagccagtgcatcgccaggaaaca

SEQ ID NO: 291365 - DNA, 25 bp, Artificial
  Probe
ggtattgtgcccattcccagctcac

SEQ ID NO: 291366 - DNA, 25 bp, Artificial
  Probe
ttcagtgacatcagaatcctccagg

SEQ ID NO: 291367 - DNA, 25 bp, Artificial
  Probe
cagaatcctccaggagagttgttca

SEQ ID NO: 291368 - DNA, 25 bp, Artificial
  Probe
agaccatctgggtcaaagctggaga

SEQ ID NO: 291369 - DNA, 25 bp, Artificial
  Probe
gaatctatgaagttttctcggagca

SEQ ID NO: 291370 - DNA, 25 bp, Artificial
  Probe
caacacccgtgttgtgggccaggag

SEQ ID NO: 291371 - DNA, 25 bp, Artificial
  Probe
tgggcatcaaacagcccattgccca

SEQ ID NO: 291372 - DNA, 25 bp, Artificial
  Probe
tatgacatccgcaggatcggccacg

SEQ ID NO: 291373 - DNA, 25 bp, Artificial
  Probe
tgactccttgcaacacagcaacctg

SEQ ID NO: 291374 - DNA, 25 bp, Artificial
  Probe
accctgggcgaaggaattaccagca

SEQ ID NO: 291375 - DNA, 25 bp, Artificial
  Probe
tcaccctgggcgaaggaattaccag

SEQ ID NO: 291376 - DNA, 25 bp, Artificial
  Probe
ctggaccctgcaggacctatgtttg

SEQ ID NO: 291377 - DNA, 25 bp, Artificial
  Probe
aagacatcggcgagttgatcatgct

SEQ ID NO: 291378 - DNA, 25 bp, Artificial
  Probe
ccacccaggagaaagtcttcgtgaa

SEQ ID NO: 291379 - DNA, 25 bp, Artificial
  Probe
aagatccagttcatcaatcaaatgg

SEQ ID NO: 291380 - DNA, 25 bp, Artificial
  Probe
tgtgcacctcttcattgactccttg

SEQ ID NO: 291381 - DNA, 25 bp, Artificial
  Probe
acgtgggattagtggactggatctc

SEQ ID NO: 291382 - DNA, 25 bp, Artificial
  Probe
gtggatgatctccagcttcacccca

SEQ ID NO: 291383 - DNA, 25 bp, Artificial
  Probe
gcaacctgcagaacacaggcttcca

SEQ ID NO: 291384 - DNA, 25 bp, Artificial
  Probe
ttctccagatgatgccaattttgtg

SEQ ID NO: 291385 - DNA, 25 bp, Artificial
  Probe
agcatggcttaaatgccataaccca

SEQ ID NO: 291386 - DNA, 25 bp, Artificial
  Probe
agaatgacattttgccctgataatg

SEQ ID NO: 291387 - DNA, 25 bp, Artificial
  Probe
tcatgatcatccacgggtggtcggt

SEQ ID NO: 291388 - DNA, 25 bp, Artificial
  Probe
gagcctacttttaccatgacactgc

SEQ ID NO: 291389 - DNA, 25 bp, Artificial
  Probe
agcctggctgccacttcctggagct

SEQ ID NO: 291390 - DNA, 25 bp, Artificial
  Probe
ggcttaaatgccataacccagacca

SEQ ID NO: 291391 - DNA, 25 bp, Artificial
  Probe
gggtgccctgaagtcccgacagtcc

SEQ ID NO: 291392 - DNA, 25 bp, Artificial
  Probe
tcggtggatggcttgctagaaacct

SEQ ID NO: 291393 - DNA, 25 bp, Artificial
  Probe
actattctttatctgtaatggttgc

SEQ ID NO: 291394 - DNA, 25 bp, Artificial
  Probe
ggaaaacagcgcagtgtgggccaat

SEQ ID NO: 291395 - DNA, 25 bp, Artificial
  Probe
tgcccatgagcgttctgtgcacctc

SEQ ID NO: 291396 - DNA, 25 bp, Artificial
  Probe
ttcaggattcgcaggcagctccatg

SEQ ID NO: 291397 - DNA, 25 bp, Artificial
  Probe
tgaactgcaagaagggccgttgcaa

SEQ ID NO: 291398 - DNA, 25 bp, Artificial
  Probe
aggtggctgctcttctcctatggct

SEQ ID NO: 291399 - DNA, 25 bp, Artificial
  Probe
ccaatgagcgcctttctccagatga

SEQ ID NO: 291400 - DNA, 25 bp, Artificial
  Probe
ggacacagagcctcactacgcgggc

SEQ ID NO: 291401 - DNA, 25 bp, Artificial
  Probe
agggccgttgcaacagtctgggcta

SEQ ID NO: 291402 - DNA, 25 bp, Artificial
  Probe
tcatcaatcaaatggagaagccaat

SEQ ID NO: 291403 - DNA, 25 bp, Artificial
  Probe
cttcagtcagggtctatgtctgaac

SEQ ID NO: 291404 - DNA, 25 bp, Artificial
  Probe
tgtgacctgaagtcaaaagactgaa

SEQ ID NO: 291405 - DNA, 25 bp, Artificial
  Probe
caggacctatgtttgagggaacttc

SEQ ID NO: 291406 - DNA, 25 bp, Artificial
  Probe
ctagaaacctggatctggaagatag

SEQ ID NO: 291407 - DNA, 25 bp, Artificial
  Probe
caacccgtgaacgtgggattagtgg

SEQ ID NO: 291408 - DNA, 25 bp, Artificial
  Probe
cctatggctggaggaatctatgaag

SEQ ID NO: 291409 - DNA, 25 bp, Artificial
  Probe
gaagatagtgggtgccctgaagtcc

SEQ ID NO: 291410 - DNA, 25 bp, Artificial
  Probe
atgagtcaagagacccaagcacaaa

SEQ ID NO: 291411 - DNA, 25 bp, Artificial
  Probe
gctcaagttcaagtgggaaaacagc

SEQ ID NO: 291412 - DNA, 25 bp, Artificial
  Probe
tcaaagctggagagacgcagcaaag

SEQ ID NO: 291413 - DNA, 25 bp, Artificial
  Probe
cactgctggggacaaaagaagaaat

SEQ ID NO: 291414 - DNA, 25 bp, Artificial
  Probe
gatttgtggtgctaactctgtgtcc

SEQ ID NO: 291415 - DNA, 25 bp, Artificial
  Probe
atctgagcctgaccaagaactaaac

SEQ ID NO: 291416 - DNA, 25 bp, Artificial
  Probe
gagtctttgtcattcaatgtcattc

SEQ ID NO: 291417 - DNA, 25 bp, Artificial
  Probe
cactggaaacgctgttgtggctatc

SEQ ID NO: 291418 - DNA, 25 bp, Artificial
  Probe
agccccacaagagtctttgtcattc

SEQ ID NO: 291419 - DNA, 25 bp, Artificial
  Probe
gggtatctgaacacctacacacaag

SEQ ID NO: 291420 - DNA, 25 bp, Artificial
  Probe
gccccacaagagtctttgtcattca

SEQ ID NO: 291421 - DNA, 25 bp, Artificial
  Probe
tggaaacgctgttgtggctatctgg

SEQ ID NO: 291422 - DNA, 25 bp, Artificial
  Probe
acacacaagcaaagccccacaagag

SEQ ID NO: 291423 - DNA, 25 bp, Artificial
  Probe
tcattcaatgtcattcagaaaggaa

SEQ ID NO: 291424 - DNA, 25 bp, Artificial
  Probe
gcctgaccaagaactaaactatgta

SEQ ID NO: 291425 - DNA, 25 bp, Artificial
  Probe
tatctgagcctgaccaagaactaaa

SEQ ID NO: 291426 - DNA, 25 bp, Artificial
  Probe
ctctgttttgctttcttgagaaaag

SEQ ID NO: 291427 - DNA, 25 bp, Artificial
  Probe
gctgttgctgggaacagaaactgtg

SEQ ID NO: 291428 - DNA, 25 bp, Artificial
  Probe
cttgtaaacactggaaacgctgttg

SEQ ID NO: 291429 - DNA, 25 bp, Artificial
  Probe
cattcaatgtcattcagaaaggaaa

SEQ ID NO: 291430 - DNA, 25 bp, Artificial
  Probe
tgtcattcaatgtcattcagaaagg

SEQ ID NO: 291431 - DNA, 25 bp, Artificial
  Probe
agaactaaactatgtacttcaggct

SEQ ID NO: 291432 - DNA, 25 bp, Artificial
  Probe
aaacctagactgagtaattcttagt

SEQ ID NO: 291433 - DNA, 25 bp, Artificial
  Probe
gtacaaaacctagactgagtaattc

SEQ ID NO: 291434 - DNA, 25 bp, Artificial
  Probe
aggtacaaaacctagactgagtaat

SEQ ID NO: 291435 - DNA, 25 bp, Artificial
  Probe
agatttgtggtgctaactctgtgtc

SEQ ID NO: 291436 - DNA, 25 bp, Artificial
  Probe
cttagtagacttcaagttttatggc

SEQ ID NO: 291437 - DNA, 25 bp, Artificial
  Probe
aagcttgtaaacactggaaacgctg

SEQ ID NO: 291438 - DNA, 25 bp, Artificial
  Probe
agttttatggcttaattcctctgtc

SEQ ID NO: 291439 - DNA, 25 bp, Artificial
  Probe
ttgtcattcaatgtcattcagaaag

SEQ ID NO: 291440 - DNA, 25 bp, Artificial
  Probe
cgtatctgagcctgaccaagaacta

SEQ ID NO: 291441 - DNA, 25 bp, Artificial
  Probe
caaagccccacaagagtctttgtca

SEQ ID NO: 291442 - DNA, 25 bp, Artificial
  Probe
ctgagcctgaccaagaactaaacta

SEQ ID NO: 291443 - DNA, 25 bp, Artificial
  Probe
tgtgggtatctgaacacctacacac

SEQ ID NO: 291444 - DNA, 25 bp, Artificial
  Probe
ggtatctgaacacctacacacaagc

SEQ ID NO: 291445 - DNA, 25 bp, Artificial
  Probe
aagcaaagccccacaagagtctttg

SEQ ID NO: 291446 - DNA, 25 bp, Artificial
  Probe
gtaaacactggaaacgctgttgtgg

SEQ ID NO: 291447 - DNA, 25 bp, Artificial
  Probe
ttgtggtgctaactctgtgtccacc

SEQ ID NO: 291448 - DNA, 25 bp, Artificial
  Probe
gtctttgtcattcaatgtcattcag

SEQ ID NO: 291449 - DNA, 25 bp, Artificial
  Probe
gacttcaagttttatggcttaattc

SEQ ID NO: 291450 - DNA, 25 bp, Artificial
  Probe
tctctgttttgctttcttgagaaaa

SEQ ID NO: 291451 - DNA, 25 bp, Artificial
  Probe
gaactaaactatgtacttcaggctt

SEQ ID NO: 291452 - DNA, 25 bp, Artificial
  Probe
aactatgtacttcaggcttaccttg

SEQ ID NO: 291453 - DNA, 25 bp, Artificial
  Probe
caagagtctttgtcattcaatgtca

SEQ ID NO: 291454 - DNA, 25 bp, Artificial
  Probe
ccacaagagtctttgtcattcaatg

SEQ ID NO: 291455 - DNA, 25 bp, Artificial
  Probe
actccgtatctgagcctgaccaaga

SEQ ID NO: 291456 - DNA, 25 bp, Artificial
  Probe
cactccgtatctgagcctgaccaag

SEQ ID NO: 291457 - DNA, 25 bp, Artificial
  Probe
acctagactgagtaattcttagtag

SEQ ID NO: 291458 - DNA, 25 bp, Artificial
  Probe
taaacactggaaacgctgttgtggc

SEQ ID NO: 291459 - DNA, 25 bp, Artificial
  Probe
tgggtatctgaacacctacacacaa

SEQ ID NO: 291460 - DNA, 25 bp, Artificial
  Probe
agcagagtttgatgcctccaagatt

SEQ ID NO: 291461 - DNA, 25 bp, Artificial
  Probe
cgccctaaggaagcagagtttgatg

SEQ ID NO: 291462 - DNA, 25 bp, Artificial
  Probe
tgagttcacgcctgaacagattgaa

SEQ ID NO: 291463 - DNA, 25 bp, Artificial
  Probe
ttaagattgagttcacgcctgaaca

SEQ ID NO: 291464 - DNA, 25 bp, Artificial
  Probe
gaacgccctaaggaagcagagtttg

SEQ ID NO: 291465 - DNA, 25 bp, Artificial
  Probe
aacgccctaaggaagcagagtttga

SEQ ID NO: 291466 - DNA, 25 bp, Artificial
  Probe
tgattacagctccaatggcccccaa

SEQ ID NO: 291467 - DNA, 25 bp, Artificial
  Probe
ccctaaggaagcagagtttgatgcc

SEQ ID NO: 291468 - DNA, 25 bp, Artificial
  Probe
cctccaagattaagattgagttcac

SEQ ID NO: 291469 - DNA, 25 bp, Artificial
  Probe
ctctgtgattacagctccaatggcc

SEQ ID NO: 291470 - DNA, 25 bp, Artificial
  Probe
ctacccaggcagaggtgctccgcgt

SEQ ID NO: 291471 - DNA, 25 bp, Artificial
  Probe
tctgtgattacagctccaatggccc

SEQ ID NO: 291472 - DNA, 25 bp, Artificial
  Probe
aaggacgatgccaaaaccgctgccc

SEQ ID NO: 291473 - DNA, 25 bp, Artificial
  Probe
gagtttgatgcctccaagattaaga

SEQ ID NO: 291474 - DNA, 25 bp, Artificial
  Probe
tcacgcctgaacagattgaagagtt

SEQ ID NO: 291475 - DNA, 25 bp, Artificial
  Probe
ttgatgcctccaagattaagattga

SEQ ID NO: 291476 - DNA, 25 bp, Artificial
  Probe
tgcctccaagattaagattgagttc

SEQ ID NO: 291477 - DNA, 25 bp, Artificial
  Probe
cgcctgaacagattgaagagttcaa

SEQ ID NO: 291478 - DNA, 25 bp, Artificial
  Probe
gtgattacagctccaatggccccca

SEQ ID NO: 291479 - DNA, 25 bp, Artificial
  Probe
tttgatgcctccaagattaagattg

SEQ ID NO: 291480 - DNA, 25 bp, Artificial
  Probe
ccaggcagaggtgctccgcgtcttg

SEQ ID NO: 291481 - DNA, 25 bp, Artificial
  Probe
gattacagctccaatggcccccaaa

SEQ ID NO: 291482 - DNA, 25 bp, Artificial
  Probe
ggacagaatcctacccaggcagagg

SEQ ID NO: 291483 - DNA, 25 bp, Artificial
  Probe
catttgtgaagcacatcatggccag

SEQ ID NO: 291484 - DNA, 25 bp, Artificial
  Probe
acctaagggcgagatgaagatcacg

SEQ ID NO: 291485 - DNA, 25 bp, Artificial
  Probe
gcccgaacgccctaaggaagcagag

SEQ ID NO: 291486 - DNA, 25 bp, Artificial
  Probe
cacctaagggcgagatgaagatcac

SEQ ID NO: 291487 - DNA, 25 bp, Artificial
  Probe
gggacagaatcctacccaggcagag

SEQ ID NO: 291488 - DNA, 25 bp, Artificial
  Probe
acgccctaaggaagcagagtttgat

SEQ ID NO: 291489 - DNA, 25 bp, Artificial
  Probe
gaccgcacacctaagggcgagatga

SEQ ID NO: 291490 - DNA, 25 bp, Artificial
  Probe
accgcacacctaagggcgagatgaa

SEQ ID NO: 291491 - DNA, 25 bp, Artificial
  Probe
acgcctgaacagattgaagagttca

SEQ ID NO: 291492 - DNA, 25 bp, Artificial
  Probe
tacccaggcagaggtgctccgcgtc

SEQ ID NO: 291493 - DNA, 25 bp, Artificial
  Probe
atgcctccaagattaagattgagtt

SEQ ID NO: 291494 - DNA, 25 bp, Artificial
  Probe
agttcacgcctgaacagattgaaga

SEQ ID NO: 291495 - DNA, 25 bp, Artificial
  Probe
ctgtttgaccgcacacctaagggcg

SEQ ID NO: 291496 - DNA, 25 bp, Artificial
  Probe
taagattgagttcacgcctgaacag

SEQ ID NO: 291497 - DNA, 25 bp, Artificial
  Probe
cccaggcagaggtgctccgcgtctt

SEQ ID NO: 291498 - DNA, 25 bp, Artificial
  Probe
gcctctctgtgattacagctccaat

SEQ ID NO: 291499 - DNA, 25 bp, Artificial
  Probe
aagattgagttcacgcctgaacaga

SEQ ID NO: 291500 - DNA, 25 bp, Artificial
  Probe
ctctctgtgattacagctccaatgg

SEQ ID NO: 291501 - DNA, 25 bp, Artificial
  Probe
ccgaacgccctaaggaagcagagtt

SEQ ID NO: 291502 - DNA, 25 bp, Artificial
  Probe
tgtgattacagctccaatggccccc

SEQ ID NO: 291503 - DNA, 25 bp, Artificial
  Probe
tgaccgcacacctaagggcgagatg

SEQ ID NO: 291504 - DNA, 25 bp, Artificial
  Probe
gtttgaccgcacacctaagggcgag

SEQ ID NO: 291505 - DNA, 25 bp, Artificial
  Probe
tgatgcctccaagattaagattgag

SEQ ID NO: 291506 - DNA, 25 bp, Artificial
  Probe
tgaaggaaccacagaggccaagcct

SEQ ID NO: 291507 - DNA, 25 bp, Artificial
  Probe
ttatttacacacttacaagttcggg

SEQ ID NO: 291508 - DNA, 25 bp, Artificial
  Probe
taccttatgaagttgaaggaaccac

SEQ ID NO: 291509 - DNA, 25 bp, Artificial
  Probe
tggagcattgcctaagtttaatgct

SEQ ID NO: 291510 - DNA, 25 bp, Artificial
  Probe
ttccttctactttggcatgtgtctg

SEQ ID NO: 291511 - DNA, 25 bp, Artificial
  Probe
gaccttctgtgttccggtcttacag

SEQ ID NO: 291512 - DNA, 25 bp, Artificial
  Probe
tctgaggactgcagagaaagcagga

SEQ ID NO: 291513 - DNA, 25 bp, Artificial
  Probe
cacttgttctgaggactgcagagaa

SEQ ID NO: 291514 - DNA, 25 bp, Artificial
  Probe
ctcttggagcattgcctaagtttaa

SEQ ID NO: 291515 - DNA, 25 bp, Artificial
  Probe
gaaggaaccacagaggccaagcctc

SEQ ID NO: 291516 - DNA, 25 bp, Artificial
  Probe
ctcagcgaagccacaggccaggggc

SEQ ID NO: 291517 - DNA, 25 bp, Artificial
  Probe
tatttacacacttacaagttcgggg

SEQ ID NO: 291518 - DNA, 25 bp, Artificial
  Probe
gctggcagtttcaaacgtaatagca

SEQ ID NO: 291519 - DNA, 25 bp, Artificial
  Probe
gttgccagacggtcacctcttggag

SEQ ID NO: 291520 - DNA, 25 bp, Artificial
  Probe
ccacagaggccaagcctcagcgaag

SEQ ID NO: 291521 - DNA, 25 bp, Artificial
  Probe
agcaaaggagtgctggcagtttcaa

SEQ ID NO: 291522 - DNA, 25 bp, Artificial
  Probe
accacagaggccaagcctcagcgaa

SEQ ID NO: 291523 - DNA, 25 bp, Artificial
  Probe
gatgaaccgtccagtgccgccactg

SEQ ID NO: 291524 - DNA, 25 bp, Artificial
  Probe
cagtttcaaacgtaatagcattaag

SEQ ID NO: 291525 - DNA, 25 bp, Artificial
  Probe
catacacagaagacgaccttctgtg

SEQ ID NO: 291526 - DNA, 25 bp, Artificial
  Probe
cgtgtcttatgaacgcatctggtct

SEQ ID NO: 291527 - DNA, 25 bp, Artificial
  Probe
gtggtcgtcttatttacacacttac

SEQ ID NO: 291528 - DNA, 25 bp, Artificial
  Probe
caccttgcactgctgcttcgtgtct

SEQ ID NO: 291529 - DNA, 25 bp, Artificial
  Probe
gatgttttccttctactttggcatg

SEQ ID NO: 291530 - DNA, 25 bp, Artificial
  Probe
tgctgccagccatgggccatacaca

SEQ ID NO: 291531 - DNA, 25 bp, Artificial
  Probe
cttacagagtgaagtggtcgtctta

SEQ ID NO: 291532 - DNA, 25 bp, Artificial
  Probe
agatcgtgtgaagctttctttcttt

SEQ ID NO: 291533 - DNA, 25 bp, Artificial
  Probe
gtggatgaaccgtccagtgccgcca

SEQ ID NO: 291534 - DNA, 25 bp, Artificial
  Probe
aagcctcagcgaagccacaggccag

SEQ ID NO: 291535 - DNA, 25 bp, Artificial
  Probe
aagcctgactgagagcgtggactgt

SEQ ID NO: 291536 - DNA, 25 bp, Artificial
  Probe
tgctgtgttgccagacggtcacctc

SEQ ID NO: 291537 - DNA, 25 bp, Artificial
  Probe
ctgtgggcttttttaccttatgaag

SEQ ID NO: 291538 - DNA, 25 bp, Artificial
  Probe
agtttaatgctgcttctctttgatg

SEQ ID NO: 291539 - DNA, 25 bp, Artificial
  Probe
cagccatgggccatacacagaagac

SEQ ID NO: 291540 - DNA, 25 bp, Artificial
  Probe
aggagtgctggcagtttcaaacgta

SEQ ID NO: 291541 - DNA, 25 bp, Artificial
  Probe
cacagaagacgaccttctgtgttcc

SEQ ID NO: 291542 - DNA, 25 bp, Artificial
  Probe
aatcttctagctgtgggctttttta

SEQ ID NO: 291543 - DNA, 25 bp, Artificial
  Probe
agtgaagtggtcgtcttatttacac

SEQ ID NO: 291544 - DNA, 25 bp, Artificial
  Probe
aggccaagcctcagcgaagccacag

SEQ ID NO: 291545 - DNA, 25 bp, Artificial
  Probe
cagtgtatttaatcttctagctgtg

SEQ ID NO: 291546 - DNA, 25 bp, Artificial
  Probe
gtgtgaagctttctttctttcactc

SEQ ID NO: 291547 - DNA, 25 bp, Artificial
  Probe
gttctgaggactgcagagaaagcag

SEQ ID NO: 291548 - DNA, 25 bp, Artificial
  Probe
ttaccttatgaagttgaaggaacca

SEQ ID NO: 291549 - DNA, 25 bp, Artificial
  Probe
tctgtgttccggtcttacagagtga

SEQ ID NO: 291550 - DNA, 25 bp, Artificial
  Probe
ctagctgtgggcttttttaccttat

SEQ ID NO: 291551 - DNA, 25 bp, Artificial
  Probe
atcttctagctgtgggcttttttac

SEQ ID NO: 291552 - DNA, 25 bp, Artificial
  Probe
tgcaattcccagacacctgggaagt

SEQ ID NO: 291553 - DNA, 25 bp, Artificial
  Probe
aattcccagacacctgggaagtggg

SEQ ID NO: 291554 - DNA, 25 bp, Artificial
  Probe
caacccggtgaagagaccaggagca

SEQ ID NO: 291555 - DNA, 25 bp, Artificial
  Probe
ccaggagcattgtacgcatacgcgg

SEQ ID NO: 291556 - DNA, 25 bp, Artificial
  Probe
accaggagcattgtacgcatacgcg

SEQ ID NO: 291557 - DNA, 25 bp, Artificial
  Probe
cagacacctgggaagtgggacattc

SEQ ID NO: 291558 - DNA, 25 bp, Artificial
  Probe
gagaccaggagcattgtacgcatac

SEQ ID NO: 291559 - DNA, 25 bp, Artificial
  Probe
acccggtgaagagaccaggagcatt

SEQ ID NO: 291560 - DNA, 25 bp, Artificial
  Probe
gaccaggagcattgtacgcatacgc

SEQ ID NO: 291561 - DNA, 25 bp, Artificial
  Probe
ccaacccggtgaagagaccaggagc

SEQ ID NO: 291562 - DNA, 25 bp, Artificial
  Probe
ttttgggccaagttggaacctctgg

SEQ ID NO: 291563 - DNA, 25 bp, Artificial
  Probe
gttttgggccaagttggaacctctg

SEQ ID NO: 291564 - DNA, 25 bp, Artificial
  Probe
tgaagagaccaggagcattgtacgc

SEQ ID NO: 291565 - DNA, 25 bp, Artificial
  Probe
acacctgggaagtgggacattcttt

SEQ ID NO: 291566 - DNA, 25 bp, Artificial
  Probe
tctgcaattcccagacacctgggaa

SEQ ID NO: 291567 - DNA, 25 bp, Artificial
  Probe
agacacctgggaagtgggacattct

SEQ ID NO: 291568 - DNA, 25 bp, Artificial
  Probe
gacacctgggaagtgggacattctt

SEQ ID NO: 291569 - DNA, 25 bp, Artificial
  Probe
aacccggtgaagagaccaggagcat

SEQ ID NO: 291570 - DNA, 25 bp, Artificial
  Probe
aagagaccaggagcattgtacgcat

SEQ ID NO: 291571 - DNA, 25 bp, Artificial
  Probe
agaccaggagcattgtacgcatacg

SEQ ID NO: 291572 - DNA, 25 bp, Artificial
  Probe
tgttttgggccaagttggaacctct

SEQ ID NO: 291573 - DNA, 25 bp, Artificial
  Probe
tttgggccaagttggaacctctggc

SEQ ID NO: 291574 - DNA, 25 bp, Artificial
  Probe
ttcccagacacctgggaagtgggac

SEQ ID NO: 291575 - DNA, 25 bp, Artificial
  Probe
ctgcaattcccagacacctgggaag

SEQ ID NO: 291576 - DNA, 25 bp, Artificial
  Probe
ctgcaggtacggtttagcatgtgtt

SEQ ID NO: 291577 - DNA, 25 bp, Artificial
  Probe
attcccagacacctgggaagtggga

SEQ ID NO: 291578 - DNA, 25 bp, Artificial
  Probe
cacccagaagagttacagcatctgg

SEQ ID NO: 291579 - DNA, 25 bp, Artificial
  Probe
atgaggatatcttcggtgcggtctt

SEQ ID NO: 291580 - DNA, 25 bp, Artificial
  Probe
agagttacagcatctggccctaaat

SEQ ID NO: 291581 - DNA, 25 bp, Artificial
  Probe
tggaggagcccaaaggcacaagact

SEQ ID NO: 291582 - DNA, 25 bp, Artificial
  Probe
caagactctgacacccagaagagtt

SEQ ID NO: 291583 - DNA, 25 bp, Artificial
  Probe
ggaggagcccaaaggcacaagactc

SEQ ID NO: 291584 - DNA, 25 bp, Artificial
  Probe
ggaaaatgaaccacccgactgaagc

SEQ ID NO: 291585 - DNA, 25 bp, Artificial
  Probe
tcatgaggatatcttcggtgcggtc

SEQ ID NO: 291586 - DNA, 25 bp, Artificial
  Probe
atcatgaggatatcttcggtgcggt

SEQ ID NO: 291587 - DNA, 25 bp, Artificial
  Probe
tatcatgaggatatcttcggtgcgg

SEQ ID NO: 291588 - DNA, 25 bp, Artificial
  Probe
tccgtgtataattccttgatgaaga

SEQ ID NO: 291589 - DNA, 25 bp, Artificial
  Probe
aagagttacagcatctggccctaaa

SEQ ID NO: 291590 - DNA, 25 bp, Artificial
  Probe
ctctgacacccagaagagttacagc

SEQ ID NO: 291591 - DNA, 25 bp, Artificial
  Probe
tgacacccagaagagttacagcatc

SEQ ID NO: 291592 - DNA, 25 bp, Artificial
  Probe
aaaggcacaagactctgacacccag

SEQ ID NO: 291593 - DNA, 25 bp, Artificial
  Probe
atgaaccacccgactgaagcacttt

SEQ ID NO: 291594 - DNA, 25 bp, Artificial
  Probe
tgtggactactgaatctctctcctc

SEQ ID NO: 291595 - DNA, 25 bp, Artificial
  Probe
tctgacacccagaagagttacagca

SEQ ID NO: 291596 - DNA, 25 bp, Artificial
  Probe
agttacagcatctggccctaaataa

SEQ ID NO: 291597 - DNA, 25 bp, Artificial
  Probe
agaagagttacagcatctggcccta

SEQ ID NO: 291598 - DNA, 25 bp, Artificial
  Probe
accgcttggcccttccgtgtataat

SEQ ID NO: 291599 - DNA, 25 bp, Artificial
  Probe
tgaaccacccgactgaagcactttg

SEQ ID NO: 291600 - DNA, 25 bp, Artificial
  Probe
gtggactactgaatctctctcctct

SEQ ID NO: 291601 - DNA, 25 bp, Artificial
  Probe
ccgcttggcccttccgtgtataatt

SEQ ID NO: 291602 - DNA, 25 bp, Artificial
  Probe
agcccaaaggcacaagactctgaca

SEQ ID NO: 291603 - DNA, 25 bp, Artificial
  Probe
gcccaaaggcacaagactctgacac

SEQ ID NO: 291604 - DNA, 25 bp, Artificial
  Probe
ggcacaagactctgacacccagaag

SEQ ID NO: 291605 - DNA, 25 bp, Artificial
  Probe
actctgacacccagaagagttacag

SEQ ID NO: 291606 - DNA, 25 bp, Artificial
  Probe
gagttacagcatctggccctaaata

SEQ ID NO: 291607 - DNA, 25 bp, Artificial
  Probe
ttggcccttccgtgtataattcctt

SEQ ID NO: 291608 - DNA, 25 bp, Artificial
  Probe
ctgacacccagaagagttacagcat

SEQ ID NO: 291609 - DNA, 25 bp, Artificial
  Probe
ggatatcttcggtgcggtcttttcc

SEQ ID NO: 291610 - DNA, 25 bp, Artificial
  Probe
ctattgtggactactgaatctctct

SEQ ID NO: 291611 - DNA, 25 bp, Artificial
  Probe
ttccgtgtataattccttgatgaag

SEQ ID NO: 291612 - DNA, 25 bp, Artificial
  Probe
ttgtggactactgaatctctctcct

SEQ ID NO: 291613 - DNA, 25 bp, Artificial
  Probe
gcacaagactctgacacccagaaga

SEQ ID NO: 291614 - DNA, 25 bp, Artificial
  Probe
ttggaggagcccaaaggcacaagac

SEQ ID NO: 291615 - DNA, 25 bp, Artificial
  Probe
cacaagactctgacacccagaagag

SEQ ID NO: 291616 - DNA, 25 bp, Artificial
  Probe
ggcccttccgtgtataattccttga

SEQ ID NO: 291617 - DNA, 25 bp, Artificial
  Probe
cttccgtgtataattccttgatgaa

SEQ ID NO: 291618 - DNA, 25 bp, Artificial
  Probe
ttatcatgaggatatcttcggtgcg

SEQ ID NO: 291619 - DNA, 25 bp, Artificial
  Probe
gagcccaaaggcacaagactctgac

SEQ ID NO: 291620 - DNA, 25 bp, Artificial
  Probe
cccttccgtgtataattccttgatg

SEQ ID NO: 291621 - DNA, 25 bp, Artificial
  Probe
ccgtgtataattccttgatgaagat

SEQ ID NO: 291622 - DNA, 25 bp, Artificial
  Probe
caaaggcacaagactctgacaccca

SEQ ID NO: 291623 - DNA, 25 bp, Artificial
  Probe
attgtggactactgaatctctctcc

SEQ ID NO: 291624 - DNA, 25 bp, Artificial
  Probe
ccctgctcgtgtgtttgggcattct

SEQ ID NO: 291625 - DNA, 25 bp, Artificial
  Probe
aatggggctgtgtggactgaccctc

SEQ ID NO: 291626 - DNA, 25 bp, Artificial
  Probe
atctcatcaccagacagagatatgg

SEQ ID NO: 291627 - DNA, 25 bp, Artificial
  Probe
cgccatgatgctaggtaacaaacga

SEQ ID NO: 291628 - DNA, 25 bp, Artificial
  Probe
gctgtgtggactgaccctcgctcta

SEQ ID NO: 291629 - DNA, 25 bp, Artificial
  Probe
cgcgccagcagaggacatggccaga

SEQ ID NO: 291630 - DNA, 25 bp, Artificial
  Probe
tctatccctgctcgtgtgtttgggc

SEQ ID NO: 291631 - DNA, 25 bp, Artificial
  Probe
gcattctggctgaggggtacccctc

SEQ ID NO: 291632 - DNA, 25 bp, Artificial
  Probe
cgctctatccctgctcgtgtgtttg

SEQ ID NO: 291633 - DNA, 25 bp, Artificial
  Probe
ctgatttcagatctcttaatgagag

SEQ ID NO: 291634 - DNA, 25 bp, Artificial
  Probe
cgccagcagaggacatggccagata

SEQ ID NO: 291635 - DNA, 25 bp, Artificial
  Probe
cctgctcgtgtgtttgggcattctg

SEQ ID NO: 291636 - DNA, 25 bp, Artificial
  Probe
gctctatccctgctcgtgtgtttgg

SEQ ID NO: 291637 - DNA, 25 bp, Artificial
  Probe
cccgccatgatgctaggtaacaaac

SEQ ID NO: 291638 - DNA, 25 bp, Artificial
  Probe
tcaccagacagagatatggcaagag

SEQ ID NO: 291639 - DNA, 25 bp, Artificial
  Probe
cactgatttcagatctcttaatgag

SEQ ID NO: 291640 - DNA, 25 bp, Artificial
  Probe
agaggcgcccagagcagagcacccg

SEQ ID NO: 291641 - DNA, 25 bp, Artificial
  Probe
gggctgtgtggactgaccctcgctc

SEQ ID NO: 291642 - DNA, 25 bp, Artificial
  Probe
actgatttcagatctcttaatgaga

SEQ ID NO: 291643 - DNA, 25 bp, Artificial
  Probe
gcgccagcagaggacatggccagat

SEQ ID NO: 291644 - DNA, 25 bp, Artificial
  Probe
tcgctctatccctgctcgtgtgttt

SEQ ID NO: 291645 - DNA, 25 bp, Artificial
  Probe
ctcatcaccagacagagatatggca

SEQ ID NO: 291646 - DNA, 25 bp, Artificial
  Probe
ggcattctggctgaggggtacccct

SEQ ID NO: 291647 - DNA, 25 bp, Artificial
  Probe
gcccgccatgatgctaggtaacaaa

SEQ ID NO: 291648 - DNA, 25 bp, Artificial
  Probe
tcattcctcgcagaggcgcccagag

SEQ ID NO: 291649 - DNA, 25 bp, Artificial
  Probe
atcaccagacagagatatggcaaga

SEQ ID NO: 291650 - DNA, 25 bp, Artificial
  Probe
gacactgatttcagatctcttaatg

SEQ ID NO: 291651 - DNA, 25 bp, Artificial
  Probe
ccgccatgatgctaggtaacaaacg

SEQ ID NO: 291652 - DNA, 25 bp, Artificial
  Probe
catcaccagacagagatatggcaag

SEQ ID NO: 291653 - DNA, 25 bp, Artificial
  Probe
acgcgccagcagaggacatggccag

SEQ ID NO: 291654 - DNA, 25 bp, Artificial
  Probe
tccctgctcgtgtgtttgggcattc

SEQ ID NO: 291655 - DNA, 25 bp, Artificial
  Probe
tcatcaccagacagagatatggcaa

SEQ ID NO: 291656 - DNA, 25 bp, Artificial
  Probe
aatctcatcaccagacagagatatg

SEQ ID NO: 291657 - DNA, 25 bp, Artificial
  Probe
ctctatccctgctcgtgtgtttggg

SEQ ID NO: 291658 - DNA, 25 bp, Artificial
  Probe
tctcatcaccagacagagatatggc

SEQ ID NO: 291659 - DNA, 25 bp, Artificial
  Probe
atccctgctcgtgtgtttgggcatt

SEQ ID NO: 291660 - DNA, 25 bp, Artificial
  Probe
tgctcgtgtgtttgggcattctggc

SEQ ID NO: 291661 - DNA, 25 bp, Artificial
  Probe
tatccctgctcgtgtgtttgggcat

SEQ ID NO: 291662 - DNA, 25 bp, Artificial
  Probe
ctatccctgctcgtgtgtttgggca

SEQ ID NO: 291663 - DNA, 25 bp, Artificial
  Probe
gacgcgccagcagaggacatggcca

SEQ ID NO: 291664 - DNA, 25 bp, Artificial
  Probe
tgtgaaaccagtctgcctgtcccac

SEQ ID NO: 291665 - DNA, 25 bp, Artificial
  Probe
gcagaggcgcccagagcagagcacc

SEQ ID NO: 291666 - DNA, 25 bp, Artificial
  Probe
gagacactgatttcagatctcttaa

SEQ ID NO: 291667 - DNA, 25 bp, Artificial
  Probe
ctgctcgtgtgtttgggcattctgg

SEQ ID NO: 291668 - DNA, 25 bp, Artificial
  Probe
ggctgtgtggactgaccctcgctct

SEQ ID NO: 291669 - DNA, 25 bp, Artificial
  Probe
ctgtgtggactgaccctcgctctat

SEQ ID NO: 291670 - DNA, 25 bp, Artificial
  Probe
gtcatcgtctggacgctggtggaca

SEQ ID NO: 291671 - DNA, 25 bp, Artificial
  Probe
ttcgtggtgtgctgggcgcccatcc

SEQ ID NO: 291672 - DNA, 25 bp, Artificial
  Probe
ccttcgtggtgtgctgggcgcccat

SEQ ID NO: 291673 - DNA, 25 bp, Artificial
  Probe
acgctggtggacatcaatcggcgcg

SEQ ID NO: 291674 - DNA, 25 bp, Artificial
  Probe
tggacgctggtggacatcaatcggc

SEQ ID NO: 291675 - DNA, 25 bp, Artificial
  Probe
catcttcgtcatcgtctggacgctg

SEQ ID NO: 291676 - DNA, 25 bp, Artificial
  Probe
cgctggtggacatcaatcggcgcga

SEQ ID NO: 291677 - DNA, 25 bp, Artificial
  Probe
ggtggccgcgctgcacttgtgcatt

SEQ ID NO: 291678 - DNA, 25 bp, Artificial
  Probe
tcgtcatcgtctggacgctggtgga

SEQ ID NO: 291679 - DNA, 25 bp, Artificial
  Probe
tcgtctggacgctggtggacatcaa

SEQ ID NO: 291680 - DNA, 25 bp, Artificial
  Probe
ttgcgctgggctacgccaacagcag

SEQ ID NO: 291681 - DNA, 25 bp, Artificial
  Probe
catccacatcttcgtcatcgtctgg

SEQ ID NO: 291682 - DNA, 25 bp, Artificial
  Probe
ccacatcttcgtcatcgtctggacg

SEQ ID NO: 291683 - DNA, 25 bp, Artificial
  Probe
agcctgcggcgcatcacgcgcatgg

SEQ ID NO: 291684 - DNA, 25 bp, Artificial
  Probe
cgctgcacttgtgcattgcgctggg

SEQ ID NO: 291685 - DNA, 25 bp, Artificial
  Probe
cattgggacagctagaatagggccc

SEQ ID NO: 291686 - DNA, 25 bp, Artificial
  Probe
tcttcgtcatcgtctggacgctggt

SEQ ID NO: 291687 - DNA, 25 bp, Artificial
  Probe
tcaatcggcgcgacccacttgtggt

SEQ ID NO: 291688 - DNA, 25 bp, Artificial
  Probe
tggtggacatcaatcggcgcgaccc

SEQ ID NO: 291689 - DNA, 25 bp, Artificial
  Probe
gaagtgatgcagtggccacaccgag

SEQ ID NO: 291690 - DNA, 25 bp, Artificial
  Probe
tgaagtgatgcagtggccacaccga

SEQ ID NO: 291691 - DNA, 25 bp, Artificial
  Probe
gctgcacttgtgcattgcgctgggc

SEQ ID NO: 291692 - DNA, 25 bp, Artificial
  Probe
gccgggcctgaggaatcaaaggctc

SEQ ID NO: 291693 - DNA, 25 bp, Artificial
  Probe
ctggtggacatcaatcggcgcgacc

SEQ ID NO: 291694 - DNA, 25 bp, Artificial
  Probe
gagctccctgggaggccatggccac

SEQ ID NO: 291695 - DNA, 25 bp, Artificial
  Probe
gccatggccaccattgggacagcta

SEQ ID NO: 291696 - DNA, 25 bp, Artificial
  Probe
tgcacttgtgcattgcgctgggcta

SEQ ID NO: 291697 - DNA, 25 bp, Artificial
  Probe
gccaccattgggacagctagaatag

SEQ ID NO: 291698 - DNA, 25 bp, Artificial
  Probe
ggccgcgctgcacttgtgcattgcg

SEQ ID NO: 291699 - DNA, 25 bp, Artificial
  Probe
catggccaccattgggacagctaga

SEQ ID NO: 291700 - DNA, 25 bp, Artificial
  Probe
ggtggacatcaatcggcgcgaccca

SEQ ID NO: 291701 - DNA, 25 bp, Artificial
  Probe
ccggctccaaggagaaggaccgcag

SEQ ID NO: 291702 - DNA, 25 bp, Artificial
  Probe
attgcgctgggctacgccaacagca

SEQ ID NO: 291703 - DNA, 25 bp, Artificial
  Probe
gcgacccacttgtggtggccgcgct

SEQ ID NO: 291704 - DNA, 25 bp, Artificial
  Probe
gcctgcggcgcatcacgcgcatggt

SEQ ID NO: 291705 - DNA, 25 bp, Artificial
  Probe
tggtggccgcgctgcacttgtgcat

SEQ ID NO: 291706 - DNA, 25 bp, Artificial
  Probe
tgtgcattgcgctgggctacgccaa

SEQ ID NO: 291707 - DNA, 25 bp, Artificial
  Probe
gtccggctccaaggagaaggaccgc

SEQ ID NO: 291708 - DNA, 25 bp, Artificial
  Probe
attgggacagctagaatagggccca

SEQ ID NO: 291709 - DNA, 25 bp, Artificial
  Probe
gaggccatggccaccattgggacag

SEQ ID NO: 291710 - DNA, 25 bp, Artificial
  Probe
caccgagctccctgggaggccatgg

SEQ ID NO: 291711 - DNA, 25 bp, Artificial
  Probe
ctgcacttgtgcattgcgctgggct

SEQ ID NO: 291712 - DNA, 25 bp, Artificial
  Probe
gtctggacgctggtggacatcaatc

SEQ ID NO: 291713 - DNA, 25 bp, Artificial
  Probe
caccattgggacagctagaataggg

SEQ ID NO: 291714 - DNA, 25 bp, Artificial
  Probe
acccacttgtggtggccgcgctgca

SEQ ID NO: 291715 - DNA, 25 bp, Artificial
  Probe
ccctgggaggccatggccaccattg

SEQ ID NO: 291716 - DNA, 25 bp, Artificial
  Probe
agtccacacaggaaaagagggaaat

SEQ ID NO: 291717 - DNA, 25 bp, Artificial
  Probe
accgcagaaagatcggttgttgctc

SEQ ID NO: 291718 - DNA, 25 bp, Artificial
  Probe
caagaccacaaagaacacaggctcc

SEQ ID NO: 291719 - DNA, 25 bp, Artificial
  Probe
actcagctaaatttcccataggaag

SEQ ID NO: 291720 - DNA, 25 bp, Artificial
  Probe
gctaaatttcccataggaaggagag

SEQ ID NO: 291721 - DNA, 25 bp, Artificial
  Probe
cggcttcatgaaggatgacgatgac

SEQ ID NO: 291722 - DNA, 25 bp, Artificial
  Probe
ttcattgcaagtggagagaaaagcc

SEQ ID NO: 291723 - DNA, 25 bp, Artificial
  Probe
tgagagcggcttcatgaaggatgac

SEQ ID NO: 291724 - DNA, 25 bp, Artificial
  Probe
gtgtatcatcctaaatgtctgtttt

SEQ ID NO: 291725 - DNA, 25 bp, Artificial
  Probe
gaaaggaccagcagtcttcccagct

SEQ ID NO: 291726 - DNA, 25 bp, Artificial
  Probe
tgcccctcagtctggctgtaaaacc

SEQ ID NO: 291727 - DNA, 25 bp, Artificial
  Probe
cttctctggaaggatacaaaaatga

SEQ ID NO: 291728 - DNA, 25 bp, Artificial
  Probe
gctgtaaaaccttacctcgctctga

SEQ ID NO: 291729 - DNA, 25 bp, Artificial
  Probe
aagatcggttgttgctccttctctg

SEQ ID NO: 291730 - DNA, 25 bp, Artificial
  Probe
gtcttcccagctgagaatggagttc

SEQ ID NO: 291731 - DNA, 25 bp, Artificial
  Probe
cctcagtctggctgtaaaaccttac

SEQ ID NO: 291732 - DNA, 25 bp, Artificial
  Probe
tccaagcagaatctcgtaactcacg

SEQ ID NO: 291733 - DNA, 25 bp, Artificial
  Probe
tcccagctgagaatggagttcagaa

SEQ ID NO: 291734 - DNA, 25 bp, Artificial
  Probe
agaacacaggctccaagcagaatct

SEQ ID NO: 291735 - DNA, 25 bp, Artificial
  Probe
ccttctctggaaggatacaaaaatg

SEQ ID NO: 291736 - DNA, 25 bp, Artificial
  Probe
gaccctgttggcaagtctgatacct

SEQ ID NO: 291737 - DNA, 25 bp, Artificial
  Probe
gctccttctctggaaggatacaaaa

SEQ ID NO: 291738 - DNA, 25 bp, Artificial
  Probe
ctcagctaaatttcccataggaagg

SEQ ID NO: 291739 - DNA, 25 bp, Artificial
  Probe
gaatctcgtaactcacggtctgccc

SEQ ID NO: 291740 - DNA, 25 bp, Artificial
  Probe
tgtaacttgtgtatcatcctaaatg

SEQ ID NO: 291741 - DNA, 25 bp, Artificial
  Probe
agcctttcagaaggaagataccgca

SEQ ID NO: 291742 - DNA, 25 bp, Artificial
  Probe
aagataccgcagaaagatcggttgt

SEQ ID NO: 291743 - DNA, 25 bp, Artificial
  Probe
ggtccacaacatcctttcagaagaa

SEQ ID NO: 291744 - DNA, 25 bp, Artificial
  Probe
accttacctcgctctgaaaggacca

SEQ ID NO: 291745 - DNA, 25 bp, Artificial
  Probe
agttcagaatactgagtccacacag

SEQ ID NO: 291746 - DNA, 25 bp, Artificial
  Probe
gtaaaaccttacctcgctctgaaag

SEQ ID NO: 291747 - DNA, 25 bp, Artificial
  Probe
ctgctggtccacaacatcctttcag

SEQ ID NO: 291748 - DNA, 25 bp, Artificial
  Probe
gatacctgctggtccacaacatcct

SEQ ID NO: 291749 - DNA, 25 bp, Artificial
  Probe
aaagcccttaatgttgatgtaactt

SEQ ID NO: 291750 - DNA, 25 bp, Artificial
  Probe
acttgtgtatcatcctaaatgtctg

SEQ ID NO: 291751 - DNA, 25 bp, Artificial
  Probe
gttgctccttctctggaaggataca

SEQ ID NO: 291752 - DNA, 25 bp, Artificial
  Probe
ctaaatttcccataggaaggagaga

SEQ ID NO: 291753 - DNA, 25 bp, Artificial
  Probe
cttcatgaaggatgacgatgacaag

SEQ ID NO: 291754 - DNA, 25 bp, Artificial
  Probe
gtctgcccctcagtctggctgtaaa

SEQ ID NO: 291755 - DNA, 25 bp, Artificial
  Probe
atatgctttgacttgtgcattaaac

SEQ ID NO: 291756 - DNA, 25 bp, Artificial
  Probe
cacaaagaacacaggctccaagcag

SEQ ID NO: 291757 - DNA, 25 bp, Artificial
  Probe
agcccttaatgttgatgtaacttgt

SEQ ID NO: 291758 - DNA, 25 bp, Artificial
  Probe
gaaagatcggttgttgctccttctc

SEQ ID NO: 291759 - DNA, 25 bp, Artificial
  Probe
cagtcttcccagctgagaatggagt

SEQ ID NO: 291760 - DNA, 25 bp, Artificial
  Probe
agtctggctgtaaaaccttacctcg

SEQ ID NO: 291761 - DNA, 25 bp, Artificial
  Probe
gtaacttgtgtatcatcctaaatgt

SEQ ID NO: 291762 - DNA, 25 bp, Artificial
  Probe
acgcaaattgttgctagagtaattt

SEQ ID NO: 291763 - DNA, 25 bp, Artificial
  Probe
aatttgtgacaaacttgcttaaaag

SEQ ID NO: 291764 - DNA, 25 bp, Artificial
  Probe
gtaatttcatcaggaatgctggtct

SEQ ID NO: 291765 - DNA, 25 bp, Artificial
  Probe
ttatatttttccaaagtataatact

SEQ ID NO: 291766 - DNA, 25 bp, Artificial
  Probe
tagaacctttttcttggtatgtata

SEQ ID NO: 291767 - DNA, 25 bp, Artificial
  Probe
tcatcaggaatgctggtcttagttt

SEQ ID NO: 291768 - DNA, 25 bp, Artificial
  Probe
ctctaggtttttgtgtgtgtacgca

SEQ ID NO: 291769 - DNA, 25 bp, Artificial
  Probe
acttaaacatctctatgatgttttt

SEQ ID NO: 291770 - DNA, 25 bp, Artificial
  Probe
gtgtacgcaaattgttgctagagta

SEQ ID NO: 291771 - DNA, 25 bp, Artificial
  Probe
ttcatcaggaatgctggtcttagtt

SEQ ID NO: 291772 - DNA, 25 bp, Artificial
  Probe
attatatttttggtgagatagaatt

SEQ ID NO: 291773 - DNA, 25 bp, Artificial
  Probe
taatttcatcaggaatgctggtctt

SEQ ID NO: 291774 - DNA, 25 bp, Artificial
  Probe
ttaatttaatactttgtagaatttg

SEQ ID NO: 291775 - DNA, 25 bp, Artificial
  Probe
aatttcatcaggaatgctggtctta

SEQ ID NO: 291776 - DNA, 25 bp, Artificial
  Probe
tttcatcaggaatgctggtcttagt

SEQ ID NO: 291777 - DNA, 25 bp, Artificial
  Probe
tacaagatattgtgctctttttctt

SEQ ID NO: 291778 - DNA, 25 bp, Artificial
  Probe
tctaggtttttgtgtgtgtacgcaa

SEQ ID NO: 291779 - DNA, 25 bp, Artificial
  Probe
gcttctcattttaatatggattgta

SEQ ID NO: 291780 - DNA, 25 bp, Artificial
  Probe
gatattgtgctctttttcttagact

SEQ ID NO: 291781 - DNA, 25 bp, Artificial
  Probe
ttcttggtatgtataaatggatacc

SEQ ID NO: 291782 - DNA, 25 bp, Artificial
  Probe
agtaatttcatcaggaatgctggtc

SEQ ID NO: 291783 - DNA, 25 bp, Artificial
  Probe
gtctctaggtttttgtgtgtgtacg

SEQ ID NO: 291784 - DNA, 25 bp, Artificial
  Probe
catcaggaatgctggtcttagtttt

SEQ ID NO: 291785 - DNA, 25 bp, Artificial
  Probe
tagactgtttgtctctaggtttttg

SEQ ID NO: 291786 - DNA, 25 bp, Artificial
  Probe
aaattatatttttggtgagatagaa

SEQ ID NO: 291787 - DNA, 25 bp, Artificial
  Probe
tctcattttaatatggattgtacaa

SEQ ID NO: 291788 - DNA, 25 bp, Artificial
  Probe
ttttcttggtatgtataaatggata

SEQ ID NO: 291789 - DNA, 25 bp, Artificial
  Probe
gactgtttgtctctaggtttttgtg

SEQ ID NO: 291790 - DNA, 25 bp, Artificial
  Probe
ttaatactttgtagaatttgtagga

SEQ ID NO: 291791 - DNA, 25 bp, Artificial
  Probe
tactttgtagaatttgtaggaaatt

SEQ ID NO: 291792 - DNA, 25 bp, Artificial
  Probe
ttgtctctaggtttttgtgtgtgta

SEQ ID NO: 291793 - DNA, 25 bp, Artificial
  Probe
acctttttcttggtatgtataaatg

SEQ ID NO: 291794 - DNA, 25 bp, Artificial
  Probe
ggaatgctggtcttagtttttatat

SEQ ID NO: 291795 - DNA, 25 bp, Artificial
  Probe
acaagatattgtgctctttttctta

SEQ ID NO: 291796 - DNA, 25 bp, Artificial
  Probe
aatggatacctattaatttaatact

SEQ ID NO: 291797 - DNA, 25 bp, Artificial
  Probe
atcaggaatgctggtcttagttttt

SEQ ID NO: 291798 - DNA, 25 bp, Artificial
  Probe
tgtgtgtgtacgcaaattgttgcta

SEQ ID NO: 291799 - DNA, 25 bp, Artificial
  Probe
tttttcttagactgtttgtctctag

SEQ ID NO: 291800 - DNA, 25 bp, Artificial
  Probe
atttcatcaggaatgctggtcttag

SEQ ID NO: 291801 - DNA, 25 bp, Artificial
  Probe
tgctggtcttagtttttatattttt

SEQ ID NO: 291802 - DNA, 25 bp, Artificial
  Probe
tcttagactgtttgtctctaggttt

SEQ ID NO: 291803 - DNA, 25 bp, Artificial
  Probe
agttgtaacaacttaaacatctcta

SEQ ID NO: 291804 - DNA, 25 bp, Artificial
  Probe
gacaaacttgcttaaaagaaacatg

SEQ ID NO: 291805 - DNA, 25 bp, Artificial
  Probe
taacaacttaaacatctctatgatg

SEQ ID NO: 291806 - DNA, 25 bp, Artificial
  Probe
ttaaacatctctatgatgtttttgt

SEQ ID NO: 291807 - DNA, 25 bp, Artificial
  Probe
atatttttggtgagatagaattagt

SEQ ID NO: 291808 - DNA, 25 bp, Artificial
  Probe
taatccaattattactgtcactgtt

SEQ ID NO: 291809 - DNA, 25 bp, Artificial
  Probe
aatccaattattactgtcactgtta

SEQ ID NO: 291810 - DNA, 25 bp, Artificial
  Probe
ttgccaaggctaatccaattattac

SEQ ID NO: 291811 - DNA, 25 bp, Artificial
  Probe
ttactgtcactgttaccataattta

SEQ ID NO: 291812 - DNA, 25 bp, Artificial
  Probe
ccaaggctaatccaattattactgt

SEQ ID NO: 291813 - DNA, 25 bp, Artificial
  Probe
gccaaggctaatccaattattactg

SEQ ID NO: 291814 - DNA, 25 bp, Artificial
  Probe
attattactgtcactgttaccataa

SEQ ID NO: 291815 - DNA, 25 bp, Artificial
  Probe
atccaattattactgtcactgttac

SEQ ID NO: 291816 - DNA, 25 bp, Artificial
  Probe
ttttgccaaggctaatccaattatt

SEQ ID NO: 291817 - DNA, 25 bp, Artificial
  Probe
aaggctaatccaattattactgtca

SEQ ID NO: 291818 - DNA, 25 bp, Artificial
  Probe
aggctaatccaattattactgtcac

SEQ ID NO: 291819 - DNA, 25 bp, Artificial
  Probe
caaggctaatccaattattactgtc

SEQ ID NO: 291820 - DNA, 25 bp, Artificial
  Probe
gcacatgggtcatgtgaatattttt

SEQ ID NO: 291821 - DNA, 25 bp, Artificial
  Probe
tttttttgccaaggctaatccaatt

SEQ ID NO: 291822 - DNA, 25 bp, Artificial
  Probe
ctaatccaattattactgtcactgt

SEQ ID NO: 291823 - DNA, 25 bp, Artificial
  Probe
tattactgtcactgttaccataatt

SEQ ID NO: 291824 - DNA, 25 bp, Artificial
  Probe
ccaattattactgtcactgttacca

SEQ ID NO: 291825 - DNA, 25 bp, Artificial
  Probe
ttattactgtcactgttaccataat

SEQ ID NO: 291826 - DNA, 25 bp, Artificial
  Probe
tttgccaaggctaatccaattatta

SEQ ID NO: 291827 - DNA, 25 bp, Artificial
  Probe
tgccaaggctaatccaattattact

SEQ ID NO: 291828 - DNA, 25 bp, Artificial
  Probe
caattattactgtcactgttaccat

SEQ ID NO: 291829 - DNA, 25 bp, Artificial
  Probe
tccaattattactgtcactgttacc

SEQ ID NO: 291830 - DNA, 25 bp, Artificial
  Probe
gctaatccaattattactgtcactg

SEQ ID NO: 291831 - DNA, 25 bp, Artificial
  Probe
attactgtcactgttaccataattt

SEQ ID NO: 291832 - DNA, 25 bp, Artificial
  Probe
ttttttttgccaaggctaatccaat

SEQ ID NO: 291833 - DNA, 25 bp, Artificial
  Probe
tttttgccaaggctaatccaattat

SEQ ID NO: 291834 - DNA, 25 bp, Artificial
  Probe
ttttttgccaaggctaatccaatta

SEQ ID NO: 291835 - DNA, 25 bp, Artificial
  Probe
aattattactgtcactgttaccata

SEQ ID NO: 291836 - DNA, 25 bp, Artificial
  Probe
ggctaatccaattattactgtcact

SEQ ID NO: 291837 - DNA, 25 bp, Artificial
  Probe
agactgatgatggtgctcatgactc

SEQ ID NO: 291838 - DNA, 25 bp, Artificial
  Probe
tgtccagtgccgaggccgcctgact

SEQ ID NO: 291839 - DNA, 25 bp, Artificial
  Probe
tgaccttcacattgggtggcttttt

SEQ ID NO: 291840 - DNA, 25 bp, Artificial
  Probe
ctgccccgctggaggcagcaaagct

SEQ ID NO: 291841 - DNA, 25 bp, Artificial
  Probe
acctcattccctggacacttgggca

SEQ ID NO: 291842 - DNA, 25 bp, Artificial
  Probe
atgactttctagatcccgttccccg

SEQ ID NO: 291843 - DNA, 25 bp, Artificial
  Probe
aggggaacttgaccttcacattggg

SEQ ID NO: 291844 - DNA, 25 bp, Artificial
  Probe
accctcctgggaacagtgtaggtga

SEQ ID NO: 291845 - DNA, 25 bp, Artificial
  Probe
caaggcagctggtgaggagcaccct

SEQ ID NO: 291846 - DNA, 25 bp, Artificial
  Probe
tccattccgagttcacactgctctg

SEQ ID NO: 291847 - DNA, 25 bp, Artificial
  Probe
ctgactcccggcaggactcttcagg

SEQ ID NO: 291848 - DNA, 25 bp, Artificial
  Probe
tcagcagggcgctctcgttctctct

SEQ ID NO: 291849 - DNA, 25 bp, Artificial
  Probe
ccttgcctgcacaggctgaggagat

SEQ ID NO: 291850 - DNA, 25 bp, Artificial
  Probe
ggaactccagtctgcctcttgccag

SEQ ID NO: 291851 - DNA, 25 bp, Artificial
  Probe
actgacacagccactgtgtggctgg

SEQ ID NO: 291852 - DNA, 25 bp, Artificial
  Probe
agcctgcacccaggaccgtcaggtg

SEQ ID NO: 291853 - DNA, 25 bp, Artificial
  Probe
cgtgtgcttgacatgggaaacttag

SEQ ID NO: 291854 - DNA, 25 bp, Artificial
  Probe
tcctagggttgaggtaggactgaca

SEQ ID NO: 291855 - DNA, 25 bp, Artificial
  Probe
tcagtcctagggttgaggtaggact

SEQ ID NO: 291856 - DNA, 25 bp, Artificial
  Probe
gtgccgtgtgcttgacatgggaaac

SEQ ID NO: 291857 - DNA, 25 bp, Artificial
  Probe
ctcagccggcgtccaggctgtgtct

SEQ ID NO: 291858 - DNA, 25 bp, Artificial
  Probe
ggcctttctcccatgactttctaga

SEQ ID NO: 291859 - DNA, 25 bp, Artificial
  Probe
gcaggactcttcaggctctggcctg

SEQ ID NO: 291860 - DNA, 25 bp, Artificial
  Probe
aacttagatgcctgctcactggcgg

SEQ ID NO: 291861 - DNA, 25 bp, Artificial
  Probe
ctcttgaggctgaagagactgatga

SEQ ID NO: 291862 - DNA, 25 bp, Artificial
  Probe
aagccagcacagagccactggggaa

SEQ ID NO: 291863 - DNA, 25 bp, Artificial
  Probe
ccaggaccgtcaggtgcagcaccgg

SEQ ID NO: 291864 - DNA, 25 bp, Artificial
  Probe
ataagcgaaggcagctggaactcca

SEQ ID NO: 291865 - DNA, 25 bp, Artificial
  Probe
cctgtcctggtggtgccgtgtgctt

SEQ ID NO: 291866 - DNA, 25 bp, Artificial
  Probe
actgctctggagcaggccaggaccg

SEQ ID NO: 291867 - DNA, 25 bp, Artificial
  Probe
tcagccggcgtccaggctgtgtctg

SEQ ID NO: 291868 - DNA, 25 bp, Artificial
  Probe
tgaaggctggcctttctcccatgac

SEQ ID NO: 291869 - DNA, 25 bp, Artificial
  Probe
aaggcgatggccttgcctgcacagg

SEQ ID NO: 291870 - DNA, 25 bp, Artificial
  Probe
acattttgcctttcacccagagaag

SEQ ID NO: 291871 - DNA, 25 bp, Artificial
  Probe
ctcagaagtgtgtggctcttgaggc

SEQ ID NO: 291872 - DNA, 25 bp, Artificial
  Probe
gttccccgtctgctttccctgtgag

SEQ ID NO: 291873 - DNA, 25 bp, Artificial
  Probe
ggctcttgaggctgaagagactgat

SEQ ID NO: 291874 - DNA, 25 bp, Artificial
  Probe
gtgacatgtaaagtccctgtggcta

SEQ ID NO: 291875 - DNA, 25 bp, Artificial
  Probe
ggtgctcatgactcttctgtgaggg

SEQ ID NO: 291876 - DNA, 25 bp, Artificial
  Probe
caacaaagtgctctggaatagcacc

SEQ ID NO: 291877 - DNA, 25 bp, Artificial
  Probe
tgactttctagatcccgttccccgt

SEQ ID NO: 291878 - DNA, 25 bp, Artificial
  Probe
gcatcgccaccactcagagtgagag

SEQ ID NO: 291879 - DNA, 25 bp, Artificial
  Probe
ctgtggctactgatgacatgtgtag

SEQ ID NO: 291880 - DNA, 25 bp, Artificial
  Probe
ggagctgagggtcttagaagcaatc

SEQ ID NO: 291881 - DNA, 25 bp, Artificial
  Probe
ggacacttgggcaagcaggcccgcc

SEQ ID NO: 291882 - DNA, 25 bp, Artificial
  Probe
gatgcctgctcactggcgggcacct

SEQ ID NO: 291883 - DNA, 25 bp, Artificial
  Probe
tgtggacacaccttcctcttactga

SEQ ID NO: 291884 - DNA, 25 bp, Artificial
  Probe
gtacagacagtggtgcagtgccagt

SEQ ID NO: 291885 - DNA, 25 bp, Artificial
  Probe
tgcagtgccagttttgcacatggag

SEQ ID NO: 291886 - DNA, 25 bp, Artificial
  Probe
cgctgaatctgtcttccaggagctg

SEQ ID NO: 291887 - DNA, 25 bp, Artificial
  Probe
gccagttttgcacatggagtcctgg

SEQ ID NO: 291888 - DNA, 25 bp, Artificial
  Probe
acgctgaatctgtcttccaggagct

SEQ ID NO: 291889 - DNA, 25 bp, Artificial
  Probe
ttgtggacacaccttcctcttactg

SEQ ID NO: 291890 - DNA, 25 bp, Artificial
  Probe
tggtgcagtgccagttttgcacatg

SEQ ID NO: 291891 - DNA, 25 bp, Artificial
  Probe
agaacttcactttgtggacacacct

SEQ ID NO: 291892 - DNA, 25 bp, Artificial
  Probe
acagtggtgcagtgccagttttgca

SEQ ID NO: 291893 - DNA, 25 bp, Artificial
  Probe
cagtgccagttttgcacatggagtc

SEQ ID NO: 291894 - DNA, 25 bp, Artificial
  Probe
ccagttttgcacatggagtcctggc

SEQ ID NO: 291895 - DNA, 25 bp, Artificial
  Probe
gctgaatctgtcttccaggagctgc

SEQ ID NO: 291896 - DNA, 25 bp, Artificial
  Probe
cagacagtggtgcagtgccagtttt

SEQ ID NO: 291897 - DNA, 25 bp, Artificial
  Probe
gcagtgccagttttgcacatggagt

SEQ ID NO: 291898 - DNA, 25 bp, Artificial
  Probe
aaatggaagctgtccgccaagccag

SEQ ID NO: 291899 - DNA, 25 bp, Artificial
  Probe
tacagaacttcactttgtggacaca

SEQ ID NO: 291900 - DNA, 25 bp, Artificial
  Probe
cacacgctgaatctgtcttccagga

SEQ ID NO: 291901 - DNA, 25 bp, Artificial
  Probe
gttttgcacatggagtcctggccac

SEQ ID NO: 291902 - DNA, 25 bp, Artificial
  Probe
cagttttgcacatggagtcctggcc

SEQ ID NO: 291903 - DNA, 25 bp, Artificial
  Probe
tttgcacatggagtcctggccacct

SEQ ID NO: 291904 - DNA, 25 bp, Artificial
  Probe
tacagacagtggtgcagtgccagtt

SEQ ID NO: 291905 - DNA, 25 bp, Artificial
  Probe
ctgtacagacagtggtgcagtgcca

SEQ ID NO: 291906 - DNA, 25 bp, Artificial
  Probe
gtgccagttttgcacatggagtcct

SEQ ID NO: 291907 - DNA, 25 bp, Artificial
  Probe
tgccagttttgcacatggagtcctg

SEQ ID NO: 291908 - DNA, 25 bp, Artificial
  Probe
ggtgcagtgccagttttgcacatgg

SEQ ID NO: 291909 - DNA, 25 bp, Artificial
  Probe
tgcacatggagtcctggccacctgg

SEQ ID NO: 291910 - DNA, 25 bp, Artificial
  Probe
tgtacagacagtggtgcagtgccag

SEQ ID NO: 291911 - DNA, 25 bp, Artificial
  Probe
agtgccagttttgcacatggagtcc

SEQ ID NO: 291912 - DNA, 25 bp, Artificial
  Probe
acacgctgaatctgtcttccaggag

SEQ ID NO: 291913 - DNA, 25 bp, Artificial
  Probe
ttggtactacagaacttcactttgt

SEQ ID NO: 291914 - DNA, 25 bp, Artificial
  Probe
ctacagaacttcactttgtggacac

SEQ ID NO: 291915 - DNA, 25 bp, Artificial
  Probe
gtggacacaccttcctcttactgag

SEQ ID NO: 291916 - DNA, 25 bp, Artificial
  Probe
ggtactacagaacttcactttgtgg

SEQ ID NO: 291917 - DNA, 25 bp, Artificial
  Probe
acagaacttcactttgtggacacac

SEQ ID NO: 291918 - DNA, 25 bp, Artificial
  Probe
gaacttcactttgtggacacacctt

SEQ ID NO: 291919 - DNA, 25 bp, Artificial
  Probe
gacagtggtgcagtgccagttttgc

SEQ ID NO: 291920 - DNA, 25 bp, Artificial
  Probe
agacagtggtgcagtgccagttttg

SEQ ID NO: 291921 - DNA, 25 bp, Artificial
  Probe
actacagaacttcactttgtggaca

SEQ ID NO: 291922 - DNA, 25 bp, Artificial
  Probe
ccacacgctgaatctgtcttccagg

SEQ ID NO: 291923 - DNA, 25 bp, Artificial
  Probe
ttttgcacatggagtcctggccacc

SEQ ID NO: 291924 - DNA, 25 bp, Artificial
  Probe
ctgaatctgtcttccaggagctgcc

SEQ ID NO: 291925 - DNA, 25 bp, Artificial
  Probe
tgaatctgtcttccaggagctgccc

SEQ ID NO: 291926 - DNA, 25 bp, Artificial
  Probe
gtactacagaacttcactttgtgga

SEQ ID NO: 291927 - DNA, 25 bp, Artificial
  Probe
cagaacttcactttgtggacacacc

SEQ ID NO: 291928 - DNA, 25 bp, Artificial
  Probe
tggtactacagaacttcactttgtg

SEQ ID NO: 291929 - DNA, 25 bp, Artificial
  Probe
acccgcaagattgcagtgcgtctga

SEQ ID NO: 291930 - DNA, 25 bp, Artificial
  Probe
tcatcgttcaagacggtgataactt

SEQ ID NO: 291931 - DNA, 25 bp, Artificial
  Probe
cgaagatcatcgttcaagacggtga

SEQ ID NO: 291932 - DNA, 25 bp, Artificial
  Probe
gttccgcaactatgacctagatttc

SEQ ID NO: 291933 - DNA, 25 bp, Artificial
  Probe
acgaagatcatcgttcaagacggtg

SEQ ID NO: 291934 - DNA, 25 bp, Artificial
  Probe
ctatgacctagatttcacagtgggg

SEQ ID NO: 291935 - DNA, 25 bp, Artificial
  Probe
tgcgtctgactcagacgaagatcat

SEQ ID NO: 291936 - DNA, 25 bp, Artificial
  Probe
cacgttccgcaactatgacctagat

SEQ ID NO: 291937 - DNA, 25 bp, Artificial
  Probe
gaagatcatcgttcaagacggtgat

SEQ ID NO: 291938 - DNA, 25 bp, Artificial
  Probe
agcacgttccgcaactatgacctag

SEQ ID NO: 291939 - DNA, 25 bp, Artificial
  Probe
cagtgcgtctgactcagacgaagat

SEQ ID NO: 291940 - DNA, 25 bp, Artificial
  Probe
cccgcaagattgcagtgcgtctgac

SEQ ID NO: 291941 - DNA, 25 bp, Artificial
  Probe
cgcaactatgacctagatttcacag

SEQ ID NO: 291942 - DNA, 25 bp, Artificial
  Probe
gaaggctacatgaaggccctagata

SEQ ID NO: 291943 - DNA, 25 bp, Artificial
  Probe
gcgtctgactcagacgaagatcatc

SEQ ID NO: 291944 - DNA, 25 bp, Artificial
  Probe
agatcatcgttcaagacggtgataa

SEQ ID NO: 291945 - DNA, 25 bp, Artificial
  Probe
gtctgactcagacgaagatcatcgt

SEQ ID NO: 291946 - DNA, 25 bp, Artificial
  Probe
aactttgaaggctacatgaaggccc

SEQ ID NO: 291947 - DNA, 25 bp, Artificial
  Probe
gcaactatgacctagatttcacagt

SEQ ID NO: 291948 - DNA, 25 bp, Artificial
  Probe
gcagtgcgtctgactcagacgaaga

SEQ ID NO: 291949 - DNA, 25 bp, Artificial
  Probe
cgcaagattgcagtgcgtctgactc

SEQ ID NO: 291950 - DNA, 25 bp, Artificial
  Probe
ctgactcagacgaagatcatcgttc

SEQ ID NO: 291951 - DNA, 25 bp, Artificial
  Probe
agacgaagatcatcgttcaagacgg

SEQ ID NO: 291952 - DNA, 25 bp, Artificial
  Probe
caactatgacctagatttcacagtg

SEQ ID NO: 291953 - DNA, 25 bp, Artificial
  Probe
gcaagattgcagtgcgtctgactca

SEQ ID NO: 291954 - DNA, 25 bp, Artificial
  Probe
gattgcagtgcgtctgactcagacg

SEQ ID NO: 291955 - DNA, 25 bp, Artificial
  Probe
cgttcaagacggtgataacttcaag

SEQ ID NO: 291956 - DNA, 25 bp, Artificial
  Probe
ccaacagcacgttccgcaactatga

SEQ ID NO: 291957 - DNA, 25 bp, Artificial
  Probe
accaacagcacgttccgcaactatg

SEQ ID NO: 291958 - DNA, 25 bp, Artificial
  Probe
aactatgacctagatttcacagtgg

SEQ ID NO: 291959 - DNA, 25 bp, Artificial
  Probe
aaggctacatgaaggccctagatat

SEQ ID NO: 291960 - DNA, 25 bp, Artificial
  Probe
attgcagtgcgtctgactcagacga

SEQ ID NO: 291961 - DNA, 25 bp, Artificial
  Probe
agacaaaaaccaacagcacgttccg

SEQ ID NO: 291962 - DNA, 25 bp, Artificial
  Probe
gcacgttccgcaactatgacctaga

SEQ ID NO: 291963 - DNA, 25 bp, Artificial
  Probe
actttgaaggctacatgaaggccct

SEQ ID NO: 291964 - DNA, 25 bp, Artificial
  Probe
atcatcgttcaagacggtgataact

SEQ ID NO: 291965 - DNA, 25 bp, Artificial
  Probe
ctttgaaggctacatgaaggcccta

SEQ ID NO: 291966 - DNA, 25 bp, Artificial
  Probe
aagatcatcgttcaagacggtgata

SEQ ID NO: 291967 - DNA, 25 bp, Artificial
  Probe
acgttccgcaactatgacctagatt

SEQ ID NO: 291968 - DNA, 25 bp, Artificial
  Probe
gtgcgtctgactcagacgaagatca

SEQ ID NO: 291969 - DNA, 25 bp, Artificial
  Probe
gactcagacgaagatcatcgttcaa

SEQ ID NO: 291970 - DNA, 25 bp, Artificial
  Probe
cgtctgactcagacgaagatcatcg

SEQ ID NO: 291971 - DNA, 25 bp, Artificial
  Probe
gacgaagatcatcgttcaagacggt

SEQ ID NO: 291972 - DNA, 25 bp, Artificial
  Probe
ctcagacgaagatcatcgttcaaga

SEQ ID NO: 291973 - DNA, 25 bp, Artificial
  Probe
ttgcagtgcgtctgactcagacgaa

SEQ ID NO: 291974 - DNA, 25 bp, Artificial
  Probe
gacaaaaaccaacagcacgttccgc

SEQ ID NO: 291975 - DNA, 25 bp, Artificial
  Probe
tccaatcgtggctactgtgtatctg

SEQ ID NO: 291976 - DNA, 25 bp, Artificial
  Probe
atctgtgacttcaaactcaggatac

SEQ ID NO: 291977 - DNA, 25 bp, Artificial
  Probe
caaatcctgggacactgggtatcct

SEQ ID NO: 291978 - DNA, 25 bp, Artificial
  Probe
cttggtgtcagtgctcagccaggct

SEQ ID NO: 291979 - DNA, 25 bp, Artificial
  Probe
ctaacaattccaatcgtggctactg

SEQ ID NO: 291980 - DNA, 25 bp, Artificial
  Probe
tgcccaattatcatttgtctgcaag

SEQ ID NO: 291981 - DNA, 25 bp, Artificial
  Probe
caattccaatcgtggctactgtgta

SEQ ID NO: 291982 - DNA, 25 bp, Artificial
  Probe
gctcagccaggctgagggcaacttt

SEQ ID NO: 291983 - DNA, 25 bp, Artificial
  Probe
ctctgattaaggagagtggtactac

SEQ ID NO: 291984 - DNA, 25 bp, Artificial
  Probe
cttcaaactcaggatacaagaaatg

SEQ ID NO: 291985 - DNA, 25 bp, Artificial
  Probe
cagtgctcagccaggctgagggcaa

SEQ ID NO: 291986 - DNA, 25 bp, Artificial
  Probe
gataacagttgtgatgcccaattat

SEQ ID NO: 291987 - DNA, 25 bp, Artificial
  Probe
tggagcagtgggtctctgtttctct

SEQ ID NO: 291988 - DNA, 25 bp, Artificial
  Probe
tgggacactgggtatcctaacaatt

SEQ ID NO: 291989 - DNA, 25 bp, Artificial
  Probe
taacagttgtgatgcccaattatca

SEQ ID NO: 291990 - DNA, 25 bp, Artificial
  Probe
ggctacttggtgtcagtgctcagcc

SEQ ID NO: 291991 - DNA, 25 bp, Artificial
  Probe
acaattccaatcgtggctactgtgt

SEQ ID NO: 291992 - DNA, 25 bp, Artificial
  Probe
aggctgagggcaactttctggcctc

SEQ ID NO: 291993 - DNA, 25 bp, Artificial
  Probe
gggacactgggtatcctaacaattc

SEQ ID NO: 291994 - DNA, 25 bp, Artificial
  Probe
gtatcctaacaattccaatcgtggc

SEQ ID NO: 291995 - DNA, 25 bp, Artificial
  Probe
ctctctgattaaggagagtggtact

SEQ ID NO: 291996 - DNA, 25 bp, Artificial
  Probe
gagtggtactacagctgccaatgtc

SEQ ID NO: 291997 - DNA, 25 bp, Artificial
  Probe
gctgagggcaactttctggcctctc

SEQ ID NO: 291998 - DNA, 25 bp, Artificial
  Probe
ccaatcgtggctactgtgtatctgt

SEQ ID NO: 291999 - DNA, 25 bp, Artificial
  Probe
gacactgggtatcctaacaattcca

SEQ ID NO: 292000 - DNA, 25 bp, Artificial
  Probe
atcctgggacactgggtatcctaac

SEQ ID NO: 292001 - DNA, 25 bp, Artificial
  Probe
tggtgtcagtgctcagccaggctga

SEQ ID NO: 292002 - DNA, 25 bp, Artificial
  Probe
gttgtgatgcccaattatcatttgt

SEQ ID NO: 292003 - DNA, 25 bp, Artificial
  Probe
ctctgtttctctacaaatcctggga

SEQ ID NO: 292004 - DNA, 25 bp, Artificial
  Probe
acagctgccaatgtctggattggcc

SEQ ID NO: 292005 - DNA, 25 bp, Artificial
  Probe
tcagccaggctgagggcaactttct

SEQ ID NO: 292006 - DNA, 25 bp, Artificial
  Probe
tgatgcccaattatcatttgtctgc

SEQ ID NO: 292007 - DNA, 25 bp, Artificial
  Probe
ggagcagtgggtctctgtttctcta

SEQ ID NO: 292008 - DNA, 25 bp, Artificial
  Probe
caaactcaggatacaagaaatggag

SEQ ID NO: 292009 - DNA, 25 bp, Artificial
  Probe
agggcaactttctggcctctctgat

SEQ ID NO: 292010 - DNA, 25 bp, Artificial
  Probe
tggtactacagctgccaatgtctgg

SEQ ID NO: 292011 - DNA, 25 bp, Artificial
  Probe
gatgcccaattatcatttgtctgca

SEQ ID NO: 292012 - DNA, 25 bp, Artificial
  Probe
tggctactgtgtatctgtgacttca

SEQ ID NO: 292013 - DNA, 25 bp, Artificial
  Probe
actacagctgccaatgtctggattg

SEQ ID NO: 292014 - DNA, 25 bp, Artificial
  Probe
ctctacaaatcctgggacactgggt

SEQ ID NO: 292015 - DNA, 25 bp, Artificial
  Probe
gcactggagcagtgggtctctgttt

SEQ ID NO: 292016 - DNA, 25 bp, Artificial
  Probe
gacttcaaactcaggatacaagaaa

SEQ ID NO: 292017 - DNA, 25 bp, Artificial
  Probe
taacaattccaatcgtggctactgt

SEQ ID NO: 292018 - DNA, 25 bp, Artificial
  Probe
ctgggtatcctaacaattccaatcg

SEQ ID NO: 292019 - DNA, 25 bp, Artificial
  Probe
gtatctgtgacttcaaactcaggat

SEQ ID NO: 292020 - DNA, 25 bp, Artificial
  Probe
aactttctggcctctctgattaagg

SEQ ID NO: 292021 - DNA, 25 bp, Artificial
  Probe
cttgtgcctgctccttttctgtatc

SEQ ID NO: 292022 - DNA, 25 bp, Artificial
  Probe
tctgtatcccttactctgttgtctg

SEQ ID NO: 292023 - DNA, 25 bp, Artificial
  Probe
tgatgaggtcccagggactcctgtc

SEQ ID NO: 292024 - DNA, 25 bp, Artificial
  Probe
tctccccgggcaagagaaggggact

SEQ ID NO: 292025 - DNA, 25 bp, Artificial
  Probe
tgggtttgctttctccaggctctct

SEQ ID NO: 292026 - DNA, 25 bp, Artificial
  Probe
gttttgcttgtctccccgggcaaga

SEQ ID NO: 292027 - DNA, 25 bp, Artificial
  Probe
ctgtatcccttactctgttgtctgt

SEQ ID NO: 292028 - DNA, 25 bp, Artificial
  Probe
tgtgcctgctccttttctgtatccc

SEQ ID NO: 292029 - DNA, 25 bp, Artificial
  Probe
ttgtgcctgctccttttctgtatcc

SEQ ID NO: 292030 - DNA, 25 bp, Artificial
  Probe
ggtttgctttctccaggctctctag

SEQ ID NO: 292031 - DNA, 25 bp, Artificial
  Probe
agttttgcttgtctccccgggcaag

SEQ ID NO: 292032 - DNA, 25 bp, Artificial
  Probe
tcccttactctgttgtctgttactg

SEQ ID NO: 292033 - DNA, 25 bp, Artificial
  Probe
gggtttgctttctccaggctctcta

SEQ ID NO: 292034 - DNA, 25 bp, Artificial
  Probe
gtatcccttactctgttgtctgtta

SEQ ID NO: 292035 - DNA, 25 bp, Artificial
  Probe
gttacggttcagttttgcttgtctc

SEQ ID NO: 292036 - DNA, 25 bp, Artificial
  Probe
caggttacggttcagttttgcttgt

SEQ ID NO: 292037 - DNA, 25 bp, Artificial
  Probe
ttcagttttgcttgtctccccgggc

SEQ ID NO: 292038 - DNA, 25 bp, Artificial
  Probe
tcagttttgcttgtctccccgggca

SEQ ID NO: 292039 - DNA, 25 bp, Artificial
  Probe
gtgcctgctccttttctgtatccct

SEQ ID NO: 292040 - DNA, 25 bp, Artificial
  Probe
tttgctttctccaggctctctagat

SEQ ID NO: 292041 - DNA, 25 bp, Artificial
  Probe
ggttcagttttgcttgtctccccgg

SEQ ID NO: 292042 - DNA, 25 bp, Artificial
  Probe
ggctggtttagcaggttacggttca

SEQ ID NO: 292043 - DNA, 25 bp, Artificial
  Probe
cggttcagttttgcttgtctccccg

SEQ ID NO: 292044 - DNA, 25 bp, Artificial
  Probe
cccttactctgttgtctgttactga

SEQ ID NO: 292045 - DNA, 25 bp, Artificial
  Probe
ccttgtgcctgctccttttctgtat

SEQ ID NO: 292046 - DNA, 25 bp, Artificial
  Probe
agcaggttacggttcagttttgctt

SEQ ID NO: 292047 - DNA, 25 bp, Artificial
  Probe
gccttgtgcctgctccttttctgta

SEQ ID NO: 292048 - DNA, 25 bp, Artificial
  Probe
ctggtttagcaggttacggttcagt

SEQ ID NO: 292049 - DNA, 25 bp, Artificial
  Probe
ttacggttcagttttgcttgtctcc

SEQ ID NO: 292050 - DNA, 25 bp, Artificial
  Probe
gctggtttagcaggttacggttcag

SEQ ID NO: 292051 - DNA, 25 bp, Artificial
  Probe
ccttactctgttgtctgttactgat

SEQ ID NO: 292052 - DNA, 25 bp, Artificial
  Probe
gtttgctttctccaggctctctaga

SEQ ID NO: 292053 - DNA, 25 bp, Artificial
  Probe
aaggtgatgaggtcccagggactcc

SEQ ID NO: 292054 - DNA, 25 bp, Artificial
  Probe
agccttgtgcctgctccttttctgt

SEQ ID NO: 292055 - DNA, 25 bp, Artificial
  Probe
gttcagttttgcttgtctccccggg

SEQ ID NO: 292056 - DNA, 25 bp, Artificial
  Probe
ctccgtgcagggtcctagctggctg

SEQ ID NO: 292057 - DNA, 25 bp, Artificial
  Probe
cagttttgcttgtctccccgggcaa

SEQ ID NO: 292058 - DNA, 25 bp, Artificial
  Probe
gcaggttacggttcagttttgcttg

SEQ ID NO: 292059 - DNA, 25 bp, Artificial
  Probe
cagggtcctagctggctgggtcctc

SEQ ID NO: 292060 - DNA, 25 bp, Artificial
  Probe
tacggttcagttttgcttgtctccc

SEQ ID NO: 292061 - DNA, 25 bp, Artificial
  Probe
tagccttgtgcctgctccttttctg

SEQ ID NO: 292062 - DNA, 25 bp, Artificial
  Probe
tgtcatgattcaagctcagcagcaa

SEQ ID NO: 292063 - DNA, 25 bp, Artificial
  Probe
ctcttacctgcatcctgtagagtag

SEQ ID NO: 292064 - DNA, 25 bp, Artificial
  Probe
ttacctgcatcctgtagagtagaca

SEQ ID NO: 292065 - DNA, 25 bp, Artificial
  Probe
tctcttacctgcatcctgtagagta

SEQ ID NO: 292066 - DNA, 25 bp, Artificial
  Probe
cccagcttgtcatgattcaagctca

SEQ ID NO: 292067 - DNA, 25 bp, Artificial
  Probe
ggtgcttggcccagctgtctcctct

SEQ ID NO: 292068 - DNA, 25 bp, Artificial
  Probe
ggcccagcttgtcatgattcaagct

SEQ ID NO: 292069 - DNA, 25 bp, Artificial
  Probe
cccaggatcgtgcaatagtcagagg

SEQ ID NO: 292070 - DNA, 25 bp, Artificial
  Probe
agcagcaagggtcctggtacctccc

SEQ ID NO: 292071 - DNA, 25 bp, Artificial
  Probe
agcttgtcatgattcaagctcagca

SEQ ID NO: 292072 - DNA, 25 bp, Artificial
  Probe
agcaagggtcctggtacctcccttg

SEQ ID NO: 292073 - DNA, 25 bp, Artificial
  Probe
agctcagcagcaagggtcctggtac

SEQ ID NO: 292074 - DNA, 25 bp, Artificial
  Probe
tgattcaagctcagcagcaagggtc

SEQ ID NO: 292075 - DNA, 25 bp, Artificial
  Probe
gcagcaagggtcctggtacctccct

SEQ ID NO: 292076 - DNA, 25 bp, Artificial
  Probe
gcggcctttgctcacaggcatgtac

SEQ ID NO: 292077 - DNA, 25 bp, Artificial
  Probe
gcctgcagcactgattcagacgtgg

SEQ ID NO: 292078 - DNA, 25 bp, Artificial
  Probe
ctgcatcctgtagagtagacagcag

SEQ ID NO: 292079 - DNA, 25 bp, Artificial
  Probe
ttcaagctcagcagcaagggtcctg

SEQ ID NO: 292080 - DNA, 25 bp, Artificial
  Probe
gattcaagctcagcagcaagggtcc

SEQ ID NO: 292081 - DNA, 25 bp, Artificial
  Probe
cctagcggcctttgctcacaggcat

SEQ ID NO: 292082 - DNA, 25 bp, Artificial
  Probe
tccccaggatcgtgcaatagtcaga

SEQ ID NO: 292083 - DNA, 25 bp, Artificial
  Probe
cagcactgattcagacgtggcccag

SEQ ID NO: 292084 - DNA, 25 bp, Artificial
  Probe
agacgtggcccagcttgtcatgatt

SEQ ID NO: 292085 - DNA, 25 bp, Artificial
  Probe
ctgattcagacgtggcccagcttgt

SEQ ID NO: 292086 - DNA, 25 bp, Artificial
  Probe
actctcttacctgcatcctgtagag

SEQ ID NO: 292087 - DNA, 25 bp, Artificial
  Probe
catgattcaagctcagcagcaaggg

SEQ ID NO: 292088 - DNA, 25 bp, Artificial
  Probe
tcatgattcaagctcagcagcaagg

SEQ ID NO: 292089 - DNA, 25 bp, Artificial
  Probe
gcatcctgtagagtagacagcagtg

SEQ ID NO: 292090 - DNA, 25 bp, Artificial
  Probe
tggcctgcagcactgattcagacgt

SEQ ID NO: 292091 - DNA, 25 bp, Artificial
  Probe
acgtggcccagcttgtcatgattca

SEQ ID NO: 292092 - DNA, 25 bp, Artificial
  Probe
gggctctggcctgcagcactgattc

SEQ ID NO: 292093 - DNA, 25 bp, Artificial
  Probe
gggtcctggtacctcccttgctctt

SEQ ID NO: 292094 - DNA, 25 bp, Artificial
  Probe
cagcagcaagggtcctggtacctcc

SEQ ID NO: 292095 - DNA, 25 bp, Artificial
  Probe
tctggcctgcagcactgattcagac

SEQ ID NO: 292096 - DNA, 25 bp, Artificial
  Probe
cttacctgcatcctgtagagtagac

SEQ ID NO: 292097 - DNA, 25 bp, Artificial
  Probe
gcagcactgattcagacgtggccca

SEQ ID NO: 292098 - DNA, 25 bp, Artificial
  Probe
cagacgtggcccagcttgtcatgat

SEQ ID NO: 292099 - DNA, 25 bp, Artificial
  Probe
ccccaggatcgtgcaatagtcagag

SEQ ID NO: 292100 - DNA, 25 bp, Artificial
  Probe
ggcctttgctcacaggcatgtactc

SEQ ID NO: 292101 - DNA, 25 bp, Artificial
  Probe
gtggcccagcttgtcatgattcaag

SEQ ID NO: 292102 - DNA, 25 bp, Artificial
  Probe
ttgtcatgattcaagctcagcagca

SEQ ID NO: 292103 - DNA, 25 bp, Artificial
  Probe
ggtcctggtacctcccttgctcttg

SEQ ID NO: 292104 - DNA, 25 bp, Artificial
  Probe
agggtcctggtacctcccttgctct

SEQ ID NO: 292105 - DNA, 25 bp, Artificial
  Probe
gcactgattcagacgtggcccagct

SEQ ID NO: 292106 - DNA, 25 bp, Artificial
  Probe
catcctgtagagtagacagcagtgg

SEQ ID NO: 292107 - DNA, 25 bp, Artificial
  Probe
atcctgtagagtagacagcagtgga

SEQ ID NO: 292108 - DNA, 25 bp, Artificial
  Probe
taaaccaatgcctctcaagctgcag

SEQ ID NO: 292109 - DNA, 25 bp, Artificial
  Probe
gtgagggcagccactagtgaccgcc

SEQ ID NO: 292110 - DNA, 25 bp, Artificial
  Probe
agacttggtggcagcttccgagaag

SEQ ID NO: 292111 - DNA, 25 bp, Artificial
  Probe
agcccatagtgtttatagacttggt

SEQ ID NO: 292112 - DNA, 25 bp, Artificial
  Probe
acttgcacaaaatcagcccatagtg

SEQ ID NO: 292113 - DNA, 25 bp, Artificial
  Probe
tccattctctggaatactttttagg

SEQ ID NO: 292114 - DNA, 25 bp, Artificial
  Probe
gaaagattcacttgcacaaaatcag

SEQ ID NO: 292115 - DNA, 25 bp, Artificial
  Probe
tgttacctcttcacctttgatgatg

SEQ ID NO: 292116 - DNA, 25 bp, Artificial
  Probe
ttgcacaaaatcagcccatagtgtt

SEQ ID NO: 292117 - DNA, 25 bp, Artificial
  Probe
ctttcattagggatccatggccacc

SEQ ID NO: 292118 - DNA, 25 bp, Artificial
  Probe
accgcctgggttttatgtgtgtggt

SEQ ID NO: 292119 - DNA, 25 bp, Artificial
  Probe
cattctctggaatactttttaggag

SEQ ID NO: 292120 - DNA, 25 bp, Artificial
  Probe
ggcagcttccgagaagtcctaccag

SEQ ID NO: 292121 - DNA, 25 bp, Artificial
  Probe
ttatagacttggtggcagcttccga

SEQ ID NO: 292122 - DNA, 25 bp, Artificial
  Probe
tacgaaccgctttccagtgttaaag

SEQ ID NO: 292123 - DNA, 25 bp, Artificial
  Probe
tgaccgcctgggttttatgtgtgtg

SEQ ID NO: 292124 - DNA, 25 bp, Artificial
  Probe
attgtcctgcagtcccttcagagct

SEQ ID NO: 292125 - DNA, 25 bp, Artificial
  Probe
cagcttccgagaagtcctaccagtg

SEQ ID NO: 292126 - DNA, 25 bp, Artificial
  Probe
ctagtgaccgcctgggttttatgtg

SEQ ID NO: 292127 - DNA, 25 bp, Artificial
  Probe
atgaggaagcactttggagaaacca

SEQ ID NO: 292128 - DNA, 25 bp, Artificial
  Probe
gatccatggccacctgctttaataa

SEQ ID NO: 292129 - DNA, 25 bp, Artificial
  Probe
aaattgtcctgcagtcccttcagag

SEQ ID NO: 292130 - DNA, 25 bp, Artificial
  Probe
attagggatccatggccacctgctt

SEQ ID NO: 292131 - DNA, 25 bp, Artificial
  Probe
tttatctaggtacagaaagattcac

SEQ ID NO: 292132 - DNA, 25 bp, Artificial
  Probe
cctaccagtgaggacctcttgtggc

SEQ ID NO: 292133 - DNA, 25 bp, Artificial
  Probe
aaatcagcccatagtgtttatagac

SEQ ID NO: 292134 - DNA, 25 bp, Artificial
  Probe
aatgaggaagcactttggagaaacc

SEQ ID NO: 292135 - DNA, 25 bp, Artificial
  Probe
gaggtggttcctttcattagggatc

SEQ ID NO: 292136 - DNA, 25 bp, Artificial
  Probe
tgcagtcccttcagagctgcgagct

SEQ ID NO: 292137 - DNA, 25 bp, Artificial
  Probe
gttcctttcattagggatccatggc

SEQ ID NO: 292138 - DNA, 25 bp, Artificial
  Probe
tcccttcagagctgcgagctgggaa

SEQ ID NO: 292139 - DNA, 25 bp, Artificial
  Probe
agtcctaccagtgaggacctcttgt

SEQ ID NO: 292140 - DNA, 25 bp, Artificial
  Probe
tgacttcgaatgaggaagcactttg

SEQ ID NO: 292141 - DNA, 25 bp, Artificial
  Probe
tacctcttcacctttgatgatgtag

SEQ ID NO: 292142 - DNA, 25 bp, Artificial
  Probe
ggatccatggccacctgctttaata

SEQ ID NO: 292143 - DNA, 25 bp, Artificial
  Probe
tatacgaaccgctttccagtgttaa

SEQ ID NO: 292144 - DNA, 25 bp, Artificial
  Probe
cagccactagtgaccgcctgggttt

SEQ ID NO: 292145 - DNA, 25 bp, Artificial
  Probe
tgtttatagacttggtggcagcttc

SEQ ID NO: 292146 - DNA, 25 bp, Artificial
  Probe
ggcagccactagtgaccgcctgggt

SEQ ID NO: 292147 - DNA, 25 bp, Artificial
  Probe
tcctgcagtcccttcagagctgcga

SEQ ID NO: 292148 - DNA, 25 bp, Artificial
  Probe
cagtgtgagggcagccactagtgac

SEQ ID NO: 292149 - DNA, 25 bp, Artificial
  Probe
ccgagaagtcctaccagtgaggacc

SEQ ID NO: 292150 - DNA, 25 bp, Artificial
  Probe
ttggtggcagcttccgagaagtcct

SEQ ID NO: 292151 - DNA, 25 bp, Artificial
  Probe
atcagcccatagtgtttatagactt

SEQ ID NO: 292152 - DNA, 25 bp, Artificial
  Probe
ggtttgacttcgaatgaggaagcac

SEQ ID NO: 292153 - DNA, 25 bp, Artificial
  Probe
acctttgatgatgtagtgactcaaa

SEQ ID NO: 292154 - DNA, 25 bp, Artificial
  Probe
tgtgccttaaaatgcccccatgtgt

SEQ ID NO: 292155 - DNA, 25 bp, Artificial
  Probe
ctaaatgatacatacagtggctaca

SEQ ID NO: 292156 - DNA, 25 bp, Artificial
  Probe
ctgtacctaaatgatacatacagtg

SEQ ID NO: 292157 - DNA, 25 bp, Artificial
  Probe
cctaaatgatacatacagtggctac

SEQ ID NO: 292158 - DNA, 25 bp, Artificial
  Probe
gacctactttgtggtactacaaagt

SEQ ID NO: 292159 - DNA, 25 bp, Artificial
  Probe
ctttgtggtactacaaagtatacaa

SEQ ID NO: 292160 - DNA, 25 bp, Artificial
  Probe
gaccctcttgttcttgtcattgttg

SEQ ID NO: 292161 - DNA, 25 bp, Artificial
  Probe
catgtgttgggcagcatctgtacaa

SEQ ID NO: 292162 - DNA, 25 bp, Artificial
  Probe
catatggaacagtcttgacaagaaa

SEQ ID NO: 292163 - DNA, 25 bp, Artificial
  Probe
actttgtggtactacaaagtataca

SEQ ID NO: 292164 - DNA, 25 bp, Artificial
  Probe
tgtacaaggagtccattagcaaagc

SEQ ID NO: 292165 - DNA, 25 bp, Artificial
  Probe
gaactacaccactgggcatagccat

SEQ ID NO: 292166 - DNA, 25 bp, Artificial
  Probe
cagtggctacatttcatagttgagg

SEQ ID NO: 292167 - DNA, 25 bp, Artificial
  Probe
taattctgatctcagaataatgtgc

SEQ ID NO: 292168 - DNA, 25 bp, Artificial
  Probe
tgcccccatgtgttgggcagcatct

SEQ ID NO: 292169 - DNA, 25 bp, Artificial
  Probe
tctgatctcagaataatgtgcctta

SEQ ID NO: 292170 - DNA, 25 bp, Artificial
  Probe
aatgatacatacagtggctacattt

SEQ ID NO: 292171 - DNA, 25 bp, Artificial
  Probe
tcatagttgaggaccctcttgttct

SEQ ID NO: 292172 - DNA, 25 bp, Artificial
  Probe
ttgacctactttgtggtactacaaa

SEQ ID NO: 292173 - DNA, 25 bp, Artificial
  Probe
gaaatttgtatttccgcttctgtat

SEQ ID NO: 292174 - DNA, 25 bp, Artificial
  Probe
agtgtgtgaactacaccactgggca

SEQ ID NO: 292175 - DNA, 25 bp, Artificial
  Probe
tgatacatacagtggctacatttca

SEQ ID NO: 292176 - DNA, 25 bp, Artificial
  Probe
tctcagaataatgtgccttaaaatg

SEQ ID NO: 292177 - DNA, 25 bp, Artificial
  Probe
cctatgaatgtatttccttaggaaa

SEQ ID NO: 292178 - DNA, 25 bp, Artificial
  Probe
agtcttgacaagaaagcctcattca

SEQ ID NO: 292179 - DNA, 25 bp, Artificial
  Probe
gaacagtcttgacaagaaagcctca

SEQ ID NO: 292180 - DNA, 25 bp, Artificial
  Probe
acaccactgggcatagccatatgga

SEQ ID NO: 292181 - DNA, 25 bp, Artificial
  Probe
atggaacagtcttgacaagaaagcc

SEQ ID NO: 292182 - DNA, 25 bp, Artificial
  Probe
agttgaggaccctcttgttcttgtc

SEQ ID NO: 292183 - DNA, 25 bp, Artificial
  Probe
gcccccatgtgttgggcagcatctg

SEQ ID NO: 292184 - DNA, 25 bp, Artificial
  Probe
tgtgcacaggccatgtcctttgagt

SEQ ID NO: 292185 - DNA, 25 bp, Artificial
  Probe
ctttgacctactttgtggtactaca

SEQ ID NO: 292186 - DNA, 25 bp, Artificial
  Probe
agccatatggaacagtcttgacaag

SEQ ID NO: 292187 - DNA, 25 bp, Artificial
  Probe
accactgggcatagccatatggaac

SEQ ID NO: 292188 - DNA, 25 bp, Artificial
  Probe
ggcatagccatatggaacagtcttg

SEQ ID NO: 292189 - DNA, 25 bp, Artificial
  Probe
tcctttgagtgtgtgaactacacca

SEQ ID NO: 292190 - DNA, 25 bp, Artificial
  Probe
aaatgcccccatgtgttgggcagca

SEQ ID NO: 292191 - DNA, 25 bp, Artificial
  Probe
atactgaactttgacctactttgtg

SEQ ID NO: 292192 - DNA, 25 bp, Artificial
  Probe
gtcttgacaagaaagcctcattcac

SEQ ID NO: 292193 - DNA, 25 bp, Artificial
  Probe
gaataatgtgccttaaaatgccccc

SEQ ID NO: 292194 - DNA, 25 bp, Artificial
  Probe
gaactttgacctactttgtggtact

SEQ ID NO: 292195 - DNA, 25 bp, Artificial
  Probe
ttagctgtgcacaggccatgtcctt

SEQ ID NO: 292196 - DNA, 25 bp, Artificial
  Probe
acatacagtggctacatttcatagt

SEQ ID NO: 292197 - DNA, 25 bp, Artificial
  Probe
ctgggcatagccatatggaacagtc

SEQ ID NO: 292198 - DNA, 25 bp, Artificial
  Probe
taatgtgccttaaaatgcccccatg

SEQ ID NO: 292199 - DNA, 25 bp, Artificial
  Probe
aggagtccattagcaaagctgcagt

SEQ ID NO: 292200 - DNA, 25 bp, Artificial
  Probe
acatctccgtgcacacttgcgctgg

SEQ ID NO: 292201 - DNA, 25 bp, Artificial
  Probe
ttctgagattagacgccagggccag

SEQ ID NO: 292202 - DNA, 25 bp, Artificial
  Probe
gcacattgcccctggacagtggggc

SEQ ID NO: 292203 - DNA, 25 bp, Artificial
  Probe
cattcatgtgtaattggtcatactg

SEQ ID NO: 292204 - DNA, 25 bp, Artificial
  Probe
atggtagccatggaggccatctgtc

SEQ ID NO: 292205 - DNA, 25 bp, Artificial
  Probe
ggccattcatgtgtaattggtcata

SEQ ID NO: 292206 - DNA, 25 bp, Artificial
  Probe
tccagagggtattgcccgtcttgcc

SEQ ID NO: 292207 - DNA, 25 bp, Artificial
  Probe
ggctctggagatcctggcaaaaaga

SEQ ID NO: 292208 - DNA, 25 bp, Artificial
  Probe
gacagagctgcagtccattaatatc

SEQ ID NO: 292209 - DNA, 25 bp, Artificial
  Probe
atttgcctgccctgagtgccctaag

SEQ ID NO: 292210 - DNA, 25 bp, Artificial
  Probe
cacattgcccctggacagtggggca

SEQ ID NO: 292211 - DNA, 25 bp, Artificial
  Probe
ttgagcgtgggcacattgcccctgg

SEQ ID NO: 292212 - DNA, 25 bp, Artificial
  Probe
ccctgagtgccctaagcgtttcatg

SEQ ID NO: 292213 - DNA, 25 bp, Artificial
  Probe
agattagacgccagggccagagaga

SEQ ID NO: 292214 - DNA, 25 bp, Artificial
  Probe
gccatggaggccatctgtccagagg

SEQ ID NO: 292215 - DNA, 25 bp, Artificial
  Probe
gcgtgggcacattgcccctggacag

SEQ ID NO: 292216 - DNA, 25 bp, Artificial
  Probe
catatccaaggatgcggcaaagtat

SEQ ID NO: 292217 - DNA, 25 bp, Artificial
  Probe
tattaccaccaatatggtagccatg

SEQ ID NO: 292218 - DNA, 25 bp, Artificial
  Probe
gcacacttgcgctggcatacagggg

SEQ ID NO: 292219 - DNA, 25 bp, Artificial
  Probe
cgtttcatgaggagcgatcatctgt

SEQ ID NO: 292220 - DNA, 25 bp, Artificial
  Probe
agctgcagtccattaatatcagtgg

SEQ ID NO: 292221 - DNA, 25 bp, Artificial
  Probe
agcttcagagacataaacgtacaca

SEQ ID NO: 292222 - DNA, 25 bp, Artificial
  Probe
tgtgggaagcgctttactcgttcgg

SEQ ID NO: 292223 - DNA, 25 bp, Artificial
  Probe
ggttcagaaggcagtggcactgcca

SEQ ID NO: 292224 - DNA, 25 bp, Artificial
  Probe
gcccttattaccaccaatatggtag

SEQ ID NO: 292225 - DNA, 25 bp, Artificial
  Probe
gagacataaacgtacacatacagga

SEQ ID NO: 292226 - DNA, 25 bp, Artificial
  Probe
gggtattgcccgtcttgccaacagt

SEQ ID NO: 292227 - DNA, 25 bp, Artificial
  Probe
acgccagggccagagagacatatgg

SEQ ID NO: 292228 - DNA, 25 bp, Artificial
  Probe
gcttcagagacataaacgtacacat

SEQ ID NO: 292229 - DNA, 25 bp, Artificial
  Probe
aacagcacatttgtcatatccaagg

SEQ ID NO: 292230 - DNA, 25 bp, Artificial
  Probe
tggcaaaacctcacatctccgtgca

SEQ ID NO: 292231 - DNA, 25 bp, Artificial
  Probe
gcaatggtttctgagattagacgcc

SEQ ID NO: 292232 - DNA, 25 bp, Artificial
  Probe
tatggcaaaacctcacatctccgtg

SEQ ID NO: 292233 - DNA, 25 bp, Artificial
  Probe
gacatatgggccaatacccaagcct

SEQ ID NO: 292234 - DNA, 25 bp, Artificial
  Probe
taaacgtacacatacaggagagaag

SEQ ID NO: 292235 - DNA, 25 bp, Artificial
  Probe
ttcagaaggcagtggcactgccact

SEQ ID NO: 292236 - DNA, 25 bp, Artificial
  Probe
cattaatatcagtggcaatggtttc

SEQ ID NO: 292237 - DNA, 25 bp, Artificial
  Probe
ttcggatgagcttcagagacataaa

SEQ ID NO: 292238 - DNA, 25 bp, Artificial
  Probe
aatacccaagcctgggatgcaagta

SEQ ID NO: 292239 - DNA, 25 bp, Artificial
  Probe
gacgccagggccagagagacatatg

SEQ ID NO: 292240 - DNA, 25 bp, Artificial
  Probe
tccgtgcacacttgcgctggcatac

SEQ ID NO: 292241 - DNA, 25 bp, Artificial
  Probe
tagccttgagcgtgggcacattgcc

SEQ ID NO: 292242 - DNA, 25 bp, Artificial
  Probe
catactgtgggaagcgctttactcg

SEQ ID NO: 292243 - DNA, 25 bp, Artificial
  Probe
gatcatctgtcaaagcatatcaaga

SEQ ID NO: 292244 - DNA, 25 bp, Artificial
  Probe
gcctgccctgagtgccctaagcgtt

SEQ ID NO: 292245 - DNA, 25 bp, Artificial
  Probe
taattggtcatactgtgggaagcgc

SEQ ID NO: 292246 - DNA, 25 bp, Artificial
  Probe
ggcctcatccttgctagaggttgga

SEQ ID NO: 292247 - DNA, 25 bp, Artificial
  Probe
taattcctgcctgaaatctctggcc

SEQ ID NO: 292248 - DNA, 25 bp, Artificial
  Probe
ctaagaatcccaaggatttctggga

SEQ ID NO: 292249 - DNA, 25 bp, Artificial
  Probe
ggggtactagtcactgccaatatgt

SEQ ID NO: 292250 - DNA, 25 bp, Artificial
  Probe
gtctgagggtacagccccttaacct

SEQ ID NO: 292251 - DNA, 25 bp, Artificial
  Probe
ctttgtatcccttgggagcctctaa

SEQ ID NO: 292252 - DNA, 25 bp, Artificial
  Probe
ctagtcactgccaatatgtgtatgg

SEQ ID NO: 292253 - DNA, 25 bp, Artificial
  Probe
tgcctgaaatctctggcctcatcct

SEQ ID NO: 292254 - DNA, 25 bp, Artificial
  Probe
aggatttctgggagcttccaacatg

SEQ ID NO: 292255 - DNA, 25 bp, Artificial
  Probe
tctttgtatcccttgggagcctcta

SEQ ID NO: 292256 - DNA, 25 bp, Artificial
  Probe
ggtactagtcactgccaatatgtgt

SEQ ID NO: 292257 - DNA, 25 bp, Artificial
  Probe
aattctgccacttggggtctctccc

SEQ ID NO: 292258 - DNA, 25 bp, Artificial
  Probe
ctgccaatatgtgtatgggacttgc

SEQ ID NO: 292259 - DNA, 25 bp, Artificial
  Probe
tcccaccaggagaactggaggctga

SEQ ID NO: 292260 - DNA, 25 bp, Artificial
  Probe
cttgctagaggttggactgaaaact

SEQ ID NO: 292261 - DNA, 25 bp, Artificial
  Probe
tcagctgacatttcccgggggtctc

SEQ ID NO: 292262 - DNA, 25 bp, Artificial
  Probe
accacaatctggttctttgaggagg

SEQ ID NO: 292263 - DNA, 25 bp, Artificial
  Probe
gaccaataattctgccacttggggt

SEQ ID NO: 292264 - DNA, 25 bp, Artificial
  Probe
tcctgcctgaaatctctggcctcat

SEQ ID NO: 292265 - DNA, 25 bp, Artificial
  Probe
agaactggaggctgaccacaatctg

SEQ ID NO: 292266 - DNA, 25 bp, Artificial
  Probe
cccaaggatttctgggagcttccaa

SEQ ID NO: 292267 - DNA, 25 bp, Artificial
  Probe
gaccacaatctggttctttgaggag

SEQ ID NO: 292268 - DNA, 25 bp, Artificial
  Probe
gggcattcagctgacatttcccggg

SEQ ID NO: 292269 - DNA, 25 bp, Artificial
  Probe
tgtggggcattcagctgacatttcc

SEQ ID NO: 292270 - DNA, 25 bp, Artificial
  Probe
aagactggtcctacttggtcctaag

SEQ ID NO: 292271 - DNA, 25 bp, Artificial
  Probe
ccaggagaactggaggctgaccaca

SEQ ID NO: 292272 - DNA, 25 bp, Artificial
  Probe
cccttgggagcctctaagactggtc

SEQ ID NO: 292273 - DNA, 25 bp, Artificial
  Probe
aaatctctggcctcatccttgctag

SEQ ID NO: 292274 - DNA, 25 bp, Artificial
  Probe
ttcctgctccccagttttcgtgtgg

SEQ ID NO: 292275 - DNA, 25 bp, Artificial
  Probe
actggtcctacttggtcctaagaat

SEQ ID NO: 292276 - DNA, 25 bp, Artificial
  Probe
atctctggcctcatccttgctagag

SEQ ID NO: 292277 - DNA, 25 bp, Artificial
  Probe
agaatcccaaggatttctgggagct

SEQ ID NO: 292278 - DNA, 25 bp, Artificial
  Probe
tcctgctccccagttttcgtgtggg

SEQ ID NO: 292279 - DNA, 25 bp, Artificial
  Probe
gtatcccttgggagcctctaagact

SEQ ID NO: 292280 - DNA, 25 bp, Artificial
  Probe
gtcctacttggtcctaagaatccca

SEQ ID NO: 292281 - DNA, 25 bp, Artificial
  Probe
tggtcctacttggtcctaagaatcc

SEQ ID NO: 292282 - DNA, 25 bp, Artificial
  Probe
ggagcttccaacatgttgattagca

SEQ ID NO: 292283 - DNA, 25 bp, Artificial
  Probe
gcctgaaatctctggcctcatcctt

SEQ ID NO: 292284 - DNA, 25 bp, Artificial
  Probe
tggtcctaagaatcccaaggatttc

SEQ ID NO: 292285 - DNA, 25 bp, Artificial
  Probe
ataattctgccacttggggtctctc

SEQ ID NO: 292286 - DNA, 25 bp, Artificial
  Probe
cctacttggtcctaagaatcccaag

SEQ ID NO: 292287 - DNA, 25 bp, Artificial
  Probe
attcctgcctgaaatctctggcctc

SEQ ID NO: 292288 - DNA, 25 bp, Artificial
  Probe
gcttccaacatgttgattagcatat

SEQ ID NO: 292289 - DNA, 25 bp, Artificial
  Probe
tctggcctcatccttgctagaggtt

SEQ ID NO: 292290 - DNA, 25 bp, Artificial
  Probe
tgcatctttgtatcccttgggagcc

SEQ ID NO: 292291 - DNA, 25 bp, Artificial
  Probe
tgggaccaataattctgccacttgg

SEQ ID NO: 292292 - DNA, 25 bp, Artificial
  Probe
gactgtggtccctccctcttccctc

SEQ ID NO: 292293 - DNA, 25 bp, Artificial
  Probe
tttcctgtgcccttcggtattgttt

SEQ ID NO: 292294 - DNA, 25 bp, Artificial
  Probe
agctagatcatcagaagacagagtc

SEQ ID NO: 292295 - DNA, 25 bp, Artificial
  Probe
agaagaggaaacccattctgtaatg

SEQ ID NO: 292296 - DNA, 25 bp, Artificial
  Probe
agacagctagatcatcagaagacag

SEQ ID NO: 292297 - DNA, 25 bp, Artificial
  Probe
ctccccgaggaagagcaaatatgag

SEQ ID NO: 292298 - DNA, 25 bp, Artificial
  Probe
gtgaacaaaatgtcccttgcggact

SEQ ID NO: 292299 - DNA, 25 bp, Artificial
  Probe
ctccctcaagagacagctagatcat

SEQ ID NO: 292300 - DNA, 25 bp, Artificial
  Probe
ttgtgaacaaaatgtcccttgcgga

SEQ ID NO: 292301 - DNA, 25 bp, Artificial
  Probe
tatgagaaattcccctcccccaaat

SEQ ID NO: 292302 - DNA, 25 bp, Artificial
  Probe
tgtggtggtctcagaagaggaaacc

SEQ ID NO: 292303 - DNA, 25 bp, Artificial
  Probe
tggcccctgcgaattgaggtaatgt

SEQ ID NO: 292304 - DNA, 25 bp, Artificial
  Probe
gtggtggtctcagaagaggaaaccc

SEQ ID NO: 292305 - DNA, 25 bp, Artificial
  Probe
gactccctcaagagacagctagatc

SEQ ID NO: 292306 - DNA, 25 bp, Artificial
  Probe
ggactccctcaagagacagctagat

SEQ ID NO: 292307 - DNA, 25 bp, Artificial
  Probe
tggaggctgggtctggagccccgat

SEQ ID NO: 292308 - DNA, 25 bp, Artificial
  Probe
acagctagatcatcagaagacagag

SEQ ID NO: 292309 - DNA, 25 bp, Artificial
  Probe
ttgcggactccctcaagagacagct

SEQ ID NO: 292310 - DNA, 25 bp, Artificial
  Probe
actccctcaagagacagctagatca

SEQ ID NO: 292311 - DNA, 25 bp, Artificial
  Probe
gagacagctagatcatcagaagaca

SEQ ID NO: 292312 - DNA, 25 bp, Artificial
  Probe
gaggaaacccattctgtaatggggc

SEQ ID NO: 292313 - DNA, 25 bp, Artificial
  Probe
cctcaagagacagctagatcatcag

SEQ ID NO: 292314 - DNA, 25 bp, Artificial
  Probe
tgcggactccctcaagagacagcta

SEQ ID NO: 292315 - DNA, 25 bp, Artificial
  Probe
cggactccctcaagagacagctaga

SEQ ID NO: 292316 - DNA, 25 bp, Artificial
  Probe
ctgggtctggagccccgatcctgta

SEQ ID NO: 292317 - DNA, 25 bp, Artificial
  Probe
gcccctgcgaattgaggtaatgtgg

SEQ ID NO: 292318 - DNA, 25 bp, Artificial
  Probe
ggcccctgcgaattgaggtaatgtg

SEQ ID NO: 292319 - DNA, 25 bp, Artificial
  Probe
agaggaaacccattctgtaatgggg

SEQ ID NO: 292320 - DNA, 25 bp, Artificial
  Probe
aagaggaaacccattctgtaatggg

SEQ ID NO: 292321 - DNA, 25 bp, Artificial
  Probe
ttcctgtgcccttcggtattgtttg

SEQ ID NO: 292322 - DNA, 25 bp, Artificial
  Probe
tgtgaacaaaatgtcccttgcggac

SEQ ID NO: 292323 - DNA, 25 bp, Artificial
  Probe
cccctgcgaattgaggtaatgtggg

SEQ ID NO: 292324 - DNA, 25 bp, Artificial
  Probe
tgtcccttgcggactccctcaagag

SEQ ID NO: 292325 - DNA, 25 bp, Artificial
  Probe
attttgtctgactgtggtccctccc

SEQ ID NO: 292326 - DNA, 25 bp, Artificial
  Probe
gacagctagatcatcagaagacaga

SEQ ID NO: 292327 - DNA, 25 bp, Artificial
  Probe
ctggcccctgcgaattgaggtaatg

SEQ ID NO: 292328 - DNA, 25 bp, Artificial
  Probe
tgtgcccttcggtattgtttgaaga

SEQ ID NO: 292329 - DNA, 25 bp, Artificial
  Probe
gcggactccctcaagagacagctag

SEQ ID NO: 292330 - DNA, 25 bp, Artificial
  Probe
gtgcccttcggtattgtttgaagac

SEQ ID NO: 292331 - DNA, 25 bp, Artificial
  Probe
gtcccttgcggactccctcaagaga

SEQ ID NO: 292332 - DNA, 25 bp, Artificial
  Probe
agagacagctagatcatcagaagac

SEQ ID NO: 292333 - DNA, 25 bp, Artificial
  Probe
cttgcggactccctcaagagacagc

SEQ ID NO: 292334 - DNA, 25 bp, Artificial
  Probe
tccctcaagagacagctagatcatc

SEQ ID NO: 292335 - DNA, 25 bp, Artificial
  Probe
agggcgtactcctggcccctgcgaa

SEQ ID NO: 292336 - DNA, 25 bp, Artificial
  Probe
ccctcaagagacagctagatcatca

SEQ ID NO: 292337 - DNA, 25 bp, Artificial
  Probe
tgcccttcggtattgtttgaagacc

SEQ ID NO: 292338 - DNA, 25 bp, Artificial
  Probe
taaccacaccatctctattaggatg

SEQ ID NO: 292339 - DNA, 25 bp, Artificial
  Probe
tctatctctctcaggcacagtgcaa

SEQ ID NO: 292340 - DNA, 25 bp, Artificial
  Probe
catctctattaggatgagtgtgatc

SEQ ID NO: 292341 - DNA, 25 bp, Artificial
  Probe
tcaagctgtttgggtaaacacttct

SEQ ID NO: 292342 - DNA, 25 bp, Artificial
  Probe
acttctatctctctcaggcacagtg

SEQ ID NO: 292343 - DNA, 25 bp, Artificial
  Probe
ctctctcaggcacagtgcaaattga

SEQ ID NO: 292344 - DNA, 25 bp, Artificial
  Probe
gggtaaacacttctatctctctcag

SEQ ID NO: 292345 - DNA, 25 bp, Artificial
  Probe
tgtatcttcaggaattttgtcacat

SEQ ID NO: 292346 - DNA, 25 bp, Artificial
  Probe
ttaatatttatgctaaccacaccat

SEQ ID NO: 292347 - DNA, 25 bp, Artificial
  Probe
tgcaaattgagtgtgcgcgcaacac

SEQ ID NO: 292348 - DNA, 25 bp, Artificial
  Probe
caggcacagtgcaaattgagtgtgc

SEQ ID NO: 292349 - DNA, 25 bp, Artificial
  Probe
ggtaaacacttctatctctctcagg

SEQ ID NO: 292350 - DNA, 25 bp, Artificial
  Probe
ccacaccatctctattaggatgagt

SEQ ID NO: 292351 - DNA, 25 bp, Artificial
  Probe
ctctattaggatgagtgtgatcaag

SEQ ID NO: 292352 - DNA, 25 bp, Artificial
  Probe
atctctctcaggcacagtgcaaatt

SEQ ID NO: 292353 - DNA, 25 bp, Artificial
  Probe
ccatctctattaggatgagtgtgat

SEQ ID NO: 292354 - DNA, 25 bp, Artificial
  Probe
acaccatctctattaggatgagtgt

SEQ ID NO: 292355 - DNA, 25 bp, Artificial
  Probe
caaattgagtgtgcgcgcaacacac

SEQ ID NO: 292356 - DNA, 25 bp, Artificial
  Probe
atgtatcttcaggaattttgtcaca

SEQ ID NO: 292357 - DNA, 25 bp, Artificial
  Probe
ctctcaggcacagtgcaaattgagt

SEQ ID NO: 292358 - DNA, 25 bp, Artificial
  Probe
gtgatcaagctgtttgggtaaacac

SEQ ID NO: 292359 - DNA, 25 bp, Artificial
  Probe
ctcaggcacagtgcaaattgagtgt

SEQ ID NO: 292360 - DNA, 25 bp, Artificial
  Probe
cacaccatctctattaggatgagtg

SEQ ID NO: 292361 - DNA, 25 bp, Artificial
  Probe
accacaccatctctattaggatgag

SEQ ID NO: 292362 - DNA, 25 bp, Artificial
  Probe
agtgtgatcaagctgtttgggtaaa

SEQ ID NO: 292363 - DNA, 25 bp, Artificial
  Probe
caccatctctattaggatgagtgtg

SEQ ID NO: 292364 - DNA, 25 bp, Artificial
  Probe
cttctatctctctcaggcacagtgc

SEQ ID NO: 292365 - DNA, 25 bp, Artificial
  Probe
tatcttcaggaattttgtcacattc

SEQ ID NO: 292366 - DNA, 25 bp, Artificial
  Probe
cacttctatctctctcaggcacagt

SEQ ID NO: 292367 - DNA, 25 bp, Artificial
  Probe
tctctcaggcacagtgcaaattgag

SEQ ID NO: 292368 - DNA, 25 bp, Artificial
  Probe
tcaggcacagtgcaaattgagtgtg

SEQ ID NO: 292369 - DNA, 25 bp, Artificial
  Probe
gatcaagctgtttgggtaaacactt

SEQ ID NO: 292370 - DNA, 25 bp, Artificial
  Probe
tctctctcaggcacagtgcaaattg

SEQ ID NO: 292371 - DNA, 25 bp, Artificial
  Probe
gtgcaaattgagtgtgcgcgcaaca

SEQ ID NO: 292372 - DNA, 25 bp, Artificial
  Probe
accatctctattaggatgagtgtga

SEQ ID NO: 292373 - DNA, 25 bp, Artificial
  Probe
agaatgtatcttcaggaattttgtc

SEQ ID NO: 292374 - DNA, 25 bp, Artificial
  Probe
gcaaattgagtgtgcgcgcaacaca

SEQ ID NO: 292375 - DNA, 25 bp, Artificial
  Probe
ttgggtaaacacttctatctctctc

SEQ ID NO: 292376 - DNA, 25 bp, Artificial
  Probe
tctcaggcacagtgcaaattgagtg

SEQ ID NO: 292377 - DNA, 25 bp, Artificial
  Probe
tgatcaagctgtttgggtaaacact

SEQ ID NO: 292378 - DNA, 25 bp, Artificial
  Probe
ttctatctctctcaggcacagtgca

SEQ ID NO: 292379 - DNA, 25 bp, Artificial
  Probe
gtatcttcaggaattttgtcacatt

SEQ ID NO: 292380 - DNA, 25 bp, Artificial
  Probe
aatgtatcttcaggaattttgtcac

SEQ ID NO: 292381 - DNA, 25 bp, Artificial
  Probe
tttcattaatatttatgctaaccac

SEQ ID NO: 292382 - DNA, 25 bp, Artificial
  Probe
atctctattaggatgagtgtgatca

SEQ ID NO: 292383 - DNA, 25 bp, Artificial
  Probe
ctatctctctcaggcacagtgcaaa

SEQ ID NO: 292384 - DNA, 25 bp, Artificial
  Probe
tgtattccctgaagccattgatcta

SEQ ID NO: 292385 - DNA, 25 bp, Artificial
  Probe
gccacatgagacaacacgtttttca

SEQ ID NO: 292386 - DNA, 25 bp, Artificial
  Probe
gtgcactgccatacctggctcacgt

SEQ ID NO: 292387 - DNA, 25 bp, Artificial
  Probe
atctcaaagacacagtgttgtacgc

SEQ ID NO: 292388 - DNA, 25 bp, Artificial
  Probe
tgtgcactgccatacctggctcacg

SEQ ID NO: 292389 - DNA, 25 bp, Artificial
  Probe
aatagtaaggttacctctctcaaag

SEQ ID NO: 292390 - DNA, 25 bp, Artificial
  Probe
attgatctatctcaaagacacagtg

SEQ ID NO: 292391 - DNA, 25 bp, Artificial
  Probe
tacgcatacatgtgcgcacgtacac

SEQ ID NO: 292392 - DNA, 25 bp, Artificial
  Probe
cctctccatagtgtgataagtttat

SEQ ID NO: 292393 - DNA, 25 bp, Artificial
  Probe
gacttctgtatatgatgcactgaag

SEQ ID NO: 292394 - DNA, 25 bp, Artificial
  Probe
agtgttgtacgcatacatgtgcgca

SEQ ID NO: 292395 - DNA, 25 bp, Artificial
  Probe
caaagacacagtgttgtacgcatac

SEQ ID NO: 292396 - DNA, 25 bp, Artificial
  Probe
ctgaagccattgatctatctcaaag

SEQ ID NO: 292397 - DNA, 25 bp, Artificial
  Probe
gcctcagcctactgggttacaggtg

SEQ ID NO: 292398 - DNA, 25 bp, Artificial
  Probe
gaccctatgctgtttttagaactca

SEQ ID NO: 292399 - DNA, 25 bp, Artificial
  Probe
atgtgcgcacgtacacacaccaaac

SEQ ID NO: 292400 - DNA, 25 bp, Artificial
  Probe
tgttgtacgcatacatgtgcgcacg

SEQ ID NO: 292401 - DNA, 25 bp, Artificial
  Probe
aggaccctatgctgtttttagaact

SEQ ID NO: 292402 - DNA, 25 bp, Artificial
  Probe
taaggaccctatgctgtttttagaa

SEQ ID NO: 292403 - DNA, 25 bp, Artificial
  Probe
atagtaaggttacctctctcaaagg

SEQ ID NO: 292404 - DNA, 25 bp, Artificial
  Probe
tgttctggtgtaacatgtattccct

SEQ ID NO: 292405 - DNA, 25 bp, Artificial
  Probe
ggtgtaacatgtattccctgaagcc

SEQ ID NO: 292406 - DNA, 25 bp, Artificial
  Probe
cactgccatacctggctcacgtttg

SEQ ID NO: 292407 - DNA, 25 bp, Artificial
  Probe
cctgcctcagcctactgggttacag

SEQ ID NO: 292408 - DNA, 25 bp, Artificial
  Probe
gaagccattgatctatctcaaagac

SEQ ID NO: 292409 - DNA, 25 bp, Artificial
  Probe
tagtaaggttacctctctcaaaggc

SEQ ID NO: 292410 - DNA, 25 bp, Artificial
  Probe
tacctctctcaaaggccaaggggag

SEQ ID NO: 292411 - DNA, 25 bp, Artificial
  Probe
gtcccatggtgaatagtaaggttac

SEQ ID NO: 292412 - DNA, 25 bp, Artificial
  Probe
gacaacacgtttttcacacagggtt

SEQ ID NO: 292413 - DNA, 25 bp, Artificial
  Probe
acacacaccaaactggaaagcgacc

SEQ ID NO: 292414 - DNA, 25 bp, Artificial
  Probe
tgtaacatgtattccctgaagccat

SEQ ID NO: 292415 - DNA, 25 bp, Artificial
  Probe
tactgggttacaggtgtgcactgcc

SEQ ID NO: 292416 - DNA, 25 bp, Artificial
  Probe
ggaggccacatgagacaacacgttt

SEQ ID NO: 292417 - DNA, 25 bp, Artificial
  Probe
atctatctcaaagacacagtgttgt

SEQ ID NO: 292418 - DNA, 25 bp, Artificial
  Probe
gacacagtgttgtacgcatacatgt

SEQ ID NO: 292419 - DNA, 25 bp, Artificial
  Probe
atgagacaacacgtttttcacacag

SEQ ID NO: 292420 - DNA, 25 bp, Artificial
  Probe
atctttctgacttctgtatatgatg

SEQ ID NO: 292421 - DNA, 25 bp, Artificial
  Probe
aatgttctggtgtaacatgtattcc

SEQ ID NO: 292422 - DNA, 25 bp, Artificial
  Probe
ataaggaccctatgctgtttttaga

SEQ ID NO: 292423 - DNA, 25 bp, Artificial
  Probe
acatgtattccctgaagccattgat

SEQ ID NO: 292424 - DNA, 25 bp, Artificial
  Probe
cagcctactgggttacaggtgtgca

SEQ ID NO: 292425 - DNA, 25 bp, Artificial
  Probe
gtaaggttacctctctcaaaggcca

SEQ ID NO: 292426 - DNA, 25 bp, Artificial
  Probe
ttataaggaccctatgctgttttta

SEQ ID NO: 292427 - DNA, 25 bp, Artificial
  Probe
atacatgtgcgcacgtacacacacc

SEQ ID NO: 292428 - DNA, 25 bp, Artificial
  Probe
ctcaaagacacagtgttgtacgcat

SEQ ID NO: 292429 - DNA, 25 bp, Artificial
  Probe
aagacacagtgttgtacgcatacat

SEQ ID NO: 292430 - DNA, 25 bp, Artificial
  Probe
catgtggtacttacatttcaaaagg

SEQ ID NO: 292431 - DNA, 25 bp, Artificial
  Probe
cacttgaagggcaccaacacttaac

SEQ ID NO: 292432 - DNA, 25 bp, Artificial
  Probe
gaatcattttaagatcctgagtttc

SEQ ID NO: 292433 - DNA, 25 bp, Artificial
  Probe
gagtctgggcaaggaaccctagtac

SEQ ID NO: 292434 - DNA, 25 bp, Artificial
  Probe
tgccagaaataaccaagctattcag

SEQ ID NO: 292435 - DNA, 25 bp, Artificial
  Probe
tctgggcaaggaaccctagtacagt

SEQ ID NO: 292436 - DNA, 25 bp, Artificial
  Probe
ctccctggacccatgagaagacagg

SEQ ID NO: 292437 - DNA, 25 bp, Artificial
  Probe
gtacttacatttcaaaaggagtatc

SEQ ID NO: 292438 - DNA, 25 bp, Artificial
  Probe
caaaccgagcaacttaaacagcctg

SEQ ID NO: 292439 - DNA, 25 bp, Artificial
  Probe
gggcaccaacacttaacaaattctg

SEQ ID NO: 292440 - DNA, 25 bp, Artificial
  Probe
tctcaagttatggatgcaagatggc

SEQ ID NO: 292441 - DNA, 25 bp, Artificial
  Probe
ctcaaatgtatctttagtagttctg

SEQ ID NO: 292442 - DNA, 25 bp, Artificial
  Probe
gccagaaataaccaagctattcaga

SEQ ID NO: 292443 - DNA, 25 bp, Artificial
  Probe
gctcctagaggatgctataactaac

SEQ ID NO: 292444 - DNA, 25 bp, Artificial
  Probe
tattcagtattcatgccttgaactg

SEQ ID NO: 292445 - DNA, 25 bp, Artificial
  Probe
aggattctgtgcatgtggtacttac

SEQ ID NO: 292446 - DNA, 25 bp, Artificial
  Probe
gagagttgcctagtaacccacttct

SEQ ID NO: 292447 - DNA, 25 bp, Artificial
  Probe
ttttaatcactggatgctggaagac

SEQ ID NO: 292448 - DNA, 25 bp, Artificial
  Probe
gcaaggaaccctagtacagtggggt

SEQ ID NO: 292449 - DNA, 25 bp, Artificial
  Probe
atcactggatgctggaagacacaca

SEQ ID NO: 292450 - DNA, 25 bp, Artificial
  Probe
ctattcagaaatacactaggaaagg

SEQ ID NO: 292451 - DNA, 25 bp, Artificial
  Probe
taaagagctaacacaggtgagtctg

SEQ ID NO: 292452 - DNA, 25 bp, Artificial
  Probe
ctggaagacacacacagagacacaa

SEQ ID NO: 292453 - DNA, 25 bp, Artificial
  Probe
tagtagttctgctccctggacccat

SEQ ID NO: 292454 - DNA, 25 bp, Artificial
  Probe
ggacccatgagaagacaggaatgag

SEQ ID NO: 292455 - DNA, 25 bp, Artificial
  Probe
gcacctttgccagaaataaccaagc

SEQ ID NO: 292456 - DNA, 25 bp, Artificial
  Probe
cttctggtcatattcagtattcatg

SEQ ID NO: 292457 - DNA, 25 bp, Artificial
  Probe
atctgtgattctagaggacacttga

SEQ ID NO: 292458 - DNA, 25 bp, Artificial
  Probe
agcaacttaaacagcctgacagctc

SEQ ID NO: 292459 - DNA, 25 bp, Artificial
  Probe
tcatgccttgaactgaactcttgct

SEQ ID NO: 292460 - DNA, 25 bp, Artificial
  Probe
ggttgggtcagcacctttgccagaa

SEQ ID NO: 292461 - DNA, 25 bp, Artificial
  Probe
agcttcaagctatgaagagtgattc

SEQ ID NO: 292462 - DNA, 25 bp, Artificial
  Probe
aatacactaggaaaggagagttgcc

SEQ ID NO: 292463 - DNA, 25 bp, Artificial
  Probe
gcctagtaacccacttctggtcata

SEQ ID NO: 292464 - DNA, 25 bp, Artificial
  Probe
cttgaactgaactcttgctcctaga

SEQ ID NO: 292465 - DNA, 25 bp, Artificial
  Probe
tagaggacacttgaagggcaccaac

SEQ ID NO: 292466 - DNA, 25 bp, Artificial
  Probe
gttctgctccctggacccatgagaa

SEQ ID NO: 292467 - DNA, 25 bp, Artificial
  Probe
gtaacccacttctggtcatattcag

SEQ ID NO: 292468 - DNA, 25 bp, Artificial
  Probe
cacaggtgagtctgggcaaggaacc

SEQ ID NO: 292469 - DNA, 25 bp, Artificial
  Probe
ttctgctccctggacccatgagaag

SEQ ID NO: 292470 - DNA, 25 bp, Artificial
  Probe
atgctggaagacacacacagagaca

SEQ ID NO: 292471 - DNA, 25 bp, Artificial
  Probe
ccaacacttaacaaattctgtgggg

SEQ ID NO: 292472 - DNA, 25 bp, Artificial
  Probe
tgattctagaggacacttgaagggc

SEQ ID NO: 292473 - DNA, 25 bp, Artificial
  Probe
aataccttgctatctcaagttatgg

SEQ ID NO: 292474 - DNA, 25 bp, Artificial
  Probe
atgcaagatggctcccagtgtctat

SEQ ID NO: 292475 - DNA, 25 bp, Artificial
  Probe
ccaagctattcagaaatacactagg

SEQ ID NO: 292476 - DNA, 25 bp, Artificial
  Probe
attttggagggtacatccagaaggc

SEQ ID NO: 292477 - DNA, 25 bp, Artificial
  Probe
gtccaacatgatgcattttggaggg

SEQ ID NO: 292478 - DNA, 25 bp, Artificial
  Probe
aggctctgtccaacatgatgcattt

SEQ ID NO: 292479 - DNA, 25 bp, Artificial
  Probe
tgatgcattttggagggtacatcca

SEQ ID NO: 292480 - DNA, 25 bp, Artificial
  Probe
gggtacatccagaaggctcagacag

SEQ ID NO: 292481 - DNA, 25 bp, Artificial
  Probe
ggctctgtccaacatgatgcatttt

SEQ ID NO: 292482 - DNA, 25 bp, Artificial
  Probe
ggtacatccagaaggctcagacaga

SEQ ID NO: 292483 - DNA, 25 bp, Artificial
  Probe
agggtacatccagaaggctcagaca

SEQ ID NO: 292484 - DNA, 25 bp, Artificial
  Probe
cagaaggctcagacagagcggaaga

SEQ ID NO: 292485 - DNA, 25 bp, Artificial
  Probe
tctgtccaacatgatgcattttgga

SEQ ID NO: 292486 - DNA, 25 bp, Artificial
  Probe
ctctgtccaacatgatgcattttgg

SEQ ID NO: 292487 - DNA, 25 bp, Artificial
  Probe
atgatgcattttggagggtacatcc

SEQ ID NO: 292488 - DNA, 25 bp, Artificial
  Probe
caacatgatgcattttggagggtac

SEQ ID NO: 292489 - DNA, 25 bp, Artificial
  Probe
gaaggctctgtccaacatgatgcat

SEQ ID NO: 292490 - DNA, 25 bp, Artificial
  Probe
tccaacatgatgcattttggagggt

SEQ ID NO: 292491 - DNA, 25 bp, Artificial
  Probe
cattttggagggtacatccagaagg

SEQ ID NO: 292492 - DNA, 25 bp, Artificial
  Probe
catccagaaggctcagacagagcgg

SEQ ID NO: 292493 - DNA, 25 bp, Artificial
  Probe
atccagaaggctcagacagagcgga

SEQ ID NO: 292494 - DNA, 25 bp, Artificial
  Probe
tggagggtacatccagaaggctcag

SEQ ID NO: 292495 - DNA, 25 bp, Artificial
  Probe
catgatgcattttggagggtacatc

SEQ ID NO: 292496 - DNA, 25 bp, Artificial
  Probe
ccaacatgatgcattttggagggta

SEQ ID NO: 292497 - DNA, 25 bp, Artificial
  Probe
ccagaaggctcagacagagcggaag

SEQ ID NO: 292498 - DNA, 25 bp, Artificial
  Probe
gctctgtccaacatgatgcattttg

SEQ ID NO: 292499 - DNA, 25 bp, Artificial
  Probe
ttttggagggtacatccagaaggct

SEQ ID NO: 292500 - DNA, 25 bp, Artificial
  Probe
tccagaaggctcagacagagcggaa

SEQ ID NO: 292501 - DNA, 25 bp, Artificial
  Probe
agaaggctctgtccaacatgatgca

SEQ ID NO: 292502 - DNA, 25 bp, Artificial
  Probe
tgtccaacatgatgcattttggagg

SEQ ID NO: 292503 - DNA, 25 bp, Artificial
  Probe
ccgaatcaaaacagccaacggagct

SEQ ID NO: 292504 - DNA, 25 bp, Artificial
  Probe
atgctgcctccgaccgaatcaaaac

SEQ ID NO: 292505 - DNA, 25 bp, Artificial
  Probe
gtggagttgtcttgctgatgaagcc

SEQ ID NO: 292506 - DNA, 25 bp, Artificial
  Probe
gaggtgacccactaaagctaccacc

SEQ ID NO: 292507 - DNA, 25 bp, Artificial
  Probe
aggagacagatgctgcctccgaccg

SEQ ID NO: 292508 - DNA, 25 bp, Artificial
  Probe
tccgaccgaatcaaaacagccaacg

SEQ ID NO: 292509 - DNA, 25 bp, Artificial
  Probe
gatcattcctgaaaacacagcaaag

SEQ ID NO: 292510 - DNA, 25 bp, Artificial
  Probe
ttcactcctcggacaggcaggagcc

SEQ ID NO: 292511 - DNA, 25 bp, Artificial
  Probe
ctttgattcacattcgagtgtgaag

SEQ ID NO: 292512 - DNA, 25 bp, Artificial
  Probe
tcttgctgatgaagccagaagtgta

SEQ ID NO: 292513 - DNA, 25 bp, Artificial
  Probe
tcccctaaacccatctggaaggaga

SEQ ID NO: 292514 - DNA, 25 bp, Artificial
  Probe
acctctgcagtggtgagaggtgacc

SEQ ID NO: 292515 - DNA, 25 bp, Artificial
  Probe
cacacttgtgtaaacttgtggagtt

SEQ ID NO: 292516 - DNA, 25 bp, Artificial
  Probe
tcccaagggtttgtgcaaacacact

SEQ ID NO: 292517 - DNA, 25 bp, Artificial
  Probe
tgtgacaggggttccgttgtgaccc

SEQ ID NO: 292518 - DNA, 25 bp, Artificial
  Probe
tctacgggccaaccaagagggtcgg

SEQ ID NO: 292519 - DNA, 25 bp, Artificial
  Probe
ggtcagtggaggtttcccagtgtaa

SEQ ID NO: 292520 - DNA, 25 bp, Artificial
  Probe
tgtcacctctgcagtggtgagaggt

SEQ ID NO: 292521 - DNA, 25 bp, Artificial
  Probe
tcacaaacagcaagggttcacgatc

SEQ ID NO: 292522 - DNA, 25 bp, Artificial
  Probe
ggagtagacacagcaatggggcaaa

SEQ ID NO: 292523 - DNA, 25 bp, Artificial
  Probe
tcagtggaggtttcccagtgtaagt

SEQ ID NO: 292524 - DNA, 25 bp, Artificial
  Probe
caggggttccgttgtgaccctctct

SEQ ID NO: 292525 - DNA, 25 bp, Artificial
  Probe
ggttcacgatcattcctgaaaacac

SEQ ID NO: 292526 - DNA, 25 bp, Artificial
  Probe
ccatctggaaggagacagatgctgc

SEQ ID NO: 292527 - DNA, 25 bp, Artificial
  Probe
agagagagagcactcccaagggttt

SEQ ID NO: 292528 - DNA, 25 bp, Artificial
  Probe
caatggggcaaagcaggtgacattg

SEQ ID NO: 292529 - DNA, 25 bp, Artificial
  Probe
tcactcctcggacaggcaggagcca

SEQ ID NO: 292530 - DNA, 25 bp, Artificial
  Probe
ttgctgctgtctacgggccaaccaa

SEQ ID NO: 292531 - DNA, 25 bp, Artificial
  Probe
tctcctgcttctcctgagaagctgt

SEQ ID NO: 292532 - DNA, 25 bp, Artificial
  Probe
acagatgctgcctccgaccgaatca

SEQ ID NO: 292533 - DNA, 25 bp, Artificial
  Probe
ggatatgcagccaccaggttgctgc

SEQ ID NO: 292534 - DNA, 25 bp, Artificial
  Probe
tgaaaacacagcaaagaggatatgc

SEQ ID NO: 292535 - DNA, 25 bp, Artificial
  Probe
gagaggtgacccactaaagctacca

SEQ ID NO: 292536 - DNA, 25 bp, Artificial
  Probe
tagacacagcaatggggcaaagcag

SEQ ID NO: 292537 - DNA, 25 bp, Artificial
  Probe
aggacttatcccaagagcctttgat

SEQ ID NO: 292538 - DNA, 25 bp, Artificial
  Probe
aacagcaagggttcacgatcattcc

SEQ ID NO: 292539 - DNA, 25 bp, Artificial
  Probe
tgtctacgggccaaccaagagggtc

SEQ ID NO: 292540 - DNA, 25 bp, Artificial
  Probe
tcccagtgtaagtcagtgaggagag

SEQ ID NO: 292541 - DNA, 25 bp, Artificial
  Probe
ttgtgacaggggttccgttgtgacc

SEQ ID NO: 292542 - DNA, 25 bp, Artificial
  Probe
tctgcagtggtgagaggtgacccac

SEQ ID NO: 292543 - DNA, 25 bp, Artificial
  Probe
ggtttgtgcaaacacacttgtgtaa

SEQ ID NO: 292544 - DNA, 25 bp, Artificial
  Probe
cccaagagcctttgattcacattcg

SEQ ID NO: 292545 - DNA, 25 bp, Artificial
  Probe
gacttatcccaagagcctttgattc

SEQ ID NO: 292546 - DNA, 25 bp, Artificial
  Probe
ctcggacaggcaggagccacctact

SEQ ID NO: 292547 - DNA, 25 bp, Artificial
  Probe
cagcaatggggcaaagcaggtgaca

SEQ ID NO: 292548 - DNA, 25 bp, Artificial
  Probe
atgggaggacttatcccaagagcct

SEQ ID NO: 292549 - DNA, 25 bp, Artificial
  Probe
ctgcgtcaccattctcctgtaaaat

SEQ ID NO: 292550 - DNA, 25 bp, Artificial
  Probe
ttatgggctgcgtcaccattctcct

SEQ ID NO: 292551 - DNA, 25 bp, Artificial
  Probe
ctggcccacatacaatacacagctt

SEQ ID NO: 292552 - DNA, 25 bp, Artificial
  Probe
cagaagcgtgctgcaaagaattcta

SEQ ID NO: 292553 - DNA, 25 bp, Artificial
  Probe
tggcccacatacaatacacagcttg

SEQ ID NO: 292554 - DNA, 25 bp, Artificial
  Probe
ttctcctgtaaaatagtactggaca

SEQ ID NO: 292555 - DNA, 25 bp, Artificial
  Probe
gtaacttattatgggctgcgtcacc

SEQ ID NO: 292556 - DNA, 25 bp, Artificial
  Probe
ctgggcagaagcgtgctgcaaagaa

SEQ ID NO: 292557 - DNA, 25 bp, Artificial
  Probe
aagaattctatgatttcttgtacat

SEQ ID NO: 292558 - DNA, 25 bp, Artificial
  Probe
attatgggctgcgtcaccattctcc

SEQ ID NO: 292559 - DNA, 25 bp, Artificial
  Probe
gcagaagcgtgctgcaaagaattct

SEQ ID NO: 292560 - DNA, 25 bp, Artificial
  Probe
atcttcctccaaagcctgggcagaa

SEQ ID NO: 292561 - DNA, 25 bp, Artificial
  Probe
gcgtcaccattctcctgtaaaatag

SEQ ID NO: 292562 - DNA, 25 bp, Artificial
  Probe
accattctcctgtaaaatagtactg

SEQ ID NO: 292563 - DNA, 25 bp, Artificial
  Probe
ggcccacatacaatacacagcttgt

SEQ ID NO: 292564 - DNA, 25 bp, Artificial
  Probe
agaagcgtgctgcaaagaattctat

SEQ ID NO: 292565 - DNA, 25 bp, Artificial
  Probe
ataatattagtagcactgagacccc

SEQ ID NO: 292566 - DNA, 25 bp, Artificial
  Probe
tatgggctgcgtcaccattctcctg

SEQ ID NO: 292567 - DNA, 25 bp, Artificial
  Probe
gctgcgtcaccattctcctgtaaaa

SEQ ID NO: 292568 - DNA, 25 bp, Artificial
  Probe
gaagcgtgctgcaaagaattctatg

SEQ ID NO: 292569 - DNA, 25 bp, Artificial
  Probe
cttattatgggctgcgtcaccattc

SEQ ID NO: 292570 - DNA, 25 bp, Artificial
  Probe
ggctgcgtcaccattctcctgtaaa

SEQ ID NO: 292571 - DNA, 25 bp, Artificial
  Probe
tctcctgtaaaatagtactggacag

SEQ ID NO: 292572 - DNA, 25 bp, Artificial
  Probe
attctcctgtaaaatagtactggac

SEQ ID NO: 292573 - DNA, 25 bp, Artificial
  Probe
taatattagtagcactgagaccccc

SEQ ID NO: 292574 - DNA, 25 bp, Artificial
  Probe
atgggctgcgtcaccattctcctgt

SEQ ID NO: 292575 - DNA, 25 bp, Artificial
  Probe
tgtaacttattatgggctgcgtcac

SEQ ID NO: 292576 - DNA, 25 bp, Artificial
  Probe
atgtaacttattatgggctgcgtca

SEQ ID NO: 292577 - DNA, 25 bp, Artificial
  Probe
tcctccaaagcctgggcagaagcgt

SEQ ID NO: 292578 - DNA, 25 bp, Artificial
  Probe
tagcactgagaccccccacggtaat

SEQ ID NO: 292579 - DNA, 25 bp, Artificial
  Probe
aaagcctgggcagaagcgtgctgca

SEQ ID NO: 292580 - DNA, 25 bp, Artificial
  Probe
gggctgcgtcaccattctcctgtaa

SEQ ID NO: 292581 - DNA, 25 bp, Artificial
  Probe
tcttgtacatgttttgctaatgctt

SEQ ID NO: 292582 - DNA, 25 bp, Artificial
  Probe
ggcagaagcgtgctgcaaagaattc

SEQ ID NO: 292583 - DNA, 25 bp, Artificial
  Probe
ccattctcctgtaaaatagtactgg

SEQ ID NO: 292584 - DNA, 25 bp, Artificial
  Probe
cattctcctgtaaaatagtactgga

SEQ ID NO: 292585 - DNA, 25 bp, Artificial
  Probe
catcttcctccaaagcctgggcaga

SEQ ID NO: 292586 - DNA, 25 bp, Artificial
  Probe
aagcctgggcagaagcgtgctgcaa

SEQ ID NO: 292587 - DNA, 25 bp, Artificial
  Probe
tgggctgcgtcaccattctcctgta

SEQ ID NO: 292588 - DNA, 25 bp, Artificial
  Probe
ccccacggtaatgtaacttattatg

SEQ ID NO: 292589 - DNA, 25 bp, Artificial
  Probe
ctcctgtaaaatagtactggacaga

SEQ ID NO: 292590 - DNA, 25 bp, Artificial
  Probe
attacatcttcctccaaagcctggg

SEQ ID NO: 292591 - DNA, 25 bp, Artificial
  Probe
cttgtacatgttttgctaatgcttg

SEQ ID NO: 292592 - DNA, 25 bp, Artificial
  Probe
tgggcagaagcgtgctgcaaagaat

SEQ ID NO: 292593 - DNA, 25 bp, Artificial
  Probe
caaagcctgggcagaagcgtgctgc

SEQ ID NO: 292594 - DNA, 25 bp, Artificial
  Probe
gggcagaagcgtgctgcaaagaatt

SEQ ID NO: 292595 - DNA, 25 bp, Artificial
  Probe
gtgtcacgctgacatagaaggcagg

SEQ ID NO: 292596 - DNA, 25 bp, Artificial
  Probe
agcgttccatgagctctgtgggtgt

SEQ ID NO: 292597 - DNA, 25 bp, Artificial
  Probe
ctttgtaatagtgacgtctgtgcat

SEQ ID NO: 292598 - DNA, 25 bp, Artificial
  Probe
ctgcccaataagaaccgagatgaac

SEQ ID NO: 292599 - DNA, 25 bp, Artificial
  Probe
cctgatgttacgtgacagaagatgg

SEQ ID NO: 292600 - DNA, 25 bp, Artificial
  Probe
cacagctaagcctttaactgtggat

SEQ ID NO: 292601 - DNA, 25 bp, Artificial
  Probe
cagagaccctgaggatgtacccacc

SEQ ID NO: 292602 - DNA, 25 bp, Artificial
  Probe
tttaactgtggatgagattgccggc

SEQ ID NO: 292603 - DNA, 25 bp, Artificial
  Probe
caagcaaacagcagaagagaggcgg

SEQ ID NO: 292604 - DNA, 25 bp, Artificial
  Probe
tggagattgctgtgggtgccctaca

SEQ ID NO: 292605 - DNA, 25 bp, Artificial
  Probe
caaaggtgtcatcctacatccacag

SEQ ID NO: 292606 - DNA, 25 bp, Artificial
  Probe
gctagaatccaaatctgctctatgc

SEQ ID NO: 292607 - DNA, 25 bp, Artificial
  Probe
ctcttcatggagaagcatccagccc

SEQ ID NO: 292608 - DNA, 25 bp, Artificial
  Probe
agaggcttctgaaagaggtggacct

SEQ ID NO: 292609 - DNA, 25 bp, Artificial
  Probe
agattgccggccaggctttcctctt

SEQ ID NO: 292610 - DNA, 25 bp, Artificial
  Probe
caggttctgtgctggagattgctgt

SEQ ID NO: 292611 - DNA, 25 bp, Artificial
  Probe
ccaaggcctctcctggctttaattt

SEQ ID NO: 292612 - DNA, 25 bp, Artificial
  Probe
ctgctgagtgcatgggggacccacc

SEQ ID NO: 292613 - DNA, 25 bp, Artificial
  Probe
atcgctggccacgagatcaccacaa

SEQ ID NO: 292614 - DNA, 25 bp, Artificial
  Probe
tttgctttcagtaccccaaggcctc

SEQ ID NO: 292615 - DNA, 25 bp, Artificial
  Probe
cccaaggcctctcctggctttaatt

SEQ ID NO: 292616 - DNA, 25 bp, Artificial
  Probe
ttgaacgagatgacacctctcatca

SEQ ID NO: 292617 - DNA, 25 bp, Artificial
  Probe
gtgtcatcctacatccacagctaag

SEQ ID NO: 292618 - DNA, 25 bp, Artificial
  Probe
gaagcctttgacatggtcacagaag

SEQ ID NO: 292619 - DNA, 25 bp, Artificial
  Probe
ctatctggacatggtggttgcagag

SEQ ID NO: 292620 - DNA, 25 bp, Artificial
  Probe
gaactgaatggcttttttaacacac

SEQ ID NO: 292621 - DNA, 25 bp, Artificial
  Probe
accctgagtgccaggagaggcttct

SEQ ID NO: 292622 - DNA, 25 bp, Artificial
  Probe
ttgcagagaccctgaggatgtaccc

SEQ ID NO: 292623 - DNA, 25 bp, Artificial
  Probe
ccacaaatgtggtggccagtgtggc

SEQ ID NO: 292624 - DNA, 25 bp, Artificial
  Probe
gctctatgccccaaaaatggagtct

SEQ ID NO: 292625 - DNA, 25 bp, Artificial
  Probe
ctttgaccctgaaaggtttacagca

SEQ ID NO: 292626 - DNA, 25 bp, Artificial
  Probe
agcccctgagtactgcaacctgcag

SEQ ID NO: 292627 - DNA, 25 bp, Artificial
  Probe
ggctgctggtggtcaagctgacact

SEQ ID NO: 292628 - DNA, 25 bp, Artificial
  Probe
aggtgctgggacagcacatccctgc

SEQ ID NO: 292629 - DNA, 25 bp, Artificial
  Probe
ttcagtcctgaaaaattgaacgaga

SEQ ID NO: 292630 - DNA, 25 bp, Artificial
  Probe
gtctgtgcatcactgttaggagggc

SEQ ID NO: 292631 - DNA, 25 bp, Artificial
  Probe
tttccatccataatggtcccattgg

SEQ ID NO: 292632 - DNA, 25 bp, Artificial
  Probe
gagggcgccatttatgtcacagttc

SEQ ID NO: 292633 - DNA, 25 bp, Artificial
  Probe
gagacttcctgcagatggtgctgga

SEQ ID NO: 292634 - DNA, 25 bp, Artificial
  Probe
ccaggagctgccttggagtacggct

SEQ ID NO: 292635 - DNA, 25 bp, Artificial
  Probe
ccaagcctgtgaacttctcctgtct

SEQ ID NO: 292636 - DNA, 25 bp, Artificial
  Probe
cacaagggaggcagcacaggactgt

SEQ ID NO: 292637 - DNA, 25 bp, Artificial
  Probe
aggtgccctgatgtctgcattcagt

SEQ ID NO: 292638 - DNA, 25 bp, Artificial
  Probe
ctgtctcacttaaaacactctgcgg

SEQ ID NO: 292639 - DNA, 25 bp, Artificial
  Probe
tggccacgagatcaccacaaacacg

SEQ ID NO: 292640 - DNA, 25 bp, Artificial
  Probe
ccagtgtggcctttggcatcgaggt

SEQ ID NO: 292641 - DNA, 25 bp, Artificial
  Probe
acaaggttctgcgaatccctgaaac

SEQ ID NO: 292642 - DNA, 25 bp, Artificial
  Probe
catctgagaactcccaggctcccca

SEQ ID NO: 292643 - DNA, 25 bp, Artificial
  Probe
acaccatctgagaactcccaggctc

SEQ ID NO: 292644 - DNA, 25 bp, Artificial
  Probe
catgtcctgtatgactttagcagaa

SEQ ID NO: 292645 - DNA, 25 bp, Artificial
  Probe
tccccacaaggttctgcgaatccct

SEQ ID NO: 292646 - DNA, 25 bp, Artificial
  Probe
acgttttacccatgtcctgtatgac

SEQ ID NO: 292647 - DNA, 25 bp, Artificial
  Probe
atgtcctgtatgactttagcagaat

SEQ ID NO: 292648 - DNA, 25 bp, Artificial
  Probe
ttctgcgaatccctgaaacgtttta

SEQ ID NO: 292649 - DNA, 25 bp, Artificial
  Probe
ggctccccacaaggttctgcgaatc

SEQ ID NO: 292650 - DNA, 25 bp, Artificial
  Probe
tctgcgaatccctgaaacgttttac

SEQ ID NO: 292651 - DNA, 25 bp, Artificial
  Probe
aggctccccacaaggttctgcgaat

SEQ ID NO: 292652 - DNA, 25 bp, Artificial
  Probe
aggttctgcgaatccctgaaacgtt

SEQ ID NO: 292653 - DNA, 25 bp, Artificial
  Probe
caccatctgagaactcccaggctcc

SEQ ID NO: 292654 - DNA, 25 bp, Artificial
  Probe
acccatgtcctgtatgactttagca

SEQ ID NO: 292655 - DNA, 25 bp, Artificial
  Probe
ccatgtcctgtatgactttagcaga

SEQ ID NO: 292656 - DNA, 25 bp, Artificial
  Probe
ccaacaccatctgagaactcccagg

SEQ ID NO: 292657 - DNA, 25 bp, Artificial
  Probe
ctgaaacgttttacccatgtcctgt

SEQ ID NO: 292658 - DNA, 25 bp, Artificial
  Probe
cccacaaggttctgcgaatccctga

SEQ ID NO: 292659 - DNA, 25 bp, Artificial
  Probe
gaaacgttttacccatgtcctgtat

SEQ ID NO: 292660 - DNA, 25 bp, Artificial
  Probe
ggttctgcgaatccctgaaacgttt

SEQ ID NO: 292661 - DNA, 25 bp, Artificial
  Probe
aaacgttttacccatgtcctgtatg

SEQ ID NO: 292662 - DNA, 25 bp, Artificial
  Probe
tgaaacgttttacccatgtcctgta

SEQ ID NO: 292663 - DNA, 25 bp, Artificial
  Probe
atctgagaactcccaggctccccac

SEQ ID NO: 292664 - DNA, 25 bp, Artificial
  Probe
tttacccatgtcctgtatgacttta

SEQ ID NO: 292665 - DNA, 25 bp, Artificial
  Probe
ccacaaggttctgcgaatccctgaa

SEQ ID NO: 292666 - DNA, 25 bp, Artificial
  Probe
tgtcctgtatgactttagcagaatt

SEQ ID NO: 292667 - DNA, 25 bp, Artificial
  Probe
caggctccccacaaggttctgcgaa

SEQ ID NO: 292668 - DNA, 25 bp, Artificial
  Probe
ctgagaactcccaggctccccacaa

SEQ ID NO: 292669 - DNA, 25 bp, Artificial
  Probe
ccccacaaggttctgcgaatccctg

SEQ ID NO: 292670 - DNA, 25 bp, Artificial
  Probe
accatctgagaactcccaggctccc

SEQ ID NO: 292671 - DNA, 25 bp, Artificial
  Probe
gtcctgtatgactttagcagaattc

SEQ ID NO: 292672 - DNA, 25 bp, Artificial
  Probe
cccatgtcctgtatgactttagcag

SEQ ID NO: 292673 - DNA, 25 bp, Artificial
  Probe
ttccccaacaccatctgagaactcc

SEQ ID NO: 292674 - DNA, 25 bp, Artificial
  Probe
cgttttacccatgtcctgtatgact

SEQ ID NO: 292675 - DNA, 25 bp, Artificial
  Probe
ttttacccatgtcctgtatgacttt

SEQ ID NO: 292676 - DNA, 25 bp, Artificial
  Probe
cctgaaacgttttacccatgtcctg

SEQ ID NO: 292677 - DNA, 25 bp, Artificial
  Probe
aaggttctgcgaatccctgaaacgt

SEQ ID NO: 292678 - DNA, 25 bp, Artificial
  Probe
ttacccatgtcctgtatgactttag

SEQ ID NO: 292679 - DNA, 25 bp, Artificial
  Probe
tacccatgtcctgtatgactttagc

SEQ ID NO: 292680 - DNA, 25 bp, Artificial
  Probe
gaatccctgaaacgttttacccatg

SEQ ID NO: 292681 - DNA, 25 bp, Artificial
  Probe
aacgttttacccatgtcctgtatga

SEQ ID NO: 292682 - DNA, 25 bp, Artificial
  Probe
caaggttctgcgaatccctgaaacg

SEQ ID NO: 292683 - DNA, 25 bp, Artificial
  Probe
tgagaactcccaggctccccacaag

SEQ ID NO: 292684 - DNA, 25 bp, Artificial
  Probe
gttttacccatgtcctgtatgactt

SEQ ID NO: 292685 - DNA, 25 bp, Artificial
  Probe
aacaccatctgagaactcccaggct

SEQ ID NO: 292686 - DNA, 25 bp, Artificial
  Probe
caacaccatctgagaactcccaggc

SEQ ID NO: 292687 - DNA, 25 bp, Artificial
  Probe
gggacacagctctctggaggccaga

SEQ ID NO: 292688 - DNA, 25 bp, Artificial
  Probe
acaaggggacacagctctctggagg

SEQ ID NO: 292689 - DNA, 25 bp, Artificial
  Probe
cactgccccaaaagtatgaaacaag

SEQ ID NO: 292690 - DNA, 25 bp, Artificial
  Probe
tgccccaaaagtatgaaacaagagt

SEQ ID NO: 292691 - DNA, 25 bp, Artificial
  Probe
ttcaagctggcacacagaacttatg

SEQ ID NO: 292692 - DNA, 25 bp, Artificial
  Probe
acacagctctctggaggccagaaac

SEQ ID NO: 292693 - DNA, 25 bp, Artificial
  Probe
gggtcctactgctggatgaagccac

SEQ ID NO: 292694 - DNA, 25 bp, Artificial
  Probe
ctggcacacagaacttatgaacttg

SEQ ID NO: 292695 - DNA, 25 bp, Artificial
  Probe
aaggggacacagctctctggaggcc

SEQ ID NO: 292696 - DNA, 25 bp, Artificial
  Probe
gtcaacattcaagctggcacacaga

SEQ ID NO: 292697 - DNA, 25 bp, Artificial
  Probe
tggcacacagaacttatgaacttgt

SEQ ID NO: 292698 - DNA, 25 bp, Artificial
  Probe
tcattgagacactgccccaaaagta

SEQ ID NO: 292699 - DNA, 25 bp, Artificial
  Probe
ctgccccaaaagtatgaaacaagag

SEQ ID NO: 292700 - DNA, 25 bp, Artificial
  Probe
gagccctcatcagacagcctcgggt

SEQ ID NO: 292701 - DNA, 25 bp, Artificial
  Probe
cagcctcgggtcctactgctggatg

SEQ ID NO: 292702 - DNA, 25 bp, Artificial
  Probe
ggtcaacattcaagctggcacacag

SEQ ID NO: 292703 - DNA, 25 bp, Artificial
  Probe
aagctggcacacagaacttatgaac

SEQ ID NO: 292704 - DNA, 25 bp, Artificial
  Probe
cacagctctctggaggccagaaaca

SEQ ID NO: 292705 - DNA, 25 bp, Artificial
  Probe
agcctcgggtcctactgctggatga

SEQ ID NO: 292706 - DNA, 25 bp, Artificial
  Probe
ggacacagctctctggaggccagaa

SEQ ID NO: 292707 - DNA, 25 bp, Artificial
  Probe
ctccatggtcaacattcaagctggc

SEQ ID NO: 292708 - DNA, 25 bp, Artificial
  Probe
gacagcctcgggtcctactgctgga

SEQ ID NO: 292709 - DNA, 25 bp, Artificial
  Probe
ggcacacagaacttatgaacttgtt

SEQ ID NO: 292710 - DNA, 25 bp, Artificial
  Probe
ttctccatggtcaacattcaagctg

SEQ ID NO: 292711 - DNA, 25 bp, Artificial
  Probe
ttcattgagacactgccccaaaagt

SEQ ID NO: 292712 - DNA, 25 bp, Artificial
  Probe
ctcgggtcctactgctggatgaagc

SEQ ID NO: 292713 - DNA, 25 bp, Artificial
  Probe
gacactgccccaaaagtatgaaaca

SEQ ID NO: 292714 - DNA, 25 bp, Artificial
  Probe
catggtcaacattcaagctggcaca

SEQ ID NO: 292715 - DNA, 25 bp, Artificial
  Probe
agctggcacacagaacttatgaact

SEQ ID NO: 292716 - DNA, 25 bp, Artificial
  Probe
ggtcctactgctggatgaagccacg

SEQ ID NO: 292717 - DNA, 25 bp, Artificial
  Probe
cttcattgagacactgccccaaaag

SEQ ID NO: 292718 - DNA, 25 bp, Artificial
  Probe
agacactgccccaaaagtatgaaac

SEQ ID NO: 292719 - DNA, 25 bp, Artificial
  Probe
tccatggtcaacattcaagctggca

SEQ ID NO: 292720 - DNA, 25 bp, Artificial
  Probe
acagcctcgggtcctactgctggat

SEQ ID NO: 292721 - DNA, 25 bp, Artificial
  Probe
gtcctactgctggatgaagccacgt

SEQ ID NO: 292722 - DNA, 25 bp, Artificial
  Probe
caacattcaagctggcacacagaac

SEQ ID NO: 292723 - DNA, 25 bp, Artificial
  Probe
atggtcaacattcaagctggcacac

SEQ ID NO: 292724 - DNA, 25 bp, Artificial
  Probe
cgggtcctactgctggatgaagcca

SEQ ID NO: 292725 - DNA, 25 bp, Artificial
  Probe
gcacacagaacttatgaacttgtta

SEQ ID NO: 292726 - DNA, 25 bp, Artificial
  Probe
aggggacacagctctctggaggcca

SEQ ID NO: 292727 - DNA, 25 bp, Artificial
  Probe
tcgggtcctactgctggatgaagcc

SEQ ID NO: 292728 - DNA, 25 bp, Artificial
  Probe
gcctcgggtcctactgctggatgaa

SEQ ID NO: 292729 - DNA, 25 bp, Artificial
  Probe
caagctggcacacagaacttatgaa

SEQ ID NO: 292730 - DNA, 25 bp, Artificial
  Probe
ccatggtcaacattcaagctggcac

SEQ ID NO: 292731 - DNA, 25 bp, Artificial
  Probe
gacacagctctctggaggccagaaa

SEQ ID NO: 292732 - DNA, 25 bp, Artificial
  Probe
tcaacattcaagctggcacacagaa

SEQ ID NO: 292733 - DNA, 25 bp, Artificial
  Probe
tatatgcaccaggttccaaatgaac

SEQ ID NO: 292734 - DNA, 25 bp, Artificial
  Probe
ctcaagtacctgacagggatgctgt

SEQ ID NO: 292735 - DNA, 25 bp, Artificial
  Probe
agcctttgcctttccagactcttgt

SEQ ID NO: 292736 - DNA, 25 bp, Artificial
  Probe
cacttggaggattcccagaagcctt

SEQ ID NO: 292737 - DNA, 25 bp, Artificial
  Probe
gacttgccacttggaggattcccag

SEQ ID NO: 292738 - DNA, 25 bp, Artificial
  Probe
ggaggacttgccacttggaggattc

SEQ ID NO: 292739 - DNA, 25 bp, Artificial
  Probe
aggcaagtcctcaagtacctgacag

SEQ ID NO: 292740 - DNA, 25 bp, Artificial
  Probe
ggcaagtcctcaagtacctgacagg

SEQ ID NO: 292741 - DNA, 25 bp, Artificial
  Probe
atatatgcaccaggttccaaatgaa

SEQ ID NO: 292742 - DNA, 25 bp, Artificial
  Probe
atgcaccaggttccaaatgaactac

SEQ ID NO: 292743 - DNA, 25 bp, Artificial
  Probe
agactcttgtatatatgcaccaggt

SEQ ID NO: 292744 - DNA, 25 bp, Artificial
  Probe
agtcctcaagtacctgacagggatg

SEQ ID NO: 292745 - DNA, 25 bp, Artificial
  Probe
ggacttgccacttggaggattccca

SEQ ID NO: 292746 - DNA, 25 bp, Artificial
  Probe
cagactcttgtatatatgcaccagg

SEQ ID NO: 292747 - DNA, 25 bp, Artificial
  Probe
ccacttggaggattcccagaagcct

SEQ ID NO: 292748 - DNA, 25 bp, Artificial
  Probe
ctcttgtatatatgcaccaggttcc

SEQ ID NO: 292749 - DNA, 25 bp, Artificial
  Probe
tgccacttggaggattcccagaagc

SEQ ID NO: 292750 - DNA, 25 bp, Artificial
  Probe
tcctcaagtacctgacagggatgct

SEQ ID NO: 292751 - DNA, 25 bp, Artificial
  Probe
tacctgacagggatgctgtgccagg

SEQ ID NO: 292752 - DNA, 25 bp, Artificial
  Probe
gcaccaggttccaaatgaactacca

SEQ ID NO: 292753 - DNA, 25 bp, Artificial
  Probe
tcccagaagcctttgcctttccaga

SEQ ID NO: 292754 - DNA, 25 bp, Artificial
  Probe
aagtcctcaagtacctgacagggat

SEQ ID NO: 292755 - DNA, 25 bp, Artificial
  Probe
cttgtatatatgcaccaggttccaa

SEQ ID NO: 292756 - DNA, 25 bp, Artificial
  Probe
ttgtatatatgcaccaggttccaaa

SEQ ID NO: 292757 - DNA, 25 bp, Artificial
  Probe
gcaagtcctcaagtacctgacaggg

SEQ ID NO: 292758 - DNA, 25 bp, Artificial
  Probe
gcctttgcctttccagactcttgta

SEQ ID NO: 292759 - DNA, 25 bp, Artificial
  Probe
ttcccagaagcctttgcctttccag

SEQ ID NO: 292760 - DNA, 25 bp, Artificial
  Probe
ggaggattcccagaagcctttgcct

SEQ ID NO: 292761 - DNA, 25 bp, Artificial
  Probe
gtcctcaagtacctgacagggatgc

SEQ ID NO: 292762 - DNA, 25 bp, Artificial
  Probe
aagcctttgcctttccagactcttg

SEQ ID NO: 292763 - DNA, 25 bp, Artificial
  Probe
acttgccacttggaggattcccaga

SEQ ID NO: 292764 - DNA, 25 bp, Artificial
  Probe
gaggattcccagaagcctttgcctt

SEQ ID NO: 292765 - DNA, 25 bp, Artificial
  Probe
caagtacctgacagggatgctgtgc

SEQ ID NO: 292766 - DNA, 25 bp, Artificial
  Probe
caggcaagtcctcaagtacctgaca

SEQ ID NO: 292767 - DNA, 25 bp, Artificial
  Probe
cttgccacttggaggattcccagaa

SEQ ID NO: 292768 - DNA, 25 bp, Artificial
  Probe
gactcttgtatatatgcaccaggtt

SEQ ID NO: 292769 - DNA, 25 bp, Artificial
  Probe
tatgcaccaggttccaaatgaacta

SEQ ID NO: 292770 - DNA, 25 bp, Artificial
  Probe
tgcaccaggttccaaatgaactacc

SEQ ID NO: 292771 - DNA, 25 bp, Artificial
  Probe
gccacttggaggattcccagaagcc

SEQ ID NO: 292772 - DNA, 25 bp, Artificial
  Probe
ccagactcttgtatatatgcaccag

SEQ ID NO: 292773 - DNA, 25 bp, Artificial
  Probe
gcctttccagactcttgtatatatg

SEQ ID NO: 292774 - DNA, 25 bp, Artificial
  Probe
tatatatgcaccaggttccaaatga

SEQ ID NO: 292775 - DNA, 25 bp, Artificial
  Probe
tgtatatatgcaccaggttccaaat

SEQ ID NO: 292776 - DNA, 25 bp, Artificial
  Probe
acctgacagggatgctgtgccagga

SEQ ID NO: 292777 - DNA, 25 bp, Artificial
  Probe
tggaggattcccagaagcctttgcc

SEQ ID NO: 292778 - DNA, 25 bp, Artificial
  Probe
aggacttgccacttggaggattccc

SEQ ID NO: 292779 - DNA, 25 bp, Artificial
  Probe
gatgcgtctggaaccccagtctatg

SEQ ID NO: 292780 - DNA, 25 bp, Artificial
  Probe
ttttgcgaagcatccccgaatgggc

SEQ ID NO: 292781 - DNA, 25 bp, Artificial
  Probe
gtctggaaccccagtctatggtgtg

SEQ ID NO: 292782 - DNA, 25 bp, Artificial
  Probe
cccgaatgggctaccttccagtgca

SEQ ID NO: 292783 - DNA, 25 bp, Artificial
  Probe
ttccagtgcagactgtgttagaggg

SEQ ID NO: 292784 - DNA, 25 bp, Artificial
  Probe
acctgagattgaagccgctctcttc

SEQ ID NO: 292785 - DNA, 25 bp, Artificial
  Probe
cgagtgtcaggagctgtttccagtt

SEQ ID NO: 292786 - DNA, 25 bp, Artificial
  Probe
tgctgctgaaacagccaagcatcag

SEQ ID NO: 292787 - DNA, 25 bp, Artificial
  Probe
agaagatgttcgtgactttgccaag

SEQ ID NO: 292788 - DNA, 25 bp, Artificial
  Probe
tggtagagtactgcactccgactac

SEQ ID NO: 292789 - DNA, 25 bp, Artificial
  Probe
ttgctaagggccataaaatgcacta

SEQ ID NO: 292790 - DNA, 25 bp, Artificial
  Probe
ccccatggtagagtactgcactccg

SEQ ID NO: 292791 - DNA, 25 bp, Artificial
  Probe
attggattcaggtacagaagcctga

SEQ ID NO: 292792 - DNA, 25 bp, Artificial
  Probe
aattatgacatctgccaaagctgct

SEQ ID NO: 292793 - DNA, 25 bp, Artificial
  Probe
gctgccggtcttgcacagagtggct

SEQ ID NO: 292794 - DNA, 25 bp, Artificial
  Probe
ataataaacctgagattgaagccgc

SEQ ID NO: 292795 - DNA, 25 bp, Artificial
  Probe
tgtggctgccggtcttgcacagagt

SEQ ID NO: 292796 - DNA, 25 bp, Artificial
  Probe
agtgtaacatctgtaaggagtgtcc

SEQ ID NO: 292797 - DNA, 25 bp, Artificial
  Probe
tccttgactggatgcgtctggaacc

SEQ ID NO: 292798 - DNA, 25 bp, Artificial
  Probe
catctgtaaggagtgtccaatcatt

SEQ ID NO: 292799 - DNA, 25 bp, Artificial
  Probe
tgactggatgcgtctggaaccccag

SEQ ID NO: 292800 - DNA, 25 bp, Artificial
  Probe
tttttctggccgagttgctaagggc

SEQ ID NO: 292801 - DNA, 25 bp, Artificial
  Probe
atgcactaccccatggtagagtact

SEQ ID NO: 292802 - DNA, 25 bp, Artificial
  Probe
ttaattatgacatctgccaaagctg

SEQ ID NO: 292803 - DNA, 25 bp, Artificial
  Probe
gtacagaagcctgaaacactttaat

SEQ ID NO: 292804 - DNA, 25 bp, Artificial
  Probe
gcagtaacattgagccgagtgtcag

SEQ ID NO: 292805 - DNA, 25 bp, Artificial
  Probe
aagcatccccgaatgggctaccttc

SEQ ID NO: 292806 - DNA, 25 bp, Artificial
  Probe
tcttgcacagagtggctgctgctga

SEQ ID NO: 292807 - DNA, 25 bp, Artificial
  Probe
gaagcatccccgaatgggctacctt

SEQ ID NO: 292808 - DNA, 25 bp, Artificial
  Probe
gccgagttgctaagggccataaaat

SEQ ID NO: 292809 - DNA, 25 bp, Artificial
  Probe
tactgcactccgactacatctggag

SEQ ID NO: 292810 - DNA, 25 bp, Artificial
  Probe
acatctggagaagatgttcgtgact

SEQ ID NO: 292811 - DNA, 25 bp, Artificial
  Probe
taaggagtgtccaatcattggattc

SEQ ID NO: 292812 - DNA, 25 bp, Artificial
  Probe
ttcaggtacagaagcctgaaacact

SEQ ID NO: 292813 - DNA, 25 bp, Artificial
  Probe
gtccttcgctctcaaatgcaaacag

SEQ ID NO: 292814 - DNA, 25 bp, Artificial
  Probe
cataaaatgcactaccccatggtag

SEQ ID NO: 292815 - DNA, 25 bp, Artificial
  Probe
gattgaagccgctctcttccttgac

SEQ ID NO: 292816 - DNA, 25 bp, Artificial
  Probe
ctatggtgtggctgccggtcttgca

SEQ ID NO: 292817 - DNA, 25 bp, Artificial
  Probe
gactttgccaaggtactgaaaaaca

SEQ ID NO: 292818 - DNA, 25 bp, Artificial
  Probe
aacattgagccgagtgtcaggagct

SEQ ID NO: 292819 - DNA, 25 bp, Artificial
  Probe
gtattttgcgaagcatccccgaatg

SEQ ID NO: 292820 - DNA, 25 bp, Artificial
  Probe
gagtggctgctgctgaaacagccaa

SEQ ID NO: 292821 - DNA, 25 bp, Artificial
  Probe
tgacatctgccaaagctgctttttt

SEQ ID NO: 292822 - DNA, 25 bp, Artificial
  Probe
ctgctgctgaaacagccaagcatca

SEQ ID NO: 292823 - DNA, 25 bp, Artificial
  Probe
tgttcgtgactttgccaaggtactg

SEQ ID NO: 292824 - DNA, 25 bp, Artificial
  Probe
ggccataaaatgcactaccccatgg

SEQ ID NO: 292825 - DNA, 25 bp, Artificial
  Probe
gttgactttctaggtcttcgtatga

SEQ ID NO: 292826 - DNA, 25 bp, Artificial
  Probe
tgtgcaaccttactatgtgcaatat

SEQ ID NO: 292827 - DNA, 25 bp, Artificial
  Probe
ctgtgcaaccttactatgtgcaata

SEQ ID NO: 292828 - DNA, 25 bp, Artificial
  Probe
gatgtctatcacagaaagattcctc

SEQ ID NO: 292829 - DNA, 25 bp, Artificial
  Probe
tgttgactttctaggtcttcgtatg

SEQ ID NO: 292830 - DNA, 25 bp, Artificial
  Probe
aatttctgtgcaaccttactatgtg

SEQ ID NO: 292831 - DNA, 25 bp, Artificial
  Probe
ctttttgtaaaagcagccagtaatt

SEQ ID NO: 292832 - DNA, 25 bp, Artificial
  Probe
aaagcagccagtaatttctgtgcaa

SEQ ID NO: 292833 - DNA, 25 bp, Artificial
  Probe
ttgatgtctatcacagaaagattcc

SEQ ID NO: 292834 - DNA, 25 bp, Artificial
  Probe
ttgactttctaggtcttcgtatgaa

SEQ ID NO: 292835 - DNA, 25 bp, Artificial
  Probe
agcagccagtaatttctgtgcaacc

SEQ ID NO: 292836 - DNA, 25 bp, Artificial
  Probe
ttctgtgcaaccttactatgtgcaa

SEQ ID NO: 292837 - DNA, 25 bp, Artificial
  Probe
atcctatggatgcatatgaaaacta

SEQ ID NO: 292838 - DNA, 25 bp, Artificial
  Probe
tgatgtctatcacagaaagattcct

SEQ ID NO: 292839 - DNA, 25 bp, Artificial
  Probe
cagccagtaatttctgtgcaacctt

SEQ ID NO: 292840 - DNA, 25 bp, Artificial
  Probe
gcagccagtaatttctgtgcaacct

SEQ ID NO: 292841 - DNA, 25 bp, Artificial
  Probe
ttttgtaaaagcagccagtaatttc

SEQ ID NO: 292842 - DNA, 25 bp, Artificial
  Probe
gtaatttctgtgcaaccttactatg

SEQ ID NO: 292843 - DNA, 25 bp, Artificial
  Probe
taatcctatggatgcatatgaaaac

SEQ ID NO: 292844 - DNA, 25 bp, Artificial
  Probe
gtgcaaccttactatgtgcaatatt

SEQ ID NO: 292845 - DNA, 25 bp, Artificial
  Probe
tctgtgcaaccttactatgtgcaat

SEQ ID NO: 292846 - DNA, 25 bp, Artificial
  Probe
gccagtaatttctgtgcaaccttac

SEQ ID NO: 292847 - DNA, 25 bp, Artificial
  Probe
tttgatgtctatcacagaaagattc

SEQ ID NO: 292848 - DNA, 25 bp, Artificial
  Probe
gtaaaagcagccagtaatttctgtg

SEQ ID NO: 292849 - DNA, 25 bp, Artificial
  Probe
aagcagccagtaatttctgtgcaac

SEQ ID NO: 292850 - DNA, 25 bp, Artificial
  Probe
tttctgtgcaaccttactatgtgca

SEQ ID NO: 292851 - DNA, 25 bp, Artificial
  Probe
tcctatggatgcatatgaaaactag

SEQ ID NO: 292852 - DNA, 25 bp, Artificial
  Probe
agccagtaatttctgtgcaacctta

SEQ ID NO: 292853 - DNA, 25 bp, Artificial
  Probe
atttctgtgcaaccttactatgtgc

SEQ ID NO: 292854 - DNA, 25 bp, Artificial
  Probe
aatcctatggatgcatatgaaaact

SEQ ID NO: 292855 - DNA, 25 bp, Artificial
  Probe
tctttttgtaaaagcagccagtaat

SEQ ID NO: 292856 - DNA, 25 bp, Artificial
  Probe
aaagcacctgcgtgtccatctcatg

SEQ ID NO: 292857 - DNA, 25 bp, Artificial
  Probe
tgcgttggtgtgtttctgtgtcgct

SEQ ID NO: 292858 - DNA, 25 bp, Artificial
  Probe
catgtttgctgacatgagcccctgc

SEQ ID NO: 292859 - DNA, 25 bp, Artificial
  Probe
cgtgtcatgtgatgtagccatgttt

SEQ ID NO: 292860 - DNA, 25 bp, Artificial
  Probe
ttacaaagcacctgcgtgtccatct

SEQ ID NO: 292861 - DNA, 25 bp, Artificial
  Probe
tgtgatgtagccatgtttgctgaca

SEQ ID NO: 292862 - DNA, 25 bp, Artificial
  Probe
cgtgtacacatgtgtgttctatgca

SEQ ID NO: 292863 - DNA, 25 bp, Artificial
  Probe
cctacctacccaacagaggacaaga

SEQ ID NO: 292864 - DNA, 25 bp, Artificial
  Probe
cgtgtccatctcatgtgcccatggg

SEQ ID NO: 292865 - DNA, 25 bp, Artificial
  Probe
aggacaagatggtcggcccctagct

SEQ ID NO: 292866 - DNA, 25 bp, Artificial
  Probe
tcccctgagggacaggactcctggg

SEQ ID NO: 292867 - DNA, 25 bp, Artificial
  Probe
tgcctcttacaaagcacctgcgtgt

SEQ ID NO: 292868 - DNA, 25 bp, Artificial
  Probe
ataccttgagcgtgtacacatgtgt

SEQ ID NO: 292869 - DNA, 25 bp, Artificial
  Probe
tcgctggcgtgtcatgtgatgtagc

SEQ ID NO: 292870 - DNA, 25 bp, Artificial
  Probe
gttagccctcagagtcttatttctc

SEQ ID NO: 292871 - DNA, 25 bp, Artificial
  Probe
ggcgtgtcatgtgatgtagccatgt

SEQ ID NO: 292872 - DNA, 25 bp, Artificial
  Probe
cgtcataccttgagcgtgtacacat

SEQ ID NO: 292873 - DNA, 25 bp, Artificial
  Probe
tcctgttagccctcagagtcttatt

SEQ ID NO: 292874 - DNA, 25 bp, Artificial
  Probe
tcagagtcttatttctctctattgg

SEQ ID NO: 292875 - DNA, 25 bp, Artificial
  Probe
ctcccctgagggacaggactcctgg

SEQ ID NO: 292876 - DNA, 25 bp, Artificial
  Probe
ttatttctctctattggtgaccaag

SEQ ID NO: 292877 - DNA, 25 bp, Artificial
  Probe
cacgccctgctgtgcagctgtgtgc

SEQ ID NO: 292878 - DNA, 25 bp, Artificial
  Probe
gccaggactcaatgcttccattctc

SEQ ID NO: 292879 - DNA, 25 bp, Artificial
  Probe
gtgtgttctatgcactcgccctgcc

SEQ ID NO: 292880 - DNA, 25 bp, Artificial
  Probe
tgtcatgtgatgtagccatgtttgc

SEQ ID NO: 292881 - DNA, 25 bp, Artificial
  Probe
gcctcttacaaagcacctgcgtgtc

SEQ ID NO: 292882 - DNA, 25 bp, Artificial
  Probe
tgtgtgttctatgcactcgccctgc

SEQ ID NO: 292883 - DNA, 25 bp, Artificial
  Probe
agacctgcatgtcctgtccccagtg

SEQ ID NO: 292884 - DNA, 25 bp, Artificial
  Probe
tgtgtttctgtgtcgctggcgtgtc

SEQ ID NO: 292885 - DNA, 25 bp, Artificial
  Probe
ctgcgtgtccatctcatgtgcccat

SEQ ID NO: 292886 - DNA, 25 bp, Artificial
  Probe
tttctgtgtcgctggcgtgtcatgt

SEQ ID NO: 292887 - DNA, 25 bp, Artificial
  Probe
gtccatctcatgtgcccatgggtca

SEQ ID NO: 292888 - DNA, 25 bp, Artificial
  Probe
cccaacagaggacaagatggtcggc

SEQ ID NO: 292889 - DNA, 25 bp, Artificial
  Probe
gtcttatttctctctattggtgacc

SEQ ID NO: 292890 - DNA, 25 bp, Artificial
  Probe
tgtcgctggcgtgtcatgtgatgta

SEQ ID NO: 292891 - DNA, 25 bp, Artificial
  Probe
ctattggtgaccaagttgcaaatgg

SEQ ID NO: 292892 - DNA, 25 bp, Artificial
  Probe
gagtcttatttctctctattggtga

SEQ ID NO: 292893 - DNA, 25 bp, Artificial
  Probe
gccctgctgtgcagctgtgtgcgtt

SEQ ID NO: 292894 - DNA, 25 bp, Artificial
  Probe
ccgtcataccttgagcgtgtacaca

SEQ ID NO: 292895 - DNA, 25 bp, Artificial
  Probe
ctcttacaaagcacctgcgtgtcca

SEQ ID NO: 292896 - DNA, 25 bp, Artificial
  Probe
cttgcctcttacaaagcacctgcgt

SEQ ID NO: 292897 - DNA, 25 bp, Artificial
  Probe
agcacctgcgtgtccatctcatgtg

SEQ ID NO: 292898 - DNA, 25 bp, Artificial
  Probe
gtcatgtgatgtagccatgtttgct

SEQ ID NO: 292899 - DNA, 25 bp, Artificial
  Probe
tgtacacatgtgtgttctatgcact

SEQ ID NO: 292900 - DNA, 25 bp, Artificial
  Probe
ccctgctgtgcagctgtgtgcgttg

SEQ ID NO: 292901 - DNA, 25 bp, Artificial
  Probe
gctggcgtgtcatgtgatgtagcca

SEQ ID NO: 292902 - DNA, 25 bp, Artificial
  Probe
aaagccctggtgtcccgctgccggg

SEQ ID NO: 292903 - DNA, 25 bp, Artificial
  Probe
atcaccacggagacggctatccagc

SEQ ID NO: 292904 - DNA, 25 bp, Artificial
  Probe
cacggagacggctatccagcttatg

SEQ ID NO: 292905 - DNA, 25 bp, Artificial
  Probe
tctggtggtgacctttgcctgcaac

SEQ ID NO: 292906 - DNA, 25 bp, Artificial
  Probe
tgacctttgcctgcaacctggcgac

SEQ ID NO: 292907 - DNA, 25 bp, Artificial
  Probe
gctggtcgccgctattgataatgat

SEQ ID NO: 292908 - DNA, 25 bp, Artificial
  Probe
atgtgtgtactgtccgtctgctggt

SEQ ID NO: 292909 - DNA, 25 bp, Artificial
  Probe
ggtggtgacctttgcctgcaacctg

SEQ ID NO: 292910 - DNA, 25 bp, Artificial
  Probe
gcttgctggctctggtggtgacctt

SEQ ID NO: 292911 - DNA, 25 bp, Artificial
  Probe
ctgggtttatctgctgctaagaaag

SEQ ID NO: 292912 - DNA, 25 bp, Artificial
  Probe
ggcgaccatcaaagccctggtgtcc

SEQ ID NO: 292913 - DNA, 25 bp, Artificial
  Probe
tagagcaatgcaagacgcagatggg

SEQ ID NO: 292914 - DNA, 25 bp, Artificial
  Probe
ttgcctgcaacctggcgaccatcaa

SEQ ID NO: 292915 - DNA, 25 bp, Artificial
  Probe
gcctggcttcgctgaaccagatctt

SEQ ID NO: 292916 - DNA, 25 bp, Artificial
  Probe
gaaagatccttcttcgaaagttctg

SEQ ID NO: 292917 - DNA, 25 bp, Artificial
  Probe
tggatccctgggtttatctgctgct

SEQ ID NO: 292918 - DNA, 25 bp, Artificial
  Probe
ggtttatctgctgctaagaaagatc

SEQ ID NO: 292919 - DNA, 25 bp, Artificial
  Probe
gcctgtctaggcttgctggctctgg

SEQ ID NO: 292920 - DNA, 25 bp, Artificial
  Probe
cgccgctattgataatgatgctgaa

SEQ ID NO: 292921 - DNA, 25 bp, Artificial
  Probe
aaatgatcttcaatcagatgtcagt

SEQ ID NO: 292922 - DNA, 25 bp, Artificial
  Probe
gtgacctttgcctgcaacctggcga

SEQ ID NO: 292923 - DNA, 25 bp, Artificial
  Probe
ctgtctaggcttgctggctctggtg

SEQ ID NO: 292924 - DNA, 25 bp, Artificial
  Probe
tgaaaatgatcttcaatcagatgtc

SEQ ID NO: 292925 - DNA, 25 bp, Artificial
  Probe
agagcaatgcaagacgcagatggga

SEQ ID NO: 292926 - DNA, 25 bp, Artificial
  Probe
ggatcatgtgtgtactgtccgtctg

SEQ ID NO: 292927 - DNA, 25 bp, Artificial
  Probe
ttcgctgaaccagatcttggatccc

SEQ ID NO: 292928 - DNA, 25 bp, Artificial
  Probe
gtgtactgtccgtctgctggtcgcc

SEQ ID NO: 292929 - DNA, 25 bp, Artificial
  Probe
ggatcaccacggagacggctatcca

SEQ ID NO: 292930 - DNA, 25 bp, Artificial
  Probe
tccgtctgctggtcgccgctattga

SEQ ID NO: 292931 - DNA, 25 bp, Artificial
  Probe
tgctaagaaagatccttcttcgaaa

SEQ ID NO: 292932 - DNA, 25 bp, Artificial
  Probe
taagaaagatccttcttcgaaagtt

SEQ ID NO: 292933 - DNA, 25 bp, Artificial
  Probe
atctgctgctaagaaagatccttct

SEQ ID NO: 292934 - DNA, 25 bp, Artificial
  Probe
aacctggcgaccatcaaagccctgg

SEQ ID NO: 292935 - DNA, 25 bp, Artificial
  Probe
aatcagatgtcagtagagcaatgca

SEQ ID NO: 292936 - DNA, 25 bp, Artificial
  Probe
cgttcgcctggcttcgctgaaccag

SEQ ID NO: 292937 - DNA, 25 bp, Artificial
  Probe
tggtggtgacctttgcctgcaacct

SEQ ID NO: 292938 - DNA, 25 bp, Artificial
  Probe
aaggagtgcaattccttcctaatcg

SEQ ID NO: 292939 - DNA, 25 bp, Artificial
  Probe
cttcgcctgtctaggcttgctggct

SEQ ID NO: 292940 - DNA, 25 bp, Artificial
  Probe
ggccggatcaccacggagacggcta

SEQ ID NO: 292941 - DNA, 25 bp, Artificial
  Probe
gttcgcctggcttcgctgaaccaga

SEQ ID NO: 292942 - DNA, 25 bp, Artificial
  Probe
tcgccgttcgcctggcttcgctgaa

SEQ ID NO: 292943 - DNA, 25 bp, Artificial
  Probe
cagcttatggggatcatgtgtgtac

SEQ ID NO: 292944 - DNA, 25 bp, Artificial
  Probe
gcaattccttcctaatcgccgttcg

SEQ ID NO: 292945 - DNA, 25 bp, Artificial
  Probe
atcttggatccctgggtttatctgc

SEQ ID NO: 292946 - DNA, 25 bp, Artificial
  Probe
ctatccagcttatggggatcatgtg

SEQ ID NO: 292947 - DNA, 25 bp, Artificial
  Probe
tttgcctgcaacctggcgaccatca

SEQ ID NO: 292948 - DNA, 25 bp, Artificial
  Probe
acagcgccaggcagcacggatgtct

SEQ ID NO: 292949 - DNA, 25 bp, Artificial
  Probe
accaacagcgccaggcagcacggat

SEQ ID NO: 292950 - DNA, 25 bp, Artificial
  Probe
ggatctaagggcacctgacctggat

SEQ ID NO: 292951 - DNA, 25 bp, Artificial
  Probe
ttttcacggggctctgcatcctatt

SEQ ID NO: 292952 - DNA, 25 bp, Artificial
  Probe
ttcccaagcccgttggctgagcttg

SEQ ID NO: 292953 - DNA, 25 bp, Artificial
  Probe
gcgccaggcagcacggatgtctcag

SEQ ID NO: 292954 - DNA, 25 bp, Artificial
  Probe
tgatcctccgtagctgcctttacgc

SEQ ID NO: 292955 - DNA, 25 bp, Artificial
  Probe
ctttccagctgtctgcttggatcta

SEQ ID NO: 292956 - DNA, 25 bp, Artificial
  Probe
ttttctcttccacaactggccacgg

SEQ ID NO: 292957 - DNA, 25 bp, Artificial
  Probe
ggttgaaccagacaatgttcctggc

SEQ ID NO: 292958 - DNA, 25 bp, Artificial
  Probe
tgaatgtagcccacacagtgcctct

SEQ ID NO: 292959 - DNA, 25 bp, Artificial
  Probe
ttctgtgtcaggtgccggcaccaac

SEQ ID NO: 292960 - DNA, 25 bp, Artificial
  Probe
cagaaaagccacaatctcatatgag

SEQ ID NO: 292961 - DNA, 25 bp, Artificial
  Probe
tccgtagctgcctttacgccagagc

SEQ ID NO: 292962 - DNA, 25 bp, Artificial
  Probe
ggccacggtttctctgcctctgttc

SEQ ID NO: 292963 - DNA, 25 bp, Artificial
  Probe
gtagctgcctttacgccagagccca

SEQ ID NO: 292964 - DNA, 25 bp, Artificial
  Probe
gtttcagacactcaagcacacccag

SEQ ID NO: 292965 - DNA, 25 bp, Artificial
  Probe
atccaaagggttgaaccagacaatg

SEQ ID NO: 292966 - DNA, 25 bp, Artificial
  Probe
aagccacaatctcatatgaggcctg

SEQ ID NO: 292967 - DNA, 25 bp, Artificial
  Probe
tgcttggatctaagggcacctgacc

SEQ ID NO: 292968 - DNA, 25 bp, Artificial
  Probe
atgtagcccacacagtgcctctggc

SEQ ID NO: 292969 - DNA, 25 bp, Artificial
  Probe
aactggccacggtttctctgcctct

SEQ ID NO: 292970 - DNA, 25 bp, Artificial
  Probe
ccgttggctgagcttgcgctcggct

SEQ ID NO: 292971 - DNA, 25 bp, Artificial
  Probe
gggagcgccttcagctttctggttt

SEQ ID NO: 292972 - DNA, 25 bp, Artificial
  Probe
agacaatgttcctggctgtcgtgct

SEQ ID NO: 292973 - DNA, 25 bp, Artificial
  Probe
tgtcgctgacccaggcctgtggacc

SEQ ID NO: 292974 - DNA, 25 bp, Artificial
  Probe
tctcttccacaactggccacggttt

SEQ ID NO: 292975 - DNA, 25 bp, Artificial
  Probe
gatccaggttttatccaaagggttg

SEQ ID NO: 292976 - DNA, 25 bp, Artificial
  Probe
ctgacccaggcctgtggaccagatg

SEQ ID NO: 292977 - DNA, 25 bp, Artificial
  Probe
ctgagcttgcgctcggctgtgtttc

SEQ ID NO: 292978 - DNA, 25 bp, Artificial
  Probe
ttatccaaagggttgaaccagacaa

SEQ ID NO: 292979 - DNA, 25 bp, Artificial
  Probe
agcccttctctgactaacatcctgg

SEQ ID NO: 292980 - DNA, 25 bp, Artificial
  Probe
gtgtcctgtcgctgacccaggcctg

SEQ ID NO: 292981 - DNA, 25 bp, Artificial
  Probe
tcccaccggatgcagaaaagccaca

SEQ ID NO: 292982 - DNA, 25 bp, Artificial
  Probe
tttctggttttcacggggctctgca

SEQ ID NO: 292983 - DNA, 25 bp, Artificial
  Probe
gcccttctctgactaacatcctgga

SEQ ID NO: 292984 - DNA, 25 bp, Artificial
  Probe
aggtgccggcaccaacagcgccagg

SEQ ID NO: 292985 - DNA, 25 bp, Artificial
  Probe
acatcctggatcttctttccagctg

SEQ ID NO: 292986 - DNA, 25 bp, Artificial
  Probe
ccaccggatgcagaaaagccacaat

SEQ ID NO: 292987 - DNA, 25 bp, Artificial
  Probe
ccagccagcttattgatcctccgta

SEQ ID NO: 292988 - DNA, 25 bp, Artificial
  Probe
ggtttctctgcctctgttcccaagc

SEQ ID NO: 292989 - DNA, 25 bp, Artificial
  Probe
cttgcgctcggctgtgtttcagaca

SEQ ID NO: 292990 - DNA, 25 bp, Artificial
  Probe
cctgtggaccagatgaatgtagccc

SEQ ID NO: 292991 - DNA, 25 bp, Artificial
  Probe
gcttctcagtgagaagaagacttgc

SEQ ID NO: 292992 - DNA, 25 bp, Artificial
  Probe
caatctcatatgaggcctgggcccc

SEQ ID NO: 292993 - DNA, 25 bp, Artificial
  Probe
tgcagaaaagccacaatctcatatg

SEQ ID NO: 292994 - DNA, 25 bp, Artificial
  Probe
gtctagacaaaccttcagcctcgac

SEQ ID NO: 292995 - DNA, 25 bp, Artificial
  Probe
atcttcctgtggaaggaaatataca

SEQ ID NO: 292996 - DNA, 25 bp, Artificial
  Probe
tgagcaagagcttcaggaagcagtt

SEQ ID NO: 292997 - DNA, 25 bp, Artificial
  Probe
aatatacatgtcaagaagcagatcg

SEQ ID NO: 292998 - DNA, 25 bp, Artificial
  Probe
atcgaatcccggaagcggcttgcca

SEQ ID NO: 292999 - DNA, 25 bp, Artificial
  Probe
ggtatgtctagacaaaccttcagcc

SEQ ID NO: 293000 - DNA, 25 bp, Artificial
  Probe
acctgcatgacctccttcaagagca

SEQ ID NO: 293001 - DNA, 25 bp, Artificial
  Probe
ctgaggtggacacctccatgctcca

SEQ ID NO: 293002 - DNA, 25 bp, Artificial
  Probe
ttgtgggcctcttcgccttctgctg

SEQ ID NO: 293003 - DNA, 25 bp, Artificial
  Probe
aatatctgccatgaggggtatgtct

SEQ ID NO: 293004 - DNA, 25 bp, Artificial
  Probe
gaactcctggtactattctacagat

SEQ ID NO: 293005 - DNA, 25 bp, Artificial
  Probe
ctacaatcttcctgtggaaggaaat

SEQ ID NO: 293006 - DNA, 25 bp, Artificial
  Probe
cctgttgaacaggtctcacagcaca

SEQ ID NO: 293007 - DNA, 25 bp, Artificial
  Probe
tgtgtgaacccctttgccctgtatc

SEQ ID NO: 293008 - DNA, 25 bp, Artificial
  Probe
aagcagatcgaatcccggaagcggc

SEQ ID NO: 293009 - DNA, 25 bp, Artificial
  Probe
tgctggctccccaatcatgtcatct

SEQ ID NO: 293010 - DNA, 25 bp, Artificial
  Probe
aaaccttcagcctcgactcttaagg

SEQ ID NO: 293011 - DNA, 25 bp, Artificial
  Probe
tactctgaggtggacacctccatgc

SEQ ID NO: 293012 - DNA, 25 bp, Artificial
  Probe
ctggtactattctacagatatctag

SEQ ID NO: 293013 - DNA, 25 bp, Artificial
  Probe
ctggccttcaccaactcctgtgtga

SEQ ID NO: 293014 - DNA, 25 bp, Artificial
  Probe
aggaagcagttcaacactcaacttc

SEQ ID NO: 293015 - DNA, 25 bp, Artificial
  Probe
gtggacacctccatgctccacttta

SEQ ID NO: 293016 - DNA, 25 bp, Artificial
  Probe
tgctgccagcccagcctgttgaaca

SEQ ID NO: 293017 - DNA, 25 bp, Artificial
  Probe
tgccctgtatctgctgagcaagagc

SEQ ID NO: 293018 - DNA, 25 bp, Artificial
  Probe
gctggctccccaatcatgtcatcta

SEQ ID NO: 293019 - DNA, 25 bp, Artificial
  Probe
gtatctgctgagcaagagcttcagg

SEQ ID NO: 293020 - DNA, 25 bp, Artificial
  Probe
tcgaatcccggaagcggcttgccaa

SEQ ID NO: 293021 - DNA, 25 bp, Artificial
  Probe
gtaccgttcctaccactactctgag

SEQ ID NO: 293022 - DNA, 25 bp, Artificial
  Probe
cccggaagcggcttgccaagacagt

SEQ ID NO: 293023 - DNA, 25 bp, Artificial
  Probe
ggaagcagttcaacactcaacttct

SEQ ID NO: 293024 - DNA, 25 bp, Artificial
  Probe
agaagcagatcgaatcccggaagcg

SEQ ID NO: 293025 - DNA, 25 bp, Artificial
  Probe
acatgtcaagaagcagatcgaatcc

SEQ ID NO: 293026 - DNA, 25 bp, Artificial
  Probe
atatctgccatgaggggtatgtcta

SEQ ID NO: 293027 - DNA, 25 bp, Artificial
  Probe
tttgtgggcctcttcgccttctgct

SEQ ID NO: 293028 - DNA, 25 bp, Artificial
  Probe
tgtgaacccctttgccctgtatctg

SEQ ID NO: 293029 - DNA, 25 bp, Artificial
  Probe
gccatgaggggtatgtctagacaaa

SEQ ID NO: 293030 - DNA, 25 bp, Artificial
  Probe
tactggtgtttgtgggcctcttcgc

SEQ ID NO: 293031 - DNA, 25 bp, Artificial
  Probe
tggccttcaccaactcctgtgtgaa

SEQ ID NO: 293032 - DNA, 25 bp, Artificial
  Probe
tcagcctcatcaacggaaatatctg

SEQ ID NO: 293033 - DNA, 25 bp, Artificial
  Probe
ccctttgccctgtatctgctgagca

SEQ ID NO: 293034 - DNA, 25 bp, Artificial
  Probe
actttatcaccagcatctgtgcccg

SEQ ID NO: 293035 - DNA, 25 bp, Artificial
  Probe
aacggaaatatctgccatgaggggt

SEQ ID NO: 293036 - DNA, 25 bp, Artificial
  Probe
gaagtaccacctgcatgacctcctt

SEQ ID NO: 293037 - DNA, 25 bp, Artificial
  Probe
cttcctgtggaaggaaatatacatg

SEQ ID NO: 293038 - DNA, 25 bp, Artificial
  Probe
gcccagcctgttgaacaggtctcac

SEQ ID NO: 293039 - DNA, 25 bp, Artificial
  Probe
gcatgacctccttcaagagcaccaa

SEQ ID NO: 293040 - DNA, 25 bp, Artificial
  Probe
gcgcatctactgtgccctctcgggt

SEQ ID NO: 293041 - DNA, 25 bp, Artificial
  Probe
acatggccgcctaccagctggagct

SEQ ID NO: 293042 - DNA, 25 bp, Artificial
  Probe
cacaccgggacaaccatcatggctg

SEQ ID NO: 293043 - DNA, 25 bp, Artificial
  Probe
agcgcatctcatggtagctggttgg

SEQ ID NO: 293044 - DNA, 25 bp, Artificial
  Probe
catcatggctgtggaatttgacggg

SEQ ID NO: 293045 - DNA, 25 bp, Artificial
  Probe
ttcccgagtgtcagcgggagcagcc

SEQ ID NO: 293046 - DNA, 25 bp, Artificial
  Probe
ggagaagtccacaccgggacaacca

SEQ ID NO: 293047 - DNA, 25 bp, Artificial
  Probe
gatgcccaagccatagccgacatgg

SEQ ID NO: 293048 - DNA, 25 bp, Artificial
  Probe
ctcatggtagctggttgggaccaac

SEQ ID NO: 293049 - DNA, 25 bp, Artificial
  Probe
ctgctgatgcccaagccatagccga

SEQ ID NO: 293050 - DNA, 25 bp, Artificial
  Probe
tgattcccgagtgtcagcgggagca

SEQ ID NO: 293051 - DNA, 25 bp, Artificial
  Probe
ttccggacgggagaagtccacaccg

SEQ ID NO: 293052 - DNA, 25 bp, Artificial
  Probe
atggccgcctaccagctggagctgc

SEQ ID NO: 293053 - DNA, 25 bp, Artificial
  Probe
gccctctcgggttccgctgctgatg

SEQ ID NO: 293054 - DNA, 25 bp, Artificial
  Probe
gagcagccgtagtgaaccgcgtgtt

SEQ ID NO: 293055 - DNA, 25 bp, Artificial
  Probe
ctaggatgctgcaagccggagcacc

SEQ ID NO: 293056 - DNA, 25 bp, Artificial
  Probe
gaagaacatctcctacaagtaccgc

SEQ ID NO: 293057 - DNA, 25 bp, Artificial
  Probe
ccttgttctggctgctgcaaacata

SEQ ID NO: 293058 - DNA, 25 bp, Artificial
  Probe
tgctgcaaacatagtgaagaacatc

SEQ ID NO: 293059 - DNA, 25 bp, Artificial
  Probe
ctcgggttccgctgctgatgcccaa

SEQ ID NO: 293060 - DNA, 25 bp, Artificial
  Probe
gtccacaccgggacaaccatcatgg

SEQ ID NO: 293061 - DNA, 25 bp, Artificial
  Probe
cgccccttgttctggctgctgcaaa

SEQ ID NO: 293062 - DNA, 25 bp, Artificial
  Probe
ggacaaccatcatggctgtggaatt

SEQ ID NO: 293063 - DNA, 25 bp, Artificial
  Probe
ggatgctaattcgacagccctttgc

SEQ ID NO: 293064 - DNA, 25 bp, Artificial
  Probe
ctctgattcccgagtgtcagcggga

SEQ ID NO: 293065 - DNA, 25 bp, Artificial
  Probe
atgcccaagccatagccgacatggc

SEQ ID NO: 293066 - DNA, 25 bp, Artificial
  Probe
agcgcatctactgtgccctctcggg

SEQ ID NO: 293067 - DNA, 25 bp, Artificial
  Probe
tggtgggctctgattcccgagtgtc

SEQ ID NO: 293068 - DNA, 25 bp, Artificial
  Probe
aagccatagccgacatggccgccta

SEQ ID NO: 293069 - DNA, 25 bp, Artificial
  Probe
acttgttagcgcatctcatggtagc

SEQ ID NO: 293070 - DNA, 25 bp, Artificial
  Probe
tgctgatgcccaagccatagccgac

SEQ ID NO: 293071 - DNA, 25 bp, Artificial
  Probe
gtgggctctgattcccgagtgtcag

SEQ ID NO: 293072 - DNA, 25 bp, Artificial
  Probe
ttccgctgctgatgcccaagccata

SEQ ID NO: 293073 - DNA, 25 bp, Artificial
  Probe
ttgttctggctgctgcaaacatagt

SEQ ID NO: 293074 - DNA, 25 bp, Artificial
  Probe
tactgtgccctctcgggttccgctg

SEQ ID NO: 293075 - DNA, 25 bp, Artificial
  Probe
cgcatctcatggtagctggttggga

SEQ ID NO: 293076 - DNA, 25 bp, Artificial
  Probe
ctaccagctggagctgcacgggttg

SEQ ID NO: 293077 - DNA, 25 bp, Artificial
  Probe
gctgatggtgtggaccatcgcgtca

SEQ ID NO: 293078 - DNA, 25 bp, Artificial
  Probe
cgcctaccagctggagctgcacggg

SEQ ID NO: 293079 - DNA, 25 bp, Artificial
  Probe
tagtgaaccgcgtgtttgacaagct

SEQ ID NO: 293080 - DNA, 25 bp, Artificial
  Probe
ttatgtggacgcagcttataaacca

SEQ ID NO: 293081 - DNA, 25 bp, Artificial
  Probe
attcccgagtgtcagcgggagcagc

SEQ ID NO: 293082 - DNA, 25 bp, Artificial
  Probe
cagccgtagtgaaccgcgtgtttga

SEQ ID NO: 293083 - DNA, 25 bp, Artificial
  Probe
aaccgcgtgtttgacaagctctccc

SEQ ID NO: 293084 - DNA, 25 bp, Artificial
  Probe
aaccatcatggctgtggaatttgac

SEQ ID NO: 293085 - DNA, 25 bp, Artificial
  Probe
atagtgaagaacatctcctacaagt

SEQ ID NO: 293086 - DNA, 25 bp, Artificial
  Probe
ccatcagatggaagatttggttaca

SEQ ID NO: 293087 - DNA, 25 bp, Artificial
  Probe
tctctacaccagtgcgtgttcttga

SEQ ID NO: 293088 - DNA, 25 bp, Artificial
  Probe
tccaccaagtaggaagatattatcc

SEQ ID NO: 293089 - DNA, 25 bp, Artificial
  Probe
tctctgagcacagacagtttatatt

SEQ ID NO: 293090 - DNA, 25 bp, Artificial
  Probe
gacactatattcagttgtatgtcca

SEQ ID NO: 293091 - DNA, 25 bp, Artificial
  Probe
tggtcctgaattactacattcaggg

SEQ ID NO: 293092 - DNA, 25 bp, Artificial
  Probe
ctatattcagttgtatgtccaatgg

SEQ ID NO: 293093 - DNA, 25 bp, Artificial
  Probe
atgttccaccaagtaggaagatatt

SEQ ID NO: 293094 - DNA, 25 bp, Artificial
  Probe
cgtgttcttgagtcccctgggacct

SEQ ID NO: 293095 - DNA, 25 bp, Artificial
  Probe
ttatggattgatacccatttgttac

SEQ ID NO: 293096 - DNA, 25 bp, Artificial
  Probe
atgtcaaggtatgttccaccaagta

SEQ ID NO: 293097 - DNA, 25 bp, Artificial
  Probe
tacaccagtgcgtgttcttgagtcc

SEQ ID NO: 293098 - DNA, 25 bp, Artificial
  Probe
tttggttacaaagatctctgcctgg

SEQ ID NO: 293099 - DNA, 25 bp, Artificial
  Probe
agttaacaattggtcctgaattact

SEQ ID NO: 293100 - DNA, 25 bp, Artificial
  Probe
ttaaggattagctgcttttccatca

SEQ ID NO: 293101 - DNA, 25 bp, Artificial
  Probe
cagaccctggtaaaatgagtccttg

SEQ ID NO: 293102 - DNA, 25 bp, Artificial
  Probe
agaacagaccctggtaaaatgagtc

SEQ ID NO: 293103 - DNA, 25 bp, Artificial
  Probe
actatattcagttgtatgtccaatg

SEQ ID NO: 293104 - DNA, 25 bp, Artificial
  Probe
acacacttttagaaggatgaagaac

SEQ ID NO: 293105 - DNA, 25 bp, Artificial
  Probe
tataggaatcctggatccattatgg

SEQ ID NO: 293106 - DNA, 25 bp, Artificial
  Probe
gatgaagaacagaccctggtaaaat

SEQ ID NO: 293107 - DNA, 25 bp, Artificial
  Probe
catcacaatccatggggttaaggat

SEQ ID NO: 293108 - DNA, 25 bp, Artificial
  Probe
attcagttgtatgtccaatggtgac

SEQ ID NO: 293109 - DNA, 25 bp, Artificial
  Probe
acccatttgttactatcagtagaag

SEQ ID NO: 293110 - DNA, 25 bp, Artificial
  Probe
cctgaattactacattcagggagca

SEQ ID NO: 293111 - DNA, 25 bp, Artificial
  Probe
ggattgatacccatttgttactatc

SEQ ID NO: 293112 - DNA, 25 bp, Artificial
  Probe
gttaacaattggtcctgaattacta

SEQ ID NO: 293113 - DNA, 25 bp, Artificial
  Probe
attggtcctgaattactacattcag

SEQ ID NO: 293114 - DNA, 25 bp, Artificial
  Probe
cttttccatcagatggaagatttgg

SEQ ID NO: 293115 - DNA, 25 bp, Artificial
  Probe
atcaatgtcaaggtatgttccacca

SEQ ID NO: 293116 - DNA, 25 bp, Artificial
  Probe
attactacattcagggagcactttt

SEQ ID NO: 293117 - DNA, 25 bp, Artificial
  Probe
tctgctttccatcacaatccatggg

SEQ ID NO: 293118 - DNA, 25 bp, Artificial
  Probe
gatacccatttgttactatcagtag

SEQ ID NO: 293119 - DNA, 25 bp, Artificial
  Probe
ggagcagacactatattcagttgta

SEQ ID NO: 293120 - DNA, 25 bp, Artificial
  Probe
tccatcagatggaagatttggttac

SEQ ID NO: 293121 - DNA, 25 bp, Artificial
  Probe
tccatcacaatccatggggttaagg

SEQ ID NO: 293122 - DNA, 25 bp, Artificial
  Probe
ctacattcagggagcacttttcagt

SEQ ID NO: 293123 - DNA, 25 bp, Artificial
  Probe
ggatccattatggattgatacccat

SEQ ID NO: 293124 - DNA, 25 bp, Artificial
  Probe
caatccatggggttaaggattagct

SEQ ID NO: 293125 - DNA, 25 bp, Artificial
  Probe
gggacctctgctttccatcacaatc

SEQ ID NO: 293126 - DNA, 25 bp, Artificial
  Probe
ccatttgttactatcagtagaagta

SEQ ID NO: 293127 - DNA, 25 bp, Artificial
  Probe
ctgggacctctgctttccatcacaa

SEQ ID NO: 293128 - DNA, 25 bp, Artificial
  Probe
ataaggtggtattgcagctgagctc

SEQ ID NO: 293129 - DNA, 25 bp, Artificial
  Probe
tacaaagatctctgcctggagcaga

SEQ ID NO: 293130 - DNA, 25 bp, Artificial
  Probe
gctttccatcacaatccatggggtt

SEQ ID NO: 293131 - DNA, 25 bp, Artificial
  Probe
gatctctgcctggagcagacactat

SEQ ID NO: 293132 - DNA, 25 bp, Artificial
  Probe
ctctgctgtgccaggctgtgagaga

SEQ ID NO: 293133 - DNA, 25 bp, Artificial
  Probe
acagaggcctcctttatcagtactg

SEQ ID NO: 293134 - DNA, 25 bp, Artificial
  Probe
aggtagtctgccatagatcaatgag

SEQ ID NO: 293135 - DNA, 25 bp, Artificial
  Probe
cacacagaggcctcctttatcagta

SEQ ID NO: 293136 - DNA, 25 bp, Artificial
  Probe
ctttatcagtactgggtgctgtgtt

SEQ ID NO: 293137 - DNA, 25 bp, Artificial
  Probe
ccatggacaccacattgctactgta

SEQ ID NO: 293138 - DNA, 25 bp, Artificial
  Probe
tgggtgctgtgtttccccagggttc

SEQ ID NO: 293139 - DNA, 25 bp, Artificial
  Probe
atgaggctcatttggagccatatgt

SEQ ID NO: 293140 - DNA, 25 bp, Artificial
  Probe
ggtcagtggaggtagccagatcttc

SEQ ID NO: 293141 - DNA, 25 bp, Artificial
  Probe
ccgcactcaacacttcagggctttg

SEQ ID NO: 293142 - DNA, 25 bp, Artificial
  Probe
gcactcaacacttcagggctttgcc

SEQ ID NO: 293143 - DNA, 25 bp, Artificial
  Probe
gctttgccttctggagtggagactc

SEQ ID NO: 293144 - DNA, 25 bp, Artificial
  Probe
aggctcatttggagccatatgttgg

SEQ ID NO: 293145 - DNA, 25 bp, Artificial
  Probe
gatcaatgaggctcatttggagcca

SEQ ID NO: 293146 - DNA, 25 bp, Artificial
  Probe
atcaatgaggctcatttggagccat

SEQ ID NO: 293147 - DNA, 25 bp, Artificial
  Probe
aaccatggacaccacattgctactg

SEQ ID NO: 293148 - DNA, 25 bp, Artificial
  Probe
ggctttgccttctggagtggagact

SEQ ID NO: 293149 - DNA, 25 bp, Artificial
  Probe
tagtctgccatagatcaatgaggct

SEQ ID NO: 293150 - DNA, 25 bp, Artificial
  Probe
cacttcagggctttgccttctggag

SEQ ID NO: 293151 - DNA, 25 bp, Artificial
  Probe
cagccaagcaagaggatcctgtggt

SEQ ID NO: 293152 - DNA, 25 bp, Artificial
  Probe
gagctggcagccaagcaagaggatc

SEQ ID NO: 293153 - DNA, 25 bp, Artificial
  Probe
tcaaaagtcaaaaggctctgtggtg

SEQ ID NO: 293154 - DNA, 25 bp, Artificial
  Probe
tgtgaggtagtctgccatagatcaa

SEQ ID NO: 293155 - DNA, 25 bp, Artificial
  Probe
atcctgtggtcagtggaggtagcca

SEQ ID NO: 293156 - DNA, 25 bp, Artificial
  Probe
atcagtactgggtgctgtgtttccc

SEQ ID NO: 293157 - DNA, 25 bp, Artificial
  Probe
tcattgtgactggtccacctgtgga

SEQ ID NO: 293158 - DNA, 25 bp, Artificial
  Probe
tggtcagtggaggtagccagatctt

SEQ ID NO: 293159 - DNA, 25 bp, Artificial
  Probe
tttccccagggttcccagaaagatg

SEQ ID NO: 293160 - DNA, 25 bp, Artificial
  Probe
gtactgggtgctgtgtttccccagg

SEQ ID NO: 293161 - DNA, 25 bp, Artificial
  Probe
ggcagccaagcaagaggatcctgtg

SEQ ID NO: 293162 - DNA, 25 bp, Artificial
  Probe
acacttcagggctttgccttctgga

SEQ ID NO: 293163 - DNA, 25 bp, Artificial
  Probe
ggacaccacattgctactgtaccct

SEQ ID NO: 293164 - DNA, 25 bp, Artificial
  Probe
agtctgccatagatcaatgaggctc

SEQ ID NO: 293165 - DNA, 25 bp, Artificial
  Probe
ggtagtctgccatagatcaatgagg

SEQ ID NO: 293166 - DNA, 25 bp, Artificial
  Probe
aagcaagaggatcctgtggtcagtg

SEQ ID NO: 293167 - DNA, 25 bp, Artificial
  Probe
ttgtgactggtccacctgtggatgg

SEQ ID NO: 293168 - DNA, 25 bp, Artificial
  Probe
tcatttggagccatatgttggcaca

SEQ ID NO: 293169 - DNA, 25 bp, Artificial
  Probe
cttctggagtggagactctagtaaa

SEQ ID NO: 293170 - DNA, 25 bp, Artificial
  Probe
ttggagccatatgttggcacaaaaa

SEQ ID NO: 293171 - DNA, 25 bp, Artificial
  Probe
actcaacacttcagggctttgcctt

SEQ ID NO: 293172 - DNA, 25 bp, Artificial
  Probe
atgagcagcaggacctggagctgta

SEQ ID NO: 293173 - DNA, 25 bp, Artificial
  Probe
tgtgtgaggtagtctgccatagatc

SEQ ID NO: 293174 - DNA, 25 bp, Artificial
  Probe
ccatagatcaatgaggctcatttgg

SEQ ID NO: 293175 - DNA, 25 bp, Artificial
  Probe
cagtactgggtgctgtgtttcccca

SEQ ID NO: 293176 - DNA, 25 bp, Artificial
  Probe
catttggagccatatgttggcacaa

SEQ ID NO: 293177 - DNA, 25 bp, Artificial
  Probe
ctgccatagatcaatgaggctcatt

SEQ ID NO: 293178 - DNA, 25 bp, Artificial
  Probe
caggagcagacacactcagctccag

SEQ ID NO: 293179 - DNA, 25 bp, Artificial
  Probe
atgaaccaggggtcccgcagcactg

SEQ ID NO: 293180 - DNA, 25 bp, Artificial
  Probe
gcagcattgaacagtcgggcgagta

SEQ ID NO: 293181 - DNA, 25 bp, Artificial
  Probe
cgcagttccgaaagaagtggaataa

SEQ ID NO: 293182 - DNA, 25 bp, Artificial
  Probe
tgccttgcccgctcataaactggtt

SEQ ID NO: 293183 - DNA, 25 bp, Artificial
  Probe
gacaagcagagcacgtctagcaccc

SEQ ID NO: 293184 - DNA, 25 bp, Artificial
  Probe
aactggttttctcacggggcatacg

SEQ ID NO: 293185 - DNA, 25 bp, Artificial
  Probe
cggcgcaccaagacatctccagagt

SEQ ID NO: 293186 - DNA, 25 bp, Artificial
  Probe
caggctgatactctctccgggcagg

SEQ ID NO: 293187 - DNA, 25 bp, Artificial
  Probe
cttgaactttccaaaacctagcgag

SEQ ID NO: 293188 - DNA, 25 bp, Artificial
  Probe
tcagaaaccgagaattacaggctga

SEQ ID NO: 293189 - DNA, 25 bp, Artificial
  Probe
acacttcctcgcagttccgaaagaa

SEQ ID NO: 293190 - DNA, 25 bp, Artificial
  Probe
ggcatggcccccagaaacaagatca

SEQ ID NO: 293191 - DNA, 25 bp, Artificial
  Probe
gatctgcctggctgcccctagggga

SEQ ID NO: 293192 - DNA, 25 bp, Artificial
  Probe
cttcccctattttaagaagtgaatg

SEQ ID NO: 293193 - DNA, 25 bp, Artificial
  Probe
tggcgcctgcggaatcagagagctt

SEQ ID NO: 293194 - DNA, 25 bp, Artificial
  Probe
tgtaaggtggagagcgcctgattac

SEQ ID NO: 293195 - DNA, 25 bp, Artificial
  Probe
aggagcagacacactcagctccagc

SEQ ID NO: 293196 - DNA, 25 bp, Artificial
  Probe
cccctattttaagaagtgaatgtct

SEQ ID NO: 293197 - DNA, 25 bp, Artificial
  Probe
gagcccggactgtggagtcctccca

SEQ ID NO: 293198 - DNA, 25 bp, Artificial
  Probe
gcatggcccccagaaacaagatcag

SEQ ID NO: 293199 - DNA, 25 bp, Artificial
  Probe
cagagtctctaggttataggtgcgg

SEQ ID NO: 293200 - DNA, 25 bp, Artificial
  Probe
gagtcctcccaggagcagacacact

SEQ ID NO: 293201 - DNA, 25 bp, Artificial
  Probe
tacggggctcgttgatgagaagaca

SEQ ID NO: 293202 - DNA, 25 bp, Artificial
  Probe
gcttgacaactcaccctttcagcag

SEQ ID NO: 293203 - DNA, 25 bp, Artificial
  Probe
tttacagacaaagacaaggacggca

SEQ ID NO: 293204 - DNA, 25 bp, Artificial
  Probe
cagaggaacccaagatcaagccagg

SEQ ID NO: 293205 - DNA, 25 bp, Artificial
  Probe
tattgggttcgctcgccgttctcgg

SEQ ID NO: 293206 - DNA, 25 bp, Artificial
  Probe
agagcacagcccacattcgagtcaa

SEQ ID NO: 293207 - DNA, 25 bp, Artificial
  Probe
gacaaggacggcatggcccccagaa

SEQ ID NO: 293208 - DNA, 25 bp, Artificial
  Probe
ggactgtggagtcctcccaggagca

SEQ ID NO: 293209 - DNA, 25 bp, Artificial
  Probe
accctacggggctcgttgatgagaa

SEQ ID NO: 293210 - DNA, 25 bp, Artificial
  Probe
gaactacaagcgtccagcagctacc

SEQ ID NO: 293211 - DNA, 25 bp, Artificial
  Probe
agcgtccagcagctaccctacgggg

SEQ ID NO: 293212 - DNA, 25 bp, Artificial
  Probe
aaagtgcaatgcttgttatacagcc

SEQ ID NO: 293213 - DNA, 25 bp, Artificial
  Probe
tcgctacagaatgaagctggtttcc

SEQ ID NO: 293214 - DNA, 25 bp, Artificial
  Probe
gttatacagccaaaggtaactatca

SEQ ID NO: 293215 - DNA, 25 bp, Artificial
  Probe
gatcagccctcaaggctatggccgc

SEQ ID NO: 293216 - DNA, 25 bp, Artificial
  Probe
cgacccagactcttgggctccagga

SEQ ID NO: 293217 - DNA, 25 bp, Artificial
  Probe
caggggtcccgcagcactggatgcc

SEQ ID NO: 293218 - DNA, 25 bp, Artificial
  Probe
ccagaaacaagatcagccctcaagg

SEQ ID NO: 293219 - DNA, 25 bp, Artificial
  Probe
cccattggcgcctgcggaatcagag

SEQ ID NO: 293220 - DNA, 25 bp, Artificial
  Probe
acaaggacggcatggcccccagaaa

SEQ ID NO: 293221 - DNA, 25 bp, Artificial
  Probe
aaacctagcgaggaaaagtgcaatg

SEQ ID NO: 293222 - DNA, 25 bp, Artificial
  Probe
tgaactttccaaaacctagcgagga

SEQ ID NO: 293223 - DNA, 25 bp, Artificial
  Probe
ggggtctgagccactgccttgcccg

SEQ ID NO: 293224 - DNA, 25 bp, Artificial
  Probe
ctcttcacttgttgcatttgctgtg

SEQ ID NO: 293225 - DNA, 25 bp, Artificial
  Probe
gaagccagtgtatatcagtggtctt

SEQ ID NO: 293226 - DNA, 25 bp, Artificial
  Probe
tatcagtggtcttagaacaatgaac

SEQ ID NO: 293227 - DNA, 25 bp, Artificial
  Probe
gtccacagtgacctgacatctaacc

SEQ ID NO: 293228 - DNA, 25 bp, Artificial
  Probe
cttgcttggttgtttaaggaagcca

SEQ ID NO: 293229 - DNA, 25 bp, Artificial
  Probe
taccgtggaaacctgaacacggaag

SEQ ID NO: 293230 - DNA, 25 bp, Artificial
  Probe
ttatcatctcgacaggataaaaatg

SEQ ID NO: 293231 - DNA, 25 bp, Artificial
  Probe
tgtagtgctcttaccctgtaatagt

SEQ ID NO: 293232 - DNA, 25 bp, Artificial
  Probe
agccagtgtatatcagtggtcttag

SEQ ID NO: 293233 - DNA, 25 bp, Artificial
  Probe
gcttttcctaaaagcaggaaccaag

SEQ ID NO: 293234 - DNA, 25 bp, Artificial
  Probe
ggggttctcgggtccacagtgacct

SEQ ID NO: 293235 - DNA, 25 bp, Artificial
  Probe
ccagtgtatatcagtggtcttagaa

SEQ ID NO: 293236 - DNA, 25 bp, Artificial
  Probe
gtgctcttaccctgtaatagtaact

SEQ ID NO: 293237 - DNA, 25 bp, Artificial
  Probe
acctgaacacggaaggacccatctc

SEQ ID NO: 293238 - DNA, 25 bp, Artificial
  Probe
gtgtacatttgcttcaagaacacat

SEQ ID NO: 293239 - DNA, 25 bp, Artificial
  Probe
ttttgtgtacatttgcttcaagaac

SEQ ID NO: 293240 - DNA, 25 bp, Artificial
  Probe
gccactgaaaggatatcttgcttgg

SEQ ID NO: 293241 - DNA, 25 bp, Artificial
  Probe
tgcatttgctgtgttcctgtgtatg

SEQ ID NO: 293242 - DNA, 25 bp, Artificial
  Probe
tactgactaccgtggaaacctgaac

SEQ ID NO: 293243 - DNA, 25 bp, Artificial
  Probe
tcttgcttggttgtttaaggaagcc

SEQ ID NO: 293244 - DNA, 25 bp, Artificial
  Probe
tgtatgctcgtttgtacataggggc

SEQ ID NO: 293245 - DNA, 25 bp, Artificial
  Probe
ttgtgtacatttgcttcaagaacac

SEQ ID NO: 293246 - DNA, 25 bp, Artificial
  Probe
aaatgtagtgctcttaccctgtaat

SEQ ID NO: 293247 - DNA, 25 bp, Artificial
  Probe
acttgttgcatttgctgtgttcctg

SEQ ID NO: 293248 - DNA, 25 bp, Artificial
  Probe
caatggtcgaatgcactgttgaaaa

SEQ ID NO: 293249 - DNA, 25 bp, Artificial
  Probe
catctcgacaggataaaaatgtagt

SEQ ID NO: 293250 - DNA, 25 bp, Artificial
  Probe
gaacctggggttctcgggtccacag

SEQ ID NO: 293251 - DNA, 25 bp, Artificial
  Probe
ggacccatctcttcacttgttgcat

SEQ ID NO: 293252 - DNA, 25 bp, Artificial
  Probe
acggaaggacccatctcttcacttg

SEQ ID NO: 293253 - DNA, 25 bp, Artificial
  Probe
ctgtgtatgctcgtttgtacatagg

SEQ ID NO: 293254 - DNA, 25 bp, Artificial
  Probe
gaacacggaaggacccatctcttca

SEQ ID NO: 293255 - DNA, 25 bp, Artificial
  Probe
gttgcatttgctgtgttcctgtgta

SEQ ID NO: 293256 - DNA, 25 bp, Artificial
  Probe
cacttgttgcatttgctgtgttcct

SEQ ID NO: 293257 - DNA, 25 bp, Artificial
  Probe
gtcttagaacaatgaacctggggtt

SEQ ID NO: 293258 - DNA, 25 bp, Artificial
  Probe
tcctaaaagcaggaaccaagagtta

SEQ ID NO: 293259 - DNA, 25 bp, Artificial
  Probe
tcgtttgtacataggggccactgaa

SEQ ID NO: 293260 - DNA, 25 bp, Artificial
  Probe
catgcttttcctaaaagcaggaacc

SEQ ID NO: 293261 - DNA, 25 bp, Artificial
  Probe
gactaccgtggaaacctgaacacgg

SEQ ID NO: 293262 - DNA, 25 bp, Artificial
  Probe
ccacagtgacctgacatctaacctg

SEQ ID NO: 293263 - DNA, 25 bp, Artificial
  Probe
tacataggggccactgaaaggatat

SEQ ID NO: 293264 - DNA, 25 bp, Artificial
  Probe
taggggccactgaaaggatatcttg

SEQ ID NO: 293265 - DNA, 25 bp, Artificial
  Probe
tcagtggtcttagaacaatgaacct

SEQ ID NO: 293266 - DNA, 25 bp, Artificial
  Probe
tgaacctggggttctcgggtccaca

SEQ ID NO: 293267 - DNA, 25 bp, Artificial
  Probe
atctcttcacttgttgcatttgctg

SEQ ID NO: 293268 - DNA, 25 bp, Artificial
  Probe
gaacaatgaacctggggttctcggg

SEQ ID NO: 293269 - DNA, 25 bp, Artificial
  Probe
catttactgactaccgtggaaacct

SEQ ID NO: 293270 - DNA, 25 bp, Artificial
  Probe
cgcatccttaccataggattaaaag

SEQ ID NO: 293271 - DNA, 25 bp, Artificial
  Probe
ttcttccacttggagcaaagaactg

SEQ ID NO: 293272 - DNA, 25 bp, Artificial
  Probe
aagcgtgcttcctgccttgagcaac

SEQ ID NO: 293273 - DNA, 25 bp, Artificial
  Probe
atccaaagattaccaagcctgtttg

SEQ ID NO: 293274 - DNA, 25 bp, Artificial
  Probe
agatacagagcagcaaggaaagagc

SEQ ID NO: 293275 - DNA, 25 bp, Artificial
  Probe
cctcaagtcctactagagctccaga

SEQ ID NO: 293276 - DNA, 25 bp, Artificial
  Probe
cgccaatgagaactatccaaagatt

SEQ ID NO: 293277 - DNA, 25 bp, Artificial
  Probe
gtgcttcctgccttgagcaacagga

SEQ ID NO: 293278 - DNA, 25 bp, Artificial
  Probe
aagagctctggagacatctccagca

SEQ ID NO: 293279 - DNA, 25 bp, Artificial
  Probe
atgctgttcttccacttggagcaaa

SEQ ID NO: 293280 - DNA, 25 bp, Artificial
  Probe
ctcatgtaactgttgactctggacc

SEQ ID NO: 293281 - DNA, 25 bp, Artificial
  Probe
tctggagacatctccagcatgagga

SEQ ID NO: 293282 - DNA, 25 bp, Artificial
  Probe
gaagagcccagctggcaccagcttt

SEQ ID NO: 293283 - DNA, 25 bp, Artificial
  Probe
ctgcaaaatgtcgatagtggtgtct

SEQ ID NO: 293284 - DNA, 25 bp, Artificial
  Probe
aaagtccaaatgtagacacagttgc

SEQ ID NO: 293285 - DNA, 25 bp, Artificial
  Probe
tgagcaacaggaacgccaatgagaa

SEQ ID NO: 293286 - DNA, 25 bp, Artificial
  Probe
tgagaactatccaaagattaccaag

SEQ ID NO: 293287 - DNA, 25 bp, Artificial
  Probe
catgctcaagcgtgcttcctgcctt

SEQ ID NO: 293288 - DNA, 25 bp, Artificial
  Probe
ctcttctgcaaaatgtcgatagtgg

SEQ ID NO: 293289 - DNA, 25 bp, Artificial
  Probe
caaagattaccaagcctgtttggaa

SEQ ID NO: 293290 - DNA, 25 bp, Artificial
  Probe
gaaacctggttctatccattgggaa

SEQ ID NO: 293291 - DNA, 25 bp, Artificial
  Probe
ctggttctatccattgggaaaaaga

SEQ ID NO: 293292 - DNA, 25 bp, Artificial
  Probe
gcagatcacagttaccttctgtcca

SEQ ID NO: 293293 - DNA, 25 bp, Artificial
  Probe
aactgagaaacctggttctatccat

SEQ ID NO: 293294 - DNA, 25 bp, Artificial
  Probe
gttgctaaagacagcgccatgctca

SEQ ID NO: 293295 - DNA, 25 bp, Artificial
  Probe
tcctgccttgagcaacaggaacgcc

SEQ ID NO: 293296 - DNA, 25 bp, Artificial
  Probe
agttctcttctgcaaaatgtcgata

SEQ ID NO: 293297 - DNA, 25 bp, Artificial
  Probe
aacaggaacgccaatgagaactatc

SEQ ID NO: 293298 - DNA, 25 bp, Artificial
  Probe
gagaactatccaaagattaccaagc

SEQ ID NO: 293299 - DNA, 25 bp, Artificial
  Probe
tccaaatgtagacacagttgctaaa

SEQ ID NO: 293300 - DNA, 25 bp, Artificial
  Probe
ggaagagcccagctggcaccagctt

SEQ ID NO: 293301 - DNA, 25 bp, Artificial
  Probe
gattaccaagcctgtttggaaataa

SEQ ID NO: 293302 - DNA, 25 bp, Artificial
  Probe
atgctcaagcgtgcttcctgccttg

SEQ ID NO: 293303 - DNA, 25 bp, Artificial
  Probe
cttctgtccacttttgacatttgtg

SEQ ID NO: 293304 - DNA, 25 bp, Artificial
  Probe
cctgatgctgttcttccacttggag

SEQ ID NO: 293305 - DNA, 25 bp, Artificial
  Probe
attaggtagttgtccttggaaccat

SEQ ID NO: 293306 - DNA, 25 bp, Artificial
  Probe
gtggtgtctacctcgcatccttacc

SEQ ID NO: 293307 - DNA, 25 bp, Artificial
  Probe
caaagttgctgagtacattgactgg

SEQ ID NO: 293308 - DNA, 25 bp, Artificial
  Probe
ctatccattgggaaaaagagatctt

SEQ ID NO: 293309 - DNA, 25 bp, Artificial
  Probe
ccacttggagcaaagaactgagaaa

SEQ ID NO: 293310 - DNA, 25 bp, Artificial
  Probe
gcgccatgctcaagcgtgcttcctg

SEQ ID NO: 293311 - DNA, 25 bp, Artificial
  Probe
gcatccttaccataggattaaaagt

SEQ ID NO: 293312 - DNA, 25 bp, Artificial
  Probe
ctccagcatgaggaggctgggtact

SEQ ID NO: 293313 - DNA, 25 bp, Artificial
  Probe
aaatgtcgatagtggtgtctacctc

SEQ ID NO: 293314 - DNA, 25 bp, Artificial
  Probe
atacagagcagcaaggaaagagctc

SEQ ID NO: 293315 - DNA, 25 bp, Artificial
  Probe
aagacagcgccatgctcaagcgtgc

SEQ ID NO: 293316 - DNA, 25 bp, Artificial
  Probe
tttaagagcagctgccacttggcaa

SEQ ID NO: 293317 - DNA, 25 bp, Artificial
  Probe
tcaggtcactcctggtcaggcaggt

SEQ ID NO: 293318 - DNA, 25 bp, Artificial
  Probe
gcccagggacagagggagcaccaac

SEQ ID NO: 293319 - DNA, 25 bp, Artificial
  Probe
tggtttctgcgcagtgttaggaaac

SEQ ID NO: 293320 - DNA, 25 bp, Artificial
  Probe
tcctgattctgtgaggaattcgatc

SEQ ID NO: 293321 - DNA, 25 bp, Artificial
  Probe
ctctcagagcccagctggcagcata

SEQ ID NO: 293322 - DNA, 25 bp, Artificial
  Probe
ttgttctgtcattcaacaagtactg

SEQ ID NO: 293323 - DNA, 25 bp, Artificial
  Probe
aagacaaacctaagttgcttttgat

SEQ ID NO: 293324 - DNA, 25 bp, Artificial
  Probe
gcaccttgttctgtcattcaacaag

SEQ ID NO: 293325 - DNA, 25 bp, Artificial
  Probe
agagcagctgccacttggcaaggat

SEQ ID NO: 293326 - DNA, 25 bp, Artificial
  Probe
tggcagcataattgtccacctctta

SEQ ID NO: 293327 - DNA, 25 bp, Artificial
  Probe
attctgtgaggaattcgatccggaa

SEQ ID NO: 293328 - DNA, 25 bp, Artificial
  Probe
ctcccgagagggtcagggcgctctc

SEQ ID NO: 293329 - DNA, 25 bp, Artificial
  Probe
tctgcgcagtgttaggaaacccaat

SEQ ID NO: 293330 - DNA, 25 bp, Artificial
  Probe
agggacgtccttgctcaggtcactc

SEQ ID NO: 293331 - DNA, 25 bp, Artificial
  Probe
aattcgatccggaagatgctcaatc

SEQ ID NO: 293332 - DNA, 25 bp, Artificial
  Probe
tatctactttcgactctttgtgggg

SEQ ID NO: 293333 - DNA, 25 bp, Artificial
  Probe
ggtcagggcgctctcagagcccagc

SEQ ID NO: 293334 - DNA, 25 bp, Artificial
  Probe
tgaggaattcgatccggaagatgct

SEQ ID NO: 293335 - DNA, 25 bp, Artificial
  Probe
ctgtatctactttcgactctttgtg

SEQ ID NO: 293336 - DNA, 25 bp, Artificial
  Probe
tcccgagagggtcagggcgctctca

SEQ ID NO: 293337 - DNA, 25 bp, Artificial
  Probe
ctcccaagaagaaaatgccagctcc

SEQ ID NO: 293338 - DNA, 25 bp, Artificial
  Probe
tatttgcattgctcccaagaagaaa

SEQ ID NO: 293339 - DNA, 25 bp, Artificial
  Probe
agcccagctggcagcataattgtcc

SEQ ID NO: 293340 - DNA, 25 bp, Artificial
  Probe
gggcgctctcagagcccagctggca

SEQ ID NO: 293341 - DNA, 25 bp, Artificial
  Probe
aacactggtttctgcgcagtgttag

SEQ ID NO: 293342 - DNA, 25 bp, Artificial
  Probe
agggcgctctcagagcccagctggc

SEQ ID NO: 293343 - DNA, 25 bp, Artificial
  Probe
ttaggaaacccaatcaggttatttg

SEQ ID NO: 293344 - DNA, 25 bp, Artificial
  Probe
gatgctcaatctgttactatctcgt

SEQ ID NO: 293345 - DNA, 25 bp, Artificial
  Probe
gcagctgccacttggcaaggatttc

SEQ ID NO: 293346 - DNA, 25 bp, Artificial
  Probe
cagagggagcaccaacactggtttc

SEQ ID NO: 293347 - DNA, 25 bp, Artificial
  Probe
tccctgctttaccagtccagtgaca

SEQ ID NO: 293348 - DNA, 25 bp, Artificial
  Probe
ggcagggacgtccttgctcaggtca

SEQ ID NO: 293349 - DNA, 25 bp, Artificial
  Probe
cagctggcagcataattgtccacct

SEQ ID NO: 293350 - DNA, 25 bp, Artificial
  Probe
tgcattgctcccaagaagaaaatgc

SEQ ID NO: 293351 - DNA, 25 bp, Artificial
  Probe
gacgtccttgctcaggtcactcctg

SEQ ID NO: 293352 - DNA, 25 bp, Artificial
  Probe
gcagtcttcttaaccaagcaccttg

SEQ ID NO: 293353 - DNA, 25 bp, Artificial
  Probe
agtgacatcgccatggtgtcgtggt

SEQ ID NO: 293354 - DNA, 25 bp, Artificial
  Probe
ctgtgaggaattcgatccggaagat

SEQ ID NO: 293355 - DNA, 25 bp, Artificial
  Probe
gttctgtcattcaacaagtactgta

SEQ ID NO: 293356 - DNA, 25 bp, Artificial
  Probe
ctgccacttggcaaggatttcgtcc

SEQ ID NO: 293357 - DNA, 25 bp, Artificial
  Probe
tcagagcccagctggcagcataatt

SEQ ID NO: 293358 - DNA, 25 bp, Artificial
  Probe
cacttggcaaggatttcgtccctcc

SEQ ID NO: 293359 - DNA, 25 bp, Artificial
  Probe
agtccagtgacatcgccatggtgtc

SEQ ID NO: 293360 - DNA, 25 bp, Artificial
  Probe
atctcgtaaacagttaaaaatgccg

SEQ ID NO: 293361 - DNA, 25 bp, Artificial
  Probe
aaatgccgtgcagtcttcttaacca

SEQ ID NO: 293362 - DNA, 25 bp, Artificial
  Probe
ctgagtccacagtccccttaagtgt

SEQ ID NO: 293363 - DNA, 25 bp, Artificial
  Probe
tgaactcagctacaaccagctggag

SEQ ID NO: 293364 - DNA, 25 bp, Artificial
  Probe
tcaaagagggcaactcctttgaact

SEQ ID NO: 293365 - DNA, 25 bp, Artificial
  Probe
tagagttctgccagtttacagttct

SEQ ID NO: 293366 - DNA, 25 bp, Artificial
  Probe
tagcacagggactttggaggcttag

SEQ ID NO: 293367 - DNA, 25 bp, Artificial
  Probe
tctgccagtttacagttcttgggaa

SEQ ID NO: 293368 - DNA, 25 bp, Artificial
  Probe
ccatgactttccaaatactttgagg

SEQ ID NO: 293369 - DNA, 25 bp, Artificial
  Probe
cccttaagtgtatgcagagaatgtc

SEQ ID NO: 293370 - DNA, 25 bp, Artificial
  Probe
agatacctggagaaggtgcaaaaac

SEQ ID NO: 293371 - DNA, 25 bp, Artificial
  Probe
gagttaccagacacattcccatgac

SEQ ID NO: 293372 - DNA, 25 bp, Artificial
  Probe
ccagctggagttaccagacacattc

SEQ ID NO: 293373 - DNA, 25 bp, Artificial
  Probe
aatacccaaagtgctcatcatagag

SEQ ID NO: 293374 - DNA, 25 bp, Artificial
  Probe
tctacggcatgtaatggattcctaa

SEQ ID NO: 293375 - DNA, 25 bp, Artificial
  Probe
aatagcacagggactttggaggctt

SEQ ID NO: 293376 - DNA, 25 bp, Artificial
  Probe
ctttggaggcttaggcatcctacac

SEQ ID NO: 293377 - DNA, 25 bp, Artificial
  Probe
cgtcagtgcatgtgtttgctttatg

SEQ ID NO: 293378 - DNA, 25 bp, Artificial
  Probe
agctggagttaccagacacattccc

SEQ ID NO: 293379 - DNA, 25 bp, Artificial
  Probe
ctcatcatagagttctgccagttta

SEQ ID NO: 293380 - DNA, 25 bp, Artificial
  Probe
gttttctacggcatgtaatggattc

SEQ ID NO: 293381 - DNA, 25 bp, Artificial
  Probe
aagcattcttacagggtactgagtc

SEQ ID NO: 293382 - DNA, 25 bp, Artificial
  Probe
aagtcttcaaagagggcaactcctt

SEQ ID NO: 293383 - DNA, 25 bp, Artificial
  Probe
gggtactgagtccacagtcccctta

SEQ ID NO: 293384 - DNA, 25 bp, Artificial
  Probe
aagagggcaactcctttgaactcag

SEQ ID NO: 293385 - DNA, 25 bp, Artificial
  Probe
tccacagtccccttaagtgtatgca

SEQ ID NO: 293386 - DNA, 25 bp, Artificial
  Probe
ggcaactcctttgaactcagctaca

SEQ ID NO: 293387 - DNA, 25 bp, Artificial
  Probe
gaactcagctacaaccagctggagt

SEQ ID NO: 293388 - DNA, 25 bp, Artificial
  Probe
gaccagccttgtaggccgttataaa

SEQ ID NO: 293389 - DNA, 25 bp, Artificial
  Probe
cacacactgaagtgaaatagcacag

SEQ ID NO: 293390 - DNA, 25 bp, Artificial
  Probe
acagggtactgagtccacagtcccc

SEQ ID NO: 293391 - DNA, 25 bp, Artificial
  Probe
attcttacagggtactgagtccaca

SEQ ID NO: 293392 - DNA, 25 bp, Artificial
  Probe
ggggaccagccttgtaggccgttat

SEQ ID NO: 293393 - DNA, 25 bp, Artificial
  Probe
actcagctacaaccagctggagtta

SEQ ID NO: 293394 - DNA, 25 bp, Artificial
  Probe
gactttggaggcttaggcatcctac

SEQ ID NO: 293395 - DNA, 25 bp, Artificial
  Probe
cacagggactttggaggcttaggca

SEQ ID NO: 293396 - DNA, 25 bp, Artificial
  Probe
cctccacaagtcttcaaagagggca

SEQ ID NO: 293397 - DNA, 25 bp, Artificial
  Probe
gagttctgccagtttacagttcttg

SEQ ID NO: 293398 - DNA, 25 bp, Artificial
  Probe
cagggactttggaggcttaggcatc

SEQ ID NO: 293399 - DNA, 25 bp, Artificial
  Probe
atgactttccaaatactttgagggg

SEQ ID NO: 293400 - DNA, 25 bp, Artificial
  Probe
ctttgaactcagctacaaccagctg

SEQ ID NO: 293401 - DNA, 25 bp, Artificial
  Probe
tggattcctaatacccaggagttaa

SEQ ID NO: 293402 - DNA, 25 bp, Artificial
  Probe
aagctgaagcattcttacagggtac

SEQ ID NO: 293403 - DNA, 25 bp, Artificial
  Probe
tttgaactcagctacaaccagctgg

SEQ ID NO: 293404 - DNA, 25 bp, Artificial
  Probe
ccggcctctggtagcacacactgaa

SEQ ID NO: 293405 - DNA, 25 bp, Artificial
  Probe
caaagagggcaactcctttgaactc

SEQ ID NO: 293406 - DNA, 25 bp, Artificial
  Probe
taatggattcctaatacccaggagt

SEQ ID NO: 293407 - DNA, 25 bp, Artificial
  Probe
cttaaaaatcattcccggcctctgg

SEQ ID NO: 293408 - DNA, 25 bp, Artificial
  Probe
aggtctcattttaggccgctttggg

SEQ ID NO: 293409 - DNA, 25 bp, Artificial
  Probe
gggaagctctcttgggataccacct

SEQ ID NO: 293410 - DNA, 25 bp, Artificial
  Probe
ggtacccgatcagtggggtagatcc

SEQ ID NO: 293411 - DNA, 25 bp, Artificial
  Probe
ccctcagttgggaggcaagtttctc

SEQ ID NO: 293412 - DNA, 25 bp, Artificial
  Probe
agaatggtttcattccaacgcactc

SEQ ID NO: 293413 - DNA, 25 bp, Artificial
  Probe
tgagtttacattcagtgtgctcagg

SEQ ID NO: 293414 - DNA, 25 bp, Artificial
  Probe
acctgagtttacattcagtgtgctc

SEQ ID NO: 293415 - DNA, 25 bp, Artificial
  Probe
ggacagggaagctctcttgggatac

SEQ ID NO: 293416 - DNA, 25 bp, Artificial
  Probe
agctggaagcactctccagtaggtg

SEQ ID NO: 293417 - DNA, 25 bp, Artificial
  Probe
acccaccgggctgcacaggggacag

SEQ ID NO: 293418 - DNA, 25 bp, Artificial
  Probe
gaatggtttcattccaacgcactca

SEQ ID NO: 293419 - DNA, 25 bp, Artificial
  Probe
cctgagtttacattcagtgtgctca

SEQ ID NO: 293420 - DNA, 25 bp, Artificial
  Probe
aggtcaagtctctcgctcggggctc

SEQ ID NO: 293421 - DNA, 25 bp, Artificial
  Probe
aaggtaaccagatcggtagctggaa

SEQ ID NO: 293422 - DNA, 25 bp, Artificial
  Probe
tcggtagctggaagcactctccagt

SEQ ID NO: 293423 - DNA, 25 bp, Artificial
  Probe
taaccagatcggtagctggaagcac

SEQ ID NO: 293424 - DNA, 25 bp, Artificial
  Probe
agcactctccagtaggtggcgaagg

SEQ ID NO: 293425 - DNA, 25 bp, Artificial
  Probe
caacgcactcattatcaggattctg

SEQ ID NO: 293426 - DNA, 25 bp, Artificial
  Probe
tgcacaggggacaggcacaggccac

SEQ ID NO: 293427 - DNA, 25 bp, Artificial
  Probe
cgctttgggaaggtaaccagatcgg

SEQ ID NO: 293428 - DNA, 25 bp, Artificial
  Probe
tgggtctgctgaagcctgcatatct

SEQ ID NO: 293429 - DNA, 25 bp, Artificial
  Probe
agctctcttgggataccacctgagt

SEQ ID NO: 293430 - DNA, 25 bp, Artificial
  Probe
tctgctgaagcctgcatatcttcac

SEQ ID NO: 293431 - DNA, 25 bp, Artificial
  Probe
gacaccctcagttgggaggcaagtt

SEQ ID NO: 293432 - DNA, 25 bp, Artificial
  Probe
aacccaccgggctgcacaggggaca

SEQ ID NO: 293433 - DNA, 25 bp, Artificial
  Probe
caagtctctcgctcggggctctgtt

SEQ ID NO: 293434 - DNA, 25 bp, Artificial
  Probe
ttcagatatgatttcgggaaaaacc

SEQ ID NO: 293435 - DNA, 25 bp, Artificial
  Probe
gaaggtaaccagatcggtagctgga

SEQ ID NO: 293436 - DNA, 25 bp, Artificial
  Probe
gtctgtcccggctgtggtacccgat

SEQ ID NO: 293437 - DNA, 25 bp, Artificial
  Probe
cgaaaggtctcattttaggccgctt

SEQ ID NO: 293438 - DNA, 25 bp, Artificial
  Probe
cccctgagggacagggaagctctct

SEQ ID NO: 293439 - DNA, 25 bp, Artificial
  Probe
ataccacctgagtttacattcagtg

SEQ ID NO: 293440 - DNA, 25 bp, Artificial
  Probe
gtgcatggtctttgtcagttgatac

SEQ ID NO: 293441 - DNA, 25 bp, Artificial
  Probe
gaggcaagtttctcttaccttggac

SEQ ID NO: 293442 - DNA, 25 bp, Artificial
  Probe
cagaaactgctgtctgtcccggctg

SEQ ID NO: 293443 - DNA, 25 bp, Artificial
  Probe
cacccctgagggacagggaagctct

SEQ ID NO: 293444 - DNA, 25 bp, Artificial
  Probe
aactgctgtctgtcccggctgtggt

SEQ ID NO: 293445 - DNA, 25 bp, Artificial
  Probe
cccggctgtggtacccgatcagtgg

SEQ ID NO: 293446 - DNA, 25 bp, Artificial
  Probe
gcaagtttctcttaccttggacttt

SEQ ID NO: 293447 - DNA, 25 bp, Artificial
  Probe
gaaactgctgtctgtcccggctgtg

SEQ ID NO: 293448 - DNA, 25 bp, Artificial
  Probe
gctgaagcctgcatatcttcaccca

SEQ ID NO: 293449 - DNA, 25 bp, Artificial
  Probe
tgagtgggtctgctgaagcctgcat

SEQ ID NO: 293450 - DNA, 25 bp, Artificial
  Probe
cactctccagtaggtggcgaagggt

SEQ ID NO: 293451 - DNA, 25 bp, Artificial
  Probe
caggagacaccctcagttgggaggc

SEQ ID NO: 293452 - DNA, 25 bp, Artificial
  Probe
tggtacccgatcagtggggtagatc

SEQ ID NO: 293453 - DNA, 25 bp, Artificial
  Probe
ggccgctttgggaaggtaaccagat

SEQ ID NO: 293454 - DNA, 25 bp, Artificial
  Probe
caaagtttgggctctacagcgatca

SEQ ID NO: 293455 - DNA, 25 bp, Artificial
  Probe
gatgagccccagtcccaatgggaca

SEQ ID NO: 293456 - DNA, 25 bp, Artificial
  Probe
gccaagcttgggagttctggcagca

SEQ ID NO: 293457 - DNA, 25 bp, Artificial
  Probe
cactgtgtatgtggatgcagtcaag

SEQ ID NO: 293458 - DNA, 25 bp, Artificial
  Probe
agctaggcccagtgactcaggagtt

SEQ ID NO: 293459 - DNA, 25 bp, Artificial
  Probe
aaaggcatctaaaggttgtggccga

SEQ ID NO: 293460 - DNA, 25 bp, Artificial
  Probe
aagatgagccccagtcccaatggga

SEQ ID NO: 293461 - DNA, 25 bp, Artificial
  Probe
tcccaatgggacagggtgaaggatt

SEQ ID NO: 293462 - DNA, 25 bp, Artificial
  Probe
cctgatcgagtatcataccaaggcc

SEQ ID NO: 293463 - DNA, 25 bp, Artificial
  Probe
catctaaaggttgtggccgaggagt

SEQ ID NO: 293464 - DNA, 25 bp, Artificial
  Probe
cgcctacaggaacagctaggcccag

SEQ ID NO: 293465 - DNA, 25 bp, Artificial
  Probe
tttcgagaccgcatgcgtgtgaatg

SEQ ID NO: 293466 - DNA, 25 bp, Artificial
  Probe
aaggatttcgccactgtgtatgtgg

SEQ ID NO: 293467 - DNA, 25 bp, Artificial
  Probe
gaagctgaacgcttagtgaggcgcc

SEQ ID NO: 293468 - DNA, 25 bp, Artificial
  Probe
aagctgcagtgttggctgtggccct

SEQ ID NO: 293469 - DNA, 25 bp, Artificial
  Probe
gcagagactatgtgtcccagtttga

SEQ ID NO: 293470 - DNA, 25 bp, Artificial
  Probe
caggttgccaagcttgggagttctg

SEQ ID NO: 293471 - DNA, 25 bp, Artificial
  Probe
cgcgctgcgcgcaaagtttgggctc

SEQ ID NO: 293472 - DNA, 25 bp, Artificial
  Probe
tccactttgggcaaacagctgaacc

SEQ ID NO: 293473 - DNA, 25 bp, Artificial
  Probe
actatgtgtcccagtttgaatcctc

SEQ ID NO: 293474 - DNA, 25 bp, Artificial
  Probe
agcttgggagttctggcagcaagat

SEQ ID NO: 293475 - DNA, 25 bp, Artificial
  Probe
gcagtcaaggacagcggcagagact

SEQ ID NO: 293476 - DNA, 25 bp, Artificial
  Probe
tatgtggatgcagtcaaggacagcg

SEQ ID NO: 293477 - DNA, 25 bp, Artificial
  Probe
ggctctacagcgatcagatgcgcga

SEQ ID NO: 293478 - DNA, 25 bp, Artificial
  Probe
ggagttctggcagcaagatgagccc

SEQ ID NO: 293479 - DNA, 25 bp, Artificial
  Probe
tggctgtggccctggtcttcctgac

SEQ ID NO: 293480 - DNA, 25 bp, Artificial
  Probe
aggagtttcgagaccgcatgcgtgt

SEQ ID NO: 293481 - DNA, 25 bp, Artificial
  Probe
agcttcacaaaaacgcgaaggagat

SEQ ID NO: 293482 - DNA, 25 bp, Artificial
  Probe
ctgttggtcgcctacaggaacagct

SEQ ID NO: 293483 - DNA, 25 bp, Artificial
  Probe
tgcagtcaaggacagcggcagagac

SEQ ID NO: 293484 - DNA, 25 bp, Artificial
  Probe
tttgggctctacagcgatcagatgc

SEQ ID NO: 293485 - DNA, 25 bp, Artificial
  Probe
gtatgtggatgcagtcaaggacagc

SEQ ID NO: 293486 - DNA, 25 bp, Artificial
  Probe
ggacactctgggttcaactgttggt

SEQ ID NO: 293487 - DNA, 25 bp, Artificial
  Probe
atgcagacgcgctgcgcgcaaagtt

SEQ ID NO: 293488 - DNA, 25 bp, Artificial
  Probe
aaggcatctaaaggttgtggccgag

SEQ ID NO: 293489 - DNA, 25 bp, Artificial
  Probe
cagctaggcccagtgactcaggagt

SEQ ID NO: 293490 - DNA, 25 bp, Artificial
  Probe
gagcctctgggcaccgagcttcaca

SEQ ID NO: 293491 - DNA, 25 bp, Artificial
  Probe
gcgcgcaaagtttgggctctacagc

SEQ ID NO: 293492 - DNA, 25 bp, Artificial
  Probe
ttcctgacaggttgccaagcttggg

SEQ ID NO: 293493 - DNA, 25 bp, Artificial
  Probe
taccctgatcgagtatcataccaag

SEQ ID NO: 293494 - DNA, 25 bp, Artificial
  Probe
aaggacagcggcagagactatgtgt

SEQ ID NO: 293495 - DNA, 25 bp, Artificial
  Probe
gttcaactgttggtcgcctacagga

SEQ ID NO: 293496 - DNA, 25 bp, Artificial
  Probe
ggcagcaagatgagccccagtccca

SEQ ID NO: 293497 - DNA, 25 bp, Artificial
  Probe
aatcctccactttgggcaaacagct

SEQ ID NO: 293498 - DNA, 25 bp, Artificial
  Probe
atgcgtgtgaatgcagacgcgctgc

SEQ ID NO: 293499 - DNA, 25 bp, Artificial
  Probe
aggtcgaggcctaccgccagaagct

SEQ ID NO: 293500 - DNA, 25 bp, Artificial
  Probe
tggaccttcctgctctgtgtaatac

SEQ ID NO: 293501 - DNA, 25 bp, Artificial
  Probe
accctggtcagatgcaggccctggg

SEQ ID NO: 293502 - DNA, 25 bp, Artificial
  Probe
gctctgtgtaatacccagtttggag

SEQ ID NO: 293503 - DNA, 25 bp, Artificial
  Probe
cttttgagaccttttgttaccatgt

SEQ ID NO: 293504 - DNA, 25 bp, Artificial
  Probe
ccttcctgctctgtgtaatacccag

SEQ ID NO: 293505 - DNA, 25 bp, Artificial
  Probe
acttggtggcttttgagaccttttg

SEQ ID NO: 293506 - DNA, 25 bp, Artificial
  Probe
tcctgctctgtgtaatacccagttt

SEQ ID NO: 293507 - DNA, 25 bp, Artificial
  Probe
aaccctggaccttcctgctctgtgt

SEQ ID NO: 293508 - DNA, 25 bp, Artificial
  Probe
gaccttttgttaccatgtgtaaagt

SEQ ID NO: 293509 - DNA, 25 bp, Artificial
  Probe
ctgctctgtgtaatacccagtttgg

SEQ ID NO: 293510 - DNA, 25 bp, Artificial
  Probe
gcttacagaccctggtcagatgcag

SEQ ID NO: 293511 - DNA, 25 bp, Artificial
  Probe
ggctgtgccctgcttacagaccctg

SEQ ID NO: 293512 - DNA, 25 bp, Artificial
  Probe
ctggaccttcctgctctgtgtaata

SEQ ID NO: 293513 - DNA, 25 bp, Artificial
  Probe
ccctgcttacagaccctggtcagat

SEQ ID NO: 293514 - DNA, 25 bp, Artificial
  Probe
cctggaccttcctgctctgtgtaat

SEQ ID NO: 293515 - DNA, 25 bp, Artificial
  Probe
tttgagaccttttgttaccatgtgt

SEQ ID NO: 293516 - DNA, 25 bp, Artificial
  Probe
cctggtcagatgcaggccctgggct

SEQ ID NO: 293517 - DNA, 25 bp, Artificial
  Probe
acagaaagcgcatcgtgtgagcgct

SEQ ID NO: 293518 - DNA, 25 bp, Artificial
  Probe
ccctggaccttcctgctctgtgtaa

SEQ ID NO: 293519 - DNA, 25 bp, Artificial
  Probe
agaccctggtcagatgcaggccctg

SEQ ID NO: 293520 - DNA, 25 bp, Artificial
  Probe
tagcactctgaaaccctggaccttc

SEQ ID NO: 293521 - DNA, 25 bp, Artificial
  Probe
acagaccctggtcagatgcaggccc

SEQ ID NO: 293522 - DNA, 25 bp, Artificial
  Probe
cagaccctggtcagatgcaggccct

SEQ ID NO: 293523 - DNA, 25 bp, Artificial
  Probe
agcgctcgggctgtgccctgcttac

SEQ ID NO: 293524 - DNA, 25 bp, Artificial
  Probe
tgctctgtgtaatacccagtttgga

SEQ ID NO: 293525 - DNA, 25 bp, Artificial
  Probe
tgtgccctgcttacagaccctggtc

SEQ ID NO: 293526 - DNA, 25 bp, Artificial
  Probe
gagaccttttgttaccatgtgtaaa

SEQ ID NO: 293527 - DNA, 25 bp, Artificial
  Probe
ttgttaccatgtgtaaagttctggc

SEQ ID NO: 293528 - DNA, 25 bp, Artificial
  Probe
cttggtggcttttgagaccttttgt

SEQ ID NO: 293529 - DNA, 25 bp, Artificial
  Probe
cttcctgctctgtgtaatacccagt

SEQ ID NO: 293530 - DNA, 25 bp, Artificial
  Probe
tgagaccttttgttaccatgtgtaa

SEQ ID NO: 293531 - DNA, 25 bp, Artificial
  Probe
gcatgcagcccctagcactctgaaa

SEQ ID NO: 293532 - DNA, 25 bp, Artificial
  Probe
gaccctggtcagatgcaggccctgg

SEQ ID NO: 293533 - DNA, 25 bp, Artificial
  Probe
gccctgcttacagaccctggtcaga

SEQ ID NO: 293534 - DNA, 25 bp, Artificial
  Probe
ctggtcagatgcaggccctgggctt

SEQ ID NO: 293535 - DNA, 25 bp, Artificial
  Probe
tgaaaccctggaccttcctgctctg

SEQ ID NO: 293536 - DNA, 25 bp, Artificial
  Probe
tggcttttgagaccttttgttacca

SEQ ID NO: 293537 - DNA, 25 bp, Artificial
  Probe
cagaaagcgcatcgtgtgagcgctc

SEQ ID NO: 293538 - DNA, 25 bp, Artificial
  Probe
gaccttcctgctctgtgtaataccc

SEQ ID NO: 293539 - DNA, 25 bp, Artificial
  Probe
ctagcactctgaaaccctggacctt

SEQ ID NO: 293540 - DNA, 25 bp, Artificial
  Probe
ccctggtcagatgcaggccctgggc

SEQ ID NO: 293541 - DNA, 25 bp, Artificial
  Probe
gagcgctcgggctgtgccctgctta

SEQ ID NO: 293542 - DNA, 25 bp, Artificial
  Probe
cttttgttaccatgtgtaaagttct

SEQ ID NO: 293543 - DNA, 25 bp, Artificial
  Probe
tacagaccctggtcagatgcaggcc

SEQ ID NO: 293544 - DNA, 25 bp, Artificial
  Probe
gtgccctgcttacagaccctggtca

SEQ ID NO: 293545 - DNA, 25 bp, Artificial
  Probe
ttcctgctctgtgtaatacccagtt

SEQ ID NO: 293546 - DNA, 25 bp, Artificial
  Probe
catgtgtgtggctgggccctttgat

SEQ ID NO: 293547 - DNA, 25 bp, Artificial
  Probe
ctgggccctttgatgggctcctctt

SEQ ID NO: 293548 - DNA, 25 bp, Artificial
  Probe
tccagtacaagcacggtgaaccaat

SEQ ID NO: 293549 - DNA, 25 bp, Artificial
  Probe
tacctggaaggaggtatatgtcacg

SEQ ID NO: 293550 - DNA, 25 bp, Artificial
  Probe
ctcccaggacattggacttgcatct

SEQ ID NO: 293551 - DNA, 25 bp, Artificial
  Probe
ctgattattctctcaataaaggaag

SEQ ID NO: 293552 - DNA, 25 bp, Artificial
  Probe
ggaactatgcctctcgtatccagcg

SEQ ID NO: 293553 - DNA, 25 bp, Artificial
  Probe
gtgcagccctaccaagatcaaacct

SEQ ID NO: 293554 - DNA, 25 bp, Artificial
  Probe
ctatgctacccatgcctgccgggag

SEQ ID NO: 293555 - DNA, 25 bp, Artificial
  Probe
aatgcacccagtatatccgccatgc

SEQ ID NO: 293556 - DNA, 25 bp, Artificial
  Probe
cgcagtgccagagaggacaaggtcc

SEQ ID NO: 293557 - DNA, 25 bp, Artificial
  Probe
gtgtctgacgacgtgcgcagtgcca

SEQ ID NO: 293558 - DNA, 25 bp, Artificial
  Probe
tatatgtcacgctgaagggcctcta

SEQ ID NO: 293559 - DNA, 25 bp, Artificial
  Probe
tgtcttactactgcatgcactccag

SEQ ID NO: 293560 - DNA, 25 bp, Artificial
  Probe
cggaagagattgctacctggaagga

SEQ ID NO: 293561 - DNA, 25 bp, Artificial
  Probe
tgctacctggaaggaggtatatgtc

SEQ ID NO: 293562 - DNA, 25 bp, Artificial
  Probe
tggttcccaagaaaagtgtcggaat

SEQ ID NO: 293563 - DNA, 25 bp, Artificial
  Probe
cggtactgtggctaccgagaggaca

SEQ ID NO: 293564 - DNA, 25 bp, Artificial
  Probe
ttagctaaatgcatagggtaccacc

SEQ ID NO: 293565 - DNA, 25 bp, Artificial
  Probe
gagccggactgctgccatgagctgt

SEQ ID NO: 293566 - DNA, 25 bp, Artificial
  Probe
agtgccagagaggacaaggtcccct

SEQ ID NO: 293567 - DNA, 25 bp, Artificial
  Probe
cacctggtcaccaagtttgaccctg

SEQ ID NO: 293568 - DNA, 25 bp, Artificial
  Probe
atctggacctggaccacccgggctt

SEQ ID NO: 293569 - DNA, 25 bp, Artificial
  Probe
caaggacaagctcaggaactatgcc

SEQ ID NO: 293570 - DNA, 25 bp, Artificial
  Probe
tcactgtggaattcgggctatgtaa

SEQ ID NO: 293571 - DNA, 25 bp, Artificial
  Probe
tgctgtcttcctacggagagctcct

SEQ ID NO: 293572 - DNA, 25 bp, Artificial
  Probe
tgagctgttgggacatgtacccatg

SEQ ID NO: 293573 - DNA, 25 bp, Artificial
  Probe
gccagtctggccttccgcgtgtttc

SEQ ID NO: 293574 - DNA, 25 bp, Artificial
  Probe
tcacctatgcattcacctgagccgg

SEQ ID NO: 293575 - DNA, 25 bp, Artificial
  Probe
atggtgcagggctgctgtcttccta

SEQ ID NO: 293576 - DNA, 25 bp, Artificial
  Probe
gagtgccattagctaaatgcatagg

SEQ ID NO: 293577 - DNA, 25 bp, Artificial
  Probe
agggtggtcctgcattcctcctgcc

SEQ ID NO: 293578 - DNA, 25 bp, Artificial
  Probe
acatttgcccagttctcccaggaca

SEQ ID NO: 293579 - DNA, 25 bp, Artificial
  Probe
tccctgtcagaggagcctgaggtcc

SEQ ID NO: 293580 - DNA, 25 bp, Artificial
  Probe
gcacctggagggtttccagcttctg

SEQ ID NO: 293581 - DNA, 25 bp, Artificial
  Probe
tgatgggctcctcttggacccccat

SEQ ID NO: 293582 - DNA, 25 bp, Artificial
  Probe
gaagctgattgcagagattgccttc

SEQ ID NO: 293583 - DNA, 25 bp, Artificial
  Probe
tttgtgtccgagagcttcaatgacg

SEQ ID NO: 293584 - DNA, 25 bp, Artificial
  Probe
ggccttccgcgtgtttcaatgcacc

SEQ ID NO: 293585 - DNA, 25 bp, Artificial
  Probe
gaaattgaaaaactctccacggtgt

SEQ ID NO: 293586 - DNA, 25 bp, Artificial
  Probe
tggctaccgagaggacagcatccca

SEQ ID NO: 293587 - DNA, 25 bp, Artificial
  Probe
ccattgacgtactggacagccctca

SEQ ID NO: 293588 - DNA, 25 bp, Artificial
  Probe
gctgaccgcacatttgcccagttct

SEQ ID NO: 293589 - DNA, 25 bp, Artificial
  Probe
aatacacagcggaagagattgctac

SEQ ID NO: 293590 - DNA, 25 bp, Artificial
  Probe
ccaagatcaaacctaccagcctgtg

SEQ ID NO: 293591 - DNA, 25 bp, Artificial
  Probe
tttcctggcccagaggctttcccat

SEQ ID NO: 293592 - DNA, 25 bp, Artificial
  Probe
ttcggtgagcatgaaactggactgc

SEQ ID NO: 293593 - DNA, 25 bp, Artificial
  Probe
tccacactggctgaaacttggattt

SEQ ID NO: 293594 - DNA, 25 bp, Artificial
  Probe
ccttggttctggaaagcaatttagt

SEQ ID NO: 293595 - DNA, 25 bp, Artificial
  Probe
gattttattcaccaagctgcatgtc

SEQ ID NO: 293596 - DNA, 25 bp, Artificial
  Probe
gatgacccagctaaacaagttcccc

SEQ ID NO: 293597 - DNA, 25 bp, Artificial
  Probe
agaactccacactggctgaaacttg

SEQ ID NO: 293598 - DNA, 25 bp, Artificial
  Probe
aggtaccctgtctgtcctgtcccag

SEQ ID NO: 293599 - DNA, 25 bp, Artificial
  Probe
aaattgatgtcacaagcttcaggca

SEQ ID NO: 293600 - DNA, 25 bp, Artificial
  Probe
aacttcagagtcagcaaaaggaaat

SEQ ID NO: 293601 - DNA, 25 bp, Artificial
  Probe
cctttgcttgaaattgatgtcacaa

SEQ ID NO: 293602 - DNA, 25 bp, Artificial
  Probe
cataagaaaccctgagttatgatga

SEQ ID NO: 293603 - DNA, 25 bp, Artificial
  Probe
ctccacactggctgaaacttggatt

SEQ ID NO: 293604 - DNA, 25 bp, Artificial
  Probe
aggcaggtaccctgtctgtcctgtc

SEQ ID NO: 293605 - DNA, 25 bp, Artificial
  Probe
tgctagacagcctgatgtgatggaa

SEQ ID NO: 293606 - DNA, 25 bp, Artificial
  Probe
actacataagaaaccctgagttatg

SEQ ID NO: 293607 - DNA, 25 bp, Artificial
  Probe
agcatcatcagctgcgacagtgttc

SEQ ID NO: 293608 - DNA, 25 bp, Artificial
  Probe
ctccaggtattttgtgggaactgag

SEQ ID NO: 293609 - DNA, 25 bp, Artificial
  Probe
gcatgaaactggactgctcaggagt

SEQ ID NO: 293610 - DNA, 25 bp, Artificial
  Probe
tgtcctgtcccagtgctagacagcc

SEQ ID NO: 293611 - DNA, 25 bp, Artificial
  Probe
gaaaccctgagttatgatgacccag

SEQ ID NO: 293612 - DNA, 25 bp, Artificial
  Probe
agtagcccagaactccacactggct

SEQ ID NO: 293613 - DNA, 25 bp, Artificial
  Probe
caaatacagctcagggtttgaaaga

SEQ ID NO: 293614 - DNA, 25 bp, Artificial
  Probe
agttcttgttcttctttcggtgagc

SEQ ID NO: 293615 - DNA, 25 bp, Artificial
  Probe
cttgttcttctttcggtgagcatga

SEQ ID NO: 293616 - DNA, 25 bp, Artificial
  Probe
cctgagttatgatgacccagctaaa

SEQ ID NO: 293617 - DNA, 25 bp, Artificial
  Probe
aacttggattttattcaccaagctg

SEQ ID NO: 293618 - DNA, 25 bp, Artificial
  Probe
ccagtgctagacagcctgatgtgat

SEQ ID NO: 293619 - DNA, 25 bp, Artificial
  Probe
actaaccctttgcttgaaattgatg

SEQ ID NO: 293620 - DNA, 25 bp, Artificial
  Probe
gtaccctgtctgtcctgtcccagtg

SEQ ID NO: 293621 - DNA, 25 bp, Artificial
  Probe
ggaaagtagcccagaactccacact

SEQ ID NO: 293622 - DNA, 25 bp, Artificial
  Probe
ccaaacactagcatcatcagctgcg

SEQ ID NO: 293623 - DNA, 25 bp, Artificial
  Probe
tcatcagctgcgacagtgttcacta

SEQ ID NO: 293624 - DNA, 25 bp, Artificial
  Probe
aaagcagatgcagcagcattggaaa

SEQ ID NO: 293625 - DNA, 25 bp, Artificial
  Probe
cttcaggcaggtaccctgtctgtcc

SEQ ID NO: 293626 - DNA, 25 bp, Artificial
  Probe
ctgtctgtcctgtcccagtgctaga

SEQ ID NO: 293627 - DNA, 25 bp, Artificial
  Probe
tgtaaaaacttcagagtcagcaaaa

SEQ ID NO: 293628 - DNA, 25 bp, Artificial
  Probe
cagtgttcactaaccctttgcttga

SEQ ID NO: 293629 - DNA, 25 bp, Artificial
  Probe
tgcagcagcattggaaagtagccca

SEQ ID NO: 293630 - DNA, 25 bp, Artificial
  Probe
cttcactttagcagaggagatttta

SEQ ID NO: 293631 - DNA, 25 bp, Artificial
  Probe
actgctcaggagtatggaaactgta

SEQ ID NO: 293632 - DNA, 25 bp, Artificial
  Probe
aggaaatcatgacttcactttagca

SEQ ID NO: 293633 - DNA, 25 bp, Artificial
  Probe
cttcagagtcagcaaaaggaaatca

SEQ ID NO: 293634 - DNA, 25 bp, Artificial
  Probe
gtgtgtgagcccagtatgcattcac

SEQ ID NO: 293635 - DNA, 25 bp, Artificial
  Probe
ttatgatgacccagctaaacaagtt

SEQ ID NO: 293636 - DNA, 25 bp, Artificial
  Probe
gtaaaaacttcagagtcagcaaaag

SEQ ID NO: 293637 - DNA, 25 bp, Artificial
  Probe
cagaactccacactggctgaaactt

SEQ ID NO: 293638 - DNA, 25 bp, Artificial
  Probe
cttctcaaggcacctgcagattttg

SEQ ID NO: 293639 - DNA, 25 bp, Artificial
  Probe
aatagctgggccacactgatctgtc

SEQ ID NO: 293640 - DNA, 25 bp, Artificial
  Probe
taaggccccaaaggagcagtttcac

SEQ ID NO: 293641 - DNA, 25 bp, Artificial
  Probe
ccccaaaggagcagtttcacctgtc

SEQ ID NO: 293642 - DNA, 25 bp, Artificial
  Probe
cctttggttcccactatgtagacta

SEQ ID NO: 293643 - DNA, 25 bp, Artificial
  Probe
gcagtttcacctgtctgtgtcccta

SEQ ID NO: 293644 - DNA, 25 bp, Artificial
  Probe
atggaggacctttggttcccactat

SEQ ID NO: 293645 - DNA, 25 bp, Artificial
  Probe
tatgtagactactgcttctcaaggc

SEQ ID NO: 293646 - DNA, 25 bp, Artificial
  Probe
tgtgttctggctagaatgccagagt

SEQ ID NO: 293647 - DNA, 25 bp, Artificial
  Probe
aggacctttggttcccactatgtag

SEQ ID NO: 293648 - DNA, 25 bp, Artificial
  Probe
attctggacatggtgaaatccaggt

SEQ ID NO: 293649 - DNA, 25 bp, Artificial
  Probe
gtttcacctgtctgtgtccctaaat

SEQ ID NO: 293650 - DNA, 25 bp, Artificial
  Probe
acactgatctgtcattctaaatagg

SEQ ID NO: 293651 - DNA, 25 bp, Artificial
  Probe
aggccccaaaggagcagtttcacct

SEQ ID NO: 293652 - DNA, 25 bp, Artificial
  Probe
aaatgtgtgttctggctagaatgcc

SEQ ID NO: 293653 - DNA, 25 bp, Artificial
  Probe
gcatccattctggacatggtgaaat

SEQ ID NO: 293654 - DNA, 25 bp, Artificial
  Probe
tccctaaatagctgggccacactga

SEQ ID NO: 293655 - DNA, 25 bp, Artificial
  Probe
atagctgggccacactgatctgtca

SEQ ID NO: 293656 - DNA, 25 bp, Artificial
  Probe
ggccacactgatctgtcattctaaa

SEQ ID NO: 293657 - DNA, 25 bp, Artificial
  Probe
ttggttcccactatgtagactactg

SEQ ID NO: 293658 - DNA, 25 bp, Artificial
  Probe
gggccacactgatctgtcattctaa

SEQ ID NO: 293659 - DNA, 25 bp, Artificial
  Probe
tgtctgtgtccctaaatagctgggc

SEQ ID NO: 293660 - DNA, 25 bp, Artificial
  Probe
aaggcacctgcagattttgattttt

SEQ ID NO: 293661 - DNA, 25 bp, Artificial
  Probe
taatggaggacctttggttcccact

SEQ ID NO: 293662 - DNA, 25 bp, Artificial
  Probe
tactgcttctcaaggcacctgcaga

SEQ ID NO: 293663 - DNA, 25 bp, Artificial
  Probe
actatgtagactactgcttctcaag

SEQ ID NO: 293664 - DNA, 25 bp, Artificial
  Probe
gcttctcaaggcacctgcagatttt

SEQ ID NO: 293665 - DNA, 25 bp, Artificial
  Probe
aggcacctgcagattttgatttttg

SEQ ID NO: 293666 - DNA, 25 bp, Artificial
  Probe
ggcacctgcagattttgatttttgt

SEQ ID NO: 293667 - DNA, 25 bp, Artificial
  Probe
ggtgaaatccaggtctcgggtctga

SEQ ID NO: 293668 - DNA, 25 bp, Artificial
  Probe
ttcacctgtctgtgtccctaaatag

SEQ ID NO: 293669 - DNA, 25 bp, Artificial
  Probe
gtagactactgcttctcaaggcacc

SEQ ID NO: 293670 - DNA, 25 bp, Artificial
  Probe
caaaggagcagtttcacctgtctgt

SEQ ID NO: 293671 - DNA, 25 bp, Artificial
  Probe
ctgatctgtcattctaaatagggaa

SEQ ID NO: 293672 - DNA, 25 bp, Artificial
  Probe
aggacaaaaatgcatccattctgga

SEQ ID NO: 293673 - DNA, 25 bp, Artificial
  Probe
tgtccctaaatagctgggccacact

SEQ ID NO: 293674 - DNA, 25 bp, Artificial
  Probe
gtcgttgacagagaagtctgactta

SEQ ID NO: 293675 - DNA, 25 bp, Artificial
  Probe
cacctgtctgtgtccctaaatagct

SEQ ID NO: 293676 - DNA, 25 bp, Artificial
  Probe
ctgtgtccctaaatagctgggccac

SEQ ID NO: 293677 - DNA, 25 bp, Artificial
  Probe
aaatgcatccattctggacatggtg

SEQ ID NO: 293678 - DNA, 25 bp, Artificial
  Probe
atccattctggacatggtgaaatcc

SEQ ID NO: 293679 - DNA, 25 bp, Artificial
  Probe
ccattctggacatggtgaaatccag

SEQ ID NO: 293680 - DNA, 25 bp, Artificial
  Probe
gacaaaaatgcatccattctggaca

SEQ ID NO: 293681 - DNA, 25 bp, Artificial
  Probe
gttcccactatgtagactactgctt

SEQ ID NO: 293682 - DNA, 25 bp, Artificial
  Probe
atggtgaaatccaggtctcgggtct

SEQ ID NO: 293683 - DNA, 25 bp, Artificial
  Probe
gaaatccaggtctcgggtctgattt

SEQ ID NO: 293684 - DNA, 25 bp, Artificial
  Probe
cggcgtccaagagacgacgactcca

SEQ ID NO: 293685 - DNA, 25 bp, Artificial
  Probe
accaatcgaagttggccatgtccaa

SEQ ID NO: 293686 - DNA, 25 bp, Artificial
  Probe
gctaagccggcgtccaagagacgac

SEQ ID NO: 293687 - DNA, 25 bp, Artificial
  Probe
ggattaccaatcgaagttggccatg

SEQ ID NO: 293688 - DNA, 25 bp, Artificial
  Probe
gacaagtggcctttcatgaccaccc

SEQ ID NO: 293689 - DNA, 25 bp, Artificial
  Probe
gacgactccaaggtgggctttgaca

SEQ ID NO: 293690 - DNA, 25 bp, Artificial
  Probe
aggaatggaccctcatgctacatgg

SEQ ID NO: 293691 - DNA, 25 bp, Artificial
  Probe
tgcaaagtatcctgagaaagaacta

SEQ ID NO: 293692 - DNA, 25 bp, Artificial
  Probe
tcgaagttggccatgtccaagaagc

SEQ ID NO: 293693 - DNA, 25 bp, Artificial
  Probe
tgattattttcactacaatggaagc

SEQ ID NO: 293694 - DNA, 25 bp, Artificial
  Probe
tccaaggtgggctttgacaagtggc

SEQ ID NO: 293695 - DNA, 25 bp, Artificial
  Probe
gattattttcactacaatggaagca

SEQ ID NO: 293696 - DNA, 25 bp, Artificial
  Probe
ctccttggtccacagttctggcagc

SEQ ID NO: 293697 - DNA, 25 bp, Artificial
  Probe
acaagcagtcccagcctggtctgaa

SEQ ID NO: 293698 - DNA, 25 bp, Artificial
  Probe
cacagaagggcttgctgaaggaatg

SEQ ID NO: 293699 - DNA, 25 bp, Artificial
  Probe
tgggcagtgcaccacagaagggctt

SEQ ID NO: 293700 - DNA, 25 bp, Artificial
  Probe
gggattaccaatcgaagttggccat

SEQ ID NO: 293701 - DNA, 25 bp, Artificial
  Probe
cccgagggacctggaccctggagct

SEQ ID NO: 293702 - DNA, 25 bp, Artificial
  Probe
agttggccatgtccaagaagcaaga

SEQ ID NO: 293703 - DNA, 25 bp, Artificial
  Probe
ggtccacagttctggcagccaccag

SEQ ID NO: 293704 - DNA, 25 bp, Artificial
  Probe
ctctccttggtccacagttctggca

SEQ ID NO: 293705 - DNA, 25 bp, Artificial
  Probe
aagagacgacgactccaaggtgggc

SEQ ID NO: 293706 - DNA, 25 bp, Artificial
  Probe
gctttgcttgctctcaatgattatt

SEQ ID NO: 293707 - DNA, 25 bp, Artificial
  Probe
aggtgggctttgacaagtggccttt

SEQ ID NO: 293708 - DNA, 25 bp, Artificial
  Probe
gggcaccaagtccattttgctaagc

SEQ ID NO: 293709 - DNA, 25 bp, Artificial
  Probe
ggcagtgcaccacagaagggcttgc

SEQ ID NO: 293710 - DNA, 25 bp, Artificial
  Probe
ccacagaagggcttgctgaaggaat

SEQ ID NO: 293711 - DNA, 25 bp, Artificial
  Probe
gccggcgtccaagagacgacgactc

SEQ ID NO: 293712 - DNA, 25 bp, Artificial
  Probe
gaagctttgcttgctctcaatgatt

SEQ ID NO: 293713 - DNA, 25 bp, Artificial
  Probe
tctgtagcccaaatatagcgttcct

SEQ ID NO: 293714 - DNA, 25 bp, Artificial
  Probe
acaagtggcctttcatgaccaccca

SEQ ID NO: 293715 - DNA, 25 bp, Artificial
  Probe
atgtccaagaagcaagagctggagg

SEQ ID NO: 293716 - DNA, 25 bp, Artificial
  Probe
gggcttgctgaaggaatggaccctc

SEQ ID NO: 293717 - DNA, 25 bp, Artificial
  Probe
gcctctccttggtccacagttctgg

SEQ ID NO: 293718 - DNA, 25 bp, Artificial
  Probe
attctgtagcccaaatatagcgttc

SEQ ID NO: 293719 - DNA, 25 bp, Artificial
  Probe
tccattttgctaagccggcgtccaa

SEQ ID NO: 293720 - DNA, 25 bp, Artificial
  Probe
ggctttgacaagtggcctttcatga

SEQ ID NO: 293721 - DNA, 25 bp, Artificial
  Probe
tccccgatgggcaccaagtccattt

SEQ ID NO: 293722 - DNA, 25 bp, Artificial
  Probe
gtgcaccacagaagggcttgctgaa

SEQ ID NO: 293723 - DNA, 25 bp, Artificial
  Probe
aagggcttgctgaaggaatggaccc

SEQ ID NO: 293724 - DNA, 25 bp, Artificial
  Probe
tgggctttgacaagtggcctttcat

SEQ ID NO: 293725 - DNA, 25 bp, Artificial
  Probe
gcctggtctgaagctttgcttgctc

SEQ ID NO: 293726 - DNA, 25 bp, Artificial
  Probe
atgcccgagggacctggaccctgga

SEQ ID NO: 293727 - DNA, 25 bp, Artificial
  Probe
gagacctgaacatcaacatgacctc

SEQ ID NO: 293728 - DNA, 25 bp, Artificial
  Probe
tgcctctccttggtccacagttctg

SEQ ID NO: 293729 - DNA, 25 bp, Artificial
  Probe
gcagtcccagcctggtctgaagctt

SEQ ID NO: 293730 - DNA, 25 bp, Artificial
  Probe
catgtcaccttagcagcaactcaga

SEQ ID NO: 293731 - DNA, 25 bp, Artificial
  Probe
ccttttcggtgctttaagctgtctt

SEQ ID NO: 293732 - DNA, 25 bp, Artificial
  Probe
gctgtcttaggctgatcatttatat

SEQ ID NO: 293733 - DNA, 25 bp, Artificial
  Probe
tgctttaagctgtcttaggctgatc

SEQ ID NO: 293734 - DNA, 25 bp, Artificial
  Probe
ttcaatcaatctgtaaagacagctg

SEQ ID NO: 293735 - DNA, 25 bp, Artificial
  Probe
actctgcaatggttcaatcaatctg

SEQ ID NO: 293736 - DNA, 25 bp, Artificial
  Probe
gaactcactgtgtccagattttttc

SEQ ID NO: 293737 - DNA, 25 bp, Artificial
  Probe
cggtgctttaagctgtcttaggctg

SEQ ID NO: 293738 - DNA, 25 bp, Artificial
  Probe
agcagcaactcagatcactgaactc

SEQ ID NO: 293739 - DNA, 25 bp, Artificial
  Probe
gagacactgcccatgtcaccttagc

SEQ ID NO: 293740 - DNA, 25 bp, Artificial
  Probe
cttagcagcaactcagatcactgaa

SEQ ID NO: 293741 - DNA, 25 bp, Artificial
  Probe
aactcagatcactgaactcactgtg

SEQ ID NO: 293742 - DNA, 25 bp, Artificial
  Probe
ctgaactcactgtgtccagattttt

SEQ ID NO: 293743 - DNA, 25 bp, Artificial
  Probe
actgcccatgtcaccttagcagcaa

SEQ ID NO: 293744 - DNA, 25 bp, Artificial
  Probe
tagcagcaactcagatcactgaact

SEQ ID NO: 293745 - DNA, 25 bp, Artificial
  Probe
tctgcaatggttcaatcaatctgta

SEQ ID NO: 293746 - DNA, 25 bp, Artificial
  Probe
ttcggtgctttaagctgtcttaggc

SEQ ID NO: 293747 - DNA, 25 bp, Artificial
  Probe
gtcaccttagcagcaactcagatca

SEQ ID NO: 293748 - DNA, 25 bp, Artificial
  Probe
tgcccatgtcaccttagcagcaact

SEQ ID NO: 293749 - DNA, 25 bp, Artificial
  Probe
actcagatcactgaactcactgtgt

SEQ ID NO: 293750 - DNA, 25 bp, Artificial
  Probe
accttagcagcaactcagatcactg

SEQ ID NO: 293751 - DNA, 25 bp, Artificial
  Probe
gctttaagctgtcttaggctgatca

SEQ ID NO: 293752 - DNA, 25 bp, Artificial
  Probe
gcaactcagatcactgaactcactg

SEQ ID NO: 293753 - DNA, 25 bp, Artificial
  Probe
tttcggtgctttaagctgtcttagg

SEQ ID NO: 293754 - DNA, 25 bp, Artificial
  Probe
gcaatggttcaatcaatctgtaaag

SEQ ID NO: 293755 - DNA, 25 bp, Artificial
  Probe
cagccttttcggtgctttaagctgt

SEQ ID NO: 293756 - DNA, 25 bp, Artificial
  Probe
gttcaatcaatctgtaaagacagct

SEQ ID NO: 293757 - DNA, 25 bp, Artificial
  Probe
gtaacagccttttcggtgctttaag

SEQ ID NO: 293758 - DNA, 25 bp, Artificial
  Probe
agccttttcggtgctttaagctgtc

SEQ ID NO: 293759 - DNA, 25 bp, Artificial
  Probe
ccttagcagcaactcagatcactga

SEQ ID NO: 293760 - DNA, 25 bp, Artificial
  Probe
ctttaagctgtcttaggctgatcat

SEQ ID NO: 293761 - DNA, 25 bp, Artificial
  Probe
ctctgcaatggttcaatcaatctgt

SEQ ID NO: 293762 - DNA, 25 bp, Artificial
  Probe
cagatcactgaactcactgtgtcca

SEQ ID NO: 293763 - DNA, 25 bp, Artificial
  Probe
cttttcggtgctttaagctgtctta

SEQ ID NO: 293764 - DNA, 25 bp, Artificial
  Probe
caatggttcaatcaatctgtaaaga

SEQ ID NO: 293765 - DNA, 25 bp, Artificial
  Probe
ggtgctttaagctgtcttaggctga

SEQ ID NO: 293766 - DNA, 25 bp, Artificial
  Probe
gcagcaactcagatcactgaactca

SEQ ID NO: 293767 - DNA, 25 bp, Artificial
  Probe
atggttcaatcaatctgtaaagaca

SEQ ID NO: 293768 - DNA, 25 bp, Artificial
  Probe
ccatgtcaccttagcagcaactcag

SEQ ID NO: 293769 - DNA, 25 bp, Artificial
  Probe
gacactgcccatgtcaccttagcag

SEQ ID NO: 293770 - DNA, 25 bp, Artificial
  Probe
tgaactcactgtgtccagatttttt

SEQ ID NO: 293771 - DNA, 25 bp, Artificial
  Probe
ctcagatcactgaactcactgtgtc

SEQ ID NO: 293772 - DNA, 25 bp, Artificial
  Probe
caatcaatctgtaaagacagctgag

SEQ ID NO: 293773 - DNA, 25 bp, Artificial
  Probe
ttaagctgtcttaggctgatcattt

SEQ ID NO: 293774 - DNA, 25 bp, Artificial
  Probe
tggttcaatcaatctgtaaagacag

SEQ ID NO: 293775 - DNA, 25 bp, Artificial
  Probe
atgtcaccttagcagcaactcagat

SEQ ID NO: 293776 - DNA, 25 bp, Artificial
  Probe
cttctgaccaactaaggcaggaggg

SEQ ID NO: 293777 - DNA, 25 bp, Artificial
  Probe
ccctttaagagaaggggtctgctgg

SEQ ID NO: 293778 - DNA, 25 bp, Artificial
  Probe
gagtgctttcctactatgactcctc

SEQ ID NO: 293779 - DNA, 25 bp, Artificial
  Probe
tccagagactcagctctagaatact

SEQ ID NO: 293780 - DNA, 25 bp, Artificial
  Probe
agactcagctctagaatacttctgt

SEQ ID NO: 293781 - DNA, 25 bp, Artificial
  Probe
aacacaacagtacatccctgacagg

SEQ ID NO: 293782 - DNA, 25 bp, Artificial
  Probe
tggcgctttcactgaactcttgcca

SEQ ID NO: 293783 - DNA, 25 bp, Artificial
  Probe
tgaaaggctgcctataaacactggt

SEQ ID NO: 293784 - DNA, 25 bp, Artificial
  Probe
actggcgctttcactgaactcttgc

SEQ ID NO: 293785 - DNA, 25 bp, Artificial
  Probe
caaactggcgctttcactgaactct

SEQ ID NO: 293786 - DNA, 25 bp, Artificial
  Probe
acccgaaagcttctgaccaactaag

SEQ ID NO: 293787 - DNA, 25 bp, Artificial
  Probe
gatttgaaaggctgcctataaacac

SEQ ID NO: 293788 - DNA, 25 bp, Artificial
  Probe
cccagggctgccaagtgtgggtacc

SEQ ID NO: 293789 - DNA, 25 bp, Artificial
  Probe
aactcttgccacatagactctgggt

SEQ ID NO: 293790 - DNA, 25 bp, Artificial
  Probe
tgtgggtaccaacactttcttgttc

SEQ ID NO: 293791 - DNA, 25 bp, Artificial
  Probe
gtgctaaacccgaaagcttctgacc

SEQ ID NO: 293792 - DNA, 25 bp, Artificial
  Probe
tcagtctccatttggggccctggcc

SEQ ID NO: 293793 - DNA, 25 bp, Artificial
  Probe
gcttctgaccaactaaggcaggagg

SEQ ID NO: 293794 - DNA, 25 bp, Artificial
  Probe
gactcagctctagaatacttctgtt

SEQ ID NO: 293795 - DNA, 25 bp, Artificial
  Probe
aaactggcgctttcactgaactctt

SEQ ID NO: 293796 - DNA, 25 bp, Artificial
  Probe
cagagactcagctctagaatacttc

SEQ ID NO: 293797 - DNA, 25 bp, Artificial
  Probe
cacaacagtacatccctgacagggc

SEQ ID NO: 293798 - DNA, 25 bp, Artificial
  Probe
gctaaacccgaaagcttctgaccaa

SEQ ID NO: 293799 - DNA, 25 bp, Artificial
  Probe
tgagtgagtgctttcctactatgac

SEQ ID NO: 293800 - DNA, 25 bp, Artificial
  Probe
acagtacatccctgacagggcaagg

SEQ ID NO: 293801 - DNA, 25 bp, Artificial
  Probe
ccgaaagcttctgaccaactaaggc

SEQ ID NO: 293802 - DNA, 25 bp, Artificial
  Probe
cagtacatccctgacagggcaagga

SEQ ID NO: 293803 - DNA, 25 bp, Artificial
  Probe
agcacatcagtctccatttggggcc

SEQ ID NO: 293804 - DNA, 25 bp, Artificial
  Probe
aagcttctgaccaactaaggcagga

SEQ ID NO: 293805 - DNA, 25 bp, Artificial
  Probe
tgccacatagactctgggtgaaggg

SEQ ID NO: 293806 - DNA, 25 bp, Artificial
  Probe
tgaactcttgccacatagactctgg

SEQ ID NO: 293807 - DNA, 25 bp, Artificial
  Probe
ttccctttaagagaaggggtctgct

SEQ ID NO: 293808 - DNA, 25 bp, Artificial
  Probe
aggctgcctataaacactggttggg

SEQ ID NO: 293809 - DNA, 25 bp, Artificial
  Probe
ggctgccaagtgtgggtaccaacac

SEQ ID NO: 293810 - DNA, 25 bp, Artificial
  Probe
cagggctgccaagtgtgggtaccaa

SEQ ID NO: 293811 - DNA, 25 bp, Artificial
  Probe
agtgtgggtaccaacactttcttgt

SEQ ID NO: 293812 - DNA, 25 bp, Artificial
  Probe
gagactcagctctagaatacttctg

SEQ ID NO: 293813 - DNA, 25 bp, Artificial
  Probe
ggtagagcacatcagtctccatttg

SEQ ID NO: 293814 - DNA, 25 bp, Artificial
  Probe
atcagtctccatttggggccctggc

SEQ ID NO: 293815 - DNA, 25 bp, Artificial
  Probe
tgttccctttaagagaaggggtctg

SEQ ID NO: 293816 - DNA, 25 bp, Artificial
  Probe
agaatacttctgttccctttaagag

SEQ ID NO: 293817 - DNA, 25 bp, Artificial
  Probe
gtacatccctgacagggcaaggatg

SEQ ID NO: 293818 - DNA, 25 bp, Artificial
  Probe
gaatacttctgttccctttaagaga

SEQ ID NO: 293819 - DNA, 25 bp, Artificial
  Probe
aaggaacacaacagtacatccctga

SEQ ID NO: 293820 - DNA, 25 bp, Artificial
  Probe
tggtagagcacatcagtctccattt

SEQ ID NO: 293821 - DNA, 25 bp, Artificial
  Probe
tgtgagtgagtgctttcctactatg

SEQ ID NO: 293822 - DNA, 25 bp, Artificial
  Probe
acttggaaacatctgaaaggttctg

SEQ ID NO: 293823 - DNA, 25 bp, Artificial
  Probe
aaatcaacctttggatggcgtcttc

SEQ ID NO: 293824 - DNA, 25 bp, Artificial
  Probe
acttgtatagccttgaaggctctcg

SEQ ID NO: 293825 - DNA, 25 bp, Artificial
  Probe
gttacatccttagagcctgcttatt

SEQ ID NO: 293826 - DNA, 25 bp, Artificial
  Probe
aaatggactgtaggactgtgtggcc

SEQ ID NO: 293827 - DNA, 25 bp, Artificial
  Probe
cgcattcctgcctcacgggtctgtg

SEQ ID NO: 293828 - DNA, 25 bp, Artificial
  Probe
tcaacctttggatggcgtcttctag

SEQ ID NO: 293829 - DNA, 25 bp, Artificial
  Probe
ctagaccacttgattgtaggattga

SEQ ID NO: 293830 - DNA, 25 bp, Artificial
  Probe
tcatgggttattctatcaaagacca

SEQ ID NO: 293831 - DNA, 25 bp, Artificial
  Probe
ctttggatggcgtcttctagaccac

SEQ ID NO: 293832 - DNA, 25 bp, Artificial
  Probe
atccttagagcctgcttatttggtc

SEQ ID NO: 293833 - DNA, 25 bp, Artificial
  Probe
gattgaaaaccacattgacaatcag

SEQ ID NO: 293834 - DNA, 25 bp, Artificial
  Probe
ctgcttatttggtctgtctgaatgt

SEQ ID NO: 293835 - DNA, 25 bp, Artificial
  Probe
gaatatggcatgtgacacagctata

SEQ ID NO: 293836 - DNA, 25 bp, Artificial
  Probe
tgcaagcttagatgtaccttgttcc

SEQ ID NO: 293837 - DNA, 25 bp, Artificial
  Probe
ggtctgtctgaatgtggtcattgtc

SEQ ID NO: 293838 - DNA, 25 bp, Artificial
  Probe
tttctgtctccttgcccacttggaa

SEQ ID NO: 293839 - DNA, 25 bp, Artificial
  Probe
ggttattctatcaaagaccagaaag

SEQ ID NO: 293840 - DNA, 25 bp, Artificial
  Probe
tgtaatattggcttccttgaagcta

SEQ ID NO: 293841 - DNA, 25 bp, Artificial
  Probe
tcatttcgcattcctgcctcacggg

SEQ ID NO: 293842 - DNA, 25 bp, Artificial
  Probe
tggccataaaatcaacctttggatg

SEQ ID NO: 293843 - DNA, 25 bp, Artificial
  Probe
tctgtgaggactcattaatgtcatg

SEQ ID NO: 293844 - DNA, 25 bp, Artificial
  Probe
gtatagccttgaaggctctcggtgt

SEQ ID NO: 293845 - DNA, 25 bp, Artificial
  Probe
gaaacatctgaaaggttctggaact

SEQ ID NO: 293846 - DNA, 25 bp, Artificial
  Probe
actttctgtctccttgcccacttgg

SEQ ID NO: 293847 - DNA, 25 bp, Artificial
  Probe
cattcctgcctcacgggtctgtgag

SEQ ID NO: 293848 - DNA, 25 bp, Artificial
  Probe
ccaggatgtaccaccgaatgccaag

SEQ ID NO: 293849 - DNA, 25 bp, Artificial
  Probe
ccacttgattgtaggattgaaaacc

SEQ ID NO: 293850 - DNA, 25 bp, Artificial
  Probe
gcttagatgtaccttgttcctcctc

SEQ ID NO: 293851 - DNA, 25 bp, Artificial
  Probe
gttctaacttgtatagccttgaagg

SEQ ID NO: 293852 - DNA, 25 bp, Artificial
  Probe
ctcattaatgtcatgggttattcta

SEQ ID NO: 293853 - DNA, 25 bp, Artificial
  Probe
atagtgcaagcttagatgtaccttg

SEQ ID NO: 293854 - DNA, 25 bp, Artificial
  Probe
cagacccttgggttacatccttaga

SEQ ID NO: 293855 - DNA, 25 bp, Artificial
  Probe
ctctttgtaatattggcttccttga

SEQ ID NO: 293856 - DNA, 25 bp, Artificial
  Probe
gtctccttgcccacttggaaacatc

SEQ ID NO: 293857 - DNA, 25 bp, Artificial
  Probe
tgtgacacagctataagaaatggac

SEQ ID NO: 293858 - DNA, 25 bp, Artificial
  Probe
tgtaggactgtgtggccataaaatc

SEQ ID NO: 293859 - DNA, 25 bp, Artificial
  Probe
ctatcaaagaccagaaagatagtgc

SEQ ID NO: 293860 - DNA, 25 bp, Artificial
  Probe
gaaggctctcggtgtacttactttc

SEQ ID NO: 293861 - DNA, 25 bp, Artificial
  Probe
agatagtgcaagcttagatgtacct

SEQ ID NO: 293862 - DNA, 25 bp, Artificial
  Probe
gtgtacttactttctgtctccttgc

SEQ ID NO: 293863 - DNA, 25 bp, Artificial
  Probe
ctgtctgaatgtggtcattgtcatg

SEQ ID NO: 293864 - DNA, 25 bp, Artificial
  Probe
ctgcctcacgggtctgtgaggactc

SEQ ID NO: 293865 - DNA, 25 bp, Artificial
  Probe
gactcattaatgtcatgggttattc

SEQ ID NO: 293866 - DNA, 25 bp, Artificial
  Probe
catctgaaaggttctggaactaaag

SEQ ID NO: 293867 - DNA, 25 bp, Artificial
  Probe
ccaccgaatgccaagttctaacttg

SEQ ID NO: 293868 - DNA, 25 bp, Artificial
  Probe
agccagacaaggtgcaaagtttccc

SEQ ID NO: 293869 - DNA, 25 bp, Artificial
  Probe
tgaacaaccgtgaggtgctggagca

SEQ ID NO: 293870 - DNA, 25 bp, Artificial
  Probe
caatgagtacacagccagacaaggt

SEQ ID NO: 293871 - DNA, 25 bp, Artificial
  Probe
ggacgggctctgaaattgccaaacc

SEQ ID NO: 293872 - DNA, 25 bp, Artificial
  Probe
gtacacagccagacaaggtgcaaag

SEQ ID NO: 293873 - DNA, 25 bp, Artificial
  Probe
ccaaaggcagagtgccgtacccagg

SEQ ID NO: 293874 - DNA, 25 bp, Artificial
  Probe
cccaggcatgaacaaccgtgaggtg

SEQ ID NO: 293875 - DNA, 25 bp, Artificial
  Probe
tacccaggcatgaacaaccgtgagg

SEQ ID NO: 293876 - DNA, 25 bp, Artificial
  Probe
tctgaaattgccaaacctcgtggac

SEQ ID NO: 293877 - DNA, 25 bp, Artificial
  Probe
tgcggtcagctaacattctggtggg

SEQ ID NO: 293878 - DNA, 25 bp, Artificial
  Probe
cgagctcatgatccactgctggaaa

SEQ ID NO: 293879 - DNA, 25 bp, Artificial
  Probe
gtgtggtcctttggaatcttactca

SEQ ID NO: 293880 - DNA, 25 bp, Artificial
  Probe
tcgacttcttaaaagacggtgaagg

SEQ ID NO: 293881 - DNA, 25 bp, Artificial
  Probe
agagatctgcggtcagctaacattc

SEQ ID NO: 293882 - DNA, 25 bp, Artificial
  Probe
cgggctctgaaattgccaaacctcg

SEQ ID NO: 293883 - DNA, 25 bp, Artificial
  Probe
cgcatgaattatatccacagagatc

SEQ ID NO: 293884 - DNA, 25 bp, Artificial
  Probe
cacagccagacaaggtgcaaagttt

SEQ ID NO: 293885 - DNA, 25 bp, Artificial
  Probe
gctggtcaccaaaggcagagtgccg

SEQ ID NO: 293886 - DNA, 25 bp, Artificial
  Probe
gaacggactcatttgcaagattgct

SEQ ID NO: 293887 - DNA, 25 bp, Artificial
  Probe
gtcaccaaaggcagagtgccgtacc

SEQ ID NO: 293888 - DNA, 25 bp, Artificial
  Probe
gttgctgcaggaatggcttacatcg

SEQ ID NO: 293889 - DNA, 25 bp, Artificial
  Probe
caccaaaggcagagtgccgtaccca

SEQ ID NO: 293890 - DNA, 25 bp, Artificial
  Probe
gagctcatgatccactgctggaaaa

SEQ ID NO: 293891 - DNA, 25 bp, Artificial
  Probe
ggaatggcttacatcgaacgcatga

SEQ ID NO: 293892 - DNA, 25 bp, Artificial
  Probe
gggaacggactcatttgcaagattg

SEQ ID NO: 293893 - DNA, 25 bp, Artificial
  Probe
agtttgctcgacttcttaaaagacg

SEQ ID NO: 293894 - DNA, 25 bp, Artificial
  Probe
catgaacaaccgtgaggtgctggag

SEQ ID NO: 293895 - DNA, 25 bp, Artificial
  Probe
tccacagagatctgcggtcagctaa

SEQ ID NO: 293896 - DNA, 25 bp, Artificial
  Probe
ggcccggttgattgaagacaatgag

SEQ ID NO: 293897 - DNA, 25 bp, Artificial
  Probe
gaagtttgctcgacttcttaaaaga

SEQ ID NO: 293898 - DNA, 25 bp, Artificial
  Probe
ggccctgtatggaaggttcacaatc

SEQ ID NO: 293899 - DNA, 25 bp, Artificial
  Probe
gaagcggccctgtatggaaggttca

SEQ ID NO: 293900 - DNA, 25 bp, Artificial
  Probe
gatctccctgcacgagctcatgatc

SEQ ID NO: 293901 - DNA, 25 bp, Artificial
  Probe
gaaattgccaaacctcgtggacatg

SEQ ID NO: 293902 - DNA, 25 bp, Artificial
  Probe
ggactcatttgcaagattgctgact

SEQ ID NO: 293903 - DNA, 25 bp, Artificial
  Probe
gagtacacagccagacaaggtgcaa

SEQ ID NO: 293904 - DNA, 25 bp, Artificial
  Probe
ccgaagcggccctgtatggaaggtt

SEQ ID NO: 293905 - DNA, 25 bp, Artificial
  Probe
agtgccgtacccaggcatgaacaac

SEQ ID NO: 293906 - DNA, 25 bp, Artificial
  Probe
ccgtacccaggcatgaacaaccgtg

SEQ ID NO: 293907 - DNA, 25 bp, Artificial
  Probe
gcacaggttgctgcaggaatggctt

SEQ ID NO: 293908 - DNA, 25 bp, Artificial
  Probe
catgatccactgctggaaaaaggat

SEQ ID NO: 293909 - DNA, 25 bp, Artificial
  Probe
aacctcgtggacatggcggcacagg

SEQ ID NO: 293910 - DNA, 25 bp, Artificial
  Probe
tgaaggacgggctctgaaattgcca

SEQ ID NO: 293911 - DNA, 25 bp, Artificial
  Probe
ggcagagtgccgtacccaggcatga

SEQ ID NO: 293912 - DNA, 25 bp, Artificial
  Probe
caggcatgaacaaccgtgaggtgct

SEQ ID NO: 293913 - DNA, 25 bp, Artificial
  Probe
ggcttacatcgaacgcatgaattat

SEQ ID NO: 293914 - DNA, 25 bp, Artificial
  Probe
aaactgccctagcaggaactatctg

SEQ ID NO: 293915 - DNA, 25 bp, Artificial
  Probe
ctttcgatttgtgcttggaatgcaa

SEQ ID NO: 293916 - DNA, 25 bp, Artificial
  Probe
tgtgttgctacttagtatcttctgg

SEQ ID NO: 293917 - DNA, 25 bp, Artificial
  Probe
tctcttagctgtccagtagtgttca

SEQ ID NO: 293918 - DNA, 25 bp, Artificial
  Probe
tcctaaatctgataagaaggaagca

SEQ ID NO: 293919 - DNA, 25 bp, Artificial
  Probe
ctttcaaagacgagatgcaacctag

SEQ ID NO: 293920 - DNA, 25 bp, Artificial
  Probe
gcttgtgttgctacttagtatcttc

SEQ ID NO: 293921 - DNA, 25 bp, Artificial
  Probe
cttccatatgtgacgggactctgtc

SEQ ID NO: 293922 - DNA, 25 bp, Artificial
  Probe
agaagaagcgcttcagggagtcctt

SEQ ID NO: 293923 - DNA, 25 bp, Artificial
  Probe
tgcccatgcgggtcctctacctgtt

SEQ ID NO: 293924 - DNA, 25 bp, Artificial
  Probe
gaagaagcgcttcagggagtcctta

SEQ ID NO: 293925 - DNA, 25 bp, Artificial
  Probe
tacgagtactggtcaacctttggga

SEQ ID NO: 293926 - DNA, 25 bp, Artificial
  Probe
ttgccatgcccatgcgggtcctcta

SEQ ID NO: 293927 - DNA, 25 bp, Artificial
  Probe
catgggggtctaatcgatgatgagc

SEQ ID NO: 293928 - DNA, 25 bp, Artificial
  Probe
tcagggagtccttaaaagtggtcct

SEQ ID NO: 293929 - DNA, 25 bp, Artificial
  Probe
tacctgttgtattacgagtactggt

SEQ ID NO: 293930 - DNA, 25 bp, Artificial
  Probe
ttagctgtccagtagtgttcaacag

SEQ ID NO: 293931 - DNA, 25 bp, Artificial
  Probe
aactataaaaactgccctagcagga

SEQ ID NO: 293932 - DNA, 25 bp, Artificial
  Probe
tgagcttgtgttgctacttagtatc

SEQ ID NO: 293933 - DNA, 25 bp, Artificial
  Probe
gtactggtcaacctttgggaacctg

SEQ ID NO: 293934 - DNA, 25 bp, Artificial
  Probe
aggaactatctgaattgtgactcag

SEQ ID NO: 293935 - DNA, 25 bp, Artificial
  Probe
cgatgatgagcttgtgttgctactt

SEQ ID NO: 293936 - DNA, 25 bp, Artificial
  Probe
ctggtcaacctttgggaacctgcat

SEQ ID NO: 293937 - DNA, 25 bp, Artificial
  Probe
ctagcaggaactatctgaattgtga

SEQ ID NO: 293938 - DNA, 25 bp, Artificial
  Probe
atatgtgacgggactctgtcttttc

SEQ ID NO: 293939 - DNA, 25 bp, Artificial
  Probe
catgcatgggggtctaatcgatgat

SEQ ID NO: 293940 - DNA, 25 bp, Artificial
  Probe
ttaaaagtggtcctgaccagagctt

SEQ ID NO: 293941 - DNA, 25 bp, Artificial
  Probe
gggactctgtcttttctatcattat

SEQ ID NO: 293942 - DNA, 25 bp, Artificial
  Probe
ctaatcgatgatgagcttgtgttgc

SEQ ID NO: 293943 - DNA, 25 bp, Artificial
  Probe
ggctttcgatttgtgcttggaatgc

SEQ ID NO: 293944 - DNA, 25 bp, Artificial
  Probe
tcttctggaaatgcttccatatgtg

SEQ ID NO: 293945 - DNA, 25 bp, Artificial
  Probe
tcttagacagaaacagctgaatgtg

SEQ ID NO: 293946 - DNA, 25 bp, Artificial
  Probe
aaggaagcattctacatgcatgggg

SEQ ID NO: 293947 - DNA, 25 bp, Artificial
  Probe
ttgagactgtggtctgaggaccgca

SEQ ID NO: 293948 - DNA, 25 bp, Artificial
  Probe
attctacatgcatgggggtctaatc

SEQ ID NO: 293949 - DNA, 25 bp, Artificial
  Probe
caacactgtatccattgagactgtg

SEQ ID NO: 293950 - DNA, 25 bp, Artificial
  Probe
gtcttagacagaaacagctgaatgt

SEQ ID NO: 293951 - DNA, 25 bp, Artificial
  Probe
tcaacctttgggaacctgcataaca

SEQ ID NO: 293952 - DNA, 25 bp, Artificial
  Probe
agcgcttcagggagtccttaaaagt

SEQ ID NO: 293953 - DNA, 25 bp, Artificial
  Probe
taactataaaaactgccctagcagg

SEQ ID NO: 293954 - DNA, 25 bp, Artificial
  Probe
agtccttaaaagtggtcctgaccag

SEQ ID NO: 293955 - DNA, 25 bp, Artificial
  Probe
aagtggtcctgaccagagctttcaa

SEQ ID NO: 293956 - DNA, 25 bp, Artificial
  Probe
cattcttctcttagctgtccagtag

SEQ ID NO: 293957 - DNA, 25 bp, Artificial
  Probe
aaatctcctaaatctgataagaagg

SEQ ID NO: 293958 - DNA, 25 bp, Artificial
  Probe
tccagtagtgttcaacagttaacta

SEQ ID NO: 293959 - DNA, 25 bp, Artificial
  Probe
ggaacctgcataacatctccttgct

SEQ ID NO: 293960 - DNA, 25 bp, Artificial
  Probe
ttaaaaggccaccttgaaggtctgg

SEQ ID NO: 293961 - DNA, 25 bp, Artificial
  Probe
tggtgctccgaatcccttctgcctg

SEQ ID NO: 293962 - DNA, 25 bp, Artificial
  Probe
agagaggatcctcctggagggttta

SEQ ID NO: 293963 - DNA, 25 bp, Artificial
  Probe
cttcagaaggtcgaaactggctcct

SEQ ID NO: 293964 - DNA, 25 bp, Artificial
  Probe
agctctctgctgagctcctggccta

SEQ ID NO: 293965 - DNA, 25 bp, Artificial
  Probe
tacctcatgcagaaccgaatgtctc

SEQ ID NO: 293966 - DNA, 25 bp, Artificial
  Probe
gaacagagccggtgaaatgggttcc

SEQ ID NO: 293967 - DNA, 25 bp, Artificial
  Probe
ctgcctgattgagtcaagggaggaa

SEQ ID NO: 293968 - DNA, 25 bp, Artificial
  Probe
cgagaccctccagtacagttcctag

SEQ ID NO: 293969 - DNA, 25 bp, Artificial
  Probe
gggttggactgaccattcgttatcg

SEQ ID NO: 293970 - DNA, 25 bp, Artificial
  Probe
gtgcgagaaccctatggaggcctct

SEQ ID NO: 293971 - DNA, 25 bp, Artificial
  Probe
ggcagatccctgtgtgttgctggct

SEQ ID NO: 293972 - DNA, 25 bp, Artificial
  Probe
tttgtgtgccagacagtgactccac

SEQ ID NO: 293973 - DNA, 25 bp, Artificial
  Probe
gttgtccgtctcagggattactccc

SEQ ID NO: 293974 - DNA, 25 bp, Artificial
  Probe
tagtgcctctcctttccagggggtt

SEQ ID NO: 293975 - DNA, 25 bp, Artificial
  Probe
tattaaaaggccaccttgaaggtct

SEQ ID NO: 293976 - DNA, 25 bp, Artificial
  Probe
tgtgatcgcattgctcgttgcagag

SEQ ID NO: 293977 - DNA, 25 bp, Artificial
  Probe
agttctcaaccgagaccctccagta

SEQ ID NO: 293978 - DNA, 25 bp, Artificial
  Probe
gtcttgctgtcaagattaattctct

SEQ ID NO: 293979 - DNA, 25 bp, Artificial
  Probe
agatccctgtgtgttgctggctgag

SEQ ID NO: 293980 - DNA, 25 bp, Artificial
  Probe
tgggttcccctctttagaccagtag

SEQ ID NO: 293981 - DNA, 25 bp, Artificial
  Probe
cagagcagcacacagtgttcccctg

SEQ ID NO: 293982 - DNA, 25 bp, Artificial
  Probe
gtcgaaactggctcctggacgcaga

SEQ ID NO: 293983 - DNA, 25 bp, Artificial
  Probe
ttatggaggacaggaccgtctagtc

SEQ ID NO: 293984 - DNA, 25 bp, Artificial
  Probe
cacagggacgccaggcctgtgatcg

SEQ ID NO: 293985 - DNA, 25 bp, Artificial
  Probe
cccaaggagggcacacccacaggtt

SEQ ID NO: 293986 - DNA, 25 bp, Artificial
  Probe
caagttactttgtggctacttcata

SEQ ID NO: 293987 - DNA, 25 bp, Artificial
  Probe
gaaccactgcctttgatatggaggc

SEQ ID NO: 293988 - DNA, 25 bp, Artificial
  Probe
agattctgaatgcaccataaatttg

SEQ ID NO: 293989 - DNA, 25 bp, Artificial
  Probe
atcaagttactttgtggctacttca

SEQ ID NO: 293990 - DNA, 25 bp, Artificial
  Probe
cacatacctcatgcagaaccgaatg

SEQ ID NO: 293991 - DNA, 25 bp, Artificial
  Probe
aggcctctgtctttttcagtcttgt

SEQ ID NO: 293992 - DNA, 25 bp, Artificial
  Probe
gaggaagaagctctctgctgagctc

SEQ ID NO: 293993 - DNA, 25 bp, Artificial
  Probe
gcctaggtctgctcacaagctgcct

SEQ ID NO: 293994 - DNA, 25 bp, Artificial
  Probe
tctttagaccagtagttctcaaccg

SEQ ID NO: 293995 - DNA, 25 bp, Artificial
  Probe
gctgagtgggcctgcagaacacctc

SEQ ID NO: 293996 - DNA, 25 bp, Artificial
  Probe
ctagtaggtcagtcgccctgttggg

SEQ ID NO: 293997 - DNA, 25 bp, Artificial
  Probe
cgtctagtctgaggaagaagctctc

SEQ ID NO: 293998 - DNA, 25 bp, Artificial
  Probe
ttgcaaggtcggaaacaaggtcctt

SEQ ID NO: 293999 - DNA, 25 bp, Artificial
  Probe
gggagacacggctttgtctcccttc

SEQ ID NO: 294000 - DNA, 25 bp, Artificial
  Probe
agtcttgtttgctttctggcctctc

SEQ ID NO: 294001 - DNA, 25 bp, Artificial
  Probe
gtacagttcctagtgctgtgatgac

SEQ ID NO: 294002 - DNA, 25 bp, Artificial
  Probe
ctcctggagggtttagattctgaat

SEQ ID NO: 294003 - DNA, 25 bp, Artificial
  Probe
cacaggttgggaaccactgcctttg

SEQ ID NO: 294004 - DNA, 25 bp, Artificial
  Probe
atcggatgtgaccaagcagaacgga

SEQ ID NO: 294005 - DNA, 25 bp, Artificial
  Probe
gaagccccgggttgtccgtctcagg

SEQ ID NO: 294006 - DNA, 25 bp, Artificial
  Probe
gtgcacccgcacacaaggagtgtct

SEQ ID NO: 294007 - DNA, 25 bp, Artificial
  Probe
tcaccaaccgctctgatgggaccta

SEQ ID NO: 294008 - DNA, 25 bp, Artificial
  Probe
aagggtgcctccatgtggccgtcaa

SEQ ID NO: 294009 - DNA, 25 bp, Artificial
  Probe
taacagagttcgtccctacgtccac

SEQ ID NO: 294010 - DNA, 25 bp, Artificial
  Probe
cagaggctgaacacacctggtggga

SEQ ID NO: 294011 - DNA, 25 bp, Artificial
  Probe
cgctgttacaggtgccgtgcacccg

SEQ ID NO: 294012 - DNA, 25 bp, Artificial
  Probe
ctcattggcagaggatctggatgga

SEQ ID NO: 294013 - DNA, 25 bp, Artificial
  Probe
agcagaattccctaaaagattgctt

SEQ ID NO: 294014 - DNA, 25 bp, Artificial
  Probe
ctctaactatgtggaggaagactat

SEQ ID NO: 294015 - DNA, 25 bp, Artificial
  Probe
ccgcatcacagagaagaaggctttc

SEQ ID NO: 294016 - DNA, 25 bp, Artificial
  Probe
cctgcaggacacagagagaggcaga

SEQ ID NO: 294017 - DNA, 25 bp, Artificial
  Probe
aatcatgacgtcagaggggttgtac

SEQ ID NO: 294018 - DNA, 25 bp, Artificial
  Probe
tcctgcaaggcctgccagatgttac

SEQ ID NO: 294019 - DNA, 25 bp, Artificial
  Probe
ttctgattgaggatcaaggtgccca

SEQ ID NO: 294020 - DNA, 25 bp, Artificial
  Probe
tacccagaaaatgctacagccaatg

SEQ ID NO: 294021 - DNA, 25 bp, Artificial
  Probe
atgaattgggccttcctaagatgga

SEQ ID NO: 294022 - DNA, 25 bp, Artificial
  Probe
ttgaggggctgtgagctgttctcat

SEQ ID NO: 294023 - DNA, 25 bp, Artificial
  Probe
gggcccaggacaagaaaaggaatga

SEQ ID NO: 294024 - DNA, 25 bp, Artificial
  Probe
atctatggccggattggctggtttc

SEQ ID NO: 294025 - DNA, 25 bp, Artificial
  Probe
tgtgtcaggaatactacgggatccc

SEQ ID NO: 294026 - DNA, 25 bp, Artificial
  Probe
agaaggacaagctacatcgaagggc

SEQ ID NO: 294027 - DNA, 25 bp, Artificial
  Probe
ccaatggacatgattttcagatgtt

SEQ ID NO: 294028 - DNA, 25 bp, Artificial
  Probe
gaagactattctgaatactgctgag

SEQ ID NO: 294029 - DNA, 25 bp, Artificial
  Probe
aagatacagcggaattcgccatcag

SEQ ID NO: 294030 - DNA, 25 bp, Artificial
  Probe
cttcctaagatggaggtgtgtcagg

SEQ ID NO: 294031 - DNA, 25 bp, Artificial
  Probe
atcaaggtgcccaggggtatgagct

SEQ ID NO: 294032 - DNA, 25 bp, Artificial
  Probe
gagcaggcgccgagggcatcctcac

SEQ ID NO: 294033 - DNA, 25 bp, Artificial
  Probe
ttcccaggatgaagcccagagatgg

SEQ ID NO: 294034 - DNA, 25 bp, Artificial
  Probe
ccaggacctgtctgtgcacctctgg

SEQ ID NO: 294035 - DNA, 25 bp, Artificial
  Probe
atgggacctacctggtgcggcaaag

SEQ ID NO: 294036 - DNA, 25 bp, Artificial
  Probe
gatctggatggagctcagatggcta

SEQ ID NO: 294037 - DNA, 25 bp, Artificial
  Probe
tgttcttcaagactcgggagctaaa

SEQ ID NO: 294038 - DNA, 25 bp, Artificial
  Probe
ctcccggagcctttgggccatttct

SEQ ID NO: 294039 - DNA, 25 bp, Artificial
  Probe
ctgagcccaggatgccagcagggtt

SEQ ID NO: 294040 - DNA, 25 bp, Artificial
  Probe
gccaaagcccgctacgacttctgtg

SEQ ID NO: 294041 - DNA, 25 bp, Artificial
  Probe
gccatcagcattaagtataatgtgg

SEQ ID NO: 294042 - DNA, 25 bp, Artificial
  Probe
cagatgatggctgagcccaggatgc

SEQ ID NO: 294043 - DNA, 25 bp, Artificial
  Probe
ccgcacacaaggagtgtctgggaag

SEQ ID NO: 294044 - DNA, 25 bp, Artificial
  Probe
tcctcaacaagaagggacagcaagg

SEQ ID NO: 294045 - DNA, 25 bp, Artificial
  Probe
gcacctctggtatgcgggccccatg

SEQ ID NO: 294046 - DNA, 25 bp, Artificial
  Probe
cgatcggaactgtcccttaaggagg

SEQ ID NO: 294047 - DNA, 25 bp, Artificial
  Probe
ggtgacatcatcaagatcctcaaca

SEQ ID NO: 294048 - DNA, 25 bp, Artificial
  Probe
gaaatacagctacgaatgaagtcgg

SEQ ID NO: 294049 - DNA, 25 bp, Artificial
  Probe
aaccctggggacattgtggaactca

SEQ ID NO: 294050 - DNA, 25 bp, Artificial
  Probe
ctcaggaaccatgaagaaggacaag

SEQ ID NO: 294051 - DNA, 25 bp, Artificial
  Probe
tttatagcacactgattttctcgag

SEQ ID NO: 294052 - DNA, 25 bp, Artificial
  Probe
atcatgccaataagaagccaataat

SEQ ID NO: 294053 - DNA, 25 bp, Artificial
  Probe
ttcttatgtacctgtgttgggaatc

SEQ ID NO: 294054 - DNA, 25 bp, Artificial
  Probe
catgccaataagaagccaataatcc

SEQ ID NO: 294055 - DNA, 25 bp, Artificial
  Probe
ataagaagccaataatccccaaaat

SEQ ID NO: 294056 - DNA, 25 bp, Artificial
  Probe
tcatgccaataagaagccaataatc

SEQ ID NO: 294057 - DNA, 25 bp, Artificial
  Probe
ataatccccaaaatgatacaataaa

SEQ ID NO: 294058 - DNA, 25 bp, Artificial
  Probe
gccaataatccccaaaatgatacaa

SEQ ID NO: 294059 - DNA, 25 bp, Artificial
  Probe
atccaagacttcattcttatgtacc

SEQ ID NO: 294060 - DNA, 25 bp, Artificial
  Probe
agacttcattcttatgtacctgtgt

SEQ ID NO: 294061 - DNA, 25 bp, Artificial
  Probe
ccaagacttcattcttatgtacctg

SEQ ID NO: 294062 - DNA, 25 bp, Artificial
  Probe
attcttatgtacctgtgttgggaat

SEQ ID NO: 294063 - DNA, 25 bp, Artificial
  Probe
aagacttcattcttatgtacctgtg

SEQ ID NO: 294064 - DNA, 25 bp, Artificial
  Probe
agccaataatccccaaaatgataca

SEQ ID NO: 294065 - DNA, 25 bp, Artificial
  Probe
ttcattcttatgtacctgtgttggg

SEQ ID NO: 294066 - DNA, 25 bp, Artificial
  Probe
taatccccaaaatgatacaataaat

SEQ ID NO: 294067 - DNA, 25 bp, Artificial
  Probe
aatccccaaaatgatacaataaatt

SEQ ID NO: 294068 - DNA, 25 bp, Artificial
  Probe
cattcttatgtacctgtgttgggaa

SEQ ID NO: 294069 - DNA, 25 bp, Artificial
  Probe
atgtacctgtgttgggaatcatgcc

SEQ ID NO: 294070 - DNA, 25 bp, Artificial
  Probe
tccaagacttcattcttatgtacct

SEQ ID NO: 294071 - DNA, 25 bp, Artificial
  Probe
ttgggaatcatgccaataagaagcc

SEQ ID NO: 294072 - DNA, 25 bp, Artificial
  Probe
tcattcttatgtacctgtgttggga

SEQ ID NO: 294073 - DNA, 25 bp, Artificial
  Probe
tccccaaaatgatacaataaatttc

SEQ ID NO: 294074 - DNA, 25 bp, Artificial
  Probe
atccccaaaatgatacaataaattt

SEQ ID NO: 294075 - DNA, 25 bp, Artificial
  Probe
gtacctgtgttgggaatcatgccaa

SEQ ID NO: 294076 - DNA, 25 bp, Artificial
  Probe
tacctgtgttgggaatcatgccaat

SEQ ID NO: 294077 - DNA, 25 bp, Artificial
  Probe
cttcattcttatgtacctgtgttgg

SEQ ID NO: 294078 - DNA, 25 bp, Artificial
  Probe
gaatcatgccaataagaagccaata

SEQ ID NO: 294079 - DNA, 25 bp, Artificial
  Probe
acctgtgttgggaatcatgccaata

SEQ ID NO: 294080 - DNA, 25 bp, Artificial
  Probe
aatccaagacttcattcttatgtac

SEQ ID NO: 294081 - DNA, 25 bp, Artificial
  Probe
ggaatcatgccaataagaagccaat

SEQ ID NO: 294082 - DNA, 25 bp, Artificial
  Probe
tatgtacctgtgttgggaatcatgc

SEQ ID NO: 294083 - DNA, 25 bp, Artificial
  Probe
ttatgtacctgtgttgggaatcatg

SEQ ID NO: 294084 - DNA, 25 bp, Artificial
  Probe
atgccaataagaagccaataatccc

SEQ ID NO: 294085 - DNA, 25 bp, Artificial
  Probe
agaagccaataatccccaaaatgat

SEQ ID NO: 294086 - DNA, 25 bp, Artificial
  Probe
agaatccaagacttcattcttatgt

SEQ ID NO: 294087 - DNA, 25 bp, Artificial
  Probe
aagaagccaataatccccaaaatga

SEQ ID NO: 294088 - DNA, 25 bp, Artificial
  Probe
aataatccccaaaatgatacaataa

SEQ ID NO: 294089 - DNA, 25 bp, Artificial
  Probe
caataatccccaaaatgatacaata

SEQ ID NO: 294090 - DNA, 25 bp, Artificial
  Probe
tgtacctgtgttgggaatcatgcca

SEQ ID NO: 294091 - DNA, 25 bp, Artificial
  Probe
acttcattcttatgtacctgtgttg

SEQ ID NO: 294092 - DNA, 25 bp, Artificial
  Probe
aatcatgccaataagaagccaataa

SEQ ID NO: 294093 - DNA, 25 bp, Artificial
  Probe
gacttcattcttatgtacctgtgtt

SEQ ID NO: 294094 - DNA, 25 bp, Artificial
  Probe
caagacttcattcttatgtacctgt

SEQ ID NO: 294095 - DNA, 25 bp, Artificial
  Probe
taagaagccaataatccccaaaatg

SEQ ID NO: 294096 - DNA, 25 bp, Artificial
  Probe
aagccaataatccccaaaatgatac

SEQ ID NO: 294097 - DNA, 25 bp, Artificial
  Probe
gaatccaagacttcattcttatgta

SEQ ID NO: 294098 - DNA, 25 bp, Artificial
  Probe
ggcctctactacaagctgcaccagg

SEQ ID NO: 294099 - DNA, 25 bp, Artificial
  Probe
ctttgaattccctatgtagtccaga

SEQ ID NO: 294100 - DNA, 25 bp, Artificial
  Probe
tctaccagggcctgggacctgtggt

SEQ ID NO: 294101 - DNA, 25 bp, Artificial
  Probe
caccaccagcactagcgtagtgtct

SEQ ID NO: 294102 - DNA, 25 bp, Artificial
  Probe
gccccaggcttgacactgggcactg

SEQ ID NO: 294103 - DNA, 25 bp, Artificial
  Probe
aggacaggtcactacctgtgcaatg

SEQ ID NO: 294104 - DNA, 25 bp, Artificial
  Probe
cctgtggtgctgtcagggcctgtca

SEQ ID NO: 294105 - DNA, 25 bp, Artificial
  Probe
acctgtggtgctgtcagggcctgtc

SEQ ID NO: 294106 - DNA, 25 bp, Artificial
  Probe
tgtcaccagcagtgcttatggggga

SEQ ID NO: 294107 - DNA, 25 bp, Artificial
  Probe
ctggacctctgctgggatcgcctac

SEQ ID NO: 294108 - DNA, 25 bp, Artificial
  Probe
gctgaaggaccagctggtggattca

SEQ ID NO: 294109 - DNA, 25 bp, Artificial
  Probe
ttcccccaagtttcatggaagccta

SEQ ID NO: 294110 - DNA, 25 bp, Artificial
  Probe
tgtgaactgtggagcaacggctact

SEQ ID NO: 294111 - DNA, 25 bp, Artificial
  Probe
ccttgaagacggagcggctgagtcc

SEQ ID NO: 294112 - DNA, 25 bp, Artificial
  Probe
cgcaaggcatctggaaaagggaaaa

SEQ ID NO: 294113 - DNA, 25 bp, Artificial
  Probe
cttgtatcacaagatgaatggtcag

SEQ ID NO: 294114 - DNA, 25 bp, Artificial
  Probe
gggagctgactttcccagtcctttc

SEQ ID NO: 294115 - DNA, 25 bp, Artificial
  Probe
ttggctccttgtgaggccagagagt

SEQ ID NO: 294116 - DNA, 25 bp, Artificial
  Probe
aagatggaatccagacgaggaaccg

SEQ ID NO: 294117 - DNA, 25 bp, Artificial
  Probe
caggacaggtcactacctgtgcaat

SEQ ID NO: 294118 - DNA, 25 bp, Artificial
  Probe
accagctggtggattcatggtggta

SEQ ID NO: 294119 - DNA, 25 bp, Artificial
  Probe
agaggtggccccaggcttgacactg

SEQ ID NO: 294120 - DNA, 25 bp, Artificial
  Probe
tcagttcttgaaggtacacaaaatg

SEQ ID NO: 294121 - DNA, 25 bp, Artificial
  Probe
gctgtcagggcctgtcagccatctt

SEQ ID NO: 294122 - DNA, 25 bp, Artificial
  Probe
tgtctttccctggacctctgctggg

SEQ ID NO: 294123 - DNA, 25 bp, Artificial
  Probe
tgcccatctctaccagggcctggga

SEQ ID NO: 294124 - DNA, 25 bp, Artificial
  Probe
gagtccagacctcctgaccctgggg

SEQ ID NO: 294125 - DNA, 25 bp, Artificial
  Probe
tggggactgcactgcctacatcact

SEQ ID NO: 294126 - DNA, 25 bp, Artificial
  Probe
ggggagctgactttcccagtccttt

SEQ ID NO: 294127 - DNA, 25 bp, Artificial
  Probe
actccctgtcaccagcagtgcttat

SEQ ID NO: 294128 - DNA, 25 bp, Artificial
  Probe
aatgccagtggagacccggtgtgca

SEQ ID NO: 294129 - DNA, 25 bp, Artificial
  Probe
tccggcccaagaagcgaatgattgt

SEQ ID NO: 294130 - DNA, 25 bp, Artificial
  Probe
tacaagctgcaccaggtgaaccgcc

SEQ ID NO: 294131 - DNA, 25 bp, Artificial
  Probe
tgtagctaagggtgaccccaaattt

SEQ ID NO: 294132 - DNA, 25 bp, Artificial
  Probe
ctgaccatgaggaaagatggaatcc

SEQ ID NO: 294133 - DNA, 25 bp, Artificial
  Probe
ctgaccctggggactgcactgccta

SEQ ID NO: 294134 - DNA, 25 bp, Artificial
  Probe
tggagcaacggctactccactgtgg

SEQ ID NO: 294135 - DNA, 25 bp, Artificial
  Probe
gccatcttatgtctttccctggacc

SEQ ID NO: 294136 - DNA, 25 bp, Artificial
  Probe
atgccagtggagacccggtgtgcaa

SEQ ID NO: 294137 - DNA, 25 bp, Artificial
  Probe
actgggagccctctcagctcagcag

SEQ ID NO: 294138 - DNA, 25 bp, Artificial
  Probe
cgcccactgaccatgaggaaagatg

SEQ ID NO: 294139 - DNA, 25 bp, Artificial
  Probe
tgcttgtggcttgtatcacaagatg

SEQ ID NO: 294140 - DNA, 25 bp, Artificial
  Probe
ctacctgtgcaatgcttgtggcttg

SEQ ID NO: 294141 - DNA, 25 bp, Artificial
  Probe
cgaatgattgtcagcaagcgagcag

SEQ ID NO: 294142 - DNA, 25 bp, Artificial
  Probe
ggcacccaatgcactaactgtcaaa

SEQ ID NO: 294143 - DNA, 25 bp, Artificial
  Probe
ctcaggctgcctgtgaactatgtag

SEQ ID NO: 294144 - DNA, 25 bp, Artificial
  Probe
gtaagcgaagagcagcgcagacttc

SEQ ID NO: 294145 - DNA, 25 bp, Artificial
  Probe
cccgtgattttcctgtgaatcataa

SEQ ID NO: 294146 - DNA, 25 bp, Artificial
  Probe
gattttcctgtgaatcataactaat

SEQ ID NO: 294147 - DNA, 25 bp, Artificial
  Probe
cgtgattttcctgtgaatcataact

SEQ ID NO: 294148 - DNA, 25 bp, Artificial
  Probe
ttcctgtgaatcataactaatgtaa

SEQ ID NO: 294149 - DNA, 25 bp, Artificial
  Probe
aagcgaagagcagcgcagacttcct

SEQ ID NO: 294150 - DNA, 25 bp, Artificial
  Probe
tcctacaggaaagttcctgtaggaa

SEQ ID NO: 294151 - DNA, 25 bp, Artificial
  Probe
caccccccgtgattttcctgtgaat

SEQ ID NO: 294152 - DNA, 25 bp, Artificial
  Probe
taagcgaagagcagcgcagacttcc

SEQ ID NO: 294153 - DNA, 25 bp, Artificial
  Probe
cagacttcctacaggaaagttcctg

SEQ ID NO: 294154 - DNA, 25 bp, Artificial
  Probe
ccccgtgattttcctgtgaatcata

SEQ ID NO: 294155 - DNA, 25 bp, Artificial
  Probe
aatgtaaatattgctgtgtgacaag

SEQ ID NO: 294156 - DNA, 25 bp, Artificial
  Probe
tgtaagcgaagagcagcgcagactt

SEQ ID NO: 294157 - DNA, 25 bp, Artificial
  Probe
aaatattgctgtgtgacaagacagt

SEQ ID NO: 294158 - DNA, 25 bp, Artificial
  Probe
tgattttcctgtgaatcataactaa

SEQ ID NO: 294159 - DNA, 25 bp, Artificial
  Probe
agcgcagacttcctacaggaaagtt

SEQ ID NO: 294160 - DNA, 25 bp, Artificial
  Probe
atattgctgtgtgacaagacagtgt

SEQ ID NO: 294161 - DNA, 25 bp, Artificial
  Probe
aatattgctgtgtgacaagacagtg

SEQ ID NO: 294162 - DNA, 25 bp, Artificial
  Probe
ttttcctgtgaatcataactaatgt

SEQ ID NO: 294163 - DNA, 25 bp, Artificial
  Probe
cgcagacttcctacaggaaagttcc

SEQ ID NO: 294164 - DNA, 25 bp, Artificial
  Probe
gcgaagagcagcgcagacttcctac

SEQ ID NO: 294165 - DNA, 25 bp, Artificial
  Probe
agcagcgcagacttcctacaggaaa

SEQ ID NO: 294166 - DNA, 25 bp, Artificial
  Probe
tttcctgtgaatcataactaatgta

SEQ ID NO: 294167 - DNA, 25 bp, Artificial
  Probe
atgtaaatattgctgtgtgacaaga

SEQ ID NO: 294168 - DNA, 25 bp, Artificial
  Probe
aagagcagcgcagacttcctacagg

SEQ ID NO: 294169 - DNA, 25 bp, Artificial
  Probe
gtaaatattgctgtgtgacaagaca

SEQ ID NO: 294170 - DNA, 25 bp, Artificial
  Probe
tgctgtgtgacaagacagtgttttt

SEQ ID NO: 294171 - DNA, 25 bp, Artificial
  Probe
taaatattgctgtgtgacaagacag

SEQ ID NO: 294172 - DNA, 25 bp, Artificial
  Probe
ccgtgattttcctgtgaatcataac

SEQ ID NO: 294173 - DNA, 25 bp, Artificial
  Probe
gcagacttcctacaggaaagttcct

SEQ ID NO: 294174 - DNA, 25 bp, Artificial
  Probe
attttcctgtgaatcataactaatg

SEQ ID NO: 294175 - DNA, 25 bp, Artificial
  Probe
cgaagagcagcgcagacttcctaca

SEQ ID NO: 294176 - DNA, 25 bp, Artificial
  Probe
gaagagcagcgcagacttcctacag

SEQ ID NO: 294177 - DNA, 25 bp, Artificial
  Probe
ttgctgtgtgacaagacagtgtttt

SEQ ID NO: 294178 - DNA, 25 bp, Artificial
  Probe
gcgcagacttcctacaggaaagttc

SEQ ID NO: 294179 - DNA, 25 bp, Artificial
  Probe
gcagcgcagacttcctacaggaaag

SEQ ID NO: 294180 - DNA, 25 bp, Artificial
  Probe
ccccccgtgattttcctgtgaatca

SEQ ID NO: 294181 - DNA, 25 bp, Artificial
  Probe
gacttcctacaggaaagttcctgta

SEQ ID NO: 294182 - DNA, 25 bp, Artificial
  Probe
acttcctacaggaaagttcctgtag

SEQ ID NO: 294183 - DNA, 25 bp, Artificial
  Probe
ttcctacaggaaagttcctgtagga

SEQ ID NO: 294184 - DNA, 25 bp, Artificial
  Probe
agacttcctacaggaaagttcctgt

SEQ ID NO: 294185 - DNA, 25 bp, Artificial
  Probe
tattgctgtgtgacaagacagtgtt

SEQ ID NO: 294186 - DNA, 25 bp, Artificial
  Probe
tacaggaaagttcctgtaggaaagt

SEQ ID NO: 294187 - DNA, 25 bp, Artificial
  Probe
ctacaggaaagttcctgtaggaaag

SEQ ID NO: 294188 - DNA, 25 bp, Artificial
  Probe
cccccgtgattttcctgtgaatcat

SEQ ID NO: 294189 - DNA, 25 bp, Artificial
  Probe
gtgattttcctgtgaatcataacta

SEQ ID NO: 294190 - DNA, 25 bp, Artificial
  Probe
gcctatccccacagtgtgcactaag

SEQ ID NO: 294191 - DNA, 25 bp, Artificial
  Probe
gctgctggcgggaatcacaggcact

SEQ ID NO: 294192 - DNA, 25 bp, Artificial
  Probe
ggtctagcagccaggggcccagtca

SEQ ID NO: 294193 - DNA, 25 bp, Artificial
  Probe
ctcaggtggccaccaagcagaggag

SEQ ID NO: 294194 - DNA, 25 bp, Artificial
  Probe
agagcctcagggaagctgctcagac

SEQ ID NO: 294195 - DNA, 25 bp, Artificial
  Probe
acttcctggccttgattctgcaccg

SEQ ID NO: 294196 - DNA, 25 bp, Artificial
  Probe
gccaggagcagcagatcgaagctgc

SEQ ID NO: 294197 - DNA, 25 bp, Artificial
  Probe
tcacagagctgctggcgggaatcac

SEQ ID NO: 294198 - DNA, 25 bp, Artificial
  Probe
tccatgatcgccacgggcagcatcg

SEQ ID NO: 294199 - DNA, 25 bp, Artificial
  Probe
tccacctgtagtttgggacaggccc

SEQ ID NO: 294200 - DNA, 25 bp, Artificial
  Probe
gatgtcacagccatccacctgtagt

SEQ ID NO: 294201 - DNA, 25 bp, Artificial
  Probe
actgaagtggactgcctgcgtgcct

SEQ ID NO: 294202 - DNA, 25 bp, Artificial
  Probe
acatggccagtcagttcctcttcct

SEQ ID NO: 294203 - DNA, 25 bp, Artificial
  Probe
agtcagaccagcactcccacagatg

SEQ ID NO: 294204 - DNA, 25 bp, Artificial
  Probe
tcagggaagctgctcagacagcccc

SEQ ID NO: 294205 - DNA, 25 bp, Artificial
  Probe
tgctggcgggaatcacaggcactga

SEQ ID NO: 294206 - DNA, 25 bp, Artificial
  Probe
ggctgctgtgattgcgcacgacttc

SEQ ID NO: 294207 - DNA, 25 bp, Artificial
  Probe
catgccatatctgaagcccgagggg

SEQ ID NO: 294208 - DNA, 25 bp, Artificial
  Probe
caaacaggtagaacccacacaccag

SEQ ID NO: 294209 - DNA, 25 bp, Artificial
  Probe
agcttggctgtcctgggccatgatg

SEQ ID NO: 294210 - DNA, 25 bp, Artificial
  Probe
gcactaaggggctgcttggtcatga

SEQ ID NO: 294211 - DNA, 25 bp, Artificial
  Probe
agatgagctcacagagctgctggcg

SEQ ID NO: 294212 - DNA, 25 bp, Artificial
  Probe
ggccatgatggtcagagagatacaa

SEQ ID NO: 294213 - DNA, 25 bp, Artificial
  Probe
ggacctggctgctgtgattgcgcac

SEQ ID NO: 294214 - DNA, 25 bp, Artificial
  Probe
cagcagatcgaagctgccctcaggg

SEQ ID NO: 294215 - DNA, 25 bp, Artificial
  Probe
tctggggcgccgatcctttcagttg

SEQ ID NO: 294216 - DNA, 25 bp, Artificial
  Probe
gctgcttggtcatgagggtgtctac

SEQ ID NO: 294217 - DNA, 25 bp, Artificial
  Probe
tcaagtgggacctggctgctgtgat

SEQ ID NO: 294218 - DNA, 25 bp, Artificial
  Probe
ctgtgattgcgcacgacttcctggc

SEQ ID NO: 294219 - DNA, 25 bp, Artificial
  Probe
acagtgtgcactaaggggctgcttg

SEQ ID NO: 294220 - DNA, 25 bp, Artificial
  Probe
gctaggcctgggtgcctgctctatg

SEQ ID NO: 294221 - DNA, 25 bp, Artificial
  Probe
cactcaaccagcttggctgtcctgg

SEQ ID NO: 294222 - DNA, 25 bp, Artificial
  Probe
ctaggaacaattcatgccatatctg

SEQ ID NO: 294223 - DNA, 25 bp, Artificial
  Probe
gacttcctggccttgattctgcacc

SEQ ID NO: 294224 - DNA, 25 bp, Artificial
  Probe
tcgaagctgccctcagggagagcct

SEQ ID NO: 294225 - DNA, 25 bp, Artificial
  Probe
aggtagaacccacacaccagcattt

SEQ ID NO: 294226 - DNA, 25 bp, Artificial
  Probe
ggaatcacaggcactgaagtggact

SEQ ID NO: 294227 - DNA, 25 bp, Artificial
  Probe
agccaggggcccagtcagaccagca

SEQ ID NO: 294228 - DNA, 25 bp, Artificial
  Probe
aggaacaattcatgccatatctgaa

SEQ ID NO: 294229 - DNA, 25 bp, Artificial
  Probe
ggtagaacccacacaccagcatttc

SEQ ID NO: 294230 - DNA, 25 bp, Artificial
  Probe
gcgtgcctgccaggagcagcagatc

SEQ ID NO: 294231 - DNA, 25 bp, Artificial
  Probe
ctgtcctgggccatgatggtcagag

SEQ ID NO: 294232 - DNA, 25 bp, Artificial
  Probe
tgccctcagggagagcctcagggaa

SEQ ID NO: 294233 - DNA, 25 bp, Artificial
  Probe
cagtgctaggcctgggtgcctgctc

SEQ ID NO: 294234 - DNA, 25 bp, Artificial
  Probe
cctcaggtggccaccaagcagagga

SEQ ID NO: 294235 - DNA, 25 bp, Artificial
  Probe
cactaaggggctgcttggtcatgag

SEQ ID NO: 294236 - DNA, 25 bp, Artificial
  Probe
catatgctttctgtagtctgctgca

SEQ ID NO: 294237 - DNA, 25 bp, Artificial
  Probe
acacactccagtgtgcatatgcttt

SEQ ID NO: 294238 - DNA, 25 bp, Artificial
  Probe
ggccatatttccaagcatgcacaaa

SEQ ID NO: 294239 - DNA, 25 bp, Artificial
  Probe
tttctgtagtctgctgcatagaaac

SEQ ID NO: 294240 - DNA, 25 bp, Artificial
  Probe
actgcttagaaacattctcatgggc

SEQ ID NO: 294241 - DNA, 25 bp, Artificial
  Probe
agcatgcacaaatacccacgtgcgt

SEQ ID NO: 294242 - DNA, 25 bp, Artificial
  Probe
attctcatgggcatatacaatggtg

SEQ ID NO: 294243 - DNA, 25 bp, Artificial
  Probe
aacgattcttagctgagaaatgacg

SEQ ID NO: 294244 - DNA, 25 bp, Artificial
  Probe
tctgtagtctgctgcatagaaacaa

SEQ ID NO: 294245 - DNA, 25 bp, Artificial
  Probe
tgctttctgtagtctgctgcataga

SEQ ID NO: 294246 - DNA, 25 bp, Artificial
  Probe
catatacaatggtggccatatttcc

SEQ ID NO: 294247 - DNA, 25 bp, Artificial
  Probe
agtctgctgcatagaaacaaacgat

SEQ ID NO: 294248 - DNA, 25 bp, Artificial
  Probe
ttcttagctgagaaatgacgaggct

SEQ ID NO: 294249 - DNA, 25 bp, Artificial
  Probe
gaaacaaacgattcttagctgagaa

SEQ ID NO: 294250 - DNA, 25 bp, Artificial
  Probe
tgcttagaaacattctcatgggcat

SEQ ID NO: 294251 - DNA, 25 bp, Artificial
  Probe
atgctttctgtagtctgctgcatag

SEQ ID NO: 294252 - DNA, 25 bp, Artificial
  Probe
caaacgattcttagctgagaaatga

SEQ ID NO: 294253 - DNA, 25 bp, Artificial
  Probe
gcacaaatacccacgtgcgtacaca

SEQ ID NO: 294254 - DNA, 25 bp, Artificial
  Probe
aatggtggccatatttccaagcatg

SEQ ID NO: 294255 - DNA, 25 bp, Artificial
  Probe
tgtagtctgctgcatagaaacaaac

SEQ ID NO: 294256 - DNA, 25 bp, Artificial
  Probe
gtctgctgcatagaaacaaacgatt

SEQ ID NO: 294257 - DNA, 25 bp, Artificial
  Probe
agtgtgcatatgctttctgtagtct

SEQ ID NO: 294258 - DNA, 25 bp, Artificial
  Probe
tagaaacaaacgattcttagctgag

SEQ ID NO: 294259 - DNA, 25 bp, Artificial
  Probe
gcatgcacaaatacccacgtgcgta

SEQ ID NO: 294260 - DNA, 25 bp, Artificial
  Probe
catagaaacaaacgattcttagctg

SEQ ID NO: 294261 - DNA, 25 bp, Artificial
  Probe
gaaacattctcatgggcatatacaa

SEQ ID NO: 294262 - DNA, 25 bp, Artificial
  Probe
ttctcatgggcatatacaatggtgg

SEQ ID NO: 294263 - DNA, 25 bp, Artificial
  Probe
gcatatacaatggtggccatatttc

SEQ ID NO: 294264 - DNA, 25 bp, Artificial
  Probe
caagcatgcacaaatacccacgtgc

SEQ ID NO: 294265 - DNA, 25 bp, Artificial
  Probe
acactccagtgtgcatatgctttct

SEQ ID NO: 294266 - DNA, 25 bp, Artificial
  Probe
cactccagtgtgcatatgctttctg

SEQ ID NO: 294267 - DNA, 25 bp, Artificial
  Probe
cacacactccagtgtgcatatgctt

SEQ ID NO: 294268 - DNA, 25 bp, Artificial
  Probe
gtgcatatgctttctgtagtctgct

SEQ ID NO: 294269 - DNA, 25 bp, Artificial
  Probe
ccagtgtgcatatgctttctgtagt

SEQ ID NO: 294270 - DNA, 25 bp, Artificial
  Probe
tgcatatgctttctgtagtctgctg

SEQ ID NO: 294271 - DNA, 25 bp, Artificial
  Probe
ccaagcatgcacaaatacccacgtg

SEQ ID NO: 294272 - DNA, 25 bp, Artificial
  Probe
cgattcttagctgagaaatgacgag

SEQ ID NO: 294273 - DNA, 25 bp, Artificial
  Probe
attcttagctgagaaatgacgaggc

SEQ ID NO: 294274 - DNA, 25 bp, Artificial
  Probe
tagaaacattctcatgggcatatac

SEQ ID NO: 294275 - DNA, 25 bp, Artificial
  Probe
ttagaaacattctcatgggcatata

SEQ ID NO: 294276 - DNA, 25 bp, Artificial
  Probe
ctccagtgtgcatatgctttctgta

SEQ ID NO: 294277 - DNA, 25 bp, Artificial
  Probe
atggtggccatatttccaagcatgc

SEQ ID NO: 294278 - DNA, 25 bp, Artificial
  Probe
acaatggtggccatatttccaagca

SEQ ID NO: 294279 - DNA, 25 bp, Artificial
  Probe
ctgcttagaaacattctcatgggca

SEQ ID NO: 294280 - DNA, 25 bp, Artificial
  Probe
acacacacactccagtgtgcatatg

SEQ ID NO: 294281 - DNA, 25 bp, Artificial
  Probe
ctcatgggcatatacaatggtggcc

SEQ ID NO: 294282 - DNA, 25 bp, Artificial
  Probe
ccatttcctgtattccatggcagca

SEQ ID NO: 294283 - DNA, 25 bp, Artificial
  Probe
ctgctgtcccgaggaacacagacca

SEQ ID NO: 294284 - DNA, 25 bp, Artificial
  Probe
atgccaccgaggatgagataatggg

SEQ ID NO: 294285 - DNA, 25 bp, Artificial
  Probe
tgagaccaagacaagtgtcgttgct

SEQ ID NO: 294286 - DNA, 25 bp, Artificial
  Probe
gaacacagaccatcagcaacaagtc

SEQ ID NO: 294287 - DNA, 25 bp, Artificial
  Probe
aacctgaatgccaccgaggatgaga

SEQ ID NO: 294288 - DNA, 25 bp, Artificial
  Probe
caggaagtcccctgctgtcccgagg

SEQ ID NO: 294289 - DNA, 25 bp, Artificial
  Probe
gaagtcccctgctgtcccgaggaac

SEQ ID NO: 294290 - DNA, 25 bp, Artificial
  Probe
gcaaagtgcatctgagccccacagc

SEQ ID NO: 294291 - DNA, 25 bp, Artificial
  Probe
gtctgctttctgtgttgtgctgtga

SEQ ID NO: 294292 - DNA, 25 bp, Artificial
  Probe
cagcaaagtgcatctgagccccaca

SEQ ID NO: 294293 - DNA, 25 bp, Artificial
  Probe
tctacaaaggagacccagcagacgc

SEQ ID NO: 294294 - DNA, 25 bp, Artificial
  Probe
tccacagatgcagtcaataaccagc

SEQ ID NO: 294295 - DNA, 25 bp, Artificial
  Probe
gagcccagtggcagggcgaaactcc

SEQ ID NO: 294296 - DNA, 25 bp, Artificial
  Probe
gaccatcagcaacaagtctacaaag

SEQ ID NO: 294297 - DNA, 25 bp, Artificial
  Probe
cccgctgatgggaaggaagtatgta

SEQ ID NO: 294298 - DNA, 25 bp, Artificial
  Probe
caacaagtctacaaaggagacccag

SEQ ID NO: 294299 - DNA, 25 bp, Artificial
  Probe
gcagtcaataaccagccatcaccag

SEQ ID NO: 294300 - DNA, 25 bp, Artificial
  Probe
gatgaccacatactttctgatccag

SEQ ID NO: 294301 - DNA, 25 bp, Artificial
  Probe
tactttctgatccagaacctgaatg

SEQ ID NO: 294302 - DNA, 25 bp, Artificial
  Probe
ggaaagatgaccacatactttctga

SEQ ID NO: 294303 - DNA, 25 bp, Artificial
  Probe
ttcccagcaaagtgcatctgagccc

SEQ ID NO: 294304 - DNA, 25 bp, Artificial
  Probe
caataaccagccatcaccagatgag

SEQ ID NO: 294305 - DNA, 25 bp, Artificial
  Probe
tgaatgccaccgaggatgagataat

SEQ ID NO: 294306 - DNA, 25 bp, Artificial
  Probe
cagatgcagtcaataaccagccatc

SEQ ID NO: 294307 - DNA, 25 bp, Artificial
  Probe
gaagtcacacttgctgggagcccag

SEQ ID NO: 294308 - DNA, 25 bp, Artificial
  Probe
gaaactccacagatgcagtcaataa

SEQ ID NO: 294309 - DNA, 25 bp, Artificial
  Probe
tgtttccatatctcccttggggccc

SEQ ID NO: 294310 - DNA, 25 bp, Artificial
  Probe
acacttgctgggagcccagtggcag

SEQ ID NO: 294311 - DNA, 25 bp, Artificial
  Probe
caccagatgagaccaagacaagtgt

SEQ ID NO: 294312 - DNA, 25 bp, Artificial
  Probe
ctaatgaagtcacacttgctgggag

SEQ ID NO: 294313 - DNA, 25 bp, Artificial
  Probe
tccatggcagcaaagggaattaatt

SEQ ID NO: 294314 - DNA, 25 bp, Artificial
  Probe
tgatcctatgggatccatttcctgt

SEQ ID NO: 294315 - DNA, 25 bp, Artificial
  Probe
agcctctaggatggaaagtcacggg

SEQ ID NO: 294316 - DNA, 25 bp, Artificial
  Probe
caagtcaggaagtcccctgctgtcc

SEQ ID NO: 294317 - DNA, 25 bp, Artificial
  Probe
gtattccatggcagcaaagggaatt

SEQ ID NO: 294318 - DNA, 25 bp, Artificial
  Probe
ctgtgttgtgctgtgatcacgagaa

SEQ ID NO: 294319 - DNA, 25 bp, Artificial
  Probe
aaagtcacgggcttcccagcaaagt

SEQ ID NO: 294320 - DNA, 25 bp, Artificial
  Probe
tactcccggaaaccaagtcaggaag

SEQ ID NO: 294321 - DNA, 25 bp, Artificial
  Probe
tgctagtggccctgtgctgtctgct

SEQ ID NO: 294322 - DNA, 25 bp, Artificial
  Probe
gaaaccaagtcaggaagtcccctgc

SEQ ID NO: 294323 - DNA, 25 bp, Artificial
  Probe
tgtcgttgctagtggccctgtgctg

SEQ ID NO: 294324 - DNA, 25 bp, Artificial
  Probe
tggcagggcgaaactccacagatgc

SEQ ID NO: 294325 - DNA, 25 bp, Artificial
  Probe
aaaggagacccagcagacgcttcta

SEQ ID NO: 294326 - DNA, 25 bp, Artificial
  Probe
cctgtgctgtctgctttctgtgttg

SEQ ID NO: 294327 - DNA, 25 bp, Artificial
  Probe
atgtactcccggaaaccaagtcagg

SEQ ID NO: 294328 - DNA, 25 bp, Artificial
  Probe
gcggtggaccctcagctcagggtca

SEQ ID NO: 294329 - DNA, 25 bp, Artificial
  Probe
ctgctgctgccaaacagggctgagg

SEQ ID NO: 294330 - DNA, 25 bp, Artificial
  Probe
ctagcacaccgcagggcagtgtact

SEQ ID NO: 294331 - DNA, 25 bp, Artificial
  Probe
atgaaagcagcagtttccatcatct

SEQ ID NO: 294332 - DNA, 25 bp, Artificial
  Probe
tgaccatcaagatgaaagcagcagt

SEQ ID NO: 294333 - DNA, 25 bp, Artificial
  Probe
tgctgctgccaaacagggctgaggc

SEQ ID NO: 294334 - DNA, 25 bp, Artificial
  Probe
gtgctttctgtcattacactgtata

SEQ ID NO: 294335 - DNA, 25 bp, Artificial
  Probe
taagcgtttaagtgctttctgtcat

SEQ ID NO: 294336 - DNA, 25 bp, Artificial
  Probe
cgtcgctgtttgattggcttttaga

SEQ ID NO: 294337 - DNA, 25 bp, Artificial
  Probe
ttattttcagtactctgcaaagaag

SEQ ID NO: 294338 - DNA, 25 bp, Artificial
  Probe
cagacagtgatggaccggatgatag

SEQ ID NO: 294339 - DNA, 25 bp, Artificial
  Probe
tgttatttgctaatactgccaattg

SEQ ID NO: 294340 - DNA, 25 bp, Artificial
  Probe
tggaaagactctgctgatcgtgaac

SEQ ID NO: 294341 - DNA, 25 bp, Artificial
  Probe
ttttacttcccagttcagctattgg

SEQ ID NO: 294342 - DNA, 25 bp, Artificial
  Probe
tcttagtgttggtgaggacagcacg

SEQ ID NO: 294343 - DNA, 25 bp, Artificial
  Probe
tttaagctcgtacatactgcattag

SEQ ID NO: 294344 - DNA, 25 bp, Artificial
  Probe
cgcagggcagtgtactttagtgctt

SEQ ID NO: 294345 - DNA, 25 bp, Artificial
  Probe
tcctttccaacatcagacagtgatg

SEQ ID NO: 294346 - DNA, 25 bp, Artificial
  Probe
gattcacatagtgctgctgctgctg

SEQ ID NO: 294347 - DNA, 25 bp, Artificial
  Probe
cagtagctggagcagtcttggttta

SEQ ID NO: 294348 - DNA, 25 bp, Artificial
  Probe
tcgtgaacattgacgtggagcctgg

SEQ ID NO: 294349 - DNA, 25 bp, Artificial
  Probe
ttcagtggctcattcctcggaggcg

SEQ ID NO: 294350 - DNA, 25 bp, Artificial
  Probe
tcgtacatactgcattagtgactta

SEQ ID NO: 294351 - DNA, 25 bp, Artificial
  Probe
catctcagtgaaagcagtaatggta

SEQ ID NO: 294352 - DNA, 25 bp, Artificial
  Probe
ctctgcaaagaaggagtttgtctta

SEQ ID NO: 294353 - DNA, 25 bp, Artificial
  Probe
tgcagccgagtggaaagactctgct

SEQ ID NO: 294354 - DNA, 25 bp, Artificial
  Probe
ctttcaaagcagttacaggagagag

SEQ ID NO: 294355 - DNA, 25 bp, Artificial
  Probe
cacccgatgggcattcattgtctga

SEQ ID NO: 294356 - DNA, 25 bp, Artificial
  Probe
ccatcaagtgatgttatttgctaat

SEQ ID NO: 294357 - DNA, 25 bp, Artificial
  Probe
gtagattccccaatctttaagctcg

SEQ ID NO: 294358 - DNA, 25 bp, Artificial
  Probe
ttagaaaatgcctagcacaccgcag

SEQ ID NO: 294359 - DNA, 25 bp, Artificial
  Probe
gacagcacgggtagctggtccaact

SEQ ID NO: 294360 - DNA, 25 bp, Artificial
  Probe
aagtggtggccaaggcctcaagcga

SEQ ID NO: 294361 - DNA, 25 bp, Artificial
  Probe
tgaaatactacgaagtggtggccaa

SEQ ID NO: 294362 - DNA, 25 bp, Artificial
  Probe
aatggtaacagcagtagctggagca

SEQ ID NO: 294363 - DNA, 25 bp, Artificial
  Probe
tatgtgttcccctggctttccatca

SEQ ID NO: 294364 - DNA, 25 bp, Artificial
  Probe
ggtttgcagccgagtggaaagactc

SEQ ID NO: 294365 - DNA, 25 bp, Artificial
  Probe
tgtgaacaccgttatgtgttcccct

SEQ ID NO: 294366 - DNA, 25 bp, Artificial
  Probe
cctgcaggctgtgatgaaatactac

SEQ ID NO: 294367 - DNA, 25 bp, Artificial
  Probe
caacttaagttttgaggatgaccat

SEQ ID NO: 294368 - DNA, 25 bp, Artificial
  Probe
gcgatgtcctgcaggctgtgatgaa

SEQ ID NO: 294369 - DNA, 25 bp, Artificial
  Probe
ctggcctggcccacgtgatcacttg

SEQ ID NO: 294370 - DNA, 25 bp, Artificial
  Probe
aggagtttgtcttactttcaaagca

SEQ ID NO: 294371 - DNA, 25 bp, Artificial
  Probe
cctttgaaaacaagtggtgtctaat

SEQ ID NO: 294372 - DNA, 25 bp, Artificial
  Probe
tgaggatgaccatcaagatgaaagc

SEQ ID NO: 294373 - DNA, 25 bp, Artificial
  Probe
gttttacttcccagttcagctattg

SEQ ID NO: 294374 - DNA, 25 bp, Artificial
  Probe
tagggtccttgctcccagtatcttc

SEQ ID NO: 294375 - DNA, 25 bp, Artificial
  Probe
tacactcagcctgaggcccagctgg

SEQ ID NO: 294376 - DNA, 25 bp, Artificial
  Probe
gtgtgtcacttcaggctctgtgggc

SEQ ID NO: 294377 - DNA, 25 bp, Artificial
  Probe
tccatggggtgaagccacagtcggt

SEQ ID NO: 294378 - DNA, 25 bp, Artificial
  Probe
ctaccctaggaaggtgcaacacagg

SEQ ID NO: 294379 - DNA, 25 bp, Artificial
  Probe
agtatcttcctactgggaagaggag

SEQ ID NO: 294380 - DNA, 25 bp, Artificial
  Probe
gtgggtgtgtcacttcaggctctgt

SEQ ID NO: 294381 - DNA, 25 bp, Artificial
  Probe
tgtgggctacactcagcctgaggcc

SEQ ID NO: 294382 - DNA, 25 bp, Artificial
  Probe
cttcctactgggaagaggagcaacc

SEQ ID NO: 294383 - DNA, 25 bp, Artificial
  Probe
tgggtgtgtcacttcaggctctgtg

SEQ ID NO: 294384 - DNA, 25 bp, Artificial
  Probe
taattattgtgatttcctgtggccc

SEQ ID NO: 294385 - DNA, 25 bp, Artificial
  Probe
accctaggaaggtgcaacacaggga

SEQ ID NO: 294386 - DNA, 25 bp, Artificial
  Probe
tcccagtatcttcctactgggaaga

SEQ ID NO: 294387 - DNA, 25 bp, Artificial
  Probe
ttattgtgatttcctgtggccccag

SEQ ID NO: 294388 - DNA, 25 bp, Artificial
  Probe
gcaacacagggatactacttgaact

SEQ ID NO: 294389 - DNA, 25 bp, Artificial
  Probe
aattattgtgatttcctgtggcccc

SEQ ID NO: 294390 - DNA, 25 bp, Artificial
  Probe
cctccatggggtgaagccacagtcg

SEQ ID NO: 294391 - DNA, 25 bp, Artificial
  Probe
aaggtgcaacacagggatactactt

SEQ ID NO: 294392 - DNA, 25 bp, Artificial
  Probe
cctaccctaggaaggtgcaacacag

SEQ ID NO: 294393 - DNA, 25 bp, Artificial
  Probe
tattgtgatttcctgtggccccagc

SEQ ID NO: 294394 - DNA, 25 bp, Artificial
  Probe
cccagtatcttcctactgggaagag

SEQ ID NO: 294395 - DNA, 25 bp, Artificial
  Probe
ccctccatggggtgaagccacagtc

SEQ ID NO: 294396 - DNA, 25 bp, Artificial
  Probe
gtgggctacactcagcctgaggccc

SEQ ID NO: 294397 - DNA, 25 bp, Artificial
  Probe
attattgtgatttcctgtggcccca

SEQ ID NO: 294398 - DNA, 25 bp, Artificial
  Probe
gtatcttcctactgggaagaggagc

SEQ ID NO: 294399 - DNA, 25 bp, Artificial
  Probe
taccctaggaaggtgcaacacaggg

SEQ ID NO: 294400 - DNA, 25 bp, Artificial
  Probe
gctctgtgggctacactcagcctga

SEQ ID NO: 294401 - DNA, 25 bp, Artificial
  Probe
tcctactgggaagaggagcaaccct

SEQ ID NO: 294402 - DNA, 25 bp, Artificial
  Probe
cttcaggctctgtgggctacactca

SEQ ID NO: 294403 - DNA, 25 bp, Artificial
  Probe
agggatactacttgaactttcctat

SEQ ID NO: 294404 - DNA, 25 bp, Artificial
  Probe
gtcacttcaggctctgtgggctaca

SEQ ID NO: 294405 - DNA, 25 bp, Artificial
  Probe
cagtatcttcctactgggaagagga

SEQ ID NO: 294406 - DNA, 25 bp, Artificial
  Probe
aacacagggatactacttgaacttt

SEQ ID NO: 294407 - DNA, 25 bp, Artificial
  Probe
gctcccagtatcttcctactgggaa

SEQ ID NO: 294408 - DNA, 25 bp, Artificial
  Probe
caacacagggatactacttgaactt

SEQ ID NO: 294409 - DNA, 25 bp, Artificial
  Probe
tcccatgccacagagggacccgaat

SEQ ID NO: 294410 - DNA, 25 bp, Artificial
  Probe
tcatagctcccatgccacagaggga

SEQ ID NO: 294411 - DNA, 25 bp, Artificial
  Probe
tgctcccagtatcttcctactggga

SEQ ID NO: 294412 - DNA, 25 bp, Artificial
  Probe
ctctgtgggctacactcagcctgag

SEQ ID NO: 294413 - DNA, 25 bp, Artificial
  Probe
ggctctgtgggctacactcagcctg

SEQ ID NO: 294414 - DNA, 25 bp, Artificial
  Probe
ctgtgggctacactcagcctgaggc

SEQ ID NO: 294415 - DNA, 25 bp, Artificial
  Probe
cctagggtccttgctcccagtatct

SEQ ID NO: 294416 - DNA, 25 bp, Artificial
  Probe
tgcaacacagggatactacttgaac

SEQ ID NO: 294417 - DNA, 25 bp, Artificial
  Probe
cttgctcccagtatcttcctactgg

SEQ ID NO: 294418 - DNA, 25 bp, Artificial
  Probe
cacttcaggctctgtgggctacact

SEQ ID NO: 294419 - DNA, 25 bp, Artificial
  Probe
acttcaggctctgtgggctacactc

SEQ ID NO: 294420 - DNA, 25 bp, Artificial
  Probe
gatctgcgcgacacaaaaaacaatc

SEQ ID NO: 294421 - DNA, 25 bp, Artificial
  Probe
tgcccctaagtggagcggtttacaa

SEQ ID NO: 294422 - DNA, 25 bp, Artificial
  Probe
ctgcgcgacacaaaaaacaatcttt

SEQ ID NO: 294423 - DNA, 25 bp, Artificial
  Probe
acattttgctgatctgcgcgacaca

SEQ ID NO: 294424 - DNA, 25 bp, Artificial
  Probe
aaacaccacaggaccacagaacaaa

SEQ ID NO: 294425 - DNA, 25 bp, Artificial
  Probe
attttgctgatctgcgcgacacaaa

SEQ ID NO: 294426 - DNA, 25 bp, Artificial
  Probe
cccaatttgcccctaagtggagcgg

SEQ ID NO: 294427 - DNA, 25 bp, Artificial
  Probe
gcgacacaaaaaacaatcttttcaa

SEQ ID NO: 294428 - DNA, 25 bp, Artificial
  Probe
aaaacaatcttttcaaacaccacag

SEQ ID NO: 294429 - DNA, 25 bp, Artificial
  Probe
ccacaggaccacagaacaaaaacaa

SEQ ID NO: 294430 - DNA, 25 bp, Artificial
  Probe
taataaacattttgctgatctgcgc

SEQ ID NO: 294431 - DNA, 25 bp, Artificial
  Probe
taaacattttgctgatctgcgcgac

SEQ ID NO: 294432 - DNA, 25 bp, Artificial
  Probe
caatttgcccctaagtggagcggtt

SEQ ID NO: 294433 - DNA, 25 bp, Artificial
  Probe
gcagaaaacacccttttgccgctgg

SEQ ID NO: 294434 - DNA, 25 bp, Artificial
  Probe
tgcgcgacacaaaaaacaatctttt

SEQ ID NO: 294435 - DNA, 25 bp, Artificial
  Probe
ttcaaacaccacaggaccacagaac

SEQ ID NO: 294436 - DNA, 25 bp, Artificial
  Probe
tacaattaactggccgcgttttaca

SEQ ID NO: 294437 - DNA, 25 bp, Artificial
  Probe
gccgctggcggataaacaaaaggcc

SEQ ID NO: 294438 - DNA, 25 bp, Artificial
  Probe
cacccttttgccgctggcggataaa

SEQ ID NO: 294439 - DNA, 25 bp, Artificial
  Probe
ttttgccgctggcggataaacaaaa

SEQ ID NO: 294440 - DNA, 25 bp, Artificial
  Probe
ccttgcagaaaacacccttttgccg

SEQ ID NO: 294441 - DNA, 25 bp, Artificial
  Probe
cccttttgccgctggcggataaaca

SEQ ID NO: 294442 - DNA, 25 bp, Artificial
  Probe
agaaaacacccttttgccgctggcg

SEQ ID NO: 294443 - DNA, 25 bp, Artificial
  Probe
aataaacattttgctgatctgcgcg

SEQ ID NO: 294444 - DNA, 25 bp, Artificial
  Probe
cttgcagaaaacacccttttgccgc

SEQ ID NO: 294445 - DNA, 25 bp, Artificial
  Probe
tggccgcgttttacaacggcgggat

SEQ ID NO: 294446 - DNA, 25 bp, Artificial
  Probe
ggccgcgttttacaacggcgggatg

SEQ ID NO: 294447 - DNA, 25 bp, Artificial
  Probe
ccttttgccgctggcggataaacaa

SEQ ID NO: 294448 - DNA, 25 bp, Artificial
  Probe
ctgatctgcgcgacacaaaaaacaa

SEQ ID NO: 294449 - DNA, 25 bp, Artificial
  Probe
cacaggaccacagaacaaaaacaaa

SEQ ID NO: 294450 - DNA, 25 bp, Artificial
  Probe
taactggccgcgttttacaacggcg

SEQ ID NO: 294451 - DNA, 25 bp, Artificial
  Probe
cagaaaacacccttttgccgctggc

SEQ ID NO: 294452 - DNA, 25 bp, Artificial
  Probe
gcccctaagtggagcggtttacaat

SEQ ID NO: 294453 - DNA, 25 bp, Artificial
  Probe
ttgcagaaaacacccttttgccgct

SEQ ID NO: 294454 - DNA, 25 bp, Artificial
  Probe
aatcttttcaaacaccacaggacca

SEQ ID NO: 294455 - DNA, 25 bp, Artificial
  Probe
aaacattttgctgatctgcgcgaca

SEQ ID NO: 294456 - DNA, 25 bp, Artificial
  Probe
aacattttgctgatctgcgcgacac

SEQ ID NO: 294457 - DNA, 25 bp, Artificial
  Probe
aataataaacattttgctgatctgc

SEQ ID NO: 294458 - DNA, 25 bp, Artificial
  Probe
gtacccaatttgcccctaagtggag

SEQ ID NO: 294459 - DNA, 25 bp, Artificial
  Probe
ttttcaaacaccacaggaccacaga

SEQ ID NO: 294460 - DNA, 25 bp, Artificial
  Probe
ttgcccctaagtggagcggtttaca

SEQ ID NO: 294461 - DNA, 25 bp, Artificial
  Probe
tcttttcaaacaccacaggaccaca

SEQ ID NO: 294462 - DNA, 25 bp, Artificial
  Probe
cattttgctgatctgcgcgacacaa

SEQ ID NO: 294463 - DNA, 25 bp, Artificial
  Probe
acaccacaggaccacagaacaaaaa

SEQ ID NO: 294464 - DNA, 25 bp, Artificial
  Probe
taagtggagcggtttacaattaact

SEQ ID NO: 294465 - DNA, 25 bp, Artificial
  Probe
ccaatttgcccctaagtggagcggt

SEQ ID NO: 294466 - DNA, 25 bp, Artificial
  Probe
gagactggacagacaacaggacagt

SEQ ID NO: 294467 - DNA, 25 bp, Artificial
  Probe
cttctgcagggcagatattggccca

SEQ ID NO: 294468 - DNA, 25 bp, Artificial
  Probe
tggcccagatttctcgtcactccaa

SEQ ID NO: 294469 - DNA, 25 bp, Artificial
  Probe
tcacaatttggtgtgaacaactttc

SEQ ID NO: 294470 - DNA, 25 bp, Artificial
  Probe
agtggcaaggccagcagccccatca

SEQ ID NO: 294471 - DNA, 25 bp, Artificial
  Probe
cctacaacaatgaagagtttcctga

SEQ ID NO: 294472 - DNA, 25 bp, Artificial
  Probe
tccagacccggacagcagagggtgt

SEQ ID NO: 294473 - DNA, 25 bp, Artificial
  Probe
gtaaccattgtccagccgtcatctt

SEQ ID NO: 294474 - DNA, 25 bp, Artificial
  Probe
cagagcaacacctacaacaatgaag

SEQ ID NO: 294475 - DNA, 25 bp, Artificial
  Probe
tcaagaaatgctgtccatgctgggg

SEQ ID NO: 294476 - DNA, 25 bp, Artificial
  Probe
ccctttttctgaatagaactattgg

SEQ ID NO: 294477 - DNA, 25 bp, Artificial
  Probe
gccaagactcgttcttcacaatttg

SEQ ID NO: 294478 - DNA, 25 bp, Artificial
  Probe
agatattggcccagatttctcgtca

SEQ ID NO: 294479 - DNA, 25 bp, Artificial
  Probe
agcaccaacttggacctctagcact

SEQ ID NO: 294480 - DNA, 25 bp, Artificial
  Probe
ggggaccagagcaacacctacaaca

SEQ ID NO: 294481 - DNA, 25 bp, Artificial
  Probe
tttcagacttcgtcctccttcagtg

SEQ ID NO: 294482 - DNA, 25 bp, Artificial
  Probe
agcaacatgttcagccaacatcagc

SEQ ID NO: 294483 - DNA, 25 bp, Artificial
  Probe
gcaacacctacaacaatgaagagtt

SEQ ID NO: 294484 - DNA, 25 bp, Artificial
  Probe
cttacccagggatcagcaccaactt

SEQ ID NO: 294485 - DNA, 25 bp, Artificial
  Probe
aagtagccagcctgaggtctttcaa

SEQ ID NO: 294486 - DNA, 25 bp, Artificial
  Probe
ggccacagtggcaaggccagcagcc

SEQ ID NO: 294487 - DNA, 25 bp, Artificial
  Probe
gtgccatgtctcttccgggtgctcc

SEQ ID NO: 294488 - DNA, 25 bp, Artificial
  Probe
agccaacatcagcacaaccaagtag

SEQ ID NO: 294489 - DNA, 25 bp, Artificial
  Probe
aaccgtggatccaactttcctcctg

SEQ ID NO: 294490 - DNA, 25 bp, Artificial
  Probe
ggacctctagcactcgcccaggttt

SEQ ID NO: 294491 - DNA, 25 bp, Artificial
  Probe
ttccagacccggacagcagagggtg

SEQ ID NO: 294492 - DNA, 25 bp, Artificial
  Probe
ttctgcagggcagatattggcccag

SEQ ID NO: 294493 - DNA, 25 bp, Artificial
  Probe
atgaagagtttcctgatctaactat

SEQ ID NO: 294494 - DNA, 25 bp, Artificial
  Probe
agctgcctactcaggctacagccaa

SEQ ID NO: 294495 - DNA, 25 bp, Artificial
  Probe
aaccaagtagccagcctgaggtctt

SEQ ID NO: 294496 - DNA, 25 bp, Artificial
  Probe
acctacaacaatgaagagtttcctg

SEQ ID NO: 294497 - DNA, 25 bp, Artificial
  Probe
ttgtccagccgtcatcttctgcagg

SEQ ID NO: 294498 - DNA, 25 bp, Artificial
  Probe
gtgaacaactttcagacttcgtcct

SEQ ID NO: 294499 - DNA, 25 bp, Artificial
  Probe
gtcctccttcagtgccatgtctctt

SEQ ID NO: 294500 - DNA, 25 bp, Artificial
  Probe
aggctacagccaagactcgttcttc

SEQ ID NO: 294501 - DNA, 25 bp, Artificial
  Probe
gtgtgaacaactttcagacttcgtc

SEQ ID NO: 294502 - DNA, 25 bp, Artificial
  Probe
gcctactcaggctacagccaagact

SEQ ID NO: 294503 - DNA, 25 bp, Artificial
  Probe
cccatcaccggtctagttccaatga

SEQ ID NO: 294504 - DNA, 25 bp, Artificial
  Probe
cctgaggtctttcaagaaatgctgt

SEQ ID NO: 294505 - DNA, 25 bp, Artificial
  Probe
ctcctgagactggacagacaacagg

SEQ ID NO: 294506 - DNA, 25 bp, Artificial
  Probe
ggacagttccagacccggacagcag

SEQ ID NO: 294507 - DNA, 25 bp, Artificial
  Probe
aggtctttcaagaaatgctgtccat

SEQ ID NO: 294508 - DNA, 25 bp, Artificial
  Probe
gagtttcctgatctaactatgtttc

SEQ ID NO: 294509 - DNA, 25 bp, Artificial
  Probe
gtcatcttctgcagggcagatattg

SEQ ID NO: 294510 - DNA, 25 bp, Artificial
  Probe
ttcgtcctccttcagtgccatgtct

SEQ ID NO: 294511 - DNA, 25 bp, Artificial
  Probe
ttggacctctagcactcgcccaggt

SEQ ID NO: 294512 - DNA, 25 bp, Artificial
  Probe
acattctatctactgatttggactg

SEQ ID NO: 294513 - DNA, 25 bp, Artificial
  Probe
ccctctgacgtttgtccttaacatg

SEQ ID NO: 294514 - DNA, 25 bp, Artificial
  Probe
gcagttcatcatgtctattgtctaa

SEQ ID NO: 294515 - DNA, 25 bp, Artificial
  Probe
ttgtccaaataaagactgagtccta

SEQ ID NO: 294516 - DNA, 25 bp, Artificial
  Probe
aagctgtctgatacttaactttcag

SEQ ID NO: 294517 - DNA, 25 bp, Artificial
  Probe
ggaaataggcccaactaccagatga

SEQ ID NO: 294518 - DNA, 25 bp, Artificial
  Probe
tcgaagcagtggtttacagatcagt

SEQ ID NO: 294519 - DNA, 25 bp, Artificial
  Probe
aagtctgtgccagatgtctccaaag

SEQ ID NO: 294520 - DNA, 25 bp, Artificial
  Probe
gtctccaaagctgtctgatacttaa

SEQ ID NO: 294521 - DNA, 25 bp, Artificial
  Probe
taaagactgagtcctagactatcag

SEQ ID NO: 294522 - DNA, 25 bp, Artificial
  Probe
ccttttccccagtgagtattagtca

SEQ ID NO: 294523 - DNA, 25 bp, Artificial
  Probe
atgtctattgtctaaaattacctgg

SEQ ID NO: 294524 - DNA, 25 bp, Artificial
  Probe
tttgctacctaaacccatctgcagg

SEQ ID NO: 294525 - DNA, 25 bp, Artificial
  Probe
caaatgccaaggaatttttgctacc

SEQ ID NO: 294526 - DNA, 25 bp, Artificial
  Probe
gtggatccactttggcttttcccat

SEQ ID NO: 294527 - DNA, 25 bp, Artificial
  Probe
gagtcctagactatcagtatcattt

SEQ ID NO: 294528 - DNA, 25 bp, Artificial
  Probe
ggtagcatcattgagactgctgtga

SEQ ID NO: 294529 - DNA, 25 bp, Artificial
  Probe
gttattaagtgtagctccagtcatt

SEQ ID NO: 294530 - DNA, 25 bp, Artificial
  Probe
gctcatctttaaagggggctaattc

SEQ ID NO: 294531 - DNA, 25 bp, Artificial
  Probe
agagaaagcagttcatcatgtctat

SEQ ID NO: 294532 - DNA, 25 bp, Artificial
  Probe
tcaaaagcactcttagtgtgaactt

SEQ ID NO: 294533 - DNA, 25 bp, Artificial
  Probe
ttgaactggtagcatcattgagact

SEQ ID NO: 294534 - DNA, 25 bp, Artificial
  Probe
gtctctaagagctcctagatttacc

SEQ ID NO: 294535 - DNA, 25 bp, Artificial
  Probe
cttcggccattgctcatctttaaag

SEQ ID NO: 294536 - DNA, 25 bp, Artificial
  Probe
aagtcagacgtcgaagcagtggttt

SEQ ID NO: 294537 - DNA, 25 bp, Artificial
  Probe
tgattctcacttccagtgtttcaag

SEQ ID NO: 294538 - DNA, 25 bp, Artificial
  Probe
ttgtctctgtaaatggaacatcctt

SEQ ID NO: 294539 - DNA, 25 bp, Artificial
  Probe
tggaaaacgtatttccttgttgtct

SEQ ID NO: 294540 - DNA, 25 bp, Artificial
  Probe
taagtgtagctccagtcattaaatt

SEQ ID NO: 294541 - DNA, 25 bp, Artificial
  Probe
ttccagtgtttcaagtggaaaacgt

SEQ ID NO: 294542 - DNA, 25 bp, Artificial
  Probe
taactttgtccaaataaagactgag

SEQ ID NO: 294543 - DNA, 25 bp, Artificial
  Probe
tgaccaaaaccttttccccagtgag

SEQ ID NO: 294544 - DNA, 25 bp, Artificial
  Probe
tcctaaatggccattcacagttgct

SEQ ID NO: 294545 - DNA, 25 bp, Artificial
  Probe
taaatgtgcatctgggcagcttaga

SEQ ID NO: 294546 - DNA, 25 bp, Artificial
  Probe
gagaactaggtctctagttaccatt

SEQ ID NO: 294547 - DNA, 25 bp, Artificial
  Probe
gaactctaggggtcctggtgatcag

SEQ ID NO: 294548 - DNA, 25 bp, Artificial
  Probe
caaagaaagcagtctctaagagctc

SEQ ID NO: 294549 - DNA, 25 bp, Artificial
  Probe
gagtcgcctagagaggaaacctttc

SEQ ID NO: 294550 - DNA, 25 bp, Artificial
  Probe
tggccttctgataaaatgttaacac

SEQ ID NO: 294551 - DNA, 25 bp, Artificial
  Probe
ccatctgcaggaaataggcccaact

SEQ ID NO: 294552 - DNA, 25 bp, Artificial
  Probe
tccccagtgagtattagtcattaga

SEQ ID NO: 294553 - DNA, 25 bp, Artificial
  Probe
aacatgcattcttcggccattgctc

SEQ ID NO: 294554 - DNA, 25 bp, Artificial
  Probe
atcacttatacactctggcatcagg

SEQ ID NO: 294555 - DNA, 25 bp, Artificial
  Probe
gggttatctacttccctctgacgtt

SEQ ID NO: 294556 - DNA, 25 bp, Artificial
  Probe
ctatctactgatttggactgaatgt

SEQ ID NO: 294557 - DNA, 25 bp, Artificial
  Probe
tcagatagagtttctttcagttgcc

SEQ ID NO: 294558 - DNA, 25 bp, Artificial
  Probe
ggttgttcctggagcctgaattaat

SEQ ID NO: 294559 - DNA, 25 bp, Artificial
  Probe
tcagagcacaccagcaccaggggcg

SEQ ID NO: 294560 - DNA, 25 bp, Artificial
  Probe
ccctgatgcataagttgtaaacaaa

SEQ ID NO: 294561 - DNA, 25 bp, Artificial
  Probe
cacaagagctaataacaccactgag

SEQ ID NO: 294562 - DNA, 25 bp, Artificial
  Probe
tttgacaacttggaaacttgattca

SEQ ID NO: 294563 - DNA, 25 bp, Artificial
  Probe
tgcaaagttctagatcaaggaacaa

SEQ ID NO: 294564 - DNA, 25 bp, Artificial
  Probe
agaacacagcacacatttttcaggc

SEQ ID NO: 294565 - DNA, 25 bp, Artificial
  Probe
atggatcaagctaccgcctcagagc

SEQ ID NO: 294566 - DNA, 25 bp, Artificial
  Probe
ccccatgcttcacgatccatgttga

SEQ ID NO: 294567 - DNA, 25 bp, Artificial
  Probe
acagcataaattccaaacatggcag

SEQ ID NO: 294568 - DNA, 25 bp, Artificial
  Probe
caccaggggcgcatgctaaaggaag

SEQ ID NO: 294569 - DNA, 25 bp, Artificial
  Probe
agcacaccagcaccaggggcgcatg

SEQ ID NO: 294570 - DNA, 25 bp, Artificial
  Probe
gacaggtgagctacagcataaattc

SEQ ID NO: 294571 - DNA, 25 bp, Artificial
  Probe
caggccaattttctaggtacaatta

SEQ ID NO: 294572 - DNA, 25 bp, Artificial
  Probe
gtagcacatgttcctgacagtgtgg

SEQ ID NO: 294573 - DNA, 25 bp, Artificial
  Probe
tattgatgagcctgatgctatttcc

SEQ ID NO: 294574 - DNA, 25 bp, Artificial
  Probe
accactgaggcatatagacaagtct

SEQ ID NO: 294575 - DNA, 25 bp, Artificial
  Probe
atggactccacacatttaaatgcag

SEQ ID NO: 294576 - DNA, 25 bp, Artificial
  Probe
gttctccttcagattattagcagtt

SEQ ID NO: 294577 - DNA, 25 bp, Artificial
  Probe
ccaaacatggcagaaatggaaatta

SEQ ID NO: 294578 - DNA, 25 bp, Artificial
  Probe
atggaatgctatcagcagagtagac

SEQ ID NO: 294579 - DNA, 25 bp, Artificial
  Probe
caagactgtcttgtaaacatggaaa

SEQ ID NO: 294580 - DNA, 25 bp, Artificial
  Probe
taacttaggggagcacgtgaggttc

SEQ ID NO: 294581 - DNA, 25 bp, Artificial
  Probe
agattattagcagttccacctcttg

SEQ ID NO: 294582 - DNA, 25 bp, Artificial
  Probe
ccattctgggcatcatagttctcct

SEQ ID NO: 294583 - DNA, 25 bp, Artificial
  Probe
tcctgacagtgtggaaacataaaca

SEQ ID NO: 294584 - DNA, 25 bp, Artificial
  Probe
gttcgtggcacgagatggaatgcta

SEQ ID NO: 294585 - DNA, 25 bp, Artificial
  Probe
tcgtggcacgagatggaatgctatc

SEQ ID NO: 294586 - DNA, 25 bp, Artificial
  Probe
gcctgatgctatttcccgggcactc

SEQ ID NO: 294587 - DNA, 25 bp, Artificial
  Probe
gacatgtttttccagggtcttgttt

SEQ ID NO: 294588 - DNA, 25 bp, Artificial
  Probe
gtttctggtctcttcctgtttgggc

SEQ ID NO: 294589 - DNA, 25 bp, Artificial
  Probe
accaggggcgcatgctaaaggaaga

SEQ ID NO: 294590 - DNA, 25 bp, Artificial
  Probe
gttcctttcatttctaaataggttg

SEQ ID NO: 294591 - DNA, 25 bp, Artificial
  Probe
cataggtcaagttttactgttcggt

SEQ ID NO: 294592 - DNA, 25 bp, Artificial
  Probe
acgatccatgttgacttcagtctgt

SEQ ID NO: 294593 - DNA, 25 bp, Artificial
  Probe
tttcaggcgatgagggtttcacatg

SEQ ID NO: 294594 - DNA, 25 bp, Artificial
  Probe
ttgattctcataggtcaagttttac

SEQ ID NO: 294595 - DNA, 25 bp, Artificial
  Probe
tagcttggtcatttacatactatgg

SEQ ID NO: 294596 - DNA, 25 bp, Artificial
  Probe
aaaggtagcacatgttcctgacagt

SEQ ID NO: 294597 - DNA, 25 bp, Artificial
  Probe
catatagacaagtctcttatgggca

SEQ ID NO: 294598 - DNA, 25 bp, Artificial
  Probe
tctggtctcttcctgtttgggcgga

SEQ ID NO: 294599 - DNA, 25 bp, Artificial
  Probe
agattaaaaccctgatgcataagtt

SEQ ID NO: 294600 - DNA, 25 bp, Artificial
  Probe
gaatacactctgatacctgacttag

SEQ ID NO: 294601 - DNA, 25 bp, Artificial
  Probe
ggtcatttacatactatggaactca

SEQ ID NO: 294602 - DNA, 25 bp, Artificial
  Probe
caccttaaggaactctcaagtcctg

SEQ ID NO: 294603 - DNA, 25 bp, Artificial
  Probe
ttctaggtacaattaccacagacag

SEQ ID NO: 294604 - DNA, 25 bp, Artificial
  Probe
acagagtcctgtagctagctcgtga

SEQ ID NO: 294605 - DNA, 25 bp, Artificial
  Probe
ctgctaatacaggtcctgcacatta

SEQ ID NO: 294606 - DNA, 25 bp, Artificial
  Probe
atggagcgctcagagtgtcctcttt

SEQ ID NO: 294607 - DNA, 25 bp, Artificial
  Probe
ctgcttgaatcagaaggagattaac

SEQ ID NO: 294608 - DNA, 25 bp, Artificial
  Probe
acattacatgactgaaggacatctg

SEQ ID NO: 294609 - DNA, 25 bp, Artificial
  Probe
catgacaggagtttgtgtgcaacag

SEQ ID NO: 294610 - DNA, 25 bp, Artificial
  Probe
tgcacattacatgactgaaggacat

SEQ ID NO: 294611 - DNA, 25 bp, Artificial
  Probe
aacagagtcctgtagctagctcgtg

SEQ ID NO: 294612 - DNA, 25 bp, Artificial
  Probe
acatctgacgatgaggcaaggggct

SEQ ID NO: 294613 - DNA, 25 bp, Artificial
  Probe
tgaaggacatctgacgatgaggcaa

SEQ ID NO: 294614 - DNA, 25 bp, Artificial
  Probe
actgaaggacatctgacgatgaggc

SEQ ID NO: 294615 - DNA, 25 bp, Artificial
  Probe
gcacattacatgactgaaggacatc

SEQ ID NO: 294616 - DNA, 25 bp, Artificial
  Probe
ttctgctaatacaggtcctgcacat

SEQ ID NO: 294617 - DNA, 25 bp, Artificial
  Probe
agtttgtgtgcaacagagtcctgta

SEQ ID NO: 294618 - DNA, 25 bp, Artificial
  Probe
tcccatgacaggagtttgtgtgcaa

SEQ ID NO: 294619 - DNA, 25 bp, Artificial
  Probe
caattttctgctaatacaggtcctg

SEQ ID NO: 294620 - DNA, 25 bp, Artificial
  Probe
atacaggtcctgcacattacatgac

SEQ ID NO: 294621 - DNA, 25 bp, Artificial
  Probe
aggtcctgcacattacatgactgaa

SEQ ID NO: 294622 - DNA, 25 bp, Artificial
  Probe
gtgcaacagagtcctgtagctagct

SEQ ID NO: 294623 - DNA, 25 bp, Artificial
  Probe
gtcctgcacattacatgactgaagg

SEQ ID NO: 294624 - DNA, 25 bp, Artificial
  Probe
acaggtcctgcacattacatgactg

SEQ ID NO: 294625 - DNA, 25 bp, Artificial
  Probe
tttgtgtgcaacagagtcctgtagc

SEQ ID NO: 294626 - DNA, 25 bp, Artificial
  Probe
agagtctcccatgacaggagtttgt

SEQ ID NO: 294627 - DNA, 25 bp, Artificial
  Probe
gtgtgcaacagagtcctgtagctag

SEQ ID NO: 294628 - DNA, 25 bp, Artificial
  Probe
tcatggagcgctcagagtgtcctct

SEQ ID NO: 294629 - DNA, 25 bp, Artificial
  Probe
gctaatacaggtcctgcacattaca

SEQ ID NO: 294630 - DNA, 25 bp, Artificial
  Probe
ccatgacaggagtttgtgtgcaaca

SEQ ID NO: 294631 - DNA, 25 bp, Artificial
  Probe
aaggacatctgacgatgaggcaagg

SEQ ID NO: 294632 - DNA, 25 bp, Artificial
  Probe
tgactgaaggacatctgacgatgag

SEQ ID NO: 294633 - DNA, 25 bp, Artificial
  Probe
catgactgaaggacatctgacgatg

SEQ ID NO: 294634 - DNA, 25 bp, Artificial
  Probe
gcaacagagtcctgtagctagctcg

SEQ ID NO: 294635 - DNA, 25 bp, Artificial
  Probe
ctgcacattacatgactgaaggaca

SEQ ID NO: 294636 - DNA, 25 bp, Artificial
  Probe
ttacatgactgaaggacatctgacg

SEQ ID NO: 294637 - DNA, 25 bp, Artificial
  Probe
agtctcccatgacaggagtttgtgt

SEQ ID NO: 294638 - DNA, 25 bp, Artificial
  Probe
tagagaagagtctcccatgacagga

SEQ ID NO: 294639 - DNA, 25 bp, Artificial
  Probe
tgcaaagctgcttgaatcagaagga

SEQ ID NO: 294640 - DNA, 25 bp, Artificial
  Probe
acatgactgaaggacatctgacgat

SEQ ID NO: 294641 - DNA, 25 bp, Artificial
  Probe
attttctgctaatacaggtcctgca

SEQ ID NO: 294642 - DNA, 25 bp, Artificial
  Probe
gaagagtctcccatgacaggagttt

SEQ ID NO: 294643 - DNA, 25 bp, Artificial
  Probe
ttcatggagcgctcagagtgtcctc

SEQ ID NO: 294644 - DNA, 25 bp, Artificial
  Probe
caaagctgcttgaatcagaaggaga

SEQ ID NO: 294645 - DNA, 25 bp, Artificial
  Probe
aaagtgcaaagctgcttgaatcaga

SEQ ID NO: 294646 - DNA, 25 bp, Artificial
  Probe
ctcccatgacaggagtttgtgtgca

SEQ ID NO: 294647 - DNA, 25 bp, Artificial
  Probe
taatacaggtcctgcacattacatg

SEQ ID NO: 294648 - DNA, 25 bp, Artificial
  Probe
atagagaagagtctcccatgacagg

SEQ ID NO: 294649 - DNA, 25 bp, Artificial
  Probe
agtgcaaagctgcttgaatcagaag

SEQ ID NO: 294650 - DNA, 25 bp, Artificial
  Probe
ggccccctttcaggaagaatctgcc

SEQ ID NO: 294651 - DNA, 25 bp, Artificial
  Probe
acctgcgggccatgctcctgactga

SEQ ID NO: 294652 - DNA, 25 bp, Artificial
  Probe
gctttccctagatcttaatgaaaag

SEQ ID NO: 294653 - DNA, 25 bp, Artificial
  Probe
gcgatttcagaacatgctcagaaat

SEQ ID NO: 294654 - DNA, 25 bp, Artificial
  Probe
ggtgtttctcagcaccaccggaggg

SEQ ID NO: 294655 - DNA, 25 bp, Artificial
  Probe
tcctcgatgaatcaatagtgaaagt

SEQ ID NO: 294656 - DNA, 25 bp, Artificial
  Probe
gcttaaactctttagttttctggct

SEQ ID NO: 294657 - DNA, 25 bp, Artificial
  Probe
ccaggccccctttcaggaagaatct

SEQ ID NO: 294658 - DNA, 25 bp, Artificial
  Probe
tgcccccagagaggactctgagcat

SEQ ID NO: 294659 - DNA, 25 bp, Artificial
  Probe
ttgaggatggccaggcatcactgta

SEQ ID NO: 294660 - DNA, 25 bp, Artificial
  Probe
gtacaagtacatcttcccggcacat

SEQ ID NO: 294661 - DNA, 25 bp, Artificial
  Probe
ggcacatctgccaaaaccaactctg

SEQ ID NO: 294662 - DNA, 25 bp, Artificial
  Probe
tcccaggccgcatcatcactgggaa

SEQ ID NO: 294663 - DNA, 25 bp, Artificial
  Probe
ctccagttgtgagttggttgatatc

SEQ ID NO: 294664 - DNA, 25 bp, Artificial
  Probe
ctcattggcaccttcattgctgggt

SEQ ID NO: 294665 - DNA, 25 bp, Artificial
  Probe
cctgactggtccaggaaagtgggaa

SEQ ID NO: 294666 - DNA, 25 bp, Artificial
  Probe
cccagcatcaaggaggtgaaagaaa

SEQ ID NO: 294667 - DNA, 25 bp, Artificial
  Probe
accatttccgcctgactggtccagg

SEQ ID NO: 294668 - DNA, 25 bp, Artificial
  Probe
tgtcgtctttaacaatacaccgaag

SEQ ID NO: 294669 - DNA, 25 bp, Artificial
  Probe
ttggcctcatcaaacccctgggttc

SEQ ID NO: 294670 - DNA, 25 bp, Artificial
  Probe
aacagtgaacgtcaccaaaactcga

SEQ ID NO: 294671 - DNA, 25 bp, Artificial
  Probe
aagtgttgatcaagcccagcatcaa

SEQ ID NO: 294672 - DNA, 25 bp, Artificial
  Probe
cacgcctggctctgagcatcttctt

SEQ ID NO: 294673 - DNA, 25 bp, Artificial
  Probe
cttctcccaactccagttgtgagtt

SEQ ID NO: 294674 - DNA, 25 bp, Artificial
  Probe
ggcatgggtgatcagccgagtcttt

SEQ ID NO: 294675 - DNA, 25 bp, Artificial
  Probe
tcacttaaaatgttggaaggatcca

SEQ ID NO: 294676 - DNA, 25 bp, Artificial
  Probe
agttttctggctttgcttgtggctg

SEQ ID NO: 294677 - DNA, 25 bp, Artificial
  Probe
cccttcctcgatgaatcaatagtga

SEQ ID NO: 294678 - DNA, 25 bp, Artificial
  Probe
tccgattacataacgtacatagatg

SEQ ID NO: 294679 - DNA, 25 bp, Artificial
  Probe
atcttgacccagtgggaccgaacag

SEQ ID NO: 294680 - DNA, 25 bp, Artificial
  Probe
acccccgagtgtcatgatgaaagaa

SEQ ID NO: 294681 - DNA, 25 bp, Artificial
  Probe
ggtcctgaaaggtgcgactacatta

SEQ ID NO: 294682 - DNA, 25 bp, Artificial
  Probe
tgagcatcttcttcggcccatgcac

SEQ ID NO: 294683 - DNA, 25 bp, Artificial
  Probe
aatgaaaagcccaacttcgcggaat

SEQ ID NO: 294684 - DNA, 25 bp, Artificial
  Probe
ctgggttccatgatacccacaggag

SEQ ID NO: 294685 - DNA, 25 bp, Artificial
  Probe
caagcatagcggatttggcttgtgc

SEQ ID NO: 294686 - DNA, 25 bp, Artificial
  Probe
agacaggactcagctgagagagcct

SEQ ID NO: 294687 - DNA, 25 bp, Artificial
  Probe
ccccagagaggactctgagcattct

SEQ ID NO: 294688 - DNA, 25 bp, Artificial
  Probe
ctgagagagcctgtgctgaatgatg

SEQ ID NO: 294689 - DNA, 25 bp, Artificial
  Probe
tggatactcctttgcgttccccttc

SEQ ID NO: 294690 - DNA, 25 bp, Artificial
  Probe
attgctgggtctcttgctagtccat

SEQ ID NO: 294691 - DNA, 25 bp, Artificial
  Probe
cccgagtgtcatgatgaaagaagtc

SEQ ID NO: 294692 - DNA, 25 bp, Artificial
  Probe
tgcttaaactctttagttttctggc

SEQ ID NO: 294693 - DNA, 25 bp, Artificial
  Probe
aaggctttgcaatccgattacataa

SEQ ID NO: 294694 - DNA, 25 bp, Artificial
  Probe
gcaattctgttcacttaaaatgttg

SEQ ID NO: 294695 - DNA, 25 bp, Artificial
  Probe
aagatgaacagctggttcaaccacg

SEQ ID NO: 294696 - DNA, 25 bp, Artificial
  Probe
cctgggacaggcagccaagaaaaca

SEQ ID NO: 294697 - DNA, 25 bp, Artificial
  Probe
tgcaacgtctggaggacaagttcct

SEQ ID NO: 294698 - DNA, 25 bp, Artificial
  Probe
ttacattgccctctaatctgtatgg

SEQ ID NO: 294699 - DNA, 25 bp, Artificial
  Probe
gccaactgaggctgggctggacccc

SEQ ID NO: 294700 - DNA, 25 bp, Artificial
  Probe
ctgcttaaagaaagtgcctgtcctc

SEQ ID NO: 294701 - DNA, 25 bp, Artificial
  Probe
tcaggaggcgcacaaccccatcatg

SEQ ID NO: 294702 - DNA, 25 bp, Artificial
  Probe
agaagaatggcattccctttcagtt

SEQ ID NO: 294703 - DNA, 25 bp, Artificial
  Probe
cttgtgtcactacctaccaccatgg

SEQ ID NO: 294704 - DNA, 25 bp, Artificial
  Probe
aatagtatggtcttggctctgcaac

SEQ ID NO: 294705 - DNA, 25 bp, Artificial
  Probe
cctgggttggcatgccgacaacatc

SEQ ID NO: 294706 - DNA, 25 bp, Artificial
  Probe
tcttgggtgctgagctatgtcagga

SEQ ID NO: 294707 - DNA, 25 bp, Artificial
  Probe
gccaggattccctgagtggtttttt

SEQ ID NO: 294708 - DNA, 25 bp, Artificial
  Probe
acatcttcgccaagaagaatggcat

SEQ ID NO: 294709 - DNA, 25 bp, Artificial
  Probe
aggcccgtgcccaagtccacgaata

SEQ ID NO: 294710 - DNA, 25 bp, Artificial
  Probe
tactcctgtggaccaaggtgttggg

SEQ ID NO: 294711 - DNA, 25 bp, Artificial
  Probe
gcggcctcaactgacagcgtggcga

SEQ ID NO: 294712 - DNA, 25 bp, Artificial
  Probe
ctcttgaggtacagtatgcacaacc

SEQ ID NO: 294713 - DNA, 25 bp, Artificial
  Probe
ggcacctttggagtactcctgtgga

SEQ ID NO: 294714 - DNA, 25 bp, Artificial
  Probe
gggctggacccctattgtggaatcg

SEQ ID NO: 294715 - DNA, 25 bp, Artificial
  Probe
tgggtttggagctctacctggacct

SEQ ID NO: 294716 - DNA, 25 bp, Artificial
  Probe
agctatgtcaggaggcgcacaaccc

SEQ ID NO: 294717 - DNA, 25 bp, Artificial
  Probe
tcaaagggcagcacttgagcgagca

SEQ ID NO: 294718 - DNA, 25 bp, Artificial
  Probe
cgacaacatccgtggcacctttgga

SEQ ID NO: 294719 - DNA, 25 bp, Artificial
  Probe
ccaggtgaactgcttaaagaaagtg

SEQ ID NO: 294720 - DNA, 25 bp, Artificial
  Probe
cactcattggggtccaggttcccga

SEQ ID NO: 294721 - DNA, 25 bp, Artificial
  Probe
tatccttagcatgcttctcttgagg

SEQ ID NO: 294722 - DNA, 25 bp, Artificial
  Probe
agggacagggccttcattgctggcc

SEQ ID NO: 294723 - DNA, 25 bp, Artificial
  Probe
caggcagccaagaaaacattaccag

SEQ ID NO: 294724 - DNA, 25 bp, Artificial
  Probe
tggcagaccactggtacccggccga

SEQ ID NO: 294725 - DNA, 25 bp, Artificial
  Probe
gcaatccgtctacaccaccttgtgt

SEQ ID NO: 294726 - DNA, 25 bp, Artificial
  Probe
ctccggaggcccatgccagcatgat

SEQ ID NO: 294727 - DNA, 25 bp, Artificial
  Probe
aggaggcgcacaaccccatcatgag

SEQ ID NO: 294728 - DNA, 25 bp, Artificial
  Probe
gaaagtgcctgtcctcaaagacgga

SEQ ID NO: 294729 - DNA, 25 bp, Artificial
  Probe
tgttggggccactcattggggtcca

SEQ ID NO: 294730 - DNA, 25 bp, Artificial
  Probe
ttgctggccagcaggtgacgctagc

SEQ ID NO: 294731 - DNA, 25 bp, Artificial
  Probe
tgtctctagaggagttgatacagcc

SEQ ID NO: 294732 - DNA, 25 bp, Artificial
  Probe
tcattggggtccaggttcccgagga

SEQ ID NO: 294733 - DNA, 25 bp, Artificial
  Probe
gcgttcttgggtgctgagctatgtc

SEQ ID NO: 294734 - DNA, 25 bp, Artificial
  Probe
gagctttgctcaaaagggacaccac

SEQ ID NO: 294735 - DNA, 25 bp, Artificial
  Probe
tgtcgaacgcaatccgtctacacca

SEQ ID NO: 294736 - DNA, 25 bp, Artificial
  Probe
acaaccccatcatgagcgtcctggg

SEQ ID NO: 294737 - DNA, 25 bp, Artificial
  Probe
cttcgccaagaagaatggcattccc

SEQ ID NO: 294738 - DNA, 25 bp, Artificial
  Probe
cccaggtgaactgcttaaagaaagt

SEQ ID NO: 294739 - DNA, 25 bp, Artificial
  Probe
gaggagctttgctcaaaagggacac

SEQ ID NO: 294740 - DNA, 25 bp, Artificial
  Probe
ggaccaaggtgttggggccactcat

SEQ ID NO: 294741 - DNA, 25 bp, Artificial
  Probe
agcaggtgacgctagcggatctcat

SEQ ID NO: 294742 - DNA, 25 bp, Artificial
  Probe
cgacgaccgcatcttgtgtcgctga

SEQ ID NO: 294743 - DNA, 25 bp, Artificial
  Probe
cgaccgcatcttgtgtcgctgaggc

SEQ ID NO: 294744 - DNA, 25 bp, Artificial
  Probe
gggaaagacactaccgcggccacgg

SEQ ID NO: 294745 - DNA, 25 bp, Artificial
  Probe
tttcatcgtgcctcctggagtagag

SEQ ID NO: 294746 - DNA, 25 bp, Artificial
  Probe
tcgcgctttcatcgtgcctcctgga

SEQ ID NO: 294747 - DNA, 25 bp, Artificial
  Probe
cgcgctttcatcgtgcctcctggag

SEQ ID NO: 294748 - DNA, 25 bp, Artificial
  Probe
aaagctcgcgctttcatcgtgcctc

SEQ ID NO: 294749 - DNA, 25 bp, Artificial
  Probe
ggcatgtgttccagccgacgaccgc

SEQ ID NO: 294750 - DNA, 25 bp, Artificial
  Probe
atcttgtgtcgctgaggcggcgcac

SEQ ID NO: 294751 - DNA, 25 bp, Artificial
  Probe
actccagcccttcaggaggcaagag

SEQ ID NO: 294752 - DNA, 25 bp, Artificial
  Probe
tgttccagccgacgaccgcatcttg

SEQ ID NO: 294753 - DNA, 25 bp, Artificial
  Probe
gcgctttcatcgtgcctcctggagt

SEQ ID NO: 294754 - DNA, 25 bp, Artificial
  Probe
ataggaaaaagctcgcgctttcatc

SEQ ID NO: 294755 - DNA, 25 bp, Artificial
  Probe
gactccagcccttcaggaggcaaga

SEQ ID NO: 294756 - DNA, 25 bp, Artificial
  Probe
agcatagttatttaggggcgaccaa

SEQ ID NO: 294757 - DNA, 25 bp, Artificial
  Probe
tcttgtgtcgctgaggcggcgcact

SEQ ID NO: 294758 - DNA, 25 bp, Artificial
  Probe
gacgaccgcatcttgtgtcgctgag

SEQ ID NO: 294759 - DNA, 25 bp, Artificial
  Probe
accgcatcttgtgtcgctgaggcgg

SEQ ID NO: 294760 - DNA, 25 bp, Artificial
  Probe
cggcatgtgttccagccgacgaccg

SEQ ID NO: 294761 - DNA, 25 bp, Artificial
  Probe
taggggcgaccaataggaaaaagct

SEQ ID NO: 294762 - DNA, 25 bp, Artificial
  Probe
actaccgcggccacgggactcttga

SEQ ID NO: 294763 - DNA, 25 bp, Artificial
  Probe
ccgcatcttgtgtcgctgaggcggc

SEQ ID NO: 294764 - DNA, 25 bp, Artificial
  Probe
acgaccgcatcttgtgtcgctgagg

SEQ ID NO: 294765 - DNA, 25 bp, Artificial
  Probe
gttccagccgacgaccgcatcttgt

SEQ ID NO: 294766 - DNA, 25 bp, Artificial
  Probe
aagtgctctcggttccccagagcaa

SEQ ID NO: 294767 - DNA, 25 bp, Artificial
  Probe
ccgacgaccgcatcttgtgtcgctg

SEQ ID NO: 294768 - DNA, 25 bp, Artificial
  Probe
ttcatcgtgcctcctggagtagaga

SEQ ID NO: 294769 - DNA, 25 bp, Artificial
  Probe
gccgacgaccgcatcttgtgtcgct

SEQ ID NO: 294770 - DNA, 25 bp, Artificial
  Probe
gaccgcatcttgtgtcgctgaggcg

SEQ ID NO: 294771 - DNA, 25 bp, Artificial
  Probe
ttccagccgacgaccgcatcttgtg

SEQ ID NO: 294772 - DNA, 25 bp, Artificial
  Probe
gtgttccagccgacgaccgcatctt

SEQ ID NO: 294773 - DNA, 25 bp, Artificial
  Probe
ttttaaatggtcacatttcgtgctt

SEQ ID NO: 294774 - DNA, 25 bp, Artificial
  Probe
agtggcacatccaggaggcctttgg

SEQ ID NO: 294775 - DNA, 25 bp, Artificial
  Probe
ccccaaattgagtcccagtggcaca

SEQ ID NO: 294776 - DNA, 25 bp, Artificial
  Probe
tcttcagccccaaattgagtcccag

SEQ ID NO: 294777 - DNA, 25 bp, Artificial
  Probe
caggaggcctttggttatcccagcc

SEQ ID NO: 294778 - DNA, 25 bp, Artificial
  Probe
gccccaaattgagtcccagtggcac

SEQ ID NO: 294779 - DNA, 25 bp, Artificial
  Probe
agattgagacctacaaccaaattag

SEQ ID NO: 294780 - DNA, 25 bp, Artificial
  Probe
gtcccagtggcacatccaggaggcc

SEQ ID NO: 294781 - DNA, 25 bp, Artificial
  Probe
gacctacaaccaaattagatttggg

SEQ ID NO: 294782 - DNA, 25 bp, Artificial
  Probe
ggaggcctttggttatcccagccat

SEQ ID NO: 294783 - DNA, 25 bp, Artificial
  Probe
ttcagccccaaattgagtcccagtg

SEQ ID NO: 294784 - DNA, 25 bp, Artificial
  Probe
attgagtcccagtggcacatccagg

SEQ ID NO: 294785 - DNA, 25 bp, Artificial
  Probe
gggagttttctaccttggttctgag

SEQ ID NO: 294786 - DNA, 25 bp, Artificial
  Probe
tggggagttttctaccttggttctg

SEQ ID NO: 294787 - DNA, 25 bp, Artificial
  Probe
cttcagccccaaattgagtcccagt

SEQ ID NO: 294788 - DNA, 25 bp, Artificial
  Probe
agccccaaattgagtcccagtggca

SEQ ID NO: 294789 - DNA, 25 bp, Artificial
  Probe
gagttttctaccttggttctgagga

SEQ ID NO: 294790 - DNA, 25 bp, Artificial
  Probe
aggcctttggttatcccagccatac

SEQ ID NO: 294791 - DNA, 25 bp, Artificial
  Probe
ttttctaccttggttctgaggatgg

SEQ ID NO: 294792 - DNA, 25 bp, Artificial
  Probe
ccaagggtttctcaatgtttcagat

SEQ ID NO: 294793 - DNA, 25 bp, Artificial
  Probe
gggtacacatgctgggtaagcactc

SEQ ID NO: 294794 - DNA, 25 bp, Artificial
  Probe
agttttctaccttggttctgaggat

SEQ ID NO: 294795 - DNA, 25 bp, Artificial
  Probe
gattgagacctacaaccaaattaga

SEQ ID NO: 294796 - DNA, 25 bp, Artificial
  Probe
gaggcctttggttatcccagccata

SEQ ID NO: 294797 - DNA, 25 bp, Artificial
  Probe
agacctacaaccaaattagatttgg

SEQ ID NO: 294798 - DNA, 25 bp, Artificial
  Probe
gagacctacaaccaaattagatttg

SEQ ID NO: 294799 - DNA, 25 bp, Artificial
  Probe
ggcacatccaggaggcctttggtta

SEQ ID NO: 294800 - DNA, 25 bp, Artificial
  Probe
tcccagtggcacatccaggaggcct

SEQ ID NO: 294801 - DNA, 25 bp, Artificial
  Probe
tggcacatccaggaggcctttggtt

SEQ ID NO: 294802 - DNA, 25 bp, Artificial
  Probe
gttttctaccttggttctgaggatg

SEQ ID NO: 294803 - DNA, 25 bp, Artificial
  Probe
ccaggaggcctttggttatcccagc

SEQ ID NO: 294804 - DNA, 25 bp, Artificial
  Probe
cagtggcacatccaggaggcctttg

SEQ ID NO: 294805 - DNA, 25 bp, Artificial
  Probe
aggaggcctttggttatcccagcca

SEQ ID NO: 294806 - DNA, 25 bp, Artificial
  Probe
gagattgagacctacaaccaaatta

SEQ ID NO: 294807 - DNA, 25 bp, Artificial
  Probe
ccagtggcacatccaggaggccttt

SEQ ID NO: 294808 - DNA, 25 bp, Artificial
  Probe
cccagtggcacatccaggaggcctt

SEQ ID NO: 294809 - DNA, 25 bp, Artificial
  Probe
cagccccaaattgagtcccagtggc

SEQ ID NO: 294810 - DNA, 25 bp, Artificial
  Probe
caagggtttctcaatgtttcagatt

SEQ ID NO: 294811 - DNA, 25 bp, Artificial
  Probe
agtcccagtggcacatccaggaggc

SEQ ID NO: 294812 - DNA, 25 bp, Artificial
  Probe
tccaggaggcctttggttatcccag

SEQ ID NO: 294813 - DNA, 25 bp, Artificial
  Probe
ggagttttctaccttggttctgagg

SEQ ID NO: 294814 - DNA, 25 bp, Artificial
  Probe
tcagccccaaattgagtcccagtgg

SEQ ID NO: 294815 - DNA, 25 bp, Artificial
  Probe
gtggcacatccaggaggcctttggt

SEQ ID NO: 294816 - DNA, 25 bp, Artificial
  Probe
aaattgagtcccagtggcacatcca

SEQ ID NO: 294817 - DNA, 25 bp, Artificial
  Probe
atccaggaggcctttggttatccca

SEQ ID NO: 294818 - DNA, 25 bp, Artificial
  Probe
aattgagtcccagtggcacatccag

SEQ ID NO: 294819 - DNA, 25 bp, Artificial
  Probe
ggggtacacatgctgggtaagcact

SEQ ID NO: 294820 - DNA, 25 bp, Artificial
  Probe
agacattccaacaagcaaatgtggc

SEQ ID NO: 294821 - DNA, 25 bp, Artificial
  Probe
tagtggcccgggttctgagtttcag

SEQ ID NO: 294822 - DNA, 25 bp, Artificial
  Probe
ggttctgagtttcagcaactcctgt

SEQ ID NO: 294823 - DNA, 25 bp, Artificial
  Probe
caagcgcaaggcacgcacttttgtc

SEQ ID NO: 294824 - DNA, 25 bp, Artificial
  Probe
gaccatccaattcatcctcgggaaa

SEQ ID NO: 294825 - DNA, 25 bp, Artificial
  Probe
ccagctaattcatgattgactcaag

SEQ ID NO: 294826 - DNA, 25 bp, Artificial
  Probe
gctccccagctaattcatgattgac

SEQ ID NO: 294827 - DNA, 25 bp, Artificial
  Probe
gtcaacccgtttgctctttacctgc

SEQ ID NO: 294828 - DNA, 25 bp, Artificial
  Probe
ctcttcagcagtaagaatgacttct

SEQ ID NO: 294829 - DNA, 25 bp, Artificial
  Probe
tgtgtcaacccgtttgctctttacc

SEQ ID NO: 294830 - DNA, 25 bp, Artificial
  Probe
gaatgtggtgaccaattctgtcctg

SEQ ID NO: 294831 - DNA, 25 bp, Artificial
  Probe
ttgtcaccttagtggcccgggttct

SEQ ID NO: 294832 - DNA, 25 bp, Artificial
  Probe
cactgtgatcggagaccatccaatt

SEQ ID NO: 294833 - DNA, 25 bp, Artificial
  Probe
cgcacttttgtctgaatagaaagaa

SEQ ID NO: 294834 - DNA, 25 bp, Artificial
  Probe
acctcctcagctcttcagcagtaag

SEQ ID NO: 294835 - DNA, 25 bp, Artificial
  Probe
aggaagcatttcaacagccagctct

SEQ ID NO: 294836 - DNA, 25 bp, Artificial
  Probe
cccgggttctgagtttcagcaactc

SEQ ID NO: 294837 - DNA, 25 bp, Artificial
  Probe
atgattgactcaagcgcaaggcacg

SEQ ID NO: 294838 - DNA, 25 bp, Artificial
  Probe
agtaagaatgacttctctgaaaagc

SEQ ID NO: 294839 - DNA, 25 bp, Artificial
  Probe
aacatcggtttacacattcccttgg

SEQ ID NO: 294840 - DNA, 25 bp, Artificial
  Probe
aaagcaacgcgaagaatgtggtgac

SEQ ID NO: 294841 - DNA, 25 bp, Artificial
  Probe
cctgctcagtgaaagcttcaggaag

SEQ ID NO: 294842 - DNA, 25 bp, Artificial
  Probe
cgcaaggcacgcacttttgtctgaa

SEQ ID NO: 294843 - DNA, 25 bp, Artificial
  Probe
gaaatagcactgtgatcggagacca

SEQ ID NO: 294844 - DNA, 25 bp, Artificial
  Probe
tctttcaactacaaggagatcgatc

SEQ ID NO: 294845 - DNA, 25 bp, Artificial
  Probe
tctgttgtgggcagaagtcctatcc

SEQ ID NO: 294846 - DNA, 25 bp, Artificial
  Probe
tgggcagaagtcctatcctgagagg

SEQ ID NO: 294847 - DNA, 25 bp, Artificial
  Probe
agaggtctaccagctacctcctcag

SEQ ID NO: 294848 - DNA, 25 bp, Artificial
  Probe
atagcactgtgatcggagaccatcc

SEQ ID NO: 294849 - DNA, 25 bp, Artificial
  Probe
tgttgtgggcagaagtcctatcctg

SEQ ID NO: 294850 - DNA, 25 bp, Artificial
  Probe
ctacaaggagatcgatccttctctt

SEQ ID NO: 294851 - DNA, 25 bp, Artificial
  Probe
gactcaagcgcaaggcacgcacttt

SEQ ID NO: 294852 - DNA, 25 bp, Artificial
  Probe
ctgtcctgctcaacggacatagcac

SEQ ID NO: 294853 - DNA, 25 bp, Artificial
  Probe
tacacattcccttgggatttaagac

SEQ ID NO: 294854 - DNA, 25 bp, Artificial
  Probe
tcaactacaaggagatcgatccttc

SEQ ID NO: 294855 - DNA, 25 bp, Artificial
  Probe
ggatttaagacattccaacaagcaa

SEQ ID NO: 294856 - DNA, 25 bp, Artificial
  Probe
tgactcaagcgcaaggcacgcactt

SEQ ID NO: 294857 - DNA, 25 bp, Artificial
  Probe
cctcagctcttcagcagtaagaatg

SEQ ID NO: 294858 - DNA, 25 bp, Artificial
  Probe
tcggtttacacattcccttgggatt

SEQ ID NO: 294859 - DNA, 25 bp, Artificial
  Probe
ctctgaaaagcaacgcgaagaatgt

SEQ ID NO: 294860 - DNA, 25 bp, Artificial
  Probe
ccagctctgttgtgggcagaagtcc

SEQ ID NO: 294861 - DNA, 25 bp, Artificial
  Probe
tcaacagccagctctgttgtgggca

SEQ ID NO: 294862 - DNA, 25 bp, Artificial
  Probe
caacgcgaagaatgtggtgaccaat

SEQ ID NO: 294863 - DNA, 25 bp, Artificial
  Probe
tcaacggacatagcacaaagcaaga

SEQ ID NO: 294864 - DNA, 25 bp, Artificial
  Probe
gagtttcagcaactcctgtgtcaac

SEQ ID NO: 294865 - DNA, 25 bp, Artificial
  Probe
ctgctccccagctaattcatgattg

SEQ ID NO: 294866 - DNA, 25 bp, Artificial
  Probe
tcaaagcgacaaagtcaaggatggc

SEQ ID NO: 294867 - DNA, 25 bp, Artificial
  Probe
gacctatggtggtcttctttcgggg

SEQ ID NO: 294868 - DNA, 25 bp, Artificial
  Probe
ctgaagagcccgaagctgtagcatc

SEQ ID NO: 294869 - DNA, 25 bp, Artificial
  Probe
ctcaaatggatccacagctacatag

SEQ ID NO: 294870 - DNA, 25 bp, Artificial
  Probe
gaaatgactgcatgcaggtcatgaa

SEQ ID NO: 294871 - DNA, 25 bp, Artificial
  Probe
cgcaggagctcagtcaggctggcca

SEQ ID NO: 294872 - DNA, 25 bp, Artificial
  Probe
gtttccctgaagagcccgaagctgt

SEQ ID NO: 294873 - DNA, 25 bp, Artificial
  Probe
aaagtgggtagctacctcaaatgga

SEQ ID NO: 294874 - DNA, 25 bp, Artificial
  Probe
gagaacatgctctgcgccggcatca

SEQ ID NO: 294875 - DNA, 25 bp, Artificial
  Probe
acgagagacgcctgcgacggcgaca

SEQ ID NO: 294876 - DNA, 25 bp, Artificial
  Probe
agagcccgaagctgtagcatccctc

SEQ ID NO: 294877 - DNA, 25 bp, Artificial
  Probe
attggagacacgagagacgcctgcg

SEQ ID NO: 294878 - DNA, 25 bp, Artificial
  Probe
ggtcatgaacaacgtggtctcggag

SEQ ID NO: 294879 - DNA, 25 bp, Artificial
  Probe
tgtctgccgaacagcggcctggcgc

SEQ ID NO: 294880 - DNA, 25 bp, Artificial
  Probe
ccctttggccgctcgaaatgactgc

SEQ ID NO: 294881 - DNA, 25 bp, Artificial
  Probe
ctcgaaatgactgcatgcaggtcat

SEQ ID NO: 294882 - DNA, 25 bp, Artificial
  Probe
tgcatgcaggtcatgaacaacgtgg

SEQ ID NO: 294883 - DNA, 25 bp, Artificial
  Probe
cctggcgcaggagctcagtcaggct

SEQ ID NO: 294884 - DNA, 25 bp, Artificial
  Probe
aactatggcgtctacaccaaagtgg

SEQ ID NO: 294885 - DNA, 25 bp, Artificial
  Probe
tctctggggcccagaggtcactctt

SEQ ID NO: 294886 - DNA, 25 bp, Artificial
  Probe
ccacagctacataggggaaagggat

SEQ ID NO: 294887 - DNA, 25 bp, Artificial
  Probe
ctagtgagtaccaagacaggggaca

SEQ ID NO: 294888 - DNA, 25 bp, Artificial
  Probe
acgtggtctcggagaacatgctctg

SEQ ID NO: 294889 - DNA, 25 bp, Artificial
  Probe
ctctgcgccggcatcattggagaca

SEQ ID NO: 294890 - DNA, 25 bp, Artificial
  Probe
tgggggacctatggtggtcttcttt

SEQ ID NO: 294891 - DNA, 25 bp, Artificial
  Probe
actcttagaataaggctgggctagt

SEQ ID NO: 294892 - DNA, 25 bp, Artificial
  Probe
atctgtctgccgaacagcggcctgg

SEQ ID NO: 294893 - DNA, 25 bp, Artificial
  Probe
gcgtctacaccaaagtgggtagcta

SEQ ID NO: 294894 - DNA, 25 bp, Artificial
  Probe
tgcccatctgtctgccgaacagcgg

SEQ ID NO: 294895 - DNA, 25 bp, Artificial
  Probe
agggctgtgggcacctcaacaacta

SEQ ID NO: 294896 - DNA, 25 bp, Artificial
  Probe
gactgcatgcaggtcatgaacaacg

SEQ ID NO: 294897 - DNA, 25 bp, Artificial
  Probe
aggctgggctagtgagtaccaagac

SEQ ID NO: 294898 - DNA, 25 bp, Artificial
  Probe
ggggacctatggtggtcttctttcg

SEQ ID NO: 294899 - DNA, 25 bp, Artificial
  Probe
gctatcaaagcgacaaagtcaagga

SEQ ID NO: 294900 - DNA, 25 bp, Artificial
  Probe
tctacaccaaagtgggtagctacct

SEQ ID NO: 294901 - DNA, 25 bp, Artificial
  Probe
gcacctcaacaactatggcgtctac

SEQ ID NO: 294902 - DNA, 25 bp, Artificial
  Probe
catgcaggtcatgaacaacgtggtc

SEQ ID NO: 294903 - DNA, 25 bp, Artificial
  Probe
agaaggaaccgcacctttattctca

SEQ ID NO: 294904 - DNA, 25 bp, Artificial
  Probe
atgtttccctgaagagcccgaagct

SEQ ID NO: 294905 - DNA, 25 bp, Artificial
  Probe
gaacaacgtggtctcggagaacatg

SEQ ID NO: 294906 - DNA, 25 bp, Artificial
  Probe
ataaggctgggctagtgagtaccaa

SEQ ID NO: 294907 - DNA, 25 bp, Artificial
  Probe
tggtggtcttctttcggggtacctg

SEQ ID NO: 294908 - DNA, 25 bp, Artificial
  Probe
gctacctcaaatggatccacagcta

SEQ ID NO: 294909 - DNA, 25 bp, Artificial
  Probe
ctgggctagtgagtaccaagacagg

SEQ ID NO: 294910 - DNA, 25 bp, Artificial
  Probe
acaactatggcgtctacaccaaagt

SEQ ID NO: 294911 - DNA, 25 bp, Artificial
  Probe
gaaggaaccgcacctttattctcac

SEQ ID NO: 294912 - DNA, 25 bp, Artificial
  Probe
gcgtccccatggtcccaaaagatgc

SEQ ID NO: 294913 - DNA, 25 bp, Artificial
  Probe
gggcaggtcatatcctcctggatca

SEQ ID NO: 294914 - DNA, 25 bp, Artificial
  Probe
gacatgcccgcgtggcacctctgtt

SEQ ID NO: 294915 - DNA, 25 bp, Artificial
  Probe
tctggatggcctgtgtggatctttg

SEQ ID NO: 294916 - DNA, 25 bp, Artificial
  Probe
ttaatgcttgcctttgcccagggcc

SEQ ID NO: 294917 - DNA, 25 bp, Artificial
  Probe
tggttctcgacatgcccgcgtggca

SEQ ID NO: 294918 - DNA, 25 bp, Artificial
  Probe
cagagtcctggtacccagctaaggg

SEQ ID NO: 294919 - DNA, 25 bp, Artificial
  Probe
gtcatatcctcctggatcatagcta

SEQ ID NO: 294920 - DNA, 25 bp, Artificial
  Probe
gtcttcagcacctggagctgcagga

SEQ ID NO: 294921 - DNA, 25 bp, Artificial
  Probe
ccccatggtcccaaaagatgcatca

SEQ ID NO: 294922 - DNA, 25 bp, Artificial
  Probe
gctatcaccccgagcaggattctgg

SEQ ID NO: 294923 - DNA, 25 bp, Artificial
  Probe
cgtggggtcttcagcacctggagct

SEQ ID NO: 294924 - DNA, 25 bp, Artificial
  Probe
gcccgtgcagagtcctggtacccag

SEQ ID NO: 294925 - DNA, 25 bp, Artificial
  Probe
gtttccaaagataccctgggctatc

SEQ ID NO: 294926 - DNA, 25 bp, Artificial
  Probe
tctttggggtgcagcgtccccatgg

SEQ ID NO: 294927 - DNA, 25 bp, Artificial
  Probe
taagcctgtttccaaagataccctg

SEQ ID NO: 294928 - DNA, 25 bp, Artificial
  Probe
caggattctgggaccacctcaaggc

SEQ ID NO: 294929 - DNA, 25 bp, Artificial
  Probe
tctgtttggagtaccccatctttgc

SEQ ID NO: 294930 - DNA, 25 bp, Artificial
  Probe
gcagagctggcgtgacacctaccca

SEQ ID NO: 294931 - DNA, 25 bp, Artificial
  Probe
aggctctaaggctggtcaccctgag

SEQ ID NO: 294932 - DNA, 25 bp, Artificial
  Probe
accccgagcaggattctgggaccac

SEQ ID NO: 294933 - DNA, 25 bp, Artificial
  Probe
cctacaccaggctctaaggctggtc

SEQ ID NO: 294934 - DNA, 25 bp, Artificial
  Probe
tcaccctgagggtcttggggtactt

SEQ ID NO: 294935 - DNA, 25 bp, Artificial
  Probe
tgcccgcgtggcacctctgtttgga

SEQ ID NO: 294936 - DNA, 25 bp, Artificial
  Probe
ggtcccaaaagatgcatcaccatcc

SEQ ID NO: 294937 - DNA, 25 bp, Artificial
  Probe
ggatctttggggtgcagcgtcccca

SEQ ID NO: 294938 - DNA, 25 bp, Artificial
  Probe
gggtcttcagcacctggagctgcag

SEQ ID NO: 294939 - DNA, 25 bp, Artificial
  Probe
gatcatagctaacctttaagcctgt

SEQ ID NO: 294940 - DNA, 25 bp, Artificial
  Probe
tcttcagcacctggagctgcaggag

SEQ ID NO: 294941 - DNA, 25 bp, Artificial
  Probe
ctaaggctggtcaccctgagggtct

SEQ ID NO: 294942 - DNA, 25 bp, Artificial
  Probe
tacttcgtggggtcttcagcacctg

SEQ ID NO: 294943 - DNA, 25 bp, Artificial
  Probe
ggagtaccccatctttgcccgtgca

SEQ ID NO: 294944 - DNA, 25 bp, Artificial
  Probe
gccctttctggatggcctgtgtgga

SEQ ID NO: 294945 - DNA, 25 bp, Artificial
  Probe
ttgcctttgcccagggccgtggcag

SEQ ID NO: 294946 - DNA, 25 bp, Artificial
  Probe
ttggagtaccccatctttgcccgtg

SEQ ID NO: 294947 - DNA, 25 bp, Artificial
  Probe
aatgcttgcctttgcccagggccgt

SEQ ID NO: 294948 - DNA, 25 bp, Artificial
  Probe
ccgtggcagagctggcgtgacacct

SEQ ID NO: 294949 - DNA, 25 bp, Artificial
  Probe
gtaccccatctttgcccgtgcagag

SEQ ID NO: 294950 - DNA, 25 bp, Artificial
  Probe
tcctggatcatagctaacctttaag

SEQ ID NO: 294951 - DNA, 25 bp, Artificial
  Probe
tgcagcgtccccatggtcccaaaag

SEQ ID NO: 294952 - DNA, 25 bp, Artificial
  Probe
ttctggatggcctgtgtggatcttt

SEQ ID NO: 294953 - DNA, 25 bp, Artificial
  Probe
acaccaggctctaaggctggtcacc

SEQ ID NO: 294954 - DNA, 25 bp, Artificial
  Probe
atcattaatgcttgcctttgcccag

SEQ ID NO: 294955 - DNA, 25 bp, Artificial
  Probe
catctttgcccgtgcagagtcctgg

SEQ ID NO: 294956 - DNA, 25 bp, Artificial
  Probe
gctgtcgctggttctcgacatgccc

SEQ ID NO: 294957 - DNA, 25 bp, Artificial
  Probe
cgagcaggattctgggaccacctca

SEQ ID NO: 294958 - DNA, 25 bp, Artificial
  Probe
gctgtgtacgactggctagaagcag

SEQ ID NO: 294959 - DNA, 25 bp, Artificial
  Probe
cagaccatagaaacaagctgaacac

SEQ ID NO: 294960 - DNA, 25 bp, Artificial
  Probe
ggtctcatctgacagtctatgggcc

SEQ ID NO: 294961 - DNA, 25 bp, Artificial
  Probe
tacaagagctgtgtacgactggcta

SEQ ID NO: 294962 - DNA, 25 bp, Artificial
  Probe
tagaagcagccagaccatagaaaca

SEQ ID NO: 294963 - DNA, 25 bp, Artificial
  Probe
tagaaacaagctgaacacagccact

SEQ ID NO: 294964 - DNA, 25 bp, Artificial
  Probe
gcctacaagagctgtgtacgactgg

SEQ ID NO: 294965 - DNA, 25 bp, Artificial
  Probe
catgtatctgcctacaagagctgtg

SEQ ID NO: 294966 - DNA, 25 bp, Artificial
  Probe
gcagccagaccatagaaacaagctg

SEQ ID NO: 294967 - DNA, 25 bp, Artificial
  Probe
gaagcagccagaccatagaaacaag

SEQ ID NO: 294968 - DNA, 25 bp, Artificial
  Probe
ggggtctcatctgacagtctatggg

SEQ ID NO: 294969 - DNA, 25 bp, Artificial
  Probe
atgggccatgtatctgcctacaaga

SEQ ID NO: 294970 - DNA, 25 bp, Artificial
  Probe
gggccatgtatctgcctacaagagc

SEQ ID NO: 294971 - DNA, 25 bp, Artificial
  Probe
gtacgactggctagaagcagccaga

SEQ ID NO: 294972 - DNA, 25 bp, Artificial
  Probe
ctgaacacagccactgatagacctc

SEQ ID NO: 294973 - DNA, 25 bp, Artificial
  Probe
aagagctgtgtacgactggctagaa

SEQ ID NO: 294974 - DNA, 25 bp, Artificial
  Probe
acaagctgaacacagccactgatag

SEQ ID NO: 294975 - DNA, 25 bp, Artificial
  Probe
tgtacgactggctagaagcagccag

SEQ ID NO: 294976 - DNA, 25 bp, Artificial
  Probe
tgtatctgcctacaagagctgtgta

SEQ ID NO: 294977 - DNA, 25 bp, Artificial
  Probe
actggctagaagcagccagaccata

SEQ ID NO: 294978 - DNA, 25 bp, Artificial
  Probe
gaaacaagctgaacacagccactga

SEQ ID NO: 294979 - DNA, 25 bp, Artificial
  Probe
gggtctcatctgacagtctatgggc

SEQ ID NO: 294980 - DNA, 25 bp, Artificial
  Probe
ctatgggccatgtatctgcctacaa

SEQ ID NO: 294981 - DNA, 25 bp, Artificial
  Probe
gtatctgcctacaagagctgtgtac

SEQ ID NO: 294982 - DNA, 25 bp, Artificial
  Probe
ccagaccatagaaacaagctgaaca

SEQ ID NO: 294983 - DNA, 25 bp, Artificial
  Probe
cgactggctagaagcagccagacca

SEQ ID NO: 294984 - DNA, 25 bp, Artificial
  Probe
agctgtgtacgactggctagaagca

SEQ ID NO: 294985 - DNA, 25 bp, Artificial
  Probe
gagctgtgtacgactggctagaagc

SEQ ID NO: 294986 - DNA, 25 bp, Artificial
  Probe
tatctgcctacaagagctgtgtacg

SEQ ID NO: 294987 - DNA, 25 bp, Artificial
  Probe
ctggctagaagcagccagaccatag

SEQ ID NO: 294988 - DNA, 25 bp, Artificial
  Probe
catctgacagtctatgggccatgta

SEQ ID NO: 294989 - DNA, 25 bp, Artificial
  Probe
tctgacagtctatgggccatgtatc

SEQ ID NO: 294990 - DNA, 25 bp, Artificial
  Probe
acaagagctgtgtacgactggctag

SEQ ID NO: 294991 - DNA, 25 bp, Artificial
  Probe
agtctatgggccatgtatctgccta

SEQ ID NO: 294992 - DNA, 25 bp, Artificial
  Probe
tcatctgacagtctatgggccatgt

SEQ ID NO: 294993 - DNA, 25 bp, Artificial
  Probe
ctgcctacaagagctgtgtacgact

SEQ ID NO: 294994 - DNA, 25 bp, Artificial
  Probe
tctcatctgacagtctatgggccat

SEQ ID NO: 294995 - DNA, 25 bp, Artificial
  Probe
gccagaccatagaaacaagctgaac

SEQ ID NO: 294996 - DNA, 25 bp, Artificial
  Probe
aagcagccagaccatagaaacaagc

SEQ ID NO: 294997 - DNA, 25 bp, Artificial
  Probe
tctatgggccatgtatctgcctaca

SEQ ID NO: 294998 - DNA, 25 bp, Artificial
  Probe
gtctcatctgacagtctatgggcca

SEQ ID NO: 294999 - DNA, 25 bp, Artificial
  Probe
ctagaagcagccagaccatagaaac

SEQ ID NO: 295000 - DNA, 25 bp, Artificial
  Probe
caagctgaacacagccactgataga

SEQ ID NO: 295001 - DNA, 25 bp, Artificial
  Probe
cctacaagagctgtgtacgactggc

SEQ ID NO: 295002 - DNA, 25 bp, Artificial
  Probe
cagccagaccatagaaacaagctga

SEQ ID NO: 295003 - DNA, 25 bp, Artificial
  Probe
gaacacagccactgatagacctcac

SEQ ID NO: 295004 - DNA, 25 bp, Artificial
  Probe
ttcaaaaggagctgccaaagtgtgt

SEQ ID NO: 295005 - DNA, 25 bp, Artificial
  Probe
tttcaaaaggagctgccaaagtgtg

SEQ ID NO: 295006 - DNA, 25 bp, Artificial
  Probe
gagctgccaaagtgtgtcatggatt

SEQ ID NO: 295007 - DNA, 25 bp, Artificial
  Probe
tttatgtgactttcaaaaggagctg

SEQ ID NO: 295008 - DNA, 25 bp, Artificial
  Probe
agctgccaaagtgtgtcatggattg

SEQ ID NO: 295009 - DNA, 25 bp, Artificial
  Probe
ggagctgccaaagtgtgtcatggat

SEQ ID NO: 295010 - DNA, 25 bp, Artificial
  Probe
tttttgctagatttttttttatgtg

SEQ ID NO: 295011 - DNA, 25 bp, Artificial
  Probe
ttatgtgactttcaaaaggagctgc

SEQ ID NO: 295012 - DNA, 25 bp, Artificial
  Probe
caaaaggagctgccaaagtgtgtca

SEQ ID NO: 295013 - DNA, 25 bp, Artificial
  Probe
tttgctagatttttttttatgtgac

SEQ ID NO: 295014 - DNA, 25 bp, Artificial
  Probe
tcaaaaggagctgccaaagtgtgtc

SEQ ID NO: 295015 - DNA, 25 bp, Artificial
  Probe
tgccaaagtgtgtcatggattggcg

SEQ ID NO: 295016 - DNA, 25 bp, Artificial
  Probe
aggagctgccaaagtgtgtcatgga

SEQ ID NO: 295017 - DNA, 25 bp, Artificial
  Probe
gctgccaaagtgtgtcatggattgg

SEQ ID NO: 295018 - DNA, 25 bp, Artificial
  Probe
tttttatgtgactttcaaaaggagc

SEQ ID NO: 295019 - DNA, 25 bp, Artificial
  Probe
aaaaggagctgccaaagtgtgtcat

SEQ ID NO: 295020 - DNA, 25 bp, Artificial
  Probe
ttttttatgtgactttcaaaaggag

SEQ ID NO: 295021 - DNA, 25 bp, Artificial
  Probe
aaaggagctgccaaagtgtgtcatg

SEQ ID NO: 295022 - DNA, 25 bp, Artificial
  Probe
tgactttcaaaaggagctgccaaag

SEQ ID NO: 295023 - DNA, 25 bp, Artificial
  Probe
ttttatgtgactttcaaaaggagct

SEQ ID NO: 295024 - DNA, 25 bp, Artificial
  Probe
ttttgctagatttttttttatgtga

SEQ ID NO: 295025 - DNA, 25 bp, Artificial
  Probe
ctgccaaagtgtgtcatggattggc

SEQ ID NO: 295026 - DNA, 25 bp, Artificial
  Probe
ttgctagatttttttttatgtgact

SEQ ID NO: 295027 - DNA, 25 bp, Artificial
  Probe
aaggagctgccaaagtgtgtcatgg

SEQ ID NO: 295028 - DNA, 25 bp, Artificial
  Probe
actttcaaaaggagctgccaaagtg

SEQ ID NO: 295029 - DNA, 25 bp, Artificial
  Probe
gactttcaaaaggagctgccaaagt

SEQ ID NO: 295030 - DNA, 25 bp, Artificial
  Probe
gtgactttcaaaaggagctgccaaa

SEQ ID NO: 295031 - DNA, 25 bp, Artificial
  Probe
tatgtgactttcaaaaggagctgcc

SEQ ID NO: 295032 - DNA, 25 bp, Artificial
  Probe
ctttcaaaaggagctgccaaagtgt

SEQ ID NO: 295033 - DNA, 25 bp, Artificial
  Probe
catctaaggctttgccgtccctgtc

SEQ ID NO: 295034 - DNA, 25 bp, Artificial
  Probe
gactggtgctcctggatccccaacg

SEQ ID NO: 295035 - DNA, 25 bp, Artificial
  Probe
acgtttatggcatgcggggcagaaa

SEQ ID NO: 295036 - DNA, 25 bp, Artificial
  Probe
ggcctcccatccagagcaggggtgt

SEQ ID NO: 295037 - DNA, 25 bp, Artificial
  Probe
atcgagaagccagtgaaagaagcca

SEQ ID NO: 295038 - DNA, 25 bp, Artificial
  Probe
agctctctgggcaggccagtggctt

SEQ ID NO: 295039 - DNA, 25 bp, Artificial
  Probe
ggctgttctaggtgggaaattcaca

SEQ ID NO: 295040 - DNA, 25 bp, Artificial
  Probe
catgttggcatctaggtgcagtgtg

SEQ ID NO: 295041 - DNA, 25 bp, Artificial
  Probe
tcccaagctagcagtgccgctcttg

SEQ ID NO: 295042 - DNA, 25 bp, Artificial
  Probe
ggtaagcatctactatgaggatgac

SEQ ID NO: 295043 - DNA, 25 bp, Artificial
  Probe
aaggcccggggcatggacaacaccg

SEQ ID NO: 295044 - DNA, 25 bp, Artificial
  Probe
acccccttttcaagctgctggtagc

SEQ ID NO: 295045 - DNA, 25 bp, Artificial
  Probe
tgtttacgtttatggcatgcggggc

SEQ ID NO: 295046 - DNA, 25 bp, Artificial
  Probe
ctactatgaggatgaccaggtggtg

SEQ ID NO: 295047 - DNA, 25 bp, Artificial
  Probe
taagtgataatgttccactgggtca

SEQ ID NO: 295048 - DNA, 25 bp, Artificial
  Probe
ccctactacttctatcgtgatgatg

SEQ ID NO: 295049 - DNA, 25 bp, Artificial
  Probe
tgacaaggccaatgccaccggaggt

SEQ ID NO: 295050 - DNA, 25 bp, Artificial
  Probe
ttgagccagtttcaagagaatgagc

SEQ ID NO: 295051 - DNA, 25 bp, Artificial
  Probe
gagcttcagcacatgctacttcttc

SEQ ID NO: 295052 - DNA, 25 bp, Artificial
  Probe
ccagcagctctctgggcaggccagt

SEQ ID NO: 295053 - DNA, 25 bp, Artificial
  Probe
gcttagtaacctcttcactcagtag

SEQ ID NO: 295054 - DNA, 25 bp, Artificial
  Probe
ctcttgggcccaggtgtggttgtaa

SEQ ID NO: 295055 - DNA, 25 bp, Artificial
  Probe
cctccaactgcctgcatacagtagg

SEQ ID NO: 295056 - DNA, 25 bp, Artificial
  Probe
tccatcaagagcagggagaaattgt

SEQ ID NO: 295057 - DNA, 25 bp, Artificial
  Probe
ggcagaaaggcctcaggtttcccca

SEQ ID NO: 295058 - DNA, 25 bp, Artificial
  Probe
ggcttgcctggcaggctgtagatct

SEQ ID NO: 295059 - DNA, 25 bp, Artificial
  Probe
gaagccatgattcgattccgcaaga

SEQ ID NO: 295060 - DNA, 25 bp, Artificial
  Probe
gcagtgtgggccttgagccagtttc

SEQ ID NO: 295061 - DNA, 25 bp, Artificial
  Probe
atggtgcagagagctgtccaggacc

SEQ ID NO: 295062 - DNA, 25 bp, Artificial
  Probe
gaaattgtctgagtacctgacggtg

SEQ ID NO: 295063 - DNA, 25 bp, Artificial
  Probe
ggtgtggtcaccatcgagcagattg

SEQ ID NO: 295064 - DNA, 25 bp, Artificial
  Probe
tgtaccgccagctgcctgctgtgca

SEQ ID NO: 295065 - DNA, 25 bp, Artificial
  Probe
aggaggaccaggaactgcaggactt

SEQ ID NO: 295066 - DNA, 25 bp, Artificial
  Probe
attgccgagcgcaataagaacaaaa

SEQ ID NO: 295067 - DNA, 25 bp, Artificial
  Probe
tgggcccaggtgtggttgtaaacta

SEQ ID NO: 295068 - DNA, 25 bp, Artificial
  Probe
aggacctgacctattcctccctgtg

SEQ ID NO: 295069 - DNA, 25 bp, Artificial
  Probe
gaatgagctgtttctgggcatgtac

SEQ ID NO: 295070 - DNA, 25 bp, Artificial
  Probe
caggacttcgtgaaggatgtttacg

SEQ ID NO: 295071 - DNA, 25 bp, Artificial
  Probe
aggctgttctaggtgggaaattcac

SEQ ID NO: 295072 - DNA, 25 bp, Artificial
  Probe
ggaaattcacagagcttcagcacat

SEQ ID NO: 295073 - DNA, 25 bp, Artificial
  Probe
gggtccatcattctacttatgcttc

SEQ ID NO: 295074 - DNA, 25 bp, Artificial
  Probe
gatcttccagcagctggtgcctctc

SEQ ID NO: 295075 - DNA, 25 bp, Artificial
  Probe
tggacaacaccgaggacatccccta

SEQ ID NO: 295076 - DNA, 25 bp, Artificial
  Probe
ctgtcaccagacagattccaaacag

SEQ ID NO: 295077 - DNA, 25 bp, Artificial
  Probe
tgtgcttcccggaggccatcaaggc

SEQ ID NO: 295078 - DNA, 25 bp, Artificial
  Probe
ctcagtagcaacagagtaagtgata

SEQ ID NO: 295079 - DNA, 25 bp, Artificial
  Probe
catgttgtatctggacgagtacgac

SEQ ID NO: 295080 - DNA, 25 bp, Artificial
  Probe
ccatttccatgttgtatctggacga

SEQ ID NO: 295081 - DNA, 25 bp, Artificial
  Probe
ccgttaattctagcatccctaaggc

SEQ ID NO: 295082 - DNA, 25 bp, Artificial
  Probe
gaccctggtcaactccgttaattct

SEQ ID NO: 295083 - DNA, 25 bp, Artificial
  Probe
gttgtatctggacgagtacgacaag

SEQ ID NO: 295084 - DNA, 25 bp, Artificial
  Probe
taagaactgccgtcgccattcgctc

SEQ ID NO: 295085 - DNA, 25 bp, Artificial
  Probe
cggatgccgctgaaatcaggcagtc

SEQ ID NO: 295086 - DNA, 25 bp, Artificial
  Probe
gccgctgaaatcaggcagtccggag

SEQ ID NO: 295087 - DNA, 25 bp, Artificial
  Probe
gcggatgccgctgaaatcaggcagt

SEQ ID NO: 295088 - DNA, 25 bp, Artificial
  Probe
ttccatgttgtatctggacgagtac

SEQ ID NO: 295089 - DNA, 25 bp, Artificial
  Probe
ccatgttgtatctggacgagtacga

SEQ ID NO: 295090 - DNA, 25 bp, Artificial
  Probe
ggtcaactccgttaattctagcatc

SEQ ID NO: 295091 - DNA, 25 bp, Artificial
  Probe
cattcgctctacgtggacttcagtg

SEQ ID NO: 295092 - DNA, 25 bp, Artificial
  Probe
tatctggacgagtacgacaaggtgg

SEQ ID NO: 295093 - DNA, 25 bp, Artificial
  Probe
ttaattctagcatccctaaggcctg

SEQ ID NO: 295094 - DNA, 25 bp, Artificial
  Probe
gtatctggacgagtacgacaaggtg

SEQ ID NO: 295095 - DNA, 25 bp, Artificial
  Probe
gccatttccatgttgtatctggacg

SEQ ID NO: 295096 - DNA, 25 bp, Artificial
  Probe
actgagcgccatttccatgttgtat

SEQ ID NO: 295097 - DNA, 25 bp, Artificial
  Probe
gttaattctagcatccctaaggcct

SEQ ID NO: 295098 - DNA, 25 bp, Artificial
  Probe
tccgttaattctagcatccctaagg

SEQ ID NO: 295099 - DNA, 25 bp, Artificial
  Probe
tccatgttgtatctggacgagtacg

SEQ ID NO: 295100 - DNA, 25 bp, Artificial
  Probe
atctggacgagtacgacaaggtggt

SEQ ID NO: 295101 - DNA, 25 bp, Artificial
  Probe
tgccgtcgccattcgctctacgtgg

SEQ ID NO: 295102 - DNA, 25 bp, Artificial
  Probe
tcgctctacgtggacttcagtgacg

SEQ ID NO: 295103 - DNA, 25 bp, Artificial
  Probe
cgttaattctagcatccctaaggcc

SEQ ID NO: 295104 - DNA, 25 bp, Artificial
  Probe
tgccgctgaaatcaggcagtccgga

SEQ ID NO: 295105 - DNA, 25 bp, Artificial
  Probe
tggtcaactccgttaattctagcat

SEQ ID NO: 295106 - DNA, 25 bp, Artificial
  Probe
cgctctacgtggacttcagtgacgt

SEQ ID NO: 295107 - DNA, 25 bp, Artificial
  Probe
cgccattcgctctacgtggacttca

SEQ ID NO: 295108 - DNA, 25 bp, Artificial
  Probe
gtcgccattcgctctacgtggactt

SEQ ID NO: 295109 - DNA, 25 bp, Artificial
  Probe
gctctacgtggacttcagtgacgtg

SEQ ID NO: 295110 - DNA, 25 bp, Artificial
  Probe
cgccatttccatgttgtatctggac

SEQ ID NO: 295111 - DNA, 25 bp, Artificial
  Probe
ttgtatctggacgagtacgacaagg

SEQ ID NO: 295112 - DNA, 25 bp, Artificial
  Probe
gatgccgctgaaatcaggcagtccg

SEQ ID NO: 295113 - DNA, 25 bp, Artificial
  Probe
attcgctctacgtggacttcagtga

SEQ ID NO: 295114 - DNA, 25 bp, Artificial
  Probe
tcgccattcgctctacgtggacttc

SEQ ID NO: 295115 - DNA, 25 bp, Artificial
  Probe
catttccatgttgtatctggacgag

SEQ ID NO: 295116 - DNA, 25 bp, Artificial
  Probe
atgccgctgaaatcaggcagtccgg

SEQ ID NO: 295117 - DNA, 25 bp, Artificial
  Probe
ttcgctctacgtggacttcagtgac

SEQ ID NO: 295118 - DNA, 25 bp, Artificial
  Probe
ccattcgctctacgtggacttcagt

SEQ ID NO: 295119 - DNA, 25 bp, Artificial
  Probe
tgtgcagaccctggtcaactccgtt

SEQ ID NO: 295120 - DNA, 25 bp, Artificial
  Probe
tgcggatgccgctgaaatcaggcag

SEQ ID NO: 295121 - DNA, 25 bp, Artificial
  Probe
gagcgccatttccatgttgtatctg

SEQ ID NO: 295122 - DNA, 25 bp, Artificial
  Probe
ctgaaatcaggcagtccggaggacg

SEQ ID NO: 295123 - DNA, 25 bp, Artificial
  Probe
tttccatgttgtatctggacgagta

SEQ ID NO: 295124 - DNA, 25 bp, Artificial
  Probe
gccattcgctctacgtggacttcag

SEQ ID NO: 295125 - DNA, 25 bp, Artificial
  Probe
gccagaatggatacccctctaaaca

SEQ ID NO: 295126 - DNA, 25 bp, Artificial
  Probe
gcaatcagagctcaacatggcggca

SEQ ID NO: 295127 - DNA, 25 bp, Artificial
  Probe
cagtgccatccctggacttcagaac

SEQ ID NO: 295128 - DNA, 25 bp, Artificial
  Probe
cctgcataagaagctgccccggtga

SEQ ID NO: 295129 - DNA, 25 bp, Artificial
  Probe
accctggcaggcacagacacagcgg

SEQ ID NO: 295130 - DNA, 25 bp, Artificial
  Probe
ctcctgcaagataggggctccctgg

SEQ ID NO: 295131 - DNA, 25 bp, Artificial
  Probe
actggcagcgtaaccggccttggcc

SEQ ID NO: 295132 - DNA, 25 bp, Artificial
  Probe
gcctaaggacagctactgaccacct

SEQ ID NO: 295133 - DNA, 25 bp, Artificial
  Probe
tgctaacgggcatgacccccaagac

SEQ ID NO: 295134 - DNA, 25 bp, Artificial
  Probe
acttcagaaccagcagctgctgggg

SEQ ID NO: 295135 - DNA, 25 bp, Artificial
  Probe
gtgaggagcattcacccctggagcg

SEQ ID NO: 295136 - DNA, 25 bp, Artificial
  Probe
ctgccacttgttaagttagggttag

SEQ ID NO: 295137 - DNA, 25 bp, Artificial
  Probe
ggctcctagcccaggactcggagca

SEQ ID NO: 295138 - DNA, 25 bp, Artificial
  Probe
cctaagcaaaggaactccgttcacg

SEQ ID NO: 295139 - DNA, 25 bp, Artificial
  Probe
tgccgcacattagaaatgaagcaat

SEQ ID NO: 295140 - DNA, 25 bp, Artificial
  Probe
ctccatgcctcctgcaagatagggg

SEQ ID NO: 295141 - DNA, 25 bp, Artificial
  Probe
tcgtagctgccacttgttaagttag

SEQ ID NO: 295142 - DNA, 25 bp, Artificial
  Probe
ctcctgggcacagtgaccccgtagg

SEQ ID NO: 295143 - DNA, 25 bp, Artificial
  Probe
gcgtctgtcatttctgttccttccc

SEQ ID NO: 295144 - DNA, 25 bp, Artificial
  Probe
ctcaccaaaccaggaagcttagcat

SEQ ID NO: 295145 - DNA, 25 bp, Artificial
  Probe
gagcaggcgtaaaccctaagcaaag

SEQ ID NO: 295146 - DNA, 25 bp, Artificial
  Probe
cgttcacgtcactgccgcacattag

SEQ ID NO: 295147 - DNA, 25 bp, Artificial
  Probe
gaagagacatggttcctgagcaggc

SEQ ID NO: 295148 - DNA, 25 bp, Artificial
  Probe
ggaccggatcttcacagcgcagctc

SEQ ID NO: 295149 - DNA, 25 bp, Artificial
  Probe
gtccagggctgactgtggtcccaag

SEQ ID NO: 295150 - DNA, 25 bp, Artificial
  Probe
taggttcagctcacacaaccctctg

SEQ ID NO: 295151 - DNA, 25 bp, Artificial
  Probe
ctagaggtttactggcgcgctaccc

SEQ ID NO: 295152 - DNA, 25 bp, Artificial
  Probe
tcggatgaggccagtgagagctccc

SEQ ID NO: 295153 - DNA, 25 bp, Artificial
  Probe
gggacagtttgatgccctcggatga

SEQ ID NO: 295154 - DNA, 25 bp, Artificial
  Probe
tgtgttctgcatccttggcaccttc

SEQ ID NO: 295155 - DNA, 25 bp, Artificial
  Probe
acacctcggggctacccagtgctaa

SEQ ID NO: 295156 - DNA, 25 bp, Artificial
  Probe
gaggactatgcagatgcctaccagg

SEQ ID NO: 295157 - DNA, 25 bp, Artificial
  Probe
gtcccaaggttctgggagaagcaag

SEQ ID NO: 295158 - DNA, 25 bp, Artificial
  Probe
gctttcctcattctttgcccttgcg

SEQ ID NO: 295159 - DNA, 25 bp, Artificial
  Probe
caagactagggaactggggcacagt

SEQ ID NO: 295160 - DNA, 25 bp, Artificial
  Probe
tgaggagcattcacccctggagcgg

SEQ ID NO: 295161 - DNA, 25 bp, Artificial
  Probe
gaacagccccagaggctgtcacctg

SEQ ID NO: 295162 - DNA, 25 bp, Artificial
  Probe
tcctcaccaaaccaggaagcttagc

SEQ ID NO: 295163 - DNA, 25 bp, Artificial
  Probe
gttagattggcgttaggctgcctct

SEQ ID NO: 295164 - DNA, 25 bp, Artificial
  Probe
ttggcctaaggacagctactgacca

SEQ ID NO: 295165 - DNA, 25 bp, Artificial
  Probe
ggggcacagtcaagcccaaagccgg

SEQ ID NO: 295166 - DNA, 25 bp, Artificial
  Probe
aatgaagcaatcagagctcaacatg

SEQ ID NO: 295167 - DNA, 25 bp, Artificial
  Probe
gatgcctaccaggacctgtaccagc

SEQ ID NO: 295168 - DNA, 25 bp, Artificial
  Probe
ggcctggaccggatcttcacagcgc

SEQ ID NO: 295169 - DNA, 25 bp, Artificial
  Probe
ggaacagacacaatgaacagcccca

SEQ ID NO: 295170 - DNA, 25 bp, Artificial
  Probe
ctggcaggcacagacacagcggctg

SEQ ID NO: 295171 - DNA, 25 bp, Artificial
  Probe
aaaggcagaatctgccatttccaat

SEQ ID NO: 295172 - DNA, 25 bp, Artificial
  Probe
ggaccaacctgagagcaccgtttaa

SEQ ID NO: 295173 - DNA, 25 bp, Artificial
  Probe
tgagcactgtggaaaggggacccaa

SEQ ID NO: 295174 - DNA, 25 bp, Artificial
  Probe
tctgcccctctatctcatagtgggg

SEQ ID NO: 295175 - DNA, 25 bp, Artificial
  Probe
actgtccagagaaaggtctgcccct

SEQ ID NO: 295176 - DNA, 25 bp, Artificial
  Probe
gtaaacagggtcagccaggagtctg

SEQ ID NO: 295177 - DNA, 25 bp, Artificial
  Probe
agttaccagtggaccaacctgagag

SEQ ID NO: 295178 - DNA, 25 bp, Artificial
  Probe
agttgtcaactgtccagagaaaggt

SEQ ID NO: 295179 - DNA, 25 bp, Artificial
  Probe
accagtggaccaacctgagagcacc

SEQ ID NO: 295180 - DNA, 25 bp, Artificial
  Probe
cgtttaagtgcaaggcggtaaacag

SEQ ID NO: 295181 - DNA, 25 bp, Artificial
  Probe
cagccaggagtctgagatggaagtt

SEQ ID NO: 295182 - DNA, 25 bp, Artificial
  Probe
tgagagcaccgtttaagtgcaaggc

SEQ ID NO: 295183 - DNA, 25 bp, Artificial
  Probe
ctgagagcaccgtttaagtgcaagg

SEQ ID NO: 295184 - DNA, 25 bp, Artificial
  Probe
cagagaaaggtctgcccctctatct

SEQ ID NO: 295185 - DNA, 25 bp, Artificial
  Probe
ccaacctgagagcaccgtttaagtg

SEQ ID NO: 295186 - DNA, 25 bp, Artificial
  Probe
tcagccaggagtctgagatggaagt

SEQ ID NO: 295187 - DNA, 25 bp, Artificial
  Probe
agtggaccaacctgagagcaccgtt

SEQ ID NO: 295188 - DNA, 25 bp, Artificial
  Probe
tgtcaactgtccagagaaaggtctg

SEQ ID NO: 295189 - DNA, 25 bp, Artificial
  Probe
atcacagaatccagtggcttcccaa

SEQ ID NO: 295190 - DNA, 25 bp, Artificial
  Probe
gttaccagtggaccaacctgagagc

SEQ ID NO: 295191 - DNA, 25 bp, Artificial
  Probe
gcaccgtttaagtgcaaggcggtaa

SEQ ID NO: 295192 - DNA, 25 bp, Artificial
  Probe
catcacagaatccagtggcttccca

SEQ ID NO: 295193 - DNA, 25 bp, Artificial
  Probe
tgagttaccagtggaccaacctgag

SEQ ID NO: 295194 - DNA, 25 bp, Artificial
  Probe
catgagttaccagtggaccaacctg

SEQ ID NO: 295195 - DNA, 25 bp, Artificial
  Probe
ccaggagtctgagatggaagttgtc

SEQ ID NO: 295196 - DNA, 25 bp, Artificial
  Probe
agcaccgtttaagtgcaaggcggta

SEQ ID NO: 295197 - DNA, 25 bp, Artificial
  Probe
gcaggaggactcctcttggtgttct

SEQ ID NO: 295198 - DNA, 25 bp, Artificial
  Probe
ctgtccagagaaaggtctgcccctc

SEQ ID NO: 295199 - DNA, 25 bp, Artificial
  Probe
acagggtcagccaggagtctgagat

SEQ ID NO: 295200 - DNA, 25 bp, Artificial
  Probe
ccagtggaccaacctgagagcaccg

SEQ ID NO: 295201 - DNA, 25 bp, Artificial
  Probe
ggtcagtgcaggaggactcctcttg

SEQ ID NO: 295202 - DNA, 25 bp, Artificial
  Probe
gagcaccgtttaagtgcaaggcggt

SEQ ID NO: 295203 - DNA, 25 bp, Artificial
  Probe
caggaggactcctcttggtgttctt

SEQ ID NO: 295204 - DNA, 25 bp, Artificial
  Probe
cggtaaacagggtcagccaggagtc

SEQ ID NO: 295205 - DNA, 25 bp, Artificial
  Probe
cacagaatccagtggcttcccaagc

SEQ ID NO: 295206 - DNA, 25 bp, Artificial
  Probe
ggtaaacagggtcagccaggagtct

SEQ ID NO: 295207 - DNA, 25 bp, Artificial
  Probe
aatgagcactgtggaaaggggaccc

SEQ ID NO: 295208 - DNA, 25 bp, Artificial
  Probe
gtcaactgtccagagaaaggtctgc

SEQ ID NO: 295209 - DNA, 25 bp, Artificial
  Probe
caacctgagagcaccgtttaagtgc

SEQ ID NO: 295210 - DNA, 25 bp, Artificial
  Probe
ccagagaaaggtctgcccctctatc

SEQ ID NO: 295211 - DNA, 25 bp, Artificial
  Probe
ggaagttgtcaactgtccagagaaa

SEQ ID NO: 295212 - DNA, 25 bp, Artificial
  Probe
atgagcactgtggaaaggggaccca

SEQ ID NO: 295213 - DNA, 25 bp, Artificial
  Probe
aagttgtcaactgtccagagaaagg

SEQ ID NO: 295214 - DNA, 25 bp, Artificial
  Probe
gaccaacctgagagcaccgtttaag

SEQ ID NO: 295215 - DNA, 25 bp, Artificial
  Probe
gaatccagtggcttcccaagctcct

SEQ ID NO: 295216 - DNA, 25 bp, Artificial
  Probe
taccagtggaccaacctgagagcac

SEQ ID NO: 295217 - DNA, 25 bp, Artificial
  Probe
cgaaaggagttctcccagtgcacgg

SEQ ID NO: 295218 - DNA, 25 bp, Artificial
  Probe
tgctttggtttctgtgactgtgctc

SEQ ID NO: 295219 - DNA, 25 bp, Artificial
  Probe
aatgaggcgccctgggtgactgaca

SEQ ID NO: 295220 - DNA, 25 bp, Artificial
  Probe
ccagatcatcattgatgggatagat

SEQ ID NO: 295221 - DNA, 25 bp, Artificial
  Probe
agcatagggcagaggcagctcctat

SEQ ID NO: 295222 - DNA, 25 bp, Artificial
  Probe
ggggccagatcatcattgatgggat

SEQ ID NO: 295223 - DNA, 25 bp, Artificial
  Probe
cgatttctagcttggaatgagaagc

SEQ ID NO: 295224 - DNA, 25 bp, Artificial
  Probe
gttccgccttgctgctggttattta

SEQ ID NO: 295225 - DNA, 25 bp, Artificial
  Probe
gtactgaaagggatcacttgtaaca

SEQ ID NO: 295226 - DNA, 25 bp, Artificial
  Probe
ttcccgttgctcaggctggcctcaa

SEQ ID NO: 295227 - DNA, 25 bp, Artificial
  Probe
cctggagttggctcacctcagatcc

SEQ ID NO: 295228 - DNA, 25 bp, Artificial
  Probe
cttgtaacatcaagagcggagagaa

SEQ ID NO: 295229 - DNA, 25 bp, Artificial
  Probe
atcacacaaaccttgaactggctag

SEQ ID NO: 295230 - DNA, 25 bp, Artificial
  Probe
aatgtgaatcacacagagctctagc

SEQ ID NO: 295231 - DNA, 25 bp, Artificial
  Probe
aggatgacgtcagaagcagagacca

SEQ ID NO: 295232 - DNA, 25 bp, Artificial
  Probe
tggttccgtggctggcggactataa

SEQ ID NO: 295233 - DNA, 25 bp, Artificial
  Probe
gataatggtcctagacaacgggaag

SEQ ID NO: 295234 - DNA, 25 bp, Artificial
  Probe
gaggcctccggcagactggcccaga

SEQ ID NO: 295235 - DNA, 25 bp, Artificial
  Probe
acaggtggcttgcaattcggctgga

SEQ ID NO: 295236 - DNA, 25 bp, Artificial
  Probe
ttcggctggagctggttggaaactt

SEQ ID NO: 295237 - DNA, 25 bp, Artificial
  Probe
caacattgtggcagttgagcgaata

SEQ ID NO: 295238 - DNA, 25 bp, Artificial
  Probe
cttgggttgttatccgaagtgacag

SEQ ID NO: 295239 - DNA, 25 bp, Artificial
  Probe
ggcagggctgtgcttcgaaaatcca

SEQ ID NO: 295240 - DNA, 25 bp, Artificial
  Probe
tggctggcggactataagaacagtt

SEQ ID NO: 295241 - DNA, 25 bp, Artificial
  Probe
atggtcctagacaacgggaagattg

SEQ ID NO: 295242 - DNA, 25 bp, Artificial
  Probe
atagatgttgcctccattggactgc

SEQ ID NO: 295243 - DNA, 25 bp, Artificial
  Probe
gtggtgacaacctgagcatagggca

SEQ ID NO: 295244 - DNA, 25 bp, Artificial
  Probe
aagattgtcgagtatggcagtcctg

SEQ ID NO: 295245 - DNA, 25 bp, Artificial
  Probe
agaggcagctcctatgcctgggcag

SEQ ID NO: 295246 - DNA, 25 bp, Artificial
  Probe
aagccggcattgaaaatgtgaatca

SEQ ID NO: 295247 - DNA, 25 bp, Artificial
  Probe
cccattttgttctcggggagtctga

SEQ ID NO: 295248 - DNA, 25 bp, Artificial
  Probe
gacgttgtgggctttgttctgtcca

SEQ ID NO: 295249 - DNA, 25 bp, Artificial
  Probe
catcatggacagtgacaagataatg

SEQ ID NO: 295250 - DNA, 25 bp, Artificial
  Probe
gctttgttctgtccaacgccctcaa

SEQ ID NO: 295251 - DNA, 25 bp, Artificial
  Probe
tgcctcttcagaatcttagagtctg

SEQ ID NO: 295252 - DNA, 25 bp, Artificial
  Probe
gctcacaggctgcacaccatcatgg

SEQ ID NO: 295253 - DNA, 25 bp, Artificial
  Probe
tggcctcaaactctaaggctccagc

SEQ ID NO: 295254 - DNA, 25 bp, Artificial
  Probe
cctttcaacaaatattcagatgagg

SEQ ID NO: 295255 - DNA, 25 bp, Artificial
  Probe
tgcaaagacacatattttgttcccg

SEQ ID NO: 295256 - DNA, 25 bp, Artificial
  Probe
agattgacatcaaccagaaatgtgt

SEQ ID NO: 295257 - DNA, 25 bp, Artificial
  Probe
gagaggctgaccatcattccccagg

SEQ ID NO: 295258 - DNA, 25 bp, Artificial
  Probe
caattcggctggagctggttggaaa

SEQ ID NO: 295259 - DNA, 25 bp, Artificial
  Probe
ccccattttgttctcggggagtctg

SEQ ID NO: 295260 - DNA, 25 bp, Artificial
  Probe
ctttcaacaaatattcagatgagga

SEQ ID NO: 295261 - DNA, 25 bp, Artificial
  Probe
cttcagaatcttagagtctgcgggg

SEQ ID NO: 295262 - DNA, 25 bp, Artificial
  Probe
tggttggaaacttggtcgtcttctg

SEQ ID NO: 295263 - DNA, 25 bp, Artificial
  Probe
ataagacatcctaccgctggttcct

SEQ ID NO: 295264 - DNA, 25 bp, Artificial
  Probe
ggaacagctccgaaatgcgttgtgg

SEQ ID NO: 295265 - DNA, 25 bp, Artificial
  Probe
ctgaccgatggactgcggtagcatc

SEQ ID NO: 295266 - DNA, 25 bp, Artificial
  Probe
ctttccgggcagtggctgaaccagg

SEQ ID NO: 295267 - DNA, 25 bp, Artificial
  Probe
ctggacacagctatgcgtggtggcc

SEQ ID NO: 295268 - DNA, 25 bp, Artificial
  Probe
actgcggtagcatcggccacaggtg

SEQ ID NO: 295269 - DNA, 25 bp, Artificial
  Probe
agacgtactggcaggccaatccttt

SEQ ID NO: 295270 - DNA, 25 bp, Artificial
  Probe
atacaatccctgaggactatgagcg

SEQ ID NO: 295271 - DNA, 25 bp, Artificial
  Probe
cccgctgaccgatggactgcggtag

SEQ ID NO: 295272 - DNA, 25 bp, Artificial
  Probe
gagaatatcatctgggctaacctgc

SEQ ID NO: 295273 - DNA, 25 bp, Artificial
  Probe
ggagcagacgtactggcaggccaat

SEQ ID NO: 295274 - DNA, 25 bp, Artificial
  Probe
tggccgcctgggtgtcttctgcttc

SEQ ID NO: 295275 - DNA, 25 bp, Artificial
  Probe
gtcctctacaggtcccggggaacag

SEQ ID NO: 295276 - DNA, 25 bp, Artificial
  Probe
gatggactgcggtagcatcggccac

SEQ ID NO: 295277 - DNA, 25 bp, Artificial
  Probe
ctccgaaatgcgttgtggcacacgg

SEQ ID NO: 295278 - DNA, 25 bp, Artificial
  Probe
tggttcctgcagcaccggcctcaag

SEQ ID NO: 295279 - DNA, 25 bp, Artificial
  Probe
tgcggttctatgagggtcctgagct

SEQ ID NO: 295280 - DNA, 25 bp, Artificial
  Probe
atcctcgaaatgtgggctggaagga

SEQ ID NO: 295281 - DNA, 25 bp, Artificial
  Probe
tccgaaatgcgttgtggcacacggg

SEQ ID NO: 295282 - DNA, 25 bp, Artificial
  Probe
tatcatctgggctaacctgcgctac

SEQ ID NO: 295283 - DNA, 25 bp, Artificial
  Probe
actatgagcgtcaccggctgcggag

SEQ ID NO: 295284 - DNA, 25 bp, Artificial
  Probe
aggccaatcctttccgggcagtggc

SEQ ID NO: 295285 - DNA, 25 bp, Artificial
  Probe
ccccgctgaccgatggactgcggta

SEQ ID NO: 295286 - DNA, 25 bp, Artificial
  Probe
gagggtcctgagctagtagctgaca

SEQ ID NO: 295287 - DNA, 25 bp, Artificial
  Probe
tctgggctaacctgcgctaccgttg

SEQ ID NO: 295288 - DNA, 25 bp, Artificial
  Probe
ggtcccggggaacagctccgaaatg

SEQ ID NO: 295289 - DNA, 25 bp, Artificial
  Probe
gctaccgttgcaatgatacaatccc

SEQ ID NO: 295290 - DNA, 25 bp, Artificial
  Probe
tgaccgatggactgcggtagcatcg

SEQ ID NO: 295291 - DNA, 25 bp, Artificial
  Probe
gctaacctgcgctaccgttgcaatg

SEQ ID NO: 295292 - DNA, 25 bp, Artificial
  Probe
ggttcctgcagcaccggcctcaagt

SEQ ID NO: 295293 - DNA, 25 bp, Artificial
  Probe
cctgcgctaccgttgcaatgataca

SEQ ID NO: 295294 - DNA, 25 bp, Artificial
  Probe
tcctttccgggcagtggctgaacca

SEQ ID NO: 295295 - DNA, 25 bp, Artificial
  Probe
ccctgaggactatgagcgtcaccgg

SEQ ID NO: 295296 - DNA, 25 bp, Artificial
  Probe
gcatctttctgaagggatgtctggc

SEQ ID NO: 295297 - DNA, 25 bp, Artificial
  Probe
tcagctcaaggctgtcaagtcctct

SEQ ID NO: 295298 - DNA, 25 bp, Artificial
  Probe
acacgggggacacagcatcccaggt

SEQ ID NO: 295299 - DNA, 25 bp, Artificial
  Probe
ctttctgaagggatgtctggcctgg

SEQ ID NO: 295300 - DNA, 25 bp, Artificial
  Probe
ccggggaacagctccgaaatgcgtt

SEQ ID NO: 295301 - DNA, 25 bp, Artificial
  Probe
cgtggtgctggacacagctatgcgt

SEQ ID NO: 295302 - DNA, 25 bp, Artificial
  Probe
tactggcaggccaatcctttccggg

SEQ ID NO: 295303 - DNA, 25 bp, Artificial
  Probe
agagaatatcatctgggctaacctg

SEQ ID NO: 295304 - DNA, 25 bp, Artificial
  Probe
gactatgagcgtcaccggctgcgga

SEQ ID NO: 295305 - DNA, 25 bp, Artificial
  Probe
aaggataagacatcctaccgctggt

SEQ ID NO: 295306 - DNA, 25 bp, Artificial
  Probe
cacagctatgcgtggtggccgcctg

SEQ ID NO: 295307 - DNA, 25 bp, Artificial
  Probe
gggtctggcatctttctgaagggat

SEQ ID NO: 295308 - DNA, 25 bp, Artificial
  Probe
ggcacacgggggacacagcatccca

SEQ ID NO: 295309 - DNA, 25 bp, Artificial
  Probe
gggttcttttagtagctgcatgctc

SEQ ID NO: 295310 - DNA, 25 bp, Artificial
  Probe
ggcctcaagaagaacgggagttgta

SEQ ID NO: 295311 - DNA, 25 bp, Artificial
  Probe
aactggctggccagtctaggtctgg

SEQ ID NO: 295312 - DNA, 25 bp, Artificial
  Probe
cctcggactcactacggccagaaag

SEQ ID NO: 295313 - DNA, 25 bp, Artificial
  Probe
cctcccggtatcttctgactaagga

SEQ ID NO: 295314 - DNA, 25 bp, Artificial
  Probe
gcacagtttggaacacggggaccaa

SEQ ID NO: 295315 - DNA, 25 bp, Artificial
  Probe
cctcagcccacagagcctgaatttg

SEQ ID NO: 295316 - DNA, 25 bp, Artificial
  Probe
gaagaactggtttgtgggcctcaag

SEQ ID NO: 295317 - DNA, 25 bp, Artificial
  Probe
ctgggtgctccctatttttggttga

SEQ ID NO: 295318 - DNA, 25 bp, Artificial
  Probe
gtgctccctatttttggttgaccct

SEQ ID NO: 295319 - DNA, 25 bp, Artificial
  Probe
ttgtaagcgcggtcctcggactcac

SEQ ID NO: 295320 - DNA, 25 bp, Artificial
  Probe
gtctgggtttggatatccagatgct

SEQ ID NO: 295321 - DNA, 25 bp, Artificial
  Probe
ttgaccattggctgcgctaaccctc

SEQ ID NO: 295322 - DNA, 25 bp, Artificial
  Probe
tctgggtttggatatccagatgctt

SEQ ID NO: 295323 - DNA, 25 bp, Artificial
  Probe
tgctccctatttttggttgacccta

SEQ ID NO: 295324 - DNA, 25 bp, Artificial
  Probe
tgttctgggtgctccctatttttgg

SEQ ID NO: 295325 - DNA, 25 bp, Artificial
  Probe
tggttgaccctaaaatgttcccttg

SEQ ID NO: 295326 - DNA, 25 bp, Artificial
  Probe
tctgactaaggagtctgttctgggt

SEQ ID NO: 295327 - DNA, 25 bp, Artificial
  Probe
aaatgttcccttgaccattggctgc

SEQ ID NO: 295328 - DNA, 25 bp, Artificial
  Probe
agaactggtttgtgggcctcaagaa

SEQ ID NO: 295329 - DNA, 25 bp, Artificial
  Probe
tctaggtctgggtttggatatccag

SEQ ID NO: 295330 - DNA, 25 bp, Artificial
  Probe
tcttttagtagctgcatgctctttc

SEQ ID NO: 295331 - DNA, 25 bp, Artificial
  Probe
actaaggagtctgttctgggtgctc

SEQ ID NO: 295332 - DNA, 25 bp, Artificial
  Probe
ctcggactcactacggccagaaagc

SEQ ID NO: 295333 - DNA, 25 bp, Artificial
  Probe
aggagtctgttctgggtgctcccta

SEQ ID NO: 295334 - DNA, 25 bp, Artificial
  Probe
caccccagcacagtttggaacacgg

SEQ ID NO: 295335 - DNA, 25 bp, Artificial
  Probe
tcccttgaccattggctgcgctaac

SEQ ID NO: 295336 - DNA, 25 bp, Artificial
  Probe
gccagaaagccatcttgtttctccc

SEQ ID NO: 295337 - DNA, 25 bp, Artificial
  Probe
tttgtgggcctcaagaagaacggga

SEQ ID NO: 295338 - DNA, 25 bp, Artificial
  Probe
taagcgcggtcctcggactcactac

SEQ ID NO: 295339 - DNA, 25 bp, Artificial
  Probe
ctcactacggccagaaagccatctt

SEQ ID NO: 295340 - DNA, 25 bp, Artificial
  Probe
gtctgttctgggtgctccctatttt

SEQ ID NO: 295341 - DNA, 25 bp, Artificial
  Probe
ggtcctcggactcactacggccaga

SEQ ID NO: 295342 - DNA, 25 bp, Artificial
  Probe
gtttggatatccagatgcttcaggg

SEQ ID NO: 295343 - DNA, 25 bp, Artificial
  Probe
ctcagcccacagagcctgaatttgt

SEQ ID NO: 295344 - DNA, 25 bp, Artificial
  Probe
ggatatccagatgcttcagggtacc

SEQ ID NO: 295345 - DNA, 25 bp, Artificial
  Probe
gtgggttcttttagtagctgcatgc

SEQ ID NO: 295346 - DNA, 25 bp, Artificial
  Probe
cttttagtagctgcatgctctttcc

SEQ ID NO: 295347 - DNA, 25 bp, Artificial
  Probe
ctgttctgggtgctccctatttttg

SEQ ID NO: 295348 - DNA, 25 bp, Artificial
  Probe
ctaggtctgggtttggatatccaga

SEQ ID NO: 295349 - DNA, 25 bp, Artificial
  Probe
ttggatatccagatgcttcagggta

SEQ ID NO: 295350 - DNA, 25 bp, Artificial
  Probe
gttcttttagtagctgcatgctctt

SEQ ID NO: 295351 - DNA, 25 bp, Artificial
  Probe
tgggtgctccctatttttggttgac

SEQ ID NO: 295352 - DNA, 25 bp, Artificial
  Probe
gccagtctaggtctgggtttggata

SEQ ID NO: 295353 - DNA, 25 bp, Artificial
  Probe
ctacggccagaaagccatcttgttt

SEQ ID NO: 295354 - DNA, 25 bp, Artificial
  Probe
ccagtctaggtctgggtttggatat

SEQ ID NO: 295355 - DNA, 25 bp, Artificial
  Probe
tgaccctgaacttctgccagctcgg

SEQ ID NO: 295356 - DNA, 25 bp, Artificial
  Probe
cctcaatcaagaggtgaggacggag

SEQ ID NO: 295357 - DNA, 25 bp, Artificial
  Probe
ggacctgcactgagtggaccacacc

SEQ ID NO: 295358 - DNA, 25 bp, Artificial
  Probe
attcctcatcccttggctgcagctg

SEQ ID NO: 295359 - DNA, 25 bp, Artificial
  Probe
ctccccgatcgagagtgaaggtgct

SEQ ID NO: 295360 - DNA, 25 bp, Artificial
  Probe
tccgtctacccctggagctgggact

SEQ ID NO: 295361 - DNA, 25 bp, Artificial
  Probe
gtgcattcctcatcccttggctgca

SEQ ID NO: 295362 - DNA, 25 bp, Artificial
  Probe
aggctattgcccaaggcccagggaa

SEQ ID NO: 295363 - DNA, 25 bp, Artificial
  Probe
tcttcaacttcctgcctgacagtgc

SEQ ID NO: 295364 - DNA, 25 bp, Artificial
  Probe
ttccggtgcattcctcatcccttgg

SEQ ID NO: 295365 - DNA, 25 bp, Artificial
  Probe
tgcccaaggcccagggaaaccaata

SEQ ID NO: 295366 - DNA, 25 bp, Artificial
  Probe
taggtccctgtataccaacctccga

SEQ ID NO: 295367 - DNA, 25 bp, Artificial
  Probe
gactttctcagttcctgtatgcccc

SEQ ID NO: 295368 - DNA, 25 bp, Artificial
  Probe
atcccttggctgcagctgcctcatt

SEQ ID NO: 295369 - DNA, 25 bp, Artificial
  Probe
ggtatggccatgaccctgaacttct

SEQ ID NO: 295370 - DNA, 25 bp, Artificial
  Probe
ttgcacttccggtgcattcctcatc

SEQ ID NO: 295371 - DNA, 25 bp, Artificial
  Probe
cccgatcgagagtgaaggtgctcac

SEQ ID NO: 295372 - DNA, 25 bp, Artificial
  Probe
ccagctcggcggacctgcactgagt

SEQ ID NO: 295373 - DNA, 25 bp, Artificial
  Probe
ggctattgcccaaggcccagggaaa

SEQ ID NO: 295374 - DNA, 25 bp, Artificial
  Probe
gctcttgtcagcagccattatttgc

SEQ ID NO: 295375 - DNA, 25 bp, Artificial
  Probe
tggccatgaccctgaacttctgcca

SEQ ID NO: 295376 - DNA, 25 bp, Artificial
  Probe
tcaatgtggctctgaaggggagctc

SEQ ID NO: 295377 - DNA, 25 bp, Artificial
  Probe
tatctaggctattgcccaaggccca

SEQ ID NO: 295378 - DNA, 25 bp, Artificial
  Probe
cgtctacccctggagctgggactgg

SEQ ID NO: 295379 - DNA, 25 bp, Artificial
  Probe
atgaccctgaacttctgccagctcg

SEQ ID NO: 295380 - DNA, 25 bp, Artificial
  Probe
tcctatctaggctattgcccaaggc

SEQ ID NO: 295381 - DNA, 25 bp, Artificial
  Probe
acgcaaatggtatggccatgaccct

SEQ ID NO: 295382 - DNA, 25 bp, Artificial
  Probe
ctcggcggacctgcactgagtggac

SEQ ID NO: 295383 - DNA, 25 bp, Artificial
  Probe
cttgtacatgagtgatctgcagttg

SEQ ID NO: 295384 - DNA, 25 bp, Artificial
  Probe
gctctgaaggggagctcttgtcagc

SEQ ID NO: 295385 - DNA, 25 bp, Artificial
  Probe
ctccgactttctcagttcctgtatg

SEQ ID NO: 295386 - DNA, 25 bp, Artificial
  Probe
gaaaccaataaacttgtacatgagt

SEQ ID NO: 295387 - DNA, 25 bp, Artificial
  Probe
attatttgcacttccggtgcattcc

SEQ ID NO: 295388 - DNA, 25 bp, Artificial
  Probe
catgagtgatctgcagttgagtcaa

SEQ ID NO: 295389 - DNA, 25 bp, Artificial
  Probe
tgatctgcagttgagtcaatgtggc

SEQ ID NO: 295390 - DNA, 25 bp, Artificial
  Probe
gctttctctaggtccctgtatacca

SEQ ID NO: 295391 - DNA, 25 bp, Artificial
  Probe
gcctgacagtgctggccttggcatc

SEQ ID NO: 295392 - DNA, 25 bp, Artificial
  Probe
tgaacttctgccagctcggcggacc

SEQ ID NO: 295393 - DNA, 25 bp, Artificial
  Probe
ctgcagttgagtcaatgtggctctg

SEQ ID NO: 295394 - DNA, 25 bp, Artificial
  Probe
aacttctgccagctcggcggacctg

SEQ ID NO: 295395 - DNA, 25 bp, Artificial
  Probe
tgcttcctcaatcaagaggtgagga

SEQ ID NO: 295396 - DNA, 25 bp, Artificial
  Probe
atggtatggccatgaccctgaactt

SEQ ID NO: 295397 - DNA, 25 bp, Artificial
  Probe
gagatttcacgcaaatggtatggcc

SEQ ID NO: 295398 - DNA, 25 bp, Artificial
  Probe
attctctgcatctgctttctctagg

SEQ ID NO: 295399 - DNA, 25 bp, Artificial
  Probe
ttgtcagcagccattatttgcactt

SEQ ID NO: 295400 - DNA, 25 bp, Artificial
  Probe
aatgtggctctgaaggggagctctt

SEQ ID NO: 295401 - DNA, 25 bp, Artificial
  Probe
caatgacctagaagacagctgtagc

SEQ ID NO: 295402 - DNA, 25 bp, Artificial
  Probe
gacctagaagacagctgtagcttga

SEQ ID NO: 295403 - DNA, 25 bp, Artificial
  Probe
ccaggacaatgacctagaagacagc

SEQ ID NO: 295404 - DNA, 25 bp, Artificial
  Probe
caacttctcctttggtggctgctca

SEQ ID NO: 295405 - DNA, 25 bp, Artificial
  Probe
gccccaggacaatgacctagaagac

SEQ ID NO: 295406 - DNA, 25 bp, Artificial
  Probe
agacagctgtagcttgaaaagaagc

SEQ ID NO: 295407 - DNA, 25 bp, Artificial
  Probe
acctagaagacagctgtagcttgaa

SEQ ID NO: 295408 - DNA, 25 bp, Artificial
  Probe
acttctcctttggtggctgctcagc

SEQ ID NO: 295409 - DNA, 25 bp, Artificial
  Probe
acagctgtagcttgaaaagaagcca

SEQ ID NO: 295410 - DNA, 25 bp, Artificial
  Probe
cgtaggccccaggacaatgacctag

SEQ ID NO: 295411 - DNA, 25 bp, Artificial
  Probe
tacgtaggccccaggacaatgacct

SEQ ID NO: 295412 - DNA, 25 bp, Artificial
  Probe
cttctcctttggtggctgctcagcc

SEQ ID NO: 295413 - DNA, 25 bp, Artificial
  Probe
gccaatgggagagtcggtgtcacct

SEQ ID NO: 295414 - DNA, 25 bp, Artificial
  Probe
ctttggtggctgctcagccagtgat

SEQ ID NO: 295415 - DNA, 25 bp, Artificial
  Probe
aggccccaggacaatgacctagaag

SEQ ID NO: 295416 - DNA, 25 bp, Artificial
  Probe
gcaacttctcctttggtggctgctc

SEQ ID NO: 295417 - DNA, 25 bp, Artificial
  Probe
gtaggccccaggacaatgacctaga

SEQ ID NO: 295418 - DNA, 25 bp, Artificial
  Probe
agccagtgatacgtaggccccagga

SEQ ID NO: 295419 - DNA, 25 bp, Artificial
  Probe
cctcacagcaacttctcctttggtg

SEQ ID NO: 295420 - DNA, 25 bp, Artificial
  Probe
ggccccaggacaatgacctagaaga

SEQ ID NO: 295421 - DNA, 25 bp, Artificial
  Probe
tcctttggtggctgctcagccagtg

SEQ ID NO: 295422 - DNA, 25 bp, Artificial
  Probe
tgctcagccagtgatacgtaggccc

SEQ ID NO: 295423 - DNA, 25 bp, Artificial
  Probe
tggtggctgctcagccagtgatacg

SEQ ID NO: 295424 - DNA, 25 bp, Artificial
  Probe
ctgctcagccagtgatacgtaggcc

SEQ ID NO: 295425 - DNA, 25 bp, Artificial
  Probe
ggctgctcagccagtgatacgtagg

SEQ ID NO: 295426 - DNA, 25 bp, Artificial
  Probe
tcggtgtcacctcacagcaacttct

SEQ ID NO: 295427 - DNA, 25 bp, Artificial
  Probe
agcaacttctcctttggtggctgct

SEQ ID NO: 295428 - DNA, 25 bp, Artificial
  Probe
gtcggtgtcacctcacagcaacttc

SEQ ID NO: 295429 - DNA, 25 bp, Artificial
  Probe
aatgacctagaagacagctgtagct

SEQ ID NO: 295430 - DNA, 25 bp, Artificial
  Probe
ccagtgatacgtaggccccaggaca

SEQ ID NO: 295431 - DNA, 25 bp, Artificial
  Probe
atgacctagaagacagctgtagctt

SEQ ID NO: 295432 - DNA, 25 bp, Artificial
  Probe
gccagtgatacgtaggccccaggac

SEQ ID NO: 295433 - DNA, 25 bp, Artificial
  Probe
cccaggacaatgacctagaagacag

SEQ ID NO: 295434 - DNA, 25 bp, Artificial
  Probe
ctcagccagtgatacgtaggcccca

SEQ ID NO: 295435 - DNA, 25 bp, Artificial
  Probe
acagcaacttctcctttggtggctg

SEQ ID NO: 295436 - DNA, 25 bp, Artificial
  Probe
caggacaatgacctagaagacagct

SEQ ID NO: 295437 - DNA, 25 bp, Artificial
  Probe
aacttctcctttggtggctgctcag

SEQ ID NO: 295438 - DNA, 25 bp, Artificial
  Probe
cctttggtggctgctcagccagtga

SEQ ID NO: 295439 - DNA, 25 bp, Artificial
  Probe
agagtcggtgtcacctcacagcaac

SEQ ID NO: 295440 - DNA, 25 bp, Artificial
  Probe
tcagccagtgatacgtaggccccag

SEQ ID NO: 295441 - DNA, 25 bp, Artificial
  Probe
gacaatgacctagaagacagctgta

SEQ ID NO: 295442 - DNA, 25 bp, Artificial
  Probe
ctagaagacagctgtagcttgaaaa

SEQ ID NO: 295443 - DNA, 25 bp, Artificial
  Probe
gagtcggtgtcacctcacagcaact

SEQ ID NO: 295444 - DNA, 25 bp, Artificial
  Probe
gagagtcggtgtcacctcacagcaa

SEQ ID NO: 295445 - DNA, 25 bp, Artificial
  Probe
cagcaacttctcctttggtggctgc

SEQ ID NO: 295446 - DNA, 25 bp, Artificial
  Probe
ctcacagcaacttctcctttggtgg

SEQ ID NO: 295447 - DNA, 25 bp, Artificial
  Probe
tttaataagctccaagacaaaggtg

SEQ ID NO: 295448 - DNA, 25 bp, Artificial
  Probe
tgctgacagattccttactgcagga

SEQ ID NO: 295449 - DNA, 25 bp, Artificial
  Probe
cagacccacatgctccgagagctga

SEQ ID NO: 295450 - DNA, 25 bp, Artificial
  Probe
agccttgtcagaaatgatcaagttt

SEQ ID NO: 295451 - DNA, 25 bp, Artificial
  Probe
cttctctgtgaactatttagaaaga

SEQ ID NO: 295452 - DNA, 25 bp, Artificial
  Probe
tggtgtcctttcacttgccctcatc

SEQ ID NO: 295453 - DNA, 25 bp, Artificial
  Probe
ctggactgcaggacataaatagagc

SEQ ID NO: 295454 - DNA, 25 bp, Artificial
  Probe
cttcagtcaagtgaagactttcttt

SEQ ID NO: 295455 - DNA, 25 bp, Artificial
  Probe
ttacctggtagaagtgatgccccag

SEQ ID NO: 295456 - DNA, 25 bp, Artificial
  Probe
gtcatcgatttctcccctgtgagaa

SEQ ID NO: 295457 - DNA, 25 bp, Artificial
  Probe
ctgcaggactttaagggttacttgg

SEQ ID NO: 295458 - DNA, 25 bp, Artificial
  Probe
cgaaagctgtgaccagtttgttatt

SEQ ID NO: 295459 - DNA, 25 bp, Artificial
  Probe
tcctcttgggaatggcgtattgttt

SEQ ID NO: 295460 - DNA, 25 bp, Artificial
  Probe
ctgcaaccacttccagtctcgaaag

SEQ ID NO: 295461 - DNA, 25 bp, Artificial
  Probe
atccttgcaacagctcagcgcatct

SEQ ID NO: 295462 - DNA, 25 bp, Artificial
  Probe
gcaactccttggaaaacctcgtttg

SEQ ID NO: 295463 - DNA, 25 bp, Artificial
  Probe
aagagaaaccaggttgctccttcca

SEQ ID NO: 295464 - DNA, 25 bp, Artificial
  Probe
gttgctccttccatgattatccttg

SEQ ID NO: 295465 - DNA, 25 bp, Artificial
  Probe
gacatcttcatcaactgcatagaag

SEQ ID NO: 295466 - DNA, 25 bp, Artificial
  Probe
tgccctcatccctgaattcaggact

SEQ ID NO: 295467 - DNA, 25 bp, Artificial
  Probe
tatttattcactgagcttctctgtg

SEQ ID NO: 295468 - DNA, 25 bp, Artificial
  Probe
gagaagctgaagaccctctggatac

SEQ ID NO: 295469 - DNA, 25 bp, Artificial
  Probe
tggcccagaaatcaaggagcatttg

SEQ ID NO: 295470 - DNA, 25 bp, Artificial
  Probe
cgtgacactcaaaatgaaaaattga

SEQ ID NO: 295471 - DNA, 25 bp, Artificial
  Probe
catgattatccttgcaacagctcag

SEQ ID NO: 295472 - DNA, 25 bp, Artificial
  Probe
tggctcagcactgctatgttgcctg

SEQ ID NO: 295473 - DNA, 25 bp, Artificial
  Probe
agttttacctggtagaagtgatgcc

SEQ ID NO: 295474 - DNA, 25 bp, Artificial
  Probe
agctgtttccataggggacatttta

SEQ ID NO: 295475 - DNA, 25 bp, Artificial
  Probe
tctcatgggtcttgggaagagaaac

SEQ ID NO: 295476 - DNA, 25 bp, Artificial
  Probe
tcaaaagaaggaccagctggacaac

SEQ ID NO: 295477 - DNA, 25 bp, Artificial
  Probe
gggttacttgggttgccaagccttg

SEQ ID NO: 295478 - DNA, 25 bp, Artificial
  Probe
tgaagaccagcaaaggccattccat

SEQ ID NO: 295479 - DNA, 25 bp, Artificial
  Probe
aggagcatttgaattccctgggaga

SEQ ID NO: 295480 - DNA, 25 bp, Artificial
  Probe
aatctgtgttgtttaagctgtttcc

SEQ ID NO: 295481 - DNA, 25 bp, Artificial
  Probe
ggtgacaataactgcacccacttcc

SEQ ID NO: 295482 - DNA, 25 bp, Artificial
  Probe
aatagagcttctaaatctgatccag

SEQ ID NO: 295483 - DNA, 25 bp, Artificial
  Probe
tggaaaacctcgtttgtacctctct

SEQ ID NO: 295484 - DNA, 25 bp, Artificial
  Probe
gactttctttcaaaagaaggaccag

SEQ ID NO: 295485 - DNA, 25 bp, Artificial
  Probe
tctactggactgcaggacataaata

SEQ ID NO: 295486 - DNA, 25 bp, Artificial
  Probe
cagccttgcagaaaacagagcttca

SEQ ID NO: 295487 - DNA, 25 bp, Artificial
  Probe
caaggccatgaatgagtttgacatc

SEQ ID NO: 295488 - DNA, 25 bp, Artificial
  Probe
agaagtaaatcaattcctcttggga

SEQ ID NO: 295489 - DNA, 25 bp, Artificial
  Probe
tactggctggagtgaagaccagcaa

SEQ ID NO: 295490 - DNA, 25 bp, Artificial
  Probe
aggggagcttccttgggaagcaact

SEQ ID NO: 295491 - DNA, 25 bp, Artificial
  Probe
aagtgatgccccaggcagagaacca

SEQ ID NO: 295492 - DNA, 25 bp, Artificial
  Probe
tgtttgtctgcttttgtagcagatc

SEQ ID NO: 295493 - DNA, 25 bp, Artificial
  Probe
actactacgtggtccgcgtgccggg

SEQ ID NO: 295494 - DNA, 25 bp, Artificial
  Probe
cgggccagaacagcagagggacttc

SEQ ID NO: 295495 - DNA, 25 bp, Artificial
  Probe
aatccccgagatgagctgtgtggtg

SEQ ID NO: 295496 - DNA, 25 bp, Artificial
  Probe
ggtacgcccctgagtccctatctga

SEQ ID NO: 295497 - DNA, 25 bp, Artificial
  Probe
tcatcgtcaagtaccggggagtcag

SEQ ID NO: 295498 - DNA, 25 bp, Artificial
  Probe
cttcggcgtggtgctgtatgagctc

SEQ ID NO: 295499 - DNA, 25 bp, Artificial
  Probe
ccgccatcttcgaggagagacacct

SEQ ID NO: 295500 - DNA, 25 bp, Artificial
  Probe
cagttacagcacagcgggccagaac

SEQ ID NO: 295501 - DNA, 25 bp, Artificial
  Probe
cgcgcaacatcctggtggagagtga

SEQ ID NO: 295502 - DNA, 25 bp, Artificial
  Probe
aatgctttactagcaagtctgcctt

SEQ ID NO: 295503 - DNA, 25 bp, Artificial
  Probe
acgccgctgcgtgcatcgtgacctg

SEQ ID NO: 295504 - DNA, 25 bp, Artificial
  Probe
tgaggcgcatgtgaagattgctgac

SEQ ID NO: 295505 - DNA, 25 bp, Artificial
  Probe
tggctgcgcgcaacatcctggtgga

SEQ ID NO: 295506 - DNA, 25 bp, Artificial
  Probe
caggtcccaagagcaccctagactt

SEQ ID NO: 295507 - DNA, 25 bp, Artificial
  Probe
agctgcggttagtgatggagtacct

SEQ ID NO: 295508 - DNA, 25 bp, Artificial
  Probe
tggtacgcccctgagtccctatctg

SEQ ID NO: 295509 - DNA, 25 bp, Artificial
  Probe
tccacctgccctactgaggttcaag

SEQ ID NO: 295510 - DNA, 25 bp, Artificial
  Probe
tgtcattacctctggaaatgcttta

SEQ ID NO: 295511 - DNA, 25 bp, Artificial
  Probe
ctctgggagacaatacgggacccct

SEQ ID NO: 295512 - DNA, 25 bp, Artificial
  Probe
tgaagcagttacagcacagcgggcc

SEQ ID NO: 295513 - DNA, 25 bp, Artificial
  Probe
ctgacttcggcctcgctaagctgct

SEQ ID NO: 295514 - DNA, 25 bp, Artificial
  Probe
agctgtgccgctacgaccctctggg

SEQ ID NO: 295515 - DNA, 25 bp, Artificial
  Probe
aggttcaagagctcatgcagctgtg

SEQ ID NO: 295516 - DNA, 25 bp, Artificial
  Probe
cgctgcgtgcatcgtgacctggctg

SEQ ID NO: 295517 - DNA, 25 bp, Artificial
  Probe
tgatggagtacctgcccagcggctg

SEQ ID NO: 295518 - DNA, 25 bp, Artificial
  Probe
cggaagccccggatagcaagcagcc

SEQ ID NO: 295519 - DNA, 25 bp, Artificial
  Probe
tggaaaagactactacgtggtccgc

SEQ ID NO: 295520 - DNA, 25 bp, Artificial
  Probe
agacaatacgggacccctggtagca

SEQ ID NO: 295521 - DNA, 25 bp, Artificial
  Probe
cctgtccatgggtttcttgggggct

SEQ ID NO: 295522 - DNA, 25 bp, Artificial
  Probe
tccctgctgggcaaggggaacttcg

SEQ ID NO: 295523 - DNA, 25 bp, Artificial
  Probe
agctgtgtggtggtgcccagctcta

SEQ ID NO: 295524 - DNA, 25 bp, Artificial
  Probe
gggctgtgaaacctcagcatggtct

SEQ ID NO: 295525 - DNA, 25 bp, Artificial
  Probe
ccggatagcaagcagccagggatga

SEQ ID NO: 295526 - DNA, 25 bp, Artificial
  Probe
gtgcccagctctatgcctgccagga

SEQ ID NO: 295527 - DNA, 25 bp, Artificial
  Probe
agcgacaagagctgcagcccatcca

SEQ ID NO: 295528 - DNA, 25 bp, Artificial
  Probe
cacctcttggagctgctggcagagg

SEQ ID NO: 295529 - DNA, 25 bp, Artificial
  Probe
tcccgccaatctgacgtgtggagct

SEQ ID NO: 295530 - DNA, 25 bp, Artificial
  Probe
gctctcctgtccatgggtttcttgg

SEQ ID NO: 295531 - DNA, 25 bp, Artificial
  Probe
cgccaatctgacgtgtggagcttcg

SEQ ID NO: 295532 - DNA, 25 bp, Artificial
  Probe
cctggtagcagtgaagcagttacag

SEQ ID NO: 295533 - DNA, 25 bp, Artificial
  Probe
agaccctctcttgaccctaggtctg

SEQ ID NO: 295534 - DNA, 25 bp, Artificial
  Probe
cgcctactgctgttcgcctggcaga

SEQ ID NO: 295535 - DNA, 25 bp, Artificial
  Probe
ctgctgttcgcctggcagatctgca

SEQ ID NO: 295536 - DNA, 25 bp, Artificial
  Probe
gctctgccacctcttggagctgctg

SEQ ID NO: 295537 - DNA, 25 bp, Artificial
  Probe
agcaccctagacttggccagaaacc

SEQ ID NO: 295538 - DNA, 25 bp, Artificial
  Probe
ttgaccctaggtctgtgcccagtcc

SEQ ID NO: 295539 - DNA, 25 bp, Artificial
  Probe
ccaagaccccgacagcggctagttt

SEQ ID NO: 295540 - DNA, 25 bp, Artificial
  Probe
caagaccccgacagcggctagttta

SEQ ID NO: 295541 - DNA, 25 bp, Artificial
  Probe
cttggccgaggacactggtggctat

SEQ ID NO: 295542 - DNA, 25 bp, Artificial
  Probe
gccgcgctggcgaacgaagactgcc

SEQ ID NO: 295543 - DNA, 25 bp, Artificial
  Probe
ctcaccctcggacagagtaaattca

SEQ ID NO: 295544 - DNA, 25 bp, Artificial
  Probe
ggcatgcttgcgacccaatggacct

SEQ ID NO: 295545 - DNA, 25 bp, Artificial
  Probe
ttgccggacgagtccgagtggcccc

SEQ ID NO: 295546 - DNA, 25 bp, Artificial
  Probe
cgggcacccgcgagagatacggacc

SEQ ID NO: 295547 - DNA, 25 bp, Artificial
  Probe
cagcccctgctgtgactgtatgctc

SEQ ID NO: 295548 - DNA, 25 bp, Artificial
  Probe
ttcatagctcacctctcgctcggaa

SEQ ID NO: 295549 - DNA, 25 bp, Artificial
  Probe
tttgccggacgagtccgagtggccc

SEQ ID NO: 295550 - DNA, 25 bp, Artificial
  Probe
ggattttccaatgtcattttaaagc

SEQ ID NO: 295551 - DNA, 25 bp, Artificial
  Probe
gaaaggtcccaaaaaggcagtcagt

SEQ ID NO: 295552 - DNA, 25 bp, Artificial
  Probe
agaaccctgtacatttccgggagtg

SEQ ID NO: 295553 - DNA, 25 bp, Artificial
  Probe
tttactaaggcgaaaaccgacactg

SEQ ID NO: 295554 - DNA, 25 bp, Artificial
  Probe
gccatgcaggtttgccggacgagtc

SEQ ID NO: 295555 - DNA, 25 bp, Artificial
  Probe
tttagtacttcagagctcaaagaaa

SEQ ID NO: 295556 - DNA, 25 bp, Artificial
  Probe
cctctcgctcggaaaaccaagaact

SEQ ID NO: 295557 - DNA, 25 bp, Artificial
  Probe
aactgcatgcccaatgttatgcaaa

SEQ ID NO: 295558 - DNA, 25 bp, Artificial
  Probe
tacggcccacggtaactgaccgtag

SEQ ID NO: 295559 - DNA, 25 bp, Artificial
  Probe
tttttgtacacgagacccagaggaa

SEQ ID NO: 295560 - DNA, 25 bp, Artificial
  Probe
gcatctgggtggacctgcagcccct

SEQ ID NO: 295561 - DNA, 25 bp, Artificial
  Probe
aaggtcccaaaaaggcagtcagtca

SEQ ID NO: 295562 - DNA, 25 bp, Artificial
  Probe
ctccgtttggcatgcttgcgaccca

SEQ ID NO: 295563 - DNA, 25 bp, Artificial
  Probe
tctttgcaaagaaagccctgtcatt

SEQ ID NO: 295564 - DNA, 25 bp, Artificial
  Probe
gctccgaataggattgtggaaattc

SEQ ID NO: 295565 - DNA, 25 bp, Artificial
  Probe
cctgcttcctcttatcaaccgggga

SEQ ID NO: 295566 - DNA, 25 bp, Artificial
  Probe
agtgacttgaccaggcggcttggcc

SEQ ID NO: 295567 - DNA, 25 bp, Artificial
  Probe
agcagattccaaactgaatggggag

SEQ ID NO: 295568 - DNA, 25 bp, Artificial
  Probe
gacgtagctttttctacggcccacg

SEQ ID NO: 295569 - DNA, 25 bp, Artificial
  Probe
tcaaggggagccttagcatgacttg

SEQ ID NO: 295570 - DNA, 25 bp, Artificial
  Probe
cacgagacccagaggaaaggtccca

SEQ ID NO: 295571 - DNA, 25 bp, Artificial
  Probe
tcttccagcattctttgacacgtag

SEQ ID NO: 295572 - DNA, 25 bp, Artificial
  Probe
catgacttgcatgaagttaaacaga

SEQ ID NO: 295573 - DNA, 25 bp, Artificial
  Probe
gtgactgtatgctcactctaaccac

SEQ ID NO: 295574 - DNA, 25 bp, Artificial
  Probe
tttccaatgtcattttaaagccagg

SEQ ID NO: 295575 - DNA, 25 bp, Artificial
  Probe
ctccagtgtgaccaagtttcataac

SEQ ID NO: 295576 - DNA, 25 bp, Artificial
  Probe
gcaagagtctcttatttcttccagc

SEQ ID NO: 295577 - DNA, 25 bp, Artificial
  Probe
gtggccccgggcattgtactaagac

SEQ ID NO: 295578 - DNA, 25 bp, Artificial
  Probe
tcatagctcacctctcgctcggaaa

SEQ ID NO: 295579 - DNA, 25 bp, Artificial
  Probe
aattaacagagcagattccaaactg

SEQ ID NO: 295580 - DNA, 25 bp, Artificial
  Probe
cgctggcccaggaagaaattttaga

SEQ ID NO: 295581 - DNA, 25 bp, Artificial
  Probe
tcaaccggggagtacgcgtgcccgc

SEQ ID NO: 295582 - DNA, 25 bp, Artificial
  Probe
agtgtgaccaagtttcataacaaat

SEQ ID NO: 295583 - DNA, 25 bp, Artificial
  Probe
gaccgtagaggattcgcccttcttt

SEQ ID NO: 295584 - DNA, 25 bp, Artificial
  Probe
ccgacagaggctgtgagagtgactt

SEQ ID NO: 295585 - DNA, 25 bp, Artificial
  Probe
tgaagaagaccctggagagactttg

SEQ ID NO: 295586 - DNA, 25 bp, Artificial
  Probe
ctagtcccctcagagcactaatgaa

SEQ ID NO: 295587 - DNA, 25 bp, Artificial
  Probe
tttatgaagaagaccctggagagac

SEQ ID NO: 295588 - DNA, 25 bp, Artificial
  Probe
ggagcatcctcagtaactactctac

SEQ ID NO: 295589 - DNA, 25 bp, Artificial
  Probe
actctacacccctagtgtggtctct

SEQ ID NO: 295590 - DNA, 25 bp, Artificial
  Probe
gaaacctgaagtgcaacctgtcagg

SEQ ID NO: 295591 - DNA, 25 bp, Artificial
  Probe
gagagactttgtcctaagcctccag

SEQ ID NO: 295592 - DNA, 25 bp, Artificial
  Probe
tgaagccagggctcggagcatcctc

SEQ ID NO: 295593 - DNA, 25 bp, Artificial
  Probe
cacctaggattgaggcccagtgtgg

SEQ ID NO: 295594 - DNA, 25 bp, Artificial
  Probe
ctttatctgttgtgctggggctgat

SEQ ID NO: 295595 - DNA, 25 bp, Artificial
  Probe
gattgaggcccagtgtggagaacca

SEQ ID NO: 295596 - DNA, 25 bp, Artificial
  Probe
gtgaagacgttccttaaattacctg

SEQ ID NO: 295597 - DNA, 25 bp, Artificial
  Probe
aacctgtcagggaaaagccatgatg

SEQ ID NO: 295598 - DNA, 25 bp, Artificial
  Probe
tcaccgcggtgaagacgttccttaa

SEQ ID NO: 295599 - DNA, 25 bp, Artificial
  Probe
gactttgtcctaagcctccagatct

SEQ ID NO: 295600 - DNA, 25 bp, Artificial
  Probe
gtcttgcctgtcaccgcggtgaaga

SEQ ID NO: 295601 - DNA, 25 bp, Artificial
  Probe
ctctggtctgaggaacaggtgcctg

SEQ ID NO: 295602 - DNA, 25 bp, Artificial
  Probe
ctgtcaccgcggtgaagacgttcct

SEQ ID NO: 295603 - DNA, 25 bp, Artificial
  Probe
tgggtttattcaagcccctgggaag

SEQ ID NO: 295604 - DNA, 25 bp, Artificial
  Probe
ctgcgtcttgcctgtcaccgcggtg

SEQ ID NO: 295605 - DNA, 25 bp, Artificial
  Probe
tctgaggaacaggtgcctggagacc

SEQ ID NO: 295606 - DNA, 25 bp, Artificial
  Probe
tgaggcccagtgtggagaaccagca

SEQ ID NO: 295607 - DNA, 25 bp, Artificial
  Probe
cctttatgaagaagaccctggagag

SEQ ID NO: 295608 - DNA, 25 bp, Artificial
  Probe
tgcctggagacctgcgcctttttta

SEQ ID NO: 295609 - DNA, 25 bp, Artificial
  Probe
tgaaaagatttcacggccactgtgc

SEQ ID NO: 295610 - DNA, 25 bp, Artificial
  Probe
tccacctgtgcacctaggattgagg

SEQ ID NO: 295611 - DNA, 25 bp, Artificial
  Probe
tgaagacgttccttaaattacctgg

SEQ ID NO: 295612 - DNA, 25 bp, Artificial
  Probe
tggagaaccagcagggcctttatga

SEQ ID NO: 295613 - DNA, 25 bp, Artificial
  Probe
cagatctcaccgacttcacatgggc

SEQ ID NO: 295614 - DNA, 25 bp, Artificial
  Probe
tggtctcttctgtcctgctgggtaa

SEQ ID NO: 295615 - DNA, 25 bp, Artificial
  Probe
gcagggcctttatgaagaagaccct

SEQ ID NO: 295616 - DNA, 25 bp, Artificial
  Probe
accagcagggcctttatgaagaaga

SEQ ID NO: 295617 - DNA, 25 bp, Artificial
  Probe
acctgtcagggaaaagccatgatga

SEQ ID NO: 295618 - DNA, 25 bp, Artificial
  Probe
atgatgaacagcagggcctgcgtct

SEQ ID NO: 295619 - DNA, 25 bp, Artificial
  Probe
ctaatgaaattgtcagctgtatatc

SEQ ID NO: 295620 - DNA, 25 bp, Artificial
  Probe
aagccatgatgaacagcagggcctg

SEQ ID NO: 295621 - DNA, 25 bp, Artificial
  Probe
ttagaggtaggcattccacatccag

SEQ ID NO: 295622 - DNA, 25 bp, Artificial
  Probe
ccacatccagtttagacagggctgg

SEQ ID NO: 295623 - DNA, 25 bp, Artificial
  Probe
aacagcagggcctgcgtcttgcctg

SEQ ID NO: 295624 - DNA, 25 bp, Artificial
  Probe
gtggagaaccagcagggcctttatg

SEQ ID NO: 295625 - DNA, 25 bp, Artificial
  Probe
agggcctgcgtcttgcctgtcaccg

SEQ ID NO: 295626 - DNA, 25 bp, Artificial
  Probe
gagacctgcgccttttttaacataa

SEQ ID NO: 295627 - DNA, 25 bp, Artificial
  Probe
cctcagagcactaatgaaattgtca

SEQ ID NO: 295628 - DNA, 25 bp, Artificial
  Probe
gatttcacggccactgtgctctggt

SEQ ID NO: 295629 - DNA, 25 bp, Artificial
  Probe
ctgaggaacaggtgcctggagacct

SEQ ID NO: 295630 - DNA, 25 bp, Artificial
  Probe
gaacaggtgcctggagacctgcgcc

SEQ ID NO: 295631 - DNA, 25 bp, Artificial
  Probe
aggaaacactctaggccatgccttt

SEQ ID NO: 295632 - DNA, 25 bp, Artificial
  Probe
cagacaccagcaataaatgtcatgt

SEQ ID NO: 295633 - DNA, 25 bp, Artificial
  Probe
caccagcaataaatgtcatgtgaca

SEQ ID NO: 295634 - DNA, 25 bp, Artificial
  Probe
agatcattcagaagacttcagtctt

SEQ ID NO: 295635 - DNA, 25 bp, Artificial
  Probe
agaaggccaccagtgcagtggacaa

SEQ ID NO: 295636 - DNA, 25 bp, Artificial
  Probe
ttgcaggcatccagaagttatatgg

SEQ ID NO: 295637 - DNA, 25 bp, Artificial
  Probe
ctctcagaatgtggagtatgcaaat

SEQ ID NO: 295638 - DNA, 25 bp, Artificial
  Probe
aggagtgaacttcctgtttgttgcc

SEQ ID NO: 295639 - DNA, 25 bp, Artificial
  Probe
ctatcaaggagatcattcagaagac

SEQ ID NO: 295640 - DNA, 25 bp, Artificial
  Probe
ctaggccatgcctttgcaccggggc

SEQ ID NO: 295641 - DNA, 25 bp, Artificial
  Probe
agagctctcagaatgtggagtatgc

SEQ ID NO: 295642 - DNA, 25 bp, Artificial
  Probe
atcgtgaaaagagctctcagaatgt

SEQ ID NO: 295643 - DNA, 25 bp, Artificial
  Probe
gatgcagacagtttctggaatgagc

SEQ ID NO: 295644 - DNA, 25 bp, Artificial
  Probe
atgttgcagaattctcactaatgcc

SEQ ID NO: 295645 - DNA, 25 bp, Artificial
  Probe
ccactgtcccaggaagccggagaag

SEQ ID NO: 295646 - DNA, 25 bp, Artificial
  Probe
cctctgagggtcattttgatggaat

SEQ ID NO: 295647 - DNA, 25 bp, Artificial
  Probe
ccactgaacttcaagagggttagtt

SEQ ID NO: 295648 - DNA, 25 bp, Artificial
  Probe
taaatgtcatgtgacatcagcaata

SEQ ID NO: 295649 - DNA, 25 bp, Artificial
  Probe
ctttgatggcagctatgaggctcac

SEQ ID NO: 295650 - DNA, 25 bp, Artificial
  Probe
tgccactgtcccaggaagccggaga

SEQ ID NO: 295651 - DNA, 25 bp, Artificial
  Probe
atgggccaggaaacactctaggcca

SEQ ID NO: 295652 - DNA, 25 bp, Artificial
  Probe
tcggtttgccggagactggaaagct

SEQ ID NO: 295653 - DNA, 25 bp, Artificial
  Probe
gtttgttgccactcatgaacttggc

SEQ ID NO: 295654 - DNA, 25 bp, Artificial
  Probe
ccactctctgggtctgggtcactct

SEQ ID NO: 295655 - DNA, 25 bp, Artificial
  Probe
tggaatgagcaaacgcccttcctga

SEQ ID NO: 295656 - DNA, 25 bp, Artificial
  Probe
ctcactttgacaaggatgagtactg

SEQ ID NO: 295657 - DNA, 25 bp, Artificial
  Probe
tgccggagactggaaagctgtcccc

SEQ ID NO: 295658 - DNA, 25 bp, Artificial
  Probe
gtgtctgctgccaggctgcctggcc

SEQ ID NO: 295659 - DNA, 25 bp, Artificial
  Probe
tacagacttgcctcggttcttagta

SEQ ID NO: 295660 - DNA, 25 bp, Artificial
  Probe
gccatgcctttgcaccggggccagg

SEQ ID NO: 295661 - DNA, 25 bp, Artificial
  Probe
aaatgcagaagttcttcggtttgcc

SEQ ID NO: 295662 - DNA, 25 bp, Artificial
  Probe
aatgagtctgacaaatctcaggtaa

SEQ ID NO: 295663 - DNA, 25 bp, Artificial
  Probe
cactaatgccaaacagtcctaagtg

SEQ ID NO: 295664 - DNA, 25 bp, Artificial
  Probe
gttgcagaattctcactaatgccaa

SEQ ID NO: 295665 - DNA, 25 bp, Artificial
  Probe
cggcaacagacgattgttctcagag

SEQ ID NO: 295666 - DNA, 25 bp, Artificial
  Probe
cccccgtgtcatggagataatgcag

SEQ ID NO: 295667 - DNA, 25 bp, Artificial
  Probe
cccgtgtcatggagataatgcagaa

SEQ ID NO: 295668 - DNA, 25 bp, Artificial
  Probe
gccaaacagtcctaagtggcattcc

SEQ ID NO: 295669 - DNA, 25 bp, Artificial
  Probe
ctcaggtaacacgacagacaccagc

SEQ ID NO: 295670 - DNA, 25 bp, Artificial
  Probe
ggagtatgcaaatcccactgaactt

SEQ ID NO: 295671 - DNA, 25 bp, Artificial
  Probe
ccagtgcagtggacaaactgaggga

SEQ ID NO: 295672 - DNA, 25 bp, Artificial
  Probe
ggagtgccagatgttgcagaattct

SEQ ID NO: 295673 - DNA, 25 bp, Artificial
  Probe
ccaggaagccggagaagtgaccgca

SEQ ID NO: 295674 - DNA, 25 bp, Artificial
  Probe
aggcctcggcggagatgctcacttt

SEQ ID NO: 295675 - DNA, 25 bp, Artificial
  Probe
tcggttcttagtagatcaaatcgtg

SEQ ID NO: 295676 - DNA, 25 bp, Artificial
  Probe
tactcctttcttccttgtactgtgg

SEQ ID NO: 295677 - DNA, 25 bp, Artificial
  Probe
tataacgtaatcctgttaagtgttc

SEQ ID NO: 295678 - DNA, 25 bp, Artificial
  Probe
ctgcttgagattccttaaagagata

SEQ ID NO: 295679 - DNA, 25 bp, Artificial
  Probe
aatcctgttaagtgttctggctgtt

SEQ ID NO: 295680 - DNA, 25 bp, Artificial
  Probe
agtctggagtctccatatcttgatt

SEQ ID NO: 295681 - DNA, 25 bp, Artificial
  Probe
tgctttgtctgcttgagattcctta

SEQ ID NO: 295682 - DNA, 25 bp, Artificial
  Probe
tgtctgcttgagattccttaaagag

SEQ ID NO: 295683 - DNA, 25 bp, Artificial
  Probe
aacagctctccttgcaaatcatgtg

SEQ ID NO: 295684 - DNA, 25 bp, Artificial
  Probe
tgtctcgaaagtctggagtctccat

SEQ ID NO: 295685 - DNA, 25 bp, Artificial
  Probe
ggtctttcatctcatggcaaacaga

SEQ ID NO: 295686 - DNA, 25 bp, Artificial
  Probe
taatcctgttaagtgttctggctgt

SEQ ID NO: 295687 - DNA, 25 bp, Artificial
  Probe
tcgaaagtctggagtctccatatct

SEQ ID NO: 295688 - DNA, 25 bp, Artificial
  Probe
gccttctggtctttcatctcatggc

SEQ ID NO: 295689 - DNA, 25 bp, Artificial
  Probe
attgtggagcacaccaacagctctc

SEQ ID NO: 295690 - DNA, 25 bp, Artificial
  Probe
tctcgaaagtctggagtctccatat

SEQ ID NO: 295691 - DNA, 25 bp, Artificial
  Probe
agaataaccattgagaggcgaaatc

SEQ ID NO: 295692 - DNA, 25 bp, Artificial
  Probe
agctctccttgcaaatcatgtggcc

SEQ ID NO: 295693 - DNA, 25 bp, Artificial
  Probe
aacatcgagagctgcgggaagattc

SEQ ID NO: 295694 - DNA, 25 bp, Artificial
  Probe
gaattcattcttttaagcagtagtc

SEQ ID NO: 295695 - DNA, 25 bp, Artificial
  Probe
gctttgtctgcttgagattccttaa

SEQ ID NO: 295696 - DNA, 25 bp, Artificial
  Probe
ctgccttctggtctttcatctcatg

SEQ ID NO: 295697 - DNA, 25 bp, Artificial
  Probe
agatcacatttttcggtggcttaaa

SEQ ID NO: 295698 - DNA, 25 bp, Artificial
  Probe
ctggtctttcatctcatggcaaaca

SEQ ID NO: 295699 - DNA, 25 bp, Artificial
  Probe
ctctccttgcaaatcatgtggccta

SEQ ID NO: 295700 - DNA, 25 bp, Artificial
  Probe
acagctctccttgcaaatcatgtgg

SEQ ID NO: 295701 - DNA, 25 bp, Artificial
  Probe
tatgtctcgaaagtctggagtctcc

SEQ ID NO: 295702 - DNA, 25 bp, Artificial
  Probe
ataaccattgagaggcgaaatcacc

SEQ ID NO: 295703 - DNA, 25 bp, Artificial
  Probe
ccatatcttgattgctttgggggta

SEQ ID NO: 295704 - DNA, 25 bp, Artificial
  Probe
gaaacatcgagagctgcgggaagat

SEQ ID NO: 295705 - DNA, 25 bp, Artificial
  Probe
gattccatcagatcacatttttcgg

SEQ ID NO: 295706 - DNA, 25 bp, Artificial
  Probe
tggagcacaccaacagctctccttg

SEQ ID NO: 295707 - DNA, 25 bp, Artificial
  Probe
cttgctttgtctgcttgagattcct

SEQ ID NO: 295708 - DNA, 25 bp, Artificial
  Probe
ttctggtctttcatctcatggcaaa

SEQ ID NO: 295709 - DNA, 25 bp, Artificial
  Probe
acattgggaaacatcgagagctgcg

SEQ ID NO: 295710 - DNA, 25 bp, Artificial
  Probe
gtctttcatctcatggcaaacagat

SEQ ID NO: 295711 - DNA, 25 bp, Artificial
  Probe
tctccatatcttgattgctttgggg

SEQ ID NO: 295712 - DNA, 25 bp, Artificial
  Probe
ttgctttgggggtatttcacacaag

SEQ ID NO: 295713 - DNA, 25 bp, Artificial
  Probe
gaataaccattgagaggcgaaatca

SEQ ID NO: 295714 - DNA, 25 bp, Artificial
  Probe
aatacagaataaccattgagaggcg

SEQ ID NO: 295715 - DNA, 25 bp, Artificial
  Probe
ctccatatcttgattgctttggggg

SEQ ID NO: 295716 - DNA, 25 bp, Artificial
  Probe
ttccatcagatcacatttttcggtg

SEQ ID NO: 295717 - DNA, 25 bp, Artificial
  Probe
cccccttgctttgtctgcttgagat

SEQ ID NO: 295718 - DNA, 25 bp, Artificial
  Probe
ggaagattccatcagatcacatttt

SEQ ID NO: 295719 - DNA, 25 bp, Artificial
  Probe
cgtaatcctgttaagtgttctggct

SEQ ID NO: 295720 - DNA, 25 bp, Artificial
  Probe
acagaataaccattgagaggcgaaa

SEQ ID NO: 295721 - DNA, 25 bp, Artificial
  Probe
tgtggagcacaccaacagctctcct

SEQ ID NO: 295722 - DNA, 25 bp, Artificial
  Probe
cagctctccttgcaaatcatgtggc

SEQ ID NO: 295723 - DNA, 25 bp, Artificial
  Probe
attgccatgctcttggccagcctca

SEQ ID NO: 295724 - DNA, 25 bp, Artificial
  Probe
gccgtcgcagctcaagccagaggag

SEQ ID NO: 295725 - DNA, 25 bp, Artificial
  Probe
agaagagcaactcatccacctttgt

SEQ ID NO: 295726 - DNA, 25 bp, Artificial
  Probe
gaagagcaactcatccacctttgtc

SEQ ID NO: 295727 - DNA, 25 bp, Artificial
  Probe
tccacgaactcgtgcagcgcttctt

SEQ ID NO: 295728 - DNA, 25 bp, Artificial
  Probe
gctcaagccagaggagctgctctca

SEQ ID NO: 295729 - DNA, 25 bp, Artificial
  Probe
gtggatctacatgctcttcacaggt

SEQ ID NO: 295730 - DNA, 25 bp, Artificial
  Probe
tcgtgcagcgcttcttctgctgctc

SEQ ID NO: 295731 - DNA, 25 bp, Artificial
  Probe
gcgcttcttctgctgctctgctcgt

SEQ ID NO: 295732 - DNA, 25 bp, Artificial
  Probe
cagctcaagccagaggagctgctct

SEQ ID NO: 295733 - DNA, 25 bp, Artificial
  Probe
gcttctgccttcatcattgccatgc

SEQ ID NO: 295734 - DNA, 25 bp, Artificial
  Probe
gctctgctcgttacctgaagggcag

SEQ ID NO: 295735 - DNA, 25 bp, Artificial
  Probe
agcgcttcttctgctgctctgctcg

SEQ ID NO: 295736 - DNA, 25 bp, Artificial
  Probe
gctgctctgctcgttacctgaaggg

SEQ ID NO: 295737 - DNA, 25 bp, Artificial
  Probe
tgtcctgagccgtcgcagctcaagc

SEQ ID NO: 295738 - DNA, 25 bp, Artificial
  Probe
ggagctgctctcagccatcttcagc

SEQ ID NO: 295739 - DNA, 25 bp, Artificial
  Probe
ctgctcgttacctgaagggcagccg

SEQ ID NO: 295740 - DNA, 25 bp, Artificial
  Probe
cgtggatctacatgctcttcacagg

SEQ ID NO: 295741 - DNA, 25 bp, Artificial
  Probe
ctgagccgtcgcagctcaagccaga

SEQ ID NO: 295742 - DNA, 25 bp, Artificial
  Probe
gcagctcaagccagaggagctgctc

SEQ ID NO: 295743 - DNA, 25 bp, Artificial
  Probe
ctcgttacctgaagggcagccggcc

SEQ ID NO: 295744 - DNA, 25 bp, Artificial
  Probe
acctttgtcctgagccgtcgcagct

SEQ ID NO: 295745 - DNA, 25 bp, Artificial
  Probe
cgtcgcagctcaagccagaggagct

SEQ ID NO: 295746 - DNA, 25 bp, Artificial
  Probe
tgctcgttacctgaagggcagccgg

SEQ ID NO: 295747 - DNA, 25 bp, Artificial
  Probe
ctcgtgcagcgcttcttctgctgct

SEQ ID NO: 295748 - DNA, 25 bp, Artificial
  Probe
cccggcgagacgagtgtcagcaaga

SEQ ID NO: 295749 - DNA, 25 bp, Artificial
  Probe
ttccacgaactcgtgcagcgcttct

SEQ ID NO: 295750 - DNA, 25 bp, Artificial
  Probe
tcttccacgaactcgtgcagcgctt

SEQ ID NO: 295751 - DNA, 25 bp, Artificial
  Probe
ctgctctgctcgttacctgaagggc

SEQ ID NO: 295752 - DNA, 25 bp, Artificial
  Probe
acgaactcgtgcagcgcttcttctg

SEQ ID NO: 295753 - DNA, 25 bp, Artificial
  Probe
gtgcagcgcttcttctgctgctctg

SEQ ID NO: 295754 - DNA, 25 bp, Artificial
  Probe
ttgccatgctcttggccagcctcaa

SEQ ID NO: 295755 - DNA, 25 bp, Artificial
  Probe
agcttctgccttcatcattgccatg

SEQ ID NO: 295756 - DNA, 25 bp, Artificial
  Probe
gcagcgcttcttctgctgctctgct

SEQ ID NO: 295757 - DNA, 25 bp, Artificial
  Probe
tctgctgctctgctcgttacctgaa

SEQ ID NO: 295758 - DNA, 25 bp, Artificial
  Probe
agacgagtgtcagcaagaagagcaa

SEQ ID NO: 295759 - DNA, 25 bp, Artificial
  Probe
cacgaactcgtgcagcgcttcttct

SEQ ID NO: 295760 - DNA, 25 bp, Artificial
  Probe
ctctgctcgttacctgaagggcagc

SEQ ID NO: 295761 - DNA, 25 bp, Artificial
  Probe
ctgctctcagccatcttcagcatga

SEQ ID NO: 295762 - DNA, 25 bp, Artificial
  Probe
gaagcttctgccttcatcattgcca

SEQ ID NO: 295763 - DNA, 25 bp, Artificial
  Probe
gagccgtcgcagctcaagccagagg

SEQ ID NO: 295764 - DNA, 25 bp, Artificial
  Probe
ggatctacatgctcttcacaggtca

SEQ ID NO: 295765 - DNA, 25 bp, Artificial
  Probe
gatctacatgctcttcacaggtcac

SEQ ID NO: 295766 - DNA, 25 bp, Artificial
  Probe
tgccttcatcattgccatgctcttg

SEQ ID NO: 295767 - DNA, 25 bp, Artificial
  Probe
ttcttctgctgctctgctcgttacc

SEQ ID NO: 295768 - DNA, 25 bp, Artificial
  Probe
ccggcgagacgagtgtcagcaagaa

SEQ ID NO: 295769 - DNA, 25 bp, Artificial
  Probe
aagacgagaggcaaccagcagacaa

SEQ ID NO: 295770 - DNA, 25 bp, Artificial
  Probe
ctctaaggaatctgggttgcatgat

SEQ ID NO: 295771 - DNA, 25 bp, Artificial
  Probe
agatatttcaaaaggctgcgtctac

SEQ ID NO: 295772 - DNA, 25 bp, Artificial
  Probe
caaccttgatgttttaaactatgtg

SEQ ID NO: 295773 - DNA, 25 bp, Artificial
  Probe
ccttaaacaatgtttctcactgtgg

SEQ ID NO: 295774 - DNA, 25 bp, Artificial
  Probe
gagactggagccaccgagaaactgt

SEQ ID NO: 295775 - DNA, 25 bp, Artificial
  Probe
aattatatggtacttgccacaaagt

SEQ ID NO: 295776 - DNA, 25 bp, Artificial
  Probe
ttcaagaccagcttcagttattcag

SEQ ID NO: 295777 - DNA, 25 bp, Artificial
  Probe
tggaaaccaggaaccaagaaggatt

SEQ ID NO: 295778 - DNA, 25 bp, Artificial
  Probe
gacaaatcctaagtctgggaagaaa

SEQ ID NO: 295779 - DNA, 25 bp, Artificial
  Probe
tcttggtcatcaaccttatccagcg

SEQ ID NO: 295780 - DNA, 25 bp, Artificial
  Probe
cagcgcattccaaccttgatgtttt

SEQ ID NO: 295781 - DNA, 25 bp, Artificial
  Probe
caattactcacacaggaggaagcag

SEQ ID NO: 295782 - DNA, 25 bp, Artificial
  Probe
ggaatcttcacttcccagtctgatg

SEQ ID NO: 295783 - DNA, 25 bp, Artificial
  Probe
ggatggaatcttcacttcccagtct

SEQ ID NO: 295784 - DNA, 25 bp, Artificial
  Probe
aatgaaatggccactttgaattcag

SEQ ID NO: 295785 - DNA, 25 bp, Artificial
  Probe
tatccagcgcattccaaccttgatg

SEQ ID NO: 295786 - DNA, 25 bp, Artificial
  Probe
gcttcagttattcagaaatgtttcc

SEQ ID NO: 295787 - DNA, 25 bp, Artificial
  Probe
ctgtcctgatgatctgtggaattta

SEQ ID NO: 295788 - DNA, 25 bp, Artificial
  Probe
tgaaagactataccagtcctcgggt

SEQ ID NO: 295789 - DNA, 25 bp, Artificial
  Probe
tgggcccaagaacctgaccaaagac

SEQ ID NO: 295790 - DNA, 25 bp, Artificial
  Probe
aaccttgatgttttaaactatgtgc

SEQ ID NO: 295791 - DNA, 25 bp, Artificial
  Probe
gatgcacttcattcacagggatctg

SEQ ID NO: 295792 - DNA, 25 bp, Artificial
  Probe
cctgaaaacttgatggatggaatct

SEQ ID NO: 295793 - DNA, 25 bp, Artificial
  Probe
caaagtgtagccaaagtgaggatcg

SEQ ID NO: 295794 - DNA, 25 bp, Artificial
  Probe
agtgaggatcgttatgagggtcctc

SEQ ID NO: 295795 - DNA, 25 bp, Artificial
  Probe
ggatctggcagctcggaattgcctt

SEQ ID NO: 295796 - DNA, 25 bp, Artificial
  Probe
gagattttaactcttggtcatcaac

SEQ ID NO: 295797 - DNA, 25 bp, Artificial
  Probe
ggaaacatagcactgagatgaacac

SEQ ID NO: 295798 - DNA, 25 bp, Artificial
  Probe
gagccattatgtttcattcagcatt

SEQ ID NO: 295799 - DNA, 25 bp, Artificial
  Probe
gggtggcagtctagactctgaactg

SEQ ID NO: 295800 - DNA, 25 bp, Artificial
  Probe
ttatcagaggaacctgtgtgtgtgc

SEQ ID NO: 295801 - DNA, 25 bp, Artificial
  Probe
caacaaaggctttgaaggtgaagac

SEQ ID NO: 295802 - DNA, 25 bp, Artificial
  Probe
cagattaccttaagaggatgcagga

SEQ ID NO: 295803 - DNA, 25 bp, Artificial
  Probe
ctgtccggtggatggctcctgaaaa

SEQ ID NO: 295804 - DNA, 25 bp, Artificial
  Probe
ctgacctggtagagctgtgtgtaga

SEQ ID NO: 295805 - DNA, 25 bp, Artificial
  Probe
agcactgagatgaacactgtattaa

SEQ ID NO: 295806 - DNA, 25 bp, Artificial
  Probe
cacagtggacatggagatgtgtctg

SEQ ID NO: 295807 - DNA, 25 bp, Artificial
  Probe
ggtcatcaaccttatccagcgcatt

SEQ ID NO: 295808 - DNA, 25 bp, Artificial
  Probe
tgaggaccacctgaactacagatta

SEQ ID NO: 295809 - DNA, 25 bp, Artificial
  Probe
aggcctgcttcctgtccggtggatg

SEQ ID NO: 295810 - DNA, 25 bp, Artificial
  Probe
atagtatctcataggaaacatagca

SEQ ID NO: 295811 - DNA, 25 bp, Artificial
  Probe
tttaatgttccgatgttgggcccaa

SEQ ID NO: 295812 - DNA, 25 bp, Artificial
  Probe
gaaggcctgcttcctgtccggtgga

SEQ ID NO: 295813 - DNA, 25 bp, Artificial
  Probe
ctcgggtagtcaagatcggtgactt

SEQ ID NO: 295814 - DNA, 25 bp, Artificial
  Probe
ttcagcattctctttaccagtgacg

SEQ ID NO: 295815 - DNA, 25 bp, Artificial
  Probe
tctgccctgtacagtgtgaccctgc

SEQ ID NO: 295816 - DNA, 25 bp, Artificial
  Probe
ccactcccataccaaggacgacctc

SEQ ID NO: 295817 - DNA, 25 bp, Artificial
  Probe
gtgcttctcttgaataggaccccag

SEQ ID NO: 295818 - DNA, 25 bp, Artificial
  Probe
cacttggtgtgcttctcttgaatag

SEQ ID NO: 295819 - DNA, 25 bp, Artificial
  Probe
gacctggggcctcccttccaatgcc

SEQ ID NO: 295820 - DNA, 25 bp, Artificial
  Probe
gcttctcttgaataggaccccagga

SEQ ID NO: 295821 - DNA, 25 bp, Artificial
  Probe
ctctcacttggtgtgcttctcttga

SEQ ID NO: 295822 - DNA, 25 bp, Artificial
  Probe
gcctgctctcacttggtgtgcttct

SEQ ID NO: 295823 - DNA, 25 bp, Artificial
  Probe
gaataggaccccaggatcgacctgg

SEQ ID NO: 295824 - DNA, 25 bp, Artificial
  Probe
ctgcctgctctcacttggtgtgctt

SEQ ID NO: 295825 - DNA, 25 bp, Artificial
  Probe
ggtgtgcttctcttgaataggaccc

SEQ ID NO: 295826 - DNA, 25 bp, Artificial
  Probe
actctctgccctgtacagtgtgacc

SEQ ID NO: 295827 - DNA, 25 bp, Artificial
  Probe
tctcttgaataggaccccaggatcg

SEQ ID NO: 295828 - DNA, 25 bp, Artificial
  Probe
gctctcacttggtgtgcttctcttg

SEQ ID NO: 295829 - DNA, 25 bp, Artificial
  Probe
ctcacttggtgtgcttctcttgaat

SEQ ID NO: 295830 - DNA, 25 bp, Artificial
  Probe
tctcacttggtgtgcttctcttgaa

SEQ ID NO: 295831 - DNA, 25 bp, Artificial
  Probe
tgctctcacttggtgtgcttctctt

SEQ ID NO: 295832 - DNA, 25 bp, Artificial
  Probe
cttctcttgaataggaccccaggat

SEQ ID NO: 295833 - DNA, 25 bp, Artificial
  Probe
tgccctgtacagtgtgaccctgcct

SEQ ID NO: 295834 - DNA, 25 bp, Artificial
  Probe
ttctcttgaataggaccccaggatc

SEQ ID NO: 295835 - DNA, 25 bp, Artificial
  Probe
tgtgcttctcttgaataggacccca

SEQ ID NO: 295836 - DNA, 25 bp, Artificial
  Probe
ctgccctgtacagtgtgaccctgcc

SEQ ID NO: 295837 - DNA, 25 bp, Artificial
  Probe
tcacttggtgtgcttctcttgaata

SEQ ID NO: 295838 - DNA, 25 bp, Artificial
  Probe
gccctgtacagtgtgaccctgcctg

SEQ ID NO: 295839 - DNA, 25 bp, Artificial
  Probe
tctctgccctgtacagtgtgaccct

SEQ ID NO: 295840 - DNA, 25 bp, Artificial
  Probe
tggtgtgcttctcttgaataggacc

SEQ ID NO: 295841 - DNA, 25 bp, Artificial
  Probe
ctgtacagtgtgaccctgcctgctc

SEQ ID NO: 295842 - DNA, 25 bp, Artificial
  Probe
ctcttgaataggaccccaggatcga

SEQ ID NO: 295843 - DNA, 25 bp, Artificial
  Probe
gtgtgcttctcttgaataggacccc

SEQ ID NO: 295844 - DNA, 25 bp, Artificial
  Probe
ataggaccccaggatcgacctgggg

SEQ ID NO: 295845 - DNA, 25 bp, Artificial
  Probe
tgcttctcttgaataggaccccagg

SEQ ID NO: 295846 - DNA, 25 bp, Artificial
  Probe
ctctgccctgtacagtgtgaccctg

SEQ ID NO: 295847 - DNA, 25 bp, Artificial
  Probe
tcttgaataggaccccaggatcgac

SEQ ID NO: 295848 - DNA, 25 bp, Artificial
  Probe
ctctctgccctgtacagtgtgaccc

SEQ ID NO: 295849 - DNA, 25 bp, Artificial
  Probe
ccctgcctgctctcacttggtgtgc

SEQ ID NO: 295850 - DNA, 25 bp, Artificial
  Probe
cctgtacagtgtgaccctgcctgct

SEQ ID NO: 295851 - DNA, 25 bp, Artificial
  Probe
ttggtgtgcttctcttgaataggac

SEQ ID NO: 295852 - DNA, 25 bp, Artificial
  Probe
cactctctgccctgtacagtgtgac

SEQ ID NO: 295853 - DNA, 25 bp, Artificial
  Probe
aataggaccccaggatcgacctggg

SEQ ID NO: 295854 - DNA, 25 bp, Artificial
  Probe
gtgtgaccctgcctgctctcacttg

SEQ ID NO: 295855 - DNA, 25 bp, Artificial
  Probe
tgcctgctctcacttggtgtgcttc

SEQ ID NO: 295856 - DNA, 25 bp, Artificial
  Probe
ctgctctcacttggtgtgcttctct

SEQ ID NO: 295857 - DNA, 25 bp, Artificial
  Probe
cttggtgtgcttctcttgaatagga

SEQ ID NO: 295858 - DNA, 25 bp, Artificial
  Probe
acttggtgtgcttctcttgaatagg

SEQ ID NO: 295859 - DNA, 25 bp, Artificial
  Probe
cctgctctcacttggtgtgcttctc

SEQ ID NO: 295860 - DNA, 25 bp, Artificial
  Probe
cctgcctgctctcacttggtgtgct

SEQ ID NO: 295861 - DNA, 25 bp, Artificial
  Probe
ctccacggtgttgtcttctgggatc

SEQ ID NO: 295862 - DNA, 25 bp, Artificial
  Probe
ttcattgtcaacatcgtcaacctgg

SEQ ID NO: 295863 - DNA, 25 bp, Artificial
  Probe
agctgcgaggccaatgggctcatgc

SEQ ID NO: 295864 - DNA, 25 bp, Artificial
  Probe
caggcatgcgcgtaggctcctcaag

SEQ ID NO: 295865 - DNA, 25 bp, Artificial
  Probe
cttctgggatctgagagtttgctga

SEQ ID NO: 295866 - DNA, 25 bp, Artificial
  Probe
cggacgccatagagccacggccaga

SEQ ID NO: 295867 - DNA, 25 bp, Artificial
  Probe
agagcttccggaaggttctgtgcct

SEQ ID NO: 295868 - DNA, 25 bp, Artificial
  Probe
gcaggatttgaatgcccctgtaaca

SEQ ID NO: 295869 - DNA, 25 bp, Artificial
  Probe
cattgtggtcaaggtgaaggctgca

SEQ ID NO: 295870 - DNA, 25 bp, Artificial
  Probe
gactcctctcggtggcagtgtgaag

SEQ ID NO: 295871 - DNA, 25 bp, Artificial
  Probe
gtggtcctatcttatgccaatagct

SEQ ID NO: 295872 - DNA, 25 bp, Artificial
  Probe
catctgccggcctctatttctttgt

SEQ ID NO: 295873 - DNA, 25 bp, Artificial
  Probe
cctctatttctttgtggtggtccta

SEQ ID NO: 295874 - DNA, 25 bp, Artificial
  Probe
cgctcggagccgaaggtgactcgca

SEQ ID NO: 295875 - DNA, 25 bp, Artificial
  Probe
aggttctgtgcctacgtagaggata

SEQ ID NO: 295876 - DNA, 25 bp, Artificial
  Probe
gctgcgaggccaatgggctcatgca

SEQ ID NO: 295877 - DNA, 25 bp, Artificial
  Probe
tgtcttctgggatctgagagtttgc

SEQ ID NO: 295878 - DNA, 25 bp, Artificial
  Probe
agaccagcaggatttgaatgcccct

SEQ ID NO: 295879 - DNA, 25 bp, Artificial
  Probe
tctttgtggtggtcctatcttatgc

SEQ ID NO: 295880 - DNA, 25 bp, Artificial
  Probe
tttgaatgcccctgtaacaccctgg

SEQ ID NO: 295881 - DNA, 25 bp, Artificial
  Probe
cggtgttgtcttctgggatctgaga

SEQ ID NO: 295882 - DNA, 25 bp, Artificial
  Probe
aggccaatgggctcatgcagaccag

SEQ ID NO: 295883 - DNA, 25 bp, Artificial
  Probe
ctcggagccgaaggtgactcgcatg

SEQ ID NO: 295884 - DNA, 25 bp, Artificial
  Probe
tctgagagtttgctgagatgcattc

SEQ ID NO: 295885 - DNA, 25 bp, Artificial
  Probe
cggaaggttctgtgcctacgtagag

SEQ ID NO: 295886 - DNA, 25 bp, Artificial
  Probe
ctcattgtggtcaaggtgaaggctg

SEQ ID NO: 295887 - DNA, 25 bp, Artificial
  Probe
gggctcatgcagaccagcaggattt

SEQ ID NO: 295888 - DNA, 25 bp, Artificial
  Probe
cctctcggtggcagtgtgaagacag

SEQ ID NO: 295889 - DNA, 25 bp, Artificial
  Probe
tgcggacgccatagagccacggcca

SEQ ID NO: 295890 - DNA, 25 bp, Artificial
  Probe
ccaggcctacaagttggactcctct

SEQ ID NO: 295891 - DNA, 25 bp, Artificial
  Probe
atgcgcgtaggctcctcaaggcgga

SEQ ID NO: 295892 - DNA, 25 bp, Artificial
  Probe
gaatgcccctgtaacaccctggggg

SEQ ID NO: 295893 - DNA, 25 bp, Artificial
  Probe
cgccatagagccacggccagacaag

SEQ ID NO: 295894 - DNA, 25 bp, Artificial
  Probe
aggcctccacggtgttgtcttctgg

SEQ ID NO: 295895 - DNA, 25 bp, Artificial
  Probe
ggtcctatcttatgccaatagctgt

SEQ ID NO: 295896 - DNA, 25 bp, Artificial
  Probe
aggcatgcgcgtaggctcctcaagg

SEQ ID NO: 295897 - DNA, 25 bp, Artificial
  Probe
gttggactcctctcggtggcagtgt

SEQ ID NO: 295898 - DNA, 25 bp, Artificial
  Probe
atgcagaccagcaggatttgaatgc

SEQ ID NO: 295899 - DNA, 25 bp, Artificial
  Probe
tttctctcggacaacttccgccaga

SEQ ID NO: 295900 - DNA, 25 bp, Artificial
  Probe
atgcggacgccatagagccacggcc

SEQ ID NO: 295901 - DNA, 25 bp, Artificial
  Probe
cacgcagctgcgaggccaatgggct

SEQ ID NO: 295902 - DNA, 25 bp, Artificial
  Probe
gttctgtgcctacgtagaggatacg

SEQ ID NO: 295903 - DNA, 25 bp, Artificial
  Probe
agagtttgctgagatgcattcaccc

SEQ ID NO: 295904 - DNA, 25 bp, Artificial
  Probe
gtcaacatcgtcaacctggccttca

SEQ ID NO: 295905 - DNA, 25 bp, Artificial
  Probe
ctgccggcctctatttctttgtggt

SEQ ID NO: 295906 - DNA, 25 bp, Artificial
  Probe
cctacgtagaggatacggtatggag

SEQ ID NO: 295907 - DNA, 25 bp, Artificial
  Probe
agcacgaccagaaaaccccagtgtc

SEQ ID NO: 295908 - DNA, 25 bp, Artificial
  Probe
atgttgagcagtcacagcctgtcct

SEQ ID NO: 295909 - DNA, 25 bp, Artificial
  Probe
ccttctgctgggaactcggcaggga

SEQ ID NO: 295910 - DNA, 25 bp, Artificial
  Probe
ttagggacttcttgggggtcacatg

SEQ ID NO: 295911 - DNA, 25 bp, Artificial
  Probe
agcagcacgaccagaaaaccccagt

SEQ ID NO: 295912 - DNA, 25 bp, Artificial
  Probe
gagtcaatggcctggggcagccttc

SEQ ID NO: 295913 - DNA, 25 bp, Artificial
  Probe
agagcaggcatttcaagatgcactt

SEQ ID NO: 295914 - DNA, 25 bp, Artificial
  Probe
gatgttgagcagtcacagcctgtcc

SEQ ID NO: 295915 - DNA, 25 bp, Artificial
  Probe
ggggtcacatggtctgtaaggacaa

SEQ ID NO: 295916 - DNA, 25 bp, Artificial
  Probe
gcactgtctggaagcctctcgggct

SEQ ID NO: 295917 - DNA, 25 bp, Artificial
  Probe
gcagccttctgctgggaactcggca

SEQ ID NO: 295918 - DNA, 25 bp, Artificial
  Probe
acttcttgggggtcacatggtctgt

SEQ ID NO: 295919 - DNA, 25 bp, Artificial
  Probe
agcaaggacagagttccttagacga

SEQ ID NO: 295920 - DNA, 25 bp, Artificial
  Probe
agaggccaaagcaaggacagagttc

SEQ ID NO: 295921 - DNA, 25 bp, Artificial
  Probe
atgcacttgccctgctgctccttag

SEQ ID NO: 295922 - DNA, 25 bp, Artificial
  Probe
tcaagatgcacttgccctgctgctc

SEQ ID NO: 295923 - DNA, 25 bp, Artificial
  Probe
tccaaccaaggcataggcagattcc

SEQ ID NO: 295924 - DNA, 25 bp, Artificial
  Probe
tcttgggggtcacatggtctgtaag

SEQ ID NO: 295925 - DNA, 25 bp, Artificial
  Probe
ttccaggagtcaatggcctggggca

SEQ ID NO: 295926 - DNA, 25 bp, Artificial
  Probe
catttcaagaagaggccaaagcaag

SEQ ID NO: 295927 - DNA, 25 bp, Artificial
  Probe
gcagggagcactgtctggaagcctc

SEQ ID NO: 295928 - DNA, 25 bp, Artificial
  Probe
agcagagcaggcatttcaagatgca

SEQ ID NO: 295929 - DNA, 25 bp, Artificial
  Probe
aggaggagccctctgcttcaagagg

SEQ ID NO: 295930 - DNA, 25 bp, Artificial
  Probe
actcggcagggagcactgtctggaa

SEQ ID NO: 295931 - DNA, 25 bp, Artificial
  Probe
caggcatttcaagatgcacttgccc

SEQ ID NO: 295932 - DNA, 25 bp, Artificial
  Probe
tctgtaaggacaaggcatggtcagc

SEQ ID NO: 295933 - DNA, 25 bp, Artificial
  Probe
aaggcataggcagattccaggagtc

SEQ ID NO: 295934 - DNA, 25 bp, Artificial
  Probe
ggacagagttccttagacgaggacc

SEQ ID NO: 295935 - DNA, 25 bp, Artificial
  Probe
ggacaaatgagctccaaccaaggca

SEQ ID NO: 295936 - DNA, 25 bp, Artificial
  Probe
cctggggcagccttctgctgggaac

SEQ ID NO: 295937 - DNA, 25 bp, Artificial
  Probe
taaggacaaggcatggtcagcacag

SEQ ID NO: 295938 - DNA, 25 bp, Artificial
  Probe
gcatggtcagcacagggtctcctcc

SEQ ID NO: 295939 - DNA, 25 bp, Artificial
  Probe
gacaaggcatggtcagcacagggtc

SEQ ID NO: 295940 - DNA, 25 bp, Artificial
  Probe
tggggcagccttctgctgggaactc

SEQ ID NO: 295941 - DNA, 25 bp, Artificial
  Probe
agcctctcgggcttgctcatttcaa

SEQ ID NO: 295942 - DNA, 25 bp, Artificial
  Probe
gcttgctcatttcaagaagaggcca

SEQ ID NO: 295943 - DNA, 25 bp, Artificial
  Probe
cttcaagaggttctggctggtgaga

SEQ ID NO: 295944 - DNA, 25 bp, Artificial
  Probe
caaccaaggcataggcagattccag

SEQ ID NO: 295945 - DNA, 25 bp, Artificial
  Probe
aactcggcagggagcactgtctgga

SEQ ID NO: 295946 - DNA, 25 bp, Artificial
  Probe
catggtctgtaaggacaaggcatgg

SEQ ID NO: 295947 - DNA, 25 bp, Artificial
  Probe
ccatttctgtagtttacagttagag

SEQ ID NO: 295948 - DNA, 25 bp, Artificial
  Probe
tgtctggaagcctctcgggcttgct

SEQ ID NO: 295949 - DNA, 25 bp, Artificial
  Probe
tgctcatttcaagaagaggccaaag

SEQ ID NO: 295950 - DNA, 25 bp, Artificial
  Probe
tgagctccaaccaaggcataggcag

SEQ ID NO: 295951 - DNA, 25 bp, Artificial
  Probe
aggccaaagcaaggacagagttcct

SEQ ID NO: 295952 - DNA, 25 bp, Artificial
  Probe
ggcagccttctgctgggaactcggc

SEQ ID NO: 295953 - DNA, 25 bp, Artificial
  Probe
gggtatactggacactacagcatct

SEQ ID NO: 295954 - DNA, 25 bp, Artificial
  Probe
ctgcaatgaacatttgcaagcaaaa

SEQ ID NO: 295955 - DNA, 25 bp, Artificial
  Probe
cccatcagtgaactactggagtaca

SEQ ID NO: 295956 - DNA, 25 bp, Artificial
  Probe
agggcttataccagaacaaggactc

SEQ ID NO: 295957 - DNA, 25 bp, Artificial
  Probe
actctggagagcaggccctacacct

SEQ ID NO: 295958 - DNA, 25 bp, Artificial
  Probe
acaacaggatatccaagaagagccc

SEQ ID NO: 295959 - DNA, 25 bp, Artificial
  Probe
ggcagtcctacagatccaaaactac

SEQ ID NO: 295960 - DNA, 25 bp, Artificial
  Probe
cagatccagggctttaaattggctc

SEQ ID NO: 295961 - DNA, 25 bp, Artificial
  Probe
actgaccagctcagataccactcag

SEQ ID NO: 295962 - DNA, 25 bp, Artificial
  Probe
gcaggagagctgtgcccaaagacat

SEQ ID NO: 295963 - DNA, 25 bp, Artificial
  Probe
actggagtacatgaagcaggcagtc

SEQ ID NO: 295964 - DNA, 25 bp, Artificial
  Probe
agagcaggggtatggccctgtccct

SEQ ID NO: 295965 - DNA, 25 bp, Artificial
  Probe
atccagggctttaaattggctcact

SEQ ID NO: 295966 - DNA, 25 bp, Artificial
  Probe
tccagcattgatggtggagcagaag

SEQ ID NO: 295967 - DNA, 25 bp, Artificial
  Probe
agttctgaaggcaggagaaccagtg

SEQ ID NO: 295968 - DNA, 25 bp, Artificial
  Probe
agctcagataccactcagcccagat

SEQ ID NO: 295969 - DNA, 25 bp, Artificial
  Probe
ctggtgaggttccagcattgatggt

SEQ ID NO: 295970 - DNA, 25 bp, Artificial
  Probe
agctggccctggttatgggagtcac

SEQ ID NO: 295971 - DNA, 25 bp, Artificial
  Probe
cagcccagatccagggctttaaatt

SEQ ID NO: 295972 - DNA, 25 bp, Artificial
  Probe
aactacacacaggatctccatgatg

SEQ ID NO: 295973 - DNA, 25 bp, Artificial
  Probe
caagaagagccctggtgaggttcca

SEQ ID NO: 295974 - DNA, 25 bp, Artificial
  Probe
atctacccatcagtgaactactgga

SEQ ID NO: 295975 - DNA, 25 bp, Artificial
  Probe
ttgtccctctgttgggacaggaagc

SEQ ID NO: 295976 - DNA, 25 bp, Artificial
  Probe
actggtgagccagttctgaaggcag

SEQ ID NO: 295977 - DNA, 25 bp, Artificial
  Probe
ggatatccaagaagagccctggtga

SEQ ID NO: 295978 - DNA, 25 bp, Artificial
  Probe
aggttccagcattgatggtggagca

SEQ ID NO: 295979 - DNA, 25 bp, Artificial
  Probe
aggcagagggcttataccagaacaa

SEQ ID NO: 295980 - DNA, 25 bp, Artificial
  Probe
cagaacaaggactcgctgcaatgaa

SEQ ID NO: 295981 - DNA, 25 bp, Artificial
  Probe
ttatgggagtcactggtgagccagt

SEQ ID NO: 295982 - DNA, 25 bp, Artificial
  Probe
cctcactatctgcaacactctggag

SEQ ID NO: 295983 - DNA, 25 bp, Artificial
  Probe
catgaagcaggcagtcctacagatc

SEQ ID NO: 295984 - DNA, 25 bp, Artificial
  Probe
cactcagcccagatccagggcttta

SEQ ID NO: 295985 - DNA, 25 bp, Artificial
  Probe
gactcgctgcaatgaacatttgcaa

SEQ ID NO: 295986 - DNA, 25 bp, Artificial
  Probe
gagcaggccctacaccttgcctggg

SEQ ID NO: 295987 - DNA, 25 bp, Artificial
  Probe
cagtgaactactggagtacatgaag

SEQ ID NO: 295988 - DNA, 25 bp, Artificial
  Probe
ctggccctggttatgggagtcactg

SEQ ID NO: 295989 - DNA, 25 bp, Artificial
  Probe
gagagcaggccctacaccttgcctg

SEQ ID NO: 295990 - DNA, 25 bp, Artificial
  Probe
atatccaagaagagccctggtgagg

SEQ ID NO: 295991 - DNA, 25 bp, Artificial
  Probe
catctacccatcagtgaactactgg

SEQ ID NO: 295992 - DNA, 25 bp, Artificial
  Probe
ggtatggccctgtccctcactatct

SEQ ID NO: 295993 - DNA, 25 bp, Artificial
  Probe
cccaaagacatgagagcaggggtat

SEQ ID NO: 295994 - DNA, 25 bp, Artificial
  Probe
caggagaaccagtggactgaccagc

SEQ ID NO: 295995 - DNA, 25 bp, Artificial
  Probe
cagtggactgaccagctcagatacc

SEQ ID NO: 295996 - DNA, 25 bp, Artificial
  Probe
agagctgtgcccaaagacatgagag

SEQ ID NO: 295997 - DNA, 25 bp, Artificial
  Probe
tgagccagttctgaaggcaggagaa

SEQ ID NO: 295998 - DNA, 25 bp, Artificial
  Probe
caacaacaggatatccaagaagagc

SEQ ID NO: 295999 - DNA, 25 bp, Artificial
  Probe
gttgactttcaggtactactttcct

SEQ ID NO: 296000 - DNA, 25 bp, Artificial
  Probe
cctaattcatggtatactgattaag

SEQ ID NO: 296001 - DNA, 25 bp, Artificial
  Probe
aaggtcactgggttgactttcaggt

SEQ ID NO: 296002 - DNA, 25 bp, Artificial
  Probe
ttcttcatcaggatcttgtataatg

SEQ ID NO: 296003 - DNA, 25 bp, Artificial
  Probe
gtagttttctcaactgtacggtacg

SEQ ID NO: 296004 - DNA, 25 bp, Artificial
  Probe
tgactaacatggtttaaatgcaact

SEQ ID NO: 296005 - DNA, 25 bp, Artificial
  Probe
gacgtgtttcttcatcaggatcttg

SEQ ID NO: 296006 - DNA, 25 bp, Artificial
  Probe
ttaagtagttttctcaactgtacgg

SEQ ID NO: 296007 - DNA, 25 bp, Artificial
  Probe
gttgtaacttcatgcttcttaggaa

SEQ ID NO: 296008 - DNA, 25 bp, Artificial
  Probe
gtttcttcatcaggatcttgtataa

SEQ ID NO: 296009 - DNA, 25 bp, Artificial
  Probe
actgactgttgtaacttcatgcttc

SEQ ID NO: 296010 - DNA, 25 bp, Artificial
  Probe
ggtactactttcctaattcatggta

SEQ ID NO: 296011 - DNA, 25 bp, Artificial
  Probe
tcatcaggatcttgtataatgacta

SEQ ID NO: 296012 - DNA, 25 bp, Artificial
  Probe
agcactccagatgtaggtcagaaca

SEQ ID NO: 296013 - DNA, 25 bp, Artificial
  Probe
tcaactgtacggtacggggacgtgt

SEQ ID NO: 296014 - DNA, 25 bp, Artificial
  Probe
cgtgtttcttcatcaggatcttgta

SEQ ID NO: 296015 - DNA, 25 bp, Artificial
  Probe
actgttgtaacttcatgcttcttag

SEQ ID NO: 296016 - DNA, 25 bp, Artificial
  Probe
gggacgtgtttcttcatcaggatct

SEQ ID NO: 296017 - DNA, 25 bp, Artificial
  Probe
tgaccagtgtcacctttttgtactt

SEQ ID NO: 296018 - DNA, 25 bp, Artificial
  Probe
acggggacgtgtttcttcatcagga

SEQ ID NO: 296019 - DNA, 25 bp, Artificial
  Probe
agctgaccagtgtcacctttttgta

SEQ ID NO: 296020 - DNA, 25 bp, Artificial
  Probe
aacttcatgcttcttaggaaagttt

SEQ ID NO: 296021 - DNA, 25 bp, Artificial
  Probe
ctgaccagtgtcacctttttgtact

SEQ ID NO: 296022 - DNA, 25 bp, Artificial
  Probe
ggtcactgggttgactttcaggtac

SEQ ID NO: 296023 - DNA, 25 bp, Artificial
  Probe
ttgtaacttcatgcttcttaggaaa

SEQ ID NO: 296024 - DNA, 25 bp, Artificial
  Probe
aggtcactgggttgactttcaggta

SEQ ID NO: 296025 - DNA, 25 bp, Artificial
  Probe
taacttcatgcttcttaggaaagtt

SEQ ID NO: 296026 - DNA, 25 bp, Artificial
  Probe
taagtagttttctcaactgtacggt

SEQ ID NO: 296027 - DNA, 25 bp, Artificial
  Probe
cttggactgactgttgtaacttcat

SEQ ID NO: 296028 - DNA, 25 bp, Artificial
  Probe
ctgggttgactttcaggtactactt

SEQ ID NO: 296029 - DNA, 25 bp, Artificial
  Probe
gactgttgtaacttcatgcttctta

SEQ ID NO: 296030 - DNA, 25 bp, Artificial
  Probe
attaagtagttttctcaactgtacg

SEQ ID NO: 296031 - DNA, 25 bp, Artificial
  Probe
ggtacggggacgtgtttcttcatca

SEQ ID NO: 296032 - DNA, 25 bp, Artificial
  Probe
ggactgactgttgtaacttcatgct

SEQ ID NO: 296033 - DNA, 25 bp, Artificial
  Probe
ttggactgactgttgtaacttcatg

SEQ ID NO: 296034 - DNA, 25 bp, Artificial
  Probe
caggtactactttcctaattcatgg

SEQ ID NO: 296035 - DNA, 25 bp, Artificial
  Probe
ggtttaaatgcaacttcatttgact

SEQ ID NO: 296036 - DNA, 25 bp, Artificial
  Probe
catcaggatcttgtataatgactaa

SEQ ID NO: 296037 - DNA, 25 bp, Artificial
  Probe
tacggggacgtgtttcttcatcagg

SEQ ID NO: 296038 - DNA, 25 bp, Artificial
  Probe
cttcatcaggatcttgtataatgac

SEQ ID NO: 296039 - DNA, 25 bp, Artificial
  Probe
tagttttctcaactgtacggtacgg

SEQ ID NO: 296040 - DNA, 25 bp, Artificial
  Probe
ggacgtgtttcttcatcaggatctt

SEQ ID NO: 296041 - DNA, 25 bp, Artificial
  Probe
cttcatgcttcttaggaaagtttaa

SEQ ID NO: 296042 - DNA, 25 bp, Artificial
  Probe
actccagatgtaggtcagaacaaaa

SEQ ID NO: 296043 - DNA, 25 bp, Artificial
  Probe
cactgggttgactttcaggtactac

SEQ ID NO: 296044 - DNA, 25 bp, Artificial
  Probe
gcagctgaccagtgtcacctttttg

SEQ ID NO: 296045 - DNA, 25 bp, Artificial
  Probe
tcattggaagtatggccaagacctg

SEQ ID NO: 296046 - DNA, 25 bp, Artificial
  Probe
catctcattggaagtatggccaaga

SEQ ID NO: 296047 - DNA, 25 bp, Artificial
  Probe
gttggagctccctttaaaagaatcg

SEQ ID NO: 296048 - DNA, 25 bp, Artificial
  Probe
gacatgaagagctgccaggagtgcc

SEQ ID NO: 296049 - DNA, 25 bp, Artificial
  Probe
ctgtgtttaggctggatcctggact

SEQ ID NO: 296050 - DNA, 25 bp, Artificial
  Probe
acatagcagacgaggccccacttct

SEQ ID NO: 296051 - DNA, 25 bp, Artificial
  Probe
tgtgcagccgggaccccaggatcaa

SEQ ID NO: 296052 - DNA, 25 bp, Artificial
  Probe
ggaataactccctggccagacacca

SEQ ID NO: 296053 - DNA, 25 bp, Artificial
  Probe
cagaatagtccgtgtgcagccggga

SEQ ID NO: 296054 - DNA, 25 bp, Artificial
  Probe
aagttgaacaagatccacgtgtcac

SEQ ID NO: 296055 - DNA, 25 bp, Artificial
  Probe
ggaagttcaatttccacaccatgac

SEQ ID NO: 296056 - DNA, 25 bp, Artificial
  Probe
agacctgagggcagaatagtccgtg

SEQ ID NO: 296057 - DNA, 25 bp, Artificial
  Probe
tacaccatgggactctcctaggatg

SEQ ID NO: 296058 - DNA, 25 bp, Artificial
  Probe
atgttgatgcccaggctgtgctgaa

SEQ ID NO: 296059 - DNA, 25 bp, Artificial
  Probe
gcctccaggggaagttcaatttcca

SEQ ID NO: 296060 - DNA, 25 bp, Artificial
  Probe
tgccagggtccctcggaataactcc

SEQ ID NO: 296061 - DNA, 25 bp, Artificial
  Probe
tagccattgcccagaatgttgatgc

SEQ ID NO: 296062 - DNA, 25 bp, Artificial
  Probe
actctgaggacatgaagagctgcca

SEQ ID NO: 296063 - DNA, 25 bp, Artificial
  Probe
tagtccgtgtgcagccgggacccca

SEQ ID NO: 296064 - DNA, 25 bp, Artificial
  Probe
tggggacatagcagacgaggcccca

SEQ ID NO: 296065 - DNA, 25 bp, Artificial
  Probe
cctggccagacaccatctcattgga

SEQ ID NO: 296066 - DNA, 25 bp, Artificial
  Probe
caggatcaagacatggcctggtcca

SEQ ID NO: 296067 - DNA, 25 bp, Artificial
  Probe
acaccatgaccatccaaattgagag

SEQ ID NO: 296068 - DNA, 25 bp, Artificial
  Probe
ccagaatgttgatgcccaggctgtg

SEQ ID NO: 296069 - DNA, 25 bp, Artificial
  Probe
gatagttggagctccctttaaaaga

SEQ ID NO: 296070 - DNA, 25 bp, Artificial
  Probe
caggactgtgtttaggctggatcct

SEQ ID NO: 296071 - DNA, 25 bp, Artificial
  Probe
acactgaggcgcagaaagggatttt

SEQ ID NO: 296072 - DNA, 25 bp, Artificial
  Probe
tggatagttggagctccctttaaaa

SEQ ID NO: 296073 - DNA, 25 bp, Artificial
  Probe
gaagtatggccaagacctgagggca

SEQ ID NO: 296074 - DNA, 25 bp, Artificial
  Probe
gactaatgttatgctcacaccacag

SEQ ID NO: 296075 - DNA, 25 bp, Artificial
  Probe
tcctggactaatgttatgctcacac

SEQ ID NO: 296076 - DNA, 25 bp, Artificial
  Probe
gtctgtccacatagccattgcccag

SEQ ID NO: 296077 - DNA, 25 bp, Artificial
  Probe
aggactgtgtttaggctggatcctg

SEQ ID NO: 296078 - DNA, 25 bp, Artificial
  Probe
agctgccaggagtgccagggtccct

SEQ ID NO: 296079 - DNA, 25 bp, Artificial
  Probe
ccacatagccattgcccagaatgtt

SEQ ID NO: 296080 - DNA, 25 bp, Artificial
  Probe
caccatgggactctcctaggatggg

SEQ ID NO: 296081 - DNA, 25 bp, Artificial
  Probe
agccagggtctctgtctgaaccaaa

SEQ ID NO: 296082 - DNA, 25 bp, Artificial
  Probe
gacaccatctcattggaagtatggc

SEQ ID NO: 296083 - DNA, 25 bp, Artificial
  Probe
acagctggagagacactgaggcgca

SEQ ID NO: 296084 - DNA, 25 bp, Artificial
  Probe
ggccaagacctgagggcagaatagt

SEQ ID NO: 296085 - DNA, 25 bp, Artificial
  Probe
tgtctgaaccaaaagttgaacaaga

SEQ ID NO: 296086 - DNA, 25 bp, Artificial
  Probe
aagatccacgtgtcacgtgactgga

SEQ ID NO: 296087 - DNA, 25 bp, Artificial
  Probe
gtccacatagccattgcccagaatg

SEQ ID NO: 296088 - DNA, 25 bp, Artificial
  Probe
cactgaggcgcagaaagggattttg

SEQ ID NO: 296089 - DNA, 25 bp, Artificial
  Probe
acgtgactggatagttggagctccc

SEQ ID NO: 296090 - DNA, 25 bp, Artificial
  Probe
agccgggaccccaggatcaagacat

SEQ ID NO: 296091 - DNA, 25 bp, Artificial
  Probe
tcttagccttgtcctccaaactggc

SEQ ID NO: 296092 - DNA, 25 bp, Artificial
  Probe
ttgttctctccctgtgacacagctg

SEQ ID NO: 296093 - DNA, 25 bp, Artificial
  Probe
gttcttagccttgtcctccaaactg

SEQ ID NO: 296094 - DNA, 25 bp, Artificial
  Probe
cacccgtgaaggaggtacagtggcc

SEQ ID NO: 296095 - DNA, 25 bp, Artificial
  Probe
tgtgttgtttgtgaccgttcttagc

SEQ ID NO: 296096 - DNA, 25 bp, Artificial
  Probe
actgcactaaaggtgaccagtacca

SEQ ID NO: 296097 - DNA, 25 bp, Artificial
  Probe
atccttgtgttgtttgtgaccgttc

SEQ ID NO: 296098 - DNA, 25 bp, Artificial
  Probe
atttgtccatggagccacattgttc

SEQ ID NO: 296099 - DNA, 25 bp, Artificial
  Probe
cagtggcccgggtgaccccagtatt

SEQ ID NO: 296100 - DNA, 25 bp, Artificial
  Probe
ctctctacgtttgatccttgtgttg

SEQ ID NO: 296101 - DNA, 25 bp, Artificial
  Probe
gtggcccgggtgaccccagtatttg

SEQ ID NO: 296102 - DNA, 25 bp, Artificial
  Probe
gcccaaggggctactgcactaaagg

SEQ ID NO: 296103 - DNA, 25 bp, Artificial
  Probe
gtccatggagccacattgttctctc

SEQ ID NO: 296104 - DNA, 25 bp, Artificial
  Probe
ccaaactggcccaaggggctactgc

SEQ ID NO: 296105 - DNA, 25 bp, Artificial
  Probe
cacagctgtagagtctgattttgtt

SEQ ID NO: 296106 - DNA, 25 bp, Artificial
  Probe
ggtgaccagtaccaacctccttctt

SEQ ID NO: 296107 - DNA, 25 bp, Artificial
  Probe
cgctgcccaggcaatgggaccaggt

SEQ ID NO: 296108 - DNA, 25 bp, Artificial
  Probe
tcccagcacccgtgaaggaggtaca

SEQ ID NO: 296109 - DNA, 25 bp, Artificial
  Probe
atgctcagacttcttacagcgccac

SEQ ID NO: 296110 - DNA, 25 bp, Artificial
  Probe
ccaggcaatgggaccaggttccagc

SEQ ID NO: 296111 - DNA, 25 bp, Artificial
  Probe
ccgggtgaccccagtatttgtccat

SEQ ID NO: 296112 - DNA, 25 bp, Artificial
  Probe
ttctccgtgcggtttccagggccca

SEQ ID NO: 296113 - DNA, 25 bp, Artificial
  Probe
ttgatccttgtgttgtttgtgaccg

SEQ ID NO: 296114 - DNA, 25 bp, Artificial
  Probe
gtgttgtttgtgaccgttcttagcc

SEQ ID NO: 296115 - DNA, 25 bp, Artificial
  Probe
ctgcccaggcaatgggaccaggttc

SEQ ID NO: 296116 - DNA, 25 bp, Artificial
  Probe
tgtttgtgaccgttcttagccttgt

SEQ ID NO: 296117 - DNA, 25 bp, Artificial
  Probe
gccacattgttctctccctgtgaca

SEQ ID NO: 296118 - DNA, 25 bp, Artificial
  Probe
caaactggcccaaggggctactgca

SEQ ID NO: 296119 - DNA, 25 bp, Artificial
  Probe
taaaggtgaccagtaccaacctcct

SEQ ID NO: 296120 - DNA, 25 bp, Artificial
  Probe
tccgctttgtcttacggtcttcggt

SEQ ID NO: 296121 - DNA, 25 bp, Artificial
  Probe
tacggtcttcggttttgatgttcta

SEQ ID NO: 296122 - DNA, 25 bp, Artificial
  Probe
tcgaaactgcacagtcaagaaggaa

SEQ ID NO: 296123 - DNA, 25 bp, Artificial
  Probe
gcccagctccggaatcgaaactgca

SEQ ID NO: 296124 - DNA, 25 bp, Artificial
  Probe
tgcactaaaggtgaccagtaccaac

SEQ ID NO: 296125 - DNA, 25 bp, Artificial
  Probe
tgtcttacggtcttcggttttgatg

SEQ ID NO: 296126 - DNA, 25 bp, Artificial
  Probe
cagaactctctacgtttgatccttg

SEQ ID NO: 296127 - DNA, 25 bp, Artificial
  Probe
gtcttacggtcttcggttttgatgt

SEQ ID NO: 296128 - DNA, 25 bp, Artificial
  Probe
cggtcttcggttttgatgttctaag

SEQ ID NO: 296129 - DNA, 25 bp, Artificial
  Probe
ggctactgcactaaaggtgaccagt

SEQ ID NO: 296130 - DNA, 25 bp, Artificial
  Probe
tatttattcgtgcttcgaaccacag

SEQ ID NO: 296131 - DNA, 25 bp, Artificial
  Probe
cctgagcccagctccggaatcgaaa

SEQ ID NO: 296132 - DNA, 25 bp, Artificial
  Probe
tgttccgctttgtcttacggtcttc

SEQ ID NO: 296133 - DNA, 25 bp, Artificial
  Probe
gcacctgcatgctcagacttcttac

SEQ ID NO: 296134 - DNA, 25 bp, Artificial
  Probe
gtgaccgttcttagccttgtcctcc

SEQ ID NO: 296135 - DNA, 25 bp, Artificial
  Probe
tgtcctccaaactggcccaaggggc

SEQ ID NO: 296136 - DNA, 25 bp, Artificial
  Probe
ttgtcctccaaactggcccaagggg

SEQ ID NO: 296137 - DNA, 25 bp, Artificial
  Probe
tgtctttgcccaccatgattctcat

SEQ ID NO: 296138 - DNA, 25 bp, Artificial
  Probe
tctttgcccaccatgattctcatta

SEQ ID NO: 296139 - DNA, 25 bp, Artificial
  Probe
ttattaccgtagagggctcagtgct

SEQ ID NO: 296140 - DNA, 25 bp, Artificial
  Probe
taccgtagagggctcagtgctactc

SEQ ID NO: 296141 - DNA, 25 bp, Artificial
  Probe
attattaccgtagagggctcagtgc

SEQ ID NO: 296142 - DNA, 25 bp, Artificial
  Probe
tctgtctttgcccaccatgattctc

SEQ ID NO: 296143 - DNA, 25 bp, Artificial
  Probe
ttctcattattaccgtagagggctc

SEQ ID NO: 296144 - DNA, 25 bp, Artificial
  Probe
taacattatcttctgtctttgccca

SEQ ID NO: 296145 - DNA, 25 bp, Artificial
  Probe
aagaataacattatcttctgtcttt

SEQ ID NO: 296146 - DNA, 25 bp, Artificial
  Probe
attctcattattaccgtagagggct

SEQ ID NO: 296147 - DNA, 25 bp, Artificial
  Probe
accgtagagggctcagtgctactcc

SEQ ID NO: 296148 - DNA, 25 bp, Artificial
  Probe
tctcattattaccgtagagggctca

SEQ ID NO: 296149 - DNA, 25 bp, Artificial
  Probe
atcttctgtctttgcccaccatgat

SEQ ID NO: 296150 - DNA, 25 bp, Artificial
  Probe
tgattctcattattaccgtagaggg

SEQ ID NO: 296151 - DNA, 25 bp, Artificial
  Probe
attatcttctgtctttgcccaccat

SEQ ID NO: 296152 - DNA, 25 bp, Artificial
  Probe
caccatgattctcattattaccgta

SEQ ID NO: 296153 - DNA, 25 bp, Artificial
  Probe
cttctgtctttgcccaccatgattc

SEQ ID NO: 296154 - DNA, 25 bp, Artificial
  Probe
tcttctgtctttgcccaccatgatt

SEQ ID NO: 296155 - DNA, 25 bp, Artificial
  Probe
ccatgattctcattattaccgtaga

SEQ ID NO: 296156 - DNA, 25 bp, Artificial
  Probe
ctcattattaccgtagagggctcag

SEQ ID NO: 296157 - DNA, 25 bp, Artificial
  Probe
ttatcttctgtctttgcccaccatg

SEQ ID NO: 296158 - DNA, 25 bp, Artificial
  Probe
aataacattatcttctgtctttgcc

SEQ ID NO: 296159 - DNA, 25 bp, Artificial
  Probe
gattctcattattaccgtagagggc

SEQ ID NO: 296160 - DNA, 25 bp, Artificial
  Probe
atgattctcattattaccgtagagg

SEQ ID NO: 296161 - DNA, 25 bp, Artificial
  Probe
accatgattctcattattaccgtag

SEQ ID NO: 296162 - DNA, 25 bp, Artificial
  Probe
ccaccatgattctcattattaccgt

SEQ ID NO: 296163 - DNA, 25 bp, Artificial
  Probe
gtctttgcccaccatgattctcatt

SEQ ID NO: 296164 - DNA, 25 bp, Artificial
  Probe
tcattattaccgtagagggctcagt

SEQ ID NO: 296165 - DNA, 25 bp, Artificial
  Probe
tgcccaccatgattctcattattac

SEQ ID NO: 296166 - DNA, 25 bp, Artificial
  Probe
acattatcttctgtctttgcccacc

SEQ ID NO: 296167 - DNA, 25 bp, Artificial
  Probe
gcccaccatgattctcattattacc

SEQ ID NO: 296168 - DNA, 25 bp, Artificial
  Probe
gaataacattatcttctgtctttgc

SEQ ID NO: 296169 - DNA, 25 bp, Artificial
  Probe
catgattctcattattaccgtagag

SEQ ID NO: 296170 - DNA, 25 bp, Artificial
  Probe
tttgcccaccatgattctcattatt

SEQ ID NO: 296171 - DNA, 25 bp, Artificial
  Probe
tattaccgtagagggctcagtgcta

SEQ ID NO: 296172 - DNA, 25 bp, Artificial
  Probe
ttgcccaccatgattctcattatta

SEQ ID NO: 296173 - DNA, 25 bp, Artificial
  Probe
tatcttctgtctttgcccaccatga

SEQ ID NO: 296174 - DNA, 25 bp, Artificial
  Probe
aacattatcttctgtctttgcccac

SEQ ID NO: 296175 - DNA, 25 bp, Artificial
  Probe
ccgtagagggctcagtgctactcct

SEQ ID NO: 296176 - DNA, 25 bp, Artificial
  Probe
cccaccatgattctcattattaccg

SEQ ID NO: 296177 - DNA, 25 bp, Artificial
  Probe
agaataacattatcttctgtctttg

SEQ ID NO: 296178 - DNA, 25 bp, Artificial
  Probe
cgtagagggctcagtgctactccta

SEQ ID NO: 296179 - DNA, 25 bp, Artificial
  Probe
ttaccgtagagggctcagtgctact

SEQ ID NO: 296180 - DNA, 25 bp, Artificial
  Probe
ctgtctttgcccaccatgattctca

SEQ ID NO: 296181 - DNA, 25 bp, Artificial
  Probe
cattatcttctgtctttgcccacca

SEQ ID NO: 296182 - DNA, 25 bp, Artificial
  Probe
cattattaccgtagagggctcagtg

SEQ ID NO: 296183 - DNA, 25 bp, Artificial
  Probe
ttaccatgacagataaagagccagc

SEQ ID NO: 296184 - DNA, 25 bp, Artificial
  Probe
ctgagtagttaccatgacagataaa

SEQ ID NO: 296185 - DNA, 25 bp, Artificial
  Probe
ttgaacagactactgagtagttacc

SEQ ID NO: 296186 - DNA, 25 bp, Artificial
  Probe
ggatcatcgggctggttgccacaga

SEQ ID NO: 296187 - DNA, 25 bp, Artificial
  Probe
tccttcccagacacaagaagtaatg

SEQ ID NO: 296188 - DNA, 25 bp, Artificial
  Probe
gtagttaccatgacagataaagagc

SEQ ID NO: 296189 - DNA, 25 bp, Artificial
  Probe
agagccagctcatttaccttcacag

SEQ ID NO: 296190 - DNA, 25 bp, Artificial
  Probe
cacctgtgtgggtgcatttgagcaa

SEQ ID NO: 296191 - DNA, 25 bp, Artificial
  Probe
ttctgtggaggtctgacatgaaggc

SEQ ID NO: 296192 - DNA, 25 bp, Artificial
  Probe
gggctggttgccacagagctccctt

SEQ ID NO: 296193 - DNA, 25 bp, Artificial
  Probe
cccagacacaagaagtaatggagtg

SEQ ID NO: 296194 - DNA, 25 bp, Artificial
  Probe
ctactgagtagttaccatgacagat

SEQ ID NO: 296195 - DNA, 25 bp, Artificial
  Probe
tccctaggatgttgggaacacaggg

SEQ ID NO: 296196 - DNA, 25 bp, Artificial
  Probe
acagaacctgcgttgaaggatccct

SEQ ID NO: 296197 - DNA, 25 bp, Artificial
  Probe
taccttcacagttcgcatcggtaaa

SEQ ID NO: 296198 - DNA, 25 bp, Artificial
  Probe
tgcgttgaaggatccctaggatgtt

SEQ ID NO: 296199 - DNA, 25 bp, Artificial
  Probe
taaggacttaacagccattcttgct

SEQ ID NO: 296200 - DNA, 25 bp, Artificial
  Probe
tctgtggaggtctgacatgaaggca

SEQ ID NO: 296201 - DNA, 25 bp, Artificial
  Probe
catttaccttcacagttcgcatcgg

SEQ ID NO: 296202 - DNA, 25 bp, Artificial
  Probe
caattctgtggaggtctgacatgaa

SEQ ID NO: 296203 - DNA, 25 bp, Artificial
  Probe
ccttcccagacacaagaagtaatgg

SEQ ID NO: 296204 - DNA, 25 bp, Artificial
  Probe
aattcacctgtgtgggtgcatttga

SEQ ID NO: 296205 - DNA, 25 bp, Artificial
  Probe
cttccactgcagtgggatcatcggg

SEQ ID NO: 296206 - DNA, 25 bp, Artificial
  Probe
gagccagctcatttaccttcacagt

SEQ ID NO: 296207 - DNA, 25 bp, Artificial
  Probe
catcggtaaacactataaggactta

SEQ ID NO: 296208 - DNA, 25 bp, Artificial
  Probe
ttcccagacacaagaagtaatggag

SEQ ID NO: 296209 - DNA, 25 bp, Artificial
  Probe
gtaaacactataaggacttaacagc

SEQ ID NO: 296210 - DNA, 25 bp, Artificial
  Probe
agttcgcatcggtaaacactataag

SEQ ID NO: 296211 - DNA, 25 bp, Artificial
  Probe
tataaggacttaacagccattcttg

SEQ ID NO: 296212 - DNA, 25 bp, Artificial
  Probe
attcttgcttacttccactgcagtg

SEQ ID NO: 296213 - DNA, 25 bp, Artificial
  Probe
agactactgagtagttaccatgaca

SEQ ID NO: 296214 - DNA, 25 bp, Artificial
  Probe
atgaaggcaatgcattcctggttac

SEQ ID NO: 296215 - DNA, 25 bp, Artificial
  Probe
gggctaaattcacctgtgtgggtgc

SEQ ID NO: 296216 - DNA, 25 bp, Artificial
  Probe
tgagcttctctcattcaattctgtg

SEQ ID NO: 296217 - DNA, 25 bp, Artificial
  Probe
gaaggatccctaggatgttgggaac

SEQ ID NO: 296218 - DNA, 25 bp, Artificial
  Probe
tcacagttcgcatcggtaaacacta

SEQ ID NO: 296219 - DNA, 25 bp, Artificial
  Probe
ggctggttgccacagagctcccttc

SEQ ID NO: 296220 - DNA, 25 bp, Artificial
  Probe
atgtacagaacctgcgttgaaggat

SEQ ID NO: 296221 - DNA, 25 bp, Artificial
  Probe
catcgggctggttgccacagagctc

SEQ ID NO: 296222 - DNA, 25 bp, Artificial
  Probe
ttcacagttcgcatcggtaaacact

SEQ ID NO: 296223 - DNA, 25 bp, Artificial
  Probe
tgaaggcaatgcattcctggttacc

SEQ ID NO: 296224 - DNA, 25 bp, Artificial
  Probe
aggtctgacatgaaggcaatgcatt

SEQ ID NO: 296225 - DNA, 25 bp, Artificial
  Probe
acagactactgagtagttaccatga

SEQ ID NO: 296226 - DNA, 25 bp, Artificial
  Probe
gagggctaaattcacctgtgtgggt

SEQ ID NO: 296227 - DNA, 25 bp, Artificial
  Probe
attcctggttaccacagacttcgcc

SEQ ID NO: 296228 - DNA, 25 bp, Artificial
  Probe
ctggatgtacagaacctgcgttgaa

SEQ ID NO: 296229 - DNA, 25 bp, Artificial
  Probe
tgccgccatcctggagttctccaag

SEQ ID NO: 296230 - DNA, 25 bp, Artificial
  Probe
gtaaaatggttcttacctctcaagc

SEQ ID NO: 296231 - DNA, 25 bp, Artificial
  Probe
ccacagagcagcagggcctgaagga

SEQ ID NO: 296232 - DNA, 25 bp, Artificial
  Probe
tcaagcttttatgtctgccacattg

SEQ ID NO: 296233 - DNA, 25 bp, Artificial
  Probe
tggctgaaagagctgacgtgcacct

SEQ ID NO: 296234 - DNA, 25 bp, Artificial
  Probe
ccaagccaccgctgtgtcacagaaa

SEQ ID NO: 296235 - DNA, 25 bp, Artificial
  Probe
tggagttctccaagccaccgctgtg

SEQ ID NO: 296236 - DNA, 25 bp, Artificial
  Probe
ggcctatccacactcgaaattactg

SEQ ID NO: 296237 - DNA, 25 bp, Artificial
  Probe
tgctccaggctgaggaggcccacaa

SEQ ID NO: 296238 - DNA, 25 bp, Artificial
  Probe
gggtggcccttcaggaactaggaca

SEQ ID NO: 296239 - DNA, 25 bp, Artificial
  Probe
ttatgtctgccacattgttttgtca

SEQ ID NO: 296240 - DNA, 25 bp, Artificial
  Probe
aaccctctcactttggtatccatgg

SEQ ID NO: 296241 - DNA, 25 bp, Artificial
  Probe
atagcagcggcctctgaaccacaga

SEQ ID NO: 296242 - DNA, 25 bp, Artificial
  Probe
gggctggcctatccacactcgaaat

SEQ ID NO: 296243 - DNA, 25 bp, Artificial
  Probe
cacaacaccgggtggcccttcagga

SEQ ID NO: 296244 - DNA, 25 bp, Artificial
  Probe
tccacactcgaaattactgaagaag

SEQ ID NO: 296245 - DNA, 25 bp, Artificial
  Probe
tgttttgtcacaagataacacactg

SEQ ID NO: 296246 - DNA, 25 bp, Artificial
  Probe
ctggagttctccaagccaccgctgt

SEQ ID NO: 296247 - DNA, 25 bp, Artificial
  Probe
aagttcctcaacaaaccacgtgccg

SEQ ID NO: 296248 - DNA, 25 bp, Artificial
  Probe
gcaccttcaacgaggcccagagact

SEQ ID NO: 296249 - DNA, 25 bp, Artificial
  Probe
ggctgagacacagtggctctgagca

SEQ ID NO: 296250 - DNA, 25 bp, Artificial
  Probe
ggctctgagcactgggctgctccag

SEQ ID NO: 296251 - DNA, 25 bp, Artificial
  Probe
acactcgaaattactgaagaagcag

SEQ ID NO: 296252 - DNA, 25 bp, Artificial
  Probe
tgtcacagaaatagcagcggcctct

SEQ ID NO: 296253 - DNA, 25 bp, Artificial
  Probe
ccccagcagtggaatggagccacgg

SEQ ID NO: 296254 - DNA, 25 bp, Artificial
  Probe
agagtgaccccgagtttgcacagtg

SEQ ID NO: 296255 - DNA, 25 bp, Artificial
  Probe
gccacattgttttgtcacaagataa

SEQ ID NO: 296256 - DNA, 25 bp, Artificial
  Probe
tggacccagaacgtaaaatggttct

SEQ ID NO: 296257 - DNA, 25 bp, Artificial
  Probe
tccaggctgaggaggcccacaacac

SEQ ID NO: 296258 - DNA, 25 bp, Artificial
  Probe
gaaagagctgacgtgcaccttcaac

SEQ ID NO: 296259 - DNA, 25 bp, Artificial
  Probe
acgaggcccagagactgctgcgccg

SEQ ID NO: 296260 - DNA, 25 bp, Artificial
  Probe
ggttcttacctctcaagcttttatg

SEQ ID NO: 296261 - DNA, 25 bp, Artificial
  Probe
tcaacgaggcccagagactgctgcg

SEQ ID NO: 296262 - DNA, 25 bp, Artificial
  Probe
ctgaggaggcccacaacaccgggtg

SEQ ID NO: 296263 - DNA, 25 bp, Artificial
  Probe
ttttgcaatgtgagagtgaccccga

SEQ ID NO: 296264 - DNA, 25 bp, Artificial
  Probe
caggaactaggacatccttggggct

SEQ ID NO: 296265 - DNA, 25 bp, Artificial
  Probe
tctgtgcaaccctctcactttggta

SEQ ID NO: 296266 - DNA, 25 bp, Artificial
  Probe
gtgccgccatcctggagttctccaa

SEQ ID NO: 296267 - DNA, 25 bp, Artificial
  Probe
acagtggctgaaagagctgacgtgc

SEQ ID NO: 296268 - DNA, 25 bp, Artificial
  Probe
aagcagaggcatttttctgtgcaac

SEQ ID NO: 296269 - DNA, 25 bp, Artificial
  Probe
ctcttcagccccagcagtggaatgg

SEQ ID NO: 296270 - DNA, 25 bp, Artificial
  Probe
aatgtgagagtgaccccgagtttgc

SEQ ID NO: 296271 - DNA, 25 bp, Artificial
  Probe
agcttttatgtctgccacattgttt

SEQ ID NO: 296272 - DNA, 25 bp, Artificial
  Probe
cacagaaatagcagcggcctctgaa

SEQ ID NO: 296273 - DNA, 25 bp, Artificial
  Probe
ggcatttttctgtgcaaccctctca

SEQ ID NO: 296274 - DNA, 25 bp, Artificial
  Probe
caatgtgagagtgaccccgagtttg

SEQ ID NO: 296275 - DNA, 25 bp, Artificial
  Probe
agcaagtaccacatcatagcttgaa

SEQ ID NO: 296276 - DNA, 25 bp, Artificial
  Probe
actgaccaagcaagtaccacatcat

SEQ ID NO: 296277 - DNA, 25 bp, Artificial
  Probe
caagtaccacatcatagcttgaatt

SEQ ID NO: 296278 - DNA, 25 bp, Artificial
  Probe
acaaagcagttgcaagcgcgactgt

SEQ ID NO: 296279 - DNA, 25 bp, Artificial
  Probe
ttgttgaaagccagcagcagcaaca

SEQ ID NO: 296280 - DNA, 25 bp, Artificial
  Probe
aagcaagtaccacatcatagcttga

SEQ ID NO: 296281 - DNA, 25 bp, Artificial
  Probe
accacatcatagcttgaattcaggt

SEQ ID NO: 296282 - DNA, 25 bp, Artificial
  Probe
agtaccacatcatagcttgaattca

SEQ ID NO: 296283 - DNA, 25 bp, Artificial
  Probe
tttgttgaaagccagcagcagcaac

SEQ ID NO: 296284 - DNA, 25 bp, Artificial
  Probe
aagtaccacatcatagcttgaattc

SEQ ID NO: 296285 - DNA, 25 bp, Artificial
  Probe
gtaccacatcatagcttgaattcag

SEQ ID NO: 296286 - DNA, 25 bp, Artificial
  Probe
agcagttgcaagcgcgactgtgaaa

SEQ ID NO: 296287 - DNA, 25 bp, Artificial
  Probe
caagcaagtaccacatcatagcttg

SEQ ID NO: 296288 - DNA, 25 bp, Artificial
  Probe
ccactgaccaagcaagtaccacatc

SEQ ID NO: 296289 - DNA, 25 bp, Artificial
  Probe
gttgcaagcgcgactgtgaaaggtg

SEQ ID NO: 296290 - DNA, 25 bp, Artificial
  Probe
cactgaccaagcaagtaccacatca

SEQ ID NO: 296291 - DNA, 25 bp, Artificial
  Probe
aaagcagttgcaagcgcgactgtga

SEQ ID NO: 296292 - DNA, 25 bp, Artificial
  Probe
accaagcaagtaccacatcatagct

SEQ ID NO: 296293 - DNA, 25 bp, Artificial
  Probe
agttgcaagcgcgactgtgaaaggt

SEQ ID NO: 296294 - DNA, 25 bp, Artificial
  Probe
aatttgttgaaagccagcagcagca

SEQ ID NO: 296295 - DNA, 25 bp, Artificial
  Probe
taccacatcatagcttgaattcagg

SEQ ID NO: 296296 - DNA, 25 bp, Artificial
  Probe
ccaagcaagtaccacatcatagctt

SEQ ID NO: 296297 - DNA, 25 bp, Artificial
  Probe
gaccaagcaagtaccacatcatagc

SEQ ID NO: 296298 - DNA, 25 bp, Artificial
  Probe
tacaaagcagttgcaagcgcgactg

SEQ ID NO: 296299 - DNA, 25 bp, Artificial
  Probe
caaagcagttgcaagcgcgactgtg

SEQ ID NO: 296300 - DNA, 25 bp, Artificial
  Probe
ctgaccaagcaagtaccacatcata

SEQ ID NO: 296301 - DNA, 25 bp, Artificial
  Probe
gcaagtaccacatcatagcttgaat

SEQ ID NO: 296302 - DNA, 25 bp, Artificial
  Probe
tgaccaagcaagtaccacatcatag

SEQ ID NO: 296303 - DNA, 25 bp, Artificial
  Probe
atttgttgaaagccagcagcagcaa

SEQ ID NO: 296304 - DNA, 25 bp, Artificial
  Probe
cacaggaggccgtcttttagacaca

SEQ ID NO: 296305 - DNA, 25 bp, Artificial
  Probe
cgtcttttagacacatggttgtggt

SEQ ID NO: 296306 - DNA, 25 bp, Artificial
  Probe
caagagcattttagccattgaagaa

SEQ ID NO: 296307 - DNA, 25 bp, Artificial
  Probe
agtcattctctacatagcatgtgta

SEQ ID NO: 296308 - DNA, 25 bp, Artificial
  Probe
aacgcgtacattacggagtacatat

SEQ ID NO: 296309 - DNA, 25 bp, Artificial
  Probe
ttaatgcctgcatcatgagccagat

SEQ ID NO: 296310 - DNA, 25 bp, Artificial
  Probe
caagtcattctctacatagcatgtg

SEQ ID NO: 296311 - DNA, 25 bp, Artificial
  Probe
tccttaatgcctgcatcatgagcca

SEQ ID NO: 296312 - DNA, 25 bp, Artificial
  Probe
ggaagaagactgttcctgaggaaca

SEQ ID NO: 296313 - DNA, 25 bp, Artificial
  Probe
acacatggttgtggtatgactatac

SEQ ID NO: 296314 - DNA, 25 bp, Artificial
  Probe
ctgttcctgaggaacataaagtttt

SEQ ID NO: 296315 - DNA, 25 bp, Artificial
  Probe
gagtggtccttaatgcctgcatcat

SEQ ID NO: 296316 - DNA, 25 bp, Artificial
  Probe
ttttctgagcccacctttgatgcta

SEQ ID NO: 296317 - DNA, 25 bp, Artificial
  Probe
ttttgggctgctgtgtggcaatgca

SEQ ID NO: 296318 - DNA, 25 bp, Artificial
  Probe
gcatcatgagccagatgggaagaag

SEQ ID NO: 296319 - DNA, 25 bp, Artificial
  Probe
ctacctcacaggaggccgtctttta

SEQ ID NO: 296320 - DNA, 25 bp, Artificial
  Probe
cctttgatgctaacagagaaataag

SEQ ID NO: 296321 - DNA, 25 bp, Artificial
  Probe
ggtgggtctacttgctacctcacag

SEQ ID NO: 296322 - DNA, 25 bp, Artificial
  Probe
acattacggagtacatattagaaac

SEQ ID NO: 296323 - DNA, 25 bp, Artificial
  Probe
ggcacaagtcattctctacatagca

SEQ ID NO: 296324 - DNA, 25 bp, Artificial
  Probe
gaactgtctgatgttaaatggccaa

SEQ ID NO: 296325 - DNA, 25 bp, Artificial
  Probe
cacatggttgtggtatgactataca

SEQ ID NO: 296326 - DNA, 25 bp, Artificial
  Probe
tgctgtgtggcaatgcagaggcaaa

SEQ ID NO: 296327 - DNA, 25 bp, Artificial
  Probe
agccagtgtcccattggcatcatct

SEQ ID NO: 296328 - DNA, 25 bp, Artificial
  Probe
tgaaaaaagccagtgtcccattggc

SEQ ID NO: 296329 - DNA, 25 bp, Artificial
  Probe
gagtacaacgcgtacattacggagt

SEQ ID NO: 296330 - DNA, 25 bp, Artificial
  Probe
tcatgagccagatgggaagaagact

SEQ ID NO: 296331 - DNA, 25 bp, Artificial
  Probe
tgtttgaggcacaagtcattctcta

SEQ ID NO: 296332 - DNA, 25 bp, Artificial
  Probe
acccttcattttctagaggtccatg

SEQ ID NO: 296333 - DNA, 25 bp, Artificial
  Probe
ctgctgtgtggcaatgcagaggcaa

SEQ ID NO: 296334 - DNA, 25 bp, Artificial
  Probe
cacatgagtacaacgcgtacattac

SEQ ID NO: 296335 - DNA, 25 bp, Artificial
  Probe
gtccttaatgcctgcatcatgagcc

SEQ ID NO: 296336 - DNA, 25 bp, Artificial
  Probe
cgtacattacggagtacatattaga

SEQ ID NO: 296337 - DNA, 25 bp, Artificial
  Probe
aactgtctgatgttaaatggccaag

SEQ ID NO: 296338 - DNA, 25 bp, Artificial
  Probe
gctacccttcattttctagaggtcc

SEQ ID NO: 296339 - DNA, 25 bp, Artificial
  Probe
aaatggccaagagcattttagccat

SEQ ID NO: 296340 - DNA, 25 bp, Artificial
  Probe
agagtcacatgagtacaacgcgtac

SEQ ID NO: 296341 - DNA, 25 bp, Artificial
  Probe
tgatgttttctgagcccacctttga

SEQ ID NO: 296342 - DNA, 25 bp, Artificial
  Probe
gccaagagcattttagccattgaag

SEQ ID NO: 296343 - DNA, 25 bp, Artificial
  Probe
ccagtgtcccattggcatcatcttt

SEQ ID NO: 296344 - DNA, 25 bp, Artificial
  Probe
ttctaaagagtcacatgagtacaac

SEQ ID NO: 296345 - DNA, 25 bp, Artificial
  Probe
atttttaactgatgttttctgagcc

SEQ ID NO: 296346 - DNA, 25 bp, Artificial
  Probe
ccagtgcaatgatgtctgtgtgtgt

SEQ ID NO: 296347 - DNA, 25 bp, Artificial
  Probe
ctctacatagcatgtgtacctccag

SEQ ID NO: 296348 - DNA, 25 bp, Artificial
  Probe
cgattctaaagagtcacatgagtac

SEQ ID NO: 296349 - DNA, 25 bp, Artificial
  Probe
ttaaatggccaagagcattttagcc

SEQ ID NO: 296350 - DNA, 25 bp, Artificial
  Probe
atgtctgaccggaggtccctgcacc

SEQ ID NO: 296351 - DNA, 25 bp, Artificial
  Probe
tctgaccggaggtccctgcacctag

SEQ ID NO: 296352 - DNA, 25 bp, Artificial
  Probe
aggtgtacaccataaccccgctgct

SEQ ID NO: 296353 - DNA, 25 bp, Artificial
  Probe
tatcatcagaaaggtacagtttgct

SEQ ID NO: 296354 - DNA, 25 bp, Artificial
  Probe
gctcagcttgaacaagatgaccagg

SEQ ID NO: 296355 - DNA, 25 bp, Artificial
  Probe
cgtggagctacctttcgtcctaatg

SEQ ID NO: 296356 - DNA, 25 bp, Artificial
  Probe
cccgctgctcagtgacaaccgagag

SEQ ID NO: 296357 - DNA, 25 bp, Artificial
  Probe
tgctcagtgacaaccgagagaagcg

SEQ ID NO: 296358 - DNA, 25 bp, Artificial
  Probe
gagctacctttcgtcctaatgcacc

SEQ ID NO: 296359 - DNA, 25 bp, Artificial
  Probe
tcctcatgtctgaccggaggtccct

SEQ ID NO: 296360 - DNA, 25 bp, Artificial
  Probe
cgcgcagtacaagtgtcctgtggct

SEQ ID NO: 296361 - DNA, 25 bp, Artificial
  Probe
tccctggacaaagagctgtactacc

SEQ ID NO: 296362 - DNA, 25 bp, Artificial
  Probe
gccttgcccttgatgggcaactcaa

SEQ ID NO: 296363 - DNA, 25 bp, Artificial
  Probe
atttgcctcttcagcaccgcgcagt

SEQ ID NO: 296364 - DNA, 25 bp, Artificial
  Probe
tgacaaccgagagaagcgtggcctt

SEQ ID NO: 296365 - DNA, 25 bp, Artificial
  Probe
aatagacatccctgtggataccaac

SEQ ID NO: 296366 - DNA, 25 bp, Artificial
  Probe
cacattctgcaaggtgtacaccata

SEQ ID NO: 296367 - DNA, 25 bp, Artificial
  Probe
accggaggtccctgcacctagaggc

SEQ ID NO: 296368 - DNA, 25 bp, Artificial
  Probe
gtgtcctgtggctcagcttgaacaa

SEQ ID NO: 296369 - DNA, 25 bp, Artificial
  Probe
tagaggcttccctggacaaagagct

SEQ ID NO: 296370 - DNA, 25 bp, Artificial
  Probe
cccttgatgggcaactcaagcacga

SEQ ID NO: 296371 - DNA, 25 bp, Artificial
  Probe
ggataccaacctcattgaattcgat

SEQ ID NO: 296372 - DNA, 25 bp, Artificial
  Probe
ccttgcccttgatgggcaactcaag

SEQ ID NO: 296373 - DNA, 25 bp, Artificial
  Probe
gtgctgggaatcctagtatcctaca

SEQ ID NO: 296374 - DNA, 25 bp, Artificial
  Probe
gaggtgctgggaatcctagtatcct

SEQ ID NO: 296375 - DNA, 25 bp, Artificial
  Probe
cgactgctgaagaagttgggccagc

SEQ ID NO: 296376 - DNA, 25 bp, Artificial
  Probe
gggaaatagacatccctgtggatac

SEQ ID NO: 296377 - DNA, 25 bp, Artificial
  Probe
gtggccttgcccttgatgggcaact

SEQ ID NO: 296378 - DNA, 25 bp, Artificial
  Probe
cttgatgggcaactcaagcacgaag

SEQ ID NO: 296379 - DNA, 25 bp, Artificial
  Probe
cagtgacaaccgagagaagcgtggc

SEQ ID NO: 296380 - DNA, 25 bp, Artificial
  Probe
acagtttgctcctgagacacccggc

SEQ ID NO: 296381 - DNA, 25 bp, Artificial
  Probe
agcttgaacaagatgaccaggtgtc

SEQ ID NO: 296382 - DNA, 25 bp, Artificial
  Probe
aaaggtacagtttgctcctgagaca

SEQ ID NO: 296383 - DNA, 25 bp, Artificial
  Probe
cagcaccgcgcagtacaagtgtcct

SEQ ID NO: 296384 - DNA, 25 bp, Artificial
  Probe
gccacttcctcatgtctgaccggag

SEQ ID NO: 296385 - DNA, 25 bp, Artificial
  Probe
gaggtccctgcacctagaggcttcc

SEQ ID NO: 296386 - DNA, 25 bp, Artificial
  Probe
ttcgataccaactatgccacagacg

SEQ ID NO: 296387 - DNA, 25 bp, Artificial
  Probe
gaattcgataccaactatgccacag

SEQ ID NO: 296388 - DNA, 25 bp, Artificial
  Probe
ctagtatcctacagggtcaaggtga

SEQ ID NO: 296389 - DNA, 25 bp, Artificial
  Probe
tgaccaggtgtctcccagttccaca

SEQ ID NO: 296390 - DNA, 25 bp, Artificial
  Probe
acaagtgtcctgtggctcagcttga

SEQ ID NO: 296391 - DNA, 25 bp, Artificial
  Probe
aggtgtctcccagttccacattctg

SEQ ID NO: 296392 - DNA, 25 bp, Artificial
  Probe
tttgcctcttcagcaccgcgcagta

SEQ ID NO: 296393 - DNA, 25 bp, Artificial
  Probe
gcaccgcgcagtacaagtgtcctgt

SEQ ID NO: 296394 - DNA, 25 bp, Artificial
  Probe
actccgtgcggcttatcatcagaaa

SEQ ID NO: 296395 - DNA, 25 bp, Artificial
  Probe
ggtgtctcccagttccacattctgc

SEQ ID NO: 296396 - DNA, 25 bp, Artificial
  Probe
gtcacagaacgaaggcacaaagtcc

SEQ ID NO: 296397 - DNA, 25 bp, Artificial
  Probe
tctgtccccgagtgaaccgtggagc

SEQ ID NO: 296398 - DNA, 25 bp, Artificial
  Probe
gctgtccttggctacaaactgttac

SEQ ID NO: 296399 - DNA, 25 bp, Artificial
  Probe
tcccagtattcctagcctgtcaacg

SEQ ID NO: 296400 - DNA, 25 bp, Artificial
  Probe
caattggggagtccttactgaatcc

SEQ ID NO: 296401 - DNA, 25 bp, Artificial
  Probe
agaagtgtctaccttgacaggtggg

SEQ ID NO: 296402 - DNA, 25 bp, Artificial
  Probe
actctgtccccgagtgaaccgtgga

SEQ ID NO: 296403 - DNA, 25 bp, Artificial
  Probe
gactactgcgttgtcccactctgtc

SEQ ID NO: 296404 - DNA, 25 bp, Artificial
  Probe
ctatttagatgtttgtcttgcacaa

SEQ ID NO: 296405 - DNA, 25 bp, Artificial
  Probe
ctgtgctgaccgaggactgatgcct

SEQ ID NO: 296406 - DNA, 25 bp, Artificial
  Probe
agaacattcatcattgaagttgtcc

SEQ ID NO: 296407 - DNA, 25 bp, Artificial
  Probe
tctggctactgttaaaattctgatg

SEQ ID NO: 296408 - DNA, 25 bp, Artificial
  Probe
aggaacattgcagagctaagcagag

SEQ ID NO: 296409 - DNA, 25 bp, Artificial
  Probe
tgagaagcagcatctgatttacatg

SEQ ID NO: 296410 - DNA, 25 bp, Artificial
  Probe
tttccgagagtttgggggtctgcca

SEQ ID NO: 296411 - DNA, 25 bp, Artificial
  Probe
ctcctagggaagatggagtgagaac

SEQ ID NO: 296412 - DNA, 25 bp, Artificial
  Probe
gggtggaccacgtcctccactgcgg

SEQ ID NO: 296413 - DNA, 25 bp, Artificial
  Probe
agatgacctagctggccccaggctg

SEQ ID NO: 296414 - DNA, 25 bp, Artificial
  Probe
gtgtctgcactgtgggatgttaact

SEQ ID NO: 296415 - DNA, 25 bp, Artificial
  Probe
attctgatgtttctgtgaaatcctc

SEQ ID NO: 296416 - DNA, 25 bp, Artificial
  Probe
gaggaacctttttatccaacagata

SEQ ID NO: 296417 - DNA, 25 bp, Artificial
  Probe
atttacatgctcaacctgcaccggc

SEQ ID NO: 296418 - DNA, 25 bp, Artificial
  Probe
ggactccacactcagtgacagggca

SEQ ID NO: 296419 - DNA, 25 bp, Artificial
  Probe
ggcctgcggtgactactgcgttgtc

SEQ ID NO: 296420 - DNA, 25 bp, Artificial
  Probe
gctggggtcccatgcaaagcaggat

SEQ ID NO: 296421 - DNA, 25 bp, Artificial
  Probe
ccattctcagatgacctagctggcc

SEQ ID NO: 296422 - DNA, 25 bp, Artificial
  Probe
ccccaaaagtgtttgggtggccatg

SEQ ID NO: 296423 - DNA, 25 bp, Artificial
  Probe
gcccacgtgtatcgtccgggctcag

SEQ ID NO: 296424 - DNA, 25 bp, Artificial
  Probe
agaggaacctttttatccaacagat

SEQ ID NO: 296425 - DNA, 25 bp, Artificial
  Probe
tgcggctgacaacatccctcctagg

SEQ ID NO: 296426 - DNA, 25 bp, Artificial
  Probe
gacgccggaagacgagaggaacctt

SEQ ID NO: 296427 - DNA, 25 bp, Artificial
  Probe
ccacgtgtatcgtccgggctcagaa

SEQ ID NO: 296428 - DNA, 25 bp, Artificial
  Probe
cgggagtttcatcagacctgatttc

SEQ ID NO: 296429 - DNA, 25 bp, Artificial
  Probe
ggagtccttactgaatcctcctttt

SEQ ID NO: 296430 - DNA, 25 bp, Artificial
  Probe
ttgcagagctaagcagaggtggcat

SEQ ID NO: 296431 - DNA, 25 bp, Artificial
  Probe
gagtatttcagctgggaggtccctc

SEQ ID NO: 296432 - DNA, 25 bp, Artificial
  Probe
cgtaggactccacactcagtgacag

SEQ ID NO: 296433 - DNA, 25 bp, Artificial
  Probe
ccagactcagtagtatattacagtt

SEQ ID NO: 296434 - DNA, 25 bp, Artificial
  Probe
cttgcacaacattggcgtgattttt

SEQ ID NO: 296435 - DNA, 25 bp, Artificial
  Probe
gctccaggatttaggccttaccatc

SEQ ID NO: 296436 - DNA, 25 bp, Artificial
  Probe
ctgagcctggtgttgtgctatttag

SEQ ID NO: 296437 - DNA, 25 bp, Artificial
  Probe
atgccgaactgaaggcccagatcga

SEQ ID NO: 296438 - DNA, 25 bp, Artificial
  Probe
cagcagccacgagctgttgggtcag

SEQ ID NO: 296439 - DNA, 25 bp, Artificial
  Probe
gagcaggcaggagcatcctttgtct

SEQ ID NO: 296440 - DNA, 25 bp, Artificial
  Probe
aaccctgaagccattggaaaactgg

SEQ ID NO: 296441 - DNA, 25 bp, Artificial
  Probe
ggccaccagggctctggctactgtt

SEQ ID NO: 296442 - DNA, 25 bp, Artificial
  Probe
agtatcagcgatgtaccatattgca

SEQ ID NO: 296443 - DNA, 25 bp, Artificial
  Probe
agcgttgcactcagcacagctctgg

SEQ ID NO: 296444 - DNA, 25 bp, Artificial
  Probe
gcgatgtaccatattgcagaaaggg

SEQ ID NO: 296445 - DNA, 25 bp, Artificial
  Probe
agtcgtagcgttgcactcagcacag

SEQ ID NO: 296446 - DNA, 25 bp, Artificial
  Probe
atcagcgatgtaccatattgcagaa

SEQ ID NO: 296447 - DNA, 25 bp, Artificial
  Probe
ataagacttccatgctcaacagtcg

SEQ ID NO: 296448 - DNA, 25 bp, Artificial
  Probe
caattaagtatcagcgatgtaccat

SEQ ID NO: 296449 - DNA, 25 bp, Artificial
  Probe
acagtcgtagcgttgcactcagcac

SEQ ID NO: 296450 - DNA, 25 bp, Artificial
  Probe
taagacttccatgctcaacagtcgt

SEQ ID NO: 296451 - DNA, 25 bp, Artificial
  Probe
gtagattattctttctggcatgctc

SEQ ID NO: 296452 - DNA, 25 bp, Artificial
  Probe
ctcaacagtcgtagcgttgcactca

SEQ ID NO: 296453 - DNA, 25 bp, Artificial
  Probe
cttccatgctcaacagtcgtagcgt

SEQ ID NO: 296454 - DNA, 25 bp, Artificial
  Probe
tcgtagcgttgcactcagcacagct

SEQ ID NO: 296455 - DNA, 25 bp, Artificial
  Probe
ggctgagcaacagtttgttgatact

SEQ ID NO: 296456 - DNA, 25 bp, Artificial
  Probe
gtcgtagcgttgcactcagcacagc

SEQ ID NO: 296457 - DNA, 25 bp, Artificial
  Probe
gattattctttctggcatgctccag

SEQ ID NO: 296458 - DNA, 25 bp, Artificial
  Probe
tctttctggcatgctccagtgtcaa

SEQ ID NO: 296459 - DNA, 25 bp, Artificial
  Probe
tacaattaagtatcagcgatgtacc

SEQ ID NO: 296460 - DNA, 25 bp, Artificial
  Probe
cagtagattattctttctggcatgc

SEQ ID NO: 296461 - DNA, 25 bp, Artificial
  Probe
actcagcacagctctggtttccata

SEQ ID NO: 296462 - DNA, 25 bp, Artificial
  Probe
cgatgtaccatattgcagaaagggg

SEQ ID NO: 296463 - DNA, 25 bp, Artificial
  Probe
gctcaacagtcgtagcgttgcactc

SEQ ID NO: 296464 - DNA, 25 bp, Artificial
  Probe
cactcagcacagctctggtttccat

SEQ ID NO: 296465 - DNA, 25 bp, Artificial
  Probe
cagcacagctctggtttccatatac

SEQ ID NO: 296466 - DNA, 25 bp, Artificial
  Probe
attctttctggcatgctccagtgtc

SEQ ID NO: 296467 - DNA, 25 bp, Artificial
  Probe
ctcagcacagctctggtttccatat

SEQ ID NO: 296468 - DNA, 25 bp, Artificial
  Probe
aagtatcagcgatgtaccatattgc

SEQ ID NO: 296469 - DNA, 25 bp, Artificial
  Probe
tccatacaattaagtatcagcgatg

SEQ ID NO: 296470 - DNA, 25 bp, Artificial
  Probe
ttctttctggcatgctccagtgtca

SEQ ID NO: 296471 - DNA, 25 bp, Artificial
  Probe
ttccatgctcaacagtcgtagcgtt

SEQ ID NO: 296472 - DNA, 25 bp, Artificial
  Probe
catacaattaagtatcagcgatgta

SEQ ID NO: 296473 - DNA, 25 bp, Artificial
  Probe
tgcactcagcacagctctggtttcc

SEQ ID NO: 296474 - DNA, 25 bp, Artificial
  Probe
gcacagctctggtttccatatacaa

SEQ ID NO: 296475 - DNA, 25 bp, Artificial
  Probe
tcagcgatgtaccatattgcagaaa

SEQ ID NO: 296476 - DNA, 25 bp, Artificial
  Probe
atgctcaacagtcgtagcgttgcac

SEQ ID NO: 296477 - DNA, 25 bp, Artificial
  Probe
tggctgagcaacagtttgttgatac

SEQ ID NO: 296478 - DNA, 25 bp, Artificial
  Probe
tagattattctttctggcatgctcc

SEQ ID NO: 296479 - DNA, 25 bp, Artificial
  Probe
gacttccatgctcaacagtcgtagc

SEQ ID NO: 296480 - DNA, 25 bp, Artificial
  Probe
gttgcactcagcacagctctggttt

SEQ ID NO: 296481 - DNA, 25 bp, Artificial
  Probe
ccatgctcaacagtcgtagcgttgc

SEQ ID NO: 296482 - DNA, 25 bp, Artificial
  Probe
aaatcatagtgagttgtccagacat

SEQ ID NO: 296483 - DNA, 25 bp, Artificial
  Probe
taagtatcagcgatgtaccatattg

SEQ ID NO: 296484 - DNA, 25 bp, Artificial
  Probe
ttgcactcagcacagctctggtttc

SEQ ID NO: 296485 - DNA, 25 bp, Artificial
  Probe
tcagtagattattctttctggcatg

SEQ ID NO: 296486 - DNA, 25 bp, Artificial
  Probe
ctgagcaacagtttgttgatactat

SEQ ID NO: 296487 - DNA, 25 bp, Artificial
  Probe
gtagcgttgcactcagcacagctct

SEQ ID NO: 296488 - DNA, 25 bp, Artificial
  Probe
ttcttgcgggccacgccaaacttat

SEQ ID NO: 296489 - DNA, 25 bp, Artificial
  Probe
ttcccctgacatttggtcctgcttg

SEQ ID NO: 296490 - DNA, 25 bp, Artificial
  Probe
gacatttggtcctgcttgaaataac

SEQ ID NO: 296491 - DNA, 25 bp, Artificial
  Probe
gacccacgggagttcttgcgggcca

SEQ ID NO: 296492 - DNA, 25 bp, Artificial
  Probe
tttcccctgacatttggtcctgctt

SEQ ID NO: 296493 - DNA, 25 bp, Artificial
  Probe
gagttttatcatctcgattgaatct

SEQ ID NO: 296494 - DNA, 25 bp, Artificial
  Probe
gccacgccaaacttattactgcctg

SEQ ID NO: 296495 - DNA, 25 bp, Artificial
  Probe
tgacatttggtcctgcttgaaataa

SEQ ID NO: 296496 - DNA, 25 bp, Artificial
  Probe
tcctatcttgtttgaaaaacgtggg

SEQ ID NO: 296497 - DNA, 25 bp, Artificial
  Probe
ttcctatcttgtttgaaaaacgtgg

SEQ ID NO: 296498 - DNA, 25 bp, Artificial
  Probe
tttggtcctgcttgaaataacaaaa

SEQ ID NO: 296499 - DNA, 25 bp, Artificial
  Probe
ttattactgcctgcagagttcaact

SEQ ID NO: 296500 - DNA, 25 bp, Artificial
  Probe
catttggtcctgcttgaaataacaa

SEQ ID NO: 296501 - DNA, 25 bp, Artificial
  Probe
ccctgacatttggtcctgcttgaaa

SEQ ID NO: 296502 - DNA, 25 bp, Artificial
  Probe
ctatcttgtttgaaaaacgtgggct

SEQ ID NO: 296503 - DNA, 25 bp, Artificial
  Probe
ctgcctgcagagttcaactacaaga

SEQ ID NO: 296504 - DNA, 25 bp, Artificial
  Probe
tcccctgacatttggtcctgcttga

SEQ ID NO: 296505 - DNA, 25 bp, Artificial
  Probe
aacgaaaccgaggtggctgcgagcc

SEQ ID NO: 296506 - DNA, 25 bp, Artificial
  Probe
ggccacgccaaacttattactgcct

SEQ ID NO: 296507 - DNA, 25 bp, Artificial
  Probe
ttttttcccctgacatttggtcctg

SEQ ID NO: 296508 - DNA, 25 bp, Artificial
  Probe
acatttggtcctgcttgaaataaca

SEQ ID NO: 296509 - DNA, 25 bp, Artificial
  Probe
ctgacatttggtcctgcttgaaata

SEQ ID NO: 296510 - DNA, 25 bp, Artificial
  Probe
acgccaaacttattactgcctgcag

SEQ ID NO: 296511 - DNA, 25 bp, Artificial
  Probe
cgccaaacttattactgcctgcaga

SEQ ID NO: 296512 - DNA, 25 bp, Artificial
  Probe
tactgcctgcagagttcaactacaa

SEQ ID NO: 296513 - DNA, 25 bp, Artificial
  Probe
tgcctgcagagttcaactacaagaa

SEQ ID NO: 296514 - DNA, 25 bp, Artificial
  Probe
gcctgcagagttcaactacaagaaa

SEQ ID NO: 296515 - DNA, 25 bp, Artificial
  Probe
cctgcagagttcaactacaagaaaa

SEQ ID NO: 296516 - DNA, 25 bp, Artificial
  Probe
cccacgggagttcttgcgggccacg

SEQ ID NO: 296517 - DNA, 25 bp, Artificial
  Probe
gggccacgccaaacttattactgcc

SEQ ID NO: 296518 - DNA, 25 bp, Artificial
  Probe
cttattactgcctgcagagttcaac

SEQ ID NO: 296519 - DNA, 25 bp, Artificial
  Probe
caaacttattactgcctgcagagtt

SEQ ID NO: 296520 - DNA, 25 bp, Artificial
  Probe
attactgcctgcagagttcaactac

SEQ ID NO: 296521 - DNA, 25 bp, Artificial
  Probe
ttggtcctgcttgaaataacaaaag

SEQ ID NO: 296522 - DNA, 25 bp, Artificial
  Probe
ttttcccctgacatttggtcctgct

SEQ ID NO: 296523 - DNA, 25 bp, Artificial
  Probe
tttcctatcttgtttgaaaaacgtg

SEQ ID NO: 296524 - DNA, 25 bp, Artificial
  Probe
gcgggccacgccaaacttattactg

SEQ ID NO: 296525 - DNA, 25 bp, Artificial
  Probe
cagacccacgggagttcttgcgggc

SEQ ID NO: 296526 - DNA, 25 bp, Artificial
  Probe
cccctgacatttggtcctgcttgaa

SEQ ID NO: 296527 - DNA, 25 bp, Artificial
  Probe
ccacgggagttcttgcgggccacgc

SEQ ID NO: 296528 - DNA, 25 bp, Artificial
  Probe
cacgggagttcttgcgggccacgcc

SEQ ID NO: 296529 - DNA, 25 bp, Artificial
  Probe
actgcctgcagagttcaactacaag

SEQ ID NO: 296530 - DNA, 25 bp, Artificial
  Probe
gccaaacttattactgcctgcagag

SEQ ID NO: 296531 - DNA, 25 bp, Artificial
  Probe
cgggccacgccaaacttattactgc

SEQ ID NO: 296532 - DNA, 25 bp, Artificial
  Probe
ccaaacttattactgcctgcagagt

SEQ ID NO: 296533 - DNA, 25 bp, Artificial
  Probe
tgcagagttcaactacaagaaaata

SEQ ID NO: 296534 - DNA, 25 bp, Artificial
  Probe
ttgaaaacctgtggtcccggaacag

SEQ ID NO: 296535 - DNA, 25 bp, Artificial
  Probe
gctgttcgaagacattgtggcccgg

SEQ ID NO: 296536 - DNA, 25 bp, Artificial
  Probe
caccaggaacttctccggagggaag

SEQ ID NO: 296537 - DNA, 25 bp, Artificial
  Probe
cattgaaggaccaggccagggtccc

SEQ ID NO: 296538 - DNA, 25 bp, Artificial
  Probe
gaggggcaccactaccttatcttcg

SEQ ID NO: 296539 - DNA, 25 bp, Artificial
  Probe
aaggaccaggccagggtccctgcgc

SEQ ID NO: 296540 - DNA, 25 bp, Artificial
  Probe
tacacgaagatgtgcgaccctggaa

SEQ ID NO: 296541 - DNA, 25 bp, Artificial
  Probe
ggtcccggaacagcaagcccgtgca

SEQ ID NO: 296542 - DNA, 25 bp, Artificial
  Probe
tcgcagggacacctggatacctctc

SEQ ID NO: 296543 - DNA, 25 bp, Artificial
  Probe
tcacatccacctgatgggtgacgag

SEQ ID NO: 296544 - DNA, 25 bp, Artificial
  Probe
gttcgcagggacacctggatacctc

SEQ ID NO: 296545 - DNA, 25 bp, Artificial
  Probe
atcactcagtacctggatgcgggtg

SEQ ID NO: 296546 - DNA, 25 bp, Artificial
  Probe
aaatggcagatcgtccacttccaca

SEQ ID NO: 296547 - DNA, 25 bp, Artificial
  Probe
aaggaatcctctgagagcaccaaca

SEQ ID NO: 296548 - DNA, 25 bp, Artificial
  Probe
ctgttcgaagacattgtggcccggg

SEQ ID NO: 296549 - DNA, 25 bp, Artificial
  Probe
tctattttgaaaacctgtggtcccg

SEQ ID NO: 296550 - DNA, 25 bp, Artificial
  Probe
gaagtgctgcggaaggacccatacg

SEQ ID NO: 296551 - DNA, 25 bp, Artificial
  Probe
catccgcatcactcagtacctggat

SEQ ID NO: 296552 - DNA, 25 bp, Artificial
  Probe
tgaaaacctgtggtcccggaacagc

SEQ ID NO: 296553 - DNA, 25 bp, Artificial
  Probe
gaagcctgagaatctgttgctggct

SEQ ID NO: 296554 - DNA, 25 bp, Artificial
  Probe
cttcgaagctcaagggtgctgcggt

SEQ ID NO: 296555 - DNA, 25 bp, Artificial
  Probe
gatgaagacaccaaagtgcgcaaac

SEQ ID NO: 296556 - DNA, 25 bp, Artificial
  Probe
cgtgaaggaatcctctgagagcacc

SEQ ID NO: 296557 - DNA, 25 bp, Artificial
  Probe
gggcaccactaccttatcttcgatc

SEQ ID NO: 296558 - DNA, 25 bp, Artificial
  Probe
ccaggagtatgctgccaagattatc

SEQ ID NO: 296559 - DNA, 25 bp, Artificial
  Probe
accaaagtgcgcaaacaggaaatta

SEQ ID NO: 296560 - DNA, 25 bp, Artificial
  Probe
tgaagacaccaaagtgcgcaaacag

SEQ ID NO: 296561 - DNA, 25 bp, Artificial
  Probe
acccatacgggaagcctgtggacct

SEQ ID NO: 296562 - DNA, 25 bp, Artificial
  Probe
cacggcccagtcagaggagacccgt

SEQ ID NO: 296563 - DNA, 25 bp, Artificial
  Probe
tgctgcggaaggacccatacgggaa

SEQ ID NO: 296564 - DNA, 25 bp, Artificial
  Probe
ctgtggtcccggaacagcaagcccg

SEQ ID NO: 296565 - DNA, 25 bp, Artificial
  Probe
gacagcctttgaaccggaggccctg

SEQ ID NO: 296566 - DNA, 25 bp, Artificial
  Probe
ggaaggacccatacgggaagcctgt

SEQ ID NO: 296567 - DNA, 25 bp, Artificial
  Probe
cctgatgggtgacgagtcagcctgc

SEQ ID NO: 296568 - DNA, 25 bp, Artificial
  Probe
gcctggactttcatcgattctattt

SEQ ID NO: 296569 - DNA, 25 bp, Artificial
  Probe
cgaagatgtgcgaccctggaatgac

SEQ ID NO: 296570 - DNA, 25 bp, Artificial
  Probe
cgacctgaagcctgagaatctgttg

SEQ ID NO: 296571 - DNA, 25 bp, Artificial
  Probe
ctgccccattgaaggaccaggccag

SEQ ID NO: 296572 - DNA, 25 bp, Artificial
  Probe
atcctacacgaagatgtgcgaccct

SEQ ID NO: 296573 - DNA, 25 bp, Artificial
  Probe
caccaccatcgaggatgaagacacc

SEQ ID NO: 296574 - DNA, 25 bp, Artificial
  Probe
gtccacttccacagatctggggcgc

SEQ ID NO: 296575 - DNA, 25 bp, Artificial
  Probe
ggcccagtcagaggagacccgtgtc

SEQ ID NO: 296576 - DNA, 25 bp, Artificial
  Probe
ctccccagaagtgctgcggaaggac

SEQ ID NO: 296577 - DNA, 25 bp, Artificial
  Probe
tggtcgagggcctggactttcatcg

SEQ ID NO: 296578 - DNA, 25 bp, Artificial
  Probe
gggtgacgagtcagcctgcatcgcc

SEQ ID NO: 296579 - DNA, 25 bp, Artificial
  Probe
gacccatacgggaagcctgtggacc

SEQ ID NO: 296580 - DNA, 25 bp, Artificial
  Probe
gcctccacaaactctgttttagtag

SEQ ID NO: 296581 - DNA, 25 bp, Artificial
  Probe
gacggtgagaccagcttacgtgaat

SEQ ID NO: 296582 - DNA, 25 bp, Artificial
  Probe
aaaggaggtcttccagtatcgccgt

SEQ ID NO: 296583 - DNA, 25 bp, Artificial
  Probe
gaatggattccctgaaaggactgaa

SEQ ID NO: 296584 - DNA, 25 bp, Artificial
  Probe
ctggaactaccaacggacacgcatt

SEQ ID NO: 296585 - DNA, 25 bp, Artificial
  Probe
gagcacacagccaatatttcatggg

SEQ ID NO: 296586 - DNA, 25 bp, Artificial
  Probe
atagacggtgagaccagcttacgtg

SEQ ID NO: 296587 - DNA, 25 bp, Artificial
  Probe
gccaatatttcatgggccatgtaac

SEQ ID NO: 296588 - DNA, 25 bp, Artificial
  Probe
tagacggtgagaccagcttacgtga

SEQ ID NO: 296589 - DNA, 25 bp, Artificial
  Probe
agatagacggtgagaccagcttacg

SEQ ID NO: 296590 - DNA, 25 bp, Artificial
  Probe
tccctgaaaggactgaataggttta

SEQ ID NO: 296591 - DNA, 25 bp, Artificial
  Probe
tgaaggccaaggagcacacagccaa

SEQ ID NO: 296592 - DNA, 25 bp, Artificial
  Probe
ccagtatcgccgtcctgaggatgaa

SEQ ID NO: 296593 - DNA, 25 bp, Artificial
  Probe
aactaccaacggacacgcatttgaa

SEQ ID NO: 296594 - DNA, 25 bp, Artificial
  Probe
gggccatgtaacatacagtactctt

SEQ ID NO: 296595 - DNA, 25 bp, Artificial
  Probe
cgccgtcctgaggatgaaggccaag

SEQ ID NO: 296596 - DNA, 25 bp, Artificial
  Probe
gacagattccagttacacggggttt

SEQ ID NO: 296597 - DNA, 25 bp, Artificial
  Probe
ggggttttcgaaccaccagaatcag

SEQ ID NO: 296598 - DNA, 25 bp, Artificial
  Probe
cacaaactctgttttagtagtaagt

SEQ ID NO: 296599 - DNA, 25 bp, Artificial
  Probe
tttgaaaggaggtcttccagtatcg

SEQ ID NO: 296600 - DNA, 25 bp, Artificial
  Probe
tgaaaggaggtcttccagtatcgcc

SEQ ID NO: 296601 - DNA, 25 bp, Artificial
  Probe
gcgtcctcctgcatgacaccttatt

SEQ ID NO: 296602 - DNA, 25 bp, Artificial
  Probe
ggacagattccagttacacggggtt

SEQ ID NO: 296603 - DNA, 25 bp, Artificial
  Probe
atatgatcatgcaacttcttaaagg

SEQ ID NO: 296604 - DNA, 25 bp, Artificial
  Probe
caacggacacgcatttgaaacaaag

SEQ ID NO: 296605 - DNA, 25 bp, Artificial
  Probe
cacaataagctgctgtgtgtggaag

SEQ ID NO: 296606 - DNA, 25 bp, Artificial
  Probe
caaggagcacacagccaatatttca

SEQ ID NO: 296607 - DNA, 25 bp, Artificial
  Probe
ctcttctcactggaactaccaacgg

SEQ ID NO: 296608 - DNA, 25 bp, Artificial
  Probe
ggccaaggagcacacagccaatatt

SEQ ID NO: 296609 - DNA, 25 bp, Artificial
  Probe
caaagccagagtttgaaaggaggtc

SEQ ID NO: 296610 - DNA, 25 bp, Artificial
  Probe
catttgaaacaaagccagagtttga

SEQ ID NO: 296611 - DNA, 25 bp, Artificial
  Probe
aaaggatgccacaataagctgctgt

SEQ ID NO: 296612 - DNA, 25 bp, Artificial
  Probe
atctaagaatggattccctgaaagg

SEQ ID NO: 296613 - DNA, 25 bp, Artificial
  Probe
gacacgcatttgaaacaaagccaga

SEQ ID NO: 296614 - DNA, 25 bp, Artificial
  Probe
ggtcttccagtatcgccgtcctgag

SEQ ID NO: 296615 - DNA, 25 bp, Artificial
  Probe
atttcatgggccatgtaacatacag

SEQ ID NO: 296616 - DNA, 25 bp, Artificial
  Probe
cgcatttgaaacaaagccagagttt

SEQ ID NO: 296617 - DNA, 25 bp, Artificial
  Probe
ccagcttacgtgaatagttgttatt

SEQ ID NO: 296618 - DNA, 25 bp, Artificial
  Probe
ccacaaactctgttttagtagtaag

SEQ ID NO: 296619 - DNA, 25 bp, Artificial
  Probe
ttaaaggatgccacaataagctgct

SEQ ID NO: 296620 - DNA, 25 bp, Artificial
  Probe
cgaaccaccagaatcagttcggcca

SEQ ID NO: 296621 - DNA, 25 bp, Artificial
  Probe
ctaccaacggacacgcatttgaaac

SEQ ID NO: 296622 - DNA, 25 bp, Artificial
  Probe
ccgtcctgaggatgaaggccaagga

SEQ ID NO: 296623 - DNA, 25 bp, Artificial
  Probe
ctaagaatggattccctgaaaggac

SEQ ID NO: 296624 - DNA, 25 bp, Artificial
  Probe
aagatagacggtgagaccagcttac

SEQ ID NO: 296625 - DNA, 25 bp, Artificial
  Probe
atgggccatgtaacatacagtactc

SEQ ID NO: 296626 - DNA, 25 bp, Artificial
  Probe
ttcgttaagcataggaacgataatg

SEQ ID NO: 296627 - DNA, 25 bp, Artificial
  Probe
tcttagaactgatctgtggaaatga

SEQ ID NO: 296628 - DNA, 25 bp, Artificial
  Probe
atgtcactttagttttcgttaagca

SEQ ID NO: 296629 - DNA, 25 bp, Artificial
  Probe
agttttcgttaagcataggaacgat

SEQ ID NO: 296630 - DNA, 25 bp, Artificial
  Probe
tatgtcttagaactgatctgtggaa

SEQ ID NO: 296631 - DNA, 25 bp, Artificial
  Probe
taatgtcaagtggtatgtcttagaa

SEQ ID NO: 296632 - DNA, 25 bp, Artificial
  Probe
gtcactttagttttcgttaagcata

SEQ ID NO: 296633 - DNA, 25 bp, Artificial
  Probe
ttagttttcgttaagcataggaacg

SEQ ID NO: 296634 - DNA, 25 bp, Artificial
  Probe
tagttttcgttaagcataggaacga

SEQ ID NO: 296635 - DNA, 25 bp, Artificial
  Probe
gtcttagaactgatctgtggaaatg

SEQ ID NO: 296636 - DNA, 25 bp, Artificial
  Probe
tgtcttagaactgatctgtggaaat

SEQ ID NO: 296637 - DNA, 25 bp, Artificial
  Probe
atgtcttagaactgatctgtggaaa

SEQ ID NO: 296638 - DNA, 25 bp, Artificial
  Probe
atgtcaagtggtatgtcttagaact

SEQ ID NO: 296639 - DNA, 25 bp, Artificial
  Probe
tagaactgatctgtggaaatgaaga

SEQ ID NO: 296640 - DNA, 25 bp, Artificial
  Probe
cttagaactgatctgtggaaatgaa

SEQ ID NO: 296641 - DNA, 25 bp, Artificial
  Probe
gaactgatctgtggaaatgaagagt

SEQ ID NO: 296642 - DNA, 25 bp, Artificial
  Probe
ttagaactgatctgtggaaatgaag

SEQ ID NO: 296643 - DNA, 25 bp, Artificial
  Probe
cactttagttttcgttaagcatagg

SEQ ID NO: 296644 - DNA, 25 bp, Artificial
  Probe
ttttcgttaagcataggaacgataa

SEQ ID NO: 296645 - DNA, 25 bp, Artificial
  Probe
agaactgatctgtggaaatgaagag

SEQ ID NO: 296646 - DNA, 25 bp, Artificial
  Probe
tgtcaagtggtatgtcttagaactg

SEQ ID NO: 296647 - DNA, 25 bp, Artificial
  Probe
gttttcgttaagcataggaacgata

SEQ ID NO: 296648 - DNA, 25 bp, Artificial
  Probe
tttcgttaagcataggaacgataat

SEQ ID NO: 296649 - DNA, 25 bp, Artificial
  Probe
tgtcactttagttttcgttaagcat

SEQ ID NO: 296650 - DNA, 25 bp, Artificial
  Probe
tcactttagttttcgttaagcatag

SEQ ID NO: 296651 - DNA, 25 bp, Artificial
  Probe
ataatgtcaagtggtatgtcttaga

SEQ ID NO: 296652 - DNA, 25 bp, Artificial
  Probe
gtatgtcttagaactgatctgtgga

SEQ ID NO: 296653 - DNA, 25 bp, Artificial
  Probe
cataccagtttgtaggcagacttct

SEQ ID NO: 296654 - DNA, 25 bp, Artificial
  Probe
tggtttcttggcacccataaccaag

SEQ ID NO: 296655 - DNA, 25 bp, Artificial
  Probe
ctgagtttcctatggtacgcgattt

SEQ ID NO: 296656 - DNA, 25 bp, Artificial
  Probe
ccatgaagcattcaaatcaaggcta

SEQ ID NO: 296657 - DNA, 25 bp, Artificial
  Probe
gacagctggagagctacagaatgga

SEQ ID NO: 296658 - DNA, 25 bp, Artificial
  Probe
agcagtaaatggtttcttggcaccc

SEQ ID NO: 296659 - DNA, 25 bp, Artificial
  Probe
tctaggcttgggaaagcaatgctta

SEQ ID NO: 296660 - DNA, 25 bp, Artificial
  Probe
caaacaaaccataccagtttgtagg

SEQ ID NO: 296661 - DNA, 25 bp, Artificial
  Probe
agagacgctgtctcaaaaacactca

SEQ ID NO: 296662 - DNA, 25 bp, Artificial
  Probe
ggagagacgctgtctcaaaaacact

SEQ ID NO: 296663 - DNA, 25 bp, Artificial
  Probe
caaaccataccagtttgtaggcaga

SEQ ID NO: 296664 - DNA, 25 bp, Artificial
  Probe
gcattcaaatcaaggctaaagacat

SEQ ID NO: 296665 - DNA, 25 bp, Artificial
  Probe
tggcctcacagttgcggaaagtccc

SEQ ID NO: 296666 - DNA, 25 bp, Artificial
  Probe
caattctaggcttgggaaagcaatg

SEQ ID NO: 296667 - DNA, 25 bp, Artificial
  Probe
ataccagtttgtaggcagacttctg

SEQ ID NO: 296668 - DNA, 25 bp, Artificial
  Probe
cacgttagctgttggcaaatggcct

SEQ ID NO: 296669 - DNA, 25 bp, Artificial
  Probe
ccaattctaggcttgggaaagcaat

SEQ ID NO: 296670 - DNA, 25 bp, Artificial
  Probe
tcacagttgcggaaagtcccaattc

SEQ ID NO: 296671 - DNA, 25 bp, Artificial
  Probe
atgaagcattcaaatcaaggctaaa

SEQ ID NO: 296672 - DNA, 25 bp, Artificial
  Probe
tgggattacagcagcagcaacaaaa

SEQ ID NO: 296673 - DNA, 25 bp, Artificial
  Probe
gaggtttacatcaaagccaacattt

SEQ ID NO: 296674 - DNA, 25 bp, Artificial
  Probe
taaatggtttcttggcacccataac

SEQ ID NO: 296675 - DNA, 25 bp, Artificial
  Probe
gaagcattcaaatcaaggctaaaga

SEQ ID NO: 296676 - DNA, 25 bp, Artificial
  Probe
gtactgtttgcctatgcagtgggat

SEQ ID NO: 296677 - DNA, 25 bp, Artificial
  Probe
ttagctgttggcaaatggcctcaca

SEQ ID NO: 296678 - DNA, 25 bp, Artificial
  Probe
agttgcggaaagtcccaattctagg

SEQ ID NO: 296679 - DNA, 25 bp, Artificial
  Probe
gctgttggcaaatggcctcacagtt

SEQ ID NO: 296680 - DNA, 25 bp, Artificial
  Probe
gcggaaagtcccaattctaggcttg

SEQ ID NO: 296681 - DNA, 25 bp, Artificial
  Probe
gtttcctatggtacgcgatttactc

SEQ ID NO: 296682 - DNA, 25 bp, Artificial
  Probe
gcaaatggcctcacagttgcggaaa

SEQ ID NO: 296683 - DNA, 25 bp, Artificial
  Probe
gcccatgaagcattcaaatcaaggc

SEQ ID NO: 296684 - DNA, 25 bp, Artificial
  Probe
aggacagctggagagctacagaatg

SEQ ID NO: 296685 - DNA, 25 bp, Artificial
  Probe
agtcccaattctaggcttgggaaag

SEQ ID NO: 296686 - DNA, 25 bp, Artificial
  Probe
tgggtttgtactgtttgcctatgca

SEQ ID NO: 296687 - DNA, 25 bp, Artificial
  Probe
tggcaaatggcctcacagttgcgga

SEQ ID NO: 296688 - DNA, 25 bp, Artificial
  Probe
ttgcctatgcagtgggattacagca

SEQ ID NO: 296689 - DNA, 25 bp, Artificial
  Probe
ctatgcagtgggattacagcagcag

SEQ ID NO: 296690 - DNA, 25 bp, Artificial
  Probe
gaaagtcccaattctaggcttggga

SEQ ID NO: 296691 - DNA, 25 bp, Artificial
  Probe
gagtttcctatggtacgcgatttac

SEQ ID NO: 296692 - DNA, 25 bp, Artificial
  Probe
tgaattggcccatgaagcattcaaa

SEQ ID NO: 296693 - DNA, 25 bp, Artificial
  Probe
gtttgtactgtttgcctatgcagtg

SEQ ID NO: 296694 - DNA, 25 bp, Artificial
  Probe
cctcaccacgttagctgttggcaaa

SEQ ID NO: 296695 - DNA, 25 bp, Artificial
  Probe
aaactgtccctgaagtctttctctg

SEQ ID NO: 296696 - DNA, 25 bp, Artificial
  Probe
cagtttgtaggcagacttctgttgg

SEQ ID NO: 296697 - DNA, 25 bp, Artificial
  Probe
acagttgcggaaagtcccaattcta

SEQ ID NO: 296698 - DNA, 25 bp, Artificial
  Probe
cttggcacccataaccaagtaatag

SEQ ID NO: 296699 - DNA, 25 bp, Artificial
  Probe
tgggatcaccagggttggggcacat

SEQ ID NO: 296700 - DNA, 25 bp, Artificial
  Probe
catgggctgggatcaccagggttgg

SEQ ID NO: 296701 - DNA, 25 bp, Artificial
  Probe
gggctgggatcaccagggttggggc

SEQ ID NO: 296702 - DNA, 25 bp, Artificial
  Probe
catatttatatcaaggcaggatgca

SEQ ID NO: 296703 - DNA, 25 bp, Artificial
  Probe
ccagctggctgccgcctgaaagcag

SEQ ID NO: 296704 - DNA, 25 bp, Artificial
  Probe
acatatttatatcaaggcaggatgc

SEQ ID NO: 296705 - DNA, 25 bp, Artificial
  Probe
ctggggagtgggtagcggtggtgtg

SEQ ID NO: 296706 - DNA, 25 bp, Artificial
  Probe
ggctgggatcaccagggttggggca

SEQ ID NO: 296707 - DNA, 25 bp, Artificial
  Probe
gcaccaagaaaacctaaagaactat

SEQ ID NO: 296708 - DNA, 25 bp, Artificial
  Probe
ccatgggctgggatcaccagggttg

SEQ ID NO: 296709 - DNA, 25 bp, Artificial
  Probe
accatgggctgggatcaccagggtt

SEQ ID NO: 296710 - DNA, 25 bp, Artificial
  Probe
tatttatatcaaggcaggatgcaga

SEQ ID NO: 296711 - DNA, 25 bp, Artificial
  Probe
atgggctgggatcaccagggttggg

SEQ ID NO: 296712 - DNA, 25 bp, Artificial
  Probe
cagctggctgccgcctgaaagcaga

SEQ ID NO: 296713 - DNA, 25 bp, Artificial
  Probe
agctggctgccgcctgaaagcagaa

SEQ ID NO: 296714 - DNA, 25 bp, Artificial
  Probe
tggggagtgggtagcggtggtgtga

SEQ ID NO: 296715 - DNA, 25 bp, Artificial
  Probe
tgggccagctggctgccgcctgaaa

SEQ ID NO: 296716 - DNA, 25 bp, Artificial
  Probe
ggccagctggctgccgcctgaaagc

SEQ ID NO: 296717 - DNA, 25 bp, Artificial
  Probe
gccagctggctgccgcctgaaagca

SEQ ID NO: 296718 - DNA, 25 bp, Artificial
  Probe
atatttatatcaaggcaggatgcag

SEQ ID NO: 296719 - DNA, 25 bp, Artificial
  Probe
ctggctgccgcctgaaagcagaaga

SEQ ID NO: 296720 - DNA, 25 bp, Artificial
  Probe
gctgggatcaccagggttggggcac

SEQ ID NO: 296721 - DNA, 25 bp, Artificial
  Probe
ctgggatcaccagggttggggcaca

SEQ ID NO: 296722 - DNA, 25 bp, Artificial
  Probe
tgggctgggatcaccagggttgggg

SEQ ID NO: 296723 - DNA, 25 bp, Artificial
  Probe
gaccatgggctgggatcaccagggt

SEQ ID NO: 296724 - DNA, 25 bp, Artificial
  Probe
tgcaccaagaaaacctaaagaacta

SEQ ID NO: 296725 - DNA, 25 bp, Artificial
  Probe
gcttattgttgacttcctgttatga

SEQ ID NO: 296726 - DNA, 25 bp, Artificial
  Probe
atagccacgcagctatgcctcacgt

SEQ ID NO: 296727 - DNA, 25 bp, Artificial
  Probe
catgtgtggctcagcccctctattt

SEQ ID NO: 296728 - DNA, 25 bp, Artificial
  Probe
gttttatgcctctagatttgtaagc

SEQ ID NO: 296729 - DNA, 25 bp, Artificial
  Probe
aatagccacgcagctatgcctcacg

SEQ ID NO: 296730 - DNA, 25 bp, Artificial
  Probe
taccatcaccatgatgaaagttctg

SEQ ID NO: 296731 - DNA, 25 bp, Artificial
  Probe
tatcaaaactgtcatttcccatggg

SEQ ID NO: 296732 - DNA, 25 bp, Artificial
  Probe
caccatgatgaaagttctgtctata

SEQ ID NO: 296733 - DNA, 25 bp, Artificial
  Probe
atgaaagttctgtctatagtcttca

SEQ ID NO: 296734 - DNA, 25 bp, Artificial
  Probe
gtctttgatcgtggaaataaccaag

SEQ ID NO: 296735 - DNA, 25 bp, Artificial
  Probe
gagtaatcagaccaaacaaagcatg

SEQ ID NO: 296736 - DNA, 25 bp, Artificial
  Probe
gtcacaacccatccatgtgtggctc

SEQ ID NO: 296737 - DNA, 25 bp, Artificial
  Probe
tcaaaactgtcatttcccatgggat

SEQ ID NO: 296738 - DNA, 25 bp, Artificial
  Probe
ctgtcatttcccatgggatgtagct

SEQ ID NO: 296739 - DNA, 25 bp, Artificial
  Probe
atgtctcactctctcataaatgtgg

SEQ ID NO: 296740 - DNA, 25 bp, Artificial
  Probe
gtaccatgccgttctatctaatgtc

SEQ ID NO: 296741 - DNA, 25 bp, Artificial
  Probe
gcctctagatttgtaagcaaattct

SEQ ID NO: 296742 - DNA, 25 bp, Artificial
  Probe
gttgacttcctgttatgaaaatctc

SEQ ID NO: 296743 - DNA, 25 bp, Artificial
  Probe
taagcaaattctaagtaccatgccg

SEQ ID NO: 296744 - DNA, 25 bp, Artificial
  Probe
gccgttctatctaatgtctaatagt

SEQ ID NO: 296745 - DNA, 25 bp, Artificial
  Probe
agtcccttaaagagggctgtatgcc

SEQ ID NO: 296746 - DNA, 25 bp, Artificial
  Probe
cataaatgtggacctgtttttacag

SEQ ID NO: 296747 - DNA, 25 bp, Artificial
  Probe
gtatcaggattcaaaccagatctat

SEQ ID NO: 296748 - DNA, 25 bp, Artificial
  Probe
tgataaatagccacgcagctatgcc

SEQ ID NO: 296749 - DNA, 25 bp, Artificial
  Probe
atagtcttcattgcttattgttgac

SEQ ID NO: 296750 - DNA, 25 bp, Artificial
  Probe
atttcccatgggatgtagctattcc

SEQ ID NO: 296751 - DNA, 25 bp, Artificial
  Probe
ttaaagagggctgtatgccttcatg

SEQ ID NO: 296752 - DNA, 25 bp, Artificial
  Probe
gatgtctgatttaacctttgtaact

SEQ ID NO: 296753 - DNA, 25 bp, Artificial
  Probe
ccatccgtctggttttatgcctcta

SEQ ID NO: 296754 - DNA, 25 bp, Artificial
  Probe
ggatgtagctattccaaacagagta

SEQ ID NO: 296755 - DNA, 25 bp, Artificial
  Probe
acaacccatccatgtgtggctcagc

SEQ ID NO: 296756 - DNA, 25 bp, Artificial
  Probe
tcccatgggatgtagctattccaaa

SEQ ID NO: 296757 - DNA, 25 bp, Artificial
  Probe
gaccaaacaaagcatgagagcccac

SEQ ID NO: 296758 - DNA, 25 bp, Artificial
  Probe
agtaccatgccgttctatctaatgt

SEQ ID NO: 296759 - DNA, 25 bp, Artificial
  Probe
ttatctgtatcaggattcaaaccag

SEQ ID NO: 296760 - DNA, 25 bp, Artificial
  Probe
aagagggctgtatgccttcatgtgg

SEQ ID NO: 296761 - DNA, 25 bp, Artificial
  Probe
ccccgcagtcccttaaagagggctg

SEQ ID NO: 296762 - DNA, 25 bp, Artificial
  Probe
tccatgtgtggctcagcccctctat

SEQ ID NO: 296763 - DNA, 25 bp, Artificial
  Probe
tcgctgtacatggacacacgcacca

SEQ ID NO: 296764 - DNA, 25 bp, Artificial
  Probe
agttctgtctatagtcttcattgct

SEQ ID NO: 296765 - DNA, 25 bp, Artificial
  Probe
tcatgtggatgtctgatttaacctt

SEQ ID NO: 296766 - DNA, 25 bp, Artificial
  Probe
gctattccaaacagagtaatcagac

SEQ ID NO: 296767 - DNA, 25 bp, Artificial
  Probe
ctcccagtcgctgtacatggacaca

SEQ ID NO: 296768 - DNA, 25 bp, Artificial
  Probe
gcaaattctaagtaccatgccgttc

SEQ ID NO: 296769 - DNA, 25 bp, Artificial
  Probe
tgccgttctatctaatgtctaatag

SEQ ID NO: 296770 - DNA, 25 bp, Artificial
  Probe
attttccatccgtctggttttatgc

SEQ ID NO: 296771 - DNA, 25 bp, Artificial
  Probe
gaatccctgcatggaaaaaagcgca

SEQ ID NO: 296772 - DNA, 25 bp, Artificial
  Probe
ccaggccaagaggagcgaatgaacc

SEQ ID NO: 296773 - DNA, 25 bp, Artificial
  Probe
aagcgcaggctccaggccaagagga

SEQ ID NO: 296774 - DNA, 25 bp, Artificial
  Probe
tccctgcatggaaaaaagcgcaggc

SEQ ID NO: 296775 - DNA, 25 bp, Artificial
  Probe
ccgagaatccctgcatggaaaaaag

SEQ ID NO: 296776 - DNA, 25 bp, Artificial
  Probe
acccatcgcctaaggagtgatacat

SEQ ID NO: 296777 - DNA, 25 bp, Artificial
  Probe
gttcacgcggatggaaacgtggtcc

SEQ ID NO: 296778 - DNA, 25 bp, Artificial
  Probe
ttcacgcggatggaaacgtggtcca

SEQ ID NO: 296779 - DNA, 25 bp, Artificial
  Probe
gctccaggccaagaggagcgaatga

SEQ ID NO: 296780 - DNA, 25 bp, Artificial
  Probe
taccgagaatccctgcatggaaaaa

SEQ ID NO: 296781 - DNA, 25 bp, Artificial
  Probe
cccatcgcctaaggagtgatacatc

SEQ ID NO: 296782 - DNA, 25 bp, Artificial
  Probe
tccaggccaagaggagcgaatgaac

SEQ ID NO: 296783 - DNA, 25 bp, Artificial
  Probe
gtgatacatcatggcgcgttcacgc

SEQ ID NO: 296784 - DNA, 25 bp, Artificial
  Probe
aaacgtggtccaatataccgagaat

SEQ ID NO: 296785 - DNA, 25 bp, Artificial
  Probe
gggccggacccatcgcctaaggagt

SEQ ID NO: 296786 - DNA, 25 bp, Artificial
  Probe
tggaaacgtggtccaatataccgag

SEQ ID NO: 296787 - DNA, 25 bp, Artificial
  Probe
cgttcacgcggatggaaacgtggtc

SEQ ID NO: 296788 - DNA, 25 bp, Artificial
  Probe
tggtccaatataccgagaatccctg

SEQ ID NO: 296789 - DNA, 25 bp, Artificial
  Probe
ccatcgcctaaggagtgatacatca

SEQ ID NO: 296790 - DNA, 25 bp, Artificial
  Probe
aaagcgcaggctccaggccaagagg

SEQ ID NO: 296791 - DNA, 25 bp, Artificial
  Probe
gagaatccctgcatggaaaaaagcg

SEQ ID NO: 296792 - DNA, 25 bp, Artificial
  Probe
cgagaatccctgcatggaaaaaagc

SEQ ID NO: 296793 - DNA, 25 bp, Artificial
  Probe
cacgcggatggaaacgtggtccaat

SEQ ID NO: 296794 - DNA, 25 bp, Artificial
  Probe
acgtggtccaatataccgagaatcc

SEQ ID NO: 296795 - DNA, 25 bp, Artificial
  Probe
aacgtggtccaatataccgagaatc

SEQ ID NO: 296796 - DNA, 25 bp, Artificial
  Probe
catggcgcgttcacgcggatggaaa

SEQ ID NO: 296797 - DNA, 25 bp, Artificial
  Probe
accgagaatccctgcatggaaaaaa

SEQ ID NO: 296798 - DNA, 25 bp, Artificial
  Probe
gacccatcgcctaaggagtgataca

SEQ ID NO: 296799 - DNA, 25 bp, Artificial
  Probe
aatataccgagaatccctgcatgga

SEQ ID NO: 296800 - DNA, 25 bp, Artificial
  Probe
caatataccgagaatccctgcatgg

SEQ ID NO: 296801 - DNA, 25 bp, Artificial
  Probe
ggacccatcgcctaaggagtgatac

SEQ ID NO: 296802 - DNA, 25 bp, Artificial
  Probe
agaatccctgcatggaaaaaagcgc

SEQ ID NO: 296803 - DNA, 25 bp, Artificial
  Probe
ccaatataccgagaatccctgcatg

SEQ ID NO: 296804 - DNA, 25 bp, Artificial
  Probe
atccctgcatggaaaaaagcgcagg

SEQ ID NO: 296805 - DNA, 25 bp, Artificial
  Probe
catcgcctaaggagtgatacatcat

SEQ ID NO: 296806 - DNA, 25 bp, Artificial
  Probe
ctccaggccaagaggagcgaatgaa

SEQ ID NO: 296807 - DNA, 25 bp, Artificial
  Probe
aggctccaggccaagaggagcgaat

SEQ ID NO: 296808 - DNA, 25 bp, Artificial
  Probe
atcgcctaaggagtgatacatcatg

SEQ ID NO: 296809 - DNA, 25 bp, Artificial
  Probe
agtgatacatcatggcgcgttcacg

SEQ ID NO: 296810 - DNA, 25 bp, Artificial
  Probe
caggccaagaggagcgaatgaacca

SEQ ID NO: 296811 - DNA, 25 bp, Artificial
  Probe
gagtgatacatcatggcgcgttcac

SEQ ID NO: 296812 - DNA, 25 bp, Artificial
  Probe
atataccgagaatccctgcatggaa

SEQ ID NO: 296813 - DNA, 25 bp, Artificial
  Probe
aatccctgcatggaaaaaagcgcag

SEQ ID NO: 296814 - DNA, 25 bp, Artificial
  Probe
gcgttcacgcggatggaaacgtggt

SEQ ID NO: 296815 - DNA, 25 bp, Artificial
  Probe
gaaaaaagcgcaggctccaggccaa

SEQ ID NO: 296816 - DNA, 25 bp, Artificial
  Probe
tcacgcggatggaaacgtggtccaa

SEQ ID NO: 296817 - DNA, 25 bp, Artificial
  Probe
tctcccttgcacagtaaagcttgga

SEQ ID NO: 296818 - DNA, 25 bp, Artificial
  Probe
tcaaaagagttcatgccccagaact

SEQ ID NO: 296819 - DNA, 25 bp, Artificial
  Probe
gactatgtcagaacgttgctttttt

SEQ ID NO: 296820 - DNA, 25 bp, Artificial
  Probe
gcctcaggtgtgttttatgaattac

SEQ ID NO: 296821 - DNA, 25 bp, Artificial
  Probe
ctcaaaagagttcatgccccagaac

SEQ ID NO: 296822 - DNA, 25 bp, Artificial
  Probe
tgtatgttaccaggtgattataacc

SEQ ID NO: 296823 - DNA, 25 bp, Artificial
  Probe
gttcatgccccagaacttagcctgt

SEQ ID NO: 296824 - DNA, 25 bp, Artificial
  Probe
tggactatgtcagaacgttgctttt

SEQ ID NO: 296825 - DNA, 25 bp, Artificial
  Probe
agaacttagcctgtacctgtgaaat

SEQ ID NO: 296826 - DNA, 25 bp, Artificial
  Probe
acagtaaagcttggactatgtcaga

SEQ ID NO: 296827 - DNA, 25 bp, Artificial
  Probe
taaatgtctcccttgcacagtaaag

SEQ ID NO: 296828 - DNA, 25 bp, Artificial
  Probe
ccttattctgctacagagggatttc

SEQ ID NO: 296829 - DNA, 25 bp, Artificial
  Probe
ttactcaaaagagttcatgccccag

SEQ ID NO: 296830 - DNA, 25 bp, Artificial
  Probe
tcatgccccagaacttagcctgtac

SEQ ID NO: 296831 - DNA, 25 bp, Artificial
  Probe
atgaattactcaaaagagttcatgc

SEQ ID NO: 296832 - DNA, 25 bp, Artificial
  Probe
tattctgctacagagggatttcttt

SEQ ID NO: 296833 - DNA, 25 bp, Artificial
  Probe
gccccagaacttagcctgtacctgt

SEQ ID NO: 296834 - DNA, 25 bp, Artificial
  Probe
atgccccagaacttagcctgtacct

SEQ ID NO: 296835 - DNA, 25 bp, Artificial
  Probe
gctggtcaccatcttcatcagagta

SEQ ID NO: 296836 - DNA, 25 bp, Artificial
  Probe
atgtctcccttgcacagtaaagctt

SEQ ID NO: 296837 - DNA, 25 bp, Artificial
  Probe
aattactgtttttagcagtgacaca

SEQ ID NO: 296838 - DNA, 25 bp, Artificial
  Probe
ctggtcaccatcttcatcagagtat

SEQ ID NO: 296839 - DNA, 25 bp, Artificial
  Probe
cttgcacagtaaagcttggactatg

SEQ ID NO: 296840 - DNA, 25 bp, Artificial
  Probe
tttgctggtcaccatcttcatcaga

SEQ ID NO: 296841 - DNA, 25 bp, Artificial
  Probe
cagtgacacagttgtgtgacagaag

SEQ ID NO: 296842 - DNA, 25 bp, Artificial
  Probe
gcttggactatgtcagaacgttgct

SEQ ID NO: 296843 - DNA, 25 bp, Artificial
  Probe
tactcaaaagagttcatgccccaga

SEQ ID NO: 296844 - DNA, 25 bp, Artificial
  Probe
ttttgctggtcaccatcttcatcag

SEQ ID NO: 296845 - DNA, 25 bp, Artificial
  Probe
agttcatgccccagaacttagcctg

SEQ ID NO: 296846 - DNA, 25 bp, Artificial
  Probe
cctcaggtgtgttttatgaattact

SEQ ID NO: 296847 - DNA, 25 bp, Artificial
  Probe
ggactatgtcagaacgttgcttttt

SEQ ID NO: 296848 - DNA, 25 bp, Artificial
  Probe
cccttgcacagtaaagcttggacta

SEQ ID NO: 296849 - DNA, 25 bp, Artificial
  Probe
aaagcctgccttattctgctacaga

SEQ ID NO: 296850 - DNA, 25 bp, Artificial
  Probe
tgccttattctgctacagagggatt

SEQ ID NO: 296851 - DNA, 25 bp, Artificial
  Probe
cagaacttagcctgtacctgtgaaa

SEQ ID NO: 296852 - DNA, 25 bp, Artificial
  Probe
attactgtttttagcagtgacacag

SEQ ID NO: 296853 - DNA, 25 bp, Artificial
  Probe
acttagcctgtacctgtgaaatatt

SEQ ID NO: 296854 - DNA, 25 bp, Artificial
  Probe
tatgttaccaggtgattataaccca

SEQ ID NO: 296855 - DNA, 25 bp, Artificial
  Probe
aagcctgccttattctgctacagag

SEQ ID NO: 296856 - DNA, 25 bp, Artificial
  Probe
ttagcagtgacacagttgtgtgaca

SEQ ID NO: 296857 - DNA, 25 bp, Artificial
  Probe
tggtcaccatcttcatcagagtatc

SEQ ID NO: 296858 - DNA, 25 bp, Artificial
  Probe
gtaaagcttggactatgtcagaacg

SEQ ID NO: 296859 - DNA, 25 bp, Artificial
  Probe
cttagcctgtacctgtgaaatatta

SEQ ID NO: 296860 - DNA, 25 bp, Artificial
  Probe
ttactgtttttagcagtgacacagt

SEQ ID NO: 296861 - DNA, 25 bp, Artificial
  Probe
ctgtttttagcagtgacacagttgt

SEQ ID NO: 296862 - DNA, 25 bp, Artificial
  Probe
tttagcagtgacacagttgtgtgac

SEQ ID NO: 296863 - DNA, 25 bp, Artificial
  Probe
tggtacccaagtgcagccagctcaa

SEQ ID NO: 296864 - DNA, 25 bp, Artificial
  Probe
aatcgccaactttgccggagtcctc

SEQ ID NO: 296865 - DNA, 25 bp, Artificial
  Probe
gtttcagaagactcagtacctcgcc

SEQ ID NO: 296866 - DNA, 25 bp, Artificial
  Probe
cggcttcctggtacccaagtgcagc

SEQ ID NO: 296867 - DNA, 25 bp, Artificial
  Probe
gtgcagccagctcaatcaattccca

SEQ ID NO: 296868 - DNA, 25 bp, Artificial
  Probe
cagaacgcgcggagttggccgcctc

SEQ ID NO: 296869 - DNA, 25 bp, Artificial
  Probe
accgcccgggagctatgacaggagt

SEQ ID NO: 296870 - DNA, 25 bp, Artificial
  Probe
ggctacccggccaaggcttatgcgg

SEQ ID NO: 296871 - DNA, 25 bp, Artificial
  Probe
aggtttcagaagactcagtacctcg

SEQ ID NO: 296872 - DNA, 25 bp, Artificial
  Probe
caggactatttattccagctttcag

SEQ ID NO: 296873 - DNA, 25 bp, Artificial
  Probe
agtatcacagcgtgaacggctccgc

SEQ ID NO: 296874 - DNA, 25 bp, Artificial
  Probe
agccagccagagaaagaagtggccg

SEQ ID NO: 296875 - DNA, 25 bp, Artificial
  Probe
ttgccggagtcctcggccaccgatt

SEQ ID NO: 296876 - DNA, 25 bp, Artificial
  Probe
tcggccaccgattctgactactaca

SEQ ID NO: 296877 - DNA, 25 bp, Artificial
  Probe
tcagctggccgctttacagagaagg

SEQ ID NO: 296878 - DNA, 25 bp, Artificial
  Probe
acccgtctcaggaatcgccaacttt

SEQ ID NO: 296879 - DNA, 25 bp, Artificial
  Probe
tcgccctgccagaacgcgcggagtt

SEQ ID NO: 296880 - DNA, 25 bp, Artificial
  Probe
gagtcccaagcatccgatccggcga

SEQ ID NO: 296881 - DNA, 25 bp, Artificial
  Probe
gaccagagcagctccacagccaatt

SEQ ID NO: 296882 - DNA, 25 bp, Artificial
  Probe
gtaaacccaggactatttattccag

SEQ ID NO: 296883 - DNA, 25 bp, Artificial
  Probe
ctggcactggcctccgggacgcttt

SEQ ID NO: 296884 - DNA, 25 bp, Artificial
  Probe
aaatctggtttcagaacaaaagatc

SEQ ID NO: 296885 - DNA, 25 bp, Artificial
  Probe
tttgccggagtcctcggccaccgat

SEQ ID NO: 296886 - DNA, 25 bp, Artificial
  Probe
ctttacagagaaggtttcagaagac

SEQ ID NO: 296887 - DNA, 25 bp, Artificial
  Probe
cttatgcggactacggctacgccag

SEQ ID NO: 296888 - DNA, 25 bp, Artificial
  Probe
aacgcgcggagttggccgcctctct

SEQ ID NO: 296889 - DNA, 25 bp, Artificial
  Probe
cgccctgccagaacgcgcggagttg

SEQ ID NO: 296890 - DNA, 25 bp, Artificial
  Probe
ttctgactactacagtcccgcgggg

SEQ ID NO: 296891 - DNA, 25 bp, Artificial
  Probe
gatccggcgacttccaagctccgtt

SEQ ID NO: 296892 - DNA, 25 bp, Artificial
  Probe
gagttggccgcctctctaggactga

SEQ ID NO: 296893 - DNA, 25 bp, Artificial
  Probe
atcacagcgtgaacggctccgcagc

SEQ ID NO: 296894 - DNA, 25 bp, Artificial
  Probe
caccagccagccagagaaagaagtg

SEQ ID NO: 296895 - DNA, 25 bp, Artificial
  Probe
gcaaagcgctcaacccataccagta

SEQ ID NO: 296896 - DNA, 25 bp, Artificial
  Probe
ctcgccacagtcaccagcggtgtgg

SEQ ID NO: 296897 - DNA, 25 bp, Artificial
  Probe
atctggtttcagaacaaaagatcca

SEQ ID NO: 296898 - DNA, 25 bp, Artificial
  Probe
ccacagccaattctggcagcagcgg

SEQ ID NO: 296899 - DNA, 25 bp, Artificial
  Probe
ccataccagtaccagtatcacagcg

SEQ ID NO: 296900 - DNA, 25 bp, Artificial
  Probe
gacgcaaacacaggtgaaaatctgg

SEQ ID NO: 296901 - DNA, 25 bp, Artificial
  Probe
ctggcctccgggacgctttattaga

SEQ ID NO: 296902 - DNA, 25 bp, Artificial
  Probe
cgcgtccagctacctggagaactcg

SEQ ID NO: 296903 - DNA, 25 bp, Artificial
  Probe
ccagctttcagctggccgctttaca

SEQ ID NO: 296904 - DNA, 25 bp, Artificial
  Probe
gctcccacagccatgtctgcttaga

SEQ ID NO: 296905 - DNA, 25 bp, Artificial
  Probe
cccgggagctatgacaggagtgttt

SEQ ID NO: 296906 - DNA, 25 bp, Artificial
  Probe
aagatccaagatcaagaagatcatg

SEQ ID NO: 296907 - DNA, 25 bp, Artificial
  Probe
ctccagcgaccctatggcgtgtaac

SEQ ID NO: 296908 - DNA, 25 bp, Artificial
  Probe
tttgacagaagagtcccaagcatcc

SEQ ID NO: 296909 - DNA, 25 bp, Artificial
  Probe
tgtctgctccctgatgcagcgctcg

SEQ ID NO: 296910 - DNA, 25 bp, Artificial
  Probe
accgctgatgtcttgaggtcaaggg

SEQ ID NO: 296911 - DNA, 25 bp, Artificial
  Probe
acgggcgctgtgtccggcttgtttc

SEQ ID NO: 296912 - DNA, 25 bp, Artificial
  Probe
accagagtcagacctctctcagagc

SEQ ID NO: 296913 - DNA, 25 bp, Artificial
  Probe
ctgatgtgttggacgcctttcttcg

SEQ ID NO: 296914 - DNA, 25 bp, Artificial
  Probe
agactcttcgtctccgctgctgaaa

SEQ ID NO: 296915 - DNA, 25 bp, Artificial
  Probe
gtgtctgctccctgatgcagcgctc

SEQ ID NO: 296916 - DNA, 25 bp, Artificial
  Probe
cacgcctggtcagtgctgtcacctg

SEQ ID NO: 296917 - DNA, 25 bp, Artificial
  Probe
ttggggccttcctgatgtgttggac

SEQ ID NO: 296918 - DNA, 25 bp, Artificial
  Probe
cgccaagatcactggaagggagcgc

SEQ ID NO: 296919 - DNA, 25 bp, Artificial
  Probe
ccgtctccagcagaccagagtcaga

SEQ ID NO: 296920 - DNA, 25 bp, Artificial
  Probe
acaccatcttcaatgccgagtttcg

SEQ ID NO: 296921 - DNA, 25 bp, Artificial
  Probe
tcttcaatgccgagtttcgaagtgt

SEQ ID NO: 296922 - DNA, 25 bp, Artificial
  Probe
ttcgaagtgtcttccgcaagactct

SEQ ID NO: 296923 - DNA, 25 bp, Artificial
  Probe
tgcgctggcggctttcgttcgtctg

SEQ ID NO: 296924 - DNA, 25 bp, Artificial
  Probe
agccccgggtgtctgctccctgatg

SEQ ID NO: 296925 - DNA, 25 bp, Artificial
  Probe
gggtcccctcttctcagattgtccg

SEQ ID NO: 296926 - DNA, 25 bp, Artificial
  Probe
ccaagcctgtgtgcagagtgcgctg

SEQ ID NO: 296927 - DNA, 25 bp, Artificial
  Probe
agaccagagtcagacctctctcaga

SEQ ID NO: 296928 - DNA, 25 bp, Artificial
  Probe
ccgtcttcccgcagaaagagaggcg

SEQ ID NO: 296929 - DNA, 25 bp, Artificial
  Probe
agtgtcttccgcaagactcttcgtc

SEQ ID NO: 296930 - DNA, 25 bp, Artificial
  Probe
caccatcttcaatgccgagtttcga

SEQ ID NO: 296931 - DNA, 25 bp, Artificial
  Probe
tcccgcagaaagagaggcgccaaga

SEQ ID NO: 296932 - DNA, 25 bp, Artificial
  Probe
agagaggcgccaagatcactggaag

SEQ ID NO: 296933 - DNA, 25 bp, Artificial
  Probe
ctcagggtcccctcttctcagattg

SEQ ID NO: 296934 - DNA, 25 bp, Artificial
  Probe
gtccggcttgtttcgtgtccccacg

SEQ ID NO: 296935 - DNA, 25 bp, Artificial
  Probe
tgaaagaaccgctgatgtcttgagg

SEQ ID NO: 296936 - DNA, 25 bp, Artificial
  Probe
ggtgcacatcacacgggcgctgtgt

SEQ ID NO: 296937 - DNA, 25 bp, Artificial
  Probe
tgtcttccgcaagactcttcgtctc

SEQ ID NO: 296938 - DNA, 25 bp, Artificial
  Probe
caaggggttccaagcctgtgtgcag

SEQ ID NO: 296939 - DNA, 25 bp, Artificial
  Probe
cttcgtctccgctgctgaaagaacc

SEQ ID NO: 296940 - DNA, 25 bp, Artificial
  Probe
cgccggtgtcggaccctactcaggg

SEQ ID NO: 296941 - DNA, 25 bp, Artificial
  Probe
caagatcactggaagggagcgcaag

SEQ ID NO: 296942 - DNA, 25 bp, Artificial
  Probe
aggtcaaggggttccaagcctgtgt

SEQ ID NO: 296943 - DNA, 25 bp, Artificial
  Probe
tcacacgggcgctgtgtccggcttg

SEQ ID NO: 296944 - DNA, 25 bp, Artificial
  Probe
ttcctaaccatttatcaacgctggg

SEQ ID NO: 296945 - DNA, 25 bp, Artificial
  Probe
ggttccaagcctgtgtgcagagtgc

SEQ ID NO: 296946 - DNA, 25 bp, Artificial
  Probe
ttggacgcctttcttcgtggtgcac

SEQ ID NO: 296947 - DNA, 25 bp, Artificial
  Probe
gctgctgaaagaaccgctgatgtct

SEQ ID NO: 296948 - DNA, 25 bp, Artificial
  Probe
gcaagactcttcgtctccgctgctg

SEQ ID NO: 296949 - DNA, 25 bp, Artificial
  Probe
gtcttgaggtcaaggggttccaagc

SEQ ID NO: 296950 - DNA, 25 bp, Artificial
  Probe
cgttcgtctgattaaatgaagtctt

SEQ ID NO: 296951 - DNA, 25 bp, Artificial
  Probe
gctgtgtccggcttgtttcgtgtcc

SEQ ID NO: 296952 - DNA, 25 bp, Artificial
  Probe
ctgatgtcttgaggtcaaggggttc

SEQ ID NO: 296953 - DNA, 25 bp, Artificial
  Probe
gtagttggggccttcctgatgtgtt

SEQ ID NO: 296954 - DNA, 25 bp, Artificial
  Probe
gtcagtgctgtcacctggctgggct

SEQ ID NO: 296955 - DNA, 25 bp, Artificial
  Probe
actctgtgagttggactgcagtctt

SEQ ID NO: 296956 - DNA, 25 bp, Artificial
  Probe
gttggactgcagtcttgcctaggtg

SEQ ID NO: 296957 - DNA, 25 bp, Artificial
  Probe
ctctgtgagttggactgcagtcttg

SEQ ID NO: 296958 - DNA, 25 bp, Artificial
  Probe
tcctcgtgtcctctccctgccaaat

SEQ ID NO: 296959 - DNA, 25 bp, Artificial
  Probe
agatattggtgtttcctcgtgtcct

SEQ ID NO: 296960 - DNA, 25 bp, Artificial
  Probe
ggactgcagtcttgcctaggtgatt

SEQ ID NO: 296961 - DNA, 25 bp, Artificial
  Probe
tggtgtttcctcgtgtcctctccct

SEQ ID NO: 296962 - DNA, 25 bp, Artificial
  Probe
ctgtgagttggactgcagtcttgcc

SEQ ID NO: 296963 - DNA, 25 bp, Artificial
  Probe
gcagtcttgcctaggtgatttttgt

SEQ ID NO: 296964 - DNA, 25 bp, Artificial
  Probe
tgtttcctcgtgtcctctccctgcc

SEQ ID NO: 296965 - DNA, 25 bp, Artificial
  Probe
tggactgcagtcttgcctaggtgat

SEQ ID NO: 296966 - DNA, 25 bp, Artificial
  Probe
taggtgatttttgtctaccgttcgt

SEQ ID NO: 296967 - DNA, 25 bp, Artificial
  Probe
ggtgatttttgtctaccgttcgtgt

SEQ ID NO: 296968 - DNA, 25 bp, Artificial
  Probe
ttcctcgtgtcctctccctgccaaa

SEQ ID NO: 296969 - DNA, 25 bp, Artificial
  Probe
attggtgtttcctcgtgtcctctcc

SEQ ID NO: 296970 - DNA, 25 bp, Artificial
  Probe
tgcagtcttgcctaggtgatttttg

SEQ ID NO: 296971 - DNA, 25 bp, Artificial
  Probe
ttgtctaccgttcgtgttttgaaag

SEQ ID NO: 296972 - DNA, 25 bp, Artificial
  Probe
ctgcagtcttgcctaggtgattttt

SEQ ID NO: 296973 - DNA, 25 bp, Artificial
  Probe
aggtgatttttgtctaccgttcgtg

SEQ ID NO: 296974 - DNA, 25 bp, Artificial
  Probe
agtcttgcctaggtgatttttgtct

SEQ ID NO: 296975 - DNA, 25 bp, Artificial
  Probe
tgcctaggtgatttttgtctaccgt

SEQ ID NO: 296976 - DNA, 25 bp, Artificial
  Probe
atattggtgtttcctcgtgtcctct

SEQ ID NO: 296977 - DNA, 25 bp, Artificial
  Probe
tcttgcctaggtgatttttgtctac

SEQ ID NO: 296978 - DNA, 25 bp, Artificial
  Probe
gccactctgtgagttggactgcagt

SEQ ID NO: 296979 - DNA, 25 bp, Artificial
  Probe
tctgtgagttggactgcagtcttgc

SEQ ID NO: 296980 - DNA, 25 bp, Artificial
  Probe
gagttggactgcagtcttgcctagg

SEQ ID NO: 296981 - DNA, 25 bp, Artificial
  Probe
gtcttgcctaggtgatttttgtcta

SEQ ID NO: 296982 - DNA, 25 bp, Artificial
  Probe
ggtgtttcctcgtgtcctctccctg

SEQ ID NO: 296983 - DNA, 25 bp, Artificial
  Probe
gtgagttggactgcagtcttgccta

SEQ ID NO: 296984 - DNA, 25 bp, Artificial
  Probe
ttggtgtttcctcgtgtcctctccc

SEQ ID NO: 296985 - DNA, 25 bp, Artificial
  Probe
tattggtgtttcctcgtgtcctctc

SEQ ID NO: 296986 - DNA, 25 bp, Artificial
  Probe
agttggactgcagtcttgcctaggt

SEQ ID NO: 296987 - DNA, 25 bp, Artificial
  Probe
tgatttttgtctaccgttcgtgttt

SEQ ID NO: 296988 - DNA, 25 bp, Artificial
  Probe
gtgatttttgtctaccgttcgtgtt

SEQ ID NO: 296989 - DNA, 25 bp, Artificial
  Probe
cactctgtgagttggactgcagtct

SEQ ID NO: 296990 - DNA, 25 bp, Artificial
  Probe
cttgcctaggtgatttttgtctacc

SEQ ID NO: 296991 - DNA, 25 bp, Artificial
  Probe
actgcagtcttgcctaggtgatttt

SEQ ID NO: 296992 - DNA, 25 bp, Artificial
  Probe
tgtctaccgttcgtgttttgaaagc

SEQ ID NO: 296993 - DNA, 25 bp, Artificial
  Probe
tgagttggactgcagtcttgcctag

SEQ ID NO: 296994 - DNA, 25 bp, Artificial
  Probe
ttgcctaggtgatttttgtctaccg

SEQ ID NO: 296995 - DNA, 25 bp, Artificial
  Probe
tagatattggtgtttcctcgtgtcc

SEQ ID NO: 296996 - DNA, 25 bp, Artificial
  Probe
cagtcttgcctaggtgatttttgtc

SEQ ID NO: 296997 - DNA, 25 bp, Artificial
  Probe
ttggactgcagtcttgcctaggtga

SEQ ID NO: 296998 - DNA, 25 bp, Artificial
  Probe
ccactctgtgagttggactgcagtc

SEQ ID NO: 296999 - DNA, 25 bp, Artificial
  Probe
atagatattggtgtttcctcgtgtc

SEQ ID NO: 297000 - DNA, 25 bp, Artificial
  Probe
gatattggtgtttcctcgtgtcctc

SEQ ID NO: 297001 - DNA, 25 bp, Artificial
  Probe
tcaccaggtgcgtgatgacattttc

SEQ ID NO: 297002 - DNA, 25 bp, Artificial
  Probe
actactatgaggagagctatttgac

SEQ ID NO: 297003 - DNA, 25 bp, Artificial
  Probe
tgcgtgatgacattttctcttcttc

SEQ ID NO: 297004 - DNA, 25 bp, Artificial
  Probe
ctaccaggacatacggggagcccga

SEQ ID NO: 297005 - DNA, 25 bp, Artificial
  Probe
agacttggattcagcctccgtggac

SEQ ID NO: 297006 - DNA, 25 bp, Artificial
  Probe
aaatcttcgagtacgagacccagag

SEQ ID NO: 297007 - DNA, 25 bp, Artificial
  Probe
cactctggggccagctgttactctt

SEQ ID NO: 297008 - DNA, 25 bp, Artificial
  Probe
agcaggcccctactgctgctctggg

SEQ ID NO: 297009 - DNA, 25 bp, Artificial
  Probe
ctggcgttcaacaccgcttccaggt

SEQ ID NO: 297010 - DNA, 25 bp, Artificial
  Probe
tctgcccaaaaaggaggacgcctta

SEQ ID NO: 297011 - DNA, 25 bp, Artificial
  Probe
gctgttactcttcctggcctttgct

SEQ ID NO: 297012 - DNA, 25 bp, Artificial
  Probe
gagagctatttgactaccaggacat

SEQ ID NO: 297013 - DNA, 25 bp, Artificial
  Probe
ttgtccgatactgagctggccgcag

SEQ ID NO: 297014 - DNA, 25 bp, Artificial
  Probe
aaagcaggcccctactgctgctctg

SEQ ID NO: 297015 - DNA, 25 bp, Artificial
  Probe
gaaggcaaccccttctggatggatc

SEQ ID NO: 297016 - DNA, 25 bp, Artificial
  Probe
accttccatcaccaggtgcgtgatg

SEQ ID NO: 297017 - DNA, 25 bp, Artificial
  Probe
tgtccaagagcttccgccggccagg

SEQ ID NO: 297018 - DNA, 25 bp, Artificial
  Probe
tcttcatggcttacccgacgtgcca

SEQ ID NO: 297019 - DNA, 25 bp, Artificial
  Probe
agacccagagaaggaggctttcgcc

SEQ ID NO: 297020 - DNA, 25 bp, Artificial
  Probe
aggagttttggctgactgccttagc

SEQ ID NO: 297021 - DNA, 25 bp, Artificial
  Probe
cttcttcagaagaggaaggcaagga

SEQ ID NO: 297022 - DNA, 25 bp, Artificial
  Probe
tccacctcatcttgccaaggaagca

SEQ ID NO: 297023 - DNA, 25 bp, Artificial
  Probe
tttcttgggccctgtgtataggtgc

SEQ ID NO: 297024 - DNA, 25 bp, Artificial
  Probe
aggcaaccccttctggatggatccc

SEQ ID NO: 297025 - DNA, 25 bp, Artificial
  Probe
ggccgcagtgctacgccagtacaac

SEQ ID NO: 297026 - DNA, 25 bp, Artificial
  Probe
ccctactgctgctctgggccaggat

SEQ ID NO: 297027 - DNA, 25 bp, Artificial
  Probe
cgccggccagggacctcacttgtag

SEQ ID NO: 297028 - DNA, 25 bp, Artificial
  Probe
ggctccactcgcaagctctacgaaa

SEQ ID NO: 297029 - DNA, 25 bp, Artificial
  Probe
tgccggccgtgtctgccatggacga

SEQ ID NO: 297030 - DNA, 25 bp, Artificial
  Probe
ggaggacgccttactttaccagagc

SEQ ID NO: 297031 - DNA, 25 bp, Artificial
  Probe
tacggcagtgcttgtctccacctca

SEQ ID NO: 297032 - DNA, 25 bp, Artificial
  Probe
gaccagaaaagcaggcccctactgc

SEQ ID NO: 297033 - DNA, 25 bp, Artificial
  Probe
gagcccgagtctgtgggcatgtcca

SEQ ID NO: 297034 - DNA, 25 bp, Artificial
  Probe
tgagctggccgcagtgctacgccag

SEQ ID NO: 297035 - DNA, 25 bp, Artificial
  Probe
agtgcttgtctccacctcatcttgc

SEQ ID NO: 297036 - DNA, 25 bp, Artificial
  Probe
cttgccaaggaagcagcaaatgctg

SEQ ID NO: 297037 - DNA, 25 bp, Artificial
  Probe
acaggtcccactctggggccagctg

SEQ ID NO: 297038 - DNA, 25 bp, Artificial
  Probe
ttggattcagcctccgtggactcag

SEQ ID NO: 297039 - DNA, 25 bp, Artificial
  Probe
ccactcgcaagctctacgaaaagaa

SEQ ID NO: 297040 - DNA, 25 bp, Artificial
  Probe
aagcagcaaatgctggctttccaca

SEQ ID NO: 297041 - DNA, 25 bp, Artificial
  Probe
gccctgtgtataggtgccggccgcc

SEQ ID NO: 297042 - DNA, 25 bp, Artificial
  Probe
ggtattggtttcagagcagctctta

SEQ ID NO: 297043 - DNA, 25 bp, Artificial
  Probe
taccagagcaaggactataatgatg

SEQ ID NO: 297044 - DNA, 25 bp, Artificial
  Probe
gttcaacaccgcttccaggtgccgg

SEQ ID NO: 297045 - DNA, 25 bp, Artificial
  Probe
agatgctgatgataccttccatcac

SEQ ID NO: 297046 - DNA, 25 bp, Artificial
  Probe
tattctagttagagggtacagggcc

SEQ ID NO: 297047 - DNA, 25 bp, Artificial
  Probe
tgattctgccagtgggagccaagct

SEQ ID NO: 297048 - DNA, 25 bp, Artificial
  Probe
agcactggagctacgagatggagac

SEQ ID NO: 297049 - DNA, 25 bp, Artificial
  Probe
aggtggacctgcacacagccaaggg

SEQ ID NO: 297050 - DNA, 25 bp, Artificial
  Probe
gagctggacggaaccgagaataagt

SEQ ID NO: 297051 - DNA, 25 bp, Artificial
  Probe
gcgcattggcgctgaggtctaccac

SEQ ID NO: 297052 - DNA, 25 bp, Artificial
  Probe
gagcacatcaacaagactctcggcc

SEQ ID NO: 297053 - DNA, 25 bp, Artificial
  Probe
actccaggggcaaccccacagtgga

SEQ ID NO: 297054 - DNA, 25 bp, Artificial
  Probe
cagcatctgaattctatcgcaatgg

SEQ ID NO: 297055 - DNA, 25 bp, Artificial
  Probe
aaggggtccctctctaccgacacat

SEQ ID NO: 297056 - DNA, 25 bp, Artificial
  Probe
cattggcgctgaggtctaccaccac

SEQ ID NO: 297057 - DNA, 25 bp, Artificial
  Probe
atcctgcgaggcacatcagtgggga

SEQ ID NO: 297058 - DNA, 25 bp, Artificial
  Probe
atttatgattgagctggacggaacc

SEQ ID NO: 297059 - DNA, 25 bp, Artificial
  Probe
tctgccagtgggagccaagctcttt

SEQ ID NO: 297060 - DNA, 25 bp, Artificial
  Probe
taccgacacattgcagacctcgcag

SEQ ID NO: 297061 - DNA, 25 bp, Artificial
  Probe
catgattctgccagtgggagccaag

SEQ ID NO: 297062 - DNA, 25 bp, Artificial
  Probe
ccaagggtcgattccgagcggctgt

SEQ ID NO: 297063 - DNA, 25 bp, Artificial
  Probe
tgtgccaagcggagcttccacgggt

SEQ ID NO: 297064 - DNA, 25 bp, Artificial
  Probe
agcggagcttccacgggtatctatg

SEQ ID NO: 297065 - DNA, 25 bp, Artificial
  Probe
tgcacacagccaagggtcgattccg

SEQ ID NO: 297066 - DNA, 25 bp, Artificial
  Probe
actactaaagacagccattcaggca

SEQ ID NO: 297067 - DNA, 25 bp, Artificial
  Probe
aatcacgatacctggggaaaggagt

SEQ ID NO: 297068 - DNA, 25 bp, Artificial
  Probe
ccctggaactactaaagacagccat

SEQ ID NO: 297069 - DNA, 25 bp, Artificial
  Probe
aagccagcgcattggcgctgaggtc

SEQ ID NO: 297070 - DNA, 25 bp, Artificial
  Probe
tgaagcactggagctacgagatgga

SEQ ID NO: 297071 - DNA, 25 bp, Artificial
  Probe
tgcagacctcgcagggaatcccgac

SEQ ID NO: 297072 - DNA, 25 bp, Artificial
  Probe
taaagacagccattcaggcagctgg

SEQ ID NO: 297073 - DNA, 25 bp, Artificial
  Probe
atctgaattctatcgcaatgggaag

SEQ ID NO: 297074 - DNA, 25 bp, Artificial
  Probe
aagtatgatctggacttcaagtcac

SEQ ID NO: 297075 - DNA, 25 bp, Artificial
  Probe
gatgatcctgcgaggcacatcagtg

SEQ ID NO: 297076 - DNA, 25 bp, Artificial
  Probe
gactccaggggcaaccccacagtgg

SEQ ID NO: 297077 - DNA, 25 bp, Artificial
  Probe
ttcaaggaagccagcgcattggcgc

SEQ ID NO: 297078 - DNA, 25 bp, Artificial
  Probe
agcttccacgggtatctatgaagca

SEQ ID NO: 297079 - DNA, 25 bp, Artificial
  Probe
gaaatcctggactccaggggcaacc

SEQ ID NO: 297080 - DNA, 25 bp, Artificial
  Probe
agcggctgtgccaagcggagcttcc

SEQ ID NO: 297081 - DNA, 25 bp, Artificial
  Probe
attccgagcggctgtgccaagcgga

SEQ ID NO: 297082 - DNA, 25 bp, Artificial
  Probe
cctcgcagggaatcccgaccttgta

SEQ ID NO: 297083 - DNA, 25 bp, Artificial
  Probe
ttccacgggtatctatgaagcactg

SEQ ID NO: 297084 - DNA, 25 bp, Artificial
  Probe
actctcggccctgctctgctggaaa

SEQ ID NO: 297085 - DNA, 25 bp, Artificial
  Probe
tatctatgaagcactggagctacga

SEQ ID NO: 297086 - DNA, 25 bp, Artificial
  Probe
ttgtacttcccgtgcctgccttcaa

SEQ ID NO: 297087 - DNA, 25 bp, Artificial
  Probe
ctctttcaaggaagccagcgcattg

SEQ ID NO: 297088 - DNA, 25 bp, Artificial
  Probe
gaatcccgaccttgtacttcccgtg

SEQ ID NO: 297089 - DNA, 25 bp, Artificial
  Probe
ggagacaaatcacgatacctgggga

SEQ ID NO: 297090 - DNA, 25 bp, Artificial
  Probe
gcggctgtgccaagcggagcttcca

SEQ ID NO: 297091 - DNA, 25 bp, Artificial
  Probe
acattgcagacctcgcagggaatcc

SEQ ID NO: 297092 - DNA, 25 bp, Artificial
  Probe
tcggccctgctctgctggaaaagaa

SEQ ID NO: 297093 - DNA, 25 bp, Artificial
  Probe
tggtgtcaccggaggctaccaactc

SEQ ID NO: 297094 - DNA, 25 bp, Artificial
  Probe
ggaaatcggagttgttgccgtcaaa

SEQ ID NO: 297095 - DNA, 25 bp, Artificial
  Probe
aggagctcccaggagaggacaaaaa

SEQ ID NO: 297096 - DNA, 25 bp, Artificial
  Probe
tccagggagatgtccgctggagaaa

SEQ ID NO: 297097 - DNA, 25 bp, Artificial
  Probe
caacggcaggcaaatgtatgtggca

SEQ ID NO: 297098 - DNA, 25 bp, Artificial
  Probe
gagttgttgccgtcaaagccattaa

SEQ ID NO: 297099 - DNA, 25 bp, Artificial
  Probe
gtccgctggagaaagctgttctcct

SEQ ID NO: 297100 - DNA, 25 bp, Artificial
  Probe
ctgccaagctcttggtcaggacatg

SEQ ID NO: 297101 - DNA, 25 bp, Artificial
  Probe
ttggtcaggacatggtgtcaccgga

SEQ ID NO: 297102 - DNA, 25 bp, Artificial
  Probe
tattacttagccatgaacaagaagg

SEQ ID NO: 297103 - DNA, 25 bp, Artificial
  Probe
actggcagcacaacggcaggcaaat

SEQ ID NO: 297104 - DNA, 25 bp, Artificial
  Probe
acaatcacctccagggagatgtccg

SEQ ID NO: 297105 - DNA, 25 bp, Artificial
  Probe
ttcttggtgtcttccgtccctgtca

SEQ ID NO: 297106 - DNA, 25 bp, Artificial
  Probe
tggagaaagctgttctccttcacca

SEQ ID NO: 297107 - DNA, 25 bp, Artificial
  Probe
gaaagctgttctccttcaccaagta

SEQ ID NO: 297108 - DNA, 25 bp, Artificial
  Probe
ctgtcacctgccaagctcttggtca

SEQ ID NO: 297109 - DNA, 25 bp, Artificial
  Probe
cagtatcctagagataacatcagtg

SEQ ID NO: 297110 - DNA, 25 bp, Artificial
  Probe
aatcggagttgttgccgtcaaagcc

SEQ ID NO: 297111 - DNA, 25 bp, Artificial
  Probe
gagatgtccgctggagaaagctgtt

SEQ ID NO: 297112 - DNA, 25 bp, Artificial
  Probe
tcacctccagggagatgtccgctgg

SEQ ID NO: 297113 - DNA, 25 bp, Artificial
  Probe
agaacggcaaggtcagcgggaccaa

SEQ ID NO: 297114 - DNA, 25 bp, Artificial
  Probe
tggtgtcttccgtccctgtcacctg

SEQ ID NO: 297115 - DNA, 25 bp, Artificial
  Probe
cttttaactggcagcacaacggcag

SEQ ID NO: 297116 - DNA, 25 bp, Artificial
  Probe
cacctccagggagatgtccgctgga

SEQ ID NO: 297117 - DNA, 25 bp, Artificial
  Probe
gccgtcaaagccattaacagcaact

SEQ ID NO: 297118 - DNA, 25 bp, Artificial
  Probe
tgttgccgtcaaagccattaacagc

SEQ ID NO: 297119 - DNA, 25 bp, Artificial
  Probe
gcatcttttaactggcagcacaacg

SEQ ID NO: 297120 - DNA, 25 bp, Artificial
  Probe
ctttctcaagattgaaaagaacggc

SEQ ID NO: 297121 - DNA, 25 bp, Artificial
  Probe
tcctagagataacatcagtggaaat

SEQ ID NO: 297122 - DNA, 25 bp, Artificial
  Probe
tcaggacatggtgtcaccggaggct

SEQ ID NO: 297123 - DNA, 25 bp, Artificial
  Probe
tcagcgggaccaagaaggaaaactg

SEQ ID NO: 297124 - DNA, 25 bp, Artificial
  Probe
ggacatggtgtcaccggaggctacc

SEQ ID NO: 297125 - DNA, 25 bp, Artificial
  Probe
tgtcacctgccaagctcttggtcag

SEQ ID NO: 297126 - DNA, 25 bp, Artificial
  Probe
cagcacaacggcaggcaaatgtatg

SEQ ID NO: 297127 - DNA, 25 bp, Artificial
  Probe
gtcagcgggaccaagaaggaaaact

SEQ ID NO: 297128 - DNA, 25 bp, Artificial
  Probe
acaacggcaggcaaatgtatgtggc

SEQ ID NO: 297129 - DNA, 25 bp, Artificial
  Probe
tactttctcaagattgaaaagaacg

SEQ ID NO: 297130 - DNA, 25 bp, Artificial
  Probe
tagccatgaacaagaaggggaaact

SEQ ID NO: 297131 - DNA, 25 bp, Artificial
  Probe
gggctgctgttgctgcttcttgttg

SEQ ID NO: 297132 - DNA, 25 bp, Artificial
  Probe
aaaggagctcccaggagaggacaaa

SEQ ID NO: 297133 - DNA, 25 bp, Artificial
  Probe
gttgctcttcttggtgtcttccgtc

SEQ ID NO: 297134 - DNA, 25 bp, Artificial
  Probe
cacctatgcatcttttaactggcag

SEQ ID NO: 297135 - DNA, 25 bp, Artificial
  Probe
agaaggaaaaacacctccgctcact

SEQ ID NO: 297136 - DNA, 25 bp, Artificial
  Probe
caagtactttctcaagattgaaaag

SEQ ID NO: 297137 - DNA, 25 bp, Artificial
  Probe
aaactgtccgtacagtatcctagag

SEQ ID NO: 297138 - DNA, 25 bp, Artificial
  Probe
aggcatgtgcgaagctacaatcacc

SEQ ID NO: 297139 - DNA, 25 bp, Artificial
  Probe
ggctcacggccctgtgtgcaaaatc

SEQ ID NO: 297140 - DNA, 25 bp, Artificial
  Probe
gagtcctgttccaaggctcaccgca

SEQ ID NO: 297141 - DNA, 25 bp, Artificial
  Probe
agagaaacaagctggccgctgccaa

SEQ ID NO: 297142 - DNA, 25 bp, Artificial
  Probe
atcactccgggcacttcaaaccttg

SEQ ID NO: 297143 - DNA, 25 bp, Artificial
  Probe
ggagaagtccggtctgcagaaagaa

SEQ ID NO: 297144 - DNA, 25 bp, Artificial
  Probe
gctctgtcatcaagcccattagcat

SEQ ID NO: 297145 - DNA, 25 bp, Artificial
  Probe
gtagcagtggggaccagtcatcaga

SEQ ID NO: 297146 - DNA, 25 bp, Artificial
  Probe
gccctgtgtgcaaaatcagtcctga

SEQ ID NO: 297147 - DNA, 25 bp, Artificial
  Probe
ctgtcggccctgtggtggtgaaaca

SEQ ID NO: 297148 - DNA, 25 bp, Artificial
  Probe
accgtcgacgtgagctgacggagaa

SEQ ID NO: 297149 - DNA, 25 bp, Artificial
  Probe
ccctgtggtggtgaaacaggagcct

SEQ ID NO: 297150 - DNA, 25 bp, Artificial
  Probe
aagcagtagcagtggggaccagtca

SEQ ID NO: 297151 - DNA, 25 bp, Artificial
  Probe
gtccggtctgcagaaagaaatcgct

SEQ ID NO: 297152 - DNA, 25 bp, Artificial
  Probe
ctaccccagtgtcctggagcaggag

SEQ ID NO: 297153 - DNA, 25 bp, Artificial
  Probe
gaaacaggagcctcctgaagaggac

SEQ ID NO: 297154 - DNA, 25 bp, Artificial
  Probe
cagtgtcctggagcaggagtcgcct

SEQ ID NO: 297155 - DNA, 25 bp, Artificial
  Probe
cagcgctctgtcatcaagcccatta

SEQ ID NO: 297156 - DNA, 25 bp, Artificial
  Probe
tcctggagcaggagtcgcctgcgtc

SEQ ID NO: 297157 - DNA, 25 bp, Artificial
  Probe
tcggaaccgtcgacgtgagctgacg

SEQ ID NO: 297158 - DNA, 25 bp, Artificial
  Probe
ccctcttcctcagcagggatggaca

SEQ ID NO: 297159 - DNA, 25 bp, Artificial
  Probe
caagctggccgctgccaagtgtcgg

SEQ ID NO: 297160 - DNA, 25 bp, Artificial
  Probe
tctacggggaagagcctctgcacac

SEQ ID NO: 297161 - DNA, 25 bp, Artificial
  Probe
tcaccgcagaagcagtagcagtggg

SEQ ID NO: 297162 - DNA, 25 bp, Artificial
  Probe
tgtcggaaccgtcgacgtgagctga

SEQ ID NO: 297163 - DNA, 25 bp, Artificial
  Probe
aatcagtcctgaggaacgccgatct

SEQ ID NO: 297164 - DNA, 25 bp, Artificial
  Probe
atgctggtggctcacggccctgtgt

SEQ ID NO: 297165 - DNA, 25 bp, Artificial
  Probe
tccttacgcggtacgggcagtgctg

SEQ ID NO: 297166 - DNA, 25 bp, Artificial
  Probe
aagacccagcgctctgtcatcaagc

SEQ ID NO: 297167 - DNA, 25 bp, Artificial
  Probe
ccaagtgtcggaaccgtcgacgtga

SEQ ID NO: 297168 - DNA, 25 bp, Artificial
  Probe
gagcctcctgaagaggacagcccct

SEQ ID NO: 297169 - DNA, 25 bp, Artificial
  Probe
aaccgtcgacgtgagctgacggaga

SEQ ID NO: 297170 - DNA, 25 bp, Artificial
  Probe
ctcagcagggatggacaagacccag

SEQ ID NO: 297171 - DNA, 25 bp, Artificial
  Probe
gggcacttcaaaccttgtcttcacc

SEQ ID NO: 297172 - DNA, 25 bp, Artificial
  Probe
agttcatgctggtggctcacggccc

SEQ ID NO: 297173 - DNA, 25 bp, Artificial
  Probe
aaggctcaccgcagaagcagtagca

SEQ ID NO: 297174 - DNA, 25 bp, Artificial
  Probe
tcctcagcagggatggacaagaccc

SEQ ID NO: 297175 - DNA, 25 bp, Artificial
  Probe
cctcttcctcagcagggatggacaa

SEQ ID NO: 297176 - DNA, 25 bp, Artificial
  Probe
ctggccgctgccaagtgtcggaacc

SEQ ID NO: 297177 - DNA, 25 bp, Artificial
  Probe
aagctggagttcatgctggtggctc

SEQ ID NO: 297178 - DNA, 25 bp, Artificial
  Probe
cgctgccaagtgtcggaaccgtcga

SEQ ID NO: 297179 - DNA, 25 bp, Artificial
  Probe
gtttctacggggaagagcctctgca

SEQ ID NO: 297180 - DNA, 25 bp, Artificial
  Probe
gtccttacgcggtacgggcagtgct

SEQ ID NO: 297181 - DNA, 25 bp, Artificial
  Probe
gttccaaggctcaccgcagaagcag

SEQ ID NO: 297182 - DNA, 25 bp, Artificial
  Probe
tgtgtgcaaaatcagtcctgaggaa

SEQ ID NO: 297183 - DNA, 25 bp, Artificial
  Probe
atcaagcccattagcattgctgggg

SEQ ID NO: 297184 - DNA, 25 bp, Artificial
  Probe
gtcatcaagcccattagcattgctg

SEQ ID NO: 297185 - DNA, 25 bp, Artificial
  Probe
ctcatggttcggtttagactccttt

SEQ ID NO: 297186 - DNA, 25 bp, Artificial
  Probe
gttagacattgttggcagtcattct

SEQ ID NO: 297187 - DNA, 25 bp, Artificial
  Probe
taagttcagtctcatggttcggttt

SEQ ID NO: 297188 - DNA, 25 bp, Artificial
  Probe
aatgtacagtggaccctgccgtcca

SEQ ID NO: 297189 - DNA, 25 bp, Artificial
  Probe
aaatgtacagtggaccctgccgtcc

SEQ ID NO: 297190 - DNA, 25 bp, Artificial
  Probe
taaccccacagatttccaacagtgg

SEQ ID NO: 297191 - DNA, 25 bp, Artificial
  Probe
agttgccctggatcttactggatta

SEQ ID NO: 297192 - DNA, 25 bp, Artificial
  Probe
gtaccagctctgtaagagttccatc

SEQ ID NO: 297193 - DNA, 25 bp, Artificial
  Probe
gctttactatgtacactaagttcag

SEQ ID NO: 297194 - DNA, 25 bp, Artificial
  Probe
tccaaggtaccagctctgtaagagt

SEQ ID NO: 297195 - DNA, 25 bp, Artificial
  Probe
ctttgtttacaaacacaaagagagg

SEQ ID NO: 297196 - DNA, 25 bp, Artificial
  Probe
cttccagttggttttcgatcttgtg

SEQ ID NO: 297197 - DNA, 25 bp, Artificial
  Probe
tcttagttgccctggatcttactgg

SEQ ID NO: 297198 - DNA, 25 bp, Artificial
  Probe
gccctggatcttactggattatttt

SEQ ID NO: 297199 - DNA, 25 bp, Artificial
  Probe
tcggtttagactcctttcctcctcg

SEQ ID NO: 297200 - DNA, 25 bp, Artificial
  Probe
ctgcactgtgttctgggtaaactgt

SEQ ID NO: 297201 - DNA, 25 bp, Artificial
  Probe
cagatttccaacagtggtaactgct

SEQ ID NO: 297202 - DNA, 25 bp, Artificial
  Probe
ctgtctattgtggtccaaggtacca

SEQ ID NO: 297203 - DNA, 25 bp, Artificial
  Probe
caacagtggtaactgctatggtttt

SEQ ID NO: 297204 - DNA, 25 bp, Artificial
  Probe
tccagttggttttcgatcttgtgtg

SEQ ID NO: 297205 - DNA, 25 bp, Artificial
  Probe
tgcactgtgttctgggtaaactgta

SEQ ID NO: 297206 - DNA, 25 bp, Artificial
  Probe
tgccgtccacctgcactgtgttctg

SEQ ID NO: 297207 - DNA, 25 bp, Artificial
  Probe
ctgtgttctgggtaaactgtaacca

SEQ ID NO: 297208 - DNA, 25 bp, Artificial
  Probe
accccacagatttccaacagtggta

SEQ ID NO: 297209 - DNA, 25 bp, Artificial
  Probe
actttgtttacaaacacaaagagag

SEQ ID NO: 297210 - DNA, 25 bp, Artificial
  Probe
cgtccacctgcactgtgttctgggt

SEQ ID NO: 297211 - DNA, 25 bp, Artificial
  Probe
tttccaacagtggtaactgctatgg

SEQ ID NO: 297212 - DNA, 25 bp, Artificial
  Probe
cagttggttttcgatcttgtgtgtc

SEQ ID NO: 297213 - DNA, 25 bp, Artificial
  Probe
gacattgttggcagtcattcttagt

SEQ ID NO: 297214 - DNA, 25 bp, Artificial
  Probe
tcatggttcggtttagactcctttc

SEQ ID NO: 297215 - DNA, 25 bp, Artificial
  Probe
gctctgtaagagttccatcaattac

SEQ ID NO: 297216 - DNA, 25 bp, Artificial
  Probe
gtaagagttccatcaattactttgt

SEQ ID NO: 297217 - DNA, 25 bp, Artificial
  Probe
ggtttagactcctttcctcctcgct

SEQ ID NO: 297218 - DNA, 25 bp, Artificial
  Probe
tatgtacactaagttcagtctcatg

SEQ ID NO: 297219 - DNA, 25 bp, Artificial
  Probe
tgttagacattgttggcagtcattc

SEQ ID NO: 297220 - DNA, 25 bp, Artificial
  Probe
acactaagttcagtctcatggttcg

SEQ ID NO: 297221 - DNA, 25 bp, Artificial
  Probe
tgtaagagttccatcaattactttg

SEQ ID NO: 297222 - DNA, 25 bp, Artificial
  Probe
gtcattcttagttgccctggatctt

SEQ ID NO: 297223 - DNA, 25 bp, Artificial
  Probe
tttttcctgtctattgtggtccaag

SEQ ID NO: 297224 - DNA, 25 bp, Artificial
  Probe
cgccttccagttggttttcgatctt

SEQ ID NO: 297225 - DNA, 25 bp, Artificial
  Probe
ggcagtcattcttagttgccctgga

SEQ ID NO: 297226 - DNA, 25 bp, Artificial
  Probe
tgtgttctgggtaaactgtaaccat

SEQ ID NO: 297227 - DNA, 25 bp, Artificial
  Probe
cagtctcatggttcggtttagactc

SEQ ID NO: 297228 - DNA, 25 bp, Artificial
  Probe
cattgttggcagtcattcttagttg

SEQ ID NO: 297229 - DNA, 25 bp, Artificial
  Probe
gggtaaactgtaaccatctcatgct

SEQ ID NO: 297230 - DNA, 25 bp, Artificial
  Probe
ttgtggtccaaggtaccagctctgt

SEQ ID NO: 297231 - DNA, 25 bp, Artificial
  Probe
taccttagttgctggcctatcctgt

SEQ ID NO: 297232 - DNA, 25 bp, Artificial
  Probe
agcaaggactagattcctcttcaaa

SEQ ID NO: 297233 - DNA, 25 bp, Artificial
  Probe
ctactcagagggttaattacctaga

SEQ ID NO: 297234 - DNA, 25 bp, Artificial
  Probe
cctcttcaaacagttgtacagcttg

SEQ ID NO: 297235 - DNA, 25 bp, Artificial
  Probe
gactagattcctcttcaaacagttg

SEQ ID NO: 297236 - DNA, 25 bp, Artificial
  Probe
atgcctgatgtaggacttggaaaac

SEQ ID NO: 297237 - DNA, 25 bp, Artificial
  Probe
cactaaggtcctcgtggttttccag

SEQ ID NO: 297238 - DNA, 25 bp, Artificial
  Probe
gacagcactgtgcttataaaacatt

SEQ ID NO: 297239 - DNA, 25 bp, Artificial
  Probe
agaagacactggaaagctcaatggc

SEQ ID NO: 297240 - DNA, 25 bp, Artificial
  Probe
aatgctctccatcgttgttcctaag

SEQ ID NO: 297241 - DNA, 25 bp, Artificial
  Probe
gtcctcgtggttttccagttacaat

SEQ ID NO: 297242 - DNA, 25 bp, Artificial
  Probe
agctcaatggcatgggcagtcaagt

SEQ ID NO: 297243 - DNA, 25 bp, Artificial
  Probe
cctaaggttggcacgcagttgggac

SEQ ID NO: 297244 - DNA, 25 bp, Artificial
  Probe
ctccagcctcccatgagaagcaagg

SEQ ID NO: 297245 - DNA, 25 bp, Artificial
  Probe
gcctatcctgtggtccatttcataa

SEQ ID NO: 297246 - DNA, 25 bp, Artificial
  Probe
tgttcctaaggttggcacgcagttg

SEQ ID NO: 297247 - DNA, 25 bp, Artificial
  Probe
atgttaaaataccttagttgctggc

SEQ ID NO: 297248 - DNA, 25 bp, Artificial
  Probe
tcaatatgggctttgaggtctaagc

SEQ ID NO: 297249 - DNA, 25 bp, Artificial
  Probe
atcgaaacatgctacttcaatatgg

SEQ ID NO: 297250 - DNA, 25 bp, Artificial
  Probe
cacgcagttgggacagcactgtgct

SEQ ID NO: 297251 - DNA, 25 bp, Artificial
  Probe
ctcccatgagaagcaaggactagat

SEQ ID NO: 297252 - DNA, 25 bp, Artificial
  Probe
aatggcatgggcagtcaagtctctg

SEQ ID NO: 297253 - DNA, 25 bp, Artificial
  Probe
gttgcttctactaagtaatgactac

SEQ ID NO: 297254 - DNA, 25 bp, Artificial
  Probe
gattcctcttcaaacagttgtacag

SEQ ID NO: 297255 - DNA, 25 bp, Artificial
  Probe
agtgatttgtacacatgccggcaag

SEQ ID NO: 297256 - DNA, 25 bp, Artificial
  Probe
acacatgccggcaagatctttgtca

SEQ ID NO: 297257 - DNA, 25 bp, Artificial
  Probe
atccaggacaaaagcgatgttaaaa

SEQ ID NO: 297258 - DNA, 25 bp, Artificial
  Probe
actaagtaatgactacactaaggtc

SEQ ID NO: 297259 - DNA, 25 bp, Artificial
  Probe
gatttgtacacatgccggcaagatc

SEQ ID NO: 297260 - DNA, 25 bp, Artificial
  Probe
gactacactaaggtcctcgtggttt

SEQ ID NO: 297261 - DNA, 25 bp, Artificial
  Probe
gttaattacctagattctagaagac

SEQ ID NO: 297262 - DNA, 25 bp, Artificial
  Probe
gtgaactaaactccagcctcccatg

SEQ ID NO: 297263 - DNA, 25 bp, Artificial
  Probe
tggaaagctcaatggcatgggcagt

SEQ ID NO: 297264 - DNA, 25 bp, Artificial
  Probe
gctacttcaatatgggctttgaggt

SEQ ID NO: 297265 - DNA, 25 bp, Artificial
  Probe
ttacctagattctagaagacactgg

SEQ ID NO: 297266 - DNA, 25 bp, Artificial
  Probe
gtcaagtctctgaaacagtcatttc

SEQ ID NO: 297267 - DNA, 25 bp, Artificial
  Probe
ccagttacaatgcaagtgatttgta

SEQ ID NO: 297268 - DNA, 25 bp, Artificial
  Probe
tggaaaacacatcaatccaggacaa

SEQ ID NO: 297269 - DNA, 25 bp, Artificial
  Probe
cttggaaaacacatcaatccaggac

SEQ ID NO: 297270 - DNA, 25 bp, Artificial
  Probe
tagttgctggcctatcctgtggtcc

SEQ ID NO: 297271 - DNA, 25 bp, Artificial
  Probe
aacacatcaatccaggacaaaagcg

SEQ ID NO: 297272 - DNA, 25 bp, Artificial
  Probe
gttggcacgcagttgggacagcact

SEQ ID NO: 297273 - DNA, 25 bp, Artificial
  Probe
ggctttactatgtgaactaaactcc

SEQ ID NO: 297274 - DNA, 25 bp, Artificial
  Probe
cctgtggtccatttcataacatttg

SEQ ID NO: 297275 - DNA, 25 bp, Artificial
  Probe
cagcttgatgcctgatgtaggactt

SEQ ID NO: 297276 - DNA, 25 bp, Artificial
  Probe
taggacacagcctactcagagggtt

SEQ ID NO: 297277 - DNA, 25 bp, Artificial
  Probe
tgcaaagtttctgtgggagcctcat

SEQ ID NO: 297278 - DNA, 25 bp, Artificial
  Probe
ctgcccaatgagtattttgtgccca

SEQ ID NO: 297279 - DNA, 25 bp, Artificial
  Probe
ctctcctagaaactgcccaatgagt

SEQ ID NO: 297280 - DNA, 25 bp, Artificial
  Probe
accagtgcaaagtttctgtgggagc

SEQ ID NO: 297281 - DNA, 25 bp, Artificial
  Probe
tgcccagaaaaccagtgcaaagttt

SEQ ID NO: 297282 - DNA, 25 bp, Artificial
  Probe
gaaactgcccaatgagtattttgtg

SEQ ID NO: 297283 - DNA, 25 bp, Artificial
  Probe
ctgtgggagcctcataaccaatcct

SEQ ID NO: 297284 - DNA, 25 bp, Artificial
  Probe
tgagtattttgtgcccagaaaacca

SEQ ID NO: 297285 - DNA, 25 bp, Artificial
  Probe
ccaatcctttcagattaggatttgt

SEQ ID NO: 297286 - DNA, 25 bp, Artificial
  Probe
agtttctgtgggagcctcataacca

SEQ ID NO: 297287 - DNA, 25 bp, Artificial
  Probe
attttgtgcccagaaaaccagtgca

SEQ ID NO: 297288 - DNA, 25 bp, Artificial
  Probe
gtgggagcctcataaccaatccttt

SEQ ID NO: 297289 - DNA, 25 bp, Artificial
  Probe
gcaaagtttctgtgggagcctcata

SEQ ID NO: 297290 - DNA, 25 bp, Artificial
  Probe
gtgcaaagtttctgtgggagcctca

SEQ ID NO: 297291 - DNA, 25 bp, Artificial
  Probe
caaagtttctgtgggagcctcataa

SEQ ID NO: 297292 - DNA, 25 bp, Artificial
  Probe
gagcctcataaccaatcctttcaga

SEQ ID NO: 297293 - DNA, 25 bp, Artificial
  Probe
aaactgcccaatgagtattttgtgc

SEQ ID NO: 297294 - DNA, 25 bp, Artificial
  Probe
ttttgtgcccagaaaaccagtgcaa

SEQ ID NO: 297295 - DNA, 25 bp, Artificial
  Probe
ttgtgcccagaaaaccagtgcaaag

SEQ ID NO: 297296 - DNA, 25 bp, Artificial
  Probe
tgggagcctcataaccaatcctttc

SEQ ID NO: 297297 - DNA, 25 bp, Artificial
  Probe
tctgtgggagcctcataaccaatcc

SEQ ID NO: 297298 - DNA, 25 bp, Artificial
  Probe
agtgcaaagtttctgtgggagcctc

SEQ ID NO: 297299 - DNA, 25 bp, Artificial
  Probe
gcccagaaaaccagtgcaaagtttc

SEQ ID NO: 297300 - DNA, 25 bp, Artificial
  Probe
actgcccaatgagtattttgtgccc

SEQ ID NO: 297301 - DNA, 25 bp, Artificial
  Probe
tctcctagaaactgcccaatgagta

SEQ ID NO: 297302 - DNA, 25 bp, Artificial
  Probe
aactgcccaatgagtattttgtgcc

SEQ ID NO: 297303 - DNA, 25 bp, Artificial
  Probe
tctctcctagaaactgcccaatgag

SEQ ID NO: 297304 - DNA, 25 bp, Artificial
  Probe
tattttgtgcccagaaaaccagtgc

SEQ ID NO: 297305 - DNA, 25 bp, Artificial
  Probe
cagtgcaaagtttctgtgggagcct

SEQ ID NO: 297306 - DNA, 25 bp, Artificial
  Probe
tttgtgcccagaaaaccagtgcaaa

SEQ ID NO: 297307 - DNA, 25 bp, Artificial
  Probe
atgagtattttgtgcccagaaaacc

SEQ ID NO: 297308 - DNA, 25 bp, Artificial
  Probe
tgtgggagcctcataaccaatcctt

SEQ ID NO: 297309 - DNA, 25 bp, Artificial
  Probe
accaatcctttcagattaggatttg

SEQ ID NO: 297310 - DNA, 25 bp, Artificial
  Probe
cccagaaaaccagtgcaaagtttct

SEQ ID NO: 297311 - DNA, 25 bp, Artificial
  Probe
agaaactgcccaatgagtattttgt

SEQ ID NO: 297312 - DNA, 25 bp, Artificial
  Probe
gtattttgtgcccagaaaaccagtg

SEQ ID NO: 297313 - DNA, 25 bp, Artificial
  Probe
tgtgcccagaaaaccagtgcaaagt

SEQ ID NO: 297314 - DNA, 25 bp, Artificial
  Probe
tgcccaatgagtattttgtgcccag

SEQ ID NO: 297315 - DNA, 25 bp, Artificial
  Probe
caatcctttcagattaggatttgtt

SEQ ID NO: 297316 - DNA, 25 bp, Artificial
  Probe
ccagaaaaccagtgcaaagtttctg

SEQ ID NO: 297317 - DNA, 25 bp, Artificial
  Probe
aaccagtgcaaagtttctgtgggag

SEQ ID NO: 297318 - DNA, 25 bp, Artificial
  Probe
aatgagtattttgtgcccagaaaac

SEQ ID NO: 297319 - DNA, 25 bp, Artificial
  Probe
tagaaactgcccaatgagtattttg

SEQ ID NO: 297320 - DNA, 25 bp, Artificial
  Probe
gtgcccagaaaaccagtgcaaagtt

SEQ ID NO: 297321 - DNA, 25 bp, Artificial
  Probe
ggagcctcataaccaatcctttcag

SEQ ID NO: 297322 - DNA, 25 bp, Artificial
  Probe
gggagcctcataaccaatcctttca

SEQ ID NO: 297323 - DNA, 25 bp, Artificial
  Probe
acatgtgcctagagagtacctaggt

SEQ ID NO: 297324 - DNA, 25 bp, Artificial
  Probe
cttgttcttcctcctgctgaactgc

SEQ ID NO: 297325 - DNA, 25 bp, Artificial
  Probe
ttcctcctgctgaactgctggggtg

SEQ ID NO: 297326 - DNA, 25 bp, Artificial
  Probe
atgtgcctagagagtacctaggtag

SEQ ID NO: 297327 - DNA, 25 bp, Artificial
  Probe
ttgttcttcctcctgctgaactgct

SEQ ID NO: 297328 - DNA, 25 bp, Artificial
  Probe
ctaaataatccacatgtgcctagag

SEQ ID NO: 297329 - DNA, 25 bp, Artificial
  Probe
cgcctcaaacgattgacacctctga

SEQ ID NO: 297330 - DNA, 25 bp, Artificial
  Probe
cacatgtgcctagagagtacctagg

SEQ ID NO: 297331 - DNA, 25 bp, Artificial
  Probe
ataatccacatgtgcctagagagta

SEQ ID NO: 297332 - DNA, 25 bp, Artificial
  Probe
tgcctagagagtacctaggtagaaa

SEQ ID NO: 297333 - DNA, 25 bp, Artificial
  Probe
gcctcaaacgattgacacctctgat

SEQ ID NO: 297334 - DNA, 25 bp, Artificial
  Probe
tgtgcctagagagtacctaggtaga

SEQ ID NO: 297335 - DNA, 25 bp, Artificial
  Probe
acgattgacacctctgatattcagg

SEQ ID NO: 297336 - DNA, 25 bp, Artificial
  Probe
catgtgcctagagagtacctaggta

SEQ ID NO: 297337 - DNA, 25 bp, Artificial
  Probe
gctgattgaaaccaacttcttgttc

SEQ ID NO: 297338 - DNA, 25 bp, Artificial
  Probe
tcctcctgctgaactgctggggtga

SEQ ID NO: 297339 - DNA, 25 bp, Artificial
  Probe
aaacaaaaccataaaataattgctg

SEQ ID NO: 297340 - DNA, 25 bp, Artificial
  Probe
gacacctctgatattcaggaaacat

SEQ ID NO: 297341 - DNA, 25 bp, Artificial
  Probe
ttgacacctctgatattcaggaaac

SEQ ID NO: 297342 - DNA, 25 bp, Artificial
  Probe
cgattgacacctctgatattcagga

SEQ ID NO: 297343 - DNA, 25 bp, Artificial
  Probe
tcgcctcaaacgattgacacctctg

SEQ ID NO: 297344 - DNA, 25 bp, Artificial
  Probe
attgacacctctgatattcaggaaa

SEQ ID NO: 297345 - DNA, 25 bp, Artificial
  Probe
tcttgttcttcctcctgctgaactg

SEQ ID NO: 297346 - DNA, 25 bp, Artificial
  Probe
tccacatgtgcctagagagtaccta

SEQ ID NO: 297347 - DNA, 25 bp, Artificial
  Probe
atccacatgtgcctagagagtacct

SEQ ID NO: 297348 - DNA, 25 bp, Artificial
  Probe
tcttcctcctgctgaactgctgggg

SEQ ID NO: 297349 - DNA, 25 bp, Artificial
  Probe
gaaagctatttttacatccctcgcc

SEQ ID NO: 297350 - DNA, 25 bp, Artificial
  Probe
ccacatgtgcctagagagtacctag

SEQ ID NO: 297351 - DNA, 25 bp, Artificial
  Probe
ttcttcctcctgctgaactgctggg

SEQ ID NO: 297352 - DNA, 25 bp, Artificial
  Probe
ctctacaattattgactaaataatc

SEQ ID NO: 297353 - DNA, 25 bp, Artificial
  Probe
cttcctcctgctgaactgctggggt

SEQ ID NO: 297354 - DNA, 25 bp, Artificial
  Probe
aacgattgacacctctgatattcag

SEQ ID NO: 297355 - DNA, 25 bp, Artificial
  Probe
ctgattgaaaccaacttcttgttct

SEQ ID NO: 297356 - DNA, 25 bp, Artificial
  Probe
gattgacacctctgatattcaggaa

SEQ ID NO: 297357 - DNA, 25 bp, Artificial
  Probe
gttcttcctcctgctgaactgctgg

SEQ ID NO: 297358 - DNA, 25 bp, Artificial
  Probe
gactaaataatccacatgtgcctag

SEQ ID NO: 297359 - DNA, 25 bp, Artificial
  Probe
cctagagagtacctaggtagaaagc

SEQ ID NO: 297360 - DNA, 25 bp, Artificial
  Probe
aaacgattgacacctctgatattca

SEQ ID NO: 297361 - DNA, 25 bp, Artificial
  Probe
taaataatccacatgtgcctagaga

SEQ ID NO: 297362 - DNA, 25 bp, Artificial
  Probe
tattcatttgtactaagaaaaaatg

SEQ ID NO: 297363 - DNA, 25 bp, Artificial
  Probe
tgacacctctgatattcaggaaaca

SEQ ID NO: 297364 - DNA, 25 bp, Artificial
  Probe
agctttctctacaattattgactaa

SEQ ID NO: 297365 - DNA, 25 bp, Artificial
  Probe
aaaccataaaataattgctgattga

SEQ ID NO: 297366 - DNA, 25 bp, Artificial
  Probe
cctctgatattcaggaaacattaaa

SEQ ID NO: 297367 - DNA, 25 bp, Artificial
  Probe
gtgcctagagagtacctaggtagaa

SEQ ID NO: 297368 - DNA, 25 bp, Artificial
  Probe
ttttagtaaagctttctctacaatt

SEQ ID NO: 297369 - DNA, 25 bp, Artificial
  Probe
ccctaccttaggaaggtgtgatatc

SEQ ID NO: 297370 - DNA, 25 bp, Artificial
  Probe
tcccagcgcagaagcctttcctttg

SEQ ID NO: 297371 - DNA, 25 bp, Artificial
  Probe
tgtgttggtactgatcattgcgggc

SEQ ID NO: 297372 - DNA, 25 bp, Artificial
  Probe
aatactatgtggacgagcagtggcc

SEQ ID NO: 297373 - DNA, 25 bp, Artificial
  Probe
tgggccccgctgctcttgaacagat

SEQ ID NO: 297374 - DNA, 25 bp, Artificial
  Probe
actggacctggcaagaggggtctca

SEQ ID NO: 297375 - DNA, 25 bp, Artificial
  Probe
gaaaggctgacttccttctctatta

SEQ ID NO: 297376 - DNA, 25 bp, Artificial
  Probe
gcttctccacaggtcagggtgcttt

SEQ ID NO: 297377 - DNA, 25 bp, Artificial
  Probe
ctatcgggatggtgaagtctgtcaa

SEQ ID NO: 297378 - DNA, 25 bp, Artificial
  Probe
cacaacagagtctggggaaagatca

SEQ ID NO: 297379 - DNA, 25 bp, Artificial
  Probe
agatcatacgggtttgggcttctcc

SEQ ID NO: 297380 - DNA, 25 bp, Artificial
  Probe
ctgtcaaacgggagatgaatggtac

SEQ ID NO: 297381 - DNA, 25 bp, Artificial
  Probe
agaccctggtgaaggggcacaacag

SEQ ID NO: 297382 - DNA, 25 bp, Artificial
  Probe
agatcaatggacagcatttacccct

SEQ ID NO: 297383 - DNA, 25 bp, Artificial
  Probe
ggcaagactgtgaactcgtgacctg

SEQ ID NO: 297384 - DNA, 25 bp, Artificial
  Probe
tgtcacaggacaggacagtggcctg

SEQ ID NO: 297385 - DNA, 25 bp, Artificial
  Probe
aaaggaacaccatgcttcctctgac

SEQ ID NO: 297386 - DNA, 25 bp, Artificial
  Probe
gaggccctaaaactcaaggtacaag

SEQ ID NO: 297387 - DNA, 25 bp, Artificial
  Probe
agtggcctggggatgcatacttgta

SEQ ID NO: 297388 - DNA, 25 bp, Artificial
  Probe
acctcctctggctgtcacaggacag

SEQ ID NO: 297389 - DNA, 25 bp, Artificial
  Probe
atgaatggtacctacaagtgccgtg

SEQ ID NO: 297390 - DNA, 25 bp, Artificial
  Probe
ggcacaacagagtctggggaaagat

SEQ ID NO: 297391 - DNA, 25 bp, Artificial
  Probe
cggctccacctcaaagagaatgcct

SEQ ID NO: 297392 - DNA, 25 bp, Artificial
  Probe
tccttctctattacccctgctgagg

SEQ ID NO: 297393 - DNA, 25 bp, Artificial
  Probe
ctggagtctcccagcaccagcatgg

SEQ ID NO: 297394 - DNA, 25 bp, Artificial
  Probe
agcctcaggcctaagaggactcgga

SEQ ID NO: 297395 - DNA, 25 bp, Artificial
  Probe
gctgatttctttcacgagtcatata

SEQ ID NO: 297396 - DNA, 25 bp, Artificial
  Probe
tatttattgagtaccctgtacagac

SEQ ID NO: 297397 - DNA, 25 bp, Artificial
  Probe
aagagctgatttctttcacgagtca

SEQ ID NO: 297398 - DNA, 25 bp, Artificial
  Probe
accgccagaggaagatcaggatata

SEQ ID NO: 297399 - DNA, 25 bp, Artificial
  Probe
aattatggtcaatccctgcatgcct

SEQ ID NO: 297400 - DNA, 25 bp, Artificial
  Probe
tctcagcagactcttacatgccagc

SEQ ID NO: 297401 - DNA, 25 bp, Artificial
  Probe
tagaagggtcctgcaagctgttgtg

SEQ ID NO: 297402 - DNA, 25 bp, Artificial
  Probe
acactagaggagtgagcaggttaac

SEQ ID NO: 297403 - DNA, 25 bp, Artificial
  Probe
gagaaaatgttccaaccacttagaa

SEQ ID NO: 297404 - DNA, 25 bp, Artificial
  Probe
tgtcaaccaccatgcctaaatatgg

SEQ ID NO: 297405 - DNA, 25 bp, Artificial
  Probe
agtggccctctgctcgtagacctct

SEQ ID NO: 297406 - DNA, 25 bp, Artificial
  Probe
atgatcagaatacctgggtcataat

SEQ ID NO: 297407 - DNA, 25 bp, Artificial
  Probe
acaagttacagaaggctcaggagga

SEQ ID NO: 297408 - DNA, 25 bp, Artificial
  Probe
taccttaggaaggtgtgatatccgg

SEQ ID NO: 297409 - DNA, 25 bp, Artificial
  Probe
agaatgcctgggagaaaatgttcca

SEQ ID NO: 297410 - DNA, 25 bp, Artificial
  Probe
ccggtagacacaagcaagagaagaa

SEQ ID NO: 297411 - DNA, 25 bp, Artificial
  Probe
gtccccaactcttgttgatgtattt

SEQ ID NO: 297412 - DNA, 25 bp, Artificial
  Probe
ccctaatctgacctgcagccggaaa

SEQ ID NO: 297413 - DNA, 25 bp, Artificial
  Probe
tggagtctcccagcaccagcatggg

SEQ ID NO: 297414 - DNA, 25 bp, Artificial
  Probe
tagaccctggtgaaggggcacaaca

SEQ ID NO: 297415 - DNA, 25 bp, Artificial
  Probe
aagcgggctaagtcggtgctcaccg

SEQ ID NO: 297416 - DNA, 25 bp, Artificial
  Probe
acaagccctcctggagctcaaggct

SEQ ID NO: 297417 - DNA, 25 bp, Artificial
  Probe
agaagagtcccaggtggtctagcag

SEQ ID NO: 297418 - DNA, 25 bp, Artificial
  Probe
aagtcggtgctcaccgtcattaaat

SEQ ID NO: 297419 - DNA, 25 bp, Artificial
  Probe
tcattcagaaaagcagacgactcct

SEQ ID NO: 297420 - DNA, 25 bp, Artificial
  Probe
ccaagtatcctcagggcaggttctg

SEQ ID NO: 297421 - DNA, 25 bp, Artificial
  Probe
gtcacagatgagaccctgagcttca

SEQ ID NO: 297422 - DNA, 25 bp, Artificial
  Probe
agtgcagtacaaagctgtgaaggac

SEQ ID NO: 297423 - DNA, 25 bp, Artificial
  Probe
tgacaagcagggtctctcctactca

SEQ ID NO: 297424 - DNA, 25 bp, Artificial
  Probe
cggtgctcaccgtcattaaatggaa

SEQ ID NO: 297425 - DNA, 25 bp, Artificial
  Probe
gagaaatccaagtatcctcagggca

SEQ ID NO: 297426 - DNA, 25 bp, Artificial
  Probe
tcctggttgtcctaagccccaacta

SEQ ID NO: 297427 - DNA, 25 bp, Artificial
  Probe
tcaaggctggcctagaaaatatggc

SEQ ID NO: 297428 - DNA, 25 bp, Artificial
  Probe
ctgcaggtggccatgccagtgaaga

SEQ ID NO: 297429 - DNA, 25 bp, Artificial
  Probe
tatcctcagggcaggttctggaagc

SEQ ID NO: 297430 - DNA, 25 bp, Artificial
  Probe
ctcagggcaggttctggaagcagct

SEQ ID NO: 297431 - DNA, 25 bp, Artificial
  Probe
ccagggaacacaagccctcctggag

SEQ ID NO: 297432 - DNA, 25 bp, Artificial
  Probe
ggagctcaaggctggcctagaaaat

SEQ ID NO: 297433 - DNA, 25 bp, Artificial
  Probe
cagtacaaagctgtgaaggacttga

SEQ ID NO: 297434 - DNA, 25 bp, Artificial
  Probe
agcagctgcaggtggccatgccagt

SEQ ID NO: 297435 - DNA, 25 bp, Artificial
  Probe
ccctgggggaattgtcacagatgag

SEQ ID NO: 297436 - DNA, 25 bp, Artificial
  Probe
caccgtcattaaatggaaaggggag

SEQ ID NO: 297437 - DNA, 25 bp, Artificial
  Probe
gaacacaagccctcctggagctcaa

SEQ ID NO: 297438 - DNA, 25 bp, Artificial
  Probe
ctcctggagctcaaggctggcctag

SEQ ID NO: 297439 - DNA, 25 bp, Artificial
  Probe
agggtctctcctactcatccctgaa

SEQ ID NO: 297440 - DNA, 25 bp, Artificial
  Probe
acaagcagggtctctcctactcatc

SEQ ID NO: 297441 - DNA, 25 bp, Artificial
  Probe
ctcccggggcaacatcaacgtcatt

SEQ ID NO: 297442 - DNA, 25 bp, Artificial
  Probe
tggtctagcagtgacaagcagggtc

SEQ ID NO: 297443 - DNA, 25 bp, Artificial
  Probe
gactcctggttgtcctaagccccaa

SEQ ID NO: 297444 - DNA, 25 bp, Artificial
  Probe
agcagtgacaagcagggtctctcct

SEQ ID NO: 297445 - DNA, 25 bp, Artificial
  Probe
ctcatccctgaaaaacgtatgaaag

SEQ ID NO: 297446 - DNA, 25 bp, Artificial
  Probe
cccaggtggtctagcagtgacaagc

SEQ ID NO: 297447 - DNA, 25 bp, Artificial
  Probe
ccatgccagtgaagaagagtcccag

SEQ ID NO: 297448 - DNA, 25 bp, Artificial
  Probe
ctggttgtcctaagccccaactacg

SEQ ID NO: 297449 - DNA, 25 bp, Artificial
  Probe
aaagcagacgactcctggttgtcct

SEQ ID NO: 297450 - DNA, 25 bp, Artificial
  Probe
aattgtcacagatgagaccctgagc

SEQ ID NO: 297451 - DNA, 25 bp, Artificial
  Probe
aggctggcctagaaaatatggcctc

SEQ ID NO: 297452 - DNA, 25 bp, Artificial
  Probe
tgcaggtggccatgccagtgaagaa

SEQ ID NO: 297453 - DNA, 25 bp, Artificial
  Probe
gaagcagctgcaggtggccatgcca

SEQ ID NO: 297454 - DNA, 25 bp, Artificial
  Probe
tccagggaacacaagccctcctgga

SEQ ID NO: 297455 - DNA, 25 bp, Artificial
  Probe
gtggccatgccagtgaagaagagtc

SEQ ID NO: 297456 - DNA, 25 bp, Artificial
  Probe
agccccaactacgtgctccagggaa

SEQ ID NO: 297457 - DNA, 25 bp, Artificial
  Probe
actacgtgctccagggaacacaagc

SEQ ID NO: 297458 - DNA, 25 bp, Artificial
  Probe
taagccccaactacgtgctccaggg

SEQ ID NO: 297459 - DNA, 25 bp, Artificial
  Probe
ctgaagcgggctaagtcggtgctca

SEQ ID NO: 297460 - DNA, 25 bp, Artificial
  Probe
cattttagtgcagtacaaagctgtg

SEQ ID NO: 297461 - DNA, 25 bp, Artificial
  Probe
aatgagggcagctccccaagacgct

SEQ ID NO: 297462 - DNA, 25 bp, Artificial
  Probe
ttttccaaaccgaaggaggatgtat

SEQ ID NO: 297463 - DNA, 25 bp, Artificial
  Probe
cgtcacaggcagaatgaaagaccta

SEQ ID NO: 297464 - DNA, 25 bp, Artificial
  Probe
ttgtttactttgtacaatcctcagg

SEQ ID NO: 297465 - DNA, 25 bp, Artificial
  Probe
tccccaagacgctccagtgaggatt

SEQ ID NO: 297466 - DNA, 25 bp, Artificial
  Probe
gagacatgagcgatcccttcaagtc

SEQ ID NO: 297467 - DNA, 25 bp, Artificial
  Probe
ccaaaccgaaggaggatgtattcta

SEQ ID NO: 297468 - DNA, 25 bp, Artificial
  Probe
tcataataaactagacactgttggt

SEQ ID NO: 297469 - DNA, 25 bp, Artificial
  Probe
tttgagaatgtgtggctgagacccg

SEQ ID NO: 297470 - DNA, 25 bp, Artificial
  Probe
acaccggaacaatgagtgtgcataa

SEQ ID NO: 297471 - DNA, 25 bp, Artificial
  Probe
atgttaagcagcaccctcaagactg

SEQ ID NO: 297472 - DNA, 25 bp, Artificial
  Probe
tcctttttaactcatgggtacccag

SEQ ID NO: 297473 - DNA, 25 bp, Artificial
  Probe
cgctccagtgaggatttaagcacct

SEQ ID NO: 297474 - DNA, 25 bp, Artificial
  Probe
cctgccacgccgaaagaggatgggt

SEQ ID NO: 297475 - DNA, 25 bp, Artificial
  Probe
gcatccaaggagtcggctccagggt

SEQ ID NO: 297476 - DNA, 25 bp, Artificial
  Probe
gcaatcctcctttttaactcatggg

SEQ ID NO: 297477 - DNA, 25 bp, Artificial
  Probe
cacgccgaaagaggatgggtttact

SEQ ID NO: 297478 - DNA, 25 bp, Artificial
  Probe
gagcgatcccttcaagtcaaaaatc

SEQ ID NO: 297479 - DNA, 25 bp, Artificial
  Probe
aagcactgtgacaccggaacaatga

SEQ ID NO: 297480 - DNA, 25 bp, Artificial
  Probe
gattcacaaccaggacctcacgtct

SEQ ID NO: 297481 - DNA, 25 bp, Artificial
  Probe
aatcatagtgccatagaaggttctg

SEQ ID NO: 297482 - DNA, 25 bp, Artificial
  Probe
ggatgttaagcagcaccctcaagac

SEQ ID NO: 297483 - DNA, 25 bp, Artificial
  Probe
gtacccagactcgaactctttcacg

SEQ ID NO: 297484 - DNA, 25 bp, Artificial
  Probe
ctcaccaacccttaggcagcaatga

SEQ ID NO: 297485 - DNA, 25 bp, Artificial
  Probe
ccatagaaggttctggactgtatag

SEQ ID NO: 297486 - DNA, 25 bp, Artificial
  Probe
aattatttcatatggaactgttcgc

SEQ ID NO: 297487 - DNA, 25 bp, Artificial
  Probe
ctgagttccttttaagaattaagct

SEQ ID NO: 297488 - DNA, 25 bp, Artificial
  Probe
ctgtatagttgtacttgctgatgct

SEQ ID NO: 297489 - DNA, 25 bp, Artificial
  Probe
acgattcacaaccaggacctcacgt

SEQ ID NO: 297490 - DNA, 25 bp, Artificial
  Probe
gatgcatcccttacagtttgtttac

SEQ ID NO: 297491 - DNA, 25 bp, Artificial
  Probe
tgccagcatcaacttccagaagcaa

SEQ ID NO: 297492 - DNA, 25 bp, Artificial
  Probe
gtgtgcataaacttcatcttgaact

SEQ ID NO: 297493 - DNA, 25 bp, Artificial
  Probe
gtgttccatgacacgccgctgtaaa

SEQ ID NO: 297494 - DNA, 25 bp, Artificial
  Probe
agcaacaagaaagcactgtgacacc

SEQ ID NO: 297495 - DNA, 25 bp, Artificial
  Probe
cgtcttcctcctcagtagatggtac

SEQ ID NO: 297496 - DNA, 25 bp, Artificial
  Probe
gatttaagcacctatgccagcatca

SEQ ID NO: 297497 - DNA, 25 bp, Artificial
  Probe
acttcatcttgaactttaaggacag

SEQ ID NO: 297498 - DNA, 25 bp, Artificial
  Probe
aagagccagtgtgctccctgccacg

SEQ ID NO: 297499 - DNA, 25 bp, Artificial
  Probe
gagcatccaaggagtcggctccagg

SEQ ID NO: 297500 - DNA, 25 bp, Artificial
  Probe
aggatgggtttactctcgtcaaatt

SEQ ID NO: 297501 - DNA, 25 bp, Artificial
  Probe
catatggaactgttcgcgttgggtg

SEQ ID NO: 297502 - DNA, 25 bp, Artificial
  Probe
aggatttaagcacctatgccagcat

SEQ ID NO: 297503 - DNA, 25 bp, Artificial
  Probe
ttctggactgtatagttgtacttgc

SEQ ID NO: 297504 - DNA, 25 bp, Artificial
  Probe
gctgatgctgtctcttgtaatataa

SEQ ID NO: 297505 - DNA, 25 bp, Artificial
  Probe
taaacttgatgtcgagctgagttcc

SEQ ID NO: 297506 - DNA, 25 bp, Artificial
  Probe
tattgtgccaagcaacaagaaagca

SEQ ID NO: 297507 - DNA, 25 bp, Artificial
  Probe
caagttttgttcacaggtcttaaga

SEQ ID NO: 297508 - DNA, 25 bp, Artificial
  Probe
ctagcaaatgcctaatgttctggag

SEQ ID NO: 297509 - DNA, 25 bp, Artificial
  Probe
gcactactttctatgctgaagcccg

SEQ ID NO: 297510 - DNA, 25 bp, Artificial
  Probe
atcttaagccataattgctgtagct

SEQ ID NO: 297511 - DNA, 25 bp, Artificial
  Probe
ttgcactactttctatgctgaagcc

SEQ ID NO: 297512 - DNA, 25 bp, Artificial
  Probe
agcccgagagagacttcatactgtg

SEQ ID NO: 297513 - DNA, 25 bp, Artificial
  Probe
acaagttttgttcacaggtcttaag

SEQ ID NO: 297514 - DNA, 25 bp, Artificial
  Probe
agacttcatactgtgaatgtttact

SEQ ID NO: 297515 - DNA, 25 bp, Artificial
  Probe
agaattccggcattttgttgcatat

SEQ ID NO: 297516 - DNA, 25 bp, Artificial
  Probe
cacaggtcttaagactggaattttt

SEQ ID NO: 297517 - DNA, 25 bp, Artificial
  Probe
ttttgcactactttctatgctgaag

SEQ ID NO: 297518 - DNA, 25 bp, Artificial
  Probe
taagccataattgctgtagctgctg

SEQ ID NO: 297519 - DNA, 25 bp, Artificial
  Probe
gatatactagcaaatgcctaatgtt

SEQ ID NO: 297520 - DNA, 25 bp, Artificial
  Probe
agttttgttcacaggtcttaagact

SEQ ID NO: 297521 - DNA, 25 bp, Artificial
  Probe
agatatactagcaaatgcctaatgt

SEQ ID NO: 297522 - DNA, 25 bp, Artificial
  Probe
ttccggcattttgttgcatatttaa

SEQ ID NO: 297523 - DNA, 25 bp, Artificial
  Probe
gatcttaagccataattgctgtagc

SEQ ID NO: 297524 - DNA, 25 bp, Artificial
  Probe
actactttctatgctgaagcccgag

SEQ ID NO: 297525 - DNA, 25 bp, Artificial
  Probe
aattccggcattttgttgcatattt

SEQ ID NO: 297526 - DNA, 25 bp, Artificial
  Probe
tgctgtagctgctgggcgccttatt

SEQ ID NO: 297527 - DNA, 25 bp, Artificial
  Probe
ataattgctgtagctgctgggcgcc

SEQ ID NO: 297528 - DNA, 25 bp, Artificial
  Probe
tttgcactactttctatgctgaagc

SEQ ID NO: 297529 - DNA, 25 bp, Artificial
  Probe
cataattgctgtagctgctgggcgc

SEQ ID NO: 297530 - DNA, 25 bp, Artificial
  Probe
gttcacaggtcttaagactggaatt

SEQ ID NO: 297531 - DNA, 25 bp, Artificial
  Probe
agcaaatgcctaatgttctggagga

SEQ ID NO: 297532 - DNA, 25 bp, Artificial
  Probe
tgcactactttctatgctgaagccc

SEQ ID NO: 297533 - DNA, 25 bp, Artificial
  Probe
actttctatgctgaagcccgagaga

SEQ ID NO: 297534 - DNA, 25 bp, Artificial
  Probe
taacaagttttgttcacaggtctta

SEQ ID NO: 297535 - DNA, 25 bp, Artificial
  Probe
tagcaaatgcctaatgttctggagg

SEQ ID NO: 297536 - DNA, 25 bp, Artificial
  Probe
ctttctatgctgaagcccgagagag

SEQ ID NO: 297537 - DNA, 25 bp, Artificial
  Probe
tactttctatgctgaagcccgagag

SEQ ID NO: 297538 - DNA, 25 bp, Artificial
  Probe
caaatgcctaatgttctggaggaaa

SEQ ID NO: 297539 - DNA, 25 bp, Artificial
  Probe
tcttaagccataattgctgtagctg

SEQ ID NO: 297540 - DNA, 25 bp, Artificial
  Probe
gccataattgctgtagctgctgggc

SEQ ID NO: 297541 - DNA, 25 bp, Artificial
  Probe
attgctgtagctgctgggcgcctta

SEQ ID NO: 297542 - DNA, 25 bp, Artificial
  Probe
gtaacaagttttgttcacaggtctt

SEQ ID NO: 297543 - DNA, 25 bp, Artificial
  Probe
gttttgttcacaggtcttaagactg

SEQ ID NO: 297544 - DNA, 25 bp, Artificial
  Probe
gacttcatactgtgaatgtttacta

SEQ ID NO: 297545 - DNA, 25 bp, Artificial
  Probe
cctaatgttctggaggaaatgtaac

SEQ ID NO: 297546 - DNA, 25 bp, Artificial
  Probe
gagacttcatactgtgaatgtttac

SEQ ID NO: 297547 - DNA, 25 bp, Artificial
  Probe
gaagcccgagagagacttcatactg

SEQ ID NO: 297548 - DNA, 25 bp, Artificial
  Probe
aattgctgtagctgctgggcgcctt

SEQ ID NO: 297549 - DNA, 25 bp, Artificial
  Probe
agatcttaagccataattgctgtag

SEQ ID NO: 297550 - DNA, 25 bp, Artificial
  Probe
ccataattgctgtagctgctgggcg

SEQ ID NO: 297551 - DNA, 25 bp, Artificial
  Probe
ttgttcacaggtcttaagactggaa

SEQ ID NO: 297552 - DNA, 25 bp, Artificial
  Probe
tttctatgctgaagcccgagagaga

SEQ ID NO: 297553 - DNA, 25 bp, Artificial
  Probe
agttgttcaggtttctgtgttctca

SEQ ID NO: 297554 - DNA, 25 bp, Artificial
  Probe
ttaacaagtatgacattccatgacg

SEQ ID NO: 297555 - DNA, 25 bp, Artificial
  Probe
ctagccgtgaaacagatttgtaaag

SEQ ID NO: 297556 - DNA, 25 bp, Artificial
  Probe
tggcaccagtgaagctggccacagg

SEQ ID NO: 297557 - DNA, 25 bp, Artificial
  Probe
gatcccaagagaatccatagcattc

SEQ ID NO: 297558 - DNA, 25 bp, Artificial
  Probe
caccagtgaagctggccacaggggt

SEQ ID NO: 297559 - DNA, 25 bp, Artificial
  Probe
cagactggcaccagtgaagctggcc

SEQ ID NO: 297560 - DNA, 25 bp, Artificial
  Probe
ctcagggacaaagaccctaaaagag

SEQ ID NO: 297561 - DNA, 25 bp, Artificial
  Probe
gttccaaatttactttacatgggat

SEQ ID NO: 297562 - DNA, 25 bp, Artificial
  Probe
atgactgcattttgtacagcagtgc

SEQ ID NO: 297563 - DNA, 25 bp, Artificial
  Probe
tgtgactgtcttcacagaagcattt

SEQ ID NO: 297564 - DNA, 25 bp, Artificial
  Probe
tatgacattccatgacgcaggagcc

SEQ ID NO: 297565 - DNA, 25 bp, Artificial
  Probe
gccccttgagcctgggcatctgctt

SEQ ID NO: 297566 - DNA, 25 bp, Artificial
  Probe
acaagtatgacattccatgacgcag

SEQ ID NO: 297567 - DNA, 25 bp, Artificial
  Probe
ttaaaaagcttagatcccaagagaa

SEQ ID NO: 297568 - DNA, 25 bp, Artificial
  Probe
ctattggtgcttctggtctaggaga

SEQ ID NO: 297569 - DNA, 25 bp, Artificial
  Probe
atagccagttttctacacccagcag

SEQ ID NO: 297570 - DNA, 25 bp, Artificial
  Probe
gagttgttcaggtttctgtgttctc

SEQ ID NO: 297571 - DNA, 25 bp, Artificial
  Probe
tttttatggccgatgactgcatttt

SEQ ID NO: 297572 - DNA, 25 bp, Artificial
  Probe
tttaaaaagcttagatcccaagaga

SEQ ID NO: 297573 - DNA, 25 bp, Artificial
  Probe
cctcactggaagatggatgcattca

SEQ ID NO: 297574 - DNA, 25 bp, Artificial
  Probe
accaccgagtatttaagcccacctg

SEQ ID NO: 297575 - DNA, 25 bp, Artificial
  Probe
acagcagtgcacatgaagaatattt

SEQ ID NO: 297576 - DNA, 25 bp, Artificial
  Probe
tctgggatgtactattggtgcttct

SEQ ID NO: 297577 - DNA, 25 bp, Artificial
  Probe
ggacactcagggacaaagaccctaa

SEQ ID NO: 297578 - DNA, 25 bp, Artificial
  Probe
cgtgttccaaatttactttacatgg

SEQ ID NO: 297579 - DNA, 25 bp, Artificial
  Probe
agcttagatcccaagagaatccata

SEQ ID NO: 297580 - DNA, 25 bp, Artificial
  Probe
atccaggcagactggcaccagtgaa

SEQ ID NO: 297581 - DNA, 25 bp, Artificial
  Probe
tacacccagcagagggataatcaaa

SEQ ID NO: 297582 - DNA, 25 bp, Artificial
  Probe
ttctgggatgtactattggtgcttc

SEQ ID NO: 297583 - DNA, 25 bp, Artificial
  Probe
cttcttattattctgggatgtacta

SEQ ID NO: 297584 - DNA, 25 bp, Artificial
  Probe
gactgcattttgtacagcagtgcac

SEQ ID NO: 297585 - DNA, 25 bp, Artificial
  Probe
atggatgcattcatagccagttttc

SEQ ID NO: 297586 - DNA, 25 bp, Artificial
  Probe
caaagaccctaaaagagttgttcag

SEQ ID NO: 297587 - DNA, 25 bp, Artificial
  Probe
gagatccaggcagactggcaccagt

SEQ ID NO: 297588 - DNA, 25 bp, Artificial
  Probe
gcttcttattattctgggatgtact

SEQ ID NO: 297589 - DNA, 25 bp, Artificial
  Probe
ggatgtactattggtgcttctggtc

SEQ ID NO: 297590 - DNA, 25 bp, Artificial
  Probe
ggatgcattcatagccagttttcta

SEQ ID NO: 297591 - DNA, 25 bp, Artificial
  Probe
ccaccgagtatttaagcccacctgg

SEQ ID NO: 297592 - DNA, 25 bp, Artificial
  Probe
gtatttaagcccacctggtcaccca

SEQ ID NO: 297593 - DNA, 25 bp, Artificial
  Probe
ttttctacacccagcagagggataa

SEQ ID NO: 297594 - DNA, 25 bp, Artificial
  Probe
aggcagactggcaccagtgaagctg

SEQ ID NO: 297595 - DNA, 25 bp, Artificial
  Probe
agtgctgagccctcactggaagatg

SEQ ID NO: 297596 - DNA, 25 bp, Artificial
  Probe
gggtgccccttgagcctgggcatct

SEQ ID NO: 297597 - DNA, 25 bp, Artificial
  Probe
cactcagggacaaagaccctaaaag

SEQ ID NO: 297598 - DNA, 25 bp, Artificial
  Probe
ccagttttctacacccagcagaggg

SEQ ID NO: 297599 - DNA, 25 bp, Artificial
  Probe
ttcaccctgggcatcatgctgagtt

SEQ ID NO: 297600 - DNA, 25 bp, Artificial
  Probe
acatcgagtcggacgcctggcagga

SEQ ID NO: 297601 - DNA, 25 bp, Artificial
  Probe
gtgtacatcgagtcggacgcctggc

SEQ ID NO: 297602 - DNA, 25 bp, Artificial
  Probe
tcattgaaaaccaggcggccgtaga

SEQ ID NO: 297603 - DNA, 25 bp, Artificial
  Probe
tccacatcagggaaaccgtgaagcc

SEQ ID NO: 297604 - DNA, 25 bp, Artificial
  Probe
agggaaaccgtgaagccccaggatg

SEQ ID NO: 297605 - DNA, 25 bp, Artificial
  Probe
caaatgcctgccagtctttattgta

SEQ ID NO: 297606 - DNA, 25 bp, Artificial
  Probe
gtcccagctccgagatgacagcaag

SEQ ID NO: 297607 - DNA, 25 bp, Artificial
  Probe
gcttcttcaccctgggcatcatgct

SEQ ID NO: 297608 - DNA, 25 bp, Artificial
  Probe
tccacaactgttctgccttttctgg

SEQ ID NO: 297609 - DNA, 25 bp, Artificial
  Probe
caggatggccctgtccaattccaca

SEQ ID NO: 297610 - DNA, 25 bp, Artificial
  Probe
ttctgccttttctggcctcgctgtg

SEQ ID NO: 297611 - DNA, 25 bp, Artificial
  Probe
cacatcagggaaaccgtgaagcccc

SEQ ID NO: 297612 - DNA, 25 bp, Artificial
  Probe
gctatgtcattgaaaaccaggcggc

SEQ ID NO: 297613 - DNA, 25 bp, Artificial
  Probe
ctttattgtagaggtacccttgagt

SEQ ID NO: 297614 - DNA, 25 bp, Artificial
  Probe
ctcgtaggtcccagctccgagatga

SEQ ID NO: 297615 - DNA, 25 bp, Artificial
  Probe
tatcctcatggtgctgggtttcttc

SEQ ID NO: 297616 - DNA, 25 bp, Artificial
  Probe
ccttttctggcctcgctgtggcagg

SEQ ID NO: 297617 - DNA, 25 bp, Artificial
  Probe
ttcggcttcttcaccctgggcatca

SEQ ID NO: 297618 - DNA, 25 bp, Artificial
  Probe
gagttacatccgatccaagaagctg

SEQ ID NO: 297619 - DNA, 25 bp, Artificial
  Probe
ccacaactgttctgccttttctggc

SEQ ID NO: 297620 - DNA, 25 bp, Artificial
  Probe
aactgttctgccttttctggcctcg

SEQ ID NO: 297621 - DNA, 25 bp, Artificial
  Probe
acagcaagctggaggctctctatat

SEQ ID NO: 297622 - DNA, 25 bp, Artificial
  Probe
ttctggcctcgctgtggcaggaaac

SEQ ID NO: 297623 - DNA, 25 bp, Artificial
  Probe
tagtcaaatgcctgccagtctttat

SEQ ID NO: 297624 - DNA, 25 bp, Artificial
  Probe
ctggcctcgctgtggcaggaaacag

SEQ ID NO: 297625 - DNA, 25 bp, Artificial
  Probe
ggcggccgtagaacaacctgccaca

SEQ ID NO: 297626 - DNA, 25 bp, Artificial
  Probe
ccaggcccgcgttctggagagcttc

SEQ ID NO: 297627 - DNA, 25 bp, Artificial
  Probe
tcgcacgaccctttcaacgtgtaca

SEQ ID NO: 297628 - DNA, 25 bp, Artificial
  Probe
ggccctgtccaattccacaactgtt

SEQ ID NO: 297629 - DNA, 25 bp, Artificial
  Probe
catggtgctgggtttcttcggcttc

SEQ ID NO: 297630 - DNA, 25 bp, Artificial
  Probe
tgctgggtttcttcggcttcttcac

SEQ ID NO: 297631 - DNA, 25 bp, Artificial
  Probe
taagtgggtctttctagtcaaatgc

SEQ ID NO: 297632 - DNA, 25 bp, Artificial
  Probe
gcttgctatgtcattgaaaaccagg

SEQ ID NO: 297633 - DNA, 25 bp, Artificial
  Probe
acaccttcctgaactgaagccactg

SEQ ID NO: 297634 - DNA, 25 bp, Artificial
  Probe
gtaggtcccagctccgagatgacag

SEQ ID NO: 297635 - DNA, 25 bp, Artificial
  Probe
ttcctgaactgaagccactgtcatg

SEQ ID NO: 297636 - DNA, 25 bp, Artificial
  Probe
atatgtcggcggacttggctcgtag

SEQ ID NO: 297637 - DNA, 25 bp, Artificial
  Probe
accaggcggccgtagaacaacctgc

SEQ ID NO: 297638 - DNA, 25 bp, Artificial
  Probe
tgctgagttacatccgatccaagaa

SEQ ID NO: 297639 - DNA, 25 bp, Artificial
  Probe
tcgctgtggcaggaaacagatgagc

SEQ ID NO: 297640 - DNA, 25 bp, Artificial
  Probe
gccactgtcatgaaccccatagtta

SEQ ID NO: 297641 - DNA, 25 bp, Artificial
  Probe
cctcgctgtggcaggaaacagatga

SEQ ID NO: 297642 - DNA, 25 bp, Artificial
  Probe
tggaacactcgcacgaccctttcaa

SEQ ID NO: 297643 - DNA, 25 bp, Artificial
  Probe
ggtttcttcggcttcttcaccctgg

SEQ ID NO: 297644 - DNA, 25 bp, Artificial
  Probe
gcggacttggctcgtaggtcccagc

SEQ ID NO: 297645 - DNA, 25 bp, Artificial
  Probe
caaccagcaggcacttggacggctg

SEQ ID NO: 297646 - DNA, 25 bp, Artificial
  Probe
tcccgacagtattgaaatggtagca

SEQ ID NO: 297647 - DNA, 25 bp, Artificial
  Probe
acgagcacaggcagccctggacaag

SEQ ID NO: 297648 - DNA, 25 bp, Artificial
  Probe
aatcctggcacataccatgggggat

SEQ ID NO: 297649 - DNA, 25 bp, Artificial
  Probe
accctgtgctaccagcccttgtggg

SEQ ID NO: 297650 - DNA, 25 bp, Artificial
  Probe
cagcaacgagcacaggcagccctgg

SEQ ID NO: 297651 - DNA, 25 bp, Artificial
  Probe
tggacacaatcctggcacataccat

SEQ ID NO: 297652 - DNA, 25 bp, Artificial
  Probe
ccacagcagatctagcactgggccg

SEQ ID NO: 297653 - DNA, 25 bp, Artificial
  Probe
ccctgtgctaccagcccttgtgggg

SEQ ID NO: 297654 - DNA, 25 bp, Artificial
  Probe
aggcccagcaacgagcacaggcagc

SEQ ID NO: 297655 - DNA, 25 bp, Artificial
  Probe
ctgcaagatgcacagcgggcacgga

SEQ ID NO: 297656 - DNA, 25 bp, Artificial
  Probe
gaaggacttcctcagccaggaggga

SEQ ID NO: 297657 - DNA, 25 bp, Artificial
  Probe
tgtgcgtcgggctgaacagctactg

SEQ ID NO: 297658 - DNA, 25 bp, Artificial
  Probe
cccagagggcacagggagctgctca

SEQ ID NO: 297659 - DNA, 25 bp, Artificial
  Probe
gagctgatcccgacagtattgaaat

SEQ ID NO: 297660 - DNA, 25 bp, Artificial
  Probe
agtgtctgagactcgtcggcaggca

SEQ ID NO: 297661 - DNA, 25 bp, Artificial
  Probe
accccgctgtggtggcctcggttgc

SEQ ID NO: 297662 - DNA, 25 bp, Artificial
  Probe
aatgtgaaggacttcctcagccagg

SEQ ID NO: 297663 - DNA, 25 bp, Artificial
  Probe
gctaatgcttctaggggccaagtgg

SEQ ID NO: 297664 - DNA, 25 bp, Artificial
  Probe
tgaaatggtagcaacacgggtgcta

SEQ ID NO: 297665 - DNA, 25 bp, Artificial
  Probe
tagcaacacgggtgctagacatctc

SEQ ID NO: 297666 - DNA, 25 bp, Artificial
  Probe
tggtggcatcctcagccgagtgtct

SEQ ID NO: 297667 - DNA, 25 bp, Artificial
  Probe
aaccagcaggcacttggacggctgt

SEQ ID NO: 297668 - DNA, 25 bp, Artificial
  Probe
gcaaccccgctgtggtggcctcggt

SEQ ID NO: 297669 - DNA, 25 bp, Artificial
  Probe
agatccagcgcctagcaagtgagat

SEQ ID NO: 297670 - DNA, 25 bp, Artificial
  Probe
cctggcggatgtggacacaatcctg

SEQ ID NO: 297671 - DNA, 25 bp, Artificial
  Probe
cgcctagcaagtgagattgcagaac

SEQ ID NO: 297672 - DNA, 25 bp, Artificial
  Probe
aagcctggcggatgtggacacaatc

SEQ ID NO: 297673 - DNA, 25 bp, Artificial
  Probe
ggtggcatcctcagccgagtgtctg

SEQ ID NO: 297674 - DNA, 25 bp, Artificial
  Probe
tcaggagcttcgagaacttatccag

SEQ ID NO: 297675 - DNA, 25 bp, Artificial
  Probe
ccatccggggagcagtggttgacac

SEQ ID NO: 297676 - DNA, 25 bp, Artificial
  Probe
cggatgtggacacaatcctggcaca

SEQ ID NO: 297677 - DNA, 25 bp, Artificial
  Probe
aatggtagcaacacgggtgctagac

SEQ ID NO: 297678 - DNA, 25 bp, Artificial
  Probe
acccataccctgagcctgacgggag

SEQ ID NO: 297679 - DNA, 25 bp, Artificial
  Probe
cacagcagatctagcactgggccgg

SEQ ID NO: 297680 - DNA, 25 bp, Artificial
  Probe
cagaggaggcccagcaacgagcaca

SEQ ID NO: 297681 - DNA, 25 bp, Artificial
  Probe
tcctcagccgagtgtctgagactcg

SEQ ID NO: 297682 - DNA, 25 bp, Artificial
  Probe
gggtgctagacatctccatcccagc

SEQ ID NO: 297683 - DNA, 25 bp, Artificial
  Probe
cctggacaaggctaatgcttctagg

SEQ ID NO: 297684 - DNA, 25 bp, Artificial
  Probe
cacaatcctggcacataccatgggg

SEQ ID NO: 297685 - DNA, 25 bp, Artificial
  Probe
ggagcaggccaatcaggagcttcga

SEQ ID NO: 297686 - DNA, 25 bp, Artificial
  Probe
tcgcctgagcagatccagcgcctag

SEQ ID NO: 297687 - DNA, 25 bp, Artificial
  Probe
cacaggcagccctggacaaggctaa

SEQ ID NO: 297688 - DNA, 25 bp, Artificial
  Probe
tgtctgagactcgtcggcaggcaga

SEQ ID NO: 297689 - DNA, 25 bp, Artificial
  Probe
ttatccagaatgtgaaggacttcct

SEQ ID NO: 297690 - DNA, 25 bp, Artificial
  Probe
ctgagcagatccagcgcctagcaag

SEQ ID NO: 297691 - DNA, 25 bp, Artificial
  Probe
tgccaacaactgtctcagagaaggc

SEQ ID NO: 297692 - DNA, 25 bp, Artificial
  Probe
acaactgtctcagagaaggcaaagg

SEQ ID NO: 297693 - DNA, 25 bp, Artificial
  Probe
tcttgggctgacaatatgtcagcta

SEQ ID NO: 297694 - DNA, 25 bp, Artificial
  Probe
gaattcaggaaccacagtgtcttca

SEQ ID NO: 297695 - DNA, 25 bp, Artificial
  Probe
cagtgcctcccaaagccatgtaaat

SEQ ID NO: 297696 - DNA, 25 bp, Artificial
  Probe
aggtcttgggctgacaatatgtcag

SEQ ID NO: 297697 - DNA, 25 bp, Artificial
  Probe
tccacagtcaacttgactgccaagc

SEQ ID NO: 297698 - DNA, 25 bp, Artificial
  Probe
cattctgtttctgtaacgaggtccc

SEQ ID NO: 297699 - DNA, 25 bp, Artificial
  Probe
ctgacaatatgtcagctaccagtaa

SEQ ID NO: 297700 - DNA, 25 bp, Artificial
  Probe
atccacagtcaacttgactgccaag

SEQ ID NO: 297701 - DNA, 25 bp, Artificial
  Probe
tgtcagctaccagtaatccacagtc

SEQ ID NO: 297702 - DNA, 25 bp, Artificial
  Probe
gctgacaatatgtcagctaccagta

SEQ ID NO: 297703 - DNA, 25 bp, Artificial
  Probe
cctgccaacaactgtctcagagaag

SEQ ID NO: 297704 - DNA, 25 bp, Artificial
  Probe
attcaggaaccacagtgtcttcatt

SEQ ID NO: 297705 - DNA, 25 bp, Artificial
  Probe
tcattctgtttctgtaacgaggtcc

SEQ ID NO: 297706 - DNA, 25 bp, Artificial
  Probe
gtaatccacagtcaacttgactgcc

SEQ ID NO: 297707 - DNA, 25 bp, Artificial
  Probe
agtgtcttcattctgtttctgtaac

SEQ ID NO: 297708 - DNA, 25 bp, Artificial
  Probe
attctgtttctgtaacgaggtccct

SEQ ID NO: 297709 - DNA, 25 bp, Artificial
  Probe
aggaaccacagtgtcttcattctgt

SEQ ID NO: 297710 - DNA, 25 bp, Artificial
  Probe
aattcaggaaccacagtgtcttcat

SEQ ID NO: 297711 - DNA, 25 bp, Artificial
  Probe
agtcaacttgactgccaagcctcca

SEQ ID NO: 297712 - DNA, 25 bp, Artificial
  Probe
cttcattctgtttctgtaacgaggt

SEQ ID NO: 297713 - DNA, 25 bp, Artificial
  Probe
caggaattcaggaaccacagtgtct

SEQ ID NO: 297714 - DNA, 25 bp, Artificial
  Probe
gtcttcattctgtttctgtaacgag

SEQ ID NO: 297715 - DNA, 25 bp, Artificial
  Probe
gtcagctaccagtaatccacagtca

SEQ ID NO: 297716 - DNA, 25 bp, Artificial
  Probe
tgtcttcattctgtttctgtaacga

SEQ ID NO: 297717 - DNA, 25 bp, Artificial
  Probe
acagtgtcttcattctgtttctgta

SEQ ID NO: 297718 - DNA, 25 bp, Artificial
  Probe
ctgccaacaactgtctcagagaagg

SEQ ID NO: 297719 - DNA, 25 bp, Artificial
  Probe
ccccacaggaattcaggaaccacag

SEQ ID NO: 297720 - DNA, 25 bp, Artificial
  Probe
ttcattctgtttctgtaacgaggtc

SEQ ID NO: 297721 - DNA, 25 bp, Artificial
  Probe
cacagtcaacttgactgccaagcct

SEQ ID NO: 297722 - DNA, 25 bp, Artificial
  Probe
cagtaatccacagtcaacttgactg

SEQ ID NO: 297723 - DNA, 25 bp, Artificial
  Probe
tcaggaaccacagtgtcttcattct

SEQ ID NO: 297724 - DNA, 25 bp, Artificial
  Probe
ctgtctcagagaaggcaaaggcttt

SEQ ID NO: 297725 - DNA, 25 bp, Artificial
  Probe
gacaatatgtcagctaccagtaatc

SEQ ID NO: 297726 - DNA, 25 bp, Artificial
  Probe
cagtgtcttcattctgtttctgtaa

SEQ ID NO: 297727 - DNA, 25 bp, Artificial
  Probe
caacaactgtctcagagaaggcaaa

SEQ ID NO: 297728 - DNA, 25 bp, Artificial
  Probe
caggaaccacagtgtcttcattctg

SEQ ID NO: 297729 - DNA, 25 bp, Artificial
  Probe
ccacagtgtcttcattctgtttctg

SEQ ID NO: 297730 - DNA, 25 bp, Artificial
  Probe
acagtcaacttgactgccaagcctc

SEQ ID NO: 297731 - DNA, 25 bp, Artificial
  Probe
atgtcagctaccagtaatccacagt

SEQ ID NO: 297732 - DNA, 25 bp, Artificial
  Probe
agtgcctcccaaagccatgtaaatg

SEQ ID NO: 297733 - DNA, 25 bp, Artificial
  Probe
caactgtctcagagaaggcaaaggc

SEQ ID NO: 297734 - DNA, 25 bp, Artificial
  Probe
gaggtcttgggctgacaatatgtca

SEQ ID NO: 297735 - DNA, 25 bp, Artificial
  Probe
gaaccacagtgtcttcattctgttt

SEQ ID NO: 297736 - DNA, 25 bp, Artificial
  Probe
ccagtgcctcccaaagccatgtaaa

SEQ ID NO: 297737 - DNA, 25 bp, Artificial
  Probe
tgtcccttaggacacatgagcccca

SEQ ID NO: 297738 - DNA, 25 bp, Artificial
  Probe
tcctgaacgcaaaccctgcgttgtc

SEQ ID NO: 297739 - DNA, 25 bp, Artificial
  Probe
gcatgtaccatctatcctaaagaag

SEQ ID NO: 297740 - DNA, 25 bp, Artificial
  Probe
gcaaaccctgcgttgtccccctaag

SEQ ID NO: 297741 - DNA, 25 bp, Artificial
  Probe
ggaaggcggtgccaattttgctcct

SEQ ID NO: 297742 - DNA, 25 bp, Artificial
  Probe
tcccttaggacacatgagccccacc

SEQ ID NO: 297743 - DNA, 25 bp, Artificial
  Probe
tctctgtcccttaggacacatgagc

SEQ ID NO: 297744 - DNA, 25 bp, Artificial
  Probe
cacgccggtgggatatggcatgtac

SEQ ID NO: 297745 - DNA, 25 bp, Artificial
  Probe
gtgccaattttgctcctgaacgcaa

SEQ ID NO: 297746 - DNA, 25 bp, Artificial
  Probe
ggtgccaattttgctcctgaacgca

SEQ ID NO: 297747 - DNA, 25 bp, Artificial
  Probe
gtgggactctatgccacgccggtgg

SEQ ID NO: 297748 - DNA, 25 bp, Artificial
  Probe
cggtgccaattttgctcctgaacgc

SEQ ID NO: 297749 - DNA, 25 bp, Artificial
  Probe
ccaattttgctcctgaacgcaaacc

SEQ ID NO: 297750 - DNA, 25 bp, Artificial
  Probe
gccaattttgctcctgaacgcaaac

SEQ ID NO: 297751 - DNA, 25 bp, Artificial
  Probe
aaggcggtgccaattttgctcctga

SEQ ID NO: 297752 - DNA, 25 bp, Artificial
  Probe
gaaggcggtgccaattttgctcctg

SEQ ID NO: 297753 - DNA, 25 bp, Artificial
  Probe
ttttgctcctgaacgcaaaccctgc

SEQ ID NO: 297754 - DNA, 25 bp, Artificial
  Probe
gcggtgccaattttgctcctgaacg

SEQ ID NO: 297755 - DNA, 25 bp, Artificial
  Probe
cctctctgtcccttaggacacatga

SEQ ID NO: 297756 - DNA, 25 bp, Artificial
  Probe
gctcctgaacgcaaaccctgcgttg

SEQ ID NO: 297757 - DNA, 25 bp, Artificial
  Probe
gcctgtgggactctatgccacgccg

SEQ ID NO: 297758 - DNA, 25 bp, Artificial
  Probe
ggcatgtaccatctatcctaaagaa

SEQ ID NO: 297759 - DNA, 25 bp, Artificial
  Probe
tctgtcccttaggacacatgagccc

SEQ ID NO: 297760 - DNA, 25 bp, Artificial
  Probe
tgccaattttgctcctgaacgcaaa

SEQ ID NO: 297761 - DNA, 25 bp, Artificial
  Probe
cctaatgatttccctctctgtccct

SEQ ID NO: 297762 - DNA, 25 bp, Artificial
  Probe
ccaggaaggcggtgccaattttgct

SEQ ID NO: 297763 - DNA, 25 bp, Artificial
  Probe
ggactctatgccacgccggtgggat

SEQ ID NO: 297764 - DNA, 25 bp, Artificial
  Probe
atatggcatgtaccatctatcctaa

SEQ ID NO: 297765 - DNA, 25 bp, Artificial
  Probe
cctgtgggactctatgccacgccgg

SEQ ID NO: 297766 - DNA, 25 bp, Artificial
  Probe
acgccggtgggatatggcatgtacc

SEQ ID NO: 297767 - DNA, 25 bp, Artificial
  Probe
aggcggtgccaattttgctcctgaa

SEQ ID NO: 297768 - DNA, 25 bp, Artificial
  Probe
attttgctcctgaacgcaaaccctg

SEQ ID NO: 297769 - DNA, 25 bp, Artificial
  Probe
gatatggcatgtaccatctatccta

SEQ ID NO: 297770 - DNA, 25 bp, Artificial
  Probe
cgccggtgggatatggcatgtacca

SEQ ID NO: 297771 - DNA, 25 bp, Artificial
  Probe
tttgtggaaagcattcccctccctc

SEQ ID NO: 297772 - DNA, 25 bp, Artificial
  Probe
ctctgtcccttaggacacatgagcc

SEQ ID NO: 297773 - DNA, 25 bp, Artificial
  Probe
tggcatgtaccatctatcctaaaga

SEQ ID NO: 297774 - DNA, 25 bp, Artificial
  Probe
ccacgccggtgggatatggcatgta

SEQ ID NO: 297775 - DNA, 25 bp, Artificial
  Probe
ggcggtgccaattttgctcctgaac

SEQ ID NO: 297776 - DNA, 25 bp, Artificial
  Probe
cctccctctccaggaaggcggtgcc

SEQ ID NO: 297777 - DNA, 25 bp, Artificial
  Probe
ctgtgggactctatgccacgccggt

SEQ ID NO: 297778 - DNA, 25 bp, Artificial
  Probe
tggaaagcattcccctccctctcca

SEQ ID NO: 297779 - DNA, 25 bp, Artificial
  Probe
ctcctgaacgcaaaccctgcgttgt

SEQ ID NO: 297780 - DNA, 25 bp, Artificial
  Probe
tgtgggactctatgccacgccggtg

SEQ ID NO: 297781 - DNA, 25 bp, Artificial
  Probe
atggcatgtaccatctatcctaaag

SEQ ID NO: 297782 - DNA, 25 bp, Artificial
  Probe
ccatctatcctaaagaagaccagat

SEQ ID NO: 297783 - DNA, 25 bp, Artificial
  Probe
taaacctgaagtccttgtcgctgga

SEQ ID NO: 297784 - DNA, 25 bp, Artificial
  Probe
ctgaagtccttgtcgctggatgtca

SEQ ID NO: 297785 - DNA, 25 bp, Artificial
  Probe
ttgtacagagggtgtctacaatcgt

SEQ ID NO: 297786 - DNA, 25 bp, Artificial
  Probe
aatatctcgaagctgctccttgtca

SEQ ID NO: 297787 - DNA, 25 bp, Artificial
  Probe
cttgatggagtctttctgcagttct

SEQ ID NO: 297788 - DNA, 25 bp, Artificial
  Probe
cctttcgctgtcatcatccagcttg

SEQ ID NO: 297789 - DNA, 25 bp, Artificial
  Probe
cttgtcagaaagcatgtttgtacag

SEQ ID NO: 297790 - DNA, 25 bp, Artificial
  Probe
gcatgtttgtacagagggtgtctac

SEQ ID NO: 297791 - DNA, 25 bp, Artificial
  Probe
aagcagtgcatgtcccgaatttcct

SEQ ID NO: 297792 - DNA, 25 bp, Artificial
  Probe
ctggaaatatctcgaagctgctcct

SEQ ID NO: 297793 - DNA, 25 bp, Artificial
  Probe
tgtacagagggtgtctacaatcgtc

SEQ ID NO: 297794 - DNA, 25 bp, Artificial
  Probe
caagacatttcacagctaagttctg

SEQ ID NO: 297795 - DNA, 25 bp, Artificial
  Probe
gacatttcacagctaagttctgcac

SEQ ID NO: 297796 - DNA, 25 bp, Artificial
  Probe
ctggatgtcattttttccagcaagt

SEQ ID NO: 297797 - DNA, 25 bp, Artificial
  Probe
caagcagtgcatgtcccgaatttcc

SEQ ID NO: 297798 - DNA, 25 bp, Artificial
  Probe
cagatcatttgtagccataaacctg

SEQ ID NO: 297799 - DNA, 25 bp, Artificial
  Probe
aattactgttttaaggccaatactg

SEQ ID NO: 297800 - DNA, 25 bp, Artificial
  Probe
agtccttgtcgctggatgtcatttt

SEQ ID NO: 297801 - DNA, 25 bp, Artificial
  Probe
gaaatatctcgaagctgctccttgt

SEQ ID NO: 297802 - DNA, 25 bp, Artificial
  Probe
tgggaagtccctgcatcgcagggat

SEQ ID NO: 297803 - DNA, 25 bp, Artificial
  Probe
ccttgtcgctggatgtcattttttc

SEQ ID NO: 297804 - DNA, 25 bp, Artificial
  Probe
ttttaaggccaatactggaaatatc

SEQ ID NO: 297805 - DNA, 25 bp, Artificial
  Probe
taaaggaccaagacatttcacagct

SEQ ID NO: 297806 - DNA, 25 bp, Artificial
  Probe
cattttttccagcaagttggagatg

SEQ ID NO: 297807 - DNA, 25 bp, Artificial
  Probe
ggacaagcagtgcatgtcccgaatt

SEQ ID NO: 297808 - DNA, 25 bp, Artificial
  Probe
agggtgtctacaatcgtctcaactt

SEQ ID NO: 297809 - DNA, 25 bp, Artificial
  Probe
ttaaggccaatactggaaatatctc

SEQ ID NO: 297810 - DNA, 25 bp, Artificial
  Probe
ttccagcaagttggagatgtggtac

SEQ ID NO: 297811 - DNA, 25 bp, Artificial
  Probe
agcccccgtgtcagcctgggttctt

SEQ ID NO: 297812 - DNA, 25 bp, Artificial
  Probe
gtctacaatcgtctcaacttggtac

SEQ ID NO: 297813 - DNA, 25 bp, Artificial
  Probe
cataaacctgaagtccttgtcgctg

SEQ ID NO: 297814 - DNA, 25 bp, Artificial
  Probe
tcatttgtagccataaacctgaagt

SEQ ID NO: 297815 - DNA, 25 bp, Artificial
  Probe
ccaatactggaaatatctcgaagct

SEQ ID NO: 297816 - DNA, 25 bp, Artificial
  Probe
atactggaaatatctcgaagctgct

SEQ ID NO: 297817 - DNA, 25 bp, Artificial
  Probe
gctaagttctgcacttcgccatttt

SEQ ID NO: 297818 - DNA, 25 bp, Artificial
  Probe
tgtcagcctgggttcttaagaggct

SEQ ID NO: 297819 - DNA, 25 bp, Artificial
  Probe
gaccaagacatttcacagctaagtt

SEQ ID NO: 297820 - DNA, 25 bp, Artificial
  Probe
gtcatcagatcatttgtagccataa

SEQ ID NO: 297821 - DNA, 25 bp, Artificial
  Probe
tttcacagctaagttctgcacttcg

SEQ ID NO: 297822 - DNA, 25 bp, Artificial
  Probe
cccgtgtcagcctgggttcttaaga

SEQ ID NO: 297823 - DNA, 25 bp, Artificial
  Probe
tgatggagtctttctgcagttctgt

SEQ ID NO: 297824 - DNA, 25 bp, Artificial
  Probe
tcgctggatgtcattttttccagca

SEQ ID NO: 297825 - DNA, 25 bp, Artificial
  Probe
actaaaggaccaagacatttcacag

SEQ ID NO: 297826 - DNA, 25 bp, Artificial
  Probe
attactgttttaaggccaatactgg

SEQ ID NO: 297827 - DNA, 25 bp, Artificial
  Probe
catgtttgtacagagggtgtctaca

SEQ ID NO: 297828 - DNA, 25 bp, Artificial
  Probe
tgggttcttaagaggctggctctct

SEQ ID NO: 297829 - DNA, 25 bp, Artificial
  Probe
cagagccccaacttggactcagaac

SEQ ID NO: 297830 - DNA, 25 bp, Artificial
  Probe
aggagatgcctttgacattggtggc

SEQ ID NO: 297831 - DNA, 25 bp, Artificial
  Probe
ggaagactggggtcctgctgtcccc

SEQ ID NO: 297832 - DNA, 25 bp, Artificial
  Probe
agactggggtcctgctgtccccgct

SEQ ID NO: 297833 - DNA, 25 bp, Artificial
  Probe
ctaaaggttcctttggtagcatctc

SEQ ID NO: 297834 - DNA, 25 bp, Artificial
  Probe
tggcagatcacgtgggccaagtgcc

SEQ ID NO: 297835 - DNA, 25 bp, Artificial
  Probe
cttggactcagaacaagtgaatggg

SEQ ID NO: 297836 - DNA, 25 bp, Artificial
  Probe
aacttgacccatggtatttgtcctg

SEQ ID NO: 297837 - DNA, 25 bp, Artificial
  Probe
atggcttgagaggtgctgcagctaa

SEQ ID NO: 297838 - DNA, 25 bp, Artificial
  Probe
agtctgagtctgcttccttggaggg

SEQ ID NO: 297839 - DNA, 25 bp, Artificial
  Probe
cagtgctgagccttctgggtcagag

SEQ ID NO: 297840 - DNA, 25 bp, Artificial
  Probe
gctttcccctcaaggggatgccggg

SEQ ID NO: 297841 - DNA, 25 bp, Artificial
  Probe
ctttgacattggtggccagagcccc

SEQ ID NO: 297842 - DNA, 25 bp, Artificial
  Probe
ggagcaaggccatggctctgaccta

SEQ ID NO: 297843 - DNA, 25 bp, Artificial
  Probe
ctgcagcctgcatgctgggatcagg

SEQ ID NO: 297844 - DNA, 25 bp, Artificial
  Probe
gagaacagaggctttcccctcaagg

SEQ ID NO: 297845 - DNA, 25 bp, Artificial
  Probe
gggactgaggcctctcttcttccag

SEQ ID NO: 297846 - DNA, 25 bp, Artificial
  Probe
atcaagaactcctattacagggaca

SEQ ID NO: 297847 - DNA, 25 bp, Artificial
  Probe
ttctgggtcagaggagtctgagtct

SEQ ID NO: 297848 - DNA, 25 bp, Artificial
  Probe
agctttgataacttgacccatggta

SEQ ID NO: 297849 - DNA, 25 bp, Artificial
  Probe
tggaggctgcaaggtccaggatatt

SEQ ID NO: 297850 - DNA, 25 bp, Artificial
  Probe
ggtactgcagcctgcatgctgggat

SEQ ID NO: 297851 - DNA, 25 bp, Artificial
  Probe
tcttccaggggttcccaaggaggtg

SEQ ID NO: 297852 - DNA, 25 bp, Artificial
  Probe
tcatctgaggagtttgaggacctag

SEQ ID NO: 297853 - DNA, 25 bp, Artificial
  Probe
caaagtgggatctggctggagaaca

SEQ ID NO: 297854 - DNA, 25 bp, Artificial
  Probe
tgaggtcccctgcttctccaaagtg

SEQ ID NO: 297855 - DNA, 25 bp, Artificial
  Probe
cgaggatcaagaactcctattacag

SEQ ID NO: 297856 - DNA, 25 bp, Artificial
  Probe
taggggaaactctccctgactctac

SEQ ID NO: 297857 - DNA, 25 bp, Artificial
  Probe
atctggctggagaacagaggctttc

SEQ ID NO: 297858 - DNA, 25 bp, Artificial
  Probe
tctaggggaaactctccctgactct

SEQ ID NO: 297859 - DNA, 25 bp, Artificial
  Probe
ccagggcctcagtggtccaccggaa

SEQ ID NO: 297860 - DNA, 25 bp, Artificial
  Probe
ggtgctctaaaggttcctttggtag

SEQ ID NO: 297861 - DNA, 25 bp, Artificial
  Probe
ctctttcttctgtggctcacctgct

SEQ ID NO: 297862 - DNA, 25 bp, Artificial
  Probe
agccttctgggtcagaggagtctga

SEQ ID NO: 297863 - DNA, 25 bp, Artificial
  Probe
gaacagaggctttcccctcaagggg

SEQ ID NO: 297864 - DNA, 25 bp, Artificial
  Probe
ctctcttcttccaggggttcccaag

SEQ ID NO: 297865 - DNA, 25 bp, Artificial
  Probe
gatctggctggagaacagaggcttt

SEQ ID NO: 297866 - DNA, 25 bp, Artificial
  Probe
gtcagaggagtctgagtctgcttcc

SEQ ID NO: 297867 - DNA, 25 bp, Artificial
  Probe
cctcagtggtccaccggaagaggag

SEQ ID NO: 297868 - DNA, 25 bp, Artificial
  Probe
ccaggaggtgaccagcatggtcccg

SEQ ID NO: 297869 - DNA, 25 bp, Artificial
  Probe
ggcagcatttatctgacccttcatc

SEQ ID NO: 297870 - DNA, 25 bp, Artificial
  Probe
cgaggcagatgatctaggggaaact

SEQ ID NO: 297871 - DNA, 25 bp, Artificial
  Probe
ggacctagggactgaggcctctctt

SEQ ID NO: 297872 - DNA, 25 bp, Artificial
  Probe
aggtcaagtgactgaccatttagat

SEQ ID NO: 297873 - DNA, 25 bp, Artificial
  Probe
gcccaaagaggagacccggtacagg

SEQ ID NO: 297874 - DNA, 25 bp, Artificial
  Probe
aggatattgcccaaagaggagaccc

SEQ ID NO: 297875 - DNA, 25 bp, Artificial
  Probe
ttgagagggctttcattgtcttgac

SEQ ID NO: 297876 - DNA, 25 bp, Artificial
  Probe
gactgaagcctgaggaattacaggt

SEQ ID NO: 297877 - DNA, 25 bp, Artificial
  Probe
cctccggatgaagacgaacagggca

SEQ ID NO: 297878 - DNA, 25 bp, Artificial
  Probe
gtaaatcaccatagctctcagagtc

SEQ ID NO: 297879 - DNA, 25 bp, Artificial
  Probe
gtaccctttgagagggctttcattg

SEQ ID NO: 297880 - DNA, 25 bp, Artificial
  Probe
ctttgagagggctttcattgtcttg

SEQ ID NO: 297881 - DNA, 25 bp, Artificial
  Probe
ctgaagacatgctgtcactgtagag

SEQ ID NO: 297882 - DNA, 25 bp, Artificial
  Probe
atcatggtaccctttgagagggctt

SEQ ID NO: 297883 - DNA, 25 bp, Artificial
  Probe
accatagctctcagagtctcatctg

SEQ ID NO: 297884 - DNA, 25 bp, Artificial
  Probe
gcacagtcagcttcatctctcagca

SEQ ID NO: 297885 - DNA, 25 bp, Artificial
  Probe
cacatctatcatggtaccctttgag

SEQ ID NO: 297886 - DNA, 25 bp, Artificial
  Probe
acatctgttgcctggaatgtgtcta

SEQ ID NO: 297887 - DNA, 25 bp, Artificial
  Probe
cgaacagggcatgagactgaagcct

SEQ ID NO: 297888 - DNA, 25 bp, Artificial
  Probe
gagtctcatctgaagacatgctgtc

SEQ ID NO: 297889 - DNA, 25 bp, Artificial
  Probe
aacagggcatgagactgaagcctga

SEQ ID NO: 297890 - DNA, 25 bp, Artificial
  Probe
ccactcatgcattcctactgcttgg

SEQ ID NO: 297891 - DNA, 25 bp, Artificial
  Probe
attgatgtaatttctgcacagtcag

SEQ ID NO: 297892 - DNA, 25 bp, Artificial
  Probe
ctggtgcgaacatgctagtggaaaa

SEQ ID NO: 297893 - DNA, 25 bp, Artificial
  Probe
tgcgaacatgctagtggaaaacaat

SEQ ID NO: 297894 - DNA, 25 bp, Artificial
  Probe
gaaatctcttttaaggtcttgagtc

SEQ ID NO: 297895 - DNA, 25 bp, Artificial
  Probe
gagactgaagcctgaggaattacag

SEQ ID NO: 297896 - DNA, 25 bp, Artificial
  Probe
ggcatgagactgaagcctgaggaat

SEQ ID NO: 297897 - DNA, 25 bp, Artificial
  Probe
agaaggtcacatctgttgcctggaa

SEQ ID NO: 297898 - DNA, 25 bp, Artificial
  Probe
cttgactcatgatggttcaggataa

SEQ ID NO: 297899 - DNA, 25 bp, Artificial
  Probe
ctcatgatggttcaggataaactat

SEQ ID NO: 297900 - DNA, 25 bp, Artificial
  Probe
agttgtaaatcaccatagctctcag

SEQ ID NO: 297901 - DNA, 25 bp, Artificial
  Probe
ggtcacatctgttgcctggaatgtg

SEQ ID NO: 297902 - DNA, 25 bp, Artificial
  Probe
acgaacagggcatgagactgaagcc

SEQ ID NO: 297903 - DNA, 25 bp, Artificial
  Probe
gcttcatctctcagcatagttgtaa

SEQ ID NO: 297904 - DNA, 25 bp, Artificial
  Probe
gaagcctgaggaattacaggtcata

SEQ ID NO: 297905 - DNA, 25 bp, Artificial
  Probe
tgctgtcactgtagagacacatgag

SEQ ID NO: 297906 - DNA, 25 bp, Artificial
  Probe
gcatgagactgaagcctgaggaatt

SEQ ID NO: 297907 - DNA, 25 bp, Artificial
  Probe
ctgcacagtcagcttcatctctcag

SEQ ID NO: 297908 - DNA, 25 bp, Artificial
  Probe
tgactcatgatggttcaggataaac

SEQ ID NO: 297909 - DNA, 25 bp, Artificial
  Probe
gtcactgtagagacacatgagcacc

SEQ ID NO: 297910 - DNA, 25 bp, Artificial
  Probe
tgtgtctacactgctgctcttgttg

SEQ ID NO: 297911 - DNA, 25 bp, Artificial
  Probe
cagtcagcttcatctctcagcatag

SEQ ID NO: 297912 - DNA, 25 bp, Artificial
  Probe
gacatgctgtcactgtagagacaca

SEQ ID NO: 297913 - DNA, 25 bp, Artificial
  Probe
tcactgtagagacacatgagcaccc

SEQ ID NO: 297914 - DNA, 25 bp, Artificial
  Probe
gtaatttctgcacagtcagcttcat

SEQ ID NO: 297915 - DNA, 25 bp, Artificial
  Probe
atctgaagacatgctgtcactgtag

SEQ ID NO: 297916 - DNA, 25 bp, Artificial
  Probe
ctcagagtctcatctgaagacatgc

SEQ ID NO: 297917 - DNA, 25 bp, Artificial
  Probe
gaagaaggtcacatctgttgcctgg

SEQ ID NO: 297918 - DNA, 25 bp, Artificial
  Probe
atctatcatggtaccctttgagagg

SEQ ID NO: 297919 - DNA, 25 bp, Artificial
  Probe
aatctcttttaaggtcttgagtcca

SEQ ID NO: 297920 - DNA, 25 bp, Artificial
  Probe
gagtccatgctaatcaatagtcccc

SEQ ID NO: 297921 - DNA, 25 bp, Artificial
  Probe
ggcagagggcattcccagaggcttt

SEQ ID NO: 297922 - DNA, 25 bp, Artificial
  Probe
catgaggacctcctgaccttagtct

SEQ ID NO: 297923 - DNA, 25 bp, Artificial
  Probe
tagatttgggctcttccacatggta

SEQ ID NO: 297924 - DNA, 25 bp, Artificial
  Probe
ctagatttgggctcttccacatggt

SEQ ID NO: 297925 - DNA, 25 bp, Artificial
  Probe
ttgagccagggcagagggcattccc

SEQ ID NO: 297926 - DNA, 25 bp, Artificial
  Probe
ggcctgcaggagaacatgaggacct

SEQ ID NO: 297927 - DNA, 25 bp, Artificial
  Probe
cacatcctgcctaagaggcactact

SEQ ID NO: 297928 - DNA, 25 bp, Artificial
  Probe
cctgcctagatttgggctcttccac

SEQ ID NO: 297929 - DNA, 25 bp, Artificial
  Probe
tgctccacatcctgcctaagaggca

SEQ ID NO: 297930 - DNA, 25 bp, Artificial
  Probe
tgtgcttaaggctcaggctgtcatt

SEQ ID NO: 297931 - DNA, 25 bp, Artificial
  Probe
ttagtcttgagatccggacttgacg

SEQ ID NO: 297932 - DNA, 25 bp, Artificial
  Probe
gccttacctgcctagatttgggctc

SEQ ID NO: 297933 - DNA, 25 bp, Artificial
  Probe
agggtgaacatgaccccgtggccac

SEQ ID NO: 297934 - DNA, 25 bp, Artificial
  Probe
ccactctgggcctgcaggagaacat

SEQ ID NO: 297935 - DNA, 25 bp, Artificial
  Probe
tgcctaagaggcactactacaagca

SEQ ID NO: 297936 - DNA, 25 bp, Artificial
  Probe
gaagttcaaatatgccgaggacatg

SEQ ID NO: 297937 - DNA, 25 bp, Artificial
  Probe
cttccacatggtagccactagccag

SEQ ID NO: 297938 - DNA, 25 bp, Artificial
  Probe
catggtagccactagccagatgtgt

SEQ ID NO: 297939 - DNA, 25 bp, Artificial
  Probe
caccagtggccctctggttcagcat

SEQ ID NO: 297940 - DNA, 25 bp, Artificial
  Probe
taaggctcaggctgtcattgtcttt

SEQ ID NO: 297941 - DNA, 25 bp, Artificial
  Probe
gggcattcccagaggctttcctgca

SEQ ID NO: 297942 - DNA, 25 bp, Artificial
  Probe
tttgggttcatatggctgggcccct

SEQ ID NO: 297943 - DNA, 25 bp, Artificial
  Probe
atcctgcctaagaggcactactaca

SEQ ID NO: 297944 - DNA, 25 bp, Artificial
  Probe
ccacagccttacctgcctagatttg

SEQ ID NO: 297945 - DNA, 25 bp, Artificial
  Probe
tcaaatatgccgaggacatggggcc

SEQ ID NO: 297946 - DNA, 25 bp, Artificial
  Probe
cggacttgacgcagtgtgtggcttc

SEQ ID NO: 297947 - DNA, 25 bp, Artificial
  Probe
agatccggacttgacgcagtgtgtg

SEQ ID NO: 297948 - DNA, 25 bp, Artificial
  Probe
gagaacatgaggacctcctgacctt

SEQ ID NO: 297949 - DNA, 25 bp, Artificial
  Probe
tctatactctagctttgtgcttaag

SEQ ID NO: 297950 - DNA, 25 bp, Artificial
  Probe
gagggcattcccagaggctttcctg

SEQ ID NO: 297951 - DNA, 25 bp, Artificial
  Probe
ctactacaagcagaagaagttcaaa

SEQ ID NO: 297952 - DNA, 25 bp, Artificial
  Probe
gggctcttccacatggtagccacta

SEQ ID NO: 297953 - DNA, 25 bp, Artificial
  Probe
gcaagactttggatttcagagctct

SEQ ID NO: 297954 - DNA, 25 bp, Artificial
  Probe
gctttgtgatctcttattgctccac

SEQ ID NO: 297955 - DNA, 25 bp, Artificial
  Probe
caaatatgccgaggacatggggccg

SEQ ID NO: 297956 - DNA, 25 bp, Artificial
  Probe
cttgagatccggacttgacgcagtg

SEQ ID NO: 297957 - DNA, 25 bp, Artificial
  Probe
ctcctccagttttcaccaatttggg

SEQ ID NO: 297958 - DNA, 25 bp, Artificial
  Probe
tggtttcagttccacatgtcccttc

SEQ ID NO: 297959 - DNA, 25 bp, Artificial
  Probe
gctgtcattgtctttcccacagcct

SEQ ID NO: 297960 - DNA, 25 bp, Artificial
  Probe
tgagccagggcagagggcattccca

SEQ ID NO: 297961 - DNA, 25 bp, Artificial
  Probe
ttcctgcaaggcagacaccagtggc

SEQ ID NO: 297962 - DNA, 25 bp, Artificial
  Probe
ggcagacaccagtggccctctggtt

SEQ ID NO: 297963 - DNA, 25 bp, Artificial
  Probe
gcctgcaggagaacatgaggacctc

SEQ ID NO: 297964 - DNA, 25 bp, Artificial
  Probe
tgacgcagtgtgtggcttccggcaa

SEQ ID NO: 297965 - DNA, 25 bp, Artificial
  Probe
tattgctccacatcctgcctaagag

SEQ ID NO: 297966 - DNA, 25 bp, Artificial
  Probe
ttcagcatgaagacaggcaagactt

SEQ ID NO: 297967 - DNA, 25 bp, Artificial
  Probe
agggtcctcctgtctgcccttttgc

SEQ ID NO: 297968 - DNA, 25 bp, Artificial
  Probe
gctctcctctctgaatataatgtgt

SEQ ID NO: 297969 - DNA, 25 bp, Artificial
  Probe
aagagagatgcctggcatcccatca

SEQ ID NO: 297970 - DNA, 25 bp, Artificial
  Probe
atcactggccaccaaacagcctgag

SEQ ID NO: 297971 - DNA, 25 bp, Artificial
  Probe
agctgggtcccactgcagcatctct

SEQ ID NO: 297972 - DNA, 25 bp, Artificial
  Probe
aagcctacgttgatagagctggatt

SEQ ID NO: 297973 - DNA, 25 bp, Artificial
  Probe
ggcccttaaggataaggctaaatcg

SEQ ID NO: 297974 - DNA, 25 bp, Artificial
  Probe
agccccctgactggaaggtccggca

SEQ ID NO: 297975 - DNA, 25 bp, Artificial
  Probe
gatagaacctatgtctacacagctc

SEQ ID NO: 297976 - DNA, 25 bp, Artificial
  Probe
ttggctggcaggaccccatgctgtc

SEQ ID NO: 297977 - DNA, 25 bp, Artificial
  Probe
agttcctccttatgcaaagccagcc

SEQ ID NO: 297978 - DNA, 25 bp, Artificial
  Probe
ccaaacagcctgagggatggtttga

SEQ ID NO: 297979 - DNA, 25 bp, Artificial
  Probe
gtggccctgagtctgacagctgtgc

SEQ ID NO: 297980 - DNA, 25 bp, Artificial
  Probe
agctggactcgaaataggaacagag

SEQ ID NO: 297981 - DNA, 25 bp, Artificial
  Probe
ctcccacacattcgtgtgaccgtga

SEQ ID NO: 297982 - DNA, 25 bp, Artificial
  Probe
ttgcccagctaccttcctacagatg

SEQ ID NO: 297983 - DNA, 25 bp, Artificial
  Probe
gttgtctgttgaatccacaacttca

SEQ ID NO: 297984 - DNA, 25 bp, Artificial
  Probe
gtggcttctgggaccctagtttact

SEQ ID NO: 297985 - DNA, 25 bp, Artificial
  Probe
gactcatgcctgcagcttgggagtg

SEQ ID NO: 297986 - DNA, 25 bp, Artificial
  Probe
tctcctcagcattctcctctgagtg

SEQ ID NO: 297987 - DNA, 25 bp, Artificial
  Probe
gaggtggcccttaaggataaggcta

SEQ ID NO: 297988 - DNA, 25 bp, Artificial
  Probe
cacctataatgaagggcctcgcttc

SEQ ID NO: 297989 - DNA, 25 bp, Artificial
  Probe
gaattatgagactcatgcctgcagc

SEQ ID NO: 297990 - DNA, 25 bp, Artificial
  Probe
tgtcttgtcacctgtaagtggcaag

SEQ ID NO: 297991 - DNA, 25 bp, Artificial
  Probe
atctacagatacagagcctgtggag

SEQ ID NO: 297992 - DNA, 25 bp, Artificial
  Probe
tcgtctctctccatatggtcctgct

SEQ ID NO: 297993 - DNA, 25 bp, Artificial
  Probe
ttttgttgccgcacctgcctcctgg

SEQ ID NO: 297994 - DNA, 25 bp, Artificial
  Probe
gcttggtccagttccctttaacgtg

SEQ ID NO: 297995 - DNA, 25 bp, Artificial
  Probe
aatccccctgaactctgcttgctgg

SEQ ID NO: 297996 - DNA, 25 bp, Artificial
  Probe
tgccaagcctgtgtgggcattttat

SEQ ID NO: 297997 - DNA, 25 bp, Artificial
  Probe
gccaagcctgtgtgggcattttata

SEQ ID NO: 297998 - DNA, 25 bp, Artificial
  Probe
ctgaaacttcaagaccaaagcagaa

SEQ ID NO: 297999 - DNA, 25 bp, Artificial
  Probe
gctaaatcggcaaaaatccccctga

SEQ ID NO: 298000 - DNA, 25 bp, Artificial
  Probe
agatgcctggcatcccatcaagtcc

SEQ ID NO: 298001 - DNA, 25 bp, Artificial
  Probe
cagccatagcccattccttggggtg

SEQ ID NO: 298002 - DNA, 25 bp, Artificial
  Probe
tgtcccagggcctcctgggcctgag

SEQ ID NO: 298003 - DNA, 25 bp, Artificial
  Probe
ccatggcacacaactgcttctcaag

SEQ ID NO: 298004 - DNA, 25 bp, Artificial
  Probe
gccctgagtctgacagctgtgccct

SEQ ID NO: 298005 - DNA, 25 bp, Artificial
  Probe
catctacagatacagagcctgtgga

SEQ ID NO: 298006 - DNA, 25 bp, Artificial
  Probe
gggtccaaaggagctacttaaggct

SEQ ID NO: 298007 - DNA, 25 bp, Artificial
  Probe
tctctgagcacctgaactaggtgga

SEQ ID NO: 298008 - DNA, 25 bp, Artificial
  Probe
gtaggtctactcatcctctcctcag

SEQ ID NO: 298009 - DNA, 25 bp, Artificial
  Probe
tgcttggtccagttccctttaacgt

SEQ ID NO: 298010 - DNA, 25 bp, Artificial
  Probe
catgctgtcctcacctataatgaag

SEQ ID NO: 298011 - DNA, 25 bp, Artificial
  Probe
gcaaatctaatgttaaccctgagtt

SEQ ID NO: 298012 - DNA, 25 bp, Artificial
  Probe
gatgtatgaccactggggatagaac

SEQ ID NO: 298013 - DNA, 25 bp, Artificial
  Probe
aaaccatgatcgacaagatttgcca

SEQ ID NO: 298014 - DNA, 25 bp, Artificial
  Probe
atcgacaagatttgccatggattta

SEQ ID NO: 298015 - DNA, 25 bp, Artificial
  Probe
gctgtattactgttcacagtccaat

SEQ ID NO: 298016 - DNA, 25 bp, Artificial
  Probe
gttcacagtccaatcatcttgtgca

SEQ ID NO: 298017 - DNA, 25 bp, Artificial
  Probe
ggactgatgttccaagtttgtatca

SEQ ID NO: 298018 - DNA, 25 bp, Artificial
  Probe
tggactgatgttccaagtttgtatc

SEQ ID NO: 298019 - DNA, 25 bp, Artificial
  Probe
tctttcttggccagcagaagttaat

SEQ ID NO: 298020 - DNA, 25 bp, Artificial
  Probe
tgatgttccaagtttgtatcattcc

SEQ ID NO: 298021 - DNA, 25 bp, Artificial
  Probe
gatcgacaagatttgccatggattt

SEQ ID NO: 298022 - DNA, 25 bp, Artificial
  Probe
gaaaccatgatcgacaagatttgcc

SEQ ID NO: 298023 - DNA, 25 bp, Artificial
  Probe
aggaaaccatgatcgacaagatttg

SEQ ID NO: 298024 - DNA, 25 bp, Artificial
  Probe
aatcatttgtttctttcttggccag

SEQ ID NO: 298025 - DNA, 25 bp, Artificial
  Probe
cccatctgttcatagtttatggact

SEQ ID NO: 298026 - DNA, 25 bp, Artificial
  Probe
aaccatgatcgacaagatttgccat

SEQ ID NO: 298027 - DNA, 25 bp, Artificial
  Probe
aaggaaaccatgatcgacaagattt

SEQ ID NO: 298028 - DNA, 25 bp, Artificial
  Probe
gatgttccaagtttgtatcattcct

SEQ ID NO: 298029 - DNA, 25 bp, Artificial
  Probe
agtccaatcatcttgtgcatctaga

SEQ ID NO: 298030 - DNA, 25 bp, Artificial
  Probe
ttgtttctttcttggccagcagaag

SEQ ID NO: 298031 - DNA, 25 bp, Artificial
  Probe
tcatagtttatggactgatgttcca

SEQ ID NO: 298032 - DNA, 25 bp, Artificial
  Probe
gactgatgttccaagtttgtatcat

SEQ ID NO: 298033 - DNA, 25 bp, Artificial
  Probe
tgatcgacaagatttgccatggatt

SEQ ID NO: 298034 - DNA, 25 bp, Artificial
  Probe
tgttcacagtccaatcatcttgtgc

SEQ ID NO: 298035 - DNA, 25 bp, Artificial
  Probe
ttcatagtttatggactgatgttcc

SEQ ID NO: 298036 - DNA, 25 bp, Artificial
  Probe
atatagctgtattactgttcacagt

SEQ ID NO: 298037 - DNA, 25 bp, Artificial
  Probe
tttcttggccagcagaagttaattg

SEQ ID NO: 298038 - DNA, 25 bp, Artificial
  Probe
gcaatcatttgtttctttcttggcc

SEQ ID NO: 298039 - DNA, 25 bp, Artificial
  Probe
catctgttcatagtttatggactga

SEQ ID NO: 298040 - DNA, 25 bp, Artificial
  Probe
atcatttgtttctttcttggccagc

SEQ ID NO: 298041 - DNA, 25 bp, Artificial
  Probe
atttgtttctttcttggccagcaga

SEQ ID NO: 298042 - DNA, 25 bp, Artificial
  Probe
gttccaagtttgtatcattcctttg

SEQ ID NO: 298043 - DNA, 25 bp, Artificial
  Probe
gtccaatcatcttgtgcatctagaa

SEQ ID NO: 298044 - DNA, 25 bp, Artificial
  Probe
ccatctgttcatagtttatggactg

SEQ ID NO: 298045 - DNA, 25 bp, Artificial
  Probe
ttggccagcagaagttaattgttct

SEQ ID NO: 298046 - DNA, 25 bp, Artificial
  Probe
ccatgatcgacaagatttgccatgg

SEQ ID NO: 298047 - DNA, 25 bp, Artificial
  Probe
atagctgtattactgttcacagtcc

SEQ ID NO: 298048 - DNA, 25 bp, Artificial
  Probe
cagtccaatcatcttgtgcatctag

SEQ ID NO: 298049 - DNA, 25 bp, Artificial
  Probe
actgatgttccaagtttgtatcatt

SEQ ID NO: 298050 - DNA, 25 bp, Artificial
  Probe
cttggccagcagaagttaattgttc

SEQ ID NO: 298051 - DNA, 25 bp, Artificial
  Probe
ctgttcacagtccaatcatcttgtg

SEQ ID NO: 298052 - DNA, 25 bp, Artificial
  Probe
agatatagctgtattactgttcaca

SEQ ID NO: 298053 - DNA, 25 bp, Artificial
  Probe
tagctgtattactgttcacagtcca

SEQ ID NO: 298054 - DNA, 25 bp, Artificial
  Probe
tcttggccagcagaagttaattgtt

SEQ ID NO: 298055 - DNA, 25 bp, Artificial
  Probe
tttgtttctttcttggccagcagaa

SEQ ID NO: 298056 - DNA, 25 bp, Artificial
  Probe
ttcttggccagcagaagttaattgt

SEQ ID NO: 298057 - DNA, 25 bp, Artificial
  Probe
catttgtttctttcttggccagcag

SEQ ID NO: 298058 - DNA, 25 bp, Artificial
  Probe
atgatcgacaagatttgccatggat

SEQ ID NO: 298059 - DNA, 25 bp, Artificial
  Probe
tcaccacactgaggatggagtaaaa

SEQ ID NO: 298060 - DNA, 25 bp, Artificial
  Probe
gcatccttgtgacttgtcattcttt

SEQ ID NO: 298061 - DNA, 25 bp, Artificial
  Probe
tcctgtctagatctaaaggacataa

SEQ ID NO: 298062 - DNA, 25 bp, Artificial
  Probe
tgatgatataatcaccacactgagg

SEQ ID NO: 298063 - DNA, 25 bp, Artificial
  Probe
agcaatcctgtctagatctaaagga

SEQ ID NO: 298064 - DNA, 25 bp, Artificial
  Probe
tttgcatccttgtgacttgtcattc

SEQ ID NO: 298065 - DNA, 25 bp, Artificial
  Probe
acaggacttcattttgcatccttgt

SEQ ID NO: 298066 - DNA, 25 bp, Artificial
  Probe
tcagatgaaccacaggacttcattt

SEQ ID NO: 298067 - DNA, 25 bp, Artificial
  Probe
taatcaccacactgaggatggagta

SEQ ID NO: 298068 - DNA, 25 bp, Artificial
  Probe
gatgatataatcaccacactgagga

SEQ ID NO: 298069 - DNA, 25 bp, Artificial
  Probe
atgaaccacaggacttcattttgca

SEQ ID NO: 298070 - DNA, 25 bp, Artificial
  Probe
tactcttcaagtcttatgaaaggtt

SEQ ID NO: 298071 - DNA, 25 bp, Artificial
  Probe
aatcaccacactgaggatggagtaa

SEQ ID NO: 298072 - DNA, 25 bp, Artificial
  Probe
tgatataatcaccacactgaggatg

SEQ ID NO: 298073 - DNA, 25 bp, Artificial
  Probe
atcagatgaaccacaggacttcatt

SEQ ID NO: 298074 - DNA, 25 bp, Artificial
  Probe
tcattttgcatccttgtgacttgtc

SEQ ID NO: 298075 - DNA, 25 bp, Artificial
  Probe
cattttgcatccttgtgacttgtca

SEQ ID NO: 298076 - DNA, 25 bp, Artificial
  Probe
gaaccacaggacttcattttgcatc

SEQ ID NO: 298077 - DNA, 25 bp, Artificial
  Probe
ttgcatccttgtgacttgtcattct

SEQ ID NO: 298078 - DNA, 25 bp, Artificial
  Probe
agatgaaccacaggacttcattttg

SEQ ID NO: 298079 - DNA, 25 bp, Artificial
  Probe
tataatcaccacactgaggatggag

SEQ ID NO: 298080 - DNA, 25 bp, Artificial
  Probe
tttactcttcaagtcttatgaaagg

SEQ ID NO: 298081 - DNA, 25 bp, Artificial
  Probe
atataatcaccacactgaggatgga

SEQ ID NO: 298082 - DNA, 25 bp, Artificial
  Probe
ccttgtgacttgtcattcttttgca

SEQ ID NO: 298083 - DNA, 25 bp, Artificial
  Probe
gtgacttgtcattcttttgcaaaaa

SEQ ID NO: 298084 - DNA, 25 bp, Artificial
  Probe
gttttcatttcctttcagcatgatg

SEQ ID NO: 298085 - DNA, 25 bp, Artificial
  Probe
attttgcatccttgtgacttgtcat

SEQ ID NO: 298086 - DNA, 25 bp, Artificial
  Probe
ttgtgacttgtcattcttttgcaaa

SEQ ID NO: 298087 - DNA, 25 bp, Artificial
  Probe
gagtaaaaagcctcttccttctcag

SEQ ID NO: 298088 - DNA, 25 bp, Artificial
  Probe
aagcaatcctgtctagatctaaagg

SEQ ID NO: 298089 - DNA, 25 bp, Artificial
  Probe
caatcctgtctagatctaaaggaca

SEQ ID NO: 298090 - DNA, 25 bp, Artificial
  Probe
gacttcattttgcatccttgtgact

SEQ ID NO: 298091 - DNA, 25 bp, Artificial
  Probe
cataattcattatacatggggtgct

SEQ ID NO: 298092 - DNA, 25 bp, Artificial
  Probe
tgaaccacaggacttcattttgcat

SEQ ID NO: 298093 - DNA, 25 bp, Artificial
  Probe
cttcattttgcatccttgtgacttg

SEQ ID NO: 298094 - DNA, 25 bp, Artificial
  Probe
ctcttcaagtcttatgaaaggttta

SEQ ID NO: 298095 - DNA, 25 bp, Artificial
  Probe
aaatcagatgaaccacaggacttca

SEQ ID NO: 298096 - DNA, 25 bp, Artificial
  Probe
acataattcattatacatggggtgc

SEQ ID NO: 298097 - DNA, 25 bp, Artificial
  Probe
cacaggacttcattttgcatccttg

SEQ ID NO: 298098 - DNA, 25 bp, Artificial
  Probe
ttactcttcaagtcttatgaaaggt

SEQ ID NO: 298099 - DNA, 25 bp, Artificial
  Probe
aatcagatgaaccacaggacttcat

SEQ ID NO: 298100 - DNA, 25 bp, Artificial
  Probe
aggacttcattttgcatccttgtga

SEQ ID NO: 298101 - DNA, 25 bp, Artificial
  Probe
taagcaatcctgtctagatctaaag

SEQ ID NO: 298102 - DNA, 25 bp, Artificial
  Probe
atggttttcatttcctttcagcatg

SEQ ID NO: 298103 - DNA, 25 bp, Artificial
  Probe
ctgtctagatctaaaggacataact

SEQ ID NO: 298104 - DNA, 25 bp, Artificial
  Probe
ggttttcatttcctttcagcatgat

SEQ ID NO: 298105 - DNA, 25 bp, Artificial
  Probe
gtagaaactcactgaggttccttaa

SEQ ID NO: 298106 - DNA, 25 bp, Artificial
  Probe
gccttcagaaataatcttcagtcag

SEQ ID NO: 298107 - DNA, 25 bp, Artificial
  Probe
aggcatgacatctgggcgtattctt

SEQ ID NO: 298108 - DNA, 25 bp, Artificial
  Probe
gacccaaataatccttcagttttgg

SEQ ID NO: 298109 - DNA, 25 bp, Artificial
  Probe
aaagcactggctcctagtaggtatg

SEQ ID NO: 298110 - DNA, 25 bp, Artificial
  Probe
caatggtgaacaaccgctacaaata

SEQ ID NO: 298111 - DNA, 25 bp, Artificial
  Probe
gcaagctaaacttgctgacccaaat

SEQ ID NO: 298112 - DNA, 25 bp, Artificial
  Probe
aatcctgagcacaagtgaaatttaa

SEQ ID NO: 298113 - DNA, 25 bp, Artificial
  Probe
gacatctgggcgtattcttttatac

SEQ ID NO: 298114 - DNA, 25 bp, Artificial
  Probe
aacatgtgagctgcaagctaaactt

SEQ ID NO: 298115 - DNA, 25 bp, Artificial
  Probe
atctgtgtggaagctgcactagggc

SEQ ID NO: 298116 - DNA, 25 bp, Artificial
  Probe
ctgaaaaagcactggctcctagtag

SEQ ID NO: 298117 - DNA, 25 bp, Artificial
  Probe
accgctacaaatatgaagggtacca

SEQ ID NO: 298118 - DNA, 25 bp, Artificial
  Probe
ctttgacattaacacttaggacacg

SEQ ID NO: 298119 - DNA, 25 bp, Artificial
  Probe
taacaaagtgtcaattttggtctca

SEQ ID NO: 298120 - DNA, 25 bp, Artificial
  Probe
ttttatacacattagctttctgagg

SEQ ID NO: 298121 - DNA, 25 bp, Artificial
  Probe
gtagtgagttcaatcctgagcacaa

SEQ ID NO: 298122 - DNA, 25 bp, Artificial
  Probe
gggtaccaggcaacctgaaaaatct

SEQ ID NO: 298123 - DNA, 25 bp, Artificial
  Probe
attagctttctgaggctctgctaca

SEQ ID NO: 298124 - DNA, 25 bp, Artificial
  Probe
ggcgaggctacgtggcttacttgct

SEQ ID NO: 298125 - DNA, 25 bp, Artificial
  Probe
ctcctagtaggtatgtatagaccat

SEQ ID NO: 298126 - DNA, 25 bp, Artificial
  Probe
gtaccaggcaacctgaaaaatctaa

SEQ ID NO: 298127 - DNA, 25 bp, Artificial
  Probe
ctgttatgtttccagtgactgaaaa

SEQ ID NO: 298128 - DNA, 25 bp, Artificial
  Probe
taacctatatcataaatctgtgtgg

SEQ ID NO: 298129 - DNA, 25 bp, Artificial
  Probe
aggaatgggcccaatggtgaacaac

SEQ ID NO: 298130 - DNA, 25 bp, Artificial
  Probe
aagtgtcaattttggtctcactggt

SEQ ID NO: 298131 - DNA, 25 bp, Artificial
  Probe
actgaaaaagcactggctcctagta

SEQ ID NO: 298132 - DNA, 25 bp, Artificial
  Probe
tatcataaatctgtgtggaagctgc

SEQ ID NO: 298133 - DNA, 25 bp, Artificial
  Probe
gatatctttgacattaacacttagg

SEQ ID NO: 298134 - DNA, 25 bp, Artificial
  Probe
caggcaacctgaaaaatctaacttg

SEQ ID NO: 298135 - DNA, 25 bp, Artificial
  Probe
ttttgaagtctcattgtagaaactc

SEQ ID NO: 298136 - DNA, 25 bp, Artificial
  Probe
ctatatcataaatctgtgtggaagc

SEQ ID NO: 298137 - DNA, 25 bp, Artificial
  Probe
ggcgtattcttttatacacattagc

SEQ ID NO: 298138 - DNA, 25 bp, Artificial
  Probe
agcatttaggcatgacatctgggcg

SEQ ID NO: 298139 - DNA, 25 bp, Artificial
  Probe
gtgaacaaccgctacaaatatgaag

SEQ ID NO: 298140 - DNA, 25 bp, Artificial
  Probe
accatgctaaaaggaatgggcccaa

SEQ ID NO: 298141 - DNA, 25 bp, Artificial
  Probe
atagaccatgctaaaaggaatgggc

SEQ ID NO: 298142 - DNA, 25 bp, Artificial
  Probe
gttccttaacaaagtgtcaattttg

SEQ ID NO: 298143 - DNA, 25 bp, Artificial
  Probe
ctgctacagaaaacatgtgagctgc

SEQ ID NO: 298144 - DNA, 25 bp, Artificial
  Probe
gacattaacacttaggacacgtttt

SEQ ID NO: 298145 - DNA, 25 bp, Artificial
  Probe
gaggttccttaacaaagtgtcaatt

SEQ ID NO: 298146 - DNA, 25 bp, Artificial
  Probe
tttccagtgactgaaaaagcactgg

SEQ ID NO: 298147 - DNA, 25 bp, Artificial
  Probe
aggctacgtggcttacttgctgtta

SEQ ID NO: 298148 - DNA, 25 bp, Artificial
  Probe
aggcaacctgaaaaatctaacttgt

SEQ ID NO: 298149 - DNA, 25 bp, Artificial
  Probe
tgggcgtattcttttatacacatta

SEQ ID NO: 298150 - DNA, 25 bp, Artificial
  Probe
ttctgaggctctgctacagaaaaca

SEQ ID NO: 298151 - DNA, 25 bp, Artificial
  Probe
gcctgctgtaagagccggaatcaga

SEQ ID NO: 298152 - DNA, 25 bp, Artificial
  Probe
agtccttcccatgagtctcgggagg

SEQ ID NO: 298153 - DNA, 25 bp, Artificial
  Probe
tacacttagagaaaacacttgtcag

SEQ ID NO: 298154 - DNA, 25 bp, Artificial
  Probe
ttaatgctttttgtggcgaacctaa

SEQ ID NO: 298155 - DNA, 25 bp, Artificial
  Probe
aatagctctgcagaagtcttggtaa

SEQ ID NO: 298156 - DNA, 25 bp, Artificial
  Probe
tgaaccatgggttttgtgctcctca

SEQ ID NO: 298157 - DNA, 25 bp, Artificial
  Probe
acacttagagaaaacacttgtcagc

SEQ ID NO: 298158 - DNA, 25 bp, Artificial
  Probe
taatgctttttgtggcgaacctaat

SEQ ID NO: 298159 - DNA, 25 bp, Artificial
  Probe
tcactgcctgcctgctgtaagagcc

SEQ ID NO: 298160 - DNA, 25 bp, Artificial
  Probe
cactgcctgcctgctgtaagagccg

SEQ ID NO: 298161 - DNA, 25 bp, Artificial
  Probe
gtaagagccggaatcagatggaatc

SEQ ID NO: 298162 - DNA, 25 bp, Artificial
  Probe
ccttgtgggtgaaccatgggttttg

SEQ ID NO: 298163 - DNA, 25 bp, Artificial
  Probe
attaatgctttttgtggcgaaccta

SEQ ID NO: 298164 - DNA, 25 bp, Artificial
  Probe
agctctgcagaagtcttggtaaagt

SEQ ID NO: 298165 - DNA, 25 bp, Artificial
  Probe
cagtccttcccatgagtctcgggag

SEQ ID NO: 298166 - DNA, 25 bp, Artificial
  Probe
tagctctgcagaagtcttggtaaag

SEQ ID NO: 298167 - DNA, 25 bp, Artificial
  Probe
tgcctgcctgctgtaagagccggaa

SEQ ID NO: 298168 - DNA, 25 bp, Artificial
  Probe
agattaatgctttttgtggcgaacc

SEQ ID NO: 298169 - DNA, 25 bp, Artificial
  Probe
gctgtcagtccttcccatgagtctc

SEQ ID NO: 298170 - DNA, 25 bp, Artificial
  Probe
tgctgtcagtccttcccatgagtct

SEQ ID NO: 298171 - DNA, 25 bp, Artificial
  Probe
cctgcctgctgtaagagccggaatc

SEQ ID NO: 298172 - DNA, 25 bp, Artificial
  Probe
actgcctgcctgctgtaagagccgg

SEQ ID NO: 298173 - DNA, 25 bp, Artificial
  Probe
agagaaaacacttgtcagcctagcc

SEQ ID NO: 298174 - DNA, 25 bp, Artificial
  Probe
gattaatgctttttgtggcgaacct

SEQ ID NO: 298175 - DNA, 25 bp, Artificial
  Probe
gtgaaccatgggttttgtgctcctc

SEQ ID NO: 298176 - DNA, 25 bp, Artificial
  Probe
atagctctgcagaagtcttggtaaa

SEQ ID NO: 298177 - DNA, 25 bp, Artificial
  Probe
gtccttcccatgagtctcgggaggt

SEQ ID NO: 298178 - DNA, 25 bp, Artificial
  Probe
ctgcctgcctgctgtaagagccgga

SEQ ID NO: 298179 - DNA, 25 bp, Artificial
  Probe
gagaaaacacttgtcagcctagcca

SEQ ID NO: 298180 - DNA, 25 bp, Artificial
  Probe
gcctgcctgctgtaagagccggaat

SEQ ID NO: 298181 - DNA, 25 bp, Artificial
  Probe
tgcctgctgtaagagccggaatcag

SEQ ID NO: 298182 - DNA, 25 bp, Artificial
  Probe
tcagtccttcccatgagtctcggga

SEQ ID NO: 298183 - DNA, 25 bp, Artificial
  Probe
ctgcctgctgtaagagccggaatca

SEQ ID NO: 298184 - DNA, 25 bp, Artificial
  Probe
gctctgcagaagtcttggtaaagta

SEQ ID NO: 298185 - DNA, 25 bp, Artificial
  Probe
gaatagctctgcagaagtcttggta

SEQ ID NO: 298186 - DNA, 25 bp, Artificial
  Probe
agtagtgccagttactaaagaaggc

SEQ ID NO: 298187 - DNA, 25 bp, Artificial
  Probe
agatctcccggaagacaatggcaga

SEQ ID NO: 298188 - DNA, 25 bp, Artificial
  Probe
gaaggccagtcaatcaaatcagata

SEQ ID NO: 298189 - DNA, 25 bp, Artificial
  Probe
cctttagatgctgtgaattattcct

SEQ ID NO: 298190 - DNA, 25 bp, Artificial
  Probe
atgctgtgaattattcctgtattcc

SEQ ID NO: 298191 - DNA, 25 bp, Artificial
  Probe
gtcctttagatgctgtgaattattc

SEQ ID NO: 298192 - DNA, 25 bp, Artificial
  Probe
accctgatagacagggaaggagagt

SEQ ID NO: 298193 - DNA, 25 bp, Artificial
  Probe
agcattgttagatctcccggaagac

SEQ ID NO: 298194 - DNA, 25 bp, Artificial
  Probe
gttagaagaatcactccagggctca

SEQ ID NO: 298195 - DNA, 25 bp, Artificial
  Probe
cgattgtggtttccagacatcttgg

SEQ ID NO: 298196 - DNA, 25 bp, Artificial
  Probe
tgctgtgaattattcctgtattcca

SEQ ID NO: 298197 - DNA, 25 bp, Artificial
  Probe
gtgccagttactaaagaaggccagt

SEQ ID NO: 298198 - DNA, 25 bp, Artificial
  Probe
tacagaacaacgttagaagaatcac

SEQ ID NO: 298199 - DNA, 25 bp, Artificial
  Probe
ctcctccgattgtggtttccagaca

SEQ ID NO: 298200 - DNA, 25 bp, Artificial
  Probe
taaagaaggccagtcaatcaaatca

SEQ ID NO: 298201 - DNA, 25 bp, Artificial
  Probe
tagatctcccggaagacaatggcag

SEQ ID NO: 298202 - DNA, 25 bp, Artificial
  Probe
cttcaaagcattgttagatctcccg

SEQ ID NO: 298203 - DNA, 25 bp, Artificial
  Probe
gcacctaagttatccagatagaagg

SEQ ID NO: 298204 - DNA, 25 bp, Artificial
  Probe
gggctcagcagacaccagggacttc

SEQ ID NO: 298205 - DNA, 25 bp, Artificial
  Probe
gaagaatcactccagggctcagcag

SEQ ID NO: 298206 - DNA, 25 bp, Artificial
  Probe
gttgttcctttccatttccatggtc

SEQ ID NO: 298207 - DNA, 25 bp, Artificial
  Probe
ctgttcttgtctaaagatgtcaaag

SEQ ID NO: 298208 - DNA, 25 bp, Artificial
  Probe
cattgttagatctcccggaagacaa

SEQ ID NO: 298209 - DNA, 25 bp, Artificial
  Probe
attctgttcttgtctaaagatgtca

SEQ ID NO: 298210 - DNA, 25 bp, Artificial
  Probe
actccagggctcagcagacaccagg

SEQ ID NO: 298211 - DNA, 25 bp, Artificial
  Probe
aagcattgttagatctcccggaaga

SEQ ID NO: 298212 - DNA, 25 bp, Artificial
  Probe
gaagactacagaacaacgttagaag

SEQ ID NO: 298213 - DNA, 25 bp, Artificial
  Probe
tccattctgttcttgtctaaagatg

SEQ ID NO: 298214 - DNA, 25 bp, Artificial
  Probe
gcattgttagatctcccggaagaca

SEQ ID NO: 298215 - DNA, 25 bp, Artificial
  Probe
tagaagaatcactccagggctcagc

SEQ ID NO: 298216 - DNA, 25 bp, Artificial
  Probe
ggttgttcctttccatttccatggt

SEQ ID NO: 298217 - DNA, 25 bp, Artificial
  Probe
gagcacctaagttatccagatagaa

SEQ ID NO: 298218 - DNA, 25 bp, Artificial
  Probe
tcccggaagacaatggcagaaaaga

SEQ ID NO: 298219 - DNA, 25 bp, Artificial
  Probe
aggccagtcaatcaaatcagataat

SEQ ID NO: 298220 - DNA, 25 bp, Artificial
  Probe
cctaagttatccagatagaaggaag

SEQ ID NO: 298221 - DNA, 25 bp, Artificial
  Probe
cgttagaagaatcactccagggctc

SEQ ID NO: 298222 - DNA, 25 bp, Artificial
  Probe
agtgccagttactaaagaaggccag

SEQ ID NO: 298223 - DNA, 25 bp, Artificial
  Probe
gtagtgccagttactaaagaaggcc

SEQ ID NO: 298224 - DNA, 25 bp, Artificial
  Probe
aaggttgttcctttccatttccatg

SEQ ID NO: 298225 - DNA, 25 bp, Artificial
  Probe
aaaccctgatagacagggaaggaga

SEQ ID NO: 298226 - DNA, 25 bp, Artificial
  Probe
gactacagaacaacgttagaagaat

SEQ ID NO: 298227 - DNA, 25 bp, Artificial
  Probe
agaaggccagtcaatcaaatcagat

SEQ ID NO: 298228 - DNA, 25 bp, Artificial
  Probe
tgtcaaaggttgttcctttccattt

SEQ ID NO: 298229 - DNA, 25 bp, Artificial
  Probe
gatgtcaaaggttgttcctttccat

SEQ ID NO: 298230 - DNA, 25 bp, Artificial
  Probe
cagggctcagcagacaccagggact

SEQ ID NO: 298231 - DNA, 25 bp, Artificial
  Probe
cctccgattgtggtttccagacatc

SEQ ID NO: 298232 - DNA, 25 bp, Artificial
  Probe
tgctggcagctgtccccaagaggtc

SEQ ID NO: 298233 - DNA, 25 bp, Artificial
  Probe
agactggaaggacctggaagcccca

SEQ ID NO: 298234 - DNA, 25 bp, Artificial
  Probe
attggcagcagctgcctcagctctc

SEQ ID NO: 298235 - DNA, 25 bp, Artificial
  Probe
tcaagaggctcctgcggcagatgag

SEQ ID NO: 298236 - DNA, 25 bp, Artificial
  Probe
cttggcctgggctatgcctcagagg

SEQ ID NO: 298237 - DNA, 25 bp, Artificial
  Probe
tgctgctcctgtccttgcacctggg

SEQ ID NO: 298238 - DNA, 25 bp, Artificial
  Probe
tttgtgccggctgtggagcctgacc

SEQ ID NO: 298239 - DNA, 25 bp, Artificial
  Probe
gtttctgctgctcctgtccttgcac

SEQ ID NO: 298240 - DNA, 25 bp, Artificial
  Probe
ctgggctatgcctcagaggagaaga

SEQ ID NO: 298241 - DNA, 25 bp, Artificial
  Probe
gccttggctgggtccttgatcttca

SEQ ID NO: 298242 - DNA, 25 bp, Artificial
  Probe
accattggcagcagctgcctcagct

SEQ ID NO: 298243 - DNA, 25 bp, Artificial
  Probe
aatgtccgccttccaagagccttac

SEQ ID NO: 298244 - DNA, 25 bp, Artificial
  Probe
ggctcctgcggcagatgagctctca

SEQ ID NO: 298245 - DNA, 25 bp, Artificial
  Probe
tgcacctgggccttggctgggtcct

SEQ ID NO: 298246 - DNA, 25 bp, Artificial
  Probe
agaagattatcttccgatactgtgc

SEQ ID NO: 298247 - DNA, 25 bp, Artificial
  Probe
ttacctggtttgtgccggctgtgga

SEQ ID NO: 298248 - DNA, 25 bp, Artificial
  Probe
ccatcagggtaacaacaatgtccgc

SEQ ID NO: 298249 - DNA, 25 bp, Artificial
  Probe
ctaccagtggctgagcttggcctgg

SEQ ID NO: 298250 - DNA, 25 bp, Artificial
  Probe
cctgcggcagatgagctctcatctg

SEQ ID NO: 298251 - DNA, 25 bp, Artificial
  Probe
cttccaagagccttacctggtttgt

SEQ ID NO: 298252 - DNA, 25 bp, Artificial
  Probe
ccagcccaccagctatgctgatgtg

SEQ ID NO: 298253 - DNA, 25 bp, Artificial
  Probe
gcagctgtccccaagaggtccgtac

SEQ ID NO: 298254 - DNA, 25 bp, Artificial
  Probe
aaatggcagagactggaaggacctg

SEQ ID NO: 298255 - DNA, 25 bp, Artificial
  Probe
gcacctgggccttggctgggtcctt

SEQ ID NO: 298256 - DNA, 25 bp, Artificial
  Probe
cctggaagccccatcagggtaacaa

SEQ ID NO: 298257 - DNA, 25 bp, Artificial
  Probe
cagagactggaaggacctggaagcc

SEQ ID NO: 298258 - DNA, 25 bp, Artificial
  Probe
ctgaccctaccagtggctgagcttg

SEQ ID NO: 298259 - DNA, 25 bp, Artificial
  Probe
ctgagcttggcctgggctatgcctc

SEQ ID NO: 298260 - DNA, 25 bp, Artificial
  Probe
agctcatggcagaccttgctgccag

SEQ ID NO: 298261 - DNA, 25 bp, Artificial
  Probe
tgtgaccttccttgatgaccaccac

SEQ ID NO: 298262 - DNA, 25 bp, Artificial
  Probe
tgcctcagaggagaagattatcttc

SEQ ID NO: 298263 - DNA, 25 bp, Artificial
  Probe
ggaagacttcggatcttgtttctgc

SEQ ID NO: 298264 - DNA, 25 bp, Artificial
  Probe
gctctcagccgcagcttgtggctgt

SEQ ID NO: 298265 - DNA, 25 bp, Artificial
  Probe
ggctgcaggaagacttcggatcttg

SEQ ID NO: 298266 - DNA, 25 bp, Artificial
  Probe
caagaggtccgtacccagcacagtc

SEQ ID NO: 298267 - DNA, 25 bp, Artificial
  Probe
ccaagaggtccgtacccagcacagt

SEQ ID NO: 298268 - DNA, 25 bp, Artificial
  Probe
tacccagcacagtctggtgctggcc

SEQ ID NO: 298269 - DNA, 25 bp, Artificial
  Probe
gggtaacaacaatgtccgccttcca

SEQ ID NO: 298270 - DNA, 25 bp, Artificial
  Probe
gaaggacctggaagccccatcaggg

SEQ ID NO: 298271 - DNA, 25 bp, Artificial
  Probe
gtaacaacaatgtccgccttccaag

SEQ ID NO: 298272 - DNA, 25 bp, Artificial
  Probe
ttgatcttcaagaggctcctgcggc

SEQ ID NO: 298273 - DNA, 25 bp, Artificial
  Probe
tcatctgggaaaatggcagagactg

SEQ ID NO: 298274 - DNA, 25 bp, Artificial
  Probe
gcagggtcgagctcatggcagacct

SEQ ID NO: 298275 - DNA, 25 bp, Artificial
  Probe
ggctgtggagcctgaccctaccagt

SEQ ID NO: 298276 - DNA, 25 bp, Artificial
  Probe
acaatgtccgccttccaagagcctt

SEQ ID NO: 298277 - DNA, 25 bp, Artificial
  Probe
acagtctggtgctggcccgtcttcg

SEQ ID NO: 298278 - DNA, 25 bp, Artificial
  Probe
ggtcttgggctgtcttctaattcca

SEQ ID NO: 298279 - DNA, 25 bp, Artificial
  Probe
gctgacccaatagtcagagttgacc

SEQ ID NO: 298280 - DNA, 25 bp, Artificial
  Probe
gtaacttgtctttggcccagccatg

SEQ ID NO: 298281 - DNA, 25 bp, Artificial
  Probe
tcagagttgacctcactggcctagc

SEQ ID NO: 298282 - DNA, 25 bp, Artificial
  Probe
agctgacccaatagtcagagttgac

SEQ ID NO: 298283 - DNA, 25 bp, Artificial
  Probe
tgtctttggcccagccatggtcttg

SEQ ID NO: 298284 - DNA, 25 bp, Artificial
  Probe
gcccagccatggtcttgggctgtct

SEQ ID NO: 298285 - DNA, 25 bp, Artificial
  Probe
gacccaatagtcagagttgacctca

SEQ ID NO: 298286 - DNA, 25 bp, Artificial
  Probe
tagctgacccaatagtcagagttga

SEQ ID NO: 298287 - DNA, 25 bp, Artificial
  Probe
tgtcttctaattccaaagggttggt

SEQ ID NO: 298288 - DNA, 25 bp, Artificial
  Probe
ttgggctgtcttctaattccaaagg

SEQ ID NO: 298289 - DNA, 25 bp, Artificial
  Probe
ctagcaaaccgtaacttgtctttgg

SEQ ID NO: 298290 - DNA, 25 bp, Artificial
  Probe
tgggctgtcttctaattccaaaggg

SEQ ID NO: 298291 - DNA, 25 bp, Artificial
  Probe
gctgtcttctaattccaaagggttg

SEQ ID NO: 298292 - DNA, 25 bp, Artificial
  Probe
tttggcccagccatggtcttgggct

SEQ ID NO: 298293 - DNA, 25 bp, Artificial
  Probe
gggctgtcttctaattccaaagggt

SEQ ID NO: 298294 - DNA, 25 bp, Artificial
  Probe
cagagttgacctcactggcctagca

SEQ ID NO: 298295 - DNA, 25 bp, Artificial
  Probe
ctcactggcctagcaaaccgtaact

SEQ ID NO: 298296 - DNA, 25 bp, Artificial
  Probe
ttagctgacccaatagtcagagttg

SEQ ID NO: 298297 - DNA, 25 bp, Artificial
  Probe
ctgacccaatagtcagagttgacct

SEQ ID NO: 298298 - DNA, 25 bp, Artificial
  Probe
ctgtcttctaattccaaagggttgg

SEQ ID NO: 298299 - DNA, 25 bp, Artificial
  Probe
agttgacctcactggcctagcaaac

SEQ ID NO: 298300 - DNA, 25 bp, Artificial
  Probe
gttagctgacccaatagtcagagtt

SEQ ID NO: 298301 - DNA, 25 bp, Artificial
  Probe
ccagccatggtcttgggctgtcttc

SEQ ID NO: 298302 - DNA, 25 bp, Artificial
  Probe
ctggcctagcaaaccgtaacttgtc

SEQ ID NO: 298303 - DNA, 25 bp, Artificial
  Probe
acccaatagtcagagttgacctcac

SEQ ID NO: 298304 - DNA, 25 bp, Artificial
  Probe
tcttctaattccaaagggttggtag

SEQ ID NO: 298305 - DNA, 25 bp, Artificial
  Probe
tggcccagccatggtcttgggctgt

SEQ ID NO: 298306 - DNA, 25 bp, Artificial
  Probe
gagttgacctcactggcctagcaaa

SEQ ID NO: 298307 - DNA, 25 bp, Artificial
  Probe
tcttgggctgtcttctaattccaaa

SEQ ID NO: 298308 - DNA, 25 bp, Artificial
  Probe
cttgggctgtcttctaattccaaag

SEQ ID NO: 298309 - DNA, 25 bp, Artificial
  Probe
tcactggcctagcaaaccgtaactt

SEQ ID NO: 298310 - DNA, 25 bp, Artificial
  Probe
acctcactggcctagcaaaccgtaa

SEQ ID NO: 298311 - DNA, 25 bp, Artificial
  Probe
ccgtaacttgtctttggcccagcca

SEQ ID NO: 298312 - DNA, 25 bp, Artificial
  Probe
agagttgacctcactggcctagcaa

SEQ ID NO: 298313 - DNA, 25 bp, Artificial
  Probe
atggtcttgggctgtcttctaattc

SEQ ID NO: 298314 - DNA, 25 bp, Artificial
  Probe
cgtaacttgtctttggcccagccat

SEQ ID NO: 298315 - DNA, 25 bp, Artificial
  Probe
cactggcctagcaaaccgtaacttg

SEQ ID NO: 298316 - DNA, 25 bp, Artificial
  Probe
tggtcttgggctgtcttctaattcc

SEQ ID NO: 298317 - DNA, 25 bp, Artificial
  Probe
atagtcagagttgacctcactggcc

SEQ ID NO: 298318 - DNA, 25 bp, Artificial
  Probe
cctagcaaaccgtaacttgtctttg

SEQ ID NO: 298319 - DNA, 25 bp, Artificial
  Probe
tagcaaaccgtaacttgtctttggc

SEQ ID NO: 298320 - DNA, 25 bp, Artificial
  Probe
ccaatagtcagagttgacctcactg

SEQ ID NO: 298321 - DNA, 25 bp, Artificial
  Probe
ggctgtcttctaattccaaagggtt

SEQ ID NO: 298322 - DNA, 25 bp, Artificial
  Probe
cccagccatggtcttgggctgtctt

SEQ ID NO: 298323 - DNA, 25 bp, Artificial
  Probe
aatagtcagagttgacctcactggc

SEQ ID NO: 298324 - DNA, 25 bp, Artificial
  Probe
cagcaggcaccacctcatcaggatt

SEQ ID NO: 298325 - DNA, 25 bp, Artificial
  Probe
cacctcatcaggattgcgcctgctg

SEQ ID NO: 298326 - DNA, 25 bp, Artificial
  Probe
atactgcagaccttgcagtcacggg

SEQ ID NO: 298327 - DNA, 25 bp, Artificial
  Probe
tactgcagaccttgcagtcacgggt

SEQ ID NO: 298328 - DNA, 25 bp, Artificial
  Probe
gacctttgaacgtctggtggacgtg

SEQ ID NO: 298329 - DNA, 25 bp, Artificial
  Probe
ttccgctacgcagacgactctttta

SEQ ID NO: 298330 - DNA, 25 bp, Artificial
  Probe
gacgactcttttactccagcctttg

SEQ ID NO: 298331 - DNA, 25 bp, Artificial
  Probe
tgtcggagtccctagatactgcaga

SEQ ID NO: 298332 - DNA, 25 bp, Artificial
  Probe
tcggagtccctagatactgcagacc

SEQ ID NO: 298333 - DNA, 25 bp, Artificial
  Probe
tacgcagacgactcttttactccag

SEQ ID NO: 298334 - DNA, 25 bp, Artificial
  Probe
cgggtgccaagcagggcccacagct

SEQ ID NO: 298335 - DNA, 25 bp, Artificial
  Probe
aatgcagtgcaggactggtccactc

SEQ ID NO: 298336 - DNA, 25 bp, Artificial
  Probe
ccatctaccgcaatgacaagaggat

SEQ ID NO: 298337 - DNA, 25 bp, Artificial
  Probe
aaggtcaaaaccatctaccgcaatg

SEQ ID NO: 298338 - DNA, 25 bp, Artificial
  Probe
ggcagctggccgaccacctgggctt

SEQ ID NO: 298339 - DNA, 25 bp, Artificial
  Probe
gagtccctagatactgcagaccttg

SEQ ID NO: 298340 - DNA, 25 bp, Artificial
  Probe
ctcatgggacaatgcccaggtgctg

SEQ ID NO: 298341 - DNA, 25 bp, Artificial
  Probe
aacgaggccggcagctggccgacca

SEQ ID NO: 298342 - DNA, 25 bp, Artificial
  Probe
accatctaccgcaatgacaagagga

SEQ ID NO: 298343 - DNA, 25 bp, Artificial
  Probe
accacctgggctttgagttctttga

SEQ ID NO: 298344 - DNA, 25 bp, Artificial
  Probe
gctacgcagacgactcttttactcc

SEQ ID NO: 298345 - DNA, 25 bp, Artificial
  Probe
ccacctgggctttgagttctttgag

SEQ ID NO: 298346 - DNA, 25 bp, Artificial
  Probe
agtccctagatactgcagaccttgc

SEQ ID NO: 298347 - DNA, 25 bp, Artificial
  Probe
ttcaatgcagtgcaggactggtcca

SEQ ID NO: 298348 - DNA, 25 bp, Artificial
  Probe
taatgtcaagcagacctttgaacgt

SEQ ID NO: 298349 - DNA, 25 bp, Artificial
  Probe
agaagatgtcggagtccctagatac

SEQ ID NO: 298350 - DNA, 25 bp, Artificial
  Probe
gcaggcaccacctcatcaggattgc

SEQ ID NO: 298351 - DNA, 25 bp, Artificial
  Probe
aggcaccacctcatcaggattgcgc

SEQ ID NO: 298352 - DNA, 25 bp, Artificial
  Probe
caagcagacctttgaacgtctggtg

SEQ ID NO: 298353 - DNA, 25 bp, Artificial
  Probe
ctagatactgcagaccttgcagtca

SEQ ID NO: 298354 - DNA, 25 bp, Artificial
  Probe
gtcacgggtgccaagcagggcccac

SEQ ID NO: 298355 - DNA, 25 bp, Artificial
  Probe
tttccgctacgcagacgactctttt

SEQ ID NO: 298356 - DNA, 25 bp, Artificial
  Probe
aggtcaaaaccatctaccgcaatga

SEQ ID NO: 298357 - DNA, 25 bp, Artificial
  Probe
tgtcaagcagacctttgaacgtctg

SEQ ID NO: 298358 - DNA, 25 bp, Artificial
  Probe
gaccttgcagtcacgggtgccaagc

SEQ ID NO: 298359 - DNA, 25 bp, Artificial
  Probe
gcagacgactcttttactccagcct

SEQ ID NO: 298360 - DNA, 25 bp, Artificial
  Probe
ggtcaaaaccatctaccgcaatgac

SEQ ID NO: 298361 - DNA, 25 bp, Artificial
  Probe
actcatgggacaatgcccaggtgct

SEQ ID NO: 298362 - DNA, 25 bp, Artificial
  Probe
aagatgtcggagtccctagatactg

SEQ ID NO: 298363 - DNA, 25 bp, Artificial
  Probe
tgaacgtctggtggacgtgatctgt

SEQ ID NO: 298364 - DNA, 25 bp, Artificial
  Probe
gcagaccttgcagtcacgggtgcca

SEQ ID NO: 298365 - DNA, 25 bp, Artificial
  Probe
gaccacctgggctttgagttctttg

SEQ ID NO: 298366 - DNA, 25 bp, Artificial
  Probe
acctttgaacgtctggtggacgtga

SEQ ID NO: 298367 - DNA, 25 bp, Artificial
  Probe
acgcagacgactcttttactccagc

SEQ ID NO: 298368 - DNA, 25 bp, Artificial
  Probe
atcctgatcattggtaacagcagtg

SEQ ID NO: 298369 - DNA, 25 bp, Artificial
  Probe
cttcaatgcagtgcaggactggtcc

SEQ ID NO: 298370 - DNA, 25 bp, Artificial
  Probe
ctgcttgctccatcagttcattgag

SEQ ID NO: 298371 - DNA, 25 bp, Artificial
  Probe
agtgtggctgctaggcaccccagca

SEQ ID NO: 298372 - DNA, 25 bp, Artificial
  Probe
agacagctacggtcaccccgacgta

SEQ ID NO: 298373 - DNA, 25 bp, Artificial
  Probe
tcttggtcattggaaatgcgggaac

SEQ ID NO: 298374 - DNA, 25 bp, Artificial
  Probe
actggaggacgaaccccgtggagct

SEQ ID NO: 298375 - DNA, 25 bp, Artificial
  Probe
aatcaggtgagctggaccccgagag

SEQ ID NO: 298376 - DNA, 25 bp, Artificial
  Probe
tgcaaactaactcagaggacagaca

SEQ ID NO: 298377 - DNA, 25 bp, Artificial
  Probe
aactcagaggacagacagtaccttt

SEQ ID NO: 298378 - DNA, 25 bp, Artificial
  Probe
caggatggcgagaccgccatgtccg

SEQ ID NO: 298379 - DNA, 25 bp, Artificial
  Probe
gaggctttcatgcagtgcgcaagga

SEQ ID NO: 298380 - DNA, 25 bp, Artificial
  Probe
ggctctggtatccagtatggagacg

SEQ ID NO: 298381 - DNA, 25 bp, Artificial
  Probe
cgcaggagcccgaagagctgaagat

SEQ ID NO: 298382 - DNA, 25 bp, Artificial
  Probe
gctcatgttcctggaaaccagtcca

SEQ ID NO: 298383 - DNA, 25 bp, Artificial
  Probe
cttgagacagctacggtcaccccga

SEQ ID NO: 298384 - DNA, 25 bp, Artificial
  Probe
aagtagatctccacgggaacggtgc

SEQ ID NO: 298385 - DNA, 25 bp, Artificial
  Probe
acgtacacaggctccaagtgcacag

SEQ ID NO: 298386 - DNA, 25 bp, Artificial
  Probe
gttcagtggtggtttctggagcaca

SEQ ID NO: 298387 - DNA, 25 bp, Artificial
  Probe
accataggagtggaattcggtcaaa

SEQ ID NO: 298388 - DNA, 25 bp, Artificial
  Probe
atcaccagccgagaaacctacaatg

SEQ ID NO: 298389 - DNA, 25 bp, Artificial
  Probe
acaggagcggttcaggtctgtcacg

SEQ ID NO: 298390 - DNA, 25 bp, Artificial
  Probe
agcccgaagagctgaagattttact

SEQ ID NO: 298391 - DNA, 25 bp, Artificial
  Probe
caagtgcacaggagtgtggctgcta

SEQ ID NO: 298392 - DNA, 25 bp, Artificial
  Probe
gctggggcactcctcgtctatgaca

SEQ ID NO: 298393 - DNA, 25 bp, Artificial
  Probe
acctggatgccgaccgggaagtcac

SEQ ID NO: 298394 - DNA, 25 bp, Artificial
  Probe
gtcatcattctctgcgggaacaaga

SEQ ID NO: 298395 - DNA, 25 bp, Artificial
  Probe
acgaaccccgtggagctgtggcgca

SEQ ID NO: 298396 - DNA, 25 bp, Artificial
  Probe
aaatgcgggaactggcaaatcctgc

SEQ ID NO: 298397 - DNA, 25 bp, Artificial
  Probe
cgagacttacgatttcttgtttaag

SEQ ID NO: 298398 - DNA, 25 bp, Artificial
  Probe
atgccagaatgctggcgagccagaa

SEQ ID NO: 298399 - DNA, 25 bp, Artificial
  Probe
ggttcgcacaagagaatgagctcat

SEQ ID NO: 298400 - DNA, 25 bp, Artificial
  Probe
caagctactacagaggtgcggctgg

SEQ ID NO: 298401 - DNA, 25 bp, Artificial
  Probe
tcctgcttgctccatcagttcattg

SEQ ID NO: 298402 - DNA, 25 bp, Artificial
  Probe
ggttcctctcgctctcgagactgga

SEQ ID NO: 298403 - DNA, 25 bp, Artificial
  Probe
atctccacgggaacggtgcacgccg

SEQ ID NO: 298404 - DNA, 25 bp, Artificial
  Probe
cttggtcattggaaatgcgggaact

SEQ ID NO: 298405 - DNA, 25 bp, Artificial
  Probe
cgcaggatggcgagaccgccatgtc

SEQ ID NO: 298406 - DNA, 25 bp, Artificial
  Probe
gagacgccgccttgagacagctacg

SEQ ID NO: 298407 - DNA, 25 bp, Artificial
  Probe
gggcactcctcgtctatgacatcac

SEQ ID NO: 298408 - DNA, 25 bp, Artificial
  Probe
aagatgactcaaatcataccatagg

SEQ ID NO: 298409 - DNA, 25 bp, Artificial
  Probe
tgcagtgcgcaaggaagatacttaa

SEQ ID NO: 298410 - DNA, 25 bp, Artificial
  Probe
gaccgggaagtcaccttccttgaag

SEQ ID NO: 298411 - DNA, 25 bp, Artificial
  Probe
tgctggcgagccagaacatcgtcat

SEQ ID NO: 298412 - DNA, 25 bp, Artificial
  Probe
aaccagtccactgactggcgagaac

SEQ ID NO: 298413 - DNA, 25 bp, Artificial
  Probe
aaattgaatcaggtgagctggaccc

SEQ ID NO: 298414 - DNA, 25 bp, Artificial
  Probe
aggcaccccagcaacacaggttcag

SEQ ID NO: 298415 - DNA, 25 bp, Artificial
  Probe
tccagtatggagacgccgccttgag

SEQ ID NO: 298416 - DNA, 25 bp, Artificial
  Probe
agaagatggttcctttgctggagac

SEQ ID NO: 298417 - DNA, 25 bp, Artificial
  Probe
acctcatggggcagcttcatcggat

SEQ ID NO: 298418 - DNA, 25 bp, Artificial
  Probe
ccctgtcttttgcatgcctgaagaa

SEQ ID NO: 298419 - DNA, 25 bp, Artificial
  Probe
cttgggcaaacttgatgctattaat

SEQ ID NO: 298420 - DNA, 25 bp, Artificial
  Probe
cagcttcatcggatgaataaagagg

SEQ ID NO: 298421 - DNA, 25 bp, Artificial
  Probe
tcaagtcgtgccagcatgagtgtgg

SEQ ID NO: 298422 - DNA, 25 bp, Artificial
  Probe
gatactggtgtttatcaagtcgtgc

SEQ ID NO: 298423 - DNA, 25 bp, Artificial
  Probe
tggcctccttaaagataatcgggag

SEQ ID NO: 298424 - DNA, 25 bp, Artificial
  Probe
tgccatctccctgtgtccttttgac

SEQ ID NO: 298425 - DNA, 25 bp, Artificial
  Probe
atggtggatccctttcacaccttgt

SEQ ID NO: 298426 - DNA, 25 bp, Artificial
  Probe
gaagtgctacagagggtgaatgtcc

SEQ ID NO: 298427 - DNA, 25 bp, Artificial
  Probe
tcgtacggctcaaagaaagatgatt

SEQ ID NO: 298428 - DNA, 25 bp, Artificial
  Probe
aaagcttcgaagcttcatcttggca

SEQ ID NO: 298429 - DNA, 25 bp, Artificial
  Probe
agacaaagtggtagcctatgttcag

SEQ ID NO: 298430 - DNA, 25 bp, Artificial
  Probe
tgctggagacatctggggagaaatc

SEQ ID NO: 298431 - DNA, 25 bp, Artificial
  Probe
atcgatacaagattctcattttgtg

SEQ ID NO: 298432 - DNA, 25 bp, Artificial
  Probe
atcaacgtagacaaagtggtagcct

SEQ ID NO: 298433 - DNA, 25 bp, Artificial
  Probe
ctacttggttggtggctttgtgaac

SEQ ID NO: 298434 - DNA, 25 bp, Artificial
  Probe
tggtggctttgtgaacgacagttgc

SEQ ID NO: 298435 - DNA, 25 bp, Artificial
  Probe
ctccctgtgtccttttgacctgtaa

SEQ ID NO: 298436 - DNA, 25 bp, Artificial
  Probe
ttctctacacgctcagtgctgtcca

SEQ ID NO: 298437 - DNA, 25 bp, Artificial
  Probe
agggtgaatgtccagcctgaactag

SEQ ID NO: 298438 - DNA, 25 bp, Artificial
  Probe
gaagcttcatcttggcatgtcaaga

SEQ ID NO: 298439 - DNA, 25 bp, Artificial
  Probe
gtcagatgcgcctgacaccctgctg

SEQ ID NO: 298440 - DNA, 25 bp, Artificial
  Probe
tctactggggcctgacagtgatgga

SEQ ID NO: 298441 - DNA, 25 bp, Artificial
  Probe
agacatctggggagaaatcgataca

SEQ ID NO: 298442 - DNA, 25 bp, Artificial
  Probe
cagatgtgtgctattcctggtgggt

SEQ ID NO: 298443 - DNA, 25 bp, Artificial
  Probe
gcattgctggattgtcacttctggg

SEQ ID NO: 298444 - DNA, 25 bp, Artificial
  Probe
aactagtgagctagtccgaggggaa

SEQ ID NO: 298445 - DNA, 25 bp, Artificial
  Probe
tttgttaatgtctaacagcagcaaa

SEQ ID NO: 298446 - DNA, 25 bp, Artificial
  Probe
ctgacaccctgctgctcgagaagca

SEQ ID NO: 298447 - DNA, 25 bp, Artificial
  Probe
ggattcctggccataactagtcagt

SEQ ID NO: 298448 - DNA, 25 bp, Artificial
  Probe
gaagcatgctgattatatcgcctcg

SEQ ID NO: 298449 - DNA, 25 bp, Artificial
  Probe
gctctgaatctcacgccggacagat

SEQ ID NO: 298450 - DNA, 25 bp, Artificial
  Probe
tacttgagaatgagcggcgtctact

SEQ ID NO: 298451 - DNA, 25 bp, Artificial
  Probe
tgggtgttggcctccttaaagataa

SEQ ID NO: 298452 - DNA, 25 bp, Artificial
  Probe
atggaagacccgagaagttaccaga

SEQ ID NO: 298453 - DNA, 25 bp, Artificial
  Probe
gtctaacagcagcaaacttaaaaag

SEQ ID NO: 298454 - DNA, 25 bp, Artificial
  Probe
tagcctatgttcagagtctacagaa

SEQ ID NO: 298455 - DNA, 25 bp, Artificial
  Probe
tgctggattgtcacttctgggggaa

SEQ ID NO: 298456 - DNA, 25 bp, Artificial
  Probe
gttatcaaacccagaagtgacttaa

SEQ ID NO: 298457 - DNA, 25 bp, Artificial
  Probe
ggacatgggcacacagcagaaggac

SEQ ID NO: 298458 - DNA, 25 bp, Artificial
  Probe
attatgaatactgcatgtccgaata

SEQ ID NO: 298459 - DNA, 25 bp, Artificial
  Probe
catgcctgaagaagtgctacagagg

SEQ ID NO: 298460 - DNA, 25 bp, Artificial
  Probe
ggtggatccctttcacaccttgttt

SEQ ID NO: 298461 - DNA, 25 bp, Artificial
  Probe
tgcagtatcagttactgtggttatc

SEQ ID NO: 298462 - DNA, 25 bp, Artificial
  Probe
tcacatttcagcttcaacagagggt

SEQ ID NO: 298463 - DNA, 25 bp, Artificial
  Probe
ccagcatattagtcagaagaatttg

SEQ ID NO: 298464 - DNA, 25 bp, Artificial
  Probe
ccactacagtgatgctgactgcatc

SEQ ID NO: 298465 - DNA, 25 bp, Artificial
  Probe
ggcagtcacactacattgcacagga

SEQ ID NO: 298466 - DNA, 25 bp, Artificial
  Probe
aatcccactacagtgatgctgactg

SEQ ID NO: 298467 - DNA, 25 bp, Artificial
  Probe
aacagagggtttcaccagcatatta

SEQ ID NO: 298468 - DNA, 25 bp, Artificial
  Probe
actacattgcacaggattgagaaga

SEQ ID NO: 298469 - DNA, 25 bp, Artificial
  Probe
aagctcttggcagtcacactacatt

SEQ ID NO: 298470 - DNA, 25 bp, Artificial
  Probe
cacactacattgcacaggattgaga

SEQ ID NO: 298471 - DNA, 25 bp, Artificial
  Probe
acatttcagcttcaacagagggttt

SEQ ID NO: 298472 - DNA, 25 bp, Artificial
  Probe
cttggcagtcacactacattgcaca

SEQ ID NO: 298473 - DNA, 25 bp, Artificial
  Probe
tacagtgatgctgactgcatcttta

SEQ ID NO: 298474 - DNA, 25 bp, Artificial
  Probe
gtcacactacattgcacaggattga

SEQ ID NO: 298475 - DNA, 25 bp, Artificial
  Probe
ttgcttcataaagctcttggcagtc

SEQ ID NO: 298476 - DNA, 25 bp, Artificial
  Probe
gctcttggcagtcacactacattgc

SEQ ID NO: 298477 - DNA, 25 bp, Artificial
  Probe
tcaccagcatattagtcagaagaat

SEQ ID NO: 298478 - DNA, 25 bp, Artificial
  Probe
cagtgatgctgactgcatctttaag

SEQ ID NO: 298479 - DNA, 25 bp, Artificial
  Probe
tttcaccagcatattagtcagaaga

SEQ ID NO: 298480 - DNA, 25 bp, Artificial
  Probe
ttcagcttcaacagagggtttcacc

SEQ ID NO: 298481 - DNA, 25 bp, Artificial
  Probe
cttgcttcataaagctcttggcagt

SEQ ID NO: 298482 - DNA, 25 bp, Artificial
  Probe
agagggtttcaccagcatattagtc

SEQ ID NO: 298483 - DNA, 25 bp, Artificial
  Probe
tgctgactgcatctttaagaagtga

SEQ ID NO: 298484 - DNA, 25 bp, Artificial
  Probe
actacagtgatgctgactgcatctt

SEQ ID NO: 298485 - DNA, 25 bp, Artificial
  Probe
cagagggtttcaccagcatattagt

SEQ ID NO: 298486 - DNA, 25 bp, Artificial
  Probe
cactacattgcacaggattgagaag

SEQ ID NO: 298487 - DNA, 25 bp, Artificial
  Probe
ctacattgcacaggattgagaagag

SEQ ID NO: 298488 - DNA, 25 bp, Artificial
  Probe
tgaatcccactacagtgatgctgac

SEQ ID NO: 298489 - DNA, 25 bp, Artificial
  Probe
aaagctcttggcagtcacactacat

SEQ ID NO: 298490 - DNA, 25 bp, Artificial
  Probe
gtgtcctacaattctcccagacttg

SEQ ID NO: 298491 - DNA, 25 bp, Artificial
  Probe
tcccactacagtgatgctgactgca

SEQ ID NO: 298492 - DNA, 25 bp, Artificial
  Probe
accagcatattagtcagaagaattt

SEQ ID NO: 298493 - DNA, 25 bp, Artificial
  Probe
gactgcatctttaagaagtgaccat

SEQ ID NO: 298494 - DNA, 25 bp, Artificial
  Probe
ggtttcaccagcatattagtcagaa

SEQ ID NO: 298495 - DNA, 25 bp, Artificial
  Probe
ctgactgcatctttaagaagtgacc

SEQ ID NO: 298496 - DNA, 25 bp, Artificial
  Probe
gacttgcttcataaagctcttggca

SEQ ID NO: 298497 - DNA, 25 bp, Artificial
  Probe
atttcagcttcaacagagggtttca

SEQ ID NO: 298498 - DNA, 25 bp, Artificial
  Probe
cagtcacactacattgcacaggatt

SEQ ID NO: 298499 - DNA, 25 bp, Artificial
  Probe
agggtttcaccagcatattagtcag

SEQ ID NO: 298500 - DNA, 25 bp, Artificial
  Probe
cagcttcaacagagggtttcaccag

SEQ ID NO: 298501 - DNA, 25 bp, Artificial
  Probe
ttcaacagagggtttcaccagcata

SEQ ID NO: 298502 - DNA, 25 bp, Artificial
  Probe
gatgctgactgcatctttaagaagt

SEQ ID NO: 298503 - DNA, 25 bp, Artificial
  Probe
ttggcagtcacactacattgcacag

SEQ ID NO: 298504 - DNA, 25 bp, Artificial
  Probe
ggagtgaatcccactacagtgatgc

SEQ ID NO: 298505 - DNA, 25 bp, Artificial
  Probe
gtgatgctgactgcatctttaagaa

SEQ ID NO: 298506 - DNA, 25 bp, Artificial
  Probe
agtgaatcccactacagtgatgctg

SEQ ID NO: 298507 - DNA, 25 bp, Artificial
  Probe
tcaacagagggtttcaccagcatat

SEQ ID NO: 298508 - DNA, 25 bp, Artificial
  Probe
gtccactcttctgacttggcttctc

SEQ ID NO: 298509 - DNA, 25 bp, Artificial
  Probe
acttctgctagaagcttgggtgcag

SEQ ID NO: 298510 - DNA, 25 bp, Artificial
  Probe
cttctgtgaaaaacttcaagccctg

SEQ ID NO: 298511 - DNA, 25 bp, Artificial
  Probe
gggaacccaactgctttggacctag

SEQ ID NO: 298512 - DNA, 25 bp, Artificial
  Probe
tgcctcttctgtgaaaaacttcaag

SEQ ID NO: 298513 - DNA, 25 bp, Artificial
  Probe
ttctgacttggcttctccaaatggg

SEQ ID NO: 298514 - DNA, 25 bp, Artificial
  Probe
cttctcctctgacttctgctagaag

SEQ ID NO: 298515 - DNA, 25 bp, Artificial
  Probe
acgcctgttgtccactcttctgact

SEQ ID NO: 298516 - DNA, 25 bp, Artificial
  Probe
gcaagtcagttgactggtgtcccca

SEQ ID NO: 298517 - DNA, 25 bp, Artificial
  Probe
ttttagagccccagcagaccttact

SEQ ID NO: 298518 - DNA, 25 bp, Artificial
  Probe
ggttttgcacatgtttcctctaatt

SEQ ID NO: 298519 - DNA, 25 bp, Artificial
  Probe
acttctggggtaaggcaagtcagtt

SEQ ID NO: 298520 - DNA, 25 bp, Artificial
  Probe
ctcagggtgtgctgggaattccttc

SEQ ID NO: 298521 - DNA, 25 bp, Artificial
  Probe
agcacttacccatagagaccattag

SEQ ID NO: 298522 - DNA, 25 bp, Artificial
  Probe
cagagggtttcttgcattttgtctt

SEQ ID NO: 298523 - DNA, 25 bp, Artificial
  Probe
tgaaaaacttcaagccctggcctcc

SEQ ID NO: 298524 - DNA, 25 bp, Artificial
  Probe
taggctcccatttgcctcttctgtg

SEQ ID NO: 298525 - DNA, 25 bp, Artificial
  Probe
agaccattagggttggctgtgctgt

SEQ ID NO: 298526 - DNA, 25 bp, Artificial
  Probe
agctctggacagaaagggaacccaa

SEQ ID NO: 298527 - DNA, 25 bp, Artificial
  Probe
caagtcagttgactggtgtccccac

SEQ ID NO: 298528 - DNA, 25 bp, Artificial
  Probe
gccatagcacttacccatagagacc

SEQ ID NO: 298529 - DNA, 25 bp, Artificial
  Probe
taaggcaagtcagttgactggtgtc

SEQ ID NO: 298530 - DNA, 25 bp, Artificial
  Probe
ggtgtgctgggaattccttctcctc

SEQ ID NO: 298531 - DNA, 25 bp, Artificial
  Probe
actaggctcccatttgcctcttctg

SEQ ID NO: 298532 - DNA, 25 bp, Artificial
  Probe
tgtgaaaaacttcaagccctggcct

SEQ ID NO: 298533 - DNA, 25 bp, Artificial
  Probe
taatttttctgttttagagccccag

SEQ ID NO: 298534 - DNA, 25 bp, Artificial
  Probe
gacacgccatagcacttacccatag

SEQ ID NO: 298535 - DNA, 25 bp, Artificial
  Probe
ggaattccttctcctctgacttctg

SEQ ID NO: 298536 - DNA, 25 bp, Artificial
  Probe
tccagggctccttggaattcacttc

SEQ ID NO: 298537 - DNA, 25 bp, Artificial
  Probe
gacttggcttctccaaatgggagga

SEQ ID NO: 298538 - DNA, 25 bp, Artificial
  Probe
ttccctaatctacattcgggagacc

SEQ ID NO: 298539 - DNA, 25 bp, Artificial
  Probe
ttgtgactggaggatcctgaggaca

SEQ ID NO: 298540 - DNA, 25 bp, Artificial
  Probe
tggaattcacttctcattgtgggga

SEQ ID NO: 298541 - DNA, 25 bp, Artificial
  Probe
gtctcagggtgtgctgggaattcct

SEQ ID NO: 298542 - DNA, 25 bp, Artificial
  Probe
catagagaccattagggttggctgt

SEQ ID NO: 298543 - DNA, 25 bp, Artificial
  Probe
ggaggagactcagctctggacagaa

SEQ ID NO: 298544 - DNA, 25 bp, Artificial
  Probe
gcttcaacagacacgccatagcact

SEQ ID NO: 298545 - DNA, 25 bp, Artificial
  Probe
aggggcttcaacagacacgccatag

SEQ ID NO: 298546 - DNA, 25 bp, Artificial
  Probe
ttacttctggggtaaggcaagtcag

SEQ ID NO: 298547 - DNA, 25 bp, Artificial
  Probe
ttctacgcctgatggggaaatagtt

SEQ ID NO: 298548 - DNA, 25 bp, Artificial
  Probe
acctagatggcctattgtgactgga

SEQ ID NO: 298549 - DNA, 25 bp, Artificial
  Probe
tttggacctagatggcctattgtga

SEQ ID NO: 298550 - DNA, 25 bp, Artificial
  Probe
gaggtctactttagacaacttggtt

SEQ ID NO: 298551 - DNA, 25 bp, Artificial
  Probe
cagaccttacttctggggtaaggca

SEQ ID NO: 298552 - DNA, 25 bp, Artificial
  Probe
tttctgttttagagccccagcagac

SEQ ID NO: 298553 - DNA, 25 bp, Artificial
  Probe
tgcagagggtttcttgcattttgtc

SEQ ID NO: 298554 - DNA, 25 bp, Artificial
  Probe
taatctgatctgtgtcacgttgcac

SEQ ID NO: 298555 - DNA, 25 bp, Artificial
  Probe
aattctgcagttctgtaatcaaaaa

SEQ ID NO: 298556 - DNA, 25 bp, Artificial
  Probe
ggaatacaaacacagtatgggatct

SEQ ID NO: 298557 - DNA, 25 bp, Artificial
  Probe
acaaacacagtatgggatctgtctt

SEQ ID NO: 298558 - DNA, 25 bp, Artificial
  Probe
tatcaattctgcagttctgtaatca

SEQ ID NO: 298559 - DNA, 25 bp, Artificial
  Probe
ctgcagttctgtaatcaaaaaaaaa

SEQ ID NO: 298560 - DNA, 25 bp, Artificial
  Probe
aacacagtatgggatctgtcttaaa

SEQ ID NO: 298561 - DNA, 25 bp, Artificial
  Probe
cacagtatgggatctgtcttaaata

SEQ ID NO: 298562 - DNA, 25 bp, Artificial
  Probe
aaacactgtcaattgtgttaatctg

SEQ ID NO: 298563 - DNA, 25 bp, Artificial
  Probe
ttaatctgatctgtgtcacgttgca

SEQ ID NO: 298564 - DNA, 25 bp, Artificial
  Probe
caaaaaaaaaacactgtcaattgtg

SEQ ID NO: 298565 - DNA, 25 bp, Artificial
  Probe
atgggatctgtcttaaatagtatca

SEQ ID NO: 298566 - DNA, 25 bp, Artificial
  Probe
aatagtatcaattctgcagttctgt

SEQ ID NO: 298567 - DNA, 25 bp, Artificial
  Probe
aaaaacactgtcaattgtgttaatc

SEQ ID NO: 298568 - DNA, 25 bp, Artificial
  Probe
aatctgatctgtgtcacgttgcaca

SEQ ID NO: 298569 - DNA, 25 bp, Artificial
  Probe
atctgatctgtgtcacgttgcacat

SEQ ID NO: 298570 - DNA, 25 bp, Artificial
  Probe
aaatagtatcaattctgcagttctg

SEQ ID NO: 298571 - DNA, 25 bp, Artificial
  Probe
aattgtgttaatctgatctgtgtca

SEQ ID NO: 298572 - DNA, 25 bp, Artificial
  Probe
atagtatcaattctgcagttctgta

SEQ ID NO: 298573 - DNA, 25 bp, Artificial
  Probe
taatcaaaaaaaaaacactgtcaat

SEQ ID NO: 298574 - DNA, 25 bp, Artificial
  Probe
atcaaaaaaaaaacactgtcaattg

SEQ ID NO: 298575 - DNA, 25 bp, Artificial
  Probe
ttgtgttaatctgatctgtgtcacg

SEQ ID NO: 298576 - DNA, 25 bp, Artificial
  Probe
tgatctgtgtcacgttgcacataaa

SEQ ID NO: 298577 - DNA, 25 bp, Artificial
  Probe
gtatcaattctgcagttctgtaatc

SEQ ID NO: 298578 - DNA, 25 bp, Artificial
  Probe
atacaaacacagtatgggatctgtc

SEQ ID NO: 298579 - DNA, 25 bp, Artificial
  Probe
acagtatgggatctgtcttaaatag

SEQ ID NO: 298580 - DNA, 25 bp, Artificial
  Probe
cttaaatagtatcaattctgcagtt

SEQ ID NO: 298581 - DNA, 25 bp, Artificial
  Probe
attgtgttaatctgatctgtgtcac

SEQ ID NO: 298582 - DNA, 25 bp, Artificial
  Probe
tacaaacacagtatgggatctgtct

SEQ ID NO: 298583 - DNA, 25 bp, Artificial
  Probe
agtatgggatctgtcttaaatagta

SEQ ID NO: 298584 - DNA, 25 bp, Artificial
  Probe
agtatcaattctgcagttctgtaat

SEQ ID NO: 298585 - DNA, 25 bp, Artificial
  Probe
tctgatctgtgtcacgttgcacata

SEQ ID NO: 298586 - DNA, 25 bp, Artificial
  Probe
ctgatctgtgtcacgttgcacataa

SEQ ID NO: 298587 - DNA, 25 bp, Artificial
  Probe
tgtcaattgtgttaatctgatctgt

SEQ ID NO: 298588 - DNA, 25 bp, Artificial
  Probe
aaaaaacactgtcaattgtgttaat

SEQ ID NO: 298589 - DNA, 25 bp, Artificial
  Probe
tggaatacaaacacagtatgggatc

SEQ ID NO: 298590 - DNA, 25 bp, Artificial
  Probe
gatctgtgtcacgttgcacataaag

SEQ ID NO: 298591 - DNA, 25 bp, Artificial
  Probe
tagtatcaattctgcagttctgtaa

SEQ ID NO: 298592 - DNA, 25 bp, Artificial
  Probe
gaatacaaacacagtatgggatctg

SEQ ID NO: 298593 - DNA, 25 bp, Artificial
  Probe
aatacaaacacagtatgggatctgt

SEQ ID NO: 298594 - DNA, 25 bp, Artificial
  Probe
tgtgttaatctgatctgtgtcacgt

SEQ ID NO: 298595 - DNA, 25 bp, Artificial
  Probe
gttaatctgatctgtgtcacgttgc

SEQ ID NO: 298596 - DNA, 25 bp, Artificial
  Probe
acacagtatgggatctgtcttaaat

SEQ ID NO: 298597 - DNA, 25 bp, Artificial
  Probe
ctggaatacaaacacagtatgggat

SEQ ID NO: 298598 - DNA, 25 bp, Artificial
  Probe
gtgttaatctgatctgtgtcacgtt

SEQ ID NO: 298599 - DNA, 25 bp, Artificial
  Probe
tgttaatctgatctgtgtcacgttg

SEQ ID NO: 298600 - DNA, 25 bp, Artificial
  Probe
gttcctgacatttttctacctgacc

SEQ ID NO: 298601 - DNA, 25 bp, Artificial
  Probe
gtctggttcctgacatttttctacc

SEQ ID NO: 298602 - DNA, 25 bp, Artificial
  Probe
tctggttcctgacatttttctacct

SEQ ID NO: 298603 - DNA, 25 bp, Artificial
  Probe
tctaaaagaaatctcccatcatcgc

SEQ ID NO: 298604 - DNA, 25 bp, Artificial
  Probe
tttttctaaaagaaatctcccatca

SEQ ID NO: 298605 - DNA, 25 bp, Artificial
  Probe
ttttctaaaagaaatctcccatcat

SEQ ID NO: 298606 - DNA, 25 bp, Artificial
  Probe
ggttcctgacatttttctacctgac

SEQ ID NO: 298607 - DNA, 25 bp, Artificial
  Probe
catttttctacctgacccctcacca

SEQ ID NO: 298608 - DNA, 25 bp, Artificial
  Probe
attgtggtctggttcctgacatttt

SEQ ID NO: 298609 - DNA, 25 bp, Artificial
  Probe
tctcccatcatcgcatccctttaga

SEQ ID NO: 298610 - DNA, 25 bp, Artificial
  Probe
aagaaatctcccatcatcgcatccc

SEQ ID NO: 298611 - DNA, 25 bp, Artificial
  Probe
gaaatctcccatcatcgcatccctt

SEQ ID NO: 298612 - DNA, 25 bp, Artificial
  Probe
ccatcatcgcatccctttagagttt

SEQ ID NO: 298613 - DNA, 25 bp, Artificial
  Probe
ctcccatcatcgcatccctttagag

SEQ ID NO: 298614 - DNA, 25 bp, Artificial
  Probe
catcgcatccctttagagttttttg

SEQ ID NO: 298615 - DNA, 25 bp, Artificial
  Probe
ctgacatttttctacctgacccctc

SEQ ID NO: 298616 - DNA, 25 bp, Artificial
  Probe
ttcctgacatttttctacctgaccc

SEQ ID NO: 298617 - DNA, 25 bp, Artificial
  Probe
ttttaaaattgtggtctggttcctg

SEQ ID NO: 298618 - DNA, 25 bp, Artificial
  Probe
atcgcatccctttagagttttttgg

SEQ ID NO: 298619 - DNA, 25 bp, Artificial
  Probe
aaaagaaatctcccatcatcgcatc

SEQ ID NO: 298620 - DNA, 25 bp, Artificial
  Probe
tcctgacatttttctacctgacccc

SEQ ID NO: 298621 - DNA, 25 bp, Artificial
  Probe
ttctaaaagaaatctcccatcatcg

SEQ ID NO: 298622 - DNA, 25 bp, Artificial
  Probe
ttgtggtctggttcctgacattttt

SEQ ID NO: 298623 - DNA, 25 bp, Artificial
  Probe
tcgcatccctttagagttttttggt

SEQ ID NO: 298624 - DNA, 25 bp, Artificial
  Probe
tcccatcatcgcatccctttagagt

SEQ ID NO: 298625 - DNA, 25 bp, Artificial
  Probe
tgacatttttctacctgacccctca

SEQ ID NO: 298626 - DNA, 25 bp, Artificial
  Probe
catcatcgcatccctttagagtttt

SEQ ID NO: 298627 - DNA, 25 bp, Artificial
  Probe
aaaattgtggtctggttcctgacat

SEQ ID NO: 298628 - DNA, 25 bp, Artificial
  Probe
aaattgtggtctggttcctgacatt

SEQ ID NO: 298629 - DNA, 25 bp, Artificial
  Probe
gacatttttctacctgacccctcac

SEQ ID NO: 298630 - DNA, 25 bp, Artificial
  Probe
tgtggtctggttcctgacatttttc

SEQ ID NO: 298631 - DNA, 25 bp, Artificial
  Probe
ctggttcctgacatttttctacctg

SEQ ID NO: 298632 - DNA, 25 bp, Artificial
  Probe
gtggtctggttcctgacatttttct

SEQ ID NO: 298633 - DNA, 25 bp, Artificial
  Probe
tcatcgcatccctttagagtttttt

SEQ ID NO: 298634 - DNA, 25 bp, Artificial
  Probe
tttttctacctgacccctcaccaat

SEQ ID NO: 298635 - DNA, 25 bp, Artificial
  Probe
tggttcctgacatttttctacctga

SEQ ID NO: 298636 - DNA, 25 bp, Artificial
  Probe
atcatcgcatccctttagagttttt

SEQ ID NO: 298637 - DNA, 25 bp, Artificial
  Probe
ggtctggttcctgacatttttctac

SEQ ID NO: 298638 - DNA, 25 bp, Artificial
  Probe
aattgtggtctggttcctgacattt

SEQ ID NO: 298639 - DNA, 25 bp, Artificial
  Probe
ttaaaattgtggtctggttcctgac

SEQ ID NO: 298640 - DNA, 25 bp, Artificial
  Probe
tttctaaaagaaatctcccatcatc

SEQ ID NO: 298641 - DNA, 25 bp, Artificial
  Probe
tggtctggttcctgacatttttcta

SEQ ID NO: 298642 - DNA, 25 bp, Artificial
  Probe
taaaagaaatctcccatcatcgcat

SEQ ID NO: 298643 - DNA, 25 bp, Artificial
  Probe
cctgacatttttctacctgacccct

SEQ ID NO: 298644 - DNA, 25 bp, Artificial
  Probe
tttaaaattgtggtctggttcctga

SEQ ID NO: 298645 - DNA, 25 bp, Artificial
  Probe
taaaattgtggtctggttcctgaca

SEQ ID NO: 298646 - DNA, 25 bp, Artificial
  Probe
agcctctggcttgtaagatttttat

SEQ ID NO: 298647 - DNA, 25 bp, Artificial
  Probe
ggcttcttcagtcaccctttgcaca

SEQ ID NO: 298648 - DNA, 25 bp, Artificial
  Probe
accccttataatgctgttacccagg

SEQ ID NO: 298649 - DNA, 25 bp, Artificial
  Probe
catgatcgtgggattagttggccag

SEQ ID NO: 298650 - DNA, 25 bp, Artificial
  Probe
gccagagttgtgactcatagatggg

SEQ ID NO: 298651 - DNA, 25 bp, Artificial
  Probe
ttagtgaggtcttaggcatccaccc

SEQ ID NO: 298652 - DNA, 25 bp, Artificial
  Probe
tcaggtcctgggattaaagccatat

SEQ ID NO: 298653 - DNA, 25 bp, Artificial
  Probe
ctgagtattctctagttacatttgt

SEQ ID NO: 298654 - DNA, 25 bp, Artificial
  Probe
cagccaggatgtttcttgttttggt

SEQ ID NO: 298655 - DNA, 25 bp, Artificial
  Probe
accctactgtgtttctccctttgtg

SEQ ID NO: 298656 - DNA, 25 bp, Artificial
  Probe
ttctgctcttgaactcctagagttc

SEQ ID NO: 298657 - DNA, 25 bp, Artificial
  Probe
cactgcctgaagtggtagttgggat

SEQ ID NO: 298658 - DNA, 25 bp, Artificial
  Probe
gtctcaccaggcacaaccttgagtc

SEQ ID NO: 298659 - DNA, 25 bp, Artificial
  Probe
ttatctctgggctccttctcacctg

SEQ ID NO: 298660 - DNA, 25 bp, Artificial
  Probe
ggcacaaccttgagtcctcactgct

SEQ ID NO: 298661 - DNA, 25 bp, Artificial
  Probe
gaagcagtaataaccctactgtgtt

SEQ ID NO: 298662 - DNA, 25 bp, Artificial
  Probe
tcccaggggattcatcatgatcgtg

SEQ ID NO: 298663 - DNA, 25 bp, Artificial
  Probe
ctaagctcatagtgatatgtggggc

SEQ ID NO: 298664 - DNA, 25 bp, Artificial
  Probe
gatactaaccactgcctcaatggca

SEQ ID NO: 298665 - DNA, 25 bp, Artificial
  Probe
gagagagacactgactctaagctca

SEQ ID NO: 298666 - DNA, 25 bp, Artificial
  Probe
catatgtcaccttacccagccagga

SEQ ID NO: 298667 - DNA, 25 bp, Artificial
  Probe
atgatactaaccactgcctcaatgg

SEQ ID NO: 298668 - DNA, 25 bp, Artificial
  Probe
ggttttagtgaggtcttaggcatcc

SEQ ID NO: 298669 - DNA, 25 bp, Artificial
  Probe
gttgctattcaaatcaatgtatctg

SEQ ID NO: 298670 - DNA, 25 bp, Artificial
  Probe
aactatagagaccattctgctcttg

SEQ ID NO: 298671 - DNA, 25 bp, Artificial
  Probe
ggactctctgtcattgtatctttcc

SEQ ID NO: 298672 - DNA, 25 bp, Artificial
  Probe
cacagcactgtgttatgagatggtg

SEQ ID NO: 298673 - DNA, 25 bp, Artificial
  Probe
ggatgaccaacttgatcccatttta

SEQ ID NO: 298674 - DNA, 25 bp, Artificial
  Probe
gggtacctattggataccatcaagc

SEQ ID NO: 298675 - DNA, 25 bp, Artificial
  Probe
tctcctctgccaacaggaccttttg

SEQ ID NO: 298676 - DNA, 25 bp, Artificial
  Probe
catggcacattctataggaaaagag

SEQ ID NO: 298677 - DNA, 25 bp, Artificial
  Probe
gcctcaatggcaatacaactaatgt

SEQ ID NO: 298678 - DNA, 25 bp, Artificial
  Probe
gtttctccctttgtgactcttgtaa

SEQ ID NO: 298679 - DNA, 25 bp, Artificial
  Probe
tgcctcaatggcaatacaactaatg

SEQ ID NO: 298680 - DNA, 25 bp, Artificial
  Probe
taacttctttcaaatatcaagaggg

SEQ ID NO: 298681 - DNA, 25 bp, Artificial
  Probe
ggaggtcatggcacattctatagga

SEQ ID NO: 298682 - DNA, 25 bp, Artificial
  Probe
cttctttcaaatatcaagagggtgt

SEQ ID NO: 298683 - DNA, 25 bp, Artificial
  Probe
tcataggtggccagagttgtgactc

SEQ ID NO: 298684 - DNA, 25 bp, Artificial
  Probe
tttggtttcaattttagagcctctg

SEQ ID NO: 298685 - DNA, 25 bp, Artificial
  Probe
ttgtccttgttctcctcacggtcct

SEQ ID NO: 298686 - DNA, 25 bp, Artificial
  Probe
ctacaagggacattggtgttgatac

SEQ ID NO: 298687 - DNA, 25 bp, Artificial
  Probe
acaacttacacattaggtggatgac

SEQ ID NO: 298688 - DNA, 25 bp, Artificial
  Probe
ttccacctggctttgcctctcaggt

SEQ ID NO: 298689 - DNA, 25 bp, Artificial
  Probe
gtgactcttgtaacagaaaacaact

SEQ ID NO: 298690 - DNA, 25 bp, Artificial
  Probe
tgtactgcttcatcaacacagcctg

SEQ ID NO: 298691 - DNA, 25 bp, Artificial
  Probe
ttaggtggatgaccaacttgatccc

SEQ ID NO: 298692 - DNA, 25 bp, Artificial
  Probe
tttgattgacgctgaggaggagctc

SEQ ID NO: 298693 - DNA, 25 bp, Artificial
  Probe
cagtccggagcagctcgcccagttt

SEQ ID NO: 298694 - DNA, 25 bp, Artificial
  Probe
agaaggtgggctgctcctggatttt

SEQ ID NO: 298695 - DNA, 25 bp, Artificial
  Probe
acatcagaagacacaaaactgttag

SEQ ID NO: 298696 - DNA, 25 bp, Artificial
  Probe
cagaaggtgggctgctcctggattt

SEQ ID NO: 298697 - DNA, 25 bp, Artificial
  Probe
taagaatttggcacagttagtcact

SEQ ID NO: 298698 - DNA, 25 bp, Artificial
  Probe
aggatcaaccgcatagcctgctatg

SEQ ID NO: 298699 - DNA, 25 bp, Artificial
  Probe
ctgtcaccaaagcttataaaacagg

SEQ ID NO: 298700 - DNA, 25 bp, Artificial
  Probe
atagagaaaaactcccaactggagc

SEQ ID NO: 298701 - DNA, 25 bp, Artificial
  Probe
tgcaagtgtggtagctatcgacaac

SEQ ID NO: 298702 - DNA, 25 bp, Artificial
  Probe
aatagagaaaaactcccaactggag

SEQ ID NO: 298703 - DNA, 25 bp, Artificial
  Probe
tgcaacgtggcagatgtctgaggaa

SEQ ID NO: 298704 - DNA, 25 bp, Artificial
  Probe
gtgagactcacacatgctgttctcg

SEQ ID NO: 298705 - DNA, 25 bp, Artificial
  Probe
ggaggagctctgtgccttttcaacc

SEQ ID NO: 298706 - DNA, 25 bp, Artificial
  Probe
agaacaatctgttgaagacactggc

SEQ ID NO: 298707 - DNA, 25 bp, Artificial
  Probe
acgctgaggaggagctctgtgcctt

SEQ ID NO: 298708 - DNA, 25 bp, Artificial
  Probe
agagacgtgagactcacacatgctg

SEQ ID NO: 298709 - DNA, 25 bp, Artificial
  Probe
ctatggatctggtgaaaagccattt

SEQ ID NO: 298710 - DNA, 25 bp, Artificial
  Probe
caacgtggcagatgtctgaggaatg

SEQ ID NO: 298711 - DNA, 25 bp, Artificial
  Probe
aaactcccaactggagcaggagaac

SEQ ID NO: 298712 - DNA, 25 bp, Artificial
  Probe
agtattaagcactcatatgcttttg

SEQ ID NO: 298713 - DNA, 25 bp, Artificial
  Probe
ccccaacagaactggctgctgctgt

SEQ ID NO: 298714 - DNA, 25 bp, Artificial
  Probe
atcagaagacacaaaactgttagtg

SEQ ID NO: 298715 - DNA, 25 bp, Artificial
  Probe
ttgattgacgctgaggaggagctct

SEQ ID NO: 298716 - DNA, 25 bp, Artificial
  Probe
tgttgaagacactggccagtccgga

SEQ ID NO: 298717 - DNA, 25 bp, Artificial
  Probe
agccagcgtcccagggctcaggatc

SEQ ID NO: 298718 - DNA, 25 bp, Artificial
  Probe
gtccggagcagctcgcccagtttca

SEQ ID NO: 298719 - DNA, 25 bp, Artificial
  Probe
ctcatatgcttttggcttgaagaaa

SEQ ID NO: 298720 - DNA, 25 bp, Artificial
  Probe
ccaactggagcaggagaacaatctg

SEQ ID NO: 298721 - DNA, 25 bp, Artificial
  Probe
gtgagcatggatgtaccctgtgcaa

SEQ ID NO: 298722 - DNA, 25 bp, Artificial
  Probe
ccctgtgcaacgtggcagatgtctg

SEQ ID NO: 298723 - DNA, 25 bp, Artificial
  Probe
gcaagctatggatctggtgaaaagc

SEQ ID NO: 298724 - DNA, 25 bp, Artificial
  Probe
aagacactggccagtccggagcagc

SEQ ID NO: 298725 - DNA, 25 bp, Artificial
  Probe
gacactggccagtccggagcagctc

SEQ ID NO: 298726 - DNA, 25 bp, Artificial
  Probe
cagtcacccatttcattgctgtctg

SEQ ID NO: 298727 - DNA, 25 bp, Artificial
  Probe
ctgctatgccccaacagaactggct

SEQ ID NO: 298728 - DNA, 25 bp, Artificial
  Probe
gatcaaccgcatagcctgctatgcc

SEQ ID NO: 298729 - DNA, 25 bp, Artificial
  Probe
accaaagcttataaaacaggacagt

SEQ ID NO: 298730 - DNA, 25 bp, Artificial
  Probe
catagcctgctatgccccaacagaa

SEQ ID NO: 298731 - DNA, 25 bp, Artificial
  Probe
gcatagcctgctatgccccaacaga

SEQ ID NO: 298732 - DNA, 25 bp, Artificial
  Probe
gaacagaccgaagagatgtgctagt

SEQ ID NO: 298733 - DNA, 25 bp, Artificial
  Probe
agtttcaggcccagctgcagactgg

SEQ ID NO: 298734 - DNA, 25 bp, Artificial
  Probe
gtctgcgaaagagacgtgagactca

SEQ ID NO: 298735 - DNA, 25 bp, Artificial
  Probe
gcgtcccagggctcaggatcaaccg

SEQ ID NO: 298736 - DNA, 25 bp, Artificial
  Probe
ggctcaggatcaaccgcatagcctg

SEQ ID NO: 298737 - DNA, 25 bp, Artificial
  Probe
ttcaggcccagctgcagactggctc

SEQ ID NO: 298738 - DNA, 25 bp, Artificial
  Probe
agaatttctaatgctcctttaggtt

SEQ ID NO: 298739 - DNA, 25 bp, Artificial
  Probe
agggccacctcagacaccatgacag

SEQ ID NO: 298740 - DNA, 25 bp, Artificial
  Probe
ttctaatgctcctttaggttaacag

SEQ ID NO: 298741 - DNA, 25 bp, Artificial
  Probe
cacaatcaaagttggccttggtgag

SEQ ID NO: 298742 - DNA, 25 bp, Artificial
  Probe
tcaaaggacttgagggctgtgatac

SEQ ID NO: 298743 - DNA, 25 bp, Artificial
  Probe
gaaccagaggtgagcgctttcaaag

SEQ ID NO: 298744 - DNA, 25 bp, Artificial
  Probe
ctacaaaagcagagccaaggacctg

SEQ ID NO: 298745 - DNA, 25 bp, Artificial
  Probe
ctcacctagttgaattagagtttag

SEQ ID NO: 298746 - DNA, 25 bp, Artificial
  Probe
cctcatcaagggagccgaaatctcg

SEQ ID NO: 298747 - DNA, 25 bp, Artificial
  Probe
tacagggccacctcagacaccatga

SEQ ID NO: 298748 - DNA, 25 bp, Artificial
  Probe
ttaactagatgtaggccaaccatgc

SEQ ID NO: 298749 - DNA, 25 bp, Artificial
  Probe
tgatacagggccacctcagacacca

SEQ ID NO: 298750 - DNA, 25 bp, Artificial
  Probe
ttggccttggtgagccatcataatt

SEQ ID NO: 298751 - DNA, 25 bp, Artificial
  Probe
tgggactcggtttcctcacctagtt

SEQ ID NO: 298752 - DNA, 25 bp, Artificial
  Probe
caagtccttgatggatttgttcaaa

SEQ ID NO: 298753 - DNA, 25 bp, Artificial
  Probe
tgttcaaatctctgggactcggttt

SEQ ID NO: 298754 - DNA, 25 bp, Artificial
  Probe
cagctacaagtccttgatggatttg

SEQ ID NO: 298755 - DNA, 25 bp, Artificial
  Probe
tgagccatcataattaaggaaaagc

SEQ ID NO: 298756 - DNA, 25 bp, Artificial
  Probe
acttgagggctgtgatacagggcca

SEQ ID NO: 298757 - DNA, 25 bp, Artificial
  Probe
agactgactcagaactctctgtgtc

SEQ ID NO: 298758 - DNA, 25 bp, Artificial
  Probe
ttgagggctgtgatacagggccacc

SEQ ID NO: 298759 - DNA, 25 bp, Artificial
  Probe
acaagtccttgatggatttgttcaa

SEQ ID NO: 298760 - DNA, 25 bp, Artificial
  Probe
tcctttaggttaacagtcaataatg

SEQ ID NO: 298761 - DNA, 25 bp, Artificial
  Probe
agaggtgagcgctttcaaaggactt

SEQ ID NO: 298762 - DNA, 25 bp, Artificial
  Probe
gacttcaaacagctaagagagggag

SEQ ID NO: 298763 - DNA, 25 bp, Artificial
  Probe
gaaagcacaatcaaagttggccttg

SEQ ID NO: 298764 - DNA, 25 bp, Artificial
  Probe
ctacaagtccttgatggatttgttc

SEQ ID NO: 298765 - DNA, 25 bp, Artificial
  Probe
aaagcagagccaaggacctgggtgt

SEQ ID NO: 298766 - DNA, 25 bp, Artificial
  Probe
gaatttctaatgctcctttaggtta

SEQ ID NO: 298767 - DNA, 25 bp, Artificial
  Probe
gctcctttaggttaacagtcaataa

SEQ ID NO: 298768 - DNA, 25 bp, Artificial
  Probe
gaagtcattatgtctacaaaagcag

SEQ ID NO: 298769 - DNA, 25 bp, Artificial
  Probe
taggccaaccatgcagaaccagagg

SEQ ID NO: 298770 - DNA, 25 bp, Artificial
  Probe
tcaaagttggccttggtgagccatc

SEQ ID NO: 298771 - DNA, 25 bp, Artificial
  Probe
atgtaggccaaccatgcagaaccag

SEQ ID NO: 298772 - DNA, 25 bp, Artificial
  Probe
tccttgatggatttgttcaaatctc

SEQ ID NO: 298773 - DNA, 25 bp, Artificial
  Probe
cctcagacaccatgacagctacaag

SEQ ID NO: 298774 - DNA, 25 bp, Artificial
  Probe
gactcagaactctctgtgtctctca

SEQ ID NO: 298775 - DNA, 25 bp, Artificial
  Probe
ctttcaaaggacttgagggctgtga

SEQ ID NO: 298776 - DNA, 25 bp, Artificial
  Probe
tcaagggagccgaaatctcgtgccg

SEQ ID NO: 298777 - DNA, 25 bp, Artificial
  Probe
cttggtgagccatcataattaagga

SEQ ID NO: 298778 - DNA, 25 bp, Artificial
  Probe
ccaaccatgcagaaccagaggtgag

SEQ ID NO: 298779 - DNA, 25 bp, Artificial
  Probe
tagatgtaggccaaccatgcagaac

SEQ ID NO: 298780 - DNA, 25 bp, Artificial
  Probe
ccttggtgagccatcataattaagg

SEQ ID NO: 298781 - DNA, 25 bp, Artificial
  Probe
ggatttgttcaaatctctgggactc

SEQ ID NO: 298782 - DNA, 25 bp, Artificial
  Probe
atttaactagatgtaggccaaccat

SEQ ID NO: 298783 - DNA, 25 bp, Artificial
  Probe
aatctctgggactcggtttcctcac

SEQ ID NO: 298784 - DNA, 25 bp, Artificial
  Probe
tttgaactccccagtgttctagaat

SEQ ID NO: 298785 - DNA, 25 bp, Artificial
  Probe
gttctcctggcaacaggttccttcc

SEQ ID NO: 298786 - DNA, 25 bp, Artificial
  Probe
ggtattagagtcctatccttgttcc

SEQ ID NO: 298787 - DNA, 25 bp, Artificial
  Probe
tctagaatggggtctccaaatttgg

SEQ ID NO: 298788 - DNA, 25 bp, Artificial
  Probe
agtcctatccttgttccaaagatgg

SEQ ID NO: 298789 - DNA, 25 bp, Artificial
  Probe
atccttgttccaaagatgggacttt

SEQ ID NO: 298790 - DNA, 25 bp, Artificial
  Probe
tggcaacaggttccttcctcccggt

SEQ ID NO: 298791 - DNA, 25 bp, Artificial
  Probe
ttctcctggcaacaggttccttcct

SEQ ID NO: 298792 - DNA, 25 bp, Artificial
  Probe
gtattagagtcctatccttgttcca

SEQ ID NO: 298793 - DNA, 25 bp, Artificial
  Probe
ccaaagatgggactttctgtttggg

SEQ ID NO: 298794 - DNA, 25 bp, Artificial
  Probe
ctctggaatttgaactccccagtgt

SEQ ID NO: 298795 - DNA, 25 bp, Artificial
  Probe
ctctctggaatttgaactccccagt

SEQ ID NO: 298796 - DNA, 25 bp, Artificial
  Probe
tgttctcctggcaacaggttccttc

SEQ ID NO: 298797 - DNA, 25 bp, Artificial
  Probe
agtcaggtttgagatgccctgagag

SEQ ID NO: 298798 - DNA, 25 bp, Artificial
  Probe
ctccccagtgttctagaatggggtc

SEQ ID NO: 298799 - DNA, 25 bp, Artificial
  Probe
cttgttccaaagatgggactttctg

SEQ ID NO: 298800 - DNA, 25 bp, Artificial
  Probe
ttagagtcctatccttgttccaaag

SEQ ID NO: 298801 - DNA, 25 bp, Artificial
  Probe
tgaactccccagtgttctagaatgg

SEQ ID NO: 298802 - DNA, 25 bp, Artificial
  Probe
tttgagatgccctgagagcctggga

SEQ ID NO: 298803 - DNA, 25 bp, Artificial
  Probe
cctatccttgttccaaagatgggac

SEQ ID NO: 298804 - DNA, 25 bp, Artificial
  Probe
tcccggtcctaaggaccttgtgttg

SEQ ID NO: 298805 - DNA, 25 bp, Artificial
  Probe
aactccccagtgttctagaatgggg

SEQ ID NO: 298806 - DNA, 25 bp, Artificial
  Probe
agagcctgggatgttctcctggcaa

SEQ ID NO: 298807 - DNA, 25 bp, Artificial
  Probe
gagcctgggatgttctcctggcaac

SEQ ID NO: 298808 - DNA, 25 bp, Artificial
  Probe
tctctctggaatttgaactccccag

SEQ ID NO: 298809 - DNA, 25 bp, Artificial
  Probe
ccagtgttctagaatggggtctcca

SEQ ID NO: 298810 - DNA, 25 bp, Artificial
  Probe
tagagtcctatccttgttccaaaga

SEQ ID NO: 298811 - DNA, 25 bp, Artificial
  Probe
agtgttctagaatggggtctccaaa

SEQ ID NO: 298812 - DNA, 25 bp, Artificial
  Probe
tgggatgttctcctggcaacaggtt

SEQ ID NO: 298813 - DNA, 25 bp, Artificial
  Probe
ctatccttgttccaaagatgggact

SEQ ID NO: 298814 - DNA, 25 bp, Artificial
  Probe
tcctcccggtcctaaggaccttgtg

SEQ ID NO: 298815 - DNA, 25 bp, Artificial
  Probe
gggatgttctcctggcaacaggttc

SEQ ID NO: 298816 - DNA, 25 bp, Artificial
  Probe
tgagagcctgggatgttctcctggc

SEQ ID NO: 298817 - DNA, 25 bp, Artificial
  Probe
ctggaatttgaactccccagtgttc

SEQ ID NO: 298818 - DNA, 25 bp, Artificial
  Probe
gtcctatccttgttccaaagatggg

SEQ ID NO: 298819 - DNA, 25 bp, Artificial
  Probe
ccccagtgttctagaatggggtctc

SEQ ID NO: 298820 - DNA, 25 bp, Artificial
  Probe
agatgccctgagagcctgggatgtt

SEQ ID NO: 298821 - DNA, 25 bp, Artificial
  Probe
tccaaagatgggactttctgtttgg

SEQ ID NO: 298822 - DNA, 25 bp, Artificial
  Probe
cctgggagtcaggtttgagatgccc

SEQ ID NO: 298823 - DNA, 25 bp, Artificial
  Probe
tggaatttgaactccccagtgttct

SEQ ID NO: 298824 - DNA, 25 bp, Artificial
  Probe
ttgttccaaagatgggactttctgt

SEQ ID NO: 298825 - DNA, 25 bp, Artificial
  Probe
cctgggatgttctcctggcaacagg

SEQ ID NO: 298826 - DNA, 25 bp, Artificial
  Probe
gaactccccagtgttctagaatggg

SEQ ID NO: 298827 - DNA, 25 bp, Artificial
  Probe
gccctgagagcctgggatgttctcc

SEQ ID NO: 298828 - DNA, 25 bp, Artificial
  Probe
agagtcctatccttgttccaaagat

SEQ ID NO: 298829 - DNA, 25 bp, Artificial
  Probe
gatgggactttctgtttggggtctc

SEQ ID NO: 298830 - DNA, 25 bp, Artificial
  Probe
gccacccagccagtaacagcttgga

SEQ ID NO: 298831 - DNA, 25 bp, Artificial
  Probe
agacagcccatatcctgatgcctgc

SEQ ID NO: 298832 - DNA, 25 bp, Artificial
  Probe
gactgtcctgctagccttgtacctg

SEQ ID NO: 298833 - DNA, 25 bp, Artificial
  Probe
accttgttggggaaacagcttcagg

SEQ ID NO: 298834 - DNA, 25 bp, Artificial
  Probe
cagccaggccatggtatggtgagcc

SEQ ID NO: 298835 - DNA, 25 bp, Artificial
  Probe
accaccgaagtggaagtgaactcaa

SEQ ID NO: 298836 - DNA, 25 bp, Artificial
  Probe
aaaggcttggagatcgcccaacact

SEQ ID NO: 298837 - DNA, 25 bp, Artificial
  Probe
taataaacatgctcgcagctgtgag

SEQ ID NO: 298838 - DNA, 25 bp, Artificial
  Probe
tccaggcagcaaccaagcctgcaag

SEQ ID NO: 298839 - DNA, 25 bp, Artificial
  Probe
tatcctgatgcctgcctgccagggc

SEQ ID NO: 298840 - DNA, 25 bp, Artificial
  Probe
gtcatccatgtgagcctggcttcta

SEQ ID NO: 298841 - DNA, 25 bp, Artificial
  Probe
ctaggcctgggcttgctggctccct

SEQ ID NO: 298842 - DNA, 25 bp, Artificial
  Probe
agctcaactgtgttaaagataccta

SEQ ID NO: 298843 - DNA, 25 bp, Artificial
  Probe
gagcagaccgacacacactttactc

SEQ ID NO: 298844 - DNA, 25 bp, Artificial
  Probe
agcttggagttgactgtgttccctg

SEQ ID NO: 298845 - DNA, 25 bp, Artificial
  Probe
aagtgctgtcgtgagtgccagccag

SEQ ID NO: 298846 - DNA, 25 bp, Artificial
  Probe
tgagggccctgcatttgctgttatc

SEQ ID NO: 298847 - DNA, 25 bp, Artificial
  Probe
ctaccccagtggtcacaagtgctgt

SEQ ID NO: 298848 - DNA, 25 bp, Artificial
  Probe
agacagaagcctcctggccacactg

SEQ ID NO: 298849 - DNA, 25 bp, Artificial
  Probe
attttatggggcacagacagcccat

SEQ ID NO: 298850 - DNA, 25 bp, Artificial
  Probe
aagacagaagcctcctggccacact

SEQ ID NO: 298851 - DNA, 25 bp, Artificial
  Probe
tgtgagcctggcttctacaatgagg

SEQ ID NO: 298852 - DNA, 25 bp, Artificial
  Probe
tgagtgccagccaggccatggtatg

SEQ ID NO: 298853 - DNA, 25 bp, Artificial
  Probe
caataccacaggagtggattttatg

SEQ ID NO: 298854 - DNA, 25 bp, Artificial
  Probe
agcaaccaagcctgcaagccctgga

SEQ ID NO: 298855 - DNA, 25 bp, Artificial
  Probe
cactctcccatgtatgctgtgcata

SEQ ID NO: 298856 - DNA, 25 bp, Artificial
  Probe
ctgcctggtggcactcctaataaac

SEQ ID NO: 298857 - DNA, 25 bp, Artificial
  Probe
tgccagtgtagaccaggcacccaac

SEQ ID NO: 298858 - DNA, 25 bp, Artificial
  Probe
tctgggagacccagcgcactacatt

SEQ ID NO: 298859 - DNA, 25 bp, Artificial
  Probe
aaggcttggagatcgcccaacactc

SEQ ID NO: 298860 - DNA, 25 bp, Artificial
  Probe
gcctgcaagccctggaccaattgta

SEQ ID NO: 298861 - DNA, 25 bp, Artificial
  Probe
gggcttgctggctcccttgactgtc

SEQ ID NO: 298862 - DNA, 25 bp, Artificial
  Probe
ccggcaagacagcagccacaagctt

SEQ ID NO: 298863 - DNA, 25 bp, Artificial
  Probe
ctcctggccacactgctctgggaga

SEQ ID NO: 298864 - DNA, 25 bp, Artificial
  Probe
tgggctggctgtgcactctcccatg

SEQ ID NO: 298865 - DNA, 25 bp, Artificial
  Probe
tggccacttttctccaggcagcaac

SEQ ID NO: 298866 - DNA, 25 bp, Artificial
  Probe
accttatctggaaagcagatccgcc

SEQ ID NO: 298867 - DNA, 25 bp, Artificial
  Probe
aggacttctcagttgccctctacac

SEQ ID NO: 298868 - DNA, 25 bp, Artificial
  Probe
tttactctagccaagatctgagcaa

SEQ ID NO: 298869 - DNA, 25 bp, Artificial
  Probe
ttggggaaacagcttcaggacccct

SEQ ID NO: 298870 - DNA, 25 bp, Artificial
  Probe
gagacccagcgcactacattcaggc

SEQ ID NO: 298871 - DNA, 25 bp, Artificial
  Probe
aggagcagaccgacacacactttac

SEQ ID NO: 298872 - DNA, 25 bp, Artificial
  Probe
acagtctggcccaggacttctcagt

SEQ ID NO: 298873 - DNA, 25 bp, Artificial
  Probe
acacagtctgtgaagacagaagcct

SEQ ID NO: 298874 - DNA, 25 bp, Artificial
  Probe
aagtgaactcaagcagaactgcaca

SEQ ID NO: 298875 - DNA, 25 bp, Artificial
  Probe
ctggccacttttctccaggcagcaa

SEQ ID NO: 298876 - DNA, 25 bp, Artificial
  Probe
ggactatatttctccagatagcctc

SEQ ID NO: 298877 - DNA, 25 bp, Artificial
  Probe
tgttctttagagagttggaccacta

SEQ ID NO: 298878 - DNA, 25 bp, Artificial
  Probe
tggtacacttgtctagggtgcctgg

SEQ ID NO: 298879 - DNA, 25 bp, Artificial
  Probe
tagcctcatgggttgtcttcctcag

SEQ ID NO: 298880 - DNA, 25 bp, Artificial
  Probe
gggggtatccagtttgtccagtgat

SEQ ID NO: 298881 - DNA, 25 bp, Artificial
  Probe
ctctagcaaggaagcccattcatgt

SEQ ID NO: 298882 - DNA, 25 bp, Artificial
  Probe
gactgtagtcccaaaaaagccttgt

SEQ ID NO: 298883 - DNA, 25 bp, Artificial
  Probe
tttagtacttttccatgcagatttg

SEQ ID NO: 298884 - DNA, 25 bp, Artificial
  Probe
gtacacttgtctagggtgcctggca

SEQ ID NO: 298885 - DNA, 25 bp, Artificial
  Probe
tgtttgctaatcattgactgtagtc

SEQ ID NO: 298886 - DNA, 25 bp, Artificial
  Probe
attgttctttagagagttggaccac

SEQ ID NO: 298887 - DNA, 25 bp, Artificial
  Probe
ttggaccactatattgtgtgtttgc

SEQ ID NO: 298888 - DNA, 25 bp, Artificial
  Probe
tgccagaatacaagcattgctttgg

SEQ ID NO: 298889 - DNA, 25 bp, Artificial
  Probe
aatgttatgccctatgtaacagcag

SEQ ID NO: 298890 - DNA, 25 bp, Artificial
  Probe
tggtgatatccatatttctgcattg

SEQ ID NO: 298891 - DNA, 25 bp, Artificial
  Probe
ccagaatacaagcattgctttgggc

SEQ ID NO: 298892 - DNA, 25 bp, Artificial
  Probe
catgcagatttgtgcacatgtgagg

SEQ ID NO: 298893 - DNA, 25 bp, Artificial
  Probe
ttctttagagagttggaccactata

SEQ ID NO: 298894 - DNA, 25 bp, Artificial
  Probe
acttgtctagggtgcctggcactgt

SEQ ID NO: 298895 - DNA, 25 bp, Artificial
  Probe
tatatttctccagatagcctcatgg

SEQ ID NO: 298896 - DNA, 25 bp, Artificial
  Probe
attcactttaccttgtgacagaagt

SEQ ID NO: 298897 - DNA, 25 bp, Artificial
  Probe
gaagtagcatgttgctgccagaata

SEQ ID NO: 298898 - DNA, 25 bp, Artificial
  Probe
aattggactatatttctccagatag

SEQ ID NO: 298899 - DNA, 25 bp, Artificial
  Probe
catgttgctgccagaatacaagcat

SEQ ID NO: 298900 - DNA, 25 bp, Artificial
  Probe
accttgtgacagaagtagcatgttg

SEQ ID NO: 298901 - DNA, 25 bp, Artificial
  Probe
tgcattgtggtacacttgtctaggg

SEQ ID NO: 298902 - DNA, 25 bp, Artificial
  Probe
ccagtttgtccagtgattgttcttt

SEQ ID NO: 298903 - DNA, 25 bp, Artificial
  Probe
gtagcatgttgctgccagaatacaa

SEQ ID NO: 298904 - DNA, 25 bp, Artificial
  Probe
atcattgactgtagtcccaaaaaag

SEQ ID NO: 298905 - DNA, 25 bp, Artificial
  Probe
ccatgcagatttgtgcacatgtgag

SEQ ID NO: 298906 - DNA, 25 bp, Artificial
  Probe
attgtggtacacttgtctagggtgc

SEQ ID NO: 298907 - DNA, 25 bp, Artificial
  Probe
agggtgcctggcactgtaaaattgg

SEQ ID NO: 298908 - DNA, 25 bp, Artificial
  Probe
cttgtgacagaagtagcatgttgct

SEQ ID NO: 298909 - DNA, 25 bp, Artificial
  Probe
cattgactgtagtcccaaaaaagcc

SEQ ID NO: 298910 - DNA, 25 bp, Artificial
  Probe
cctggcactgtaaaattggactata

SEQ ID NO: 298911 - DNA, 25 bp, Artificial
  Probe
atttctccagatagcctcatgggtt

SEQ ID NO: 298912 - DNA, 25 bp, Artificial
  Probe
gctaatcattgactgtagtcccaaa

SEQ ID NO: 298913 - DNA, 25 bp, Artificial
  Probe
ttccatgcagatttgtgcacatgtg

SEQ ID NO: 298914 - DNA, 25 bp, Artificial
  Probe
gtctagggtgcctggcactgtaaaa

SEQ ID NO: 298915 - DNA, 25 bp, Artificial
  Probe
ccctatgtaacagcagagtaacata

SEQ ID NO: 298916 - DNA, 25 bp, Artificial
  Probe
cagatagcctcatgggttgtcttcc

SEQ ID NO: 298917 - DNA, 25 bp, Artificial
  Probe
tcattgactgtagtcccaaaaaagc

SEQ ID NO: 298918 - DNA, 25 bp, Artificial
  Probe
cactatattgtgtgtttgctaatca

SEQ ID NO: 298919 - DNA, 25 bp, Artificial
  Probe
ctccagatagcctcatgggttgtct

SEQ ID NO: 298920 - DNA, 25 bp, Artificial
  Probe
caagcattgctttgggcaaattaaa

SEQ ID NO: 298921 - DNA, 25 bp, Artificial
  Probe
tgtagtcccaaaaaagccttgtgaa

SEQ ID NO: 298922 - DNA, 25 bp, Artificial
  Probe
aatgcactgtacaatgctgctgtac

SEQ ID NO: 298923 - DNA, 25 bp, Artificial
  Probe
gctgctgtacaatcccagggtaagt

SEQ ID NO: 298924 - DNA, 25 bp, Artificial
  Probe
actgtacaatgctgctgtacaatcc

SEQ ID NO: 298925 - DNA, 25 bp, Artificial
  Probe
tccataaatgcactgtacaatgctg

SEQ ID NO: 298926 - DNA, 25 bp, Artificial
  Probe
acaatgctgctgtacaatcccaggg

SEQ ID NO: 298927 - DNA, 25 bp, Artificial
  Probe
gtacaatgctgctgtacaatcccag

SEQ ID NO: 298928 - DNA, 25 bp, Artificial
  Probe
aacacctgtggagaaaactaaatga

SEQ ID NO: 298929 - DNA, 25 bp, Artificial
  Probe
gtaagtgtgactgtcagtcttcaga

SEQ ID NO: 298930 - DNA, 25 bp, Artificial
  Probe
tgactgtcagtcttcagaggccacc

SEQ ID NO: 298931 - DNA, 25 bp, Artificial
  Probe
caatcccagggtaagtgtgactgtc

SEQ ID NO: 298932 - DNA, 25 bp, Artificial
  Probe
agtgtgactgtcagtcttcagaggc

SEQ ID NO: 298933 - DNA, 25 bp, Artificial
  Probe
tacaatgctgctgtacaatcccagg

SEQ ID NO: 298934 - DNA, 25 bp, Artificial
  Probe
aatgctgctgtacaatcccagggta

SEQ ID NO: 298935 - DNA, 25 bp, Artificial
  Probe
tgtgactgtcagtcttcagaggcca

SEQ ID NO: 298936 - DNA, 25 bp, Artificial
  Probe
tgcacgaggcagtgattctcaagct

SEQ ID NO: 298937 - DNA, 25 bp, Artificial
  Probe
tgctgctgtacaatcccagggtaag

SEQ ID NO: 298938 - DNA, 25 bp, Artificial
  Probe
ctgtacaatgctgctgtacaatccc

SEQ ID NO: 298939 - DNA, 25 bp, Artificial
  Probe
tatgcacgaggcagtgattctcaag

SEQ ID NO: 298940 - DNA, 25 bp, Artificial
  Probe
cccagggtaagtgtgactgtcagtc

SEQ ID NO: 298941 - DNA, 25 bp, Artificial
  Probe
tcccagggtaagtgtgactgtcagt

SEQ ID NO: 298942 - DNA, 25 bp, Artificial
  Probe
cactgtacaatgctgctgtacaatc

SEQ ID NO: 298943 - DNA, 25 bp, Artificial
  Probe
cataaatgcactgtacaatgctgct

SEQ ID NO: 298944 - DNA, 25 bp, Artificial
  Probe
atgctgctgtacaatcccagggtaa

SEQ ID NO: 298945 - DNA, 25 bp, Artificial
  Probe
caatgctgctgtacaatcccagggt

SEQ ID NO: 298946 - DNA, 25 bp, Artificial
  Probe
taagtgtgactgtcagtcttcagag

SEQ ID NO: 298947 - DNA, 25 bp, Artificial
  Probe
gctccataaatgcactgtacaatgc

SEQ ID NO: 298948 - DNA, 25 bp, Artificial
  Probe
ccataaatgcactgtacaatgctgc

SEQ ID NO: 298949 - DNA, 25 bp, Artificial
  Probe
acaatcccagggtaagtgtgactgt

SEQ ID NO: 298950 - DNA, 25 bp, Artificial
  Probe
gtgactgtcagtcttcagaggccac

SEQ ID NO: 298951 - DNA, 25 bp, Artificial
  Probe
gtgtgactgtcagtcttcagaggcc

SEQ ID NO: 298952 - DNA, 25 bp, Artificial
  Probe
aaatgcactgtacaatgctgctgta

SEQ ID NO: 298953 - DNA, 25 bp, Artificial
  Probe
aaattaaagtatgcacgaggcagtg

SEQ ID NO: 298954 - DNA, 25 bp, Artificial
  Probe
ctgtacaatcccagggtaagtgtga

SEQ ID NO: 298955 - DNA, 25 bp, Artificial
  Probe
gcactgtacaatgctgctgtacaat

SEQ ID NO: 298956 - DNA, 25 bp, Artificial
  Probe
tgcactgtacaatgctgctgtacaa

SEQ ID NO: 298957 - DNA, 25 bp, Artificial
  Probe
atcccagggtaagtgtgactgtcag

SEQ ID NO: 298958 - DNA, 25 bp, Artificial
  Probe
atgcacgaggcagtgattctcaagc

SEQ ID NO: 298959 - DNA, 25 bp, Artificial
  Probe
aatcccagggtaagtgtgactgtca

SEQ ID NO: 298960 - DNA, 25 bp, Artificial
  Probe
gtatgcacgaggcagtgattctcaa

SEQ ID NO: 298961 - DNA, 25 bp, Artificial
  Probe
atgcactgtacaatgctgctgtaca

SEQ ID NO: 298962 - DNA, 25 bp, Artificial
  Probe
taaagtatgcacgaggcagtgattc

SEQ ID NO: 298963 - DNA, 25 bp, Artificial
  Probe
ttttacctgaggaatttggataagt

SEQ ID NO: 298964 - DNA, 25 bp, Artificial
  Probe
tgtacaatgctgctgtacaatccca

SEQ ID NO: 298965 - DNA, 25 bp, Artificial
  Probe
agctccataaatgcactgtacaatg

SEQ ID NO: 298966 - DNA, 25 bp, Artificial
  Probe
gcacgaggcagtgattctcaagctt

SEQ ID NO: 298967 - DNA, 25 bp, Artificial
  Probe
aagtgtgactgtcagtcttcagagg

SEQ ID NO: 298968 - DNA, 25 bp, Artificial
  Probe
accatgaaggcaaggccaagcaggc

SEQ ID NO: 298969 - DNA, 25 bp, Artificial
  Probe
ggcgggcaccatgacttcccagaaa

SEQ ID NO: 298970 - DNA, 25 bp, Artificial
  Probe
acgtctccatggtggattatgctca

SEQ ID NO: 298971 - DNA, 25 bp, Artificial
  Probe
gggagaacgtctccatggtggatta

SEQ ID NO: 298972 - DNA, 25 bp, Artificial
  Probe
aacgggagaacgtctccatggtgga

SEQ ID NO: 298973 - DNA, 25 bp, Artificial
  Probe
ccatgacttcccagaaagacacgtt

SEQ ID NO: 298974 - DNA, 25 bp, Artificial
  Probe
gtctccatggtggattatgctcaca

SEQ ID NO: 298975 - DNA, 25 bp, Artificial
  Probe
gcaggattgaccacgggcaccatga

SEQ ID NO: 298976 - DNA, 25 bp, Artificial
  Probe
gagaacgtctccatggtggattatg

SEQ ID NO: 298977 - DNA, 25 bp, Artificial
  Probe
caccatgaaggcaaggccaagcagg

SEQ ID NO: 298978 - DNA, 25 bp, Artificial
  Probe
tcccacgttttcacgtttggtggct

SEQ ID NO: 298979 - DNA, 25 bp, Artificial
  Probe
ggattatgctcacaacaactaccag

SEQ ID NO: 298980 - DNA, 25 bp, Artificial
  Probe
tcactcccacgttttcacgtttggt

SEQ ID NO: 298981 - DNA, 25 bp, Artificial
  Probe
aatcggaacaacctgactgaccctt

SEQ ID NO: 298982 - DNA, 25 bp, Artificial
  Probe
ctccatggtggattatgctcacaac

SEQ ID NO: 298983 - DNA, 25 bp, Artificial
  Probe
gaggcaggattgaccacgggcacca

SEQ ID NO: 298984 - DNA, 25 bp, Artificial
  Probe
cactcccacgttttcacgtttggtg

SEQ ID NO: 298985 - DNA, 25 bp, Artificial
  Probe
tgacttcccagaaagacacgttgac

SEQ ID NO: 298986 - DNA, 25 bp, Artificial
  Probe
gttgaatcggaacaacctgactgac

SEQ ID NO: 298987 - DNA, 25 bp, Artificial
  Probe
acgggagaacgtctccatggtggat

SEQ ID NO: 298988 - DNA, 25 bp, Artificial
  Probe
cccggggacatgcagtatgagttga

SEQ ID NO: 298989 - DNA, 25 bp, Artificial
  Probe
aaggcgggcaccatgacttcccaga

SEQ ID NO: 298990 - DNA, 25 bp, Artificial
  Probe
aggccatcggaaaggcgggcaccat

SEQ ID NO: 298991 - DNA, 25 bp, Artificial
  Probe
gtggattatgctcacaacaactacc

SEQ ID NO: 298992 - DNA, 25 bp, Artificial
  Probe
agttgaatcggaacaacctgactga

SEQ ID NO: 298993 - DNA, 25 bp, Artificial
  Probe
gttactgctgatcactcccacgttt

SEQ ID NO: 298994 - DNA, 25 bp, Artificial
  Probe
cacgttttcacgtttggtggctaca

SEQ ID NO: 298995 - DNA, 25 bp, Artificial
  Probe
gaccacgggcaccatgaaggcaagg

SEQ ID NO: 298996 - DNA, 25 bp, Artificial
  Probe
cacgggcaccatgaaggcaaggcca

SEQ ID NO: 298997 - DNA, 25 bp, Artificial
  Probe
ttgaatcggaacaacctgactgacc

SEQ ID NO: 298998 - DNA, 25 bp, Artificial
  Probe
ggcaccatgacttcccagaaagaca

SEQ ID NO: 298999 - DNA, 25 bp, Artificial
  Probe
tgaccacgggcaccatgaaggcaag

SEQ ID NO: 299000 - DNA, 25 bp, Artificial
  Probe
atcggaacaacctgactgacccttc

SEQ ID NO: 299001 - DNA, 25 bp, Artificial
  Probe
gaaaggcgggcaccatgacttccca

SEQ ID NO: 299002 - DNA, 25 bp, Artificial
  Probe
cgggcaccatgaaggcaaggccaag

SEQ ID NO: 299003 - DNA, 25 bp, Artificial
  Probe
cgggcaccatgacttcccagaaaga

SEQ ID NO: 299004 - DNA, 25 bp, Artificial
  Probe
ccaagcaggcgctgcatgaggccgt

SEQ ID NO: 299005 - DNA, 25 bp, Artificial
  Probe
gatcactcccacgttttcacgtttg

SEQ ID NO: 299006 - DNA, 25 bp, Artificial
  Probe
tggttactgctgatcactcccacgt

SEQ ID NO: 299007 - DNA, 25 bp, Artificial
  Probe
ttgaccacgggcaccatgaaggcaa

SEQ ID NO: 299008 - DNA, 25 bp, Artificial
  Probe
gacttcccagaaagacacgttgact

SEQ ID NO: 299009 - DNA, 25 bp, Artificial
  Probe
atgacttcccagaaagacacgttga

SEQ ID NO: 299010 - DNA, 25 bp, Artificial
  Probe
tccatggtggattatgctcacaaca

SEQ ID NO: 299011 - DNA, 25 bp, Artificial
  Probe
gaacgtctccatggtggattatgct

SEQ ID NO: 299012 - DNA, 25 bp, Artificial
  Probe
agcccggggacatgcagtatgagtt

SEQ ID NO: 299013 - DNA, 25 bp, Artificial
  Probe
aaggcaaggccaagcaggcgctgca

SEQ ID NO: 299014 - DNA, 25 bp, Artificial
  Probe
atcctgtccttgcaggcgtctgaat

SEQ ID NO: 299015 - DNA, 25 bp, Artificial
  Probe
acagcctgtcggaccacagcttggg

SEQ ID NO: 299016 - DNA, 25 bp, Artificial
  Probe
ggaaaaacagcctgtcggaccacag

SEQ ID NO: 299017 - DNA, 25 bp, Artificial
  Probe
cccttctgagcttatgtcgaatgac

SEQ ID NO: 299018 - DNA, 25 bp, Artificial
  Probe
acgagcagcatgaaagccttcagtc

SEQ ID NO: 299019 - DNA, 25 bp, Artificial
  Probe
agcttgggcatctcccggagcaaaa

SEQ ID NO: 299020 - DNA, 25 bp, Artificial
  Probe
gatgagtctgctctacaacatgaac

SEQ ID NO: 299021 - DNA, 25 bp, Artificial
  Probe
gagcttatgtcgaatgacagcaaag

SEQ ID NO: 299022 - DNA, 25 bp, Artificial
  Probe
ccccggtggacgacccgatgagtct

SEQ ID NO: 299023 - DNA, 25 bp, Artificial
  Probe
ttgcaggcgtctgaattcccttctg

SEQ ID NO: 299024 - DNA, 25 bp, Artificial
  Probe
ttatatcttggacctgcagatcgcc

SEQ ID NO: 299025 - DNA, 25 bp, Artificial
  Probe
aatgacagcaaagtactctgtggct

SEQ ID NO: 299026 - DNA, 25 bp, Artificial
  Probe
cttggacctgcagatcgccctggac

SEQ ID NO: 299027 - DNA, 25 bp, Artificial
  Probe
ctgaattcccttctgagcttatgtc

SEQ ID NO: 299028 - DNA, 25 bp, Artificial
  Probe
ccttcagtccggtgaggtccgttag

SEQ ID NO: 299029 - DNA, 25 bp, Artificial
  Probe
actgctactccaagctcaaggaact

SEQ ID NO: 299030 - DNA, 25 bp, Artificial
  Probe
tcaaggaactggtgcccagcatccc

SEQ ID NO: 299031 - DNA, 25 bp, Artificial
  Probe
tcagtccggtgaggtccgttaggaa

SEQ ID NO: 299032 - DNA, 25 bp, Artificial
  Probe
tccaagctcaaggaactggtgccca

SEQ ID NO: 299033 - DNA, 25 bp, Artificial
  Probe
tatcttggacctgcagatcgccctg

SEQ ID NO: 299034 - DNA, 25 bp, Artificial
  Probe
ctacgagcagcatgaaagccttcag

SEQ ID NO: 299035 - DNA, 25 bp, Artificial
  Probe
gcctgtcggaccacagcttgggcat

SEQ ID NO: 299036 - DNA, 25 bp, Artificial
  Probe
aggcgtctgaattcccttctgagct

SEQ ID NO: 299037 - DNA, 25 bp, Artificial
  Probe
catcagcatcctgtccttgcaggcg

SEQ ID NO: 299038 - DNA, 25 bp, Artificial
  Probe
gtcggaccacagcttgggcatctcc

SEQ ID NO: 299039 - DNA, 25 bp, Artificial
  Probe
tatgtcgaatgacagcaaagtactc

SEQ ID NO: 299040 - DNA, 25 bp, Artificial
  Probe
gacccgatgagtctgctctacaaca

SEQ ID NO: 299041 - DNA, 25 bp, Artificial
  Probe
cgattatatcttggacctgcagatc

SEQ ID NO: 299042 - DNA, 25 bp, Artificial
  Probe
cacagcttgggcatctcccggagca

SEQ ID NO: 299043 - DNA, 25 bp, Artificial
  Probe
agcatgaaagccttcagtccggtga

SEQ ID NO: 299044 - DNA, 25 bp, Artificial
  Probe
cgactgctactccaagctcaaggaa

SEQ ID NO: 299045 - DNA, 25 bp, Artificial
  Probe
cctgtcggaccacagcttgggcatc

SEQ ID NO: 299046 - DNA, 25 bp, Artificial
  Probe
caggcgtctgaattcccttctgagc

SEQ ID NO: 299047 - DNA, 25 bp, Artificial
  Probe
tccttgcaggcgtctgaattccctt

SEQ ID NO: 299048 - DNA, 25 bp, Artificial
  Probe
gacagcaaagtactctgtggctaaa

SEQ ID NO: 299049 - DNA, 25 bp, Artificial
  Probe
gaaagccttcagtccggtgaggtcc

SEQ ID NO: 299050 - DNA, 25 bp, Artificial
  Probe
gtggacgacccgatgagtctgctct

SEQ ID NO: 299051 - DNA, 25 bp, Artificial
  Probe
tatcgtcagcctgcaccaccagaga

SEQ ID NO: 299052 - DNA, 25 bp, Artificial
  Probe
ttggacctgcagatcgccctggact

SEQ ID NO: 299053 - DNA, 25 bp, Artificial
  Probe
ctccaagctcaaggaactggtgccc

SEQ ID NO: 299054 - DNA, 25 bp, Artificial
  Probe
tgaccaccctgaacacggacatcag

SEQ ID NO: 299055 - DNA, 25 bp, Artificial
  Probe
tgagtctgctctacaacatgaacga

SEQ ID NO: 299056 - DNA, 25 bp, Artificial
  Probe
cctgaacacggacatcagcatcctg

SEQ ID NO: 299057 - DNA, 25 bp, Artificial
  Probe
tcctgtccttgcaggcgtctgaatt

SEQ ID NO: 299058 - DNA, 25 bp, Artificial
  Probe
acacggacatcagcatcctgtcctt

SEQ ID NO: 299059 - DNA, 25 bp, Artificial
  Probe
cccgatgagtctgctctacaacatg

SEQ ID NO: 299060 - DNA, 25 bp, Artificial
  Probe
cttaactcagaatactaaaagagag

SEQ ID NO: 299061 - DNA, 25 bp, Artificial
  Probe
tcacgaaaccccaaggcggctgtcg

SEQ ID NO: 299062 - DNA, 25 bp, Artificial
  Probe
cccaggcaatggagccctctgtgaa

SEQ ID NO: 299063 - DNA, 25 bp, Artificial
  Probe
tctcccaggctgtgccttaactcag

SEQ ID NO: 299064 - DNA, 25 bp, Artificial
  Probe
ccctctgtgaaactggataaaatgg

SEQ ID NO: 299065 - DNA, 25 bp, Artificial
  Probe
tagccccaggaaggaaatgacgcag

SEQ ID NO: 299066 - DNA, 25 bp, Artificial
  Probe
ggaagtgagcatgttgcctgtcacg

SEQ ID NO: 299067 - DNA, 25 bp, Artificial
  Probe
tgcctgtcacgaaaccccaaggcgg

SEQ ID NO: 299068 - DNA, 25 bp, Artificial
  Probe
gtgacatgtcccagggctgactcta

SEQ ID NO: 299069 - DNA, 25 bp, Artificial
  Probe
ggagcctgcaaatgcattgtgctgg

SEQ ID NO: 299070 - DNA, 25 bp, Artificial
  Probe
ggactttggccgaggctccgctcct

SEQ ID NO: 299071 - DNA, 25 bp, Artificial
  Probe
tggcctagccccaggaaggaaatga

SEQ ID NO: 299072 - DNA, 25 bp, Artificial
  Probe
gagcaagctcgctcagagagcggtt

SEQ ID NO: 299073 - DNA, 25 bp, Artificial
  Probe
tcacggttgggctactgccaattcc

SEQ ID NO: 299074 - DNA, 25 bp, Artificial
  Probe
aggaaatgacgcagcttgctcctca

SEQ ID NO: 299075 - DNA, 25 bp, Artificial
  Probe
gagcatgttgcctgtcacgaaaccc

SEQ ID NO: 299076 - DNA, 25 bp, Artificial
  Probe
tgtctcctggcctagccccaggaag

SEQ ID NO: 299077 - DNA, 25 bp, Artificial
  Probe
cagagagcggttggagcctgcaaat

SEQ ID NO: 299078 - DNA, 25 bp, Artificial
  Probe
atgggtgacatgtcccagggctgac

SEQ ID NO: 299079 - DNA, 25 bp, Artificial
  Probe
gaaatgacgcagcttgctcctcatc

SEQ ID NO: 299080 - DNA, 25 bp, Artificial
  Probe
caaatgcattgtgctggctgtggtg

SEQ ID NO: 299081 - DNA, 25 bp, Artificial
  Probe
gcaatggagccctctgtgaaactgg

SEQ ID NO: 299082 - DNA, 25 bp, Artificial
  Probe
cctgcaaatgcattgtgctggctgt

SEQ ID NO: 299083 - DNA, 25 bp, Artificial
  Probe
catacccaggcaatggagccctctg

SEQ ID NO: 299084 - DNA, 25 bp, Artificial
  Probe
ggctctatcctccaagaagtaccca

SEQ ID NO: 299085 - DNA, 25 bp, Artificial
  Probe
gaaggagcaagctcgctcagagagc

SEQ ID NO: 299086 - DNA, 25 bp, Artificial
  Probe
cacgaaaccccaaggcggctgtcgg

SEQ ID NO: 299087 - DNA, 25 bp, Artificial
  Probe
actcttacgtgtctcctggcctagc

SEQ ID NO: 299088 - DNA, 25 bp, Artificial
  Probe
gcggttggagcctgcaaatgcattg

SEQ ID NO: 299089 - DNA, 25 bp, Artificial
  Probe
attccgtccggactcttacgtgtct

SEQ ID NO: 299090 - DNA, 25 bp, Artificial
  Probe
ttgcttgctctcacggttgggctac

SEQ ID NO: 299091 - DNA, 25 bp, Artificial
  Probe
agaagtacccatacccaggcaatgg

SEQ ID NO: 299092 - DNA, 25 bp, Artificial
  Probe
gtacccatacccaggcaatggagcc

SEQ ID NO: 299093 - DNA, 25 bp, Artificial
  Probe
gtctcctggcctagccccaggaagg

SEQ ID NO: 299094 - DNA, 25 bp, Artificial
  Probe
atctcccaggctgtgccttaactca

SEQ ID NO: 299095 - DNA, 25 bp, Artificial
  Probe
tgctctcacggttgggctactgcca

SEQ ID NO: 299096 - DNA, 25 bp, Artificial
  Probe
caagaagtacccatacccaggcaat

SEQ ID NO: 299097 - DNA, 25 bp, Artificial
  Probe
atgtcccagggctgactctacctaa

SEQ ID NO: 299098 - DNA, 25 bp, Artificial
  Probe
cgaggctccgctccttgtcatgctg

SEQ ID NO: 299099 - DNA, 25 bp, Artificial
  Probe
tttggccgaggctccgctccttgtc

SEQ ID NO: 299100 - DNA, 25 bp, Artificial
  Probe
tgggctactgccaattccctgtgct

SEQ ID NO: 299101 - DNA, 25 bp, Artificial
  Probe
actctacctaaaaggctttgtggag

SEQ ID NO: 299102 - DNA, 25 bp, Artificial
  Probe
ctcagagagcggttggagcctgcaa

SEQ ID NO: 299103 - DNA, 25 bp, Artificial
  Probe
gccaattccctgtgctgtttcctac

SEQ ID NO: 299104 - DNA, 25 bp, Artificial
  Probe
ccaggctgtgccttaactcagaata

SEQ ID NO: 299105 - DNA, 25 bp, Artificial
  Probe
tggttttggaaggttgcttgctctc

SEQ ID NO: 299106 - DNA, 25 bp, Artificial
  Probe
atggaggccaacagcccgtggcaac

SEQ ID NO: 299107 - DNA, 25 bp, Artificial
  Probe
cgccagagtcattccctctcttgag

SEQ ID NO: 299108 - DNA, 25 bp, Artificial
  Probe
tagctttctgcctgagtgactccgc

SEQ ID NO: 299109 - DNA, 25 bp, Artificial
  Probe
ggccaccagaagtccggactgcaca

SEQ ID NO: 299110 - DNA, 25 bp, Artificial
  Probe
agtgactccgccagagtcattccct

SEQ ID NO: 299111 - DNA, 25 bp, Artificial
  Probe
acgtggttactgtccctgtctcgta

SEQ ID NO: 299112 - DNA, 25 bp, Artificial
  Probe
tgagctctgaagctaggtccaccct

SEQ ID NO: 299113 - DNA, 25 bp, Artificial
  Probe
cggccgttcggcatggaggccaaca

SEQ ID NO: 299114 - DNA, 25 bp, Artificial
  Probe
tggcattgtggagtgcttaaacact

SEQ ID NO: 299115 - DNA, 25 bp, Artificial
  Probe
gcatggaggccaacagcccgtggca

SEQ ID NO: 299116 - DNA, 25 bp, Artificial
  Probe
agactgctgctgctcagtccgatcc

SEQ ID NO: 299117 - DNA, 25 bp, Artificial
  Probe
ttgataggggcttaagcatgctcaa

SEQ ID NO: 299118 - DNA, 25 bp, Artificial
  Probe
tgcgttcagcccttctcagtgagct

SEQ ID NO: 299119 - DNA, 25 bp, Artificial
  Probe
tgtggacgtggttactgtccctgtc

SEQ ID NO: 299120 - DNA, 25 bp, Artificial
  Probe
cctgtgaactaatttgcgttcagcc

SEQ ID NO: 299121 - DNA, 25 bp, Artificial
  Probe
ggcctgaaggccaccagaagtccgg

SEQ ID NO: 299122 - DNA, 25 bp, Artificial
  Probe
caggctggatctcgttggcattgtg

SEQ ID NO: 299123 - DNA, 25 bp, Artificial
  Probe
attccctctcttgaggttgcatccc

SEQ ID NO: 299124 - DNA, 25 bp, Artificial
  Probe
gttactgtccctgtctcgtatggcc

SEQ ID NO: 299125 - DNA, 25 bp, Artificial
  Probe
ccaatgtgtccctgtgaactaattt

SEQ ID NO: 299126 - DNA, 25 bp, Artificial
  Probe
agcttggctttctccccaaagacct

SEQ ID NO: 299127 - DNA, 25 bp, Artificial
  Probe
ttaaacactctccatgcggccgttc

SEQ ID NO: 299128 - DNA, 25 bp, Artificial
  Probe
tgcacacagcacaggctggatctcg

SEQ ID NO: 299129 - DNA, 25 bp, Artificial
  Probe
accctatcagagcttggctttctcc

SEQ ID NO: 299130 - DNA, 25 bp, Artificial
  Probe
gagtgcttaaacactctccatgcgg

SEQ ID NO: 299131 - DNA, 25 bp, Artificial
  Probe
aactccagtcctagctttctgcctg

SEQ ID NO: 299132 - DNA, 25 bp, Artificial
  Probe
atgctcaagagagcagagagcgttg

SEQ ID NO: 299133 - DNA, 25 bp, Artificial
  Probe
cacagcacaggctggatctcgttgg

SEQ ID NO: 299134 - DNA, 25 bp, Artificial
  Probe
agagtcattccctctcttgaggttg

SEQ ID NO: 299135 - DNA, 25 bp, Artificial
  Probe
acagcccgtggcaactgtaattaaa

SEQ ID NO: 299136 - DNA, 25 bp, Artificial
  Probe
gatctcgttggcattgtggagtgct

SEQ ID NO: 299137 - DNA, 25 bp, Artificial
  Probe
cctctccaggtgtggactgcacaca

SEQ ID NO: 299138 - DNA, 25 bp, Artificial
  Probe
ggggcttaagcatgctcaagagagc

SEQ ID NO: 299139 - DNA, 25 bp, Artificial
  Probe
acagtgtcacttcaccctatcagag

SEQ ID NO: 299140 - DNA, 25 bp, Artificial
  Probe
cacctggcctgaaggccaccagaag

SEQ ID NO: 299141 - DNA, 25 bp, Artificial
  Probe
tcagagcttggctttctccccaaag

SEQ ID NO: 299142 - DNA, 25 bp, Artificial
  Probe
ggttgcatcccctaagctgagttga

SEQ ID NO: 299143 - DNA, 25 bp, Artificial
  Probe
tgcctgagtgactccgccagagtca

SEQ ID NO: 299144 - DNA, 25 bp, Artificial
  Probe
gccagctgcaccaatgtgtccctgt

SEQ ID NO: 299145 - DNA, 25 bp, Artificial
  Probe
tgcaccaatgtgtccctgtgaacta

SEQ ID NO: 299146 - DNA, 25 bp, Artificial
  Probe
taatttgcgttcagcccttctcagt

SEQ ID NO: 299147 - DNA, 25 bp, Artificial
  Probe
cctaagctgagttgataggggctta

SEQ ID NO: 299148 - DNA, 25 bp, Artificial
  Probe
cgttcggcatggaggccaacagccc

SEQ ID NO: 299149 - DNA, 25 bp, Artificial
  Probe
gccaacagcccgtggcaactgtaat

SEQ ID NO: 299150 - DNA, 25 bp, Artificial
  Probe
cttgaggttgcatcccctaagctga

SEQ ID NO: 299151 - DNA, 25 bp, Artificial
  Probe
ctaatttgcgttcagcccttctcag

SEQ ID NO: 299152 - DNA, 25 bp, Artificial
  Probe
gtcccaccaggcagcatctgaggac

SEQ ID NO: 299153 - DNA, 25 bp, Artificial
  Probe
cctgactctgattcccgcatcaatg

SEQ ID NO: 299154 - DNA, 25 bp, Artificial
  Probe
agcagcctgactctgattcccgcat

SEQ ID NO: 299155 - DNA, 25 bp, Artificial
  Probe
gccacaggcaatttgaagcatttat

SEQ ID NO: 299156 - DNA, 25 bp, Artificial
  Probe
tcagtattgccctcttctgcaaatg

SEQ ID NO: 299157 - DNA, 25 bp, Artificial
  Probe
aaatgtccccagcaggccacaggca

SEQ ID NO: 299158 - DNA, 25 bp, Artificial
  Probe
cgtggctcccagacacttgcctttg

SEQ ID NO: 299159 - DNA, 25 bp, Artificial
  Probe
ccttcggcagcacaaagggcggctg

SEQ ID NO: 299160 - DNA, 25 bp, Artificial
  Probe
ctggagcagcctgactctgattccc

SEQ ID NO: 299161 - DNA, 25 bp, Artificial
  Probe
attcaacctgatgctccgtggctcc

SEQ ID NO: 299162 - DNA, 25 bp, Artificial
  Probe
aatgtccccagcaggccacaggcaa

SEQ ID NO: 299163 - DNA, 25 bp, Artificial
  Probe
ccaccaggcagcatctgaggacctg

SEQ ID NO: 299164 - DNA, 25 bp, Artificial
  Probe
acagctcctggagcagcctgactct

SEQ ID NO: 299165 - DNA, 25 bp, Artificial
  Probe
ccccagcaggccacaggcaatttga

SEQ ID NO: 299166 - DNA, 25 bp, Artificial
  Probe
gaagatcacaataaacagctggagt

SEQ ID NO: 299167 - DNA, 25 bp, Artificial
  Probe
acaccgactatccaaagagaaaagg

SEQ ID NO: 299168 - DNA, 25 bp, Artificial
  Probe
gtttcccgaccttcagtattgccct

SEQ ID NO: 299169 - DNA, 25 bp, Artificial
  Probe
agctcctggagcagcctgactctga

SEQ ID NO: 299170 - DNA, 25 bp, Artificial
  Probe
tgcatcgcctcagacagctcctgga

SEQ ID NO: 299171 - DNA, 25 bp, Artificial
  Probe
cctggagcagcctgactctgattcc

SEQ ID NO: 299172 - DNA, 25 bp, Artificial
  Probe
tcattgagctactcgcttgaccccg

SEQ ID NO: 299173 - DNA, 25 bp, Artificial
  Probe
ctcccagacacttgcctttgagtgc

SEQ ID NO: 299174 - DNA, 25 bp, Artificial
  Probe
atgctccgtggctcccagacacttg

SEQ ID NO: 299175 - DNA, 25 bp, Artificial
  Probe
ggtgttctactgagggaatcaaaca

SEQ ID NO: 299176 - DNA, 25 bp, Artificial
  Probe
tcacaataaacagctggagtctcag

SEQ ID NO: 299177 - DNA, 25 bp, Artificial
  Probe
acagcatccttcattgagctactcg

SEQ ID NO: 299178 - DNA, 25 bp, Artificial
  Probe
agcatctgaggacctgctggccccg

SEQ ID NO: 299179 - DNA, 25 bp, Artificial
  Probe
aggatgcagattctggaagatcaca

SEQ ID NO: 299180 - DNA, 25 bp, Artificial
  Probe
gattcccgcatcaatggtgtctccc

SEQ ID NO: 299181 - DNA, 25 bp, Artificial
  Probe
taaacagctggagtctcagctgcat

SEQ ID NO: 299182 - DNA, 25 bp, Artificial
  Probe
agatgtgatggagcagctcaacagc

SEQ ID NO: 299183 - DNA, 25 bp, Artificial
  Probe
gaagcatttatccagccaaccaacg

SEQ ID NO: 299184 - DNA, 25 bp, Artificial
  Probe
cgaccttcagtattgccctcttctg

SEQ ID NO: 299185 - DNA, 25 bp, Artificial
  Probe
acaccagcacggacctcacagatgt

SEQ ID NO: 299186 - DNA, 25 bp, Artificial
  Probe
caggccacaggcaatttgaagcatt

SEQ ID NO: 299187 - DNA, 25 bp, Artificial
  Probe
agtattgccctcttctgcaaatgcc

SEQ ID NO: 299188 - DNA, 25 bp, Artificial
  Probe
agggaatcaaacaccgactatccaa

SEQ ID NO: 299189 - DNA, 25 bp, Artificial
  Probe
gaccttcagtattgccctcttctgc

SEQ ID NO: 299190 - DNA, 25 bp, Artificial
  Probe
caacgtttcccgaccttcagtattg

SEQ ID NO: 299191 - DNA, 25 bp, Artificial
  Probe
ctgattcccgcatcaatggtgtctc

SEQ ID NO: 299192 - DNA, 25 bp, Artificial
  Probe
ctcacagatgtgatggagcagctca

SEQ ID NO: 299193 - DNA, 25 bp, Artificial
  Probe
ctcagacagctcctggagcagcctg

SEQ ID NO: 299194 - DNA, 25 bp, Artificial
  Probe
cagacacttgcctttgagtgctgac

SEQ ID NO: 299195 - DNA, 25 bp, Artificial
  Probe
tcgcctcagacagctcctggagcag

SEQ ID NO: 299196 - DNA, 25 bp, Artificial
  Probe
gagcagctcaacagcacgtttccct

SEQ ID NO: 299197 - DNA, 25 bp, Artificial
  Probe
ccattcaacctgatgctccgtggct

SEQ ID NO: 299198 - DNA, 25 bp, Artificial
  Probe
aaagggaatgcttttctacgctctt

SEQ ID NO: 299199 - DNA, 25 bp, Artificial
  Probe
acctgaaaatcactgttagttctcg

SEQ ID NO: 299200 - DNA, 25 bp, Artificial
  Probe
atgtatgtatcagcatgccagttgt

SEQ ID NO: 299201 - DNA, 25 bp, Artificial
  Probe
gaatgcttttctacgctcttctgct

SEQ ID NO: 299202 - DNA, 25 bp, Artificial
  Probe
atgtctcccaatgtgaaggttaaat

SEQ ID NO: 299203 - DNA, 25 bp, Artificial
  Probe
tgattatatgtctcccaatgtgaag

SEQ ID NO: 299204 - DNA, 25 bp, Artificial
  Probe
ataatcgcatccatgttgtcttgtt

SEQ ID NO: 299205 - DNA, 25 bp, Artificial
  Probe
aaatcactgttagttctcgaagttc

SEQ ID NO: 299206 - DNA, 25 bp, Artificial
  Probe
tatcagcatgccagttgttcaatag

SEQ ID NO: 299207 - DNA, 25 bp, Artificial
  Probe
ctgttagttctcgaagttcaaaggg

SEQ ID NO: 299208 - DNA, 25 bp, Artificial
  Probe
caaatagtttccacattgcttgagg

SEQ ID NO: 299209 - DNA, 25 bp, Artificial
  Probe
tgaaaatcactgttagttctcgaag

SEQ ID NO: 299210 - DNA, 25 bp, Artificial
  Probe
agtttccacattgcttgaggcaaac

SEQ ID NO: 299211 - DNA, 25 bp, Artificial
  Probe
attgtactgtgtcttcatgaagatc

SEQ ID NO: 299212 - DNA, 25 bp, Artificial
  Probe
gcttttctacgctcttctgctattg

SEQ ID NO: 299213 - DNA, 25 bp, Artificial
  Probe
tgccagttgttcaatagttatttac

SEQ ID NO: 299214 - DNA, 25 bp, Artificial
  Probe
tgtgattatatgtctcccaatgtga

SEQ ID NO: 299215 - DNA, 25 bp, Artificial
  Probe
gtgtcttcatgaagatctttttcat

SEQ ID NO: 299216 - DNA, 25 bp, Artificial
  Probe
atgcttgattgtactgtgtcttcat

SEQ ID NO: 299217 - DNA, 25 bp, Artificial
  Probe
agttctcgaagttcaaagggaatgc

SEQ ID NO: 299218 - DNA, 25 bp, Artificial
  Probe
ttctcgaagttcaaagggaatgctt

SEQ ID NO: 299219 - DNA, 25 bp, Artificial
  Probe
aatcactgttagttctcgaagttca

SEQ ID NO: 299220 - DNA, 25 bp, Artificial
  Probe
tccacattgcttgaggcaaactaat

SEQ ID NO: 299221 - DNA, 25 bp, Artificial
  Probe
tccatgttgtcttgttgtaccatgt

SEQ ID NO: 299222 - DNA, 25 bp, Artificial
  Probe
ctgaaaatcactgttagttctcgaa

SEQ ID NO: 299223 - DNA, 25 bp, Artificial
  Probe
catgccagttgttcaatagttattt

SEQ ID NO: 299224 - DNA, 25 bp, Artificial
  Probe
aatagtttccacattgcttgaggca

SEQ ID NO: 299225 - DNA, 25 bp, Artificial
  Probe
atgtgattatatgtctcccaatgtg

SEQ ID NO: 299226 - DNA, 25 bp, Artificial
  Probe
cttgattgtactgtgtcttcatgaa

SEQ ID NO: 299227 - DNA, 25 bp, Artificial
  Probe
cgcatccatgttgtcttgttgtacc

SEQ ID NO: 299228 - DNA, 25 bp, Artificial
  Probe
ctgtgtcttcatgaagatctttttc

SEQ ID NO: 299229 - DNA, 25 bp, Artificial
  Probe
tatgtatcagcatgccagttgttca

SEQ ID NO: 299230 - DNA, 25 bp, Artificial
  Probe
gctcttctgctattgaaaaggggga

SEQ ID NO: 299231 - DNA, 25 bp, Artificial
  Probe
gtatgtatcagcatgccagttgttc

SEQ ID NO: 299232 - DNA, 25 bp, Artificial
  Probe
tgtatgtatgtatcagcatgccagt

SEQ ID NO: 299233 - DNA, 25 bp, Artificial
  Probe
tacgctcttctgctattgaaaaggg

SEQ ID NO: 299234 - DNA, 25 bp, Artificial
  Probe
tatatgtctcccaatgtgaaggtta

SEQ ID NO: 299235 - DNA, 25 bp, Artificial
  Probe
gtctcccaatgtgaaggttaaatta

SEQ ID NO: 299236 - DNA, 25 bp, Artificial
  Probe
agggaatgcttttctacgctcttct

SEQ ID NO: 299237 - DNA, 25 bp, Artificial
  Probe
tatgcttgattgtactgtgtcttca

SEQ ID NO: 299238 - DNA, 25 bp, Artificial
  Probe
tactgtgtcttcatgaagatctttt

SEQ ID NO: 299239 - DNA, 25 bp, Artificial
  Probe
ccacattgcttgaggcaaactaatg

SEQ ID NO: 299240 - DNA, 25 bp, Artificial
  Probe
tctacgctcttctgctattgaaaag

SEQ ID NO: 299241 - DNA, 25 bp, Artificial
  Probe
cagcatgccagttgttcaatagtta

SEQ ID NO: 299242 - DNA, 25 bp, Artificial
  Probe
ttgtactgtgtcttcatgaagatct

SEQ ID NO: 299243 - DNA, 25 bp, Artificial
  Probe
cttctgctattgaaaagggggacag

SEQ ID NO: 299244 - DNA, 25 bp, Artificial
  Probe
aatgaacacgagacgctgttagcac

SEQ ID NO: 299245 - DNA, 25 bp, Artificial
  Probe
tggttcatgagagagtctgtatccg

SEQ ID NO: 299246 - DNA, 25 bp, Artificial
  Probe
cagaagatgtgttcaccatggatta

SEQ ID NO: 299247 - DNA, 25 bp, Artificial
  Probe
tgtgatcgtcccaggcatgaacatg

SEQ ID NO: 299248 - DNA, 25 bp, Artificial
  Probe
cgccagtctggaatgatgacacgca

SEQ ID NO: 299249 - DNA, 25 bp, Artificial
  Probe
tcagaaggcatcatcttctacactg

SEQ ID NO: 299250 - DNA, 25 bp, Artificial
  Probe
agccgtgtgctatgagacaaatgtc

SEQ ID NO: 299251 - DNA, 25 bp, Artificial
  Probe
ctgttagcacgctggcagaacaaga

SEQ ID NO: 299252 - DNA, 25 bp, Artificial
  Probe
tccatgggcgcgtcacacaggcttc

SEQ ID NO: 299253 - DNA, 25 bp, Artificial
  Probe
tcttaatttccatgggcgcgtcaca

SEQ ID NO: 299254 - DNA, 25 bp, Artificial
  Probe
acaactacccgctgtgtgcactgca

SEQ ID NO: 299255 - DNA, 25 bp, Artificial
  Probe
agctggcctgcgagtagaggcttcc

SEQ ID NO: 299256 - DNA, 25 bp, Artificial
  Probe
gaaccctgcgccaggagctggcagc

SEQ ID NO: 299257 - DNA, 25 bp, Artificial
  Probe
aaagtggaaccctgcgccaggagct

SEQ ID NO: 299258 - DNA, 25 bp, Artificial
  Probe
cacgctggcagaacaagaacacgga

SEQ ID NO: 299259 - DNA, 25 bp, Artificial
  Probe
cattgagctgcagaataagacgcca

SEQ ID NO: 299260 - DNA, 25 bp, Artificial
  Probe
tccacggcaatgacccggactacat

SEQ ID NO: 299261 - DNA, 25 bp, Artificial
  Probe
aggcttcaagggaccccggaagatg

SEQ ID NO: 299262 - DNA, 25 bp, Artificial
  Probe
accccggaagatgagtgtgatcgtc

SEQ ID NO: 299263 - DNA, 25 bp, Artificial
  Probe
catgaacatggttcatgagagagtc

SEQ ID NO: 299264 - DNA, 25 bp, Artificial
  Probe
ttctacactggaaagtggaaccctg

SEQ ID NO: 299265 - DNA, 25 bp, Artificial
  Probe
ccaggagctggcagccgtgtgctat

SEQ ID NO: 299266 - DNA, 25 bp, Artificial
  Probe
agtcctatgttcttaatttccatgg

SEQ ID NO: 299267 - DNA, 25 bp, Artificial
  Probe
gaccccggaagatgagtgtgatcgt

SEQ ID NO: 299268 - DNA, 25 bp, Artificial
  Probe
atcatccacggcaatgacccggact

SEQ ID NO: 299269 - DNA, 25 bp, Artificial
  Probe
gacacgcagtcctatgttcttaatt

SEQ ID NO: 299270 - DNA, 25 bp, Artificial
  Probe
actgcaggcctttgccatcgctctg

SEQ ID NO: 299271 - DNA, 25 bp, Artificial
  Probe
tgtgtgcactgcaggcctttgccat

SEQ ID NO: 299272 - DNA, 25 bp, Artificial
  Probe
ttccagatcatccacggcaatgacc

SEQ ID NO: 299273 - DNA, 25 bp, Artificial
  Probe
atggttcatgagagagtctgtatcc

SEQ ID NO: 299274 - DNA, 25 bp, Artificial
  Probe
atgatgacacgcagtcctatgttct

SEQ ID NO: 299275 - DNA, 25 bp, Artificial
  Probe
ctatgagacaaatgtcctaggcttc

SEQ ID NO: 299276 - DNA, 25 bp, Artificial
  Probe
agtagaggcttccactgcctttagg

SEQ ID NO: 299277 - DNA, 25 bp, Artificial
  Probe
cgtcatgcagtttggccgggtagca

SEQ ID NO: 299278 - DNA, 25 bp, Artificial
  Probe
tggagtggagcctgcctgcacctgc

SEQ ID NO: 299279 - DNA, 25 bp, Artificial
  Probe
gtcaaccctcagaaggcatcatctt

SEQ ID NO: 299280 - DNA, 25 bp, Artificial
  Probe
acaagaacacggagagcatcattga

SEQ ID NO: 299281 - DNA, 25 bp, Artificial
  Probe
gatgagtgtgatcgtcccaggcatg

SEQ ID NO: 299282 - DNA, 25 bp, Artificial
  Probe
cccaggcatgaacatggttcatgag

SEQ ID NO: 299283 - DNA, 25 bp, Artificial
  Probe
acacggagagcatcattgagctgca

SEQ ID NO: 299284 - DNA, 25 bp, Artificial
  Probe
gaataagacgccagtctggaatgat

SEQ ID NO: 299285 - DNA, 25 bp, Artificial
  Probe
gccccgtctggagtggagcctgcct

SEQ ID NO: 299286 - DNA, 25 bp, Artificial
  Probe
tggcgtcaaccctcagaaggcatca

SEQ ID NO: 299287 - DNA, 25 bp, Artificial
  Probe
gcaatgacccggactacatcgtcat

SEQ ID NO: 299288 - DNA, 25 bp, Artificial
  Probe
ttgacagcaagctggcctgcgagta

SEQ ID NO: 299289 - DNA, 25 bp, Artificial
  Probe
aggcctttgccatcgctctgtccag

SEQ ID NO: 299290 - DNA, 25 bp, Artificial
  Probe
gtaactcattctgctgccaaattga

SEQ ID NO: 299291 - DNA, 25 bp, Artificial
  Probe
tggtgtctccatggaccaaatttat

SEQ ID NO: 299292 - DNA, 25 bp, Artificial
  Probe
agaagctgctaacagagatgggccc

SEQ ID NO: 299293 - DNA, 25 bp, Artificial
  Probe
aaactccatggatgtttaccaagta

SEQ ID NO: 299294 - DNA, 25 bp, Artificial
  Probe
cagcacaaggcaggaagagaatcca

SEQ ID NO: 299295 - DNA, 25 bp, Artificial
  Probe
tccctggatagtaatggtgcagctt

SEQ ID NO: 299296 - DNA, 25 bp, Artificial
  Probe
aagatgagcccataaattgcgagag

SEQ ID NO: 299297 - DNA, 25 bp, Artificial
  Probe
cttcccatgacctgacggtaactca

SEQ ID NO: 299298 - DNA, 25 bp, Artificial
  Probe
ctaaaactgtactgtgttatccaag

SEQ ID NO: 299299 - DNA, 25 bp, Artificial
  Probe
gtttaattagcttactctctggtct

SEQ ID NO: 299300 - DNA, 25 bp, Artificial
  Probe
aatactgccctggtgtctccatgga

SEQ ID NO: 299301 - DNA, 25 bp, Artificial
  Probe
acaacgtgtgcctttttgaaagact

SEQ ID NO: 299302 - DNA, 25 bp, Artificial
  Probe
cttggaagcgacacaggatgattat

SEQ ID NO: 299303 - DNA, 25 bp, Artificial
  Probe
ttcacgatgagcatggaggagtaac

SEQ ID NO: 299304 - DNA, 25 bp, Artificial
  Probe
tgatagttcaagacttcatcttgga

SEQ ID NO: 299305 - DNA, 25 bp, Artificial
  Probe
agtaaggcattttcagtgcccgaaa

SEQ ID NO: 299306 - DNA, 25 bp, Artificial
  Probe
gcagtattcacctgaagtaggagtg

SEQ ID NO: 299307 - DNA, 25 bp, Artificial
  Probe
ggacattttgtgctctcacaaccct

SEQ ID NO: 299308 - DNA, 25 bp, Artificial
  Probe
cacgatgagcatggaggagtaacag

SEQ ID NO: 299309 - DNA, 25 bp, Artificial
  Probe
gtactgtgttatccaagaaactaac

SEQ ID NO: 299310 - DNA, 25 bp, Artificial
  Probe
ctgcatgtcattttaacttttgtga

SEQ ID NO: 299311 - DNA, 25 bp, Artificial
  Probe
gatcaatttgatgaggccgggagtc

SEQ ID NO: 299312 - DNA, 25 bp, Artificial
  Probe
acctccctggatagtaatggtgcag

SEQ ID NO: 299313 - DNA, 25 bp, Artificial
  Probe
ttagctgtatttgtagcaatcatca

SEQ ID NO: 299314 - DNA, 25 bp, Artificial
  Probe
gtaacagcagggacattttgtgctc

SEQ ID NO: 299315 - DNA, 25 bp, Artificial
  Probe
tttagctgtatttgtagcaatcatc

SEQ ID NO: 299316 - DNA, 25 bp, Artificial
  Probe
gatgaggccgggagtcttcactgac

SEQ ID NO: 299317 - DNA, 25 bp, Artificial
  Probe
gcagtgtctctttctaaacttagaa

SEQ ID NO: 299318 - DNA, 25 bp, Artificial
  Probe
ctgaagaacacaaatgtctttcgaa

SEQ ID NO: 299319 - DNA, 25 bp, Artificial
  Probe
aaattgacaccattaacaacgtgtg

SEQ ID NO: 299320 - DNA, 25 bp, Artificial
  Probe
accaagtagccaagatgatcaattt

SEQ ID NO: 299321 - DNA, 25 bp, Artificial
  Probe
acgcttatgtctgaagaacacaaat

SEQ ID NO: 299322 - DNA, 25 bp, Artificial
  Probe
ttacaactgcagtattcacctgaag

SEQ ID NO: 299323 - DNA, 25 bp, Artificial
  Probe
gacaccattaacaacgtgtgccttt

SEQ ID NO: 299324 - DNA, 25 bp, Artificial
  Probe
cacaaatgtctttcgaatgaggaaa

SEQ ID NO: 299325 - DNA, 25 bp, Artificial
  Probe
atcaatttgatgaggccgggagtct

SEQ ID NO: 299326 - DNA, 25 bp, Artificial
  Probe
gccaaatccagatagtcccattagt

SEQ ID NO: 299327 - DNA, 25 bp, Artificial
  Probe
ttactggccaaataaagatgagccc

SEQ ID NO: 299328 - DNA, 25 bp, Artificial
  Probe
taataggaaacaccaaccttgggag

SEQ ID NO: 299329 - DNA, 25 bp, Artificial
  Probe
aagcagtgtctctttctaaacttag

SEQ ID NO: 299330 - DNA, 25 bp, Artificial
  Probe
agtttaattagcttactctctggtc

SEQ ID NO: 299331 - DNA, 25 bp, Artificial
  Probe
ctttgcctgatggaaatatagctga

SEQ ID NO: 299332 - DNA, 25 bp, Artificial
  Probe
catgattgttcacgatgagcatgga

SEQ ID NO: 299333 - DNA, 25 bp, Artificial
  Probe
gcctttttgaaagacttcttgtaat

SEQ ID NO: 299334 - DNA, 25 bp, Artificial
  Probe
gatagtcccattagtaaaacatttg

SEQ ID NO: 299335 - DNA, 25 bp, Artificial
  Probe
caaccttgggagatatttgttctta

SEQ ID NO: 299336 - DNA, 25 bp, Artificial
  Probe
cacagccactccatgggcctggagg

SEQ ID NO: 299337 - DNA, 25 bp, Artificial
  Probe
tgtggaggctctgcatgttaaaacg

SEQ ID NO: 299338 - DNA, 25 bp, Artificial
  Probe
catgttaaaacgacaacctggctgc

SEQ ID NO: 299339 - DNA, 25 bp, Artificial
  Probe
gaattgcttaactgtcaaagctccc

SEQ ID NO: 299340 - DNA, 25 bp, Artificial
  Probe
aatattgagacagatgccttctttt

SEQ ID NO: 299341 - DNA, 25 bp, Artificial
  Probe
gctctgcatgttaaaacgacaacct

SEQ ID NO: 299342 - DNA, 25 bp, Artificial
  Probe
ctgtgagtgacaaccacagccactc

SEQ ID NO: 299343 - DNA, 25 bp, Artificial
  Probe
cctgtgagtgacaaccacagccact

SEQ ID NO: 299344 - DNA, 25 bp, Artificial
  Probe
ggggatcagccctatagaattgctt

SEQ ID NO: 299345 - DNA, 25 bp, Artificial
  Probe
atttacctctggattggccagagga

SEQ ID NO: 299346 - DNA, 25 bp, Artificial
  Probe
agccctatagaattgcttaactgtc

SEQ ID NO: 299347 - DNA, 25 bp, Artificial
  Probe
aactgtcaaagctcccttgcagaag

SEQ ID NO: 299348 - DNA, 25 bp, Artificial
  Probe
ccatggtgtctgtaagaccaaagag

SEQ ID NO: 299349 - DNA, 25 bp, Artificial
  Probe
gtaagaccaaagagcccctcagtta

SEQ ID NO: 299350 - DNA, 25 bp, Artificial
  Probe
gagacagatgccttcttttgcaatt

SEQ ID NO: 299351 - DNA, 25 bp, Artificial
  Probe
gtttattacaagatttacctctgga

SEQ ID NO: 299352 - DNA, 25 bp, Artificial
  Probe
caaactgtgtagtgtagctattgac

SEQ ID NO: 299353 - DNA, 25 bp, Artificial
  Probe
gtcaaagctcccttgcagaagaacc

SEQ ID NO: 299354 - DNA, 25 bp, Artificial
  Probe
cagaagaaccctgtgagtgacaacc

SEQ ID NO: 299355 - DNA, 25 bp, Artificial
  Probe
aagctcccttgcagaagaaccctgt

SEQ ID NO: 299356 - DNA, 25 bp, Artificial
  Probe
tatcctgcatgtgtctgggtgcagg

SEQ ID NO: 299357 - DNA, 25 bp, Artificial
  Probe
ctatagaattgcttaactgtcaaag

SEQ ID NO: 299358 - DNA, 25 bp, Artificial
  Probe
ccaaagagcccctcagttaggctgt

SEQ ID NO: 299359 - DNA, 25 bp, Artificial
  Probe
gagcccctcagttaggctgtttatt

SEQ ID NO: 299360 - DNA, 25 bp, Artificial
  Probe
agtgacaaccacagccactccatgg

SEQ ID NO: 299361 - DNA, 25 bp, Artificial
  Probe
ttgcttaactgtcaaagctcccttg

SEQ ID NO: 299362 - DNA, 25 bp, Artificial
  Probe
caaagagcccctcagttaggctgtt

SEQ ID NO: 299363 - DNA, 25 bp, Artificial
  Probe
agaaccctgtgagtgacaaccacag

SEQ ID NO: 299364 - DNA, 25 bp, Artificial
  Probe
gaaatgtatgcgttatcctgcatgt

SEQ ID NO: 299365 - DNA, 25 bp, Artificial
  Probe
gtttgatttccgagtatccatggtg

SEQ ID NO: 299366 - DNA, 25 bp, Artificial
  Probe
gatcagccctatagaattgcttaac

SEQ ID NO: 299367 - DNA, 25 bp, Artificial
  Probe
tattacaagatttacctctggattg

SEQ ID NO: 299368 - DNA, 25 bp, Artificial
  Probe
aaccctgtgagtgacaaccacagcc

SEQ ID NO: 299369 - DNA, 25 bp, Artificial
  Probe
ctgtaagaccaaagagcccctcagt

SEQ ID NO: 299370 - DNA, 25 bp, Artificial
  Probe
gtgtctgtaagaccaaagagcccct

SEQ ID NO: 299371 - DNA, 25 bp, Artificial
  Probe
tagaattgcttaactgtcaaagctc

SEQ ID NO: 299372 - DNA, 25 bp, Artificial
  Probe
tattgagacagatgccttcttttgc

SEQ ID NO: 299373 - DNA, 25 bp, Artificial
  Probe
taactggggatcagccctatagaat

SEQ ID NO: 299374 - DNA, 25 bp, Artificial
  Probe
tgtgggtttgatttccgagtatcca

SEQ ID NO: 299375 - DNA, 25 bp, Artificial
  Probe
acagccactccatgggcctggaggg

SEQ ID NO: 299376 - DNA, 25 bp, Artificial
  Probe
ataactggggatcagccctatagaa

SEQ ID NO: 299377 - DNA, 25 bp, Artificial
  Probe
gacagatgccttcttttgcaattta

SEQ ID NO: 299378 - DNA, 25 bp, Artificial
  Probe
gaagaaccctgtgagtgacaaccac

SEQ ID NO: 299379 - DNA, 25 bp, Artificial
  Probe
atgtgggtttgatttccgagtatcc

SEQ ID NO: 299380 - DNA, 25 bp, Artificial
  Probe
aagagcccctcagttaggctgttta

SEQ ID NO: 299381 - DNA, 25 bp, Artificial
  Probe
ctgttctcagtgactatgtgggttt

SEQ ID NO: 299382 - DNA, 25 bp, Artificial
  Probe
gcctagttcatccaatcctcactgg

SEQ ID NO: 299383 - DNA, 25 bp, Artificial
  Probe
tgccactgactatttctatccgaag

SEQ ID NO: 299384 - DNA, 25 bp, Artificial
  Probe
tgacccagagtggaaaacagattcc

SEQ ID NO: 299385 - DNA, 25 bp, Artificial
  Probe
gagggtctcatacttcctgaactgg

SEQ ID NO: 299386 - DNA, 25 bp, Artificial
  Probe
tgatttcccaattaggaagtgtaac

SEQ ID NO: 299387 - DNA, 25 bp, Artificial
  Probe
tacttcctgaactggattcagtccc

SEQ ID NO: 299388 - DNA, 25 bp, Artificial
  Probe
agttcatccaatcctcactgggtgg

SEQ ID NO: 299389 - DNA, 25 bp, Artificial
  Probe
atagtattaccctcagacacaggtc

SEQ ID NO: 299390 - DNA, 25 bp, Artificial
  Probe
gctcgggagattcaggaggacctct

SEQ ID NO: 299391 - DNA, 25 bp, Artificial
  Probe
gttgtctttttatggactaaagcca

SEQ ID NO: 299392 - DNA, 25 bp, Artificial
  Probe
aggaccatacagaccatctgcctgc

SEQ ID NO: 299393 - DNA, 25 bp, Artificial
  Probe
gggaacagttcttgcatcccatgag

SEQ ID NO: 299394 - DNA, 25 bp, Artificial
  Probe
tgcccccgaggtttggtgatgctcc

SEQ ID NO: 299395 - DNA, 25 bp, Artificial
  Probe
gggtaagggccactcatatacttaa

SEQ ID NO: 299396 - DNA, 25 bp, Artificial
  Probe
atggaaatcaatcctgactcaagat

SEQ ID NO: 299397 - DNA, 25 bp, Artificial
  Probe
cctgactcaagatgaatagatgggg

SEQ ID NO: 299398 - DNA, 25 bp, Artificial
  Probe
actgcaagtctaggtatttccctcc

SEQ ID NO: 299399 - DNA, 25 bp, Artificial
  Probe
gacctcttatctgtaacatcgatgg

SEQ ID NO: 299400 - DNA, 25 bp, Artificial
  Probe
aacagctgaggtattctgagggtgc

SEQ ID NO: 299401 - DNA, 25 bp, Artificial
  Probe
gcagggtcatctccatcatgtggag

SEQ ID NO: 299402 - DNA, 25 bp, Artificial
  Probe
cattcatgaggtctgctgttgggaa

SEQ ID NO: 299403 - DNA, 25 bp, Artificial
  Probe
ctccacttgaatgtattattcccgg

SEQ ID NO: 299404 - DNA, 25 bp, Artificial
  Probe
ttcccaattaggaagtgtaacagct

SEQ ID NO: 299405 - DNA, 25 bp, Artificial
  Probe
ttcaggaggacctcttatctgtaac

SEQ ID NO: 299406 - DNA, 25 bp, Artificial
  Probe
tttctcacgaacagtgcaagcagcc

SEQ ID NO: 299407 - DNA, 25 bp, Artificial
  Probe
tcccatgagtggatcaggaaatatt

SEQ ID NO: 299408 - DNA, 25 bp, Artificial
  Probe
cagcagggtcatctccatcatgtgg

SEQ ID NO: 299409 - DNA, 25 bp, Artificial
  Probe
cgcccaactctgagcgggattgtga

SEQ ID NO: 299410 - DNA, 25 bp, Artificial
  Probe
ccaatatgagcacagtagtgtgaag

SEQ ID NO: 299411 - DNA, 25 bp, Artificial
  Probe
ctgcagtttaaaaacccaagtgtag

SEQ ID NO: 299412 - DNA, 25 bp, Artificial
  Probe
tctacacgagggtctcatacttcct

SEQ ID NO: 299413 - DNA, 25 bp, Artificial
  Probe
gctgctgacccagagtggaaaacag

SEQ ID NO: 299414 - DNA, 25 bp, Artificial
  Probe
cacaggtctgggtgctggccatcca

SEQ ID NO: 299415 - DNA, 25 bp, Artificial
  Probe
tataaaatgctgtgtgctgctgacc

SEQ ID NO: 299416 - DNA, 25 bp, Artificial
  Probe
tcccacattggagaagagaatggcc

SEQ ID NO: 299417 - DNA, 25 bp, Artificial
  Probe
gttggttcccctaatgggtcattca

SEQ ID NO: 299418 - DNA, 25 bp, Artificial
  Probe
cactgtgcacaggttgtgagtataa

SEQ ID NO: 299419 - DNA, 25 bp, Artificial
  Probe
gcgtgtgtgtgtttgctcactgtgc

SEQ ID NO: 299420 - DNA, 25 bp, Artificial
  Probe
aacaggctctgcactgattctttgc

SEQ ID NO: 299421 - DNA, 25 bp, Artificial
  Probe
gcagctaatgtctgcttcacttttt

SEQ ID NO: 299422 - DNA, 25 bp, Artificial
  Probe
aaatctgagcaaagctggtgtattc

SEQ ID NO: 299423 - DNA, 25 bp, Artificial
  Probe
aagagaatggcctagccttctgatg

SEQ ID NO: 299424 - DNA, 25 bp, Artificial
  Probe
tgtaaagattatttctcacgaacag

SEQ ID NO: 299425 - DNA, 25 bp, Artificial
  Probe
ctagccttctgatggtccccaggca

SEQ ID NO: 299426 - DNA, 25 bp, Artificial
  Probe
ccaccagggtgaaccccaatagtat

SEQ ID NO: 299427 - DNA, 25 bp, Artificial
  Probe
tggaaaacagattcctgctcgggag

SEQ ID NO: 299428 - DNA, 25 bp, Artificial
  Probe
tgccaatagcatgcaacatacgttt

SEQ ID NO: 299429 - DNA, 25 bp, Artificial
  Probe
caatagcatgcaacatacgttttgt

SEQ ID NO: 299430 - DNA, 25 bp, Artificial
  Probe
caagcttgctctattgccaatagca

SEQ ID NO: 299431 - DNA, 25 bp, Artificial
  Probe
tttgcccttctgcttctactttttt

SEQ ID NO: 299432 - DNA, 25 bp, Artificial
  Probe
cttttttcagggaagctgctaaaga

SEQ ID NO: 299433 - DNA, 25 bp, Artificial
  Probe
ccttctgcttctacttttttcaggg

SEQ ID NO: 299434 - DNA, 25 bp, Artificial
  Probe
ccattaccaagcttgctctattgcc

SEQ ID NO: 299435 - DNA, 25 bp, Artificial
  Probe
tccacgggtcggaatgcagctctcc

SEQ ID NO: 299436 - DNA, 25 bp, Artificial
  Probe
ttccacgggtcggaatgcagctctc

SEQ ID NO: 299437 - DNA, 25 bp, Artificial
  Probe
aatagcatgcaacatacgttttgtt

SEQ ID NO: 299438 - DNA, 25 bp, Artificial
  Probe
gctctattgccaatagcatgcaaca

SEQ ID NO: 299439 - DNA, 25 bp, Artificial
  Probe
gcttctacttttttcagggaagctg

SEQ ID NO: 299440 - DNA, 25 bp, Artificial
  Probe
aagcttgctctattgccaatagcat

SEQ ID NO: 299441 - DNA, 25 bp, Artificial
  Probe
ctcctcccattaccaagcttgctct

SEQ ID NO: 299442 - DNA, 25 bp, Artificial
  Probe
ctacttttttcagggaagctgctaa

SEQ ID NO: 299443 - DNA, 25 bp, Artificial
  Probe
ggtcggaatgcagctctcctcccat

SEQ ID NO: 299444 - DNA, 25 bp, Artificial
  Probe
gaatgcagctctcctcccattacca

SEQ ID NO: 299445 - DNA, 25 bp, Artificial
  Probe
gcttgctctattgccaatagcatgc

SEQ ID NO: 299446 - DNA, 25 bp, Artificial
  Probe
accaagcttgctctattgccaatag

SEQ ID NO: 299447 - DNA, 25 bp, Artificial
  Probe
ttttttcagggaagctgctaaagaa

SEQ ID NO: 299448 - DNA, 25 bp, Artificial
  Probe
ctattgccaatagcatgcaacatac

SEQ ID NO: 299449 - DNA, 25 bp, Artificial
  Probe
cccttctgcttctacttttttcagg

SEQ ID NO: 299450 - DNA, 25 bp, Artificial
  Probe
ttctgcttctacttttttcagggaa

SEQ ID NO: 299451 - DNA, 25 bp, Artificial
  Probe
gtcggaatgcagctctcctcccatt

SEQ ID NO: 299452 - DNA, 25 bp, Artificial
  Probe
tattgccaatagcatgcaacatacg

SEQ ID NO: 299453 - DNA, 25 bp, Artificial
  Probe
catgcaacatacgttttgtttgccc

SEQ ID NO: 299454 - DNA, 25 bp, Artificial
  Probe
cttctacttttttcagggaagctgc

SEQ ID NO: 299455 - DNA, 25 bp, Artificial
  Probe
tcctcccattaccaagcttgctcta

SEQ ID NO: 299456 - DNA, 25 bp, Artificial
  Probe
ttctacttttttcagggaagctgct

SEQ ID NO: 299457 - DNA, 25 bp, Artificial
  Probe
ctgcttctacttttttcagggaagc

SEQ ID NO: 299458 - DNA, 25 bp, Artificial
  Probe
tctacttttttcagggaagctgcta

SEQ ID NO: 299459 - DNA, 25 bp, Artificial
  Probe
cttctgcttctacttttttcaggga

SEQ ID NO: 299460 - DNA, 25 bp, Artificial
  Probe
ttgcccttctgcttctacttttttc

SEQ ID NO: 299461 - DNA, 25 bp, Artificial
  Probe
atagcatgcaacatacgttttgttt

SEQ ID NO: 299462 - DNA, 25 bp, Artificial
  Probe
ccaatagcatgcaacatacgttttg

SEQ ID NO: 299463 - DNA, 25 bp, Artificial
  Probe
agcttgctctattgccaatagcatg

SEQ ID NO: 299464 - DNA, 25 bp, Artificial
  Probe
ccacgggtcggaatgcagctctcct

SEQ ID NO: 299465 - DNA, 25 bp, Artificial
  Probe
attgccaatagcatgcaacatacgt

SEQ ID NO: 299466 - DNA, 25 bp, Artificial
  Probe
gccaatagcatgcaacatacgtttt

SEQ ID NO: 299467 - DNA, 25 bp, Artificial
  Probe
taccaagcttgctctattgccaata

SEQ ID NO: 299468 - DNA, 25 bp, Artificial
  Probe
tgcttctacttttttcagggaagct

SEQ ID NO: 299469 - DNA, 25 bp, Artificial
  Probe
ttgtttgcccttctgcttctacttt

SEQ ID NO: 299470 - DNA, 25 bp, Artificial
  Probe
ttgccaatagcatgcaacatacgtt

SEQ ID NO: 299471 - DNA, 25 bp, Artificial
  Probe
ccaagcttgctctattgccaatagc

SEQ ID NO: 299472 - DNA, 25 bp, Artificial
  Probe
acgggtcggaatgcagctctcctcc

SEQ ID NO: 299473 - DNA, 25 bp, Artificial
  Probe
tgctctattgccaatagcatgcaac

SEQ ID NO: 299474 - DNA, 25 bp, Artificial
  Probe
tcgccaaggatgtgaagcagttcta

SEQ ID NO: 299475 - DNA, 25 bp, Artificial
  Probe
attctcattgctgtgggagctgtga

SEQ ID NO: 299476 - DNA, 25 bp, Artificial
  Probe
tgccaaggcagtggtgaagaccttc

SEQ ID NO: 299477 - DNA, 25 bp, Artificial
  Probe
aggcccttcagcaggctgtgatgga

SEQ ID NO: 299478 - DNA, 25 bp, Artificial
  Probe
acttgccttgtgatcctgtttgcct

SEQ ID NO: 299479 - DNA, 25 bp, Artificial
  Probe
ttcacttgccttgtgatcctgtttg

SEQ ID NO: 299480 - DNA, 25 bp, Artificial
  Probe
gtaaacaaagaccagatcgccaagg

SEQ ID NO: 299481 - DNA, 25 bp, Artificial
  Probe
tcctggggtgctatggggccatcca

SEQ ID NO: 299482 - DNA, 25 bp, Artificial
  Probe
gggacgttcttcacttgccttgtga

SEQ ID NO: 299483 - DNA, 25 bp, Artificial
  Probe
tgctatggggccatccaggagtccc

SEQ ID NO: 299484 - DNA, 25 bp, Artificial
  Probe
gcagttctacgaccaggcccttcag

SEQ ID NO: 299485 - DNA, 25 bp, Artificial
  Probe
ggccatccaggagtcccagtgcctg

SEQ ID NO: 299486 - DNA, 25 bp, Artificial
  Probe
atgtgggcatctacattctcattgc

SEQ ID NO: 299487 - DNA, 25 bp, Artificial
  Probe
acgttcttcacttgccttgtgatcc

SEQ ID NO: 299488 - DNA, 25 bp, Artificial
  Probe
agttctacgaccaggcccttcagca

SEQ ID NO: 299489 - DNA, 25 bp, Artificial
  Probe
tgcctgctggggacgttcttcactt

SEQ ID NO: 299490 - DNA, 25 bp, Artificial
  Probe
tcttcacttgccttgtgatcctgtt

SEQ ID NO: 299491 - DNA, 25 bp, Artificial
  Probe
catctggggctttgtaaacaaagac

SEQ ID NO: 299492 - DNA, 25 bp, Artificial
  Probe
ccttcagcaggctgtgatggatgat

SEQ ID NO: 299493 - DNA, 25 bp, Artificial
  Probe
ccagatcgccaaggatgtgaagcag

SEQ ID NO: 299494 - DNA, 25 bp, Artificial
  Probe
gaccagatcgccaaggatgtgaagc

SEQ ID NO: 299495 - DNA, 25 bp, Artificial
  Probe
tccaggagtcccagtgcctgctggg

SEQ ID NO: 299496 - DNA, 25 bp, Artificial
  Probe
gtgtccctcaagcagcaactcattc

SEQ ID NO: 299497 - DNA, 25 bp, Artificial
  Probe
atcgccaaggatgtgaagcagttct

SEQ ID NO: 299498 - DNA, 25 bp, Artificial
  Probe
tggggacgttcttcacttgccttgt

SEQ ID NO: 299499 - DNA, 25 bp, Artificial
  Probe
ctcattcactcagcttctgaaggaa

SEQ ID NO: 299500 - DNA, 25 bp, Artificial
  Probe
gtcccagtgcctgctggggacgttc

SEQ ID NO: 299501 - DNA, 25 bp, Artificial
  Probe
acgaccaggcccttcagcaggctgt

SEQ ID NO: 299502 - DNA, 25 bp, Artificial
  Probe
ggcatctggggctttgtaaacaaag

SEQ ID NO: 299503 - DNA, 25 bp, Artificial
  Probe
tgtgtccctcaagcagcaactcatt

SEQ ID NO: 299504 - DNA, 25 bp, Artificial
  Probe
atgtttgtaggcttcctggggtgct

SEQ ID NO: 299505 - DNA, 25 bp, Artificial
  Probe
ctgctggggacgttcttcacttgcc

SEQ ID NO: 299506 - DNA, 25 bp, Artificial
  Probe
attcactcagcttctgaaggaagac

SEQ ID NO: 299507 - DNA, 25 bp, Artificial
  Probe
tttgtaggcttcctggggtgctatg

SEQ ID NO: 299508 - DNA, 25 bp, Artificial
  Probe
cccagtgcctgctggggacgttctt

SEQ ID NO: 299509 - DNA, 25 bp, Artificial
  Probe
aactcattcactcagcttctgaagg

SEQ ID NO: 299510 - DNA, 25 bp, Artificial
  Probe
ttctcattgctgtgggagctgtgat

SEQ ID NO: 299511 - DNA, 25 bp, Artificial
  Probe
ctacattctcattgctgtgggagct

SEQ ID NO: 299512 - DNA, 25 bp, Artificial
  Probe
cttcctggggtgctatggggccatc

SEQ ID NO: 299513 - DNA, 25 bp, Artificial
  Probe
cacttgccttgtgatcctgtttgcc

SEQ ID NO: 299514 - DNA, 25 bp, Artificial
  Probe
atgtgaagcagttctacgaccaggc

SEQ ID NO: 299515 - DNA, 25 bp, Artificial
  Probe
agatcgccaaggatgtgaagcagtt

SEQ ID NO: 299516 - DNA, 25 bp, Artificial
  Probe
cttcagcaggctgtgatggatgatg

SEQ ID NO: 299517 - DNA, 25 bp, Artificial
  Probe
caatgccaaggcagtggtgaagacc

SEQ ID NO: 299518 - DNA, 25 bp, Artificial
  Probe
taaacaaagaccagatcgccaagga

SEQ ID NO: 299519 - DNA, 25 bp, Artificial
  Probe
ctttgtaaacaaagaccagatcgcc

SEQ ID NO: 299520 - DNA, 25 bp, Artificial
  Probe
tttaacaaaacttggcctgactagt

SEQ ID NO: 299521 - DNA, 25 bp, Artificial
  Probe
atctggatgacaaaaccgagacatc

SEQ ID NO: 299522 - DNA, 25 bp, Artificial
  Probe
gtcatggagcccatcctgggccgca

SEQ ID NO: 299523 - DNA, 25 bp, Artificial
  Probe
tcaggttggcctcttgggagcccga

SEQ ID NO: 299524 - DNA, 25 bp, Artificial
  Probe
ctttaacaaaacttggcctgactag

SEQ ID NO: 299525 - DNA, 25 bp, Artificial
  Probe
cctgactagttctaaaaatgtagat

SEQ ID NO: 299526 - DNA, 25 bp, Artificial
  Probe
ctaaggcatccttggggcttgacca

SEQ ID NO: 299527 - DNA, 25 bp, Artificial
  Probe
gactctttcctctctcgtgggctga

SEQ ID NO: 299528 - DNA, 25 bp, Artificial
  Probe
ccagcgtcatggagcccatcctggg

SEQ ID NO: 299529 - DNA, 25 bp, Artificial
  Probe
aatgtagatcccttctctgtcgaca

SEQ ID NO: 299530 - DNA, 25 bp, Artificial
  Probe
tggcctcctggctatgcccagagag

SEQ ID NO: 299531 - DNA, 25 bp, Artificial
  Probe
gcgcgcagggtcagcgacagcttct

SEQ ID NO: 299532 - DNA, 25 bp, Artificial
  Probe
catccttggggcttgaccatcacag

SEQ ID NO: 299533 - DNA, 25 bp, Artificial
  Probe
tggcctcttgggagcccgagtcaca

SEQ ID NO: 299534 - DNA, 25 bp, Artificial
  Probe
ctctcgtgggctgaatctctcatgg

SEQ ID NO: 299535 - DNA, 25 bp, Artificial
  Probe
tccaagtgggccactccttcaggtt

SEQ ID NO: 299536 - DNA, 25 bp, Artificial
  Probe
ttcttccggcccagcgtcatggagc

SEQ ID NO: 299537 - DNA, 25 bp, Artificial
  Probe
agccagctgcgcaagaagagctgag

SEQ ID NO: 299538 - DNA, 25 bp, Artificial
  Probe
atttattgccaaaaagtagtgcgtc

SEQ ID NO: 299539 - DNA, 25 bp, Artificial
  Probe
atgacaaaaccgagacatcagcgcg

SEQ ID NO: 299540 - DNA, 25 bp, Artificial
  Probe
tcacaaccccacgatgttctcgaga

SEQ ID NO: 299541 - DNA, 25 bp, Artificial
  Probe
agcggctgtcgactctttcctctct

SEQ ID NO: 299542 - DNA, 25 bp, Artificial
  Probe
tgtcgactctttcctctctcgtggg

SEQ ID NO: 299543 - DNA, 25 bp, Artificial
  Probe
cgcagtacagccagctgcgcaagaa

SEQ ID NO: 299544 - DNA, 25 bp, Artificial
  Probe
cacgatgttctcgagacccacatca

SEQ ID NO: 299545 - DNA, 25 bp, Artificial
  Probe
gcaccgagcggctgtcgactctttc

SEQ ID NO: 299546 - DNA, 25 bp, Artificial
  Probe
aaaccacacttccaagtgggccact

SEQ ID NO: 299547 - DNA, 25 bp, Artificial
  Probe
aaccgagacatcagcgcgtcctggc

SEQ ID NO: 299548 - DNA, 25 bp, Artificial
  Probe
cacatcatttctaaggcatccttgg

SEQ ID NO: 299549 - DNA, 25 bp, Artificial
  Probe
aagcctgcgcgcagggtcagcgaca

SEQ ID NO: 299550 - DNA, 25 bp, Artificial
  Probe
tgggccgcacgcagtacagccagct

SEQ ID NO: 299551 - DNA, 25 bp, Artificial
  Probe
cacagtcaggttttaaggggcaccg

SEQ ID NO: 299552 - DNA, 25 bp, Artificial
  Probe
ctggctatgcccagagagaagcctg

SEQ ID NO: 299553 - DNA, 25 bp, Artificial
  Probe
gcagtacagccagctgcgcaagaag

SEQ ID NO: 299554 - DNA, 25 bp, Artificial
  Probe
agtagtgcgtcagttgactgttttc

SEQ ID NO: 299555 - DNA, 25 bp, Artificial
  Probe
aggaaacagaaaccacacttccaag

SEQ ID NO: 299556 - DNA, 25 bp, Artificial
  Probe
acttggcctgactagttctaaaaat

SEQ ID NO: 299557 - DNA, 25 bp, Artificial
  Probe
tgcccagagagaagcctgcgcgcag

SEQ ID NO: 299558 - DNA, 25 bp, Artificial
  Probe
ctcgagacccacatcatttctaagg

SEQ ID NO: 299559 - DNA, 25 bp, Artificial
  Probe
gagacccacatcatttctaaggcat

SEQ ID NO: 299560 - DNA, 25 bp, Artificial
  Probe
tattgccaaaaagtagtgcgtcagt

SEQ ID NO: 299561 - DNA, 25 bp, Artificial
  Probe
gggccgcacgcagtacagccagctg

SEQ ID NO: 299562 - DNA, 25 bp, Artificial
  Probe
gaagagctgagtagcctgcgcccct

SEQ ID NO: 299563 - DNA, 25 bp, Artificial
  Probe
gctgcgcaagaagagctgagtagcc

SEQ ID NO: 299564 - DNA, 25 bp, Artificial
  Probe
gggtcagcgacagcttcttccggcc

SEQ ID NO: 299565 - DNA, 25 bp, Artificial
  Probe
gggctgaatctctcatggctttttt

SEQ ID NO: 299566 - DNA, 25 bp, Artificial
  Probe
agtagatggcttcactgatccctcc

SEQ ID NO: 299567 - DNA, 25 bp, Artificial
  Probe
gctatggctggcaccctgccactgt

SEQ ID NO: 299568 - DNA, 25 bp, Artificial
  Probe
atccgctgttccagcgtgtcttaga

SEQ ID NO: 299569 - DNA, 25 bp, Artificial
  Probe
tgtctaccagttgactcgcatgtgc

SEQ ID NO: 299570 - DNA, 25 bp, Artificial
  Probe
tgggcccttgcagtggcttgacaag

SEQ ID NO: 299571 - DNA, 25 bp, Artificial
  Probe
gggctttgaggctgtctaccagttg

SEQ ID NO: 299572 - DNA, 25 bp, Artificial
  Probe
agatggcttcactgatccctccaat

SEQ ID NO: 299573 - DNA, 25 bp, Artificial
  Probe
ctgaaccagcgagttggggagacat

SEQ ID NO: 299574 - DNA, 25 bp, Artificial
  Probe
agcgcttctgtctgggcctgctgtc

SEQ ID NO: 299575 - DNA, 25 bp, Artificial
  Probe
ctttgaggctgtctaccagttgact

SEQ ID NO: 299576 - DNA, 25 bp, Artificial
  Probe
gcttcacagccgtccatgacagtag

SEQ ID NO: 299577 - DNA, 25 bp, Artificial
  Probe
cagcgtgtcttagagacactgggag

SEQ ID NO: 299578 - DNA, 25 bp, Artificial
  Probe
agttggggagacattccacgcttca

SEQ ID NO: 299579 - DNA, 25 bp, Artificial
  Probe
agagtgcctcagtgacagtgctatt

SEQ ID NO: 299580 - DNA, 25 bp, Artificial
  Probe
caccatccgcatgagcttcgtcaaa

SEQ ID NO: 299581 - DNA, 25 bp, Artificial
  Probe
cagccgtggagcttacaaggcggca

SEQ ID NO: 299582 - DNA, 25 bp, Artificial
  Probe
gtgctattttcgtccagtctcccaa

SEQ ID NO: 299583 - DNA, 25 bp, Artificial
  Probe
agccgagtacaggagacagacagtg

SEQ ID NO: 299584 - DNA, 25 bp, Artificial
  Probe
ttgactcgcatgtgcaccatccgca

SEQ ID NO: 299585 - DNA, 25 bp, Artificial
  Probe
ttcacagccgtccatgacagtagat

SEQ ID NO: 299586 - DNA, 25 bp, Artificial
  Probe
gctacacctgaatgggcccttgcag

SEQ ID NO: 299587 - DNA, 25 bp, Artificial
  Probe
ttgcagtggcttgacaaggtcctca

SEQ ID NO: 299588 - DNA, 25 bp, Artificial
  Probe
gtggagcttacaaggcggcacattg

SEQ ID NO: 299589 - DNA, 25 bp, Artificial
  Probe
tgttccagcgtgtcttagagacact

SEQ ID NO: 299590 - DNA, 25 bp, Artificial
  Probe
tccatgacagtagatggcttcactg

SEQ ID NO: 299591 - DNA, 25 bp, Artificial
  Probe
gttgactcgcatgtgcaccatccgc

SEQ ID NO: 299592 - DNA, 25 bp, Artificial
  Probe
tgtgcggctctactacattggaggg

SEQ ID NO: 299593 - DNA, 25 bp, Artificial
  Probe
catccgctgttccagcgtgtcttag

SEQ ID NO: 299594 - DNA, 25 bp, Artificial
  Probe
aattcagagcgcttctgtctgggcc

SEQ ID NO: 299595 - DNA, 25 bp, Artificial
  Probe
aatgttaaccggaatgcagccgtgg

SEQ ID NO: 299596 - DNA, 25 bp, Artificial
  Probe
cctcagtgacagtgctattttcgtc

SEQ ID NO: 299597 - DNA, 25 bp, Artificial
  Probe
gaaccagcgagttggggagacattc

SEQ ID NO: 299598 - DNA, 25 bp, Artificial
  Probe
cctccaattcagagcgcttctgtct

SEQ ID NO: 299599 - DNA, 25 bp, Artificial
  Probe
taaccggaatgcagccgtggagctt

SEQ ID NO: 299600 - DNA, 25 bp, Artificial
  Probe
gttccagcgtgtcttagagacactg

SEQ ID NO: 299601 - DNA, 25 bp, Artificial
  Probe
ccgtccatgacagtagatggcttca

SEQ ID NO: 299602 - DNA, 25 bp, Artificial
  Probe
gggtgtgcggctctactacattgga

SEQ ID NO: 299603 - DNA, 25 bp, Artificial
  Probe
actgatccctccaattcagagcgct

SEQ ID NO: 299604 - DNA, 25 bp, Artificial
  Probe
cttgcagtggcttgacaaggtcctc

SEQ ID NO: 299605 - DNA, 25 bp, Artificial
  Probe
acagtagatggcttcactgatccct

SEQ ID NO: 299606 - DNA, 25 bp, Artificial
  Probe
catccgcatgagcttcgtcaaaggc

SEQ ID NO: 299607 - DNA, 25 bp, Artificial
  Probe
gatggcttcactgatccctccaatt

SEQ ID NO: 299608 - DNA, 25 bp, Artificial
  Probe
ctacgagctgaaccagcgagttggg

SEQ ID NO: 299609 - DNA, 25 bp, Artificial
  Probe
tcgagctacacctgaatgggccctt

SEQ ID NO: 299610 - DNA, 25 bp, Artificial
  Probe
atgcagccgtggagcttacaaggcg

SEQ ID NO: 299611 - DNA, 25 bp, Artificial
  Probe
ggaatgcagccgtggagcttacaag

SEQ ID NO: 299612 - DNA, 25 bp, Artificial
  Probe
cttgcaactgttctgttcattttgg

SEQ ID NO: 299613 - DNA, 25 bp, Artificial
  Probe
aagagcatgcgcacaatgctgcaac

SEQ ID NO: 299614 - DNA, 25 bp, Artificial
  Probe
agctaggccaaaccattctgggctc

SEQ ID NO: 299615 - DNA, 25 bp, Artificial
  Probe
agattggggatctccgcaagtagag

SEQ ID NO: 299616 - DNA, 25 bp, Artificial
  Probe
caactgttctgttcattttggtctc

SEQ ID NO: 299617 - DNA, 25 bp, Artificial
  Probe
tgtggtgctgccaacaggcggtaac

SEQ ID NO: 299618 - DNA, 25 bp, Artificial
  Probe
agatggcacagatacaggggatgct

SEQ ID NO: 299619 - DNA, 25 bp, Artificial
  Probe
tcacgagatggcacagatacagggg

SEQ ID NO: 299620 - DNA, 25 bp, Artificial
  Probe
cttcagccacttgtgaatgtgccca

SEQ ID NO: 299621 - DNA, 25 bp, Artificial
  Probe
caacaggcggtaacggcacatcacc

SEQ ID NO: 299622 - DNA, 25 bp, Artificial
  Probe
gggatgctccaaacaccagaggtgg

SEQ ID NO: 299623 - DNA, 25 bp, Artificial
  Probe
tggcacagatacaggggatgctcca

SEQ ID NO: 299624 - DNA, 25 bp, Artificial
  Probe
tccccaggccggaagcttgaagagc

SEQ ID NO: 299625 - DNA, 25 bp, Artificial
  Probe
cgcaacactgtcacagcactggggg

SEQ ID NO: 299626 - DNA, 25 bp, Artificial
  Probe
ggcggtaacggcacatcaccagcgc

SEQ ID NO: 299627 - DNA, 25 bp, Artificial
  Probe
caggccggaagcttgaagagcatgc

SEQ ID NO: 299628 - DNA, 25 bp, Artificial
  Probe
cagatacaggggatgctccaaacac

SEQ ID NO: 299629 - DNA, 25 bp, Artificial
  Probe
gccaacaggcggtaacggcacatca

SEQ ID NO: 299630 - DNA, 25 bp, Artificial
  Probe
gcttgaagagcatgcgcacaatgct

SEQ ID NO: 299631 - DNA, 25 bp, Artificial
  Probe
tacccctgagggttagtgccaaggg

SEQ ID NO: 299632 - DNA, 25 bp, Artificial
  Probe
tagctcccggcacagtggcttcagc

SEQ ID NO: 299633 - DNA, 25 bp, Artificial
  Probe
ctccgcaagtagagcaaagttctgg

SEQ ID NO: 299634 - DNA, 25 bp, Artificial
  Probe
acctctgtcgccacagtagactctt

SEQ ID NO: 299635 - DNA, 25 bp, Artificial
  Probe
ctaagattggggatctccgcaagta

SEQ ID NO: 299636 - DNA, 25 bp, Artificial
  Probe
ggcatagagtctcaaactcagtgtg

SEQ ID NO: 299637 - DNA, 25 bp, Artificial
  Probe
agcaaagttctggattcacgtccca

SEQ ID NO: 299638 - DNA, 25 bp, Artificial
  Probe
aaagttctggattcacgtcccacct

SEQ ID NO: 299639 - DNA, 25 bp, Artificial
  Probe
acgagtacagttcgaacgttggtca

SEQ ID NO: 299640 - DNA, 25 bp, Artificial
  Probe
gtagctcccggcacagtggcttcag

SEQ ID NO: 299641 - DNA, 25 bp, Artificial
  Probe
ttagttctaagattggggatctccg

SEQ ID NO: 299642 - DNA, 25 bp, Artificial
  Probe
catctgtggtgctgccaacaggcgg

SEQ ID NO: 299643 - DNA, 25 bp, Artificial
  Probe
ggggatctccgcaagtagagcaaag

SEQ ID NO: 299644 - DNA, 25 bp, Artificial
  Probe
ctgtgggtccgcaacactgtcacag

SEQ ID NO: 299645 - DNA, 25 bp, Artificial
  Probe
aagcttgaagagcatgcgcacaatg

SEQ ID NO: 299646 - DNA, 25 bp, Artificial
  Probe
ggtccccaatacatctgtggtgctg

SEQ ID NO: 299647 - DNA, 25 bp, Artificial
  Probe
accaagagtgcctgggaggccagtt

SEQ ID NO: 299648 - DNA, 25 bp, Artificial
  Probe
caccaccggggacgagtacagttcg

SEQ ID NO: 299649 - DNA, 25 bp, Artificial
  Probe
agagtgcctgggaggccagttcact

SEQ ID NO: 299650 - DNA, 25 bp, Artificial
  Probe
ttggtcacgagatggcacagataca

SEQ ID NO: 299651 - DNA, 25 bp, Artificial
  Probe
gcatcctgtgggtccgcaacactgt

SEQ ID NO: 299652 - DNA, 25 bp, Artificial
  Probe
cctaaccaagagtgcctgggaggcc

SEQ ID NO: 299653 - DNA, 25 bp, Artificial
  Probe
ggtgctgcatcctgtgggtccgcaa

SEQ ID NO: 299654 - DNA, 25 bp, Artificial
  Probe
gtggcttcagccacttgtgaatgtg

SEQ ID NO: 299655 - DNA, 25 bp, Artificial
  Probe
gcaccaccggggacgagtacagttc

SEQ ID NO: 299656 - DNA, 25 bp, Artificial
  Probe
gtggtccaacggagctgagcctaac

SEQ ID NO: 299657 - DNA, 25 bp, Artificial
  Probe
cccagggtccccaatacatctgtgg

SEQ ID NO: 299658 - DNA, 25 bp, Artificial
  Probe
gtccatggaggctgtaggctgttcc

SEQ ID NO: 299659 - DNA, 25 bp, Artificial
  Probe
cctcagcatatggtgctcctcagga

SEQ ID NO: 299660 - DNA, 25 bp, Artificial
  Probe
cctgctctgggacctcaggagacaa

SEQ ID NO: 299661 - DNA, 25 bp, Artificial
  Probe
ccaagagaccatctggctgccacga

SEQ ID NO: 299662 - DNA, 25 bp, Artificial
  Probe
cgcctcagcatatggtgctcctcag

SEQ ID NO: 299663 - DNA, 25 bp, Artificial
  Probe
gcatatggtgctcctcaggagtcca

SEQ ID NO: 299664 - DNA, 25 bp, Artificial
  Probe
aggccccaagagaccatctggctgc

SEQ ID NO: 299665 - DNA, 25 bp, Artificial
  Probe
ctgggacccctattctgcctgacgt

SEQ ID NO: 299666 - DNA, 25 bp, Artificial
  Probe
cgagggcttgttctgcctgctctgg

SEQ ID NO: 299667 - DNA, 25 bp, Artificial
  Probe
aggctgttccttcagccctgggacc

SEQ ID NO: 299668 - DNA, 25 bp, Artificial
  Probe
catggaggctgtaggctgttccttc

SEQ ID NO: 299669 - DNA, 25 bp, Artificial
  Probe
ggacccctattctgcctgacgtgag

SEQ ID NO: 299670 - DNA, 25 bp, Artificial
  Probe
tggtgctcctcaggagtccatggag

SEQ ID NO: 299671 - DNA, 25 bp, Artificial
  Probe
gtgctcctcaggagtccatggaggc

SEQ ID NO: 299672 - DNA, 25 bp, Artificial
  Probe
gcccttgtccacagggcctttttgt

SEQ ID NO: 299673 - DNA, 25 bp, Artificial
  Probe
tgccacgagggcttgttctgcctgc

SEQ ID NO: 299674 - DNA, 25 bp, Artificial
  Probe
tctgggacctcaggagacaattctg

SEQ ID NO: 299675 - DNA, 25 bp, Artificial
  Probe
ggagaccctgcctgatcctttttcc

SEQ ID NO: 299676 - DNA, 25 bp, Artificial
  Probe
catctggctgccacgagggcttgtt

SEQ ID NO: 299677 - DNA, 25 bp, Artificial
  Probe
tgcccttgtccacagggcctttttg

SEQ ID NO: 299678 - DNA, 25 bp, Artificial
  Probe
ctggctgccacgagggcttgttctg

SEQ ID NO: 299679 - DNA, 25 bp, Artificial
  Probe
aggcggagaccctgcctgatccttt

SEQ ID NO: 299680 - DNA, 25 bp, Artificial
  Probe
tgaggaccctatcctcctcagagga

SEQ ID NO: 299681 - DNA, 25 bp, Artificial
  Probe
gaggctgtaggctgttccttcagcc

SEQ ID NO: 299682 - DNA, 25 bp, Artificial
  Probe
gcctgctctgggacctcaggagaca

SEQ ID NO: 299683 - DNA, 25 bp, Artificial
  Probe
ttgaagcaggagaccgcctcagcat

SEQ ID NO: 299684 - DNA, 25 bp, Artificial
  Probe
gaccgcctcagcatatggtgctcct

SEQ ID NO: 299685 - DNA, 25 bp, Artificial
  Probe
cctcaggagacaattctgccatcat

SEQ ID NO: 299686 - DNA, 25 bp, Artificial
  Probe
ctattctgcctgacgtgaggaccct

SEQ ID NO: 299687 - DNA, 25 bp, Artificial
  Probe
acgtgaggaccctatcctcctcaga

SEQ ID NO: 299688 - DNA, 25 bp, Artificial
  Probe
tctgcccttgtccacagggcctttt

SEQ ID NO: 299689 - DNA, 25 bp, Artificial
  Probe
tatggggagccaggaactgaagtcc

SEQ ID NO: 299690 - DNA, 25 bp, Artificial
  Probe
tgcctgacgtgaggaccctatcctc

SEQ ID NO: 299691 - DNA, 25 bp, Artificial
  Probe
ttctgcctgctctgggacctcagga

SEQ ID NO: 299692 - DNA, 25 bp, Artificial
  Probe
ctgcctgacgtgaggaccctatcct

SEQ ID NO: 299693 - DNA, 25 bp, Artificial
  Probe
ccacgagggcttgttctgcctgctc

SEQ ID NO: 299694 - DNA, 25 bp, Artificial
  Probe
tgctcctcaggagtccatggaggct

SEQ ID NO: 299695 - DNA, 25 bp, Artificial
  Probe
caagagaccatctggctgccacgag

SEQ ID NO: 299696 - DNA, 25 bp, Artificial
  Probe
ccatggaggctgtaggctgttcctt

SEQ ID NO: 299697 - DNA, 25 bp, Artificial
  Probe
cctcaggagtccatggaggctgtag

SEQ ID NO: 299698 - DNA, 25 bp, Artificial
  Probe
ccctattctgcctgacgtgaggacc

SEQ ID NO: 299699 - DNA, 25 bp, Artificial
  Probe
aggagaccgcctcagcatatggtgc

SEQ ID NO: 299700 - DNA, 25 bp, Artificial
  Probe
tggaggccccaagagaccatctggc

SEQ ID NO: 299701 - DNA, 25 bp, Artificial
  Probe
ggaggccccaagagaccatctggct

SEQ ID NO: 299702 - DNA, 25 bp, Artificial
  Probe
caggagaccgcctcagcatatggtg

SEQ ID NO: 299703 - DNA, 25 bp, Artificial
  Probe
aggagacaattctgccatcatctct

SEQ ID NO: 299704 - DNA, 25 bp, Artificial
  Probe
gatctaccgaggtggccacactgat

SEQ ID NO: 299705 - DNA, 25 bp, Artificial
  Probe
gttacagctggcagcagtattaacg

SEQ ID NO: 299706 - DNA, 25 bp, Artificial
  Probe
cttttttgctaggagacgtctaaga

SEQ ID NO: 299707 - DNA, 25 bp, Artificial
  Probe
tatcgatggtaactgcatagcggcc

SEQ ID NO: 299708 - DNA, 25 bp, Artificial
  Probe
gcatagcggcccttgctgtgttctt

SEQ ID NO: 299709 - DNA, 25 bp, Artificial
  Probe
gatggtaactgcatagcggcccttg

SEQ ID NO: 299710 - DNA, 25 bp, Artificial
  Probe
gagtataacaactgtgcatgccttt

SEQ ID NO: 299711 - DNA, 25 bp, Artificial
  Probe
ccttttttgctaggagacgtctaag

SEQ ID NO: 299712 - DNA, 25 bp, Artificial
  Probe
gactctgttccaccttgtcacgtgt

SEQ ID NO: 299713 - DNA, 25 bp, Artificial
  Probe
cttgtcacgtgtacagactttaatc

SEQ ID NO: 299714 - DNA, 25 bp, Artificial
  Probe
agacttgcattctgggactctgttc

SEQ ID NO: 299715 - DNA, 25 bp, Artificial
  Probe
catgcctttcctttgtaaatgtgct

SEQ ID NO: 299716 - DNA, 25 bp, Artificial
  Probe
cagatctaccgaggtggccacactg

SEQ ID NO: 299717 - DNA, 25 bp, Artificial
  Probe
caaatccctgcttgctgtcattgtc

SEQ ID NO: 299718 - DNA, 25 bp, Artificial
  Probe
tgctacagatctaccgaggtggcca

SEQ ID NO: 299719 - DNA, 25 bp, Artificial
  Probe
gccccttgttttccatctttgtggc

SEQ ID NO: 299720 - DNA, 25 bp, Artificial
  Probe
acgtgtacagactttaatctgttac

SEQ ID NO: 299721 - DNA, 25 bp, Artificial
  Probe
acagctggcagcagtattaacgcgg

SEQ ID NO: 299722 - DNA, 25 bp, Artificial
  Probe
actgtgcatgcctttcctttgtaaa

SEQ ID NO: 299723 - DNA, 25 bp, Artificial
  Probe
cccttgttttccatctttgtggcct

SEQ ID NO: 299724 - DNA, 25 bp, Artificial
  Probe
gtacagactttaatctgttacagct

SEQ ID NO: 299725 - DNA, 25 bp, Artificial
  Probe
tccaccttgtcacgtgtacagactt

SEQ ID NO: 299726 - DNA, 25 bp, Artificial
  Probe
tcgatggtaactgcatagcggccct

SEQ ID NO: 299727 - DNA, 25 bp, Artificial
  Probe
tgcattctgggactctgttccacct

SEQ ID NO: 299728 - DNA, 25 bp, Artificial
  Probe
ttgtcactgtatcgatggtaactgc

SEQ ID NO: 299729 - DNA, 25 bp, Artificial
  Probe
atagcggcccttgctgtgttctttt

SEQ ID NO: 299730 - DNA, 25 bp, Artificial
  Probe
atgcctttcctttgtaaatgtgctg

SEQ ID NO: 299731 - DNA, 25 bp, Artificial
  Probe
acagatctaccgaggtggccacact

SEQ ID NO: 299732 - DNA, 25 bp, Artificial
  Probe
atctgttacagctggcagcagtatt

SEQ ID NO: 299733 - DNA, 25 bp, Artificial
  Probe
tctttttctaagacttgcattctgg

SEQ ID NO: 299734 - DNA, 25 bp, Artificial
  Probe
ggtggccccttgttttccatctttg

SEQ ID NO: 299735 - DNA, 25 bp, Artificial
  Probe
accgaggtggccacactgatttgcc

SEQ ID NO: 299736 - DNA, 25 bp, Artificial
  Probe
aagagcccaggattgctcctgtttg

SEQ ID NO: 299737 - DNA, 25 bp, Artificial
  Probe
taaagagcccaggattgctcctgtt

SEQ ID NO: 299738 - DNA, 25 bp, Artificial
  Probe
ttacagctggcagcagtattaacgc

SEQ ID NO: 299739 - DNA, 25 bp, Artificial
  Probe
gtataacaactgtgcatgcctttcc

SEQ ID NO: 299740 - DNA, 25 bp, Artificial
  Probe
ttgcattctgggactctgttccacc

SEQ ID NO: 299741 - DNA, 25 bp, Artificial
  Probe
aggtggccacactgatttgcctgct

SEQ ID NO: 299742 - DNA, 25 bp, Artificial
  Probe
tgcggtggccccttgttttccatct

SEQ ID NO: 299743 - DNA, 25 bp, Artificial
  Probe
atctttgtggccttttttgctagga

SEQ ID NO: 299744 - DNA, 25 bp, Artificial
  Probe
aaatccctgcttgctgtcattgtca

SEQ ID NO: 299745 - DNA, 25 bp, Artificial
  Probe
tgcatgcctttcctttgtaaatgtg

SEQ ID NO: 299746 - DNA, 25 bp, Artificial
  Probe
gtggccacactgatttgcctgctcg

SEQ ID NO: 299747 - DNA, 25 bp, Artificial
  Probe
agtaaagagcccaggattgctcctg

SEQ ID NO: 299748 - DNA, 25 bp, Artificial
  Probe
taagacttgcattctgggactctgt

SEQ ID NO: 299749 - DNA, 25 bp, Artificial
  Probe
tggtaactgcatagcggcccttgct

SEQ ID NO: 299750 - DNA, 25 bp, Artificial
  Probe
ctgtctccaggttctgtgttcccag

SEQ ID NO: 299751 - DNA, 25 bp, Artificial
  Probe
ctaggatccaccttgaacttcgcta

SEQ ID NO: 299752 - DNA, 25 bp, Artificial
  Probe
gttcccagtctctgtgtctctggtt

SEQ ID NO: 299753 - DNA, 25 bp, Artificial
  Probe
cccgtgcttgactgccctgggagga

SEQ ID NO: 299754 - DNA, 25 bp, Artificial
  Probe
gaccccatgaatgacttttgtctcc

SEQ ID NO: 299755 - DNA, 25 bp, Artificial
  Probe
ctacctcactcttaggacttcaagg

SEQ ID NO: 299756 - DNA, 25 bp, Artificial
  Probe
cactcttaggacttcaaggtttggg

SEQ ID NO: 299757 - DNA, 25 bp, Artificial
  Probe
tcaaaccattggaatgggtcccttt

SEQ ID NO: 299758 - DNA, 25 bp, Artificial
  Probe
tgtgttcccagtctctgtgtctctg

SEQ ID NO: 299759 - DNA, 25 bp, Artificial
  Probe
cctgcttattatgtttgtgctggat

SEQ ID NO: 299760 - DNA, 25 bp, Artificial
  Probe
gaccaagtttgaggttttgtccctg

SEQ ID NO: 299761 - DNA, 25 bp, Artificial
  Probe
accctgcttattatgtttgtgctgg

SEQ ID NO: 299762 - DNA, 25 bp, Artificial
  Probe
ggatccaccttgaacttcgctacta

SEQ ID NO: 299763 - DNA, 25 bp, Artificial
  Probe
ccctgcttattatgtttgtgctgga

SEQ ID NO: 299764 - DNA, 25 bp, Artificial
  Probe
caaatcactctgtctccaggttctg

SEQ ID NO: 299765 - DNA, 25 bp, Artificial
  Probe
aggttttgtccctggctcctcacta

SEQ ID NO: 299766 - DNA, 25 bp, Artificial
  Probe
accaccctgcttattatgtttgtgc

SEQ ID NO: 299767 - DNA, 25 bp, Artificial
  Probe
gtttgaggttttgtccctggctcct

SEQ ID NO: 299768 - DNA, 25 bp, Artificial
  Probe
agaagtcaaaccattggaatgggtc

SEQ ID NO: 299769 - DNA, 25 bp, Artificial
  Probe
tactgctttcctgaccccatgaatg

SEQ ID NO: 299770 - DNA, 25 bp, Artificial
  Probe
ggaccatctctcacaataggcacaa

SEQ ID NO: 299771 - DNA, 25 bp, Artificial
  Probe
ctgtgtctctggttagttggaaagc

SEQ ID NO: 299772 - DNA, 25 bp, Artificial
  Probe
tggaccatctctcacaataggcaca

SEQ ID NO: 299773 - DNA, 25 bp, Artificial
  Probe
ctctgtgtctctggttagttggaaa

SEQ ID NO: 299774 - DNA, 25 bp, Artificial
  Probe
caggttctgtgttcccagtctctgt

SEQ ID NO: 299775 - DNA, 25 bp, Artificial
  Probe
ttccagggttcctgggaagaagtca

SEQ ID NO: 299776 - DNA, 25 bp, Artificial
  Probe
gtcaaaccattggaatgggtccctt

SEQ ID NO: 299777 - DNA, 25 bp, Artificial
  Probe
tctctctctttctgagagacgttgt

SEQ ID NO: 299778 - DNA, 25 bp, Artificial
  Probe
ttgaacttcgctactacctcagccg

SEQ ID NO: 299779 - DNA, 25 bp, Artificial
  Probe
agtcaaaccattggaatgggtccct

SEQ ID NO: 299780 - DNA, 25 bp, Artificial
  Probe
ttcctgaccccatgaatgacttttg

SEQ ID NO: 299781 - DNA, 25 bp, Artificial
  Probe
tttgaggttttgtccctggctcctc

SEQ ID NO: 299782 - DNA, 25 bp, Artificial
  Probe
ctctttctgagagacgttgtctagg

SEQ ID NO: 299783 - DNA, 25 bp, Artificial
  Probe
gaagtcaaaccattggaatgggtcc

SEQ ID NO: 299784 - DNA, 25 bp, Artificial
  Probe
agagacgttgtctaggatccacctt

SEQ ID NO: 299785 - DNA, 25 bp, Artificial
  Probe
tctccaggttctgtgttcccagtct

SEQ ID NO: 299786 - DNA, 25 bp, Artificial
  Probe
ggatatcaggccacccgtgcttgac

SEQ ID NO: 299787 - DNA, 25 bp, Artificial
  Probe
atcttggaccatctctcacaatagg

SEQ ID NO: 299788 - DNA, 25 bp, Artificial
  Probe
cacccgtgcttgactgccctgggag

SEQ ID NO: 299789 - DNA, 25 bp, Artificial
  Probe
ctcttaggacttcaaggtttgggag

SEQ ID NO: 299790 - DNA, 25 bp, Artificial
  Probe
tccaggttctgtgttcccagtctct

SEQ ID NO: 299791 - DNA, 25 bp, Artificial
  Probe
actgctttcctgaccccatgaatga

SEQ ID NO: 299792 - DNA, 25 bp, Artificial
  Probe
tctgagagacgttgtctaggatcca

SEQ ID NO: 299793 - DNA, 25 bp, Artificial
  Probe
cctgaccccatgaatgacttttgtc

SEQ ID NO: 299794 - DNA, 25 bp, Artificial
  Probe
ctgagagacgttgtctaggatccac

SEQ ID NO: 299795 - DNA, 25 bp, Artificial
  Probe
cattggaatgggtcccttttccact

SEQ ID NO: 299796 - DNA, 25 bp, Artificial
  Probe
caactctcccgactgtctggactat

SEQ ID NO: 299797 - DNA, 25 bp, Artificial
  Probe
ccgactgtctggactataaggacca

SEQ ID NO: 299798 - DNA, 25 bp, Artificial
  Probe
gtggtccctatcatgttgctgctgc

SEQ ID NO: 299799 - DNA, 25 bp, Artificial
  Probe
tccgtggtccctatcatgttgctgc

SEQ ID NO: 299800 - DNA, 25 bp, Artificial
  Probe
gaagaaacgcaactaccttcgccct

SEQ ID NO: 299801 - DNA, 25 bp, Artificial
  Probe
cccgactgtctggactataaggacc

SEQ ID NO: 299802 - DNA, 25 bp, Artificial
  Probe
actataaggaccaagcctcatggcg

SEQ ID NO: 299803 - DNA, 25 bp, Artificial
  Probe
gttccaggtcttgtgagcccaggag

SEQ ID NO: 299804 - DNA, 25 bp, Artificial
  Probe
cctcatggcggttccaggtcttgtg

SEQ ID NO: 299805 - DNA, 25 bp, Artificial
  Probe
ctgtctggactataaggaccaagcc

SEQ ID NO: 299806 - DNA, 25 bp, Artificial
  Probe
actcaacttcaactctcccgactgt

SEQ ID NO: 299807 - DNA, 25 bp, Artificial
  Probe
ctcatggcggttccaggtcttgtga

SEQ ID NO: 299808 - DNA, 25 bp, Artificial
  Probe
gaccaagcctcatggcggttccagg

SEQ ID NO: 299809 - DNA, 25 bp, Artificial
  Probe
actctcccgactgtctggactataa

SEQ ID NO: 299810 - DNA, 25 bp, Artificial
  Probe
gccgccgctgcttcctctgcctgga

SEQ ID NO: 299811 - DNA, 25 bp, Artificial
  Probe
ggaccaagcctcatggcggttccag

SEQ ID NO: 299812 - DNA, 25 bp, Artificial
  Probe
tcccgactgtctggactataaggac

SEQ ID NO: 299813 - DNA, 25 bp, Artificial
  Probe
gactataaggaccaagcctcatggc

SEQ ID NO: 299814 - DNA, 25 bp, Artificial
  Probe
ggtccctatcatgttgctgctgctg

SEQ ID NO: 299815 - DNA, 25 bp, Artificial
  Probe
ctctcccgactgtctggactataag

SEQ ID NO: 299816 - DNA, 25 bp, Artificial
  Probe
aggaccaagcctcatggcggttcca

SEQ ID NO: 299817 - DNA, 25 bp, Artificial
  Probe
agcctcatggcggttccaggtcttg

SEQ ID NO: 299818 - DNA, 25 bp, Artificial
  Probe
aacgcaactaccttcgccctccgtg

SEQ ID NO: 299819 - DNA, 25 bp, Artificial
  Probe
actgtctggactataaggaccaagc

SEQ ID NO: 299820 - DNA, 25 bp, Artificial
  Probe
tataaggaccaagcctcatggcggt

SEQ ID NO: 299821 - DNA, 25 bp, Artificial
  Probe
tccaggtcttgtgagcccaggaggg

SEQ ID NO: 299822 - DNA, 25 bp, Artificial
  Probe
tacaaggagcccgccgccgccgctg

SEQ ID NO: 299823 - DNA, 25 bp, Artificial
  Probe
gactgcttggattacaaggagcccg

SEQ ID NO: 299824 - DNA, 25 bp, Artificial
  Probe
cggttccaggtcttgtgagcccagg

SEQ ID NO: 299825 - DNA, 25 bp, Artificial
  Probe
ctccgtggtccctatcatgttgctg

SEQ ID NO: 299826 - DNA, 25 bp, Artificial
  Probe
gaaacgcaactaccttcgccctccg

SEQ ID NO: 299827 - DNA, 25 bp, Artificial
  Probe
ggttccaggtcttgtgagcccagga

SEQ ID NO: 299828 - DNA, 25 bp, Artificial
  Probe
aactctcccgactgtctggactata

SEQ ID NO: 299829 - DNA, 25 bp, Artificial
  Probe
catggcggttccaggtcttgtgagc

SEQ ID NO: 299830 - DNA, 25 bp, Artificial
  Probe
ctataaggaccaagcctcatggcgg

SEQ ID NO: 299831 - DNA, 25 bp, Artificial
  Probe
gactgtctggactataaggaccaag

SEQ ID NO: 299832 - DNA, 25 bp, Artificial
  Probe
tggtccctatcatgttgctgctgct

SEQ ID NO: 299833 - DNA, 25 bp, Artificial
  Probe
actgcttggattacaaggagcccgc

SEQ ID NO: 299834 - DNA, 25 bp, Artificial
  Probe
cgactgtctggactataaggaccaa

SEQ ID NO: 299835 - DNA, 25 bp, Artificial
  Probe
gcttcctctgcctggaaactcaact

SEQ ID NO: 299836 - DNA, 25 bp, Artificial
  Probe
agcccaggagggaaaggaagtggag

SEQ ID NO: 299837 - DNA, 25 bp, Artificial
  Probe
ttccaggtcttgtgagcccaggagg

SEQ ID NO: 299838 - DNA, 25 bp, Artificial
  Probe
gcctcatggcggttccaggtcttgt

SEQ ID NO: 299839 - DNA, 25 bp, Artificial
  Probe
ccgtggtccctatcatgttgctgct

SEQ ID NO: 299840 - DNA, 25 bp, Artificial
  Probe
aaggaccaagcctcatggcggttcc

SEQ ID NO: 299841 - DNA, 25 bp, Artificial
  Probe
cgtggtccctatcatgttgctgctg

SEQ ID NO: 299842 - DNA, 25 bp, Artificial
  Probe
gaatacattgtacactggcaaaccc

SEQ ID NO: 299843 - DNA, 25 bp, Artificial
  Probe
gtacctacctacaatgaaaacatgg

SEQ ID NO: 299844 - DNA, 25 bp, Artificial
  Probe
gagccttcctggaccatcctgttac

SEQ ID NO: 299845 - DNA, 25 bp, Artificial
  Probe
gaccacgtccaaaaaatgttctcag

SEQ ID NO: 299846 - DNA, 25 bp, Artificial
  Probe
gattcccgtggattaattctattta

SEQ ID NO: 299847 - DNA, 25 bp, Artificial
  Probe
ttactctagcccagtctggccgtat

SEQ ID NO: 299848 - DNA, 25 bp, Artificial
  Probe
tcgaggttctatttttctaatagtc

SEQ ID NO: 299849 - DNA, 25 bp, Artificial
  Probe
aaagcccaggagagatgaaaagacc

SEQ ID NO: 299850 - DNA, 25 bp, Artificial
  Probe
ggtcacagagggtcatgatactaat

SEQ ID NO: 299851 - DNA, 25 bp, Artificial
  Probe
tttattgacaagtgttacctttgcg

SEQ ID NO: 299852 - DNA, 25 bp, Artificial
  Probe
aacatggctggctctcgccggggcc

SEQ ID NO: 299853 - DNA, 25 bp, Artificial
  Probe
aagggtcttgggacatggtgaccaa

SEQ ID NO: 299854 - DNA, 25 bp, Artificial
  Probe
ctccattgaactggaagaatatggt

SEQ ID NO: 299855 - DNA, 25 bp, Artificial
  Probe
acatgtgctgaatggctagcaaaaa

SEQ ID NO: 299856 - DNA, 25 bp, Artificial
  Probe
tggtttattagcaaacctgagcagt

SEQ ID NO: 299857 - DNA, 25 bp, Artificial
  Probe
tattttaaggccaagtgcaggtgtc

SEQ ID NO: 299858 - DNA, 25 bp, Artificial
  Probe
gcccatcctttctgacttgaatgtc

SEQ ID NO: 299859 - DNA, 25 bp, Artificial
  Probe
cagcagggtcaggaagcaagattta

SEQ ID NO: 299860 - DNA, 25 bp, Artificial
  Probe
tactctagcccagtctggccgtatc

SEQ ID NO: 299861 - DNA, 25 bp, Artificial
  Probe
ttctgcagatgctaataaatcctgt

SEQ ID NO: 299862 - DNA, 25 bp, Artificial
  Probe
ttctcagggcgctggcgtgtccagc

SEQ ID NO: 299863 - DNA, 25 bp, Artificial
  Probe
tacaatgaaaacatggctggctctc

SEQ ID NO: 299864 - DNA, 25 bp, Artificial
  Probe
tgaatacattgtacactggcaaacc

SEQ ID NO: 299865 - DNA, 25 bp, Artificial
  Probe
gccggggcccatcctttctgacttg

SEQ ID NO: 299866 - DNA, 25 bp, Artificial
  Probe
ttttttacttctactgaacacggag

SEQ ID NO: 299867 - DNA, 25 bp, Artificial
  Probe
ccgtccctgtgtgtcagagctattt

SEQ ID NO: 299868 - DNA, 25 bp, Artificial
  Probe
ccaaaaaatgttctcagggcgctgg

SEQ ID NO: 299869 - DNA, 25 bp, Artificial
  Probe
tgaaaacatggctggctctcgccgg

SEQ ID NO: 299870 - DNA, 25 bp, Artificial
  Probe
ttaaggtattactgcttgttgtgcc

SEQ ID NO: 299871 - DNA, 25 bp, Artificial
  Probe
gctttgcgttggactatttcccatt

SEQ ID NO: 299872 - DNA, 25 bp, Artificial
  Probe
tgaaaagaccacgtccaaaaaatgt

SEQ ID NO: 299873 - DNA, 25 bp, Artificial
  Probe
gcttcgatgggttaaggtcacagag

SEQ ID NO: 299874 - DNA, 25 bp, Artificial
  Probe
tgtccagcagggtcaggaagcaaga

SEQ ID NO: 299875 - DNA, 25 bp, Artificial
  Probe
gtccatcacccttttaagaaatgtg

SEQ ID NO: 299876 - DNA, 25 bp, Artificial
  Probe
tgggacatggtgaccaaggagcctt

SEQ ID NO: 299877 - DNA, 25 bp, Artificial
  Probe
cctgtgtgtcagagctattttgtgg

SEQ ID NO: 299878 - DNA, 25 bp, Artificial
  Probe
cgaggttctatttttctaatagtct

SEQ ID NO: 299879 - DNA, 25 bp, Artificial
  Probe
ctggtttattagcaaacctgagcag

SEQ ID NO: 299880 - DNA, 25 bp, Artificial
  Probe
attgtgtcatgcttctgcagatgct

SEQ ID NO: 299881 - DNA, 25 bp, Artificial
  Probe
cttctactgaacacggagccattat

SEQ ID NO: 299882 - DNA, 25 bp, Artificial
  Probe
agattaagtccgatactaactgtaa

SEQ ID NO: 299883 - DNA, 25 bp, Artificial
  Probe
ttaaggtcacagagggtcatgatac

SEQ ID NO: 299884 - DNA, 25 bp, Artificial
  Probe
agtctggccgtatccgctgctccat

SEQ ID NO: 299885 - DNA, 25 bp, Artificial
  Probe
atgagggctggtttattagcaaacc

SEQ ID NO: 299886 - DNA, 25 bp, Artificial
  Probe
gatgctaataaatcctgtctggctt

SEQ ID NO: 299887 - DNA, 25 bp, Artificial
  Probe
ggtacattgtgtcatgcttctgcag

SEQ ID NO: 299888 - DNA, 25 bp, Artificial
  Probe
cctcacagccacctaggaacatatg

SEQ ID NO: 299889 - DNA, 25 bp, Artificial
  Probe
caccaggtgaccaggctgtggaaaa

SEQ ID NO: 299890 - DNA, 25 bp, Artificial
  Probe
gtctgtgtatctcactttgtcctac

SEQ ID NO: 299891 - DNA, 25 bp, Artificial
  Probe
cacttgttactttgggtgcaaaaca

SEQ ID NO: 299892 - DNA, 25 bp, Artificial
  Probe
gtgacgcccgtgtgcagagccgtca

SEQ ID NO: 299893 - DNA, 25 bp, Artificial
  Probe
ctaagaaagcgtctcagaaagaaag

SEQ ID NO: 299894 - DNA, 25 bp, Artificial
  Probe
actccccagcatttgctgcggttct

SEQ ID NO: 299895 - DNA, 25 bp, Artificial
  Probe
ttcttatctctgaggttgtttacac

SEQ ID NO: 299896 - DNA, 25 bp, Artificial
  Probe
ccaggctgtggaaaaccggaagtct

SEQ ID NO: 299897 - DNA, 25 bp, Artificial
  Probe
aagatctctgggtcttcgtgtttct

SEQ ID NO: 299898 - DNA, 25 bp, Artificial
  Probe
catttgctgcggttctttgtggtaa

SEQ ID NO: 299899 - DNA, 25 bp, Artificial
  Probe
tggacagcagtgacgcccgtgtgca

SEQ ID NO: 299900 - DNA, 25 bp, Artificial
  Probe
ctgcggggcttcaggacaatggaca

SEQ ID NO: 299901 - DNA, 25 bp, Artificial
  Probe
ggaaactttagctacggatcaacct

SEQ ID NO: 299902 - DNA, 25 bp, Artificial
  Probe
tcactttgtcctaccaccaatgtgg

SEQ ID NO: 299903 - DNA, 25 bp, Artificial
  Probe
aacaggatttacactcagaggagcc

SEQ ID NO: 299904 - DNA, 25 bp, Artificial
  Probe
acctctcgtttaagggaacgctgct

SEQ ID NO: 299905 - DNA, 25 bp, Artificial
  Probe
tcagatggtactagggggacacaga

SEQ ID NO: 299906 - DNA, 25 bp, Artificial
  Probe
ccttaagaggcctggctcccgatgt

SEQ ID NO: 299907 - DNA, 25 bp, Artificial
  Probe
aaaccggaagtctgtctgctttctc

SEQ ID NO: 299908 - DNA, 25 bp, Artificial
  Probe
ggcttctacttctggcctggcagtg

SEQ ID NO: 299909 - DNA, 25 bp, Artificial
  Probe
tcacgaacgctgcatatgacccaac

SEQ ID NO: 299910 - DNA, 25 bp, Artificial
  Probe
tgttggttgggcaggcagacctctc

SEQ ID NO: 299911 - DNA, 25 bp, Artificial
  Probe
cagtcgcgatgaactgttccaaccc

SEQ ID NO: 299912 - DNA, 25 bp, Artificial
  Probe
ggaagctctgacttacttgggtggc

SEQ ID NO: 299913 - DNA, 25 bp, Artificial
  Probe
tcctggtcgacttgactgtcactcc

SEQ ID NO: 299914 - DNA, 25 bp, Artificial
  Probe
agccacagaaacaggagcaaatgtt

SEQ ID NO: 299915 - DNA, 25 bp, Artificial
  Probe
ccagctatcaagctcttcacgtttg

SEQ ID NO: 299916 - DNA, 25 bp, Artificial
  Probe
cccagtgagcccacaaatatatgtt

SEQ ID NO: 299917 - DNA, 25 bp, Artificial
  Probe
cctaccaccaatgtggtcacagtta

SEQ ID NO: 299918 - DNA, 25 bp, Artificial
  Probe
gccacagaaacaggagcaaatgttt

SEQ ID NO: 299919 - DNA, 25 bp, Artificial
  Probe
caacctgcggagaggacggtcactg

SEQ ID NO: 299920 - DNA, 25 bp, Artificial
  Probe
aacagagcattggacaccacatctg

SEQ ID NO: 299921 - DNA, 25 bp, Artificial
  Probe
gtcttcgtgtttcttatctctgagg

SEQ ID NO: 299922 - DNA, 25 bp, Artificial
  Probe
tgaccaggctgtggaaaaccggaag

SEQ ID NO: 299923 - DNA, 25 bp, Artificial
  Probe
tgaaaacccgagttagtccaaggca

SEQ ID NO: 299924 - DNA, 25 bp, Artificial
  Probe
acaggaaccaaacgaaaggacgatg

SEQ ID NO: 299925 - DNA, 25 bp, Artificial
  Probe
tggcgccttggcttctacttctggc

SEQ ID NO: 299926 - DNA, 25 bp, Artificial
  Probe
agaggacggtcactggtcagatgct

SEQ ID NO: 299927 - DNA, 25 bp, Artificial
  Probe
gacaccacatctgactgcagacttt

SEQ ID NO: 299928 - DNA, 25 bp, Artificial
  Probe
ggcgggacgctactggctctgctaa

SEQ ID NO: 299929 - DNA, 25 bp, Artificial
  Probe
ggagccaactctctccgctgcgggg

SEQ ID NO: 299930 - DNA, 25 bp, Artificial
  Probe
aagaggcctggctcccgatgtcaat

SEQ ID NO: 299931 - DNA, 25 bp, Artificial
  Probe
ctttctcttgggattgaagaatggc

SEQ ID NO: 299932 - DNA, 25 bp, Artificial
  Probe
ggtctgtggcttgatgttactttgc

SEQ ID NO: 299933 - DNA, 25 bp, Artificial
  Probe
aaccaaacgaaaggacgatgtgctc

SEQ ID NO: 299934 - DNA, 25 bp, Artificial
  Probe
ctgctcaccatcactgctctggata

SEQ ID NO: 299935 - DNA, 25 bp, Artificial
  Probe
attcattcagccttggaaagtcaat

SEQ ID NO: 299936 - DNA, 25 bp, Artificial
  Probe
aaggacagcctcatcttcagccggc

SEQ ID NO: 299937 - DNA, 25 bp, Artificial
  Probe
ttggacctctactgggccaccaatg

SEQ ID NO: 299938 - DNA, 25 bp, Artificial
  Probe
cttggacctctactgggccaccaat

SEQ ID NO: 299939 - DNA, 25 bp, Artificial
  Probe
gaaaggacagcctcatcttcagccg

SEQ ID NO: 299940 - DNA, 25 bp, Artificial
  Probe
ttgacccggacacaagcttaatata

SEQ ID NO: 299941 - DNA, 25 bp, Artificial
  Probe
actcatgaaatgagccatttagctc

SEQ ID NO: 299942 - DNA, 25 bp, Artificial
  Probe
ttgcaggctcctagatgagccccgc

SEQ ID NO: 299943 - DNA, 25 bp, Artificial
  Probe
tatttaccggcatatttcagtcatg

SEQ ID NO: 299944 - DNA, 25 bp, Artificial
  Probe
tactgggccaccaatgcccactatt

SEQ ID NO: 299945 - DNA, 25 bp, Artificial
  Probe
aaagtcaatttgcaggctcctagat

SEQ ID NO: 299946 - DNA, 25 bp, Artificial
  Probe
agtgtctagatctaacatcacgatc

SEQ ID NO: 299947 - DNA, 25 bp, Artificial
  Probe
accaatgcccactattttaagagtg

SEQ ID NO: 299948 - DNA, 25 bp, Artificial
  Probe
gatctaacatcacgatcatctcgag

SEQ ID NO: 299949 - DNA, 25 bp, Artificial
  Probe
tgtgacctgtgatggccaaagacgt

SEQ ID NO: 299950 - DNA, 25 bp, Artificial
  Probe
caatttgcaggctcctagatgagcc

SEQ ID NO: 299951 - DNA, 25 bp, Artificial
  Probe
acagggacctctatccagaagcccg

SEQ ID NO: 299952 - DNA, 25 bp, Artificial
  Probe
ggcttgacccggacacaagcttaat

SEQ ID NO: 299953 - DNA, 25 bp, Artificial
  Probe
catatttcagtcatgtgacctgtga

SEQ ID NO: 299954 - DNA, 25 bp, Artificial
  Probe
ggataaattctgtgtggcttgaccc

SEQ ID NO: 299955 - DNA, 25 bp, Artificial
  Probe
tttactcatgaaatgagccatttag

SEQ ID NO: 299956 - DNA, 25 bp, Artificial
  Probe
gtgtctagatctaacatcacgatca

SEQ ID NO: 299957 - DNA, 25 bp, Artificial
  Probe
catcacgatcatctcgagactctgc

SEQ ID NO: 299958 - DNA, 25 bp, Artificial
  Probe
tcagccttggaaagtcaatttgcag

SEQ ID NO: 299959 - DNA, 25 bp, Artificial
  Probe
agcttctatggcaggataaattctg

SEQ ID NO: 299960 - DNA, 25 bp, Artificial
  Probe
attctgtgtggcttgacccggacac

SEQ ID NO: 299961 - DNA, 25 bp, Artificial
  Probe
acgatcatctcgagactctgcaatg

SEQ ID NO: 299962 - DNA, 25 bp, Artificial
  Probe
atgtgacctgtgatggccaaagacg

SEQ ID NO: 299963 - DNA, 25 bp, Artificial
  Probe
cactattttaagagtgtctagatct

SEQ ID NO: 299964 - DNA, 25 bp, Artificial
  Probe
gactctgcaatgaatgaaagaagct

SEQ ID NO: 299965 - DNA, 25 bp, Artificial
  Probe
cttctatggcaggataaattctgtg

SEQ ID NO: 299966 - DNA, 25 bp, Artificial
  Probe
ttctgtgtggcttgacccggacaca

SEQ ID NO: 299967 - DNA, 25 bp, Artificial
  Probe
tgaaatgagccatttagctcctaaa

SEQ ID NO: 299968 - DNA, 25 bp, Artificial
  Probe
acatcacgatcatctcgagactctg

SEQ ID NO: 299969 - DNA, 25 bp, Artificial
  Probe
ggatagaaaaaccttctctttggct

SEQ ID NO: 299970 - DNA, 25 bp, Artificial
  Probe
tgaaagaattcattcagccttggaa

SEQ ID NO: 299971 - DNA, 25 bp, Artificial
  Probe
atcatctcgagactctgcaatgaat

SEQ ID NO: 299972 - DNA, 25 bp, Artificial
  Probe
gataaattctgtgtggcttgacccg

SEQ ID NO: 299973 - DNA, 25 bp, Artificial
  Probe
ctgtgatggccaaagacgttttggg

SEQ ID NO: 299974 - DNA, 25 bp, Artificial
  Probe
aagtcaatttgcaggctcctagatg

SEQ ID NO: 299975 - DNA, 25 bp, Artificial
  Probe
tagaaaaaccttctctttggctaag

SEQ ID NO: 299976 - DNA, 25 bp, Artificial
  Probe
ctgctctggataggaaaggacagcc

SEQ ID NO: 299977 - DNA, 25 bp, Artificial
  Probe
ctgggccaccaatgcccactatttt

SEQ ID NO: 299978 - DNA, 25 bp, Artificial
  Probe
cctgtgatggccaaagacgttttgg

SEQ ID NO: 299979 - DNA, 25 bp, Artificial
  Probe
cacgatcatctcgagactctgcaat

SEQ ID NO: 299980 - DNA, 25 bp, Artificial
  Probe
gtgcagtaaaccacagccagtcggt

SEQ ID NO: 299981 - DNA, 25 bp, Artificial
  Probe
tgcaagatgtctctgaatggacagc

SEQ ID NO: 299982 - DNA, 25 bp, Artificial
  Probe
tgtacaacctcaaacagtgcaagat

SEQ ID NO: 299983 - DNA, 25 bp, Artificial
  Probe
ggatttcccagttttgacacatgta

SEQ ID NO: 299984 - DNA, 25 bp, Artificial
  Probe
tacaacctcaaacagtgcaagatgt

SEQ ID NO: 299985 - DNA, 25 bp, Artificial
  Probe
cgcccaaagggtgcagtaaaccaca

SEQ ID NO: 299986 - DNA, 25 bp, Artificial
  Probe
ccccaactgtgacaagcatggcctg

SEQ ID NO: 299987 - DNA, 25 bp, Artificial
  Probe
atccccaactgtgacaagcatggcc

SEQ ID NO: 299988 - DNA, 25 bp, Artificial
  Probe
agtgctggtgtgtgaaccccaatac

SEQ ID NO: 299989 - DNA, 25 bp, Artificial
  Probe
aggatttcccagttttgacacatgt

SEQ ID NO: 299990 - DNA, 25 bp, Artificial
  Probe
aactgtgacaagcatggcctgtaca

SEQ ID NO: 299991 - DNA, 25 bp, Artificial
  Probe
cccagtggcagttaacctgtacctc

SEQ ID NO: 299992 - DNA, 25 bp, Artificial
  Probe
ggagtgctggtgtgtgaaccccaat

SEQ ID NO: 299993 - DNA, 25 bp, Artificial
  Probe
ggtgcagtaaaccacagccagtcgg

SEQ ID NO: 299994 - DNA, 25 bp, Artificial
  Probe
atgatcggggtcctctggaacatct

SEQ ID NO: 299995 - DNA, 25 bp, Artificial
  Probe
accccaaacaccagcagaaatggag

SEQ ID NO: 299996 - DNA, 25 bp, Artificial
  Probe
acaacctcaaacagtgcaagatgtc

SEQ ID NO: 299997 - DNA, 25 bp, Artificial
  Probe
cagtgcaagatgtctctgaatggac

SEQ ID NO: 299998 - DNA, 25 bp, Artificial
  Probe
aagcatggcctgtacaacctcaaac

SEQ ID NO: 299999 - DNA, 25 bp, Artificial
  Probe
aacagtgcaagatgtctctgaatgg

SEQ ID NO: 300000 - DNA, 25 bp, Artificial
  Probe
atggcctgtacaacctcaaacagtg

SEQ ID NO: 300001 - DNA, 25 bp, Artificial
  Probe
aacctcaaacagtgcaagatgtctc

SEQ ID NO: 300002 - DNA, 25 bp, Artificial
  Probe
cctcaaacagtgcaagatgtctctg

SEQ ID NO: 300003 - DNA, 25 bp, Artificial
  Probe
ggcctgtacaacctcaaacagtgca

SEQ ID NO: 300004 - DNA, 25 bp, Artificial
  Probe
gtgcaagatgtctctgaatggacag

SEQ ID NO: 300005 - DNA, 25 bp, Artificial
  Probe
actgtgacaagcatggcctgtacaa

SEQ ID NO: 300006 - DNA, 25 bp, Artificial
  Probe
acctcaaacagtgcaagatgtctct

SEQ ID NO: 300007 - DNA, 25 bp, Artificial
  Probe
acaagcatggcctgtacaacctcaa

SEQ ID NO: 300008 - DNA, 25 bp, Artificial
  Probe
ctgtgacaagcatggcctgtacaac

SEQ ID NO: 300009 - DNA, 25 bp, Artificial
  Probe
agcatggcctgtacaacctcaaaca

SEQ ID NO: 300010 - DNA, 25 bp, Artificial
  Probe
cccaactgtgacaagcatggcctgt

SEQ ID NO: 300011 - DNA, 25 bp, Artificial
  Probe
catggcctgtacaacctcaaacagt

SEQ ID NO: 300012 - DNA, 25 bp, Artificial
  Probe
tgcatatccccaactgtgacaagca

SEQ ID NO: 300013 - DNA, 25 bp, Artificial
  Probe
ctgcatatccccaactgtgacaagc

SEQ ID NO: 300014 - DNA, 25 bp, Artificial
  Probe
ccaaacaccagcagaaatggagggt

SEQ ID NO: 300015 - DNA, 25 bp, Artificial
  Probe
gcctgtacaacctcaaacagtgcaa

SEQ ID NO: 300016 - DNA, 25 bp, Artificial
  Probe
acagtgcaagatgtctctgaatgga

SEQ ID NO: 300017 - DNA, 25 bp, Artificial
  Probe
ctgtacaacctcaaacagtgcaaga

SEQ ID NO: 300018 - DNA, 25 bp, Artificial
  Probe
gatttcccagttttgacacatgtat

SEQ ID NO: 300019 - DNA, 25 bp, Artificial
  Probe
ccccagtggcagttaacctgtacct

SEQ ID NO: 300020 - DNA, 25 bp, Artificial
  Probe
gaggatttcccagttttgacacatg

SEQ ID NO: 300021 - DNA, 25 bp, Artificial
  Probe
tatccccaactgtgacaagcatggc

SEQ ID NO: 300022 - DNA, 25 bp, Artificial
  Probe
cccaaacaccagcagaaatggaggg

SEQ ID NO: 300023 - DNA, 25 bp, Artificial
  Probe
gcagtaaaccacagccagtcggtgc

SEQ ID NO: 300024 - DNA, 25 bp, Artificial
  Probe
gcatatccccaactgtgacaagcat

SEQ ID NO: 300025 - DNA, 25 bp, Artificial
  Probe
atatccccaactgtgacaagcatgg

SEQ ID NO: 300026 - DNA, 25 bp, Artificial
  Probe
taaacctctgcctcttgacgatgga

SEQ ID NO: 300027 - DNA, 25 bp, Artificial
  Probe
tggctgaagagcacagagggaacta

SEQ ID NO: 300028 - DNA, 25 bp, Artificial
  Probe
cccacggaatgagacgatggaagct

SEQ ID NO: 300029 - DNA, 25 bp, Artificial
  Probe
cgatggaagctgacccaggatccac

SEQ ID NO: 300030 - DNA, 25 bp, Artificial
  Probe
ctagccctttgctgcccactttgag

SEQ ID NO: 300031 - DNA, 25 bp, Artificial
  Probe
tgatctgcaacgtcacgggccagtt

SEQ ID NO: 300032 - DNA, 25 bp, Artificial
  Probe
agcaatatcccgtcacacgagtaat

SEQ ID NO: 300033 - DNA, 25 bp, Artificial
  Probe
acataccaggggaagcaatatcccg

SEQ ID NO: 300034 - DNA, 25 bp, Artificial
  Probe
tgagtttgccaatcaattttgatgc

SEQ ID NO: 300035 - DNA, 25 bp, Artificial
  Probe
ctcgttttgactctaagatggagag

SEQ ID NO: 300036 - DNA, 25 bp, Artificial
  Probe
cttctttggattcaagaataaactg

SEQ ID NO: 300037 - DNA, 25 bp, Artificial
  Probe
cgcacgtcctacacataccagggga

SEQ ID NO: 300038 - DNA, 25 bp, Artificial
  Probe
cctgtgattatgagcccacggaatg

SEQ ID NO: 300039 - DNA, 25 bp, Artificial
  Probe
ttggctgctcctagccctttgctgc

SEQ ID NO: 300040 - DNA, 25 bp, Artificial
  Probe
ccttgtctactggaagtggaatggg

SEQ ID NO: 300041 - DNA, 25 bp, Artificial
  Probe
agggacagacctgtgattatgagcc

SEQ ID NO: 300042 - DNA, 25 bp, Artificial
  Probe
gccgaagactatcagttgtgagttt

SEQ ID NO: 300043 - DNA, 25 bp, Artificial
  Probe
caatcctagccgaagactatcagtt

SEQ ID NO: 300044 - DNA, 25 bp, Artificial
  Probe
agggaactatacttgccgcacgtcc

SEQ ID NO: 300045 - DNA, 25 bp, Artificial
  Probe
cgatccaatcctagccgaagactat

SEQ ID NO: 300046 - DNA, 25 bp, Artificial
  Probe
acgatggaaacttctttggattcaa

SEQ ID NO: 300047 - DNA, 25 bp, Artificial
  Probe
atgaaggttggctgctcctagccct

SEQ ID NO: 300048 - DNA, 25 bp, Artificial
  Probe
gacgatggaagctgacccaggatcc

SEQ ID NO: 300049 - DNA, 25 bp, Artificial
  Probe
tcagttgtgagtttgccaatcaatt

SEQ ID NO: 300050 - DNA, 25 bp, Artificial
  Probe
agtttgccaatcaattttgatgcta

SEQ ID NO: 300051 - DNA, 25 bp, Artificial
  Probe
gggaactatacttgccgcacgtcct

SEQ ID NO: 300052 - DNA, 25 bp, Artificial
  Probe
cctacacataccaggggaagcaata

SEQ ID NO: 300053 - DNA, 25 bp, Artificial
  Probe
acgggccagttcaccgaccttgtct

SEQ ID NO: 300054 - DNA, 25 bp, Artificial
  Probe
actgtaaacctctgcctcttgacga

SEQ ID NO: 300055 - DNA, 25 bp, Artificial
  Probe
ggaagctgacccaggatccacgata

SEQ ID NO: 300056 - DNA, 25 bp, Artificial
  Probe
gcaatatcccgtcacacgagtaata

SEQ ID NO: 300057 - DNA, 25 bp, Artificial
  Probe
gtcacgggccagttcaccgaccttg

SEQ ID NO: 300058 - DNA, 25 bp, Artificial
  Probe
atgagcccacggaatgagacgatgg

SEQ ID NO: 300059 - DNA, 25 bp, Artificial
  Probe
agaactgtaaacctctgcctcttga

SEQ ID NO: 300060 - DNA, 25 bp, Artificial
  Probe
ccaaagttcagtggtataagaactg

SEQ ID NO: 300061 - DNA, 25 bp, Artificial
  Probe
cgatggaaacttctttggattcaag

SEQ ID NO: 300062 - DNA, 25 bp, Artificial
  Probe
ctttgagctttgctaagtgatagac

SEQ ID NO: 300063 - DNA, 25 bp, Artificial
  Probe
aagactatcagttgtgagtttgcca

SEQ ID NO: 300064 - DNA, 25 bp, Artificial
  Probe
ctcttgacgatggaaacttctttgg

SEQ ID NO: 300065 - DNA, 25 bp, Artificial
  Probe
aatgggacgatccaatcctagccga

SEQ ID NO: 300066 - DNA, 25 bp, Artificial
  Probe
atcaattttgatgctacattctgtg

SEQ ID NO: 300067 - DNA, 25 bp, Artificial
  Probe
cctttgctgcccactttgagctttg

SEQ ID NO: 300068 - DNA, 25 bp, Artificial
  Probe
gccagttcaccgaccttgtctactg

SEQ ID NO: 300069 - DNA, 25 bp, Artificial
  Probe
tatcacaatagatgacagcaagagg

SEQ ID NO: 300070 - DNA, 25 bp, Artificial
  Probe
gattatgagcccacggaatgagacg

SEQ ID NO: 300071 - DNA, 25 bp, Artificial
  Probe
atttatcacaatagatgacagcaag

SEQ ID NO: 300072 - DNA, 25 bp, Artificial
  Probe
tctacaaggacttgtattagcagaa

SEQ ID NO: 300073 - DNA, 25 bp, Artificial
  Probe
ttgcactattattttgagggaaaaa

SEQ ID NO: 300074 - DNA, 25 bp, Artificial
  Probe
ccagtcgctgacaaagtgttccttc

SEQ ID NO: 300075 - DNA, 25 bp, Artificial
  Probe
gtcccagtcgctgacaaagtgttcc

SEQ ID NO: 300076 - DNA, 25 bp, Artificial
  Probe
gacaaagtgttccttctatcgattg

SEQ ID NO: 300077 - DNA, 25 bp, Artificial
  Probe
acaaagtgttccttctatcgattgc

SEQ ID NO: 300078 - DNA, 25 bp, Artificial
  Probe
caaagtgttccttctatcgattgca

SEQ ID NO: 300079 - DNA, 25 bp, Artificial
  Probe
acaaggacttgtattagcagaaaag

SEQ ID NO: 300080 - DNA, 25 bp, Artificial
  Probe
ctattttatgcatattgtttataaa

SEQ ID NO: 300081 - DNA, 25 bp, Artificial
  Probe
attagcagaaaagtcccagtcgctg

SEQ ID NO: 300082 - DNA, 25 bp, Artificial
  Probe
tgcactattattttgagggaaaaaa

SEQ ID NO: 300083 - DNA, 25 bp, Artificial
  Probe
gctgacaaagtgttccttctatcga

SEQ ID NO: 300084 - DNA, 25 bp, Artificial
  Probe
agtcccagtcgctgacaaagtgttc

SEQ ID NO: 300085 - DNA, 25 bp, Artificial
  Probe
aagtcccagtcgctgacaaagtgtt

SEQ ID NO: 300086 - DNA, 25 bp, Artificial
  Probe
tacatttacaatttacttttaatat

SEQ ID NO: 300087 - DNA, 25 bp, Artificial
  Probe
agtcgctgacaaagtgttccttcta

SEQ ID NO: 300088 - DNA, 25 bp, Artificial
  Probe
tgacaaagtgttccttctatcgatt

SEQ ID NO: 300089 - DNA, 25 bp, Artificial
  Probe
tttatgcatattgtttataaagata

SEQ ID NO: 300090 - DNA, 25 bp, Artificial
  Probe
agaacatgatctattttatgcatat

SEQ ID NO: 300091 - DNA, 25 bp, Artificial
  Probe
ttctatcgattgcactattattttg

SEQ ID NO: 300092 - DNA, 25 bp, Artificial
  Probe
aaagtgttccttctatcgattgcac

SEQ ID NO: 300093 - DNA, 25 bp, Artificial
  Probe
atgatctattttatgcatattgttt

SEQ ID NO: 300094 - DNA, 25 bp, Artificial
  Probe
atcgattgcactattattttgaggg

SEQ ID NO: 300095 - DNA, 25 bp, Artificial
  Probe
tattagcagaaaagtcccagtcgct

SEQ ID NO: 300096 - DNA, 25 bp, Artificial
  Probe
tgttccttctatcgattgcactatt

SEQ ID NO: 300097 - DNA, 25 bp, Artificial
  Probe
gcagaaaagtcccagtcgctgacaa

SEQ ID NO: 300098 - DNA, 25 bp, Artificial
  Probe
agaaaagtcccagtcgctgacaaag

SEQ ID NO: 300099 - DNA, 25 bp, Artificial
  Probe
aagtgttccttctatcgattgcact

SEQ ID NO: 300100 - DNA, 25 bp, Artificial
  Probe
gatacatttacaatttacttttaat

SEQ ID NO: 300101 - DNA, 25 bp, Artificial
  Probe
ctacaaggacttgtattagcagaaa

SEQ ID NO: 300102 - DNA, 25 bp, Artificial
  Probe
gtcgctgacaaagtgttccttctat

SEQ ID NO: 300103 - DNA, 25 bp, Artificial
  Probe
cagtcgctgacaaagtgttccttct

SEQ ID NO: 300104 - DNA, 25 bp, Artificial
  Probe
cagaaaagtcccagtcgctgacaaa

SEQ ID NO: 300105 - DNA, 25 bp, Artificial
  Probe
ctgacaaagtgttccttctatcgat

SEQ ID NO: 300106 - DNA, 25 bp, Artificial
  Probe
tcccagtcgctgacaaagtgttcct

SEQ ID NO: 300107 - DNA, 25 bp, Artificial
  Probe
tcgctgacaaagtgttccttctatc

SEQ ID NO: 300108 - DNA, 25 bp, Artificial
  Probe
agtgttccttctatcgattgcacta

SEQ ID NO: 300109 - DNA, 25 bp, Artificial
  Probe
cgctgacaaagtgttccttctatcg

SEQ ID NO: 300110 - DNA, 25 bp, Artificial
  Probe
aacatgatctattttatgcatattg

SEQ ID NO: 300111 - DNA, 25 bp, Artificial
  Probe
ttagcagaaaagtcccagtcgctga

SEQ ID NO: 300112 - DNA, 25 bp, Artificial
  Probe
tagcagaaaagtcccagtcgctgac

SEQ ID NO: 300113 - DNA, 25 bp, Artificial
  Probe
atctacaaggacttgtattagcaga

SEQ ID NO: 300114 - DNA, 25 bp, Artificial
  Probe
cccagtcgctgacaaagtgttcctt

SEQ ID NO: 300115 - DNA, 25 bp, Artificial
  Probe
gttccttctatcgattgcactatta

SEQ ID NO: 300116 - DNA, 25 bp, Artificial
  Probe
gtgttccttctatcgattgcactat

SEQ ID NO: 300117 - DNA, 25 bp, Artificial
  Probe
ttttagaacatgatctattttatgc

SEQ ID NO: 300118 - DNA, 25 bp, Artificial
  Probe
catggtctgggaatcccagagttca

SEQ ID NO: 300119 - DNA, 25 bp, Artificial
  Probe
tcaactgagtattccgagaggcagc

SEQ ID NO: 300120 - DNA, 25 bp, Artificial
  Probe
aaggttgtgcatggtctgggaatcc

SEQ ID NO: 300121 - DNA, 25 bp, Artificial
  Probe
tggaggaaacctactgctaacagtg

SEQ ID NO: 300122 - DNA, 25 bp, Artificial
  Probe
atggatggcagctggaagccttcgc

SEQ ID NO: 300123 - DNA, 25 bp, Artificial
  Probe
tggcagaatcatgtgggcatctgaa

SEQ ID NO: 300124 - DNA, 25 bp, Artificial
  Probe
tccgagaggcagcatcccctgctga

SEQ ID NO: 300125 - DNA, 25 bp, Artificial
  Probe
gataaccagcctaccggagccaaaa

SEQ ID NO: 300126 - DNA, 25 bp, Artificial
  Probe
tctcagttgcccttcaggttctgca

SEQ ID NO: 300127 - DNA, 25 bp, Artificial
  Probe
gacatatggccctctggctcttcaa

SEQ ID NO: 300128 - DNA, 25 bp, Artificial
  Probe
tccatgctggcgaggtccttaagaa

SEQ ID NO: 300129 - DNA, 25 bp, Artificial
  Probe
gagtattccgagaggcagcatcccc

SEQ ID NO: 300130 - DNA, 25 bp, Artificial
  Probe
ttgatccaagcattaacacctgctg

SEQ ID NO: 300131 - DNA, 25 bp, Artificial
  Probe
ggatggcagctggaagccttcgcca

SEQ ID NO: 300132 - DNA, 25 bp, Artificial
  Probe
tctgggaatcccagagttcatctac

SEQ ID NO: 300133 - DNA, 25 bp, Artificial
  Probe
gacacactgcagctgcggccaactg

SEQ ID NO: 300134 - DNA, 25 bp, Artificial
  Probe
aatcatgtgggcatctgaatccact

SEQ ID NO: 300135 - DNA, 25 bp, Artificial
  Probe
cgggctctcagttgcccttcaggtt

SEQ ID NO: 300136 - DNA, 25 bp, Artificial
  Probe
caatgaactgctttctcctggaatt

SEQ ID NO: 300137 - DNA, 25 bp, Artificial
  Probe
tgcccttcaggttctgcaccctggg

SEQ ID NO: 300138 - DNA, 25 bp, Artificial
  Probe
cctgctgactgagaaattgatccaa

SEQ ID NO: 300139 - DNA, 25 bp, Artificial
  Probe
agcatcccctgctgactgagaaatt

SEQ ID NO: 300140 - DNA, 25 bp, Artificial
  Probe
acctgctggaagaagcagagaaggt

SEQ ID NO: 300141 - DNA, 25 bp, Artificial
  Probe
tgctctcgggctctcagttgccctt

SEQ ID NO: 300142 - DNA, 25 bp, Artificial
  Probe
cagcagataaccagcctaccggagc

SEQ ID NO: 300143 - DNA, 25 bp, Artificial
  Probe
cagtggcagaatcatgtgggcatct

SEQ ID NO: 300144 - DNA, 25 bp, Artificial
  Probe
ctgacagtgactttcatcccagttg

SEQ ID NO: 300145 - DNA, 25 bp, Artificial
  Probe
gtggagactgctctcgggctctcag

SEQ ID NO: 300146 - DNA, 25 bp, Artificial
  Probe
cactttgacatatggccctctggct

SEQ ID NO: 300147 - DNA, 25 bp, Artificial
  Probe
agctggaagccttcgccatagcccg

SEQ ID NO: 300148 - DNA, 25 bp, Artificial
  Probe
taagcatttacctgggcattaagta

SEQ ID NO: 300149 - DNA, 25 bp, Artificial
  Probe
ttcaacacttaagcatttacctggg

SEQ ID NO: 300150 - DNA, 25 bp, Artificial
  Probe
tggccctctggctcttcaaagcagt

SEQ ID NO: 300151 - DNA, 25 bp, Artificial
  Probe
tggagactgctctcgggctctcagt

SEQ ID NO: 300152 - DNA, 25 bp, Artificial
  Probe
ttcacagaaggcaaaggcgttccag

SEQ ID NO: 300153 - DNA, 25 bp, Artificial
  Probe
ggttctgcaccctggggacctggca

SEQ ID NO: 300154 - DNA, 25 bp, Artificial
  Probe
aaggcaaaggcgttccaggacacac

SEQ ID NO: 300155 - DNA, 25 bp, Artificial
  Probe
ccagcctaccggagccaaaagggtg

SEQ ID NO: 300156 - DNA, 25 bp, Artificial
  Probe
atctacaaacaaagaggaggcgttc

SEQ ID NO: 300157 - DNA, 25 bp, Artificial
  Probe
ggaatcccagagttcatctacaaac

SEQ ID NO: 300158 - DNA, 25 bp, Artificial
  Probe
gcatggtctgggaatcccagagttc

SEQ ID NO: 300159 - DNA, 25 bp, Artificial
  Probe
gactttcatcccagttgcaaagtta

SEQ ID NO: 300160 - DNA, 25 bp, Artificial
  Probe
gaactgctttctcctggaattacag

SEQ ID NO: 300161 - DNA, 25 bp, Artificial
  Probe
cagtgactttcatcccagttgcaaa

SEQ ID NO: 300162 - DNA, 25 bp, Artificial
  Probe
catggtccatgctggcgaggtcctt

SEQ ID NO: 300163 - DNA, 25 bp, Artificial
  Probe
ccagagttcatctacaaacaaagag

SEQ ID NO: 300164 - DNA, 25 bp, Artificial
  Probe
cttgacctctgtgaccaaccgttgg

SEQ ID NO: 300165 - DNA, 25 bp, Artificial
  Probe
cttggtaacaagctgttgatatcaa

SEQ ID NO: 300166 - DNA, 25 bp, Artificial
  Probe
caagaacccgcttagtttacattgt

SEQ ID NO: 300167 - DNA, 25 bp, Artificial
  Probe
cttagtttacattgtgacattctgt

SEQ ID NO: 300168 - DNA, 25 bp, Artificial
  Probe
cattgtgacattctgttgtaaaatc

SEQ ID NO: 300169 - DNA, 25 bp, Artificial
  Probe
ctaaaatgctgacttttagcaggac

SEQ ID NO: 300170 - DNA, 25 bp, Artificial
  Probe
gctgacaggccttggtaacaagctg

SEQ ID NO: 300171 - DNA, 25 bp, Artificial
  Probe
ttgatatcaagaacccgcttagttt

SEQ ID NO: 300172 - DNA, 25 bp, Artificial
  Probe
ctgacttttagcaggactttgtgaa

SEQ ID NO: 300173 - DNA, 25 bp, Artificial
  Probe
gtaacaagctgttgatatcaagaac

SEQ ID NO: 300174 - DNA, 25 bp, Artificial
  Probe
aactattgggccttgcagtacttga

SEQ ID NO: 300175 - DNA, 25 bp, Artificial
  Probe
aatgctgacttttagcaggactttg

SEQ ID NO: 300176 - DNA, 25 bp, Artificial
  Probe
ctgttgatatcaagaacccgcttag

SEQ ID NO: 300177 - DNA, 25 bp, Artificial
  Probe
aagagatggccaagccaggggcaaa

SEQ ID NO: 300178 - DNA, 25 bp, Artificial
  Probe
cttgcagtacttgaaggacggagaa

SEQ ID NO: 300179 - DNA, 25 bp, Artificial
  Probe
tgtgaccaaccgttggatggagaag

SEQ ID NO: 300180 - DNA, 25 bp, Artificial
  Probe
cagtacttgaaggacggagaagtca

SEQ ID NO: 300181 - DNA, 25 bp, Artificial
  Probe
caactaaaatgctgacttttagcag

SEQ ID NO: 300182 - DNA, 25 bp, Artificial
  Probe
ggagccgtgatacttgacctctgtg

SEQ ID NO: 300183 - DNA, 25 bp, Artificial
  Probe
ccgcttagtttacattgtgacattc

SEQ ID NO: 300184 - DNA, 25 bp, Artificial
  Probe
tcttaaaggccctcggcttctgtct

SEQ ID NO: 300185 - DNA, 25 bp, Artificial
  Probe
ggagaagctgacaggccttggtaac

SEQ ID NO: 300186 - DNA, 25 bp, Artificial
  Probe
tgctgacttttagcaggactttgtg

SEQ ID NO: 300187 - DNA, 25 bp, Artificial
  Probe
gccctcggcttctgtctcttgcaaa

SEQ ID NO: 300188 - DNA, 25 bp, Artificial
  Probe
gtcggtgtcttaaaggccctcggct

SEQ ID NO: 300189 - DNA, 25 bp, Artificial
  Probe
ggccttgcagtacttgaaggacgga

SEQ ID NO: 300190 - DNA, 25 bp, Artificial
  Probe
cctcggcttctgtctcttgcaaact

SEQ ID NO: 300191 - DNA, 25 bp, Artificial
  Probe
aggagccgtgatacttgacctctgt

SEQ ID NO: 300192 - DNA, 25 bp, Artificial
  Probe
agaacccgcttagtttacattgtga

SEQ ID NO: 300193 - DNA, 25 bp, Artificial
  Probe
tgggccttgcagtacttgaaggacg

SEQ ID NO: 300194 - DNA, 25 bp, Artificial
  Probe
atacttgacctctgtgaccaaccgt

SEQ ID NO: 300195 - DNA, 25 bp, Artificial
  Probe
gatggccaagccaggggcaaattat

SEQ ID NO: 300196 - DNA, 25 bp, Artificial
  Probe
aaggccctcggcttctgtctcttgc

SEQ ID NO: 300197 - DNA, 25 bp, Artificial
  Probe
tgtgacattctgttgtaaaatcaac

SEQ ID NO: 300198 - DNA, 25 bp, Artificial
  Probe
gcagtacttgaaggacggagaagtc

SEQ ID NO: 300199 - DNA, 25 bp, Artificial
  Probe
taaaggagccgtgatacttgacctc

SEQ ID NO: 300200 - DNA, 25 bp, Artificial
  Probe
acaggccttggtaacaagctgttga

SEQ ID NO: 300201 - DNA, 25 bp, Artificial
  Probe
tcggtgtcttaaaggccctcggctt

SEQ ID NO: 300202 - DNA, 25 bp, Artificial
  Probe
aaaggagccgtgatacttgacctct

SEQ ID NO: 300203 - DNA, 25 bp, Artificial
  Probe
tcgtcggtgtcttaaaggccctcgg

SEQ ID NO: 300204 - DNA, 25 bp, Artificial
  Probe
tgacctctgtgaccaaccgttggat

SEQ ID NO: 300205 - DNA, 25 bp, Artificial
  Probe
cctctgtgaccaaccgttggatgga

SEQ ID NO: 300206 - DNA, 25 bp, Artificial
  Probe
tcaagaacccgcttagtttacattg

SEQ ID NO: 300207 - DNA, 25 bp, Artificial
  Probe
caaccgttggatggagaagctgaca

SEQ ID NO: 300208 - DNA, 25 bp, Artificial
  Probe
cttgcaaactattgggccttgcagt

SEQ ID NO: 300209 - DNA, 25 bp, Artificial
  Probe
acttgacctctgtgaccaaccgttg

SEQ ID NO: 300210 - DNA, 25 bp, Artificial
  Probe
gttcgtgagactctagtgcgcagct

SEQ ID NO: 300211 - DNA, 25 bp, Artificial
  Probe
tcatgtaagcaagacagtggcacta

SEQ ID NO: 300212 - DNA, 25 bp, Artificial
  Probe
agtgggtcagcgtttccacagggtt

SEQ ID NO: 300213 - DNA, 25 bp, Artificial
  Probe
tcagacgacgcctgccttctgcaag

SEQ ID NO: 300214 - DNA, 25 bp, Artificial
  Probe
aaatctgattttctcctcttgggga

SEQ ID NO: 300215 - DNA, 25 bp, Artificial
  Probe
catctgggtatgagtcagacagaat

SEQ ID NO: 300216 - DNA, 25 bp, Artificial
  Probe
ctggtcctgagagtgctgtcctccc

SEQ ID NO: 300217 - DNA, 25 bp, Artificial
  Probe
gtgtctctcagacgacgcctgcctt

SEQ ID NO: 300218 - DNA, 25 bp, Artificial
  Probe
ggcttgagtgggtcagcgtttccac

SEQ ID NO: 300219 - DNA, 25 bp, Artificial
  Probe
gctctctcagaaagggagactggaa

SEQ ID NO: 300220 - DNA, 25 bp, Artificial
  Probe
cacagatcactagaaggtttttaga

SEQ ID NO: 300221 - DNA, 25 bp, Artificial
  Probe
ccggtcatggggacagcaaatatgg

SEQ ID NO: 300222 - DNA, 25 bp, Artificial
  Probe
tccacacctgtcaaagatcagaaag

SEQ ID NO: 300223 - DNA, 25 bp, Artificial
  Probe
cagaatggcgtggagacccacagat

SEQ ID NO: 300224 - DNA, 25 bp, Artificial
  Probe
acccagggacgctgaactcagaggg

SEQ ID NO: 300225 - DNA, 25 bp, Artificial
  Probe
taagcaagacagtggcactaaaatt

SEQ ID NO: 300226 - DNA, 25 bp, Artificial
  Probe
cagagcctgctctctcagaaaggga

SEQ ID NO: 300227 - DNA, 25 bp, Artificial
  Probe
caaagatcagaaagccgcctctagc

SEQ ID NO: 300228 - DNA, 25 bp, Artificial
  Probe
gaagcagagcctgctctctcagaaa

SEQ ID NO: 300229 - DNA, 25 bp, Artificial
  Probe
taccgtgtctctcagacgacgcctg

SEQ ID NO: 300230 - DNA, 25 bp, Artificial
  Probe
aacatggtgatgactctcagaattc

SEQ ID NO: 300231 - DNA, 25 bp, Artificial
  Probe
aacactacgaatcatgtaagcaaga

SEQ ID NO: 300232 - DNA, 25 bp, Artificial
  Probe
ttgttcttggtctcccgcgtgggaa

SEQ ID NO: 300233 - DNA, 25 bp, Artificial
  Probe
atcatgtaagcaagacagtggcact

SEQ ID NO: 300234 - DNA, 25 bp, Artificial
  Probe
gcaatatgaaaaccatacttcgaag

SEQ ID NO: 300235 - DNA, 25 bp, Artificial
  Probe
ggagacccagggacgctgaactcag

SEQ ID NO: 300236 - DNA, 25 bp, Artificial
  Probe
atatggcaggaggtacaggcaactc

SEQ ID NO: 300237 - DNA, 25 bp, Artificial
  Probe
agtcagacagaatggcgtggagacc

SEQ ID NO: 300238 - DNA, 25 bp, Artificial
  Probe
cctgctctctcagaaagggagactg

SEQ ID NO: 300239 - DNA, 25 bp, Artificial
  Probe
cccagggacgctgaactcagagggt

SEQ ID NO: 300240 - DNA, 25 bp, Artificial
  Probe
acctgtcaaagatcagaaagccgcc

SEQ ID NO: 300241 - DNA, 25 bp, Artificial
  Probe
aatatggcaggaggtacaggcaact

SEQ ID NO: 300242 - DNA, 25 bp, Artificial
  Probe
gaggtacaggcaactcatctgggta

SEQ ID NO: 300243 - DNA, 25 bp, Artificial
  Probe
atggcccagagagcacaattctccc

SEQ ID NO: 300244 - DNA, 25 bp, Artificial
  Probe
cagaaagccgcctctagccttggac

SEQ ID NO: 300245 - DNA, 25 bp, Artificial
  Probe
gaagtgttcgtgagactctagtgcg

SEQ ID NO: 300246 - DNA, 25 bp, Artificial
  Probe
ctgccttctgcaaggggagacccag

SEQ ID NO: 300247 - DNA, 25 bp, Artificial
  Probe
gagagcacaattctcccatttccag

SEQ ID NO: 300248 - DNA, 25 bp, Artificial
  Probe
cccctctgtcataagaagcagagcc

SEQ ID NO: 300249 - DNA, 25 bp, Artificial
  Probe
ctctgtcataagaagcagagcctgc

SEQ ID NO: 300250 - DNA, 25 bp, Artificial
  Probe
tctgattttctcctcttggggaaaa

SEQ ID NO: 300251 - DNA, 25 bp, Artificial
  Probe
ctacgaatcatgtaagcaagacagt

SEQ ID NO: 300252 - DNA, 25 bp, Artificial
  Probe
cttcactcctggagccggtcatggg

SEQ ID NO: 300253 - DNA, 25 bp, Artificial
  Probe
gcccagagagcacaattctcccatt

SEQ ID NO: 300254 - DNA, 25 bp, Artificial
  Probe
caggaaccactggtcctgagagtgc

SEQ ID NO: 300255 - DNA, 25 bp, Artificial
  Probe
ctcctcttggggaaaatattccatg

SEQ ID NO: 300256 - DNA, 25 bp, Artificial
  Probe
gcgtaccacttaacgcggcagaatc

SEQ ID NO: 300257 - DNA, 25 bp, Artificial
  Probe
ggccagggaccagttcgactataat

SEQ ID NO: 300258 - DNA, 25 bp, Artificial
  Probe
tcctccgaaaacagacgagcacact

SEQ ID NO: 300259 - DNA, 25 bp, Artificial
  Probe
ttaacgcggcagaatcccttcgcgc

SEQ ID NO: 300260 - DNA, 25 bp, Artificial
  Probe
agggaccagttcgactataatgacg

SEQ ID NO: 300261 - DNA, 25 bp, Artificial
  Probe
gccgacagagcaccaaaggccacta

SEQ ID NO: 300262 - DNA, 25 bp, Artificial
  Probe
cggcgcacacaaagtggcgagtgaa

SEQ ID NO: 300263 - DNA, 25 bp, Artificial
  Probe
acgcgatgacagacacaggcggcgc

SEQ ID NO: 300264 - DNA, 25 bp, Artificial
  Probe
ataatgacgcgatgacagacacagg

SEQ ID NO: 300265 - DNA, 25 bp, Artificial
  Probe
gaccagttcgactataatgacgcga

SEQ ID NO: 300266 - DNA, 25 bp, Artificial
  Probe
ccgacagagcaccaaaggccactag

SEQ ID NO: 300267 - DNA, 25 bp, Artificial
  Probe
tcgcgcagcgaaacaaagccgacag

SEQ ID NO: 300268 - DNA, 25 bp, Artificial
  Probe
tataatgacgcgatgacagacacag

SEQ ID NO: 300269 - DNA, 25 bp, Artificial
  Probe
gcaccaaaggccactaggatgcatg

SEQ ID NO: 300270 - DNA, 25 bp, Artificial
  Probe
ggggccagggaccagttcgactata

SEQ ID NO: 300271 - DNA, 25 bp, Artificial
  Probe
cgcagcgaaacaaagccgacagagc

SEQ ID NO: 300272 - DNA, 25 bp, Artificial
  Probe
cggcagaatcccttcgcgcagcgaa

SEQ ID NO: 300273 - DNA, 25 bp, Artificial
  Probe
atgacgcgatgacagacacaggcgg

SEQ ID NO: 300274 - DNA, 25 bp, Artificial
  Probe
atcccttcgcgcagcgaaacaaagc

SEQ ID NO: 300275 - DNA, 25 bp, Artificial
  Probe
cggcgtaccacttaacgcggcagaa

SEQ ID NO: 300276 - DNA, 25 bp, Artificial
  Probe
tcgactataatgacgcgatgacaga

SEQ ID NO: 300277 - DNA, 25 bp, Artificial
  Probe
ctcgatcctccgaaaacagacgagc

SEQ ID NO: 300278 - DNA, 25 bp, Artificial
  Probe
tccgaaaacagacgagcacactcga

SEQ ID NO: 300279 - DNA, 25 bp, Artificial
  Probe
cacaggcggcgcacacaaagtggcg

SEQ ID NO: 300280 - DNA, 25 bp, Artificial
  Probe
gcgatgacagacacaggcggcgcac

SEQ ID NO: 300281 - DNA, 25 bp, Artificial
  Probe
ttcgactataatgacgcgatgacag

SEQ ID NO: 300282 - DNA, 25 bp, Artificial
  Probe
gggccagggaccagttcgactataa

SEQ ID NO: 300283 - DNA, 25 bp, Artificial
  Probe
aacgcggcagaatcccttcgcgcag

SEQ ID NO: 300284 - DNA, 25 bp, Artificial
  Probe
ccggcgtaccacttaacgcggcaga

SEQ ID NO: 300285 - DNA, 25 bp, Artificial
  Probe
caaagccgacagagcaccaaaggcc

SEQ ID NO: 300286 - DNA, 25 bp, Artificial
  Probe
agttcgactataatgacgcgatgac

SEQ ID NO: 300287 - DNA, 25 bp, Artificial
  Probe
atcctccgaaaacagacgagcacac

SEQ ID NO: 300288 - DNA, 25 bp, Artificial
  Probe
acaggcggcgcacacaaagtggcga

SEQ ID NO: 300289 - DNA, 25 bp, Artificial
  Probe
acttaacgcggcagaatcccttcgc

SEQ ID NO: 300290 - DNA, 25 bp, Artificial
  Probe
gttcgactataatgacgcgatgaca

SEQ ID NO: 300291 - DNA, 25 bp, Artificial
  Probe
ttcgcgcagcgaaacaaagccgaca

SEQ ID NO: 300292 - DNA, 25 bp, Artificial
  Probe
gatgacagacacaggcggcgcacac

SEQ ID NO: 300293 - DNA, 25 bp, Artificial
  Probe
ggcagaatcccttcgcgcagcgaaa

SEQ ID NO: 300294 - DNA, 25 bp, Artificial
  Probe
acagagcaccaaaggccactaggat

SEQ ID NO: 300295 - DNA, 25 bp, Artificial
  Probe
accagttcgactataatgacgcgat

SEQ ID NO: 300296 - DNA, 25 bp, Artificial
  Probe
ctccgaaaacagacgagcacactcg

SEQ ID NO: 300297 - DNA, 25 bp, Artificial
  Probe
cttcgcgcagcgaaacaaagccgac

SEQ ID NO: 300298 - DNA, 25 bp, Artificial
  Probe
tgacgcgatgacagacacaggcggc

SEQ ID NO: 300299 - DNA, 25 bp, Artificial
  Probe
gcgcacacaaagtggcgagtgaaaa

SEQ ID NO: 300300 - DNA, 25 bp, Artificial
  Probe
cgcgatgacagacacaggcggcgca

SEQ ID NO: 300301 - DNA, 25 bp, Artificial
  Probe
cgaaaacagacgagcacactcgagg

SEQ ID NO: 300302 - DNA, 25 bp, Artificial
  Probe
aaacgccatgtctgtctttaaactg

SEQ ID NO: 300303 - DNA, 25 bp, Artificial
  Probe
gggctcctgtttggaggtcaatgct

SEQ ID NO: 300304 - DNA, 25 bp, Artificial
  Probe
tgccccaaaaacaggaaggcagtgt

SEQ ID NO: 300305 - DNA, 25 bp, Artificial
  Probe
cgccatgtctgtctttaaactgacc

SEQ ID NO: 300306 - DNA, 25 bp, Artificial
  Probe
gtctcttaaaccagcctagtaactg

SEQ ID NO: 300307 - DNA, 25 bp, Artificial
  Probe
cacgctcttacaaacgccatgtctg

SEQ ID NO: 300308 - DNA, 25 bp, Artificial
  Probe
gatacgtctcttaaaccagcctagt

SEQ ID NO: 300309 - DNA, 25 bp, Artificial
  Probe
tgatggacaatacttcccagagtag

SEQ ID NO: 300310 - DNA, 25 bp, Artificial
  Probe
gaataagcttgctgtggtctatgct

SEQ ID NO: 300311 - DNA, 25 bp, Artificial
  Probe
ccccaacgtgatggacaatacttcc

SEQ ID NO: 300312 - DNA, 25 bp, Artificial
  Probe
tttaaagtccccaacgtgatggaca

SEQ ID NO: 300313 - DNA, 25 bp, Artificial
  Probe
gccccaaaaacaggaaggcagtgta

SEQ ID NO: 300314 - DNA, 25 bp, Artificial
  Probe
tgctgtggtctatgctcccatcacg

SEQ ID NO: 300315 - DNA, 25 bp, Artificial
  Probe
tgtggtctatgctcccatcacgctc

SEQ ID NO: 300316 - DNA, 25 bp, Artificial
  Probe
tcaaaattcaagtccattgggttga

SEQ ID NO: 300317 - DNA, 25 bp, Artificial
  Probe
aatacttcccagagtagaaatggac

SEQ ID NO: 300318 - DNA, 25 bp, Artificial
  Probe
ggctcctgtttggaggtcaatgctg

SEQ ID NO: 300319 - DNA, 25 bp, Artificial
  Probe
cttcccagagtagaaatggacacga

SEQ ID NO: 300320 - DNA, 25 bp, Artificial
  Probe
gcttgctgtggtctatgctcccatc

SEQ ID NO: 300321 - DNA, 25 bp, Artificial
  Probe
tccccaacgtgatggacaatacttc

SEQ ID NO: 300322 - DNA, 25 bp, Artificial
  Probe
tttcaaaattcaagtccattgggtt

SEQ ID NO: 300323 - DNA, 25 bp, Artificial
  Probe
agctttcaaaattcaagtccattgg

SEQ ID NO: 300324 - DNA, 25 bp, Artificial
  Probe
acttcccagagtagaaatggacacg

SEQ ID NO: 300325 - DNA, 25 bp, Artificial
  Probe
atggacaatacttcccagagtagaa

SEQ ID NO: 300326 - DNA, 25 bp, Artificial
  Probe
gccatgtctgtctttaaactgaccc

SEQ ID NO: 300327 - DNA, 25 bp, Artificial
  Probe
acgctcttacaaacgccatgtctgt

SEQ ID NO: 300328 - DNA, 25 bp, Artificial
  Probe
ataagcttgctgtggtctatgctcc

SEQ ID NO: 300329 - DNA, 25 bp, Artificial
  Probe
tttcgaatacagcaactggggacca

SEQ ID NO: 300330 - DNA, 25 bp, Artificial
  Probe
aaagtccccaacgtgatggacaata

SEQ ID NO: 300331 - DNA, 25 bp, Artificial
  Probe
atgtctgtctttaaactgacccccg

SEQ ID NO: 300332 - DNA, 25 bp, Artificial
  Probe
gaatacagcaactggggaccatgag

SEQ ID NO: 300333 - DNA, 25 bp, Artificial
  Probe
ctttcaaaattcaagtccattgggt

SEQ ID NO: 300334 - DNA, 25 bp, Artificial
  Probe
acaatacttcccagagtagaaatgg

SEQ ID NO: 300335 - DNA, 25 bp, Artificial
  Probe
tgtttggaggtcaatgctgcctgcc

SEQ ID NO: 300336 - DNA, 25 bp, Artificial
  Probe
gggaaaatcacagctttcaaaattc

SEQ ID NO: 300337 - DNA, 25 bp, Artificial
  Probe
caatacttcccagagtagaaatgga

SEQ ID NO: 300338 - DNA, 25 bp, Artificial
  Probe
ctgtggtctatgctcccatcacgct

SEQ ID NO: 300339 - DNA, 25 bp, Artificial
  Probe
ctgtttggaggtcaatgctgcctgc

SEQ ID NO: 300340 - DNA, 25 bp, Artificial
  Probe
agatacgtctcttaaaccagcctag

SEQ ID NO: 300341 - DNA, 25 bp, Artificial
  Probe
ccttttcgaatacagcaactgggga

SEQ ID NO: 300342 - DNA, 25 bp, Artificial
  Probe
aatggacacgaataagcttgctgtg

SEQ ID NO: 300343 - DNA, 25 bp, Artificial
  Probe
cacgaataagcttgctgtggtctat

SEQ ID NO: 300344 - DNA, 25 bp, Artificial
  Probe
cctgtttggaggtcaatgctgcctg

SEQ ID NO: 300345 - DNA, 25 bp, Artificial
  Probe
tctgtctttaaactgacccccgtgg

SEQ ID NO: 300346 - DNA, 25 bp, Artificial
  Probe
taagcttgctgtggtctatgctccc

SEQ ID NO: 300347 - DNA, 25 bp, Artificial
  Probe
ggacacgaataagcttgctgtggtc

SEQ ID NO: 300348 - DNA, 25 bp, Artificial
  Probe
tgcgcctcttgtgacttttcagcca

SEQ ID NO: 300349 - DNA, 25 bp, Artificial
  Probe
tggtgacttgtgatcagtgtcatcg

SEQ ID NO: 300350 - DNA, 25 bp, Artificial
  Probe
gtgctaagtccatgttttgtacaat

SEQ ID NO: 300351 - DNA, 25 bp, Artificial
  Probe
cgcattgagtgttgatgctggtgac

SEQ ID NO: 300352 - DNA, 25 bp, Artificial
  Probe
cagttgcgcctcttgtgacttttca

SEQ ID NO: 300353 - DNA, 25 bp, Artificial
  Probe
gtcatcgtgctaagtccatgttttg

SEQ ID NO: 300354 - DNA, 25 bp, Artificial
  Probe
tgctaagtccatgttttgtacaatt

SEQ ID NO: 300355 - DNA, 25 bp, Artificial
  Probe
tgatcagtgtcatcgtgctaagtcc

SEQ ID NO: 300356 - DNA, 25 bp, Artificial
  Probe
agtgtcatcgtgctaagtccatgtt

SEQ ID NO: 300357 - DNA, 25 bp, Artificial
  Probe
accgcattgagtgttgatgctggtg

SEQ ID NO: 300358 - DNA, 25 bp, Artificial
  Probe
tatgtaaagtttccagttgcgcctc

SEQ ID NO: 300359 - DNA, 25 bp, Artificial
  Probe
tttacctgagcttgtcgtgggaagt

SEQ ID NO: 300360 - DNA, 25 bp, Artificial
  Probe
catcgtgctaagtccatgttttgta

SEQ ID NO: 300361 - DNA, 25 bp, Artificial
  Probe
taaagtttccagttgcgcctcttgt

SEQ ID NO: 300362 - DNA, 25 bp, Artificial
  Probe
tatttacctgagcttgtcgtgggaa

SEQ ID NO: 300363 - DNA, 25 bp, Artificial
  Probe
cttgtgatcagtgtcatcgtgctaa

SEQ ID NO: 300364 - DNA, 25 bp, Artificial
  Probe
agttgcgcctcttgtgacttttcag

SEQ ID NO: 300365 - DNA, 25 bp, Artificial
  Probe
atgtaaagtttccagttgcgcctct

SEQ ID NO: 300366 - DNA, 25 bp, Artificial
  Probe
ttgtgacttttcagccagtaccatt

SEQ ID NO: 300367 - DNA, 25 bp, Artificial
  Probe
gtgtcatcgtgctaagtccatgttt

SEQ ID NO: 300368 - DNA, 25 bp, Artificial
  Probe
aaagtttccagttgcgcctcttgtg

SEQ ID NO: 300369 - DNA, 25 bp, Artificial
  Probe
ctcttgtgacttttcagccagtacc

SEQ ID NO: 300370 - DNA, 25 bp, Artificial
  Probe
tttatttacctgagcttgtcgtggg

SEQ ID NO: 300371 - DNA, 25 bp, Artificial
  Probe
gtgacttgtgatcagtgtcatcgtg

SEQ ID NO: 300372 - DNA, 25 bp, Artificial
  Probe
gtgatcagtgtcatcgtgctaagtc

SEQ ID NO: 300373 - DNA, 25 bp, Artificial
  Probe
cgcctcttgtgacttttcagccagt

SEQ ID NO: 300374 - DNA, 25 bp, Artificial
  Probe
gacttgtgatcagtgtcatcgtgct

SEQ ID NO: 300375 - DNA, 25 bp, Artificial
  Probe
gtatgtaaagtttccagttgcgcct

SEQ ID NO: 300376 - DNA, 25 bp, Artificial
  Probe
agtaaaccgcattgagtgttgatgc

SEQ ID NO: 300377 - DNA, 25 bp, Artificial
  Probe
cagtgtcatcgtgctaagtccatgt

SEQ ID NO: 300378 - DNA, 25 bp, Artificial
  Probe
aaaccgcattgagtgttgatgctgg

SEQ ID NO: 300379 - DNA, 25 bp, Artificial
  Probe
tcttgtgacttttcagccagtacca

SEQ ID NO: 300380 - DNA, 25 bp, Artificial
  Probe
tcagtgtcatcgtgctaagtccatg

SEQ ID NO: 300381 - DNA, 25 bp, Artificial
  Probe
tccagttgcgcctcttgtgactttt

SEQ ID NO: 300382 - DNA, 25 bp, Artificial
  Probe
cctcttgtgacttttcagccagtac

SEQ ID NO: 300383 - DNA, 25 bp, Artificial
  Probe
tgacttgtgatcagtgtcatcgtgc

SEQ ID NO: 300384 - DNA, 25 bp, Artificial
  Probe
tgctggtgacttgtgatcagtgtca

SEQ ID NO: 300385 - DNA, 25 bp, Artificial
  Probe
gctggtgacttgtgatcagtgtcat

SEQ ID NO: 300386 - DNA, 25 bp, Artificial
  Probe
ccgcattgagtgttgatgctggtga

SEQ ID NO: 300387 - DNA, 25 bp, Artificial
  Probe
atgctggtgacttgtgatcagtgtc

SEQ ID NO: 300388 - DNA, 25 bp, Artificial
  Probe
gtaaaccgcattgagtgttgatgct

SEQ ID NO: 300389 - DNA, 25 bp, Artificial
  Probe
ttatttacctgagcttgtcgtggga

SEQ ID NO: 300390 - DNA, 25 bp, Artificial
  Probe
gcctcttgtgacttttcagccagta

SEQ ID NO: 300391 - DNA, 25 bp, Artificial
  Probe
ttacctgagcttgtcgtgggaagtg

SEQ ID NO: 300392 - DNA, 25 bp, Artificial
  Probe
tcgtgctaagtccatgttttgtaca

SEQ ID NO: 300393 - DNA, 25 bp, Artificial
  Probe
cgtgctaagtccatgttttgtacaa

SEQ ID NO: 300394 - DNA, 25 bp, Artificial
  Probe
cgtggtaattcacatcaccatgtct

SEQ ID NO: 300395 - DNA, 25 bp, Artificial
  Probe
tctgcatggattcggcatgcccaac

SEQ ID NO: 300396 - DNA, 25 bp, Artificial
  Probe
catggattcggcatgcccaacgtgg

SEQ ID NO: 300397 - DNA, 25 bp, Artificial
  Probe
catgcccaacgtggtaattcacatc

SEQ ID NO: 300398 - DNA, 25 bp, Artificial
  Probe
ttcggcatgcccaacgtggtaattc

SEQ ID NO: 300399 - DNA, 25 bp, Artificial
  Probe
tagcagcccggtgttctgcatggat

SEQ ID NO: 300400 - DNA, 25 bp, Artificial
  Probe
aatgatgtcaggtagcagcccggtg

SEQ ID NO: 300401 - DNA, 25 bp, Artificial
  Probe
cagcccggtgttctgcatggattcg

SEQ ID NO: 300402 - DNA, 25 bp, Artificial
  Probe
cggtgttctgcatggattcggcatg

SEQ ID NO: 300403 - DNA, 25 bp, Artificial
  Probe
gatgtcaggtagcagcccggtgttc

SEQ ID NO: 300404 - DNA, 25 bp, Artificial
  Probe
cggcatgcccaacgtggtaattcac

SEQ ID NO: 300405 - DNA, 25 bp, Artificial
  Probe
gtggtaattcacatcaccatgtctc

SEQ ID NO: 300406 - DNA, 25 bp, Artificial
  Probe
tcggcatgcccaacgtggtaattca

SEQ ID NO: 300407 - DNA, 25 bp, Artificial
  Probe
agcccggtgttctgcatggattcgg

SEQ ID NO: 300408 - DNA, 25 bp, Artificial
  Probe
ggtagcagcccggtgttctgcatgg

SEQ ID NO: 300409 - DNA, 25 bp, Artificial
  Probe
gcagcccggtgttctgcatggattc

SEQ ID NO: 300410 - DNA, 25 bp, Artificial
  Probe
gtgttctgcatggattcggcatgcc

SEQ ID NO: 300411 - DNA, 25 bp, Artificial
  Probe
atgcccaacgtggtaattcacatca

SEQ ID NO: 300412 - DNA, 25 bp, Artificial
  Probe
atggattcggcatgcccaacgtggt

SEQ ID NO: 300413 - DNA, 25 bp, Artificial
  Probe
ccggtgttctgcatggattcggcat

SEQ ID NO: 300414 - DNA, 25 bp, Artificial
  Probe
tgtctcctttgctcttgccaaaaag

SEQ ID NO: 300415 - DNA, 25 bp, Artificial
  Probe
gcccggtgttctgcatggattcggc

SEQ ID NO: 300416 - DNA, 25 bp, Artificial
  Probe
accaatgatgtcaggtagcagcccg

SEQ ID NO: 300417 - DNA, 25 bp, Artificial
  Probe
atgatgtcaggtagcagcccggtgt

SEQ ID NO: 300418 - DNA, 25 bp, Artificial
  Probe
aaccaatgatgtcaggtagcagccc

SEQ ID NO: 300419 - DNA, 25 bp, Artificial
  Probe
tgatgtcaggtagcagcccggtgtt

SEQ ID NO: 300420 - DNA, 25 bp, Artificial
  Probe
gttctgcatggattcggcatgccca

SEQ ID NO: 300421 - DNA, 25 bp, Artificial
  Probe
atgtcaggtagcagcccggtgttct

SEQ ID NO: 300422 - DNA, 25 bp, Artificial
  Probe
agcagcccggtgttctgcatggatt

SEQ ID NO: 300423 - DNA, 25 bp, Artificial
  Probe
ggtgttctgcatggattcggcatgc

SEQ ID NO: 300424 - DNA, 25 bp, Artificial
  Probe
tgcccaacgtggtaattcacatcac

SEQ ID NO: 300425 - DNA, 25 bp, Artificial
  Probe
aaaccaatgatgtcaggtagcagcc

SEQ ID NO: 300426 - DNA, 25 bp, Artificial
  Probe
attcggcatgcccaacgtggtaatt

SEQ ID NO: 300427 - DNA, 25 bp, Artificial
  Probe
cccggtgttctgcatggattcggca

SEQ ID NO: 300428 - DNA, 25 bp, Artificial
  Probe
aaaaccaatgatgtcaggtagcagc

SEQ ID NO: 300429 - DNA, 25 bp, Artificial
  Probe
cccaacgtggtaattcacatcacca

SEQ ID NO: 300430 - DNA, 25 bp, Artificial
  Probe
acgtggtaattcacatcaccatgtc

SEQ ID NO: 300431 - DNA, 25 bp, Artificial
  Probe
gcatgcccaacgtggtaattcacat

SEQ ID NO: 300432 - DNA, 25 bp, Artificial
  Probe
tgttctgcatggattcggcatgccc

SEQ ID NO: 300433 - DNA, 25 bp, Artificial
  Probe
ccaatgatgtcaggtagcagcccgg

SEQ ID NO: 300434 - DNA, 25 bp, Artificial
  Probe
gtagcagcccggtgttctgcatgga

SEQ ID NO: 300435 - DNA, 25 bp, Artificial
  Probe
gcccaacgtggtaattcacatcacc

SEQ ID NO: 300436 - DNA, 25 bp, Artificial
  Probe
tgtcaggtagcagcccggtgttctg

SEQ ID NO: 300437 - DNA, 25 bp, Artificial
  Probe
ggcatgcccaacgtggtaattcaca

SEQ ID NO: 300438 - DNA, 25 bp, Artificial
  Probe
caatgatgtcaggtagcagcccggt

SEQ ID NO: 300439 - DNA, 25 bp, Artificial
  Probe
ttctgcatggattcggcatgcccaa

SEQ ID NO: 300440 - DNA, 25 bp, Artificial
  Probe
ggacgaacttacaatcccacagcca

SEQ ID NO: 300441 - DNA, 25 bp, Artificial
  Probe
ggaataatcagctatttcctaagtc

SEQ ID NO: 300442 - DNA, 25 bp, Artificial
  Probe
atcaagataccttccgggtgtgaac

SEQ ID NO: 300443 - DNA, 25 bp, Artificial
  Probe
agagccaaagccatcttcctctgaa

SEQ ID NO: 300444 - DNA, 25 bp, Artificial
  Probe
ccaccggtaggagaagtggaagcct

SEQ ID NO: 300445 - DNA, 25 bp, Artificial
  Probe
tgcaggccattcagccaccacagaa

SEQ ID NO: 300446 - DNA, 25 bp, Artificial
  Probe
gatttcttccttttccggaaatgca

SEQ ID NO: 300447 - DNA, 25 bp, Artificial
  Probe
ccacttggcgcctctgggtgcgtcg

SEQ ID NO: 300448 - DNA, 25 bp, Artificial
  Probe
attgtgaaccgcacacagccagtcc

SEQ ID NO: 300449 - DNA, 25 bp, Artificial
  Probe
tccaagaagccgagcatggatgcct

SEQ ID NO: 300450 - DNA, 25 bp, Artificial
  Probe
ataccaacgaatccagtcagcacag

SEQ ID NO: 300451 - DNA, 25 bp, Artificial
  Probe
ggcggacctcgctttcaagaggagt

SEQ ID NO: 300452 - DNA, 25 bp, Artificial
  Probe
cctctgggtgcgtcggctgccgact

SEQ ID NO: 300453 - DNA, 25 bp, Artificial
  Probe
gcagctgcagcctccagagccaaag

SEQ ID NO: 300454 - DNA, 25 bp, Artificial
  Probe
tgaaacaatcaagataccttccggg

SEQ ID NO: 300455 - DNA, 25 bp, Artificial
  Probe
ggtgtgaaccccaagaacgtgtctt

SEQ ID NO: 300456 - DNA, 25 bp, Artificial
  Probe
aagtggaagcctgaagcattgctcc

SEQ ID NO: 300457 - DNA, 25 bp, Artificial
  Probe
aggagtaacgcagcagggaaccttg

SEQ ID NO: 300458 - DNA, 25 bp, Artificial
  Probe
acctccaaagcagcagggtcaccat

SEQ ID NO: 300459 - DNA, 25 bp, Artificial
  Probe
tcccctcggtgcacgggaggacaga

SEQ ID NO: 300460 - DNA, 25 bp, Artificial
  Probe
aggacgcacacaaccgtgggcgcct

SEQ ID NO: 300461 - DNA, 25 bp, Artificial
  Probe
acatccttgatcagcctgccgggca

SEQ ID NO: 300462 - DNA, 25 bp, Artificial
  Probe
cagaacacagtggttcagccacctc

SEQ ID NO: 300463 - DNA, 25 bp, Artificial
  Probe
tctcaatattgtgaaccgcacacag

SEQ ID NO: 300464 - DNA, 25 bp, Artificial
  Probe
ggatccaaagaaacggccaactgca

SEQ ID NO: 300465 - DNA, 25 bp, Artificial
  Probe
agcatggatgccttcaaggaaaaaa

SEQ ID NO: 300466 - DNA, 25 bp, Artificial
  Probe
gatgtttccaagtatcgtcaaaacc

SEQ ID NO: 300467 - DNA, 25 bp, Artificial
  Probe
gccccttgatcctgggagacgtcta

SEQ ID NO: 300468 - DNA, 25 bp, Artificial
  Probe
atgccagtagtgaggctattcagct

SEQ ID NO: 300469 - DNA, 25 bp, Artificial
  Probe
gatcagctggccagaggatccactt

SEQ ID NO: 300470 - DNA, 25 bp, Artificial
  Probe
acgtgtctttggtagctggcggcaa

SEQ ID NO: 300471 - DNA, 25 bp, Artificial
  Probe
cgctaagcagtactatttgaaacaa

SEQ ID NO: 300472 - DNA, 25 bp, Artificial
  Probe
cttgtcaactgcttcaaccgctaag

SEQ ID NO: 300473 - DNA, 25 bp, Artificial
  Probe
tcccagtctccaaccacttgaaggg

SEQ ID NO: 300474 - DNA, 25 bp, Artificial
  Probe
tggagcacaaaaactggccgaggcc

SEQ ID NO: 300475 - DNA, 25 bp, Artificial
  Probe
ggatcctaagcctttgccaaacatc

SEQ ID NO: 300476 - DNA, 25 bp, Artificial
  Probe
tgctccgtagaggacaatcacgccc

SEQ ID NO: 300477 - DNA, 25 bp, Artificial
  Probe
ctttctcaagaaagaagtgggatca

SEQ ID NO: 300478 - DNA, 25 bp, Artificial
  Probe
cagaagcaggactcccagtctccaa

SEQ ID NO: 300479 - DNA, 25 bp, Artificial
  Probe
ttcctaagtctctgggatccatggg

SEQ ID NO: 300480 - DNA, 25 bp, Artificial
  Probe
agtcagcacagtaggccataagggg

SEQ ID NO: 300481 - DNA, 25 bp, Artificial
  Probe
tgacagaaatgcttaactgggatcc

SEQ ID NO: 300482 - DNA, 25 bp, Artificial
  Probe
ggggtcagacagtcttcaagtctgg

SEQ ID NO: 300483 - DNA, 25 bp, Artificial
  Probe
gaaggagtctccatttcggtttcca

SEQ ID NO: 300484 - DNA, 25 bp, Artificial
  Probe
aggactgcgacttgggagcctccca

SEQ ID NO: 300485 - DNA, 25 bp, Artificial
  Probe
ccggaagtcagctcccgatttcttc

SEQ ID NO: 300486 - DNA, 25 bp, Artificial
  Probe
atcaagaacaagaacctggactggt

SEQ ID NO: 300487 - DNA, 25 bp, Artificial
  Probe
aacgtctgggcttcgtggacgtgca

SEQ ID NO: 300488 - DNA, 25 bp, Artificial
  Probe
agatcctagaagaggacgaggagct

SEQ ID NO: 300489 - DNA, 25 bp, Artificial
  Probe
ccaagccaggctctggccagcggga

SEQ ID NO: 300490 - DNA, 25 bp, Artificial
  Probe
tacctgtacttcattgtgctggtcc

SEQ ID NO: 300491 - DNA, 25 bp, Artificial
  Probe
aagacagactacacgggccccgaga

SEQ ID NO: 300492 - DNA, 25 bp, Artificial
  Probe
ctggagcacaacatgtggaactacc

SEQ ID NO: 300493 - DNA, 25 bp, Artificial
  Probe
tactctgcttatgtgtattgtcacc

SEQ ID NO: 300494 - DNA, 25 bp, Artificial
  Probe
tgccaccctggctaggaaggtggta

SEQ ID NO: 300495 - DNA, 25 bp, Artificial
  Probe
agccctccaaagacgagtcgctctt

SEQ ID NO: 300496 - DNA, 25 bp, Artificial
  Probe
ctacgtggctcagatgatcaagaac

SEQ ID NO: 300497 - DNA, 25 bp, Artificial
  Probe
aacgagatccgcatcctgcaggaga

SEQ ID NO: 300498 - DNA, 25 bp, Artificial
  Probe
caacgtctgggcttcgtggacgtgc

SEQ ID NO: 300499 - DNA, 25 bp, Artificial
  Probe
accctggctaggaaggtggtagcct

SEQ ID NO: 300500 - DNA, 25 bp, Artificial
  Probe
gcaagccctccaaagacgagtcgct

SEQ ID NO: 300501 - DNA, 25 bp, Artificial
  Probe
tccaaagacgagtcgctcttcccag

SEQ ID NO: 300502 - DNA, 25 bp, Artificial
  Probe
gaagagcacatcaaactggagcaca

SEQ ID NO: 300503 - DNA, 25 bp, Artificial
  Probe
tgcttagtaagtacccttgaagaga

SEQ ID NO: 300504 - DNA, 25 bp, Artificial
  Probe
agtgtcctttgaagagcacatcaaa

SEQ ID NO: 300505 - DNA, 25 bp, Artificial
  Probe
atgaaccacggactgaggaacggtg

SEQ ID NO: 300506 - DNA, 25 bp, Artificial
  Probe
gtctctgaggtctcggtgcctgaga

SEQ ID NO: 300507 - DNA, 25 bp, Artificial
  Probe
cagctcaatgagctcaaggaacaga

SEQ ID NO: 300508 - DNA, 25 bp, Artificial
  Probe
ccgcatcctgcaggagaagcttggc

SEQ ID NO: 300509 - DNA, 25 bp, Artificial
  Probe
cagaactgcatgagccgctgagcag

SEQ ID NO: 300510 - DNA, 25 bp, Artificial
  Probe
tgcctgccaccctggctaggaaggt

SEQ ID NO: 300511 - DNA, 25 bp, Artificial
  Probe
catcctgcaggagaagcttggctcc

SEQ ID NO: 300512 - DNA, 25 bp, Artificial
  Probe
tcaggtcaggtagaagccaggtgcc

SEQ ID NO: 300513 - DNA, 25 bp, Artificial
  Probe
acgagtcgctcttcccagccagggt

SEQ ID NO: 300514 - DNA, 25 bp, Artificial
  Probe
ggtccgtgtcaagaacaagacagac

SEQ ID NO: 300515 - DNA, 25 bp, Artificial
  Probe
ggcttcgtggacgtgcagaactgca

SEQ ID NO: 300516 - DNA, 25 bp, Artificial
  Probe
agaggaaatcctcaagaccacgtgc

SEQ ID NO: 300517 - DNA, 25 bp, Artificial
  Probe
tcctttgaagagcacatcaaactgg

SEQ ID NO: 300518 - DNA, 25 bp, Artificial
  Probe
ccgcccttccttcaggtcaggtaga

SEQ ID NO: 300519 - DNA, 25 bp, Artificial
  Probe
ggactggttcccacggatgcgcgcc

SEQ ID NO: 300520 - DNA, 25 bp, Artificial
  Probe
gagtgccagagcagagcacggtcct

SEQ ID NO: 300521 - DNA, 25 bp, Artificial
  Probe
taagtacccttgaagagactcggtt

SEQ ID NO: 300522 - DNA, 25 bp, Artificial
  Probe
cctcctgtggcctgctggggacagt

SEQ ID NO: 300523 - DNA, 25 bp, Artificial
  Probe
acagagcgggcctgtgatactctgc

SEQ ID NO: 300524 - DNA, 25 bp, Artificial
  Probe
cgtggctcagatgatcaagaacaag

SEQ ID NO: 300525 - DNA, 25 bp, Artificial
  Probe
ggtctcggtgcctgagatcctagaa

SEQ ID NO: 300526 - DNA, 25 bp, Artificial
  Probe
gtcaagaacaagacagactacacgg

SEQ ID NO: 300527 - DNA, 25 bp, Artificial
  Probe
ggaaatcctcaagaccacgtgcttc

SEQ ID NO: 300528 - DNA, 25 bp, Artificial
  Probe
gaacaagaacctggactggttccca

SEQ ID NO: 300529 - DNA, 25 bp, Artificial
  Probe
tgatcaagaacaagaacctggactg

SEQ ID NO: 300530 - DNA, 25 bp, Artificial
  Probe
agcagaacgagatccgcatcctgca

SEQ ID NO: 300531 - DNA, 25 bp, Artificial
  Probe
atgaagctggtctcgcacctcaccg

SEQ ID NO: 300532 - DNA, 25 bp, Artificial
  Probe
tccaacagccccactgaagggaagg

SEQ ID NO: 300533 - DNA, 25 bp, Artificial
  Probe
tccgcaggggtccaacagccccact

SEQ ID NO: 300534 - DNA, 25 bp, Artificial
  Probe
caggggtccaacagccccactgaag

SEQ ID NO: 300535 - DNA, 25 bp, Artificial
  Probe
ttgtgctgccctggagttgtcccct

SEQ ID NO: 300536 - DNA, 25 bp, Artificial
  Probe
cttgtgctgccctggagttgtcccc

SEQ ID NO: 300537 - DNA, 25 bp, Artificial
  Probe
ggcccttgtgctgccctggagttgt

SEQ ID NO: 300538 - DNA, 25 bp, Artificial
  Probe
ctgatggcccttgtgctgccctgga

SEQ ID NO: 300539 - DNA, 25 bp, Artificial
  Probe
ctctcctttcttcctgcctgtgttc

SEQ ID NO: 300540 - DNA, 25 bp, Artificial
  Probe
ctggagttgtcccctccgcaggggt

SEQ ID NO: 300541 - DNA, 25 bp, Artificial
  Probe
cccttgtgctgccctggagttgtcc

SEQ ID NO: 300542 - DNA, 25 bp, Artificial
  Probe
cactgatggcccttgtgctgccctg

SEQ ID NO: 300543 - DNA, 25 bp, Artificial
  Probe
tggcccttgtgctgccctggagttg

SEQ ID NO: 300544 - DNA, 25 bp, Artificial
  Probe
cctggagttgtcccctccgcagggg

SEQ ID NO: 300545 - DNA, 25 bp, Artificial
  Probe
gtcactgatggcccttgtgctgccc

SEQ ID NO: 300546 - DNA, 25 bp, Artificial
  Probe
ctgccctggagttgtcccctccgca

SEQ ID NO: 300547 - DNA, 25 bp, Artificial
  Probe
tctgacactctcctttcttcctgcc

SEQ ID NO: 300548 - DNA, 25 bp, Artificial
  Probe
gccctggagttgtcccctccgcagg

SEQ ID NO: 300549 - DNA, 25 bp, Artificial
  Probe
ctcctttcttcctgcctgtgttcta

SEQ ID NO: 300550 - DNA, 25 bp, Artificial
  Probe
ctctgacactctcctttcttcctgc

SEQ ID NO: 300551 - DNA, 25 bp, Artificial
  Probe
ccgcaggggtccaacagccccactg

SEQ ID NO: 300552 - DNA, 25 bp, Artificial
  Probe
gtcccctccgcaggggtccaacagc

SEQ ID NO: 300553 - DNA, 25 bp, Artificial
  Probe
gcccttgtgctgccctggagttgtc

SEQ ID NO: 300554 - DNA, 25 bp, Artificial
  Probe
caacagccccactgaagggaagggg

SEQ ID NO: 300555 - DNA, 25 bp, Artificial
  Probe
actgatggcccttgtgctgccctgg

SEQ ID NO: 300556 - DNA, 25 bp, Artificial
  Probe
tcccctccgcaggggtccaacagcc

SEQ ID NO: 300557 - DNA, 25 bp, Artificial
  Probe
tcactgatggcccttgtgctgccct

SEQ ID NO: 300558 - DNA, 25 bp, Artificial
  Probe
actctcctttcttcctgcctgtgtt

SEQ ID NO: 300559 - DNA, 25 bp, Artificial
  Probe
tgatggcccttgtgctgccctggag

SEQ ID NO: 300560 - DNA, 25 bp, Artificial
  Probe
tgtgctgccctggagttgtcccctc

SEQ ID NO: 300561 - DNA, 25 bp, Artificial
  Probe
aggggtccaacagccccactgaagg

SEQ ID NO: 300562 - DNA, 25 bp, Artificial
  Probe
cagccccactgaagggaaggggtgt

SEQ ID NO: 300563 - DNA, 25 bp, Artificial
  Probe
ctccgcaggggtccaacagccccac

SEQ ID NO: 300564 - DNA, 25 bp, Artificial
  Probe
tgtcactgatggcccttgtgctgcc

SEQ ID NO: 300565 - DNA, 25 bp, Artificial
  Probe
atggcccttgtgctgccctggagtt

SEQ ID NO: 300566 - DNA, 25 bp, Artificial
  Probe
attgtcactgatggcccttgtgctg

SEQ ID NO: 300567 - DNA, 25 bp, Artificial
  Probe
cattgtcactgatggcccttgtgct

SEQ ID NO: 300568 - DNA, 25 bp, Artificial
  Probe
gatggcccttgtgctgccctggagt

SEQ ID NO: 300569 - DNA, 25 bp, Artificial
  Probe
gtgctgccctggagttgtcccctcc

SEQ ID NO: 300570 - DNA, 25 bp, Artificial
  Probe
cctccgcaggggtccaacagcccca

SEQ ID NO: 300571 - DNA, 25 bp, Artificial
  Probe
ccattgtcactgatggcccttgtgc

SEQ ID NO: 300572 - DNA, 25 bp, Artificial
  Probe
tggagttgtcccctccgcaggggtc

SEQ ID NO: 300573 - DNA, 25 bp, Artificial
  Probe
ccttgtgctgccctggagttgtccc

SEQ ID NO: 300574 - DNA, 25 bp, Artificial
  Probe
gggtccaacagccccactgaaggga

SEQ ID NO: 300575 - DNA, 25 bp, Artificial
  Probe
tgacactctcctttcttcctgcctg

SEQ ID NO: 300576 - DNA, 25 bp, Artificial
  Probe
acagccccactgaagggaaggggtg

SEQ ID NO: 300577 - DNA, 25 bp, Artificial
  Probe
gccattgtcactgatggcccttgtg

SEQ ID NO: 300578 - DNA, 25 bp, Artificial
  Probe
tcttggccgttcctgatcctcctgt

SEQ ID NO: 300579 - DNA, 25 bp, Artificial
  Probe
tgacctcaagaaatggaaggagccc

SEQ ID NO: 300580 - DNA, 25 bp, Artificial
  Probe
aggctggagctctgtccacccgtgc

SEQ ID NO: 300581 - DNA, 25 bp, Artificial
  Probe
cgccacgagcagcttgtccggttct

SEQ ID NO: 300582 - DNA, 25 bp, Artificial
  Probe
atggattttatcacagcaaacagtg

SEQ ID NO: 300583 - DNA, 25 bp, Artificial
  Probe
gtttttatactccacatgctgcttg

SEQ ID NO: 300584 - DNA, 25 bp, Artificial
  Probe
cttgccactgggtgctgcctgtggt

SEQ ID NO: 300585 - DNA, 25 bp, Artificial
  Probe
tgtggcctctgaggatgagcttgcc

SEQ ID NO: 300586 - DNA, 25 bp, Artificial
  Probe
tgttaaacacacgtctggaataaaa

SEQ ID NO: 300587 - DNA, 25 bp, Artificial
  Probe
ctattggctgggaaggttccgatgt

SEQ ID NO: 300588 - DNA, 25 bp, Artificial
  Probe
ccaggggagcctcgacctctgcatg

SEQ ID NO: 300589 - DNA, 25 bp, Artificial
  Probe
cgctcaacagaaagcaggagatgag

SEQ ID NO: 300590 - DNA, 25 bp, Artificial
  Probe
tctcagcatgaagaggcaaaggctg

SEQ ID NO: 300591 - DNA, 25 bp, Artificial
  Probe
ttctgctttgaaagggcagcgcggt

SEQ ID NO: 300592 - DNA, 25 bp, Artificial
  Probe
cctacagcagcatgcgggcccggga

SEQ ID NO: 300593 - DNA, 25 bp, Artificial
  Probe
atagtgtatttatactccggagcac

SEQ ID NO: 300594 - DNA, 25 bp, Artificial
  Probe
cgagcacaagtcagtctgaggtagg

SEQ ID NO: 300595 - DNA, 25 bp, Artificial
  Probe
tgccgctcaacagaaagcaggagat

SEQ ID NO: 300596 - DNA, 25 bp, Artificial
  Probe
tgcgggcccgggagatcactgacct

SEQ ID NO: 300597 - DNA, 25 bp, Artificial
  Probe
tcacccgtggccagggagcctgtgt

SEQ ID NO: 300598 - DNA, 25 bp, Artificial
  Probe
gttagccctggctcggggagacttc

SEQ ID NO: 300599 - DNA, 25 bp, Artificial
  Probe
atggcactgtgctccctgcactgct

SEQ ID NO: 300600 - DNA, 25 bp, Artificial
  Probe
cgcggtagtgcctagaacgagcaca

SEQ ID NO: 300601 - DNA, 25 bp, Artificial
  Probe
gtgtatttatactccggagcacacc

SEQ ID NO: 300602 - DNA, 25 bp, Artificial
  Probe
tctctggatggagaagctgggctct

SEQ ID NO: 300603 - DNA, 25 bp, Artificial
  Probe
agaagatccctggatctctggagac

SEQ ID NO: 300604 - DNA, 25 bp, Artificial
  Probe
ctcctgtccttccaggttcgcgtag

SEQ ID NO: 300605 - DNA, 25 bp, Artificial
  Probe
aggttcgcgtagtcgctggagcccc

SEQ ID NO: 300606 - DNA, 25 bp, Artificial
  Probe
actcagctgccgtgcgctgccaggg

SEQ ID NO: 300607 - DNA, 25 bp, Artificial
  Probe
gaggaccagcccatcctgtggaatg

SEQ ID NO: 300608 - DNA, 25 bp, Artificial
  Probe
ggctgctgcccgacatgtgccttgc

SEQ ID NO: 300609 - DNA, 25 bp, Artificial
  Probe
gtgcctgcttcgtgccccgagattt

SEQ ID NO: 300610 - DNA, 25 bp, Artificial
  Probe
gctggatagcttccacctcatggcc

SEQ ID NO: 300611 - DNA, 25 bp, Artificial
  Probe
tggaaggagccctgccaacgggaac

SEQ ID NO: 300612 - DNA, 25 bp, Artificial
  Probe
gcgcgctgcgctcagggactcagct

SEQ ID NO: 300613 - DNA, 25 bp, Artificial
  Probe
aggggaccccaactgccaccagtat

SEQ ID NO: 300614 - DNA, 25 bp, Artificial
  Probe
gccaacgggaactctataaagtgtt

SEQ ID NO: 300615 - DNA, 25 bp, Artificial
  Probe
cgtgcctgcttcgtgccccgagatt

SEQ ID NO: 300616 - DNA, 25 bp, Artificial
  Probe
gcctgtgtactagaacctgccgcac

SEQ ID NO: 300617 - DNA, 25 bp, Artificial
  Probe
gtaatcaaagctaaacgtggaaagc

SEQ ID NO: 300618 - DNA, 25 bp, Artificial
  Probe
tggaataaaacattctacctggaaa

SEQ ID NO: 300619 - DNA, 25 bp, Artificial
  Probe
aagctgggctctgctggtgtgtcta

SEQ ID NO: 300620 - DNA, 25 bp, Artificial
  Probe
tgctggtgtgtctacccatggagtg

SEQ ID NO: 300621 - DNA, 25 bp, Artificial
  Probe
catctcagctcttccagagttctgc

SEQ ID NO: 300622 - DNA, 25 bp, Artificial
  Probe
aggggagcctcgacctctgcatgcc

SEQ ID NO: 300623 - DNA, 25 bp, Artificial
  Probe
catgctgcttgatgtacaagtgggt

SEQ ID NO: 300624 - DNA, 25 bp, Artificial
  Probe
aacgttgcacagactattttagtac

SEQ ID NO: 300625 - DNA, 25 bp, Artificial
  Probe
tttatttacagagtgcatgacgtgc

SEQ ID NO: 300626 - DNA, 25 bp, Artificial
  Probe
aggacctttcgagaaggcgaaagat

SEQ ID NO: 300627 - DNA, 25 bp, Artificial
  Probe
tacagagtgcatgacgtgccgattc

SEQ ID NO: 300628 - DNA, 25 bp, Artificial
  Probe
gagtgcatgacgtgccgattctact

SEQ ID NO: 300629 - DNA, 25 bp, Artificial
  Probe
aaacgttgcacagactattttagta

SEQ ID NO: 300630 - DNA, 25 bp, Artificial
  Probe
ttgcacagactattttagtaccatg

SEQ ID NO: 300631 - DNA, 25 bp, Artificial
  Probe
gttgcacagactattttagtaccat

SEQ ID NO: 300632 - DNA, 25 bp, Artificial
  Probe
tgtataaacgttgcacagactattt

SEQ ID NO: 300633 - DNA, 25 bp, Artificial
  Probe
ttacagagtgcatgacgtgccgatt

SEQ ID NO: 300634 - DNA, 25 bp, Artificial
  Probe
atttgtataaacgttgcacagacta

SEQ ID NO: 300635 - DNA, 25 bp, Artificial
  Probe
atagaaggacctttcgagaaggcga

SEQ ID NO: 300636 - DNA, 25 bp, Artificial
  Probe
tatttacagagtgcatgacgtgccg

SEQ ID NO: 300637 - DNA, 25 bp, Artificial
  Probe
tttgtataaacgttgcacagactat

SEQ ID NO: 300638 - DNA, 25 bp, Artificial
  Probe
tagaaggacctttcgagaaggcgaa

SEQ ID NO: 300639 - DNA, 25 bp, Artificial
  Probe
gaaggacctttcgagaaggcgaaag

SEQ ID NO: 300640 - DNA, 25 bp, Artificial
  Probe
cagagtgcatgacgtgccgattcta

SEQ ID NO: 300641 - DNA, 25 bp, Artificial
  Probe
tgacgtgccgattctactttacatt

SEQ ID NO: 300642 - DNA, 25 bp, Artificial
  Probe
ttgtataaacgttgcacagactatt

SEQ ID NO: 300643 - DNA, 25 bp, Artificial
  Probe
cgtgccgattctactttacatttgt

SEQ ID NO: 300644 - DNA, 25 bp, Artificial
  Probe
catgacgtgccgattctactttaca

SEQ ID NO: 300645 - DNA, 25 bp, Artificial
  Probe
taaacgttgcacagactattttagt

SEQ ID NO: 300646 - DNA, 25 bp, Artificial
  Probe
acgttgcacagactattttagtacc

SEQ ID NO: 300647 - DNA, 25 bp, Artificial
  Probe
cagactattttagtaccatgatttg

SEQ ID NO: 300648 - DNA, 25 bp, Artificial
  Probe
atttacagagtgcatgacgtgccga

SEQ ID NO: 300649 - DNA, 25 bp, Artificial
  Probe
ttatttacagagtgcatgacgtgcc

SEQ ID NO: 300650 - DNA, 25 bp, Artificial
  Probe
gtataaacgttgcacagactatttt

SEQ ID NO: 300651 - DNA, 25 bp, Artificial
  Probe
tgcacagactattttagtaccatga

SEQ ID NO: 300652 - DNA, 25 bp, Artificial
  Probe
gacctttcgagaaggcgaaagatgg

SEQ ID NO: 300653 - DNA, 25 bp, Artificial
  Probe
gacgtgccgattctactttacattt

SEQ ID NO: 300654 - DNA, 25 bp, Artificial
  Probe
agagtgcatgacgtgccgattctac

SEQ ID NO: 300655 - DNA, 25 bp, Artificial
  Probe
acagagtgcatgacgtgccgattct

SEQ ID NO: 300656 - DNA, 25 bp, Artificial
  Probe
taatagaaggacctttcgagaaggc

SEQ ID NO: 300657 - DNA, 25 bp, Artificial
  Probe
cgttgcacagactattttagtacca

SEQ ID NO: 300658 - DNA, 25 bp, Artificial
  Probe
aatagaaggacctttcgagaaggcg

SEQ ID NO: 300659 - DNA, 25 bp, Artificial
  Probe
acgtgccgattctactttacatttg

SEQ ID NO: 300660 - DNA, 25 bp, Artificial
  Probe
tttacagagtgcatgacgtgccgat

SEQ ID NO: 300661 - DNA, 25 bp, Artificial
  Probe
ggacctttcgagaaggcgaaagatg

SEQ ID NO: 300662 - DNA, 25 bp, Artificial
  Probe
atgacgtgccgattctactttacat

SEQ ID NO: 300663 - DNA, 25 bp, Artificial
  Probe
gtgccgattctactttacatttgtt

SEQ ID NO: 300664 - DNA, 25 bp, Artificial
  Probe
cccagtctgcggtccactgatgagg

SEQ ID NO: 300665 - DNA, 25 bp, Artificial
  Probe
agctttcttcataaaaaccacaggg

SEQ ID NO: 300666 - DNA, 25 bp, Artificial
  Probe
tccacttgccagcttccggaataca

SEQ ID NO: 300667 - DNA, 25 bp, Artificial
  Probe
cttccggaatacaacttcaattcgg

SEQ ID NO: 300668 - DNA, 25 bp, Artificial
  Probe
ctatcaagggccacaccaaatctgg

SEQ ID NO: 300669 - DNA, 25 bp, Artificial
  Probe
ctccatcttgcctatgtgaccagca

SEQ ID NO: 300670 - DNA, 25 bp, Artificial
  Probe
tggcctccatcttgcctatgtgacc

SEQ ID NO: 300671 - DNA, 25 bp, Artificial
  Probe
gtgccctgaagttggggagacctcc

SEQ ID NO: 300672 - DNA, 25 bp, Artificial
  Probe
gcccatgtcagagagtgggcttgta

SEQ ID NO: 300673 - DNA, 25 bp, Artificial
  Probe
aggtgtcttggcactagaagagcta

SEQ ID NO: 300674 - DNA, 25 bp, Artificial
  Probe
cacttgccagcttccggaatacaac

SEQ ID NO: 300675 - DNA, 25 bp, Artificial
  Probe
atgtgaccagcatggggaagctcag

SEQ ID NO: 300676 - DNA, 25 bp, Artificial
  Probe
gagctgatcctgtgaacaacaccct

SEQ ID NO: 300677 - DNA, 25 bp, Artificial
  Probe
ccctcctgcagagagctggaatgtg

SEQ ID NO: 300678 - DNA, 25 bp, Artificial
  Probe
tgacatcttgcatggccccagtctg

SEQ ID NO: 300679 - DNA, 25 bp, Artificial
  Probe
cataaaaaccacagggcccatgtca

SEQ ID NO: 300680 - DNA, 25 bp, Artificial
  Probe
agatggagctcctgaaagagaagtc

SEQ ID NO: 300681 - DNA, 25 bp, Artificial
  Probe
gcctgaggaggacctggctgacatc

SEQ ID NO: 300682 - DNA, 25 bp, Artificial
  Probe
tcagaggtgtcttggcactagaaga

SEQ ID NO: 300683 - DNA, 25 bp, Artificial
  Probe
cttggcactagaagagctacagaaa

SEQ ID NO: 300684 - DNA, 25 bp, Artificial
  Probe
agctcctgaaagagaagtcatggtt

SEQ ID NO: 300685 - DNA, 25 bp, Artificial
  Probe
ctggctgacatcttgcatggcccca

SEQ ID NO: 300686 - DNA, 25 bp, Artificial
  Probe
gcttccggaatacaacttcaattcg

SEQ ID NO: 300687 - DNA, 25 bp, Artificial
  Probe
ctgaggaggacctggctgacatctt

SEQ ID NO: 300688 - DNA, 25 bp, Artificial
  Probe
cttcataaaaaccacagggcccatg

SEQ ID NO: 300689 - DNA, 25 bp, Artificial
  Probe
agaagtcatggttcctaccatgcca

SEQ ID NO: 300690 - DNA, 25 bp, Artificial
  Probe
aaatctggagtgcagcttcgccctc

SEQ ID NO: 300691 - DNA, 25 bp, Artificial
  Probe
tgcggtccactgatgaggaagatga

SEQ ID NO: 300692 - DNA, 25 bp, Artificial
  Probe
agctacagaaagctatcaagggcca

SEQ ID NO: 300693 - DNA, 25 bp, Artificial
  Probe
ctgcagagagctggaatgtgcctga

SEQ ID NO: 300694 - DNA, 25 bp, Artificial
  Probe
aagttggggagacctccatttcatc

SEQ ID NO: 300695 - DNA, 25 bp, Artificial
  Probe
accacagggcccatgtcagagagtg

SEQ ID NO: 300696 - DNA, 25 bp, Artificial
  Probe
ccggaatacaacttcaattcggaag

SEQ ID NO: 300697 - DNA, 25 bp, Artificial
  Probe
ttgcatggccccagtctgcggtcca

SEQ ID NO: 300698 - DNA, 25 bp, Artificial
  Probe
tggttcctaccatgccagagactcc

SEQ ID NO: 300699 - DNA, 25 bp, Artificial
  Probe
gctttcttcataaaaaccacagggc

SEQ ID NO: 300700 - DNA, 25 bp, Artificial
  Probe
ccacagggcccatgtcagagagtgg

SEQ ID NO: 300701 - DNA, 25 bp, Artificial
  Probe
atggccccagtctgcggtccactga

SEQ ID NO: 300702 - DNA, 25 bp, Artificial
  Probe
ggaggacctggctgacatcttgcat

SEQ ID NO: 300703 - DNA, 25 bp, Artificial
  Probe
gccagcttccggaatacaacttcaa

SEQ ID NO: 300704 - DNA, 25 bp, Artificial
  Probe
gaatacaacttcaattcggaagacc

SEQ ID NO: 300705 - DNA, 25 bp, Artificial
  Probe
ggaagctcagaggtgtcttggcact

SEQ ID NO: 300706 - DNA, 25 bp, Artificial
  Probe
ctacagaaagctatcaagggccaca

SEQ ID NO: 300707 - DNA, 25 bp, Artificial
  Probe
ccatgtcagagagtgggcttgtata

SEQ ID NO: 300708 - DNA, 25 bp, Artificial
  Probe
tggagctcctgaaagagaagtcatg

SEQ ID NO: 300709 - DNA, 25 bp, Artificial
  Probe
atgaggacgagctgatcctgtgaac

SEQ ID NO: 300710 - DNA, 25 bp, Artificial
  Probe
gcttgtgtccccagtctgggcactc

SEQ ID NO: 300711 - DNA, 25 bp, Artificial
  Probe
tcacagttctgctctgtggtcctgc

SEQ ID NO: 300712 - DNA, 25 bp, Artificial
  Probe
tggtagcttgtgtccccagtctggg

SEQ ID NO: 300713 - DNA, 25 bp, Artificial
  Probe
aaagccagtgggatcacatacctgg

SEQ ID NO: 300714 - DNA, 25 bp, Artificial
  Probe
tggaaccctcacaccaaggagactt

SEQ ID NO: 300715 - DNA, 25 bp, Artificial
  Probe
tacctggaaccctcacaccaaggag

SEQ ID NO: 300716 - DNA, 25 bp, Artificial
  Probe
agtgtatggcccaattctgggtcct

SEQ ID NO: 300717 - DNA, 25 bp, Artificial
  Probe
cagtgattcctgtctttaccatttg

SEQ ID NO: 300718 - DNA, 25 bp, Artificial
  Probe
agaacaaggctgaaagccagtggga

SEQ ID NO: 300719 - DNA, 25 bp, Artificial
  Probe
agtctgggcactcttcctcacactg

SEQ ID NO: 300720 - DNA, 25 bp, Artificial
  Probe
gacacagacttagcaacagcaatgc

SEQ ID NO: 300721 - DNA, 25 bp, Artificial
  Probe
tgtgataacagtgattcctgtcttt

SEQ ID NO: 300722 - DNA, 25 bp, Artificial
  Probe
tcctgcagtgtatggcccaattctg

SEQ ID NO: 300723 - DNA, 25 bp, Artificial
  Probe
tctcctataggctctggtagcttgt

SEQ ID NO: 300724 - DNA, 25 bp, Artificial
  Probe
taagttcataaatcagtctgagctg

SEQ ID NO: 300725 - DNA, 25 bp, Artificial
  Probe
ggatcacatacctggaaccctcaca

SEQ ID NO: 300726 - DNA, 25 bp, Artificial
  Probe
agcaccatcccatttgtgataacag

SEQ ID NO: 300727 - DNA, 25 bp, Artificial
  Probe
tgtgtccccagtctgggcactcttc

SEQ ID NO: 300728 - DNA, 25 bp, Artificial
  Probe
taaatcagtctgagctgtctgacac

SEQ ID NO: 300729 - DNA, 25 bp, Artificial
  Probe
gaatatctgatcacaagattctgtc

SEQ ID NO: 300730 - DNA, 25 bp, Artificial
  Probe
caatgcactagagaggctatttgaa

SEQ ID NO: 300731 - DNA, 25 bp, Artificial
  Probe
ccagtgggatcacatacctggaacc

SEQ ID NO: 300732 - DNA, 25 bp, Artificial
  Probe
gctctgtggtcctgcagtgtatggc

SEQ ID NO: 300733 - DNA, 25 bp, Artificial
  Probe
acttcagttctgtgcccgtgtgctg

SEQ ID NO: 300734 - DNA, 25 bp, Artificial
  Probe
gtctgacacagacttagcaacagca

SEQ ID NO: 300735 - DNA, 25 bp, Artificial
  Probe
ccataagggcaaacttccataacag

SEQ ID NO: 300736 - DNA, 25 bp, Artificial
  Probe
ggtgtctcctataggctctggtagc

SEQ ID NO: 300737 - DNA, 25 bp, Artificial
  Probe
gctgaaagccagtgggatcacatac

SEQ ID NO: 300738 - DNA, 25 bp, Artificial
  Probe
aggctgaaagccagtgggatcacat

SEQ ID NO: 300739 - DNA, 25 bp, Artificial
  Probe
accctcacaccaaggagacttaggc

SEQ ID NO: 300740 - DNA, 25 bp, Artificial
  Probe
tgcccgtgtgctggaaggtgtctcc

SEQ ID NO: 300741 - DNA, 25 bp, Artificial
  Probe
tctgggcactcttcctcacactgta

SEQ ID NO: 300742 - DNA, 25 bp, Artificial
  Probe
gtctttaccatttgttcattgtgaa

SEQ ID NO: 300743 - DNA, 25 bp, Artificial
  Probe
tcacttcacagttctgctctgtggt

SEQ ID NO: 300744 - DNA, 25 bp, Artificial
  Probe
cccatttgtgataacagtgattcct

SEQ ID NO: 300745 - DNA, 25 bp, Artificial
  Probe
tgtgctggaaggtgtctcctatagg

SEQ ID NO: 300746 - DNA, 25 bp, Artificial
  Probe
gggcaaacttccataacagcctcac

SEQ ID NO: 300747 - DNA, 25 bp, Artificial
  Probe
atggcccaattctgggtccttctga

SEQ ID NO: 300748 - DNA, 25 bp, Artificial
  Probe
agtgattcctgtctttaccatttgt

SEQ ID NO: 300749 - DNA, 25 bp, Artificial
  Probe
aaagcagagaccataagggcaaact

SEQ ID NO: 300750 - DNA, 25 bp, Artificial
  Probe
gaaccctcacaccaaggagacttag

SEQ ID NO: 300751 - DNA, 25 bp, Artificial
  Probe
gataacagtgattcctgtctttacc

SEQ ID NO: 300752 - DNA, 25 bp, Artificial
  Probe
ccaaggagacttaggcaggtagaac

SEQ ID NO: 300753 - DNA, 25 bp, Artificial
  Probe
cataaatcagtctgagctgtctgac

SEQ ID NO: 300754 - DNA, 25 bp, Artificial
  Probe
gtccttctgaatatctgatcacaag

SEQ ID NO: 300755 - DNA, 25 bp, Artificial
  Probe
cccaattctgggtccttctgaatat

SEQ ID NO: 300756 - DNA, 25 bp, Artificial
  Probe
tttaacaagattacttgtgtccaag

SEQ ID NO: 300757 - DNA, 25 bp, Artificial
  Probe
tgtgtagatgagtcaggctgctctt

SEQ ID NO: 300758 - DNA, 25 bp, Artificial
  Probe
ctattagaaccttattgaggtagca

SEQ ID NO: 300759 - DNA, 25 bp, Artificial
  Probe
ggtgactcatattacaacactcaag

SEQ ID NO: 300760 - DNA, 25 bp, Artificial
  Probe
cttgtgtccaagtgatgatagaact

SEQ ID NO: 300761 - DNA, 25 bp, Artificial
  Probe
gagtgtgacttagtcaggtgactca

SEQ ID NO: 300762 - DNA, 25 bp, Artificial
  Probe
actctctgtgtagatgagtcaggct

SEQ ID NO: 300763 - DNA, 25 bp, Artificial
  Probe
ctctgtgtagatgagtcaggctgct

SEQ ID NO: 300764 - DNA, 25 bp, Artificial
  Probe
gtttaacaagattacttgtgtccaa

SEQ ID NO: 300765 - DNA, 25 bp, Artificial
  Probe
ttacctgtgccgtggagtgtgactt

SEQ ID NO: 300766 - DNA, 25 bp, Artificial
  Probe
gtccacctattagaaccttattgag

SEQ ID NO: 300767 - DNA, 25 bp, Artificial
  Probe
ggtcccactttgaatcgctgactgg

SEQ ID NO: 300768 - DNA, 25 bp, Artificial
  Probe
caacaattgtcagtatgctgcataa

SEQ ID NO: 300769 - DNA, 25 bp, Artificial
  Probe
ggaactctctgtgtagatgagtcag

SEQ ID NO: 300770 - DNA, 25 bp, Artificial
  Probe
cttcgttacctgtgccgtggagtgt

SEQ ID NO: 300771 - DNA, 25 bp, Artificial
  Probe
tgtgccgtggagtgtgacttagtca

SEQ ID NO: 300772 - DNA, 25 bp, Artificial
  Probe
ctagtccaagtgtaaggtgttatca

SEQ ID NO: 300773 - DNA, 25 bp, Artificial
  Probe
acacacatttggagggtaattgccc

SEQ ID NO: 300774 - DNA, 25 bp, Artificial
  Probe
gatgagtcaggctgctcttgaactc

SEQ ID NO: 300775 - DNA, 25 bp, Artificial
  Probe
gggtaattgcccacagccagactaa

SEQ ID NO: 300776 - DNA, 25 bp, Artificial
  Probe
gtgacttagtcaggtgactcatatt

SEQ ID NO: 300777 - DNA, 25 bp, Artificial
  Probe
gtaattgcccacagccagactaaag

SEQ ID NO: 300778 - DNA, 25 bp, Artificial
  Probe
acaattgtcagtatgctgcataaaa

SEQ ID NO: 300779 - DNA, 25 bp, Artificial
  Probe
attttgatcacaactctatgagtag

SEQ ID NO: 300780 - DNA, 25 bp, Artificial
  Probe
cggaactctctgtgtagatgagtca

SEQ ID NO: 300781 - DNA, 25 bp, Artificial
  Probe
agttgaggtcatcagtgtctctagt

SEQ ID NO: 300782 - DNA, 25 bp, Artificial
  Probe
tgcgccaccatgtccacctattaga

SEQ ID NO: 300783 - DNA, 25 bp, Artificial
  Probe
acactcaagctgcacacacatttgg

SEQ ID NO: 300784 - DNA, 25 bp, Artificial
  Probe
gcgccaccatgtccacctattagaa

SEQ ID NO: 300785 - DNA, 25 bp, Artificial
  Probe
caagattacttgtgtccaagtgatg

SEQ ID NO: 300786 - DNA, 25 bp, Artificial
  Probe
agagttgaggtcatcagtgtctcta

SEQ ID NO: 300787 - DNA, 25 bp, Artificial
  Probe
acaagattacttgtgtccaagtgat

SEQ ID NO: 300788 - DNA, 25 bp, Artificial
  Probe
gaactttcttggttgctgtgtttcg

SEQ ID NO: 300789 - DNA, 25 bp, Artificial
  Probe
ctgtgccgtggagtgtgacttagtc

SEQ ID NO: 300790 - DNA, 25 bp, Artificial
  Probe
agaactttcttggttgctgtgtttc

SEQ ID NO: 300791 - DNA, 25 bp, Artificial
  Probe
acagggtcccactttgaatcgctga

SEQ ID NO: 300792 - DNA, 25 bp, Artificial
  Probe
ttgaatcgctgactggcccggaact

SEQ ID NO: 300793 - DNA, 25 bp, Artificial
  Probe
ttgcccacagccagactaaagttga

SEQ ID NO: 300794 - DNA, 25 bp, Artificial
  Probe
acttgtgtccaagtgatgatagaac

SEQ ID NO: 300795 - DNA, 25 bp, Artificial
  Probe
actttgaatcgctgactggcccgga

SEQ ID NO: 300796 - DNA, 25 bp, Artificial
  Probe
aactctatgagtagggctctgtgtg

SEQ ID NO: 300797 - DNA, 25 bp, Artificial
  Probe
ggaaggagctcctgacttcgttacc

SEQ ID NO: 300798 - DNA, 25 bp, Artificial
  Probe
tagtcaggtgactcatattacaaca

SEQ ID NO: 300799 - DNA, 25 bp, Artificial
  Probe
acttagtcaggtgactcatattaca

SEQ ID NO: 300800 - DNA, 25 bp, Artificial
  Probe
gaaggagctcctgacttcgttacct

SEQ ID NO: 300801 - DNA, 25 bp, Artificial
  Probe
caattgtcagtatgctgcataaaaa

SEQ ID NO: 300802 - DNA, 25 bp, Artificial
  Probe
cccccaaggcaatatgctgggtgcc

SEQ ID NO: 300803 - DNA, 25 bp, Artificial
  Probe
attctgcgtacccccaaggcaatat

SEQ ID NO: 300804 - DNA, 25 bp, Artificial
  Probe
cctttcatttagtcagcatgtggaa

SEQ ID NO: 300805 - DNA, 25 bp, Artificial
  Probe
tacccccaaggcaatatgctgggtg

SEQ ID NO: 300806 - DNA, 25 bp, Artificial
  Probe
cgtacccccaaggcaatatgctggg

SEQ ID NO: 300807 - DNA, 25 bp, Artificial
  Probe
ttgaaagacttcctttcatttagtc

SEQ ID NO: 300808 - DNA, 25 bp, Artificial
  Probe
acttcctttcatttagtcagcatgt

SEQ ID NO: 300809 - DNA, 25 bp, Artificial
  Probe
tcatttagtcagcatgtggaaattc

SEQ ID NO: 300810 - DNA, 25 bp, Artificial
  Probe
tcctttcatttagtcagcatgtgga

SEQ ID NO: 300811 - DNA, 25 bp, Artificial
  Probe
agacttcctttcatttagtcagcat

SEQ ID NO: 300812 - DNA, 25 bp, Artificial
  Probe
cttcctttcatttagtcagcatgtg

SEQ ID NO: 300813 - DNA, 25 bp, Artificial
  Probe
acccccaaggcaatatgctgggtgc

SEQ ID NO: 300814 - DNA, 25 bp, Artificial
  Probe
aaattctgcgtacccccaaggcaat

SEQ ID NO: 300815 - DNA, 25 bp, Artificial
  Probe
ttctgcgtacccccaaggcaatatg

SEQ ID NO: 300816 - DNA, 25 bp, Artificial
  Probe
ccccaaggcaatatgctgggtgcca

SEQ ID NO: 300817 - DNA, 25 bp, Artificial
  Probe
atttagtcagcatgtggaaattctg

SEQ ID NO: 300818 - DNA, 25 bp, Artificial
  Probe
tttctttgagtcaattgaaagactt

SEQ ID NO: 300819 - DNA, 25 bp, Artificial
  Probe
ttttctttgagtcaattgaaagact

SEQ ID NO: 300820 - DNA, 25 bp, Artificial
  Probe
gtggaaattctgcgtacccccaagg

SEQ ID NO: 300821 - DNA, 25 bp, Artificial
  Probe
tttttctttgagtcaattgaaagac

SEQ ID NO: 300822 - DNA, 25 bp, Artificial
  Probe
tttagtcagcatgtggaaattctgc

SEQ ID NO: 300823 - DNA, 25 bp, Artificial
  Probe
tctgcgtacccccaaggcaatatgc

SEQ ID NO: 300824 - DNA, 25 bp, Artificial
  Probe
ttctttgagtcaattgaaagacttc

SEQ ID NO: 300825 - DNA, 25 bp, Artificial
  Probe
aagacttcctttcatttagtcagca

SEQ ID NO: 300826 - DNA, 25 bp, Artificial
  Probe
caattgaaagacttcctttcattta

SEQ ID NO: 300827 - DNA, 25 bp, Artificial
  Probe
tgaaagacttcctttcatttagtca

SEQ ID NO: 300828 - DNA, 25 bp, Artificial
  Probe
aattgaaagacttcctttcatttag

SEQ ID NO: 300829 - DNA, 25 bp, Artificial
  Probe
ctttcatttagtcagcatgtggaaa

SEQ ID NO: 300830 - DNA, 25 bp, Artificial
  Probe
tttcatttagtcagcatgtggaaat

SEQ ID NO: 300831 - DNA, 25 bp, Artificial
  Probe
tgcgtacccccaaggcaatatgctg

SEQ ID NO: 300832 - DNA, 25 bp, Artificial
  Probe
gaaattctgcgtacccccaaggcaa

SEQ ID NO: 300833 - DNA, 25 bp, Artificial
  Probe
gacttcctttcatttagtcagcatg

SEQ ID NO: 300834 - DNA, 25 bp, Artificial
  Probe
ttagtcagcatgtggaaattctgcg

SEQ ID NO: 300835 - DNA, 25 bp, Artificial
  Probe
tggaaattctgcgtacccccaaggc

SEQ ID NO: 300836 - DNA, 25 bp, Artificial
  Probe
ttcatttagtcagcatgtggaaatt

SEQ ID NO: 300837 - DNA, 25 bp, Artificial
  Probe
catttagtcagcatgtggaaattct

SEQ ID NO: 300838 - DNA, 25 bp, Artificial
  Probe
ttcctttcatttagtcagcatgtgg

SEQ ID NO: 300839 - DNA, 25 bp, Artificial
  Probe
gcgtacccccaaggcaatatgctgg

SEQ ID NO: 300840 - DNA, 25 bp, Artificial
  Probe
aaagacttcctttcatttagtcagc

SEQ ID NO: 300841 - DNA, 25 bp, Artificial
  Probe
gaaagacttcctttcatttagtcag

SEQ ID NO: 300842 - DNA, 25 bp, Artificial
  Probe
tcaattgaaagacttcctttcattt

SEQ ID NO: 300843 - DNA, 25 bp, Artificial
  Probe
ggaaattctgcgtacccccaaggca

SEQ ID NO: 300844 - DNA, 25 bp, Artificial
  Probe
gtcaattgaaagacttcctttcatt

SEQ ID NO: 300845 - DNA, 25 bp, Artificial
  Probe
attgaaagacttcctttcatttagt

SEQ ID NO: 300846 - DNA, 25 bp, Artificial
  Probe
aattctgcgtacccccaaggcaata

SEQ ID NO: 300847 - DNA, 25 bp, Artificial
  Probe
gtacccccaaggcaatatgctgggt

SEQ ID NO: 300848 - DNA, 25 bp, Artificial
  Probe
ccgacagacttttgtagataagagg

SEQ ID NO: 300849 - DNA, 25 bp, Artificial
  Probe
tgatcctgagcatcttttgttacct

SEQ ID NO: 300850 - DNA, 25 bp, Artificial
  Probe
tgtggagcagctcacccgggacctg

SEQ ID NO: 300851 - DNA, 25 bp, Artificial
  Probe
gatcctgagcatcttttgttacctg

SEQ ID NO: 300852 - DNA, 25 bp, Artificial
  Probe
atcctgagcatcttttgttacctgc

SEQ ID NO: 300853 - DNA, 25 bp, Artificial
  Probe
acattgattccatggctgccgtgcc

SEQ ID NO: 300854 - DNA, 25 bp, Artificial
  Probe
tatgacgacgagagcgccatcgact

SEQ ID NO: 300855 - DNA, 25 bp, Artificial
  Probe
ttagagactccgaacgaccgatacc

SEQ ID NO: 300856 - DNA, 25 bp, Artificial
  Probe
cggccgagaacgagaagctgcatca

SEQ ID NO: 300857 - DNA, 25 bp, Artificial
  Probe
gcgccgcaaccaggagatgcagcag

SEQ ID NO: 300858 - DNA, 25 bp, Artificial
  Probe
tgtgggccttagagactccgaacga

SEQ ID NO: 300859 - DNA, 25 bp, Artificial
  Probe
acttttccgacagacttttgtagat

SEQ ID NO: 300860 - DNA, 25 bp, Artificial
  Probe
ggctacggtgatcctgagcatcttt

SEQ ID NO: 300861 - DNA, 25 bp, Artificial
  Probe
cgaggcagccctggaccgagccttg

SEQ ID NO: 300862 - DNA, 25 bp, Artificial
  Probe
tacattgattccatggctgccgtgc

SEQ ID NO: 300863 - DNA, 25 bp, Artificial
  Probe
gtgtgggccttagagactccgaacg

SEQ ID NO: 300864 - DNA, 25 bp, Artificial
  Probe
agacttttccgacagacttttgtag

SEQ ID NO: 300865 - DNA, 25 bp, Artificial
  Probe
cattgcagctaaggtacattgtaga

SEQ ID NO: 300866 - DNA, 25 bp, Artificial
  Probe
cttttgttacctgctggtagaaatg

SEQ ID NO: 300867 - DNA, 25 bp, Artificial
  Probe
catgtatgacgacgagagcgccatc

SEQ ID NO: 300868 - DNA, 25 bp, Artificial
  Probe
ttaccattgcagctaaggtacattg

SEQ ID NO: 300869 - DNA, 25 bp, Artificial
  Probe
ccagcctccggcagttcttcaaaga

SEQ ID NO: 300870 - DNA, 25 bp, Artificial
  Probe
gtcggccgagaacgagaagctgcat

SEQ ID NO: 300871 - DNA, 25 bp, Artificial
  Probe
ccaagcgccgcaaccaggagatgca

SEQ ID NO: 300872 - DNA, 25 bp, Artificial
  Probe
gccaagcgccgcaaccaggagatgc

SEQ ID NO: 300873 - DNA, 25 bp, Artificial
  Probe
ttgttacctgctggtagaaatgatc

SEQ ID NO: 300874 - DNA, 25 bp, Artificial
  Probe
ggccttagagactccgaacgaccga

SEQ ID NO: 300875 - DNA, 25 bp, Artificial
  Probe
tagaaaagacttttccgacagactt

SEQ ID NO: 300876 - DNA, 25 bp, Artificial
  Probe
aggcagccctggaccgagccttgcg

SEQ ID NO: 300877 - DNA, 25 bp, Artificial
  Probe
cctccggcagttcttcaaagagctg

SEQ ID NO: 300878 - DNA, 25 bp, Artificial
  Probe
ccattgcagctaaggtacattgtag

SEQ ID NO: 300879 - DNA, 25 bp, Artificial
  Probe
agactccgaacgaccgatacctcag

SEQ ID NO: 300880 - DNA, 25 bp, Artificial
  Probe
gccatgtatgacgacgagagcgcca

SEQ ID NO: 300881 - DNA, 25 bp, Artificial
  Probe
gcatcttttgttacctgctggtaga

SEQ ID NO: 300882 - DNA, 25 bp, Artificial
  Probe
gacttttccgacagacttttgtaga

SEQ ID NO: 300883 - DNA, 25 bp, Artificial
  Probe
gcagccctgagtaccggcagcgacg

SEQ ID NO: 300884 - DNA, 25 bp, Artificial
  Probe
gcctccggcagttcttcaaagagct

SEQ ID NO: 300885 - DNA, 25 bp, Artificial
  Probe
gggacaaggccaagcgccgcaacca

SEQ ID NO: 300886 - DNA, 25 bp, Artificial
  Probe
tcgaggcagccctggaccgagcctt

SEQ ID NO: 300887 - DNA, 25 bp, Artificial
  Probe
taggctacggtgatcctgagcatct

SEQ ID NO: 300888 - DNA, 25 bp, Artificial
  Probe
ctaggctacggtgatcctgagcatc

SEQ ID NO: 300889 - DNA, 25 bp, Artificial
  Probe
atgtatgacgacgagagcgccatcg

SEQ ID NO: 300890 - DNA, 25 bp, Artificial
  Probe
ggcagccctgagtaccggcagcgac

SEQ ID NO: 300891 - DNA, 25 bp, Artificial
  Probe
catcttttgttacctgctggtagaa

SEQ ID NO: 300892 - DNA, 25 bp, Artificial
  Probe
gctacggtgatcctgagcatctttt

SEQ ID NO: 300893 - DNA, 25 bp, Artificial
  Probe
atcttttgttacctgctggtagaaa

SEQ ID NO: 300894 - DNA, 25 bp, Artificial
  Probe
tggttaccaagtatctgtaaccctt

SEQ ID NO: 300895 - DNA, 25 bp, Artificial
  Probe
gctttggatgtggttaccaagtatc

SEQ ID NO: 300896 - DNA, 25 bp, Artificial
  Probe
ctctgtagaggtttgcaaagactga

SEQ ID NO: 300897 - DNA, 25 bp, Artificial
  Probe
ctttttcaatggttgggacaatggc

SEQ ID NO: 300898 - DNA, 25 bp, Artificial
  Probe
tgtacatatactgtataggccacct

SEQ ID NO: 300899 - DNA, 25 bp, Artificial
  Probe
tccctagacagtattgccatctctg

SEQ ID NO: 300900 - DNA, 25 bp, Artificial
  Probe
gtggatcaagcttgtgtacttgatc

SEQ ID NO: 300901 - DNA, 25 bp, Artificial
  Probe
tttgtaaatattcttggccacgttc

SEQ ID NO: 300902 - DNA, 25 bp, Artificial
  Probe
ctttggatgtggttaccaagtatct

SEQ ID NO: 300903 - DNA, 25 bp, Artificial
  Probe
ggatcaagcttgtgtacttgatcat

SEQ ID NO: 300904 - DNA, 25 bp, Artificial
  Probe
aacctttgacctctgtagaggtttg

SEQ ID NO: 300905 - DNA, 25 bp, Artificial
  Probe
gttaccaagtatctgtaacccttga

SEQ ID NO: 300906 - DNA, 25 bp, Artificial
  Probe
atgtggttaccaagtatctgtaacc

SEQ ID NO: 300907 - DNA, 25 bp, Artificial
  Probe
ctgtataggccacctgtacatatcc

SEQ ID NO: 300908 - DNA, 25 bp, Artificial
  Probe
agccatattccagcaatgaaccttg

SEQ ID NO: 300909 - DNA, 25 bp, Artificial
  Probe
cagtattgccatctctggccaaata

SEQ ID NO: 300910 - DNA, 25 bp, Artificial
  Probe
ttccagcaatgaaccttgtgctata

SEQ ID NO: 300911 - DNA, 25 bp, Artificial
  Probe
tcagctttggatgtggttaccaagt

SEQ ID NO: 300912 - DNA, 25 bp, Artificial
  Probe
tcgtggatcaagcttgtgtacttga

SEQ ID NO: 300913 - DNA, 25 bp, Artificial
  Probe
tgtaaatattcttggccacgttcta

SEQ ID NO: 300914 - DNA, 25 bp, Artificial
  Probe
cccacctgtacatatactgtatagg

SEQ ID NO: 300915 - DNA, 25 bp, Artificial
  Probe
cctagacagtattgccatctctggc

SEQ ID NO: 300916 - DNA, 25 bp, Artificial
  Probe
tgacctctgtagaggtttgcaaaga

SEQ ID NO: 300917 - DNA, 25 bp, Artificial
  Probe
cccttgaatccctagacagtattgc

SEQ ID NO: 300918 - DNA, 25 bp, Artificial
  Probe
tagaaagccatattccagcaatgaa

SEQ ID NO: 300919 - DNA, 25 bp, Artificial
  Probe
actgtataggccacctgtacatatc

SEQ ID NO: 300920 - DNA, 25 bp, Artificial
  Probe
catatactgtataggccacctgtac

SEQ ID NO: 300921 - DNA, 25 bp, Artificial
  Probe
tattcttggccacgttctacttcag

SEQ ID NO: 300922 - DNA, 25 bp, Artificial
  Probe
attcttggccacgttctacttcagc

SEQ ID NO: 300923 - DNA, 25 bp, Artificial
  Probe
gacagtattgccatctctggccaaa

SEQ ID NO: 300924 - DNA, 25 bp, Artificial
  Probe
cctttgacctctgtagaggtttgca

SEQ ID NO: 300925 - DNA, 25 bp, Artificial
  Probe
ataggccacctgtacatatcccaga

SEQ ID NO: 300926 - DNA, 25 bp, Artificial
  Probe
caagcttgtgtacttgatcattttt

SEQ ID NO: 300927 - DNA, 25 bp, Artificial
  Probe
acctgtacatatactgtataggcca

SEQ ID NO: 300928 - DNA, 25 bp, Artificial
  Probe
gtattgccatctctggccaaatatg

SEQ ID NO: 300929 - DNA, 25 bp, Artificial
  Probe
gaaagccatattccagcaatgaacc

SEQ ID NO: 300930 - DNA, 25 bp, Artificial
  Probe
gaatccctagacagtattgccatct

SEQ ID NO: 300931 - DNA, 25 bp, Artificial
  Probe
gtaacccttgaatccctagacagta

SEQ ID NO: 300932 - DNA, 25 bp, Artificial
  Probe
gaaacctttgacctctgtagaggtt

SEQ ID NO: 300933 - DNA, 25 bp, Artificial
  Probe
aaccttgtgctatagtgactcccac

SEQ ID NO: 300934 - DNA, 25 bp, Artificial
  Probe
acttttgtaaatattcttggccacg

SEQ ID NO: 300935 - DNA, 25 bp, Artificial
  Probe
tgtaacccttgaatccctagacagt

SEQ ID NO: 300936 - DNA, 25 bp, Artificial
  Probe
ctgtaacccttgaatccctagacag

SEQ ID NO: 300937 - DNA, 25 bp, Artificial
  Probe
tacatatactgtataggccacctgt

SEQ ID NO: 300938 - DNA, 25 bp, Artificial
  Probe
tattgccatctctggccaaatatgc

SEQ ID NO: 300939 - DNA, 25 bp, Artificial
  Probe
atgaatgaaacctttgacctctgta

SEQ ID NO: 300940 - DNA, 25 bp, Artificial
  Probe
gatccctcgggtcctggaaagttat

SEQ ID NO: 300941 - DNA, 25 bp, Artificial
  Probe
cacaatggcacatcgggaaatagca

SEQ ID NO: 300942 - DNA, 25 bp, Artificial
  Probe
gttctttggatttcatcacttactg

SEQ ID NO: 300943 - DNA, 25 bp, Artificial
  Probe
agacacaatggcacatcgggaaata

SEQ ID NO: 300944 - DNA, 25 bp, Artificial
  Probe
tctgggctgacaatgaggactccat

SEQ ID NO: 300945 - DNA, 25 bp, Artificial
  Probe
tctcaacctctgtttgcctaactgg

SEQ ID NO: 300946 - DNA, 25 bp, Artificial
  Probe
cgatggtgtggtcacttttcgtgga

SEQ ID NO: 300947 - DNA, 25 bp, Artificial
  Probe
cccgagacacaatggcacatcggga

SEQ ID NO: 300948 - DNA, 25 bp, Artificial
  Probe
tcgacgggtgcctgtctcctttcga

SEQ ID NO: 300949 - DNA, 25 bp, Artificial
  Probe
gcagttctaaagctttaacgggagg

SEQ ID NO: 300950 - DNA, 25 bp, Artificial
  Probe
aaactctgggctgacaatgaggact

SEQ ID NO: 300951 - DNA, 25 bp, Artificial
  Probe
ttctgttctcacaaggtcatcctag

SEQ ID NO: 300952 - DNA, 25 bp, Artificial
  Probe
tggcacatcgggaaatagcaacttc

SEQ ID NO: 300953 - DNA, 25 bp, Artificial
  Probe
ttggatttcatcacttactgatcag

SEQ ID NO: 300954 - DNA, 25 bp, Artificial
  Probe
aaagttatgaagtcccgagacacaa

SEQ ID NO: 300955 - DNA, 25 bp, Artificial
  Probe
tcgtggaacacacaatatagaaaag

SEQ ID NO: 300956 - DNA, 25 bp, Artificial
  Probe
ggctcctttctcaacctctgtttgc

SEQ ID NO: 300957 - DNA, 25 bp, Artificial
  Probe
tggatttcatcacttactgatcagt

SEQ ID NO: 300958 - DNA, 25 bp, Artificial
  Probe
gttgacttcttttggagagcccagc

SEQ ID NO: 300959 - DNA, 25 bp, Artificial
  Probe
aacgtgcactcgacgggtgcctgtc

SEQ ID NO: 300960 - DNA, 25 bp, Artificial
  Probe
acctgaggggtcaaacgtgcactcg

SEQ ID NO: 300961 - DNA, 25 bp, Artificial
  Probe
gtcatcctaggcatcatgtatggct

SEQ ID NO: 300962 - DNA, 25 bp, Artificial
  Probe
tcgggtcctggaaagttatgaagtc

SEQ ID NO: 300963 - DNA, 25 bp, Artificial
  Probe
gtcacttttcgtggaacacacaata

SEQ ID NO: 300964 - DNA, 25 bp, Artificial
  Probe
tcaacctctgtttgcctaactggtt

SEQ ID NO: 300965 - DNA, 25 bp, Artificial
  Probe
ctttccattgaagaataggatctga

SEQ ID NO: 300966 - DNA, 25 bp, Artificial
  Probe
ctgacaatgaggactccatgttttt

SEQ ID NO: 300967 - DNA, 25 bp, Artificial
  Probe
caaggtcatcctaggcatcatgtat

SEQ ID NO: 300968 - DNA, 25 bp, Artificial
  Probe
gagctgcgatggtgtggtcactttt

SEQ ID NO: 300969 - DNA, 25 bp, Artificial
  Probe
tttggagagcccagcactaatgtaa

SEQ ID NO: 300970 - DNA, 25 bp, Artificial
  Probe
tgtatggctggctcctttctcaacc

SEQ ID NO: 300971 - DNA, 25 bp, Artificial
  Probe
agggcccaacggtgcctgtgtgttt

SEQ ID NO: 300972 - DNA, 25 bp, Artificial
  Probe
aaccgaactttccattgaagaatag

SEQ ID NO: 300973 - DNA, 25 bp, Artificial
  Probe
ttatgttgacttcttttggagagcc

SEQ ID NO: 300974 - DNA, 25 bp, Artificial
  Probe
ggtcaaacgtgcactcgacgggtgc

SEQ ID NO: 300975 - DNA, 25 bp, Artificial
  Probe
tttcgtggaacacacaatatagaaa

SEQ ID NO: 300976 - DNA, 25 bp, Artificial
  Probe
gggtgcctgtctcctttcgatccct

SEQ ID NO: 300977 - DNA, 25 bp, Artificial
  Probe
atcatgtatggctggctcctttctc

SEQ ID NO: 300978 - DNA, 25 bp, Artificial
  Probe
cctctgtttgcctaactggttcttt

SEQ ID NO: 300979 - DNA, 25 bp, Artificial
  Probe
aggcatcatgtatggctggctcctt

SEQ ID NO: 300980 - DNA, 25 bp, Artificial
  Probe
tatgaagtcccgagacacaatggca

SEQ ID NO: 300981 - DNA, 25 bp, Artificial
  Probe
gcactcgacgggtgcctgtctcctt

SEQ ID NO: 300982 - DNA, 25 bp, Artificial
  Probe
cttcttttggagagcccagcactaa

SEQ ID NO: 300983 - DNA, 25 bp, Artificial
  Probe
aataggatctgaccatttcagtgca

SEQ ID NO: 300984 - DNA, 25 bp, Artificial
  Probe
gagcccagcactaatgtaaatactc

SEQ ID NO: 300985 - DNA, 25 bp, Artificial
  Probe
cccaacggtgcctgtgtgttttgtt

SEQ ID NO: 300986 - DNA, 25 bp, Artificial
  Probe
tcttggacctaaccatactccagtg

SEQ ID NO: 300987 - DNA, 25 bp, Artificial
  Probe
gtgcccatagcctagtgcagaagtg

SEQ ID NO: 300988 - DNA, 25 bp, Artificial
  Probe
ccattggagactgtggaaagtcctc

SEQ ID NO: 300989 - DNA, 25 bp, Artificial
  Probe
gacctaaccatactccagtgatgta

SEQ ID NO: 300990 - DNA, 25 bp, Artificial
  Probe
ctcctcgtttggtgccattgttaaa

SEQ ID NO: 300991 - DNA, 25 bp, Artificial
  Probe
atgacacttcatgactcctcgtttg

SEQ ID NO: 300992 - DNA, 25 bp, Artificial
  Probe
aaccatactccagtgatgtagtagc

SEQ ID NO: 300993 - DNA, 25 bp, Artificial
  Probe
actattctgtagtgcccatagccta

SEQ ID NO: 300994 - DNA, 25 bp, Artificial
  Probe
cgtttggtgccattgttaaagtacg

SEQ ID NO: 300995 - DNA, 25 bp, Artificial
  Probe
tttggtgccattgttaaagtacgac

SEQ ID NO: 300996 - DNA, 25 bp, Artificial
  Probe
gcttcttcatttattggctcccatg

SEQ ID NO: 300997 - DNA, 25 bp, Artificial
  Probe
ttcacctttcggagctgccgatcgt

SEQ ID NO: 300998 - DNA, 25 bp, Artificial
  Probe
gaagcttcttcatttattggctccc

SEQ ID NO: 300999 - DNA, 25 bp, Artificial
  Probe
tttccattggagactgtggaaagtc

SEQ ID NO: 301000 - DNA, 25 bp, Artificial
  Probe
actccagtgatgtagtagctgggac

SEQ ID NO: 301001 - DNA, 25 bp, Artificial
  Probe
tctgtagtgcccatagcctagtgca

SEQ ID NO: 301002 - DNA, 25 bp, Artificial
  Probe
atgggaagcttcttcatttattggc

SEQ ID NO: 301003 - DNA, 25 bp, Artificial
  Probe
gtagtagctgggactcattgtggca

SEQ ID NO: 301004 - DNA, 25 bp, Artificial
  Probe
ccactcctttccattggagactgtg

SEQ ID NO: 301005 - DNA, 25 bp, Artificial
  Probe
tcggagctgccgatcgttcagcact

SEQ ID NO: 301006 - DNA, 25 bp, Artificial
  Probe
ccagtgatgtagtagctgggactca

SEQ ID NO: 301007 - DNA, 25 bp, Artificial
  Probe
tcctttccattggagactgtggaaa

SEQ ID NO: 301008 - DNA, 25 bp, Artificial
  Probe
gttgtcatcttggacctaaccatac

SEQ ID NO: 301009 - DNA, 25 bp, Artificial
  Probe
tgggaagcttcttcatttattggct

SEQ ID NO: 301010 - DNA, 25 bp, Artificial
  Probe
tcgtttggtgccattgttaaagtac

SEQ ID NO: 301011 - DNA, 25 bp, Artificial
  Probe
cattgtggctgttcccgtttgactt

SEQ ID NO: 301012 - DNA, 25 bp, Artificial
  Probe
tggctgttcccgtttgacttcatta

SEQ ID NO: 301013 - DNA, 25 bp, Artificial
  Probe
atactccagtgatgtagtagctggg

SEQ ID NO: 301014 - DNA, 25 bp, Artificial
  Probe
gtgacttaggacattgtggctgttc

SEQ ID NO: 301015 - DNA, 25 bp, Artificial
  Probe
agcctagtgcagaagtgacttagga

SEQ ID NO: 301016 - DNA, 25 bp, Artificial
  Probe
tagtagctgggactcattgtggcag

SEQ ID NO: 301017 - DNA, 25 bp, Artificial
  Probe
gcctttcacctttcggagctgccga

SEQ ID NO: 301018 - DNA, 25 bp, Artificial
  Probe
cctctcttggttgtcatcttggacc

SEQ ID NO: 301019 - DNA, 25 bp, Artificial
  Probe
acctttcggagctgccgatcgttca

SEQ ID NO: 301020 - DNA, 25 bp, Artificial
  Probe
tgggatggccatgacacttcatgac

SEQ ID NO: 301021 - DNA, 25 bp, Artificial
  Probe
gttcccgtttgacttcattattgcc

SEQ ID NO: 301022 - DNA, 25 bp, Artificial
  Probe
cttaggacattgtggctgttcccgt

SEQ ID NO: 301023 - DNA, 25 bp, Artificial
  Probe
tgtggaaagtcctcttccctcctgc

SEQ ID NO: 301024 - DNA, 25 bp, Artificial
  Probe
ggacattgtggctgttcccgtttga

SEQ ID NO: 301025 - DNA, 25 bp, Artificial
  Probe
ggttgtcatcttggacctaaccata

SEQ ID NO: 301026 - DNA, 25 bp, Artificial
  Probe
gccatgacacttcatgactcctcgt

SEQ ID NO: 301027 - DNA, 25 bp, Artificial
  Probe
atcgttcagcactgaaaagtccccc

SEQ ID NO: 301028 - DNA, 25 bp, Artificial
  Probe
tgtagtgcccatagcctagtgcaga

SEQ ID NO: 301029 - DNA, 25 bp, Artificial
  Probe
actgtggaaagtcctcttccctcct

SEQ ID NO: 301030 - DNA, 25 bp, Artificial
  Probe
atgagcgtaccctctcttggttgtc

SEQ ID NO: 301031 - DNA, 25 bp, Artificial
  Probe
acacgcctttcacctttcggagctg

SEQ ID NO: 301032 - DNA, 25 bp, Artificial
  Probe
tgtaccagtggcaagcactgatcgt

SEQ ID NO: 301033 - DNA, 25 bp, Artificial
  Probe
atcttatgtaaaacatcagggcctg

SEQ ID NO: 301034 - DNA, 25 bp, Artificial
  Probe
cctctgtagccgttctatctggcta

SEQ ID NO: 301035 - DNA, 25 bp, Artificial
  Probe
tgaggcagagcgactccaagagaac

SEQ ID NO: 301036 - DNA, 25 bp, Artificial
  Probe
cacatttcttatttggactagtgaa

SEQ ID NO: 301037 - DNA, 25 bp, Artificial
  Probe
ggatgttaaccaagctcttagaaga

SEQ ID NO: 301038 - DNA, 25 bp, Artificial
  Probe
tctgcctttgcctaccagctagagg

SEQ ID NO: 301039 - DNA, 25 bp, Artificial
  Probe
ttagtccgtgggagtcacatttctt

SEQ ID NO: 301040 - DNA, 25 bp, Artificial
  Probe
cgggacctctgtagccgttctatct

SEQ ID NO: 301041 - DNA, 25 bp, Artificial
  Probe
atgtaaaacatcagggcctgaataa

SEQ ID NO: 301042 - DNA, 25 bp, Artificial
  Probe
atggtgtaccagtggcaagcactga

SEQ ID NO: 301043 - DNA, 25 bp, Artificial
  Probe
agtttctgcctttgcctaccagcta

SEQ ID NO: 301044 - DNA, 25 bp, Artificial
  Probe
atctggctagcaaggaagattcgtt

SEQ ID NO: 301045 - DNA, 25 bp, Artificial
  Probe
ggcttaccgtaccttccaagggatg

SEQ ID NO: 301046 - DNA, 25 bp, Artificial
  Probe
agccgttctatctggctagcaagga

SEQ ID NO: 301047 - DNA, 25 bp, Artificial
  Probe
tggatggtgtaccagtggcaagcac

SEQ ID NO: 301048 - DNA, 25 bp, Artificial
  Probe
caagagaacctccaggcttaccgta

SEQ ID NO: 301049 - DNA, 25 bp, Artificial
  Probe
tgactgaggcagagcgactccaaga

SEQ ID NO: 301050 - DNA, 25 bp, Artificial
  Probe
gctcttatggaatcttatgtaaaac

SEQ ID NO: 301051 - DNA, 25 bp, Artificial
  Probe
aatggatggcccacctatccctttc

SEQ ID NO: 301052 - DNA, 25 bp, Artificial
  Probe
catttcaccccaactgaaggtgact

SEQ ID NO: 301053 - DNA, 25 bp, Artificial
  Probe
tcagtggatggtgtaccagtggcaa

SEQ ID NO: 301054 - DNA, 25 bp, Artificial
  Probe
cttccaagggatgttaaccaagctc

SEQ ID NO: 301055 - DNA, 25 bp, Artificial
  Probe
aatatcaaccttgactcagtggatg

SEQ ID NO: 301056 - DNA, 25 bp, Artificial
  Probe
gatggctttcgcagagcaaacacct

SEQ ID NO: 301057 - DNA, 25 bp, Artificial
  Probe
caagtttctgcctttgcctaccagc

SEQ ID NO: 301058 - DNA, 25 bp, Artificial
  Probe
ccaggaatttgctgccacctctgag

SEQ ID NO: 301059 - DNA, 25 bp, Artificial
  Probe
cgccgggacctctgtagccgttcta

SEQ ID NO: 301060 - DNA, 25 bp, Artificial
  Probe
taccagctagaggagttaatggtgc

SEQ ID NO: 301061 - DNA, 25 bp, Artificial
  Probe
gctccaagtttctgcctttgcctac

SEQ ID NO: 301062 - DNA, 25 bp, Artificial
  Probe
cttatgctccaagtttctgcctttg

SEQ ID NO: 301063 - DNA, 25 bp, Artificial
  Probe
gcttaccgtaccttccaagggatgt

SEQ ID NO: 301064 - DNA, 25 bp, Artificial
  Probe
acatttagtccgtgggagtcacatt

SEQ ID NO: 301065 - DNA, 25 bp, Artificial
  Probe
tttcgcagagcaaacacctctgacc

SEQ ID NO: 301066 - DNA, 25 bp, Artificial
  Probe
gatgactgaggcagagcgactccaa

SEQ ID NO: 301067 - DNA, 25 bp, Artificial
  Probe
tcttagaagaccagagagtacattt

SEQ ID NO: 301068 - DNA, 25 bp, Artificial
  Probe
cactgatcgttggagtgagatgact

SEQ ID NO: 301069 - DNA, 25 bp, Artificial
  Probe
ggaagattcgttcagacctgactgc

SEQ ID NO: 301070 - DNA, 25 bp, Artificial
  Probe
gttctatctggctagcaaggaagat

SEQ ID NO: 301071 - DNA, 25 bp, Artificial
  Probe
ccttccaagggatgttaaccaagct

SEQ ID NO: 301072 - DNA, 25 bp, Artificial
  Probe
gtgcacaatcccattagaaaatgcc

SEQ ID NO: 301073 - DNA, 25 bp, Artificial
  Probe
cgtgggagtcacatttcttatttgg

SEQ ID NO: 301074 - DNA, 25 bp, Artificial
  Probe
agagagtacatttcaccccaactga

SEQ ID NO: 301075 - DNA, 25 bp, Artificial
  Probe
agagtacatttcaccccaactgaag

SEQ ID NO: 301076 - DNA, 25 bp, Artificial
  Probe
tcttatgtaaaacatcagggcctga

SEQ ID NO: 301077 - DNA, 25 bp, Artificial
  Probe
gtgacttccatcaggcaatacatac

SEQ ID NO: 301078 - DNA, 25 bp, Artificial
  Probe
cctttcctgtcagttgcaaacgaag

SEQ ID NO: 301079 - DNA, 25 bp, Artificial
  Probe
tcacgtgaccctttcctgtcagttg

SEQ ID NO: 301080 - DNA, 25 bp, Artificial
  Probe
tatgatcacgtgaccctttcctgtc

SEQ ID NO: 301081 - DNA, 25 bp, Artificial
  Probe
ttcctgtcagttgcaaacgaagttc

SEQ ID NO: 301082 - DNA, 25 bp, Artificial
  Probe
tgaccctttcctgtcagttgcaaac

SEQ ID NO: 301083 - DNA, 25 bp, Artificial
  Probe
agttgcaaacgaagttcattcctgt

SEQ ID NO: 301084 - DNA, 25 bp, Artificial
  Probe
gaccctttcctgtcagttgcaaacg

SEQ ID NO: 301085 - DNA, 25 bp, Artificial
  Probe
cattcctgtctaaatcaaagtggga

SEQ ID NO: 301086 - DNA, 25 bp, Artificial
  Probe
ggcttagctctagaaccctaatttt

SEQ ID NO: 301087 - DNA, 25 bp, Artificial
  Probe
tattaacttttgctatgatcacgtg

SEQ ID NO: 301088 - DNA, 25 bp, Artificial
  Probe
taacttttgctatgatcacgtgacc

SEQ ID NO: 301089 - DNA, 25 bp, Artificial
  Probe
attaacttttgctatgatcacgtga

SEQ ID NO: 301090 - DNA, 25 bp, Artificial
  Probe
cttttgctatgatcacgtgaccctt

SEQ ID NO: 301091 - DNA, 25 bp, Artificial
  Probe
tttgctatgatcacgtgaccctttc

SEQ ID NO: 301092 - DNA, 25 bp, Artificial
  Probe
cctgtctaaatcaaagtgggaacgt

SEQ ID NO: 301093 - DNA, 25 bp, Artificial
  Probe
ctgtcagttgcaaacgaagttcatt

SEQ ID NO: 301094 - DNA, 25 bp, Artificial
  Probe
gtggcttagctctagaaccctaatt

SEQ ID NO: 301095 - DNA, 25 bp, Artificial
  Probe
cgtgaccctttcctgtcagttgcaa

SEQ ID NO: 301096 - DNA, 25 bp, Artificial
  Probe
tttcctgtcagttgcaaacgaagtt

SEQ ID NO: 301097 - DNA, 25 bp, Artificial
  Probe
tgctatgatcacgtgaccctttcct

SEQ ID NO: 301098 - DNA, 25 bp, Artificial
  Probe
caagtgaaaatccttcggcttgggg

SEQ ID NO: 301099 - DNA, 25 bp, Artificial
  Probe
cctcaagtgaaaatccttcggcttg

SEQ ID NO: 301100 - DNA, 25 bp, Artificial
  Probe
agtgaaaatccttcggcttggggct

SEQ ID NO: 301101 - DNA, 25 bp, Artificial
  Probe
acctcaagtgaaaatccttcggctt

SEQ ID NO: 301102 - DNA, 25 bp, Artificial
  Probe
gctatgatcacgtgaccctttcctg

SEQ ID NO: 301103 - DNA, 25 bp, Artificial
  Probe
gaccccagaatttatgaaaggcaag

SEQ ID NO: 301104 - DNA, 25 bp, Artificial
  Probe
tcacagaccccagaatttatgaaag

SEQ ID NO: 301105 - DNA, 25 bp, Artificial
  Probe
tggcttagctctagaaccctaattt

SEQ ID NO: 301106 - DNA, 25 bp, Artificial
  Probe
acagaccccagaatttatgaaaggc

SEQ ID NO: 301107 - DNA, 25 bp, Artificial
  Probe
gttcattcctgtctaaatcaaagtg

SEQ ID NO: 301108 - DNA, 25 bp, Artificial
  Probe
tcagttgcaaacgaagttcattcct

SEQ ID NO: 301109 - DNA, 25 bp, Artificial
  Probe
atcacgtgaccctttcctgtcagtt

SEQ ID NO: 301110 - DNA, 25 bp, Artificial
  Probe
ttcattcctgtctaaatcaaagtgg

SEQ ID NO: 301111 - DNA, 25 bp, Artificial
  Probe
gcaaacgaagttcattcctgtctaa

SEQ ID NO: 301112 - DNA, 25 bp, Artificial
  Probe
ttaacttttgctatgatcacgtgac

SEQ ID NO: 301113 - DNA, 25 bp, Artificial
  Probe
cagaccccagaatttatgaaaggca

SEQ ID NO: 301114 - DNA, 25 bp, Artificial
  Probe
ttcctgtctaaatcaaagtgggaac

SEQ ID NO: 301115 - DNA, 25 bp, Artificial
  Probe
accctttcctgtcagttgcaaacga

SEQ ID NO: 301116 - DNA, 25 bp, Artificial
  Probe
accccagaatttatgaaaggcaaga

SEQ ID NO: 301117 - DNA, 25 bp, Artificial
  Probe
ctcaagtgaaaatccttcggcttgg

SEQ ID NO: 301118 - DNA, 25 bp, Artificial
  Probe
cacgtgaccctttcctgtcagttgc

SEQ ID NO: 301119 - DNA, 25 bp, Artificial
  Probe
cctgtcagttgcaaacgaagttcat

SEQ ID NO: 301120 - DNA, 25 bp, Artificial
  Probe
ccacctcaagtgaaaatccttcggc

SEQ ID NO: 301121 - DNA, 25 bp, Artificial
  Probe
tcctgtctaaatcaaagtgggaacg

SEQ ID NO: 301122 - DNA, 25 bp, Artificial
  Probe
tgcaaacgaagttcattcctgtcta

SEQ ID NO: 301123 - DNA, 25 bp, Artificial
  Probe
gcttagctctagaaccctaattttg

SEQ ID NO: 301124 - DNA, 25 bp, Artificial
  Probe
caacagtgctctgtacgtaacctgt

SEQ ID NO: 301125 - DNA, 25 bp, Artificial
  Probe
aggtcctgccaggagggcaacaagt

SEQ ID NO: 301126 - DNA, 25 bp, Artificial
  Probe
gcctggcgttacgttggcgagccat

SEQ ID NO: 301127 - DNA, 25 bp, Artificial
  Probe
gtacgttctcacttggtcctcgttc

SEQ ID NO: 301128 - DNA, 25 bp, Artificial
  Probe
atagttgttccctctgctctgggag

SEQ ID NO: 301129 - DNA, 25 bp, Artificial
  Probe
ctgaaatagttgttccctctgctct

SEQ ID NO: 301130 - DNA, 25 bp, Artificial
  Probe
gggaacagcagcagcttgtcttgta

SEQ ID NO: 301131 - DNA, 25 bp, Artificial
  Probe
cgttggcgagccatcttgtacgttc

SEQ ID NO: 301132 - DNA, 25 bp, Artificial
  Probe
cttgtcttgtaaggtcctgccagga

SEQ ID NO: 301133 - DNA, 25 bp, Artificial
  Probe
tcacttggtcctcgttcttctgcga

SEQ ID NO: 301134 - DNA, 25 bp, Artificial
  Probe
cttccaacagtgctctgtacgtaac

SEQ ID NO: 301135 - DNA, 25 bp, Artificial
  Probe
cgttcttctgcgacctgaaatagtt

SEQ ID NO: 301136 - DNA, 25 bp, Artificial
  Probe
aggctgttagtgagcctctgacagc

SEQ ID NO: 301137 - DNA, 25 bp, Artificial
  Probe
ttctgcgacctgaaatagttgttcc

SEQ ID NO: 301138 - DNA, 25 bp, Artificial
  Probe
gttcttctgcgacctgaaatagttg

SEQ ID NO: 301139 - DNA, 25 bp, Artificial
  Probe
cagtgctctgtacgtaacctgtaag

SEQ ID NO: 301140 - DNA, 25 bp, Artificial
  Probe
tcttctgcgacctgaaatagttgtt

SEQ ID NO: 301141 - DNA, 25 bp, Artificial
  Probe
gcgagccatcttgtacgttctcact

SEQ ID NO: 301142 - DNA, 25 bp, Artificial
  Probe
gaacagcagcagcttgtcttgtaag

SEQ ID NO: 301143 - DNA, 25 bp, Artificial
  Probe
tgtcttgtaaggtcctgccaggagg

SEQ ID NO: 301144 - DNA, 25 bp, Artificial
  Probe
gcctctgacagcttgtgaacttgct

SEQ ID NO: 301145 - DNA, 25 bp, Artificial
  Probe
tgaaatagttgttccctctgctctg

SEQ ID NO: 301146 - DNA, 25 bp, Artificial
  Probe
acctgaaatagttgttccctctgct

SEQ ID NO: 301147 - DNA, 25 bp, Artificial
  Probe
cgttctcacttggtcctcgttcttc

SEQ ID NO: 301148 - DNA, 25 bp, Artificial
  Probe
gcagcttgtcttgtaaggtcctgcc

SEQ ID NO: 301149 - DNA, 25 bp, Artificial
  Probe
tcctcgttcttctgcgacctgaaat

SEQ ID NO: 301150 - DNA, 25 bp, Artificial
  Probe
ctgcgacctgaaatagttgttccct

SEQ ID NO: 301151 - DNA, 25 bp, Artificial
  Probe
ctggcgttacgttggcgagccatct

SEQ ID NO: 301152 - DNA, 25 bp, Artificial
  Probe
gcttgtcttgtaaggtcctgccagg

SEQ ID NO: 301153 - DNA, 25 bp, Artificial
  Probe
gagcctctgacagcttgtgaacttg

SEQ ID NO: 301154 - DNA, 25 bp, Artificial
  Probe
ttgttccctctgctctgggagctgg

SEQ ID NO: 301155 - DNA, 25 bp, Artificial
  Probe
gtgagcctctgacagcttgtgaact

SEQ ID NO: 301156 - DNA, 25 bp, Artificial
  Probe
tgcgtgctagcaaggctgtgctgca

SEQ ID NO: 301157 - DNA, 25 bp, Artificial
  Probe
ttgtgcgtgctagcaaggctgtgct

SEQ ID NO: 301158 - DNA, 25 bp, Artificial
  Probe
atcttgtacgttctcacttggtcct

SEQ ID NO: 301159 - DNA, 25 bp, Artificial
  Probe
gtacgtaacctgtaagcatttcaac

SEQ ID NO: 301160 - DNA, 25 bp, Artificial
  Probe
cagcagcttgtcttgtaaggtcctg

SEQ ID NO: 301161 - DNA, 25 bp, Artificial
  Probe
tggggaacagcagcagcttgtcttg

SEQ ID NO: 301162 - DNA, 25 bp, Artificial
  Probe
cttgtaaggtcctgccaggagggca

SEQ ID NO: 301163 - DNA, 25 bp, Artificial
  Probe
gccacgccagtgtggcctggcgtta

SEQ ID NO: 301164 - DNA, 25 bp, Artificial
  Probe
taaggtcctgccaggagggcaacaa

SEQ ID NO: 301165 - DNA, 25 bp, Artificial
  Probe
gtacttacagtccagcccagagctg

SEQ ID NO: 301166 - DNA, 25 bp, Artificial
  Probe
tgcttccaacagtgctctgtacgta

SEQ ID NO: 301167 - DNA, 25 bp, Artificial
  Probe
tcttgtaaggtcctgccaggagggc

SEQ ID NO: 301168 - DNA, 25 bp, Artificial
  Probe
tgttagtgagcctctgacagcttgt

SEQ ID NO: 301169 - DNA, 25 bp, Artificial
  Probe
ctctgtacgtaacctgtaagcattt

SEQ ID NO: 301170 - DNA, 25 bp, Artificial
  Probe
tcttggccgtatttccccttggaca

SEQ ID NO: 301171 - DNA, 25 bp, Artificial
  Probe
atgctggactcaaaggcagaggtca

SEQ ID NO: 301172 - DNA, 25 bp, Artificial
  Probe
cagaattggttctctcatgtattcc

SEQ ID NO: 301173 - DNA, 25 bp, Artificial
  Probe
tacatgcaggagttatccggggagc

SEQ ID NO: 301174 - DNA, 25 bp, Artificial
  Probe
atcagcatcatgagtcattacagat

SEQ ID NO: 301175 - DNA, 25 bp, Artificial
  Probe
tgggccagcaactagctatctcagg

SEQ ID NO: 301176 - DNA, 25 bp, Artificial
  Probe
cttggccgtatttccccttggacat

SEQ ID NO: 301177 - DNA, 25 bp, Artificial
  Probe
ggtcagaattggttctctcatgtat

SEQ ID NO: 301178 - DNA, 25 bp, Artificial
  Probe
gatcagcatcatgagtcattacaga

SEQ ID NO: 301179 - DNA, 25 bp, Artificial
  Probe
gcaactagctatctcaggtccctca

SEQ ID NO: 301180 - DNA, 25 bp, Artificial
  Probe
acatgcaggagttatccggggagcc

SEQ ID NO: 301181 - DNA, 25 bp, Artificial
  Probe
gggccagcaactagctatctcaggt

SEQ ID NO: 301182 - DNA, 25 bp, Artificial
  Probe
tctgctctagggaatcgggatgttg

SEQ ID NO: 301183 - DNA, 25 bp, Artificial
  Probe
tcagcatcatgagtcattacagata

SEQ ID NO: 301184 - DNA, 25 bp, Artificial
  Probe
ggactcaaaggcagaggtcagaatt

SEQ ID NO: 301185 - DNA, 25 bp, Artificial
  Probe
gcatcatgagtcattacagataatg

SEQ ID NO: 301186 - DNA, 25 bp, Artificial
  Probe
actcaaaggcagaggtcagaattgg

SEQ ID NO: 301187 - DNA, 25 bp, Artificial
  Probe
ctcgatcagcatcatgagtcattac

SEQ ID NO: 301188 - DNA, 25 bp, Artificial
  Probe
agcatcatgagtcattacagataat

SEQ ID NO: 301189 - DNA, 25 bp, Artificial
  Probe
gccagcaactagctatctcaggtcc

SEQ ID NO: 301190 - DNA, 25 bp, Artificial
  Probe
gtatttccccttggacatttggcta

SEQ ID NO: 301191 - DNA, 25 bp, Artificial
  Probe
ggccagcaactagctatctcaggtc

SEQ ID NO: 301192 - DNA, 25 bp, Artificial
  Probe
catcatgagtcattacagataatgt

SEQ ID NO: 301193 - DNA, 25 bp, Artificial
  Probe
tcgatcagcatcatgagtcattaca

SEQ ID NO: 301194 - DNA, 25 bp, Artificial
  Probe
cgatcagcatcatgagtcattacag

SEQ ID NO: 301195 - DNA, 25 bp, Artificial
  Probe
tcagaattggttctctcatgtattc

SEQ ID NO: 301196 - DNA, 25 bp, Artificial
  Probe
agcaactagctatctcaggtccctc

SEQ ID NO: 301197 - DNA, 25 bp, Artificial
  Probe
cagcatcatgagtcattacagataa

SEQ ID NO: 301198 - DNA, 25 bp, Artificial
  Probe
taccaagccaaagtcccctggaatt

SEQ ID NO: 301199 - DNA, 25 bp, Artificial
  Probe
tctgccttccttcttggccgtattt

SEQ ID NO: 301200 - DNA, 25 bp, Artificial
  Probe
ttaccaagccaaagtcccctggaat

SEQ ID NO: 301201 - DNA, 25 bp, Artificial
  Probe
atgcaggagttatccggggagcctc

SEQ ID NO: 301202 - DNA, 25 bp, Artificial
  Probe
agaattggttctctcatgtattccc

SEQ ID NO: 301203 - DNA, 25 bp, Artificial
  Probe
ctcaaaggcagaggtcagaattggt

SEQ ID NO: 301204 - DNA, 25 bp, Artificial
  Probe
cgtatttccccttggacatttggct

SEQ ID NO: 301205 - DNA, 25 bp, Artificial
  Probe
tgctggactcaaaggcagaggtcag

SEQ ID NO: 301206 - DNA, 25 bp, Artificial
  Probe
gtcagaattggttctctcatgtatt

SEQ ID NO: 301207 - DNA, 25 bp, Artificial
  Probe
gaattggttctctcatgtattccct

SEQ ID NO: 301208 - DNA, 25 bp, Artificial
  Probe
cagcaactagctatctcaggtccct

SEQ ID NO: 301209 - DNA, 25 bp, Artificial
  Probe
cttctgccttccttcttggccgtat

SEQ ID NO: 301210 - DNA, 25 bp, Artificial
  Probe
gactcaaaggcagaggtcagaattg

SEQ ID NO: 301211 - DNA, 25 bp, Artificial
  Probe
cctcgatcagcatcatgagtcatta

SEQ ID NO: 301212 - DNA, 25 bp, Artificial
  Probe
tgccttccttcttggccgtatttcc

SEQ ID NO: 301213 - DNA, 25 bp, Artificial
  Probe
ttctgccttccttcttggccgtatt

SEQ ID NO: 301214 - DNA, 25 bp, Artificial
  Probe
accaagccaaagtcccctggaattg

SEQ ID NO: 301215 - DNA, 25 bp, Artificial
  Probe
ctgctctagggaatcgggatgttgt

SEQ ID NO: 301216 - DNA, 25 bp, Artificial
  Probe
tgacctctcctcataaagatttgga

SEQ ID NO: 301217 - DNA, 25 bp, Artificial
  Probe
cagttccagagtcatcagtaggcta

SEQ ID NO: 301218 - DNA, 25 bp, Artificial
  Probe
taaacatcagccagttccagagtca

SEQ ID NO: 301219 - DNA, 25 bp, Artificial
  Probe
aatcctatgatcaaagcaactggtc

SEQ ID NO: 301220 - DNA, 25 bp, Artificial
  Probe
tgggtcatctgtaaacatcagccag

SEQ ID NO: 301221 - DNA, 25 bp, Artificial
  Probe
caacacttccatcagaagtgaggat

SEQ ID NO: 301222 - DNA, 25 bp, Artificial
  Probe
tccagagtcatcagtaggctagata

SEQ ID NO: 301223 - DNA, 25 bp, Artificial
  Probe
atgatcaaagcaactggtcaacact

SEQ ID NO: 301224 - DNA, 25 bp, Artificial
  Probe
cagagtcatcagtaggctagataga

SEQ ID NO: 301225 - DNA, 25 bp, Artificial
  Probe
aactggtcaacacttccatcagaag

SEQ ID NO: 301226 - DNA, 25 bp, Artificial
  Probe
gaactcagattatctgaagacacaa

SEQ ID NO: 301227 - DNA, 25 bp, Artificial
  Probe
tcagccagttccagagtcatcagta

SEQ ID NO: 301228 - DNA, 25 bp, Artificial
  Probe
agaactcagattatctgaagacaca

SEQ ID NO: 301229 - DNA, 25 bp, Artificial
  Probe
tctgaagacacaaacctggcaggag

SEQ ID NO: 301230 - DNA, 25 bp, Artificial
  Probe
atcagccagttccagagtcatcagt

SEQ ID NO: 301231 - DNA, 25 bp, Artificial
  Probe
agcaactggtcaacacttccatcag

SEQ ID NO: 301232 - DNA, 25 bp, Artificial
  Probe
cttccatcagaagtgaggataggaa

SEQ ID NO: 301233 - DNA, 25 bp, Artificial
  Probe
gccagttccagagtcatcagtaggc

SEQ ID NO: 301234 - DNA, 25 bp, Artificial
  Probe
gtaatcctatgatcaaagcaactgg

SEQ ID NO: 301235 - DNA, 25 bp, Artificial
  Probe
tctgtaaacatcagccagttccaga

SEQ ID NO: 301236 - DNA, 25 bp, Artificial
  Probe
gatagaaggtgacctctcctcataa

SEQ ID NO: 301237 - DNA, 25 bp, Artificial
  Probe
gatcaaagcaactggtcaacacttc

SEQ ID NO: 301238 - DNA, 25 bp, Artificial
  Probe
tccatcagaagtgaggataggaagc

SEQ ID NO: 301239 - DNA, 25 bp, Artificial
  Probe
tctcctcataaagatttggagaact

SEQ ID NO: 301240 - DNA, 25 bp, Artificial
  Probe
ccagagtcatcagtaggctagatag

SEQ ID NO: 301241 - DNA, 25 bp, Artificial
  Probe
tgaagacacaaacctggcaggaggg

SEQ ID NO: 301242 - DNA, 25 bp, Artificial
  Probe
gacctctcctcataaagatttggag

SEQ ID NO: 301243 - DNA, 25 bp, Artificial
  Probe
tcctcataaagatttggagaactca

SEQ ID NO: 301244 - DNA, 25 bp, Artificial
  Probe
agaaggtgacctctcctcataaaga

SEQ ID NO: 301245 - DNA, 25 bp, Artificial
  Probe
tatgggtcatctgtaaacatcagcc

SEQ ID NO: 301246 - DNA, 25 bp, Artificial
  Probe
attatctgaagacacaaacctggca

SEQ ID NO: 301247 - DNA, 25 bp, Artificial
  Probe
atctgtaaacatcagccagttccag

SEQ ID NO: 301248 - DNA, 25 bp, Artificial
  Probe
gaagacacaaacctggcaggaggga

SEQ ID NO: 301249 - DNA, 25 bp, Artificial
  Probe
tatgatcaaagcaactggtcaacac

SEQ ID NO: 301250 - DNA, 25 bp, Artificial
  Probe
gcaactggtcaacacttccatcaga

SEQ ID NO: 301251 - DNA, 25 bp, Artificial
  Probe
aacacttccatcagaagtgaggata

SEQ ID NO: 301252 - DNA, 25 bp, Artificial
  Probe
acacttccatcagaagtgaggatag

SEQ ID NO: 301253 - DNA, 25 bp, Artificial
  Probe
ctggtcaacacttccatcagaagtg

SEQ ID NO: 301254 - DNA, 25 bp, Artificial
  Probe
atgggtcatctgtaaacatcagcca

SEQ ID NO: 301255 - DNA, 25 bp, Artificial
  Probe
gtgacctctcctcataaagatttgg

SEQ ID NO: 301256 - DNA, 25 bp, Artificial
  Probe
tgtaatcctatgatcaaagcaactg

SEQ ID NO: 301257 - DNA, 25 bp, Artificial
  Probe
gtcatctgtaaacatcagccagttc

SEQ ID NO: 301258 - DNA, 25 bp, Artificial
  Probe
aacatcagccagttccagagtcatc

SEQ ID NO: 301259 - DNA, 25 bp, Artificial
  Probe
cctatgggtcatctgtaaacatcag

SEQ ID NO: 301260 - DNA, 25 bp, Artificial
  Probe
aaccctatgggtcatctgtaaacat

SEQ ID NO: 301261 - DNA, 25 bp, Artificial
  Probe
gtcaacacttccatcagaagtgagg

SEQ ID NO: 301262 - DNA, 25 bp, Artificial
  Probe
tgctctaaccgtgtagacgtacctg

SEQ ID NO: 301263 - DNA, 25 bp, Artificial
  Probe
atggctgaccgcatcatcagcatga

SEQ ID NO: 301264 - DNA, 25 bp, Artificial
  Probe
tctggaacttcgtcggctctaaacc

SEQ ID NO: 301265 - DNA, 25 bp, Artificial
  Probe
tggcagcacatcaccgaccagatcg

SEQ ID NO: 301266 - DNA, 25 bp, Artificial
  Probe
ggtggagtcacagctgaagatcctg

SEQ ID NO: 301267 - DNA, 25 bp, Artificial
  Probe
attctggggtttgtatgctaccagc

SEQ ID NO: 301268 - DNA, 25 bp, Artificial
  Probe
gagtcacagctgaagatcctgatcc

SEQ ID NO: 301269 - DNA, 25 bp, Artificial
  Probe
gtcctcttcagtgattgattggctc

SEQ ID NO: 301270 - DNA, 25 bp, Artificial
  Probe
tcattcatcctgactgcagcctgtc

SEQ ID NO: 301271 - DNA, 25 bp, Artificial
  Probe
tcaccgaccagatcggcatgttctg

SEQ ID NO: 301272 - DNA, 25 bp, Artificial
  Probe
gaaaggcatggctgaccgcatcatc

SEQ ID NO: 301273 - DNA, 25 bp, Artificial
  Probe
gccattcaccaggtcaccaagtaat

SEQ ID NO: 301274 - DNA, 25 bp, Artificial
  Probe
ttcagcctttgctctcatgagagtc

SEQ ID NO: 301275 - DNA, 25 bp, Artificial
  Probe
tcaccggcctaaagcctgagcaggt

SEQ ID NO: 301276 - DNA, 25 bp, Artificial
  Probe
tgcccttgatttcagagtcctcttc

SEQ ID NO: 301277 - DNA, 25 bp, Artificial
  Probe
acgccattcaccaggtcaccaagta

SEQ ID NO: 301278 - DNA, 25 bp, Artificial
  Probe
gcatgaggacccagttggtctccaa

SEQ ID NO: 301279 - DNA, 25 bp, Artificial
  Probe
gaataactagttctgtcattaacag

SEQ ID NO: 301280 - DNA, 25 bp, Artificial
  Probe
cggctgatatctggaacttcgtcgg

SEQ ID NO: 301281 - DNA, 25 bp, Artificial
  Probe
tcatcctgactgcagcctgtcttca

SEQ ID NO: 301282 - DNA, 25 bp, Artificial
  Probe
gaccagatcggcatgttctgcttca

SEQ ID NO: 301283 - DNA, 25 bp, Artificial
  Probe
atgttctgcttcaccggcctaaagc

SEQ ID NO: 301284 - DNA, 25 bp, Artificial
  Probe
aactagttctgtcattaacagttgt

SEQ ID NO: 301285 - DNA, 25 bp, Artificial
  Probe
ttcctcggaaaagaggtagggcaga

SEQ ID NO: 301286 - DNA, 25 bp, Artificial
  Probe
caccaggtcaccaagtaatcaccag

SEQ ID NO: 301287 - DNA, 25 bp, Artificial
  Probe
tgtggaccccggtagagcctctcat

SEQ ID NO: 301288 - DNA, 25 bp, Artificial
  Probe
tctaaccgtgtagacgtacctggtt

SEQ ID NO: 301289 - DNA, 25 bp, Artificial
  Probe
ctctcatattagaggctgtaagaga

SEQ ID NO: 301290 - DNA, 25 bp, Artificial
  Probe
tgtgtcctcgtggtgtggagcaact

SEQ ID NO: 301291 - DNA, 25 bp, Artificial
  Probe
gctattctggggtttgtatgctacc

SEQ ID NO: 301292 - DNA, 25 bp, Artificial
  Probe
tgaacgcgttcctcggaaaagaggt

SEQ ID NO: 301293 - DNA, 25 bp, Artificial
  Probe
tcttcacatgagtcagacatgcagg

SEQ ID NO: 301294 - DNA, 25 bp, Artificial
  Probe
tcacagctgaagatcctgatccgcc

SEQ ID NO: 301295 - DNA, 25 bp, Artificial
  Probe
cgattgaacgcgttcctcggaaaag

SEQ ID NO: 301296 - DNA, 25 bp, Artificial
  Probe
ttcaccggcctaaagcctgagcagg

SEQ ID NO: 301297 - DNA, 25 bp, Artificial
  Probe
tccaacctgaagaaagagggctcgt

SEQ ID NO: 301298 - DNA, 25 bp, Artificial
  Probe
aactggcagcacatcaccgaccaga

SEQ ID NO: 301299 - DNA, 25 bp, Artificial
  Probe
caccaggtgcaaggaaacagagatc

SEQ ID NO: 301300 - DNA, 25 bp, Artificial
  Probe
aaggcatggctgaccgcatcatcag

SEQ ID NO: 301301 - DNA, 25 bp, Artificial
  Probe
ctgactgcagcctgtcttcacatga

SEQ ID NO: 301302 - DNA, 25 bp, Artificial
  Probe
cctgtcgattgaacgcgttcctcgg

SEQ ID NO: 301303 - DNA, 25 bp, Artificial
  Probe
cgtgtagacgtacctggttttctct

SEQ ID NO: 301304 - DNA, 25 bp, Artificial
  Probe
ctcgtggtgtggagcaactgtgtca

SEQ ID NO: 301305 - DNA, 25 bp, Artificial
  Probe
gtgcataactcctgtcgattgaacg

SEQ ID NO: 301306 - DNA, 25 bp, Artificial
  Probe
tttgctctcatgagagtcacgtgca

SEQ ID NO: 301307 - DNA, 25 bp, Artificial
  Probe
cccggtagagcctctcatattagag

SEQ ID NO: 301308 - DNA, 25 bp, Artificial
  Probe
ggaccaacagttcttccaaacctga

SEQ ID NO: 301309 - DNA, 25 bp, Artificial
  Probe
gccctgggtccaaacccacatgtaa

SEQ ID NO: 301310 - DNA, 25 bp, Artificial
  Probe
tttccagaacccactgcaaagtgag

SEQ ID NO: 301311 - DNA, 25 bp, Artificial
  Probe
ggcgccttcttcctctgctgttgta

SEQ ID NO: 301312 - DNA, 25 bp, Artificial
  Probe
gcccttccttatagatggactaacc

SEQ ID NO: 301313 - DNA, 25 bp, Artificial
  Probe
cttccttatagatggactaaccctg

SEQ ID NO: 301314 - DNA, 25 bp, Artificial
  Probe
tgccctgggtccaaacccacatgta

SEQ ID NO: 301315 - DNA, 25 bp, Artificial
  Probe
tgctgatcacagagccagcacctgt

SEQ ID NO: 301316 - DNA, 25 bp, Artificial
  Probe
tctcagcactcatatggaccaacag

SEQ ID NO: 301317 - DNA, 25 bp, Artificial
  Probe
agaggtgacacaagacctctgactg

SEQ ID NO: 301318 - DNA, 25 bp, Artificial
  Probe
ccacagctgggcagccattctgggc

SEQ ID NO: 301319 - DNA, 25 bp, Artificial
  Probe
aacccacatgtaaccaaaaagctgg

SEQ ID NO: 301320 - DNA, 25 bp, Artificial
  Probe
gccattctgggcttttccagaaccc

SEQ ID NO: 301321 - DNA, 25 bp, Artificial
  Probe
agctgggcagccattctgggctttt

SEQ ID NO: 301322 - DNA, 25 bp, Artificial
  Probe
atggactaaccctggggacccagcg

SEQ ID NO: 301323 - DNA, 25 bp, Artificial
  Probe
gatcacagagccagcacctgtagtc

SEQ ID NO: 301324 - DNA, 25 bp, Artificial
  Probe
ccaccgagcccttccttatagatgg

SEQ ID NO: 301325 - DNA, 25 bp, Artificial
  Probe
acccacctgcatgctgatcacagag

SEQ ID NO: 301326 - DNA, 25 bp, Artificial
  Probe
acacaaggacccagcctttgttctg

SEQ ID NO: 301327 - DNA, 25 bp, Artificial
  Probe
ccaaaaagctggagccgacacaagg

SEQ ID NO: 301328 - DNA, 25 bp, Artificial
  Probe
ttccttatagatggactaaccctgg

SEQ ID NO: 301329 - DNA, 25 bp, Artificial
  Probe
tgagtacagcactgtcaccagcact

SEQ ID NO: 301330 - DNA, 25 bp, Artificial
  Probe
tgagggtatcatcaccatcgagtct

SEQ ID NO: 301331 - DNA, 25 bp, Artificial
  Probe
tatagatggactaaccctggggacc

SEQ ID NO: 301332 - DNA, 25 bp, Artificial
  Probe
tggagccgacacaaggacccagcct

SEQ ID NO: 301333 - DNA, 25 bp, Artificial
  Probe
agctggagccgacacaaggacccag

SEQ ID NO: 301334 - DNA, 25 bp, Artificial
  Probe
cgagtctcaggatggaggccccttc

SEQ ID NO: 301335 - DNA, 25 bp, Artificial
  Probe
gccgacacaaggacccagcctttgt

SEQ ID NO: 301336 - DNA, 25 bp, Artificial
  Probe
ggcccgagcgtgagggtatcatcac

SEQ ID NO: 301337 - DNA, 25 bp, Artificial
  Probe
ccagcacctgtagtcagagagcggg

SEQ ID NO: 301338 - DNA, 25 bp, Artificial
  Probe
gggcagccattctgggcttttccag

SEQ ID NO: 301339 - DNA, 25 bp, Artificial
  Probe
aaggacccagcctttgttctgcact

SEQ ID NO: 301340 - DNA, 25 bp, Artificial
  Probe
ctctgctgttgtacccacctgcatg

SEQ ID NO: 301341 - DNA, 25 bp, Artificial
  Probe
gcgccttcttcctctgctgttgtac

SEQ ID NO: 301342 - DNA, 25 bp, Artificial
  Probe
ccactgcaaagtgagtacagcactg

SEQ ID NO: 301343 - DNA, 25 bp, Artificial
  Probe
tgttgtacccacctgcatgctgatc

SEQ ID NO: 301344 - DNA, 25 bp, Artificial
  Probe
aagctggagccgacacaaggaccca

SEQ ID NO: 301345 - DNA, 25 bp, Artificial
  Probe
cttatagatggactaaccctgggga

SEQ ID NO: 301346 - DNA, 25 bp, Artificial
  Probe
gctgttgtacccacctgcatgctga

SEQ ID NO: 301347 - DNA, 25 bp, Artificial
  Probe
tggaccaacagttcttccaaacctg

SEQ ID NO: 301348 - DNA, 25 bp, Artificial
  Probe
ctggcgccttcttcctctgctgttg

SEQ ID NO: 301349 - DNA, 25 bp, Artificial
  Probe
ggcttttccagaacccactgcaaag

SEQ ID NO: 301350 - DNA, 25 bp, Artificial
  Probe
tcagcactcatatggaccaacagtt

SEQ ID NO: 301351 - DNA, 25 bp, Artificial
  Probe
acacaagacctctgactgcatcctg

SEQ ID NO: 301352 - DNA, 25 bp, Artificial
  Probe
agtacagcactgtcaccagcactca

SEQ ID NO: 301353 - DNA, 25 bp, Artificial
  Probe
cacctgcatgctgatcacagagcca

SEQ ID NO: 301354 - DNA, 25 bp, Artificial
  Probe
tcatctctcagtcaattaggttcag

SEQ ID NO: 301355 - DNA, 25 bp, Artificial
  Probe
tgcggaggacctttaaggagatcat

SEQ ID NO: 301356 - DNA, 25 bp, Artificial
  Probe
gatctcgtgccctcagaacgtctat

SEQ ID NO: 301357 - DNA, 25 bp, Artificial
  Probe
tgggttcaggcgaacttgtacgctc

SEQ ID NO: 301358 - DNA, 25 bp, Artificial
  Probe
tgacctggtaagtggcctcaggaga

SEQ ID NO: 301359 - DNA, 25 bp, Artificial
  Probe
cagaacgtctattgcgcttgcttta

SEQ ID NO: 301360 - DNA, 25 bp, Artificial
  Probe
ctaaggagctcagatggactcctcc

SEQ ID NO: 301361 - DNA, 25 bp, Artificial
  Probe
agtcgtctccgtggtgagactggcc

SEQ ID NO: 301362 - DNA, 25 bp, Artificial
  Probe
cgcgtggcggcctatattaccatta

SEQ ID NO: 301363 - DNA, 25 bp, Artificial
  Probe
tgagacagttgtctttttactcctt

SEQ ID NO: 301364 - DNA, 25 bp, Artificial
  Probe
ggagatcatctgttgtcatgggttc

SEQ ID NO: 301365 - DNA, 25 bp, Artificial
  Probe
tggtaagtggcctcaggagatgcat

SEQ ID NO: 301366 - DNA, 25 bp, Artificial
  Probe
agcagggccgctaaggagctcagat

SEQ ID NO: 301367 - DNA, 25 bp, Artificial
  Probe
ttaggttcagccagggcatgagcag

SEQ ID NO: 301368 - DNA, 25 bp, Artificial
  Probe
cagctcggtttggttatggcgtgtt

SEQ ID NO: 301369 - DNA, 25 bp, Artificial
  Probe
aggagatgcataacctcctgggtga

SEQ ID NO: 301370 - DNA, 25 bp, Artificial
  Probe
aagtgtgcatgtgtgagtcgtctcc

SEQ ID NO: 301371 - DNA, 25 bp, Artificial
  Probe
tattaccattagtggcctttgtgtt

SEQ ID NO: 301372 - DNA, 25 bp, Artificial
  Probe
gtgagactggcctgagacagttgtc

SEQ ID NO: 301373 - DNA, 25 bp, Artificial
  Probe
gcagccaagagatgcggaggacctt

SEQ ID NO: 301374 - DNA, 25 bp, Artificial
  Probe
tccttggcaggtattaaaacacctt

SEQ ID NO: 301375 - DNA, 25 bp, Artificial
  Probe
ctccttatctccttggcagctcggt

SEQ ID NO: 301376 - DNA, 25 bp, Artificial
  Probe
ctattgcgcttgctttatgtcttac

SEQ ID NO: 301377 - DNA, 25 bp, Artificial
  Probe
ctccttggcagctcggtttggttat

SEQ ID NO: 301378 - DNA, 25 bp, Artificial
  Probe
gatgcggaggacctttaaggagatc

SEQ ID NO: 301379 - DNA, 25 bp, Artificial
  Probe
cgtctattgcgcttgctttatgtct

SEQ ID NO: 301380 - DNA, 25 bp, Artificial
  Probe
gcctctcatctctcagtcaattagg

SEQ ID NO: 301381 - DNA, 25 bp, Artificial
  Probe
gcgcttgctttatgtcttactttaa

SEQ ID NO: 301382 - DNA, 25 bp, Artificial
  Probe
gatcatgtgcaattccgtgatcgat

SEQ ID NO: 301383 - DNA, 25 bp, Artificial
  Probe
tccgtggtgagactggcctgagaca

SEQ ID NO: 301384 - DNA, 25 bp, Artificial
  Probe
tcattgaaagaaaccgcgtggcggc

SEQ ID NO: 301385 - DNA, 25 bp, Artificial
  Probe
ctcctgggtgagttgtcattgaaag

SEQ ID NO: 301386 - DNA, 25 bp, Artificial
  Probe
taacctcctgggtgagttgtcattg

SEQ ID NO: 301387 - DNA, 25 bp, Artificial
  Probe
ttttagaaggttttcaccattcctg

SEQ ID NO: 301388 - DNA, 25 bp, Artificial
  Probe
catgtgtgagtcgtctccgtggtga

SEQ ID NO: 301389 - DNA, 25 bp, Artificial
  Probe
acctttaaggagatcatctgttgtc

SEQ ID NO: 301390 - DNA, 25 bp, Artificial
  Probe
acatgtaccttatactgatcatgtg

SEQ ID NO: 301391 - DNA, 25 bp, Artificial
  Probe
ctaatgatctcgtgccctcagaacg

SEQ ID NO: 301392 - DNA, 25 bp, Artificial
  Probe
ccattagtggcctttgtgtttctct

SEQ ID NO: 301393 - DNA, 25 bp, Artificial
  Probe
ggccgctaaggagctcagatggact

SEQ ID NO: 301394 - DNA, 25 bp, Artificial
  Probe
tgtcatgggttcaggcgaacttgta

SEQ ID NO: 301395 - DNA, 25 bp, Artificial
  Probe
ttatactgatcatgtgcaattccgt

SEQ ID NO: 301396 - DNA, 25 bp, Artificial
  Probe
gtaccttatactgatcatgtgcaat

SEQ ID NO: 301397 - DNA, 25 bp, Artificial
  Probe
cctttaaggagatcatctgttgtca

SEQ ID NO: 301398 - DNA, 25 bp, Artificial
  Probe
tccgcagccaagagatgcggaggac

SEQ ID NO: 301399 - DNA, 25 bp, Artificial
  Probe
tggcctcaggagatgcataacctcc

SEQ ID NO: 301400 - DNA, 25 bp, Artificial
  Probe
gtcatctgcaatctgccattctcag

SEQ ID NO: 301401 - DNA, 25 bp, Artificial
  Probe
catcagggccttgacatgctcgacc

SEQ ID NO: 301402 - DNA, 25 bp, Artificial
  Probe
cagcaaccttgatgggccggaagaa

SEQ ID NO: 301403 - DNA, 25 bp, Artificial
  Probe
cttgacatgctcgacctgctgggcc

SEQ ID NO: 301404 - DNA, 25 bp, Artificial
  Probe
ctccaagttagtgtttctcatttgc

SEQ ID NO: 301405 - DNA, 25 bp, Artificial
  Probe
tttgactctagtcatctgcaatctg

SEQ ID NO: 301406 - DNA, 25 bp, Artificial
  Probe
tctgccattctcagggcctccaagt

SEQ ID NO: 301407 - DNA, 25 bp, Artificial
  Probe
ttctcatttgcctggaatgaactga

SEQ ID NO: 301408 - DNA, 25 bp, Artificial
  Probe
aatctgccattctcagggcctccaa

SEQ ID NO: 301409 - DNA, 25 bp, Artificial
  Probe
gttagtgtttctcatttgcctggaa

SEQ ID NO: 301410 - DNA, 25 bp, Artificial
  Probe
aagttagtgtttctcatttgcctgg

SEQ ID NO: 301411 - DNA, 25 bp, Artificial
  Probe
ccacattccagctgtcgagtggagg

SEQ ID NO: 301412 - DNA, 25 bp, Artificial
  Probe
ttagtgtttctcatttgcctggaat

SEQ ID NO: 301413 - DNA, 25 bp, Artificial
  Probe
agaacatgagcacagccagaagccc

SEQ ID NO: 301414 - DNA, 25 bp, Artificial
  Probe
tgatgggccggaagaacatgagcac

SEQ ID NO: 301415 - DNA, 25 bp, Artificial
  Probe
agaagccccatcagggccttgacat

SEQ ID NO: 301416 - DNA, 25 bp, Artificial
  Probe
tcagggccttgacatgctcgacctg

SEQ ID NO: 301417 - DNA, 25 bp, Artificial
  Probe
gaggacttcacaatctctttttgac

SEQ ID NO: 301418 - DNA, 25 bp, Artificial
  Probe
tgcaatctgccattctcagggcctc

SEQ ID NO: 301419 - DNA, 25 bp, Artificial
  Probe
agggcctccaagttagtgtttctca

SEQ ID NO: 301420 - DNA, 25 bp, Artificial
  Probe
atgagcacagccagaagccccatca

SEQ ID NO: 301421 - DNA, 25 bp, Artificial
  Probe
agtgtttctcatttgcctggaatga

SEQ ID NO: 301422 - DNA, 25 bp, Artificial
  Probe
gcctccaagttagtgtttctcattt

SEQ ID NO: 301423 - DNA, 25 bp, Artificial
  Probe
ctgcaatctgccattctcagggcct

SEQ ID NO: 301424 - DNA, 25 bp, Artificial
  Probe
gagaggacttcacaatctctttttg

SEQ ID NO: 301425 - DNA, 25 bp, Artificial
  Probe
ttgatgggccggaagaacatgagca

SEQ ID NO: 301426 - DNA, 25 bp, Artificial
  Probe
ccccacattccagctgtcgagtgga

SEQ ID NO: 301427 - DNA, 25 bp, Artificial
  Probe
agaggacttcacaatctctttttga

SEQ ID NO: 301428 - DNA, 25 bp, Artificial
  Probe
cagggccttgacatgctcgacctgc

SEQ ID NO: 301429 - DNA, 25 bp, Artificial
  Probe
gactctagtcatctgcaatctgcca

SEQ ID NO: 301430 - DNA, 25 bp, Artificial
  Probe
agcacagccagaagccccatcaggg

SEQ ID NO: 301431 - DNA, 25 bp, Artificial
  Probe
tcatctgcaatctgccattctcagg

SEQ ID NO: 301432 - DNA, 25 bp, Artificial
  Probe
gggcctccaagttagtgtttctcat

SEQ ID NO: 301433 - DNA, 25 bp, Artificial
  Probe
atctgccattctcagggcctccaag

SEQ ID NO: 301434 - DNA, 25 bp, Artificial
  Probe
gtgtttctcatttgcctggaatgaa

SEQ ID NO: 301435 - DNA, 25 bp, Artificial
  Probe
attctcagggcctccaagttagtgt

SEQ ID NO: 301436 - DNA, 25 bp, Artificial
  Probe
cagaagccccatcagggccttgaca

SEQ ID NO: 301437 - DNA, 25 bp, Artificial
  Probe
tgactctagtcatctgcaatctgcc

SEQ ID NO: 301438 - DNA, 25 bp, Artificial
  Probe
gccagaagccccatcagggccttga

SEQ ID NO: 301439 - DNA, 25 bp, Artificial
  Probe
cccatcagggccttgacatgctcga

SEQ ID NO: 301440 - DNA, 25 bp, Artificial
  Probe
tgacatgctcgacctgctgggccca

SEQ ID NO: 301441 - DNA, 25 bp, Artificial
  Probe
gggccttgacatgctcgacctgctg

SEQ ID NO: 301442 - DNA, 25 bp, Artificial
  Probe
gagcacagccagaagccccatcagg

SEQ ID NO: 301443 - DNA, 25 bp, Artificial
  Probe
gaacatgagcacagccagaagcccc

SEQ ID NO: 301444 - DNA, 25 bp, Artificial
  Probe
ctcatttgcctggaatgaactgaat

SEQ ID NO: 301445 - DNA, 25 bp, Artificial
  Probe
cccacattccagctgtcgagtggag

SEQ ID NO: 301446 - DNA, 25 bp, Artificial
  Probe
agactgtgtgtgactgaaaagcaac

SEQ ID NO: 301447 - DNA, 25 bp, Artificial
  Probe
cgtgggttccaaacaacgctcgtat

SEQ ID NO: 301448 - DNA, 25 bp, Artificial
  Probe
tgaattgccctgtgcagagttgtga

SEQ ID NO: 301449 - DNA, 25 bp, Artificial
  Probe
ctttattcggagactctgtcggggt

SEQ ID NO: 301450 - DNA, 25 bp, Artificial
  Probe
ctggcacaggaacgtgggttccaaa

SEQ ID NO: 301451 - DNA, 25 bp, Artificial
  Probe
acctggccatccaggaagtgttccg

SEQ ID NO: 301452 - DNA, 25 bp, Artificial
  Probe
gaaacacacctactctgagaggaag

SEQ ID NO: 301453 - DNA, 25 bp, Artificial
  Probe
gtttcctgtggtattcgagctaaaa

SEQ ID NO: 301454 - DNA, 25 bp, Artificial
  Probe
atacgcaggcgtcaaatatgcaaac

SEQ ID NO: 301455 - DNA, 25 bp, Artificial
  Probe
caaacaacgctcgtatggactgaaa

SEQ ID NO: 301456 - DNA, 25 bp, Artificial
  Probe
gggttccaaacaacgctcgtatgga

SEQ ID NO: 301457 - DNA, 25 bp, Artificial
  Probe
ctgaattgccctgtgcagagttgtg

SEQ ID NO: 301458 - DNA, 25 bp, Artificial
  Probe
cgctcgtatggactgaaaagatacg

SEQ ID NO: 301459 - DNA, 25 bp, Artificial
  Probe
acctactctgagaggaagttctttt

SEQ ID NO: 301460 - DNA, 25 bp, Artificial
  Probe
gatacgcaggcgtcaaatatgcaaa

SEQ ID NO: 301461 - DNA, 25 bp, Artificial
  Probe
acgcaggcgtcaaatatgcaaacga

SEQ ID NO: 301462 - DNA, 25 bp, Artificial
  Probe
ccaaacaacgctcgtatggactgaa

SEQ ID NO: 301463 - DNA, 25 bp, Artificial
  Probe
acaacgctcgtatggactgaaaaga

SEQ ID NO: 301464 - DNA, 25 bp, Artificial
  Probe
tggcacaggaacgtgggttccaaac

SEQ ID NO: 301465 - DNA, 25 bp, Artificial
  Probe
tttgtttcctgtggtattcgagcta

SEQ ID NO: 301466 - DNA, 25 bp, Artificial
  Probe
tcaaatgattcagtattctgtggtc

SEQ ID NO: 301467 - DNA, 25 bp, Artificial
  Probe
tccaaacaacgctcgtatggactga

SEQ ID NO: 301468 - DNA, 25 bp, Artificial
  Probe
tttcctgtggtattcgagctaaaaa

SEQ ID NO: 301469 - DNA, 25 bp, Artificial
  Probe
gcccacctggccatccaggaagtgt

SEQ ID NO: 301470 - DNA, 25 bp, Artificial
  Probe
cggggaaacacacctactctgagag

SEQ ID NO: 301471 - DNA, 25 bp, Artificial
  Probe
ttgtttcctgtggtattcgagctaa

SEQ ID NO: 301472 - DNA, 25 bp, Artificial
  Probe
tccttcactgaattgccctgtgcag

SEQ ID NO: 301473 - DNA, 25 bp, Artificial
  Probe
aagtggctcaaatgattcagtattc

SEQ ID NO: 301474 - DNA, 25 bp, Artificial
  Probe
gctggcacaggaacgtgggttccaa

SEQ ID NO: 301475 - DNA, 25 bp, Artificial
  Probe
ttgccctgtgcagagttgtgagtac

SEQ ID NO: 301476 - DNA, 25 bp, Artificial
  Probe
gactcaattctttctgcccacctgg

SEQ ID NO: 301477 - DNA, 25 bp, Artificial
  Probe
gcgtcaaatatgcaaacgagataga

SEQ ID NO: 301478 - DNA, 25 bp, Artificial
  Probe
agtggctcaaatgattcagtattct

SEQ ID NO: 301479 - DNA, 25 bp, Artificial
  Probe
ggccatccaggaagtgttccgacgg

SEQ ID NO: 301480 - DNA, 25 bp, Artificial
  Probe
aaatccttcactgaattgccctgtg

SEQ ID NO: 301481 - DNA, 25 bp, Artificial
  Probe
acacacctactctgagaggaagttc

SEQ ID NO: 301482 - DNA, 25 bp, Artificial
  Probe
catccaggaagtgttccgacggttg

SEQ ID NO: 301483 - DNA, 25 bp, Artificial
  Probe
attgccctgtgcagagttgtgagta

SEQ ID NO: 301484 - DNA, 25 bp, Artificial
  Probe
ggaaacacacctactctgagaggaa

SEQ ID NO: 301485 - DNA, 25 bp, Artificial
  Probe
ttattcggagactctgtcggggtga

SEQ ID NO: 301486 - DNA, 25 bp, Artificial
  Probe
tttattcggagactctgtcggggtg

SEQ ID NO: 301487 - DNA, 25 bp, Artificial
  Probe
caaatgattcagtattctgtggtcc

SEQ ID NO: 301488 - DNA, 25 bp, Artificial
  Probe
aacacacctactctgagaggaagtt

SEQ ID NO: 301489 - DNA, 25 bp, Artificial
  Probe
gaattgccctgtgcagagttgtgag

SEQ ID NO: 301490 - DNA, 25 bp, Artificial
  Probe
acacctactctgagaggaagttctt

SEQ ID NO: 301491 - DNA, 25 bp, Artificial
  Probe
ggctttattcggagactctgtcggg

SEQ ID NO: 301492 - DNA, 25 bp, Artificial
  Probe
ccttgctgggccaggggaacaaagt

SEQ ID NO: 301493 - DNA, 25 bp, Artificial
  Probe
gcataggaagcttcaaggagctgct

SEQ ID NO: 301494 - DNA, 25 bp, Artificial
  Probe
tgtctaccctggtgagcgtttttgt

SEQ ID NO: 301495 - DNA, 25 bp, Artificial
  Probe
ctgcttggtagtctctgtgtggttg

SEQ ID NO: 301496 - DNA, 25 bp, Artificial
  Probe
taaggagaaggctctgctctgcctg

SEQ ID NO: 301497 - DNA, 25 bp, Artificial
  Probe
ttccagcggtgaaggctagacaaaa

SEQ ID NO: 301498 - DNA, 25 bp, Artificial
  Probe
gctgacacattcctgaaagaggaag

SEQ ID NO: 301499 - DNA, 25 bp, Artificial
  Probe
cttctcagtggtattgtgactaagt

SEQ ID NO: 301500 - DNA, 25 bp, Artificial
  Probe
ctgcctgaggaggaagacagcacaa

SEQ ID NO: 301501 - DNA, 25 bp, Artificial
  Probe
aaactgtactgtgtctcgcattaag

SEQ ID NO: 301502 - DNA, 25 bp, Artificial
  Probe
aggaaggctcattatgctctcccaa

SEQ ID NO: 301503 - DNA, 25 bp, Artificial
  Probe
cactgcccacatttgggctcagggt

SEQ ID NO: 301504 - DNA, 25 bp, Artificial
  Probe
ctgtggaatgccatgaactgggttc

SEQ ID NO: 301505 - DNA, 25 bp, Artificial
  Probe
tcaatggagacaaccgcctctagtc

SEQ ID NO: 301506 - DNA, 25 bp, Artificial
  Probe
ggtaagcctcacctctgaggacagg

SEQ ID NO: 301507 - DNA, 25 bp, Artificial
  Probe
ggccccaagaaggactcgggtcaat

SEQ ID NO: 301508 - DNA, 25 bp, Artificial
  Probe
agctgttccatgtccgggcccggga

SEQ ID NO: 301509 - DNA, 25 bp, Artificial
  Probe
tcagttggtggcataggaagcttca

SEQ ID NO: 301510 - DNA, 25 bp, Artificial
  Probe
caaagtttacattgtcctgtagctt

SEQ ID NO: 301511 - DNA, 25 bp, Artificial
  Probe
acagcagctctatggggtgttgtta

SEQ ID NO: 301512 - DNA, 25 bp, Artificial
  Probe
agcctcacctctgaggacagggtgg

SEQ ID NO: 301513 - DNA, 25 bp, Artificial
  Probe
tggagtcaggcagtaggcaccaaat

SEQ ID NO: 301514 - DNA, 25 bp, Artificial
  Probe
cagcctgaaagatacaggggatcat

SEQ ID NO: 301515 - DNA, 25 bp, Artificial
  Probe
ggagcggtctactgtaaagccttcc

SEQ ID NO: 301516 - DNA, 25 bp, Artificial
  Probe
atgccctgaggcttggccctggagc

SEQ ID NO: 301517 - DNA, 25 bp, Artificial
  Probe
agcatagccagcattcagcacacgc

SEQ ID NO: 301518 - DNA, 25 bp, Artificial
  Probe
gttgttactggaagagggcactgtc

SEQ ID NO: 301519 - DNA, 25 bp, Artificial
  Probe
ggaagggtcctttgaagccagatac

SEQ ID NO: 301520 - DNA, 25 bp, Artificial
  Probe
ccctaccttgttggagagcagcagc

SEQ ID NO: 301521 - DNA, 25 bp, Artificial
  Probe
ggaacgggcctcagatgcctccagc

SEQ ID NO: 301522 - DNA, 25 bp, Artificial
  Probe
ccacagctggtcagggtgaaagagt

SEQ ID NO: 301523 - DNA, 25 bp, Artificial
  Probe
tctcccaaaggaatggagacatggg

SEQ ID NO: 301524 - DNA, 25 bp, Artificial
  Probe
tttcttctcagtggtattgtgacta

SEQ ID NO: 301525 - DNA, 25 bp, Artificial
  Probe
aggtgggtccctccatcttgggcca

SEQ ID NO: 301526 - DNA, 25 bp, Artificial
  Probe
tagccagcattcagcacacgcaaac

SEQ ID NO: 301527 - DNA, 25 bp, Artificial
  Probe
agctctgggtgaaggcaaaaaactg

SEQ ID NO: 301528 - DNA, 25 bp, Artificial
  Probe
gagtagatgccctgaggcttggccc

SEQ ID NO: 301529 - DNA, 25 bp, Artificial
  Probe
tattctgtcctgctcctcaccttgg

SEQ ID NO: 301530 - DNA, 25 bp, Artificial
  Probe
acatctggccctgaatgtggaggtg

SEQ ID NO: 301531 - DNA, 25 bp, Artificial
  Probe
ccctggagccaggtcagaggaatgc

SEQ ID NO: 301532 - DNA, 25 bp, Artificial
  Probe
tgacagtcgggaacgaagggcccca

SEQ ID NO: 301533 - DNA, 25 bp, Artificial
  Probe
cctggagccaggtcagaggaatgca

SEQ ID NO: 301534 - DNA, 25 bp, Artificial
  Probe
atgcctccagccagctgttccatgt

SEQ ID NO: 301535 - DNA, 25 bp, Artificial
  Probe
aaatcgatgtctaccctggtgagcg

SEQ ID NO: 301536 - DNA, 25 bp, Artificial
  Probe
attgtgactaagttattctgtcctg

SEQ ID NO: 301537 - DNA, 25 bp, Artificial
  Probe
gaagacagcacaagggcacattgcc

SEQ ID NO: 301538 - DNA, 25 bp, Artificial
  Probe
cctctaaatgcatggcctttgttcc

SEQ ID NO: 301539 - DNA, 25 bp, Artificial
  Probe
gatgtacatatcattcctgtagctt

SEQ ID NO: 301540 - DNA, 25 bp, Artificial
  Probe
catatcattcctgtagctttagacg

SEQ ID NO: 301541 - DNA, 25 bp, Artificial
  Probe
ccaatgtacagtaggcatttccgtt

SEQ ID NO: 301542 - DNA, 25 bp, Artificial
  Probe
gagtcttctgactattttgatcccc

SEQ ID NO: 301543 - DNA, 25 bp, Artificial
  Probe
atgcatggcctttgttccaggtccc

SEQ ID NO: 301544 - DNA, 25 bp, Artificial
  Probe
agcagaactcctagtgatgtacata

SEQ ID NO: 301545 - DNA, 25 bp, Artificial
  Probe
tgcatggcctttgttccaggtccca

SEQ ID NO: 301546 - DNA, 25 bp, Artificial
  Probe
gtgatgtacatatcattcctgtagc

SEQ ID NO: 301547 - DNA, 25 bp, Artificial
  Probe
gctttagacgtacactttagaaata

SEQ ID NO: 301548 - DNA, 25 bp, Artificial
  Probe
tccgttctgatatctgagtcttctg

SEQ ID NO: 301549 - DNA, 25 bp, Artificial
  Probe
gtagctttagacgtacactttagaa

SEQ ID NO: 301550 - DNA, 25 bp, Artificial
  Probe
tctgatatctgagtcttctgactat

SEQ ID NO: 301551 - DNA, 25 bp, Artificial
  Probe
tctgagtcttctgactattttgatc

SEQ ID NO: 301552 - DNA, 25 bp, Artificial
  Probe
ccagagtaccgtggagcagaactcc

SEQ ID NO: 301553 - DNA, 25 bp, Artificial
  Probe
gaactcctagtgatgtacatatcat

SEQ ID NO: 301554 - DNA, 25 bp, Artificial
  Probe
actgctggccctctaaatgcatggc

SEQ ID NO: 301555 - DNA, 25 bp, Artificial
  Probe
ctcccaatgtacagtaggcatttcc

SEQ ID NO: 301556 - DNA, 25 bp, Artificial
  Probe
taggcatttccgttctgatatctga

SEQ ID NO: 301557 - DNA, 25 bp, Artificial
  Probe
tttgatccccttgactgctggccct

SEQ ID NO: 301558 - DNA, 25 bp, Artificial
  Probe
catggcctttgttccaggtcccaga

SEQ ID NO: 301559 - DNA, 25 bp, Artificial
  Probe
ctgactattttgatccccttgactg

SEQ ID NO: 301560 - DNA, 25 bp, Artificial
  Probe
taccgtggagcagaactcctagtga

SEQ ID NO: 301561 - DNA, 25 bp, Artificial
  Probe
ggagcagaactcctagtgatgtaca

SEQ ID NO: 301562 - DNA, 25 bp, Artificial
  Probe
tgactattttgatccccttgactgc

SEQ ID NO: 301563 - DNA, 25 bp, Artificial
  Probe
gcatttccgttctgatatctgagtc

SEQ ID NO: 301564 - DNA, 25 bp, Artificial
  Probe
agtaccgtggagcagaactcctagt

SEQ ID NO: 301565 - DNA, 25 bp, Artificial
  Probe
gactgctggccctctaaatgcatgg

SEQ ID NO: 301566 - DNA, 25 bp, Artificial
  Probe
acagtaggcatttccgttctgatat

SEQ ID NO: 301567 - DNA, 25 bp, Artificial
  Probe
gtggagcagaactcctagtgatgta

SEQ ID NO: 301568 - DNA, 25 bp, Artificial
  Probe
aggcatttccgttctgatatctgag

SEQ ID NO: 301569 - DNA, 25 bp, Artificial
  Probe
tgtacagtaggcatttccgttctga

SEQ ID NO: 301570 - DNA, 25 bp, Artificial
  Probe
aaatgcatggcctttgttccaggtc

SEQ ID NO: 301571 - DNA, 25 bp, Artificial
  Probe
ttcctgtagctttagacgtacactt

SEQ ID NO: 301572 - DNA, 25 bp, Artificial
  Probe
aggtcccagactgacagttgttaga

SEQ ID NO: 301573 - DNA, 25 bp, Artificial
  Probe
ctttgttccaggtcccagactgaca

SEQ ID NO: 301574 - DNA, 25 bp, Artificial
  Probe
tgatatctgagtcttctgactattt

SEQ ID NO: 301575 - DNA, 25 bp, Artificial
  Probe
attttgatccccttgactgctggcc

SEQ ID NO: 301576 - DNA, 25 bp, Artificial
  Probe
gtacagtaggcatttccgttctgat

SEQ ID NO: 301577 - DNA, 25 bp, Artificial
  Probe
agagtaccgtggagcagaactccta

SEQ ID NO: 301578 - DNA, 25 bp, Artificial
  Probe
tggcctttgttccaggtcccagact

SEQ ID NO: 301579 - DNA, 25 bp, Artificial
  Probe
accagagtaccgtggagcagaactc

SEQ ID NO: 301580 - DNA, 25 bp, Artificial
  Probe
ttccaggtcccagactgacagttgt

SEQ ID NO: 301581 - DNA, 25 bp, Artificial
  Probe
atgcaccagagtaccgtggagcaga

SEQ ID NO: 301582 - DNA, 25 bp, Artificial
  Probe
gtacatatcattcctgtagctttag

SEQ ID NO: 301583 - DNA, 25 bp, Artificial
  Probe
aagactcccaatgtacagtaggcat

SEQ ID NO: 301584 - DNA, 25 bp, Artificial
  Probe
aggtcagctccctgaagaacaaact

SEQ ID NO: 301585 - DNA, 25 bp, Artificial
  Probe
gtccggaaaggcactggcgactgct

SEQ ID NO: 301586 - DNA, 25 bp, Artificial
  Probe
agcagctggacaacgagaccaagga

SEQ ID NO: 301587 - DNA, 25 bp, Artificial
  Probe
agctgaaggatgtgctgctgcaagt

SEQ ID NO: 301588 - DNA, 25 bp, Artificial
  Probe
aggcagcctccaagcaggtgcgccg

SEQ ID NO: 301589 - DNA, 25 bp, Artificial
  Probe
agttcaaggaccaggccgacaaggc

SEQ ID NO: 301590 - DNA, 25 bp, Artificial
  Probe
ggaggatgccacagagactgccgat

SEQ ID NO: 301591 - DNA, 25 bp, Artificial
  Probe
tgagctggaggatgccacagagact

SEQ ID NO: 301592 - DNA, 25 bp, Artificial
  Probe
cgagaggtcagctccctgaagaaca

SEQ ID NO: 301593 - DNA, 25 bp, Artificial
  Probe
ccgagtagggacttctgctacccaa

SEQ ID NO: 301594 - DNA, 25 bp, Artificial
  Probe
acgcggagcagttcaaggaccaggc

SEQ ID NO: 301595 - DNA, 25 bp, Artificial
  Probe
ggaccaggccgacaaggcatccact

SEQ ID NO: 301596 - DNA, 25 bp, Artificial
  Probe
aaggcactggcgactgctcagacga

SEQ ID NO: 301597 - DNA, 25 bp, Artificial
  Probe
aggaccaggccgacaaggcatccac

SEQ ID NO: 301598 - DNA, 25 bp, Artificial
  Probe
gtgacccgccgaattgtccggaaag

SEQ ID NO: 301599 - DNA, 25 bp, Artificial
  Probe
ctgaagcagcttaagcggcagctag

SEQ ID NO: 301600 - DNA, 25 bp, Artificial
  Probe
gatgccacagagactgccgatgcta

SEQ ID NO: 301601 - DNA, 25 bp, Artificial
  Probe
caaggcatccactcgcctgaagcag

SEQ ID NO: 301602 - DNA, 25 bp, Artificial
  Probe
tgctatgaaccgagaggtcagctcc

SEQ ID NO: 301603 - DNA, 25 bp, Artificial
  Probe
tgtgacccgccgaattgtccggaaa

SEQ ID NO: 301604 - DNA, 25 bp, Artificial
  Probe
acgagaccaaggagcgccaggcagc

SEQ ID NO: 301605 - DNA, 25 bp, Artificial
  Probe
caagacggatggacagacggctcca

SEQ ID NO: 301606 - DNA, 25 bp, Artificial
  Probe
cgactgctcagacgaggaggtcgac

SEQ ID NO: 301607 - DNA, 25 bp, Artificial
  Probe
tacccaagacggatggacagacggc

SEQ ID NO: 301608 - DNA, 25 bp, Artificial
  Probe
ccctgaagaacaaactgaggcgtgg

SEQ ID NO: 301609 - DNA, 25 bp, Artificial
  Probe
gcagttcaaggaccaggccgacaag

SEQ ID NO: 301610 - DNA, 25 bp, Artificial
  Probe
cactggcgactgctcagacgaggag

SEQ ID NO: 301611 - DNA, 25 bp, Artificial
  Probe
ccgatgctatgaaccgagaggtcag

SEQ ID NO: 301612 - DNA, 25 bp, Artificial
  Probe
ggcattggcttcctctgctgcatcc

SEQ ID NO: 301613 - DNA, 25 bp, Artificial
  Probe
cttctgctacccaagacggatggac

SEQ ID NO: 301614 - DNA, 25 bp, Artificial
  Probe
ggagcgccaggcagcctccaagcag

SEQ ID NO: 301615 - DNA, 25 bp, Artificial
  Probe
ctgctacccaagacggatggacaga

SEQ ID NO: 301616 - DNA, 25 bp, Artificial
  Probe
aggaacgcggagcagttcaaggacc

SEQ ID NO: 301617 - DNA, 25 bp, Artificial
  Probe
cagagactgccgatgctatgaaccg

SEQ ID NO: 301618 - DNA, 25 bp, Artificial
  Probe
ccggaaaggcactggcgactgctca

SEQ ID NO: 301619 - DNA, 25 bp, Artificial
  Probe
ctcagacgaggaggtcgacggtaaa

SEQ ID NO: 301620 - DNA, 25 bp, Artificial
  Probe
gggacttctgctacccaagacggat

SEQ ID NO: 301621 - DNA, 25 bp, Artificial
  Probe
atgtgctgctgcaagtggaagacga

SEQ ID NO: 301622 - DNA, 25 bp, Artificial
  Probe
cgacaaggcatccactcgcctgaag

SEQ ID NO: 301623 - DNA, 25 bp, Artificial
  Probe
ctgccttgagactgctctgcccatg

SEQ ID NO: 301624 - DNA, 25 bp, Artificial
  Probe
tgccttgagactgctctgcccatgc

SEQ ID NO: 301625 - DNA, 25 bp, Artificial
  Probe
catccactcgcctgaagcagcttaa

SEQ ID NO: 301626 - DNA, 25 bp, Artificial
  Probe
tgccacagagactgccgatgctatg

SEQ ID NO: 301627 - DNA, 25 bp, Artificial
  Probe
tggggacatgccatttgttgtgacc

SEQ ID NO: 301628 - DNA, 25 bp, Artificial
  Probe
ccatttgttgtgacccgccgaattg

SEQ ID NO: 301629 - DNA, 25 bp, Artificial
  Probe
cgaattgtccggaaaggcactggcg

SEQ ID NO: 301630 - DNA, 25 bp, Artificial
  Probe
gttttctgtgaagcagcttctttgg

SEQ ID NO: 301631 - DNA, 25 bp, Artificial
  Probe
tcctgagcttgctgtggctccctac

SEQ ID NO: 301632 - DNA, 25 bp, Artificial
  Probe
gggtcagctgtcctcaggatgtgat

SEQ ID NO: 301633 - DNA, 25 bp, Artificial
  Probe
tcctgataagactgggtgcagcctg

SEQ ID NO: 301634 - DNA, 25 bp, Artificial
  Probe
agggctccatctatgttgctttggg

SEQ ID NO: 301635 - DNA, 25 bp, Artificial
  Probe
tgtcagtaagcctgacagactcaga

SEQ ID NO: 301636 - DNA, 25 bp, Artificial
  Probe
ctgacagactcagaggttcaccaag

SEQ ID NO: 301637 - DNA, 25 bp, Artificial
  Probe
gttgctttggggaccttgtcgtcta

SEQ ID NO: 301638 - DNA, 25 bp, Artificial
  Probe
aatcagggcggctttgacaagccaa

SEQ ID NO: 301639 - DNA, 25 bp, Artificial
  Probe
tggggaccttgtcgtctactctggg

SEQ ID NO: 301640 - DNA, 25 bp, Artificial
  Probe
ctgagcttgctgtggctccctacca

SEQ ID NO: 301641 - DNA, 25 bp, Artificial
  Probe
cacctgtcagtaagcctgacagact

SEQ ID NO: 301642 - DNA, 25 bp, Artificial
  Probe
tggacttgagtgtacttgtgccttt

SEQ ID NO: 301643 - DNA, 25 bp, Artificial
  Probe
tgtacttgtgcctttgatgtcgtat

SEQ ID NO: 301644 - DNA, 25 bp, Artificial
  Probe
tgtgggtcagctgtcctcaggatgt

SEQ ID NO: 301645 - DNA, 25 bp, Artificial
  Probe
gggttttctgtgaagcagcttcttt

SEQ ID NO: 301646 - DNA, 25 bp, Artificial
  Probe
tgaagtgagggctccatctatgttg

SEQ ID NO: 301647 - DNA, 25 bp, Artificial
  Probe
tgggtcagctgtcctcaggatgtga

SEQ ID NO: 301648 - DNA, 25 bp, Artificial
  Probe
cactgctgtgggtcagctgtcctca

SEQ ID NO: 301649 - DNA, 25 bp, Artificial
  Probe
tgagtgtacttgtgcctttgatgtc

SEQ ID NO: 301650 - DNA, 25 bp, Artificial
  Probe
tcagcactgctgtgggtcagctgtc

SEQ ID NO: 301651 - DNA, 25 bp, Artificial
  Probe
tcttgccccgtcagcactgctgtgg

SEQ ID NO: 301652 - DNA, 25 bp, Artificial
  Probe
ctccatctatgttgctttggggacc

SEQ ID NO: 301653 - DNA, 25 bp, Artificial
  Probe
ggatttattcacctgtcagtaagcc

SEQ ID NO: 301654 - DNA, 25 bp, Artificial
  Probe
tcttctatcctgagcttgctgtggc

SEQ ID NO: 301655 - DNA, 25 bp, Artificial
  Probe
taagactgggtgcagcctgttgacg

SEQ ID NO: 301656 - DNA, 25 bp, Artificial
  Probe
agccaaacgaagagatcctgataag

SEQ ID NO: 301657 - DNA, 25 bp, Artificial
  Probe
cttgagtgtacttgtgcctttgatg

SEQ ID NO: 301658 - DNA, 25 bp, Artificial
  Probe
gcctgacagactcagaggttcacca

SEQ ID NO: 301659 - DNA, 25 bp, Artificial
  Probe
tcagctgtcctcaggatgtgatctg

SEQ ID NO: 301660 - DNA, 25 bp, Artificial
  Probe
ttgtgcctttgatgtcgtatctggg

SEQ ID NO: 301661 - DNA, 25 bp, Artificial
  Probe
actgtcttaatcagggcggctttga

SEQ ID NO: 301662 - DNA, 25 bp, Artificial
  Probe
atctatgttgctttggggaccttgt

SEQ ID NO: 301663 - DNA, 25 bp, Artificial
  Probe
gctgtcctcaggatgtgatctggct

SEQ ID NO: 301664 - DNA, 25 bp, Artificial
  Probe
acactgtcttaatcagggcggcttt

SEQ ID NO: 301665 - DNA, 25 bp, Artificial
  Probe
ttgctttggggaccttgtcgtctac

SEQ ID NO: 301666 - DNA, 25 bp, Artificial
  Probe
ccccgtcagcactgctgtgggtcag

SEQ ID NO: 301667 - DNA, 25 bp, Artificial
  Probe
acaagccaaacgaagagatcctgat

SEQ ID NO: 301668 - DNA, 25 bp, Artificial
  Probe
ctttgacaagccaaacgaagagatc

SEQ ID NO: 301669 - DNA, 25 bp, Artificial
  Probe
tttgacaagccaaacgaagagatcc

SEQ ID NO: 301670 - DNA, 25 bp, Artificial
  Probe
aagagatcctgataagactgggtgc

SEQ ID NO: 301671 - DNA, 25 bp, Artificial
  Probe
tctcttctatcctgagcttgctgtg

SEQ ID NO: 301672 - DNA, 25 bp, Artificial
  Probe
gataagactgggtgcagcctgttga

SEQ ID NO: 301673 - DNA, 25 bp, Artificial
  Probe
ttgccccgtcagcactgctgtgggt

SEQ ID NO: 301674 - DNA, 25 bp, Artificial
  Probe
gcggctttgacaagccaaacgaaga

SEQ ID NO: 301675 - DNA, 25 bp, Artificial
  Probe
ctgtcctcaggatgtgatctggctg

SEQ ID NO: 301676 - DNA, 25 bp, Artificial
  Probe
ctgatcttaactggcccaatgttaa

SEQ ID NO: 301677 - DNA, 25 bp, Artificial
  Probe
aactggcccaatgttaatcattgca

SEQ ID NO: 301678 - DNA, 25 bp, Artificial
  Probe
tgcacagtactctacgttgcatata

SEQ ID NO: 301679 - DNA, 25 bp, Artificial
  Probe
cccaccagtctgatcttaactggcc

SEQ ID NO: 301680 - DNA, 25 bp, Artificial
  Probe
gttaatcattgcacagtactctacg

SEQ ID NO: 301681 - DNA, 25 bp, Artificial
  Probe
accagtctgatcttaactggcccaa

SEQ ID NO: 301682 - DNA, 25 bp, Artificial
  Probe
gtactctacgttgcatatataattt

SEQ ID NO: 301683 - DNA, 25 bp, Artificial
  Probe
tgttaatcattgcacagtactctac

SEQ ID NO: 301684 - DNA, 25 bp, Artificial
  Probe
ccaccagtctgatcttaactggccc

SEQ ID NO: 301685 - DNA, 25 bp, Artificial
  Probe
tatataatttgccattaattaacgg

SEQ ID NO: 301686 - DNA, 25 bp, Artificial
  Probe
cttaactggcccaatgttaatcatt

SEQ ID NO: 301687 - DNA, 25 bp, Artificial
  Probe
aatgttaatcattgcacagtactct

SEQ ID NO: 301688 - DNA, 25 bp, Artificial
  Probe
actggcccaatgttaatcattgcac

SEQ ID NO: 301689 - DNA, 25 bp, Artificial
  Probe
tcattgcacagtactctacgttgca

SEQ ID NO: 301690 - DNA, 25 bp, Artificial
  Probe
atcattgcacagtactctacgttgc

SEQ ID NO: 301691 - DNA, 25 bp, Artificial
  Probe
ccagtctgatcttaactggcccaat

SEQ ID NO: 301692 - DNA, 25 bp, Artificial
  Probe
gtctgatcttaactggcccaatgtt

SEQ ID NO: 301693 - DNA, 25 bp, Artificial
  Probe
taatcattgcacagtactctacgtt

SEQ ID NO: 301694 - DNA, 25 bp, Artificial
  Probe
tactctacgttgcatatataatttg

SEQ ID NO: 301695 - DNA, 25 bp, Artificial
  Probe
aatcattgcacagtactctacgttg

SEQ ID NO: 301696 - DNA, 25 bp, Artificial
  Probe
ccaatgttaatcattgcacagtact

SEQ ID NO: 301697 - DNA, 25 bp, Artificial
  Probe
tctacgttgcatatataatttgcca

SEQ ID NO: 301698 - DNA, 25 bp, Artificial
  Probe
taactggcccaatgttaatcattgc

SEQ ID NO: 301699 - DNA, 25 bp, Artificial
  Probe
gcacagtactctacgttgcatatat

SEQ ID NO: 301700 - DNA, 25 bp, Artificial
  Probe
agtctgatcttaactggcccaatgt

SEQ ID NO: 301701 - DNA, 25 bp, Artificial
  Probe
tctgatcttaactggcccaatgtta

SEQ ID NO: 301702 - DNA, 25 bp, Artificial
  Probe
gcccaatgttaatcattgcacagta

SEQ ID NO: 301703 - DNA, 25 bp, Artificial
  Probe
caatgttaatcattgcacagtactc

SEQ ID NO: 301704 - DNA, 25 bp, Artificial
  Probe
catatataatttgccattaattaac

SEQ ID NO: 301705 - DNA, 25 bp, Artificial
  Probe
actctacgttgcatatataatttgc

SEQ ID NO: 301706 - DNA, 25 bp, Artificial
  Probe
cagtctgatcttaactggcccaatg

SEQ ID NO: 301707 - DNA, 25 bp, Artificial
  Probe
cacagtactctacgttgcatatata

SEQ ID NO: 301708 - DNA, 25 bp, Artificial
  Probe
ctggcccaatgttaatcattgcaca

SEQ ID NO: 301709 - DNA, 25 bp, Artificial
  Probe
caccagtctgatcttaactggccca

SEQ ID NO: 301710 - DNA, 25 bp, Artificial
  Probe
agtactctacgttgcatatataatt

SEQ ID NO: 301711 - DNA, 25 bp, Artificial
  Probe
ccccccaccagtctgatcttaactg

SEQ ID NO: 301712 - DNA, 25 bp, Artificial
  Probe
ttaactggcccaatgttaatcattg

SEQ ID NO: 301713 - DNA, 25 bp, Artificial
  Probe
acagtactctacgttgcatatataa

SEQ ID NO: 301714 - DNA, 25 bp, Artificial
  Probe
ttaatcattgcacagtactctacgt

SEQ ID NO: 301715 - DNA, 25 bp, Artificial
  Probe
atataatttgccattaattaacggg

SEQ ID NO: 301716 - DNA, 25 bp, Artificial
  Probe
ccccaccagtctgatcttaactggc

SEQ ID NO: 301717 - DNA, 25 bp, Artificial
  Probe
cattgcacagtactctacgttgcat

SEQ ID NO: 301718 - DNA, 25 bp, Artificial
  Probe
atcttaactggcccaatgttaatca

SEQ ID NO: 301719 - DNA, 25 bp, Artificial
  Probe
tggcccaatgttaatcattgcacag

SEQ ID NO: 301720 - DNA, 25 bp, Artificial
  Probe
ttgcacagtactctacgttgcatat

SEQ ID NO: 301721 - DNA, 25 bp, Artificial
  Probe
gatcttaactggcccaatgttaatc

SEQ ID NO: 301722 - DNA, 25 bp, Artificial
  Probe
aacatatgcgccagctactaatgga

SEQ ID NO: 301723 - DNA, 25 bp, Artificial
  Probe
aacttctgccgtcgtcctgtgcact

SEQ ID NO: 301724 - DNA, 25 bp, Artificial
  Probe
caccacagccctcagatgatggaaa

SEQ ID NO: 301725 - DNA, 25 bp, Artificial
  Probe
ggcactcaacagcaagatctgtgat

SEQ ID NO: 301726 - DNA, 25 bp, Artificial
  Probe
ctactaatggacaggggctttcctg

SEQ ID NO: 301727 - DNA, 25 bp, Artificial
  Probe
cttatgagcgagtgggagcgatcct

SEQ ID NO: 301728 - DNA, 25 bp, Artificial
  Probe
ccacagccctcagatgatggaaaac

SEQ ID NO: 301729 - DNA, 25 bp, Artificial
  Probe
ctccaagatgtgtctgtggctgcat

SEQ ID NO: 301730 - DNA, 25 bp, Artificial
  Probe
tggacaggggctttcctgttatccc

SEQ ID NO: 301731 - DNA, 25 bp, Artificial
  Probe
aagatgtgtctgtggctgcatgcaa

SEQ ID NO: 301732 - DNA, 25 bp, Artificial
  Probe
ctgaggcgtgcacaccagcgcaacg

SEQ ID NO: 301733 - DNA, 25 bp, Artificial
  Probe
agccctcagatgatggaaaactttg

SEQ ID NO: 301734 - DNA, 25 bp, Artificial
  Probe
gcaagatctgtgatcttctgctcgc

SEQ ID NO: 301735 - DNA, 25 bp, Artificial
  Probe
gcttctagctgacttgattctaaaa

SEQ ID NO: 301736 - DNA, 25 bp, Artificial
  Probe
gctgcatgcaacttctgccgtcgtc

SEQ ID NO: 301737 - DNA, 25 bp, Artificial
  Probe
gtgatcttctgctcgccaagcacag

SEQ ID NO: 301738 - DNA, 25 bp, Artificial
  Probe
ccagcgcaacgtcaaacatatgcgc

SEQ ID NO: 301739 - DNA, 25 bp, Artificial
  Probe
ggtcaagccctgaggcgtgcacacc

SEQ ID NO: 301740 - DNA, 25 bp, Artificial
  Probe
acgtcaaacatatgcgccagctact

SEQ ID NO: 301741 - DNA, 25 bp, Artificial
  Probe
cggcactcaacagcaagatctgtga

SEQ ID NO: 301742 - DNA, 25 bp, Artificial
  Probe
tgcatgcaacttctgccgtcgtcct

SEQ ID NO: 301743 - DNA, 25 bp, Artificial
  Probe
cctccaagatgtgtctgtggctgca

SEQ ID NO: 301744 - DNA, 25 bp, Artificial
  Probe
gctactaatggacaggggctttcct

SEQ ID NO: 301745 - DNA, 25 bp, Artificial
  Probe
cactcaacagcaagatctgtgatct

SEQ ID NO: 301746 - DNA, 25 bp, Artificial
  Probe
gcatctatgtgcaggccatcaacta

SEQ ID NO: 301747 - DNA, 25 bp, Artificial
  Probe
ttctgctcgccaagcacagcatcta

SEQ ID NO: 301748 - DNA, 25 bp, Artificial
  Probe
taatgcggcactcaacagcaagatc

SEQ ID NO: 301749 - DNA, 25 bp, Artificial
  Probe
gggtaatgcggcactcaacagcaag

SEQ ID NO: 301750 - DNA, 25 bp, Artificial
  Probe
cacagcatctatgtgcaggccatca

SEQ ID NO: 301751 - DNA, 25 bp, Artificial
  Probe
ggtaatgcggcactcaacagcaaga

SEQ ID NO: 301752 - DNA, 25 bp, Artificial
  Probe
tcaacagcaagatctgtgatcttct

SEQ ID NO: 301753 - DNA, 25 bp, Artificial
  Probe
ctgtgatcttctgctcgccaagcac

SEQ ID NO: 301754 - DNA, 25 bp, Artificial
  Probe
gcacaccagcgcaacgtcaaacata

SEQ ID NO: 301755 - DNA, 25 bp, Artificial
  Probe
ctcgccaagcacagcatctatgtgc

SEQ ID NO: 301756 - DNA, 25 bp, Artificial
  Probe
ccaagcacagcatctatgtgcaggc

SEQ ID NO: 301757 - DNA, 25 bp, Artificial
  Probe
tgtgcaggccatcaactacccaact

SEQ ID NO: 301758 - DNA, 25 bp, Artificial
  Probe
ccaagatgtgtctgtggctgcatgc

SEQ ID NO: 301759 - DNA, 25 bp, Artificial
  Probe
tgcttctagctgacttgattctaaa

SEQ ID NO: 301760 - DNA, 25 bp, Artificial
  Probe
gcatgcaacttctgccgtcgtcctg

SEQ ID NO: 301761 - DNA, 25 bp, Artificial
  Probe
gatctgtgatcttctgctcgccaag

SEQ ID NO: 301762 - DNA, 25 bp, Artificial
  Probe
caggggctttcctgttatcccctgt

SEQ ID NO: 301763 - DNA, 25 bp, Artificial
  Probe
atggacaggggctttcctgttatcc

SEQ ID NO: 301764 - DNA, 25 bp, Artificial
  Probe
catatgcgccagctactaatggaca

SEQ ID NO: 301765 - DNA, 25 bp, Artificial
  Probe
gacaggggctttcctgttatcccct

SEQ ID NO: 301766 - DNA, 25 bp, Artificial
  Probe
tgtgtctgtggctgcatgcaacttc

SEQ ID NO: 301767 - DNA, 25 bp, Artificial
  Probe
cagcatctatgtgcaggccatcaac

SEQ ID NO: 301768 - DNA, 25 bp, Artificial
  Probe
gcgaccctggggtcctctgtagagc

SEQ ID NO: 301769 - DNA, 25 bp, Artificial
  Probe
agtatcgaaatgacaaccctagact

SEQ ID NO: 301770 - DNA, 25 bp, Artificial
  Probe
ttgtcatggtcaaggggccatgtga

SEQ ID NO: 301771 - DNA, 25 bp, Artificial
  Probe
aagacgactagatcattctctgggt

SEQ ID NO: 301772 - DNA, 25 bp, Artificial
  Probe
aatacagacaccattttagctgcgt

SEQ ID NO: 301773 - DNA, 25 bp, Artificial
  Probe
gtagactgtaaccatgatttccatt

SEQ ID NO: 301774 - DNA, 25 bp, Artificial
  Probe
atcccccgaaactgaaagcaatggg

SEQ ID NO: 301775 - DNA, 25 bp, Artificial
  Probe
cgccactctcaggatgtccttcgtg

SEQ ID NO: 301776 - DNA, 25 bp, Artificial
  Probe
ttttaattgtcatggtcaaggggcc

SEQ ID NO: 301777 - DNA, 25 bp, Artificial
  Probe
acagctttgcatttttccttgtagt

SEQ ID NO: 301778 - DNA, 25 bp, Artificial
  Probe
gtatcgaaatgacaaccctagacta

SEQ ID NO: 301779 - DNA, 25 bp, Artificial
  Probe
gtcacgttttctgtttcaataactg

SEQ ID NO: 301780 - DNA, 25 bp, Artificial
  Probe
catcagcatgaaggacagtgacgag

SEQ ID NO: 301781 - DNA, 25 bp, Artificial
  Probe
caatggtacaacagctccatgaacg

SEQ ID NO: 301782 - DNA, 25 bp, Artificial
  Probe
aagcaatgggcgtttgtgtcctggc

SEQ ID NO: 301783 - DNA, 25 bp, Artificial
  Probe
gagatgtttaccaatacagacacca

SEQ ID NO: 301784 - DNA, 25 bp, Artificial
  Probe
gggaattttctgtcaaccaccatgc

SEQ ID NO: 301785 - DNA, 25 bp, Artificial
  Probe
ggccgacgcctacgtgactttcgtc

SEQ ID NO: 301786 - DNA, 25 bp, Artificial
  Probe
ctggcaaacacagctttgcattttt

SEQ ID NO: 301787 - DNA, 25 bp, Artificial
  Probe
tcattctctgggtccaagagtccac

SEQ ID NO: 301788 - DNA, 25 bp, Artificial
  Probe
aagtagtggatccatcttgcttttt

SEQ ID NO: 301789 - DNA, 25 bp, Artificial
  Probe
accaccatgcccatgagatgtttac

SEQ ID NO: 301790 - DNA, 25 bp, Artificial
  Probe
tggatgtggccgacgcctacgtgac

SEQ ID NO: 301791 - DNA, 25 bp, Artificial
  Probe
gaccgaccggatggacctccagctt

SEQ ID NO: 301792 - DNA, 25 bp, Artificial
  Probe
acgtgggagccagtgtgtttccaag

SEQ ID NO: 301793 - DNA, 25 bp, Artificial
  Probe
tagtctgttagttaaccccattagg

SEQ ID NO: 301794 - DNA, 25 bp, Artificial
  Probe
ctgtagagctgtttctttctgtgga

SEQ ID NO: 301795 - DNA, 25 bp, Artificial
  Probe
ggacctccagcttcacatttatcag

SEQ ID NO: 301796 - DNA, 25 bp, Artificial
  Probe
caatacagacaccattttagctgcg

SEQ ID NO: 301797 - DNA, 25 bp, Artificial
  Probe
aaacctacagagatttccgattgca

SEQ ID NO: 301798 - DNA, 25 bp, Artificial
  Probe
cacagctttgcatttttccttgtag

SEQ ID NO: 301799 - DNA, 25 bp, Artificial
  Probe
gtcaaggggccatgtgatcagacgt

SEQ ID NO: 301800 - DNA, 25 bp, Artificial
  Probe
cccgaaactgaaagcaatgggcgtt

SEQ ID NO: 301801 - DNA, 25 bp, Artificial
  Probe
gacgtgggagccagtgtgtttccaa

SEQ ID NO: 301802 - DNA, 25 bp, Artificial
  Probe
agatatggatatctcctccagtaga

SEQ ID NO: 301803 - DNA, 25 bp, Artificial
  Probe
cctggctgaccgaccggatggacct

SEQ ID NO: 301804 - DNA, 25 bp, Artificial
  Probe
tatctgtcacgtacattgcactctg

SEQ ID NO: 301805 - DNA, 25 bp, Artificial
  Probe
ttgtgtcctggcaaacacagctttg

SEQ ID NO: 301806 - DNA, 25 bp, Artificial
  Probe
gatggagtcctgtaatcaatgcatg

SEQ ID NO: 301807 - DNA, 25 bp, Artificial
  Probe
tgtaactgagcgaccctggggtcct

SEQ ID NO: 301808 - DNA, 25 bp, Artificial
  Probe
ggcttgcaaggcatcagcatgaagg

SEQ ID NO: 301809 - DNA, 25 bp, Artificial
  Probe
tcgaaatcggctcactgtagaggaa

SEQ ID NO: 301810 - DNA, 25 bp, Artificial
  Probe
ccttcgtgataaggtcaatgaggag

SEQ ID NO: 301811 - DNA, 25 bp, Artificial
  Probe
tcagctgaaaacactaattaggatg

SEQ ID NO: 301812 - DNA, 25 bp, Artificial
  Probe
ctttctgtggaaagtagtggatcca

SEQ ID NO: 301813 - DNA, 25 bp, Artificial
  Probe
ttatcagctgaaaacactaattagg

SEQ ID NO: 301814 - DNA, 25 bp, Artificial
  Probe
aaatgagtctgaagtgctgggctac

SEQ ID NO: 301815 - DNA, 25 bp, Artificial
  Probe
ctacaacactgcagggacaggaccc

SEQ ID NO: 301816 - DNA, 25 bp, Artificial
  Probe
cgaaatcagaacagtcagtgatggt

SEQ ID NO: 301817 - DNA, 25 bp, Artificial
  Probe
caaccaccagcaaacattgcctgga

SEQ ID NO: 301818 - DNA, 25 bp, Artificial
  Probe
gctgtcaaattccaaattatgcctg

SEQ ID NO: 301819 - DNA, 25 bp, Artificial
  Probe
gtaaaactcatgtcttggaaacaaa

SEQ ID NO: 301820 - DNA, 25 bp, Artificial
  Probe
accagttaatgtcaccacgaaaaag

SEQ ID NO: 301821 - DNA, 25 bp, Artificial
  Probe
tgttattcagccactttcacgatga

SEQ ID NO: 301822 - DNA, 25 bp, Artificial
  Probe
cagaacagtcagtgatggtggagac

SEQ ID NO: 301823 - DNA, 25 bp, Artificial
  Probe
ggaagctgtcaaattccaaattatg

SEQ ID NO: 301824 - DNA, 25 bp, Artificial
  Probe
aagtccaccagttaatgtcaccacg

SEQ ID NO: 301825 - DNA, 25 bp, Artificial
  Probe
agagcaaatcattctgtaaatacgt

SEQ ID NO: 301826 - DNA, 25 bp, Artificial
  Probe
aattttctgagagcaaatcattctg

SEQ ID NO: 301827 - DNA, 25 bp, Artificial
  Probe
cacgatgaatcaatctatggatctt

SEQ ID NO: 301828 - DNA, 25 bp, Artificial
  Probe
tctgtgagagcctacaacactgcag

SEQ ID NO: 301829 - DNA, 25 bp, Artificial
  Probe
ctggttccatttgaagaagactatt

SEQ ID NO: 301830 - DNA, 25 bp, Artificial
  Probe
aaattccaaattatgcctgaactgg

SEQ ID NO: 301831 - DNA, 25 bp, Artificial
  Probe
atcgaaatcagaacagtcagtgatg

SEQ ID NO: 301832 - DNA, 25 bp, Artificial
  Probe
tctgagagcaaatcattctgtaaat

SEQ ID NO: 301833 - DNA, 25 bp, Artificial
  Probe
ggcagaaccgacagagtaaaactca

SEQ ID NO: 301834 - DNA, 25 bp, Artificial
  Probe
tcggcagaaccgacagagtaaaact

SEQ ID NO: 301835 - DNA, 25 bp, Artificial
  Probe
agagtaaaactcatgtcttggaaac

SEQ ID NO: 301836 - DNA, 25 bp, Artificial
  Probe
tcaagtttgagttccgtgggagttc

SEQ ID NO: 301837 - DNA, 25 bp, Artificial
  Probe
ccgtgggagttcagatcttgaagcc

SEQ ID NO: 301838 - DNA, 25 bp, Artificial
  Probe
ttgaagcccagtacccagttcctga

SEQ ID NO: 301839 - DNA, 25 bp, Artificial
  Probe
ataatacatcagctgagctactggt

SEQ ID NO: 301840 - DNA, 25 bp, Artificial
  Probe
gaagtgctgggctacaagatcctct

SEQ ID NO: 301841 - DNA, 25 bp, Artificial
  Probe
gcctgaactgggagcatgtaaaaac

SEQ ID NO: 301842 - DNA, 25 bp, Artificial
  Probe
ctatttgatcgaaatcagaacagtc

SEQ ID NO: 301843 - DNA, 25 bp, Artificial
  Probe
gttttgttattcagccactttcacg

SEQ ID NO: 301844 - DNA, 25 bp, Artificial
  Probe
gagttcagatcttgaagcccagtac

SEQ ID NO: 301845 - DNA, 25 bp, Artificial
  Probe
ttcagatcttgaagcccagtaccca

SEQ ID NO: 301846 - DNA, 25 bp, Artificial
  Probe
tgcctggaagctgtcaaattccaaa

SEQ ID NO: 301847 - DNA, 25 bp, Artificial
  Probe
accagcaaacattgcctggaagctg

SEQ ID NO: 301848 - DNA, 25 bp, Artificial
  Probe
cagttcctgacaatggttggatttt

SEQ ID NO: 301849 - DNA, 25 bp, Artificial
  Probe
tcctctatcggcagaaccgacagag

SEQ ID NO: 301850 - DNA, 25 bp, Artificial
  Probe
gagttccgtgggagttcagatcttg

SEQ ID NO: 301851 - DNA, 25 bp, Artificial
  Probe
gagacatattcttaatacagacttg

SEQ ID NO: 301852 - DNA, 25 bp, Artificial
  Probe
actttcacgatgaatcaatctatgg

SEQ ID NO: 301853 - DNA, 25 bp, Artificial
  Probe
cagttaatgtcaccacgaaaaagtc

SEQ ID NO: 301854 - DNA, 25 bp, Artificial
  Probe
tgtatattactaagctcttgtctcg

SEQ ID NO: 301855 - DNA, 25 bp, Artificial
  Probe
cctgaactgggagcatgtaaaaact

SEQ ID NO: 301856 - DNA, 25 bp, Artificial
  Probe
tgcttctgtgagagcctacaacact

SEQ ID NO: 301857 - DNA, 25 bp, Artificial
  Probe
atcttgaagcccagtacccagttcc

SEQ ID NO: 301858 - DNA, 25 bp, Artificial
  Probe
gttattcagccactttcacgatgaa

SEQ ID NO: 301859 - DNA, 25 bp, Artificial
  Probe
caagatcctctatcggcagaaccga

SEQ ID NO: 301860 - DNA, 25 bp, Artificial
  Probe
catgtccaagcaggagggcagtaag

SEQ ID NO: 301861 - DNA, 25 bp, Artificial
  Probe
gagctcaaccccaattgtgacgagc

SEQ ID NO: 301862 - DNA, 25 bp, Artificial
  Probe
agaacagacaagtcccacacagcaa

SEQ ID NO: 301863 - DNA, 25 bp, Artificial
  Probe
tgcagacctagcagacaccatgagg

SEQ ID NO: 301864 - DNA, 25 bp, Artificial
  Probe
gtgttgccctggagcccaacggcag

SEQ ID NO: 301865 - DNA, 25 bp, Artificial
  Probe
ttggcttccaggacgcctacaagcg

SEQ ID NO: 301866 - DNA, 25 bp, Artificial
  Probe
gagcccaacggcagcttcagctttg

SEQ ID NO: 301867 - DNA, 25 bp, Artificial
  Probe
cgcatctatggcaccaccgtttagg

SEQ ID NO: 301868 - DNA, 25 bp, Artificial
  Probe
gcctcgaaagtatggacggcacagc

SEQ ID NO: 301869 - DNA, 25 bp, Artificial
  Probe
accgtttagggcatgtgttgccctg

SEQ ID NO: 301870 - DNA, 25 bp, Artificial
  Probe
gaccacattggcttccaggacgcct

SEQ ID NO: 301871 - DNA, 25 bp, Artificial
  Probe
ttccaggacgcctacaagcgcatct

SEQ ID NO: 301872 - DNA, 25 bp, Artificial
  Probe
agactccggcgctacctcaacaatg

SEQ ID NO: 301873 - DNA, 25 bp, Artificial
  Probe
atctatggcaccaccgtttagggca

SEQ ID NO: 301874 - DNA, 25 bp, Artificial
  Probe
tgctggccctgactgcattctgcct

SEQ ID NO: 301875 - DNA, 25 bp, Artificial
  Probe
ctctgagtctgacaaagccttcatg

SEQ ID NO: 301876 - DNA, 25 bp, Artificial
  Probe
tcaacaatggacttggagccccagc

SEQ ID NO: 301877 - DNA, 25 bp, Artificial
  Probe
tgtgtgagctcaaccccaattgtga

SEQ ID NO: 301878 - DNA, 25 bp, Artificial
  Probe
tgcattctgcctctctgacctggca

SEQ ID NO: 301879 - DNA, 25 bp, Artificial
  Probe
agcagacaccatgaggaccctctct

SEQ ID NO: 301880 - DNA, 25 bp, Artificial
  Probe
catgtgttgccctggagcccaacgg

SEQ ID NO: 301881 - DNA, 25 bp, Artificial
  Probe
ggtgcaaagcccagcgactctgagt

SEQ ID NO: 301882 - DNA, 25 bp, Artificial
  Probe
agacaagtcccacacagcaactcgg

SEQ ID NO: 301883 - DNA, 25 bp, Artificial
  Probe
tagggcatgtgttgccctggagccc

SEQ ID NO: 301884 - DNA, 25 bp, Artificial
  Probe
gcctctctgacctggcaggtgcaaa

SEQ ID NO: 301885 - DNA, 25 bp, Artificial
  Probe
gtgtgtgagctcaaccccaattgtg

SEQ ID NO: 301886 - DNA, 25 bp, Artificial
  Probe
gcctacaagcgcatctatggcacca

SEQ ID NO: 301887 - DNA, 25 bp, Artificial
  Probe
ctgacaaagccttcatgtccaagca

SEQ ID NO: 301888 - DNA, 25 bp, Artificial
  Probe
cagatcccctggagcctcacaggga

SEQ ID NO: 301889 - DNA, 25 bp, Artificial
  Probe
agtatggacggcacagctgctccaa

SEQ ID NO: 301890 - DNA, 25 bp, Artificial
  Probe
gtggtgaatagactccggcgctacc

SEQ ID NO: 301891 - DNA, 25 bp, Artificial
  Probe
ttgtgacgagctagcggaccacatt

SEQ ID NO: 301892 - DNA, 25 bp, Artificial
  Probe
acgagctagcggaccacattggctt

SEQ ID NO: 301893 - DNA, 25 bp, Artificial
  Probe
acagcaactcggtgcagacctagca

SEQ ID NO: 301894 - DNA, 25 bp, Artificial
  Probe
caaagcccagcgactctgagtctga

SEQ ID NO: 301895 - DNA, 25 bp, Artificial
  Probe
aggacgcctacaagcgcatctatgg

SEQ ID NO: 301896 - DNA, 25 bp, Artificial
  Probe
cagcttcagctttggctactctcca

SEQ ID NO: 301897 - DNA, 25 bp, Artificial
  Probe
tggtgaatagactccggcgctacct

SEQ ID NO: 301898 - DNA, 25 bp, Artificial
  Probe
cctctctctgcctcgaaagtatgga

SEQ ID NO: 301899 - DNA, 25 bp, Artificial
  Probe
ctctgctggccctgactgcattctg

SEQ ID NO: 301900 - DNA, 25 bp, Artificial
  Probe
gcaccaccgtttagggcatgtgttg

SEQ ID NO: 301901 - DNA, 25 bp, Artificial
  Probe
ctctgacctggcaggtgcaaagccc

SEQ ID NO: 301902 - DNA, 25 bp, Artificial
  Probe
tggcaggtgcaaagcccagcgactc

SEQ ID NO: 301903 - DNA, 25 bp, Artificial
  Probe
gtcccacacagcaactcggtgcaga

SEQ ID NO: 301904 - DNA, 25 bp, Artificial
  Probe
ctcggtgcagacctagcagacacca

SEQ ID NO: 301905 - DNA, 25 bp, Artificial
  Probe
caagcgcatctatggcaccaccgtt

SEQ ID NO: 301906 - DNA, 25 bp, Artificial
  Probe
gtcagtactaggtctcaatacaaaa

SEQ ID NO: 301907 - DNA, 25 bp, Artificial
  Probe
aagcactcttaccaggtcagtacta

SEQ ID NO: 301908 - DNA, 25 bp, Artificial
  Probe
ctgtacaccttgactgtggcccgaa

SEQ ID NO: 301909 - DNA, 25 bp, Artificial
  Probe
tcagtactaggtctcaatacaaaag

SEQ ID NO: 301910 - DNA, 25 bp, Artificial
  Probe
agtactaggtctcaatacaaaagat

SEQ ID NO: 301911 - DNA, 25 bp, Artificial
  Probe
gtacaccttgactgtggcccgaaac

SEQ ID NO: 301912 - DNA, 25 bp, Artificial
  Probe
taccaggtcagtactaggtctcaat

SEQ ID NO: 301913 - DNA, 25 bp, Artificial
  Probe
actcttaccaggtcagtactaggtc

SEQ ID NO: 301914 - DNA, 25 bp, Artificial
  Probe
tgtggcccgaaacagagctgaagta

SEQ ID NO: 301915 - DNA, 25 bp, Artificial
  Probe
acaccttgactgtggcccgaaacag

SEQ ID NO: 301916 - DNA, 25 bp, Artificial
  Probe
cttaccaggtcagtactaggtctca

SEQ ID NO: 301917 - DNA, 25 bp, Artificial
  Probe
gtggcccgaaacagagctgaagtaa

SEQ ID NO: 301918 - DNA, 25 bp, Artificial
  Probe
tacaccttgactgtggcccgaaaca

SEQ ID NO: 301919 - DNA, 25 bp, Artificial
  Probe
agaagcactcttaccaggtcagtac

SEQ ID NO: 301920 - DNA, 25 bp, Artificial
  Probe
tcttaccaggtcagtactaggtctc

SEQ ID NO: 301921 - DNA, 25 bp, Artificial
  Probe
tccaagaagcactcttaccaggtca

SEQ ID NO: 301922 - DNA, 25 bp, Artificial
  Probe
ccaggtcagtactaggtctcaatac

SEQ ID NO: 301923 - DNA, 25 bp, Artificial
  Probe
actaggtctcaatacaaaagatatg

SEQ ID NO: 301924 - DNA, 25 bp, Artificial
  Probe
ctcttaccaggtcagtactaggtct

SEQ ID NO: 301925 - DNA, 25 bp, Artificial
  Probe
gacatccaagaagcactcttaccag

SEQ ID NO: 301926 - DNA, 25 bp, Artificial
  Probe
ctgtggcccgaaacagagctgaagt

SEQ ID NO: 301927 - DNA, 25 bp, Artificial
  Probe
cactcttaccaggtcagtactaggt

SEQ ID NO: 301928 - DNA, 25 bp, Artificial
  Probe
caagaagcactcttaccaggtcagt

SEQ ID NO: 301929 - DNA, 25 bp, Artificial
  Probe
cagtactaggtctcaatacaaaaga

SEQ ID NO: 301930 - DNA, 25 bp, Artificial
  Probe
gcccgaaacagagctgaagtaactc

SEQ ID NO: 301931 - DNA, 25 bp, Artificial
  Probe
ctaggtctcaatacaaaagatatgc

SEQ ID NO: 301932 - DNA, 25 bp, Artificial
  Probe
ggcccgaaacagagctgaagtaact

SEQ ID NO: 301933 - DNA, 25 bp, Artificial
  Probe
tggcccgaaacagagctgaagtaac

SEQ ID NO: 301934 - DNA, 25 bp, Artificial
  Probe
acatccaagaagcactcttaccagg

SEQ ID NO: 301935 - DNA, 25 bp, Artificial
  Probe
accaggtcagtactaggtctcaata

SEQ ID NO: 301936 - DNA, 25 bp, Artificial
  Probe
aggtcagtactaggtctcaatacaa

SEQ ID NO: 301937 - DNA, 25 bp, Artificial
  Probe
ccaagaagcactcttaccaggtcag

SEQ ID NO: 301938 - DNA, 25 bp, Artificial
  Probe
gaagcactcttaccaggtcagtact

SEQ ID NO: 301939 - DNA, 25 bp, Artificial
  Probe
aggtctcaatacaaaagatatgctt

SEQ ID NO: 301940 - DNA, 25 bp, Artificial
  Probe
actgtggcccgaaacagagctgaag

SEQ ID NO: 301941 - DNA, 25 bp, Artificial
  Probe
tgtacaccttgactgtggcccgaaa

SEQ ID NO: 301942 - DNA, 25 bp, Artificial
  Probe
gcactcttaccaggtcagtactagg

SEQ ID NO: 301943 - DNA, 25 bp, Artificial
  Probe
caggtcagtactaggtctcaataca

SEQ ID NO: 301944 - DNA, 25 bp, Artificial
  Probe
catccaagaagcactcttaccaggt

SEQ ID NO: 301945 - DNA, 25 bp, Artificial
  Probe
ttaccaggtcagtactaggtctcaa

SEQ ID NO: 301946 - DNA, 25 bp, Artificial
  Probe
ggtcagtactaggtctcaatacaaa

SEQ ID NO: 301947 - DNA, 25 bp, Artificial
  Probe
agcactcttaccaggtcagtactag

SEQ ID NO: 301948 - DNA, 25 bp, Artificial
  Probe
gactgtggcccgaaacagagctgaa

SEQ ID NO: 301949 - DNA, 25 bp, Artificial
  Probe
atccaagaagcactcttaccaggtc

SEQ ID NO: 301950 - DNA, 25 bp, Artificial
  Probe
gtactaggtctcaatacaaaagata

SEQ ID NO: 301951 - DNA, 25 bp, Artificial
  Probe
actgtacaccttgactgtggcccga

SEQ ID NO: 301952 - DNA, 25 bp, Artificial
  Probe
ttcttgcagctctcagattttgtta

SEQ ID NO: 301953 - DNA, 25 bp, Artificial
  Probe
tgtgtttttctccagtgctgtccat

SEQ ID NO: 301954 - DNA, 25 bp, Artificial
  Probe
agcaattgaggcatttgcagaacac

SEQ ID NO: 301955 - DNA, 25 bp, Artificial
  Probe
agtacaatgtgtttttctccagtgc

SEQ ID NO: 301956 - DNA, 25 bp, Artificial
  Probe
atcggcaccctattttcttgcagct

SEQ ID NO: 301957 - DNA, 25 bp, Artificial
  Probe
ctgttagcaattgaggcatttgcag

SEQ ID NO: 301958 - DNA, 25 bp, Artificial
  Probe
tgtttagctaccacagagtgagtat

SEQ ID NO: 301959 - DNA, 25 bp, Artificial
  Probe
caattgaggcatttgcagaacactg

SEQ ID NO: 301960 - DNA, 25 bp, Artificial
  Probe
tacattcctccctggtggtgcccgg

SEQ ID NO: 301961 - DNA, 25 bp, Artificial
  Probe
taccacagagtgagtatgcactaaa

SEQ ID NO: 301962 - DNA, 25 bp, Artificial
  Probe
acattcctccctggtggtgcccggt

SEQ ID NO: 301963 - DNA, 25 bp, Artificial
  Probe
tcccctttgaacactgctctgcaga

SEQ ID NO: 301964 - DNA, 25 bp, Artificial
  Probe
cctgcactgtttaagaatctcgtat

SEQ ID NO: 301965 - DNA, 25 bp, Artificial
  Probe
ctctcagattttgttaatctggatt

SEQ ID NO: 301966 - DNA, 25 bp, Artificial
  Probe
tgtttaagaatctcgtatgccattt

SEQ ID NO: 301967 - DNA, 25 bp, Artificial
  Probe
attgaggcatttgcagaacactgta

SEQ ID NO: 301968 - DNA, 25 bp, Artificial
  Probe
ccctgtacattcctccctggtggtg

SEQ ID NO: 301969 - DNA, 25 bp, Artificial
  Probe
tttagctaccacagagtgagtatgc

SEQ ID NO: 301970 - DNA, 25 bp, Artificial
  Probe
cactgtttaagaatctcgtatgcca

SEQ ID NO: 301971 - DNA, 25 bp, Artificial
  Probe
tgtggtttttctggagaacctcctt

SEQ ID NO: 301972 - DNA, 25 bp, Artificial
  Probe
agactgtacagaaatcggcacccta

SEQ ID NO: 301973 - DNA, 25 bp, Artificial
  Probe
gtccatgcttttcatgtcgtgaaat

SEQ ID NO: 301974 - DNA, 25 bp, Artificial
  Probe
tagctaccacagagtgagtatgcac

SEQ ID NO: 301975 - DNA, 25 bp, Artificial
  Probe
tctttgtggtttttctggagaacct

SEQ ID NO: 301976 - DNA, 25 bp, Artificial
  Probe
tgtcctgttagcaattgaggcattt

SEQ ID NO: 301977 - DNA, 25 bp, Artificial
  Probe
cctcctgcactgtttaagaatctcg

SEQ ID NO: 301978 - DNA, 25 bp, Artificial
  Probe
gccctcctgcactgtttaagaatct

SEQ ID NO: 301979 - DNA, 25 bp, Artificial
  Probe
ttgtggtttttctggagaacctcct

SEQ ID NO: 301980 - DNA, 25 bp, Artificial
  Probe
cttgccctcctgcactgtttaagaa

SEQ ID NO: 301981 - DNA, 25 bp, Artificial
  Probe
ccctgtttagctaccacagagtgag

SEQ ID NO: 301982 - DNA, 25 bp, Artificial
  Probe
tgcactgtttaagaatctcgtatgc

SEQ ID NO: 301983 - DNA, 25 bp, Artificial
  Probe
aacccctgtttagctaccacagagt

SEQ ID NO: 301984 - DNA, 25 bp, Artificial
  Probe
ctgtttaagaatctcgtatgccatt

SEQ ID NO: 301985 - DNA, 25 bp, Artificial
  Probe
tgcagaacactgtacagaccccgct

SEQ ID NO: 301986 - DNA, 25 bp, Artificial
  Probe
cctgtacattcctccctggtggtgc

SEQ ID NO: 301987 - DNA, 25 bp, Artificial
  Probe
agtgctgtccatgcttttcatgtcg

SEQ ID NO: 301988 - DNA, 25 bp, Artificial
  Probe
taggaacccctgtttagctaccaca

SEQ ID NO: 301989 - DNA, 25 bp, Artificial
  Probe
gaggcatttgcagaacactgtacag

SEQ ID NO: 301990 - DNA, 25 bp, Artificial
  Probe
tacaatgtgtttttctccagtgctg

SEQ ID NO: 301991 - DNA, 25 bp, Artificial
  Probe
gctaccacagagtgagtatgcacta

SEQ ID NO: 301992 - DNA, 25 bp, Artificial
  Probe
tgaacactgctctgcagaagccacc

SEQ ID NO: 301993 - DNA, 25 bp, Artificial
  Probe
ggcaccctattttcttgcagctctc

SEQ ID NO: 301994 - DNA, 25 bp, Artificial
  Probe
ttttgtagactgtacagaaatcggc

SEQ ID NO: 301995 - DNA, 25 bp, Artificial
  Probe
gtttttctccagtgctgtccatgct

SEQ ID NO: 301996 - DNA, 25 bp, Artificial
  Probe
aaatcggcaccctattttcttgcag

SEQ ID NO: 301997 - DNA, 25 bp, Artificial
  Probe
attttcttgcagctctcagattttg

SEQ ID NO: 301998 - DNA, 25 bp, Artificial
  Probe
ccttgctgaggctgaccctgagcca

SEQ ID NO: 301999 - DNA, 25 bp, Artificial
  Probe
ccccaggagccgacatccagggatg

SEQ ID NO: 302000 - DNA, 25 bp, Artificial
  Probe
ttgctgaggctgaccctgagccagc

SEQ ID NO: 302001 - DNA, 25 bp, Artificial
  Probe
aagagaagagtcctccagaccagtc

SEQ ID NO: 302002 - DNA, 25 bp, Artificial
  Probe
ctctgaagagaacctggacgagaca

SEQ ID NO: 302003 - DNA, 25 bp, Artificial
  Probe
tgtctgaaggcctggctctgccagg

SEQ ID NO: 302004 - DNA, 25 bp, Artificial
  Probe
cagcctcagctccaggagctgaaga

SEQ ID NO: 302005 - DNA, 25 bp, Artificial
  Probe
atggaccctggcagcgatgggtctc

SEQ ID NO: 302006 - DNA, 25 bp, Artificial
  Probe
agcagaagggctctgaagagaacct

SEQ ID NO: 302007 - DNA, 25 bp, Artificial
  Probe
gaagagtgactcctgaaggcccacc

SEQ ID NO: 302008 - DNA, 25 bp, Artificial
  Probe
cctgatgagccttcagaagcacttg

SEQ ID NO: 302009 - DNA, 25 bp, Artificial
  Probe
tgaagagaacctggacgagacaaga

SEQ ID NO: 302010 - DNA, 25 bp, Artificial
  Probe
aagagaacctggacgagacaagaga

SEQ ID NO: 302011 - DNA, 25 bp, Artificial
  Probe
ctgaagagaacctggacgagacaag

SEQ ID NO: 302012 - DNA, 25 bp, Artificial
  Probe
gcagcgatgggtctccaggcaagtc

SEQ ID NO: 302013 - DNA, 25 bp, Artificial
  Probe
agcactcccgtcaagcttgaaggag

SEQ ID NO: 302014 - DNA, 25 bp, Artificial
  Probe
cctctgtcttgtgttctgtcctctc

SEQ ID NO: 302015 - DNA, 25 bp, Artificial
  Probe
ggctctgaagagaacctggacgaga

SEQ ID NO: 302016 - DNA, 25 bp, Artificial
  Probe
cccaacagtggcagaggaagcccat

SEQ ID NO: 302017 - DNA, 25 bp, Artificial
  Probe
agtggcagaggaagcccatgcttcc

SEQ ID NO: 302018 - DNA, 25 bp, Artificial
  Probe
agaccagtcagctgttcccaacact

SEQ ID NO: 302019 - DNA, 25 bp, Artificial
  Probe
gaggaagcccatgcttccccagaca

SEQ ID NO: 302020 - DNA, 25 bp, Artificial
  Probe
ccctgatgagccttcagaagcactt

SEQ ID NO: 302021 - DNA, 25 bp, Artificial
  Probe
caggagccgacatccagggatggca

SEQ ID NO: 302022 - DNA, 25 bp, Artificial
  Probe
ccaccctgcatactgtcgtgtctga

SEQ ID NO: 302023 - DNA, 25 bp, Artificial
  Probe
tctcccctgatgagccttcagaagc

SEQ ID NO: 302024 - DNA, 25 bp, Artificial
  Probe
acctggacgagacaagagagcagaa

SEQ ID NO: 302025 - DNA, 25 bp, Artificial
  Probe
cgatgggtctccaggcaagtcccca

SEQ ID NO: 302026 - DNA, 25 bp, Artificial
  Probe
tccaggagctgaagaggtagcctcc

SEQ ID NO: 302027 - DNA, 25 bp, Artificial
  Probe
cagaggaagcccatgcttccccaga

SEQ ID NO: 302028 - DNA, 25 bp, Artificial
  Probe
accctggcagcgatgggtctccagg

SEQ ID NO: 302029 - DNA, 25 bp, Artificial
  Probe
ctcagctccaggagctgaagaggta

SEQ ID NO: 302030 - DNA, 25 bp, Artificial
  Probe
ctctgtcttgtgttctgtcctctcg

SEQ ID NO: 302031 - DNA, 25 bp, Artificial
  Probe
ccaacagtggcagaggaagcccatg

SEQ ID NO: 302032 - DNA, 25 bp, Artificial
  Probe
tgtcgtgtctgaaggcctggctctg

SEQ ID NO: 302033 - DNA, 25 bp, Artificial
  Probe
aactagaggaataccgccgagaggt

SEQ ID NO: 302034 - DNA, 25 bp, Artificial
  Probe
ctgtcttgtgttctgtcctctcgtg

SEQ ID NO: 302035 - DNA, 25 bp, Artificial
  Probe
ccctggcagcgatgggtctccaggc

SEQ ID NO: 302036 - DNA, 25 bp, Artificial
  Probe
agaagagtgactcctgaaggcccac

SEQ ID NO: 302037 - DNA, 25 bp, Artificial
  Probe
ggtctcccatggaccctggcagcga

SEQ ID NO: 302038 - DNA, 25 bp, Artificial
  Probe
aagcagaagggctctgaagagaacc

SEQ ID NO: 302039 - DNA, 25 bp, Artificial
  Probe
aggggtctcccatggaccctggcag

SEQ ID NO: 302040 - DNA, 25 bp, Artificial
  Probe
agtcctccagaccagtcagctgttc

SEQ ID NO: 302041 - DNA, 25 bp, Artificial
  Probe
cctcctctgtcttgtgttctgtcct

SEQ ID NO: 302042 - DNA, 25 bp, Artificial
  Probe
cgtcaagcttgaaggaggccttccc

SEQ ID NO: 302043 - DNA, 25 bp, Artificial
  Probe
agggctctgaagagaacctggacga

SEQ ID NO: 302044 - DNA, 25 bp, Artificial
  Probe
atttattattacaattatatttatt

SEQ ID NO: 302045 - DNA, 25 bp, Artificial
  Probe
tcctaggacttttctttgggggcag

SEQ ID NO: 302046 - DNA, 25 bp, Artificial
  Probe
ttatatttattcatctttatcatat

SEQ ID NO: 302047 - DNA, 25 bp, Artificial
  Probe
caattatatttattcatctttatca

SEQ ID NO: 302048 - DNA, 25 bp, Artificial
  Probe
ttcgtgacattcttagtattgtcat

SEQ ID NO: 302049 - DNA, 25 bp, Artificial
  Probe
tattattacaattatatttattcat

SEQ ID NO: 302050 - DNA, 25 bp, Artificial
  Probe
tcttagtattgtcatatttattatt

SEQ ID NO: 302051 - DNA, 25 bp, Artificial
  Probe
ccttcaggtccaatcaaatcctagg

SEQ ID NO: 302052 - DNA, 25 bp, Artificial
  Probe
tccttcaggtccaatcaaatcctag

SEQ ID NO: 302053 - DNA, 25 bp, Artificial
  Probe
cgtgacattcttagtattgtcatat

SEQ ID NO: 302054 - DNA, 25 bp, Artificial
  Probe
ggaactactattattcgtgacattc

SEQ ID NO: 302055 - DNA, 25 bp, Artificial
  Probe
tattattcgtgacattcttagtatt

SEQ ID NO: 302056 - DNA, 25 bp, Artificial
  Probe
ctactattattcgtgacattcttag

SEQ ID NO: 302057 - DNA, 25 bp, Artificial
  Probe
gaaggagagccttgcccttcctctt

SEQ ID NO: 302058 - DNA, 25 bp, Artificial
  Probe
gtccaatcaaatcctaggacttttc

SEQ ID NO: 302059 - DNA, 25 bp, Artificial
  Probe
tttgggggcagacaagggaactact

SEQ ID NO: 302060 - DNA, 25 bp, Artificial
  Probe
gggaactactattattcgtgacatt

SEQ ID NO: 302061 - DNA, 25 bp, Artificial
  Probe
ttattcgtgacattcttagtattgt

SEQ ID NO: 302062 - DNA, 25 bp, Artificial
  Probe
aggtccaatcaaatcctaggacttt

SEQ ID NO: 302063 - DNA, 25 bp, Artificial
  Probe
tatttattcatctttatcatattta

SEQ ID NO: 302064 - DNA, 25 bp, Artificial
  Probe
ttcaggtccaatcaaatcctaggac

SEQ ID NO: 302065 - DNA, 25 bp, Artificial
  Probe
taggacttttctttgggggcagaca

SEQ ID NO: 302066 - DNA, 25 bp, Artificial
  Probe
tcgtgacattcttagtattgtcata

SEQ ID NO: 302067 - DNA, 25 bp, Artificial
  Probe
ctcttccttcaggtccaatcaaatc

SEQ ID NO: 302068 - DNA, 25 bp, Artificial
  Probe
aactactattattcgtgacattctt

SEQ ID NO: 302069 - DNA, 25 bp, Artificial
  Probe
cttcctcttccttcaggtccaatca

SEQ ID NO: 302070 - DNA, 25 bp, Artificial
  Probe
actattattcgtgacattcttagta

SEQ ID NO: 302071 - DNA, 25 bp, Artificial
  Probe
gtgacattcttagtattgtcatatt

SEQ ID NO: 302072 - DNA, 25 bp, Artificial
  Probe
attcgtgacattcttagtattgtca

SEQ ID NO: 302073 - DNA, 25 bp, Artificial
  Probe
tcctcttccttcaggtccaatcaaa

SEQ ID NO: 302074 - DNA, 25 bp, Artificial
  Probe
tcaaatcctaggacttttctttggg

SEQ ID NO: 302075 - DNA, 25 bp, Artificial
  Probe
gacttttctttgggggcagacaagg

SEQ ID NO: 302076 - DNA, 25 bp, Artificial
  Probe
ggtccaatcaaatcctaggactttt

SEQ ID NO: 302077 - DNA, 25 bp, Artificial
  Probe
cttccttcaggtccaatcaaatcct

SEQ ID NO: 302078 - DNA, 25 bp, Artificial
  Probe
ggacttttctttgggggcagacaag

SEQ ID NO: 302079 - DNA, 25 bp, Artificial
  Probe
atcaaatcctaggacttttctttgg

SEQ ID NO: 302080 - DNA, 25 bp, Artificial
  Probe
tattcgtgacattcttagtattgtc

SEQ ID NO: 302081 - DNA, 25 bp, Artificial
  Probe
cattcttagtattgtcatatttatt

SEQ ID NO: 302082 - DNA, 25 bp, Artificial
  Probe
ttctttgggggcagacaagggaact

SEQ ID NO: 302083 - DNA, 25 bp, Artificial
  Probe
gagagccttgcccttcctcttcctt

SEQ ID NO: 302084 - DNA, 25 bp, Artificial
  Probe
gaactactattattcgtgacattct

SEQ ID NO: 302085 - DNA, 25 bp, Artificial
  Probe
cttcaggtccaatcaaatcctagga

SEQ ID NO: 302086 - DNA, 25 bp, Artificial
  Probe
gacattcttagtattgtcatattta

SEQ ID NO: 302087 - DNA, 25 bp, Artificial
  Probe
tgaaggagagccttgcccttcctct

SEQ ID NO: 302088 - DNA, 25 bp, Artificial
  Probe
tcaggtccaatcaaatcctaggact

SEQ ID NO: 302089 - DNA, 25 bp, Artificial
  Probe
caggtccaatcaaatcctaggactt

SEQ ID NO: 302090 - DNA, 25 bp, Artificial
  Probe
agtaggtacgtcaaagcctgtactc

SEQ ID NO: 302091 - DNA, 25 bp, Artificial
  Probe
ggaaaacgtattacactcctaatgg

SEQ ID NO: 302092 - DNA, 25 bp, Artificial
  Probe
ggcccagaggagcaacgacaccttg

SEQ ID NO: 302093 - DNA, 25 bp, Artificial
  Probe
tcatgtccacctctcggagcttcgt

SEQ ID NO: 302094 - DNA, 25 bp, Artificial
  Probe
tcctttcttcccaggaagccaggga

SEQ ID NO: 302095 - DNA, 25 bp, Artificial
  Probe
tggaggtagctctgtgacggaaaac

SEQ ID NO: 302096 - DNA, 25 bp, Artificial
  Probe
ctgctttgaatgacagtgaactgac

SEQ ID NO: 302097 - DNA, 25 bp, Artificial
  Probe
cggactcagaaatgaccattcagga

SEQ ID NO: 302098 - DNA, 25 bp, Artificial
  Probe
cttgggcagacaccaggccctgctt

SEQ ID NO: 302099 - DNA, 25 bp, Artificial
  Probe
agttcagacgaaagcaaggctctaa

SEQ ID NO: 302100 - DNA, 25 bp, Artificial
  Probe
aatgacagtgaactgactggtgtgc

SEQ ID NO: 302101 - DNA, 25 bp, Artificial
  Probe
cagaggagcaacgacaccttgggca

SEQ ID NO: 302102 - DNA, 25 bp, Artificial
  Probe
cagtatcacacctgggtttgctgaa

SEQ ID NO: 302103 - DNA, 25 bp, Artificial
  Probe
cactgctttgaatgacagtgaactg

SEQ ID NO: 302104 - DNA, 25 bp, Artificial
  Probe
ttcttcccaggaagccagggagagt

SEQ ID NO: 302105 - DNA, 25 bp, Artificial
  Probe
ttgggcagacaccaggccctgcttc

SEQ ID NO: 302106 - DNA, 25 bp, Artificial
  Probe
aggaaacgggcctgcaagggcccat

SEQ ID NO: 302107 - DNA, 25 bp, Artificial
  Probe
ctgactggtgtgctctttagagtta

SEQ ID NO: 302108 - DNA, 25 bp, Artificial
  Probe
ctgcttcccctacagtgtgcagatg

SEQ ID NO: 302109 - DNA, 25 bp, Artificial
  Probe
gatgggtccttcctttcttcccagg

SEQ ID NO: 302110 - DNA, 25 bp, Artificial
  Probe
cgaaagcaaggctctaagctaccca

SEQ ID NO: 302111 - DNA, 25 bp, Artificial
  Probe
acagtgtgcagatgcggactcagaa

SEQ ID NO: 302112 - DNA, 25 bp, Artificial
  Probe
ctctgtgacggaaaacgtattacac

SEQ ID NO: 302113 - DNA, 25 bp, Artificial
  Probe
tcggagcttcgtcattagtggtgga

SEQ ID NO: 302114 - DNA, 25 bp, Artificial
  Probe
tatccaccatcagttcagacgaaag

SEQ ID NO: 302115 - DNA, 25 bp, Artificial
  Probe
tccacctctcggagcttcgtcatta

SEQ ID NO: 302116 - DNA, 25 bp, Artificial
  Probe
tgaaatgtccccagcgctggtcatg

SEQ ID NO: 302117 - DNA, 25 bp, Artificial
  Probe
agcgctggtcatgtccacctctcgg

SEQ ID NO: 302118 - DNA, 25 bp, Artificial
  Probe
cactcctaatggagggaaaggctat

SEQ ID NO: 302119 - DNA, 25 bp, Artificial
  Probe
tcagatgaaatgtccccagcgctgg

SEQ ID NO: 302120 - DNA, 25 bp, Artificial
  Probe
gccctgagcaaaaggatgggtcctt

SEQ ID NO: 302121 - DNA, 25 bp, Artificial
  Probe
aggctatccagttgagaggtttttc

SEQ ID NO: 302122 - DNA, 25 bp, Artificial
  Probe
gtgcagatgcggactcagaaatgac

SEQ ID NO: 302123 - DNA, 25 bp, Artificial
  Probe
agatgcggactcagaaatgaccatt

SEQ ID NO: 302124 - DNA, 25 bp, Artificial
  Probe
agaactccctggaggcccagaggag

SEQ ID NO: 302125 - DNA, 25 bp, Artificial
  Probe
accattcaggaaacgggcctgcaag

SEQ ID NO: 302126 - DNA, 25 bp, Artificial
  Probe
ggatgggtccttcctttcttcccag

SEQ ID NO: 302127 - DNA, 25 bp, Artificial
  Probe
aaacgggcctgcaagggcccatggt

SEQ ID NO: 302128 - DNA, 25 bp, Artificial
  Probe
agttgcactgctttgaatgacagtg

SEQ ID NO: 302129 - DNA, 25 bp, Artificial
  Probe
gcaacgacaccttgggcagacacca

SEQ ID NO: 302130 - DNA, 25 bp, Artificial
  Probe
ggctatccagttgagaggtttttct

SEQ ID NO: 302131 - DNA, 25 bp, Artificial
  Probe
ttcttagagccctgagcaaaaggat

SEQ ID NO: 302132 - DNA, 25 bp, Artificial
  Probe
catgttttggggtcgttttccagag

SEQ ID NO: 302133 - DNA, 25 bp, Artificial
  Probe
ccctggaggcccagaggagcaacga

SEQ ID NO: 302134 - DNA, 25 bp, Artificial
  Probe
ctcagatgaaatgtccccagcgctg

SEQ ID NO: 302135 - DNA, 25 bp, Artificial
  Probe
ggtttgctgaagtcttttcctctgc

SEQ ID NO: 302136 - DNA, 25 bp, Artificial
  Probe
agcacctccatgaaggagcacctaa

SEQ ID NO: 302137 - DNA, 25 bp, Artificial
  Probe
ggagctaagagctcttcttccactg

SEQ ID NO: 302138 - DNA, 25 bp, Artificial
  Probe
ctggtgactctgtggaggctcagat

SEQ ID NO: 302139 - DNA, 25 bp, Artificial
  Probe
ttcttccactgttcttctgaaggtc

SEQ ID NO: 302140 - DNA, 25 bp, Artificial
  Probe
ggggaccccaacatgggcaactcac

SEQ ID NO: 302141 - DNA, 25 bp, Artificial
  Probe
tgtgacattcgagatgctgcccact

SEQ ID NO: 302142 - DNA, 25 bp, Artificial
  Probe
aagttctgggctgtgacattcgaga

SEQ ID NO: 302143 - DNA, 25 bp, Artificial
  Probe
cactgtggttggtgaccacactccc

SEQ ID NO: 302144 - DNA, 25 bp, Artificial
  Probe
agctaagagctcttcttccactgtt

SEQ ID NO: 302145 - DNA, 25 bp, Artificial
  Probe
gtaactacctggacatcaataagaa

SEQ ID NO: 302146 - DNA, 25 bp, Artificial
  Probe
cagatgactctcagacaacaccggt

SEQ ID NO: 302147 - DNA, 25 bp, Artificial
  Probe
cattcgagatgctgcccactgtggt

SEQ ID NO: 302148 - DNA, 25 bp, Artificial
  Probe
tacagatgactctcagacaacaccg

SEQ ID NO: 302149 - DNA, 25 bp, Artificial
  Probe
atgctgcccactgtggttggtgacc

SEQ ID NO: 302150 - DNA, 25 bp, Artificial
  Probe
ctccatgaaggagcacctaagggaa

SEQ ID NO: 302151 - DNA, 25 bp, Artificial
  Probe
ctctcaggctggtgactctgtggag

SEQ ID NO: 302152 - DNA, 25 bp, Artificial
  Probe
tgtcccacctacagatgactctcag

SEQ ID NO: 302153 - DNA, 25 bp, Artificial
  Probe
catgaaggagcacctaagggaaaag

SEQ ID NO: 302154 - DNA, 25 bp, Artificial
  Probe
ttcctcaagttctgggctgtgacat

SEQ ID NO: 302155 - DNA, 25 bp, Artificial
  Probe
cccctgaggatgactcagaggctgc

SEQ ID NO: 302156 - DNA, 25 bp, Artificial
  Probe
gaatggtaactacctggacatcaat

SEQ ID NO: 302157 - DNA, 25 bp, Artificial
  Probe
ccctgaggatgactcagaggctgcc

SEQ ID NO: 302158 - DNA, 25 bp, Artificial
  Probe
agatgctgcccactgtggttggtga

SEQ ID NO: 302159 - DNA, 25 bp, Artificial
  Probe
tccactgttcttctgaaggtcctgt

SEQ ID NO: 302160 - DNA, 25 bp, Artificial
  Probe
gtgcccacacactggtacccttata

SEQ ID NO: 302161 - DNA, 25 bp, Artificial
  Probe
aaagttcctcaagttctgggctgtg

SEQ ID NO: 302162 - DNA, 25 bp, Artificial
  Probe
gggctgtgacattcgagatgctgcc

SEQ ID NO: 302163 - DNA, 25 bp, Artificial
  Probe
gatgactctcagacaacaccggtgc

SEQ ID NO: 302164 - DNA, 25 bp, Artificial
  Probe
ggtaactacctggacatcaataaga

SEQ ID NO: 302165 - DNA, 25 bp, Artificial
  Probe
tccccctgaggatgactcagaggct

SEQ ID NO: 302166 - DNA, 25 bp, Artificial
  Probe
caactctcaggctggtgactctgtg

SEQ ID NO: 302167 - DNA, 25 bp, Artificial
  Probe
aacagacaactctcaggctggtgac

SEQ ID NO: 302168 - DNA, 25 bp, Artificial
  Probe
cagcacctccatgaaggagcaccta

SEQ ID NO: 302169 - DNA, 25 bp, Artificial
  Probe
atgactctcagacaacaccggtgcc

SEQ ID NO: 302170 - DNA, 25 bp, Artificial
  Probe
cccaacagacaactctcaggctggt

SEQ ID NO: 302171 - DNA, 25 bp, Artificial
  Probe
gtgactctgtggaggctcagatgcc

SEQ ID NO: 302172 - DNA, 25 bp, Artificial
  Probe
gttctgggctgtgacattcgagatg

SEQ ID NO: 302173 - DNA, 25 bp, Artificial
  Probe
aaccagcacctccatgaaggagcac

SEQ ID NO: 302174 - DNA, 25 bp, Artificial
  Probe
agaatggtaactacctggacatcaa

SEQ ID NO: 302175 - DNA, 25 bp, Artificial
  Probe
tgcccactgtggttggtgaccacac

SEQ ID NO: 302176 - DNA, 25 bp, Artificial
  Probe
taaccagcacctccatgaaggagca

SEQ ID NO: 302177 - DNA, 25 bp, Artificial
  Probe
caagttctgggctgtgacattcgag

SEQ ID NO: 302178 - DNA, 25 bp, Artificial
  Probe
ggaaaagttcctcaagttctgggct

SEQ ID NO: 302179 - DNA, 25 bp, Artificial
  Probe
gtcccacctacagatgactctcaga

SEQ ID NO: 302180 - DNA, 25 bp, Artificial
  Probe
cagacaactctcaggctggtgactc

SEQ ID NO: 302181 - DNA, 25 bp, Artificial
  Probe
gctgcccactgtggttggtgaccac

SEQ ID NO: 302182 - DNA, 25 bp, Artificial
  Probe
agcacccacagcttgtgagcaagat

SEQ ID NO: 302183 - DNA, 25 bp, Artificial
  Probe
taccgaggcaaatttcccaactctg

SEQ ID NO: 302184 - DNA, 25 bp, Artificial
  Probe
tgaccaggcagagctggatcagcta

SEQ ID NO: 302185 - DNA, 25 bp, Artificial
  Probe
cccagggctccctctgtgttggtgt

SEQ ID NO: 302186 - DNA, 25 bp, Artificial
  Probe
ggcccttttgaccatcatggaccac

SEQ ID NO: 302187 - DNA, 25 bp, Artificial
  Probe
aagactcgatcacacacccagggct

SEQ ID NO: 302188 - DNA, 25 bp, Artificial
  Probe
cacccaggctagtggggtctggttt

SEQ ID NO: 302189 - DNA, 25 bp, Artificial
  Probe
ccttagtcccaataaagtctgattg

SEQ ID NO: 302190 - DNA, 25 bp, Artificial
  Probe
tgcccgggccggtatccccattgat

SEQ ID NO: 302191 - DNA, 25 bp, Artificial
  Probe
atctatcaagccagtgggagcacta

SEQ ID NO: 302192 - DNA, 25 bp, Artificial
  Probe
tggttttgcctacacccacaaaacg

SEQ ID NO: 302193 - DNA, 25 bp, Artificial
  Probe
tcacccaggctagtggggtctggtt

SEQ ID NO: 302194 - DNA, 25 bp, Artificial
  Probe
cttcacagccgttcttgacaacatg

SEQ ID NO: 302195 - DNA, 25 bp, Artificial
  Probe
cttgcagttggacttctggcgggac

SEQ ID NO: 302196 - DNA, 25 bp, Artificial
  Probe
cgttcttgacaacatggacatcttc

SEQ ID NO: 302197 - DNA, 25 bp, Artificial
  Probe
tggaggtcaagtccatcgtggactt

SEQ ID NO: 302198 - DNA, 25 bp, Artificial
  Probe
actgctcgatgaggagaaacagcag

SEQ ID NO: 302199 - DNA, 25 bp, Artificial
  Probe
acactggcatccattctagggagtg

SEQ ID NO: 302200 - DNA, 25 bp, Artificial
  Probe
cctgtcagcgtttaaaaaggcctca

SEQ ID NO: 302201 - DNA, 25 bp, Artificial
  Probe
gaccatcatggaccacacagtcaaa

SEQ ID NO: 302202 - DNA, 25 bp, Artificial
  Probe
caggccagggccttgtccactgact

SEQ ID NO: 302203 - DNA, 25 bp, Artificial
  Probe
gaaacagcagatgtctgccttccag

SEQ ID NO: 302204 - DNA, 25 bp, Artificial
  Probe
gctcggaaacttaccgaggcaaatt

SEQ ID NO: 302205 - DNA, 25 bp, Artificial
  Probe
caaatttcccaactctgaggtggag

SEQ ID NO: 302206 - DNA, 25 bp, Artificial
  Probe
gaagttcagcactggagggaccaat

SEQ ID NO: 302207 - DNA, 25 bp, Artificial
  Probe
tgtctgccttccaggccagggcctt

SEQ ID NO: 302208 - DNA, 25 bp, Artificial
  Probe
tggagattgtcaccaaccctgatgg

SEQ ID NO: 302209 - DNA, 25 bp, Artificial
  Probe
accccaacaggaactgggacgctgg

SEQ ID NO: 302210 - DNA, 25 bp, Artificial
  Probe
aattatgccacctatcatacgctgg

SEQ ID NO: 302211 - DNA, 25 bp, Artificial
  Probe
tcaccaaagactatggccaggaccc

SEQ ID NO: 302212 - DNA, 25 bp, Artificial
  Probe
atcgacactggcatccattctaggg

SEQ ID NO: 302213 - DNA, 25 bp, Artificial
  Probe
tctgtgaaagcattcttggaatatc

SEQ ID NO: 302214 - DNA, 25 bp, Artificial
  Probe
cactggagggaccaatcgcccagca

SEQ ID NO: 302215 - DNA, 25 bp, Artificial
  Probe
aagatgtgcagttactgctcgatga

SEQ ID NO: 302216 - DNA, 25 bp, Artificial
  Probe
agttggaggacctggagcacttgca

SEQ ID NO: 302217 - DNA, 25 bp, Artificial
  Probe
acgagccatgggaacatcaaggcct

SEQ ID NO: 302218 - DNA, 25 bp, Artificial
  Probe
cggagcaagtagcaacccctgctcg

SEQ ID NO: 302219 - DNA, 25 bp, Artificial
  Probe
aagcccaggtgcagaaagtgaagga

SEQ ID NO: 302220 - DNA, 25 bp, Artificial
  Probe
gtagcaacccctgctcggaaactta

SEQ ID NO: 302221 - DNA, 25 bp, Artificial
  Probe
gcaatgagaactttgtgggacacca

SEQ ID NO: 302222 - DNA, 25 bp, Artificial
  Probe
ttccccagcatccaatctgtgaaag

SEQ ID NO: 302223 - DNA, 25 bp, Artificial
  Probe
ggccttgtccactgactctttcaat

SEQ ID NO: 302224 - DNA, 25 bp, Artificial
  Probe
aagtctgctgtgacagccttgacgt

SEQ ID NO: 302225 - DNA, 25 bp, Artificial
  Probe
cccattgatgtcagagtgcccttcc

SEQ ID NO: 302226 - DNA, 25 bp, Artificial
  Probe
gcttagaggattcctgctgcctgcc

SEQ ID NO: 302227 - DNA, 25 bp, Artificial
  Probe
acacccacaaaacgaatcgcatgtg

SEQ ID NO: 302228 - DNA, 25 bp, Artificial
  Probe
tcaattactgtgcagtgactgacaa

SEQ ID NO: 302229 - DNA, 25 bp, Artificial
  Probe
atcctggtttcaattactgtgcagt

SEQ ID NO: 302230 - DNA, 25 bp, Artificial
  Probe
tttcaattactgtgcagtgactgac

SEQ ID NO: 302231 - DNA, 25 bp, Artificial
  Probe
aagcctcgggggattgctctccagc

SEQ ID NO: 302232 - DNA, 25 bp, Artificial
  Probe
ctgtgcagtgactgacaagcctcgg

SEQ ID NO: 302233 - DNA, 25 bp, Artificial
  Probe
tgtgcagtgactgacaagcctcggg

SEQ ID NO: 302234 - DNA, 25 bp, Artificial
  Probe
aaagcctgtttatgatccatcctgg

SEQ ID NO: 302235 - DNA, 25 bp, Artificial
  Probe
gcctcgggggattgctctccagctc

SEQ ID NO: 302236 - DNA, 25 bp, Artificial
  Probe
tcagttttcgcctttgttccacaag

SEQ ID NO: 302237 - DNA, 25 bp, Artificial
  Probe
gccttgtacatagcacacccaggtc

SEQ ID NO: 302238 - DNA, 25 bp, Artificial
  Probe
tgtttatgatccatcctggtttcaa

SEQ ID NO: 302239 - DNA, 25 bp, Artificial
  Probe
ggtttcaattactgtgcagtgactg

SEQ ID NO: 302240 - DNA, 25 bp, Artificial
  Probe
tccatcctggtttcaattactgtgc

SEQ ID NO: 302241 - DNA, 25 bp, Artificial
  Probe
caattactgtgcagtgactgacaag

SEQ ID NO: 302242 - DNA, 25 bp, Artificial
  Probe
ctcgggggattgctctccagctctt

SEQ ID NO: 302243 - DNA, 25 bp, Artificial
  Probe
tctgccttgtacatagcacacccag

SEQ ID NO: 302244 - DNA, 25 bp, Artificial
  Probe
catcctggtttcaattactgtgcag

SEQ ID NO: 302245 - DNA, 25 bp, Artificial
  Probe
ttttcgcctttgttccacaaggata

SEQ ID NO: 302246 - DNA, 25 bp, Artificial
  Probe
agcctcgggggattgctctccagct

SEQ ID NO: 302247 - DNA, 25 bp, Artificial
  Probe
cgcctttgttccacaaggataggaa

SEQ ID NO: 302248 - DNA, 25 bp, Artificial
  Probe
cagtgactgacaagcctcgggggat

SEQ ID NO: 302249 - DNA, 25 bp, Artificial
  Probe
atccatcctggtttcaattactgtg

SEQ ID NO: 302250 - DNA, 25 bp, Artificial
  Probe
ctggtttcaattactgtgcagtgac

SEQ ID NO: 302251 - DNA, 25 bp, Artificial
  Probe
gactgacaagcctcgggggattgct

SEQ ID NO: 302252 - DNA, 25 bp, Artificial
  Probe
atagcacacccaggtcctgggaaat

SEQ ID NO: 302253 - DNA, 25 bp, Artificial
  Probe
cctgtttatgatccatcctggtttc

SEQ ID NO: 302254 - DNA, 25 bp, Artificial
  Probe
aagcctgtttatgatccatcctggt

SEQ ID NO: 302255 - DNA, 25 bp, Artificial
  Probe
cttgtacatagcacacccaggtcct

SEQ ID NO: 302256 - DNA, 25 bp, Artificial
  Probe
cctggtttcaattactgtgcagtga

SEQ ID NO: 302257 - DNA, 25 bp, Artificial
  Probe
catagcacacccaggtcctgggaaa

SEQ ID NO: 302258 - DNA, 25 bp, Artificial
  Probe
aattactgtgcagtgactgacaagc

SEQ ID NO: 302259 - DNA, 25 bp, Artificial
  Probe
tagcacacccaggtcctgggaaatg

SEQ ID NO: 302260 - DNA, 25 bp, Artificial
  Probe
attactgtgcagtgactgacaagcc

SEQ ID NO: 302261 - DNA, 25 bp, Artificial
  Probe
tttcgcctttgttccacaaggatag

SEQ ID NO: 302262 - DNA, 25 bp, Artificial
  Probe
gcctttgttccacaaggataggaaa

SEQ ID NO: 302263 - DNA, 25 bp, Artificial
  Probe
tgatccatcctggtttcaattactg

SEQ ID NO: 302264 - DNA, 25 bp, Artificial
  Probe
ctgccttgtacatagcacacccagg

SEQ ID NO: 302265 - DNA, 25 bp, Artificial
  Probe
gttttcgcctttgttccacaaggat

SEQ ID NO: 302266 - DNA, 25 bp, Artificial
  Probe
cagttttcgcctttgttccacaagg

SEQ ID NO: 302267 - DNA, 25 bp, Artificial
  Probe
ggggattgctctccagctcttctct

SEQ ID NO: 302268 - DNA, 25 bp, Artificial
  Probe
ttgtacatagcacacccaggtcctg

SEQ ID NO: 302269 - DNA, 25 bp, Artificial
  Probe
tgtacatagcacacccaggtcctgg

SEQ ID NO: 302270 - DNA, 25 bp, Artificial
  Probe
taaagcctgtttatgatccatcctg

SEQ ID NO: 302271 - DNA, 25 bp, Artificial
  Probe
tactgtgcagtgactgacaagcctc

SEQ ID NO: 302272 - DNA, 25 bp, Artificial
  Probe
gatccatcctggtttcaattactgt

SEQ ID NO: 302273 - DNA, 25 bp, Artificial
  Probe
ggattgctctccagctcttctctgc

SEQ ID NO: 302274 - DNA, 25 bp, Artificial
  Probe
gagagaaccagctcggatttgttta

SEQ ID NO: 302275 - DNA, 25 bp, Artificial
  Probe
gtgagtgagcttccagaggctgact

SEQ ID NO: 302276 - DNA, 25 bp, Artificial
  Probe
tacgaagaacacagggcctggagaa

SEQ ID NO: 302277 - DNA, 25 bp, Artificial
  Probe
caagctttgggctccaatctttgtg

SEQ ID NO: 302278 - DNA, 25 bp, Artificial
  Probe
cactggacaacagagggtcacgaag

SEQ ID NO: 302279 - DNA, 25 bp, Artificial
  Probe
caagacatggattctttaggtctca

SEQ ID NO: 302280 - DNA, 25 bp, Artificial
  Probe
catctagtgccctgccggaactgta

SEQ ID NO: 302281 - DNA, 25 bp, Artificial
  Probe
tttaggtctcatagggtttccccag

SEQ ID NO: 302282 - DNA, 25 bp, Artificial
  Probe
ctccaatctttgtggcatctacgaa

SEQ ID NO: 302283 - DNA, 25 bp, Artificial
  Probe
aaactcatctagtgccctgccggaa

SEQ ID NO: 302284 - DNA, 25 bp, Artificial
  Probe
cacacagggcaagctttgggctcca

SEQ ID NO: 302285 - DNA, 25 bp, Artificial
  Probe
caaactcatctagtgccctgccgga

SEQ ID NO: 302286 - DNA, 25 bp, Artificial
  Probe
gcagagacagccaaactcatctagt

SEQ ID NO: 302287 - DNA, 25 bp, Artificial
  Probe
gctgacttagaactcaggggcagag

SEQ ID NO: 302288 - DNA, 25 bp, Artificial
  Probe
aataccactggcaacagccgaaatc

SEQ ID NO: 302289 - DNA, 25 bp, Artificial
  Probe
ggaactcgctatgtagtcaaggacg

SEQ ID NO: 302290 - DNA, 25 bp, Artificial
  Probe
cagctcggatttgtttagttttcgt

SEQ ID NO: 302291 - DNA, 25 bp, Artificial
  Probe
actgactctcagctttcatgggagg

SEQ ID NO: 302292 - DNA, 25 bp, Artificial
  Probe
gacaacagagggtcacgaagccatg

SEQ ID NO: 302293 - DNA, 25 bp, Artificial
  Probe
tgccctgccggaactgtaatccacg

SEQ ID NO: 302294 - DNA, 25 bp, Artificial
  Probe
cagggcaagctttgggctccaatct

SEQ ID NO: 302295 - DNA, 25 bp, Artificial
  Probe
gacctttctgcttccatttcttgag

SEQ ID NO: 302296 - DNA, 25 bp, Artificial
  Probe
tccagaggctgacttagaactcagg

SEQ ID NO: 302297 - DNA, 25 bp, Artificial
  Probe
cacgaagccatgaagacagaatggc

SEQ ID NO: 302298 - DNA, 25 bp, Artificial
  Probe
tgtagtcaaggacgacgtcgttgaa

SEQ ID NO: 302299 - DNA, 25 bp, Artificial
  Probe
gaaccagctcggatttgtttagttt

SEQ ID NO: 302300 - DNA, 25 bp, Artificial
  Probe
acgtcgttgaactcatgacctttct

SEQ ID NO: 302301 - DNA, 25 bp, Artificial
  Probe
ctgccggaactgtaatccacgccag

SEQ ID NO: 302302 - DNA, 25 bp, Artificial
  Probe
agcacgggccctgcactggacaaca

SEQ ID NO: 302303 - DNA, 25 bp, Artificial
  Probe
tctcatagggtttccccagacagca

SEQ ID NO: 302304 - DNA, 25 bp, Artificial
  Probe
ggtcacgaagccatgaagacagaat

SEQ ID NO: 302305 - DNA, 25 bp, Artificial
  Probe
tagggtttccccagacagcacgggc

SEQ ID NO: 302306 - DNA, 25 bp, Artificial
  Probe
tgccggaactgtaatccacgccagc

SEQ ID NO: 302307 - DNA, 25 bp, Artificial
  Probe
aatctttgtggcatctacgaagaac

SEQ ID NO: 302308 - DNA, 25 bp, Artificial
  Probe
catggattctttaggtctcataggg

SEQ ID NO: 302309 - DNA, 25 bp, Artificial
  Probe
gtgccctgccggaactgtaatccac

SEQ ID NO: 302310 - DNA, 25 bp, Artificial
  Probe
gacagaatggccactgactctcagc

SEQ ID NO: 302311 - DNA, 25 bp, Artificial
  Probe
tggcaacagccgaaatcaccaaaaa

SEQ ID NO: 302312 - DNA, 25 bp, Artificial
  Probe
gacttagaactcaggggcagagaca

SEQ ID NO: 302313 - DNA, 25 bp, Artificial
  Probe
gtgagcttccagaggctgacttaga

SEQ ID NO: 302314 - DNA, 25 bp, Artificial
  Probe
actcaggggcagagacagccaaact

SEQ ID NO: 302315 - DNA, 25 bp, Artificial
  Probe
gaactcaggggcagagacagccaaa

SEQ ID NO: 302316 - DNA, 25 bp, Artificial
  Probe
tccatttcttgagtgctgagattac

SEQ ID NO: 302317 - DNA, 25 bp, Artificial
  Probe
taccactggcaacagccgaaatcac

SEQ ID NO: 302318 - DNA, 25 bp, Artificial
  Probe
gtcaaggacgacgtcgttgaactca

SEQ ID NO: 302319 - DNA, 25 bp, Artificial
  Probe
acagccaaactcatctagtgccctg

SEQ ID NO: 302320 - DNA, 25 bp, Artificial
  Probe
tgctgcttgaatcctgagtggttaa

SEQ ID NO: 302321 - DNA, 25 bp, Artificial
  Probe
gccatggcttcttgcctggcctggc

SEQ ID NO: 302322 - DNA, 25 bp, Artificial
  Probe
ctgcttgaatcctgagtggttaaga

SEQ ID NO: 302323 - DNA, 25 bp, Artificial
  Probe
gaacctttccttgctgcttgaatcc

SEQ ID NO: 302324 - DNA, 25 bp, Artificial
  Probe
gtatcatggccatggcttcttgcct

SEQ ID NO: 302325 - DNA, 25 bp, Artificial
  Probe
ggttctgaggactgaggaaagctca

SEQ ID NO: 302326 - DNA, 25 bp, Artificial
  Probe
gctgcttgaatcctgagtggttaag

SEQ ID NO: 302327 - DNA, 25 bp, Artificial
  Probe
tggttctgaggactgaggaaagctc

SEQ ID NO: 302328 - DNA, 25 bp, Artificial
  Probe
agggaacatcctgggaacaggacaa

SEQ ID NO: 302329 - DNA, 25 bp, Artificial
  Probe
cttgctgcttgaatcctgagtggtt

SEQ ID NO: 302330 - DNA, 25 bp, Artificial
  Probe
tccttgctgcttgaatcctgagtgg

SEQ ID NO: 302331 - DNA, 25 bp, Artificial
  Probe
ggccatggcttcttgcctggcctgg

SEQ ID NO: 302332 - DNA, 25 bp, Artificial
  Probe
cctttccttgctgcttgaatcctga

SEQ ID NO: 302333 - DNA, 25 bp, Artificial
  Probe
actatagggtccagtgggtatcatg

SEQ ID NO: 302334 - DNA, 25 bp, Artificial
  Probe
gagacacatgcatcccaacaggggg

SEQ ID NO: 302335 - DNA, 25 bp, Artificial
  Probe
ttgctgcttgaatcctgagtggtta

SEQ ID NO: 302336 - DNA, 25 bp, Artificial
  Probe
acctttccttgctgcttgaatcctg

SEQ ID NO: 302337 - DNA, 25 bp, Artificial
  Probe
tttccttgctgcttgaatcctgagt

SEQ ID NO: 302338 - DNA, 25 bp, Artificial
  Probe
tccagtgggtatcatggccatggct

SEQ ID NO: 302339 - DNA, 25 bp, Artificial
  Probe
tgagacacatgcatcccaacagggg

SEQ ID NO: 302340 - DNA, 25 bp, Artificial
  Probe
ccagtgggtatcatggccatggctt

SEQ ID NO: 302341 - DNA, 25 bp, Artificial
  Probe
ccttgctgcttgaatcctgagtggt

SEQ ID NO: 302342 - DNA, 25 bp, Artificial
  Probe
ctttccttgctgcttgaatcctgag

SEQ ID NO: 302343 - DNA, 25 bp, Artificial
  Probe
cagtgggtatcatggccatggcttc

SEQ ID NO: 302344 - DNA, 25 bp, Artificial
  Probe
tggacggcctctggattacagaccc

SEQ ID NO: 302345 - DNA, 25 bp, Artificial
  Probe
cagactatagggtccagtgggtatc

SEQ ID NO: 302346 - DNA, 25 bp, Artificial
  Probe
catggccatggcttcttgcctggcc

SEQ ID NO: 302347 - DNA, 25 bp, Artificial
  Probe
ccctgacagactatagggtccagtg

SEQ ID NO: 302348 - DNA, 25 bp, Artificial
  Probe
aggaacctttccttgctgcttgaat

SEQ ID NO: 302349 - DNA, 25 bp, Artificial
  Probe
agactatagggtccagtgggtatca

SEQ ID NO: 302350 - DNA, 25 bp, Artificial
  Probe
gactatagggtccagtgggtatcat

SEQ ID NO: 302351 - DNA, 25 bp, Artificial
  Probe
tatagggtccagtgggtatcatggc

SEQ ID NO: 302352 - DNA, 25 bp, Artificial
  Probe
ttggttctgaggactgaggaaagct

SEQ ID NO: 302353 - DNA, 25 bp, Artificial
  Probe
tggccatggcttcttgcctggcctg

SEQ ID NO: 302354 - DNA, 25 bp, Artificial
  Probe
ctggacggcctctggattacagacc

SEQ ID NO: 302355 - DNA, 25 bp, Artificial
  Probe
ggacggcctctggattacagaccct

SEQ ID NO: 302356 - DNA, 25 bp, Artificial
  Probe
actggacggcctctggattacagac

SEQ ID NO: 302357 - DNA, 25 bp, Artificial
  Probe
ggtatcatggccatggcttcttgcc

SEQ ID NO: 302358 - DNA, 25 bp, Artificial
  Probe
cctgacagactatagggtccagtgg

SEQ ID NO: 302359 - DNA, 25 bp, Artificial
  Probe
ttccttgctgcttgaatcctgagtg

SEQ ID NO: 302360 - DNA, 25 bp, Artificial
  Probe
gtccagtgggtatcatggccatggc

SEQ ID NO: 302361 - DNA, 25 bp, Artificial
  Probe
ctatagggtccagtgggtatcatgg

SEQ ID NO: 302362 - DNA, 25 bp, Artificial
  Probe
tgaatcctgagtggttaagagggcc

SEQ ID NO: 302363 - DNA, 25 bp, Artificial
  Probe
ggaacctttccttgctgcttgaatc

SEQ ID NO: 302364 - DNA, 25 bp, Artificial
  Probe
ctgacagactatagggtccagtggg

SEQ ID NO: 302365 - DNA, 25 bp, Artificial
  Probe
cactggacggcctctggattacaga

SEQ ID NO: 302366 - DNA, 25 bp, Artificial
  Probe
gtagtatatgaccaatctctgtgac

SEQ ID NO: 302367 - DNA, 25 bp, Artificial
  Probe
catgtgtactgtctggaaacgaatt

SEQ ID NO: 302368 - DNA, 25 bp, Artificial
  Probe
tacactgaccagtcccacaagtgtt

SEQ ID NO: 302369 - DNA, 25 bp, Artificial
  Probe
agatctccgatacactgaccagtcc

SEQ ID NO: 302370 - DNA, 25 bp, Artificial
  Probe
cttagctgaaacctaaggctatgtt

SEQ ID NO: 302371 - DNA, 25 bp, Artificial
  Probe
taaggctatgtttccgaagatctcc

SEQ ID NO: 302372 - DNA, 25 bp, Artificial
  Probe
tctgtgactcgcttagctgaaacct

SEQ ID NO: 302373 - DNA, 25 bp, Artificial
  Probe
acccacactgtgcatttagagtatg

SEQ ID NO: 302374 - DNA, 25 bp, Artificial
  Probe
tgtttccgaagatctccgatacact

SEQ ID NO: 302375 - DNA, 25 bp, Artificial
  Probe
tttcgtgcatttgtgagccaaagag

SEQ ID NO: 302376 - DNA, 25 bp, Artificial
  Probe
atgatttgaacacatgtgtactgtc

SEQ ID NO: 302377 - DNA, 25 bp, Artificial
  Probe
aaatcttgcttcagtagcctttgct

SEQ ID NO: 302378 - DNA, 25 bp, Artificial
  Probe
ctgaccagtcccacaagtgtttttg

SEQ ID NO: 302379 - DNA, 25 bp, Artificial
  Probe
cgatacactgaccagtcccacaagt

SEQ ID NO: 302380 - DNA, 25 bp, Artificial
  Probe
gaaatcttgcttcagtagcctttgc

SEQ ID NO: 302381 - DNA, 25 bp, Artificial
  Probe
ttatggaaatcttgcttcagtagcc

SEQ ID NO: 302382 - DNA, 25 bp, Artificial
  Probe
tttccgaagatctccgatacactga

SEQ ID NO: 302383 - DNA, 25 bp, Artificial
  Probe
gatttgaacacatgtgtactgtctg

SEQ ID NO: 302384 - DNA, 25 bp, Artificial
  Probe
tgaagacatgaaacccacactgtgc

SEQ ID NO: 302385 - DNA, 25 bp, Artificial
  Probe
tcttgcttcagtagcctttgctctt

SEQ ID NO: 302386 - DNA, 25 bp, Artificial
  Probe
aacacatgtgtactgtctggaaacg

SEQ ID NO: 302387 - DNA, 25 bp, Artificial
  Probe
tgaaacccacactgtgcatttagag

SEQ ID NO: 302388 - DNA, 25 bp, Artificial
  Probe
gtactgtctggaaacgaattctgat

SEQ ID NO: 302389 - DNA, 25 bp, Artificial
  Probe
cgaagatctccgatacactgaccag

SEQ ID NO: 302390 - DNA, 25 bp, Artificial
  Probe
cgtgcatttgtgagccaaagagaaa

SEQ ID NO: 302391 - DNA, 25 bp, Artificial
  Probe
aatctctgtgactcgcttagctgaa

SEQ ID NO: 302392 - DNA, 25 bp, Artificial
  Probe
gagtgcccttaacataatgatttga

SEQ ID NO: 302393 - DNA, 25 bp, Artificial
  Probe
cccctcaggctgtacgtcaggtgtt

SEQ ID NO: 302394 - DNA, 25 bp, Artificial
  Probe
agctgaaacctaaggctatgtttcc

SEQ ID NO: 302395 - DNA, 25 bp, Artificial
  Probe
catgaaacccacactgtgcatttag

SEQ ID NO: 302396 - DNA, 25 bp, Artificial
  Probe
cccacaagtgtttttgaagacatga

SEQ ID NO: 302397 - DNA, 25 bp, Artificial
  Probe
aatgactagatctcctgtaattttg

SEQ ID NO: 302398 - DNA, 25 bp, Artificial
  Probe
gcttcagtagcctttgctcttctct

SEQ ID NO: 302399 - DNA, 25 bp, Artificial
  Probe
gaaacctaaggctatgtttccgaag

SEQ ID NO: 302400 - DNA, 25 bp, Artificial
  Probe
gctatgtttccgaagatctccgata

SEQ ID NO: 302401 - DNA, 25 bp, Artificial
  Probe
tggaaatcttgcttcagtagccttt

SEQ ID NO: 302402 - DNA, 25 bp, Artificial
  Probe
tatatgaccaatctctgtgactcgc

SEQ ID NO: 302403 - DNA, 25 bp, Artificial
  Probe
gacatgaaacccacactgtgcattt

SEQ ID NO: 302404 - DNA, 25 bp, Artificial
  Probe
ctgtctggaaacgaattctgatact

SEQ ID NO: 302405 - DNA, 25 bp, Artificial
  Probe
tcaggctgtacgtcaggtgttctca

SEQ ID NO: 302406 - DNA, 25 bp, Artificial
  Probe
ctagatctcctgtaattttgtagta

SEQ ID NO: 302407 - DNA, 25 bp, Artificial
  Probe
ctcgcttagctgaaacctaaggcta

SEQ ID NO: 302408 - DNA, 25 bp, Artificial
  Probe
ttgaagacatgaaacccacactgtg

SEQ ID NO: 302409 - DNA, 25 bp, Artificial
  Probe
atttgagtgcccttaacataatgat

SEQ ID NO: 302410 - DNA, 25 bp, Artificial
  Probe
aacctaaggctatgtttccgaagat

SEQ ID NO: 302411 - DNA, 25 bp, Artificial
  Probe
gtgcccttaacataatgatttgaac

SEQ ID NO: 302412 - DNA, 25 bp, Artificial
  Probe
atggacggcacagaccaccctgcat

SEQ ID NO: 302413 - DNA, 25 bp, Artificial
  Probe
atctctagccagaggcctaggcatc

SEQ ID NO: 302414 - DNA, 25 bp, Artificial
  Probe
agccagaggcctaggcatctggaag

SEQ ID NO: 302415 - DNA, 25 bp, Artificial
  Probe
gaatggccactaaggcagtcctgaa

SEQ ID NO: 302416 - DNA, 25 bp, Artificial
  Probe
ggtacaggcgcgtctcagttgtgaa

SEQ ID NO: 302417 - DNA, 25 bp, Artificial
  Probe
ttggcatgtggcaggctctatagca

SEQ ID NO: 302418 - DNA, 25 bp, Artificial
  Probe
gccatacagtgtgagggcctaaagc

SEQ ID NO: 302419 - DNA, 25 bp, Artificial
  Probe
tgcggagtctcatggacggcacaga

SEQ ID NO: 302420 - DNA, 25 bp, Artificial
  Probe
ctgagcagccctgcaggttgatgcc

SEQ ID NO: 302421 - DNA, 25 bp, Artificial
  Probe
aatccttggaatcaaggaaatgacc

SEQ ID NO: 302422 - DNA, 25 bp, Artificial
  Probe
actgagcagccctgcaggttgatgc

SEQ ID NO: 302423 - DNA, 25 bp, Artificial
  Probe
tcccgaggcaaagaatctctagcca

SEQ ID NO: 302424 - DNA, 25 bp, Artificial
  Probe
gtagggcagacttgctacctggaat

SEQ ID NO: 302425 - DNA, 25 bp, Artificial
  Probe
tcagtgcggagtctcatggacggca

SEQ ID NO: 302426 - DNA, 25 bp, Artificial
  Probe
cggctcggtcagtgcggagtctcat

SEQ ID NO: 302427 - DNA, 25 bp, Artificial
  Probe
ccagagctggaggtctctgggaact

SEQ ID NO: 302428 - DNA, 25 bp, Artificial
  Probe
gcatctggaagaaccctgacgatgt

SEQ ID NO: 302429 - DNA, 25 bp, Artificial
  Probe
ccatacagtgtgagggcctaaagct

SEQ ID NO: 302430 - DNA, 25 bp, Artificial
  Probe
aggcaaagaatctctagccagaggc

SEQ ID NO: 302431 - DNA, 25 bp, Artificial
  Probe
ggccactaaggcagtcctgaagggc

SEQ ID NO: 302432 - DNA, 25 bp, Artificial
  Probe
cccttgccatacagtgtgagggcct

SEQ ID NO: 302433 - DNA, 25 bp, Artificial
  Probe
gaagaaccctgacgatgtaggagtg

SEQ ID NO: 302434 - DNA, 25 bp, Artificial
  Probe
cccacggctcggtcagtgcggagtc

SEQ ID NO: 302435 - DNA, 25 bp, Artificial
  Probe
tgctacctggaatggccactaaggc

SEQ ID NO: 302436 - DNA, 25 bp, Artificial
  Probe
ttatggaaaccgttgccagagctgg

SEQ ID NO: 302437 - DNA, 25 bp, Artificial
  Probe
accgttgccagagctggaggtctct

SEQ ID NO: 302438 - DNA, 25 bp, Artificial
  Probe
gaatctctagccagaggcctaggca

SEQ ID NO: 302439 - DNA, 25 bp, Artificial
  Probe
ctggaagaaccctgacgatgtagga

SEQ ID NO: 302440 - DNA, 25 bp, Artificial
  Probe
tatggaaaccgttgccagagctgga

SEQ ID NO: 302441 - DNA, 25 bp, Artificial
  Probe
cggcccttgccatacagtgtgaggg

SEQ ID NO: 302442 - DNA, 25 bp, Artificial
  Probe
gttcttggcatgtggcaggctctat

SEQ ID NO: 302443 - DNA, 25 bp, Artificial
  Probe
cttggctctgaatccttggaatcaa

SEQ ID NO: 302444 - DNA, 25 bp, Artificial
  Probe
ggagtctcatggacggcacagacca

SEQ ID NO: 302445 - DNA, 25 bp, Artificial
  Probe
cctcctcagatagtcttgtttgcta

SEQ ID NO: 302446 - DNA, 25 bp, Artificial
  Probe
ccgttgccagagctggaggtctctg

SEQ ID NO: 302447 - DNA, 25 bp, Artificial
  Probe
caaagaatctctagccagaggccta

SEQ ID NO: 302448 - DNA, 25 bp, Artificial
  Probe
gtcttgtttgctaggcccaattccc

SEQ ID NO: 302449 - DNA, 25 bp, Artificial
  Probe
gggagcccaggaaggctaccccgct

SEQ ID NO: 302450 - DNA, 25 bp, Artificial
  Probe
cttgccatacagtgtgagggcctaa

SEQ ID NO: 302451 - DNA, 25 bp, Artificial
  Probe
catgtggcaggctctatagcataag

SEQ ID NO: 302452 - DNA, 25 bp, Artificial
  Probe
cctggaatggccactaaggcagtcc

SEQ ID NO: 302453 - DNA, 25 bp, Artificial
  Probe
agaggcctaggcatctggaagaacc

SEQ ID NO: 302454 - DNA, 25 bp, Artificial
  Probe
cactaaggcagtcctgaagggcccc

SEQ ID NO: 302455 - DNA, 25 bp, Artificial
  Probe
ttggttcttggcatgtggcaggctc

SEQ ID NO: 302456 - DNA, 25 bp, Artificial
  Probe
agtgcggagtctcatggacggcaca

SEQ ID NO: 302457 - DNA, 25 bp, Artificial
  Probe
aaacttggttcttggcatgtggcag

SEQ ID NO: 302458 - DNA, 25 bp, Artificial
  Probe
gccaataaattctaggcctaaaaag

SEQ ID NO: 302459 - DNA, 25 bp, Artificial
  Probe
ctctaaatagccaaagcatcatgag

SEQ ID NO: 302460 - DNA, 25 bp, Artificial
  Probe
cgaatgctgtaacaggcaagttgac

SEQ ID NO: 302461 - DNA, 25 bp, Artificial
  Probe
gtttcatggtcttctagtatataac

SEQ ID NO: 302462 - DNA, 25 bp, Artificial
  Probe
tttgagcatcttggttgcagagatc

SEQ ID NO: 302463 - DNA, 25 bp, Artificial
  Probe
gatcctcatgtgtactattatgtaa

SEQ ID NO: 302464 - DNA, 25 bp, Artificial
  Probe
cttggttgcagagatctcaagaatt

SEQ ID NO: 302465 - DNA, 25 bp, Artificial
  Probe
ctcaaagcacacaacagatgctaag

SEQ ID NO: 302466 - DNA, 25 bp, Artificial
  Probe
cttcaaggtgttttgcttcttgtaa

SEQ ID NO: 302467 - DNA, 25 bp, Artificial
  Probe
aaacttgaagcagttacatccgtct

SEQ ID NO: 302468 - DNA, 25 bp, Artificial
  Probe
gtgtctcaactatctgcttgtcaat

SEQ ID NO: 302469 - DNA, 25 bp, Artificial
  Probe
ctatgttctttaaaacttgaagcag

SEQ ID NO: 302470 - DNA, 25 bp, Artificial
  Probe
tgtgccttatgttcagtcattttaa

SEQ ID NO: 302471 - DNA, 25 bp, Artificial
  Probe
atttgtgagatgaacccgttccctt

SEQ ID NO: 302472 - DNA, 25 bp, Artificial
  Probe
ggcaaaaatatcttcactgtaatgt

SEQ ID NO: 302473 - DNA, 25 bp, Artificial
  Probe
agaactcttgcctttgctttccaag

SEQ ID NO: 302474 - DNA, 25 bp, Artificial
  Probe
gtgctcctcatgtgatcccacattc

SEQ ID NO: 302475 - DNA, 25 bp, Artificial
  Probe
tacatccgtctttcatcattacggg

SEQ ID NO: 302476 - DNA, 25 bp, Artificial
  Probe
ttgtcagataatcttgatgacgctg

SEQ ID NO: 302477 - DNA, 25 bp, Artificial
  Probe
tttaatttgctgtcttcatgtcgaa

SEQ ID NO: 302478 - DNA, 25 bp, Artificial
  Probe
ttggcttgttactgccttttgtcag

SEQ ID NO: 302479 - DNA, 25 bp, Artificial
  Probe
acaacactcaagtctacccagagtg

SEQ ID NO: 302480 - DNA, 25 bp, Artificial
  Probe
tgcctactaccctgtacctaaaggg

SEQ ID NO: 302481 - DNA, 25 bp, Artificial
  Probe
gactcgtgcattcagagccttttgt

SEQ ID NO: 302482 - DNA, 25 bp, Artificial
  Probe
catttgcctattcgaatgctgtaac

SEQ ID NO: 302483 - DNA, 25 bp, Artificial
  Probe
ctgcccagtgtagtgaattcctttc

SEQ ID NO: 302484 - DNA, 25 bp, Artificial
  Probe
ccaaagcatcatgagtttggaattt

SEQ ID NO: 302485 - DNA, 25 bp, Artificial
  Probe
ggtgaacaccttcaacactgattaa

SEQ ID NO: 302486 - DNA, 25 bp, Artificial
  Probe
ttcactacgaagaaacagaatgaga

SEQ ID NO: 302487 - DNA, 25 bp, Artificial
  Probe
agatctcaagaatttacgtcttgga

SEQ ID NO: 302488 - DNA, 25 bp, Artificial
  Probe
gaactcttgcctttgctttccaagt

SEQ ID NO: 302489 - DNA, 25 bp, Artificial
  Probe
gtagtccagttattccatcttgacc

SEQ ID NO: 302490 - DNA, 25 bp, Artificial
  Probe
tcttctgttatttgtgagatgaacc

SEQ ID NO: 302491 - DNA, 25 bp, Artificial
  Probe
cacaacagatgctaagtagatgggt

SEQ ID NO: 302492 - DNA, 25 bp, Artificial
  Probe
gagatgtatgcctactaccctgtac

SEQ ID NO: 302493 - DNA, 25 bp, Artificial
  Probe
tgtagtgaattcctttccaagaact

SEQ ID NO: 302494 - DNA, 25 bp, Artificial
  Probe
gtgaattcctttccaagaactcttg

SEQ ID NO: 302495 - DNA, 25 bp, Artificial
  Probe
tggaatttaacatcagctcccatgt

SEQ ID NO: 302496 - DNA, 25 bp, Artificial
  Probe
tatgatcctcatgtgtactattatg

SEQ ID NO: 302497 - DNA, 25 bp, Artificial
  Probe
catgtagtccagttattccatcttg

SEQ ID NO: 302498 - DNA, 25 bp, Artificial
  Probe
gtgccttatgttcagtcattttaat

SEQ ID NO: 302499 - DNA, 25 bp, Artificial
  Probe
ttggtctgagacatttggtgaacac

SEQ ID NO: 302500 - DNA, 25 bp, Artificial
  Probe
gaagcagttacatccgtctttcatc

SEQ ID NO: 302501 - DNA, 25 bp, Artificial
  Probe
ggtttctcagccaaaaagcatcatc

SEQ ID NO: 302502 - DNA, 25 bp, Artificial
  Probe
ttaagcccaggctagcctgatttag

SEQ ID NO: 302503 - DNA, 25 bp, Artificial
  Probe
tgtgatcccacattctactgcccag

SEQ ID NO: 302504 - DNA, 25 bp, Artificial
  Probe
gacgaccttcgcagagatccagccg

SEQ ID NO: 302505 - DNA, 25 bp, Artificial
  Probe
atgatgttgtccaccgcggccacgc

SEQ ID NO: 302506 - DNA, 25 bp, Artificial
  Probe
agcagcgtagtgacgcgcttcacag

SEQ ID NO: 302507 - DNA, 25 bp, Artificial
  Probe
tacctgatccccaaagagattcagc

SEQ ID NO: 302508 - DNA, 25 bp, Artificial
  Probe
agaacccgaggtgaaaaatgccaag

SEQ ID NO: 302509 - DNA, 25 bp, Artificial
  Probe
ccatcgcccttcagggactcggtgg

SEQ ID NO: 302510 - DNA, 25 bp, Artificial
  Probe
aggcgtatcacctgcccaggagacg

SEQ ID NO: 302511 - DNA, 25 bp, Artificial
  Probe
cacgaccatgacgaccttcgcagag

SEQ ID NO: 302512 - DNA, 25 bp, Artificial
  Probe
caaagagattcagctgcccacgacc

SEQ ID NO: 302513 - DNA, 25 bp, Artificial
  Probe
gccactggaaacttccctgagatag

SEQ ID NO: 302514 - DNA, 25 bp, Artificial
  Probe
cctcggtgttccagatgggcgcagc

SEQ ID NO: 302515 - DNA, 25 bp, Artificial
  Probe
gtagtgacgcgcttcacagccaaca

SEQ ID NO: 302516 - DNA, 25 bp, Artificial
  Probe
tggaggagcttgtggccctcactcc

SEQ ID NO: 302517 - DNA, 25 bp, Artificial
  Probe
ttcgcagagatccagccgctgccgg

SEQ ID NO: 302518 - DNA, 25 bp, Artificial
  Probe
agatcagcagcgtagtgacgcgctt

SEQ ID NO: 302519 - DNA, 25 bp, Artificial
  Probe
atgggcgcagcgacacccatagtca

SEQ ID NO: 302520 - DNA, 25 bp, Artificial
  Probe
ttcttcatcgttgtgagccactgga

SEQ ID NO: 302521 - DNA, 25 bp, Artificial
  Probe
atcagagattacacgcagagttctt

SEQ ID NO: 302522 - DNA, 25 bp, Artificial
  Probe
atccccaaagagattcagctgccca

SEQ ID NO: 302523 - DNA, 25 bp, Artificial
  Probe
aaatgccaaggacacacacggtgga

SEQ ID NO: 302524 - DNA, 25 bp, Artificial
  Probe
ccaaactctccagtctcagaatcgg

SEQ ID NO: 302525 - DNA, 25 bp, Artificial
  Probe
ccatgacgaccttcgcagagatcca

SEQ ID NO: 302526 - DNA, 25 bp, Artificial
  Probe
agagttcttcatcgttgtgagccac

SEQ ID NO: 302527 - DNA, 25 bp, Artificial
  Probe
agacgcccacaggagctgaatccgc

SEQ ID NO: 302528 - DNA, 25 bp, Artificial
  Probe
ccagatgggcgcagcgacacccata

SEQ ID NO: 302529 - DNA, 25 bp, Artificial
  Probe
tctcatcatcagagattacacgcag

SEQ ID NO: 302530 - DNA, 25 bp, Artificial
  Probe
gggcgacaggcgtatcacctgccca

SEQ ID NO: 302531 - DNA, 25 bp, Artificial
  Probe
tgggcgcagcgacacccatagtcac

SEQ ID NO: 302532 - DNA, 25 bp, Artificial
  Probe
aaactctccagtctcagaatcggcc

SEQ ID NO: 302533 - DNA, 25 bp, Artificial
  Probe
acagagaacccgaggtgaaaaatgc

SEQ ID NO: 302534 - DNA, 25 bp, Artificial
  Probe
cgcccttcagggactcggtggactc

SEQ ID NO: 302535 - DNA, 25 bp, Artificial
  Probe
cgccccgggcaaaccagatctggag

SEQ ID NO: 302536 - DNA, 25 bp, Artificial
  Probe
gtgacgcgcttcacagccaacatct

SEQ ID NO: 302537 - DNA, 25 bp, Artificial
  Probe
aagagattcagctgcccacgaccat

SEQ ID NO: 302538 - DNA, 25 bp, Artificial
  Probe
gagataggcctgtgcagcagacctc

SEQ ID NO: 302539 - DNA, 25 bp, Artificial
  Probe
tggaaacttccctgagataggcctg

SEQ ID NO: 302540 - DNA, 25 bp, Artificial
  Probe
atagtcaccccaacagagaacccga

SEQ ID NO: 302541 - DNA, 25 bp, Artificial
  Probe
atctccgagctcaactccatgatgt

SEQ ID NO: 302542 - DNA, 25 bp, Artificial
  Probe
cttccctgagataggcctgtgcagc

SEQ ID NO: 302543 - DNA, 25 bp, Artificial
  Probe
caccccaacagagaacccgaggtga

SEQ ID NO: 302544 - DNA, 25 bp, Artificial
  Probe
gagattacacgcagagttcttcatc

SEQ ID NO: 302545 - DNA, 25 bp, Artificial
  Probe
ttcatcgttgtgagccactggaaac

SEQ ID NO: 302546 - DNA, 25 bp, Artificial
  Probe
attcagctgcccacgaccatgacga

SEQ ID NO: 302547 - DNA, 25 bp, Artificial
  Probe
gagcagatcagcagcgtagtgacgc

SEQ ID NO: 302548 - DNA, 25 bp, Artificial
  Probe
cccttcagggactcggtggactcgg

SEQ ID NO: 302549 - DNA, 25 bp, Artificial
  Probe
gaccttcgcagagatccagccgctg

SEQ ID NO: 302550 - DNA, 25 bp, Artificial
  Probe
acctcaccgcagacagggcctgatg

SEQ ID NO: 302551 - DNA, 25 bp, Artificial
  Probe
gaaaccagaggttacggttcagtgc

SEQ ID NO: 302552 - DNA, 25 bp, Artificial
  Probe
gattgccaacgaaaccagaggttac

SEQ ID NO: 302553 - DNA, 25 bp, Artificial
  Probe
gaaaggtattctctcagcagaagag

SEQ ID NO: 302554 - DNA, 25 bp, Artificial
  Probe
tcagtgccgaggacccagtgtatgg

SEQ ID NO: 302555 - DNA, 25 bp, Artificial
  Probe
ccccatttctcaggtgatgtacgaa

SEQ ID NO: 302556 - DNA, 25 bp, Artificial
  Probe
gctgttgccccatttctcaggtgat

SEQ ID NO: 302557 - DNA, 25 bp, Artificial
  Probe
ccatttctcaggtgatgtacgaaca

SEQ ID NO: 302558 - DNA, 25 bp, Artificial
  Probe
agcagaccgttcacattctaaagct

SEQ ID NO: 302559 - DNA, 25 bp, Artificial
  Probe
cgaaaccagaggttacggttcagtg

SEQ ID NO: 302560 - DNA, 25 bp, Artificial
  Probe
cccatttctcaggtgatgtacgaac

SEQ ID NO: 302561 - DNA, 25 bp, Artificial
  Probe
taaagctacgactacctcaccgcag

SEQ ID NO: 302562 - DNA, 25 bp, Artificial
  Probe
ggacccagtgtatgggaagcagacc

SEQ ID NO: 302563 - DNA, 25 bp, Artificial
  Probe
ggacggctcacaatttaagaatact

SEQ ID NO: 302564 - DNA, 25 bp, Artificial
  Probe
gccccatttctcaggtgatgtacga

SEQ ID NO: 302565 - DNA, 25 bp, Artificial
  Probe
tgttgccccatttctcaggtgatgt

SEQ ID NO: 302566 - DNA, 25 bp, Artificial
  Probe
aactatgagctgttgccccatttct

SEQ ID NO: 302567 - DNA, 25 bp, Artificial
  Probe
tgaaaggtattctctcagcagaaga

SEQ ID NO: 302568 - DNA, 25 bp, Artificial
  Probe
acggctcacaatttaagaatactga

SEQ ID NO: 302569 - DNA, 25 bp, Artificial
  Probe
aaagctacgactacctcaccgcaga

SEQ ID NO: 302570 - DNA, 25 bp, Artificial
  Probe
ggaagcagaccgttcacattctaaa

SEQ ID NO: 302571 - DNA, 25 bp, Artificial
  Probe
ctcaccgcagacagggcctgatgaa

SEQ ID NO: 302572 - DNA, 25 bp, Artificial
  Probe
gaccgttcacattctaaagctacga

SEQ ID NO: 302573 - DNA, 25 bp, Artificial
  Probe
tgtatgggaagcagaccgttcacat

SEQ ID NO: 302574 - DNA, 25 bp, Artificial
  Probe
gcagacagggcctgatgaagtgaaa

SEQ ID NO: 302575 - DNA, 25 bp, Artificial
  Probe
cggctcacaatttaagaatactgac

SEQ ID NO: 302576 - DNA, 25 bp, Artificial
  Probe
attgccaacgaaaccagaggttacg

SEQ ID NO: 302577 - DNA, 25 bp, Artificial
  Probe
catttctcaggtgatgtacgaacat

SEQ ID NO: 302578 - DNA, 25 bp, Artificial
  Probe
agaccgttcacattctaaagctacg

SEQ ID NO: 302579 - DNA, 25 bp, Artificial
  Probe
agggacggctcacaatttaagaata

SEQ ID NO: 302580 - DNA, 25 bp, Artificial
  Probe
ttgccaacgaaaccagaggttacgg

SEQ ID NO: 302581 - DNA, 25 bp, Artificial
  Probe
aggacccagtgtatgggaagcagac

SEQ ID NO: 302582 - DNA, 25 bp, Artificial
  Probe
actatgagctgttgccccatttctc

SEQ ID NO: 302583 - DNA, 25 bp, Artificial
  Probe
gttcagtgccgaggacccagtgtat

SEQ ID NO: 302584 - DNA, 25 bp, Artificial
  Probe
tacctcaccgcagacagggcctgat

SEQ ID NO: 302585 - DNA, 25 bp, Artificial
  Probe
gttacggttcagtgccgaggaccca

SEQ ID NO: 302586 - DNA, 25 bp, Artificial
  Probe
ggttcagtgccgaggacccagtgta

SEQ ID NO: 302587 - DNA, 25 bp, Artificial
  Probe
cagacagggcctgatgaagtgaaag

SEQ ID NO: 302588 - DNA, 25 bp, Artificial
  Probe
aggattgccaacgaaaccagaggtt

SEQ ID NO: 302589 - DNA, 25 bp, Artificial
  Probe
ttctcaggtgatgtacgaacataca

SEQ ID NO: 302590 - DNA, 25 bp, Artificial
  Probe
gcagaccgttcacattctaaagcta

SEQ ID NO: 302591 - DNA, 25 bp, Artificial
  Probe
ttgccccatttctcaggtgatgtac

SEQ ID NO: 302592 - DNA, 25 bp, Artificial
  Probe
tgccaacgaaaccagaggttacggt

SEQ ID NO: 302593 - DNA, 25 bp, Artificial
  Probe
agctgttgccccatttctcaggtga

SEQ ID NO: 302594 - DNA, 25 bp, Artificial
  Probe
ccgaggacccagtgtatgggaagca

SEQ ID NO: 302595 - DNA, 25 bp, Artificial
  Probe
cctcaccgcagacagggcctgatga

SEQ ID NO: 302596 - DNA, 25 bp, Artificial
  Probe
gttgtattgtttgtcagtgtccttt

SEQ ID NO: 302597 - DNA, 25 bp, Artificial
  Probe
tgtttgtcagtgtccttttgtaaat

SEQ ID NO: 302598 - DNA, 25 bp, Artificial
  Probe
ttttctgttgtattgtttgtcagtg

SEQ ID NO: 302599 - DNA, 25 bp, Artificial
  Probe
tggcgttttctgttgtattgtttgt

SEQ ID NO: 302600 - DNA, 25 bp, Artificial
  Probe
tttctgttgtattgtttgtcagtgt

SEQ ID NO: 302601 - DNA, 25 bp, Artificial
  Probe
tttgtcagtgtccttttgtaaatgt

SEQ ID NO: 302602 - DNA, 25 bp, Artificial
  Probe
ttctgttgtattgtttgtcagtgtc

SEQ ID NO: 302603 - DNA, 25 bp, Artificial
  Probe
cgttttctgttgtattgtttgtcag

SEQ ID NO: 302604 - DNA, 25 bp, Artificial
  Probe
gtgtccttttgtaaatgttgaagtg

SEQ ID NO: 302605 - DNA, 25 bp, Artificial
  Probe
tgtggcgttttctgttgtattgttt

SEQ ID NO: 302606 - DNA, 25 bp, Artificial
  Probe
attgtttgtcagtgtccttttgtaa

SEQ ID NO: 302607 - DNA, 25 bp, Artificial
  Probe
ttgtcagtgtccttttgtaaatgtt

SEQ ID NO: 302608 - DNA, 25 bp, Artificial
  Probe
tatgtggcgttttctgttgtattgt

SEQ ID NO: 302609 - DNA, 25 bp, Artificial
  Probe
tcagtgtccttttgtaaatgttgaa

SEQ ID NO: 302610 - DNA, 25 bp, Artificial
  Probe
ttgtttgtcagtgtccttttgtaaa

SEQ ID NO: 302611 - DNA, 25 bp, Artificial
  Probe
tctgttgtattgtttgtcagtgtcc

SEQ ID NO: 302612 - DNA, 25 bp, Artificial
  Probe
agtgtccttttgtaaatgttgaagt

SEQ ID NO: 302613 - DNA, 25 bp, Artificial
  Probe
tgtcagtgtccttttgtaaatgttg

SEQ ID NO: 302614 - DNA, 25 bp, Artificial
  Probe
ttgtattgtttgtcagtgtcctttt

SEQ ID NO: 302615 - DNA, 25 bp, Artificial
  Probe
atgtggcgttttctgttgtattgtt

SEQ ID NO: 302616 - DNA, 25 bp, Artificial
  Probe
gtttgtcagtgtccttttgtaaatg

SEQ ID NO: 302617 - DNA, 25 bp, Artificial
  Probe
tccttttgtaaatgttgaagtgagt

SEQ ID NO: 302618 - DNA, 25 bp, Artificial
  Probe
tgtccttttgtaaatgttgaagtga

SEQ ID NO: 302619 - DNA, 25 bp, Artificial
  Probe
gttttctgttgtattgtttgtcagt

SEQ ID NO: 302620 - DNA, 25 bp, Artificial
  Probe
tattgtttgtcagtgtccttttgta

SEQ ID NO: 302621 - DNA, 25 bp, Artificial
  Probe
ggcgttttctgttgtattgtttgtc

SEQ ID NO: 302622 - DNA, 25 bp, Artificial
  Probe
cagtgtccttttgtaaatgttgaag

SEQ ID NO: 302623 - DNA, 25 bp, Artificial
  Probe
gtattgtttgtcagtgtccttttgt

SEQ ID NO: 302624 - DNA, 25 bp, Artificial
  Probe
tgtattgtttgtcagtgtccttttg

SEQ ID NO: 302625 - DNA, 25 bp, Artificial
  Probe
gcgttttctgttgtattgtttgtca

SEQ ID NO: 302626 - DNA, 25 bp, Artificial
  Probe
gtcagtgtccttttgtaaatgttga

SEQ ID NO: 302627 - DNA, 25 bp, Artificial
  Probe
ctgttgtattgtttgtcagtgtcct

SEQ ID NO: 302628 - DNA, 25 bp, Artificial
  Probe
gtggcgttttctgttgtattgtttg

SEQ ID NO: 302629 - DNA, 25 bp, Artificial
  Probe
tgttgtattgtttgtcagtgtcctt

SEQ ID NO: 302630 - DNA, 25 bp, Artificial
  Probe
tttggataaaatccttctgtaacag

SEQ ID NO: 302631 - DNA, 25 bp, Artificial
  Probe
cagcagaattttctaggtggtcagt

SEQ ID NO: 302632 - DNA, 25 bp, Artificial
  Probe
tggcacatccttaaatcctctgagc

SEQ ID NO: 302633 - DNA, 25 bp, Artificial
  Probe
gggaattcacagacccatgaaactt

SEQ ID NO: 302634 - DNA, 25 bp, Artificial
  Probe
ggcatcctcagcagcagaattttct

SEQ ID NO: 302635 - DNA, 25 bp, Artificial
  Probe
gacccatgaaacttatctcactgtg

SEQ ID NO: 302636 - DNA, 25 bp, Artificial
  Probe
tccttctgtaacagacctcaagaag

SEQ ID NO: 302637 - DNA, 25 bp, Artificial
  Probe
tgaaaagtacactcaattgcatctg

SEQ ID NO: 302638 - DNA, 25 bp, Artificial
  Probe
tctttcctacctcagtgggttttat

SEQ ID NO: 302639 - DNA, 25 bp, Artificial
  Probe
tacctcagtgggttttattccagta

SEQ ID NO: 302640 - DNA, 25 bp, Artificial
  Probe
aatgggaattcacagacccatgaaa

SEQ ID NO: 302641 - DNA, 25 bp, Artificial
  Probe
atggcacatccttaaatcctctgag

SEQ ID NO: 302642 - DNA, 25 bp, Artificial
  Probe
ttcttaggagggtcaaaaagactct

SEQ ID NO: 302643 - DNA, 25 bp, Artificial
  Probe
ccctctttgtaagagaagagcaaag

SEQ ID NO: 302644 - DNA, 25 bp, Artificial
  Probe
ggataaaatccttctgtaacagacc

SEQ ID NO: 302645 - DNA, 25 bp, Artificial
  Probe
cttcatggtattcttaggagggtca

SEQ ID NO: 302646 - DNA, 25 bp, Artificial
  Probe
cgtaatgctatcattttcaaaagga

SEQ ID NO: 302647 - DNA, 25 bp, Artificial
  Probe
tcatattacagatgggctaactaag

SEQ ID NO: 302648 - DNA, 25 bp, Artificial
  Probe
aagagcaaagcctagtggaaccagc

SEQ ID NO: 302649 - DNA, 25 bp, Artificial
  Probe
ttgcatctggaatgggaattcacag

SEQ ID NO: 302650 - DNA, 25 bp, Artificial
  Probe
taaagagtaccctatagtttgctca

SEQ ID NO: 302651 - DNA, 25 bp, Artificial
  Probe
tcttcatggtattcttaggagggtc

SEQ ID NO: 302652 - DNA, 25 bp, Artificial
  Probe
tggtcagttagatgcagtgtcctct

SEQ ID NO: 302653 - DNA, 25 bp, Artificial
  Probe
gctaaccatctaaagacgggaagaa

SEQ ID NO: 302654 - DNA, 25 bp, Artificial
  Probe
ggtcaaaaagactctgctcatatta

SEQ ID NO: 302655 - DNA, 25 bp, Artificial
  Probe
aggagtctactttcttgagaagtgc

SEQ ID NO: 302656 - DNA, 25 bp, Artificial
  Probe
ggaagaacctaactgtgacaaccac

SEQ ID NO: 302657 - DNA, 25 bp, Artificial
  Probe
acgtaatgctatcattttcaaaagg

SEQ ID NO: 302658 - DNA, 25 bp, Artificial
  Probe
tttctaggatgtaatcagtgtttcc

SEQ ID NO: 302659 - DNA, 25 bp, Artificial
  Probe
cttctgtaacagacctcaagaagga

SEQ ID NO: 302660 - DNA, 25 bp, Artificial
  Probe
cactgtgcaccttctgcttctaaag

SEQ ID NO: 302661 - DNA, 25 bp, Artificial
  Probe
tttgccctcctgtccttaaagctgt

SEQ ID NO: 302662 - DNA, 25 bp, Artificial
  Probe
gtctgggtcttcttacatcattcaa

SEQ ID NO: 302663 - DNA, 25 bp, Artificial
  Probe
gggtcagtcttttgccctcctgtcc

SEQ ID NO: 302664 - DNA, 25 bp, Artificial
  Probe
attaaagctaaccatctaaagacgg

SEQ ID NO: 302665 - DNA, 25 bp, Artificial
  Probe
ctgcttctaaagtgccggatgggta

SEQ ID NO: 302666 - DNA, 25 bp, Artificial
  Probe
catgtgctgagtctttgtaattcta

SEQ ID NO: 302667 - DNA, 25 bp, Artificial
  Probe
gaagaacctaactgtgacaaccaca

SEQ ID NO: 302668 - DNA, 25 bp, Artificial
  Probe
tacaggaaatgttcctcgtcctaag

SEQ ID NO: 302669 - DNA, 25 bp, Artificial
  Probe
agctacatctttcctacctcagtgg

SEQ ID NO: 302670 - DNA, 25 bp, Artificial
  Probe
ctcagtgggttttattccagtaaga

SEQ ID NO: 302671 - DNA, 25 bp, Artificial
  Probe
gaatgtttaccctctttgtaagaga

SEQ ID NO: 302672 - DNA, 25 bp, Artificial
  Probe
gtcatgatcaccaatctgtactgtt

SEQ ID NO: 302673 - DNA, 25 bp, Artificial
  Probe
atgataactgggtcagtcttttgcc

SEQ ID NO: 302674 - DNA, 25 bp, Artificial
  Probe
ccgacatatgatactgtttgttatt

SEQ ID NO: 302675 - DNA, 25 bp, Artificial
  Probe
gagtaccctatagtttgctcactac

SEQ ID NO: 302676 - DNA, 25 bp, Artificial
  Probe
ccagttccaggaagtttctatggca

SEQ ID NO: 302677 - DNA, 25 bp, Artificial
  Probe
tggcaaccttagtgctcattaagga

SEQ ID NO: 302678 - DNA, 25 bp, Artificial
  Probe
tagtcgggtgccagttccaggaagt

SEQ ID NO: 302679 - DNA, 25 bp, Artificial
  Probe
cagtgctacatgtttttgtctttga

SEQ ID NO: 302680 - DNA, 25 bp, Artificial
  Probe
tgtgtaacaagctggagcagacaga

SEQ ID NO: 302681 - DNA, 25 bp, Artificial
  Probe
agagcctacagtgaggctgtacctc

SEQ ID NO: 302682 - DNA, 25 bp, Artificial
  Probe
agtttctatggcaaccttagtgctc

SEQ ID NO: 302683 - DNA, 25 bp, Artificial
  Probe
agcatagtcgggtgccagttccagg

SEQ ID NO: 302684 - DNA, 25 bp, Artificial
  Probe
gctttcagtgggagagcctacagtg

SEQ ID NO: 302685 - DNA, 25 bp, Artificial
  Probe
agatcacatccgttaagcagaatac

SEQ ID NO: 302686 - DNA, 25 bp, Artificial
  Probe
gttacctgtaagctgatacctaaaa

SEQ ID NO: 302687 - DNA, 25 bp, Artificial
  Probe
ccagctggctcaggtcctgggactg

SEQ ID NO: 302688 - DNA, 25 bp, Artificial
  Probe
tacagtgtgtaacaagctggagcag

SEQ ID NO: 302689 - DNA, 25 bp, Artificial
  Probe
agtgaggctgtacctcactgtggga

SEQ ID NO: 302690 - DNA, 25 bp, Artificial
  Probe
agaagctttcagtgggagagcctac

SEQ ID NO: 302691 - DNA, 25 bp, Artificial
  Probe
ggagagcctacagtgaggctgtacc

SEQ ID NO: 302692 - DNA, 25 bp, Artificial
  Probe
taaggtttttatgctctgttacctg

SEQ ID NO: 302693 - DNA, 25 bp, Artificial
  Probe
tgccagttccaggaagtttctatgg

SEQ ID NO: 302694 - DNA, 25 bp, Artificial
  Probe
agaggcaggatcagcccaagaagct

SEQ ID NO: 302695 - DNA, 25 bp, Artificial
  Probe
tgctcattaaggaacattgtcagtt

SEQ ID NO: 302696 - DNA, 25 bp, Artificial
  Probe
tgctacatgtttttgtctttgagac

SEQ ID NO: 302697 - DNA, 25 bp, Artificial
  Probe
ctacatgtttttgtctttgagacaa

SEQ ID NO: 302698 - DNA, 25 bp, Artificial
  Probe
gatcacatccgttaagcagaatacc

SEQ ID NO: 302699 - DNA, 25 bp, Artificial
  Probe
cccaagaagctttcagtgggagagc

SEQ ID NO: 302700 - DNA, 25 bp, Artificial
  Probe
gggtgccagttccaggaagtttcta

SEQ ID NO: 302701 - DNA, 25 bp, Artificial
  Probe
gagcctacagtgaggctgtacctca

SEQ ID NO: 302702 - DNA, 25 bp, Artificial
  Probe
atgctctgttacctgtaagctgata

SEQ ID NO: 302703 - DNA, 25 bp, Artificial
  Probe
tccaggaagtttctatggcaacctt

SEQ ID NO: 302704 - DNA, 25 bp, Artificial
  Probe
ttccaggaagtttctatggcaacct

SEQ ID NO: 302705 - DNA, 25 bp, Artificial
  Probe
tgttacctgtaagctgatacctaaa

SEQ ID NO: 302706 - DNA, 25 bp, Artificial
  Probe
cagtgtgtaacaagctggagcagac

SEQ ID NO: 302707 - DNA, 25 bp, Artificial
  Probe
tttcagtgggagagcctacagtgag

SEQ ID NO: 302708 - DNA, 25 bp, Artificial
  Probe
agattcccacactcaactgcaggtg

SEQ ID NO: 302709 - DNA, 25 bp, Artificial
  Probe
gtcgggtgccagttccaggaagttt

SEQ ID NO: 302710 - DNA, 25 bp, Artificial
  Probe
ttagtgctcattaaggaacattgtc

SEQ ID NO: 302711 - DNA, 25 bp, Artificial
  Probe
caagaagctttcagtgggagagcct

SEQ ID NO: 302712 - DNA, 25 bp, Artificial
  Probe
caggatcagcccaagaagctttcag

SEQ ID NO: 302713 - DNA, 25 bp, Artificial
  Probe
attcccacactcaactgcaggtgga

SEQ ID NO: 302714 - DNA, 25 bp, Artificial
  Probe
tttcatttggagaggcaggatcagc

SEQ ID NO: 302715 - DNA, 25 bp, Artificial
  Probe
ccttagtgctcattaaggaacattg

SEQ ID NO: 302716 - DNA, 25 bp, Artificial
  Probe
gctacatgtttttgtctttgagaca

SEQ ID NO: 302717 - DNA, 25 bp, Artificial
  Probe
caaagtcagggtttttcaatgcctt

SEQ ID NO: 302718 - DNA, 25 bp, Artificial
  Probe
gaagattcccacactcaactgcagg

SEQ ID NO: 302719 - DNA, 25 bp, Artificial
  Probe
atttggagaggcaggatcagcccaa

SEQ ID NO: 302720 - DNA, 25 bp, Artificial
  Probe
gccaaaggtccctccagcctgtagt

SEQ ID NO: 302721 - DNA, 25 bp, Artificial
  Probe
gtgctcattaaggaacattgtcagt

SEQ ID NO: 302722 - DNA, 25 bp, Artificial
  Probe
tgtagcaattcattcaaaagacaag

SEQ ID NO: 302723 - DNA, 25 bp, Artificial
  Probe
attcattcaaaagacaagagaactg

SEQ ID NO: 302724 - DNA, 25 bp, Artificial
  Probe
gcagtggttactggacagtcctcgt

SEQ ID NO: 302725 - DNA, 25 bp, Artificial
  Probe
taaaccagcaccaaggtttgtgtgt

SEQ ID NO: 302726 - DNA, 25 bp, Artificial
  Probe
atggaaaagctcagtgtctgtagca

SEQ ID NO: 302727 - DNA, 25 bp, Artificial
  Probe
ttcctgattccgaggcttcctgtta

SEQ ID NO: 302728 - DNA, 25 bp, Artificial
  Probe
tcagtgtctgtagcaattcattcaa

SEQ ID NO: 302729 - DNA, 25 bp, Artificial
  Probe
gctgtataaatcagccgatgtaaac

SEQ ID NO: 302730 - DNA, 25 bp, Artificial
  Probe
tcctgttatgctgtataaatcagcc

SEQ ID NO: 302731 - DNA, 25 bp, Artificial
  Probe
taaatcagccgatgtaaaccagcac

SEQ ID NO: 302732 - DNA, 25 bp, Artificial
  Probe
tcatctgcgaaaacaaggaaagagt

SEQ ID NO: 302733 - DNA, 25 bp, Artificial
  Probe
accagcaccaaggtttgtgtgtttt

SEQ ID NO: 302734 - DNA, 25 bp, Artificial
  Probe
agtatatcaggctgttctttcatgt

SEQ ID NO: 302735 - DNA, 25 bp, Artificial
  Probe
ctgtcccttattctctgtatctgtg

SEQ ID NO: 302736 - DNA, 25 bp, Artificial
  Probe
agacaagagaactgtcccttattct

SEQ ID NO: 302737 - DNA, 25 bp, Artificial
  Probe
cctcgtgtcttttgtctgggtgtta

SEQ ID NO: 302738 - DNA, 25 bp, Artificial
  Probe
aggtcatggaatcatctgcgaaaac

SEQ ID NO: 302739 - DNA, 25 bp, Artificial
  Probe
aacattgtaattaaccctgggcagt

SEQ ID NO: 302740 - DNA, 25 bp, Artificial
  Probe
ggctttttagtatactcctgtaaca

SEQ ID NO: 302741 - DNA, 25 bp, Artificial
  Probe
gacaagagaactgtcccttattctc

SEQ ID NO: 302742 - DNA, 25 bp, Artificial
  Probe
agtgtctgtagcaattcattcaaaa

SEQ ID NO: 302743 - DNA, 25 bp, Artificial
  Probe
acattgtaattaaccctgggcagtg

SEQ ID NO: 302744 - DNA, 25 bp, Artificial
  Probe
attcccatgaccatcagggccctta

SEQ ID NO: 302745 - DNA, 25 bp, Artificial
  Probe
gagaactgtcccttattctctgtat

SEQ ID NO: 302746 - DNA, 25 bp, Artificial
  Probe
gtcctcgtgtcttttgtctgggtgt

SEQ ID NO: 302747 - DNA, 25 bp, Artificial
  Probe
tgattccgaggcttcctgttatgct

SEQ ID NO: 302748 - DNA, 25 bp, Artificial
  Probe
tgtaattaaccctgggcagtggtta

SEQ ID NO: 302749 - DNA, 25 bp, Artificial
  Probe
gtatctgtgcttttcatctctgtgg

SEQ ID NO: 302750 - DNA, 25 bp, Artificial
  Probe
gtcccttattctctgtatctgtgct

SEQ ID NO: 302751 - DNA, 25 bp, Artificial
  Probe
taaccctgggcagtggttactggac

SEQ ID NO: 302752 - DNA, 25 bp, Artificial
  Probe
gtagcaattcattcaaaagacaaga

SEQ ID NO: 302753 - DNA, 25 bp, Artificial
  Probe
gtctgtagcaattcattcaaaagac

SEQ ID NO: 302754 - DNA, 25 bp, Artificial
  Probe
gaatcatctgcgaaaacaaggaaag

SEQ ID NO: 302755 - DNA, 25 bp, Artificial
  Probe
gcttttcatctctgtggcaattatc

SEQ ID NO: 302756 - DNA, 25 bp, Artificial
  Probe
cagcaccaaggtttgtgtgttttgt

SEQ ID NO: 302757 - DNA, 25 bp, Artificial
  Probe
ctcgtgtcttttgtctgggtgttaa

SEQ ID NO: 302758 - DNA, 25 bp, Artificial
  Probe
atgctgtataaatcagccgatgtaa

SEQ ID NO: 302759 - DNA, 25 bp, Artificial
  Probe
ggaaaagctcagtgtctgtagcaat

SEQ ID NO: 302760 - DNA, 25 bp, Artificial
  Probe
atcatctgcgaaaacaaggaaagag

SEQ ID NO: 302761 - DNA, 25 bp, Artificial
  Probe
tgggcagtggttactggacagtcct

SEQ ID NO: 302762 - DNA, 25 bp, Artificial
  Probe
tctcttcctgattccgaggcttcct

SEQ ID NO: 302763 - DNA, 25 bp, Artificial
  Probe
ctgtggcaattatcttagggtctga

SEQ ID NO: 302764 - DNA, 25 bp, Artificial
  Probe
agtggttactggacagtcctcgtgt

SEQ ID NO: 302765 - DNA, 25 bp, Artificial
  Probe
aaagctcagtgtctgtagcaattca

SEQ ID NO: 302766 - DNA, 25 bp, Artificial
  Probe
catctctgtggcaattatcttaggg

SEQ ID NO: 302767 - DNA, 25 bp, Artificial
  Probe
catggaatcatctgcgaaaacaagg

SEQ ID NO: 302768 - DNA, 25 bp, Artificial
  Probe
cagagtcacagtcagggtgttgctg

SEQ ID NO: 302769 - DNA, 25 bp, Artificial
  Probe
tgtgtccttgtgtttctctgcccgg

SEQ ID NO: 302770 - DNA, 25 bp, Artificial
  Probe
cagggtgttgctgctttcttgtctc

SEQ ID NO: 302771 - DNA, 25 bp, Artificial
  Probe
tccttgtgtttctctgcccggtggt

SEQ ID NO: 302772 - DNA, 25 bp, Artificial
  Probe
cctctttcaagatggtaccgaggaa

SEQ ID NO: 302773 - DNA, 25 bp, Artificial
  Probe
tcacagtcagggtgttgctgctttc

SEQ ID NO: 302774 - DNA, 25 bp, Artificial
  Probe
cacaccctcttcttgtgtccttgtg

SEQ ID NO: 302775 - DNA, 25 bp, Artificial
  Probe
ttcctctttcaagatggtaccgagg

SEQ ID NO: 302776 - DNA, 25 bp, Artificial
  Probe
cacacacacggcatagtgatgtttg

SEQ ID NO: 302777 - DNA, 25 bp, Artificial
  Probe
ctgagggccattcctgtgtcttcca

SEQ ID NO: 302778 - DNA, 25 bp, Artificial
  Probe
tgttgctgctttcttgtctctgagg

SEQ ID NO: 302779 - DNA, 25 bp, Artificial
  Probe
acacacacacacacggcatagtgat

SEQ ID NO: 302780 - DNA, 25 bp, Artificial
  Probe
tgtccttgtgtttctctgcccggtg

SEQ ID NO: 302781 - DNA, 25 bp, Artificial
  Probe
ctttcttgtctctgagggccattcc

SEQ ID NO: 302782 - DNA, 25 bp, Artificial
  Probe
agagtcacagtcagggtgttgctgc

SEQ ID NO: 302783 - DNA, 25 bp, Artificial
  Probe
tctctgagggccattcctgtgtctt

SEQ ID NO: 302784 - DNA, 25 bp, Artificial
  Probe
ttctctgcccggtggttgaactgag

SEQ ID NO: 302785 - DNA, 25 bp, Artificial
  Probe
ctggggctacaggtctggtaaaaga

SEQ ID NO: 302786 - DNA, 25 bp, Artificial
  Probe
cagtcagggtgttgctgctttcttg

SEQ ID NO: 302787 - DNA, 25 bp, Artificial
  Probe
tctctgcccggtggttgaactgaga

SEQ ID NO: 302788 - DNA, 25 bp, Artificial
  Probe
acacggcatagtgatgtttgtttca

SEQ ID NO: 302789 - DNA, 25 bp, Artificial
  Probe
gcccggtggttgaactgagattcta

SEQ ID NO: 302790 - DNA, 25 bp, Artificial
  Probe
caatggataggttctggggctacag

SEQ ID NO: 302791 - DNA, 25 bp, Artificial
  Probe
ttcaatggataggttctggggctac

SEQ ID NO: 302792 - DNA, 25 bp, Artificial
  Probe
tccttcctctttcaagatggtaccg

SEQ ID NO: 302793 - DNA, 25 bp, Artificial
  Probe
ataagatacagagtcacagtcaggg

SEQ ID NO: 302794 - DNA, 25 bp, Artificial
  Probe
gggtgttgctgctttcttgtctctg

SEQ ID NO: 302795 - DNA, 25 bp, Artificial
  Probe
cttgtgtttctctgcccggtggttg

SEQ ID NO: 302796 - DNA, 25 bp, Artificial
  Probe
tgagggccattcctgtgtcttccaa

SEQ ID NO: 302797 - DNA, 25 bp, Artificial
  Probe
gtgtagtgctaacacaccctcttct

SEQ ID NO: 302798 - DNA, 25 bp, Artificial
  Probe
caccctcttcttgtgtccttgtgtt

SEQ ID NO: 302799 - DNA, 25 bp, Artificial
  Probe
gtagtgctaacacaccctcttcttg

SEQ ID NO: 302800 - DNA, 25 bp, Artificial
  Probe
ctctgagggccattcctgtgtcttc

SEQ ID NO: 302801 - DNA, 25 bp, Artificial
  Probe
cacagtcagggtgttgctgctttct

SEQ ID NO: 302802 - DNA, 25 bp, Artificial
  Probe
ctttcaagatggtaccgaggaatgg

SEQ ID NO: 302803 - DNA, 25 bp, Artificial
  Probe
atacagagtcacagtcagggtgttg

SEQ ID NO: 302804 - DNA, 25 bp, Artificial
  Probe
acaccctcttcttgtgtccttgtgt

SEQ ID NO: 302805 - DNA, 25 bp, Artificial
  Probe
acacacggcatagtgatgtttgttt

SEQ ID NO: 302806 - DNA, 25 bp, Artificial
  Probe
acacacacggcatagtgatgtttgt

SEQ ID NO: 302807 - DNA, 25 bp, Artificial
  Probe
ggtgttgctgctttcttgtctctga

SEQ ID NO: 302808 - DNA, 25 bp, Artificial
  Probe
gttctggggctacaggtctggtaaa

SEQ ID NO: 302809 - DNA, 25 bp, Artificial
  Probe
aagatacagagtcacagtcagggtg

SEQ ID NO: 302810 - DNA, 25 bp, Artificial
  Probe
tctgcccggtggttgaactgagatt

SEQ ID NO: 302811 - DNA, 25 bp, Artificial
  Probe
cacacggcatagtgatgtttgtttc

SEQ ID NO: 302812 - DNA, 25 bp, Artificial
  Probe
ccttcctctttcaagatggtaccga

SEQ ID NO: 302813 - DNA, 25 bp, Artificial
  Probe
cttgtgtccttgtgtttctctgccc

SEQ ID NO: 302814 - DNA, 25 bp, Artificial
  Probe
agctttctgttcactctgagatgat

SEQ ID NO: 302815 - DNA, 25 bp, Artificial
  Probe
gccttcccttcagctaaccactacc

SEQ ID NO: 302816 - DNA, 25 bp, Artificial
  Probe
tagttctaagatgtgaaggagcttt

SEQ ID NO: 302817 - DNA, 25 bp, Artificial
  Probe
tctgttcactctgagatgataaaga

SEQ ID NO: 302818 - DNA, 25 bp, Artificial
  Probe
tcctcattttagaaccctgccagga

SEQ ID NO: 302819 - DNA, 25 bp, Artificial
  Probe
gtgtctcctggataatgattcagga

SEQ ID NO: 302820 - DNA, 25 bp, Artificial
  Probe
ctcaaaactcagcaattagatgagt

SEQ ID NO: 302821 - DNA, 25 bp, Artificial
  Probe
atgtgaaggagctttctgttcactc

SEQ ID NO: 302822 - DNA, 25 bp, Artificial
  Probe
tctcaaaactcagcaattagatgag

SEQ ID NO: 302823 - DNA, 25 bp, Artificial
  Probe
tgtctcctggataatgattcaggaa

SEQ ID NO: 302824 - DNA, 25 bp, Artificial
  Probe
agaagccactttgctgataagacaa

SEQ ID NO: 302825 - DNA, 25 bp, Artificial
  Probe
agccactttgctgataagacaatag

SEQ ID NO: 302826 - DNA, 25 bp, Artificial
  Probe
cagaagggctcctgccttcccttca

SEQ ID NO: 302827 - DNA, 25 bp, Artificial
  Probe
gagaagccactttgctgataagaca

SEQ ID NO: 302828 - DNA, 25 bp, Artificial
  Probe
aggagaagccactttgctgataaga

SEQ ID NO: 302829 - DNA, 25 bp, Artificial
  Probe
gcatttcttaataaactacttttct

SEQ ID NO: 302830 - DNA, 25 bp, Artificial
  Probe
tcaaaactcagcaattagatgagta

SEQ ID NO: 302831 - DNA, 25 bp, Artificial
  Probe
tctgagtaccattcctattcaccat

SEQ ID NO: 302832 - DNA, 25 bp, Artificial
  Probe
cctcattttagaaccctgccaggaa

SEQ ID NO: 302833 - DNA, 25 bp, Artificial
  Probe
aactcagcaattagatgagtaggag

SEQ ID NO: 302834 - DNA, 25 bp, Artificial
  Probe
ggagaagccactttgctgataagac

SEQ ID NO: 302835 - DNA, 25 bp, Artificial
  Probe
cactttgctgataagacaatagctt

SEQ ID NO: 302836 - DNA, 25 bp, Artificial
  Probe
tgaaggagctttctgttcactctga

SEQ ID NO: 302837 - DNA, 25 bp, Artificial
  Probe
aaatgggccatgatgtttgggagct

SEQ ID NO: 302838 - DNA, 25 bp, Artificial
  Probe
gccactttgctgataagacaatagc

SEQ ID NO: 302839 - DNA, 25 bp, Artificial
  Probe
ctcctggataatgattcaggaacag

SEQ ID NO: 302840 - DNA, 25 bp, Artificial
  Probe
aagccactttgctgataagacaata

SEQ ID NO: 302841 - DNA, 25 bp, Artificial
  Probe
aatattagttctaagatgtgaagga

SEQ ID NO: 302842 - DNA, 25 bp, Artificial
  Probe
ctttctgttcactctgagatgataa

SEQ ID NO: 302843 - DNA, 25 bp, Artificial
  Probe
gaagccactttgctgataagacaat

SEQ ID NO: 302844 - DNA, 25 bp, Artificial
  Probe
tttctgttcactctgagatgataaa

SEQ ID NO: 302845 - DNA, 25 bp, Artificial
  Probe
gaaggagctttctgttcactctgag

SEQ ID NO: 302846 - DNA, 25 bp, Artificial
  Probe
gtctcctggataatgattcaggaac

SEQ ID NO: 302847 - DNA, 25 bp, Artificial
  Probe
atcctcattttagaaccctgccagg

SEQ ID NO: 302848 - DNA, 25 bp, Artificial
  Probe
ccactttgctgataagacaatagct

SEQ ID NO: 302849 - DNA, 25 bp, Artificial
  Probe
taggagaagccactttgctgataag

SEQ ID NO: 302850 - DNA, 25 bp, Artificial
  Probe
ctgttcactctgagatgataaagag

SEQ ID NO: 302851 - DNA, 25 bp, Artificial
  Probe
ttctgttcactctgagatgataaag

SEQ ID NO: 302852 - DNA, 25 bp, Artificial
  Probe
gctttctgttcactctgagatgata

SEQ ID NO: 302853 - DNA, 25 bp, Artificial
  Probe
caaaactcagcaattagatgagtag

SEQ ID NO: 302854 - DNA, 25 bp, Artificial
  Probe
tgtgtctcctggataatgattcagg

SEQ ID NO: 302855 - DNA, 25 bp, Artificial
  Probe
tcactctgagatgataaagagaaag

SEQ ID NO: 302856 - DNA, 25 bp, Artificial
  Probe
tatcctattataaatattagttcta

SEQ ID NO: 302857 - DNA, 25 bp, Artificial
  Probe
ctgtgtctcctggataatgattcag

SEQ ID NO: 302858 - DNA, 25 bp, Artificial
  Probe
tctcctggataatgattcaggaaca

SEQ ID NO: 302859 - DNA, 25 bp, Artificial
  Probe
cattttagaaccctgccaggaacaa

SEQ ID NO: 302860 - DNA, 25 bp, Artificial
  Probe
actgacccttgaagaagaggattct

SEQ ID NO: 302861 - DNA, 25 bp, Artificial
  Probe
gagaaggccccaactatttcagcag

SEQ ID NO: 302862 - DNA, 25 bp, Artificial
  Probe
gaactgacccttgaagaagaggatt

SEQ ID NO: 302863 - DNA, 25 bp, Artificial
  Probe
tgacccttgaagaagaggattctga

SEQ ID NO: 302864 - DNA, 25 bp, Artificial
  Probe
agaaggccccaactatttcagcagc

SEQ ID NO: 302865 - DNA, 25 bp, Artificial
  Probe
tctgaaggaccggaaaaggagggag

SEQ ID NO: 302866 - DNA, 25 bp, Artificial
  Probe
gattctgaaggaccggaaaaggagg

SEQ ID NO: 302867 - DNA, 25 bp, Artificial
  Probe
gtttcagttcgaactgacccttgaa

SEQ ID NO: 302868 - DNA, 25 bp, Artificial
  Probe
gaaggccccaactatttcagcagca

SEQ ID NO: 302869 - DNA, 25 bp, Artificial
  Probe
ggattctgaaggaccggaaaaggag

SEQ ID NO: 302870 - DNA, 25 bp, Artificial
  Probe
agggagaaggccccaactatttcag

SEQ ID NO: 302871 - DNA, 25 bp, Artificial
  Probe
ggccccaactatttcagcagcacaa

SEQ ID NO: 302872 - DNA, 25 bp, Artificial
  Probe
ctgacccttgaagaagaggattctg

SEQ ID NO: 302873 - DNA, 25 bp, Artificial
  Probe
aagtttcagttcgaactgacccttg

SEQ ID NO: 302874 - DNA, 25 bp, Artificial
  Probe
ccaactatttcagcagcacaaagac

SEQ ID NO: 302875 - DNA, 25 bp, Artificial
  Probe
ggagaaggccccaactatttcagca

SEQ ID NO: 302876 - DNA, 25 bp, Artificial
  Probe
agaagtttcagttcgaactgaccct

SEQ ID NO: 302877 - DNA, 25 bp, Artificial
  Probe
gaagtttcagttcgaactgaccctt

SEQ ID NO: 302878 - DNA, 25 bp, Artificial
  Probe
cgaactgacccttgaagaagaggat

SEQ ID NO: 302879 - DNA, 25 bp, Artificial
  Probe
agaggattctgaaggaccggaaaag

SEQ ID NO: 302880 - DNA, 25 bp, Artificial
  Probe
caactatttcagcagcacaaagaca

SEQ ID NO: 302881 - DNA, 25 bp, Artificial
  Probe
aaggccccaactatttcagcagcac

SEQ ID NO: 302882 - DNA, 25 bp, Artificial
  Probe
agtttcagttcgaactgacccttga

SEQ ID NO: 302883 - DNA, 25 bp, Artificial
  Probe
gccccaactatttcagcagcacaaa

SEQ ID NO: 302884 - DNA, 25 bp, Artificial
  Probe
ccccaactatttcagcagcacaaag

SEQ ID NO: 302885 - DNA, 25 bp, Artificial
  Probe
tttcagttcgaactgacccttgaag

SEQ ID NO: 302886 - DNA, 25 bp, Artificial
  Probe
cccaactatttcagcagcacaaaga

SEQ ID NO: 302887 - DNA, 25 bp, Artificial
  Probe
aactgacccttgaagaagaggattc

SEQ ID NO: 302888 - DNA, 25 bp, Artificial
  Probe
aggccccaactatttcagcagcaca

SEQ ID NO: 302889 - DNA, 25 bp, Artificial
  Probe
gggagaaggccccaactatttcagc

SEQ ID NO: 302890 - DNA, 25 bp, Artificial
  Probe
attgtagctcacagccagttatagg

SEQ ID NO: 302891 - DNA, 25 bp, Artificial
  Probe
catgcattcacaagtgcttgtcctt

SEQ ID NO: 302892 - DNA, 25 bp, Artificial
  Probe
ttgtagctcacagccagttatagga

SEQ ID NO: 302893 - DNA, 25 bp, Artificial
  Probe
ttattgtagctcacagccagttata

SEQ ID NO: 302894 - DNA, 25 bp, Artificial
  Probe
ctcacagccagttataggaagaaag

SEQ ID NO: 302895 - DNA, 25 bp, Artificial
  Probe
gatcattttattgtagctcacagcc

SEQ ID NO: 302896 - DNA, 25 bp, Artificial
  Probe
cattttattgtagctcacagccagt

SEQ ID NO: 302897 - DNA, 25 bp, Artificial
  Probe
gtcacccatacatttcatgatcatt

SEQ ID NO: 302898 - DNA, 25 bp, Artificial
  Probe
acaagtgcttgtccttgtagtcacc

SEQ ID NO: 302899 - DNA, 25 bp, Artificial
  Probe
gcattcacaagtgcttgtccttgta

SEQ ID NO: 302900 - DNA, 25 bp, Artificial
  Probe
cttgtccttgtagtcacccatacat

SEQ ID NO: 302901 - DNA, 25 bp, Artificial
  Probe
agacattttcccatcatgctgcttg

SEQ ID NO: 302902 - DNA, 25 bp, Artificial
  Probe
gcttgtccttgtagtcacccataca

SEQ ID NO: 302903 - DNA, 25 bp, Artificial
  Probe
tgcttgtccttgtagtcacccatac

SEQ ID NO: 302904 - DNA, 25 bp, Artificial
  Probe
cacccatacatttcatgatcatttt

SEQ ID NO: 302905 - DNA, 25 bp, Artificial
  Probe
tattgtagctcacagccagttatag

SEQ ID NO: 302906 - DNA, 25 bp, Artificial
  Probe
ttttattgtagctcacagccagtta

SEQ ID NO: 302907 - DNA, 25 bp, Artificial
  Probe
gacattttcccatcatgctgcttga

SEQ ID NO: 302908 - DNA, 25 bp, Artificial
  Probe
tcacagccagttataggaagaaaga

SEQ ID NO: 302909 - DNA, 25 bp, Artificial
  Probe
aagtgcttgtccttgtagtcaccca

SEQ ID NO: 302910 - DNA, 25 bp, Artificial
  Probe
gtgcttgtccttgtagtcacccata

SEQ ID NO: 302911 - DNA, 25 bp, Artificial
  Probe
tcatgatcattttattgtagctcac

SEQ ID NO: 302912 - DNA, 25 bp, Artificial
  Probe
ttcacaagtgcttgtccttgtagtc

SEQ ID NO: 302913 - DNA, 25 bp, Artificial
  Probe
aagaaagacattttcccatcatgct

SEQ ID NO: 302914 - DNA, 25 bp, Artificial
  Probe
tcattttattgtagctcacagccag

SEQ ID NO: 302915 - DNA, 25 bp, Artificial
  Probe
tagctcacagccagttataggaaga

SEQ ID NO: 302916 - DNA, 25 bp, Artificial
  Probe
tgatcattttattgtagctcacagc

SEQ ID NO: 302917 - DNA, 25 bp, Artificial
  Probe
aagacattttcccatcatgctgctt

SEQ ID NO: 302918 - DNA, 25 bp, Artificial
  Probe
gtccttgtagtcacccatacatttc

SEQ ID NO: 302919 - DNA, 25 bp, Artificial
  Probe
atcattttattgtagctcacagcca

SEQ ID NO: 302920 - DNA, 25 bp, Artificial
  Probe
attttattgtagctcacagccagtt

SEQ ID NO: 302921 - DNA, 25 bp, Artificial
  Probe
ttcccatcatgctgcttgatttaat

SEQ ID NO: 302922 - DNA, 25 bp, Artificial
  Probe
tcacaagtgcttgtccttgtagtca

SEQ ID NO: 302923 - DNA, 25 bp, Artificial
  Probe
acattttcccatcatgctgcttgat

SEQ ID NO: 302924 - DNA, 25 bp, Artificial
  Probe
agtgcttgtccttgtagtcacccat

SEQ ID NO: 302925 - DNA, 25 bp, Artificial
  Probe
tgcattcacaagtgcttgtccttgt

SEQ ID NO: 302926 - DNA, 25 bp, Artificial
  Probe
agctcacagccagttataggaagaa

SEQ ID NO: 302927 - DNA, 25 bp, Artificial
  Probe
cacagccagttataggaagaaagac

SEQ ID NO: 302928 - DNA, 25 bp, Artificial
  Probe
cacaagtgcttgtccttgtagtcac

SEQ ID NO: 302929 - DNA, 25 bp, Artificial
  Probe
attcacaagtgcttgtccttgtagt

SEQ ID NO: 302930 - DNA, 25 bp, Artificial
  Probe
atttcatgatcattttattgtagct

SEQ ID NO: 302931 - DNA, 25 bp, Artificial
  Probe
gtagctcacagccagttataggaag

SEQ ID NO: 302932 - DNA, 25 bp, Artificial
  Probe
atgcattcacaagtgcttgtccttg

SEQ ID NO: 302933 - DNA, 25 bp, Artificial
  Probe
caagtgcttgtccttgtagtcaccc

SEQ ID NO: 302934 - DNA, 25 bp, Artificial
  Probe
tttattgtagctcacagccagttat

SEQ ID NO: 302935 - DNA, 25 bp, Artificial
  Probe
gctcacagccagttataggaagaaa

SEQ ID NO: 302936 - DNA, 25 bp, Artificial
  Probe
gtctgcggagatattccatttgagc

SEQ ID NO: 302937 - DNA, 25 bp, Artificial
  Probe
cctcacagactcagtggcgtccagt

SEQ ID NO: 302938 - DNA, 25 bp, Artificial
  Probe
aagagatcgtcaagggccaagtgta

SEQ ID NO: 302939 - DNA, 25 bp, Artificial
  Probe
tccgtggatgcaggatgttctcctg

SEQ ID NO: 302940 - DNA, 25 bp, Artificial
  Probe
agactgtgggtcaccaagatgggcc

SEQ ID NO: 302941 - DNA, 25 bp, Artificial
  Probe
aagagagagcttgtctgctggcctc

SEQ ID NO: 302942 - DNA, 25 bp, Artificial
  Probe
ccggccctcctttgaagaaatccag

SEQ ID NO: 302943 - DNA, 25 bp, Artificial
  Probe
agaagagactagttcactcgtcctg

SEQ ID NO: 302944 - DNA, 25 bp, Artificial
  Probe
accatccgtggatgcaggatgttct

SEQ ID NO: 302945 - DNA, 25 bp, Artificial
  Probe
atgtcaacatcttattagatggtgc

SEQ ID NO: 302946 - DNA, 25 bp, Artificial
  Probe
gctctacgatgcagggacagaaatg

SEQ ID NO: 302947 - DNA, 25 bp, Artificial
  Probe
cagaaccatccgtggatgcaggatg

SEQ ID NO: 302948 - DNA, 25 bp, Artificial
  Probe
tgagcacgacgaagagatcgtcaag

SEQ ID NO: 302949 - DNA, 25 bp, Artificial
  Probe
ctccctcaaggagaagagactagtt

SEQ ID NO: 302950 - DNA, 25 bp, Artificial
  Probe
tcgtcaagggccaagtgtactttag

SEQ ID NO: 302951 - DNA, 25 bp, Artificial
  Probe
gtgcctgtccctgagaccatcggac

SEQ ID NO: 302952 - DNA, 25 bp, Artificial
  Probe
ggtgcctgtccctgagaccatcgga

SEQ ID NO: 302953 - DNA, 25 bp, Artificial
  Probe
tcacagactcagtggcgtccagtgt

SEQ ID NO: 302954 - DNA, 25 bp, Artificial
  Probe
cacccagcaaatagcagccattctg

SEQ ID NO: 302955 - DNA, 25 bp, Artificial
  Probe
ccagcaaatagcagccattctgtca

SEQ ID NO: 302956 - DNA, 25 bp, Artificial
  Probe
ggagatattccatttgagcacgacg

SEQ ID NO: 302957 - DNA, 25 bp, Artificial
  Probe
tgaagaaatccagaaccatccgtgg

SEQ ID NO: 302958 - DNA, 25 bp, Artificial
  Probe
cttattagatggtgcctgtccctga

SEQ ID NO: 302959 - DNA, 25 bp, Artificial
  Probe
gattcatctgcacagcctgtcacca

SEQ ID NO: 302960 - DNA, 25 bp, Artificial
  Probe
gagcttgtctgctggcctccaacag

SEQ ID NO: 302961 - DNA, 25 bp, Artificial
  Probe
acaactcattccaggctccggggtc

SEQ ID NO: 302962 - DNA, 25 bp, Artificial
  Probe
ttagatggtgcctgtccctgagacc

SEQ ID NO: 302963 - DNA, 25 bp, Artificial
  Probe
ccctccagggaagagagagcttgtc

SEQ ID NO: 302964 - DNA, 25 bp, Artificial
  Probe
gaccctccagggaagagagagcttg

SEQ ID NO: 302965 - DNA, 25 bp, Artificial
  Probe
caacaggaccctgctctacgatgca

SEQ ID NO: 302966 - DNA, 25 bp, Artificial
  Probe
agccattctgtcagaccctccaggg

SEQ ID NO: 302967 - DNA, 25 bp, Artificial
  Probe
catggaactttagtcaccatggaga

SEQ ID NO: 302968 - DNA, 25 bp, Artificial
  Probe
cgccgagattcatctgcacagcctg

SEQ ID NO: 302969 - DNA, 25 bp, Artificial
  Probe
ttaggcaaagggtctcttcagaatg

SEQ ID NO: 302970 - DNA, 25 bp, Artificial
  Probe
cagaatgtcaacatcttattagatg

SEQ ID NO: 302971 - DNA, 25 bp, Artificial
  Probe
atagcagccattctgtcagaccctc

SEQ ID NO: 302972 - DNA, 25 bp, Artificial
  Probe
ccatggagactgtgggtcaccaaga

SEQ ID NO: 302973 - DNA, 25 bp, Artificial
  Probe
agactagttcactcgtcctggaccc

SEQ ID NO: 302974 - DNA, 25 bp, Artificial
  Probe
ccattctgtcagaccctccagggaa

SEQ ID NO: 302975 - DNA, 25 bp, Artificial
  Probe
cagaaatgacaactcattccaggct

SEQ ID NO: 302976 - DNA, 25 bp, Artificial
  Probe
gccctcctttgaagaaatccagaac

SEQ ID NO: 302977 - DNA, 25 bp, Artificial
  Probe
gggtcagagccctgtcatggaactt

SEQ ID NO: 302978 - DNA, 25 bp, Artificial
  Probe
caagtgtactttaggcaaagggtct

SEQ ID NO: 302979 - DNA, 25 bp, Artificial
  Probe
gacagaaatgacaactcattccagg

SEQ ID NO: 302980 - DNA, 25 bp, Artificial
  Probe
caaatagcagccattctgtcagacc

SEQ ID NO: 302981 - DNA, 25 bp, Artificial
  Probe
ggtctcttcagaatgtcaacatctt

SEQ ID NO: 302982 - DNA, 25 bp, Artificial
  Probe
taagcccgggggtctgatgcagtcc

SEQ ID NO: 302983 - DNA, 25 bp, Artificial
  Probe
catccaggactaagcccgggggtct

SEQ ID NO: 302984 - DNA, 25 bp, Artificial
  Probe
agctgtgtccgcacctcggccaagg

SEQ ID NO: 302985 - DNA, 25 bp, Artificial
  Probe
gcccaggagtggtccgatccccgga

SEQ ID NO: 302986 - DNA, 25 bp, Artificial
  Probe
gttaggaacaacactgcatccctct

SEQ ID NO: 302987 - DNA, 25 bp, Artificial
  Probe
tttgaggtaacagtgcctgaccttg

SEQ ID NO: 302988 - DNA, 25 bp, Artificial
  Probe
ccttgccctcgtacgcttcatggta

SEQ ID NO: 302989 - DNA, 25 bp, Artificial
  Probe
tgagtggagctgtgtccgcacctcg

SEQ ID NO: 302990 - DNA, 25 bp, Artificial
  Probe
ctttattggccagagtactatcccc

SEQ ID NO: 302991 - DNA, 25 bp, Artificial
  Probe
cgccatgtccacctcttgtctaaga

SEQ ID NO: 302992 - DNA, 25 bp, Artificial
  Probe
aacagtgcctgaccttgccctcgta

SEQ ID NO: 302993 - DNA, 25 bp, Artificial
  Probe
cgcacctcggccaaggctgacatta

SEQ ID NO: 302994 - DNA, 25 bp, Artificial
  Probe
actttttgtgaagatctccatccag

SEQ ID NO: 302995 - DNA, 25 bp, Artificial
  Probe
tgtgtccgcacctcggccaaggctg

SEQ ID NO: 302996 - DNA, 25 bp, Artificial
  Probe
ctcaagcaggggtaccgccatgtcc

SEQ ID NO: 302997 - DNA, 25 bp, Artificial
  Probe
tgatgcagtccgacctgagtgagtg

SEQ ID NO: 302998 - DNA, 25 bp, Artificial
  Probe
tcaagcaggggtaccgccatgtcca

SEQ ID NO: 302999 - DNA, 25 bp, Artificial
  Probe
cttcatggtagaggattatgattcc

SEQ ID NO: 303000 - DNA, 25 bp, Artificial
  Probe
ccggagcgctccaaaattccgttag

SEQ ID NO: 303001 - DNA, 25 bp, Artificial
  Probe
aaattccgttaggaacaacactgca

SEQ ID NO: 303002 - DNA, 25 bp, Artificial
  Probe
gcgctccaaaattccgttaggaaca

SEQ ID NO: 303003 - DNA, 25 bp, Artificial
  Probe
cctggaacagcctcaagcaggggta

SEQ ID NO: 303004 - DNA, 25 bp, Artificial
  Probe
gcagttattaccaataatggtttca

SEQ ID NO: 303005 - DNA, 25 bp, Artificial
  Probe
caataatggtttcaacccacggtgg

SEQ ID NO: 303006 - DNA, 25 bp, Artificial
  Probe
attgcaccgacctctggcgcggagc

SEQ ID NO: 303007 - DNA, 25 bp, Artificial
  Probe
ctcggccaaggctgacattattgca

SEQ ID NO: 303008 - DNA, 25 bp, Artificial
  Probe
gaggcccaggagtggtccgatcccc

SEQ ID NO: 303009 - DNA, 25 bp, Artificial
  Probe
gccagagtactatcccctggaacag

SEQ ID NO: 303010 - DNA, 25 bp, Artificial
  Probe
cccgggggtctgatgcagtccgacc

SEQ ID NO: 303011 - DNA, 25 bp, Artificial
  Probe
ctcttgtctaagaatggagaccagc

SEQ ID NO: 303012 - DNA, 25 bp, Artificial
  Probe
ggtaacagtgcctgaccttgccctc

SEQ ID NO: 303013 - DNA, 25 bp, Artificial
  Probe
cgtacgcttcatggtagaggattat

SEQ ID NO: 303014 - DNA, 25 bp, Artificial
  Probe
gggtctgatgcagtccgacctgagt

SEQ ID NO: 303015 - DNA, 25 bp, Artificial
  Probe
tgacattattgcaccgacctctggc

SEQ ID NO: 303016 - DNA, 25 bp, Artificial
  Probe
taccctctagctgtctttatggata

SEQ ID NO: 303017 - DNA, 25 bp, Artificial
  Probe
agtgagtggagctgtgtccgcacct

SEQ ID NO: 303018 - DNA, 25 bp, Artificial
  Probe
ctcgtacgcttcatggtagaggatt

SEQ ID NO: 303019 - DNA, 25 bp, Artificial
  Probe
gtttgaggtaacagtgcctgacctt

SEQ ID NO: 303020 - DNA, 25 bp, Artificial
  Probe
cagtccgacctgagtgagtggagct

SEQ ID NO: 303021 - DNA, 25 bp, Artificial
  Probe
ccaataatggtttcaacccacggtg

SEQ ID NO: 303022 - DNA, 25 bp, Artificial
  Probe
attattgcaccgacctctggcgcgg

SEQ ID NO: 303023 - DNA, 25 bp, Artificial
  Probe
gggtaccgccatgtccacctcttgt

SEQ ID NO: 303024 - DNA, 25 bp, Artificial
  Probe
gaccttgccctcgtacgcttcatgg

SEQ ID NO: 303025 - DNA, 25 bp, Artificial
  Probe
aggggtaccgccatgtccacctctt

SEQ ID NO: 303026 - DNA, 25 bp, Artificial
  Probe
agtactatcccctggaacagcctca

SEQ ID NO: 303027 - DNA, 25 bp, Artificial
  Probe
acagcctcaagcaggggtaccgcca

SEQ ID NO: 303028 - DNA, 25 bp, Artificial
  Probe
tccttgctggtctgtgtgtgatgag

SEQ ID NO: 303029 - DNA, 25 bp, Artificial
  Probe
gtgatcctgcggaaacgcgaatgag

SEQ ID NO: 303030 - DNA, 25 bp, Artificial
  Probe
agtgcagcggccatctacacagtga

SEQ ID NO: 303031 - DNA, 25 bp, Artificial
  Probe
aaccaagctcagtattttcgttttg

SEQ ID NO: 303032 - DNA, 25 bp, Artificial
  Probe
atctacacagtgagacacagtgagt

SEQ ID NO: 303033 - DNA, 25 bp, Artificial
  Probe
aatccttgctggtctgtgtgtgatg

SEQ ID NO: 303034 - DNA, 25 bp, Artificial
  Probe
ttatgttgaccgtcagcctcgtgtt

SEQ ID NO: 303035 - DNA, 25 bp, Artificial
  Probe
atcactggagtcttccaaatccttg

SEQ ID NO: 303036 - DNA, 25 bp, Artificial
  Probe
tcaacctcataggataaccaaagtg

SEQ ID NO: 303037 - DNA, 25 bp, Artificial
  Probe
agacacagtgagtggcatgtcaaca

SEQ ID NO: 303038 - DNA, 25 bp, Artificial
  Probe
tacacagtgagacacagtgagtggc

SEQ ID NO: 303039 - DNA, 25 bp, Artificial
  Probe
tctacgtgatcctgcggaaacgcga

SEQ ID NO: 303040 - DNA, 25 bp, Artificial
  Probe
tgagtggcatgtcaacaacgactac

SEQ ID NO: 303041 - DNA, 25 bp, Artificial
  Probe
atctacgtgatcctgcggaaacgcg

SEQ ID NO: 303042 - DNA, 25 bp, Artificial
  Probe
ggagtcttccaaatccttgctggtc

SEQ ID NO: 303043 - DNA, 25 bp, Artificial
  Probe
gccatctacacagtgagacacagtg

SEQ ID NO: 303044 - DNA, 25 bp, Artificial
  Probe
ccttgctggtctgtgtgtgatgagt

SEQ ID NO: 303045 - DNA, 25 bp, Artificial
  Probe
gcggccatctacacagtgagacaca

SEQ ID NO: 303046 - DNA, 25 bp, Artificial
  Probe
ctttttatgttgaccgtcagcctcg

SEQ ID NO: 303047 - DNA, 25 bp, Artificial
  Probe
gctggccctccttagtggcatcatc

SEQ ID NO: 303048 - DNA, 25 bp, Artificial
  Probe
gtcaacaacgactactcctatggct

SEQ ID NO: 303049 - DNA, 25 bp, Artificial
  Probe
acctcataggataaccaaagtgcgg

SEQ ID NO: 303050 - DNA, 25 bp, Artificial
  Probe
atgtcaacaacgactactcctatgg

SEQ ID NO: 303051 - DNA, 25 bp, Artificial
  Probe
gaaacgcgaatgaggcgcccgacgc

SEQ ID NO: 303052 - DNA, 25 bp, Artificial
  Probe
tgtgatgagtgcagcggccatctac

SEQ ID NO: 303053 - DNA, 25 bp, Artificial
  Probe
ccttagtggcatcatctacgtgatc

SEQ ID NO: 303054 - DNA, 25 bp, Artificial
  Probe
acagtgagacacagtgagtggcatg

SEQ ID NO: 303055 - DNA, 25 bp, Artificial
  Probe
cactggagtcttccaaatccttgct

SEQ ID NO: 303056 - DNA, 25 bp, Artificial
  Probe
accaaacagaacacagttgagtggg

SEQ ID NO: 303057 - DNA, 25 bp, Artificial
  Probe
tgtgtgatgagtgcagcggccatct

SEQ ID NO: 303058 - DNA, 25 bp, Artificial
  Probe
agccaaaccaaacagaacacagttg

SEQ ID NO: 303059 - DNA, 25 bp, Artificial
  Probe
acacagtgagacacagtgagtggca

SEQ ID NO: 303060 - DNA, 25 bp, Artificial
  Probe
catctacacagtgagacacagtgag

SEQ ID NO: 303061 - DNA, 25 bp, Artificial
  Probe
gctttttatgttgaccgtcagcctc

SEQ ID NO: 303062 - DNA, 25 bp, Artificial
  Probe
aggctctgagcgtgcatagggtaca

SEQ ID NO: 303063 - DNA, 25 bp, Artificial
  Probe
agtggcatgtcaacaacgactactc

SEQ ID NO: 303064 - DNA, 25 bp, Artificial
  Probe
tgagacacagtgagtggcatgtcaa

SEQ ID NO: 303065 - DNA, 25 bp, Artificial
  Probe
gcttttacatcactggagtcttcca

SEQ ID NO: 303066 - DNA, 25 bp, Artificial
  Probe
tagtggcatcatctacgtgatcctg

SEQ ID NO: 303067 - DNA, 25 bp, Artificial
  Probe
tctgagcgtgcatagggtacacagg

SEQ ID NO: 303068 - DNA, 25 bp, Artificial
  Probe
agtgagacacagtgagtggcatgtc

SEQ ID NO: 303069 - DNA, 25 bp, Artificial
  Probe
ctccttagtggcatcatctacgtga

SEQ ID NO: 303070 - DNA, 25 bp, Artificial
  Probe
ggcatgtcaacaacgactactccta

SEQ ID NO: 303071 - DNA, 25 bp, Artificial
  Probe
ttagtggcatcatctacgtgatcct

SEQ ID NO: 303072 - DNA, 25 bp, Artificial
  Probe
ttccaaatccttgctggtctgtgtg

SEQ ID NO: 303073 - DNA, 25 bp, Artificial
  Probe
aaaggcggccgcttttacatcactg

SEQ ID NO: 303074 - DNA, 25 bp, Artificial
  Probe
gtaaatcagactccagcaatttttg

SEQ ID NO: 303075 - DNA, 25 bp, Artificial
  Probe
gatgattcagcgtgtcaatggctct

SEQ ID NO: 303076 - DNA, 25 bp, Artificial
  Probe
cgtcatgggcaacgaagagctctgt

SEQ ID NO: 303077 - DNA, 25 bp, Artificial
  Probe
acatacttatttcattaactgtggg

SEQ ID NO: 303078 - DNA, 25 bp, Artificial
  Probe
gctgtatcaagagctcttggggatt

SEQ ID NO: 303079 - DNA, 25 bp, Artificial
  Probe
tctgctttccaaacgcgcctaaagt

SEQ ID NO: 303080 - DNA, 25 bp, Artificial
  Probe
cttgtctcgccagagcctgaagtcc

SEQ ID NO: 303081 - DNA, 25 bp, Artificial
  Probe
gattttaaaggctctgcaggagcac

SEQ ID NO: 303082 - DNA, 25 bp, Artificial
  Probe
ccatggaaaaggtcccacagagcag

SEQ ID NO: 303083 - DNA, 25 bp, Artificial
  Probe
ctgaagtccatgatattgaaaggtc

SEQ ID NO: 303084 - DNA, 25 bp, Artificial
  Probe
gcaccctctgtggaaaacgtaaaga

SEQ ID NO: 303085 - DNA, 25 bp, Artificial
  Probe
tccatggaaaaggtcccacagagca

SEQ ID NO: 303086 - DNA, 25 bp, Artificial
  Probe
gaccataaaccaagtaatcctctgg

SEQ ID NO: 303087 - DNA, 25 bp, Artificial
  Probe
ctgatgaccttgagaaagtttgcaa

SEQ ID NO: 303088 - DNA, 25 bp, Artificial
  Probe
tccaaacgcgcctaaagtctcagca

SEQ ID NO: 303089 - DNA, 25 bp, Artificial
  Probe
actgtggggactcaagaggtttact

SEQ ID NO: 303090 - DNA, 25 bp, Artificial
  Probe
tctgtgatgattcagcgtgtcaatg

SEQ ID NO: 303091 - DNA, 25 bp, Artificial
  Probe
atacggctgtgatcggtttgccaag

SEQ ID NO: 303092 - DNA, 25 bp, Artificial
  Probe
acacggtgcagatagaagtgggtca

SEQ ID NO: 303093 - DNA, 25 bp, Artificial
  Probe
gacgtcatgggcaacgaagagctct

SEQ ID NO: 303094 - DNA, 25 bp, Artificial
  Probe
ctgtggggactcaagaggtttactt

SEQ ID NO: 303095 - DNA, 25 bp, Artificial
  Probe
agtagtcgacacctgtttgtataag

SEQ ID NO: 303096 - DNA, 25 bp, Artificial
  Probe
tttcattaactgtggggactcaaga

SEQ ID NO: 303097 - DNA, 25 bp, Artificial
  Probe
tggcatctgggacgtcatgggcaac

SEQ ID NO: 303098 - DNA, 25 bp, Artificial
  Probe
acgaagagctctgtgactttgtgag

SEQ ID NO: 303099 - DNA, 25 bp, Artificial
  Probe
gggtgtcttaatttctccccaacat

SEQ ID NO: 303100 - DNA, 25 bp, Artificial
  Probe
caataaccaggattttaaaggctct

SEQ ID NO: 303101 - DNA, 25 bp, Artificial
  Probe
gggctctgtgatgattcagcgtgtc

SEQ ID NO: 303102 - DNA, 25 bp, Artificial
  Probe
tatatgatgggcatgctggttctca

SEQ ID NO: 303103 - DNA, 25 bp, Artificial
  Probe
tctgggacgtcatgggcaacgaaga

SEQ ID NO: 303104 - DNA, 25 bp, Artificial
  Probe
tcttgcatgtgatggcatctgggac

SEQ ID NO: 303105 - DNA, 25 bp, Artificial
  Probe
tgagcacttgttagatcacatcacc

SEQ ID NO: 303106 - DNA, 25 bp, Artificial
  Probe
tgtgattttgatctgctttccaaac

SEQ ID NO: 303107 - DNA, 25 bp, Artificial
  Probe
tacaaatgtgtccatggaaaaggtc

SEQ ID NO: 303108 - DNA, 25 bp, Artificial
  Probe
atgtgtccatggaaaaggtcccaca

SEQ ID NO: 303109 - DNA, 25 bp, Artificial
  Probe
aacacggtgcagatagaagtgggtc

SEQ ID NO: 303110 - DNA, 25 bp, Artificial
  Probe
gctgtgatcggtttgccaagtggac

SEQ ID NO: 303111 - DNA, 25 bp, Artificial
  Probe
aagatgaccagttcatcattcttgc

SEQ ID NO: 303112 - DNA, 25 bp, Artificial
  Probe
gtgtaattgtccttgtacaaagtgc

SEQ ID NO: 303113 - DNA, 25 bp, Artificial
  Probe
tcaccaataaccaggattttaaagg

SEQ ID NO: 303114 - DNA, 25 bp, Artificial
  Probe
caagtggacttgagacatggtcatt

SEQ ID NO: 303115 - DNA, 25 bp, Artificial
  Probe
acttgagacatggtcattctttgct

SEQ ID NO: 303116 - DNA, 25 bp, Artificial
  Probe
catggtcattctttgctgtatatga

SEQ ID NO: 303117 - DNA, 25 bp, Artificial
  Probe
aatgaagtagtcgacacctgtttgt

SEQ ID NO: 303118 - DNA, 25 bp, Artificial
  Probe
tggctctctggctgtatcaagagct

SEQ ID NO: 303119 - DNA, 25 bp, Artificial
  Probe
cgcgcctaaagtctcagcagaggcg

SEQ ID NO: 303120 - DNA, 25 bp, Artificial
  Probe
atttcttgtcaagtcatgtgatctt

SEQ ID NO: 303121 - DNA, 25 bp, Artificial
  Probe
aaaccgaagacagttcttctgcggg

SEQ ID NO: 303122 - DNA, 25 bp, Artificial
  Probe
cttaaaaccgaagacagttcttctg

SEQ ID NO: 303123 - DNA, 25 bp, Artificial
  Probe
accttagcttgtgttccgtgactgg

SEQ ID NO: 303124 - DNA, 25 bp, Artificial
  Probe
taagctgctaggaccttagcttgtg

SEQ ID NO: 303125 - DNA, 25 bp, Artificial
  Probe
accgaagacagttcttctgcgggga

SEQ ID NO: 303126 - DNA, 25 bp, Artificial
  Probe
ataagctgctaggaccttagcttgt

SEQ ID NO: 303127 - DNA, 25 bp, Artificial
  Probe
cttggggacttgtttgacagactgc

SEQ ID NO: 303128 - DNA, 25 bp, Artificial
  Probe
gctaggaccttagcttgtgttccgt

SEQ ID NO: 303129 - DNA, 25 bp, Artificial
  Probe
ttggggacttgtttgacagactgca

SEQ ID NO: 303130 - DNA, 25 bp, Artificial
  Probe
aacttggggacttgtttgacagact

SEQ ID NO: 303131 - DNA, 25 bp, Artificial
  Probe
gcttaaaaccgaagacagttcttct

SEQ ID NO: 303132 - DNA, 25 bp, Artificial
  Probe
catgttttcaggtagaacttaacaa

SEQ ID NO: 303133 - DNA, 25 bp, Artificial
  Probe
agctgacttgggattgtgtttcttc

SEQ ID NO: 303134 - DNA, 25 bp, Artificial
  Probe
cgaagacagttcttctgcggggact

SEQ ID NO: 303135 - DNA, 25 bp, Artificial
  Probe
cttagcttgtgttccgtgactggta

SEQ ID NO: 303136 - DNA, 25 bp, Artificial
  Probe
gctgctaggaccttagcttgtgttc

SEQ ID NO: 303137 - DNA, 25 bp, Artificial
  Probe
tgctcagcagtgatgagttttcctt

SEQ ID NO: 303138 - DNA, 25 bp, Artificial
  Probe
acttggggacttgtttgacagactg

SEQ ID NO: 303139 - DNA, 25 bp, Artificial
  Probe
aagacagttcttctgcggggactga

SEQ ID NO: 303140 - DNA, 25 bp, Artificial
  Probe
attgtgtttcttcgtcccagatccg

SEQ ID NO: 303141 - DNA, 25 bp, Artificial
  Probe
tgacgccgagtagaaaggaagctga

SEQ ID NO: 303142 - DNA, 25 bp, Artificial
  Probe
tctcagataagctgctaggacctta

SEQ ID NO: 303143 - DNA, 25 bp, Artificial
  Probe
tgtttgacagactgcagcttgtctt

SEQ ID NO: 303144 - DNA, 25 bp, Artificial
  Probe
catttcttgtcaagtcatgtgatct

SEQ ID NO: 303145 - DNA, 25 bp, Artificial
  Probe
tgggattgtgtttcttcgtcccaga

SEQ ID NO: 303146 - DNA, 25 bp, Artificial
  Probe
tcagataagctgctaggaccttagc

SEQ ID NO: 303147 - DNA, 25 bp, Artificial
  Probe
agtgacgccgagtagaaaggaagct

SEQ ID NO: 303148 - DNA, 25 bp, Artificial
  Probe
gggacttgtttgacagactgcagct

SEQ ID NO: 303149 - DNA, 25 bp, Artificial
  Probe
acttgtttgacagactgcagcttgt

SEQ ID NO: 303150 - DNA, 25 bp, Artificial
  Probe
tgacttgggattgtgtttcttcgtc

SEQ ID NO: 303151 - DNA, 25 bp, Artificial
  Probe
gaccttagcttgtgttccgtgactg

SEQ ID NO: 303152 - DNA, 25 bp, Artificial
  Probe
gtctcagataagctgctaggacctt

SEQ ID NO: 303153 - DNA, 25 bp, Artificial
  Probe
gcatgttttcaggtagaacttaaca

SEQ ID NO: 303154 - DNA, 25 bp, Artificial
  Probe
tcatggactctttaaaatgattgac

SEQ ID NO: 303155 - DNA, 25 bp, Artificial
  Probe
acttgtctcagataagctgctagga

SEQ ID NO: 303156 - DNA, 25 bp, Artificial
  Probe
ctgacttgggattgtgtttcttcgt

SEQ ID NO: 303157 - DNA, 25 bp, Artificial
  Probe
tgctaggaccttagcttgtgttccg

SEQ ID NO: 303158 - DNA, 25 bp, Artificial
  Probe
ggattgtgtttcttcgtcccagatc

SEQ ID NO: 303159 - DNA, 25 bp, Artificial
  Probe
tgtgtttcttcgtcccagatccgag

SEQ ID NO: 303160 - DNA, 25 bp, Artificial
  Probe
cagtgctcagcagtgatgagttttc

SEQ ID NO: 303161 - DNA, 25 bp, Artificial
  Probe
ccagtgctcagcagtgatgagtttt

SEQ ID NO: 303162 - DNA, 25 bp, Artificial
  Probe
gtgctcagcagtgatgagttttcct

SEQ ID NO: 303163 - DNA, 25 bp, Artificial
  Probe
ttaaaaccgaagacagttcttctgc

SEQ ID NO: 303164 - DNA, 25 bp, Artificial
  Probe
cttgggattgtgtttcttcgtccca

SEQ ID NO: 303165 - DNA, 25 bp, Artificial
  Probe
acatttcttgtcaagtcatgtgatc

SEQ ID NO: 303166 - DNA, 25 bp, Artificial
  Probe
tattctgtggagaccgtgactcttc

SEQ ID NO: 303167 - DNA, 25 bp, Artificial
  Probe
ctatccagagcgtatcacaatattg

SEQ ID NO: 303168 - DNA, 25 bp, Artificial
  Probe
gtgtgatctcttatggtcagatcca

SEQ ID NO: 303169 - DNA, 25 bp, Artificial
  Probe
aacggcctcacactggtgtcccgtg

SEQ ID NO: 303170 - DNA, 25 bp, Artificial
  Probe
actggtgtcccgtgctcaccagctt

SEQ ID NO: 303171 - DNA, 25 bp, Artificial
  Probe
tccagagcgtatcacaatattgcga

SEQ ID NO: 303172 - DNA, 25 bp, Artificial
  Probe
gatattattctgtggagaccgtgac

SEQ ID NO: 303173 - DNA, 25 bp, Artificial
  Probe
ctgtggagaccgtgactcttcttgt

SEQ ID NO: 303174 - DNA, 25 bp, Artificial
  Probe
acctcgtcgtggagagcctcatgtg

SEQ ID NO: 303175 - DNA, 25 bp, Artificial
  Probe
atctcttatggtcagatccagatga

SEQ ID NO: 303176 - DNA, 25 bp, Artificial
  Probe
ggtgcgctatccagagcgtatcaca

SEQ ID NO: 303177 - DNA, 25 bp, Artificial
  Probe
atggacagatattctgcctccacgg

SEQ ID NO: 303178 - DNA, 25 bp, Artificial
  Probe
atattctgcctccacggtggcctct

SEQ ID NO: 303179 - DNA, 25 bp, Artificial
  Probe
tagtgcacccaattactgctaccgc

SEQ ID NO: 303180 - DNA, 25 bp, Artificial
  Probe
ttaaaggtgcgctatccagagcgta

SEQ ID NO: 303181 - DNA, 25 bp, Artificial
  Probe
ttcttgtagcattaaaggtgcgcta

SEQ ID NO: 303182 - DNA, 25 bp, Artificial
  Probe
cctggatcgcttacaggaagttcca

SEQ ID NO: 303183 - DNA, 25 bp, Artificial
  Probe
ggacagatattctgcctccacggtg

SEQ ID NO: 303184 - DNA, 25 bp, Artificial
  Probe
tgatctcttatggtcagatccagat

SEQ ID NO: 303185 - DNA, 25 bp, Artificial
  Probe
gctggggcatttctccacgtggtgc

SEQ ID NO: 303186 - DNA, 25 bp, Artificial
  Probe
gctacacatttggacaagacatttc

SEQ ID NO: 303187 - DNA, 25 bp, Artificial
  Probe
tgaaagccggcagatcacacaagta

SEQ ID NO: 303188 - DNA, 25 bp, Artificial
  Probe
tcgtggagagcctcatgtgacccgg

SEQ ID NO: 303189 - DNA, 25 bp, Artificial
  Probe
tgagggcccaatgtgtgatctctta

SEQ ID NO: 303190 - DNA, 25 bp, Artificial
  Probe
tagcattaaaggtgcgctatccaga

SEQ ID NO: 303191 - DNA, 25 bp, Artificial
  Probe
acttacagctttagtagatggacag

SEQ ID NO: 303192 - DNA, 25 bp, Artificial
  Probe
tgcgctatccagagcgtatcacaat

SEQ ID NO: 303193 - DNA, 25 bp, Artificial
  Probe
cccaatgtgtgatctcttatggtca

SEQ ID NO: 303194 - DNA, 25 bp, Artificial
  Probe
ggtcaccatttttagtgcacccaat

SEQ ID NO: 303195 - DNA, 25 bp, Artificial
  Probe
tccacgtggtgctggctacacattt

SEQ ID NO: 303196 - DNA, 25 bp, Artificial
  Probe
cttccacttacagctttagtagatg

SEQ ID NO: 303197 - DNA, 25 bp, Artificial
  Probe
cacatttggacaagacatttctgaa

SEQ ID NO: 303198 - DNA, 25 bp, Artificial
  Probe
aagagccctggatcgcttacaggaa

SEQ ID NO: 303199 - DNA, 25 bp, Artificial
  Probe
tatgggaacgccaacgtgtggaaat

SEQ ID NO: 303200 - DNA, 25 bp, Artificial
  Probe
ttagtgcacccaattactgctaccg

SEQ ID NO: 303201 - DNA, 25 bp, Artificial
  Probe
cagacaccaactatctattcatggg

SEQ ID NO: 303202 - DNA, 25 bp, Artificial
  Probe
gaatgtggtcaccatttttagtgca

SEQ ID NO: 303203 - DNA, 25 bp, Artificial
  Probe
gaacgccaacgtgtggaaatacttt

SEQ ID NO: 303204 - DNA, 25 bp, Artificial
  Probe
tgcctacgaaagtatgggaacgcca

SEQ ID NO: 303205 - DNA, 25 bp, Artificial
  Probe
cgtggtgctggctacacatttggac

SEQ ID NO: 303206 - DNA, 25 bp, Artificial
  Probe
gatattctgcctccacggtggcctc

SEQ ID NO: 303207 - DNA, 25 bp, Artificial
  Probe
acataagagccctggatcgcttaca

SEQ ID NO: 303208 - DNA, 25 bp, Artificial
  Probe
tacactggatcacataagagccctg

SEQ ID NO: 303209 - DNA, 25 bp, Artificial
  Probe
tgaatgcctacgaaagtatgggaac

SEQ ID NO: 303210 - DNA, 25 bp, Artificial
  Probe
tgacccagcacctcgtcgtggagag

SEQ ID NO: 303211 - DNA, 25 bp, Artificial
  Probe
gtttgacccagcacctcgtcgtgga

SEQ ID NO: 303212 - DNA, 25 bp, Artificial
  Probe
cagcggagccatctgctgttttgtt

SEQ ID NO: 303213 - DNA, 25 bp, Artificial
  Probe
ttgcttcccttatgccctggactac

SEQ ID NO: 303214 - DNA, 25 bp, Artificial
  Probe
tttggtggcttgcttcccttatgcc

SEQ ID NO: 303215 - DNA, 25 bp, Artificial
  Probe
ctgtagtttggtgatccctttactt

SEQ ID NO: 303216 - DNA, 25 bp, Artificial
  Probe
tactttggtggcttgcttcccttat

SEQ ID NO: 303217 - DNA, 25 bp, Artificial
  Probe
cagctcatagcatcaggcagcggag

SEQ ID NO: 303218 - DNA, 25 bp, Artificial
  Probe
tgcatgtgcaggactattcaagtat

SEQ ID NO: 303219 - DNA, 25 bp, Artificial
  Probe
cctggactacagctcatagcatcag

SEQ ID NO: 303220 - DNA, 25 bp, Artificial
  Probe
agactgcatgtcgaaattttacttt

SEQ ID NO: 303221 - DNA, 25 bp, Artificial
  Probe
tggtggcttgcttcccttatgccct

SEQ ID NO: 303222 - DNA, 25 bp, Artificial
  Probe
tttggtgatccctttactttggtgg

SEQ ID NO: 303223 - DNA, 25 bp, Artificial
  Probe
ggcttgcttcccttatgccctggac

SEQ ID NO: 303224 - DNA, 25 bp, Artificial
  Probe
gactgcatgtcgaaattttactttt

SEQ ID NO: 303225 - DNA, 25 bp, Artificial
  Probe
gtttgccaggaagtgcaccttgtat

SEQ ID NO: 303226 - DNA, 25 bp, Artificial
  Probe
tccctttactttggtggcttgcttc

SEQ ID NO: 303227 - DNA, 25 bp, Artificial
  Probe
ggtgatccctttactttggtggctt

SEQ ID NO: 303228 - DNA, 25 bp, Artificial
  Probe
tgtgagtactccagttgcttaaaaa

SEQ ID NO: 303229 - DNA, 25 bp, Artificial
  Probe
ccttcagatgttagtggaagcataa

SEQ ID NO: 303230 - DNA, 25 bp, Artificial
  Probe
aagtgcaccttgtatggtcttctgt

SEQ ID NO: 303231 - DNA, 25 bp, Artificial
  Probe
ccactgtagtttggtgatcccttta

SEQ ID NO: 303232 - DNA, 25 bp, Artificial
  Probe
ttgccaggaagtgcaccttgtatgg

SEQ ID NO: 303233 - DNA, 25 bp, Artificial
  Probe
ttatgcatgtgcaggactattcaag

SEQ ID NO: 303234 - DNA, 25 bp, Artificial
  Probe
gtagtttggtgatccctttactttg

SEQ ID NO: 303235 - DNA, 25 bp, Artificial
  Probe
gaagtgcaccttgtatggtcttctg

SEQ ID NO: 303236 - DNA, 25 bp, Artificial
  Probe
ccttatgccctggactacagctcat

SEQ ID NO: 303237 - DNA, 25 bp, Artificial
  Probe
catgtgcaggactattcaagtattt

SEQ ID NO: 303238 - DNA, 25 bp, Artificial
  Probe
gcagcggagccatctgctgttttgt

SEQ ID NO: 303239 - DNA, 25 bp, Artificial
  Probe
tcttgtgagtactccagttgcttaa

SEQ ID NO: 303240 - DNA, 25 bp, Artificial
  Probe
ggcagcggagccatctgctgttttg

SEQ ID NO: 303241 - DNA, 25 bp, Artificial
  Probe
ttatgccctggactacagctcatag

SEQ ID NO: 303242 - DNA, 25 bp, Artificial
  Probe
atagcatcaggcagcggagccatct

SEQ ID NO: 303243 - DNA, 25 bp, Artificial
  Probe
tcaagactgcatgtcgaaattttac

SEQ ID NO: 303244 - DNA, 25 bp, Artificial
  Probe
ctcttcagcccttcagatgttagtg

SEQ ID NO: 303245 - DNA, 25 bp, Artificial
  Probe
gatccctttactttggtggcttgct

SEQ ID NO: 303246 - DNA, 25 bp, Artificial
  Probe
atattatgcatgtgcaggactattc

SEQ ID NO: 303247 - DNA, 25 bp, Artificial
  Probe
tttgtttgccaggaagtgcaccttg

SEQ ID NO: 303248 - DNA, 25 bp, Artificial
  Probe
atcaggcagcggagccatctgctgt

SEQ ID NO: 303249 - DNA, 25 bp, Artificial
  Probe
atgccctggactacagctcatagca

SEQ ID NO: 303250 - DNA, 25 bp, Artificial
  Probe
aaagtcaagactgcatgtcgaaatt

SEQ ID NO: 303251 - DNA, 25 bp, Artificial
  Probe
gccctggactacagctcatagcatc

SEQ ID NO: 303252 - DNA, 25 bp, Artificial
  Probe
ttacttttgatagttacagaactgc

SEQ ID NO: 303253 - DNA, 25 bp, Artificial
  Probe
agcacacaataaattccatgcatgg

SEQ ID NO: 303254 - DNA, 25 bp, Artificial
  Probe
caggaagtgcaccttgtatggtctt

SEQ ID NO: 303255 - DNA, 25 bp, Artificial
  Probe
tcagcccttcagatgttagtggaag

SEQ ID NO: 303256 - DNA, 25 bp, Artificial
  Probe
ttcagcccttcagatgttagtggaa

SEQ ID NO: 303257 - DNA, 25 bp, Artificial
  Probe
gagtactccagttgcttaaaaacca

SEQ ID NO: 303258 - DNA, 25 bp, Artificial
  Probe
cacacaactttagaatagaatgtag

SEQ ID NO: 303259 - DNA, 25 bp, Artificial
  Probe
ctccttgttggcaacacagaaagtt

SEQ ID NO: 303260 - DNA, 25 bp, Artificial
  Probe
cagtccttgatgtgggtttcctggc

SEQ ID NO: 303261 - DNA, 25 bp, Artificial
  Probe
tgttcctgaagaagacagtccttga

SEQ ID NO: 303262 - DNA, 25 bp, Artificial
  Probe
attttaggatgctgaatcctttgct

SEQ ID NO: 303263 - DNA, 25 bp, Artificial
  Probe
acattgacatttggaacttggggtc

SEQ ID NO: 303264 - DNA, 25 bp, Artificial
  Probe
gtccactgagctctgaggggctctt

SEQ ID NO: 303265 - DNA, 25 bp, Artificial
  Probe
ccattttaggatgctgaatcctttg

SEQ ID NO: 303266 - DNA, 25 bp, Artificial
  Probe
gtctggcgtcttagaacttggctcc

SEQ ID NO: 303267 - DNA, 25 bp, Artificial
  Probe
ttggcaacacagaaagttagatttc

SEQ ID NO: 303268 - DNA, 25 bp, Artificial
  Probe
ccactgagctctgaggggctcttct

SEQ ID NO: 303269 - DNA, 25 bp, Artificial
  Probe
gaagacagtccttgatgtgggtttc

SEQ ID NO: 303270 - DNA, 25 bp, Artificial
  Probe
gagctgacattgacatttggaactt

SEQ ID NO: 303271 - DNA, 25 bp, Artificial
  Probe
tttaggatgctgaatcctttgctaa

SEQ ID NO: 303272 - DNA, 25 bp, Artificial
  Probe
ggggtctcacccttgcctagaatat

SEQ ID NO: 303273 - DNA, 25 bp, Artificial
  Probe
cctgaagaagacagtccttgatgtg

SEQ ID NO: 303274 - DNA, 25 bp, Artificial
  Probe
agagctgacattgacatttggaact

SEQ ID NO: 303275 - DNA, 25 bp, Artificial
  Probe
tggaacttggggtctcacccttgcc

SEQ ID NO: 303276 - DNA, 25 bp, Artificial
  Probe
gaacttggctccttgttggcaacac

SEQ ID NO: 303277 - DNA, 25 bp, Artificial
  Probe
tgccattttaggatgctgaatcctt

SEQ ID NO: 303278 - DNA, 25 bp, Artificial
  Probe
gctgacattgacatttggaacttgg

SEQ ID NO: 303279 - DNA, 25 bp, Artificial
  Probe
gttttgttcctgaagaagacagtcc

SEQ ID NO: 303280 - DNA, 25 bp, Artificial
  Probe
tccttgttggcaacacagaaagtta

SEQ ID NO: 303281 - DNA, 25 bp, Artificial
  Probe
gctgggcattgtgagagctgacatt

SEQ ID NO: 303282 - DNA, 25 bp, Artificial
  Probe
atgctgaatcctttgctaactaaga

SEQ ID NO: 303283 - DNA, 25 bp, Artificial
  Probe
gacatttggaacttggggtctcacc

SEQ ID NO: 303284 - DNA, 25 bp, Artificial
  Probe
cgtcttagaacttggctccttgttg

SEQ ID NO: 303285 - DNA, 25 bp, Artificial
  Probe
gagaccgtccactgagctctgaggg

SEQ ID NO: 303286 - DNA, 25 bp, Artificial
  Probe
ggcgtcttagaacttggctccttgt

SEQ ID NO: 303287 - DNA, 25 bp, Artificial
  Probe
cttggctccttgttggcaacacaga

SEQ ID NO: 303288 - DNA, 25 bp, Artificial
  Probe
tggctgcatagttagactttttctc

SEQ ID NO: 303289 - DNA, 25 bp, Artificial
  Probe
cattgtgagagctgacattgacatt

SEQ ID NO: 303290 - DNA, 25 bp, Artificial
  Probe
agttttgttcctgaagaagacagtc

SEQ ID NO: 303291 - DNA, 25 bp, Artificial
  Probe
gccatggctgcatagttagactttt

SEQ ID NO: 303292 - DNA, 25 bp, Artificial
  Probe
ttagaacttggctccttgttggcaa

SEQ ID NO: 303293 - DNA, 25 bp, Artificial
  Probe
ctgggcattgtgagagctgacattg

SEQ ID NO: 303294 - DNA, 25 bp, Artificial
  Probe
ttttgccattttaggatgctgaatc

SEQ ID NO: 303295 - DNA, 25 bp, Artificial
  Probe
ggatgctgaatcctttgctaactaa

SEQ ID NO: 303296 - DNA, 25 bp, Artificial
  Probe
tgacatttggaacttggggtctcac

SEQ ID NO: 303297 - DNA, 25 bp, Artificial
  Probe
acttggggtctcacccttgcctaga

SEQ ID NO: 303298 - DNA, 25 bp, Artificial
  Probe
agacagtccttgatgtgggtttcct

SEQ ID NO: 303299 - DNA, 25 bp, Artificial
  Probe
cactgagctctgaggggctcttctg

SEQ ID NO: 303300 - DNA, 25 bp, Artificial
  Probe
gcttagaactttatatcacagggca

SEQ ID NO: 303301 - DNA, 25 bp, Artificial
  Probe
ttggctccttgttggcaacacagaa

SEQ ID NO: 303302 - DNA, 25 bp, Artificial
  Probe
atggctgcatagttagactttttct

SEQ ID NO: 303303 - DNA, 25 bp, Artificial
  Probe
cttgttggcaacacagaaagttaga

SEQ ID NO: 303304 - DNA, 25 bp, Artificial
  Probe
accttcatccagctgggctgcatcg

SEQ ID NO: 303305 - DNA, 25 bp, Artificial
  Probe
agtcactgcccatgccaggacagtg

SEQ ID NO: 303306 - DNA, 25 bp, Artificial
  Probe
acgtgaccaaggtgaagacatggag

SEQ ID NO: 303307 - DNA, 25 bp, Artificial
  Probe
ccgagcagccctacgtgaccaaggt

SEQ ID NO: 303308 - DNA, 25 bp, Artificial
  Probe
ccaaactttgatgaggatggtcagg

SEQ ID NO: 303309 - DNA, 25 bp, Artificial
  Probe
gacagtggccccttgactttcacag

SEQ ID NO: 303310 - DNA, 25 bp, Artificial
  Probe
tccacatgcctgtgtgaccctcaag

SEQ ID NO: 303311 - DNA, 25 bp, Artificial
  Probe
ctgtacatgggagtcacatcactgt

SEQ ID NO: 303312 - DNA, 25 bp, Artificial
  Probe
tggaggatgcacctgttcaccttca

SEQ ID NO: 303313 - DNA, 25 bp, Artificial
  Probe
gcctctgaggcgttgccttttgccc

SEQ ID NO: 303314 - DNA, 25 bp, Artificial
  Probe
tgctcattttcatgccagccaagca

SEQ ID NO: 303315 - DNA, 25 bp, Artificial
  Probe
ttttgccccggctcttccaggacag

SEQ ID NO: 303316 - DNA, 25 bp, Artificial
  Probe
acctcaggacccagggatgtgcctg

SEQ ID NO: 303317 - DNA, 25 bp, Artificial
  Probe
aggcgttgccttttgccccggctct

SEQ ID NO: 303318 - DNA, 25 bp, Artificial
  Probe
tgagtacaatgagctccacatgcct

SEQ ID NO: 303319 - DNA, 25 bp, Artificial
  Probe
tgctgcgcaggatcccgttggccgt

SEQ ID NO: 303320 - DNA, 25 bp, Artificial
  Probe
agctgcaggcgctggactctgaaga

SEQ ID NO: 303321 - DNA, 25 bp, Artificial
  Probe
ctgtgctgcgcaggatcccgttggc

SEQ ID NO: 303322 - DNA, 25 bp, Artificial
  Probe
tggtgactcacctcaggacccaggg

SEQ ID NO: 303323 - DNA, 25 bp, Artificial
  Probe
ccatgccaggacagtggccccttga

SEQ ID NO: 303324 - DNA, 25 bp, Artificial
  Probe
acagtggccccttgactttcacagc

SEQ ID NO: 303325 - DNA, 25 bp, Artificial
  Probe
gacggcaccggctttgaagtcatta

SEQ ID NO: 303326 - DNA, 25 bp, Artificial
  Probe
cctctgggtggtcaagtcaacggtg

SEQ ID NO: 303327 - DNA, 25 bp, Artificial
  Probe
tccagttgtcccagcgtctgctgct

SEQ ID NO: 303328 - DNA, 25 bp, Artificial
  Probe
atgagctccacatgcctgtgtgacc

SEQ ID NO: 303329 - DNA, 25 bp, Artificial
  Probe
tgactcacctcaggacccagggatg

SEQ ID NO: 303330 - DNA, 25 bp, Artificial
  Probe
tcaagtcaacggtggcctcactggc

SEQ ID NO: 303331 - DNA, 25 bp, Artificial
  Probe
tcttgctcacggtgcctctgaggcg

SEQ ID NO: 303332 - DNA, 25 bp, Artificial
  Probe
tgaggcgttgccttttgccccggct

SEQ ID NO: 303333 - DNA, 25 bp, Artificial
  Probe
ggtggtcaagtcaacggtggcctca

SEQ ID NO: 303334 - DNA, 25 bp, Artificial
  Probe
agctgggctgcatcgcgctcctctg

SEQ ID NO: 303335 - DNA, 25 bp, Artificial
  Probe
acctgttcaccttcatccagctggg

SEQ ID NO: 303336 - DNA, 25 bp, Artificial
  Probe
gctgcatcgcgctcctctgggtggt

SEQ ID NO: 303337 - DNA, 25 bp, Artificial
  Probe
tcaacggtggcctcactggcctttc

SEQ ID NO: 303338 - DNA, 25 bp, Artificial
  Probe
acggtgcctctgaggcgttgccttt

SEQ ID NO: 303339 - DNA, 25 bp, Artificial
  Probe
agcccagacggcaccggctttgaag

SEQ ID NO: 303340 - DNA, 25 bp, Artificial
  Probe
tgcctggagtcactgcccatgccag

SEQ ID NO: 303341 - DNA, 25 bp, Artificial
  Probe
ctcttccaggacagggagctgcagg

SEQ ID NO: 303342 - DNA, 25 bp, Artificial
  Probe
cagggatgtgcctggagtcactgcc

SEQ ID NO: 303343 - DNA, 25 bp, Artificial
  Probe
gagtcactgcccatgccaggacagt

SEQ ID NO: 303344 - DNA, 25 bp, Artificial
  Probe
gatgcacctgttcaccttcatccag

SEQ ID NO: 303345 - DNA, 25 bp, Artificial
  Probe
ccctcaagatggtggccctccgaga

SEQ ID NO: 303346 - DNA, 25 bp, Artificial
  Probe
atgccaggacagtggccccttgact

SEQ ID NO: 303347 - DNA, 25 bp, Artificial
  Probe
cgcaggatcccgttggccgtgctct

SEQ ID NO: 303348 - DNA, 25 bp, Artificial
  Probe
cttgactttcacagcccagacggca

SEQ ID NO: 303349 - DNA, 25 bp, Artificial
  Probe
atcgtcatgggagctgtgctgcgca

SEQ ID NO: 303350 - DNA, 25 bp, Artificial
  Probe
gctgtcgtggcgtcgcaacacgccg

SEQ ID NO: 303351 - DNA, 25 bp, Artificial
  Probe
cctgcagaccttgctgcagacgcta

SEQ ID NO: 303352 - DNA, 25 bp, Artificial
  Probe
cagctccaggctgtgtccttgcact

SEQ ID NO: 303353 - DNA, 25 bp, Artificial
  Probe
caacacgccgccttgttggactggc

SEQ ID NO: 303354 - DNA, 25 bp, Artificial
  Probe
gcgacgtggccttcgggctcatgtt

SEQ ID NO: 303355 - DNA, 25 bp, Artificial
  Probe
aactgctcatctacctacgcgtggc

SEQ ID NO: 303356 - DNA, 25 bp, Artificial
  Probe
cttcctggggctgctggtcaccggc

SEQ ID NO: 303357 - DNA, 25 bp, Artificial
  Probe
cactgctggggctcggccgctacag

SEQ ID NO: 303358 - DNA, 25 bp, Artificial
  Probe
ctcggccgctacagtgtgcagtacc

SEQ ID NO: 303359 - DNA, 25 bp, Artificial
  Probe
gctgcagagcgcttcgtgggcatca

SEQ ID NO: 303360 - DNA, 25 bp, Artificial
  Probe
tgccgcgtctaccatgcgcgcgagg

SEQ ID NO: 303361 - DNA, 25 bp, Artificial
  Probe
actctcgggctgctgccactgctgg

SEQ ID NO: 303362 - DNA, 25 bp, Artificial
  Probe
ttcgtgggcatcacacggcccttct

SEQ ID NO: 303363 - DNA, 25 bp, Artificial
  Probe
tgctcaacaccgtgagcgtggccac

SEQ ID NO: 303364 - DNA, 25 bp, Artificial
  Probe
ggactctcgggctgctgccactgct

SEQ ID NO: 303365 - DNA, 25 bp, Artificial
  Probe
tgcggaccacggagcgccaactgct

SEQ ID NO: 303366 - DNA, 25 bp, Artificial
  Probe
ccgcgatggctgcagagcgcttcgt

SEQ ID NO: 303367 - DNA, 25 bp, Artificial
  Probe
tcctcgctttgctgtgcggcctcgt

SEQ ID NO: 303368 - DNA, 25 bp, Artificial
  Probe
gctccaggctgtgtccttgcactca

SEQ ID NO: 303369 - DNA, 25 bp, Artificial
  Probe
acagtgtgcagtaccccggctcctg

SEQ ID NO: 303370 - DNA, 25 bp, Artificial
  Probe
gttcttcgggctgtgtcccctgctc

SEQ ID NO: 303371 - DNA, 25 bp, Artificial
  Probe
ggttgccgcctttgccacttcatgg

SEQ ID NO: 303372 - DNA, 25 bp, Artificial
  Probe
ggagcgccaactgctcatctaccta

SEQ ID NO: 303373 - DNA, 25 bp, Artificial
  Probe
gccatggtgttcttcgggctgtgtc

SEQ ID NO: 303374 - DNA, 25 bp, Artificial
  Probe
gctggtcttcatcctgcagaccttg

SEQ ID NO: 303375 - DNA, 25 bp, Artificial
  Probe
agatgatggttcagctcgtaggcat

SEQ ID NO: 303376 - DNA, 25 bp, Artificial
  Probe
acacaggccatgctcagtggaccct

SEQ ID NO: 303377 - DNA, 25 bp, Artificial
  Probe
gccttgttggactggcgtgccactg

SEQ ID NO: 303378 - DNA, 25 bp, Artificial
  Probe
gctcggccgctacagtgtgcagtac

SEQ ID NO: 303379 - DNA, 25 bp, Artificial
  Probe
ggcgtgccactgatcccggttgccg

SEQ ID NO: 303380 - DNA, 25 bp, Artificial
  Probe
ctacgcgtggccacatggaaccaga

SEQ ID NO: 303381 - DNA, 25 bp, Artificial
  Probe
gactggcgtgccactgatcccggtt

SEQ ID NO: 303382 - DNA, 25 bp, Artificial
  Probe
tggccacggtgtgttggatgccctt

SEQ ID NO: 303383 - DNA, 25 bp, Artificial
  Probe
tgcatccaaggttcacttcccagct

SEQ ID NO: 303384 - DNA, 25 bp, Artificial
  Probe
tacagtgtgcagtaccccggctcct

SEQ ID NO: 303385 - DNA, 25 bp, Artificial
  Probe
tctacctacgcgtggccacatggaa

SEQ ID NO: 303386 - DNA, 25 bp, Artificial
  Probe
tcaccggcgctgtcgtggcgtcgca

SEQ ID NO: 303387 - DNA, 25 bp, Artificial
  Probe
tgggtctacatcctcttccgtaggt

SEQ ID NO: 303388 - DNA, 25 bp, Artificial
  Probe
tgcagacgctacctgtcatgagccc

SEQ ID NO: 303389 - DNA, 25 bp, Artificial
  Probe
ctcaccgacttcctggggctgctgg

SEQ ID NO: 303390 - DNA, 25 bp, Artificial
  Probe
taccccggctcctggtgcttcttga

SEQ ID NO: 303391 - DNA, 25 bp, Artificial
  Probe
ctggtgcttcttgactcttggggcg

SEQ ID NO: 303392 - DNA, 25 bp, Artificial
  Probe
gatgatggttcagctcgtaggcatc

SEQ ID NO: 303393 - DNA, 25 bp, Artificial
  Probe
tgtttgctctcctgggcagcgtgtc

SEQ ID NO: 303394 - DNA, 25 bp, Artificial
  Probe
ctccggacagctgttgcggaccacg

SEQ ID NO: 303395 - DNA, 25 bp, Artificial
  Probe
acaccgtgagcgtggccacgctctg

SEQ ID NO: 303396 - DNA, 25 bp, Artificial
  Probe
accacaaggggctgctgcttgtgtc

SEQ ID NO: 303397 - DNA, 25 bp, Artificial
  Probe
tgtctcttgagacctcagttaggag

SEQ ID NO: 303398 - DNA, 25 bp, Artificial
  Probe
cactcctcagggacaggtacctgca

SEQ ID NO: 303399 - DNA, 25 bp, Artificial
  Probe
tgtttatctgacaaaggaactcaat

SEQ ID NO: 303400 - DNA, 25 bp, Artificial
  Probe
ctgcccaaagcctagtgagaaatct

SEQ ID NO: 303401 - DNA, 25 bp, Artificial
  Probe
gtctgtgttattctgacccggggga

SEQ ID NO: 303402 - DNA, 25 bp, Artificial
  Probe
tggtctccctttcctgtagacctcg

SEQ ID NO: 303403 - DNA, 25 bp, Artificial
  Probe
cacaaggggctgctgcttgtgtcaa

SEQ ID NO: 303404 - DNA, 25 bp, Artificial
  Probe
gcagttcccacctttgaggttttgc

SEQ ID NO: 303405 - DNA, 25 bp, Artificial
  Probe
ggaactctgcctaggggatgcctcc

SEQ ID NO: 303406 - DNA, 25 bp, Artificial
  Probe
agttcagtccttcctctgccatggc

SEQ ID NO: 303407 - DNA, 25 bp, Artificial
  Probe
acactaccacacgaaccaaggagca

SEQ ID NO: 303408 - DNA, 25 bp, Artificial
  Probe
agaagagacgcattcactcctcagg

SEQ ID NO: 303409 - DNA, 25 bp, Artificial
  Probe
catggcctctgtctgtctgcctcat

SEQ ID NO: 303410 - DNA, 25 bp, Artificial
  Probe
gaagggtacacaacctacccatcat

SEQ ID NO: 303411 - DNA, 25 bp, Artificial
  Probe
gagtaggtcactgaggggcctcctt

SEQ ID NO: 303412 - DNA, 25 bp, Artificial
  Probe
ctcttgagacctcagttaggagagg

SEQ ID NO: 303413 - DNA, 25 bp, Artificial
  Probe
tcctcagggacaggtacctgcacct

SEQ ID NO: 303414 - DNA, 25 bp, Artificial
  Probe
tgccatggcctctgtctgtctgcct

SEQ ID NO: 303415 - DNA, 25 bp, Artificial
  Probe
acaaggggctgctgcttgtgtcaag

SEQ ID NO: 303416 - DNA, 25 bp, Artificial
  Probe
tctgccatggcctctgtctgtctgc

SEQ ID NO: 303417 - DNA, 25 bp, Artificial
  Probe
cccaaagcctagtgagaaatctggc

SEQ ID NO: 303418 - DNA, 25 bp, Artificial
  Probe
actaccacacgaaccaaggagcact

SEQ ID NO: 303419 - DNA, 25 bp, Artificial
  Probe
acgcattcactcctcagggacaggt

SEQ ID NO: 303420 - DNA, 25 bp, Artificial
  Probe
agtaggtcactgaggggcctccttc

SEQ ID NO: 303421 - DNA, 25 bp, Artificial
  Probe
cggaactctgcctaggggatgcctc

SEQ ID NO: 303422 - DNA, 25 bp, Artificial
  Probe
cgtcctgccgcctgtctgtgttatt

SEQ ID NO: 303423 - DNA, 25 bp, Artificial
  Probe
tcctctgcctttatactcacggggc

SEQ ID NO: 303424 - DNA, 25 bp, Artificial
  Probe
tcacggggctcactcactgccaaga

SEQ ID NO: 303425 - DNA, 25 bp, Artificial
  Probe
gcctgcgaagggtacacaacctacc

SEQ ID NO: 303426 - DNA, 25 bp, Artificial
  Probe
ggagaggctgctgtttatctgacaa

SEQ ID NO: 303427 - DNA, 25 bp, Artificial
  Probe
cctacctgcccaaagcctagtgaga

SEQ ID NO: 303428 - DNA, 25 bp, Artificial
  Probe
atctgacaaaggaactcaattgggg

SEQ ID NO: 303429 - DNA, 25 bp, Artificial
  Probe
atggcctctgtctgtctgcctcatc

SEQ ID NO: 303430 - DNA, 25 bp, Artificial
  Probe
atacactaccacacgaaccaaggag

SEQ ID NO: 303431 - DNA, 25 bp, Artificial
  Probe
cctgcagttcccacctttgaggttt

SEQ ID NO: 303432 - DNA, 25 bp, Artificial
  Probe
ctacctgcccaaagcctagtgagaa

SEQ ID NO: 303433 - DNA, 25 bp, Artificial
  Probe
cctcagttaggagaggctgctgttt

SEQ ID NO: 303434 - DNA, 25 bp, Artificial
  Probe
tgaggggcctccttcctctgccttt

SEQ ID NO: 303435 - DNA, 25 bp, Artificial
  Probe
cattcactcctcagggacaggtacc

SEQ ID NO: 303436 - DNA, 25 bp, Artificial
  Probe
gggctcactcactgccaagatgacc

SEQ ID NO: 303437 - DNA, 25 bp, Artificial
  Probe
gttcccacctttgaggttttgccat

SEQ ID NO: 303438 - DNA, 25 bp, Artificial
  Probe
ttatctgacaaaggaactcaattgg

SEQ ID NO: 303439 - DNA, 25 bp, Artificial
  Probe
aagcctagtgagaaatctggcccct

SEQ ID NO: 303440 - DNA, 25 bp, Artificial
  Probe
taccacacgaaccaaggagcactca

SEQ ID NO: 303441 - DNA, 25 bp, Artificial
  Probe
cttcctctgcctttatactcacggg

SEQ ID NO: 303442 - DNA, 25 bp, Artificial
  Probe
gccctacttgtcactactagggtcc

SEQ ID NO: 303443 - DNA, 25 bp, Artificial
  Probe
tcactactagggtccccagctctgt

SEQ ID NO: 303444 - DNA, 25 bp, Artificial
  Probe
cttggactgtgtcttttcttcataa

SEQ ID NO: 303445 - DNA, 25 bp, Artificial
  Probe
cacttcctgctggtggcctgggatg

SEQ ID NO: 303446 - DNA, 25 bp, Artificial
  Probe
agtagccctacttgtcactactagg

SEQ ID NO: 303447 - DNA, 25 bp, Artificial
  Probe
caataaacctcaggtccactttgga

SEQ ID NO: 303448 - DNA, 25 bp, Artificial
  Probe
cttgtcactactagggtccccagct

SEQ ID NO: 303449 - DNA, 25 bp, Artificial
  Probe
gccaataaacctcaggtccactttg

SEQ ID NO: 303450 - DNA, 25 bp, Artificial
  Probe
cctgctgccttggactgtgtctttt

SEQ ID NO: 303451 - DNA, 25 bp, Artificial
  Probe
tccatcagaagcagtagccctactt

SEQ ID NO: 303452 - DNA, 25 bp, Artificial
  Probe
gccccctgtccatcagaagcagtag

SEQ ID NO: 303453 - DNA, 25 bp, Artificial
  Probe
ccaataaacctcaggtccactttgg

SEQ ID NO: 303454 - DNA, 25 bp, Artificial
  Probe
cgccacttcctgctggtggcctggg

SEQ ID NO: 303455 - DNA, 25 bp, Artificial
  Probe
ttcctgctgccttggactgtgtctt

SEQ ID NO: 303456 - DNA, 25 bp, Artificial
  Probe
tagggattccgcagtctgggttagc

SEQ ID NO: 303457 - DNA, 25 bp, Artificial
  Probe
gtgccaataaacctcaggtccactt

SEQ ID NO: 303458 - DNA, 25 bp, Artificial
  Probe
gctgccttggactgtgtcttttctt

SEQ ID NO: 303459 - DNA, 25 bp, Artificial
  Probe
gctgaggcttcctgctgccttggac

SEQ ID NO: 303460 - DNA, 25 bp, Artificial
  Probe
gctggcgccacttcctgctggtggc

SEQ ID NO: 303461 - DNA, 25 bp, Artificial
  Probe
cctgtccatcagaagcagtagccct

SEQ ID NO: 303462 - DNA, 25 bp, Artificial
  Probe
gggtctgtttgctttagggattccg

SEQ ID NO: 303463 - DNA, 25 bp, Artificial
  Probe
cttcctgctgccttggactgtgtct

SEQ ID NO: 303464 - DNA, 25 bp, Artificial
  Probe
gtcgctggcgccacttcctgctggt

SEQ ID NO: 303465 - DNA, 25 bp, Artificial
  Probe
ttgctttagggattccgcagtctgg

SEQ ID NO: 303466 - DNA, 25 bp, Artificial
  Probe
ccttggactgtgtcttttcttcata

SEQ ID NO: 303467 - DNA, 25 bp, Artificial
  Probe
tctgtttgctttagggattccgcag

SEQ ID NO: 303468 - DNA, 25 bp, Artificial
  Probe
acttgtcactactagggtccccagc

SEQ ID NO: 303469 - DNA, 25 bp, Artificial
  Probe
gccttggactgtgtcttttcttcat

SEQ ID NO: 303470 - DNA, 25 bp, Artificial
  Probe
gaggtgccaataaacctcaggtcca

SEQ ID NO: 303471 - DNA, 25 bp, Artificial
  Probe
tgctttagggattccgcagtctggg

SEQ ID NO: 303472 - DNA, 25 bp, Artificial
  Probe
atcagaagcagtagccctacttgtc

SEQ ID NO: 303473 - DNA, 25 bp, Artificial
  Probe
ggactgtgtcttttcttcataaatt

SEQ ID NO: 303474 - DNA, 25 bp, Artificial
  Probe
ctacttgtcactactagggtcccca

SEQ ID NO: 303475 - DNA, 25 bp, Artificial
  Probe
gtctgtttgctttagggattccgca

SEQ ID NO: 303476 - DNA, 25 bp, Artificial
  Probe
ggattccgcagtctgggttagcaga

SEQ ID NO: 303477 - DNA, 25 bp, Artificial
  Probe
tggcgccacttcctgctggtggcct

SEQ ID NO: 303478 - DNA, 25 bp, Artificial
  Probe
ctgtccatcagaagcagtagcccta

SEQ ID NO: 303479 - DNA, 25 bp, Artificial
  Probe
cctgtgagcggacatccgcgtgcgc

SEQ ID NO: 303480 - DNA, 25 bp, Artificial
  Probe
gaggcttcctgctgccttggactgt

SEQ ID NO: 303481 - DNA, 25 bp, Artificial
  Probe
gcagtagccctacttgtcactacta

SEQ ID NO: 303482 - DNA, 25 bp, Artificial
  Probe
gattccgcagtctgggttagcagag

SEQ ID NO: 303483 - DNA, 25 bp, Artificial
  Probe
ctgctgccttggactgtgtcttttc

SEQ ID NO: 303484 - DNA, 25 bp, Artificial
  Probe
aagcagtagccctacttgtcactac

SEQ ID NO: 303485 - DNA, 25 bp, Artificial
  Probe
ctgaggcttcctgctgccttggact

SEQ ID NO: 303486 - DNA, 25 bp, Artificial
  Probe
tttgctttagggattccgcagtctg

SEQ ID NO: 303487 - DNA, 25 bp, Artificial
  Probe
agggattccgcagtctgggttagca

SEQ ID NO: 303488 - DNA, 25 bp, Artificial
  Probe
cttttattgatcacattgctggaga

SEQ ID NO: 303489 - DNA, 25 bp, Artificial
  Probe
ccaagcttgatctggtaccattggg

SEQ ID NO: 303490 - DNA, 25 bp, Artificial
  Probe
cagcagcagcgctgttagtgagcta

SEQ ID NO: 303491 - DNA, 25 bp, Artificial
  Probe
actgataggggacttgtgtacagca

SEQ ID NO: 303492 - DNA, 25 bp, Artificial
  Probe
gtaatgctggtgcaacccagagtag

SEQ ID NO: 303493 - DNA, 25 bp, Artificial
  Probe
gtaagcactgactttgtagaaaaca

SEQ ID NO: 303494 - DNA, 25 bp, Artificial
  Probe
ttagtagaagctaggccaatgatcc

SEQ ID NO: 303495 - DNA, 25 bp, Artificial
  Probe
cattgggatgatgacctgagacccc

SEQ ID NO: 303496 - DNA, 25 bp, Artificial
  Probe
cagccaacagcagcagcgctgttag

SEQ ID NO: 303497 - DNA, 25 bp, Artificial
  Probe
acaccctgatgtaatgctggtgcaa

SEQ ID NO: 303498 - DNA, 25 bp, Artificial
  Probe
cagccatcttggaacagagaaacaa

SEQ ID NO: 303499 - DNA, 25 bp, Artificial
  Probe
tcgtccagggattgaagggagacca

SEQ ID NO: 303500 - DNA, 25 bp, Artificial
  Probe
ctggtgcaacccagagtagaattta

SEQ ID NO: 303501 - DNA, 25 bp, Artificial
  Probe
gcagcgctgttagtgagctaagtaa

SEQ ID NO: 303502 - DNA, 25 bp, Artificial
  Probe
cctgatgtaatgctggtgcaaccca

SEQ ID NO: 303503 - DNA, 25 bp, Artificial
  Probe
tgtcttttattgatcacattgctgg

SEQ ID NO: 303504 - DNA, 25 bp, Artificial
  Probe
ctaagtaagcactgactttgtagaa

SEQ ID NO: 303505 - DNA, 25 bp, Artificial
  Probe
ccattgggatgatgacctgagaccc

SEQ ID NO: 303506 - DNA, 25 bp, Artificial
  Probe
agctaagtaagcactgactttgtag

SEQ ID NO: 303507 - DNA, 25 bp, Artificial
  Probe
aaacgtacaccctgatgtaatgctg

SEQ ID NO: 303508 - DNA, 25 bp, Artificial
  Probe
tagcttgtgctgctggactgatagg

SEQ ID NO: 303509 - DNA, 25 bp, Artificial
  Probe
tggtagcttgtgctgctggactgat

SEQ ID NO: 303510 - DNA, 25 bp, Artificial
  Probe
cacagccaacagcagcagcgctgtt

SEQ ID NO: 303511 - DNA, 25 bp, Artificial
  Probe
atctggtaccattgggatgatgacc

SEQ ID NO: 303512 - DNA, 25 bp, Artificial
  Probe
gtacaccctgatgtaatgctggtgc

SEQ ID NO: 303513 - DNA, 25 bp, Artificial
  Probe
acatcagccatcttggaacagagaa

SEQ ID NO: 303514 - DNA, 25 bp, Artificial
  Probe
ggcttgaaaacaccacactgaaaat

SEQ ID NO: 303515 - DNA, 25 bp, Artificial
  Probe
aggcttgaaaacaccacactgaaaa

SEQ ID NO: 303516 - DNA, 25 bp, Artificial
  Probe
agtaagcactgactttgtagaaaac

SEQ ID NO: 303517 - DNA, 25 bp, Artificial
  Probe
atgtaatgctggtgcaacccagagt

SEQ ID NO: 303518 - DNA, 25 bp, Artificial
  Probe
tcttttattgatcacattgctggag

SEQ ID NO: 303519 - DNA, 25 bp, Artificial
  Probe
accaggaaaacgtacaccctgatgt

SEQ ID NO: 303520 - DNA, 25 bp, Artificial
  Probe
catcagccatcttggaacagagaaa

SEQ ID NO: 303521 - DNA, 25 bp, Artificial
  Probe
tgctacgtgggcaacaaaggaactg

SEQ ID NO: 303522 - DNA, 25 bp, Artificial
  Probe
gatctggtaccattgggatgatgac

SEQ ID NO: 303523 - DNA, 25 bp, Artificial
  Probe
gcgctgttagtgagctaagtaagca

SEQ ID NO: 303524 - DNA, 25 bp, Artificial
  Probe
aggaaaacgtacaccctgatgtaat

SEQ ID NO: 303525 - DNA, 25 bp, Artificial
  Probe
cttgatctggtaccattgggatgat

SEQ ID NO: 303526 - DNA, 25 bp, Artificial
  Probe
ctacgtgggcaacaaaggaactgag

SEQ ID NO: 303527 - DNA, 25 bp, Artificial
  Probe
ggtgcaacccagagtagaatttatt

SEQ ID NO: 303528 - DNA, 25 bp, Artificial
  Probe
aatcgtccagggattgaagggagac

SEQ ID NO: 303529 - DNA, 25 bp, Artificial
  Probe
aacatcagccatcttggaacagaga

SEQ ID NO: 303530 - DNA, 25 bp, Artificial
  Probe
accattgggatgatgacctgagacc

SEQ ID NO: 303531 - DNA, 25 bp, Artificial
  Probe
aatgctggtgcaacccagagtagaa

SEQ ID NO: 303532 - DNA, 25 bp, Artificial
  Probe
ggtaccattgggatgatgacctgag

SEQ ID NO: 303533 - DNA, 25 bp, Artificial
  Probe
tgatgtaatgctggtgcaacccaga

SEQ ID NO: 303534 - DNA, 25 bp, Artificial
  Probe
tgaacccctctaaagggagattggg

SEQ ID NO: 303535 - DNA, 25 bp, Artificial
  Probe
tgctggcctcttcacttctgccaga

SEQ ID NO: 303536 - DNA, 25 bp, Artificial
  Probe
tgtggtctaggaaggcctctcgcag

SEQ ID NO: 303537 - DNA, 25 bp, Artificial
  Probe
tctcgcaggcagctcttcccttgga

SEQ ID NO: 303538 - DNA, 25 bp, Artificial
  Probe
gaacctgtcattgctgacaaaccta

SEQ ID NO: 303539 - DNA, 25 bp, Artificial
  Probe
tggtgaatttgacctggatgagacc

SEQ ID NO: 303540 - DNA, 25 bp, Artificial
  Probe
ggggccactgagtgaaatgattcta

SEQ ID NO: 303541 - DNA, 25 bp, Artificial
  Probe
agcccacgaaaaggaacagagctgc

SEQ ID NO: 303542 - DNA, 25 bp, Artificial
  Probe
gctgacaaacctatttctccagtgc

SEQ ID NO: 303543 - DNA, 25 bp, Artificial
  Probe
aagttggagttttactcctgagcta

SEQ ID NO: 303544 - DNA, 25 bp, Artificial
  Probe
ctgccaggggccactgagtgaaatg

SEQ ID NO: 303545 - DNA, 25 bp, Artificial
  Probe
acaatgtgcataagctgttcccacc

SEQ ID NO: 303546 - DNA, 25 bp, Artificial
  Probe
ctaggaaggcctctcgcaggcagct

SEQ ID NO: 303547 - DNA, 25 bp, Artificial
  Probe
gaccatggatgttgccaggcatgtg

SEQ ID NO: 303548 - DNA, 25 bp, Artificial
  Probe
aaaggaacagagctgccagttactg

SEQ ID NO: 303549 - DNA, 25 bp, Artificial
  Probe
gctcttcccttggaggctgtgatag

SEQ ID NO: 303550 - DNA, 25 bp, Artificial
  Probe
aaccctttatacgttagtgaatatg

SEQ ID NO: 303551 - DNA, 25 bp, Artificial
  Probe
attataggtttgcatgaccacacct

SEQ ID NO: 303552 - DNA, 25 bp, Artificial
  Probe
ctgactaggagtcctggcttccaac

SEQ ID NO: 303553 - DNA, 25 bp, Artificial
  Probe
gatagagcggccaggactagctgac

SEQ ID NO: 303554 - DNA, 25 bp, Artificial
  Probe
atgttgccaggcatgtggaggaact

SEQ ID NO: 303555 - DNA, 25 bp, Artificial
  Probe
tgccaggcatgtggaggaactttta

SEQ ID NO: 303556 - DNA, 25 bp, Artificial
  Probe
tgcaggcaacacagtggtatgtgag

SEQ ID NO: 303557 - DNA, 25 bp, Artificial
  Probe
ccttgtagcccacgaaaaggaacag

SEQ ID NO: 303558 - DNA, 25 bp, Artificial
  Probe
aaaccagcgtggacatgggattcgg

SEQ ID NO: 303559 - DNA, 25 bp, Artificial
  Probe
tccatatatcccaggctgtccatga

SEQ ID NO: 303560 - DNA, 25 bp, Artificial
  Probe
acgctggactccatgcttctcttgg

SEQ ID NO: 303561 - DNA, 25 bp, Artificial
  Probe
ttcacttctgccagaagctccttgt

SEQ ID NO: 303562 - DNA, 25 bp, Artificial
  Probe
actcagacctcaagggtcccctgga

SEQ ID NO: 303563 - DNA, 25 bp, Artificial
  Probe
cctttatacgttagtgaatatgggc

SEQ ID NO: 303564 - DNA, 25 bp, Artificial
  Probe
taagctgttcccaccaacacaggcg

SEQ ID NO: 303565 - DNA, 25 bp, Artificial
  Probe
gctgcggattttgtgaccgctcaca

SEQ ID NO: 303566 - DNA, 25 bp, Artificial
  Probe
gtttgcatgaccacacctgcctcag

SEQ ID NO: 303567 - DNA, 25 bp, Artificial
  Probe
acgccggcccatggacagtcttgac

SEQ ID NO: 303568 - DNA, 25 bp, Artificial
  Probe
cctggacctctcctctaagagctga

SEQ ID NO: 303569 - DNA, 25 bp, Artificial
  Probe
catgaatgatcctcctgcctcagct

SEQ ID NO: 303570 - DNA, 25 bp, Artificial
  Probe
ctaaagtagtggtggccttttcact

SEQ ID NO: 303571 - DNA, 25 bp, Artificial
  Probe
cttgaccaagatggtgaatttgacc

SEQ ID NO: 303572 - DNA, 25 bp, Artificial
  Probe
ccttgcttgttatcagaaaggaggg

SEQ ID NO: 303573 - DNA, 25 bp, Artificial
  Probe
aacacaggcggctgccaaagctgac

SEQ ID NO: 303574 - DNA, 25 bp, Artificial
  Probe
gcttgcaaccttgcttgttatcaga

SEQ ID NO: 303575 - DNA, 25 bp, Artificial
  Probe
tggctttgcaccttcgcagttccgc

SEQ ID NO: 303576 - DNA, 25 bp, Artificial
  Probe
gtctggctaaagtagtggtggcctt

SEQ ID NO: 303577 - DNA, 25 bp, Artificial
  Probe
ggtctctccatatatcccaggctgt

SEQ ID NO: 303578 - DNA, 25 bp, Artificial
  Probe
ttgtacatagaactcacatttatgg

SEQ ID NO: 303579 - DNA, 25 bp, Artificial
  Probe
tgctgacaaacctatttctccagtg

SEQ ID NO: 303580 - DNA, 25 bp, Artificial
  Probe
gaattcttagttaatctttgggcac

SEQ ID NO: 303581 - DNA, 25 bp, Artificial
  Probe
aatattatgcctcaagaatgagggc

SEQ ID NO: 303582 - DNA, 25 bp, Artificial
  Probe
tacactggtgagagtgcctgtgtat

SEQ ID NO: 303583 - DNA, 25 bp, Artificial
  Probe
gactgtacttgattttttcaaagac

SEQ ID NO: 303584 - DNA, 25 bp, Artificial
  Probe
ctgcctgtcaagtttttataccagt

SEQ ID NO: 303585 - DNA, 25 bp, Artificial
  Probe
ttcttagttaatctttgggcactcc

SEQ ID NO: 303586 - DNA, 25 bp, Artificial
  Probe
tgtacactggtgagagtgcctgtgt

SEQ ID NO: 303587 - DNA, 25 bp, Artificial
  Probe
tgcaactatggacaatttaacacag

SEQ ID NO: 303588 - DNA, 25 bp, Artificial
  Probe
tgcctgtcaagtttttataccagta

SEQ ID NO: 303589 - DNA, 25 bp, Artificial
  Probe
gaaatattaccctgcctgtcaagtt

SEQ ID NO: 303590 - DNA, 25 bp, Artificial
  Probe
gctgtactatgttaactgagtgact

SEQ ID NO: 303591 - DNA, 25 bp, Artificial
  Probe
tattatgcctcaagaatgagggcga

SEQ ID NO: 303592 - DNA, 25 bp, Artificial
  Probe
aagacttcatttaacactgagtgaa

SEQ ID NO: 303593 - DNA, 25 bp, Artificial
  Probe
actggctgtactatgttaactgagt

SEQ ID NO: 303594 - DNA, 25 bp, Artificial
  Probe
gagaaacacagtcatcccaaagtgt

SEQ ID NO: 303595 - DNA, 25 bp, Artificial
  Probe
gaaacacagtcatcccaaagtgtgt

SEQ ID NO: 303596 - DNA, 25 bp, Artificial
  Probe
gacttcatttaacactgagtgaaat

SEQ ID NO: 303597 - DNA, 25 bp, Artificial
  Probe
gcgagaaacacagtcatcccaaagt

SEQ ID NO: 303598 - DNA, 25 bp, Artificial
  Probe
ggctgtactatgttaactgagtgac

SEQ ID NO: 303599 - DNA, 25 bp, Artificial
  Probe
agtcatcccaaagtgtgtcttttat

SEQ ID NO: 303600 - DNA, 25 bp, Artificial
  Probe
tttatgtacactggtgagagtgcct

SEQ ID NO: 303601 - DNA, 25 bp, Artificial
  Probe
atgtacactggtgagagtgcctgtg

SEQ ID NO: 303602 - DNA, 25 bp, Artificial
  Probe
ctgtactatgttaactgagtgactg

SEQ ID NO: 303603 - DNA, 25 bp, Artificial
  Probe
gtcatcccaaagtgtgtcttttatt

SEQ ID NO: 303604 - DNA, 25 bp, Artificial
  Probe
acacatacacagacacacacaattg

SEQ ID NO: 303605 - DNA, 25 bp, Artificial
  Probe
acactggtgagagtgcctgtgtatg

SEQ ID NO: 303606 - DNA, 25 bp, Artificial
  Probe
ttatgtacactggtgagagtgcctg

SEQ ID NO: 303607 - DNA, 25 bp, Artificial
  Probe
atattatgcctcaagaatgagggcg

SEQ ID NO: 303608 - DNA, 25 bp, Artificial
  Probe
cactggtgagagtgcctgtgtatgt

SEQ ID NO: 303609 - DNA, 25 bp, Artificial
  Probe
tatgtacactggtgagagtgcctgt

SEQ ID NO: 303610 - DNA, 25 bp, Artificial
  Probe
cagtcatcccaaagtgtgtctttta

SEQ ID NO: 303611 - DNA, 25 bp, Artificial
  Probe
attatgcctcaagaatgagggcgag

SEQ ID NO: 303612 - DNA, 25 bp, Artificial
  Probe
ctatgttaactgagtgactgtactt

SEQ ID NO: 303613 - DNA, 25 bp, Artificial
  Probe
actatgttaactgagtgactgtact

SEQ ID NO: 303614 - DNA, 25 bp, Artificial
  Probe
ctgagtgactgtacttgattttttc

SEQ ID NO: 303615 - DNA, 25 bp, Artificial
  Probe
acagtcatcccaaagtgtgtctttt

SEQ ID NO: 303616 - DNA, 25 bp, Artificial
  Probe
caaagacttcatttaacactgagtg

SEQ ID NO: 303617 - DNA, 25 bp, Artificial
  Probe
aattcttagttaatctttgggcact

SEQ ID NO: 303618 - DNA, 25 bp, Artificial
  Probe
cgagaaacacagtcatcccaaagtg

SEQ ID NO: 303619 - DNA, 25 bp, Artificial
  Probe
gtttatgtacactggtgagagtgcc

SEQ ID NO: 303620 - DNA, 25 bp, Artificial
  Probe
cacagtcatcccaaagtgtgtcttt

SEQ ID NO: 303621 - DNA, 25 bp, Artificial
  Probe
attcttagttaatctttgggcactc

SEQ ID NO: 303622 - DNA, 25 bp, Artificial
  Probe
ctggctgtactatgttaactgagtg

SEQ ID NO: 303623 - DNA, 25 bp, Artificial
  Probe
agacttcatttaacactgagtgaaa

SEQ ID NO: 303624 - DNA, 25 bp, Artificial
  Probe
gtacactggtgagagtgcctgtgta

SEQ ID NO: 303625 - DNA, 25 bp, Artificial
  Probe
cctgcctgtcaagtttttataccag

SEQ ID NO: 303626 - DNA, 25 bp, Artificial
  Probe
taatagtggcagcacagcaaccaga

SEQ ID NO: 303627 - DNA, 25 bp, Artificial
  Probe
catgatccgcaaacagtagataata

SEQ ID NO: 303628 - DNA, 25 bp, Artificial
  Probe
ccatgaagcatccaaatcccaaacc

SEQ ID NO: 303629 - DNA, 25 bp, Artificial
  Probe
cagcacagcaaccagatcacccatg

SEQ ID NO: 303630 - DNA, 25 bp, Artificial
  Probe
gggcatgatccgcaaacagtagata

SEQ ID NO: 303631 - DNA, 25 bp, Artificial
  Probe
tggcagcacagcaaccagatcaccc

SEQ ID NO: 303632 - DNA, 25 bp, Artificial
  Probe
tccgcaaacagtagataatagtggc

SEQ ID NO: 303633 - DNA, 25 bp, Artificial
  Probe
agcatccaaatcccaaaccccagag

SEQ ID NO: 303634 - DNA, 25 bp, Artificial
  Probe
cacccatgaagcatccaaatcccaa

SEQ ID NO: 303635 - DNA, 25 bp, Artificial
  Probe
cacagcaaccagatcacccatgaag

SEQ ID NO: 303636 - DNA, 25 bp, Artificial
  Probe
aatagtggcagcacagcaaccagat

SEQ ID NO: 303637 - DNA, 25 bp, Artificial
  Probe
gtggcagcacagcaaccagatcacc

SEQ ID NO: 303638 - DNA, 25 bp, Artificial
  Probe
agggcatgatccgcaaacagtagat

SEQ ID NO: 303639 - DNA, 25 bp, Artificial
  Probe
gatccgcaaacagtagataatagtg

SEQ ID NO: 303640 - DNA, 25 bp, Artificial
  Probe
atgatccgcaaacagtagataatag

SEQ ID NO: 303641 - DNA, 25 bp, Artificial
  Probe
tgaagcatccaaatcccaaacccca

SEQ ID NO: 303642 - DNA, 25 bp, Artificial
  Probe
tcacccatgaagcatccaaatccca

SEQ ID NO: 303643 - DNA, 25 bp, Artificial
  Probe
aagcatccaaatcccaaaccccaga

SEQ ID NO: 303644 - DNA, 25 bp, Artificial
  Probe
ataatagtggcagcacagcaaccag

SEQ ID NO: 303645 - DNA, 25 bp, Artificial
  Probe
acccatgaagcatccaaatcccaaa

SEQ ID NO: 303646 - DNA, 25 bp, Artificial
  Probe
gaagcatccaaatcccaaaccccag

SEQ ID NO: 303647 - DNA, 25 bp, Artificial
  Probe
gcagcacagcaaccagatcacccat

SEQ ID NO: 303648 - DNA, 25 bp, Artificial
  Probe
agatcacccatgaagcatccaaatc

SEQ ID NO: 303649 - DNA, 25 bp, Artificial
  Probe
gcaaccagatcacccatgaagcatc

SEQ ID NO: 303650 - DNA, 25 bp, Artificial
  Probe
atcacccatgaagcatccaaatccc

SEQ ID NO: 303651 - DNA, 25 bp, Artificial
  Probe
accagatcacccatgaagcatccaa

SEQ ID NO: 303652 - DNA, 25 bp, Artificial
  Probe
tagtggcagcacagcaaccagatca

SEQ ID NO: 303653 - DNA, 25 bp, Artificial
  Probe
agcaaccagatcacccatgaagcat

SEQ ID NO: 303654 - DNA, 25 bp, Artificial
  Probe
catgaagcatccaaatcccaaaccc

SEQ ID NO: 303655 - DNA, 25 bp, Artificial
  Probe
aagggcatgatccgcaaacagtaga

SEQ ID NO: 303656 - DNA, 25 bp, Artificial
  Probe
cagatcacccatgaagcatccaaat

SEQ ID NO: 303657 - DNA, 25 bp, Artificial
  Probe
gcacagcaaccagatcacccatgaa

SEQ ID NO: 303658 - DNA, 25 bp, Artificial
  Probe
agcacagcaaccagatcacccatga

SEQ ID NO: 303659 - DNA, 25 bp, Artificial
  Probe
ggcatgatccgcaaacagtagataa

SEQ ID NO: 303660 - DNA, 25 bp, Artificial
  Probe
agtggcagcacagcaaccagatcac

SEQ ID NO: 303661 - DNA, 25 bp, Artificial
  Probe
cagcaaccagatcacccatgaagca

SEQ ID NO: 303662 - DNA, 25 bp, Artificial
  Probe
atgaagcatccaaatcccaaacccc

SEQ ID NO: 303663 - DNA, 25 bp, Artificial
  Probe
acagcaaccagatcacccatgaagc

SEQ ID NO: 303664 - DNA, 25 bp, Artificial
  Probe
aaccagatcacccatgaagcatcca

SEQ ID NO: 303665 - DNA, 25 bp, Artificial
  Probe
tgatccgcaaacagtagataatagt

SEQ ID NO: 303666 - DNA, 25 bp, Artificial
  Probe
atccgcaaacagtagataatagtgg

SEQ ID NO: 303667 - DNA, 25 bp, Artificial
  Probe
gcatgatccgcaaacagtagataat

SEQ ID NO: 303668 - DNA, 25 bp, Artificial
  Probe
caaccagatcacccatgaagcatcc

SEQ ID NO: 303669 - DNA, 25 bp, Artificial
  Probe
ccagatcacccatgaagcatccaaa

SEQ ID NO: 303670 - DNA, 25 bp, Artificial
  Probe
gatcacccatgaagcatccaaatcc

SEQ ID NO: 303671 - DNA, 25 bp, Artificial
  Probe
atagtggcagcacagcaaccagatc

SEQ ID NO: 303672 - DNA, 25 bp, Artificial
  Probe
gcttgtgccctcgagagattctcct

SEQ ID NO: 303673 - DNA, 25 bp, Artificial
  Probe
ttatggagcacaagtcagaaagcaa

SEQ ID NO: 303674 - DNA, 25 bp, Artificial
  Probe
gaacccagttctggaattgcgtgct

SEQ ID NO: 303675 - DNA, 25 bp, Artificial
  Probe
tccttcttatgaaccgagagcttgt

SEQ ID NO: 303676 - DNA, 25 bp, Artificial
  Probe
accgagagcttgtgccctcgagaga

SEQ ID NO: 303677 - DNA, 25 bp, Artificial
  Probe
tcatctgcacactgcgtgcatttgc

SEQ ID NO: 303678 - DNA, 25 bp, Artificial
  Probe
tttctctggattgatgcttggtgac

SEQ ID NO: 303679 - DNA, 25 bp, Artificial
  Probe
actgcgtgcatttgcgtgtgtgttg

SEQ ID NO: 303680 - DNA, 25 bp, Artificial
  Probe
acagaacccagttctggaattgcgt

SEQ ID NO: 303681 - DNA, 25 bp, Artificial
  Probe
gtcctcttccttcttatgaaccgag

SEQ ID NO: 303682 - DNA, 25 bp, Artificial
  Probe
ctgacctacagaacccagttctgga

SEQ ID NO: 303683 - DNA, 25 bp, Artificial
  Probe
ccagttctggaattgcgtgctttcg

SEQ ID NO: 303684 - DNA, 25 bp, Artificial
  Probe
cacactgcgtgcatttgcgtgtgtg

SEQ ID NO: 303685 - DNA, 25 bp, Artificial
  Probe
agttcctcaaattgaccaatagctg

SEQ ID NO: 303686 - DNA, 25 bp, Artificial
  Probe
cctcatagattggaaggatgaacct

SEQ ID NO: 303687 - DNA, 25 bp, Artificial
  Probe
cctcgagagattctcctcagtcacg

SEQ ID NO: 303688 - DNA, 25 bp, Artificial
  Probe
cgtgcatttgcgtgtgtgttgtgtc

SEQ ID NO: 303689 - DNA, 25 bp, Artificial
  Probe
gttcctcaaattgaccaatagctgc

SEQ ID NO: 303690 - DNA, 25 bp, Artificial
  Probe
tcctcaaattgaccaatagctgctg

SEQ ID NO: 303691 - DNA, 25 bp, Artificial
  Probe
acatttttctctggattgatgcttg

SEQ ID NO: 303692 - DNA, 25 bp, Artificial
  Probe
ggctcatgaagcacccgctgcttgg

SEQ ID NO: 303693 - DNA, 25 bp, Artificial
  Probe
gagcttgtgccctcgagagattctc

SEQ ID NO: 303694 - DNA, 25 bp, Artificial
  Probe
acccagttctggaattgcgtgcttt

SEQ ID NO: 303695 - DNA, 25 bp, Artificial
  Probe
agaacccagttctggaattgcgtgc

SEQ ID NO: 303696 - DNA, 25 bp, Artificial
  Probe
gaccaatagctgctgctttcatatt

SEQ ID NO: 303697 - DNA, 25 bp, Artificial
  Probe
tgcttggtgacttggctcatgaagc

SEQ ID NO: 303698 - DNA, 25 bp, Artificial
  Probe
ctgcacactgcgtgcatttgcgtgt

SEQ ID NO: 303699 - DNA, 25 bp, Artificial
  Probe
ctcatctgcacactgcgtgcatttg

SEQ ID NO: 303700 - DNA, 25 bp, Artificial
  Probe
acctgacctacagaacccagttctg

SEQ ID NO: 303701 - DNA, 25 bp, Artificial
  Probe
cctcttccttcttatgaaccgagag

SEQ ID NO: 303702 - DNA, 25 bp, Artificial
  Probe
gagtgggtgacctcatattgtcctc

SEQ ID NO: 303703 - DNA, 25 bp, Artificial
  Probe
cctgacctacagaacccagttctgg

SEQ ID NO: 303704 - DNA, 25 bp, Artificial
  Probe
ttctcctcagtcacgtcagaactcg

SEQ ID NO: 303705 - DNA, 25 bp, Artificial
  Probe
tcttatgaaccgagagcttgtgccc

SEQ ID NO: 303706 - DNA, 25 bp, Artificial
  Probe
catttttctctggattgatgcttgg

SEQ ID NO: 303707 - DNA, 25 bp, Artificial
  Probe
tggtgacttggctcatgaagcaccc

SEQ ID NO: 303708 - DNA, 25 bp, Artificial
  Probe
gattctcctcagtcacgtcagaact

SEQ ID NO: 303709 - DNA, 25 bp, Artificial
  Probe
agggtgtgtactcctaagtgtgtgc

SEQ ID NO: 303710 - DNA, 25 bp, Artificial
  Probe
atttatggagcacaagtcagaaagc

SEQ ID NO: 303711 - DNA, 25 bp, Artificial
  Probe
cctacagaacccagttctggaattg

SEQ ID NO: 303712 - DNA, 25 bp, Artificial
  Probe
cttggctcatgaagcacccgctgct

SEQ ID NO: 303713 - DNA, 25 bp, Artificial
  Probe
gccctcgagagattctcctcagtca

SEQ ID NO: 303714 - DNA, 25 bp, Artificial
  Probe
ggtgacctcatattgtcctcttcct

SEQ ID NO: 303715 - DNA, 25 bp, Artificial
  Probe
ggattgatgcttggtgacttggctc

SEQ ID NO: 303716 - DNA, 25 bp, Artificial
  Probe
ctctggattgatgcttggtgacttg

SEQ ID NO: 303717 - DNA, 25 bp, Artificial
  Probe
gttacatttttctctggattgatgc

SEQ ID NO: 303718 - DNA, 25 bp, Artificial
  Probe
gatctttctggttacactctgctta

SEQ ID NO: 303719 - DNA, 25 bp, Artificial
  Probe
agctgcatgttaagtgagtgatcca

SEQ ID NO: 303720 - DNA, 25 bp, Artificial
  Probe
tgacccattggctactgtggtaact

SEQ ID NO: 303721 - DNA, 25 bp, Artificial
  Probe
tcctagcggcgcaactgggagaaat

SEQ ID NO: 303722 - DNA, 25 bp, Artificial
  Probe
tcaatgcatcctagcggcgcaactg

SEQ ID NO: 303723 - DNA, 25 bp, Artificial
  Probe
cctggagctcccaggggaactgaag

SEQ ID NO: 303724 - DNA, 25 bp, Artificial
  Probe
ttggatgcgccctacaacttcaacc

SEQ ID NO: 303725 - DNA, 25 bp, Artificial
  Probe
ccactgggtgcctgatggccgcgat

SEQ ID NO: 303726 - DNA, 25 bp, Artificial
  Probe
gctctctgctcaatgcatcctagcg

SEQ ID NO: 303727 - DNA, 25 bp, Artificial
  Probe
aggacatattgtttggccctttgga

SEQ ID NO: 303728 - DNA, 25 bp, Artificial
  Probe
tactgtgatatgacccattggctac

SEQ ID NO: 303729 - DNA, 25 bp, Artificial
  Probe
cgcaccctatttcactggcctggag

SEQ ID NO: 303730 - DNA, 25 bp, Artificial
  Probe
atggccgcgatgtcggaggacatat

SEQ ID NO: 303731 - DNA, 25 bp, Artificial
  Probe
aagctgcatgttaagtgagtgatcc

SEQ ID NO: 303732 - DNA, 25 bp, Artificial
  Probe
ctagcggcgcaactgggagaaatgc

SEQ ID NO: 303733 - DNA, 25 bp, Artificial
  Probe
tgcatggactcttcggtgggcctag

SEQ ID NO: 303734 - DNA, 25 bp, Artificial
  Probe
atgaccggttcttcggccctgatct

SEQ ID NO: 303735 - DNA, 25 bp, Artificial
  Probe
acagatgaccggttcttcggccctg

SEQ ID NO: 303736 - DNA, 25 bp, Artificial
  Probe
cgcgatgtcggaggacatattgttt

SEQ ID NO: 303737 - DNA, 25 bp, Artificial
  Probe
ttggctactgtggtaactgcatgga

SEQ ID NO: 303738 - DNA, 25 bp, Artificial
  Probe
tcaacaccttccaaactagatgtgg

SEQ ID NO: 303739 - DNA, 25 bp, Artificial
  Probe
tatcaacaacctgatgtcagaacag

SEQ ID NO: 303740 - DNA, 25 bp, Artificial
  Probe
tgagtgatccactgggtgcctgatg

SEQ ID NO: 303741 - DNA, 25 bp, Artificial
  Probe
acgaaggtggccatgtcggacatac

SEQ ID NO: 303742 - DNA, 25 bp, Artificial
  Probe
cactggcctggagctcccaggggaa

SEQ ID NO: 303743 - DNA, 25 bp, Artificial
  Probe
ctgtgacagatgaccggttcttcgg

SEQ ID NO: 303744 - DNA, 25 bp, Artificial
  Probe
cctgatgtcagaacagacatcaaca

SEQ ID NO: 303745 - DNA, 25 bp, Artificial
  Probe
cttccaaactagatgtggggtttgg

SEQ ID NO: 303746 - DNA, 25 bp, Artificial
  Probe
tgatccactgggtgcctgatggccg

SEQ ID NO: 303747 - DNA, 25 bp, Artificial
  Probe
actgaagttggatgcgccctacaac

SEQ ID NO: 303748 - DNA, 25 bp, Artificial
  Probe
ttaagtgagtgatccactgggtgcc

SEQ ID NO: 303749 - DNA, 25 bp, Artificial
  Probe
catcgtatttggtctattactgtga

SEQ ID NO: 303750 - DNA, 25 bp, Artificial
  Probe
accctatttcactggcctggagctc

SEQ ID NO: 303751 - DNA, 25 bp, Artificial
  Probe
gttcttcggccctgatctttctggt

SEQ ID NO: 303752 - DNA, 25 bp, Artificial
  Probe
tcccaggggaactgaagttggatgc

SEQ ID NO: 303753 - DNA, 25 bp, Artificial
  Probe
taacatcgtatttggtctattactg

SEQ ID NO: 303754 - DNA, 25 bp, Artificial
  Probe
gacataccgtgaaggcaattagact

SEQ ID NO: 303755 - DNA, 25 bp, Artificial
  Probe
tggggtctactaccagagcctctat

SEQ ID NO: 303756 - DNA, 25 bp, Artificial
  Probe
ggtctactaccagagcctctattcc

SEQ ID NO: 303757 - DNA, 25 bp, Artificial
  Probe
tggatgcgccctacaacttcaacca

SEQ ID NO: 303758 - DNA, 25 bp, Artificial
  Probe
ttctggttacactctgcttatccag

SEQ ID NO: 303759 - DNA, 25 bp, Artificial
  Probe
tccagttaattaacatcgtatttgg

SEQ ID NO: 303760 - DNA, 25 bp, Artificial
  Probe
ggtttgctgtgacagatgaccggtt

SEQ ID NO: 303761 - DNA, 25 bp, Artificial
  Probe
agctcccaggggaactgaagttgga

SEQ ID NO: 303762 - DNA, 25 bp, Artificial
  Probe
ggttacactctgcttatccagttaa

SEQ ID NO: 303763 - DNA, 25 bp, Artificial
  Probe
tttggtctattactgtgatatgacc

SEQ ID NO: 303764 - DNA, 25 bp, Artificial
  Probe
tgggtctacgagagccattcctatt

SEQ ID NO: 303765 - DNA, 25 bp, Artificial
  Probe
cttgctggtgatcaagcattcagtc

SEQ ID NO: 303766 - DNA, 25 bp, Artificial
  Probe
ctttataatcctgcagtggcatgtt

SEQ ID NO: 303767 - DNA, 25 bp, Artificial
  Probe
ctcaaaatgggatgccatgactctg

SEQ ID NO: 303768 - DNA, 25 bp, Artificial
  Probe
gatacggtgcctcatacctgtcatg

SEQ ID NO: 303769 - DNA, 25 bp, Artificial
  Probe
gcctatctgaaaacatgtaacaggc

SEQ ID NO: 303770 - DNA, 25 bp, Artificial
  Probe
tcctgcagacacattctttgtaatg

SEQ ID NO: 303771 - DNA, 25 bp, Artificial
  Probe
taataggatgctattctttactgac

SEQ ID NO: 303772 - DNA, 25 bp, Artificial
  Probe
gtaactagaaacatcgtaggcccac

SEQ ID NO: 303773 - DNA, 25 bp, Artificial
  Probe
ctccggttagtagagccatttatgt

SEQ ID NO: 303774 - DNA, 25 bp, Artificial
  Probe
cacactctccggttagtagagccat

SEQ ID NO: 303775 - DNA, 25 bp, Artificial
  Probe
catgtaacaggcaactcctgcagac

SEQ ID NO: 303776 - DNA, 25 bp, Artificial
  Probe
gtaatgacttcagtctcctcgtcca

SEQ ID NO: 303777 - DNA, 25 bp, Artificial
  Probe
ctggtgatcaagcattcagtctatg

SEQ ID NO: 303778 - DNA, 25 bp, Artificial
  Probe
aattgctgtgagttgttggtcagcc

SEQ ID NO: 303779 - DNA, 25 bp, Artificial
  Probe
ctctgtctggataattctgtggaaa

SEQ ID NO: 303780 - DNA, 25 bp, Artificial
  Probe
atctgaaaacatgtaacaggcaact

SEQ ID NO: 303781 - DNA, 25 bp, Artificial
  Probe
gcagacacattctttgtaatgactt

SEQ ID NO: 303782 - DNA, 25 bp, Artificial
  Probe
tagaaacatcgtaggcccactttac

SEQ ID NO: 303783 - DNA, 25 bp, Artificial
  Probe
gcaactcctgcagacacattctttg

SEQ ID NO: 303784 - DNA, 25 bp, Artificial
  Probe
tcagtctatgggtctacgagagcca

SEQ ID NO: 303785 - DNA, 25 bp, Artificial
  Probe
atcaagcattcagtctatgggtcta

SEQ ID NO: 303786 - DNA, 25 bp, Artificial
  Probe
tgtggaaaaaccattctgagctgga

SEQ ID NO: 303787 - DNA, 25 bp, Artificial
  Probe
cctcaaaatgggatgccatgactct

SEQ ID NO: 303788 - DNA, 25 bp, Artificial
  Probe
taatgactttataatcctgcagtgg

SEQ ID NO: 303789 - DNA, 25 bp, Artificial
  Probe
tggaaaaaccattctgagctggata

SEQ ID NO: 303790 - DNA, 25 bp, Artificial
  Probe
tctgagctggatacggtgcctcata

SEQ ID NO: 303791 - DNA, 25 bp, Artificial
  Probe
ttagtagagccatttatgtacatcg

SEQ ID NO: 303792 - DNA, 25 bp, Artificial
  Probe
gtgcctcatacctgtcatgtctact

SEQ ID NO: 303793 - DNA, 25 bp, Artificial
  Probe
ggaaaaaccattctgagctggatac

SEQ ID NO: 303794 - DNA, 25 bp, Artificial
  Probe
atgccatgactctgtctggataatt

SEQ ID NO: 303795 - DNA, 25 bp, Artificial
  Probe
gttagtagagccatttatgtacatc

SEQ ID NO: 303796 - DNA, 25 bp, Artificial
  Probe
gcattcagtctatgggtctacgaga

SEQ ID NO: 303797 - DNA, 25 bp, Artificial
  Probe
aaaccattctgagctggatacggtg

SEQ ID NO: 303798 - DNA, 25 bp, Artificial
  Probe
gtcatgtctactttcaggaggcaga

SEQ ID NO: 303799 - DNA, 25 bp, Artificial
  Probe
cagcctatctgaaaacatgtaacag

SEQ ID NO: 303800 - DNA, 25 bp, Artificial
  Probe
atgactctgtctggataattctgtg

SEQ ID NO: 303801 - DNA, 25 bp, Artificial
  Probe
gtaggcccactttactctttatatg

SEQ ID NO: 303802 - DNA, 25 bp, Artificial
  Probe
ggtgatcaagcattcagtctatggg

SEQ ID NO: 303803 - DNA, 25 bp, Artificial
  Probe
gttttacagcctatctgaaaacatg

SEQ ID NO: 303804 - DNA, 25 bp, Artificial
  Probe
gtaatgactttataatcctgcagtg

SEQ ID NO: 303805 - DNA, 25 bp, Artificial
  Probe
tcgtccacactctccggttagtaga

SEQ ID NO: 303806 - DNA, 25 bp, Artificial
  Probe
catacctgtcatgtctactttcagg

SEQ ID NO: 303807 - DNA, 25 bp, Artificial
  Probe
tttataatcctgcagtggcatgttc

SEQ ID NO: 303808 - DNA, 25 bp, Artificial
  Probe
ggtaatgacttcagtctcctcgtcc

SEQ ID NO: 303809 - DNA, 25 bp, Artificial
  Probe
ggcccactttactctttatatggta

SEQ ID NO: 303810 - DNA, 25 bp, Artificial
  Probe
gccacaagcccttccagtgtcggat

SEQ ID NO: 303811 - DNA, 25 bp, Artificial
  Probe
caaagacaagcagatccacccgggc

SEQ ID NO: 303812 - DNA, 25 bp, Artificial
  Probe
tattacccctctggagaccatcaag

SEQ ID NO: 303813 - DNA, 25 bp, Artificial
  Probe
gccaagatccacctcaagcaaaagg

SEQ ID NO: 303814 - DNA, 25 bp, Artificial
  Probe
gatccacctcaagcaaaaggagaag

SEQ ID NO: 303815 - DNA, 25 bp, Artificial
  Probe
cctctggagaccatcaaggccttca

SEQ ID NO: 303816 - DNA, 25 bp, Artificial
  Probe
tgggctccattccagaacacaagcc

SEQ ID NO: 303817 - DNA, 25 bp, Artificial
  Probe
ggcatggaccccattcgggtcaacc

SEQ ID NO: 303818 - DNA, 25 bp, Artificial
  Probe
ttacccctctggagaccatcaaggc

SEQ ID NO: 303819 - DNA, 25 bp, Artificial
  Probe
ttccagaacacaagcccttccaggg

SEQ ID NO: 303820 - DNA, 25 bp, Artificial
  Probe
gacatgggctccattccagaacaca

SEQ ID NO: 303821 - DNA, 25 bp, Artificial
  Probe
gggagaagccctttgcctgtgagtt

SEQ ID NO: 303822 - DNA, 25 bp, Artificial
  Probe
cctgtgagttctgtgggcgcaagtt

SEQ ID NO: 303823 - DNA, 25 bp, Artificial
  Probe
cttccagggcatggaccccattcgg

SEQ ID NO: 303824 - DNA, 25 bp, Artificial
  Probe
ttgcctgtgagttctgtgggcgcaa

SEQ ID NO: 303825 - DNA, 25 bp, Artificial
  Probe
gcaagtaccccaatcggcctagcaa

SEQ ID NO: 303826 - DNA, 25 bp, Artificial
  Probe
gccttcaaagacaagcagatccacc

SEQ ID NO: 303827 - DNA, 25 bp, Artificial
  Probe
gtcggatctgcatgcgcagcttcag

SEQ ID NO: 303828 - DNA, 25 bp, Artificial
  Probe
atctgcatgcgcagcttcagccgca

SEQ ID NO: 303829 - DNA, 25 bp, Artificial
  Probe
gcatgcgcagcttcagccgcagcga

SEQ ID NO: 303830 - DNA, 25 bp, Artificial
  Probe
tccagggcatggaccccattcgggt

SEQ ID NO: 303831 - DNA, 25 bp, Artificial
  Probe
gaacacaagcccttccagggcatgg

SEQ ID NO: 303832 - DNA, 25 bp, Artificial
  Probe
aagacaagcagatccacccgggctt

SEQ ID NO: 303833 - DNA, 25 bp, Artificial
  Probe
ttctgtgggcgcaagtttgcgcgca

SEQ ID NO: 303834 - DNA, 25 bp, Artificial
  Probe
tgcatgcgcagcttcagccgcagcg

SEQ ID NO: 303835 - DNA, 25 bp, Artificial
  Probe
ggagaagccctttgcctgtgagttc

SEQ ID NO: 303836 - DNA, 25 bp, Artificial
  Probe
ggccacaagcccttccagtgtcgga

SEQ ID NO: 303837 - DNA, 25 bp, Artificial
  Probe
acaagcagatccacccgggcttcgg

SEQ ID NO: 303838 - DNA, 25 bp, Artificial
  Probe
ctgtgaccggcgtttcagccgctcg

SEQ ID NO: 303839 - DNA, 25 bp, Artificial
  Probe
caagtaccccaatcggcctagcaag

SEQ ID NO: 303840 - DNA, 25 bp, Artificial
  Probe
cgccaagatccacctcaagcaaaag

SEQ ID NO: 303841 - DNA, 25 bp, Artificial
  Probe
ttcaaagacaagcagatccacccgg

SEQ ID NO: 303842 - DNA, 25 bp, Artificial
  Probe
ctgtgagttctgtgggcgcaagttt

SEQ ID NO: 303843 - DNA, 25 bp, Artificial
  Probe
cacaagcccttccagtgtcggatct

SEQ ID NO: 303844 - DNA, 25 bp, Artificial
  Probe
gcccttccagtgtcggatctgcatg

SEQ ID NO: 303845 - DNA, 25 bp, Artificial
  Probe
cgtttcagccgctcggacgagctga

SEQ ID NO: 303846 - DNA, 25 bp, Artificial
  Probe
aagtttgcgcgcagcgacgagcgca

SEQ ID NO: 303847 - DNA, 25 bp, Artificial
  Probe
ttccagtgtcggatctgcatgcgca

SEQ ID NO: 303848 - DNA, 25 bp, Artificial
  Probe
gaccggcgtttcagccgctcggacg

SEQ ID NO: 303849 - DNA, 25 bp, Artificial
  Probe
caagatccacctcaagcaaaaggag

SEQ ID NO: 303850 - DNA, 25 bp, Artificial
  Probe
tggagaccatcaaggccttcaaaga

SEQ ID NO: 303851 - DNA, 25 bp, Artificial
  Probe
attccagaacacaagcccttccagg

SEQ ID NO: 303852 - DNA, 25 bp, Artificial
  Probe
caagcccttccagtgtcggatctgc

SEQ ID NO: 303853 - DNA, 25 bp, Artificial
  Probe
ccctttgcctgtgagttctgtgggc

SEQ ID NO: 303854 - DNA, 25 bp, Artificial
  Probe
accatcaaggccttcaaagacaagc

SEQ ID NO: 303855 - DNA, 25 bp, Artificial
  Probe
tctgcatgcgcagcttcagccgcag

SEQ ID NO: 303856 - DNA, 25 bp, Artificial
  Probe
gtacagcgggcactgagcccagcga

SEQ ID NO: 303857 - DNA, 25 bp, Artificial
  Probe
taccagccggccaagcaaagagtca

SEQ ID NO: 303858 - DNA, 25 bp, Artificial
  Probe
ttgttcgcagctgtaggtgctggct

SEQ ID NO: 303859 - DNA, 25 bp, Artificial
  Probe
cacgcactatgaagattgttatgaa

SEQ ID NO: 303860 - DNA, 25 bp, Artificial
  Probe
agcatgagactgtgaaccagcaaga

SEQ ID NO: 303861 - DNA, 25 bp, Artificial
  Probe
cagagcccggcgaacatctactaca

SEQ ID NO: 303862 - DNA, 25 bp, Artificial
  Probe
ctggctgcgtcatcttcctgctcat

SEQ ID NO: 303863 - DNA, 25 bp, Artificial
  Probe
gctgcgtcatcttcctgctcattat

SEQ ID NO: 303864 - DNA, 25 bp, Artificial
  Probe
tcgtccaggagatgccacctcagag

SEQ ID NO: 303865 - DNA, 25 bp, Artificial
  Probe
tgacagtcctactactcaagctccg

SEQ ID NO: 303866 - DNA, 25 bp, Artificial
  Probe
tgatggcaagcatgagactgtgaac

SEQ ID NO: 303867 - DNA, 25 bp, Artificial
  Probe
tcccagggggactctgatggcaagc

SEQ ID NO: 303868 - DNA, 25 bp, Artificial
  Probe
aaccagcaagagaagagtggcccag

SEQ ID NO: 303869 - DNA, 25 bp, Artificial
  Probe
tgccgtaacgcctgagcagttgact

SEQ ID NO: 303870 - DNA, 25 bp, Artificial
  Probe
gactacagagaacaactactgcccc

SEQ ID NO: 303871 - DNA, 25 bp, Artificial
  Probe
tgggcaagatccaaatgccgtaacg

SEQ ID NO: 303872 - DNA, 25 bp, Artificial
  Probe
aaacgacatcgcaagcatacacagc

SEQ ID NO: 303873 - DNA, 25 bp, Artificial
  Probe
ccggccaagcaaagagtcagacaac

SEQ ID NO: 303874 - DNA, 25 bp, Artificial
  Probe
caaagagtcagacaacactgtcaag

SEQ ID NO: 303875 - DNA, 25 bp, Artificial
  Probe
cagttgactaccagccggccaagca

SEQ ID NO: 303876 - DNA, 25 bp, Artificial
  Probe
agatgccacctcagagcccggcgaa

SEQ ID NO: 303877 - DNA, 25 bp, Artificial
  Probe
tggcaagcatgagactgtgaaccag

SEQ ID NO: 303878 - DNA, 25 bp, Artificial
  Probe
gactctgatggcaagcatgagactg

SEQ ID NO: 303879 - DNA, 25 bp, Artificial
  Probe
atccaaatgccgtaacgcctgagca

SEQ ID NO: 303880 - DNA, 25 bp, Artificial
  Probe
ggacaccgacagcttctttaactcc

SEQ ID NO: 303881 - DNA, 25 bp, Artificial
  Probe
agagtcagacaacactgtcaagaca

SEQ ID NO: 303882 - DNA, 25 bp, Artificial
  Probe
gccccaaaggggatagtggtacagc

SEQ ID NO: 303883 - DNA, 25 bp, Artificial
  Probe
gcggggacaccgacagcttctttaa

SEQ ID NO: 303884 - DNA, 25 bp, Artificial
  Probe
tcgcaagcatacacagcagcgggcg

SEQ ID NO: 303885 - DNA, 25 bp, Artificial
  Probe
ggcactgagcccagcgacatcatca

SEQ ID NO: 303886 - DNA, 25 bp, Artificial
  Probe
gggactacgggcatcctgtctacat

SEQ ID NO: 303887 - DNA, 25 bp, Artificial
  Probe
cagcgggcactgagcccagcgacat

SEQ ID NO: 303888 - DNA, 25 bp, Artificial
  Probe
ccagggggactctgatggcaagcat

SEQ ID NO: 303889 - DNA, 25 bp, Artificial
  Probe
caggagatgccacctcagagcccgg

SEQ ID NO: 303890 - DNA, 25 bp, Artificial
  Probe
cagacaacactgtcaagacagccac

SEQ ID NO: 303891 - DNA, 25 bp, Artificial
  Probe
ctctgatggcaagcatgagactgtg

SEQ ID NO: 303892 - DNA, 25 bp, Artificial
  Probe
ccaaatgccgtaacgcctgagcagt

SEQ ID NO: 303893 - DNA, 25 bp, Artificial
  Probe
gtaggtgctggctgcgtcatcttcc

SEQ ID NO: 303894 - DNA, 25 bp, Artificial
  Probe
tggcagcggggacaccgacagcttc

SEQ ID NO: 303895 - DNA, 25 bp, Artificial
  Probe
gtcaagacagccacacaggctcctg

SEQ ID NO: 303896 - DNA, 25 bp, Artificial
  Probe
agcgacatcatcatccccttacgga

SEQ ID NO: 303897 - DNA, 25 bp, Artificial
  Probe
gcaagatccaaatgccgtaacgcct

SEQ ID NO: 303898 - DNA, 25 bp, Artificial
  Probe
cagctgtaggtgctggctgcgtcat

SEQ ID NO: 303899 - DNA, 25 bp, Artificial
  Probe
cggactacagagaacaactactgcc

SEQ ID NO: 303900 - DNA, 25 bp, Artificial
  Probe
atccccttacggactacagagaaca

SEQ ID NO: 303901 - DNA, 25 bp, Artificial
  Probe
tcaagctccgcaaacgacatcgcaa

SEQ ID NO: 303902 - DNA, 25 bp, Artificial
  Probe
tttgaatgtttccaacctggagtat

SEQ ID NO: 303903 - DNA, 25 bp, Artificial
  Probe
gtttccaacctggagtatatattgt

SEQ ID NO: 303904 - DNA, 25 bp, Artificial
  Probe
gtttgaatgtttccaacctggagta

SEQ ID NO: 303905 - DNA, 25 bp, Artificial
  Probe
ttatagcacattacaactgaaaagg

SEQ ID NO: 303906 - DNA, 25 bp, Artificial
  Probe
atgtttccaacctggagtatatatt

SEQ ID NO: 303907 - DNA, 25 bp, Artificial
  Probe
tggtccttattctaacttatggaga

SEQ ID NO: 303908 - DNA, 25 bp, Artificial
  Probe
tgaatgtttccaacctggagtatat

SEQ ID NO: 303909 - DNA, 25 bp, Artificial
  Probe
ggtccttattctaacttatggagat

SEQ ID NO: 303910 - DNA, 25 bp, Artificial
  Probe
tgatccctctgattttgaaggtttt

SEQ ID NO: 303911 - DNA, 25 bp, Artificial
  Probe
cccttgatccctctgattttgaagg

SEQ ID NO: 303912 - DNA, 25 bp, Artificial
  Probe
gcacattacaactgaaaaggactta

SEQ ID NO: 303913 - DNA, 25 bp, Artificial
  Probe
ttctggtccttattctaacttatgg

SEQ ID NO: 303914 - DNA, 25 bp, Artificial
  Probe
ccaacctggagtatatattgtctac

SEQ ID NO: 303915 - DNA, 25 bp, Artificial
  Probe
ccttgatccctctgattttgaaggt

SEQ ID NO: 303916 - DNA, 25 bp, Artificial
  Probe
tatagcacattacaactgaaaagga

SEQ ID NO: 303917 - DNA, 25 bp, Artificial
  Probe
ttgatccctctgattttgaaggttt

SEQ ID NO: 303918 - DNA, 25 bp, Artificial
  Probe
cttgatccctctgattttgaaggtt

SEQ ID NO: 303919 - DNA, 25 bp, Artificial
  Probe
cagcctttcttagtgcctatgtgga

SEQ ID NO: 303920 - DNA, 25 bp, Artificial
  Probe
gaatgtttccaacctggagtatata

SEQ ID NO: 303921 - DNA, 25 bp, Artificial
  Probe
atagcacattacaactgaaaaggac

SEQ ID NO: 303922 - DNA, 25 bp, Artificial
  Probe
ttgtcagcctttcttagtgcctatg

SEQ ID NO: 303923 - DNA, 25 bp, Artificial
  Probe
agcctttcttagtgcctatgtggaa

SEQ ID NO: 303924 - DNA, 25 bp, Artificial
  Probe
gtccttattctaacttatggagatt

SEQ ID NO: 303925 - DNA, 25 bp, Artificial
  Probe
tagcacattacaactgaaaaggact

SEQ ID NO: 303926 - DNA, 25 bp, Artificial
  Probe
gtcagcctttcttagtgcctatgtg

SEQ ID NO: 303927 - DNA, 25 bp, Artificial
  Probe
atccctctgattttgaaggttttgc

SEQ ID NO: 303928 - DNA, 25 bp, Artificial
  Probe
ttgaatgtttccaacctggagtata

SEQ ID NO: 303929 - DNA, 25 bp, Artificial
  Probe
aatgtttccaacctggagtatatat

SEQ ID NO: 303930 - DNA, 25 bp, Artificial
  Probe
tccctctgattttgaaggttttgca

SEQ ID NO: 303931 - DNA, 25 bp, Artificial
  Probe
ttccaacctggagtatatattgtct

SEQ ID NO: 303932 - DNA, 25 bp, Artificial
  Probe
tctggtccttattctaacttatgga

SEQ ID NO: 303933 - DNA, 25 bp, Artificial
  Probe
tgtttgaatgtttccaacctggagt

SEQ ID NO: 303934 - DNA, 25 bp, Artificial
  Probe
ccctctgattttgaaggttttgcaa

SEQ ID NO: 303935 - DNA, 25 bp, Artificial
  Probe
cctctgattttgaaggttttgcaat

SEQ ID NO: 303936 - DNA, 25 bp, Artificial
  Probe
tccaacctggagtatatattgtcta

SEQ ID NO: 303937 - DNA, 25 bp, Artificial
  Probe
ctggtccttattctaacttatggag

SEQ ID NO: 303938 - DNA, 25 bp, Artificial
  Probe
tgtcagcctttcttagtgcctatgt

SEQ ID NO: 303939 - DNA, 25 bp, Artificial
  Probe
agcacattacaactgaaaaggactt

SEQ ID NO: 303940 - DNA, 25 bp, Artificial
  Probe
tttgtcagcctttcttagtgcctat

SEQ ID NO: 303941 - DNA, 25 bp, Artificial
  Probe
gcccttgatccctctgattttgaag

SEQ ID NO: 303942 - DNA, 25 bp, Artificial
  Probe
ttttgtcagcctttcttagtgccta

SEQ ID NO: 303943 - DNA, 25 bp, Artificial
  Probe
tttccaacctggagtatatattgtc

SEQ ID NO: 303944 - DNA, 25 bp, Artificial
  Probe
gatccctctgattttgaaggttttg

SEQ ID NO: 303945 - DNA, 25 bp, Artificial
  Probe
tgtttccaacctggagtatatattg

SEQ ID NO: 303946 - DNA, 25 bp, Artificial
  Probe
cattacaactgaaaaggacttaaga

SEQ ID NO: 303947 - DNA, 25 bp, Artificial
  Probe
tcagcctttcttagtgcctatgtgg

SEQ ID NO: 303948 - DNA, 25 bp, Artificial
  Probe
ttgcctgaatgcaggcagctggcag

SEQ ID NO: 303949 - DNA, 25 bp, Artificial
  Probe
ggcagcctgctgagaatggcagtcc

SEQ ID NO: 303950 - DNA, 25 bp, Artificial
  Probe
tcttcagccctggagggttggccga

SEQ ID NO: 303951 - DNA, 25 bp, Artificial
  Probe
aagggattggcacacttaggtcctt

SEQ ID NO: 303952 - DNA, 25 bp, Artificial
  Probe
agtcaccagggcagctggagcagca

SEQ ID NO: 303953 - DNA, 25 bp, Artificial
  Probe
tcaccagggcagctggagcagcagc

SEQ ID NO: 303954 - DNA, 25 bp, Artificial
  Probe
cacctgatggctgatgtgggtaaga

SEQ ID NO: 303955 - DNA, 25 bp, Artificial
  Probe
cggccattgcgctggcttactaggc

SEQ ID NO: 303956 - DNA, 25 bp, Artificial
  Probe
tgccctgtggagagcagtctagcag

SEQ ID NO: 303957 - DNA, 25 bp, Artificial
  Probe
agtctgtctgagcatgctaccaagc

SEQ ID NO: 303958 - DNA, 25 bp, Artificial
  Probe
aggctcttgggctgttaggaacatt

SEQ ID NO: 303959 - DNA, 25 bp, Artificial
  Probe
tgccatggcctggaactgactgggt

SEQ ID NO: 303960 - DNA, 25 bp, Artificial
  Probe
gcctgcagcctggagctcagcactg

SEQ ID NO: 303961 - DNA, 25 bp, Artificial
  Probe
gagatgtccttgtattgttcccttt

SEQ ID NO: 303962 - DNA, 25 bp, Artificial
  Probe
aggtgagccagatctggttgcctga

SEQ ID NO: 303963 - DNA, 25 bp, Artificial
  Probe
taacctgcaggcagaggacagctgg

SEQ ID NO: 303964 - DNA, 25 bp, Artificial
  Probe
acaggcagttttgtctgagcccagc

SEQ ID NO: 303965 - DNA, 25 bp, Artificial
  Probe
gtctgtctgagcatgctaccaagcc

SEQ ID NO: 303966 - DNA, 25 bp, Artificial
  Probe
cattgagagagctgggcagcctgct

SEQ ID NO: 303967 - DNA, 25 bp, Artificial
  Probe
cagttcaggccttggcttagaggag

SEQ ID NO: 303968 - DNA, 25 bp, Artificial
  Probe
caggcagcaaggtatggaggctcct

SEQ ID NO: 303969 - DNA, 25 bp, Artificial
  Probe
aggacaaagactaccgagatccgac

SEQ ID NO: 303970 - DNA, 25 bp, Artificial
  Probe
ggtggctgtgtttccatgggtacca

SEQ ID NO: 303971 - DNA, 25 bp, Artificial
  Probe
tgtttccatgggtaccatgggtgtg

SEQ ID NO: 303972 - DNA, 25 bp, Artificial
  Probe
caggcagttttgtctgagcccagcc

SEQ ID NO: 303973 - DNA, 25 bp, Artificial
  Probe
aatggtgggatattctcaggtccga

SEQ ID NO: 303974 - DNA, 25 bp, Artificial
  Probe
cccatgacaggaaatggtgggatat

SEQ ID NO: 303975 - DNA, 25 bp, Artificial
  Probe
gactgaccaaattgcccaatcccag

SEQ ID NO: 303976 - DNA, 25 bp, Artificial
  Probe
agctggagcagcagccagaaagccc

SEQ ID NO: 303977 - DNA, 25 bp, Artificial
  Probe
tcccttttaggtgacgattaggaag

SEQ ID NO: 303978 - DNA, 25 bp, Artificial
  Probe
cccctcaacgagaaccagaggcttt

SEQ ID NO: 303979 - DNA, 25 bp, Artificial
  Probe
cctgccatggcctggaactgactgg

SEQ ID NO: 303980 - DNA, 25 bp, Artificial
  Probe
ctcctggctgagctgctcctacttt

SEQ ID NO: 303981 - DNA, 25 bp, Artificial
  Probe
gtatggaggctcctgtggtagtcct

SEQ ID NO: 303982 - DNA, 25 bp, Artificial
  Probe
agcccttccacatggtgacccttag

SEQ ID NO: 303983 - DNA, 25 bp, Artificial
  Probe
gctctgccggccattgcgctggctt

SEQ ID NO: 303984 - DNA, 25 bp, Artificial
  Probe
gatattctcaggtccgaatcctcat

SEQ ID NO: 303985 - DNA, 25 bp, Artificial
  Probe
gtctaccatcctctctgaatggata

SEQ ID NO: 303986 - DNA, 25 bp, Artificial
  Probe
tgtattgttcccttttaggtgacga

SEQ ID NO: 303987 - DNA, 25 bp, Artificial
  Probe
attgcgctggcttactaggccccgt

SEQ ID NO: 303988 - DNA, 25 bp, Artificial
  Probe
gcaataggtggcatccccagtgact

SEQ ID NO: 303989 - DNA, 25 bp, Artificial
  Probe
acacctgatggctgatgtgggtaag

SEQ ID NO: 303990 - DNA, 25 bp, Artificial
  Probe
ctctggccagcctggcatcagttca

SEQ ID NO: 303991 - DNA, 25 bp, Artificial
  Probe
tgatcacagcccaggcagcaaggta

SEQ ID NO: 303992 - DNA, 25 bp, Artificial
  Probe
caccacacctgagtttaaatgccag

SEQ ID NO: 303993 - DNA, 25 bp, Artificial
  Probe
caggtttgcccctctacgtcacaaa

SEQ ID NO: 303994 - DNA, 25 bp, Artificial
  Probe
gcaataatgtccagggacaggcaga

SEQ ID NO: 303995 - DNA, 25 bp, Artificial
  Probe
tggaggcaaaccagcggaggacaca

SEQ ID NO: 303996 - DNA, 25 bp, Artificial
  Probe
ccttcggaagctaagggatctggtt

SEQ ID NO: 303997 - DNA, 25 bp, Artificial
  Probe
agtcctaggatcctcatgggagatc

SEQ ID NO: 303998 - DNA, 25 bp, Artificial
  Probe
atttggaggcaaaccagcggaggac

SEQ ID NO: 303999 - DNA, 25 bp, Artificial
  Probe
tgggcagtctgtctgctgccacccg

SEQ ID NO: 304000 - DNA, 25 bp, Artificial
  Probe
caggcagaagccttcggaagctaag

SEQ ID NO: 304001 - DNA, 25 bp, Artificial
  Probe
agctaagggatctggtttggttccg

SEQ ID NO: 304002 - DNA, 25 bp, Artificial
  Probe
ctatgctgtcgtctgggcagtctgt

SEQ ID NO: 304003 - DNA, 25 bp, Artificial
  Probe
accccagatgccttctatgctgtcg

SEQ ID NO: 304004 - DNA, 25 bp, Artificial
  Probe
atgtccagggacaggcagaagcctt

SEQ ID NO: 304005 - DNA, 25 bp, Artificial
  Probe
gggcagtctgtctgctgccacccga

SEQ ID NO: 304006 - DNA, 25 bp, Artificial
  Probe
gtctccataaagcaggaggaaggtt

SEQ ID NO: 304007 - DNA, 25 bp, Artificial
  Probe
gagtcacctggatttggaggcaaac

SEQ ID NO: 304008 - DNA, 25 bp, Artificial
  Probe
gaggacacatctagaagttgcccca

SEQ ID NO: 304009 - DNA, 25 bp, Artificial
  Probe
tcctaggatcctcatgggagatcca

SEQ ID NO: 304010 - DNA, 25 bp, Artificial
  Probe
tggttccgtggaaaatggagccaag

SEQ ID NO: 304011 - DNA, 25 bp, Artificial
  Probe
gagccaagtcctaggatcctcatgg

SEQ ID NO: 304012 - DNA, 25 bp, Artificial
  Probe
tatgctgtcgtctgggcagtctgtc

SEQ ID NO: 304013 - DNA, 25 bp, Artificial
  Probe
agaagccttcggaagctaagggatc

SEQ ID NO: 304014 - DNA, 25 bp, Artificial
  Probe
aaatggagccaagtcctaggatcct

SEQ ID NO: 304015 - DNA, 25 bp, Artificial
  Probe
gcaaaccagcggaggacacatctag

SEQ ID NO: 304016 - DNA, 25 bp, Artificial
  Probe
gatcctcatgggagatccaggagca

SEQ ID NO: 304017 - DNA, 25 bp, Artificial
  Probe
ttcctcccaagctgctctcttgagt

SEQ ID NO: 304018 - DNA, 25 bp, Artificial
  Probe
caagctgctctcttgagtctccata

SEQ ID NO: 304019 - DNA, 25 bp, Artificial
  Probe
agatgccttctatgctgtcgtctgg

SEQ ID NO: 304020 - DNA, 25 bp, Artificial
  Probe
tctgggcagtctgtctgctgccacc

SEQ ID NO: 304021 - DNA, 25 bp, Artificial
  Probe
agtctccataaagcaggaggaaggt

SEQ ID NO: 304022 - DNA, 25 bp, Artificial
  Probe
ggacacatctagaagttgccccaac

SEQ ID NO: 304023 - DNA, 25 bp, Artificial
  Probe
tccataaagcaggaggaaggttccg

SEQ ID NO: 304024 - DNA, 25 bp, Artificial
  Probe
cgacccggggcagaaaagcaataat

SEQ ID NO: 304025 - DNA, 25 bp, Artificial
  Probe
gaagccatggagtcacctggatttg

SEQ ID NO: 304026 - DNA, 25 bp, Artificial
  Probe
ctgctctcttgagtctccataaagc

SEQ ID NO: 304027 - DNA, 25 bp, Artificial
  Probe
gctctcttgagtctccataaagcag

SEQ ID NO: 304028 - DNA, 25 bp, Artificial
  Probe
tttggttccgtggaaaatggagcca

SEQ ID NO: 304029 - DNA, 25 bp, Artificial
  Probe
gaagccttcggaagctaagggatct

SEQ ID NO: 304030 - DNA, 25 bp, Artificial
  Probe
tgtcgtctgggcagtctgtctgctg

SEQ ID NO: 304031 - DNA, 25 bp, Artificial
  Probe
aaagcaataatgtccagggacaggc

SEQ ID NO: 304032 - DNA, 25 bp, Artificial
  Probe
ccaagctgctctcttgagtctccat

SEQ ID NO: 304033 - DNA, 25 bp, Artificial
  Probe
aggcagaagccttcggaagctaagg

SEQ ID NO: 304034 - DNA, 25 bp, Artificial
  Probe
taatgtccagggacaggcagaagcc

SEQ ID NO: 304035 - DNA, 25 bp, Artificial
  Probe
cgtctgggcagtctgtctgctgcca

SEQ ID NO: 304036 - DNA, 25 bp, Artificial
  Probe
ctaagggatctggtttggttccgtg

SEQ ID NO: 304037 - DNA, 25 bp, Artificial
  Probe
ccttctatgctgtcgtctgggcagt

SEQ ID NO: 304038 - DNA, 25 bp, Artificial
  Probe
aagcaataatgtccagggacaggca

SEQ ID NO: 304039 - DNA, 25 bp, Artificial
  Probe
ccagcggaggacacatctagaagtt

SEQ ID NO: 304040 - DNA, 25 bp, Artificial
  Probe
ctgctttgcctttgcctgacaaaaa

SEQ ID NO: 304041 - DNA, 25 bp, Artificial
  Probe
tctctcctcatgtggctatgtgagc

SEQ ID NO: 304042 - DNA, 25 bp, Artificial
  Probe
atactcaacgcgactgctttgcctt

SEQ ID NO: 304043 - DNA, 25 bp, Artificial
  Probe
ctacaccacggttcacaccgtgaag

SEQ ID NO: 304044 - DNA, 25 bp, Artificial
  Probe
gtccgagacagcagataccgctcca

SEQ ID NO: 304045 - DNA, 25 bp, Artificial
  Probe
actgcccgaatgtccgagacagcag

SEQ ID NO: 304046 - DNA, 25 bp, Artificial
  Probe
aggggccttatactcaacgcgactg

SEQ ID NO: 304047 - DNA, 25 bp, Artificial
  Probe
cccgaatgtccgagacagcagatac

SEQ ID NO: 304048 - DNA, 25 bp, Artificial
  Probe
actactgcccgaatgtccgagacag

SEQ ID NO: 304049 - DNA, 25 bp, Artificial
  Probe
ccgaatgtccgagacagcagatacc

SEQ ID NO: 304050 - DNA, 25 bp, Artificial
  Probe
ggccttatactcaacgcgactgctt

SEQ ID NO: 304051 - DNA, 25 bp, Artificial
  Probe
acaccacggttcacaccgtgaagtc

SEQ ID NO: 304052 - DNA, 25 bp, Artificial
  Probe
agaagtttctctcctcatgtggcta

SEQ ID NO: 304053 - DNA, 25 bp, Artificial
  Probe
ccgagacagcagataccgctccaga

SEQ ID NO: 304054 - DNA, 25 bp, Artificial
  Probe
gctatgtgagcacagaccaactgaa

SEQ ID NO: 304055 - DNA, 25 bp, Artificial
  Probe
tcctcatgtggctatgtgagcacag

SEQ ID NO: 304056 - DNA, 25 bp, Artificial
  Probe
cggttcacaccgtgaagtccccaag

SEQ ID NO: 304057 - DNA, 25 bp, Artificial
  Probe
tgtccgagacagcagataccgctcc

SEQ ID NO: 304058 - DNA, 25 bp, Artificial
  Probe
gcagataccgctccagatgctgagc

SEQ ID NO: 304059 - DNA, 25 bp, Artificial
  Probe
aagtttctctcctcatgtggctatg

SEQ ID NO: 304060 - DNA, 25 bp, Artificial
  Probe
atgtggctatgtgagcacagaccaa

SEQ ID NO: 304061 - DNA, 25 bp, Artificial
  Probe
atgtgagcacagaccaactgaacaa

SEQ ID NO: 304062 - DNA, 25 bp, Artificial
  Probe
ttcacaccgtgaagtccccaagggg

SEQ ID NO: 304063 - DNA, 25 bp, Artificial
  Probe
actcaacgcgactgctttgcctttg

SEQ ID NO: 304064 - DNA, 25 bp, Artificial
  Probe
atgctgagcctgtcccagactacac

SEQ ID NO: 304065 - DNA, 25 bp, Artificial
  Probe
gctccagatgctgagcctgtcccag

SEQ ID NO: 304066 - DNA, 25 bp, Artificial
  Probe
gactgctttgcctttgcctgacaaa

SEQ ID NO: 304067 - DNA, 25 bp, Artificial
  Probe
ctatgtgagcacagaccaactgaac

SEQ ID NO: 304068 - DNA, 25 bp, Artificial
  Probe
taccgctccagatgctgagcctgtc

SEQ ID NO: 304069 - DNA, 25 bp, Artificial
  Probe
tgtgagcacagaccaactgaacaaa

SEQ ID NO: 304070 - DNA, 25 bp, Artificial
  Probe
gccttatactcaacgcgactgcttt

SEQ ID NO: 304071 - DNA, 25 bp, Artificial
  Probe
ctactgcccgaatgtccgagacagc

SEQ ID NO: 304072 - DNA, 25 bp, Artificial
  Probe
tgtggctatgtgagcacagaccaac

SEQ ID NO: 304073 - DNA, 25 bp, Artificial
  Probe
ggggccttatactcaacgcgactgc

SEQ ID NO: 304074 - DNA, 25 bp, Artificial
  Probe
cccaaggggccttatactcaacgcg

SEQ ID NO: 304075 - DNA, 25 bp, Artificial
  Probe
acgcgactgctttgcctttgcctga

SEQ ID NO: 304076 - DNA, 25 bp, Artificial
  Probe
cagataccgctccagatgctgagcc

SEQ ID NO: 304077 - DNA, 25 bp, Artificial
  Probe
agatgctgagcctgtcccagactac

SEQ ID NO: 304078 - DNA, 25 bp, Artificial
  Probe
catgtggctatgtgagcacagacca

SEQ ID NO: 304079 - DNA, 25 bp, Artificial
  Probe
agcagataccgctccagatgctgag

SEQ ID NO: 304080 - DNA, 25 bp, Artificial
  Probe
ggttcacaccgtgaagtccccaagg

SEQ ID NO: 304081 - DNA, 25 bp, Artificial
  Probe
ctccagatgctgagcctgtcccaga

SEQ ID NO: 304082 - DNA, 25 bp, Artificial
  Probe
tcacaccgtgaagtccccaaggggc

SEQ ID NO: 304083 - DNA, 25 bp, Artificial
  Probe
gagacagcagataccgctccagatg

SEQ ID NO: 304084 - DNA, 25 bp, Artificial
  Probe
tttctctcctcatgtggctatgtga

SEQ ID NO: 304085 - DNA, 25 bp, Artificial
  Probe
actacaccacggttcacaccgtgaa

SEQ ID NO: 304086 - DNA, 25 bp, Artificial
  Probe
caggagttagacactctccgcaacc

SEQ ID NO: 304087 - DNA, 25 bp, Artificial
  Probe
aggctgccagcctcatcaagggtgt

SEQ ID NO: 304088 - DNA, 25 bp, Artificial
  Probe
gaacagctactttctgacctctttg

SEQ ID NO: 304089 - DNA, 25 bp, Artificial
  Probe
acctactatgaatgcgagcctcggg

SEQ ID NO: 304090 - DNA, 25 bp, Artificial
  Probe
ctacagcaacccagggagctacgac

SEQ ID NO: 304091 - DNA, 25 bp, Artificial
  Probe
ggaagaacagctactttctgacctc

SEQ ID NO: 304092 - DNA, 25 bp, Artificial
  Probe
cgaggcaccggcagaggcagctaca

SEQ ID NO: 304093 - DNA, 25 bp, Artificial
  Probe
ctacatcgagtctggggaagaacag

SEQ ID NO: 304094 - DNA, 25 bp, Artificial
  Probe
cttaagggcccaggaacaccttcat

SEQ ID NO: 304095 - DNA, 25 bp, Artificial
  Probe
ggacatgtgtgagcatgaggcctcc

SEQ ID NO: 304096 - DNA, 25 bp, Artificial
  Probe
ccagggagctacgaccccagggctg

SEQ ID NO: 304097 - DNA, 25 bp, Artificial
  Probe
tcgcacaagggcaagaaggcagtga

SEQ ID NO: 304098 - DNA, 25 bp, Artificial
  Probe
aggcagctacaatcccctgcagtac

SEQ ID NO: 304099 - DNA, 25 bp, Artificial
  Probe
tgcagtaccaagtggcacactgtgg

SEQ ID NO: 304100 - DNA, 25 bp, Artificial
  Probe
ctctccgcctacatcgagtctgggg

SEQ ID NO: 304101 - DNA, 25 bp, Artificial
  Probe
caagaggcgcattatggagacacag

SEQ ID NO: 304102 - DNA, 25 bp, Artificial
  Probe
cagaggcagctacaatcccctgcag

SEQ ID NO: 304103 - DNA, 25 bp, Artificial
  Probe
aggcaccggcagaggcagctacaat

SEQ ID NO: 304104 - DNA, 25 bp, Artificial
  Probe
actttctgacctctttgccatgaag

SEQ ID NO: 304105 - DNA, 25 bp, Artificial
  Probe
gaaggctttgggacctggcatctac

SEQ ID NO: 304106 - DNA, 25 bp, Artificial
  Probe
cacatttggcccagataggaaggct

SEQ ID NO: 304107 - DNA, 25 bp, Artificial
  Probe
cgtggaccagctcacccaggagtta

SEQ ID NO: 304108 - DNA, 25 bp, Artificial
  Probe
tcaaggcccctgtggcggctgctgc

SEQ ID NO: 304109 - DNA, 25 bp, Artificial
  Probe
gcctgaagcccgaagccttaagggc

SEQ ID NO: 304110 - DNA, 25 bp, Artificial
  Probe
accagctcacccaggagttagacac

SEQ ID NO: 304111 - DNA, 25 bp, Artificial
  Probe
tggccagcagccacttgagttctca

SEQ ID NO: 304112 - DNA, 25 bp, Artificial
  Probe
gggcccaggaacaccttcatttcct

SEQ ID NO: 304113 - DNA, 25 bp, Artificial
  Probe
cagccacttgagttctcagggggtc

SEQ ID NO: 304114 - DNA, 25 bp, Artificial
  Probe
tgtgggcagacagcagtgcacctcc

SEQ ID NO: 304115 - DNA, 25 bp, Artificial
  Probe
ggaaaatgagcgtctgcgcagccgc

SEQ ID NO: 304116 - DNA, 25 bp, Artificial
  Probe
cctcacacacatttggcccagatag

SEQ ID NO: 304117 - DNA, 25 bp, Artificial
  Probe
cagggagctacgaccccagggctgt

SEQ ID NO: 304118 - DNA, 25 bp, Artificial
  Probe
tgtgtgagcatgaggcctccattga

SEQ ID NO: 304119 - DNA, 25 bp, Artificial
  Probe
tcacccaggagttagacactctccg

SEQ ID NO: 304120 - DNA, 25 bp, Artificial
  Probe
atagcctggagtaccggctgcgacg

SEQ ID NO: 304121 - DNA, 25 bp, Artificial
  Probe
tgccatgaagccaacgcctgaagcc

SEQ ID NO: 304122 - DNA, 25 bp, Artificial
  Probe
caaagatagcctggagtaccggctg

SEQ ID NO: 304123 - DNA, 25 bp, Artificial
  Probe
gctactttctgacctctttgccatg

SEQ ID NO: 304124 - DNA, 25 bp, Artificial
  Probe
gaagccaacgcctgaagcccgaagc

SEQ ID NO: 304125 - DNA, 25 bp, Artificial
  Probe
acaatcccctgcagtaccaagtggc

SEQ ID NO: 304126 - DNA, 25 bp, Artificial
  Probe
agcatgaggcctccattgacctctc

SEQ ID NO: 304127 - DNA, 25 bp, Artificial
  Probe
gagttagacactctccgcaacctct

SEQ ID NO: 304128 - DNA, 25 bp, Artificial
  Probe
ccaagaggcgcattatggagacaca

SEQ ID NO: 304129 - DNA, 25 bp, Artificial
  Probe
ctcacacacatttggcccagatagg

SEQ ID NO: 304130 - DNA, 25 bp, Artificial
  Probe
gcccagataggaaggctttgggacc

SEQ ID NO: 304131 - DNA, 25 bp, Artificial
  Probe
cacactgtgggcagacagcagtgca

SEQ ID NO: 304132 - DNA, 25 bp, Artificial
  Probe
aagccgcagctgtggcccttgactg

SEQ ID NO: 304133 - DNA, 25 bp, Artificial
  Probe
tcctgggattacattctctcccttg

SEQ ID NO: 304134 - DNA, 25 bp, Artificial
  Probe
atgtgtttatcaagccgcagctgtg

SEQ ID NO: 304135 - DNA, 25 bp, Artificial
  Probe
ctcagcactagagcatggaatttaa

SEQ ID NO: 304136 - DNA, 25 bp, Artificial
  Probe
tgatgtgtttatcaagccgcagctg

SEQ ID NO: 304137 - DNA, 25 bp, Artificial
  Probe
gtattcagccccaatgttttgaact

SEQ ID NO: 304138 - DNA, 25 bp, Artificial
  Probe
agggctacattgtggggacaaatgc

SEQ ID NO: 304139 - DNA, 25 bp, Artificial
  Probe
tgttttgtgaatatggcctttcact

SEQ ID NO: 304140 - DNA, 25 bp, Artificial
  Probe
atctgtgccacctgggagtctgcta

SEQ ID NO: 304141 - DNA, 25 bp, Artificial
  Probe
ggtagggtattcagccccaatgttt

SEQ ID NO: 304142 - DNA, 25 bp, Artificial
  Probe
acacacggtgatgtgtttatcaagc

SEQ ID NO: 304143 - DNA, 25 bp, Artificial
  Probe
taaatgtaaggcttccagcatgtgc

SEQ ID NO: 304144 - DNA, 25 bp, Artificial
  Probe
aaatgcaagcatcatcttggggcag

SEQ ID NO: 304145 - DNA, 25 bp, Artificial
  Probe
agctttggcttgacgggaaacccag

SEQ ID NO: 304146 - DNA, 25 bp, Artificial
  Probe
aaagtctgcagaagggctacattgt

SEQ ID NO: 304147 - DNA, 25 bp, Artificial
  Probe
atgaaccttttaaccccagcagatg

SEQ ID NO: 304148 - DNA, 25 bp, Artificial
  Probe
tctgtggtcctcagcactagagcat

SEQ ID NO: 304149 - DNA, 25 bp, Artificial
  Probe
acacggtgatgtgtttatcaagccg

SEQ ID NO: 304150 - DNA, 25 bp, Artificial
  Probe
atctgttttgtgaatatggcctttc

SEQ ID NO: 304151 - DNA, 25 bp, Artificial
  Probe
ctgactgttgtgagtcctgaggcac

SEQ ID NO: 304152 - DNA, 25 bp, Artificial
  Probe
gggattacattctctcccttgtccc

SEQ ID NO: 304153 - DNA, 25 bp, Artificial
  Probe
tgacgcgaatcagtctttggtggga

SEQ ID NO: 304154 - DNA, 25 bp, Artificial
  Probe
ttttaaccccagcagatgttgtaga

SEQ ID NO: 304155 - DNA, 25 bp, Artificial
  Probe
gcggtggctttgacgcgaatcagtc

SEQ ID NO: 304156 - DNA, 25 bp, Artificial
  Probe
cttgactgactgttgtgagtcctga

SEQ ID NO: 304157 - DNA, 25 bp, Artificial
  Probe
ccagaacagatcaatgcagtctatg

SEQ ID NO: 304158 - DNA, 25 bp, Artificial
  Probe
caaatgcaagcatcatcttggggca

SEQ ID NO: 304159 - DNA, 25 bp, Artificial
  Probe
gacaaatgcaagcatcatcttgggg

SEQ ID NO: 304160 - DNA, 25 bp, Artificial
  Probe
ggctttgacgcgaatcagtctttgg

SEQ ID NO: 304161 - DNA, 25 bp, Artificial
  Probe
tttgtgctatctccagaacagatca

SEQ ID NO: 304162 - DNA, 25 bp, Artificial
  Probe
tatcaagccgcagctgtggcccttg

SEQ ID NO: 304163 - DNA, 25 bp, Artificial
  Probe
atgtaaggcttccagcatgtgcatc

SEQ ID NO: 304164 - DNA, 25 bp, Artificial
  Probe
caagccgcagctgtggcccttgact

SEQ ID NO: 304165 - DNA, 25 bp, Artificial
  Probe
agccccaatgttttgaactggcggg

SEQ ID NO: 304166 - DNA, 25 bp, Artificial
  Probe
ttatcaagccgcagctgtggccctt

SEQ ID NO: 304167 - DNA, 25 bp, Artificial
  Probe
ccccagcagatgttgtagatctgtt

SEQ ID NO: 304168 - DNA, 25 bp, Artificial
  Probe
cagctgtggcccttgactgactgtt

SEQ ID NO: 304169 - DNA, 25 bp, Artificial
  Probe
tgctctgtggtcctcagcactagag

SEQ ID NO: 304170 - DNA, 25 bp, Artificial
  Probe
aacacacggtgatgtgtttatcaag

SEQ ID NO: 304171 - DNA, 25 bp, Artificial
  Probe
caatgttttgaactggcgggcactg

SEQ ID NO: 304172 - DNA, 25 bp, Artificial
  Probe
tgtgctatctccagaacagatcaat

SEQ ID NO: 304173 - DNA, 25 bp, Artificial
  Probe
gactttgtgctatctccagaacaga

SEQ ID NO: 304174 - DNA, 25 bp, Artificial
  Probe
ccttttaaccccagcagatgttgta

SEQ ID NO: 304175 - DNA, 25 bp, Artificial
  Probe
tcagccccaatgttttgaactggcg

SEQ ID NO: 304176 - DNA, 25 bp, Artificial
  Probe
cagaagggctacattgtggggacaa

SEQ ID NO: 304177 - DNA, 25 bp, Artificial
  Probe
ctctgtggtcctcagcactagagca

SEQ ID NO: 304178 - DNA, 25 bp, Artificial
  Probe
attctgaaaggctctacagtcacaa

SEQ ID NO: 304179 - DNA, 25 bp, Artificial
  Probe
tcccatgaatacatggccaaaatag

SEQ ID NO: 304180 - DNA, 25 bp, Artificial
  Probe
ggtcaaacacggacccatggcagtt

SEQ ID NO: 304181 - DNA, 25 bp, Artificial
  Probe
ggaagaaaactgctttccctacaca

SEQ ID NO: 304182 - DNA, 25 bp, Artificial
  Probe
agaagtggccacagcggaaggatcc

SEQ ID NO: 304183 - DNA, 25 bp, Artificial
  Probe
ttctatggtggctgcaatgaagccc

SEQ ID NO: 304184 - DNA, 25 bp, Artificial
  Probe
aggttgtatcttgtagcccgtatgc

SEQ ID NO: 304185 - DNA, 25 bp, Artificial
  Probe
tacacagccacagatgctccatgca

SEQ ID NO: 304186 - DNA, 25 bp, Artificial
  Probe
aacccctttgagctgaccaatcatg

SEQ ID NO: 304187 - DNA, 25 bp, Artificial
  Probe
caatcatgctgttctgcttgtgggc

SEQ ID NO: 304188 - DNA, 25 bp, Artificial
  Probe
gaccccaatcctgagtcctcaggag

SEQ ID NO: 304189 - DNA, 25 bp, Artificial
  Probe
ctctgggtatgctagaagcaagaat

SEQ ID NO: 304190 - DNA, 25 bp, Artificial
  Probe
tatagccatggcagccataccgatt

SEQ ID NO: 304191 - DNA, 25 bp, Artificial
  Probe
ggaaggatcctaaggcccaaacctg

SEQ ID NO: 304192 - DNA, 25 bp, Artificial
  Probe
atctaccaccacactggactgagcg

SEQ ID NO: 304193 - DNA, 25 bp, Artificial
  Probe
ggctacttccggatccgcagaggaa

SEQ ID NO: 304194 - DNA, 25 bp, Artificial
  Probe
cagtcacaaccacaactttgtgaag

SEQ ID NO: 304195 - DNA, 25 bp, Artificial
  Probe
caaatcactctgagaaggtttatgt

SEQ ID NO: 304196 - DNA, 25 bp, Artificial
  Probe
tttaagtttgccagaatcttgggac

SEQ ID NO: 304197 - DNA, 25 bp, Artificial
  Probe
gagaaacgtccgtggcatcaatttt

SEQ ID NO: 304198 - DNA, 25 bp, Artificial
  Probe
attgtaggacctagctcccagtgtc

SEQ ID NO: 304199 - DNA, 25 bp, Artificial
  Probe
ctgccccgataactgatgaaataca

SEQ ID NO: 304200 - DNA, 25 bp, Artificial
  Probe
atatttttgctggtcacctaaaatg

SEQ ID NO: 304201 - DNA, 25 bp, Artificial
  Probe
gccccgataactgatgaaatacagc

SEQ ID NO: 304202 - DNA, 25 bp, Artificial
  Probe
accacctatgaagaatatgagaaac

SEQ ID NO: 304203 - DNA, 25 bp, Artificial
  Probe
gaagaaaactgctttccctacacag

SEQ ID NO: 304204 - DNA, 25 bp, Artificial
  Probe
aagatccagtcactgggttagacta

SEQ ID NO: 304205 - DNA, 25 bp, Artificial
  Probe
gagagtatagccatggcagccatac

SEQ ID NO: 304206 - DNA, 25 bp, Artificial
  Probe
tcttctgagtactactatgtgggtg

SEQ ID NO: 304207 - DNA, 25 bp, Artificial
  Probe
cacagtgggatctaccaccacactg

SEQ ID NO: 304208 - DNA, 25 bp, Artificial
  Probe
tgaagtccacgatgacttcctgcac

SEQ ID NO: 304209 - DNA, 25 bp, Artificial
  Probe
agaccccaatcctgagtcctcagga

SEQ ID NO: 304210 - DNA, 25 bp, Artificial
  Probe
gacttttacaaagcaatatcagaag

SEQ ID NO: 304211 - DNA, 25 bp, Artificial
  Probe
ttagactactggattgtcaagaaca

SEQ ID NO: 304212 - DNA, 25 bp, Artificial
  Probe
cctcaggaggttgtatcttgtagcc

SEQ ID NO: 304213 - DNA, 25 bp, Artificial
  Probe
gaaaggctctacagtcacaaccaca

SEQ ID NO: 304214 - DNA, 25 bp, Artificial
  Probe
cctcattgcaggaaagtatgcccaa

SEQ ID NO: 304215 - DNA, 25 bp, Artificial
  Probe
ctattcttctgagtactactatgtg

SEQ ID NO: 304216 - DNA, 25 bp, Artificial
  Probe
tgtgaatgtggcacaccttggaggt

SEQ ID NO: 304217 - DNA, 25 bp, Artificial
  Probe
atccgcagaggaactgatgaatgtg

SEQ ID NO: 304218 - DNA, 25 bp, Artificial
  Probe
ccatgcaaaccaaaggaaaactgcc

SEQ ID NO: 304219 - DNA, 25 bp, Artificial
  Probe
aacacggacccatggcagttgcctt

SEQ ID NO: 304220 - DNA, 25 bp, Artificial
  Probe
cccaaggttgtgatggtggattccc

SEQ ID NO: 304221 - DNA, 25 bp, Artificial
  Probe
ttgtgatggtggattcccatacctc

SEQ ID NO: 304222 - DNA, 25 bp, Artificial
  Probe
cagccagatgtttcattgttaaaaa

SEQ ID NO: 304223 - DNA, 25 bp, Artificial
  Probe
ccttggaggtctccaggaaaaatat

SEQ ID NO: 304224 - DNA, 25 bp, Artificial
  Probe
cccaactatcaccagacttcggagg

SEQ ID NO: 304225 - DNA, 25 bp, Artificial
  Probe
acccatcaataaaagtgcaccatgg

SEQ ID NO: 304226 - DNA, 25 bp, Artificial
  Probe
accattggcaaagaatgtgaaatgc

SEQ ID NO: 304227 - DNA, 25 bp, Artificial
  Probe
caagttcaccattggcaaagaatgt

SEQ ID NO: 304228 - DNA, 25 bp, Artificial
  Probe
gacctacgagcgtgtaagcaagagg

SEQ ID NO: 304229 - DNA, 25 bp, Artificial
  Probe
gaattacgacgagttcatgaagcgc

SEQ ID NO: 304230 - DNA, 25 bp, Artificial
  Probe
tggcttgagccaccaggctgggctc

SEQ ID NO: 304231 - DNA, 25 bp, Artificial
  Probe
acgagttcatgaagcgcctgggtct

SEQ ID NO: 304232 - DNA, 25 bp, Artificial
  Probe
gaacttcacctggtcccagtcttac

SEQ ID NO: 304233 - DNA, 25 bp, Artificial
  Probe
ggcaacatcatgagcaacaagttca

SEQ ID NO: 304234 - DNA, 25 bp, Artificial
  Probe
tcacagaggtccagcaggatggaga

SEQ ID NO: 304235 - DNA, 25 bp, Artificial
  Probe
cctacgagcgtgtaagcaagagggt

SEQ ID NO: 304236 - DNA, 25 bp, Artificial
  Probe
tcacctggtcccagtcttactctgg

SEQ ID NO: 304237 - DNA, 25 bp, Artificial
  Probe
gcttgagccaccaggctgggctctg

SEQ ID NO: 304238 - DNA, 25 bp, Artificial
  Probe
ccaccatcggggatgtgacctacga

SEQ ID NO: 304239 - DNA, 25 bp, Artificial
  Probe
gggctctgagggactgcaacccatc

SEQ ID NO: 304240 - DNA, 25 bp, Artificial
  Probe
ggactgcaacccatcaataaaagtg

SEQ ID NO: 304241 - DNA, 25 bp, Artificial
  Probe
ccagtcttactctgggggcaacatc

SEQ ID NO: 304242 - DNA, 25 bp, Artificial
  Probe
ggatgtgacctacgagcgtgtaagc

SEQ ID NO: 304243 - DNA, 25 bp, Artificial
  Probe
aagttcaaggcaaccgtgaagatgg

SEQ ID NO: 304244 - DNA, 25 bp, Artificial
  Probe
gcaacatcatgagcaacaagttcac

SEQ ID NO: 304245 - DNA, 25 bp, Artificial
  Probe
catgagcaacaagttcaccattggc

SEQ ID NO: 304246 - DNA, 25 bp, Artificial
  Probe
tcaccattggcaaagaatgtgaaat

SEQ ID NO: 304247 - DNA, 25 bp, Artificial
  Probe
aggtccagcaggatggagagaactt

SEQ ID NO: 304248 - DNA, 25 bp, Artificial
  Probe
ggtcccagtcttactctgggggcaa

SEQ ID NO: 304249 - DNA, 25 bp, Artificial
  Probe
agaattacgacgagttcatgaagcg

SEQ ID NO: 304250 - DNA, 25 bp, Artificial
  Probe
tctgggggcaacatcatgagcaaca

SEQ ID NO: 304251 - DNA, 25 bp, Artificial
  Probe
actatggccttcaccggcaaatacg

SEQ ID NO: 304252 - DNA, 25 bp, Artificial
  Probe
atggagagaacttcacctggtccca

SEQ ID NO: 304253 - DNA, 25 bp, Artificial
  Probe
atgtgacctacgagcgtgtaagcaa

SEQ ID NO: 304254 - DNA, 25 bp, Artificial
  Probe
agatctccaccatcggggatgtgac

SEQ ID NO: 304255 - DNA, 25 bp, Artificial
  Probe
gactgcaacccatcaataaaagtgc

SEQ ID NO: 304256 - DNA, 25 bp, Artificial
  Probe
cacctggtcccagtcttactctggg

SEQ ID NO: 304257 - DNA, 25 bp, Artificial
  Probe
catcggggatgtgacctacgagcgt

SEQ ID NO: 304258 - DNA, 25 bp, Artificial
  Probe
acgtaacttcaagatcatcacagag

SEQ ID NO: 304259 - DNA, 25 bp, Artificial
  Probe
ttggtggagatctccaccatcgggg

SEQ ID NO: 304260 - DNA, 25 bp, Artificial
  Probe
tgagggactgcaacccatcaataaa

SEQ ID NO: 304261 - DNA, 25 bp, Artificial
  Probe
aaagtgcaccatggatcaccactaa

SEQ ID NO: 304262 - DNA, 25 bp, Artificial
  Probe
gccttcaccggcaaatacgaatttg

SEQ ID NO: 304263 - DNA, 25 bp, Artificial
  Probe
caccggcaaatacgaatttgaaagt

SEQ ID NO: 304264 - DNA, 25 bp, Artificial
  Probe
gtccagcaggatggagagaacttca

SEQ ID NO: 304265 - DNA, 25 bp, Artificial
  Probe
tggtggcagacttccccaactatca

SEQ ID NO: 304266 - DNA, 25 bp, Artificial
  Probe
gaagttcaaggcaaccgtgaagatg

SEQ ID NO: 304267 - DNA, 25 bp, Artificial
  Probe
tatcaccagacttcggaggtcgtgg

SEQ ID NO: 304268 - DNA, 25 bp, Artificial
  Probe
actctgggggcaacatcatgagcaa

SEQ ID NO: 304269 - DNA, 25 bp, Artificial
  Probe
caataaaagtgcaccatggatcacc

SEQ ID NO: 304270 - DNA, 25 bp, Artificial
  Probe
caggatgaaccaggactgcttctga

SEQ ID NO: 304271 - DNA, 25 bp, Artificial
  Probe
gcgagacctcatcaggatgaaccag

SEQ ID NO: 304272 - DNA, 25 bp, Artificial
  Probe
tgaagtggcgagacctcatcaggat

SEQ ID NO: 304273 - DNA, 25 bp, Artificial
  Probe
tggcaatgcctgagccggacctcct

SEQ ID NO: 304274 - DNA, 25 bp, Artificial
  Probe
cgagacctcatcaggatgaaccagg

SEQ ID NO: 304275 - DNA, 25 bp, Artificial
  Probe
gagacctcatcaggatgaaccagga

SEQ ID NO: 304276 - DNA, 25 bp, Artificial
  Probe
gcaatgcctgagccggacctcctcc

SEQ ID NO: 304277 - DNA, 25 bp, Artificial
  Probe
gatgaaccaggactgcttctgagcg

SEQ ID NO: 304278 - DNA, 25 bp, Artificial
  Probe
gacccctggcaatgcctgagccgga

SEQ ID NO: 304279 - DNA, 25 bp, Artificial
  Probe
cctgaagtggcgagacctcatcagg

SEQ ID NO: 304280 - DNA, 25 bp, Artificial
  Probe
acctccctccactgtggaaagccaa

SEQ ID NO: 304281 - DNA, 25 bp, Artificial
  Probe
aaccaggactgcttctgagcgctcg

SEQ ID NO: 304282 - DNA, 25 bp, Artificial
  Probe
caacctcccctgaagtggcgagacc

SEQ ID NO: 304283 - DNA, 25 bp, Artificial
  Probe
ccaggactgcttctgagcgctcgta

SEQ ID NO: 304284 - DNA, 25 bp, Artificial
  Probe
tggaaagccaacctcccctgaagtg

SEQ ID NO: 304285 - DNA, 25 bp, Artificial
  Probe
gaaccaggactgcttctgagcgctc

SEQ ID NO: 304286 - DNA, 25 bp, Artificial
  Probe
ctccactgtggaaagccaacctccc

SEQ ID NO: 304287 - DNA, 25 bp, Artificial
  Probe
gactgcttctgagcgctcgtatcac

SEQ ID NO: 304288 - DNA, 25 bp, Artificial
  Probe
tgagccggacctcctccctcacctc

SEQ ID NO: 304289 - DNA, 25 bp, Artificial
  Probe
gagacccctggcaatgcctgagccg

SEQ ID NO: 304290 - DNA, 25 bp, Artificial
  Probe
accaggactgcttctgagcgctcgt

SEQ ID NO: 304291 - DNA, 25 bp, Artificial
  Probe
ctggcaatgcctgagccggacctcc

SEQ ID NO: 304292 - DNA, 25 bp, Artificial
  Probe
tgaaccaggactgcttctgagcgct

SEQ ID NO: 304293 - DNA, 25 bp, Artificial
  Probe
atgaaccaggactgcttctgagcgc

SEQ ID NO: 304294 - DNA, 25 bp, Artificial
  Probe
tgcctgagccggacctcctccctca

SEQ ID NO: 304295 - DNA, 25 bp, Artificial
  Probe
caggactgcttctgagcgctcgtat

SEQ ID NO: 304296 - DNA, 25 bp, Artificial
  Probe
ggactgcttctgagcgctcgtatca

SEQ ID NO: 304297 - DNA, 25 bp, Artificial
  Probe
aagtggcgagacctcatcaggatga

SEQ ID NO: 304298 - DNA, 25 bp, Artificial
  Probe
acccctggcaatgcctgagccggac

SEQ ID NO: 304299 - DNA, 25 bp, Artificial
  Probe
gtggcgagacctcatcaggatgaac

SEQ ID NO: 304300 - DNA, 25 bp, Artificial
  Probe
ggagacccctggcaatgcctgagcc

SEQ ID NO: 304301 - DNA, 25 bp, Artificial
  Probe
agtggcgagacctcatcaggatgaa

SEQ ID NO: 304302 - DNA, 25 bp, Artificial
  Probe
ggcaatgcctgagccggacctcctc

SEQ ID NO: 304303 - DNA, 25 bp, Artificial
  Probe
atcaggatgaaccaggactgcttct

SEQ ID NO: 304304 - DNA, 25 bp, Artificial
  Probe
acctcccctgaagtggcgagacctc

SEQ ID NO: 304305 - DNA, 25 bp, Artificial
  Probe
aggactgcttctgagcgctcgtatc

SEQ ID NO: 304306 - DNA, 25 bp, Artificial
  Probe
aggatgaaccaggactgcttctgag

SEQ ID NO: 304307 - DNA, 25 bp, Artificial
  Probe
tggcgagacctcatcaggatgaacc

SEQ ID NO: 304308 - DNA, 25 bp, Artificial
  Probe
actgtggaaagccaacctcccctga

SEQ ID NO: 304309 - DNA, 25 bp, Artificial
  Probe
aggagacccctggcaatgcctgagc

SEQ ID NO: 304310 - DNA, 25 bp, Artificial
  Probe
ggcgagacctcatcaggatgaacca

SEQ ID NO: 304311 - DNA, 25 bp, Artificial
  Probe
tgtggaaagccaacctcccctgaag

SEQ ID NO: 304312 - DNA, 25 bp, Artificial
  Probe
ccactgtggaaagccaacctcccct

SEQ ID NO: 304313 - DNA, 25 bp, Artificial
  Probe
agacccctggcaatgcctgagccgg

SEQ ID NO: 304314 - DNA, 25 bp, Artificial
  Probe
ggatgaaccaggactgcttctgagc

SEQ ID NO: 304315 - DNA, 25 bp, Artificial
  Probe
cccctgaagtggcgagacctcatca

SEQ ID NO: 304316 - DNA, 25 bp, Artificial
  Probe
gaagcactttccagaaagtttattt

SEQ ID NO: 304317 - DNA, 25 bp, Artificial
  Probe
tctggcagcagatggaaagcctcgg

SEQ ID NO: 304318 - DNA, 25 bp, Artificial
  Probe
ccttggagcaagtgaggaagattca

SEQ ID NO: 304319 - DNA, 25 bp, Artificial
  Probe
ttcctctaccaaggtctcctgcagg

SEQ ID NO: 304320 - DNA, 25 bp, Artificial
  Probe
ttgttctcctgcttggagcagagag

SEQ ID NO: 304321 - DNA, 25 bp, Artificial
  Probe
gcaggcatttcctctgagctggccc

SEQ ID NO: 304322 - DNA, 25 bp, Artificial
  Probe
ggccctggaattgaccgattctttt

SEQ ID NO: 304323 - DNA, 25 bp, Artificial
  Probe
agtattgattcctgccgctgctcca

SEQ ID NO: 304324 - DNA, 25 bp, Artificial
  Probe
tcaaccaggttgtaggttttcctga

SEQ ID NO: 304325 - DNA, 25 bp, Artificial
  Probe
tggtggtacccaagaaatcacattg

SEQ ID NO: 304326 - DNA, 25 bp, Artificial
  Probe
tggatgtcgacaactttgccaccac

SEQ ID NO: 304327 - DNA, 25 bp, Artificial
  Probe
atagaggaaggctgacctgtctacc

SEQ ID NO: 304328 - DNA, 25 bp, Artificial
  Probe
tttaaacagcagtgttcccaaactg

SEQ ID NO: 304329 - DNA, 25 bp, Artificial
  Probe
gacaaagtgcctgagccaactgcac

SEQ ID NO: 304330 - DNA, 25 bp, Artificial
  Probe
gagccaactgcacagcgggctcttc

SEQ ID NO: 304331 - DNA, 25 bp, Artificial
  Probe
tgggtatccccaaggcttccctgag

SEQ ID NO: 304332 - DNA, 25 bp, Artificial
  Probe
ttcacttctgccttccagcgtcggg

SEQ ID NO: 304333 - DNA, 25 bp, Artificial
  Probe
tcatccggaggagctggtgctgttt

SEQ ID NO: 304334 - DNA, 25 bp, Artificial
  Probe
aaaggcacaaggaatcctgtgggga

SEQ ID NO: 304335 - DNA, 25 bp, Artificial
  Probe
tccacttctgagttttgttctcctg

SEQ ID NO: 304336 - DNA, 25 bp, Artificial
  Probe
aacagtggcgccaggtttggccctg

SEQ ID NO: 304337 - DNA, 25 bp, Artificial
  Probe
aggcaccccattctgtggtggtacc

SEQ ID NO: 304338 - DNA, 25 bp, Artificial
  Probe
acagcgggctcttcctctaccaagg

SEQ ID NO: 304339 - DNA, 25 bp, Artificial
  Probe
cttctgccttccagcgtcgggcagg

SEQ ID NO: 304340 - DNA, 25 bp, Artificial
  Probe
ccaccatctggcagcagatggaaag

SEQ ID NO: 304341 - DNA, 25 bp, Artificial
  Probe
agagaaggctcttgtgtcctcctgt

SEQ ID NO: 304342 - DNA, 25 bp, Artificial
  Probe
ggggacaagacatccctgtttaata

SEQ ID NO: 304343 - DNA, 25 bp, Artificial
  Probe
tggagacagctcaccacgctctgca

SEQ ID NO: 304344 - DNA, 25 bp, Artificial
  Probe
ttttagcgcttgctggcctagaact

SEQ ID NO: 304345 - DNA, 25 bp, Artificial
  Probe
aagattcaggccaggaacactgaac

SEQ ID NO: 304346 - DNA, 25 bp, Artificial
  Probe
ttcctgaccccgtaggaatgaagtc

SEQ ID NO: 304347 - DNA, 25 bp, Artificial
  Probe
aaggcttccctgagcagctgctcca

SEQ ID NO: 304348 - DNA, 25 bp, Artificial
  Probe
ggacaagaggccattcccctgctca

SEQ ID NO: 304349 - DNA, 25 bp, Artificial
  Probe
cttttttagcgcttgctggcctaga

SEQ ID NO: 304350 - DNA, 25 bp, Artificial
  Probe
gaccccacttgtcactgtaaccaag

SEQ ID NO: 304351 - DNA, 25 bp, Artificial
  Probe
tgaccccgtaggaatgaagtcccta

SEQ ID NO: 304352 - DNA, 25 bp, Artificial
  Probe
ttgtgtcctcctgtggagcagggaa

SEQ ID NO: 304353 - DNA, 25 bp, Artificial
  Probe
cccaccttggatatgcttcacctgg

SEQ ID NO: 304354 - DNA, 25 bp, Artificial
  Probe
gaatgaagtccctaaagaaacagtg

SEQ ID NO: 304355 - DNA, 25 bp, Artificial
  Probe
gcctttgccccgaagctttctgctt

SEQ ID NO: 304356 - DNA, 25 bp, Artificial
  Probe
tctcaggggcccaggcagcatctgg

SEQ ID NO: 304357 - DNA, 25 bp, Artificial
  Probe
cttgcctaggcctgcgcagaagcac

SEQ ID NO: 304358 - DNA, 25 bp, Artificial
  Probe
caggaggagtcctggtcacttcata

SEQ ID NO: 304359 - DNA, 25 bp, Artificial
  Probe
taaataccgagtattgattcctgcc

SEQ ID NO: 304360 - DNA, 25 bp, Artificial
  Probe
gagctctaagcttctagatccttct

SEQ ID NO: 304361 - DNA, 25 bp, Artificial
  Probe
aaatggagctctaagcttctagatc

SEQ ID NO: 304362 - DNA, 25 bp, Artificial
  Probe
catgttagtgtgttgtctgtttcct

SEQ ID NO: 304363 - DNA, 25 bp, Artificial
  Probe
tagtgtgttgtctgtttcctacaag

SEQ ID NO: 304364 - DNA, 25 bp, Artificial
  Probe
tctgtttcctacaagttaatccagt

SEQ ID NO: 304365 - DNA, 25 bp, Artificial
  Probe
tgtgttgtctgtttcctacaagtta

SEQ ID NO: 304366 - DNA, 25 bp, Artificial
  Probe
ttagtgtgttgtctgtttcctacaa

SEQ ID NO: 304367 - DNA, 25 bp, Artificial
  Probe
tgtttcctacaagttaatccagttg

SEQ ID NO: 304368 - DNA, 25 bp, Artificial
  Probe
gttagtgtgttgtctgtttcctaca

SEQ ID NO: 304369 - DNA, 25 bp, Artificial
  Probe
gtttcctacaagttaatccagttgc

SEQ ID NO: 304370 - DNA, 25 bp, Artificial
  Probe
ttgtctgtttcctacaagttaatcc

SEQ ID NO: 304371 - DNA, 25 bp, Artificial
  Probe
tttcccatgtttgatggtgaagtca

SEQ ID NO: 304372 - DNA, 25 bp, Artificial
  Probe
gttgtctgtttcctacaagttaatc

SEQ ID NO: 304373 - DNA, 25 bp, Artificial
  Probe
gaagtcatgttagtgtgttgtctgt

SEQ ID NO: 304374 - DNA, 25 bp, Artificial
  Probe
atgttagtgtgttgtctgtttccta

SEQ ID NO: 304375 - DNA, 25 bp, Artificial
  Probe
gtgttgtctgtttcctacaagttaa

SEQ ID NO: 304376 - DNA, 25 bp, Artificial
  Probe
cacatttcccatgtttgatggtgaa

SEQ ID NO: 304377 - DNA, 25 bp, Artificial
  Probe
atttcccatgtttgatggtgaagtc

SEQ ID NO: 304378 - DNA, 25 bp, Artificial
  Probe
tgttgtctgtttcctacaagttaat

SEQ ID NO: 304379 - DNA, 25 bp, Artificial
  Probe
tcccatgtttgatggtgaagtcatg

SEQ ID NO: 304380 - DNA, 25 bp, Artificial
  Probe
tcatgttagtgtgttgtctgtttcc

SEQ ID NO: 304381 - DNA, 25 bp, Artificial
  Probe
gtgtgttgtctgtttcctacaagtt

SEQ ID NO: 304382 - DNA, 25 bp, Artificial
  Probe
acatttcccatgtttgatggtgaag

SEQ ID NO: 304383 - DNA, 25 bp, Artificial
  Probe
catttcccatgtttgatggtgaagt

SEQ ID NO: 304384 - DNA, 25 bp, Artificial
  Probe
ttcccatgtttgatggtgaagtcat

SEQ ID NO: 304385 - DNA, 25 bp, Artificial
  Probe
tttcctacaagttaatccagttgca

SEQ ID NO: 304386 - DNA, 25 bp, Artificial
  Probe
aagtcatgttagtgtgttgtctgtt

SEQ ID NO: 304387 - DNA, 25 bp, Artificial
  Probe
gtctgtttcctacaagttaatccag

SEQ ID NO: 304388 - DNA, 25 bp, Artificial
  Probe
agtgtgttgtctgtttcctacaagt

SEQ ID NO: 304389 - DNA, 25 bp, Artificial
  Probe
tgttagtgtgttgtctgtttcctac

SEQ ID NO: 304390 - DNA, 25 bp, Artificial
  Probe
agtcatgttagtgtgttgtctgttt

SEQ ID NO: 304391 - DNA, 25 bp, Artificial
  Probe
ctgtttcctacaagttaatccagtt

SEQ ID NO: 304392 - DNA, 25 bp, Artificial
  Probe
tgtctgtttcctacaagttaatcca

SEQ ID NO: 304393 - DNA, 25 bp, Artificial
  Probe
gtcatgttagtgtgttgtctgtttc

SEQ ID NO: 304394 - DNA, 25 bp, Artificial
  Probe
cccatgtttgatggtgaagtcatgt

SEQ ID NO: 304395 - DNA, 25 bp, Artificial
  Probe
agcacgtcagatacctcccatcgag

SEQ ID NO: 304396 - DNA, 25 bp, Artificial
  Probe
attttgcttgcctttgggctgaggc

SEQ ID NO: 304397 - DNA, 25 bp, Artificial
  Probe
ggtagccttgagagcccctaggttc

SEQ ID NO: 304398 - DNA, 25 bp, Artificial
  Probe
aacagcctcagcacgtcagatacct

SEQ ID NO: 304399 - DNA, 25 bp, Artificial
  Probe
ctaggttcctcaacacggaccttct

SEQ ID NO: 304400 - DNA, 25 bp, Artificial
  Probe
ccttgaccatgacattctaatgctg

SEQ ID NO: 304401 - DNA, 25 bp, Artificial
  Probe
cacgtgagatgtctgtgtggcttgt

SEQ ID NO: 304402 - DNA, 25 bp, Artificial
  Probe
gaagaaccccaaaagacagcatcac

SEQ ID NO: 304403 - DNA, 25 bp, Artificial
  Probe
ccaaggctgagacaatccgcaacct

SEQ ID NO: 304404 - DNA, 25 bp, Artificial
  Probe
cctgccgccggtaccacgtgagatg

SEQ ID NO: 304405 - DNA, 25 bp, Artificial
  Probe
tggttcctgatggaaatatgcttcc

SEQ ID NO: 304406 - DNA, 25 bp, Artificial
  Probe
caagaagactcagtgactggagccc

SEQ ID NO: 304407 - DNA, 25 bp, Artificial
  Probe
acgtcagatacctcccatcgaggaa

SEQ ID NO: 304408 - DNA, 25 bp, Artificial
  Probe
ctgactgagcggtagccttgagagc

SEQ ID NO: 304409 - DNA, 25 bp, Artificial
  Probe
cttgagagcccctaggttcctcaac

SEQ ID NO: 304410 - DNA, 25 bp, Artificial
  Probe
attagtattttgcttgcctttgggc

SEQ ID NO: 304411 - DNA, 25 bp, Artificial
  Probe
aggccaaggctgagacaatccgcaa

SEQ ID NO: 304412 - DNA, 25 bp, Artificial
  Probe
tggagccctgtctggttccctcctt

SEQ ID NO: 304413 - DNA, 25 bp, Artificial
  Probe
tgtcccaggaactggtgatctacat

SEQ ID NO: 304414 - DNA, 25 bp, Artificial
  Probe
tcgaggaaccccaagtgaagatgag

SEQ ID NO: 304415 - DNA, 25 bp, Artificial
  Probe
tgactgagcggtagccttgagagcc

SEQ ID NO: 304416 - DNA, 25 bp, Artificial
  Probe
tgagcggtagccttgagagccccta

SEQ ID NO: 304417 - DNA, 25 bp, Artificial
  Probe
gtgaagaaccccaaaagacagcatc

SEQ ID NO: 304418 - DNA, 25 bp, Artificial
  Probe
tcccagcagggtgaagaaccccaaa

SEQ ID NO: 304419 - DNA, 25 bp, Artificial
  Probe
cggcctcctgtgcagggacgcagca

SEQ ID NO: 304420 - DNA, 25 bp, Artificial
  Probe
accccaagtgaagatgaggccaagg

SEQ ID NO: 304421 - DNA, 25 bp, Artificial
  Probe
gctgtctgactgagcggtagccttg

SEQ ID NO: 304422 - DNA, 25 bp, Artificial
  Probe
tgactaacagcctcagcacgtcaga

SEQ ID NO: 304423 - DNA, 25 bp, Artificial
  Probe
cccaggaactggtgatctacattcc

SEQ ID NO: 304424 - DNA, 25 bp, Artificial
  Probe
taaatacatctgtcccaggaactgg

SEQ ID NO: 304425 - DNA, 25 bp, Artificial
  Probe
tccgactagcctctatccaggctgg

SEQ ID NO: 304426 - DNA, 25 bp, Artificial
  Probe
tgccagtctcagttcacatacccgg

SEQ ID NO: 304427 - DNA, 25 bp, Artificial
  Probe
ctcccagcagggtgaagaaccccaa

SEQ ID NO: 304428 - DNA, 25 bp, Artificial
  Probe
tgactggagccctgtctggttccct

SEQ ID NO: 304429 - DNA, 25 bp, Artificial
  Probe
gcttcctaaatacatctgtcccagg

SEQ ID NO: 304430 - DNA, 25 bp, Artificial
  Probe
tcccatcgaggaaccccaagtgaag

SEQ ID NO: 304431 - DNA, 25 bp, Artificial
  Probe
gagcccctaggttcctcaacacgga

SEQ ID NO: 304432 - DNA, 25 bp, Artificial
  Probe
ctctatccaggctggaggacaggag

SEQ ID NO: 304433 - DNA, 25 bp, Artificial
  Probe
aggttcctcaacacggaccttctag

SEQ ID NO: 304434 - DNA, 25 bp, Artificial
  Probe
ctaaatacatctgtcccaggaactg

SEQ ID NO: 304435 - DNA, 25 bp, Artificial
  Probe
atacccggcctcctgtgcagggacg

SEQ ID NO: 304436 - DNA, 25 bp, Artificial
  Probe
ctcagtgactggagccctgtctggt

SEQ ID NO: 304437 - DNA, 25 bp, Artificial
  Probe
ccttctcagccttggttcctgatgg

SEQ ID NO: 304438 - DNA, 25 bp, Artificial
  Probe
gacagacaaggcatcactacatcca

SEQ ID NO: 304439 - DNA, 25 bp, Artificial
  Probe
tcctcaacacggaccttctagacag

SEQ ID NO: 304440 - DNA, 25 bp, Artificial
  Probe
ctcccatcgaggaaccccaagtgaa

SEQ ID NO: 304441 - DNA, 25 bp, Artificial
  Probe
ctgtcacacagttgaatgttttgtt

SEQ ID NO: 304442 - DNA, 25 bp, Artificial
  Probe
acttttctatgttcaggatgtctcc

SEQ ID NO: 304443 - DNA, 25 bp, Artificial
  Probe
gtctccatatgtctatatgtaggag

SEQ ID NO: 304444 - DNA, 25 bp, Artificial
  Probe
cttttctatgttcaggatgtctcca

SEQ ID NO: 304445 - DNA, 25 bp, Artificial
  Probe
ttagagcactgacaaacttaatcag

SEQ ID NO: 304446 - DNA, 25 bp, Artificial
  Probe
cactcctgtgtcatttcctgtttct

SEQ ID NO: 304447 - DNA, 25 bp, Artificial
  Probe
atatgtctatatgtaggagttctca

SEQ ID NO: 304448 - DNA, 25 bp, Artificial
  Probe
ttctatgttcaggatgtctccatat

SEQ ID NO: 304449 - DNA, 25 bp, Artificial
  Probe
atgttcaggatgtctccatatgtct

SEQ ID NO: 304450 - DNA, 25 bp, Artificial
  Probe
ttaatttcattgaatttatggttca

SEQ ID NO: 304451 - DNA, 25 bp, Artificial
  Probe
tgtctccatatgtctatatgtagga

SEQ ID NO: 304452 - DNA, 25 bp, Artificial
  Probe
ttttctatgttcaggatgtctccat

SEQ ID NO: 304453 - DNA, 25 bp, Artificial
  Probe
atgtctccatatgtctatatgtagg

SEQ ID NO: 304454 - DNA, 25 bp, Artificial
  Probe
ttattattgtagacatgatgctcct

SEQ ID NO: 304455 - DNA, 25 bp, Artificial
  Probe
ctccatatgtctatatgtaggagtt

SEQ ID NO: 304456 - DNA, 25 bp, Artificial
  Probe
tgtttagagcactgacaaacttaat

SEQ ID NO: 304457 - DNA, 25 bp, Artificial
  Probe
tctatgttcaggatgtctccatatg

SEQ ID NO: 304458 - DNA, 25 bp, Artificial
  Probe
ttgtttagagcactgacaaacttaa

SEQ ID NO: 304459 - DNA, 25 bp, Artificial
  Probe
tttctatgttcaggatgtctccata

SEQ ID NO: 304460 - DNA, 25 bp, Artificial
  Probe
tccatatgtctatatgtaggagttc

SEQ ID NO: 304461 - DNA, 25 bp, Artificial
  Probe
catatgtctatatgtaggagttctc

SEQ ID NO: 304462 - DNA, 25 bp, Artificial
  Probe
ctatgttcaggatgtctccatatgt

SEQ ID NO: 304463 - DNA, 25 bp, Artificial
  Probe
tcctgtcacacagttgaatgttttg

SEQ ID NO: 304464 - DNA, 25 bp, Artificial
  Probe
atatcatttttatagtgagaaaaac

SEQ ID NO: 304465 - DNA, 25 bp, Artificial
  Probe
ttaacttttctatgttcaggatgtc

SEQ ID NO: 304466 - DNA, 25 bp, Artificial
  Probe
cctgtcacacagttgaatgttttgt

SEQ ID NO: 304467 - DNA, 25 bp, Artificial
  Probe
tcaggatgtctccatatgtctatat

SEQ ID NO: 304468 - DNA, 25 bp, Artificial
  Probe
gtttagagcactgacaaacttaatc

SEQ ID NO: 304469 - DNA, 25 bp, Artificial
  Probe
ggatgtctccatatgtctatatgta

SEQ ID NO: 304470 - DNA, 25 bp, Artificial
  Probe
tctccatatgtctatatgtaggagt

SEQ ID NO: 304471 - DNA, 25 bp, Artificial
  Probe
gatgtctccatatgtctatatgtag

SEQ ID NO: 304472 - DNA, 25 bp, Artificial
  Probe
gttcaggatgtctccatatgtctat

SEQ ID NO: 304473 - DNA, 25 bp, Artificial
  Probe
tttgtttagagcactgacaaactta

SEQ ID NO: 304474 - DNA, 25 bp, Artificial
  Probe
ccatatgtctatatgtaggagttct

SEQ ID NO: 304475 - DNA, 25 bp, Artificial
  Probe
taacttttctatgttcaggatgtct

SEQ ID NO: 304476 - DNA, 25 bp, Artificial
  Probe
tgtcacacagttgaatgttttgttt

SEQ ID NO: 304477 - DNA, 25 bp, Artificial
  Probe
tatgttcaggatgtctccatatgtc

SEQ ID NO: 304478 - DNA, 25 bp, Artificial
  Probe
tgttcaggatgtctccatatgtcta

SEQ ID NO: 304479 - DNA, 25 bp, Artificial
  Probe
ttcaggatgtctccatatgtctata

SEQ ID NO: 304480 - DNA, 25 bp, Artificial
  Probe
ttctcaaatattattattattgtag

SEQ ID NO: 304481 - DNA, 25 bp, Artificial
  Probe
caggatgtctccatatgtctatatg

SEQ ID NO: 304482 - DNA, 25 bp, Artificial
  Probe
tgaaaagatacattctcattaagcc

SEQ ID NO: 304483 - DNA, 25 bp, Artificial
  Probe
aggatgtctccatatgtctatatgt

SEQ ID NO: 304484 - DNA, 25 bp, Artificial
  Probe
aacttttctatgttcaggatgtctc

SEQ ID NO: 304485 - DNA, 25 bp, Artificial
  Probe
ttctcactcctgtgtcatttcctgt

SEQ ID NO: 304486 - DNA, 25 bp, Artificial
  Probe
gttaacttttctatgttcaggatgt

SEQ ID NO: 304487 - DNA, 25 bp, Artificial
  Probe
tttgtaaagctgtcatctgaccaag

SEQ ID NO: 304488 - DNA, 25 bp, Artificial
  Probe
accttccagtgctttgtgtattgtt

SEQ ID NO: 304489 - DNA, 25 bp, Artificial
  Probe
ggaatttaactgactccttaaagca

SEQ ID NO: 304490 - DNA, 25 bp, Artificial
  Probe
agatggagtccagagagcccccttg

SEQ ID NO: 304491 - DNA, 25 bp, Artificial
  Probe
tgactccttaaagcagagagtatcc

SEQ ID NO: 304492 - DNA, 25 bp, Artificial
  Probe
cccttccaaggagagaaagatggag

SEQ ID NO: 304493 - DNA, 25 bp, Artificial
  Probe
tctcctgtgctgatgccagggacag

SEQ ID NO: 304494 - DNA, 25 bp, Artificial
  Probe
gcatttgcagtggatattgggaacc

SEQ ID NO: 304495 - DNA, 25 bp, Artificial
  Probe
agagagcccccttgttaatgcccct

SEQ ID NO: 304496 - DNA, 25 bp, Artificial
  Probe
tgtaaagctgtcatctgaccaaggt

SEQ ID NO: 304497 - DNA, 25 bp, Artificial
  Probe
ggatattgggaaccttccagtgctt

SEQ ID NO: 304498 - DNA, 25 bp, Artificial
  Probe
attgggaaccttccagtgctttgtg

SEQ ID NO: 304499 - DNA, 25 bp, Artificial
  Probe
gactccttaaagcagagagtatccc

SEQ ID NO: 304500 - DNA, 25 bp, Artificial
  Probe
gaatttaactgactccttaaagcag

SEQ ID NO: 304501 - DNA, 25 bp, Artificial
  Probe
ttaactgactccttaaagcagagag

SEQ ID NO: 304502 - DNA, 25 bp, Artificial
  Probe
ctgtcatctgaccaaggtctcctgt

SEQ ID NO: 304503 - DNA, 25 bp, Artificial
  Probe
cccgaccgggacaagtgtgcacatc

SEQ ID NO: 304504 - DNA, 25 bp, Artificial
  Probe
ccgaccgggacaagtgtgcacatct

SEQ ID NO: 304505 - DNA, 25 bp, Artificial
  Probe
tctgaccaaggtctcctgtgctgat

SEQ ID NO: 304506 - DNA, 25 bp, Artificial
  Probe
agctgtcatctgaccaaggtctcct

SEQ ID NO: 304507 - DNA, 25 bp, Artificial
  Probe
aaagctgtcatctgaccaaggtctc

SEQ ID NO: 304508 - DNA, 25 bp, Artificial
  Probe
tgtttgtaaagctgtcatctgacca

SEQ ID NO: 304509 - DNA, 25 bp, Artificial
  Probe
taaagctgtcatctgaccaaggtct

SEQ ID NO: 304510 - DNA, 25 bp, Artificial
  Probe
ctctcttcctgatgccagtggctgg

SEQ ID NO: 304511 - DNA, 25 bp, Artificial
  Probe
gatattgggaaccttccagtgcttt

SEQ ID NO: 304512 - DNA, 25 bp, Artificial
  Probe
ttcgactctcttcctgatgccagtg

SEQ ID NO: 304513 - DNA, 25 bp, Artificial
  Probe
agtttgagagacagtgagtgccccg

SEQ ID NO: 304514 - DNA, 25 bp, Artificial
  Probe
gaccaaggtctcctgtgctgatgcc

SEQ ID NO: 304515 - DNA, 25 bp, Artificial
  Probe
aggtctcctgtgctgatgccaggga

SEQ ID NO: 304516 - DNA, 25 bp, Artificial
  Probe
atattgggaaccttccagtgctttg

SEQ ID NO: 304517 - DNA, 25 bp, Artificial
  Probe
tgggaaccttccagtgctttgtgta

SEQ ID NO: 304518 - DNA, 25 bp, Artificial
  Probe
cttcctgatgccagtggctgggctg

SEQ ID NO: 304519 - DNA, 25 bp, Artificial
  Probe
gatggagtccagagagcccccttgt

SEQ ID NO: 304520 - DNA, 25 bp, Artificial
  Probe
catttgcagtggatattgggaacct

SEQ ID NO: 304521 - DNA, 25 bp, Artificial
  Probe
gtcatctgaccaaggtctcctgtgc

SEQ ID NO: 304522 - DNA, 25 bp, Artificial
  Probe
caaggtctcctgtgctgatgccagg

SEQ ID NO: 304523 - DNA, 25 bp, Artificial
  Probe
tttgcagtggatattgggaaccttc

SEQ ID NO: 304524 - DNA, 25 bp, Artificial
  Probe
ggaaccttccagtgctttgtgtatt

SEQ ID NO: 304525 - DNA, 25 bp, Artificial
  Probe
tggagtccagagagcccccttgtta

SEQ ID NO: 304526 - DNA, 25 bp, Artificial
  Probe
cgactctcttcctgatgccagtggc

SEQ ID NO: 304527 - DNA, 25 bp, Artificial
  Probe
ctccttaaagcagagagtatcccct

SEQ ID NO: 304528 - DNA, 25 bp, Artificial
  Probe
aaccttccagtgctttgtgtattgt

SEQ ID NO: 304529 - DNA, 25 bp, Artificial
  Probe
atctgaccaaggtctcctgtgctga

SEQ ID NO: 304530 - DNA, 25 bp, Artificial
  Probe
aaggtctcctgtgctgatgccaggg

SEQ ID NO: 304531 - DNA, 25 bp, Artificial
  Probe
ccaaggtctcctgtgctgatgccag

SEQ ID NO: 304532 - DNA, 25 bp, Artificial
  Probe
aactgactccttaaagcagagagta

SEQ ID NO: 304533 - DNA, 25 bp, Artificial
  Probe
gttccctgatctacttccctgcaga

SEQ ID NO: 304534 - DNA, 25 bp, Artificial
  Probe
cttccctgcagaagaacacttcctg

SEQ ID NO: 304535 - DNA, 25 bp, Artificial
  Probe
gcagaagaacacttcctgtcccagc

SEQ ID NO: 304536 - DNA, 25 bp, Artificial
  Probe
gatttacccgtctgtcctctgtatt

SEQ ID NO: 304537 - DNA, 25 bp, Artificial
  Probe
tccctgcagaagaacacttcctgtc

SEQ ID NO: 304538 - DNA, 25 bp, Artificial
  Probe
gataacacagatttacccgtctgtc

SEQ ID NO: 304539 - DNA, 25 bp, Artificial
  Probe
tccctgatctacttccctgcagaag

SEQ ID NO: 304540 - DNA, 25 bp, Artificial
  Probe
ctgcagaagaacacttcctgtccca

SEQ ID NO: 304541 - DNA, 25 bp, Artificial
  Probe
gaagaagttccctgatctacttccc

SEQ ID NO: 304542 - DNA, 25 bp, Artificial
  Probe
acacgcacgatatgcacgcacacat

SEQ ID NO: 304543 - DNA, 25 bp, Artificial
  Probe
cagaagaacacttcctgtcccagct

SEQ ID NO: 304544 - DNA, 25 bp, Artificial
  Probe
agaagttccctgatctacttccctg

SEQ ID NO: 304545 - DNA, 25 bp, Artificial
  Probe
agaacacttcctgtcccagctcttg

SEQ ID NO: 304546 - DNA, 25 bp, Artificial
  Probe
ccctgatctacttccctgcagaaga

SEQ ID NO: 304547 - DNA, 25 bp, Artificial
  Probe
gatctcccaggattccaactggggg

SEQ ID NO: 304548 - DNA, 25 bp, Artificial
  Probe
ctccacagcgttctgtgtgggaaag

SEQ ID NO: 304549 - DNA, 25 bp, Artificial
  Probe
agcctgcctctttgcacttggataa

SEQ ID NO: 304550 - DNA, 25 bp, Artificial
  Probe
gcctgcctctttgcacttggataac

SEQ ID NO: 304551 - DNA, 25 bp, Artificial
  Probe
gaagaacacttcctgtcccagctct

SEQ ID NO: 304552 - DNA, 25 bp, Artificial
  Probe
cctgcctctttgcacttggataaca

SEQ ID NO: 304553 - DNA, 25 bp, Artificial
  Probe
agaagatctcccaggattccaactg

SEQ ID NO: 304554 - DNA, 25 bp, Artificial
  Probe
cgcacgatatgcacgcacacatgca

SEQ ID NO: 304555 - DNA, 25 bp, Artificial
  Probe
atatgcacgcacacatgcacagcac

SEQ ID NO: 304556 - DNA, 25 bp, Artificial
  Probe
ctttgaagaagttccctgatctact

SEQ ID NO: 304557 - DNA, 25 bp, Artificial
  Probe
tctcccaggattccaactgggggtc

SEQ ID NO: 304558 - DNA, 25 bp, Artificial
  Probe
agttccctgatctacttccctgcag

SEQ ID NO: 304559 - DNA, 25 bp, Artificial
  Probe
cagatttacccgtctgtcctctgta

SEQ ID NO: 304560 - DNA, 25 bp, Artificial
  Probe
cgatatgcacgcacacatgcacagc

SEQ ID NO: 304561 - DNA, 25 bp, Artificial
  Probe
tgcagaagaacacttcctgtcccag

SEQ ID NO: 304562 - DNA, 25 bp, Artificial
  Probe
gactttgaagaagttccctgatcta

SEQ ID NO: 304563 - DNA, 25 bp, Artificial
  Probe
gatatgcacgcacacatgcacagca

SEQ ID NO: 304564 - DNA, 25 bp, Artificial
  Probe
gaagatctcccaggattccaactgg

SEQ ID NO: 304565 - DNA, 25 bp, Artificial
  Probe
tcttgctgctggaggcatggtaaaa

SEQ ID NO: 304566 - DNA, 25 bp, Artificial
  Probe
cctccacagcgttctgtgtgggaaa

SEQ ID NO: 304567 - DNA, 25 bp, Artificial
  Probe
agatttacccgtctgtcctctgtat

SEQ ID NO: 304568 - DNA, 25 bp, Artificial
  Probe
ggataacacagatttacccgtctgt

SEQ ID NO: 304569 - DNA, 25 bp, Artificial
  Probe
gatctacttccctgcagaagaacac

SEQ ID NO: 304570 - DNA, 25 bp, Artificial
  Probe
tgcacttggataacacagatttacc

SEQ ID NO: 304571 - DNA, 25 bp, Artificial
  Probe
ccagcctgcctctttgcacttggat

SEQ ID NO: 304572 - DNA, 25 bp, Artificial
  Probe
cacttggataacacagatttacccg

SEQ ID NO: 304573 - DNA, 25 bp, Artificial
  Probe
gaagttccctgatctacttccctgc

SEQ ID NO: 304574 - DNA, 25 bp, Artificial
  Probe
tccacagcgttctgtgtgggaaaga

SEQ ID NO: 304575 - DNA, 25 bp, Artificial
  Probe
ttcctgtcccagctcttgctgctgg

SEQ ID NO: 304576 - DNA, 25 bp, Artificial
  Probe
ctctttgcacttggataacacagat

SEQ ID NO: 304577 - DNA, 25 bp, Artificial
  Probe
ccagctcttgctgctggaggcatgg

SEQ ID NO: 304578 - DNA, 25 bp, Artificial
  Probe
cccagctcttgctgctggaggcatg

SEQ ID NO: 304579 - DNA, 25 bp, Artificial
  Probe
tgcagatacatcgagaacctggagg

SEQ ID NO: 304580 - DNA, 25 bp, Artificial
  Probe
cagaagttcagttgtcactttttgt

SEQ ID NO: 304581 - DNA, 25 bp, Artificial
  Probe
caagaaaacgggactgcacatgcca

SEQ ID NO: 304582 - DNA, 25 bp, Artificial
  Probe
ttgtctccgccgtaagcgtcgcagc

SEQ ID NO: 304583 - DNA, 25 bp, Artificial
  Probe
aacttctgcattcatggtgaatgca

SEQ ID NO: 304584 - DNA, 25 bp, Artificial
  Probe
gtctccgccgtaagcgtcgcagcta

SEQ ID NO: 304585 - DNA, 25 bp, Artificial
  Probe
aaacgggactgcacatgccatagcc

SEQ ID NO: 304586 - DNA, 25 bp, Artificial
  Probe
tcagttgtcactttttgtgatagtc

SEQ ID NO: 304587 - DNA, 25 bp, Artificial
  Probe
cgtaagcgtcgcagctattggcatc

SEQ ID NO: 304588 - DNA, 25 bp, Artificial
  Probe
gatcgcgttagcagccataattgtc

SEQ ID NO: 304589 - DNA, 25 bp, Artificial
  Probe
ggataacagtcgagtcactgccaag

SEQ ID NO: 304590 - DNA, 25 bp, Artificial
  Probe
caattcaggataacagtcgagtcac

SEQ ID NO: 304591 - DNA, 25 bp, Artificial
  Probe
gtcctgcttcggaaacgattcttca

SEQ ID NO: 304592 - DNA, 25 bp, Artificial
  Probe
aaccatgaagactcagaagaaggat

SEQ ID NO: 304593 - DNA, 25 bp, Artificial
  Probe
tccaagatcgcgttagcagccataa

SEQ ID NO: 304594 - DNA, 25 bp, Artificial
  Probe
tggtgacctgccattgtcatcagga

SEQ ID NO: 304595 - DNA, 25 bp, Artificial
  Probe
cgtcgcagctattggcatcattacc

SEQ ID NO: 304596 - DNA, 25 bp, Artificial
  Probe
acagtcgagtcactgccaagccaca

SEQ ID NO: 304597 - DNA, 25 bp, Artificial
  Probe
tagcctagctgatggcaattcagga

SEQ ID NO: 304598 - DNA, 25 bp, Artificial
  Probe
ccgccgtaagcgtcgcagctattgg

SEQ ID NO: 304599 - DNA, 25 bp, Artificial
  Probe
attcaggataacagtcgagtcactg

SEQ ID NO: 304600 - DNA, 25 bp, Artificial
  Probe
gccatagcctagctgatggcaattc

SEQ ID NO: 304601 - DNA, 25 bp, Artificial
  Probe
tgcattcatggtgaatgcagataca

SEQ ID NO: 304602 - DNA, 25 bp, Artificial
  Probe
ccacaccggaagtgacgaatcggtc

SEQ ID NO: 304603 - DNA, 25 bp, Artificial
  Probe
tcaggattactttggcgaacggtgt

SEQ ID NO: 304604 - DNA, 25 bp, Artificial
  Probe
ttaccgccgtcctgcttcggaaacg

SEQ ID NO: 304605 - DNA, 25 bp, Artificial
  Probe
gaggtggtgacctgccattgtcatc

SEQ ID NO: 304606 - DNA, 25 bp, Artificial
  Probe
actgcacatgccatagcctagctga

SEQ ID NO: 304607 - DNA, 25 bp, Artificial
  Probe
tgcacatgccatagcctagctgatg

SEQ ID NO: 304608 - DNA, 25 bp, Artificial
  Probe
cggaaacgattcttcagggaatatg

SEQ ID NO: 304609 - DNA, 25 bp, Artificial
  Probe
cataattgtctttgtctccgccgta

SEQ ID NO: 304610 - DNA, 25 bp, Artificial
  Probe
cgccgtcctgcttcggaaacgattc

SEQ ID NO: 304611 - DNA, 25 bp, Artificial
  Probe
gaatcggtccttctttcagcgaagg

SEQ ID NO: 304612 - DNA, 25 bp, Artificial
  Probe
ttcagcgaaggctccagaagttcag

SEQ ID NO: 304613 - DNA, 25 bp, Artificial
  Probe
attggcatcattaccgccgtcctgc

SEQ ID NO: 304614 - DNA, 25 bp, Artificial
  Probe
cgggactgcacatgccatagcctag

SEQ ID NO: 304615 - DNA, 25 bp, Artificial
  Probe
gcgttagcagccataattgtctttg

SEQ ID NO: 304616 - DNA, 25 bp, Artificial
  Probe
cagatacatcgagaacctggaggtg

SEQ ID NO: 304617 - DNA, 25 bp, Artificial
  Probe
gtgacgaatcggtccttctttcagc

SEQ ID NO: 304618 - DNA, 25 bp, Artificial
  Probe
gacctgccattgtcatcaggattac

SEQ ID NO: 304619 - DNA, 25 bp, Artificial
  Probe
aggatgacagcgacctatccaagat

SEQ ID NO: 304620 - DNA, 25 bp, Artificial
  Probe
acctatccaagatcgcgttagcagc

SEQ ID NO: 304621 - DNA, 25 bp, Artificial
  Probe
tagctgatggcaattcaggataaca

SEQ ID NO: 304622 - DNA, 25 bp, Artificial
  Probe
gccattgtcatcaggattactttgg

SEQ ID NO: 304623 - DNA, 25 bp, Artificial
  Probe
caccggaagtgacgaatcggtcctt

SEQ ID NO: 304624 - DNA, 25 bp, Artificial
  Probe
gcattcatggtgaatgcagatacat

SEQ ID NO: 304625 - DNA, 25 bp, Artificial
  Probe
ggctttgataagctctttctctccc

SEQ ID NO: 304626 - DNA, 25 bp, Artificial
  Probe
atctccgcgggactggaacaaggcc

SEQ ID NO: 304627 - DNA, 25 bp, Artificial
  Probe
agactgctgacatatgtgcactccc

SEQ ID NO: 304628 - DNA, 25 bp, Artificial
  Probe
agatgctgaaagcaaacgggtccga

SEQ ID NO: 304629 - DNA, 25 bp, Artificial
  Probe
tctatgaccggctggcccggtaccg

SEQ ID NO: 304630 - DNA, 25 bp, Artificial
  Probe
ccgcaaaagcccatatataccgtga

SEQ ID NO: 304631 - DNA, 25 bp, Artificial
  Probe
aatttgtctgggagtcggtcttctt

SEQ ID NO: 304632 - DNA, 25 bp, Artificial
  Probe
gtggctgcacaacaatatcatctcc

SEQ ID NO: 304633 - DNA, 25 bp, Artificial
  Probe
ccactcagcgagtccggctggagcg

SEQ ID NO: 304634 - DNA, 25 bp, Artificial
  Probe
aaagcaaacgggtccgaagagctct

SEQ ID NO: 304635 - DNA, 25 bp, Artificial
  Probe
tcatctccatagtgggaatttgtct

SEQ ID NO: 304636 - DNA, 25 bp, Artificial
  Probe
ttggtgttacggaccatccagagct

SEQ ID NO: 304637 - DNA, 25 bp, Artificial
  Probe
tcatttccactcagcgagtccggct

SEQ ID NO: 304638 - DNA, 25 bp, Artificial
  Probe
catggccctggctctcctgggctgt

SEQ ID NO: 304639 - DNA, 25 bp, Artificial
  Probe
ttctctcccagctaagccggctggg

SEQ ID NO: 304640 - DNA, 25 bp, Artificial
  Probe
tgcaggaattggtgttacggaccat

SEQ ID NO: 304641 - DNA, 25 bp, Artificial
  Probe
tgcgcagtttcagctgcgctgctgc

SEQ ID NO: 304642 - DNA, 25 bp, Artificial
  Probe
tttctctcccagctaagccggctgg

SEQ ID NO: 304643 - DNA, 25 bp, Artificial
  Probe
gggtgtcctcaccatggccctggct

SEQ ID NO: 304644 - DNA, 25 bp, Artificial
  Probe
cgcggagcctccagaagtggctgca

SEQ ID NO: 304645 - DNA, 25 bp, Artificial
  Probe
gggactatgcgcagtttcagctgcg

SEQ ID NO: 304646 - DNA, 25 bp, Artificial
  Probe
gggctctaaaggagctgcgctgtct

SEQ ID NO: 304647 - DNA, 25 bp, Artificial
  Probe
acgcacctccatgcagtcaggaact

SEQ ID NO: 304648 - DNA, 25 bp, Artificial
  Probe
tctgggttcctcaagctgctcgctc

SEQ ID NO: 304649 - DNA, 25 bp, Artificial
  Probe
aacctcttcttctttgtactaggag

SEQ ID NO: 304650 - DNA, 25 bp, Artificial
  Probe
ggcagactgctgacatatgtgcact

SEQ ID NO: 304651 - DNA, 25 bp, Artificial
  Probe
agatgtccgcccaagagagttgcct

SEQ ID NO: 304652 - DNA, 25 bp, Artificial
  Probe
cagagctaccgcacgaatccggatg

SEQ ID NO: 304653 - DNA, 25 bp, Artificial
  Probe
ttcctgtgtagaaatctggatcacg

SEQ ID NO: 304654 - DNA, 25 bp, Artificial
  Probe
gttgcctcagcctcatcaagtactt

SEQ ID NO: 304655 - DNA, 25 bp, Artificial
  Probe
ccatctaggcgaagatgtccgccca

SEQ ID NO: 304656 - DNA, 25 bp, Artificial
  Probe
gggactggaacaaggcccagatgct

SEQ ID NO: 304657 - DNA, 25 bp, Artificial
  Probe
atatataccgtgagggctgcgcgcg

SEQ ID NO: 304658 - DNA, 25 bp, Artificial
  Probe
atggccctggctctcctgggctgtg

SEQ ID NO: 304659 - DNA, 25 bp, Artificial
  Probe
aagaccagcttcgtgtcctttgtgg

SEQ ID NO: 304660 - DNA, 25 bp, Artificial
  Probe
ttgtgccctgctcctgctacaattc

SEQ ID NO: 304661 - DNA, 25 bp, Artificial
  Probe
gaccatccagagctaccgcacgaat

SEQ ID NO: 304662 - DNA, 25 bp, Artificial
  Probe
gcgctgctgcggttggcaatctccg

SEQ ID NO: 304663 - DNA, 25 bp, Artificial
  Probe
tagaaatctggatcacgtctatgac

SEQ ID NO: 304664 - DNA, 25 bp, Artificial
  Probe
tgcggttggcaatctccgcgggact

SEQ ID NO: 304665 - DNA, 25 bp, Artificial
  Probe
gcgaccaatgactcctccggctttg

SEQ ID NO: 304666 - DNA, 25 bp, Artificial
  Probe
acaacaatatcatctccatagtggg

SEQ ID NO: 304667 - DNA, 25 bp, Artificial
  Probe
tgctacaattccaccgcgaccaatg

SEQ ID NO: 304668 - DNA, 25 bp, Artificial
  Probe
gagagctgggactatgcgcagtttc

SEQ ID NO: 304669 - DNA, 25 bp, Artificial
  Probe
taggcgaagatgtccgcccaagaga

SEQ ID NO: 304670 - DNA, 25 bp, Artificial
  Probe
atccggatgagacagctgctgagga

SEQ ID NO: 304671 - DNA, 25 bp, Artificial
  Probe
ctggttcctctctagcctgtaaagt

SEQ ID NO: 304672 - DNA, 25 bp, Artificial
  Probe
caaacacatgtaatgtacttaccca

SEQ ID NO: 304673 - DNA, 25 bp, Artificial
  Probe
taccattacatattaacatatatat

SEQ ID NO: 304674 - DNA, 25 bp, Artificial
  Probe
ttcccacagggcacagagataacca

SEQ ID NO: 304675 - DNA, 25 bp, Artificial
  Probe
tctctagcctgtaaagtggatcatc

SEQ ID NO: 304676 - DNA, 25 bp, Artificial
  Probe
tattaacatatatattcccacaggg

SEQ ID NO: 304677 - DNA, 25 bp, Artificial
  Probe
ggcacagagataaccatccctaaaa

SEQ ID NO: 304678 - DNA, 25 bp, Artificial
  Probe
aaaagctggttcctctctagcctgt

SEQ ID NO: 304679 - DNA, 25 bp, Artificial
  Probe
gaaaacattgaccattaaaagctgg

SEQ ID NO: 304680 - DNA, 25 bp, Artificial
  Probe
agctggttcctctctagcctgtaaa

SEQ ID NO: 304681 - DNA, 25 bp, Artificial
  Probe
ctctctagcctgtaaagtggatcat

SEQ ID NO: 304682 - DNA, 25 bp, Artificial
  Probe
gtaatgtacttacccatgaacatac

SEQ ID NO: 304683 - DNA, 25 bp, Artificial
  Probe
attaaaagctggttcctctctagcc

SEQ ID NO: 304684 - DNA, 25 bp, Artificial
  Probe
attgaccattaaaagctggttcctc

SEQ ID NO: 304685 - DNA, 25 bp, Artificial
  Probe
acttacccatgaacataccatacca

SEQ ID NO: 304686 - DNA, 25 bp, Artificial
  Probe
ccattaaaagctggttcctctctag

SEQ ID NO: 304687 - DNA, 25 bp, Artificial
  Probe
cctctctagcctgtaaagtggatca

SEQ ID NO: 304688 - DNA, 25 bp, Artificial
  Probe
accattaaaagctggttcctctcta

SEQ ID NO: 304689 - DNA, 25 bp, Artificial
  Probe
ccatccctaaaacaatggaaaacat

SEQ ID NO: 304690 - DNA, 25 bp, Artificial
  Probe
tcctctctagcctgtaaagtggatc

SEQ ID NO: 304691 - DNA, 25 bp, Artificial
  Probe
atatattcccacagggcacagagat

SEQ ID NO: 304692 - DNA, 25 bp, Artificial
  Probe
gctggttcctctctagcctgtaaag

SEQ ID NO: 304693 - DNA, 25 bp, Artificial
  Probe
gtacttacccatgaacataccatac

SEQ ID NO: 304694 - DNA, 25 bp, Artificial
  Probe
ttaaaagctggttcctctctagcct

SEQ ID NO: 304695 - DNA, 25 bp, Artificial
  Probe
aaagctggttcctctctagcctgta

SEQ ID NO: 304696 - DNA, 25 bp, Artificial
  Probe
ggttcctctctagcctgtaaagtgg

SEQ ID NO: 304697 - DNA, 25 bp, Artificial
  Probe
ctagcctgtaaagtggatcatctca

SEQ ID NO: 304698 - DNA, 25 bp, Artificial
  Probe
atccctaaaacaatggaaaacattg

SEQ ID NO: 304699 - DNA, 25 bp, Artificial
  Probe
cccacagggcacagagataaccatc

SEQ ID NO: 304700 - DNA, 25 bp, Artificial
  Probe
attacatattaacatatatattccc

SEQ ID NO: 304701 - DNA, 25 bp, Artificial
  Probe
cattaaaagctggttcctctctagc

SEQ ID NO: 304702 - DNA, 25 bp, Artificial
  Probe
ctctagcctgtaaagtggatcatct

SEQ ID NO: 304703 - DNA, 25 bp, Artificial
  Probe
cacatgtacctatcataccattaca

SEQ ID NO: 304704 - DNA, 25 bp, Artificial
  Probe
tcccacagggcacagagataaccat

SEQ ID NO: 304705 - DNA, 25 bp, Artificial
  Probe
gcacagagataaccatccctaaaac

SEQ ID NO: 304706 - DNA, 25 bp, Artificial
  Probe
tatatattcccacagggcacagaga

SEQ ID NO: 304707 - DNA, 25 bp, Artificial
  Probe
cattgaccattaaaagctggttcct

SEQ ID NO: 304708 - DNA, 25 bp, Artificial
  Probe
tggttcctctctagcctgtaaagtg

SEQ ID NO: 304709 - DNA, 25 bp, Artificial
  Probe
aagctggttcctctctagcctgtaa

SEQ ID NO: 304710 - DNA, 25 bp, Artificial
  Probe
attcccacagggcacagagataacc

SEQ ID NO: 304711 - DNA, 25 bp, Artificial
  Probe
tggaaaacattgaccattaaaagct

SEQ ID NO: 304712 - DNA, 25 bp, Artificial
  Probe
ggaaaacattgaccattaaaagctg

SEQ ID NO: 304713 - DNA, 25 bp, Artificial
  Probe
ttgaccattaaaagctggttcctct

SEQ ID NO: 304714 - DNA, 25 bp, Artificial
  Probe
acattgaccattaaaagctggttcc

SEQ ID NO: 304715 - DNA, 25 bp, Artificial
  Probe
tgaccattaaaagctggttcctctc

SEQ ID NO: 304716 - DNA, 25 bp, Artificial
  Probe
tctagcctgtaaagtggatcatctc

SEQ ID NO: 304717 - DNA, 25 bp, Artificial
  Probe
gacctagtaatcagtttgaatattc

SEQ ID NO: 304718 - DNA, 25 bp, Artificial
  Probe
ctaaagaccaacacggaagttggtg

SEQ ID NO: 304719 - DNA, 25 bp, Artificial
  Probe
taaagatcgtctgagccgacggtgg

SEQ ID NO: 304720 - DNA, 25 bp, Artificial
  Probe
tgatcacgcgcctaatgatgtcaga

SEQ ID NO: 304721 - DNA, 25 bp, Artificial
  Probe
tcgtctgagccgacggtggattcac

SEQ ID NO: 304722 - DNA, 25 bp, Artificial
  Probe
attagtgcaggcagaagctctggac

SEQ ID NO: 304723 - DNA, 25 bp, Artificial
  Probe
ggccttatgtttacacgctcttctc

SEQ ID NO: 304724 - DNA, 25 bp, Artificial
  Probe
agacggtacaaggacgcagcaaaac

SEQ ID NO: 304725 - DNA, 25 bp, Artificial
  Probe
tgttgcgggagaacctaaagaccaa

SEQ ID NO: 304726 - DNA, 25 bp, Artificial
  Probe
gcggccacttgttgcgggagaacct

SEQ ID NO: 304727 - DNA, 25 bp, Artificial
  Probe
agactaacagaatctggccttatgt

SEQ ID NO: 304728 - DNA, 25 bp, Artificial
  Probe
ttcctttcgagacacttaaagatcg

SEQ ID NO: 304729 - DNA, 25 bp, Artificial
  Probe
tgtccaacaggaagatgataaacct

SEQ ID NO: 304730 - DNA, 25 bp, Artificial
  Probe
agcaaaaccagtcatcgaactgtac

SEQ ID NO: 304731 - DNA, 25 bp, Artificial
  Probe
ttttggttccggaccatgtgatcac

SEQ ID NO: 304732 - DNA, 25 bp, Artificial
  Probe
accggcgagcctcttgtccaacagg

SEQ ID NO: 304733 - DNA, 25 bp, Artificial
  Probe
cggctaagacggtacaaggacgcag

SEQ ID NO: 304734 - DNA, 25 bp, Artificial
  Probe
gaccatgtgatcacgcgcctaatga

SEQ ID NO: 304735 - DNA, 25 bp, Artificial
  Probe
atgataaacctgaagcacttgctgc

SEQ ID NO: 304736 - DNA, 25 bp, Artificial
  Probe
cagttttctgggacggagactaaca

SEQ ID NO: 304737 - DNA, 25 bp, Artificial
  Probe
ctgtgatgtggacctagtaatcagt

SEQ ID NO: 304738 - DNA, 25 bp, Artificial
  Probe
tacaaggacgcagcaaaaccagtca

SEQ ID NO: 304739 - DNA, 25 bp, Artificial
  Probe
aggacattagtgcaggcagaagctc

SEQ ID NO: 304740 - DNA, 25 bp, Artificial
  Probe
agtcatcgaactgtacaagagccgt

SEQ ID NO: 304741 - DNA, 25 bp, Artificial
  Probe
agaactttggcctccagcatctctc

SEQ ID NO: 304742 - DNA, 25 bp, Artificial
  Probe
tcagaactggagacccggagtgccc

SEQ ID NO: 304743 - DNA, 25 bp, Artificial
  Probe
ttctgggacggagactaacagaatc

SEQ ID NO: 304744 - DNA, 25 bp, Artificial
  Probe
attcaatccaaagaagcctactgag

SEQ ID NO: 304745 - DNA, 25 bp, Artificial
  Probe
atcagtttgaatattcctttcgaga

SEQ ID NO: 304746 - DNA, 25 bp, Artificial
  Probe
gagaacctaaagaccaacacggaag

SEQ ID NO: 304747 - DNA, 25 bp, Artificial
  Probe
aggtcttttggttccggaccatgtg

SEQ ID NO: 304748 - DNA, 25 bp, Artificial
  Probe
ttgctgcccggctaagacggtacaa

SEQ ID NO: 304749 - DNA, 25 bp, Artificial
  Probe
ctattagatggattcccaaggacat

SEQ ID NO: 304750 - DNA, 25 bp, Artificial
  Probe
ctggagacccggagtgcccagcact

SEQ ID NO: 304751 - DNA, 25 bp, Artificial
  Probe
cacggaagttggtgacgtggcaaaa

SEQ ID NO: 304752 - DNA, 25 bp, Artificial
  Probe
gtacaagagccgtggagtgctccac

SEQ ID NO: 304753 - DNA, 25 bp, Artificial
  Probe
ttgttgcgggagaacctaaagacca

SEQ ID NO: 304754 - DNA, 25 bp, Artificial
  Probe
gggttgatgacatcaccggcgagcc

SEQ ID NO: 304755 - DNA, 25 bp, Artificial
  Probe
gtttgaatattcctttcgagacact

SEQ ID NO: 304756 - DNA, 25 bp, Artificial
  Probe
tgaagcacttgctgcccggctaaga

SEQ ID NO: 304757 - DNA, 25 bp, Artificial
  Probe
cactggctattagatggattcccaa

SEQ ID NO: 304758 - DNA, 25 bp, Artificial
  Probe
tctccagcggccacttgttgcggga

SEQ ID NO: 304759 - DNA, 25 bp, Artificial
  Probe
tggagacccggagtgcccagcactg

SEQ ID NO: 304760 - DNA, 25 bp, Artificial
  Probe
cgacggtggattcacccttccagcg

SEQ ID NO: 304761 - DNA, 25 bp, Artificial
  Probe
gttgatgacatcaccggcgagcctc

SEQ ID NO: 304762 - DNA, 25 bp, Artificial
  Probe
cccggagtgcccagcactggctatt

SEQ ID NO: 304763 - DNA, 25 bp, Artificial
  Probe
tacaaggacaaggagactggggaca

SEQ ID NO: 304764 - DNA, 25 bp, Artificial
  Probe
ctgtacaaagcgtgctctataatat

SEQ ID NO: 304765 - DNA, 25 bp, Artificial
  Probe
tgagtctccggaaagcagctatggc

SEQ ID NO: 304766 - DNA, 25 bp, Artificial
  Probe
tcagtgaacaaacgaggcgtcctac

SEQ ID NO: 304767 - DNA, 25 bp, Artificial
  Probe
cagagcccaatgtaaagtttataga

SEQ ID NO: 304768 - DNA, 25 bp, Artificial
  Probe
ggggacaccaaggagctccatgccc

SEQ ID NO: 304769 - DNA, 25 bp, Artificial
  Probe
cccgctcactgttgttgccgacggg

SEQ ID NO: 304770 - DNA, 25 bp, Artificial
  Probe
atgtacatagcctaggactgtgtgt

SEQ ID NO: 304771 - DNA, 25 bp, Artificial
  Probe
ctcccacttcgttggcttcattatg

SEQ ID NO: 304772 - DNA, 25 bp, Artificial
  Probe
gtatctggttcactgaaagggaaac

SEQ ID NO: 304773 - DNA, 25 bp, Artificial
  Probe
tgacctttatgatgatgccgctatt

SEQ ID NO: 304774 - DNA, 25 bp, Artificial
  Probe
ctagggtgcttgtcgatattcgagg

SEQ ID NO: 304775 - DNA, 25 bp, Artificial
  Probe
gagatgcgtataacctgaggcatcc

SEQ ID NO: 304776 - DNA, 25 bp, Artificial
  Probe
gtcgatcccagtccagttctcatct

SEQ ID NO: 304777 - DNA, 25 bp, Artificial
  Probe
gttaacactcaagtgtttggatttc

SEQ ID NO: 304778 - DNA, 25 bp, Artificial
  Probe
tgatgatgccgctattttccaggcc

SEQ ID NO: 304779 - DNA, 25 bp, Artificial
  Probe
aaacctcgggctcttttcagtagtg

SEQ ID NO: 304780 - DNA, 25 bp, Artificial
  Probe
accaagcttgtgtataagcatgtaa

SEQ ID NO: 304781 - DNA, 25 bp, Artificial
  Probe
ccttaattcacaattgagaatgaag

SEQ ID NO: 304782 - DNA, 25 bp, Artificial
  Probe
ctggttcactgaaagggaaaccaca

SEQ ID NO: 304783 - DNA, 25 bp, Artificial
  Probe
ttatgaaggatgcaccacagtttaa

SEQ ID NO: 304784 - DNA, 25 bp, Artificial
  Probe
tggggttgctttccaccatggcaag

SEQ ID NO: 304785 - DNA, 25 bp, Artificial
  Probe
gcgtataacctgaggcatcctctta

SEQ ID NO: 304786 - DNA, 25 bp, Artificial
  Probe
cctccttcctcagtgaacaaacgag

SEQ ID NO: 304787 - DNA, 25 bp, Artificial
  Probe
cagtctatgccacgtatttctgctt

SEQ ID NO: 304788 - DNA, 25 bp, Artificial
  Probe
gcggaccatgccagcaagcttcctt

SEQ ID NO: 304789 - DNA, 25 bp, Artificial
  Probe
gccgctattttccaggccaaaaagt

SEQ ID NO: 304790 - DNA, 25 bp, Artificial
  Probe
ggaaaccacatggaagtcattggga

SEQ ID NO: 304791 - DNA, 25 bp, Artificial
  Probe
cttcttctccgttgcagtctatgcc

SEQ ID NO: 304792 - DNA, 25 bp, Artificial
  Probe
cacatggaagtcattgggacttgag

SEQ ID NO: 304793 - DNA, 25 bp, Artificial
  Probe
cagaaaacaaccaagtacagagtgg

SEQ ID NO: 304794 - DNA, 25 bp, Artificial
  Probe
tcatcatgagtctccggaaagcagc

SEQ ID NO: 304795 - DNA, 25 bp, Artificial
  Probe
ggaagaacctcatctccaataaagt

SEQ ID NO: 304796 - DNA, 25 bp, Artificial
  Probe
ctgttgttgccgacgggctcttctc

SEQ ID NO: 304797 - DNA, 25 bp, Artificial
  Probe
cccacagatacctgatcacttgaag

SEQ ID NO: 304798 - DNA, 25 bp, Artificial
  Probe
cagatttcacccagcgaaactaggg

SEQ ID NO: 304799 - DNA, 25 bp, Artificial
  Probe
tttaaagccaatttcgcggagcttg

SEQ ID NO: 304800 - DNA, 25 bp, Artificial
  Probe
attgccaagaaacttaagagaatac

SEQ ID NO: 304801 - DNA, 25 bp, Artificial
  Probe
catctattcagaaatgaagtatctg

SEQ ID NO: 304802 - DNA, 25 bp, Artificial
  Probe
ctggtcgatcccagtccagttctca

SEQ ID NO: 304803 - DNA, 25 bp, Artificial
  Probe
tggcttcattatgaaggatgcacca

SEQ ID NO: 304804 - DNA, 25 bp, Artificial
  Probe
cctttatgatgatgccgctattttc

SEQ ID NO: 304805 - DNA, 25 bp, Artificial
  Probe
gagactggggacaccaaggagctcc

SEQ ID NO: 304806 - DNA, 25 bp, Artificial
  Probe
agttcaggaagaacctcatctccaa

SEQ ID NO: 304807 - DNA, 25 bp, Artificial
  Probe
atcacttgaaggaatcatttctgga

SEQ ID NO: 304808 - DNA, 25 bp, Artificial
  Probe
atgccttaattcacaattgagaatg

SEQ ID NO: 304809 - DNA, 25 bp, Artificial
  Probe
cctctgatagtgatgacaagtgcca

SEQ ID NO: 304810 - DNA, 25 bp, Artificial
  Probe
cacagcacagggtgtaaaagtcagg

SEQ ID NO: 304811 - DNA, 25 bp, Artificial
  Probe
gaacctccaatgacaagatgtatat

SEQ ID NO: 304812 - DNA, 25 bp, Artificial
  Probe
agcagcagtgacacagagaccaccg

SEQ ID NO: 304813 - DNA, 25 bp, Artificial
  Probe
gcctcgtcttttgagaaaagggcag

SEQ ID NO: 304814 - DNA, 25 bp, Artificial
  Probe
actggaacctccaatgacaagatgt

SEQ ID NO: 304815 - DNA, 25 bp, Artificial
  Probe
ccctaaaggagctccggaaggccat

SEQ ID NO: 304816 - DNA, 25 bp, Artificial
  Probe
tggcagactcattgggattgtcacc

SEQ ID NO: 304817 - DNA, 25 bp, Artificial
  Probe
ctgtcacagcacagggtgtaaaagt

SEQ ID NO: 304818 - DNA, 25 bp, Artificial
  Probe
cttctgcaagccagcagtgaccaga

SEQ ID NO: 304819 - DNA, 25 bp, Artificial
  Probe
tcaccctaaaggagctccggaaggc

SEQ ID NO: 304820 - DNA, 25 bp, Artificial
  Probe
ctcattgggattgtcaccctaaagg

SEQ ID NO: 304821 - DNA, 25 bp, Artificial
  Probe
acctccaatgacaagatgtatatag

SEQ ID NO: 304822 - DNA, 25 bp, Artificial
  Probe
cttccttctgcaagccagcagtgac

SEQ ID NO: 304823 - DNA, 25 bp, Artificial
  Probe
ccggaggaccagcaatgctctggca

SEQ ID NO: 304824 - DNA, 25 bp, Artificial
  Probe
ccagccggaggaccagcaatgctct

SEQ ID NO: 304825 - DNA, 25 bp, Artificial
  Probe
ctcgtcttttgagaaaagggcagaa

SEQ ID NO: 304826 - DNA, 25 bp, Artificial
  Probe
tcattgggattgtcaccctaaagga

SEQ ID NO: 304827 - DNA, 25 bp, Artificial
  Probe
ctgcctcgtcttttgagaaaagggc

SEQ ID NO: 304828 - DNA, 25 bp, Artificial
  Probe
atagtgatgacaagtgccagtgacc

SEQ ID NO: 304829 - DNA, 25 bp, Artificial
  Probe
gaggaccagcaatgctctggcagga

SEQ ID NO: 304830 - DNA, 25 bp, Artificial
  Probe
gcagtgacacagagaccaccgaggt

SEQ ID NO: 304831 - DNA, 25 bp, Artificial
  Probe
ttatactggaacctccaatgacaag

SEQ ID NO: 304832 - DNA, 25 bp, Artificial
  Probe
agaccaccgaggtgcatgcactctg

SEQ ID NO: 304833 - DNA, 25 bp, Artificial
  Probe
gaccagcaatgctctggcaggaggt

SEQ ID NO: 304834 - DNA, 25 bp, Artificial
  Probe
ccctgcctcgtcttttgagaaaagg

SEQ ID NO: 304835 - DNA, 25 bp, Artificial
  Probe
cagccggaggaccagcaatgctctg

SEQ ID NO: 304836 - DNA, 25 bp, Artificial
  Probe
ggattgtcaccctaaaggagctccg

SEQ ID NO: 304837 - DNA, 25 bp, Artificial
  Probe
cagcagtgacacagagaccaccgag

SEQ ID NO: 304838 - DNA, 25 bp, Artificial
  Probe
gacacagagaccaccgaggtgcatg

SEQ ID NO: 304839 - DNA, 25 bp, Artificial
  Probe
cggaggaccagcaatgctctggcag

SEQ ID NO: 304840 - DNA, 25 bp, Artificial
  Probe
cccctctgatagtgatgacaagtgc

SEQ ID NO: 304841 - DNA, 25 bp, Artificial
  Probe
ggtttatactggaacctccaatgac

SEQ ID NO: 304842 - DNA, 25 bp, Artificial
  Probe
accagcaatgctctggcaggaggtg

SEQ ID NO: 304843 - DNA, 25 bp, Artificial
  Probe
aggaccagcaatgctctggcaggag

SEQ ID NO: 304844 - DNA, 25 bp, Artificial
  Probe
cagagaccaccgaggtgcatgcact

SEQ ID NO: 304845 - DNA, 25 bp, Artificial
  Probe
ctgtcttccttctgcaagccagcag

SEQ ID NO: 304846 - DNA, 25 bp, Artificial
  Probe
gtttatactggaacctccaatgaca

SEQ ID NO: 304847 - DNA, 25 bp, Artificial
  Probe
gaccaccgaggtgcatgcactctgg

SEQ ID NO: 304848 - DNA, 25 bp, Artificial
  Probe
agccggaggaccagcaatgctctgg

SEQ ID NO: 304849 - DNA, 25 bp, Artificial
  Probe
agactcattgggattgtcaccctaa

SEQ ID NO: 304850 - DNA, 25 bp, Artificial
  Probe
tctgcaagccagcagtgaccagaag

SEQ ID NO: 304851 - DNA, 25 bp, Artificial
  Probe
tcccagccggaggaccagcaatgct

SEQ ID NO: 304852 - DNA, 25 bp, Artificial
  Probe
acagcacagggtgtaaaagtcaggc

SEQ ID NO: 304853 - DNA, 25 bp, Artificial
  Probe
attgggattgtcaccctaaaggagc

SEQ ID NO: 304854 - DNA, 25 bp, Artificial
  Probe
gctctgtcacagcacagggtgtaaa

SEQ ID NO: 304855 - DNA, 25 bp, Artificial
  Probe
aggcgagatccttgccaagaggtat

SEQ ID NO: 304856 - DNA, 25 bp, Artificial
  Probe
aagacagcacgagcaagaggtatgg

SEQ ID NO: 304857 - DNA, 25 bp, Artificial
  Probe
ctcctccgacctgctgaaagagcta

SEQ ID NO: 304858 - DNA, 25 bp, Artificial
  Probe
cccgtggagccagaagaagaggcca

SEQ ID NO: 304859 - DNA, 25 bp, Artificial
  Probe
aagaggccaatggaggcgagatcct

SEQ ID NO: 304860 - DNA, 25 bp, Artificial
  Probe
ggctttatgcggttttgaagccctt

SEQ ID NO: 304861 - DNA, 25 bp, Artificial
  Probe
ctgcctgaaagctgtgatttttagg

SEQ ID NO: 304862 - DNA, 25 bp, Artificial
  Probe
ctagccaagaagtatggagggttca

SEQ ID NO: 304863 - DNA, 25 bp, Artificial
  Probe
cgaaagatagccaccaacaggaaag

SEQ ID NO: 304864 - DNA, 25 bp, Artificial
  Probe
gagtctctaccctcggatgaagaag

SEQ ID NO: 304865 - DNA, 25 bp, Artificial
  Probe
tctgtattcttttgagtcttgaagc

SEQ ID NO: 304866 - DNA, 25 bp, Artificial
  Probe
ggagacctgcaaggatctcctgcag

SEQ ID NO: 304867 - DNA, 25 bp, Artificial
  Probe
tcatgaaacggtatggaggcttcat

SEQ ID NO: 304868 - DNA, 25 bp, Artificial
  Probe
cactcgaatgtgaagggcagctgcc

SEQ ID NO: 304869 - DNA, 25 bp, Artificial
  Probe
tcaaaatctgggagacctgcaagga

SEQ ID NO: 304870 - DNA, 25 bp, Artificial
  Probe
agcaactgccccatcagtgatgttt

SEQ ID NO: 304871 - DNA, 25 bp, Artificial
  Probe
agatacggaggcttcctgaagcgct

SEQ ID NO: 304872 - DNA, 25 bp, Artificial
  Probe
aggagacaaccgtgcgaaagatagc

SEQ ID NO: 304873 - DNA, 25 bp, Artificial
  Probe
caaccgtgcgaaagatagccaccaa

SEQ ID NO: 304874 - DNA, 25 bp, Artificial
  Probe
agcaccaacaatgatgaagacagca

SEQ ID NO: 304875 - DNA, 25 bp, Artificial
  Probe
tcttgtcatgtgctgcttgtgctgt

SEQ ID NO: 304876 - DNA, 25 bp, Artificial
  Probe
gcccgagttcccttgggataacatc

SEQ ID NO: 304877 - DNA, 25 bp, Artificial
  Probe
ccccgagtggtggatggactatcag

SEQ ID NO: 304878 - DNA, 25 bp, Artificial
  Probe
ttcatgaaacggtatggaggcttca

SEQ ID NO: 304879 - DNA, 25 bp, Artificial
  Probe
atgaagacagcacgagcaagaggta

SEQ ID NO: 304880 - DNA, 25 bp, Artificial
  Probe
ctactgggaacaggagacaaccgtg

SEQ ID NO: 304881 - DNA, 25 bp, Artificial
  Probe
aactgctgcctgaaagctgtgattt

SEQ ID NO: 304882 - DNA, 25 bp, Artificial
  Probe
tgccaagaggtatggcggtttcatg

SEQ ID NO: 304883 - DNA, 25 bp, Artificial
  Probe
ccccagctggaagacgaagcaaagg

SEQ ID NO: 304884 - DNA, 25 bp, Artificial
  Probe
cgccccgagtggtggatggactatc

SEQ ID NO: 304885 - DNA, 25 bp, Artificial
  Probe
tgagggagacaccttggccaactcc

SEQ ID NO: 304886 - DNA, 25 bp, Artificial
  Probe
tggatgagctttaccccgtggagcc

SEQ ID NO: 304887 - DNA, 25 bp, Artificial
  Probe
caaaggagctgcagaagcgctatgg

SEQ ID NO: 304888 - DNA, 25 bp, Artificial
  Probe
cgacctgctgaaagagctactggga

SEQ ID NO: 304889 - DNA, 25 bp, Artificial
  Probe
tatgggggcttcatgagaggcctca

SEQ ID NO: 304890 - DNA, 25 bp, Artificial
  Probe
atgggggcttcatgagaggcctcaa

SEQ ID NO: 304891 - DNA, 25 bp, Artificial
  Probe
gctttatgcggttttgaagcccttc

SEQ ID NO: 304892 - DNA, 25 bp, Artificial
  Probe
cagcagcaaacaggatgagagccac

SEQ ID NO: 304893 - DNA, 25 bp, Artificial
  Probe
atgtgaagggcagctgccttctttc

SEQ ID NO: 304894 - DNA, 25 bp, Artificial
  Probe
ccctcggatgaagaaggcgaaagtt

SEQ ID NO: 304895 - DNA, 25 bp, Artificial
  Probe
aggatgagagccacttgctagccaa

SEQ ID NO: 304896 - DNA, 25 bp, Artificial
  Probe
agggagacaccttggccaactcctc

SEQ ID NO: 304897 - DNA, 25 bp, Artificial
  Probe
gatggatgagctttaccccgtggag

SEQ ID NO: 304898 - DNA, 25 bp, Artificial
  Probe
agagctactgggaacaggagacaac

SEQ ID NO: 304899 - DNA, 25 bp, Artificial
  Probe
cgaagcaaaggagctgcagaagcgc

SEQ ID NO: 304900 - DNA, 25 bp, Artificial
  Probe
gaacaggagacaaccgtgcgaaaga

SEQ ID NO: 304901 - DNA, 25 bp, Artificial
  Probe
gtcctgctgaaggaggagaagagac

SEQ ID NO: 304902 - DNA, 25 bp, Artificial
  Probe
cgagatgccaggcagtttgaaccct

SEQ ID NO: 304903 - DNA, 25 bp, Artificial
  Probe
ctgtcctgctgaaggaggagaagag

SEQ ID NO: 304904 - DNA, 25 bp, Artificial
  Probe
agatcctgtcctgctgaaggaggag

SEQ ID NO: 304905 - DNA, 25 bp, Artificial
  Probe
taccacttcgagatgccaggcagtt

SEQ ID NO: 304906 - DNA, 25 bp, Artificial
  Probe
gcactcctttaccacttcgagatgc

SEQ ID NO: 304907 - DNA, 25 bp, Artificial
  Probe
tcctgctgaaggaggagaagagacc

SEQ ID NO: 304908 - DNA, 25 bp, Artificial
  Probe
gaagagaccgcactcctttaccact

SEQ ID NO: 304909 - DNA, 25 bp, Artificial
  Probe
accacttcgagatgccaggcagttt

SEQ ID NO: 304910 - DNA, 25 bp, Artificial
  Probe
cctcaagatcctgtcctgctgaagg

SEQ ID NO: 304911 - DNA, 25 bp, Artificial
  Probe
acttcgagatgccaggcagtttgaa

SEQ ID NO: 304912 - DNA, 25 bp, Artificial
  Probe
actcctttaccacttcgagatgcca

SEQ ID NO: 304913 - DNA, 25 bp, Artificial
  Probe
cctttaccacttcgagatgccaggc

SEQ ID NO: 304914 - DNA, 25 bp, Artificial
  Probe
aagatcctgtcctgctgaaggagga

SEQ ID NO: 304915 - DNA, 25 bp, Artificial
  Probe
ttcgagatgccaggcagtttgaacc

SEQ ID NO: 304916 - DNA, 25 bp, Artificial
  Probe
tcctgtcctgctgaaggaggagaag

SEQ ID NO: 304917 - DNA, 25 bp, Artificial
  Probe
aagagaccgcactcctttaccactt

SEQ ID NO: 304918 - DNA, 25 bp, Artificial
  Probe
gagaagagaccgcactcctttacca

SEQ ID NO: 304919 - DNA, 25 bp, Artificial
  Probe
tcaagatcctgtcctgctgaaggag

SEQ ID NO: 304920 - DNA, 25 bp, Artificial
  Probe
gatcctgtcctgctgaaggaggaga

SEQ ID NO: 304921 - DNA, 25 bp, Artificial
  Probe
ttcctcaagatcctgtcctgctgaa

SEQ ID NO: 304922 - DNA, 25 bp, Artificial
  Probe
cctgtcctgctgaaggaggagaaga

SEQ ID NO: 304923 - DNA, 25 bp, Artificial
  Probe
cactcctttaccacttcgagatgcc

SEQ ID NO: 304924 - DNA, 25 bp, Artificial
  Probe
tcctttaccacttcgagatgccagg

SEQ ID NO: 304925 - DNA, 25 bp, Artificial
  Probe
cacttcgagatgccaggcagtttga

SEQ ID NO: 304926 - DNA, 25 bp, Artificial
  Probe
tttaccacttcgagatgccaggcag

SEQ ID NO: 304927 - DNA, 25 bp, Artificial
  Probe
caagatcctgtcctgctgaaggagg

SEQ ID NO: 304928 - DNA, 25 bp, Artificial
  Probe
tcgagatgccaggcagtttgaaccc

SEQ ID NO: 304929 - DNA, 25 bp, Artificial
  Probe
gagatgccaggcagtttgaaccctg

SEQ ID NO: 304930 - DNA, 25 bp, Artificial
  Probe
tgtcctgctgaaggaggagaagaga

SEQ ID NO: 304931 - DNA, 25 bp, Artificial
  Probe
cgcactcctttaccacttcgagatg

SEQ ID NO: 304932 - DNA, 25 bp, Artificial
  Probe
atcctgtcctgctgaaggaggagaa

SEQ ID NO: 304933 - DNA, 25 bp, Artificial
  Probe
ctttaccacttcgagatgccaggca

SEQ ID NO: 304934 - DNA, 25 bp, Artificial
  Probe
tcctcaagatcctgtcctgctgaag

SEQ ID NO: 304935 - DNA, 25 bp, Artificial
  Probe
agagaccgcactcctttaccacttc

SEQ ID NO: 304936 - DNA, 25 bp, Artificial
  Probe
ctcctttaccacttcgagatgccag

SEQ ID NO: 304937 - DNA, 25 bp, Artificial
  Probe
gagaccgcactcctttaccacttcg

SEQ ID NO: 304938 - DNA, 25 bp, Artificial
  Probe
cttcgagatgccaggcagtttgaac

SEQ ID NO: 304939 - DNA, 25 bp, Artificial
  Probe
ttaccacttcgagatgccaggcagt

SEQ ID NO: 304940 - DNA, 25 bp, Artificial
  Probe
ccacttcgagatgccaggcagtttg

SEQ ID NO: 304941 - DNA, 25 bp, Artificial
  Probe
ctcaagatcctgtcctgctgaagga

SEQ ID NO: 304942 - DNA, 25 bp, Artificial
  Probe
agaagagaccgcactcctttaccac

SEQ ID NO: 304943 - DNA, 25 bp, Artificial
  Probe
cctgctgaaggaggagaagagaccg

SEQ ID NO: 304944 - DNA, 25 bp, Artificial
  Probe
accgcactcctttaccacttcgaga

SEQ ID NO: 304945 - DNA, 25 bp, Artificial
  Probe
tgacaaatccgatttgccataaaag

SEQ ID NO: 304946 - DNA, 25 bp, Artificial
  Probe
agggcatcagcgaacaagaagggaa

SEQ ID NO: 304947 - DNA, 25 bp, Artificial
  Probe
tggcatcagccatggctcagtggta

SEQ ID NO: 304948 - DNA, 25 bp, Artificial
  Probe
gaacagcaactctggcatcatcaag

SEQ ID NO: 304949 - DNA, 25 bp, Artificial
  Probe
ctgggcagtactctctggctgcagt

SEQ ID NO: 304950 - DNA, 25 bp, Artificial
  Probe
ggcactgacaaatccgatttgccat

SEQ ID NO: 304951 - DNA, 25 bp, Artificial
  Probe
agcctggagcacaggctgaaggcac

SEQ ID NO: 304952 - DNA, 25 bp, Artificial
  Probe
actctctggctgcagttgtccttgg

SEQ ID NO: 304953 - DNA, 25 bp, Artificial
  Probe
tgaaggcactgacaaatccgatttg

SEQ ID NO: 304954 - DNA, 25 bp, Artificial
  Probe
ctcaacaggcaaaggcagaagcaac

SEQ ID NO: 304955 - DNA, 25 bp, Artificial
  Probe
aaggatcagggctttgccttcgact

SEQ ID NO: 304956 - DNA, 25 bp, Artificial
  Probe
tcctgaaggatcagggctttgcctt

SEQ ID NO: 304957 - DNA, 25 bp, Artificial
  Probe
tttgctaacgccaagtgggccagag

SEQ ID NO: 304958 - DNA, 25 bp, Artificial
  Probe
gctttgccttcgactaccggggaga

SEQ ID NO: 304959 - DNA, 25 bp, Artificial
  Probe
cttgtccagtctctcaacaggcaaa

SEQ ID NO: 304960 - DNA, 25 bp, Artificial
  Probe
tacaaccggcggactttgctaacgc

SEQ ID NO: 304961 - DNA, 25 bp, Artificial
  Probe
caggctgaaggcactgacaaatccg

SEQ ID NO: 304962 - DNA, 25 bp, Artificial
  Probe
tactcaatgagaacagcaactctgg

SEQ ID NO: 304963 - DNA, 25 bp, Artificial
  Probe
aaggcagaagcaactactcaatgag

SEQ ID NO: 304964 - DNA, 25 bp, Artificial
  Probe
cggactttgctaacgccaagtgggc

SEQ ID NO: 304965 - DNA, 25 bp, Artificial
  Probe
ggatcagggctttgccttcgactac

SEQ ID NO: 304966 - DNA, 25 bp, Artificial
  Probe
ctctggcatcatcaagagccattac

SEQ ID NO: 304967 - DNA, 25 bp, Artificial
  Probe
gcaactactcaatgagaacagcaac

SEQ ID NO: 304968 - DNA, 25 bp, Artificial
  Probe
agcaactctggcatcatcaagagcc

SEQ ID NO: 304969 - DNA, 25 bp, Artificial
  Probe
ctcagtggtagcaggtgtaattggc

SEQ ID NO: 304970 - DNA, 25 bp, Artificial
  Probe
caagtgggccagagcctggagcaca

SEQ ID NO: 304971 - DNA, 25 bp, Artificial
  Probe
gtgagtggccggatccaagttcctg

SEQ ID NO: 304972 - DNA, 25 bp, Artificial
  Probe
agagccattacaaccggcggacttt

SEQ ID NO: 304973 - DNA, 25 bp, Artificial
  Probe
agcacaggctgaaggcactgacaaa

SEQ ID NO: 304974 - DNA, 25 bp, Artificial
  Probe
gtactctctggctgcagttgtcctt

SEQ ID NO: 304975 - DNA, 25 bp, Artificial
  Probe
ctactcaatgagaacagcaactctg

SEQ ID NO: 304976 - DNA, 25 bp, Artificial
  Probe
ggcatcatcaagagccattacaacc

SEQ ID NO: 304977 - DNA, 25 bp, Artificial
  Probe
ggagcacaggctgaaggcactgaca

SEQ ID NO: 304978 - DNA, 25 bp, Artificial
  Probe
cacaggagtgagtggccggatccaa

SEQ ID NO: 304979 - DNA, 25 bp, Artificial
  Probe
catggctcagtggtagcaggtgtaa

SEQ ID NO: 304980 - DNA, 25 bp, Artificial
  Probe
gccagagcctggagcacaggctgaa

SEQ ID NO: 304981 - DNA, 25 bp, Artificial
  Probe
aaactgtgaacttggcaagccgaat

SEQ ID NO: 304982 - DNA, 25 bp, Artificial
  Probe
cagggctttgccttcgactaccggg

SEQ ID NO: 304983 - DNA, 25 bp, Artificial
  Probe
gctaacgccaagtgggccagagcct

SEQ ID NO: 304984 - DNA, 25 bp, Artificial
  Probe
ctctcaacaggcaaaggcagaagca

SEQ ID NO: 304985 - DNA, 25 bp, Artificial
  Probe
cagtctctcaacaggcaaaggcaga

SEQ ID NO: 304986 - DNA, 25 bp, Artificial
  Probe
atgtgaagggcatcagcgaacaaga

SEQ ID NO: 304987 - DNA, 25 bp, Artificial
  Probe
catcagcgaacaagaagggaaaatc

SEQ ID NO: 304988 - DNA, 25 bp, Artificial
  Probe
tatgtgaagggcatcagcgaacaag

SEQ ID NO: 304989 - DNA, 25 bp, Artificial
  Probe
cgctaagaaaccacagtatgacatt

SEQ ID NO: 304990 - DNA, 25 bp, Artificial
  Probe
taattggcgctaagaaaccacagta

SEQ ID NO: 304991 - DNA, 25 bp, Artificial
  Probe
tgagaccccaaggttaacccatcca

SEQ ID NO: 304992 - DNA, 25 bp, Artificial
  Probe
tcctcaaatggattgacaggtccat

SEQ ID NO: 304993 - DNA, 25 bp, Artificial
  Probe
tacacgaaggtcacggccttcctca

SEQ ID NO: 304994 - DNA, 25 bp, Artificial
  Probe
tcagcattacgcagaatatgttctg

SEQ ID NO: 304995 - DNA, 25 bp, Artificial
  Probe
ccaagcaagaggacgcctgccaggg

SEQ ID NO: 304996 - DNA, 25 bp, Artificial
  Probe
gccacactgatgacgcaaaagacag

SEQ ID NO: 304997 - DNA, 25 bp, Artificial
  Probe
gcggtggccctcacgtcacacgatt

SEQ ID NO: 304998 - DNA, 25 bp, Artificial
  Probe
gcgcaggctatgacgccaagcaaga

SEQ ID NO: 304999 - DNA, 25 bp, Artificial
  Probe
ccaaagtcctgaagatgatggaggt

SEQ ID NO: 305000 - DNA, 25 bp, Artificial
  Probe
tgggccgaggccacactgatgacgc

SEQ ID NO: 305001 - DNA, 25 bp, Artificial
  Probe
tgacaggtccatgaaagccagggtg

SEQ ID NO: 305002 - DNA, 25 bp, Artificial
  Probe
tgcctgcttgcctcagaaagactgg

SEQ ID NO: 305003 - DNA, 25 bp, Artificial
  Probe
aagtcctgaagatgatggaggtgcc

SEQ ID NO: 305004 - DNA, 25 bp, Artificial
  Probe
aagacacctactttgtgaccggcat

SEQ ID NO: 305005 - DNA, 25 bp, Artificial
  Probe
actgatgacgcaaaagacaggcatc

SEQ ID NO: 305006 - DNA, 25 bp, Artificial
  Probe
tccaccagcttcagcattacgcaga

SEQ ID NO: 305007 - DNA, 25 bp, Artificial
  Probe
gatatgatcatcaagcacaacaagt

SEQ ID NO: 305008 - DNA, 25 bp, Artificial
  Probe
ctgatgacgcaaaagacaggcatcg

SEQ ID NO: 305009 - DNA, 25 bp, Artificial
  Probe
gggaaatacggcatctacacgaagg

SEQ ID NO: 305010 - DNA, 25 bp, Artificial
  Probe
tcaagcacaacaagtttcagaggga

SEQ ID NO: 305011 - DNA, 25 bp, Artificial
  Probe
tttgtgaccggcatcgtcagctggg

SEQ ID NO: 305012 - DNA, 25 bp, Artificial
  Probe
tatgttctgcgcaggctatgacgcc

SEQ ID NO: 305013 - DNA, 25 bp, Artificial
  Probe
cacctacgacttcgacattgccatg

SEQ ID NO: 305014 - DNA, 25 bp, Artificial
  Probe
caacaagtttcagagggacacctac

SEQ ID NO: 305015 - DNA, 25 bp, Artificial
  Probe
cctcagaaagactgggccgaggcca

SEQ ID NO: 305016 - DNA, 25 bp, Artificial
  Probe
agtttcagagggacacctacgactt

SEQ ID NO: 305017 - DNA, 25 bp, Artificial
  Probe
aaggtcacggccttcctcaaatgga

SEQ ID NO: 305018 - DNA, 25 bp, Artificial
  Probe
agcttcagcattacgcagaatatgt

SEQ ID NO: 305019 - DNA, 25 bp, Artificial
  Probe
aatggattgacaggtccatgaaagc

SEQ ID NO: 305020 - DNA, 25 bp, Artificial
  Probe
gatcatcaagcacaacaagtttcag

SEQ ID NO: 305021 - DNA, 25 bp, Artificial
  Probe
ggctatgacgccaagcaagaggacg

SEQ ID NO: 305022 - DNA, 25 bp, Artificial
  Probe
agtcctgaagatgatggaggtgccc

SEQ ID NO: 305023 - DNA, 25 bp, Artificial
  Probe
tcatcaagcacaacaagtttcagag

SEQ ID NO: 305024 - DNA, 25 bp, Artificial
  Probe
cagtccaaagtcctgaagatgatgg

SEQ ID NO: 305025 - DNA, 25 bp, Artificial
  Probe
acctactttgtgaccggcatcgtca

SEQ ID NO: 305026 - DNA, 25 bp, Artificial
  Probe
gcacaacaagtttcagagggacacc

SEQ ID NO: 305027 - DNA, 25 bp, Artificial
  Probe
ttcgacattgccatgctgaggctga

SEQ ID NO: 305028 - DNA, 25 bp, Artificial
  Probe
acgttccgcgagaacgtggcccctg

SEQ ID NO: 305029 - DNA, 25 bp, Artificial
  Probe
cagaatatgttctgcgcaggctatg

SEQ ID NO: 305030 - DNA, 25 bp, Artificial
  Probe
attgccatgctgaggctgaagaccc

SEQ ID NO: 305031 - DNA, 25 bp, Artificial
  Probe
ctctgagaccccaaggttaacccat

SEQ ID NO: 305032 - DNA, 25 bp, Artificial
  Probe
ttctgcgcaggctatgacgccaagc

SEQ ID NO: 305033 - DNA, 25 bp, Artificial
  Probe
cgacttcgacattgccatgctgagg

SEQ ID NO: 305034 - DNA, 25 bp, Artificial
  Probe
gccctcacgtcacacgattcaaaga

SEQ ID NO: 305035 - DNA, 25 bp, Artificial
  Probe
ccatgctgaggctgaagacccccat

SEQ ID NO: 305036 - DNA, 25 bp, Artificial
  Probe
ccttcctcaaatggattgacaggtc

SEQ ID NO: 305037 - DNA, 25 bp, Artificial
  Probe
cagggtttctctgtaggtcaggctg

SEQ ID NO: 305038 - DNA, 25 bp, Artificial
  Probe
gccaggttcagtggtgctacgagct

SEQ ID NO: 305039 - DNA, 25 bp, Artificial
  Probe
gagcccctttctacctgtgggctaa

SEQ ID NO: 305040 - DNA, 25 bp, Artificial
  Probe
gtctctgcctcctgagtgccgggat

SEQ ID NO: 305041 - DNA, 25 bp, Artificial
  Probe
cactccggtgatctattgagtttta

SEQ ID NO: 305042 - DNA, 25 bp, Artificial
  Probe
actccggtgatctattgagttttaa

SEQ ID NO: 305043 - DNA, 25 bp, Artificial
  Probe
agttcactccggtgatctattgagt

SEQ ID NO: 305044 - DNA, 25 bp, Artificial
  Probe
tagagccctgactgagcctttagct

SEQ ID NO: 305045 - DNA, 25 bp, Artificial
  Probe
tggatcagcctgtctctgcctcctg

SEQ ID NO: 305046 - DNA, 25 bp, Artificial
  Probe
tctctgtaggtcaggctgggcttga

SEQ ID NO: 305047 - DNA, 25 bp, Artificial
  Probe
cacagtgtatcacacctgaaactgc

SEQ ID NO: 305048 - DNA, 25 bp, Artificial
  Probe
ctgagcccctttctacctgtgggct

SEQ ID NO: 305049 - DNA, 25 bp, Artificial
  Probe
ttaaacagggtttctctgtaggtca

SEQ ID NO: 305050 - DNA, 25 bp, Artificial
  Probe
agctagagccctgactgagccttta

SEQ ID NO: 305051 - DNA, 25 bp, Artificial
  Probe
atcagcctgtctctgcctcctgagt

SEQ ID NO: 305052 - DNA, 25 bp, Artificial
  Probe
actgtttccccagctagagccctga

SEQ ID NO: 305053 - DNA, 25 bp, Artificial
  Probe
ctagagccctgactgagcctttagc

SEQ ID NO: 305054 - DNA, 25 bp, Artificial
  Probe
ctgagtgccgggattaaaggtgttc

SEQ ID NO: 305055 - DNA, 25 bp, Artificial
  Probe
ttgaactggatcagcctgtctctgc

SEQ ID NO: 305056 - DNA, 25 bp, Artificial
  Probe
cctgactgagcctttagcttggatt

SEQ ID NO: 305057 - DNA, 25 bp, Artificial
  Probe
gcttgaactggatcagcctgtctct

SEQ ID NO: 305058 - DNA, 25 bp, Artificial
  Probe
gagccctgactgagcctttagcttg

SEQ ID NO: 305059 - DNA, 25 bp, Artificial
  Probe
gctgggcttgaactggatcagcctg

SEQ ID NO: 305060 - DNA, 25 bp, Artificial
  Probe
ctccggtgatctattgagttttaag

SEQ ID NO: 305061 - DNA, 25 bp, Artificial
  Probe
tgtttccccagctagagccctgact

SEQ ID NO: 305062 - DNA, 25 bp, Artificial
  Probe
tactgtttccccagctagagccctg

SEQ ID NO: 305063 - DNA, 25 bp, Artificial
  Probe
gcccacagtgtatcacacctgaaac

SEQ ID NO: 305064 - DNA, 25 bp, Artificial
  Probe
tgccaggttcagtggtgctacgagc

SEQ ID NO: 305065 - DNA, 25 bp, Artificial
  Probe
ggcttgaactggatcagcctgtctc

SEQ ID NO: 305066 - DNA, 25 bp, Artificial
  Probe
tcagcaggtggagtctgggacttca

SEQ ID NO: 305067 - DNA, 25 bp, Artificial
  Probe
ccaggttcagtggtgctacgagctg

SEQ ID NO: 305068 - DNA, 25 bp, Artificial
  Probe
ttctctgtaggtcaggctgggcttg

SEQ ID NO: 305069 - DNA, 25 bp, Artificial
  Probe
ttccccagctagagccctgactgag

SEQ ID NO: 305070 - DNA, 25 bp, Artificial
  Probe
ctctgcctcctgagtgccgggatta

SEQ ID NO: 305071 - DNA, 25 bp, Artificial
  Probe
aacagggtttctctgtaggtcaggc

SEQ ID NO: 305072 - DNA, 25 bp, Artificial
  Probe
gtcaggctgggcttgaactggatca

SEQ ID NO: 305073 - DNA, 25 bp, Artificial
  Probe
ctgtctctgcctcctgagtgccggg

SEQ ID NO: 305074 - DNA, 25 bp, Artificial
  Probe
tgactgagcctttagcttggattct

SEQ ID NO: 305075 - DNA, 25 bp, Artificial
  Probe
taaacagggtttctctgtaggtcag

SEQ ID NO: 305076 - DNA, 25 bp, Artificial
  Probe
cagctagagccctgactgagccttt

SEQ ID NO: 305077 - DNA, 25 bp, Artificial
  Probe
gtttctctgtaggtcaggctgggct

SEQ ID NO: 305078 - DNA, 25 bp, Artificial
  Probe
aggctgggcttgaactggatcagcc

SEQ ID NO: 305079 - DNA, 25 bp, Artificial
  Probe
ctgcctcctgagtgccgggattaaa

SEQ ID NO: 305080 - DNA, 25 bp, Artificial
  Probe
tcagcctgtctctgcctcctgagtg

SEQ ID NO: 305081 - DNA, 25 bp, Artificial
  Probe
gtttccccagctagagccctgactg

SEQ ID NO: 305082 - DNA, 25 bp, Artificial
  Probe
ccacagtgtatcacacctgaaactg

SEQ ID NO: 305083 - DNA, 25 bp, Artificial
  Probe
gactatcaactgctgcagatacatt

SEQ ID NO: 305084 - DNA, 25 bp, Artificial
  Probe
ctgcttcagttaacagggaaaaaga

SEQ ID NO: 305085 - DNA, 25 bp, Artificial
  Probe
caaatgcagccagcttcttgtattt

SEQ ID NO: 305086 - DNA, 25 bp, Artificial
  Probe
acaagtagactcagcgaaaatacat

SEQ ID NO: 305087 - DNA, 25 bp, Artificial
  Probe
actgaatgtctgacaagtagactca

SEQ ID NO: 305088 - DNA, 25 bp, Artificial
  Probe
atgcagccagcttcttgtattttta

SEQ ID NO: 305089 - DNA, 25 bp, Artificial
  Probe
tcagagacatcagtatgtgcttact

SEQ ID NO: 305090 - DNA, 25 bp, Artificial
  Probe
ggtatgtgtctgcttcagttaacag

SEQ ID NO: 305091 - DNA, 25 bp, Artificial
  Probe
ctgataggacatattcttggtacca

SEQ ID NO: 305092 - DNA, 25 bp, Artificial
  Probe
tttttgtcagtcagagacatcagta

SEQ ID NO: 305093 - DNA, 25 bp, Artificial
  Probe
caaacaaagctagttcttcaaggga

SEQ ID NO: 305094 - DNA, 25 bp, Artificial
  Probe
caaagctagttcttcaagggataga

SEQ ID NO: 305095 - DNA, 25 bp, Artificial
  Probe
gaaactgaatgtctgacaagtagac

SEQ ID NO: 305096 - DNA, 25 bp, Artificial
  Probe
agttaccttgccaaatgagtcttgt

SEQ ID NO: 305097 - DNA, 25 bp, Artificial
  Probe
agagacatcagtatgtgcttacttg

SEQ ID NO: 305098 - DNA, 25 bp, Artificial
  Probe
agacatcagtatgtgcttacttgtg

SEQ ID NO: 305099 - DNA, 25 bp, Artificial
  Probe
aacccaagtgccaaacaaagctagt

SEQ ID NO: 305100 - DNA, 25 bp, Artificial
  Probe
ggcaagtagttaccttgccaaatga

SEQ ID NO: 305101 - DNA, 25 bp, Artificial
  Probe
ggacatattcttggtaccacagaca

SEQ ID NO: 305102 - DNA, 25 bp, Artificial
  Probe
ataggacatattcttggtaccacag

SEQ ID NO: 305103 - DNA, 25 bp, Artificial
  Probe
catcagtatgtgcttacttgtgttc

SEQ ID NO: 305104 - DNA, 25 bp, Artificial
  Probe
tttttcagaggctgtgtattcatgc

SEQ ID NO: 305105 - DNA, 25 bp, Artificial
  Probe
aagtagttaccttgccaaatgagtc

SEQ ID NO: 305106 - DNA, 25 bp, Artificial
  Probe
caaatgcattcatattagctgatga

SEQ ID NO: 305107 - DNA, 25 bp, Artificial
  Probe
tgacaagtagactcagcgaaaatac

SEQ ID NO: 305108 - DNA, 25 bp, Artificial
  Probe
taggctttcccgtggacaaatgcag

SEQ ID NO: 305109 - DNA, 25 bp, Artificial
  Probe
ctgttaatggtatgtgtctgcttca

SEQ ID NO: 305110 - DNA, 25 bp, Artificial
  Probe
ccaaatgagtcttgtgtggcagatg

SEQ ID NO: 305111 - DNA, 25 bp, Artificial
  Probe
ctgctgcagatacattagagaacac

SEQ ID NO: 305112 - DNA, 25 bp, Artificial
  Probe
ctatcaactgctgcagatacattag

SEQ ID NO: 305113 - DNA, 25 bp, Artificial
  Probe
tgaaaataggctttcccgtggacaa

SEQ ID NO: 305114 - DNA, 25 bp, Artificial
  Probe
cttctgttgcattgactatcaactg

SEQ ID NO: 305115 - DNA, 25 bp, Artificial
  Probe
ttagcaaatgcattcatattagctg

SEQ ID NO: 305116 - DNA, 25 bp, Artificial
  Probe
ctgtgtattcatgcagtacaagtcc

SEQ ID NO: 305117 - DNA, 25 bp, Artificial
  Probe
tcagaggctgtgtattcatgcagta

SEQ ID NO: 305118 - DNA, 25 bp, Artificial
  Probe
agcaaatgcattcatattagctgat

SEQ ID NO: 305119 - DNA, 25 bp, Artificial
  Probe
cagtatgtgcttacttgtgttcaag

SEQ ID NO: 305120 - DNA, 25 bp, Artificial
  Probe
aatgtctgacaagtagactcagcga

SEQ ID NO: 305121 - DNA, 25 bp, Artificial
  Probe
cagtcagagacatcagtatgtgctt

SEQ ID NO: 305122 - DNA, 25 bp, Artificial
  Probe
aggctgtgtattcatgcagtacaag

SEQ ID NO: 305123 - DNA, 25 bp, Artificial
  Probe
gtttatgatacaaaacccaagtgcc

SEQ ID NO: 305124 - DNA, 25 bp, Artificial
  Probe
gacatattcttggtaccacagacaa

SEQ ID NO: 305125 - DNA, 25 bp, Artificial
  Probe
atgaaaataggctttcccgtggaca

SEQ ID NO: 305126 - DNA, 25 bp, Artificial
  Probe
gtagactcagcgaaaatacattatt

SEQ ID NO: 305127 - DNA, 25 bp, Artificial
  Probe
gtggacaaatgcagccagcttcttg

SEQ ID NO: 305128 - DNA, 25 bp, Artificial
  Probe
atggtatgtgtctgcttcagttaac

SEQ ID NO: 305129 - DNA, 25 bp, Artificial
  Probe
ctcaagtcactcaaagtgccatgct

SEQ ID NO: 305130 - DNA, 25 bp, Artificial
  Probe
gtgggactcagcaggatgacatttt

SEQ ID NO: 305131 - DNA, 25 bp, Artificial
  Probe
gtcactggagtaccagaaaactgta

SEQ ID NO: 305132 - DNA, 25 bp, Artificial
  Probe
ccaaagttcctctagatctgcatgc

SEQ ID NO: 305133 - DNA, 25 bp, Artificial
  Probe
tgccatattcagaaagcttacatcg

SEQ ID NO: 305134 - DNA, 25 bp, Artificial
  Probe
ccagaaaactgtaaatcctggtctg

SEQ ID NO: 305135 - DNA, 25 bp, Artificial
  Probe
gtagtatccagatttccgcatgccg

SEQ ID NO: 305136 - DNA, 25 bp, Artificial
  Probe
ctcatagttttcagcgagacagcag

SEQ ID NO: 305137 - DNA, 25 bp, Artificial
  Probe
gttcctctagatctgcatgccatat

SEQ ID NO: 305138 - DNA, 25 bp, Artificial
  Probe
ccagagtcacactcatagttttcag

SEQ ID NO: 305139 - DNA, 25 bp, Artificial
  Probe
cagaaaactgtaaatcctggtctgt

SEQ ID NO: 305140 - DNA, 25 bp, Artificial
  Probe
agcatttgtgttatgtccctactca

SEQ ID NO: 305141 - DNA, 25 bp, Artificial
  Probe
catcctgtagtatccagatttccgc

SEQ ID NO: 305142 - DNA, 25 bp, Artificial
  Probe
tcaaagtgccatgctttaaccccag

SEQ ID NO: 305143 - DNA, 25 bp, Artificial
  Probe
aaaccaataagcaaatggggagctg

SEQ ID NO: 305144 - DNA, 25 bp, Artificial
  Probe
tgccatgctttaaccccagagtcac

SEQ ID NO: 305145 - DNA, 25 bp, Artificial
  Probe
accaaagttcctctagatctgcatg

SEQ ID NO: 305146 - DNA, 25 bp, Artificial
  Probe
cagcgagacagcagagggacataaa

SEQ ID NO: 305147 - DNA, 25 bp, Artificial
  Probe
agtcactcaaagtgccatgctttaa

SEQ ID NO: 305148 - DNA, 25 bp, Artificial
  Probe
tacatcgctcaagtcactcaaagtg

SEQ ID NO: 305149 - DNA, 25 bp, Artificial
  Probe
tcactcaatggtgtatgtaaccaga

SEQ ID NO: 305150 - DNA, 25 bp, Artificial
  Probe
gcacatcctgtagtatccagatttc

SEQ ID NO: 305151 - DNA, 25 bp, Artificial
  Probe
caaaccaataagcaaatggggagct

SEQ ID NO: 305152 - DNA, 25 bp, Artificial
  Probe
gcatttgtgttatgtccctactcac

SEQ ID NO: 305153 - DNA, 25 bp, Artificial
  Probe
gttttcagcgagacagcagagggac

SEQ ID NO: 305154 - DNA, 25 bp, Artificial
  Probe
ctttgaccacgtgtttgaaatgagt

SEQ ID NO: 305155 - DNA, 25 bp, Artificial
  Probe
gccacaagcacatcctgtagtatcc

SEQ ID NO: 305156 - DNA, 25 bp, Artificial
  Probe
gggactcagcaggatgacattttca

SEQ ID NO: 305157 - DNA, 25 bp, Artificial
  Probe
tggagccacaagcacatcctgtagt

SEQ ID NO: 305158 - DNA, 25 bp, Artificial
  Probe
tcagcgagacagcagagggacataa

SEQ ID NO: 305159 - DNA, 25 bp, Artificial
  Probe
gtgttatgtccctactcactcaatg

SEQ ID NO: 305160 - DNA, 25 bp, Artificial
  Probe
gcatgccatattcagaaagcttaca

SEQ ID NO: 305161 - DNA, 25 bp, Artificial
  Probe
cagaaagcttacatcgctcaagtca

SEQ ID NO: 305162 - DNA, 25 bp, Artificial
  Probe
tcctgtagtatccagatttccgcat

SEQ ID NO: 305163 - DNA, 25 bp, Artificial
  Probe
acatcctgtagtatccagatttccg

SEQ ID NO: 305164 - DNA, 25 bp, Artificial
  Probe
ccctgtgtgtcactggagtaccaga

SEQ ID NO: 305165 - DNA, 25 bp, Artificial
  Probe
atctgcatgccatattcagaaagct

SEQ ID NO: 305166 - DNA, 25 bp, Artificial
  Probe
cacaagcacatcctgtagtatccag

SEQ ID NO: 305167 - DNA, 25 bp, Artificial
  Probe
gagtccactttgaccacgtgtttga

SEQ ID NO: 305168 - DNA, 25 bp, Artificial
  Probe
attcagaaagcttacatcgctcaag

SEQ ID NO: 305169 - DNA, 25 bp, Artificial
  Probe
tagttttcagcgagacagcagaggg

SEQ ID NO: 305170 - DNA, 25 bp, Artificial
  Probe
gatctgcatgccatattcagaaagc

SEQ ID NO: 305171 - DNA, 25 bp, Artificial
  Probe
ctctagatctgcatgccatattcag

SEQ ID NO: 305172 - DNA, 25 bp, Artificial
  Probe
cctggtctgtgaggatctgaagaga

SEQ ID NO: 305173 - DNA, 25 bp, Artificial
  Probe
aaactgtaaatcctggtctgtgagg

SEQ ID NO: 305174 - DNA, 25 bp, Artificial
  Probe
ctccacctacgtttgcatcatggaa

SEQ ID NO: 305175 - DNA, 25 bp, Artificial
  Probe
cttgcccacaaaacactagaggtgg

SEQ ID NO: 305176 - DNA, 25 bp, Artificial
  Probe
gattgtgggcatctttgctctgtgt

SEQ ID NO: 305177 - DNA, 25 bp, Artificial
  Probe
gtataattcttcagtcaagatactg

SEQ ID NO: 305178 - DNA, 25 bp, Artificial
  Probe
ctgctttagagctaggtactagagt

SEQ ID NO: 305179 - DNA, 25 bp, Artificial
  Probe
gctagaactgattccaaaaactgtt

SEQ ID NO: 305180 - DNA, 25 bp, Artificial
  Probe
cttcagtcaagatactgtagtgtta

SEQ ID NO: 305181 - DNA, 25 bp, Artificial
  Probe
ttacagtttattggatcccaaagta

SEQ ID NO: 305182 - DNA, 25 bp, Artificial
  Probe
aatgtggccatcctcctgtcacacg

SEQ ID NO: 305183 - DNA, 25 bp, Artificial
  Probe
caggaaccgggacttccgctacagt

SEQ ID NO: 305184 - DNA, 25 bp, Artificial
  Probe
agccctggccaaggacaagcccaaa

SEQ ID NO: 305185 - DNA, 25 bp, Artificial
  Probe
ctgtcacacgccaattcagttgtca

SEQ ID NO: 305186 - DNA, 25 bp, Artificial
  Probe
actgcacccctgctttagagctagg

SEQ ID NO: 305187 - DNA, 25 bp, Artificial
  Probe
cacaaaacactagaggtggaaactt

SEQ ID NO: 305188 - DNA, 25 bp, Artificial
  Probe
tttttaagaatctgcctcattcgtg

SEQ ID NO: 305189 - DNA, 25 bp, Artificial
  Probe
tggaaacttggagagctgggtcctt

SEQ ID NO: 305190 - DNA, 25 bp, Artificial
  Probe
gtactagagtttgcttctctctcac

SEQ ID NO: 305191 - DNA, 25 bp, Artificial
  Probe
cagtttattggatcccaaagtatga

SEQ ID NO: 305192 - DNA, 25 bp, Artificial
  Probe
agcaactgcacagaacctggggatg

SEQ ID NO: 305193 - DNA, 25 bp, Artificial
  Probe
caccagcaactgcacagaacctggg

SEQ ID NO: 305194 - DNA, 25 bp, Artificial
  Probe
ggggacagtcaactttcagtctgag

SEQ ID NO: 305195 - DNA, 25 bp, Artificial
  Probe
ggatggcatcacgaataagagctgc

SEQ ID NO: 305196 - DNA, 25 bp, Artificial
  Probe
tcccatgagctacatggtttatttc

SEQ ID NO: 305197 - DNA, 25 bp, Artificial
  Probe
cgcggccaagtcactggctatgatt

SEQ ID NO: 305198 - DNA, 25 bp, Artificial
  Probe
agagctgggtccttcctccactgca

SEQ ID NO: 305199 - DNA, 25 bp, Artificial
  Probe
gccaattcagttgtcaatcccattg

SEQ ID NO: 305200 - DNA, 25 bp, Artificial
  Probe
aatgactgaaacttaccttactgtg

SEQ ID NO: 305201 - DNA, 25 bp, Artificial
  Probe
acaatggactggacacagctggtga

SEQ ID NO: 305202 - DNA, 25 bp, Artificial
  Probe
aacacgagcaagagggatcatcgct

SEQ ID NO: 305203 - DNA, 25 bp, Artificial
  Probe
tctgccagacggacaccaagggtgg

SEQ ID NO: 305204 - DNA, 25 bp, Artificial
  Probe
ctggcctttgggagaagaaggctta

SEQ ID NO: 305205 - DNA, 25 bp, Artificial
  Probe
cagtaaagaccgtgccaccagcaac

SEQ ID NO: 305206 - DNA, 25 bp, Artificial
  Probe
cttacttactgtgtggatggcgggc

SEQ ID NO: 305207 - DNA, 25 bp, Artificial
  Probe
aagtatttttcacttacagcaatgg

SEQ ID NO: 305208 - DNA, 25 bp, Artificial
  Probe
gccctgaacgcttgccaggagtcac

SEQ ID NO: 305209 - DNA, 25 bp, Artificial
  Probe
agcaaaatcccctagctgtgtatta

SEQ ID NO: 305210 - DNA, 25 bp, Artificial
  Probe
ctcattcgtggtagaaaaatgactg

SEQ ID NO: 305211 - DNA, 25 bp, Artificial
  Probe
cttactgtgaaacactgtgaactat

SEQ ID NO: 305212 - DNA, 25 bp, Artificial
  Probe
tgactcctttcctgggttggaacag

SEQ ID NO: 305213 - DNA, 25 bp, Artificial
  Probe
ctctgtgttggctccccgtgcatgc

SEQ ID NO: 305214 - DNA, 25 bp, Artificial
  Probe
cggctagaactgattccaaaaactg

SEQ ID NO: 305215 - DNA, 25 bp, Artificial
  Probe
ttcacttacagcaatgggaaaataa

SEQ ID NO: 305216 - DNA, 25 bp, Artificial
  Probe
tatttcaacttctttgggtgtgtcc

SEQ ID NO: 305217 - DNA, 25 bp, Artificial
  Probe
atgaatgtggccatcctcctgtcac

SEQ ID NO: 305218 - DNA, 25 bp, Artificial
  Probe
ggacaactaccctctcaagcatgtg

SEQ ID NO: 305219 - DNA, 25 bp, Artificial
  Probe
caggaccacgctgcagcgggagatc

SEQ ID NO: 305220 - DNA, 25 bp, Artificial
  Probe
agcccaaatgggtgatgaatgtggc

SEQ ID NO: 305221 - DNA, 25 bp, Artificial
  Probe
acccaatactgagaaggagtatctt

SEQ ID NO: 305222 - DNA, 25 bp, Artificial
  Probe
tctatcaacaatatcgctgagaatg

SEQ ID NO: 305223 - DNA, 25 bp, Artificial
  Probe
gggccttattgtctcttctatcaac

SEQ ID NO: 305224 - DNA, 25 bp, Artificial
  Probe
taaatgatgcaggttcctgaggtgc

SEQ ID NO: 305225 - DNA, 25 bp, Artificial
  Probe
ccaaagagtgggactgtgagaagac

SEQ ID NO: 305226 - DNA, 25 bp, Artificial
  Probe
atatcgctgagaatgttaagcacaa

SEQ ID NO: 305227 - DNA, 25 bp, Artificial
  Probe
aacaggattcctgtgggttctcagg

SEQ ID NO: 305228 - DNA, 25 bp, Artificial
  Probe
acaatgacatcctggggccttattg

SEQ ID NO: 305229 - DNA, 25 bp, Artificial
  Probe
tccttgaaaggcaagacttacctag

SEQ ID NO: 305230 - DNA, 25 bp, Artificial
  Probe
gggttgatctgcttttcaatgtgac

SEQ ID NO: 305231 - DNA, 25 bp, Artificial
  Probe
catgtacaacaggattcctgtgggt

SEQ ID NO: 305232 - DNA, 25 bp, Artificial
  Probe
catcctggggccttattgtctcttc

SEQ ID NO: 305233 - DNA, 25 bp, Artificial
  Probe
agccacggtgtggaataaatgatgc

SEQ ID NO: 305234 - DNA, 25 bp, Artificial
  Probe
aacgtgtggccctgatcatgaagtg

SEQ ID NO: 305235 - DNA, 25 bp, Artificial
  Probe
gcagaaaccacatgttcaaatttga

SEQ ID NO: 305236 - DNA, 25 bp, Artificial
  Probe
ggaaattccagaaccccatgtccat

SEQ ID NO: 305237 - DNA, 25 bp, Artificial
  Probe
gaagtgccaccaactttaactgact

SEQ ID NO: 305238 - DNA, 25 bp, Artificial
  Probe
tctgtaccaagaaaagcagatatta

SEQ ID NO: 305239 - DNA, 25 bp, Artificial
  Probe
aatatcagcttgaggatcaaagctg

SEQ ID NO: 305240 - DNA, 25 bp, Artificial
  Probe
cgatactcaaggagattaagcaggg

SEQ ID NO: 305241 - DNA, 25 bp, Artificial
  Probe
gggaaattccagaaccccatgtcca

SEQ ID NO: 305242 - DNA, 25 bp, Artificial
  Probe
cttagtggcaaaacgcctttgggtg

SEQ ID NO: 305243 - DNA, 25 bp, Artificial
  Probe
ataatatcagcttgaggatcaaagc

SEQ ID NO: 305244 - DNA, 25 bp, Artificial
  Probe
acctgtttggtcaggcactgaaggt

SEQ ID NO: 305245 - DNA, 25 bp, Artificial
  Probe
caatgtgaccatcgaggttagtgtg

SEQ ID NO: 305246 - DNA, 25 bp, Artificial
  Probe
agaaccccatgtccattgcccagat

SEQ ID NO: 305247 - DNA, 25 bp, Artificial
  Probe
cattcctgagccacggtgtggaata

SEQ ID NO: 305248 - DNA, 25 bp, Artificial
  Probe
cgtttcaaatctgtaccaagaaaag

SEQ ID NO: 305249 - DNA, 25 bp, Artificial
  Probe
ccaacttcacccaatactgagaagg

SEQ ID NO: 305250 - DNA, 25 bp, Artificial
  Probe
actatgtatacgatactcaaggaga

SEQ ID NO: 305251 - DNA, 25 bp, Artificial
  Probe
atacaccataaacaaccagctgagg

SEQ ID NO: 305252 - DNA, 25 bp, Artificial
  Probe
atttgaaaccacaatgacatcctgg

SEQ ID NO: 305253 - DNA, 25 bp, Artificial
  Probe
cttctgttgtatgtgaccaaaggat

SEQ ID NO: 305254 - DNA, 25 bp, Artificial
  Probe
caaccttggccctgacatgcatgta

SEQ ID NO: 305255 - DNA, 25 bp, Artificial
  Probe
ttaacagtgctactccattcctgag

SEQ ID NO: 305256 - DNA, 25 bp, Artificial
  Probe
aatgttaagcacaagacctattggg

SEQ ID NO: 305257 - DNA, 25 bp, Artificial
  Probe
cttcagtgtggacacaggagcagtg

SEQ ID NO: 305258 - DNA, 25 bp, Artificial
  Probe
aaagtggatctgtgctccttgctgt

SEQ ID NO: 305259 - DNA, 25 bp, Artificial
  Probe
tagatgtgccccaagtaacgtgtgg

SEQ ID NO: 305260 - DNA, 25 bp, Artificial
  Probe
ggagcagtggcaaccttggccctga

SEQ ID NO: 305261 - DNA, 25 bp, Artificial
  Probe
ggagtatcttctgttgtatgtgacc

SEQ ID NO: 305262 - DNA, 25 bp, Artificial
  Probe
tggaagaagcgcagcgcagaaacca

SEQ ID NO: 305263 - DNA, 25 bp, Artificial
  Probe
gaaccccatgtccattgcccagatt

SEQ ID NO: 305264 - DNA, 25 bp, Artificial
  Probe
attattggagacatctacagcactg

SEQ ID NO: 305265 - DNA, 25 bp, Artificial
  Probe
attctcccttccttgaaaggcaaga

SEQ ID NO: 305266 - DNA, 25 bp, Artificial
  Probe
acaccataaacaaccagctgagggg

SEQ ID NO: 305267 - DNA, 25 bp, Artificial
  Probe
tgattggcgctgtgcgcgctccatg

SEQ ID NO: 305268 - DNA, 25 bp, Artificial
  Probe
cgacgtaaactacactcagctagtc

SEQ ID NO: 305269 - DNA, 25 bp, Artificial
  Probe
ctgcatgcccgatacgccgagtgtg

SEQ ID NO: 305270 - DNA, 25 bp, Artificial
  Probe
ctggcaccatgtgtgcatcccgcga

SEQ ID NO: 305271 - DNA, 25 bp, Artificial
  Probe
tacactcagctagtcgatctgcatg

SEQ ID NO: 305272 - DNA, 25 bp, Artificial
  Probe
cgctgtgcgcgctccatgcacgaat

SEQ ID NO: 305273 - DNA, 25 bp, Artificial
  Probe
gctagtcgatctgcatgcccgatac

SEQ ID NO: 305274 - DNA, 25 bp, Artificial
  Probe
gcagtcccgaggacctggcgtgcat

SEQ ID NO: 305275 - DNA, 25 bp, Artificial
  Probe
cctggctggcaccatgtgtgcatcc

SEQ ID NO: 305276 - DNA, 25 bp, Artificial
  Probe
gcaccatgtgtgcatcccgcgatga

SEQ ID NO: 305277 - DNA, 25 bp, Artificial
  Probe
tgcatcccgcgatgattggcgctgt

SEQ ID NO: 305278 - DNA, 25 bp, Artificial
  Probe
atgggcacatggtttgcctggataa

SEQ ID NO: 305279 - DNA, 25 bp, Artificial
  Probe
acatcgatgggcacatggtttgcct

SEQ ID NO: 305280 - DNA, 25 bp, Artificial
  Probe
ggcaccatgtgtgcatcccgcgatg

SEQ ID NO: 305281 - DNA, 25 bp, Artificial
  Probe
tagtcgatctgcatgcccgatacgc

SEQ ID NO: 305282 - DNA, 25 bp, Artificial
  Probe
catcccgcgatgattggcgctgtgc

SEQ ID NO: 305283 - DNA, 25 bp, Artificial
  Probe
cagctagtcgatctgcatgcccgat

SEQ ID NO: 305284 - DNA, 25 bp, Artificial
  Probe
actacactcagctagtcgatctgca

SEQ ID NO: 305285 - DNA, 25 bp, Artificial
  Probe
tggctggcaccatgtgtgcatcccg

SEQ ID NO: 305286 - DNA, 25 bp, Artificial
  Probe
acccactgtggaaatggatgaaagt

SEQ ID NO: 305287 - DNA, 25 bp, Artificial
  Probe
gcatcccgcgatgattggcgctgtg

SEQ ID NO: 305288 - DNA, 25 bp, Artificial
  Probe
tcgatgggcacatggtttgcctgga

SEQ ID NO: 305289 - DNA, 25 bp, Artificial
  Probe
tgcatgcccgatacgccgagtgtgg

SEQ ID NO: 305290 - DNA, 25 bp, Artificial
  Probe
gatgattggcgctgtgcgcgctcca

SEQ ID NO: 305291 - DNA, 25 bp, Artificial
  Probe
tcagctagtcgatctgcatgcccga

SEQ ID NO: 305292 - DNA, 25 bp, Artificial
  Probe
ggctggcaccatgtgtgcatcccgc

SEQ ID NO: 305293 - DNA, 25 bp, Artificial
  Probe
agtcccgaggacctggcgtgcatcc

SEQ ID NO: 305294 - DNA, 25 bp, Artificial
  Probe
accatgtgtgcatcccgcgatgatt

SEQ ID NO: 305295 - DNA, 25 bp, Artificial
  Probe
atcgatgggcacatggtttgcctgg

SEQ ID NO: 305296 - DNA, 25 bp, Artificial
  Probe
agtcgatctgcatgcccgatacgcc

SEQ ID NO: 305297 - DNA, 25 bp, Artificial
  Probe
tcccgcgatgattggcgctgtgcgc

SEQ ID NO: 305298 - DNA, 25 bp, Artificial
  Probe
tgcctgaaaaccagcccgctggtgg

SEQ ID NO: 305299 - DNA, 25 bp, Artificial
  Probe
cacccactgtggaaatggatgaaag

SEQ ID NO: 305300 - DNA, 25 bp, Artificial
  Probe
ccgacgtaaactacactcagctagt

SEQ ID NO: 305301 - DNA, 25 bp, Artificial
  Probe
gacgtaaactacactcagctagtcg

SEQ ID NO: 305302 - DNA, 25 bp, Artificial
  Probe
cgatgggcacatggtttgcctggat

SEQ ID NO: 305303 - DNA, 25 bp, Artificial
  Probe
gtaaactacactcagctagtcgatc

SEQ ID NO: 305304 - DNA, 25 bp, Artificial
  Probe
actcagctagtcgatctgcatgccc

SEQ ID NO: 305305 - DNA, 25 bp, Artificial
  Probe
gctgtgcgcgctccatgcacgaatt

SEQ ID NO: 305306 - DNA, 25 bp, Artificial
  Probe
atcccgcgatgattggcgctgtgcg

SEQ ID NO: 305307 - DNA, 25 bp, Artificial
  Probe
gcctggctggcaccatgtgtgcatc

SEQ ID NO: 305308 - DNA, 25 bp, Artificial
  Probe
cccactgtggaaatggatgaaagtc

SEQ ID NO: 305309 - DNA, 25 bp, Artificial
  Probe
aaactacactcagctagtcgatctg

SEQ ID NO: 305310 - DNA, 25 bp, Artificial
  Probe
tctgcatgcccgatacgccgagtgt

SEQ ID NO: 305311 - DNA, 25 bp, Artificial
  Probe
cgtaaactacactcagctagtcgat

SEQ ID NO: 305312 - DNA, 25 bp, Artificial
  Probe
ctacactcagctagtcgatctgcat

SEQ ID NO: 305313 - DNA, 25 bp, Artificial
  Probe
gagttgactcttccaactacgaccc

SEQ ID NO: 305314 - DNA, 25 bp, Artificial
  Probe
atcagctgcggctgtaccaggagaa

SEQ ID NO: 305315 - DNA, 25 bp, Artificial
  Probe
aactgtgtgcctcacgtttgtcctt

SEQ ID NO: 305316 - DNA, 25 bp, Artificial
  Probe
aagacatgttcagtgaccccaactt

SEQ ID NO: 305317 - DNA, 25 bp, Artificial
  Probe
tccaactcaggagaaggtgacattt

SEQ ID NO: 305318 - DNA, 25 bp, Artificial
  Probe
cgagccactcaccatagagatgaca

SEQ ID NO: 305319 - DNA, 25 bp, Artificial
  Probe
ctctgtgcgcgcacatgcgtgcggt

SEQ ID NO: 305320 - DNA, 25 bp, Artificial
  Probe
tgagtaacagcaggttctactccta

SEQ ID NO: 305321 - DNA, 25 bp, Artificial
  Probe
ctgagaagtatgacccgatgccccc

SEQ ID NO: 305322 - DNA, 25 bp, Artificial
  Probe
tccctctgaagaacgggtacagtga

SEQ ID NO: 305323 - DNA, 25 bp, Artificial
  Probe
ccctcctggttttctgtgagatgcg

SEQ ID NO: 305324 - DNA, 25 bp, Artificial
  Probe
cacgtttgtccttccctgttctcag

SEQ ID NO: 305325 - DNA, 25 bp, Artificial
  Probe
aagacgacggttgtgaatgacaacg

SEQ ID NO: 305326 - DNA, 25 bp, Artificial
  Probe
tcttttgtggagacaaaggcagaca

SEQ ID NO: 305327 - DNA, 25 bp, Artificial
  Probe
ccctttgtagaggtggaaatctgtg

SEQ ID NO: 305328 - DNA, 25 bp, Artificial
  Probe
gctcttcctgtatgacacacaccag

SEQ ID NO: 305329 - DNA, 25 bp, Artificial
  Probe
gttcatctgtgacattcattgtcct

SEQ ID NO: 305330 - DNA, 25 bp, Artificial
  Probe
agatgacatttctgaagacgtcccc

SEQ ID NO: 305331 - DNA, 25 bp, Artificial
  Probe
aggaagagctcaacaaccagctctt

SEQ ID NO: 305332 - DNA, 25 bp, Artificial
  Probe
aggagttgagaccttcctgctgttt

SEQ ID NO: 305333 - DNA, 25 bp, Artificial
  Probe
gaagaagaactctattcctcctgtc

SEQ ID NO: 305334 - DNA, 25 bp, Artificial
  Probe
agaggaatcagtccattgctattga

SEQ ID NO: 305335 - DNA, 25 bp, Artificial
  Probe
gaatgacaacggtctcagccctgtc

SEQ ID NO: 305336 - DNA, 25 bp, Artificial
  Probe
agtgaccccaacttcctggctcatg

SEQ ID NO: 305337 - DNA, 25 bp, Artificial
  Probe
atgacccaaaccttgcgttcctacg

SEQ ID NO: 305338 - DNA, 25 bp, Artificial
  Probe
agaactctattcctcctgtcgccag

SEQ ID NO: 305339 - DNA, 25 bp, Artificial
  Probe
gagctcaacaaccagctcttcctgt

SEQ ID NO: 305340 - DNA, 25 bp, Artificial
  Probe
aaaggcagacagcattgtcaggcaa

SEQ ID NO: 305341 - DNA, 25 bp, Artificial
  Probe
gcggctgtaccaggagaagtgtaac

SEQ ID NO: 305342 - DNA, 25 bp, Artificial
  Probe
cccttccgtctgtggctgtgtggct

SEQ ID NO: 305343 - DNA, 25 bp, Artificial
  Probe
aggatttagatcagtccctctgaag

SEQ ID NO: 305344 - DNA, 25 bp, Artificial
  Probe
ctgttctcagcctctttgaataaag

SEQ ID NO: 305345 - DNA, 25 bp, Artificial
  Probe
tctgtggggccgagtatgacagcaa

SEQ ID NO: 305346 - DNA, 25 bp, Artificial
  Probe
acagtgaagacatcgagctggcatc

SEQ ID NO: 305347 - DNA, 25 bp, Artificial
  Probe
cccattaaaggcatcaaatcaggat

SEQ ID NO: 305348 - DNA, 25 bp, Artificial
  Probe
tctggtctacgaagaagacatgttc

SEQ ID NO: 305349 - DNA, 25 bp, Artificial
  Probe
ccattaaaggcatcaaatcaggatt

SEQ ID NO: 305350 - DNA, 25 bp, Artificial
  Probe
tggaaaatcctgacttccgggaaat

SEQ ID NO: 305351 - DNA, 25 bp, Artificial
  Probe
caaggttcttggtgcacgccacctc

SEQ ID NO: 305352 - DNA, 25 bp, Artificial
  Probe
gctgtttttccaccttggacaactt

SEQ ID NO: 305353 - DNA, 25 bp, Artificial
  Probe
gacaccaaggagaacaacatgaagt

SEQ ID NO: 305354 - DNA, 25 bp, Artificial
  Probe
ggtctcagccctgtctgggctccaa

SEQ ID NO: 305355 - DNA, 25 bp, Artificial
  Probe
cggagtatcgcctgtccctttgtag

SEQ ID NO: 305356 - DNA, 25 bp, Artificial
  Probe
tgccctggtgaaggagttcaatgtt

SEQ ID NO: 305357 - DNA, 25 bp, Artificial
  Probe
accaaggaccatttggaaaatcctg

SEQ ID NO: 305358 - DNA, 25 bp, Artificial
  Probe
tgacccgtgtctaccccaagggaca

SEQ ID NO: 305359 - DNA, 25 bp, Artificial
  Probe
aactgtgtggtcttgaacctccgta

SEQ ID NO: 305360 - DNA, 25 bp, Artificial
  Probe
cttgaacctccgtatagtccgaatc

SEQ ID NO: 305361 - DNA, 25 bp, Artificial
  Probe
gaacctccgtatagtccgaatccct

SEQ ID NO: 305362 - DNA, 25 bp, Artificial
  Probe
ccctggcttctgcaactgtgtggtc

SEQ ID NO: 305363 - DNA, 25 bp, Artificial
  Probe
tgtgtggtcttgaacctccgtatag

SEQ ID NO: 305364 - DNA, 25 bp, Artificial
  Probe
tgtgccgagttaagggcactgaaaa

SEQ ID NO: 305365 - DNA, 25 bp, Artificial
  Probe
tgcaactgtgtggtcttgaacctcc

SEQ ID NO: 305366 - DNA, 25 bp, Artificial
  Probe
tccagaacatgcacaggacatagga

SEQ ID NO: 305367 - DNA, 25 bp, Artificial
  Probe
ccttccaatagcatattggtgcaca

SEQ ID NO: 305368 - DNA, 25 bp, Artificial
  Probe
cagaacatgcacaggacataggaga

SEQ ID NO: 305369 - DNA, 25 bp, Artificial
  Probe
gcctccttccaatagcatattggtg

SEQ ID NO: 305370 - DNA, 25 bp, Artificial
  Probe
agcctccttccaatagcatattggt

SEQ ID NO: 305371 - DNA, 25 bp, Artificial
  Probe
ctggcttctgcaactgtgtggtctt

SEQ ID NO: 305372 - DNA, 25 bp, Artificial
  Probe
cctagccctggcttctgcaactgtg

SEQ ID NO: 305373 - DNA, 25 bp, Artificial
  Probe
cctggcttctgcaactgtgtggtct

SEQ ID NO: 305374 - DNA, 25 bp, Artificial
  Probe
agccctggcttctgcaactgtgtgg

SEQ ID NO: 305375 - DNA, 25 bp, Artificial
  Probe
aagcctccttccaatagcatattgg

SEQ ID NO: 305376 - DNA, 25 bp, Artificial
  Probe
agaacatgcacaggacataggagat

SEQ ID NO: 305377 - DNA, 25 bp, Artificial
  Probe
ctgcaactgtgtggtcttgaacctc

SEQ ID NO: 305378 - DNA, 25 bp, Artificial
  Probe
tgtggtcttgaacctccgtatagtc

SEQ ID NO: 305379 - DNA, 25 bp, Artificial
  Probe
tggtcttgaacctccgtatagtccg

SEQ ID NO: 305380 - DNA, 25 bp, Artificial
  Probe
caactgtgtggtcttgaacctccgt

SEQ ID NO: 305381 - DNA, 25 bp, Artificial
  Probe
ttccaatagcatattggtgcacacc

SEQ ID NO: 305382 - DNA, 25 bp, Artificial
  Probe
ccagaacatgcacaggacataggag

SEQ ID NO: 305383 - DNA, 25 bp, Artificial
  Probe
cctccttccaatagcatattggtgc

SEQ ID NO: 305384 - DNA, 25 bp, Artificial
  Probe
tccttccaatagcatattggtgcac

SEQ ID NO: 305385 - DNA, 25 bp, Artificial
  Probe
ctgtgtggtcttgaacctccgtata

SEQ ID NO: 305386 - DNA, 25 bp, Artificial
  Probe
gcaactgtgtggtcttgaacctccg

SEQ ID NO: 305387 - DNA, 25 bp, Artificial
  Probe
tggcttctgcaactgtgtggtcttg

SEQ ID NO: 305388 - DNA, 25 bp, Artificial
  Probe
gtgtggtcttgaacctccgtatagt

SEQ ID NO: 305389 - DNA, 25 bp, Artificial
  Probe
ctagccctggcttctgcaactgtgt

SEQ ID NO: 305390 - DNA, 25 bp, Artificial
  Probe
tccaatagcatattggtgcacaccc

SEQ ID NO: 305391 - DNA, 25 bp, Artificial
  Probe
actgtgtggtcttgaacctccgtat

SEQ ID NO: 305392 - DNA, 25 bp, Artificial
  Probe
ggcttctgcaactgtgtggtcttga

SEQ ID NO: 305393 - DNA, 25 bp, Artificial
  Probe
ttctgcaactgtgtggtcttgaacc

SEQ ID NO: 305394 - DNA, 25 bp, Artificial
  Probe
gccctggcttctgcaactgtgtggt

SEQ ID NO: 305395 - DNA, 25 bp, Artificial
  Probe
aacatgcacaggacataggagatcc

SEQ ID NO: 305396 - DNA, 25 bp, Artificial
  Probe
catgcacaggacataggagatccat

SEQ ID NO: 305397 - DNA, 25 bp, Artificial
  Probe
tctgcaactgtgtggtcttgaacct

SEQ ID NO: 305398 - DNA, 25 bp, Artificial
  Probe
cttctgcaactgtgtggtcttgaac

SEQ ID NO: 305399 - DNA, 25 bp, Artificial
  Probe
gtggtcttgaacctccgtatagtcc

SEQ ID NO: 305400 - DNA, 25 bp, Artificial
  Probe
acatgcacaggacataggagatcca

SEQ ID NO: 305401 - DNA, 25 bp, Artificial
  Probe
cttccaatagcatattggtgcacac

SEQ ID NO: 305402 - DNA, 25 bp, Artificial
  Probe
tgaacctccgtatagtccgaatccc

SEQ ID NO: 305403 - DNA, 25 bp, Artificial
  Probe
gaacatgcacaggacataggagatc

SEQ ID NO: 305404 - DNA, 25 bp, Artificial
  Probe
tagccctggcttctgcaactgtgtg

SEQ ID NO: 305405 - DNA, 25 bp, Artificial
  Probe
tcggcatcatgagaaggctactgcg

SEQ ID NO: 305406 - DNA, 25 bp, Artificial
  Probe
tgggatccactgagcgtgatgcaga

SEQ ID NO: 305407 - DNA, 25 bp, Artificial
  Probe
tcctggcgccggaagtgctcacaga

SEQ ID NO: 305408 - DNA, 25 bp, Artificial
  Probe
cgtcaatgatgaggttcgttatccc

SEQ ID NO: 305409 - DNA, 25 bp, Artificial
  Probe
gtatttgacagcatcgtcaatgatg

SEQ ID NO: 305410 - DNA, 25 bp, Artificial
  Probe
gaggccatcggcatcatgagaaggc

SEQ ID NO: 305411 - DNA, 25 bp, Artificial
  Probe
ccttcgtgcctacactttcggggcg

SEQ ID NO: 305412 - DNA, 25 bp, Artificial
  Probe
cccagagcggaggttgggatccact

SEQ ID NO: 305413 - DNA, 25 bp, Artificial
  Probe
cttcgtgcctacactttcggggcgc

SEQ ID NO: 305414 - DNA, 25 bp, Artificial
  Probe
atcctacactcgagccgtggactgg

SEQ ID NO: 305415 - DNA, 25 bp, Artificial
  Probe
atttgacagcatcgtcaatgatgag

SEQ ID NO: 305416 - DNA, 25 bp, Artificial
  Probe
actgggatgccctgctggcccgtcg

SEQ ID NO: 305417 - DNA, 25 bp, Artificial
  Probe
gcctttcttcaggactctggactgg

SEQ ID NO: 305418 - DNA, 25 bp, Artificial
  Probe
catgagaaggctactgcggaggaac

SEQ ID NO: 305419 - DNA, 25 bp, Artificial
  Probe
attctgcggaactccggagttcctg

SEQ ID NO: 305420 - DNA, 25 bp, Artificial
  Probe
acagctgcggagcaggcggccttcc

SEQ ID NO: 305421 - DNA, 25 bp, Artificial
  Probe
gacacatcctacactcgagccgtgg

SEQ ID NO: 305422 - DNA, 25 bp, Artificial
  Probe
ctctggactgggatgccctgctggc

SEQ ID NO: 305423 - DNA, 25 bp, Artificial
  Probe
tctggactgggatgccctgctggcc

SEQ ID NO: 305424 - DNA, 25 bp, Artificial
  Probe
tgcacggcccctgacagctgcggag

SEQ ID NO: 305425 - DNA, 25 bp, Artificial
  Probe
acggcccctgacagctgcggagcag

SEQ ID NO: 305426 - DNA, 25 bp, Artificial
  Probe
atccactgagcgtgatgcagaagat

SEQ ID NO: 305427 - DNA, 25 bp, Artificial
  Probe
atgcacggcccctgacagctgcgga

SEQ ID NO: 305428 - DNA, 25 bp, Artificial
  Probe
acatcctacactcgagccgtggact

SEQ ID NO: 305429 - DNA, 25 bp, Artificial
  Probe
gtgcctacactttcggggcgcacag

SEQ ID NO: 305430 - DNA, 25 bp, Artificial
  Probe
aacccagagcggaggttgggatcca

SEQ ID NO: 305431 - DNA, 25 bp, Artificial
  Probe
agacacatcctacactcgagccgtg

SEQ ID NO: 305432 - DNA, 25 bp, Artificial
  Probe
ctactgcggaggaacccagagcgga

SEQ ID NO: 305433 - DNA, 25 bp, Artificial
  Probe
tgaggttcgttatccccgcttcctg

SEQ ID NO: 305434 - DNA, 25 bp, Artificial
  Probe
gaagtgctcacagacacatcctaca

SEQ ID NO: 305435 - DNA, 25 bp, Artificial
  Probe
cggaagtgctcacagacacatccta

SEQ ID NO: 305436 - DNA, 25 bp, Artificial
  Probe
cactgagcgtgatgcagaagatgtg

SEQ ID NO: 305437 - DNA, 25 bp, Artificial
  Probe
agcaggcggccttccgggatttcga

SEQ ID NO: 305438 - DNA, 25 bp, Artificial
  Probe
ccgggatttcgactttgtggcagga

SEQ ID NO: 305439 - DNA, 25 bp, Artificial
  Probe
aggctactgcggaggaacccagagc

SEQ ID NO: 305440 - DNA, 25 bp, Artificial
  Probe
gttgggatccactgagcgtgatgca

SEQ ID NO: 305441 - DNA, 25 bp, Artificial
  Probe
cttccgggatttcgactttgtggca

SEQ ID NO: 305442 - DNA, 25 bp, Artificial
  Probe
aagtatttgacagcatcgtcaatga

SEQ ID NO: 305443 - DNA, 25 bp, Artificial
  Probe
gccggaagtgctcacagacacatcc

SEQ ID NO: 305444 - DNA, 25 bp, Artificial
  Probe
ctgcggaggccatcggcatcatgag

SEQ ID NO: 305445 - DNA, 25 bp, Artificial
  Probe
tgatgaggttcgttatccccgcttc

SEQ ID NO: 305446 - DNA, 25 bp, Artificial
  Probe
tcctgtctgcggaggccatcggcat

SEQ ID NO: 305447 - DNA, 25 bp, Artificial
  Probe
aggactctggactgggatgccctgc

SEQ ID NO: 305448 - DNA, 25 bp, Artificial
  Probe
ctttcggggcgcacagacgtcagca

SEQ ID NO: 305449 - DNA, 25 bp, Artificial
  Probe
gccttgcccaagagttcttggtttt

SEQ ID NO: 305450 - DNA, 25 bp, Artificial
  Probe
acttcgatgaggagttcactgggga

SEQ ID NO: 305451 - DNA, 25 bp, Artificial
  Probe
atggagatgcccttcaccaaggagc

SEQ ID NO: 305452 - DNA, 25 bp, Artificial
  Probe
cccaagccggccattgaaaactcaa

SEQ ID NO: 305453 - DNA, 25 bp, Artificial
  Probe
gggctatcttgcagggtgtagactc

SEQ ID NO: 305454 - DNA, 25 bp, Artificial
  Probe
ggagatgcccttcaccaaggagccc

SEQ ID NO: 305455 - DNA, 25 bp, Artificial
  Probe
tgagcggaggcctcagcaacctgct

SEQ ID NO: 305456 - DNA, 25 bp, Artificial
  Probe
agagagatctctagggccccaactt

SEQ ID NO: 305457 - DNA, 25 bp, Artificial
  Probe
gagccccgctggttgtttgggacca

SEQ ID NO: 305458 - DNA, 25 bp, Artificial
  Probe
ccagagggccgcttggaacagtacc

SEQ ID NO: 305459 - DNA, 25 bp, Artificial
  Probe
cagcctcaaggatgagatgaatcac

SEQ ID NO: 305460 - DNA, 25 bp, Artificial
  Probe
taccgaaccacgtgcccagtatggg

SEQ ID NO: 305461 - DNA, 25 bp, Artificial
  Probe
tctgtgagtgggtttacgattacac

SEQ ID NO: 305462 - DNA, 25 bp, Artificial
  Probe
atttcgagtacagtagttacaacta

SEQ ID NO: 305463 - DNA, 25 bp, Artificial
  Probe
gtttccatggtatggagatgccctt

SEQ ID NO: 305464 - DNA, 25 bp, Artificial
  Probe
cagagccagacagtgatgacaacct

SEQ ID NO: 305465 - DNA, 25 bp, Artificial
  Probe
tgctcttccgatgctcgctaccgaa

SEQ ID NO: 305466 - DNA, 25 bp, Artificial
  Probe
ccttttcatccgtcattatctggcg

SEQ ID NO: 305467 - DNA, 25 bp, Artificial
  Probe
aacctggtggagatgtacagcctca

SEQ ID NO: 305468 - DNA, 25 bp, Artificial
  Probe
cttgcagagagatctctagggcccc

SEQ ID NO: 305469 - DNA, 25 bp, Artificial
  Probe
agatgtacagcctcaaggatgagat

SEQ ID NO: 305470 - DNA, 25 bp, Artificial
  Probe
gcctatcagtggtgccgggagtacc

SEQ ID NO: 305471 - DNA, 25 bp, Artificial
  Probe
ctcatgttggttgatttcgagtaca

SEQ ID NO: 305472 - DNA, 25 bp, Artificial
  Probe
cgcgcagcgccgagcctatcagtgg

SEQ ID NO: 305473 - DNA, 25 bp, Artificial
  Probe
ctggatgctaagtgcccagaaccaa

SEQ ID NO: 305474 - DNA, 25 bp, Artificial
  Probe
cacttacgaggagtggcctttctac

SEQ ID NO: 305475 - DNA, 25 bp, Artificial
  Probe
tccccagatgaacctggtggagatg

SEQ ID NO: 305476 - DNA, 25 bp, Artificial
  Probe
ccactatagagtttggctacttgga

SEQ ID NO: 305477 - DNA, 25 bp, Artificial
  Probe
cgtttgccccgtgagcggaggcctc

SEQ ID NO: 305478 - DNA, 25 bp, Artificial
  Probe
ctccttggtattagaaagcgtgatg

SEQ ID NO: 305479 - DNA, 25 bp, Artificial
  Probe
gtccccagtggtcttctgccacaat

SEQ ID NO: 305480 - DNA, 25 bp, Artificial
  Probe
agcccctggggctgtgcacctaaat

SEQ ID NO: 305481 - DNA, 25 bp, Artificial
  Probe
tgacatccaggaaggaaacatctta

SEQ ID NO: 305482 - DNA, 25 bp, Artificial
  Probe
ctccaggcttccatgtccactatag

SEQ ID NO: 305483 - DNA, 25 bp, Artificial
  Probe
aatcggcggcgctcttcctcgctgt

SEQ ID NO: 305484 - DNA, 25 bp, Artificial
  Probe
atggagtgtttccagagggccgctt

SEQ ID NO: 305485 - DNA, 25 bp, Artificial
  Probe
gccgcttggaacagtacctcccaag

SEQ ID NO: 305486 - DNA, 25 bp, Artificial
  Probe
atgagatgaatcacctcaggacgtt

SEQ ID NO: 305487 - DNA, 25 bp, Artificial
  Probe
gcggaggcctcagcaacctgctctt

SEQ ID NO: 305488 - DNA, 25 bp, Artificial
  Probe
aggacgttgctagacgctacaccgt

SEQ ID NO: 305489 - DNA, 25 bp, Artificial
  Probe
tttcatccgtcattatctggcggag

SEQ ID NO: 305490 - DNA, 25 bp, Artificial
  Probe
gctaccgaaccacgtgcccagtatg

SEQ ID NO: 305491 - DNA, 25 bp, Artificial
  Probe
tgctacggctgtacggggctatctt

SEQ ID NO: 305492 - DNA, 25 bp, Artificial
  Probe
tgctgctacggctgtacggggctat

SEQ ID NO: 305493 - DNA, 25 bp, Artificial
  Probe
agatccaggacctgccgtccactag

SEQ ID NO: 305494 - DNA, 25 bp, Artificial
  Probe
gaacagcagctccttttcatccgtc

SEQ ID NO: 305495 - DNA, 25 bp, Artificial
  Probe
gcagactaccccactagagaacagc

SEQ ID NO: 305496 - DNA, 25 bp, Artificial
  Probe
tgatttcgagtacagtagttacaac

SEQ ID NO: 305497 - DNA, 25 bp, Artificial
  Probe
atgggttcaactccagcacatgaag

SEQ ID NO: 305498 - DNA, 25 bp, Artificial
  Probe
caattctcaggaatgttgcagagtg

SEQ ID NO: 305499 - DNA, 25 bp, Artificial
  Probe
gttactgagcaaagtgcttgcacat

SEQ ID NO: 305500 - DNA, 25 bp, Artificial
  Probe
actccagcacatgaagtataatggt

SEQ ID NO: 305501 - DNA, 25 bp, Artificial
  Probe
tttgcagcactactgttaaagttca

SEQ ID NO: 305502 - DNA, 25 bp, Artificial
  Probe
ctccagcacatgaagtataatggtc

SEQ ID NO: 305503 - DNA, 25 bp, Artificial
  Probe
actgagcaaagtgcttgcacatttg

SEQ ID NO: 305504 - DNA, 25 bp, Artificial
  Probe
tcaattctcaggaatgttgcagagt

SEQ ID NO: 305505 - DNA, 25 bp, Artificial
  Probe
aaggataatccactctgctgacttt

SEQ ID NO: 305506 - DNA, 25 bp, Artificial
  Probe
atatgggttcaactccagcacatga

SEQ ID NO: 305507 - DNA, 25 bp, Artificial
  Probe
atgttgcagagtggttgtccaatcc

SEQ ID NO: 305508 - DNA, 25 bp, Artificial
  Probe
ttcaattctcaggaatgttgcagag

SEQ ID NO: 305509 - DNA, 25 bp, Artificial
  Probe
attcaattctcaggaatgttgcaga

SEQ ID NO: 305510 - DNA, 25 bp, Artificial
  Probe
gttttttgcagcactactgttaaag

SEQ ID NO: 305511 - DNA, 25 bp, Artificial
  Probe
agtggttgtccaatccgtgagaact

SEQ ID NO: 305512 - DNA, 25 bp, Artificial
  Probe
tttttgcagcactactgttaaagtt

SEQ ID NO: 305513 - DNA, 25 bp, Artificial
  Probe
ggataatccactctgctgactttca

SEQ ID NO: 305514 - DNA, 25 bp, Artificial
  Probe
agcactactgttaaagttcacaagt

SEQ ID NO: 305515 - DNA, 25 bp, Artificial
  Probe
ttatatgggttcaactccagcacat

SEQ ID NO: 305516 - DNA, 25 bp, Artificial
  Probe
aagtgcttgcacatttgctgtctgt

SEQ ID NO: 305517 - DNA, 25 bp, Artificial
  Probe
ttttttgcagcactactgttaaagt

SEQ ID NO: 305518 - DNA, 25 bp, Artificial
  Probe
tgggttcaactccagcacatgaagt

SEQ ID NO: 305519 - DNA, 25 bp, Artificial
  Probe
ggttcaactccagcacatgaagtat

SEQ ID NO: 305520 - DNA, 25 bp, Artificial
  Probe
tatgggttcaactccagcacatgaa

SEQ ID NO: 305521 - DNA, 25 bp, Artificial
  Probe
aaaggataatccactctgctgactt

SEQ ID NO: 305522 - DNA, 25 bp, Artificial
  Probe
tttatatgggttcaactccagcaca

SEQ ID NO: 305523 - DNA, 25 bp, Artificial
  Probe
ttttatatgggttcaactccagcac

SEQ ID NO: 305524 - DNA, 25 bp, Artificial
  Probe
agagtggttgtccaatccgtgagaa

SEQ ID NO: 305525 - DNA, 25 bp, Artificial
  Probe
aatgttgcagagtggttgtccaatc

SEQ ID NO: 305526 - DNA, 25 bp, Artificial
  Probe
caactccagcacatgaagtataatg

SEQ ID NO: 305527 - DNA, 25 bp, Artificial
  Probe
aggataatccactctgctgactttc

SEQ ID NO: 305528 - DNA, 25 bp, Artificial
  Probe
ttgcagagtggttgtccaatccgtg

SEQ ID NO: 305529 - DNA, 25 bp, Artificial
  Probe
ttactgagcaaagtgcttgcacatt

SEQ ID NO: 305530 - DNA, 25 bp, Artificial
  Probe
tactgagcaaagtgcttgcacattt

SEQ ID NO: 305531 - DNA, 25 bp, Artificial
  Probe
cagagtggttgtccaatccgtgaga

SEQ ID NO: 305532 - DNA, 25 bp, Artificial
  Probe
gttgcagagtggttgtccaatccgt

SEQ ID NO: 305533 - DNA, 25 bp, Artificial
  Probe
gtgcttgcacatttgctgtctgttt

SEQ ID NO: 305534 - DNA, 25 bp, Artificial
  Probe
tgttgcagagtggttgtccaatccg

SEQ ID NO: 305535 - DNA, 25 bp, Artificial
  Probe
cagcactactgttaaagttcacaag

SEQ ID NO: 305536 - DNA, 25 bp, Artificial
  Probe
caaagtgcttgcacatttgctgtct

SEQ ID NO: 305537 - DNA, 25 bp, Artificial
  Probe
gagtggttgtccaatccgtgagaac

SEQ ID NO: 305538 - DNA, 25 bp, Artificial
  Probe
ttttgcagcactactgttaaagttc

SEQ ID NO: 305539 - DNA, 25 bp, Artificial
  Probe
gttcaactccagcacatgaagtata

SEQ ID NO: 305540 - DNA, 25 bp, Artificial
  Probe
ttattcaattctcaggaatgttgca

SEQ ID NO: 305541 - DNA, 25 bp, Artificial
  Probe
aactccagcacatgaagtataatgg

SEQ ID NO: 305542 - DNA, 25 bp, Artificial
  Probe
attattcaattctcaggaatgttgc

SEQ ID NO: 305543 - DNA, 25 bp, Artificial
  Probe
aaagtcgactctttttcattgtatt

SEQ ID NO: 305544 - DNA, 25 bp, Artificial
  Probe
gactctttttcattgtatttgaaga

SEQ ID NO: 305545 - DNA, 25 bp, Artificial
  Probe
taagccctgatcttggaaaagaaaa

SEQ ID NO: 305546 - DNA, 25 bp, Artificial
  Probe
atggattcatcatccccagaacatt

SEQ ID NO: 305547 - DNA, 25 bp, Artificial
  Probe
ctagtaagccctgatcttggaaaag

SEQ ID NO: 305548 - DNA, 25 bp, Artificial
  Probe
ctttttcattgtatttgaagaagtt

SEQ ID NO: 305549 - DNA, 25 bp, Artificial
  Probe
attaaattctgatattactttcaaa

SEQ ID NO: 305550 - DNA, 25 bp, Artificial
  Probe
gtaagccctgatcttggaaaagaaa

SEQ ID NO: 305551 - DNA, 25 bp, Artificial
  Probe
ctctttttcattgtatttgaagaag

SEQ ID NO: 305552 - DNA, 25 bp, Artificial
  Probe
tcataaagtcgactctttttcattg

SEQ ID NO: 305553 - DNA, 25 bp, Artificial
  Probe
agaagagtggtggagtggggcaaac

SEQ ID NO: 305554 - DNA, 25 bp, Artificial
  Probe
acattctcataaagtcgactctttt

SEQ ID NO: 305555 - DNA, 25 bp, Artificial
  Probe
ccagaacattctcataaagtcgact

SEQ ID NO: 305556 - DNA, 25 bp, Artificial
  Probe
attctcataaagtcgactctttttc

SEQ ID NO: 305557 - DNA, 25 bp, Artificial
  Probe
ctatttcctagtaagccctgatctt

SEQ ID NO: 305558 - DNA, 25 bp, Artificial
  Probe
agccctgatcttggaaaagaaaaag

SEQ ID NO: 305559 - DNA, 25 bp, Artificial
  Probe
ggattcatcatccccagaacattct

SEQ ID NO: 305560 - DNA, 25 bp, Artificial
  Probe
tcagaaacctatttcctagtaagcc

SEQ ID NO: 305561 - DNA, 25 bp, Artificial
  Probe
tccccagaacattctcataaagtcg

SEQ ID NO: 305562 - DNA, 25 bp, Artificial
  Probe
tcgactctttttcattgtatttgaa

SEQ ID NO: 305563 - DNA, 25 bp, Artificial
  Probe
tcctagtaagccctgatcttggaaa

SEQ ID NO: 305564 - DNA, 25 bp, Artificial
  Probe
catccccagaacattctcataaagt

SEQ ID NO: 305565 - DNA, 25 bp, Artificial
  Probe
ttcatcatccccagaacattctcat

SEQ ID NO: 305566 - DNA, 25 bp, Artificial
  Probe
tttcctagtaagccctgatcttgga

SEQ ID NO: 305567 - DNA, 25 bp, Artificial
  Probe
tttcagaaacctatttcctagtaag

SEQ ID NO: 305568 - DNA, 25 bp, Artificial
  Probe
atttcctagtaagccctgatcttgg

SEQ ID NO: 305569 - DNA, 25 bp, Artificial
  Probe
aacctatttcctagtaagccctgat

SEQ ID NO: 305570 - DNA, 25 bp, Artificial
  Probe
gccctgatcttggaaaagaaaaagg

SEQ ID NO: 305571 - DNA, 25 bp, Artificial
  Probe
aaaatggattcatcatccccagaac

SEQ ID NO: 305572 - DNA, 25 bp, Artificial
  Probe
tattttcagaaacctatttcctagt

SEQ ID NO: 305573 - DNA, 25 bp, Artificial
  Probe
cgactctttttcattgtatttgaag

SEQ ID NO: 305574 - DNA, 25 bp, Artificial
  Probe
aagagtggtggagtggggcaaacat

SEQ ID NO: 305575 - DNA, 25 bp, Artificial
  Probe
tagtaagccctgatcttggaaaaga

SEQ ID NO: 305576 - DNA, 25 bp, Artificial
  Probe
agtcgactctttttcattgtatttg

SEQ ID NO: 305577 - DNA, 25 bp, Artificial
  Probe
gaaacctatttcctagtaagccctg

SEQ ID NO: 305578 - DNA, 25 bp, Artificial
  Probe
agtaagccctgatcttggaaaagaa

SEQ ID NO: 305579 - DNA, 25 bp, Artificial
  Probe
cagaacattctcataaagtcgactc

SEQ ID NO: 305580 - DNA, 25 bp, Artificial
  Probe
ttttcattgtatttgaagaagttga

SEQ ID NO: 305581 - DNA, 25 bp, Artificial
  Probe
gaacattctcataaagtcgactctt

SEQ ID NO: 305582 - DNA, 25 bp, Artificial
  Probe
tatttcctagtaagccctgatcttg

SEQ ID NO: 305583 - DNA, 25 bp, Artificial
  Probe
ataaagtcgactctttttcattgta

SEQ ID NO: 305584 - DNA, 25 bp, Artificial
  Probe
cctatttcctagtaagccctgatct

SEQ ID NO: 305585 - DNA, 25 bp, Artificial
  Probe
tttcattgtatttgaagaagttgaa

SEQ ID NO: 305586 - DNA, 25 bp, Artificial
  Probe
atcatccccagaacattctcataaa

SEQ ID NO: 305587 - DNA, 25 bp, Artificial
  Probe
aagaagagtggtggagtggggcaaa

SEQ ID NO: 305588 - DNA, 25 bp, Artificial
  Probe
cctagtaagccctgatcttggaaaa

SEQ ID NO: 305589 - DNA, 25 bp, Artificial
  Probe
ttgtccttcaagcatggctcattac

SEQ ID NO: 305590 - DNA, 25 bp, Artificial
  Probe
aattgatgcagttccctctacagct

SEQ ID NO: 305591 - DNA, 25 bp, Artificial
  Probe
cttcttgtccttcaagcatggctca

SEQ ID NO: 305592 - DNA, 25 bp, Artificial
  Probe
atggctcattaccagagactgtgat

SEQ ID NO: 305593 - DNA, 25 bp, Artificial
  Probe
tctgggttcccttcttgtccttcaa

SEQ ID NO: 305594 - DNA, 25 bp, Artificial
  Probe
ttcttgtccttcaagcatggctcat

SEQ ID NO: 305595 - DNA, 25 bp, Artificial
  Probe
cttgtccttcaagcatggctcatta

SEQ ID NO: 305596 - DNA, 25 bp, Artificial
  Probe
agcatggctcattaccagagactgt

SEQ ID NO: 305597 - DNA, 25 bp, Artificial
  Probe
ggttcccttcttgtccttcaagcat

SEQ ID NO: 305598 - DNA, 25 bp, Artificial
  Probe
gggttcccttcttgtccttcaagca

SEQ ID NO: 305599 - DNA, 25 bp, Artificial
  Probe
tccttcaagcatggctcattaccag

SEQ ID NO: 305600 - DNA, 25 bp, Artificial
  Probe
ctctgggttcccttcttgtccttca

SEQ ID NO: 305601 - DNA, 25 bp, Artificial
  Probe
tcattaccagagactgtgatatttg

SEQ ID NO: 305602 - DNA, 25 bp, Artificial
  Probe
gtttacttaaactgtggcccctctg

SEQ ID NO: 305603 - DNA, 25 bp, Artificial
  Probe
gttcccttcttgtccttcaagcatg

SEQ ID NO: 305604 - DNA, 25 bp, Artificial
  Probe
ccttcttgtccttcaagcatggctc

SEQ ID NO: 305605 - DNA, 25 bp, Artificial
  Probe
ttgaattgatgcagttccctctaca

SEQ ID NO: 305606 - DNA, 25 bp, Artificial
  Probe
ttacttaaactgtggcccctctggg

SEQ ID NO: 305607 - DNA, 25 bp, Artificial
  Probe
tggctcattaccagagactgtgata

SEQ ID NO: 305608 - DNA, 25 bp, Artificial
  Probe
gctcattaccagagactgtgatatt

SEQ ID NO: 305609 - DNA, 25 bp, Artificial
  Probe
tcttgtccttcaagcatggctcatt

SEQ ID NO: 305610 - DNA, 25 bp, Artificial
  Probe
tgggttcccttcttgtccttcaagc

SEQ ID NO: 305611 - DNA, 25 bp, Artificial
  Probe
catggctcattaccagagactgtga

SEQ ID NO: 305612 - DNA, 25 bp, Artificial
  Probe
tacttaaactgtggcccctctgggt

SEQ ID NO: 305613 - DNA, 25 bp, Artificial
  Probe
tgaattgatgcagttccctctacag

SEQ ID NO: 305614 - DNA, 25 bp, Artificial
  Probe
gcatggctcattaccagagactgtg

SEQ ID NO: 305615 - DNA, 25 bp, Artificial
  Probe
ctgggttcccttcttgtccttcaag

SEQ ID NO: 305616 - DNA, 25 bp, Artificial
  Probe
tctaagactgtttacttaaactgtg

SEQ ID NO: 305617 - DNA, 25 bp, Artificial
  Probe
cccttcttgtccttcaagcatggct

SEQ ID NO: 305618 - DNA, 25 bp, Artificial
  Probe
atgcagttccctctacagctacagg

SEQ ID NO: 305619 - DNA, 25 bp, Artificial
  Probe
tcccttcttgtccttcaagcatggc

SEQ ID NO: 305620 - DNA, 25 bp, Artificial
  Probe
tttacttaaactgtggcccctctgg

SEQ ID NO: 305621 - DNA, 25 bp, Artificial
  Probe
tggcccctctgggttcccttcttgt

SEQ ID NO: 305622 - DNA, 25 bp, Artificial
  Probe
ctcattaccagagactgtgatattt

SEQ ID NO: 305623 - DNA, 25 bp, Artificial
  Probe
gtccttcaagcatggctcattacca

SEQ ID NO: 305624 - DNA, 25 bp, Artificial
  Probe
gatgcagttccctctacagctacag

SEQ ID NO: 305625 - DNA, 25 bp, Artificial
  Probe
ttcaagcatggctcattaccagaga

SEQ ID NO: 305626 - DNA, 25 bp, Artificial
  Probe
tgcagttccctctacagctacagga

SEQ ID NO: 305627 - DNA, 25 bp, Artificial
  Probe
cattaccagagactgtgatatttga

SEQ ID NO: 305628 - DNA, 25 bp, Artificial
  Probe
aagcatggctcattaccagagactg

SEQ ID NO: 305629 - DNA, 25 bp, Artificial
  Probe
ggctcattaccagagactgtgatat

SEQ ID NO: 305630 - DNA, 25 bp, Artificial
  Probe
ttcccttcttgtccttcaagcatgg

SEQ ID NO: 305631 - DNA, 25 bp, Artificial
  Probe
tgtttacttaaactgtggcccctct

SEQ ID NO: 305632 - DNA, 25 bp, Artificial
  Probe
caagcatggctcattaccagagact

SEQ ID NO: 305633 - DNA, 25 bp, Artificial
  Probe
gaattgatgcagttccctctacagc

SEQ ID NO: 305634 - DNA, 25 bp, Artificial
  Probe
tcaagcatggctcattaccagagac

SEQ ID NO: 305635 - DNA, 25 bp, Artificial
  Probe
aaatgcctccacaacacgagagaga

SEQ ID NO: 305636 - DNA, 25 bp, Artificial
  Probe
gtgcgttacctctcggagcgcatcc

SEQ ID NO: 305637 - DNA, 25 bp, Artificial
  Probe
tgatgctagccaaggccaaggagtg

SEQ ID NO: 305638 - DNA, 25 bp, Artificial
  Probe
aaccaacaggtgctgccttgttacc

SEQ ID NO: 305639 - DNA, 25 bp, Artificial
  Probe
atcaaggacctgaagctgaaggtgc

SEQ ID NO: 305640 - DNA, 25 bp, Artificial
  Probe
cgctatgatatcgaagccaaatgcc

SEQ ID NO: 305641 - DNA, 25 bp, Artificial
  Probe
cagcgcccttcaggacttatgccga

SEQ ID NO: 305642 - DNA, 25 bp, Artificial
  Probe
ccaaacacaaggtgtccatggatct

SEQ ID NO: 305643 - DNA, 25 bp, Artificial
  Probe
acaggtgctgccttgttaccaccat

SEQ ID NO: 305644 - DNA, 25 bp, Artificial
  Probe
aagctgaaggtgctggacctccgtg

SEQ ID NO: 305645 - DNA, 25 bp, Artificial
  Probe
tgaagctgaaggtgctggacctccg

SEQ ID NO: 305646 - DNA, 25 bp, Artificial
  Probe
agccaaatgcctccacaacacgaga

SEQ ID NO: 305647 - DNA, 25 bp, Artificial
  Probe
ccaccatgccggaagttgagaggaa

SEQ ID NO: 305648 - DNA, 25 bp, Artificial
  Probe
acaacacgagagagatcaaggacct

SEQ ID NO: 305649 - DNA, 25 bp, Artificial
  Probe
caaggacctgaagctgaaggtgctg

SEQ ID NO: 305650 - DNA, 25 bp, Artificial
  Probe
gaaatctaagatcactgcctcccgt

SEQ ID NO: 305651 - DNA, 25 bp, Artificial
  Probe
ctcatgctgaagagcctgatgctag

SEQ ID NO: 305652 - DNA, 25 bp, Artificial
  Probe
tgctgaagagcctgatgctagccaa

SEQ ID NO: 305653 - DNA, 25 bp, Artificial
  Probe
ccatgccggaagttgagaggaaatc

SEQ ID NO: 305654 - DNA, 25 bp, Artificial
  Probe
gatatcgaagccaaatgcctccaca

SEQ ID NO: 305655 - DNA, 25 bp, Artificial
  Probe
gacctgaagctgaaggtgctggacc

SEQ ID NO: 305656 - DNA, 25 bp, Artificial
  Probe
ttgttaccaccatgccggaagttga

SEQ ID NO: 305657 - DNA, 25 bp, Artificial
  Probe
tcaaggacctgaagctgaaggtgct

SEQ ID NO: 305658 - DNA, 25 bp, Artificial
  Probe
aggagcgctatgatatcgaagccaa

SEQ ID NO: 305659 - DNA, 25 bp, Artificial
  Probe
actgcctcccgtaaactcatgctga

SEQ ID NO: 305660 - DNA, 25 bp, Artificial
  Probe
agaaggtgcgttacctctcggagcg

SEQ ID NO: 305661 - DNA, 25 bp, Artificial
  Probe
tcagcgcccttcaggacttatgccg

SEQ ID NO: 305662 - DNA, 25 bp, Artificial
  Probe
accaacaggtgctgccttgttacca

SEQ ID NO: 305663 - DNA, 25 bp, Artificial
  Probe
ggaaccaacaggtgctgccttgtta

SEQ ID NO: 305664 - DNA, 25 bp, Artificial
  Probe
aagccaaatgcctccacaacacgag

SEQ ID NO: 305665 - DNA, 25 bp, Artificial
  Probe
ctgggttccaaacacaaggtgtcca

SEQ ID NO: 305666 - DNA, 25 bp, Artificial
  Probe
ttatgccgagagctccatgccaagg

SEQ ID NO: 305667 - DNA, 25 bp, Artificial
  Probe
ccttcaggacttatgccgagagctc

SEQ ID NO: 305668 - DNA, 25 bp, Artificial
  Probe
ctatgatatcgaagccaaatgcctc

SEQ ID NO: 305669 - DNA, 25 bp, Artificial
  Probe
gagcctgatgctagccaaggccaag

SEQ ID NO: 305670 - DNA, 25 bp, Artificial
  Probe
ctgatgctagccaaggccaaggagt

SEQ ID NO: 305671 - DNA, 25 bp, Artificial
  Probe
gctggacctccgtgggaagttcaag

SEQ ID NO: 305672 - DNA, 25 bp, Artificial
  Probe
cctgaagctgaaggtgctggacctc

SEQ ID NO: 305673 - DNA, 25 bp, Artificial
  Probe
tactgggttccaaacacaaggtgtc

SEQ ID NO: 305674 - DNA, 25 bp, Artificial
  Probe
cagacactgggcacagcatgcctgt

SEQ ID NO: 305675 - DNA, 25 bp, Artificial
  Probe
ggacttatgccgagagctccatgcc

SEQ ID NO: 305676 - DNA, 25 bp, Artificial
  Probe
ccacaacacgagagagatcaaggac

SEQ ID NO: 305677 - DNA, 25 bp, Artificial
  Probe
tgagaaggtgcgttacctctcggag

SEQ ID NO: 305678 - DNA, 25 bp, Artificial
  Probe
ccgagagctccatgccaaggtggag

SEQ ID NO: 305679 - DNA, 25 bp, Artificial
  Probe
acttatgccgagagctccatgccaa

SEQ ID NO: 305680 - DNA, 25 bp, Artificial
  Probe
catgccggaagttgagaggaaatct

SEQ ID NO: 305681 - DNA, 25 bp, Artificial
  Probe
aagagtgtgatgctccagatcgcgg

SEQ ID NO: 305682 - DNA, 25 bp, Artificial
  Probe
gctcagagcttgagatctcaagatg

SEQ ID NO: 305683 - DNA, 25 bp, Artificial
  Probe
gagtacttggcctcactccaataaa

SEQ ID NO: 305684 - DNA, 25 bp, Artificial
  Probe
cggagacagcacctgaagagtgtga

SEQ ID NO: 305685 - DNA, 25 bp, Artificial
  Probe
ggaagcacctaacatccagtctgga

SEQ ID NO: 305686 - DNA, 25 bp, Artificial
  Probe
tgctgcacagaatctaggctcagag

SEQ ID NO: 305687 - DNA, 25 bp, Artificial
  Probe
caaacaactgcatgcgaagatcgat

SEQ ID NO: 305688 - DNA, 25 bp, Artificial
  Probe
acagcacctgaagagtgtgatgctc

SEQ ID NO: 305689 - DNA, 25 bp, Artificial
  Probe
caactgcatgcgaagatcgatgcgg

SEQ ID NO: 305690 - DNA, 25 bp, Artificial
  Probe
ctaccattggggaagcacctaacat

SEQ ID NO: 305691 - DNA, 25 bp, Artificial
  Probe
ggggaagcacctaacatccagtctg

SEQ ID NO: 305692 - DNA, 25 bp, Artificial
  Probe
atcacggcccggagacagcacctga

SEQ ID NO: 305693 - DNA, 25 bp, Artificial
  Probe
gtgatgctccagatcgcggccacag

SEQ ID NO: 305694 - DNA, 25 bp, Artificial
  Probe
gcactgctgcacagaatctaggctc

SEQ ID NO: 305695 - DNA, 25 bp, Artificial
  Probe
agaatctaggctcagagcttgagat

SEQ ID NO: 305696 - DNA, 25 bp, Artificial
  Probe
agacatgaaccagaagctatttgac

SEQ ID NO: 305697 - DNA, 25 bp, Artificial
  Probe
cacctgaagagtgtgatgctccaga

SEQ ID NO: 305698 - DNA, 25 bp, Artificial
  Probe
gcatggacctgagagccaacctgaa

SEQ ID NO: 305699 - DNA, 25 bp, Artificial
  Probe
gagaagcgcaacagggccatcacgg

SEQ ID NO: 305700 - DNA, 25 bp, Artificial
  Probe
gagacagcacctgaagagtgtgatg

SEQ ID NO: 305701 - DNA, 25 bp, Artificial
  Probe
acctaacatccagtctggagtactt

SEQ ID NO: 305702 - DNA, 25 bp, Artificial
  Probe
agagcagcaaggagctggaagacat

SEQ ID NO: 305703 - DNA, 25 bp, Artificial
  Probe
catcccaggctccatgtctgaagtg

SEQ ID NO: 305704 - DNA, 25 bp, Artificial
  Probe
ggcccggagacagcacctgaagagt

SEQ ID NO: 305705 - DNA, 25 bp, Artificial
  Probe
gcaacagggccatcacggcccggag

SEQ ID NO: 305706 - DNA, 25 bp, Artificial
  Probe
atctaggctcagagcttgagatctc

SEQ ID NO: 305707 - DNA, 25 bp, Artificial
  Probe
gtgtgatgctccagatcgcggccac

SEQ ID NO: 305708 - DNA, 25 bp, Artificial
  Probe
atgcgaagatcgatgcggctgaaga

SEQ ID NO: 305709 - DNA, 25 bp, Artificial
  Probe
accattggggaagcacctaacatcc

SEQ ID NO: 305710 - DNA, 25 bp, Artificial
  Probe
agcagcaaggagctggaagacatga

SEQ ID NO: 305711 - DNA, 25 bp, Artificial
  Probe
acggcccggagacagcacctgaaga

SEQ ID NO: 305712 - DNA, 25 bp, Artificial
  Probe
gtgcatggacctgagagccaacctg

SEQ ID NO: 305713 - DNA, 25 bp, Artificial
  Probe
aactgcatgcgaagatcgatgcggc

SEQ ID NO: 305714 - DNA, 25 bp, Artificial
  Probe
tgatgctccagatcgcggccacaga

SEQ ID NO: 305715 - DNA, 25 bp, Artificial
  Probe
cacatcccaggctccatgtctgaag

SEQ ID NO: 305716 - DNA, 25 bp, Artificial
  Probe
cagcactgctgcacagaatctaggc

SEQ ID NO: 305717 - DNA, 25 bp, Artificial
  Probe
aacagggccatcacggcccggagac

SEQ ID NO: 305718 - DNA, 25 bp, Artificial
  Probe
caacagggccatcacggcccggaga

SEQ ID NO: 305719 - DNA, 25 bp, Artificial
  Probe
tgcacagaatctaggctcagagctt

SEQ ID NO: 305720 - DNA, 25 bp, Artificial
  Probe
cagaatctaggctcagagcttgaga

SEQ ID NO: 305721 - DNA, 25 bp, Artificial
  Probe
gtctggagtacttggcctcactcca

SEQ ID NO: 305722 - DNA, 25 bp, Artificial
  Probe
cagagcttgagatctcaagatggga

SEQ ID NO: 305723 - DNA, 25 bp, Artificial
  Probe
acttggcctcactccaataaaggat

SEQ ID NO: 305724 - DNA, 25 bp, Artificial
  Probe
catgcgaagatcgatgcggctgaag

SEQ ID NO: 305725 - DNA, 25 bp, Artificial
  Probe
cccggagacagcacctgaagagtgt

SEQ ID NO: 305726 - DNA, 25 bp, Artificial
  Probe
aggaactctgcaaacaactgcatgc

SEQ ID NO: 305727 - DNA, 25 bp, Artificial
  Probe
cttgtggaccaatcccggaggtgag

SEQ ID NO: 305728 - DNA, 25 bp, Artificial
  Probe
cctgtggccagctggccctgtgact

SEQ ID NO: 305729 - DNA, 25 bp, Artificial
  Probe
ttagggagaagtcctactgacgaca

SEQ ID NO: 305730 - DNA, 25 bp, Artificial
  Probe
ggtctacagcgctgaagaccagttc

SEQ ID NO: 305731 - DNA, 25 bp, Artificial
  Probe
gctgaagaccagttccagcctcctg

SEQ ID NO: 305732 - DNA, 25 bp, Artificial
  Probe
ttacggctctcatcctcagcagcag

SEQ ID NO: 305733 - DNA, 25 bp, Artificial
  Probe
ggtgagccttacgaagagaaagttc

SEQ ID NO: 305734 - DNA, 25 bp, Artificial
  Probe
aggttccactagagccacctgcagc

SEQ ID NO: 305735 - DNA, 25 bp, Artificial
  Probe
cacgaagctctatgagagatataag

SEQ ID NO: 305736 - DNA, 25 bp, Artificial
  Probe
cggaggtgagccttacgaagagaaa

SEQ ID NO: 305737 - DNA, 25 bp, Artificial
  Probe
ctatcctctgcctgtggccagctgg

SEQ ID NO: 305738 - DNA, 25 bp, Artificial
  Probe
atgtgccttctgtcacgtaccactc

SEQ ID NO: 305739 - DNA, 25 bp, Artificial
  Probe
gagaagtcctactgacgacacctac

SEQ ID NO: 305740 - DNA, 25 bp, Artificial
  Probe
ctcccagagctctttggagcactct

SEQ ID NO: 305741 - DNA, 25 bp, Artificial
  Probe
tgaagaccagttccagcctcctgtc

SEQ ID NO: 305742 - DNA, 25 bp, Artificial
  Probe
ctgcctgtggccagctggccctgtg

SEQ ID NO: 305743 - DNA, 25 bp, Artificial
  Probe
tccccggggtgtacggagattatga

SEQ ID NO: 305744 - DNA, 25 bp, Artificial
  Probe
tatcctctgcctgtggccagctggc

SEQ ID NO: 305745 - DNA, 25 bp, Artificial
  Probe
cgctgcctggtaagagcaacaggtg

SEQ ID NO: 305746 - DNA, 25 bp, Artificial
  Probe
tgtccccggggtgtacggagattat

SEQ ID NO: 305747 - DNA, 25 bp, Artificial
  Probe
tcagcagctatgtgccttctgtcac

SEQ ID NO: 305748 - DNA, 25 bp, Artificial
  Probe
agcaggacccctttctgctcgctta

SEQ ID NO: 305749 - DNA, 25 bp, Artificial
  Probe
tggatttcagcagctatgtgccttc

SEQ ID NO: 305750 - DNA, 25 bp, Artificial
  Probe
atcatcccttgtggaccaatcccgg

SEQ ID NO: 305751 - DNA, 25 bp, Artificial
  Probe
tgagccttacgaagagaaagttcct

SEQ ID NO: 305752 - DNA, 25 bp, Artificial
  Probe
ctttctgctcgcttacggctctcat

SEQ ID NO: 305753 - DNA, 25 bp, Artificial
  Probe
ggccatcatcccttgtggaccaatc

SEQ ID NO: 305754 - DNA, 25 bp, Artificial
  Probe
aggacccctttctgctcgcttacgg

SEQ ID NO: 305755 - DNA, 25 bp, Artificial
  Probe
agctatgtgccttctgtcacgtacc

SEQ ID NO: 305756 - DNA, 25 bp, Artificial
  Probe
gagatataagttctccagcagtaag

SEQ ID NO: 305757 - DNA, 25 bp, Artificial
  Probe
agtaaggtctacagcgctgaagacc

SEQ ID NO: 305758 - DNA, 25 bp, Artificial
  Probe
agagaaagttcctgtggatttcagc

SEQ ID NO: 305759 - DNA, 25 bp, Artificial
  Probe
acagcgctgaagaccagttccagcc

SEQ ID NO: 305760 - DNA, 25 bp, Artificial
  Probe
gtacgcgctgcctggtaagagcaac

SEQ ID NO: 305761 - DNA, 25 bp, Artificial
  Probe
tcccagagctctttggagcactctc

SEQ ID NO: 305762 - DNA, 25 bp, Artificial
  Probe
acaacgagatgctcctaaacctctg

SEQ ID NO: 305763 - DNA, 25 bp, Artificial
  Probe
gatcacttcaacaacgagatgctcc

SEQ ID NO: 305764 - DNA, 25 bp, Artificial
  Probe
ggctctcatcctcagcagcagtacg

SEQ ID NO: 305765 - DNA, 25 bp, Artificial
  Probe
gggagaagtcctactgacgacacct

SEQ ID NO: 305766 - DNA, 25 bp, Artificial
  Probe
gcgtgcatgggcttggatcacttca

SEQ ID NO: 305767 - DNA, 25 bp, Artificial
  Probe
caacaggttccactagagccacctg

SEQ ID NO: 305768 - DNA, 25 bp, Artificial
  Probe
atcccggaggtgagccttacgaaga

SEQ ID NO: 305769 - DNA, 25 bp, Artificial
  Probe
agcagtacgcgctgcctggtaagag

SEQ ID NO: 305770 - DNA, 25 bp, Artificial
  Probe
aaatgctgtcttagggagaagtcct

SEQ ID NO: 305771 - DNA, 25 bp, Artificial
  Probe
tttctgctcgcttacggctctcatc

SEQ ID NO: 305772 - DNA, 25 bp, Artificial
  Probe
gaccaatcccggaggtgagccttac

SEQ ID NO: 305773 - DNA, 25 bp, Artificial
  Probe
tttatcaggcgagtgggtagagcac

SEQ ID NO: 305774 - DNA, 25 bp, Artificial
  Probe
ccacagcccgggtgagaagtaaaag

SEQ ID NO: 305775 - DNA, 25 bp, Artificial
  Probe
ttatcaggcgagtgggtagagcaca

SEQ ID NO: 305776 - DNA, 25 bp, Artificial
  Probe
ttcccactcggaaggccaggaccat

SEQ ID NO: 305777 - DNA, 25 bp, Artificial
  Probe
cctcagtcgttctctgatcctgctt

SEQ ID NO: 305778 - DNA, 25 bp, Artificial
  Probe
ctctaagtttggagctatttcttga

SEQ ID NO: 305779 - DNA, 25 bp, Artificial
  Probe
gaatattttgagcacacactctaag

SEQ ID NO: 305780 - DNA, 25 bp, Artificial
  Probe
cgtagggtaactgaccgcttctaag

SEQ ID NO: 305781 - DNA, 25 bp, Artificial
  Probe
aaaggaccaatctgcctgtaccaca

SEQ ID NO: 305782 - DNA, 25 bp, Artificial
  Probe
tttcccactcggaaggccaggacca

SEQ ID NO: 305783 - DNA, 25 bp, Artificial
  Probe
actcggaaggccaggaccattcaac

SEQ ID NO: 305784 - DNA, 25 bp, Artificial
  Probe
tttttgcaggtctgctgctgtgtgg

SEQ ID NO: 305785 - DNA, 25 bp, Artificial
  Probe
aatctgcctgtaccacagcccgggt

SEQ ID NO: 305786 - DNA, 25 bp, Artificial
  Probe
gaggatgccagtttatcaggcgagt

SEQ ID NO: 305787 - DNA, 25 bp, Artificial
  Probe
gtgccaaaggaccaatctgcctgta

SEQ ID NO: 305788 - DNA, 25 bp, Artificial
  Probe
aagtaaaagctttttgcaggtctgc

SEQ ID NO: 305789 - DNA, 25 bp, Artificial
  Probe
attttgagcacacactctaagtttg

SEQ ID NO: 305790 - DNA, 25 bp, Artificial
  Probe
ttcaacaagaaataccatgggaaag

SEQ ID NO: 305791 - DNA, 25 bp, Artificial
  Probe
aactgaccgcttctaagtgatgaga

SEQ ID NO: 305792 - DNA, 25 bp, Artificial
  Probe
aggatgccagtttatcaggcgagtg

SEQ ID NO: 305793 - DNA, 25 bp, Artificial
  Probe
gagaacacttaggtactgctgattt

SEQ ID NO: 305794 - DNA, 25 bp, Artificial
  Probe
atgccagtttatcaggcgagtgggt

SEQ ID NO: 305795 - DNA, 25 bp, Artificial
  Probe
cgcttctaagtgatgagaggcccat

SEQ ID NO: 305796 - DNA, 25 bp, Artificial
  Probe
tgccagtttatcaggcgagtgggta

SEQ ID NO: 305797 - DNA, 25 bp, Artificial
  Probe
attttcaggctgaacctactggcga

SEQ ID NO: 305798 - DNA, 25 bp, Artificial
  Probe
tgattttcccactcggaaggccagg

SEQ ID NO: 305799 - DNA, 25 bp, Artificial
  Probe
aacctactggcgactacatttgaca

SEQ ID NO: 305800 - DNA, 25 bp, Artificial
  Probe
gtaaaagctttttgcaggtctgctg

SEQ ID NO: 305801 - DNA, 25 bp, Artificial
  Probe
cgcgccctgaagaaaatcaccaagt

SEQ ID NO: 305802 - DNA, 25 bp, Artificial
  Probe
tgcctgtaccacagcccgggtgaga

SEQ ID NO: 305803 - DNA, 25 bp, Artificial
  Probe
gccaggaccattcaacaggggaaaa

SEQ ID NO: 305804 - DNA, 25 bp, Artificial
  Probe
ccctttcaacaagaaataccatggg

SEQ ID NO: 305805 - DNA, 25 bp, Artificial
  Probe
gtaactgaccgcttctaagtgatga

SEQ ID NO: 305806 - DNA, 25 bp, Artificial
  Probe
aaagctttttgcaggtctgctgctg

SEQ ID NO: 305807 - DNA, 25 bp, Artificial
  Probe
ggctgaacctactggcgactacatt

SEQ ID NO: 305808 - DNA, 25 bp, Artificial
  Probe
gagaggcccatttccctcagtcgtt

SEQ ID NO: 305809 - DNA, 25 bp, Artificial
  Probe
catctccctcggtgaaaacggggag

SEQ ID NO: 305810 - DNA, 25 bp, Artificial
  Probe
atgagaggcccatttccctcagtcg

SEQ ID NO: 305811 - DNA, 25 bp, Artificial
  Probe
ttccctcagtcgttctctgatcctg

SEQ ID NO: 305812 - DNA, 25 bp, Artificial
  Probe
ttattttcaggctgaacctactggc

SEQ ID NO: 305813 - DNA, 25 bp, Artificial
  Probe
tactgctgattttcccactcggaag

SEQ ID NO: 305814 - DNA, 25 bp, Artificial
  Probe
gctgattttcccactcggaaggcca

SEQ ID NO: 305815 - DNA, 25 bp, Artificial
  Probe
gtcgttctctgatcctgctttccac

SEQ ID NO: 305816 - DNA, 25 bp, Artificial
  Probe
caggaccattcaacaggggaaaagg

SEQ ID NO: 305817 - DNA, 25 bp, Artificial
  Probe
gtagggtaactgaccgcttctaagt

SEQ ID NO: 305818 - DNA, 25 bp, Artificial
  Probe
cgccctgaagaaaatcaccaagttc

SEQ ID NO: 305819 - DNA, 25 bp, Artificial
  Probe
ctcccagagatagatcaactaactg

SEQ ID NO: 305820 - DNA, 25 bp, Artificial
  Probe
cagtttttatgctcagatctcactg

SEQ ID NO: 305821 - DNA, 25 bp, Artificial
  Probe
actatcatgaatgacatggttcaca

SEQ ID NO: 305822 - DNA, 25 bp, Artificial
  Probe
ccacttgttgaggaaacactctccc

SEQ ID NO: 305823 - DNA, 25 bp, Artificial
  Probe
agatagatcaactaactgtgtcctg

SEQ ID NO: 305824 - DNA, 25 bp, Artificial
  Probe
tgagctggatgcaaaggctgctttc

SEQ ID NO: 305825 - DNA, 25 bp, Artificial
  Probe
cttttaagggcctctctacatagcc

SEQ ID NO: 305826 - DNA, 25 bp, Artificial
  Probe
ttcttccctgtctctctgaggcctg

SEQ ID NO: 305827 - DNA, 25 bp, Artificial
  Probe
tcggcatcctgtctgtcctatcttc

SEQ ID NO: 305828 - DNA, 25 bp, Artificial
  Probe
caatcttaggccacttgttgaggaa

SEQ ID NO: 305829 - DNA, 25 bp, Artificial
  Probe
gacagcaggctcgagtttagggcta

SEQ ID NO: 305830 - DNA, 25 bp, Artificial
  Probe
aggctcgagtttagggctagacatt

SEQ ID NO: 305831 - DNA, 25 bp, Artificial
  Probe
catagccccggctggctagagcttg

SEQ ID NO: 305832 - DNA, 25 bp, Artificial
  Probe
cttccctttccttctgtgttcaggg

SEQ ID NO: 305833 - DNA, 25 bp, Artificial
  Probe
tagggtgtcggcatcctgtctgtcc

SEQ ID NO: 305834 - DNA, 25 bp, Artificial
  Probe
cctgtctctctgaggcctgaatcca

SEQ ID NO: 305835 - DNA, 25 bp, Artificial
  Probe
taaattgggacaggatctcacgtac

SEQ ID NO: 305836 - DNA, 25 bp, Artificial
  Probe
tgtcctatcttccagcttcccggtt

SEQ ID NO: 305837 - DNA, 25 bp, Artificial
  Probe
ctctctgaggcctgaatccacagct

SEQ ID NO: 305838 - DNA, 25 bp, Artificial
  Probe
ctgacctcttatgtgcacatccgtg

SEQ ID NO: 305839 - DNA, 25 bp, Artificial
  Probe
actgtggggaccattaagggtctag

SEQ ID NO: 305840 - DNA, 25 bp, Artificial
  Probe
taagggcctctctacatagccccgg

SEQ ID NO: 305841 - DNA, 25 bp, Artificial
  Probe
cctggacctcccagagatagatcaa

SEQ ID NO: 305842 - DNA, 25 bp, Artificial
  Probe
tgccaccttccagaagcaatcttag

SEQ ID NO: 305843 - DNA, 25 bp, Artificial
  Probe
agtttagggctagacatttgccact

SEQ ID NO: 305844 - DNA, 25 bp, Artificial
  Probe
cacttgctttattggggagcagaga

SEQ ID NO: 305845 - DNA, 25 bp, Artificial
  Probe
atttgggcttcctggtgagaaaact

SEQ ID NO: 305846 - DNA, 25 bp, Artificial
  Probe
ggcgttggttattcctggaacccag

SEQ ID NO: 305847 - DNA, 25 bp, Artificial
  Probe
tctgaggcctgaatccacagcttcc

SEQ ID NO: 305848 - DNA, 25 bp, Artificial
  Probe
gttattcctggaacccagcctctct

SEQ ID NO: 305849 - DNA, 25 bp, Artificial
  Probe
tccctttccttctgtgttcagggga

SEQ ID NO: 305850 - DNA, 25 bp, Artificial
  Probe
cacccgcagccttgagctggatgca

SEQ ID NO: 305851 - DNA, 25 bp, Artificial
  Probe
gatcccagtttttatgctcagatct

SEQ ID NO: 305852 - DNA, 25 bp, Artificial
  Probe
aaactatcatgaatgacatggttca

SEQ ID NO: 305853 - DNA, 25 bp, Artificial
  Probe
ccattaagggtctagggggacagca

SEQ ID NO: 305854 - DNA, 25 bp, Artificial
  Probe
ttccttctgtgttcaggggaaacca

SEQ ID NO: 305855 - DNA, 25 bp, Artificial
  Probe
cttatgtgcacatccgtgtcaagac

SEQ ID NO: 305856 - DNA, 25 bp, Artificial
  Probe
ggctgctttcaatttgtctttgtag

SEQ ID NO: 305857 - DNA, 25 bp, Artificial
  Probe
ggatgcaaaggctgctttcaatttg

SEQ ID NO: 305858 - DNA, 25 bp, Artificial
  Probe
cttcctggtgagaaaactctagggg

SEQ ID NO: 305859 - DNA, 25 bp, Artificial
  Probe
tcctgggatcccagtttttatgctc

SEQ ID NO: 305860 - DNA, 25 bp, Artificial
  Probe
aactgtgtcctgagtgctgggattt

SEQ ID NO: 305861 - DNA, 25 bp, Artificial
  Probe
ggctagagcttgctgtgcagaccag

SEQ ID NO: 305862 - DNA, 25 bp, Artificial
  Probe
attgggacaggatctcacgtacccc

SEQ ID NO: 305863 - DNA, 25 bp, Artificial
  Probe
gtacatagggtgtcggcatcctgtc

SEQ ID NO: 305864 - DNA, 25 bp, Artificial
  Probe
agaagcaatcttaggccacttgttg

SEQ ID NO: 305865 - DNA, 25 bp, Artificial
  Probe
attgtcatgaattgcgtcatcgtgc

SEQ ID NO: 305866 - DNA, 25 bp, Artificial
  Probe
tgactggcagaactgctctctcatt

SEQ ID NO: 305867 - DNA, 25 bp, Artificial
  Probe
cgtatctttgcgaacgccaacgact

SEQ ID NO: 305868 - DNA, 25 bp, Artificial
  Probe
cgaggcgtgcctcatctgtgggcat

SEQ ID NO: 305869 - DNA, 25 bp, Artificial
  Probe
ctgcaatgttctggtctatgaggga

SEQ ID NO: 305870 - DNA, 25 bp, Artificial
  Probe
gtcgaaagccgcttttttacgtcat

SEQ ID NO: 305871 - DNA, 25 bp, Artificial
  Probe
agaggcatcggcatggaacttggac

SEQ ID NO: 305872 - DNA, 25 bp, Artificial
  Probe
ggcaatgccatcaacaaaattgaca

SEQ ID NO: 305873 - DNA, 25 bp, Artificial
  Probe
cgcagtggaggtcacctatttcccc

SEQ ID NO: 305874 - DNA, 25 bp, Artificial
  Probe
gctatctaccgcagcacgtgcgcag

SEQ ID NO: 305875 - DNA, 25 bp, Artificial
  Probe
cgctgctgggcaggtatcttatttt

SEQ ID NO: 305876 - DNA, 25 bp, Artificial
  Probe
tcaacgtcctgctagcccagactgt

SEQ ID NO: 305877 - DNA, 25 bp, Artificial
  Probe
tattagagctactgccgcgcctcct

SEQ ID NO: 305878 - DNA, 25 bp, Artificial
  Probe
agggaggctccacagaagaccctgg

SEQ ID NO: 305879 - DNA, 25 bp, Artificial
  Probe
tatttttgtcatggtggttgccacg

SEQ ID NO: 305880 - DNA, 25 bp, Artificial
  Probe
tcgaaagccgcttttttacgtcatt

SEQ ID NO: 305881 - DNA, 25 bp, Artificial
  Probe
ctacacgctcatcatccgtcgaaag

SEQ ID NO: 305882 - DNA, 25 bp, Artificial
  Probe
atctttgcagtggatgacgatggca

SEQ ID NO: 305883 - DNA, 25 bp, Artificial
  Probe
tcttccttggaggttacttcaacca

SEQ ID NO: 305884 - DNA, 25 bp, Artificial
  Probe
gacaatgtctgtttttgggcagcgt

SEQ ID NO: 305885 - DNA, 25 bp, Artificial
  Probe
tacacgctcatcatccgtcgaaagc

SEQ ID NO: 305886 - DNA, 25 bp, Artificial
  Probe
ctggtggccagaaatgcacggtctc

SEQ ID NO: 305887 - DNA, 25 bp, Artificial
  Probe
tttcgttcccagacctacaatgctg

SEQ ID NO: 305888 - DNA, 25 bp, Artificial
  Probe
acgtcattaacatcattgtgccttg

SEQ ID NO: 305889 - DNA, 25 bp, Artificial
  Probe
cagcttttaccgagaatggagaatg

SEQ ID NO: 305890 - DNA, 25 bp, Artificial
  Probe
gcgtcatcgtgctcaacgtatcttt

SEQ ID NO: 305891 - DNA, 25 bp, Artificial
  Probe
agaatgggccattgactactgccca

SEQ ID NO: 305892 - DNA, 25 bp, Artificial
  Probe
aaattgacatcgacaccgcagcttt

SEQ ID NO: 305893 - DNA, 25 bp, Artificial
  Probe
gtcttcttgttcctaattgcccaga

SEQ ID NO: 305894 - DNA, 25 bp, Artificial
  Probe
cctacaatgctgaagaggtggagtt

SEQ ID NO: 305895 - DNA, 25 bp, Artificial
  Probe
ttttattagagctactgccgcgcct

SEQ ID NO: 305896 - DNA, 25 bp, Artificial
  Probe
agaggatcccggagctgcctcacca

SEQ ID NO: 305897 - DNA, 25 bp, Artificial
  Probe
cctgcgcaggctggtggccagaaat

SEQ ID NO: 305898 - DNA, 25 bp, Artificial
  Probe
gagctcatcttgaaaaagccgcgga

SEQ ID NO: 305899 - DNA, 25 bp, Artificial
  Probe
gaaactgacgtcatctacacgctca

SEQ ID NO: 305900 - DNA, 25 bp, Artificial
  Probe
cagactgtcttcttgttcctaattg

SEQ ID NO: 305901 - DNA, 25 bp, Artificial
  Probe
cattgtgccttgtgtgctcatttct

SEQ ID NO: 305902 - DNA, 25 bp, Artificial
  Probe
ttggtgctcttcagcgtcggttcta

SEQ ID NO: 305903 - DNA, 25 bp, Artificial
  Probe
cgtcattaacatcattgtgccttgt

SEQ ID NO: 305904 - DNA, 25 bp, Artificial
  Probe
cctaattgcccagaaaattccagag

SEQ ID NO: 305905 - DNA, 25 bp, Artificial
  Probe
gcagaactgctctctcatttttcgt

SEQ ID NO: 305906 - DNA, 25 bp, Artificial
  Probe
cttctctgagcgtgccgctgctggg

SEQ ID NO: 305907 - DNA, 25 bp, Artificial
  Probe
cggagctgcctcaccagcgaggcgt

SEQ ID NO: 305908 - DNA, 25 bp, Artificial
  Probe
gcatggaacttggaccgcagccgcc

SEQ ID NO: 305909 - DNA, 25 bp, Artificial
  Probe
cccaggcatgattcgccattatgag

SEQ ID NO: 305910 - DNA, 25 bp, Artificial
  Probe
ctttgcagtggatgacgatggcaat

SEQ ID NO: 305911 - DNA, 25 bp, Artificial
  Probe
catttcctgatctagtgctctcaag

SEQ ID NO: 305912 - DNA, 25 bp, Artificial
  Probe
tatgaaataaacactcgtttcggga

SEQ ID NO: 305913 - DNA, 25 bp, Artificial
  Probe
ctggacagttaccttgtgggagatg

SEQ ID NO: 305914 - DNA, 25 bp, Artificial
  Probe
gcttctcccatttcctgatctagtg

SEQ ID NO: 305915 - DNA, 25 bp, Artificial
  Probe
agattggacaaggtgcttcaggcac

SEQ ID NO: 305916 - DNA, 25 bp, Artificial
  Probe
ggatggctctgtcaaattaactgac

SEQ ID NO: 305917 - DNA, 25 bp, Artificial
  Probe
ctgaagattgccaagcctctctcca

SEQ ID NO: 305918 - DNA, 25 bp, Artificial
  Probe
gtgccaagccttctatgaaataaac

SEQ ID NO: 305919 - DNA, 25 bp, Artificial
  Probe
atgtgccaagccttctatgaaataa

SEQ ID NO: 305920 - DNA, 25 bp, Artificial
  Probe
ggtgcttcaggcacagtgtacactg

SEQ ID NO: 305921 - DNA, 25 bp, Artificial
  Probe
aactccagagcagagcaaaaggagc

SEQ ID NO: 305922 - DNA, 25 bp, Artificial
  Probe
agaagaagtacacacgcttcgagaa

SEQ ID NO: 305923 - DNA, 25 bp, Artificial
  Probe
cttaacagatgtggtgacagaaacc

SEQ ID NO: 305924 - DNA, 25 bp, Artificial
  Probe
ctctgtcaaattaactgactttgga

SEQ ID NO: 305925 - DNA, 25 bp, Artificial
  Probe
agcagcagccgaagaaagaactcat

SEQ ID NO: 305926 - DNA, 25 bp, Artificial
  Probe
tgggcgatcctaagaagaagtacac

SEQ ID NO: 305927 - DNA, 25 bp, Artificial
  Probe
tctgctgggaatggatggctctgtc

SEQ ID NO: 305928 - DNA, 25 bp, Artificial
  Probe
ctaatccagcagaggccatttctaa

SEQ ID NO: 305929 - DNA, 25 bp, Artificial
  Probe
acagttaccttgtgggagatgagct

SEQ ID NO: 305930 - DNA, 25 bp, Artificial
  Probe
cacgcttcgagaagattggacaagg

SEQ ID NO: 305931 - DNA, 25 bp, Artificial
  Probe
gcctcatgtgccaagccttctatga

SEQ ID NO: 305932 - DNA, 25 bp, Artificial
  Probe
aacccaaacattgtgaactatctgg

SEQ ID NO: 305933 - DNA, 25 bp, Artificial
  Probe
acaaggtgcttcaggcacagtgtac

SEQ ID NO: 305934 - DNA, 25 bp, Artificial
  Probe
cagcagcagccgaagaaagaactca

SEQ ID NO: 305935 - DNA, 25 bp, Artificial
  Probe
tgaagattgccaagcctctctccag

SEQ ID NO: 305936 - DNA, 25 bp, Artificial
  Probe
ctgtgcacagataactccagagcag

SEQ ID NO: 305937 - DNA, 25 bp, Artificial
  Probe
tgtgggcgatcctaagaagaagtac

SEQ ID NO: 305938 - DNA, 25 bp, Artificial
  Probe
gaatggatggctctgtcaaattaac

SEQ ID NO: 305939 - DNA, 25 bp, Artificial
  Probe
cctcatgtgccaagccttctatgaa

SEQ ID NO: 305940 - DNA, 25 bp, Artificial
  Probe
atacttggccggaggctccttaaca

SEQ ID NO: 305941 - DNA, 25 bp, Artificial
  Probe
cattaaacagatgaaccttcagcag

SEQ ID NO: 305942 - DNA, 25 bp, Artificial
  Probe
ctgcagcatcaattcctgaagattg

SEQ ID NO: 305943 - DNA, 25 bp, Artificial
  Probe
ctatgaaataaacactcgtttcggg

SEQ ID NO: 305944 - DNA, 25 bp, Artificial
  Probe
ttggccggaggctccttaacagatg

SEQ ID NO: 305945 - DNA, 25 bp, Artificial
  Probe
gatgactaatccagcagaggccatt

SEQ ID NO: 305946 - DNA, 25 bp, Artificial
  Probe
ctagcactgaagagaaccgcaaccg

SEQ ID NO: 305947 - DNA, 25 bp, Artificial
  Probe
gtgctctcaagactttgatccttgg

SEQ ID NO: 305948 - DNA, 25 bp, Artificial
  Probe
gcatagtgagtgtgggcgatcctaa

SEQ ID NO: 305949 - DNA, 25 bp, Artificial
  Probe
cagctaaagagctactgcagcatca

SEQ ID NO: 305950 - DNA, 25 bp, Artificial
  Probe
tctacaagctttggagttcctgcat

SEQ ID NO: 305951 - DNA, 25 bp, Artificial
  Probe
ccagcagaggccatttctaaatagg

SEQ ID NO: 305952 - DNA, 25 bp, Artificial
  Probe
ccgtctagcactgaagagaaccgca

SEQ ID NO: 305953 - DNA, 25 bp, Artificial
  Probe
gaagaagtacacacgcttcgagaag

SEQ ID NO: 305954 - DNA, 25 bp, Artificial
  Probe
aagtacacacgcttcgagaagattg

SEQ ID NO: 305955 - DNA, 25 bp, Artificial
  Probe
tgcaatggatgtagccacagggcag

SEQ ID NO: 305956 - DNA, 25 bp, Artificial
  Probe
attcctgaagattgccaagcctctc

SEQ ID NO: 305957 - DNA, 25 bp, Artificial
  Probe
cttcggtgcttacatagctggcaga

SEQ ID NO: 305958 - DNA, 25 bp, Artificial
  Probe
gtcttgccagcaacggatctcgttt

SEQ ID NO: 305959 - DNA, 25 bp, Artificial
  Probe
gtctgtcatacactttgccacttga

SEQ ID NO: 305960 - DNA, 25 bp, Artificial
  Probe
ttttttcaaaagcaattcttcggtg

SEQ ID NO: 305961 - DNA, 25 bp, Artificial
  Probe
tgccagcaacggatctcgttttttg

SEQ ID NO: 305962 - DNA, 25 bp, Artificial
  Probe
ctcatgaaacccagtcacgtcattg

SEQ ID NO: 305963 - DNA, 25 bp, Artificial
  Probe
aggaccaggtttacagagctttata

SEQ ID NO: 305964 - DNA, 25 bp, Artificial
  Probe
gcaattcttcggtgcttacatagct

SEQ ID NO: 305965 - DNA, 25 bp, Artificial
  Probe
acgtcattgtggagaccatgatgtg

SEQ ID NO: 305966 - DNA, 25 bp, Artificial
  Probe
tcggtgcttacatagctggcagaga

SEQ ID NO: 305967 - DNA, 25 bp, Artificial
  Probe
ggggctacgccctttcactccagag

SEQ ID NO: 305968 - DNA, 25 bp, Artificial
  Probe
tcaaaagcaattcttcggtgcttac

SEQ ID NO: 305969 - DNA, 25 bp, Artificial
  Probe
caaccctcatgaacggtgcactcat

SEQ ID NO: 305970 - DNA, 25 bp, Artificial
  Probe
acccagtcacgtcattgtggagacc

SEQ ID NO: 305971 - DNA, 25 bp, Artificial
  Probe
gagtctgtcatacactttgccactt

SEQ ID NO: 305972 - DNA, 25 bp, Artificial
  Probe
taaccttagattctcctaggaccag

SEQ ID NO: 305973 - DNA, 25 bp, Artificial
  Probe
gagcaaccctcatgaacggtgcact

SEQ ID NO: 305974 - DNA, 25 bp, Artificial
  Probe
ttgaattggtcttgccagcaacgga

SEQ ID NO: 305975 - DNA, 25 bp, Artificial
  Probe
ggcgccgctttcctgccgtttacta

SEQ ID NO: 305976 - DNA, 25 bp, Artificial
  Probe
tatatagagtctgtcatacactttg

SEQ ID NO: 305977 - DNA, 25 bp, Artificial
  Probe
ggtgcttacatagctggcagagagt

SEQ ID NO: 305978 - DNA, 25 bp, Artificial
  Probe
aaccttagattctcctaggaccagg

SEQ ID NO: 305979 - DNA, 25 bp, Artificial
  Probe
agagtctgtcatacactttgccact

SEQ ID NO: 305980 - DNA, 25 bp, Artificial
  Probe
agcaaccctcatgaacggtgcactc

SEQ ID NO: 305981 - DNA, 25 bp, Artificial
  Probe
tgcactcatgaaacccagtcacgtc

SEQ ID NO: 305982 - DNA, 25 bp, Artificial
  Probe
gaccaggtttacagagctttatatt

SEQ ID NO: 305983 - DNA, 25 bp, Artificial
  Probe
tcatgaacggtgcactcatgaaacc

SEQ ID NO: 305984 - DNA, 25 bp, Artificial
  Probe
attggtcttgccagcaacggatctc

SEQ ID NO: 305985 - DNA, 25 bp, Artificial
  Probe
cctcatgaacggtgcactcatgaaa

SEQ ID NO: 305986 - DNA, 25 bp, Artificial
  Probe
ttagattctcctaggaccaggttta

SEQ ID NO: 305987 - DNA, 25 bp, Artificial
  Probe
aacccatgggcctatgtcctggggg

SEQ ID NO: 305988 - DNA, 25 bp, Artificial
  Probe
atacactttgccacttgaattggtc

SEQ ID NO: 305989 - DNA, 25 bp, Artificial
  Probe
ccagagcaaccctcatgaacggtgc

SEQ ID NO: 305990 - DNA, 25 bp, Artificial
  Probe
cggtgcactcatgaaacccagtcac

SEQ ID NO: 305991 - DNA, 25 bp, Artificial
  Probe
tttcaaaagcaattcttcggtgctt

SEQ ID NO: 305992 - DNA, 25 bp, Artificial
  Probe
gcgccgctttcctgccgtttactaa

SEQ ID NO: 305993 - DNA, 25 bp, Artificial
  Probe
ttgtggagaccatgatgtgaggtcc

SEQ ID NO: 305994 - DNA, 25 bp, Artificial
  Probe
cctaggaccaggtttacagagcttt

SEQ ID NO: 305995 - DNA, 25 bp, Artificial
  Probe
cgtcattgtggagaccatgatgtga

SEQ ID NO: 305996 - DNA, 25 bp, Artificial
  Probe
tacatagctggcagagagttctgcc

SEQ ID NO: 305997 - DNA, 25 bp, Artificial
  Probe
gccacttgaattggtcttgccagca

SEQ ID NO: 305998 - DNA, 25 bp, Artificial
  Probe
acactttgccacttgaattggtctt

SEQ ID NO: 305999 - DNA, 25 bp, Artificial
  Probe
ctcctaggaccaggtttacagagct

SEQ ID NO: 306000 - DNA, 25 bp, Artificial
  Probe
tgcttacatagctggcagagagttc

SEQ ID NO: 306001 - DNA, 25 bp, Artificial
  Probe
taggaccaggtttacagagctttat

SEQ ID NO: 306002 - DNA, 25 bp, Artificial
  Probe
tttttcaaaagcaattcttcggtgc

SEQ ID NO: 306003 - DNA, 25 bp, Artificial
  Probe
aaggtcatccaactgaagaacctgg

SEQ ID NO: 306004 - DNA, 25 bp, Artificial
  Probe
aggtcatccaactgaagaacctgga

SEQ ID NO: 306005 - DNA, 25 bp, Artificial
  Probe
tgtcagtgctggaagcggcatgttg

SEQ ID NO: 306006 - DNA, 25 bp, Artificial
  Probe
cggcgactgacaggggcgcgagccc

SEQ ID NO: 306007 - DNA, 25 bp, Artificial
  Probe
gccggcgactgacaggggcgcgagc

SEQ ID NO: 306008 - DNA, 25 bp, Artificial
  Probe
ggcgactgacaggggcgcgagcccg

SEQ ID NO: 306009 - DNA, 25 bp, Artificial
  Probe
gctggaagcggcatgttggtcagcc

SEQ ID NO: 306010 - DNA, 25 bp, Artificial
  Probe
agtgctggaagcggcatgttggtca

SEQ ID NO: 306011 - DNA, 25 bp, Artificial
  Probe
gccaaggtcatccaactgaagaacc

SEQ ID NO: 306012 - DNA, 25 bp, Artificial
  Probe
ccaaggtcatccaactgaagaacct

SEQ ID NO: 306013 - DNA, 25 bp, Artificial
  Probe
atgttggtcagccggcgactgacag

SEQ ID NO: 306014 - DNA, 25 bp, Artificial
  Probe
agcggcatgttggtcagccggcgac

SEQ ID NO: 306015 - DNA, 25 bp, Artificial
  Probe
agccaaggtcatccaactgaagaac

SEQ ID NO: 306016 - DNA, 25 bp, Artificial
  Probe
tgctggaagcggcatgttggtcagc

SEQ ID NO: 306017 - DNA, 25 bp, Artificial
  Probe
ggaagcggcatgttggtcagccggc

SEQ ID NO: 306018 - DNA, 25 bp, Artificial
  Probe
aagcggcatgttggtcagccggcga

SEQ ID NO: 306019 - DNA, 25 bp, Artificial
  Probe
tggtcagccggcgactgacaggggc

SEQ ID NO: 306020 - DNA, 25 bp, Artificial
  Probe
gcgactgacaggggcgcgagcccgg

SEQ ID NO: 306021 - DNA, 25 bp, Artificial
  Probe
tcagccggcgactgacaggggcgcg

SEQ ID NO: 306022 - DNA, 25 bp, Artificial
  Probe
gactgacaggggcgcgagcccgggc

SEQ ID NO: 306023 - DNA, 25 bp, Artificial
  Probe
ggtcatccaactgaagaacctggag

SEQ ID NO: 306024 - DNA, 25 bp, Artificial
  Probe
cagccggcgactgacaggggcgcga

SEQ ID NO: 306025 - DNA, 25 bp, Artificial
  Probe
gtcagccggcgactgacaggggcgc

SEQ ID NO: 306026 - DNA, 25 bp, Artificial
  Probe
actgacaggggcgcgagcccgggca

SEQ ID NO: 306027 - DNA, 25 bp, Artificial
  Probe
caaggtcatccaactgaagaacctg

SEQ ID NO: 306028 - DNA, 25 bp, Artificial
  Probe
tgttggtcagccggcgactgacagg

SEQ ID NO: 306029 - DNA, 25 bp, Artificial
  Probe
agccggcgactgacaggggcgcgag

SEQ ID NO: 306030 - DNA, 25 bp, Artificial
  Probe
ggcatgttggtcagccggcgactga

SEQ ID NO: 306031 - DNA, 25 bp, Artificial
  Probe
gcatgttggtcagccggcgactgac

SEQ ID NO: 306032 - DNA, 25 bp, Artificial
  Probe
ccggcgactgacaggggcgcgagcc

SEQ ID NO: 306033 - DNA, 25 bp, Artificial
  Probe
gtgctggaagcggcatgttggtcag

SEQ ID NO: 306034 - DNA, 25 bp, Artificial
  Probe
catgttggtcagccggcgactgaca

SEQ ID NO: 306035 - DNA, 25 bp, Artificial
  Probe
ctgacaggggcgcgagcccgggcac

SEQ ID NO: 306036 - DNA, 25 bp, Artificial
  Probe
cgactgacaggggcgcgagcccggg

SEQ ID NO: 306037 - DNA, 25 bp, Artificial
  Probe
gcggcatgttggtcagccggcgact

SEQ ID NO: 306038 - DNA, 25 bp, Artificial
  Probe
tgacaggggcgcgagcccgggcacc

SEQ ID NO: 306039 - DNA, 25 bp, Artificial
  Probe
gacaggggcgcgagcccgggcacct

SEQ ID NO: 306040 - DNA, 25 bp, Artificial
  Probe
ctggaagcggcatgttggtcagccg

SEQ ID NO: 306041 - DNA, 25 bp, Artificial
  Probe
gaagcggcatgttggtcagccggcg

SEQ ID NO: 306042 - DNA, 25 bp, Artificial
  Probe
ttggtcagccggcgactgacagggg

SEQ ID NO: 306043 - DNA, 25 bp, Artificial
  Probe
gttggtcagccggcgactgacaggg

SEQ ID NO: 306044 - DNA, 25 bp, Artificial
  Probe
tggaagcggcatgttggtcagccgg

SEQ ID NO: 306045 - DNA, 25 bp, Artificial
  Probe
gttactctgtctgacctgactacat

SEQ ID NO: 306046 - DNA, 25 bp, Artificial
  Probe
ttcctgaggtgttcgctgcaggctg

SEQ ID NO: 306047 - DNA, 25 bp, Artificial
  Probe
tgagagagcagtgtcccagccatct

SEQ ID NO: 306048 - DNA, 25 bp, Artificial
  Probe
agcgaggagcccaggcactgcagtt

SEQ ID NO: 306049 - DNA, 25 bp, Artificial
  Probe
tctctgctgccctttctggtggcag

SEQ ID NO: 306050 - DNA, 25 bp, Artificial
  Probe
ctgcagttccccttcggcgagtttg

SEQ ID NO: 306051 - DNA, 25 bp, Artificial
  Probe
tgccttccatgtgcaccagagccat

SEQ ID NO: 306052 - DNA, 25 bp, Artificial
  Probe
actctaataggcactggataaatgt

SEQ ID NO: 306053 - DNA, 25 bp, Artificial
  Probe
ctcactcctccagtgtgaagatggt

SEQ ID NO: 306054 - DNA, 25 bp, Artificial
  Probe
ctttctggtggcagtgagttccagg

SEQ ID NO: 306055 - DNA, 25 bp, Artificial
  Probe
cccttcggcgagtttgggccatggt

SEQ ID NO: 306056 - DNA, 25 bp, Artificial
  Probe
cctgcttgggtaatggaagtcacca

SEQ ID NO: 306057 - DNA, 25 bp, Artificial
  Probe
ctgttagatgtccacagagtattat

SEQ ID NO: 306058 - DNA, 25 bp, Artificial
  Probe
tgttctattttggtgacttgacaac

SEQ ID NO: 306059 - DNA, 25 bp, Artificial
  Probe
tgctaagctacctggcccctaagtc

SEQ ID NO: 306060 - DNA, 25 bp, Artificial
  Probe
cgagtttgggccatggtgtcacagt

SEQ ID NO: 306061 - DNA, 25 bp, Artificial
  Probe
ctaataggcactggataaatgttct

SEQ ID NO: 306062 - DNA, 25 bp, Artificial
  Probe
aatactgtggttttcttctctgctg

SEQ ID NO: 306063 - DNA, 25 bp, Artificial
  Probe
cagtttgtcccctgcttgggtaatg

SEQ ID NO: 306064 - DNA, 25 bp, Artificial
  Probe
gctagcagtttgtcccctgcttggg

SEQ ID NO: 306065 - DNA, 25 bp, Artificial
  Probe
tcctccagtgtgaagatggtgacag

SEQ ID NO: 306066 - DNA, 25 bp, Artificial
  Probe
gcagtgagttccagggctagcagtt

SEQ ID NO: 306067 - DNA, 25 bp, Artificial
  Probe
catgtgcaccagagccatgcgcgtc

SEQ ID NO: 306068 - DNA, 25 bp, Artificial
  Probe
ttcgctgcaggctgtgtcagttgct

SEQ ID NO: 306069 - DNA, 25 bp, Artificial
  Probe
ttgtcccctgcttgggtaatggaag

SEQ ID NO: 306070 - DNA, 25 bp, Artificial
  Probe
gtgcctaaaactgtccacacagacc

SEQ ID NO: 306071 - DNA, 25 bp, Artificial
  Probe
cattcataggaatactgtggttttc

SEQ ID NO: 306072 - DNA, 25 bp, Artificial
  Probe
tccccttcggcgagtttgggccatg

SEQ ID NO: 306073 - DNA, 25 bp, Artificial
  Probe
gtcaccatggggaactgcttgctaa

SEQ ID NO: 306074 - DNA, 25 bp, Artificial
  Probe
ttgacaaccttccataatctgagag

SEQ ID NO: 306075 - DNA, 25 bp, Artificial
  Probe
attaacctgttagatgtccacagag

SEQ ID NO: 306076 - DNA, 25 bp, Artificial
  Probe
tgccctttctggtggcagtgagttc

SEQ ID NO: 306077 - DNA, 25 bp, Artificial
  Probe
catgtgcctaaaactgtccacacag

SEQ ID NO: 306078 - DNA, 25 bp, Artificial
  Probe
aggcactgcagttccccttcggcga

SEQ ID NO: 306079 - DNA, 25 bp, Artificial
  Probe
gtaatggaagtcaccatggggaact

SEQ ID NO: 306080 - DNA, 25 bp, Artificial
  Probe
ctgtctgacctgactacattcatag

SEQ ID NO: 306081 - DNA, 25 bp, Artificial
  Probe
tacctggcccctaagtcctgcggaa

SEQ ID NO: 306082 - DNA, 25 bp, Artificial
  Probe
ctgcgtgtacccactctaataggca

SEQ ID NO: 306083 - DNA, 25 bp, Artificial
  Probe
ctaaaactgtccacacagacccagg

SEQ ID NO: 306084 - DNA, 25 bp, Artificial
  Probe
ctgtggttttcttctctgctgccct

SEQ ID NO: 306085 - DNA, 25 bp, Artificial
  Probe
tttgggccatggtgtcacagtggct

SEQ ID NO: 306086 - DNA, 25 bp, Artificial
  Probe
gagccatgcgcgtcttcctgaggtg

SEQ ID NO: 306087 - DNA, 25 bp, Artificial
  Probe
atggtgtcacagtggctgtacagag

SEQ ID NO: 306088 - DNA, 25 bp, Artificial
  Probe
ggtgacttgacaaccttccataatc

SEQ ID NO: 306089 - DNA, 25 bp, Artificial
  Probe
gagttccagggctagcagtttgtcc

SEQ ID NO: 306090 - DNA, 25 bp, Artificial
  Probe
tggaagtcaccatggggaactgctt

SEQ ID NO: 306091 - DNA, 25 bp, Artificial
  Probe
cttttaagtccctatgctgttggcc

SEQ ID NO: 306092 - DNA, 25 bp, Artificial
  Probe
tgtcccaggaggaagtaagctctta

SEQ ID NO: 306093 - DNA, 25 bp, Artificial
  Probe
agtccctatgctgttggccatccct

SEQ ID NO: 306094 - DNA, 25 bp, Artificial
  Probe
gccttgttgcctagccctacaaatg

SEQ ID NO: 306095 - DNA, 25 bp, Artificial
  Probe
atgctgttggccatccctcctttgc

SEQ ID NO: 306096 - DNA, 25 bp, Artificial
  Probe
tctgctttgaggtaagagcttgttc

SEQ ID NO: 306097 - DNA, 25 bp, Artificial
  Probe
gcctcgcaccggtgattactactag

SEQ ID NO: 306098 - DNA, 25 bp, Artificial
  Probe
gaaaggttatgctgtcccaggagga

SEQ ID NO: 306099 - DNA, 25 bp, Artificial
  Probe
gccacctgcaagtcattctaagcta

SEQ ID NO: 306100 - DNA, 25 bp, Artificial
  Probe
cctttgcctgggtgctcagggcatg

SEQ ID NO: 306101 - DNA, 25 bp, Artificial
  Probe
ccaaacaccaaagttagcagagacc

SEQ ID NO: 306102 - DNA, 25 bp, Artificial
  Probe
gtccaggccttgttgcctagcccta

SEQ ID NO: 306103 - DNA, 25 bp, Artificial
  Probe
tgactgacacagagctgcctcgcac

SEQ ID NO: 306104 - DNA, 25 bp, Artificial
  Probe
ccccgtggttggttgctcacgttag

SEQ ID NO: 306105 - DNA, 25 bp, Artificial
  Probe
agccctacaaatgactactgcttag

SEQ ID NO: 306106 - DNA, 25 bp, Artificial
  Probe
ccccaaagaacgtcacctgtcagat

SEQ ID NO: 306107 - DNA, 25 bp, Artificial
  Probe
cagaagaccccgaggttatcttaat

SEQ ID NO: 306108 - DNA, 25 bp, Artificial
  Probe
atcaccagggggaaaggttatgctg

SEQ ID NO: 306109 - DNA, 25 bp, Artificial
  Probe
gataaggtgctctcctattcctacc

SEQ ID NO: 306110 - DNA, 25 bp, Artificial
  Probe
ggtgctcagggcatgctgactagca

SEQ ID NO: 306111 - DNA, 25 bp, Artificial
  Probe
gagctgcctcgcaccggtgattact

SEQ ID NO: 306112 - DNA, 25 bp, Artificial
  Probe
ggccttgttgcctagccctacaaat

SEQ ID NO: 306113 - DNA, 25 bp, Artificial
  Probe
aaccatggccacctgcaagtcattc

SEQ ID NO: 306114 - DNA, 25 bp, Artificial
  Probe
ccctcctttgcctgggtgctcaggg

SEQ ID NO: 306115 - DNA, 25 bp, Artificial
  Probe
ggaatgcggtccaggccttgttgcc

SEQ ID NO: 306116 - DNA, 25 bp, Artificial
  Probe
tgagggcagaagaccccgaggttat

SEQ ID NO: 306117 - DNA, 25 bp, Artificial
  Probe
tcaaaagcatcaccagggggaaagg

SEQ ID NO: 306118 - DNA, 25 bp, Artificial
  Probe
agcacttttaagtccctatgctgtt

SEQ ID NO: 306119 - DNA, 25 bp, Artificial
  Probe
acctgtcagatgagcctctttactt

SEQ ID NO: 306120 - DNA, 25 bp, Artificial
  Probe
gttgcctagccctacaaatgactac

SEQ ID NO: 306121 - DNA, 25 bp, Artificial
  Probe
gagcctctttacttccccgtggttg

SEQ ID NO: 306122 - DNA, 25 bp, Artificial
  Probe
gtgattactactagcacttttaagt

SEQ ID NO: 306123 - DNA, 25 bp, Artificial
  Probe
cacagagctgcctcgcaccggtgat

SEQ ID NO: 306124 - DNA, 25 bp, Artificial
  Probe
gcctagccctacaaatgactactgc

SEQ ID NO: 306125 - DNA, 25 bp, Artificial
  Probe
tatgctgtcccaggaggaagtaagc

SEQ ID NO: 306126 - DNA, 25 bp, Artificial
  Probe
ttacttccccgtggttggttgctca

SEQ ID NO: 306127 - DNA, 25 bp, Artificial
  Probe
aattctttcctctcttgataaggtg

SEQ ID NO: 306128 - DNA, 25 bp, Artificial
  Probe
gcaagtcattctaagctacccgctt

SEQ ID NO: 306129 - DNA, 25 bp, Artificial
  Probe
tttgcctgggtgctcagggcatgct

SEQ ID NO: 306130 - DNA, 25 bp, Artificial
  Probe
tacaaatgactactgcttaggtgag

SEQ ID NO: 306131 - DNA, 25 bp, Artificial
  Probe
gcggtccaggccttgttgcctagcc

SEQ ID NO: 306132 - DNA, 25 bp, Artificial
  Probe
aaggaatgcggtccaggccttgttg

SEQ ID NO: 306133 - DNA, 25 bp, Artificial
  Probe
gtcagatgagcctctttacttcccc

SEQ ID NO: 306134 - DNA, 25 bp, Artificial
  Probe
aaggttatgctgtcccaggaggaag

SEQ ID NO: 306135 - DNA, 25 bp, Artificial
  Probe
ctagcacttttaagtccctatgctg

SEQ ID NO: 306136 - DNA, 25 bp, Artificial
  Probe
acatttttcaaaagcatcaccaggg

SEQ ID NO: 306137 - DNA, 25 bp, Artificial
  Probe
gttggtcaccatgctcctcattctc

SEQ ID NO: 306138 - DNA, 25 bp, Artificial
  Probe
ctctgtcgtaatagatgagtgcaag

SEQ ID NO: 306139 - DNA, 25 bp, Artificial
  Probe
attctcacagctgtgggcctgccga

SEQ ID NO: 306140 - DNA, 25 bp, Artificial
  Probe
aactccccagcgtatcttatggtaa

SEQ ID NO: 306141 - DNA, 25 bp, Artificial
  Probe
gacccgattctcagccaattcttga

SEQ ID NO: 306142 - DNA, 25 bp, Artificial
  Probe
ccagcgtatcttatggtaaaagatg

SEQ ID NO: 306143 - DNA, 25 bp, Artificial
  Probe
tcttcatagcccagatgaatggggt

SEQ ID NO: 306144 - DNA, 25 bp, Artificial
  Probe
ctgggattgtctatcacctttccaa

SEQ ID NO: 306145 - DNA, 25 bp, Artificial
  Probe
catgctcctcattctcacagctgtg

SEQ ID NO: 306146 - DNA, 25 bp, Artificial
  Probe
ctggcggccaatggaaagtcagctg

SEQ ID NO: 306147 - DNA, 25 bp, Artificial
  Probe
actggctgctggatagaatgagaac

SEQ ID NO: 306148 - DNA, 25 bp, Artificial
  Probe
tcccaacaccgaatgcacgaagaca

SEQ ID NO: 306149 - DNA, 25 bp, Artificial
  Probe
gcaactctggcgagcattggtgcag

SEQ ID NO: 306150 - DNA, 25 bp, Artificial
  Probe
gactgcagtgttgaggaagaacctt

SEQ ID NO: 306151 - DNA, 25 bp, Artificial
  Probe
tgcacgaagacatcgaaatgaccaa

SEQ ID NO: 306152 - DNA, 25 bp, Artificial
  Probe
tcctggatggaggtcagatagtgac

SEQ ID NO: 306153 - DNA, 25 bp, Artificial
  Probe
ggtcatcctggatggaggtcagata

SEQ ID NO: 306154 - DNA, 25 bp, Artificial
  Probe
catcgaaatgaccaagacgcagtcc

SEQ ID NO: 306155 - DNA, 25 bp, Artificial
  Probe
cggtcaatgtagtgggcgattcttt

SEQ ID NO: 306156 - DNA, 25 bp, Artificial
  Probe
tgtctatgccgcacacaactctgtc

SEQ ID NO: 306157 - DNA, 25 bp, Artificial
  Probe
agaaccacagggaaagcaactctaa

SEQ ID NO: 306158 - DNA, 25 bp, Artificial
  Probe
ccagcgccgggttggtcaccatgct

SEQ ID NO: 306159 - DNA, 25 bp, Artificial
  Probe
attgactcccaacaccgaatgcacg

SEQ ID NO: 306160 - DNA, 25 bp, Artificial
  Probe
ctggctgctggatagaatgagaact

SEQ ID NO: 306161 - DNA, 25 bp, Artificial
  Probe
atcagtctgctggtggcagtggact

SEQ ID NO: 306162 - DNA, 25 bp, Artificial
  Probe
agctggacaccattgactcccaaca

SEQ ID NO: 306163 - DNA, 25 bp, Artificial
  Probe
agcccagatgaatggggtcatcctg

SEQ ID NO: 306164 - DNA, 25 bp, Artificial
  Probe
gagaacttcggtcaatgtagtgggc

SEQ ID NO: 306165 - DNA, 25 bp, Artificial
  Probe
cgaagccgtggcagccatcttcata

SEQ ID NO: 306166 - DNA, 25 bp, Artificial
  Probe
ttgactcccaacaccgaatgcacga

SEQ ID NO: 306167 - DNA, 25 bp, Artificial
  Probe
ttacagcaactctggcgagcattgg

SEQ ID NO: 306168 - DNA, 25 bp, Artificial
  Probe
aagatgctctaaacaggcttccttt

SEQ ID NO: 306169 - DNA, 25 bp, Artificial
  Probe
gggaaagcaactctaatcagtgtgt

SEQ ID NO: 306170 - DNA, 25 bp, Artificial
  Probe
agccatcttcatagcccagatgaat

SEQ ID NO: 306171 - DNA, 25 bp, Artificial
  Probe
tggaaagtcagctgactgcagtgtt

SEQ ID NO: 306172 - DNA, 25 bp, Artificial
  Probe
tgagtgcaaggtaactctggcggcc

SEQ ID NO: 306173 - DNA, 25 bp, Artificial
  Probe
cagtggactggctgctggatagaat

SEQ ID NO: 306174 - DNA, 25 bp, Artificial
  Probe
gcaaggtaactctggcggccaatgg

SEQ ID NO: 306175 - DNA, 25 bp, Artificial
  Probe
actctggcggccaatggaaagtcag

SEQ ID NO: 306176 - DNA, 25 bp, Artificial
  Probe
tttatgacgacacgaagaaccacag

SEQ ID NO: 306177 - DNA, 25 bp, Artificial
  Probe
cgtggcagccatcttcatagcccag

SEQ ID NO: 306178 - DNA, 25 bp, Artificial
  Probe
tcagtgtgtctatgccgcacacaac

SEQ ID NO: 306179 - DNA, 25 bp, Artificial
  Probe
ctgccgacagaggacatcagtctgc

SEQ ID NO: 306180 - DNA, 25 bp, Artificial
  Probe
atagtgactgtaagccttacagcaa

SEQ ID NO: 306181 - DNA, 25 bp, Artificial
  Probe
gccagtattcccagcgccgggttgg

SEQ ID NO: 306182 - DNA, 25 bp, Artificial
  Probe
aagacatcgaaatgaccaagacgca

SEQ ID NO: 306183 - DNA, 25 bp, Artificial
  Probe
ctcagttctgtgttgggtactgagg

SEQ ID NO: 306184 - DNA, 25 bp, Artificial
  Probe
caaccccgattactggcacagcagg

SEQ ID NO: 306185 - DNA, 25 bp, Artificial
  Probe
ctcgtcggtaggtctcagttctgtg

SEQ ID NO: 306186 - DNA, 25 bp, Artificial
  Probe
tttccccaaggctaatgcccagaga

SEQ ID NO: 306187 - DNA, 25 bp, Artificial
  Probe
aggctaatgcccagagaacgtaaac

SEQ ID NO: 306188 - DNA, 25 bp, Artificial
  Probe
tgcccagagaacgtaaacttctgct

SEQ ID NO: 306189 - DNA, 25 bp, Artificial
  Probe
gaaggcaccctctcgtcggtaggtc

SEQ ID NO: 306190 - DNA, 25 bp, Artificial
  Probe
tccctggaagaactgggttacgagt

SEQ ID NO: 306191 - DNA, 25 bp, Artificial
  Probe
ggcttttccccaaggctaatgccca

SEQ ID NO: 306192 - DNA, 25 bp, Artificial
  Probe
tactggcacagcaggcttttcccca

SEQ ID NO: 306193 - DNA, 25 bp, Artificial
  Probe
cgtgtggcggcagctagtgcctctt

SEQ ID NO: 306194 - DNA, 25 bp, Artificial
  Probe
tggcggcagctagtgcctcttcgag

SEQ ID NO: 306195 - DNA, 25 bp, Artificial
  Probe
actccagatgaagactatgagtaca

SEQ ID NO: 306196 - DNA, 25 bp, Artificial
  Probe
ccgattactggcacagcaggctttt

SEQ ID NO: 306197 - DNA, 25 bp, Artificial
  Probe
ctggcacaactccagatgaagacta

SEQ ID NO: 306198 - DNA, 25 bp, Artificial
  Probe
aaccccgattactggcacagcaggc

SEQ ID NO: 306199 - DNA, 25 bp, Artificial
  Probe
gcctgcccagcagctgagcaagggt

SEQ ID NO: 306200 - DNA, 25 bp, Artificial
  Probe
ccgcctcaaaactctgcgtagttta

SEQ ID NO: 306201 - DNA, 25 bp, Artificial
  Probe
tcggtaggtctcagttctgtgttgg

SEQ ID NO: 306202 - DNA, 25 bp, Artificial
  Probe
ccccaaggctaatgcccagagaacg

SEQ ID NO: 306203 - DNA, 25 bp, Artificial
  Probe
gagaacgtaaacttctgctccgtga

SEQ ID NO: 306204 - DNA, 25 bp, Artificial
  Probe
cgagtacatggatgtgggttcagac

SEQ ID NO: 306205 - DNA, 25 bp, Artificial
  Probe
cctctgctggcacaactccagatga

SEQ ID NO: 306206 - DNA, 25 bp, Artificial
  Probe
ttctgctccgtgacgctctgcgggc

SEQ ID NO: 306207 - DNA, 25 bp, Artificial
  Probe
gtaaacttctgctccgtgacgctct

SEQ ID NO: 306208 - DNA, 25 bp, Artificial
  Probe
acagcaggcttttccccaaggctaa

SEQ ID NO: 306209 - DNA, 25 bp, Artificial
  Probe
actatgcagctatgggggcctgccc

SEQ ID NO: 306210 - DNA, 25 bp, Artificial
  Probe
gcctggctccctggaagaactgggt

SEQ ID NO: 306211 - DNA, 25 bp, Artificial
  Probe
tcgacaaccccgattactggcacag

SEQ ID NO: 306212 - DNA, 25 bp, Artificial
  Probe
taggtctcagttctgtgttgggtac

SEQ ID NO: 306213 - DNA, 25 bp, Artificial
  Probe
ggcacagcaggcttttccccaaggc

SEQ ID NO: 306214 - DNA, 25 bp, Artificial
  Probe
tttccaggggcctggacatcacgcc

SEQ ID NO: 306215 - DNA, 25 bp, Artificial
  Probe
gcagctagtgcctcttcgagggtac

SEQ ID NO: 306216 - DNA, 25 bp, Artificial
  Probe
tgtgggttcagacctcagtgcttct

SEQ ID NO: 306217 - DNA, 25 bp, Artificial
  Probe
agctagtgcctcttcgagggtaccc

SEQ ID NO: 306218 - DNA, 25 bp, Artificial
  Probe
aggcaccctctcgtcggtaggtctc

SEQ ID NO: 306219 - DNA, 25 bp, Artificial
  Probe
ccctctcgtcggtaggtctcagttc

SEQ ID NO: 306220 - DNA, 25 bp, Artificial
  Probe
gattactggcacagcaggcttttcc

SEQ ID NO: 306221 - DNA, 25 bp, Artificial
  Probe
gactatgcagctatgggggcctgcc

SEQ ID NO: 306222 - DNA, 25 bp, Artificial
  Probe
atgcgagctttccaggggcctggac

SEQ ID NO: 306223 - DNA, 25 bp, Artificial
  Probe
gatgtgggttcagacctcagtgctt

SEQ ID NO: 306224 - DNA, 25 bp, Artificial
  Probe
tcagacctcagtgcttctctgggca

SEQ ID NO: 306225 - DNA, 25 bp, Artificial
  Probe
cccagcagctgagcaagggtacgag

SEQ ID NO: 306226 - DNA, 25 bp, Artificial
  Probe
tgcgagctttccaggggcctggaca

SEQ ID NO: 306227 - DNA, 25 bp, Artificial
  Probe
ggcaccctctcgtcggtaggtctca

SEQ ID NO: 306228 - DNA, 25 bp, Artificial
  Probe
acttctgctccgtgacgctctgcgg

SEQ ID NO: 306229 - DNA, 25 bp, Artificial
  Probe
gcaccattctcatcaaccgggtgct

SEQ ID NO: 306230 - DNA, 25 bp, Artificial
  Probe
atcaaccgggtgctcgcctcgtgct

SEQ ID NO: 306231 - DNA, 25 bp, Artificial
  Probe
cggtgcacagcgtaacgctacgaga

SEQ ID NO: 306232 - DNA, 25 bp, Artificial
  Probe
taccacattggcacctggctgttgg

SEQ ID NO: 306233 - DNA, 25 bp, Artificial
  Probe
tgctcgcctcgtgctacgcagtcat

SEQ ID NO: 306234 - DNA, 25 bp, Artificial
  Probe
tcgcctcgtgctacgcagtcatcga

SEQ ID NO: 306235 - DNA, 25 bp, Artificial
  Probe
tgctacgcagtcatcgaggagcaca

SEQ ID NO: 306236 - DNA, 25 bp, Artificial
  Probe
gccagataagcaaccgggaaagcgc

SEQ ID NO: 306237 - DNA, 25 bp, Artificial
  Probe
gctgtaccacattggcacctggctg

SEQ ID NO: 306238 - DNA, 25 bp, Artificial
  Probe
cgcagtcatcgaggagcacagctgg

SEQ ID NO: 306239 - DNA, 25 bp, Artificial
  Probe
cgagaccctgcatcccttgggaatg

SEQ ID NO: 306240 - DNA, 25 bp, Artificial
  Probe
ctgcgggcatccactggtactcgca

SEQ ID NO: 306241 - DNA, 25 bp, Artificial
  Probe
ctgctgtaccacattggcacctggc

SEQ ID NO: 306242 - DNA, 25 bp, Artificial
  Probe
accattctcatcaaccgggtgctcg

SEQ ID NO: 306243 - DNA, 25 bp, Artificial
  Probe
gcacctggctgttggacagcgagac

SEQ ID NO: 306244 - DNA, 25 bp, Artificial
  Probe
cgtgctacgcagtcatcgaggagca

SEQ ID NO: 306245 - DNA, 25 bp, Artificial
  Probe
atcccttgggaatggcagtcaagtc

SEQ ID NO: 306246 - DNA, 25 bp, Artificial
  Probe
taagcaaccgggaaagcgcacggaa

SEQ ID NO: 306247 - DNA, 25 bp, Artificial
  Probe
cgggtgctcgcctcgtgctacgcag

SEQ ID NO: 306248 - DNA, 25 bp, Artificial
  Probe
cagtcatcgaggagcacagctgggc

SEQ ID NO: 306249 - DNA, 25 bp, Artificial
  Probe
ggacggcaccattctcatcaaccgg

SEQ ID NO: 306250 - DNA, 25 bp, Artificial
  Probe
gccgcggtgcacagcgtaacgctac

SEQ ID NO: 306251 - DNA, 25 bp, Artificial
  Probe
acagcgtaacgctacgagaggaggc

SEQ ID NO: 306252 - DNA, 25 bp, Artificial
  Probe
actggtactcgcagctgctgtacca

SEQ ID NO: 306253 - DNA, 25 bp, Artificial
  Probe
acagcgagaccctgcatcccttggg

SEQ ID NO: 306254 - DNA, 25 bp, Artificial
  Probe
ggcggacggcaccattctcatcaac

SEQ ID NO: 306255 - DNA, 25 bp, Artificial
  Probe
ctgccccgcaatctgtagcggaagc

SEQ ID NO: 306256 - DNA, 25 bp, Artificial
  Probe
tcgaggagcacagctgggcacaccg

SEQ ID NO: 306257 - DNA, 25 bp, Artificial
  Probe
tcatcaaccgggtgctcgcctcgtg

SEQ ID NO: 306258 - DNA, 25 bp, Artificial
  Probe
acggcggacggcaccattctcatca

SEQ ID NO: 306259 - DNA, 25 bp, Artificial
  Probe
gtccagctgaagtccgacgggaccg

SEQ ID NO: 306260 - DNA, 25 bp, Artificial
  Probe
gtgcacagcgtaacgctacgagagg

SEQ ID NO: 306261 - DNA, 25 bp, Artificial
  Probe
cacattggcacctggctgttggaca

SEQ ID NO: 306262 - DNA, 25 bp, Artificial
  Probe
tcaaccgggtgctcgcctcgtgcta

SEQ ID NO: 306263 - DNA, 25 bp, Artificial
  Probe
ttggacagcgagaccctgcatccct

SEQ ID NO: 306264 - DNA, 25 bp, Artificial
  Probe
ggtgctcgcctcgtgctacgcagtc

SEQ ID NO: 306265 - DNA, 25 bp, Artificial
  Probe
gcatcccttgggaatggcagtcaag

SEQ ID NO: 306266 - DNA, 25 bp, Artificial
  Probe
gcctgcgggcatccactggtactcg

SEQ ID NO: 306267 - DNA, 25 bp, Artificial
  Probe
atccactggtactcgcagctgctgt

SEQ ID NO: 306268 - DNA, 25 bp, Artificial
  Probe
tgttggacagcgagaccctgcatcc

SEQ ID NO: 306269 - DNA, 25 bp, Artificial
  Probe
ctcgtgctacgcagtcatcgaggag

SEQ ID NO: 306270 - DNA, 25 bp, Artificial
  Probe
ggaatggcagtcaagtccagctgaa

SEQ ID NO: 306271 - DNA, 25 bp, Artificial
  Probe
gaagcgactgccagataagcaaccg

SEQ ID NO: 306272 - DNA, 25 bp, Artificial
  Probe
ttggcacctggctgttggacagcga

SEQ ID NO: 306273 - DNA, 25 bp, Artificial
  Probe
tggctgttggacagcgagaccctgc

SEQ ID NO: 306274 - DNA, 25 bp, Artificial
  Probe
cccgcaatctgtagcggaagcgagg

SEQ ID NO: 306275 - DNA, 25 bp, Artificial
  Probe
aggtcctgccgtctacatgaggagg

SEQ ID NO: 306276 - DNA, 25 bp, Artificial
  Probe
catcttcggcgctgtccctgtggtc

SEQ ID NO: 306277 - DNA, 25 bp, Artificial
  Probe
aggaacaaaagctctgactatgtgc

SEQ ID NO: 306278 - DNA, 25 bp, Artificial
  Probe
ccaggcctcaacacaagagaagaat

SEQ ID NO: 306279 - DNA, 25 bp, Artificial
  Probe
ccaaaggtcatgtcagtagacccac

SEQ ID NO: 306280 - DNA, 25 bp, Artificial
  Probe
tcttaagcagaatgttctcgtcacc

SEQ ID NO: 306281 - DNA, 25 bp, Artificial
  Probe
aagctctgactatgtgcagcttctt

SEQ ID NO: 306282 - DNA, 25 bp, Artificial
  Probe
gtcagtagacccactaggaacaaaa

SEQ ID NO: 306283 - DNA, 25 bp, Artificial
  Probe
aaggtcatgtcagtagacccactag

SEQ ID NO: 306284 - DNA, 25 bp, Artificial
  Probe
ggtcgccagtgctgtcactgccctg

SEQ ID NO: 306285 - DNA, 25 bp, Artificial
  Probe
aaatgtggaggctgccattcagaga

SEQ ID NO: 306286 - DNA, 25 bp, Artificial
  Probe
tgccagagaccttgggccagccgct

SEQ ID NO: 306287 - DNA, 25 bp, Artificial
  Probe
aacggaagggcttcacacagcacta

SEQ ID NO: 306288 - DNA, 25 bp, Artificial
  Probe
ccatccaaatgtggaggctgccatt

SEQ ID NO: 306289 - DNA, 25 bp, Artificial
  Probe
caggtcctgccgtctacatgaggag

SEQ ID NO: 306290 - DNA, 25 bp, Artificial
  Probe
ccagccgctgccagatacagtgcag

SEQ ID NO: 306291 - DNA, 25 bp, Artificial
  Probe
tgggccagccgctgccagatacagt

SEQ ID NO: 306292 - DNA, 25 bp, Artificial
  Probe
gcttcacacagcactaaagggagtg

SEQ ID NO: 306293 - DNA, 25 bp, Artificial
  Probe
tcttcggcgctgtccctgtggtcgc

SEQ ID NO: 306294 - DNA, 25 bp, Artificial
  Probe
gaacggaagggcttcacacagcact

SEQ ID NO: 306295 - DNA, 25 bp, Artificial
  Probe
ggctgccattcagagaaatccctcc

SEQ ID NO: 306296 - DNA, 25 bp, Artificial
  Probe
gaacaaaagctctgactatgtgcag

SEQ ID NO: 306297 - DNA, 25 bp, Artificial
  Probe
tggactttgagaacggaagggcttc

SEQ ID NO: 306298 - DNA, 25 bp, Artificial
  Probe
aggcctcaacacaagagaagaatgg

SEQ ID NO: 306299 - DNA, 25 bp, Artificial
  Probe
cacctccaggaccttgcaaagaatc

SEQ ID NO: 306300 - DNA, 25 bp, Artificial
  Probe
tcatgtcagtagacccactaggaac

SEQ ID NO: 306301 - DNA, 25 bp, Artificial
  Probe
ctctgactatgtgcagcttcttaag

SEQ ID NO: 306302 - DNA, 25 bp, Artificial
  Probe
tgcctctcttcatcttcggcgctgt

SEQ ID NO: 306303 - DNA, 25 bp, Artificial
  Probe
ctgtccctgtggtcgccagtgctgt

SEQ ID NO: 306304 - DNA, 25 bp, Artificial
  Probe
gtggaggctgccattcagagaaatc

SEQ ID NO: 306305 - DNA, 25 bp, Artificial
  Probe
tagacccactaggaacaaaagctct

SEQ ID NO: 306306 - DNA, 25 bp, Artificial
  Probe
agaccttgggccagccgctgccaga

SEQ ID NO: 306307 - DNA, 25 bp, Artificial
  Probe
cccactaggaacaaaagctctgact

SEQ ID NO: 306308 - DNA, 25 bp, Artificial
  Probe
agccgctgccagatacagtgcagga

SEQ ID NO: 306309 - DNA, 25 bp, Artificial
  Probe
ctccccaaaggtcatgtcagtagac

SEQ ID NO: 306310 - DNA, 25 bp, Artificial
  Probe
cggaagggcttcacacagcactaaa

SEQ ID NO: 306311 - DNA, 25 bp, Artificial
  Probe
tgccctgctgccagagaccttgggc

SEQ ID NO: 306312 - DNA, 25 bp, Artificial
  Probe
gcgctgtccctgtggtcgccagtgc

SEQ ID NO: 306313 - DNA, 25 bp, Artificial
  Probe
ggccatcttcctgctcatggtcact

SEQ ID NO: 306314 - DNA, 25 bp, Artificial
  Probe
aatgttctcgtcaccggccatcttc

SEQ ID NO: 306315 - DNA, 25 bp, Artificial
  Probe
cgctccaggcctcaacacaagagaa

SEQ ID NO: 306316 - DNA, 25 bp, Artificial
  Probe
ggaggctgccattcagagaaatccc

SEQ ID NO: 306317 - DNA, 25 bp, Artificial
  Probe
cctgctgccagagaccttgggccag

SEQ ID NO: 306318 - DNA, 25 bp, Artificial
  Probe
gctgccagagaccttgggccagccg

SEQ ID NO: 306319 - DNA, 25 bp, Artificial
  Probe
cctgtggtcgccagtgctgtcactg

SEQ ID NO: 306320 - DNA, 25 bp, Artificial
  Probe
catccaaatgtggaggctgccattc

SEQ ID NO: 306321 - DNA, 25 bp, Artificial
  Probe
cagcaggatgccatccatgcggcct

SEQ ID NO: 306322 - DNA, 25 bp, Artificial
  Probe
gtgaccggctcaagcctggctttga

SEQ ID NO: 306323 - DNA, 25 bp, Artificial
  Probe
gttggcagctgaaaggcagcatgca

SEQ ID NO: 306324 - DNA, 25 bp, Artificial
  Probe
gatgctcaacgtgactccccatcat

SEQ ID NO: 306325 - DNA, 25 bp, Artificial
  Probe
cacttgcagagcttctgcagccggg

SEQ ID NO: 306326 - DNA, 25 bp, Artificial
  Probe
ggcctctctatctgcgccaatgtca

SEQ ID NO: 306327 - DNA, 25 bp, Artificial
  Probe
aacgagaacggctagcgctggcagc

SEQ ID NO: 306328 - DNA, 25 bp, Artificial
  Probe
agggtgctgcccacttgcagagctt

SEQ ID NO: 306329 - DNA, 25 bp, Artificial
  Probe
aggacagggtgctgcccacttgcag

SEQ ID NO: 306330 - DNA, 25 bp, Artificial
  Probe
aggtgaaacctagtgagctggaacc

SEQ ID NO: 306331 - DNA, 25 bp, Artificial
  Probe
gtgaacgtgacctccgtgaccggct

SEQ ID NO: 306332 - DNA, 25 bp, Artificial
  Probe
ttggcagctgaaaggcagcatgcag

SEQ ID NO: 306333 - DNA, 25 bp, Artificial
  Probe
gctgcagatgctcaacgtgactccc

SEQ ID NO: 306334 - DNA, 25 bp, Artificial
  Probe
agcaggatgccatccatgcggcctc

SEQ ID NO: 306335 - DNA, 25 bp, Artificial
  Probe
cctggaacgagaacggctagcgctg

SEQ ID NO: 306336 - DNA, 25 bp, Artificial
  Probe
tctgcacgagaacgaagttcttcgt

SEQ ID NO: 306337 - DNA, 25 bp, Artificial
  Probe
gggcctggctctacaacctgggcca

SEQ ID NO: 306338 - DNA, 25 bp, Artificial
  Probe
tggctctacaacctgggccacctgg

SEQ ID NO: 306339 - DNA, 25 bp, Artificial
  Probe
ctgaaaggcagcatgcagaaagggt

SEQ ID NO: 306340 - DNA, 25 bp, Artificial
  Probe
gcagccctgggcaatgacccactag

SEQ ID NO: 306341 - DNA, 25 bp, Artificial
  Probe
acgtgacctccgtgaccggctcaag

SEQ ID NO: 306342 - DNA, 25 bp, Artificial
  Probe
ggggcctggctctacaacctgggcc

SEQ ID NO: 306343 - DNA, 25 bp, Artificial
  Probe
gcctggctttgaggtgaaacctagt

SEQ ID NO: 306344 - DNA, 25 bp, Artificial
  Probe
gacacgggggcctggctctacaacc

SEQ ID NO: 306345 - DNA, 25 bp, Artificial
  Probe
cagccctgcgtcctgacatgtctta

SEQ ID NO: 306346 - DNA, 25 bp, Artificial
  Probe
ctttcccttttcatccgagcctggg

SEQ ID NO: 306347 - DNA, 25 bp, Artificial
  Probe
caagccgaggacagggtgctgccca

SEQ ID NO: 306348 - DNA, 25 bp, Artificial
  Probe
gggcaatgacccactagcccggctg

SEQ ID NO: 306349 - DNA, 25 bp, Artificial
  Probe
cccaagccgaggacagggtgctgcc

SEQ ID NO: 306350 - DNA, 25 bp, Artificial
  Probe
agcccgtgaacgtgacctccgtgac

SEQ ID NO: 306351 - DNA, 25 bp, Artificial
  Probe
ctcaccctctgcacgagaacgaagt

SEQ ID NO: 306352 - DNA, 25 bp, Artificial
  Probe
tgtcttatgctgagcggttggcagc

SEQ ID NO: 306353 - DNA, 25 bp, Artificial
  Probe
agcctggctttgaggtgaaacctag

SEQ ID NO: 306354 - DNA, 25 bp, Artificial
  Probe
cacagtcagccgagctgcagcgctt

SEQ ID NO: 306355 - DNA, 25 bp, Artificial
  Probe
ttcatccgagcctggggcccctgga

SEQ ID NO: 306356 - DNA, 25 bp, Artificial
  Probe
cactagcccggctgcagatgctcaa

SEQ ID NO: 306357 - DNA, 25 bp, Artificial
  Probe
ggcccctggaacgagaacggctagc

SEQ ID NO: 306358 - DNA, 25 bp, Artificial
  Probe
gagaacgaagttcttcgtcaccagc

SEQ ID NO: 306359 - DNA, 25 bp, Artificial
  Probe
tccgtgaccggctcaagcctggctt

SEQ ID NO: 306360 - DNA, 25 bp, Artificial
  Probe
acgagaacggctagcgctggcagct

SEQ ID NO: 306361 - DNA, 25 bp, Artificial
  Probe
tgcaccagcaggatgccatccatgc

SEQ ID NO: 306362 - DNA, 25 bp, Artificial
  Probe
tttcccttttcatccgagcctgggg

SEQ ID NO: 306363 - DNA, 25 bp, Artificial
  Probe
gcagatgctcaacgtgactccccat

SEQ ID NO: 306364 - DNA, 25 bp, Artificial
  Probe
tagtgagctggaacccctacatggg

SEQ ID NO: 306365 - DNA, 25 bp, Artificial
  Probe
tatgctgagcggttggcagctgaaa

SEQ ID NO: 306366 - DNA, 25 bp, Artificial
  Probe
ttcttcgtcaccagctctttgctgc

SEQ ID NO: 306367 - DNA, 25 bp, Artificial
  Probe
tagcttcatccgtgaaggactgagg

SEQ ID NO: 306368 - DNA, 25 bp, Artificial
  Probe
ttctcctagcttcatccgtgaagga

SEQ ID NO: 306369 - DNA, 25 bp, Artificial
  Probe
tgatttctgctcgtggcagtacact

SEQ ID NO: 306370 - DNA, 25 bp, Artificial
  Probe
aacccagatgcatcaatttctgatg

SEQ ID NO: 306371 - DNA, 25 bp, Artificial
  Probe
tgaaaacaggatacctcgggtattt

SEQ ID NO: 306372 - DNA, 25 bp, Artificial
  Probe
ctgaggacctttgttatacttaaca

SEQ ID NO: 306373 - DNA, 25 bp, Artificial
  Probe
ctcctagcttcatccgtgaaggact

SEQ ID NO: 306374 - DNA, 25 bp, Artificial
  Probe
gactgaggacctttgttatacttaa

SEQ ID NO: 306375 - DNA, 25 bp, Artificial
  Probe
aggactgaggacctttgttatactt

SEQ ID NO: 306376 - DNA, 25 bp, Artificial
  Probe
ttatttctgccgaaagtattcaggt

SEQ ID NO: 306377 - DNA, 25 bp, Artificial
  Probe
agtattcaggtttgctgtggacatc

SEQ ID NO: 306378 - DNA, 25 bp, Artificial
  Probe
tataaacgtggcatagatttgccag

SEQ ID NO: 306379 - DNA, 25 bp, Artificial
  Probe
tgaggacctttgttatacttaacaa

SEQ ID NO: 306380 - DNA, 25 bp, Artificial
  Probe
atccgtgaaggactgaggacctttg

SEQ ID NO: 306381 - DNA, 25 bp, Artificial
  Probe
gggccagaaacaaacttctatgctt

SEQ ID NO: 306382 - DNA, 25 bp, Artificial
  Probe
aaggactgaggacctttgttatact

SEQ ID NO: 306383 - DNA, 25 bp, Artificial
  Probe
ctgttccatgtggttctcctagctt

SEQ ID NO: 306384 - DNA, 25 bp, Artificial
  Probe
tttctgagtgatttctgctcgtggc

SEQ ID NO: 306385 - DNA, 25 bp, Artificial
  Probe
acgtggcatagatttgccagaaaaa

SEQ ID NO: 306386 - DNA, 25 bp, Artificial
  Probe
agtacactgttccatgtggttctcc

SEQ ID NO: 306387 - DNA, 25 bp, Artificial
  Probe
ttctgagtgatttctgctcgtggca

SEQ ID NO: 306388 - DNA, 25 bp, Artificial
  Probe
tgctcgtggcagtacactgttccat

SEQ ID NO: 306389 - DNA, 25 bp, Artificial
  Probe
cttcatccgtgaaggactgaggacc

SEQ ID NO: 306390 - DNA, 25 bp, Artificial
  Probe
ggccagaaacaaacttctatgctta

SEQ ID NO: 306391 - DNA, 25 bp, Artificial
  Probe
gtttgctgtggacatcaggagtctg

SEQ ID NO: 306392 - DNA, 25 bp, Artificial
  Probe
acatcaggagtctgaattctgttct

SEQ ID NO: 306393 - DNA, 25 bp, Artificial
  Probe
catgtggttctcctagcttcatccg

SEQ ID NO: 306394 - DNA, 25 bp, Artificial
  Probe
agtctgaattctgttcttactgatt

SEQ ID NO: 306395 - DNA, 25 bp, Artificial
  Probe
tctgctcgtggcagtacactgttcc

SEQ ID NO: 306396 - DNA, 25 bp, Artificial
  Probe
agtgatttctgctcgtggcagtaca

SEQ ID NO: 306397 - DNA, 25 bp, Artificial
  Probe
ctgccgaaagtattcaggtttgctg

SEQ ID NO: 306398 - DNA, 25 bp, Artificial
  Probe
gatgcatcaatttctgatgcttttt

SEQ ID NO: 306399 - DNA, 25 bp, Artificial
  Probe
atgttaccttttatgaaatgagcac

SEQ ID NO: 306400 - DNA, 25 bp, Artificial
  Probe
gatttctgctcgtggcagtacactg

SEQ ID NO: 306401 - DNA, 25 bp, Artificial
  Probe
agcttcatccgtgaaggactgagga

SEQ ID NO: 306402 - DNA, 25 bp, Artificial
  Probe
atgaaaacaggatacctcgggtatt

SEQ ID NO: 306403 - DNA, 25 bp, Artificial
  Probe
atcaggagtctgaattctgttctta

SEQ ID NO: 306404 - DNA, 25 bp, Artificial
  Probe
ggcctttctgagtgatttctgctcg

SEQ ID NO: 306405 - DNA, 25 bp, Artificial
  Probe
tggacatcaggagtctgaattctgt

SEQ ID NO: 306406 - DNA, 25 bp, Artificial
  Probe
agatgcatcaatttctgatgctttt

SEQ ID NO: 306407 - DNA, 25 bp, Artificial
  Probe
ggatacctcgggtatttccaaatat

SEQ ID NO: 306408 - DNA, 25 bp, Artificial
  Probe
ccagatgcatcaatttctgatgctt

SEQ ID NO: 306409 - DNA, 25 bp, Artificial
  Probe
gagtgatttctgctcgtggcagtac

SEQ ID NO: 306410 - DNA, 25 bp, Artificial
  Probe
aggtttgctgtggacatcaggagtc

SEQ ID NO: 306411 - DNA, 25 bp, Artificial
  Probe
ggagtctgaattctgttcttactga

SEQ ID NO: 306412 - DNA, 25 bp, Artificial
  Probe
gatacctcgggtatttccaaatata

SEQ ID NO: 306413 - DNA, 25 bp, Artificial
  Probe
ccgtgcctcagagaaatttgtattt

SEQ ID NO: 306414 - DNA, 25 bp, Artificial
  Probe
ttgttgtgaacatcaacctgctgac

SEQ ID NO: 306415 - DNA, 25 bp, Artificial
  Probe
gttaagtatgtgactgctgccgtgc

SEQ ID NO: 306416 - DNA, 25 bp, Artificial
  Probe
atcaacctgctgactgaacctggga

SEQ ID NO: 306417 - DNA, 25 bp, Artificial
  Probe
ttaagtatgtgactgctgccgtgcc

SEQ ID NO: 306418 - DNA, 25 bp, Artificial
  Probe
tgtgaacatcaacctgctgactgaa

SEQ ID NO: 306419 - DNA, 25 bp, Artificial
  Probe
gttgtgaacatcaacctgctgactg

SEQ ID NO: 306420 - DNA, 25 bp, Artificial
  Probe
ctgctgactgaacctgggaattcag

SEQ ID NO: 306421 - DNA, 25 bp, Artificial
  Probe
agccaacatgattgttgtgaacatc

SEQ ID NO: 306422 - DNA, 25 bp, Artificial
  Probe
agtatgtgactgctgccgtgcctca

SEQ ID NO: 306423 - DNA, 25 bp, Artificial
  Probe
aaaagccaacatgattgttgtgaac

SEQ ID NO: 306424 - DNA, 25 bp, Artificial
  Probe
gtgaacatcaacctgctgactgaac

SEQ ID NO: 306425 - DNA, 25 bp, Artificial
  Probe
aacctgctgactgaacctgggaatt

SEQ ID NO: 306426 - DNA, 25 bp, Artificial
  Probe
taagtatgtgactgctgccgtgcct

SEQ ID NO: 306427 - DNA, 25 bp, Artificial
  Probe
acctgctgactgaacctgggaattc

SEQ ID NO: 306428 - DNA, 25 bp, Artificial
  Probe
gtgactgctgccgtgcctcagagaa

SEQ ID NO: 306429 - DNA, 25 bp, Artificial
  Probe
tcaacctgctgactgaacctgggaa

SEQ ID NO: 306430 - DNA, 25 bp, Artificial
  Probe
acctgggaattcaggttaagtatgt

SEQ ID NO: 306431 - DNA, 25 bp, Artificial
  Probe
cctgctgactgaacctgggaattca

SEQ ID NO: 306432 - DNA, 25 bp, Artificial
  Probe
tgctgactgaacctgggaattcagg

SEQ ID NO: 306433 - DNA, 25 bp, Artificial
  Probe
gccaacatgattgttgtgaacatca

SEQ ID NO: 306434 - DNA, 25 bp, Artificial
  Probe
cgtgcctcagagaaatttgtattta

SEQ ID NO: 306435 - DNA, 25 bp, Artificial
  Probe
gtatgtgactgctgccgtgcctcag

SEQ ID NO: 306436 - DNA, 25 bp, Artificial
  Probe
gactgctgccgtgcctcagagaaat

SEQ ID NO: 306437 - DNA, 25 bp, Artificial
  Probe
aatcttagaacaaatgtttgtttat

SEQ ID NO: 306438 - DNA, 25 bp, Artificial
  Probe
aacatcaacctgctgactgaacctg

SEQ ID NO: 306439 - DNA, 25 bp, Artificial
  Probe
tgccgtgcctcagagaaatttgtat

SEQ ID NO: 306440 - DNA, 25 bp, Artificial
  Probe
gaacatcaacctgctgactgaacct

SEQ ID NO: 306441 - DNA, 25 bp, Artificial
  Probe
caacctgctgactgaacctgggaat

SEQ ID NO: 306442 - DNA, 25 bp, Artificial
  Probe
ctgctgccgtgcctcagagaaattt

SEQ ID NO: 306443 - DNA, 25 bp, Artificial
  Probe
tgctgccgtgcctcagagaaatttg

SEQ ID NO: 306444 - DNA, 25 bp, Artificial
  Probe
gctgactgaacctgggaattcaggt

SEQ ID NO: 306445 - DNA, 25 bp, Artificial
  Probe
aaagccaacatgattgttgtgaaca

SEQ ID NO: 306446 - DNA, 25 bp, Artificial
  Probe
tgaacatcaacctgctgactgaacc

SEQ ID NO: 306447 - DNA, 25 bp, Artificial
  Probe
aagtatgtgactgctgccgtgcctc

SEQ ID NO: 306448 - DNA, 25 bp, Artificial
  Probe
tgactgctgccgtgcctcagagaaa

SEQ ID NO: 306449 - DNA, 25 bp, Artificial
  Probe
tatgtgactgctgccgtgcctcaga

SEQ ID NO: 306450 - DNA, 25 bp, Artificial
  Probe
ttgtgaacatcaacctgctgactga

SEQ ID NO: 306451 - DNA, 25 bp, Artificial
  Probe
tgttgtgaacatcaacctgctgact

SEQ ID NO: 306452 - DNA, 25 bp, Artificial
  Probe
gctgccgtgcctcagagaaatttgt

SEQ ID NO: 306453 - DNA, 25 bp, Artificial
  Probe
ctgccgtgcctcagagaaatttgta

SEQ ID NO: 306454 - DNA, 25 bp, Artificial
  Probe
ctgactgaacctgggaattcaggtt

SEQ ID NO: 306455 - DNA, 25 bp, Artificial
  Probe
aagccaacatgattgttgtgaacat

SEQ ID NO: 306456 - DNA, 25 bp, Artificial
  Probe
acatcaacctgctgactgaacctgg

SEQ ID NO: 306457 - DNA, 25 bp, Artificial
  Probe
gccgtgcctcagagaaatttgtatt

SEQ ID NO: 306458 - DNA, 25 bp, Artificial
  Probe
gtgcctcagagaaatttgtatttaa

SEQ ID NO: 306459 - DNA, 25 bp, Artificial
  Probe
ttgcctctatccactcttgaaaggc

SEQ ID NO: 306460 - DNA, 25 bp, Artificial
  Probe
gaggcatcaagttttcctatccaac

SEQ ID NO: 306461 - DNA, 25 bp, Artificial
  Probe
tgattgaaaagcagctgcagacaga

SEQ ID NO: 306462 - DNA, 25 bp, Artificial
  Probe
tgcaagggctgtaggttctggacct

SEQ ID NO: 306463 - DNA, 25 bp, Artificial
  Probe
ctcccagggcacttagcatctgctg

SEQ ID NO: 306464 - DNA, 25 bp, Artificial
  Probe
agctgcaaaatgttttcctgtgctt

SEQ ID NO: 306465 - DNA, 25 bp, Artificial
  Probe
ttcaggcatagtctatgtaacttac

SEQ ID NO: 306466 - DNA, 25 bp, Artificial
  Probe
gctaactatagctgggtcctcgtcc

SEQ ID NO: 306467 - DNA, 25 bp, Artificial
  Probe
agcggccaagccaggaactcatctc

SEQ ID NO: 306468 - DNA, 25 bp, Artificial
  Probe
cttaaaagagctgttggcagtgaca

SEQ ID NO: 306469 - DNA, 25 bp, Artificial
  Probe
accagagccagaggttttggggtca

SEQ ID NO: 306470 - DNA, 25 bp, Artificial
  Probe
gaacaaatggcctaggtcagaaaca

SEQ ID NO: 306471 - DNA, 25 bp, Artificial
  Probe
tcatggcccagtgcaagggctgtag

SEQ ID NO: 306472 - DNA, 25 bp, Artificial
  Probe
tgctacaagccctggtgtcagcctt

SEQ ID NO: 306473 - DNA, 25 bp, Artificial
  Probe
ggccctcattcatgacttgtccatt

SEQ ID NO: 306474 - DNA, 25 bp, Artificial
  Probe
ttactccagcagctcggcggacaca

SEQ ID NO: 306475 - DNA, 25 bp, Artificial
  Probe
gcagccactgagtacacacggaaca

SEQ ID NO: 306476 - DNA, 25 bp, Artificial
  Probe
tatttgcaactgtgggcaggcagac

SEQ ID NO: 306477 - DNA, 25 bp, Artificial
  Probe
acctgctgccttgcagggctaccag

SEQ ID NO: 306478 - DNA, 25 bp, Artificial
  Probe
aggccacggccagcatgaataccaa

SEQ ID NO: 306479 - DNA, 25 bp, Artificial
  Probe
tctctagctggtagaaaacttcgat

SEQ ID NO: 306480 - DNA, 25 bp, Artificial
  Probe
gagacatgtagatcctgtgaacaca

SEQ ID NO: 306481 - DNA, 25 bp, Artificial
  Probe
accactaacctgctgccttgcaggg

SEQ ID NO: 306482 - DNA, 25 bp, Artificial
  Probe
tcccaggccggctgctggcatgaag

SEQ ID NO: 306483 - DNA, 25 bp, Artificial
  Probe
gcaactgcacaggatagacacctca

SEQ ID NO: 306484 - DNA, 25 bp, Artificial
  Probe
tctgaggcatgtaggccacggccag

SEQ ID NO: 306485 - DNA, 25 bp, Artificial
  Probe
gtccaaagaccctgggagaccatgt

SEQ ID NO: 306486 - DNA, 25 bp, Artificial
  Probe
caggcagacctgagggaatgcttgc

SEQ ID NO: 306487 - DNA, 25 bp, Artificial
  Probe
tctagaaactagctgaggcccgggg

SEQ ID NO: 306488 - DNA, 25 bp, Artificial
  Probe
ggccagacatctgtcctgaatgtct

SEQ ID NO: 306489 - DNA, 25 bp, Artificial
  Probe
atgcttgctgtgattgaaaagcagc

SEQ ID NO: 306490 - DNA, 25 bp, Artificial
  Probe
tgagcagccctggatcccaggccgg

SEQ ID NO: 306491 - DNA, 25 bp, Artificial
  Probe
aagtaggggctccacttctggtaca

SEQ ID NO: 306492 - DNA, 25 bp, Artificial
  Probe
aagagatcggctgatcacaaagtgg

SEQ ID NO: 306493 - DNA, 25 bp, Artificial
  Probe
tgaaagttgtcctatcaaccactag

SEQ ID NO: 306494 - DNA, 25 bp, Artificial
  Probe
aagtatctagaaactagctgaggcc

SEQ ID NO: 306495 - DNA, 25 bp, Artificial
  Probe
atttttccagtgttatttgcaactg

SEQ ID NO: 306496 - DNA, 25 bp, Artificial
  Probe
ggcccgggggccagacatctgtcct

SEQ ID NO: 306497 - DNA, 25 bp, Artificial
  Probe
gaaacacttaaaagagctgttggca

SEQ ID NO: 306498 - DNA, 25 bp, Artificial
  Probe
taatgctaactatagctgggtcctc

SEQ ID NO: 306499 - DNA, 25 bp, Artificial
  Probe
agaggcatcaagttttcctatccaa

SEQ ID NO: 306500 - DNA, 25 bp, Artificial
  Probe
gtacacacggaacattcagaacacc

SEQ ID NO: 306501 - DNA, 25 bp, Artificial
  Probe
gttcagcggccaagccaggaactca

SEQ ID NO: 306502 - DNA, 25 bp, Artificial
  Probe
ctttagtacagcagagaagtatcta

SEQ ID NO: 306503 - DNA, 25 bp, Artificial
  Probe
cacacacacaggataaaagctgcaa

SEQ ID NO: 306504 - DNA, 25 bp, Artificial
  Probe
cacacacacacaggataaaagctgc

SEQ ID NO: 306505 - DNA, 25 bp, Artificial
  Probe
tgtcctaccgggagacagtcagtga

SEQ ID NO: 306506 - DNA, 25 bp, Artificial
  Probe
aggtggtcagatcatccccacagcg

SEQ ID NO: 306507 - DNA, 25 bp, Artificial
  Probe
tgaccctgcatgctgatgccatcca

SEQ ID NO: 306508 - DNA, 25 bp, Artificial
  Probe
tccctgatggcctagcagaggacat

SEQ ID NO: 306509 - DNA, 25 bp, Artificial
  Probe
acattctcaccgacatcaccaaggg

SEQ ID NO: 306510 - DNA, 25 bp, Artificial
  Probe
gtggtcagatcatccccacagcgcg

SEQ ID NO: 306511 - DNA, 25 bp, Artificial
  Probe
tctggggagcacatcattgctggtg

SEQ ID NO: 306512 - DNA, 25 bp, Artificial
  Probe
acctggccgaaaagtatgagtggga

SEQ ID NO: 306513 - DNA, 25 bp, Artificial
  Probe
ggtgctctttgtgaggagaacatgc

SEQ ID NO: 306514 - DNA, 25 bp, Artificial
  Probe
gatctgccttaaggacctggaggag

SEQ ID NO: 306515 - DNA, 25 bp, Artificial
  Probe
caaacaagcacaacaggctgtacat

SEQ ID NO: 306516 - DNA, 25 bp, Artificial
  Probe
ctctttgtgaggagaacatgcgtgg

SEQ ID NO: 306517 - DNA, 25 bp, Artificial
  Probe
gctgatgccatccaccgaggaggtg

SEQ ID NO: 306518 - DNA, 25 bp, Artificial
  Probe
caagtccccaaacaagcacaacagg

SEQ ID NO: 306519 - DNA, 25 bp, Artificial
  Probe
gcgccgctgcctctatgccagtgtg

SEQ ID NO: 306520 - DNA, 25 bp, Artificial
  Probe
tacctgaatgagatcaaggacagtg

SEQ ID NO: 306521 - DNA, 25 bp, Artificial
  Probe
ggacctgatggcactggtcccaaca

SEQ ID NO: 306522 - DNA, 25 bp, Artificial
  Probe
gcgtgcccgttacctggccgaaaag

SEQ ID NO: 306523 - DNA, 25 bp, Artificial
  Probe
cctagcagaggacatcgataagggt

SEQ ID NO: 306524 - DNA, 25 bp, Artificial
  Probe
cctaccgggagacagtcagtgagga

SEQ ID NO: 306525 - DNA, 25 bp, Artificial
  Probe
tgcgatttgatgtccatgatgtgac

SEQ ID NO: 306526 - DNA, 25 bp, Artificial
  Probe
gtgctctgtctttccaagtccccaa

SEQ ID NO: 306527 - DNA, 25 bp, Artificial
  Probe
gctggattccagtgggccactaagg

SEQ ID NO: 306528 - DNA, 25 bp, Artificial
  Probe
acagtcagtgaggagtccaacgtgc

SEQ ID NO: 306529 - DNA, 25 bp, Artificial
  Probe
cgtggtgtgcgatttgatgtccatg

SEQ ID NO: 306530 - DNA, 25 bp, Artificial
  Probe
ggatgttgctgaagcccgcaagatc

SEQ ID NO: 306531 - DNA, 25 bp, Artificial
  Probe
tgcccgccaggagctcaaggcgcgt

SEQ ID NO: 306532 - DNA, 25 bp, Artificial
  Probe
tgccagtgtgctgactgcacagccc

SEQ ID NO: 306533 - DNA, 25 bp, Artificial
  Probe
cccatcaagaaatctgaccctgtcg

SEQ ID NO: 306534 - DNA, 25 bp, Artificial
  Probe
tatctgcccgccaggagctcaaggc

SEQ ID NO: 306535 - DNA, 25 bp, Artificial
  Probe
tgatggcactggtcccaacattctc

SEQ ID NO: 306536 - DNA, 25 bp, Artificial
  Probe
tatgagtgggatgttgctgaagccc

SEQ ID NO: 306537 - DNA, 25 bp, Artificial
  Probe
atgatgtgaccctgcatgctgatgc

SEQ ID NO: 306538 - DNA, 25 bp, Artificial
  Probe
ttgctggtgctggagagctgcacct

SEQ ID NO: 306539 - DNA, 25 bp, Artificial
  Probe
cctcatggagcctatctacctggtg

SEQ ID NO: 306540 - DNA, 25 bp, Artificial
  Probe
acaggctgtacatgaaggccaggcc

SEQ ID NO: 306541 - DNA, 25 bp, Artificial
  Probe
gctgaagcccgcaagatctggtgct

SEQ ID NO: 306542 - DNA, 25 bp, Artificial
  Probe
gtggctggattccagtgggccacta

SEQ ID NO: 306543 - DNA, 25 bp, Artificial
  Probe
ggcgcgtgcccgttacctggccgaa

SEQ ID NO: 306544 - DNA, 25 bp, Artificial
  Probe
agcacatcattgctggtgctggaga

SEQ ID NO: 306545 - DNA, 25 bp, Artificial
  Probe
tgctggagagctgcacctggagatc

SEQ ID NO: 306546 - DNA, 25 bp, Artificial
  Probe
gctcaaggcgcgtgcccgttacctg

SEQ ID NO: 306547 - DNA, 25 bp, Artificial
  Probe
catgctgatgccatccaccgaggag

SEQ ID NO: 306548 - DNA, 25 bp, Artificial
  Probe
gttacctggccgaaaagtatgagtg

SEQ ID NO: 306549 - DNA, 25 bp, Artificial
  Probe
gcgtggtgtgcgatttgatgtccat

SEQ ID NO: 306550 - DNA, 25 bp, Artificial
  Probe
aggagtctggggagcacatcattgc

SEQ ID NO: 306551 - DNA, 25 bp, Artificial
  Probe
aggggcccccatgagacctcagcag

SEQ ID NO: 306552 - DNA, 25 bp, Artificial
  Probe
caaatgcttatatggcacccgaaag

SEQ ID NO: 306553 - DNA, 25 bp, Artificial
  Probe
tttaatgcctctccagcttctgcag

SEQ ID NO: 306554 - DNA, 25 bp, Artificial
  Probe
aattctttataagtgtgactcatcg

SEQ ID NO: 306555 - DNA, 25 bp, Artificial
  Probe
taggaaaattccagagcacgtcctc

SEQ ID NO: 306556 - DNA, 25 bp, Artificial
  Probe
acatggcctgaaggtgaatacacgg

SEQ ID NO: 306557 - DNA, 25 bp, Artificial
  Probe
tcatcgtatatcataggattttacg

SEQ ID NO: 306558 - DNA, 25 bp, Artificial
  Probe
tccaacatgcttgtaaacacaagcg

SEQ ID NO: 306559 - DNA, 25 bp, Artificial
  Probe
ccttacctgggagtcttcaagaagg

SEQ ID NO: 306560 - DNA, 25 bp, Artificial
  Probe
accttacctgggagtcttcaagaag

SEQ ID NO: 306561 - DNA, 25 bp, Artificial
  Probe
ttgttaaaggccttacctatctgtg

SEQ ID NO: 306562 - DNA, 25 bp, Artificial
  Probe
gcctcctggggaacggaacatacat

SEQ ID NO: 306563 - DNA, 25 bp, Artificial
  Probe
ctcggctgaactgagaaagatactg

SEQ ID NO: 306564 - DNA, 25 bp, Artificial
  Probe
atttcaggagagcagtatgggatcc

SEQ ID NO: 306565 - DNA, 25 bp, Artificial
  Probe
caagacatacggtatcgagacaccc

SEQ ID NO: 306566 - DNA, 25 bp, Artificial
  Probe
tcagcaggacactgaccacccagga

SEQ ID NO: 306567 - DNA, 25 bp, Artificial
  Probe
gagccgtttgtacatttcatcactc

SEQ ID NO: 306568 - DNA, 25 bp, Artificial
  Probe
agccaagacgtatgttggaacaaat

SEQ ID NO: 306569 - DNA, 25 bp, Artificial
  Probe
gcacaccagccctgtggtctcagat

SEQ ID NO: 306570 - DNA, 25 bp, Artificial
  Probe
agcttcagaagcagatcatgtctga

SEQ ID NO: 306571 - DNA, 25 bp, Artificial
  Probe
aattctatagccaagacgtatgttg

SEQ ID NO: 306572 - DNA, 25 bp, Artificial
  Probe
tcatgtcccaagtgggaaaatctta

SEQ ID NO: 306573 - DNA, 25 bp, Artificial
  Probe
cttacctatctgtggagtttaaaga

SEQ ID NO: 306574 - DNA, 25 bp, Artificial
  Probe
acccgaaaggatttcaggagagcag

SEQ ID NO: 306575 - DNA, 25 bp, Artificial
  Probe
tgttgtaaagggtcagcctatcagc

SEQ ID NO: 306576 - DNA, 25 bp, Artificial
  Probe
gatgggtcacccattcatcgtgcag

SEQ ID NO: 306577 - DNA, 25 bp, Artificial
  Probe
attgcagtagcagttgttaaaggcc

SEQ ID NO: 306578 - DNA, 25 bp, Artificial
  Probe
gggctggaccatctcagcacaccag

SEQ ID NO: 306579 - DNA, 25 bp, Artificial
  Probe
aacacaagcggacaggtcaagctgt

SEQ ID NO: 306580 - DNA, 25 bp, Artificial
  Probe
agacggagccagcaggggcccccat

SEQ ID NO: 306581 - DNA, 25 bp, Artificial
  Probe
gagagttctcggagccgtttgtaca

SEQ ID NO: 306582 - DNA, 25 bp, Artificial
  Probe
gaagcagcccaaggaaagaccagcg

SEQ ID NO: 306583 - DNA, 25 bp, Artificial
  Probe
aggacactgaccacccaggaccagg

SEQ ID NO: 306584 - DNA, 25 bp, Artificial
  Probe
tacaaagcatatcatgtcccaagtg

SEQ ID NO: 306585 - DNA, 25 bp, Artificial
  Probe
gtgacttcggcgtgagcacccagct

SEQ ID NO: 306586 - DNA, 25 bp, Artificial
  Probe
ccagctggtgaattctatagccaag

SEQ ID NO: 306587 - DNA, 25 bp, Artificial
  Probe
caaggaaagaccagcgcccgaggag

SEQ ID NO: 306588 - DNA, 25 bp, Artificial
  Probe
ggttattctgttagacatcacactg

SEQ ID NO: 306589 - DNA, 25 bp, Artificial
  Probe
aacggaacatacatggcctgaaggt

SEQ ID NO: 306590 - DNA, 25 bp, Artificial
  Probe
atagcttgaagaagtcctcggctga

SEQ ID NO: 306591 - DNA, 25 bp, Artificial
  Probe
tcctcggaagaattgcagtagcagt

SEQ ID NO: 306592 - DNA, 25 bp, Artificial
  Probe
gtacatttcatcactcagtgcatga

SEQ ID NO: 306593 - DNA, 25 bp, Artificial
  Probe
caggtcaagctgtgtgacttcggcg

SEQ ID NO: 306594 - DNA, 25 bp, Artificial
  Probe
cagtgcattgttgatgaggattcgc

SEQ ID NO: 306595 - DNA, 25 bp, Artificial
  Probe
gaatacacgggctggaccatctcag

SEQ ID NO: 306596 - DNA, 25 bp, Artificial
  Probe
cgtgcagttcaatgacggaaacgcc

SEQ ID NO: 306597 - DNA, 25 bp, Artificial
  Probe
gtgacccagcgctgctgtagcactg

SEQ ID NO: 306598 - DNA, 25 bp, Artificial
  Probe
ggctcattatttccaaatgccctgt

SEQ ID NO: 306599 - DNA, 25 bp, Artificial
  Probe
gagaattttacttctcacatggaaa

SEQ ID NO: 306600 - DNA, 25 bp, Artificial
  Probe
cctttgcattttgatgttcacttag

SEQ ID NO: 306601 - DNA, 25 bp, Artificial
  Probe
acttcactggggaacttgacgctgc

SEQ ID NO: 306602 - DNA, 25 bp, Artificial
  Probe
gtaaggggtccaatcccacgcagcg

SEQ ID NO: 306603 - DNA, 25 bp, Artificial
  Probe
ggaaactgcactttttgctaaatcc

SEQ ID NO: 306604 - DNA, 25 bp, Artificial
  Probe
tgccctgcctctgctgccatggaaa

SEQ ID NO: 306605 - DNA, 25 bp, Artificial
  Probe
tacagaggggcctgttctggcagta

SEQ ID NO: 306606 - DNA, 25 bp, Artificial
  Probe
gcctgttctggcagtagttctgtgc

SEQ ID NO: 306607 - DNA, 25 bp, Artificial
  Probe
atgtgctgactttgggcactataca

SEQ ID NO: 306608 - DNA, 25 bp, Artificial
  Probe
agtgtccagccctttaggatgggct

SEQ ID NO: 306609 - DNA, 25 bp, Artificial
  Probe
ctaaaacagccctgtagaagattag

SEQ ID NO: 306610 - DNA, 25 bp, Artificial
  Probe
attatttccaaatgccctgtctggt

SEQ ID NO: 306611 - DNA, 25 bp, Artificial
  Probe
tgtgaatcagggaagccatgctgtc

SEQ ID NO: 306612 - DNA, 25 bp, Artificial
  Probe
tgaagctgaacatgggctcattatt

SEQ ID NO: 306613 - DNA, 25 bp, Artificial
  Probe
gtagttctgtgcaccgcctatacac

SEQ ID NO: 306614 - DNA, 25 bp, Artificial
  Probe
ctgactttgggcactatacagaggg

SEQ ID NO: 306615 - DNA, 25 bp, Artificial
  Probe
ctgtctccaggtatggggtgaagct

SEQ ID NO: 306616 - DNA, 25 bp, Artificial
  Probe
atcagggaagccatgctgtctccag

SEQ ID NO: 306617 - DNA, 25 bp, Artificial
  Probe
ctgaacatgggctcattatttccaa

SEQ ID NO: 306618 - DNA, 25 bp, Artificial
  Probe
tagcactgttgctgccgtggctcgg

SEQ ID NO: 306619 - DNA, 25 bp, Artificial
  Probe
tgctgccatggaaagtgcgaggaaa

SEQ ID NO: 306620 - DNA, 25 bp, Artificial
  Probe
cacttagtgtccagccctttaggat

SEQ ID NO: 306621 - DNA, 25 bp, Artificial
  Probe
cagtctgtcaggaacggttgtagtg

SEQ ID NO: 306622 - DNA, 25 bp, Artificial
  Probe
ttccaaatgccctgtctggtctgct

SEQ ID NO: 306623 - DNA, 25 bp, Artificial
  Probe
cagccctttaggatgggctggccag

SEQ ID NO: 306624 - DNA, 25 bp, Artificial
  Probe
actcaacttcactggggaacttgac

SEQ ID NO: 306625 - DNA, 25 bp, Artificial
  Probe
taaggggtccaatcccacgcagcgc

SEQ ID NO: 306626 - DNA, 25 bp, Artificial
  Probe
attcttgctgtgacccagcgctgct

SEQ ID NO: 306627 - DNA, 25 bp, Artificial
  Probe
ggcactatacagaggggcctgttct

SEQ ID NO: 306628 - DNA, 25 bp, Artificial
  Probe
ttgctaaatcctttgcattttgatg

SEQ ID NO: 306629 - DNA, 25 bp, Artificial
  Probe
tctcacatggaaactgcactttttg

SEQ ID NO: 306630 - DNA, 25 bp, Artificial
  Probe
ttccctttgcggtactgaaaggatt

SEQ ID NO: 306631 - DNA, 25 bp, Artificial
  Probe
ttgctgtgacccagcgctgctgtag

SEQ ID NO: 306632 - DNA, 25 bp, Artificial
  Probe
ggagaattttacttctcacatggaa

SEQ ID NO: 306633 - DNA, 25 bp, Artificial
  Probe
cccctggactcaacttcactgggga

SEQ ID NO: 306634 - DNA, 25 bp, Artificial
  Probe
ggaacttgacgctgcagttgtgaat

SEQ ID NO: 306635 - DNA, 25 bp, Artificial
  Probe
ctgcagttgtgaatcagggaagcca

SEQ ID NO: 306636 - DNA, 25 bp, Artificial
  Probe
cgcccctaaaacagccctgtagaag

SEQ ID NO: 306637 - DNA, 25 bp, Artificial
  Probe
cctttgcggtactgaaaggattgaa

SEQ ID NO: 306638 - DNA, 25 bp, Artificial
  Probe
gctaaatcctttgcattttgatgtt

SEQ ID NO: 306639 - DNA, 25 bp, Artificial
  Probe
cgcctatacacctcagtctgtcagg

SEQ ID NO: 306640 - DNA, 25 bp, Artificial
  Probe
aggtcatggcgctgtcatgctctgg

SEQ ID NO: 306641 - DNA, 25 bp, Artificial
  Probe
aggggcctgttctggcagtagttct

SEQ ID NO: 306642 - DNA, 25 bp, Artificial
  Probe
gcctctgctgccatggaaagtgcga

SEQ ID NO: 306643 - DNA, 25 bp, Artificial
  Probe
ggagccactgactgccttaatccca

SEQ ID NO: 306644 - DNA, 25 bp, Artificial
  Probe
caaggccctgggagccactgactgc

SEQ ID NO: 306645 - DNA, 25 bp, Artificial
  Probe
aggtgtggatttctccctggactgt

SEQ ID NO: 306646 - DNA, 25 bp, Artificial
  Probe
gacaaaatcaacgacgcgattgacc

SEQ ID NO: 306647 - DNA, 25 bp, Artificial
  Probe
atcaacgacgcgattgacctgatga

SEQ ID NO: 306648 - DNA, 25 bp, Artificial
  Probe
gcatccgaacaatcctgaccttttg

SEQ ID NO: 306649 - DNA, 25 bp, Artificial
  Probe
tgagaagttcccaaaagccaaggcc

SEQ ID NO: 306650 - DNA, 25 bp, Artificial
  Probe
cagattggatccaagcttgtccaga

SEQ ID NO: 306651 - DNA, 25 bp, Artificial
  Probe
actggtgacccatgccctacctttt

SEQ ID NO: 306652 - DNA, 25 bp, Artificial
  Probe
acaatcctgaccttttgaagacgcc

SEQ ID NO: 306653 - DNA, 25 bp, Artificial
  Probe
gaagttcccaaaagccaaggccctg

SEQ ID NO: 306654 - DNA, 25 bp, Artificial
  Probe
tgccttaatcccagagacctagaca

SEQ ID NO: 306655 - DNA, 25 bp, Artificial
  Probe
ccacttcccacgatgagccaaggaa

SEQ ID NO: 306656 - DNA, 25 bp, Artificial
  Probe
acttggaatgtcatcagattggatc

SEQ ID NO: 306657 - DNA, 25 bp, Artificial
  Probe
aatcccagagacctagacaaacctg

SEQ ID NO: 306658 - DNA, 25 bp, Artificial
  Probe
accgtggacatgatattgggccgtt

SEQ ID NO: 306659 - DNA, 25 bp, Artificial
  Probe
gcttccagaatcatagctattgaca

SEQ ID NO: 306660 - DNA, 25 bp, Artificial
  Probe
gaatcatagctattgacatcaacag

SEQ ID NO: 306661 - DNA, 25 bp, Artificial
  Probe
cactgtggtcggagcaaaggttgat

SEQ ID NO: 306662 - DNA, 25 bp, Artificial
  Probe
accttttgacaaaatcaacgacgcg

SEQ ID NO: 306663 - DNA, 25 bp, Artificial
  Probe
ctggttactgactacaagaataaga

SEQ ID NO: 306664 - DNA, 25 bp, Artificial
  Probe
acatcaacagtgagaagttcccaaa

SEQ ID NO: 306665 - DNA, 25 bp, Artificial
  Probe
aagccaaggccctgggagccactga

SEQ ID NO: 306666 - DNA, 25 bp, Artificial
  Probe
gcttgtccagatgacttcccacttc

SEQ ID NO: 306667 - DNA, 25 bp, Artificial
  Probe
gtgtagactctgtcccaaacctggt

SEQ ID NO: 306668 - DNA, 25 bp, Artificial
  Probe
tgaagacgccaggaggaacttggaa

SEQ ID NO: 306669 - DNA, 25 bp, Artificial
  Probe
tgactgccttaatcccagagaccta

SEQ ID NO: 306670 - DNA, 25 bp, Artificial
  Probe
gaaattcgatctggacttactggtg

SEQ ID NO: 306671 - DNA, 25 bp, Artificial
  Probe
tgtcatcactgaactgacgggtgga

SEQ ID NO: 306672 - DNA, 25 bp, Artificial
  Probe
atgaatatatccaccgtggacatga

SEQ ID NO: 306673 - DNA, 25 bp, Artificial
  Probe
tggatttctccctggactgtgcagg

SEQ ID NO: 306674 - DNA, 25 bp, Artificial
  Probe
aaagtgtagactctgtcccaaacct

SEQ ID NO: 306675 - DNA, 25 bp, Artificial
  Probe
acgccaggaggaacttggaatgtca

SEQ ID NO: 306676 - DNA, 25 bp, Artificial
  Probe
gaaatgaatatatccaccgtggaca

SEQ ID NO: 306677 - DNA, 25 bp, Artificial
  Probe
tggactgtgcaggaacagctcagac

SEQ ID NO: 306678 - DNA, 25 bp, Artificial
  Probe
ttggatccaagcttgtccagatgac

SEQ ID NO: 306679 - DNA, 25 bp, Artificial
  Probe
gccttaatcccagagacctagacaa

SEQ ID NO: 306680 - DNA, 25 bp, Artificial
  Probe
aagcagctgtagactgcaccgtcgt

SEQ ID NO: 306681 - DNA, 25 bp, Artificial
  Probe
tgacctgatgaaccaaggaaaaagc

SEQ ID NO: 306682 - DNA, 25 bp, Artificial
  Probe
tcccaaaagccaaggccctgggagc

SEQ ID NO: 306683 - DNA, 25 bp, Artificial
  Probe
gccctgggagccactgactgcctta

SEQ ID NO: 306684 - DNA, 25 bp, Artificial
  Probe
tactggtgacccatgccctaccttt

SEQ ID NO: 306685 - DNA, 25 bp, Artificial
  Probe
ttcccaaaagccaaggccctgggag

SEQ ID NO: 306686 - DNA, 25 bp, Artificial
  Probe
gaccttttgaagacgccaggaggaa

SEQ ID NO: 306687 - DNA, 25 bp, Artificial
  Probe
ccgaacaatcctgaccttttgaaga

SEQ ID NO: 306688 - DNA, 25 bp, Artificial
  Probe
tatatccaccgtggacatgatattg

SEQ ID NO: 306689 - DNA, 25 bp, Artificial
  Probe
aaggccaagtggactgactcctagc

SEQ ID NO: 306690 - DNA, 25 bp, Artificial
  Probe
tcccaagtggtgacaaccaggtgga

SEQ ID NO: 306691 - DNA, 25 bp, Artificial
  Probe
tggtgacaaccaggtggatgccaag

SEQ ID NO: 306692 - DNA, 25 bp, Artificial
  Probe
acaaccaggtggatgccaaggaagg

SEQ ID NO: 306693 - DNA, 25 bp, Artificial
  Probe
cagtctcccaagtggtgacaaccag

SEQ ID NO: 306694 - DNA, 25 bp, Artificial
  Probe
ccaggccttgggactagccagtctc

SEQ ID NO: 306695 - DNA, 25 bp, Artificial
  Probe
gaaggccaagtggactgactcctag

SEQ ID NO: 306696 - DNA, 25 bp, Artificial
  Probe
ctcccaagtggtgacaaccaggtgg

SEQ ID NO: 306697 - DNA, 25 bp, Artificial
  Probe
gccagtctcccaagtggtgacaacc

SEQ ID NO: 306698 - DNA, 25 bp, Artificial
  Probe
aagtggactgactcctagcttttct

SEQ ID NO: 306699 - DNA, 25 bp, Artificial
  Probe
gtgacaaccaggtggatgccaagga

SEQ ID NO: 306700 - DNA, 25 bp, Artificial
  Probe
gggactagccagtctcccaagtggt

SEQ ID NO: 306701 - DNA, 25 bp, Artificial
  Probe
ccaagtggtgacaaccaggtggatg

SEQ ID NO: 306702 - DNA, 25 bp, Artificial
  Probe
caggccttgggactagccagtctcc

SEQ ID NO: 306703 - DNA, 25 bp, Artificial
  Probe
ggccttgggactagccagtctccca

SEQ ID NO: 306704 - DNA, 25 bp, Artificial
  Probe
agtggactgactcctagcttttctt

SEQ ID NO: 306705 - DNA, 25 bp, Artificial
  Probe
gacaaccaggtggatgccaaggaag

SEQ ID NO: 306706 - DNA, 25 bp, Artificial
  Probe
caagtggtgacaaccaggtggatgc

SEQ ID NO: 306707 - DNA, 25 bp, Artificial
  Probe
ggactagccagtctcccaagtggtg

SEQ ID NO: 306708 - DNA, 25 bp, Artificial
  Probe
tgacaaccaggtggatgccaaggaa

SEQ ID NO: 306709 - DNA, 25 bp, Artificial
  Probe
agccagtctcccaagtggtgacaac

SEQ ID NO: 306710 - DNA, 25 bp, Artificial
  Probe
aggccaagtggactgactcctagct

SEQ ID NO: 306711 - DNA, 25 bp, Artificial
  Probe
aagtggtgacaaccaggtggatgcc

SEQ ID NO: 306712 - DNA, 25 bp, Artificial
  Probe
cccaagtggtgacaaccaggtggat

SEQ ID NO: 306713 - DNA, 25 bp, Artificial
  Probe
tctcccaagtggtgacaaccaggtg

SEQ ID NO: 306714 - DNA, 25 bp, Artificial
  Probe
ccaggcagggtatgacccgtcacag

SEQ ID NO: 306715 - DNA, 25 bp, Artificial
  Probe
ctccaggcagggtatgacccgtcac

SEQ ID NO: 306716 - DNA, 25 bp, Artificial
  Probe
caagtggactgactcctagcttttc

SEQ ID NO: 306717 - DNA, 25 bp, Artificial
  Probe
gtggtgacaaccaggtggatgccaa

SEQ ID NO: 306718 - DNA, 25 bp, Artificial
  Probe
tccaggcagggtatgacccgtcaca

SEQ ID NO: 306719 - DNA, 25 bp, Artificial
  Probe
aggcctccaggcagggtatgacccg

SEQ ID NO: 306720 - DNA, 25 bp, Artificial
  Probe
agtctcccaagtggtgacaaccagg

SEQ ID NO: 306721 - DNA, 25 bp, Artificial
  Probe
aggccttgggactagccagtctccc

SEQ ID NO: 306722 - DNA, 25 bp, Artificial
  Probe
gtctcccaagtggtgacaaccaggt

SEQ ID NO: 306723 - DNA, 25 bp, Artificial
  Probe
agtggtgacaaccaggtggatgcca

SEQ ID NO: 306724 - DNA, 25 bp, Artificial
  Probe
ttgggactagccagtctcccaagtg

SEQ ID NO: 306725 - DNA, 25 bp, Artificial
  Probe
ggtgacaaccaggtggatgccaagg

SEQ ID NO: 306726 - DNA, 25 bp, Artificial
  Probe
ggccaagtggactgactcctagctt

SEQ ID NO: 306727 - DNA, 25 bp, Artificial
  Probe
gactagccagtctcccaagtggtga

SEQ ID NO: 306728 - DNA, 25 bp, Artificial
  Probe
tgggactagccagtctcccaagtgg

SEQ ID NO: 306729 - DNA, 25 bp, Artificial
  Probe
aggcagggtatgacccgtcacagcc

SEQ ID NO: 306730 - DNA, 25 bp, Artificial
  Probe
aaggaaggccaagtggactgactcc

SEQ ID NO: 306731 - DNA, 25 bp, Artificial
  Probe
ccagtctcccaagtggtgacaacca

SEQ ID NO: 306732 - DNA, 25 bp, Artificial
  Probe
ccaagtggactgactcctagctttt

SEQ ID NO: 306733 - DNA, 25 bp, Artificial
  Probe
gccaagtggactgactcctagcttt

SEQ ID NO: 306734 - DNA, 25 bp, Artificial
  Probe
caaccaggtggatgccaaggaaggc

SEQ ID NO: 306735 - DNA, 25 bp, Artificial
  Probe
acaactgtggagactaaggaaccag

SEQ ID NO: 306736 - DNA, 25 bp, Artificial
  Probe
tcagagtgatctgtatccttagcca

SEQ ID NO: 306737 - DNA, 25 bp, Artificial
  Probe
gcatcagcgacctctttgtacctaa

SEQ ID NO: 306738 - DNA, 25 bp, Artificial
  Probe
accagctttggagctcttggaacca

SEQ ID NO: 306739 - DNA, 25 bp, Artificial
  Probe
gacctctttgtacctaaagatttgg

SEQ ID NO: 306740 - DNA, 25 bp, Artificial
  Probe
aggagagattgctcgctgtaagcag

SEQ ID NO: 306741 - DNA, 25 bp, Artificial
  Probe
ccacagaaccaagtcaaccgcaagt

SEQ ID NO: 306742 - DNA, 25 bp, Artificial
  Probe
tgtgatcccagctatgtcaaggatc

SEQ ID NO: 306743 - DNA, 25 bp, Artificial
  Probe
tttgtcagcatcagcgacctctttg

SEQ ID NO: 306744 - DNA, 25 bp, Artificial
  Probe
agagtgatctgtatccttagccacc

SEQ ID NO: 306745 - DNA, 25 bp, Artificial
  Probe
atcagcgacctctttgtacctaaag

SEQ ID NO: 306746 - DNA, 25 bp, Artificial
  Probe
atagtcagatctttatttcccgtgc

SEQ ID NO: 306747 - DNA, 25 bp, Artificial
  Probe
atttcccgtgcctatgatgctacca

SEQ ID NO: 306748 - DNA, 25 bp, Artificial
  Probe
taggccaggtaatcagagtgatctg

SEQ ID NO: 306749 - DNA, 25 bp, Artificial
  Probe
aaggagagattgctcgctgtaagca

SEQ ID NO: 306750 - DNA, 25 bp, Artificial
  Probe
gattgctcgctgtaagcagctcatc

SEQ ID NO: 306751 - DNA, 25 bp, Artificial
  Probe
cagctatgtcaaggatcgggttgaa

SEQ ID NO: 306752 - DNA, 25 bp, Artificial
  Probe
tccacagaaccaagtcaaccgcaag

SEQ ID NO: 306753 - DNA, 25 bp, Artificial
  Probe
gaaagaaatcagaccagctttggag

SEQ ID NO: 306754 - DNA, 25 bp, Artificial
  Probe
ccagctatgtcaaggatcgggttga

SEQ ID NO: 306755 - DNA, 25 bp, Artificial
  Probe
aaatttgtcagcatcagcgacctct

SEQ ID NO: 306756 - DNA, 25 bp, Artificial
  Probe
acagaaccaagtcaaccgcaagtca

SEQ ID NO: 306757 - DNA, 25 bp, Artificial
  Probe
ggtacctacatgttgaataagccaa

SEQ ID NO: 306758 - DNA, 25 bp, Artificial
  Probe
gaaatcagaccagctttggagctct

SEQ ID NO: 306759 - DNA, 25 bp, Artificial
  Probe
cagatctttatttcccgtgcctatg

SEQ ID NO: 306760 - DNA, 25 bp, Artificial
  Probe
ggaggtacctacatgttgaataagc

SEQ ID NO: 306761 - DNA, 25 bp, Artificial
  Probe
attgctcgctgtaagcagctcatct

SEQ ID NO: 306762 - DNA, 25 bp, Artificial
  Probe
gtacctacatgttgaataagccaat

SEQ ID NO: 306763 - DNA, 25 bp, Artificial
  Probe
aatttgtcagcatcagcgacctctt

SEQ ID NO: 306764 - DNA, 25 bp, Artificial
  Probe
aatcagaccagctttggagctcttg

SEQ ID NO: 306765 - DNA, 25 bp, Artificial
  Probe
agcgacctctttgtacctaaagatt

SEQ ID NO: 306766 - DNA, 25 bp, Artificial
  Probe
tcagcatcagcgacctctttgtacc

SEQ ID NO: 306767 - DNA, 25 bp, Artificial
  Probe
cagcatcagcgacctctttgtacct

SEQ ID NO: 306768 - DNA, 25 bp, Artificial
  Probe
gcgacctctttgtacctaaagattt

SEQ ID NO: 306769 - DNA, 25 bp, Artificial
  Probe
gtcagatctttatttcccgtgccta

SEQ ID NO: 306770 - DNA, 25 bp, Artificial
  Probe
gagtgatctgtatccttagccaccc

SEQ ID NO: 306771 - DNA, 25 bp, Artificial
  Probe
agactaacagcagtacatattatgt

SEQ ID NO: 306772 - DNA, 25 bp, Artificial
  Probe
atctgtgatcccagctatgtcaagg

SEQ ID NO: 306773 - DNA, 25 bp, Artificial
  Probe
gagattgctcgctgtaagcagctca

SEQ ID NO: 306774 - DNA, 25 bp, Artificial
  Probe
ctttatttcccgtgcctatgatgct

SEQ ID NO: 306775 - DNA, 25 bp, Artificial
  Probe
agtaggccaggtaatcagagtgatc

SEQ ID NO: 306776 - DNA, 25 bp, Artificial
  Probe
aagactaacagcagtacatattatg

SEQ ID NO: 306777 - DNA, 25 bp, Artificial
  Probe
gtgatcccagctatgtcaaggatcg

SEQ ID NO: 306778 - DNA, 25 bp, Artificial
  Probe
cccagctatgtcaaggatcgggttg

SEQ ID NO: 306779 - DNA, 25 bp, Artificial
  Probe
cagaccagctttggagctcttggaa

SEQ ID NO: 306780 - DNA, 25 bp, Artificial
  Probe
atttgtcagcatcagcgacctcttt

SEQ ID NO: 306781 - DNA, 25 bp, Artificial
  Probe
actgtacagtttgcagaatatatcc

SEQ ID NO: 306782 - DNA, 25 bp, Artificial
  Probe
cttactcctatgtgttggagaggct

SEQ ID NO: 306783 - DNA, 25 bp, Artificial
  Probe
tgtgtgtgtaccttgcagcctcccg

SEQ ID NO: 306784 - DNA, 25 bp, Artificial
  Probe
tatgacgagcatgaggggccagcac

SEQ ID NO: 306785 - DNA, 25 bp, Artificial
  Probe
ggaagtccccgtgtgtgtgtacctt

SEQ ID NO: 306786 - DNA, 25 bp, Artificial
  Probe
actcctatgtgttggagaggctgga

SEQ ID NO: 306787 - DNA, 25 bp, Artificial
  Probe
ccgtgtgtgtgtaccttgcagcctc

SEQ ID NO: 306788 - DNA, 25 bp, Artificial
  Probe
tatccagaaaaacgtgcagctttat

SEQ ID NO: 306789 - DNA, 25 bp, Artificial
  Probe
cgtgtgtgtgtaccttgcagcctcc

SEQ ID NO: 306790 - DNA, 25 bp, Artificial
  Probe
ctatgacgagcatgaggggccagca

SEQ ID NO: 306791 - DNA, 25 bp, Artificial
  Probe
cctggctggctatgacgagcatgag

SEQ ID NO: 306792 - DNA, 25 bp, Artificial
  Probe
tactcctatgtgttggagaggctgg

SEQ ID NO: 306793 - DNA, 25 bp, Artificial
  Probe
tcttactcctatgtgttggagaggc

SEQ ID NO: 306794 - DNA, 25 bp, Artificial
  Probe
tccagaaaaacgtgcagctttataa

SEQ ID NO: 306795 - DNA, 25 bp, Artificial
  Probe
gcatgaggggccagcactttactac

SEQ ID NO: 306796 - DNA, 25 bp, Artificial
  Probe
gaatatatccagaaaaacgtgcagc

SEQ ID NO: 306797 - DNA, 25 bp, Artificial
  Probe
aagtccccgtgtgtgtgtaccttgc

SEQ ID NO: 306798 - DNA, 25 bp, Artificial
  Probe
gaagtccccgtgtgtgtgtaccttg

SEQ ID NO: 306799 - DNA, 25 bp, Artificial
  Probe
atgaggggccagcactttactacat

SEQ ID NO: 306800 - DNA, 25 bp, Artificial
  Probe
tcctggctggctatgacgagcatga

SEQ ID NO: 306801 - DNA, 25 bp, Artificial
  Probe
atatccagaaaaacgtgcagcttta

SEQ ID NO: 306802 - DNA, 25 bp, Artificial
  Probe
aggggccagcactttactacatgga

SEQ ID NO: 306803 - DNA, 25 bp, Artificial
  Probe
ccccgtgtgtgtgtaccttgcagcc

SEQ ID NO: 306804 - DNA, 25 bp, Artificial
  Probe
cccgtgtgtgtgtaccttgcagcct

SEQ ID NO: 306805 - DNA, 25 bp, Artificial
  Probe
ctcctggctggctatgacgagcatg

SEQ ID NO: 306806 - DNA, 25 bp, Artificial
  Probe
aatcttactcctatgtgttggagag

SEQ ID NO: 306807 - DNA, 25 bp, Artificial
  Probe
cactgtacagtttgcagaatatatc

SEQ ID NO: 306808 - DNA, 25 bp, Artificial
  Probe
gaggggccagcactttactacatgg

SEQ ID NO: 306809 - DNA, 25 bp, Artificial
  Probe
catgaggggccagcactttactaca

SEQ ID NO: 306810 - DNA, 25 bp, Artificial
  Probe
atccagaaaaacgtgcagctttata

SEQ ID NO: 306811 - DNA, 25 bp, Artificial
  Probe
atgacgagcatgaggggccagcact

SEQ ID NO: 306812 - DNA, 25 bp, Artificial
  Probe
gtgtgtgtgtaccttgcagcctccc

SEQ ID NO: 306813 - DNA, 25 bp, Artificial
  Probe
tgaggggccagcactttactacatg

SEQ ID NO: 306814 - DNA, 25 bp, Artificial
  Probe
aatatatccagaaaaacgtgcagct

SEQ ID NO: 306815 - DNA, 25 bp, Artificial
  Probe
tccccgtgtgtgtgtaccttgcagc

SEQ ID NO: 306816 - DNA, 25 bp, Artificial
  Probe
gggaagtccccgtgtgtgtgtacct

SEQ ID NO: 306817 - DNA, 25 bp, Artificial
  Probe
atatatccagaaaaacgtgcagctt

SEQ ID NO: 306818 - DNA, 25 bp, Artificial
  Probe
agtccccgtgtgtgtgtaccttgca

SEQ ID NO: 306819 - DNA, 25 bp, Artificial
  Probe
aatattgtccagatgaaggacgatc

SEQ ID NO: 306820 - DNA, 25 bp, Artificial
  Probe
caatattgtccagatgaaggacgat

SEQ ID NO: 306821 - DNA, 25 bp, Artificial
  Probe
tatatccagaaaaacgtgcagcttt

SEQ ID NO: 306822 - DNA, 25 bp, Artificial
  Probe
acactgtacagtttgcagaatatat

SEQ ID NO: 306823 - DNA, 25 bp, Artificial
  Probe
ccagaaaaacgtgcagctttataaa

SEQ ID NO: 306824 - DNA, 25 bp, Artificial
  Probe
atattgtccagatgaaggacgatca

SEQ ID NO: 306825 - DNA, 25 bp, Artificial
  Probe
aaatcttactcctatgtgttggaga

SEQ ID NO: 306826 - DNA, 25 bp, Artificial
  Probe
atcttactcctatgtgttggagagg

SEQ ID NO: 306827 - DNA, 25 bp, Artificial
  Probe
ctttgtccccatcagggagagccca

SEQ ID NO: 306828 - DNA, 25 bp, Artificial
  Probe
cccatcagggagagcccaatacaga

SEQ ID NO: 306829 - DNA, 25 bp, Artificial
  Probe
ttgcccagcgtctcaagttccgact

SEQ ID NO: 306830 - DNA, 25 bp, Artificial
  Probe
actttgtccccatcagggagagccc

SEQ ID NO: 306831 - DNA, 25 bp, Artificial
  Probe
ccccatcagggagagcccaatacag

SEQ ID NO: 306832 - DNA, 25 bp, Artificial
  Probe
acctgtcattgctggcttggacccg

SEQ ID NO: 306833 - DNA, 25 bp, Artificial
  Probe
agagcccaatacagagcgactttat

SEQ ID NO: 306834 - DNA, 25 bp, Artificial
  Probe
acctcattggctgtccatggtgaca

SEQ ID NO: 306835 - DNA, 25 bp, Artificial
  Probe
acagaacctgtcattgctggcttgg

SEQ ID NO: 306836 - DNA, 25 bp, Artificial
  Probe
gtcattgctggcttggacccgaaga

SEQ ID NO: 306837 - DNA, 25 bp, Artificial
  Probe
tccccatcagggagagcccaataca

SEQ ID NO: 306838 - DNA, 25 bp, Artificial
  Probe
gagcccaatacagagcgactttatc

SEQ ID NO: 306839 - DNA, 25 bp, Artificial
  Probe
tacacagaacctgtcattgctggct

SEQ ID NO: 306840 - DNA, 25 bp, Artificial
  Probe
attgctggcttggacccgaagacct

SEQ ID NO: 306841 - DNA, 25 bp, Artificial
  Probe
tctcaagttccgactgaacctgtac

SEQ ID NO: 306842 - DNA, 25 bp, Artificial
  Probe
cagcgtctcaagttccgactgaacc

SEQ ID NO: 306843 - DNA, 25 bp, Artificial
  Probe
agggagagcccaatacagagcgact

SEQ ID NO: 306844 - DNA, 25 bp, Artificial
  Probe
gcccagcgtctcaagttccgactga

SEQ ID NO: 306845 - DNA, 25 bp, Artificial
  Probe
cacagaacctgtcattgctggcttg

SEQ ID NO: 306846 - DNA, 25 bp, Artificial
  Probe
aacctgtcattgctggcttggaccc

SEQ ID NO: 306847 - DNA, 25 bp, Artificial
  Probe
cgaagacctttaagcccttcatttg

SEQ ID NO: 306848 - DNA, 25 bp, Artificial
  Probe
tcattgctggcttggacccgaagac

SEQ ID NO: 306849 - DNA, 25 bp, Artificial
  Probe
agcccaatacagagcgactttatct

SEQ ID NO: 306850 - DNA, 25 bp, Artificial
  Probe
ttgctggcttggacccgaagacctt

SEQ ID NO: 306851 - DNA, 25 bp, Artificial
  Probe
cagggagagcccaatacagagcgac

SEQ ID NO: 306852 - DNA, 25 bp, Artificial
  Probe
gttgcccagcgtctcaagttccgac

SEQ ID NO: 306853 - DNA, 25 bp, Artificial
  Probe
gagagcccaatacagagcgacttta

SEQ ID NO: 306854 - DNA, 25 bp, Artificial
  Probe
tttgtccccatcagggagagcccaa

SEQ ID NO: 306855 - DNA, 25 bp, Artificial
  Probe
acacagaacctgtcattgctggctt

SEQ ID NO: 306856 - DNA, 25 bp, Artificial
  Probe
ccagcgtctcaagttccgactgaac

SEQ ID NO: 306857 - DNA, 25 bp, Artificial
  Probe
agttgcccagcgtctcaagttccga

SEQ ID NO: 306858 - DNA, 25 bp, Artificial
  Probe
gacctcattggctgtccatggtgac

SEQ ID NO: 306859 - DNA, 25 bp, Artificial
  Probe
tgcccagcgtctcaagttccgactg

SEQ ID NO: 306860 - DNA, 25 bp, Artificial
  Probe
cccagcgtctcaagttccgactgaa

SEQ ID NO: 306861 - DNA, 25 bp, Artificial
  Probe
cattgctggcttggacccgaagacc

SEQ ID NO: 306862 - DNA, 25 bp, Artificial
  Probe
ggagagcccaatacagagcgacttt

SEQ ID NO: 306863 - DNA, 25 bp, Artificial
  Probe
atgccatgggtcgagaatccagctt

SEQ ID NO: 306864 - DNA, 25 bp, Artificial
  Probe
gtcgagaatccagcttctttcccaa

SEQ ID NO: 306865 - DNA, 25 bp, Artificial
  Probe
caacttgaaggtacaggagatgctg

SEQ ID NO: 306866 - DNA, 25 bp, Artificial
  Probe
ttcgactctttagaactaagacctg

SEQ ID NO: 306867 - DNA, 25 bp, Artificial
  Probe
acgcacttccggtacttgggctttg

SEQ ID NO: 306868 - DNA, 25 bp, Artificial
  Probe
agtcacacggggagatgtctcactg

SEQ ID NO: 306869 - DNA, 25 bp, Artificial
  Probe
ctgtgaccttgcagaggtatattgt

SEQ ID NO: 306870 - DNA, 25 bp, Artificial
  Probe
acttccggtacttgggctttggctg

SEQ ID NO: 306871 - DNA, 25 bp, Artificial
  Probe
ccaggcccagggagacatggccaag

SEQ ID NO: 306872 - DNA, 25 bp, Artificial
  Probe
accccatctctgtgaccttgcagag

SEQ ID NO: 306873 - DNA, 25 bp, Artificial
  Probe
tgaagttctagctgcccggcgccag

SEQ ID NO: 306874 - DNA, 25 bp, Artificial
  Probe
ggacttaaggcagaagcgagacttc

SEQ ID NO: 306875 - DNA, 25 bp, Artificial
  Probe
atatctccagaaacagcactctgtg

SEQ ID NO: 306876 - DNA, 25 bp, Artificial
  Probe
caaacaagtttgacccaactcgttg

SEQ ID NO: 306877 - DNA, 25 bp, Artificial
  Probe
cagcctctcaagcaggacctgggct

SEQ ID NO: 306878 - DNA, 25 bp, Artificial
  Probe
tagcctcctgggaggcaacaagctg

SEQ ID NO: 306879 - DNA, 25 bp, Artificial
  Probe
ttatgaaatggcacacaacttgaag

SEQ ID NO: 306880 - DNA, 25 bp, Artificial
  Probe
acatcacagagatgctggcaggagg

SEQ ID NO: 306881 - DNA, 25 bp, Artificial
  Probe
accagtgttcccatgctcaacatgc

SEQ ID NO: 306882 - DNA, 25 bp, Artificial
  Probe
ggacttcatcaaagtcttacacaga

SEQ ID NO: 306883 - DNA, 25 bp, Artificial
  Probe
aaagctgatgaatacacccagaact

SEQ ID NO: 306884 - DNA, 25 bp, Artificial
  Probe
ttttcagtaaagctgatgaatacac

SEQ ID NO: 306885 - DNA, 25 bp, Artificial
  Probe
caagatggtccagttggtcccactc

SEQ ID NO: 306886 - DNA, 25 bp, Artificial
  Probe
ctttctacttactcaggaggttaat

SEQ ID NO: 306887 - DNA, 25 bp, Artificial
  Probe
gagatgtctcactggggcatttgag

SEQ ID NO: 306888 - DNA, 25 bp, Artificial
  Probe
atggaacctttatgaaatggcacac

SEQ ID NO: 306889 - DNA, 25 bp, Artificial
  Probe
tcaaagtatccgtgatgtggggacc

SEQ ID NO: 306890 - DNA, 25 bp, Artificial
  Probe
gtatccgtgatgtggggaccaagtt

SEQ ID NO: 306891 - DNA, 25 bp, Artificial
  Probe
gatgctgcgggctgaagttctagct

SEQ ID NO: 306892 - DNA, 25 bp, Artificial
  Probe
agcggttcatcgacgccgtctacca

SEQ ID NO: 306893 - DNA, 25 bp, Artificial
  Probe
tgcccttcaagaacatccaggccaa

SEQ ID NO: 306894 - DNA, 25 bp, Artificial
  Probe
gaggagatcgtggaccctgagtccc

SEQ ID NO: 306895 - DNA, 25 bp, Artificial
  Probe
tacctgtccacgttagctgggccct

SEQ ID NO: 306896 - DNA, 25 bp, Artificial
  Probe
caagtttgacccaactcgttggttg

SEQ ID NO: 306897 - DNA, 25 bp, Artificial
  Probe
attgcaggctgcagtcacacgggga

SEQ ID NO: 306898 - DNA, 25 bp, Artificial
  Probe
ctgcctgggatgtgattttcagtaa

SEQ ID NO: 306899 - DNA, 25 bp, Artificial
  Probe
tggggaccaagttcaacctcatcct

SEQ ID NO: 306900 - DNA, 25 bp, Artificial
  Probe
gacctattccgctttgcctttgagt

SEQ ID NO: 306901 - DNA, 25 bp, Artificial
  Probe
aacatccaggccaacatcacagaga

SEQ ID NO: 306902 - DNA, 25 bp, Artificial
  Probe
cagaagcgagacttcagcaagtacc

SEQ ID NO: 306903 - DNA, 25 bp, Artificial
  Probe
agtgttcccatgctcaacatgcctc

SEQ ID NO: 306904 - DNA, 25 bp, Artificial
  Probe
caaagtcttacacagacgcatcaag

SEQ ID NO: 306905 - DNA, 25 bp, Artificial
  Probe
gcctgagaagcctatcttcttcaac

SEQ ID NO: 306906 - DNA, 25 bp, Artificial
  Probe
accctgagtcccagcggttcatcga

SEQ ID NO: 306907 - DNA, 25 bp, Artificial
  Probe
ccagaaaaggcgacactgtatgaat

SEQ ID NO: 306908 - DNA, 25 bp, Artificial
  Probe
gggtggacacgacctccatgactct

SEQ ID NO: 306909 - DNA, 25 bp, Artificial
  Probe
gaatgtcacgtctaccgtctcctct

SEQ ID NO: 306910 - DNA, 25 bp, Artificial
  Probe
aaccatatggctcgtggcggagatg

SEQ ID NO: 306911 - DNA, 25 bp, Artificial
  Probe
tcgtgtcagagatcatgatgtacgt

SEQ ID NO: 306912 - DNA, 25 bp, Artificial
  Probe
tccaggtggctgaatagcgctggct

SEQ ID NO: 306913 - DNA, 25 bp, Artificial
  Probe
attctgagaccgaggcagtgtatgg

SEQ ID NO: 306914 - DNA, 25 bp, Artificial
  Probe
aatgtcacctacaaccactctggcg

SEQ ID NO: 306915 - DNA, 25 bp, Artificial
  Probe
caccgccgagaccttcacggagtgg

SEQ ID NO: 306916 - DNA, 25 bp, Artificial
  Probe
ccgaggcagtgtatgggatgacctt

SEQ ID NO: 306917 - DNA, 25 bp, Artificial
  Probe
cgccatgcatgatgggtgaagcaat

SEQ ID NO: 306918 - DNA, 25 bp, Artificial
  Probe
cgtcgtcaagaagatccacctggag

SEQ ID NO: 306919 - DNA, 25 bp, Artificial
  Probe
ggcgcggtgctggtatcctcagcct

SEQ ID NO: 306920 - DNA, 25 bp, Artificial
  Probe
ctacgctatgagaatgaggtgctgc

SEQ ID NO: 306921 - DNA, 25 bp, Artificial
  Probe
gctgaatagcgctggctctgggctc

SEQ ID NO: 306922 - DNA, 25 bp, Artificial
  Probe
ttgataattacgagcacaacaccag

SEQ ID NO: 306923 - DNA, 25 bp, Artificial
  Probe
acaggcgtccaggtggctgaatagc

SEQ ID NO: 306924 - DNA, 25 bp, Artificial
  Probe
caagagaatgcctcggaatacctgg

SEQ ID NO: 306925 - DNA, 25 bp, Artificial
  Probe
ctacaaccactctggcgactacgaa

SEQ ID NO: 306926 - DNA, 25 bp, Artificial
  Probe
acaacaccagcgtcgtcaagaagat

SEQ ID NO: 306927 - DNA, 25 bp, Artificial
  Probe
ccatggggacgctgctggctctcgt

SEQ ID NO: 306928 - DNA, 25 bp, Artificial
  Probe
cgccagaagggcacagaggaatttg

SEQ ID NO: 306929 - DNA, 25 bp, Artificial
  Probe
acggagtggaccttccgccagaagg

SEQ ID NO: 306930 - DNA, 25 bp, Artificial
  Probe
cagagatatggcatccatcgtgtca

SEQ ID NO: 306931 - DNA, 25 bp, Artificial
  Probe
gtggacaaggccaacagagatatgg

SEQ ID NO: 306932 - DNA, 25 bp, Artificial
  Probe
acttccgagagcaaagagaactgta

SEQ ID NO: 306933 - DNA, 25 bp, Artificial
  Probe
caccgccatgcatgatgggtgaagc

SEQ ID NO: 306934 - DNA, 25 bp, Artificial
  Probe
actgtacaggcgtccaggtggctga

SEQ ID NO: 306935 - DNA, 25 bp, Artificial
  Probe
accgaggcagtgtatgggatgacct

SEQ ID NO: 306936 - DNA, 25 bp, Artificial
  Probe
caaggccaacagagatatggcatcc

SEQ ID NO: 306937 - DNA, 25 bp, Artificial
  Probe
ggaccttccgccagaagggcacaga

SEQ ID NO: 306938 - DNA, 25 bp, Artificial
  Probe
atagcgctggctctgggctccgcct

SEQ ID NO: 306939 - DNA, 25 bp, Artificial
  Probe
gctgccacggaagctgctgcacaag

SEQ ID NO: 306940 - DNA, 25 bp, Artificial
  Probe
agatcatgatgtacgtgctcattgt

SEQ ID NO: 306941 - DNA, 25 bp, Artificial
  Probe
aaatcctgtgtatctcctgtaagcg

SEQ ID NO: 306942 - DNA, 25 bp, Artificial
  Probe
acctgcaggacctgtccatcttcat

SEQ ID NO: 306943 - DNA, 25 bp, Artificial
  Probe
ccaggtggctgaatagcgctggctc

SEQ ID NO: 306944 - DNA, 25 bp, Artificial
  Probe
tgcaggacctgtccatcttcatcac

SEQ ID NO: 306945 - DNA, 25 bp, Artificial
  Probe
gtaagcgtcgtagtgagaccaccgc

SEQ ID NO: 306946 - DNA, 25 bp, Artificial
  Probe
attgctgctgccacggaagctgctg

SEQ ID NO: 306947 - DNA, 25 bp, Artificial
  Probe
gaatttgtcaagatcctacgctatg

SEQ ID NO: 306948 - DNA, 25 bp, Artificial
  Probe
cgcggtgctggtatcctcagcctgg

SEQ ID NO: 306949 - DNA, 25 bp, Artificial
  Probe
gatgaccttcaaaatcctgtgtatc

SEQ ID NO: 306950 - DNA, 25 bp, Artificial
  Probe
tggtgtactgctacaagaagattgc

SEQ ID NO: 306951 - DNA, 25 bp, Artificial
  Probe
tgtatgggatgaccttcaaaatcct

SEQ ID NO: 306952 - DNA, 25 bp, Artificial
  Probe
ctcctgtaagcgtcgtagtgagacc

SEQ ID NO: 306953 - DNA, 25 bp, Artificial
  Probe
ccaccctgcttttgctgcctgtttg

SEQ ID NO: 306954 - DNA, 25 bp, Artificial
  Probe
ctacaagaagattgctgctgccacg

SEQ ID NO: 306955 - DNA, 25 bp, Artificial
  Probe
ctctcatggtgaactggaggagaag

SEQ ID NO: 306956 - DNA, 25 bp, Artificial
  Probe
caaactcctggaggaacagccctct

SEQ ID NO: 306957 - DNA, 25 bp, Artificial
  Probe
cattatgaggcctctttggtcccag

SEQ ID NO: 306958 - DNA, 25 bp, Artificial
  Probe
ggtggttgccacaaactcctggagg

SEQ ID NO: 306959 - DNA, 25 bp, Artificial
  Probe
ccttgggagctgtgaagttttagac

SEQ ID NO: 306960 - DNA, 25 bp, Artificial
  Probe
gaagttttagactcaggatgggcct

SEQ ID NO: 306961 - DNA, 25 bp, Artificial
  Probe
ctaccagcctgcacttcctgtagat

SEQ ID NO: 306962 - DNA, 25 bp, Artificial
  Probe
gcctttgctctgtgggatcaggatc

SEQ ID NO: 306963 - DNA, 25 bp, Artificial
  Probe
acgtgcggtggttgccacaaactcc

SEQ ID NO: 306964 - DNA, 25 bp, Artificial
  Probe
ttggcctgtccctgaagctgagcct

SEQ ID NO: 306965 - DNA, 25 bp, Artificial
  Probe
ttgctctgtgggatcaggatcagag

SEQ ID NO: 306966 - DNA, 25 bp, Artificial
  Probe
gtacaccacatgacggctttacatg

SEQ ID NO: 306967 - DNA, 25 bp, Artificial
  Probe
cctctccgtggatcccaaagtggga

SEQ ID NO: 306968 - DNA, 25 bp, Artificial
  Probe
cgtggatcccaaagtgggacagaga

SEQ ID NO: 306969 - DNA, 25 bp, Artificial
  Probe
ccacatgacggctttacatgtacca

SEQ ID NO: 306970 - DNA, 25 bp, Artificial
  Probe
gatgggctttgcacagagggccatt

SEQ ID NO: 306971 - DNA, 25 bp, Artificial
  Probe
actaaggtgcccttgggagctgtga

SEQ ID NO: 306972 - DNA, 25 bp, Artificial
  Probe
gcagtgcgtacaccacatgacggct

SEQ ID NO: 306973 - DNA, 25 bp, Artificial
  Probe
cattagttggcctgtccctgaagct

SEQ ID NO: 306974 - DNA, 25 bp, Artificial
  Probe
ttagttggcctgtccctgaagctga

SEQ ID NO: 306975 - DNA, 25 bp, Artificial
  Probe
ctgggcctttgctctgtgggatcag

SEQ ID NO: 306976 - DNA, 25 bp, Artificial
  Probe
ctaaggtgcccttgggagctgtgaa

SEQ ID NO: 306977 - DNA, 25 bp, Artificial
  Probe
gccacaaactcctggaggaacagcc

SEQ ID NO: 306978 - DNA, 25 bp, Artificial
  Probe
gatttctgggcctttgctctgtggg

SEQ ID NO: 306979 - DNA, 25 bp, Artificial
  Probe
tccgtggatcccaaagtgggacaga

SEQ ID NO: 306980 - DNA, 25 bp, Artificial
  Probe
ttttagactcaggatgggcctgatt

SEQ ID NO: 306981 - DNA, 25 bp, Artificial
  Probe
atgtgacggcagtgcgtacaccaca

SEQ ID NO: 306982 - DNA, 25 bp, Artificial
  Probe
acttcctgtagatggagcaggatgg

SEQ ID NO: 306983 - DNA, 25 bp, Artificial
  Probe
ttagactcaggatgggcctgatttc

SEQ ID NO: 306984 - DNA, 25 bp, Artificial
  Probe
gtataccatgtgacggcagtgcgta

SEQ ID NO: 306985 - DNA, 25 bp, Artificial
  Probe
cagagggccattagttggcctgtcc

SEQ ID NO: 306986 - DNA, 25 bp, Artificial
  Probe
cacaaactcctggaggaacagccct

SEQ ID NO: 306987 - DNA, 25 bp, Artificial
  Probe
cgctccctgggctttacctcaattt

SEQ ID NO: 306988 - DNA, 25 bp, Artificial
  Probe
ccatgtgacggcagtgcgtacacca

SEQ ID NO: 306989 - DNA, 25 bp, Artificial
  Probe
tggcctgtccctgaagctgagcctg

SEQ ID NO: 306990 - DNA, 25 bp, Artificial
  Probe
gacggcagtgcgtacaccacatgac

SEQ ID NO: 306991 - DNA, 25 bp, Artificial
  Probe
tggttgccacaaactcctggaggaa

SEQ ID NO: 306992 - DNA, 25 bp, Artificial
  Probe
ggcctttgctctgtgggatcaggat

SEQ ID NO: 306993 - DNA, 25 bp, Artificial
  Probe
ggctttgcacagagggccattagtt

SEQ ID NO: 306994 - DNA, 25 bp, Artificial
  Probe
tgctctgtgggatcaggatcagaga

SEQ ID NO: 306995 - DNA, 25 bp, Artificial
  Probe
gcacagagggccattagttggcctg

SEQ ID NO: 306996 - DNA, 25 bp, Artificial
  Probe
gggctttacctcaattttgctctac

SEQ ID NO: 306997 - DNA, 25 bp, Artificial
  Probe
acatgtaccacgtgcggtggttgcc

SEQ ID NO: 306998 - DNA, 25 bp, Artificial
  Probe
taccacgtgcggtggttgccacaaa

SEQ ID NO: 306999 - DNA, 25 bp, Artificial
  Probe
gggtggatgaccactctcatggtga

SEQ ID NO: 307000 - DNA, 25 bp, Artificial
  Probe
gtgcccttgggagctgtgaagtttt

SEQ ID NO: 307001 - DNA, 25 bp, Artificial
  Probe
taaagctcattggttcatcccgttg

SEQ ID NO: 307002 - DNA, 25 bp, Artificial
  Probe
tctttagcgatctcctccaatttgg

SEQ ID NO: 307003 - DNA, 25 bp, Artificial
  Probe
tcaaaatgaccgttcgttttgccaa

SEQ ID NO: 307004 - DNA, 25 bp, Artificial
  Probe
ctctgtagcaacaacctctgtctag

SEQ ID NO: 307005 - DNA, 25 bp, Artificial
  Probe
gtagcaacaacctctgtctagatcc

SEQ ID NO: 307006 - DNA, 25 bp, Artificial
  Probe
gttatagctcccatcatttcaaggt

SEQ ID NO: 307007 - DNA, 25 bp, Artificial
  Probe
aggtgctggccgacgcagtttcccc

SEQ ID NO: 307008 - DNA, 25 bp, Artificial
  Probe
gctccttaggacttaggaggtactt

SEQ ID NO: 307009 - DNA, 25 bp, Artificial
  Probe
tactctggtcataaaaagagctatt

SEQ ID NO: 307010 - DNA, 25 bp, Artificial
  Probe
ccagatttccagctatgggagctgt

SEQ ID NO: 307011 - DNA, 25 bp, Artificial
  Probe
tacggcatattggaggcaagcatgg

SEQ ID NO: 307012 - DNA, 25 bp, Artificial
  Probe
aaagcttttatcaaactcaagtggt

SEQ ID NO: 307013 - DNA, 25 bp, Artificial
  Probe
gaagggacagttccaacccatctag

SEQ ID NO: 307014 - DNA, 25 bp, Artificial
  Probe
ggaagtccctgaaactgataagcta

SEQ ID NO: 307015 - DNA, 25 bp, Artificial
  Probe
gtccctgaaactgataagctatcac

SEQ ID NO: 307016 - DNA, 25 bp, Artificial
  Probe
catgcacttgggaagtggaatcagg

SEQ ID NO: 307017 - DNA, 25 bp, Artificial
  Probe
gtcttgctgtctttccaatagccac

SEQ ID NO: 307018 - DNA, 25 bp, Artificial
  Probe
caaactcaagtggtagacttagagg

SEQ ID NO: 307019 - DNA, 25 bp, Artificial
  Probe
ggcccacatccatggcctcatttaa

SEQ ID NO: 307020 - DNA, 25 bp, Artificial
  Probe
ctgaggtcacttttagataatccaa

SEQ ID NO: 307021 - DNA, 25 bp, Artificial
  Probe
agaaggtgatgctgtccatcccaca

SEQ ID NO: 307022 - DNA, 25 bp, Artificial
  Probe
tatacaaacaataagaactgctgag

SEQ ID NO: 307023 - DNA, 25 bp, Artificial
  Probe
cctagcctgctaacctgctatattg

SEQ ID NO: 307024 - DNA, 25 bp, Artificial
  Probe
gtatcagggcccacatccatggcct

SEQ ID NO: 307025 - DNA, 25 bp, Artificial
  Probe
aacccatctagctgcctgcaagtca

SEQ ID NO: 307026 - DNA, 25 bp, Artificial
  Probe
gagctatttgcaaattcctacttag

SEQ ID NO: 307027 - DNA, 25 bp, Artificial
  Probe
gcgaaacctatcttcatatatgtcg

SEQ ID NO: 307028 - DNA, 25 bp, Artificial
  Probe
accactaaggccactgagctgtcta

SEQ ID NO: 307029 - DNA, 25 bp, Artificial
  Probe
agactggatggcttaatcaacagag

SEQ ID NO: 307030 - DNA, 25 bp, Artificial
  Probe
tattgaagagcacagactggatggc

SEQ ID NO: 307031 - DNA, 25 bp, Artificial
  Probe
ttcaggttaagctcaggaaacaaat

SEQ ID NO: 307032 - DNA, 25 bp, Artificial
  Probe
taatccaaaaattctggaagagaca

SEQ ID NO: 307033 - DNA, 25 bp, Artificial
  Probe
catcatttcaaggttaacttaaggg

SEQ ID NO: 307034 - DNA, 25 bp, Artificial
  Probe
ccatcatttcaaggttaacttaagg

SEQ ID NO: 307035 - DNA, 25 bp, Artificial
  Probe
atcaggagggtctggagttcaaagc

SEQ ID NO: 307036 - DNA, 25 bp, Artificial
  Probe
cacatggctattctttactctggtc

SEQ ID NO: 307037 - DNA, 25 bp, Artificial
  Probe
ggtctggagttcaaagctagctttg

SEQ ID NO: 307038 - DNA, 25 bp, Artificial
  Probe
aagagacaaagaccagccaagctgc

SEQ ID NO: 307039 - DNA, 25 bp, Artificial
  Probe
tattttctcacagttctagagactg

SEQ ID NO: 307040 - DNA, 25 bp, Artificial
  Probe
gcaaattcctacttagaagacagtc

SEQ ID NO: 307041 - DNA, 25 bp, Artificial
  Probe
ttctccctagttacattgtatcagg

SEQ ID NO: 307042 - DNA, 25 bp, Artificial
  Probe
gggacagttccaacccatctagctg

SEQ ID NO: 307043 - DNA, 25 bp, Artificial
  Probe
aagctgcctagaagggacagttcca

SEQ ID NO: 307044 - DNA, 25 bp, Artificial
  Probe
ataatccaaaaattctggaagagac

SEQ ID NO: 307045 - DNA, 25 bp, Artificial
  Probe
cgcagtttccccagaggcctgtctt

SEQ ID NO: 307046 - DNA, 25 bp, Artificial
  Probe
tagccactctcttgctgcatccttg

SEQ ID NO: 307047 - DNA, 25 bp, Artificial
  Probe
tagtggttcatttggccctcaacag

SEQ ID NO: 307048 - DNA, 25 bp, Artificial
  Probe
cattcttccagaagaagaaaggcaa

SEQ ID NO: 307049 - DNA, 25 bp, Artificial
  Probe
aggccttctcaaaggccaaatggga

SEQ ID NO: 307050 - DNA, 25 bp, Artificial
  Probe
cagtgaattgacttcatccagaaag

SEQ ID NO: 307051 - DNA, 25 bp, Artificial
  Probe
gaatctgaggccaacagcctggctg

SEQ ID NO: 307052 - DNA, 25 bp, Artificial
  Probe
acagtgaatctgaggccaacagcct

SEQ ID NO: 307053 - DNA, 25 bp, Artificial
  Probe
aatactccaggttgatatttcctgc

SEQ ID NO: 307054 - DNA, 25 bp, Artificial
  Probe
agggcatgaccatccgttggtggat

SEQ ID NO: 307055 - DNA, 25 bp, Artificial
  Probe
ggagtacgcagctgtcaactacctg

SEQ ID NO: 307056 - DNA, 25 bp, Artificial
  Probe
gatacatggacctaatgaccacact

SEQ ID NO: 307057 - DNA, 25 bp, Artificial
  Probe
aatctgaggccaacagcctggctgg

SEQ ID NO: 307058 - DNA, 25 bp, Artificial
  Probe
ttggtcagtgttttcctagggattc

SEQ ID NO: 307059 - DNA, 25 bp, Artificial
  Probe
ggaagcttcgggacaaatttccatg

SEQ ID NO: 307060 - DNA, 25 bp, Artificial
  Probe
tggatacatggacctaatgaccaca

SEQ ID NO: 307061 - DNA, 25 bp, Artificial
  Probe
acgctggatggaagctacagtgaat

SEQ ID NO: 307062 - DNA, 25 bp, Artificial
  Probe
gccctcaacagtgaattgacttcat

SEQ ID NO: 307063 - DNA, 25 bp, Artificial
  Probe
tgtggaatgcttcattcaagaacca

SEQ ID NO: 307064 - DNA, 25 bp, Artificial
  Probe
gtgttcgtgtttctctcagtgttgg

SEQ ID NO: 307065 - DNA, 25 bp, Artificial
  Probe
ggaagctacagtgaatctgaggcca

SEQ ID NO: 307066 - DNA, 25 bp, Artificial
  Probe
agctttgtgttcgtgtttctctcag

SEQ ID NO: 307067 - DNA, 25 bp, Artificial
  Probe
ccaagaagccacattcttccagaag

SEQ ID NO: 307068 - DNA, 25 bp, Artificial
  Probe
agctgtcaactacctgaccacagtg

SEQ ID NO: 307069 - DNA, 25 bp, Artificial
  Probe
cacagtgcaggaacagaaggaacgg

SEQ ID NO: 307070 - DNA, 25 bp, Artificial
  Probe
ttctcaaaggccaaatgggactcta

SEQ ID NO: 307071 - DNA, 25 bp, Artificial
  Probe
ctcaaaggccaaatgggactctata

SEQ ID NO: 307072 - DNA, 25 bp, Artificial
  Probe
tcagtgttggagtacgcagctgtca

SEQ ID NO: 307073 - DNA, 25 bp, Artificial
  Probe
gggactctatatcttccagaacacc

SEQ ID NO: 307074 - DNA, 25 bp, Artificial
  Probe
tgaccatccgttggtggatacatgg

SEQ ID NO: 307075 - DNA, 25 bp, Artificial
  Probe
tgacaaatactccaggttgatattt

SEQ ID NO: 307076 - DNA, 25 bp, Artificial
  Probe
tcatttggccctcaacagtgaattg

SEQ ID NO: 307077 - DNA, 25 bp, Artificial
  Probe
ggttgatatttcctgccttctacat

SEQ ID NO: 307078 - DNA, 25 bp, Artificial
  Probe
aatagtggttcatttggccctcaac

SEQ ID NO: 307079 - DNA, 25 bp, Artificial
  Probe
ctagggattctaaggctggatctgg

SEQ ID NO: 307080 - DNA, 25 bp, Artificial
  Probe
ttggaggagcccagggacctccagc

SEQ ID NO: 307081 - DNA, 25 bp, Artificial
  Probe
tcatccagaaagaaaggccttctca

SEQ ID NO: 307082 - DNA, 25 bp, Artificial
  Probe
aagcagctgctcctggcttggagga

SEQ ID NO: 307083 - DNA, 25 bp, Artificial
  Probe
caacagcctggctggctacccaaga

SEQ ID NO: 307084 - DNA, 25 bp, Artificial
  Probe
aaggccttctcaaaggccaaatggg

SEQ ID NO: 307085 - DNA, 25 bp, Artificial
  Probe
gaaagggcatgaccatccgttggtg

SEQ ID NO: 307086 - DNA, 25 bp, Artificial
  Probe
ccatgccattgacaaatactccagg

SEQ ID NO: 307087 - DNA, 25 bp, Artificial
  Probe
gctgctcctggcttggaggagccca

SEQ ID NO: 307088 - DNA, 25 bp, Artificial
  Probe
tccgttggtggatacatggacctaa

SEQ ID NO: 307089 - DNA, 25 bp, Artificial
  Probe
ggctacccaagaagccacattcttc

SEQ ID NO: 307090 - DNA, 25 bp, Artificial
  Probe
cacgtgtggaatgcttcattcaaga

SEQ ID NO: 307091 - DNA, 25 bp, Artificial
  Probe
aggccaaatgggactctatatcttc

SEQ ID NO: 307092 - DNA, 25 bp, Artificial
  Probe
caagcagctgctcctggcttggagg

SEQ ID NO: 307093 - DNA, 25 bp, Artificial
  Probe
atcactattgtccatgaaatagacg

SEQ ID NO: 307094 - DNA, 25 bp, Artificial
  Probe
ctctttgaagagaagcattgctata

SEQ ID NO: 307095 - DNA, 25 bp, Artificial
  Probe
acggactcacctcctggcatagatc

SEQ ID NO: 307096 - DNA, 25 bp, Artificial
  Probe
gaccgtatatttctagtgtccccaa

SEQ ID NO: 307097 - DNA, 25 bp, Artificial
  Probe
atgacaacgcaatgccggagttcat

SEQ ID NO: 307098 - DNA, 25 bp, Artificial
  Probe
tgccctaacaagcaaagaggaagag

SEQ ID NO: 307099 - DNA, 25 bp, Artificial
  Probe
atgaagttgccctaacaagcaaaga

SEQ ID NO: 307100 - DNA, 25 bp, Artificial
  Probe
ccagagagcacaagtacggactcac

SEQ ID NO: 307101 - DNA, 25 bp, Artificial
  Probe
gcacagcttctcaaatctaggatca

SEQ ID NO: 307102 - DNA, 25 bp, Artificial
  Probe
gcacaagtacggactcacctcctgg

SEQ ID NO: 307103 - DNA, 25 bp, Artificial
  Probe
actcccctttgtagtgccagagact

SEQ ID NO: 307104 - DNA, 25 bp, Artificial
  Probe
ccggtgctctttgaagagaagcatt

SEQ ID NO: 307105 - DNA, 25 bp, Artificial
  Probe
tcctggcatagatctccacaaccag

SEQ ID NO: 307106 - DNA, 25 bp, Artificial
  Probe
acgcaatgccggagttcatatctgg

SEQ ID NO: 307107 - DNA, 25 bp, Artificial
  Probe
gatcacttcagaaggggagtacatc

SEQ ID NO: 307108 - DNA, 25 bp, Artificial
  Probe
gcgagcgtgcctctagagcccaggc

SEQ ID NO: 307109 - DNA, 25 bp, Artificial
  Probe
ctcaaatctaggatcacttcagaag

SEQ ID NO: 307110 - DNA, 25 bp, Artificial
  Probe
cacaaccaggcgagcgtgcctctag

SEQ ID NO: 307111 - DNA, 25 bp, Artificial
  Probe
atagacatcaacgttggtttcgata

SEQ ID NO: 307112 - DNA, 25 bp, Artificial
  Probe
atccccttggaccagatagacatca

SEQ ID NO: 307113 - DNA, 25 bp, Artificial
  Probe
ccggagttcatatctggccaatgag

SEQ ID NO: 307114 - DNA, 25 bp, Artificial
  Probe
agtgagaacggagttccagagagca

SEQ ID NO: 307115 - DNA, 25 bp, Artificial
  Probe
attgtccatgaaatagacgaagaca

SEQ ID NO: 307116 - DNA, 25 bp, Artificial
  Probe
gttggtttcgatagcggaatcgacc

SEQ ID NO: 307117 - DNA, 25 bp, Artificial
  Probe
cggtgctctttgaagagaagcattg

SEQ ID NO: 307118 - DNA, 25 bp, Artificial
  Probe
ctttgtagtgccagagacttagcag

SEQ ID NO: 307119 - DNA, 25 bp, Artificial
  Probe
tcccctttgtagtgccagagactta

SEQ ID NO: 307120 - DNA, 25 bp, Artificial
  Probe
gattccataagacttacgaagtacc

SEQ ID NO: 307121 - DNA, 25 bp, Artificial
  Probe
gatctccacaaccaggcgagcgtgc

SEQ ID NO: 307122 - DNA, 25 bp, Artificial
  Probe
tgccagagacttagcagagaagaaa

SEQ ID NO: 307123 - DNA, 25 bp, Artificial
  Probe
caatgcagactttgaaatcgttgtc

SEQ ID NO: 307124 - DNA, 25 bp, Artificial
  Probe
ccagatagacatcaacgttggtttc

SEQ ID NO: 307125 - DNA, 25 bp, Artificial
  Probe
ccatgacaacgcaatgccggagttc

SEQ ID NO: 307126 - DNA, 25 bp, Artificial
  Probe
gtagactattcaagattccataaga

SEQ ID NO: 307127 - DNA, 25 bp, Artificial
  Probe
cggaatcgaccgtatatttctagtg

SEQ ID NO: 307128 - DNA, 25 bp, Artificial
  Probe
tcaagattccataagacttacgaag

SEQ ID NO: 307129 - DNA, 25 bp, Artificial
  Probe
actgccatgacaacgcaatgccgga

SEQ ID NO: 307130 - DNA, 25 bp, Artificial
  Probe
gacatcaacgttggtttcgatagcg

SEQ ID NO: 307131 - DNA, 25 bp, Artificial
  Probe
ccttggaccagatagacatcaacgt

SEQ ID NO: 307132 - DNA, 25 bp, Artificial
  Probe
tgcagactttgaaatcgttgtcatc

SEQ ID NO: 307133 - DNA, 25 bp, Artificial
  Probe
tgacaatgcagactttgaaatcgtt

SEQ ID NO: 307134 - DNA, 25 bp, Artificial
  Probe
tttcgatagcggaatcgaccgtata

SEQ ID NO: 307135 - DNA, 25 bp, Artificial
  Probe
gtgtccccaatcactattgtccatg

SEQ ID NO: 307136 - DNA, 25 bp, Artificial
  Probe
accaggcgagcgtgcctctagagcc

SEQ ID NO: 307137 - DNA, 25 bp, Artificial
  Probe
atagcggaatcgaccgtatatttct

SEQ ID NO: 307138 - DNA, 25 bp, Artificial
  Probe
gacattgacaatgcagactttgaaa

SEQ ID NO: 307139 - DNA, 25 bp, Artificial
  Probe
agacgctaaggctagggaacagcat

SEQ ID NO: 307140 - DNA, 25 bp, Artificial
  Probe
cagagacctttctcttccagtctag

SEQ ID NO: 307141 - DNA, 25 bp, Artificial
  Probe
gcatctccaaggagatgagacgcta

SEQ ID NO: 307142 - DNA, 25 bp, Artificial
  Probe
agagccttggggtccacagcctcag

SEQ ID NO: 307143 - DNA, 25 bp, Artificial
  Probe
agagtctaagtgtggagcagagcct

SEQ ID NO: 307144 - DNA, 25 bp, Artificial
  Probe
gctagggaacagcatcctaacctca

SEQ ID NO: 307145 - DNA, 25 bp, Artificial
  Probe
gagaactttctctggcatctccaag

SEQ ID NO: 307146 - DNA, 25 bp, Artificial
  Probe
agcctcagagacctttctcttccag

SEQ ID NO: 307147 - DNA, 25 bp, Artificial
  Probe
ccaggccctagagaactttctctgg

SEQ ID NO: 307148 - DNA, 25 bp, Artificial
  Probe
tctcaaccagcctctgagaatagaa

SEQ ID NO: 307149 - DNA, 25 bp, Artificial
  Probe
ctgatggtcggtcagtgaagcatta

SEQ ID NO: 307150 - DNA, 25 bp, Artificial
  Probe
ctaggagatctgatggtcggtcagt

SEQ ID NO: 307151 - DNA, 25 bp, Artificial
  Probe
gatgagacgctaaggctagggaaca

SEQ ID NO: 307152 - DNA, 25 bp, Artificial
  Probe
cagcctctgagaatagaagcacctt

SEQ ID NO: 307153 - DNA, 25 bp, Artificial
  Probe
agaaggtgtcctaggatggctagct

SEQ ID NO: 307154 - DNA, 25 bp, Artificial
  Probe
gggtccacagcctcagagacctttc

SEQ ID NO: 307155 - DNA, 25 bp, Artificial
  Probe
ctcaggccttgttccccttacaggg

SEQ ID NO: 307156 - DNA, 25 bp, Artificial
  Probe
tctgatggtcggtcagtgaagcatt

SEQ ID NO: 307157 - DNA, 25 bp, Artificial
  Probe
agcatcctaacctcaggccttgttc

SEQ ID NO: 307158 - DNA, 25 bp, Artificial
  Probe
agatgagacgctaaggctagggaac

SEQ ID NO: 307159 - DNA, 25 bp, Artificial
  Probe
agtctaggagatctgatggtcggtc

SEQ ID NO: 307160 - DNA, 25 bp, Artificial
  Probe
cctgccaggccctagagaactttct

SEQ ID NO: 307161 - DNA, 25 bp, Artificial
  Probe
gagaatagaagcaccttcctgccag

SEQ ID NO: 307162 - DNA, 25 bp, Artificial
  Probe
tgttcatggctctcaaccagcctct

SEQ ID NO: 307163 - DNA, 25 bp, Artificial
  Probe
tctccaaggagatgagacgctaagg

SEQ ID NO: 307164 - DNA, 25 bp, Artificial
  Probe
ggtccacagcctcagagacctttct

SEQ ID NO: 307165 - DNA, 25 bp, Artificial
  Probe
tctaggagatctgatggtcggtcag

SEQ ID NO: 307166 - DNA, 25 bp, Artificial
  Probe
ggtgtcctaggatggctagctacat

SEQ ID NO: 307167 - DNA, 25 bp, Artificial
  Probe
tttctctggcatctccaaggagatg

SEQ ID NO: 307168 - DNA, 25 bp, Artificial
  Probe
tggctctcaaccagcctctgagaat

SEQ ID NO: 307169 - DNA, 25 bp, Artificial
  Probe
agtctaagtgtggagcagagccttg

SEQ ID NO: 307170 - DNA, 25 bp, Artificial
  Probe
gaatatgctagcatgatccccaaca

SEQ ID NO: 307171 - DNA, 25 bp, Artificial
  Probe
cttgttccccttacagggtgcccag

SEQ ID NO: 307172 - DNA, 25 bp, Artificial
  Probe
actttctctggcatctccaaggaga

SEQ ID NO: 307173 - DNA, 25 bp, Artificial
  Probe
tccctgagaacaggatgagaggttg

SEQ ID NO: 307174 - DNA, 25 bp, Artificial
  Probe
ccctagagaactttctctggcatct

SEQ ID NO: 307175 - DNA, 25 bp, Artificial
  Probe
ggtgttcatggctctcaaccagcct

SEQ ID NO: 307176 - DNA, 25 bp, Artificial
  Probe
cctctacccgggtgttcatggctct

SEQ ID NO: 307177 - DNA, 25 bp, Artificial
  Probe
gacgctaaggctagggaacagcatc

SEQ ID NO: 307178 - DNA, 25 bp, Artificial
  Probe
tcctaggatggctagctacattgtg

SEQ ID NO: 307179 - DNA, 25 bp, Artificial
  Probe
gcctcagagacctttctcttccagt

SEQ ID NO: 307180 - DNA, 25 bp, Artificial
  Probe
cctggtcttgggaatatgctagcat

SEQ ID NO: 307181 - DNA, 25 bp, Artificial
  Probe
cccgggtgttcatggctctcaacca

SEQ ID NO: 307182 - DNA, 25 bp, Artificial
  Probe
aatagaagcaccttcctgccaggcc

SEQ ID NO: 307183 - DNA, 25 bp, Artificial
  Probe
tgttccccttacagggtgcccaggt

SEQ ID NO: 307184 - DNA, 25 bp, Artificial
  Probe
cttggggtccacagcctcagagacc

SEQ ID NO: 307185 - DNA, 25 bp, Artificial
  Probe
tcccccagagcactggttcctggtt

SEQ ID NO: 307186 - DNA, 25 bp, Artificial
  Probe
gaacccagccgctagtggtcgcgat

SEQ ID NO: 307187 - DNA, 25 bp, Artificial
  Probe
atatcccacgggtcctaacaatcgt

SEQ ID NO: 307188 - DNA, 25 bp, Artificial
  Probe
tgcaaaccaggtaaaacttagatac

SEQ ID NO: 307189 - DNA, 25 bp, Artificial
  Probe
tctgtcacattaagggcaattgtaa

SEQ ID NO: 307190 - DNA, 25 bp, Artificial
  Probe
tctgagtggcgcacaccagaaccca

SEQ ID NO: 307191 - DNA, 25 bp, Artificial
  Probe
cataaagagaacatcactcagacgg

SEQ ID NO: 307192 - DNA, 25 bp, Artificial
  Probe
atttgaactgcagcaatatcccacg

SEQ ID NO: 307193 - DNA, 25 bp, Artificial
  Probe
ggaaccgttttgttaagcgatgcca

SEQ ID NO: 307194 - DNA, 25 bp, Artificial
  Probe
actgcagcaatatcccacgggtcct

SEQ ID NO: 307195 - DNA, 25 bp, Artificial
  Probe
tactgtacatgacttgtaatatacg

SEQ ID NO: 307196 - DNA, 25 bp, Artificial
  Probe
cccagccgctagtggtcgcgatgag

SEQ ID NO: 307197 - DNA, 25 bp, Artificial
  Probe
ttaagcgatgccagtttacataaag

SEQ ID NO: 307198 - DNA, 25 bp, Artificial
  Probe
ttttactcgggctaaacagaactag

SEQ ID NO: 307199 - DNA, 25 bp, Artificial
  Probe
accgttttgttaagcgatgccagtt

SEQ ID NO: 307200 - DNA, 25 bp, Artificial
  Probe
tagtatttttactcgggctaaacag

SEQ ID NO: 307201 - DNA, 25 bp, Artificial
  Probe
agagcactggttcctggtttctgtg

SEQ ID NO: 307202 - DNA, 25 bp, Artificial
  Probe
ctcgggctaaacagaactaggagaa

SEQ ID NO: 307203 - DNA, 25 bp, Artificial
  Probe
ctgtacatgacttgtaatatacgat

SEQ ID NO: 307204 - DNA, 25 bp, Artificial
  Probe
gggcccggcatatccgtgtctgagc

SEQ ID NO: 307205 - DNA, 25 bp, Artificial
  Probe
tcagacgctcgctgggcccggcata

SEQ ID NO: 307206 - DNA, 25 bp, Artificial
  Probe
tggtttctgtgcagccgttctgagt

SEQ ID NO: 307207 - DNA, 25 bp, Artificial
  Probe
aagagaacatcactcagacggtcag

SEQ ID NO: 307208 - DNA, 25 bp, Artificial
  Probe
cacttgcaaaccaggtaaaacttag

SEQ ID NO: 307209 - DNA, 25 bp, Artificial
  Probe
cttgcaaaccaggtaaaacttagat

SEQ ID NO: 307210 - DNA, 25 bp, Artificial
  Probe
tctgtgcagccgttctgagtggcgc

SEQ ID NO: 307211 - DNA, 25 bp, Artificial
  Probe
attatcgtaccgtatttgaactgca

SEQ ID NO: 307212 - DNA, 25 bp, Artificial
  Probe
tttgttaagcgatgccagtttacat

SEQ ID NO: 307213 - DNA, 25 bp, Artificial
  Probe
gaagggtagcgcacttgcaaaccag

SEQ ID NO: 307214 - DNA, 25 bp, Artificial
  Probe
agccgttctgagtggcgcacaccag

SEQ ID NO: 307215 - DNA, 25 bp, Artificial
  Probe
taaagagaacatcactcagacggtc

SEQ ID NO: 307216 - DNA, 25 bp, Artificial
  Probe
tcactcagacggtcagttctgtcac

SEQ ID NO: 307217 - DNA, 25 bp, Artificial
  Probe
caattgtaaactggaagggtagcgc

SEQ ID NO: 307218 - DNA, 25 bp, Artificial
  Probe
gcactggttcctggtttctgtgcag

SEQ ID NO: 307219 - DNA, 25 bp, Artificial
  Probe
ttttgttaagcgatgccagtttaca

SEQ ID NO: 307220 - DNA, 25 bp, Artificial
  Probe
tgtaattatcgtaccgtatttgaac

SEQ ID NO: 307221 - DNA, 25 bp, Artificial
  Probe
cagcaatatcccacgggtcctaaca

SEQ ID NO: 307222 - DNA, 25 bp, Artificial
  Probe
tcccacgggtcctaacaatcgtagt

SEQ ID NO: 307223 - DNA, 25 bp, Artificial
  Probe
aactggaagggtagcgcacttgcaa

SEQ ID NO: 307224 - DNA, 25 bp, Artificial
  Probe
ttagaggcaattctcacatattcag

SEQ ID NO: 307225 - DNA, 25 bp, Artificial
  Probe
attgtaaactggaagggtagcgcac

SEQ ID NO: 307226 - DNA, 25 bp, Artificial
  Probe
gctgggcccggcatatccgtgtctg

SEQ ID NO: 307227 - DNA, 25 bp, Artificial
  Probe
tgagtggcgcacaccagaacccagc

SEQ ID NO: 307228 - DNA, 25 bp, Artificial
  Probe
gatgccagtttacataaagagaaca

SEQ ID NO: 307229 - DNA, 25 bp, Artificial
  Probe
aacatcactcagacggtcagttctg

SEQ ID NO: 307230 - DNA, 25 bp, Artificial
  Probe
gtatttgaactgcagcaatatccca

SEQ ID NO: 307231 - DNA, 25 bp, Artificial
  Probe
gcccttctggggtcccagtgcctga

SEQ ID NO: 307232 - DNA, 25 bp, Artificial
  Probe
tgaaccacaatgtcaggccactacg

SEQ ID NO: 307233 - DNA, 25 bp, Artificial
  Probe
cctgttgcctttcaggagccttcag

SEQ ID NO: 307234 - DNA, 25 bp, Artificial
  Probe
tgtgtgcactccagcctgaatcagc

SEQ ID NO: 307235 - DNA, 25 bp, Artificial
  Probe
tttcaggagccttcaggttaggcca

SEQ ID NO: 307236 - DNA, 25 bp, Artificial
  Probe
ttgcctttcaggagccttcaggtta

SEQ ID NO: 307237 - DNA, 25 bp, Artificial
  Probe
ccctgttgcctttcaggagccttca

SEQ ID NO: 307238 - DNA, 25 bp, Artificial
  Probe
ttttgtgaaccacaatgtcaggcca

SEQ ID NO: 307239 - DNA, 25 bp, Artificial
  Probe
tggcttttgtgaaccacaatgtcag

SEQ ID NO: 307240 - DNA, 25 bp, Artificial
  Probe
ctttcaggagccttcaggttaggcc

SEQ ID NO: 307241 - DNA, 25 bp, Artificial
  Probe
agcctacttcatgctttagcaatgg

SEQ ID NO: 307242 - DNA, 25 bp, Artificial
  Probe
cgctccctggcttttgtgaaccaca

SEQ ID NO: 307243 - DNA, 25 bp, Artificial
  Probe
tcctgtgtgcactccagcctgaatc

SEQ ID NO: 307244 - DNA, 25 bp, Artificial
  Probe
agaactctctccttaggggccacct

SEQ ID NO: 307245 - DNA, 25 bp, Artificial
  Probe
gcccagcctacttcatgctttagca

SEQ ID NO: 307246 - DNA, 25 bp, Artificial
  Probe
aggccacagaactctctccttaggg

SEQ ID NO: 307247 - DNA, 25 bp, Artificial
  Probe
ctggcttttgtgaaccacaatgtca

SEQ ID NO: 307248 - DNA, 25 bp, Artificial
  Probe
taggccacagaactctctccttagg

SEQ ID NO: 307249 - DNA, 25 bp, Artificial
  Probe
ctgaatcagcccttctggggtccca

SEQ ID NO: 307250 - DNA, 25 bp, Artificial
  Probe
aagcccagcctacttcatgctttag

SEQ ID NO: 307251 - DNA, 25 bp, Artificial
  Probe
ctgttgcctttcaggagccttcagg

SEQ ID NO: 307252 - DNA, 25 bp, Artificial
  Probe
cacagaactctctccttaggggcca

SEQ ID NO: 307253 - DNA, 25 bp, Artificial
  Probe
tcaggagccttcaggttaggccaca

SEQ ID NO: 307254 - DNA, 25 bp, Artificial
  Probe
gggcgacagacagcttgtccttccg

SEQ ID NO: 307255 - DNA, 25 bp, Artificial
  Probe
cgacagacagcttgtccttccggta

SEQ ID NO: 307256 - DNA, 25 bp, Artificial
  Probe
ttgtgaaccacaatgtcaggccact

SEQ ID NO: 307257 - DNA, 25 bp, Artificial
  Probe
aatcagcccttctggggtcccagtg

SEQ ID NO: 307258 - DNA, 25 bp, Artificial
  Probe
ctccctggcttttgtgaaccacaat

SEQ ID NO: 307259 - DNA, 25 bp, Artificial
  Probe
aaccacaatgtcaggccactacgag

SEQ ID NO: 307260 - DNA, 25 bp, Artificial
  Probe
gccacagaactctctccttaggggc

SEQ ID NO: 307261 - DNA, 25 bp, Artificial
  Probe
tcaggttaggccacagaactctctc

SEQ ID NO: 307262 - DNA, 25 bp, Artificial
  Probe
ggcgacagacagcttgtccttccgg

SEQ ID NO: 307263 - DNA, 25 bp, Artificial
  Probe
cagcctacttcatgctttagcaatg

SEQ ID NO: 307264 - DNA, 25 bp, Artificial
  Probe
acagaactctctccttaggggccac

SEQ ID NO: 307265 - DNA, 25 bp, Artificial
  Probe
gtgtaggggtcagctgtgcccacca

SEQ ID NO: 307266 - DNA, 25 bp, Artificial
  Probe
ctgtgtgcactccagcctgaatcag

SEQ ID NO: 307267 - DNA, 25 bp, Artificial
  Probe
gcttttgtgaaccacaatgtcaggc

SEQ ID NO: 307268 - DNA, 25 bp, Artificial
  Probe
gtcaggccactacgagcctgggttg

SEQ ID NO: 307269 - DNA, 25 bp, Artificial
  Probe
gaactctctccttaggggccacctt

SEQ ID NO: 307270 - DNA, 25 bp, Artificial
  Probe
agacagcttgtccttccggtagcct

SEQ ID NO: 307271 - DNA, 25 bp, Artificial
  Probe
caatgtcaggccactacgagcctgg

SEQ ID NO: 307272 - DNA, 25 bp, Artificial
  Probe
ctgtgtaggggtcagctgtgcccac

SEQ ID NO: 307273 - DNA, 25 bp, Artificial
  Probe
tcaggccactacgagcctgggttgc

SEQ ID NO: 307274 - DNA, 25 bp, Artificial
  Probe
cagacagcttgtccttccggtagcc

SEQ ID NO: 307275 - DNA, 25 bp, Artificial
  Probe
cctgtgtaggggtcagctgtgccca

SEQ ID NO: 307276 - DNA, 25 bp, Artificial
  Probe
caggttaggccacagaactctctcc

SEQ ID NO: 307277 - DNA, 25 bp, Artificial
  Probe
aacacatgtagctactgagctatga

SEQ ID NO: 307278 - DNA, 25 bp, Artificial
  Probe
ctgtagccttatttgaacaatactg

SEQ ID NO: 307279 - DNA, 25 bp, Artificial
  Probe
cactcaagaaaagtctcttgtaacg

SEQ ID NO: 307280 - DNA, 25 bp, Artificial
  Probe
tatgctgctgtaatacaggaaaaca

SEQ ID NO: 307281 - DNA, 25 bp, Artificial
  Probe
ctactgagctatgactgtccttggt

SEQ ID NO: 307282 - DNA, 25 bp, Artificial
  Probe
gtctcttgtaacgtaaaggcaaaca

SEQ ID NO: 307283 - DNA, 25 bp, Artificial
  Probe
gctatgactgtccttggtcacactc

SEQ ID NO: 307284 - DNA, 25 bp, Artificial
  Probe
tgactgtccttggtcacactctatg

SEQ ID NO: 307285 - DNA, 25 bp, Artificial
  Probe
atgctgctgtaatacaggaaaacac

SEQ ID NO: 307286 - DNA, 25 bp, Artificial
  Probe
acatagtgctgaatgacggcaaaga

SEQ ID NO: 307287 - DNA, 25 bp, Artificial
  Probe
atggtttcactctgtccaggcgcct

SEQ ID NO: 307288 - DNA, 25 bp, Artificial
  Probe
ctatgactgtccttggtcacactct

SEQ ID NO: 307289 - DNA, 25 bp, Artificial
  Probe
agatgcccgtcaatgtaaaatcacc

SEQ ID NO: 307290 - DNA, 25 bp, Artificial
  Probe
gactgctattctgaaatgcaacaat

SEQ ID NO: 307291 - DNA, 25 bp, Artificial
  Probe
tcaagaaaagtctcttgtaacgtaa

SEQ ID NO: 307292 - DNA, 25 bp, Artificial
  Probe
aatgtcactcaagaaaagtctcttg

SEQ ID NO: 307293 - DNA, 25 bp, Artificial
  Probe
atacaggaaaacacagcggatgcct

SEQ ID NO: 307294 - DNA, 25 bp, Artificial
  Probe
aacgtaaaggcaaacacatgtagct

SEQ ID NO: 307295 - DNA, 25 bp, Artificial
  Probe
aaggcaaacacatgtagctactgag

SEQ ID NO: 307296 - DNA, 25 bp, Artificial
  Probe
gtcactcaagaaaagtctcttgtaa

SEQ ID NO: 307297 - DNA, 25 bp, Artificial
  Probe
gtagccttatttgaacaatactgaa

SEQ ID NO: 307298 - DNA, 25 bp, Artificial
  Probe
tgtccaggcgcctaaggactatgct

SEQ ID NO: 307299 - DNA, 25 bp, Artificial
  Probe
acaatcttgtacagtcaggactgat

SEQ ID NO: 307300 - DNA, 25 bp, Artificial
  Probe
ggagcaatcagacatttcagatgcc

SEQ ID NO: 307301 - DNA, 25 bp, Artificial
  Probe
acagcggatgcctcctctattaaaa

SEQ ID NO: 307302 - DNA, 25 bp, Artificial
  Probe
ctcaagaaaagtctcttgtaacgta

SEQ ID NO: 307303 - DNA, 25 bp, Artificial
  Probe
aaagcaaatactgtagccttatttg

SEQ ID NO: 307304 - DNA, 25 bp, Artificial
  Probe
catgtagctactgagctatgactgt

SEQ ID NO: 307305 - DNA, 25 bp, Artificial
  Probe
tctgaaatgcaacaatcttgtacag

SEQ ID NO: 307306 - DNA, 25 bp, Artificial
  Probe
ttcataagactgctattctgaaatg

SEQ ID NO: 307307 - DNA, 25 bp, Artificial
  Probe
aatcttgtacagtcaggactgataa

SEQ ID NO: 307308 - DNA, 25 bp, Artificial
  Probe
ttcactctgtccaggcgcctaagga

SEQ ID NO: 307309 - DNA, 25 bp, Artificial
  Probe
agacatttcagatgcccgtcaatgt

SEQ ID NO: 307310 - DNA, 25 bp, Artificial
  Probe
caacaatcttgtacagtcaggactg

SEQ ID NO: 307311 - DNA, 25 bp, Artificial
  Probe
cccacaaatggatattgtggaaaac

SEQ ID NO: 307312 - DNA, 25 bp, Artificial
  Probe
aatacaggaaaacacagcggatgcc

SEQ ID NO: 307313 - DNA, 25 bp, Artificial
  Probe
catagtgctgaatgacggcaaagaa

SEQ ID NO: 307314 - DNA, 25 bp, Artificial
  Probe
tagctactgagctatgactgtcctt

SEQ ID NO: 307315 - DNA, 25 bp, Artificial
  Probe
ggcaaacacatgtagctactgagct

SEQ ID NO: 307316 - DNA, 25 bp, Artificial
  Probe
tactcatggtttcactctgtccagg

SEQ ID NO: 307317 - DNA, 25 bp, Artificial
  Probe
ttcagatgcccgtcaatgtaaaatc

SEQ ID NO: 307318 - DNA, 25 bp, Artificial
  Probe
gcgcctaaggactatgctgctgtaa

SEQ ID NO: 307319 - DNA, 25 bp, Artificial
  Probe
ctcttgtaacgtaaaggcaaacaca

SEQ ID NO: 307320 - DNA, 25 bp, Artificial
  Probe
aacatagtgctgaatgacggcaaag

SEQ ID NO: 307321 - DNA, 25 bp, Artificial
  Probe
agcaaatactgtagccttatttgaa

SEQ ID NO: 307322 - DNA, 25 bp, Artificial
  Probe
gatgcccgtcaatgtaaaatcacct

SEQ ID NO: 307323 - DNA, 25 bp, Artificial
  Probe
tattgcgcaacaagccctacagcaa

SEQ ID NO: 307324 - DNA, 25 bp, Artificial
  Probe
cctacagcaaaaaggactatagatc

SEQ ID NO: 307325 - DNA, 25 bp, Artificial
  Probe
caacctctagtgtcccaggattctc

SEQ ID NO: 307326 - DNA, 25 bp, Artificial
  Probe
ctatagatcctaaggcaatgcatga

SEQ ID NO: 307327 - DNA, 25 bp, Artificial
  Probe
acagcaaaacaagctgaaagacctc

SEQ ID NO: 307328 - DNA, 25 bp, Artificial
  Probe
gaaagacctctctccaattgctgaa

SEQ ID NO: 307329 - DNA, 25 bp, Artificial
  Probe
cgcaacaagccctacagcaaaaagg

SEQ ID NO: 307330 - DNA, 25 bp, Artificial
  Probe
aggtctctgctgttgctaccactgt

SEQ ID NO: 307331 - DNA, 25 bp, Artificial
  Probe
cacttgcttgtggaattatttcagg

SEQ ID NO: 307332 - DNA, 25 bp, Artificial
  Probe
gaaagttctagagcttcactgaagt

SEQ ID NO: 307333 - DNA, 25 bp, Artificial
  Probe
aagctgaaagacctctctccaattg

SEQ ID NO: 307334 - DNA, 25 bp, Artificial
  Probe
tgaaaaccttggtgccattcaggtc

SEQ ID NO: 307335 - DNA, 25 bp, Artificial
  Probe
agaacggccttaccagccactcttt

SEQ ID NO: 307336 - DNA, 25 bp, Artificial
  Probe
agatcctaaggcaatgcatgagcca

SEQ ID NO: 307337 - DNA, 25 bp, Artificial
  Probe
gtaggcggtgcagaacggccttacc

SEQ ID NO: 307338 - DNA, 25 bp, Artificial
  Probe
acctcagctggctgtggcatggtgc

SEQ ID NO: 307339 - DNA, 25 bp, Artificial
  Probe
tagcagcttgctgctcaacctctag

SEQ ID NO: 307340 - DNA, 25 bp, Artificial
  Probe
aggcaatgcatgagccacttaagct

SEQ ID NO: 307341 - DNA, 25 bp, Artificial
  Probe
ctcagctggctgtggcatggtgcct

SEQ ID NO: 307342 - DNA, 25 bp, Artificial
  Probe
ctctctccaattgctgaacgcctgg

SEQ ID NO: 307343 - DNA, 25 bp, Artificial
  Probe
gaacggccttaccagccactctttt

SEQ ID NO: 307344 - DNA, 25 bp, Artificial
  Probe
tgtgagctctgtgctgctgggatca

SEQ ID NO: 307345 - DNA, 25 bp, Artificial
  Probe
ctgaacaactcattgaaaaccttgg

SEQ ID NO: 307346 - DNA, 25 bp, Artificial
  Probe
aatgcatgagccacttaagctgcat

SEQ ID NO: 307347 - DNA, 25 bp, Artificial
  Probe
tcaatcacttagcagcttgctgctc

SEQ ID NO: 307348 - DNA, 25 bp, Artificial
  Probe
gctctgtgctgctgggatcatccac

SEQ ID NO: 307349 - DNA, 25 bp, Artificial
  Probe
agctgcatgagtaaatcctggtggg

SEQ ID NO: 307350 - DNA, 25 bp, Artificial
  Probe
tccaattgctgaacgcctgggatgc

SEQ ID NO: 307351 - DNA, 25 bp, Artificial
  Probe
attgataacatattgcgcaacaagc

SEQ ID NO: 307352 - DNA, 25 bp, Artificial
  Probe
ctctgaggtctctgctgttgctacc

SEQ ID NO: 307353 - DNA, 25 bp, Artificial
  Probe
tgaacgcctgggatgcacactacct

SEQ ID NO: 307354 - DNA, 25 bp, Artificial
  Probe
ctaagatgacatcacatgtggtaaa

SEQ ID NO: 307355 - DNA, 25 bp, Artificial
  Probe
cactacctcagctggctgtggcatg

SEQ ID NO: 307356 - DNA, 25 bp, Artificial
  Probe
ttgctgaacgcctgggatgcacact

SEQ ID NO: 307357 - DNA, 25 bp, Artificial
  Probe
acatattgcgcaacaagccctacag

SEQ ID NO: 307358 - DNA, 25 bp, Artificial
  Probe
catgagtaaatcctggtgggtaggc

SEQ ID NO: 307359 - DNA, 25 bp, Artificial
  Probe
ttctagagcttcactgaagtgctac

SEQ ID NO: 307360 - DNA, 25 bp, Artificial
  Probe
ctctagtgtcccaggattctctgag

SEQ ID NO: 307361 - DNA, 25 bp, Artificial
  Probe
ccattcaggtcctccctaagatgac

SEQ ID NO: 307362 - DNA, 25 bp, Artificial
  Probe
aaggactatagatcctaaggcaatg

SEQ ID NO: 307363 - DNA, 25 bp, Artificial
  Probe
aaccttggtgccattcaggtcctcc

SEQ ID NO: 307364 - DNA, 25 bp, Artificial
  Probe
gggatcatccactcctgaacaactc

SEQ ID NO: 307365 - DNA, 25 bp, Artificial
  Probe
ttttcaatcacttagcagcttgctg

SEQ ID NO: 307366 - DNA, 25 bp, Artificial
  Probe
aggcggtgcagaacggccttaccag

SEQ ID NO: 307367 - DNA, 25 bp, Artificial
  Probe
cttaagctgcatgagtaaatcctgg

SEQ ID NO: 307368 - DNA, 25 bp, Artificial
  Probe
ctgggatgcacactacctcagctgg

SEQ ID NO: 307369 - DNA, 25 bp, Artificial
  Probe
gccagagctgttccacaagatagga

SEQ ID NO: 307370 - DNA, 25 bp, Artificial
  Probe
aggcagagaccgagagaggcctttc

SEQ ID NO: 307371 - DNA, 25 bp, Artificial
  Probe
ggtcgccgccagcaagccaaactga

SEQ ID NO: 307372 - DNA, 25 bp, Artificial
  Probe
agcttccctggagaggctgcagctg

SEQ ID NO: 307373 - DNA, 25 bp, Artificial
  Probe
ggagtaggtgccatgacctggtccc

SEQ ID NO: 307374 - DNA, 25 bp, Artificial
  Probe
ctctgtgaaaagacacgctgatcta

SEQ ID NO: 307375 - DNA, 25 bp, Artificial
  Probe
caggatttcccctctgtgaaaagac

SEQ ID NO: 307376 - DNA, 25 bp, Artificial
  Probe
ctgtgcgggccatgacccatgtcat

SEQ ID NO: 307377 - DNA, 25 bp, Artificial
  Probe
aacattggagcaatacaggtccttc

SEQ ID NO: 307378 - DNA, 25 bp, Artificial
  Probe
catgtcatcaaccaagggatggcca

SEQ ID NO: 307379 - DNA, 25 bp, Artificial
  Probe
atggccatgtactggggcacatcac

SEQ ID NO: 307380 - DNA, 25 bp, Artificial
  Probe
tcaaccaagggatggccatgtactg

SEQ ID NO: 307381 - DNA, 25 bp, Artificial
  Probe
attgtcgtcctccatcgtccacgag

SEQ ID NO: 307382 - DNA, 25 bp, Artificial
  Probe
aaggactgaaagcttccctggagag

SEQ ID NO: 307383 - DNA, 25 bp, Artificial
  Probe
ccatgtatccggaatcaaccacggg

SEQ ID NO: 307384 - DNA, 25 bp, Artificial
  Probe
tactccagagcctctctgaagggct

SEQ ID NO: 307385 - DNA, 25 bp, Artificial
  Probe
ggtgccatgacctggtcccctctgg

SEQ ID NO: 307386 - DNA, 25 bp, Artificial
  Probe
ctccagagcctctctgaagggctac

SEQ ID NO: 307387 - DNA, 25 bp, Artificial
  Probe
gaacctgccggagcaagcgggattc

SEQ ID NO: 307388 - DNA, 25 bp, Artificial
  Probe
caggtccttccaaaattgtcgtcct

SEQ ID NO: 307389 - DNA, 25 bp, Artificial
  Probe
aggcctactcggtggctcggcagtt

SEQ ID NO: 307390 - DNA, 25 bp, Artificial
  Probe
ggtggagacggtccagccttgtcat

SEQ ID NO: 307391 - DNA, 25 bp, Artificial
  Probe
tcccccgggatgatctacagtactc

SEQ ID NO: 307392 - DNA, 25 bp, Artificial
  Probe
actgtgcgggccatgacccatgtca

SEQ ID NO: 307393 - DNA, 25 bp, Artificial
  Probe
acgctgatctagataagtgaggccg

SEQ ID NO: 307394 - DNA, 25 bp, Artificial
  Probe
cgcccatctgcgagcaagcggaata

SEQ ID NO: 307395 - DNA, 25 bp, Artificial
  Probe
gtggagacggtccagccttgtcatc

SEQ ID NO: 307396 - DNA, 25 bp, Artificial
  Probe
gaacatgggtgaccttcggaggcca

SEQ ID NO: 307397 - DNA, 25 bp, Artificial
  Probe
ggctcggcagttcaacctgatcccg

SEQ ID NO: 307398 - DNA, 25 bp, Artificial
  Probe
ttccacaagataggagtaggtgcca

SEQ ID NO: 307399 - DNA, 25 bp, Artificial
  Probe
cttcgggtctcctgcctggggcttg

SEQ ID NO: 307400 - DNA, 25 bp, Artificial
  Probe
aataccacatgttccagagggagaa

SEQ ID NO: 307401 - DNA, 25 bp, Artificial
  Probe
cgcgggcgtcccacgaggtaaagat

SEQ ID NO: 307402 - DNA, 25 bp, Artificial
  Probe
aaattgtcgtcctccatcgtccacg

SEQ ID NO: 307403 - DNA, 25 bp, Artificial
  Probe
aagacacgctgatctagataagtga

SEQ ID NO: 307404 - DNA, 25 bp, Artificial
  Probe
ccggaatcaaccacggggtctccag

SEQ ID NO: 307405 - DNA, 25 bp, Artificial
  Probe
gaacgagggcgtcagctccgtgctc

SEQ ID NO: 307406 - DNA, 25 bp, Artificial
  Probe
gtcccacgaggtaaagatgctgcgg

SEQ ID NO: 307407 - DNA, 25 bp, Artificial
  Probe
cacataatcgaaggactgaaagctt

SEQ ID NO: 307408 - DNA, 25 bp, Artificial
  Probe
tccatcgtccacgagatcgacagca

SEQ ID NO: 307409 - DNA, 25 bp, Artificial
  Probe
tcatagccaataataggatgctagg

SEQ ID NO: 307410 - DNA, 25 bp, Artificial
  Probe
catcaacctgttcgatacggcggag

SEQ ID NO: 307411 - DNA, 25 bp, Artificial
  Probe
tgcagaacaacttatggagaacatt

SEQ ID NO: 307412 - DNA, 25 bp, Artificial
  Probe
ttgcagagcgcctaggctgcaccct

SEQ ID NO: 307413 - DNA, 25 bp, Artificial
  Probe
aacctgccggagcaagcgggattcg

SEQ ID NO: 307414 - DNA, 25 bp, Artificial
  Probe
ctggagctccatggagatcatggag

SEQ ID NO: 307415 - DNA, 25 bp, Artificial
  Probe
gtagcacactgaatggttcaaatct

SEQ ID NO: 307416 - DNA, 25 bp, Artificial
  Probe
aaagctaacttgtatgccagtattt

SEQ ID NO: 307417 - DNA, 25 bp, Artificial
  Probe
tttaaaagctaacttgtatgccagt

SEQ ID NO: 307418 - DNA, 25 bp, Artificial
  Probe
tgtgtgtctataactcagtttccat

SEQ ID NO: 307419 - DNA, 25 bp, Artificial
  Probe
tctttttcctaagtgagactttgtg

SEQ ID NO: 307420 - DNA, 25 bp, Artificial
  Probe
ttacagaatttgacctaagagccta

SEQ ID NO: 307421 - DNA, 25 bp, Artificial
  Probe
gtacagtagatctttttcctaagtg

SEQ ID NO: 307422 - DNA, 25 bp, Artificial
  Probe
agttctatgttaaaccagtacagta

SEQ ID NO: 307423 - DNA, 25 bp, Artificial
  Probe
ctttaaaagctaacttgtatgccag

SEQ ID NO: 307424 - DNA, 25 bp, Artificial
  Probe
tacatgtgtgtctataactcagttt

SEQ ID NO: 307425 - DNA, 25 bp, Artificial
  Probe
agagttctatgttaaaccagtacag

SEQ ID NO: 307426 - DNA, 25 bp, Artificial
  Probe
tacagtagatctttttcctaagtga

SEQ ID NO: 307427 - DNA, 25 bp, Artificial
  Probe
tggttcaaatctatacatgtgtgtc

SEQ ID NO: 307428 - DNA, 25 bp, Artificial
  Probe
aaacttacagaatttgacctaagag

SEQ ID NO: 307429 - DNA, 25 bp, Artificial
  Probe
acatgtagcacactgaatggttcaa

SEQ ID NO: 307430 - DNA, 25 bp, Artificial
  Probe
acttacagaatttgacctaagagcc

SEQ ID NO: 307431 - DNA, 25 bp, Artificial
  Probe
ctttttcctaagtgagactttgtgg

SEQ ID NO: 307432 - DNA, 25 bp, Artificial
  Probe
gcacactgaatggttcaaatctata

SEQ ID NO: 307433 - DNA, 25 bp, Artificial
  Probe
agaatttgacctaagagcctataat

SEQ ID NO: 307434 - DNA, 25 bp, Artificial
  Probe
gtgtgtctataactcagtttccatt

SEQ ID NO: 307435 - DNA, 25 bp, Artificial
  Probe
ctatgttaaaccagtacagtagatc

SEQ ID NO: 307436 - DNA, 25 bp, Artificial
  Probe
tgttaaaccagtacagtagatcttt

SEQ ID NO: 307437 - DNA, 25 bp, Artificial
  Probe
gaatttgacctaagagcctataatt

SEQ ID NO: 307438 - DNA, 25 bp, Artificial
  Probe
ggttcaaatctatacatgtgtgtct

SEQ ID NO: 307439 - DNA, 25 bp, Artificial
  Probe
atgtagcacactgaatggttcaaat

SEQ ID NO: 307440 - DNA, 25 bp, Artificial
  Probe
ttcctaagtgagactttgtggttac

SEQ ID NO: 307441 - DNA, 25 bp, Artificial
  Probe
gtagatctttttcctaagtgagact

SEQ ID NO: 307442 - DNA, 25 bp, Artificial
  Probe
cctaagtgagactttgtggttactg

SEQ ID NO: 307443 - DNA, 25 bp, Artificial
  Probe
gctcagaaatttcaacttagagaaa

SEQ ID NO: 307444 - DNA, 25 bp, Artificial
  Probe
ttgctcagaaatttcaacttagaga

SEQ ID NO: 307445 - DNA, 25 bp, Artificial
  Probe
tatacatgtgtgtctataactcagt

SEQ ID NO: 307446 - DNA, 25 bp, Artificial
  Probe
agatctttttcctaagtgagacttt

SEQ ID NO: 307447 - DNA, 25 bp, Artificial
  Probe
tttgctcagaaatttcaacttagag

SEQ ID NO: 307448 - DNA, 25 bp, Artificial
  Probe
acagtagatctttttcctaagtgag

SEQ ID NO: 307449 - DNA, 25 bp, Artificial
  Probe
acatgtgtgtctataactcagtttc

SEQ ID NO: 307450 - DNA, 25 bp, Artificial
  Probe
cttacagaatttgacctaagagcct

SEQ ID NO: 307451 - DNA, 25 bp, Artificial
  Probe
gttaaaccagtacagtagatctttt

SEQ ID NO: 307452 - DNA, 25 bp, Artificial
  Probe
tacagaatttgacctaagagcctat

SEQ ID NO: 307453 - DNA, 25 bp, Artificial
  Probe
tagatctttttcctaagtgagactt

SEQ ID NO: 307454 - DNA, 25 bp, Artificial
  Probe
tgtagcacactgaatggttcaaatc

SEQ ID NO: 307455 - DNA, 25 bp, Artificial
  Probe
ctatacatgtgtgtctataactcag

SEQ ID NO: 307456 - DNA, 25 bp, Artificial
  Probe
agctaacttgtatgccagtattttt

SEQ ID NO: 307457 - DNA, 25 bp, Artificial
  Probe
gcaatgttttcatgtagcatatact

SEQ ID NO: 307458 - DNA, 25 bp, Artificial
  Probe
gttcaaatctatacatgtgtgtcta

SEQ ID NO: 307459 - DNA, 25 bp, Artificial
  Probe
agaactagagttctatgttaaacca

SEQ ID NO: 307460 - DNA, 25 bp, Artificial
  Probe
tgctcagaaatttcaacttagagaa

SEQ ID NO: 307461 - DNA, 25 bp, Artificial
  Probe
ttctgtgctgttgtaggtggcctag

SEQ ID NO: 307462 - DNA, 25 bp, Artificial
  Probe
ggctatatttccaatggagagctct

SEQ ID NO: 307463 - DNA, 25 bp, Artificial
  Probe
cggctatatttccaatggagagctc

SEQ ID NO: 307464 - DNA, 25 bp, Artificial
  Probe
agacggctatatttccaatggagag

SEQ ID NO: 307465 - DNA, 25 bp, Artificial
  Probe
ctatatttccaatggagagctcttc

SEQ ID NO: 307466 - DNA, 25 bp, Artificial
  Probe
ggcctagatatccacaaaaagatgg

SEQ ID NO: 307467 - DNA, 25 bp, Artificial
  Probe
tggcctagatatccacaaaaagatg

SEQ ID NO: 307468 - DNA, 25 bp, Artificial
  Probe
gctatatttccaatggagagctctt

SEQ ID NO: 307469 - DNA, 25 bp, Artificial
  Probe
aacctgaaagatacgcagttacagc

SEQ ID NO: 307470 - DNA, 25 bp, Artificial
  Probe
agatacgcagttacagcagattgta

SEQ ID NO: 307471 - DNA, 25 bp, Artificial
  Probe
acggctatatttccaatggagagct

SEQ ID NO: 307472 - DNA, 25 bp, Artificial
  Probe
atacgcagttacagcagattgtaga

SEQ ID NO: 307473 - DNA, 25 bp, Artificial
  Probe
tgtaggtggcctagatatccacaaa

SEQ ID NO: 307474 - DNA, 25 bp, Artificial
  Probe
taaagacggctatatttccaatgga

SEQ ID NO: 307475 - DNA, 25 bp, Artificial
  Probe
gcagttacagcagattgtagacaaa

SEQ ID NO: 307476 - DNA, 25 bp, Artificial
  Probe
atatttccaatggagagctcttcca

SEQ ID NO: 307477 - DNA, 25 bp, Artificial
  Probe
tctgtgctgttgtaggtggcctaga

SEQ ID NO: 307478 - DNA, 25 bp, Artificial
  Probe
ggtggcctagatatccacaaaaaga

SEQ ID NO: 307479 - DNA, 25 bp, Artificial
  Probe
ctgtgctgttgtaggtggcctagat

SEQ ID NO: 307480 - DNA, 25 bp, Artificial
  Probe
acaacctgaaagatacgcagttaca

SEQ ID NO: 307481 - DNA, 25 bp, Artificial
  Probe
aagacggctatatttccaatggaga

SEQ ID NO: 307482 - DNA, 25 bp, Artificial
  Probe
cagttacagcagattgtagacaaaa

SEQ ID NO: 307483 - DNA, 25 bp, Artificial
  Probe
agttctgtgctgttgtaggtggcct

SEQ ID NO: 307484 - DNA, 25 bp, Artificial
  Probe
tgctgttgtaggtggcctagatatc

SEQ ID NO: 307485 - DNA, 25 bp, Artificial
  Probe
gcctagatatccacaaaaagatggt

SEQ ID NO: 307486 - DNA, 25 bp, Artificial
  Probe
atggtgggcaacaacctgaaagata

SEQ ID NO: 307487 - DNA, 25 bp, Artificial
  Probe
gttctgtgctgttgtaggtggccta

SEQ ID NO: 307488 - DNA, 25 bp, Artificial
  Probe
taggtggcctagatatccacaaaaa

SEQ ID NO: 307489 - DNA, 25 bp, Artificial
  Probe
tggtgggcaacaacctgaaagatac

SEQ ID NO: 307490 - DNA, 25 bp, Artificial
  Probe
caacaacctgaaagatacgcagtta

SEQ ID NO: 307491 - DNA, 25 bp, Artificial
  Probe
cgcagttacagcagattgtagacaa

SEQ ID NO: 307492 - DNA, 25 bp, Artificial
  Probe
ttgtaggtggcctagatatccacaa

SEQ ID NO: 307493 - DNA, 25 bp, Artificial
  Probe
ccgtatctacgacatggataaagac

SEQ ID NO: 307494 - DNA, 25 bp, Artificial
  Probe
acgcagttacagcagattgtagaca

SEQ ID NO: 307495 - DNA, 25 bp, Artificial
  Probe
ggcaacaacctgaaagatacgcagt

SEQ ID NO: 307496 - DNA, 25 bp, Artificial
  Probe
tgggcaacaacctgaaagatacgca

SEQ ID NO: 307497 - DNA, 25 bp, Artificial
  Probe
gtgggcaacaacctgaaagatacgc

SEQ ID NO: 307498 - DNA, 25 bp, Artificial
  Probe
gggcaacaacctgaaagatacgcag

SEQ ID NO: 307499 - DNA, 25 bp, Artificial
  Probe
caacctgaaagatacgcagttacag

SEQ ID NO: 307500 - DNA, 25 bp, Artificial
  Probe
cctagatatccacaaaaagatggtg

SEQ ID NO: 307501 - DNA, 25 bp, Artificial
  Probe
ctagatatccacaaaaagatggtgg

SEQ ID NO: 307502 - DNA, 25 bp, Artificial
  Probe
aggtggcctagatatccacaaaaag

SEQ ID NO: 307503 - DNA, 25 bp, Artificial
  Probe
tatatttccaatggagagctcttcc

SEQ ID NO: 307504 - DNA, 25 bp, Artificial
  Probe
gatacgcagttacagcagattgtag

SEQ ID NO: 307505 - DNA, 25 bp, Artificial
  Probe
aagatacgcagttacagcagattgt

SEQ ID NO: 307506 - DNA, 25 bp, Artificial
  Probe
cgtatctacgacatggataaagacg

SEQ ID NO: 307507 - DNA, 25 bp, Artificial
  Probe
cctgaacacaatggatgagttctgt

SEQ ID NO: 307508 - DNA, 25 bp, Artificial
  Probe
tgtgtcacgccgtggagcacggttt

SEQ ID NO: 307509 - DNA, 25 bp, Artificial
  Probe
gaatgcagtccgaagtcacagagag

SEQ ID NO: 307510 - DNA, 25 bp, Artificial
  Probe
cactctcaagggagcagcaacaagt

SEQ ID NO: 307511 - DNA, 25 bp, Artificial
  Probe
cagaaggtctggtacagagacttca

SEQ ID NO: 307512 - DNA, 25 bp, Artificial
  Probe
attacctgtgtcacgccgtggagca

SEQ ID NO: 307513 - DNA, 25 bp, Artificial
  Probe
gaagtcacagagagccttggtatat

SEQ ID NO: 307514 - DNA, 25 bp, Artificial
  Probe
gtcatcgatacagaacatttggagg

SEQ ID NO: 307515 - DNA, 25 bp, Artificial
  Probe
agccttggtatattggcaatttcag

SEQ ID NO: 307516 - DNA, 25 bp, Artificial
  Probe
acatttggaggaacttcttcataaa

SEQ ID NO: 307517 - DNA, 25 bp, Artificial
  Probe
catcaggacagaacaggggctcctg

SEQ ID NO: 307518 - DNA, 25 bp, Artificial
  Probe
gagatggctctaagaccaaagaaat

SEQ ID NO: 307519 - DNA, 25 bp, Artificial
  Probe
gcacatgcaggagagcaagaaaggt

SEQ ID NO: 307520 - DNA, 25 bp, Artificial
  Probe
ggggcactctcaagggagcagcaac

SEQ ID NO: 307521 - DNA, 25 bp, Artificial
  Probe
ccggggcactctcaagggagcagca

SEQ ID NO: 307522 - DNA, 25 bp, Artificial
  Probe
agtggaagcacatgcaggagagcaa

SEQ ID NO: 307523 - DNA, 25 bp, Artificial
  Probe
agcatgacgcccagccagaaggtct

SEQ ID NO: 307524 - DNA, 25 bp, Artificial
  Probe
gaaatgtccagtagcatgacgccca

SEQ ID NO: 307525 - DNA, 25 bp, Artificial
  Probe
ggcacagtcttgaagagagaatcat

SEQ ID NO: 307526 - DNA, 25 bp, Artificial
  Probe
ctggaagtcatcgatacagaacatt

SEQ ID NO: 307527 - DNA, 25 bp, Artificial
  Probe
ggtctggtacagagacttcatgcag

SEQ ID NO: 307528 - DNA, 25 bp, Artificial
  Probe
cttcttaaggtgaccctggaagtca

SEQ ID NO: 307529 - DNA, 25 bp, Artificial
  Probe
ggaggaacttcttcataaagatgac

SEQ ID NO: 307530 - DNA, 25 bp, Artificial
  Probe
cccaacctgaacacaatggatgagt

SEQ ID NO: 307531 - DNA, 25 bp, Artificial
  Probe
cttcttcataaagatgacgatggag

SEQ ID NO: 307532 - DNA, 25 bp, Artificial
  Probe
tgggtgatcatatcatcaggacaga

SEQ ID NO: 307533 - DNA, 25 bp, Artificial
  Probe
aggacccacgagtttgagagggcac

SEQ ID NO: 307534 - DNA, 25 bp, Artificial
  Probe
ctctaagaccaaagaaatgtccagt

SEQ ID NO: 307535 - DNA, 25 bp, Artificial
  Probe
accaaagaaatgtccagtagcatga

SEQ ID NO: 307536 - DNA, 25 bp, Artificial
  Probe
cttggaatgcagtccgaagtcacag

SEQ ID NO: 307537 - DNA, 25 bp, Artificial
  Probe
tgacgcccagccagaaggtctggta

SEQ ID NO: 307538 - DNA, 25 bp, Artificial
  Probe
cacaatggatgagttctgtgaacaa

SEQ ID NO: 307539 - DNA, 25 bp, Artificial
  Probe
tagaaacaggaggacccacgagttt

SEQ ID NO: 307540 - DNA, 25 bp, Artificial
  Probe
ttaaggtgaccctggaagtcatcga

SEQ ID NO: 307541 - DNA, 25 bp, Artificial
  Probe
cgtggagcacggtttcatgcaaact

SEQ ID NO: 307542 - DNA, 25 bp, Artificial
  Probe
gagacttcatgcagctcatcaacca

SEQ ID NO: 307543 - DNA, 25 bp, Artificial
  Probe
acaggaggacccacgagtttgagag

SEQ ID NO: 307544 - DNA, 25 bp, Artificial
  Probe
aggattcaggcaattacctgtgtca

SEQ ID NO: 307545 - DNA, 25 bp, Artificial
  Probe
gcacggtttcatgcaaactcttctt

SEQ ID NO: 307546 - DNA, 25 bp, Artificial
  Probe
tcacagagagccttggtatattggc

SEQ ID NO: 307547 - DNA, 25 bp, Artificial
  Probe
ctcaagggagcagcaacaagtggaa

SEQ ID NO: 307548 - DNA, 25 bp, Artificial
  Probe
tccagtagcatgacgcccagccaga

SEQ ID NO: 307549 - DNA, 25 bp, Artificial
  Probe
cgtagtctgcagaagaaggattcag

SEQ ID NO: 307550 - DNA, 25 bp, Artificial
  Probe
agaacaggggctcctgcttcgtagt

SEQ ID NO: 307551 - DNA, 25 bp, Artificial
  Probe
aatagtagcacattcttggaatgca

SEQ ID NO: 307552 - DNA, 25 bp, Artificial
  Probe
atacagaacatttggaggaacttct

SEQ ID NO: 307553 - DNA, 25 bp, Artificial
  Probe
tggcactggccgtcgttttacaacg

SEQ ID NO: 307554 - DNA, 25 bp, Artificial
  Probe
tttagcttggcactggccgtcgttt

SEQ ID NO: 307555 - DNA, 25 bp, Artificial
  Probe
acaccattgaaaatgtcaaggcaaa

SEQ ID NO: 307556 - DNA, 25 bp, Artificial
  Probe
aagcggccgcaagcttattcccttt

SEQ ID NO: 307557 - DNA, 25 bp, Artificial
  Probe
ggaagcggccgcaagcttattccct

SEQ ID NO: 307558 - DNA, 25 bp, Artificial
  Probe
gttaacaagtttcattgcactttga

SEQ ID NO: 307559 - DNA, 25 bp, Artificial
  Probe
cattgcactttgaataaagttcttg

SEQ ID NO: 307560 - DNA, 25 bp, Artificial
  Probe
ggggcatgcagatctttgtgaagac

SEQ ID NO: 307561 - DNA, 25 bp, Artificial
  Probe
ggcactggccgtcgttttacaacgt

SEQ ID NO: 307562 - DNA, 25 bp, Artificial
  Probe
agcccagtgacaccattgaaaatgt

SEQ ID NO: 307563 - DNA, 25 bp, Artificial
  Probe
aagatccaggacaaggagggcatcc

SEQ ID NO: 307564 - DNA, 25 bp, Artificial
  Probe
ttagcttggcactggccgtcgtttt

SEQ ID NO: 307565 - DNA, 25 bp, Artificial
  Probe
gcaaagatccaggacaaggagggca

SEQ ID NO: 307566 - DNA, 25 bp, Artificial
  Probe
ggcatgcagatctttgtgaagaccc

SEQ ID NO: 307567 - DNA, 25 bp, Artificial
  Probe
cagtgacaccattgaaaatgtcaag

SEQ ID NO: 307568 - DNA, 25 bp, Artificial
  Probe
gccgcaagcttattccctttagtga

SEQ ID NO: 307569 - DNA, 25 bp, Artificial
  Probe
agcggccgcaagcttattcccttta

SEQ ID NO: 307570 - DNA, 25 bp, Artificial
  Probe
gaagcggccgcaagcttattccctt

SEQ ID NO: 307571 - DNA, 25 bp, Artificial
  Probe
gctgttaacaagtttcattgcactt

SEQ ID NO: 307572 - DNA, 25 bp, Artificial
  Probe
attgcactttgaataaagttcttgc

SEQ ID NO: 307573 - DNA, 25 bp, Artificial
  Probe
cggccgcaagcttattccctttagt

SEQ ID NO: 307574 - DNA, 25 bp, Artificial
  Probe
tgttaacaagtttcattgcactttg

SEQ ID NO: 307575 - DNA, 25 bp, Artificial
  Probe
cccctgaccagcagaggctgatctt

SEQ ID NO: 307576 - DNA, 25 bp, Artificial
  Probe
cccagtgacaccattgaaaatgtca

SEQ ID NO: 307577 - DNA, 25 bp, Artificial
  Probe
gcccagtgacaccattgaaaatgtc

SEQ ID NO: 307578 - DNA, 25 bp, Artificial
  Probe
gacaccattgaaaatgtcaaggcaa

SEQ ID NO: 307579 - DNA, 25 bp, Artificial
  Probe
ggccgcaagcttattccctttagtg

SEQ ID NO: 307580 - DNA, 25 bp, Artificial
  Probe
caaagatccaggacaaggagggcat

SEQ ID NO: 307581 - DNA, 25 bp, Artificial
  Probe
ccagtgacaccattgaaaatgtcaa

SEQ ID NO: 307582 - DNA, 25 bp, Artificial
  Probe
catgcagatctttgtgaagaccctg

SEQ ID NO: 307583 - DNA, 25 bp, Artificial
  Probe
gtgacaccattgaaaatgtcaaggc

SEQ ID NO: 307584 - DNA, 25 bp, Artificial
  Probe
ttttagcttggcactggccgtcgtt

SEQ ID NO: 307585 - DNA, 25 bp, Artificial
  Probe
atgcagatctttgtgaagaccctga

SEQ ID NO: 307586 - DNA, 25 bp, Artificial
  Probe
atgtcaaggcaaagatccaggacaa

SEQ ID NO: 307587 - DNA, 25 bp, Artificial
  Probe
gcatgcagatctttgtgaagaccct

SEQ ID NO: 307588 - DNA, 25 bp, Artificial
  Probe
agtgacaccattgaaaatgtcaagg

SEQ ID NO: 307589 - DNA, 25 bp, Artificial
  Probe
cctgaccagcagaggctgatctttg

SEQ ID NO: 307590 - DNA, 25 bp, Artificial
  Probe
gggcatgcagatctttgtgaagacc

SEQ ID NO: 307591 - DNA, 25 bp, Artificial
  Probe
gcggccgcaagcttattccctttag

SEQ ID NO: 307592 - DNA, 25 bp, Artificial
  Probe
gagcccagtgacaccattgaaaatg

SEQ ID NO: 307593 - DNA, 25 bp, Artificial
  Probe
ccgcaagcttattccctttagtgag

SEQ ID NO: 307594 - DNA, 25 bp, Artificial
  Probe
tgtcaaggcaaagatccaggacaag

SEQ ID NO: 307595 - DNA, 25 bp, Artificial
  Probe
taggggtacttctgccagccattcc

SEQ ID NO: 307596 - DNA, 25 bp, Artificial
  Probe
cccagcctgggttgctggagcatca

SEQ ID NO: 307597 - DNA, 25 bp, Artificial
  Probe
tctgtcctctttagccctcagggac

SEQ ID NO: 307598 - DNA, 25 bp, Artificial
  Probe
tagccctcagggacccctgatacag

SEQ ID NO: 307599 - DNA, 25 bp, Artificial
  Probe
ggcatggctctcttgtacagtgtac

SEQ ID NO: 307600 - DNA, 25 bp, Artificial
  Probe
agggacccctgatacagaggggaca

SEQ ID NO: 307601 - DNA, 25 bp, Artificial
  Probe
agcctgggttgctggagcatcattg

SEQ ID NO: 307602 - DNA, 25 bp, Artificial
  Probe
gagagctgggcatggctctcttgta

SEQ ID NO: 307603 - DNA, 25 bp, Artificial
  Probe
agaatgggacttcatgtcctccctg

SEQ ID NO: 307604 - DNA, 25 bp, Artificial
  Probe
cataggggtacttctgccagccatt

SEQ ID NO: 307605 - DNA, 25 bp, Artificial
  Probe
gttgctggagcatcattggggtcat

SEQ ID NO: 307606 - DNA, 25 bp, Artificial
  Probe
gtgagtttggcctggacagacagcc

SEQ ID NO: 307607 - DNA, 25 bp, Artificial
  Probe
ttctgcatggacatttgagagccag

SEQ ID NO: 307608 - DNA, 25 bp, Artificial
  Probe
gagagccagtatttctctgtcctct

SEQ ID NO: 307609 - DNA, 25 bp, Artificial
  Probe
tgagagctgggcatggctctcttgt

SEQ ID NO: 307610 - DNA, 25 bp, Artificial
  Probe
gacttcatgtcctccctgcgtttct

SEQ ID NO: 307611 - DNA, 25 bp, Artificial
  Probe
atggctttctgcatggacatttgag

SEQ ID NO: 307612 - DNA, 25 bp, Artificial
  Probe
catttgagagccagtatttctctgt

SEQ ID NO: 307613 - DNA, 25 bp, Artificial
  Probe
cagcctgggttgctggagcatcatt

SEQ ID NO: 307614 - DNA, 25 bp, Artificial
  Probe
agccaagatggctttctgcatggac

SEQ ID NO: 307615 - DNA, 25 bp, Artificial
  Probe
tcattggggtcataactgtacccct

SEQ ID NO: 307616 - DNA, 25 bp, Artificial
  Probe
ctcttgtacagtgtacattggaatt

SEQ ID NO: 307617 - DNA, 25 bp, Artificial
  Probe
taccagccaagatggctttctgcat

SEQ ID NO: 307618 - DNA, 25 bp, Artificial
  Probe
tcctctctcacatttgtggagaaca

SEQ ID NO: 307619 - DNA, 25 bp, Artificial
  Probe
tctttagccctcagggacccctgat

SEQ ID NO: 307620 - DNA, 25 bp, Artificial
  Probe
agatggctttctgcatggacatttg

SEQ ID NO: 307621 - DNA, 25 bp, Artificial
  Probe
ctgcatggacatttgagagccagta

SEQ ID NO: 307622 - DNA, 25 bp, Artificial
  Probe
tcagggacccctgatacagagggga

SEQ ID NO: 307623 - DNA, 25 bp, Artificial
  Probe
tacatctggacagaaaggactctgg

SEQ ID NO: 307624 - DNA, 25 bp, Artificial
  Probe
cagaaaggactctgggcacagacac

SEQ ID NO: 307625 - DNA, 25 bp, Artificial
  Probe
gccaagatggctttctgcatggaca

SEQ ID NO: 307626 - DNA, 25 bp, Artificial
  Probe
gctgggcatggctctcttgtacagt

SEQ ID NO: 307627 - DNA, 25 bp, Artificial
  Probe
ctttcctctctcacatttgtggaga

SEQ ID NO: 307628 - DNA, 25 bp, Artificial
  Probe
ggacccctgatacagaggggacaga

SEQ ID NO: 307629 - DNA, 25 bp, Artificial
  Probe
gcatcattggggtcataactgtacc

SEQ ID NO: 307630 - DNA, 25 bp, Artificial
  Probe
ttctctgtcctctttagccctcagg

SEQ ID NO: 307631 - DNA, 25 bp, Artificial
  Probe
gccagtatttctctgtcctctttag

SEQ ID NO: 307632 - DNA, 25 bp, Artificial
  Probe
atggacatttgagagccagtatttc

SEQ ID NO: 307633 - DNA, 25 bp, Artificial
  Probe
cccctgatacagaggggacagagag

SEQ ID NO: 307634 - DNA, 25 bp, Artificial
  Probe
ctggagcatcattggggtcataact

SEQ ID NO: 307635 - DNA, 25 bp, Artificial
  Probe
gagccagtatttctctgtcctcttt

SEQ ID NO: 307636 - DNA, 25 bp, Artificial
  Probe
catggacatttgagagccagtattt

SEQ ID NO: 307637 - DNA, 25 bp, Artificial
  Probe
ccctaccagccaagatggctttctg

SEQ ID NO: 307638 - DNA, 25 bp, Artificial
  Probe
gggctacatctggacagaaaggact

SEQ ID NO: 307639 - DNA, 25 bp, Artificial
  Probe
ctcagggacccctgatacagagggg

SEQ ID NO: 307640 - DNA, 25 bp, Artificial
  Probe
tttggcctggacagacagccatggg

SEQ ID NO: 307641 - DNA, 25 bp, Artificial
  Probe
tgccttctccatatgaagtcaaggg

SEQ ID NO: 307642 - DNA, 25 bp, Artificial
  Probe
caacttgaagagatacctgaagtct

SEQ ID NO: 307643 - DNA, 25 bp, Artificial
  Probe
tcctgcaggaatactttgatggcaa

SEQ ID NO: 307644 - DNA, 25 bp, Artificial
  Probe
gagcggttcctgcaggaatactttg

SEQ ID NO: 307645 - DNA, 25 bp, Artificial
  Probe
gtgctgatcgagttttatgctcctt

SEQ ID NO: 307646 - DNA, 25 bp, Artificial
  Probe
ttgtcatgcaggaggagttctcgcg

SEQ ID NO: 307647 - DNA, 25 bp, Artificial
  Probe
agttctcgcgggatggcaaggctct

SEQ ID NO: 307648 - DNA, 25 bp, Artificial
  Probe
tttgatggcaacttgaagagatacc

SEQ ID NO: 307649 - DNA, 25 bp, Artificial
  Probe
acacaccaacgttgaatctctggtg

SEQ ID NO: 307650 - DNA, 25 bp, Artificial
  Probe
gcaaggctcttgagcggttcctgca

SEQ ID NO: 307651 - DNA, 25 bp, Artificial
  Probe
agtttgtcatgcaggaggagttctc

SEQ ID NO: 307652 - DNA, 25 bp, Artificial
  Probe
cggttcctgcaggaatactttgatg

SEQ ID NO: 307653 - DNA, 25 bp, Artificial
  Probe
gctcttgagcggttcctgcaggaat

SEQ ID NO: 307654 - DNA, 25 bp, Artificial
  Probe
ttgagcggttcctgcaggaatactt

SEQ ID NO: 307655 - DNA, 25 bp, Artificial
  Probe
aagacattccttgatgctggacaca

SEQ ID NO: 307656 - DNA, 25 bp, Artificial
  Probe
caaagacattccttgatgctggaca

SEQ ID NO: 307657 - DNA, 25 bp, Artificial
  Probe
ctaactactggagaaacagggtcat

SEQ ID NO: 307658 - DNA, 25 bp, Artificial
  Probe
gccttctccatatgaagtcaagggt

SEQ ID NO: 307659 - DNA, 25 bp, Artificial
  Probe
atgctgaagacaaggacgtgctgat

SEQ ID NO: 307660 - DNA, 25 bp, Artificial
  Probe
ctttgatggcaacttgaagagatac

SEQ ID NO: 307661 - DNA, 25 bp, Artificial
  Probe
gacaaggacgtgctgatcgagtttt

SEQ ID NO: 307662 - DNA, 25 bp, Artificial
  Probe
gtttgtcatgcaggaggagttctcg

SEQ ID NO: 307663 - DNA, 25 bp, Artificial
  Probe
caaggacgtgctgatcgagttttat

SEQ ID NO: 307664 - DNA, 25 bp, Artificial
  Probe
gttctcgcgggatggcaaggctctt

SEQ ID NO: 307665 - DNA, 25 bp, Artificial
  Probe
tgtgccttctccatatgaagtcaag

SEQ ID NO: 307666 - DNA, 25 bp, Artificial
  Probe
gacccaaatattgtcatagccaaga

SEQ ID NO: 307667 - DNA, 25 bp, Artificial
  Probe
ggacgtgctgatcgagttttatgct

SEQ ID NO: 307668 - DNA, 25 bp, Artificial
  Probe
aagacaaggacgtgctgatcgagtt

SEQ ID NO: 307669 - DNA, 25 bp, Artificial
  Probe
gatggcaaggctcttgagcggttcc

SEQ ID NO: 307670 - DNA, 25 bp, Artificial
  Probe
tctaactactggagaaacagggtca

SEQ ID NO: 307671 - DNA, 25 bp, Artificial
  Probe
aactactggagaaacagggtcatga

SEQ ID NO: 307672 - DNA, 25 bp, Artificial
  Probe
tgctgatcgagttttatgctccttg

SEQ ID NO: 307673 - DNA, 25 bp, Artificial
  Probe
tgatgtgccttctccatatgaagtc

SEQ ID NO: 307674 - DNA, 25 bp, Artificial
  Probe
agacccaaatattgtcatagccaag

SEQ ID NO: 307675 - DNA, 25 bp, Artificial
  Probe
ccttctccatatgaagtcaagggtt

SEQ ID NO: 307676 - DNA, 25 bp, Artificial
  Probe
atggcaaggctcttgagcggttcct

SEQ ID NO: 307677 - DNA, 25 bp, Artificial
  Probe
ctgcaggaatactttgatggcaact

SEQ ID NO: 307678 - DNA, 25 bp, Artificial
  Probe
tggcaaggctcttgagcggttcctg

SEQ ID NO: 307679 - DNA, 25 bp, Artificial
  Probe
gatgtgccttctccatatgaagtca

SEQ ID NO: 307680 - DNA, 25 bp, Artificial
  Probe
cccaaatattgtcatagccaagatg

SEQ ID NO: 307681 - DNA, 25 bp, Artificial
  Probe
atggatatactctgaatcctgttaa

SEQ ID NO: 307682 - DNA, 25 bp, Artificial
  Probe
caaatattgtcatagccaagatgga

SEQ ID NO: 307683 - DNA, 25 bp, Artificial
  Probe
tgaagacaaggacgtgctgatcgag

SEQ ID NO: 307684 - DNA, 25 bp, Artificial
  Probe
gttcctgcaggaatactttgatggc

SEQ ID NO: 307685 - DNA, 25 bp, Artificial
  Probe
aggacgtgctgatcgagttttatgc

SEQ ID NO: 307686 - DNA, 25 bp, Artificial
  Probe
ccaaatattgtcatagccaagatgg

SEQ ID NO: 307687 - DNA, 25 bp, Artificial
  Probe
tcttaaactaggtttggctctccaa

SEQ ID NO: 307688 - DNA, 25 bp, Artificial
  Probe
gatctagtcttacctctgggttttt

SEQ ID NO: 307689 - DNA, 25 bp, Artificial
  Probe
cccaccttgtgtgtggttagtacct

SEQ ID NO: 307690 - DNA, 25 bp, Artificial
  Probe
cttaaactaggtttggctctccaag

SEQ ID NO: 307691 - DNA, 25 bp, Artificial
  Probe
cccaatgtgacctggcttacactat

SEQ ID NO: 307692 - DNA, 25 bp, Artificial
  Probe
tacactatgcctagggtctctaatc

SEQ ID NO: 307693 - DNA, 25 bp, Artificial
  Probe
ccccaatgtgacctggcttacacta

SEQ ID NO: 307694 - DNA, 25 bp, Artificial
  Probe
ctatgcctagggtctctaatccctc

SEQ ID NO: 307695 - DNA, 25 bp, Artificial
  Probe
cctggcttacactatgcctagggtc

SEQ ID NO: 307696 - DNA, 25 bp, Artificial
  Probe
ccaccttgtgtgtggttagtacctt

SEQ ID NO: 307697 - DNA, 25 bp, Artificial
  Probe
gtgacctggcttacactatgcctag

SEQ ID NO: 307698 - DNA, 25 bp, Artificial
  Probe
tgacctggcttacactatgcctagg

SEQ ID NO: 307699 - DNA, 25 bp, Artificial
  Probe
tagggtctctaatccctcagcttct

SEQ ID NO: 307700 - DNA, 25 bp, Artificial
  Probe
gtctctgtgtggagcctccctacaa

SEQ ID NO: 307701 - DNA, 25 bp, Artificial
  Probe
ggtctctgtgtggagcctccctaca

SEQ ID NO: 307702 - DNA, 25 bp, Artificial
  Probe
tatgcctagggtctctaatccctca

SEQ ID NO: 307703 - DNA, 25 bp, Artificial
  Probe
ctgtgtggagcctccctacaacctt

SEQ ID NO: 307704 - DNA, 25 bp, Artificial
  Probe
tggtctctgtgtggagcctccctac

SEQ ID NO: 307705 - DNA, 25 bp, Artificial
  Probe
taggtttggctctccaagctctttt

SEQ ID NO: 307706 - DNA, 25 bp, Artificial
  Probe
gtggagcctccctacaacctttata

SEQ ID NO: 307707 - DNA, 25 bp, Artificial
  Probe
ccttgtgtgtggttagtaccttagg

SEQ ID NO: 307708 - DNA, 25 bp, Artificial
  Probe
ggctctccaagctcttttaaatggg

SEQ ID NO: 307709 - DNA, 25 bp, Artificial
  Probe
ttggctctccaagctcttttaaatg

SEQ ID NO: 307710 - DNA, 25 bp, Artificial
  Probe
actaggtttggctctccaagctctt

SEQ ID NO: 307711 - DNA, 25 bp, Artificial
  Probe
aggtttggctctccaagctctttta

SEQ ID NO: 307712 - DNA, 25 bp, Artificial
  Probe
ctagggtctctaatccctcagcttc

SEQ ID NO: 307713 - DNA, 25 bp, Artificial
  Probe
tatcttaaactaggtttggctctcc

SEQ ID NO: 307714 - DNA, 25 bp, Artificial
  Probe
tggctctccaagctcttttaaatgg

SEQ ID NO: 307715 - DNA, 25 bp, Artificial
  Probe
tctccaagctcttttaaatggggtc

SEQ ID NO: 307716 - DNA, 25 bp, Artificial
  Probe
gaggtcattataaacccctcgtcgg

SEQ ID NO: 307717 - DNA, 25 bp, Artificial
  Probe
ggtttggctctccaagctcttttaa

SEQ ID NO: 307718 - DNA, 25 bp, Artificial
  Probe
atgcctagggtctctaatccctcag

SEQ ID NO: 307719 - DNA, 25 bp, Artificial
  Probe
ttacactatgcctagggtctctaat

SEQ ID NO: 307720 - DNA, 25 bp, Artificial
  Probe
tttatcttaaactaggtttggctct

SEQ ID NO: 307721 - DNA, 25 bp, Artificial
  Probe
tggcttacactatgcctagggtctc

SEQ ID NO: 307722 - DNA, 25 bp, Artificial
  Probe
tctggtctctgtgtggagcctccct

SEQ ID NO: 307723 - DNA, 25 bp, Artificial
  Probe
ctggcttacactatgcctagggtct

SEQ ID NO: 307724 - DNA, 25 bp, Artificial
  Probe
gtttggctctccaagctcttttaaa

SEQ ID NO: 307725 - DNA, 25 bp, Artificial
  Probe
tccaagctcttttaaatggggtcga

SEQ ID NO: 307726 - DNA, 25 bp, Artificial
  Probe
gacctggcttacactatgcctaggg

SEQ ID NO: 307727 - DNA, 25 bp, Artificial
  Probe
cctagggtctctaatccctcagctt

SEQ ID NO: 307728 - DNA, 25 bp, Artificial
  Probe
ttaaactaggtttggctctccaagc

SEQ ID NO: 307729 - DNA, 25 bp, Artificial
  Probe
ctaggtttggctctccaagctcttt

SEQ ID NO: 307730 - DNA, 25 bp, Artificial
  Probe
atgtgacctggcttacactatgcct

SEQ ID NO: 307731 - DNA, 25 bp, Artificial
  Probe
atcttaaactaggtttggctctcca

SEQ ID NO: 307732 - DNA, 25 bp, Artificial
  Probe
gcacctttgggcttggttctgtttt

SEQ ID NO: 307733 - DNA, 25 bp, Artificial
  Probe
agttgccacctaccatagagccatc

SEQ ID NO: 307734 - DNA, 25 bp, Artificial
  Probe
ctcagtgaactggagcagctgcggc

SEQ ID NO: 307735 - DNA, 25 bp, Artificial
  Probe
tggcgagattcaacgacctcaggtt

SEQ ID NO: 307736 - DNA, 25 bp, Artificial
  Probe
atgatcagaccaagcccgggagttt

SEQ ID NO: 307737 - DNA, 25 bp, Artificial
  Probe
atcgctttcaaggtggtagcgctgg

SEQ ID NO: 307738 - DNA, 25 bp, Artificial
  Probe
cggccatgagggtcagcccgcatca

SEQ ID NO: 307739 - DNA, 25 bp, Artificial
  Probe
cagccagagcgacgtggtggaaacc

SEQ ID NO: 307740 - DNA, 25 bp, Artificial
  Probe
ccagccagagcgacgtggtggaaac

SEQ ID NO: 307741 - DNA, 25 bp, Artificial
  Probe
gttgccacctaccatagagccatca

SEQ ID NO: 307742 - DNA, 25 bp, Artificial
  Probe
ccgagaaccccgaagacatcggcag

SEQ ID NO: 307743 - DNA, 25 bp, Artificial
  Probe
tgaccagcctctcagcggaactttc

SEQ ID NO: 307744 - DNA, 25 bp, Artificial
  Probe
ctgtactacggcacctcggcaggct

SEQ ID NO: 307745 - DNA, 25 bp, Artificial
  Probe
cgacctcaggtttgtcggtcggagc

SEQ ID NO: 307746 - DNA, 25 bp, Artificial
  Probe
ttctcccggccgagccagtggcatg

SEQ ID NO: 307747 - DNA, 25 bp, Artificial
  Probe
ccaccgtggtcctatgaccagtctt

SEQ ID NO: 307748 - DNA, 25 bp, Artificial
  Probe
cagtacctggggtccatcacctctt

SEQ ID NO: 307749 - DNA, 25 bp, Artificial
  Probe
atgcaggatgccaggcagatccagc

SEQ ID NO: 307750 - DNA, 25 bp, Artificial
  Probe
cccatcgctttcaaggtggtagcgc

SEQ ID NO: 307751 - DNA, 25 bp, Artificial
  Probe
gcaatgacgaaaactactcggcgga

SEQ ID NO: 307752 - DNA, 25 bp, Artificial
  Probe
ctcggcggagctgagaaacgccacc

SEQ ID NO: 307753 - DNA, 25 bp, Artificial
  Probe
catcaaaatcacagtggacggcccc

SEQ ID NO: 307754 - DNA, 25 bp, Artificial
  Probe
ctcagcctcaaagtcagatgcagga

SEQ ID NO: 307755 - DNA, 25 bp, Artificial
  Probe
ggatgccaggcagatccagccgtcc

SEQ ID NO: 307756 - DNA, 25 bp, Artificial
  Probe
actactcggcggagctgagaaacgc

SEQ ID NO: 307757 - DNA, 25 bp, Artificial
  Probe
tgtactacggcacctcggcaggctc

SEQ ID NO: 307758 - DNA, 25 bp, Artificial
  Probe
tgtccttttccgagcggctcagtga

SEQ ID NO: 307759 - DNA, 25 bp, Artificial
  Probe
tttccgagcggctcagtgaactgga

SEQ ID NO: 307760 - DNA, 25 bp, Artificial
  Probe
ggccatgagggtcagcccgcatcac

SEQ ID NO: 307761 - DNA, 25 bp, Artificial
  Probe
ttccgagcggctcagtgaactggag

SEQ ID NO: 307762 - DNA, 25 bp, Artificial
  Probe
ctctggtcaccgtcatggcgggcaa

SEQ ID NO: 307763 - DNA, 25 bp, Artificial
  Probe
agtttgtccttttccgagcggctca

SEQ ID NO: 307764 - DNA, 25 bp, Artificial
  Probe
aactagatgatcagaccaagcccgg

SEQ ID NO: 307765 - DNA, 25 bp, Artificial
  Probe
gacgaaaactactcggcggagctga

SEQ ID NO: 307766 - DNA, 25 bp, Artificial
  Probe
taaccacgttgtttattccaaagag

SEQ ID NO: 307767 - DNA, 25 bp, Artificial
  Probe
gccaccgcggccatgaagaaccaag

SEQ ID NO: 307768 - DNA, 25 bp, Artificial
  Probe
tcactggcgctgcaacaagaccctg

SEQ ID NO: 307769 - DNA, 25 bp, Artificial
  Probe
ccatagagccatcaaaatcacagtg

SEQ ID NO: 307770 - DNA, 25 bp, Artificial
  Probe
ctgagaaacgccaccgcggccatga

SEQ ID NO: 307771 - DNA, 25 bp, Artificial
  Probe
gcctctcagcggaactttccagtcg

SEQ ID NO: 307772 - DNA, 25 bp, Artificial
  Probe
ccatgaagaaccaagtggcgagatt

SEQ ID NO: 307773 - DNA, 25 bp, Artificial
  Probe
ggggtccatcacctcttctgtgcac

SEQ ID NO: 307774 - DNA, 25 bp, Artificial
  Probe
cacgttgtttattccaaagagtgtg

SEQ ID NO: 307775 - DNA, 25 bp, Artificial
  Probe
gaactttccagtcgactctcaacag

SEQ ID NO: 307776 - DNA, 25 bp, Artificial
  Probe
acatcggcagaaactagatgatcag

SEQ ID NO: 307777 - DNA, 25 bp, Artificial
  Probe
gcgacgttccggatggcactctggt

SEQ ID NO: 307778 - DNA, 25 bp, Artificial
  Probe
aagacgcagcccatcctgtttggca

SEQ ID NO: 307779 - DNA, 25 bp, Artificial
  Probe
cagaagtgtgctttatcagtttttc

SEQ ID NO: 307780 - DNA, 25 bp, Artificial
  Probe
ctcccatggatgacagataatgcca

SEQ ID NO: 307781 - DNA, 25 bp, Artificial
  Probe
ttttctgcttttgtgagggtactca

SEQ ID NO: 307782 - DNA, 25 bp, Artificial
  Probe
tcaagtccctgtaggaccaaggacc

SEQ ID NO: 307783 - DNA, 25 bp, Artificial
  Probe
tctgctacatatgcactggaggcat

SEQ ID NO: 307784 - DNA, 25 bp, Artificial
  Probe
accctggggcatcaagtccctgtag

SEQ ID NO: 307785 - DNA, 25 bp, Artificial
  Probe
ccatcctctgctacatatgcactgg

SEQ ID NO: 307786 - DNA, 25 bp, Artificial
  Probe
ctcttttctgcttttgtgagggtac

SEQ ID NO: 307787 - DNA, 25 bp, Artificial
  Probe
catcctctgctacatatgcactgga

SEQ ID NO: 307788 - DNA, 25 bp, Artificial
  Probe
atcaagtccctgtaggaccaaggac

SEQ ID NO: 307789 - DNA, 25 bp, Artificial
  Probe
ctggggcatcaagtccctgtaggac

SEQ ID NO: 307790 - DNA, 25 bp, Artificial
  Probe
ctctgctacatatgcactggaggca

SEQ ID NO: 307791 - DNA, 25 bp, Artificial
  Probe
cttttctgcttttgtgagggtactc

SEQ ID NO: 307792 - DNA, 25 bp, Artificial
  Probe
tctgcttttgtgagggtactcaccc

SEQ ID NO: 307793 - DNA, 25 bp, Artificial
  Probe
caagtccctgtaggaccaaggacct

SEQ ID NO: 307794 - DNA, 25 bp, Artificial
  Probe
atcctctgctacatatgcactggag

SEQ ID NO: 307795 - DNA, 25 bp, Artificial
  Probe
cctcttttctgcttttgtgagggta

SEQ ID NO: 307796 - DNA, 25 bp, Artificial
  Probe
cctcccatggatgacagataatgcc

SEQ ID NO: 307797 - DNA, 25 bp, Artificial
  Probe
tggggcatcaagtccctgtaggacc

SEQ ID NO: 307798 - DNA, 25 bp, Artificial
  Probe
gccatcctctgctacatatgcactg

SEQ ID NO: 307799 - DNA, 25 bp, Artificial
  Probe
tttctgcttttgtgagggtactcac

SEQ ID NO: 307800 - DNA, 25 bp, Artificial
  Probe
ccctggggcatcaagtccctgtagg

SEQ ID NO: 307801 - DNA, 25 bp, Artificial
  Probe
cctggggcatcaagtccctgtagga

SEQ ID NO: 307802 - DNA, 25 bp, Artificial
  Probe
catcaagtccctgtaggaccaagga

SEQ ID NO: 307803 - DNA, 25 bp, Artificial
  Probe
gcatcaagtccctgtaggaccaagg

SEQ ID NO: 307804 - DNA, 25 bp, Artificial
  Probe
ttctgcttttgtgagggtactcacc

SEQ ID NO: 307805 - DNA, 25 bp, Artificial
  Probe
ctaccctggggcatcaagtccctgt

SEQ ID NO: 307806 - DNA, 25 bp, Artificial
  Probe
taccctggggcatcaagtccctgta

SEQ ID NO: 307807 - DNA, 25 bp, Artificial
  Probe
tactgacctcttgtcctgtatagca

SEQ ID NO: 307808 - DNA, 25 bp, Artificial
  Probe
ctgtggcttgtactgacctcttgtc

SEQ ID NO: 307809 - DNA, 25 bp, Artificial
  Probe
ctgtatagcaacctatttgactgct

SEQ ID NO: 307810 - DNA, 25 bp, Artificial
  Probe
tcacatgacttgtgccacagacacg

SEQ ID NO: 307811 - DNA, 25 bp, Artificial
  Probe
cggggctgtggcttgtactgacctc

SEQ ID NO: 307812 - DNA, 25 bp, Artificial
  Probe
tctgctttcctgaatacccaggctc

SEQ ID NO: 307813 - DNA, 25 bp, Artificial
  Probe
gtatagcaacctatttgactgcttc

SEQ ID NO: 307814 - DNA, 25 bp, Artificial
  Probe
gcagctgcctacatccaaacacagt

SEQ ID NO: 307815 - DNA, 25 bp, Artificial
  Probe
atgacttgtgccacagacacgaata

SEQ ID NO: 307816 - DNA, 25 bp, Artificial
  Probe
tctccggggctgtggcttgtactga

SEQ ID NO: 307817 - DNA, 25 bp, Artificial
  Probe
ttgtgccacagacacgaataatatc

SEQ ID NO: 307818 - DNA, 25 bp, Artificial
  Probe
acttgtgccacagacacgaataata

SEQ ID NO: 307819 - DNA, 25 bp, Artificial
  Probe
ttgccaacaatctccggggctgtgg

SEQ ID NO: 307820 - DNA, 25 bp, Artificial
  Probe
tcatcattgccaacaatctccgggg

SEQ ID NO: 307821 - DNA, 25 bp, Artificial
  Probe
gattaagaagtcacccttgaccatc

SEQ ID NO: 307822 - DNA, 25 bp, Artificial
  Probe
aagattaagaagtcacccttgacca

SEQ ID NO: 307823 - DNA, 25 bp, Artificial
  Probe
gaagtcacccttgaccatctgcttt

SEQ ID NO: 307824 - DNA, 25 bp, Artificial
  Probe
gtggcttgtactgacctcttgtcct

SEQ ID NO: 307825 - DNA, 25 bp, Artificial
  Probe
cctctttggcgagaagattaagaag

SEQ ID NO: 307826 - DNA, 25 bp, Artificial
  Probe
gacacgaataatatccaggtggtat

SEQ ID NO: 307827 - DNA, 25 bp, Artificial
  Probe
gctttcctgaatacccaggctccaa

SEQ ID NO: 307828 - DNA, 25 bp, Artificial
  Probe
gaaatttactgtcacatgacttgtg

SEQ ID NO: 307829 - DNA, 25 bp, Artificial
  Probe
agaagtcacccttgaccatctgctt

SEQ ID NO: 307830 - DNA, 25 bp, Artificial
  Probe
cattgccaacaatctccggggctgt

SEQ ID NO: 307831 - DNA, 25 bp, Artificial
  Probe
tgtcctgtatagcaacctatttgac

SEQ ID NO: 307832 - DNA, 25 bp, Artificial
  Probe
ggcttgtactgacctcttgtcctgt

SEQ ID NO: 307833 - DNA, 25 bp, Artificial
  Probe
acctctttggcgagaagattaagaa

SEQ ID NO: 307834 - DNA, 25 bp, Artificial
  Probe
cttgtactgacctcttgtcctgtat

SEQ ID NO: 307835 - DNA, 25 bp, Artificial
  Probe
ctgtcacatgacttgtgccacagac

SEQ ID NO: 307836 - DNA, 25 bp, Artificial
  Probe
tagcaacctatttgactgcttcatg

SEQ ID NO: 307837 - DNA, 25 bp, Artificial
  Probe
gaaagacctctttggcgagaagatt

SEQ ID NO: 307838 - DNA, 25 bp, Artificial
  Probe
catctgctttcctgaatacccaggc

SEQ ID NO: 307839 - DNA, 25 bp, Artificial
  Probe
cagacacgaataatatccaggtggt

SEQ ID NO: 307840 - DNA, 25 bp, Artificial
  Probe
atcatcattgccaacaatctccggg

SEQ ID NO: 307841 - DNA, 25 bp, Artificial
  Probe
gccacagacacgaataatatccagg

SEQ ID NO: 307842 - DNA, 25 bp, Artificial
  Probe
caacacctatgaagacgcagctgcc

SEQ ID NO: 307843 - DNA, 25 bp, Artificial
  Probe
cacagacacgaataatatccaggtg

SEQ ID NO: 307844 - DNA, 25 bp, Artificial
  Probe
aatctccggggctgtggcttgtact

SEQ ID NO: 307845 - DNA, 25 bp, Artificial
  Probe
ggggctgtggcttgtactgacctct

SEQ ID NO: 307846 - DNA, 25 bp, Artificial
  Probe
atctgctttcctgaatacccaggct

SEQ ID NO: 307847 - DNA, 25 bp, Artificial
  Probe
tgctttcctgaatacccaggctcca

SEQ ID NO: 307848 - DNA, 25 bp, Artificial
  Probe
aacctatttgactgcttcatggact

SEQ ID NO: 307849 - DNA, 25 bp, Artificial
  Probe
cacgaataatatccaggtggtattc

SEQ ID NO: 307850 - DNA, 25 bp, Artificial
  Probe
gacctcttgtcctgtatagcaacct

SEQ ID NO: 307851 - DNA, 25 bp, Artificial
  Probe
gctgcctacatccaaacacagtttg

SEQ ID NO: 307852 - DNA, 25 bp, Artificial
  Probe
ttgtcctgtatagcaacctatttga

SEQ ID NO: 307853 - DNA, 25 bp, Artificial
  Probe
aaacaaacaaaaaccatgcctgaga

SEQ ID NO: 307854 - DNA, 25 bp, Artificial
  Probe
catgcctgagagttgggtgtagtag

SEQ ID NO: 307855 - DNA, 25 bp, Artificial
  Probe
tagtgagacctatctcaataaaagc

SEQ ID NO: 307856 - DNA, 25 bp, Artificial
  Probe
agtgagacctatctcaataaaagca

SEQ ID NO: 307857 - DNA, 25 bp, Artificial
  Probe
aaaaaccatgcctgagagttgggtg

SEQ ID NO: 307858 - DNA, 25 bp, Artificial
  Probe
acaaacaaaaaccatgcctgagagt

SEQ ID NO: 307859 - DNA, 25 bp, Artificial
  Probe
caaacaaaaaccatgcctgagagtt

SEQ ID NO: 307860 - DNA, 25 bp, Artificial
  Probe
gacctatctcaataaaagcaaacaa

SEQ ID NO: 307861 - DNA, 25 bp, Artificial
  Probe
atgcctgagagttgggtgtagtagc

SEQ ID NO: 307862 - DNA, 25 bp, Artificial
  Probe
acaaaaaccatgcctgagagttggg

SEQ ID NO: 307863 - DNA, 25 bp, Artificial
  Probe
aaaacaaacaaaaaccatgcctgag

SEQ ID NO: 307864 - DNA, 25 bp, Artificial
  Probe
tgagacctatctcaataaaagcaaa

SEQ ID NO: 307865 - DNA, 25 bp, Artificial
  Probe
accatgcctgagagttgggtgtagt

SEQ ID NO: 307866 - DNA, 25 bp, Artificial
  Probe
aaccatgcctgagagttgggtgtag

SEQ ID NO: 307867 - DNA, 25 bp, Artificial
  Probe
acctatctcaataaaagcaaacaac

SEQ ID NO: 307868 - DNA, 25 bp, Artificial
  Probe
aaaccatgcctgagagttgggtgta

SEQ ID NO: 307869 - DNA, 25 bp, Artificial
  Probe
gagacctatctcaataaaagcaaac

SEQ ID NO: 307870 - DNA, 25 bp, Artificial
  Probe
aacaaacaaaaaccatgcctgagag

SEQ ID NO: 307871 - DNA, 25 bp, Artificial
  Probe
gcctgagagttgggtgtagtagcac

SEQ ID NO: 307872 - DNA, 25 bp, Artificial
  Probe
agacctatctcaataaaagcaaaca

SEQ ID NO: 307873 - DNA, 25 bp, Artificial
  Probe
acacaggtggagctctaggagttcg

SEQ ID NO: 307874 - DNA, 25 bp, Artificial
  Probe
ccatgcctgagagttgggtgtagta

SEQ ID NO: 307875 - DNA, 25 bp, Artificial
  Probe
tgcctgagagttgggtgtagtagca

SEQ ID NO: 307876 - DNA, 25 bp, Artificial
  Probe
gtgagacctatctcaataaaagcaa

SEQ ID NO: 307877 - DNA, 25 bp, Artificial
  Probe
caaaaaccatgcctgagagttgggt

SEQ ID NO: 307878 - DNA, 25 bp, Artificial
  Probe
aaacaaaaaccatgcctgagagttg

SEQ ID NO: 307879 - DNA, 25 bp, Artificial
  Probe
aaaaccatgcctgagagttgggtgt

SEQ ID NO: 307880 - DNA, 25 bp, Artificial
  Probe
aacaaaaaccatgcctgagagttgg

SEQ ID NO: 307881 - DNA, 25 bp, Artificial
  Probe
cctcatcgtggacagatagcattaa

SEQ ID NO: 307882 - DNA, 25 bp, Artificial
  Probe
aatacagctcatcttgaaggaagga

SEQ ID NO: 307883 - DNA, 25 bp, Artificial
  Probe
tacagctcatcttgaaggaaggaac

SEQ ID NO: 307884 - DNA, 25 bp, Artificial
  Probe
ggaacactcactgaatctcattgtc

SEQ ID NO: 307885 - DNA, 25 bp, Artificial
  Probe
atctcattgtcctcatcgtggacag

SEQ ID NO: 307886 - DNA, 25 bp, Artificial
  Probe
tctcattgtcctcatcgtggacaga

SEQ ID NO: 307887 - DNA, 25 bp, Artificial
  Probe
ttgtcctcatcgtggacagatagca

SEQ ID NO: 307888 - DNA, 25 bp, Artificial
  Probe
agctcatcttgaaggaaggaacact

SEQ ID NO: 307889 - DNA, 25 bp, Artificial
  Probe
ctgaatctcattgtcctcatcgtgg

SEQ ID NO: 307890 - DNA, 25 bp, Artificial
  Probe
acacctgatatttcacgggctgttt

SEQ ID NO: 307891 - DNA, 25 bp, Artificial
  Probe
tgaagcctcgggaaagcacttagat

SEQ ID NO: 307892 - DNA, 25 bp, Artificial
  Probe
ctcattgtcctcatcgtggacagat

SEQ ID NO: 307893 - DNA, 25 bp, Artificial
  Probe
tccacacctgatatttcacgggctg

SEQ ID NO: 307894 - DNA, 25 bp, Artificial
  Probe
attgtcctcatcgtggacagatagc

SEQ ID NO: 307895 - DNA, 25 bp, Artificial
  Probe
atacagctcatcttgaaggaaggaa

SEQ ID NO: 307896 - DNA, 25 bp, Artificial
  Probe
aatctcattgtcctcatcgtggaca

SEQ ID NO: 307897 - DNA, 25 bp, Artificial
  Probe
cacctgatatttcacgggctgttta

SEQ ID NO: 307898 - DNA, 25 bp, Artificial
  Probe
tttccacacctgatatttcacgggc

SEQ ID NO: 307899 - DNA, 25 bp, Artificial
  Probe
gaaggaacactcactgaatctcatt

SEQ ID NO: 307900 - DNA, 25 bp, Artificial
  Probe
cagctcatcttgaaggaaggaacac

SEQ ID NO: 307901 - DNA, 25 bp, Artificial
  Probe
actgaatctcattgtcctcatcgtg

SEQ ID NO: 307902 - DNA, 25 bp, Artificial
  Probe
ccacacctgatatttcacgggctgt

SEQ ID NO: 307903 - DNA, 25 bp, Artificial
  Probe
taaatacagctcatcttgaaggaag

SEQ ID NO: 307904 - DNA, 25 bp, Artificial
  Probe
aggaacactcactgaatctcattgt

SEQ ID NO: 307905 - DNA, 25 bp, Artificial
  Probe
gctcatcttgaaggaaggaacactc

SEQ ID NO: 307906 - DNA, 25 bp, Artificial
  Probe
tgcttgcggaaaggtgtgcacgcat

SEQ ID NO: 307907 - DNA, 25 bp, Artificial
  Probe
tgtcctcatcgtggacagatagcat

SEQ ID NO: 307908 - DNA, 25 bp, Artificial
  Probe
gaatctcattgtcctcatcgtggac

SEQ ID NO: 307909 - DNA, 25 bp, Artificial
  Probe
atgaatgaagcctcgggaaagcact

SEQ ID NO: 307910 - DNA, 25 bp, Artificial
  Probe
ggaaggaacactcactgaatctcat

SEQ ID NO: 307911 - DNA, 25 bp, Artificial
  Probe
ctcatcgtggacagatagcattaaa

SEQ ID NO: 307912 - DNA, 25 bp, Artificial
  Probe
cacacctgatatttcacgggctgtt

SEQ ID NO: 307913 - DNA, 25 bp, Artificial
  Probe
tcatcgtggacagatagcattaaaa

SEQ ID NO: 307914 - DNA, 25 bp, Artificial
  Probe
gtcctcatcgtggacagatagcatt

SEQ ID NO: 307915 - DNA, 25 bp, Artificial
  Probe
aggaaggaacactcactgaatctca

SEQ ID NO: 307916 - DNA, 25 bp, Artificial
  Probe
acctgatatttcacgggctgtttac

SEQ ID NO: 307917 - DNA, 25 bp, Artificial
  Probe
caataaatacagctcatcttgaagg

SEQ ID NO: 307918 - DNA, 25 bp, Artificial
  Probe
tgaatctcattgtcctcatcgtgga

SEQ ID NO: 307919 - DNA, 25 bp, Artificial
  Probe
ctttccacacctgatatttcacggg

SEQ ID NO: 307920 - DNA, 25 bp, Artificial
  Probe
aaggaacactcactgaatctcattg

SEQ ID NO: 307921 - DNA, 25 bp, Artificial
  Probe
catcgtggacagatagcattaaaac

SEQ ID NO: 307922 - DNA, 25 bp, Artificial
  Probe
gcaataaatacagctcatcttgaag

SEQ ID NO: 307923 - DNA, 25 bp, Artificial
  Probe
tcctcatcgtggacagatagcatta

SEQ ID NO: 307924 - DNA, 25 bp, Artificial
  Probe
acagctcatcttgaaggaaggaaca

SEQ ID NO: 307925 - DNA, 25 bp, Artificial
  Probe
ttccacacctgatatttcacgggct

SEQ ID NO: 307926 - DNA, 25 bp, Artificial
  Probe
gaagcctcgggaaagcacttagatt

SEQ ID NO: 307927 - DNA, 25 bp, Artificial
  Probe
gcaggggcttgggactgggaacata

SEQ ID NO: 307928 - DNA, 25 bp, Artificial
  Probe
actccacttcagctgttgtgtgggt

SEQ ID NO: 307929 - DNA, 25 bp, Artificial
  Probe
ttgttaagttcccatctagcctcta

SEQ ID NO: 307930 - DNA, 25 bp, Artificial
  Probe
tcactccacttcagctgttgtgtgg

SEQ ID NO: 307931 - DNA, 25 bp, Artificial
  Probe
gtcacctcatgcaggggcttgggac

SEQ ID NO: 307932 - DNA, 25 bp, Artificial
  Probe
ccttgttaagttcccatctagcctc

SEQ ID NO: 307933 - DNA, 25 bp, Artificial
  Probe
agctgttgtgtgggtgggaggtcac

SEQ ID NO: 307934 - DNA, 25 bp, Artificial
  Probe
acctcatgcaggggcttgggactgg

SEQ ID NO: 307935 - DNA, 25 bp, Artificial
  Probe
tctagcctctacctaccaaacttct

SEQ ID NO: 307936 - DNA, 25 bp, Artificial
  Probe
aagttcccatctagcctctacctac

SEQ ID NO: 307937 - DNA, 25 bp, Artificial
  Probe
ctccacttcagctgttgtgtgggtg

SEQ ID NO: 307938 - DNA, 25 bp, Artificial
  Probe
tcacctcatgcaggggcttgggact

SEQ ID NO: 307939 - DNA, 25 bp, Artificial
  Probe
tacctaccaaacttctcttggatct

SEQ ID NO: 307940 - DNA, 25 bp, Artificial
  Probe
gactgggaacataccttgttaagtt

SEQ ID NO: 307941 - DNA, 25 bp, Artificial
  Probe
tagcctctacctaccaaacttctct

SEQ ID NO: 307942 - DNA, 25 bp, Artificial
  Probe
ctaccaaacttctcttggatctcta

SEQ ID NO: 307943 - DNA, 25 bp, Artificial
  Probe
tgggaggtcacctcatgcaggggct

SEQ ID NO: 307944 - DNA, 25 bp, Artificial
  Probe
ctgttgtgtgggtgggaggtcacct

SEQ ID NO: 307945 - DNA, 25 bp, Artificial
  Probe
ctcactccacttcagctgttgtgtg

SEQ ID NO: 307946 - DNA, 25 bp, Artificial
  Probe
ggtcacctcatgcaggggcttggga

SEQ ID NO: 307947 - DNA, 25 bp, Artificial
  Probe
ttaagttcccatctagcctctacct

SEQ ID NO: 307948 - DNA, 25 bp, Artificial
  Probe
cctaccaaacttctcttggatctct

SEQ ID NO: 307949 - DNA, 25 bp, Artificial
  Probe
accaaacttctcttggatctctaaa

SEQ ID NO: 307950 - DNA, 25 bp, Artificial
  Probe
gggcttgggactgggaacatacctt

SEQ ID NO: 307951 - DNA, 25 bp, Artificial
  Probe
taccttgttaagttcccatctagcc

SEQ ID NO: 307952 - DNA, 25 bp, Artificial
  Probe
acataccttgttaagttcccatcta

SEQ ID NO: 307953 - DNA, 25 bp, Artificial
  Probe
tcccatctagcctctacctaccaaa

SEQ ID NO: 307954 - DNA, 25 bp, Artificial
  Probe
gttaagttcccatctagcctctacc

SEQ ID NO: 307955 - DNA, 25 bp, Artificial
  Probe
tgtgtgggtgggaggtcacctcatg

SEQ ID NO: 307956 - DNA, 25 bp, Artificial
  Probe
tgtctcactccacttcagctgttgt

SEQ ID NO: 307957 - DNA, 25 bp, Artificial
  Probe
gaggtcacctcatgcaggggcttgg

SEQ ID NO: 307958 - DNA, 25 bp, Artificial
  Probe
ggaggtcacctcatgcaggggcttg

SEQ ID NO: 307959 - DNA, 25 bp, Artificial
  Probe
tctcactccacttcagctgttgtgt

SEQ ID NO: 307960 - DNA, 25 bp, Artificial
  Probe
ttgtctcactccacttcagctgttg

SEQ ID NO: 307961 - DNA, 25 bp, Artificial
  Probe
ctctacctaccaaacttctcttgga

SEQ ID NO: 307962 - DNA, 25 bp, Artificial
  Probe
caggggcttgggactgggaacatac

SEQ ID NO: 307963 - DNA, 25 bp, Artificial
  Probe
ggaacataccttgttaagttcccat

SEQ ID NO: 307964 - DNA, 25 bp, Artificial
  Probe
cactccacttcagctgttgtgtggg

SEQ ID NO: 307965 - DNA, 25 bp, Artificial
  Probe
gaacataccttgttaagttcccatc

SEQ ID NO: 307966 - DNA, 25 bp, Artificial
  Probe
catgcaggggcttgggactgggaac

SEQ ID NO: 307967 - DNA, 25 bp, Artificial
  Probe
gcctctacctaccaaacttctcttg

SEQ ID NO: 307968 - DNA, 25 bp, Artificial
  Probe
ggcttgggactgggaacataccttg

SEQ ID NO: 307969 - DNA, 25 bp, Artificial
  Probe
atctagcctctacctaccaaacttc

SEQ ID NO: 307970 - DNA, 25 bp, Artificial
  Probe
gttcccatctagcctctacctacca

SEQ ID NO: 307971 - DNA, 25 bp, Artificial
  Probe
ttcagctgttgtgtgggtgggaggt

SEQ ID NO: 307972 - DNA, 25 bp, Artificial
  Probe
gttgtgtgggtgggaggtcacctca

SEQ ID NO: 307973 - DNA, 25 bp, Artificial
  Probe
gttctttgcatttctgttgtcagac

SEQ ID NO: 307974 - DNA, 25 bp, Artificial
  Probe
ggacaacgaactcagcatgctagga

SEQ ID NO: 307975 - DNA, 25 bp, Artificial
  Probe
tcagactcattttaacccgtgtagc

SEQ ID NO: 307976 - DNA, 25 bp, Artificial
  Probe
tgtctgacttgtcgtagtgggtttc

SEQ ID NO: 307977 - DNA, 25 bp, Artificial
  Probe
gagcgtctccgtggattccgacagg

SEQ ID NO: 307978 - DNA, 25 bp, Artificial
  Probe
agaataccgttgagcgtctccgtgg

SEQ ID NO: 307979 - DNA, 25 bp, Artificial
  Probe
ttaagaataccgttgagcgtctccg

SEQ ID NO: 307980 - DNA, 25 bp, Artificial
  Probe
agtcaggacaacgaactcagcatgc

SEQ ID NO: 307981 - DNA, 25 bp, Artificial
  Probe
ccgtggattccgacaggatattctc

SEQ ID NO: 307982 - DNA, 25 bp, Artificial
  Probe
cgtcccttaagaataccgttgagcg

SEQ ID NO: 307983 - DNA, 25 bp, Artificial
  Probe
gcatttctgttgtcagactcatttt

SEQ ID NO: 307984 - DNA, 25 bp, Artificial
  Probe
taagaataccgttgagcgtctccgt

SEQ ID NO: 307985 - DNA, 25 bp, Artificial
  Probe
ttcagaagtcaggacaacgaactca

SEQ ID NO: 307986 - DNA, 25 bp, Artificial
  Probe
tcccttaagaataccgttgagcgtc

SEQ ID NO: 307987 - DNA, 25 bp, Artificial
  Probe
cttgtctgacttgtcgtagtgggtt

SEQ ID NO: 307988 - DNA, 25 bp, Artificial
  Probe
cgtggattccgacaggatattctct

SEQ ID NO: 307989 - DNA, 25 bp, Artificial
  Probe
ctttgcatttctgttgtcagactca

SEQ ID NO: 307990 - DNA, 25 bp, Artificial
  Probe
tgagcgtctccgtggattccgacag

SEQ ID NO: 307991 - DNA, 25 bp, Artificial
  Probe
tcgtagtgggtttcttccttgttga

SEQ ID NO: 307992 - DNA, 25 bp, Artificial
  Probe
aacgaactcagcatgctaggacagt

SEQ ID NO: 307993 - DNA, 25 bp, Artificial
  Probe
ttacttgtctgacttgtcgtagtgg

SEQ ID NO: 307994 - DNA, 25 bp, Artificial
  Probe
attccgacaggatattctctgggtt

SEQ ID NO: 307995 - DNA, 25 bp, Artificial
  Probe
gtcagactcattttaacccgtgtag

SEQ ID NO: 307996 - DNA, 25 bp, Artificial
  Probe
ccgttgagcgtctccgtggattccg

SEQ ID NO: 307997 - DNA, 25 bp, Artificial
  Probe
aagtcaggacaacgaactcagcatg

SEQ ID NO: 307998 - DNA, 25 bp, Artificial
  Probe
gtcaggacaacgaactcagcatgct

SEQ ID NO: 307999 - DNA, 25 bp, Artificial
  Probe
gattccgacaggatattctctgggt

SEQ ID NO: 308000 - DNA, 25 bp, Artificial
  Probe
gacaggatattctctgggttctttg

SEQ ID NO: 308001 - DNA, 25 bp, Artificial
  Probe
tctttgcatttctgttgtcagactc

SEQ ID NO: 308002 - DNA, 25 bp, Artificial
  Probe
ccgacaggatattctctgggttctt

SEQ ID NO: 308003 - DNA, 25 bp, Artificial
  Probe
gtctccgtggattccgacaggatat

SEQ ID NO: 308004 - DNA, 25 bp, Artificial
  Probe
gtcgtagtgggtttcttccttgttg

SEQ ID NO: 308005 - DNA, 25 bp, Artificial
  Probe
gacttgtcgtagtgggtttcttcct

SEQ ID NO: 308006 - DNA, 25 bp, Artificial
  Probe
tctgacttgtcgtagtgggtttctt

SEQ ID NO: 308007 - DNA, 25 bp, Artificial
  Probe
gacaacgaactcagcatgctaggac

SEQ ID NO: 308008 - DNA, 25 bp, Artificial
  Probe
tccgacaggatattctctgggttct

SEQ ID NO: 308009 - DNA, 25 bp, Artificial
  Probe
ccgtgtagctagtggcattttattc

SEQ ID NO: 308010 - DNA, 25 bp, Artificial
  Probe
tgttgtcagactcattttaacccgt

SEQ ID NO: 308011 - DNA, 25 bp, Artificial
  Probe
ttgcatttctgttgtcagactcatt

SEQ ID NO: 308012 - DNA, 25 bp, Artificial
  Probe
gggttctttgcatttctgttgtcag

SEQ ID NO: 308013 - DNA, 25 bp, Artificial
  Probe
tgacttgtcgtagtgggtttcttcc

SEQ ID NO: 308014 - DNA, 25 bp, Artificial
  Probe
attcagaagtcaggacaacgaactc

SEQ ID NO: 308015 - DNA, 25 bp, Artificial
  Probe
attacttgtctgacttgtcgtagtg

SEQ ID NO: 308016 - DNA, 25 bp, Artificial
  Probe
ctgttgtcagactcattttaacccg

SEQ ID NO: 308017 - DNA, 25 bp, Artificial
  Probe
caggatattctctgggttctttgca

SEQ ID NO: 308018 - DNA, 25 bp, Artificial
  Probe
taccgttgagcgtctccgtggattc

SEQ ID NO: 308019 - DNA, 25 bp, Artificial
  Probe
agcagtgtttatcaggcacagagaa

SEQ ID NO: 308020 - DNA, 25 bp, Artificial
  Probe
cccataagcccatttatggaccgct

SEQ ID NO: 308021 - DNA, 25 bp, Artificial
  Probe
aagcccatttatggaccgctctgcc

SEQ ID NO: 308022 - DNA, 25 bp, Artificial
  Probe
tcagcaccttctgcagaaccacatg

SEQ ID NO: 308023 - DNA, 25 bp, Artificial
  Probe
gagacactgatgacccggaagaaga

SEQ ID NO: 308024 - DNA, 25 bp, Artificial
  Probe
caggagtcctttatctcacacatcg

SEQ ID NO: 308025 - DNA, 25 bp, Artificial
  Probe
gggcctgctaaatgtaaggacctcc

SEQ ID NO: 308026 - DNA, 25 bp, Artificial
  Probe
aggcaccgctgcagcattcctcaga

SEQ ID NO: 308027 - DNA, 25 bp, Artificial
  Probe
cgactctgcgggtctcatgccggga

SEQ ID NO: 308028 - DNA, 25 bp, Artificial
  Probe
gccagccttggtttgcccataagcc

SEQ ID NO: 308029 - DNA, 25 bp, Artificial
  Probe
tgtttatcaggcacagagaaccagg

SEQ ID NO: 308030 - DNA, 25 bp, Artificial
  Probe
cagaaccacatgatgtggaagaaag

SEQ ID NO: 308031 - DNA, 25 bp, Artificial
  Probe
ctgcgggtctcatgccgggaaaatg

SEQ ID NO: 308032 - DNA, 25 bp, Artificial
  Probe
gccaatcttcaggagtcctttatct

SEQ ID NO: 308033 - DNA, 25 bp, Artificial
  Probe
aggcacagagaaccaggccccagac

SEQ ID NO: 308034 - DNA, 25 bp, Artificial
  Probe
catgccgggaaaatgggtagatgac

SEQ ID NO: 308035 - DNA, 25 bp, Artificial
  Probe
agaagccagccttggtttgcccata

SEQ ID NO: 308036 - DNA, 25 bp, Artificial
  Probe
tgatgattcaggagacactgatgac

SEQ ID NO: 308037 - DNA, 25 bp, Artificial
  Probe
tctcatgccgggaaaatgggtagat

SEQ ID NO: 308038 - DNA, 25 bp, Artificial
  Probe
tggctgacatcaacgggcctgctaa

SEQ ID NO: 308039 - DNA, 25 bp, Artificial
  Probe
actcctacgactctgcgggtctcat

SEQ ID NO: 308040 - DNA, 25 bp, Artificial
  Probe
accgctgcagcattcctcagaacaa

SEQ ID NO: 308041 - DNA, 25 bp, Artificial
  Probe
gcagtgtttatcaggcacagagaac

SEQ ID NO: 308042 - DNA, 25 bp, Artificial
  Probe
gatgaagaagccagccttggtttgc

SEQ ID NO: 308043 - DNA, 25 bp, Artificial
  Probe
tcgccagcgagttttatgagcaggg

SEQ ID NO: 308044 - DNA, 25 bp, Artificial
  Probe
cagcgagttttatgagcagggcgat

SEQ ID NO: 308045 - DNA, 25 bp, Artificial
  Probe
agaggctgaaacaccacacgaggaa

SEQ ID NO: 308046 - DNA, 25 bp, Artificial
  Probe
gcatcgccagcgagttttatgagca

SEQ ID NO: 308047 - DNA, 25 bp, Artificial
  Probe
ccacacgaggaagaaacctgtgaaa

SEQ ID NO: 308048 - DNA, 25 bp, Artificial
  Probe
tctcacacatcgtgggtcctctttg

SEQ ID NO: 308049 - DNA, 25 bp, Artificial
  Probe
cttggtttgcccataagcccattta

SEQ ID NO: 308050 - DNA, 25 bp, Artificial
  Probe
gagggcatcgccagcgagttttatg

SEQ ID NO: 308051 - DNA, 25 bp, Artificial
  Probe
ctcctacgactctgcgggtctcatg

SEQ ID NO: 308052 - DNA, 25 bp, Artificial
  Probe
ggtttgcccataagcccatttatgg

SEQ ID NO: 308053 - DNA, 25 bp, Artificial
  Probe
catcaacgggcctgctaaatgtaag

SEQ ID NO: 308054 - DNA, 25 bp, Artificial
  Probe
tgaaaacagtgaagctcccagaaag

SEQ ID NO: 308055 - DNA, 25 bp, Artificial
  Probe
gtgggtcctctttgccactcctacg

SEQ ID NO: 308056 - DNA, 25 bp, Artificial
  Probe
ggcaccgctgcagcattcctcagaa

SEQ ID NO: 308057 - DNA, 25 bp, Artificial
  Probe
gagaatctactgtcaaataactcag

SEQ ID NO: 308058 - DNA, 25 bp, Artificial
  Probe
caggagacactgatgacccggaaga

SEQ ID NO: 308059 - DNA, 25 bp, Artificial
  Probe
ctcagaacaaatccaggctatcaag

SEQ ID NO: 308060 - DNA, 25 bp, Artificial
  Probe
acacatcgtgggtcctctttgccac

SEQ ID NO: 308061 - DNA, 25 bp, Artificial
  Probe
tataaagttggctgacatcaacggg

SEQ ID NO: 308062 - DNA, 25 bp, Artificial
  Probe
tttgccactcctacgactctgcggg

SEQ ID NO: 308063 - DNA, 25 bp, Artificial
  Probe
gcattcctcagaacaaatccaggct

SEQ ID NO: 308064 - DNA, 25 bp, Artificial
  Probe
ccgcagctggccaatcttcaggagt

SEQ ID NO: 308065 - DNA, 25 bp, Artificial
  Probe
gcagtctcagctccaagtcatcgct

SEQ ID NO: 308066 - DNA, 25 bp, Artificial
  Probe
agggaggcatcatgggctttctgaa

SEQ ID NO: 308067 - DNA, 25 bp, Artificial
  Probe
agtctcagctccaagtcatcgctca

SEQ ID NO: 308068 - DNA, 25 bp, Artificial
  Probe
ctattttggcaactaggtccctcct

SEQ ID NO: 308069 - DNA, 25 bp, Artificial
  Probe
caccagggaggcatcatgggctttc

SEQ ID NO: 308070 - DNA, 25 bp, Artificial
  Probe
ctaaaagagaatcacccaggaagat

SEQ ID NO: 308071 - DNA, 25 bp, Artificial
  Probe
tcttcctataacttgatgcatgtag

SEQ ID NO: 308072 - DNA, 25 bp, Artificial
  Probe
gtatctggaatctccaatgggtgag

SEQ ID NO: 308073 - DNA, 25 bp, Artificial
  Probe
tgcatgctgggcacgtacacacaag

SEQ ID NO: 308074 - DNA, 25 bp, Artificial
  Probe
cgctcaccagggaggcatcatgggc

SEQ ID NO: 308075 - DNA, 25 bp, Artificial
  Probe
tgttctctgggctattatgggttac

SEQ ID NO: 308076 - DNA, 25 bp, Artificial
  Probe
ctattatgggttactttcatgaggc

SEQ ID NO: 308077 - DNA, 25 bp, Artificial
  Probe
gcttctcagtctagtcttgcttcat

SEQ ID NO: 308078 - DNA, 25 bp, Artificial
  Probe
gagaaagggcctacaggctaaaaga

SEQ ID NO: 308079 - DNA, 25 bp, Artificial
  Probe
tcctctctggctgttctctgggcta

SEQ ID NO: 308080 - DNA, 25 bp, Artificial
  Probe
tggcagagagccagggcagtcatct

SEQ ID NO: 308081 - DNA, 25 bp, Artificial
  Probe
ctctgggctattatgggttactttc

SEQ ID NO: 308082 - DNA, 25 bp, Artificial
  Probe
ccagggaggcatcatgggctttctg

SEQ ID NO: 308083 - DNA, 25 bp, Artificial
  Probe
ggcacgtacacacaagacctcaaca

SEQ ID NO: 308084 - DNA, 25 bp, Artificial
  Probe
atggtatctggaatctccaatgggt

SEQ ID NO: 308085 - DNA, 25 bp, Artificial
  Probe
agagaatcacccaggaagatggcag

SEQ ID NO: 308086 - DNA, 25 bp, Artificial
  Probe
tgtgggaatctgagtacctgcatgc

SEQ ID NO: 308087 - DNA, 25 bp, Artificial
  Probe
ctttcatgaggcaaaggatggtatc

SEQ ID NO: 308088 - DNA, 25 bp, Artificial
  Probe
ctcagtctagtcttgcttcataaag

SEQ ID NO: 308089 - DNA, 25 bp, Artificial
  Probe
ctctggctgttctctgggctattat

SEQ ID NO: 308090 - DNA, 25 bp, Artificial
  Probe
tcatcgctcaccagggaggcatcat

SEQ ID NO: 308091 - DNA, 25 bp, Artificial
  Probe
ggagcacctggcaagaaaagggata

SEQ ID NO: 308092 - DNA, 25 bp, Artificial
  Probe
ggcctacaggctaaaagagaatcac

SEQ ID NO: 308093 - DNA, 25 bp, Artificial
  Probe
tggccaaggacttggagacaaacca

SEQ ID NO: 308094 - DNA, 25 bp, Artificial
  Probe
cacccaggaagatggcagagagcca

SEQ ID NO: 308095 - DNA, 25 bp, Artificial
  Probe
gtagttcctctctggctgttctctg

SEQ ID NO: 308096 - DNA, 25 bp, Artificial
  Probe
gctaaaagagaatcacccaggaaga

SEQ ID NO: 308097 - DNA, 25 bp, Artificial
  Probe
ccaagtcatcgctcaccagggaggc

SEQ ID NO: 308098 - DNA, 25 bp, Artificial
  Probe
ggaatctgagtacctgcatgctggg

SEQ ID NO: 308099 - DNA, 25 bp, Artificial
  Probe
acagccccagatctaagcggtgtgg

SEQ ID NO: 308100 - DNA, 25 bp, Artificial
  Probe
gagagccagggcagtcatctggatt

SEQ ID NO: 308101 - DNA, 25 bp, Artificial
  Probe
gggcctacaggctaaaagagaatca

SEQ ID NO: 308102 - DNA, 25 bp, Artificial
  Probe
ggatatggccaaggacttggagaca

SEQ ID NO: 308103 - DNA, 25 bp, Artificial
  Probe
ctggctgttctctgggctattatgg

SEQ ID NO: 308104 - DNA, 25 bp, Artificial
  Probe
gaaagggcctacaggctaaaagaga

SEQ ID NO: 308105 - DNA, 25 bp, Artificial
  Probe
agctccaagtcatcgctcaccaggg

SEQ ID NO: 308106 - DNA, 25 bp, Artificial
  Probe
catgtagttcctctctggctgttct

SEQ ID NO: 308107 - DNA, 25 bp, Artificial
  Probe
ttcctctctggctgttctctgggct

SEQ ID NO: 308108 - DNA, 25 bp, Artificial
  Probe
gcacctggcaagaaaagggatatgg

SEQ ID NO: 308109 - DNA, 25 bp, Artificial
  Probe
ttggacagccccagatctaagcggt

SEQ ID NO: 308110 - DNA, 25 bp, Artificial
  Probe
gtacctgcatgctgggcacgtacac

SEQ ID NO: 308111 - DNA, 25 bp, Artificial
  Probe
gaccaggctctaattccactggcag

SEQ ID NO: 308112 - DNA, 25 bp, Artificial
  Probe
agtagcatcgatgtcctctcagctc

SEQ ID NO: 308113 - DNA, 25 bp, Artificial
  Probe
gatacacccaacagcatggtagcca

SEQ ID NO: 308114 - DNA, 25 bp, Artificial
  Probe
aggaccaggctctaattccactggc

SEQ ID NO: 308115 - DNA, 25 bp, Artificial
  Probe
ggtagccagtcctatagaggcatga

SEQ ID NO: 308116 - DNA, 25 bp, Artificial
  Probe
ggctctaattccactggcagtgaag

SEQ ID NO: 308117 - DNA, 25 bp, Artificial
  Probe
gctctaattccactggcagtgaagt

SEQ ID NO: 308118 - DNA, 25 bp, Artificial
  Probe
agccagtcctatagaggcatgagga

SEQ ID NO: 308119 - DNA, 25 bp, Artificial
  Probe
ccagatacacccaacagcatggtag

SEQ ID NO: 308120 - DNA, 25 bp, Artificial
  Probe
agatacacccaacagcatggtagcc

SEQ ID NO: 308121 - DNA, 25 bp, Artificial
  Probe
acccaacagcatggtagccagtcct

SEQ ID NO: 308122 - DNA, 25 bp, Artificial
  Probe
accaggctctaattccactggcagt

SEQ ID NO: 308123 - DNA, 25 bp, Artificial
  Probe
tcgatgtcctctcagctcccagata

SEQ ID NO: 308124 - DNA, 25 bp, Artificial
  Probe
agcatggtagccagtcctatagagg

SEQ ID NO: 308125 - DNA, 25 bp, Artificial
  Probe
catggtagccagtcctatagaggca

SEQ ID NO: 308126 - DNA, 25 bp, Artificial
  Probe
tccactggcagtgaagtagcatcga

SEQ ID NO: 308127 - DNA, 25 bp, Artificial
  Probe
ccagtcctatagaggcatgaggaac

SEQ ID NO: 308128 - DNA, 25 bp, Artificial
  Probe
gccagtcctatagaggcatgaggaa

SEQ ID NO: 308129 - DNA, 25 bp, Artificial
  Probe
gaagtagcatcgatgtcctctcagc

SEQ ID NO: 308130 - DNA, 25 bp, Artificial
  Probe
attccactggcagtgaagtagcatc

SEQ ID NO: 308131 - DNA, 25 bp, Artificial
  Probe
tacacccaacagcatggtagccagt

SEQ ID NO: 308132 - DNA, 25 bp, Artificial
  Probe
ctctaattccactggcagtgaagta

SEQ ID NO: 308133 - DNA, 25 bp, Artificial
  Probe
tcctatagaggcatgaggaacattc

SEQ ID NO: 308134 - DNA, 25 bp, Artificial
  Probe
aagtagcatcgatgtcctctcagct

SEQ ID NO: 308135 - DNA, 25 bp, Artificial
  Probe
gaggaccaggctctaattccactgg

SEQ ID NO: 308136 - DNA, 25 bp, Artificial
  Probe
aggctctaattccactggcagtgaa

SEQ ID NO: 308137 - DNA, 25 bp, Artificial
  Probe
ttccactggcagtgaagtagcatcg

SEQ ID NO: 308138 - DNA, 25 bp, Artificial
  Probe
ccactggcagtgaagtagcatcgat

SEQ ID NO: 308139 - DNA, 25 bp, Artificial
  Probe
tggtagccagtcctatagaggcatg

SEQ ID NO: 308140 - DNA, 25 bp, Artificial
  Probe
caacagcatggtagccagtcctata

SEQ ID NO: 308141 - DNA, 25 bp, Artificial
  Probe
tagccagtcctatagaggcatgagg

SEQ ID NO: 308142 - DNA, 25 bp, Artificial
  Probe
aggaggaccaggctctaattccact

SEQ ID NO: 308143 - DNA, 25 bp, Artificial
  Probe
atacacccaacagcatggtagccag

SEQ ID NO: 308144 - DNA, 25 bp, Artificial
  Probe
ccaacagcatggtagccagtcctat

SEQ ID NO: 308145 - DNA, 25 bp, Artificial
  Probe
atcgatgtcctctcagctcccagat

SEQ ID NO: 308146 - DNA, 25 bp, Artificial
  Probe
aattccactggcagtgaagtagcat

SEQ ID NO: 308147 - DNA, 25 bp, Artificial
  Probe
ggaccaggctctaattccactggca

SEQ ID NO: 308148 - DNA, 25 bp, Artificial
  Probe
gtagcatcgatgtcctctcagctcc

SEQ ID NO: 308149 - DNA, 25 bp, Artificial
  Probe
gtagccagtcctatagaggcatgag

SEQ ID NO: 308150 - DNA, 25 bp, Artificial
  Probe
gcatggtagccagtcctatagaggc

SEQ ID NO: 308151 - DNA, 25 bp, Artificial
  Probe
ccaggctctaattccactggcagtg

SEQ ID NO: 308152 - DNA, 25 bp, Artificial
  Probe
cccaacagcatggtagccagtccta

SEQ ID NO: 308153 - DNA, 25 bp, Artificial
  Probe
gatgtcctctcagctcccagataca

SEQ ID NO: 308154 - DNA, 25 bp, Artificial
  Probe
atggtagccagtcctatagaggcat

SEQ ID NO: 308155 - DNA, 25 bp, Artificial
  Probe
caggctctaattccactggcagtga

SEQ ID NO: 308156 - DNA, 25 bp, Artificial
  Probe
ggaggaccaggctctaattccactg

SEQ ID NO: 308157 - DNA, 25 bp, Artificial
  Probe
taccctcactaactcttcctgaggg

SEQ ID NO: 308158 - DNA, 25 bp, Artificial
  Probe
ggggagcccaacgtgtcctacatct

SEQ ID NO: 308159 - DNA, 25 bp, Artificial
  Probe
ctcaccttgtggtggcttttaaaga

SEQ ID NO: 308160 - DNA, 25 bp, Artificial
  Probe
tcacccctggacaaaggtgttcaaa

SEQ ID NO: 308161 - DNA, 25 bp, Artificial
  Probe
gggacgccaaccagggagcaaatcc

SEQ ID NO: 308162 - DNA, 25 bp, Artificial
  Probe
gtcctcaagctctgcgactttggca

SEQ ID NO: 308163 - DNA, 25 bp, Artificial
  Probe
cactcccaaggtgtgtgtcaccgtg

SEQ ID NO: 308164 - DNA, 25 bp, Artificial
  Probe
tcaccagcctcaccttgtggtggct

SEQ ID NO: 308165 - DNA, 25 bp, Artificial
  Probe
gagtacactccatcctcaaggctct

SEQ ID NO: 308166 - DNA, 25 bp, Artificial
  Probe
tggcaggcacctgatgccacaccta

SEQ ID NO: 308167 - DNA, 25 bp, Artificial
  Probe
ttacacctcgtccatcgatgtgtgg

SEQ ID NO: 308168 - DNA, 25 bp, Artificial
  Probe
tgaggccatcgcactctgctctagc

SEQ ID NO: 308169 - DNA, 25 bp, Artificial
  Probe
cgtgctccggagctcatctttggag

SEQ ID NO: 308170 - DNA, 25 bp, Artificial
  Probe
aatctcggacaccacctgaggccat

SEQ ID NO: 308171 - DNA, 25 bp, Artificial
  Probe
acgctcactcggaaggctcaagtgg

SEQ ID NO: 308172 - DNA, 25 bp, Artificial
  Probe
cctgctggccctagactgagggcag

SEQ ID NO: 308173 - DNA, 25 bp, Artificial
  Probe
atgtgtggtcagctggctgtgtact

SEQ ID NO: 308174 - DNA, 25 bp, Artificial
  Probe
aaatccgagagatgaaccctaacta

SEQ ID NO: 308175 - DNA, 25 bp, Artificial
  Probe
cgctcactcggaaggctcaagtggg

SEQ ID NO: 308176 - DNA, 25 bp, Artificial
  Probe
ggagcccaacgtgtcctacatctgt

SEQ ID NO: 308177 - DNA, 25 bp, Artificial
  Probe
catcaaggtactagggacgccaacc

SEQ ID NO: 308178 - DNA, 25 bp, Artificial
  Probe
aactgcggagtctcggaacccagct

SEQ ID NO: 308179 - DNA, 25 bp, Artificial
  Probe
taactcttcctgagggccctaccga

SEQ ID NO: 308180 - DNA, 25 bp, Artificial
  Probe
atcaagccccagaatttgcttgtgg

SEQ ID NO: 308181 - DNA, 25 bp, Artificial
  Probe
ccactagaggcctgtgcccacagtt

SEQ ID NO: 308182 - DNA, 25 bp, Artificial
  Probe
ggtgaactttccatccaaccgtctc

SEQ ID NO: 308183 - DNA, 25 bp, Artificial
  Probe
atgaactacccagcatctaggcctc

SEQ ID NO: 308184 - DNA, 25 bp, Artificial
  Probe
gccaaccagggagcaaatccgagag

SEQ ID NO: 308185 - DNA, 25 bp, Artificial
  Probe
tcttccggagcttggcctacatcca

SEQ ID NO: 308186 - DNA, 25 bp, Artificial
  Probe
ttgaggtccccatcaggccctgcta

SEQ ID NO: 308187 - DNA, 25 bp, Artificial
  Probe
aaggtgtgtgtcaccgtgacatcaa

SEQ ID NO: 308188 - DNA, 25 bp, Artificial
  Probe
tggagccacagattacacctcgtcc

SEQ ID NO: 308189 - DNA, 25 bp, Artificial
  Probe
ttggccagcccatcttccctgggga

SEQ ID NO: 308190 - DNA, 25 bp, Artificial
  Probe
ggaaagggccatagcccatccagct

SEQ ID NO: 308191 - DNA, 25 bp, Artificial
  Probe
ccagcttgtggagatcatcaaggta

SEQ ID NO: 308192 - DNA, 25 bp, Artificial
  Probe
tgagctgcttcttggccagcccatc

SEQ ID NO: 308193 - DNA, 25 bp, Artificial
  Probe
gggtagaccagcttgtggagatcat

SEQ ID NO: 308194 - DNA, 25 bp, Artificial
  Probe
ccatgtcccttgtaaatagaaccag

SEQ ID NO: 308195 - DNA, 25 bp, Artificial
  Probe
ccctcttcaacttcagtcctggtga

SEQ ID NO: 308196 - DNA, 25 bp, Artificial
  Probe
atccgagagatgaaccctaactaca

SEQ ID NO: 308197 - DNA, 25 bp, Artificial
  Probe
ggtaaatgaactacccagcatctag

SEQ ID NO: 308198 - DNA, 25 bp, Artificial
  Probe
tggaaagggccatagcccatccagc

SEQ ID NO: 308199 - DNA, 25 bp, Artificial
  Probe
tcgtcctcacaagctttaactgaga

SEQ ID NO: 308200 - DNA, 25 bp, Artificial
  Probe
tcggtactaccgtgctccggagctc

SEQ ID NO: 308201 - DNA, 25 bp, Artificial
  Probe
gagatcatcaaggtactagggacgc

SEQ ID NO: 308202 - DNA, 25 bp, Artificial
  Probe
ctcaagtgggctggaaagggccata

SEQ ID NO: 308203 - DNA, 25 bp, Artificial
  Probe
ccactagcttgtaggcagatgtctg

SEQ ID NO: 308204 - DNA, 25 bp, Artificial
  Probe
tgtaggcagatgtctgagtctctag

SEQ ID NO: 308205 - DNA, 25 bp, Artificial
  Probe
ttcctgtatgcctttgcttggtctg

SEQ ID NO: 308206 - DNA, 25 bp, Artificial
  Probe
gtgctgttgccctttccccatatgc

SEQ ID NO: 308207 - DNA, 25 bp, Artificial
  Probe
aggcagatgtctgagtctctaggtg

SEQ ID NO: 308208 - DNA, 25 bp, Artificial
  Probe
tctctaggtggtttccccattttat

SEQ ID NO: 308209 - DNA, 25 bp, Artificial
  Probe
accgtgactttgaaagtttgtgctg

SEQ ID NO: 308210 - DNA, 25 bp, Artificial
  Probe
agttagctttgatgatctcactcca

SEQ ID NO: 308211 - DNA, 25 bp, Artificial
  Probe
tccccatatgccactagcttgtagg

SEQ ID NO: 308212 - DNA, 25 bp, Artificial
  Probe
agtttgtgctgttgccctttcccca

SEQ ID NO: 308213 - DNA, 25 bp, Artificial
  Probe
attgcgtgtcccagcactgctgtgg

SEQ ID NO: 308214 - DNA, 25 bp, Artificial
  Probe
cactgctggagataggcagacctct

SEQ ID NO: 308215 - DNA, 25 bp, Artificial
  Probe
gctcttcctgtatgcctttgcttgg

SEQ ID NO: 308216 - DNA, 25 bp, Artificial
  Probe
tagcttgtaggcagatgtctgagtc

SEQ ID NO: 308217 - DNA, 25 bp, Artificial
  Probe
gactttgaaagtttgtgctgttgcc

SEQ ID NO: 308218 - DNA, 25 bp, Artificial
  Probe
tcctactggaattggctagactttt

SEQ ID NO: 308219 - DNA, 25 bp, Artificial
  Probe
gtttccccattttatagcagttagc

SEQ ID NO: 308220 - DNA, 25 bp, Artificial
  Probe
agaacatcgaagtggcttctctcac

SEQ ID NO: 308221 - DNA, 25 bp, Artificial
  Probe
ttcccctgttcctcacgttgggaat

SEQ ID NO: 308222 - DNA, 25 bp, Artificial
  Probe
gtaaatacaccgtgactttgaaagt

SEQ ID NO: 308223 - DNA, 25 bp, Artificial
  Probe
accagagaacatcgaagtggcttct

SEQ ID NO: 308224 - DNA, 25 bp, Artificial
  Probe
ctgtggttcgctcagcagctgtgct

SEQ ID NO: 308225 - DNA, 25 bp, Artificial
  Probe
tagcagttagctttgatgatctcac

SEQ ID NO: 308226 - DNA, 25 bp, Artificial
  Probe
gctttgatgatctcactccaagaaa

SEQ ID NO: 308227 - DNA, 25 bp, Artificial
  Probe
ttagctttgatgatctcactccaag

SEQ ID NO: 308228 - DNA, 25 bp, Artificial
  Probe
attgccttcgatacccaccagagaa

SEQ ID NO: 308229 - DNA, 25 bp, Artificial
  Probe
ccccattttatagcagttagctttg

SEQ ID NO: 308230 - DNA, 25 bp, Artificial
  Probe
gcaaagattgcgtgtcccagcactg

SEQ ID NO: 308231 - DNA, 25 bp, Artificial
  Probe
tatagcagttagctttgatgatctc

SEQ ID NO: 308232 - DNA, 25 bp, Artificial
  Probe
caaagattgcgtgtcccagcactgc

SEQ ID NO: 308233 - DNA, 25 bp, Artificial
  Probe
ccattttatagcagttagctttgat

SEQ ID NO: 308234 - DNA, 25 bp, Artificial
  Probe
agcactgctgtggttcgctcagcag

SEQ ID NO: 308235 - DNA, 25 bp, Artificial
  Probe
tgttcctcacgttgggaatgtaaat

SEQ ID NO: 308236 - DNA, 25 bp, Artificial
  Probe
tatgccactagcttgtaggcagatg

SEQ ID NO: 308237 - DNA, 25 bp, Artificial
  Probe
tggctagacttttccctgctgccac

SEQ ID NO: 308238 - DNA, 25 bp, Artificial
  Probe
catcgaagtggcttctctcactgct

SEQ ID NO: 308239 - DNA, 25 bp, Artificial
  Probe
aatacaccgtgactttgaaagtttg

SEQ ID NO: 308240 - DNA, 25 bp, Artificial
  Probe
gagataggcagacctcttcctactg

SEQ ID NO: 308241 - DNA, 25 bp, Artificial
  Probe
gaaagtttgtgctgttgccctttcc

SEQ ID NO: 308242 - DNA, 25 bp, Artificial
  Probe
ggtggtttccccattttatagcagt

SEQ ID NO: 308243 - DNA, 25 bp, Artificial
  Probe
gagtctctaggtggtttccccattt

SEQ ID NO: 308244 - DNA, 25 bp, Artificial
  Probe
gaattggctagacttttccctgctg

SEQ ID NO: 308245 - DNA, 25 bp, Artificial
  Probe
cctcacgttgggaatgtaaatacac

SEQ ID NO: 308246 - DNA, 25 bp, Artificial
  Probe
cttcgatacccaccagagaacatcg

SEQ ID NO: 308247 - DNA, 25 bp, Artificial
  Probe
cttctctcactgctggagataggca

SEQ ID NO: 308248 - DNA, 25 bp, Artificial
  Probe
gatgtctgagtctctaggtggtttc

SEQ ID NO: 308249 - DNA, 25 bp, Artificial
  Probe
gcacctttggatgttcctacgaaga

SEQ ID NO: 308250 - DNA, 25 bp, Artificial
  Probe
tgactgccggggaccaatgaatcag

SEQ ID NO: 308251 - DNA, 25 bp, Artificial
  Probe
gctacaggcttagatgtgctgggaa

SEQ ID NO: 308252 - DNA, 25 bp, Artificial
  Probe
acagcacctttggatgttcctacga

SEQ ID NO: 308253 - DNA, 25 bp, Artificial
  Probe
agatgtgctgggaaaccggagttac

SEQ ID NO: 308254 - DNA, 25 bp, Artificial
  Probe
cacctttggatgttcctacgaagag

SEQ ID NO: 308255 - DNA, 25 bp, Artificial
  Probe
ttcctggtgccaaggttcccacgtg

SEQ ID NO: 308256 - DNA, 25 bp, Artificial
  Probe
acctttggatgttcctacgaagaga

SEQ ID NO: 308257 - DNA, 25 bp, Artificial
  Probe
cttggaggctacaggcttagatgtg

SEQ ID NO: 308258 - DNA, 25 bp, Artificial
  Probe
gggaacagcacctttggatgttcct

SEQ ID NO: 308259 - DNA, 25 bp, Artificial
  Probe
cttcctggtgccaaggttcccacgt

SEQ ID NO: 308260 - DNA, 25 bp, Artificial
  Probe
ctgccggggaccaatgaatcagtgc

SEQ ID NO: 308261 - DNA, 25 bp, Artificial
  Probe
agcacctttggatgttcctacgaag

SEQ ID NO: 308262 - DNA, 25 bp, Artificial
  Probe
gatgtgctgggaaaccggagttaca

SEQ ID NO: 308263 - DNA, 25 bp, Artificial
  Probe
gactgccggggaccaatgaatcagt

SEQ ID NO: 308264 - DNA, 25 bp, Artificial
  Probe
gaccctcagactgtggggcatccct

SEQ ID NO: 308265 - DNA, 25 bp, Artificial
  Probe
tgccggggaccaatgaatcagtgct

SEQ ID NO: 308266 - DNA, 25 bp, Artificial
  Probe
aatcagtgcttggaggctacaggct

SEQ ID NO: 308267 - DNA, 25 bp, Artificial
  Probe
actgccggggaccaatgaatcagtg

SEQ ID NO: 308268 - DNA, 25 bp, Artificial
  Probe
tacaggcttagatgtgctgggaaac

SEQ ID NO: 308269 - DNA, 25 bp, Artificial
  Probe
acaggcttagatgtgctgggaaacc

SEQ ID NO: 308270 - DNA, 25 bp, Artificial
  Probe
cacggcttcctggtgccaaggttcc

SEQ ID NO: 308271 - DNA, 25 bp, Artificial
  Probe
ccaatgaatcagtgcttggaggcta

SEQ ID NO: 308272 - DNA, 25 bp, Artificial
  Probe
tgaccctcagactgtggggcatccc

SEQ ID NO: 308273 - DNA, 25 bp, Artificial
  Probe
atgtgctgggaaaccggagttacac

SEQ ID NO: 308274 - DNA, 25 bp, Artificial
  Probe
accaatgaatcagtgcttggaggct

SEQ ID NO: 308275 - DNA, 25 bp, Artificial
  Probe
cctgaccctcagactgtggggcatc

SEQ ID NO: 308276 - DNA, 25 bp, Artificial
  Probe
tcctgaccctcagactgtggggcat

SEQ ID NO: 308277 - DNA, 25 bp, Artificial
  Probe
tgggcctcaagaactggaagagaat

SEQ ID NO: 308278 - DNA, 25 bp, Artificial
  Probe
tgaatcagtgcttggaggctacagg

SEQ ID NO: 308279 - DNA, 25 bp, Artificial
  Probe
ggcctcaagaactggaagagaattg

SEQ ID NO: 308280 - DNA, 25 bp, Artificial
  Probe
aacagcacctttggatgttcctacg

SEQ ID NO: 308281 - DNA, 25 bp, Artificial
  Probe
caggcttagatgtgctgggaaaccg

SEQ ID NO: 308282 - DNA, 25 bp, Artificial
  Probe
gcctcaagaactggaagagaattga

SEQ ID NO: 308283 - DNA, 25 bp, Artificial
  Probe
gaccaatgaatcagtgcttggaggc

SEQ ID NO: 308284 - DNA, 25 bp, Artificial
  Probe
gaatcagtgcttggaggctacaggc

SEQ ID NO: 308285 - DNA, 25 bp, Artificial
  Probe
aatgaatcagtgcttggaggctaca

SEQ ID NO: 308286 - DNA, 25 bp, Artificial
  Probe
ccacggcttcctggtgccaaggttc

SEQ ID NO: 308287 - DNA, 25 bp, Artificial
  Probe
atcagtgcttggaggctacaggctt

SEQ ID NO: 308288 - DNA, 25 bp, Artificial
  Probe
gaacagcacctttggatgttcctac

SEQ ID NO: 308289 - DNA, 25 bp, Artificial
  Probe
ggggaacagcacctttggatgttcc

SEQ ID NO: 308290 - DNA, 25 bp, Artificial
  Probe
tgcttggaggctacaggcttagatg

SEQ ID NO: 308291 - DNA, 25 bp, Artificial
  Probe
ctacaggcttagatgtgctgggaaa

SEQ ID NO: 308292 - DNA, 25 bp, Artificial
  Probe
ctgaccctcagactgtggggcatcc

SEQ ID NO: 308293 - DNA, 25 bp, Artificial
  Probe
gtgcttggaggctacaggcttagat

SEQ ID NO: 308294 - DNA, 25 bp, Artificial
  Probe
ggaacagcacctttggatgttccta

SEQ ID NO: 308295 - DNA, 25 bp, Artificial
  Probe
acacaatctgcgatcatcccggagt

SEQ ID NO: 308296 - DNA, 25 bp, Artificial
  Probe
cccctagtatgttgagttgtcccag

SEQ ID NO: 308297 - DNA, 25 bp, Artificial
  Probe
aaccatagtaactgccttggctaag

SEQ ID NO: 308298 - DNA, 25 bp, Artificial
  Probe
atgctaccttcgaggcctagctcaa

SEQ ID NO: 308299 - DNA, 25 bp, Artificial
  Probe
accttcgaggcctagctcaattttg

SEQ ID NO: 308300 - DNA, 25 bp, Artificial
  Probe
gttgaacttcgttcgcttgggttct

SEQ ID NO: 308301 - DNA, 25 bp, Artificial
  Probe
caaatagcagattgcccatgccaga

SEQ ID NO: 308302 - DNA, 25 bp, Artificial
  Probe
taatgaaaccatagtaactgccttg

SEQ ID NO: 308303 - DNA, 25 bp, Artificial
  Probe
gcctaattttcatgcggcagaatgt

SEQ ID NO: 308304 - DNA, 25 bp, Artificial
  Probe
actatctaaattgtcagtgtctatg

SEQ ID NO: 308305 - DNA, 25 bp, Artificial
  Probe
gaatgtctcccctagtatgttgagt

SEQ ID NO: 308306 - DNA, 25 bp, Artificial
  Probe
gatcacagcacacaatctgcgatca

SEQ ID NO: 308307 - DNA, 25 bp, Artificial
  Probe
tagtatgttgagttgtcccagctgg

SEQ ID NO: 308308 - DNA, 25 bp, Artificial
  Probe
cggcagaatgtctcccctagtatgt

SEQ ID NO: 308309 - DNA, 25 bp, Artificial
  Probe
tagtaactgccttggctaagatcac

SEQ ID NO: 308310 - DNA, 25 bp, Artificial
  Probe
cgttcgcttgggttctcctgcattt

SEQ ID NO: 308311 - DNA, 25 bp, Artificial
  Probe
aatctgcgatcatcccggagtattt

SEQ ID NO: 308312 - DNA, 25 bp, Artificial
  Probe
atagtaactgccttggctaagatca

SEQ ID NO: 308313 - DNA, 25 bp, Artificial
  Probe
gaatcaggttgaacttcgttcgctt

SEQ ID NO: 308314 - DNA, 25 bp, Artificial
  Probe
taattgttagctttgccccaaatag

SEQ ID NO: 308315 - DNA, 25 bp, Artificial
  Probe
caggttgaacttcgttcgcttgggt

SEQ ID NO: 308316 - DNA, 25 bp, Artificial
  Probe
agcagattgcccatgccagagtctg

SEQ ID NO: 308317 - DNA, 25 bp, Artificial
  Probe
tgtcagtgtctatggcctaattttc

SEQ ID NO: 308318 - DNA, 25 bp, Artificial
  Probe
catgccagagtctgggtcgtgctga

SEQ ID NO: 308319 - DNA, 25 bp, Artificial
  Probe
cagagtctgggtcgtgctgatgcta

SEQ ID NO: 308320 - DNA, 25 bp, Artificial
  Probe
gtgtctatggcctaattttcatgcg

SEQ ID NO: 308321 - DNA, 25 bp, Artificial
  Probe
cgatcatcccggagtatttggcatt

SEQ ID NO: 308322 - DNA, 25 bp, Artificial
  Probe
ttcatctgcagtaatgaaaccatag

SEQ ID NO: 308323 - DNA, 25 bp, Artificial
  Probe
gcagattgcccatgccagagtctgg

SEQ ID NO: 308324 - DNA, 25 bp, Artificial
  Probe
cccagctgggaaatgtctctacatt

SEQ ID NO: 308325 - DNA, 25 bp, Artificial
  Probe
aactgccttggctaagatcacagca

SEQ ID NO: 308326 - DNA, 25 bp, Artificial
  Probe
ttttcatgcggcagaatgtctcccc

SEQ ID NO: 308327 - DNA, 25 bp, Artificial
  Probe
gcctagctcaattttgcaaagcata

SEQ ID NO: 308328 - DNA, 25 bp, Artificial
  Probe
tcccggagtatttggcattacttct

SEQ ID NO: 308329 - DNA, 25 bp, Artificial
  Probe
aacttcgttcgcttgggttctcctg

SEQ ID NO: 308330 - DNA, 25 bp, Artificial
  Probe
acttcgttcgcttgggttctcctgc

SEQ ID NO: 308331 - DNA, 25 bp, Artificial
  Probe
attgcccatgccagagtctgggtcg

SEQ ID NO: 308332 - DNA, 25 bp, Artificial
  Probe
tatgttgagttgtcccagctgggaa

SEQ ID NO: 308333 - DNA, 25 bp, Artificial
  Probe
tagctttgccccaaatagcagattg

SEQ ID NO: 308334 - DNA, 25 bp, Artificial
  Probe
gtctggagtcatcaccctcatcaac

SEQ ID NO: 308335 - DNA, 25 bp, Artificial
  Probe
aattgttagctttgccccaaatagc

SEQ ID NO: 308336 - DNA, 25 bp, Artificial
  Probe
ttgagttgtcccagctgggaaatgt

SEQ ID NO: 308337 - DNA, 25 bp, Artificial
  Probe
gtatttggcattacttctgatggtc

SEQ ID NO: 308338 - DNA, 25 bp, Artificial
  Probe
gtcccagctgggaaatgtctctaca

SEQ ID NO: 308339 - DNA, 25 bp, Artificial
  Probe
cattacttctgatggtcagtcaaga

SEQ ID NO: 308340 - DNA, 25 bp, Artificial
  Probe
aaatccaatccagtgtgtttgcttg

SEQ ID NO: 308341 - DNA, 25 bp, Artificial
  Probe
gggttaattttgtcctgtgccttat

SEQ ID NO: 308342 - DNA, 25 bp, Artificial
  Probe
tctcttttttgttcggtggaagcat

SEQ ID NO: 308343 - DNA, 25 bp, Artificial
  Probe
ttgagtcctataacctatagatgtg

SEQ ID NO: 308344 - DNA, 25 bp, Artificial
  Probe
gcttgagtcctataacctatagatg

SEQ ID NO: 308345 - DNA, 25 bp, Artificial
  Probe
cctgaatcagtacgtggggttaatt

SEQ ID NO: 308346 - DNA, 25 bp, Artificial
  Probe
ctataacctatagatgtgatagcaa

SEQ ID NO: 308347 - DNA, 25 bp, Artificial
  Probe
gtgccttatgtggaaaggaacttct

SEQ ID NO: 308348 - DNA, 25 bp, Artificial
  Probe
ccctgaatcagtacgtggggttaat

SEQ ID NO: 308349 - DNA, 25 bp, Artificial
  Probe
tcccctgaatcagtacgtggggtta

SEQ ID NO: 308350 - DNA, 25 bp, Artificial
  Probe
aagcatgtgcaggagacatttcatc

SEQ ID NO: 308351 - DNA, 25 bp, Artificial
  Probe
tttgtcctgtgccttatgtggaaag

SEQ ID NO: 308352 - DNA, 25 bp, Artificial
  Probe
ttcatttcccctgaatcagtacgtg

SEQ ID NO: 308353 - DNA, 25 bp, Artificial
  Probe
tgtcctgtgccttatgtggaaagga

SEQ ID NO: 308354 - DNA, 25 bp, Artificial
  Probe
tgtgccttatgtggaaaggaacttc

SEQ ID NO: 308355 - DNA, 25 bp, Artificial
  Probe
gcaggagacatttcatcccaacata

SEQ ID NO: 308356 - DNA, 25 bp, Artificial
  Probe
agcatgtgcaggagacatttcatcc

SEQ ID NO: 308357 - DNA, 25 bp, Artificial
  Probe
ttgtcctgtgccttatgtggaaagg

SEQ ID NO: 308358 - DNA, 25 bp, Artificial
  Probe
tcatttcccctgaatcagtacgtgg

SEQ ID NO: 308359 - DNA, 25 bp, Artificial
  Probe
tcctataacctatagatgtgatagc

SEQ ID NO: 308360 - DNA, 25 bp, Artificial
  Probe
aataatgtgcttgagtcctataacc

SEQ ID NO: 308361 - DNA, 25 bp, Artificial
  Probe
agcaaagaaacacaagccaggaaaa

SEQ ID NO: 308362 - DNA, 25 bp, Artificial
  Probe
tgagtcctataacctatagatgtga

SEQ ID NO: 308363 - DNA, 25 bp, Artificial
  Probe
gtcctataacctatagatgtgatag

SEQ ID NO: 308364 - DNA, 25 bp, Artificial
  Probe
atgtgcttgagtcctataacctata

SEQ ID NO: 308365 - DNA, 25 bp, Artificial
  Probe
tttcccctgaatcagtacgtggggt

SEQ ID NO: 308366 - DNA, 25 bp, Artificial
  Probe
ggttaattttgtcctgtgccttatg

SEQ ID NO: 308367 - DNA, 25 bp, Artificial
  Probe
cctgtgccttatgtggaaaggaact

SEQ ID NO: 308368 - DNA, 25 bp, Artificial
  Probe
ttcccctgaatcagtacgtggggtt

SEQ ID NO: 308369 - DNA, 25 bp, Artificial
  Probe
aattttgtcctgtgccttatgtgga

SEQ ID NO: 308370 - DNA, 25 bp, Artificial
  Probe
ataatgtgcttgagtcctataacct

SEQ ID NO: 308371 - DNA, 25 bp, Artificial
  Probe
catttcccctgaatcagtacgtggg

SEQ ID NO: 308372 - DNA, 25 bp, Artificial
  Probe
taattttgtcctgtgccttatgtgg

SEQ ID NO: 308373 - DNA, 25 bp, Artificial
  Probe
tataacctatagatgtgatagcaaa

SEQ ID NO: 308374 - DNA, 25 bp, Artificial
  Probe
cttgagtcctataacctatagatgt

SEQ ID NO: 308375 - DNA, 25 bp, Artificial
  Probe
ctgtgccttatgtggaaaggaactt

SEQ ID NO: 308376 - DNA, 25 bp, Artificial
  Probe
agtcctataacctatagatgtgata

SEQ ID NO: 308377 - DNA, 25 bp, Artificial
  Probe
gtgcttgagtcctataacctataga

SEQ ID NO: 308378 - DNA, 25 bp, Artificial
  Probe
gagtcctataacctatagatgtgat

SEQ ID NO: 308379 - DNA, 25 bp, Artificial
  Probe
gtcctgtgccttatgtggaaaggaa

SEQ ID NO: 308380 - DNA, 25 bp, Artificial
  Probe
tcctgtgccttatgtggaaaggaac

SEQ ID NO: 308381 - DNA, 25 bp, Artificial
  Probe
tgtgcttgagtcctataacctatag

SEQ ID NO: 308382 - DNA, 25 bp, Artificial
  Probe
atttcccctgaatcagtacgtgggg

SEQ ID NO: 308383 - DNA, 25 bp, Artificial
  Probe
tgcttgagtcctataacctatagat

SEQ ID NO: 308384 - DNA, 25 bp, Artificial
  Probe
taatgtgcttgagtcctataaccta

SEQ ID NO: 308385 - DNA, 25 bp, Artificial
  Probe
cctataacctatagatgtgatagca

SEQ ID NO: 308386 - DNA, 25 bp, Artificial
  Probe
aatgtgcttgagtcctataacctat

SEQ ID NO: 308387 - DNA, 25 bp, Artificial
  Probe
tgcaaaatcttctgtcaaatgaaga

SEQ ID NO: 308388 - DNA, 25 bp, Artificial
  Probe
aaggcttgtcaaggtgcaaaatctt

SEQ ID NO: 308389 - DNA, 25 bp, Artificial
  Probe
tgaaggcttgtcaaggtgcaaaatc

SEQ ID NO: 308390 - DNA, 25 bp, Artificial
  Probe
gctgttctgagtccttgaaggcttg

SEQ ID NO: 308391 - DNA, 25 bp, Artificial
  Probe
tcacacatgcacctgccatgtgcgg

SEQ ID NO: 308392 - DNA, 25 bp, Artificial
  Probe
tgtttaaagaacgtcatctgctgtt

SEQ ID NO: 308393 - DNA, 25 bp, Artificial
  Probe
agcaagctaccctgaaaccttagca

SEQ ID NO: 308394 - DNA, 25 bp, Artificial
  Probe
ctcccctggaaagaataatgatcac

SEQ ID NO: 308395 - DNA, 25 bp, Artificial
  Probe
gaaacagcaagctaccctgaaacct

SEQ ID NO: 308396 - DNA, 25 bp, Artificial
  Probe
aaggaaacagcaagctaccctgaaa

SEQ ID NO: 308397 - DNA, 25 bp, Artificial
  Probe
atcttctgtcaaatgaagagtcgtc

SEQ ID NO: 308398 - DNA, 25 bp, Artificial
  Probe
ttctgagtccttgaaggcttgtcaa

SEQ ID NO: 308399 - DNA, 25 bp, Artificial
  Probe
acgtcatctgctgttctgagtcctt

SEQ ID NO: 308400 - DNA, 25 bp, Artificial
  Probe
gtcatctgctgttctgagtccttga

SEQ ID NO: 308401 - DNA, 25 bp, Artificial
  Probe
gcaagctaccctgaaaccttagcac

SEQ ID NO: 308402 - DNA, 25 bp, Artificial
  Probe
aggtgcaaaatcttctgtcaaatga

SEQ ID NO: 308403 - DNA, 25 bp, Artificial
  Probe
gagtcgtcacacatgcacctgccat

SEQ ID NO: 308404 - DNA, 25 bp, Artificial
  Probe
caccgtctggtttgcttgtttaaag

SEQ ID NO: 308405 - DNA, 25 bp, Artificial
  Probe
atgatcaccgtctggtttgcttgtt

SEQ ID NO: 308406 - DNA, 25 bp, Artificial
  Probe
tcaaggtgcaaaatcttctgtcaaa

SEQ ID NO: 308407 - DNA, 25 bp, Artificial
  Probe
tgcacctgccatgtgcggtgagtct

SEQ ID NO: 308408 - DNA, 25 bp, Artificial
  Probe
ttctgtcaaatgaagagtcgtcaca

SEQ ID NO: 308409 - DNA, 25 bp, Artificial
  Probe
aggaaacagcaagctaccctgaaac

SEQ ID NO: 308410 - DNA, 25 bp, Artificial
  Probe
taatgatcaccgtctggtttgcttg

SEQ ID NO: 308411 - DNA, 25 bp, Artificial
  Probe
tcttctgtcaaatgaagagtcgtca

SEQ ID NO: 308412 - DNA, 25 bp, Artificial
  Probe
tctgctgttctgagtccttgaaggc

SEQ ID NO: 308413 - DNA, 25 bp, Artificial
  Probe
aaatcttctgtcaaatgaagagtcg

SEQ ID NO: 308414 - DNA, 25 bp, Artificial
  Probe
taaagaacgtcatctgctgttctga

SEQ ID NO: 308415 - DNA, 25 bp, Artificial
  Probe
tccttgaaggcttgtcaaggtgcaa

SEQ ID NO: 308416 - DNA, 25 bp, Artificial
  Probe
gttctgagtccttgaaggcttgtca

SEQ ID NO: 308417 - DNA, 25 bp, Artificial
  Probe
ctgttctgagtccttgaaggcttgt

SEQ ID NO: 308418 - DNA, 25 bp, Artificial
  Probe
tcgtcacacatgcacctgccatgtg

SEQ ID NO: 308419 - DNA, 25 bp, Artificial
  Probe
cttgaaggcttgtcaaggtgcaaaa

SEQ ID NO: 308420 - DNA, 25 bp, Artificial
  Probe
agaacgtcatctgctgttctgagtc

SEQ ID NO: 308421 - DNA, 25 bp, Artificial
  Probe
gcaaaatcttctgtcaaatgaagag

SEQ ID NO: 308422 - DNA, 25 bp, Artificial
  Probe
agaataatgatcaccgtctggtttg

SEQ ID NO: 308423 - DNA, 25 bp, Artificial
  Probe
gtccttgaaggcttgtcaaggtgca

SEQ ID NO: 308424 - DNA, 25 bp, Artificial
  Probe
atcaccgtctggtttgcttgtttaa

SEQ ID NO: 308425 - DNA, 25 bp, Artificial
  Probe
ctgagtccttgaaggcttgtcaagg

SEQ ID NO: 308426 - DNA, 25 bp, Artificial
  Probe
ggaaacagcaagctaccctgaaacc

SEQ ID NO: 308427 - DNA, 25 bp, Artificial
  Probe
agtcgtcacacatgcacctgccatg

SEQ ID NO: 308428 - DNA, 25 bp, Artificial
  Probe
aaatgaagagtcgtcacacatgcac

SEQ ID NO: 308429 - DNA, 25 bp, Artificial
  Probe
gcacctgccatgtgcggtgagtctt

SEQ ID NO: 308430 - DNA, 25 bp, Artificial
  Probe
ttaaagaacgtcatctgctgttctg

SEQ ID NO: 308431 - DNA, 25 bp, Artificial
  Probe
aggcttgtcaaggtgcaaaatcttc

SEQ ID NO: 308432 - DNA, 25 bp, Artificial
  Probe
atgaagagtcgtcacacatgcacct

SEQ ID NO: 308433 - DNA, 25 bp, Artificial
  Probe
atcaagcctcatcagacaccagagg

SEQ ID NO: 308434 - DNA, 25 bp, Artificial
  Probe
caagcctcatcagacaccagaggag

SEQ ID NO: 308435 - DNA, 25 bp, Artificial
  Probe
gccttcagcggcaaatcaaacctga

SEQ ID NO: 308436 - DNA, 25 bp, Artificial
  Probe
agttcgtctctaaccgtgcatatga

SEQ ID NO: 308437 - DNA, 25 bp, Artificial
  Probe
ccttcagcggcaaatcaaacctgac

SEQ ID NO: 308438 - DNA, 25 bp, Artificial
  Probe
tctcgaatcacgtcgcttattgtgc

SEQ ID NO: 308439 - DNA, 25 bp, Artificial
  Probe
gtgagaaaccgtatggctgcaatga

SEQ ID NO: 308440 - DNA, 25 bp, Artificial
  Probe
ttttctcgaatcacgtcgcttattg

SEQ ID NO: 308441 - DNA, 25 bp, Artificial
  Probe
cgcttattgtgcatgtgagaattca

SEQ ID NO: 308442 - DNA, 25 bp, Artificial
  Probe
tgagaaaccgtatggctgcaatgag

SEQ ID NO: 308443 - DNA, 25 bp, Artificial
  Probe
gtcccatcacatcagacaccagaga

SEQ ID NO: 308444 - DNA, 25 bp, Artificial
  Probe
aattttcaggcagaagcagtacctc

SEQ ID NO: 308445 - DNA, 25 bp, Artificial
  Probe
acctgactgagcatgagaaaattca

SEQ ID NO: 308446 - DNA, 25 bp, Artificial
  Probe
aatcaaacctgactgagcatgagaa

SEQ ID NO: 308447 - DNA, 25 bp, Artificial
  Probe
cgtcgcttattgtgcatgtgagaat

SEQ ID NO: 308448 - DNA, 25 bp, Artificial
  Probe
caggcagaagcagtacctcatcaaa

SEQ ID NO: 308449 - DNA, 25 bp, Artificial
  Probe
aggccttcagccagaagtcccatca

SEQ ID NO: 308450 - DNA, 25 bp, Artificial
  Probe
tcgcttattgtgcatgtgagaattc

SEQ ID NO: 308451 - DNA, 25 bp, Artificial
  Probe
tcacgtcgcttattgtgcatgtgag

SEQ ID NO: 308452 - DNA, 25 bp, Artificial
  Probe
aagcctcatcagacaccagaggagc

SEQ ID NO: 308453 - DNA, 25 bp, Artificial
  Probe
cagcggcaaatcaaacctgactgag

SEQ ID NO: 308454 - DNA, 25 bp, Artificial
  Probe
ccgtgcatatgaggagccacacggg

SEQ ID NO: 308455 - DNA, 25 bp, Artificial
  Probe
gccttttctcgaatcacgtcgctta

SEQ ID NO: 308456 - DNA, 25 bp, Artificial
  Probe
gaaaggccttttctcgaatcacgtc

SEQ ID NO: 308457 - DNA, 25 bp, Artificial
  Probe
ctttacacatgagaatccacactgg

SEQ ID NO: 308458 - DNA, 25 bp, Artificial
  Probe
tttctcgaatcacgtcgcttattgt

SEQ ID NO: 308459 - DNA, 25 bp, Artificial
  Probe
gaagtcccatcacatcagacaccag

SEQ ID NO: 308460 - DNA, 25 bp, Artificial
  Probe
ggcagaagcagtacctcatcaaaca

SEQ ID NO: 308461 - DNA, 25 bp, Artificial
  Probe
gaaggctttttctcagttctccact

SEQ ID NO: 308462 - DNA, 25 bp, Artificial
  Probe
tacacatgagaatccacactggcga

SEQ ID NO: 308463 - DNA, 25 bp, Artificial
  Probe
aaacctgactgagcatgagaaaatt

SEQ ID NO: 308464 - DNA, 25 bp, Artificial
  Probe
gaatcacgtcgcttattgtgcatgt

SEQ ID NO: 308465 - DNA, 25 bp, Artificial
  Probe
cttctgtcagagttcgtctctaacc

SEQ ID NO: 308466 - DNA, 25 bp, Artificial
  Probe
agccttctgtcagagttcgtctcta

SEQ ID NO: 308467 - DNA, 25 bp, Artificial
  Probe
cgtctctaaccgtgcatatgaggag

SEQ ID NO: 308468 - DNA, 25 bp, Artificial
  Probe
ggcaaatcaaacctgactgagcatg

SEQ ID NO: 308469 - DNA, 25 bp, Artificial
  Probe
aaccgtgcatatgaggagccacacg

SEQ ID NO: 308470 - DNA, 25 bp, Artificial
  Probe
tgtcagagttcgtctctaaccgtgc

SEQ ID NO: 308471 - DNA, 25 bp, Artificial
  Probe
gctttacacatgagaatccacactg

SEQ ID NO: 308472 - DNA, 25 bp, Artificial
  Probe
gcttattgtgcatgtgagaattcac

SEQ ID NO: 308473 - DNA, 25 bp, Artificial
  Probe
gcagaagcagtacctcatcaaacat

SEQ ID NO: 308474 - DNA, 25 bp, Artificial
  Probe
tgggaaggctttttctcagttctcc

SEQ ID NO: 308475 - DNA, 25 bp, Artificial
  Probe
tgtgggaaggctttttctcagttct

SEQ ID NO: 308476 - DNA, 25 bp, Artificial
  Probe
tcagagttcgtctctaaccgtgcat

SEQ ID NO: 308477 - DNA, 25 bp, Artificial
  Probe
gcggaaaggccttttctcgaatcac

SEQ ID NO: 308478 - DNA, 25 bp, Artificial
  Probe
gtctctaaccgtgcatatgaggagc

SEQ ID NO: 308479 - DNA, 25 bp, Artificial
  Probe
ttgtctgtcttcttatccccagagt

SEQ ID NO: 308480 - DNA, 25 bp, Artificial
  Probe
tctgtcttcttatccccagagttcc

SEQ ID NO: 308481 - DNA, 25 bp, Artificial
  Probe
tatccccagagttccccctagaggc

SEQ ID NO: 308482 - DNA, 25 bp, Artificial
  Probe
tccccctagaggcaggggggcatgc

SEQ ID NO: 308483 - DNA, 25 bp, Artificial
  Probe
tcttcttatccccagagttccccct

SEQ ID NO: 308484 - DNA, 25 bp, Artificial
  Probe
tgtcttcttatccccagagttcccc

SEQ ID NO: 308485 - DNA, 25 bp, Artificial
  Probe
ccagagttccccctagaggcagggg

SEQ ID NO: 308486 - DNA, 25 bp, Artificial
  Probe
atccccagagttccccctagaggca

SEQ ID NO: 308487 - DNA, 25 bp, Artificial
  Probe
tagaggcaggggggcatgcatgtct

SEQ ID NO: 308488 - DNA, 25 bp, Artificial
  Probe
cagagttccccctagaggcaggggg

SEQ ID NO: 308489 - DNA, 25 bp, Artificial
  Probe
tgtctgtcttcttatccccagagtt

SEQ ID NO: 308490 - DNA, 25 bp, Artificial
  Probe
ttatccccagagttccccctagagg

SEQ ID NO: 308491 - DNA, 25 bp, Artificial
  Probe
gtctgtcttcttatccccagagttc

SEQ ID NO: 308492 - DNA, 25 bp, Artificial
  Probe
ccccctagaggcaggggggcatgca

SEQ ID NO: 308493 - DNA, 25 bp, Artificial
  Probe
ctagaggcaggggggcatgcatgtc

SEQ ID NO: 308494 - DNA, 25 bp, Artificial
  Probe
ttcttatccccagagttccccctag

SEQ ID NO: 308495 - DNA, 25 bp, Artificial
  Probe
cttatccccagagttccccctagag

SEQ ID NO: 308496 - DNA, 25 bp, Artificial
  Probe
cccctagaggcaggggggcatgcat

SEQ ID NO: 308497 - DNA, 25 bp, Artificial
  Probe
ttccccctagaggcaggggggcatg

SEQ ID NO: 308498 - DNA, 25 bp, Artificial
  Probe
cctagaggcaggggggcatgcatgt

SEQ ID NO: 308499 - DNA, 25 bp, Artificial
  Probe
gttccccctagaggcaggggggcat

SEQ ID NO: 308500 - DNA, 25 bp, Artificial
  Probe
cccagagttccccctagaggcaggg

SEQ ID NO: 308501 - DNA, 25 bp, Artificial
  Probe
ccctagaggcaggggggcatgcatg

SEQ ID NO: 308502 - DNA, 25 bp, Artificial
  Probe
tcttatccccagagttccccctaga

SEQ ID NO: 308503 - DNA, 25 bp, Artificial
  Probe
tccccagagttccccctagaggcag

SEQ ID NO: 308504 - DNA, 25 bp, Artificial
  Probe
ccccagagttccccctagaggcagg

SEQ ID NO: 308505 - DNA, 25 bp, Artificial
  Probe
ctgtcttcttatccccagagttccc

SEQ ID NO: 308506 - DNA, 25 bp, Artificial
  Probe
tcccaatagtgtttggaattacgtt

SEQ ID NO: 308507 - DNA, 25 bp, Artificial
  Probe
cttcccaatagtgtttggaattacg

SEQ ID NO: 308508 - DNA, 25 bp, Artificial
  Probe
gaccttaaatgctattgtaacttgc

SEQ ID NO: 308509 - DNA, 25 bp, Artificial
  Probe
ctggaacataattcctgccatgaaa

SEQ ID NO: 308510 - DNA, 25 bp, Artificial
  Probe
ttctttctcctgtggtctggggctc

SEQ ID NO: 308511 - DNA, 25 bp, Artificial
  Probe
gaagaccttaaatgctattgtaact

SEQ ID NO: 308512 - DNA, 25 bp, Artificial
  Probe
aaagtttctttctcctgtggtctgg

SEQ ID NO: 308513 - DNA, 25 bp, Artificial
  Probe
tctggaacataattcctgccatgaa

SEQ ID NO: 308514 - DNA, 25 bp, Artificial
  Probe
ccatgaaagcaacttcccaatagtg

SEQ ID NO: 308515 - DNA, 25 bp, Artificial
  Probe
ggaacataattcctgccatgaaagc

SEQ ID NO: 308516 - DNA, 25 bp, Artificial
  Probe
atgctattgtaacttgcttgagaac

SEQ ID NO: 308517 - DNA, 25 bp, Artificial
  Probe
tgccatgaaagcaacttcccaatag

SEQ ID NO: 308518 - DNA, 25 bp, Artificial
  Probe
catgaaagcaacttcccaatagtgt

SEQ ID NO: 308519 - DNA, 25 bp, Artificial
  Probe
gcaacttcccaatagtgtttggaat

SEQ ID NO: 308520 - DNA, 25 bp, Artificial
  Probe
gtaccagggcaaataactggcacca

SEQ ID NO: 308521 - DNA, 25 bp, Artificial
  Probe
agtttctttctcctgtggtctgggg

SEQ ID NO: 308522 - DNA, 25 bp, Artificial
  Probe
gagaaaagtttctttctcctgtggt

SEQ ID NO: 308523 - DNA, 25 bp, Artificial
  Probe
cgtggactctggaacataattcctg

SEQ ID NO: 308524 - DNA, 25 bp, Artificial
  Probe
aagtttctttctcctgtggtctggg

SEQ ID NO: 308525 - DNA, 25 bp, Artificial
  Probe
agcgtggactctggaacataattcc

SEQ ID NO: 308526 - DNA, 25 bp, Artificial
  Probe
tgggcccaaaggtaccagggcaaat

SEQ ID NO: 308527 - DNA, 25 bp, Artificial
  Probe
gcgtggactctggaacataattcct

SEQ ID NO: 308528 - DNA, 25 bp, Artificial
  Probe
tgctattgtaacttgcttgagaact

SEQ ID NO: 308529 - DNA, 25 bp, Artificial
  Probe
actctggaacataattcctgccatg

SEQ ID NO: 308530 - DNA, 25 bp, Artificial
  Probe
agaccttaaatgctattgtaacttg

SEQ ID NO: 308531 - DNA, 25 bp, Artificial
  Probe
gccatgaaagcaacttcccaatagt

SEQ ID NO: 308532 - DNA, 25 bp, Artificial
  Probe
gaacataattcctgccatgaaagca

SEQ ID NO: 308533 - DNA, 25 bp, Artificial
  Probe
tttctcctgtggtctggggctcatc

SEQ ID NO: 308534 - DNA, 25 bp, Artificial
  Probe
aagcaacttcccaatagtgtttgga

SEQ ID NO: 308535 - DNA, 25 bp, Artificial
  Probe
tccagcgtggactctggaacataat

SEQ ID NO: 308536 - DNA, 25 bp, Artificial
  Probe
gactctggaacataattcctgccat

SEQ ID NO: 308537 - DNA, 25 bp, Artificial
  Probe
tctttctcctgtggtctggggctca

SEQ ID NO: 308538 - DNA, 25 bp, Artificial
  Probe
gtttctttctcctgtggtctggggc

SEQ ID NO: 308539 - DNA, 25 bp, Artificial
  Probe
cagcgtggactctggaacataattc

SEQ ID NO: 308540 - DNA, 25 bp, Artificial
  Probe
ccagcgtggactctggaacataatt

SEQ ID NO: 308541 - DNA, 25 bp, Artificial
  Probe
tttctttctcctgtggtctggggct

SEQ ID NO: 308542 - DNA, 25 bp, Artificial
  Probe
agcaacttcccaatagtgtttggaa

SEQ ID NO: 308543 - DNA, 25 bp, Artificial
  Probe
ctttctcctgtggtctggggctcat

SEQ ID NO: 308544 - DNA, 25 bp, Artificial
  Probe
atgaaagcaacttcccaatagtgtt

SEQ ID NO: 308545 - DNA, 25 bp, Artificial
  Probe
ttcccaatagtgtttggaattacgt

SEQ ID NO: 308546 - DNA, 25 bp, Artificial
  Probe
ggtaccagggcaaataactggcacc

SEQ ID NO: 308547 - DNA, 25 bp, Artificial
  Probe
ctctggaacataattcctgccatga

SEQ ID NO: 308548 - DNA, 25 bp, Artificial
  Probe
tggaacataattcctgccatgaaag

SEQ ID NO: 308549 - DNA, 25 bp, Artificial
  Probe
actgctagtggagatggacgtcact

SEQ ID NO: 308550 - DNA, 25 bp, Artificial
  Probe
ttctgagaatcagcactgctagtgg

SEQ ID NO: 308551 - DNA, 25 bp, Artificial
  Probe
agcccggagaggacccacgcgtgac

SEQ ID NO: 308552 - DNA, 25 bp, Artificial
  Probe
ctgctagtggagatggacgtcacta

SEQ ID NO: 308553 - DNA, 25 bp, Artificial
  Probe
gggccaagtacttcatccgggatga

SEQ ID NO: 308554 - DNA, 25 bp, Artificial
  Probe
tctgagaatcagcactgctagtgga

SEQ ID NO: 308555 - DNA, 25 bp, Artificial
  Probe
agaatcagcactgctagtggagatg

SEQ ID NO: 308556 - DNA, 25 bp, Artificial
  Probe
ccaagtacttcatccgggatgagtt

SEQ ID NO: 308557 - DNA, 25 bp, Artificial
  Probe
gccaagtacttcatccgggatgagt

SEQ ID NO: 308558 - DNA, 25 bp, Artificial
  Probe
cgggccaagtacttcatccgggatg

SEQ ID NO: 308559 - DNA, 25 bp, Artificial
  Probe
ggccaagtacttcatccgggatgag

SEQ ID NO: 308560 - DNA, 25 bp, Artificial
  Probe
ccgggccaagtacttcatccgggat

SEQ ID NO: 308561 - DNA, 25 bp, Artificial
  Probe
cagcactgctagtggagatggacgt

SEQ ID NO: 308562 - DNA, 25 bp, Artificial
  Probe
gacccgggccaagtacttcatccgg

SEQ ID NO: 308563 - DNA, 25 bp, Artificial
  Probe
ttcatccgggatgagtttctgagaa

SEQ ID NO: 308564 - DNA, 25 bp, Artificial
  Probe
gtttctgagaatcagcactgctagt

SEQ ID NO: 308565 - DNA, 25 bp, Artificial
  Probe
acttcatccgggatgagtttctgag

SEQ ID NO: 308566 - DNA, 25 bp, Artificial
  Probe
gcactgctagtggagatggacgtca

SEQ ID NO: 308567 - DNA, 25 bp, Artificial
  Probe
gaatcagcactgctagtggagatgg

SEQ ID NO: 308568 - DNA, 25 bp, Artificial
  Probe
gatggacgtcactactgctaccctc

SEQ ID NO: 308569 - DNA, 25 bp, Artificial
  Probe
cgtgacatcatccagcgcatgcatc

SEQ ID NO: 308570 - DNA, 25 bp, Artificial
  Probe
ccgtgacatcatccagcgcatgcat

SEQ ID NO: 308571 - DNA, 25 bp, Artificial
  Probe
agcactgctagtggagatggacgtc

SEQ ID NO: 308572 - DNA, 25 bp, Artificial
  Probe
agtttctgagaatcagcactgctag

SEQ ID NO: 308573 - DNA, 25 bp, Artificial
  Probe
tttctgagaatcagcactgctagtg

SEQ ID NO: 308574 - DNA, 25 bp, Artificial
  Probe
agatggacgtcactactgctaccct

SEQ ID NO: 308575 - DNA, 25 bp, Artificial
  Probe
atcagcactgctagtggagatggac

SEQ ID NO: 308576 - DNA, 25 bp, Artificial
  Probe
gagatggacgtcactactgctaccc

SEQ ID NO: 308577 - DNA, 25 bp, Artificial
  Probe
atccgggatgagtttctgagaatca

SEQ ID NO: 308578 - DNA, 25 bp, Artificial
  Probe
tgacccgggccaagtacttcatccg

SEQ ID NO: 308579 - DNA, 25 bp, Artificial
  Probe
atggacgtcactactgctaccctca

SEQ ID NO: 308580 - DNA, 25 bp, Artificial
  Probe
tcatccgggatgagtttctgagaat

SEQ ID NO: 308581 - DNA, 25 bp, Artificial
  Probe
aatcagcactgctagtggagatgga

SEQ ID NO: 308582 - DNA, 25 bp, Artificial
  Probe
gccgtgacatcatccagcgcatgca

SEQ ID NO: 308583 - DNA, 25 bp, Artificial
  Probe
cactgctagtggagatggacgtcac

SEQ ID NO: 308584 - DNA, 25 bp, Artificial
  Probe
tccgggatgagtttctgagaatcag

SEQ ID NO: 308585 - DNA, 25 bp, Artificial
  Probe
catccgggatgagtttctgagaatc

SEQ ID NO: 308586 - DNA, 25 bp, Artificial
  Probe
ctgagaatcagcactgctagtggag

SEQ ID NO: 308587 - DNA, 25 bp, Artificial
  Probe
tgagaatcagcactgctagtggaga

SEQ ID NO: 308588 - DNA, 25 bp, Artificial
  Probe
cttcatccgggatgagtttctgaga

SEQ ID NO: 308589 - DNA, 25 bp, Artificial
  Probe
tcagcactgctagtggagatggacg

SEQ ID NO: 308590 - DNA, 25 bp, Artificial
  Probe
gtgacccgggccaagtacttcatcc

SEQ ID NO: 308591 - DNA, 25 bp, Artificial
  Probe
gtgacatcatccagcgcatgcatct

SEQ ID NO: 308592 - DNA, 25 bp, Artificial
  Probe
gagaatcagcactgctagtggagat

SEQ ID NO: 308593 - DNA, 25 bp, Artificial
  Probe
ggtcctaaatccagttctcacattg

SEQ ID NO: 308594 - DNA, 25 bp, Artificial
  Probe
cagctggctcagaaacccagccagg

SEQ ID NO: 308595 - DNA, 25 bp, Artificial
  Probe
gctcagaaacccagccaggatgtgc

SEQ ID NO: 308596 - DNA, 25 bp, Artificial
  Probe
ggaatccccaagtccatttagaatc

SEQ ID NO: 308597 - DNA, 25 bp, Artificial
  Probe
ggaatctccaaatcccttgagaacc

SEQ ID NO: 308598 - DNA, 25 bp, Artificial
  Probe
gctggctcagaaacccagccaggat

SEQ ID NO: 308599 - DNA, 25 bp, Artificial
  Probe
aacgtggtcctaaatccagttctca

SEQ ID NO: 308600 - DNA, 25 bp, Artificial
  Probe
gtggtcctaaatccagttctcacat

SEQ ID NO: 308601 - DNA, 25 bp, Artificial
  Probe
ttgggaatccccaagtccatttaga

SEQ ID NO: 308602 - DNA, 25 bp, Artificial
  Probe
tgaaagctgagaccatccgcagcct

SEQ ID NO: 308603 - DNA, 25 bp, Artificial
  Probe
ctcattcctcaagatgtcccttgag

SEQ ID NO: 308604 - DNA, 25 bp, Artificial
  Probe
gactgacacctactctgagaaccct

SEQ ID NO: 308605 - DNA, 25 bp, Artificial
  Probe
tctcacattgggaatccccaagtcc

SEQ ID NO: 308606 - DNA, 25 bp, Artificial
  Probe
cccgtctctgggtcctgagtccatt

SEQ ID NO: 308607 - DNA, 25 bp, Artificial
  Probe
aggcccagccttagccaggatgagg

SEQ ID NO: 308608 - DNA, 25 bp, Artificial
  Probe
tccccaagtccatttagaatcctgg

SEQ ID NO: 308609 - DNA, 25 bp, Artificial
  Probe
ctttggaatctccaaatcccttgag

SEQ ID NO: 308610 - DNA, 25 bp, Artificial
  Probe
cttagccaggatgaggtgaaagctg

SEQ ID NO: 308611 - DNA, 25 bp, Artificial
  Probe
tccgactgacacctactctgagaac

SEQ ID NO: 308612 - DNA, 25 bp, Artificial
  Probe
ccaggcccagccttagccaggatga

SEQ ID NO: 308613 - DNA, 25 bp, Artificial
  Probe
agcggcccaggtcctgctggacgtc

SEQ ID NO: 308614 - DNA, 25 bp, Artificial
  Probe
cagttctcacattgggaatccccaa

SEQ ID NO: 308615 - DNA, 25 bp, Artificial
  Probe
ttgagaaacgtggtcctaaatccag

SEQ ID NO: 308616 - DNA, 25 bp, Artificial
  Probe
ccagccttagccaggatgaggtgaa

SEQ ID NO: 308617 - DNA, 25 bp, Artificial
  Probe
gaaacccagccaggatgtgccacca

SEQ ID NO: 308618 - DNA, 25 bp, Artificial
  Probe
gaccaatgccttcaaccttccagag

SEQ ID NO: 308619 - DNA, 25 bp, Artificial
  Probe
tgctggtcccattcgtcaggccagc

SEQ ID NO: 308620 - DNA, 25 bp, Artificial
  Probe
accaaaccacagctggctcagaaac

SEQ ID NO: 308621 - DNA, 25 bp, Artificial
  Probe
aggtcctgctggacgtcccaccaaa

SEQ ID NO: 308622 - DNA, 25 bp, Artificial
  Probe
tcccttgagaaacgtggtcctaaat

SEQ ID NO: 308623 - DNA, 25 bp, Artificial
  Probe
ctagacaacccgtctctgggtcctg

SEQ ID NO: 308624 - DNA, 25 bp, Artificial
  Probe
tgtcccttgagaaacgtggtcctaa

SEQ ID NO: 308625 - DNA, 25 bp, Artificial
  Probe
acaacccgtctctgggtcctgagtc

SEQ ID NO: 308626 - DNA, 25 bp, Artificial
  Probe
aggccctgctggtcccattcgtcag

SEQ ID NO: 308627 - DNA, 25 bp, Artificial
  Probe
cttgagaaacgtggtcctaaatcca

SEQ ID NO: 308628 - DNA, 25 bp, Artificial
  Probe
tcaagatgtcccttgagaaacgtgg

SEQ ID NO: 308629 - DNA, 25 bp, Artificial
  Probe
gaaacgtggtcctaaatccagttct

SEQ ID NO: 308630 - DNA, 25 bp, Artificial
  Probe
caccaaaccacagctggctcagaaa

SEQ ID NO: 308631 - DNA, 25 bp, Artificial
  Probe
gagtccatttctcacctttggaatc

SEQ ID NO: 308632 - DNA, 25 bp, Artificial
  Probe
ttctccgactgacacctactctgag

SEQ ID NO: 308633 - DNA, 25 bp, Artificial
  Probe
gtgaaagctgagaccatccgcagcc

SEQ ID NO: 308634 - DNA, 25 bp, Artificial
  Probe
ctgctggtcccattcgtcaggccag

SEQ ID NO: 308635 - DNA, 25 bp, Artificial
  Probe
aatgccttcaaccttccagagccag

SEQ ID NO: 308636 - DNA, 25 bp, Artificial
  Probe
tcacattgggaatccccaagtccat

SEQ ID NO: 308637 - DNA, 25 bp, Artificial
  Probe
cagcggcccaggtcctgctggacgt

SEQ ID NO: 308638 - DNA, 25 bp, Artificial
  Probe
ttcctcaagatgtcccttgagaaac

SEQ ID NO: 308639 - DNA, 25 bp, Artificial
  Probe
ccttgtcgctggtgaataagaaatt

SEQ ID NO: 308640 - DNA, 25 bp, Artificial
  Probe
tctctttaagttgttattgacagac

SEQ ID NO: 308641 - DNA, 25 bp, Artificial
  Probe
tccacttagacgaaatagagtccca

SEQ ID NO: 308642 - DNA, 25 bp, Artificial
  Probe
ggaaagacacactgggtcagtggcc

SEQ ID NO: 308643 - DNA, 25 bp, Artificial
  Probe
ccctcctgtgctactggttagagga

SEQ ID NO: 308644 - DNA, 25 bp, Artificial
  Probe
agagttaccgccaagttcgactgaa

SEQ ID NO: 308645 - DNA, 25 bp, Artificial
  Probe
tctgcttggcctcctgagaagtttg

SEQ ID NO: 308646 - DNA, 25 bp, Artificial
  Probe
ttaatgagagttttttcccaccagt

SEQ ID NO: 308647 - DNA, 25 bp, Artificial
  Probe
catattttgactgttctggggaagc

SEQ ID NO: 308648 - DNA, 25 bp, Artificial
  Probe
ccgaataattacaaaacgtgtctgg

SEQ ID NO: 308649 - DNA, 25 bp, Artificial
  Probe
agcaaagacacatgttccacttaga

SEQ ID NO: 308650 - DNA, 25 bp, Artificial
  Probe
ctatttcggatttgttgtacatggc

SEQ ID NO: 308651 - DNA, 25 bp, Artificial
  Probe
gttagaaatcctgaccaagaacctc

SEQ ID NO: 308652 - DNA, 25 bp, Artificial
  Probe
tacaaaacgtgtctggtactttgtg

SEQ ID NO: 308653 - DNA, 25 bp, Artificial
  Probe
aggcggctatcatagggaaagacac

SEQ ID NO: 308654 - DNA, 25 bp, Artificial
  Probe
gtggcctgattctgcttggcctcct

SEQ ID NO: 308655 - DNA, 25 bp, Artificial
  Probe
gcaatctcttgtttccgtggattct

SEQ ID NO: 308656 - DNA, 25 bp, Artificial
  Probe
gtgctactggttagaggaaatcaca

SEQ ID NO: 308657 - DNA, 25 bp, Artificial
  Probe
cttccagtggcgagaaaaggatcta

SEQ ID NO: 308658 - DNA, 25 bp, Artificial
  Probe
ggtcagtggcctgattctgcttggc

SEQ ID NO: 308659 - DNA, 25 bp, Artificial
  Probe
gaaatcacaagaatgtcctgacatt

SEQ ID NO: 308660 - DNA, 25 bp, Artificial
  Probe
agagccgccaacctcatcgtattga

SEQ ID NO: 308661 - DNA, 25 bp, Artificial
  Probe
aggagcattccagagccgccaacct

SEQ ID NO: 308662 - DNA, 25 bp, Artificial
  Probe
ttttactcttaaagcgcgagggatg

SEQ ID NO: 308663 - DNA, 25 bp, Artificial
  Probe
tacttctctatatacaggtatatgg

SEQ ID NO: 308664 - DNA, 25 bp, Artificial
  Probe
aagcttaacctctgatcacacgtag

SEQ ID NO: 308665 - DNA, 25 bp, Artificial
  Probe
ctaatgtagatgagctccaggcaaa

SEQ ID NO: 308666 - DNA, 25 bp, Artificial
  Probe
ggagactatcccacctgattctaca

SEQ ID NO: 308667 - DNA, 25 bp, Artificial
  Probe
ttaatgcagccgataataagcttaa

SEQ ID NO: 308668 - DNA, 25 bp, Artificial
  Probe
atttgaccactgctgagaaattaaa

SEQ ID NO: 308669 - DNA, 25 bp, Artificial
  Probe
cttctctatatacaggtatatgggt

SEQ ID NO: 308670 - DNA, 25 bp, Artificial
  Probe
cgaaaacatttttcccttgtcgctg

SEQ ID NO: 308671 - DNA, 25 bp, Artificial
  Probe
ttgtacatggcgtggttagaaatcc

SEQ ID NO: 308672 - DNA, 25 bp, Artificial
  Probe
agcgggctctctttaagttgttatt

SEQ ID NO: 308673 - DNA, 25 bp, Artificial
  Probe
tgtaccttggtgtccgaataattac

SEQ ID NO: 308674 - DNA, 25 bp, Artificial
  Probe
gtcctgacattttactcttaaagcg

SEQ ID NO: 308675 - DNA, 25 bp, Artificial
  Probe
tgcagccgataataagcttaacctc

SEQ ID NO: 308676 - DNA, 25 bp, Artificial
  Probe
ttccagtggcgagaaaaggatctat

SEQ ID NO: 308677 - DNA, 25 bp, Artificial
  Probe
tacatggcgtggttagaaatcctga

SEQ ID NO: 308678 - DNA, 25 bp, Artificial
  Probe
tggttagaaatcctgaccaagaacc

SEQ ID NO: 308679 - DNA, 25 bp, Artificial
  Probe
ataagagctggctgacatgcttgca

SEQ ID NO: 308680 - DNA, 25 bp, Artificial
  Probe
gaaatgttgtaccttggtgtccgaa

SEQ ID NO: 308681 - DNA, 25 bp, Artificial
  Probe
acactgggtcagtggcctgattctg

SEQ ID NO: 308682 - DNA, 25 bp, Artificial
  Probe
ttctgcttggcctcctgagaagttt

SEQ ID NO: 308683 - DNA, 25 bp, Artificial
  Probe
gcttaacctctgatcacacgtagct

SEQ ID NO: 308684 - DNA, 25 bp, Artificial
  Probe
catgcttgcaggatgtgctaatgta

SEQ ID NO: 308685 - DNA, 25 bp, Artificial
  Probe
catgcatagtgttcccaaagccatg

SEQ ID NO: 308686 - DNA, 25 bp, Artificial
  Probe
ggcctgccctccaaggatgctggga

SEQ ID NO: 308687 - DNA, 25 bp, Artificial
  Probe
tcttaacttcccaaggaaggacagg

SEQ ID NO: 308688 - DNA, 25 bp, Artificial
  Probe
tgggaggccctgaacacaaagactg

SEQ ID NO: 308689 - DNA, 25 bp, Artificial
  Probe
gccaagggcaggagcccatgaccag

SEQ ID NO: 308690 - DNA, 25 bp, Artificial
  Probe
aaagccatgtcacaatgaccacatg

SEQ ID NO: 308691 - DNA, 25 bp, Artificial
  Probe
tatcctaggatagattcgaacttga

SEQ ID NO: 308692 - DNA, 25 bp, Artificial
  Probe
gaataaaggatctctgctcacaaaa

SEQ ID NO: 308693 - DNA, 25 bp, Artificial
  Probe
ggcaggagcccatgaccagctgtgt

SEQ ID NO: 308694 - DNA, 25 bp, Artificial
  Probe
tctagacagggctgttctctttgtg

SEQ ID NO: 308695 - DNA, 25 bp, Artificial
  Probe
tccttgtccatctgggcagtccctt

SEQ ID NO: 308696 - DNA, 25 bp, Artificial
  Probe
ctccaaggatgctgggaataaagga

SEQ ID NO: 308697 - DNA, 25 bp, Artificial
  Probe
ctgttcaaggcctgccctccaagga

SEQ ID NO: 308698 - DNA, 25 bp, Artificial
  Probe
ttcgaacttgatatggctgaccctg

SEQ ID NO: 308699 - DNA, 25 bp, Artificial
  Probe
gttcccaaagccatgtcacaatgac

SEQ ID NO: 308700 - DNA, 25 bp, Artificial
  Probe
ttctctctagacagggctgttctct

SEQ ID NO: 308701 - DNA, 25 bp, Artificial
  Probe
aggcttcagccactatgccagactg

SEQ ID NO: 308702 - DNA, 25 bp, Artificial
  Probe
acttgatatggctgaccctgaacct

SEQ ID NO: 308703 - DNA, 25 bp, Artificial
  Probe
tcctatcttaacttcccaaggaagg

SEQ ID NO: 308704 - DNA, 25 bp, Artificial
  Probe
agactgccacacatttcaacaaagg

SEQ ID NO: 308705 - DNA, 25 bp, Artificial
  Probe
atgtgggcatgcatagtgttcccaa

SEQ ID NO: 308706 - DNA, 25 bp, Artificial
  Probe
cacaaagactgtcaggggtctggtc

SEQ ID NO: 308707 - DNA, 25 bp, Artificial
  Probe
tgaccctctaaaaatccctacgtgg

SEQ ID NO: 308708 - DNA, 25 bp, Artificial
  Probe
aggccgaaaactgatcagagagatg

SEQ ID NO: 308709 - DNA, 25 bp, Artificial
  Probe
gtcacaatgaccacatggattccac

SEQ ID NO: 308710 - DNA, 25 bp, Artificial
  Probe
tctaagatcttgttctgtatcctag

SEQ ID NO: 308711 - DNA, 25 bp, Artificial
  Probe
gaaggacaggcttcagccactatgc

SEQ ID NO: 308712 - DNA, 25 bp, Artificial
  Probe
ttaaatctctccttgtccatctggg

SEQ ID NO: 308713 - DNA, 25 bp, Artificial
  Probe
caaagcacccacagccaagggcagg

SEQ ID NO: 308714 - DNA, 25 bp, Artificial
  Probe
gccacacatttcaacaaagggacat

SEQ ID NO: 308715 - DNA, 25 bp, Artificial
  Probe
tttgtgcaaagcacccacagccaag

SEQ ID NO: 308716 - DNA, 25 bp, Artificial
  Probe
agctgtgtgccctttaaatctctcc

SEQ ID NO: 308717 - DNA, 25 bp, Artificial
  Probe
tcccaaggaaggacaggcttcagcc

SEQ ID NO: 308718 - DNA, 25 bp, Artificial
  Probe
gtgtgccctttaaatctctccttgt

SEQ ID NO: 308719 - DNA, 25 bp, Artificial
  Probe
tagattcgaacttgatatggctgac

SEQ ID NO: 308720 - DNA, 25 bp, Artificial
  Probe
tgaccacatggattccacacttttg

SEQ ID NO: 308721 - DNA, 25 bp, Artificial
  Probe
tttgtgaggccgaaaactgatcaga

SEQ ID NO: 308722 - DNA, 25 bp, Artificial
  Probe
tatggctgaccctgaacctgtgacc

SEQ ID NO: 308723 - DNA, 25 bp, Artificial
  Probe
gccgaaaactgatcagagagatgag

SEQ ID NO: 308724 - DNA, 25 bp, Artificial
  Probe
aggagcccatgaccagctgtgtgcc

SEQ ID NO: 308725 - DNA, 25 bp, Artificial
  Probe
tgaccagctgtgtgccctttaaatc

SEQ ID NO: 308726 - DNA, 25 bp, Artificial
  Probe
tggctgaccctgaacctgtgaccct

SEQ ID NO: 308727 - DNA, 25 bp, Artificial
  Probe
gattccacacttttggaagatattt

SEQ ID NO: 308728 - DNA, 25 bp, Artificial
  Probe
gactgtcaggggtctggtctattct

SEQ ID NO: 308729 - DNA, 25 bp, Artificial
  Probe
acagccaagggcaggagcccatgac

SEQ ID NO: 308730 - DNA, 25 bp, Artificial
  Probe
tctaaaaatccctacgtggcctgta

SEQ ID NO: 308731 - DNA, 25 bp, Artificial
  Probe
gtccagcaagcctttggatgtgatg

SEQ ID NO: 308732 - DNA, 25 bp, Artificial
  Probe
ccagcaagcctttggatgtgatgtc

SEQ ID NO: 308733 - DNA, 25 bp, Artificial
  Probe
cggtctctcaagaactttgtacagc

SEQ ID NO: 308734 - DNA, 25 bp, Artificial
  Probe
acagagcaggcgataccttaggact

SEQ ID NO: 308735 - DNA, 25 bp, Artificial
  Probe
ccttcccagagtcaagctggggatg

SEQ ID NO: 308736 - DNA, 25 bp, Artificial
  Probe
ttcagcacgggctccgcggacagcg

SEQ ID NO: 308737 - DNA, 25 bp, Artificial
  Probe
ctcaagaactttgtacagcaagtcc

SEQ ID NO: 308738 - DNA, 25 bp, Artificial
  Probe
tttttgtaaagcagacgctactctc

SEQ ID NO: 308739 - DNA, 25 bp, Artificial
  Probe
cacccacagagcaggcgatacctta

SEQ ID NO: 308740 - DNA, 25 bp, Artificial
  Probe
cgataccttaggactgaagagagtt

SEQ ID NO: 308741 - DNA, 25 bp, Artificial
  Probe
gacgctactctcaagcatttgacaa

SEQ ID NO: 308742 - DNA, 25 bp, Artificial
  Probe
aggcgataccttaggactgaagaga

SEQ ID NO: 308743 - DNA, 25 bp, Artificial
  Probe
gcctttggatgtgatgtctttgctt

SEQ ID NO: 308744 - DNA, 25 bp, Artificial
  Probe
caggcgataccttaggactgaagag

SEQ ID NO: 308745 - DNA, 25 bp, Artificial
  Probe
ttttgtaaagcagacgctactctca

SEQ ID NO: 308746 - DNA, 25 bp, Artificial
  Probe
aagcagacgctactctcaagcattt

SEQ ID NO: 308747 - DNA, 25 bp, Artificial
  Probe
ggggatgtaccgagccggtctctca

SEQ ID NO: 308748 - DNA, 25 bp, Artificial
  Probe
agcctttggatgtgatgtctttgct

SEQ ID NO: 308749 - DNA, 25 bp, Artificial
  Probe
gcctcaagggcctgggcttctactc

SEQ ID NO: 308750 - DNA, 25 bp, Artificial
  Probe
tgtacagcaagtccagcaagccttt

SEQ ID NO: 308751 - DNA, 25 bp, Artificial
  Probe
ggcgataccttaggactgaagagag

SEQ ID NO: 308752 - DNA, 25 bp, Artificial
  Probe
gagccggtctctcaagaactttgta

SEQ ID NO: 308753 - DNA, 25 bp, Artificial
  Probe
ttgtacagcaagtccagcaagcctt

SEQ ID NO: 308754 - DNA, 25 bp, Artificial
  Probe
accgagccggtctctcaagaacttt

SEQ ID NO: 308755 - DNA, 25 bp, Artificial
  Probe
acagcaagtccagcaagcctttgga

SEQ ID NO: 308756 - DNA, 25 bp, Artificial
  Probe
agcaagtccagcaagcctttggatg

SEQ ID NO: 308757 - DNA, 25 bp, Artificial
  Probe
actttgtacagcaagtccagcaagc

SEQ ID NO: 308758 - DNA, 25 bp, Artificial
  Probe
taaagcagacgctactctcaagcat

SEQ ID NO: 308759 - DNA, 25 bp, Artificial
  Probe
tttgtaaagcagacgctactctcaa

SEQ ID NO: 308760 - DNA, 25 bp, Artificial
  Probe
tctcaagaactttgtacagcaagtc

SEQ ID NO: 308761 - DNA, 25 bp, Artificial
  Probe
tctggggactgtcctctcggtccac

SEQ ID NO: 308762 - DNA, 25 bp, Artificial
  Probe
gaactttgtacagcaagtccagcaa

SEQ ID NO: 308763 - DNA, 25 bp, Artificial
  Probe
ctgggcttctactcgctgggcctct

SEQ ID NO: 308764 - DNA, 25 bp, Artificial
  Probe
ccgctctggggactgtcctctcggt

SEQ ID NO: 308765 - DNA, 25 bp, Artificial
  Probe
gcaagtccagcaagcctttggatgt

SEQ ID NO: 308766 - DNA, 25 bp, Artificial
  Probe
cagacgctactctcaagcatttgac

SEQ ID NO: 308767 - DNA, 25 bp, Artificial
  Probe
gtaccgagccggtctctcaagaact

SEQ ID NO: 308768 - DNA, 25 bp, Artificial
  Probe
gctctggggactgtcctctcggtcc

SEQ ID NO: 308769 - DNA, 25 bp, Artificial
  Probe
ccagagtcaagctggggatgtaccg

SEQ ID NO: 308770 - DNA, 25 bp, Artificial
  Probe
ccgagccggtctctcaagaactttg

SEQ ID NO: 308771 - DNA, 25 bp, Artificial
  Probe
tgggcctctctttcgccgcgctgta

SEQ ID NO: 308772 - DNA, 25 bp, Artificial
  Probe
gcttctactcgctgggcctctcttt

SEQ ID NO: 308773 - DNA, 25 bp, Artificial
  Probe
agcaagcctttggatgtgatgtctt

SEQ ID NO: 308774 - DNA, 25 bp, Artificial
  Probe
ctctcaagaactttgtacagcaagt

SEQ ID NO: 308775 - DNA, 25 bp, Artificial
  Probe
gccggtctctcaagaactttgtaca

SEQ ID NO: 308776 - DNA, 25 bp, Artificial
  Probe
cccagagtcaagctggggatgtacc

SEQ ID NO: 308777 - DNA, 25 bp, Artificial
  Probe
ttgtcactggctctggggacaagaa

SEQ ID NO: 308778 - DNA, 25 bp, Artificial
  Probe
gcaaactggactcctcctcatagca

SEQ ID NO: 308779 - DNA, 25 bp, Artificial
  Probe
ttgtaagacctggaaaggacaacct

SEQ ID NO: 308780 - DNA, 25 bp, Artificial
  Probe
aatcctcatcggtgcttagctgtga

SEQ ID NO: 308781 - DNA, 25 bp, Artificial
  Probe
ggcaactgcagcaacacgacttcac

SEQ ID NO: 308782 - DNA, 25 bp, Artificial
  Probe
ctcatagcactttgcgctgttgtac

SEQ ID NO: 308783 - DNA, 25 bp, Artificial
  Probe
gagtttaaggccttccatagcccac

SEQ ID NO: 308784 - DNA, 25 bp, Artificial
  Probe
tggctctggggacaagaaagctacg

SEQ ID NO: 308785 - DNA, 25 bp, Artificial
  Probe
caatgtggaagtgttgcatgtcacc

SEQ ID NO: 308786 - DNA, 25 bp, Artificial
  Probe
ccttatggggccagcatcttccagt

SEQ ID NO: 308787 - DNA, 25 bp, Artificial
  Probe
ggctattgcccaactggagagtggc

SEQ ID NO: 308788 - DNA, 25 bp, Artificial
  Probe
cactgtgaggtcctgggacctgcgt

SEQ ID NO: 308789 - DNA, 25 bp, Artificial
  Probe
gctgtgacatctctgcggatgacaa

SEQ ID NO: 308790 - DNA, 25 bp, Artificial
  Probe
ttcaataccattgcagttgtggagt

SEQ ID NO: 308791 - DNA, 25 bp, Artificial
  Probe
gaggacaccttatggggccagcatc

SEQ ID NO: 308792 - DNA, 25 bp, Artificial
  Probe
tctttgggctattgcccaactggag

SEQ ID NO: 308793 - DNA, 25 bp, Artificial
  Probe
tcctcctcatagcactttgcgctgt

SEQ ID NO: 308794 - DNA, 25 bp, Artificial
  Probe
ggatttcaataccattgcagttgtg

SEQ ID NO: 308795 - DNA, 25 bp, Artificial
  Probe
tgcgctgttgtacttttctgttcac

SEQ ID NO: 308796 - DNA, 25 bp, Artificial
  Probe
gaaaggacaaccttttgaatgcttg

SEQ ID NO: 308797 - DNA, 25 bp, Artificial
  Probe
gtttggacaacactgtgaggtcctg

SEQ ID NO: 308798 - DNA, 25 bp, Artificial
  Probe
ctggctctggggacaagaaagctac

SEQ ID NO: 308799 - DNA, 25 bp, Artificial
  Probe
gaagtgttgcatgtcaccaagccag

SEQ ID NO: 308800 - DNA, 25 bp, Artificial
  Probe
agtttgcccactgtggcaaatggtt

SEQ ID NO: 308801 - DNA, 25 bp, Artificial
  Probe
acatctctgcggatgacaagtacat

SEQ ID NO: 308802 - DNA, 25 bp, Artificial
  Probe
catttctaacgatggcaccaagctc

SEQ ID NO: 308803 - DNA, 25 bp, Artificial
  Probe
cactttgcgctgttgtacttttctg

SEQ ID NO: 308804 - DNA, 25 bp, Artificial
  Probe
caaggatttcaataccattgcagtt

SEQ ID NO: 308805 - DNA, 25 bp, Artificial
  Probe
ctggacaggtggtttggacaacact

SEQ ID NO: 308806 - DNA, 25 bp, Artificial
  Probe
caataccattgcagttgtggagttt

SEQ ID NO: 308807 - DNA, 25 bp, Artificial
  Probe
ttattaaggacaaatcttcgtgcaa

SEQ ID NO: 308808 - DNA, 25 bp, Artificial
  Probe
gtgaagggcggcaactgcagcaaca

SEQ ID NO: 308809 - DNA, 25 bp, Artificial
  Probe
agcactttgcgctgttgtacttttc

SEQ ID NO: 308810 - DNA, 25 bp, Artificial
  Probe
tttctttgggctattgcccaactgg

SEQ ID NO: 308811 - DNA, 25 bp, Artificial
  Probe
ccattgcagttgtggagtttaaggc

SEQ ID NO: 308812 - DNA, 25 bp, Artificial
  Probe
ttccagtccaaagaatcctcatcgg

SEQ ID NO: 308813 - DNA, 25 bp, Artificial
  Probe
actgtggcaaatggtttgtaagacc

SEQ ID NO: 308814 - DNA, 25 bp, Artificial
  Probe
caaagaatcctcatcggtgcttagc

SEQ ID NO: 308815 - DNA, 25 bp, Artificial
  Probe
cccaactggagagtggcttgcagtg

SEQ ID NO: 308816 - DNA, 25 bp, Artificial
  Probe
tgcagttgtggagtttaaggccttc

SEQ ID NO: 308817 - DNA, 25 bp, Artificial
  Probe
ctctgcggatgacaagtacattgtc

SEQ ID NO: 308818 - DNA, 25 bp, Artificial
  Probe
tgtgttctgtcactcaagtttgccc

SEQ ID NO: 308819 - DNA, 25 bp, Artificial
  Probe
gctgttgtacttttctgttcacccc

SEQ ID NO: 308820 - DNA, 25 bp, Artificial
  Probe
gacaaataccagttgcatcttcatg

SEQ ID NO: 308821 - DNA, 25 bp, Artificial
  Probe
gccagcatcttccagtccaaagaat

SEQ ID NO: 308822 - DNA, 25 bp, Artificial
  Probe
tgtcactggctctggggacaagaaa

SEQ ID NO: 308823 - DNA, 25 bp, Artificial
  Probe
accattcttggttgccgaaacacca

SEQ ID NO: 308824 - DNA, 25 bp, Artificial
  Probe
acatcatggcagaagtgtgtagagc

SEQ ID NO: 308825 - DNA, 25 bp, Artificial
  Probe
cttacttattggatttccgaagtat

SEQ ID NO: 308826 - DNA, 25 bp, Artificial
  Probe
gaaccctgtgacaagcacattttcc

SEQ ID NO: 308827 - DNA, 25 bp, Artificial
  Probe
actccacagagatcgggatccatca

SEQ ID NO: 308828 - DNA, 25 bp, Artificial
  Probe
gtaggacttacttattggatttccg

SEQ ID NO: 308829 - DNA, 25 bp, Artificial
  Probe
catcatggcagaagtgtgtagagca

SEQ ID NO: 308830 - DNA, 25 bp, Artificial
  Probe
ctacagctataccaagtggatagta

SEQ ID NO: 308831 - DNA, 25 bp, Artificial
  Probe
ccaatgacatcatggcagaagtgtg

SEQ ID NO: 308832 - DNA, 25 bp, Artificial
  Probe
gttgtaaacccctattatttgcgtg

SEQ ID NO: 308833 - DNA, 25 bp, Artificial
  Probe
acaccaaggcgtacggaaggcaaag

SEQ ID NO: 308834 - DNA, 25 bp, Artificial
  Probe
ttgccgaaacaccaagggcccgaca

SEQ ID NO: 308835 - DNA, 25 bp, Artificial
  Probe
acccctattatttgcgtgtgcgaag

SEQ ID NO: 308836 - DNA, 25 bp, Artificial
  Probe
gatccatcagcaactatcgatcttg

SEQ ID NO: 308837 - DNA, 25 bp, Artificial
  Probe
gatgatcaccatttaactcggcctc

SEQ ID NO: 308838 - DNA, 25 bp, Artificial
  Probe
tggttgccgaaacaccaagggcccg

SEQ ID NO: 308839 - DNA, 25 bp, Artificial
  Probe
agaagccaaatcagggactgctact

SEQ ID NO: 308840 - DNA, 25 bp, Artificial
  Probe
ttgcgtgtgcgaaggaagaaccctg

SEQ ID NO: 308841 - DNA, 25 bp, Artificial
  Probe
attcgaagtcaaagccgacccaatg

SEQ ID NO: 308842 - DNA, 25 bp, Artificial
  Probe
aactatcgatcttgccaaaggagcg

SEQ ID NO: 308843 - DNA, 25 bp, Artificial
  Probe
aggctcaaggaaagccctcagaagt

SEQ ID NO: 308844 - DNA, 25 bp, Artificial
  Probe
tgtgacaagcacattttccaaaatg

SEQ ID NO: 308845 - DNA, 25 bp, Artificial
  Probe
caaggaaagccctcagaagtctctc

SEQ ID NO: 308846 - DNA, 25 bp, Artificial
  Probe
agaagtctctcttacctcatccgtg

SEQ ID NO: 308847 - DNA, 25 bp, Artificial
  Probe
ctcaccctgagagagtaccattctt

SEQ ID NO: 308848 - DNA, 25 bp, Artificial
  Probe
agggcccgacacaccctagatgaat

SEQ ID NO: 308849 - DNA, 25 bp, Artificial
  Probe
ctataccaagtggatagtaggactt

SEQ ID NO: 308850 - DNA, 25 bp, Artificial
  Probe
caagggcccgacacaccctagatga

SEQ ID NO: 308851 - DNA, 25 bp, Artificial
  Probe
gaaagccctcagaagtctctcttac

SEQ ID NO: 308852 - DNA, 25 bp, Artificial
  Probe
ggattcgaagtcaaagccgacccaa

SEQ ID NO: 308853 - DNA, 25 bp, Artificial
  Probe
agcaactatcgatcttgccaaagga

SEQ ID NO: 308854 - DNA, 25 bp, Artificial
  Probe
catttggggattcgaagtcaaagcc

SEQ ID NO: 308855 - DNA, 25 bp, Artificial
  Probe
tagagcaatcaagcagttggactat

SEQ ID NO: 308856 - DNA, 25 bp, Artificial
  Probe
acagagatcgggatccatcagcaac

SEQ ID NO: 308857 - DNA, 25 bp, Artificial
  Probe
tttgcgtgtgcgaaggaagaaccct

SEQ ID NO: 308858 - DNA, 25 bp, Artificial
  Probe
gaagtctctcttacctcatccgtga

SEQ ID NO: 308859 - DNA, 25 bp, Artificial
  Probe
caatcaagcagttggactatgaatg

SEQ ID NO: 308860 - DNA, 25 bp, Artificial
  Probe
aagtcaaagccgacccaatgacatc

SEQ ID NO: 308861 - DNA, 25 bp, Artificial
  Probe
ataccaagtggatagtaggacttac

SEQ ID NO: 308862 - DNA, 25 bp, Artificial
  Probe
cgactcctctcctgttgacgtagct

SEQ ID NO: 308863 - DNA, 25 bp, Artificial
  Probe
attacagaagccaaatcagggactg

SEQ ID NO: 308864 - DNA, 25 bp, Artificial
  Probe
tcttgccaaaggagcgactccgacg

SEQ ID NO: 308865 - DNA, 25 bp, Artificial
  Probe
aaatgagtctacagctataccaagt

SEQ ID NO: 308866 - DNA, 25 bp, Artificial
  Probe
tcttggttgccgaaacaccaagggc

SEQ ID NO: 308867 - DNA, 25 bp, Artificial
  Probe
gacaagcacattttccaaaatgagt

SEQ ID NO: 308868 - DNA, 25 bp, Artificial
  Probe
aaggaagaaccctgtgacaagcaca

SEQ ID NO: 308869 - DNA, 25 bp, Artificial
  Probe
agacttccctcttaaatggtgacag

SEQ ID NO: 308870 - DNA, 25 bp, Artificial
  Probe
ctgtcctgtggctgtgtccaaacac

SEQ ID NO: 308871 - DNA, 25 bp, Artificial
  Probe
ttgagacttccctcttaaatggtga

SEQ ID NO: 308872 - DNA, 25 bp, Artificial
  Probe
tgccaacactttactactgtggaaa

SEQ ID NO: 308873 - DNA, 25 bp, Artificial
  Probe
cttcagggtattcagtactgctcag

SEQ ID NO: 308874 - DNA, 25 bp, Artificial
  Probe
tgttttgagacttccctcttaaatg

SEQ ID NO: 308875 - DNA, 25 bp, Artificial
  Probe
gccccgcgggatgttttgagacttc

SEQ ID NO: 308876 - DNA, 25 bp, Artificial
  Probe
gagacttccctcttaaatggtgaca

SEQ ID NO: 308877 - DNA, 25 bp, Artificial
  Probe
ctgctcagtattattgtctaagaga

SEQ ID NO: 308878 - DNA, 25 bp, Artificial
  Probe
cactttactactgtggaaagacaag

SEQ ID NO: 308879 - DNA, 25 bp, Artificial
  Probe
ggtattcagtactgctcagtattat

SEQ ID NO: 308880 - DNA, 25 bp, Artificial
  Probe
cagcactgtcaggaggcctgtcctg

SEQ ID NO: 308881 - DNA, 25 bp, Artificial
  Probe
tctgcttcagggtattcagtactgc

SEQ ID NO: 308882 - DNA, 25 bp, Artificial
  Probe
agggtattcagtactgctcagtatt

SEQ ID NO: 308883 - DNA, 25 bp, Artificial
  Probe
gtcctgtggctgtgtccaaacaccc

SEQ ID NO: 308884 - DNA, 25 bp, Artificial
  Probe
tcagggtattcagtactgctcagta

SEQ ID NO: 308885 - DNA, 25 bp, Artificial
  Probe
ccaacactttactactgtggaaaga

SEQ ID NO: 308886 - DNA, 25 bp, Artificial
  Probe
ttcagggtattcagtactgctcagt

SEQ ID NO: 308887 - DNA, 25 bp, Artificial
  Probe
ctttactactgtggaaagacaagtg

SEQ ID NO: 308888 - DNA, 25 bp, Artificial
  Probe
acactttactactgtggaaagacaa

SEQ ID NO: 308889 - DNA, 25 bp, Artificial
  Probe
tcagtactgctcagtattattgtct

SEQ ID NO: 308890 - DNA, 25 bp, Artificial
  Probe
actgctcagtattattgtctaagag

SEQ ID NO: 308891 - DNA, 25 bp, Artificial
  Probe
agtactgctcagtattattgtctaa

SEQ ID NO: 308892 - DNA, 25 bp, Artificial
  Probe
atgccaacactttactactgtggaa

SEQ ID NO: 308893 - DNA, 25 bp, Artificial
  Probe
tccctcttaaatggtgacagttggt

SEQ ID NO: 308894 - DNA, 25 bp, Artificial
  Probe
gccctgttctgcttcagggtattca

SEQ ID NO: 308895 - DNA, 25 bp, Artificial
  Probe
agcactgtcaggaggcctgtcctgt

SEQ ID NO: 308896 - DNA, 25 bp, Artificial
  Probe
tgtcctgtggctgtgtccaaacacc

SEQ ID NO: 308897 - DNA, 25 bp, Artificial
  Probe
caacactttactactgtggaaagac

SEQ ID NO: 308898 - DNA, 25 bp, Artificial
  Probe
aggcctgtcctgtggctgtgtccaa

SEQ ID NO: 308899 - DNA, 25 bp, Artificial
  Probe
attcagtactgctcagtattattgt

SEQ ID NO: 308900 - DNA, 25 bp, Artificial
  Probe
tgccctgttctgcttcagggtattc

SEQ ID NO: 308901 - DNA, 25 bp, Artificial
  Probe
cttccctcttaaatggtgacagttg

SEQ ID NO: 308902 - DNA, 25 bp, Artificial
  Probe
gtattcagtactgctcagtattatt

SEQ ID NO: 308903 - DNA, 25 bp, Artificial
  Probe
cagtactgctcagtattattgtcta

SEQ ID NO: 308904 - DNA, 25 bp, Artificial
  Probe
ctgttctgcttcagggtattcagta

SEQ ID NO: 308905 - DNA, 25 bp, Artificial
  Probe
tgagacttccctcttaaatggtgac

SEQ ID NO: 308906 - DNA, 25 bp, Artificial
  Probe
ccctgttctgcttcagggtattcag

SEQ ID NO: 308907 - DNA, 25 bp, Artificial
  Probe
acatgccaacactttactactgtgg

SEQ ID NO: 308908 - DNA, 25 bp, Artificial
  Probe
ctcagtattattgtctaagagaatc

SEQ ID NO: 308909 - DNA, 25 bp, Artificial
  Probe
tactgctcagtattattgtctaaga

SEQ ID NO: 308910 - DNA, 25 bp, Artificial
  Probe
agttaaaccagacagttctgctttc

SEQ ID NO: 308911 - DNA, 25 bp, Artificial
  Probe
gatgttttgagacttccctcttaaa

SEQ ID NO: 308912 - DNA, 25 bp, Artificial
  Probe
gcttcagggtattcagtactgctca

SEQ ID NO: 308913 - DNA, 25 bp, Artificial
  Probe
aagttaaaccagacagttctgcttt

SEQ ID NO: 308914 - DNA, 25 bp, Artificial
  Probe
gaggcctgtcctgtggctgtgtcca

SEQ ID NO: 308915 - DNA, 25 bp, Artificial
  Probe
atggcaatgcccaggagcaatcatc

SEQ ID NO: 308916 - DNA, 25 bp, Artificial
  Probe
gtttgcacgaataccaactcctctg

SEQ ID NO: 308917 - DNA, 25 bp, Artificial
  Probe
aatggaatcctctgggtgaagcaga

SEQ ID NO: 308918 - DNA, 25 bp, Artificial
  Probe
tgtgccttgatggaatggaatcctc

SEQ ID NO: 308919 - DNA, 25 bp, Artificial
  Probe
ctcattgctgtggaaaaatctctgg

SEQ ID NO: 308920 - DNA, 25 bp, Artificial
  Probe
tcaggccagccgtccttgggagaga

SEQ ID NO: 308921 - DNA, 25 bp, Artificial
  Probe
tggaatggaatcctctgggtgaagc

SEQ ID NO: 308922 - DNA, 25 bp, Artificial
  Probe
agagaccctgccttactcaggccag

SEQ ID NO: 308923 - DNA, 25 bp, Artificial
  Probe
gtgaagcagaaccaagccattgcac

SEQ ID NO: 308924 - DNA, 25 bp, Artificial
  Probe
gccaggcttccaacgcgttatacac

SEQ ID NO: 308925 - DNA, 25 bp, Artificial
  Probe
cggccgagcatgagaatgcaatgtt

SEQ ID NO: 308926 - DNA, 25 bp, Artificial
  Probe
cgaataccaactcctctgtgccttg

SEQ ID NO: 308927 - DNA, 25 bp, Artificial
  Probe
gtctttcaagagaccctgccttact

SEQ ID NO: 308928 - DNA, 25 bp, Artificial
  Probe
tcctgaagacctgaagaaagacaat

SEQ ID NO: 308929 - DNA, 25 bp, Artificial
  Probe
aatctctggagtcagaggcctgggt

SEQ ID NO: 308930 - DNA, 25 bp, Artificial
  Probe
gcttgggggaacctttcatgtcttt

SEQ ID NO: 308931 - DNA, 25 bp, Artificial
  Probe
gccagaatgcggttgctgcagcctc

SEQ ID NO: 308932 - DNA, 25 bp, Artificial
  Probe
aagattcacaccatgtgggccccac

SEQ ID NO: 308933 - DNA, 25 bp, Artificial
  Probe
cttactcaggccagccgtccttggg

SEQ ID NO: 308934 - DNA, 25 bp, Artificial
  Probe
aatgcaatgttttctaacagcagcg

SEQ ID NO: 308935 - DNA, 25 bp, Artificial
  Probe
aacagcagcgacctaggtgaagcat

SEQ ID NO: 308936 - DNA, 25 bp, Artificial
  Probe
agccattgcacatggcaatgcccag

SEQ ID NO: 308937 - DNA, 25 bp, Artificial
  Probe
tgcacatggcaatgcccaggagcaa

SEQ ID NO: 308938 - DNA, 25 bp, Artificial
  Probe
gggcagccaggcttccaacgcgtta

SEQ ID NO: 308939 - DNA, 25 bp, Artificial
  Probe
tgcttgctggaccaatgggaccatt

SEQ ID NO: 308940 - DNA, 25 bp, Artificial
  Probe
tgcagcctcctgtggcctgggcagc

SEQ ID NO: 308941 - DNA, 25 bp, Artificial
  Probe
attgtgtccagaagggctcctgaag

SEQ ID NO: 308942 - DNA, 25 bp, Artificial
  Probe
acagagtttgggtgcacactaccct

SEQ ID NO: 308943 - DNA, 25 bp, Artificial
  Probe
ctggcaaacctttggcccaaagatt

SEQ ID NO: 308944 - DNA, 25 bp, Artificial
  Probe
gaagcagaaccaagccattgcacat

SEQ ID NO: 308945 - DNA, 25 bp, Artificial
  Probe
tggaccaatgggaccattggcttgg

SEQ ID NO: 308946 - DNA, 25 bp, Artificial
  Probe
ccgtccttgggagagaggagccctc

SEQ ID NO: 308947 - DNA, 25 bp, Artificial
  Probe
ggaaaaatctctggagtcagaggcc

SEQ ID NO: 308948 - DNA, 25 bp, Artificial
  Probe
gtataacgtttgcacgaataccaac

SEQ ID NO: 308949 - DNA, 25 bp, Artificial
  Probe
gcttccaacgcgttatacacagagt

SEQ ID NO: 308950 - DNA, 25 bp, Artificial
  Probe
gtccagaagggctcctgaagacctg

SEQ ID NO: 308951 - DNA, 25 bp, Artificial
  Probe
atgcccaggagcaatcatccacaac

SEQ ID NO: 308952 - DNA, 25 bp, Artificial
  Probe
ctttggcccaaagattcacaccatg

SEQ ID NO: 308953 - DNA, 25 bp, Artificial
  Probe
aagacaccagaagttttttccacag

SEQ ID NO: 308954 - DNA, 25 bp, Artificial
  Probe
tatacacagagtttgggtgcacact

SEQ ID NO: 308955 - DNA, 25 bp, Artificial
  Probe
aggcctcggccgagcatgagaatgc

SEQ ID NO: 308956 - DNA, 25 bp, Artificial
  Probe
aggcctgggtgcagctctggactct

SEQ ID NO: 308957 - DNA, 25 bp, Artificial
  Probe
agagtttgggtgcacactaccctcc

SEQ ID NO: 308958 - DNA, 25 bp, Artificial
  Probe
cctggcaaacctttggcccaaagat

SEQ ID NO: 308959 - DNA, 25 bp, Artificial
  Probe
ttcaagagaccctgccttactcagg

SEQ ID NO: 308960 - DNA, 25 bp, Artificial
  Probe
gaaagacaatctcattgctgtggaa

SEQ ID NO: 308961 - DNA, 25 bp, Artificial
  Probe
cgatctgtgacagagcagtttaagg

SEQ ID NO: 308962 - DNA, 25 bp, Artificial
  Probe
ctgctttagacttgaaaagagacag

SEQ ID NO: 308963 - DNA, 25 bp, Artificial
  Probe
aaccagtgaatgtgcccgggtgtac

SEQ ID NO: 308964 - DNA, 25 bp, Artificial
  Probe
gtgctattaccaagttcaagatcaa

SEQ ID NO: 308965 - DNA, 25 bp, Artificial
  Probe
ccacggagcccaggaagatactttg

SEQ ID NO: 308966 - DNA, 25 bp, Artificial
  Probe
tttttgtacgacgtcaggtgttcaa

SEQ ID NO: 308967 - DNA, 25 bp, Artificial
  Probe
aatgtgcccgggtgtacattcccct

SEQ ID NO: 308968 - DNA, 25 bp, Artificial
  Probe
tttttcctgctttagacttgaaaag

SEQ ID NO: 308969 - DNA, 25 bp, Artificial
  Probe
ggcttcttcccctgggaatactgat

SEQ ID NO: 308970 - DNA, 25 bp, Artificial
  Probe
cccctgggaatactgatggattttt

SEQ ID NO: 308971 - DNA, 25 bp, Artificial
  Probe
tgggataggcttcttcccctgggaa

SEQ ID NO: 308972 - DNA, 25 bp, Artificial
  Probe
ctcttggaaggatgggataggcttc

SEQ ID NO: 308973 - DNA, 25 bp, Artificial
  Probe
acaggcaggcgatctgtgacagagc

SEQ ID NO: 308974 - DNA, 25 bp, Artificial
  Probe
gagtacactgcctgccttaagtgag

SEQ ID NO: 308975 - DNA, 25 bp, Artificial
  Probe
ggaacaaactgagctatgtagtcag

SEQ ID NO: 308976 - DNA, 25 bp, Artificial
  Probe
tttagattggccatagagtacactg

SEQ ID NO: 308977 - DNA, 25 bp, Artificial
  Probe
ctaggcctcggagcttccacatctg

SEQ ID NO: 308978 - DNA, 25 bp, Artificial
  Probe
actttaagacacattctaaggactg

SEQ ID NO: 308979 - DNA, 25 bp, Artificial
  Probe
agcccaggaagatactttgtattgt

SEQ ID NO: 308980 - DNA, 25 bp, Artificial
  Probe
accacttgtagatttgatttcattg

SEQ ID NO: 308981 - DNA, 25 bp, Artificial
  Probe
agttggaagcttaccaatcttactt

SEQ ID NO: 308982 - DNA, 25 bp, Artificial
  Probe
gtgaactttttctcattacgtgttg

SEQ ID NO: 308983 - DNA, 25 bp, Artificial
  Probe
gcttataaaacagtcatcctggctc

SEQ ID NO: 308984 - DNA, 25 bp, Artificial
  Probe
gcagctcagaaccacagcaactatc

SEQ ID NO: 308985 - DNA, 25 bp, Artificial
  Probe
taccaagttcaagatcaaaaaaggc

SEQ ID NO: 308986 - DNA, 25 bp, Artificial
  Probe
ctgccttaagtgaggacatgaaagt

SEQ ID NO: 308987 - DNA, 25 bp, Artificial
  Probe
tgtctactgcatttagggagtattc

SEQ ID NO: 308988 - DNA, 25 bp, Artificial
  Probe
tgcctgtaagccaaaagtaaggtgt

SEQ ID NO: 308989 - DNA, 25 bp, Artificial
  Probe
gtcagaatgtgactggttggatctc

SEQ ID NO: 308990 - DNA, 25 bp, Artificial
  Probe
tcagaatgtgactggttggatctca

SEQ ID NO: 308991 - DNA, 25 bp, Artificial
  Probe
cattgttgttgtctactgcatttag

SEQ ID NO: 308992 - DNA, 25 bp, Artificial
  Probe
aatggtgatggcagccttaggatca

SEQ ID NO: 308993 - DNA, 25 bp, Artificial
  Probe
ctgactgaggcagattgagaattcg

SEQ ID NO: 308994 - DNA, 25 bp, Artificial
  Probe
atgaaagtgctattaccaagttcaa

SEQ ID NO: 308995 - DNA, 25 bp, Artificial
  Probe
tccacatctgccagcggtcctaatg

SEQ ID NO: 308996 - DNA, 25 bp, Artificial
  Probe
ggaagcttaccaatcttactttgta

SEQ ID NO: 308997 - DNA, 25 bp, Artificial
  Probe
aatacatctttgatgtgttgttcct

SEQ ID NO: 308998 - DNA, 25 bp, Artificial
  Probe
tgtatttgaaagtgcctttgcagct

SEQ ID NO: 308999 - DNA, 25 bp, Artificial
  Probe
acactgcctgccttaagtgaggaca

SEQ ID NO: 309000 - DNA, 25 bp, Artificial
  Probe
tctactgcatttagggagtattcta

SEQ ID NO: 309001 - DNA, 25 bp, Artificial
  Probe
gaacaaactgagctatgtagtcaga

SEQ ID NO: 309002 - DNA, 25 bp, Artificial
  Probe
cttgaaccataaaatgtccagttag

SEQ ID NO: 309003 - DNA, 25 bp, Artificial
  Probe
ttttcaccattcgtatgtaatgctg

SEQ ID NO: 309004 - DNA, 25 bp, Artificial
  Probe
gtgttcaaacacttccttgatagca

SEQ ID NO: 309005 - DNA, 25 bp, Artificial
  Probe
tgcccgggtgtacattcccctgcag

SEQ ID NO: 309006 - DNA, 25 bp, Artificial
  Probe
gcagccttaggatcatagttttatt

SEQ ID NO: 309007 - DNA, 25 bp, Artificial
  Probe
acactaggtagtcagctctgcggct

SEQ ID NO: 309008 - DNA, 25 bp, Artificial
  Probe
caaccgcacacaggaaacggaagac

SEQ ID NO: 309009 - DNA, 25 bp, Artificial
  Probe
taggcgggcccgagcgttcgttctc

SEQ ID NO: 309010 - DNA, 25 bp, Artificial
  Probe
tcagtgttcacatgaggtcctcccg

SEQ ID NO: 309011 - DNA, 25 bp, Artificial
  Probe
tggctgagggagcacagagacctct

SEQ ID NO: 309012 - DNA, 25 bp, Artificial
  Probe
tgctaccacactaggtagtcagctc

SEQ ID NO: 309013 - DNA, 25 bp, Artificial
  Probe
ccccactgtgtagaaggagacagtg

SEQ ID NO: 309014 - DNA, 25 bp, Artificial
  Probe
gaagagtgttccttccacctgtagg

SEQ ID NO: 309015 - DNA, 25 bp, Artificial
  Probe
ctactaaccccactgtgtagaagga

SEQ ID NO: 309016 - DNA, 25 bp, Artificial
  Probe
tttggctgagggagcacagagacct

SEQ ID NO: 309017 - DNA, 25 bp, Artificial
  Probe
ttaaagtacagttttgcagttccta

SEQ ID NO: 309018 - DNA, 25 bp, Artificial
  Probe
ccgagacatctgctaccacactagg

SEQ ID NO: 309019 - DNA, 25 bp, Artificial
  Probe
cttccacctgtaggaggaagagatg

SEQ ID NO: 309020 - DNA, 25 bp, Artificial
  Probe
ttctcactcgctaggcgggcccgag

SEQ ID NO: 309021 - DNA, 25 bp, Artificial
  Probe
accgcacacaggaaacggaagacca

SEQ ID NO: 309022 - DNA, 25 bp, Artificial
  Probe
acctctgttaaagtacagttttgca

SEQ ID NO: 309023 - DNA, 25 bp, Artificial
  Probe
gctgaacctgtgagcccgaaacttt

SEQ ID NO: 309024 - DNA, 25 bp, Artificial
  Probe
gagcgttcgttctcccttttgagta

SEQ ID NO: 309025 - DNA, 25 bp, Artificial
  Probe
agggagcacagagacctctgttaaa

SEQ ID NO: 309026 - DNA, 25 bp, Artificial
  Probe
catctgctaccacactaggtagtca

SEQ ID NO: 309027 - DNA, 25 bp, Artificial
  Probe
gcccgagcgttcgttctcccttttg

SEQ ID NO: 309028 - DNA, 25 bp, Artificial
  Probe
ctcatgaagcacagggaagagtgtt

SEQ ID NO: 309029 - DNA, 25 bp, Artificial
  Probe
caggttgctgcaagctcagctgaac

SEQ ID NO: 309030 - DNA, 25 bp, Artificial
  Probe
gttgctgcaagctcagctgaacctg

SEQ ID NO: 309031 - DNA, 25 bp, Artificial
  Probe
aagtacagttttgcagttcctatac

SEQ ID NO: 309032 - DNA, 25 bp, Artificial
  Probe
tgctgtcctctcagaccgttctcat

SEQ ID NO: 309033 - DNA, 25 bp, Artificial
  Probe
gtgagcccgaaactttcagatcccc

SEQ ID NO: 309034 - DNA, 25 bp, Artificial
  Probe
gttctcactcgctaggcgggcccga

SEQ ID NO: 309035 - DNA, 25 bp, Artificial
  Probe
gttttgcagttcctatacagttttc

SEQ ID NO: 309036 - DNA, 25 bp, Artificial
  Probe
cctctcagaccgttctcatgaagca

SEQ ID NO: 309037 - DNA, 25 bp, Artificial
  Probe
tgtgctctactaaccccactgtgta

SEQ ID NO: 309038 - DNA, 25 bp, Artificial
  Probe
aaggtttgttcaggttgctgcaagc

SEQ ID NO: 309039 - DNA, 25 bp, Artificial
  Probe
ttatttctgaggttgttctcactcg

SEQ ID NO: 309040 - DNA, 25 bp, Artificial
  Probe
cgcacacaggaaacggaagaccagg

SEQ ID NO: 309041 - DNA, 25 bp, Artificial
  Probe
agtgttccttccacctgtaggagga

SEQ ID NO: 309042 - DNA, 25 bp, Artificial
  Probe
gttcgttctcccttttgagtaagca

SEQ ID NO: 309043 - DNA, 25 bp, Artificial
  Probe
ccgagcgttcgttctcccttttgag

SEQ ID NO: 309044 - DNA, 25 bp, Artificial
  Probe
tgtgtcagtgttcacatgaggtcct

SEQ ID NO: 309045 - DNA, 25 bp, Artificial
  Probe
gtcagtgttcacatgaggtcctccc

SEQ ID NO: 309046 - DNA, 25 bp, Artificial
  Probe
ggttgttctcactcgctaggcgggc

SEQ ID NO: 309047 - DNA, 25 bp, Artificial
  Probe
ctgtcctctcagaccgttctcatga

SEQ ID NO: 309048 - DNA, 25 bp, Artificial
  Probe
taggtagtcagctctgcggctgtgt

SEQ ID NO: 309049 - DNA, 25 bp, Artificial
  Probe
cagctctgcggctgtgtgtgctcta

SEQ ID NO: 309050 - DNA, 25 bp, Artificial
  Probe
cttttgagtaagcagggcatgctgt

SEQ ID NO: 309051 - DNA, 25 bp, Artificial
  Probe
cctgtgagcccgaaactttcagatc

SEQ ID NO: 309052 - DNA, 25 bp, Artificial
  Probe
taaagtacagttttgcagttcctat

SEQ ID NO: 309053 - DNA, 25 bp, Artificial
  Probe
tgtaaccttcccaggaccaggagaa

SEQ ID NO: 309054 - DNA, 25 bp, Artificial
  Probe
aagatgggctgaatccctttttaga

SEQ ID NO: 309055 - DNA, 25 bp, Artificial
  Probe
agcaaaccccagaggctcggcaggc

SEQ ID NO: 309056 - DNA, 25 bp, Artificial
  Probe
tcaaacagcctgaatccaacttagg

SEQ ID NO: 309057 - DNA, 25 bp, Artificial
  Probe
ccggagagactttgggcttgactgt

SEQ ID NO: 309058 - DNA, 25 bp, Artificial
  Probe
gcatactcatcttgtgcaccaagca

SEQ ID NO: 309059 - DNA, 25 bp, Artificial
  Probe
gactttgggcttgactgtgatgaac

SEQ ID NO: 309060 - DNA, 25 bp, Artificial
  Probe
acacccaagaggtcccggagagact

SEQ ID NO: 309061 - DNA, 25 bp, Artificial
  Probe
ggaatcgcggtgctgtcgctacccc

SEQ ID NO: 309062 - DNA, 25 bp, Artificial
  Probe
caaacccatgaaagacggtacaagg

SEQ ID NO: 309063 - DNA, 25 bp, Artificial
  Probe
tgcacccaaaagatataaggctaat

SEQ ID NO: 309064 - DNA, 25 bp, Artificial
  Probe
gtgcaccaagcaaaccccagaggct

SEQ ID NO: 309065 - DNA, 25 bp, Artificial
  Probe
attattgcacccaaaagatataagg

SEQ ID NO: 309066 - DNA, 25 bp, Artificial
  Probe
agaatgggcatgatcttgctgtaac

SEQ ID NO: 309067 - DNA, 25 bp, Artificial
  Probe
tcccaggaccaggagaagatgggct

SEQ ID NO: 309068 - DNA, 25 bp, Artificial
  Probe
aaattccagccatggtagtagaccg

SEQ ID NO: 309069 - DNA, 25 bp, Artificial
  Probe
ctggattattgcacccaaaagatat

SEQ ID NO: 309070 - DNA, 25 bp, Artificial
  Probe
aaacttgacatgagcccaggcactg

SEQ ID NO: 309071 - DNA, 25 bp, Artificial
  Probe
cactccacggaatcgcggtgctgtc

SEQ ID NO: 309072 - DNA, 25 bp, Artificial
  Probe
caagcaaaccccagaggctcggcag

SEQ ID NO: 309073 - DNA, 25 bp, Artificial
  Probe
tgggaaaattccagccatggtagta

SEQ ID NO: 309074 - DNA, 25 bp, Artificial
  Probe
ataaggctaattactgctctggaga

SEQ ID NO: 309075 - DNA, 25 bp, Artificial
  Probe
taaggctaattactgctctggagag

SEQ ID NO: 309076 - DNA, 25 bp, Artificial
  Probe
ccgcatactcatcttgtgcaccaag

SEQ ID NO: 309077 - DNA, 25 bp, Artificial
  Probe
ggtcgatttcgaagcctttggatgg

SEQ ID NO: 309078 - DNA, 25 bp, Artificial
  Probe
ttgctgtaaccttcccaggaccagg

SEQ ID NO: 309079 - DNA, 25 bp, Artificial
  Probe
acggaatcgcggtgctgtcgctacc

SEQ ID NO: 309080 - DNA, 25 bp, Artificial
  Probe
aaggtataccggaatccgatctctg

SEQ ID NO: 309081 - DNA, 25 bp, Artificial
  Probe
ccaacttaggcattgaaatcaaagc

SEQ ID NO: 309082 - DNA, 25 bp, Artificial
  Probe
tgaatccaacttaggcattgaaatc

SEQ ID NO: 309083 - DNA, 25 bp, Artificial
  Probe
tgggcttgactgtgatgaacactcc

SEQ ID NO: 309084 - DNA, 25 bp, Artificial
  Probe
ggtataccggaatccgatctctgaa

SEQ ID NO: 309085 - DNA, 25 bp, Artificial
  Probe
acagacacacccaagaggtcccgga

SEQ ID NO: 309086 - DNA, 25 bp, Artificial
  Probe
ccctcacggtcgatttcgaagcctt

SEQ ID NO: 309087 - DNA, 25 bp, Artificial
  Probe
attggctcaaacagcctgaatccaa

SEQ ID NO: 309088 - DNA, 25 bp, Artificial
  Probe
agatgggctgaatccctttttagaa

SEQ ID NO: 309089 - DNA, 25 bp, Artificial
  Probe
tgcaaaattggctcaaacagcctga

SEQ ID NO: 309090 - DNA, 25 bp, Artificial
  Probe
tgactgtgatgaacactccacggaa

SEQ ID NO: 309091 - DNA, 25 bp, Artificial
  Probe
tgacatgagcccaggcactggtatt

SEQ ID NO: 309092 - DNA, 25 bp, Artificial
  Probe
caggcactggtatttggcagagtat

SEQ ID NO: 309093 - DNA, 25 bp, Artificial
  Probe
gtcccggagagactttgggcttgac

SEQ ID NO: 309094 - DNA, 25 bp, Artificial
  Probe
atgggaaaattccagccatggtagt

SEQ ID NO: 309095 - DNA, 25 bp, Artificial
  Probe
atcttgtgcaccaagcaaaccccag

SEQ ID NO: 309096 - DNA, 25 bp, Artificial
  Probe
aggcccttgctgcacgccaacaaaa

SEQ ID NO: 309097 - DNA, 25 bp, Artificial
  Probe
tgaatccctttttagaagtcaaagt

SEQ ID NO: 309098 - DNA, 25 bp, Artificial
  Probe
tcaaagtaacagacacacccaagag

SEQ ID NO: 309099 - DNA, 25 bp, Artificial
  Probe
ctctccaaggccttccatttatttc

SEQ ID NO: 309100 - DNA, 25 bp, Artificial
  Probe
ttgcaagtgactctccaaggccttc

SEQ ID NO: 309101 - DNA, 25 bp, Artificial
  Probe
agtgactctccaaggccttccattt

SEQ ID NO: 309102 - DNA, 25 bp, Artificial
  Probe
tgatgtgaggttgcaagtgactctc

SEQ ID NO: 309103 - DNA, 25 bp, Artificial
  Probe
cccctgatgtgaggttgcaagtgac

SEQ ID NO: 309104 - DNA, 25 bp, Artificial
  Probe
gcaagtgactctccaaggccttcca

SEQ ID NO: 309105 - DNA, 25 bp, Artificial
  Probe
tgcaagtgactctccaaggccttcc

SEQ ID NO: 309106 - DNA, 25 bp, Artificial
  Probe
gtgactctccaaggccttccattta

SEQ ID NO: 309107 - DNA, 25 bp, Artificial
  Probe
caaggccttccatttatttctattt

SEQ ID NO: 309108 - DNA, 25 bp, Artificial
  Probe
tccaaggccttccatttatttctat

SEQ ID NO: 309109 - DNA, 25 bp, Artificial
  Probe
aagtgactctccaaggccttccatt

SEQ ID NO: 309110 - DNA, 25 bp, Artificial
  Probe
cctgatgtgaggttgcaagtgactc

SEQ ID NO: 309111 - DNA, 25 bp, Artificial
  Probe
gttgcaagtgactctccaaggcctt

SEQ ID NO: 309112 - DNA, 25 bp, Artificial
  Probe
caagtgactctccaaggccttccat

SEQ ID NO: 309113 - DNA, 25 bp, Artificial
  Probe
ctgatgtgaggttgcaagtgactct

SEQ ID NO: 309114 - DNA, 25 bp, Artificial
  Probe
actctccaaggccttccatttattt

SEQ ID NO: 309115 - DNA, 25 bp, Artificial
  Probe
ccctgatgtgaggttgcaagtgact

SEQ ID NO: 309116 - DNA, 25 bp, Artificial
  Probe
tctccaaggccttccatttatttct

SEQ ID NO: 309117 - DNA, 25 bp, Artificial
  Probe
aggttgcaagtgactctccaaggcc

SEQ ID NO: 309118 - DNA, 25 bp, Artificial
  Probe
ggttgcaagtgactctccaaggcct

SEQ ID NO: 309119 - DNA, 25 bp, Artificial
  Probe
tgactctccaaggccttccatttat

SEQ ID NO: 309120 - DNA, 25 bp, Artificial
  Probe
acccctgatgtgaggttgcaagtga

SEQ ID NO: 309121 - DNA, 25 bp, Artificial
  Probe
gactctccaaggccttccatttatt

SEQ ID NO: 309122 - DNA, 25 bp, Artificial
  Probe
ctccaaggccttccatttatttcta

SEQ ID NO: 309123 - DNA, 25 bp, Artificial
  Probe
ccaaggccttccatttatttctatt

SEQ ID NO: 309124 - DNA, 25 bp, Artificial
  Probe
ccagcccaataaagtgttggcccca

SEQ ID NO: 309125 - DNA, 25 bp, Artificial
  Probe
gaaagacctacttgttcaagggtag

SEQ ID NO: 309126 - DNA, 25 bp, Artificial
  Probe
tccctttttgccttccgaggtgagt

SEQ ID NO: 309127 - DNA, 25 bp, Artificial
  Probe
ttcctgcccacagttacagtggccg

SEQ ID NO: 309128 - DNA, 25 bp, Artificial
  Probe
tgtaccagggaaagtggacgctgct

SEQ ID NO: 309129 - DNA, 25 bp, Artificial
  Probe
tgctctccagcgaagagagtgggct

SEQ ID NO: 309130 - DNA, 25 bp, Artificial
  Probe
ctgggcgtcgaagtcgaaaacgcta

SEQ ID NO: 309131 - DNA, 25 bp, Artificial
  Probe
acccacgctccattgctcagtattg

SEQ ID NO: 309132 - DNA, 25 bp, Artificial
  Probe
accatgccagaagatgagtattgga

SEQ ID NO: 309133 - DNA, 25 bp, Artificial
  Probe
agtatgaatttcagcagcagcccag

SEQ ID NO: 309134 - DNA, 25 bp, Artificial
  Probe
ttgctatgagctagatgaaacagca

SEQ ID NO: 309135 - DNA, 25 bp, Artificial
  Probe
gctctccagcgaagagagtgggcta

SEQ ID NO: 309136 - DNA, 25 bp, Artificial
  Probe
ccacagttacagtggccgggaaagg

SEQ ID NO: 309137 - DNA, 25 bp, Artificial
  Probe
ggagtggccccaaggcctgacacca

SEQ ID NO: 309138 - DNA, 25 bp, Artificial
  Probe
gccttcactcgcatcaactgtcagg

SEQ ID NO: 309139 - DNA, 25 bp, Artificial
  Probe
gaaaccaagaacagtaccaatgctg

SEQ ID NO: 309140 - DNA, 25 bp, Artificial
  Probe
aagccaacaactcctgatcctcagg

SEQ ID NO: 309141 - DNA, 25 bp, Artificial
  Probe
gttgacgcagccttagcccttcctg

SEQ ID NO: 309142 - DNA, 25 bp, Artificial
  Probe
gtggactctgtgaatcctccctacc

SEQ ID NO: 309143 - DNA, 25 bp, Artificial
  Probe
tgggctgcccaacctctgagaagta

SEQ ID NO: 309144 - DNA, 25 bp, Artificial
  Probe
tgtctggggcatcgagggccccatc

SEQ ID NO: 309145 - DNA, 25 bp, Artificial
  Probe
acctgcgagcccattcagagcgtct

SEQ ID NO: 309146 - DNA, 25 bp, Artificial
  Probe
gagcttcagaaacctcgtcctccag

SEQ ID NO: 309147 - DNA, 25 bp, Artificial
  Probe
tggacgctgctatggccggccgcat

SEQ ID NO: 309148 - DNA, 25 bp, Artificial
  Probe
acattccgctctgtccaggccaaaa

SEQ ID NO: 309149 - DNA, 25 bp, Artificial
  Probe
agtggaaagccctttgatgccttca

SEQ ID NO: 309150 - DNA, 25 bp, Artificial
  Probe
tggagctatgactacccggaggaaa

SEQ ID NO: 309151 - DNA, 25 bp, Artificial
  Probe
ctgagtttccagaagaagagctgtg

SEQ ID NO: 309152 - DNA, 25 bp, Artificial
  Probe
cccagccaggaggaatgtgaaggaa

SEQ ID NO: 309153 - DNA, 25 bp, Artificial
  Probe
gtgcaatccgagaacacctctctac

SEQ ID NO: 309154 - DNA, 25 bp, Artificial
  Probe
cccacgctccattgctcagtattgg

SEQ ID NO: 309155 - DNA, 25 bp, Artificial
  Probe
agtgcaagccccaagtgacccgggg

SEQ ID NO: 309156 - DNA, 25 bp, Artificial
  Probe
attggagctatgactacccggagga

SEQ ID NO: 309157 - DNA, 25 bp, Artificial
  Probe
cactttaacctaaagcctcgagccg

SEQ ID NO: 309158 - DNA, 25 bp, Artificial
  Probe
caagaacctgaagtggggcaacagg

SEQ ID NO: 309159 - DNA, 25 bp, Artificial
  Probe
gaacatttttgaactcctcttctgg

SEQ ID NO: 309160 - DNA, 25 bp, Artificial
  Probe
cagcgggacagctgggagaacattt

SEQ ID NO: 309161 - DNA, 25 bp, Artificial
  Probe
ctcgagccgaagagactataaagcc

SEQ ID NO: 309162 - DNA, 25 bp, Artificial
  Probe
cgagttaaccttagaacacggcgag

SEQ ID NO: 309163 - DNA, 25 bp, Artificial
  Probe
gtgaaggaagctctctgtcagccgt

SEQ ID NO: 309164 - DNA, 25 bp, Artificial
  Probe
ttccgctctgtccaggccaaaaaac

SEQ ID NO: 309165 - DNA, 25 bp, Artificial
  Probe
gagacaagtactaccgagttaacct

SEQ ID NO: 309166 - DNA, 25 bp, Artificial
  Probe
atcagcagggattggcatggtgtac

SEQ ID NO: 309167 - DNA, 25 bp, Artificial
  Probe
gaagtctgggcgtcgaagtcgaaaa

SEQ ID NO: 309168 - DNA, 25 bp, Artificial
  Probe
atgaaacagcagtgaggcctgggta

SEQ ID NO: 309169 - DNA, 25 bp, Artificial
  Probe
gtttaccatgccagaagatgagtat

SEQ ID NO: 309170 - DNA, 25 bp, Artificial
  Probe
gtgtcctctcagtgctgacggcatg

SEQ ID NO: 309171 - DNA, 25 bp, Artificial
  Probe
gtttctcctatcgagtgtcagcccc

SEQ ID NO: 309172 - DNA, 25 bp, Artificial
  Probe
agcagcagatgctctgcagttcact

SEQ ID NO: 309173 - DNA, 25 bp, Artificial
  Probe
tgtcctctcagtgctgacggcatgt

SEQ ID NO: 309174 - DNA, 25 bp, Artificial
  Probe
cctctcagtgctgacggcatgtttc

SEQ ID NO: 309175 - DNA, 25 bp, Artificial
  Probe
gcatgtttctcctatcgagtgtcag

SEQ ID NO: 309176 - DNA, 25 bp, Artificial
  Probe
gctctgcagttcactgctgtgtcct

SEQ ID NO: 309177 - DNA, 25 bp, Artificial
  Probe
tgtttctcctatcgagtgtcagccc

SEQ ID NO: 309178 - DNA, 25 bp, Artificial
  Probe
cagatgctctgcagttcactgctgt

SEQ ID NO: 309179 - DNA, 25 bp, Artificial
  Probe
gtgctgacggcatgtttctcctatc

SEQ ID NO: 309180 - DNA, 25 bp, Artificial
  Probe
cagcagatgctctgcagttcactgc

SEQ ID NO: 309181 - DNA, 25 bp, Artificial
  Probe
agttcactgctgtgtcctctcagtg

SEQ ID NO: 309182 - DNA, 25 bp, Artificial
  Probe
gttcactgctgtgtcctctcagtgc

SEQ ID NO: 309183 - DNA, 25 bp, Artificial
  Probe
cactgctgtgtcctctcagtgctga

SEQ ID NO: 309184 - DNA, 25 bp, Artificial
  Probe
ttcactgctgtgtcctctcagtgct

SEQ ID NO: 309185 - DNA, 25 bp, Artificial
  Probe
agtgctgacggcatgtttctcctat

SEQ ID NO: 309186 - DNA, 25 bp, Artificial
  Probe
ctgtgtcctctcagtgctgacggca

SEQ ID NO: 309187 - DNA, 25 bp, Artificial
  Probe
atgctctgcagttcactgctgtgtc

SEQ ID NO: 309188 - DNA, 25 bp, Artificial
  Probe
ggagcagcagatgctctgcagttca

SEQ ID NO: 309189 - DNA, 25 bp, Artificial
  Probe
acggcatgtttctcctatcgagtgt

SEQ ID NO: 309190 - DNA, 25 bp, Artificial
  Probe
cagttcactgctgtgtcctctcagt

SEQ ID NO: 309191 - DNA, 25 bp, Artificial
  Probe
agatgctctgcagttcactgctgtg

SEQ ID NO: 309192 - DNA, 25 bp, Artificial
  Probe
ggcatgtttctcctatcgagtgtca

SEQ ID NO: 309193 - DNA, 25 bp, Artificial
  Probe
tgacggcatgtttctcctatcgagt

SEQ ID NO: 309194 - DNA, 25 bp, Artificial
  Probe
tcactgctgtgtcctctcagtgctg

SEQ ID NO: 309195 - DNA, 25 bp, Artificial
  Probe
tgctgtgtcctctcagtgctgacgg

SEQ ID NO: 309196 - DNA, 25 bp, Artificial
  Probe
tgtgtcctctcagtgctgacggcat

SEQ ID NO: 309197 - DNA, 25 bp, Artificial
  Probe
actgctgtgtcctctcagtgctgac

SEQ ID NO: 309198 - DNA, 25 bp, Artificial
  Probe
tgctgacggcatgtttctcctatcg

SEQ ID NO: 309199 - DNA, 25 bp, Artificial
  Probe
gcagttcactgctgtgtcctctcag

SEQ ID NO: 309200 - DNA, 25 bp, Artificial
  Probe
ctgctgtgtcctctcagtgctgacg

SEQ ID NO: 309201 - DNA, 25 bp, Artificial
  Probe
gatgctctgcagttcactgctgtgt

SEQ ID NO: 309202 - DNA, 25 bp, Artificial
  Probe
ctctgcagttcactgctgtgtcctc

SEQ ID NO: 309203 - DNA, 25 bp, Artificial
  Probe
tctgcagttcactgctgtgtcctct

SEQ ID NO: 309204 - DNA, 25 bp, Artificial
  Probe
tcctctcagtgctgacggcatgttt

SEQ ID NO: 309205 - DNA, 25 bp, Artificial
  Probe
gcagatgctctgcagttcactgctg

SEQ ID NO: 309206 - DNA, 25 bp, Artificial
  Probe
ctgcagttcactgctgtgtcctctc

SEQ ID NO: 309207 - DNA, 25 bp, Artificial
  Probe
ctctcagtgctgacggcatgtttct

SEQ ID NO: 309208 - DNA, 25 bp, Artificial
  Probe
ctgacggcatgtttctcctatcgag

SEQ ID NO: 309209 - DNA, 25 bp, Artificial
  Probe
gctgtgtcctctcagtgctgacggc

SEQ ID NO: 309210 - DNA, 25 bp, Artificial
  Probe
cggcatgtttctcctatcgagtgtc

SEQ ID NO: 309211 - DNA, 25 bp, Artificial
  Probe
atgtttctcctatcgagtgtcagcc

SEQ ID NO: 309212 - DNA, 25 bp, Artificial
  Probe
gacggcatgtttctcctatcgagtg

SEQ ID NO: 309213 - DNA, 25 bp, Artificial
  Probe
gagcagcagatgctctgcagttcac

SEQ ID NO: 309214 - DNA, 25 bp, Artificial
  Probe
gctgacggcatgtttctcctatcga

SEQ ID NO: 309215 - DNA, 25 bp, Artificial
  Probe
tgcagttcactgctgtgtcctctca

SEQ ID NO: 309216 - DNA, 25 bp, Artificial
  Probe
atatggctgaaggagacccagaagc

SEQ ID NO: 309217 - DNA, 25 bp, Artificial
  Probe
gtccaggaactttctgggagcatcc

SEQ ID NO: 309218 - DNA, 25 bp, Artificial
  Probe
tggtaaggcctcagcgaccgccagt

SEQ ID NO: 309219 - DNA, 25 bp, Artificial
  Probe
tcaagaaagcgttgccggcccttcc

SEQ ID NO: 309220 - DNA, 25 bp, Artificial
  Probe
cattttcaagaaagcgttgccggcc

SEQ ID NO: 309221 - DNA, 25 bp, Artificial
  Probe
tcgtgcagcccttcatggaccaact

SEQ ID NO: 309222 - DNA, 25 bp, Artificial
  Probe
cgggctcattttctactttgccacg

SEQ ID NO: 309223 - DNA, 25 bp, Artificial
  Probe
ccagtggggactggaacacaaccat

SEQ ID NO: 309224 - DNA, 25 bp, Artificial
  Probe
gttggtaaggcctcagcgaccgcca

SEQ ID NO: 309225 - DNA, 25 bp, Artificial
  Probe
tcactagtgaagacccggaggaaag

SEQ ID NO: 309226 - DNA, 25 bp, Artificial
  Probe
ttgatcggcctgtgccttacgttac

SEQ ID NO: 309227 - DNA, 25 bp, Artificial
  Probe
gaacacaaccatagcctgctttgta

SEQ ID NO: 309228 - DNA, 25 bp, Artificial
  Probe
gaagagacacaggacactggcactg

SEQ ID NO: 309229 - DNA, 25 bp, Artificial
  Probe
tacagtgttctggttggtaaggcct

SEQ ID NO: 309230 - DNA, 25 bp, Artificial
  Probe
ccgccagtggggactggaacacaac

SEQ ID NO: 309231 - DNA, 25 bp, Artificial
  Probe
gctcattttctactttgccacggat

SEQ ID NO: 309232 - DNA, 25 bp, Artificial
  Probe
gagacagtcacctggggcctcatcg

SEQ ID NO: 309233 - DNA, 25 bp, Artificial
  Probe
attatctcgtgcagcccttcatgga

SEQ ID NO: 309234 - DNA, 25 bp, Artificial
  Probe
gggactggaacacaaccatagcctg

SEQ ID NO: 309235 - DNA, 25 bp, Artificial
  Probe
tcatcgctccactcctgagtcaaga

SEQ ID NO: 309236 - DNA, 25 bp, Artificial
  Probe
ttatctattcctcaaccatggtgtg

SEQ ID NO: 309237 - DNA, 25 bp, Artificial
  Probe
agcctgctttgtagccatattgatc

SEQ ID NO: 309238 - DNA, 25 bp, Artificial
  Probe
agcacacaaggaacagagagggaag

SEQ ID NO: 309239 - DNA, 25 bp, Artificial
  Probe
ctcaaccatggtgtggttggtgaat

SEQ ID NO: 309240 - DNA, 25 bp, Artificial
  Probe
tagccatattgatcggcctgtgcct

SEQ ID NO: 309241 - DNA, 25 bp, Artificial
  Probe
tcctgagtcaagagctgctgtccag

SEQ ID NO: 309242 - DNA, 25 bp, Artificial
  Probe
ccaggaactttctgggagcatcctc

SEQ ID NO: 309243 - DNA, 25 bp, Artificial
  Probe
tcggcctgtgccttacgttactcct

SEQ ID NO: 309244 - DNA, 25 bp, Artificial
  Probe
gaaatgagactctctttccagctct

SEQ ID NO: 309245 - DNA, 25 bp, Artificial
  Probe
ttctggttggtaaggcctcagcgac

SEQ ID NO: 309246 - DNA, 25 bp, Artificial
  Probe
tgctttgtagccatattgatcggcc

SEQ ID NO: 309247 - DNA, 25 bp, Artificial
  Probe
acaaccatagcctgctttgtagcca

SEQ ID NO: 309248 - DNA, 25 bp, Artificial
  Probe
tattgatcggcctgtgccttacgtt

SEQ ID NO: 309249 - DNA, 25 bp, Artificial
  Probe
ttcaagaaagcgttgccggcccttc

SEQ ID NO: 309250 - DNA, 25 bp, Artificial
  Probe
gacacaggacactggcactgggagc

SEQ ID NO: 309251 - DNA, 25 bp, Artificial
  Probe
tgagtcaagagctgctgtccaggaa

SEQ ID NO: 309252 - DNA, 25 bp, Artificial
  Probe
gctgctgtccaggaactttctggga

SEQ ID NO: 309253 - DNA, 25 bp, Artificial
  Probe
tgtgccttacgttactcctgctcgc

SEQ ID NO: 309254 - DNA, 25 bp, Artificial
  Probe
atggctgaaggagacccagaagccc

SEQ ID NO: 309255 - DNA, 25 bp, Artificial
  Probe
gaggcccaaagagacagtcacctgg

SEQ ID NO: 309256 - DNA, 25 bp, Artificial
  Probe
cctgctcgccattttcaagaaagcg

SEQ ID NO: 309257 - DNA, 25 bp, Artificial
  Probe
ttctactttgccacggattatctcg

SEQ ID NO: 309258 - DNA, 25 bp, Artificial
  Probe
cacacaaggaacagagagggaagag

SEQ ID NO: 309259 - DNA, 25 bp, Artificial
  Probe
gaactttctgggagcatcctcacta

SEQ ID NO: 309260 - DNA, 25 bp, Artificial
  Probe
aaaccccaagtatagcacacaagga

SEQ ID NO: 309261 - DNA, 25 bp, Artificial
  Probe
actttgccacggattatctcgtgca

SEQ ID NO: 309262 - DNA, 25 bp, Artificial
  Probe
ggaatttgaatcttccctgtatgaa

SEQ ID NO: 309263 - DNA, 25 bp, Artificial
  Probe
atatcgaccgaacagccaacgaatc

SEQ ID NO: 309264 - DNA, 25 bp, Artificial
  Probe
gatatcgaccgaacagccaacgaat

SEQ ID NO: 309265 - DNA, 25 bp, Artificial
  Probe
accaagttctcttcgttgacaaaag

SEQ ID NO: 309266 - DNA, 25 bp, Artificial
  Probe
acctgaggccgcatgatttatagag

SEQ ID NO: 309267 - DNA, 25 bp, Artificial
  Probe
gaatcccagaccagactgataatat

SEQ ID NO: 309268 - DNA, 25 bp, Artificial
  Probe
aaatgaccaagttctcttcgttgac

SEQ ID NO: 309269 - DNA, 25 bp, Artificial
  Probe
aggccgcatgatttatagagtaaac

SEQ ID NO: 309270 - DNA, 25 bp, Artificial
  Probe
gaatttgaatcttccctgtatgaag

SEQ ID NO: 309271 - DNA, 25 bp, Artificial
  Probe
ctgaggccgcatgatttatagagta

SEQ ID NO: 309272 - DNA, 25 bp, Artificial
  Probe
ccaagttctcttcgttgacaaaaga

SEQ ID NO: 309273 - DNA, 25 bp, Artificial
  Probe
tgatatcgaccgaacagccaacgaa

SEQ ID NO: 309274 - DNA, 25 bp, Artificial
  Probe
gaccaagttctcttcgttgacaaaa

SEQ ID NO: 309275 - DNA, 25 bp, Artificial
  Probe
atgaccaagttctcttcgttgacaa

SEQ ID NO: 309276 - DNA, 25 bp, Artificial
  Probe
gcataaatgaccaagttctcttcgt

SEQ ID NO: 309277 - DNA, 25 bp, Artificial
  Probe
tgaccaagttctcttcgttgacaaa

SEQ ID NO: 309278 - DNA, 25 bp, Artificial
  Probe
agcataaatgaccaagttctcttcg

SEQ ID NO: 309279 - DNA, 25 bp, Artificial
  Probe
caagttctcttcgttgacaaaagaa

SEQ ID NO: 309280 - DNA, 25 bp, Artificial
  Probe
tatcgaccgaacagccaacgaatcc

SEQ ID NO: 309281 - DNA, 25 bp, Artificial
  Probe
gagccttatgataacctactctgta

SEQ ID NO: 309282 - DNA, 25 bp, Artificial
  Probe
cgaatcccagaccagactgataata

SEQ ID NO: 309283 - DNA, 25 bp, Artificial
  Probe
aatgaccaagttctcttcgttgaca

SEQ ID NO: 309284 - DNA, 25 bp, Artificial
  Probe
tggaatttgaatcttccctgtatga

SEQ ID NO: 309285 - DNA, 25 bp, Artificial
  Probe
taaatgaccaagttctcttcgttga

SEQ ID NO: 309286 - DNA, 25 bp, Artificial
  Probe
ccaacgaatcccagaccagactgat

SEQ ID NO: 309287 - DNA, 25 bp, Artificial
  Probe
gaccgaacagccaacgaatcccaga

SEQ ID NO: 309288 - DNA, 25 bp, Artificial
  Probe
cctgaggccgcatgatttatagagt

SEQ ID NO: 309289 - DNA, 25 bp, Artificial
  Probe
aacagccaacgaatcccagaccaga

SEQ ID NO: 309290 - DNA, 25 bp, Artificial
  Probe
aacgaatcccagaccagactgataa

SEQ ID NO: 309291 - DNA, 25 bp, Artificial
  Probe
acgaatcccagaccagactgataat

SEQ ID NO: 309292 - DNA, 25 bp, Artificial
  Probe
caacgaatcccagaccagactgata

SEQ ID NO: 309293 - DNA, 25 bp, Artificial
  Probe
gaacagccaacgaatcccagaccag

SEQ ID NO: 309294 - DNA, 25 bp, Artificial
  Probe
atggtggtgacagtgaccgcctacc

SEQ ID NO: 309295 - DNA, 25 bp, Artificial
  Probe
ggatcccagccaggactccagcatg

SEQ ID NO: 309296 - DNA, 25 bp, Artificial
  Probe
tactggcatgggtggcacctaccag

SEQ ID NO: 309297 - DNA, 25 bp, Artificial
  Probe
gaggagttctgcatctacaaccgca

SEQ ID NO: 309298 - DNA, 25 bp, Artificial
  Probe
gtggtcttcggctccattgtgaatg

SEQ ID NO: 309299 - DNA, 25 bp, Artificial
  Probe
ggaccgcaagaaagccgtgctgtct

SEQ ID NO: 309300 - DNA, 25 bp, Artificial
  Probe
ttgatgtgtacttcccgcagatcag

SEQ ID NO: 309301 - DNA, 25 bp, Artificial
  Probe
atgcctgcagctacggcgtgaccgt

SEQ ID NO: 309302 - DNA, 25 bp, Artificial
  Probe
gcggtatcagattggcgccgactcg

SEQ ID NO: 309303 - DNA, 25 bp, Artificial
  Probe
gccttccagcggtatcagattggcg

SEQ ID NO: 309304 - DNA, 25 bp, Artificial
  Probe
tccattgtgaatgagggctacctga

SEQ ID NO: 309305 - DNA, 25 bp, Artificial
  Probe
tacatggatcccagccaggactcca

SEQ ID NO: 309306 - DNA, 25 bp, Artificial
  Probe
ggtgcgacagccacataccatcctg

SEQ ID NO: 309307 - DNA, 25 bp, Artificial
  Probe
cccagtgctgggtcggaccctactg

SEQ ID NO: 309308 - DNA, 25 bp, Artificial
  Probe
tgctagccttccagcggtatcagat

SEQ ID NO: 309309 - DNA, 25 bp, Artificial
  Probe
cgggtcaggccgtgctagccttcca

SEQ ID NO: 309310 - DNA, 25 bp, Artificial
  Probe
gcagtgtcaaggaccgcaagaaagc

SEQ ID NO: 309311 - DNA, 25 bp, Artificial
  Probe
gggtgtgtccacatatgtgtgcaag

SEQ ID NO: 309312 - DNA, 25 bp, Artificial
  Probe
gaccctactggcatgggtggcacct

SEQ ID NO: 309313 - DNA, 25 bp, Artificial
  Probe
gtgattccactgaggcccagtgcag

SEQ ID NO: 309314 - DNA, 25 bp, Artificial
  Probe
tcgcacatgctcagcctccaagtga

SEQ ID NO: 309315 - DNA, 25 bp, Artificial
  Probe
tgttggccttcctcacctgcctggt

SEQ ID NO: 309316 - DNA, 25 bp, Artificial
  Probe
gagttctgcatctacaaccgcaacc

SEQ ID NO: 309317 - DNA, 25 bp, Artificial
  Probe
tacctggcgcttgatgtgtacttcc

SEQ ID NO: 309318 - DNA, 25 bp, Artificial
  Probe
ccaggactccagcatgccttatgca

SEQ ID NO: 309319 - DNA, 25 bp, Artificial
  Probe
acctgcctggtctacctggcgcttg

SEQ ID NO: 309320 - DNA, 25 bp, Artificial
  Probe
tgtacttcccgcagatcagcagtgt

SEQ ID NO: 309321 - DNA, 25 bp, Artificial
  Probe
tgaatgagggctacctgaacaaccc

SEQ ID NO: 309322 - DNA, 25 bp, Artificial
  Probe
gggctacctgaacaacccggaggag

SEQ ID NO: 309323 - DNA, 25 bp, Artificial
  Probe
ccccctgatggtggtgacagtgacc

SEQ ID NO: 309324 - DNA, 25 bp, Artificial
  Probe
ccatcctgcgcgtcgtgtcttgggt

SEQ ID NO: 309325 - DNA, 25 bp, Artificial
  Probe
gtgctgggtcggaccctactggcat

SEQ ID NO: 309326 - DNA, 25 bp, Artificial
  Probe
ccattgtggtcttcggctccattgt

SEQ ID NO: 309327 - DNA, 25 bp, Artificial
  Probe
tgaccgtgggcgtgttggccttcct

SEQ ID NO: 309328 - DNA, 25 bp, Artificial
  Probe
gtcaaggaccgcaagaaagccgtgc

SEQ ID NO: 309329 - DNA, 25 bp, Artificial
  Probe
ccgtgggcgtgttggccttcctcac

SEQ ID NO: 309330 - DNA, 25 bp, Artificial
  Probe
gagccccagggctaccagtcgcagg

SEQ ID NO: 309331 - DNA, 25 bp, Artificial
  Probe
gtgttggccttcctcacctgcctgg

SEQ ID NO: 309332 - DNA, 25 bp, Artificial
  Probe
gcaagaaagccgtgctgtctgacat

SEQ ID NO: 309333 - DNA, 25 bp, Artificial
  Probe
ccaagtgattccactgaggcccagt

SEQ ID NO: 309334 - DNA, 25 bp, Artificial
  Probe
gtggtgacagtgaccgcctaccctg

SEQ ID NO: 309335 - DNA, 25 bp, Artificial
  Probe
cctcttctcccaggactacatggat

SEQ ID NO: 309336 - DNA, 25 bp, Artificial
  Probe
gctaccagtcgcagggctactgagc

SEQ ID NO: 309337 - DNA, 25 bp, Artificial
  Probe
tcagcctccaagtgattccactgag

SEQ ID NO: 309338 - DNA, 25 bp, Artificial
  Probe
cccaatgcctgcagctacggcgtga

SEQ ID NO: 309339 - DNA, 25 bp, Artificial
  Probe
cagccaggactccagcatgccttat

SEQ ID NO: 309340 - DNA, 25 bp, Artificial
  Probe
gtcttggtgagcacgctgctccctc

SEQ ID NO: 309341 - DNA, 25 bp, Artificial
  Probe
accatgaatggctccggcagccagg

SEQ ID NO: 309342 - DNA, 25 bp, Artificial
  Probe
ggagcggcgtccactttggtgatac

SEQ ID NO: 309343 - DNA, 25 bp, Artificial
  Probe
aggagggagcggcgtccactttggt

SEQ ID NO: 309344 - DNA, 25 bp, Artificial
  Probe
gcgtccactttggtgataccatgaa

SEQ ID NO: 309345 - DNA, 25 bp, Artificial
  Probe
cggcgtccactttggtgataccatg

SEQ ID NO: 309346 - DNA, 25 bp, Artificial
  Probe
ggtcttggtgagcacgctgctccct

SEQ ID NO: 309347 - DNA, 25 bp, Artificial
  Probe
tccctcgctgcagcgccccagcgag

SEQ ID NO: 309348 - DNA, 25 bp, Artificial
  Probe
tgagcacgctgctccctcgctgcag

SEQ ID NO: 309349 - DNA, 25 bp, Artificial
  Probe
ctttggtgataccatgaatggctcc

SEQ ID NO: 309350 - DNA, 25 bp, Artificial
  Probe
actgccgagctccaggagccagggc

SEQ ID NO: 309351 - DNA, 25 bp, Artificial
  Probe
tccgggtcttggtgagcacgctgct

SEQ ID NO: 309352 - DNA, 25 bp, Artificial
  Probe
agcggcgtccactttggtgatacca

SEQ ID NO: 309353 - DNA, 25 bp, Artificial
  Probe
ccactttggtgataccatgaatggc

SEQ ID NO: 309354 - DNA, 25 bp, Artificial
  Probe
tttggtgataccatgaatggctccg

SEQ ID NO: 309355 - DNA, 25 bp, Artificial
  Probe
gtgataccatgaatggctccggcag

SEQ ID NO: 309356 - DNA, 25 bp, Artificial
  Probe
tcttggtgagcacgctgctccctcg

SEQ ID NO: 309357 - DNA, 25 bp, Artificial
  Probe
tccactttggtgataccatgaatgg

SEQ ID NO: 309358 - DNA, 25 bp, Artificial
  Probe
tgcagcgccccagcgagactgccga

SEQ ID NO: 309359 - DNA, 25 bp, Artificial
  Probe
tgcgcgggggacgggaggaggaggg

SEQ ID NO: 309360 - DNA, 25 bp, Artificial
  Probe
gtccgggtcttggtgagcacgctgc

SEQ ID NO: 309361 - DNA, 25 bp, Artificial
  Probe
gtccactttggtgataccatgaatg

SEQ ID NO: 309362 - DNA, 25 bp, Artificial
  Probe
gcgccccagcgagactgccgagctc

SEQ ID NO: 309363 - DNA, 25 bp, Artificial
  Probe
ggcgtccactttggtgataccatga

SEQ ID NO: 309364 - DNA, 25 bp, Artificial
  Probe
gataccatgaatggctccggcagcc

SEQ ID NO: 309365 - DNA, 25 bp, Artificial
  Probe
ctgtccgggtcttggtgagcacgct

SEQ ID NO: 309366 - DNA, 25 bp, Artificial
  Probe
gcaggggtgcgcgggggacgggagg

SEQ ID NO: 309367 - DNA, 25 bp, Artificial
  Probe
ggagccagggcaggggtgcgcgggg

SEQ ID NO: 309368 - DNA, 25 bp, Artificial
  Probe
tgataccatgaatggctccggcagc

SEQ ID NO: 309369 - DNA, 25 bp, Artificial
  Probe
agcgagactgccgagctccaggagc

SEQ ID NO: 309370 - DNA, 25 bp, Artificial
  Probe
tccaggagccagggcaggggtgcgc

SEQ ID NO: 309371 - DNA, 25 bp, Artificial
  Probe
gagcggcgtccactttggtgatacc

SEQ ID NO: 309372 - DNA, 25 bp, Artificial
  Probe
gcggcgtccactttggtgataccat

SEQ ID NO: 309373 - DNA, 25 bp, Artificial
  Probe
gggtcttggtgagcacgctgctccc

SEQ ID NO: 309374 - DNA, 25 bp, Artificial
  Probe
ttggtgataccatgaatggctccgg

SEQ ID NO: 309375 - DNA, 25 bp, Artificial
  Probe
agactgccgagctccaggagccagg

SEQ ID NO: 309376 - DNA, 25 bp, Artificial
  Probe
agggagcggcgtccactttggtgat

SEQ ID NO: 309377 - DNA, 25 bp, Artificial
  Probe
actttggtgataccatgaatggctc

SEQ ID NO: 309378 - DNA, 25 bp, Artificial
  Probe
cactttggtgataccatgaatggct

SEQ ID NO: 309379 - DNA, 25 bp, Artificial
  Probe
ccgggtcttggtgagcacgctgctc

SEQ ID NO: 309380 - DNA, 25 bp, Artificial
  Probe
gactgccgagctccaggagccaggg

SEQ ID NO: 309381 - DNA, 25 bp, Artificial
  Probe
cgtccactttggtgataccatgaat

SEQ ID NO: 309382 - DNA, 25 bp, Artificial
  Probe
ggtgcgcgggggacgggaggaggag

SEQ ID NO: 309383 - DNA, 25 bp, Artificial
  Probe
cagggcaggggtgcgcgggggacgg

SEQ ID NO: 309384 - DNA, 25 bp, Artificial
  Probe
tggtgagcacgctgctccctcgctg

SEQ ID NO: 309385 - DNA, 25 bp, Artificial
  Probe
cgggtcttggtgagcacgctgctcc

SEQ ID NO: 309386 - DNA, 25 bp, Artificial
  Probe
cctggcctacggacgcacgctatgt

SEQ ID NO: 309387 - DNA, 25 bp, Artificial
  Probe
gagagactagactaaccctgtcccc

SEQ ID NO: 309388 - DNA, 25 bp, Artificial
  Probe
gcctacggacgcacgctatgtttcc

SEQ ID NO: 309389 - DNA, 25 bp, Artificial
  Probe
gtgagcctggcctacggacgcacgc

SEQ ID NO: 309390 - DNA, 25 bp, Artificial
  Probe
gcacgctatgtttcctatgggccgc

SEQ ID NO: 309391 - DNA, 25 bp, Artificial
  Probe
cacgctatgtttcctatgggccgcc

SEQ ID NO: 309392 - DNA, 25 bp, Artificial
  Probe
cctcgtggttggagtatggagccca

SEQ ID NO: 309393 - DNA, 25 bp, Artificial
  Probe
acgccaggcctcgtggttggagtat

SEQ ID NO: 309394 - DNA, 25 bp, Artificial
  Probe
ccatgctggcagtggccgcgctcta

SEQ ID NO: 309395 - DNA, 25 bp, Artificial
  Probe
gctctacgcgctttgctggggcccg

SEQ ID NO: 309396 - DNA, 25 bp, Artificial
  Probe
cgctatgtttcctatgggccgccgt

SEQ ID NO: 309397 - DNA, 25 bp, Artificial
  Probe
gctatgtttcctatgggccgccgtg

SEQ ID NO: 309398 - DNA, 25 bp, Artificial
  Probe
ggacgcacgctatgtttcctatggg

SEQ ID NO: 309399 - DNA, 25 bp, Artificial
  Probe
acgcacgctatgtttcctatgggcc

SEQ ID NO: 309400 - DNA, 25 bp, Artificial
  Probe
tctacgcgctttgctggggcccgca

SEQ ID NO: 309401 - DNA, 25 bp, Artificial
  Probe
tgagcctggcctacggacgcacgct

SEQ ID NO: 309402 - DNA, 25 bp, Artificial
  Probe
cgctcatcctctgcttctggtacgg

SEQ ID NO: 309403 - DNA, 25 bp, Artificial
  Probe
ctatgtttcctatgggccgccgtgg

SEQ ID NO: 309404 - DNA, 25 bp, Artificial
  Probe
acgcgctcatcctctgcttctggta

SEQ ID NO: 309405 - DNA, 25 bp, Artificial
  Probe
acgctatgtttcctatgggccgccg

SEQ ID NO: 309406 - DNA, 25 bp, Artificial
  Probe
acggacgcacgctatgtttcctatg

SEQ ID NO: 309407 - DNA, 25 bp, Artificial
  Probe
gcgctcatcctctgcttctggtacg

SEQ ID NO: 309408 - DNA, 25 bp, Artificial
  Probe
cggacgcacgctatgtttcctatgg

SEQ ID NO: 309409 - DNA, 25 bp, Artificial
  Probe
cgcacgctatgtttcctatgggccg

SEQ ID NO: 309410 - DNA, 25 bp, Artificial
  Probe
tggccgcgctctacgcgctttgctg

SEQ ID NO: 309411 - DNA, 25 bp, Artificial
  Probe
gacgcacgctatgtttcctatgggc

SEQ ID NO: 309412 - DNA, 25 bp, Artificial
  Probe
gaccagttcctggaattctcaaaaa

SEQ ID NO: 309413 - DNA, 25 bp, Artificial
  Probe
tgacctcaacctttagaggatatgg

SEQ ID NO: 309414 - DNA, 25 bp, Artificial
  Probe
ccagttcctggaattctcaaaaaag

SEQ ID NO: 309415 - DNA, 25 bp, Artificial
  Probe
tccaggttgaactttggggactatt

SEQ ID NO: 309416 - DNA, 25 bp, Artificial
  Probe
ccaggtgttcaggtctcatgcctca

SEQ ID NO: 309417 - DNA, 25 bp, Artificial
  Probe
cgttaccagggctcactgactacac

SEQ ID NO: 309418 - DNA, 25 bp, Artificial
  Probe
gaagaaactgtctgcctacttccgt

SEQ ID NO: 309419 - DNA, 25 bp, Artificial
  Probe
ccaggctgtgatgagactgtcatct

SEQ ID NO: 309420 - DNA, 25 bp, Artificial
  Probe
tgggaaaccgccaggtgttcaggtc

SEQ ID NO: 309421 - DNA, 25 bp, Artificial
  Probe
attctggatatctggcctctgacct

SEQ ID NO: 309422 - DNA, 25 bp, Artificial
  Probe
gtgagagctgcctgcaggatatgct

SEQ ID NO: 309423 - DNA, 25 bp, Artificial
  Probe
actacaccaggctgtgatgagactg

SEQ ID NO: 309424 - DNA, 25 bp, Artificial
  Probe
cagggctcactgactacaccaggct

SEQ ID NO: 309425 - DNA, 25 bp, Artificial
  Probe
agagacctatggatctctgaccttc

SEQ ID NO: 309426 - DNA, 25 bp, Artificial
  Probe
taaagaccagttcctggaattctca

SEQ ID NO: 309427 - DNA, 25 bp, Artificial
  Probe
actgtctgcctacttccgttaccag

SEQ ID NO: 309428 - DNA, 25 bp, Artificial
  Probe
ggatatctggcctctgacctcaacc

SEQ ID NO: 309429 - DNA, 25 bp, Artificial
  Probe
ggatatggcttctctttctcaatct

SEQ ID NO: 309430 - DNA, 25 bp, Artificial
  Probe
actgactacaccaggctgtgatgag

SEQ ID NO: 309431 - DNA, 25 bp, Artificial
  Probe
ctacttccgttaccagggctcactg

SEQ ID NO: 309432 - DNA, 25 bp, Artificial
  Probe
aaagctctactatgaccaagaacag

SEQ ID NO: 309433 - DNA, 25 bp, Artificial
  Probe
gatccataaagaccagttcctggaa

SEQ ID NO: 309434 - DNA, 25 bp, Artificial
  Probe
acttccgttaccagggctcactgac

SEQ ID NO: 309435 - DNA, 25 bp, Artificial
  Probe
aagctctactatgaccaagaacaga

SEQ ID NO: 309436 - DNA, 25 bp, Artificial
  Probe
ctcaatctttccaggttgaactttg

SEQ ID NO: 309437 - DNA, 25 bp, Artificial
  Probe
tcatctggactgtgttcgaggaacc

SEQ ID NO: 309438 - DNA, 25 bp, Artificial
  Probe
caggatatgcttcctgaaaagaaga

SEQ ID NO: 309439 - DNA, 25 bp, Artificial
  Probe
tgcctacttccgttaccagggctca

SEQ ID NO: 309440 - DNA, 25 bp, Artificial
  Probe
accagggctcactgactacaccagg

SEQ ID NO: 309441 - DNA, 25 bp, Artificial
  Probe
gatatctggcctctgacctcaacct

SEQ ID NO: 309442 - DNA, 25 bp, Artificial
  Probe
tgtgatgagactgtcatctggactg

SEQ ID NO: 309443 - DNA, 25 bp, Artificial
  Probe
agaggatatggcttctctttctcaa

SEQ ID NO: 309444 - DNA, 25 bp, Artificial
  Probe
atgcttcctgaaaagaagaaactgt

SEQ ID NO: 309445 - DNA, 25 bp, Artificial
  Probe
gcagccactgggaaaccgccaggtg

SEQ ID NO: 309446 - DNA, 25 bp, Artificial
  Probe
ccctggatggagagagcagagacct

SEQ ID NO: 309447 - DNA, 25 bp, Artificial
  Probe
tgtctgcctacttccgttaccaggg

SEQ ID NO: 309448 - DNA, 25 bp, Artificial
  Probe
tctggcctctgacctcaacctttag

SEQ ID NO: 309449 - DNA, 25 bp, Artificial
  Probe
agaagaaactgtctgcctacttccg

SEQ ID NO: 309450 - DNA, 25 bp, Artificial
  Probe
caatctttccaggttgaactttggg

SEQ ID NO: 309451 - DNA, 25 bp, Artificial
  Probe
acctttagaggatatggcttctctt

SEQ ID NO: 309452 - DNA, 25 bp, Artificial
  Probe
ccacagtgagtgagagctgcctgca

SEQ ID NO: 309453 - DNA, 25 bp, Artificial
  Probe
gatatgcttcctgaaaagaagaaac

SEQ ID NO: 309454 - DNA, 25 bp, Artificial
  Probe
ggtcaaattctggatatctggcctc

SEQ ID NO: 309455 - DNA, 25 bp, Artificial
  Probe
ttccaggttgaactttggggactat

SEQ ID NO: 309456 - DNA, 25 bp, Artificial
  Probe
gttcctggaattctcaaaaaagctc

SEQ ID NO: 309457 - DNA, 25 bp, Artificial
  Probe
agccactgggaaaccgccaggtgtt

SEQ ID NO: 309458 - DNA, 25 bp, Artificial
  Probe
ctgtgataggtggtgtcgtttcccc

SEQ ID NO: 309459 - DNA, 25 bp, Artificial
  Probe
cgtcggcccacagtgggtgctgaca

SEQ ID NO: 309460 - DNA, 25 bp, Artificial
  Probe
tgtgtcatggggtgacatgccctgt

SEQ ID NO: 309461 - DNA, 25 bp, Artificial
  Probe
cggtgaattcccagataccatccag

SEQ ID NO: 309462 - DNA, 25 bp, Artificial
  Probe
ccaggcgggtttctggagacagtct

SEQ ID NO: 309463 - DNA, 25 bp, Artificial
  Probe
ctgcctttgaagaaagactgctctg

SEQ ID NO: 309464 - DNA, 25 bp, Artificial
  Probe
gcatctgaaacgtccagtcaaattc

SEQ ID NO: 309465 - DNA, 25 bp, Artificial
  Probe
cacccgaagcatggtgtgcgcaggc

SEQ ID NO: 309466 - DNA, 25 bp, Artificial
  Probe
ggtttctggagacagtctgctactt

SEQ ID NO: 309467 - DNA, 25 bp, Artificial
  Probe
ccctgcctttgaagaaagactgctc

SEQ ID NO: 309468 - DNA, 25 bp, Artificial
  Probe
gcaaccttctgtcagtctgctctgc

SEQ ID NO: 309469 - DNA, 25 bp, Artificial
  Probe
tatctgggaggctacagagccaggc

SEQ ID NO: 309470 - DNA, 25 bp, Artificial
  Probe
cccgactgtcagatcctcggctggg

SEQ ID NO: 309471 - DNA, 25 bp, Artificial
  Probe
gcactcatatcagatggatccaaaa

SEQ ID NO: 309472 - DNA, 25 bp, Artificial
  Probe
tgacagctgcccactgcaaaaaacc

SEQ ID NO: 309473 - DNA, 25 bp, Artificial
  Probe
cagtctgctacttgggacccagaca

SEQ ID NO: 309474 - DNA, 25 bp, Artificial
  Probe
ctacacctcgggtcacttgctgtgt

SEQ ID NO: 309475 - DNA, 25 bp, Artificial
  Probe
aacccatgacaatgatatcatgatg

SEQ ID NO: 309476 - DNA, 25 bp, Artificial
  Probe
acctcgggtcacttgctgtgtggtg

SEQ ID NO: 309477 - DNA, 25 bp, Artificial
  Probe
ggcccctgtttgaagaactctcacc

SEQ ID NO: 309478 - DNA, 25 bp, Artificial
  Probe
atgtccagctggtgtcccgggaaga

SEQ ID NO: 309479 - DNA, 25 bp, Artificial
  Probe
cagtgaagacgctggccctgtgctt

SEQ ID NO: 309480 - DNA, 25 bp, Artificial
  Probe
agatggatccaaaacatcatcagaa

SEQ ID NO: 309481 - DNA, 25 bp, Artificial
  Probe
tctgtggacaggactattgtccatc

SEQ ID NO: 309482 - DNA, 25 bp, Artificial
  Probe
catggaggcccctgtttgaagaact

SEQ ID NO: 309483 - DNA, 25 bp, Artificial
  Probe
gaaagactgctctgagaagaatccc

SEQ ID NO: 309484 - DNA, 25 bp, Artificial
  Probe
cccacctaagttctggcaggtacac

SEQ ID NO: 309485 - DNA, 25 bp, Artificial
  Probe
cacctccgagggattgtgtcatggg

SEQ ID NO: 309486 - DNA, 25 bp, Artificial
  Probe
tggggaaacacaatctacggcaaac

SEQ ID NO: 309487 - DNA, 25 bp, Artificial
  Probe
agcctggtcggaagatcaggataag

SEQ ID NO: 309488 - DNA, 25 bp, Artificial
  Probe
ctggaggtgtacttggggaaacaca

SEQ ID NO: 309489 - DNA, 25 bp, Artificial
  Probe
gtcaaattctctcaaaggatccagc

SEQ ID NO: 309490 - DNA, 25 bp, Artificial
  Probe
acgtccagtcaaattctctcaaagg

SEQ ID NO: 309491 - DNA, 25 bp, Artificial
  Probe
tgccctgtggatcaaaggaaaagcc

SEQ ID NO: 309492 - DNA, 25 bp, Artificial
  Probe
ggatcataaggcaaccttctgtcag

SEQ ID NO: 309493 - DNA, 25 bp, Artificial
  Probe
aaagccgggagtttacacagatgtc

SEQ ID NO: 309494 - DNA, 25 bp, Artificial
  Probe
aggtcccctggtatgcggtggtcac

SEQ ID NO: 309495 - DNA, 25 bp, Artificial
  Probe
tcagagccttcagatgtccagctct

SEQ ID NO: 309496 - DNA, 25 bp, Artificial
  Probe
acatcatcagaaacaagtgactctg

SEQ ID NO: 309497 - DNA, 25 bp, Artificial
  Probe
gatggatccaaaacatcatcagaaa

SEQ ID NO: 309498 - DNA, 25 bp, Artificial
  Probe
gagcaccctgccttgctgactttct

SEQ ID NO: 309499 - DNA, 25 bp, Artificial
  Probe
cttctcttgtggagcaccctgcctt

SEQ ID NO: 309500 - DNA, 25 bp, Artificial
  Probe
cctggtatgcggtggtcacctccga

SEQ ID NO: 309501 - DNA, 25 bp, Artificial
  Probe
atgcagttcttgacctgtctctccc

SEQ ID NO: 309502 - DNA, 25 bp, Artificial
  Probe
acaatgatatcatgatggtgcatct

SEQ ID NO: 309503 - DNA, 25 bp, Artificial
  Probe
taccctggcaagatcacccgaagca

SEQ ID NO: 309504 - DNA, 25 bp, Artificial
  Probe
acctcctgttaagattttgcacacg

SEQ ID NO: 309505 - DNA, 25 bp, Artificial
  Probe
tcagtgtaactgagtacggatttca

SEQ ID NO: 309506 - DNA, 25 bp, Artificial
  Probe
tgtttgctcagtgtaactgagtacg

SEQ ID NO: 309507 - DNA, 25 bp, Artificial
  Probe
gtgtttgctcagtgtaactgagtac

SEQ ID NO: 309508 - DNA, 25 bp, Artificial
  Probe
gggcatctcccacgttagagatgca

SEQ ID NO: 309509 - DNA, 25 bp, Artificial
  Probe
actgagtacggatttcaacacgacc

SEQ ID NO: 309510 - DNA, 25 bp, Artificial
  Probe
agtacggatttcaacacgaccaaca

SEQ ID NO: 309511 - DNA, 25 bp, Artificial
  Probe
cctcctgttaagattttgcacacgg

SEQ ID NO: 309512 - DNA, 25 bp, Artificial
  Probe
aagattttgcacacgggcatctccc

SEQ ID NO: 309513 - DNA, 25 bp, Artificial
  Probe
ttgcacacgggcatctcccacgtta

SEQ ID NO: 309514 - DNA, 25 bp, Artificial
  Probe
aactgagtacggatttcaacacgac

SEQ ID NO: 309515 - DNA, 25 bp, Artificial
  Probe
ataacttgtgcttatacagatcggt

SEQ ID NO: 309516 - DNA, 25 bp, Artificial
  Probe
tgcttatacagatcggtattttatc

SEQ ID NO: 309517 - DNA, 25 bp, Artificial
  Probe
cttgtgcttatacagatcggtattt

SEQ ID NO: 309518 - DNA, 25 bp, Artificial
  Probe
ttgctcagtgtaactgagtacggat

SEQ ID NO: 309519 - DNA, 25 bp, Artificial
  Probe
tgcagtgtttgctcagtgtaactga

SEQ ID NO: 309520 - DNA, 25 bp, Artificial
  Probe
tttgctcagtgtaactgagtacgga

SEQ ID NO: 309521 - DNA, 25 bp, Artificial
  Probe
gtacggatttcaacacgaccaacag

SEQ ID NO: 309522 - DNA, 25 bp, Artificial
  Probe
cataacttgtgcttatacagatcgg

SEQ ID NO: 309523 - DNA, 25 bp, Artificial
  Probe
cgggcatctcccacgttagagatgc

SEQ ID NO: 309524 - DNA, 25 bp, Artificial
  Probe
ggaagacaacttcaacacctcctgt

SEQ ID NO: 309525 - DNA, 25 bp, Artificial
  Probe
taacttgtgcttatacagatcggta

SEQ ID NO: 309526 - DNA, 25 bp, Artificial
  Probe
gccaccaaaaaccattggaagacaa

SEQ ID NO: 309527 - DNA, 25 bp, Artificial
  Probe
gatgcagtgtttgctcagtgtaact

SEQ ID NO: 309528 - DNA, 25 bp, Artificial
  Probe
atctcccacgttagagatgcagtgt

SEQ ID NO: 309529 - DNA, 25 bp, Artificial
  Probe
taagattttgcacacgggcatctcc

SEQ ID NO: 309530 - DNA, 25 bp, Artificial
  Probe
tcccacgttagagatgcagtgtttg

SEQ ID NO: 309531 - DNA, 25 bp, Artificial
  Probe
tacggatttcaacacgaccaacagc

SEQ ID NO: 309532 - DNA, 25 bp, Artificial
  Probe
ctcccacgttagagatgcagtgttt

SEQ ID NO: 309533 - DNA, 25 bp, Artificial
  Probe
tggaagacaacttcaacacctcctg

SEQ ID NO: 309534 - DNA, 25 bp, Artificial
  Probe
acttgtgcttatacagatcggtatt

SEQ ID NO: 309535 - DNA, 25 bp, Artificial
  Probe
catctcccacgttagagatgcagtg

SEQ ID NO: 309536 - DNA, 25 bp, Artificial
  Probe
atgcagtgtttgctcagtgtaactg

SEQ ID NO: 309537 - DNA, 25 bp, Artificial
  Probe
gcacacgggcatctcccacgttaga

SEQ ID NO: 309538 - DNA, 25 bp, Artificial
  Probe
ggatttcaacacgaccaacagctcc

SEQ ID NO: 309539 - DNA, 25 bp, Artificial
  Probe
gtttgctcagtgtaactgagtacgg

SEQ ID NO: 309540 - DNA, 25 bp, Artificial
  Probe
cgccaccaaaaaccattggaagaca

SEQ ID NO: 309541 - DNA, 25 bp, Artificial
  Probe
cacacgggcatctcccacgttagag

SEQ ID NO: 309542 - DNA, 25 bp, Artificial
  Probe
acggatttcaacacgaccaacagct

SEQ ID NO: 309543 - DNA, 25 bp, Artificial
  Probe
gctcagtgtaactgagtacggattt

SEQ ID NO: 309544 - DNA, 25 bp, Artificial
  Probe
agatgcagtgtttgctcagtgtaac

SEQ ID NO: 309545 - DNA, 25 bp, Artificial
  Probe
ccataacttgtgcttatacagatcg

SEQ ID NO: 309546 - DNA, 25 bp, Artificial
  Probe
ccacgttagagatgcagtgtttgct

SEQ ID NO: 309547 - DNA, 25 bp, Artificial
  Probe
tctcccacgttagagatgcagtgtt

SEQ ID NO: 309548 - DNA, 25 bp, Artificial
  Probe
tgcacacgggcatctcccacgttag

SEQ ID NO: 309549 - DNA, 25 bp, Artificial
  Probe
cagtgtttgctcagtgtaactgagt

SEQ ID NO: 309550 - DNA, 25 bp, Artificial
  Probe
agcgttcctgagacccatccagggt

SEQ ID NO: 309551 - DNA, 25 bp, Artificial
  Probe
cctctgaagcaagtgaaggtcccca

SEQ ID NO: 309552 - DNA, 25 bp, Artificial
  Probe
gctgtctttaactcactgcttcctg

SEQ ID NO: 309553 - DNA, 25 bp, Artificial
  Probe
tgacgtactacctggactggattca

SEQ ID NO: 309554 - DNA, 25 bp, Artificial
  Probe
agtgaagggtacctggctgcaagca

SEQ ID NO: 309555 - DNA, 25 bp, Artificial
  Probe
gcacctgctgtctttaactcactgc

SEQ ID NO: 309556 - DNA, 25 bp, Artificial
  Probe
attcaccgctatgtccctcagcgtt

SEQ ID NO: 309557 - DNA, 25 bp, Artificial
  Probe
accacaacacagctgcactgtgcgg

SEQ ID NO: 309558 - DNA, 25 bp, Artificial
  Probe
gctatgtccctcagcgttcctgaga

SEQ ID NO: 309559 - DNA, 25 bp, Artificial
  Probe
gtctttaactcactgcttcctggcc

SEQ ID NO: 309560 - DNA, 25 bp, Artificial
  Probe
gaagtaccacactggcctctacaca

SEQ ID NO: 309561 - DNA, 25 bp, Artificial
  Probe
tggccttctttgtactctgtctccc

SEQ ID NO: 309562 - DNA, 25 bp, Artificial
  Probe
ctgagacccatccagggtcagggaa

SEQ ID NO: 309563 - DNA, 25 bp, Artificial
  Probe
aggagatgatgttcccattgtccag

SEQ ID NO: 309564 - DNA, 25 bp, Artificial
  Probe
atggcatgctgtgtgctggaaatac

SEQ ID NO: 309565 - DNA, 25 bp, Artificial
  Probe
tgatcggaagtaccacactggcctc

SEQ ID NO: 309566 - DNA, 25 bp, Artificial
  Probe
ccctcttttctgtggctcattaaag

SEQ ID NO: 309567 - DNA, 25 bp, Artificial
  Probe
cagatggaaccctggccttctttgt

SEQ ID NO: 309568 - DNA, 25 bp, Artificial
  Probe
ttcccattgtccaggatggcatgct

SEQ ID NO: 309569 - DNA, 25 bp, Artificial
  Probe
tggattcaccgctatgtccctcagc

SEQ ID NO: 309570 - DNA, 25 bp, Artificial
  Probe
tcagcgttcctgagacccatccagg

SEQ ID NO: 309571 - DNA, 25 bp, Artificial
  Probe
actttgttccaccttgagtccctcg

SEQ ID NO: 309572 - DNA, 25 bp, Artificial
  Probe
tgcttcctggccagatggaaccctg

SEQ ID NO: 309573 - DNA, 25 bp, Artificial
  Probe
acaacacagctgcactgtgcggctc

SEQ ID NO: 309574 - DNA, 25 bp, Artificial
  Probe
ctcagggggcccactggtctgcaaa

SEQ ID NO: 309575 - DNA, 25 bp, Artificial
  Probe
cccatccagggtcagggaagaacca

SEQ ID NO: 309576 - DNA, 25 bp, Artificial
  Probe
aagcaagtgaaggtccccattgtgg

SEQ ID NO: 309577 - DNA, 25 bp, Artificial
  Probe
cgctatgtccctcagcgttcctgag

SEQ ID NO: 309578 - DNA, 25 bp, Artificial
  Probe
ggtccccattgtggaaaacagcctg

SEQ ID NO: 309579 - DNA, 25 bp, Artificial
  Probe
cagcctgtgtgatcggaagtaccac

SEQ ID NO: 309580 - DNA, 25 bp, Artificial
  Probe
tcctggcatttacacccgggtgacg

SEQ ID NO: 309581 - DNA, 25 bp, Artificial
  Probe
actggtctgcaaagtgaagggtacc

SEQ ID NO: 309582 - DNA, 25 bp, Artificial
  Probe
aagtgaagggtacctggctgcaagc

SEQ ID NO: 309583 - DNA, 25 bp, Artificial
  Probe
agggctgcgcagaggccaatcgtcc

SEQ ID NO: 309584 - DNA, 25 bp, Artificial
  Probe
agaaccaggcacctgctgtctttaa

SEQ ID NO: 309585 - DNA, 25 bp, Artificial
  Probe
ccacactggcctctacacaggagat

SEQ ID NO: 309586 - DNA, 25 bp, Artificial
  Probe
ttacacccgggtgacgtactacctg

SEQ ID NO: 309587 - DNA, 25 bp, Artificial
  Probe
gacgtactacctggactggattcac

SEQ ID NO: 309588 - DNA, 25 bp, Artificial
  Probe
ataccaggagcgactcctgccaggg

SEQ ID NO: 309589 - DNA, 25 bp, Artificial
  Probe
tctacacaggagatgatgttcccat

SEQ ID NO: 309590 - DNA, 25 bp, Artificial
  Probe
agcaagtgaaggtccccattgtgga

SEQ ID NO: 309591 - DNA, 25 bp, Artificial
  Probe
tggaaaacagcctgtgtgatcggaa

SEQ ID NO: 309592 - DNA, 25 bp, Artificial
  Probe
accaggagcgactcctgccagggag

SEQ ID NO: 309593 - DNA, 25 bp, Artificial
  Probe
cttttctgtggctcattaaagtatg

SEQ ID NO: 309594 - DNA, 25 bp, Artificial
  Probe
ccatccagggtcagggaagaaccag

SEQ ID NO: 309595 - DNA, 25 bp, Artificial
  Probe
gcactgtgcggctccctcttttctg

SEQ ID NO: 309596 - DNA, 25 bp, Artificial
  Probe
gtgatcaaccttggttatcccagaa

SEQ ID NO: 309597 - DNA, 25 bp, Artificial
  Probe
gatgcgtgatttctgtgcctttgtt

SEQ ID NO: 309598 - DNA, 25 bp, Artificial
  Probe
cctgggtctgcttccagccagcttg

SEQ ID NO: 309599 - DNA, 25 bp, Artificial
  Probe
ctgagctggtgctgccaagggctct

SEQ ID NO: 309600 - DNA, 25 bp, Artificial
  Probe
atgcagacataacattccttcgatg

SEQ ID NO: 309601 - DNA, 25 bp, Artificial
  Probe
tgcatcagtgatgtctgcagtggga

SEQ ID NO: 309602 - DNA, 25 bp, Artificial
  Probe
cctgagctggtgctgccaagggctc

SEQ ID NO: 309603 - DNA, 25 bp, Artificial
  Probe
gggtctgcttccagccagcttgcct

SEQ ID NO: 309604 - DNA, 25 bp, Artificial
  Probe
cttggtgtgctctggccctggcctg

SEQ ID NO: 309605 - DNA, 25 bp, Artificial
  Probe
ttacatcctcggtgcgacaggattc

SEQ ID NO: 309606 - DNA, 25 bp, Artificial
  Probe
gctgccaagggctctgaaggcctca

SEQ ID NO: 309607 - DNA, 25 bp, Artificial
  Probe
atgactggggccttgtctgctaagg

SEQ ID NO: 309608 - DNA, 25 bp, Artificial
  Probe
ccctgccgaagttacatcctcggtg

SEQ ID NO: 309609 - DNA, 25 bp, Artificial
  Probe
acaccagtgggagaaactgtgacaa

SEQ ID NO: 309610 - DNA, 25 bp, Artificial
  Probe
atcctcggtgcgacaggattcttgg

SEQ ID NO: 309611 - DNA, 25 bp, Artificial
  Probe
aagagatatatttcccaagaagctt

SEQ ID NO: 309612 - DNA, 25 bp, Artificial
  Probe
tccttcgatgcgtgatttctgtgcc

SEQ ID NO: 309613 - DNA, 25 bp, Artificial
  Probe
catcagtgatgtctgcagtgggaga

SEQ ID NO: 309614 - DNA, 25 bp, Artificial
  Probe
ttcctgtcagcctgggtctgcttcc

SEQ ID NO: 309615 - DNA, 25 bp, Artificial
  Probe
caagggctctgaaggcctcatacca

SEQ ID NO: 309616 - DNA, 25 bp, Artificial
  Probe
cctggcctgagctggtgctgccaag

SEQ ID NO: 309617 - DNA, 25 bp, Artificial
  Probe
gggcgtgtggcctattcctgtcagc

SEQ ID NO: 309618 - DNA, 25 bp, Artificial
  Probe
atagtttgtgtattgctccaaatca

SEQ ID NO: 309619 - DNA, 25 bp, Artificial
  Probe
ggagaaagtgccaaccctgagaaca

SEQ ID NO: 309620 - DNA, 25 bp, Artificial
  Probe
cacaccagtgggagaaactgtgaca

SEQ ID NO: 309621 - DNA, 25 bp, Artificial
  Probe
ccttgtctgctaaggaagattgaga

SEQ ID NO: 309622 - DNA, 25 bp, Artificial
  Probe
tgtgacaatgactggggccttgtct

SEQ ID NO: 309623 - DNA, 25 bp, Artificial
  Probe
gaaactgtgacaatgactggggcct

SEQ ID NO: 309624 - DNA, 25 bp, Artificial
  Probe
cagcagtccagatggcggcaaaaaa

SEQ ID NO: 309625 - DNA, 25 bp, Artificial
  Probe
ttcaggtcaagatggcctctacata

SEQ ID NO: 309626 - DNA, 25 bp, Artificial
  Probe
cacacagtcgactgcctcaggggtg

SEQ ID NO: 309627 - DNA, 25 bp, Artificial
  Probe
acattccttcgatgcgtgatttctg

SEQ ID NO: 309628 - DNA, 25 bp, Artificial
  Probe
gagaaagtgccaaccctgagaacag

SEQ ID NO: 309629 - DNA, 25 bp, Artificial
  Probe
gaagttacatcctcggtgcgacagg

SEQ ID NO: 309630 - DNA, 25 bp, Artificial
  Probe
gcacagtgggcgtgtggcctattcc

SEQ ID NO: 309631 - DNA, 25 bp, Artificial
  Probe
gtctgcagtgggagaaagtgccaac

SEQ ID NO: 309632 - DNA, 25 bp, Artificial
  Probe
tgtcagcctgggtctgcttccagcc

SEQ ID NO: 309633 - DNA, 25 bp, Artificial
  Probe
tcccaagaagcttattgaagtaaga

SEQ ID NO: 309634 - DNA, 25 bp, Artificial
  Probe
tacataggtgtcagtttgtcctccc

SEQ ID NO: 309635 - DNA, 25 bp, Artificial
  Probe
gatatatttcccaagaagcttattg

SEQ ID NO: 309636 - DNA, 25 bp, Artificial
  Probe
tctggctctgctccacaccagtggg

SEQ ID NO: 309637 - DNA, 25 bp, Artificial
  Probe
gctctgaaggcctcataccacttgt

SEQ ID NO: 309638 - DNA, 25 bp, Artificial
  Probe
tgggtgcatcagtgatgtctgcagt

SEQ ID NO: 309639 - DNA, 25 bp, Artificial
  Probe
gccctggcctgagctggtgctgcca

SEQ ID NO: 309640 - DNA, 25 bp, Artificial
  Probe
gtcaagatggcctctacataggtgt

SEQ ID NO: 309641 - DNA, 25 bp, Artificial
  Probe
acagtgggcgtgtggcctattcctg

SEQ ID NO: 309642 - DNA, 25 bp, Artificial
  Probe
tcacttactgtaaagagtcgttttc

SEQ ID NO: 309643 - DNA, 25 bp, Artificial
  Probe
ttgcttccgagcatacaactgagtg

SEQ ID NO: 309644 - DNA, 25 bp, Artificial
  Probe
tggagtcagttctcgagatacgtga

SEQ ID NO: 309645 - DNA, 25 bp, Artificial
  Probe
cagttctcgagatacgtgaaagttt

SEQ ID NO: 309646 - DNA, 25 bp, Artificial
  Probe
agagtcgttttcataaaggccaatt

SEQ ID NO: 309647 - DNA, 25 bp, Artificial
  Probe
ccgagcatacaactgagtgtgccct

SEQ ID NO: 309648 - DNA, 25 bp, Artificial
  Probe
tgccctggagtcagttctcgagata

SEQ ID NO: 309649 - DNA, 25 bp, Artificial
  Probe
ctttttcacttactgtaaagagtcg

SEQ ID NO: 309650 - DNA, 25 bp, Artificial
  Probe
tgcttccgagcatacaactgagtgt

SEQ ID NO: 309651 - DNA, 25 bp, Artificial
  Probe
ttcacttactgtaaagagtcgtttt

SEQ ID NO: 309652 - DNA, 25 bp, Artificial
  Probe
gtgccctggagtcagttctcgagat

SEQ ID NO: 309653 - DNA, 25 bp, Artificial
  Probe
agtgtgccctggagtcagttctcga

SEQ ID NO: 309654 - DNA, 25 bp, Artificial
  Probe
aagagtcgttttcataaaggccaat

SEQ ID NO: 309655 - DNA, 25 bp, Artificial
  Probe
attgcttccgagcatacaactgagt

SEQ ID NO: 309656 - DNA, 25 bp, Artificial
  Probe
ggagtcagttctcgagatacgtgaa

SEQ ID NO: 309657 - DNA, 25 bp, Artificial
  Probe
tttttcacttactgtaaagagtcgt

SEQ ID NO: 309658 - DNA, 25 bp, Artificial
  Probe
gtgtgccctggagtcagttctcgag

SEQ ID NO: 309659 - DNA, 25 bp, Artificial
  Probe
tacaactgagtgtgccctggagtca

SEQ ID NO: 309660 - DNA, 25 bp, Artificial
  Probe
gcatacaactgagtgtgccctggag

SEQ ID NO: 309661 - DNA, 25 bp, Artificial
  Probe
atacaactgagtgtgccctggagtc

SEQ ID NO: 309662 - DNA, 25 bp, Artificial
  Probe
ttccgagcatacaactgagtgtgcc

SEQ ID NO: 309663 - DNA, 25 bp, Artificial
  Probe
gcttccgagcatacaactgagtgtg

SEQ ID NO: 309664 - DNA, 25 bp, Artificial
  Probe
gagtcagttctcgagatacgtgaaa

SEQ ID NO: 309665 - DNA, 25 bp, Artificial
  Probe
catacaactgagtgtgccctggagt

SEQ ID NO: 309666 - DNA, 25 bp, Artificial
  Probe
agtcgttttcataaaggccaattca

SEQ ID NO: 309667 - DNA, 25 bp, Artificial
  Probe
tgagtgtgccctggagtcagttctc

SEQ ID NO: 309668 - DNA, 25 bp, Artificial
  Probe
cttccgagcatacaactgagtgtgc

SEQ ID NO: 309669 - DNA, 25 bp, Artificial
  Probe
gagtgtgccctggagtcagttctcg

SEQ ID NO: 309670 - DNA, 25 bp, Artificial
  Probe
tcagttctcgagatacgtgaaagtt

SEQ ID NO: 309671 - DNA, 25 bp, Artificial
  Probe
agtcagttctcgagatacgtgaaag

SEQ ID NO: 309672 - DNA, 25 bp, Artificial
  Probe
ctggagtcagttctcgagatacgtg

SEQ ID NO: 309673 - DNA, 25 bp, Artificial
  Probe
acttactgtaaagagtcgttttcat

SEQ ID NO: 309674 - DNA, 25 bp, Artificial
  Probe
cttactgtaaagagtcgttttcata

SEQ ID NO: 309675 - DNA, 25 bp, Artificial
  Probe
gtcagttctcgagatacgtgaaagt

SEQ ID NO: 309676 - DNA, 25 bp, Artificial
  Probe
gagcatacaactgagtgtgccctgg

SEQ ID NO: 309677 - DNA, 25 bp, Artificial
  Probe
tgtgccctggagtcagttctcgaga

SEQ ID NO: 309678 - DNA, 25 bp, Artificial
  Probe
gtcgttttcataaaggccaattcat

SEQ ID NO: 309679 - DNA, 25 bp, Artificial
  Probe
ccctggagtcagttctcgagatacg

SEQ ID NO: 309680 - DNA, 25 bp, Artificial
  Probe
gccctggagtcagttctcgagatac

SEQ ID NO: 309681 - DNA, 25 bp, Artificial
  Probe
tattgcttccgagcatacaactgag

SEQ ID NO: 309682 - DNA, 25 bp, Artificial
  Probe
ctgagtgtgccctggagtcagttct

SEQ ID NO: 309683 - DNA, 25 bp, Artificial
  Probe
tttcacttactgtaaagagtcgttt

SEQ ID NO: 309684 - DNA, 25 bp, Artificial
  Probe
cgagcatacaactgagtgtgccctg

SEQ ID NO: 309685 - DNA, 25 bp, Artificial
  Probe
ttttcacttactgtaaagagtcgtt

SEQ ID NO: 309686 - DNA, 25 bp, Artificial
  Probe
cacttactgtaaagagtcgttttca

SEQ ID NO: 309687 - DNA, 25 bp, Artificial
  Probe
agcatacaactgagtgtgccctgga

SEQ ID NO: 309688 - DNA, 25 bp, Artificial
  Probe
gctattctagaatcatctcagtatg

SEQ ID NO: 309689 - DNA, 25 bp, Artificial
  Probe
ttccaacgccagtctgataataaag

SEQ ID NO: 309690 - DNA, 25 bp, Artificial
  Probe
acaggttgtcacagaagagaccttt

SEQ ID NO: 309691 - DNA, 25 bp, Artificial
  Probe
cttctgagtccagtaaaggattgtg

SEQ ID NO: 309692 - DNA, 25 bp, Artificial
  Probe
ttggaaacttccaggctctttgtgc

SEQ ID NO: 309693 - DNA, 25 bp, Artificial
  Probe
gataaccagttgttccattgattaa

SEQ ID NO: 309694 - DNA, 25 bp, Artificial
  Probe
gattaacttttgtctcaaacgtgca

SEQ ID NO: 309695 - DNA, 25 bp, Artificial
  Probe
agggccatctgttcctaaagtgtat

SEQ ID NO: 309696 - DNA, 25 bp, Artificial
  Probe
aaacttccaggctctttgtgccatt

SEQ ID NO: 309697 - DNA, 25 bp, Artificial
  Probe
gatgataaccagttgttccattgat

SEQ ID NO: 309698 - DNA, 25 bp, Artificial
  Probe
gtatgtttccttcttccaacgccag

SEQ ID NO: 309699 - DNA, 25 bp, Artificial
  Probe
ttgtgccatttctgttctgattcaa

SEQ ID NO: 309700 - DNA, 25 bp, Artificial
  Probe
ttgtcttctaaccagacttcagcag

SEQ ID NO: 309701 - DNA, 25 bp, Artificial
  Probe
ttgtcacagaagagacctttgttag

SEQ ID NO: 309702 - DNA, 25 bp, Artificial
  Probe
gtaagtccttttgtcttctaaccag

SEQ ID NO: 309703 - DNA, 25 bp, Artificial
  Probe
tcatcagcagatagggccatctgtt

SEQ ID NO: 309704 - DNA, 25 bp, Artificial
  Probe
gctctttgtgccatttctgttctga

SEQ ID NO: 309705 - DNA, 25 bp, Artificial
  Probe
gtctcactttactacaggttgtcac

SEQ ID NO: 309706 - DNA, 25 bp, Artificial
  Probe
acgccagtctgataataaagtatct

SEQ ID NO: 309707 - DNA, 25 bp, Artificial
  Probe
ttagctgatgctgaagtgtcatcag

SEQ ID NO: 309708 - DNA, 25 bp, Artificial
  Probe
actgatggcttctgggttagttact

SEQ ID NO: 309709 - DNA, 25 bp, Artificial
  Probe
ctttgttagctgatgctgaagtgtc

SEQ ID NO: 309710 - DNA, 25 bp, Artificial
  Probe
ttcagcagatgataaccagttgttc

SEQ ID NO: 309711 - DNA, 25 bp, Artificial
  Probe
tgttctgattcaaagcagtgcagca

SEQ ID NO: 309712 - DNA, 25 bp, Artificial
  Probe
tagttgcactgatggcttctgggtt

SEQ ID NO: 309713 - DNA, 25 bp, Artificial
  Probe
gcagatagggccatctgttcctaaa

SEQ ID NO: 309714 - DNA, 25 bp, Artificial
  Probe
ctgatgctgaagtgtcatcagcaga

SEQ ID NO: 309715 - DNA, 25 bp, Artificial
  Probe
gtaaatagttgcactgatggcttct

SEQ ID NO: 309716 - DNA, 25 bp, Artificial
  Probe
ttgattaacttttgtctcaaacgtg

SEQ ID NO: 309717 - DNA, 25 bp, Artificial
  Probe
ggctattctagaatcatctcagtat

SEQ ID NO: 309718 - DNA, 25 bp, Artificial
  Probe
tgttagctgatgctgaagtgtcatc

SEQ ID NO: 309719 - DNA, 25 bp, Artificial
  Probe
taacttttgtctcaaacgtgcacag

SEQ ID NO: 309720 - DNA, 25 bp, Artificial
  Probe
cagtgcagcatgatgtcattgtggt

SEQ ID NO: 309721 - DNA, 25 bp, Artificial
  Probe
atggcttctgggttagttacttctg

SEQ ID NO: 309722 - DNA, 25 bp, Artificial
  Probe
caaacgtgcacaggtgacagtataa

SEQ ID NO: 309723 - DNA, 25 bp, Artificial
  Probe
tgcactgatggcttctgggttagtt

SEQ ID NO: 309724 - DNA, 25 bp, Artificial
  Probe
cagatagggccatctgttcctaaag

SEQ ID NO: 309725 - DNA, 25 bp, Artificial
  Probe
taaatagttgcactgatggcttctg

SEQ ID NO: 309726 - DNA, 25 bp, Artificial
  Probe
tattttcagggctattctagaatca

SEQ ID NO: 309727 - DNA, 25 bp, Artificial
  Probe
gtgagcagtaagtccttttgtcttc

SEQ ID NO: 309728 - DNA, 25 bp, Artificial
  Probe
cagttgttccattgattaacttttg

SEQ ID NO: 309729 - DNA, 25 bp, Artificial
  Probe
gcagtaagtccttttgtcttctaac

SEQ ID NO: 309730 - DNA, 25 bp, Artificial
  Probe
ttcagggctattctagaatcatctc

SEQ ID NO: 309731 - DNA, 25 bp, Artificial
  Probe
acgtgcacaggtgacagtataatta

SEQ ID NO: 309732 - DNA, 25 bp, Artificial
  Probe
ccatttctgttctgattcaaagcag

SEQ ID NO: 309733 - DNA, 25 bp, Artificial
  Probe
ccaggctctttgtgccatttctgtt

SEQ ID NO: 309734 - DNA, 25 bp, Artificial
  Probe
gtgggacactcaatggacactctga

SEQ ID NO: 309735 - DNA, 25 bp, Artificial
  Probe
ggctcaagggcctgtgtgccactgt

SEQ ID NO: 309736 - DNA, 25 bp, Artificial
  Probe
tcagccctcaggaccctattatggc

SEQ ID NO: 309737 - DNA, 25 bp, Artificial
  Probe
ctcaagtctttcagggaggcagaaa

SEQ ID NO: 309738 - DNA, 25 bp, Artificial
  Probe
cctattatggccacgcaggccaggc

SEQ ID NO: 309739 - DNA, 25 bp, Artificial
  Probe
gcctctggcctctactcagcttttt

SEQ ID NO: 309740 - DNA, 25 bp, Artificial
  Probe
agcaggcaggcttctgccagctcct

SEQ ID NO: 309741 - DNA, 25 bp, Artificial
  Probe
gctcgggaggccaagccctgactga

SEQ ID NO: 309742 - DNA, 25 bp, Artificial
  Probe
ccctgactgagctggcaaaggagga

SEQ ID NO: 309743 - DNA, 25 bp, Artificial
  Probe
tgcttcaaagcctggagctggctct

SEQ ID NO: 309744 - DNA, 25 bp, Artificial
  Probe
gacactcaatggacactctgatcct

SEQ ID NO: 309745 - DNA, 25 bp, Artificial
  Probe
agtttggtggccatcccagactgag

SEQ ID NO: 309746 - DNA, 25 bp, Artificial
  Probe
ggaaacctcactgctcctgttctct

SEQ ID NO: 309747 - DNA, 25 bp, Artificial
  Probe
gtttgactactctgaccatcagccc

SEQ ID NO: 309748 - DNA, 25 bp, Artificial
  Probe
tctactcagctttttcctacatggg

SEQ ID NO: 309749 - DNA, 25 bp, Artificial
  Probe
gactctatcccgaccttagaggggc

SEQ ID NO: 309750 - DNA, 25 bp, Artificial
  Probe
gatccagttctgcattagtaacctc

SEQ ID NO: 309751 - DNA, 25 bp, Artificial
  Probe
ctcaggaccctattatggccacgca

SEQ ID NO: 309752 - DNA, 25 bp, Artificial
  Probe
ttatggccacgcaggccaggcctct

SEQ ID NO: 309753 - DNA, 25 bp, Artificial
  Probe
actgctcctgttctctcctgggaga

SEQ ID NO: 309754 - DNA, 25 bp, Artificial
  Probe
cattggtgcccacgtggcccagggc

SEQ ID NO: 309755 - DNA, 25 bp, Artificial
  Probe
tctcctgggagagcaaggggctcaa

SEQ ID NO: 309756 - DNA, 25 bp, Artificial
  Probe
gtttggtggccatcccagactgagg

SEQ ID NO: 309757 - DNA, 25 bp, Artificial
  Probe
cctcacctaactgaggagagtcctc

SEQ ID NO: 309758 - DNA, 25 bp, Artificial
  Probe
ctgcagaggctgacagcagcaggca

SEQ ID NO: 309759 - DNA, 25 bp, Artificial
  Probe
gggacctgcttcaaagcctggagct

SEQ ID NO: 309760 - DNA, 25 bp, Artificial
  Probe
cgaggtccccagatccagttctgca

SEQ ID NO: 309761 - DNA, 25 bp, Artificial
  Probe
tgcctaaaagctaggctgcctaggg

SEQ ID NO: 309762 - DNA, 25 bp, Artificial
  Probe
cctcatgcccagcagtggcagtgga

SEQ ID NO: 309763 - DNA, 25 bp, Artificial
  Probe
tgtcaccattggtgcccacgtggcc

SEQ ID NO: 309764 - DNA, 25 bp, Artificial
  Probe
tggtgggaaacctcactgctcctgt

SEQ ID NO: 309765 - DNA, 25 bp, Artificial
  Probe
ttagaggggccctgtcaccattggt

SEQ ID NO: 309766 - DNA, 25 bp, Artificial
  Probe
tcatcagcctcatgcccagcagtgg

SEQ ID NO: 309767 - DNA, 25 bp, Artificial
  Probe
attggtgcccacgtggcccagggcc

SEQ ID NO: 309768 - DNA, 25 bp, Artificial
  Probe
agctttttcctacatgggcccctct

SEQ ID NO: 309769 - DNA, 25 bp, Artificial
  Probe
ctttgaacagctttgtgaagagcag

SEQ ID NO: 309770 - DNA, 25 bp, Artificial
  Probe
catcagccctcaggaccctattatg

SEQ ID NO: 309771 - DNA, 25 bp, Artificial
  Probe
aggcctctggcctctactcagcttt

SEQ ID NO: 309772 - DNA, 25 bp, Artificial
  Probe
cctggagctggctctgtcctgtcac

SEQ ID NO: 309773 - DNA, 25 bp, Artificial
  Probe
acagcagcaggcaggcttctgccag

SEQ ID NO: 309774 - DNA, 25 bp, Artificial
  Probe
agtcccacacactgggaacagccag

SEQ ID NO: 309775 - DNA, 25 bp, Artificial
  Probe
accctctatcccaggacctgagaag

SEQ ID NO: 309776 - DNA, 25 bp, Artificial
  Probe
tcactgctcctgttctctcctggga

SEQ ID NO: 309777 - DNA, 25 bp, Artificial
  Probe
gctaggctgcctagggacctgcttc

SEQ ID NO: 309778 - DNA, 25 bp, Artificial
  Probe
gccagtatatacgactctatcccga

SEQ ID NO: 309779 - DNA, 25 bp, Artificial
  Probe
tcccgaccttagaggggccctgtca

SEQ ID NO: 309780 - DNA, 25 bp, Artificial
  Probe
gttggcgccatccttttcatcccgg

SEQ ID NO: 309781 - DNA, 25 bp, Artificial
  Probe
ttggcctcattgtaatctccacagg

SEQ ID NO: 309782 - DNA, 25 bp, Artificial
  Probe
ggtcttggcctcattgtaatctcca

SEQ ID NO: 309783 - DNA, 25 bp, Artificial
  Probe
cgcttctggtcttggcctcattgta

SEQ ID NO: 309784 - DNA, 25 bp, Artificial
  Probe
gaagcccgtgaagaacgcttctggt

SEQ ID NO: 309785 - DNA, 25 bp, Artificial
  Probe
cgccatccttttcatcccgggagag

SEQ ID NO: 309786 - DNA, 25 bp, Artificial
  Probe
gagagaagcccgtgaagaacgcttc

SEQ ID NO: 309787 - DNA, 25 bp, Artificial
  Probe
tgtcgcttccaaccagcgaactata

SEQ ID NO: 309788 - DNA, 25 bp, Artificial
  Probe
gttgttggcgccatccttttcatcc

SEQ ID NO: 309789 - DNA, 25 bp, Artificial
  Probe
actcatcgtggttgttggcgccatc

SEQ ID NO: 309790 - DNA, 25 bp, Artificial
  Probe
ttggcgccatccttttcatcccggg

SEQ ID NO: 309791 - DNA, 25 bp, Artificial
  Probe
tcccgggagagaagcccgtgaagaa

SEQ ID NO: 309792 - DNA, 25 bp, Artificial
  Probe
agagaagcccgtgaagaacgcttct

SEQ ID NO: 309793 - DNA, 25 bp, Artificial
  Probe
gcactcacactcatcgtggttgttg

SEQ ID NO: 309794 - DNA, 25 bp, Artificial
  Probe
ctcatcgtggttgttggcgccatcc

SEQ ID NO: 309795 - DNA, 25 bp, Artificial
  Probe
tggcctcattgtaatctccacagga

SEQ ID NO: 309796 - DNA, 25 bp, Artificial
  Probe
agaacgcttctggtcttggcctcat

SEQ ID NO: 309797 - DNA, 25 bp, Artificial
  Probe
gagaagcccgtgaagaacgcttctg

SEQ ID NO: 309798 - DNA, 25 bp, Artificial
  Probe
ttgtcgcttccaaccagcgaactat

SEQ ID NO: 309799 - DNA, 25 bp, Artificial
  Probe
tttcatcccgggagagaagcccgtg

SEQ ID NO: 309800 - DNA, 25 bp, Artificial
  Probe
gctggcactcacactcatcgtggtt

SEQ ID NO: 309801 - DNA, 25 bp, Artificial
  Probe
tggcgccatccttttcatcccggga

SEQ ID NO: 309802 - DNA, 25 bp, Artificial
  Probe
tcatcccgggagagaagcccgtgaa

SEQ ID NO: 309803 - DNA, 25 bp, Artificial
  Probe
cagcgaactatacaacctcctagga

SEQ ID NO: 309804 - DNA, 25 bp, Artificial
  Probe
gtcttggcctcattgtaatctccac

SEQ ID NO: 309805 - DNA, 25 bp, Artificial
  Probe
ctggtcttggcctcattgtaatctc

SEQ ID NO: 309806 - DNA, 25 bp, Artificial
  Probe
ccatccttttcatcccgggagagaa

SEQ ID NO: 309807 - DNA, 25 bp, Artificial
  Probe
gcgccatccttttcatcccgggaga

SEQ ID NO: 309808 - DNA, 25 bp, Artificial
  Probe
aacgcttctggtcttggcctcattg

SEQ ID NO: 309809 - DNA, 25 bp, Artificial
  Probe
cactcatcgtggttgttggcgccat

SEQ ID NO: 309810 - DNA, 25 bp, Artificial
  Probe
tgttggcgccatccttttcatcccg

SEQ ID NO: 309811 - DNA, 25 bp, Artificial
  Probe
ggcactcacactcatcgtggttgtt

SEQ ID NO: 309812 - DNA, 25 bp, Artificial
  Probe
catcgtggttgttggcgccatcctt

SEQ ID NO: 309813 - DNA, 25 bp, Artificial
  Probe
cttggcctcattgtaatctccacag

SEQ ID NO: 309814 - DNA, 25 bp, Artificial
  Probe
ccagcgaactatacaacctcctagg

SEQ ID NO: 309815 - DNA, 25 bp, Artificial
  Probe
tttgtcgcttccaaccagcgaacta

SEQ ID NO: 309816 - DNA, 25 bp, Artificial
  Probe
gtgaagaacgcttctggtcttggcc

SEQ ID NO: 309817 - DNA, 25 bp, Artificial
  Probe
gtcgcttccaaccagcgaactatac

SEQ ID NO: 309818 - DNA, 25 bp, Artificial
  Probe
gcctcattgtaatctccacaggaat

SEQ ID NO: 309819 - DNA, 25 bp, Artificial
  Probe
cactcacactcatcgtggttgttgg

SEQ ID NO: 309820 - DNA, 25 bp, Artificial
  Probe
gaagaacgcttctggtcttggcctc

SEQ ID NO: 309821 - DNA, 25 bp, Artificial
  Probe
agcccgtgaagaacgcttctggtct

SEQ ID NO: 309822 - DNA, 25 bp, Artificial
  Probe
gaacgcttctggtcttggcctcatt

SEQ ID NO: 309823 - DNA, 25 bp, Artificial
  Probe
acactcatcgtggttgttggcgcca

SEQ ID NO: 309824 - DNA, 25 bp, Artificial
  Probe
cgtgaagaacgcttctggtcttggc

SEQ ID NO: 309825 - DNA, 25 bp, Artificial
  Probe
aagcccgtgaagaacgcttctggtc

SEQ ID NO: 309826 - DNA, 25 bp, Artificial
  Probe
gttcaatcccattttagagcgtgaa

SEQ ID NO: 309827 - DNA, 25 bp, Artificial
  Probe
tgttcaatcccattttagagcgtga

SEQ ID NO: 309828 - DNA, 25 bp, Artificial
  Probe
tgtgacttcatttcactgctgtata

SEQ ID NO: 309829 - DNA, 25 bp, Artificial
  Probe
atggagctgtttaccgagcaactgg

SEQ ID NO: 309830 - DNA, 25 bp, Artificial
  Probe
ggccgcagttcttctaagaaacatc

SEQ ID NO: 309831 - DNA, 25 bp, Artificial
  Probe
cacgtagtcatggaagacagagaag

SEQ ID NO: 309832 - DNA, 25 bp, Artificial
  Probe
aacacgttcagtaccatgctattgt

SEQ ID NO: 309833 - DNA, 25 bp, Artificial
  Probe
tagagcgtgaaactcctacattaga

SEQ ID NO: 309834 - DNA, 25 bp, Artificial
  Probe
taccgagcaactggtgaggaattat

SEQ ID NO: 309835 - DNA, 25 bp, Artificial
  Probe
taatgtgacttcatttcactgctgt

SEQ ID NO: 309836 - DNA, 25 bp, Artificial
  Probe
gacctgctatattttcatgttgttg

SEQ ID NO: 309837 - DNA, 25 bp, Artificial
  Probe
cacgttcagtaccatgctattgttt

SEQ ID NO: 309838 - DNA, 25 bp, Artificial
  Probe
cactccacgtagtcatggaagacag

SEQ ID NO: 309839 - DNA, 25 bp, Artificial
  Probe
actccacgtagtcatggaagacaga

SEQ ID NO: 309840 - DNA, 25 bp, Artificial
  Probe
gttgaaaacacgttcagtaccatgc

SEQ ID NO: 309841 - DNA, 25 bp, Artificial
  Probe
tgttggccgcagttcttctaagaaa

SEQ ID NO: 309842 - DNA, 25 bp, Artificial
  Probe
agatggagctgtttaccgagcaact

SEQ ID NO: 309843 - DNA, 25 bp, Artificial
  Probe
tgaaaacacgttcagtaccatgcta

SEQ ID NO: 309844 - DNA, 25 bp, Artificial
  Probe
tttaccgagcaactggtgaggaatt

SEQ ID NO: 309845 - DNA, 25 bp, Artificial
  Probe
atgtgacttcatttcactgctgtat

SEQ ID NO: 309846 - DNA, 25 bp, Artificial
  Probe
ccgagcaactggtgaggaattatgt

SEQ ID NO: 309847 - DNA, 25 bp, Artificial
  Probe
agcgtgaaactcctacattagaata

SEQ ID NO: 309848 - DNA, 25 bp, Artificial
  Probe
agttttgacctgctatattttcatg

SEQ ID NO: 309849 - DNA, 25 bp, Artificial
  Probe
attttagagcgtgaaactcctacat

SEQ ID NO: 309850 - DNA, 25 bp, Artificial
  Probe
agctgtttaccgagcaactggtgag

SEQ ID NO: 309851 - DNA, 25 bp, Artificial
  Probe
tccactccacgtagtcatggaagac

SEQ ID NO: 309852 - DNA, 25 bp, Artificial
  Probe
acagatggagctgtttaccgagcaa

SEQ ID NO: 309853 - DNA, 25 bp, Artificial
  Probe
atcccattttagagcgtgaaactcc

SEQ ID NO: 309854 - DNA, 25 bp, Artificial
  Probe
gttgctaccctgtgttggccgcagt

SEQ ID NO: 309855 - DNA, 25 bp, Artificial
  Probe
acgttgaaaacacgttcagtaccat

SEQ ID NO: 309856 - DNA, 25 bp, Artificial
  Probe
catccactccacgtagtcatggaag

SEQ ID NO: 309857 - DNA, 25 bp, Artificial
  Probe
ttctaatgctgatttaacggactga

SEQ ID NO: 309858 - DNA, 25 bp, Artificial
  Probe
gtgacttcatttcactgctgtatat

SEQ ID NO: 309859 - DNA, 25 bp, Artificial
  Probe
tgttgctaccctgtgttggccgcag

SEQ ID NO: 309860 - DNA, 25 bp, Artificial
  Probe
ctaatgctgatttaacggactgata

SEQ ID NO: 309861 - DNA, 25 bp, Artificial
  Probe
tgtgttggccgcagttcttctaaga

SEQ ID NO: 309862 - DNA, 25 bp, Artificial
  Probe
gtgttcaatcccattttagagcgtg

SEQ ID NO: 309863 - DNA, 25 bp, Artificial
  Probe
gtgaaactcctacattagaatagat

SEQ ID NO: 309864 - DNA, 25 bp, Artificial
  Probe
tttagagcgtgaaactcctacatta

SEQ ID NO: 309865 - DNA, 25 bp, Artificial
  Probe
acatccactccacgtagtcatggaa

SEQ ID NO: 309866 - DNA, 25 bp, Artificial
  Probe
atgttgctaccctgtgttggccgca

SEQ ID NO: 309867 - DNA, 25 bp, Artificial
  Probe
tgctaccctgtgttggccgcagttc

SEQ ID NO: 309868 - DNA, 25 bp, Artificial
  Probe
gctaccctgtgttggccgcagttct

SEQ ID NO: 309869 - DNA, 25 bp, Artificial
  Probe
ttaccgagcaactggtgaggaatta

SEQ ID NO: 309870 - DNA, 25 bp, Artificial
  Probe
aatcccattttagagcgtgaaactc

SEQ ID NO: 309871 - DNA, 25 bp, Artificial
  Probe
ctgtttaccgagcaactggtgagga

SEQ ID NO: 309872 - DNA, 25 bp, Artificial
  Probe
ccggagccgccagaaccagcgagag

SEQ ID NO: 309873 - DNA, 25 bp, Artificial
  Probe
gagccgccagaaccagcgagaggcc

SEQ ID NO: 309874 - DNA, 25 bp, Artificial
  Probe
attcggcagcagagtccgcatcaag

SEQ ID NO: 309875 - DNA, 25 bp, Artificial
  Probe
tcggaggccccagtcccaaacgtag

SEQ ID NO: 309876 - DNA, 25 bp, Artificial
  Probe
gcggcaaatccgtgagtaccagctc

SEQ ID NO: 309877 - DNA, 25 bp, Artificial
  Probe
gacacattcggcagcagagtccgca

SEQ ID NO: 309878 - DNA, 25 bp, Artificial
  Probe
tcatcgtggagacagacacattcgg

SEQ ID NO: 309879 - DNA, 25 bp, Artificial
  Probe
atctgtatgaacaagaggggcaagc

SEQ ID NO: 309880 - DNA, 25 bp, Artificial
  Probe
actcgcaggaccaagcgcactcgga

SEQ ID NO: 309881 - DNA, 25 bp, Artificial
  Probe
gcagttcgaattcgtgggctccgcc

SEQ ID NO: 309882 - DNA, 25 bp, Artificial
  Probe
gcaggcggcaaatccgtgagtacca

SEQ ID NO: 309883 - DNA, 25 bp, Artificial
  Probe
accagtggcaagcacgtgcaggtca

SEQ ID NO: 309884 - DNA, 25 bp, Artificial
  Probe
gcgtattcaccgagatcgtactgga

SEQ ID NO: 309885 - DNA, 25 bp, Artificial
  Probe
cgagatcgtactggagaacaactac

SEQ ID NO: 309886 - DNA, 25 bp, Artificial
  Probe
tgagcaggcggcaaatccgtgagta

SEQ ID NO: 309887 - DNA, 25 bp, Artificial
  Probe
ttcatggctttcacccggcagggcc

SEQ ID NO: 309888 - DNA, 25 bp, Artificial
  Probe
cacgtgcaggtcaccgggcgtcgca

SEQ ID NO: 309889 - DNA, 25 bp, Artificial
  Probe
ggaccagggcgctatgactgaccag

SEQ ID NO: 309890 - DNA, 25 bp, Artificial
  Probe
acgcccggcatgagggctggttcat

SEQ ID NO: 309891 - DNA, 25 bp, Artificial
  Probe
aaccacgctgaaaggcagaagcagt

SEQ ID NO: 309892 - DNA, 25 bp, Artificial
  Probe
tatgactgaccagctgagcaggcgg

SEQ ID NO: 309893 - DNA, 25 bp, Artificial
  Probe
gttcatggctttcacccggcagggc

SEQ ID NO: 309894 - DNA, 25 bp, Artificial
  Probe
gagaacaactacacagccttccaga

SEQ ID NO: 309895 - DNA, 25 bp, Artificial
  Probe
atggcaacaagttcgccaagctcat

SEQ ID NO: 309896 - DNA, 25 bp, Artificial
  Probe
gagaggcccacttcatcaagcgcct

SEQ ID NO: 309897 - DNA, 25 bp, Artificial
  Probe
agaagcagttcgaattcgtgggctc

SEQ ID NO: 309898 - DNA, 25 bp, Artificial
  Probe
gactgcgtattcaccgagatcgtac

SEQ ID NO: 309899 - DNA, 25 bp, Artificial
  Probe
agcgagaggcccacttcatcaagcg

SEQ ID NO: 309900 - DNA, 25 bp, Artificial
  Probe
tccgtgagtaccagctctacagccg

SEQ ID NO: 309901 - DNA, 25 bp, Artificial
  Probe
caagcacgtgcaggtcaccgggcgt

SEQ ID NO: 309902 - DNA, 25 bp, Artificial
  Probe
actggagaacaactacacagccttc

SEQ ID NO: 309903 - DNA, 25 bp, Artificial
  Probe
taaccagtacgtgagggaccagggc

SEQ ID NO: 309904 - DNA, 25 bp, Artificial
  Probe
caccgctgaggatggcaacaagttc

SEQ ID NO: 309905 - DNA, 25 bp, Artificial
  Probe
atcgtactggagaacaactacacag

SEQ ID NO: 309906 - DNA, 25 bp, Artificial
  Probe
gcatgagggctggttcatggctttc

SEQ ID NO: 309907 - DNA, 25 bp, Artificial
  Probe
ctctgccaccgctgaggatggcaac

SEQ ID NO: 309908 - DNA, 25 bp, Artificial
  Probe
agaaccagcgagaggcccacttcat

SEQ ID NO: 309909 - DNA, 25 bp, Artificial
  Probe
aagccgagcgggaagagcaaagact

SEQ ID NO: 309910 - DNA, 25 bp, Artificial
  Probe
agggctggttcatggctttcacccg

SEQ ID NO: 309911 - DNA, 25 bp, Artificial
  Probe
gactgaccagctgagcaggcggcaa

SEQ ID NO: 309912 - DNA, 25 bp, Artificial
  Probe
gcaaagactgcgtattcaccgagat

SEQ ID NO: 309913 - DNA, 25 bp, Artificial
  Probe
acaagttcgccaagctcatcgtgga

SEQ ID NO: 309914 - DNA, 25 bp, Artificial
  Probe
cccaaccacgctgaaaggcagaagc

SEQ ID NO: 309915 - DNA, 25 bp, Artificial
  Probe
aacgcccggcatgagggctggttca

SEQ ID NO: 309916 - DNA, 25 bp, Artificial
  Probe
gaccagctgagcaggcggcaaatcc

SEQ ID NO: 309917 - DNA, 25 bp, Artificial
  Probe
agtggcaagcacgtgcaggtcaccg

SEQ ID NO: 309918 - DNA, 25 bp, Artificial
  Probe
caagacccgcgaaaaccagcaagat

SEQ ID NO: 309919 - DNA, 25 bp, Artificial
  Probe
ggcggcctcgcaagggtcccaagac

SEQ ID NO: 309920 - DNA, 25 bp, Artificial
  Probe
cttcgggagtcaagtccggatcaag

SEQ ID NO: 309921 - DNA, 25 bp, Artificial
  Probe
agacggataccttcgggagtcaagt

SEQ ID NO: 309922 - DNA, 25 bp, Artificial
  Probe
ctcctagtggagacggataccttcg

SEQ ID NO: 309923 - DNA, 25 bp, Artificial
  Probe
agtcctgggccgtaggatcagtgcc

SEQ ID NO: 309924 - DNA, 25 bp, Artificial
  Probe
tggtactagcaaggagtgcgtgttc

SEQ ID NO: 309925 - DNA, 25 bp, Artificial
  Probe
tgcagaagcccttcaagtacaccac

SEQ ID NO: 309926 - DNA, 25 bp, Artificial
  Probe
ctgatggtactagcaaggagtgcgt

SEQ ID NO: 309927 - DNA, 25 bp, Artificial
  Probe
cctgggccgtaggatcagtgcccgt

SEQ ID NO: 309928 - DNA, 25 bp, Artificial
  Probe
tggtacgtgggcttcaccaagaagg

SEQ ID NO: 309929 - DNA, 25 bp, Artificial
  Probe
actacacggccctgatgtcagccaa

SEQ ID NO: 309930 - DNA, 25 bp, Artificial
  Probe
acaagtatgcccagctcctagtgga

SEQ ID NO: 309931 - DNA, 25 bp, Artificial
  Probe
ctgcagaagcccttcaagtacacca

SEQ ID NO: 309932 - DNA, 25 bp, Artificial
  Probe
tctggaaaacaactacacggccctg

SEQ ID NO: 309933 - DNA, 25 bp, Artificial
  Probe
agttactaagcgatcccggcggatc

SEQ ID NO: 309934 - DNA, 25 bp, Artificial
  Probe
gataccttcgggagtcaagtccgga

SEQ ID NO: 309935 - DNA, 25 bp, Artificial
  Probe
tgcccagctcctagtggagacggat

SEQ ID NO: 309936 - DNA, 25 bp, Artificial
  Probe
ggaagcctgatggtactagcaagga

SEQ ID NO: 309937 - DNA, 25 bp, Artificial
  Probe
ccagactcgggctcgcgatgatgtg

SEQ ID NO: 309938 - DNA, 25 bp, Artificial
  Probe
atgtgagtcggaagcagctgcgctt

SEQ ID NO: 309939 - DNA, 25 bp, Artificial
  Probe
gcagctgcgcttgtaccagctctac

SEQ ID NO: 309940 - DNA, 25 bp, Artificial
  Probe
gcgcttgtaccagctctacagcagg

SEQ ID NO: 309941 - DNA, 25 bp, Artificial
  Probe
tacgtgggcttcaccaagaaggggc

SEQ ID NO: 309942 - DNA, 25 bp, Artificial
  Probe
caggctggtacgtgggcttcaccaa

SEQ ID NO: 309943 - DNA, 25 bp, Artificial
  Probe
actagcaaggagtgcgtgttcattg

SEQ ID NO: 309944 - DNA, 25 bp, Artificial
  Probe
acattcaagtcctgggccgtaggat

SEQ ID NO: 309945 - DNA, 25 bp, Artificial
  Probe
gcatccatgtggagaaccagactcg

SEQ ID NO: 309946 - DNA, 25 bp, Artificial
  Probe
gtcggaagcagctgcgcttgtacca

SEQ ID NO: 309947 - DNA, 25 bp, Artificial
  Probe
tcatgaagcgttaccccaagggaca

SEQ ID NO: 309948 - DNA, 25 bp, Artificial
  Probe
actgagctgcagaagcccttcaagt

SEQ ID NO: 309949 - DNA, 25 bp, Artificial
  Probe
aagtatgcccagctcctagtggaga

SEQ ID NO: 309950 - DNA, 25 bp, Artificial
  Probe
tggagacggataccttcgggagtca

SEQ ID NO: 309951 - DNA, 25 bp, Artificial
  Probe
aagcgttaccccaagggacagactg

SEQ ID NO: 309952 - DNA, 25 bp, Artificial
  Probe
aagtccggatcaagggcaaagagac

SEQ ID NO: 309953 - DNA, 25 bp, Artificial
  Probe
ggccctgatgtcagccaagtactca

SEQ ID NO: 309954 - DNA, 25 bp, Artificial
  Probe
ggagaaccagactcgggctcgcgat

SEQ ID NO: 309955 - DNA, 25 bp, Artificial
  Probe
tgcacttcatgaagcgttaccccaa

SEQ ID NO: 309956 - DNA, 25 bp, Artificial
  Probe
cttcatgaagcgttaccccaaggga

SEQ ID NO: 309957 - DNA, 25 bp, Artificial
  Probe
tcaagtacaccacagttactaagcg

SEQ ID NO: 309958 - DNA, 25 bp, Artificial
  Probe
ggaaaacaactacacggccctgatg

SEQ ID NO: 309959 - DNA, 25 bp, Artificial
  Probe
acctgtgtatgaaccgaaaaggcaa

SEQ ID NO: 309960 - DNA, 25 bp, Artificial
  Probe
gggaagcacattcaagtcctgggcc

SEQ ID NO: 309961 - DNA, 25 bp, Artificial
  Probe
agtcaagtccggatcaagggcaaag

SEQ ID NO: 309962 - DNA, 25 bp, Artificial
  Probe
aagagacagagttctacctgtgtat

SEQ ID NO: 309963 - DNA, 25 bp, Artificial
  Probe
ctcgcgatgatgtgagtcggaagca

SEQ ID NO: 309964 - DNA, 25 bp, Artificial
  Probe
cagcacagcccgattctgtgttgac

SEQ ID NO: 309965 - DNA, 25 bp, Artificial
  Probe
tcagaggacacaaggaccaaatagc

SEQ ID NO: 309966 - DNA, 25 bp, Artificial
  Probe
ccccaggtatatggatggaggataa

SEQ ID NO: 309967 - DNA, 25 bp, Artificial
  Probe
tgacatcttgcctgagaccctaaag

SEQ ID NO: 309968 - DNA, 25 bp, Artificial
  Probe
ccttcgagctgctggcacggccttg

SEQ ID NO: 309969 - DNA, 25 bp, Artificial
  Probe
gtagaaattctgtccgctgcaagga

SEQ ID NO: 309970 - DNA, 25 bp, Artificial
  Probe
ctgtctgcgttgtgccgggaatcag

SEQ ID NO: 309971 - DNA, 25 bp, Artificial
  Probe
ctgagaccctaaagaagagaaggag

SEQ ID NO: 309972 - DNA, 25 bp, Artificial
  Probe
ctgagtatgctgtgtggagccccac

SEQ ID NO: 309973 - DNA, 25 bp, Artificial
  Probe
gttgacaaaatactcgaacgaaatg

SEQ ID NO: 309974 - DNA, 25 bp, Artificial
  Probe
gtcgggttcctctcaaatccatcat

SEQ ID NO: 309975 - DNA, 25 bp, Artificial
  Probe
cgagctgctggcacggccttgccag

SEQ ID NO: 309976 - DNA, 25 bp, Artificial
  Probe
cgatttcttggaagggcagccattc

SEQ ID NO: 309977 - DNA, 25 bp, Artificial
  Probe
tccctgtctgcgttgtgccgggaat

SEQ ID NO: 309978 - DNA, 25 bp, Artificial
  Probe
aaaggacatgctggtgcttgcagga

SEQ ID NO: 309979 - DNA, 25 bp, Artificial
  Probe
tctgctgagggagcagtgaccactg

SEQ ID NO: 309980 - DNA, 25 bp, Artificial
  Probe
gtctgctgagggagcagtgaccact

SEQ ID NO: 309981 - DNA, 25 bp, Artificial
  Probe
gctgagtatgctgtgtggagcccca

SEQ ID NO: 309982 - DNA, 25 bp, Artificial
  Probe
atcagagcagagtgttagcgctgta

SEQ ID NO: 309983 - DNA, 25 bp, Artificial
  Probe
caccccaggtatatggatggaggat

SEQ ID NO: 309984 - DNA, 25 bp, Artificial
  Probe
aggacacaaggaccaaatagcttgg

SEQ ID NO: 309985 - DNA, 25 bp, Artificial
  Probe
gaatcagagcagagtgttagcgctg

SEQ ID NO: 309986 - DNA, 25 bp, Artificial
  Probe
tgcctgagaccctaaagaagagaag

SEQ ID NO: 309987 - DNA, 25 bp, Artificial
  Probe
tgttagcgctgtaaaaggacatgct

SEQ ID NO: 309988 - DNA, 25 bp, Artificial
  Probe
gtgttagcgctgtaaaaggacatgc

SEQ ID NO: 309989 - DNA, 25 bp, Artificial
  Probe
aagtagaaattctgtccgctgcaag

SEQ ID NO: 309990 - DNA, 25 bp, Artificial
  Probe
aatactcgaacgaaatgattacatg

SEQ ID NO: 309991 - DNA, 25 bp, Artificial
  Probe
ggtcgggttcctctcaaatccatca

SEQ ID NO: 309992 - DNA, 25 bp, Artificial
  Probe
tcttggaagggcagccattcatcta

SEQ ID NO: 309993 - DNA, 25 bp, Artificial
  Probe
gggaaaggctccttcaaggaattca

SEQ ID NO: 309994 - DNA, 25 bp, Artificial
  Probe
tgccgggaatcagagcagagtgtta

SEQ ID NO: 309995 - DNA, 25 bp, Artificial
  Probe
agcagtcagaggacacaaggaccaa

SEQ ID NO: 309996 - DNA, 25 bp, Artificial
  Probe
gaaatcatcgatttcttggaagggc

SEQ ID NO: 309997 - DNA, 25 bp, Artificial
  Probe
accttcgagctgctggcacggcctt

SEQ ID NO: 309998 - DNA, 25 bp, Artificial
  Probe
agggattgactttatgccaggcttg

SEQ ID NO: 309999 - DNA, 25 bp, Artificial
  Probe
gaccaaatagcttgggagttgcgga

SEQ ID NO: 310000 - DNA, 25 bp, Artificial
  Probe
cgattctgtgttgacaaaatactcg

SEQ ID NO: 310001 - DNA, 25 bp, Artificial
  Probe
tgcttgcaggaaatcatcgatttct

SEQ ID NO: 310002 - DNA, 25 bp, Artificial
  Probe
ccttcaaggaattcagggacagggg

SEQ ID NO: 310003 - DNA, 25 bp, Artificial
  Probe
gacaaaatactcgaacgaaatgatt

SEQ ID NO: 310004 - DNA, 25 bp, Artificial
  Probe
aattctgtccgctgcaaggagcagt

SEQ ID NO: 310005 - DNA, 25 bp, Artificial
  Probe
tgagggctgacatcttgcctgagac

SEQ ID NO: 310006 - DNA, 25 bp, Artificial
  Probe
tgcaaggagcagtcagaggacacaa

SEQ ID NO: 310007 - DNA, 25 bp, Artificial
  Probe
ttcatctacaccagggattgacttt

SEQ ID NO: 310008 - DNA, 25 bp, Artificial
  Probe
tgactttatgccaggcttgtgatga

SEQ ID NO: 310009 - DNA, 25 bp, Artificial
  Probe
gaccactgggggaaaggctccttca

SEQ ID NO: 310010 - DNA, 25 bp, Artificial
  Probe
tggcaagctggattacagggcttgc

SEQ ID NO: 310011 - DNA, 25 bp, Artificial
  Probe
acatctccctgctgaaataaggagg

SEQ ID NO: 310012 - DNA, 25 bp, Artificial
  Probe
gaaagcagcattctggtggcaggat

SEQ ID NO: 310013 - DNA, 25 bp, Artificial
  Probe
tgaccatagcctatgtcatggctgc

SEQ ID NO: 310014 - DNA, 25 bp, Artificial
  Probe
ggtccgtttgtcacggcagacatgg

SEQ ID NO: 310015 - DNA, 25 bp, Artificial
  Probe
ggatggtacctgtggccagagcacc

SEQ ID NO: 310016 - DNA, 25 bp, Artificial
  Probe
gctgtcagcgcttgccatgtgcacg

SEQ ID NO: 310017 - DNA, 25 bp, Artificial
  Probe
cagatgacagagatccccctggacc

SEQ ID NO: 310018 - DNA, 25 bp, Artificial
  Probe
agatatggatggtacctgtggccag

SEQ ID NO: 310019 - DNA, 25 bp, Artificial
  Probe
atgaccatagcctatgtcatggctg

SEQ ID NO: 310020 - DNA, 25 bp, Artificial
  Probe
gctgcctgcgccatcagcatgatga

SEQ ID NO: 310021 - DNA, 25 bp, Artificial
  Probe
atccccctggaccacatctgggtgg

SEQ ID NO: 310022 - DNA, 25 bp, Artificial
  Probe
ggtctttgatcgagcccgaaagcga

SEQ ID NO: 310023 - DNA, 25 bp, Artificial
  Probe
gaagactgtggctacaacattccac

SEQ ID NO: 310024 - DNA, 25 bp, Artificial
  Probe
actttgctgatgacatctccctgct

SEQ ID NO: 310025 - DNA, 25 bp, Artificial
  Probe
atgtgcacgatgagttcaggacggc

SEQ ID NO: 310026 - DNA, 25 bp, Artificial
  Probe
agatgacagagatccccctggacca

SEQ ID NO: 310027 - DNA, 25 bp, Artificial
  Probe
ctatgtcatggctgccatctgcgcc

SEQ ID NO: 310028 - DNA, 25 bp, Artificial
  Probe
atcgagcccgaaagcgaattggctt

SEQ ID NO: 310029 - DNA, 25 bp, Artificial
  Probe
gtttgtcacggcagacatggaagac

SEQ ID NO: 310030 - DNA, 25 bp, Artificial
  Probe
atgacatctccctgctgaaataagg

SEQ ID NO: 310031 - DNA, 25 bp, Artificial
  Probe
acatggaagactgtggctacaacat

SEQ ID NO: 310032 - DNA, 25 bp, Artificial
  Probe
caacctgccgaatgcttctgccttg

SEQ ID NO: 310033 - DNA, 25 bp, Artificial
  Probe
acggcagacatggaagactgtggct

SEQ ID NO: 310034 - DNA, 25 bp, Artificial
  Probe
cagcgcttgccatgtgcacgatgag

SEQ ID NO: 310035 - DNA, 25 bp, Artificial
  Probe
tccacagacagatgagtcaacactt

SEQ ID NO: 310036 - DNA, 25 bp, Artificial
  Probe
cagatgagtcaacacttatgaccat

SEQ ID NO: 310037 - DNA, 25 bp, Artificial
  Probe
tgctgtcagcgcttgccatgtgcac

SEQ ID NO: 310038 - DNA, 25 bp, Artificial
  Probe
tgtggccagagcacctcaggaccct

SEQ ID NO: 310039 - DNA, 25 bp, Artificial
  Probe
aagcgaattggctttgctgtcagcg

SEQ ID NO: 310040 - DNA, 25 bp, Artificial
  Probe
aagctggattacagggcttgcaagg

SEQ ID NO: 310041 - DNA, 25 bp, Artificial
  Probe
atagcctatgtcatggctgccatct

SEQ ID NO: 310042 - DNA, 25 bp, Artificial
  Probe
cttcatgttgccactctgcctcatg

SEQ ID NO: 310043 - DNA, 25 bp, Artificial
  Probe
ggagcggtcatcatggaaggcttct

SEQ ID NO: 310044 - DNA, 25 bp, Artificial
  Probe
cacagtcatccacaggcaccgttat

SEQ ID NO: 310045 - DNA, 25 bp, Artificial
  Probe
atggtatgtcagtggcgctgcctac

SEQ ID NO: 310046 - DNA, 25 bp, Artificial
  Probe
tgtcagtggcgctgcctacgctgcc

SEQ ID NO: 310047 - DNA, 25 bp, Artificial
  Probe
tgatcgagcccgaaagcgaattggc

SEQ ID NO: 310048 - DNA, 25 bp, Artificial
  Probe
gagtcaacacttatgaccatagcct

SEQ ID NO: 310049 - DNA, 25 bp, Artificial
  Probe
cttctgccttgacagaaaagagaca

SEQ ID NO: 310050 - DNA, 25 bp, Artificial
  Probe
cctttggtcacgtgagttggagata

SEQ ID NO: 310051 - DNA, 25 bp, Artificial
  Probe
gcccgaaagcgaattggctttgctg

SEQ ID NO: 310052 - DNA, 25 bp, Artificial
  Probe
tggaaggtccgtttgtcacggcaga

SEQ ID NO: 310053 - DNA, 25 bp, Artificial
  Probe
tgggtggttccctttggtcacgtga

SEQ ID NO: 310054 - DNA, 25 bp, Artificial
  Probe
gtacctgtggccagagcacctcagg

SEQ ID NO: 310055 - DNA, 25 bp, Artificial
  Probe
cccgaaagcgaattggctttgctgt

SEQ ID NO: 310056 - DNA, 25 bp, Artificial
  Probe
tcatgccaagccagaatggttttag

SEQ ID NO: 310057 - DNA, 25 bp, Artificial
  Probe
tgcaacatcttaaaaggagagagca

SEQ ID NO: 310058 - DNA, 25 bp, Artificial
  Probe
catgccaagccagaatggttttagt

SEQ ID NO: 310059 - DNA, 25 bp, Artificial
  Probe
aaggacttggcttcatgtagttaca

SEQ ID NO: 310060 - DNA, 25 bp, Artificial
  Probe
ttgcttgtttgaaatagggtctcac

SEQ ID NO: 310061 - DNA, 25 bp, Artificial
  Probe
ggacttggcttcatgtagttacaga

SEQ ID NO: 310062 - DNA, 25 bp, Artificial
  Probe
gcttcatgtagttacagatgggact

SEQ ID NO: 310063 - DNA, 25 bp, Artificial
  Probe
atgagataagccagactcaaaaggt

SEQ ID NO: 310064 - DNA, 25 bp, Artificial
  Probe
gtatcaccctgattgacctgcaact

SEQ ID NO: 310065 - DNA, 25 bp, Artificial
  Probe
atgcaacatcttaaaaggagagagc

SEQ ID NO: 310066 - DNA, 25 bp, Artificial
  Probe
cagactcaaaaggttgtgtgatttc

SEQ ID NO: 310067 - DNA, 25 bp, Artificial
  Probe
cccccaaggacttggcttcatgtag

SEQ ID NO: 310068 - DNA, 25 bp, Artificial
  Probe
gggtctcactgtatcaccctgattg

SEQ ID NO: 310069 - DNA, 25 bp, Artificial
  Probe
gagataagccagactcaaaaggttg

SEQ ID NO: 310070 - DNA, 25 bp, Artificial
  Probe
ttctgcctttaacgtgccatcatgc

SEQ ID NO: 310071 - DNA, 25 bp, Artificial
  Probe
cttgcatatgcaacatcttaaaagg

SEQ ID NO: 310072 - DNA, 25 bp, Artificial
  Probe
tgtgatttcttgcatatgcaacatc

SEQ ID NO: 310073 - DNA, 25 bp, Artificial
  Probe
gtgatttcttgcatatgcaacatct

SEQ ID NO: 310074 - DNA, 25 bp, Artificial
  Probe
tgaaatagggtctcactgtatcacc

SEQ ID NO: 310075 - DNA, 25 bp, Artificial
  Probe
ccaagccagaatggttttagtatta

SEQ ID NO: 310076 - DNA, 25 bp, Artificial
  Probe
ggcttcatgtagttacagatgggac

SEQ ID NO: 310077 - DNA, 25 bp, Artificial
  Probe
ctttaacgtgccatcatgccaagcc

SEQ ID NO: 310078 - DNA, 25 bp, Artificial
  Probe
atcccccaaggacttggcttcatgt

SEQ ID NO: 310079 - DNA, 25 bp, Artificial
  Probe
taagccagactcaaaaggttgtgtg

SEQ ID NO: 310080 - DNA, 25 bp, Artificial
  Probe
ttgcatatgcaacatcttaaaagga

SEQ ID NO: 310081 - DNA, 25 bp, Artificial
  Probe
aagccagactcaaaaggttgtgtga

SEQ ID NO: 310082 - DNA, 25 bp, Artificial
  Probe
tctgcctttaacgtgccatcatgcc

SEQ ID NO: 310083 - DNA, 25 bp, Artificial
  Probe
gtgtgatttcttgcatatgcaacat

SEQ ID NO: 310084 - DNA, 25 bp, Artificial
  Probe
catatgcaacatcttaaaaggagag

SEQ ID NO: 310085 - DNA, 25 bp, Artificial
  Probe
gaaatagggtctcactgtatcaccc

SEQ ID NO: 310086 - DNA, 25 bp, Artificial
  Probe
gataagccagactcaaaaggttgtg

SEQ ID NO: 310087 - DNA, 25 bp, Artificial
  Probe
tagggtctcactgtatcaccctgat

SEQ ID NO: 310088 - DNA, 25 bp, Artificial
  Probe
ttgtgtgatttcttgcatatgcaac

SEQ ID NO: 310089 - DNA, 25 bp, Artificial
  Probe
cttcatgtagttacagatgggactg

SEQ ID NO: 310090 - DNA, 25 bp, Artificial
  Probe
ctgcctttaacgtgccatcatgcca

SEQ ID NO: 310091 - DNA, 25 bp, Artificial
  Probe
gtctcactgtatcaccctgattgac

SEQ ID NO: 310092 - DNA, 25 bp, Artificial
  Probe
caaggacttggcttcatgtagttac

SEQ ID NO: 310093 - DNA, 25 bp, Artificial
  Probe
ctgtatcaccctgattgacctgcaa

SEQ ID NO: 310094 - DNA, 25 bp, Artificial
  Probe
actgtatcaccctgattgacctgca

SEQ ID NO: 310095 - DNA, 25 bp, Artificial
  Probe
aatagggtctcactgtatcaccctg

SEQ ID NO: 310096 - DNA, 25 bp, Artificial
  Probe
ccagactcaaaaggttgtgtgattt

SEQ ID NO: 310097 - DNA, 25 bp, Artificial
  Probe
cttggcttcatgtagttacagatgg

SEQ ID NO: 310098 - DNA, 25 bp, Artificial
  Probe
ttaacgtgccatcatgccaagccag

SEQ ID NO: 310099 - DNA, 25 bp, Artificial
  Probe
agggtctcactgtatcaccctgatt

SEQ ID NO: 310100 - DNA, 25 bp, Artificial
  Probe
tttctgcctttaacgtgccatcatg

SEQ ID NO: 310101 - DNA, 25 bp, Artificial
  Probe
taacgtgccatcatgccaagccaga

SEQ ID NO: 310102 - DNA, 25 bp, Artificial
  Probe
atttttgtactgcagacgtttcgtg

SEQ ID NO: 310103 - DNA, 25 bp, Artificial
  Probe
gcatagctattcaggcaccgggccg

SEQ ID NO: 310104 - DNA, 25 bp, Artificial
  Probe
gcttgcatagctattcaggcaccgg

SEQ ID NO: 310105 - DNA, 25 bp, Artificial
  Probe
catttttgtactgcagacgtttcgt

SEQ ID NO: 310106 - DNA, 25 bp, Artificial
  Probe
tgctcccggaagaactgagtgcttg

SEQ ID NO: 310107 - DNA, 25 bp, Artificial
  Probe
tcaggcaccgggccggagggtactt

SEQ ID NO: 310108 - DNA, 25 bp, Artificial
  Probe
ttacatttttgtactgcagacgttt

SEQ ID NO: 310109 - DNA, 25 bp, Artificial
  Probe
tactgcagacgtttcgtgtaaataa

SEQ ID NO: 310110 - DNA, 25 bp, Artificial
  Probe
gaatttattctattattatgagcta

SEQ ID NO: 310111 - DNA, 25 bp, Artificial
  Probe
aagtttacatttttgtactgcagac

SEQ ID NO: 310112 - DNA, 25 bp, Artificial
  Probe
tcccggaagaactgagtgcttgcat

SEQ ID NO: 310113 - DNA, 25 bp, Artificial
  Probe
tcaggatgcttcattcatatgaaaa

SEQ ID NO: 310114 - DNA, 25 bp, Artificial
  Probe
tgtactgcagacgtttcgtgtaaat

SEQ ID NO: 310115 - DNA, 25 bp, Artificial
  Probe
ttcattcatatgaaaatgtattttt

SEQ ID NO: 310116 - DNA, 25 bp, Artificial
  Probe
gaactgagtgcttgcatagctattc

SEQ ID NO: 310117 - DNA, 25 bp, Artificial
  Probe
actgcagacgtttcgtgtaaataaa

SEQ ID NO: 310118 - DNA, 25 bp, Artificial
  Probe
tgagtgcttgcatagctattcaggc

SEQ ID NO: 310119 - DNA, 25 bp, Artificial
  Probe
tttgtactgcagacgtttcgtgtaa

SEQ ID NO: 310120 - DNA, 25 bp, Artificial
  Probe
agaactgagtgcttgcatagctatt

SEQ ID NO: 310121 - DNA, 25 bp, Artificial
  Probe
ttgctcccggaagaactgagtgctt

SEQ ID NO: 310122 - DNA, 25 bp, Artificial
  Probe
ctgcagacgtttcgtgtaaataaaa

SEQ ID NO: 310123 - DNA, 25 bp, Artificial
  Probe
tttacatttttgtactgcagacgtt

SEQ ID NO: 310124 - DNA, 25 bp, Artificial
  Probe
ttattcaggatgcttcattcatatg

SEQ ID NO: 310125 - DNA, 25 bp, Artificial
  Probe
agtttacatttttgtactgcagacg

SEQ ID NO: 310126 - DNA, 25 bp, Artificial
  Probe
ttgcatagctattcaggcaccgggc

SEQ ID NO: 310127 - DNA, 25 bp, Artificial
  Probe
attcaggatgcttcattcatatgaa

SEQ ID NO: 310128 - DNA, 25 bp, Artificial
  Probe
agctatcaaagtttacatttttgta

SEQ ID NO: 310129 - DNA, 25 bp, Artificial
  Probe
ctcccggaagaactgagtgcttgca

SEQ ID NO: 310130 - DNA, 25 bp, Artificial
  Probe
gctcccggaagaactgagtgcttgc

SEQ ID NO: 310131 - DNA, 25 bp, Artificial
  Probe
ttgtactgcagacgtttcgtgtaaa

SEQ ID NO: 310132 - DNA, 25 bp, Artificial
  Probe
ggtactttaatttattcaggatgct

SEQ ID NO: 310133 - DNA, 25 bp, Artificial
  Probe
tttttgtactgcagacgtttcgtgt

SEQ ID NO: 310134 - DNA, 25 bp, Artificial
  Probe
gagtgcttgcatagctattcaggca

SEQ ID NO: 310135 - DNA, 25 bp, Artificial
  Probe
tgcttgcatagctattcaggcaccg

SEQ ID NO: 310136 - DNA, 25 bp, Artificial
  Probe
aactgagtgcttgcatagctattca

SEQ ID NO: 310137 - DNA, 25 bp, Artificial
  Probe
tacatttttgtactgcagacgtttc

SEQ ID NO: 310138 - DNA, 25 bp, Artificial
  Probe
ttcaggatgcttcattcatatgaaa

SEQ ID NO: 310139 - DNA, 25 bp, Artificial
  Probe
gtactgcagacgtttcgtgtaaata

SEQ ID NO: 310140 - DNA, 25 bp, Artificial
  Probe
caggatgcttcattcatatgaaaat

SEQ ID NO: 310141 - DNA, 25 bp, Artificial
  Probe
tattcaggatgcttcattcatatga

SEQ ID NO: 310142 - DNA, 25 bp, Artificial
  Probe
aaagtttacatttttgtactgcaga

SEQ ID NO: 310143 - DNA, 25 bp, Artificial
  Probe
tgcatagctattcaggcaccgggcc

SEQ ID NO: 310144 - DNA, 25 bp, Artificial
  Probe
gtttacatttttgtactgcagacgt

SEQ ID NO: 310145 - DNA, 25 bp, Artificial
  Probe
cttgcatagctattcaggcaccggg

SEQ ID NO: 310146 - DNA, 25 bp, Artificial
  Probe
acatttttgtactgcagacgtttcg

SEQ ID NO: 310147 - DNA, 25 bp, Artificial
  Probe
ttttgtactgcagacgtttcgtgta

SEQ ID NO: 310148 - DNA, 25 bp, Artificial
  Probe
cacttccaccgtgaagcgagagagc

SEQ ID NO: 310149 - DNA, 25 bp, Artificial
  Probe
cattaagaacagtagccgttagaag

SEQ ID NO: 310150 - DNA, 25 bp, Artificial
  Probe
tgctgcaaaggaagccattaagaac

SEQ ID NO: 310151 - DNA, 25 bp, Artificial
  Probe
ctccctcttcatagtgctgtgtgtt

SEQ ID NO: 310152 - DNA, 25 bp, Artificial
  Probe
caatgtcgaagtagccattaagtgg

SEQ ID NO: 310153 - DNA, 25 bp, Artificial
  Probe
gtagccattaagtggccacttccac

SEQ ID NO: 310154 - DNA, 25 bp, Artificial
  Probe
gaacagtagccgttagaagtgcaag

SEQ ID NO: 310155 - DNA, 25 bp, Artificial
  Probe
caccgtgaagcgagagagccagtag

SEQ ID NO: 310156 - DNA, 25 bp, Artificial
  Probe
cattcgtgcatttactttgaagaaa

SEQ ID NO: 310157 - DNA, 25 bp, Artificial
  Probe
ttaagtggccacttccaccgtgaag

SEQ ID NO: 310158 - DNA, 25 bp, Artificial
  Probe
agcaatgtcgaagtagccattaagt

SEQ ID NO: 310159 - DNA, 25 bp, Artificial
  Probe
actccctcttcatagtgctgtgtgt

SEQ ID NO: 310160 - DNA, 25 bp, Artificial
  Probe
cctcattcgtgcatttactttgaag

SEQ ID NO: 310161 - DNA, 25 bp, Artificial
  Probe
ccacttccaccgtgaagcgagagag

SEQ ID NO: 310162 - DNA, 25 bp, Artificial
  Probe
gtggccacttccaccgtgaagcgag

SEQ ID NO: 310163 - DNA, 25 bp, Artificial
  Probe
cttccaccgtgaagcgagagagcca

SEQ ID NO: 310164 - DNA, 25 bp, Artificial
  Probe
ccctcttcatagtgctgtgtgtttt

SEQ ID NO: 310165 - DNA, 25 bp, Artificial
  Probe
ctgattcttgctgcaaaggaagcca

SEQ ID NO: 310166 - DNA, 25 bp, Artificial
  Probe
ctcattcgtgcatttactttgaaga

SEQ ID NO: 310167 - DNA, 25 bp, Artificial
  Probe
ctcccggatgaagtaagactgaact

SEQ ID NO: 310168 - DNA, 25 bp, Artificial
  Probe
ccattaagaacagtagccgttagaa

SEQ ID NO: 310169 - DNA, 25 bp, Artificial
  Probe
gtcgaagtagccattaagtggccac

SEQ ID NO: 310170 - DNA, 25 bp, Artificial
  Probe
cgtctcccggatgaagtaagactga

SEQ ID NO: 310171 - DNA, 25 bp, Artificial
  Probe
acagtagccgttagaagtgcaagcc

SEQ ID NO: 310172 - DNA, 25 bp, Artificial
  Probe
tctgattcttgctgcaaaggaagcc

SEQ ID NO: 310173 - DNA, 25 bp, Artificial
  Probe
tcattcgtgcatttactttgaagaa

SEQ ID NO: 310174 - DNA, 25 bp, Artificial
  Probe
tagccgttagaagtgcaagccttac

SEQ ID NO: 310175 - DNA, 25 bp, Artificial
  Probe
agtagccgttagaagtgcaagcctt

SEQ ID NO: 310176 - DNA, 25 bp, Artificial
  Probe
gtagccgttagaagtgcaagcctta

SEQ ID NO: 310177 - DNA, 25 bp, Artificial
  Probe
tgattcttgctgcaaaggaagccat

SEQ ID NO: 310178 - DNA, 25 bp, Artificial
  Probe
cattaagtggccacttccaccgtga

SEQ ID NO: 310179 - DNA, 25 bp, Artificial
  Probe
tcgaagtagccattaagtggccact

SEQ ID NO: 310180 - DNA, 25 bp, Artificial
  Probe
accgtctcccggatgaagtaagact

SEQ ID NO: 310181 - DNA, 25 bp, Artificial
  Probe
acactccctcttcatagtgctgtgt

SEQ ID NO: 310182 - DNA, 25 bp, Artificial
  Probe
tcttgctgcaaaggaagccattaag

SEQ ID NO: 310183 - DNA, 25 bp, Artificial
  Probe
ttgctgcaaaggaagccattaagaa

SEQ ID NO: 310184 - DNA, 25 bp, Artificial
  Probe
agtagccattaagtggccacttcca

SEQ ID NO: 310185 - DNA, 25 bp, Artificial
  Probe
aagtggccacttccaccgtgaagcg

SEQ ID NO: 310186 - DNA, 25 bp, Artificial
  Probe
agtggccacttccaccgtgaagcga

SEQ ID NO: 310187 - DNA, 25 bp, Artificial
  Probe
actcctctgattcttgctgcaaagg

SEQ ID NO: 310188 - DNA, 25 bp, Artificial
  Probe
ctcctctgattcttgctgcaaagga

SEQ ID NO: 310189 - DNA, 25 bp, Artificial
  Probe
attaagtggccacttccaccgtgaa

SEQ ID NO: 310190 - DNA, 25 bp, Artificial
  Probe
tcctctgattcttgctgcaaaggaa

SEQ ID NO: 310191 - DNA, 25 bp, Artificial
  Probe
tctcccggatgaagtaagactgaac

SEQ ID NO: 310192 - DNA, 25 bp, Artificial
  Probe
cctctgattcttgctgcaaaggaag

SEQ ID NO: 310193 - DNA, 25 bp, Artificial
  Probe
cttgctgcaaaggaagccattaaga

SEQ ID NO: 310194 - DNA, 25 bp, Artificial
  Probe
agagatgtagcctgtgtttaaatcc

SEQ ID NO: 310195 - DNA, 25 bp, Artificial
  Probe
cttttaaaagacatggtctgtgaac

SEQ ID NO: 310196 - DNA, 25 bp, Artificial
  Probe
gcatatctacctagaagtgacctcc

SEQ ID NO: 310197 - DNA, 25 bp, Artificial
  Probe
agctgacagcatttacctatgtgta

SEQ ID NO: 310198 - DNA, 25 bp, Artificial
  Probe
gctttaacagctgacagcatttacc

SEQ ID NO: 310199 - DNA, 25 bp, Artificial
  Probe
ctatcgtaaggtcctcttttgaact

SEQ ID NO: 310200 - DNA, 25 bp, Artificial
  Probe
tgtgtttaaatccagagcttcttaa

SEQ ID NO: 310201 - DNA, 25 bp, Artificial
  Probe
tctaagtcaaacgacgtaaacacgc

SEQ ID NO: 310202 - DNA, 25 bp, Artificial
  Probe
tatctacctagaagtgacctcctag

SEQ ID NO: 310203 - DNA, 25 bp, Artificial
  Probe
ttgcttgtaggcacatcagcatatc

SEQ ID NO: 310204 - DNA, 25 bp, Artificial
  Probe
cttaattgaacttgacattgtctga

SEQ ID NO: 310205 - DNA, 25 bp, Artificial
  Probe
ctaggtcttagtcattatgaaatac

SEQ ID NO: 310206 - DNA, 25 bp, Artificial
  Probe
taaacacgcctgtccagatagtctt

SEQ ID NO: 310207 - DNA, 25 bp, Artificial
  Probe
atctgtgaccttttaaaagacatgg

SEQ ID NO: 310208 - DNA, 25 bp, Artificial
  Probe
accttttaaaagacatggtctgtga

SEQ ID NO: 310209 - DNA, 25 bp, Artificial
  Probe
tcccttgcttgtaggcacatcagca

SEQ ID NO: 310210 - DNA, 25 bp, Artificial
  Probe
atctaagtcaaacgacgtaaacacg

SEQ ID NO: 310211 - DNA, 25 bp, Artificial
  Probe
gcacatcagcatatctacctagaag

SEQ ID NO: 310212 - DNA, 25 bp, Artificial
  Probe
cttttgaactgaatctgtgcttaaa

SEQ ID NO: 310213 - DNA, 25 bp, Artificial
  Probe
aactgaatctgtgcttaaaattgtc

SEQ ID NO: 310214 - DNA, 25 bp, Artificial
  Probe
acagtgtttagttcttcacgttcta

SEQ ID NO: 310215 - DNA, 25 bp, Artificial
  Probe
tgattgcaggccaacttatagctct

SEQ ID NO: 310216 - DNA, 25 bp, Artificial
  Probe
tgaatctgtgcttaaaattgtcttc

SEQ ID NO: 310217 - DNA, 25 bp, Artificial
  Probe
gcttcttaattgaacttgacattgt

SEQ ID NO: 310218 - DNA, 25 bp, Artificial
  Probe
ttgtctgattgcaggccaacttata

SEQ ID NO: 310219 - DNA, 25 bp, Artificial
  Probe
acatcagcatatctacctagaagtg

SEQ ID NO: 310220 - DNA, 25 bp, Artificial
  Probe
gtctgtgaacagtgtttagttcttc

SEQ ID NO: 310221 - DNA, 25 bp, Artificial
  Probe
taaactatcgtaaggtcctcttttg

SEQ ID NO: 310222 - DNA, 25 bp, Artificial
  Probe
attgaacttgacattgtctgattgc

SEQ ID NO: 310223 - DNA, 25 bp, Artificial
  Probe
tatctacaaataagctatgggaggc

SEQ ID NO: 310224 - DNA, 25 bp, Artificial
  Probe
ctgtgaccttttaaaagacatggtc

SEQ ID NO: 310225 - DNA, 25 bp, Artificial
  Probe
tctgtgaacagtgtttagttcttca

SEQ ID NO: 310226 - DNA, 25 bp, Artificial
  Probe
ctctctcaagtaaactatcgtaagg

SEQ ID NO: 310227 - DNA, 25 bp, Artificial
  Probe
gtttagttcttcacgttctagtctc

SEQ ID NO: 310228 - DNA, 25 bp, Artificial
  Probe
tgacagcatttacctatgtgtagaa

SEQ ID NO: 310229 - DNA, 25 bp, Artificial
  Probe
ccagatagtctttctttagtggata

SEQ ID NO: 310230 - DNA, 25 bp, Artificial
  Probe
tcttaattgaacttgacattgtctg

SEQ ID NO: 310231 - DNA, 25 bp, Artificial
  Probe
taacagctgacagcatttacctatg

SEQ ID NO: 310232 - DNA, 25 bp, Artificial
  Probe
gtgtttaaatccagagcttcttaat

SEQ ID NO: 310233 - DNA, 25 bp, Artificial
  Probe
atccagagcttcttaattgaacttg

SEQ ID NO: 310234 - DNA, 25 bp, Artificial
  Probe
aacgacgtaaacacgcctgtccaga

SEQ ID NO: 310235 - DNA, 25 bp, Artificial
  Probe
tcctagagatgtagcctgtgtttaa

SEQ ID NO: 310236 - DNA, 25 bp, Artificial
  Probe
cgtaaacacgcctgtccagatagtc

SEQ ID NO: 310237 - DNA, 25 bp, Artificial
  Probe
ggcgatggctttaacagctgacagc

SEQ ID NO: 310238 - DNA, 25 bp, Artificial
  Probe
tcaagtaaactatcgtaaggtcctc

SEQ ID NO: 310239 - DNA, 25 bp, Artificial
  Probe
gcctgtgtttaaatccagagcttct

SEQ ID NO: 310240 - DNA, 25 bp, Artificial
  Probe
gcgcgcatttgcacccaagagactc

SEQ ID NO: 310241 - DNA, 25 bp, Artificial
  Probe
gcatttgcacccaagagactcgtgc

SEQ ID NO: 310242 - DNA, 25 bp, Artificial
  Probe
gagcgactgggtactgtccccgcgt

SEQ ID NO: 310243 - DNA, 25 bp, Artificial
  Probe
gtcaaccgggcgtcgctgactcagg

SEQ ID NO: 310244 - DNA, 25 bp, Artificial
  Probe
gctgatcaaagcacgcctgcatggc

SEQ ID NO: 310245 - DNA, 25 bp, Artificial
  Probe
tgatgatctggtagcccagggctgc

SEQ ID NO: 310246 - DNA, 25 bp, Artificial
  Probe
accgggcgtcgctgactcagggtct

SEQ ID NO: 310247 - DNA, 25 bp, Artificial
  Probe
cccgcgtcagctgcaactgagcatg

SEQ ID NO: 310248 - DNA, 25 bp, Artificial
  Probe
gactgtgcaggcaactctcgaggac

SEQ ID NO: 310249 - DNA, 25 bp, Artificial
  Probe
tgtccccgcgtcagctgcaactgag

SEQ ID NO: 310250 - DNA, 25 bp, Artificial
  Probe
acacgcatgcgctgatcaaagcacg

SEQ ID NO: 310251 - DNA, 25 bp, Artificial
  Probe
gcaacgtgcgatcagcctccaggga

SEQ ID NO: 310252 - DNA, 25 bp, Artificial
  Probe
ccaagagactcgtgcccgctgggtc

SEQ ID NO: 310253 - DNA, 25 bp, Artificial
  Probe
ctcgaggacctaggttggagcgact

SEQ ID NO: 310254 - DNA, 25 bp, Artificial
  Probe
tttgcacccaagagactcgtgcccg

SEQ ID NO: 310255 - DNA, 25 bp, Artificial
  Probe
cggtcggccaacacgcatgcgctga

SEQ ID NO: 310256 - DNA, 25 bp, Artificial
  Probe
tcaaagcacgcctgcatggcctgca

SEQ ID NO: 310257 - DNA, 25 bp, Artificial
  Probe
actgcagacttatgatgatctggta

SEQ ID NO: 310258 - DNA, 25 bp, Artificial
  Probe
atctggtagcccagggctgccactg

SEQ ID NO: 310259 - DNA, 25 bp, Artificial
  Probe
tgctgtcacctggagactgtgcagg

SEQ ID NO: 310260 - DNA, 25 bp, Artificial
  Probe
gctacaccccggtggttcttatgca

SEQ ID NO: 310261 - DNA, 25 bp, Artificial
  Probe
cagctgcaactgagcatgtgcgtgg

SEQ ID NO: 310262 - DNA, 25 bp, Artificial
  Probe
gtcagctgcaactgagcatgtgcgt

SEQ ID NO: 310263 - DNA, 25 bp, Artificial
  Probe
tgactcagggtctccccgaagccta

SEQ ID NO: 310264 - DNA, 25 bp, Artificial
  Probe
ggccaacacgcatgcgctgatcaaa

SEQ ID NO: 310265 - DNA, 25 bp, Artificial
  Probe
ctgcatggcctgcagcccgacagag

SEQ ID NO: 310266 - DNA, 25 bp, Artificial
  Probe
aactgcacttacgatcggccgccgg

SEQ ID NO: 310267 - DNA, 25 bp, Artificial
  Probe
gggcgtcgctgactcagggtctccc

SEQ ID NO: 310268 - DNA, 25 bp, Artificial
  Probe
cggccaacacgcatgcgctgatcaa

SEQ ID NO: 310269 - DNA, 25 bp, Artificial
  Probe
tggagactgtgcaggcaactctcga

SEQ ID NO: 310270 - DNA, 25 bp, Artificial
  Probe
acccaagagactcgtgcccgctggg

SEQ ID NO: 310271 - DNA, 25 bp, Artificial
  Probe
cacaggacagacagcggcgtgtcac

SEQ ID NO: 310272 - DNA, 25 bp, Artificial
  Probe
cagacagcggcgtgtcactgcagac

SEQ ID NO: 310273 - DNA, 25 bp, Artificial
  Probe
tgtcacctggagactgtgcaggcaa

SEQ ID NO: 310274 - DNA, 25 bp, Artificial
  Probe
cgcgtcagctgcaactgagcatgtg

SEQ ID NO: 310275 - DNA, 25 bp, Artificial
  Probe
gcagacttatgatgatctggtagcc

SEQ ID NO: 310276 - DNA, 25 bp, Artificial
  Probe
gtagcccagggctgccactgcgctt

SEQ ID NO: 310277 - DNA, 25 bp, Artificial
  Probe
tgcatggcctgcagcccgacagagt

SEQ ID NO: 310278 - DNA, 25 bp, Artificial
  Probe
caaagcacgcctgcatggcctgcag

SEQ ID NO: 310279 - DNA, 25 bp, Artificial
  Probe
gtcccgggcgctgctgtcacctgga

SEQ ID NO: 310280 - DNA, 25 bp, Artificial
  Probe
ctgcaacgtgcgatcagcctccagg

SEQ ID NO: 310281 - DNA, 25 bp, Artificial
  Probe
gccgaagcgcgcatttgcacccaag

SEQ ID NO: 310282 - DNA, 25 bp, Artificial
  Probe
gactgggtactgtccccgcgtcagc

SEQ ID NO: 310283 - DNA, 25 bp, Artificial
  Probe
ggcgctgctgtcacctggagactgt

SEQ ID NO: 310284 - DNA, 25 bp, Artificial
  Probe
gcgcgcgcctggaactgcacttacg

SEQ ID NO: 310285 - DNA, 25 bp, Artificial
  Probe
cccgggcgctgctgtcacctggaga

SEQ ID NO: 310286 - DNA, 25 bp, Artificial
  Probe
taccacgaatttcgtgtagctgtat

SEQ ID NO: 310287 - DNA, 25 bp, Artificial
  Probe
atatgtatttattgtcgttactgcc

SEQ ID NO: 310288 - DNA, 25 bp, Artificial
  Probe
ttattgtcgttactgcctttggaag

SEQ ID NO: 310289 - DNA, 25 bp, Artificial
  Probe
tttacagaaggcagcccttttgata

SEQ ID NO: 310290 - DNA, 25 bp, Artificial
  Probe
tgtaccacgaatttcgtgtagctgt

SEQ ID NO: 310291 - DNA, 25 bp, Artificial
  Probe
agaaggcagcccttttgataacatt

SEQ ID NO: 310292 - DNA, 25 bp, Artificial
  Probe
gcccttttgataacattgctgcaaa

SEQ ID NO: 310293 - DNA, 25 bp, Artificial
  Probe
cagcccttttgataacattgctgca

SEQ ID NO: 310294 - DNA, 25 bp, Artificial
  Probe
ttactgcctttggaagaaacagggg

SEQ ID NO: 310295 - DNA, 25 bp, Artificial
  Probe
gtcgttactgcctttggaagaaaca

SEQ ID NO: 310296 - DNA, 25 bp, Artificial
  Probe
tgcctttggaagaaacaggggatca

SEQ ID NO: 310297 - DNA, 25 bp, Artificial
  Probe
cacgaatttcgtgtagctgtattca

SEQ ID NO: 310298 - DNA, 25 bp, Artificial
  Probe
atgtgtaccacgaatttcgtgtagc

SEQ ID NO: 310299 - DNA, 25 bp, Artificial
  Probe
atactcgaagcttcaagggatatat

SEQ ID NO: 310300 - DNA, 25 bp, Artificial
  Probe
actgcctttggaagaaacaggggat

SEQ ID NO: 310301 - DNA, 25 bp, Artificial
  Probe
atttattgtcgttactgcctttgga

SEQ ID NO: 310302 - DNA, 25 bp, Artificial
  Probe
aatttcgtgtagctgtattcagatc

SEQ ID NO: 310303 - DNA, 25 bp, Artificial
  Probe
caaatactcgaagcttcaagggata

SEQ ID NO: 310304 - DNA, 25 bp, Artificial
  Probe
taacattgctgcaaagtgcaaatac

SEQ ID NO: 310305 - DNA, 25 bp, Artificial
  Probe
cctgtttacagaaggcagccctttt

SEQ ID NO: 310306 - DNA, 25 bp, Artificial
  Probe
ccttttgataacattgctgcaaagt

SEQ ID NO: 310307 - DNA, 25 bp, Artificial
  Probe
gtgtaccacgaatttcgtgtagctg

SEQ ID NO: 310308 - DNA, 25 bp, Artificial
  Probe
gataacattgctgcaaagtgcaaat

SEQ ID NO: 310309 - DNA, 25 bp, Artificial
  Probe
cattgctgcaaagtgcaaatactcg

SEQ ID NO: 310310 - DNA, 25 bp, Artificial
  Probe
ctgcctttggaagaaacaggggatc

SEQ ID NO: 310311 - DNA, 25 bp, Artificial
  Probe
atttcgtgtagctgtattcagatcg

SEQ ID NO: 310312 - DNA, 25 bp, Artificial
  Probe
attgctgcaaagtgcaaatactcga

SEQ ID NO: 310313 - DNA, 25 bp, Artificial
  Probe
ggatcaaagttcctgttcaccttat

SEQ ID NO: 310314 - DNA, 25 bp, Artificial
  Probe
aaggcagcccttttgataacattgc

SEQ ID NO: 310315 - DNA, 25 bp, Artificial
  Probe
aacattgctgcaaagtgcaaatact

SEQ ID NO: 310316 - DNA, 25 bp, Artificial
  Probe
cgaatttcgtgtagctgtattcaga

SEQ ID NO: 310317 - DNA, 25 bp, Artificial
  Probe
tgataacattgctgcaaagtgcaaa

SEQ ID NO: 310318 - DNA, 25 bp, Artificial
  Probe
ttgataacattgctgcaaagtgcaa

SEQ ID NO: 310319 - DNA, 25 bp, Artificial
  Probe
aagtgcaaatactcgaagcttcaag

SEQ ID NO: 310320 - DNA, 25 bp, Artificial
  Probe
tattgtcgttactgcctttggaaga

SEQ ID NO: 310321 - DNA, 25 bp, Artificial
  Probe
agtgcaaatactcgaagcttcaagg

SEQ ID NO: 310322 - DNA, 25 bp, Artificial
  Probe
actcgaagcttcaagggatatatgt

SEQ ID NO: 310323 - DNA, 25 bp, Artificial
  Probe
accacgaatttcgtgtagctgtatt

SEQ ID NO: 310324 - DNA, 25 bp, Artificial
  Probe
ttcgtgtagctgtattcagatcgta

SEQ ID NO: 310325 - DNA, 25 bp, Artificial
  Probe
aaatgtgtaccacgaatttcgtgta

SEQ ID NO: 310326 - DNA, 25 bp, Artificial
  Probe
aatactcgaagcttcaagggatata

SEQ ID NO: 310327 - DNA, 25 bp, Artificial
  Probe
ttttgataacattgctgcaaagtgc

SEQ ID NO: 310328 - DNA, 25 bp, Artificial
  Probe
ggcagcccttttgataacattgctg

SEQ ID NO: 310329 - DNA, 25 bp, Artificial
  Probe
cgttactgcctttggaagaaacagg

SEQ ID NO: 310330 - DNA, 25 bp, Artificial
  Probe
gggatcaaagttcctgttcacctta

SEQ ID NO: 310331 - DNA, 25 bp, Artificial
  Probe
ctcgaagcttcaagggatatatgta

SEQ ID NO: 310332 - DNA, 25 bp, Artificial
  Probe
tgagatcacagatgaacctccctac

SEQ ID NO: 310333 - DNA, 25 bp, Artificial
  Probe
ctcagtgcaggttgtgacaatgtgg

SEQ ID NO: 310334 - DNA, 25 bp, Artificial
  Probe
gtccgaatcatcgatcccaggcggg

SEQ ID NO: 310335 - DNA, 25 bp, Artificial
  Probe
gggtgattccagcatccggtacttt

SEQ ID NO: 310336 - DNA, 25 bp, Artificial
  Probe
catctttctggctgatgggaaggtg

SEQ ID NO: 310337 - DNA, 25 bp, Artificial
  Probe
ctgcatgaacgcaagtgtgagccca

SEQ ID NO: 310338 - DNA, 25 bp, Artificial
  Probe
tttgaggagcccatggccctgcagg

SEQ ID NO: 310339 - DNA, 25 bp, Artificial
  Probe
caacggcagcctcttttgcacagct

SEQ ID NO: 310340 - DNA, 25 bp, Artificial
  Probe
gatccaatcctcatctcactacggg

SEQ ID NO: 310341 - DNA, 25 bp, Artificial
  Probe
tactgcctttctatgacccggacac

SEQ ID NO: 310342 - DNA, 25 bp, Artificial
  Probe
tggcactctgggacccagaaaactt

SEQ ID NO: 310343 - DNA, 25 bp, Artificial
  Probe
cggtactttgagatcacagatgaac

SEQ ID NO: 310344 - DNA, 25 bp, Artificial
  Probe
acccagaaaactttgaggagcccat

SEQ ID NO: 310345 - DNA, 25 bp, Artificial
  Probe
ggacaccagtgtggtctacgtctgt

SEQ ID NO: 310346 - DNA, 25 bp, Artificial
  Probe
gcccatggccctgcaggagctggat

SEQ ID NO: 310347 - DNA, 25 bp, Artificial
  Probe
tgcctttctatgacccggacaccag

SEQ ID NO: 310348 - DNA, 25 bp, Artificial
  Probe
cctcatctcactacgggaagcctat

SEQ ID NO: 310349 - DNA, 25 bp, Artificial
  Probe
ttatctggaatgtgggcactgcaga

SEQ ID NO: 310350 - DNA, 25 bp, Artificial
  Probe
aaattgccaggttctacaaactgca

SEQ ID NO: 310351 - DNA, 25 bp, Artificial
  Probe
tgccaggttctacaaactgcatgaa

SEQ ID NO: 310352 - DNA, 25 bp, Artificial
  Probe
tggtgcttatctggaatgtgggcac

SEQ ID NO: 310353 - DNA, 25 bp, Artificial
  Probe
caaactgcatgaacgcaagtgtgag

SEQ ID NO: 310354 - DNA, 25 bp, Artificial
  Probe
gcatgaacgcaagtgtgagcccata

SEQ ID NO: 310355 - DNA, 25 bp, Artificial
  Probe
caactggcactctgggacccagaaa

SEQ ID NO: 310356 - DNA, 25 bp, Artificial
  Probe
gtgattccagcatccggtactttga

SEQ ID NO: 310357 - DNA, 25 bp, Artificial
  Probe
gaaatgtgcttctcagtgcaggttg

SEQ ID NO: 310358 - DNA, 25 bp, Artificial
  Probe
atggggctctactgcctttctatga

SEQ ID NO: 310359 - DNA, 25 bp, Artificial
  Probe
tccagcatccggtactttgagatca

SEQ ID NO: 310360 - DNA, 25 bp, Artificial
  Probe
caagagtgtccgaatcatcgatccc

SEQ ID NO: 310361 - DNA, 25 bp, Artificial
  Probe
gtactttgagatcacagatgaacct

SEQ ID NO: 310362 - DNA, 25 bp, Artificial
  Probe
tctatgacccggacaccagtgtggt

SEQ ID NO: 310363 - DNA, 25 bp, Artificial
  Probe
ggccctgcaggagctggattcaagc

SEQ ID NO: 310364 - DNA, 25 bp, Artificial
  Probe
actctgggacccagaaaactttgag

SEQ ID NO: 310365 - DNA, 25 bp, Artificial
  Probe
agcttgcaaggacaagagtgtccga

SEQ ID NO: 310366 - DNA, 25 bp, Artificial
  Probe
cccatgcgggccatctttctggctg

SEQ ID NO: 310367 - DNA, 25 bp, Artificial
  Probe
tactttgagatcacagatgaacctc

SEQ ID NO: 310368 - DNA, 25 bp, Artificial
  Probe
gagatcacagatgaacctccctaca

SEQ ID NO: 310369 - DNA, 25 bp, Artificial
  Probe
tgggacccagaaaactttgaggagc

SEQ ID NO: 310370 - DNA, 25 bp, Artificial
  Probe
acggcaactggcactctgggaccca

SEQ ID NO: 310371 - DNA, 25 bp, Artificial
  Probe
tgtgaaattgccaggttctacaaac

SEQ ID NO: 310372 - DNA, 25 bp, Artificial
  Probe
gggccatctttctggctgatgggaa

SEQ ID NO: 310373 - DNA, 25 bp, Artificial
  Probe
tctcactacgggaagcctatgtgcc

SEQ ID NO: 310374 - DNA, 25 bp, Artificial
  Probe
gacccagaaaactttgaggagccca

SEQ ID NO: 310375 - DNA, 25 bp, Artificial
  Probe
ctttctggctgatgggaaggtgttc

SEQ ID NO: 310376 - DNA, 25 bp, Artificial
  Probe
ggctctactgcctttctatgacccg

SEQ ID NO: 310377 - DNA, 25 bp, Artificial
  Probe
caatcctcatctcactacgggaagc

SEQ ID NO: 310378 - DNA, 25 bp, Artificial
  Probe
cgccggaaagatggtcctggcagac

SEQ ID NO: 310379 - DNA, 25 bp, Artificial
  Probe
ggaagccagctggtctggtgccaac

SEQ ID NO: 310380 - DNA, 25 bp, Artificial
  Probe
gagatctacaagctgttcctggcac

SEQ ID NO: 310381 - DNA, 25 bp, Artificial
  Probe
ccgagtggccctggagggttcttca

SEQ ID NO: 310382 - DNA, 25 bp, Artificial
  Probe
ctttttccagatcaaaatggaaatg

SEQ ID NO: 310383 - DNA, 25 bp, Artificial
  Probe
tcagtccaaggtcaaggagaaggca

SEQ ID NO: 310384 - DNA, 25 bp, Artificial
  Probe
agtatggggatcagtccaaggtcaa

SEQ ID NO: 310385 - DNA, 25 bp, Artificial
  Probe
ctgagacggggctgtttggcatcac

SEQ ID NO: 310386 - DNA, 25 bp, Artificial
  Probe
gaaatgctggccaaagctatcgagc

SEQ ID NO: 310387 - DNA, 25 bp, Artificial
  Probe
ctgggcccccagtcactgagagcat

SEQ ID NO: 310388 - DNA, 25 bp, Artificial
  Probe
attctgcggcagctggaagaagaag

SEQ ID NO: 310389 - DNA, 25 bp, Artificial
  Probe
ctccgatctataaagaaatgctggc

SEQ ID NO: 310390 - DNA, 25 bp, Artificial
  Probe
tctgggaagcctgtgaggatctgaa

SEQ ID NO: 310391 - DNA, 25 bp, Artificial
  Probe
gaagcagccaacaccgtggacatca

SEQ ID NO: 310392 - DNA, 25 bp, Artificial
  Probe
tcccatttatgagacgccacctacg

SEQ ID NO: 310393 - DNA, 25 bp, Artificial
  Probe
ccaccgctatgtgttggacgcggcg

SEQ ID NO: 310394 - DNA, 25 bp, Artificial
  Probe
tcacacgggaaggtgcagcctctgg

SEQ ID NO: 310395 - DNA, 25 bp, Artificial
  Probe
ctgccctgtcccttggcaggtttct

SEQ ID NO: 310396 - DNA, 25 bp, Artificial
  Probe
ctttcactgcctttcccttgcttgg

SEQ ID NO: 310397 - DNA, 25 bp, Artificial
  Probe
agtccaatggaatgggcgtgtgctc

SEQ ID NO: 310398 - DNA, 25 bp, Artificial
  Probe
tccgagtggccctggagggttcttc

SEQ ID NO: 310399 - DNA, 25 bp, Artificial
  Probe
agccaggtcagcacttggctcccag

SEQ ID NO: 310400 - DNA, 25 bp, Artificial
  Probe
ctgcccctgggaaagcctggcggaa

SEQ ID NO: 310401 - DNA, 25 bp, Artificial
  Probe
acatcaccgtgaaggggctgagaca

SEQ ID NO: 310402 - DNA, 25 bp, Artificial
  Probe
acaagctgttcctggcaccgggtgc

SEQ ID NO: 310403 - DNA, 25 bp, Artificial
  Probe
ccagtactttctcaagaaggaattc

SEQ ID NO: 310404 - DNA, 25 bp, Artificial
  Probe
agagctcgagaagcagccaacaccg

SEQ ID NO: 310405 - DNA, 25 bp, Artificial
  Probe
acccaagtgcattaggatgatattg

SEQ ID NO: 310406 - DNA, 25 bp, Artificial
  Probe
tggacgcggcgcagacccacattta

SEQ ID NO: 310407 - DNA, 25 bp, Artificial
  Probe
tcccttggcaggtttctgagacggg

SEQ ID NO: 310408 - DNA, 25 bp, Artificial
  Probe
ctcacctggccgtgtacacagggac

SEQ ID NO: 310409 - DNA, 25 bp, Artificial
  Probe
gaaagtagccaactttttccagatc

SEQ ID NO: 310410 - DNA, 25 bp, Artificial
  Probe
ggaaaccaccaagagaagctccacc

SEQ ID NO: 310411 - DNA, 25 bp, Artificial
  Probe
tggttgactcccaacggccaccttt

SEQ ID NO: 310412 - DNA, 25 bp, Artificial
  Probe
tgtacacagggacctgcgtgcctcc

SEQ ID NO: 310413 - DNA, 25 bp, Artificial
  Probe
ttatgagacgccacctacgctccag

SEQ ID NO: 310414 - DNA, 25 bp, Artificial
  Probe
atggaaatgcctacggacagtgggc

SEQ ID NO: 310415 - DNA, 25 bp, Artificial
  Probe
cagtcactgagagcatcgagacctc

SEQ ID NO: 310416 - DNA, 25 bp, Artificial
  Probe
gaaatctccgatctataaagaaatg

SEQ ID NO: 310417 - DNA, 25 bp, Artificial
  Probe
caagccctgtcattctgcggcagct

SEQ ID NO: 310418 - DNA, 25 bp, Artificial
  Probe
ccagaccacggaaaaggaagtcatc

SEQ ID NO: 310419 - DNA, 25 bp, Artificial
  Probe
tggacatcacccagccaggtcagca

SEQ ID NO: 310420 - DNA, 25 bp, Artificial
  Probe
gagaacctgggattctgggaagcct

SEQ ID NO: 310421 - DNA, 25 bp, Artificial
  Probe
agcctctgggggacatgggtcaaca

SEQ ID NO: 310422 - DNA, 25 bp, Artificial
  Probe
cgatggatcaacatagacggcaaaa

SEQ ID NO: 310423 - DNA, 25 bp, Artificial
  Probe
aagccagctggtctggtgccaaccc

SEQ ID NO: 310424 - DNA, 25 bp, Artificial
  Probe
acttaaccgcgtcaaattaacgctg

SEQ ID NO: 310425 - DNA, 25 bp, Artificial
  Probe
gcaggctgcgtgtggctcactagat

SEQ ID NO: 310426 - DNA, 25 bp, Artificial
  Probe
aaggttaacactaggctacagtgga

SEQ ID NO: 310427 - DNA, 25 bp, Artificial
  Probe
ccacatactcctttgtacagagatg

SEQ ID NO: 310428 - DNA, 25 bp, Artificial
  Probe
gcctaaacgctttgtcttctgttcc

SEQ ID NO: 310429 - DNA, 25 bp, Artificial
  Probe
gatgtctcttgacaaatcattcaag

SEQ ID NO: 310430 - DNA, 25 bp, Artificial
  Probe
ctaggctacagtggaatagtcattt

SEQ ID NO: 310431 - DNA, 25 bp, Artificial
  Probe
gctcccaggttgaaaagagattttt

SEQ ID NO: 310432 - DNA, 25 bp, Artificial
  Probe
gaagtacactacagaggttaaccta

SEQ ID NO: 310433 - DNA, 25 bp, Artificial
  Probe
atcaaagatactcaatgggagccct

SEQ ID NO: 310434 - DNA, 25 bp, Artificial
  Probe
tcctattttaactggaagttcttag

SEQ ID NO: 310435 - DNA, 25 bp, Artificial
  Probe
agaagactagcagctagcaagtgtg

SEQ ID NO: 310436 - DNA, 25 bp, Artificial
  Probe
cagctgtgtttctttctgagagaaa

SEQ ID NO: 310437 - DNA, 25 bp, Artificial
  Probe
tgttttcaggcgaggcagctcccag

SEQ ID NO: 310438 - DNA, 25 bp, Artificial
  Probe
tgcgacgctagtagaacaaacttaa

SEQ ID NO: 310439 - DNA, 25 bp, Artificial
  Probe
tcagacaggacacttaatgggagtg

SEQ ID NO: 310440 - DNA, 25 bp, Artificial
  Probe
atccccttggcctgttgttctgttt

SEQ ID NO: 310441 - DNA, 25 bp, Artificial
  Probe
ttgtgtctcccgatctactgtagag

SEQ ID NO: 310442 - DNA, 25 bp, Artificial
  Probe
agagagctgaaccttggccttcttc

SEQ ID NO: 310443 - DNA, 25 bp, Artificial
  Probe
attcaagactctcatctagaatgga

SEQ ID NO: 310444 - DNA, 25 bp, Artificial
  Probe
ctataagctgggtggatggtctcat

SEQ ID NO: 310445 - DNA, 25 bp, Artificial
  Probe
caccacctcttcgactgacagtgag

SEQ ID NO: 310446 - DNA, 25 bp, Artificial
  Probe
tcaagactctcatctagaatggagt

SEQ ID NO: 310447 - DNA, 25 bp, Artificial
  Probe
acatgaggatttcagacaggacact

SEQ ID NO: 310448 - DNA, 25 bp, Artificial
  Probe
aattaacgctgtttacccagtgtga

SEQ ID NO: 310449 - DNA, 25 bp, Artificial
  Probe
cacagtccagcaaatgatatctctg

SEQ ID NO: 310450 - DNA, 25 bp, Artificial
  Probe
agctgggtggatggtctcatttcca

SEQ ID NO: 310451 - DNA, 25 bp, Artificial
  Probe
acacaaaagagcagaggcggaatag

SEQ ID NO: 310452 - DNA, 25 bp, Artificial
  Probe
aatagtcatttaatggcaggctcaa

SEQ ID NO: 310453 - DNA, 25 bp, Artificial
  Probe
cttcgactgacagtgagatgtttag

SEQ ID NO: 310454 - DNA, 25 bp, Artificial
  Probe
agtggacatttctctctaggggcag

SEQ ID NO: 310455 - DNA, 25 bp, Artificial
  Probe
ataagtagacaggtggaaggccatc

SEQ ID NO: 310456 - DNA, 25 bp, Artificial
  Probe
atctactgtagagatactttctaga

SEQ ID NO: 310457 - DNA, 25 bp, Artificial
  Probe
agagtacagcccacattacaaagga

SEQ ID NO: 310458 - DNA, 25 bp, Artificial
  Probe
ccagctgtgtttctttctgagagaa

SEQ ID NO: 310459 - DNA, 25 bp, Artificial
  Probe
agcactcccttcttgggtactcttc

SEQ ID NO: 310460 - DNA, 25 bp, Artificial
  Probe
ggagtggacatttctctctaggggc

SEQ ID NO: 310461 - DNA, 25 bp, Artificial
  Probe
acccactgtggactgggaaacatca

SEQ ID NO: 310462 - DNA, 25 bp, Artificial
  Probe
actttctagagattctgagcgttac

SEQ ID NO: 310463 - DNA, 25 bp, Artificial
  Probe
cctgggtccagaatgtgggttatat

SEQ ID NO: 310464 - DNA, 25 bp, Artificial
  Probe
aaatgctgagtggacaccattatgc

SEQ ID NO: 310465 - DNA, 25 bp, Artificial
  Probe
tatccaatcaaagatactcaatggg

SEQ ID NO: 310466 - DNA, 25 bp, Artificial
  Probe
gcaggctcaatttgggaagtacact

SEQ ID NO: 310467 - DNA, 25 bp, Artificial
  Probe
attaaaagaagcactcccttcttgg

SEQ ID NO: 310468 - DNA, 25 bp, Artificial
  Probe
ccacattacaaaggaggattctttt

SEQ ID NO: 310469 - DNA, 25 bp, Artificial
  Probe
acaccattatgctaacagactgaag

SEQ ID NO: 310470 - DNA, 25 bp, Artificial
  Probe
cccgtccaattatgtgaagctgacc

SEQ ID NO: 310471 - DNA, 25 bp, Artificial
  Probe
ggatgtacgattacaccgcgcagaa

SEQ ID NO: 310472 - DNA, 25 bp, Artificial
  Probe
agtagaagaactcactgcagagcag

SEQ ID NO: 310473 - DNA, 25 bp, Artificial
  Probe
cttgatcatgtgacttgcagcatga

SEQ ID NO: 310474 - DNA, 25 bp, Artificial
  Probe
tgatgggagatgcagccttgatcat

SEQ ID NO: 310475 - DNA, 25 bp, Artificial
  Probe
atcccatatcactgcccagagggat

SEQ ID NO: 310476 - DNA, 25 bp, Artificial
  Probe
tgacgatgagctagccttcagcaaa

SEQ ID NO: 310477 - DNA, 25 bp, Artificial
  Probe
atcgaaatgtctgagtcctgcgtgc

SEQ ID NO: 310478 - DNA, 25 bp, Artificial
  Probe
agctgaccacagacatggaccccag

SEQ ID NO: 310479 - DNA, 25 bp, Artificial
  Probe
tcagtgggcaggttgggctcttccc

SEQ ID NO: 310480 - DNA, 25 bp, Artificial
  Probe
tcctgcgtgcagaggcagaagcaaa

SEQ ID NO: 310481 - DNA, 25 bp, Artificial
  Probe
ctgagtcctgcgtgcagaggcagaa

SEQ ID NO: 310482 - DNA, 25 bp, Artificial
  Probe
gatgtacgattacaccgcgcagaat

SEQ ID NO: 310483 - DNA, 25 bp, Artificial
  Probe
atgtctgagtcctgcgtgcagaggc

SEQ ID NO: 310484 - DNA, 25 bp, Artificial
  Probe
aatgacgatgagctagccttcagca

SEQ ID NO: 310485 - DNA, 25 bp, Artificial
  Probe
atgtgaagctgaccacagacatgga

SEQ ID NO: 310486 - DNA, 25 bp, Artificial
  Probe
cacctactgccttctgagtagaaga

SEQ ID NO: 310487 - DNA, 25 bp, Artificial
  Probe
ccgcgcagaatgacgatgagctagc

SEQ ID NO: 310488 - DNA, 25 bp, Artificial
  Probe
agccagcaatgaatcatatgttgtc

SEQ ID NO: 310489 - DNA, 25 bp, Artificial
  Probe
caggtgatcgggatgtacgattaca

SEQ ID NO: 310490 - DNA, 25 bp, Artificial
  Probe
aagctgaccacagacatggacccca

SEQ ID NO: 310491 - DNA, 25 bp, Artificial
  Probe
atgcagccttgatcatgtgacttgc

SEQ ID NO: 310492 - DNA, 25 bp, Artificial
  Probe
gatgagctagccttcagcaaaggcc

SEQ ID NO: 310493 - DNA, 25 bp, Artificial
  Probe
tgccttctgagtagaagaactcact

SEQ ID NO: 310494 - DNA, 25 bp, Artificial
  Probe
cctcaggcttgaaagccctcaaaga

SEQ ID NO: 310495 - DNA, 25 bp, Artificial
  Probe
aaattgcagaactgcacagggtggt

SEQ ID NO: 310496 - DNA, 25 bp, Artificial
  Probe
gcaaattgcagaactgcacagggtg

SEQ ID NO: 310497 - DNA, 25 bp, Artificial
  Probe
caacgtcctcagcaaggaggacccg

SEQ ID NO: 310498 - DNA, 25 bp, Artificial
  Probe
gtccaattatgtgaagctgaccaca

SEQ ID NO: 310499 - DNA, 25 bp, Artificial
  Probe
attacaccgcgcagaatgacgatga

SEQ ID NO: 310500 - DNA, 25 bp, Artificial
  Probe
gcttgaaagccctcaaagagaccca

SEQ ID NO: 310501 - DNA, 25 bp, Artificial
  Probe
tcagcaaaggccagatcatcaacgt

SEQ ID NO: 310502 - DNA, 25 bp, Artificial
  Probe
ggagatgcagccttgatcatgtgac

SEQ ID NO: 310503 - DNA, 25 bp, Artificial
  Probe
attatgtgaagctgaccacagacat

SEQ ID NO: 310504 - DNA, 25 bp, Artificial
  Probe
agccttcagcaaaggccagatcatc

SEQ ID NO: 310505 - DNA, 25 bp, Artificial
  Probe
gaaagccctcaaagagacccactat

SEQ ID NO: 310506 - DNA, 25 bp, Artificial
  Probe
cccagccagcaatgaatcatatgtt

SEQ ID NO: 310507 - DNA, 25 bp, Artificial
  Probe
tggtgggtccttttgtgctttccta

SEQ ID NO: 310508 - DNA, 25 bp, Artificial
  Probe
cttagttgcatgtgatcgaaatgtc

SEQ ID NO: 310509 - DNA, 25 bp, Artificial
  Probe
tcatgtgacttgcagcatgatcacc

SEQ ID NO: 310510 - DNA, 25 bp, Artificial
  Probe
ccctcaggcttgaaagccctcaaag

SEQ ID NO: 310511 - DNA, 25 bp, Artificial
  Probe
atatcactgcccagagggatgatgg

SEQ ID NO: 310512 - DNA, 25 bp, Artificial
  Probe
cagccagcagtgtgccaggtgatcg

SEQ ID NO: 310513 - DNA, 25 bp, Artificial
  Probe
atcactgcccagagggatgatggga

SEQ ID NO: 310514 - DNA, 25 bp, Artificial
  Probe
atgatcacctactgccttctgagta

SEQ ID NO: 310515 - DNA, 25 bp, Artificial
  Probe
actatcccatatcactgcccagagg

SEQ ID NO: 310516 - DNA, 25 bp, Artificial
  Probe
ccgggagctggtgcacattaagccg

SEQ ID NO: 310517 - DNA, 25 bp, Artificial
  Probe
cattaagccggaccagtccaatgtg

SEQ ID NO: 310518 - DNA, 25 bp, Artificial
  Probe
acatggaccagagacaagtacatgg

SEQ ID NO: 310519 - DNA, 25 bp, Artificial
  Probe
gcccagctggtgaaggacaggcact

SEQ ID NO: 310520 - DNA, 25 bp, Artificial
  Probe
atgagacataactccgtggtgctgg

SEQ ID NO: 310521 - DNA, 25 bp, Artificial
  Probe
gatgagtctgtgacaggcgctgaca

SEQ ID NO: 310522 - DNA, 25 bp, Artificial
  Probe
tgctgtgaagctcaatgaagtcatt

SEQ ID NO: 310523 - DNA, 25 bp, Artificial
  Probe
cccagctggtgaaggacaggcactc

SEQ ID NO: 310524 - DNA, 25 bp, Artificial
  Probe
gacatggaccagagacaagtacatg

SEQ ID NO: 310525 - DNA, 25 bp, Artificial
  Probe
cctacacctacgagcggacactgat

SEQ ID NO: 310526 - DNA, 25 bp, Artificial
  Probe
aacagtgacatctcggcctacacct

SEQ ID NO: 310527 - DNA, 25 bp, Artificial
  Probe
cccctgacaacttccgggagctggt

SEQ ID NO: 310528 - DNA, 25 bp, Artificial
  Probe
ggaagacctttatcgacactgtgcg

SEQ ID NO: 310529 - DNA, 25 bp, Artificial
  Probe
agtcattgtcacacgctcccatgat

SEQ ID NO: 310530 - DNA, 25 bp, Artificial
  Probe
atgcccctgacaacttccgggagct

SEQ ID NO: 310531 - DNA, 25 bp, Artificial
  Probe
gacactgatgatggagcagcggtct

SEQ ID NO: 310532 - DNA, 25 bp, Artificial
  Probe
ggatgcgcattttcaccgtggccca

SEQ ID NO: 310533 - DNA, 25 bp, Artificial
  Probe
tgaggacccacgtgcctggaagacc

SEQ ID NO: 310534 - DNA, 25 bp, Artificial
  Probe
atgatgcccgcctggtcctactgaa

SEQ ID NO: 310535 - DNA, 25 bp, Artificial
  Probe
gaagctcaatgaagtcattgtcaca

SEQ ID NO: 310536 - DNA, 25 bp, Artificial
  Probe
acgagcggacactgatgatggagca

SEQ ID NO: 310537 - DNA, 25 bp, Artificial
  Probe
aagctcaatgaagtcattgtcacac

SEQ ID NO: 310538 - DNA, 25 bp, Artificial
  Probe
gtacatggctgaaccctgggacccc

SEQ ID NO: 310539 - DNA, 25 bp, Artificial
  Probe
ccccctaagaacagtgagggtgatg

SEQ ID NO: 310540 - DNA, 25 bp, Artificial
  Probe
tggtgcacattaagccggaccagtc

SEQ ID NO: 310541 - DNA, 25 bp, Artificial
  Probe
tgcccgcctggtcctactgaacatg

SEQ ID NO: 310542 - DNA, 25 bp, Artificial
  Probe
agtgaggacccacgtgcctggaaga

SEQ ID NO: 310543 - DNA, 25 bp, Artificial
  Probe
ccggaccagtccaatgtgcggcgta

SEQ ID NO: 310544 - DNA, 25 bp, Artificial
  Probe
tgagtctgtgacaggcgctgacaag

SEQ ID NO: 310545 - DNA, 25 bp, Artificial
  Probe
acaacttccgggagctggtgcacat

SEQ ID NO: 310546 - DNA, 25 bp, Artificial
  Probe
cggtctcaaatgctgcgacagatga

SEQ ID NO: 310547 - DNA, 25 bp, Artificial
  Probe
caagtacatggctgaaccctgggac

SEQ ID NO: 310548 - DNA, 25 bp, Artificial
  Probe
tcctgctgcgccagcataaggtttg

SEQ ID NO: 310549 - DNA, 25 bp, Artificial
  Probe
cgccagcataaggtttggaagaagt

SEQ ID NO: 310550 - DNA, 25 bp, Artificial
  Probe
gcctggtcctactgaacatgcccgg

SEQ ID NO: 310551 - DNA, 25 bp, Artificial
  Probe
tgatgatggagcagcggtctcaaat

SEQ ID NO: 310552 - DNA, 25 bp, Artificial
  Probe
gcgtatgcacactgctgtgaagctc

SEQ ID NO: 310553 - DNA, 25 bp, Artificial
  Probe
tgccggatgcgcattttcaccgtgg

SEQ ID NO: 310554 - DNA, 25 bp, Artificial
  Probe
ggcctacacctacgagcggacactg

SEQ ID NO: 310555 - DNA, 25 bp, Artificial
  Probe
atggagcagcggtctcaaatgctgc

SEQ ID NO: 310556 - DNA, 25 bp, Artificial
  Probe
cgacagagtgaggacccacgtgcct

SEQ ID NO: 310557 - DNA, 25 bp, Artificial
  Probe
acctacgagcggacactgatgatgg

SEQ ID NO: 310558 - DNA, 25 bp, Artificial
  Probe
aatgaagtcattgtcacacgctccc

SEQ ID NO: 310559 - DNA, 25 bp, Artificial
  Probe
tgtgacaggcgctgacaagatccag

SEQ ID NO: 310560 - DNA, 25 bp, Artificial
  Probe
gatgcacaacagtgacatctcggcc

SEQ ID NO: 310561 - DNA, 25 bp, Artificial
  Probe
taactccgtggtgctgggctggccc

SEQ ID NO: 310562 - DNA, 25 bp, Artificial
  Probe
acgcatgtgagaaccgaatgtgagt

SEQ ID NO: 310563 - DNA, 25 bp, Artificial
  Probe
ccttaccgatgtggaagaaagaaat

SEQ ID NO: 310564 - DNA, 25 bp, Artificial
  Probe
ctgtgtgtttcatggctgtagcgcg

SEQ ID NO: 310565 - DNA, 25 bp, Artificial
  Probe
gaaaccttaccgatgtggaagaaag

SEQ ID NO: 310566 - DNA, 25 bp, Artificial
  Probe
ccccagagaagatgtgcgtgtgact

SEQ ID NO: 310567 - DNA, 25 bp, Artificial
  Probe
atcgtttcaccctgacgcatgtgag

SEQ ID NO: 310568 - DNA, 25 bp, Artificial
  Probe
ctgtggcctggttccctgtgtgttt

SEQ ID NO: 310569 - DNA, 25 bp, Artificial
  Probe
tctgctgcctttggattgcatttca

SEQ ID NO: 310570 - DNA, 25 bp, Artificial
  Probe
cagccttttgggtattcattgccac

SEQ ID NO: 310571 - DNA, 25 bp, Artificial
  Probe
ttgttgtcacttcatgataaaagtc

SEQ ID NO: 310572 - DNA, 25 bp, Artificial
  Probe
ggcctggttccctgtgtgtttcatg

SEQ ID NO: 310573 - DNA, 25 bp, Artificial
  Probe
gatgtgcgtgtgactgtaaaacatc

SEQ ID NO: 310574 - DNA, 25 bp, Artificial
  Probe
agcgcggctcttgtccactctgctg

SEQ ID NO: 310575 - DNA, 25 bp, Artificial
  Probe
aaactcagtgtggacaggcaaaagt

SEQ ID NO: 310576 - DNA, 25 bp, Artificial
  Probe
tttcatggctgtagcgcggctcttg

SEQ ID NO: 310577 - DNA, 25 bp, Artificial
  Probe
cgtttcaccctgacgcatgtgagaa

SEQ ID NO: 310578 - DNA, 25 bp, Artificial
  Probe
gcctcaaagggaaaccttaccgatg

SEQ ID NO: 310579 - DNA, 25 bp, Artificial
  Probe
ggctcttgtccactctgctgccttt

SEQ ID NO: 310580 - DNA, 25 bp, Artificial
  Probe
tgcccggcatctgtggcctggttcc

SEQ ID NO: 310581 - DNA, 25 bp, Artificial
  Probe
tgtccactctgctgcctttggattg

SEQ ID NO: 310582 - DNA, 25 bp, Artificial
  Probe
atactttaaaggattggcgacccat

SEQ ID NO: 310583 - DNA, 25 bp, Artificial
  Probe
gactgtaaaacatcgtttcaccctg

SEQ ID NO: 310584 - DNA, 25 bp, Artificial
  Probe
gtcacttcatgataaaagtcaattg

SEQ ID NO: 310585 - DNA, 25 bp, Artificial
  Probe
tcaccctgacgcatgtgagaaccga

SEQ ID NO: 310586 - DNA, 25 bp, Artificial
  Probe
gttgtcacttcatgataaaagtcaa

SEQ ID NO: 310587 - DNA, 25 bp, Artificial
  Probe
caccccagagaagatgtgcgtgtga

SEQ ID NO: 310588 - DNA, 25 bp, Artificial
  Probe
atgtgcgtgtgactgtaaaacatcg

SEQ ID NO: 310589 - DNA, 25 bp, Artificial
  Probe
tgtaaaacatcgtttcaccctgacg

SEQ ID NO: 310590 - DNA, 25 bp, Artificial
  Probe
ccttttgggtattcattgccacacc

SEQ ID NO: 310591 - DNA, 25 bp, Artificial
  Probe
cctttggattgcatttcaagttgga

SEQ ID NO: 310592 - DNA, 25 bp, Artificial
  Probe
attcatactttaaaggattggcgac

SEQ ID NO: 310593 - DNA, 25 bp, Artificial
  Probe
gtaaaacatcgtttcaccctgacgc

SEQ ID NO: 310594 - DNA, 25 bp, Artificial
  Probe
gattggcgacccatttataagggat

SEQ ID NO: 310595 - DNA, 25 bp, Artificial
  Probe
cgacccatttataagggatgtagga

SEQ ID NO: 310596 - DNA, 25 bp, Artificial
  Probe
aaaggattggcgacccatttataag

SEQ ID NO: 310597 - DNA, 25 bp, Artificial
  Probe
tcaaagggaaaccttaccgatgtgg

SEQ ID NO: 310598 - DNA, 25 bp, Artificial
  Probe
gcatctgtggcctggttccctgtgt

SEQ ID NO: 310599 - DNA, 25 bp, Artificial
  Probe
ctgtagcgcggctcttgtccactct

SEQ ID NO: 310600 - DNA, 25 bp, Artificial
  Probe
ttcttaaacttcaaactcagtgtgg

SEQ ID NO: 310601 - DNA, 25 bp, Artificial
  Probe
cagttgttgtcacttcatgataaaa

SEQ ID NO: 310602 - DNA, 25 bp, Artificial
  Probe
gtgtttcatggctgtagcgcggctc

SEQ ID NO: 310603 - DNA, 25 bp, Artificial
  Probe
cgtgcccggcatctgtggcctggtt

SEQ ID NO: 310604 - DNA, 25 bp, Artificial
  Probe
catttcaagttggaagttctgtttc

SEQ ID NO: 310605 - DNA, 25 bp, Artificial
  Probe
gatcaagactcctcaagcaaagact

SEQ ID NO: 310606 - DNA, 25 bp, Artificial
  Probe
cactctgctgcctttggattgcatt

SEQ ID NO: 310607 - DNA, 25 bp, Artificial
  Probe
ttagatcaagactcctcaagcaaag

SEQ ID NO: 310608 - DNA, 25 bp, Artificial
  Probe
gacagggccaaactctccctcagga

SEQ ID NO: 310609 - DNA, 25 bp, Artificial
  Probe
aacctgcggctgagcccgagactgt

SEQ ID NO: 310610 - DNA, 25 bp, Artificial
  Probe
cgatggcctaaggttcaggcctgag

SEQ ID NO: 310611 - DNA, 25 bp, Artificial
  Probe
aagagatcgccaacttcagtcccat

SEQ ID NO: 310612 - DNA, 25 bp, Artificial
  Probe
ggatgaagctgcagtgactgcccga

SEQ ID NO: 310613 - DNA, 25 bp, Artificial
  Probe
taaagagatgactgccttttacctt

SEQ ID NO: 310614 - DNA, 25 bp, Artificial
  Probe
tctacaaagagatcgccaacttcag

SEQ ID NO: 310615 - DNA, 25 bp, Artificial
  Probe
atgatgccttagagcgggagaatct

SEQ ID NO: 310616 - DNA, 25 bp, Artificial
  Probe
tacttctatctcagggtttatagga

SEQ ID NO: 310617 - DNA, 25 bp, Artificial
  Probe
agaattccagcctgctgtttggggg

SEQ ID NO: 310618 - DNA, 25 bp, Artificial
  Probe
agatcgccaacttcagtcccatagc

SEQ ID NO: 310619 - DNA, 25 bp, Artificial
  Probe
agctgcagtgactgcccgatctaac

SEQ ID NO: 310620 - DNA, 25 bp, Artificial
  Probe
tgcccgatctaacctgcggctgagc

SEQ ID NO: 310621 - DNA, 25 bp, Artificial
  Probe
agggaagaatcttccgatggcctaa

SEQ ID NO: 310622 - DNA, 25 bp, Artificial
  Probe
aatgtagtgtcctgagccgagggaa

SEQ ID NO: 310623 - DNA, 25 bp, Artificial
  Probe
gctgagggccttatagggaatgact

SEQ ID NO: 310624 - DNA, 25 bp, Artificial
  Probe
atattcacatgtagcccaggctgtc

SEQ ID NO: 310625 - DNA, 25 bp, Artificial
  Probe
ctgagggccttatagggaatgacta

SEQ ID NO: 310626 - DNA, 25 bp, Artificial
  Probe
ccaggctgtcctccatgtagccaaa

SEQ ID NO: 310627 - DNA, 25 bp, Artificial
  Probe
ctaacctgcggctgagcccgagact

SEQ ID NO: 310628 - DNA, 25 bp, Artificial
  Probe
caaacatgtgggtgattgcctggct

SEQ ID NO: 310629 - DNA, 25 bp, Artificial
  Probe
aatatattcacatgtagcccaggct

SEQ ID NO: 310630 - DNA, 25 bp, Artificial
  Probe
cgagactgtgacagggccaaactct

SEQ ID NO: 310631 - DNA, 25 bp, Artificial
  Probe
ttttgtcactacttctatctcaggg

SEQ ID NO: 310632 - DNA, 25 bp, Artificial
  Probe
agggagaattccagcctgctgtttg

SEQ ID NO: 310633 - DNA, 25 bp, Artificial
  Probe
cagaccaggatgagggcttaaagag

SEQ ID NO: 310634 - DNA, 25 bp, Artificial
  Probe
cccatagcccggaaggactcgaggc

SEQ ID NO: 310635 - DNA, 25 bp, Artificial
  Probe
agaatcttccgatggcctaaggttc

SEQ ID NO: 310636 - DNA, 25 bp, Artificial
  Probe
tgtcctgagccgagggaagaatctt

SEQ ID NO: 310637 - DNA, 25 bp, Artificial
  Probe
tgcagcacagaccaggatgagggct

SEQ ID NO: 310638 - DNA, 25 bp, Artificial
  Probe
tcagtcaggctgagggccttatagg

SEQ ID NO: 310639 - DNA, 25 bp, Artificial
  Probe
aacatgtgggtgattgcctggctgt

SEQ ID NO: 310640 - DNA, 25 bp, Artificial
  Probe
tcagcgtggacgaatggaaacaaca

SEQ ID NO: 310641 - DNA, 25 bp, Artificial
  Probe
cgggagaatctcagcgtggacgaat

SEQ ID NO: 310642 - DNA, 25 bp, Artificial
  Probe
cttcagtcccatagcccggaaggac

SEQ ID NO: 310643 - DNA, 25 bp, Artificial
  Probe
tgccttttacctttttggaggtcag

SEQ ID NO: 310644 - DNA, 25 bp, Artificial
  Probe
ctgagcccgagactgtgacagggcc

SEQ ID NO: 310645 - DNA, 25 bp, Artificial
  Probe
aacttcagtcccatagcccggaagg

SEQ ID NO: 310646 - DNA, 25 bp, Artificial
  Probe
tgattgcctggctgtggggtccctt

SEQ ID NO: 310647 - DNA, 25 bp, Artificial
  Probe
ggttcaggcctgagggagaattcca

SEQ ID NO: 310648 - DNA, 25 bp, Artificial
  Probe
aggttcaggcctgagggagaattcc

SEQ ID NO: 310649 - DNA, 25 bp, Artificial
  Probe
ccaaggatatgtcagtcaggctgag

SEQ ID NO: 310650 - DNA, 25 bp, Artificial
  Probe
atagcccggaaggactcgaggcgac

SEQ ID NO: 310651 - DNA, 25 bp, Artificial
  Probe
agtgactgcccgatctaacctgcgg

SEQ ID NO: 310652 - DNA, 25 bp, Artificial
  Probe
ctggctgtggggtcccttccttcct

SEQ ID NO: 310653 - DNA, 25 bp, Artificial
  Probe
gatatgtcagtcaggctgagggcct

SEQ ID NO: 310654 - DNA, 25 bp, Artificial
  Probe
ccatgtgtgcagttagtgtgagtgc

SEQ ID NO: 310655 - DNA, 25 bp, Artificial
  Probe
ctgacagaacatcttagaagagaaa

SEQ ID NO: 310656 - DNA, 25 bp, Artificial
  Probe
ctatcgcagagtgtccagtttttgt

SEQ ID NO: 310657 - DNA, 25 bp, Artificial
  Probe
gggcgatcccctgacagcatccttg

SEQ ID NO: 310658 - DNA, 25 bp, Artificial
  Probe
cccatttaacccaaatgtgagcggg

SEQ ID NO: 310659 - DNA, 25 bp, Artificial
  Probe
ctgcaatgtgccttttctgagattg

SEQ ID NO: 310660 - DNA, 25 bp, Artificial
  Probe
ttgtttcttccacatttggaagata

SEQ ID NO: 310661 - DNA, 25 bp, Artificial
  Probe
attgaaacggtcttgcagtgacgag

SEQ ID NO: 310662 - DNA, 25 bp, Artificial
  Probe
caagaatattctgcaatgtgccttt

SEQ ID NO: 310663 - DNA, 25 bp, Artificial
  Probe
atgtgggacattgtttgtttcttcc

SEQ ID NO: 310664 - DNA, 25 bp, Artificial
  Probe
agctgacagaacatcttagaagaga

SEQ ID NO: 310665 - DNA, 25 bp, Artificial
  Probe
ccaatgccccagttgtcagtcagag

SEQ ID NO: 310666 - DNA, 25 bp, Artificial
  Probe
agaagccgcggaagccttccttggc

SEQ ID NO: 310667 - DNA, 25 bp, Artificial
  Probe
aagatgcaggtctaagagggatctc

SEQ ID NO: 310668 - DNA, 25 bp, Artificial
  Probe
ggacattgtttgtttcttccacatt

SEQ ID NO: 310669 - DNA, 25 bp, Artificial
  Probe
tccagatgcttgagggaagcattgc

SEQ ID NO: 310670 - DNA, 25 bp, Artificial
  Probe
tctttgattaactgggatgatctca

SEQ ID NO: 310671 - DNA, 25 bp, Artificial
  Probe
cagttagtgtgagtgctatgcctga

SEQ ID NO: 310672 - DNA, 25 bp, Artificial
  Probe
gaagcattgctgctacaaatatttc

SEQ ID NO: 310673 - DNA, 25 bp, Artificial
  Probe
atccagatgcttgagggaagcattg

SEQ ID NO: 310674 - DNA, 25 bp, Artificial
  Probe
ccaacccttgcgtatttcccatgtg

SEQ ID NO: 310675 - DNA, 25 bp, Artificial
  Probe
agctttccgaagagcacatcctcct

SEQ ID NO: 310676 - DNA, 25 bp, Artificial
  Probe
ccttggtctcagtgagaaggaagat

SEQ ID NO: 310677 - DNA, 25 bp, Artificial
  Probe
aaacctattgaaacggtcttgcagt

SEQ ID NO: 310678 - DNA, 25 bp, Artificial
  Probe
aagagaaatttgcacaccaggaagc

SEQ ID NO: 310679 - DNA, 25 bp, Artificial
  Probe
ctgggtgccaaggatgactttatgg

SEQ ID NO: 310680 - DNA, 25 bp, Artificial
  Probe
acagacagttttgttgtaagcatca

SEQ ID NO: 310681 - DNA, 25 bp, Artificial
  Probe
cgcggcttgttgacgcggaagcttt

SEQ ID NO: 310682 - DNA, 25 bp, Artificial
  Probe
ctgcacgcggcttgttgacgcggaa

SEQ ID NO: 310683 - DNA, 25 bp, Artificial
  Probe
tcctcagcgtttttctaaagtgttt

SEQ ID NO: 310684 - DNA, 25 bp, Artificial
  Probe
ggcgatcccctgacagcatccttgt

SEQ ID NO: 310685 - DNA, 25 bp, Artificial
  Probe
atcaagaatattctgcaatgtgcct

SEQ ID NO: 310686 - DNA, 25 bp, Artificial
  Probe
agtttactgaggagccggtccccag

SEQ ID NO: 310687 - DNA, 25 bp, Artificial
  Probe
ggaagccttccttggcttctcctat

SEQ ID NO: 310688 - DNA, 25 bp, Artificial
  Probe
tcctatggactccttcctctgaaag

SEQ ID NO: 310689 - DNA, 25 bp, Artificial
  Probe
aggctgggtgccaaggatgacttta

SEQ ID NO: 310690 - DNA, 25 bp, Artificial
  Probe
tcctgcagaaggaccggaccaagag

SEQ ID NO: 310691 - DNA, 25 bp, Artificial
  Probe
cacagccagtgtgaaagaagccgcg

SEQ ID NO: 310692 - DNA, 25 bp, Artificial
  Probe
gacactacaatgtgggacattgttt

SEQ ID NO: 310693 - DNA, 25 bp, Artificial
  Probe
gagagtgccgcctgagacgcacctt

SEQ ID NO: 310694 - DNA, 25 bp, Artificial
  Probe
gtctgagctgtgatcaagaatattc

SEQ ID NO: 310695 - DNA, 25 bp, Artificial
  Probe
tgagcgggcccagtgaccttcggca

SEQ ID NO: 310696 - DNA, 25 bp, Artificial
  Probe
ggaagcttggcagtcccgcctgccg

SEQ ID NO: 310697 - DNA, 25 bp, Artificial
  Probe
atcctcctctcagtgagctagtgag

SEQ ID NO: 310698 - DNA, 25 bp, Artificial
  Probe
aacccaaatgtgagcgggcccagtg

SEQ ID NO: 310699 - DNA, 25 bp, Artificial
  Probe
gggaagcattgctgctacaaatatt

SEQ ID NO: 310700 - DNA, 25 bp, Artificial
  Probe
acgcggcagagctgcgcaagagcct

SEQ ID NO: 310701 - DNA, 25 bp, Artificial
  Probe
aggatcctgctgctggctgtcaagg

SEQ ID NO: 310702 - DNA, 25 bp, Artificial
  Probe
ggttaccgagcctgtctggcgcgcc

SEQ ID NO: 310703 - DNA, 25 bp, Artificial
  Probe
cacggaagcacctgggtctttggat

SEQ ID NO: 310704 - DNA, 25 bp, Artificial
  Probe
tgtgcgcttcctacgggagcagcct

SEQ ID NO: 310705 - DNA, 25 bp, Artificial
  Probe
actttggaggccatggtaggttcct

SEQ ID NO: 310706 - DNA, 25 bp, Artificial
  Probe
tcgctttcccgcagaacatgagact

SEQ ID NO: 310707 - DNA, 25 bp, Artificial
  Probe
ccttggactttggaggccatggtag

SEQ ID NO: 310708 - DNA, 25 bp, Artificial
  Probe
cgcgcgcggatcaatgagagcctga

SEQ ID NO: 310709 - DNA, 25 bp, Artificial
  Probe
ggagcagagacttcccgctattcga

SEQ ID NO: 310710 - DNA, 25 bp, Artificial
  Probe
tagtattgccgctgctaggagcaga

SEQ ID NO: 310711 - DNA, 25 bp, Artificial
  Probe
gagacttcccgctattcgaagttgg

SEQ ID NO: 310712 - DNA, 25 bp, Artificial
  Probe
ctaggagcagagacttcccgctatt

SEQ ID NO: 310713 - DNA, 25 bp, Artificial
  Probe
cgctgctaggagcagagacttcccg

SEQ ID NO: 310714 - DNA, 25 bp, Artificial
  Probe
ctttggaggccatggtaggttcctg

SEQ ID NO: 310715 - DNA, 25 bp, Artificial
  Probe
agagcacctgcgacagaggactgtc

SEQ ID NO: 310716 - DNA, 25 bp, Artificial
  Probe
cctgcgacagaggactgtcagtggc

SEQ ID NO: 310717 - DNA, 25 bp, Artificial
  Probe
tccaagcagccttggactttggagg

SEQ ID NO: 310718 - DNA, 25 bp, Artificial
  Probe
taaagggtctagtattgccgctgct

SEQ ID NO: 310719 - DNA, 25 bp, Artificial
  Probe
tgctagagcacctgcgacagaggac

SEQ ID NO: 310720 - DNA, 25 bp, Artificial
  Probe
taacagaccctgtgggcccgtcgct

SEQ ID NO: 310721 - DNA, 25 bp, Artificial
  Probe
tgctgctggctgtcaagggacctag

SEQ ID NO: 310722 - DNA, 25 bp, Artificial
  Probe
acgggagcagcctgcgtcagtatgt

SEQ ID NO: 310723 - DNA, 25 bp, Artificial
  Probe
agaacatgagactgcctagaggagt

SEQ ID NO: 310724 - DNA, 25 bp, Artificial
  Probe
agagcctgagccagctaaagggtct

SEQ ID NO: 310725 - DNA, 25 bp, Artificial
  Probe
gcaagagcctgaagccactgctgga

SEQ ID NO: 310726 - DNA, 25 bp, Artificial
  Probe
agggtctagtattgccgctgctagg

SEQ ID NO: 310727 - DNA, 25 bp, Artificial
  Probe
gcgcctgctagagcacctgcgacag

SEQ ID NO: 310728 - DNA, 25 bp, Artificial
  Probe
ccgctattcgaagttggagaaggcg

SEQ ID NO: 310729 - DNA, 25 bp, Artificial
  Probe
tgagcgcgcgcctgctagagcacct

SEQ ID NO: 310730 - DNA, 25 bp, Artificial
  Probe
gagcagcctgcgtcagtatgttcca

SEQ ID NO: 310731 - DNA, 25 bp, Artificial
  Probe
taccgagcctgtctggcgcgcctgg

SEQ ID NO: 310732 - DNA, 25 bp, Artificial
  Probe
atgactgtgcgcttcctacgggagc

SEQ ID NO: 310733 - DNA, 25 bp, Artificial
  Probe
acctcgagggttaccgagcctgtct

SEQ ID NO: 310734 - DNA, 25 bp, Artificial
  Probe
ggtaacagaccctgtgggcccgtcg

SEQ ID NO: 310735 - DNA, 25 bp, Artificial
  Probe
aagccactgctggagaagcgccggc

SEQ ID NO: 310736 - DNA, 25 bp, Artificial
  Probe
caccccgaggtaacagaccctgtgg

SEQ ID NO: 310737 - DNA, 25 bp, Artificial
  Probe
aggccatggtaggttcctggatgtt

SEQ ID NO: 310738 - DNA, 25 bp, Artificial
  Probe
gcttcctacgggagcagcctgcgtc

SEQ ID NO: 310739 - DNA, 25 bp, Artificial
  Probe
tggaaatgactgtgcgcttcctacg

SEQ ID NO: 310740 - DNA, 25 bp, Artificial
  Probe
tgagccagctaaagggtctagtatt

SEQ ID NO: 310741 - DNA, 25 bp, Artificial
  Probe
gcagagctgcgcaagagcctgaagc

SEQ ID NO: 310742 - DNA, 25 bp, Artificial
  Probe
tgcgcaagagcctgaagccactgct

SEQ ID NO: 310743 - DNA, 25 bp, Artificial
  Probe
ctacctcgagggttaccgagcctgt

SEQ ID NO: 310744 - DNA, 25 bp, Artificial
  Probe
ccagctaaagggtctagtattgccg

SEQ ID NO: 310745 - DNA, 25 bp, Artificial
  Probe
cggacatcctggaaatgactgtgcg

SEQ ID NO: 310746 - DNA, 25 bp, Artificial
  Probe
agccccatctcttccgaagggaatg

SEQ ID NO: 310747 - DNA, 25 bp, Artificial
  Probe
tacgtggcaagtgagggtttcccca

SEQ ID NO: 310748 - DNA, 25 bp, Artificial
  Probe
ccaggcatcagctgttcctggcaca

SEQ ID NO: 310749 - DNA, 25 bp, Artificial
  Probe
gttcaatggagctgtgagtgacgac

SEQ ID NO: 310750 - DNA, 25 bp, Artificial
  Probe
cgaagggaatgagctcctggtccag

SEQ ID NO: 310751 - DNA, 25 bp, Artificial
  Probe
catcacttgcccaaagcagtacaag

SEQ ID NO: 310752 - DNA, 25 bp, Artificial
  Probe
tttgcggagacaaggcccctagccc

SEQ ID NO: 310753 - DNA, 25 bp, Artificial
  Probe
cacctcaggcactgagcaccagttt

SEQ ID NO: 310754 - DNA, 25 bp, Artificial
  Probe
gcccaactggcctgagtcggattac

SEQ ID NO: 310755 - DNA, 25 bp, Artificial
  Probe
actgtcaccgtcagtctcctgggtg

SEQ ID NO: 310756 - DNA, 25 bp, Artificial
  Probe
ctaaccttcgggaagtttgatgtgg

SEQ ID NO: 310757 - DNA, 25 bp, Artificial
  Probe
gagggcctcactgtcaccgtcagtc

SEQ ID NO: 310758 - DNA, 25 bp, Artificial
  Probe
gaaattttgcggagacaaggcccct

SEQ ID NO: 310759 - DNA, 25 bp, Artificial
  Probe
cgatggcttctcagcctcctacagg

SEQ ID NO: 310760 - DNA, 25 bp, Artificial
  Probe
gtcgggccacctcaggcactgagca

SEQ ID NO: 310761 - DNA, 25 bp, Artificial
  Probe
caccttgcagagcaacttttgctcc

SEQ ID NO: 310762 - DNA, 25 bp, Artificial
  Probe
acccagtaagcctaaagtccagcct

SEQ ID NO: 310763 - DNA, 25 bp, Artificial
  Probe
ggcaactccagttgctccagatgcc

SEQ ID NO: 310764 - DNA, 25 bp, Artificial
  Probe
agtcccgctctgaccctaagacagg

SEQ ID NO: 310765 - DNA, 25 bp, Artificial
  Probe
gggacgaggattcctgctctggtac

SEQ ID NO: 310766 - DNA, 25 bp, Artificial
  Probe
ccaggcaactccagttgctccagat

SEQ ID NO: 310767 - DNA, 25 bp, Artificial
  Probe
cctgccacgggatgccgtggaaaag

SEQ ID NO: 310768 - DNA, 25 bp, Artificial
  Probe
caactggcctgagtcggattacccc

SEQ ID NO: 310769 - DNA, 25 bp, Artificial
  Probe
gaagtttgatgtggagcctgacaca

SEQ ID NO: 310770 - DNA, 25 bp, Artificial
  Probe
tgtgagtgacgactcaaagaggctg

SEQ ID NO: 310771 - DNA, 25 bp, Artificial
  Probe
gaaggcgcagggaaccctgaccacg

SEQ ID NO: 310772 - DNA, 25 bp, Artificial
  Probe
aaggcgcagggaaccctgaccacgc

SEQ ID NO: 310773 - DNA, 25 bp, Artificial
  Probe
ccctgccacgggatgccgtggaaaa

SEQ ID NO: 310774 - DNA, 25 bp, Artificial
  Probe
tcttccgaagggaatgagctcctgg

SEQ ID NO: 310775 - DNA, 25 bp, Artificial
  Probe
tgttcctggcacatcattgcaccct

SEQ ID NO: 310776 - DNA, 25 bp, Artificial
  Probe
aggcactgagcaccagttttgcggg

SEQ ID NO: 310777 - DNA, 25 bp, Artificial
  Probe
attgcaccctcaaaccaggtgatca

SEQ ID NO: 310778 - DNA, 25 bp, Artificial
  Probe
gctctgaccctaagacaggaactgg

SEQ ID NO: 310779 - DNA, 25 bp, Artificial
  Probe
ctgtgagtgacgactcaaagaggct

SEQ ID NO: 310780 - DNA, 25 bp, Artificial
  Probe
ggatgcacagcatggtccccagtcc

SEQ ID NO: 310781 - DNA, 25 bp, Artificial
  Probe
tgtcactgccgatggcttctcagcc

SEQ ID NO: 310782 - DNA, 25 bp, Artificial
  Probe
tgctacccaggcaactccagttgct

SEQ ID NO: 310783 - DNA, 25 bp, Artificial
  Probe
cggtcgggccacctcaggcactgag

SEQ ID NO: 310784 - DNA, 25 bp, Artificial
  Probe
aggatgcacagcatggtccccagtc

SEQ ID NO: 310785 - DNA, 25 bp, Artificial
  Probe
ggacgaggattcctgctctggtaca

SEQ ID NO: 310786 - DNA, 25 bp, Artificial
  Probe
tagagaaacctgagggctctcctgc

SEQ ID NO: 310787 - DNA, 25 bp, Artificial
  Probe
ctgtcagtgtgttcaatggagctgt

SEQ ID NO: 310788 - DNA, 25 bp, Artificial
  Probe
tatgtgccctgcaagcagatgcccc

SEQ ID NO: 310789 - DNA, 25 bp, Artificial
  Probe
cttcgggaagtttgatgtggagcct

SEQ ID NO: 310790 - DNA, 25 bp, Artificial
  Probe
gagggctctcctgctacccaggcaa

SEQ ID NO: 310791 - DNA, 25 bp, Artificial
  Probe
tcactgtcaccgtcagtctcctggg

SEQ ID NO: 310792 - DNA, 25 bp, Artificial
  Probe
cacatgtgatcctagtgaacctggc

SEQ ID NO: 310793 - DNA, 25 bp, Artificial
  Probe
catgtgatcctagtgaacctggcta

SEQ ID NO: 310794 - DNA, 25 bp, Artificial
  Probe
gtgatcctagtgaacctggctagaa

SEQ ID NO: 310795 - DNA, 25 bp, Artificial
  Probe
gactatgtccagagagaacactgac

SEQ ID NO: 310796 - DNA, 25 bp, Artificial
  Probe
acctggctagaatgctgattgaatc

SEQ ID NO: 310797 - DNA, 25 bp, Artificial
  Probe
tgaacctggctagaatgctgattga

SEQ ID NO: 310798 - DNA, 25 bp, Artificial
  Probe
aaggccacatgtgatcctagtgaac

SEQ ID NO: 310799 - DNA, 25 bp, Artificial
  Probe
tgtgatcctagtgaacctggctaga

SEQ ID NO: 310800 - DNA, 25 bp, Artificial
  Probe
agaagactatgtccagagagaacac

SEQ ID NO: 310801 - DNA, 25 bp, Artificial
  Probe
agactatgtccagagagaacactga

SEQ ID NO: 310802 - DNA, 25 bp, Artificial
  Probe
gaaaggccacatgtgatcctagtga

SEQ ID NO: 310803 - DNA, 25 bp, Artificial
  Probe
acagaagactatgtccagagagaac

SEQ ID NO: 310804 - DNA, 25 bp, Artificial
  Probe
cacagaagactatgtccagagagaa

SEQ ID NO: 310805 - DNA, 25 bp, Artificial
  Probe
cagaagactatgtccagagagaaca

SEQ ID NO: 310806 - DNA, 25 bp, Artificial
  Probe
ctggaaaggccacatgtgatcctag

SEQ ID NO: 310807 - DNA, 25 bp, Artificial
  Probe
tcacagaagactatgtccagagaga

SEQ ID NO: 310808 - DNA, 25 bp, Artificial
  Probe
gtcacagaagactatgtccagagag

SEQ ID NO: 310809 - DNA, 25 bp, Artificial
  Probe
gaagactatgtccagagagaacact

SEQ ID NO: 310810 - DNA, 25 bp, Artificial
  Probe
acatgtgatcctagtgaacctggct

SEQ ID NO: 310811 - DNA, 25 bp, Artificial
  Probe
gaacctggctagaatgctgattgaa

SEQ ID NO: 310812 - DNA, 25 bp, Artificial
  Probe
tcctagtgaacctggctagaatgct

SEQ ID NO: 310813 - DNA, 25 bp, Artificial
  Probe
ctatgtccagagagaacactgactt

SEQ ID NO: 310814 - DNA, 25 bp, Artificial
  Probe
agtgaacctggctagaatgctgatt

SEQ ID NO: 310815 - DNA, 25 bp, Artificial
  Probe
tggtgcttcctggatgtggtccctg

SEQ ID NO: 310816 - DNA, 25 bp, Artificial
  Probe
aagactatgtccagagagaacactg

SEQ ID NO: 310817 - DNA, 25 bp, Artificial
  Probe
actatgtccagagagaacactgact

SEQ ID NO: 310818 - DNA, 25 bp, Artificial
  Probe
cctggctagaatgctgattgaatct

SEQ ID NO: 310819 - DNA, 25 bp, Artificial
  Probe
ggccacatgtgatcctagtgaacct

SEQ ID NO: 310820 - DNA, 25 bp, Artificial
  Probe
tttatcaccgggtccccaactcaga

SEQ ID NO: 310821 - DNA, 25 bp, Artificial
  Probe
ggtgcttcctggatgtggtccctgc

SEQ ID NO: 310822 - DNA, 25 bp, Artificial
  Probe
aacctggctagaatgctgattgaat

SEQ ID NO: 310823 - DNA, 25 bp, Artificial
  Probe
gtgaacctggctagaatgctgattg

SEQ ID NO: 310824 - DNA, 25 bp, Artificial
  Probe
gatcctagtgaacctggctagaatg

SEQ ID NO: 310825 - DNA, 25 bp, Artificial
  Probe
ccacatgtgatcctagtgaacctgg

SEQ ID NO: 310826 - DNA, 25 bp, Artificial
  Probe
aaaggccacatgtgatcctagtgaa

SEQ ID NO: 310827 - DNA, 25 bp, Artificial
  Probe
atcctagtgaacctggctagaatgc

SEQ ID NO: 310828 - DNA, 25 bp, Artificial
  Probe
tgatcctagtgaacctggctagaat

SEQ ID NO: 310829 - DNA, 25 bp, Artificial
  Probe
tggaaaggccacatgtgatcctagt

SEQ ID NO: 310830 - DNA, 25 bp, Artificial
  Probe
atgtccagagagaacactgactttg

SEQ ID NO: 310831 - DNA, 25 bp, Artificial
  Probe
gccacatgtgatcctagtgaacctg

SEQ ID NO: 310832 - DNA, 25 bp, Artificial
  Probe
tgcttcctggatgtggtccctgcct

SEQ ID NO: 310833 - DNA, 25 bp, Artificial
  Probe
ggaaaggccacatgtgatcctagtg

SEQ ID NO: 310834 - DNA, 25 bp, Artificial
  Probe
aggccacatgtgatcctagtgaacc

SEQ ID NO: 310835 - DNA, 25 bp, Artificial
  Probe
gtgcttcctggatgtggtccctgcc

SEQ ID NO: 310836 - DNA, 25 bp, Artificial
  Probe
tatgtccagagagaacactgacttt

SEQ ID NO: 310837 - DNA, 25 bp, Artificial
  Probe
atgtgatcctagtgaacctggctag

SEQ ID NO: 310838 - DNA, 25 bp, Artificial
  Probe
cctgtgtgaccagattctcggtgac

SEQ ID NO: 310839 - DNA, 25 bp, Artificial
  Probe
agccatgattttgttacggcatcca

SEQ ID NO: 310840 - DNA, 25 bp, Artificial
  Probe
aggcaagttctcttcccctgtgtga

SEQ ID NO: 310841 - DNA, 25 bp, Artificial
  Probe
acaaggatctgcaggattttccgta

SEQ ID NO: 310842 - DNA, 25 bp, Artificial
  Probe
tttccgtagacaaagaggtctcgtg

SEQ ID NO: 310843 - DNA, 25 bp, Artificial
  Probe
catttagaaatgtcccgatatgtgg

SEQ ID NO: 310844 - DNA, 25 bp, Artificial
  Probe
ccagattctcggtgacacacagttg

SEQ ID NO: 310845 - DNA, 25 bp, Artificial
  Probe
tggatcaaatcctcatttagaaatg

SEQ ID NO: 310846 - DNA, 25 bp, Artificial
  Probe
ggcaagttctcttcccctgtgtgac

SEQ ID NO: 310847 - DNA, 25 bp, Artificial
  Probe
cgcctgcagccatgattttgttacg

SEQ ID NO: 310848 - DNA, 25 bp, Artificial
  Probe
gtcccgatatgtggatatatgtgtc

SEQ ID NO: 310849 - DNA, 25 bp, Artificial
  Probe
ttctcggtgacacacagttgtgcag

SEQ ID NO: 310850 - DNA, 25 bp, Artificial
  Probe
gtgtaacacaaggatctgcaggatt

SEQ ID NO: 310851 - DNA, 25 bp, Artificial
  Probe
gactcaccagctggatcaaatcctc

SEQ ID NO: 310852 - DNA, 25 bp, Artificial
  Probe
tcccgatatgtggatatatgtgtct

SEQ ID NO: 310853 - DNA, 25 bp, Artificial
  Probe
tctgcaggattttccgtagacaaag

SEQ ID NO: 310854 - DNA, 25 bp, Artificial
  Probe
aggatctgcaggattttccgtagac

SEQ ID NO: 310855 - DNA, 25 bp, Artificial
  Probe
gcttttgcctcctgctttgcagacc

SEQ ID NO: 310856 - DNA, 25 bp, Artificial
  Probe
attctcggtgacacacagttgtgca

SEQ ID NO: 310857 - DNA, 25 bp, Artificial
  Probe
ggtttaggcaagttctcttcccctg

SEQ ID NO: 310858 - DNA, 25 bp, Artificial
  Probe
ctgactcaccagctggatcaaatcc

SEQ ID NO: 310859 - DNA, 25 bp, Artificial
  Probe
ttttttagcttcactgatggcaaca

SEQ ID NO: 310860 - DNA, 25 bp, Artificial
  Probe
caaagaggtctcgtgtatttttgtc

SEQ ID NO: 310861 - DNA, 25 bp, Artificial
  Probe
ccgcctgcagccatgattttgttac

SEQ ID NO: 310862 - DNA, 25 bp, Artificial
  Probe
gtggcttttgcctcctgctttgcag

SEQ ID NO: 310863 - DNA, 25 bp, Artificial
  Probe
caggattttccgtagacaaagaggt

SEQ ID NO: 310864 - DNA, 25 bp, Artificial
  Probe
ctctggtggcttttgcctcctgctt

SEQ ID NO: 310865 - DNA, 25 bp, Artificial
  Probe
tagcttcactgatggcaacagagga

SEQ ID NO: 310866 - DNA, 25 bp, Artificial
  Probe
ttgcagaccgcctgcagccatgatt

SEQ ID NO: 310867 - DNA, 25 bp, Artificial
  Probe
ctgtgtgaccagattctcggtgaca

SEQ ID NO: 310868 - DNA, 25 bp, Artificial
  Probe
ccagctggatcaaatcctcatttag

SEQ ID NO: 310869 - DNA, 25 bp, Artificial
  Probe
cagaccgcctgcagccatgattttg

SEQ ID NO: 310870 - DNA, 25 bp, Artificial
  Probe
ttctcttcccctgtgtgaccagatt

SEQ ID NO: 310871 - DNA, 25 bp, Artificial
  Probe
gtgtgtaacacaaggatctgcagga

SEQ ID NO: 310872 - DNA, 25 bp, Artificial
  Probe
ctgtttctctggtggcttttgcctc

SEQ ID NO: 310873 - DNA, 25 bp, Artificial
  Probe
ggatcaaatcctcatttagaaatgt

SEQ ID NO: 310874 - DNA, 25 bp, Artificial
  Probe
ctcttcccctgtgtgaccagattct

SEQ ID NO: 310875 - DNA, 25 bp, Artificial
  Probe
cctcatttagaaatgtcccgatatg

SEQ ID NO: 310876 - DNA, 25 bp, Artificial
  Probe
gtgaccagattctcggtgacacaca

SEQ ID NO: 310877 - DNA, 25 bp, Artificial
  Probe
ccctgtgtgaccagattctcggtga

SEQ ID NO: 310878 - DNA, 25 bp, Artificial
  Probe
tgcagccatgattttgttacggcat

SEQ ID NO: 310879 - DNA, 25 bp, Artificial
  Probe
ttttgcctcctgctttgcagaccgc

SEQ ID NO: 310880 - DNA, 25 bp, Artificial
  Probe
ggattttccgtagacaaagaggtct

SEQ ID NO: 310881 - DNA, 25 bp, Artificial
  Probe
attttccgtagacaaagaggtctcg

SEQ ID NO: 310882 - DNA, 25 bp, Artificial
  Probe
gctggatcaaatcctcatttagaaa

SEQ ID NO: 310883 - DNA, 25 bp, Artificial
  Probe
ttaggcaagttctcttcccctgtgt

SEQ ID NO: 310884 - DNA, 25 bp, Artificial
  Probe
ctaccctgaaagcagctgccttcat

SEQ ID NO: 310885 - DNA, 25 bp, Artificial
  Probe
acccttcctgctgaaggaatggtgg

SEQ ID NO: 310886 - DNA, 25 bp, Artificial
  Probe
agagcctagacatgcctaccctgaa

SEQ ID NO: 310887 - DNA, 25 bp, Artificial
  Probe
accacctgtcttcctctgcaaagtg

SEQ ID NO: 310888 - DNA, 25 bp, Artificial
  Probe
ttcctgtgtgcctgttctgaagccc

SEQ ID NO: 310889 - DNA, 25 bp, Artificial
  Probe
tcttcctctgcaaagtgctcaggga

SEQ ID NO: 310890 - DNA, 25 bp, Artificial
  Probe
gcagcaggtgcctgtatacctagga

SEQ ID NO: 310891 - DNA, 25 bp, Artificial
  Probe
tgtctaagatagcatgggagcccct

SEQ ID NO: 310892 - DNA, 25 bp, Artificial
  Probe
tcacccttcctgctgaaggaatggt

SEQ ID NO: 310893 - DNA, 25 bp, Artificial
  Probe
gctgccttcattaccctttcctgtg

SEQ ID NO: 310894 - DNA, 25 bp, Artificial
  Probe
atgcctaccctgaaagcagctgcct

SEQ ID NO: 310895 - DNA, 25 bp, Artificial
  Probe
cctagacatgcctaccctgaaagca

SEQ ID NO: 310896 - DNA, 25 bp, Artificial
  Probe
ttgtctaagatagcatgggagcccc

SEQ ID NO: 310897 - DNA, 25 bp, Artificial
  Probe
tgcctgttctgaagcccgtaccttc

SEQ ID NO: 310898 - DNA, 25 bp, Artificial
  Probe
tctcaacagaagtgccgctgtaccg

SEQ ID NO: 310899 - DNA, 25 bp, Artificial
  Probe
agaggccagctgtccgcctgacttt

SEQ ID NO: 310900 - DNA, 25 bp, Artificial
  Probe
acatgcctaccctgaaagcagctgc

SEQ ID NO: 310901 - DNA, 25 bp, Artificial
  Probe
tcacaagttatgcagcaggtgcctg

SEQ ID NO: 310902 - DNA, 25 bp, Artificial
  Probe
gcctgtatacctaggaacactctca

SEQ ID NO: 310903 - DNA, 25 bp, Artificial
  Probe
tggcaagagcctagacatgcctacc

SEQ ID NO: 310904 - DNA, 25 bp, Artificial
  Probe
cctgaaagcagctgccttcattacc

SEQ ID NO: 310905 - DNA, 25 bp, Artificial
  Probe
tgcctaccctgaaagcagctgcctt

SEQ ID NO: 310906 - DNA, 25 bp, Artificial
  Probe
ctggcaagagcctagacatgcctac

SEQ ID NO: 310907 - DNA, 25 bp, Artificial
  Probe
cacaagttatgcagcaggtgcctgt

SEQ ID NO: 310908 - DNA, 25 bp, Artificial
  Probe
tcctctgcaaagtgctcagggaaat

SEQ ID NO: 310909 - DNA, 25 bp, Artificial
  Probe
aagtgccgctgtaccgagggcccag

SEQ ID NO: 310910 - DNA, 25 bp, Artificial
  Probe
ccctttcctgtgtgcctgttctgaa

SEQ ID NO: 310911 - DNA, 25 bp, Artificial
  Probe
ccttcacaagttatgcagcaggtgc

SEQ ID NO: 310912 - DNA, 25 bp, Artificial
  Probe
ctagacatgcctaccctgaaagcag

SEQ ID NO: 310913 - DNA, 25 bp, Artificial
  Probe
tctgcaaagtgctcagggaaatggc

SEQ ID NO: 310914 - DNA, 25 bp, Artificial
  Probe
cttcctgctgaaggaatggtggcgt

SEQ ID NO: 310915 - DNA, 25 bp, Artificial
  Probe
gaggctggcaagagcctagacatgc

SEQ ID NO: 310916 - DNA, 25 bp, Artificial
  Probe
ctcacccttcctgctgaaggaatgg

SEQ ID NO: 310917 - DNA, 25 bp, Artificial
  Probe
cagaggccagctgtccgcctgactt

SEQ ID NO: 310918 - DNA, 25 bp, Artificial
  Probe
tacctaggaacactctcaacagaag

SEQ ID NO: 310919 - DNA, 25 bp, Artificial
  Probe
gagaggctggcaagagcctagacat

SEQ ID NO: 310920 - DNA, 25 bp, Artificial
  Probe
tgcaaagtgctcagggaaatggcct

SEQ ID NO: 310921 - DNA, 25 bp, Artificial
  Probe
cagaagtgccgctgtaccgagggcc

SEQ ID NO: 310922 - DNA, 25 bp, Artificial
  Probe
aagtgctcagggaaatggccttcat

SEQ ID NO: 310923 - DNA, 25 bp, Artificial
  Probe
gtatacctaggaacactctcaacag

SEQ ID NO: 310924 - DNA, 25 bp, Artificial
  Probe
ccttcccatctttggagctaattgt

SEQ ID NO: 310925 - DNA, 25 bp, Artificial
  Probe
cacctgtcttcctctgcaaagtgct

SEQ ID NO: 310926 - DNA, 25 bp, Artificial
  Probe
tgaccacctgtcttcctctgcaaag

SEQ ID NO: 310927 - DNA, 25 bp, Artificial
  Probe
caggtgcctgtatacctaggaacac

SEQ ID NO: 310928 - DNA, 25 bp, Artificial
  Probe
gtgcctgtatacctaggaacactct

SEQ ID NO: 310929 - DNA, 25 bp, Artificial
  Probe
ttcattaccctttcctgtgtgcctg

SEQ ID NO: 310930 - DNA, 25 bp, Artificial
  Probe
aattcacagcctctctggacagggg

SEQ ID NO: 310931 - DNA, 25 bp, Artificial
  Probe
taattcacagcctctctggacaggg

SEQ ID NO: 310932 - DNA, 25 bp, Artificial
  Probe
aggggtcgcctagactggcttgccc

SEQ ID NO: 310933 - DNA, 25 bp, Artificial
  Probe
ggtcgcctagactggcttgcccttc

SEQ ID NO: 310934 - DNA, 25 bp, Artificial
  Probe
cggccagtgtgaaccgcaggtctgt

SEQ ID NO: 310935 - DNA, 25 bp, Artificial
  Probe
ggtctgacccctatacggagaccgc

SEQ ID NO: 310936 - DNA, 25 bp, Artificial
  Probe
gcccttcgtcccagggtctgaaaag

SEQ ID NO: 310937 - DNA, 25 bp, Artificial
  Probe
aacggccagtgtgaaccgcaggtct

SEQ ID NO: 310938 - DNA, 25 bp, Artificial
  Probe
ggactaaggccaggaacagggacca

SEQ ID NO: 310939 - DNA, 25 bp, Artificial
  Probe
ggcagtaattcacagcctctctgga

SEQ ID NO: 310940 - DNA, 25 bp, Artificial
  Probe
actggcttgcccttcgtcccagggt

SEQ ID NO: 310941 - DNA, 25 bp, Artificial
  Probe
cacagcctctctggacaggggtcgc

SEQ ID NO: 310942 - DNA, 25 bp, Artificial
  Probe
acaggggtcgcctagactggcttgc

SEQ ID NO: 310943 - DNA, 25 bp, Artificial
  Probe
agtgtgaaccgcaggtctgtggatc

SEQ ID NO: 310944 - DNA, 25 bp, Artificial
  Probe
gaacggccagtgtgaaccgcaggtc

SEQ ID NO: 310945 - DNA, 25 bp, Artificial
  Probe
agcctctctggacaggggtcgccta

SEQ ID NO: 310946 - DNA, 25 bp, Artificial
  Probe
tcaaagccaagcagcacgcctcttt

SEQ ID NO: 310947 - DNA, 25 bp, Artificial
  Probe
tctgaaaaggggtgccagagcaccc

SEQ ID NO: 310948 - DNA, 25 bp, Artificial
  Probe
tggcttgcccttcgtcccagggtct

SEQ ID NO: 310949 - DNA, 25 bp, Artificial
  Probe
ttagtccctgccagtacgccgtgga

SEQ ID NO: 310950 - DNA, 25 bp, Artificial
  Probe
gggtcgcctagactggcttgccctt

SEQ ID NO: 310951 - DNA, 25 bp, Artificial
  Probe
aagccaagcagcacgcctctttcag

SEQ ID NO: 310952 - DNA, 25 bp, Artificial
  Probe
ccgaagagggccttttccctcacag

SEQ ID NO: 310953 - DNA, 25 bp, Artificial
  Probe
gtgtgaaccgcaggtctgtggatcc

SEQ ID NO: 310954 - DNA, 25 bp, Artificial
  Probe
tctgacccctatacggagaccgcgg

SEQ ID NO: 310955 - DNA, 25 bp, Artificial
  Probe
tgtgaaccgcaggtctgtggatcca

SEQ ID NO: 310956 - DNA, 25 bp, Artificial
  Probe
gccagtacgccgtggaacggccagt

SEQ ID NO: 310957 - DNA, 25 bp, Artificial
  Probe
aaagccaagcagcacgcctctttca

SEQ ID NO: 310958 - DNA, 25 bp, Artificial
  Probe
gcctctctggacaggggtcgcctag

SEQ ID NO: 310959 - DNA, 25 bp, Artificial
  Probe
cagtacgccgtggaacggccagtgt

SEQ ID NO: 310960 - DNA, 25 bp, Artificial
  Probe
tggtctgacccctatacggagaccg

SEQ ID NO: 310961 - DNA, 25 bp, Artificial
  Probe
agtccctgccagtacgccgtggaac

SEQ ID NO: 310962 - DNA, 25 bp, Artificial
  Probe
gccctgggactaaggccaggaacag

SEQ ID NO: 310963 - DNA, 25 bp, Artificial
  Probe
ggccctgggactaaggccaggaaca

SEQ ID NO: 310964 - DNA, 25 bp, Artificial
  Probe
aaccgcaggtctgtggatccatccc

SEQ ID NO: 310965 - DNA, 25 bp, Artificial
  Probe
cgtggaacggccagtgtgaaccgca

SEQ ID NO: 310966 - DNA, 25 bp, Artificial
  Probe
ctaaggccaggaacagggaccagct

SEQ ID NO: 310967 - DNA, 25 bp, Artificial
  Probe
gtccctgccagtacgccgtggaacg

SEQ ID NO: 310968 - DNA, 25 bp, Artificial
  Probe
gcagtaattcacagcctctctggac

SEQ ID NO: 310969 - DNA, 25 bp, Artificial
  Probe
attcacagcctctctggacaggggt

SEQ ID NO: 310970 - DNA, 25 bp, Artificial
  Probe
tcccagggtctgaaaaggggtgcca

SEQ ID NO: 310971 - DNA, 25 bp, Artificial
  Probe
ggggcagtgtcctgcccttacgcct

SEQ ID NO: 310972 - DNA, 25 bp, Artificial
  Probe
ggggtcgcctagactggcttgccct

SEQ ID NO: 310973 - DNA, 25 bp, Artificial
  Probe
gcttgcccttcgtcccagggtctga

SEQ ID NO: 310974 - DNA, 25 bp, Artificial
  Probe
gggcagtaattcacagcctctctgg

SEQ ID NO: 310975 - DNA, 25 bp, Artificial
  Probe
cgaagagggccttttccctcacagc

SEQ ID NO: 310976 - DNA, 25 bp, Artificial
  Probe
ctctctaacacagaggtcattgaat

SEQ ID NO: 310977 - DNA, 25 bp, Artificial
  Probe
ttattctttgggagatctttaccta

SEQ ID NO: 310978 - DNA, 25 bp, Artificial
  Probe
aagcgtttatactctgttgcctcct

SEQ ID NO: 310979 - DNA, 25 bp, Artificial
  Probe
aggagatctacaaaatcctccatgc

SEQ ID NO: 310980 - DNA, 25 bp, Artificial
  Probe
acccaaggccgtgtcttggagagac

SEQ ID NO: 310981 - DNA, 25 bp, Artificial
  Probe
ctgcccaaaagaagtatatgatgtc

SEQ ID NO: 310982 - DNA, 25 bp, Artificial
  Probe
cagctctctaacacagaggtcattg

SEQ ID NO: 310983 - DNA, 25 bp, Artificial
  Probe
aggccgtgtcttggagagaccccga

SEQ ID NO: 310984 - DNA, 25 bp, Artificial
  Probe
tattctttgggagatctttacctat

SEQ ID NO: 310985 - DNA, 25 bp, Artificial
  Probe
ggccaagcgtttatactctgttgcc

SEQ ID NO: 310986 - DNA, 25 bp, Artificial
  Probe
tctgcccaaaagaagtatatgatgt

SEQ ID NO: 310987 - DNA, 25 bp, Artificial
  Probe
gagagaccccgagtctgcccaaaag

SEQ ID NO: 310988 - DNA, 25 bp, Artificial
  Probe
caaggccgtgtcttggagagacccc

SEQ ID NO: 310989 - DNA, 25 bp, Artificial
  Probe
acctgaaagcatcatgtaccggaag

SEQ ID NO: 310990 - DNA, 25 bp, Artificial
  Probe
gagtctgcccaaaagaagtatatga

SEQ ID NO: 310991 - DNA, 25 bp, Artificial
  Probe
gtctgcccaaaagaagtatatgatg

SEQ ID NO: 310992 - DNA, 25 bp, Artificial
  Probe
gagaccccgagtctgcccaaaagaa

SEQ ID NO: 310993 - DNA, 25 bp, Artificial
  Probe
tccagctctctaacacagaggtcat

SEQ ID NO: 310994 - DNA, 25 bp, Artificial
  Probe
tacaaaatcctccatgctttgggga

SEQ ID NO: 310995 - DNA, 25 bp, Artificial
  Probe
gactggtggccaagcgtttatactc

SEQ ID NO: 310996 - DNA, 25 bp, Artificial
  Probe
agctctctaacacagaggtcattga

SEQ ID NO: 310997 - DNA, 25 bp, Artificial
  Probe
tgtcttggagagaccccgagtctgc

SEQ ID NO: 310998 - DNA, 25 bp, Artificial
  Probe
ccgtgtcttggagagaccccgagtc

SEQ ID NO: 310999 - DNA, 25 bp, Artificial
  Probe
cgagtctgcccaaaagaagtatatg

SEQ ID NO: 311000 - DNA, 25 bp, Artificial
  Probe
gcgtttatactctgttgcctcctct

SEQ ID NO: 311001 - DNA, 25 bp, Artificial
  Probe
ctacaaaatcctccatgctttgggg

SEQ ID NO: 311002 - DNA, 25 bp, Artificial
  Probe
agtgcctgctacacatacaacactg

SEQ ID NO: 311003 - DNA, 25 bp, Artificial
  Probe
cacccaaggccgtgtcttggagaga

SEQ ID NO: 311004 - DNA, 25 bp, Artificial
  Probe
tctacaaaatcctccatgctttggg

SEQ ID NO: 311005 - DNA, 25 bp, Artificial
  Probe
tttcgtccatctttgaccgaaacga

SEQ ID NO: 311006 - DNA, 25 bp, Artificial
  Probe
ctacctggacattcttggctagtgg

SEQ ID NO: 311007 - DNA, 25 bp, Artificial
  Probe
ttcgtccatctttgaccgaaacgaa

SEQ ID NO: 311008 - DNA, 25 bp, Artificial
  Probe
atgcatcacccaaggccgtgtcttg

SEQ ID NO: 311009 - DNA, 25 bp, Artificial
  Probe
gccaagcgtttatactctgttgcct

SEQ ID NO: 311010 - DNA, 25 bp, Artificial
  Probe
ttccagctctctaacacagaggtca

SEQ ID NO: 311011 - DNA, 25 bp, Artificial
  Probe
tgactggtggccaagcgtttatact

SEQ ID NO: 311012 - DNA, 25 bp, Artificial
  Probe
tgaaagcatcatgtaccggaagttt

SEQ ID NO: 311013 - DNA, 25 bp, Artificial
  Probe
agagaccccgagtctgcccaaaaga

SEQ ID NO: 311014 - DNA, 25 bp, Artificial
  Probe
gccgtgtcttggagagaccccgagt

SEQ ID NO: 311015 - DNA, 25 bp, Artificial
  Probe
aaggccgtgtcttggagagaccccg

SEQ ID NO: 311016 - DNA, 25 bp, Artificial
  Probe
cgtgtcttggagagaccccgagtct

SEQ ID NO: 311017 - DNA, 25 bp, Artificial
  Probe
ccagctctctaacacagaggtcatt

SEQ ID NO: 311018 - DNA, 25 bp, Artificial
  Probe
cgtccatctttgaccgaaacgaaca

SEQ ID NO: 311019 - DNA, 25 bp, Artificial
  Probe
ggtggccaagcgtttatactctgtt

SEQ ID NO: 311020 - DNA, 25 bp, Artificial
  Probe
tcgtccatctttgaccgaaacgaac

SEQ ID NO: 311021 - DNA, 25 bp, Artificial
  Probe
ggagatctacaaaatcctccatgct

SEQ ID NO: 311022 - DNA, 25 bp, Artificial
  Probe
tgggaccttcatggaggtcctagcc

SEQ ID NO: 311023 - DNA, 25 bp, Artificial
  Probe
tgtacaagactacatgcaatgggag

SEQ ID NO: 311024 - DNA, 25 bp, Artificial
  Probe
ccagaggactagctgactttgccaa

SEQ ID NO: 311025 - DNA, 25 bp, Artificial
  Probe
ggaccttcatggaggtcctagcctt

SEQ ID NO: 311026 - DNA, 25 bp, Artificial
  Probe
gtacaagactacatgcaatgggagg

SEQ ID NO: 311027 - DNA, 25 bp, Artificial
  Probe
cagaggactagctgactttgccaag

SEQ ID NO: 311028 - DNA, 25 bp, Artificial
  Probe
gactagctgactttgccaaggggtg

SEQ ID NO: 311029 - DNA, 25 bp, Artificial
  Probe
tcatggaggtcctagcctttcttag

SEQ ID NO: 311030 - DNA, 25 bp, Artificial
  Probe
ggcctgggaccttcatggaggtcct

SEQ ID NO: 311031 - DNA, 25 bp, Artificial
  Probe
tggcctgggaccttcatggaggtcc

SEQ ID NO: 311032 - DNA, 25 bp, Artificial
  Probe
gtcccgggtgtacaagactacatgc

SEQ ID NO: 311033 - DNA, 25 bp, Artificial
  Probe
catggaggtcctagcctttcttagg

SEQ ID NO: 311034 - DNA, 25 bp, Artificial
  Probe
agaggactagctgactttgccaagg

SEQ ID NO: 311035 - DNA, 25 bp, Artificial
  Probe
gaggactagctgactttgccaaggg

SEQ ID NO: 311036 - DNA, 25 bp, Artificial
  Probe
actagctgactttgccaaggggtgc

SEQ ID NO: 311037 - DNA, 25 bp, Artificial
  Probe
caagactacatgcaatgggaggttt

SEQ ID NO: 311038 - DNA, 25 bp, Artificial
  Probe
tacaagactacatgcaatgggaggt

SEQ ID NO: 311039 - DNA, 25 bp, Artificial
  Probe
ttcatggaggtcctagcctttctta

SEQ ID NO: 311040 - DNA, 25 bp, Artificial
  Probe
gcctgggaccttcatggaggtccta

SEQ ID NO: 311041 - DNA, 25 bp, Artificial
  Probe
accttcatggaggtcctagcctttc

SEQ ID NO: 311042 - DNA, 25 bp, Artificial
  Probe
ggactagctgactttgccaaggggt

SEQ ID NO: 311043 - DNA, 25 bp, Artificial
  Probe
aggtcctagcctttcttaggctgca

SEQ ID NO: 311044 - DNA, 25 bp, Artificial
  Probe
tcccgggtgtacaagactacatgca

SEQ ID NO: 311045 - DNA, 25 bp, Artificial
  Probe
ccttcatggaggtcctagcctttct

SEQ ID NO: 311046 - DNA, 25 bp, Artificial
  Probe
gggaccttcatggaggtcctagcct

SEQ ID NO: 311047 - DNA, 25 bp, Artificial
  Probe
aggactagctgactttgccaagggg

SEQ ID NO: 311048 - DNA, 25 bp, Artificial
  Probe
cttcatggaggtcctagcctttctt

SEQ ID NO: 311049 - DNA, 25 bp, Artificial
  Probe
acaagactacatgcaatgggaggtt

SEQ ID NO: 311050 - DNA, 25 bp, Artificial
  Probe
gaccttcatggaggtcctagccttt

SEQ ID NO: 311051 - DNA, 25 bp, Artificial
  Probe
gaggtcctagcctttcttaggctgc

SEQ ID NO: 311052 - DNA, 25 bp, Artificial
  Probe
aagattccaccttcaggcctacaga

SEQ ID NO: 311053 - DNA, 25 bp, Artificial
  Probe
gtgtacaagactacatgcaatggga

SEQ ID NO: 311054 - DNA, 25 bp, Artificial
  Probe
ggcctcagttttaaccatgattcca

SEQ ID NO: 311055 - DNA, 25 bp, Artificial
  Probe
cagtcctcagagtgaccacactctt

SEQ ID NO: 311056 - DNA, 25 bp, Artificial
  Probe
tgggaaaccctaaggatctgagccc

SEQ ID NO: 311057 - DNA, 25 bp, Artificial
  Probe
aggcagcccagcaagagggacccca

SEQ ID NO: 311058 - DNA, 25 bp, Artificial
  Probe
tccactgggcactgccgagtctgag

SEQ ID NO: 311059 - DNA, 25 bp, Artificial
  Probe
tgtacatactgcagagttcgggagg

SEQ ID NO: 311060 - DNA, 25 bp, Artificial
  Probe
tcttaccttgggtcctgggcctgtt

SEQ ID NO: 311061 - DNA, 25 bp, Artificial
  Probe
gaggcagcccagcaagagggacccc

SEQ ID NO: 311062 - DNA, 25 bp, Artificial
  Probe
ccacgtgtttttatcgctgacttta

SEQ ID NO: 311063 - DNA, 25 bp, Artificial
  Probe
ctgcgacttatctccctcaggagag

SEQ ID NO: 311064 - DNA, 25 bp, Artificial
  Probe
acagctatctgtaccaaacactgtg

SEQ ID NO: 311065 - DNA, 25 bp, Artificial
  Probe
cactcctgcacctggtacgggaggt

SEQ ID NO: 311066 - DNA, 25 bp, Artificial
  Probe
actgttccccgatcattgttcactg

SEQ ID NO: 311067 - DNA, 25 bp, Artificial
  Probe
gtcctaccacaacatgttctgtctg

SEQ ID NO: 311068 - DNA, 25 bp, Artificial
  Probe
accctgatccccaggcagagatgtc

SEQ ID NO: 311069 - DNA, 25 bp, Artificial
  Probe
cctatgagacactggagagaaagag

SEQ ID NO: 311070 - DNA, 25 bp, Artificial
  Probe
ggcatgcatgactctttggcaacat

SEQ ID NO: 311071 - DNA, 25 bp, Artificial
  Probe
tgtaccaaacactgtgtcccctcag

SEQ ID NO: 311072 - DNA, 25 bp, Artificial
  Probe
gcatctgctgccagcagctgcgacg

SEQ ID NO: 311073 - DNA, 25 bp, Artificial
  Probe
acggcatacagagacatttggtgtc

SEQ ID NO: 311074 - DNA, 25 bp, Artificial
  Probe
atgtggtggttgaccgagatcccag

SEQ ID NO: 311075 - DNA, 25 bp, Artificial
  Probe
agaatgtggtggttgaccgagatcc

SEQ ID NO: 311076 - DNA, 25 bp, Artificial
  Probe
ggcggcatgatccaaacatgcgaac

SEQ ID NO: 311077 - DNA, 25 bp, Artificial
  Probe
agctcttctactgtacatactgcag

SEQ ID NO: 311078 - DNA, 25 bp, Artificial
  Probe
tgggcctgacccacactatatagac

SEQ ID NO: 311079 - DNA, 25 bp, Artificial
  Probe
catgttgctccgtgtgttcccttgt

SEQ ID NO: 311080 - DNA, 25 bp, Artificial
  Probe
ccctaaggatctgagccctgagggg

SEQ ID NO: 311081 - DNA, 25 bp, Artificial
  Probe
cgatcattgttcactgcagtgcagg

SEQ ID NO: 311082 - DNA, 25 bp, Artificial
  Probe
tgttctgtctgtccatccatcacag

SEQ ID NO: 311083 - DNA, 25 bp, Artificial
  Probe
gtcccctcagccaggaaaggagtac

SEQ ID NO: 311084 - DNA, 25 bp, Artificial
  Probe
gaggcttgaagcattactggttcac

SEQ ID NO: 311085 - DNA, 25 bp, Artificial
  Probe
ggagtactgatctgagctctcaccc

SEQ ID NO: 311086 - DNA, 25 bp, Artificial
  Probe
ggtgggcatctctggcctatgagac

SEQ ID NO: 311087 - DNA, 25 bp, Artificial
  Probe
tggtagacatcctaaagaccacgtg

SEQ ID NO: 311088 - DNA, 25 bp, Artificial
  Probe
catctgttgtcctggcctggtccct

SEQ ID NO: 311089 - DNA, 25 bp, Artificial
  Probe
gagaagcagctatccctccagtcct

SEQ ID NO: 311090 - DNA, 25 bp, Artificial
  Probe
aagtgtcctaccacaacatgttctg

SEQ ID NO: 311091 - DNA, 25 bp, Artificial
  Probe
ccactcctgcacctggtacgggagg

SEQ ID NO: 311092 - DNA, 25 bp, Artificial
  Probe
ttattccacggcatacagagacatt

SEQ ID NO: 311093 - DNA, 25 bp, Artificial
  Probe
ccatgtttgtgttgagagcccatga

SEQ ID NO: 311094 - DNA, 25 bp, Artificial
  Probe
agaccacgtgccagctccgtcagga

SEQ ID NO: 311095 - DNA, 25 bp, Artificial
  Probe
ggtcctgggcctgttccctggctct

SEQ ID NO: 311096 - DNA, 25 bp, Artificial
  Probe
aatctgctcgtggtcattgaataga

SEQ ID NO: 311097 - DNA, 25 bp, Artificial
  Probe
tggttcacatcctggcctgaccaga

SEQ ID NO: 311098 - DNA, 25 bp, Artificial
  Probe
tctggcctcacaggatgtggatggt

SEQ ID NO: 311099 - DNA, 25 bp, Artificial
  Probe
ctgctgccagcagctgcgacgtgag

SEQ ID NO: 311100 - DNA, 25 bp, Artificial
  Probe
tgcctcagcctagtgcctttggggg

SEQ ID NO: 311101 - DNA, 25 bp, Artificial
  Probe
gactgaacagccaatgagtccgagg

SEQ ID NO: 311102 - DNA, 25 bp, Artificial
  Probe
ccccatggtgaatgtggagaatcac

SEQ ID NO: 311103 - DNA, 25 bp, Artificial
  Probe
gtaagagcacaagcatgaggacctt

SEQ ID NO: 311104 - DNA, 25 bp, Artificial
  Probe
acagcatccacctaaagtttggatg

SEQ ID NO: 311105 - DNA, 25 bp, Artificial
  Probe
cacctaaagtttggatgtggcttgg

SEQ ID NO: 311106 - DNA, 25 bp, Artificial
  Probe
acctttgttgggatcacagcatcca

SEQ ID NO: 311107 - DNA, 25 bp, Artificial
  Probe
tcagaagagggtgtctcctggaact

SEQ ID NO: 311108 - DNA, 25 bp, Artificial
  Probe
tgagtccgaggcaatctaatgcctc

SEQ ID NO: 311109 - DNA, 25 bp, Artificial
  Probe
ctttgttgggatcacagcatccacc

SEQ ID NO: 311110 - DNA, 25 bp, Artificial
  Probe
catccacctaaagtttggatgtggc

SEQ ID NO: 311111 - DNA, 25 bp, Artificial
  Probe
cctttaacgtcctggactgaacagc

SEQ ID NO: 311112 - DNA, 25 bp, Artificial
  Probe
gcatgaggacctttgttgggatcac

SEQ ID NO: 311113 - DNA, 25 bp, Artificial
  Probe
agagcacaagcatgaggacctttgt

SEQ ID NO: 311114 - DNA, 25 bp, Artificial
  Probe
agccctctggagcagcagccggtgc

SEQ ID NO: 311115 - DNA, 25 bp, Artificial
  Probe
accttgaaccccatggtgaatgtgg

SEQ ID NO: 311116 - DNA, 25 bp, Artificial
  Probe
ccaatgagtccgaggcaatctaatg

SEQ ID NO: 311117 - DNA, 25 bp, Artificial
  Probe
ttgagccctctggagcagcagccgg

SEQ ID NO: 311118 - DNA, 25 bp, Artificial
  Probe
tccgaggcaatctaatgcctcagcc

SEQ ID NO: 311119 - DNA, 25 bp, Artificial
  Probe
gaggcaatctaatgcctcagcctag

SEQ ID NO: 311120 - DNA, 25 bp, Artificial
  Probe
atctgatgaccttgaaccccatggt

SEQ ID NO: 311121 - DNA, 25 bp, Artificial
  Probe
cagaagagggtgtctcctggaactg

SEQ ID NO: 311122 - DNA, 25 bp, Artificial
  Probe
agtccgaggcaatctaatgcctcag

SEQ ID NO: 311123 - DNA, 25 bp, Artificial
  Probe
gcatccacctaaagtttggatgtgg

SEQ ID NO: 311124 - DNA, 25 bp, Artificial
  Probe
atctaatgcctcagcctagtgcctt

SEQ ID NO: 311125 - DNA, 25 bp, Artificial
  Probe
gtggagaatcacgttctctgacttc

SEQ ID NO: 311126 - DNA, 25 bp, Artificial
  Probe
tgaggacctttgttgggatcacagc

SEQ ID NO: 311127 - DNA, 25 bp, Artificial
  Probe
ggtgagcttgccatgtaatctgatg

SEQ ID NO: 311128 - DNA, 25 bp, Artificial
  Probe
aagagggtgtctcctggaactggaa

SEQ ID NO: 311129 - DNA, 25 bp, Artificial
  Probe
acaagcatgaggacctttgttggga

SEQ ID NO: 311130 - DNA, 25 bp, Artificial
  Probe
gagaatcacgttctctgacttccac

SEQ ID NO: 311131 - DNA, 25 bp, Artificial
  Probe
agcacaagcatgaggacctttgttg

SEQ ID NO: 311132 - DNA, 25 bp, Artificial
  Probe
acgtcctggactgaacagccaatga

SEQ ID NO: 311133 - DNA, 25 bp, Artificial
  Probe
gtcctggactgaacagccaatgagt

SEQ ID NO: 311134 - DNA, 25 bp, Artificial
  Probe
aatgcctcagcctagtgcctttggg

SEQ ID NO: 311135 - DNA, 25 bp, Artificial
  Probe
caatctaatgcctcagcctagtgcc

SEQ ID NO: 311136 - DNA, 25 bp, Artificial
  Probe
cttgagccctctggagcagcagccg

SEQ ID NO: 311137 - DNA, 25 bp, Artificial
  Probe
gaagtgaacttgagccctctggagc

SEQ ID NO: 311138 - DNA, 25 bp, Artificial
  Probe
cctggactgaacagccaatgagtcc

SEQ ID NO: 311139 - DNA, 25 bp, Artificial
  Probe
aaccccatggtgaatgtggagaatc

SEQ ID NO: 311140 - DNA, 25 bp, Artificial
  Probe
gaacagccaatgagtccgaggcaat

SEQ ID NO: 311141 - DNA, 25 bp, Artificial
  Probe
gagggtgtctcctggaactggaatt

SEQ ID NO: 311142 - DNA, 25 bp, Artificial
  Probe
atcacgttctctgacttccacatgg

SEQ ID NO: 311143 - DNA, 25 bp, Artificial
  Probe
cttgaaccccatggtgaatgtggag

SEQ ID NO: 311144 - DNA, 25 bp, Artificial
  Probe
taagagcacaagcatgaggaccttt

SEQ ID NO: 311145 - DNA, 25 bp, Artificial
  Probe
acagccaatgagtccgaggcaatct

SEQ ID NO: 311146 - DNA, 25 bp, Artificial
  Probe
tggcactggccgtcgttttacaacg

SEQ ID NO: 311147 - DNA, 25 bp, Artificial
  Probe
tgcggctctgcacacggaaggagac

SEQ ID NO: 311148 - DNA, 25 bp, Artificial
  Probe
caaagttgccggagaaaagatcact

SEQ ID NO: 311149 - DNA, 25 bp, Artificial
  Probe
caacctttgatggtgaagaggagcc

SEQ ID NO: 311150 - DNA, 25 bp, Artificial
  Probe
caaggcctttgttgaatttttgact

SEQ ID NO: 311151 - DNA, 25 bp, Artificial
  Probe
gacccttgtactggactgccactat

SEQ ID NO: 311152 - DNA, 25 bp, Artificial
  Probe
aggccgaagagcaggagccagaact

SEQ ID NO: 311153 - DNA, 25 bp, Artificial
  Probe
cctttgatggtgaagaggagccctc

SEQ ID NO: 311154 - DNA, 25 bp, Artificial
  Probe
gcacacggaaggagacaaggccttt

SEQ ID NO: 311155 - DNA, 25 bp, Artificial
  Probe
ttcggtttgctcagcgtacgagccg

SEQ ID NO: 311156 - DNA, 25 bp, Artificial
  Probe
aaattattgcgcaaagttgccggag

SEQ ID NO: 311157 - DNA, 25 bp, Artificial
  Probe
ttagcttggcactggccgtcgtttt

SEQ ID NO: 311158 - DNA, 25 bp, Artificial
  Probe
gtttgctcagcgtacgagccggctc

SEQ ID NO: 311159 - DNA, 25 bp, Artificial
  Probe
gcggctctgcacacggaaggagaca

SEQ ID NO: 311160 - DNA, 25 bp, Artificial
  Probe
gagccagaactgacatcaactccca

SEQ ID NO: 311161 - DNA, 25 bp, Artificial
  Probe
cctcacaggggcagaaggccgaaga

SEQ ID NO: 311162 - DNA, 25 bp, Artificial
  Probe
cattgcggccgcaagcttattccct

SEQ ID NO: 311163 - DNA, 25 bp, Artificial
  Probe
ttctctattaaggaagtgagctttc

SEQ ID NO: 311164 - DNA, 25 bp, Artificial
  Probe
aagaggagccctcacaggggcagaa

SEQ ID NO: 311165 - DNA, 25 bp, Artificial
  Probe
actggactgccactatcctgaggac

SEQ ID NO: 311166 - DNA, 25 bp, Artificial
  Probe
cgctgcggctctgcacacggaagga

SEQ ID NO: 311167 - DNA, 25 bp, Artificial
  Probe
ttgctcagcgtacgagccggctccg

SEQ ID NO: 311168 - DNA, 25 bp, Artificial
  Probe
ccttgtactggactgccactatcct

SEQ ID NO: 311169 - DNA, 25 bp, Artificial
  Probe
catcctaatatatgggggaaagcaa

SEQ ID NO: 311170 - DNA, 25 bp, Artificial
  Probe
catccctccaacctttgatggtgaa

SEQ ID NO: 311171 - DNA, 25 bp, Artificial
  Probe
tgcgctgcggctctgcacacggaag

SEQ ID NO: 311172 - DNA, 25 bp, Artificial
  Probe
aggagccagaactgacatcaactcc

SEQ ID NO: 311173 - DNA, 25 bp, Artificial
  Probe
agagcaggagccagaactgacatca

SEQ ID NO: 311174 - DNA, 25 bp, Artificial
  Probe
agcaggagccagaactgacatcaac

SEQ ID NO: 311175 - DNA, 25 bp, Artificial
  Probe
tggctgtcatcctaatatatggggg

SEQ ID NO: 311176 - DNA, 25 bp, Artificial
  Probe
cattttctctattaaggaagtgagc

SEQ ID NO: 311177 - DNA, 25 bp, Artificial
  Probe
ctgcggctctgcacacggaaggaga

SEQ ID NO: 311178 - DNA, 25 bp, Artificial
  Probe
gcttcggcatttactgcagcccgcg

SEQ ID NO: 311179 - DNA, 25 bp, Artificial
  Probe
acccttgtactggactgccactatc

SEQ ID NO: 311180 - DNA, 25 bp, Artificial
  Probe
gtcatcctaatatatgggggaaagc

SEQ ID NO: 311181 - DNA, 25 bp, Artificial
  Probe
ccggcccttcggtttgctcagcgta

SEQ ID NO: 311182 - DNA, 25 bp, Artificial
  Probe
attgcgcaaagttgccggagaaaag

SEQ ID NO: 311183 - DNA, 25 bp, Artificial
  Probe
ttttagcttggcactggccgtcgtt

SEQ ID NO: 311184 - DNA, 25 bp, Artificial
  Probe
ctatcctgaggacgagatcggacac

SEQ ID NO: 311185 - DNA, 25 bp, Artificial
  Probe
tactggactgccactatcctgagga

SEQ ID NO: 311186 - DNA, 25 bp, Artificial
  Probe
gccactatcctgaggacgagatcgg

SEQ ID NO: 311187 - DNA, 25 bp, Artificial
  Probe
ggactgccactatcctgaggacgag

SEQ ID NO: 311188 - DNA, 25 bp, Artificial
  Probe
cttgtactggactgccactatcctg

SEQ ID NO: 311189 - DNA, 25 bp, Artificial
  Probe
ctctgcacacggaaggagacaaggc

SEQ ID NO: 311190 - DNA, 25 bp, Artificial
  Probe
ccgcaagcttattccctttagtgag

SEQ ID NO: 311191 - DNA, 25 bp, Artificial
  Probe
ctgtcatcctaatatatgggggaaa

SEQ ID NO: 311192 - DNA, 25 bp, Artificial
  Probe
acacttggctgtgtcttgagggaaa

SEQ ID NO: 311193 - DNA, 25 bp, Artificial
  Probe
aagctactgaagtgccttgggcaag

SEQ ID NO: 311194 - DNA, 25 bp, Artificial
  Probe
ccactgctgtgtaaatcagaactca

SEQ ID NO: 311195 - DNA, 25 bp, Artificial
  Probe
tgtaaatcagaactcaggctgccag

SEQ ID NO: 311196 - DNA, 25 bp, Artificial
  Probe
gtgctccgaaagcacacgcttcacg

SEQ ID NO: 311197 - DNA, 25 bp, Artificial
  Probe
cagaactcaggctgccagacacttg

SEQ ID NO: 311198 - DNA, 25 bp, Artificial
  Probe
tggtgctccgaaagcacacgcttca

SEQ ID NO: 311199 - DNA, 25 bp, Artificial
  Probe
gcctccactgctgtgtaaatcagaa

SEQ ID NO: 311200 - DNA, 25 bp, Artificial
  Probe
cactgctgtgtaaatcagaactcag

SEQ ID NO: 311201 - DNA, 25 bp, Artificial
  Probe
tcgctggctgcagtcacatcggtgg

SEQ ID NO: 311202 - DNA, 25 bp, Artificial
  Probe
gacacttggctgtgtcttgagggaa

SEQ ID NO: 311203 - DNA, 25 bp, Artificial
  Probe
cacttggctgtgtcttgagggaaat

SEQ ID NO: 311204 - DNA, 25 bp, Artificial
  Probe
agtcgctggctgcagtcacatcggt

SEQ ID NO: 311205 - DNA, 25 bp, Artificial
  Probe
gtaaatcagaactcaggctgccaga

SEQ ID NO: 311206 - DNA, 25 bp, Artificial
  Probe
ggtgctccgaaagcacacgcttcac

SEQ ID NO: 311207 - DNA, 25 bp, Artificial
  Probe
ctcaggctgccagacacttggctgt

SEQ ID NO: 311208 - DNA, 25 bp, Artificial
  Probe
tactgaagtgccttgggcaaggata

SEQ ID NO: 311209 - DNA, 25 bp, Artificial
  Probe
gaaagctactgaagtgccttgggca

SEQ ID NO: 311210 - DNA, 25 bp, Artificial
  Probe
atgtaaattgtgttcacagtctctc

SEQ ID NO: 311211 - DNA, 25 bp, Artificial
  Probe
ctccactgctgtgtaaatcagaact

SEQ ID NO: 311212 - DNA, 25 bp, Artificial
  Probe
gctgccagacacttggctgtgtctt

SEQ ID NO: 311213 - DNA, 25 bp, Artificial
  Probe
taaatcagaactcaggctgccagac

SEQ ID NO: 311214 - DNA, 25 bp, Artificial
  Probe
gtcgctggctgcagtcacatcggtg

SEQ ID NO: 311215 - DNA, 25 bp, Artificial
  Probe
ttggcctccactgctgtgtaaatca

SEQ ID NO: 311216 - DNA, 25 bp, Artificial
  Probe
ttttgtgaaagctactgaagtgcct

SEQ ID NO: 311217 - DNA, 25 bp, Artificial
  Probe
ctgccagacacttggctgtgtcttg

SEQ ID NO: 311218 - DNA, 25 bp, Artificial
  Probe
ggcctccactgctgtgtaaatcaga

SEQ ID NO: 311219 - DNA, 25 bp, Artificial
  Probe
tggcctccactgctgtgtaaatcag

SEQ ID NO: 311220 - DNA, 25 bp, Artificial
  Probe
aggctgccagacacttggctgtgtc

SEQ ID NO: 311221 - DNA, 25 bp, Artificial
  Probe
aaatcagaactcaggctgccagaca

SEQ ID NO: 311222 - DNA, 25 bp, Artificial
  Probe
ggctgccagacacttggctgtgtct

SEQ ID NO: 311223 - DNA, 25 bp, Artificial
  Probe
tgaaagctactgaagtgccttgggc

SEQ ID NO: 311224 - DNA, 25 bp, Artificial
  Probe
agacacttggctgtgtcttgaggga

SEQ ID NO: 311225 - DNA, 25 bp, Artificial
  Probe
tccactgctgtgtaaatcagaactc

SEQ ID NO: 311226 - DNA, 25 bp, Artificial
  Probe
tttgtgaaagctactgaagtgcctt

SEQ ID NO: 311227 - DNA, 25 bp, Artificial
  Probe
attttgtgaaagctactgaagtgcc

SEQ ID NO: 311228 - DNA, 25 bp, Artificial
  Probe
cagacacttggctgtgtcttgaggg

SEQ ID NO: 311229 - DNA, 25 bp, Artificial
  Probe
tcaggctgccagacacttggctgtg

SEQ ID NO: 311230 - DNA, 25 bp, Artificial
  Probe
atggtgctccgaaagcacacgcttc

SEQ ID NO: 311231 - DNA, 25 bp, Artificial
  Probe
gaaagcacacgcttcacgctcttaa

SEQ ID NO: 311232 - DNA, 25 bp, Artificial
  Probe
tgtgtaaatcagaactcaggctgcc

SEQ ID NO: 311233 - DNA, 25 bp, Artificial
  Probe
catggtgctccgaaagcacacgctt

SEQ ID NO: 311234 - DNA, 25 bp, Artificial
  Probe
cctccactgctgtgtaaatcagaac

SEQ ID NO: 311235 - DNA, 25 bp, Artificial
  Probe
aaagctactgaagtgccttgggcaa

SEQ ID NO: 311236 - DNA, 25 bp, Artificial
  Probe
actcaggctgccagacacttggctg

SEQ ID NO: 311237 - DNA, 25 bp, Artificial
  Probe
caggctgccagacacttggctgtgt

SEQ ID NO: 311238 - DNA, 25 bp, Artificial
  Probe
ccttccagcggaagttactaattcg

SEQ ID NO: 311239 - DNA, 25 bp, Artificial
  Probe
tttccagatggttcctacttacacg

SEQ ID NO: 311240 - DNA, 25 bp, Artificial
  Probe
gttcccatagcaacccgtgtttcct

SEQ ID NO: 311241 - DNA, 25 bp, Artificial
  Probe
ccaggccgtgcgtttctacagtaac

SEQ ID NO: 311242 - DNA, 25 bp, Artificial
  Probe
gcttctgtacagttctttcactaag

SEQ ID NO: 311243 - DNA, 25 bp, Artificial
  Probe
tataaacatggtctgtacataagca

SEQ ID NO: 311244 - DNA, 25 bp, Artificial
  Probe
agttctttcactaagaaatgacaag

SEQ ID NO: 311245 - DNA, 25 bp, Artificial
  Probe
aagatgcttctgtacagttctttca

SEQ ID NO: 311246 - DNA, 25 bp, Artificial
  Probe
tctgtacataagcaagtgagagtca

SEQ ID NO: 311247 - DNA, 25 bp, Artificial
  Probe
ggttgtcatggcatcttttgctctc

SEQ ID NO: 311248 - DNA, 25 bp, Artificial
  Probe
cagttcccatagcaacccgtgtttc

SEQ ID NO: 311249 - DNA, 25 bp, Artificial
  Probe
gtaacctttccagatggttcctact

SEQ ID NO: 311250 - DNA, 25 bp, Artificial
  Probe
gagagtcagtgtacccgaagtctta

SEQ ID NO: 311251 - DNA, 25 bp, Artificial
  Probe
gaagtcttacacgataccttcagat

SEQ ID NO: 311252 - DNA, 25 bp, Artificial
  Probe
taaagatgcttctgtacagttcttt

SEQ ID NO: 311253 - DNA, 25 bp, Artificial
  Probe
gatgcttctgtacagttctttcact

SEQ ID NO: 311254 - DNA, 25 bp, Artificial
  Probe
taacgactggatcagaaaggaaact

SEQ ID NO: 311255 - DNA, 25 bp, Artificial
  Probe
gtacccgaagtcttacacgatacct

SEQ ID NO: 311256 - DNA, 25 bp, Artificial
  Probe
gtgcgtttctacagtaacctttcca

SEQ ID NO: 311257 - DNA, 25 bp, Artificial
  Probe
gccgtgcgtttctacagtaaccttt

SEQ ID NO: 311258 - DNA, 25 bp, Artificial
  Probe
gttctttcactaagaaatgacaagt

SEQ ID NO: 311259 - DNA, 25 bp, Artificial
  Probe
gaaactgtcgtctttgaaatgttac

SEQ ID NO: 311260 - DNA, 25 bp, Artificial
  Probe
actaattcggacctgactgatgcag

SEQ ID NO: 311261 - DNA, 25 bp, Artificial
  Probe
acatggtctgtacataagcaagtga

SEQ ID NO: 311262 - DNA, 25 bp, Artificial
  Probe
taattcggacctgactgatgcagtt

SEQ ID NO: 311263 - DNA, 25 bp, Artificial
  Probe
ttccagcggaagttactaattcgga

SEQ ID NO: 311264 - DNA, 25 bp, Artificial
  Probe
cagtgtacccgaagtcttacacgat

SEQ ID NO: 311265 - DNA, 25 bp, Artificial
  Probe
tggcatcttttgctctctagcccca

SEQ ID NO: 311266 - DNA, 25 bp, Artificial
  Probe
tgatgttatcccataacgactggat

SEQ ID NO: 311267 - DNA, 25 bp, Artificial
  Probe
ttttaaagatgcttctgtacagttc

SEQ ID NO: 311268 - DNA, 25 bp, Artificial
  Probe
gcgtttctacagtaacctttccaga

SEQ ID NO: 311269 - DNA, 25 bp, Artificial
  Probe
gatggttcctacttacacgacttca

SEQ ID NO: 311270 - DNA, 25 bp, Artificial
  Probe
ttactaattcggacctgactgatgc

SEQ ID NO: 311271 - DNA, 25 bp, Artificial
  Probe
ctgcagtatcacaggaagattaaag

SEQ ID NO: 311272 - DNA, 25 bp, Artificial
  Probe
gactgatgcagttcccatagcaacc

SEQ ID NO: 311273 - DNA, 25 bp, Artificial
  Probe
gtttctacagtaacctttccagatg

SEQ ID NO: 311274 - DNA, 25 bp, Artificial
  Probe
agtgagagtcagtgtacccgaagtc

SEQ ID NO: 311275 - DNA, 25 bp, Artificial
  Probe
aacatggtctgtacataagcaagtg

SEQ ID NO: 311276 - DNA, 25 bp, Artificial
  Probe
ccgaagtcttacacgataccttcag

SEQ ID NO: 311277 - DNA, 25 bp, Artificial
  Probe
gtacagttctttcactaagaaatga

SEQ ID NO: 311278 - DNA, 25 bp, Artificial
  Probe
taaacatggtctgtacataagcaag

SEQ ID NO: 311279 - DNA, 25 bp, Artificial
  Probe
gatgcagttcccatagcaacccgtg

SEQ ID NO: 311280 - DNA, 25 bp, Artificial
  Probe
gtctgtacataagcaagtgagagtc

SEQ ID NO: 311281 - DNA, 25 bp, Artificial
  Probe
ctgtcgtctttgaaatgttacatgt

SEQ ID NO: 311282 - DNA, 25 bp, Artificial
  Probe
tgtacagttctttcactaagaaatg

SEQ ID NO: 311283 - DNA, 25 bp, Artificial
  Probe
cagtaacctttccagatggttccta

SEQ ID NO: 311284 - DNA, 25 bp, Artificial
  Probe
tgggggacctcaaaccccagtgctg

SEQ ID NO: 311285 - DNA, 25 bp, Artificial
  Probe
acaacttaaccctcggtagccagtg

SEQ ID NO: 311286 - DNA, 25 bp, Artificial
  Probe
agtcaccacacttgggccacatgga

SEQ ID NO: 311287 - DNA, 25 bp, Artificial
  Probe
tccccagaaaagtgtgtaggaaata

SEQ ID NO: 311288 - DNA, 25 bp, Artificial
  Probe
gtcctctgtccttggtttccattta

SEQ ID NO: 311289 - DNA, 25 bp, Artificial
  Probe
tcggtagccagtgagggaaaccaca

SEQ ID NO: 311290 - DNA, 25 bp, Artificial
  Probe
cttgctctggaagagtgtgtgtcta

SEQ ID NO: 311291 - DNA, 25 bp, Artificial
  Probe
ccatgtgtgcatggacgacagggcc

SEQ ID NO: 311292 - DNA, 25 bp, Artificial
  Probe
agtggaggctgagtcctctgtcctt

SEQ ID NO: 311293 - DNA, 25 bp, Artificial
  Probe
ctcaaggccttaatgaggttaaagg

SEQ ID NO: 311294 - DNA, 25 bp, Artificial
  Probe
gttcccggtggctttgagtaggatc

SEQ ID NO: 311295 - DNA, 25 bp, Artificial
  Probe
cacaacattctaaatattgggggat

SEQ ID NO: 311296 - DNA, 25 bp, Artificial
  Probe
ttgctgctggagaccccacatctct

SEQ ID NO: 311297 - DNA, 25 bp, Artificial
  Probe
tctgctcagtcctgctcttggcctg

SEQ ID NO: 311298 - DNA, 25 bp, Artificial
  Probe
aggaccacggcctatagtcaccaca

SEQ ID NO: 311299 - DNA, 25 bp, Artificial
  Probe
cccacagcgcttctttaactttgag

SEQ ID NO: 311300 - DNA, 25 bp, Artificial
  Probe
ccacatctctccagaacttggaagc

SEQ ID NO: 311301 - DNA, 25 bp, Artificial
  Probe
cagcccctggacacattgctgctgg

SEQ ID NO: 311302 - DNA, 25 bp, Artificial
  Probe
tcacgagtccccttggtttggagtt

SEQ ID NO: 311303 - DNA, 25 bp, Artificial
  Probe
gtatgatttcccagtctgctgactc

SEQ ID NO: 311304 - DNA, 25 bp, Artificial
  Probe
taggccccggaaagggaatcagtgt

SEQ ID NO: 311305 - DNA, 25 bp, Artificial
  Probe
cagcattgatcgttcattgtaaagt

SEQ ID NO: 311306 - DNA, 25 bp, Artificial
  Probe
tctgaggcagttcctccctggcctg

SEQ ID NO: 311307 - DNA, 25 bp, Artificial
  Probe
tcttggcctgtgaatgtgcctcgcc

SEQ ID NO: 311308 - DNA, 25 bp, Artificial
  Probe
gtgtgctctgcctctgctcagtcct

SEQ ID NO: 311309 - DNA, 25 bp, Artificial
  Probe
agtgtgtgtctatacactggtgtgc

SEQ ID NO: 311310 - DNA, 25 bp, Artificial
  Probe
ctgactgccttgagatctctcccaa

SEQ ID NO: 311311 - DNA, 25 bp, Artificial
  Probe
tcacccttgccctaaagcaggagtc

SEQ ID NO: 311312 - DNA, 25 bp, Artificial
  Probe
gcatgtgtgtttgatggctttcatc

SEQ ID NO: 311313 - DNA, 25 bp, Artificial
  Probe
ttgtctttcccttctggctgccaac

SEQ ID NO: 311314 - DNA, 25 bp, Artificial
  Probe
accgctgcgctttccctggctggag

SEQ ID NO: 311315 - DNA, 25 bp, Artificial
  Probe
aagggcagcaggacatgtggccccc

SEQ ID NO: 311316 - DNA, 25 bp, Artificial
  Probe
tgtgccctgcgtccttgtggtggct

SEQ ID NO: 311317 - DNA, 25 bp, Artificial
  Probe
tctccttgtctttcccttctggctg

SEQ ID NO: 311318 - DNA, 25 bp, Artificial
  Probe
tccctgaaattgtatgcaaagtgtc

SEQ ID NO: 311319 - DNA, 25 bp, Artificial
  Probe
ctgcgctttccctggctggagtgga

SEQ ID NO: 311320 - DNA, 25 bp, Artificial
  Probe
ctcagtttccccttgctctggaaga

SEQ ID NO: 311321 - DNA, 25 bp, Artificial
  Probe
cttcacaacattctaaatattgggg

SEQ ID NO: 311322 - DNA, 25 bp, Artificial
  Probe
gctctctgaggcagttcctccctgg

SEQ ID NO: 311323 - DNA, 25 bp, Artificial
  Probe
tggggatatacctacctcagggttg

SEQ ID NO: 311324 - DNA, 25 bp, Artificial
  Probe
ttccccagaaaagtgtgtaggaaat

SEQ ID NO: 311325 - DNA, 25 bp, Artificial
  Probe
ccttcttgcttcattctcctgtgtg

SEQ ID NO: 311326 - DNA, 25 bp, Artificial
  Probe
gccttgagatctctcccaactcagt

SEQ ID NO: 311327 - DNA, 25 bp, Artificial
  Probe
ttctgctttccttgacagcagcctg

SEQ ID NO: 311328 - DNA, 25 bp, Artificial
  Probe
gcgcgtgcttgaaggcaccaccatc

SEQ ID NO: 311329 - DNA, 25 bp, Artificial
  Probe
gttcccaaagtgaccttctgggtgg

SEQ ID NO: 311330 - DNA, 25 bp, Artificial
  Probe
gttacctgctatgtcactgtctact

SEQ ID NO: 311331 - DNA, 25 bp, Artificial
  Probe
ttaacagctctctccggttgacttc

SEQ ID NO: 311332 - DNA, 25 bp, Artificial
  Probe
gaatatcgtcacctctgtccctatg

SEQ ID NO: 311333 - DNA, 25 bp, Artificial
  Probe
tgcttttctgcacctcaagtcaatg

SEQ ID NO: 311334 - DNA, 25 bp, Artificial
  Probe
ctttgacatccaggatgctgtcctt

SEQ ID NO: 311335 - DNA, 25 bp, Artificial
  Probe
gtcactgtctactcccaagacgatg

SEQ ID NO: 311336 - DNA, 25 bp, Artificial
  Probe
atcgtcacctctgtccctatgtgct

SEQ ID NO: 311337 - DNA, 25 bp, Artificial
  Probe
gttggctcacatctgttacctgcta

SEQ ID NO: 311338 - DNA, 25 bp, Artificial
  Probe
cctcaagtcaatgagaccagtgttg

SEQ ID NO: 311339 - DNA, 25 bp, Artificial
  Probe
tcccaagacgatgaatatcgtcacc

SEQ ID NO: 311340 - DNA, 25 bp, Artificial
  Probe
ctgtccttggccaaattcagcttct

SEQ ID NO: 311341 - DNA, 25 bp, Artificial
  Probe
acgatgaatatcgtcacctctgtcc

SEQ ID NO: 311342 - DNA, 25 bp, Artificial
  Probe
gtccctatgtgctctctcttagttc

SEQ ID NO: 311343 - DNA, 25 bp, Artificial
  Probe
gaactgccagtcacagctctcgatc

SEQ ID NO: 311344 - DNA, 25 bp, Artificial
  Probe
ggtcagagccaatttctacaaacac

SEQ ID NO: 311345 - DNA, 25 bp, Artificial
  Probe
tatgtcactgtctactcccaagacg

SEQ ID NO: 311346 - DNA, 25 bp, Artificial
  Probe
ggatgctgtccttggccaaattcag

SEQ ID NO: 311347 - DNA, 25 bp, Artificial
  Probe
ttggccaaattcagcttctttgaat

SEQ ID NO: 311348 - DNA, 25 bp, Artificial
  Probe
agctctctccggttgacttcgaagg

SEQ ID NO: 311349 - DNA, 25 bp, Artificial
  Probe
acccacctttgacatccaggatgct

SEQ ID NO: 311350 - DNA, 25 bp, Artificial
  Probe
tcgatccccggcttcagttggctca

SEQ ID NO: 311351 - DNA, 25 bp, Artificial
  Probe
aaaggaactgccagtcacagctctc

SEQ ID NO: 311352 - DNA, 25 bp, Artificial
  Probe
tctgtccctatgtgctctctcttag

SEQ ID NO: 311353 - DNA, 25 bp, Artificial
  Probe
caagtcaatgagaccagtgttgtgt

SEQ ID NO: 311354 - DNA, 25 bp, Artificial
  Probe
gccaaattcagcttctttgaattgt

SEQ ID NO: 311355 - DNA, 25 bp, Artificial
  Probe
tccggttgacttcgaagggcaaagg

SEQ ID NO: 311356 - DNA, 25 bp, Artificial
  Probe
gctcacatctgttacctgctatgtc

SEQ ID NO: 311357 - DNA, 25 bp, Artificial
  Probe
tatgtgctctctcttagttcctcag

SEQ ID NO: 311358 - DNA, 25 bp, Artificial
  Probe
atatcgtcacctctgtccctatgtg

SEQ ID NO: 311359 - DNA, 25 bp, Artificial
  Probe
cagcttctttgaattgtcataaaag

SEQ ID NO: 311360 - DNA, 25 bp, Artificial
  Probe
agtcaatgagaccagtgttgtgtac

SEQ ID NO: 311361 - DNA, 25 bp, Artificial
  Probe
gtgctctctcttagttcctcagata

SEQ ID NO: 311362 - DNA, 25 bp, Artificial
  Probe
tttaacagctctctccggttgactt

SEQ ID NO: 311363 - DNA, 25 bp, Artificial
  Probe
caatgagaccagtgttgtgtaccag

SEQ ID NO: 311364 - DNA, 25 bp, Artificial
  Probe
atccccggcttcagttggctcacat

SEQ ID NO: 311365 - DNA, 25 bp, Artificial
  Probe
acatctgttacctgctatgtcactg

SEQ ID NO: 311366 - DNA, 25 bp, Artificial
  Probe
gatgaatatcgtcacctctgtccct

SEQ ID NO: 311367 - DNA, 25 bp, Artificial
  Probe
gcttcagttggctcacatctgttac

SEQ ID NO: 311368 - DNA, 25 bp, Artificial
  Probe
atacccacctttgacatccaggatg

SEQ ID NO: 311369 - DNA, 25 bp, Artificial
  Probe
tctactcccaagacgatgaatatcg

SEQ ID NO: 311370 - DNA, 25 bp, Artificial
  Probe
ctgtctactcccaagacgatgaata

SEQ ID NO: 311371 - DNA, 25 bp, Artificial
  Probe
tgctatgtcactgtctactcccaag

SEQ ID NO: 311372 - DNA, 25 bp, Artificial
  Probe
gatccccggcttcagttggctcaca

SEQ ID NO: 311373 - DNA, 25 bp, Artificial
  Probe
cagttggctcacatctgttacctgc

SEQ ID NO: 311374 - DNA, 25 bp, Artificial
  Probe
cccggcttcagttggctcacatctg

SEQ ID NO: 311375 - DNA, 25 bp, Artificial
  Probe
gctatgtcactgtctactcccaaga

SEQ ID NO: 311376 - DNA, 25 bp, Artificial
  Probe
atttcctgagagaaatcagcctgag

SEQ ID NO: 311377 - DNA, 25 bp, Artificial
  Probe
ccatatttcatgaatggggtttggc

SEQ ID NO: 311378 - DNA, 25 bp, Artificial
  Probe
cttcaggggcagacagctatctatt

SEQ ID NO: 311379 - DNA, 25 bp, Artificial
  Probe
gctgtggcccatggacccgttggct

SEQ ID NO: 311380 - DNA, 25 bp, Artificial
  Probe
cctctcctgggacagtgccctttga

SEQ ID NO: 311381 - DNA, 25 bp, Artificial
  Probe
tgcacccagtattgctccatcgact

SEQ ID NO: 311382 - DNA, 25 bp, Artificial
  Probe
acgtgcctgtgtgaaagtctcaccc

SEQ ID NO: 311383 - DNA, 25 bp, Artificial
  Probe
aagcatacaggcatctacaggcctg

SEQ ID NO: 311384 - DNA, 25 bp, Artificial
  Probe
agggtgaaggctcagctgagtcact

SEQ ID NO: 311385 - DNA, 25 bp, Artificial
  Probe
gcccaagcttggtcccaggaagagg

SEQ ID NO: 311386 - DNA, 25 bp, Artificial
  Probe
gtgagaaattctcttggtgcagctc

SEQ ID NO: 311387 - DNA, 25 bp, Artificial
  Probe
tgtggcccatggacccgttggctgt

SEQ ID NO: 311388 - DNA, 25 bp, Artificial
  Probe
gcatttctgagaactgccttcccat

SEQ ID NO: 311389 - DNA, 25 bp, Artificial
  Probe
tacgagagagccacaaggcccaagc

SEQ ID NO: 311390 - DNA, 25 bp, Artificial
  Probe
tttcctaagccctgcatttctgaga

SEQ ID NO: 311391 - DNA, 25 bp, Artificial
  Probe
tcagacctgctgaggggacccttca

SEQ ID NO: 311392 - DNA, 25 bp, Artificial
  Probe
ctccaatctggctaaacagctggct

SEQ ID NO: 311393 - DNA, 25 bp, Artificial
  Probe
catggcccgtgctgctgtttcctca

SEQ ID NO: 311394 - DNA, 25 bp, Artificial
  Probe
acccaggctgcctctgggctgtgca

SEQ ID NO: 311395 - DNA, 25 bp, Artificial
  Probe
ctctatttggggaaacatcgctttt

SEQ ID NO: 311396 - DNA, 25 bp, Artificial
  Probe
gtccgagctgtgaatggtatttcct

SEQ ID NO: 311397 - DNA, 25 bp, Artificial
  Probe
aggacgcgccggtgactctcttcca

SEQ ID NO: 311398 - DNA, 25 bp, Artificial
  Probe
tacccttcacatcaagctggccttg

SEQ ID NO: 311399 - DNA, 25 bp, Artificial
  Probe
tgagtcactgccatgtgacccctac

SEQ ID NO: 311400 - DNA, 25 bp, Artificial
  Probe
atggtatttcctgagagaaatcagc

SEQ ID NO: 311401 - DNA, 25 bp, Artificial
  Probe
tgatctcttctggaaagatgctggc

SEQ ID NO: 311402 - DNA, 25 bp, Artificial
  Probe
gggacccttcagctggctggagcct

SEQ ID NO: 311403 - DNA, 25 bp, Artificial
  Probe
taaacagctggctgtaatgcctgat

SEQ ID NO: 311404 - DNA, 25 bp, Artificial
  Probe
cttcatgtgacaaaacaaggatata

SEQ ID NO: 311405 - DNA, 25 bp, Artificial
  Probe
gaccccaaagcgagccagctgctgg

SEQ ID NO: 311406 - DNA, 25 bp, Artificial
  Probe
aggatatattcttgctgctacgaca

SEQ ID NO: 311407 - DNA, 25 bp, Artificial
  Probe
aagtccttggctgcaggacgcgccg

SEQ ID NO: 311408 - DNA, 25 bp, Artificial
  Probe
ctgccaagtccttggctgcaggacg

SEQ ID NO: 311409 - DNA, 25 bp, Artificial
  Probe
catctacaggcctggcgtggttcgt

SEQ ID NO: 311410 - DNA, 25 bp, Artificial
  Probe
tcttccttcccgaagttctctgagg

SEQ ID NO: 311411 - DNA, 25 bp, Artificial
  Probe
cagtcaggggtacgagagagccaca

SEQ ID NO: 311412 - DNA, 25 bp, Artificial
  Probe
ggaccactgaatcctgtcttaattc

SEQ ID NO: 311413 - DNA, 25 bp, Artificial
  Probe
gtttggctctatttggggaaacatc

SEQ ID NO: 311414 - DNA, 25 bp, Artificial
  Probe
ggtctctcaagatttaagaaccaca

SEQ ID NO: 311415 - DNA, 25 bp, Artificial
  Probe
gctgtgcaaagctcttcagtgagcc

SEQ ID NO: 311416 - DNA, 25 bp, Artificial
  Probe
cacatcataggaggtgagaaattct

SEQ ID NO: 311417 - DNA, 25 bp, Artificial
  Probe
ccaggctgcctctgggctgtgcaaa

SEQ ID NO: 311418 - DNA, 25 bp, Artificial
  Probe
cttgggctccactgccaagtccttg

SEQ ID NO: 311419 - DNA, 25 bp, Artificial
  Probe
gaacaggcttctgcacctccaagca

SEQ ID NO: 311420 - DNA, 25 bp, Artificial
  Probe
ctgccttcccatatttcatgaatgg

SEQ ID NO: 311421 - DNA, 25 bp, Artificial
  Probe
ggtgactctcttccatgcccatctt

SEQ ID NO: 311422 - DNA, 25 bp, Artificial
  Probe
cagtttttgtatcttggggcaagac

SEQ ID NO: 311423 - DNA, 25 bp, Artificial
  Probe
gcagctctggttttccttcacactc

SEQ ID NO: 311424 - DNA, 25 bp, Artificial
  Probe
taactgacaggcaacagccagttgt

SEQ ID NO: 311425 - DNA, 25 bp, Artificial
  Probe
tttcccatgtacattatggatcatg

SEQ ID NO: 311426 - DNA, 25 bp, Artificial
  Probe
cgtgggacgcattgactgtaccaca

SEQ ID NO: 311427 - DNA, 25 bp, Artificial
  Probe
gatcccttggtggtgactttgtaga

SEQ ID NO: 311428 - DNA, 25 bp, Artificial
  Probe
tggttttccttcacactctaccagg

SEQ ID NO: 311429 - DNA, 25 bp, Artificial
  Probe
agccagttgtattgggcagctctgg

SEQ ID NO: 311430 - DNA, 25 bp, Artificial
  Probe
cccttggtggtgactttgtagacgt

SEQ ID NO: 311431 - DNA, 25 bp, Artificial
  Probe
actgacaggcaacagccagttgtat

SEQ ID NO: 311432 - DNA, 25 bp, Artificial
  Probe
cgcattgactgtaccacagacatgt

SEQ ID NO: 311433 - DNA, 25 bp, Artificial
  Probe
ctactaactgacaggcaacagccag

SEQ ID NO: 311434 - DNA, 25 bp, Artificial
  Probe
tgccatcattgatcccttggtggtg

SEQ ID NO: 311435 - DNA, 25 bp, Artificial
  Probe
ggttttccttcacactctaccagga

SEQ ID NO: 311436 - DNA, 25 bp, Artificial
  Probe
gacaccttctactaactgacaggca

SEQ ID NO: 311437 - DNA, 25 bp, Artificial
  Probe
aagacaccttctactaactgacagg

SEQ ID NO: 311438 - DNA, 25 bp, Artificial
  Probe
tgcacttttgaatccaatctcagtg

SEQ ID NO: 311439 - DNA, 25 bp, Artificial
  Probe
ttcccatgtacattatggatcatgt

SEQ ID NO: 311440 - DNA, 25 bp, Artificial
  Probe
tcagtggcaagacaccttctactaa

SEQ ID NO: 311441 - DNA, 25 bp, Artificial
  Probe
tagaagcgtgggacgcattgactgt

SEQ ID NO: 311442 - DNA, 25 bp, Artificial
  Probe
tcattgatcccttggtggtgacttt

SEQ ID NO: 311443 - DNA, 25 bp, Artificial
  Probe
ccttctactaactgacaggcaacag

SEQ ID NO: 311444 - DNA, 25 bp, Artificial
  Probe
ggcaagacaccttctactaactgac

SEQ ID NO: 311445 - DNA, 25 bp, Artificial
  Probe
gcaacagccagttgtattgggcagc

SEQ ID NO: 311446 - DNA, 25 bp, Artificial
  Probe
attgggcagctctggttttccttca

SEQ ID NO: 311447 - DNA, 25 bp, Artificial
  Probe
gtatcttggggcaagactgcaaact

SEQ ID NO: 311448 - DNA, 25 bp, Artificial
  Probe
atcattgatcccttggtggtgactt

SEQ ID NO: 311449 - DNA, 25 bp, Artificial
  Probe
tgaatccaatctcagtggcaagaca

SEQ ID NO: 311450 - DNA, 25 bp, Artificial
  Probe
tgactgtaccacagacatgtatact

SEQ ID NO: 311451 - DNA, 25 bp, Artificial
  Probe
atccaatctcagtggcaagacacct

SEQ ID NO: 311452 - DNA, 25 bp, Artificial
  Probe
gtattgggcagctctggttttcctt

SEQ ID NO: 311453 - DNA, 25 bp, Artificial
  Probe
ctgacaggcaacagccagttgtatt

SEQ ID NO: 311454 - DNA, 25 bp, Artificial
  Probe
atcttggggcaagactgcaaacttt

SEQ ID NO: 311455 - DNA, 25 bp, Artificial
  Probe
acttttgaatccaatctcagtggca

SEQ ID NO: 311456 - DNA, 25 bp, Artificial
  Probe
tgggacgcattgactgtaccacaga

SEQ ID NO: 311457 - DNA, 25 bp, Artificial
  Probe
ttgtattgggcagctctggttttcc

SEQ ID NO: 311458 - DNA, 25 bp, Artificial
  Probe
gactttcccatgtacattatggatc

SEQ ID NO: 311459 - DNA, 25 bp, Artificial
  Probe
caggactttcccatgtacattatgg

SEQ ID NO: 311460 - DNA, 25 bp, Artificial
  Probe
gactgtaccacagacatgtatactt

SEQ ID NO: 311461 - DNA, 25 bp, Artificial
  Probe
aatctcagtggcaagacaccttcta

SEQ ID NO: 311462 - DNA, 25 bp, Artificial
  Probe
agcgtgggacgcattgactgtacca

SEQ ID NO: 311463 - DNA, 25 bp, Artificial
  Probe
caggcaacagccagttgtattgggc

SEQ ID NO: 311464 - DNA, 25 bp, Artificial
  Probe
tcttggggcaagactgcaaactttt

SEQ ID NO: 311465 - DNA, 25 bp, Artificial
  Probe
aggactttcccatgtacattatgga

SEQ ID NO: 311466 - DNA, 25 bp, Artificial
  Probe
gttgtattgggcagctctggttttc

SEQ ID NO: 311467 - DNA, 25 bp, Artificial
  Probe
ttcgtttgccatcattgatcccttg

SEQ ID NO: 311468 - DNA, 25 bp, Artificial
  Probe
atggtagtcctataacattatcatg

SEQ ID NO: 311469 - DNA, 25 bp, Artificial
  Probe
gtgatacacacagcaaatgacaaat

SEQ ID NO: 311470 - DNA, 25 bp, Artificial
  Probe
caacttatgactcaagtttgagatg

SEQ ID NO: 311471 - DNA, 25 bp, Artificial
  Probe
gacctttagctttcatgtgaaagaa

SEQ ID NO: 311472 - DNA, 25 bp, Artificial
  Probe
atctacttcagcatggccaacatag

SEQ ID NO: 311473 - DNA, 25 bp, Artificial
  Probe
tctacttcagcatggccaacatagt

SEQ ID NO: 311474 - DNA, 25 bp, Artificial
  Probe
aatagttgggatctcttttcatcca

SEQ ID NO: 311475 - DNA, 25 bp, Artificial
  Probe
catcaccagggtgtattagagaaga

SEQ ID NO: 311476 - DNA, 25 bp, Artificial
  Probe
cctctgtaaacatcaccagggtgta

SEQ ID NO: 311477 - DNA, 25 bp, Artificial
  Probe
tgttctgtgttatcctctgtaaaca

SEQ ID NO: 311478 - DNA, 25 bp, Artificial
  Probe
ttctcttattgtcagacattgtagt

SEQ ID NO: 311479 - DNA, 25 bp, Artificial
  Probe
taaagacctttagctttcatgtgaa

SEQ ID NO: 311480 - DNA, 25 bp, Artificial
  Probe
ctgtaaacatcaccagggtgtatta

SEQ ID NO: 311481 - DNA, 25 bp, Artificial
  Probe
gatacacacagcaaatgacaaatgt

SEQ ID NO: 311482 - DNA, 25 bp, Artificial
  Probe
acatagtgactttcaagacaggctg

SEQ ID NO: 311483 - DNA, 25 bp, Artificial
  Probe
caagacaggctgagctgtatagtgg

SEQ ID NO: 311484 - DNA, 25 bp, Artificial
  Probe
ccaacatagtgactttcaagacagg

SEQ ID NO: 311485 - DNA, 25 bp, Artificial
  Probe
aagacctttagctttcatgtgaaag

SEQ ID NO: 311486 - DNA, 25 bp, Artificial
  Probe
tggtacaacttatgactcaagtttg

SEQ ID NO: 311487 - DNA, 25 bp, Artificial
  Probe
acatcaccagggtgtattagagaag

SEQ ID NO: 311488 - DNA, 25 bp, Artificial
  Probe
ccatgtgatacacacagcaaatgac

SEQ ID NO: 311489 - DNA, 25 bp, Artificial
  Probe
gttctgtgttatcctctgtaaacat

SEQ ID NO: 311490 - DNA, 25 bp, Artificial
  Probe
cacacagcaaatgacaaatgttggt

SEQ ID NO: 311491 - DNA, 25 bp, Artificial
  Probe
ggatctcttttcatccatgtgatac

SEQ ID NO: 311492 - DNA, 25 bp, Artificial
  Probe
gtaaacatcaccagggtgtattaga

SEQ ID NO: 311493 - DNA, 25 bp, Artificial
  Probe
tgaaatctacttcagcatggccaac

SEQ ID NO: 311494 - DNA, 25 bp, Artificial
  Probe
acacacagcaaatgacaaatgttgg

SEQ ID NO: 311495 - DNA, 25 bp, Artificial
  Probe
gttatcctctgtaaacatcaccagg

SEQ ID NO: 311496 - DNA, 25 bp, Artificial
  Probe
tgaatgctcaggaaagtctaatagc

SEQ ID NO: 311497 - DNA, 25 bp, Artificial
  Probe
tgggatctcttttcatccatgtgat

SEQ ID NO: 311498 - DNA, 25 bp, Artificial
  Probe
gataaagacctttagctttcatgtg

SEQ ID NO: 311499 - DNA, 25 bp, Artificial
  Probe
aacatagtgactttcaagacaggct

SEQ ID NO: 311500 - DNA, 25 bp, Artificial
  Probe
aaagtgttctgtgttatcctctgta

SEQ ID NO: 311501 - DNA, 25 bp, Artificial
  Probe
gaaatctacttcagcatggccaaca

SEQ ID NO: 311502 - DNA, 25 bp, Artificial
  Probe
tttctcttattgtcagacattgtag

SEQ ID NO: 311503 - DNA, 25 bp, Artificial
  Probe
ggtagtcctataacattatcatgga

SEQ ID NO: 311504 - DNA, 25 bp, Artificial
  Probe
tgtgaaatctacttcagcatggcca

SEQ ID NO: 311505 - DNA, 25 bp, Artificial
  Probe
atccatgtgatacacacagcaaatg

SEQ ID NO: 311506 - DNA, 25 bp, Artificial
  Probe
tagttgggatctcttttcatccatg

SEQ ID NO: 311507 - DNA, 25 bp, Artificial
  Probe
gtggtacaacttatgactcaagttt

SEQ ID NO: 311508 - DNA, 25 bp, Artificial
  Probe
tttctgtgaaatctacttcagcatg

SEQ ID NO: 311509 - DNA, 25 bp, Artificial
  Probe
tctcttattgtcagacattgtagtg

SEQ ID NO: 311510 - DNA, 25 bp, Artificial
  Probe
agacctttagctttcatgtgaaaga

SEQ ID NO: 311511 - DNA, 25 bp, Artificial
  Probe
ctcttattgtcagacattgtagtgt

SEQ ID NO: 311512 - DNA, 25 bp, Artificial
  Probe
tgttgtggtacaacttatgactcaa

SEQ ID NO: 311513 - DNA, 25 bp, Artificial
  Probe
ttgtggtacaacttatgactcaagt

SEQ ID NO: 311514 - DNA, 25 bp, Artificial
  Probe
agatatcttgaaagttcctgaagtc

SEQ ID NO: 311515 - DNA, 25 bp, Artificial
  Probe
gttcctgaagtcaggctcagctctc

SEQ ID NO: 311516 - DNA, 25 bp, Artificial
  Probe
agttcctgaagtcaggctcagctct

SEQ ID NO: 311517 - DNA, 25 bp, Artificial
  Probe
agtcaggctcagctctccaggacag

SEQ ID NO: 311518 - DNA, 25 bp, Artificial
  Probe
tttgtgtcggctatagtttgggacc

SEQ ID NO: 311519 - DNA, 25 bp, Artificial
  Probe
ttatgtggcccagaagttttagttc

SEQ ID NO: 311520 - DNA, 25 bp, Artificial
  Probe
ttttctcctatttaagcttgaagga

SEQ ID NO: 311521 - DNA, 25 bp, Artificial
  Probe
gtgtgacttatgtggcccagaagtt

SEQ ID NO: 311522 - DNA, 25 bp, Artificial
  Probe
agtttgggacccagccactgctcat

SEQ ID NO: 311523 - DNA, 25 bp, Artificial
  Probe
ctcctatttaagcttgaaggagttt

SEQ ID NO: 311524 - DNA, 25 bp, Artificial
  Probe
gaaagttcctgaagtcaggctcagc

SEQ ID NO: 311525 - DNA, 25 bp, Artificial
  Probe
aggctcagctctccaggacagtaaa

SEQ ID NO: 311526 - DNA, 25 bp, Artificial
  Probe
tcacctcagtgtgacttatgtggcc

SEQ ID NO: 311527 - DNA, 25 bp, Artificial
  Probe
ctgaagtcaggctcagctctccagg

SEQ ID NO: 311528 - DNA, 25 bp, Artificial
  Probe
tttcacctcagtgtgacttatgtgg

SEQ ID NO: 311529 - DNA, 25 bp, Artificial
  Probe
tggcccagaagttttagttctgcag

SEQ ID NO: 311530 - DNA, 25 bp, Artificial
  Probe
gtggcccagaagttttagttctgca

SEQ ID NO: 311531 - DNA, 25 bp, Artificial
  Probe
ctatagtttgggacccagccactgc

SEQ ID NO: 311532 - DNA, 25 bp, Artificial
  Probe
agtgtgacttatgtggcccagaagt

SEQ ID NO: 311533 - DNA, 25 bp, Artificial
  Probe
tgtgtcggctatagtttgggaccca

SEQ ID NO: 311534 - DNA, 25 bp, Artificial
  Probe
ggacccagccactgctcataaggaa

SEQ ID NO: 311535 - DNA, 25 bp, Artificial
  Probe
tcagtgtgacttatgtggcccagaa

SEQ ID NO: 311536 - DNA, 25 bp, Artificial
  Probe
tcagctctccaggacagtaaattat

SEQ ID NO: 311537 - DNA, 25 bp, Artificial
  Probe
taaggaaatactcagtgctgtcgtt

SEQ ID NO: 311538 - DNA, 25 bp, Artificial
  Probe
tattttcacctcagtgtgacttatg

SEQ ID NO: 311539 - DNA, 25 bp, Artificial
  Probe
tatcttgaaagttcctgaagtcagg

SEQ ID NO: 311540 - DNA, 25 bp, Artificial
  Probe
tctcctatttaagcttgaaggagtt

SEQ ID NO: 311541 - DNA, 25 bp, Artificial
  Probe
cttatgtggcccagaagttttagtt

SEQ ID NO: 311542 - DNA, 25 bp, Artificial
  Probe
cctatttaagcttgaaggagtttct

SEQ ID NO: 311543 - DNA, 25 bp, Artificial
  Probe
gtcggctatagtttgggacccagcc

SEQ ID NO: 311544 - DNA, 25 bp, Artificial
  Probe
aatactcagtgctgtcgttggaatt

SEQ ID NO: 311545 - DNA, 25 bp, Artificial
  Probe
attttcacctcagtgtgacttatgt

SEQ ID NO: 311546 - DNA, 25 bp, Artificial
  Probe
ttgtgtcggctatagtttgggaccc

SEQ ID NO: 311547 - DNA, 25 bp, Artificial
  Probe
ttctcctatttaagcttgaaggagt

SEQ ID NO: 311548 - DNA, 25 bp, Artificial
  Probe
gatatcttgaaagttcctgaagtca

SEQ ID NO: 311549 - DNA, 25 bp, Artificial
  Probe
tcggctatagtttgggacccagcca

SEQ ID NO: 311550 - DNA, 25 bp, Artificial
  Probe
gaaatactcagtgctgtcgttggaa

SEQ ID NO: 311551 - DNA, 25 bp, Artificial
  Probe
ccactgctcataaggaaatactcag

SEQ ID NO: 311552 - DNA, 25 bp, Artificial
  Probe
cctcagtgtgacttatgtggcccag

SEQ ID NO: 311553 - DNA, 25 bp, Artificial
  Probe
cttgaaagttcctgaagtcaggctc

SEQ ID NO: 311554 - DNA, 25 bp, Artificial
  Probe
gccactgctcataaggaaatactca

SEQ ID NO: 311555 - DNA, 25 bp, Artificial
  Probe
ctcagtgctgtcgttggaatttatt

SEQ ID NO: 311556 - DNA, 25 bp, Artificial
  Probe
acccagccactgctcataaggaaat

SEQ ID NO: 311557 - DNA, 25 bp, Artificial
  Probe
actcagtgctgtcgttggaatttat

SEQ ID NO: 311558 - DNA, 25 bp, Artificial
  Probe
gaagtcaggctcagctctccaggac

SEQ ID NO: 311559 - DNA, 25 bp, Artificial
  Probe
tcttgaaagttcctgaagtcaggct

SEQ ID NO: 311560 - DNA, 25 bp, Artificial
  Probe
gttcactccattaggctgtgaagtg

SEQ ID NO: 311561 - DNA, 25 bp, Artificial
  Probe
acagatcctctcaggcacaagagtt

SEQ ID NO: 311562 - DNA, 25 bp, Artificial
  Probe
ctcaggcacaagagtttacaattga

SEQ ID NO: 311563 - DNA, 25 bp, Artificial
  Probe
cccgaggtactgagggataattcta

SEQ ID NO: 311564 - DNA, 25 bp, Artificial
  Probe
gtcaatccagtgatgttcactccat

SEQ ID NO: 311565 - DNA, 25 bp, Artificial
  Probe
gagtcagacgcacaagggttaaaat

SEQ ID NO: 311566 - DNA, 25 bp, Artificial
  Probe
gaccttcctcttttggaactcacag

SEQ ID NO: 311567 - DNA, 25 bp, Artificial
  Probe
ggttaaaatcccaactgctggtctc

SEQ ID NO: 311568 - DNA, 25 bp, Artificial
  Probe
actcacagcattatctacctggggg

SEQ ID NO: 311569 - DNA, 25 bp, Artificial
  Probe
ccagaacccgaggtactgagggata

SEQ ID NO: 311570 - DNA, 25 bp, Artificial
  Probe
caactgctggtctctacctggccat

SEQ ID NO: 311571 - DNA, 25 bp, Artificial
  Probe
atacagagtggtccagaacccgagg

SEQ ID NO: 311572 - DNA, 25 bp, Artificial
  Probe
gttaaaatcccaactgctggtctct

SEQ ID NO: 311573 - DNA, 25 bp, Artificial
  Probe
aatcccaactgctggtctctacctg

SEQ ID NO: 311574 - DNA, 25 bp, Artificial
  Probe
atgaactcacagaaaggacacaagt

SEQ ID NO: 311575 - DNA, 25 bp, Artificial
  Probe
gtccagaacccgaggtactgaggga

SEQ ID NO: 311576 - DNA, 25 bp, Artificial
  Probe
tgctggtctctacctggccatcagt

SEQ ID NO: 311577 - DNA, 25 bp, Artificial
  Probe
aagacagatcctctcaggcacaaga

SEQ ID NO: 311578 - DNA, 25 bp, Artificial
  Probe
ctctacctggccatcagtgagctct

SEQ ID NO: 311579 - DNA, 25 bp, Artificial
  Probe
ggagccattgtcattattttcaata

SEQ ID NO: 311580 - DNA, 25 bp, Artificial
  Probe
actccattaggctgtgaagtgagag

SEQ ID NO: 311581 - DNA, 25 bp, Artificial
  Probe
gagtggtccagaacccgaggtactg

SEQ ID NO: 311582 - DNA, 25 bp, Artificial
  Probe
gtcagacgcacaagggttaaaatcc

SEQ ID NO: 311583 - DNA, 25 bp, Artificial
  Probe
attattttcaatacagagtggtcca

SEQ ID NO: 311584 - DNA, 25 bp, Artificial
  Probe
acccgaggtactgagggataattct

SEQ ID NO: 311585 - DNA, 25 bp, Artificial
  Probe
tggaactcacagcattatctacctg

SEQ ID NO: 311586 - DNA, 25 bp, Artificial
  Probe
tacctggccatcagtgagctctttc

SEQ ID NO: 311587 - DNA, 25 bp, Artificial
  Probe
gtttacaattgaggagccattgtca

SEQ ID NO: 311588 - DNA, 25 bp, Artificial
  Probe
tcattattttcaatacagagtggtc

SEQ ID NO: 311589 - DNA, 25 bp, Artificial
  Probe
actgctggtctctacctggccatca

SEQ ID NO: 311590 - DNA, 25 bp, Artificial
  Probe
ttacaattgaggagccattgtcatt

SEQ ID NO: 311591 - DNA, 25 bp, Artificial
  Probe
agcatggagtcagacgcacaagggt

SEQ ID NO: 311592 - DNA, 25 bp, Artificial
  Probe
tggccatcagtgagctctttcactt

SEQ ID NO: 311593 - DNA, 25 bp, Artificial
  Probe
ttgaggagccattgtcattattttc

SEQ ID NO: 311594 - DNA, 25 bp, Artificial
  Probe
tgaggagccattgtcattattttca

SEQ ID NO: 311595 - DNA, 25 bp, Artificial
  Probe
ctggtctctacctggccatcagtga

SEQ ID NO: 311596 - DNA, 25 bp, Artificial
  Probe
acagagtggtccagaacccgaggta

SEQ ID NO: 311597 - DNA, 25 bp, Artificial
  Probe
aggagccattgtcattattttcaat

SEQ ID NO: 311598 - DNA, 25 bp, Artificial
  Probe
ggagtcagacgcacaagggttaaaa

SEQ ID NO: 311599 - DNA, 25 bp, Artificial
  Probe
cctgtaagtcaatccagtgatgttc

SEQ ID NO: 311600 - DNA, 25 bp, Artificial
  Probe
cacctgtaagtcaatccagtgatgt

SEQ ID NO: 311601 - DNA, 25 bp, Artificial
  Probe
aatccagtgatgttcactccattag

SEQ ID NO: 311602 - DNA, 25 bp, Artificial
  Probe
atcctctcaggcacaagagtttaca

SEQ ID NO: 311603 - DNA, 25 bp, Artificial
  Probe
atcccaactgctggtctctacctgg

SEQ ID NO: 311604 - DNA, 25 bp, Artificial
  Probe
gaacccgaggtactgagggataatt

SEQ ID NO: 311605 - DNA, 25 bp, Artificial
  Probe
ccattaggctgtgaagtgagaggct

SEQ ID NO: 311606 - DNA, 25 bp, Artificial
  Probe
gcatgagtcaaacactcattgatat

SEQ ID NO: 311607 - DNA, 25 bp, Artificial
  Probe
cttctgtgagatggtcatttcactg

SEQ ID NO: 311608 - DNA, 25 bp, Artificial
  Probe
gactggcccttagtcattaaaacaa

SEQ ID NO: 311609 - DNA, 25 bp, Artificial
  Probe
cctcaaacccaggatagcatgccag

SEQ ID NO: 311610 - DNA, 25 bp, Artificial
  Probe
ggtttgcagtagagccccatatgac

SEQ ID NO: 311611 - DNA, 25 bp, Artificial
  Probe
tccttgggccttcttctttcgtggc

SEQ ID NO: 311612 - DNA, 25 bp, Artificial
  Probe
cagtttatctgcaagctggagggaa

SEQ ID NO: 311613 - DNA, 25 bp, Artificial
  Probe
aactggcatagctgccaagcaagaa

SEQ ID NO: 311614 - DNA, 25 bp, Artificial
  Probe
ctttgagatatttctgccttctaga

SEQ ID NO: 311615 - DNA, 25 bp, Artificial
  Probe
ttatctgcaagctggagggaattac

SEQ ID NO: 311616 - DNA, 25 bp, Artificial
  Probe
gtggcccttcctgctcctgataata

SEQ ID NO: 311617 - DNA, 25 bp, Artificial
  Probe
cttgatctggccttacattagccct

SEQ ID NO: 311618 - DNA, 25 bp, Artificial
  Probe
gcaagaattagctcggctgagctct

SEQ ID NO: 311619 - DNA, 25 bp, Artificial
  Probe
gagggaatctcaacaacacttctgt

SEQ ID NO: 311620 - DNA, 25 bp, Artificial
  Probe
caaattgcactggtgctgtttatta

SEQ ID NO: 311621 - DNA, 25 bp, Artificial
  Probe
aaactcaaattgcactggtgctgtt

SEQ ID NO: 311622 - DNA, 25 bp, Artificial
  Probe
ggcatgagtcaaacactcattgata

SEQ ID NO: 311623 - DNA, 25 bp, Artificial
  Probe
aggtttgcagtagagccccatatga

SEQ ID NO: 311624 - DNA, 25 bp, Artificial
  Probe
ttgagatatttctgccttctagatt

SEQ ID NO: 311625 - DNA, 25 bp, Artificial
  Probe
tcgtggcccttcctgctcctgataa

SEQ ID NO: 311626 - DNA, 25 bp, Artificial
  Probe
ctcctgataatagtgaactggcata

SEQ ID NO: 311627 - DNA, 25 bp, Artificial
  Probe
tgagctctgtattctggtgaatggc

SEQ ID NO: 311628 - DNA, 25 bp, Artificial
  Probe
ataatagtgaactggcatagctgcc

SEQ ID NO: 311629 - DNA, 25 bp, Artificial
  Probe
tatgactggcccttagtcattaaaa

SEQ ID NO: 311630 - DNA, 25 bp, Artificial
  Probe
tggccttacattagccctaacacag

SEQ ID NO: 311631 - DNA, 25 bp, Artificial
  Probe
tgagatggtcatttcactgttgagc

SEQ ID NO: 311632 - DNA, 25 bp, Artificial
  Probe
agcaagaattagctcggctgagctc

SEQ ID NO: 311633 - DNA, 25 bp, Artificial
  Probe
gccccatatgactggcccttagtca

SEQ ID NO: 311634 - DNA, 25 bp, Artificial
  Probe
gatctggccttacattagccctaac

SEQ ID NO: 311635 - DNA, 25 bp, Artificial
  Probe
aattagctcggctgagctctgtatt

SEQ ID NO: 311636 - DNA, 25 bp, Artificial
  Probe
tgtccttgggccttcttctttcgtg

SEQ ID NO: 311637 - DNA, 25 bp, Artificial
  Probe
cactgttgagcatgtgtttatgagc

SEQ ID NO: 311638 - DNA, 25 bp, Artificial
  Probe
tagtgaactggcatagctgccaagc

SEQ ID NO: 311639 - DNA, 25 bp, Artificial
  Probe
atacctttatcctgggctgcagaaa

SEQ ID NO: 311640 - DNA, 25 bp, Artificial
  Probe
tctcagcacatacctttatcctggg

SEQ ID NO: 311641 - DNA, 25 bp, Artificial
  Probe
catttcactgttgagcatgtgttta

SEQ ID NO: 311642 - DNA, 25 bp, Artificial
  Probe
gatatttctgccttctagattatgg

SEQ ID NO: 311643 - DNA, 25 bp, Artificial
  Probe
agccctaacacagtttatctgcaag

SEQ ID NO: 311644 - DNA, 25 bp, Artificial
  Probe
cccaggatagcatgccagcttttct

SEQ ID NO: 311645 - DNA, 25 bp, Artificial
  Probe
cagtagagccccatatgactggccc

SEQ ID NO: 311646 - DNA, 25 bp, Artificial
  Probe
tgctttttggagactggccagggca

SEQ ID NO: 311647 - DNA, 25 bp, Artificial
  Probe
gttggatgtccttgggccttcttct

SEQ ID NO: 311648 - DNA, 25 bp, Artificial
  Probe
ctttttggagactggccagggcaga

SEQ ID NO: 311649 - DNA, 25 bp, Artificial
  Probe
tctgcaagctggagggaattacatg

SEQ ID NO: 311650 - DNA, 25 bp, Artificial
  Probe
tgggccttcttctttcgtggccctt

SEQ ID NO: 311651 - DNA, 25 bp, Artificial
  Probe
ttttaaaactcaaattgcactggtg

SEQ ID NO: 311652 - DNA, 25 bp, Artificial
  Probe
atgcaggctatgacggaactactac

SEQ ID NO: 311653 - DNA, 25 bp, Artificial
  Probe
gagagacttctgtgcgtatacaagc

SEQ ID NO: 311654 - DNA, 25 bp, Artificial
  Probe
gttcagacaagcagaacatttctaa

SEQ ID NO: 311655 - DNA, 25 bp, Artificial
  Probe
ttgtatgttgctagagactttcgtc

SEQ ID NO: 311656 - DNA, 25 bp, Artificial
  Probe
agactttcgtcaggtcagggggaca

SEQ ID NO: 311657 - DNA, 25 bp, Artificial
  Probe
tatacgacagcctctgagttggggc

SEQ ID NO: 311658 - DNA, 25 bp, Artificial
  Probe
taacgttgaatgttccttaaaggct

SEQ ID NO: 311659 - DNA, 25 bp, Artificial
  Probe
ccgttgtatgttgctagagactttc

SEQ ID NO: 311660 - DNA, 25 bp, Artificial
  Probe
ttccttaaaggctgacacttctgaa

SEQ ID NO: 311661 - DNA, 25 bp, Artificial
  Probe
gaaacaggccgttgtatgttgctag

SEQ ID NO: 311662 - DNA, 25 bp, Artificial
  Probe
tttcgtcaggtcagggggacacaca

SEQ ID NO: 311663 - DNA, 25 bp, Artificial
  Probe
gttaccaagtcaacgacaagcctta

SEQ ID NO: 311664 - DNA, 25 bp, Artificial
  Probe
cagcctctgagttggggcaaagaag

SEQ ID NO: 311665 - DNA, 25 bp, Artificial
  Probe
aggctatgacggaactactaccttg

SEQ ID NO: 311666 - DNA, 25 bp, Artificial
  Probe
ctaaacgagaagtccgagctgaacg

SEQ ID NO: 311667 - DNA, 25 bp, Artificial
  Probe
ctatgacggaactactaccttgcta

SEQ ID NO: 311668 - DNA, 25 bp, Artificial
  Probe
ctaccttgctatggatgagggttgg

SEQ ID NO: 311669 - DNA, 25 bp, Artificial
  Probe
caggtcagggggacacacagtcttg

SEQ ID NO: 311670 - DNA, 25 bp, Artificial
  Probe
cacttctgaagcaatgttaggaaag

SEQ ID NO: 311671 - DNA, 25 bp, Artificial
  Probe
ttttgagagacttctgtgcgtatac

SEQ ID NO: 311672 - DNA, 25 bp, Artificial
  Probe
ggctgacacttctgaagcaatgtta

SEQ ID NO: 311673 - DNA, 25 bp, Artificial
  Probe
cttgtcacatatgaagagatgttac

SEQ ID NO: 311674 - DNA, 25 bp, Artificial
  Probe
gataatgacggcatgttcagacaag

SEQ ID NO: 311675 - DNA, 25 bp, Artificial
  Probe
cgagctgaacgactgaaaagagatt

SEQ ID NO: 311676 - DNA, 25 bp, Artificial
  Probe
gagatgttaccaagtcaacgacaag

SEQ ID NO: 311677 - DNA, 25 bp, Artificial
  Probe
acagtcttgtcacatatgaagagat

SEQ ID NO: 311678 - DNA, 25 bp, Artificial
  Probe
acaagcagaacatttctaaacgaga

SEQ ID NO: 311679 - DNA, 25 bp, Artificial
  Probe
gattatgcaggctatgacggaacta

SEQ ID NO: 311680 - DNA, 25 bp, Artificial
  Probe
acgagaagtccgagctgaacgactg

SEQ ID NO: 311681 - DNA, 25 bp, Artificial
  Probe
tctgtgcgtatacaagcagataatg

SEQ ID NO: 311682 - DNA, 25 bp, Artificial
  Probe
tgaaaagagattcctcgccatattg

SEQ ID NO: 311683 - DNA, 25 bp, Artificial
  Probe
ttgtcacatatgaagagatgttacc

SEQ ID NO: 311684 - DNA, 25 bp, Artificial
  Probe
tatgttgctagagactttcgtcagg

SEQ ID NO: 311685 - DNA, 25 bp, Artificial
  Probe
gttttatacgacagcctctgagttg

SEQ ID NO: 311686 - DNA, 25 bp, Artificial
  Probe
tgtatgttgctagagactttcgtca

SEQ ID NO: 311687 - DNA, 25 bp, Artificial
  Probe
tgacacttctgaagcaatgttagga

SEQ ID NO: 311688 - DNA, 25 bp, Artificial
  Probe
ctagagactttcgtcaggtcagggg

SEQ ID NO: 311689 - DNA, 25 bp, Artificial
  Probe
aggtcagggggacacacagtcttgt

SEQ ID NO: 311690 - DNA, 25 bp, Artificial
  Probe
cagacaagcagaacatttctaaacg

SEQ ID NO: 311691 - DNA, 25 bp, Artificial
  Probe
gacttctgtgcgtatacaagcagat

SEQ ID NO: 311692 - DNA, 25 bp, Artificial
  Probe
tggtctcatagaagctaatttggct

SEQ ID NO: 311693 - DNA, 25 bp, Artificial
  Probe
aatgttccttaaaggctgacacttc

SEQ ID NO: 311694 - DNA, 25 bp, Artificial
  Probe
cagggggacacacagtcttgtcaca

SEQ ID NO: 311695 - DNA, 25 bp, Artificial
  Probe
gtctcatagaagctaatttggctta

SEQ ID NO: 311696 - DNA, 25 bp, Artificial
  Probe
cttctgaagcaatgttaggaaagac

SEQ ID NO: 311697 - DNA, 25 bp, Artificial
  Probe
aagcagaacatttctaaacgagaag

SEQ ID NO: 311698 - DNA, 25 bp, Artificial
  Probe
acgctgagagaagctgcagccatct

SEQ ID NO: 311699 - DNA, 25 bp, Artificial
  Probe
ttcctggctcccaatgtgtcgtcag

SEQ ID NO: 311700 - DNA, 25 bp, Artificial
  Probe
aaggaaccgaaactgatgggagcta

SEQ ID NO: 311701 - DNA, 25 bp, Artificial
  Probe
cctgctccctttttctgcacatgag

SEQ ID NO: 311702 - DNA, 25 bp, Artificial
  Probe
gtcgcctggacttcctatggaaaaa

SEQ ID NO: 311703 - DNA, 25 bp, Artificial
  Probe
cacacggccgggattgcgagtagcc

SEQ ID NO: 311704 - DNA, 25 bp, Artificial
  Probe
agatcctcaataaaatgtctccagg

SEQ ID NO: 311705 - DNA, 25 bp, Artificial
  Probe
caccatcctcctggtgttcactatg

SEQ ID NO: 311706 - DNA, 25 bp, Artificial
  Probe
gtggcatcttgttccctatttctgc

SEQ ID NO: 311707 - DNA, 25 bp, Artificial
  Probe
cagccgaggtgtcatcaaggtcaag

SEQ ID NO: 311708 - DNA, 25 bp, Artificial
  Probe
agctcatcggccagaaccggcgcaa

SEQ ID NO: 311709 - DNA, 25 bp, Artificial
  Probe
gcaaagggcaactctgtacctactt

SEQ ID NO: 311710 - DNA, 25 bp, Artificial
  Probe
agcctgctcttcttaccagtgtcgt

SEQ ID NO: 311711 - DNA, 25 bp, Artificial
  Probe
ttctgcttctgctgtggctggtggc

SEQ ID NO: 311712 - DNA, 25 bp, Artificial
  Probe
ggcaactctgtacctacttcctgaa

SEQ ID NO: 311713 - DNA, 25 bp, Artificial
  Probe
aatgtactccctgcacacgtggcgc

SEQ ID NO: 311714 - DNA, 25 bp, Artificial
  Probe
tttaaggaattctactcggaatcca

SEQ ID NO: 311715 - DNA, 25 bp, Artificial
  Probe
acatcaaccatgaggggctagagtg

SEQ ID NO: 311716 - DNA, 25 bp, Artificial
  Probe
tggctcggcagaatgagtattactg

SEQ ID NO: 311717 - DNA, 25 bp, Artificial
  Probe
gcatccatcccagactttaaggaat

SEQ ID NO: 311718 - DNA, 25 bp, Artificial
  Probe
aatgagtattactgtcgcctggact

SEQ ID NO: 311719 - DNA, 25 bp, Artificial
  Probe
aaggaattctactcggaatccaaca

SEQ ID NO: 311720 - DNA, 25 bp, Artificial
  Probe
tcattgcccgcctttatcaaggctc

SEQ ID NO: 311721 - DNA, 25 bp, Artificial
  Probe
tcgaactgaagctgcttctgcttct

SEQ ID NO: 311722 - DNA, 25 bp, Artificial
  Probe
ctcggaatccaacatcaaccatgag

SEQ ID NO: 311723 - DNA, 25 bp, Artificial
  Probe
tgcgagtagccctgggcacagccac

SEQ ID NO: 311724 - DNA, 25 bp, Artificial
  Probe
gtgtcgtcagactgccctttcctgg

SEQ ID NO: 311725 - DNA, 25 bp, Artificial
  Probe
cctcgtcctggctcggcagaatgag

SEQ ID NO: 311726 - DNA, 25 bp, Artificial
  Probe
atcaaggctcattgggctccaggcc

SEQ ID NO: 311727 - DNA, 25 bp, Artificial
  Probe
gggagctatctacttcttcatcttc

SEQ ID NO: 311728 - DNA, 25 bp, Artificial
  Probe
acttcctgaacacagacctgacacg

SEQ ID NO: 311729 - DNA, 25 bp, Artificial
  Probe
gccatctgggcaccatggtggaatt

SEQ ID NO: 311730 - DNA, 25 bp, Artificial
  Probe
ccaagtgaccgaggagacagctagg

SEQ ID NO: 311731 - DNA, 25 bp, Artificial
  Probe
ctaccatcagtcgtacgaatgtgtt

SEQ ID NO: 311732 - DNA, 25 bp, Artificial
  Probe
acccctgggcaggacacacaacagg

SEQ ID NO: 311733 - DNA, 25 bp, Artificial
  Probe
tcctggtggccacacggccgggatt

SEQ ID NO: 311734 - DNA, 25 bp, Artificial
  Probe
cacggccgggattgcgagtagccct

SEQ ID NO: 311735 - DNA, 25 bp, Artificial
  Probe
atggccgtcgtcagcctgctcttct

SEQ ID NO: 311736 - DNA, 25 bp, Artificial
  Probe
acagacctgacacgaaccggatctc

SEQ ID NO: 311737 - DNA, 25 bp, Artificial
  Probe
gctgggtttcctttcctgctccctt

SEQ ID NO: 311738 - DNA, 25 bp, Artificial
  Probe
gcatcccatactccatgcattgttg

SEQ ID NO: 311739 - DNA, 25 bp, Artificial
  Probe
gcaatccctgggttacacatgctac

SEQ ID NO: 311740 - DNA, 25 bp, Artificial
  Probe
tacttcctgggagctgccagcatcc

SEQ ID NO: 311741 - DNA, 25 bp, Artificial
  Probe
gagagcacaggagttctcggcaaga

SEQ ID NO: 311742 - DNA, 25 bp, Artificial
  Probe
aatggagaatgtactccctgcacac

SEQ ID NO: 311743 - DNA, 25 bp, Artificial
  Probe
tgcatccatcccagactttaaggaa

SEQ ID NO: 311744 - DNA, 25 bp, Artificial
  Probe
gagagatcaactaaccacagactca

SEQ ID NO: 311745 - DNA, 25 bp, Artificial
  Probe
tgagagtcctatgaaactcgtccag

SEQ ID NO: 311746 - DNA, 25 bp, Artificial
  Probe
tgtgatcctttgagagtcctatgaa

SEQ ID NO: 311747 - DNA, 25 bp, Artificial
  Probe
aaattgaagcaaatccctgagcact

SEQ ID NO: 311748 - DNA, 25 bp, Artificial
  Probe
agatctctgcaattgtgagcgacga

SEQ ID NO: 311749 - DNA, 25 bp, Artificial
  Probe
agagtcagaactgatggtgccacaa

SEQ ID NO: 311750 - DNA, 25 bp, Artificial
  Probe
caaatgactgcctactgggttcata

SEQ ID NO: 311751 - DNA, 25 bp, Artificial
  Probe
cctgagcactggtgtgatcctttga

SEQ ID NO: 311752 - DNA, 25 bp, Artificial
  Probe
tctcacatgcccaaagtcatgggag

SEQ ID NO: 311753 - DNA, 25 bp, Artificial
  Probe
gcctactgggttcatatcaattcat

SEQ ID NO: 311754 - DNA, 25 bp, Artificial
  Probe
ctgcctactgggttcatatcaattc

SEQ ID NO: 311755 - DNA, 25 bp, Artificial
  Probe
agagagatcaactaaccacagactc

SEQ ID NO: 311756 - DNA, 25 bp, Artificial
  Probe
agggagaagcttcttccctcaaatg

SEQ ID NO: 311757 - DNA, 25 bp, Artificial
  Probe
gaagcaaatccctgagcactggtgt

SEQ ID NO: 311758 - DNA, 25 bp, Artificial
  Probe
atgactgcctactgggttcatatca

SEQ ID NO: 311759 - DNA, 25 bp, Artificial
  Probe
tgcccaaagtcatgggagagagatc

SEQ ID NO: 311760 - DNA, 25 bp, Artificial
  Probe
ctgatggttctggaactgaaaaatc

SEQ ID NO: 311761 - DNA, 25 bp, Artificial
  Probe
gccacagggacagaaatgggtgaac

SEQ ID NO: 311762 - DNA, 25 bp, Artificial
  Probe
cacagactcaagatctctgcaattg

SEQ ID NO: 311763 - DNA, 25 bp, Artificial
  Probe
cttttaaagttgcatgtcagacgtt

SEQ ID NO: 311764 - DNA, 25 bp, Artificial
  Probe
gtccagagagtcagaactgatggtg

SEQ ID NO: 311765 - DNA, 25 bp, Artificial
  Probe
agtcagaactgatggtgccacaaag

SEQ ID NO: 311766 - DNA, 25 bp, Artificial
  Probe
agctgttcattttatagagcaagac

SEQ ID NO: 311767 - DNA, 25 bp, Artificial
  Probe
actgatggtgccacaaagggagaag

SEQ ID NO: 311768 - DNA, 25 bp, Artificial
  Probe
atgaaactcgtccagagagtcagaa

SEQ ID NO: 311769 - DNA, 25 bp, Artificial
  Probe
atataaggctaattaccatgtagct

SEQ ID NO: 311770 - DNA, 25 bp, Artificial
  Probe
aaggctaattaccatgtagcttcat

SEQ ID NO: 311771 - DNA, 25 bp, Artificial
  Probe
tgaacaaatgactgcctactgggtt

SEQ ID NO: 311772 - DNA, 25 bp, Artificial
  Probe
ataaggctaattaccatgtagcttc

SEQ ID NO: 311773 - DNA, 25 bp, Artificial
  Probe
cagaactgatggtgccacaaaggga

SEQ ID NO: 311774 - DNA, 25 bp, Artificial
  Probe
aattgaagcaaatccctgagcactg

SEQ ID NO: 311775 - DNA, 25 bp, Artificial
  Probe
ggagaagcttcttccctcaaatgca

SEQ ID NO: 311776 - DNA, 25 bp, Artificial
  Probe
tgatggtgccacaaagggagaagct

SEQ ID NO: 311777 - DNA, 25 bp, Artificial
  Probe
tcacatgcccaaagtcatgggagag

SEQ ID NO: 311778 - DNA, 25 bp, Artificial
  Probe
aactcgtccagagagtcagaactga

SEQ ID NO: 311779 - DNA, 25 bp, Artificial
  Probe
gctaattaccatgtagcttcattgc

SEQ ID NO: 311780 - DNA, 25 bp, Artificial
  Probe
ctttgagagtcctatgaaactcgtc

SEQ ID NO: 311781 - DNA, 25 bp, Artificial
  Probe
caattgtgagcgacgaaacatttct

SEQ ID NO: 311782 - DNA, 25 bp, Artificial
  Probe
atggtgccacaaagggagaagcttc

SEQ ID NO: 311783 - DNA, 25 bp, Artificial
  Probe
gagatcaactaaccacagactcaag

SEQ ID NO: 311784 - DNA, 25 bp, Artificial
  Probe
tgatggttctggaactgaaaaatcc

SEQ ID NO: 311785 - DNA, 25 bp, Artificial
  Probe
ttcttcttttaaagttgcatgtcag

SEQ ID NO: 311786 - DNA, 25 bp, Artificial
  Probe
tgcctactgggttcatatcaattca

SEQ ID NO: 311787 - DNA, 25 bp, Artificial
  Probe
tctgcaattgtgagcgacgaaacat

SEQ ID NO: 311788 - DNA, 25 bp, Artificial
  Probe
cctatgaaactcgtccagagagtca

SEQ ID NO: 311789 - DNA, 25 bp, Artificial
  Probe
attgtgagcgacgaaacatttcttc

SEQ ID NO: 311790 - DNA, 25 bp, Artificial
  Probe
tgtgatacacccaagtgggatacgt

SEQ ID NO: 311791 - DNA, 25 bp, Artificial
  Probe
ggagcaatgaccagcgaggttgact

SEQ ID NO: 311792 - DNA, 25 bp, Artificial
  Probe
agccttcaagcaaccgatccttgca

SEQ ID NO: 311793 - DNA, 25 bp, Artificial
  Probe
gccagcaacaaagaccaagcacatc

SEQ ID NO: 311794 - DNA, 25 bp, Artificial
  Probe
gcatttaccactctgagtactgccc

SEQ ID NO: 311795 - DNA, 25 bp, Artificial
  Probe
ggctgcttcctccaaaagccaaaac

SEQ ID NO: 311796 - DNA, 25 bp, Artificial
  Probe
tcctttggacaaggtcctgggccct

SEQ ID NO: 311797 - DNA, 25 bp, Artificial
  Probe
cgccatgaacgaatgatgtgataca

SEQ ID NO: 311798 - DNA, 25 bp, Artificial
  Probe
cacatccctctgtcctgaggaagca

SEQ ID NO: 311799 - DNA, 25 bp, Artificial
  Probe
ccaaaagccaaaactcagcagacag

SEQ ID NO: 311800 - DNA, 25 bp, Artificial
  Probe
atgatgtgatacacccaagtgggat

SEQ ID NO: 311801 - DNA, 25 bp, Artificial
  Probe
caaggtcctttggacaaggtcctgg

SEQ ID NO: 311802 - DNA, 25 bp, Artificial
  Probe
tggacagaagccaaggtcctttgga

SEQ ID NO: 311803 - DNA, 25 bp, Artificial
  Probe
ctgtcctgaggaagcatttaccact

SEQ ID NO: 311804 - DNA, 25 bp, Artificial
  Probe
aatgatgtgatacacccaagtggga

SEQ ID NO: 311805 - DNA, 25 bp, Artificial
  Probe
aaagccaaaactcagcagacagagc

SEQ ID NO: 311806 - DNA, 25 bp, Artificial
  Probe
agtactccgggctgctgtgttcagg

SEQ ID NO: 311807 - DNA, 25 bp, Artificial
  Probe
ttgcaagcagagaccccagtatcca

SEQ ID NO: 311808 - DNA, 25 bp, Artificial
  Probe
tatcctgtggccatggtagcctggc

SEQ ID NO: 311809 - DNA, 25 bp, Artificial
  Probe
caatgaccagcgaggttgactttct

SEQ ID NO: 311810 - DNA, 25 bp, Artificial
  Probe
actcagcagacagagccttcaagca

SEQ ID NO: 311811 - DNA, 25 bp, Artificial
  Probe
gaacatgagtactccgggctgctgt

SEQ ID NO: 311812 - DNA, 25 bp, Artificial
  Probe
tggtagcctggctgcttcctccaaa

SEQ ID NO: 311813 - DNA, 25 bp, Artificial
  Probe
tgtggccatggtagcctggctgctt

SEQ ID NO: 311814 - DNA, 25 bp, Artificial
  Probe
gccaaaactcagcagacagagcctt

SEQ ID NO: 311815 - DNA, 25 bp, Artificial
  Probe
aatcctttggggagcaatgaccagc

SEQ ID NO: 311816 - DNA, 25 bp, Artificial
  Probe
ctggctgcttcctccaaaagccaaa

SEQ ID NO: 311817 - DNA, 25 bp, Artificial
  Probe
gatacacccaagtgggatacgtaca

SEQ ID NO: 311818 - DNA, 25 bp, Artificial
  Probe
tcctatatcctgtggccatggtagc

SEQ ID NO: 311819 - DNA, 25 bp, Artificial
  Probe
aactcagcagacagagccttcaagc

SEQ ID NO: 311820 - DNA, 25 bp, Artificial
  Probe
agaacttggacagaagccaaggtcc

SEQ ID NO: 311821 - DNA, 25 bp, Artificial
  Probe
cttggactcttgacgccatgaacga

SEQ ID NO: 311822 - DNA, 25 bp, Artificial
  Probe
gtcccaatcctttggggagcaatga

SEQ ID NO: 311823 - DNA, 25 bp, Artificial
  Probe
ttcaagcaaccgatccttgcaagca

SEQ ID NO: 311824 - DNA, 25 bp, Artificial
  Probe
cctttggggagcaatgaccagcgag

SEQ ID NO: 311825 - DNA, 25 bp, Artificial
  Probe
aacttggacagaagccaaggtcctt

SEQ ID NO: 311826 - DNA, 25 bp, Artificial
  Probe
actcttgacgccatgaacgaatgat

SEQ ID NO: 311827 - DNA, 25 bp, Artificial
  Probe
gcagacagagccttcaagcaaccga

SEQ ID NO: 311828 - DNA, 25 bp, Artificial
  Probe
cacccaagtgggatacgtacaagaa

SEQ ID NO: 311829 - DNA, 25 bp, Artificial
  Probe
gtagcctggctgcttcctccaaaag

SEQ ID NO: 311830 - DNA, 25 bp, Artificial
  Probe
cagtggcaggccagctcctatatcc

SEQ ID NO: 311831 - DNA, 25 bp, Artificial
  Probe
gccatggtagcctggctgcttcctc

SEQ ID NO: 311832 - DNA, 25 bp, Artificial
  Probe
aggaagcatttaccactctgagtac

SEQ ID NO: 311833 - DNA, 25 bp, Artificial
  Probe
cagccagaacttggacagaagccaa

SEQ ID NO: 311834 - DNA, 25 bp, Artificial
  Probe
tggacaaggtcctgggccctgcagt

SEQ ID NO: 311835 - DNA, 25 bp, Artificial
  Probe
ccaagaacatgagtactccgggctg

SEQ ID NO: 311836 - DNA, 25 bp, Artificial
  Probe
actctggcagagtgcggctagtact

SEQ ID NO: 311837 - DNA, 25 bp, Artificial
  Probe
ccacggctggtaagtagaggccaga

SEQ ID NO: 311838 - DNA, 25 bp, Artificial
  Probe
ttccctctgagctcgttcaggcagg

SEQ ID NO: 311839 - DNA, 25 bp, Artificial
  Probe
agtgcggctagtacttggcgcccac

SEQ ID NO: 311840 - DNA, 25 bp, Artificial
  Probe
tcggcatgttcctgcagcctctctt

SEQ ID NO: 311841 - DNA, 25 bp, Artificial
  Probe
cccacttaagtgagcgacactggtc

SEQ ID NO: 311842 - DNA, 25 bp, Artificial
  Probe
gtactgggtgcaagatggatctctc

SEQ ID NO: 311843 - DNA, 25 bp, Artificial
  Probe
cagctcccagctccaagtgaggtct

SEQ ID NO: 311844 - DNA, 25 bp, Artificial
  Probe
agcctggaggctggacccgctgcct

SEQ ID NO: 311845 - DNA, 25 bp, Artificial
  Probe
gataaggggctcagactctggcaga

SEQ ID NO: 311846 - DNA, 25 bp, Artificial
  Probe
gctctcttgggagctcggtctccca

SEQ ID NO: 311847 - DNA, 25 bp, Artificial
  Probe
cacccacttaagtgagcgacactgg

SEQ ID NO: 311848 - DNA, 25 bp, Artificial
  Probe
agagggctccagacccgggcttcag

SEQ ID NO: 311849 - DNA, 25 bp, Artificial
  Probe
cgggcttcaggttcccttctgccag

SEQ ID NO: 311850 - DNA, 25 bp, Artificial
  Probe
acagagttatctgtgacctccaagt

SEQ ID NO: 311851 - DNA, 25 bp, Artificial
  Probe
acctccaagtcatcggagaggagga

SEQ ID NO: 311852 - DNA, 25 bp, Artificial
  Probe
tcctttccctctgagctcgttcagg

SEQ ID NO: 311853 - DNA, 25 bp, Artificial
  Probe
ttcagtactgggtgcaagatggatc

SEQ ID NO: 311854 - DNA, 25 bp, Artificial
  Probe
tgacccctgcggttcagtactgggt

SEQ ID NO: 311855 - DNA, 25 bp, Artificial
  Probe
cacatagtcctccagcctggaggct

SEQ ID NO: 311856 - DNA, 25 bp, Artificial
  Probe
ggacccgctgccttgtggtcgagcc

SEQ ID NO: 311857 - DNA, 25 bp, Artificial
  Probe
gttcacacatagtcctccagcctgg

SEQ ID NO: 311858 - DNA, 25 bp, Artificial
  Probe
taaggggctcagactctggcagagt

SEQ ID NO: 311859 - DNA, 25 bp, Artificial
  Probe
agctctcttgggagctcggtctccc

SEQ ID NO: 311860 - DNA, 25 bp, Artificial
  Probe
tcagactctggcagagtgcggctag

SEQ ID NO: 311861 - DNA, 25 bp, Artificial
  Probe
cagagtgcggctagtacttggcgcc

SEQ ID NO: 311862 - DNA, 25 bp, Artificial
  Probe
agaaggcgccaagaaagagacagag

SEQ ID NO: 311863 - DNA, 25 bp, Artificial
  Probe
tgcggttcagtactgggtgcaagat

SEQ ID NO: 311864 - DNA, 25 bp, Artificial
  Probe
accctgtacctcagagggctccaga

SEQ ID NO: 311865 - DNA, 25 bp, Artificial
  Probe
cctctgagctcgttcaggcaggagt

SEQ ID NO: 311866 - DNA, 25 bp, Artificial
  Probe
gtagaggccagagatcacagagcca

SEQ ID NO: 311867 - DNA, 25 bp, Artificial
  Probe
gctcgttcaggcaggagtgccaatg

SEQ ID NO: 311868 - DNA, 25 bp, Artificial
  Probe
ttaagtgagcgacactggtctggga

SEQ ID NO: 311869 - DNA, 25 bp, Artificial
  Probe
tcgttcaggcaggagtgccaatggt

SEQ ID NO: 311870 - DNA, 25 bp, Artificial
  Probe
cctggaggctggacccgctgccttg

SEQ ID NO: 311871 - DNA, 25 bp, Artificial
  Probe
gacccgggcttcaggttcccttctg

SEQ ID NO: 311872 - DNA, 25 bp, Artificial
  Probe
aggccagagatcacagagccaccta

SEQ ID NO: 311873 - DNA, 25 bp, Artificial
  Probe
gccttgtggtcgagccttctccttt

SEQ ID NO: 311874 - DNA, 25 bp, Artificial
  Probe
ctcagagggctccagacccgggctt

SEQ ID NO: 311875 - DNA, 25 bp, Artificial
  Probe
gtcggcatgttcctgcagcctctct

SEQ ID NO: 311876 - DNA, 25 bp, Artificial
  Probe
tgtggtcgagccttctcctttccct

SEQ ID NO: 311877 - DNA, 25 bp, Artificial
  Probe
ctgagctcgttcaggcaggagtgcc

SEQ ID NO: 311878 - DNA, 25 bp, Artificial
  Probe
gactcgaagtgttggggagctctct

SEQ ID NO: 311879 - DNA, 25 bp, Artificial
  Probe
cttaagtgagcgacactggtctggg

SEQ ID NO: 311880 - DNA, 25 bp, Artificial
  Probe
ggtctcattcatttgcagctcctca

SEQ ID NO: 311881 - DNA, 25 bp, Artificial
  Probe
gaccgtcggcatgttcctgcagcct

SEQ ID NO: 311882 - DNA, 25 bp, Artificial
  Probe
aattgtccttgagcttgtgcctatc

SEQ ID NO: 311883 - DNA, 25 bp, Artificial
  Probe
cggtctgagaattgtccttgagctt

SEQ ID NO: 311884 - DNA, 25 bp, Artificial
  Probe
tgagcttgtgcctatctggggctgt

SEQ ID NO: 311885 - DNA, 25 bp, Artificial
  Probe
agacggcggtctgagaattgtcctt

SEQ ID NO: 311886 - DNA, 25 bp, Artificial
  Probe
aggcgcttcatttagagcaggcatg

SEQ ID NO: 311887 - DNA, 25 bp, Artificial
  Probe
gcaattcctttctaaataaaggaga

SEQ ID NO: 311888 - DNA, 25 bp, Artificial
  Probe
attgtccttgagcttgtgcctatct

SEQ ID NO: 311889 - DNA, 25 bp, Artificial
  Probe
gtccttgagcttgtgcctatctggg

SEQ ID NO: 311890 - DNA, 25 bp, Artificial
  Probe
gagaattgtccttgagcttgtgcct

SEQ ID NO: 311891 - DNA, 25 bp, Artificial
  Probe
gacaggcgcttcatttagagcaggc

SEQ ID NO: 311892 - DNA, 25 bp, Artificial
  Probe
ccttgagcttgtgcctatctggggc

SEQ ID NO: 311893 - DNA, 25 bp, Artificial
  Probe
gtctgagaattgtccttgagcttgt

SEQ ID NO: 311894 - DNA, 25 bp, Artificial
  Probe
aacagtcaggcagacggcggtctga

SEQ ID NO: 311895 - DNA, 25 bp, Artificial
  Probe
agcttgtgcctatctggggctgtgt

SEQ ID NO: 311896 - DNA, 25 bp, Artificial
  Probe
tgtccttgagcttgtgcctatctgg

SEQ ID NO: 311897 - DNA, 25 bp, Artificial
  Probe
cgcttcatttagagcaggcatgagt

SEQ ID NO: 311898 - DNA, 25 bp, Artificial
  Probe
agaattgtccttgagcttgtgccta

SEQ ID NO: 311899 - DNA, 25 bp, Artificial
  Probe
aggagcaattcctttctaaataaag

SEQ ID NO: 311900 - DNA, 25 bp, Artificial
  Probe
ggacaggcgcttcatttagagcagg

SEQ ID NO: 311901 - DNA, 25 bp, Artificial
  Probe
cttcatttagagcaggcatgagtaa

SEQ ID NO: 311902 - DNA, 25 bp, Artificial
  Probe
caggcgcttcatttagagcaggcat

SEQ ID NO: 311903 - DNA, 25 bp, Artificial
  Probe
tgagaattgtccttgagcttgtgcc

SEQ ID NO: 311904 - DNA, 25 bp, Artificial
  Probe
tctgagaattgtccttgagcttgtg

SEQ ID NO: 311905 - DNA, 25 bp, Artificial
  Probe
ggagcaattcctttctaaataaagg

SEQ ID NO: 311906 - DNA, 25 bp, Artificial
  Probe
gaattgtccttgagcttgtgcctat

SEQ ID NO: 311907 - DNA, 25 bp, Artificial
  Probe
tttagagcaggcatgagtaaaacag

SEQ ID NO: 311908 - DNA, 25 bp, Artificial
  Probe
tcctttctaaataaaggagagagac

SEQ ID NO: 311909 - DNA, 25 bp, Artificial
  Probe
gcttcatttagagcaggcatgagta

SEQ ID NO: 311910 - DNA, 25 bp, Artificial
  Probe
gcagacggcggtctgagaattgtcc

SEQ ID NO: 311911 - DNA, 25 bp, Artificial
  Probe
ttgtccttgagcttgtgcctatctg

SEQ ID NO: 311912 - DNA, 25 bp, Artificial
  Probe
gcagaggtcatgggaggaagagctc

SEQ ID NO: 311913 - DNA, 25 bp, Artificial
  Probe
acggcggtctgagaattgtccttga

SEQ ID NO: 311914 - DNA, 25 bp, Artificial
  Probe
gtaaaacagtcaggcagacggcggt

SEQ ID NO: 311915 - DNA, 25 bp, Artificial
  Probe
aggacaggcgcttcatttagagcag

SEQ ID NO: 311916 - DNA, 25 bp, Artificial
  Probe
caggacaggcgcttcatttagagca

SEQ ID NO: 311917 - DNA, 25 bp, Artificial
  Probe
cagacggcggtctgagaattgtcct

SEQ ID NO: 311918 - DNA, 25 bp, Artificial
  Probe
acaggcgcttcatttagagcaggca

SEQ ID NO: 311919 - DNA, 25 bp, Artificial
  Probe
ctgagaattgtccttgagcttgtgc

SEQ ID NO: 311920 - DNA, 25 bp, Artificial
  Probe
ggcagacggcggtctgagaattgtc

SEQ ID NO: 311921 - DNA, 25 bp, Artificial
  Probe
gacggcggtctgagaattgtccttg

SEQ ID NO: 311922 - DNA, 25 bp, Artificial
  Probe
agcaattcctttctaaataaaggag

SEQ ID NO: 311923 - DNA, 25 bp, Artificial
  Probe
tccttgagcttgtgcctatctgggg

SEQ ID NO: 311924 - DNA, 25 bp, Artificial
  Probe
ggtctgagaattgtccttgagcttg

SEQ ID NO: 311925 - DNA, 25 bp, Artificial
  Probe
ggcgcttcatttagagcaggcatga

SEQ ID NO: 311926 - DNA, 25 bp, Artificial
  Probe
gagcaattcctttctaaataaagga

SEQ ID NO: 311927 - DNA, 25 bp, Artificial
  Probe
gcgcttcatttagagcaggcatgag

SEQ ID NO: 311928 - DNA, 25 bp, Artificial
  Probe
gctactgctggagcatcacagagag

SEQ ID NO: 311929 - DNA, 25 bp, Artificial
  Probe
cattcctccagttatgagagattgt

SEQ ID NO: 311930 - DNA, 25 bp, Artificial
  Probe
agtttctactggctactgctggagc

SEQ ID NO: 311931 - DNA, 25 bp, Artificial
  Probe
actggctactgctggagcatcacag

SEQ ID NO: 311932 - DNA, 25 bp, Artificial
  Probe
tttctactggctactgctggagcat

SEQ ID NO: 311933 - DNA, 25 bp, Artificial
  Probe
gtattacattcctccagttatgaga

SEQ ID NO: 311934 - DNA, 25 bp, Artificial
  Probe
ctgaataatgcgcccctcacatctc

SEQ ID NO: 311935 - DNA, 25 bp, Artificial
  Probe
tggtattacattcctccagttatga

SEQ ID NO: 311936 - DNA, 25 bp, Artificial
  Probe
cctccagttatgagagattgtgcag

SEQ ID NO: 311937 - DNA, 25 bp, Artificial
  Probe
tggctactgctggagcatcacagag

SEQ ID NO: 311938 - DNA, 25 bp, Artificial
  Probe
tgaataatgcgcccctcacatctcc

SEQ ID NO: 311939 - DNA, 25 bp, Artificial
  Probe
tatggtattacattcctccagttat

SEQ ID NO: 311940 - DNA, 25 bp, Artificial
  Probe
ctactggctactgctggagcatcac

SEQ ID NO: 311941 - DNA, 25 bp, Artificial
  Probe
acatctcccaacattttaacctagt

SEQ ID NO: 311942 - DNA, 25 bp, Artificial
  Probe
cacatctcccaacattttaacctag

SEQ ID NO: 311943 - DNA, 25 bp, Artificial
  Probe
ggtattacattcctccagttatgag

SEQ ID NO: 311944 - DNA, 25 bp, Artificial
  Probe
tagtttctactggctactgctggag

SEQ ID NO: 311945 - DNA, 25 bp, Artificial
  Probe
attatggtattacattcctccagtt

SEQ ID NO: 311946 - DNA, 25 bp, Artificial
  Probe
atagtttctactggctactgctgga

SEQ ID NO: 311947 - DNA, 25 bp, Artificial
  Probe
tattacattcctccagttatgagag

SEQ ID NO: 311948 - DNA, 25 bp, Artificial
  Probe
tcctccagttatgagagattgtgca

SEQ ID NO: 311949 - DNA, 25 bp, Artificial
  Probe
cactgaataatgcgcccctcacatc

SEQ ID NO: 311950 - DNA, 25 bp, Artificial
  Probe
actgaataatgcgcccctcacatct

SEQ ID NO: 311951 - DNA, 25 bp, Artificial
  Probe
ttcctccagttatgagagattgtgc

SEQ ID NO: 311952 - DNA, 25 bp, Artificial
  Probe
tacattcctccagttatgagagatt

SEQ ID NO: 311953 - DNA, 25 bp, Artificial
  Probe
atggtattacattcctccagttatg

SEQ ID NO: 311954 - DNA, 25 bp, Artificial
  Probe
gaataatgcgcccctcacatctccc

SEQ ID NO: 311955 - DNA, 25 bp, Artificial
  Probe
tactggctactgctggagcatcaca

SEQ ID NO: 311956 - DNA, 25 bp, Artificial
  Probe
acattcctccagttatgagagattg

SEQ ID NO: 311957 - DNA, 25 bp, Artificial
  Probe
ctactgctggagcatcacagagagg

SEQ ID NO: 311958 - DNA, 25 bp, Artificial
  Probe
catctcccaacattttaacctagta

SEQ ID NO: 311959 - DNA, 25 bp, Artificial
  Probe
attacattcctccagttatgagaga

SEQ ID NO: 311960 - DNA, 25 bp, Artificial
  Probe
tcacatctcccaacattttaaccta

SEQ ID NO: 311961 - DNA, 25 bp, Artificial
  Probe
actgctggagcatcacagagaggca

SEQ ID NO: 311962 - DNA, 25 bp, Artificial
  Probe
ctgctggagcatcacagagaggcat

SEQ ID NO: 311963 - DNA, 25 bp, Artificial
  Probe
tactgctggagcatcacagagaggc

SEQ ID NO: 311964 - DNA, 25 bp, Artificial
  Probe
catagtttctactggctactgctgg

SEQ ID NO: 311965 - DNA, 25 bp, Artificial
  Probe
ttctactggctactgctggagcatc

SEQ ID NO: 311966 - DNA, 25 bp, Artificial
  Probe
gtttctactggctactgctggagca

SEQ ID NO: 311967 - DNA, 25 bp, Artificial
  Probe
ttacattcctccagttatgagagat

SEQ ID NO: 311968 - DNA, 25 bp, Artificial
  Probe
ggctactgctggagcatcacagaga

SEQ ID NO: 311969 - DNA, 25 bp, Artificial
  Probe
tgctggagcatcacagagaggcata

SEQ ID NO: 311970 - DNA, 25 bp, Artificial
  Probe
tctactggctactgctggagcatca

SEQ ID NO: 311971 - DNA, 25 bp, Artificial
  Probe
attcctccagttatgagagattgtg

SEQ ID NO: 311972 - DNA, 25 bp, Artificial
  Probe
ctggctactgctggagcatcacaga

SEQ ID NO: 311973 - DNA, 25 bp, Artificial
  Probe
ttatggtattacattcctccagtta

SEQ ID NO: 311974 - DNA, 25 bp, Artificial
  Probe
taatggcaaacgaggtcacttccca

SEQ ID NO: 311975 - DNA, 25 bp, Artificial
  Probe
aaaggagacatcctgagaatccggg

SEQ ID NO: 311976 - DNA, 25 bp, Artificial
  Probe
cttacaggtgtcaaagcagtctagt

SEQ ID NO: 311977 - DNA, 25 bp, Artificial
  Probe
ggatcaacagaatcccgaggaggac

SEQ ID NO: 311978 - DNA, 25 bp, Artificial
  Probe
tcttccctttaagaaaggagacatc

SEQ ID NO: 311979 - DNA, 25 bp, Artificial
  Probe
tccgcctcagtatcggctctgattg

SEQ ID NO: 311980 - DNA, 25 bp, Artificial
  Probe
gaatccgggataagcctgaagagca

SEQ ID NO: 311981 - DNA, 25 bp, Artificial
  Probe
gattcctgtcccttacgtggagaag

SEQ ID NO: 311982 - DNA, 25 bp, Artificial
  Probe
cctaacctccagaatgggcccattt

SEQ ID NO: 311983 - DNA, 25 bp, Artificial
  Probe
ctccgcctcagtatcggctctgatt

SEQ ID NO: 311984 - DNA, 25 bp, Artificial
  Probe
ggggatgattcctgtcccttacgtg

SEQ ID NO: 311985 - DNA, 25 bp, Artificial
  Probe
tgagaatccgggataagcctgaaga

SEQ ID NO: 311986 - DNA, 25 bp, Artificial
  Probe
gaagcgagtccctaatgcctacgac

SEQ ID NO: 311987 - DNA, 25 bp, Artificial
  Probe
cggctctgattggaggtaaccagga

SEQ ID NO: 311988 - DNA, 25 bp, Artificial
  Probe
aacagaatcccgaggaggacttcag

SEQ ID NO: 311989 - DNA, 25 bp, Artificial
  Probe
tttgctgacagatgagaacaatctg

SEQ ID NO: 311990 - DNA, 25 bp, Artificial
  Probe
tcccttacgtggagaagtatagacc

SEQ ID NO: 311991 - DNA, 25 bp, Artificial
  Probe
gtctatacaattttcttacaggtgt

SEQ ID NO: 311992 - DNA, 25 bp, Artificial
  Probe
acatcctgagaatccgggataagcc

SEQ ID NO: 311993 - DNA, 25 bp, Artificial
  Probe
gcaaacgaggtcacttcccattcac

SEQ ID NO: 311994 - DNA, 25 bp, Artificial
  Probe
atagttccacactttgctgacagat

SEQ ID NO: 311995 - DNA, 25 bp, Artificial
  Probe
ccattcacacatgtccgtctgctgg

SEQ ID NO: 311996 - DNA, 25 bp, Artificial
  Probe
ggatgattcctgtcccttacgtgga

SEQ ID NO: 311997 - DNA, 25 bp, Artificial
  Probe
acaagacagccttggctttggaggt

SEQ ID NO: 311998 - DNA, 25 bp, Artificial
  Probe
ctcagtatcggctctgattggaggt

SEQ ID NO: 311999 - DNA, 25 bp, Artificial
  Probe
tccagaagcgagtccctaatgccta

SEQ ID NO: 312000 - DNA, 25 bp, Artificial
  Probe
tgggcccatttatgccagggttatc

SEQ ID NO: 312001 - DNA, 25 bp, Artificial
  Probe
cagaatgggcccatttatgccaggg

SEQ ID NO: 312002 - DNA, 25 bp, Artificial
  Probe
gaagatcttccctttaagaaaggag

SEQ ID NO: 312003 - DNA, 25 bp, Artificial
  Probe
taacctccagaatgggcccatttat

SEQ ID NO: 312004 - DNA, 25 bp, Artificial
  Probe
cactttgctgacagatgagaacaat

SEQ ID NO: 312005 - DNA, 25 bp, Artificial
  Probe
ttccctttaagaaaggagacatcct

SEQ ID NO: 312006 - DNA, 25 bp, Artificial
  Probe
gccgtctatacaattttcttacagg

SEQ ID NO: 312007 - DNA, 25 bp, Artificial
  Probe
cccatttatgccagggttatccaga

SEQ ID NO: 312008 - DNA, 25 bp, Artificial
  Probe
gacaagacagccttggctttggagg

SEQ ID NO: 312009 - DNA, 25 bp, Artificial
  Probe
aatgcctacgacaagacagccttgg

SEQ ID NO: 312010 - DNA, 25 bp, Artificial
  Probe
cttcagctgagtatagttccacact

SEQ ID NO: 312011 - DNA, 25 bp, Artificial
  Probe
ctgagtatagttccacactttgctg

SEQ ID NO: 312012 - DNA, 25 bp, Artificial
  Probe
cattcacacatgtccgtctgctgga

SEQ ID NO: 312013 - DNA, 25 bp, Artificial
  Probe
tacaattttcttacaggtgtcaaag

SEQ ID NO: 312014 - DNA, 25 bp, Artificial
  Probe
tatccagaagcgagtccctaatgcc

SEQ ID NO: 312015 - DNA, 25 bp, Artificial
  Probe
gtccctaatgcctacgacaagacag

SEQ ID NO: 312016 - DNA, 25 bp, Artificial
  Probe
ttatataagcatcctgttgcctgtg

SEQ ID NO: 312017 - DNA, 25 bp, Artificial
  Probe
tttatgccagggttatccagaagcg

SEQ ID NO: 312018 - DNA, 25 bp, Artificial
  Probe
cacacatgtccgtctgctggatcaa

SEQ ID NO: 312019 - DNA, 25 bp, Artificial
  Probe
gcgagtccctaatgcctacgacaag

SEQ ID NO: 312020 - DNA, 25 bp, Artificial
  Probe
attttcggcgggacgccgactgtgt

SEQ ID NO: 312021 - DNA, 25 bp, Artificial
  Probe
ggaaatacccatcttatacgcacag

SEQ ID NO: 312022 - DNA, 25 bp, Artificial
  Probe
ggcaatttgccaaggcctttccagt

SEQ ID NO: 312023 - DNA, 25 bp, Artificial
  Probe
acgccgactgtgtctgggagagcca

SEQ ID NO: 312024 - DNA, 25 bp, Artificial
  Probe
gagtactgcaccaggggactgctct

SEQ ID NO: 312025 - DNA, 25 bp, Artificial
  Probe
tctccagaacttcacgttgcatccg

SEQ ID NO: 312026 - DNA, 25 bp, Artificial
  Probe
ctgttctgcgatgcacccttttcct

SEQ ID NO: 312027 - DNA, 25 bp, Artificial
  Probe
ttcatgccattttcggcgggacgcc

SEQ ID NO: 312028 - DNA, 25 bp, Artificial
  Probe
attcaagacccctcaggagttcaat

SEQ ID NO: 312029 - DNA, 25 bp, Artificial
  Probe
cgttgcatccgctggtggagcctga

SEQ ID NO: 312030 - DNA, 25 bp, Artificial
  Probe
tcttatacgcacagaccctgttctg

SEQ ID NO: 312031 - DNA, 25 bp, Artificial
  Probe
gagcctgaggacatcgacctgaccc

SEQ ID NO: 312032 - DNA, 25 bp, Artificial
  Probe
gtttcactgttgtgggcctccattg

SEQ ID NO: 312033 - DNA, 25 bp, Artificial
  Probe
cttaacaccgtgcactatgactccg

SEQ ID NO: 312034 - DNA, 25 bp, Artificial
  Probe
gcacagaccctgttctgcgatgcac

SEQ ID NO: 312035 - DNA, 25 bp, Artificial
  Probe
actgtgtctgggagagccactggca

SEQ ID NO: 312036 - DNA, 25 bp, Artificial
  Probe
ctgctctggccctcttccaggggtt

SEQ ID NO: 312037 - DNA, 25 bp, Artificial
  Probe
gtgcactatgactccgaccaattca

SEQ ID NO: 312038 - DNA, 25 bp, Artificial
  Probe
ggctgggcaatttgccaaggccttt

SEQ ID NO: 312039 - DNA, 25 bp, Artificial
  Probe
tctggatgccaatcaatccttcaag

SEQ ID NO: 312040 - DNA, 25 bp, Artificial
  Probe
ttgtgtatgcgcattcgctgagtac

SEQ ID NO: 312041 - DNA, 25 bp, Artificial
  Probe
acgcatggagctgttcatatacctc

SEQ ID NO: 312042 - DNA, 25 bp, Artificial
  Probe
cggggcctgccacgtgtcggtactt

SEQ ID NO: 312043 - DNA, 25 bp, Artificial
  Probe
tcctggctgtttgtatcatttccta

SEQ ID NO: 312044 - DNA, 25 bp, Artificial
  Probe
tgcaccaggggactgctctggccct

SEQ ID NO: 312045 - DNA, 25 bp, Artificial
  Probe
tccagttgtgtatgcgcattcgctg

SEQ ID NO: 312046 - DNA, 25 bp, Artificial
  Probe
gaccaattcaagacccctcaggagt

SEQ ID NO: 312047 - DNA, 25 bp, Artificial
  Probe
gcctgccacgtgtcggtactttacc

SEQ ID NO: 312048 - DNA, 25 bp, Artificial
  Probe
atcaatccttcaagaagagccccgc

SEQ ID NO: 312049 - DNA, 25 bp, Artificial
  Probe
tgggcctccattgacgtctctctca

SEQ ID NO: 312050 - DNA, 25 bp, Artificial
  Probe
gagttcaatcctgagcattttctgg

SEQ ID NO: 312051 - DNA, 25 bp, Artificial
  Probe
gcacccttttcctggctgtttgtat

SEQ ID NO: 312052 - DNA, 25 bp, Artificial
  Probe
acgctccttaacaccgtgcactatg

SEQ ID NO: 312053 - DNA, 25 bp, Artificial
  Probe
tatcttaagcgcatcttcatggaaa

SEQ ID NO: 312054 - DNA, 25 bp, Artificial
  Probe
tgagcattttctggatgccaatcaa

SEQ ID NO: 312055 - DNA, 25 bp, Artificial
  Probe
gcattttctggatgccaatcaatcc

SEQ ID NO: 312056 - DNA, 25 bp, Artificial
  Probe
tggccctcttccaggggtttcactg

SEQ ID NO: 312057 - DNA, 25 bp, Artificial
  Probe
cgaccaattcaagacccctcaggag

SEQ ID NO: 312058 - DNA, 25 bp, Artificial
  Probe
ggggaaatacccatcttatacgcac

SEQ ID NO: 312059 - DNA, 25 bp, Artificial
  Probe
atccgctggtggagcctgaggacat

SEQ ID NO: 312060 - DNA, 25 bp, Artificial
  Probe
tttgccaaggcctttccagttgtgt

SEQ ID NO: 312061 - DNA, 25 bp, Artificial
  Probe
ctgttgtgggcctccattgacgtct

SEQ ID NO: 312062 - DNA, 25 bp, Artificial
  Probe
tgtcatcacgctccttaacaccgtg

SEQ ID NO: 312063 - DNA, 25 bp, Artificial
  Probe
cgccttcatgccattttcggcggga

SEQ ID NO: 312064 - DNA, 25 bp, Artificial
  Probe
accaggggactgctctggccctctt

SEQ ID NO: 312065 - DNA, 25 bp, Artificial
  Probe
gcgcatcttcatggaaaaaatgacg

SEQ ID NO: 312066 - DNA, 25 bp, Artificial
  Probe
tcttcaaacacctctcggactgctg

SEQ ID NO: 312067 - DNA, 25 bp, Artificial
  Probe
aacacctctcggactgctgtgtctc

SEQ ID NO: 312068 - DNA, 25 bp, Artificial
  Probe
tgcagggagttcctccatgctgagg

SEQ ID NO: 312069 - DNA, 25 bp, Artificial
  Probe
caaccagtactttcctggtgctaac

SEQ ID NO: 312070 - DNA, 25 bp, Artificial
  Probe
gtagaacaggcctgtgtatactgca

SEQ ID NO: 312071 - DNA, 25 bp, Artificial
  Probe
caggcagtcccctgtggtagagctt

SEQ ID NO: 312072 - DNA, 25 bp, Artificial
  Probe
gtgtctccaatatcttctccaggct

SEQ ID NO: 312073 - DNA, 25 bp, Artificial
  Probe
ttgctgccggatgctcaacagagac

SEQ ID NO: 312074 - DNA, 25 bp, Artificial
  Probe
ttagtcctggccaggctttctagat

SEQ ID NO: 312075 - DNA, 25 bp, Artificial
  Probe
atgctgaggtcaatcttgtcaaacc

SEQ ID NO: 312076 - DNA, 25 bp, Artificial
  Probe
gtctcttcaaacacctctcggactg

SEQ ID NO: 312077 - DNA, 25 bp, Artificial
  Probe
actgcagggagttcctccatgctga

SEQ ID NO: 312078 - DNA, 25 bp, Artificial
  Probe
tgaattctgacttgacaccagtctc

SEQ ID NO: 312079 - DNA, 25 bp, Artificial
  Probe
actctcaggcagtcccctgtggtag

SEQ ID NO: 312080 - DNA, 25 bp, Artificial
  Probe
gtctgacatcccaaaggccccaggg

SEQ ID NO: 312081 - DNA, 25 bp, Artificial
  Probe
tgtccgtatagtagtagcctagcca

SEQ ID NO: 312082 - DNA, 25 bp, Artificial
  Probe
cctgtggtagagcttgtagaacagg

SEQ ID NO: 312083 - DNA, 25 bp, Artificial
  Probe
acctctcggactgctgtgtctccaa

SEQ ID NO: 312084 - DNA, 25 bp, Artificial
  Probe
tggtgctaacatcaaatacggcacc

SEQ ID NO: 312085 - DNA, 25 bp, Artificial
  Probe
atagtagtagcctagccaccctgct

SEQ ID NO: 312086 - DNA, 25 bp, Artificial
  Probe
agcttgtagaacaggcctgtgtata

SEQ ID NO: 312087 - DNA, 25 bp, Artificial
  Probe
agtagcctagccaccctgctggtga

SEQ ID NO: 312088 - DNA, 25 bp, Artificial
  Probe
gcctagccaccctgctggtgatggg

SEQ ID NO: 312089 - DNA, 25 bp, Artificial
  Probe
gctgtgtctccaatatcttctccag

SEQ ID NO: 312090 - DNA, 25 bp, Artificial
  Probe
tgttgctgccggatgctcaacagag

SEQ ID NO: 312091 - DNA, 25 bp, Artificial
  Probe
tccctgtgtccgtatagtagtagcc

SEQ ID NO: 312092 - DNA, 25 bp, Artificial
  Probe
gttgtgtgtttagtcctggccaggc

SEQ ID NO: 312093 - DNA, 25 bp, Artificial
  Probe
acaaccagtactttcctggtgctaa

SEQ ID NO: 312094 - DNA, 25 bp, Artificial
  Probe
tcttgtacaaccagtactttcctgg

SEQ ID NO: 312095 - DNA, 25 bp, Artificial
  Probe
tgtgtttagtcctggccaggctttc

SEQ ID NO: 312096 - DNA, 25 bp, Artificial
  Probe
tagtagtagcctagccaccctgctg

SEQ ID NO: 312097 - DNA, 25 bp, Artificial
  Probe
cctagccaccctgctggtgatgggg

SEQ ID NO: 312098 - DNA, 25 bp, Artificial
  Probe
caatatcttctccaggctctgacag

SEQ ID NO: 312099 - DNA, 25 bp, Artificial
  Probe
tgtgtatactgcagggagttcctcc

SEQ ID NO: 312100 - DNA, 25 bp, Artificial
  Probe
tccgtatagtagtagcctagccacc

SEQ ID NO: 312101 - DNA, 25 bp, Artificial
  Probe
gactgctgtgtctccaatatcttct

SEQ ID NO: 312102 - DNA, 25 bp, Artificial
  Probe
gtactttcctggtgctaacatcaaa

SEQ ID NO: 312103 - DNA, 25 bp, Artificial
  Probe
tttcctggtgctaacatcaaatacg

SEQ ID NO: 312104 - DNA, 25 bp, Artificial
  Probe
gaattctgacttgacaccagtctct

SEQ ID NO: 312105 - DNA, 25 bp, Artificial
  Probe
ttcaaacacctctcggactgctgtg

SEQ ID NO: 312106 - DNA, 25 bp, Artificial
  Probe
aatatcttctccaggctctgacagg

SEQ ID NO: 312107 - DNA, 25 bp, Artificial
  Probe
gccaggctttctagatccatccatt

SEQ ID NO: 312108 - DNA, 25 bp, Artificial
  Probe
gttcctccatgctgaggtcaatctt

SEQ ID NO: 312109 - DNA, 25 bp, Artificial
  Probe
tatactgcagggagttcctccatgc

SEQ ID NO: 312110 - DNA, 25 bp, Artificial
  Probe
tcctggccaggctttctagatccat

SEQ ID NO: 312111 - DNA, 25 bp, Artificial
  Probe
gagcttgtagaacaggcctgtgtat

SEQ ID NO: 312112 - DNA, 25 bp, Artificial
  Probe
aatgtaacccccagatagagccacg

SEQ ID NO: 312113 - DNA, 25 bp, Artificial
  Probe
tagagccacgtgaggaaaacactat

SEQ ID NO: 312114 - DNA, 25 bp, Artificial
  Probe
ccccagactacaactccgtggtgtt

SEQ ID NO: 312115 - DNA, 25 bp, Artificial
  Probe
gttcaatcctcctgtgactccacgt

SEQ ID NO: 312116 - DNA, 25 bp, Artificial
  Probe
agtgcttctcacaagccccagacaa

SEQ ID NO: 312117 - DNA, 25 bp, Artificial
  Probe
ctcagggtaacttggacaggaaggt

SEQ ID NO: 312118 - DNA, 25 bp, Artificial
  Probe
ttctaagtcccaacggctcggctca

SEQ ID NO: 312119 - DNA, 25 bp, Artificial
  Probe
caactccgtggtgttgtactcctcc

SEQ ID NO: 312120 - DNA, 25 bp, Artificial
  Probe
ggaccagacccagtaagtcattagc

SEQ ID NO: 312121 - DNA, 25 bp, Artificial
  Probe
ccctttctgaggaaagggagaacag

SEQ ID NO: 312122 - DNA, 25 bp, Artificial
  Probe
tttctaagtcccaacggctcggctc

SEQ ID NO: 312123 - DNA, 25 bp, Artificial
  Probe
agtcattagctcagggcagcgtgct

SEQ ID NO: 312124 - DNA, 25 bp, Artificial
  Probe
acccccagatagagccacgtgagga

SEQ ID NO: 312125 - DNA, 25 bp, Artificial
  Probe
gagaaatcctttctaagtcccaacg

SEQ ID NO: 312126 - DNA, 25 bp, Artificial
  Probe
ccagatagagccacgtgaggaaaac

SEQ ID NO: 312127 - DNA, 25 bp, Artificial
  Probe
tgtgactccacgttagagaaatcct

SEQ ID NO: 312128 - DNA, 25 bp, Artificial
  Probe
ccagactacaactccgtggtgttgt

SEQ ID NO: 312129 - DNA, 25 bp, Artificial
  Probe
tctgggtccctttctgaggaaaggg

SEQ ID NO: 312130 - DNA, 25 bp, Artificial
  Probe
cgctgttttgactaacaagaatgta

SEQ ID NO: 312131 - DNA, 25 bp, Artificial
  Probe
tcctcgggagccagctgcttctcgt

SEQ ID NO: 312132 - DNA, 25 bp, Artificial
  Probe
atcctttctaagtcccaacggctcg

SEQ ID NO: 312133 - DNA, 25 bp, Artificial
  Probe
cttctcgtgacttttaatcgtgctt

SEQ ID NO: 312134 - DNA, 25 bp, Artificial
  Probe
ctcagggcagcgtgctctgggtccc

SEQ ID NO: 312135 - DNA, 25 bp, Artificial
  Probe
ctgtgggaccagacccagtaagtca

SEQ ID NO: 312136 - DNA, 25 bp, Artificial
  Probe
acaactccgtggtgttgtactcctc

SEQ ID NO: 312137 - DNA, 25 bp, Artificial
  Probe
cagctgtgggaccagacccagtaag

SEQ ID NO: 312138 - DNA, 25 bp, Artificial
  Probe
gagtttacacctattccgctcctcg

SEQ ID NO: 312139 - DNA, 25 bp, Artificial
  Probe
gactccacgttagagaaatcctttc

SEQ ID NO: 312140 - DNA, 25 bp, Artificial
  Probe
tgcagctgtgggaccagacccagta

SEQ ID NO: 312141 - DNA, 25 bp, Artificial
  Probe
ccgcctgcttagtgcttctcacaag

SEQ ID NO: 312142 - DNA, 25 bp, Artificial
  Probe
tgcttagtgcttctcacaagcccca

SEQ ID NO: 312143 - DNA, 25 bp, Artificial
  Probe
gtttacacctattccgctcctcggg

SEQ ID NO: 312144 - DNA, 25 bp, Artificial
  Probe
ggaaggaatcctgctgctctccgcc

SEQ ID NO: 312145 - DNA, 25 bp, Artificial
  Probe
agggcagcgtgctctgggtcccttt

SEQ ID NO: 312146 - DNA, 25 bp, Artificial
  Probe
gggaccagacccagtaagtcattag

SEQ ID NO: 312147 - DNA, 25 bp, Artificial
  Probe
caatcctcctgtgactccacgttag

SEQ ID NO: 312148 - DNA, 25 bp, Artificial
  Probe
aaagcctcagggtaacttggacagg

SEQ ID NO: 312149 - DNA, 25 bp, Artificial
  Probe
gtttgttgtcgctgttttgactaac

SEQ ID NO: 312150 - DNA, 25 bp, Artificial
  Probe
cagacaacagcctctgacagtatta

SEQ ID NO: 312151 - DNA, 25 bp, Artificial
  Probe
ctacaactccgtggtgttgtactcc

SEQ ID NO: 312152 - DNA, 25 bp, Artificial
  Probe
tgttttgactaacaagaatgtaacc

SEQ ID NO: 312153 - DNA, 25 bp, Artificial
  Probe
gcctgcttagtgcttctcacaagcc

SEQ ID NO: 312154 - DNA, 25 bp, Artificial
  Probe
taacaagaatgtaacccccagatag

SEQ ID NO: 312155 - DNA, 25 bp, Artificial
  Probe
gacaacagcctctgacagtattata

SEQ ID NO: 312156 - DNA, 25 bp, Artificial
  Probe
gcttctcgtgacttttaatcgtgct

SEQ ID NO: 312157 - DNA, 25 bp, Artificial
  Probe
tgttcaatcctcctgtgactccacg

SEQ ID NO: 312158 - DNA, 25 bp, Artificial
  Probe
atgggagcctggaggaacagcacaa

SEQ ID NO: 312159 - DNA, 25 bp, Artificial
  Probe
tatataccctgtgtttcctagtatg

SEQ ID NO: 312160 - DNA, 25 bp, Artificial
  Probe
ccatgtgctgtattaagtgctttat

SEQ ID NO: 312161 - DNA, 25 bp, Artificial
  Probe
aggaagaatatccaccatcgtcccc

SEQ ID NO: 312162 - DNA, 25 bp, Artificial
  Probe
aggaaactagacctaggttattcag

SEQ ID NO: 312163 - DNA, 25 bp, Artificial
  Probe
ggccttggtcccaggctctcaaaaa

SEQ ID NO: 312164 - DNA, 25 bp, Artificial
  Probe
ctttatgaacatttgttaggctggc

SEQ ID NO: 312165 - DNA, 25 bp, Artificial
  Probe
caaatggcgggtcctgagatgttta

SEQ ID NO: 312166 - DNA, 25 bp, Artificial
  Probe
accctcttcttctcaagctctgtgg

SEQ ID NO: 312167 - DNA, 25 bp, Artificial
  Probe
caccatggcaagcaccgccaggagg

SEQ ID NO: 312168 - DNA, 25 bp, Artificial
  Probe
aatgagccagcagacaacgcccatc

SEQ ID NO: 312169 - DNA, 25 bp, Artificial
  Probe
actccctgtgccactagaggtggca

SEQ ID NO: 312170 - DNA, 25 bp, Artificial
  Probe
gactaccgtgacaacacagaactcc

SEQ ID NO: 312171 - DNA, 25 bp, Artificial
  Probe
gaagaatatccaccatcgtccccag

SEQ ID NO: 312172 - DNA, 25 bp, Artificial
  Probe
acccctgctgatcctgtggaccaat

SEQ ID NO: 312173 - DNA, 25 bp, Artificial
  Probe
gatgctgaagctgaatgggaagcac

SEQ ID NO: 312174 - DNA, 25 bp, Artificial
  Probe
agaggtggcaccataccctgggttg

SEQ ID NO: 312175 - DNA, 25 bp, Artificial
  Probe
ctcatccatggatgaagatataaat

SEQ ID NO: 312176 - DNA, 25 bp, Artificial
  Probe
aaaggaactgagctgctcatccatg

SEQ ID NO: 312177 - DNA, 25 bp, Artificial
  Probe
gcatttcttcaggaaacggcctccc

SEQ ID NO: 312178 - DNA, 25 bp, Artificial
  Probe
atataagctgctttagctggggttc

SEQ ID NO: 312179 - DNA, 25 bp, Artificial
  Probe
cctgctgatcctgtggaccaattaa

SEQ ID NO: 312180 - DNA, 25 bp, Artificial
  Probe
catttgttaggctggcctccggagc

SEQ ID NO: 312181 - DNA, 25 bp, Artificial
  Probe
gctggcctccggagctgaggttcca

SEQ ID NO: 312182 - DNA, 25 bp, Artificial
  Probe
tctcctagagctagccggatggact

SEQ ID NO: 312183 - DNA, 25 bp, Artificial
  Probe
aggaacagcacaaagcagatctacg

SEQ ID NO: 312184 - DNA, 25 bp, Artificial
  Probe
caccgccaggaggagagtctgcttg

SEQ ID NO: 312185 - DNA, 25 bp, Artificial
  Probe
ccctgccagtcaagagtcctgcagt

SEQ ID NO: 312186 - DNA, 25 bp, Artificial
  Probe
atactgtgtggctgatgctgaagct

SEQ ID NO: 312187 - DNA, 25 bp, Artificial
  Probe
caccgatcccaaatggcgggtcctg

SEQ ID NO: 312188 - DNA, 25 bp, Artificial
  Probe
ataataatggtcaggtgccatgtgc

SEQ ID NO: 312189 - DNA, 25 bp, Artificial
  Probe
acagagagccgcaccggggtctcag

SEQ ID NO: 312190 - DNA, 25 bp, Artificial
  Probe
agtctcctagagctagccggatgga

SEQ ID NO: 312191 - DNA, 25 bp, Artificial
  Probe
cctctctgtggtccaaggagtgtgc

SEQ ID NO: 312192 - DNA, 25 bp, Artificial
  Probe
ccttggttactaggagactagtgtg

SEQ ID NO: 312193 - DNA, 25 bp, Artificial
  Probe
attcaggagggcaggtatataccct

SEQ ID NO: 312194 - DNA, 25 bp, Artificial
  Probe
cttggcagtgcagagatctggcctc

SEQ ID NO: 312195 - DNA, 25 bp, Artificial
  Probe
aatgggaagcacaagccgtgtggac

SEQ ID NO: 312196 - DNA, 25 bp, Artificial
  Probe
tctactgggttttgaatctaccaga

SEQ ID NO: 312197 - DNA, 25 bp, Artificial
  Probe
cagtgaagtcctcagggagccgctg

SEQ ID NO: 312198 - DNA, 25 bp, Artificial
  Probe
gccgtgtggacaacagagagccgca

SEQ ID NO: 312199 - DNA, 25 bp, Artificial
  Probe
gttccagtcaacctgaaccctaagc

SEQ ID NO: 312200 - DNA, 25 bp, Artificial
  Probe
ctccaacttggcagtgcagagatct

SEQ ID NO: 312201 - DNA, 25 bp, Artificial
  Probe
agtctgcttggcagaactgccatgc

SEQ ID NO: 312202 - DNA, 25 bp, Artificial
  Probe
agaactcggactccagagcctcctt

SEQ ID NO: 312203 - DNA, 25 bp, Artificial
  Probe
aggctctcaaaaatagtgtaccctc

SEQ ID NO: 312204 - DNA, 25 bp, Artificial
  Probe
agcctgcacgggtctagaaggctgt

SEQ ID NO: 312205 - DNA, 25 bp, Artificial
  Probe
cgttacacttagagcctgcacgggt

SEQ ID NO: 312206 - DNA, 25 bp, Artificial
  Probe
cccatctgcactacaggacactttg

SEQ ID NO: 312207 - DNA, 25 bp, Artificial
  Probe
cacttagagcctgcacgggtctaga

SEQ ID NO: 312208 - DNA, 25 bp, Artificial
  Probe
gtctgagcgcctacctagaacagag

SEQ ID NO: 312209 - DNA, 25 bp, Artificial
  Probe
cccgttacacttagagcctgcacgg

SEQ ID NO: 312210 - DNA, 25 bp, Artificial
  Probe
gccttcctacacaggggcctggagg

SEQ ID NO: 312211 - DNA, 25 bp, Artificial
  Probe
tgcactacaggacactttggagaag

SEQ ID NO: 312212 - DNA, 25 bp, Artificial
  Probe
agaattgcacagagctaggcccccg

SEQ ID NO: 312213 - DNA, 25 bp, Artificial
  Probe
gagaattgcacagagctaggccccc

SEQ ID NO: 312214 - DNA, 25 bp, Artificial
  Probe
tcccgttacacttagagcctgcacg

SEQ ID NO: 312215 - DNA, 25 bp, Artificial
  Probe
tctagaaggctgtgggatcccagga

SEQ ID NO: 312216 - DNA, 25 bp, Artificial
  Probe
agagaattgcacagagctaggcccc

SEQ ID NO: 312217 - DNA, 25 bp, Artificial
  Probe
cttcttccttttcctgtctgagcgc

SEQ ID NO: 312218 - DNA, 25 bp, Artificial
  Probe
catctgcactacaggacactttgga

SEQ ID NO: 312219 - DNA, 25 bp, Artificial
  Probe
ggcgtttctaattctctctaaatag

SEQ ID NO: 312220 - DNA, 25 bp, Artificial
  Probe
agaactaccttctagaagagaattg

SEQ ID NO: 312221 - DNA, 25 bp, Artificial
  Probe
tagaactaccttctagaagagaatt

SEQ ID NO: 312222 - DNA, 25 bp, Artificial
  Probe
acttagagcctgcacgggtctagaa

SEQ ID NO: 312223 - DNA, 25 bp, Artificial
  Probe
tgaggccaccagcaccttgcatagc

SEQ ID NO: 312224 - DNA, 25 bp, Artificial
  Probe
gcactacaggacactttggagaaga

SEQ ID NO: 312225 - DNA, 25 bp, Artificial
  Probe
tgagcgcctacctagaacagagcct

SEQ ID NO: 312226 - DNA, 25 bp, Artificial
  Probe
cttccttttcctgtctgagcgccta

SEQ ID NO: 312227 - DNA, 25 bp, Artificial
  Probe
aactaccttctagaagagaattgca

SEQ ID NO: 312228 - DNA, 25 bp, Artificial
  Probe
ctacaggacactttggagaagagaa

SEQ ID NO: 312229 - DNA, 25 bp, Artificial
  Probe
cttttcctgtctgagcgcctaccta

SEQ ID NO: 312230 - DNA, 25 bp, Artificial
  Probe
ggtggcgtttctaattctctctaaa

SEQ ID NO: 312231 - DNA, 25 bp, Artificial
  Probe
catcccgttacacttagagcctgca

SEQ ID NO: 312232 - DNA, 25 bp, Artificial
  Probe
gtggcgtttctaattctctctaaat

SEQ ID NO: 312233 - DNA, 25 bp, Artificial
  Probe
tgtctgagcgcctacctagaacaga

SEQ ID NO: 312234 - DNA, 25 bp, Artificial
  Probe
tcttcttccttttcctgtctgagcg

SEQ ID NO: 312235 - DNA, 25 bp, Artificial
  Probe
ttcttccttttcctgtctgagcgcc

SEQ ID NO: 312236 - DNA, 25 bp, Artificial
  Probe
atagaactaccttctagaagagaat

SEQ ID NO: 312237 - DNA, 25 bp, Artificial
  Probe
cactacaggacactttggagaagag

SEQ ID NO: 312238 - DNA, 25 bp, Artificial
  Probe
acacttagagcctgcacgggtctag

SEQ ID NO: 312239 - DNA, 25 bp, Artificial
  Probe
atctgcactacaggacactttggag

SEQ ID NO: 312240 - DNA, 25 bp, Artificial
  Probe
cgccttcctacacaggggcctggag

SEQ ID NO: 312241 - DNA, 25 bp, Artificial
  Probe
taccttctagaagagaattgcacag

SEQ ID NO: 312242 - DNA, 25 bp, Artificial
  Probe
cgcatcccgttacacttagagcctg

SEQ ID NO: 312243 - DNA, 25 bp, Artificial
  Probe
ttttcctgtctgagcgcctacctag

SEQ ID NO: 312244 - DNA, 25 bp, Artificial
  Probe
gagcgcctacctagaacagagcctc

SEQ ID NO: 312245 - DNA, 25 bp, Artificial
  Probe
aatagaactaccttctagaagagaa

SEQ ID NO: 312246 - DNA, 25 bp, Artificial
  Probe
taaatagaactaccttctagaagag

SEQ ID NO: 312247 - DNA, 25 bp, Artificial
  Probe
ctgcactacaggacactttggagaa

SEQ ID NO: 312248 - DNA, 25 bp, Artificial
  Probe
tagaacagagcctcccatctgcact

SEQ ID NO: 312249 - DNA, 25 bp, Artificial
  Probe
ctgaggccaccagcaccttgcatag

SEQ ID NO: 312250 - DNA, 25 bp, Artificial
  Probe
gcctcgacatttctaagtaaatcag

SEQ ID NO: 312251 - DNA, 25 bp, Artificial
  Probe
cttgctgtatacagggactgataca

SEQ ID NO: 312252 - DNA, 25 bp, Artificial
  Probe
agtcactgcccatgcattgagtact

SEQ ID NO: 312253 - DNA, 25 bp, Artificial
  Probe
agcctgtgggttcctgaatgggcaa

SEQ ID NO: 312254 - DNA, 25 bp, Artificial
  Probe
ggcctcgacatttctaagtaaatca

SEQ ID NO: 312255 - DNA, 25 bp, Artificial
  Probe
gcccatgcattgagtacttgctgta

SEQ ID NO: 312256 - DNA, 25 bp, Artificial
  Probe
acttgctgtatacagggactgatac

SEQ ID NO: 312257 - DNA, 25 bp, Artificial
  Probe
gaccatgagatccatggccccttag

SEQ ID NO: 312258 - DNA, 25 bp, Artificial
  Probe
gggcctcgacatttctaagtaaatc

SEQ ID NO: 312259 - DNA, 25 bp, Artificial
  Probe
gtcccaagccccaggagggcaagga

SEQ ID NO: 312260 - DNA, 25 bp, Artificial
  Probe
attgtgtggccacagctagctcctc

SEQ ID NO: 312261 - DNA, 25 bp, Artificial
  Probe
ttaatcttggccattgtgtggccac

SEQ ID NO: 312262 - DNA, 25 bp, Artificial
  Probe
ccagcctgtgggttcctgaatgggc

SEQ ID NO: 312263 - DNA, 25 bp, Artificial
  Probe
cggacgactgagtttgcaagcttgg

SEQ ID NO: 312264 - DNA, 25 bp, Artificial
  Probe
gggggccatgaccatctccccagag

SEQ ID NO: 312265 - DNA, 25 bp, Artificial
  Probe
ttggccattgtgtggccacagctag

SEQ ID NO: 312266 - DNA, 25 bp, Artificial
  Probe
acgactgagtttgcaagcttgggtg

SEQ ID NO: 312267 - DNA, 25 bp, Artificial
  Probe
ccaagccccaggagggcaaggagta

SEQ ID NO: 312268 - DNA, 25 bp, Artificial
  Probe
tggacctccggacgactgagtttgc

SEQ ID NO: 312269 - DNA, 25 bp, Artificial
  Probe
ctgatacaatgacttttcttcggaa

SEQ ID NO: 312270 - DNA, 25 bp, Artificial
  Probe
gtggaaagtcactgcccatgcattg

SEQ ID NO: 312271 - DNA, 25 bp, Artificial
  Probe
gatgacccagcctgtgggttcctga

SEQ ID NO: 312272 - DNA, 25 bp, Artificial
  Probe
cattgagtacttgctgtatacaggg

SEQ ID NO: 312273 - DNA, 25 bp, Artificial
  Probe
ggggcctcgacatttctaagtaaat

SEQ ID NO: 312274 - DNA, 25 bp, Artificial
  Probe
accacggcatcagactgtgggtgag

SEQ ID NO: 312275 - DNA, 25 bp, Artificial
  Probe
gacctccggacgactgagtttgcaa

SEQ ID NO: 312276 - DNA, 25 bp, Artificial
  Probe
gacatttctaagtaaatcagaagcc

SEQ ID NO: 312277 - DNA, 25 bp, Artificial
  Probe
tgacccagcctgtgggttcctgaat

SEQ ID NO: 312278 - DNA, 25 bp, Artificial
  Probe
cactgcccatgcattgagtacttgc

SEQ ID NO: 312279 - DNA, 25 bp, Artificial
  Probe
ctccggacgactgagtttgcaagct

SEQ ID NO: 312280 - DNA, 25 bp, Artificial
  Probe
tggactggcattcattcctctgagg

SEQ ID NO: 312281 - DNA, 25 bp, Artificial
  Probe
cccatgcattgagtacttgctgtat

SEQ ID NO: 312282 - DNA, 25 bp, Artificial
  Probe
gactggactggcattcattcctctg

SEQ ID NO: 312283 - DNA, 25 bp, Artificial
  Probe
aagtcactgcccatgcattgagtac

SEQ ID NO: 312284 - DNA, 25 bp, Artificial
  Probe
tggccacagctagctcctcactgtt

SEQ ID NO: 312285 - DNA, 25 bp, Artificial
  Probe
cttggccattgtgtggccacagcta

SEQ ID NO: 312286 - DNA, 25 bp, Artificial
  Probe
ttgagtacttgctgtatacagggac

SEQ ID NO: 312287 - DNA, 25 bp, Artificial
  Probe
actgcttaatcttggccattgtgtg

SEQ ID NO: 312288 - DNA, 25 bp, Artificial
  Probe
aactgactggactggcattcattcc

SEQ ID NO: 312289 - DNA, 25 bp, Artificial
  Probe
atacagggactgatacaatgacttt

SEQ ID NO: 312290 - DNA, 25 bp, Artificial
  Probe
gtgtggccacagctagctcctcact

SEQ ID NO: 312291 - DNA, 25 bp, Artificial
  Probe
actgatacaatgacttttcttcgga

SEQ ID NO: 312292 - DNA, 25 bp, Artificial
  Probe
tgaactgactggactggcattcatt

SEQ ID NO: 312293 - DNA, 25 bp, Artificial
  Probe
tggaccatgagatccatggcccctt

SEQ ID NO: 312294 - DNA, 25 bp, Artificial
  Probe
cattgtgtggccacagctagctcct

SEQ ID NO: 312295 - DNA, 25 bp, Artificial
  Probe
gcattgagtacttgctgtatacagg

SEQ ID NO: 312296 - DNA, 25 bp, Artificial
  Probe
ttatccgggttctgatgtcagaatc

SEQ ID NO: 312297 - DNA, 25 bp, Artificial
  Probe
taaagcccctatggttctaatcagc

SEQ ID NO: 312298 - DNA, 25 bp, Artificial
  Probe
gcttttattgtaaagcccctatggt

SEQ ID NO: 312299 - DNA, 25 bp, Artificial
  Probe
acttcatctgagagtagctagaaga

SEQ ID NO: 312300 - DNA, 25 bp, Artificial
  Probe
tctaatcagcgttatccgggttctg

SEQ ID NO: 312301 - DNA, 25 bp, Artificial
  Probe
cacagggaatgcaccaattattgct

SEQ ID NO: 312302 - DNA, 25 bp, Artificial
  Probe
ttctttcagatgcacagggaatgca

SEQ ID NO: 312303 - DNA, 25 bp, Artificial
  Probe
cagaatcatgggaacctgaacacta

SEQ ID NO: 312304 - DNA, 25 bp, Artificial
  Probe
agcccctatggttctaatcagcgtt

SEQ ID NO: 312305 - DNA, 25 bp, Artificial
  Probe
atgcacagggaatgcaccaattatt

SEQ ID NO: 312306 - DNA, 25 bp, Artificial
  Probe
ccaacttcatctgagagtagctaga

SEQ ID NO: 312307 - DNA, 25 bp, Artificial
  Probe
agactttttgccatcatatggtcaa

SEQ ID NO: 312308 - DNA, 25 bp, Artificial
  Probe
tccgggttctgatgtcagaatcatg

SEQ ID NO: 312309 - DNA, 25 bp, Artificial
  Probe
gactttttgccatcatatggtcaat

SEQ ID NO: 312310 - DNA, 25 bp, Artificial
  Probe
gcgttatccgggttctgatgtcaga

SEQ ID NO: 312311 - DNA, 25 bp, Artificial
  Probe
gcaccaattattgctatatagattg

SEQ ID NO: 312312 - DNA, 25 bp, Artificial
  Probe
ttctaatcagcgttatccgggttct

SEQ ID NO: 312313 - DNA, 25 bp, Artificial
  Probe
ccctatggttctaatcagcgttatc

SEQ ID NO: 312314 - DNA, 25 bp, Artificial
  Probe
tttctttcagatgcacagggaatgc

SEQ ID NO: 312315 - DNA, 25 bp, Artificial
  Probe
agcttttattgtaaagcccctatgg

SEQ ID NO: 312316 - DNA, 25 bp, Artificial
  Probe
tgggaacctgaacactaagttttag

SEQ ID NO: 312317 - DNA, 25 bp, Artificial
  Probe
gaatgcaccaattattgctatatag

SEQ ID NO: 312318 - DNA, 25 bp, Artificial
  Probe
aatcatgggaacctgaacactaagt

SEQ ID NO: 312319 - DNA, 25 bp, Artificial
  Probe
agatgcacagggaatgcaccaatta

SEQ ID NO: 312320 - DNA, 25 bp, Artificial
  Probe
tttcagatgcacagggaatgcacca

SEQ ID NO: 312321 - DNA, 25 bp, Artificial
  Probe
gttatccgggttctgatgtcagaat

SEQ ID NO: 312322 - DNA, 25 bp, Artificial
  Probe
agggaatgcaccaattattgctata

SEQ ID NO: 312323 - DNA, 25 bp, Artificial
  Probe
ctttcagatgcacagggaatgcacc

SEQ ID NO: 312324 - DNA, 25 bp, Artificial
  Probe
cgttatccgggttctgatgtcagaa

SEQ ID NO: 312325 - DNA, 25 bp, Artificial
  Probe
ctgatgtcagaatcatgggaacctg

SEQ ID NO: 312326 - DNA, 25 bp, Artificial
  Probe
aaagcccctatggttctaatcagcg

SEQ ID NO: 312327 - DNA, 25 bp, Artificial
  Probe
atggttctaatcagcgttatccggg

SEQ ID NO: 312328 - DNA, 25 bp, Artificial
  Probe
ttgtaaagcccctatggttctaatc

SEQ ID NO: 312329 - DNA, 25 bp, Artificial
  Probe
cccctatggttctaatcagcgttat

SEQ ID NO: 312330 - DNA, 25 bp, Artificial
  Probe
taatcagcgttatccgggttctgat

SEQ ID NO: 312331 - DNA, 25 bp, Artificial
  Probe
catgggaacctgaacactaagtttt

SEQ ID NO: 312332 - DNA, 25 bp, Artificial
  Probe
tgaacactaagttttaggccaaaat

SEQ ID NO: 312333 - DNA, 25 bp, Artificial
  Probe
tatccgggttctgatgtcagaatca

SEQ ID NO: 312334 - DNA, 25 bp, Artificial
  Probe
ggaatgcaccaattattgctatata

SEQ ID NO: 312335 - DNA, 25 bp, Artificial
  Probe
cttcatctgagagtagctagaagag

SEQ ID NO: 312336 - DNA, 25 bp, Artificial
  Probe
cctatggttctaatcagcgttatcc

SEQ ID NO: 312337 - DNA, 25 bp, Artificial
  Probe
tcatgggaacctgaacactaagttt

SEQ ID NO: 312338 - DNA, 25 bp, Artificial
  Probe
aacttcatctgagagtagctagaag

SEQ ID NO: 312339 - DNA, 25 bp, Artificial
  Probe
ttctgatgtcagaatcatgggaacc

SEQ ID NO: 312340 - DNA, 25 bp, Artificial
  Probe
gcccctatggttctaatcagcgtta

SEQ ID NO: 312341 - DNA, 25 bp, Artificial
  Probe
tgcacagggaatgcaccaattattg

SEQ ID NO: 312342 - DNA, 25 bp, Artificial
  Probe
actgccctcgtggtagctgtggttg

SEQ ID NO: 312343 - DNA, 25 bp, Artificial
  Probe
aacagcagcagcagctgctcactgc

SEQ ID NO: 312344 - DNA, 25 bp, Artificial
  Probe
gcagctgctcactgccttcgtggag

SEQ ID NO: 312345 - DNA, 25 bp, Artificial
  Probe
ccatgaccagcaggacgtaactagt

SEQ ID NO: 312346 - DNA, 25 bp, Artificial
  Probe
ttccatgttttcgttggccctgaaa

SEQ ID NO: 312347 - DNA, 25 bp, Artificial
  Probe
aactagtaactttctgggtgccatg

SEQ ID NO: 312348 - DNA, 25 bp, Artificial
  Probe
ggcagaggctgacgtggacattatt

SEQ ID NO: 312349 - DNA, 25 bp, Artificial
  Probe
ctttgtgatcgacaatggtgcagat

SEQ ID NO: 312350 - DNA, 25 bp, Artificial
  Probe
gcggatagccatgacctatgagcgc

SEQ ID NO: 312351 - DNA, 25 bp, Artificial
  Probe
caccccattcctggagagtacaagt

SEQ ID NO: 312352 - DNA, 25 bp, Artificial
  Probe
ctgacagccctatcgggatcagctc

SEQ ID NO: 312353 - DNA, 25 bp, Artificial
  Probe
gtggacctttccaagatgcagaacg

SEQ ID NO: 312354 - DNA, 25 bp, Artificial
  Probe
gcatcggggccctcaacaagatcaa

SEQ ID NO: 312355 - DNA, 25 bp, Artificial
  Probe
ccaagctattcaccaactgaggggt

SEQ ID NO: 312356 - DNA, 25 bp, Artificial
  Probe
catcagtgtggctgtgggaactagc

SEQ ID NO: 312357 - DNA, 25 bp, Artificial
  Probe
acggatgcctcatcccgaagcatcg

SEQ ID NO: 312358 - DNA, 25 bp, Artificial
  Probe
cctgatcgcccgagtcatgctgcta

SEQ ID NO: 312359 - DNA, 25 bp, Artificial
  Probe
aagcagattggcagcctggaatcca

SEQ ID NO: 312360 - DNA, 25 bp, Artificial
  Probe
tgtggctgtgggaactagccacgcc

SEQ ID NO: 312361 - DNA, 25 bp, Artificial
  Probe
tgtcctccgggaaacatggctgatc

SEQ ID NO: 312362 - DNA, 25 bp, Artificial
  Probe
acacacaaagctgctaaagaagatt

SEQ ID NO: 312363 - DNA, 25 bp, Artificial
  Probe
tgttcagcatctctctgtggatcat

SEQ ID NO: 312364 - DNA, 25 bp, Artificial
  Probe
ggagcacctcacagccagcttcaat

SEQ ID NO: 312365 - DNA, 25 bp, Artificial
  Probe
actgtcttggggtttgtactcaaag

SEQ ID NO: 312366 - DNA, 25 bp, Artificial
  Probe
cactcagctcaccaaacggatcaag

SEQ ID NO: 312367 - DNA, 25 bp, Artificial
  Probe
gaaaggtgtctgtcttctcactggc

SEQ ID NO: 312368 - DNA, 25 bp, Artificial
  Probe
ccccatacacaagttcaagcagttg

SEQ ID NO: 312369 - DNA, 25 bp, Artificial
  Probe
aagttcttctggacggcacgcctgg

SEQ ID NO: 312370 - DNA, 25 bp, Artificial
  Probe
tgttcttgcgcctatacctgatcgc

SEQ ID NO: 312371 - DNA, 25 bp, Artificial
  Probe
aggtgtctgtcttctcactggcatc

SEQ ID NO: 312372 - DNA, 25 bp, Artificial
  Probe
ttgatcatcgcctaccacacaaggg

SEQ ID NO: 312373 - DNA, 25 bp, Artificial
  Probe
ccctcgtggtagctgtggttgcccg

SEQ ID NO: 312374 - DNA, 25 bp, Artificial
  Probe
agaagattgaccacgccaaagtcag

SEQ ID NO: 312375 - DNA, 25 bp, Artificial
  Probe
tgacgtggacattattctgtccatc

SEQ ID NO: 312376 - DNA, 25 bp, Artificial
  Probe
cggggccctcaacaagatcaacttc

SEQ ID NO: 312377 - DNA, 25 bp, Artificial
  Probe
attcgtcatgaagacgctcatgacc

SEQ ID NO: 312378 - DNA, 25 bp, Artificial
  Probe
cctggagatgctggtgtgcgccatc

SEQ ID NO: 312379 - DNA, 25 bp, Artificial
  Probe
gatcaagaacgctgccgccaatgtc

SEQ ID NO: 312380 - DNA, 25 bp, Artificial
  Probe
ttcaacacccgattcgtcatgaaga

SEQ ID NO: 312381 - DNA, 25 bp, Artificial
  Probe
cctggactgtgagagtctgtgaaag

SEQ ID NO: 312382 - DNA, 25 bp, Artificial
  Probe
cgaccggagtgaagacctggaaaag

SEQ ID NO: 312383 - DNA, 25 bp, Artificial
  Probe
ctctgacagccctatcgggatcagc

SEQ ID NO: 312384 - DNA, 25 bp, Artificial
  Probe
gctgctacatagcaagctcttcacg

SEQ ID NO: 312385 - DNA, 25 bp, Artificial
  Probe
cacaaagctgctaaagaagattgac

SEQ ID NO: 312386 - DNA, 25 bp, Artificial
  Probe
atgtcctccgggaaacatggctgat

SEQ ID NO: 312387 - DNA, 25 bp, Artificial
  Probe
gctacatagcaagctcttcacggat

SEQ ID NO: 312388 - DNA, 25 bp, Artificial
  Probe
tgctgacacatagaaggaagattcc

SEQ ID NO: 312389 - DNA, 25 bp, Artificial
  Probe
gttccttgtacctggacgggaccag

SEQ ID NO: 312390 - DNA, 25 bp, Artificial
  Probe
ccaccagaacccagaggcagactgg

SEQ ID NO: 312391 - DNA, 25 bp, Artificial
  Probe
aagatgatagtgtggcccctttcct

SEQ ID NO: 312392 - DNA, 25 bp, Artificial
  Probe
cttgctccgaggagagcagagcctg

SEQ ID NO: 312393 - DNA, 25 bp, Artificial
  Probe
gtgctggggctgcttgcactcgcct

SEQ ID NO: 312394 - DNA, 25 bp, Artificial
  Probe
ttactggccaggtgatcccaaaccc

SEQ ID NO: 312395 - DNA, 25 bp, Artificial
  Probe
ttggcggtcagcaaattgacaagtt

SEQ ID NO: 312396 - DNA, 25 bp, Artificial
  Probe
aggccctggaaacagagcaagagga

SEQ ID NO: 312397 - DNA, 25 bp, Artificial
  Probe
ctgcaggcccggacagtctttcctt

SEQ ID NO: 312398 - DNA, 25 bp, Artificial
  Probe
taccacaagagagaagctggggccc

SEQ ID NO: 312399 - DNA, 25 bp, Artificial
  Probe
aaggaagattccagtcctacagagc

SEQ ID NO: 312400 - DNA, 25 bp, Artificial
  Probe
gggctgcttgcactcgccttccttg

SEQ ID NO: 312401 - DNA, 25 bp, Artificial
  Probe
gctcagcagtgtagccctgccttct

SEQ ID NO: 312402 - DNA, 25 bp, Artificial
  Probe
tgacacaacgctggttgctgccctc

SEQ ID NO: 312403 - DNA, 25 bp, Artificial
  Probe
tccagtgtcgcatggaccctggcgg

SEQ ID NO: 312404 - DNA, 25 bp, Artificial
  Probe
cttctacgcctctgagctccgaggg

SEQ ID NO: 312405 - DNA, 25 bp, Artificial
  Probe
ccagatgtaggtttggggcatcaag

SEQ ID NO: 312406 - DNA, 25 bp, Artificial
  Probe
ggcactcgtgtatgcgtgggttcct

SEQ ID NO: 312407 - DNA, 25 bp, Artificial
  Probe
actggcatggcctggacaccaacct

SEQ ID NO: 312408 - DNA, 25 bp, Artificial
  Probe
aggcagcagggtcctctccgtacga

SEQ ID NO: 312409 - DNA, 25 bp, Artificial
  Probe
tactactaaggcagtctccactggg

SEQ ID NO: 312410 - DNA, 25 bp, Artificial
  Probe
ccctttattgccaggtcaccatgca

SEQ ID NO: 312411 - DNA, 25 bp, Artificial
  Probe
tatgccagactaagggaggcaaagg

SEQ ID NO: 312412 - DNA, 25 bp, Artificial
  Probe
gctcctatgaagttccattatgcca

SEQ ID NO: 312413 - DNA, 25 bp, Artificial
  Probe
gaccagctggaggtaaccccggagt

SEQ ID NO: 312414 - DNA, 25 bp, Artificial
  Probe
ccatggtcgccctgtggattggcag

SEQ ID NO: 312415 - DNA, 25 bp, Artificial
  Probe
tagtgtcctgcacagcccacaacat

SEQ ID NO: 312416 - DNA, 25 bp, Artificial
  Probe
ccaaataatggaccttcctgcccgt

SEQ ID NO: 312417 - DNA, 25 bp, Artificial
  Probe
tggctaagcgtgctgcccctgggcc

SEQ ID NO: 312418 - DNA, 25 bp, Artificial
  Probe
ctgcgaagcctcctgtgggtctgga

SEQ ID NO: 312419 - DNA, 25 bp, Artificial
  Probe
gagactgagggcactccactcttcc

SEQ ID NO: 312420 - DNA, 25 bp, Artificial
  Probe
accctggcgggcaggtgaccagtct

SEQ ID NO: 312421 - DNA, 25 bp, Artificial
  Probe
attccagtcctacagagccagacct

SEQ ID NO: 312422 - DNA, 25 bp, Artificial
  Probe
cccaggcatggctaagcgtgctgcc

SEQ ID NO: 312423 - DNA, 25 bp, Artificial
  Probe
gcaggcccggacagtctttcctttg

SEQ ID NO: 312424 - DNA, 25 bp, Artificial
  Probe
tcgccctgtggattggcagcttggt

SEQ ID NO: 312425 - DNA, 25 bp, Artificial
  Probe
cctgggccccattcctgagggctgg

SEQ ID NO: 312426 - DNA, 25 bp, Artificial
  Probe
cttcctgcccgttggcccagaggta

SEQ ID NO: 312427 - DNA, 25 bp, Artificial
  Probe
aacctgggcaatgtgcagaccctcc

SEQ ID NO: 312428 - DNA, 25 bp, Artificial
  Probe
ttaccagatgtaggtttggggcatc

SEQ ID NO: 312429 - DNA, 25 bp, Artificial
  Probe
ctggagtgacggtgcattggaccct

SEQ ID NO: 312430 - DNA, 25 bp, Artificial
  Probe
ttgacaagttcctcccaaataatgg

SEQ ID NO: 312431 - DNA, 25 bp, Artificial
  Probe
ctcaggccctggaaacagagcaaga

SEQ ID NO: 312432 - DNA, 25 bp, Artificial
  Probe
ggttcctgtgggagtcgaagctttc

SEQ ID NO: 312433 - DNA, 25 bp, Artificial
  Probe
ctctgagctccgaggggccctgcta

SEQ ID NO: 312434 - DNA, 25 bp, Artificial
  Probe
ttcggggatagtgtctcctccactt

SEQ ID NO: 312435 - DNA, 25 bp, Artificial
  Probe
atagtgtctcctccacttatggtta

SEQ ID NO: 312436 - DNA, 25 bp, Artificial
  Probe
gcagctctccagagcggcgtggtct

SEQ ID NO: 312437 - DNA, 25 bp, Artificial
  Probe
cggttctgcagctctccagagcggc

SEQ ID NO: 312438 - DNA, 25 bp, Artificial
  Probe
gaggccaaagccagggcgcccaaac

SEQ ID NO: 312439 - DNA, 25 bp, Artificial
  Probe
ttgcctctggggactcgccttctct

SEQ ID NO: 312440 - DNA, 25 bp, Artificial
  Probe
tctcttccttctcgaagaggccaaa

SEQ ID NO: 312441 - DNA, 25 bp, Artificial
  Probe
gtttcggggatagtgtctcctccac

SEQ ID NO: 312442 - DNA, 25 bp, Artificial
  Probe
tctcctggagagcatctctggggac

SEQ ID NO: 312443 - DNA, 25 bp, Artificial
  Probe
agagcggcgtggtctcttacctgtg

SEQ ID NO: 312444 - DNA, 25 bp, Artificial
  Probe
tcttccttctcgaagaggccaaagc

SEQ ID NO: 312445 - DNA, 25 bp, Artificial
  Probe
tcctggagagcatctctggggacct

SEQ ID NO: 312446 - DNA, 25 bp, Artificial
  Probe
tccagagcggcgtggtctcttacct

SEQ ID NO: 312447 - DNA, 25 bp, Artificial
  Probe
agaggccaagccaatttgtaactag

SEQ ID NO: 312448 - DNA, 25 bp, Artificial
  Probe
ctgcccaggccgaaaagagttggta

SEQ ID NO: 312449 - DNA, 25 bp, Artificial
  Probe
agtttcggggatagtgtctcctcca

SEQ ID NO: 312450 - DNA, 25 bp, Artificial
  Probe
ccagagcggcgtggtctcttacctg

SEQ ID NO: 312451 - DNA, 25 bp, Artificial
  Probe
tccttctcgaagaggccaaagccag

SEQ ID NO: 312452 - DNA, 25 bp, Artificial
  Probe
cttctctcctggagagcatctctgg

SEQ ID NO: 312453 - DNA, 25 bp, Artificial
  Probe
ctcgtttgcctctggggactcgcct

SEQ ID NO: 312454 - DNA, 25 bp, Artificial
  Probe
gaggccaagccaatttgtaactaga

SEQ ID NO: 312455 - DNA, 25 bp, Artificial
  Probe
gccggttctgcagctctccagagcg

SEQ ID NO: 312456 - DNA, 25 bp, Artificial
  Probe
gtgtctcctccacttatggttactt

SEQ ID NO: 312457 - DNA, 25 bp, Artificial
  Probe
ttctgcagctctccagagcggcgtg

SEQ ID NO: 312458 - DNA, 25 bp, Artificial
  Probe
tcccagcaggccagaggcagttggt

SEQ ID NO: 312459 - DNA, 25 bp, Artificial
  Probe
ctcgaagaggccaaagccagggcgc

SEQ ID NO: 312460 - DNA, 25 bp, Artificial
  Probe
tcccaggggcctcgtttgcctctgg

SEQ ID NO: 312461 - DNA, 25 bp, Artificial
  Probe
gtcccaggggcctcgtttgcctctg

SEQ ID NO: 312462 - DNA, 25 bp, Artificial
  Probe
aacaggcacagagctgcccaggccg

SEQ ID NO: 312463 - DNA, 25 bp, Artificial
  Probe
ggagagcatctctggggacctcccg

SEQ ID NO: 312464 - DNA, 25 bp, Artificial
  Probe
ggtatctcttccttctcgaagaggc

SEQ ID NO: 312465 - DNA, 25 bp, Artificial
  Probe
agagttggtatctcttccttctcga

SEQ ID NO: 312466 - DNA, 25 bp, Artificial
  Probe
agttggtatctcttccttctcgaag

SEQ ID NO: 312467 - DNA, 25 bp, Artificial
  Probe
tgagtttcggggatagtgtctcctc

SEQ ID NO: 312468 - DNA, 25 bp, Artificial
  Probe
ctctcctggagagcatctctgggga

SEQ ID NO: 312469 - DNA, 25 bp, Artificial
  Probe
acagagctgcccaggccgaaaagag

SEQ ID NO: 312470 - DNA, 25 bp, Artificial
  Probe
tgcagctctccagagcggcgtggtc

SEQ ID NO: 312471 - DNA, 25 bp, Artificial
  Probe
cccaggccgaaaagagttggtatct

SEQ ID NO: 312472 - DNA, 25 bp, Artificial
  Probe
tggagagcatctctggggacctccc

SEQ ID NO: 312473 - DNA, 25 bp, Artificial
  Probe
acaggcacagagctgcccaggccga

SEQ ID NO: 312474 - DNA, 25 bp, Artificial
  Probe
gggatagtgtctcctccacttatgg

SEQ ID NO: 312475 - DNA, 25 bp, Artificial
  Probe
ccttctctcctggagagcatctctg

SEQ ID NO: 312476 - DNA, 25 bp, Artificial
  Probe
tggtatctcttccttctcgaagagg

SEQ ID NO: 312477 - DNA, 25 bp, Artificial
  Probe
cgaagaggccaaagccagggcgccc

SEQ ID NO: 312478 - DNA, 25 bp, Artificial
  Probe
gcccaggccgaaaagagttggtatc

SEQ ID NO: 312479 - DNA, 25 bp, Artificial
  Probe
gcctcgtttgcctctggggactcgc

SEQ ID NO: 312480 - DNA, 25 bp, Artificial
  Probe
tgctatttcctaacctgcaggcaga

SEQ ID NO: 312481 - DNA, 25 bp, Artificial
  Probe
atgggaccctcatattttgcccttt

SEQ ID NO: 312482 - DNA, 25 bp, Artificial
  Probe
atacacagtacagtggtataaactt

SEQ ID NO: 312483 - DNA, 25 bp, Artificial
  Probe
aatgggaccctcatattttgccctt

SEQ ID NO: 312484 - DNA, 25 bp, Artificial
  Probe
taatgggaccctcatattttgccct

SEQ ID NO: 312485 - DNA, 25 bp, Artificial
  Probe
ggcatcctggatttagaaaacggac

SEQ ID NO: 312486 - DNA, 25 bp, Artificial
  Probe
cttcaaagttttctgctgtaaagaa

SEQ ID NO: 312487 - DNA, 25 bp, Artificial
  Probe
agacttcaaagttttctgctgtaaa

SEQ ID NO: 312488 - DNA, 25 bp, Artificial
  Probe
ggggcatcctggatttagaaaacgg

SEQ ID NO: 312489 - DNA, 25 bp, Artificial
  Probe
gctatttcctaacctgcaggcagaa

SEQ ID NO: 312490 - DNA, 25 bp, Artificial
  Probe
attttatccaatgcagtttggcttt

SEQ ID NO: 312491 - DNA, 25 bp, Artificial
  Probe
ggctccggggcatcctggatttaga

SEQ ID NO: 312492 - DNA, 25 bp, Artificial
  Probe
caacatacacagtacagtggtataa

SEQ ID NO: 312493 - DNA, 25 bp, Artificial
  Probe
atttcctaacctgcaggcagaacgt

SEQ ID NO: 312494 - DNA, 25 bp, Artificial
  Probe
aacggacaacatacacagtacagtg

SEQ ID NO: 312495 - DNA, 25 bp, Artificial
  Probe
tgttgctatttcctaacctgcaggc

SEQ ID NO: 312496 - DNA, 25 bp, Artificial
  Probe
tatccaatgcagtttggctttttaa

SEQ ID NO: 312497 - DNA, 25 bp, Artificial
  Probe
acggacaacatacacagtacagtgg

SEQ ID NO: 312498 - DNA, 25 bp, Artificial
  Probe
tggctccggggcatcctggatttag

SEQ ID NO: 312499 - DNA, 25 bp, Artificial
  Probe
ttatccaatgcagtttggcttttta

SEQ ID NO: 312500 - DNA, 25 bp, Artificial
  Probe
cggacaacatacacagtacagtggt

SEQ ID NO: 312501 - DNA, 25 bp, Artificial
  Probe
atccaatgcagtttggctttttaaa

SEQ ID NO: 312502 - DNA, 25 bp, Artificial
  Probe
ctgttgctatttcctaacctgcagg

SEQ ID NO: 312503 - DNA, 25 bp, Artificial
  Probe
gggcattttggctccggggcatcct

SEQ ID NO: 312504 - DNA, 25 bp, Artificial
  Probe
aacctgcaggcagaacgtgaaaggg

SEQ ID NO: 312505 - DNA, 25 bp, Artificial
  Probe
acatacacagtacagtggtataaac

SEQ ID NO: 312506 - DNA, 25 bp, Artificial
  Probe
ctccggggcatcctggatttagaaa

SEQ ID NO: 312507 - DNA, 25 bp, Artificial
  Probe
ttgctatttcctaacctgcaggcag

SEQ ID NO: 312508 - DNA, 25 bp, Artificial
  Probe
caaagttttctgctgtaaagaaagc

SEQ ID NO: 312509 - DNA, 25 bp, Artificial
  Probe
gacaacatacacagtacagtggtat

SEQ ID NO: 312510 - DNA, 25 bp, Artificial
  Probe
tccggggcatcctggatttagaaaa

SEQ ID NO: 312511 - DNA, 25 bp, Artificial
  Probe
acacagtacagtggtataaactttt

SEQ ID NO: 312512 - DNA, 25 bp, Artificial
  Probe
ttaatgggaccctcatattttgccc

SEQ ID NO: 312513 - DNA, 25 bp, Artificial
  Probe
gacttcaaagttttctgctgtaaag

SEQ ID NO: 312514 - DNA, 25 bp, Artificial
  Probe
actgttgctatttcctaacctgcag

SEQ ID NO: 312515 - DNA, 25 bp, Artificial
  Probe
aacatacacagtacagtggtataaa

SEQ ID NO: 312516 - DNA, 25 bp, Artificial
  Probe
ctgcaggcagaacgtgaaagggcat

SEQ ID NO: 312517 - DNA, 25 bp, Artificial
  Probe
gctccggggcatcctggatttagaa

SEQ ID NO: 312518 - DNA, 25 bp, Artificial
  Probe
catcctggatttagaaaacggacaa

SEQ ID NO: 312519 - DNA, 25 bp, Artificial
  Probe
aaacggacaacatacacagtacagt

SEQ ID NO: 312520 - DNA, 25 bp, Artificial
  Probe
aattttatccaatgcagtttggctt

SEQ ID NO: 312521 - DNA, 25 bp, Artificial
  Probe
acaacatacacagtacagtggtata

SEQ ID NO: 312522 - DNA, 25 bp, Artificial
  Probe
ctatttcctaacctgcaggcagaac

SEQ ID NO: 312523 - DNA, 25 bp, Artificial
  Probe
caagacttcaaagttttctgctgta

SEQ ID NO: 312524 - DNA, 25 bp, Artificial
  Probe
tttcctaacctgcaggcagaacgtg

SEQ ID NO: 312525 - DNA, 25 bp, Artificial
  Probe
cggggcatcctggatttagaaaacg

SEQ ID NO: 312526 - DNA, 25 bp, Artificial
  Probe
ctgggttggtgcacagtcatttttt

SEQ ID NO: 312527 - DNA, 25 bp, Artificial
  Probe
aggctgacatcatctgtttcaaatg

SEQ ID NO: 312528 - DNA, 25 bp, Artificial
  Probe
agggaatcactaagccccaagtcct

SEQ ID NO: 312529 - DNA, 25 bp, Artificial
  Probe
actaagccccaagtcctgaagaggc

SEQ ID NO: 312530 - DNA, 25 bp, Artificial
  Probe
ttcaaatggggttgtgccacaggct

SEQ ID NO: 312531 - DNA, 25 bp, Artificial
  Probe
tgacatcatctgtttcaaatggggt

SEQ ID NO: 312532 - DNA, 25 bp, Artificial
  Probe
tcatctgtttcaaatggggttgtgc

SEQ ID NO: 312533 - DNA, 25 bp, Artificial
  Probe
aggcctggcattgttggttctattt

SEQ ID NO: 312534 - DNA, 25 bp, Artificial
  Probe
gcctggcattgttggttctatttaa

SEQ ID NO: 312535 - DNA, 25 bp, Artificial
  Probe
caggcctggcattgttggttctatt

SEQ ID NO: 312536 - DNA, 25 bp, Artificial
  Probe
cactaagccccaagtcctgaagagg

SEQ ID NO: 312537 - DNA, 25 bp, Artificial
  Probe
cctggcattgttggttctatttaat

SEQ ID NO: 312538 - DNA, 25 bp, Artificial
  Probe
taagatgctgggttggtgcacagtc

SEQ ID NO: 312539 - DNA, 25 bp, Artificial
  Probe
catcatctgtttcaaatggggttgt

SEQ ID NO: 312540 - DNA, 25 bp, Artificial
  Probe
gatgctgggttggtgcacagtcatt

SEQ ID NO: 312541 - DNA, 25 bp, Artificial
  Probe
tgctgggttggtgcacagtcatttt

SEQ ID NO: 312542 - DNA, 25 bp, Artificial
  Probe
aagatgctgggttggtgcacagtca

SEQ ID NO: 312543 - DNA, 25 bp, Artificial
  Probe
taggctgacatcatctgtttcaaat

SEQ ID NO: 312544 - DNA, 25 bp, Artificial
  Probe
taagccccaagtcctgaagaggcag

SEQ ID NO: 312545 - DNA, 25 bp, Artificial
  Probe
atctgtttcaaatggggttgtgcca

SEQ ID NO: 312546 - DNA, 25 bp, Artificial
  Probe
tttaaacaggcctggcattgttggt

SEQ ID NO: 312547 - DNA, 25 bp, Artificial
  Probe
tgattaaacgtgcagactatgcaaa

SEQ ID NO: 312548 - DNA, 25 bp, Artificial
  Probe
gagggaatcactaagccccaagtcc

SEQ ID NO: 312549 - DNA, 25 bp, Artificial
  Probe
aacaggcctggcattgttggttcta

SEQ ID NO: 312550 - DNA, 25 bp, Artificial
  Probe
ccatggctgcccagctctgaggcag

SEQ ID NO: 312551 - DNA, 25 bp, Artificial
  Probe
ggtaggctgacatcatctgtttcaa

SEQ ID NO: 312552 - DNA, 25 bp, Artificial
  Probe
ctaagccccaagtcctgaagaggca

SEQ ID NO: 312553 - DNA, 25 bp, Artificial
  Probe
agctctgaggcagagggaatcacta

SEQ ID NO: 312554 - DNA, 25 bp, Artificial
  Probe
gggtaggctgacatcatctgtttca

SEQ ID NO: 312555 - DNA, 25 bp, Artificial
  Probe
caaatggggttgtgccacaggcttt

SEQ ID NO: 312556 - DNA, 25 bp, Artificial
  Probe
tcaaatggggttgtgccacaggctt

SEQ ID NO: 312557 - DNA, 25 bp, Artificial
  Probe
gctctgaggcagagggaatcactaa

SEQ ID NO: 312558 - DNA, 25 bp, Artificial
  Probe
tcactaagccccaagtcctgaagag

SEQ ID NO: 312559 - DNA, 25 bp, Artificial
  Probe
gctgacatcatctgtttcaaatggg

SEQ ID NO: 312560 - DNA, 25 bp, Artificial
  Probe
tgcccagctctgaggcagagggaat

SEQ ID NO: 312561 - DNA, 25 bp, Artificial
  Probe
gacatcatctgtttcaaatggggtt

SEQ ID NO: 312562 - DNA, 25 bp, Artificial
  Probe
ggcctggcattgttggttctattta

SEQ ID NO: 312563 - DNA, 25 bp, Artificial
  Probe
acaggcctggcattgttggttctat

SEQ ID NO: 312564 - DNA, 25 bp, Artificial
  Probe
ctgcccagctctgaggcagagggaa

SEQ ID NO: 312565 - DNA, 25 bp, Artificial
  Probe
atgctgggttggtgcacagtcattt

SEQ ID NO: 312566 - DNA, 25 bp, Artificial
  Probe
ggctgacatcatctgtttcaaatgg

SEQ ID NO: 312567 - DNA, 25 bp, Artificial
  Probe
tttcaaatggggttgtgccacaggc

SEQ ID NO: 312568 - DNA, 25 bp, Artificial
  Probe
gtaggctgacatcatctgtttcaaa

SEQ ID NO: 312569 - DNA, 25 bp, Artificial
  Probe
ctgacatcatctgtttcaaatgggg

SEQ ID NO: 312570 - DNA, 25 bp, Artificial
  Probe
cagctctgaggcagagggaatcact

SEQ ID NO: 312571 - DNA, 25 bp, Artificial
  Probe
catctgtttcaaatggggttgtgcc

SEQ ID NO: 312572 - DNA, 25 bp, Artificial
  Probe
ctgctccacctcatgttaataaagg

SEQ ID NO: 312573 - DNA, 25 bp, Artificial
  Probe
agcaggtggctgacctgaccctgat

SEQ ID NO: 312574 - DNA, 25 bp, Artificial
  Probe
cggtgtcgggcctcatgcatgtttc

SEQ ID NO: 312575 - DNA, 25 bp, Artificial
  Probe
gaggctatcaccagaactggaggct

SEQ ID NO: 312576 - DNA, 25 bp, Artificial
  Probe
cactcgatgaggaggcacaggcacc

SEQ ID NO: 312577 - DNA, 25 bp, Artificial
  Probe
gagagacagcctccttctctcatat

SEQ ID NO: 312578 - DNA, 25 bp, Artificial
  Probe
taaagggaacactgagcaggcagcc

SEQ ID NO: 312579 - DNA, 25 bp, Artificial
  Probe
cagtgatgagcctttcagtgcatgc

SEQ ID NO: 312580 - DNA, 25 bp, Artificial
  Probe
ccacccgtggggatacactcgatga

SEQ ID NO: 312581 - DNA, 25 bp, Artificial
  Probe
aaagcaggtggcagccaaggctcag

SEQ ID NO: 312582 - DNA, 25 bp, Artificial
  Probe
aggtgccatgggaatggtgacccac

SEQ ID NO: 312583 - DNA, 25 bp, Artificial
  Probe
gaggcacaggcaccatgaagcggcc

SEQ ID NO: 312584 - DNA, 25 bp, Artificial
  Probe
ccaagacacaccaggacctacaaga

SEQ ID NO: 312585 - DNA, 25 bp, Artificial
  Probe
ccaaggctcagtgtcccagggagag

SEQ ID NO: 312586 - DNA, 25 bp, Artificial
  Probe
ggatctcacctttaaaacctgcttg

SEQ ID NO: 312587 - DNA, 25 bp, Artificial
  Probe
tccctatcccacacgggtgacaggg

SEQ ID NO: 312588 - DNA, 25 bp, Artificial
  Probe
gcctcatgcatgtttcatgtactct

SEQ ID NO: 312589 - DNA, 25 bp, Artificial
  Probe
tctgggtcctgcttcctgggcctgg

SEQ ID NO: 312590 - DNA, 25 bp, Artificial
  Probe
agagggtcactgaggctcagataga

SEQ ID NO: 312591 - DNA, 25 bp, Artificial
  Probe
aagagggcactacacaggcctggag

SEQ ID NO: 312592 - DNA, 25 bp, Artificial
  Probe
ctcctgcatctccacagttcaagag

SEQ ID NO: 312593 - DNA, 25 bp, Artificial
  Probe
taggccttggctgtgatatgcagca

SEQ ID NO: 312594 - DNA, 25 bp, Artificial
  Probe
agaagcctacaaagccctcctgcat

SEQ ID NO: 312595 - DNA, 25 bp, Artificial
  Probe
tgagctggtcctgtgaaggtgccat

SEQ ID NO: 312596 - DNA, 25 bp, Artificial
  Probe
tggtagggatgctactctcgtccca

SEQ ID NO: 312597 - DNA, 25 bp, Artificial
  Probe
ggggacatcagcagccccaacagca

SEQ ID NO: 312598 - DNA, 25 bp, Artificial
  Probe
tgtcctgctgactgcccatggcctg

SEQ ID NO: 312599 - DNA, 25 bp, Artificial
  Probe
ggctgtcagggtcagcctctctctc

SEQ ID NO: 312600 - DNA, 25 bp, Artificial
  Probe
aggaggctatcaccagaactggagg

SEQ ID NO: 312601 - DNA, 25 bp, Artificial
  Probe
ctgccactttagtgttttagactca

SEQ ID NO: 312602 - DNA, 25 bp, Artificial
  Probe
cctcctttctgctcctttgtagctg

SEQ ID NO: 312603 - DNA, 25 bp, Artificial
  Probe
gcttgggcacctctgtcaggccaca

SEQ ID NO: 312604 - DNA, 25 bp, Artificial
  Probe
acctcatgttaataaagggaacact

SEQ ID NO: 312605 - DNA, 25 bp, Artificial
  Probe
ctctccagccaggacttgctgactg

SEQ ID NO: 312606 - DNA, 25 bp, Artificial
  Probe
ttcatgtactctcacacaccatggg

SEQ ID NO: 312607 - DNA, 25 bp, Artificial
  Probe
ctcttagtggaagcatgaagtccag

SEQ ID NO: 312608 - DNA, 25 bp, Artificial
  Probe
gagcaggtggctgacctgaccctga

SEQ ID NO: 312609 - DNA, 25 bp, Artificial
  Probe
gatgctactctcgtcccacctaaga

SEQ ID NO: 312610 - DNA, 25 bp, Artificial
  Probe
catgaagtccagtgtgtgtggatgc

SEQ ID NO: 312611 - DNA, 25 bp, Artificial
  Probe
cttttctgaaaggaaagcaggtggc

SEQ ID NO: 312612 - DNA, 25 bp, Artificial
  Probe
aaacctgcttgctgccactttagtg

SEQ ID NO: 312613 - DNA, 25 bp, Artificial
  Probe
gaatggtgacccacatccagtgact

SEQ ID NO: 312614 - DNA, 25 bp, Artificial
  Probe
gttttgagcaaatcagcaagggtcc

SEQ ID NO: 312615 - DNA, 25 bp, Artificial
  Probe
tgcgtgcatgcttgggcacctctgt

SEQ ID NO: 312616 - DNA, 25 bp, Artificial
  Probe
acaccatgggctggacttcacagcc

SEQ ID NO: 312617 - DNA, 25 bp, Artificial
  Probe
ttcagtgcatgctgcctgttgttcc

SEQ ID NO: 312618 - DNA, 25 bp, Artificial
  Probe
acccaaggaaccagccggctattat

SEQ ID NO: 312619 - DNA, 25 bp, Artificial
  Probe
acagccaatgggaggtaagtattct

SEQ ID NO: 312620 - DNA, 25 bp, Artificial
  Probe
agagcagtctgtgaggccacaaaag

SEQ ID NO: 312621 - DNA, 25 bp, Artificial
  Probe
agcatataagacagccaatgggagg

SEQ ID NO: 312622 - DNA, 25 bp, Artificial
  Probe
gtgcttacaaactgactgagtgagt

SEQ ID NO: 312623 - DNA, 25 bp, Artificial
  Probe
gaaccagccggctattatacactca

SEQ ID NO: 312624 - DNA, 25 bp, Artificial
  Probe
tgctgtggagacctcaaacgactgt

SEQ ID NO: 312625 - DNA, 25 bp, Artificial
  Probe
cccagatgactcttgctgtggagac

SEQ ID NO: 312626 - DNA, 25 bp, Artificial
  Probe
agatccaaaggagaagccaaatgta

SEQ ID NO: 312627 - DNA, 25 bp, Artificial
  Probe
ttgctgtggagacctcaaacgactg

SEQ ID NO: 312628 - DNA, 25 bp, Artificial
  Probe
tccaaacgtctgaaaatacccaagg

SEQ ID NO: 312629 - DNA, 25 bp, Artificial
  Probe
agacctcaaacgactgtgcttacaa

SEQ ID NO: 312630 - DNA, 25 bp, Artificial
  Probe
ctgtggagacctcaaacgactgtgc

SEQ ID NO: 312631 - DNA, 25 bp, Artificial
  Probe
cggctattatacactcacccagatg

SEQ ID NO: 312632 - DNA, 25 bp, Artificial
  Probe
cttacaaactgactgagtgagtgac

SEQ ID NO: 312633 - DNA, 25 bp, Artificial
  Probe
gaaggtatgcttctgcagtctaatg

SEQ ID NO: 312634 - DNA, 25 bp, Artificial
  Probe
atgactcttgctgtggagacctcaa

SEQ ID NO: 312635 - DNA, 25 bp, Artificial
  Probe
agccggctattatacactcacccag

SEQ ID NO: 312636 - DNA, 25 bp, Artificial
  Probe
ttctgcagtctaatggctgcattat

SEQ ID NO: 312637 - DNA, 25 bp, Artificial
  Probe
gactgtgcttacaaactgactgagt

SEQ ID NO: 312638 - DNA, 25 bp, Artificial
  Probe
tacccaaggaaccagccggctatta

SEQ ID NO: 312639 - DNA, 25 bp, Artificial
  Probe
ttctagatccaaaggagaagccaaa

SEQ ID NO: 312640 - DNA, 25 bp, Artificial
  Probe
aatacccaaggaaccagccggctat

SEQ ID NO: 312641 - DNA, 25 bp, Artificial
  Probe
gacctcaaacgactgtgcttacaaa

SEQ ID NO: 312642 - DNA, 25 bp, Artificial
  Probe
ctagcatataagacagccaatggga

SEQ ID NO: 312643 - DNA, 25 bp, Artificial
  Probe
ctgaaaatacccaaggaaccagccg

SEQ ID NO: 312644 - DNA, 25 bp, Artificial
  Probe
aacgactgtgcttacaaactgactg

SEQ ID NO: 312645 - DNA, 25 bp, Artificial
  Probe
cttctagcatataagacagccaatg

SEQ ID NO: 312646 - DNA, 25 bp, Artificial
  Probe
actgactgagtgagtgactagtctt

SEQ ID NO: 312647 - DNA, 25 bp, Artificial
  Probe
agtattctagatccaaaggagaagc

SEQ ID NO: 312648 - DNA, 25 bp, Artificial
  Probe
gtctgtgaggccacaaaagaatgca

SEQ ID NO: 312649 - DNA, 25 bp, Artificial
  Probe
ctgactgagtgagtgactagtcttg

SEQ ID NO: 312650 - DNA, 25 bp, Artificial
  Probe
gtggagacctcaaacgactgtgctt

SEQ ID NO: 312651 - DNA, 25 bp, Artificial
  Probe
cagatgactcttgctgtggagacct

SEQ ID NO: 312652 - DNA, 25 bp, Artificial
  Probe
tacaaactgactgagtgagtgacta

SEQ ID NO: 312653 - DNA, 25 bp, Artificial
  Probe
ctcaaacgactgtgcttacaaactg

SEQ ID NO: 312654 - DNA, 25 bp, Artificial
  Probe
gtattctagatccaaaggagaagcc

SEQ ID NO: 312655 - DNA, 25 bp, Artificial
  Probe
gccggctattatacactcacccaga

SEQ ID NO: 312656 - DNA, 25 bp, Artificial
  Probe
tgcttctgcagtctaatggctgcat

SEQ ID NO: 312657 - DNA, 25 bp, Artificial
  Probe
acactcacccagatgactcttgctg

SEQ ID NO: 312658 - DNA, 25 bp, Artificial
  Probe
ggctattatacactcacccagatga

SEQ ID NO: 312659 - DNA, 25 bp, Artificial
  Probe
gagcagtctgtgaggccacaaaaga

SEQ ID NO: 312660 - DNA, 25 bp, Artificial
  Probe
tattctagatccaaaggagaagcca

SEQ ID NO: 312661 - DNA, 25 bp, Artificial
  Probe
actcacccagatgactcttgctgtg

SEQ ID NO: 312662 - DNA, 25 bp, Artificial
  Probe
caaactgactgagtgagtgactagt

SEQ ID NO: 312663 - DNA, 25 bp, Artificial
  Probe
tgaaaatacccaaggaaccagccgg

SEQ ID NO: 312664 - DNA, 25 bp, Artificial
  Probe
tcttaaagcttctgctagatgcaca

SEQ ID NO: 312665 - DNA, 25 bp, Artificial
  Probe
cttctgctagatgcacagttcactg

SEQ ID NO: 312666 - DNA, 25 bp, Artificial
  Probe
tgctagatgcacagttcactgaaaa

SEQ ID NO: 312667 - DNA, 25 bp, Artificial
  Probe
agtcagtcacaaactggaagaattg

SEQ ID NO: 312668 - DNA, 25 bp, Artificial
  Probe
tctgctagatgcacagttcactgaa

SEQ ID NO: 312669 - DNA, 25 bp, Artificial
  Probe
ttcagtcagtcacaaactggaagaa

SEQ ID NO: 312670 - DNA, 25 bp, Artificial
  Probe
tgttctgtgtgcacataaaggcatc

SEQ ID NO: 312671 - DNA, 25 bp, Artificial
  Probe
tcacatttgccaagggacactgtca

SEQ ID NO: 312672 - DNA, 25 bp, Artificial
  Probe
cagtcacaaactggaagaattgtaa

SEQ ID NO: 312673 - DNA, 25 bp, Artificial
  Probe
aattcagtcagtcacaaactggaag

SEQ ID NO: 312674 - DNA, 25 bp, Artificial
  Probe
tgccaagggacactgtcatctcatt

SEQ ID NO: 312675 - DNA, 25 bp, Artificial
  Probe
aagggacactgtcatctcattgcct

SEQ ID NO: 312676 - DNA, 25 bp, Artificial
  Probe
ttctgtgtgcacataaaggcatcac

SEQ ID NO: 312677 - DNA, 25 bp, Artificial
  Probe
taaaggcatcacatttgccaaggga

SEQ ID NO: 312678 - DNA, 25 bp, Artificial
  Probe
aaggcatcacatttgccaagggaca

SEQ ID NO: 312679 - DNA, 25 bp, Artificial
  Probe
agcttctgctagatgcacagttcac

SEQ ID NO: 312680 - DNA, 25 bp, Artificial
  Probe
gcacagttcactgaaaattcagtca

SEQ ID NO: 312681 - DNA, 25 bp, Artificial
  Probe
acataaaggcatcacatttgccaag

SEQ ID NO: 312682 - DNA, 25 bp, Artificial
  Probe
ggacactgtcatctcattgcctcca

SEQ ID NO: 312683 - DNA, 25 bp, Artificial
  Probe
aagcttctgctagatgcacagttca

SEQ ID NO: 312684 - DNA, 25 bp, Artificial
  Probe
taagctggatctgtgtccttttctt

SEQ ID NO: 312685 - DNA, 25 bp, Artificial
  Probe
gttctgtgtgcacataaaggcatca

SEQ ID NO: 312686 - DNA, 25 bp, Artificial
  Probe
ttttcttaaagcttctgctagatgc

SEQ ID NO: 312687 - DNA, 25 bp, Artificial
  Probe
ctagatgcacagttcactgaaaatt

SEQ ID NO: 312688 - DNA, 25 bp, Artificial
  Probe
tgcacagttcactgaaaattcagtc

SEQ ID NO: 312689 - DNA, 25 bp, Artificial
  Probe
cagtcagtcacaaactggaagaatt

SEQ ID NO: 312690 - DNA, 25 bp, Artificial
  Probe
gcacataaaggcatcacatttgcca

SEQ ID NO: 312691 - DNA, 25 bp, Artificial
  Probe
tcagtcagtcacaaactggaagaat

SEQ ID NO: 312692 - DNA, 25 bp, Artificial
  Probe
tagatgcacagttcactgaaaattc

SEQ ID NO: 312693 - DNA, 25 bp, Artificial
  Probe
atgcacagttcactgaaaattcagt

SEQ ID NO: 312694 - DNA, 25 bp, Artificial
  Probe
aaattcagtcagtcacaaactggaa

SEQ ID NO: 312695 - DNA, 25 bp, Artificial
  Probe
ttgttctgtgtgcacataaaggcat

SEQ ID NO: 312696 - DNA, 25 bp, Artificial
  Probe
agatgcacagttcactgaaaattca

SEQ ID NO: 312697 - DNA, 25 bp, Artificial
  Probe
ttcttaaagcttctgctagatgcac

SEQ ID NO: 312698 - DNA, 25 bp, Artificial
  Probe
atttgccaagggacactgtcatctc

SEQ ID NO: 312699 - DNA, 25 bp, Artificial
  Probe
gggacactgtcatctcattgcctcc

SEQ ID NO: 312700 - DNA, 25 bp, Artificial
  Probe
tttcttaaagcttctgctagatgca

SEQ ID NO: 312701 - DNA, 25 bp, Artificial
  Probe
atcacatttgccaagggacactgtc

SEQ ID NO: 312702 - DNA, 25 bp, Artificial
  Probe
taaagcttctgctagatgcacagtt

SEQ ID NO: 312703 - DNA, 25 bp, Artificial
  Probe
aggcatcacatttgccaagggacac

SEQ ID NO: 312704 - DNA, 25 bp, Artificial
  Probe
gttcactgaaaattcagtcagtcac

SEQ ID NO: 312705 - DNA, 25 bp, Artificial
  Probe
cagttcactgaaaattcagtcagtc

SEQ ID NO: 312706 - DNA, 25 bp, Artificial
  Probe
cataaaggcatcacatttgccaagg

SEQ ID NO: 312707 - DNA, 25 bp, Artificial
  Probe
ccaagggacactgtcatctcattgc

SEQ ID NO: 312708 - DNA, 25 bp, Artificial
  Probe
gccaagggacactgtcatctcattg

SEQ ID NO: 312709 - DNA, 25 bp, Artificial
  Probe
tgaaaattcagtcagtcacaaactg

SEQ ID NO: 312710 - DNA, 25 bp, Artificial
  Probe
ccagattctgatgtgtggtgaaaca

SEQ ID NO: 312711 - DNA, 25 bp, Artificial
  Probe
ctcctcttaggcactttagtcatgc

SEQ ID NO: 312712 - DNA, 25 bp, Artificial
  Probe
ctgcctcaccaggtcttcattaaag

SEQ ID NO: 312713 - DNA, 25 bp, Artificial
  Probe
ggtgcagagcttctagccctggtac

SEQ ID NO: 312714 - DNA, 25 bp, Artificial
  Probe
caagttggagtatcctgagttctgt

SEQ ID NO: 312715 - DNA, 25 bp, Artificial
  Probe
tctcccctgcttctcatagaaggtg

SEQ ID NO: 312716 - DNA, 25 bp, Artificial
  Probe
ctcccgtggagcatctggtgtgtgt

SEQ ID NO: 312717 - DNA, 25 bp, Artificial
  Probe
tttagtcatgctagcccagattctg

SEQ ID NO: 312718 - DNA, 25 bp, Artificial
  Probe
accctggtgactcctttccgcgtgg

SEQ ID NO: 312719 - DNA, 25 bp, Artificial
  Probe
ctcatagaaggtgcagagcttctag

SEQ ID NO: 312720 - DNA, 25 bp, Artificial
  Probe
ttcagctcttgatgggatgaaggct

SEQ ID NO: 312721 - DNA, 25 bp, Artificial
  Probe
gactcccgtggagcatctggtgtgt

SEQ ID NO: 312722 - DNA, 25 bp, Artificial
  Probe
aggagcagatagctctatgggactc

SEQ ID NO: 312723 - DNA, 25 bp, Artificial
  Probe
ctggtgactcctttccgcgtgggag

SEQ ID NO: 312724 - DNA, 25 bp, Artificial
  Probe
aaggtgatgtcatgcaccctggtga

SEQ ID NO: 312725 - DNA, 25 bp, Artificial
  Probe
ctgtagctagacgaggacatggagt

SEQ ID NO: 312726 - DNA, 25 bp, Artificial
  Probe
agaaggtgcagagcttctagccctg

SEQ ID NO: 312727 - DNA, 25 bp, Artificial
  Probe
gttcagctcttgatgggatgaaggc

SEQ ID NO: 312728 - DNA, 25 bp, Artificial
  Probe
gtacctcctcttaggcactttagtc

SEQ ID NO: 312729 - DNA, 25 bp, Artificial
  Probe
tgtcatgcaccctggtgactccttt

SEQ ID NO: 312730 - DNA, 25 bp, Artificial
  Probe
cctggtacctcctcttaggcacttt

SEQ ID NO: 312731 - DNA, 25 bp, Artificial
  Probe
gcagtataccacagacatgctcttc

SEQ ID NO: 312732 - DNA, 25 bp, Artificial
  Probe
tagccctggtacctcctcttaggca

SEQ ID NO: 312733 - DNA, 25 bp, Artificial
  Probe
gaaatgtttacaacatctagagcaa

SEQ ID NO: 312734 - DNA, 25 bp, Artificial
  Probe
tagctctatgggactcccgtggagc

SEQ ID NO: 312735 - DNA, 25 bp, Artificial
  Probe
ctcttgatgggatgaaggctgcaga

SEQ ID NO: 312736 - DNA, 25 bp, Artificial
  Probe
gtcttcattaaagatgccactgctt

SEQ ID NO: 312737 - DNA, 25 bp, Artificial
  Probe
gctctatgggactcccgtggagcat

SEQ ID NO: 312738 - DNA, 25 bp, Artificial
  Probe
tgtctgtgtcgaggagcagatagct

SEQ ID NO: 312739 - DNA, 25 bp, Artificial
  Probe
tgagtcttgggcagtataccacaga

SEQ ID NO: 312740 - DNA, 25 bp, Artificial
  Probe
ctagagttcagctcttgatgggatg

SEQ ID NO: 312741 - DNA, 25 bp, Artificial
  Probe
ggtgcggcaccctcacttggggcct

SEQ ID NO: 312742 - DNA, 25 bp, Artificial
  Probe
ccaggtcttcattaaagatgccact

SEQ ID NO: 312743 - DNA, 25 bp, Artificial
  Probe
aactgtgagtcttgggcagtatacc

SEQ ID NO: 312744 - DNA, 25 bp, Artificial
  Probe
ggcactatcccaattcaaaatggct

SEQ ID NO: 312745 - DNA, 25 bp, Artificial
  Probe
gtcatgcaccctggtgactcctttc

SEQ ID NO: 312746 - DNA, 25 bp, Artificial
  Probe
tcatgctagcccagattctgatgtg

SEQ ID NO: 312747 - DNA, 25 bp, Artificial
  Probe
taactgtgagtcttgggcagtatac

SEQ ID NO: 312748 - DNA, 25 bp, Artificial
  Probe
atgggactcccgtggagcatctggt

SEQ ID NO: 312749 - DNA, 25 bp, Artificial
  Probe
gtgatgtcatgcaccctggtgactc

SEQ ID NO: 312750 - DNA, 25 bp, Artificial
  Probe
cagatagctctatgggactcccgtg

SEQ ID NO: 312751 - DNA, 25 bp, Artificial
  Probe
ggcaccctcacttggggcctagagt

SEQ ID NO: 312752 - DNA, 25 bp, Artificial
  Probe
ctgtgtcgaggagcagatagctcta

SEQ ID NO: 312753 - DNA, 25 bp, Artificial
  Probe
tcacttggggcctagagttcagctc

SEQ ID NO: 312754 - DNA, 25 bp, Artificial
  Probe
ttctagccctggtacctcctcttag

SEQ ID NO: 312755 - DNA, 25 bp, Artificial
  Probe
aaggctgcagaaggtgatgtcatgc

SEQ ID NO: 312756 - DNA, 25 bp, Artificial
  Probe
gtgaggagtgtctcttcatggcttc

SEQ ID NO: 312757 - DNA, 25 bp, Artificial
  Probe
ctcctttgaagttgattgcaacctt

SEQ ID NO: 312758 - DNA, 25 bp, Artificial
  Probe
acggttgatgggtgccggcaatcac

SEQ ID NO: 312759 - DNA, 25 bp, Artificial
  Probe
tgacaaatgcctcctgctgattggc

SEQ ID NO: 312760 - DNA, 25 bp, Artificial
  Probe
acccactcgtgtgcagtgacccgtg

SEQ ID NO: 312761 - DNA, 25 bp, Artificial
  Probe
ggtgccggcaatcacctgctgacta

SEQ ID NO: 312762 - DNA, 25 bp, Artificial
  Probe
agtgtgctcctttgaagttgattgc

SEQ ID NO: 312763 - DNA, 25 bp, Artificial
  Probe
cactcgtgtgcagtgacccgtgctt

SEQ ID NO: 312764 - DNA, 25 bp, Artificial
  Probe
tcaaacccactcgtgtgcagtgacc

SEQ ID NO: 312765 - DNA, 25 bp, Artificial
  Probe
tgggtgccggcaatcacctgctgac

SEQ ID NO: 312766 - DNA, 25 bp, Artificial
  Probe
aatgatcttcaaacccactcgtgtg

SEQ ID NO: 312767 - DNA, 25 bp, Artificial
  Probe
gcctccattacagagcacagggatt

SEQ ID NO: 312768 - DNA, 25 bp, Artificial
  Probe
gtgatagggaccacacctacggttg

SEQ ID NO: 312769 - DNA, 25 bp, Artificial
  Probe
aagttgattgcaaccttctaaatga

SEQ ID NO: 312770 - DNA, 25 bp, Artificial
  Probe
aggagtgtctcttcatggcttctgc

SEQ ID NO: 312771 - DNA, 25 bp, Artificial
  Probe
gttgattgcaaccttctaaatgatc

SEQ ID NO: 312772 - DNA, 25 bp, Artificial
  Probe
tcgtgtgcagtgacccgtgctttga

SEQ ID NO: 312773 - DNA, 25 bp, Artificial
  Probe
tcaattgacaaatgcctcctgctga

SEQ ID NO: 312774 - DNA, 25 bp, Artificial
  Probe
tgacccgtgctttgaaaaacaggtt

SEQ ID NO: 312775 - DNA, 25 bp, Artificial
  Probe
cataggcatgtttcacgaggtgata

SEQ ID NO: 312776 - DNA, 25 bp, Artificial
  Probe
cctccattacagagcacagggattc

SEQ ID NO: 312777 - DNA, 25 bp, Artificial
  Probe
aaacccactcgtgtgcagtgacccg

SEQ ID NO: 312778 - DNA, 25 bp, Artificial
  Probe
tgtgctcctttgaagttgattgcaa

SEQ ID NO: 312779 - DNA, 25 bp, Artificial
  Probe
gggaccacacctacggttgatgggt

SEQ ID NO: 312780 - DNA, 25 bp, Artificial
  Probe
tctagtgtgctcctttgaagttgat

SEQ ID NO: 312781 - DNA, 25 bp, Artificial
  Probe
tgctcctttgaagttgattgcaacc

SEQ ID NO: 312782 - DNA, 25 bp, Artificial
  Probe
atagggaccacacctacggttgatg

SEQ ID NO: 312783 - DNA, 25 bp, Artificial
  Probe
aacccactcgtgtgcagtgacccgt

SEQ ID NO: 312784 - DNA, 25 bp, Artificial
  Probe
ccactcgtgtgcagtgacccgtgct

SEQ ID NO: 312785 - DNA, 25 bp, Artificial
  Probe
gtctctagtgtgctcctttgaagtt

SEQ ID NO: 312786 - DNA, 25 bp, Artificial
  Probe
aggcacattcacataggcatgtttc

SEQ ID NO: 312787 - DNA, 25 bp, Artificial
  Probe
gcatgtttcacgaggtgatagggac

SEQ ID NO: 312788 - DNA, 25 bp, Artificial
  Probe
tttcacgaggtgatagggaccacac

SEQ ID NO: 312789 - DNA, 25 bp, Artificial
  Probe
ctagtgtgctcctttgaagttgatt

SEQ ID NO: 312790 - DNA, 25 bp, Artificial
  Probe
tgaggagtgtctcttcatggcttct

SEQ ID NO: 312791 - DNA, 25 bp, Artificial
  Probe
gcacattcacataggcatgtttcac

SEQ ID NO: 312792 - DNA, 25 bp, Artificial
  Probe
attcacataggcatgtttcacgagg

SEQ ID NO: 312793 - DNA, 25 bp, Artificial
  Probe
ttcacataggcatgtttcacgaggt

SEQ ID NO: 312794 - DNA, 25 bp, Artificial
  Probe
atcttcaaacccactcgtgtgcagt

SEQ ID NO: 312795 - DNA, 25 bp, Artificial
  Probe
atgggtgccggcaatcacctgctga

SEQ ID NO: 312796 - DNA, 25 bp, Artificial
  Probe
ccacacctacggttgatgggtgccg

SEQ ID NO: 312797 - DNA, 25 bp, Artificial
  Probe
acctacggttgatgggtgccggcaa

SEQ ID NO: 312798 - DNA, 25 bp, Artificial
  Probe
ttgacaaatgcctcctgctgattgg

SEQ ID NO: 312799 - DNA, 25 bp, Artificial
  Probe
ctcaattgacaaatgcctcctgctg

SEQ ID NO: 312800 - DNA, 25 bp, Artificial
  Probe
tgcagtgacccgtgctttgaaaaac

SEQ ID NO: 312801 - DNA, 25 bp, Artificial
  Probe
cttcaaacccactcgtgtgcagtga

SEQ ID NO: 312802 - DNA, 25 bp, Artificial
  Probe
gatcggagggatgttcatggcactc

SEQ ID NO: 312803 - DNA, 25 bp, Artificial
  Probe
ttacctactccgaggagaaccgcat

SEQ ID NO: 312804 - DNA, 25 bp, Artificial
  Probe
gtctcagtcttgcagctccgtttaa

SEQ ID NO: 312805 - DNA, 25 bp, Artificial
  Probe
aggagaaccgcatcttctacctaca

SEQ ID NO: 312806 - DNA, 25 bp, Artificial
  Probe
cttgcattgcgatcggagggatgtt

SEQ ID NO: 312807 - DNA, 25 bp, Artificial
  Probe
ttcctgtgtgccatcctgctttcct

SEQ ID NO: 312808 - DNA, 25 bp, Artificial
  Probe
gttcatggcactcacctggcagacc

SEQ ID NO: 312809 - DNA, 25 bp, Artificial
  Probe
gatgttcatggcactcacctggcag

SEQ ID NO: 312810 - DNA, 25 bp, Artificial
  Probe
tgctgaccacggaaaatcccaatat

SEQ ID NO: 312811 - DNA, 25 bp, Artificial
  Probe
agcaaagttacctactccgaggaga

SEQ ID NO: 312812 - DNA, 25 bp, Artificial
  Probe
acctgccagcttgtacctggtcctt

SEQ ID NO: 312813 - DNA, 25 bp, Artificial
  Probe
ctgcggttcacctgccagcttgtac

SEQ ID NO: 312814 - DNA, 25 bp, Artificial
  Probe
cagcttgtacctggtccttctgctt

SEQ ID NO: 312815 - DNA, 25 bp, Artificial
  Probe
ttggagcctgtatgacacacctgat

SEQ ID NO: 312816 - DNA, 25 bp, Artificial
  Probe
tgccctgttcactgcctactttgga

SEQ ID NO: 312817 - DNA, 25 bp, Artificial
  Probe
gataacccgtggacaggggccattt

SEQ ID NO: 312818 - DNA, 25 bp, Artificial
  Probe
tgcctactttggagcctgtatgaca

SEQ ID NO: 312819 - DNA, 25 bp, Artificial
  Probe
tgcacgctgctatcggatcgttgct

SEQ ID NO: 312820 - DNA, 25 bp, Artificial
  Probe
ggatgcccctcagcaaagttaccta

SEQ ID NO: 312821 - DNA, 25 bp, Artificial
  Probe
ttctcctgctgaccacggaaaatcc

SEQ ID NO: 312822 - DNA, 25 bp, Artificial
  Probe
ctgtgccctgttcactgcctacttt

SEQ ID NO: 312823 - DNA, 25 bp, Artificial
  Probe
cattgcgatcggagggatgttcatg

SEQ ID NO: 312824 - DNA, 25 bp, Artificial
  Probe
tcatgtgcctgcacgctgctatcgg

SEQ ID NO: 312825 - DNA, 25 bp, Artificial
  Probe
actccgaggagaaccgcatcttcta

SEQ ID NO: 312826 - DNA, 25 bp, Artificial
  Probe
tgggctctggggtttcaacagttcc

SEQ ID NO: 312827 - DNA, 25 bp, Artificial
  Probe
gtgcctgcacgctgctatcggatcg

SEQ ID NO: 312828 - DNA, 25 bp, Artificial
  Probe
gcaaagttacctactccgaggagaa

SEQ ID NO: 312829 - DNA, 25 bp, Artificial
  Probe
gctgaccacggaaaatcccaatatc

SEQ ID NO: 312830 - DNA, 25 bp, Artificial
  Probe
ggtttcaacagttccctggcttgca

SEQ ID NO: 312831 - DNA, 25 bp, Artificial
  Probe
acggaaaatcccaatatctacagga

SEQ ID NO: 312832 - DNA, 25 bp, Artificial
  Probe
tcggatcgttgctgggagtcatcgc

SEQ ID NO: 312833 - DNA, 25 bp, Artificial
  Probe
ggttcacctgccagcttgtacctgg

SEQ ID NO: 312834 - DNA, 25 bp, Artificial
  Probe
tcaacagttccctggcttgcattgc

SEQ ID NO: 312835 - DNA, 25 bp, Artificial
  Probe
tggacaggggccattttcctgtgtg

SEQ ID NO: 312836 - DNA, 25 bp, Artificial
  Probe
cgatcggagggatgttcatggcact

SEQ ID NO: 312837 - DNA, 25 bp, Artificial
  Probe
tactctttctcctgctgaccacgga

SEQ ID NO: 312838 - DNA, 25 bp, Artificial
  Probe
ggaaaatcccaatatctacaggatg

SEQ ID NO: 312839 - DNA, 25 bp, Artificial
  Probe
cttgcagctccgtttaaagatatct

SEQ ID NO: 312840 - DNA, 25 bp, Artificial
  Probe
cgctgctatcggatcgttgctggga

SEQ ID NO: 312841 - DNA, 25 bp, Artificial
  Probe
acaggatgcccctcagcaaagttac

SEQ ID NO: 312842 - DNA, 25 bp, Artificial
  Probe
cagttccctggcttgcattgcgatc

SEQ ID NO: 312843 - DNA, 25 bp, Artificial
  Probe
ctgttcactgcctactttggagcct

SEQ ID NO: 312844 - DNA, 25 bp, Artificial
  Probe
ccctggcttgcattgcgatcggagg

SEQ ID NO: 312845 - DNA, 25 bp, Artificial
  Probe
cactcatgtgcctgcacgctgctat

SEQ ID NO: 312846 - DNA, 25 bp, Artificial
  Probe
cattttcctgtgtgccatcctgctt

SEQ ID NO: 312847 - DNA, 25 bp, Artificial
  Probe
ccaatatctacaggatgcccctcag

SEQ ID NO: 312848 - DNA, 25 bp, Artificial
  Probe
gttacttatggaatggctctcagag

SEQ ID NO: 312849 - DNA, 25 bp, Artificial
  Probe
tccaatcatagtgtaagcaaacgtc

SEQ ID NO: 312850 - DNA, 25 bp, Artificial
  Probe
gctgggttcactaatgagttccaac

SEQ ID NO: 312851 - DNA, 25 bp, Artificial
  Probe
cttgagttacttatggaatggctct

SEQ ID NO: 312852 - DNA, 25 bp, Artificial
  Probe
ctcagcatggccagcaagtaattat

SEQ ID NO: 312853 - DNA, 25 bp, Artificial
  Probe
ggttcactaatgagttccaactgtc

SEQ ID NO: 312854 - DNA, 25 bp, Artificial
  Probe
gaaggactccaaagtccttccacct

SEQ ID NO: 312855 - DNA, 25 bp, Artificial
  Probe
taaggagtgaccttttccaacatcc

SEQ ID NO: 312856 - DNA, 25 bp, Artificial
  Probe
tttgttgccaaggatttctttacca

SEQ ID NO: 312857 - DNA, 25 bp, Artificial
  Probe
tgctctaaggcttgggaccggacac

SEQ ID NO: 312858 - DNA, 25 bp, Artificial
  Probe
cattagcctgccatgcaagagggct

SEQ ID NO: 312859 - DNA, 25 bp, Artificial
  Probe
atttagtggcgcaaatcatgattcc

SEQ ID NO: 312860 - DNA, 25 bp, Artificial
  Probe
gaaatgttcattagcctgccatgca

SEQ ID NO: 312861 - DNA, 25 bp, Artificial
  Probe
taccatgacaaggaaggactccaaa

SEQ ID NO: 312862 - DNA, 25 bp, Artificial
  Probe
agatatctgggagatgctctaaggc

SEQ ID NO: 312863 - DNA, 25 bp, Artificial
  Probe
gacacctgaattcattgaaaatgcc

SEQ ID NO: 312864 - DNA, 25 bp, Artificial
  Probe
tgaaaatgccaatgtatcttctttg

SEQ ID NO: 312865 - DNA, 25 bp, Artificial
  Probe
aggaaatgttcattagcctgccatg

SEQ ID NO: 312866 - DNA, 25 bp, Artificial
  Probe
ctgtaaactaaccaactcagcatgg

SEQ ID NO: 312867 - DNA, 25 bp, Artificial
  Probe
tcagttatttagtggcgcaaatcat

SEQ ID NO: 312868 - DNA, 25 bp, Artificial
  Probe
tccaactgtctcaggccagtcttct

SEQ ID NO: 312869 - DNA, 25 bp, Artificial
  Probe
catccaatcatagtgtaagcaaacg

SEQ ID NO: 312870 - DNA, 25 bp, Artificial
  Probe
ttccaggaaatgttcattagcctgc

SEQ ID NO: 312871 - DNA, 25 bp, Artificial
  Probe
cactaatgagttccaactgtctcag

SEQ ID NO: 312872 - DNA, 25 bp, Artificial
  Probe
tgttcattagcctgccatgcaagag

SEQ ID NO: 312873 - DNA, 25 bp, Artificial
  Probe
agtgtaagcaaacgtctttgcttgt

SEQ ID NO: 312874 - DNA, 25 bp, Artificial
  Probe
attcttagatatctgggagatgctc

SEQ ID NO: 312875 - DNA, 25 bp, Artificial
  Probe
ctaaggcttgggaccggacacctga

SEQ ID NO: 312876 - DNA, 25 bp, Artificial
  Probe
gttagtgccctgtggaagtttattc

SEQ ID NO: 312877 - DNA, 25 bp, Artificial
  Probe
cctgggtgttttgttgccaaggatt

SEQ ID NO: 312878 - DNA, 25 bp, Artificial
  Probe
atgctctaaggcttgggaccggaca

SEQ ID NO: 312879 - DNA, 25 bp, Artificial
  Probe
ggctgggttcactaatgagttccaa

SEQ ID NO: 312880 - DNA, 25 bp, Artificial
  Probe
tgccctgtggaagtttattcttaga

SEQ ID NO: 312881 - DNA, 25 bp, Artificial
  Probe
atctgggagatgctctaaggcttgg

SEQ ID NO: 312882 - DNA, 25 bp, Artificial
  Probe
ggagtgaccttttccaacatccaat

SEQ ID NO: 312883 - DNA, 25 bp, Artificial
  Probe
catctggtaaggagtgaccttttcc

SEQ ID NO: 312884 - DNA, 25 bp, Artificial
  Probe
atttccagaaacatcatctggtaag

SEQ ID NO: 312885 - DNA, 25 bp, Artificial
  Probe
atggccagcaagtaattattctgac

SEQ ID NO: 312886 - DNA, 25 bp, Artificial
  Probe
ttagcctgccatgcaagagggctgg

SEQ ID NO: 312887 - DNA, 25 bp, Artificial
  Probe
gcttgggaccggacacctgaattca

SEQ ID NO: 312888 - DNA, 25 bp, Artificial
  Probe
ttcttagatatctgggagatgctct

SEQ ID NO: 312889 - DNA, 25 bp, Artificial
  Probe
ttgagttacttatggaatggctctc

SEQ ID NO: 312890 - DNA, 25 bp, Artificial
  Probe
tagtggcgcaaatcatgattccagg

SEQ ID NO: 312891 - DNA, 25 bp, Artificial
  Probe
ctcagcctgggtgttttgttgccaa

SEQ ID NO: 312892 - DNA, 25 bp, Artificial
  Probe
accaactcagcatggccagcaagta

SEQ ID NO: 312893 - DNA, 25 bp, Artificial
  Probe
ttacttatggaatggctctcagagg

SEQ ID NO: 312894 - DNA, 25 bp, Artificial
  Probe
gcttagccagccttcgcccataaag

SEQ ID NO: 312895 - DNA, 25 bp, Artificial
  Probe
gaggcctgaccccggaccctgcacc

SEQ ID NO: 312896 - DNA, 25 bp, Artificial
  Probe
tatacctcctcagcaaggaggcctt

SEQ ID NO: 312897 - DNA, 25 bp, Artificial
  Probe
ccctcagtcctgctaacagttaagc

SEQ ID NO: 312898 - DNA, 25 bp, Artificial
  Probe
tccagctgatgacctggaccctgct

SEQ ID NO: 312899 - DNA, 25 bp, Artificial
  Probe
agtcctgctaacagttaagcccaaa

SEQ ID NO: 312900 - DNA, 25 bp, Artificial
  Probe
agcctctccagctgatgacctggac

SEQ ID NO: 312901 - DNA, 25 bp, Artificial
  Probe
acctcctcagcaaggaggccttacc

SEQ ID NO: 312902 - DNA, 25 bp, Artificial
  Probe
tgagcctctccagctgatgacctgg

SEQ ID NO: 312903 - DNA, 25 bp, Artificial
  Probe
tctcactatgcctcctcagcgagga

SEQ ID NO: 312904 - DNA, 25 bp, Artificial
  Probe
tttgtcctcattcccagcccagctt

SEQ ID NO: 312905 - DNA, 25 bp, Artificial
  Probe
accctcagtcctgctaacagttaag

SEQ ID NO: 312906 - DNA, 25 bp, Artificial
  Probe
tttgagcctctccagctgatgacct

SEQ ID NO: 312907 - DNA, 25 bp, Artificial
  Probe
tcctgctaacagttaagcccaaatc

SEQ ID NO: 312908 - DNA, 25 bp, Artificial
  Probe
tcgcccataaagcaagctccaatgt

SEQ ID NO: 312909 - DNA, 25 bp, Artificial
  Probe
tcagtcctgctaacagttaagccca

SEQ ID NO: 312910 - DNA, 25 bp, Artificial
  Probe
gtcctgctaacagttaagcccaaat

SEQ ID NO: 312911 - DNA, 25 bp, Artificial
  Probe
attcccagcccagcttagccagcct

SEQ ID NO: 312912 - DNA, 25 bp, Artificial
  Probe
tctccagctgatgacctggaccctg

SEQ ID NO: 312913 - DNA, 25 bp, Artificial
  Probe
gcaaggaggccttaccctagcacat

SEQ ID NO: 312914 - DNA, 25 bp, Artificial
  Probe
ctatgcctcctcagcgaggaggcct

SEQ ID NO: 312915 - DNA, 25 bp, Artificial
  Probe
actatgcctcctcagcgaggaggcc

SEQ ID NO: 312916 - DNA, 25 bp, Artificial
  Probe
tgacctggaccctgctccccattcc

SEQ ID NO: 312917 - DNA, 25 bp, Artificial
  Probe
ctcagtcctgctaacagttaagccc

SEQ ID NO: 312918 - DNA, 25 bp, Artificial
  Probe
atacctcctcagcaaggaggcctta

SEQ ID NO: 312919 - DNA, 25 bp, Artificial
  Probe
gagcctctccagctgatgacctgga

SEQ ID NO: 312920 - DNA, 25 bp, Artificial
  Probe
ctgcaccctcagtcctgctaacagt

SEQ ID NO: 312921 - DNA, 25 bp, Artificial
  Probe
tcactatgcctcctcagcgaggagg

SEQ ID NO: 312922 - DNA, 25 bp, Artificial
  Probe
caaggaggccttaccctagcacatc

SEQ ID NO: 312923 - DNA, 25 bp, Artificial
  Probe
agcaaggaggccttaccctagcaca

SEQ ID NO: 312924 - DNA, 25 bp, Artificial
  Probe
gccttaccctagcacatctcactat

SEQ ID NO: 312925 - DNA, 25 bp, Artificial
  Probe
ctatacctcctcagcaaggaggcct

SEQ ID NO: 312926 - DNA, 25 bp, Artificial
  Probe
tgcaccctcagtcctgctaacagtt

SEQ ID NO: 312927 - DNA, 25 bp, Artificial
  Probe
cttttccttcatcctctgcccagcc

SEQ ID NO: 312928 - DNA, 25 bp, Artificial
  Probe
ttttgagcctctccagctgatgacc

SEQ ID NO: 312929 - DNA, 25 bp, Artificial
  Probe
ttcccagctcatctccctatacctc

SEQ ID NO: 312930 - DNA, 25 bp, Artificial
  Probe
ccctgtcttttccttcatcctctgc

SEQ ID NO: 312931 - DNA, 25 bp, Artificial
  Probe
tcctcagcaaggaggccttacccta

SEQ ID NO: 312932 - DNA, 25 bp, Artificial
  Probe
ttgagcctctccagctgatgacctg

SEQ ID NO: 312933 - DNA, 25 bp, Artificial
  Probe
ccattcctgccctgtcttttccttc

SEQ ID NO: 312934 - DNA, 25 bp, Artificial
  Probe
cagtcctgctaacagttaagcccaa

SEQ ID NO: 312935 - DNA, 25 bp, Artificial
  Probe
cctcagtcctgctaacagttaagcc

SEQ ID NO: 312936 - DNA, 25 bp, Artificial
  Probe
ctagcacatctcactatgcctcctc

SEQ ID NO: 312937 - DNA, 25 bp, Artificial
  Probe
ttcgcccataaagcaagctccaatg

SEQ ID NO: 312938 - DNA, 25 bp, Artificial
  Probe
gcaccctcagtcctgctaacagtta

SEQ ID NO: 312939 - DNA, 25 bp, Artificial
  Probe
tacctcctcagcaaggaggccttac

SEQ ID NO: 312940 - DNA, 25 bp, Artificial
  Probe
agagtcacacacaggagtgcagtat

SEQ ID NO: 312941 - DNA, 25 bp, Artificial
  Probe
gagacccaagctagccttgagtaat

SEQ ID NO: 312942 - DNA, 25 bp, Artificial
  Probe
tttagtccattgtttatccagtgag

SEQ ID NO: 312943 - DNA, 25 bp, Artificial
  Probe
ccacagaacctgtcattcacaacgg

SEQ ID NO: 312944 - DNA, 25 bp, Artificial
  Probe
ccagggcacgggaacaaatgggtca

SEQ ID NO: 312945 - DNA, 25 bp, Artificial
  Probe
tcggcgttaagtacgcagaaaaaca

SEQ ID NO: 312946 - DNA, 25 bp, Artificial
  Probe
ggacaactcgaccatttctctacag

SEQ ID NO: 312947 - DNA, 25 bp, Artificial
  Probe
gcttgggcggcaagtgtatgacccc

SEQ ID NO: 312948 - DNA, 25 bp, Artificial
  Probe
gaagagacatctatgaccagaagct

SEQ ID NO: 312949 - DNA, 25 bp, Artificial
  Probe
acgcttcgatgaaggcaagctaaag

SEQ ID NO: 312950 - DNA, 25 bp, Artificial
  Probe
gaccatttctctacagatgggcacc

SEQ ID NO: 312951 - DNA, 25 bp, Artificial
  Probe
tgtaatcggtttacagatggggacc

SEQ ID NO: 312952 - DNA, 25 bp, Artificial
  Probe
aagttgcttcccagaaaggaatgag

SEQ ID NO: 312953 - DNA, 25 bp, Artificial
  Probe
tatgacagcctatgggactcggagg

SEQ ID NO: 312954 - DNA, 25 bp, Artificial
  Probe
gacatctatgaccagaagctaacat

SEQ ID NO: 312955 - DNA, 25 bp, Artificial
  Probe
taaaggctggccaaagtgtaatcgg

SEQ ID NO: 312956 - DNA, 25 bp, Artificial
  Probe
cattacagccggtggacaactcgac

SEQ ID NO: 312957 - DNA, 25 bp, Artificial
  Probe
agatgagtaccctcgagagtaccag

SEQ ID NO: 312958 - DNA, 25 bp, Artificial
  Probe
ctgtacctttaaagaatgccttacg

SEQ ID NO: 312959 - DNA, 25 bp, Artificial
  Probe
gtcggcaccgggtaccagaagagac

SEQ ID NO: 312960 - DNA, 25 bp, Artificial
  Probe
ctatgaccagaagctaacattacag

SEQ ID NO: 312961 - DNA, 25 bp, Artificial
  Probe
caacaaagttgcttcccagaaagga

SEQ ID NO: 312962 - DNA, 25 bp, Artificial
  Probe
ctggccaaagtgtaatcggtttaca

SEQ ID NO: 312963 - DNA, 25 bp, Artificial
  Probe
ttacagatggggaccaacaaatgtg

SEQ ID NO: 312964 - DNA, 25 bp, Artificial
  Probe
attcacaacggaagccagggcacgg

SEQ ID NO: 312965 - DNA, 25 bp, Artificial
  Probe
ccagaccaccatcagtctgcagatg

SEQ ID NO: 312966 - DNA, 25 bp, Artificial
  Probe
aaatgcagactgacaaaccctttga

SEQ ID NO: 312967 - DNA, 25 bp, Artificial
  Probe
acgaccagggcatcgattactagag

SEQ ID NO: 312968 - DNA, 25 bp, Artificial
  Probe
cagaaaaacagacacgacgcttcga

SEQ ID NO: 312969 - DNA, 25 bp, Artificial
  Probe
tggcgagtacccagatgagtaccct

SEQ ID NO: 312970 - DNA, 25 bp, Artificial
  Probe
cagacacgacgcttcgatgaaggca

SEQ ID NO: 312971 - DNA, 25 bp, Artificial
  Probe
agctaacattacagccggtggacaa

SEQ ID NO: 312972 - DNA, 25 bp, Artificial
  Probe
ctgtcattcacaacggaagccaggg

SEQ ID NO: 312973 - DNA, 25 bp, Artificial
  Probe
ttgacatcggcgttaagtacgcaga

SEQ ID NO: 312974 - DNA, 25 bp, Artificial
  Probe
caaccattgacatcggcgttaagta

SEQ ID NO: 312975 - DNA, 25 bp, Artificial
  Probe
caccgggtaccagaagagacatcta

SEQ ID NO: 312976 - DNA, 25 bp, Artificial
  Probe
ggactcggaggcatctttatgatcc

SEQ ID NO: 312977 - DNA, 25 bp, Artificial
  Probe
gatcccaaaatgcagactgacaaac

SEQ ID NO: 312978 - DNA, 25 bp, Artificial
  Probe
caagctaaaggctggccaaagtgta

SEQ ID NO: 312979 - DNA, 25 bp, Artificial
  Probe
ctttgaccagaccaccatcagtctg

SEQ ID NO: 312980 - DNA, 25 bp, Artificial
  Probe
cattcacaacggaagccagggcacg

SEQ ID NO: 312981 - DNA, 25 bp, Artificial
  Probe
agttgcttcccagaaaggaatgagc

SEQ ID NO: 312982 - DNA, 25 bp, Artificial
  Probe
tatgggactcggaggcatctttatg

SEQ ID NO: 312983 - DNA, 25 bp, Artificial
  Probe
ggcaccaacaaagttgcttcccaga

SEQ ID NO: 312984 - DNA, 25 bp, Artificial
  Probe
gtaatcggtttacagatggggacca

SEQ ID NO: 312985 - DNA, 25 bp, Artificial
  Probe
gcagactgacaaaccctttgaccag

SEQ ID NO: 312986 - DNA, 25 bp, Artificial
  Probe
gatgcgtggtcttctggccaagcgt

SEQ ID NO: 312987 - DNA, 25 bp, Artificial
  Probe
tccatagaagttcactgctgacctg

SEQ ID NO: 312988 - DNA, 25 bp, Artificial
  Probe
aattctttggattgtgctccataga

SEQ ID NO: 312989 - DNA, 25 bp, Artificial
  Probe
gtcttctggccaagcgtctgcgggt

SEQ ID NO: 312990 - DNA, 25 bp, Artificial
  Probe
agcgtctgcgggttcatattgttgg

SEQ ID NO: 312991 - DNA, 25 bp, Artificial
  Probe
atgcgtggtcttctggccaagcgtc

SEQ ID NO: 312992 - DNA, 25 bp, Artificial
  Probe
ctttggattgtgctccatagaagtt

SEQ ID NO: 312993 - DNA, 25 bp, Artificial
  Probe
acaggaattatgactccatgaaaga

SEQ ID NO: 312994 - DNA, 25 bp, Artificial
  Probe
tctttggattgtgctccatagaagt

SEQ ID NO: 312995 - DNA, 25 bp, Artificial
  Probe
agaattctttggattgtgctccata

SEQ ID NO: 312996 - DNA, 25 bp, Artificial
  Probe
gccgaaaccacagatgcgtggtctt

SEQ ID NO: 312997 - DNA, 25 bp, Artificial
  Probe
tgtgctccatagaagttcactgctg

SEQ ID NO: 312998 - DNA, 25 bp, Artificial
  Probe
gaattctttggattgtgctccatag

SEQ ID NO: 312999 - DNA, 25 bp, Artificial
  Probe
aaggcttatgcagatttctacagga

SEQ ID NO: 313000 - DNA, 25 bp, Artificial
  Probe
gaagttcactgctgacctgtgttcc

SEQ ID NO: 313001 - DNA, 25 bp, Artificial
  Probe
cactgctgacctgtgttcctgaact

SEQ ID NO: 313002 - DNA, 25 bp, Artificial
  Probe
tgacctgtgttcctgaactatgaaa

SEQ ID NO: 313003 - DNA, 25 bp, Artificial
  Probe
gacctgtgttcctgaactatgaaac

SEQ ID NO: 313004 - DNA, 25 bp, Artificial
  Probe
ggcttatgcagatttctacaggaat

SEQ ID NO: 313005 - DNA, 25 bp, Artificial
  Probe
ctgttgccgaaaccacagatgcgtg

SEQ ID NO: 313006 - DNA, 25 bp, Artificial
  Probe
agaagttcactgctgacctgtgttc

SEQ ID NO: 313007 - DNA, 25 bp, Artificial
  Probe
cttatgcagatttctacaggaatta

SEQ ID NO: 313008 - DNA, 25 bp, Artificial
  Probe
gctccatagaagttcactgctgacc

SEQ ID NO: 313009 - DNA, 25 bp, Artificial
  Probe
tgcgggttcatattgttggcgcatt

SEQ ID NO: 313010 - DNA, 25 bp, Artificial
  Probe
ctctgttgccgaaaccacagatgcg

SEQ ID NO: 313011 - DNA, 25 bp, Artificial
  Probe
tgctgacctgtgttcctgaactatg

SEQ ID NO: 313012 - DNA, 25 bp, Artificial
  Probe
accacagatgcgtggtcttctggcc

SEQ ID NO: 313013 - DNA, 25 bp, Artificial
  Probe
tctgcgggttcatattgttggcgca

SEQ ID NO: 313014 - DNA, 25 bp, Artificial
  Probe
ctggccaagcgtctgcgggttcata

SEQ ID NO: 313015 - DNA, 25 bp, Artificial
  Probe
tccggtgctctgttgccgaaaccac

SEQ ID NO: 313016 - DNA, 25 bp, Artificial
  Probe
tctggccaagcgtctgcgggttcat

SEQ ID NO: 313017 - DNA, 25 bp, Artificial
  Probe
ttcactgctgacctgtgttcctgaa

SEQ ID NO: 313018 - DNA, 25 bp, Artificial
  Probe
tagaagttcactgctgacctgtgtt

SEQ ID NO: 313019 - DNA, 25 bp, Artificial
  Probe
cagatttctacaggaattatgactc

SEQ ID NO: 313020 - DNA, 25 bp, Artificial
  Probe
gattgtgctccatagaagttcactg

SEQ ID NO: 313021 - DNA, 25 bp, Artificial
  Probe
ccggtgctctgttgccgaaaccaca

SEQ ID NO: 313022 - DNA, 25 bp, Artificial
  Probe
cgggttcatattgttggcgcattcg

SEQ ID NO: 313023 - DNA, 25 bp, Artificial
  Probe
ccacagatgcgtggtcttctggcca

SEQ ID NO: 313024 - DNA, 25 bp, Artificial
  Probe
gttccggtgctctgttgccgaaacc

SEQ ID NO: 313025 - DNA, 25 bp, Artificial
  Probe
ggattgtgctccatagaagttcact

SEQ ID NO: 313026 - DNA, 25 bp, Artificial
  Probe
tgcgtggtcttctggccaagcgtct

SEQ ID NO: 313027 - DNA, 25 bp, Artificial
  Probe
agatttctacaggaattatgactcc

SEQ ID NO: 313028 - DNA, 25 bp, Artificial
  Probe
tgtgttcctgaactatgaaacgtga

SEQ ID NO: 313029 - DNA, 25 bp, Artificial
  Probe
gatttctacaggaattatgactcca

SEQ ID NO: 313030 - DNA, 25 bp, Artificial
  Probe
tggccaagcgtctgcgggttcatat

SEQ ID NO: 313031 - DNA, 25 bp, Artificial
  Probe
gtgttcctgaactatgaaacgtgaa

SEQ ID NO: 313032 - DNA, 25 bp, Artificial
  Probe
actctgcagaatacacagggggtat

SEQ ID NO: 313033 - DNA, 25 bp, Artificial
  Probe
agaatctgagttttacttgaaactc

SEQ ID NO: 313034 - DNA, 25 bp, Artificial
  Probe
gcgataaacttgaccacaccagaat

SEQ ID NO: 313035 - DNA, 25 bp, Artificial
  Probe
gggatggcaccattgctccttacaa

SEQ ID NO: 313036 - DNA, 25 bp, Artificial
  Probe
tgaccacaccagaatctgagtttta

SEQ ID NO: 313037 - DNA, 25 bp, Artificial
  Probe
gtcaaaaccctcaagaaggtggctc

SEQ ID NO: 313038 - DNA, 25 bp, Artificial
  Probe
tgaaactctgcagaatacacagggg

SEQ ID NO: 313039 - DNA, 25 bp, Artificial
  Probe
agtcaaaaccctcaagaaggtggct

SEQ ID NO: 313040 - DNA, 25 bp, Artificial
  Probe
acaccagaatctgagttttacttga

SEQ ID NO: 313041 - DNA, 25 bp, Artificial
  Probe
acttgaccacaccagaatctgagtt

SEQ ID NO: 313042 - DNA, 25 bp, Artificial
  Probe
ctctgcagaatacacagggggtatg

SEQ ID NO: 313043 - DNA, 25 bp, Artificial
  Probe
caagctaaccctagatgcggcagct

SEQ ID NO: 313044 - DNA, 25 bp, Artificial
  Probe
cacaccagaatctgagttttacttg

SEQ ID NO: 313045 - DNA, 25 bp, Artificial
  Probe
aaacttgaccacaccagaatctgag

SEQ ID NO: 313046 - DNA, 25 bp, Artificial
  Probe
aatctgagttttacttgaaactctg

SEQ ID NO: 313047 - DNA, 25 bp, Artificial
  Probe
aaactctgcagaatacacagggggt

SEQ ID NO: 313048 - DNA, 25 bp, Artificial
  Probe
acaagctaaccctagatgcggcagc

SEQ ID NO: 313049 - DNA, 25 bp, Artificial
  Probe
gagtcaaaaccctcaagaaggtggc

SEQ ID NO: 313050 - DNA, 25 bp, Artificial
  Probe
caccagaatctgagttttacttgaa

SEQ ID NO: 313051 - DNA, 25 bp, Artificial
  Probe
ggatggcaccattgctccttacaag

SEQ ID NO: 313052 - DNA, 25 bp, Artificial
  Probe
cttgaccacaccagaatctgagttt

SEQ ID NO: 313053 - DNA, 25 bp, Artificial
  Probe
gagttttacttgaaactctgcagaa

SEQ ID NO: 313054 - DNA, 25 bp, Artificial
  Probe
tcaaaaccctcaagaaggtggctcc

SEQ ID NO: 313055 - DNA, 25 bp, Artificial
  Probe
cagaatctgagttttacttgaaact

SEQ ID NO: 313056 - DNA, 25 bp, Artificial
  Probe
tggcaccattgctccttacaagcta

SEQ ID NO: 313057 - DNA, 25 bp, Artificial
  Probe
acatccccgtgtctgattcggctct

SEQ ID NO: 313058 - DNA, 25 bp, Artificial
  Probe
ggcaccattgctccttacaagctaa

SEQ ID NO: 313059 - DNA, 25 bp, Artificial
  Probe
ttgaaactctgcagaatacacaggg

SEQ ID NO: 313060 - DNA, 25 bp, Artificial
  Probe
ccctcaagaaggtggctccggggat

SEQ ID NO: 313061 - DNA, 25 bp, Artificial
  Probe
agttttacttgaaactctgcagaat

SEQ ID NO: 313062 - DNA, 25 bp, Artificial
  Probe
cttgaaactctgcagaatacacagg

SEQ ID NO: 313063 - DNA, 25 bp, Artificial
  Probe
gaccacaccagaatctgagttttac

SEQ ID NO: 313064 - DNA, 25 bp, Artificial
  Probe
tccttacaagctaaccctagatgcg

SEQ ID NO: 313065 - DNA, 25 bp, Artificial
  Probe
cccgtgtctgattcggctctcctta

SEQ ID NO: 313066 - DNA, 25 bp, Artificial
  Probe
gctccttacaagctaaccctagatg

SEQ ID NO: 313067 - DNA, 25 bp, Artificial
  Probe
aactctgcagaatacacagggggta

SEQ ID NO: 313068 - DNA, 25 bp, Artificial
  Probe
tctgcagaatacacagggggtatga

SEQ ID NO: 313069 - DNA, 25 bp, Artificial
  Probe
gttttacttgaaactctgcagaata

SEQ ID NO: 313070 - DNA, 25 bp, Artificial
  Probe
ctgcagaatacacagggggtatgaa

SEQ ID NO: 313071 - DNA, 25 bp, Artificial
  Probe
ccttacaagctaaccctagatgcgg

SEQ ID NO: 313072 - DNA, 25 bp, Artificial
  Probe
gatggcaccattgctccttacaagc

SEQ ID NO: 313073 - DNA, 25 bp, Artificial
  Probe
atttggagtcaaaaccctcaagaag

SEQ ID NO: 313074 - DNA, 25 bp, Artificial
  Probe
tacatccccgtgtctgattcggctc

SEQ ID NO: 313075 - DNA, 25 bp, Artificial
  Probe
tttggagtcaaaaccctcaagaagg

SEQ ID NO: 313076 - DNA, 25 bp, Artificial
  Probe
acttgaaactctgcagaatacacag

SEQ ID NO: 313077 - DNA, 25 bp, Artificial
  Probe
aacttgaccacaccagaatctgagt

SEQ ID NO: 313078 - DNA, 25 bp, Artificial
  Probe
tggatcctatgttccctggaacata

SEQ ID NO: 313079 - DNA, 25 bp, Artificial
  Probe
ggctcaacaactacagaacgcacct

SEQ ID NO: 313080 - DNA, 25 bp, Artificial
  Probe
gtctctctgctctaagatgctaaat

SEQ ID NO: 313081 - DNA, 25 bp, Artificial
  Probe
tcatctaagggtctgggagagtctg

SEQ ID NO: 313082 - DNA, 25 bp, Artificial
  Probe
tctcttgaggatactccagatacac

SEQ ID NO: 313083 - DNA, 25 bp, Artificial
  Probe
tatgttccctggaacatacctgtgt

SEQ ID NO: 313084 - DNA, 25 bp, Artificial
  Probe
ctggaacatacctgtgtgagtgaaa

SEQ ID NO: 313085 - DNA, 25 bp, Artificial
  Probe
tccacagcactgctttactgattcg

SEQ ID NO: 313086 - DNA, 25 bp, Artificial
  Probe
caaacaccctgtattcatctaaggg

SEQ ID NO: 313087 - DNA, 25 bp, Artificial
  Probe
ccagagtttcacagcccagaatcat

SEQ ID NO: 313088 - DNA, 25 bp, Artificial
  Probe
tctgctctaagatgctaaatatgaa

SEQ ID NO: 313089 - DNA, 25 bp, Artificial
  Probe
ctgtattcatctaagggtctgggag

SEQ ID NO: 313090 - DNA, 25 bp, Artificial
  Probe
tgaggatactccagatacacctgag

SEQ ID NO: 313091 - DNA, 25 bp, Artificial
  Probe
ggattggctcaacaactacagaacg

SEQ ID NO: 313092 - DNA, 25 bp, Artificial
  Probe
gactccagagaaaatcagaatggct

SEQ ID NO: 313093 - DNA, 25 bp, Artificial
  Probe
actagtcctctgactccagagaaaa

SEQ ID NO: 313094 - DNA, 25 bp, Artificial
  Probe
aagctcactagtcctctgactccag

SEQ ID NO: 313095 - DNA, 25 bp, Artificial
  Probe
caccctgtattcatctaagggtctg

SEQ ID NO: 313096 - DNA, 25 bp, Artificial
  Probe
ctgctctaagatgctaaatatgaaa

SEQ ID NO: 313097 - DNA, 25 bp, Artificial
  Probe
ctctggaccatggaagctcactagt

SEQ ID NO: 313098 - DNA, 25 bp, Artificial
  Probe
ctcactagtcctctgactccagaga

SEQ ID NO: 313099 - DNA, 25 bp, Artificial
  Probe
agagatgaacctggatcctatgttc

SEQ ID NO: 313100 - DNA, 25 bp, Artificial
  Probe
ccacagcactgctttactgattcgg

SEQ ID NO: 313101 - DNA, 25 bp, Artificial
  Probe
agagaggcatctctggaccatggaa

SEQ ID NO: 313102 - DNA, 25 bp, Artificial
  Probe
tctctgctctaagatgctaaatatg

SEQ ID NO: 313103 - DNA, 25 bp, Artificial
  Probe
tggaagctcactagtcctctgactc

SEQ ID NO: 313104 - DNA, 25 bp, Artificial
  Probe
gagatgaacctggatcctatgttcc

SEQ ID NO: 313105 - DNA, 25 bp, Artificial
  Probe
ggtctctctgctctaagatgctaaa

SEQ ID NO: 313106 - DNA, 25 bp, Artificial
  Probe
tctgactccagagaaaatcagaatg

SEQ ID NO: 313107 - DNA, 25 bp, Artificial
  Probe
ctggatcctatgttccctggaacat

SEQ ID NO: 313108 - DNA, 25 bp, Artificial
  Probe
ttactgattcggaagtttctcttga

SEQ ID NO: 313109 - DNA, 25 bp, Artificial
  Probe
aacaccctgtattcatctaagggtc

SEQ ID NO: 313110 - DNA, 25 bp, Artificial
  Probe
ttcatctaagggtctgggagagtct

SEQ ID NO: 313111 - DNA, 25 bp, Artificial
  Probe
aaggattggctcaacaactacagaa

SEQ ID NO: 313112 - DNA, 25 bp, Artificial
  Probe
atgaaagccagagtttcacagccca

SEQ ID NO: 313113 - DNA, 25 bp, Artificial
  Probe
tgctttactgattcggaagtttctc

SEQ ID NO: 313114 - DNA, 25 bp, Artificial
  Probe
ctgattcggaagtttctcttgagga

SEQ ID NO: 313115 - DNA, 25 bp, Artificial
  Probe
tatgaacttctgaaaggattggctc

SEQ ID NO: 313116 - DNA, 25 bp, Artificial
  Probe
attccaagagatgaacctggatcct

SEQ ID NO: 313117 - DNA, 25 bp, Artificial
  Probe
attcggaagtttctcttgaggatac

SEQ ID NO: 313118 - DNA, 25 bp, Artificial
  Probe
tcttgaggatactccagatacacct

SEQ ID NO: 313119 - DNA, 25 bp, Artificial
  Probe
ggaagtttctcttgaggatactcca

SEQ ID NO: 313120 - DNA, 25 bp, Artificial
  Probe
ctcccggtctctctgctctaagatg

SEQ ID NO: 313121 - DNA, 25 bp, Artificial
  Probe
cttctgaaaggattggctcaacaac

SEQ ID NO: 313122 - DNA, 25 bp, Artificial
  Probe
ttccaagagatgaacctggatccta

SEQ ID NO: 313123 - DNA, 25 bp, Artificial
  Probe
cccggtctctctgctctaagatgct

SEQ ID NO: 313124 - DNA, 25 bp, Artificial
  Probe
ttgctacacctaaaagacaataaag

SEQ ID NO: 313125 - DNA, 25 bp, Artificial
  Probe
gatttcctcagtgtaaccgaaatat

SEQ ID NO: 313126 - DNA, 25 bp, Artificial
  Probe
tcctcacccatgatttcctcagtgt

SEQ ID NO: 313127 - DNA, 25 bp, Artificial
  Probe
ccatgatttcctcagtgtaaccgaa

SEQ ID NO: 313128 - DNA, 25 bp, Artificial
  Probe
acacctaaaagacaataaagattct

SEQ ID NO: 313129 - DNA, 25 bp, Artificial
  Probe
tcctcagtgtaaccgaaatattttg

SEQ ID NO: 313130 - DNA, 25 bp, Artificial
  Probe
atttcctcagtgtaaccgaaatatt

SEQ ID NO: 313131 - DNA, 25 bp, Artificial
  Probe
tttgttttgctacacctaaaagaca

SEQ ID NO: 313132 - DNA, 25 bp, Artificial
  Probe
tttgctacacctaaaagacaataaa

SEQ ID NO: 313133 - DNA, 25 bp, Artificial
  Probe
cctcagtgtaaccgaaatattttgt

SEQ ID NO: 313134 - DNA, 25 bp, Artificial
  Probe
tacacctaaaagacaataaagattc

SEQ ID NO: 313135 - DNA, 25 bp, Artificial
  Probe
ctacacctaaaagacaataaagatt

SEQ ID NO: 313136 - DNA, 25 bp, Artificial
  Probe
ttcctcacccatgatttcctcagtg

SEQ ID NO: 313137 - DNA, 25 bp, Artificial
  Probe
cacccatgatttcctcagtgtaacc

SEQ ID NO: 313138 - DNA, 25 bp, Artificial
  Probe
tattttgttttgctacacctaaaag

SEQ ID NO: 313139 - DNA, 25 bp, Artificial
  Probe
cctcacccatgatttcctcagtgta

SEQ ID NO: 313140 - DNA, 25 bp, Artificial
  Probe
ttcctcagtgtaaccgaaatatttt

SEQ ID NO: 313141 - DNA, 25 bp, Artificial
  Probe
tttcctcagtgtaaccgaaatattt

SEQ ID NO: 313142 - DNA, 25 bp, Artificial
  Probe
gctacacctaaaagacaataaagat

SEQ ID NO: 313143 - DNA, 25 bp, Artificial
  Probe
ctcacccatgatttcctcagtgtaa

SEQ ID NO: 313144 - DNA, 25 bp, Artificial
  Probe
tgctacacctaaaagacaataaaga

SEQ ID NO: 313145 - DNA, 25 bp, Artificial
  Probe
acccatgatttcctcagtgtaaccg

SEQ ID NO: 313146 - DNA, 25 bp, Artificial
  Probe
cccatgatttcctcagtgtaaccga

SEQ ID NO: 313147 - DNA, 25 bp, Artificial
  Probe
tgttttgctacacctaaaagacaat

SEQ ID NO: 313148 - DNA, 25 bp, Artificial
  Probe
ttgttttgctacacctaaaagacaa

SEQ ID NO: 313149 - DNA, 25 bp, Artificial
  Probe
atgatttcctcagtgtaaccgaaat

SEQ ID NO: 313150 - DNA, 25 bp, Artificial
  Probe
ttttgctacacctaaaagacaataa

SEQ ID NO: 313151 - DNA, 25 bp, Artificial
  Probe
gttttgctacacctaaaagacaata

SEQ ID NO: 313152 - DNA, 25 bp, Artificial
  Probe
tcacccatgatttcctcagtgtaac

SEQ ID NO: 313153 - DNA, 25 bp, Artificial
  Probe
tgatttcctcagtgtaaccgaaata

SEQ ID NO: 313154 - DNA, 25 bp, Artificial
  Probe
catgatttcctcagtgtaaccgaaa

SEQ ID NO: 313155 - DNA, 25 bp, Artificial
  Probe
ttttgcgcaaataccccaagaggag

SEQ ID NO: 313156 - DNA, 25 bp, Artificial
  Probe
ttttctcaccctgactgcctctggg

SEQ ID NO: 313157 - DNA, 25 bp, Artificial
  Probe
gtggtgactcggtcccaggagaacc

SEQ ID NO: 313158 - DNA, 25 bp, Artificial
  Probe
tggtcttttctcaccctgactgcct

SEQ ID NO: 313159 - DNA, 25 bp, Artificial
  Probe
accagaaacgctatggtggttttct

SEQ ID NO: 313160 - DNA, 25 bp, Artificial
  Probe
tgatgaagccgcacaggctggcacg

SEQ ID NO: 313161 - DNA, 25 bp, Artificial
  Probe
ctgcctctgggctccatggcaagga

SEQ ID NO: 313162 - DNA, 25 bp, Artificial
  Probe
atggtggttttctgcggcgtcagtt

SEQ ID NO: 313163 - DNA, 25 bp, Artificial
  Probe
ctctgggctccatggcaaggatgac

SEQ ID NO: 313164 - DNA, 25 bp, Artificial
  Probe
ccatggcaaggatgacttggagaat

SEQ ID NO: 313165 - DNA, 25 bp, Artificial
  Probe
aggtagggcatgaggacctgtacaa

SEQ ID NO: 313166 - DNA, 25 bp, Artificial
  Probe
aggctacacggcactgaccaagctc

SEQ ID NO: 313167 - DNA, 25 bp, Artificial
  Probe
ttttctgcggcgtcagttcaaggtg

SEQ ID NO: 313168 - DNA, 25 bp, Artificial
  Probe
aggttgctttggaagaaggctacac

SEQ ID NO: 313169 - DNA, 25 bp, Artificial
  Probe
gggcttttggtcttttctcaccctg

SEQ ID NO: 313170 - DNA, 25 bp, Artificial
  Probe
aaaggccaactccttaccagcgtct

SEQ ID NO: 313171 - DNA, 25 bp, Artificial
  Probe
ggcatgaggacctgtacaaacgcta

SEQ ID NO: 313172 - DNA, 25 bp, Artificial
  Probe
cccaagaggagctccgagatgactg

SEQ ID NO: 313173 - DNA, 25 bp, Artificial
  Probe
tcaacgaggaggacttgagaaaaca

SEQ ID NO: 313174 - DNA, 25 bp, Artificial
  Probe
actgacctgatgaatgatgaagccg

SEQ ID NO: 313175 - DNA, 25 bp, Artificial
  Probe
agcttaagtgggacaaccagaaacg

SEQ ID NO: 313176 - DNA, 25 bp, Artificial
  Probe
aaagctcaggggtctctccagcagg

SEQ ID NO: 313177 - DNA, 25 bp, Artificial
  Probe
tgggacaaccagaaacgctatggtg

SEQ ID NO: 313178 - DNA, 25 bp, Artificial
  Probe
tgccggggcttttggtcttttctca

SEQ ID NO: 313179 - DNA, 25 bp, Artificial
  Probe
tccttaccagcgtctcagaggaaaa

SEQ ID NO: 313180 - DNA, 25 bp, Artificial
  Probe
ctatgggggcttcctgcggcgcatt

SEQ ID NO: 313181 - DNA, 25 bp, Artificial
  Probe
gagaaccccaatacctattccgaag

SEQ ID NO: 313182 - DNA, 25 bp, Artificial
  Probe
gcattcgccccaagcttaagtggga

SEQ ID NO: 313183 - DNA, 25 bp, Artificial
  Probe
ggccaaacgctatggcggctttttg

SEQ ID NO: 313184 - DNA, 25 bp, Artificial
  Probe
agcgtctcagaggaaaagctcaggg

SEQ ID NO: 313185 - DNA, 25 bp, Artificial
  Probe
gactcggtcccaggagaaccccaat

SEQ ID NO: 313186 - DNA, 25 bp, Artificial
  Probe
tatgggggcttcctgcggcgcattc

SEQ ID NO: 313187 - DNA, 25 bp, Artificial
  Probe
acggcactgaccaagctcttggagc

SEQ ID NO: 313188 - DNA, 25 bp, Artificial
  Probe
atgaagccgcacaggctggcacgct

SEQ ID NO: 313189 - DNA, 25 bp, Artificial
  Probe
taccccaagaggagctccgagatga

SEQ ID NO: 313190 - DNA, 25 bp, Artificial
  Probe
atcaggtagggcatgaggacctgta

SEQ ID NO: 313191 - DNA, 25 bp, Artificial
  Probe
gcacaggctggcacgctccatttca

SEQ ID NO: 313192 - DNA, 25 bp, Artificial
  Probe
atacctattccgaagatttagatgt

SEQ ID NO: 313193 - DNA, 25 bp, Artificial
  Probe
aatctgagctactgggcactgacct

SEQ ID NO: 313194 - DNA, 25 bp, Artificial
  Probe
tggagaaaggccaactccttaccag

SEQ ID NO: 313195 - DNA, 25 bp, Artificial
  Probe
gaggacctgtacaaacgctatgggg

SEQ ID NO: 313196 - DNA, 25 bp, Artificial
  Probe
cgctatggcggctttttgcgcaaat

SEQ ID NO: 313197 - DNA, 25 bp, Artificial
  Probe
cggcgtcagttcaaggtggtgactc

SEQ ID NO: 313198 - DNA, 25 bp, Artificial
  Probe
gcaggtttggcaacggaagagaatc

SEQ ID NO: 313199 - DNA, 25 bp, Artificial
  Probe
gagaatctgagctactgggcactga

SEQ ID NO: 313200 - DNA, 25 bp, Artificial
  Probe
caggagaaccccaatacctattccg

SEQ ID NO: 313201 - DNA, 25 bp, Artificial
  Probe
cttgacattccgtgtacccatagct

SEQ ID NO: 313202 - DNA, 25 bp, Artificial
  Probe
aaatgtacagctttctgcttccttg

SEQ ID NO: 313203 - DNA, 25 bp, Artificial
  Probe
cttcatagtatgacccaaatcggga

SEQ ID NO: 313204 - DNA, 25 bp, Artificial
  Probe
taccagttttttggatgattcttca

SEQ ID NO: 313205 - DNA, 25 bp, Artificial
  Probe
tgagaaagaccttccagcaccacac

SEQ ID NO: 313206 - DNA, 25 bp, Artificial
  Probe
tgtcttctgaggaaattcaaaacct

SEQ ID NO: 313207 - DNA, 25 bp, Artificial
  Probe
aggccttcagtctcacagtatcacc

SEQ ID NO: 313208 - DNA, 25 bp, Artificial
  Probe
gagagaaccaagaacagccaggcct

SEQ ID NO: 313209 - DNA, 25 bp, Artificial
  Probe
gttgagaaagaccttccagcaccac

SEQ ID NO: 313210 - DNA, 25 bp, Artificial
  Probe
ttagtcagtactgtgtggacagggc

SEQ ID NO: 313211 - DNA, 25 bp, Artificial
  Probe
ttcgtcctcagacacgcctcaagaa

SEQ ID NO: 313212 - DNA, 25 bp, Artificial
  Probe
ggacactacagtagagagaaccaag

SEQ ID NO: 313213 - DNA, 25 bp, Artificial
  Probe
ttaccagtattctgcctaatgtttg

SEQ ID NO: 313214 - DNA, 25 bp, Artificial
  Probe
tgttcataccacatgtgtgactaaa

SEQ ID NO: 313215 - DNA, 25 bp, Artificial
  Probe
gagctgtgacacgtaacattcttct

SEQ ID NO: 313216 - DNA, 25 bp, Artificial
  Probe
aatatctgcagtgtcttctgaggaa

SEQ ID NO: 313217 - DNA, 25 bp, Artificial
  Probe
atgttctgtggatgcggcctcttgc

SEQ ID NO: 313218 - DNA, 25 bp, Artificial
  Probe
acagctttctgcttccttgggtggt

SEQ ID NO: 313219 - DNA, 25 bp, Artificial
  Probe
gtatttgtgatttcccccattgcac

SEQ ID NO: 313220 - DNA, 25 bp, Artificial
  Probe
tgtctgtgcctgtgacagaccctcc

SEQ ID NO: 313221 - DNA, 25 bp, Artificial
  Probe
ccagccctgacagtgctttgtctgt

SEQ ID NO: 313222 - DNA, 25 bp, Artificial
  Probe
tcttgggaagcctttattagtcagt

SEQ ID NO: 313223 - DNA, 25 bp, Artificial
  Probe
tgtatcatataaacggccataccag

SEQ ID NO: 313224 - DNA, 25 bp, Artificial
  Probe
caccacaaaaaggtcccgtgttcat

SEQ ID NO: 313225 - DNA, 25 bp, Artificial
  Probe
acccccagttactgatgtgctagat

SEQ ID NO: 313226 - DNA, 25 bp, Artificial
  Probe
aagacttagaacacagggaagttgc

SEQ ID NO: 313227 - DNA, 25 bp, Artificial
  Probe
ctccagtggactcatccagcttcgt

SEQ ID NO: 313228 - DNA, 25 bp, Artificial
  Probe
ggactcatccagcttcgtcctcaga

SEQ ID NO: 313229 - DNA, 25 bp, Artificial
  Probe
aacttctttggctgataattgggct

SEQ ID NO: 313230 - DNA, 25 bp, Artificial
  Probe
cacatggtgagagctgtgctttaaa

SEQ ID NO: 313231 - DNA, 25 bp, Artificial
  Probe
tgcttccttgggtggttttcttggg

SEQ ID NO: 313232 - DNA, 25 bp, Artificial
  Probe
gcattgagcacatggtgagagctgt

SEQ ID NO: 313233 - DNA, 25 bp, Artificial
  Probe
aagtatttgtgatttcccccattgc

SEQ ID NO: 313234 - DNA, 25 bp, Artificial
  Probe
tataaacggccataccagttttttg

SEQ ID NO: 313235 - DNA, 25 bp, Artificial
  Probe
ccatctgctgaaatatgaaaagaat

SEQ ID NO: 313236 - DNA, 25 bp, Artificial
  Probe
gcaacgtgttcctgattagctccat

SEQ ID NO: 313237 - DNA, 25 bp, Artificial
  Probe
tgattcttcaatgttctgtggatgc

SEQ ID NO: 313238 - DNA, 25 bp, Artificial
  Probe
gttaccactcaaaagttcatgaccg

SEQ ID NO: 313239 - DNA, 25 bp, Artificial
  Probe
tgaggagcattcctagccttggggt

SEQ ID NO: 313240 - DNA, 25 bp, Artificial
  Probe
tctggtagctcttcgctctgttttc

SEQ ID NO: 313241 - DNA, 25 bp, Artificial
  Probe
tccctccaggtctcagcacagttgt

SEQ ID NO: 313242 - DNA, 25 bp, Artificial
  Probe
tattatagcaacgtgttcctgatta

SEQ ID NO: 313243 - DNA, 25 bp, Artificial
  Probe
gctgtgacacgtaacattcttctca

SEQ ID NO: 313244 - DNA, 25 bp, Artificial
  Probe
aaacgtgcagttaatactcggcgct

SEQ ID NO: 313245 - DNA, 25 bp, Artificial
  Probe
gatgcggcctcttgcctgaggagca

SEQ ID NO: 313246 - DNA, 25 bp, Artificial
  Probe
cacacctgtggttgtgaaaatagta

SEQ ID NO: 313247 - DNA, 25 bp, Artificial
  Probe
tcaatgaccctgaaatgttaatagc

SEQ ID NO: 313248 - DNA, 25 bp, Artificial
  Probe
caatgaccctgaaatgttaatagca

SEQ ID NO: 313249 - DNA, 25 bp, Artificial
  Probe
tgaccctgaaatgttaatagcatgg

SEQ ID NO: 313250 - DNA, 25 bp, Artificial
  Probe
aatgaccctgaaatgttaatagcat

SEQ ID NO: 313251 - DNA, 25 bp, Artificial
  Probe
ttgttttcaatgaccctgaaatgtt

SEQ ID NO: 313252 - DNA, 25 bp, Artificial
  Probe
tcttttgcactgatgtgtcgaacct

SEQ ID NO: 313253 - DNA, 25 bp, Artificial
  Probe
atcttttgcactgatgtgtcgaacc

SEQ ID NO: 313254 - DNA, 25 bp, Artificial
  Probe
ataccttttggtttgacactgtatt

SEQ ID NO: 313255 - DNA, 25 bp, Artificial
  Probe
cacattgatttcatgactgatgata

SEQ ID NO: 313256 - DNA, 25 bp, Artificial
  Probe
atgaccctgaaatgttaatagcatg

SEQ ID NO: 313257 - DNA, 25 bp, Artificial
  Probe
cttttgcactgatgtgtcgaacctt

SEQ ID NO: 313258 - DNA, 25 bp, Artificial
  Probe
gttataccttttggtttgacactgt

SEQ ID NO: 313259 - DNA, 25 bp, Artificial
  Probe
ttataccttttggtttgacactgta

SEQ ID NO: 313260 - DNA, 25 bp, Artificial
  Probe
atgcaactctagttataccttttgg

SEQ ID NO: 313261 - DNA, 25 bp, Artificial
  Probe
ttggtttgacactgtattttcacat

SEQ ID NO: 313262 - DNA, 25 bp, Artificial
  Probe
tttgcactgatgtgtcgaaccttat

SEQ ID NO: 313263 - DNA, 25 bp, Artificial
  Probe
tgcaactctagttataccttttggt

SEQ ID NO: 313264 - DNA, 25 bp, Artificial
  Probe
gcaactctagttataccttttggtt

SEQ ID NO: 313265 - DNA, 25 bp, Artificial
  Probe
tctagttataccttttggtttgaca

SEQ ID NO: 313266 - DNA, 25 bp, Artificial
  Probe
tagttataccttttggtttgacact

SEQ ID NO: 313267 - DNA, 25 bp, Artificial
  Probe
tttcacattgatttcatgactgatg

SEQ ID NO: 313268 - DNA, 25 bp, Artificial
  Probe
agttataccttttggtttgacactg

SEQ ID NO: 313269 - DNA, 25 bp, Artificial
  Probe
ttgcactgatgtgtcgaaccttatt

SEQ ID NO: 313270 - DNA, 25 bp, Artificial
  Probe
tttggtttgacactgtattttcaca

SEQ ID NO: 313271 - DNA, 25 bp, Artificial
  Probe
tggtttgacactgtattttcacatt

SEQ ID NO: 313272 - DNA, 25 bp, Artificial
  Probe
ttcaatgaccctgaaatgttaatag

SEQ ID NO: 313273 - DNA, 25 bp, Artificial
  Probe
gtttgacactgtattttcacattga

SEQ ID NO: 313274 - DNA, 25 bp, Artificial
  Probe
ttttgcactgatgtgtcgaacctta

SEQ ID NO: 313275 - DNA, 25 bp, Artificial
  Probe
ggtttgacactgtattttcacattg

SEQ ID NO: 313276 - DNA, 25 bp, Artificial
  Probe
gtgatattctatgcaactctagtta

SEQ ID NO: 313277 - DNA, 25 bp, Artificial
  Probe
tataccttttggtttgacactgtat

SEQ ID NO: 313278 - DNA, 25 bp, Artificial
  Probe
agaatctcatgaccacccttccagg

SEQ ID NO: 313279 - DNA, 25 bp, Artificial
  Probe
cagctagctatccagcgtctgcagg

SEQ ID NO: 313280 - DNA, 25 bp, Artificial
  Probe
gcaatgagacccagctcatctcctt

SEQ ID NO: 313281 - DNA, 25 bp, Artificial
  Probe
caaccccaggctaccagaatgtggc

SEQ ID NO: 313282 - DNA, 25 bp, Artificial
  Probe
ccttccaggccaggatgcgtctctg

SEQ ID NO: 313283 - DNA, 25 bp, Artificial
  Probe
agtatctggaggtgcagagacagct

SEQ ID NO: 313284 - DNA, 25 bp, Artificial
  Probe
gggtgtactctaccagccctcaggc

SEQ ID NO: 313285 - DNA, 25 bp, Artificial
  Probe
gctaccagccatacaacatgcagaa

SEQ ID NO: 313286 - DNA, 25 bp, Artificial
  Probe
tgtccagatgcgtgcccagatgcct

SEQ ID NO: 313287 - DNA, 25 bp, Artificial
  Probe
tgccttatgcccagctccaggctat

SEQ ID NO: 313288 - DNA, 25 bp, Artificial
  Probe
ccagcacagggcaatgagacccagc

SEQ ID NO: 313289 - DNA, 25 bp, Artificial
  Probe
gatgcgtgcccagatgcctgccttc

SEQ ID NO: 313290 - DNA, 25 bp, Artificial
  Probe
cacctttagcccagcaggctcagta

SEQ ID NO: 313291 - DNA, 25 bp, Artificial
  Probe
gtccatgggctaccagccatacaac

SEQ ID NO: 313292 - DNA, 25 bp, Artificial
  Probe
caaccagctttcctggcacctttag

SEQ ID NO: 313293 - DNA, 25 bp, Artificial
  Probe
atgtggcttctcaggccccacagag

SEQ ID NO: 313294 - DNA, 25 bp, Artificial
  Probe
tatccagcgtctgcaggaacaggag

SEQ ID NO: 313295 - DNA, 25 bp, Artificial
  Probe
acagggaccgccagcacagggcaat

SEQ ID NO: 313296 - DNA, 25 bp, Artificial
  Probe
agcctccacagaccagcaacattgg

SEQ ID NO: 313297 - DNA, 25 bp, Artificial
  Probe
ggcagatgcgcctggagcaacagaa

SEQ ID NO: 313298 - DNA, 25 bp, Artificial
  Probe
agccaatgtccatgggctaccagcc

SEQ ID NO: 313299 - DNA, 25 bp, Artificial
  Probe
cgatgcatggtgtgtatatgagcca

SEQ ID NO: 313300 - DNA, 25 bp, Artificial
  Probe
acgtcagatccagctggcacagaag

SEQ ID NO: 313301 - DNA, 25 bp, Artificial
  Probe
acagcagatcccagcatggtcagcg

SEQ ID NO: 313302 - DNA, 25 bp, Artificial
  Probe
cacagaagctggagatcatgagaca

SEQ ID NO: 313303 - DNA, 25 bp, Artificial
  Probe
acatggggagccagccaatgtccat

SEQ ID NO: 313304 - DNA, 25 bp, Artificial
  Probe
cgtctgcaggaacaggagaaggaac

SEQ ID NO: 313305 - DNA, 25 bp, Artificial
  Probe
agctttcctggcacctttagcccag

SEQ ID NO: 313306 - DNA, 25 bp, Artificial
  Probe
atctggaggtgcagagacagctagc

SEQ ID NO: 313307 - DNA, 25 bp, Artificial
  Probe
ggggtgtactctaccagccctcagg

SEQ ID NO: 313308 - DNA, 25 bp, Artificial
  Probe
ttcctggcacctttagcccagcagg

SEQ ID NO: 313309 - DNA, 25 bp, Artificial
  Probe
ccatgtaccagcagatggcacccag

SEQ ID NO: 313310 - DNA, 25 bp, Artificial
  Probe
ggctacatggggagccagccaatgt

SEQ ID NO: 313311 - DNA, 25 bp, Artificial
  Probe
ggcaccacagcagatcccagcatgg

SEQ ID NO: 313312 - DNA, 25 bp, Artificial
  Probe
gtacccagcaggtgcccctggggca

SEQ ID NO: 313313 - DNA, 25 bp, Artificial
  Probe
gggcagcagcccatgtaccagcaga

SEQ ID NO: 313314 - DNA, 25 bp, Artificial
  Probe
catgtacccagcaggtgcccctggg

SEQ ID NO: 313315 - DNA, 25 bp, Artificial
  Probe
gccatacaacatgcagaatctcatg

SEQ ID NO: 313316 - DNA, 25 bp, Artificial
  Probe
gtgcagagacagctagctatccagc

SEQ ID NO: 313317 - DNA, 25 bp, Artificial
  Probe
aggatgcgtctctgccagcccagca

SEQ ID NO: 313318 - DNA, 25 bp, Artificial
  Probe
tccaggccaggatgcgtctctgcca

SEQ ID NO: 313319 - DNA, 25 bp, Artificial
  Probe
agcatgcctggcaccacagcagatc

SEQ ID NO: 313320 - DNA, 25 bp, Artificial
  Probe
tccagctggcacagaagctggagat

SEQ ID NO: 313321 - DNA, 25 bp, Artificial
  Probe
agctccaggctatgcccacagctgg

SEQ ID NO: 313322 - DNA, 25 bp, Artificial
  Probe
gccttatgcccagctccaggctatg

SEQ ID NO: 313323 - DNA, 25 bp, Artificial
  Probe
ctatccagcgtctgcaggaacagga

SEQ ID NO: 313324 - DNA, 25 bp, Artificial
  Probe
cctgctgctgtgttcagtgagggat

SEQ ID NO: 313325 - DNA, 25 bp, Artificial
  Probe
ctgatggacacaaatgccaaaggca

SEQ ID NO: 313326 - DNA, 25 bp, Artificial
  Probe
aagacactgtcagaaacacaaggct

SEQ ID NO: 313327 - DNA, 25 bp, Artificial
  Probe
tgttgaccaatgctatggaggttac

SEQ ID NO: 313328 - DNA, 25 bp, Artificial
  Probe
tggtgtcctttctggtaaccaaggc

SEQ ID NO: 313329 - DNA, 25 bp, Artificial
  Probe
ccgtccctggatgcagtggcaacat

SEQ ID NO: 313330 - DNA, 25 bp, Artificial
  Probe
accctctgctgaattggaggctgat

SEQ ID NO: 313331 - DNA, 25 bp, Artificial
  Probe
gaaaccaagcctttgattttgggag

SEQ ID NO: 313332 - DNA, 25 bp, Artificial
  Probe
acagagccggccttccaggaaggac

SEQ ID NO: 313333 - DNA, 25 bp, Artificial
  Probe
tgctcagacgcctggccaccgagga

SEQ ID NO: 313334 - DNA, 25 bp, Artificial
  Probe
ctgctgaattggaggctgatggaca

SEQ ID NO: 313335 - DNA, 25 bp, Artificial
  Probe
ctaaacacaaagtataagtgaagcc

SEQ ID NO: 313336 - DNA, 25 bp, Artificial
  Probe
cagaagaactcatcatacgcatttg

SEQ ID NO: 313337 - DNA, 25 bp, Artificial
  Probe
tgcttcgggagcacaaggacagtgt

SEQ ID NO: 313338 - DNA, 25 bp, Artificial
  Probe
ccatccattctttcattggagatgg

SEQ ID NO: 313339 - DNA, 25 bp, Artificial
  Probe
tcctagctgctgttgaaaagacact

SEQ ID NO: 313340 - DNA, 25 bp, Artificial
  Probe
tgaccgaataatctagttgatcctc

SEQ ID NO: 313341 - DNA, 25 bp, Artificial
  Probe
agaacttggagaaccagcccataag

SEQ ID NO: 313342 - DNA, 25 bp, Artificial
  Probe
acgctggccctgctgctgtgttcag

SEQ ID NO: 313343 - DNA, 25 bp, Artificial
  Probe
ataagtgaagccacatctagacacc

SEQ ID NO: 313344 - DNA, 25 bp, Artificial
  Probe
ttggtgaaaccagaagccttaaaca

SEQ ID NO: 313345 - DNA, 25 bp, Artificial
  Probe
accatggtcataaagttggactttg

SEQ ID NO: 313346 - DNA, 25 bp, Artificial
  Probe
caagcctttgattttgggagaacag

SEQ ID NO: 313347 - DNA, 25 bp, Artificial
  Probe
gaactactgtatattcaaagttggc

SEQ ID NO: 313348 - DNA, 25 bp, Artificial
  Probe
ccattctttcattggagatggtttg

SEQ ID NO: 313349 - DNA, 25 bp, Artificial
  Probe
agcccataagaaaacagggaccact

SEQ ID NO: 313350 - DNA, 25 bp, Artificial
  Probe
tgctgaacctcacagagccggcctt

SEQ ID NO: 313351 - DNA, 25 bp, Artificial
  Probe
agacgcctggccaccgaggatgagc

SEQ ID NO: 313352 - DNA, 25 bp, Artificial
  Probe
ggcaacaagcggtcccgaaccagga

SEQ ID NO: 313353 - DNA, 25 bp, Artificial
  Probe
tcagtgcagggtccacgctggccct

SEQ ID NO: 313354 - DNA, 25 bp, Artificial
  Probe
tgcagtggcaacatctgcaggatgg

SEQ ID NO: 313355 - DNA, 25 bp, Artificial
  Probe
tcccaggacagtgaaacacagtaat

SEQ ID NO: 313356 - DNA, 25 bp, Artificial
  Probe
catttagactaacaagaatgttgac

SEQ ID NO: 313357 - DNA, 25 bp, Artificial
  Probe
ccaccgtgtgtgtaagaagatctgt

SEQ ID NO: 313358 - DNA, 25 bp, Artificial
  Probe
ccaggggcttcaacagcaaggacac

SEQ ID NO: 313359 - DNA, 25 bp, Artificial
  Probe
tggaagtgctgatctcagagggaca

SEQ ID NO: 313360 - DNA, 25 bp, Artificial
  Probe
aggggcttcaacagcaaggacacag

SEQ ID NO: 313361 - DNA, 25 bp, Artificial
  Probe
cctttgtctatgaccctctgctgaa

SEQ ID NO: 313362 - DNA, 25 bp, Artificial
  Probe
tctcctccgatgcttttgtaccttg

SEQ ID NO: 313363 - DNA, 25 bp, Artificial
  Probe
ccacacagtgatggaggtgcttcgg

SEQ ID NO: 313364 - DNA, 25 bp, Artificial
  Probe
ccagaagccttaaacaagaaagcta

SEQ ID NO: 313365 - DNA, 25 bp, Artificial
  Probe
taagaagatctgtcttccacctgat

SEQ ID NO: 313366 - DNA, 25 bp, Artificial
  Probe
gtgaaacacagtaatcctacagaaa

SEQ ID NO: 313367 - DNA, 25 bp, Artificial
  Probe
gcaggccagtcagtagaaattttgg

SEQ ID NO: 313368 - DNA, 25 bp, Artificial
  Probe
tattaacagggttcgagataagctc

SEQ ID NO: 313369 - DNA, 25 bp, Artificial
  Probe
tgtgccaggatctcagtgcagggtc

SEQ ID NO: 313370 - DNA, 25 bp, Artificial
  Probe
ggcagacactgaagttcagagacgt

SEQ ID NO: 313371 - DNA, 25 bp, Artificial
  Probe
aaagcaggcctctggcctctgacat

SEQ ID NO: 313372 - DNA, 25 bp, Artificial
  Probe
attctctgtttttatctgcaggatc

SEQ ID NO: 313373 - DNA, 25 bp, Artificial
  Probe
gcatattctctgtttttatctgcag

SEQ ID NO: 313374 - DNA, 25 bp, Artificial
  Probe
accagtcctgccacaagtctaagat

SEQ ID NO: 313375 - DNA, 25 bp, Artificial
  Probe
agaccatttttgcagagtggttcct

SEQ ID NO: 313376 - DNA, 25 bp, Artificial
  Probe
ctctgtttttatctgcaggatctta

SEQ ID NO: 313377 - DNA, 25 bp, Artificial
  Probe
agacgtgcgttctgtcagcattatc

SEQ ID NO: 313378 - DNA, 25 bp, Artificial
  Probe
tcttagaacaaacagggccttagtt

SEQ ID NO: 313379 - DNA, 25 bp, Artificial
  Probe
gcgttctgtcagcattatcttaaat

SEQ ID NO: 313380 - DNA, 25 bp, Artificial
  Probe
gtcctgccacaagtctaagataagt

SEQ ID NO: 313381 - DNA, 25 bp, Artificial
  Probe
cactgaagttcagagacgtgcgttc

SEQ ID NO: 313382 - DNA, 25 bp, Artificial
  Probe
gtaatgtgagacctactataaacaa

SEQ ID NO: 313383 - DNA, 25 bp, Artificial
  Probe
tatcactgtgtaatgtgagacctac

SEQ ID NO: 313384 - DNA, 25 bp, Artificial
  Probe
tgccacaagtctaagataagttgca

SEQ ID NO: 313385 - DNA, 25 bp, Artificial
  Probe
ctgaagttcagagacgtgcgttctg

SEQ ID NO: 313386 - DNA, 25 bp, Artificial
  Probe
catttttgcagagtggttccttggt

SEQ ID NO: 313387 - DNA, 25 bp, Artificial
  Probe
tccaggcagacactgaagttcagag

SEQ ID NO: 313388 - DNA, 25 bp, Artificial
  Probe
atattctctgtttttatctgcagga

SEQ ID NO: 313389 - DNA, 25 bp, Artificial
  Probe
tttttatctgcaggatcttaaatgc

SEQ ID NO: 313390 - DNA, 25 bp, Artificial
  Probe
caaacagggccttagttactgcatt

SEQ ID NO: 313391 - DNA, 25 bp, Artificial
  Probe
catattctctgtttttatctgcagg

SEQ ID NO: 313392 - DNA, 25 bp, Artificial
  Probe
cttggtgaccagtcctgccacaagt

SEQ ID NO: 313393 - DNA, 25 bp, Artificial
  Probe
taaagcaggcctctggcctctgaca

SEQ ID NO: 313394 - DNA, 25 bp, Artificial
  Probe
ttttgcagagtggttccttggtgac

SEQ ID NO: 313395 - DNA, 25 bp, Artificial
  Probe
cagagacgtgcgttctgtcagcatt

SEQ ID NO: 313396 - DNA, 25 bp, Artificial
  Probe
ccaggcagacactgaagttcagaga

SEQ ID NO: 313397 - DNA, 25 bp, Artificial
  Probe
agttcagagacgtgcgttctgtcag

SEQ ID NO: 313398 - DNA, 25 bp, Artificial
  Probe
acgtgcgttctgtcagcattatctt

SEQ ID NO: 313399 - DNA, 25 bp, Artificial
  Probe
gcagagtggttccttggtgaccagt

SEQ ID NO: 313400 - DNA, 25 bp, Artificial
  Probe
ctgtttttatctgcaggatcttaaa

SEQ ID NO: 313401 - DNA, 25 bp, Artificial
  Probe
agagtggttccttggtgaccagtcc

SEQ ID NO: 313402 - DNA, 25 bp, Artificial
  Probe
ttgcagagtggttccttggtgacca

SEQ ID NO: 313403 - DNA, 25 bp, Artificial
  Probe
ctggcctctgacattgctgcagcct

SEQ ID NO: 313404 - DNA, 25 bp, Artificial
  Probe
gtgagacctactataaacaatgaaa

SEQ ID NO: 313405 - DNA, 25 bp, Artificial
  Probe
tgcatatcactgtgtaatgtgagac

SEQ ID NO: 313406 - DNA, 25 bp, Artificial
  Probe
caggcagacactgaagttcagagac

SEQ ID NO: 313407 - DNA, 25 bp, Artificial
  Probe
aggcctctggcctctgacattgctg

SEQ ID NO: 313408 - DNA, 25 bp, Artificial
  Probe
atctgcaggatcttaaatgcatatc

SEQ ID NO: 313409 - DNA, 25 bp, Artificial
  Probe
gcatatcactgtgtaatgtgagacc

SEQ ID NO: 313410 - DNA, 25 bp, Artificial
  Probe
ttcctcagaaataaagcaggcctct

SEQ ID NO: 313411 - DNA, 25 bp, Artificial
  Probe
ggtgaccagtcctgccacaagtcta

SEQ ID NO: 313412 - DNA, 25 bp, Artificial
  Probe
aatgtgagacctactataaacaatg

SEQ ID NO: 313413 - DNA, 25 bp, Artificial
  Probe
ggcctctggcctctgacattgctgc

SEQ ID NO: 313414 - DNA, 25 bp, Artificial
  Probe
agtggttccttggtgaccagtcctg

SEQ ID NO: 313415 - DNA, 25 bp, Artificial
  Probe
gatcttaaatgcatatcactgtgta

SEQ ID NO: 313416 - DNA, 25 bp, Artificial
  Probe
cacatggacagatggaccaagaagc

SEQ ID NO: 313417 - DNA, 25 bp, Artificial
  Probe
ccagtgtttggctggttgtctatcg

SEQ ID NO: 313418 - DNA, 25 bp, Artificial
  Probe
tttggctggttgtctatcgggactg

SEQ ID NO: 313419 - DNA, 25 bp, Artificial
  Probe
agatggaccaagaagccagtgtttg

SEQ ID NO: 313420 - DNA, 25 bp, Artificial
  Probe
atcgggactggaccaggaagataac

SEQ ID NO: 313421 - DNA, 25 bp, Artificial
  Probe
gttgtctatcgggactggaccagga

SEQ ID NO: 313422 - DNA, 25 bp, Artificial
  Probe
ggcctgggcacatggacagatggac

SEQ ID NO: 313423 - DNA, 25 bp, Artificial
  Probe
ttggctggttgtctatcgggactgg

SEQ ID NO: 313424 - DNA, 25 bp, Artificial
  Probe
tgggcacatggacagatggaccaag

SEQ ID NO: 313425 - DNA, 25 bp, Artificial
  Probe
agactgctggcctgggcacatggac

SEQ ID NO: 313426 - DNA, 25 bp, Artificial
  Probe
acagtcatgtgactgggcactaggg

SEQ ID NO: 313427 - DNA, 25 bp, Artificial
  Probe
tcctcagttggatgatgaggacaca

SEQ ID NO: 313428 - DNA, 25 bp, Artificial
  Probe
cagtgtttggctggttgtctatcgg

SEQ ID NO: 313429 - DNA, 25 bp, Artificial
  Probe
gtttcctcagttggatgatgaggac

SEQ ID NO: 313430 - DNA, 25 bp, Artificial
  Probe
tctatcgggactggaccaggaagat

SEQ ID NO: 313431 - DNA, 25 bp, Artificial
  Probe
gaagccagtgtttggctggttgtct

SEQ ID NO: 313432 - DNA, 25 bp, Artificial
  Probe
acatggacagatggaccaagaagcc

SEQ ID NO: 313433 - DNA, 25 bp, Artificial
  Probe
ctatcgggactggaccaggaagata

SEQ ID NO: 313434 - DNA, 25 bp, Artificial
  Probe
gtttggctggttgtctatcgggact

SEQ ID NO: 313435 - DNA, 25 bp, Artificial
  Probe
gctggttgtctatcgggactggacc

SEQ ID NO: 313436 - DNA, 25 bp, Artificial
  Probe
gcctgggcacatggacagatggacc

SEQ ID NO: 313437 - DNA, 25 bp, Artificial
  Probe
ggaccaagaagccagtgtttggctg

SEQ ID NO: 313438 - DNA, 25 bp, Artificial
  Probe
caagaagccagtgtttggctggttg

SEQ ID NO: 313439 - DNA, 25 bp, Artificial
  Probe
gaccaagaagccagtgtttggctgg

SEQ ID NO: 313440 - DNA, 25 bp, Artificial
  Probe
aattaaatatgtttcctcagttgga

SEQ ID NO: 313441 - DNA, 25 bp, Artificial
  Probe
aaacagtcatgtgactgggcactag

SEQ ID NO: 313442 - DNA, 25 bp, Artificial
  Probe
gaaacagtcatgtgactgggcacta

SEQ ID NO: 313443 - DNA, 25 bp, Artificial
  Probe
ggaaacagtcatgtgactgggcact

SEQ ID NO: 313444 - DNA, 25 bp, Artificial
  Probe
ctgctggcctgggcacatggacaga

SEQ ID NO: 313445 - DNA, 25 bp, Artificial
  Probe
atggaccaagaagccagtgtttggc

SEQ ID NO: 313446 - DNA, 25 bp, Artificial
  Probe
aacagtcatgtgactgggcactagg

SEQ ID NO: 313447 - DNA, 25 bp, Artificial
  Probe
ccaagaagccagtgtttggctggtt

SEQ ID NO: 313448 - DNA, 25 bp, Artificial
  Probe
cctcagttggatgatgaggacacaa

SEQ ID NO: 313449 - DNA, 25 bp, Artificial
  Probe
aagaagccagtgtttggctggttgt

SEQ ID NO: 313450 - DNA, 25 bp, Artificial
  Probe
tgtttggctggttgtctatcgggac

SEQ ID NO: 313451 - DNA, 25 bp, Artificial
  Probe
gatggaccaagaagccagtgtttgg

SEQ ID NO: 313452 - DNA, 25 bp, Artificial
  Probe
cactagggggctagactgctggcct

SEQ ID NO: 313453 - DNA, 25 bp, Artificial
  Probe
ttgtctatcgggactggaccaggaa

SEQ ID NO: 313454 - DNA, 25 bp, Artificial
  Probe
tgactgggcactagggggctagact

SEQ ID NO: 313455 - DNA, 25 bp, Artificial
  Probe
ctgggcacatggacagatggaccaa

SEQ ID NO: 313456 - DNA, 25 bp, Artificial
  Probe
gtctatcgggactggaccaggaaga

SEQ ID NO: 313457 - DNA, 25 bp, Artificial
  Probe
agaagccagtgtttggctggttgtc

SEQ ID NO: 313458 - DNA, 25 bp, Artificial
  Probe
accaagaagccagtgtttggctggt

SEQ ID NO: 313459 - DNA, 25 bp, Artificial
  Probe
cagatggaccaagaagccagtgttt

SEQ ID NO: 313460 - DNA, 25 bp, Artificial
  Probe
tgtctatcgggactggaccaggaag

SEQ ID NO: 313461 - DNA, 25 bp, Artificial
  Probe
cctgggcacatggacagatggacca

SEQ ID NO: 313462 - DNA, 25 bp, Artificial
  Probe
acaatgtgttcagtatactttgtgt

SEQ ID NO: 313463 - DNA, 25 bp, Artificial
  Probe
accacgtttaaatgagcagtctcag

SEQ ID NO: 313464 - DNA, 25 bp, Artificial
  Probe
tgttcagtatactttgtgtaccacg

SEQ ID NO: 313465 - DNA, 25 bp, Artificial
  Probe
tatactttgtgtaccacgtttaaat

SEQ ID NO: 313466 - DNA, 25 bp, Artificial
  Probe
gaattatgctttaatgctgttatct

SEQ ID NO: 313467 - DNA, 25 bp, Artificial
  Probe
acaatattgtctatttcaactatgg

SEQ ID NO: 313468 - DNA, 25 bp, Artificial
  Probe
tgtgtaccacgtttaaatgagcagt

SEQ ID NO: 313469 - DNA, 25 bp, Artificial
  Probe
tgataggatgctcaccgagcaaaac

SEQ ID NO: 313470 - DNA, 25 bp, Artificial
  Probe
gtgttcagtatactttgtgtaccac

SEQ ID NO: 313471 - DNA, 25 bp, Artificial
  Probe
ttacccctttcctcattaattgata

SEQ ID NO: 313472 - DNA, 25 bp, Artificial
  Probe
tcctcattaattgataaggaattat

SEQ ID NO: 313473 - DNA, 25 bp, Artificial
  Probe
gtaccacgtttaaatgagcagtctc

SEQ ID NO: 313474 - DNA, 25 bp, Artificial
  Probe
cacctccacatgaaacaatgtgttc

SEQ ID NO: 313475 - DNA, 25 bp, Artificial
  Probe
atgtgttcagtatactttgtgtacc

SEQ ID NO: 313476 - DNA, 25 bp, Artificial
  Probe
tgtaccacgtttaaatgagcagtct

SEQ ID NO: 313477 - DNA, 25 bp, Artificial
  Probe
tgagcagtctcaggataagttttac

SEQ ID NO: 313478 - DNA, 25 bp, Artificial
  Probe
gttcagtatactttgtgtaccacgt

SEQ ID NO: 313479 - DNA, 25 bp, Artificial
  Probe
ttgtgtaccacgtttaaatgagcag

SEQ ID NO: 313480 - DNA, 25 bp, Artificial
  Probe
tcagtatactttgtgtaccacgttt

SEQ ID NO: 313481 - DNA, 25 bp, Artificial
  Probe
ataggatgctcaccgagcaaaacca

SEQ ID NO: 313482 - DNA, 25 bp, Artificial
  Probe
ttttgataggatgctcaccgagcaa

SEQ ID NO: 313483 - DNA, 25 bp, Artificial
  Probe
acctccacatgaaacaatgtgttca

SEQ ID NO: 313484 - DNA, 25 bp, Artificial
  Probe
ttgataggatgctcaccgagcaaaa

SEQ ID NO: 313485 - DNA, 25 bp, Artificial
  Probe
ctccacatgaaacaatgtgttcagt

SEQ ID NO: 313486 - DNA, 25 bp, Artificial
  Probe
atgagcagtctcaggataagtttta

SEQ ID NO: 313487 - DNA, 25 bp, Artificial
  Probe
gaatcctgttacccctttcctcatt

SEQ ID NO: 313488 - DNA, 25 bp, Artificial
  Probe
actttgtgtaccacgtttaaatgag

SEQ ID NO: 313489 - DNA, 25 bp, Artificial
  Probe
tactttgtgtaccacgtttaaatga

SEQ ID NO: 313490 - DNA, 25 bp, Artificial
  Probe
gataggatgctcaccgagcaaaacc

SEQ ID NO: 313491 - DNA, 25 bp, Artificial
  Probe
tttgataggatgctcaccgagcaaa

SEQ ID NO: 313492 - DNA, 25 bp, Artificial
  Probe
cagtatactttgtgtaccacgttta

SEQ ID NO: 313493 - DNA, 25 bp, Artificial
  Probe
agcagtctcaggataagttttacag

SEQ ID NO: 313494 - DNA, 25 bp, Artificial
  Probe
cctccacatgaaacaatgtgttcag

SEQ ID NO: 313495 - DNA, 25 bp, Artificial
  Probe
tccacatgaaacaatgtgttcagta

SEQ ID NO: 313496 - DNA, 25 bp, Artificial
  Probe
aatgtgttcagtatactttgtgtac

SEQ ID NO: 313497 - DNA, 25 bp, Artificial
  Probe
cttttgataggatgctcaccgagca

SEQ ID NO: 313498 - DNA, 25 bp, Artificial
  Probe
gaaaagactcttgaatcctgttacc

SEQ ID NO: 313499 - DNA, 25 bp, Artificial
  Probe
tgtgttcagtatactttgtgtacca

SEQ ID NO: 313500 - DNA, 25 bp, Artificial
  Probe
tcttgaatcctgttacccctttcct

SEQ ID NO: 313501 - DNA, 25 bp, Artificial
  Probe
tttgtgtaccacgtttaaatgagca

SEQ ID NO: 313502 - DNA, 25 bp, Artificial
  Probe
gtttaaatgagcagtctcaggataa

SEQ ID NO: 313503 - DNA, 25 bp, Artificial
  Probe
ctttgtgtaccacgtttaaatgagc

SEQ ID NO: 313504 - DNA, 25 bp, Artificial
  Probe
gtgtaccacgtttaaatgagcagtc

SEQ ID NO: 313505 - DNA, 25 bp, Artificial
  Probe
taccacgtttaaatgagcagtctca

SEQ ID NO: 313506 - DNA, 25 bp, Artificial
  Probe
gagcagtctcaggataagttttaca

SEQ ID NO: 313507 - DNA, 25 bp, Artificial
  Probe
atactttgtgtaccacgtttaaatg

SEQ ID NO: 313508 - DNA, 25 bp, Artificial
  Probe
tctgtttgcctgaaagtcaagcctg

SEQ ID NO: 313509 - DNA, 25 bp, Artificial
  Probe
catgttgtggtttccatctggccag

SEQ ID NO: 313510 - DNA, 25 bp, Artificial
  Probe
aatccaaagactagtctggacagca

SEQ ID NO: 313511 - DNA, 25 bp, Artificial
  Probe
caagcctgcatgttgtggtttccat

SEQ ID NO: 313512 - DNA, 25 bp, Artificial
  Probe
gtaattctcttcagtggacagaaaa

SEQ ID NO: 313513 - DNA, 25 bp, Artificial
  Probe
tgcatgttgtggtttccatctggcc

SEQ ID NO: 313514 - DNA, 25 bp, Artificial
  Probe
ttgtggtttccatctggccagaaat

SEQ ID NO: 313515 - DNA, 25 bp, Artificial
  Probe
actagtctggacagcaaagattcca

SEQ ID NO: 313516 - DNA, 25 bp, Artificial
  Probe
ctggacagcaaagattccagtgtca

SEQ ID NO: 313517 - DNA, 25 bp, Artificial
  Probe
gtgaatccaaagactagtctggaca

SEQ ID NO: 313518 - DNA, 25 bp, Artificial
  Probe
gtggtttccatctggccagaaatca

SEQ ID NO: 313519 - DNA, 25 bp, Artificial
  Probe
atgtaattctcttcagtggacagaa

SEQ ID NO: 313520 - DNA, 25 bp, Artificial
  Probe
cagcaaagattccagtgtcatgtaa

SEQ ID NO: 313521 - DNA, 25 bp, Artificial
  Probe
tgtcatgtaattctcttcagtggac

SEQ ID NO: 313522 - DNA, 25 bp, Artificial
  Probe
agtgtcatgtaattctcttcagtgg

SEQ ID NO: 313523 - DNA, 25 bp, Artificial
  Probe
tgcatcatctgtttgcctgaaagtc

SEQ ID NO: 313524 - DNA, 25 bp, Artificial
  Probe
agtgaatccaaagactagtctggac

SEQ ID NO: 313525 - DNA, 25 bp, Artificial
  Probe
aagactagtctggacagcaaagatt

SEQ ID NO: 313526 - DNA, 25 bp, Artificial
  Probe
tccagtgtcatgtaattctcttcag

SEQ ID NO: 313527 - DNA, 25 bp, Artificial
  Probe
ctgcatgttgtggtttccatctggc

SEQ ID NO: 313528 - DNA, 25 bp, Artificial
  Probe
ctgtttgcctgaaagtcaagcctgc

SEQ ID NO: 313529 - DNA, 25 bp, Artificial
  Probe
ggacagcaaagattccagtgtcatg

SEQ ID NO: 313530 - DNA, 25 bp, Artificial
  Probe
aaagtgaatccaaagactagtctgg

SEQ ID NO: 313531 - DNA, 25 bp, Artificial
  Probe
tcatgtaattctcttcagtggacag

SEQ ID NO: 313532 - DNA, 25 bp, Artificial
  Probe
cctatgcatcatctgtttgcctgaa

SEQ ID NO: 313533 - DNA, 25 bp, Artificial
  Probe
ctagtctggacagcaaagattccag

SEQ ID NO: 313534 - DNA, 25 bp, Artificial
  Probe
gaaagtcaagcctgcatgttgtggt

SEQ ID NO: 313535 - DNA, 25 bp, Artificial
  Probe
gtcaagcctgcatgttgtggtttcc

SEQ ID NO: 313536 - DNA, 25 bp, Artificial
  Probe
tgcctgaaagtcaagcctgcatgtt

SEQ ID NO: 313537 - DNA, 25 bp, Artificial
  Probe
taattctcttcagtggacagaaaaa

SEQ ID NO: 313538 - DNA, 25 bp, Artificial
  Probe
agtctggacagcaaagattccagtg

SEQ ID NO: 313539 - DNA, 25 bp, Artificial
  Probe
ccagtgtcatgtaattctcttcagt

SEQ ID NO: 313540 - DNA, 25 bp, Artificial
  Probe
gattccagtgtcatgtaattctctt

SEQ ID NO: 313541 - DNA, 25 bp, Artificial
  Probe
aacctatgcatcatctgtttgcctg

SEQ ID NO: 313542 - DNA, 25 bp, Artificial
  Probe
gacagcaaagattccagtgtcatgt

SEQ ID NO: 313543 - DNA, 25 bp, Artificial
  Probe
catctgtttgcctgaaagtcaagcc

SEQ ID NO: 313544 - DNA, 25 bp, Artificial
  Probe
aaagtcaagcctgcatgttgtggtt

SEQ ID NO: 313545 - DNA, 25 bp, Artificial
  Probe
aagattccagtgtcatgtaattctc

SEQ ID NO: 313546 - DNA, 25 bp, Artificial
  Probe
gcctgcatgttgtggtttccatctg

SEQ ID NO: 313547 - DNA, 25 bp, Artificial
  Probe
tgttgtggtttccatctggccagaa

SEQ ID NO: 313548 - DNA, 25 bp, Artificial
  Probe
agactagtctggacagcaaagattc

SEQ ID NO: 313549 - DNA, 25 bp, Artificial
  Probe
caaagactagtctggacagcaaaga

SEQ ID NO: 313550 - DNA, 25 bp, Artificial
  Probe
tttgcctgaaagtcaagcctgcatg

SEQ ID NO: 313551 - DNA, 25 bp, Artificial
  Probe
atccaaagactagtctggacagcaa

SEQ ID NO: 313552 - DNA, 25 bp, Artificial
  Probe
caaagattccagtgtcatgtaattc

SEQ ID NO: 313553 - DNA, 25 bp, Artificial
  Probe
gcatcatctgtttgcctgaaagtca

SEQ ID NO: 313554 - DNA, 25 bp, Artificial
  Probe
tccgtggtttttagggcttgttgca

SEQ ID NO: 313555 - DNA, 25 bp, Artificial
  Probe
ggatctaaatgttctaacttgccct

SEQ ID NO: 313556 - DNA, 25 bp, Artificial
  Probe
gcagacctcctcgtgggctgttgct

SEQ ID NO: 313557 - DNA, 25 bp, Artificial
  Probe
gatctaaatgttctaacttgccctg

SEQ ID NO: 313558 - DNA, 25 bp, Artificial
  Probe
tcagagtccgagtccgactgacgtc

SEQ ID NO: 313559 - DNA, 25 bp, Artificial
  Probe
gtatatacacttgtgttgctcttct

SEQ ID NO: 313560 - DNA, 25 bp, Artificial
  Probe
taccgtaacaactggtattatcgtg

SEQ ID NO: 313561 - DNA, 25 bp, Artificial
  Probe
cttgccctgtcagctactgttcata

SEQ ID NO: 313562 - DNA, 25 bp, Artificial
  Probe
tgacgtccgcagacctcctcgtggg

SEQ ID NO: 313563 - DNA, 25 bp, Artificial
  Probe
acttgccctgtcagctactgttcat

SEQ ID NO: 313564 - DNA, 25 bp, Artificial
  Probe
ggtttttagggcttgttgcatgcac

SEQ ID NO: 313565 - DNA, 25 bp, Artificial
  Probe
tgttgcatgcacactgtttactgta

SEQ ID NO: 313566 - DNA, 25 bp, Artificial
  Probe
ttgcggggcagtttttcctccgtgg

SEQ ID NO: 313567 - DNA, 25 bp, Artificial
  Probe
acacttgtgttgctcttctctaccg

SEQ ID NO: 313568 - DNA, 25 bp, Artificial
  Probe
gggcttgttgcatgcacactgttta

SEQ ID NO: 313569 - DNA, 25 bp, Artificial
  Probe
gttgtatatacacttgtgttgctct

SEQ ID NO: 313570 - DNA, 25 bp, Artificial
  Probe
aatgttctaacttgccctgtcagct

SEQ ID NO: 313571 - DNA, 25 bp, Artificial
  Probe
catgcacactgtttactgtaatgtg

SEQ ID NO: 313572 - DNA, 25 bp, Artificial
  Probe
gtgttgctcttctctaccgtaacaa

SEQ ID NO: 313573 - DNA, 25 bp, Artificial
  Probe
taaatgttctaacttgccctgtcag

SEQ ID NO: 313574 - DNA, 25 bp, Artificial
  Probe
ctcctcgtgggctgttgctaccgag

SEQ ID NO: 313575 - DNA, 25 bp, Artificial
  Probe
gagtccgactgacgtccgcagacct

SEQ ID NO: 313576 - DNA, 25 bp, Artificial
  Probe
cagacctcctcgtgggctgttgcta

SEQ ID NO: 313577 - DNA, 25 bp, Artificial
  Probe
tctaccgtaacaactggtattatcg

SEQ ID NO: 313578 - DNA, 25 bp, Artificial
  Probe
acttgtgttgctcttctctaccgta

SEQ ID NO: 313579 - DNA, 25 bp, Artificial
  Probe
tctaacttgccctgtcagctactgt

SEQ ID NO: 313580 - DNA, 25 bp, Artificial
  Probe
ttgccctgtcagctactgttcataa

SEQ ID NO: 313581 - DNA, 25 bp, Artificial
  Probe
agtccgagtccgactgacgtccgca

SEQ ID NO: 313582 - DNA, 25 bp, Artificial
  Probe
cctcagagtccgagtccgactgacg

SEQ ID NO: 313583 - DNA, 25 bp, Artificial
  Probe
tcctcgtgggctgttgctaccgagg

SEQ ID NO: 313584 - DNA, 25 bp, Artificial
  Probe
tccgcagacctcctcgtgggctgtt

SEQ ID NO: 313585 - DNA, 25 bp, Artificial
  Probe
tccgagtccgactgacgtccgcaga

SEQ ID NO: 313586 - DNA, 25 bp, Artificial
  Probe
tgttgtatatacacttgtgttgctc

SEQ ID NO: 313587 - DNA, 25 bp, Artificial
  Probe
cgtaacaactggtattatcgtgtga

SEQ ID NO: 313588 - DNA, 25 bp, Artificial
  Probe
ctgttgctaccgaggccgtgtgttt

SEQ ID NO: 313589 - DNA, 25 bp, Artificial
  Probe
cctcgtgggctgttgctaccgaggc

SEQ ID NO: 313590 - DNA, 25 bp, Artificial
  Probe
ttttagggcttgttgcatgcacact

SEQ ID NO: 313591 - DNA, 25 bp, Artificial
  Probe
aaatgttctaacttgccctgtcagc

SEQ ID NO: 313592 - DNA, 25 bp, Artificial
  Probe
ctcgtgggctgttgctaccgaggcc

SEQ ID NO: 313593 - DNA, 25 bp, Artificial
  Probe
atgcacactgtttactgtaatgtgt

SEQ ID NO: 313594 - DNA, 25 bp, Artificial
  Probe
ccgtaacaactggtattatcgtgtg

SEQ ID NO: 313595 - DNA, 25 bp, Artificial
  Probe
gcatgcacactgtttactgtaatgt

SEQ ID NO: 313596 - DNA, 25 bp, Artificial
  Probe
tgtttgcggggcagtttttcctccg

SEQ ID NO: 313597 - DNA, 25 bp, Artificial
  Probe
cacactgtttactgtaatgtgttgt

SEQ ID NO: 313598 - DNA, 25 bp, Artificial
  Probe
tttgcggggcagtttttcctccgtg

SEQ ID NO: 313599 - DNA, 25 bp, Artificial
  Probe
tgtatatacacttgtgttgctcttc

SEQ ID NO: 313600 - DNA, 25 bp, Artificial
  Probe
cccagcagaaagacttgtgagtcca

SEQ ID NO: 313601 - DNA, 25 bp, Artificial
  Probe
gaaagacttgtgagtccaagcagga

SEQ ID NO: 313602 - DNA, 25 bp, Artificial
  Probe
agttcacttctgtgctgtctctttc

SEQ ID NO: 313603 - DNA, 25 bp, Artificial
  Probe
cgaaagacttggatccagattgcag

SEQ ID NO: 313604 - DNA, 25 bp, Artificial
  Probe
ccagattgcaggtcccagttcactt

SEQ ID NO: 313605 - DNA, 25 bp, Artificial
  Probe
agtggtgttgacgagtcgatcaacc

SEQ ID NO: 313606 - DNA, 25 bp, Artificial
  Probe
tgagtccaagcaggacagtggtgtt

SEQ ID NO: 313607 - DNA, 25 bp, Artificial
  Probe
cccggcagacccagcagaaagactt

SEQ ID NO: 313608 - DNA, 25 bp, Artificial
  Probe
cttctgtgctgtctctttctgctgg

SEQ ID NO: 313609 - DNA, 25 bp, Artificial
  Probe
tacaatatgaccattgtgtgtattc

SEQ ID NO: 313610 - DNA, 25 bp, Artificial
  Probe
tggtgttgacgagtcgatcaacctg

SEQ ID NO: 313611 - DNA, 25 bp, Artificial
  Probe
aagacttgtgagtccaagcaggaca

SEQ ID NO: 313612 - DNA, 25 bp, Artificial
  Probe
gatcaacctggaggaagttgaaccc

SEQ ID NO: 313613 - DNA, 25 bp, Artificial
  Probe
tcacttctgtgctgtctctttctgc

SEQ ID NO: 313614 - DNA, 25 bp, Artificial
  Probe
aagttgaaccccaattgcatcagca

SEQ ID NO: 313615 - DNA, 25 bp, Artificial
  Probe
aagacttggatccagattgcaggtc

SEQ ID NO: 313616 - DNA, 25 bp, Artificial
  Probe
acagtggtgttgacgagtcgatcaa

SEQ ID NO: 313617 - DNA, 25 bp, Artificial
  Probe
tctacaaagcagtcaaaaagtgttt

SEQ ID NO: 313618 - DNA, 25 bp, Artificial
  Probe
attgcaggtcccagttcacttctgt

SEQ ID NO: 313619 - DNA, 25 bp, Artificial
  Probe
acccagcagaaagacttgtgagtcc

SEQ ID NO: 313620 - DNA, 25 bp, Artificial
  Probe
agatgcagaaccagcccggcagacc

SEQ ID NO: 313621 - DNA, 25 bp, Artificial
  Probe
gtcgtctacaaagcagtcaaaaagt

SEQ ID NO: 313622 - DNA, 25 bp, Artificial
  Probe
acctcacaatatggttttttcgcag

SEQ ID NO: 313623 - DNA, 25 bp, Artificial
  Probe
cagccccagtttgatcgaaagactt

SEQ ID NO: 313624 - DNA, 25 bp, Artificial
  Probe
caatatgaccattgtgtgtattctg

SEQ ID NO: 313625 - DNA, 25 bp, Artificial
  Probe
agtttgatcgaaagacttggatcca

SEQ ID NO: 313626 - DNA, 25 bp, Artificial
  Probe
gaagatgcagaaccagcccggcaga

SEQ ID NO: 313627 - DNA, 25 bp, Artificial
  Probe
atcgaaagacttggatccagattgc

SEQ ID NO: 313628 - DNA, 25 bp, Artificial
  Probe
tgctggtcgtctacaaagcagtcaa

SEQ ID NO: 313629 - DNA, 25 bp, Artificial
  Probe
ctttctgctggtcgtctacaaagca

SEQ ID NO: 313630 - DNA, 25 bp, Artificial
  Probe
ccattgtgtgtattctggaaacgga

SEQ ID NO: 313631 - DNA, 25 bp, Artificial
  Probe
tttctgctggtcgtctacaaagcag

SEQ ID NO: 313632 - DNA, 25 bp, Artificial
  Probe
agtccaagcaggacagtggtgttga

SEQ ID NO: 313633 - DNA, 25 bp, Artificial
  Probe
tcaacctggaggaagttgaacccca

SEQ ID NO: 313634 - DNA, 25 bp, Artificial
  Probe
cctatctcttccattcccggatggg

SEQ ID NO: 313635 - DNA, 25 bp, Artificial
  Probe
gttcagtgtctccatcagcctatct

SEQ ID NO: 313636 - DNA, 25 bp, Artificial
  Probe
tgaccattgtgtgtattctggaaac

SEQ ID NO: 313637 - DNA, 25 bp, Artificial
  Probe
tctgtgctgtctctttctgctggtc

SEQ ID NO: 313638 - DNA, 25 bp, Artificial
  Probe
aatatggttttttcgcagccccagt

SEQ ID NO: 313639 - DNA, 25 bp, Artificial
  Probe
ccccagtttgatcgaaagacttgga

SEQ ID NO: 313640 - DNA, 25 bp, Artificial
  Probe
ccaagcaggacagtggtgttgacga

SEQ ID NO: 313641 - DNA, 25 bp, Artificial
  Probe
agcctatctcttccattcccggatg

SEQ ID NO: 313642 - DNA, 25 bp, Artificial
  Probe
cagtttgatcgaaagacttggatcc

SEQ ID NO: 313643 - DNA, 25 bp, Artificial
  Probe
ctctttctgctggtcgtctacaaag

SEQ ID NO: 313644 - DNA, 25 bp, Artificial
  Probe
gtgttgacgagtcgatcaacctgga

SEQ ID NO: 313645 - DNA, 25 bp, Artificial
  Probe
ttgtgagtccaagcaggacagtggt

SEQ ID NO: 313646 - DNA, 25 bp, Artificial
  Probe
agagccagcactaggcgagttgtca

SEQ ID NO: 313647 - DNA, 25 bp, Artificial
  Probe
cgagagccagcactaggcgagttgt

SEQ ID NO: 313648 - DNA, 25 bp, Artificial
  Probe
cagcactaggcgagttgtcattgcc

SEQ ID NO: 313649 - DNA, 25 bp, Artificial
  Probe
taggcgagttgtcattgcctgtgag

SEQ ID NO: 313650 - DNA, 25 bp, Artificial
  Probe
acagccctcctatggccaagataga

SEQ ID NO: 313651 - DNA, 25 bp, Artificial
  Probe
tctaggtgacgatggacatacagag

SEQ ID NO: 313652 - DNA, 25 bp, Artificial
  Probe
gcaatatgaactgtcacgaaggcat

SEQ ID NO: 313653 - DNA, 25 bp, Artificial
  Probe
tcacgaaggcatagtgagggtcact

SEQ ID NO: 313654 - DNA, 25 bp, Artificial
  Probe
agacatctggaacattcgcagcatc

SEQ ID NO: 313655 - DNA, 25 bp, Artificial
  Probe
ggaggatgacttctacccagtgcaa

SEQ ID NO: 313656 - DNA, 25 bp, Artificial
  Probe
ggcggcagcgacaactactgcaacg

SEQ ID NO: 313657 - DNA, 25 bp, Artificial
  Probe
tgtcacgaaggcatagtgagggtca

SEQ ID NO: 313658 - DNA, 25 bp, Artificial
  Probe
acagggagctctgtgccccacaact

SEQ ID NO: 313659 - DNA, 25 bp, Artificial
  Probe
aggtacagggcgagagccagcacta

SEQ ID NO: 313660 - DNA, 25 bp, Artificial
  Probe
caccttcatccacgaagacatctgg

SEQ ID NO: 313661 - DNA, 25 bp, Artificial
  Probe
gcactttgacagatagatgacatct

SEQ ID NO: 313662 - DNA, 25 bp, Artificial
  Probe
atagaatgtaccaacggttccttag

SEQ ID NO: 313663 - DNA, 25 bp, Artificial
  Probe
tcccatgcaagaatggcaatatgaa

SEQ ID NO: 313664 - DNA, 25 bp, Artificial
  Probe
cattcgcagcatctgtgatactgcc

SEQ ID NO: 313665 - DNA, 25 bp, Artificial
  Probe
gcatctgtgatactgccaatatccc

SEQ ID NO: 313666 - DNA, 25 bp, Artificial
  Probe
catagtgagggtcactgactgcaga

SEQ ID NO: 313667 - DNA, 25 bp, Artificial
  Probe
tgacgatggacatacagaggaccca

SEQ ID NO: 313668 - DNA, 25 bp, Artificial
  Probe
tggaacattcgcagcatctgtgata

SEQ ID NO: 313669 - DNA, 25 bp, Artificial
  Probe
gcctgtgagggtaccccagaggtcc

SEQ ID NO: 313670 - DNA, 25 bp, Artificial
  Probe
tcattgcctgtgagggtaccccaga

SEQ ID NO: 313671 - DNA, 25 bp, Artificial
  Probe
cctcctatggccaagatagaatgta

SEQ ID NO: 313672 - DNA, 25 bp, Artificial
  Probe
gttgtcattgcctgtgagggtaccc

SEQ ID NO: 313673 - DNA, 25 bp, Artificial
  Probe
gagagacagggagctctgtgcccca

SEQ ID NO: 313674 - DNA, 25 bp, Artificial
  Probe
tagatgacatctgtagctgctactg

SEQ ID NO: 313675 - DNA, 25 bp, Artificial
  Probe
tgtgatactgccaatatcccatgca

SEQ ID NO: 313676 - DNA, 25 bp, Artificial
  Probe
tggggttagggcttgtacagccctc

SEQ ID NO: 313677 - DNA, 25 bp, Artificial
  Probe
gacttctacccagtgcaaacgcttc

SEQ ID NO: 313678 - DNA, 25 bp, Artificial
  Probe
tgactgcagagagacagggagctct

SEQ ID NO: 313679 - DNA, 25 bp, Artificial
  Probe
tagggcttgtacagccctcctatgg

SEQ ID NO: 313680 - DNA, 25 bp, Artificial
  Probe
gctctgtgccccacaactgtaggta

SEQ ID NO: 313681 - DNA, 25 bp, Artificial
  Probe
gatactgccaatatcccatgcaaga

SEQ ID NO: 313682 - DNA, 25 bp, Artificial
  Probe
ttagacagcatgtggaccctgaggg

SEQ ID NO: 313683 - DNA, 25 bp, Artificial
  Probe
tgccaatatcccatgcaagaatggc

SEQ ID NO: 313684 - DNA, 25 bp, Artificial
  Probe
caggcggcagcgacaactactgcaa

SEQ ID NO: 313685 - DNA, 25 bp, Artificial
  Probe
aactgtaggtacagggcgagagcca

SEQ ID NO: 313686 - DNA, 25 bp, Artificial
  Probe
atggacatacagaggacccaatcct

SEQ ID NO: 313687 - DNA, 25 bp, Artificial
  Probe
ccctgctggggttagggcttgtaca

SEQ ID NO: 313688 - DNA, 25 bp, Artificial
  Probe
gacatacagaggacccaatccttgc

SEQ ID NO: 313689 - DNA, 25 bp, Artificial
  Probe
cctatggccaagatagaatgtacca

SEQ ID NO: 313690 - DNA, 25 bp, Artificial
  Probe
tgagggtaccccagaggtcccagtg

SEQ ID NO: 313691 - DNA, 25 bp, Artificial
  Probe
cttgtacagccctcctatggccaag

SEQ ID NO: 313692 - DNA, 25 bp, Artificial
  Probe
tgacagagttggtcaccagcccaga

SEQ ID NO: 313693 - DNA, 25 bp, Artificial
  Probe
tggtccgactcaacgcctagtccag

SEQ ID NO: 313694 - DNA, 25 bp, Artificial
  Probe
gctgctccaggacatggagaggaat

SEQ ID NO: 313695 - DNA, 25 bp, Artificial
  Probe
gcctagtccagcaactgctaccagt

SEQ ID NO: 313696 - DNA, 25 bp, Artificial
  Probe
ctgcgggttcccagcgagcatcctt

SEQ ID NO: 313697 - DNA, 25 bp, Artificial
  Probe
cctacctggctgctccaggacatgg

SEQ ID NO: 313698 - DNA, 25 bp, Artificial
  Probe
acagagttggtcaccagcccagacc

SEQ ID NO: 313699 - DNA, 25 bp, Artificial
  Probe
gctccaggacatggagaggaatacc

SEQ ID NO: 313700 - DNA, 25 bp, Artificial
  Probe
ctctgtcttgaagtgtgacagagtt

SEQ ID NO: 313701 - DNA, 25 bp, Artificial
  Probe
tcccagcgagcatccttatttgacc

SEQ ID NO: 313702 - DNA, 25 bp, Artificial
  Probe
tcaacgcctagtccagcaactgcta

SEQ ID NO: 313703 - DNA, 25 bp, Artificial
  Probe
gggttcccagcgagcatccttattt

SEQ ID NO: 313704 - DNA, 25 bp, Artificial
  Probe
ctccaggacatggagaggaataccc

SEQ ID NO: 313705 - DNA, 25 bp, Artificial
  Probe
agaggaataccctgcagcagggacc

SEQ ID NO: 313706 - DNA, 25 bp, Artificial
  Probe
tgagtccccagagcactgggccagc

SEQ ID NO: 313707 - DNA, 25 bp, Artificial
  Probe
cacctcggccctctaaggggtctgg

SEQ ID NO: 313708 - DNA, 25 bp, Artificial
  Probe
gtaacccccaagaggcaggtgatgg

SEQ ID NO: 313709 - DNA, 25 bp, Artificial
  Probe
gcgagcatccttatttgaccccatc

SEQ ID NO: 313710 - DNA, 25 bp, Artificial
  Probe
ctctaaggggtctgggacctcctct

SEQ ID NO: 313711 - DNA, 25 bp, Artificial
  Probe
gctttcctgaacctctctgtcttga

SEQ ID NO: 313712 - DNA, 25 bp, Artificial
  Probe
cagactggtccgactcaacgcctag

SEQ ID NO: 313713 - DNA, 25 bp, Artificial
  Probe
agctttcctgaacctctctgtcttg

SEQ ID NO: 313714 - DNA, 25 bp, Artificial
  Probe
cttcctgcgggttcccagcgagcat

SEQ ID NO: 313715 - DNA, 25 bp, Artificial
  Probe
agtccagcaactgctaccagtgcca

SEQ ID NO: 313716 - DNA, 25 bp, Artificial
  Probe
tctctgtcttgaagtgtgacagagt

SEQ ID NO: 313717 - DNA, 25 bp, Artificial
  Probe
cagccagaagtaacccccaagaggc

SEQ ID NO: 313718 - DNA, 25 bp, Artificial
  Probe
cctggctgctccaggacatggagag

SEQ ID NO: 313719 - DNA, 25 bp, Artificial
  Probe
cccccaagaggcaggtgatggccta

SEQ ID NO: 313720 - DNA, 25 bp, Artificial
  Probe
aagaggcaggtgatggcctaagttc

SEQ ID NO: 313721 - DNA, 25 bp, Artificial
  Probe
ccccaagaggcaggtgatggcctaa

SEQ ID NO: 313722 - DNA, 25 bp, Artificial
  Probe
cccaagaggcaggtgatggcctaag

SEQ ID NO: 313723 - DNA, 25 bp, Artificial
  Probe
agactggtccgactcaacgcctagt

SEQ ID NO: 313724 - DNA, 25 bp, Artificial
  Probe
aataccctgcagcagggacccacag

SEQ ID NO: 313725 - DNA, 25 bp, Artificial
  Probe
cagcgagcatccttatttgacccca

SEQ ID NO: 313726 - DNA, 25 bp, Artificial
  Probe
ctagtccagcaactgctaccagtgc

SEQ ID NO: 313727 - DNA, 25 bp, Artificial
  Probe
gactcaacgcctagtccagcaactg

SEQ ID NO: 313728 - DNA, 25 bp, Artificial
  Probe
gtaccagctttcctgaacctctctg

SEQ ID NO: 313729 - DNA, 25 bp, Artificial
  Probe
aacctctctgtcttgaagtgtgaca

SEQ ID NO: 313730 - DNA, 25 bp, Artificial
  Probe
aggaataccctgcagcagggaccca

SEQ ID NO: 313731 - DNA, 25 bp, Artificial
  Probe
cctgaacctctctgtcttgaagtgt

SEQ ID NO: 313732 - DNA, 25 bp, Artificial
  Probe
gaagtaacccccaagaggcaggtga

SEQ ID NO: 313733 - DNA, 25 bp, Artificial
  Probe
tgtgacagagttggtcaccagccca

SEQ ID NO: 313734 - DNA, 25 bp, Artificial
  Probe
tttcctgaacctctctgtcttgaag

SEQ ID NO: 313735 - DNA, 25 bp, Artificial
  Probe
ttcccagcgagcatccttatttgac

SEQ ID NO: 313736 - DNA, 25 bp, Artificial
  Probe
aggggtctgggacctcctctcgatc

SEQ ID NO: 313737 - DNA, 25 bp, Artificial
  Probe
ccagccagaagtaacccccaagagg

SEQ ID NO: 313738 - DNA, 25 bp, Artificial
  Probe
tgctgctcagcatacgctacggcct

SEQ ID NO: 313739 - DNA, 25 bp, Artificial
  Probe
gcagcaactcctgagcacgggacgg

SEQ ID NO: 313740 - DNA, 25 bp, Artificial
  Probe
ccagttcttaagacagaatgagatg

SEQ ID NO: 313741 - DNA, 25 bp, Artificial
  Probe
agaaggcccgcgtcctggaccaagc

SEQ ID NO: 313742 - DNA, 25 bp, Artificial
  Probe
ctgggccaaggagcagcagaaagcc

SEQ ID NO: 313743 - DNA, 25 bp, Artificial
  Probe
acgctgctgctcagcatacgctacg

SEQ ID NO: 313744 - DNA, 25 bp, Artificial
  Probe
cccagagctggcagacagtagcagc

SEQ ID NO: 313745 - DNA, 25 bp, Artificial
  Probe
gtggctcagcaggagcaactgtgac

SEQ ID NO: 313746 - DNA, 25 bp, Artificial
  Probe
tgggccaaggagcagcagaaagcca

SEQ ID NO: 313747 - DNA, 25 bp, Artificial
  Probe
agcagcaacatccagttcttaagac

SEQ ID NO: 313748 - DNA, 25 bp, Artificial
  Probe
cgacacactggatgaagagaaggcc

SEQ ID NO: 313749 - DNA, 25 bp, Artificial
  Probe
cattgaattccagtactccacgctg

SEQ ID NO: 313750 - DNA, 25 bp, Artificial
  Probe
ggttcaccaacattgaattccagta

SEQ ID NO: 313751 - DNA, 25 bp, Artificial
  Probe
gcgagaagcagcaactcctgagcac

SEQ ID NO: 313752 - DNA, 25 bp, Artificial
  Probe
accccaagtggcaagaaagctcaca

SEQ ID NO: 313753 - DNA, 25 bp, Artificial
  Probe
gctgccacctcttctctgggtggct

SEQ ID NO: 313754 - DNA, 25 bp, Artificial
  Probe
gtagactagagctcggccacaaatt

SEQ ID NO: 313755 - DNA, 25 bp, Artificial
  Probe
aattccagtactccacgctgctgct

SEQ ID NO: 313756 - DNA, 25 bp, Artificial
  Probe
gagacgaagacctaacaggggcact

SEQ ID NO: 313757 - DNA, 25 bp, Artificial
  Probe
ggctgctttaggaccccaagtggca

SEQ ID NO: 313758 - DNA, 25 bp, Artificial
  Probe
tctcctaaggagacgaagacctaac

SEQ ID NO: 313759 - DNA, 25 bp, Artificial
  Probe
gttatgagggctattacgtgcttcc

SEQ ID NO: 313760 - DNA, 25 bp, Artificial
  Probe
gtactccacgctgctgctcagcata

SEQ ID NO: 313761 - DNA, 25 bp, Artificial
  Probe
ccccgacacactggatgaagagaag

SEQ ID NO: 313762 - DNA, 25 bp, Artificial
  Probe
cattttttgagttcaaatgctactg

SEQ ID NO: 313763 - DNA, 25 bp, Artificial
  Probe
ctgaggccgggctgctttaggaccc

SEQ ID NO: 313764 - DNA, 25 bp, Artificial
  Probe
cgtgcttccggtggaacagtaccca

SEQ ID NO: 313765 - DNA, 25 bp, Artificial
  Probe
cgaagacctaacaggggcactgagg

SEQ ID NO: 313766 - DNA, 25 bp, Artificial
  Probe
tagagctcggccacaaattctgagg

SEQ ID NO: 313767 - DNA, 25 bp, Artificial
  Probe
tcagcaggagcaactgtgacctcct

SEQ ID NO: 313768 - DNA, 25 bp, Artificial
  Probe
gcttccggtggaacagtacccagag

SEQ ID NO: 313769 - DNA, 25 bp, Artificial
  Probe
tgtgacctcctctcctaaggagacg

SEQ ID NO: 313770 - DNA, 25 bp, Artificial
  Probe
ggtaacaaaataacctgctgccacc

SEQ ID NO: 313771 - DNA, 25 bp, Artificial
  Probe
cgcgtcctggaccaagcgcgacaga

SEQ ID NO: 313772 - DNA, 25 bp, Artificial
  Probe
agagctggcagacagtagcagcaac

SEQ ID NO: 313773 - DNA, 25 bp, Artificial
  Probe
catcctgaagtagactagagctcgg

SEQ ID NO: 313774 - DNA, 25 bp, Artificial
  Probe
cgtcctggaccaagcgcgacagagg

SEQ ID NO: 313775 - DNA, 25 bp, Artificial
  Probe
ggagcaactgtgacctcctctccta

SEQ ID NO: 313776 - DNA, 25 bp, Artificial
  Probe
cagtagcagcaacatccagttctta

SEQ ID NO: 313777 - DNA, 25 bp, Artificial
  Probe
aagtagactagagctcggccacaaa

SEQ ID NO: 313778 - DNA, 25 bp, Artificial
  Probe
ctcttctctgggtggctcagcagga

SEQ ID NO: 313779 - DNA, 25 bp, Artificial
  Probe
gcaagaaagctcacattttttgagt

SEQ ID NO: 313780 - DNA, 25 bp, Artificial
  Probe
agtactccacgctgctgctcagcat

SEQ ID NO: 313781 - DNA, 25 bp, Artificial
  Probe
acatccagttcttaagacagaatga

SEQ ID NO: 313782 - DNA, 25 bp, Artificial
  Probe
tgctactgtccaagcgcaaagtccc

SEQ ID NO: 313783 - DNA, 25 bp, Artificial
  Probe
gcgcaaagtccctcatcctgaagta

SEQ ID NO: 313784 - DNA, 25 bp, Artificial
  Probe
ctcagtcacggctgctcgagatgga

SEQ ID NO: 313785 - DNA, 25 bp, Artificial
  Probe
gctcggtgggcagtaacatatttga

SEQ ID NO: 313786 - DNA, 25 bp, Artificial
  Probe
aattcctgacctcatcaccagtgtg

SEQ ID NO: 313787 - DNA, 25 bp, Artificial
  Probe
ggctcaccaggttggtgaaaccatt

SEQ ID NO: 313788 - DNA, 25 bp, Artificial
  Probe
cttctcaatcgcttcgtgtaaatgg

SEQ ID NO: 313789 - DNA, 25 bp, Artificial
  Probe
tcctgggcttcaccatgttccttct

SEQ ID NO: 313790 - DNA, 25 bp, Artificial
  Probe
agcctatccctgtcagcagcaacgg

SEQ ID NO: 313791 - DNA, 25 bp, Artificial
  Probe
attatgggtttgacgatcctagcgg

SEQ ID NO: 313792 - DNA, 25 bp, Artificial
  Probe
gcaggcacttcaattcctgacctca

SEQ ID NO: 313793 - DNA, 25 bp, Artificial
  Probe
tcctgacctcatcaccagtgtgatc

SEQ ID NO: 313794 - DNA, 25 bp, Artificial
  Probe
aagagcagaagacctggctggaagt

SEQ ID NO: 313795 - DNA, 25 bp, Artificial
  Probe
aagatcctgggcttcaccatgttcc

SEQ ID NO: 313796 - DNA, 25 bp, Artificial
  Probe
acctggctggaagttactgtccgtc

SEQ ID NO: 313797 - DNA, 25 bp, Artificial
  Probe
atgctcctgtttgtgatcttctcaa

SEQ ID NO: 313798 - DNA, 25 bp, Artificial
  Probe
tggctcctgttctccctcatcaatg

SEQ ID NO: 313799 - DNA, 25 bp, Artificial
  Probe
cagtgtgatcgttgcccggaaaggc

SEQ ID NO: 313800 - DNA, 25 bp, Artificial
  Probe
ctgtgccattgtcttgctgtttctc

SEQ ID NO: 313801 - DNA, 25 bp, Artificial
  Probe
gggcttcaccatgttccttctctac

SEQ ID NO: 313802 - DNA, 25 bp, Artificial
  Probe
tttgacgatcctagcggcaggcact

SEQ ID NO: 313803 - DNA, 25 bp, Artificial
  Probe
ttgatatcacagtgggcctgcctgt

SEQ ID NO: 313804 - DNA, 25 bp, Artificial
  Probe
tctgactcagtcacggctgctcgag

SEQ ID NO: 313805 - DNA, 25 bp, Artificial
  Probe
atcaatgcgctgcagcctatccctg

SEQ ID NO: 313806 - DNA, 25 bp, Artificial
  Probe
caatcgcttcgtgtaaatggagaat

SEQ ID NO: 313807 - DNA, 25 bp, Artificial
  Probe
atctggatagccatgttctcatacc

SEQ ID NO: 313808 - DNA, 25 bp, Artificial
  Probe
tgatcttctcaatcgcttcgtgtaa

SEQ ID NO: 313809 - DNA, 25 bp, Artificial
  Probe
ctggaagttactgtccgtctcacca

SEQ ID NO: 313810 - DNA, 25 bp, Artificial
  Probe
cctgtatctgtctgactcagtcacg

SEQ ID NO: 313811 - DNA, 25 bp, Artificial
  Probe
cggcctgttctgtgccattgtcttg

SEQ ID NO: 313812 - DNA, 25 bp, Artificial
  Probe
agacatggccgtgtcaagctcggtg

SEQ ID NO: 313813 - DNA, 25 bp, Artificial
  Probe
cttctctactttgtgttcctggtga

SEQ ID NO: 313814 - DNA, 25 bp, Artificial
  Probe
cgcttcgtgtaaatggagaatgaac

SEQ ID NO: 313815 - DNA, 25 bp, Artificial
  Probe
gatcctagcggcaggcacttcaatt

SEQ ID NO: 313816 - DNA, 25 bp, Artificial
  Probe
gagcagaagacctggctggaagtta

SEQ ID NO: 313817 - DNA, 25 bp, Artificial
  Probe
tgtcaagctcggtgggcagtaacat

SEQ ID NO: 313818 - DNA, 25 bp, Artificial
  Probe
tcaatgcgctgcagcctatccctgt

SEQ ID NO: 313819 - DNA, 25 bp, Artificial
  Probe
ccatgttctcatacctcatggtgtg

SEQ ID NO: 313820 - DNA, 25 bp, Artificial
  Probe
tgctcgagatggacaaagagcagaa

SEQ ID NO: 313821 - DNA, 25 bp, Artificial
  Probe
gttctccctcatcaatgcgctgcag

SEQ ID NO: 313822 - DNA, 25 bp, Artificial
  Probe
agctcggtgggcagtaacatatttg

SEQ ID NO: 313823 - DNA, 25 bp, Artificial
  Probe
atccctgtcagcagcaacggcctgt

SEQ ID NO: 313824 - DNA, 25 bp, Artificial
  Probe
ccttctctactttgtgttcctggtg

SEQ ID NO: 313825 - DNA, 25 bp, Artificial
  Probe
taacatatttgatatcacagtgggc

SEQ ID NO: 313826 - DNA, 25 bp, Artificial
  Probe
ctgttctgtgccattgtcttgctgt

SEQ ID NO: 313827 - DNA, 25 bp, Artificial
  Probe
caccaggttggtgaaaccattggga

SEQ ID NO: 313828 - DNA, 25 bp, Artificial
  Probe
gccattgtcttgctgtttctcatgc

SEQ ID NO: 313829 - DNA, 25 bp, Artificial
  Probe
ctttgtgttcctggtgatcagtgtg

SEQ ID NO: 313830 - DNA, 25 bp, Artificial
  Probe
catctagggccttgccagttctgag

SEQ ID NO: 313831 - DNA, 25 bp, Artificial
  Probe
tagggccttgccagttctgaggaga

SEQ ID NO: 313832 - DNA, 25 bp, Artificial
  Probe
ttcccaaggtgttgaaggtccttgg

SEQ ID NO: 313833 - DNA, 25 bp, Artificial
  Probe
gagtttcacatctgccatccaaggc

SEQ ID NO: 313834 - DNA, 25 bp, Artificial
  Probe
tacacacagtttagggtggactctg

SEQ ID NO: 313835 - DNA, 25 bp, Artificial
  Probe
tggaatcctggtcagcagactcagg

SEQ ID NO: 313836 - DNA, 25 bp, Artificial
  Probe
cagactcagggcaccgactaatggc

SEQ ID NO: 313837 - DNA, 25 bp, Artificial
  Probe
ggactgttcatgagcccgggacagc

SEQ ID NO: 313838 - DNA, 25 bp, Artificial
  Probe
cgtatatgtacacacatatgtgtat

SEQ ID NO: 313839 - DNA, 25 bp, Artificial
  Probe
tcatgagcggcacaagtgtatcaac

SEQ ID NO: 313840 - DNA, 25 bp, Artificial
  Probe
gtacacacatatgtgtatatacatg

SEQ ID NO: 313841 - DNA, 25 bp, Artificial
  Probe
tgcctctcctgtacacacagtttag

SEQ ID NO: 313842 - DNA, 25 bp, Artificial
  Probe
tcaagttcatctagggccttgccag

SEQ ID NO: 313843 - DNA, 25 bp, Artificial
  Probe
ctgccccatgacaagaccaagtgct

SEQ ID NO: 313844 - DNA, 25 bp, Artificial
  Probe
cggctatatgcctctcctgtacaca

SEQ ID NO: 313845 - DNA, 25 bp, Artificial
  Probe
tattttgaagtcagccgcactgggc

SEQ ID NO: 313846 - DNA, 25 bp, Artificial
  Probe
ggccttgccagttctgaggagaaga

SEQ ID NO: 313847 - DNA, 25 bp, Artificial
  Probe
tcatctagggccttgccagttctga

SEQ ID NO: 313848 - DNA, 25 bp, Artificial
  Probe
ttatatgtgcgtatatgtacacaca

SEQ ID NO: 313849 - DNA, 25 bp, Artificial
  Probe
ttattttgaagtcagccgcactggg

SEQ ID NO: 313850 - DNA, 25 bp, Artificial
  Probe
gggcccaggccctttgcttggagaa

SEQ ID NO: 313851 - DNA, 25 bp, Artificial
  Probe
ccgcactgggcctggaatcctggtc

SEQ ID NO: 313852 - DNA, 25 bp, Artificial
  Probe
ccctttgcttggagaagagcaggga

SEQ ID NO: 313853 - DNA, 25 bp, Artificial
  Probe
ggcaccgactaatggcgaacactga

SEQ ID NO: 313854 - DNA, 25 bp, Artificial
  Probe
cacagtttagggtggactctgtgct

SEQ ID NO: 313855 - DNA, 25 bp, Artificial
  Probe
agtcagccgcactgggcctggaatc

SEQ ID NO: 313856 - DNA, 25 bp, Artificial
  Probe
ttgtcaaggtgtacggctatatgcc

SEQ ID NO: 313857 - DNA, 25 bp, Artificial
  Probe
catgagcccgggacagctggttccc

SEQ ID NO: 313858 - DNA, 25 bp, Artificial
  Probe
gttcccaaggtgttgaaggtccttg

SEQ ID NO: 313859 - DNA, 25 bp, Artificial
  Probe
gtcagcagactcagggcaccgacta

SEQ ID NO: 313860 - DNA, 25 bp, Artificial
  Probe
agagagtttcacatctgccatccaa

SEQ ID NO: 313861 - DNA, 25 bp, Artificial
  Probe
aggccctttgcttggagaagagcag

SEQ ID NO: 313862 - DNA, 25 bp, Artificial
  Probe
tttatatgtgcgtatatgtacacac

SEQ ID NO: 313863 - DNA, 25 bp, Artificial
  Probe
agggccttgccagttctgaggagaa

SEQ ID NO: 313864 - DNA, 25 bp, Artificial
  Probe
aagtcagccgcactgggcctggaat

SEQ ID NO: 313865 - DNA, 25 bp, Artificial
  Probe
tttgtcaaggtgtacggctatatgc

SEQ ID NO: 313866 - DNA, 25 bp, Artificial
  Probe
tgttgaaggtccttggggacatcgt

SEQ ID NO: 313867 - DNA, 25 bp, Artificial
  Probe
ttcatgagcggcacaagtgtatcaa

SEQ ID NO: 313868 - DNA, 25 bp, Artificial
  Probe
ggctatatgcctctcctgtacacac

SEQ ID NO: 313869 - DNA, 25 bp, Artificial
  Probe
cgactaatggcgaacactgaggact

SEQ ID NO: 313870 - DNA, 25 bp, Artificial
  Probe
aaggtgtacggctatatgcctctcc

SEQ ID NO: 313871 - DNA, 25 bp, Artificial
  Probe
tgtacggctatatgcctctcctgta

SEQ ID NO: 313872 - DNA, 25 bp, Artificial
  Probe
ggactctgtgctcttcaagacccgc

SEQ ID NO: 313873 - DNA, 25 bp, Artificial
  Probe
ctcagggcaccgactaatggcgaac

SEQ ID NO: 313874 - DNA, 25 bp, Artificial
  Probe
atgagcccgggacagctggttcccg

SEQ ID NO: 313875 - DNA, 25 bp, Artificial
  Probe
ctcactttcatgagcggcacaagtg

SEQ ID NO: 313876 - DNA, 25 bp, Artificial
  Probe
gagtcctcaggaaacacagatgggg

SEQ ID NO: 313877 - DNA, 25 bp, Artificial
  Probe
ctatcccctacataatacggcagag

SEQ ID NO: 313878 - DNA, 25 bp, Artificial
  Probe
ttaaaagcacttactttcaggtcag

SEQ ID NO: 313879 - DNA, 25 bp, Artificial
  Probe
aattgcaccagaaatgttaaggaac

SEQ ID NO: 313880 - DNA, 25 bp, Artificial
  Probe
tctggacaacttggtgagaactctt

SEQ ID NO: 313881 - DNA, 25 bp, Artificial
  Probe
cagaatgggagacaccctgggttca

SEQ ID NO: 313882 - DNA, 25 bp, Artificial
  Probe
gaaagatcatgtcaagtctggacaa

SEQ ID NO: 313883 - DNA, 25 bp, Artificial
  Probe
ctgaagtctgctttcaatgaaatta

SEQ ID NO: 313884 - DNA, 25 bp, Artificial
  Probe
ttgcaccagaaatgttaaggaacag

SEQ ID NO: 313885 - DNA, 25 bp, Artificial
  Probe
gtgagccaatcttcacagatatcta

SEQ ID NO: 313886 - DNA, 25 bp, Artificial
  Probe
agatcccccatgcagatcatcactg

SEQ ID NO: 313887 - DNA, 25 bp, Artificial
  Probe
agagaaatagtttcttcctgtcaat

SEQ ID NO: 313888 - DNA, 25 bp, Artificial
  Probe
tagaggcctgtgcaagctttgggtt

SEQ ID NO: 313889 - DNA, 25 bp, Artificial
  Probe
agaatgggagacaccctgggttcaa

SEQ ID NO: 313890 - DNA, 25 bp, Artificial
  Probe
tgaaattatcttctatggaagggcc

SEQ ID NO: 313891 - DNA, 25 bp, Artificial
  Probe
taacatgaatttgaacctggatagc

SEQ ID NO: 313892 - DNA, 25 bp, Artificial
  Probe
aatttaatgcccaaataggaagtct

SEQ ID NO: 313893 - DNA, 25 bp, Artificial
  Probe
cccttacctggatagaaaatgttca

SEQ ID NO: 313894 - DNA, 25 bp, Artificial
  Probe
ggcctgcctttctagatttctataa

SEQ ID NO: 313895 - DNA, 25 bp, Artificial
  Probe
tggcccagacctataatccctagag

SEQ ID NO: 313896 - DNA, 25 bp, Artificial
  Probe
ctcactgactctgttttcttaatgg

SEQ ID NO: 313897 - DNA, 25 bp, Artificial
  Probe
gatttgcaaactatatcactgaagt

SEQ ID NO: 313898 - DNA, 25 bp, Artificial
  Probe
agaatggcctcctagactatagcac

SEQ ID NO: 313899 - DNA, 25 bp, Artificial
  Probe
ggtcagatgttgtggcccagaccta

SEQ ID NO: 313900 - DNA, 25 bp, Artificial
  Probe
cataatacggcagagtcattggaaa

SEQ ID NO: 313901 - DNA, 25 bp, Artificial
  Probe
tcacatacaaggaacagataaggct

SEQ ID NO: 313902 - DNA, 25 bp, Artificial
  Probe
agcttgtgatcatttagagtttcac

SEQ ID NO: 313903 - DNA, 25 bp, Artificial
  Probe
ggtggaagcactctctctcactgac

SEQ ID NO: 313904 - DNA, 25 bp, Artificial
  Probe
tactgcagaacactgcattcccatg

SEQ ID NO: 313905 - DNA, 25 bp, Artificial
  Probe
gaccctaagcaaaatgataacatga

SEQ ID NO: 313906 - DNA, 25 bp, Artificial
  Probe
tggaagcactctctctcactgactc

SEQ ID NO: 313907 - DNA, 25 bp, Artificial
  Probe
gtgcctactttgatttgcaaactat

SEQ ID NO: 313908 - DNA, 25 bp, Artificial
  Probe
gaagtctctctgctctagtaatttc

SEQ ID NO: 313909 - DNA, 25 bp, Artificial
  Probe
aggaggatcacaggttcagggtcta

SEQ ID NO: 313910 - DNA, 25 bp, Artificial
  Probe
tgttgccttgcgttgggttgtttcc

SEQ ID NO: 313911 - DNA, 25 bp, Artificial
  Probe
actccacttccttgtgagtcctcag

SEQ ID NO: 313912 - DNA, 25 bp, Artificial
  Probe
catcaccctgaaatctgtcagcaag

SEQ ID NO: 313913 - DNA, 25 bp, Artificial
  Probe
tatcttctatggaagggccaaggag

SEQ ID NO: 313914 - DNA, 25 bp, Artificial
  Probe
gatcaaaacagatgacagtgtgcct

SEQ ID NO: 313915 - DNA, 25 bp, Artificial
  Probe
gagaaatagtttcttcctgtcaata

SEQ ID NO: 313916 - DNA, 25 bp, Artificial
  Probe
ttccttatacagatgtctgtgggtg

SEQ ID NO: 313917 - DNA, 25 bp, Artificial
  Probe
gcaccagcactgtcacaaagcatct

SEQ ID NO: 313918 - DNA, 25 bp, Artificial
  Probe
caaagcatctcatccattgcccagg

SEQ ID NO: 313919 - DNA, 25 bp, Artificial
  Probe
cattgcccagggtgtagaggcctgt

SEQ ID NO: 313920 - DNA, 25 bp, Artificial
  Probe
acatgggctgcagagaaagatcatg

SEQ ID NO: 313921 - DNA, 25 bp, Artificial
  Probe
cctataatccctagaggttgagata

SEQ ID NO: 313922 - DNA, 25 bp, Artificial
  Probe
ccttggtcttatttcgagaacaaga

SEQ ID NO: 313923 - DNA, 25 bp, Artificial
  Probe
tctctttctccgtggcttactggtt

SEQ ID NO: 313924 - DNA, 25 bp, Artificial
  Probe
ccaaagcatttatgcaacagcaaag

SEQ ID NO: 313925 - DNA, 25 bp, Artificial
  Probe
accattccttggtcttatttcgaga

SEQ ID NO: 313926 - DNA, 25 bp, Artificial
  Probe
ggtttcagttatccatgcctccaaa

SEQ ID NO: 313927 - DNA, 25 bp, Artificial
  Probe
catagagccaaagcatttatgcaac

SEQ ID NO: 313928 - DNA, 25 bp, Artificial
  Probe
gcctccaaataaatcctatggctga

SEQ ID NO: 313929 - DNA, 25 bp, Artificial
  Probe
tgcctccaaataaatcctatggctg

SEQ ID NO: 313930 - DNA, 25 bp, Artificial
  Probe
gaaagtcaccattccttggtcttat

SEQ ID NO: 313931 - DNA, 25 bp, Artificial
  Probe
cagtccatctctttctccgtggctt

SEQ ID NO: 313932 - DNA, 25 bp, Artificial
  Probe
agccaaagcatttatgcaacagcaa

SEQ ID NO: 313933 - DNA, 25 bp, Artificial
  Probe
aaagcatttatgcaacagcaaagcc

SEQ ID NO: 313934 - DNA, 25 bp, Artificial
  Probe
caagaaagtcaccattccttggtct

SEQ ID NO: 313935 - DNA, 25 bp, Artificial
  Probe
tatgcaacagcaaagccacaacaga

SEQ ID NO: 313936 - DNA, 25 bp, Artificial
  Probe
gtcttatttcgagaacaagaaccag

SEQ ID NO: 313937 - DNA, 25 bp, Artificial
  Probe
aacgacagcaagcagtcatagagcc

SEQ ID NO: 313938 - DNA, 25 bp, Artificial
  Probe
caccattccttggtcttatttcgag

SEQ ID NO: 313939 - DNA, 25 bp, Artificial
  Probe
gtcatagagccaaagcatttatgca

SEQ ID NO: 313940 - DNA, 25 bp, Artificial
  Probe
tccaaataaatcctatggctgaaag

SEQ ID NO: 313941 - DNA, 25 bp, Artificial
  Probe
gcaagcagtcatagagccaaagcat

SEQ ID NO: 313942 - DNA, 25 bp, Artificial
  Probe
ttggtcttatttcgagaacaagaac

SEQ ID NO: 313943 - DNA, 25 bp, Artificial
  Probe
gagaacaagaaccagtccatctctt

SEQ ID NO: 313944 - DNA, 25 bp, Artificial
  Probe
tcttatttcgagaacaagaaccagt

SEQ ID NO: 313945 - DNA, 25 bp, Artificial
  Probe
cgagaacaagaaccagtccatctct

SEQ ID NO: 313946 - DNA, 25 bp, Artificial
  Probe
acgacagcaagcagtcatagagcca

SEQ ID NO: 313947 - DNA, 25 bp, Artificial
  Probe
gtcaccattccttggtcttatttcg

SEQ ID NO: 313948 - DNA, 25 bp, Artificial
  Probe
tttctccgtggcttactggtttcag

SEQ ID NO: 313949 - DNA, 25 bp, Artificial
  Probe
caaataaatcctatggctgaaagta

SEQ ID NO: 313950 - DNA, 25 bp, Artificial
  Probe
caccaagaaagtcaccattccttgg

SEQ ID NO: 313951 - DNA, 25 bp, Artificial
  Probe
ttctccgtggcttactggtttcagt

SEQ ID NO: 313952 - DNA, 25 bp, Artificial
  Probe
gcttactggtttcagttatccatgc

SEQ ID NO: 313953 - DNA, 25 bp, Artificial
  Probe
ttccttggtcttatttcgagaacaa

SEQ ID NO: 313954 - DNA, 25 bp, Artificial
  Probe
tccgtggcttactggtttcagttat

SEQ ID NO: 313955 - DNA, 25 bp, Artificial
  Probe
ttaacgacagcaagcagtcatagag

SEQ ID NO: 313956 - DNA, 25 bp, Artificial
  Probe
gtccatctctttctccgtggcttac

SEQ ID NO: 313957 - DNA, 25 bp, Artificial
  Probe
ttatgcaacagcaaagccacaacag

SEQ ID NO: 313958 - DNA, 25 bp, Artificial
  Probe
gcatttatgcaacagcaaagccaca

SEQ ID NO: 313959 - DNA, 25 bp, Artificial
  Probe
agagccaaagcatttatgcaacagc

SEQ ID NO: 313960 - DNA, 25 bp, Artificial
  Probe
aagcagtcatagagccaaagcattt

SEQ ID NO: 313961 - DNA, 25 bp, Artificial
  Probe
ttactggtttcagttatccatgcct

SEQ ID NO: 313962 - DNA, 25 bp, Artificial
  Probe
gtggcttactggtttcagttatcca

SEQ ID NO: 313963 - DNA, 25 bp, Artificial
  Probe
cagcaagcagtcatagagccaaagc

SEQ ID NO: 313964 - DNA, 25 bp, Artificial
  Probe
ctggtttcagttatccatgcctcca

SEQ ID NO: 313965 - DNA, 25 bp, Artificial
  Probe
ccaagaaagtcaccattccttggtc

SEQ ID NO: 313966 - DNA, 25 bp, Artificial
  Probe
atttcgagaacaagaaccagtccat

SEQ ID NO: 313967 - DNA, 25 bp, Artificial
  Probe
agtcatagagccaaagcatttatgc

SEQ ID NO: 313968 - DNA, 25 bp, Artificial
  Probe
tcagcaagcagacactcgcgttacc

SEQ ID NO: 313969 - DNA, 25 bp, Artificial
  Probe
tcctgaacactctggaaggctggca

SEQ ID NO: 313970 - DNA, 25 bp, Artificial
  Probe
cctgaacactctggaaggctggcag

SEQ ID NO: 313971 - DNA, 25 bp, Artificial
  Probe
agcaagcagacactcgcgttacctc

SEQ ID NO: 313972 - DNA, 25 bp, Artificial
  Probe
ctcagcaagcagacactcgcgttac

SEQ ID NO: 313973 - DNA, 25 bp, Artificial
  Probe
ctgaacactctggaaggctggcagg

SEQ ID NO: 313974 - DNA, 25 bp, Artificial
  Probe
tctcctgaacactctggaaggctgg

SEQ ID NO: 313975 - DNA, 25 bp, Artificial
  Probe
tggagtggagctctctcctgaacac

SEQ ID NO: 313976 - DNA, 25 bp, Artificial
  Probe
gtggagctctctcctgaacactctg

SEQ ID NO: 313977 - DNA, 25 bp, Artificial
  Probe
agctctctcctgaacactctggaag

SEQ ID NO: 313978 - DNA, 25 bp, Artificial
  Probe
gcaagcagacactcgcgttacctca

SEQ ID NO: 313979 - DNA, 25 bp, Artificial
  Probe
agcctcagcaagcagacactcgcgt

SEQ ID NO: 313980 - DNA, 25 bp, Artificial
  Probe
gagtggagctctctcctgaacactc

SEQ ID NO: 313981 - DNA, 25 bp, Artificial
  Probe
tctctcctgaacactctggaaggct

SEQ ID NO: 313982 - DNA, 25 bp, Artificial
  Probe
ctctctcctgaacactctggaaggc

SEQ ID NO: 313983 - DNA, 25 bp, Artificial
  Probe
gagctctctcctgaacactctggaa

SEQ ID NO: 313984 - DNA, 25 bp, Artificial
  Probe
ctcctgaacactctggaaggctggc

SEQ ID NO: 313985 - DNA, 25 bp, Artificial
  Probe
tgaacactctggaaggctggcaggt

SEQ ID NO: 313986 - DNA, 25 bp, Artificial
  Probe
tggagctctctcctgaacactctgg

SEQ ID NO: 313987 - DNA, 25 bp, Artificial
  Probe
cagcaagcagacactcgcgttacct

SEQ ID NO: 313988 - DNA, 25 bp, Artificial
  Probe
cctcagcaagcagacactcgcgtta

SEQ ID NO: 313989 - DNA, 25 bp, Artificial
  Probe
gcctcagcaagcagacactcgcgtt

SEQ ID NO: 313990 - DNA, 25 bp, Artificial
  Probe
ctctcctgaacactctggaaggctg

SEQ ID NO: 313991 - DNA, 25 bp, Artificial
  Probe
agtggagctctctcctgaacactct

SEQ ID NO: 313992 - DNA, 25 bp, Artificial
  Probe
ttcagcctcagcaagcagacactcg

SEQ ID NO: 313993 - DNA, 25 bp, Artificial
  Probe
gctctctcctgaacactctggaagg

SEQ ID NO: 313994 - DNA, 25 bp, Artificial
  Probe
ggagctctctcctgaacactctgga

SEQ ID NO: 313995 - DNA, 25 bp, Artificial
  Probe
agacaatatggcatccagccctaaa

SEQ ID NO: 313996 - DNA, 25 bp, Artificial
  Probe
atgacccagctcagagcaaccagct

SEQ ID NO: 313997 - DNA, 25 bp, Artificial
  Probe
gccctggcctggtgtgcatcggcca

SEQ ID NO: 313998 - DNA, 25 bp, Artificial
  Probe
cactcggggtaatgcctttgggagc

SEQ ID NO: 313999 - DNA, 25 bp, Artificial
  Probe
atgatgtggcccagcctctcctggc

SEQ ID NO: 314000 - DNA, 25 bp, Artificial
  Probe
ccccctgacatcaggcttggggacg

SEQ ID NO: 314001 - DNA, 25 bp, Artificial
  Probe
tacacccggcagtgccagtcgcttt

SEQ ID NO: 314002 - DNA, 25 bp, Artificial
  Probe
ctggcccaggagatggaagcttgca

SEQ ID NO: 314003 - DNA, 25 bp, Artificial
  Probe
agccctaaagaaccaccaggcgctg

SEQ ID NO: 314004 - DNA, 25 bp, Artificial
  Probe
gttacagccagctggctggcagtgc

SEQ ID NO: 314005 - DNA, 25 bp, Artificial
  Probe
ggctgggcacctcctgattgcatga

SEQ ID NO: 314006 - DNA, 25 bp, Artificial
  Probe
tcagttctaggacttaaagtggaac

SEQ ID NO: 314007 - DNA, 25 bp, Artificial
  Probe
acctgccagctgaggccgggagcac

SEQ ID NO: 314008 - DNA, 25 bp, Artificial
  Probe
ggaacctctgtctgaatctcccaca

SEQ ID NO: 314009 - DNA, 25 bp, Artificial
  Probe
atgccatggccatggggtctgcgac

SEQ ID NO: 314010 - DNA, 25 bp, Artificial
  Probe
atggaagcttgcagctggtagtgcc

SEQ ID NO: 314011 - DNA, 25 bp, Artificial
  Probe
tgcatgggcgctgtgcctcctacac

SEQ ID NO: 314012 - DNA, 25 bp, Artificial
  Probe
tgcatcagcggctctgccagctcaa

SEQ ID NO: 314013 - DNA, 25 bp, Artificial
  Probe
tgcatcggccatcgatgccagcctg

SEQ ID NO: 314014 - DNA, 25 bp, Artificial
  Probe
taggaatcagcctctgctgggctca

SEQ ID NO: 314015 - DNA, 25 bp, Artificial
  Probe
gggcgcagccccagtggtagctaca

SEQ ID NO: 314016 - DNA, 25 bp, Artificial
  Probe
ctggacttgggcaatgatgtggccc

SEQ ID NO: 314017 - DNA, 25 bp, Artificial
  Probe
ccactgaattacctgcagctgagtg

SEQ ID NO: 314018 - DNA, 25 bp, Artificial
  Probe
ggtctgcgacagcagcaggcactgc

SEQ ID NO: 314019 - DNA, 25 bp, Artificial
  Probe
gggaatgtggtctgtctctgctctg

SEQ ID NO: 314020 - DNA, 25 bp, Artificial
  Probe
aggcactgccactgtgacgagggct

SEQ ID NO: 314021 - DNA, 25 bp, Artificial
  Probe
cctgcctggcccaggagatggaagc

SEQ ID NO: 314022 - DNA, 25 bp, Artificial
  Probe
ggagcacaggaatgccgcagcaaat

SEQ ID NO: 314023 - DNA, 25 bp, Artificial
  Probe
tggcactgcctgtggccctggcctg

SEQ ID NO: 314024 - DNA, 25 bp, Artificial
  Probe
ctcccacaaaacactagagaagcag

SEQ ID NO: 314025 - DNA, 25 bp, Artificial
  Probe
cgccttcccacagacgattgcgatt

SEQ ID NO: 314026 - DNA, 25 bp, Artificial
  Probe
tcccacaaaacactagagaagcaga

SEQ ID NO: 314027 - DNA, 25 bp, Artificial
  Probe
gccgggagcacagtgtgcatctgac

SEQ ID NO: 314028 - DNA, 25 bp, Artificial
  Probe
ctgcagctgggtagatctggacttg

SEQ ID NO: 314029 - DNA, 25 bp, Artificial
  Probe
ctccaaacagccaacactcggggta

SEQ ID NO: 314030 - DNA, 25 bp, Artificial
  Probe
cctaggagatagctctcagtgcccc

SEQ ID NO: 314031 - DNA, 25 bp, Artificial
  Probe
ccaatatagggcagcccaatccggt

SEQ ID NO: 314032 - DNA, 25 bp, Artificial
  Probe
tgctcctcagcctcctgttgttatt

SEQ ID NO: 314033 - DNA, 25 bp, Artificial
  Probe
ctcctgattgcatgacccagctcag

SEQ ID NO: 314034 - DNA, 25 bp, Artificial
  Probe
cctgctcagttctaggacttaaagt

SEQ ID NO: 314035 - DNA, 25 bp, Artificial
  Probe
ttgtgggcaactacagtgccagtgg

SEQ ID NO: 314036 - DNA, 25 bp, Artificial
  Probe
gacttaaagtggaacctctgtctga

SEQ ID NO: 314037 - DNA, 25 bp, Artificial
  Probe
atgcatgggcgctgtgcctcctaca

SEQ ID NO: 314038 - DNA, 25 bp, Artificial
  Probe
aatatggcatccagccctaaagaac

SEQ ID NO: 314039 - DNA, 25 bp, Artificial
  Probe
gtgccagctactggtaccgtgcccg

SEQ ID NO: 314040 - DNA, 25 bp, Artificial
  Probe
gctggtagtgccttccaggcctgcc

SEQ ID NO: 314041 - DNA, 25 bp, Artificial
  Probe
atccgcccatgagaacgccgtgcag

SEQ ID NO: 314042 - DNA, 25 bp, Artificial
  Probe
aggcgagtctccagggactaactgg

SEQ ID NO: 314043 - DNA, 25 bp, Artificial
  Probe
ctctgaaaaatctccggcccttgta

SEQ ID NO: 314044 - DNA, 25 bp, Artificial
  Probe
ggccattccagctctgaaaaatctc

SEQ ID NO: 314045 - DNA, 25 bp, Artificial
  Probe
agaagaagtccattctcatgaagca

SEQ ID NO: 314046 - DNA, 25 bp, Artificial
  Probe
tgcatgagactcacccatgctcagg

SEQ ID NO: 314047 - DNA, 25 bp, Artificial
  Probe
cggcccttgtaattattgttgttat

SEQ ID NO: 314048 - DNA, 25 bp, Artificial
  Probe
gcagtcgaggtgcagacgtaccagc

SEQ ID NO: 314049 - DNA, 25 bp, Artificial
  Probe
tgagactcacccatgctcaggccat

SEQ ID NO: 314050 - DNA, 25 bp, Artificial
  Probe
agagcgacctggatcaacccgcctt

SEQ ID NO: 314051 - DNA, 25 bp, Artificial
  Probe
agcaacacagcgacaaggcgagtct

SEQ ID NO: 314052 - DNA, 25 bp, Artificial
  Probe
tatggtacctagtccggtggagacg

SEQ ID NO: 314053 - DNA, 25 bp, Artificial
  Probe
ctgcatgagactcacccatgctcag

SEQ ID NO: 314054 - DNA, 25 bp, Artificial
  Probe
cagctggtagagatgaccggcttga

SEQ ID NO: 314055 - DNA, 25 bp, Artificial
  Probe
ttcgcactccagagcgacctggatc

SEQ ID NO: 314056 - DNA, 25 bp, Artificial
  Probe
ggctccctaggcaactcctctggta

SEQ ID NO: 314057 - DNA, 25 bp, Artificial
  Probe
cagcgagttcgcactccagagcgac

SEQ ID NO: 314058 - DNA, 25 bp, Artificial
  Probe
cctctggtagcgacgtgacctctct

SEQ ID NO: 314059 - DNA, 25 bp, Artificial
  Probe
tacctagtccggtggagacgtgaga

SEQ ID NO: 314060 - DNA, 25 bp, Artificial
  Probe
cagcgcagtcgaggtgcagacgtac

SEQ ID NO: 314061 - DNA, 25 bp, Artificial
  Probe
gcagcagcaacacagcgacaaggcg

SEQ ID NO: 314062 - DNA, 25 bp, Artificial
  Probe
ccgcccatgagaacgccgtgcaggg

SEQ ID NO: 314063 - DNA, 25 bp, Artificial
  Probe
tccgagtcaggctccctaggcaact

SEQ ID NO: 314064 - DNA, 25 bp, Artificial
  Probe
cctagtccggtggagacgtgagaca

SEQ ID NO: 314065 - DNA, 25 bp, Artificial
  Probe
ccagggactaactgggacgctcctg

SEQ ID NO: 314066 - DNA, 25 bp, Artificial
  Probe
acgtgacctctctgtcttcgcagct

SEQ ID NO: 314067 - DNA, 25 bp, Artificial
  Probe
gagcgacctggatcaacccgccttt

SEQ ID NO: 314068 - DNA, 25 bp, Artificial
  Probe
aactcctctggtagcgacgtgacct

SEQ ID NO: 314069 - DNA, 25 bp, Artificial
  Probe
ccccaacagtatggtacctagtccg

SEQ ID NO: 314070 - DNA, 25 bp, Artificial
  Probe
gagtctccagggactaactgggacg

SEQ ID NO: 314071 - DNA, 25 bp, Artificial
  Probe
aagctctcagcgagttcgcactcca

SEQ ID NO: 314072 - DNA, 25 bp, Artificial
  Probe
cagcagcaacacagcgacaaggcga

SEQ ID NO: 314073 - DNA, 25 bp, Artificial
  Probe
ccattctcatgaagcagctacagca

SEQ ID NO: 314074 - DNA, 25 bp, Artificial
  Probe
ctggtctccttctccgagtcaggct

SEQ ID NO: 314075 - DNA, 25 bp, Artificial
  Probe
ttccagctctgaaaaatctccggcc

SEQ ID NO: 314076 - DNA, 25 bp, Artificial
  Probe
tggaaagctctcagcgagttcgcac

SEQ ID NO: 314077 - DNA, 25 bp, Artificial
  Probe
gagactcacccatgctcaggccatt

SEQ ID NO: 314078 - DNA, 25 bp, Artificial
  Probe
cattccagctctgaaaaatctccgg

SEQ ID NO: 314079 - DNA, 25 bp, Artificial
  Probe
cagctctgaaaaatctccggccctt

SEQ ID NO: 314080 - DNA, 25 bp, Artificial
  Probe
catgctcaggccattccagctctga

SEQ ID NO: 314081 - DNA, 25 bp, Artificial
  Probe
gccgccctggaaagctctcagcgag

SEQ ID NO: 314082 - DNA, 25 bp, Artificial
  Probe
aacacagcgacaaggcgagtctcca

SEQ ID NO: 314083 - DNA, 25 bp, Artificial
  Probe
agcgacaaggcgagtctccagggac

SEQ ID NO: 314084 - DNA, 25 bp, Artificial
  Probe
gcctttcaacagctggtctccttct

SEQ ID NO: 314085 - DNA, 25 bp, Artificial
  Probe
aatctccggcccttgtaattattgt

SEQ ID NO: 314086 - DNA, 25 bp, Artificial
  Probe
tttcaacagctggtctccttctccg

SEQ ID NO: 314087 - DNA, 25 bp, Artificial
  Probe
accttgctgtagtgcacatgctcag

SEQ ID NO: 314088 - DNA, 25 bp, Artificial
  Probe
gagcccccaagagtcaccagaggac

SEQ ID NO: 314089 - DNA, 25 bp, Artificial
  Probe
cctttccataaggttttcaagccag

SEQ ID NO: 314090 - DNA, 25 bp, Artificial
  Probe
tcgtgctcgtgctcgggacctcaca

SEQ ID NO: 314091 - DNA, 25 bp, Artificial
  Probe
agttagggtttctgcggctctgata

SEQ ID NO: 314092 - DNA, 25 bp, Artificial
  Probe
tgctgctgatctggaacagccaaac

SEQ ID NO: 314093 - DNA, 25 bp, Artificial
  Probe
cctcacagggattcccagttctgtt

SEQ ID NO: 314094 - DNA, 25 bp, Artificial
  Probe
acagggattcccagttctgttttgc

SEQ ID NO: 314095 - DNA, 25 bp, Artificial
  Probe
ccatcataggcctaacattggctgc

SEQ ID NO: 314096 - DNA, 25 bp, Artificial
  Probe
tgcctcagcaagagcccccaagagt

SEQ ID NO: 314097 - DNA, 25 bp, Artificial
  Probe
tcgggacctcacagggattcccagt

SEQ ID NO: 314098 - DNA, 25 bp, Artificial
  Probe
caccttgggtacctttggtatctgg

SEQ ID NO: 314099 - DNA, 25 bp, Artificial
  Probe
aagcagcttatctgcctgagtgggt

SEQ ID NO: 314100 - DNA, 25 bp, Artificial
  Probe
tgcatctggagtgctgtgtcacgga

SEQ ID NO: 314101 - DNA, 25 bp, Artificial
  Probe
cctaacattggctgcatctggagtg

SEQ ID NO: 314102 - DNA, 25 bp, Artificial
  Probe
tgctgtagtgcacatgctcagaggg

SEQ ID NO: 314103 - DNA, 25 bp, Artificial
  Probe
ttgctgtagtgcacatgctcagagg

SEQ ID NO: 314104 - DNA, 25 bp, Artificial
  Probe
gcccacactgttagccatcataggc

SEQ ID NO: 314105 - DNA, 25 bp, Artificial
  Probe
cagttctgttttgcatgcttctcag

SEQ ID NO: 314106 - DNA, 25 bp, Artificial
  Probe
atgcctcagcaagagcccccaagag

SEQ ID NO: 314107 - DNA, 25 bp, Artificial
  Probe
gtcaccagaggaccttgctgtagtg

SEQ ID NO: 314108 - DNA, 25 bp, Artificial
  Probe
cattgctgctgatctggaacagcca

SEQ ID NO: 314109 - DNA, 25 bp, Artificial
  Probe
ggatactgtttacctggctaacttt

SEQ ID NO: 314110 - DNA, 25 bp, Artificial
  Probe
ccgtcatcaccttgggtacctttgg

SEQ ID NO: 314111 - DNA, 25 bp, Artificial
  Probe
gcaagagcccccaagagtcaccaga

SEQ ID NO: 314112 - DNA, 25 bp, Artificial
  Probe
ataaggttttcaagccagaagcagc

SEQ ID NO: 314113 - DNA, 25 bp, Artificial
  Probe
ctgatctggaacagccaaacagagg

SEQ ID NO: 314114 - DNA, 25 bp, Artificial
  Probe
gacctcacagggattcccagttctg

SEQ ID NO: 314115 - DNA, 25 bp, Artificial
  Probe
gttgttgtcgtgctcgtgctcgtgc

SEQ ID NO: 314116 - DNA, 25 bp, Artificial
  Probe
cactgttagccatcataggcctaac

SEQ ID NO: 314117 - DNA, 25 bp, Artificial
  Probe
gttagccatcataggcctaacattg

SEQ ID NO: 314118 - DNA, 25 bp, Artificial
  Probe
taggcctaacattggctgcatctgg

SEQ ID NO: 314119 - DNA, 25 bp, Artificial
  Probe
ggtttctgcggctctgataaaacac

SEQ ID NO: 314120 - DNA, 25 bp, Artificial
  Probe
gctcgtgctcgtgctcgggacctca

SEQ ID NO: 314121 - DNA, 25 bp, Artificial
  Probe
ggtactttgagctcctccatgccca

SEQ ID NO: 314122 - DNA, 25 bp, Artificial
  Probe
tggtatctgggctgcctatctcaca

SEQ ID NO: 314123 - DNA, 25 bp, Artificial
  Probe
gtgggcattgctgctgatctggaac

SEQ ID NO: 314124 - DNA, 25 bp, Artificial
  Probe
tatgttgttgtcgtgctcgtgctcg

SEQ ID NO: 314125 - DNA, 25 bp, Artificial
  Probe
tgtttacctggctaactttacccag

SEQ ID NO: 314126 - DNA, 25 bp, Artificial
  Probe
gtgtagttagggtttctgcggctct

SEQ ID NO: 314127 - DNA, 25 bp, Artificial
  Probe
catcaccttgggtacctttggtatc

SEQ ID NO: 314128 - DNA, 25 bp, Artificial
  Probe
ctcgtgctcgggacctcacagggat

SEQ ID NO: 314129 - DNA, 25 bp, Artificial
  Probe
acactgttagccatcataggcctaa

SEQ ID NO: 314130 - DNA, 25 bp, Artificial
  Probe
cacagcctggacttagctcagcagc

SEQ ID NO: 314131 - DNA, 25 bp, Artificial
  Probe
ggttttcaagccagaagcagcttat

SEQ ID NO: 314132 - DNA, 25 bp, Artificial
  Probe
atgcccacactgttagccatcatag

SEQ ID NO: 314133 - DNA, 25 bp, Artificial
  Probe
tggcttgggcccaacaagtgatgga

SEQ ID NO: 314134 - DNA, 25 bp, Artificial
  Probe
gcttaggtacaagtcacctattcaa

SEQ ID NO: 314135 - DNA, 25 bp, Artificial
  Probe
ctttctgggggcttctgattcagac

SEQ ID NO: 314136 - DNA, 25 bp, Artificial
  Probe
actgaaatcaacacctaatgatgtg

SEQ ID NO: 314137 - DNA, 25 bp, Artificial
  Probe
gtcacctattcaatggtttccttga

SEQ ID NO: 314138 - DNA, 25 bp, Artificial
  Probe
aggtgtcaaccaaggtctagaggag

SEQ ID NO: 314139 - DNA, 25 bp, Artificial
  Probe
ggggcttctgattcagaccctaggt

SEQ ID NO: 314140 - DNA, 25 bp, Artificial
  Probe
acttctctctgttaaaaatgagatg

SEQ ID NO: 314141 - DNA, 25 bp, Artificial
  Probe
taggtgtcaaccaaggtctagagga

SEQ ID NO: 314142 - DNA, 25 bp, Artificial
  Probe
cgcttaggtacaagtcacctattca

SEQ ID NO: 314143 - DNA, 25 bp, Artificial
  Probe
tgaacttctctctgttaaaaatgag

SEQ ID NO: 314144 - DNA, 25 bp, Artificial
  Probe
gaaatcaacacctaatgatgtgata

SEQ ID NO: 314145 - DNA, 25 bp, Artificial
  Probe
ttgaggtcgcttaggtacaagtcac

SEQ ID NO: 314146 - DNA, 25 bp, Artificial
  Probe
gcttctgattcagaccctaggtgtc

SEQ ID NO: 314147 - DNA, 25 bp, Artificial
  Probe
ataatgagtggcttgggcccaacaa

SEQ ID NO: 314148 - DNA, 25 bp, Artificial
  Probe
tgattcagaccctaggtgtcaacca

SEQ ID NO: 314149 - DNA, 25 bp, Artificial
  Probe
gcttgggcccaacaagtgatggatc

SEQ ID NO: 314150 - DNA, 25 bp, Artificial
  Probe
cttctgattcagaccctaggtgtca

SEQ ID NO: 314151 - DNA, 25 bp, Artificial
  Probe
ggcttctgattcagaccctaggtgt

SEQ ID NO: 314152 - DNA, 25 bp, Artificial
  Probe
ttaggtacaagtcacctattcaatg

SEQ ID NO: 314153 - DNA, 25 bp, Artificial
  Probe
ttctgggggcttctgattcagaccc

SEQ ID NO: 314154 - DNA, 25 bp, Artificial
  Probe
gtcaaccaaggtctagaggagaatg

SEQ ID NO: 314155 - DNA, 25 bp, Artificial
  Probe
ggcccaacaagtgatggatctgtag

SEQ ID NO: 314156 - DNA, 25 bp, Artificial
  Probe
ggtacaagtcacctattcaatggtt

SEQ ID NO: 314157 - DNA, 25 bp, Artificial
  Probe
tgggcccaacaagtgatggatctgt

SEQ ID NO: 314158 - DNA, 25 bp, Artificial
  Probe
tgaggtcgcttaggtacaagtcacc

SEQ ID NO: 314159 - DNA, 25 bp, Artificial
  Probe
ctgggggcttctgattcagacccta

SEQ ID NO: 314160 - DNA, 25 bp, Artificial
  Probe
gaacttctctctgttaaaaatgaga

SEQ ID NO: 314161 - DNA, 25 bp, Artificial
  Probe
tcagaccctaggtgtcaaccaaggt

SEQ ID NO: 314162 - DNA, 25 bp, Artificial
  Probe
tgggggcttctgattcagaccctag

SEQ ID NO: 314163 - DNA, 25 bp, Artificial
  Probe
taatgagtggcttgggcccaacaag

SEQ ID NO: 314164 - DNA, 25 bp, Artificial
  Probe
ggtcgcttaggtacaagtcacctat

SEQ ID NO: 314165 - DNA, 25 bp, Artificial
  Probe
ctttgaggtcgcttaggtacaagtc

SEQ ID NO: 314166 - DNA, 25 bp, Artificial
  Probe
gtacaagtcacctattcaatggttt

SEQ ID NO: 314167 - DNA, 25 bp, Artificial
  Probe
gaccctaggtgtcaaccaaggtcta

SEQ ID NO: 314168 - DNA, 25 bp, Artificial
  Probe
cagaccctaggtgtcaaccaaggtc

SEQ ID NO: 314169 - DNA, 25 bp, Artificial
  Probe
aatggtttccttgaacttctctctg

SEQ ID NO: 314170 - DNA, 25 bp, Artificial
  Probe
ccaacaagtgatggatctgtagtta

SEQ ID NO: 314171 - DNA, 25 bp, Artificial
  Probe
ccctaggtgtcaaccaaggtctaga

SEQ ID NO: 314172 - DNA, 25 bp, Artificial
  Probe
tcaaccaaggtctagaggagaatga

SEQ ID NO: 314173 - DNA, 25 bp, Artificial
  Probe
ggcttgggcccaacaagtgatggat

SEQ ID NO: 314174 - DNA, 25 bp, Artificial
  Probe
atggtttccttgaacttctctctgt

SEQ ID NO: 314175 - DNA, 25 bp, Artificial
  Probe
ggtttccttgaacttctctctgtta

SEQ ID NO: 314176 - DNA, 25 bp, Artificial
  Probe
gcccaacaagtgatggatctgtagt

SEQ ID NO: 314177 - DNA, 25 bp, Artificial
  Probe
caaccaaggtctagaggagaatgag

SEQ ID NO: 314178 - DNA, 25 bp, Artificial
  Probe
ggaactttgaggtcgcttaggtaca

SEQ ID NO: 314179 - DNA, 25 bp, Artificial
  Probe
ttcacgggtacgaatttatccaaga

SEQ ID NO: 314180 - DNA, 25 bp, Artificial
  Probe
gactctttgaaacactatgaatgtt

SEQ ID NO: 314181 - DNA, 25 bp, Artificial
  Probe
gagctgcgtcaaactcattataaca

SEQ ID NO: 314182 - DNA, 25 bp, Artificial
  Probe
ctgatttctagacttgtggacagtt

SEQ ID NO: 314183 - DNA, 25 bp, Artificial
  Probe
tgcctgtaacatgtgtagggaaaac

SEQ ID NO: 314184 - DNA, 25 bp, Artificial
  Probe
gtgtttcacatgcaaccatgttact

SEQ ID NO: 314185 - DNA, 25 bp, Artificial
  Probe
ccaatcttacagtgattgataaatg

SEQ ID NO: 314186 - DNA, 25 bp, Artificial
  Probe
acccacagaaaaatagtgtggaaat

SEQ ID NO: 314187 - DNA, 25 bp, Artificial
  Probe
accacgtaataaacaggaagaactg

SEQ ID NO: 314188 - DNA, 25 bp, Artificial
  Probe
cggtttgaagccttgttatgaagcc

SEQ ID NO: 314189 - DNA, 25 bp, Artificial
  Probe
cagacatctgtagagatgagaacta

SEQ ID NO: 314190 - DNA, 25 bp, Artificial
  Probe
agcaaatccaatcttacagtgattg

SEQ ID NO: 314191 - DNA, 25 bp, Artificial
  Probe
tataaaggtcgcaaaccatttgcag

SEQ ID NO: 314192 - DNA, 25 bp, Artificial
  Probe
attggtctggccagcgcctctaact

SEQ ID NO: 314193 - DNA, 25 bp, Artificial
  Probe
ccccctgtggactctttgaaacact

SEQ ID NO: 314194 - DNA, 25 bp, Artificial
  Probe
aatgcttattgactcaagttcactg

SEQ ID NO: 314195 - DNA, 25 bp, Artificial
  Probe
gggaaattcaccaaacaaactgatt

SEQ ID NO: 314196 - DNA, 25 bp, Artificial
  Probe
cctgtaacatgtgtagggaaaactg

SEQ ID NO: 314197 - DNA, 25 bp, Artificial
  Probe
tacagcgattatcaatgggaaattc

SEQ ID NO: 314198 - DNA, 25 bp, Artificial
  Probe
agcactaatacattgggaaatacgt

SEQ ID NO: 314199 - DNA, 25 bp, Artificial
  Probe
ttgccagacaaggaacttagttcct

SEQ ID NO: 314200 - DNA, 25 bp, Artificial
  Probe
ttggatgaacccacagaaaaatagt

SEQ ID NO: 314201 - DNA, 25 bp, Artificial
  Probe
atgggaaattcaccaaacaaactga

SEQ ID NO: 314202 - DNA, 25 bp, Artificial
  Probe
tacgaatttatccaagaccgattgg

SEQ ID NO: 314203 - DNA, 25 bp, Artificial
  Probe
gccatctgcagacatctgtagagat

SEQ ID NO: 314204 - DNA, 25 bp, Artificial
  Probe
cgtttgtaatgttgtgcctgtaaca

SEQ ID NO: 314205 - DNA, 25 bp, Artificial
  Probe
catgtgtgtctacatgagtgtatac

SEQ ID NO: 314206 - DNA, 25 bp, Artificial
  Probe
ttttgaggtgtttttacacattgcc

SEQ ID NO: 314207 - DNA, 25 bp, Artificial
  Probe
ggccatgctgtgtgtcctttttata

SEQ ID NO: 314208 - DNA, 25 bp, Artificial
  Probe
tgtatagtctcctctttggggaaaa

SEQ ID NO: 314209 - DNA, 25 bp, Artificial
  Probe
ccgaacttacctttgtgacacttag

SEQ ID NO: 314210 - DNA, 25 bp, Artificial
  Probe
taagcactaatacattgggaaatac

SEQ ID NO: 314211 - DNA, 25 bp, Artificial
  Probe
gccctgtgtgattggatgaacccac

SEQ ID NO: 314212 - DNA, 25 bp, Artificial
  Probe
atgtgttactgaactacccagtttt

SEQ ID NO: 314213 - DNA, 25 bp, Artificial
  Probe
ggaaatcagagctgcgtcaaactca

SEQ ID NO: 314214 - DNA, 25 bp, Artificial
  Probe
atctgacagaatgcagtgacacttt

SEQ ID NO: 314215 - DNA, 25 bp, Artificial
  Probe
gaatgcagtgacactttcctgttgt

SEQ ID NO: 314216 - DNA, 25 bp, Artificial
  Probe
gtgtatacacacttgaaaatgctta

SEQ ID NO: 314217 - DNA, 25 bp, Artificial
  Probe
tgtgtgtctacatgagtgtatacac

SEQ ID NO: 314218 - DNA, 25 bp, Artificial
  Probe
agaccgattggaatccagacaaaca

SEQ ID NO: 314219 - DNA, 25 bp, Artificial
  Probe
acgtttgtaatgttgtgcctgtaac

SEQ ID NO: 314220 - DNA, 25 bp, Artificial
  Probe
ggagttgcttggatgtatagtctcc

SEQ ID NO: 314221 - DNA, 25 bp, Artificial
  Probe
ccatttgcagttggagttgcttgga

SEQ ID NO: 314222 - DNA, 25 bp, Artificial
  Probe
catgagtgtatacacacttgaaaat

SEQ ID NO: 314223 - DNA, 25 bp, Artificial
  Probe
caaactgatttctagacttgtggac

SEQ ID NO: 314224 - DNA, 25 bp, Artificial
  Probe
tgttttcactgtaaattcttgatgc

SEQ ID NO: 314225 - DNA, 25 bp, Artificial
  Probe
acagttgccaataacattgtttccg

SEQ ID NO: 314226 - DNA, 25 bp, Artificial
  Probe
ctaagagcagacactgctctcccaa

SEQ ID NO: 314227 - DNA, 25 bp, Artificial
  Probe
taacttgggcatctaatcttgtcac

SEQ ID NO: 314228 - DNA, 25 bp, Artificial
  Probe
gcacctgcaggcactacactcatgt

SEQ ID NO: 314229 - DNA, 25 bp, Artificial
  Probe
agtctatgggcataccaccctgtac

SEQ ID NO: 314230 - DNA, 25 bp, Artificial
  Probe
ttctggcacctgcaggcactacact

SEQ ID NO: 314231 - DNA, 25 bp, Artificial
  Probe
gcatctaatcttgtcaccaaagtag

SEQ ID NO: 314232 - DNA, 25 bp, Artificial
  Probe
gcagacactgctctcccaaaggatg

SEQ ID NO: 314233 - DNA, 25 bp, Artificial
  Probe
caggcactacactcatgtgcacaga

SEQ ID NO: 314234 - DNA, 25 bp, Artificial
  Probe
agctaagagcagacactgctctccc

SEQ ID NO: 314235 - DNA, 25 bp, Artificial
  Probe
acttcggttttgtggccttcagccg

SEQ ID NO: 314236 - DNA, 25 bp, Artificial
  Probe
accaaagtagccaggcttgataagg

SEQ ID NO: 314237 - DNA, 25 bp, Artificial
  Probe
cactgctctcccaaaggatgggagt

SEQ ID NO: 314238 - DNA, 25 bp, Artificial
  Probe
cctaaacgcataattaagtaagttg

SEQ ID NO: 314239 - DNA, 25 bp, Artificial
  Probe
ggttttgtggccttcagccgttctc

SEQ ID NO: 314240 - DNA, 25 bp, Artificial
  Probe
atggaattatcctggggctgcagaa

SEQ ID NO: 314241 - DNA, 25 bp, Artificial
  Probe
gctaacttgggcatctaatcttgtc

SEQ ID NO: 314242 - DNA, 25 bp, Artificial
  Probe
ctgctctcccaaaggatgggagttt

SEQ ID NO: 314243 - DNA, 25 bp, Artificial
  Probe
gtgcacagacacacctaaacgcata

SEQ ID NO: 314244 - DNA, 25 bp, Artificial
  Probe
gtttgagcccagagtctacatccca

SEQ ID NO: 314245 - DNA, 25 bp, Artificial
  Probe
cctttggctaacttgggcatctaat

SEQ ID NO: 314246 - DNA, 25 bp, Artificial
  Probe
tttgtggccttcagccgttctcact

SEQ ID NO: 314247 - DNA, 25 bp, Artificial
  Probe
gcaggcactacactcatgtgcacag

SEQ ID NO: 314248 - DNA, 25 bp, Artificial
  Probe
gagtttgagcccagagtctacatcc

SEQ ID NO: 314249 - DNA, 25 bp, Artificial
  Probe
ctaatcttgtcaccaaagtagccag

SEQ ID NO: 314250 - DNA, 25 bp, Artificial
  Probe
tgagcccagagtctacatcccataa

SEQ ID NO: 314251 - DNA, 25 bp, Artificial
  Probe
ttaaatggaattatcctggggctgc

SEQ ID NO: 314252 - DNA, 25 bp, Artificial
  Probe
aatcttgtcaccaaagtagccaggc

SEQ ID NO: 314253 - DNA, 25 bp, Artificial
  Probe
gagcccagagtctacatcccataac

SEQ ID NO: 314254 - DNA, 25 bp, Artificial
  Probe
caataacattgtttccgaaggatcc

SEQ ID NO: 314255 - DNA, 25 bp, Artificial
  Probe
tttccgaaggatccatcgccctctt

SEQ ID NO: 314256 - DNA, 25 bp, Artificial
  Probe
aagtctatgggcataccaccctgta

SEQ ID NO: 314257 - DNA, 25 bp, Artificial
  Probe
tctcccaaaggatgggagtttgagc

SEQ ID NO: 314258 - DNA, 25 bp, Artificial
  Probe
ctgtacatgcccaagctcatctaga

SEQ ID NO: 314259 - DNA, 25 bp, Artificial
  Probe
tacatgcccaagctcatctagaagt

SEQ ID NO: 314260 - DNA, 25 bp, Artificial
  Probe
ttcctttggctaacttgggcatcta

SEQ ID NO: 314261 - DNA, 25 bp, Artificial
  Probe
gttgccaataacattgtttccgaag

SEQ ID NO: 314262 - DNA, 25 bp, Artificial
  Probe
taaataagtctatgggcataccacc

SEQ ID NO: 314263 - DNA, 25 bp, Artificial
  Probe
tattcctttggctaacttgggcatc

SEQ ID NO: 314264 - DNA, 25 bp, Artificial
  Probe
aatacttcggttttgtggccttcag

SEQ ID NO: 314265 - DNA, 25 bp, Artificial
  Probe
tcatgtgcacagacacacctaaacg

SEQ ID NO: 314266 - DNA, 25 bp, Artificial
  Probe
ctattattcctttggctaacttggg

SEQ ID NO: 314267 - DNA, 25 bp, Artificial
  Probe
acattgtttccgaaggatccatcgc

SEQ ID NO: 314268 - DNA, 25 bp, Artificial
  Probe
tgtcaccaaagtagccaggcttgat

SEQ ID NO: 314269 - DNA, 25 bp, Artificial
  Probe
gagcagacactgctctcccaaagga

SEQ ID NO: 314270 - DNA, 25 bp, Artificial
  Probe
cctgcaggcactacactcatgtgca

SEQ ID NO: 314271 - DNA, 25 bp, Artificial
  Probe
cttaaggttgcttccctagctggga

SEQ ID NO: 314272 - DNA, 25 bp, Artificial
  Probe
cctcacctcagaggatgaagactaa

SEQ ID NO: 314273 - DNA, 25 bp, Artificial
  Probe
ttgcttccctagctgggaagacgtg

SEQ ID NO: 314274 - DNA, 25 bp, Artificial
  Probe
tgctttagccactggccgtgagaca

SEQ ID NO: 314275 - DNA, 25 bp, Artificial
  Probe
tattaggctcatctgttccccacag

SEQ ID NO: 314276 - DNA, 25 bp, Artificial
  Probe
gggatggcccttcacagtgaatgga

SEQ ID NO: 314277 - DNA, 25 bp, Artificial
  Probe
agccagatttttcaaagttgtttct

SEQ ID NO: 314278 - DNA, 25 bp, Artificial
  Probe
ctcacctcagaggatgaagactaat

SEQ ID NO: 314279 - DNA, 25 bp, Artificial
  Probe
gagtagctccaatgccacctctcag

SEQ ID NO: 314280 - DNA, 25 bp, Artificial
  Probe
tccctagctgggaagacgtgactgg

SEQ ID NO: 314281 - DNA, 25 bp, Artificial
  Probe
tttagagcgcccatcagaagagtcc

SEQ ID NO: 314282 - DNA, 25 bp, Artificial
  Probe
gaaatggctatcagccataggctgg

SEQ ID NO: 314283 - DNA, 25 bp, Artificial
  Probe
actggccgtgagacacagcccacag

SEQ ID NO: 314284 - DNA, 25 bp, Artificial
  Probe
tccacttcagaagcacttgcccttg

SEQ ID NO: 314285 - DNA, 25 bp, Artificial
  Probe
aggctcatctgttccccacaggaaa

SEQ ID NO: 314286 - DNA, 25 bp, Artificial
  Probe
ctgtgatctacacatcatctcgatg

SEQ ID NO: 314287 - DNA, 25 bp, Artificial
  Probe
gaattccgtcactgcctctatgcca

SEQ ID NO: 314288 - DNA, 25 bp, Artificial
  Probe
ccccacaggaaaacctaaatagatg

SEQ ID NO: 314289 - DNA, 25 bp, Artificial
  Probe
gccagggctctggagcccagttccg

SEQ ID NO: 314290 - DNA, 25 bp, Artificial
  Probe
ggtctggggagtagctccaatgcca

SEQ ID NO: 314291 - DNA, 25 bp, Artificial
  Probe
ggaggctcgccacaagctctggcgc

SEQ ID NO: 314292 - DNA, 25 bp, Artificial
  Probe
attttaatgctttagccactggccg

SEQ ID NO: 314293 - DNA, 25 bp, Artificial
  Probe
ggcgcccatctgcaaacacctttat

SEQ ID NO: 314294 - DNA, 25 bp, Artificial
  Probe
tgccatcaggccagggctctggagc

SEQ ID NO: 314295 - DNA, 25 bp, Artificial
  Probe
cagtccaagcctccttagagcttct

SEQ ID NO: 314296 - DNA, 25 bp, Artificial
  Probe
gcttggctcagacaccacaaatatt

SEQ ID NO: 314297 - DNA, 25 bp, Artificial
  Probe
taaaggcagagcaagccagattttt

SEQ ID NO: 314298 - DNA, 25 bp, Artificial
  Probe
cttcacagtgaatggagcaggagag

SEQ ID NO: 314299 - DNA, 25 bp, Artificial
  Probe
tgcggccccgagaagggaccagttt

SEQ ID NO: 314300 - DNA, 25 bp, Artificial
  Probe
gtcctcggggccacactttagagcg

SEQ ID NO: 314301 - DNA, 25 bp, Artificial
  Probe
gccacactttagagcgcccatcaga

SEQ ID NO: 314302 - DNA, 25 bp, Artificial
  Probe
ggacttaaggttgcttccctagctg

SEQ ID NO: 314303 - DNA, 25 bp, Artificial
  Probe
tggcgcccatctgcaaacaccttta

SEQ ID NO: 314304 - DNA, 25 bp, Artificial
  Probe
gtgcctgcagggaggctcgccacaa

SEQ ID NO: 314305 - DNA, 25 bp, Artificial
  Probe
atcatctcgatggttctgtaacggg

SEQ ID NO: 314306 - DNA, 25 bp, Artificial
  Probe
catagacagttctgcggccccgaga

SEQ ID NO: 314307 - DNA, 25 bp, Artificial
  Probe
acgtgactgggaagaccccgtgatg

SEQ ID NO: 314308 - DNA, 25 bp, Artificial
  Probe
tagatggccttaacaatataaaggc

SEQ ID NO: 314309 - DNA, 25 bp, Artificial
  Probe
atctcttccggcttaactctgggtg

SEQ ID NO: 314310 - DNA, 25 bp, Artificial
  Probe
ttagacaaaacacgaagtcgctttg

SEQ ID NO: 314311 - DNA, 25 bp, Artificial
  Probe
tctgcggccccgagaagggaccagt

SEQ ID NO: 314312 - DNA, 25 bp, Artificial
  Probe
ctccatcccatagacagttctgcgg

SEQ ID NO: 314313 - DNA, 25 bp, Artificial
  Probe
gccgtgagacacagcccacagtctg

SEQ ID NO: 314314 - DNA, 25 bp, Artificial
  Probe
cccacaggaaaacctaaatagatgg

SEQ ID NO: 314315 - DNA, 25 bp, Artificial
  Probe
atggccttaacaatataaaggcaga

SEQ ID NO: 314316 - DNA, 25 bp, Artificial
  Probe
ggctgtgcagacactgcaggcaccc

SEQ ID NO: 314317 - DNA, 25 bp, Artificial
  Probe
tagcactgtgttgtgtaaagtcaac

SEQ ID NO: 314318 - DNA, 25 bp, Artificial
  Probe
tcttcagcgataatctcaagtgcaa

SEQ ID NO: 314319 - DNA, 25 bp, Artificial
  Probe
ttgtctgtcctgtggagcaggcagt

SEQ ID NO: 314320 - DNA, 25 bp, Artificial
  Probe
tttcttagcatttattagcactgtg

SEQ ID NO: 314321 - DNA, 25 bp, Artificial
  Probe
ttgtgtaaagtcaacccagaaaaat

SEQ ID NO: 314322 - DNA, 25 bp, Artificial
  Probe
attgtctgtcctgtggagcaggcag

SEQ ID NO: 314323 - DNA, 25 bp, Artificial
  Probe
cttcagcgataatctcaagtgcaaa

SEQ ID NO: 314324 - DNA, 25 bp, Artificial
  Probe
ttcttcagcgataatctcaagtgca

SEQ ID NO: 314325 - DNA, 25 bp, Artificial
  Probe
gcgataatctcaagtgcaaacatct

SEQ ID NO: 314326 - DNA, 25 bp, Artificial
  Probe
ggatcccttacttgggtggaaatgg

SEQ ID NO: 314327 - DNA, 25 bp, Artificial
  Probe
tggatcccttacttgggtggaaatg

SEQ ID NO: 314328 - DNA, 25 bp, Artificial
  Probe
tgtgtaaagtcaacccagaaaaatt

SEQ ID NO: 314329 - DNA, 25 bp, Artificial
  Probe
caattggatcccttacttgggtgga

SEQ ID NO: 314330 - DNA, 25 bp, Artificial
  Probe
cagcgataatctcaagtgcaaacat

SEQ ID NO: 314331 - DNA, 25 bp, Artificial
  Probe
gagtttcttagcatttattagcact

SEQ ID NO: 314332 - DNA, 25 bp, Artificial
  Probe
tcttagcatttattagcactgtgtt

SEQ ID NO: 314333 - DNA, 25 bp, Artificial
  Probe
gtttcttagcatttattagcactgt

SEQ ID NO: 314334 - DNA, 25 bp, Artificial
  Probe
tttcttcagcgataatctcaagtgc

SEQ ID NO: 314335 - DNA, 25 bp, Artificial
  Probe
cttagcatttattagcactgtgttg

SEQ ID NO: 314336 - DNA, 25 bp, Artificial
  Probe
tggagcaggcagtgactgttaaact

SEQ ID NO: 314337 - DNA, 25 bp, Artificial
  Probe
aattgtctgtcctgtggagcaggca

SEQ ID NO: 314338 - DNA, 25 bp, Artificial
  Probe
ttcttagcatttattagcactgtgt

SEQ ID NO: 314339 - DNA, 25 bp, Artificial
  Probe
agcgataatctcaagtgcaaacatc

SEQ ID NO: 314340 - DNA, 25 bp, Artificial
  Probe
agtttcttagcatttattagcactg

SEQ ID NO: 314341 - DNA, 25 bp, Artificial
  Probe
caaattgtctgtcctgtggagcagg

SEQ ID NO: 314342 - DNA, 25 bp, Artificial
  Probe
ttggatcccttacttgggtggaaat

SEQ ID NO: 314343 - DNA, 25 bp, Artificial
  Probe
aaattgtctgtcctgtggagcaggc

SEQ ID NO: 314344 - DNA, 25 bp, Artificial
  Probe
tcagcgataatctcaagtgcaaaca

SEQ ID NO: 314345 - DNA, 25 bp, Artificial
  Probe
ctgtcctgtggagcaggcagtgact

SEQ ID NO: 314346 - DNA, 25 bp, Artificial
  Probe
ttcagcgataatctcaagtgcaaac

SEQ ID NO: 314347 - DNA, 25 bp, Artificial
  Probe
agcactgtgttgtgtaaagtcaacc

SEQ ID NO: 314348 - DNA, 25 bp, Artificial
  Probe
gtggagcaggcagtgactgttaaac

SEQ ID NO: 314349 - DNA, 25 bp, Artificial
  Probe
ttttcttcagcgataatctcaagtg

SEQ ID NO: 314350 - DNA, 25 bp, Artificial
  Probe
agcgtgagccgcaacagcgcctcag

SEQ ID NO: 314351 - DNA, 25 bp, Artificial
  Probe
ggaaagcaaccctggtaccagctct

SEQ ID NO: 314352 - DNA, 25 bp, Artificial
  Probe
ctgctggcagcgtgagccgcaacag

SEQ ID NO: 314353 - DNA, 25 bp, Artificial
  Probe
gtgagccgcaacagcgcctcagcat

SEQ ID NO: 314354 - DNA, 25 bp, Artificial
  Probe
ctgaggcgatcgagtgcatcacgca

SEQ ID NO: 314355 - DNA, 25 bp, Artificial
  Probe
cagctctccaacactgaggcgatcg

SEQ ID NO: 314356 - DNA, 25 bp, Artificial
  Probe
atctacagcacagactactaccgtg

SEQ ID NO: 314357 - DNA, 25 bp, Artificial
  Probe
tctacagcacagactactaccgtgt

SEQ ID NO: 314358 - DNA, 25 bp, Artificial
  Probe
tgaggcgatcgagtgcatcacgcag

SEQ ID NO: 314359 - DNA, 25 bp, Artificial
  Probe
tcttcacctatggaaagcaaccctg

SEQ ID NO: 314360 - DNA, 25 bp, Artificial
  Probe
ccgctggatgcctccagagagcatc

SEQ ID NO: 314361 - DNA, 25 bp, Artificial
  Probe
tctccaacactgaggcgatcgagtg

SEQ ID NO: 314362 - DNA, 25 bp, Artificial
  Probe
taccagctctccaacactgaggcga

SEQ ID NO: 314363 - DNA, 25 bp, Artificial
  Probe
tccagagagcatcctctaccgcaag

SEQ ID NO: 314364 - DNA, 25 bp, Artificial
  Probe
ccatccgctggatgcctccagagag

SEQ ID NO: 314365 - DNA, 25 bp, Artificial
  Probe
cctatggaaagcaaccctggtacca

SEQ ID NO: 314366 - DNA, 25 bp, Artificial
  Probe
tctgggagatcttcacctatggaaa

SEQ ID NO: 314367 - DNA, 25 bp, Artificial
  Probe
caggcgccaccgagttacctggacg

SEQ ID NO: 314368 - DNA, 25 bp, Artificial
  Probe
ggtgctctgggagatcttcacctat

SEQ ID NO: 314369 - DNA, 25 bp, Artificial
  Probe
aacactgaggcgatcgagtgcatca

SEQ ID NO: 314370 - DNA, 25 bp, Artificial
  Probe
gaaagcaaccctggtaccagctctc

SEQ ID NO: 314371 - DNA, 25 bp, Artificial
  Probe
cactgaggcgatcgagtgcatcacg

SEQ ID NO: 314372 - DNA, 25 bp, Artificial
  Probe
ggtaccagctctccaacactgaggc

SEQ ID NO: 314373 - DNA, 25 bp, Artificial
  Probe
cgcaacagcgcctcagcatgaagga

SEQ ID NO: 314374 - DNA, 25 bp, Artificial
  Probe
cacctatggaaagcaaccctggtac

SEQ ID NO: 314375 - DNA, 25 bp, Artificial
  Probe
agcagggacatctacagcacagact

SEQ ID NO: 314376 - DNA, 25 bp, Artificial
  Probe
cctcagcatgaaggatgtgcacgcg

SEQ ID NO: 314377 - DNA, 25 bp, Artificial
  Probe
cagcgcctcagcatgaaggatgtgc

SEQ ID NO: 314378 - DNA, 25 bp, Artificial
  Probe
agcacagactactaccgtgtgggag

SEQ ID NO: 314379 - DNA, 25 bp, Artificial
  Probe
ggcacaggcgccaccgagttacctg

SEQ ID NO: 314380 - DNA, 25 bp, Artificial
  Probe
tgctggcagcgtgagccgcaacagc

SEQ ID NO: 314381 - DNA, 25 bp, Artificial
  Probe
tggatgtcaggctaccctgggctcc

SEQ ID NO: 314382 - DNA, 25 bp, Artificial
  Probe
ggcgccaccgagttacctggacgtt

SEQ ID NO: 314383 - DNA, 25 bp, Artificial
  Probe
gatgcctccagagagcatcctctac

SEQ ID NO: 314384 - DNA, 25 bp, Artificial
  Probe
caagtcttaccctcagcatgtggag

SEQ ID NO: 314385 - DNA, 25 bp, Artificial
  Probe
ctggtaccagctctccaacactgag

SEQ ID NO: 314386 - DNA, 25 bp, Artificial
  Probe
ggacatctacagcacagactactac

SEQ ID NO: 314387 - DNA, 25 bp, Artificial
  Probe
atgagcagggacatctacagcacag

SEQ ID NO: 314388 - DNA, 25 bp, Artificial
  Probe
ctatggaaagcaaccctggtaccag

SEQ ID NO: 314389 - DNA, 25 bp, Artificial
  Probe
cttcacctatggaaagcaaccctgg

SEQ ID NO: 314390 - DNA, 25 bp, Artificial
  Probe
agagcatcctctaccgcaagttcag

SEQ ID NO: 314391 - DNA, 25 bp, Artificial
  Probe
tgctctgggagatcttcacctatgg

SEQ ID NO: 314392 - DNA, 25 bp, Artificial
  Probe
ggatgtcaggctaccctgggctccc

SEQ ID NO: 314393 - DNA, 25 bp, Artificial
  Probe
acgcgcggctgcaggccttggcaca

SEQ ID NO: 314394 - DNA, 25 bp, Artificial
  Probe
aggccttggcacaggcgccaccgag

SEQ ID NO: 314395 - DNA, 25 bp, Artificial
  Probe
gatcttcacctatggaaagcaaccc

SEQ ID NO: 314396 - DNA, 25 bp, Artificial
  Probe
ggcccacctggctatccggagagga

SEQ ID NO: 314397 - DNA, 25 bp, Artificial
  Probe
aaggctggcccacctggctatccgg

SEQ ID NO: 314398 - DNA, 25 bp, Artificial
  Probe
cacctggctatccggagaggagagg

SEQ ID NO: 314399 - DNA, 25 bp, Artificial
  Probe
cgaggacccggccaaggctggccca

SEQ ID NO: 314400 - DNA, 25 bp, Artificial
  Probe
tccggagaggagagggcaggacgca

SEQ ID NO: 314401 - DNA, 25 bp, Artificial
  Probe
gaggacccggccaaggctggcccac

SEQ ID NO: 314402 - DNA, 25 bp, Artificial
  Probe
caccgaggacccggccaaggctggc

SEQ ID NO: 314403 - DNA, 25 bp, Artificial
  Probe
ggccggcaccgaggacccggccaag

SEQ ID NO: 314404 - DNA, 25 bp, Artificial
  Probe
cctggctatccggagaggagagggc

SEQ ID NO: 314405 - DNA, 25 bp, Artificial
  Probe
gacgcagcggccacggcaatttccg

SEQ ID NO: 314406 - DNA, 25 bp, Artificial
  Probe
agagggcaggacgcagcggccacgg

SEQ ID NO: 314407 - DNA, 25 bp, Artificial
  Probe
ggctatccggagaggagagggcagg

SEQ ID NO: 314408 - DNA, 25 bp, Artificial
  Probe
aggctggcccacctggctatccgga

SEQ ID NO: 314409 - DNA, 25 bp, Artificial
  Probe
ggcaggacgcagcggccacggcaat

SEQ ID NO: 314410 - DNA, 25 bp, Artificial
  Probe
gacccggccaaggctggcccacctg

SEQ ID NO: 314411 - DNA, 25 bp, Artificial
  Probe
ccggccaaggctggcccacctggct

SEQ ID NO: 314412 - DNA, 25 bp, Artificial
  Probe
ggccaaggctggcccacctggctat

SEQ ID NO: 314413 - DNA, 25 bp, Artificial
  Probe
acgcagcggccacggcaatttccgg

SEQ ID NO: 314414 - DNA, 25 bp, Artificial
  Probe
acccggccaaggctggcccacctgg

SEQ ID NO: 314415 - DNA, 25 bp, Artificial
  Probe
cgcagcggccacggcaatttccggg

SEQ ID NO: 314416 - DNA, 25 bp, Artificial
  Probe
gcagcggccacggcaatttccgggt

SEQ ID NO: 314417 - DNA, 25 bp, Artificial
  Probe
cagcggccacggcaatttccgggta

SEQ ID NO: 314418 - DNA, 25 bp, Artificial
  Probe
gccaaggctggcccacctggctatc

SEQ ID NO: 314419 - DNA, 25 bp, Artificial
  Probe
tggcccacctggctatccggagagg

SEQ ID NO: 314420 - DNA, 25 bp, Artificial
  Probe
ggacgcagcggccacggcaatttcc

SEQ ID NO: 314421 - DNA, 25 bp, Artificial
  Probe
ggcaccgaggacccggccaaggctg

SEQ ID NO: 314422 - DNA, 25 bp, Artificial
  Probe
gcccacctggctatccggagaggag

SEQ ID NO: 314423 - DNA, 25 bp, Artificial
  Probe
gctggcccacctggctatccggaga

SEQ ID NO: 314424 - DNA, 25 bp, Artificial
  Probe
cggcaccgaggacccggccaaggct

SEQ ID NO: 314425 - DNA, 25 bp, Artificial
  Probe
ccacctggctatccggagaggagag

SEQ ID NO: 314426 - DNA, 25 bp, Artificial
  Probe
ggacccggccaaggctggcccacct

SEQ ID NO: 314427 - DNA, 25 bp, Artificial
  Probe
gcaccgaggacccggccaaggctgg

SEQ ID NO: 314428 - DNA, 25 bp, Artificial
  Probe
tatccggagaggagagggcaggacg

SEQ ID NO: 314429 - DNA, 25 bp, Artificial
  Probe
atccggagaggagagggcaggacgc

SEQ ID NO: 314430 - DNA, 25 bp, Artificial
  Probe
agggcaggacgcagcggccacggca

SEQ ID NO: 314431 - DNA, 25 bp, Artificial
  Probe
cccggccaaggctggcccacctggc

SEQ ID NO: 314432 - DNA, 25 bp, Artificial
  Probe
ctatccggagaggagagggcaggac

SEQ ID NO: 314433 - DNA, 25 bp, Artificial
  Probe
tggctatccggagaggagagggcag

SEQ ID NO: 314434 - DNA, 25 bp, Artificial
  Probe
gagagggcaggacgcagcggccacg

SEQ ID NO: 314435 - DNA, 25 bp, Artificial
  Probe
caaggctggcccacctggctatccg

SEQ ID NO: 314436 - DNA, 25 bp, Artificial
  Probe
cccacctggctatccggagaggaga

SEQ ID NO: 314437 - DNA, 25 bp, Artificial
  Probe
acctggctatccggagaggagaggg

SEQ ID NO: 314438 - DNA, 25 bp, Artificial
  Probe
gccggcaccgaggacccggccaagg

SEQ ID NO: 314439 - DNA, 25 bp, Artificial
  Probe
ggctggcccacctggctatccggag

SEQ ID NO: 314440 - DNA, 25 bp, Artificial
  Probe
gcaggacgcagcggccacggcaatt

SEQ ID NO: 314441 - DNA, 25 bp, Artificial
  Probe
gctatccggagaggagagggcagga

SEQ ID NO: 314442 - DNA, 25 bp, Artificial
  Probe
ttccagaatgtgaccctaccagcct

SEQ ID NO: 314443 - DNA, 25 bp, Artificial
  Probe
ctcctcaaaggcacttgagagacaa

SEQ ID NO: 314444 - DNA, 25 bp, Artificial
  Probe
agcttcgtcaccaggacagacacag

SEQ ID NO: 314445 - DNA, 25 bp, Artificial
  Probe
gtcgacttcaggtttccatcacacc

SEQ ID NO: 314446 - DNA, 25 bp, Artificial
  Probe
ctggccctttccaggggagctggtt

SEQ ID NO: 314447 - DNA, 25 bp, Artificial
  Probe
taagtgtgctgtgaactctctgatc

SEQ ID NO: 314448 - DNA, 25 bp, Artificial
  Probe
tggttctggaataccctgagcctta

SEQ ID NO: 314449 - DNA, 25 bp, Artificial
  Probe
gcttctttccagaatgtgaccctac

SEQ ID NO: 314450 - DNA, 25 bp, Artificial
  Probe
tctggaataccctgagccttagtga

SEQ ID NO: 314451 - DNA, 25 bp, Artificial
  Probe
tctcgggcggtccactcctcaaagg

SEQ ID NO: 314452 - DNA, 25 bp, Artificial
  Probe
tcgggcggtccactcctcaaaggca

SEQ ID NO: 314453 - DNA, 25 bp, Artificial
  Probe
ggacactggcttctttccagaatgt

SEQ ID NO: 314454 - DNA, 25 bp, Artificial
  Probe
agctggttggtgtcttgtttccctc

SEQ ID NO: 314455 - DNA, 25 bp, Artificial
  Probe
tcacaggtggttctggaataccctg

SEQ ID NO: 314456 - DNA, 25 bp, Artificial
  Probe
ttcgtcaccaggacagacacagcct

SEQ ID NO: 314457 - DNA, 25 bp, Artificial
  Probe
acttctcctgggagaaggcactgat

SEQ ID NO: 314458 - DNA, 25 bp, Artificial
  Probe
tcaaaggcacttgagagacaactgg

SEQ ID NO: 314459 - DNA, 25 bp, Artificial
  Probe
gtggttctggaataccctgagcctt

SEQ ID NO: 314460 - DNA, 25 bp, Artificial
  Probe
tggatctggccctttccaggggagc

SEQ ID NO: 314461 - DNA, 25 bp, Artificial
  Probe
ccttagtgatgaccaaaggacactg

SEQ ID NO: 314462 - DNA, 25 bp, Artificial
  Probe
gggcggtccactcctcaaaggcact

SEQ ID NO: 314463 - DNA, 25 bp, Artificial
  Probe
caagtcgacttcaggtttccatcac

SEQ ID NO: 314464 - DNA, 25 bp, Artificial
  Probe
taggctgctggctcagcttcgtcac

SEQ ID NO: 314465 - DNA, 25 bp, Artificial
  Probe
accaaaggacactggcttctttcca

SEQ ID NO: 314466 - DNA, 25 bp, Artificial
  Probe
tccactcctcaaaggcacttgagag

SEQ ID NO: 314467 - DNA, 25 bp, Artificial
  Probe
gatgtaggctgctggctcagcttcg

SEQ ID NO: 314468 - DNA, 25 bp, Artificial
  Probe
gagctggttggtgtcttgtttccct

SEQ ID NO: 314469 - DNA, 25 bp, Artificial
  Probe
ctgatgtaggctgctggctcagctt

SEQ ID NO: 314470 - DNA, 25 bp, Artificial
  Probe
gacactggcttctttccagaatgtg

SEQ ID NO: 314471 - DNA, 25 bp, Artificial
  Probe
acaactgggcctggaaggtggacat

SEQ ID NO: 314472 - DNA, 25 bp, Artificial
  Probe
tctttccagaatgtgaccctaccag

SEQ ID NO: 314473 - DNA, 25 bp, Artificial
  Probe
agccaagtcgacttcaggtttccat

SEQ ID NO: 314474 - DNA, 25 bp, Artificial
  Probe
ggcacttgagagacaactgggcctg

SEQ ID NO: 314475 - DNA, 25 bp, Artificial
  Probe
aaggcactgatgtaggctgctggct

SEQ ID NO: 314476 - DNA, 25 bp, Artificial
  Probe
gtgctgtgaactctctgatcctttt

SEQ ID NO: 314477 - DNA, 25 bp, Artificial
  Probe
gtgatgaccaaaggacactggcttc

SEQ ID NO: 314478 - DNA, 25 bp, Artificial
  Probe
tctcctgggagaaggcactgatgta

SEQ ID NO: 314479 - DNA, 25 bp, Artificial
  Probe
gacctgatcacaggtggttctggaa

SEQ ID NO: 314480 - DNA, 25 bp, Artificial
  Probe
ggtggttctggaataccctgagcct

SEQ ID NO: 314481 - DNA, 25 bp, Artificial
  Probe
tcgtcaccaggacagacacagcctg

SEQ ID NO: 314482 - DNA, 25 bp, Artificial
  Probe
ctggcttctttccagaatgtgaccc

SEQ ID NO: 314483 - DNA, 25 bp, Artificial
  Probe
ataccctgagccttagtgatgacca

SEQ ID NO: 314484 - DNA, 25 bp, Artificial
  Probe
aggcactgatgtaggctgctggctc

SEQ ID NO: 314485 - DNA, 25 bp, Artificial
  Probe
ctggttggtgtcttgtttccctcac

SEQ ID NO: 314486 - DNA, 25 bp, Artificial
  Probe
aactgggcctggaaggtggacattc

SEQ ID NO: 314487 - DNA, 25 bp, Artificial
  Probe
ggagctggttggtgtcttgtttccc

SEQ ID NO: 314488 - DNA, 25 bp, Artificial
  Probe
gagtccctctcaacagttccttagt

SEQ ID NO: 314489 - DNA, 25 bp, Artificial
  Probe
tagttccccgtgatttacaattttg

SEQ ID NO: 314490 - DNA, 25 bp, Artificial
  Probe
ccccgtgatttacaattttgcaaga

SEQ ID NO: 314491 - DNA, 25 bp, Artificial
  Probe
tgaaggtgttcgttacgagaactct

SEQ ID NO: 314492 - DNA, 25 bp, Artificial
  Probe
gcttctgcaggcagccttacgatta

SEQ ID NO: 314493 - DNA, 25 bp, Artificial
  Probe
tttactggtcccacagagggaccat

SEQ ID NO: 314494 - DNA, 25 bp, Artificial
  Probe
atggcagatacaaccctatgttcct

SEQ ID NO: 314495 - DNA, 25 bp, Artificial
  Probe
gtcagtagaaacacactactgactc

SEQ ID NO: 314496 - DNA, 25 bp, Artificial
  Probe
agtagaaacacactactgactcctg

SEQ ID NO: 314497 - DNA, 25 bp, Artificial
  Probe
agagggaccattctggtggagtccc

SEQ ID NO: 314498 - DNA, 25 bp, Artificial
  Probe
tgcaagagacacatggcagatacaa

SEQ ID NO: 314499 - DNA, 25 bp, Artificial
  Probe
attctggtggagtccctctcaacag

SEQ ID NO: 314500 - DNA, 25 bp, Artificial
  Probe
ctctgtcctggcttctgcaggcagc

SEQ ID NO: 314501 - DNA, 25 bp, Artificial
  Probe
tcaagctgctcgagggcactggctc

SEQ ID NO: 314502 - DNA, 25 bp, Artificial
  Probe
agcatgctctgtcctggcttctgca

SEQ ID NO: 314503 - DNA, 25 bp, Artificial
  Probe
ggtctttactggtcccacagaggga

SEQ ID NO: 314504 - DNA, 25 bp, Artificial
  Probe
tgttcctaattctgaaatccgtcag

SEQ ID NO: 314505 - DNA, 25 bp, Artificial
  Probe
ccctcctgaatcttcgaagtgaact

SEQ ID NO: 314506 - DNA, 25 bp, Artificial
  Probe
ctaattctgaaatccgtcagtagaa

SEQ ID NO: 314507 - DNA, 25 bp, Artificial
  Probe
tgatttacaattttgcaagagacac

SEQ ID NO: 314508 - DNA, 25 bp, Artificial
  Probe
gtgttcgttacgagaactcttgttg

SEQ ID NO: 314509 - DNA, 25 bp, Artificial
  Probe
cgaggtgtccagcacccgtcgcgga

SEQ ID NO: 314510 - DNA, 25 bp, Artificial
  Probe
tggctccgaggtgtccagcacccgt

SEQ ID NO: 314511 - DNA, 25 bp, Artificial
  Probe
gcactggctccgaggtgtccagcac

SEQ ID NO: 314512 - DNA, 25 bp, Artificial
  Probe
caattttgcaagagacacatggcag

SEQ ID NO: 314513 - DNA, 25 bp, Artificial
  Probe
catgctctgtcctggcttctgcagg

SEQ ID NO: 314514 - DNA, 25 bp, Artificial
  Probe
ttctgaaatccgtcagtagaaacac

SEQ ID NO: 314515 - DNA, 25 bp, Artificial
  Probe
tttacaattttgcaagagacacatg

SEQ ID NO: 314516 - DNA, 25 bp, Artificial
  Probe
ctggtcccacagagggaccattctg

SEQ ID NO: 314517 - DNA, 25 bp, Artificial
  Probe
gagacacatggcagatacaacccta

SEQ ID NO: 314518 - DNA, 25 bp, Artificial
  Probe
cctggcttctgcaggcagccttacg

SEQ ID NO: 314519 - DNA, 25 bp, Artificial
  Probe
ctgcaggcagccttacgattaaaac

SEQ ID NO: 314520 - DNA, 25 bp, Artificial
  Probe
cacccgtcgcggaggcactttggtc

SEQ ID NO: 314521 - DNA, 25 bp, Artificial
  Probe
caacagttccttagttccccgtgat

SEQ ID NO: 314522 - DNA, 25 bp, Artificial
  Probe
tactagggtctttactggtcccaca

SEQ ID NO: 314523 - DNA, 25 bp, Artificial
  Probe
gaaatccgtcagtagaaacacacta

SEQ ID NO: 314524 - DNA, 25 bp, Artificial
  Probe
ctcaacagttccttagttccccgtg

SEQ ID NO: 314525 - DNA, 25 bp, Artificial
  Probe
ggcactttggtccagaccccgaagg

SEQ ID NO: 314526 - DNA, 25 bp, Artificial
  Probe
gaaacacactactgactcctgaagg

SEQ ID NO: 314527 - DNA, 25 bp, Artificial
  Probe
gggttatgacacaactcataacttg

SEQ ID NO: 314528 - DNA, 25 bp, Artificial
  Probe
gcagccttacgattaaaactaaagt

SEQ ID NO: 314529 - DNA, 25 bp, Artificial
  Probe
cacagagggaccattctggtggagt

SEQ ID NO: 314530 - DNA, 25 bp, Artificial
  Probe
ctgaatcttcgaagtgaactgtagt

SEQ ID NO: 314531 - DNA, 25 bp, Artificial
  Probe
actcataacttggaggagaacctgg

SEQ ID NO: 314532 - DNA, 25 bp, Artificial
  Probe
tggtggagtccctctcaacagttcc

SEQ ID NO: 314533 - DNA, 25 bp, Artificial
  Probe
cgtcgcggaggcactttggtccaga

SEQ ID NO: 314534 - DNA, 25 bp, Artificial
  Probe
tgtagtcttggcatagggacacggc

SEQ ID NO: 314535 - DNA, 25 bp, Artificial
  Probe
gtgacttaagtcactgggactcact

SEQ ID NO: 314536 - DNA, 25 bp, Artificial
  Probe
gtagtcttggcatagggacacggcc

SEQ ID NO: 314537 - DNA, 25 bp, Artificial
  Probe
gctagttgccgttgctaaatgattt

SEQ ID NO: 314538 - DNA, 25 bp, Artificial
  Probe
ggactcactaattttctctgagaga

SEQ ID NO: 314539 - DNA, 25 bp, Artificial
  Probe
gactcactaattttctctgagagaa

SEQ ID NO: 314540 - DNA, 25 bp, Artificial
  Probe
ggacacggccgaaataactgactcc

SEQ ID NO: 314541 - DNA, 25 bp, Artificial
  Probe
tcactaattttctctgagagaacag

SEQ ID NO: 314542 - DNA, 25 bp, Artificial
  Probe
tttttgtcttgaaaatgatagacat

SEQ ID NO: 314543 - DNA, 25 bp, Artificial
  Probe
cagtgacttaagtcactgggactca

SEQ ID NO: 314544 - DNA, 25 bp, Artificial
  Probe
acacggccgaaataactgactcctt

SEQ ID NO: 314545 - DNA, 25 bp, Artificial
  Probe
cactgggactcactaattttctctg

SEQ ID NO: 314546 - DNA, 25 bp, Artificial
  Probe
tggcatagggacacggccgaaataa

SEQ ID NO: 314547 - DNA, 25 bp, Artificial
  Probe
ggccgaaataactgactccttcctc

SEQ ID NO: 314548 - DNA, 25 bp, Artificial
  Probe
aaggcagggctagttgccgttgcta

SEQ ID NO: 314549 - DNA, 25 bp, Artificial
  Probe
gggactcactaattttctctgagag

SEQ ID NO: 314550 - DNA, 25 bp, Artificial
  Probe
tttaataatactgtaatgtgtattt

SEQ ID NO: 314551 - DNA, 25 bp, Artificial
  Probe
gacacggccgaaataactgactcct

SEQ ID NO: 314552 - DNA, 25 bp, Artificial
  Probe
ctgtcagtgacttaagtcactggga

SEQ ID NO: 314553 - DNA, 25 bp, Artificial
  Probe
aatttctattgtaaatagctcagtg

SEQ ID NO: 314554 - DNA, 25 bp, Artificial
  Probe
aagtcactgggactcactaattttc

SEQ ID NO: 314555 - DNA, 25 bp, Artificial
  Probe
agtgacttaagtcactgggactcac

SEQ ID NO: 314556 - DNA, 25 bp, Artificial
  Probe
tgggactcactaattttctctgaga

SEQ ID NO: 314557 - DNA, 25 bp, Artificial
  Probe
actgggactcactaattttctctga

SEQ ID NO: 314558 - DNA, 25 bp, Artificial
  Probe
tgtatttctttgtggggaaagcttt

SEQ ID NO: 314559 - DNA, 25 bp, Artificial
  Probe
taagtcactgggactcactaatttt

SEQ ID NO: 314560 - DNA, 25 bp, Artificial
  Probe
gggacacggccgaaataactgactc

SEQ ID NO: 314561 - DNA, 25 bp, Artificial
  Probe
ctagttgccgttgctaaatgattta

SEQ ID NO: 314562 - DNA, 25 bp, Artificial
  Probe
gccgaaataactgactccttcctcg

SEQ ID NO: 314563 - DNA, 25 bp, Artificial
  Probe
tagtcttggcatagggacacggccg

SEQ ID NO: 314564 - DNA, 25 bp, Artificial
  Probe
ttaaagtgtttgtagtcttggcata

SEQ ID NO: 314565 - DNA, 25 bp, Artificial
  Probe
ttctctgagagaacagttgattgag

SEQ ID NO: 314566 - DNA, 25 bp, Artificial
  Probe
atagctcagtgttacataatgaagc

SEQ ID NO: 314567 - DNA, 25 bp, Artificial
  Probe
ttggcatagggacacggccgaaata

SEQ ID NO: 314568 - DNA, 25 bp, Artificial
  Probe
gtcactgggactcactaattttctc

SEQ ID NO: 314569 - DNA, 25 bp, Artificial
  Probe
agtcactgggactcactaattttct

SEQ ID NO: 314570 - DNA, 25 bp, Artificial
  Probe
tgacttaagtcactgggactcacta

SEQ ID NO: 314571 - DNA, 25 bp, Artificial
  Probe
actaattttctctgagagaacagtt

SEQ ID NO: 314572 - DNA, 25 bp, Artificial
  Probe
cactaattttctctgagagaacagt

SEQ ID NO: 314573 - DNA, 25 bp, Artificial
  Probe
ggctagttgccgttgctaaatgatt

SEQ ID NO: 314574 - DNA, 25 bp, Artificial
  Probe
ctattgtaaatagctcagtgttaca

SEQ ID NO: 314575 - DNA, 25 bp, Artificial
  Probe
ctgggactcactaattttctctgag

SEQ ID NO: 314576 - DNA, 25 bp, Artificial
  Probe
aggcagggctagttgccgttgctaa

SEQ ID NO: 314577 - DNA, 25 bp, Artificial
  Probe
ggcagggctagttgccgttgctaaa

SEQ ID NO: 314578 - DNA, 25 bp, Artificial
  Probe
cttggcatagggacacggccgaaat

SEQ ID NO: 314579 - DNA, 25 bp, Artificial
  Probe
gacttaagtcactgggactcactaa

SEQ ID NO: 314580 - DNA, 25 bp, Artificial
  Probe
agcctgagaggggccgagggaggcc

SEQ ID NO: 314581 - DNA, 25 bp, Artificial
  Probe
gaaagcctgagaggggccgagggag

SEQ ID NO: 314582 - DNA, 25 bp, Artificial
  Probe
gcctgagaggggccgagggaggccc

SEQ ID NO: 314583 - DNA, 25 bp, Artificial
  Probe
gccccgagggccaaggcctggctcc

SEQ ID NO: 314584 - DNA, 25 bp, Artificial
  Probe
ggaggccccgagggccaaggcctgg

SEQ ID NO: 314585 - DNA, 25 bp, Artificial
  Probe
ccgagggccaaggcctggctcccca

SEQ ID NO: 314586 - DNA, 25 bp, Artificial
  Probe
cgagggccaaggcctggctccccat

SEQ ID NO: 314587 - DNA, 25 bp, Artificial
  Probe
ctgaaagcctgagaggggccgaggg

SEQ ID NO: 314588 - DNA, 25 bp, Artificial
  Probe
caccagctgaaagcctgagaggggc

SEQ ID NO: 314589 - DNA, 25 bp, Artificial
  Probe
agggccaaggcctggctccccatca

SEQ ID NO: 314590 - DNA, 25 bp, Artificial
  Probe
ggccaaggcctggctccccatcacg

SEQ ID NO: 314591 - DNA, 25 bp, Artificial
  Probe
tgaaagcctgagaggggccgaggga

SEQ ID NO: 314592 - DNA, 25 bp, Artificial
  Probe
gggaggccccgagggccaaggcctg

SEQ ID NO: 314593 - DNA, 25 bp, Artificial
  Probe
accagctgaaagcctgagaggggcc

SEQ ID NO: 314594 - DNA, 25 bp, Artificial
  Probe
gagaggggccgagggaggccccgag

SEQ ID NO: 314595 - DNA, 25 bp, Artificial
  Probe
gctgaaagcctgagaggggccgagg

SEQ ID NO: 314596 - DNA, 25 bp, Artificial
  Probe
tcacgccctaccactttatgcacaa

SEQ ID NO: 314597 - DNA, 25 bp, Artificial
  Probe
aagcctgagaggggccgagggaggc

SEQ ID NO: 314598 - DNA, 25 bp, Artificial
  Probe
agctgaaagcctgagaggggccgag

SEQ ID NO: 314599 - DNA, 25 bp, Artificial
  Probe
tggcaccagctgaaagcctgagagg

SEQ ID NO: 314600 - DNA, 25 bp, Artificial
  Probe
ggccccgagggccaaggcctggctc

SEQ ID NO: 314601 - DNA, 25 bp, Artificial
  Probe
tgagaggggccgagggaggccccga

SEQ ID NO: 314602 - DNA, 25 bp, Artificial
  Probe
aaagcctgagaggggccgagggagg

SEQ ID NO: 314603 - DNA, 25 bp, Artificial
  Probe
ccaaggcctggctccccatcacgcc

SEQ ID NO: 314604 - DNA, 25 bp, Artificial
  Probe
gccaaggcctggctccccatcacgc

SEQ ID NO: 314605 - DNA, 25 bp, Artificial
  Probe
agtggcaccagctgaaagcctgaga

SEQ ID NO: 314606 - DNA, 25 bp, Artificial
  Probe
caaggcctggctccccatcacgccc

SEQ ID NO: 314607 - DNA, 25 bp, Artificial
  Probe
gcaccagctgaaagcctgagagggg

SEQ ID NO: 314608 - DNA, 25 bp, Artificial
  Probe
ggcaccagctgaaagcctgagaggg

SEQ ID NO: 314609 - DNA, 25 bp, Artificial
  Probe
gtggcaccagctgaaagcctgagag

SEQ ID NO: 314610 - DNA, 25 bp, Artificial
  Probe
cagctgaaagcctgagaggggccga

SEQ ID NO: 314611 - DNA, 25 bp, Artificial
  Probe
ctgagaggggccgagggaggccccg

SEQ ID NO: 314612 - DNA, 25 bp, Artificial
  Probe
aggccccgagggccaaggcctggct

SEQ ID NO: 314613 - DNA, 25 bp, Artificial
  Probe
ccagctgaaagcctgagaggggccg

SEQ ID NO: 314614 - DNA, 25 bp, Artificial
  Probe
tcctactgggggttctcctacatgg

SEQ ID NO: 314615 - DNA, 25 bp, Artificial
  Probe
tcctcagaagcagatatagaacctc

SEQ ID NO: 314616 - DNA, 25 bp, Artificial
  Probe
gtcatttgtcacacagatgttctcc

SEQ ID NO: 314617 - DNA, 25 bp, Artificial
  Probe
aattcctcagaagcagatatagaac

SEQ ID NO: 314618 - DNA, 25 bp, Artificial
  Probe
gcctgctcctactgggggttctcct

SEQ ID NO: 314619 - DNA, 25 bp, Artificial
  Probe
gagaacgttaattcctcagaagcag

SEQ ID NO: 314620 - DNA, 25 bp, Artificial
  Probe
agttgtccatactgtatgttttatc

SEQ ID NO: 314621 - DNA, 25 bp, Artificial
  Probe
agtcagactcaaatgaagagcccat

SEQ ID NO: 314622 - DNA, 25 bp, Artificial
  Probe
acacagatgttctcccatgggcagc

SEQ ID NO: 314623 - DNA, 25 bp, Artificial
  Probe
agagtcagactcaaatgaagagccc

SEQ ID NO: 314624 - DNA, 25 bp, Artificial
  Probe
ccctgctccacttggctgaaataga

SEQ ID NO: 314625 - DNA, 25 bp, Artificial
  Probe
aatagactgcaatgccatgttctgc

SEQ ID NO: 314626 - DNA, 25 bp, Artificial
  Probe
actttaaagttgtccatactgtatg

SEQ ID NO: 314627 - DNA, 25 bp, Artificial
  Probe
tgtcctagcctgctcctactggggg

SEQ ID NO: 314628 - DNA, 25 bp, Artificial
  Probe
ctgggggttctcctacatggtgcct

SEQ ID NO: 314629 - DNA, 25 bp, Artificial
  Probe
agcaacaagtttgtagcaggagaac

SEQ ID NO: 314630 - DNA, 25 bp, Artificial
  Probe
agactcaaatgaagagcccatttat

SEQ ID NO: 314631 - DNA, 25 bp, Artificial
  Probe
cctgtatagcaacaagtttgtagca

SEQ ID NO: 314632 - DNA, 25 bp, Artificial
  Probe
ctactgggggttctcctacatggtg

SEQ ID NO: 314633 - DNA, 25 bp, Artificial
  Probe
aggtcatttgtcacacagatgttct

SEQ ID NO: 314634 - DNA, 25 bp, Artificial
  Probe
caacaagtttgtagcaggagaacgt

SEQ ID NO: 314635 - DNA, 25 bp, Artificial
  Probe
tcacacagatgttctcccatgggca

SEQ ID NO: 314636 - DNA, 25 bp, Artificial
  Probe
tgttctcatggagaacatcctgtat

SEQ ID NO: 314637 - DNA, 25 bp, Artificial
  Probe
aacgttaattcctcagaagcagata

SEQ ID NO: 314638 - DNA, 25 bp, Artificial
  Probe
cagatatagaacctcagagtcagac

SEQ ID NO: 314639 - DNA, 25 bp, Artificial
  Probe
atgttctcatggagaacatcctgta

SEQ ID NO: 314640 - DNA, 25 bp, Artificial
  Probe
ctttaaagttgtccatactgtatgt

SEQ ID NO: 314641 - DNA, 25 bp, Artificial
  Probe
ggccctgctccacttggctgaaata

SEQ ID NO: 314642 - DNA, 25 bp, Artificial
  Probe
atggagaacatcctgtatagcaaca

SEQ ID NO: 314643 - DNA, 25 bp, Artificial
  Probe
agaacgttaattcctcagaagcaga

SEQ ID NO: 314644 - DNA, 25 bp, Artificial
  Probe
tcatggagaacatcctgtatagcaa

SEQ ID NO: 314645 - DNA, 25 bp, Artificial
  Probe
agaacctcagagtcagactcaaatg

SEQ ID NO: 314646 - DNA, 25 bp, Artificial
  Probe
cctagcctgctcctactgggggttc

SEQ ID NO: 314647 - DNA, 25 bp, Artificial
  Probe
gatgttctcccatgggcagcctagg

SEQ ID NO: 314648 - DNA, 25 bp, Artificial
  Probe
gggtggccctgctccacttggctga

SEQ ID NO: 314649 - DNA, 25 bp, Artificial
  Probe
agatgttctcccatgggcagcctag

SEQ ID NO: 314650 - DNA, 25 bp, Artificial
  Probe
atcctgtatagcaacaagtttgtag

SEQ ID NO: 314651 - DNA, 25 bp, Artificial
  Probe
ggagaacatcctgtatagcaacaag

SEQ ID NO: 314652 - DNA, 25 bp, Artificial
  Probe
gctccacttggctgaaatagactgc

SEQ ID NO: 314653 - DNA, 25 bp, Artificial
  Probe
ggcctaggtcatttgtcacacagat

SEQ ID NO: 314654 - DNA, 25 bp, Artificial
  Probe
ccacttggctgaaatagactgcaat

SEQ ID NO: 314655 - DNA, 25 bp, Artificial
  Probe
tagaacctcagagtcagactcaaat

SEQ ID NO: 314656 - DNA, 25 bp, Artificial
  Probe
agcagatatagaacctcagagtcag

SEQ ID NO: 314657 - DNA, 25 bp, Artificial
  Probe
gactcaaatgaagagcccatttata

SEQ ID NO: 314658 - DNA, 25 bp, Artificial
  Probe
gaaatagactgcaatgccatgttct

SEQ ID NO: 314659 - DNA, 25 bp, Artificial
  Probe
tttgtcacacagatgttctcccatg

SEQ ID NO: 314660 - DNA, 25 bp, Artificial
  Probe
ccactgacaggactggtccctgtac

SEQ ID NO: 314661 - DNA, 25 bp, Artificial
  Probe
gctctggatggacatggccatggca

SEQ ID NO: 314662 - DNA, 25 bp, Artificial
  Probe
ctgacaggactggtccctgtacttt

SEQ ID NO: 314663 - DNA, 25 bp, Artificial
  Probe
caaagaggcgccagctaacaagtaa

SEQ ID NO: 314664 - DNA, 25 bp, Artificial
  Probe
agcaagaactcacatccagcttctg

SEQ ID NO: 314665 - DNA, 25 bp, Artificial
  Probe
ctcagtaccagcagcatggccgggc

SEQ ID NO: 314666 - DNA, 25 bp, Artificial
  Probe
gtaccagcagcatggccgggccctg

SEQ ID NO: 314667 - DNA, 25 bp, Artificial
  Probe
tcccttcgatgttggcatcaagctg

SEQ ID NO: 314668 - DNA, 25 bp, Artificial
  Probe
ccagagcaccagaaagcccagcaga

SEQ ID NO: 314669 - DNA, 25 bp, Artificial
  Probe
aggaatccaagaagccaccagctaa

SEQ ID NO: 314670 - DNA, 25 bp, Artificial
  Probe
atccaagaagccaccagctaaactg

SEQ ID NO: 314671 - DNA, 25 bp, Artificial
  Probe
gaaatcaggttcaatgctcccttcg

SEQ ID NO: 314672 - DNA, 25 bp, Artificial
  Probe
cgatgttggcatcaagctgtcagga

SEQ ID NO: 314673 - DNA, 25 bp, Artificial
  Probe
gtgtcttcagcgactatctgcagtt

SEQ ID NO: 314674 - DNA, 25 bp, Artificial
  Probe
caggttcaatgctcccttcgatgtt

SEQ ID NO: 314675 - DNA, 25 bp, Artificial
  Probe
tgttggcatcaagctgtcaggagct

SEQ ID NO: 314676 - DNA, 25 bp, Artificial
  Probe
catggccatggcaggttccagcttc

SEQ ID NO: 314677 - DNA, 25 bp, Artificial
  Probe
tccacccagaggacagaggacaagc

SEQ ID NO: 314678 - DNA, 25 bp, Artificial
  Probe
agtaccagcagcatggccgggccct

SEQ ID NO: 314679 - DNA, 25 bp, Artificial
  Probe
taaactgcagccacgagctctggaa

SEQ ID NO: 314680 - DNA, 25 bp, Artificial
  Probe
cagccacgagctctggaaggctggc

SEQ ID NO: 314681 - DNA, 25 bp, Artificial
  Probe
aatgctcccttcgatgttggcatca

SEQ ID NO: 314682 - DNA, 25 bp, Artificial
  Probe
accagctaaactgcagccacgagct

SEQ ID NO: 314683 - DNA, 25 bp, Artificial
  Probe
catggtgtcttcagcgactatctgc

SEQ ID NO: 314684 - DNA, 25 bp, Artificial
  Probe
caggagctcagtaccagcagcatgg

SEQ ID NO: 314685 - DNA, 25 bp, Artificial
  Probe
tgcagccacgagctctggaaggctg

SEQ ID NO: 314686 - DNA, 25 bp, Artificial
  Probe
ggtccctgtactttcctcctaagca

SEQ ID NO: 314687 - DNA, 25 bp, Artificial
  Probe
gcatgctctggatggacatggccat

SEQ ID NO: 314688 - DNA, 25 bp, Artificial
  Probe
tgagcccagagcaccagaaagccca

SEQ ID NO: 314689 - DNA, 25 bp, Artificial
  Probe
tgctctggatggacatggccatggc

SEQ ID NO: 314690 - DNA, 25 bp, Artificial
  Probe
cacccagaggacagaggacaagcag

SEQ ID NO: 314691 - DNA, 25 bp, Artificial
  Probe
gactggtccctgtactttcctccta

SEQ ID NO: 314692 - DNA, 25 bp, Artificial
  Probe
aagcccagcagagaaaggaatccaa

SEQ ID NO: 314693 - DNA, 25 bp, Artificial
  Probe
tgacaggactggtccctgtactttc

SEQ ID NO: 314694 - DNA, 25 bp, Artificial
  Probe
gagcccagagcaccagaaagcccag

SEQ ID NO: 314695 - DNA, 25 bp, Artificial
  Probe
ggactggtccctgtactttcctcct

SEQ ID NO: 314696 - DNA, 25 bp, Artificial
  Probe
accagaaagcccagcagagaaagga

SEQ ID NO: 314697 - DNA, 25 bp, Artificial
  Probe
acgagctctggaaggctggctccac

SEQ ID NO: 314698 - DNA, 25 bp, Artificial
  Probe
ccctgggaaagtttcttcaggatat

SEQ ID NO: 314699 - DNA, 25 bp, Artificial
  Probe
gaaagcccagcagagaaaggaatcc

SEQ ID NO: 314700 - DNA, 25 bp, Artificial
  Probe
ttcgatgttggcatcaagctgtcag

SEQ ID NO: 314701 - DNA, 25 bp, Artificial
  Probe
cagctaaactgcagccacgagctct

SEQ ID NO: 314702 - DNA, 25 bp, Artificial
  Probe
aaggaatccaagaagccaccagcta

SEQ ID NO: 314703 - DNA, 25 bp, Artificial
  Probe
gaagccaccagctaaactgcagcca

SEQ ID NO: 314704 - DNA, 25 bp, Artificial
  Probe
tgtcaggagctcagtaccagcagca

SEQ ID NO: 314705 - DNA, 25 bp, Artificial
  Probe
cctgggaaagtttcttcaggatatc

SEQ ID NO: 314706 - DNA, 25 bp, Artificial
  Probe
cttcctatgagtatccttctgattg

SEQ ID NO: 314707 - DNA, 25 bp, Artificial
  Probe
tgtgtcagcagcaaaaaggcaatga

SEQ ID NO: 314708 - DNA, 25 bp, Artificial
  Probe
tgaactagtgaatcgcagtgtgcct

SEQ ID NO: 314709 - DNA, 25 bp, Artificial
  Probe
tctgatgtcccttgtccttctcagg

SEQ ID NO: 314710 - DNA, 25 bp, Artificial
  Probe
tccttctgattgaggcaaatgggag

SEQ ID NO: 314711 - DNA, 25 bp, Artificial
  Probe
cggtggcatggcatgacctccttgg

SEQ ID NO: 314712 - DNA, 25 bp, Artificial
  Probe
gttgccttcttgctactctatttcg

SEQ ID NO: 314713 - DNA, 25 bp, Artificial
  Probe
atgaactagtgaatcgcagtgtgcc

SEQ ID NO: 314714 - DNA, 25 bp, Artificial
  Probe
gacactgatgagagtgctcaggcta

SEQ ID NO: 314715 - DNA, 25 bp, Artificial
  Probe
cagcatagcatctgatgtcccttgt

SEQ ID NO: 314716 - DNA, 25 bp, Artificial
  Probe
ttatgcggagtgtccggcaaacatg

SEQ ID NO: 314717 - DNA, 25 bp, Artificial
  Probe
tactggagtattaccctatggtcta

SEQ ID NO: 314718 - DNA, 25 bp, Artificial
  Probe
atgccatcatacagagccttgtcaa

SEQ ID NO: 314719 - DNA, 25 bp, Artificial
  Probe
gccttcttgctactctatttcgatg

SEQ ID NO: 314720 - DNA, 25 bp, Artificial
  Probe
ttacaaggtcagcttccatcaattg

SEQ ID NO: 314721 - DNA, 25 bp, Artificial
  Probe
gctccggtggcatggcatgacctcc

SEQ ID NO: 314722 - DNA, 25 bp, Artificial
  Probe
ggtcagcttccatcaattgggctgg

SEQ ID NO: 314723 - DNA, 25 bp, Artificial
  Probe
tgaatcgcagtgtgcctcagctttc

SEQ ID NO: 314724 - DNA, 25 bp, Artificial
  Probe
caaacatgcagcatagcatctgatg

SEQ ID NO: 314725 - DNA, 25 bp, Artificial
  Probe
gagtattaccctatggtctaaattc

SEQ ID NO: 314726 - DNA, 25 bp, Artificial
  Probe
ggtatgattgctcagtcctgcacat

SEQ ID NO: 314727 - DNA, 25 bp, Artificial
  Probe
tttcttatgcggagtgtccggcaaa

SEQ ID NO: 314728 - DNA, 25 bp, Artificial
  Probe
ctccttttcttatgcggagtgtccg

SEQ ID NO: 314729 - DNA, 25 bp, Artificial
  Probe
ttgctactctatttcgatgacactg

SEQ ID NO: 314730 - DNA, 25 bp, Artificial
  Probe
cgatgacactgatgagagtgctcag

SEQ ID NO: 314731 - DNA, 25 bp, Artificial
  Probe
cttgtcaatgaactagtgaatcgca

SEQ ID NO: 314732 - DNA, 25 bp, Artificial
  Probe
ttctcaggaacaggataggtctgta

SEQ ID NO: 314733 - DNA, 25 bp, Artificial
  Probe
ggaatctgtactggagtattaccct

SEQ ID NO: 314734 - DNA, 25 bp, Artificial
  Probe
ggagtattaccctatggtctaaatt

SEQ ID NO: 314735 - DNA, 25 bp, Artificial
  Probe
gtttcttcctatgagtatccttctg

SEQ ID NO: 314736 - DNA, 25 bp, Artificial
  Probe
cactgatgagagtgctcaggctaaa

SEQ ID NO: 314737 - DNA, 25 bp, Artificial
  Probe
cttgagctccggtggcatggcatga

SEQ ID NO: 314738 - DNA, 25 bp, Artificial
  Probe
agctttcctgtgtcccttataagtt

SEQ ID NO: 314739 - DNA, 25 bp, Artificial
  Probe
cttcttgcaagaggtcaagaggagt

SEQ ID NO: 314740 - DNA, 25 bp, Artificial
  Probe
gagtgctcaggctaaacttcttgca

SEQ ID NO: 314741 - DNA, 25 bp, Artificial
  Probe
ctagtgaatcgcagtgtgcctcagc

SEQ ID NO: 314742 - DNA, 25 bp, Artificial
  Probe
ttggatgttgccttcttgctactct

SEQ ID NO: 314743 - DNA, 25 bp, Artificial
  Probe
agactcttgagctccggtggcatgg

SEQ ID NO: 314744 - DNA, 25 bp, Artificial
  Probe
agctccggtggcatggcatgacctc

SEQ ID NO: 314745 - DNA, 25 bp, Artificial
  Probe
tcatacagagccttgtcaatgaact

SEQ ID NO: 314746 - DNA, 25 bp, Artificial
  Probe
aaggcaatgagactcttgagctccg

SEQ ID NO: 314747 - DNA, 25 bp, Artificial
  Probe
aactgatagggaatctccttttctt

SEQ ID NO: 314748 - DNA, 25 bp, Artificial
  Probe
ctccttggatgttgccttcttgcta

SEQ ID NO: 314749 - DNA, 25 bp, Artificial
  Probe
gccatcatacagagccttgtcaatg

SEQ ID NO: 314750 - DNA, 25 bp, Artificial
  Probe
ggagtgtccggcaaacatgcagcat

SEQ ID NO: 314751 - DNA, 25 bp, Artificial
  Probe
ccccaaattactgtaaaggaatctg

SEQ ID NO: 314752 - DNA, 25 bp, Artificial
  Probe
cgagtgtggtttccaatggacaaat

SEQ ID NO: 314753 - DNA, 25 bp, Artificial
  Probe
tgtgcccagcaggagcaggctccca

SEQ ID NO: 314754 - DNA, 25 bp, Artificial
  Probe
gctcatcttgtatctcaatgacacg

SEQ ID NO: 314755 - DNA, 25 bp, Artificial
  Probe
gtagccataggtgtacaggacacac

SEQ ID NO: 314756 - DNA, 25 bp, Artificial
  Probe
tctacaataccgtccggctcttcag

SEQ ID NO: 314757 - DNA, 25 bp, Artificial
  Probe
aatgacacgagtacccaggcctacc

SEQ ID NO: 314758 - DNA, 25 bp, Artificial
  Probe
ggtcttgctatacactctgaacaac

SEQ ID NO: 314759 - DNA, 25 bp, Artificial
  Probe
ttaatatgcctctctcagtgccgcc

SEQ ID NO: 314760 - DNA, 25 bp, Artificial
  Probe
agcagaagtcacctctacaataccg

SEQ ID NO: 314761 - DNA, 25 bp, Artificial
  Probe
agagagcttcatgtgaccaatcttt

SEQ ID NO: 314762 - DNA, 25 bp, Artificial
  Probe
gttcctaaacccagcagaagtcacc

SEQ ID NO: 314763 - DNA, 25 bp, Artificial
  Probe
ccataaaccaagtggattatagctc

SEQ ID NO: 314764 - DNA, 25 bp, Artificial
  Probe
ccctgccaatggtggacctgctatt

SEQ ID NO: 314765 - DNA, 25 bp, Artificial
  Probe
tcctcggcaccgtcggggacagaaa

SEQ ID NO: 314766 - DNA, 25 bp, Artificial
  Probe
ctgtccccgggcagtcaggcatcgg

SEQ ID NO: 314767 - DNA, 25 bp, Artificial
  Probe
aacccgatggctccattgcttacaa

SEQ ID NO: 314768 - DNA, 25 bp, Artificial
  Probe
agagtgctgtggttttacgcgtaac

SEQ ID NO: 314769 - DNA, 25 bp, Artificial
  Probe
cagaaacaaagaagccacttacagc

SEQ ID NO: 314770 - DNA, 25 bp, Artificial
  Probe
gcctgggcagagagcttcatgtgac

SEQ ID NO: 314771 - DNA, 25 bp, Artificial
  Probe
ccgtcctgtggaagaggaggctact

SEQ ID NO: 314772 - DNA, 25 bp, Artificial
  Probe
gatacaaccctaggtactgtaaagg

SEQ ID NO: 314773 - DNA, 25 bp, Artificial
  Probe
tgtgactacccgtcctgtggaagag

SEQ ID NO: 314774 - DNA, 25 bp, Artificial
  Probe
aggtgtacaggacacactggtcgtt

SEQ ID NO: 314775 - DNA, 25 bp, Artificial
  Probe
agcaaccagatgacaggacccctgc

SEQ ID NO: 314776 - DNA, 25 bp, Artificial
  Probe
atgagaagctagacccctcagtgcc

SEQ ID NO: 314777 - DNA, 25 bp, Artificial
  Probe
aggcattcacagcatcccggccagg

SEQ ID NO: 314778 - DNA, 25 bp, Artificial
  Probe
ggagcattcacctatctgtcaattt

SEQ ID NO: 314779 - DNA, 25 bp, Artificial
  Probe
gccccagagaatggaacgtttaata

SEQ ID NO: 314780 - DNA, 25 bp, Artificial
  Probe
gggacaactggatcgtggccccgca

SEQ ID NO: 314781 - DNA, 25 bp, Artificial
  Probe
ttcttttccctcaaaacgagtgtga

SEQ ID NO: 314782 - DNA, 25 bp, Artificial
  Probe
ctgtcaattttacatgcacaagaga

SEQ ID NO: 314783 - DNA, 25 bp, Artificial
  Probe
acctgagcctgtctggcagagcagt

SEQ ID NO: 314784 - DNA, 25 bp, Artificial
  Probe
ccgcacagatacaaccctaggtact

SEQ ID NO: 314785 - DNA, 25 bp, Artificial
  Probe
gtttaatatgcctctctcagtgccg

SEQ ID NO: 314786 - DNA, 25 bp, Artificial
  Probe
aaggctaccccaagagcgccatact

SEQ ID NO: 314787 - DNA, 25 bp, Artificial
  Probe
tacaaggtgcacctgtcgttagcat

SEQ ID NO: 314788 - DNA, 25 bp, Artificial
  Probe
ctcctccactgtgacctgtgtgtgt

SEQ ID NO: 314789 - DNA, 25 bp, Artificial
  Probe
ttcagtccacccagaggcattcaca

SEQ ID NO: 314790 - DNA, 25 bp, Artificial
  Probe
ttcagcccctggtggcctcaagcga

SEQ ID NO: 314791 - DNA, 25 bp, Artificial
  Probe
gacagaaaaccctcagctcagaaac

SEQ ID NO: 314792 - DNA, 25 bp, Artificial
  Probe
ttcttacccacgagtgtggtttcca

SEQ ID NO: 314793 - DNA, 25 bp, Artificial
  Probe
aatacagccccttgagcgtgttgac

SEQ ID NO: 314794 - DNA, 25 bp, Artificial
  Probe
ccctgaggaaacacaggtggattga

SEQ ID NO: 314795 - DNA, 25 bp, Artificial
  Probe
ttacgcgtaacagaagaataaaccg

SEQ ID NO: 314796 - DNA, 25 bp, Artificial
  Probe
cattgcttacaaagagtacgaagat

SEQ ID NO: 314797 - DNA, 25 bp, Artificial
  Probe
ccctcagtgccaaggccttcatgtg

SEQ ID NO: 314798 - DNA, 25 bp, Artificial
  Probe
ggccagggtaacatctccatcagcc

SEQ ID NO: 314799 - DNA, 25 bp, Artificial
  Probe
tcatcgaagccaaggcatccaaaat

SEQ ID NO: 314800 - DNA, 25 bp, Artificial
  Probe
cctagatgggccacagaggcctgtt

SEQ ID NO: 314801 - DNA, 25 bp, Artificial
  Probe
ttcaaaatcgtctgcgtctatattg

SEQ ID NO: 314802 - DNA, 25 bp, Artificial
  Probe
gttcccgagatcacgctcagagctc

SEQ ID NO: 314803 - DNA, 25 bp, Artificial
  Probe
gatctgttcccgagatcacgctcag

SEQ ID NO: 314804 - DNA, 25 bp, Artificial
  Probe
tgtggaatttcaccaggagcagcag

SEQ ID NO: 314805 - DNA, 25 bp, Artificial
  Probe
agtggccctgaacctgctggtcaca

SEQ ID NO: 314806 - DNA, 25 bp, Artificial
  Probe
ggtaacatctccatcagccttgtac

SEQ ID NO: 314807 - DNA, 25 bp, Artificial
  Probe
gcatccaaaatcttcaactgccgga

SEQ ID NO: 314808 - DNA, 25 bp, Artificial
  Probe
ctgggtgacctagatgggccacaga

SEQ ID NO: 314809 - DNA, 25 bp, Artificial
  Probe
aggagcagcagatcttcatcgaagc

SEQ ID NO: 314810 - DNA, 25 bp, Artificial
  Probe
ggaaacgggaccttcagcgtccact

SEQ ID NO: 314811 - DNA, 25 bp, Artificial
  Probe
acctgctggtcacagggaagattgt

SEQ ID NO: 314812 - DNA, 25 bp, Artificial
  Probe
gcctgttcaaggaggctggctgtct

SEQ ID NO: 314813 - DNA, 25 bp, Artificial
  Probe
gatgggccacagaggcctgttcaag

SEQ ID NO: 314814 - DNA, 25 bp, Artificial
  Probe
cagcccttcaaaatcgtctgcgtct

SEQ ID NO: 314815 - DNA, 25 bp, Artificial
  Probe
tcagagctccgctacctggagctgc

SEQ ID NO: 314816 - DNA, 25 bp, Artificial
  Probe
cgaagccaaggcatccaaaatcttc

SEQ ID NO: 314817 - DNA, 25 bp, Artificial
  Probe
acgccacgggccagggtaacatctc

SEQ ID NO: 314818 - DNA, 25 bp, Artificial
  Probe
gacccagccaagatctgttcccgag

SEQ ID NO: 314819 - DNA, 25 bp, Artificial
  Probe
acatcaagacagtggccctgaacct

SEQ ID NO: 314820 - DNA, 25 bp, Artificial
  Probe
cgagatcacgctcagagctccgcta

SEQ ID NO: 314821 - DNA, 25 bp, Artificial
  Probe
cccagcaaagctgtggaatttcacc

SEQ ID NO: 314822 - DNA, 25 bp, Artificial
  Probe
gccttctatagcacggactatcgac

SEQ ID NO: 314823 - DNA, 25 bp, Artificial
  Probe
ccatctgggtgacctagatgggcca

SEQ ID NO: 314824 - DNA, 25 bp, Artificial
  Probe
gccacagaggcctgttcaaggaggc

SEQ ID NO: 314825 - DNA, 25 bp, Artificial
  Probe
ctgcgtctatattgccttctatagc

SEQ ID NO: 314826 - DNA, 25 bp, Artificial
  Probe
aaatcgtctgcgtctatattgcctt

SEQ ID NO: 314827 - DNA, 25 bp, Artificial
  Probe
tctatagcacggactatcgactggt

SEQ ID NO: 314828 - DNA, 25 bp, Artificial
  Probe
gctgtggaatttcaccaggagcagc

SEQ ID NO: 314829 - DNA, 25 bp, Artificial
  Probe
ccaggagcagcagatcttcatcgaa

SEQ ID NO: 314830 - DNA, 25 bp, Artificial
  Probe
cggactatcgactggtgcagaaggt

SEQ ID NO: 314831 - DNA, 25 bp, Artificial
  Probe
cacagaggcctgttcaaggaggctg

SEQ ID NO: 314832 - DNA, 25 bp, Artificial
  Probe
ccccagcaaagctgtggaatttcac

SEQ ID NO: 314833 - DNA, 25 bp, Artificial
  Probe
tgaacctgctggtcacagggaagat

SEQ ID NO: 314834 - DNA, 25 bp, Artificial
  Probe
aggcatccaaaatcttcaactgccg

SEQ ID NO: 314835 - DNA, 25 bp, Artificial
  Probe
ttcatcgaagccaaggcatccaaaa

SEQ ID NO: 314836 - DNA, 25 bp, Artificial
  Probe
gtctatattgccttctatagcacgg

SEQ ID NO: 314837 - DNA, 25 bp, Artificial
  Probe
gcccttcaaaatcgtctgcgtctat

SEQ ID NO: 314838 - DNA, 25 bp, Artificial
  Probe
gccaagatctgttcccgagatcacg

SEQ ID NO: 314839 - DNA, 25 bp, Artificial
  Probe
gagatcacgctcagagctccgctac

SEQ ID NO: 314840 - DNA, 25 bp, Artificial
  Probe
cacgggccagggtaacatctccatc

SEQ ID NO: 314841 - DNA, 25 bp, Artificial
  Probe
gatcttcatcgaagccaaggcatcc

SEQ ID NO: 314842 - DNA, 25 bp, Artificial
  Probe
gaagccaaggcatccaaaatcttca

SEQ ID NO: 314843 - DNA, 25 bp, Artificial
  Probe
ccaaaatcttcaactgccggatgga

SEQ ID NO: 314844 - DNA, 25 bp, Artificial
  Probe
tgggcccagagtttcccaccagatc

SEQ ID NO: 314845 - DNA, 25 bp, Artificial
  Probe
agtcaggccgcttggctctgcgcca

SEQ ID NO: 314846 - DNA, 25 bp, Artificial
  Probe
ccccacgtcttccactatgggtgag

SEQ ID NO: 314847 - DNA, 25 bp, Artificial
  Probe
gagtcaggccgcttggctctgcgcc

SEQ ID NO: 314848 - DNA, 25 bp, Artificial
  Probe
cgcaggtgtgcttcaccgagcacac

SEQ ID NO: 314849 - DNA, 25 bp, Artificial
  Probe
agagtttcccaccagatctcagtct

SEQ ID NO: 314850 - DNA, 25 bp, Artificial
  Probe
cgcgcttttaattgccacgtagaat

SEQ ID NO: 314851 - DNA, 25 bp, Artificial
  Probe
ctgggcccagagtttcccaccagat

SEQ ID NO: 314852 - DNA, 25 bp, Artificial
  Probe
agtgagcacccctactttggataac

SEQ ID NO: 314853 - DNA, 25 bp, Artificial
  Probe
aacttccagagtgagcacccctact

SEQ ID NO: 314854 - DNA, 25 bp, Artificial
  Probe
ttcccccgggactatcagccagtgt

SEQ ID NO: 314855 - DNA, 25 bp, Artificial
  Probe
acgacccgtcgcaggtgtgcttcac

SEQ ID NO: 314856 - DNA, 25 bp, Artificial
  Probe
ccagagtttcccaccagatctcagt

SEQ ID NO: 314857 - DNA, 25 bp, Artificial
  Probe
acacgcagagtcaggccgcttggct

SEQ ID NO: 314858 - DNA, 25 bp, Artificial
  Probe
ccaccagatctcagtctcactaggt

SEQ ID NO: 314859 - DNA, 25 bp, Artificial
  Probe
ctgtacgacccgtcgcaggtgtgct

SEQ ID NO: 314860 - DNA, 25 bp, Artificial
  Probe
tcagtctcactaggtgggaccctcc

SEQ ID NO: 314861 - DNA, 25 bp, Artificial
  Probe
attgccacgtagaatatgagaagac

SEQ ID NO: 314862 - DNA, 25 bp, Artificial
  Probe
ttcctcagttttgactacaaactgg

SEQ ID NO: 314863 - DNA, 25 bp, Artificial
  Probe
ggactatcagccagtgtggccctcc

SEQ ID NO: 314864 - DNA, 25 bp, Artificial
  Probe
cagtgtggccctccatttccttgtg

SEQ ID NO: 314865 - DNA, 25 bp, Artificial
  Probe
ttgccacgtagaatatgagaagaca

SEQ ID NO: 314866 - DNA, 25 bp, Artificial
  Probe
cccgggactatcagccagtgtggcc

SEQ ID NO: 314867 - DNA, 25 bp, Artificial
  Probe
tcctcagttttgactacaaactggt

SEQ ID NO: 314868 - DNA, 25 bp, Artificial
  Probe
cccagactataacttccagagtgag

SEQ ID NO: 314869 - DNA, 25 bp, Artificial
  Probe
ctggggccaaagagtcgcgcgcttt

SEQ ID NO: 314870 - DNA, 25 bp, Artificial
  Probe
cttttaattgccacgtagaatatga

SEQ ID NO: 314871 - DNA, 25 bp, Artificial
  Probe
cgtgcctgtacgacccgtcgcaggt

SEQ ID NO: 314872 - DNA, 25 bp, Artificial
  Probe
cgagcacacgcagagtcaggccgct

SEQ ID NO: 314873 - DNA, 25 bp, Artificial
  Probe
tccagagtgagcacccctactttgg

SEQ ID NO: 314874 - DNA, 25 bp, Artificial
  Probe
tatcagccagtgtggccctccattt

SEQ ID NO: 314875 - DNA, 25 bp, Artificial
  Probe
ctcagttttgactacaaactggtgc

SEQ ID NO: 314876 - DNA, 25 bp, Artificial
  Probe
gagcacccctactttggataacgcc

SEQ ID NO: 314877 - DNA, 25 bp, Artificial
  Probe
agagtcgcgcgcttttaattgccac

SEQ ID NO: 314878 - DNA, 25 bp, Artificial
  Probe
cctccatttccttgtggtactgagt

SEQ ID NO: 314879 - DNA, 25 bp, Artificial
  Probe
gacccgtcgcaggtgtgcttcaccg

SEQ ID NO: 314880 - DNA, 25 bp, Artificial
  Probe
tgtgcttcaccgagcacacgcagag

SEQ ID NO: 314881 - DNA, 25 bp, Artificial
  Probe
gactatcagccagtgtggccctcca

SEQ ID NO: 314882 - DNA, 25 bp, Artificial
  Probe
ggccctccatttccttgtggtactg

SEQ ID NO: 314883 - DNA, 25 bp, Artificial
  Probe
atgagaagacaaaccgcgctcgcaa

SEQ ID NO: 314884 - DNA, 25 bp, Artificial
  Probe
ttcaccgagcacacgcagagtcagg

SEQ ID NO: 314885 - DNA, 25 bp, Artificial
  Probe
ttgactacaaactggtgcagaaggt

SEQ ID NO: 314886 - DNA, 25 bp, Artificial
  Probe
ctgtataccccatgctcctgtgact

SEQ ID NO: 314887 - DNA, 25 bp, Artificial
  Probe
gggcccagagtttcccaccagatct

SEQ ID NO: 314888 - DNA, 25 bp, Artificial
  Probe
tggggccaaagagtcgcgcgctttt

SEQ ID NO: 314889 - DNA, 25 bp, Artificial
  Probe
tgtataccccatgctcctgtgactg

SEQ ID NO: 314890 - DNA, 25 bp, Artificial
  Probe
tctgtatactgatgggagacgggca

SEQ ID NO: 314891 - DNA, 25 bp, Artificial
  Probe
gcaacgtaacccttcaggatgttca

SEQ ID NO: 314892 - DNA, 25 bp, Artificial
  Probe
ttacaaattttccaatagagcgaag

SEQ ID NO: 314893 - DNA, 25 bp, Artificial
  Probe
agcccccgagttgacaggagatcaa

SEQ ID NO: 314894 - DNA, 25 bp, Artificial
  Probe
gcacagttgtgacttcttcctaaac

SEQ ID NO: 314895 - DNA, 25 bp, Artificial
  Probe
agacttcaggaatgggacaactttt

SEQ ID NO: 314896 - DNA, 25 bp, Artificial
  Probe
gagatcaatggcttcagacagtctt

SEQ ID NO: 314897 - DNA, 25 bp, Artificial
  Probe
ggagacgggcacagttgtgacttct

SEQ ID NO: 314898 - DNA, 25 bp, Artificial
  Probe
cttcctaaacacagccttggagctc

SEQ ID NO: 314899 - DNA, 25 bp, Artificial
  Probe
caggccgagaatgctcaggacagtg

SEQ ID NO: 314900 - DNA, 25 bp, Artificial
  Probe
atcttcagaagcaaatagaagagca

SEQ ID NO: 314901 - DNA, 25 bp, Artificial
  Probe
tctctgagacacaggggaatttgct

SEQ ID NO: 314902 - DNA, 25 bp, Artificial
  Probe
tggagctacttaaggccttagagac

SEQ ID NO: 314903 - DNA, 25 bp, Artificial
  Probe
attgtatcaggcaacgtaacccttc

SEQ ID NO: 314904 - DNA, 25 bp, Artificial
  Probe
ctaaacacagccttggagctctctg

SEQ ID NO: 314905 - DNA, 25 bp, Artificial
  Probe
tatactgatgggagacgggcacagt

SEQ ID NO: 314906 - DNA, 25 bp, Artificial
  Probe
agtctcccatcgtgggataaaattg

SEQ ID NO: 314907 - DNA, 25 bp, Artificial
  Probe
ccttagagacccttgtggctcaaaa

SEQ ID NO: 314908 - DNA, 25 bp, Artificial
  Probe
ctatgtctgtatactgatgggagac

SEQ ID NO: 314909 - DNA, 25 bp, Artificial
  Probe
gacccttgtggctcaaaataccact

SEQ ID NO: 314910 - DNA, 25 bp, Artificial
  Probe
ctacttaaggccttagagacccttg

SEQ ID NO: 314911 - DNA, 25 bp, Artificial
  Probe
cttgagtctcccatcgtgggataaa

SEQ ID NO: 314912 - DNA, 25 bp, Artificial
  Probe
aaggccttagagacccttgtggctc

SEQ ID NO: 314913 - DNA, 25 bp, Artificial
  Probe
aagagcaggccgagaatgctcagga

SEQ ID NO: 314914 - DNA, 25 bp, Artificial
  Probe
tggaagggcaagtcctccatcttca

SEQ ID NO: 314915 - DNA, 25 bp, Artificial
  Probe
tggctcaaaataccactggccccgt

SEQ ID NO: 314916 - DNA, 25 bp, Artificial
  Probe
gacttcttcctaaacacagccttgg

SEQ ID NO: 314917 - DNA, 25 bp, Artificial
  Probe
cgaagactttagtgactcgaagaac

SEQ ID NO: 314918 - DNA, 25 bp, Artificial
  Probe
gtcctccatcttcagaagcaaatag

SEQ ID NO: 314919 - DNA, 25 bp, Artificial
  Probe
gttgtgacttcttcctaaacacagc

SEQ ID NO: 314920 - DNA, 25 bp, Artificial
  Probe
tctaccatttgatggcctatgtctg

SEQ ID NO: 314921 - DNA, 25 bp, Artificial
  Probe
tagagacccttgtggctcaaaatac

SEQ ID NO: 314922 - DNA, 25 bp, Artificial
  Probe
tcaggcaacgtaacccttcaggatg

SEQ ID NO: 314923 - DNA, 25 bp, Artificial
  Probe
gtggagctacttaaggccttagaga

SEQ ID NO: 314924 - DNA, 25 bp, Artificial
  Probe
atactgatgggagacgggcacagtt

SEQ ID NO: 314925 - DNA, 25 bp, Artificial
  Probe
gcaagtcctccatcttcagaagcaa

SEQ ID NO: 314926 - DNA, 25 bp, Artificial
  Probe
tcccatcgtgggataaaattgtatc

SEQ ID NO: 314927 - DNA, 25 bp, Artificial
  Probe
ccccgagttgacaggagatcaatgg

SEQ ID NO: 314928 - DNA, 25 bp, Artificial
  Probe
ctaccccaggctctaccatttgatg

SEQ ID NO: 314929 - DNA, 25 bp, Artificial
  Probe
gactttagtgactcgaagaacccca

SEQ ID NO: 314930 - DNA, 25 bp, Artificial
  Probe
cccatcgtgggataaaattgtatca

SEQ ID NO: 314931 - DNA, 25 bp, Artificial
  Probe
tcctttactacgaaggaatttctag

SEQ ID NO: 314932 - DNA, 25 bp, Artificial
  Probe
tagtgactcgaagaaccccaacggt

SEQ ID NO: 314933 - DNA, 25 bp, Artificial
  Probe
catttgatggcctatgtctgtatac

SEQ ID NO: 314934 - DNA, 25 bp, Artificial
  Probe
cagtcttgagtctcccatcgtggga

SEQ ID NO: 314935 - DNA, 25 bp, Artificial
  Probe
attttccaatagagcgaagacttta

SEQ ID NO: 314936 - DNA, 25 bp, Artificial
  Probe
cgccctacagacaccggaatactgt

SEQ ID NO: 314937 - DNA, 25 bp, Artificial
  Probe
agctcagctagagtgttttaggagc

SEQ ID NO: 314938 - DNA, 25 bp, Artificial
  Probe
tacagacaccggaatactgtggtgt

SEQ ID NO: 314939 - DNA, 25 bp, Artificial
  Probe
cgccttgggaaatgcagagtacatg

SEQ ID NO: 314940 - DNA, 25 bp, Artificial
  Probe
ctcgctgaagccaggcactatgctg

SEQ ID NO: 314941 - DNA, 25 bp, Artificial
  Probe
tcaccaacgccttgggaaatgcaga

SEQ ID NO: 314942 - DNA, 25 bp, Artificial
  Probe
gaaagcatttgacaaccccgactac

SEQ ID NO: 314943 - DNA, 25 bp, Artificial
  Probe
cctctcagagttctcgctgaagcca

SEQ ID NO: 314944 - DNA, 25 bp, Artificial
  Probe
ctcagctagagtgttttaggagcag

SEQ ID NO: 314945 - DNA, 25 bp, Artificial
  Probe
ttgacaaccccgactactggaacca

SEQ ID NO: 314946 - DNA, 25 bp, Artificial
  Probe
ctgtgccagagaaagccaagaaagc

SEQ ID NO: 314947 - DNA, 25 bp, Artificial
  Probe
tccgccctattgtggcagagaatcc

SEQ ID NO: 314948 - DNA, 25 bp, Artificial
  Probe
agttctcgctgaagccaggcactat

SEQ ID NO: 314949 - DNA, 25 bp, Artificial
  Probe
tgaaaaacagcttactgtctgtgcc

SEQ ID NO: 314950 - DNA, 25 bp, Artificial
  Probe
ggagcactcttcagcacccagacta

SEQ ID NO: 314951 - DNA, 25 bp, Artificial
  Probe
cagagaatcctgagtacctctcaga

SEQ ID NO: 314952 - DNA, 25 bp, Artificial
  Probe
tattgtggcagagaatcctgagtac

SEQ ID NO: 314953 - DNA, 25 bp, Artificial
  Probe
gaatactgtggtgtgagctcagcta

SEQ ID NO: 314954 - DNA, 25 bp, Artificial
  Probe
cagagttctcgctgaagccaggcac

SEQ ID NO: 314955 - DNA, 25 bp, Artificial
  Probe
agtacgtgaatgagcccctttatct

SEQ ID NO: 314956 - DNA, 25 bp, Artificial
  Probe
gagaatcctgagtacctctcagagt

SEQ ID NO: 314957 - DNA, 25 bp, Artificial
  Probe
acctgcaggaatacagcacaaaata

SEQ ID NO: 314958 - DNA, 25 bp, Artificial
  Probe
ttgtggcagagaatcctgagtacct

SEQ ID NO: 314959 - DNA, 25 bp, Artificial
  Probe
actgtctgtgccagagaaagccaag

SEQ ID NO: 314960 - DNA, 25 bp, Artificial
  Probe
agtacatgaaaaacagcttactgtc

SEQ ID NO: 314961 - DNA, 25 bp, Artificial
  Probe
tggcagtcttccttctaccccaagg

SEQ ID NO: 314962 - DNA, 25 bp, Artificial
  Probe
actgtggtgtgagctcagctagagt

SEQ ID NO: 314963 - DNA, 25 bp, Artificial
  Probe
aagcatttgacaaccccgactactg

SEQ ID NO: 314964 - DNA, 25 bp, Artificial
  Probe
acggatccgccctattgtggcagag

SEQ ID NO: 314965 - DNA, 25 bp, Artificial
  Probe
agcttactgtctgtgccagagaaag

SEQ ID NO: 314966 - DNA, 25 bp, Artificial
  Probe
ccctattgtggcagagaatcctgag

SEQ ID NO: 314967 - DNA, 25 bp, Artificial
  Probe
tttataaacagaatggacggatccg

SEQ ID NO: 314968 - DNA, 25 bp, Artificial
  Probe
cggaatactgtggtgtgagctcagc

SEQ ID NO: 314969 - DNA, 25 bp, Artificial
  Probe
accggaatactgtggtgtgagctca

SEQ ID NO: 314970 - DNA, 25 bp, Artificial
  Probe
tacctgcaggaatacagcacaaaat

SEQ ID NO: 314971 - DNA, 25 bp, Artificial
  Probe
aacagcttactgtctgtgccagaga

SEQ ID NO: 314972 - DNA, 25 bp, Artificial
  Probe
caacgccttgggaaatgcagagtac

SEQ ID NO: 314973 - DNA, 25 bp, Artificial
  Probe
atcctgagtacctctcagagttctc

SEQ ID NO: 314974 - DNA, 25 bp, Artificial
  Probe
ttcagcacccagactacctgcagga

SEQ ID NO: 314975 - DNA, 25 bp, Artificial
  Probe
ttcaccaacgccttgggaaatgcag

SEQ ID NO: 314976 - DNA, 25 bp, Artificial
  Probe
ccccaaggcagaggatgagtacgtg

SEQ ID NO: 314977 - DNA, 25 bp, Artificial
  Probe
atccgccctattgtggcagagaatc

SEQ ID NO: 314978 - DNA, 25 bp, Artificial
  Probe
gcacccagactacctgcaggaatac

SEQ ID NO: 314979 - DNA, 25 bp, Artificial
  Probe
tctgtgccagagaaagccaagaaag

SEQ ID NO: 314980 - DNA, 25 bp, Artificial
  Probe
acatgaaaaacagcttactgtctgt

SEQ ID NO: 314981 - DNA, 25 bp, Artificial
  Probe
cagaatggacggatccgccctattg

SEQ ID NO: 314982 - DNA, 25 bp, Artificial
  Probe
gccgcagctagtagcaacatttata

SEQ ID NO: 314983 - DNA, 25 bp, Artificial
  Probe
ctgggtttgcattccaatcattttg

SEQ ID NO: 314984 - DNA, 25 bp, Artificial
  Probe
taagcttaagggtcccgctttgatg

SEQ ID NO: 314985 - DNA, 25 bp, Artificial
  Probe
atacctggcttcttaaccagataag

SEQ ID NO: 314986 - DNA, 25 bp, Artificial
  Probe
tgcattccaatcattttgccgcagc

SEQ ID NO: 314987 - DNA, 25 bp, Artificial
  Probe
attttgccgcagctagtagcaacat

SEQ ID NO: 314988 - DNA, 25 bp, Artificial
  Probe
gcttcttaaccagataagaagtttt

SEQ ID NO: 314989 - DNA, 25 bp, Artificial
  Probe
agggtcccgctttgatgtcctatat

SEQ ID NO: 314990 - DNA, 25 bp, Artificial
  Probe
ggtttgcattccaatcattttgccg

SEQ ID NO: 314991 - DNA, 25 bp, Artificial
  Probe
ttgcattccaatcattttgccgcag

SEQ ID NO: 314992 - DNA, 25 bp, Artificial
  Probe
attccaatcattttgccgcagctag

SEQ ID NO: 314993 - DNA, 25 bp, Artificial
  Probe
gggtcccgctttgatgtcctatatc

SEQ ID NO: 314994 - DNA, 25 bp, Artificial
  Probe
ccgcagctagtagcaacatttatat

SEQ ID NO: 314995 - DNA, 25 bp, Artificial
  Probe
ctctgggtttgcattccaatcattt

SEQ ID NO: 314996 - DNA, 25 bp, Artificial
  Probe
tgggtttgcattccaatcattttgc

SEQ ID NO: 314997 - DNA, 25 bp, Artificial
  Probe
gtttgcattccaatcattttgccgc

SEQ ID NO: 314998 - DNA, 25 bp, Artificial
  Probe
gtcccgctttgatgtcctatatcaa

SEQ ID NO: 314999 - DNA, 25 bp, Artificial
  Probe
ctggcttcttaaccagataagaagt

SEQ ID NO: 315000 - DNA, 25 bp, Artificial
  Probe
ggcctaggggagctatcacaatacc

SEQ ID NO: 315001 - DNA, 25 bp, Artificial
  Probe
tacctggcttcttaaccagataaga

SEQ ID NO: 315002 - DNA, 25 bp, Artificial
  Probe
cctggcttcttaaccagataagaag

SEQ ID NO: 315003 - DNA, 25 bp, Artificial
  Probe
tcattttgccgcagctagtagcaac

SEQ ID NO: 315004 - DNA, 25 bp, Artificial
  Probe
tgccgcagctagtagcaacatttat

SEQ ID NO: 315005 - DNA, 25 bp, Artificial
  Probe
tctgggtttgcattccaatcatttt

SEQ ID NO: 315006 - DNA, 25 bp, Artificial
  Probe
actctgggtttgcattccaatcatt

SEQ ID NO: 315007 - DNA, 25 bp, Artificial
  Probe
ttttgccgcagctagtagcaacatt

SEQ ID NO: 315008 - DNA, 25 bp, Artificial
  Probe
ccgctttgatgtcctatatcaaatg

SEQ ID NO: 315009 - DNA, 25 bp, Artificial
  Probe
ggagctatcacaatacctggcttct

SEQ ID NO: 315010 - DNA, 25 bp, Artificial
  Probe
ctggcctaggggagctatcacaata

SEQ ID NO: 315011 - DNA, 25 bp, Artificial
  Probe
atattctggcctaggggagctatca

SEQ ID NO: 315012 - DNA, 25 bp, Artificial
  Probe
acctggcttcttaaccagataagaa

SEQ ID NO: 315013 - DNA, 25 bp, Artificial
  Probe
taagggtcccgctttgatgtcctat

SEQ ID NO: 315014 - DNA, 25 bp, Artificial
  Probe
tatattctggcctaggggagctatc

SEQ ID NO: 315015 - DNA, 25 bp, Artificial
  Probe
gagctatcacaatacctggcttctt

SEQ ID NO: 315016 - DNA, 25 bp, Artificial
  Probe
gctttgatgtcctatatcaaatgat

SEQ ID NO: 315017 - DNA, 25 bp, Artificial
  Probe
tttgccgcagctagtagcaacattt

SEQ ID NO: 315018 - DNA, 25 bp, Artificial
  Probe
ggcttcttaaccagataagaagttt

SEQ ID NO: 315019 - DNA, 25 bp, Artificial
  Probe
cgctttgatgtcctatatcaaatga

SEQ ID NO: 315020 - DNA, 25 bp, Artificial
  Probe
tggcctaggggagctatcacaatac

SEQ ID NO: 315021 - DNA, 25 bp, Artificial
  Probe
aagggtcccgctttgatgtcctata

SEQ ID NO: 315022 - DNA, 25 bp, Artificial
  Probe
gggtttgcattccaatcattttgcc

SEQ ID NO: 315023 - DNA, 25 bp, Artificial
  Probe
ttccaatcattttgccgcagctagt

SEQ ID NO: 315024 - DNA, 25 bp, Artificial
  Probe
gggagctatcacaatacctggcttc

SEQ ID NO: 315025 - DNA, 25 bp, Artificial
  Probe
ttgccgcagctagtagcaacattta

SEQ ID NO: 315026 - DNA, 25 bp, Artificial
  Probe
gcattccaatcattttgccgcagct

SEQ ID NO: 315027 - DNA, 25 bp, Artificial
  Probe
cattttgccgcagctagtagcaaca

SEQ ID NO: 315028 - DNA, 25 bp, Artificial
  Probe
actctggttcagtagagagccctcc

SEQ ID NO: 315029 - DNA, 25 bp, Artificial
  Probe
tcagagaaagccagagcctgtgcaa

SEQ ID NO: 315030 - DNA, 25 bp, Artificial
  Probe
cagagcctgtgcaaccaagaggtcc

SEQ ID NO: 315031 - DNA, 25 bp, Artificial
  Probe
ggagttctgctattctcaccacaca

SEQ ID NO: 315032 - DNA, 25 bp, Artificial
  Probe
gcagggctctccacagagcggactc

SEQ ID NO: 315033 - DNA, 25 bp, Artificial
  Probe
cagagcggactcaaggccctggagt

SEQ ID NO: 315034 - DNA, 25 bp, Artificial
  Probe
gatctttgatgttcacggccaagga

SEQ ID NO: 315035 - DNA, 25 bp, Artificial
  Probe
tccacagagcggactcaaggccctg

SEQ ID NO: 315036 - DNA, 25 bp, Artificial
  Probe
gaagatctttgatgttcacggccaa

SEQ ID NO: 315037 - DNA, 25 bp, Artificial
  Probe
agccagcgagctcacatctgcatgg

SEQ ID NO: 315038 - DNA, 25 bp, Artificial
  Probe
ccagcgagctcacatctgcatggtg

SEQ ID NO: 315039 - DNA, 25 bp, Artificial
  Probe
ggctctccacagagcggactcaagg

SEQ ID NO: 315040 - DNA, 25 bp, Artificial
  Probe
caggagccagcgagctcacatctgc

SEQ ID NO: 315041 - DNA, 25 bp, Artificial
  Probe
tctttgatgttcacggccaaggaaa

SEQ ID NO: 315042 - DNA, 25 bp, Artificial
  Probe
aggtgcaggactctggttcagtaga

SEQ ID NO: 315043 - DNA, 25 bp, Artificial
  Probe
accacacatctgagataaacagctg

SEQ ID NO: 315044 - DNA, 25 bp, Artificial
  Probe
tcagctgtgaagatctttgatgttc

SEQ ID NO: 315045 - DNA, 25 bp, Artificial
  Probe
tcacatctgcatggtgtgtgtgtgt

SEQ ID NO: 315046 - DNA, 25 bp, Artificial
  Probe
agagaaagccagagcctgtgcaacc

SEQ ID NO: 315047 - DNA, 25 bp, Artificial
  Probe
caagaggtccagaggccagccacag

SEQ ID NO: 315048 - DNA, 25 bp, Artificial
  Probe
gtgatgactgtcagctgtgaagatc

SEQ ID NO: 315049 - DNA, 25 bp, Artificial
  Probe
cctctgtgatgactgtcagctgtga

SEQ ID NO: 315050 - DNA, 25 bp, Artificial
  Probe
actggctggagcaggcacttctctc

SEQ ID NO: 315051 - DNA, 25 bp, Artificial
  Probe
ggcagctgtcctctgtgatgactgt

SEQ ID NO: 315052 - DNA, 25 bp, Artificial
  Probe
gcacttctctcagagaaagccagag

SEQ ID NO: 315053 - DNA, 25 bp, Artificial
  Probe
gggagttctgctattctcaccacac

SEQ ID NO: 315054 - DNA, 25 bp, Artificial
  Probe
cacacatctgagataaacagctggg

SEQ ID NO: 315055 - DNA, 25 bp, Artificial
  Probe
aggactggctggagcaggcacttct

SEQ ID NO: 315056 - DNA, 25 bp, Artificial
  Probe
gctggagcaggcacttctctcagag

SEQ ID NO: 315057 - DNA, 25 bp, Artificial
  Probe
ccaagaggtccagaggccagccaca

SEQ ID NO: 315058 - DNA, 25 bp, Artificial
  Probe
tgtatgtctgtacatgcagctgtgt

SEQ ID NO: 315059 - DNA, 25 bp, Artificial
  Probe
tctctcagagaaagccagagcctgt

SEQ ID NO: 315060 - DNA, 25 bp, Artificial
  Probe
tcgaggcagctgtcctctgtgatga

SEQ ID NO: 315061 - DNA, 25 bp, Artificial
  Probe
agctgtgaagatctttgatgttcac

SEQ ID NO: 315062 - DNA, 25 bp, Artificial
  Probe
cagggctctccacagagcggactca

SEQ ID NO: 315063 - DNA, 25 bp, Artificial
  Probe
acatctgagataaacagctgggtgt

SEQ ID NO: 315064 - DNA, 25 bp, Artificial
  Probe
ctgtgatgactgtcagctgtgaaga

SEQ ID NO: 315065 - DNA, 25 bp, Artificial
  Probe
aaagccagagcctgtgcaaccaaga

SEQ ID NO: 315066 - DNA, 25 bp, Artificial
  Probe
ttcacaggagccagcgagctcacat

SEQ ID NO: 315067 - DNA, 25 bp, Artificial
  Probe
ctgtcagctgtgaagatctttgatg

SEQ ID NO: 315068 - DNA, 25 bp, Artificial
  Probe
gtgcaggactctggttcagtagaga

SEQ ID NO: 315069 - DNA, 25 bp, Artificial
  Probe
agccagagcctgtgcaaccaagagg

SEQ ID NO: 315070 - DNA, 25 bp, Artificial
  Probe
cagtgtcgaggcagctgtcctctgt

SEQ ID NO: 315071 - DNA, 25 bp, Artificial
  Probe
cagctgtcctctgtgatgactgtca

SEQ ID NO: 315072 - DNA, 25 bp, Artificial
  Probe
gctgtcctctgtgatgactgtcagc

SEQ ID NO: 315073 - DNA, 25 bp, Artificial
  Probe
gtctgtacatgcagctgtgtgtcct

SEQ ID NO: 315074 - DNA, 25 bp, Artificial
  Probe
cttctcagagatacccgtgggatgg

SEQ ID NO: 315075 - DNA, 25 bp, Artificial
  Probe
cccgtggacagtctgggcaccagcg

SEQ ID NO: 315076 - DNA, 25 bp, Artificial
  Probe
tgcgtccacggctgtgacttttggc

SEQ ID NO: 315077 - DNA, 25 bp, Artificial
  Probe
aaatcgagcgaagatggcagcccga

SEQ ID NO: 315078 - DNA, 25 bp, Artificial
  Probe
agctgcagagccagcgcatcctagc

SEQ ID NO: 315079 - DNA, 25 bp, Artificial
  Probe
cgaggagctgcagagccagcgcatc

SEQ ID NO: 315080 - DNA, 25 bp, Artificial
  Probe
ccggccttcctgtcagtgacttctg

SEQ ID NO: 315081 - DNA, 25 bp, Artificial
  Probe
ggacaccggccttcctgtcagtgac

SEQ ID NO: 315082 - DNA, 25 bp, Artificial
  Probe
tacccgtgggatggacaccggcctt

SEQ ID NO: 315083 - DNA, 25 bp, Artificial
  Probe
tcagctacgccttctccgtgtggcg

SEQ ID NO: 315084 - DNA, 25 bp, Artificial
  Probe
aagctggccgccaggtacatagact

SEQ ID NO: 315085 - DNA, 25 bp, Artificial
  Probe
aatcgagcgaagatggcagcccgac

SEQ ID NO: 315086 - DNA, 25 bp, Artificial
  Probe
atattggattgtatttccctctaag

SEQ ID NO: 315087 - DNA, 25 bp, Artificial
  Probe
ttcctgtcagtgacttctgcgtcct

SEQ ID NO: 315088 - DNA, 25 bp, Artificial
  Probe
agacgctcaagctggccgccaggta

SEQ ID NO: 315089 - DNA, 25 bp, Artificial
  Probe
atctcaggcgcaagaggaactggat

SEQ ID NO: 315090 - DNA, 25 bp, Artificial
  Probe
gacagagagccaggttcacatcctt

SEQ ID NO: 315091 - DNA, 25 bp, Artificial
  Probe
tgtcccccgtggacagtctgggcac

SEQ ID NO: 315092 - DNA, 25 bp, Artificial
  Probe
ctggatgcgtccacggctgtgactt

SEQ ID NO: 315093 - DNA, 25 bp, Artificial
  Probe
acagtctgggcaccagcgaggaaga

SEQ ID NO: 315094 - DNA, 25 bp, Artificial
  Probe
ctttctggaaagttctagattcagg

SEQ ID NO: 315095 - DNA, 25 bp, Artificial
  Probe
tgctcaccattggattttcctcctg

SEQ ID NO: 315096 - DNA, 25 bp, Artificial
  Probe
gtgacttttggcacccggacaacca

SEQ ID NO: 315097 - DNA, 25 bp, Artificial
  Probe
gaactggatgcgtccacggctgtga

SEQ ID NO: 315098 - DNA, 25 bp, Artificial
  Probe
gtccttatctgctcaccattggatt

SEQ ID NO: 315099 - DNA, 25 bp, Artificial
  Probe
cagagatacccgtgggatggacacc

SEQ ID NO: 315100 - DNA, 25 bp, Artificial
  Probe
tcctcctgagctttagtttggggga

SEQ ID NO: 315101 - DNA, 25 bp, Artificial
  Probe
gcatcctagccaacgtgcgcgagcg

SEQ ID NO: 315102 - DNA, 25 bp, Artificial
  Probe
acgtggctcacgagcgtctcagcta

SEQ ID NO: 315103 - DNA, 25 bp, Artificial
  Probe
gacttctgcgtccttatctgctcac

SEQ ID NO: 315104 - DNA, 25 bp, Artificial
  Probe
agctggagcggcagcccaagcgctt

SEQ ID NO: 315105 - DNA, 25 bp, Artificial
  Probe
aagggcagcccgagcgcgcagtcct

SEQ ID NO: 315106 - DNA, 25 bp, Artificial
  Probe
cggaagcggcgctacagcaagaaat

SEQ ID NO: 315107 - DNA, 25 bp, Artificial
  Probe
gacaataagatgaccagctgcagct

SEQ ID NO: 315108 - DNA, 25 bp, Artificial
  Probe
agctacgccttctccgtgtggcgca

SEQ ID NO: 315109 - DNA, 25 bp, Artificial
  Probe
cagacgctcaagctggccgccaggt

SEQ ID NO: 315110 - DNA, 25 bp, Artificial
  Probe
gagccagcgcatcctagccaacgtg

SEQ ID NO: 315111 - DNA, 25 bp, Artificial
  Probe
ctacagcaagaaatcgagcgaagat

SEQ ID NO: 315112 - DNA, 25 bp, Artificial
  Probe
cgccttctccgtgtggcgcatggag

SEQ ID NO: 315113 - DNA, 25 bp, Artificial
  Probe
cgaccccgggcaagcgcggcaagaa

SEQ ID NO: 315114 - DNA, 25 bp, Artificial
  Probe
ccgtggacagtctgggcaccagcga

SEQ ID NO: 315115 - DNA, 25 bp, Artificial
  Probe
agcccaagcgcttcggccggaagcg

SEQ ID NO: 315116 - DNA, 25 bp, Artificial
  Probe
gcccgagcgcgcagtccttcgagga

SEQ ID NO: 315117 - DNA, 25 bp, Artificial
  Probe
ctgcaaagcgacgagatggacaata

SEQ ID NO: 315118 - DNA, 25 bp, Artificial
  Probe
cgcttcggccggaagcggcgctaca

SEQ ID NO: 315119 - DNA, 25 bp, Artificial
  Probe
ctgcgtccttatctgctcaccattg

SEQ ID NO: 315120 - DNA, 25 bp, Artificial
  Probe
cagcacagatactgtgagctgacat

SEQ ID NO: 315121 - DNA, 25 bp, Artificial
  Probe
taccattcgaatgagttttgtcaag

SEQ ID NO: 315122 - DNA, 25 bp, Artificial
  Probe
ggatgtaaccagtactccatgctgg

SEQ ID NO: 315123 - DNA, 25 bp, Artificial
  Probe
tagaggaatttccagcacagatact

SEQ ID NO: 315124 - DNA, 25 bp, Artificial
  Probe
ttttaacaatcaggagtttgctcag

SEQ ID NO: 315125 - DNA, 25 bp, Artificial
  Probe
aggaatttccagcacagatactgtg

SEQ ID NO: 315126 - DNA, 25 bp, Artificial
  Probe
taacaatcaggagtttgctcagctt

SEQ ID NO: 315127 - DNA, 25 bp, Artificial
  Probe
cccagcagctgcagcctcaaaattt

SEQ ID NO: 315128 - DNA, 25 bp, Artificial
  Probe
gtaccattcgaatgagttttgtcaa

SEQ ID NO: 315129 - DNA, 25 bp, Artificial
  Probe
ggaatttccagcacagatactgtga

SEQ ID NO: 315130 - DNA, 25 bp, Artificial
  Probe
caccgtctgtaagattcccagcagc

SEQ ID NO: 315131 - DNA, 25 bp, Artificial
  Probe
tactgtgagctgacatggaaaaaca

SEQ ID NO: 315132 - DNA, 25 bp, Artificial
  Probe
atttccagcacagatactgtgagct

SEQ ID NO: 315133 - DNA, 25 bp, Artificial
  Probe
agcacagatactgtgagctgacatg

SEQ ID NO: 315134 - DNA, 25 bp, Artificial
  Probe
agaggaatttccagcacagatactg

SEQ ID NO: 315135 - DNA, 25 bp, Artificial
  Probe
actgtgagctgacatggaaaaacag

SEQ ID NO: 315136 - DNA, 25 bp, Artificial
  Probe
cgtctgtaagattcccagcagctgc

SEQ ID NO: 315137 - DNA, 25 bp, Artificial
  Probe
accgacaggatgtaaccagtactcc

SEQ ID NO: 315138 - DNA, 25 bp, Artificial
  Probe
tctgtttcatagtgcagaagtattc

SEQ ID NO: 315139 - DNA, 25 bp, Artificial
  Probe
atactgtgagctgacatggaaaaac

SEQ ID NO: 315140 - DNA, 25 bp, Artificial
  Probe
gtaattgtgaccaacacatttgtat

SEQ ID NO: 315141 - DNA, 25 bp, Artificial
  Probe
ccaccgacaggatgtaaccagtact

SEQ ID NO: 315142 - DNA, 25 bp, Artificial
  Probe
caccgacaggatgtaaccagtactc

SEQ ID NO: 315143 - DNA, 25 bp, Artificial
  Probe
aatttccagcacagatactgtgagc

SEQ ID NO: 315144 - DNA, 25 bp, Artificial
  Probe
tttccagcacagatactgtgagctg

SEQ ID NO: 315145 - DNA, 25 bp, Artificial
  Probe
ccagcacagatactgtgagctgaca

SEQ ID NO: 315146 - DNA, 25 bp, Artificial
  Probe
tttttaacaatcaggagtttgctca

SEQ ID NO: 315147 - DNA, 25 bp, Artificial
  Probe
tacgtaattgtgaccaacacatttg

SEQ ID NO: 315148 - DNA, 25 bp, Artificial
  Probe
gtgtaccattcgaatgagttttgtc

SEQ ID NO: 315149 - DNA, 25 bp, Artificial
  Probe
catttcttctgtttcatagtgcaga

SEQ ID NO: 315150 - DNA, 25 bp, Artificial
  Probe
accgtctgtaagattcccagcagct

SEQ ID NO: 315151 - DNA, 25 bp, Artificial
  Probe
tcaggagtttgctcagcttctggct

SEQ ID NO: 315152 - DNA, 25 bp, Artificial
  Probe
aggatgtaaccagtactccatgctg

SEQ ID NO: 315153 - DNA, 25 bp, Artificial
  Probe
gcacagatactgtgagctgacatgg

SEQ ID NO: 315154 - DNA, 25 bp, Artificial
  Probe
ttcccagcagctgcagcctcaaaat

SEQ ID NO: 315155 - DNA, 25 bp, Artificial
  Probe
cacagatactgtgagctgacatgga

SEQ ID NO: 315156 - DNA, 25 bp, Artificial
  Probe
gtgaccaacacatttgtattttatg

SEQ ID NO: 315157 - DNA, 25 bp, Artificial
  Probe
cagatactgtgagctgacatggaaa

SEQ ID NO: 315158 - DNA, 25 bp, Artificial
  Probe
tttcttctgtttcatagtgcagaag

SEQ ID NO: 315159 - DNA, 25 bp, Artificial
  Probe
ctgtttcatagtgcagaagtattct

SEQ ID NO: 315160 - DNA, 25 bp, Artificial
  Probe
attcccagcagctgcagcctcaaaa

SEQ ID NO: 315161 - DNA, 25 bp, Artificial
  Probe
ttcttctgtttcatagtgcagaagt

SEQ ID NO: 315162 - DNA, 25 bp, Artificial
  Probe
cgtaattgtgaccaacacatttgta

SEQ ID NO: 315163 - DNA, 25 bp, Artificial
  Probe
cttctgtttcatagtgcagaagtat

SEQ ID NO: 315164 - DNA, 25 bp, Artificial
  Probe
ccatttcttctgtttcatagtgcag

SEQ ID NO: 315165 - DNA, 25 bp, Artificial
  Probe
atttttaacaatcaggagtttgctc

SEQ ID NO: 315166 - DNA, 25 bp, Artificial
  Probe
tccacccggaatgctgggatcgagg

SEQ ID NO: 315167 - DNA, 25 bp, Artificial
  Probe
ccataccagatgaggccttcactct

SEQ ID NO: 315168 - DNA, 25 bp, Artificial
  Probe
gcttcaagtaacacatcccagtgcc

SEQ ID NO: 315169 - DNA, 25 bp, Artificial
  Probe
ttcaagtaacacatcccagtgcctg

SEQ ID NO: 315170 - DNA, 25 bp, Artificial
  Probe
ctaccaagcagcagccataccagat

SEQ ID NO: 315171 - DNA, 25 bp, Artificial
  Probe
ctctaccacggctatctgccagaga

SEQ ID NO: 315172 - DNA, 25 bp, Artificial
  Probe
accacggctatctgccagagaatgg

SEQ ID NO: 315173 - DNA, 25 bp, Artificial
  Probe
cagagcctaccaagcagcagccata

SEQ ID NO: 315174 - DNA, 25 bp, Artificial
  Probe
ctgcttcaagtaacacatcccagtg

SEQ ID NO: 315175 - DNA, 25 bp, Artificial
  Probe
agtggcgtccttaagcccagcgcgg

SEQ ID NO: 315176 - DNA, 25 bp, Artificial
  Probe
tggtgcccaacctgcccagagcagg

SEQ ID NO: 315177 - DNA, 25 bp, Artificial
  Probe
ctctgtcgccggtcaaggaacctgc

SEQ ID NO: 315178 - DNA, 25 bp, Artificial
  Probe
gctatctgccagagaatggagtcct

SEQ ID NO: 315179 - DNA, 25 bp, Artificial
  Probe
aaggaacctgccaagacctcatcac

SEQ ID NO: 315180 - DNA, 25 bp, Artificial
  Probe
atgaggccttcactctatgctctgt

SEQ ID NO: 315181 - DNA, 25 bp, Artificial
  Probe
caagcagcagccataccagatgagg

SEQ ID NO: 315182 - DNA, 25 bp, Artificial
  Probe
ggtcaaggaacctgccaagacctca

SEQ ID NO: 315183 - DNA, 25 bp, Artificial
  Probe
tcaagtaacacatcccagtgcctgt

SEQ ID NO: 315184 - DNA, 25 bp, Artificial
  Probe
gtggtctcctcgagccaagcaggcc

SEQ ID NO: 315185 - DNA, 25 bp, Artificial
  Probe
agagcctaccaagcagcagccatac

SEQ ID NO: 315186 - DNA, 25 bp, Artificial
  Probe
tgtcgccggtcaaggaacctgccaa

SEQ ID NO: 315187 - DNA, 25 bp, Artificial
  Probe
tggaaaccttccttctgcttcaagt

SEQ ID NO: 315188 - DNA, 25 bp, Artificial
  Probe
atctgccagagaatggagtcctgcg

SEQ ID NO: 315189 - DNA, 25 bp, Artificial
  Probe
aggaacctgccaagacctcatcacg

SEQ ID NO: 315190 - DNA, 25 bp, Artificial
  Probe
ccgagtggcgtccttaagcccagcg

SEQ ID NO: 315191 - DNA, 25 bp, Artificial
  Probe
gtaacacatcccagtgcctgtcttg

SEQ ID NO: 315192 - DNA, 25 bp, Artificial
  Probe
gtggcgtccttaagcccagcgcgga

SEQ ID NO: 315193 - DNA, 25 bp, Artificial
  Probe
tcgaggcccaggtgtggaaaccttc

SEQ ID NO: 315194 - DNA, 25 bp, Artificial
  Probe
gagtggcgtccttaagcccagcgcg

SEQ ID NO: 315195 - DNA, 25 bp, Artificial
  Probe
cggctatctgccagagaatggagtc

SEQ ID NO: 315196 - DNA, 25 bp, Artificial
  Probe
agaatggagtcctgcgcccagagcc

SEQ ID NO: 315197 - DNA, 25 bp, Artificial
  Probe
cacccggaatgctgggatcgaggcc

SEQ ID NO: 315198 - DNA, 25 bp, Artificial
  Probe
gatcgaggcccaggtgtggaaacct

SEQ ID NO: 315199 - DNA, 25 bp, Artificial
  Probe
ccagatgaggccttcactctatgct

SEQ ID NO: 315200 - DNA, 25 bp, Artificial
  Probe
cttcactctatgctctgtcgccggt

SEQ ID NO: 315201 - DNA, 25 bp, Artificial
  Probe
ctctatgctctgtcgccggtcaagg

SEQ ID NO: 315202 - DNA, 25 bp, Artificial
  Probe
gcgtggtctcctcgagccaagcagg

SEQ ID NO: 315203 - DNA, 25 bp, Artificial
  Probe
gaggcccaggtgtggaaaccttcct

SEQ ID NO: 315204 - DNA, 25 bp, Artificial
  Probe
gaacctgccaagacctcatcacgtg

SEQ ID NO: 315205 - DNA, 25 bp, Artificial
  Probe
aggtgtggaaaccttccttctgctt

SEQ ID NO: 315206 - DNA, 25 bp, Artificial
  Probe
tgtggaaaccttccttctgcttcaa

SEQ ID NO: 315207 - DNA, 25 bp, Artificial
  Probe
tctgtcgccggtcaaggaacctgcc

SEQ ID NO: 315208 - DNA, 25 bp, Artificial
  Probe
aagcagcagccataccagatgaggc

SEQ ID NO: 315209 - DNA, 25 bp, Artificial
  Probe
ggaaaccttccttctgcttcaagta

SEQ ID NO: 315210 - DNA, 25 bp, Artificial
  Probe
aggccttcactctatgctctgtcgc

SEQ ID NO: 315211 - DNA, 25 bp, Artificial
  Probe
taccacggctatctgccagagaatg

SEQ ID NO: 315212 - DNA, 25 bp, Artificial
  Probe
gtacaacagtctgcactgcttacag

SEQ ID NO: 315213 - DNA, 25 bp, Artificial
  Probe
gtgtttagttcatccttattactgc

SEQ ID NO: 315214 - DNA, 25 bp, Artificial
  Probe
aactgtacaacagtctgcactgctt

SEQ ID NO: 315215 - DNA, 25 bp, Artificial
  Probe
tacttagcaatccttgtttgttagt

SEQ ID NO: 315216 - DNA, 25 bp, Artificial
  Probe
gtctgcactgcttacagtataactc

SEQ ID NO: 315217 - DNA, 25 bp, Artificial
  Probe
tactgctttgtcattatagctttag

SEQ ID NO: 315218 - DNA, 25 bp, Artificial
  Probe
gaccttgttttcacattagattttg

SEQ ID NO: 315219 - DNA, 25 bp, Artificial
  Probe
tttccaaacgatgtgtgtttagttc

SEQ ID NO: 315220 - DNA, 25 bp, Artificial
  Probe
ttgttgttctctgttaggtatgcac

SEQ ID NO: 315221 - DNA, 25 bp, Artificial
  Probe
attgcttcttcaagtgccaaaagtc

SEQ ID NO: 315222 - DNA, 25 bp, Artificial
  Probe
ctgttaggtatgcacaacagaatac

SEQ ID NO: 315223 - DNA, 25 bp, Artificial
  Probe
ttctctgttaggtatgcacaacaga

SEQ ID NO: 315224 - DNA, 25 bp, Artificial
  Probe
acagccattcaatgtaattatgaag

SEQ ID NO: 315225 - DNA, 25 bp, Artificial
  Probe
gcttacagtataactccgttaatga

SEQ ID NO: 315226 - DNA, 25 bp, Artificial
  Probe
actgctttgtcattatagctttagt

SEQ ID NO: 315227 - DNA, 25 bp, Artificial
  Probe
ctgtacaacagtctgcactgcttac

SEQ ID NO: 315228 - DNA, 25 bp, Artificial
  Probe
atacttagcaatccttgtttgttag

SEQ ID NO: 315229 - DNA, 25 bp, Artificial
  Probe
tgaagcatgcgctgtaagcctcaga

SEQ ID NO: 315230 - DNA, 25 bp, Artificial
  Probe
gattttgaagcatgcgctgtaagcc

SEQ ID NO: 315231 - DNA, 25 bp, Artificial
  Probe
gttttacagattgttgtcctctgtc

SEQ ID NO: 315232 - DNA, 25 bp, Artificial
  Probe
gaatacttagcaatccttgtttgtt

SEQ ID NO: 315233 - DNA, 25 bp, Artificial
  Probe
gcatgcgctgtaagcctcagaattg

SEQ ID NO: 315234 - DNA, 25 bp, Artificial
  Probe
agattttgaagcatgcgctgtaagc

SEQ ID NO: 315235 - DNA, 25 bp, Artificial
  Probe
tcagaattgcttcttcaagtgccaa

SEQ ID NO: 315236 - DNA, 25 bp, Artificial
  Probe
tgttaggtatgcacaacagaatact

SEQ ID NO: 315237 - DNA, 25 bp, Artificial
  Probe
agattgttgtcctctgtctatttaa

SEQ ID NO: 315238 - DNA, 25 bp, Artificial
  Probe
caaactgtacaacagtctgcactgc

SEQ ID NO: 315239 - DNA, 25 bp, Artificial
  Probe
ctgcactgcttacagtataactccg

SEQ ID NO: 315240 - DNA, 25 bp, Artificial
  Probe
tttcacattagattttgaagcatgc

SEQ ID NO: 315241 - DNA, 25 bp, Artificial
  Probe
taatactacagaagcagataatcag

SEQ ID NO: 315242 - DNA, 25 bp, Artificial
  Probe
cagccattcaatgtaattatgaagg

SEQ ID NO: 315243 - DNA, 25 bp, Artificial
  Probe
gcgctgtaagcctcagaattgcttc

SEQ ID NO: 315244 - DNA, 25 bp, Artificial
  Probe
gcactgcttacagtataactccgtt

SEQ ID NO: 315245 - DNA, 25 bp, Artificial
  Probe
acagattgttgtcctctgtctattt

SEQ ID NO: 315246 - DNA, 25 bp, Artificial
  Probe
agactataatactacagaagcagat

SEQ ID NO: 315247 - DNA, 25 bp, Artificial
  Probe
tttacagattgttgtcctctgtcta

SEQ ID NO: 315248 - DNA, 25 bp, Artificial
  Probe
tgcactgcttacagtataactccgt

SEQ ID NO: 315249 - DNA, 25 bp, Artificial
  Probe
aagcctcagaattgcttcttcaagt

SEQ ID NO: 315250 - DNA, 25 bp, Artificial
  Probe
gaagaccttgttttcacattagatt

SEQ ID NO: 315251 - DNA, 25 bp, Artificial
  Probe
gactataatactacagaagcagata

SEQ ID NO: 315252 - DNA, 25 bp, Artificial
  Probe
tgcttacagtataactccgttaatg

SEQ ID NO: 315253 - DNA, 25 bp, Artificial
  Probe
ggttgttttacagattgttgtcctc

SEQ ID NO: 315254 - DNA, 25 bp, Artificial
  Probe
gtatgcacaacagaatacttagcaa

SEQ ID NO: 315255 - DNA, 25 bp, Artificial
  Probe
caaacgatgtgtgtttagttcatcc

SEQ ID NO: 315256 - DNA, 25 bp, Artificial
  Probe
actcaatgctatttgttgttctctg

SEQ ID NO: 315257 - DNA, 25 bp, Artificial
  Probe
cagaatacttagcaatccttgtttg

SEQ ID NO: 315258 - DNA, 25 bp, Artificial
  Probe
tccagcatagagatgctatgtattt

SEQ ID NO: 315259 - DNA, 25 bp, Artificial
  Probe
gcctttccaaacaggctattggaca

SEQ ID NO: 315260 - DNA, 25 bp, Artificial
  Probe
ttcttggaatcaggttgaaccctcc

SEQ ID NO: 315261 - DNA, 25 bp, Artificial
  Probe
gtataaatgcccaggaggctcgaat

SEQ ID NO: 315262 - DNA, 25 bp, Artificial
  Probe
taacgcaaaacatagctagctcttg

SEQ ID NO: 315263 - DNA, 25 bp, Artificial
  Probe
catagacacgcctttccaaacaggc

SEQ ID NO: 315264 - DNA, 25 bp, Artificial
  Probe
tatcactgcaaatgggtacagctca

SEQ ID NO: 315265 - DNA, 25 bp, Artificial
  Probe
gggcacatggcctattgcagtcttg

SEQ ID NO: 315266 - DNA, 25 bp, Artificial
  Probe
atggccattctaacgcaaaacatag

SEQ ID NO: 315267 - DNA, 25 bp, Artificial
  Probe
tggttatggccattctaacgcaaaa

SEQ ID NO: 315268 - DNA, 25 bp, Artificial
  Probe
ccactcagtcttttaggggtaacat

SEQ ID NO: 315269 - DNA, 25 bp, Artificial
  Probe
tctgattcccactcagtcttttagg

SEQ ID NO: 315270 - DNA, 25 bp, Artificial
  Probe
tcatagctcataagatgaaagccat

SEQ ID NO: 315271 - DNA, 25 bp, Artificial
  Probe
tctattcccctttcttggaatcagg

SEQ ID NO: 315272 - DNA, 25 bp, Artificial
  Probe
gatgaaagccatcatttatcactgc

SEQ ID NO: 315273 - DNA, 25 bp, Artificial
  Probe
catagctagctcttgctttaatttg

SEQ ID NO: 315274 - DNA, 25 bp, Artificial
  Probe
cagtcttggttatggccattctaac

SEQ ID NO: 315275 - DNA, 25 bp, Artificial
  Probe
caaacaggctattggacaaggggag

SEQ ID NO: 315276 - DNA, 25 bp, Artificial
  Probe
ggcctcaattaagaattctgattcc

SEQ ID NO: 315277 - DNA, 25 bp, Artificial
  Probe
tcccctttcttggaatcaggttgaa

SEQ ID NO: 315278 - DNA, 25 bp, Artificial
  Probe
ttccaaacaggctattggacaaggg

SEQ ID NO: 315279 - DNA, 25 bp, Artificial
  Probe
ctgcaaatgggtacagctcacagat

SEQ ID NO: 315280 - DNA, 25 bp, Artificial
  Probe
gtgcccaatacctggcctcaattaa

SEQ ID NO: 315281 - DNA, 25 bp, Artificial
  Probe
caaagggtctgagcattagcttaat

SEQ ID NO: 315282 - DNA, 25 bp, Artificial
  Probe
tacctggcctcaattaagaattctg

SEQ ID NO: 315283 - DNA, 25 bp, Artificial
  Probe
ggtgtccacaatcagatcctaaaaa

SEQ ID NO: 315284 - DNA, 25 bp, Artificial
  Probe
gatcagaggtcttgcccatgagcag

SEQ ID NO: 315285 - DNA, 25 bp, Artificial
  Probe
gaaagggtgtccacaatcagatcct

SEQ ID NO: 315286 - DNA, 25 bp, Artificial
  Probe
ctactgtataaatgcccaggaggct

SEQ ID NO: 315287 - DNA, 25 bp, Artificial
  Probe
gattcccactcagtcttttaggggt

SEQ ID NO: 315288 - DNA, 25 bp, Artificial
  Probe
taaatgcccaggaggctcgaatggg

SEQ ID NO: 315289 - DNA, 25 bp, Artificial
  Probe
acctccaaagggtctgagcattagc

SEQ ID NO: 315290 - DNA, 25 bp, Artificial
  Probe
agccatcatttatcactgcaaatgg

SEQ ID NO: 315291 - DNA, 25 bp, Artificial
  Probe
ctttcttggaatcaggttgaaccct

SEQ ID NO: 315292 - DNA, 25 bp, Artificial
  Probe
caaatgggtacagctcacagatcag

SEQ ID NO: 315293 - DNA, 25 bp, Artificial
  Probe
aagactaagacagattccagcatag

SEQ ID NO: 315294 - DNA, 25 bp, Artificial
  Probe
cactcagtcttttaggggtaacata

SEQ ID NO: 315295 - DNA, 25 bp, Artificial
  Probe
gcaaaacatagctagctcttgcttt

SEQ ID NO: 315296 - DNA, 25 bp, Artificial
  Probe
cgacctactgtataaatgcccagga

SEQ ID NO: 315297 - DNA, 25 bp, Artificial
  Probe
ttaagccttcatagctcataagatg

SEQ ID NO: 315298 - DNA, 25 bp, Artificial
  Probe
tctgagcattagcttaattaagcta

SEQ ID NO: 315299 - DNA, 25 bp, Artificial
  Probe
gttatggccattctaacgcaaaaca

SEQ ID NO: 315300 - DNA, 25 bp, Artificial
  Probe
ggaatcaggttgaaccctccgtatt

SEQ ID NO: 315301 - DNA, 25 bp, Artificial
  Probe
agatgaaagccatcatttatcactg

SEQ ID NO: 315302 - DNA, 25 bp, Artificial
  Probe
ggggatgtgcccaatacctggcctc

SEQ ID NO: 315303 - DNA, 25 bp, Artificial
  Probe
ctagctcttgctttaatttgggtgt

SEQ ID NO: 315304 - DNA, 25 bp, Artificial
  Probe
tgggccaaacctgcatcccctggga

SEQ ID NO: 315305 - DNA, 25 bp, Artificial
  Probe
cggtactgcggttgcacagagtatt

SEQ ID NO: 315306 - DNA, 25 bp, Artificial
  Probe
atgagctgaagctttaacaggctgt

SEQ ID NO: 315307 - DNA, 25 bp, Artificial
  Probe
ttgggccaaacctgcatcccctggg

SEQ ID NO: 315308 - DNA, 25 bp, Artificial
  Probe
gttgcacagagtatttcgcctaaac

SEQ ID NO: 315309 - DNA, 25 bp, Artificial
  Probe
ttgcacagagtatttcgcctaaacc

SEQ ID NO: 315310 - DNA, 25 bp, Artificial
  Probe
gcccaccagtggacttggctgcttg

SEQ ID NO: 315311 - DNA, 25 bp, Artificial
  Probe
agtggacttggctgcttgggccaaa

SEQ ID NO: 315312 - DNA, 25 bp, Artificial
  Probe
caccagtggacttggctgcttgggc

SEQ ID NO: 315313 - DNA, 25 bp, Artificial
  Probe
tgcacagagtatttcgcctaaacca

SEQ ID NO: 315314 - DNA, 25 bp, Artificial
  Probe
tactgcggttgcacagagtatttcg

SEQ ID NO: 315315 - DNA, 25 bp, Artificial
  Probe
gcagaggcccaccagtggacttggc

SEQ ID NO: 315316 - DNA, 25 bp, Artificial
  Probe
gtactgcggttgcacagagtatttc

SEQ ID NO: 315317 - DNA, 25 bp, Artificial
  Probe
atcccctgggagaaaaactgcagga

SEQ ID NO: 315318 - DNA, 25 bp, Artificial
  Probe
tgcggttgcacagagtatttcgcct

SEQ ID NO: 315319 - DNA, 25 bp, Artificial
  Probe
gtggacttggctgcttgggccaaac

SEQ ID NO: 315320 - DNA, 25 bp, Artificial
  Probe
agccaatgagctgaagctttaacag

SEQ ID NO: 315321 - DNA, 25 bp, Artificial
  Probe
ctgcggttgcacagagtatttcgcc

SEQ ID NO: 315322 - DNA, 25 bp, Artificial
  Probe
tcccctgggagaaaaactgcaggat

SEQ ID NO: 315323 - DNA, 25 bp, Artificial
  Probe
gctccccctcggtactgcggttgca

SEQ ID NO: 315324 - DNA, 25 bp, Artificial
  Probe
gacttggctgcttgggccaaacctg

SEQ ID NO: 315325 - DNA, 25 bp, Artificial
  Probe
ggccaaacctgcatcccctgggaga

SEQ ID NO: 315326 - DNA, 25 bp, Artificial
  Probe
agaggcccaccagtggacttggctg

SEQ ID NO: 315327 - DNA, 25 bp, Artificial
  Probe
cggcagaggcccaccagtggacttg

SEQ ID NO: 315328 - DNA, 25 bp, Artificial
  Probe
gcacagagtatttcgcctaaaccaa

SEQ ID NO: 315329 - DNA, 25 bp, Artificial
  Probe
ggacttggctgcttgggccaaacct

SEQ ID NO: 315330 - DNA, 25 bp, Artificial
  Probe
ccaccagtggacttggctgcttggg

SEQ ID NO: 315331 - DNA, 25 bp, Artificial
  Probe
acctgcatcccctgggagaaaaact

SEQ ID NO: 315332 - DNA, 25 bp, Artificial
  Probe
ggcccaccagtggacttggctgctt

SEQ ID NO: 315333 - DNA, 25 bp, Artificial
  Probe
ggtactgcggttgcacagagtattt

SEQ ID NO: 315334 - DNA, 25 bp, Artificial
  Probe
tctacccccgtacaggaggcaaagg

SEQ ID NO: 315335 - DNA, 25 bp, Artificial
  Probe
agtggtggttcctcctcccacattc

SEQ ID NO: 315336 - DNA, 25 bp, Artificial
  Probe
tcggtactgcggttgcacagagtat

SEQ ID NO: 315337 - DNA, 25 bp, Artificial
  Probe
cagaggcccaccagtggacttggct

SEQ ID NO: 315338 - DNA, 25 bp, Artificial
  Probe
gcatcccctgggagaaaaactgcag

SEQ ID NO: 315339 - DNA, 25 bp, Artificial
  Probe
cggttgcacagagtatttcgcctaa

SEQ ID NO: 315340 - DNA, 25 bp, Artificial
  Probe
actgcggttgcacagagtatttcgc

SEQ ID NO: 315341 - DNA, 25 bp, Artificial
  Probe
catcccctgggagaaaaactgcagg

SEQ ID NO: 315342 - DNA, 25 bp, Artificial
  Probe
gaattggtgtgtctcccctgctggc

SEQ ID NO: 315343 - DNA, 25 bp, Artificial
  Probe
cacagagtatttcgcctaaaccaag

SEQ ID NO: 315344 - DNA, 25 bp, Artificial
  Probe
aattggtgtgtctcccctgctggca

SEQ ID NO: 315345 - DNA, 25 bp, Artificial
  Probe
gggccaaacctgcatcccctgggag

SEQ ID NO: 315346 - DNA, 25 bp, Artificial
  Probe
tggacttggctgcttgggccaaacc

SEQ ID NO: 315347 - DNA, 25 bp, Artificial
  Probe
tgagctgaagctttaacaggctgtc

SEQ ID NO: 315348 - DNA, 25 bp, Artificial
  Probe
tagccaatgagctgaagctttaaca

SEQ ID NO: 315349 - DNA, 25 bp, Artificial
  Probe
tgaagctttaacaggctgtcaggag

SEQ ID NO: 315350 - DNA, 25 bp, Artificial
  Probe
gctgctgtgcgtgcacaaaggacat

SEQ ID NO: 315351 - DNA, 25 bp, Artificial
  Probe
tgtgcgtgcacaaaggacattgcag

SEQ ID NO: 315352 - DNA, 25 bp, Artificial
  Probe
tagtcaggtccctgatttaaccagg

SEQ ID NO: 315353 - DNA, 25 bp, Artificial
  Probe
cagttccttgctgctgtgcgtgcac

SEQ ID NO: 315354 - DNA, 25 bp, Artificial
  Probe
gcacagttccttgctgctgtgcgtg

SEQ ID NO: 315355 - DNA, 25 bp, Artificial
  Probe
aggagagccgtagcactaaatagtt

SEQ ID NO: 315356 - DNA, 25 bp, Artificial
  Probe
ccaagcagaggagagccgtagcact

SEQ ID NO: 315357 - DNA, 25 bp, Artificial
  Probe
gagagccgtagcactaaatagttgg

SEQ ID NO: 315358 - DNA, 25 bp, Artificial
  Probe
tgcaggctgatctcctcttaaccct

SEQ ID NO: 315359 - DNA, 25 bp, Artificial
  Probe
ttctccagagtgacctaatccagtg

SEQ ID NO: 315360 - DNA, 25 bp, Artificial
  Probe
tgcacaaaggacattgcaggctgat

SEQ ID NO: 315361 - DNA, 25 bp, Artificial
  Probe
tggtgttctcagacttcttgtgaag

SEQ ID NO: 315362 - DNA, 25 bp, Artificial
  Probe
tccttgctgctgtgcgtgcacaaag

SEQ ID NO: 315363 - DNA, 25 bp, Artificial
  Probe
caaaggacattgcaggctgatctcc

SEQ ID NO: 315364 - DNA, 25 bp, Artificial
  Probe
tgaagggcccaaacaggccctgggc

SEQ ID NO: 315365 - DNA, 25 bp, Artificial
  Probe
tccagtgttgcgtcttacctcactg

SEQ ID NO: 315366 - DNA, 25 bp, Artificial
  Probe
cgtgcacaaaggacattgcaggctg

SEQ ID NO: 315367 - DNA, 25 bp, Artificial
  Probe
gctttcattagtcaggtccctgatt

SEQ ID NO: 315368 - DNA, 25 bp, Artificial
  Probe
aaaggacattgcaggctgatctcct

SEQ ID NO: 315369 - DNA, 25 bp, Artificial
  Probe
tcattagtcaggtccctgatttaac

SEQ ID NO: 315370 - DNA, 25 bp, Artificial
  Probe
tgtgaagggcccaaacaggccctgg

SEQ ID NO: 315371 - DNA, 25 bp, Artificial
  Probe
ctaatccagtgttgcgtcttacctc

SEQ ID NO: 315372 - DNA, 25 bp, Artificial
  Probe
gacattgcaggctgatctcctctta

SEQ ID NO: 315373 - DNA, 25 bp, Artificial
  Probe
gtggaggcactcgagcatctcgccc

SEQ ID NO: 315374 - DNA, 25 bp, Artificial
  Probe
gtagtggaggcactcgagcatctcg

SEQ ID NO: 315375 - DNA, 25 bp, Artificial
  Probe
tgctgctgtgcgtgcacaaaggaca

SEQ ID NO: 315376 - DNA, 25 bp, Artificial
  Probe
tccctgatttaaccaggattcgcac

SEQ ID NO: 315377 - DNA, 25 bp, Artificial
  Probe
accaggattcgcacagttccttgct

SEQ ID NO: 315378 - DNA, 25 bp, Artificial
  Probe
gacttcttgtgaagggcccaaacag

SEQ ID NO: 315379 - DNA, 25 bp, Artificial
  Probe
agagccgtagcactaaatagttggg

SEQ ID NO: 315380 - DNA, 25 bp, Artificial
  Probe
cgtagcactaaatagttgggagact

SEQ ID NO: 315381 - DNA, 25 bp, Artificial
  Probe
gccccttctggctttcattagtcag

SEQ ID NO: 315382 - DNA, 25 bp, Artificial
  Probe
tagttgggagactcccatacttcct

SEQ ID NO: 315383 - DNA, 25 bp, Artificial
  Probe
cagtgttgcgtcttacctcactggc

SEQ ID NO: 315384 - DNA, 25 bp, Artificial
  Probe
tttaaccaggattcgcacagttcct

SEQ ID NO: 315385 - DNA, 25 bp, Artificial
  Probe
caccgctttctccagagtgacctaa

SEQ ID NO: 315386 - DNA, 25 bp, Artificial
  Probe
agtgttgcgtcttacctcactggct

SEQ ID NO: 315387 - DNA, 25 bp, Artificial
  Probe
tttcattagtcaggtccctgattta

SEQ ID NO: 315388 - DNA, 25 bp, Artificial
  Probe
ttcgcacagttccttgctgctgtgc

SEQ ID NO: 315389 - DNA, 25 bp, Artificial
  Probe
tagcactaaatagttgggagactcc

SEQ ID NO: 315390 - DNA, 25 bp, Artificial
  Probe
ctctttcaaatctgcgggcctccaa

SEQ ID NO: 315391 - DNA, 25 bp, Artificial
  Probe
ccgctccaagcagaggagagccgta

SEQ ID NO: 315392 - DNA, 25 bp, Artificial
  Probe
cacagttccttgctgctgtgcgtgc

SEQ ID NO: 315393 - DNA, 25 bp, Artificial
  Probe
agactcccatacttcctggtgactc

SEQ ID NO: 315394 - DNA, 25 bp, Artificial
  Probe
tgcgtgcacaaaggacattgcaggc

SEQ ID NO: 315395 - DNA, 25 bp, Artificial
  Probe
tgggagactcccatacttcctggtg

SEQ ID NO: 315396 - DNA, 25 bp, Artificial
  Probe
aacagattgttaacttcctgttgta

SEQ ID NO: 315397 - DNA, 25 bp, Artificial
  Probe
cagaagctaaggttcgccttcagaa

SEQ ID NO: 315398 - DNA, 25 bp, Artificial
  Probe
caacctcaaggactggcagctgcag

SEQ ID NO: 315399 - DNA, 25 bp, Artificial
  Probe
gcttcatctccaacggggagctctt

SEQ ID NO: 315400 - DNA, 25 bp, Artificial
  Probe
agaatccactggtgggccgagtgat

SEQ ID NO: 315401 - DNA, 25 bp, Artificial
  Probe
gttaacttcctgttgtaacaactag

SEQ ID NO: 315402 - DNA, 25 bp, Artificial
  Probe
gagaagacaacaattctcatggagt

SEQ ID NO: 315403 - DNA, 25 bp, Artificial
  Probe
tccgtgatgtggtcagaaccatgga

SEQ ID NO: 315404 - DNA, 25 bp, Artificial
  Probe
atcacggtcaagaagactaaaagct

SEQ ID NO: 315405 - DNA, 25 bp, Artificial
  Probe
tacatctgtgcctttctttctcgag

SEQ ID NO: 315406 - DNA, 25 bp, Artificial
  Probe
ccacaagaaattggtcgtgtttgta

SEQ ID NO: 315407 - DNA, 25 bp, Artificial
  Probe
ttggtcgtgtttgtagatcacggtc

SEQ ID NO: 315408 - DNA, 25 bp, Artificial
  Probe
gataatgatggcttcatctccaacg

SEQ ID NO: 315409 - DNA, 25 bp, Artificial
  Probe
catcttggtcctggataaggatggt

SEQ ID NO: 315410 - DNA, 25 bp, Artificial
  Probe
ggtgtacatctgtgcctttctttct

SEQ ID NO: 315411 - DNA, 25 bp, Artificial
  Probe
aagagttccgtgatgtggtcagaac

SEQ ID NO: 315412 - DNA, 25 bp, Artificial
  Probe
agaggtgtacatctgtgcctttctt

SEQ ID NO: 315413 - DNA, 25 bp, Artificial
  Probe
tccgcgagttcatcgtgggcacctc

SEQ ID NO: 315414 - DNA, 25 bp, Artificial
  Probe
tgatgtggtcagaaccatggagatc

SEQ ID NO: 315415 - DNA, 25 bp, Artificial
  Probe
agttcagcgtcaagggtgacgaaga

SEQ ID NO: 315416 - DNA, 25 bp, Artificial
  Probe
tttacctgtggcattcagacttttt

SEQ ID NO: 315417 - DNA, 25 bp, Artificial
  Probe
ggtgatggccggatatcctttgaag

SEQ ID NO: 315418 - DNA, 25 bp, Artificial
  Probe
cagcagctggtggacaaaagcatct

SEQ ID NO: 315419 - DNA, 25 bp, Artificial
  Probe
taggaactcctttcgtttacctgtg

SEQ ID NO: 315420 - DNA, 25 bp, Artificial
  Probe
ctttctcgaggttgtgtacatggga

SEQ ID NO: 315421 - DNA, 25 bp, Artificial
  Probe
acctcccagttcagcgtcaagggtg

SEQ ID NO: 315422 - DNA, 25 bp, Artificial
  Probe
tgtagatcacggtcaagaagactaa

SEQ ID NO: 315423 - DNA, 25 bp, Artificial
  Probe
ttctcatggagtattaggaactcct

SEQ ID NO: 315424 - DNA, 25 bp, Artificial
  Probe
gtgggaaacaacctcaaggactggc

SEQ ID NO: 315425 - DNA, 25 bp, Artificial
  Probe
ttcgtttacctgtggcattcagact

SEQ ID NO: 315426 - DNA, 25 bp, Artificial
  Probe
tggacttccgcgagttcatcgtggg

SEQ ID NO: 315427 - DNA, 25 bp, Artificial
  Probe
agaagctaaggttcgccttcagaat

SEQ ID NO: 315428 - DNA, 25 bp, Artificial
  Probe
cccagttcagcgtcaagggtgacga

SEQ ID NO: 315429 - DNA, 25 bp, Artificial
  Probe
ggccggatatcctttgaagagttcc

SEQ ID NO: 315430 - DNA, 25 bp, Artificial
  Probe
tgcagcagctggtggacaaaagcat

SEQ ID NO: 315431 - DNA, 25 bp, Artificial
  Probe
ctaaggttcgccttcagaatctatg

SEQ ID NO: 315432 - DNA, 25 bp, Artificial
  Probe
gacaaaagcatcttggtcctggata

SEQ ID NO: 315433 - DNA, 25 bp, Artificial
  Probe
cttcagaatctatgacatggataat

SEQ ID NO: 315434 - DNA, 25 bp, Artificial
  Probe
ggcattcagactttttaacaaacag

SEQ ID NO: 315435 - DNA, 25 bp, Artificial
  Probe
taaggatggtgatggccggatatcc

SEQ ID NO: 315436 - DNA, 25 bp, Artificial
  Probe
aaagcatcttggtcctggataagga

SEQ ID NO: 315437 - DNA, 25 bp, Artificial
  Probe
tctttgacacagacggcaacgggga

SEQ ID NO: 315438 - DNA, 25 bp, Artificial
  Probe
actggtgggccgagtgatcgacatc

SEQ ID NO: 315439 - DNA, 25 bp, Artificial
  Probe
tggacaaaagcatcttggtcctgga

SEQ ID NO: 315440 - DNA, 25 bp, Artificial
  Probe
cgtgtttgtagatcacggtcaagaa

SEQ ID NO: 315441 - DNA, 25 bp, Artificial
  Probe
aaggttcgccttcagaatctatgac

SEQ ID NO: 315442 - DNA, 25 bp, Artificial
  Probe
tccgcacactcagattgatgtgctg

SEQ ID NO: 315443 - DNA, 25 bp, Artificial
  Probe
gatccccagatccaaaacatgtgtt

SEQ ID NO: 315444 - DNA, 25 bp, Artificial
  Probe
tgcctgacagccatttcagttttaa

SEQ ID NO: 315445 - DNA, 25 bp, Artificial
  Probe
ggctgttgggttaggcctttgctta

SEQ ID NO: 315446 - DNA, 25 bp, Artificial
  Probe
agccatttcagttttaacttcagag

SEQ ID NO: 315447 - DNA, 25 bp, Artificial
  Probe
cagaattatgcagctgtaggctgtt

SEQ ID NO: 315448 - DNA, 25 bp, Artificial
  Probe
gatgtgtgttctgcacacgctttta

SEQ ID NO: 315449 - DNA, 25 bp, Artificial
  Probe
tgatgtgtgttctgcacacgctttt

SEQ ID NO: 315450 - DNA, 25 bp, Artificial
  Probe
cacatgtcgagcattgaccctttcc

SEQ ID NO: 315451 - DNA, 25 bp, Artificial
  Probe
gtgctgcctgacagccatttcagtt

SEQ ID NO: 315452 - DNA, 25 bp, Artificial
  Probe
ggatttttacactgaagtatgcagc

SEQ ID NO: 315453 - DNA, 25 bp, Artificial
  Probe
ttaggcctttgcttacagtggattt

SEQ ID NO: 315454 - DNA, 25 bp, Artificial
  Probe
ttgcctcatgaaaaattagacagtc

SEQ ID NO: 315455 - DNA, 25 bp, Artificial
  Probe
tgtgttctgcacacgcttttatcag

SEQ ID NO: 315456 - DNA, 25 bp, Artificial
  Probe
tgtcgagcattgaccctttccttta

SEQ ID NO: 315457 - DNA, 25 bp, Artificial
  Probe
atttgcctcatgaaaaattagacag

SEQ ID NO: 315458 - DNA, 25 bp, Artificial
  Probe
catggtatattgctctactgatgtg

SEQ ID NO: 315459 - DNA, 25 bp, Artificial
  Probe
tttggctgtgcatgggattgaaccc

SEQ ID NO: 315460 - DNA, 25 bp, Artificial
  Probe
cacacgcttttatcagggaaacgtt

SEQ ID NO: 315461 - DNA, 25 bp, Artificial
  Probe
cacactcagattgatgtgctgcctg

SEQ ID NO: 315462 - DNA, 25 bp, Artificial
  Probe
gattgaacccagagcctcgtgtgtg

SEQ ID NO: 315463 - DNA, 25 bp, Artificial
  Probe
gctagatccccagatccaaaacatg

SEQ ID NO: 315464 - DNA, 25 bp, Artificial
  Probe
gcctgacagccatttcagttttaac

SEQ ID NO: 315465 - DNA, 25 bp, Artificial
  Probe
cttagccattttgtgccaattacag

SEQ ID NO: 315466 - DNA, 25 bp, Artificial
  Probe
ttagccattttgtgccaattacagt

SEQ ID NO: 315467 - DNA, 25 bp, Artificial
  Probe
cactttccgcacactcagattgatg

SEQ ID NO: 315468 - DNA, 25 bp, Artificial
  Probe
ctgaagtatgcagctaccccaagtg

SEQ ID NO: 315469 - DNA, 25 bp, Artificial
  Probe
gtcacatgtcgagcattgacccttt

SEQ ID NO: 315470 - DNA, 25 bp, Artificial
  Probe
ttctgcacacgcttttatcagggaa

SEQ ID NO: 315471 - DNA, 25 bp, Artificial
  Probe
atgtgctgcctgacagccatttcag

SEQ ID NO: 315472 - DNA, 25 bp, Artificial
  Probe
ctctactgatgtgtgttctgcacac

SEQ ID NO: 315473 - DNA, 25 bp, Artificial
  Probe
agattgatgtgctgcctgacagcca

SEQ ID NO: 315474 - DNA, 25 bp, Artificial
  Probe
aagtatgcagctaccccaagtgtgc

SEQ ID NO: 315475 - DNA, 25 bp, Artificial
  Probe
ttgggttaggcctttgcttacagtg

SEQ ID NO: 315476 - DNA, 25 bp, Artificial
  Probe
accccaagtgtgctggtcacatgtc

SEQ ID NO: 315477 - DNA, 25 bp, Artificial
  Probe
tatattgctctactgatgtgtgttc

SEQ ID NO: 315478 - DNA, 25 bp, Artificial
  Probe
ttttacactgaagtatgcagctacc

SEQ ID NO: 315479 - DNA, 25 bp, Artificial
  Probe
tgcagctaccccaagtgtgctggtc

SEQ ID NO: 315480 - DNA, 25 bp, Artificial
  Probe
atttttacactgaagtatgcagcta

SEQ ID NO: 315481 - DNA, 25 bp, Artificial
  Probe
tgctggtcacatgtcgagcattgac

SEQ ID NO: 315482 - DNA, 25 bp, Artificial
  Probe
gtgccaattacagtttctctttttg

SEQ ID NO: 315483 - DNA, 25 bp, Artificial
  Probe
gttcagaattatgcagctgtaggct

SEQ ID NO: 315484 - DNA, 25 bp, Artificial
  Probe
tagatccccagatccaaaacatgtg

SEQ ID NO: 315485 - DNA, 25 bp, Artificial
  Probe
acactgaagtatgcagctaccccaa

SEQ ID NO: 315486 - DNA, 25 bp, Artificial
  Probe
ggattgaacccagagcctcgtgtgt

SEQ ID NO: 315487 - DNA, 25 bp, Artificial
  Probe
tgcttacagtggatttttacactga

SEQ ID NO: 315488 - DNA, 25 bp, Artificial
  Probe
catgtttgtgtctgcctcgtcccct

SEQ ID NO: 315489 - DNA, 25 bp, Artificial
  Probe
acggcctgcctgtcgcatgtttgtg

SEQ ID NO: 315490 - DNA, 25 bp, Artificial
  Probe
tccagtggccccactgcagtgagag

SEQ ID NO: 315491 - DNA, 25 bp, Artificial
  Probe
ccacagagcagctcatcgaggccgt

SEQ ID NO: 315492 - DNA, 25 bp, Artificial
  Probe
gcagaatgtccatttccactgctcg

SEQ ID NO: 315493 - DNA, 25 bp, Artificial
  Probe
aatcatcaagaccacagagcagctc

SEQ ID NO: 315494 - DNA, 25 bp, Artificial
  Probe
gcacggcctgcctgtcgcatgtttg

SEQ ID NO: 315495 - DNA, 25 bp, Artificial
  Probe
tggccccactgcagtgagagctgcg

SEQ ID NO: 315496 - DNA, 25 bp, Artificial
  Probe
acacagtacatcgacggccagggca

SEQ ID NO: 315497 - DNA, 25 bp, Artificial
  Probe
tcaccggacagagttggtgtttgga

SEQ ID NO: 315498 - DNA, 25 bp, Artificial
  Probe
actgcagtgagagctgcgcctggtt

SEQ ID NO: 315499 - DNA, 25 bp, Artificial
  Probe
gcacgtgcacgtcatcggcgaggat

SEQ ID NO: 315500 - DNA, 25 bp, Artificial
  Probe
cctgtcgcatgtttgtgtctgcctc

SEQ ID NO: 315501 - DNA, 25 bp, Artificial
  Probe
cacagagcagctcatcgaggccgtc

SEQ ID NO: 315502 - DNA, 25 bp, Artificial
  Probe
gagagctgcgcctggtttcaccgga

SEQ ID NO: 315503 - DNA, 25 bp, Artificial
  Probe
tcgaggccgtcaacaacggcgactt

SEQ ID NO: 315504 - DNA, 25 bp, Artificial
  Probe
agttggtgtttggagcccagccgcc

SEQ ID NO: 315505 - DNA, 25 bp, Artificial
  Probe
tggtttcaccggacagagttggtgt

SEQ ID NO: 315506 - DNA, 25 bp, Artificial
  Probe
gagctgcgcctggtttcaccggaca

SEQ ID NO: 315507 - DNA, 25 bp, Artificial
  Probe
tgaacccgcacgtgcacgtcatcgg

SEQ ID NO: 315508 - DNA, 25 bp, Artificial
  Probe
acaaccatagaggacgaagatgcca

SEQ ID NO: 315509 - DNA, 25 bp, Artificial
  Probe
tgtccatttccactgctcgggcgct

SEQ ID NO: 315510 - DNA, 25 bp, Artificial
  Probe
catcaagaccacagagcagctcatc

SEQ ID NO: 315511 - DNA, 25 bp, Artificial
  Probe
tgtcgcatgtttgtgtctgcctcgt

SEQ ID NO: 315512 - DNA, 25 bp, Artificial
  Probe
agcctgaagctctgggcaacctggt

SEQ ID NO: 315513 - DNA, 25 bp, Artificial
  Probe
gctgcgcctggtttcaccggacaga

SEQ ID NO: 315514 - DNA, 25 bp, Artificial
  Probe
atcgaggccgtcaacaacggcgact

SEQ ID NO: 315515 - DNA, 25 bp, Artificial
  Probe
tcccctggtgcctgtgtctgcagaa

SEQ ID NO: 315516 - DNA, 25 bp, Artificial
  Probe
acagagttggtgtttggagcccagc

SEQ ID NO: 315517 - DNA, 25 bp, Artificial
  Probe
agagcagctcatcgaggccgtcaac

SEQ ID NO: 315518 - DNA, 25 bp, Artificial
  Probe
atcaagaccacagagcagctcatcg

SEQ ID NO: 315519 - DNA, 25 bp, Artificial
  Probe
cctgcctgtcgcatgtttgtgtctg

SEQ ID NO: 315520 - DNA, 25 bp, Artificial
  Probe
ccagtggccccactgcagtgagagc

SEQ ID NO: 315521 - DNA, 25 bp, Artificial
  Probe
tgcgcctggtttcaccggacagagt

SEQ ID NO: 315522 - DNA, 25 bp, Artificial
  Probe
gcgcctggtttcaccggacagagtt

SEQ ID NO: 315523 - DNA, 25 bp, Artificial
  Probe
cccactgcagtgagagctgcgcctg

SEQ ID NO: 315524 - DNA, 25 bp, Artificial
  Probe
ctctgggcaacctggtcgaagggat

SEQ ID NO: 315525 - DNA, 25 bp, Artificial
  Probe
cacagtacatcgacggccagggcag

SEQ ID NO: 315526 - DNA, 25 bp, Artificial
  Probe
tcatcgaggccgtcaacaacggcga

SEQ ID NO: 315527 - DNA, 25 bp, Artificial
  Probe
cactgcagtgagagctgcgcctggt

SEQ ID NO: 315528 - DNA, 25 bp, Artificial
  Probe
agcagctcatcgaggccgtcaacaa

SEQ ID NO: 315529 - DNA, 25 bp, Artificial
  Probe
tcgcatgtttgtgtctgcctcgtcc

SEQ ID NO: 315530 - DNA, 25 bp, Artificial
  Probe
agtggccccactgcagtgagagctg

SEQ ID NO: 315531 - DNA, 25 bp, Artificial
  Probe
tgcagtgagagctgcgcctggtttc

SEQ ID NO: 315532 - DNA, 25 bp, Artificial
  Probe
cgaggccgtcaacaacggcgacttt

SEQ ID NO: 315533 - DNA, 25 bp, Artificial
  Probe
gttggtgtttggagcccagccgccc

SEQ ID NO: 315534 - DNA, 25 bp, Artificial
  Probe
ggtgagactccgttcccttcagttt

SEQ ID NO: 315535 - DNA, 25 bp, Artificial
  Probe
gaagggacaatcttcctggttaccg

SEQ ID NO: 315536 - DNA, 25 bp, Artificial
  Probe
gcaggtcaatgctgccctgctggac

SEQ ID NO: 315537 - DNA, 25 bp, Artificial
  Probe
gacaaacaatgctctgaactgctcc

SEQ ID NO: 315538 - DNA, 25 bp, Artificial
  Probe
tccagctggtggaaggcgtccaaga

SEQ ID NO: 315539 - DNA, 25 bp, Artificial
  Probe
atgctgcacgccaaaagagcctaag

SEQ ID NO: 315540 - DNA, 25 bp, Artificial
  Probe
ttcagctcagatgtcaagaatcttg

SEQ ID NO: 315541 - DNA, 25 bp, Artificial
  Probe
acaatgctctgaactgctccaagca

SEQ ID NO: 315542 - DNA, 25 bp, Artificial
  Probe
agcatcatctcaaacacagaagtcg

SEQ ID NO: 315543 - DNA, 25 bp, Artificial
  Probe
gaaatttggacaactgcttcttcga

SEQ ID NO: 315544 - DNA, 25 bp, Artificial
  Probe
ggatgtgccctacaataaccttctc

SEQ ID NO: 315545 - DNA, 25 bp, Artificial
  Probe
caagagcaggtcaatgctgccctgc

SEQ ID NO: 315546 - DNA, 25 bp, Artificial
  Probe
aacaggcagaagactacctgtacta

SEQ ID NO: 315547 - DNA, 25 bp, Artificial
  Probe
gaaatccgggcaatcagcaaacagg

SEQ ID NO: 315548 - DNA, 25 bp, Artificial
  Probe
tgccctgctggactacacactttgc

SEQ ID NO: 315549 - DNA, 25 bp, Artificial
  Probe
attgaaatgctgcacgccaaaagag

SEQ ID NO: 315550 - DNA, 25 bp, Artificial
  Probe
acccacaacaaactgagaaatttgg

SEQ ID NO: 315551 - DNA, 25 bp, Artificial
  Probe
gacaactgcttcttcgactaccaga

SEQ ID NO: 315552 - DNA, 25 bp, Artificial
  Probe
gaactgctccaagcaatgctaatta

SEQ ID NO: 315553 - DNA, 25 bp, Artificial
  Probe
agtcgcattcaacaacctcctgagc

SEQ ID NO: 315554 - DNA, 25 bp, Artificial
  Probe
gcacgccaaaagagcctaagttccc

SEQ ID NO: 315555 - DNA, 25 bp, Artificial
  Probe
cttgctctagggacagagactggag

SEQ ID NO: 315556 - DNA, 25 bp, Artificial
  Probe
ggggatgtgccctacaataaccttc

SEQ ID NO: 315557 - DNA, 25 bp, Artificial
  Probe
caatcagcaaacaggcagaagacta

SEQ ID NO: 315558 - DNA, 25 bp, Artificial
  Probe
ctcgcccaggagctcgtggtgagac

SEQ ID NO: 315559 - DNA, 25 bp, Artificial
  Probe
caagcacgtgaatggggatgtgccc

SEQ ID NO: 315560 - DNA, 25 bp, Artificial
  Probe
tgaatggggatgtgccctacaataa

SEQ ID NO: 315561 - DNA, 25 bp, Artificial
  Probe
agaagtcgcattcaacaacctcctg

SEQ ID NO: 315562 - DNA, 25 bp, Artificial
  Probe
ctggttaccggagaacacgtggact

SEQ ID NO: 315563 - DNA, 25 bp, Artificial
  Probe
agaatcttgagaacttccagctggt

SEQ ID NO: 315564 - DNA, 25 bp, Artificial
  Probe
gctggactacacactttgcaactac

SEQ ID NO: 315565 - DNA, 25 bp, Artificial
  Probe
ggaagacaaacaatgctctgaactg

SEQ ID NO: 315566 - DNA, 25 bp, Artificial
  Probe
ttgaaatgctgcacgccaaaagagc

SEQ ID NO: 315567 - DNA, 25 bp, Artificial
  Probe
cacaacaaactgagaaatttggaca

SEQ ID NO: 315568 - DNA, 25 bp, Artificial
  Probe
ccctagacccttgctctagggacag

SEQ ID NO: 315569 - DNA, 25 bp, Artificial
  Probe
tggaaggcgtccaagagcaggtcaa

SEQ ID NO: 315570 - DNA, 25 bp, Artificial
  Probe
gtggactactccagcatcatctcaa

SEQ ID NO: 315571 - DNA, 25 bp, Artificial
  Probe
ttacaaacttggtttaaagacactg

SEQ ID NO: 315572 - DNA, 25 bp, Artificial
  Probe
gactaccagaaatccgggcaatcag

SEQ ID NO: 315573 - DNA, 25 bp, Artificial
  Probe
cttcagtttgatcagcgggagtttg

SEQ ID NO: 315574 - DNA, 25 bp, Artificial
  Probe
tttgtgtgtctgaagttcctggtgc

SEQ ID NO: 315575 - DNA, 25 bp, Artificial
  Probe
gtgagactccgttcccttcagtttg

SEQ ID NO: 315576 - DNA, 25 bp, Artificial
  Probe
atcttcctggttaccggagaacacg

SEQ ID NO: 315577 - DNA, 25 bp, Artificial
  Probe
gagaacacgtggactactccagcat

SEQ ID NO: 315578 - DNA, 25 bp, Artificial
  Probe
tgcttcttcgactaccagaaatccg

SEQ ID NO: 315579 - DNA, 25 bp, Artificial
  Probe
gcatcatctcaaacacagaagtcgc

SEQ ID NO: 315580 - DNA, 25 bp, Artificial
  Probe
tagacactaaaacatataggggtgc

SEQ ID NO: 315581 - DNA, 25 bp, Artificial
  Probe
cagatctgcctgtggtttagaaata

SEQ ID NO: 315582 - DNA, 25 bp, Artificial
  Probe
cgccatcacagagaagatgacatcc

SEQ ID NO: 315583 - DNA, 25 bp, Artificial
  Probe
ggattctgctcagcatttcctcacc

SEQ ID NO: 315584 - DNA, 25 bp, Artificial
  Probe
tccatcgttattggagaaacaaaga

SEQ ID NO: 315585 - DNA, 25 bp, Artificial
  Probe
gtcttctagaattttccaagaagaa

SEQ ID NO: 315586 - DNA, 25 bp, Artificial
  Probe
aggaactgtcgctcagccagaagca

SEQ ID NO: 315587 - DNA, 25 bp, Artificial
  Probe
agtgtgctaaactcaaaccagttta

SEQ ID NO: 315588 - DNA, 25 bp, Artificial
  Probe
accatggtggcaaatgcggagactc

SEQ ID NO: 315589 - DNA, 25 bp, Artificial
  Probe
cacgaatgattctcttctgttttgt

SEQ ID NO: 315590 - DNA, 25 bp, Artificial
  Probe
atagaattcaagagccatcaaggag

SEQ ID NO: 315591 - DNA, 25 bp, Artificial
  Probe
tgctttgtcaggaatgaacagtcat

SEQ ID NO: 315592 - DNA, 25 bp, Artificial
  Probe
gtcacccggatacatttatctgtga

SEQ ID NO: 315593 - DNA, 25 bp, Artificial
  Probe
ggtgctttgtcaggaatgaacagtc

SEQ ID NO: 315594 - DNA, 25 bp, Artificial
  Probe
cacagcacagtggtcttagggaggt

SEQ ID NO: 315595 - DNA, 25 bp, Artificial
  Probe
cagtttagtgtcatgctctggttta

SEQ ID NO: 315596 - DNA, 25 bp, Artificial
  Probe
gatgggcattacgttcggtgttatc

SEQ ID NO: 315597 - DNA, 25 bp, Artificial
  Probe
cttgtcacccggatacatttatctg

SEQ ID NO: 315598 - DNA, 25 bp, Artificial
  Probe
aagggaatccgcatgcactaaaaag

SEQ ID NO: 315599 - DNA, 25 bp, Artificial
  Probe
atagggaaagccaccatgctcttac

SEQ ID NO: 315600 - DNA, 25 bp, Artificial
  Probe
cttacttccatatgtgaagtgtgct

SEQ ID NO: 315601 - DNA, 25 bp, Artificial
  Probe
acgtttccattgctactcacgaatg

SEQ ID NO: 315602 - DNA, 25 bp, Artificial
  Probe
ggttataatccacgtttccattgct

SEQ ID NO: 315603 - DNA, 25 bp, Artificial
  Probe
cctctcctccatcgttattggagaa

SEQ ID NO: 315604 - DNA, 25 bp, Artificial
  Probe
catttatatggtgttcacaatcctg

SEQ ID NO: 315605 - DNA, 25 bp, Artificial
  Probe
agaagaaaccatggtggcaaatgcg

SEQ ID NO: 315606 - DNA, 25 bp, Artificial
  Probe
gaaattgcttgaacatcaagatagc

SEQ ID NO: 315607 - DNA, 25 bp, Artificial
  Probe
tcagccagaagcagatgaagccact

SEQ ID NO: 315608 - DNA, 25 bp, Artificial
  Probe
gcgggcactgggaacacagcacagt

SEQ ID NO: 315609 - DNA, 25 bp, Artificial
  Probe
tgatgttgagactgtacccatgaaa

SEQ ID NO: 315610 - DNA, 25 bp, Artificial
  Probe
tgccaaattcagaatgaggaacctt

SEQ ID NO: 315611 - DNA, 25 bp, Artificial
  Probe
gctactcacgaatgattctcttctg

SEQ ID NO: 315612 - DNA, 25 bp, Artificial
  Probe
gatgacatcctgcaaacccatgatt

SEQ ID NO: 315613 - DNA, 25 bp, Artificial
  Probe
ctgcaaacccatgattacagcaatg

SEQ ID NO: 315614 - DNA, 25 bp, Artificial
  Probe
tcacaatcctgttatgacaagcccg

SEQ ID NO: 315615 - DNA, 25 bp, Artificial
  Probe
agaagatgacatcctgcaaacccat

SEQ ID NO: 315616 - DNA, 25 bp, Artificial
  Probe
ttccatatgtgaagtgtgctaaact

SEQ ID NO: 315617 - DNA, 25 bp, Artificial
  Probe
ctggttcggcatagggaaagccacc

SEQ ID NO: 315618 - DNA, 25 bp, Artificial
  Probe
gtttccattgctactcacgaatgat

SEQ ID NO: 315619 - DNA, 25 bp, Artificial
  Probe
gactgtacccatgaaaaatttggaa

SEQ ID NO: 315620 - DNA, 25 bp, Artificial
  Probe
gcagatgaagccactggtcctggtt

SEQ ID NO: 315621 - DNA, 25 bp, Artificial
  Probe
agtcatggttataatccacgtttcc

SEQ ID NO: 315622 - DNA, 25 bp, Artificial
  Probe
taggctactttgaacattatctgca

SEQ ID NO: 315623 - DNA, 25 bp, Artificial
  Probe
cagctattcggatgtcatggctggg

SEQ ID NO: 315624 - DNA, 25 bp, Artificial
  Probe
ctatcgcaggatggattcagaggat

SEQ ID NO: 315625 - DNA, 25 bp, Artificial
  Probe
catgctctggtttataaggatgggc

SEQ ID NO: 315626 - DNA, 25 bp, Artificial
  Probe
tgacctgtcctagatataagtctgg

SEQ ID NO: 315627 - DNA, 25 bp, Artificial
  Probe
aggaaccagacagtgataagtactt

SEQ ID NO: 315628 - DNA, 25 bp, Artificial
  Probe
gaaacagtttacttgcctgttgagt

SEQ ID NO: 315629 - DNA, 25 bp, Artificial
  Probe
taagatggtcatagcctgctggagc

SEQ ID NO: 315630 - DNA, 25 bp, Artificial
  Probe
gctgcccatcggtgtgtccctggca

SEQ ID NO: 315631 - DNA, 25 bp, Artificial
  Probe
tataagatggtcatagcctgctgga

SEQ ID NO: 315632 - DNA, 25 bp, Artificial
  Probe
tgtgtccctggcatggctgacgcca

SEQ ID NO: 315633 - DNA, 25 bp, Artificial
  Probe
ttaggaaccagacagtgataagtac

SEQ ID NO: 315634 - DNA, 25 bp, Artificial
  Probe
atggctgacgccaaagcgcacacca

SEQ ID NO: 315635 - DNA, 25 bp, Artificial
  Probe
atgacctgtcctagatataagtctg

SEQ ID NO: 315636 - DNA, 25 bp, Artificial
  Probe
cctgctggagcgtttcttattatga

SEQ ID NO: 315637 - DNA, 25 bp, Artificial
  Probe
atatgacctgtcctagatataagtc

SEQ ID NO: 315638 - DNA, 25 bp, Artificial
  Probe
ctggcatggctgacgccaaagcgca

SEQ ID NO: 315639 - DNA, 25 bp, Artificial
  Probe
ttctttgtggaccaaaccatatatg

SEQ ID NO: 315640 - DNA, 25 bp, Artificial
  Probe
gagaagactccatcagtatcaaaaa

SEQ ID NO: 315641 - DNA, 25 bp, Artificial
  Probe
gtgataagtactttctttgtggacc

SEQ ID NO: 315642 - DNA, 25 bp, Artificial
  Probe
ggtgtacagcacagacaggtggatc

SEQ ID NO: 315643 - DNA, 25 bp, Artificial
  Probe
gtgtccctggcatggctgacgccaa

SEQ ID NO: 315644 - DNA, 25 bp, Artificial
  Probe
ctgctggagcgtttcttattatgat

SEQ ID NO: 315645 - DNA, 25 bp, Artificial
  Probe
gataagtactttctttgtggaccaa

SEQ ID NO: 315646 - DNA, 25 bp, Artificial
  Probe
gtactttctttgtggaccaaaccat

SEQ ID NO: 315647 - DNA, 25 bp, Artificial
  Probe
ggtcatagcctgctggagcgtttct

SEQ ID NO: 315648 - DNA, 25 bp, Artificial
  Probe
tgtcctagatataagtctggtaggc

SEQ ID NO: 315649 - DNA, 25 bp, Artificial
  Probe
cacagacaggtggatctttgggctg

SEQ ID NO: 315650 - DNA, 25 bp, Artificial
  Probe
atggtcatagcctgctggagcgttt

SEQ ID NO: 315651 - DNA, 25 bp, Artificial
  Probe
tggtgtacagcacagacaggtggat

SEQ ID NO: 315652 - DNA, 25 bp, Artificial
  Probe
agaagctgcccatcggtgtgtccct

SEQ ID NO: 315653 - DNA, 25 bp, Artificial
  Probe
ggctgacgccaaagcgcacaccagg

SEQ ID NO: 315654 - DNA, 25 bp, Artificial
  Probe
tcggtgtgtccctggcatggctgac

SEQ ID NO: 315655 - DNA, 25 bp, Artificial
  Probe
tatatgaaacagtttacttgcctgt

SEQ ID NO: 315656 - DNA, 25 bp, Artificial
  Probe
tggctgacgccaaagcgcacaccag

SEQ ID NO: 315657 - DNA, 25 bp, Artificial
  Probe
tgataagtactttctttgtggacca

SEQ ID NO: 315658 - DNA, 25 bp, Artificial
  Probe
tggtcatagcctgctggagcgtttc

SEQ ID NO: 315659 - DNA, 25 bp, Artificial
  Probe
atgaaacagtttacttgcctgttga

SEQ ID NO: 315660 - DNA, 25 bp, Artificial
  Probe
tgtggaccaaaccatatatgacctg

SEQ ID NO: 315661 - DNA, 25 bp, Artificial
  Probe
acctgtcctagatataagtctggta

SEQ ID NO: 315662 - DNA, 25 bp, Artificial
  Probe
atagcctgctggagcgtttcttatt

SEQ ID NO: 315663 - DNA, 25 bp, Artificial
  Probe
ataagatggtcatagcctgctggag

SEQ ID NO: 315664 - DNA, 25 bp, Artificial
  Probe
ccctggcatggctgacgccaaagcg

SEQ ID NO: 315665 - DNA, 25 bp, Artificial
  Probe
gcacagacaggtggatctttgggct

SEQ ID NO: 315666 - DNA, 25 bp, Artificial
  Probe
gccaaagcgcacaccaggcagcgag

SEQ ID NO: 315667 - DNA, 25 bp, Artificial
  Probe
atgagtagaagctgcccatcggtgt

SEQ ID NO: 315668 - DNA, 25 bp, Artificial
  Probe
ggaccaaaccatatatgacctgtcc

SEQ ID NO: 315669 - DNA, 25 bp, Artificial
  Probe
tagaagctgcccatcggtgtgtccc

SEQ ID NO: 315670 - DNA, 25 bp, Artificial
  Probe
cccatcggtgtgtccctggcatggc

SEQ ID NO: 315671 - DNA, 25 bp, Artificial
  Probe
tgtacagcacagacaggtggatctt

SEQ ID NO: 315672 - DNA, 25 bp, Artificial
  Probe
ctgccatctcaagaataaaccaagg

SEQ ID NO: 315673 - DNA, 25 bp, Artificial
  Probe
acagggcaaaactgccatctcaaga

SEQ ID NO: 315674 - DNA, 25 bp, Artificial
  Probe
ttccttctgaaggaagtctgggata

SEQ ID NO: 315675 - DNA, 25 bp, Artificial
  Probe
cctttggtgctatccctttccatag

SEQ ID NO: 315676 - DNA, 25 bp, Artificial
  Probe
cctaaatggtgctgccctgctcgta

SEQ ID NO: 315677 - DNA, 25 bp, Artificial
  Probe
atccctttccatagttaagcactgg

SEQ ID NO: 315678 - DNA, 25 bp, Artificial
  Probe
agagattccagaagggtctctactc

SEQ ID NO: 315679 - DNA, 25 bp, Artificial
  Probe
gggcacaaatcaggatcctaaatgg

SEQ ID NO: 315680 - DNA, 25 bp, Artificial
  Probe
ccatagttaagcactggatacctcc

SEQ ID NO: 315681 - DNA, 25 bp, Artificial
  Probe
tatttaatctgcttccttctgaagg

SEQ ID NO: 315682 - DNA, 25 bp, Artificial
  Probe
gatacctcctggtccctggctagga

SEQ ID NO: 315683 - DNA, 25 bp, Artificial
  Probe
atctcaagaataaaccaaggaactg

SEQ ID NO: 315684 - DNA, 25 bp, Artificial
  Probe
tggtgctatccctttccatagttaa

SEQ ID NO: 315685 - DNA, 25 bp, Artificial
  Probe
tcccaaggacacagggcaaaactgc

SEQ ID NO: 315686 - DNA, 25 bp, Artificial
  Probe
ggaccaagatgttgggcacaaatca

SEQ ID NO: 315687 - DNA, 25 bp, Artificial
  Probe
accaggccctttggtgctatccctt

SEQ ID NO: 315688 - DNA, 25 bp, Artificial
  Probe
ccttctggggaccaagatgttgggc

SEQ ID NO: 315689 - DNA, 25 bp, Artificial
  Probe
aggacacagggcaaaactgccatct

SEQ ID NO: 315690 - DNA, 25 bp, Artificial
  Probe
gtccccaagccttctggggaccaag

SEQ ID NO: 315691 - DNA, 25 bp, Artificial
  Probe
tagttaagcactggatacctcctgg

SEQ ID NO: 315692 - DNA, 25 bp, Artificial
  Probe
tcctcccaaggacacagggcaaaac

SEQ ID NO: 315693 - DNA, 25 bp, Artificial
  Probe
caaatcaggatcctaaatggtgctg

SEQ ID NO: 315694 - DNA, 25 bp, Artificial
  Probe
tgcttccttctgaaggaagtctggg

SEQ ID NO: 315695 - DNA, 25 bp, Artificial
  Probe
ggtctatttaatctgcttccttctg

SEQ ID NO: 315696 - DNA, 25 bp, Artificial
  Probe
agccttctggggaccaagatgttgg

SEQ ID NO: 315697 - DNA, 25 bp, Artificial
  Probe
cctgctcgtaactgggaactgtatg

SEQ ID NO: 315698 - DNA, 25 bp, Artificial
  Probe
tcctattctttctttgagtaaagag

SEQ ID NO: 315699 - DNA, 25 bp, Artificial
  Probe
tgttgggcacaaatcaggatcctaa

SEQ ID NO: 315700 - DNA, 25 bp, Artificial
  Probe
aatctgcttccttctgaaggaagtc

SEQ ID NO: 315701 - DNA, 25 bp, Artificial
  Probe
tggtccctggctaggacctttccct

SEQ ID NO: 315702 - DNA, 25 bp, Artificial
  Probe
ggcaaaactgccatctcaagaataa

SEQ ID NO: 315703 - DNA, 25 bp, Artificial
  Probe
gtaaacaagatcaacgtgggacgcc

SEQ ID NO: 315704 - DNA, 25 bp, Artificial
  Probe
tggctaggacctttccctctcattc

SEQ ID NO: 315705 - DNA, 25 bp, Artificial
  Probe
ctggatacctcctggtccctggcta

SEQ ID NO: 315706 - DNA, 25 bp, Artificial
  Probe
cctattctttctttgagtaaagagg

SEQ ID NO: 315707 - DNA, 25 bp, Artificial
  Probe
gccatctcaagaataaaccaaggaa

SEQ ID NO: 315708 - DNA, 25 bp, Artificial
  Probe
taaacaagatcaacgtgggacgccc

SEQ ID NO: 315709 - DNA, 25 bp, Artificial
  Probe
gtgctatccctttccatagttaagc

SEQ ID NO: 315710 - DNA, 25 bp, Artificial
  Probe
ccccaagccttctggggaccaagat

SEQ ID NO: 315711 - DNA, 25 bp, Artificial
  Probe
gatgttgggcacaaatcaggatcct

SEQ ID NO: 315712 - DNA, 25 bp, Artificial
  Probe
aagcactggatacctcctggtccct

SEQ ID NO: 315713 - DNA, 25 bp, Artificial
  Probe
ctggggaccaagatgttgggcacaa

SEQ ID NO: 315714 - DNA, 25 bp, Artificial
  Probe
ctggctaggacctttccctctcatt

SEQ ID NO: 315715 - DNA, 25 bp, Artificial
  Probe
atggtgctgccctgctcgtaactgg

SEQ ID NO: 315716 - DNA, 25 bp, Artificial
  Probe
taactcagagctgatgaagccccac

SEQ ID NO: 315717 - DNA, 25 bp, Artificial
  Probe
ctcgtaactgggaactgtatgaaat

SEQ ID NO: 315718 - DNA, 25 bp, Artificial
  Probe
agcagcagctctgtgcatcctcatc

SEQ ID NO: 315719 - DNA, 25 bp, Artificial
  Probe
ttgacccctgtgagccgagctcagg

SEQ ID NO: 315720 - DNA, 25 bp, Artificial
  Probe
gggagtctagcagtaccactggcat

SEQ ID NO: 315721 - DNA, 25 bp, Artificial
  Probe
aggtgatccgggagtctagcagtac

SEQ ID NO: 315722 - DNA, 25 bp, Artificial
  Probe
ctctatgccatgtacaagtacagaa

SEQ ID NO: 315723 - DNA, 25 bp, Artificial
  Probe
gggattgtcgcagcagcagctctgt

SEQ ID NO: 315724 - DNA, 25 bp, Artificial
  Probe
tgccatgtacaagtacagaaaccgg

SEQ ID NO: 315725 - DNA, 25 bp, Artificial
  Probe
atcagtaactcagcacagtccaatg

SEQ ID NO: 315726 - DNA, 25 bp, Artificial
  Probe
gccgagctcaggtgggttagccaac

SEQ ID NO: 315727 - DNA, 25 bp, Artificial
  Probe
agcacagtccaatggggctgtggtc

SEQ ID NO: 315728 - DNA, 25 bp, Artificial
  Probe
ccagcagtgcgaaaagcgccaacaa

SEQ ID NO: 315729 - DNA, 25 bp, Artificial
  Probe
attatgtctgatctcaagattcgaa

SEQ ID NO: 315730 - DNA, 25 bp, Artificial
  Probe
tgggcggccgcgaaccatacccagg

SEQ ID NO: 315731 - DNA, 25 bp, Artificial
  Probe
acagaaaccgggatgaaggctcata

SEQ ID NO: 315732 - DNA, 25 bp, Artificial
  Probe
agagtcgaaactacatcagtaactc

SEQ ID NO: 315733 - DNA, 25 bp, Artificial
  Probe
gtcgaaactacatcagtaactcagc

SEQ ID NO: 315734 - DNA, 25 bp, Artificial
  Probe
gagaagcagcccagcagtgcgaaaa

SEQ ID NO: 315735 - DNA, 25 bp, Artificial
  Probe
atctcaagattcgaaaaggacactt

SEQ ID NO: 315736 - DNA, 25 bp, Artificial
  Probe
tagcagtaccactggcatggtggtg

SEQ ID NO: 315737 - DNA, 25 bp, Artificial
  Probe
gcagcccagcagtgcgaaaagcgcc

SEQ ID NO: 315738 - DNA, 25 bp, Artificial
  Probe
gcagcagcagctctgtgcatcctca

SEQ ID NO: 315739 - DNA, 25 bp, Artificial
  Probe
tgtacaagtacagaaaccgggatga

SEQ ID NO: 315740 - DNA, 25 bp, Artificial
  Probe
tccgggagtctagcagtaccactgg

SEQ ID NO: 315741 - DNA, 25 bp, Artificial
  Probe
agtattatgtctgatctcaagattc

SEQ ID NO: 315742 - DNA, 25 bp, Artificial
  Probe
ctcatatcacgtggatgagagtcga

SEQ ID NO: 315743 - DNA, 25 bp, Artificial
  Probe
gacattgacccctgtgagccgagct

SEQ ID NO: 315744 - DNA, 25 bp, Artificial
  Probe
ctatgccatgtacaagtacagaaac

SEQ ID NO: 315745 - DNA, 25 bp, Artificial
  Probe
tcgcagcagcagctctgtgcatcct

SEQ ID NO: 315746 - DNA, 25 bp, Artificial
  Probe
acaagtatgtcatgctcttgtttct

SEQ ID NO: 315747 - DNA, 25 bp, Artificial
  Probe
aaaccgggatgaaggctcatatcac

SEQ ID NO: 315748 - DNA, 25 bp, Artificial
  Probe
ggaatgcgatcaggagggaaaactc

SEQ ID NO: 315749 - DNA, 25 bp, Artificial
  Probe
ggatgaaggctcatatcacgtggat

SEQ ID NO: 315750 - DNA, 25 bp, Artificial
  Probe
agccgagctcaggtgggttagccaa

SEQ ID NO: 315751 - DNA, 25 bp, Artificial
  Probe
acaagtacagaaaccgggatgaagg

SEQ ID NO: 315752 - DNA, 25 bp, Artificial
  Probe
aaggctcatatcacgtggatgagag

SEQ ID NO: 315753 - DNA, 25 bp, Artificial
  Probe
cgaaccatacccaggctcggcagag

SEQ ID NO: 315754 - DNA, 25 bp, Artificial
  Probe
atgtctgatctcaagattcgaaaag

SEQ ID NO: 315755 - DNA, 25 bp, Artificial
  Probe
cagcgacgatgaggacattgacccc

SEQ ID NO: 315756 - DNA, 25 bp, Artificial
  Probe
aatgcgatcaggagggaaaactctt

SEQ ID NO: 315757 - DNA, 25 bp, Artificial
  Probe
cccagcagtgcgaaaagcgccaaca

SEQ ID NO: 315758 - DNA, 25 bp, Artificial
  Probe
ttgtcgcagcagcagctctgtgcat

SEQ ID NO: 315759 - DNA, 25 bp, Artificial
  Probe
gatgaggacattgacccctgtgagc

SEQ ID NO: 315760 - DNA, 25 bp, Artificial
  Probe
tcctctatgccatgtacaagtacag

SEQ ID NO: 315761 - DNA, 25 bp, Artificial
  Probe
tcacgtggatgagagtcgaaactac

SEQ ID NO: 315762 - DNA, 25 bp, Artificial
  Probe
atgaggacattgacccctgtgagcc

SEQ ID NO: 315763 - DNA, 25 bp, Artificial
  Probe
ccatacccaggctcggcagaggtga

SEQ ID NO: 315764 - DNA, 25 bp, Artificial
  Probe
gtttttagtttcagtcactaatagc

SEQ ID NO: 315765 - DNA, 25 bp, Artificial
  Probe
ccagaggttactactggagaaaatg

SEQ ID NO: 315766 - DNA, 25 bp, Artificial
  Probe
gtttcagtcactaatagcttcctgt

SEQ ID NO: 315767 - DNA, 25 bp, Artificial
  Probe
acccctagaggaagattacatttca

SEQ ID NO: 315768 - DNA, 25 bp, Artificial
  Probe
aaagcacattcatggttcagtgaaa

SEQ ID NO: 315769 - DNA, 25 bp, Artificial
  Probe
agtcataaaacagcagtgcaactca

SEQ ID NO: 315770 - DNA, 25 bp, Artificial
  Probe
tcatgctgattatctcaagttttag

SEQ ID NO: 315771 - DNA, 25 bp, Artificial
  Probe
tctgtaatctctcttcttggttggc

SEQ ID NO: 315772 - DNA, 25 bp, Artificial
  Probe
ttggccctctggaattaaccattcc

SEQ ID NO: 315773 - DNA, 25 bp, Artificial
  Probe
ctctgtaggtttgttctagatattc

SEQ ID NO: 315774 - DNA, 25 bp, Artificial
  Probe
cacattcatggttcagtgaaagaaa

SEQ ID NO: 315775 - DNA, 25 bp, Artificial
  Probe
ttcttggttggctagtcatcacatc

SEQ ID NO: 315776 - DNA, 25 bp, Artificial
  Probe
aaccagcaggagacatgaattcaaa

SEQ ID NO: 315777 - DNA, 25 bp, Artificial
  Probe
atcacatcaggctcattggccctct

SEQ ID NO: 315778 - DNA, 25 bp, Artificial
  Probe
ctattttcaggaacgaatgcttagt

SEQ ID NO: 315779 - DNA, 25 bp, Artificial
  Probe
ccattcctgagtagacaaatacttg

SEQ ID NO: 315780 - DNA, 25 bp, Artificial
  Probe
gcttttaaacacagtgcgtttttag

SEQ ID NO: 315781 - DNA, 25 bp, Artificial
  Probe
aacagcagtgcaactcagactatat

SEQ ID NO: 315782 - DNA, 25 bp, Artificial
  Probe
ggttacccctagaggaagattacat

SEQ ID NO: 315783 - DNA, 25 bp, Artificial
  Probe
agtttcagtcactaatagcttcctg

SEQ ID NO: 315784 - DNA, 25 bp, Artificial
  Probe
ctaattcaatgtcatctgtggttat

SEQ ID NO: 315785 - DNA, 25 bp, Artificial
  Probe
gacaaatacttgacaggttttgaac

SEQ ID NO: 315786 - DNA, 25 bp, Artificial
  Probe
gaattaaccattcctgagtagacaa

SEQ ID NO: 315787 - DNA, 25 bp, Artificial
  Probe
tctaaatatggtctaggttacccct

SEQ ID NO: 315788 - DNA, 25 bp, Artificial
  Probe
aacacagtgcgtttttagtttcagt

SEQ ID NO: 315789 - DNA, 25 bp, Artificial
  Probe
tcctcagtctcctttggcaggcact

SEQ ID NO: 315790 - DNA, 25 bp, Artificial
  Probe
aactctaattcaatgtcatctgtgg

SEQ ID NO: 315791 - DNA, 25 bp, Artificial
  Probe
aggaaaagcacattcatggttcagt

SEQ ID NO: 315792 - DNA, 25 bp, Artificial
  Probe
tattggtttaccagaggttactact

SEQ ID NO: 315793 - DNA, 25 bp, Artificial
  Probe
aatatggtctaggttacccctagag

SEQ ID NO: 315794 - DNA, 25 bp, Artificial
  Probe
ctttggcaggcactaaatttagagg

SEQ ID NO: 315795 - DNA, 25 bp, Artificial
  Probe
cactttagatctattttcaggaacg

SEQ ID NO: 315796 - DNA, 25 bp, Artificial
  Probe
cctttggcaggcactaaatttagag

SEQ ID NO: 315797 - DNA, 25 bp, Artificial
  Probe
tatggtctaggttacccctagagga

SEQ ID NO: 315798 - DNA, 25 bp, Artificial
  Probe
gtctcctttggcaggcactaaattt

SEQ ID NO: 315799 - DNA, 25 bp, Artificial
  Probe
agtcatcacatcaggctcattggcc

SEQ ID NO: 315800 - DNA, 25 bp, Artificial
  Probe
gctcattggccctctggaattaacc

SEQ ID NO: 315801 - DNA, 25 bp, Artificial
  Probe
tcaatgtcatctgtggttattttac

SEQ ID NO: 315802 - DNA, 25 bp, Artificial
  Probe
tctcttcttggttggctagtcatca

SEQ ID NO: 315803 - DNA, 25 bp, Artificial
  Probe
cataaaacagcagtgcaactcagac

SEQ ID NO: 315804 - DNA, 25 bp, Artificial
  Probe
cattcctgagtagacaaatacttga

SEQ ID NO: 315805 - DNA, 25 bp, Artificial
  Probe
ctcagtctcctttggcaggcactaa

SEQ ID NO: 315806 - DNA, 25 bp, Artificial
  Probe
ctaatagcttcctgtctaaatatgg

SEQ ID NO: 315807 - DNA, 25 bp, Artificial
  Probe
gcagtgcaactcagactatattact

SEQ ID NO: 315808 - DNA, 25 bp, Artificial
  Probe
catcaggctcattggccctctggaa

SEQ ID NO: 315809 - DNA, 25 bp, Artificial
  Probe
caatgtcatctgtggttattttaca

SEQ ID NO: 315810 - DNA, 25 bp, Artificial
  Probe
aatgttgaacccagctggcctggac

SEQ ID NO: 315811 - DNA, 25 bp, Artificial
  Probe
ccccagtgcgctgaggtgtgaatga

SEQ ID NO: 315812 - DNA, 25 bp, Artificial
  Probe
gctggcctggacagccagtagcatc

SEQ ID NO: 315813 - DNA, 25 bp, Artificial
  Probe
acgtgaaaatgatcccaaggttggc

SEQ ID NO: 315814 - DNA, 25 bp, Artificial
  Probe
gtccaggttaaacctcttcactcag

SEQ ID NO: 315815 - DNA, 25 bp, Artificial
  Probe
caaattcatagagaacattggctat

SEQ ID NO: 315816 - DNA, 25 bp, Artificial
  Probe
cacgatatcagcagataatgaaaag

SEQ ID NO: 315817 - DNA, 25 bp, Artificial
  Probe
actgaaccccagtgcgctgaggtgt

SEQ ID NO: 315818 - DNA, 25 bp, Artificial
  Probe
ccttctcatccgaacgcttgaagcg

SEQ ID NO: 315819 - DNA, 25 bp, Artificial
  Probe
ctggcacaaatgtgggcaataatat

SEQ ID NO: 315820 - DNA, 25 bp, Artificial
  Probe
ttctagggcttttgaaatgccaggt

SEQ ID NO: 315821 - DNA, 25 bp, Artificial
  Probe
aagataagagccaagcgacggagga

SEQ ID NO: 315822 - DNA, 25 bp, Artificial
  Probe
ctccaagagttccttgggggacagg

SEQ ID NO: 315823 - DNA, 25 bp, Artificial
  Probe
gggacagggaccacatcaatctcat

SEQ ID NO: 315824 - DNA, 25 bp, Artificial
  Probe
gacagggaccacatcaatctcatct

SEQ ID NO: 315825 - DNA, 25 bp, Artificial
  Probe
ataccttcaccatgcggagctttaa

SEQ ID NO: 315826 - DNA, 25 bp, Artificial
  Probe
gttgaacccagctggcctggacagc

SEQ ID NO: 315827 - DNA, 25 bp, Artificial
  Probe
gaggaactggccatcttgattcata

SEQ ID NO: 315828 - DNA, 25 bp, Artificial
  Probe
ctagtgttaataccttcaccatgcg

SEQ ID NO: 315829 - DNA, 25 bp, Artificial
  Probe
agcgacggaggaactggccatcttg

SEQ ID NO: 315830 - DNA, 25 bp, Artificial
  Probe
ttctcagacctttagacatgcactg

SEQ ID NO: 315831 - DNA, 25 bp, Artificial
  Probe
gttccttgggggacagggaccacat

SEQ ID NO: 315832 - DNA, 25 bp, Artificial
  Probe
acatttagtgcagtgcctgatacac

SEQ ID NO: 315833 - DNA, 25 bp, Artificial
  Probe
gaagcccagtattaatgtcactgat

SEQ ID NO: 315834 - DNA, 25 bp, Artificial
  Probe
caatcagccaacacgatatcagcag

SEQ ID NO: 315835 - DNA, 25 bp, Artificial
  Probe
acccagctggcctggacagccagta

SEQ ID NO: 315836 - DNA, 25 bp, Artificial
  Probe
agataagagccaagcgacggaggaa

SEQ ID NO: 315837 - DNA, 25 bp, Artificial
  Probe
aatgagggagccacatgcagtgaga

SEQ ID NO: 315838 - DNA, 25 bp, Artificial
  Probe
aaatgatcccaaggttggcctcagc

SEQ ID NO: 315839 - DNA, 25 bp, Artificial
  Probe
ctcttcactcagtctaactcgagag

SEQ ID NO: 315840 - DNA, 25 bp, Artificial
  Probe
tttatgtctccaacatttagtgcag

SEQ ID NO: 315841 - DNA, 25 bp, Artificial
  Probe
taactcgagagtttttgaatcacac

SEQ ID NO: 315842 - DNA, 25 bp, Artificial
  Probe
tttgtctttatgtcacctgttggcc

SEQ ID NO: 315843 - DNA, 25 bp, Artificial
  Probe
gctatgtcctttatggaatatacaa

SEQ ID NO: 315844 - DNA, 25 bp, Artificial
  Probe
atccgaacgcttgaagcgatttttt

SEQ ID NO: 315845 - DNA, 25 bp, Artificial
  Probe
gagaacattggctatgtcctttatg

SEQ ID NO: 315846 - DNA, 25 bp, Artificial
  Probe
agtgagaaactgaaccccagtgcgc

SEQ ID NO: 315847 - DNA, 25 bp, Artificial
  Probe
tctctttgtatctgtggtgtcatga

SEQ ID NO: 315848 - DNA, 25 bp, Artificial
  Probe
gccaagcgacggaggaactggccat

SEQ ID NO: 315849 - DNA, 25 bp, Artificial
  Probe
gatctttctcagacctttagacatg

SEQ ID NO: 315850 - DNA, 25 bp, Artificial
  Probe
acctagtgggccacaattcccatta

SEQ ID NO: 315851 - DNA, 25 bp, Artificial
  Probe
ccagtagcatccaagaacacgaaag

SEQ ID NO: 315852 - DNA, 25 bp, Artificial
  Probe
tccttgggggacagggaccacatca

SEQ ID NO: 315853 - DNA, 25 bp, Artificial
  Probe
aaggtgttttacgaccagccatgac

SEQ ID NO: 315854 - DNA, 25 bp, Artificial
  Probe
taaactcagtgagaaactgaacccc

SEQ ID NO: 315855 - DNA, 25 bp, Artificial
  Probe
gtgggccacaattcccattacgtga

SEQ ID NO: 315856 - DNA, 25 bp, Artificial
  Probe
caattcacggtgagctagagtgaga

SEQ ID NO: 315857 - DNA, 25 bp, Artificial
  Probe
tttgttggccgcaaatcccagttca

SEQ ID NO: 315858 - DNA, 25 bp, Artificial
  Probe
actgtcaaagaagacccacactctg

SEQ ID NO: 315859 - DNA, 25 bp, Artificial
  Probe
ccaacactttatggaaaggaagtgg

SEQ ID NO: 315860 - DNA, 25 bp, Artificial
  Probe
tagtaacagggcattccctgaggag

SEQ ID NO: 315861 - DNA, 25 bp, Artificial
  Probe
cctgtccatcccagtgcgaattctg

SEQ ID NO: 315862 - DNA, 25 bp, Artificial
  Probe
aggcgtcctcctgtgcggcgcattg

SEQ ID NO: 315863 - DNA, 25 bp, Artificial
  Probe
attgcagacacacgtgtacgatgtc

SEQ ID NO: 315864 - DNA, 25 bp, Artificial
  Probe
gccacctatcaacctgacaagcagt

SEQ ID NO: 315865 - DNA, 25 bp, Artificial
  Probe
ccctgaggagttcttgggaatgtta

SEQ ID NO: 315866 - DNA, 25 bp, Artificial
  Probe
ttttgagacaaattgccacagagcc

SEQ ID NO: 315867 - DNA, 25 bp, Artificial
  Probe
acctgacaagcagtaatttgttggc

SEQ ID NO: 315868 - DNA, 25 bp, Artificial
  Probe
tatcaacctgacaagcagtaatttg

SEQ ID NO: 315869 - DNA, 25 bp, Artificial
  Probe
gtgaacaccgccagcagggcacagc

SEQ ID NO: 315870 - DNA, 25 bp, Artificial
  Probe
agtatggaccggacctgaaaaggat

SEQ ID NO: 315871 - DNA, 25 bp, Artificial
  Probe
tgccacctatcaacctgacaagcag

SEQ ID NO: 315872 - DNA, 25 bp, Artificial
  Probe
gttggccgcaaatcccagttcaaac

SEQ ID NO: 315873 - DNA, 25 bp, Artificial
  Probe
gagctcaaagtcagagtcattaagg

SEQ ID NO: 315874 - DNA, 25 bp, Artificial
  Probe
acctgaaaaggatcttctcaagttc

SEQ ID NO: 315875 - DNA, 25 bp, Artificial
  Probe
caaagtcagagtcattaaggccaaa

SEQ ID NO: 315876 - DNA, 25 bp, Artificial
  Probe
aacaccgccagcagggcacagctga

SEQ ID NO: 315877 - DNA, 25 bp, Artificial
  Probe
aagggccaaggagctcaaagtcaga

SEQ ID NO: 315878 - DNA, 25 bp, Artificial
  Probe
tctgtctcggaactaacaaaccctg

SEQ ID NO: 315879 - DNA, 25 bp, Artificial
  Probe
aggagacgtcccagacctgaagaag

SEQ ID NO: 315880 - DNA, 25 bp, Artificial
  Probe
atgtcagtatggaccggacctgaaa

SEQ ID NO: 315881 - DNA, 25 bp, Artificial
  Probe
ctgacactgtcaaagaagacccaca

SEQ ID NO: 315882 - DNA, 25 bp, Artificial
  Probe
caagttcgagtcaagtagtaacagg

SEQ ID NO: 315883 - DNA, 25 bp, Artificial
  Probe
catcccagtgcgaattctgacactg

SEQ ID NO: 315884 - DNA, 25 bp, Artificial
  Probe
cactggacaggaagccttctgtctc

SEQ ID NO: 315885 - DNA, 25 bp, Artificial
  Probe
cgccagcagggcacagctgaggaca

SEQ ID NO: 315886 - DNA, 25 bp, Artificial
  Probe
tgtctcggaactaacaaaccctgtc

SEQ ID NO: 315887 - DNA, 25 bp, Artificial
  Probe
caaggagctcaaagtcagagtcatt

SEQ ID NO: 315888 - DNA, 25 bp, Artificial
  Probe
cccaacactttatggaaaggaagtg

SEQ ID NO: 315889 - DNA, 25 bp, Artificial
  Probe
tggaaacccaacactttatggaaag

SEQ ID NO: 315890 - DNA, 25 bp, Artificial
  Probe
aagccttctgtctcggaactaacaa

SEQ ID NO: 315891 - DNA, 25 bp, Artificial
  Probe
cccacatcactggacaggaagcctt

SEQ ID NO: 315892 - DNA, 25 bp, Artificial
  Probe
tcccagacctgaagaagacagagag

SEQ ID NO: 315893 - DNA, 25 bp, Artificial
  Probe
agggcacagctgaggacacacaccc

SEQ ID NO: 315894 - DNA, 25 bp, Artificial
  Probe
cccaattcacggtgagctagagtga

SEQ ID NO: 315895 - DNA, 25 bp, Artificial
  Probe
agggccaaggagctcaaagtcagag

SEQ ID NO: 315896 - DNA, 25 bp, Artificial
  Probe
ttaagtaaggcgtcctcctgtgcgg

SEQ ID NO: 315897 - DNA, 25 bp, Artificial
  Probe
caaagaagacccacactctgggggc

SEQ ID NO: 315898 - DNA, 25 bp, Artificial
  Probe
gcagtaatttgttggccgcaaatcc

SEQ ID NO: 315899 - DNA, 25 bp, Artificial
  Probe
gaccggacctgaaaaggatcttctc

SEQ ID NO: 315900 - DNA, 25 bp, Artificial
  Probe
cctgtgcggcgcattgcagacacac

SEQ ID NO: 315901 - DNA, 25 bp, Artificial
  Probe
aagcagtaatttgttggccgcaaat

SEQ ID NO: 315902 - DNA, 25 bp, Artificial
  Probe
ttcttccataaataagcacaggcag

SEQ ID NO: 315903 - DNA, 25 bp, Artificial
  Probe
ctttctaggctatctggtaaattgg

SEQ ID NO: 315904 - DNA, 25 bp, Artificial
  Probe
gagatttctctcactttctaggcta

SEQ ID NO: 315905 - DNA, 25 bp, Artificial
  Probe
agagatttctctcactttctaggct

SEQ ID NO: 315906 - DNA, 25 bp, Artificial
  Probe
tttgggccaggtctgtacagttcaa

SEQ ID NO: 315907 - DNA, 25 bp, Artificial
  Probe
ctctcactttctaggctatctggta

SEQ ID NO: 315908 - DNA, 25 bp, Artificial
  Probe
tggcagagatttctctcactttcta

SEQ ID NO: 315909 - DNA, 25 bp, Artificial
  Probe
gtcttccagattcctactaggatag

SEQ ID NO: 315910 - DNA, 25 bp, Artificial
  Probe
gagagttctcaaactacggacttcc

SEQ ID NO: 315911 - DNA, 25 bp, Artificial
  Probe
cattgattagccatttgagttcttt

SEQ ID NO: 315912 - DNA, 25 bp, Artificial
  Probe
ataagcacaggcagacctatcatag

SEQ ID NO: 315913 - DNA, 25 bp, Artificial
  Probe
cataaataagcacaggcagacctat

SEQ ID NO: 315914 - DNA, 25 bp, Artificial
  Probe
caggtctgtacagttcaaattactc

SEQ ID NO: 315915 - DNA, 25 bp, Artificial
  Probe
cactttctaggctatctggtaaatt

SEQ ID NO: 315916 - DNA, 25 bp, Artificial
  Probe
tatcatagcaatagccagtacctgg

SEQ ID NO: 315917 - DNA, 25 bp, Artificial
  Probe
gggccaggtctgtacagttcaaatt

SEQ ID NO: 315918 - DNA, 25 bp, Artificial
  Probe
gacctatcatagcaatagccagtac

SEQ ID NO: 315919 - DNA, 25 bp, Artificial
  Probe
agagagttctcaaactacggacttc

SEQ ID NO: 315920 - DNA, 25 bp, Artificial
  Probe
tttggccgtttactgctgagattgt

SEQ ID NO: 315921 - DNA, 25 bp, Artificial
  Probe
cattctagttcttaattcttgaggt

SEQ ID NO: 315922 - DNA, 25 bp, Artificial
  Probe
gcagagatttctctcactttctagg

SEQ ID NO: 315923 - DNA, 25 bp, Artificial
  Probe
gagttctcaaactacggacttccca

SEQ ID NO: 315924 - DNA, 25 bp, Artificial
  Probe
ttcatttggccgtttactgctgaga

SEQ ID NO: 315925 - DNA, 25 bp, Artificial
  Probe
cttctgatactggatggaattttac

SEQ ID NO: 315926 - DNA, 25 bp, Artificial
  Probe
atagcaatagccagtacctggtacc

SEQ ID NO: 315927 - DNA, 25 bp, Artificial
  Probe
gccgtttactgctgagattgtttat

SEQ ID NO: 315928 - DNA, 25 bp, Artificial
  Probe
ccattctagttcttaattcttgagg

SEQ ID NO: 315929 - DNA, 25 bp, Artificial
  Probe
acaggcagacctatcatagcaatag

SEQ ID NO: 315930 - DNA, 25 bp, Artificial
  Probe
cacaggcagacctatcatagcaata

SEQ ID NO: 315931 - DNA, 25 bp, Artificial
  Probe
ccgtttactgctgagattgtttatt

SEQ ID NO: 315932 - DNA, 25 bp, Artificial
  Probe
tggaattttacttgcccattctagt

SEQ ID NO: 315933 - DNA, 25 bp, Artificial
  Probe
agtcttccagattcctactaggata

SEQ ID NO: 315934 - DNA, 25 bp, Artificial
  Probe
ttgactatgttcatgtcttaatgtc

SEQ ID NO: 315935 - DNA, 25 bp, Artificial
  Probe
ctgtgtagcataggagagagttctc

SEQ ID NO: 315936 - DNA, 25 bp, Artificial
  Probe
gttcgattcatttggccgtttactg

SEQ ID NO: 315937 - DNA, 25 bp, Artificial
  Probe
ccaggtctgtacagttcaaattact

SEQ ID NO: 315938 - DNA, 25 bp, Artificial
  Probe
ggcagacctatcatagcaatagcca

SEQ ID NO: 315939 - DNA, 25 bp, Artificial
  Probe
ggtctgtacagttcaaattactctc

SEQ ID NO: 315940 - DNA, 25 bp, Artificial
  Probe
ttctctcactttctaggctatctgg

SEQ ID NO: 315941 - DNA, 25 bp, Artificial
  Probe
ggccgtttactgctgagattgttta

SEQ ID NO: 315942 - DNA, 25 bp, Artificial
  Probe
gactatgttcatgtcttaatgtctt

SEQ ID NO: 315943 - DNA, 25 bp, Artificial
  Probe
gtttctgcacatattaaagatgttc

SEQ ID NO: 315944 - DNA, 25 bp, Artificial
  Probe
atggaattttacttgcccattctag

SEQ ID NO: 315945 - DNA, 25 bp, Artificial
  Probe
ctatcatagcaatagccagtacctg

SEQ ID NO: 315946 - DNA, 25 bp, Artificial
  Probe
aatttttgggccaggtctgtacagt

SEQ ID NO: 315947 - DNA, 25 bp, Artificial
  Probe
taagcacaggcagacctatcatagc

SEQ ID NO: 315948 - DNA, 25 bp, Artificial
  Probe
atgagcatgccaaggctctgtggga

SEQ ID NO: 315949 - DNA, 25 bp, Artificial
  Probe
atgagggagttcgtgcctgctacga

SEQ ID NO: 315950 - DNA, 25 bp, Artificial
  Probe
tcgactgtgcccagtacttcctgga

SEQ ID NO: 315951 - DNA, 25 bp, Artificial
  Probe
tcctggacaagattgatgtgatcaa

SEQ ID NO: 315952 - DNA, 25 bp, Artificial
  Probe
aacttccacatgttcgatgtgggcg

SEQ ID NO: 315953 - DNA, 25 bp, Artificial
  Probe
agtcaacttccacatgttcgatgtg

SEQ ID NO: 315954 - DNA, 25 bp, Artificial
  Probe
gatggctgcgtaccatctctgtgat

SEQ ID NO: 315955 - DNA, 25 bp, Artificial
  Probe
aggccgactacgtgccaagtgacca

SEQ ID NO: 315956 - DNA, 25 bp, Artificial
  Probe
tcctcaacaagcaagatctgcttgc

SEQ ID NO: 315957 - DNA, 25 bp, Artificial
  Probe
ctgaggatgcgactcccgagcccgg

SEQ ID NO: 315958 - DNA, 25 bp, Artificial
  Probe
gactacgtgccaagtgaccaggacc

SEQ ID NO: 315959 - DNA, 25 bp, Artificial
  Probe
gaaggtcctcgctgggaaatcgaag

SEQ ID NO: 315960 - DNA, 25 bp, Artificial
  Probe
catcatcttcgtggtggccagcagc

SEQ ID NO: 315961 - DNA, 25 bp, Artificial
  Probe
cactcctgaggatgcgactcccgag

SEQ ID NO: 315962 - DNA, 25 bp, Artificial
  Probe
cgctccaacgagtaccagctgatcg

SEQ ID NO: 315963 - DNA, 25 bp, Artificial
  Probe
cgcaagtggatccagtgcttcaatg

SEQ ID NO: 315964 - DNA, 25 bp, Artificial
  Probe
gaccaagttccaggtggacaaagtc

SEQ ID NO: 315965 - DNA, 25 bp, Artificial
  Probe
actttccagagttcgctcgctacac

SEQ ID NO: 315966 - DNA, 25 bp, Artificial
  Probe
tgatgtgatcaagcaggccgactac

SEQ ID NO: 315967 - DNA, 25 bp, Artificial
  Probe
cctcgctgggaaatcgaagattgag

SEQ ID NO: 315968 - DNA, 25 bp, Artificial
  Probe
acaagcaagatctgcttgctgagaa

SEQ ID NO: 315969 - DNA, 25 bp, Artificial
  Probe
tacgtgccaagtgaccaggacctgc

SEQ ID NO: 315970 - DNA, 25 bp, Artificial
  Probe
agattgaggactactttccagagtt

SEQ ID NO: 315971 - DNA, 25 bp, Artificial
  Probe
ggagttcgtgcctgctacgagcgct

SEQ ID NO: 315972 - DNA, 25 bp, Artificial
  Probe
tcatccgggaggacaaccagaccaa

SEQ ID NO: 315973 - DNA, 25 bp, Artificial
  Probe
tctggaatctttgagaccaagttcc

SEQ ID NO: 315974 - DNA, 25 bp, Artificial
  Probe
acaacctgaaggaggccattgaaac

SEQ ID NO: 315975 - DNA, 25 bp, Artificial
  Probe
atgtgatcaagcaggccgactacgt

SEQ ID NO: 315976 - DNA, 25 bp, Artificial
  Probe
ccaagttccaggtggacaaagtcaa

SEQ ID NO: 315977 - DNA, 25 bp, Artificial
  Probe
cctcaacaagcaagatctgcttgct

SEQ ID NO: 315978 - DNA, 25 bp, Artificial
  Probe
acctgaattctatgagcatgccaag

SEQ ID NO: 315979 - DNA, 25 bp, Artificial
  Probe
aatctttgagaccaagttccaggtg

SEQ ID NO: 315980 - DNA, 25 bp, Artificial
  Probe
tcgctacaccactcctgaggatgcg

SEQ ID NO: 315981 - DNA, 25 bp, Artificial
  Probe
cagatggctgcgtaccatctctgtg

SEQ ID NO: 315982 - DNA, 25 bp, Artificial
  Probe
tcaagcaggccgactacgtgccaag

SEQ ID NO: 315983 - DNA, 25 bp, Artificial
  Probe
tacgagcgctccaacgagtaccagc

SEQ ID NO: 315984 - DNA, 25 bp, Artificial
  Probe
catccgggaggacaaccagaccaac

SEQ ID NO: 315985 - DNA, 25 bp, Artificial
  Probe
gatgaacgccgcaagtggatccagt

SEQ ID NO: 315986 - DNA, 25 bp, Artificial
  Probe
ctacgagcgctccaacgagtaccag

SEQ ID NO: 315987 - DNA, 25 bp, Artificial
  Probe
gcggccagcgcgatgaacgccgcaa

SEQ ID NO: 315988 - DNA, 25 bp, Artificial
  Probe
gccaccaaagtgcaggacatcaaaa

SEQ ID NO: 315989 - DNA, 25 bp, Artificial
  Probe
gccagcgcgatgaacgccgcaagtg

SEQ ID NO: 315990 - DNA, 25 bp, Artificial
  Probe
ttcgtggtggccagcagcagctaca

SEQ ID NO: 315991 - DNA, 25 bp, Artificial
  Probe
tggaacaacagatggctgcgtacca

SEQ ID NO: 315992 - DNA, 25 bp, Artificial
  Probe
gtgcctgctacgagcgctccaacga

SEQ ID NO: 315993 - DNA, 25 bp, Artificial
  Probe
gctgccgcgtcctgacctctggaat

SEQ ID NO: 315994 - DNA, 25 bp, Artificial
  Probe
agacgttcttgtaaggacgaagcgg

SEQ ID NO: 315995 - DNA, 25 bp, Artificial
  Probe
ggtttgtggagttcttccacgtaca

SEQ ID NO: 315996 - DNA, 25 bp, Artificial
  Probe
tcttccacgtacaggacctagaagg

SEQ ID NO: 315997 - DNA, 25 bp, Artificial
  Probe
gttcttgtaaggacgaagcgggact

SEQ ID NO: 315998 - DNA, 25 bp, Artificial
  Probe
tgaaggtgctcttgaagctgcccgg

SEQ ID NO: 315999 - DNA, 25 bp, Artificial
  Probe
ggactggcttgtgaaacaaagaggc

SEQ ID NO: 316000 - DNA, 25 bp, Artificial
  Probe
tgcccgggattttaacagggcagaa

SEQ ID NO: 316001 - DNA, 25 bp, Artificial
  Probe
cttgtgagtgcaataggtgactcta

SEQ ID NO: 316002 - DNA, 25 bp, Artificial
  Probe
acgaagcgggactggcttgtgaaac

SEQ ID NO: 316003 - DNA, 25 bp, Artificial
  Probe
ttggtgcctttgtggccaaacactt

SEQ ID NO: 316004 - DNA, 25 bp, Artificial
  Probe
agccaccaactacatgcttccgtga

SEQ ID NO: 316005 - DNA, 25 bp, Artificial
  Probe
gcatcagaaatgtgctgctggcttt

SEQ ID NO: 316006 - DNA, 25 bp, Artificial
  Probe
ataggtgactctaaaacctccagcc

SEQ ID NO: 316007 - DNA, 25 bp, Artificial
  Probe
agcgggactggcttgtgaaacaaag

SEQ ID NO: 316008 - DNA, 25 bp, Artificial
  Probe
tcttttggtgcctttgtggccaaac

SEQ ID NO: 316009 - DNA, 25 bp, Artificial
  Probe
agaaggcggcatcagaaatgtgctg

SEQ ID NO: 316010 - DNA, 25 bp, Artificial
  Probe
tgcagcgcaaccacgagacggcctt

SEQ ID NO: 316011 - DNA, 25 bp, Artificial
  Probe
cttccgtgagaacaaatgtgtttat

SEQ ID NO: 316012 - DNA, 25 bp, Artificial
  Probe
aaggcggcatcagaaatgtgctgct

SEQ ID NO: 316013 - DNA, 25 bp, Artificial
  Probe
agacggccttccagggcatgcttcg

SEQ ID NO: 316014 - DNA, 25 bp, Artificial
  Probe
tttatgaaggtgctcttgaagctgc

SEQ ID NO: 316015 - DNA, 25 bp, Artificial
  Probe
tgctcttgaagctgcccgggatttt

SEQ ID NO: 316016 - DNA, 25 bp, Artificial
  Probe
gaaagtatcacagacgttcttgtaa

SEQ ID NO: 316017 - DNA, 25 bp, Artificial
  Probe
ctagaaggcggcatcagaaatgtgc

SEQ ID NO: 316018 - DNA, 25 bp, Artificial
  Probe
ggtctggcatatctaataaggtagc

SEQ ID NO: 316019 - DNA, 25 bp, Artificial
  Probe
ggctggtctggcatatctaataagg

SEQ ID NO: 316020 - DNA, 25 bp, Artificial
  Probe
agcttgtgagtgcaataggtgactc

SEQ ID NO: 316021 - DNA, 25 bp, Artificial
  Probe
tgcttcggaaactggacattaaaaa

SEQ ID NO: 316022 - DNA, 25 bp, Artificial
  Probe
caactacatgcttccgtgagaacaa

SEQ ID NO: 316023 - DNA, 25 bp, Artificial
  Probe
atcagaaatgtgctgctggcttttg

SEQ ID NO: 316024 - DNA, 25 bp, Artificial
  Probe
aggtgactctaaaacctccagccac

SEQ ID NO: 316025 - DNA, 25 bp, Artificial
  Probe
agctgcccgggattttaacagggca

SEQ ID NO: 316026 - DNA, 25 bp, Artificial
  Probe
ggcatgcttcggaaactggacatta

SEQ ID NO: 316027 - DNA, 25 bp, Artificial
  Probe
acaggacctagaaggcggcatcaga

SEQ ID NO: 316028 - DNA, 25 bp, Artificial
  Probe
tacatgcttccgtgagaacaaatgt

SEQ ID NO: 316029 - DNA, 25 bp, Artificial
  Probe
gcctttgtggccaaacacttaaaga

SEQ ID NO: 316030 - DNA, 25 bp, Artificial
  Probe
ggccaaacacttaaagagcataaac

SEQ ID NO: 316031 - DNA, 25 bp, Artificial
  Probe
aaggtgctcttgaagctgcccggga

SEQ ID NO: 316032 - DNA, 25 bp, Artificial
  Probe
ttcttgtaaggacgaagcgggactg

SEQ ID NO: 316033 - DNA, 25 bp, Artificial
  Probe
cacgagacggccttccagggcatgc

SEQ ID NO: 316034 - DNA, 25 bp, Artificial
  Probe
gtctggcatatctaataaggtagct

SEQ ID NO: 316035 - DNA, 25 bp, Artificial
  Probe
gccttccagggcatgcttcggaaac

SEQ ID NO: 316036 - DNA, 25 bp, Artificial
  Probe
ccagggcatgcttcggaaactggac

SEQ ID NO: 316037 - DNA, 25 bp, Artificial
  Probe
acctttagcagaaagtatcacagac

SEQ ID NO: 316038 - DNA, 25 bp, Artificial
  Probe
cgggactggcttgtgaaacaaagag

SEQ ID NO: 316039 - DNA, 25 bp, Artificial
  Probe
gtacaggacctagaaggcggcatca

SEQ ID NO: 316040 - DNA, 25 bp, Artificial
  Probe
ggggttcatgaggtcctcttcactt

SEQ ID NO: 316041 - DNA, 25 bp, Artificial
  Probe
tcatggggccgcttcttattagccc

SEQ ID NO: 316042 - DNA, 25 bp, Artificial
  Probe
gttcatgaggtcctcttcactttct

SEQ ID NO: 316043 - DNA, 25 bp, Artificial
  Probe
ggcgaaatcaacgttgctcctcatt

SEQ ID NO: 316044 - DNA, 25 bp, Artificial
  Probe
agacgttggggtacagcctcacagg

SEQ ID NO: 316045 - DNA, 25 bp, Artificial
  Probe
tcctggggaagtgttccaagaagct

SEQ ID NO: 316046 - DNA, 25 bp, Artificial
  Probe
cgccactggggctgcagaacctgtg

SEQ ID NO: 316047 - DNA, 25 bp, Artificial
  Probe
tgcggttctccacatgcagctcaca

SEQ ID NO: 316048 - DNA, 25 bp, Artificial
  Probe
cctctgagaccctgggagacgttgg

SEQ ID NO: 316049 - DNA, 25 bp, Artificial
  Probe
gttcctggggaagtgttccaagaag

SEQ ID NO: 316050 - DNA, 25 bp, Artificial
  Probe
ggattttcaaaacgtattcgactct

SEQ ID NO: 316051 - DNA, 25 bp, Artificial
  Probe
gagatggctctgagacactccagaa

SEQ ID NO: 316052 - DNA, 25 bp, Artificial
  Probe
ggggccgcttcttattagcccgcca

SEQ ID NO: 316053 - DNA, 25 bp, Artificial
  Probe
gagacttcaccctggccaatacgat

SEQ ID NO: 316054 - DNA, 25 bp, Artificial
  Probe
aacgttgctcctcattcctttgttg

SEQ ID NO: 316055 - DNA, 25 bp, Artificial
  Probe
gaacctgtgtcctggggaagaattt

SEQ ID NO: 316056 - DNA, 25 bp, Artificial
  Probe
tgtgtcctggggaagaatttccggt

SEQ ID NO: 316057 - DNA, 25 bp, Artificial
  Probe
ggccttgcagtatggctttgccaat

SEQ ID NO: 316058 - DNA, 25 bp, Artificial
  Probe
acgtattcgactcttcatccagctg

SEQ ID NO: 316059 - DNA, 25 bp, Artificial
  Probe
gaagcagcctgtctgagagcagtga

SEQ ID NO: 316060 - DNA, 25 bp, Artificial
  Probe
atgcagctcacacctggcctctgag

SEQ ID NO: 316061 - DNA, 25 bp, Artificial
  Probe
ctggggctgcagaacctgtgtcctg

SEQ ID NO: 316062 - DNA, 25 bp, Artificial
  Probe
aagtgttccaagaagctgtcggagg

SEQ ID NO: 316063 - DNA, 25 bp, Artificial
  Probe
ggaagtgttccaagaagctgtcgga

SEQ ID NO: 316064 - DNA, 25 bp, Artificial
  Probe
gacactccagaagctgcggttctcc

SEQ ID NO: 316065 - DNA, 25 bp, Artificial
  Probe
acggatttctggtggccttgcagta

SEQ ID NO: 316066 - DNA, 25 bp, Artificial
  Probe
tacaaatacagattggcgaaatcaa

SEQ ID NO: 316067 - DNA, 25 bp, Artificial
  Probe
ttggccccggggaagcagcctgtct

SEQ ID NO: 316068 - DNA, 25 bp, Artificial
  Probe
agctgcgaaagtcatggggccgctt

SEQ ID NO: 316069 - DNA, 25 bp, Artificial
  Probe
ccccggggaagcagcctgtctgaga

SEQ ID NO: 316070 - DNA, 25 bp, Artificial
  Probe
tttctggtggccttgcagtatggct

SEQ ID NO: 316071 - DNA, 25 bp, Artificial
  Probe
aagcagcctgtctgagagcagtgag

SEQ ID NO: 316072 - DNA, 25 bp, Artificial
  Probe
ttcttccccgacgaccaagttcaag

SEQ ID NO: 316073 - DNA, 25 bp, Artificial
  Probe
tgagggagacttcaccctggccaat

SEQ ID NO: 316074 - DNA, 25 bp, Artificial
  Probe
gacgaccaagttcaaggattttcaa

SEQ ID NO: 316075 - DNA, 25 bp, Artificial
  Probe
gctgcagaacctgtgtcctggggaa

SEQ ID NO: 316076 - DNA, 25 bp, Artificial
  Probe
ttcaccctggccaatacgatggagg

SEQ ID NO: 316077 - DNA, 25 bp, Artificial
  Probe
ctctgtccacggatttctggtggcc

SEQ ID NO: 316078 - DNA, 25 bp, Artificial
  Probe
tgcagctcacacctggcctctgaga

SEQ ID NO: 316079 - DNA, 25 bp, Artificial
  Probe
agaagctgcggttctccacatgcag

SEQ ID NO: 316080 - DNA, 25 bp, Artificial
  Probe
ctttgccaatggagaggtgaaggca

SEQ ID NO: 316081 - DNA, 25 bp, Artificial
  Probe
tctgagagcagtgagggagacttca

SEQ ID NO: 316082 - DNA, 25 bp, Artificial
  Probe
acacctggcctctgagaccctggga

SEQ ID NO: 316083 - DNA, 25 bp, Artificial
  Probe
ctgcgaaagtcatggggccgcttct

SEQ ID NO: 316084 - DNA, 25 bp, Artificial
  Probe
gcgaaatcaacgttgctcctcattc

SEQ ID NO: 316085 - DNA, 25 bp, Artificial
  Probe
gttgctcctcattcctttgttgggg

SEQ ID NO: 316086 - DNA, 25 bp, Artificial
  Probe
gccctcaaaatgagcccgtgggcca

SEQ ID NO: 316087 - DNA, 25 bp, Artificial
  Probe
acgactgcacggtgggatacattgt

SEQ ID NO: 316088 - DNA, 25 bp, Artificial
  Probe
ggggccttgccctcaaaatgagccc

SEQ ID NO: 316089 - DNA, 25 bp, Artificial
  Probe
tgggtgcccgtctgcttcatagccc

SEQ ID NO: 316090 - DNA, 25 bp, Artificial
  Probe
gcagaagctgccatctggtgctgtt

SEQ ID NO: 316091 - DNA, 25 bp, Artificial
  Probe
ctcaaacacagtgaaattctggttt

SEQ ID NO: 316092 - DNA, 25 bp, Artificial
  Probe
gagcacagcagaacgggttcgactg

SEQ ID NO: 316093 - DNA, 25 bp, Artificial
  Probe
tcccacctggagaacttgcagaagc

SEQ ID NO: 316094 - DNA, 25 bp, Artificial
  Probe
ctacctggggcgacctagtctggac

SEQ ID NO: 316095 - DNA, 25 bp, Artificial
  Probe
acgtgaaccccaaaagcctgctgca

SEQ ID NO: 316096 - DNA, 25 bp, Artificial
  Probe
ggggtcctgagaacccgcacaacgt

SEQ ID NO: 316097 - DNA, 25 bp, Artificial
  Probe
agtctggacggaaatggttctgcca

SEQ ID NO: 316098 - DNA, 25 bp, Artificial
  Probe
ttctgcctgagcaggggccttgccc

SEQ ID NO: 316099 - DNA, 25 bp, Artificial
  Probe
agaacttgcagaagctgccatctgg

SEQ ID NO: 316100 - DNA, 25 bp, Artificial
  Probe
agggctcctgggtgcccgtctgctt

SEQ ID NO: 316101 - DNA, 25 bp, Artificial
  Probe
agcagaacgggttcgactgcctgac

SEQ ID NO: 316102 - DNA, 25 bp, Artificial
  Probe
gcacaacgtggtgaatgtagctgga

SEQ ID NO: 316103 - DNA, 25 bp, Artificial
  Probe
acggaaatggttctgccacgtggat

SEQ ID NO: 316104 - DNA, 25 bp, Artificial
  Probe
agctatgggggtcctgagaacccgc

SEQ ID NO: 316105 - DNA, 25 bp, Artificial
  Probe
tacgtgaaccccaaaagcctgctgc

SEQ ID NO: 316106 - DNA, 25 bp, Artificial
  Probe
tagctggaagtttcagcattcgaca

SEQ ID NO: 316107 - DNA, 25 bp, Artificial
  Probe
actgcctgacgactgcacggtggga

SEQ ID NO: 316108 - DNA, 25 bp, Artificial
  Probe
caggttaccctgagctatgggggtc

SEQ ID NO: 316109 - DNA, 25 bp, Artificial
  Probe
ctgagaacccgcacaacgtggtgaa

SEQ ID NO: 316110 - DNA, 25 bp, Artificial
  Probe
cccatcgaagccacagagagggtcc

SEQ ID NO: 316111 - DNA, 25 bp, Artificial
  Probe
atcgaagccacagagagggtccagg

SEQ ID NO: 316112 - DNA, 25 bp, Artificial
  Probe
ccagacacccactggtgtcctatga

SEQ ID NO: 316113 - DNA, 25 bp, Artificial
  Probe
tggggcgacctagtctggaccaccc

SEQ ID NO: 316114 - DNA, 25 bp, Artificial
  Probe
acctggagaacttgcagaagctgcc

SEQ ID NO: 316115 - DNA, 25 bp, Artificial
  Probe
aatggttctgccacgtggatgatga

SEQ ID NO: 316116 - DNA, 25 bp, Artificial
  Probe
atgtagctggaagtttcagcattcg

SEQ ID NO: 316117 - DNA, 25 bp, Artificial
  Probe
ctgcacggtgggatacattgtggaa

SEQ ID NO: 316118 - DNA, 25 bp, Artificial
  Probe
aggacatctacctggggcgacctag

SEQ ID NO: 316119 - DNA, 25 bp, Artificial
  Probe
ctgcagcaggttaccctgagctatg

SEQ ID NO: 316120 - DNA, 25 bp, Artificial
  Probe
agcccgtgggccagcctaggcagtt

SEQ ID NO: 316121 - DNA, 25 bp, Artificial
  Probe
taccctgagctatgggggtcctgag

SEQ ID NO: 316122 - DNA, 25 bp, Artificial
  Probe
atacattgtggaagggctcctgggt

SEQ ID NO: 316123 - DNA, 25 bp, Artificial
  Probe
catagagtctggacggaaatggttc

SEQ ID NO: 316124 - DNA, 25 bp, Artificial
  Probe
cggaaatggttctgccacgtggatg

SEQ ID NO: 316125 - DNA, 25 bp, Artificial
  Probe
tcagtcagtgcactgccttctctac

SEQ ID NO: 316126 - DNA, 25 bp, Artificial
  Probe
tcttccaaccaggacatctacctgg

SEQ ID NO: 316127 - DNA, 25 bp, Artificial
  Probe
gccagcctaggcagtttcatgagca

SEQ ID NO: 316128 - DNA, 25 bp, Artificial
  Probe
cctgggtgcccgtctgcttcatagc

SEQ ID NO: 316129 - DNA, 25 bp, Artificial
  Probe
gcggtggcacctcaaacacagtgaa

SEQ ID NO: 316130 - DNA, 25 bp, Artificial
  Probe
gttctgcctgagcaggggccttgcc

SEQ ID NO: 316131 - DNA, 25 bp, Artificial
  Probe
cacagtgaaattctggtttgctact

SEQ ID NO: 316132 - DNA, 25 bp, Artificial
  Probe
tttctcccatggtgccccagctagg

SEQ ID NO: 316133 - DNA, 25 bp, Artificial
  Probe
ctggactacaaagatcagagtgcct

SEQ ID NO: 316134 - DNA, 25 bp, Artificial
  Probe
ctacagccccgtggacagcctggaa

SEQ ID NO: 316135 - DNA, 25 bp, Artificial
  Probe
ccatggtgccccagctagggggtcc

SEQ ID NO: 316136 - DNA, 25 bp, Artificial
  Probe
agccccgtggacagcctggaattca

SEQ ID NO: 316137 - DNA, 25 bp, Artificial
  Probe
agagctatagcacctacagccccgt

SEQ ID NO: 316138 - DNA, 25 bp, Artificial
  Probe
aattcagccccaggtgtaggccacc

SEQ ID NO: 316139 - DNA, 25 bp, Artificial
  Probe
tctgtggggccatccttggcccagt

SEQ ID NO: 316140 - DNA, 25 bp, Artificial
  Probe
ctgccaaaggctgtgaaaaattcag

SEQ ID NO: 316141 - DNA, 25 bp, Artificial
  Probe
gatccatacctttctcccatggtgc

SEQ ID NO: 316142 - DNA, 25 bp, Artificial
  Probe
acagcctggaattcaaggaccctac

SEQ ID NO: 316143 - DNA, 25 bp, Artificial
  Probe
tgaccgatgtgtatatctgatgctt

SEQ ID NO: 316144 - DNA, 25 bp, Artificial
  Probe
cctggaagtttcagatcttgtagaa

SEQ ID NO: 316145 - DNA, 25 bp, Artificial
  Probe
tgggttggatccatacctttctccc

SEQ ID NO: 316146 - DNA, 25 bp, Artificial
  Probe
aaattcagccccaggtgtaggccac

SEQ ID NO: 316147 - DNA, 25 bp, Artificial
  Probe
tttcagatcttgtagaagaggcttc

SEQ ID NO: 316148 - DNA, 25 bp, Artificial
  Probe
cacctcctgcttagattccaggaga

SEQ ID NO: 316149 - DNA, 25 bp, Artificial
  Probe
ggcttcatattctcccttccagcgg

SEQ ID NO: 316150 - DNA, 25 bp, Artificial
  Probe
tatagcacctacagccccgtggaca

SEQ ID NO: 316151 - DNA, 25 bp, Artificial
  Probe
gcatcagcaagtagcaatcctgcca

SEQ ID NO: 316152 - DNA, 25 bp, Artificial
  Probe
taccccaagcaatgaaagggacttc

SEQ ID NO: 316153 - DNA, 25 bp, Artificial
  Probe
ttcagtgggttggatccataccttt

SEQ ID NO: 316154 - DNA, 25 bp, Artificial
  Probe
tgtgaaaaattcagccccaggtgta

SEQ ID NO: 316155 - DNA, 25 bp, Artificial
  Probe
ccagctagggggtccggctctcagc

SEQ ID NO: 316156 - DNA, 25 bp, Artificial
  Probe
cccagtcttcagtaaaggtgctgag

SEQ ID NO: 316157 - DNA, 25 bp, Artificial
  Probe
ggcacctggaaattcacctacaatc

SEQ ID NO: 316158 - DNA, 25 bp, Artificial
  Probe
gagtgcctggaagtttcagatcttg

SEQ ID NO: 316159 - DNA, 25 bp, Artificial
  Probe
caaggaccctacaggcacctggaaa

SEQ ID NO: 316160 - DNA, 25 bp, Artificial
  Probe
ctaccccaagcaatgaaagggactt

SEQ ID NO: 316161 - DNA, 25 bp, Artificial
  Probe
ccttgtcaggccagagctatagcac

SEQ ID NO: 316162 - DNA, 25 bp, Artificial
  Probe
atagcatgaccgatgtgtatatctg

SEQ ID NO: 316163 - DNA, 25 bp, Artificial
  Probe
ctgtgaaaaattcagccccaggtgt

SEQ ID NO: 316164 - DNA, 25 bp, Artificial
  Probe
agcaagtagcaatcctgccaaaggc

SEQ ID NO: 316165 - DNA, 25 bp, Artificial
  Probe
ccagtagatagcatgaccgatgtgt

SEQ ID NO: 316166 - DNA, 25 bp, Artificial
  Probe
agaggcttcatattctcccttccag

SEQ ID NO: 316167 - DNA, 25 bp, Artificial
  Probe
tacaaagatcagagtgcctggaagt

SEQ ID NO: 316168 - DNA, 25 bp, Artificial
  Probe
ccaagacagtccagcagcaaccagt

SEQ ID NO: 316169 - DNA, 25 bp, Artificial
  Probe
cctgccaaaggctgtgaaaaattca

SEQ ID NO: 316170 - DNA, 25 bp, Artificial
  Probe
tacaatcccatggaccctctggact

SEQ ID NO: 316171 - DNA, 25 bp, Artificial
  Probe
ggaaattcacctacaatcccatgga

SEQ ID NO: 316172 - DNA, 25 bp, Artificial
  Probe
caatcctgccaaaggctgtgaaaaa

SEQ ID NO: 316173 - DNA, 25 bp, Artificial
  Probe
tggaattcaaggaccctacaggcac

SEQ ID NO: 316174 - DNA, 25 bp, Artificial
  Probe
tggaaattcacctacaatcccatgg

SEQ ID NO: 316175 - DNA, 25 bp, Artificial
  Probe
ttcagatcttgtagaagaggcttca

SEQ ID NO: 316176 - DNA, 25 bp, Artificial
  Probe
ctctgtggggccatccttggcccag

SEQ ID NO: 316177 - DNA, 25 bp, Artificial
  Probe
cacctccttgtcaggccagagctat

SEQ ID NO: 316178 - DNA, 25 bp, Artificial
  Probe
tagaggctgtatttcttgggggggg

SEQ ID NO: 316179 - DNA, 25 bp, Artificial
  Probe
aacttgtacgatgtcgaaattagga

SEQ ID NO: 316180 - DNA, 25 bp, Artificial
  Probe
tttggccatcattttaatgttctca

SEQ ID NO: 316181 - DNA, 25 bp, Artificial
  Probe
cagctcagctcataatattttttct

SEQ ID NO: 316182 - DNA, 25 bp, Artificial
  Probe
agctcataatattttttctatgcaa

SEQ ID NO: 316183 - DNA, 25 bp, Artificial
  Probe
tttaggcagctcagctcataatatt

SEQ ID NO: 316184 - DNA, 25 bp, Artificial
  Probe
tatactaatttggccatcattttaa

SEQ ID NO: 316185 - DNA, 25 bp, Artificial
  Probe
ttgtacgatgtcgaaattaggattt

SEQ ID NO: 316186 - DNA, 25 bp, Artificial
  Probe
ataatttaggcagctcagctcataa

SEQ ID NO: 316187 - DNA, 25 bp, Artificial
  Probe
aaataatttaggcagctcagctcat

SEQ ID NO: 316188 - DNA, 25 bp, Artificial
  Probe
ttaatgttctcaaaattaggaaata

SEQ ID NO: 316189 - DNA, 25 bp, Artificial
  Probe
tttaatgttctcaaaattaggaaat

SEQ ID NO: 316190 - DNA, 25 bp, Artificial
  Probe
ccatcattttaatgttctcaaaatt

SEQ ID NO: 316191 - DNA, 25 bp, Artificial
  Probe
gaggctgtatttcttggggggggag

SEQ ID NO: 316192 - DNA, 25 bp, Artificial
  Probe
tactaatttggccatcattttaatg

SEQ ID NO: 316193 - DNA, 25 bp, Artificial
  Probe
agatatactaatttggccatcattt

SEQ ID NO: 316194 - DNA, 25 bp, Artificial
  Probe
atttaggcagctcagctcataatat

SEQ ID NO: 316195 - DNA, 25 bp, Artificial
  Probe
gatatactaatttggccatcatttt

SEQ ID NO: 316196 - DNA, 25 bp, Artificial
  Probe
tcagctcataatattttttctatgc

SEQ ID NO: 316197 - DNA, 25 bp, Artificial
  Probe
tcataatattttttctatgcaatat

SEQ ID NO: 316198 - DNA, 25 bp, Artificial
  Probe
gcagctcagctcataatattttttc

SEQ ID NO: 316199 - DNA, 25 bp, Artificial
  Probe
atttggccatcattttaatgttctc

SEQ ID NO: 316200 - DNA, 25 bp, Artificial
  Probe
tcattttaatgttctcaaaattagg

SEQ ID NO: 316201 - DNA, 25 bp, Artificial
  Probe
aatttggccatcattttaatgttct

SEQ ID NO: 316202 - DNA, 25 bp, Artificial
  Probe
taatttaggcagctcagctcataat

SEQ ID NO: 316203 - DNA, 25 bp, Artificial
  Probe
taatttggccatcattttaatgttc

SEQ ID NO: 316204 - DNA, 25 bp, Artificial
  Probe
cattttaatgttctcaaaattagga

SEQ ID NO: 316205 - DNA, 25 bp, Artificial
  Probe
aatgttctcaaaattaggaaataat

SEQ ID NO: 316206 - DNA, 25 bp, Artificial
  Probe
actaatttggccatcattttaatgt

SEQ ID NO: 316207 - DNA, 25 bp, Artificial
  Probe
aatttaggcagctcagctcataata

SEQ ID NO: 316208 - DNA, 25 bp, Artificial
  Probe
cttgtacgatgtcgaaattaggatt

SEQ ID NO: 316209 - DNA, 25 bp, Artificial
  Probe
ctcagctcataatattttttctatg

SEQ ID NO: 316210 - DNA, 25 bp, Artificial
  Probe
aggcagctcagctcataatattttt

SEQ ID NO: 316211 - DNA, 25 bp, Artificial
  Probe
atcattttaatgttctcaaaattag

SEQ ID NO: 316212 - DNA, 25 bp, Artificial
  Probe
ggcagctcagctcataatatttttt

SEQ ID NO: 316213 - DNA, 25 bp, Artificial
  Probe
tatttttaaagggtagaggctgtat

SEQ ID NO: 316214 - DNA, 25 bp, Artificial
  Probe
gccatcattttaatgttctcaaaat

SEQ ID NO: 316215 - DNA, 25 bp, Artificial
  Probe
tgtacgatgtcgaaattaggattta

SEQ ID NO: 316216 - DNA, 25 bp, Artificial
  Probe
gctcagctcataatattttttctat

SEQ ID NO: 316217 - DNA, 25 bp, Artificial
  Probe
ctcataatattttttctatgcaata

SEQ ID NO: 316218 - DNA, 25 bp, Artificial
  Probe
gtagaggctgtatttcttggggggg

SEQ ID NO: 316219 - DNA, 25 bp, Artificial
  Probe
aataatttaggcagctcagctcata

SEQ ID NO: 316220 - DNA, 25 bp, Artificial
  Probe
ggtagaggctgtatttcttgggggg

SEQ ID NO: 316221 - DNA, 25 bp, Artificial
  Probe
ttaggcagctcagctcataatattt

SEQ ID NO: 316222 - DNA, 25 bp, Artificial
  Probe
tggccatcattttaatgttctcaaa

SEQ ID NO: 316223 - DNA, 25 bp, Artificial
  Probe
atactaatttggccatcattttaat

SEQ ID NO: 316224 - DNA, 25 bp, Artificial
  Probe
cagggccagggtgagccagtgcaca

SEQ ID NO: 316225 - DNA, 25 bp, Artificial
  Probe
ggtgagccagtgcacaggctccgga

SEQ ID NO: 316226 - DNA, 25 bp, Artificial
  Probe
agccagtgcacaggctccggagccc

SEQ ID NO: 316227 - DNA, 25 bp, Artificial
  Probe
agggtgagccagtgcacaggctccg

SEQ ID NO: 316228 - DNA, 25 bp, Artificial
  Probe
gccagtgcacaggctccggagcccc

SEQ ID NO: 316229 - DNA, 25 bp, Artificial
  Probe
ggccagggtgagccagtgcacaggc

SEQ ID NO: 316230 - DNA, 25 bp, Artificial
  Probe
gggtgagccagtgcacaggctccgg

SEQ ID NO: 316231 - DNA, 25 bp, Artificial
  Probe
agatgtagggtcacagggccagggt

SEQ ID NO: 316232 - DNA, 25 bp, Artificial
  Probe
tagggtcacagggccagggtgagcc

SEQ ID NO: 316233 - DNA, 25 bp, Artificial
  Probe
agggtcacagggccagggtgagcca

SEQ ID NO: 316234 - DNA, 25 bp, Artificial
  Probe
ggtcacagggccagggtgagccagt

SEQ ID NO: 316235 - DNA, 25 bp, Artificial
  Probe
ccagggtgagccagtgcacaggctc

SEQ ID NO: 316236 - DNA, 25 bp, Artificial
  Probe
tcacagggccagggtgagccagtgc

SEQ ID NO: 316237 - DNA, 25 bp, Artificial
  Probe
gatgtagggtcacagggccagggtg

SEQ ID NO: 316238 - DNA, 25 bp, Artificial
  Probe
ccagtgcacaggctccggagcccct

SEQ ID NO: 316239 - DNA, 25 bp, Artificial
  Probe
gtgagccagtgcacaggctccggag

SEQ ID NO: 316240 - DNA, 25 bp, Artificial
  Probe
gccagggtgagccagtgcacaggct

SEQ ID NO: 316241 - DNA, 25 bp, Artificial
  Probe
cagtgcacaggctccggagcccctg

SEQ ID NO: 316242 - DNA, 25 bp, Artificial
  Probe
gggtcacagggccagggtgagccag

SEQ ID NO: 316243 - DNA, 25 bp, Artificial
  Probe
tgagccagtgcacaggctccggagc

SEQ ID NO: 316244 - DNA, 25 bp, Artificial
  Probe
agggccagggtgagccagtgcacag

SEQ ID NO: 316245 - DNA, 25 bp, Artificial
  Probe
acagatgtagggtcacagggccagg

SEQ ID NO: 316246 - DNA, 25 bp, Artificial
  Probe
cagggtgagccagtgcacaggctcc

SEQ ID NO: 316247 - DNA, 25 bp, Artificial
  Probe
tgtagggtcacagggccagggtgag

SEQ ID NO: 316248 - DNA, 25 bp, Artificial
  Probe
cacagatgtagggtcacagggccag

SEQ ID NO: 316249 - DNA, 25 bp, Artificial
  Probe
agtgcacaggctccggagcccctgg

SEQ ID NO: 316250 - DNA, 25 bp, Artificial
  Probe
cagatgtagggtcacagggccaggg

SEQ ID NO: 316251 - DNA, 25 bp, Artificial
  Probe
atgtagggtcacagggccagggtga

SEQ ID NO: 316252 - DNA, 25 bp, Artificial
  Probe
gtcacagggccagggtgagccagtg

SEQ ID NO: 316253 - DNA, 25 bp, Artificial
  Probe
cacagggccagggtgagccagtgca

SEQ ID NO: 316254 - DNA, 25 bp, Artificial
  Probe
acacagatgtagggtcacagggcca

SEQ ID NO: 316255 - DNA, 25 bp, Artificial
  Probe
gggccagggtgagccagtgcacagg

SEQ ID NO: 316256 - DNA, 25 bp, Artificial
  Probe
acagggccagggtgagccagtgcac

SEQ ID NO: 316257 - DNA, 25 bp, Artificial
  Probe
gtagggtcacagggccagggtgagc

SEQ ID NO: 316258 - DNA, 25 bp, Artificial
  Probe
gagccagtgcacaggctccggagcc

SEQ ID NO: 316259 - DNA, 25 bp, Artificial
  Probe
acttgtcatggtcatctgctactca

SEQ ID NO: 316260 - DNA, 25 bp, Artificial
  Probe
agttccgaaggtatctctccatatt

SEQ ID NO: 316261 - DNA, 25 bp, Artificial
  Probe
accctgtttcgctgtaggaatgaga

SEQ ID NO: 316262 - DNA, 25 bp, Artificial
  Probe
catgcacttagaccaggccatgcag

SEQ ID NO: 316263 - DNA, 25 bp, Artificial
  Probe
gttccgaaggtatctctccatattt

SEQ ID NO: 316264 - DNA, 25 bp, Artificial
  Probe
tgacatgcacttagaccaggccatg

SEQ ID NO: 316265 - DNA, 25 bp, Artificial
  Probe
gcccctacttgtcatggtcatctgc

SEQ ID NO: 316266 - DNA, 25 bp, Artificial
  Probe
gctgcgttaatcctatcatttatgc

SEQ ID NO: 316267 - DNA, 25 bp, Artificial
  Probe
aagatgatcagcatacttgtggccc

SEQ ID NO: 316268 - DNA, 25 bp, Artificial
  Probe
cctgtttcgctgtaggaatgagaaa

SEQ ID NO: 316269 - DNA, 25 bp, Artificial
  Probe
tgtggttgacatgcacttagaccag

SEQ ID NO: 316270 - DNA, 25 bp, Artificial
  Probe
tcagcatacttgtggcccttatttt

SEQ ID NO: 316271 - DNA, 25 bp, Artificial
  Probe
caaacaatgcccagttttctatagg

SEQ ID NO: 316272 - DNA, 25 bp, Artificial
  Probe
gtaactgtgtggttgacatgcactt

SEQ ID NO: 316273 - DNA, 25 bp, Artificial
  Probe
gaccgagtgagctcaacatttaccc

SEQ ID NO: 316274 - DNA, 25 bp, Artificial
  Probe
gtggcccttattttccaacaatctg

SEQ ID NO: 316275 - DNA, 25 bp, Artificial
  Probe
ttttctatagggagacagcagaccg

SEQ ID NO: 316276 - DNA, 25 bp, Artificial
  Probe
agaagttccgaaggtatctctccat

SEQ ID NO: 316277 - DNA, 25 bp, Artificial
  Probe
tgaggctcatctttgccatcatgat

SEQ ID NO: 316278 - DNA, 25 bp, Artificial
  Probe
gaaggtatctctccatatttttcag

SEQ ID NO: 316279 - DNA, 25 bp, Artificial
  Probe
gagtaactgtgtggttgacatgcac

SEQ ID NO: 316280 - DNA, 25 bp, Artificial
  Probe
cagaccgagtgagctcaacatttac

SEQ ID NO: 316281 - DNA, 25 bp, Artificial
  Probe
ctgtgtggttgacatgcacttagac

SEQ ID NO: 316282 - DNA, 25 bp, Artificial
  Probe
tgatcagcatacttgtggcccttat

SEQ ID NO: 316283 - DNA, 25 bp, Artificial
  Probe
ggttgacatgcacttagaccaggcc

SEQ ID NO: 316284 - DNA, 25 bp, Artificial
  Probe
cccagttttctatagggagacagca

SEQ ID NO: 316285 - DNA, 25 bp, Artificial
  Probe
ccagttttctatagggagacagcag

SEQ ID NO: 316286 - DNA, 25 bp, Artificial
  Probe
ctacttgtcatggtcatctgctact

SEQ ID NO: 316287 - DNA, 25 bp, Artificial
  Probe
ttctatagggagacagcagaccgag

SEQ ID NO: 316288 - DNA, 25 bp, Artificial
  Probe
gacagcagaccgagtgagctcaaca

SEQ ID NO: 316289 - DNA, 25 bp, Artificial
  Probe
gggctgtgaggctcatctttgccat

SEQ ID NO: 316290 - DNA, 25 bp, Artificial
  Probe
cctacttgtcatggtcatctgctac

SEQ ID NO: 316291 - DNA, 25 bp, Artificial
  Probe
gaggctcatctttgccatcatgatt

SEQ ID NO: 316292 - DNA, 25 bp, Artificial
  Probe
tgtgtggttgacatgcacttagacc

SEQ ID NO: 316293 - DNA, 25 bp, Artificial
  Probe
atgcccagttttctatagggagaca

SEQ ID NO: 316294 - DNA, 25 bp, Artificial
  Probe
gtttgcctctctaccaggaatcata

SEQ ID NO: 316295 - DNA, 25 bp, Artificial
  Probe
acaatgcccagttttctatagggag

SEQ ID NO: 316296 - DNA, 25 bp, Artificial
  Probe
gaagttccgaaggtatctctccata

SEQ ID NO: 316297 - DNA, 25 bp, Artificial
  Probe
catagggctgtgaggctcatctttg

SEQ ID NO: 316298 - DNA, 25 bp, Artificial
  Probe
catgattgtctactttctcttctgg

SEQ ID NO: 316299 - DNA, 25 bp, Artificial
  Probe
gcatagggctgtgaggctcatcttt

SEQ ID NO: 316300 - DNA, 25 bp, Artificial
  Probe
ctgcccctacttgtcatggtcatct

SEQ ID NO: 316301 - DNA, 25 bp, Artificial
  Probe
gctgtgaggctcatctttgccatca

SEQ ID NO: 316302 - DNA, 25 bp, Artificial
  Probe
aactgtgtggttgacatgcacttag

SEQ ID NO: 316303 - DNA, 25 bp, Artificial
  Probe
atgatcagcatacttgtggccctta

SEQ ID NO: 316304 - DNA, 25 bp, Artificial
  Probe
ggcccttattttccaacaatctgga

SEQ ID NO: 316305 - DNA, 25 bp, Artificial
  Probe
ttgtacaaacactcggactcggaga

SEQ ID NO: 316306 - DNA, 25 bp, Artificial
  Probe
gacagtattatgtggccctgaataa

SEQ ID NO: 316307 - DNA, 25 bp, Artificial
  Probe
ttccccaatggcacggtgcatggca

SEQ ID NO: 316308 - DNA, 25 bp, Artificial
  Probe
ttacccaggccagtagatccttcta

SEQ ID NO: 316309 - DNA, 25 bp, Artificial
  Probe
cagcatccggggagtagactctggc

SEQ ID NO: 316310 - DNA, 25 bp, Artificial
  Probe
caaacactcggactcggagagacag

SEQ ID NO: 316311 - DNA, 25 bp, Artificial
  Probe
tgaacgagcgcctgggccagatcga

SEQ ID NO: 316312 - DNA, 25 bp, Artificial
  Probe
tgcaaggcttctcctcctctctggg

SEQ ID NO: 316313 - DNA, 25 bp, Artificial
  Probe
agagctgtttggatcgaagaaactc

SEQ ID NO: 316314 - DNA, 25 bp, Artificial
  Probe
caatggcacggtgcatggcacccgc

SEQ ID NO: 316315 - DNA, 25 bp, Artificial
  Probe
actcggactcggagagacagtatta

SEQ ID NO: 316316 - DNA, 25 bp, Artificial
  Probe
tatcagcttggctgtggggctgatc

SEQ ID NO: 316317 - DNA, 25 bp, Artificial
  Probe
tgcccttagctgactccccgggttt

SEQ ID NO: 316318 - DNA, 25 bp, Artificial
  Probe
tctaagttgccctccatgtccagag

SEQ ID NO: 316319 - DNA, 25 bp, Artificial
  Probe
agacagtattatgtggccctgaata

SEQ ID NO: 316320 - DNA, 25 bp, Artificial
  Probe
gtttcctgaacgagcgcctgggcca

SEQ ID NO: 316321 - DNA, 25 bp, Artificial
  Probe
cgcacgggcttccaccttgaaatct

SEQ ID NO: 316322 - DNA, 25 bp, Artificial
  Probe
tctggaatttatcagcttggctgtg

SEQ ID NO: 316323 - DNA, 25 bp, Artificial
  Probe
gatccttctaagttgccctccatgt

SEQ ID NO: 316324 - DNA, 25 bp, Artificial
  Probe
tgactccccgggtttcctgaacgag

SEQ ID NO: 316325 - DNA, 25 bp, Artificial
  Probe
cccgggtttcctgaacgagcgcctg

SEQ ID NO: 316326 - DNA, 25 bp, Artificial
  Probe
ctctggggaacgtgcccttagctga

SEQ ID NO: 316327 - DNA, 25 bp, Artificial
  Probe
tcctctctggggaacgtgcccttag

SEQ ID NO: 316328 - DNA, 25 bp, Artificial
  Probe
atccggggagtagactctggcctat

SEQ ID NO: 316329 - DNA, 25 bp, Artificial
  Probe
gatcgaagaaactcacacgagaatg

SEQ ID NO: 316330 - DNA, 25 bp, Artificial
  Probe
agttgccctccatgtccagagacct

SEQ ID NO: 316331 - DNA, 25 bp, Artificial
  Probe
tcggactcggagagacagtattatg

SEQ ID NO: 316332 - DNA, 25 bp, Artificial
  Probe
gcctccttggactgggacctgcaag

SEQ ID NO: 316333 - DNA, 25 bp, Artificial
  Probe
gaaatcttccccaatggcacggtgc

SEQ ID NO: 316334 - DNA, 25 bp, Artificial
  Probe
actgggacctgcaaggcttctcctc

SEQ ID NO: 316335 - DNA, 25 bp, Artificial
  Probe
atgtggccctgaataaagacggctc

SEQ ID NO: 316336 - DNA, 25 bp, Artificial
  Probe
aattctggaatttatcagcttggct

SEQ ID NO: 316337 - DNA, 25 bp, Artificial
  Probe
gtgcccttagctgactccccgggtt

SEQ ID NO: 316338 - DNA, 25 bp, Artificial
  Probe
gcaaggcttctcctcctctctgggg

SEQ ID NO: 316339 - DNA, 25 bp, Artificial
  Probe
cacgggcttccaccttgaaatcttc

SEQ ID NO: 316340 - DNA, 25 bp, Artificial
  Probe
aatcttccccaatggcacggtgcat

SEQ ID NO: 316341 - DNA, 25 bp, Artificial
  Probe
cttggactgggacctgcaaggcttc

SEQ ID NO: 316342 - DNA, 25 bp, Artificial
  Probe
caccttgtacaaacactcggactcg

SEQ ID NO: 316343 - DNA, 25 bp, Artificial
  Probe
ctatacctaggaatgaatgagcgag

SEQ ID NO: 316344 - DNA, 25 bp, Artificial
  Probe
gcatccaccttgtacaaacactcgg

SEQ ID NO: 316345 - DNA, 25 bp, Artificial
  Probe
tagactctggcctatacctaggaat

SEQ ID NO: 316346 - DNA, 25 bp, Artificial
  Probe
catgtccagagacctcttccgctat

SEQ ID NO: 316347 - DNA, 25 bp, Artificial
  Probe
attatgtggccctgaataaagacgg

SEQ ID NO: 316348 - DNA, 25 bp, Artificial
  Probe
gggaacgtgcccttagctgactccc

SEQ ID NO: 316349 - DNA, 25 bp, Artificial
  Probe
cgagaatgtgttttccgggaacagt

SEQ ID NO: 316350 - DNA, 25 bp, Artificial
  Probe
gggagtagactctggcctataccta

SEQ ID NO: 316351 - DNA, 25 bp, Artificial
  Probe
ggtggcagaattcaccacagcgcta

SEQ ID NO: 316352 - DNA, 25 bp, Artificial
  Probe
aaatcacagaggatgacctccggct

SEQ ID NO: 316353 - DNA, 25 bp, Artificial
  Probe
ctttcagaaagtgcagaggcaagct

SEQ ID NO: 316354 - DNA, 25 bp, Artificial
  Probe
cgtacagcaggcaaaccagcagctg

SEQ ID NO: 316355 - DNA, 25 bp, Artificial
  Probe
cagtgaacagcgtcaaaggaagata

SEQ ID NO: 316356 - DNA, 25 bp, Artificial
  Probe
gggaaagccaaacacagcctcaagt

SEQ ID NO: 316357 - DNA, 25 bp, Artificial
  Probe
cccccagtgaacagcgtcaaaggaa

SEQ ID NO: 316358 - DNA, 25 bp, Artificial
  Probe
agcaggcaaaccagcagctgtcaag

SEQ ID NO: 316359 - DNA, 25 bp, Artificial
  Probe
cggcaaattatcagcgcaaatccag

SEQ ID NO: 316360 - DNA, 25 bp, Artificial
  Probe
gcagctgtcaagagcggcaaattat

SEQ ID NO: 316361 - DNA, 25 bp, Artificial
  Probe
cttcaatcagacagctggaagctga

SEQ ID NO: 316362 - DNA, 25 bp, Artificial
  Probe
agcggcaaattatcagcgcaaatcc

SEQ ID NO: 316363 - DNA, 25 bp, Artificial
  Probe
gtacagcaggcaaaccagcagctgt

SEQ ID NO: 316364 - DNA, 25 bp, Artificial
  Probe
tgtatcttgggaaagccaaacacag

SEQ ID NO: 316365 - DNA, 25 bp, Artificial
  Probe
catcgtatggggtctgaaaggctga

SEQ ID NO: 316366 - DNA, 25 bp, Artificial
  Probe
tgcggaagttcacgtacagcaggca

SEQ ID NO: 316367 - DNA, 25 bp, Artificial
  Probe
tgaacagcgtcaaaggaagatacag

SEQ ID NO: 316368 - DNA, 25 bp, Artificial
  Probe
ctgcatcatcattttaatcctggtg

SEQ ID NO: 316369 - DNA, 25 bp, Artificial
  Probe
gttcacgtacagcaggcaaaccagc

SEQ ID NO: 316370 - DNA, 25 bp, Artificial
  Probe
ctggtggtcggaatcgtgatcatct

SEQ ID NO: 316371 - DNA, 25 bp, Artificial
  Probe
aagaccgattggtggcagaattcac

SEQ ID NO: 316372 - DNA, 25 bp, Artificial
  Probe
ggctttcctgaagacagctcaaaag

SEQ ID NO: 316373 - DNA, 25 bp, Artificial
  Probe
atgacctccggctcattcatgagag

SEQ ID NO: 316374 - DNA, 25 bp, Artificial
  Probe
gcagaattcaccacagcgctaacaa

SEQ ID NO: 316375 - DNA, 25 bp, Artificial
  Probe
gtgcaagtccaagatgaagaaatca

SEQ ID NO: 316376 - DNA, 25 bp, Artificial
  Probe
agcgcaaatccagaaaaaccctctg

SEQ ID NO: 316377 - DNA, 25 bp, Artificial
  Probe
aaagccaaacacagcctcaagtgca

SEQ ID NO: 316378 - DNA, 25 bp, Artificial
  Probe
ccaaacacagcctcaagtgcaagtc

SEQ ID NO: 316379 - DNA, 25 bp, Artificial
  Probe
ctcattcatgagagagagtcttcaa

SEQ ID NO: 316380 - DNA, 25 bp, Artificial
  Probe
ttgtatcttgggaaagccaaacaca

SEQ ID NO: 316381 - DNA, 25 bp, Artificial
  Probe
cagagtatcgggtggctttcctgaa

SEQ ID NO: 316382 - DNA, 25 bp, Artificial
  Probe
acccccagtgaacagcgtcaaagga

SEQ ID NO: 316383 - DNA, 25 bp, Artificial
  Probe
acattaaggagtttggctttctgcc

SEQ ID NO: 316384 - DNA, 25 bp, Artificial
  Probe
gcgcaaatccagaaaaaccctctgc

SEQ ID NO: 316385 - DNA, 25 bp, Artificial
  Probe
acagcgctaacaaactttcagaaag

SEQ ID NO: 316386 - DNA, 25 bp, Artificial
  Probe
agagagtcttcaatcagacagctgg

SEQ ID NO: 316387 - DNA, 25 bp, Artificial
  Probe
agatacagaaagaccgattggtggc

SEQ ID NO: 316388 - DNA, 25 bp, Artificial
  Probe
aaagtgcggaagttcacgtacagca

SEQ ID NO: 316389 - DNA, 25 bp, Artificial
  Probe
agtgcaagtccaagatgaagaaatc

SEQ ID NO: 316390 - DNA, 25 bp, Artificial
  Probe
aaggagtttggctttctgcccacca

SEQ ID NO: 316391 - DNA, 25 bp, Artificial
  Probe
acagaaagaccgattggtggcagaa

SEQ ID NO: 316392 - DNA, 25 bp, Artificial
  Probe
tggtcggaatcgtgatcatcttctt

SEQ ID NO: 316393 - DNA, 25 bp, Artificial
  Probe
aacacagcctcaagtgcaagtccaa

SEQ ID NO: 316394 - DNA, 25 bp, Artificial
  Probe
ttcttcatcgtatggggtctgaaag

SEQ ID NO: 316395 - DNA, 25 bp, Artificial
  Probe
taatcctggtggtcggaatcgtgat

SEQ ID NO: 316396 - DNA, 25 bp, Artificial
  Probe
cagaggatgacctccggctcattca

SEQ ID NO: 316397 - DNA, 25 bp, Artificial
  Probe
tgccctccaaccagtgtttcatttg

SEQ ID NO: 316398 - DNA, 25 bp, Artificial
  Probe
aggagtcccagtcagccctacgaac

SEQ ID NO: 316399 - DNA, 25 bp, Artificial
  Probe
ggtgagcagcacagctcatctctct

SEQ ID NO: 316400 - DNA, 25 bp, Artificial
  Probe
ggtctcatgctgagggcaggaacct

SEQ ID NO: 316401 - DNA, 25 bp, Artificial
  Probe
gttggggtgctgcttctggcacccc

SEQ ID NO: 316402 - DNA, 25 bp, Artificial
  Probe
gccctccaaccagtgtttcatttgc

SEQ ID NO: 316403 - DNA, 25 bp, Artificial
  Probe
ccttccaagcttcaggcacctgggg

SEQ ID NO: 316404 - DNA, 25 bp, Artificial
  Probe
aggtctaagaattgccctccaacca

SEQ ID NO: 316405 - DNA, 25 bp, Artificial
  Probe
agacgtccgtgaatggaagccctcc

SEQ ID NO: 316406 - DNA, 25 bp, Artificial
  Probe
cttgttgcacaaactgaagaggtaa

SEQ ID NO: 316407 - DNA, 25 bp, Artificial
  Probe
gcagagcctgggaacgtgcattttg

SEQ ID NO: 316408 - DNA, 25 bp, Artificial
  Probe
gggtcccctagcaccgttagggcag

SEQ ID NO: 316409 - DNA, 25 bp, Artificial
  Probe
ataagactgtgtagccggcctacca

SEQ ID NO: 316410 - DNA, 25 bp, Artificial
  Probe
cttccaagcttcaggcacctggggt

SEQ ID NO: 316411 - DNA, 25 bp, Artificial
  Probe
gttataagactgtgtagccggccta

SEQ ID NO: 316412 - DNA, 25 bp, Artificial
  Probe
atctgtgaggtctcatgctgagggc

SEQ ID NO: 316413 - DNA, 25 bp, Artificial
  Probe
cctagcaccgttagggcagagcctg

SEQ ID NO: 316414 - DNA, 25 bp, Artificial
  Probe
tcagtggggatctgtgaggtctcat

SEQ ID NO: 316415 - DNA, 25 bp, Artificial
  Probe
tctgtgaggtctcatgctgagggca

SEQ ID NO: 316416 - DNA, 25 bp, Artificial
  Probe
caccgttagggcagagcctgggaac

SEQ ID NO: 316417 - DNA, 25 bp, Artificial
  Probe
gtaatcactctcaaggttcccaagc

SEQ ID NO: 316418 - DNA, 25 bp, Artificial
  Probe
cattttgcagaaactcttgaaggtt

SEQ ID NO: 316419 - DNA, 25 bp, Artificial
  Probe
gtgtagccggcctaccaggtccttt

SEQ ID NO: 316420 - DNA, 25 bp, Artificial
  Probe
ctacgaacccacagacgtccgtgaa

SEQ ID NO: 316421 - DNA, 25 bp, Artificial
  Probe
gtcctcgtaatcactctcaaggttc

SEQ ID NO: 316422 - DNA, 25 bp, Artificial
  Probe
ccctgagccgtgtttctggcttcat

SEQ ID NO: 316423 - DNA, 25 bp, Artificial
  Probe
taagaattgccctccaaccagtgtt

SEQ ID NO: 316424 - DNA, 25 bp, Artificial
  Probe
gtgagcagcacagctcatctctctg

SEQ ID NO: 316425 - DNA, 25 bp, Artificial
  Probe
ctaggagtcccagtcagccctacga

SEQ ID NO: 316426 - DNA, 25 bp, Artificial
  Probe
ccctcagtggggatctgtgaggtct

SEQ ID NO: 316427 - DNA, 25 bp, Artificial
  Probe
ctgttggggtgctgcttctggcacc

SEQ ID NO: 316428 - DNA, 25 bp, Artificial
  Probe
tccaaccagtgtttcatttgcctag

SEQ ID NO: 316429 - DNA, 25 bp, Artificial
  Probe
ggggtgcttggctgtcctcgtaatc

SEQ ID NO: 316430 - DNA, 25 bp, Artificial
  Probe
tccctcaggtctaagaattgccctc

SEQ ID NO: 316431 - DNA, 25 bp, Artificial
  Probe
tttcatcctgagagggtcatgtccc

SEQ ID NO: 316432 - DNA, 25 bp, Artificial
  Probe
aggtctcatgctgagggcaggaacc

SEQ ID NO: 316433 - DNA, 25 bp, Artificial
  Probe
cacagacgtccgtgaatggaagccc

SEQ ID NO: 316434 - DNA, 25 bp, Artificial
  Probe
tgcacaaactgaagaggtaaaaggc

SEQ ID NO: 316435 - DNA, 25 bp, Artificial
  Probe
agtctccctcaggtctaagaattgc

SEQ ID NO: 316436 - DNA, 25 bp, Artificial
  Probe
ccctagcaccgttagggcagagcct

SEQ ID NO: 316437 - DNA, 25 bp, Artificial
  Probe
cgtaatcactctcaaggttcccaag

SEQ ID NO: 316438 - DNA, 25 bp, Artificial
  Probe
cccctcttgttgcacaaactgaaga

SEQ ID NO: 316439 - DNA, 25 bp, Artificial
  Probe
gggtcatgtccctcattttctgcag

SEQ ID NO: 316440 - DNA, 25 bp, Artificial
  Probe
tttgcctaggagtcccagtcagccc

SEQ ID NO: 316441 - DNA, 25 bp, Artificial
  Probe
agccggcctaccaggtccttttcat

SEQ ID NO: 316442 - DNA, 25 bp, Artificial
  Probe
cattttctgcagtggccatccctct

SEQ ID NO: 316443 - DNA, 25 bp, Artificial
  Probe
tggccacccagtggtggctcagcca

SEQ ID NO: 316444 - DNA, 25 bp, Artificial
  Probe
agcctagaattgacgctttagtggc

SEQ ID NO: 316445 - DNA, 25 bp, Artificial
  Probe
gcaagaagccatttccccataagca

SEQ ID NO: 316446 - DNA, 25 bp, Artificial
  Probe
tagcacttgccgttaacaacagcag

SEQ ID NO: 316447 - DNA, 25 bp, Artificial
  Probe
ttgggtagcacttgccgttaacaac

SEQ ID NO: 316448 - DNA, 25 bp, Artificial
  Probe
agagccagtatatcgctctttccag

SEQ ID NO: 316449 - DNA, 25 bp, Artificial
  Probe
agctcacagattaggaattaacagc

SEQ ID NO: 316450 - DNA, 25 bp, Artificial
  Probe
ccccataagcactggcctttgacgg

SEQ ID NO: 316451 - DNA, 25 bp, Artificial
  Probe
attaacagccaaaggctcccacagt

SEQ ID NO: 316452 - DNA, 25 bp, Artificial
  Probe
tagaattgacgctttagtggcccaa

SEQ ID NO: 316453 - DNA, 25 bp, Artificial
  Probe
gttaacaacagcagcctagagccta

SEQ ID NO: 316454 - DNA, 25 bp, Artificial
  Probe
cccacagtagggaccagacggggct

SEQ ID NO: 316455 - DNA, 25 bp, Artificial
  Probe
gaattaacagccaaaggctcccaca

SEQ ID NO: 316456 - DNA, 25 bp, Artificial
  Probe
gccacccagtggtggctcagccatt

SEQ ID NO: 316457 - DNA, 25 bp, Artificial
  Probe
ggctcccacagtagggaccagacgg

SEQ ID NO: 316458 - DNA, 25 bp, Artificial
  Probe
ccacagtgggtgacaggtatggtaa

SEQ ID NO: 316459 - DNA, 25 bp, Artificial
  Probe
cttcctgttggcttttgggtagcac

SEQ ID NO: 316460 - DNA, 25 bp, Artificial
  Probe
cagcaggtgcggtcacgctcttgtc

SEQ ID NO: 316461 - DNA, 25 bp, Artificial
  Probe
gtgcaagaagccatttccccataag

SEQ ID NO: 316462 - DNA, 25 bp, Artificial
  Probe
taggattggcccaggtggcctctgt

SEQ ID NO: 316463 - DNA, 25 bp, Artificial
  Probe
ttagacaccagcaggtgcggtcacg

SEQ ID NO: 316464 - DNA, 25 bp, Artificial
  Probe
tcccctcagtggaattgtggaagtg

SEQ ID NO: 316465 - DNA, 25 bp, Artificial
  Probe
ttggcttttgggtagcacttgccgt

SEQ ID NO: 316466 - DNA, 25 bp, Artificial
  Probe
aaccacagtgggtgacaggtatggt

SEQ ID NO: 316467 - DNA, 25 bp, Artificial
  Probe
gctcttgtccttagggagaagctga

SEQ ID NO: 316468 - DNA, 25 bp, Artificial
  Probe
gcccaggtggcctctgtgagcacca

SEQ ID NO: 316469 - DNA, 25 bp, Artificial
  Probe
agtccttaggattggcccaggtggc

SEQ ID NO: 316470 - DNA, 25 bp, Artificial
  Probe
tcctgcttctatcttcccagggcgg

SEQ ID NO: 316471 - DNA, 25 bp, Artificial
  Probe
aactgcagagccagtatatcgctct

SEQ ID NO: 316472 - DNA, 25 bp, Artificial
  Probe
aagtgtggcaagtccatgttcggac

SEQ ID NO: 316473 - DNA, 25 bp, Artificial
  Probe
ctttagtggcccaactgcagagcca

SEQ ID NO: 316474 - DNA, 25 bp, Artificial
  Probe
atttccccataagcactggcctttg

SEQ ID NO: 316475 - DNA, 25 bp, Artificial
  Probe
gtatggtaagtccttaggattggcc

SEQ ID NO: 316476 - DNA, 25 bp, Artificial
  Probe
ccctcagtggaattgtggaagtgtg

SEQ ID NO: 316477 - DNA, 25 bp, Artificial
  Probe
aagctgaattagcagccccacagcc

SEQ ID NO: 316478 - DNA, 25 bp, Artificial
  Probe
atatcgctctttccagcacaatcgg

SEQ ID NO: 316479 - DNA, 25 bp, Artificial
  Probe
cagcctagagcctagaattgacgct

SEQ ID NO: 316480 - DNA, 25 bp, Artificial
  Probe
cctggtaggtgtgcaagaagccatt

SEQ ID NO: 316481 - DNA, 25 bp, Artificial
  Probe
gcaccattagacaccagcaggtgcg

SEQ ID NO: 316482 - DNA, 25 bp, Artificial
  Probe
acagccaaaggctcccacagtaggg

SEQ ID NO: 316483 - DNA, 25 bp, Artificial
  Probe
gcacaatcgggcagctcacagatta

SEQ ID NO: 316484 - DNA, 25 bp, Artificial
  Probe
ttgacgctttagtggcccaactgca

SEQ ID NO: 316485 - DNA, 25 bp, Artificial
  Probe
ttgcacctggtaggtgtgcaagaag

SEQ ID NO: 316486 - DNA, 25 bp, Artificial
  Probe
acccacagagggtcctgcttctatc

SEQ ID NO: 316487 - DNA, 25 bp, Artificial
  Probe
tttccagcacaatcgggcagctcac

SEQ ID NO: 316488 - DNA, 25 bp, Artificial
  Probe
tagacaccagcaggtgcggtcacgc

SEQ ID NO: 316489 - DNA, 25 bp, Artificial
  Probe
tcgtgggcgccatcaccctgaacaa

SEQ ID NO: 316490 - DNA, 25 bp, Artificial
  Probe
atcgtgggcgccatcaccctgaaca

SEQ ID NO: 316491 - DNA, 25 bp, Artificial
  Probe
aacatgaacagttgtttccagtgag

SEQ ID NO: 316492 - DNA, 25 bp, Artificial
  Probe
gacaggaaagactctccacagctgc

SEQ ID NO: 316493 - DNA, 25 bp, Artificial
  Probe
tacccaagcaaatgtagagaacgca

SEQ ID NO: 316494 - DNA, 25 bp, Artificial
  Probe
agttgtttccagtgagctactgaaa

SEQ ID NO: 316495 - DNA, 25 bp, Artificial
  Probe
gtagagaacgcatttctcctcaaaa

SEQ ID NO: 316496 - DNA, 25 bp, Artificial
  Probe
aacctcttatccaggctgctcagct

SEQ ID NO: 316497 - DNA, 25 bp, Artificial
  Probe
gctgcgcaaggacatgtgctcctgg

SEQ ID NO: 316498 - DNA, 25 bp, Artificial
  Probe
ggaaagactctccacagctgctcat

SEQ ID NO: 316499 - DNA, 25 bp, Artificial
  Probe
tgttctacatcgtgggcgccatcac

SEQ ID NO: 316500 - DNA, 25 bp, Artificial
  Probe
gtgttgaatctgtacacacccgtta

SEQ ID NO: 316501 - DNA, 25 bp, Artificial
  Probe
catctgctccatgtgcaacgctctg

SEQ ID NO: 316502 - DNA, 25 bp, Artificial
  Probe
gtgcggttacgagacaggaaagact

SEQ ID NO: 316503 - DNA, 25 bp, Artificial
  Probe
aagagactctggaacctcttatcca

SEQ ID NO: 316504 - DNA, 25 bp, Artificial
  Probe
ggcctgggcttcattgcaagggtct

SEQ ID NO: 316505 - DNA, 25 bp, Artificial
  Probe
tgtacacacccgttaatgagtttga

SEQ ID NO: 316506 - DNA, 25 bp, Artificial
  Probe
atggatgcaaaacacatctttcctg

SEQ ID NO: 316507 - DNA, 25 bp, Artificial
  Probe
cctggccctagaaaccatccagatt

SEQ ID NO: 316508 - DNA, 25 bp, Artificial
  Probe
aaactgacgatgacgcggaagccat

SEQ ID NO: 316509 - DNA, 25 bp, Artificial
  Probe
agaatggctacgtgacaagaatcta

SEQ ID NO: 316510 - DNA, 25 bp, Artificial
  Probe
aatggctacgtgacaagaatctaat

SEQ ID NO: 316511 - DNA, 25 bp, Artificial
  Probe
tcattgcaagggtctgaagggctac

SEQ ID NO: 316512 - DNA, 25 bp, Artificial
  Probe
tcatttatccgcactatacaggtgc

SEQ ID NO: 316513 - DNA, 25 bp, Artificial
  Probe
ggaaagggtctctgtttcatttatc

SEQ ID NO: 316514 - DNA, 25 bp, Artificial
  Probe
ctgaacaacctcctgctgcgcaagg

SEQ ID NO: 316515 - DNA, 25 bp, Artificial
  Probe
cagattccagccagcctgggcctgg

SEQ ID NO: 316516 - DNA, 25 bp, Artificial
  Probe
tgaacaacctcctgctgcgcaagga

SEQ ID NO: 316517 - DNA, 25 bp, Artificial
  Probe
tgggcttcattgcaagggtctgaag

SEQ ID NO: 316518 - DNA, 25 bp, Artificial
  Probe
gacatgtgctcctggagcaaaggca

SEQ ID NO: 316519 - DNA, 25 bp, Artificial
  Probe
tgtagagaacgcatttctcctcaaa

SEQ ID NO: 316520 - DNA, 25 bp, Artificial
  Probe
ggatgcaaaacacatctttcctgtc

SEQ ID NO: 316521 - DNA, 25 bp, Artificial
  Probe
gctcagcttttgcaagtgaaaaaga

SEQ ID NO: 316522 - DNA, 25 bp, Artificial
  Probe
tctccacagctgctcatggatgcaa

SEQ ID NO: 316523 - DNA, 25 bp, Artificial
  Probe
acgatgacgcggaagccatctgctc

SEQ ID NO: 316524 - DNA, 25 bp, Artificial
  Probe
cacccgttaatgagtttgaggaaag

SEQ ID NO: 316525 - DNA, 25 bp, Artificial
  Probe
tttccagtgagctactgaaaataca

SEQ ID NO: 316526 - DNA, 25 bp, Artificial
  Probe
ccacagctgctcatggatgcaaaac

SEQ ID NO: 316527 - DNA, 25 bp, Artificial
  Probe
ggtctgaagggctacccaagcaaat

SEQ ID NO: 316528 - DNA, 25 bp, Artificial
  Probe
ctcctgctgcgcaaggacatgtgct

SEQ ID NO: 316529 - DNA, 25 bp, Artificial
  Probe
gaatctgtacacacccgttaatgag

SEQ ID NO: 316530 - DNA, 25 bp, Artificial
  Probe
tgcaagggtctgaagggctacccaa

SEQ ID NO: 316531 - DNA, 25 bp, Artificial
  Probe
atacaggtgcggttacgagacagga

SEQ ID NO: 316532 - DNA, 25 bp, Artificial
  Probe
gcactatacaggtgcggttacgaga

SEQ ID NO: 316533 - DNA, 25 bp, Artificial
  Probe
tagaaaccatccagattccagccag

SEQ ID NO: 316534 - DNA, 25 bp, Artificial
  Probe
ggtctctgtttcatttatccgcact

SEQ ID NO: 316535 - DNA, 25 bp, Artificial
  Probe
gaagctagcccctcagtgcacagtc

SEQ ID NO: 316536 - DNA, 25 bp, Artificial
  Probe
acttctccaggctggtgtcagtgac

SEQ ID NO: 316537 - DNA, 25 bp, Artificial
  Probe
ggcctgcgtttgaggaaaatctcca

SEQ ID NO: 316538 - DNA, 25 bp, Artificial
  Probe
agttcggaagctagcccctcagtgc

SEQ ID NO: 316539 - DNA, 25 bp, Artificial
  Probe
ccatcctggaggacctggggctgac

SEQ ID NO: 316540 - DNA, 25 bp, Artificial
  Probe
tgccttcagaccagggacatcttta

SEQ ID NO: 316541 - DNA, 25 bp, Artificial
  Probe
cctgcaggagctgacagtgtctgtg

SEQ ID NO: 316542 - DNA, 25 bp, Artificial
  Probe
acccagatggcctgcgtttgaggaa

SEQ ID NO: 316543 - DNA, 25 bp, Artificial
  Probe
tctgatgatgccttgatggtcctag

SEQ ID NO: 316544 - DNA, 25 bp, Artificial
  Probe
gacgtctgatgatgccttgatggtc

SEQ ID NO: 316545 - DNA, 25 bp, Artificial
  Probe
ccctcagtgcacagtcacctttttg

SEQ ID NO: 316546 - DNA, 25 bp, Artificial
  Probe
agagcaattgggatctccctggact

SEQ ID NO: 316547 - DNA, 25 bp, Artificial
  Probe
aggacctggggctgactctgacgtc

SEQ ID NO: 316548 - DNA, 25 bp, Artificial
  Probe
tcttccggggccagaagacgcaatg

SEQ ID NO: 316549 - DNA, 25 bp, Artificial
  Probe
tccggggccagaagacgcaatgcct

SEQ ID NO: 316550 - DNA, 25 bp, Artificial
  Probe
cttgatggtcctagaggtgtgccag

SEQ ID NO: 316551 - DNA, 25 bp, Artificial
  Probe
gactaaggattcagcccacacggac

SEQ ID NO: 316552 - DNA, 25 bp, Artificial
  Probe
acacccaatggctttctgagagaag

SEQ ID NO: 316553 - DNA, 25 bp, Artificial
  Probe
agacgcaatgccttcagaccaggga

SEQ ID NO: 316554 - DNA, 25 bp, Artificial
  Probe
gcctgacccagatggcctgcgtttg

SEQ ID NO: 316555 - DNA, 25 bp, Artificial
  Probe
tggccctgcgtcaggtccgagccat

SEQ ID NO: 316556 - DNA, 25 bp, Artificial
  Probe
ccaggctggtgtcagtgacagttcg

SEQ ID NO: 316557 - DNA, 25 bp, Artificial
  Probe
aggaaaatctccaaagagcaattgg

SEQ ID NO: 316558 - DNA, 25 bp, Artificial
  Probe
tctctccgagattgagagcgacagc

SEQ ID NO: 316559 - DNA, 25 bp, Artificial
  Probe
aaatctccaaagagcaattgggatc

SEQ ID NO: 316560 - DNA, 25 bp, Artificial
  Probe
atcctggaggacctggggctgactc

SEQ ID NO: 316561 - DNA, 25 bp, Artificial
  Probe
ttggagttctcttccggggccagaa

SEQ ID NO: 316562 - DNA, 25 bp, Artificial
  Probe
cgcctgacccagatggcctgcgttt

SEQ ID NO: 316563 - DNA, 25 bp, Artificial
  Probe
ggtggtgccctcataactgtccgcc

SEQ ID NO: 316564 - DNA, 25 bp, Artificial
  Probe
gcgtcaggtccgagccatcctggag

SEQ ID NO: 316565 - DNA, 25 bp, Artificial
  Probe
cagaccagggacatctttaagacca

SEQ ID NO: 316566 - DNA, 25 bp, Artificial
  Probe
ttgggatctccctggactaaggatt

SEQ ID NO: 316567 - DNA, 25 bp, Artificial
  Probe
ctccgagattgagagcgacagcctg

SEQ ID NO: 316568 - DNA, 25 bp, Artificial
  Probe
acctttttgcaatcggaggatgggt

SEQ ID NO: 316569 - DNA, 25 bp, Artificial
  Probe
gcaattgggatctccctggactaag

SEQ ID NO: 316570 - DNA, 25 bp, Artificial
  Probe
gcctgcaggagctgacagtgtctgt

SEQ ID NO: 316571 - DNA, 25 bp, Artificial
  Probe
gtgacagttcggaagctagcccctc

SEQ ID NO: 316572 - DNA, 25 bp, Artificial
  Probe
ttcagaccagggacatctttaagac

SEQ ID NO: 316573 - DNA, 25 bp, Artificial
  Probe
tggactaaggattcagcccacacgg

SEQ ID NO: 316574 - DNA, 25 bp, Artificial
  Probe
agatggcctgcgtttgaggaaaatc

SEQ ID NO: 316575 - DNA, 25 bp, Artificial
  Probe
gtcagtgacagttcggaagctagcc

SEQ ID NO: 316576 - DNA, 25 bp, Artificial
  Probe
caggtccgagccatcctggaggacc

SEQ ID NO: 316577 - DNA, 25 bp, Artificial
  Probe
ctccaaagagcaattgggatctccc

SEQ ID NO: 316578 - DNA, 25 bp, Artificial
  Probe
cagaagacgcaatgccttcagacca

SEQ ID NO: 316579 - DNA, 25 bp, Artificial
  Probe
ctggtgtcagtgacagttcggaagc

SEQ ID NO: 316580 - DNA, 25 bp, Artificial
  Probe
gccagaagacgcaatgccttcagac

SEQ ID NO: 316581 - DNA, 25 bp, Artificial
  Probe
atctgcagatgttgcaggaccttgt

SEQ ID NO: 316582 - DNA, 25 bp, Artificial
  Probe
tgtaacttagtcacggcaaagagga

SEQ ID NO: 316583 - DNA, 25 bp, Artificial
  Probe
cacaccctcagagagcgcctgggtg

SEQ ID NO: 316584 - DNA, 25 bp, Artificial
  Probe
acccctaaaggacaaccatctgcag

SEQ ID NO: 316585 - DNA, 25 bp, Artificial
  Probe
acaagagggaccagtcccagagcag

SEQ ID NO: 316586 - DNA, 25 bp, Artificial
  Probe
atcaccaccaagtggctctggatct

SEQ ID NO: 316587 - DNA, 25 bp, Artificial
  Probe
cagtcccagagcagccactgaaagg

SEQ ID NO: 316588 - DNA, 25 bp, Artificial
  Probe
tcacaccctcagagagcgcctgggt

SEQ ID NO: 316589 - DNA, 25 bp, Artificial
  Probe
cccagagcagccactgaaagggctt

SEQ ID NO: 316590 - DNA, 25 bp, Artificial
  Probe
aggagccatcaccaccatcgtcaag

SEQ ID NO: 316591 - DNA, 25 bp, Artificial
  Probe
tcagagagcgcctgggtgtaactta

SEQ ID NO: 316592 - DNA, 25 bp, Artificial
  Probe
aatcctacaagctcctgccaggagc

SEQ ID NO: 316593 - DNA, 25 bp, Artificial
  Probe
agagcgcctgggtgtaacttagtca

SEQ ID NO: 316594 - DNA, 25 bp, Artificial
  Probe
gatctgaatcctacaagctcctgcc

SEQ ID NO: 316595 - DNA, 25 bp, Artificial
  Probe
cagagcagccactgaaagggcttgt

SEQ ID NO: 316596 - DNA, 25 bp, Artificial
  Probe
gatcaccaagcaggaagccatctag

SEQ ID NO: 316597 - DNA, 25 bp, Artificial
  Probe
gtcacggcaaagaggatgtgacaag

SEQ ID NO: 316598 - DNA, 25 bp, Artificial
  Probe
ccaccaagtggctctggatctgaat

SEQ ID NO: 316599 - DNA, 25 bp, Artificial
  Probe
agcgcctgggtgtaacttagtcacg

SEQ ID NO: 316600 - DNA, 25 bp, Artificial
  Probe
tctggatctgaatcctacaagctcc

SEQ ID NO: 316601 - DNA, 25 bp, Artificial
  Probe
cgcctgggtgtaacttagtcacggc

SEQ ID NO: 316602 - DNA, 25 bp, Artificial
  Probe
aaggacaaccatctgcagatgttgc

SEQ ID NO: 316603 - DNA, 25 bp, Artificial
  Probe
tctgaatcctacaagctcctgccag

SEQ ID NO: 316604 - DNA, 25 bp, Artificial
  Probe
ctgcagatgttgcaggaccttgttt

SEQ ID NO: 316605 - DNA, 25 bp, Artificial
  Probe
cagatgttgcaggaccttgtttaaa

SEQ ID NO: 316606 - DNA, 25 bp, Artificial
  Probe
ggtgaggcttctgctggctcacacc

SEQ ID NO: 316607 - DNA, 25 bp, Artificial
  Probe
gcagccactgaaagggcttgtaggc

SEQ ID NO: 316608 - DNA, 25 bp, Artificial
  Probe
tgggtgtaacttagtcacggcaaag

SEQ ID NO: 316609 - DNA, 25 bp, Artificial
  Probe
ccatctgcagatgttgcaggacctt

SEQ ID NO: 316610 - DNA, 25 bp, Artificial
  Probe
ccctaaaggacaaccatctgcagat

SEQ ID NO: 316611 - DNA, 25 bp, Artificial
  Probe
aagagggaccagtcccagagcagcc

SEQ ID NO: 316612 - DNA, 25 bp, Artificial
  Probe
tcacggcaaagaggatgtgacaaga

SEQ ID NO: 316613 - DNA, 25 bp, Artificial
  Probe
ggtgtaacttagtcacggcaaagag

SEQ ID NO: 316614 - DNA, 25 bp, Artificial
  Probe
cttagtcacggcaaagaggatgtga

SEQ ID NO: 316615 - DNA, 25 bp, Artificial
  Probe
gggaccagtcccagagcagccactg

SEQ ID NO: 316616 - DNA, 25 bp, Artificial
  Probe
ttctgctggctcacaccctcagaga

SEQ ID NO: 316617 - DNA, 25 bp, Artificial
  Probe
cgatcaccaagcaggaagccatcta

SEQ ID NO: 316618 - DNA, 25 bp, Artificial
  Probe
tgaggcttctgctggctcacaccct

SEQ ID NO: 316619 - DNA, 25 bp, Artificial
  Probe
caccaagtggctctggatctgaatc

SEQ ID NO: 316620 - DNA, 25 bp, Artificial
  Probe
ccagccaacgatcaccaagcaggaa

SEQ ID NO: 316621 - DNA, 25 bp, Artificial
  Probe
tgttgcaggaccttgtttaaaaaca

SEQ ID NO: 316622 - DNA, 25 bp, Artificial
  Probe
cactgaaagggcttgtaggcccaaa

SEQ ID NO: 316623 - DNA, 25 bp, Artificial
  Probe
ctaaaggacaaccatctgcagatgt

SEQ ID NO: 316624 - DNA, 25 bp, Artificial
  Probe
catcaccaccaagtggctctggatc

SEQ ID NO: 316625 - DNA, 25 bp, Artificial
  Probe
tctgctggctcacaccctcagagag

SEQ ID NO: 316626 - DNA, 25 bp, Artificial
  Probe
ctgaatcctacaagctcctgccagg

SEQ ID NO: 316627 - DNA, 25 bp, Artificial
  Probe
tggatggcgacacgaagcactgtgt

SEQ ID NO: 316628 - DNA, 25 bp, Artificial
  Probe
agccagcggggctgttacgcatgct

SEQ ID NO: 316629 - DNA, 25 bp, Artificial
  Probe
ccagtattcactgatggaggatgag

SEQ ID NO: 316630 - DNA, 25 bp, Artificial
  Probe
cacccagaaaggtgcccgacagagg

SEQ ID NO: 316631 - DNA, 25 bp, Artificial
  Probe
ggaccagtacctcgtgtggctcacc

SEQ ID NO: 316632 - DNA, 25 bp, Artificial
  Probe
gaaaggtgcccgacagaggaagatc

SEQ ID NO: 316633 - DNA, 25 bp, Artificial
  Probe
ttggcttcgcagagccctataacct

SEQ ID NO: 316634 - DNA, 25 bp, Artificial
  Probe
atgctgagtgccaaacgagacggga

SEQ ID NO: 316635 - DNA, 25 bp, Artificial
  Probe
taacctgtacggatccctgaaggag

SEQ ID NO: 316636 - DNA, 25 bp, Artificial
  Probe
ctgttacgcatgctctgtggtggtg

SEQ ID NO: 316637 - DNA, 25 bp, Artificial
  Probe
gctgttacgcatgctctgtggtggt

SEQ ID NO: 316638 - DNA, 25 bp, Artificial
  Probe
gcacgtggtacgtgggcaagatcaa

SEQ ID NO: 316639 - DNA, 25 bp, Artificial
  Probe
ctaccagcacgcatcacttgtgcag

SEQ ID NO: 316640 - DNA, 25 bp, Artificial
  Probe
cttcccctggtgaacacacgcagga

SEQ ID NO: 316641 - DNA, 25 bp, Artificial
  Probe
ctttggcttcgcagagccctataac

SEQ ID NO: 316642 - DNA, 25 bp, Artificial
  Probe
acgcatcacttgtgcagcacaatga

SEQ ID NO: 316643 - DNA, 25 bp, Artificial
  Probe
agcactgtgtcatctaccgcacagc

SEQ ID NO: 316644 - DNA, 25 bp, Artificial
  Probe
atctcatgcagctgcgcaagatcag

SEQ ID NO: 316645 - DNA, 25 bp, Artificial
  Probe
ctgcgcaagatcagggaccagtacc

SEQ ID NO: 316646 - DNA, 25 bp, Artificial
  Probe
cgcacgtggtacgtgggcaagatca

SEQ ID NO: 316647 - DNA, 25 bp, Artificial
  Probe
ccctgaaggagctggtattgcacta

SEQ ID NO: 316648 - DNA, 25 bp, Artificial
  Probe
tcctcatccgggagagcagccagcg

SEQ ID NO: 316649 - DNA, 25 bp, Artificial
  Probe
cctcatccgggagagcagccagcgg

SEQ ID NO: 316650 - DNA, 25 bp, Artificial
  Probe
agactgaggaccagtattcactgat

SEQ ID NO: 316651 - DNA, 25 bp, Artificial
  Probe
tcactgatggaggatgaggacgccc

SEQ ID NO: 316652 - DNA, 25 bp, Artificial
  Probe
caagatcagggaccagtacctcgtg

SEQ ID NO: 316653 - DNA, 25 bp, Artificial
  Probe
aacgagacgggaccttcctcatccg

SEQ ID NO: 316654 - DNA, 25 bp, Artificial
  Probe
agcggggctgttacgcatgctctgt

SEQ ID NO: 316655 - DNA, 25 bp, Artificial
  Probe
agctggtattgcactaccagcacgc

SEQ ID NO: 316656 - DNA, 25 bp, Artificial
  Probe
tgcccgacagaggaagatcaacgag

SEQ ID NO: 316657 - DNA, 25 bp, Artificial
  Probe
cagtacctcgtgtggctcacccaga

SEQ ID NO: 316658 - DNA, 25 bp, Artificial
  Probe
accgcacagccactggctttggctt

SEQ ID NO: 316659 - DNA, 25 bp, Artificial
  Probe
tcaacgagtggctgggaatcaagaa

SEQ ID NO: 316660 - DNA, 25 bp, Artificial
  Probe
taccgcacagccactggctttggct

SEQ ID NO: 316661 - DNA, 25 bp, Artificial
  Probe
tgggcaagatcaaccgcacacaggc

SEQ ID NO: 316662 - DNA, 25 bp, Artificial
  Probe
ttcgcagagccctataacctgtacg

SEQ ID NO: 316663 - DNA, 25 bp, Artificial
  Probe
gtgccaaacgagacgggaccttcct

SEQ ID NO: 316664 - DNA, 25 bp, Artificial
  Probe
tgcagcacaatgacgcgctcaccgt

SEQ ID NO: 316665 - DNA, 25 bp, Artificial
  Probe
acagccactggctttggcttcgcag

SEQ ID NO: 316666 - DNA, 25 bp, Artificial
  Probe
attcactgatggaggatgaggacgc

SEQ ID NO: 316667 - DNA, 25 bp, Artificial
  Probe
cccaccatgaggagcgcacgtggta

SEQ ID NO: 316668 - DNA, 25 bp, Artificial
  Probe
cctggtgaacacacgcaggatgcca

SEQ ID NO: 316669 - DNA, 25 bp, Artificial
  Probe
atgcagctgcgcaagatcagggacc

SEQ ID NO: 316670 - DNA, 25 bp, Artificial
  Probe
tacgtgggcaagatcaaccgcacac

SEQ ID NO: 316671 - DNA, 25 bp, Artificial
  Probe
aagatcaacgagtggctgggaatca

SEQ ID NO: 316672 - DNA, 25 bp, Artificial
  Probe
gggaccttcctcatccgggagagca

SEQ ID NO: 316673 - DNA, 25 bp, Artificial
  Probe
gtatttggaacatgctttctatcat

SEQ ID NO: 316674 - DNA, 25 bp, Artificial
  Probe
tctcgttctgaatgatgcatgtgtg

SEQ ID NO: 316675 - DNA, 25 bp, Artificial
  Probe
accaaatggctacctggaataattt

SEQ ID NO: 316676 - DNA, 25 bp, Artificial
  Probe
tgctttctatcatgcgttgactgta

SEQ ID NO: 316677 - DNA, 25 bp, Artificial
  Probe
cctctcgttctgaatgatgcatgtg

SEQ ID NO: 316678 - DNA, 25 bp, Artificial
  Probe
tgcgttgactgtatgcatttcatgc

SEQ ID NO: 316679 - DNA, 25 bp, Artificial
  Probe
gtgcattttcagttctaactttgtg

SEQ ID NO: 316680 - DNA, 25 bp, Artificial
  Probe
actatggtggcctgagaggctcact

SEQ ID NO: 316681 - DNA, 25 bp, Artificial
  Probe
ctgtatgcatttcatgcacattttg

SEQ ID NO: 316682 - DNA, 25 bp, Artificial
  Probe
atacaaaccaaatggctacctggaa

SEQ ID NO: 316683 - DNA, 25 bp, Artificial
  Probe
taatgcaaaagctaactatggtggc

SEQ ID NO: 316684 - DNA, 25 bp, Artificial
  Probe
taatgataacctcaagactatcagg

SEQ ID NO: 316685 - DNA, 25 bp, Artificial
  Probe
ggtcgctttcttatgatacaaacca

SEQ ID NO: 316686 - DNA, 25 bp, Artificial
  Probe
ttctatcatgcgttgactgtatgca

SEQ ID NO: 316687 - DNA, 25 bp, Artificial
  Probe
aaaccaaatggctacctggaataat

SEQ ID NO: 316688 - DNA, 25 bp, Artificial
  Probe
acacgcttccagacggaactgtacg

SEQ ID NO: 316689 - DNA, 25 bp, Artificial
  Probe
attaatcagggtgcattttcagttc

SEQ ID NO: 316690 - DNA, 25 bp, Artificial
  Probe
gaactcttcctctcgttctgaatga

SEQ ID NO: 316691 - DNA, 25 bp, Artificial
  Probe
gatacacgcttccagacggaactgt

SEQ ID NO: 316692 - DNA, 25 bp, Artificial
  Probe
gcaaaagctaactatggtggcctga

SEQ ID NO: 316693 - DNA, 25 bp, Artificial
  Probe
cgttgactgtatgcatttcatgcac

SEQ ID NO: 316694 - DNA, 25 bp, Artificial
  Probe
gccacagtttgcactactcgtaaca

SEQ ID NO: 316695 - DNA, 25 bp, Artificial
  Probe
agggtgcattttcagttctaacttt

SEQ ID NO: 316696 - DNA, 25 bp, Artificial
  Probe
aaagctaactatggtggcctgagag

SEQ ID NO: 316697 - DNA, 25 bp, Artificial
  Probe
aactcttggaggtcgctttcttatg

SEQ ID NO: 316698 - DNA, 25 bp, Artificial
  Probe
aatactgaggaactcttcctctcgt

SEQ ID NO: 316699 - DNA, 25 bp, Artificial
  Probe
ctcaagactatcaggagaaatattt

SEQ ID NO: 316700 - DNA, 25 bp, Artificial
  Probe
ctcttcctctcgttctgaatgatgc

SEQ ID NO: 316701 - DNA, 25 bp, Artificial
  Probe
gtatgcatttcatgcacattttgtt

SEQ ID NO: 316702 - DNA, 25 bp, Artificial
  Probe
agtttgcactactcgtaacataatg

SEQ ID NO: 316703 - DNA, 25 bp, Artificial
  Probe
tacgtgccacagtttgcactactcg

SEQ ID NO: 316704 - DNA, 25 bp, Artificial
  Probe
tcagggtgcattttcagttctaact

SEQ ID NO: 316705 - DNA, 25 bp, Artificial
  Probe
gcttccagacggaactgtacgtgcc

SEQ ID NO: 316706 - DNA, 25 bp, Artificial
  Probe
aggaactcttcctctcgttctgaat

SEQ ID NO: 316707 - DNA, 25 bp, Artificial
  Probe
actgtacgtgccacagtttgcacta

SEQ ID NO: 316708 - DNA, 25 bp, Artificial
  Probe
gtttgcactactcgtaacataatga

SEQ ID NO: 316709 - DNA, 25 bp, Artificial
  Probe
cggaactgtacgtgccacagtttgc

SEQ ID NO: 316710 - DNA, 25 bp, Artificial
  Probe
tggtggcctgagaggctcacttgta

SEQ ID NO: 316711 - DNA, 25 bp, Artificial
  Probe
gactgtatgcatttcatgcacattt

SEQ ID NO: 316712 - DNA, 25 bp, Artificial
  Probe
taagatacacgcttccagacggaac

SEQ ID NO: 316713 - DNA, 25 bp, Artificial
  Probe
tactgaggaactcttcctctcgttc

SEQ ID NO: 316714 - DNA, 25 bp, Artificial
  Probe
cacttgtatttggaacatgctttct

SEQ ID NO: 316715 - DNA, 25 bp, Artificial
  Probe
agctaactatggtggcctgagaggc

SEQ ID NO: 316716 - DNA, 25 bp, Artificial
  Probe
atgatacaaaccaaatggctacctg

SEQ ID NO: 316717 - DNA, 25 bp, Artificial
  Probe
cctgagaggctcacttgtatttgga

SEQ ID NO: 316718 - DNA, 25 bp, Artificial
  Probe
cttggaggtcgctttcttatgatac

SEQ ID NO: 316719 - DNA, 25 bp, Artificial
  Probe
aaatcgcccagtgtccagtccaagg

SEQ ID NO: 316720 - DNA, 25 bp, Artificial
  Probe
ctcaggaagccgacagagagagcaa

SEQ ID NO: 316721 - DNA, 25 bp, Artificial
  Probe
gcgaacaagcccaggtgaccccaga

SEQ ID NO: 316722 - DNA, 25 bp, Artificial
  Probe
gaagacacacctcatcccagaggat

SEQ ID NO: 316723 - DNA, 25 bp, Artificial
  Probe
gttcttcaagctcaatgtcatcaag

SEQ ID NO: 316724 - DNA, 25 bp, Artificial
  Probe
cctgctataaaatcgcccagtgtcc

SEQ ID NO: 316725 - DNA, 25 bp, Artificial
  Probe
gtactgtaggcctactttcccaacg

SEQ ID NO: 316726 - DNA, 25 bp, Artificial
  Probe
aagccgacagagagagcaagcaaat

SEQ ID NO: 316727 - DNA, 25 bp, Artificial
  Probe
ccaaagctcgcttctatagaagcga

SEQ ID NO: 316728 - DNA, 25 bp, Artificial
  Probe
ggcctacacagatgatcttccacca

SEQ ID NO: 316729 - DNA, 25 bp, Artificial
  Probe
agccaggacatctgcgcagagaggc

SEQ ID NO: 316730 - DNA, 25 bp, Artificial
  Probe
gacagcaaagcgagaccttccacca

SEQ ID NO: 316731 - DNA, 25 bp, Artificial
  Probe
tctatagaagcgagagcagacagat

SEQ ID NO: 316732 - DNA, 25 bp, Artificial
  Probe
gagagaagctctggacggaagacaa

SEQ ID NO: 316733 - DNA, 25 bp, Artificial
  Probe
aacagaagcaccagccaggacatct

SEQ ID NO: 316734 - DNA, 25 bp, Artificial
  Probe
gaagacaagtcactgacctgcgaac

SEQ ID NO: 316735 - DNA, 25 bp, Artificial
  Probe
ctcatcccagaggatatccttccgt

SEQ ID NO: 316736 - DNA, 25 bp, Artificial
  Probe
cgcagagaggcctacacagatgatc

SEQ ID NO: 316737 - DNA, 25 bp, Artificial
  Probe
gaaacagaagcaccagccaggacat

SEQ ID NO: 316738 - DNA, 25 bp, Artificial
  Probe
tcatcagacagaaaaggcggcagtt

SEQ ID NO: 316739 - DNA, 25 bp, Artificial
  Probe
acagctggaggcacggcctataatg

SEQ ID NO: 316740 - DNA, 25 bp, Artificial
  Probe
agcgaagacacacctcatcccagag

SEQ ID NO: 316741 - DNA, 25 bp, Artificial
  Probe
atctgcgcagagaggcctacacaga

SEQ ID NO: 316742 - DNA, 25 bp, Artificial
  Probe
tataatggggccaaagctcgcttct

SEQ ID NO: 316743 - DNA, 25 bp, Artificial
  Probe
tccttccgtactgtaggcctacttt

SEQ ID NO: 316744 - DNA, 25 bp, Artificial
  Probe
ccccagagaagcacaggagcagcca

SEQ ID NO: 316745 - DNA, 25 bp, Artificial
  Probe
gatcccagttcttcaagctcaatgt

SEQ ID NO: 316746 - DNA, 25 bp, Artificial
  Probe
gctctggacggaagacaagtcactg

SEQ ID NO: 316747 - DNA, 25 bp, Artificial
  Probe
gcagccaaacgaagggaaagcacga

SEQ ID NO: 316748 - DNA, 25 bp, Artificial
  Probe
accgcctgctataaaatcgcccagt

SEQ ID NO: 316749 - DNA, 25 bp, Artificial
  Probe
ccaagaaacagaagcaccagccagg

SEQ ID NO: 316750 - DNA, 25 bp, Artificial
  Probe
gaggcacggcctataatggggccaa

SEQ ID NO: 316751 - DNA, 25 bp, Artificial
  Probe
agcaagcaaatgtgggccgaagaaa

SEQ ID NO: 316752 - DNA, 25 bp, Artificial
  Probe
agagcagacagatcatcagacagaa

SEQ ID NO: 316753 - DNA, 25 bp, Artificial
  Probe
gacctgcgaacaagcccaggtgacc

SEQ ID NO: 316754 - DNA, 25 bp, Artificial
  Probe
aagaggctcaggaagccgacagaga

SEQ ID NO: 316755 - DNA, 25 bp, Artificial
  Probe
cacggcctataatggggccaaagct

SEQ ID NO: 316756 - DNA, 25 bp, Artificial
  Probe
ggatcccagttcttcaagctcaatg

SEQ ID NO: 316757 - DNA, 25 bp, Artificial
  Probe
ccagaaagccagacccaccaagaaa

SEQ ID NO: 316758 - DNA, 25 bp, Artificial
  Probe
agccagacccaccaagaaacagaag

SEQ ID NO: 316759 - DNA, 25 bp, Artificial
  Probe
tgtaggcctactttcccaacgtcaa

SEQ ID NO: 316760 - DNA, 25 bp, Artificial
  Probe
agaagcacaggagcagccaaacgaa

SEQ ID NO: 316761 - DNA, 25 bp, Artificial
  Probe
cgcttctatagaagcgagagcagac

SEQ ID NO: 316762 - DNA, 25 bp, Artificial
  Probe
gagaccttccaccagcgaagacaca

SEQ ID NO: 316763 - DNA, 25 bp, Artificial
  Probe
caaccctagggatcccagttcttca

SEQ ID NO: 316764 - DNA, 25 bp, Artificial
  Probe
gtcaaacaaccctagggatcccagt

SEQ ID NO: 316765 - DNA, 25 bp, Artificial
  Probe
gatttctggttccagctccaatcca

SEQ ID NO: 316766 - DNA, 25 bp, Artificial
  Probe
gtgcacatctctgattggggtcttc

SEQ ID NO: 316767 - DNA, 25 bp, Artificial
  Probe
tccgaactcgggatcaggtttacca

SEQ ID NO: 316768 - DNA, 25 bp, Artificial
  Probe
ctctgattggggtcttctttaccgt

SEQ ID NO: 316769 - DNA, 25 bp, Artificial
  Probe
gattggggtcttctttaccgtctgc

SEQ ID NO: 316770 - DNA, 25 bp, Artificial
  Probe
tcctctatgaggagcggcacagtga

SEQ ID NO: 316771 - DNA, 25 bp, Artificial
  Probe
gacctgggaagcttctacttgcccc

SEQ ID NO: 316772 - DNA, 25 bp, Artificial
  Probe
tcgggatcaggtttaccagaaggag

SEQ ID NO: 316773 - DNA, 25 bp, Artificial
  Probe
tgccagaattgtgttcaagaccaat

SEQ ID NO: 316774 - DNA, 25 bp, Artificial
  Probe
gctatacagtcttcagggtcaacat

SEQ ID NO: 316775 - DNA, 25 bp, Artificial
  Probe
cagagtccccggttcgtcaggagca

SEQ ID NO: 316776 - DNA, 25 bp, Artificial
  Probe
accttgccgtgctggggctctatac

SEQ ID NO: 316777 - DNA, 25 bp, Artificial
  Probe
ccgaatctaccttgccgtgctgggg

SEQ ID NO: 316778 - DNA, 25 bp, Artificial
  Probe
acggcctcttatgtgccttcgaggg

SEQ ID NO: 316779 - DNA, 25 bp, Artificial
  Probe
cttgttgatcaaattcctctatgag

SEQ ID NO: 316780 - DNA, 25 bp, Artificial
  Probe
ccatcctgtgccactttgatcagct

SEQ ID NO: 316781 - DNA, 25 bp, Artificial
  Probe
gccctcttggttctcagtttatcca

SEQ ID NO: 316782 - DNA, 25 bp, Artificial
  Probe
tgctggtgggctatacagtcttcag

SEQ ID NO: 316783 - DNA, 25 bp, Artificial
  Probe
tgccaatgagtctagattgtacctc

SEQ ID NO: 316784 - DNA, 25 bp, Artificial
  Probe
tctgcatggccctcttggttctcag

SEQ ID NO: 316785 - DNA, 25 bp, Artificial
  Probe
ttaccgtctgcatggccctcttggt

SEQ ID NO: 316786 - DNA, 25 bp, Artificial
  Probe
ccccaactgtcgtgccagaattgtg

SEQ ID NO: 316787 - DNA, 25 bp, Artificial
  Probe
ctctctccgaactcgggatcaggtt

SEQ ID NO: 316788 - DNA, 25 bp, Artificial
  Probe
gccaagaagcgcagggtgcacatct

SEQ ID NO: 316789 - DNA, 25 bp, Artificial
  Probe
ctctctctgggcactgtggagcagg

SEQ ID NO: 316790 - DNA, 25 bp, Artificial
  Probe
ccgtgctggggctctatactgtcac

SEQ ID NO: 316791 - DNA, 25 bp, Artificial
  Probe
tactgtcaccttatgctctctctgg

SEQ ID NO: 316792 - DNA, 25 bp, Artificial
  Probe
ggctctatactgtcaccttatgctc

SEQ ID NO: 316793 - DNA, 25 bp, Artificial
  Probe
gtgttcaagaccaatgtgctggtgg

SEQ ID NO: 316794 - DNA, 25 bp, Artificial
  Probe
ccaatgtgctggtgggctatacagt

SEQ ID NO: 316795 - DNA, 25 bp, Artificial
  Probe
gctcgccatcctgtgccactttgat

SEQ ID NO: 316796 - DNA, 25 bp, Artificial
  Probe
gaggacacagagtccccggttcgtc

SEQ ID NO: 316797 - DNA, 25 bp, Artificial
  Probe
tgagtctagattgtacctcagagct

SEQ ID NO: 316798 - DNA, 25 bp, Artificial
  Probe
gctcttccgaatctaccttgccgtg

SEQ ID NO: 316799 - DNA, 25 bp, Artificial
  Probe
atcaacaactctctccgaactcggg

SEQ ID NO: 316800 - DNA, 25 bp, Artificial
  Probe
tctaccttgccgtgctggggctcta

SEQ ID NO: 316801 - DNA, 25 bp, Artificial
  Probe
gcaagaacggcctcttatgtgcctt

SEQ ID NO: 316802 - DNA, 25 bp, Artificial
  Probe
ttatgctctctctgggcactgtgga

SEQ ID NO: 316803 - DNA, 25 bp, Artificial
  Probe
gagtggctcgccatcctgtgccact

SEQ ID NO: 316804 - DNA, 25 bp, Artificial
  Probe
gccttcgaggggactctgatgccaa

SEQ ID NO: 316805 - DNA, 25 bp, Artificial
  Probe
agcggcacagtgagcaagaacggcc

SEQ ID NO: 316806 - DNA, 25 bp, Artificial
  Probe
gatcagctgctcttccgaatctacc

SEQ ID NO: 316807 - DNA, 25 bp, Artificial
  Probe
tcttctttaccgtctgcatggccct

SEQ ID NO: 316808 - DNA, 25 bp, Artificial
  Probe
gtgggctatacagtcttcagggtca

SEQ ID NO: 316809 - DNA, 25 bp, Artificial
  Probe
tgctcttccgaatctaccttgccgt

SEQ ID NO: 316810 - DNA, 25 bp, Artificial
  Probe
ctcttatgtgccttcgaggggactc

SEQ ID NO: 316811 - DNA, 25 bp, Artificial
  Probe
tcactgtaacccatggactgagttt

SEQ ID NO: 316812 - DNA, 25 bp, Artificial
  Probe
tgagaggagcttccacaatgtgccc

SEQ ID NO: 316813 - DNA, 25 bp, Artificial
  Probe
gggaagagcctcgaatcacttgcac

SEQ ID NO: 316814 - DNA, 25 bp, Artificial
  Probe
tatgagatcagctccctggtgcggt

SEQ ID NO: 316815 - DNA, 25 bp, Artificial
  Probe
aggagcttccacaatgtgcccagga

SEQ ID NO: 316816 - DNA, 25 bp, Artificial
  Probe
tcagctccctggtgcggtaccagtg

SEQ ID NO: 316817 - DNA, 25 bp, Artificial
  Probe
tgtgcccaggatgctgagcccagcg

SEQ ID NO: 316818 - DNA, 25 bp, Artificial
  Probe
gcctttccagggaccagtgcaggga

SEQ ID NO: 316819 - DNA, 25 bp, Artificial
  Probe
agcaaattcactgtaacccatggac

SEQ ID NO: 316820 - DNA, 25 bp, Artificial
  Probe
accgtgcatcccactcacatggtgt

SEQ ID NO: 316821 - DNA, 25 bp, Artificial
  Probe
aaattcactgtaacccatggactga

SEQ ID NO: 316822 - DNA, 25 bp, Artificial
  Probe
aagcaaattcactgtaacccatgga

SEQ ID NO: 316823 - DNA, 25 bp, Artificial
  Probe
tccctggtgcggtaccagtgtactg

SEQ ID NO: 316824 - DNA, 25 bp, Artificial
  Probe
gcttccacaatgtgcccaggatgct

SEQ ID NO: 316825 - DNA, 25 bp, Artificial
  Probe
cctggtgcggtaccagtgtactgag

SEQ ID NO: 316826 - DNA, 25 bp, Artificial
  Probe
gcggccagccatgctgaccgtgcat

SEQ ID NO: 316827 - DNA, 25 bp, Artificial
  Probe
agatcagctccctggtgcggtacca

SEQ ID NO: 316828 - DNA, 25 bp, Artificial
  Probe
acccatggactgagtttagagacat

SEQ ID NO: 316829 - DNA, 25 bp, Artificial
  Probe
cttgtcgctttttgtcatataagga

SEQ ID NO: 316830 - DNA, 25 bp, Artificial
  Probe
ccactgagaggagcttccacaatgt

SEQ ID NO: 316831 - DNA, 25 bp, Artificial
  Probe
agggctttgtccagcgccatgtgcc

SEQ ID NO: 316832 - DNA, 25 bp, Artificial
  Probe
agcggccagccatgctgaccgtgca

SEQ ID NO: 316833 - DNA, 25 bp, Artificial
  Probe
ccagcatggcccactgagaggagct

SEQ ID NO: 316834 - DNA, 25 bp, Artificial
  Probe
gtcgctttttgtcatataaggaatc

SEQ ID NO: 316835 - DNA, 25 bp, Artificial
  Probe
tgcatcccactcacatggtgtcttc

SEQ ID NO: 316836 - DNA, 25 bp, Artificial
  Probe
ggtaccagtgtactgagggctttgt

SEQ ID NO: 316837 - DNA, 25 bp, Artificial
  Probe
ctgagggctttgtccagcgccatgt

SEQ ID NO: 316838 - DNA, 25 bp, Artificial
  Probe
ccatggactgagtttagagacattt

SEQ ID NO: 316839 - DNA, 25 bp, Artificial
  Probe
actgagggctttgtccagcgccatg

SEQ ID NO: 316840 - DNA, 25 bp, Artificial
  Probe
atcccactcacatggtgtcttcttg

SEQ ID NO: 316841 - DNA, 25 bp, Artificial
  Probe
agcggtggagcatgccagaaccctt

SEQ ID NO: 316842 - DNA, 25 bp, Artificial
  Probe
gcatcccactcacatggtgtcttct

SEQ ID NO: 316843 - DNA, 25 bp, Artificial
  Probe
tcttgtcgctttttgtcatataagg

SEQ ID NO: 316844 - DNA, 25 bp, Artificial
  Probe
tgcggtaccagtgtactgagggctt

SEQ ID NO: 316845 - DNA, 25 bp, Artificial
  Probe
tgtactgagggctttgtccagcgcc

SEQ ID NO: 316846 - DNA, 25 bp, Artificial
  Probe
gctttttgtcatataaggaatccat

SEQ ID NO: 316847 - DNA, 25 bp, Artificial
  Probe
cacaatgtgcccaggatgctgagcc

SEQ ID NO: 316848 - DNA, 25 bp, Artificial
  Probe
caacacctacaagcacaggctacag

SEQ ID NO: 316849 - DNA, 25 bp, Artificial
  Probe
gtactgagggctttgtccagcgcca

SEQ ID NO: 316850 - DNA, 25 bp, Artificial
  Probe
accagtgtactgagggctttgtcca

SEQ ID NO: 316851 - DNA, 25 bp, Artificial
  Probe
tgcccaggatgctgagcccagcggc

SEQ ID NO: 316852 - DNA, 25 bp, Artificial
  Probe
gtggagcatgccagaacccttgggc

SEQ ID NO: 316853 - DNA, 25 bp, Artificial
  Probe
acctacaagcacaggctacagaagc

SEQ ID NO: 316854 - DNA, 25 bp, Artificial
  Probe
gatcgctatgagatcagctccctgg

SEQ ID NO: 316855 - DNA, 25 bp, Artificial
  Probe
gagcctcgaatcacttgcacagacc

SEQ ID NO: 316856 - DNA, 25 bp, Artificial
  Probe
cacatggtgtcttcttgtcgctttt

SEQ ID NO: 316857 - DNA, 25 bp, Artificial
  Probe
cccagcactgcctaaagttaggcgt

SEQ ID NO: 316858 - DNA, 25 bp, Artificial
  Probe
acactgcaacccaagtacttggcag

SEQ ID NO: 316859 - DNA, 25 bp, Artificial
  Probe
gttggtagactcctggtctagcatg

SEQ ID NO: 316860 - DNA, 25 bp, Artificial
  Probe
atgaaaccccgagttcaatccccag

SEQ ID NO: 316861 - DNA, 25 bp, Artificial
  Probe
ctgcaacccaagtacttggcaggaa

SEQ ID NO: 316862 - DNA, 25 bp, Artificial
  Probe
gtggcagcacacactgcaacccaag

SEQ ID NO: 316863 - DNA, 25 bp, Artificial
  Probe
ggacacagatgctgcctggcaaaaa

SEQ ID NO: 316864 - DNA, 25 bp, Artificial
  Probe
gcctggcaaaaagttcctgattttg

SEQ ID NO: 316865 - DNA, 25 bp, Artificial
  Probe
aggcgtggcagcacacactgcaacc

SEQ ID NO: 316866 - DNA, 25 bp, Artificial
  Probe
tggcagcacacactgcaacccaagt

SEQ ID NO: 316867 - DNA, 25 bp, Artificial
  Probe
tctagcatgcatgaaaccccgagtt

SEQ ID NO: 316868 - DNA, 25 bp, Artificial
  Probe
ctgcctaaagttaggcgtggcagca

SEQ ID NO: 316869 - DNA, 25 bp, Artificial
  Probe
atgctatagttcagttggtagactc

SEQ ID NO: 316870 - DNA, 25 bp, Artificial
  Probe
tttgagggcaatgtgggctacacag

SEQ ID NO: 316871 - DNA, 25 bp, Artificial
  Probe
actcctggtctagcatgcatgaaac

SEQ ID NO: 316872 - DNA, 25 bp, Artificial
  Probe
cctggcaaaaagttcctgattttga

SEQ ID NO: 316873 - DNA, 25 bp, Artificial
  Probe
ggtagactcctggtctagcatgcat

SEQ ID NO: 316874 - DNA, 25 bp, Artificial
  Probe
gcaatgtgggctacacaggaccttg

SEQ ID NO: 316875 - DNA, 25 bp, Artificial
  Probe
tggtctagcatgcatgaaaccccga

SEQ ID NO: 316876 - DNA, 25 bp, Artificial
  Probe
acagatgctgcctggcaaaaagttc

SEQ ID NO: 316877 - DNA, 25 bp, Artificial
  Probe
cagttggtagactcctggtctagca

SEQ ID NO: 316878 - DNA, 25 bp, Artificial
  Probe
cacaggaccttgtcttgaaagaaag

SEQ ID NO: 316879 - DNA, 25 bp, Artificial
  Probe
taaagttaggcgtggcagcacacac

SEQ ID NO: 316880 - DNA, 25 bp, Artificial
  Probe
atgtgggctacacaggaccttgtct

SEQ ID NO: 316881 - DNA, 25 bp, Artificial
  Probe
ggagcatccagtgtataacatggta

SEQ ID NO: 316882 - DNA, 25 bp, Artificial
  Probe
gttcagttggtagactcctggtcta

SEQ ID NO: 316883 - DNA, 25 bp, Artificial
  Probe
gaaggacacagatgctgcctggcaa

SEQ ID NO: 316884 - DNA, 25 bp, Artificial
  Probe
ggcaatgtgggctacacaggacctt

SEQ ID NO: 316885 - DNA, 25 bp, Artificial
  Probe
tggggagcatccagtgtataacatg

SEQ ID NO: 316886 - DNA, 25 bp, Artificial
  Probe
catccagtgtataacatggtatata

SEQ ID NO: 316887 - DNA, 25 bp, Artificial
  Probe
agcatgcatgaaaccccgagttcaa

SEQ ID NO: 316888 - DNA, 25 bp, Artificial
  Probe
ggcagcacacactgcaacccaagta

SEQ ID NO: 316889 - DNA, 25 bp, Artificial
  Probe
aaggacacagatgctgcctggcaaa

SEQ ID NO: 316890 - DNA, 25 bp, Artificial
  Probe
agactcctggtctagcatgcatgaa

SEQ ID NO: 316891 - DNA, 25 bp, Artificial
  Probe
ttggtagactcctggtctagcatgc

SEQ ID NO: 316892 - DNA, 25 bp, Artificial
  Probe
actgcctaaagttaggcgtggcagc

SEQ ID NO: 316893 - DNA, 25 bp, Artificial
  Probe
ctcagcttcatagcaggtttgaggg

SEQ ID NO: 316894 - DNA, 25 bp, Artificial
  Probe
tatagttcagttggtagactcctgg

SEQ ID NO: 316895 - DNA, 25 bp, Artificial
  Probe
atagttcagttggtagactcctggt

SEQ ID NO: 316896 - DNA, 25 bp, Artificial
  Probe
caagtacttggcaggaagattcaaa

SEQ ID NO: 316897 - DNA, 25 bp, Artificial
  Probe
gcaaaaagttcctgattttgagcat

SEQ ID NO: 316898 - DNA, 25 bp, Artificial
  Probe
aatgtgggctacacaggaccttgtc

SEQ ID NO: 316899 - DNA, 25 bp, Artificial
  Probe
gcacacactgcaacccaagtacttg

SEQ ID NO: 316900 - DNA, 25 bp, Artificial
  Probe
aacccaagtacttggcaggaagatt

SEQ ID NO: 316901 - DNA, 25 bp, Artificial
  Probe
gtctagcatgcatgaaaccccgagt

SEQ ID NO: 316902 - DNA, 25 bp, Artificial
  Probe
gttaggcgtggcagcacacactgca

SEQ ID NO: 316903 - DNA, 25 bp, Artificial
  Probe
atcactctggccatcattggggtct

SEQ ID NO: 316904 - DNA, 25 bp, Artificial
  Probe
cagcaatgaccaccaactgcctgat

SEQ ID NO: 316905 - DNA, 25 bp, Artificial
  Probe
tgccttcagtctgttggctaaccca

SEQ ID NO: 316906 - DNA, 25 bp, Artificial
  Probe
tctctgccttcagtctgttggctaa

SEQ ID NO: 316907 - DNA, 25 bp, Artificial
  Probe
agtcctgatgatagatctctgcctt

SEQ ID NO: 316908 - DNA, 25 bp, Artificial
  Probe
cagaagagtcctgatgatagatctc

SEQ ID NO: 316909 - DNA, 25 bp, Artificial
  Probe
atgatagatctctgccttcagtctg

SEQ ID NO: 316910 - DNA, 25 bp, Artificial
  Probe
ctgccttcagtctgttggctaaccc

SEQ ID NO: 316911 - DNA, 25 bp, Artificial
  Probe
catcattggggtctgaggaacaatt

SEQ ID NO: 316912 - DNA, 25 bp, Artificial
  Probe
cactctggccatcattggggtctga

SEQ ID NO: 316913 - DNA, 25 bp, Artificial
  Probe
tcactctggccatcattggggtctg

SEQ ID NO: 316914 - DNA, 25 bp, Artificial
  Probe
agaagagtcctgatgatagatctct

SEQ ID NO: 316915 - DNA, 25 bp, Artificial
  Probe
gaccaatagcactgcctcggcctgt

SEQ ID NO: 316916 - DNA, 25 bp, Artificial
  Probe
tgatgatagatctctgccttcagtc

SEQ ID NO: 316917 - DNA, 25 bp, Artificial
  Probe
acttccaggaagaccaatagcactg

SEQ ID NO: 316918 - DNA, 25 bp, Artificial
  Probe
tctggccatcattggggtctgagga

SEQ ID NO: 316919 - DNA, 25 bp, Artificial
  Probe
ccttcagtctgttggctaacccaat

SEQ ID NO: 316920 - DNA, 25 bp, Artificial
  Probe
tagatctctgccttcagtctgttgg

SEQ ID NO: 316921 - DNA, 25 bp, Artificial
  Probe
tacttccaggaagaccaatagcact

SEQ ID NO: 316922 - DNA, 25 bp, Artificial
  Probe
ttggctaacccaatccccatgatga

SEQ ID NO: 316923 - DNA, 25 bp, Artificial
  Probe
agcaatgaccaccaactgcctgatc

SEQ ID NO: 316924 - DNA, 25 bp, Artificial
  Probe
ccatcattggggtctgaggaacaat

SEQ ID NO: 316925 - DNA, 25 bp, Artificial
  Probe
gatctctgccttcagtctgttggct

SEQ ID NO: 316926 - DNA, 25 bp, Artificial
  Probe
agaccaatagcactgcctcggcctg

SEQ ID NO: 316927 - DNA, 25 bp, Artificial
  Probe
gcaatgaccaccaactgcctgatca

SEQ ID NO: 316928 - DNA, 25 bp, Artificial
  Probe
ggaagaccaatagcactgcctcggc

SEQ ID NO: 316929 - DNA, 25 bp, Artificial
  Probe
aagaccaatagcactgcctcggcct

SEQ ID NO: 316930 - DNA, 25 bp, Artificial
  Probe
cttccaggaagaccaatagcactgc

SEQ ID NO: 316931 - DNA, 25 bp, Artificial
  Probe
tctacttccaggaagaccaatagca

SEQ ID NO: 316932 - DNA, 25 bp, Artificial
  Probe
gtctgttggctaacccaatccccat

SEQ ID NO: 316933 - DNA, 25 bp, Artificial
  Probe
ctacttccaggaagaccaatagcac

SEQ ID NO: 316934 - DNA, 25 bp, Artificial
  Probe
gttggctaacccaatccccatgatg

SEQ ID NO: 316935 - DNA, 25 bp, Artificial
  Probe
atctctgccttcagtctgttggcta

SEQ ID NO: 316936 - DNA, 25 bp, Artificial
  Probe
gtcctgatgatagatctctgccttc

SEQ ID NO: 316937 - DNA, 25 bp, Artificial
  Probe
aactgcctgatcactctggccatca

SEQ ID NO: 316938 - DNA, 25 bp, Artificial
  Probe
ctgatgatagatctctgccttcagt

SEQ ID NO: 316939 - DNA, 25 bp, Artificial
  Probe
actgcctgatcactctggccatcat

SEQ ID NO: 316940 - DNA, 25 bp, Artificial
  Probe
agagtcctgatgatagatctctgcc

SEQ ID NO: 316941 - DNA, 25 bp, Artificial
  Probe
gatgatagatctctgccttcagtct

SEQ ID NO: 316942 - DNA, 25 bp, Artificial
  Probe
tcctgatgatagatctctgccttca

SEQ ID NO: 316943 - DNA, 25 bp, Artificial
  Probe
aatagcactgcctcggcctgtcctt

SEQ ID NO: 316944 - DNA, 25 bp, Artificial
  Probe
tctgccttcagtctgttggctaacc

SEQ ID NO: 316945 - DNA, 25 bp, Artificial
  Probe
caggaagaccaatagcactgcctcg

SEQ ID NO: 316946 - DNA, 25 bp, Artificial
  Probe
agtctgttggctaacccaatcccca

SEQ ID NO: 316947 - DNA, 25 bp, Artificial
  Probe
ttccaggaagaccaatagcactgcc

SEQ ID NO: 316948 - DNA, 25 bp, Artificial
  Probe
actctggccatcattggggtctgag

SEQ ID NO: 316949 - DNA, 25 bp, Artificial
  Probe
ttacatgagcctgatatgacagagg

SEQ ID NO: 316950 - DNA, 25 bp, Artificial
  Probe
agcaagagaaagcttccaggggaca

SEQ ID NO: 316951 - DNA, 25 bp, Artificial
  Probe
atcagttacttaagcaagagaaagc

SEQ ID NO: 316952 - DNA, 25 bp, Artificial
  Probe
aacagcatgagaagtccccagagcc

SEQ ID NO: 316953 - DNA, 25 bp, Artificial
  Probe
tcaggagtcagaactgcaagtggaa

SEQ ID NO: 316954 - DNA, 25 bp, Artificial
  Probe
tcatgaaccagaactgcacctggga

SEQ ID NO: 316955 - DNA, 25 bp, Artificial
  Probe
cagcatgagaagtccccagagccag

SEQ ID NO: 316956 - DNA, 25 bp, Artificial
  Probe
gttacatgagcctgatatgacagag

SEQ ID NO: 316957 - DNA, 25 bp, Artificial
  Probe
actacaaagaagcagcagcacagcc

SEQ ID NO: 316958 - DNA, 25 bp, Artificial
  Probe
cacctgggaaagcagcaggaacaac

SEQ ID NO: 316959 - DNA, 25 bp, Artificial
  Probe
gagctggatgactcacatctagaac

SEQ ID NO: 316960 - DNA, 25 bp, Artificial
  Probe
gaaagaagactctctcactacaaag

SEQ ID NO: 316961 - DNA, 25 bp, Artificial
  Probe
tgcacctgggaaagcagcaggagtc

SEQ ID NO: 316962 - DNA, 25 bp, Artificial
  Probe
aaagcagcaggagtcacatgagcct

SEQ ID NO: 316963 - DNA, 25 bp, Artificial
  Probe
aaagcagcaggagttacatgagcct

SEQ ID NO: 316964 - DNA, 25 bp, Artificial
  Probe
accagcgattggatcaagaactagt

SEQ ID NO: 316965 - DNA, 25 bp, Artificial
  Probe
caatccaaccagtgaaagaagactc

SEQ ID NO: 316966 - DNA, 25 bp, Artificial
  Probe
aaccagaactgcacctgggaaagca

SEQ ID NO: 316967 - DNA, 25 bp, Artificial
  Probe
cagagtctttatgaaccagaactgc

SEQ ID NO: 316968 - DNA, 25 bp, Artificial
  Probe
tcagttacttaagcaagagaaagct

SEQ ID NO: 316969 - DNA, 25 bp, Artificial
  Probe
aaattggagaacctgacacagaagg

SEQ ID NO: 316970 - DNA, 25 bp, Artificial
  Probe
cagagtcttcatgaaccagaactgc

SEQ ID NO: 316971 - DNA, 25 bp, Artificial
  Probe
cagaactgcacctgggaaagcagca

SEQ ID NO: 316972 - DNA, 25 bp, Artificial
  Probe
tctgaatcagttacttaagcaagag

SEQ ID NO: 316973 - DNA, 25 bp, Artificial
  Probe
agagactcagccaatccaaccagtg

SEQ ID NO: 316974 - DNA, 25 bp, Artificial
  Probe
ccagaactgcacctgggaaagcagc

SEQ ID NO: 316975 - DNA, 25 bp, Artificial
  Probe
agaagtccccagagccagaactgca

SEQ ID NO: 316976 - DNA, 25 bp, Artificial
  Probe
ctcagccaatccaaccagtgaaaga

SEQ ID NO: 316977 - DNA, 25 bp, Artificial
  Probe
gcacctgggaaagcagcaggaacaa

SEQ ID NO: 316978 - DNA, 25 bp, Artificial
  Probe
tacaaagaagcagcagcacagccat

SEQ ID NO: 316979 - DNA, 25 bp, Artificial
  Probe
acctgacacagaaggagaagcagat

SEQ ID NO: 316980 - DNA, 25 bp, Artificial
  Probe
atctagaacaggagaaggagctctt

SEQ ID NO: 316981 - DNA, 25 bp, Artificial
  Probe
agcacaaattggagaacctgacaca

SEQ ID NO: 316982 - DNA, 25 bp, Artificial
  Probe
aagagaaagcttccaggggacagga

SEQ ID NO: 316983 - DNA, 25 bp, Artificial
  Probe
agaagcagagtcttcatgaaccaga

SEQ ID NO: 316984 - DNA, 25 bp, Artificial
  Probe
aaagcaattagtaccaagcactgac

SEQ ID NO: 316985 - DNA, 25 bp, Artificial
  Probe
ccagagccagaactgcacctgggaa

SEQ ID NO: 316986 - DNA, 25 bp, Artificial
  Probe
aaagtctgaatcagttacttaagca

SEQ ID NO: 316987 - DNA, 25 bp, Artificial
  Probe
acctgggaaagcagcaggagtcaca

SEQ ID NO: 316988 - DNA, 25 bp, Artificial
  Probe
gcagcacagccatgaagtgcagtga

SEQ ID NO: 316989 - DNA, 25 bp, Artificial
  Probe
gtccaagagactcagccaatccaac

SEQ ID NO: 316990 - DNA, 25 bp, Artificial
  Probe
acctgggaaagcagcaggagttaca

SEQ ID NO: 316991 - DNA, 25 bp, Artificial
  Probe
gaaggagctcttggaccagcgattg

SEQ ID NO: 316992 - DNA, 25 bp, Artificial
  Probe
agtatgaaggctaccaaagatcaaa

SEQ ID NO: 316993 - DNA, 25 bp, Artificial
  Probe
gtcacatgagcctgatatgacagag

SEQ ID NO: 316994 - DNA, 25 bp, Artificial
  Probe
ggctaccaaagatcaaaaagtctga

SEQ ID NO: 316995 - DNA, 25 bp, Artificial
  Probe
ctgccgtgagcctccagatcaaact

SEQ ID NO: 316996 - DNA, 25 bp, Artificial
  Probe
cgtgtcacggcaacctcatgaacca

SEQ ID NO: 316997 - DNA, 25 bp, Artificial
  Probe
cagctcaaggggaaccatttcccaa

SEQ ID NO: 316998 - DNA, 25 bp, Artificial
  Probe
aacggcagtgccaatgccctcttta

SEQ ID NO: 316999 - DNA, 25 bp, Artificial
  Probe
catgccaatgggacagagaagacca

SEQ ID NO: 317000 - DNA, 25 bp, Artificial
  Probe
acaagtaccatgtgggccatgtgga

SEQ ID NO: 317001 - DNA, 25 bp, Artificial
  Probe
ttacacagctcaaggggaaccattt

SEQ ID NO: 317002 - DNA, 25 bp, Artificial
  Probe
atgcgactacagacgtcatgagggg

SEQ ID NO: 317003 - DNA, 25 bp, Artificial
  Probe
gagtcaactggctcaactcaacggc

SEQ ID NO: 317004 - DNA, 25 bp, Artificial
  Probe
gaaccatttcccaacaacgtggata

SEQ ID NO: 317005 - DNA, 25 bp, Artificial
  Probe
ttgtgcccctactgctcattctgca

SEQ ID NO: 317006 - DNA, 25 bp, Artificial
  Probe
accatgtgggccatgtggatgtgcc

SEQ ID NO: 317007 - DNA, 25 bp, Artificial
  Probe
atcacctgggatcagaaaaacctca

SEQ ID NO: 317008 - DNA, 25 bp, Artificial
  Probe
gcctccagatcaaactcaatgcgac

SEQ ID NO: 317009 - DNA, 25 bp, Artificial
  Probe
agcaaagaagccttccaaaggaaga

SEQ ID NO: 317010 - DNA, 25 bp, Artificial
  Probe
ccaacaacgtggataagctatgtgc

SEQ ID NO: 317011 - DNA, 25 bp, Artificial
  Probe
tatttcctattacacagctcaaggg

SEQ ID NO: 317012 - DNA, 25 bp, Artificial
  Probe
agaagccttccaaaggaagaagttg

SEQ ID NO: 317013 - DNA, 25 bp, Artificial
  Probe
gatgtgccctgtgtccccgacaact

SEQ ID NO: 317014 - DNA, 25 bp, Artificial
  Probe
tgtaaatgccacctgcgccatacgc

SEQ ID NO: 317015 - DNA, 25 bp, Artificial
  Probe
atgccaatgggacagagaagaccaa

SEQ ID NO: 317016 - DNA, 25 bp, Artificial
  Probe
agagaagaccaagttggtcgagctg

SEQ ID NO: 317017 - DNA, 25 bp, Artificial
  Probe
catgtgggccatgtggatgtgccct

SEQ ID NO: 317018 - DNA, 25 bp, Artificial
  Probe
cagctcctggggacatacaagcaag

SEQ ID NO: 317019 - DNA, 25 bp, Artificial
  Probe
cggcagtgccaatgccctctttatt

SEQ ID NO: 317020 - DNA, 25 bp, Artificial
  Probe
ctctagcaaagaagccttccaaagg

SEQ ID NO: 317021 - DNA, 25 bp, Artificial
  Probe
cctgaccaacatcacctgggatcag

SEQ ID NO: 317022 - DNA, 25 bp, Artificial
  Probe
actctagcaaagaagccttccaaag

SEQ ID NO: 317023 - DNA, 25 bp, Artificial
  Probe
gaagccttccaaaggaagaagttgg

SEQ ID NO: 317024 - DNA, 25 bp, Artificial
  Probe
gccatgtggatgtgccctgtgtccc

SEQ ID NO: 317025 - DNA, 25 bp, Artificial
  Probe
attctgcactggaaacacggggcag

SEQ ID NO: 317026 - DNA, 25 bp, Artificial
  Probe
cctttccatgccaatgggacagaga

SEQ ID NO: 317027 - DNA, 25 bp, Artificial
  Probe
tcaagagtcaactggctcaactcaa

SEQ ID NO: 317028 - DNA, 25 bp, Artificial
  Probe
ccctactgctcattctgcactggaa

SEQ ID NO: 317029 - DNA, 25 bp, Artificial
  Probe
caagttggtcgagctgtatcggatg

SEQ ID NO: 317030 - DNA, 25 bp, Artificial
  Probe
cttccaaaggaagaagttgggctgc

SEQ ID NO: 317031 - DNA, 25 bp, Artificial
  Probe
cgtgctttgccgtctgtgcaacaag

SEQ ID NO: 317032 - DNA, 25 bp, Artificial
  Probe
gatcaaactcaatgcgactacagac

SEQ ID NO: 317033 - DNA, 25 bp, Artificial
  Probe
cagatcaaactcaatgcgactacag

SEQ ID NO: 317034 - DNA, 25 bp, Artificial
  Probe
aactcaacggcagtgccaatgccct

SEQ ID NO: 317035 - DNA, 25 bp, Artificial
  Probe
tggctcaactcaacggcagtgccaa

SEQ ID NO: 317036 - DNA, 25 bp, Artificial
  Probe
gtggatgtgccctgtgtccccgaca

SEQ ID NO: 317037 - DNA, 25 bp, Artificial
  Probe
gctgccagctcctggggacatacaa

SEQ ID NO: 317038 - DNA, 25 bp, Artificial
  Probe
ttgggctgccagctcctggggacat

SEQ ID NO: 317039 - DNA, 25 bp, Artificial
  Probe
ctgtgtccccgacaactctagcaaa

SEQ ID NO: 317040 - DNA, 25 bp, Artificial
  Probe
gacaactctagcaaagaagccttcc

SEQ ID NO: 317041 - DNA, 25 bp, Artificial
  Probe
gccccgcaggggagaaccacctttg

SEQ ID NO: 317042 - DNA, 25 bp, Artificial
  Probe
ccactgaagctgaggcgcattctga

SEQ ID NO: 317043 - DNA, 25 bp, Artificial
  Probe
catggagacagtggtggacattttc

SEQ ID NO: 317044 - DNA, 25 bp, Artificial
  Probe
ccactgatgtgatgcggccccgcag

SEQ ID NO: 317045 - DNA, 25 bp, Artificial
  Probe
gactctcataaaagagacagactac

SEQ ID NO: 317046 - DNA, 25 bp, Artificial
  Probe
atgagttcactcaccgtaccctagc

SEQ ID NO: 317047 - DNA, 25 bp, Artificial
  Probe
aagacgttctgagacacatggcgca

SEQ ID NO: 317048 - DNA, 25 bp, Artificial
  Probe
cgggagctaatcttggctataaaaa

SEQ ID NO: 317049 - DNA, 25 bp, Artificial
  Probe
ggaaactggggctccgacaatgcct

SEQ ID NO: 317050 - DNA, 25 bp, Artificial
  Probe
ccacctttgtcagtactaacccagg

SEQ ID NO: 317051 - DNA, 25 bp, Artificial
  Probe
catcatgtacttcacagaggagccc

SEQ ID NO: 317052 - DNA, 25 bp, Artificial
  Probe
aagctgaggcgcattctgaacctga

SEQ ID NO: 317053 - DNA, 25 bp, Artificial
  Probe
cgagagattcggagcgcctcatagg

SEQ ID NO: 317054 - DNA, 25 bp, Artificial
  Probe
gaacctgagcccttttactgtcaca

SEQ ID NO: 317055 - DNA, 25 bp, Artificial
  Probe
gtttcctgtggtggtctcgagagat

SEQ ID NO: 317056 - DNA, 25 bp, Artificial
  Probe
aacctgagcccttttactgtcacag

SEQ ID NO: 317057 - DNA, 25 bp, Artificial
  Probe
aaggatgagttcactcaccgtaccc

SEQ ID NO: 317058 - DNA, 25 bp, Artificial
  Probe
acagcccacatccactgaagctgag

SEQ ID NO: 317059 - DNA, 25 bp, Artificial
  Probe
gagaaccacctttgtcagtactaac

SEQ ID NO: 317060 - DNA, 25 bp, Artificial
  Probe
tggtctcgagagattcggagcgcct

SEQ ID NO: 317061 - DNA, 25 bp, Artificial
  Probe
ccatcatgtacttcacagaggagcc

SEQ ID NO: 317062 - DNA, 25 bp, Artificial
  Probe
gggctccgacaatgcctggtgacac

SEQ ID NO: 317063 - DNA, 25 bp, Artificial
  Probe
tcaccgtaccctagccactgatgtg

SEQ ID NO: 317064 - DNA, 25 bp, Artificial
  Probe
cgacaatgcctggtgacacggagtg

SEQ ID NO: 317065 - DNA, 25 bp, Artificial
  Probe
tgggaggcttcttgggatcatcaca

SEQ ID NO: 317066 - DNA, 25 bp, Artificial
  Probe
atgtggagactctcataaaagagac

SEQ ID NO: 317067 - DNA, 25 bp, Artificial
  Probe
atgcggccccgcaggggagaaccac

SEQ ID NO: 317068 - DNA, 25 bp, Artificial
  Probe
ttgtcagtactaacccaggacagca

SEQ ID NO: 317069 - DNA, 25 bp, Artificial
  Probe
cccatttcttgatgtgaaggatgag

SEQ ID NO: 317070 - DNA, 25 bp, Artificial
  Probe
cgtaccctagccactgatgtgatgc

SEQ ID NO: 317071 - DNA, 25 bp, Artificial
  Probe
attcggagcgcctcataggctttgc

SEQ ID NO: 317072 - DNA, 25 bp, Artificial
  Probe
tacaatgggtttcctgtggtggtct

SEQ ID NO: 317073 - DNA, 25 bp, Artificial
  Probe
acccccatggagacagtggtggaca

SEQ ID NO: 317074 - DNA, 25 bp, Artificial
  Probe
aatgggtttcctgtggtggtctcga

SEQ ID NO: 317075 - DNA, 25 bp, Artificial
  Probe
caggggagaaccacctttgtcagta

SEQ ID NO: 317076 - DNA, 25 bp, Artificial
  Probe
ggagcgcctcataggctttgcccag

SEQ ID NO: 317077 - DNA, 25 bp, Artificial
  Probe
aattccatcatgtacttcacagagg

SEQ ID NO: 317078 - DNA, 25 bp, Artificial
  Probe
tggtggacattttccggaaactggg

SEQ ID NO: 317079 - DNA, 25 bp, Artificial
  Probe
aggcttcttgggatcatcacaaaaa

SEQ ID NO: 317080 - DNA, 25 bp, Artificial
  Probe
attctgaacctgagcccttttactg

SEQ ID NO: 317081 - DNA, 25 bp, Artificial
  Probe
cagtggtggacattttccggaaact

SEQ ID NO: 317082 - DNA, 25 bp, Artificial
  Probe
tcctgtggtggtctcgagagattcg

SEQ ID NO: 317083 - DNA, 25 bp, Artificial
  Probe
cctcataggctttgcccagaggcgg

SEQ ID NO: 317084 - DNA, 25 bp, Artificial
  Probe
gtctcgagagattcggagcgcctca

SEQ ID NO: 317085 - DNA, 25 bp, Artificial
  Probe
agtactaacccaggacagcatgact

SEQ ID NO: 317086 - DNA, 25 bp, Artificial
  Probe
aagagacagactacaatgggtttcc

SEQ ID NO: 317087 - DNA, 25 bp, Artificial
  Probe
cattaaaaccagaggggtcccagag

SEQ ID NO: 317088 - DNA, 25 bp, Artificial
  Probe
tgacagaccaaatggcgaggtgaaa

SEQ ID NO: 317089 - DNA, 25 bp, Artificial
  Probe
ttgactatggcgaacagcgaacgct

SEQ ID NO: 317090 - DNA, 25 bp, Artificial
  Probe
ttgtgtggtttgtcgtggatccccc

SEQ ID NO: 317091 - DNA, 25 bp, Artificial
  Probe
atacagtatcctcctgatggtcacc

SEQ ID NO: 317092 - DNA, 25 bp, Artificial
  Probe
cacttactgtttccatgagtttaag

SEQ ID NO: 317093 - DNA, 25 bp, Artificial
  Probe
gagtcttgaaaccaacacgtcttct

SEQ ID NO: 317094 - DNA, 25 bp, Artificial
  Probe
tttaagtgcttcagtgtctctggga

SEQ ID NO: 317095 - DNA, 25 bp, Artificial
  Probe
ttccctgggatacagtatcctcctg

SEQ ID NO: 317096 - DNA, 25 bp, Artificial
  Probe
ccacaccatcattgactatggcgaa

SEQ ID NO: 317097 - DNA, 25 bp, Artificial
  Probe
gctaccatgcaaagcaaactgatcc

SEQ ID NO: 317098 - DNA, 25 bp, Artificial
  Probe
atttttcatccagagcagaatgttc

SEQ ID NO: 317099 - DNA, 25 bp, Artificial
  Probe
catcattgactatggcgaacagcga

SEQ ID NO: 317100 - DNA, 25 bp, Artificial
  Probe
agcaaactgatccaaaagggaaatg

SEQ ID NO: 317101 - DNA, 25 bp, Artificial
  Probe
gcaaagcaaactgatccaaaaggga

SEQ ID NO: 317102 - DNA, 25 bp, Artificial
  Probe
catgcaaagcaaactgatccaaaag

SEQ ID NO: 317103 - DNA, 25 bp, Artificial
  Probe
agagtcttgaaaccaacacgtcttc

SEQ ID NO: 317104 - DNA, 25 bp, Artificial
  Probe
agacgttcaatgaagccaaacctat

SEQ ID NO: 317105 - DNA, 25 bp, Artificial
  Probe
acgtgcatcatttggttagctttca

SEQ ID NO: 317106 - DNA, 25 bp, Artificial
  Probe
gtgaactctgtgagagtcttgaaac

SEQ ID NO: 317107 - DNA, 25 bp, Artificial
  Probe
agccaaacctattggctttacaatg

SEQ ID NO: 317108 - DNA, 25 bp, Artificial
  Probe
tgccattaaaaccagaggggtccca

SEQ ID NO: 317109 - DNA, 25 bp, Artificial
  Probe
caaactgatccaaaagggaaatgac

SEQ ID NO: 317110 - DNA, 25 bp, Artificial
  Probe
ccctgggatacagtatcctcctgat

SEQ ID NO: 317111 - DNA, 25 bp, Artificial
  Probe
actatggcgaacagcgaacgctgga

SEQ ID NO: 317112 - DNA, 25 bp, Artificial
  Probe
tttcatccagagcagaatgttcaaa

SEQ ID NO: 317113 - DNA, 25 bp, Artificial
  Probe
aacagcgaacgctggatcctgagaa

SEQ ID NO: 317114 - DNA, 25 bp, Artificial
  Probe
ggcgaacagcgaacgctggatcctg

SEQ ID NO: 317115 - DNA, 25 bp, Artificial
  Probe
aaatgacagaccaaatggcgaggtg

SEQ ID NO: 317116 - DNA, 25 bp, Artificial
  Probe
catccagagcagaatgttcaaaaac

SEQ ID NO: 317117 - DNA, 25 bp, Artificial
  Probe
taatttttcatccagagcagaatgt

SEQ ID NO: 317118 - DNA, 25 bp, Artificial
  Probe
tcagctacagtaatcattcgatctg

SEQ ID NO: 317119 - DNA, 25 bp, Artificial
  Probe
tttccatgagtttaagtgcttcagt

SEQ ID NO: 317120 - DNA, 25 bp, Artificial
  Probe
acgctggatcctgagaacgccaggg

SEQ ID NO: 317121 - DNA, 25 bp, Artificial
  Probe
actgtttatgccattaaaaccagag

SEQ ID NO: 317122 - DNA, 25 bp, Artificial
  Probe
ggatctgtcactcatttgttccctg

SEQ ID NO: 317123 - DNA, 25 bp, Artificial
  Probe
ggtcccagagacgttcaatgaagcc

SEQ ID NO: 317124 - DNA, 25 bp, Artificial
  Probe
gtgatatttcggatctgtcactcat

SEQ ID NO: 317125 - DNA, 25 bp, Artificial
  Probe
cagaggggtcccagagacgttcaat

SEQ ID NO: 317126 - DNA, 25 bp, Artificial
  Probe
gccattaaaaccagaggggtcccag

SEQ ID NO: 317127 - DNA, 25 bp, Artificial
  Probe
atgagtttaagtgcttcagtgtctc

SEQ ID NO: 317128 - DNA, 25 bp, Artificial
  Probe
gcatcatttggttagctttcatccc

SEQ ID NO: 317129 - DNA, 25 bp, Artificial
  Probe
tggcgaacagcgaacgctggatcct

SEQ ID NO: 317130 - DNA, 25 bp, Artificial
  Probe
gctgtggtcacagctgctaccatgc

SEQ ID NO: 317131 - DNA, 25 bp, Artificial
  Probe
actctgtgagagtcttgaaaccaac

SEQ ID NO: 317132 - DNA, 25 bp, Artificial
  Probe
gacaacgacacttactgtttccatg

SEQ ID NO: 317133 - DNA, 25 bp, Artificial
  Probe
atatcctgggcacgaccatgctgcc

SEQ ID NO: 317134 - DNA, 25 bp, Artificial
  Probe
cagcctggaaaactaccaggtggcc

SEQ ID NO: 317135 - DNA, 25 bp, Artificial
  Probe
gcctggaaaactaccaggtggcccg

SEQ ID NO: 317136 - DNA, 25 bp, Artificial
  Probe
gctgtcgttgcctactatatcctgg

SEQ ID NO: 317137 - DNA, 25 bp, Artificial
  Probe
ggctgtgctgtaccacacggaggac

SEQ ID NO: 317138 - DNA, 25 bp, Artificial
  Probe
cttccacgagcatcggattttctac

SEQ ID NO: 317139 - DNA, 25 bp, Artificial
  Probe
atcgccatggtgaagatcaaccagt

SEQ ID NO: 317140 - DNA, 25 bp, Artificial
  Probe
tgcttctcaacgactcgggagaatg

SEQ ID NO: 317141 - DNA, 25 bp, Artificial
  Probe
tatatcctgggcacgaccatgctgc

SEQ ID NO: 317142 - DNA, 25 bp, Artificial
  Probe
ggaggacactcgtgaccagaaccaa

SEQ ID NO: 317143 - DNA, 25 bp, Artificial
  Probe
cggtggcctcctcattatcgccatg

SEQ ID NO: 317144 - DNA, 25 bp, Artificial
  Probe
gcctcctcattatcgccatggtgaa

SEQ ID NO: 317145 - DNA, 25 bp, Artificial
  Probe
gagtccaacatcagggaccaagagg

SEQ ID NO: 317146 - DNA, 25 bp, Artificial
  Probe
acggaggacactcgtgaccagaacc

SEQ ID NO: 317147 - DNA, 25 bp, Artificial
  Probe
gagaatgagaccactgtcctgtacc

SEQ ID NO: 317148 - DNA, 25 bp, Artificial
  Probe
tgagtccaacatcagggaccaagag

SEQ ID NO: 317149 - DNA, 25 bp, Artificial
  Probe
attatcgccatggtgaagatcaacc

SEQ ID NO: 317150 - DNA, 25 bp, Artificial
  Probe
gattgagtccaacatcagggaccaa

SEQ ID NO: 317151 - DNA, 25 bp, Artificial
  Probe
gtgtgctgtcgttgcctactatatc

SEQ ID NO: 317152 - DNA, 25 bp, Artificial
  Probe
tcggattttctactgcttctcaacg

SEQ ID NO: 317153 - DNA, 25 bp, Artificial
  Probe
tttctactgcttctcaacgactcgg

SEQ ID NO: 317154 - DNA, 25 bp, Artificial
  Probe
acgagcatcggattttctactgctt

SEQ ID NO: 317155 - DNA, 25 bp, Artificial
  Probe
cttctcaacgactcgggagaatgag

SEQ ID NO: 317156 - DNA, 25 bp, Artificial
  Probe
acacggaggacactcgtgaccagaa

SEQ ID NO: 317157 - DNA, 25 bp, Artificial
  Probe
gcatcggattttctactgcttctca

SEQ ID NO: 317158 - DNA, 25 bp, Artificial
  Probe
tgaccggtggcctcctcattatcgc

SEQ ID NO: 317159 - DNA, 25 bp, Artificial
  Probe
acctgattgagtccaacatcaggga

SEQ ID NO: 317160 - DNA, 25 bp, Artificial
  Probe
aaggtcagaacgaacttccacgagc

SEQ ID NO: 317161 - DNA, 25 bp, Artificial
  Probe
attgagtccaacatcagggaccaag

SEQ ID NO: 317162 - DNA, 25 bp, Artificial
  Probe
acgcagcctggaaaactaccaggtg

SEQ ID NO: 317163 - DNA, 25 bp, Artificial
  Probe
ctcattatcgccatggtgaagatca

SEQ ID NO: 317164 - DNA, 25 bp, Artificial
  Probe
gtgaagatcaaccagtccctttcca

SEQ ID NO: 317165 - DNA, 25 bp, Artificial
  Probe
ccacgcagcctggaaaactaccagg

SEQ ID NO: 317166 - DNA, 25 bp, Artificial
  Probe
aacgactcgggagaatgagaccact

SEQ ID NO: 317167 - DNA, 25 bp, Artificial
  Probe
ctgattgagtccaacatcagggacc

SEQ ID NO: 317168 - DNA, 25 bp, Artificial
  Probe
tgtgctgtaccacacggaggacact

SEQ ID NO: 317169 - DNA, 25 bp, Artificial
  Probe
cacgagcatcggattttctactgct

SEQ ID NO: 317170 - DNA, 25 bp, Artificial
  Probe
caacgactcgggagaatgagaccac

SEQ ID NO: 317171 - DNA, 25 bp, Artificial
  Probe
cctactatatcctgggcacgaccat

SEQ ID NO: 317172 - DNA, 25 bp, Artificial
  Probe
gtaccacacggaggacactcgtgac

SEQ ID NO: 317173 - DNA, 25 bp, Artificial
  Probe
gaatgagaccactgtcctgtaccgg

SEQ ID NO: 317174 - DNA, 25 bp, Artificial
  Probe
ggattttctactgcttctcaacgac

SEQ ID NO: 317175 - DNA, 25 bp, Artificial
  Probe
ccacctgattgagtccaacatcagg

SEQ ID NO: 317176 - DNA, 25 bp, Artificial
  Probe
gccggtgggctgtgctgtaccacac

SEQ ID NO: 317177 - DNA, 25 bp, Artificial
  Probe
ccggtgggctgtgctgtaccacacg

SEQ ID NO: 317178 - DNA, 25 bp, Artificial
  Probe
aatccacgtgccacctgattgagtc

SEQ ID NO: 317179 - DNA, 25 bp, Artificial
  Probe
ctttaccccgacagcctgtggatgg

SEQ ID NO: 317180 - DNA, 25 bp, Artificial
  Probe
cgcgcagcatgcactcaattccatg

SEQ ID NO: 317181 - DNA, 25 bp, Artificial
  Probe
cctttacagcagtgttctcatcctg

SEQ ID NO: 317182 - DNA, 25 bp, Artificial
  Probe
ggtcatcaagcaaggatgtgagttc

SEQ ID NO: 317183 - DNA, 25 bp, Artificial
  Probe
tggatctccatcacggaggccctcg

SEQ ID NO: 317184 - DNA, 25 bp, Artificial
  Probe
tacaccgtcaacctttacagcagtg

SEQ ID NO: 317185 - DNA, 25 bp, Artificial
  Probe
actccaagggccaccagaagcgcaa

SEQ ID NO: 317186 - DNA, 25 bp, Artificial
  Probe
ccaccaacagccagagcgcgaggaa

SEQ ID NO: 317187 - DNA, 25 bp, Artificial
  Probe
tgggtctcatcctgccgggcatcgt

SEQ ID NO: 317188 - DNA, 25 bp, Artificial
  Probe
agcatcgattccttcatccttttgg

SEQ ID NO: 317189 - DNA, 25 bp, Artificial
  Probe
tttatgtaaggctgtgcatatcatc

SEQ ID NO: 317190 - DNA, 25 bp, Artificial
  Probe
ccttatcctggctttctttgcctgc

SEQ ID NO: 317191 - DNA, 25 bp, Artificial
  Probe
ggtggacactcttccgtctccacag

SEQ ID NO: 317192 - DNA, 25 bp, Artificial
  Probe
cttcgccgatgtcagccagggggac

SEQ ID NO: 317193 - DNA, 25 bp, Artificial
  Probe
cttttggaggtcatcaagcaaggat

SEQ ID NO: 317194 - DNA, 25 bp, Artificial
  Probe
accagaagcgcaaggccctcaagac

SEQ ID NO: 317195 - DNA, 25 bp, Artificial
  Probe
catcaagcaaggatgtgagttcgag

SEQ ID NO: 317196 - DNA, 25 bp, Artificial
  Probe
ttctttgcctgctggctaccgtatt

SEQ ID NO: 317197 - DNA, 25 bp, Artificial
  Probe
tctacgccttcctcggggccaaatt

SEQ ID NO: 317198 - DNA, 25 bp, Artificial
  Probe
tcaagatcctttccaaagggaaacg

SEQ ID NO: 317199 - DNA, 25 bp, Artificial
  Probe
ctcttccgtctccacagagtcagaa

SEQ ID NO: 317200 - DNA, 25 bp, Artificial
  Probe
caagactacggtcatccttatcctg

SEQ ID NO: 317201 - DNA, 25 bp, Artificial
  Probe
catggctgactggtactttgggaaa

SEQ ID NO: 317202 - DNA, 25 bp, Artificial
  Probe
atcctgccgggcatcgtcatcctgt

SEQ ID NO: 317203 - DNA, 25 bp, Artificial
  Probe
atctccaagctgtcacactccaagg

SEQ ID NO: 317204 - DNA, 25 bp, Artificial
  Probe
agcgcaaggccctcaagactacggt

SEQ ID NO: 317205 - DNA, 25 bp, Artificial
  Probe
accaacagccagagcgcgaggaagc

SEQ ID NO: 317206 - DNA, 25 bp, Artificial
  Probe
tgtcacactccaagggccaccagaa

SEQ ID NO: 317207 - DNA, 25 bp, Artificial
  Probe
gggtggacactcttccgtctccaca

SEQ ID NO: 317208 - DNA, 25 bp, Artificial
  Probe
ggacggcaggtacatctgtgaccgc

SEQ ID NO: 317209 - DNA, 25 bp, Artificial
  Probe
cctggctttctttgcctgctggcta

SEQ ID NO: 317210 - DNA, 25 bp, Artificial
  Probe
tctccaagctgtcacactccaaggg

SEQ ID NO: 317211 - DNA, 25 bp, Artificial
  Probe
gctgtgcatatcatctacaccgtca

SEQ ID NO: 317212 - DNA, 25 bp, Artificial
  Probe
gtgttctcatcctggccttcatcag

SEQ ID NO: 317213 - DNA, 25 bp, Artificial
  Probe
tcatcttcgccgatgtcagccaggg

SEQ ID NO: 317214 - DNA, 25 bp, Artificial
  Probe
gaggctccagcctcaagatcctttc

SEQ ID NO: 317215 - DNA, 25 bp, Artificial
  Probe
ggtacatctgtgaccgcctttaccc

SEQ ID NO: 317216 - DNA, 25 bp, Artificial
  Probe
gtcatcctgtcctgttactgcatca

SEQ ID NO: 317217 - DNA, 25 bp, Artificial
  Probe
atgtgagttcgagagcgtcgtgcac

SEQ ID NO: 317218 - DNA, 25 bp, Artificial
  Probe
agggccaccagaagcgcaaggccct

SEQ ID NO: 317219 - DNA, 25 bp, Artificial
  Probe
tcatcctggccttcatcagcctgga

SEQ ID NO: 317220 - DNA, 25 bp, Artificial
  Probe
tgtggatggtggtgttccagttcca

SEQ ID NO: 317221 - DNA, 25 bp, Artificial
  Probe
gccctcaagactacggtcatcctta

SEQ ID NO: 317222 - DNA, 25 bp, Artificial
  Probe
taccgtattacgtggggatcagcat

SEQ ID NO: 317223 - DNA, 25 bp, Artificial
  Probe
agtggatctccatcacggaggccct

SEQ ID NO: 317224 - DNA, 25 bp, Artificial
  Probe
ccagcctcaagatcctttccaaagg

SEQ ID NO: 317225 - DNA, 25 bp, Artificial
  Probe
tgacaaacgggctcaccataatgca

SEQ ID NO: 317226 - DNA, 25 bp, Artificial
  Probe
cgataacgatgacatcgaggtggag

SEQ ID NO: 317227 - DNA, 25 bp, Artificial
  Probe
aatcctagacaaagcaacagagtat

SEQ ID NO: 317228 - DNA, 25 bp, Artificial
  Probe
cgtgcactggagaaggcaagatcaa

SEQ ID NO: 317229 - DNA, 25 bp, Artificial
  Probe
cactccaaggagagaaggcatcccg

SEQ ID NO: 317230 - DNA, 25 bp, Artificial
  Probe
ggaccacatcaaagacagctttcac

SEQ ID NO: 317231 - DNA, 25 bp, Artificial
  Probe
agccccagaacaggaagaaactgcg

SEQ ID NO: 317232 - DNA, 25 bp, Artificial
  Probe
tttgcgggactcagtcccatcactc

SEQ ID NO: 317233 - DNA, 25 bp, Artificial
  Probe
taacgatgacatcgaggtggagagc

SEQ ID NO: 317234 - DNA, 25 bp, Artificial
  Probe
caagacattgatgacctcaagcggc

SEQ ID NO: 317235 - DNA, 25 bp, Artificial
  Probe
tccagctcagagtccgagcctgagg

SEQ ID NO: 317236 - DNA, 25 bp, Artificial
  Probe
aagggcggcaccatctctgccttcg

SEQ ID NO: 317237 - DNA, 25 bp, Artificial
  Probe
tcagtcccatcactccaaggagaga

SEQ ID NO: 317238 - DNA, 25 bp, Artificial
  Probe
gacaaacgggctcaccataatgcac

SEQ ID NO: 317239 - DNA, 25 bp, Artificial
  Probe
tgggggttcagactccagctcagag

SEQ ID NO: 317240 - DNA, 25 bp, Artificial
  Probe
ccgagcctgaggagccccagaacag

SEQ ID NO: 317241 - DNA, 25 bp, Artificial
  Probe
tgcactggaacgaaaacgtagggac

SEQ ID NO: 317242 - DNA, 25 bp, Artificial
  Probe
cagctttcacagtttgcgggactca

SEQ ID NO: 317243 - DNA, 25 bp, Artificial
  Probe
ctagacaaagcaacagagtatatcc

SEQ ID NO: 317244 - DNA, 25 bp, Artificial
  Probe
acctcaagcggcagaatgctcttct

SEQ ID NO: 317245 - DNA, 25 bp, Artificial
  Probe
caacaagtccgtgcactggagaagg

SEQ ID NO: 317246 - DNA, 25 bp, Artificial
  Probe
aatgcactggaacgaaaacgtaggg

SEQ ID NO: 317247 - DNA, 25 bp, Artificial
  Probe
aggcaagatcaagtgcccaactgca

SEQ ID NO: 317248 - DNA, 25 bp, Artificial
  Probe
caaagacagctttcacagtttgcgg

SEQ ID NO: 317249 - DNA, 25 bp, Artificial
  Probe
gctcagagtccgagcctgaggagcc

SEQ ID NO: 317250 - DNA, 25 bp, Artificial
  Probe
cggcaccatctctgccttcgatggg

SEQ ID NO: 317251 - DNA, 25 bp, Artificial
  Probe
aaacgtagggaccacatcaaagaca

SEQ ID NO: 317252 - DNA, 25 bp, Artificial
  Probe
ctgaggagccccagaacaggaagaa

SEQ ID NO: 317253 - DNA, 25 bp, Artificial
  Probe
ttgatgacctcaagcggcagaatgc

SEQ ID NO: 317254 - DNA, 25 bp, Artificial
  Probe
acagtttgcgggactcagtcccatc

SEQ ID NO: 317255 - DNA, 25 bp, Artificial
  Probe
gcaacaagtccgtgcactggagaag

SEQ ID NO: 317256 - DNA, 25 bp, Artificial
  Probe
atgggggttcagactccagctcaga

SEQ ID NO: 317257 - DNA, 25 bp, Artificial
  Probe
tggagcaacaagtccgtgcactgga

SEQ ID NO: 317258 - DNA, 25 bp, Artificial
  Probe
aggaaaaaccatacgcaccagcaag

SEQ ID NO: 317259 - DNA, 25 bp, Artificial
  Probe
catcaaagacagctttcacagtttg

SEQ ID NO: 317260 - DNA, 25 bp, Artificial
  Probe
gctttcacagtttgcgggactcagt

SEQ ID NO: 317261 - DNA, 25 bp, Artificial
  Probe
tcccgggcccaaatcctagacaaag

SEQ ID NO: 317262 - DNA, 25 bp, Artificial
  Probe
gatcaagtgcccaactgcagaccaa

SEQ ID NO: 317263 - DNA, 25 bp, Artificial
  Probe
agagtccgagcctgaggagccccag

SEQ ID NO: 317264 - DNA, 25 bp, Artificial
  Probe
gaaactgcggatggaggccagctaa

SEQ ID NO: 317265 - DNA, 25 bp, Artificial
  Probe
aagtgcccaactgcagaccaactac

SEQ ID NO: 317266 - DNA, 25 bp, Artificial
  Probe
ggcaagatcaagtgcccaactgcag

SEQ ID NO: 317267 - DNA, 25 bp, Artificial
  Probe
ccaaatcctagacaaagcaacagag

SEQ ID NO: 317268 - DNA, 25 bp, Artificial
  Probe
aggagagaaggcatcccgggcccaa

SEQ ID NO: 317269 - DNA, 25 bp, Artificial
  Probe
tcagactccagctcagagtccgagc

SEQ ID NO: 317270 - DNA, 25 bp, Artificial
  Probe
ggactcagtcccatcactccaagga

SEQ ID NO: 317271 - DNA, 25 bp, Artificial
  Probe
aatacctatgcgtcagcgattcaca

SEQ ID NO: 317272 - DNA, 25 bp, Artificial
  Probe
aagcagtccgagcaaccggaacttt

SEQ ID NO: 317273 - DNA, 25 bp, Artificial
  Probe
cccagtccagtgaagtacagactga

SEQ ID NO: 317274 - DNA, 25 bp, Artificial
  Probe
ctataatacctatgcgtcagcgatt

SEQ ID NO: 317275 - DNA, 25 bp, Artificial
  Probe
agtgccaaatttacagatgactgta

SEQ ID NO: 317276 - DNA, 25 bp, Artificial
  Probe
tgtcgccatctcgtagaagccccag

SEQ ID NO: 317277 - DNA, 25 bp, Artificial
  Probe
tggccctgaacaagagagggaaagc

SEQ ID NO: 317278 - DNA, 25 bp, Artificial
  Probe
aaaggttcccctgtcgccatctcgt

SEQ ID NO: 317279 - DNA, 25 bp, Artificial
  Probe
gcagtccgagcaaccggaactttcc

SEQ ID NO: 317280 - DNA, 25 bp, Artificial
  Probe
ttcaccgtcactgttccagaaaaga

SEQ ID NO: 317281 - DNA, 25 bp, Artificial
  Probe
aggttcaagcagtccgagcaaccgg

SEQ ID NO: 317282 - DNA, 25 bp, Artificial
  Probe
aaaggaaaactccatgcaagtgcca

SEQ ID NO: 317283 - DNA, 25 bp, Artificial
  Probe
agtacagactgaagtttcgcttcgg

SEQ ID NO: 317284 - DNA, 25 bp, Artificial
  Probe
tgtggccctgaacaagagagggaaa

SEQ ID NO: 317285 - DNA, 25 bp, Artificial
  Probe
cttcaccgtcactgttccagaaaag

SEQ ID NO: 317286 - DNA, 25 bp, Artificial
  Probe
acttcctacccaggttcaagcagtc

SEQ ID NO: 317287 - DNA, 25 bp, Artificial
  Probe
tatgtggccctgaacaagagaggga

SEQ ID NO: 317288 - DNA, 25 bp, Artificial
  Probe
gattcacagaactgaaaagacaggc

SEQ ID NO: 317289 - DNA, 25 bp, Artificial
  Probe
caggttcaagcagtccgagcaaccg

SEQ ID NO: 317290 - DNA, 25 bp, Artificial
  Probe
cgattcacagaactgaaaagacagg

SEQ ID NO: 317291 - DNA, 25 bp, Artificial
  Probe
aacagctataatacctatgcgtcag

SEQ ID NO: 317292 - DNA, 25 bp, Artificial
  Probe
gcaagtgccaaatttacagatgact

SEQ ID NO: 317293 - DNA, 25 bp, Artificial
  Probe
gtcgccatctcgtagaagccccagt

SEQ ID NO: 317294 - DNA, 25 bp, Artificial
  Probe
tcaccgtcactgttccagaaaagaa

SEQ ID NO: 317295 - DNA, 25 bp, Artificial
  Probe
tcaagcagtccgagcaaccggaact

SEQ ID NO: 317296 - DNA, 25 bp, Artificial
  Probe
gactgtaagttcagggagagattcc

SEQ ID NO: 317297 - DNA, 25 bp, Artificial
  Probe
gccctgaacaagagagggaaagcca

SEQ ID NO: 317298 - DNA, 25 bp, Artificial
  Probe
ggaactttccttcaccgtcactgtt

SEQ ID NO: 317299 - DNA, 25 bp, Artificial
  Probe
atgtggccctgaacaagagagggaa

SEQ ID NO: 317300 - DNA, 25 bp, Artificial
  Probe
ccaaaagaggctgcagcccacgggt

SEQ ID NO: 317301 - DNA, 25 bp, Artificial
  Probe
ttcctacccaggttcaagcagtccg

SEQ ID NO: 317302 - DNA, 25 bp, Artificial
  Probe
catgcaagtgccaaatttacagatg

SEQ ID NO: 317303 - DNA, 25 bp, Artificial
  Probe
cggaactttccttcaccgtcactgt

SEQ ID NO: 317304 - DNA, 25 bp, Artificial
  Probe
cacttcctacccaggttcaagcagt

SEQ ID NO: 317305 - DNA, 25 bp, Artificial
  Probe
atgcgtcagcgattcacagaactga

SEQ ID NO: 317306 - DNA, 25 bp, Artificial
  Probe
ggaaaactccatgcaagtgccaaat

SEQ ID NO: 317307 - DNA, 25 bp, Artificial
  Probe
gccaaatttacagatgactgtaagt

SEQ ID NO: 317308 - DNA, 25 bp, Artificial
  Probe
tacctatgcgtcagcgattcacaga

SEQ ID NO: 317309 - DNA, 25 bp, Artificial
  Probe
atacgaggagttttcagcaacaaat

SEQ ID NO: 317310 - DNA, 25 bp, Artificial
  Probe
ccagtccagtgaagtacagactgaa

SEQ ID NO: 317311 - DNA, 25 bp, Artificial
  Probe
cgtagaagccccagtccagtgaagt

SEQ ID NO: 317312 - DNA, 25 bp, Artificial
  Probe
cagactgaagtttcgcttcggatga

SEQ ID NO: 317313 - DNA, 25 bp, Artificial
  Probe
caaatttacagatgactgtaagttc

SEQ ID NO: 317314 - DNA, 25 bp, Artificial
  Probe
tatgcgtcagcgattcacagaactg

SEQ ID NO: 317315 - DNA, 25 bp, Artificial
  Probe
gagcaaccggaactttccttcaccg

SEQ ID NO: 317316 - DNA, 25 bp, Artificial
  Probe
ccaaatttacagatgactgtaagtt

SEQ ID NO: 317317 - DNA, 25 bp, Artificial
  Probe
ccttcgacaaggctgtcagtattct

SEQ ID NO: 317318 - DNA, 25 bp, Artificial
  Probe
gtattcttcctggtcacgcccttgg

SEQ ID NO: 317319 - DNA, 25 bp, Artificial
  Probe
gacaaggctgtcagtattcttcctg

SEQ ID NO: 317320 - DNA, 25 bp, Artificial
  Probe
tggtcacgcccttggccacgccctc

SEQ ID NO: 317321 - DNA, 25 bp, Artificial
  Probe
gctgtcagtattcttcctggtcacg

SEQ ID NO: 317322 - DNA, 25 bp, Artificial
  Probe
ctacctcctcgtttgtccctccagc

SEQ ID NO: 317323 - DNA, 25 bp, Artificial
  Probe
attcttcctggtcacgcccttggcc

SEQ ID NO: 317324 - DNA, 25 bp, Artificial
  Probe
tgtcagtattcttcctggtcacgcc

SEQ ID NO: 317325 - DNA, 25 bp, Artificial
  Probe
catccccagacaatctggagccaga

SEQ ID NO: 317326 - DNA, 25 bp, Artificial
  Probe
acaaggctgtcagtattcttcctgg

SEQ ID NO: 317327 - DNA, 25 bp, Artificial
  Probe
ctccctcccttgcatggttccccct

SEQ ID NO: 317328 - DNA, 25 bp, Artificial
  Probe
tcacgcccttggccacgccctccgt

SEQ ID NO: 317329 - DNA, 25 bp, Artificial
  Probe
accttccctgggctgctccactcct

SEQ ID NO: 317330 - DNA, 25 bp, Artificial
  Probe
cgacaaggctgtcagtattcttcct

SEQ ID NO: 317331 - DNA, 25 bp, Artificial
  Probe
ttcgacaaggctgtcagtattcttc

SEQ ID NO: 317332 - DNA, 25 bp, Artificial
  Probe
tcatccccagacaatctggagccag

SEQ ID NO: 317333 - DNA, 25 bp, Artificial
  Probe
agtattcttcctggtcacgcccttg

SEQ ID NO: 317334 - DNA, 25 bp, Artificial
  Probe
tcccttccctgtggacccatcacct

SEQ ID NO: 317335 - DNA, 25 bp, Artificial
  Probe
aaggctgtcagtattcttcctggtc

SEQ ID NO: 317336 - DNA, 25 bp, Artificial
  Probe
ccccagacaatctggagccagagct

SEQ ID NO: 317337 - DNA, 25 bp, Artificial
  Probe
atccccagacaatctggagccagag

SEQ ID NO: 317338 - DNA, 25 bp, Artificial
  Probe
aggctgtcagtattcttcctggtca

SEQ ID NO: 317339 - DNA, 25 bp, Artificial
  Probe
tccccagacaatctggagccagagc

SEQ ID NO: 317340 - DNA, 25 bp, Artificial
  Probe
ttgcatggttccccctcatccctcc

SEQ ID NO: 317341 - DNA, 25 bp, Artificial
  Probe
tcagtattcttcctggtcacgccct

SEQ ID NO: 317342 - DNA, 25 bp, Artificial
  Probe
cacgccctccgtggtcacaccctcc

SEQ ID NO: 317343 - DNA, 25 bp, Artificial
  Probe
tccgtggtcacaccctccctccctt

SEQ ID NO: 317344 - DNA, 25 bp, Artificial
  Probe
ggctgtcagtattcttcctggtcac

SEQ ID NO: 317345 - DNA, 25 bp, Artificial
  Probe
ttccctgggctgctccactcctatc

SEQ ID NO: 317346 - DNA, 25 bp, Artificial
  Probe
atcaccttccctgggctgctccact

SEQ ID NO: 317347 - DNA, 25 bp, Artificial
  Probe
cagtattcttcctggtcacgccctt

SEQ ID NO: 317348 - DNA, 25 bp, Artificial
  Probe
gtggacccatcaccttccctgggct

SEQ ID NO: 317349 - DNA, 25 bp, Artificial
  Probe
ctgtcagtattcttcctggtcacgc

SEQ ID NO: 317350 - DNA, 25 bp, Artificial
  Probe
actcctatctttctcatccccagac

SEQ ID NO: 317351 - DNA, 25 bp, Artificial
  Probe
tcgacaaggctgtcagtattcttcc

SEQ ID NO: 317352 - DNA, 25 bp, Artificial
  Probe
ctcccttgcatggttccccctcatc

SEQ ID NO: 317353 - DNA, 25 bp, Artificial
  Probe
gtcagtattcttcctggtcacgccc

SEQ ID NO: 317354 - DNA, 25 bp, Artificial
  Probe
tgggctgctccactcctatctttct

SEQ ID NO: 317355 - DNA, 25 bp, Artificial
  Probe
tatctttctcatccccagacaatct

SEQ ID NO: 317356 - DNA, 25 bp, Artificial
  Probe
ctcgtttgtccctccagctcccttc

SEQ ID NO: 317357 - DNA, 25 bp, Artificial
  Probe
cctcctcgtttgtccctccagctcc

SEQ ID NO: 317358 - DNA, 25 bp, Artificial
  Probe
tattcttcctggtcacgcccttggc

SEQ ID NO: 317359 - DNA, 25 bp, Artificial
  Probe
tcctacctcctcgtttgtccctcca

SEQ ID NO: 317360 - DNA, 25 bp, Artificial
  Probe
tctcatccccagacaatctggagcc

SEQ ID NO: 317361 - DNA, 25 bp, Artificial
  Probe
cttcgacaaggctgtcagtattctt

SEQ ID NO: 317362 - DNA, 25 bp, Artificial
  Probe
caaggctgtcagtattcttcctggt

SEQ ID NO: 317363 - DNA, 25 bp, Artificial
  Probe
atctacagccctgctcgaggatatg

SEQ ID NO: 317364 - DNA, 25 bp, Artificial
  Probe
gaggtgaagccctgtgtcatctaca

SEQ ID NO: 317365 - DNA, 25 bp, Artificial
  Probe
gctggtgctccactaccagcagaca

SEQ ID NO: 317366 - DNA, 25 bp, Artificial
  Probe
atcccgtctgggtgagattcacgat

SEQ ID NO: 317367 - DNA, 25 bp, Artificial
  Probe
gacctgatccagctgcgtaagatcc

SEQ ID NO: 317368 - DNA, 25 bp, Artificial
  Probe
taagatccgagaccagcacctcgta

SEQ ID NO: 317369 - DNA, 25 bp, Artificial
  Probe
acctcgtatggctcaatcacagggg

SEQ ID NO: 317370 - DNA, 25 bp, Artificial
  Probe
caagctttggacaaccgggaaatag

SEQ ID NO: 317371 - DNA, 25 bp, Artificial
  Probe
tgctcgaggatatggctttgcagaa

SEQ ID NO: 317372 - DNA, 25 bp, Artificial
  Probe
gatgttacgcttgttctgtggttgc

SEQ ID NO: 317373 - DNA, 25 bp, Artificial
  Probe
acgcttgttctgtggttgcagacgg

SEQ ID NO: 317374 - DNA, 25 bp, Artificial
  Probe
ttgaaatcccgtctgggtgagattc

SEQ ID NO: 317375 - DNA, 25 bp, Artificial
  Probe
ttatgggaagccagacggtgcattc

SEQ ID NO: 317376 - DNA, 25 bp, Artificial
  Probe
tcacgatagcaaagtgcgtcttgag

SEQ ID NO: 317377 - DNA, 25 bp, Artificial
  Probe
gaggacctgctttatgggaagccag

SEQ ID NO: 317378 - DNA, 25 bp, Artificial
  Probe
tgtgtcatctacagccctgctcgag

SEQ ID NO: 317379 - DNA, 25 bp, Artificial
  Probe
ctgctttatgggaagccagacggtg

SEQ ID NO: 317380 - DNA, 25 bp, Artificial
  Probe
acctggtttgtggaggatgtgaacc

SEQ ID NO: 317381 - DNA, 25 bp, Artificial
  Probe
tcgtatggctcaatcacaggggagt

SEQ ID NO: 317382 - DNA, 25 bp, Artificial
  Probe
tggtgctccactaccagcagacatc

SEQ ID NO: 317383 - DNA, 25 bp, Artificial
  Probe
gatccagctgcgtaagatccgagac

SEQ ID NO: 317384 - DNA, 25 bp, Artificial
  Probe
gaagccagacggtgcattcttaatt

SEQ ID NO: 317385 - DNA, 25 bp, Artificial
  Probe
tgagattcacgatagcaaagtgcgt

SEQ ID NO: 317386 - DNA, 25 bp, Artificial
  Probe
agaccagcacctcgtatggctcaat

SEQ ID NO: 317387 - DNA, 25 bp, Artificial
  Probe
atgggaagccagacggtgcattctt

SEQ ID NO: 317388 - DNA, 25 bp, Artificial
  Probe
tcttgagcaggacttgaagaaacaa

SEQ ID NO: 317389 - DNA, 25 bp, Artificial
  Probe
ctgtgtcatctacagccctgctcga

SEQ ID NO: 317390 - DNA, 25 bp, Artificial
  Probe
ctcccgcattatgatgagaagacct

SEQ ID NO: 317391 - DNA, 25 bp, Artificial
  Probe
cgtctgggtgagattcacgatagca

SEQ ID NO: 317392 - DNA, 25 bp, Artificial
  Probe
atcaatgaggacgatgagagcctcc

SEQ ID NO: 317393 - DNA, 25 bp, Artificial
  Probe
cagcacctcgtatggctcaatcaca

SEQ ID NO: 317394 - DNA, 25 bp, Artificial
  Probe
acctgatccagctgcgtaagatccg

SEQ ID NO: 317395 - DNA, 25 bp, Artificial
  Probe
tgctttatgggaagccagacggtgc

SEQ ID NO: 317396 - DNA, 25 bp, Artificial
  Probe
tttatcaatgaggacgatgagagcc

SEQ ID NO: 317397 - DNA, 25 bp, Artificial
  Probe
tagcaaagtgcgtcttgagcaggac

SEQ ID NO: 317398 - DNA, 25 bp, Artificial
  Probe
atgtgaaccgagtacaggcagagga

SEQ ID NO: 317399 - DNA, 25 bp, Artificial
  Probe
gtgcgtcttgagcaggacttgaaga

SEQ ID NO: 317400 - DNA, 25 bp, Artificial
  Probe
gtgaagccctgtgtcatctacagcc

SEQ ID NO: 317401 - DNA, 25 bp, Artificial
  Probe
cattcttaattcgtgagagtagcaa

SEQ ID NO: 317402 - DNA, 25 bp, Artificial
  Probe
gcacagatgccctcgctctgcagat

SEQ ID NO: 317403 - DNA, 25 bp, Artificial
  Probe
cgaggatatggctttgcagaaccct

SEQ ID NO: 317404 - DNA, 25 bp, Artificial
  Probe
tgaaccgagtacaggcagaggacct

SEQ ID NO: 317405 - DNA, 25 bp, Artificial
  Probe
tgcattcttaattcgtgagagtagc

SEQ ID NO: 317406 - DNA, 25 bp, Artificial
  Probe
tcccgcattatgatgagaagacctg

SEQ ID NO: 317407 - DNA, 25 bp, Artificial
  Probe
gagtacaggcagaggacctgcttta

SEQ ID NO: 317408 - DNA, 25 bp, Artificial
  Probe
cgtcttgagcaggacttgaagaaac

SEQ ID NO: 317409 - DNA, 25 bp, Artificial
  Probe
gccacagcatcgagctcaagctgct

SEQ ID NO: 317410 - DNA, 25 bp, Artificial
  Probe
gataatgtttgtcttgacccacaag

SEQ ID NO: 317411 - DNA, 25 bp, Artificial
  Probe
tcaagctgctcctttctcggccatg

SEQ ID NO: 317412 - DNA, 25 bp, Artificial
  Probe
atgatcgctaatttggaggtgatcc

SEQ ID NO: 317413 - DNA, 25 bp, Artificial
  Probe
atttctgctgctgttcacactgcca

SEQ ID NO: 317414 - DNA, 25 bp, Artificial
  Probe
gctgctgttcacactgccacagcat

SEQ ID NO: 317415 - DNA, 25 bp, Artificial
  Probe
ccccaaggtggaagtcatagctaag

SEQ ID NO: 317416 - DNA, 25 bp, Artificial
  Probe
tggttgcaacggagctacgctgtgt

SEQ ID NO: 317417 - DNA, 25 bp, Artificial
  Probe
gtttgcttaaccttagctccaagaa

SEQ ID NO: 317418 - DNA, 25 bp, Artificial
  Probe
cgtcattcaccctgctggcatttct

SEQ ID NO: 317419 - DNA, 25 bp, Artificial
  Probe
atttggaggtgatccctgcaggtcc

SEQ ID NO: 317420 - DNA, 25 bp, Artificial
  Probe
gccatggttgcaacggagctacgct

SEQ ID NO: 317421 - DNA, 25 bp, Artificial
  Probe
tgctgttcacactgccacagcatcg

SEQ ID NO: 317422 - DNA, 25 bp, Artificial
  Probe
cttgacccacaagctccgttgataa

SEQ ID NO: 317423 - DNA, 25 bp, Artificial
  Probe
cctgctggcatttctgctgctgttc

SEQ ID NO: 317424 - DNA, 25 bp, Artificial
  Probe
gcaggtccacattgccccaaggtgg

SEQ ID NO: 317425 - DNA, 25 bp, Artificial
  Probe
tcattcaccctgctggcatttctgc

SEQ ID NO: 317426 - DNA, 25 bp, Artificial
  Probe
ttgtcttgacccacaagctccgttg

SEQ ID NO: 317427 - DNA, 25 bp, Artificial
  Probe
accccaaaatgatcgctaatttgga

SEQ ID NO: 317428 - DNA, 25 bp, Artificial
  Probe
gagctcaagctgctcctttctcggc

SEQ ID NO: 317429 - DNA, 25 bp, Artificial
  Probe
gttcacactgccacagcatcgagct

SEQ ID NO: 317430 - DNA, 25 bp, Artificial
  Probe
gtgatccctgcaggtccacattgcc

SEQ ID NO: 317431 - DNA, 25 bp, Artificial
  Probe
aaccccaaaatgatcgctaatttgg

SEQ ID NO: 317432 - DNA, 25 bp, Artificial
  Probe
ctaatttggaggtgatccctgcagg

SEQ ID NO: 317433 - DNA, 25 bp, Artificial
  Probe
taatgtttgtcttgacccacaagct

SEQ ID NO: 317434 - DNA, 25 bp, Artificial
  Probe
ccacattgccccaaggtggaagtca

SEQ ID NO: 317435 - DNA, 25 bp, Artificial
  Probe
acactgccacagcatcgagctcaag

SEQ ID NO: 317436 - DNA, 25 bp, Artificial
  Probe
ctgcaggtccacattgccccaaggt

SEQ ID NO: 317437 - DNA, 25 bp, Artificial
  Probe
actgccacagcatcgagctcaagct

SEQ ID NO: 317438 - DNA, 25 bp, Artificial
  Probe
ggtgatccctgcaggtccacattgc

SEQ ID NO: 317439 - DNA, 25 bp, Artificial
  Probe
tgctggcatttctgctgctgttcac

SEQ ID NO: 317440 - DNA, 25 bp, Artificial
  Probe
acggagctacgctgtgtttgcttaa

SEQ ID NO: 317441 - DNA, 25 bp, Artificial
  Probe
caccctgctggcatttctgctgctg

SEQ ID NO: 317442 - DNA, 25 bp, Artificial
  Probe
aagtcatagctaagttgaagaacca

SEQ ID NO: 317443 - DNA, 25 bp, Artificial
  Probe
acagcatcgagctcaagctgctcct

SEQ ID NO: 317444 - DNA, 25 bp, Artificial
  Probe
agtcatagctaagttgaagaaccag

SEQ ID NO: 317445 - DNA, 25 bp, Artificial
  Probe
agctccgttgataaagaaagtcatt

SEQ ID NO: 317446 - DNA, 25 bp, Artificial
  Probe
atcgctaatttggaggtgatccctg

SEQ ID NO: 317447 - DNA, 25 bp, Artificial
  Probe
gctgctcctttctcggccatggttg

SEQ ID NO: 317448 - DNA, 25 bp, Artificial
  Probe
cctttctcggccatggttgcaacgg

SEQ ID NO: 317449 - DNA, 25 bp, Artificial
  Probe
ggaggtgatccctgcaggtccacat

SEQ ID NO: 317450 - DNA, 25 bp, Artificial
  Probe
caaagcggaatgcacttgcactggt

SEQ ID NO: 317451 - DNA, 25 bp, Artificial
  Probe
tgctcgtcattcaccctgctggcat

SEQ ID NO: 317452 - DNA, 25 bp, Artificial
  Probe
tgcaacggagctacgctgtgtttgc

SEQ ID NO: 317453 - DNA, 25 bp, Artificial
  Probe
tgacccacaagctccgttgataaag

SEQ ID NO: 317454 - DNA, 25 bp, Artificial
  Probe
ccacaagctccgttgataaagaaag

SEQ ID NO: 317455 - DNA, 25 bp, Artificial
  Probe
accaacgggcctgagcataggtagc

SEQ ID NO: 317456 - DNA, 25 bp, Artificial
  Probe
acatatcctggtcctgggacagcag

SEQ ID NO: 317457 - DNA, 25 bp, Artificial
  Probe
gggcctgagcataggtagcagtact

SEQ ID NO: 317458 - DNA, 25 bp, Artificial
  Probe
ccaccaagggtcgaaggtcaaggct

SEQ ID NO: 317459 - DNA, 25 bp, Artificial
  Probe
ctccaccaagggtcgaaggtcaagg

SEQ ID NO: 317460 - DNA, 25 bp, Artificial
  Probe
ccagacatatcctggtcctgggaca

SEQ ID NO: 317461 - DNA, 25 bp, Artificial
  Probe
gcctgagcataggtagcagtactcc

SEQ ID NO: 317462 - DNA, 25 bp, Artificial
  Probe
gtagcagtactccaccaagggtcga

SEQ ID NO: 317463 - DNA, 25 bp, Artificial
  Probe
aggctctgaaaggttaccaaccaga

SEQ ID NO: 317464 - DNA, 25 bp, Artificial
  Probe
acgggcctgagcataggtagcagta

SEQ ID NO: 317465 - DNA, 25 bp, Artificial
  Probe
aggtagcagtactccaccaagggtc

SEQ ID NO: 317466 - DNA, 25 bp, Artificial
  Probe
ctggtcctgggacagcagttaattt

SEQ ID NO: 317467 - DNA, 25 bp, Artificial
  Probe
tgaaaggttaccaaccagacatatc

SEQ ID NO: 317468 - DNA, 25 bp, Artificial
  Probe
agcagtactccaccaagggtcgaag

SEQ ID NO: 317469 - DNA, 25 bp, Artificial
  Probe
agacatatcctggtcctgggacagc

SEQ ID NO: 317470 - DNA, 25 bp, Artificial
  Probe
ctgaaaggttaccaaccagacatat

SEQ ID NO: 317471 - DNA, 25 bp, Artificial
  Probe
agcctttgaccaacgggcctgagca

SEQ ID NO: 317472 - DNA, 25 bp, Artificial
  Probe
accaaccagacatatcctggtcctg

SEQ ID NO: 317473 - DNA, 25 bp, Artificial
  Probe
ggtagcagtactccaccaagggtcg

SEQ ID NO: 317474 - DNA, 25 bp, Artificial
  Probe
aggtcaaggctctgaaaggttacca

SEQ ID NO: 317475 - DNA, 25 bp, Artificial
  Probe
caccaagggtcgaaggtcaaggctc

SEQ ID NO: 317476 - DNA, 25 bp, Artificial
  Probe
ggtcctgggacagcagttaatttct

SEQ ID NO: 317477 - DNA, 25 bp, Artificial
  Probe
cctggtcctgggacagcagttaatt

SEQ ID NO: 317478 - DNA, 25 bp, Artificial
  Probe
cgggcctgagcataggtagcagtac

SEQ ID NO: 317479 - DNA, 25 bp, Artificial
  Probe
ccaagggtcgaaggtcaaggctctg

SEQ ID NO: 317480 - DNA, 25 bp, Artificial
  Probe
accaagggtcgaaggtcaaggctct

SEQ ID NO: 317481 - DNA, 25 bp, Artificial
  Probe
caacgggcctgagcataggtagcag

SEQ ID NO: 317482 - DNA, 25 bp, Artificial
  Probe
cataggtagcagtactccaccaagg

SEQ ID NO: 317483 - DNA, 25 bp, Artificial
  Probe
ccaacgggcctgagcataggtagca

SEQ ID NO: 317484 - DNA, 25 bp, Artificial
  Probe
accagacatatcctggtcctgggac

SEQ ID NO: 317485 - DNA, 25 bp, Artificial
  Probe
gcagtactccaccaagggtcgaagg

SEQ ID NO: 317486 - DNA, 25 bp, Artificial
  Probe
aaccagacatatcctggtcctggga

SEQ ID NO: 317487 - DNA, 25 bp, Artificial
  Probe
gtcaaggctctgaaaggttaccaac

SEQ ID NO: 317488 - DNA, 25 bp, Artificial
  Probe
cagtactccaccaagggtcgaaggt

SEQ ID NO: 317489 - DNA, 25 bp, Artificial
  Probe
ggttaccaaccagacatatcctggt

SEQ ID NO: 317490 - DNA, 25 bp, Artificial
  Probe
gaccaacgggcctgagcataggtag

SEQ ID NO: 317491 - DNA, 25 bp, Artificial
  Probe
aacgggcctgagcataggtagcagt

SEQ ID NO: 317492 - DNA, 25 bp, Artificial
  Probe
taggtagcagtactccaccaagggt

SEQ ID NO: 317493 - DNA, 25 bp, Artificial
  Probe
tcctgggacagcagttaatttctat

SEQ ID NO: 317494 - DNA, 25 bp, Artificial
  Probe
ggcctgagcataggtagcagtactc

SEQ ID NO: 317495 - DNA, 25 bp, Artificial
  Probe
tctgaaaggttaccaaccagacata

SEQ ID NO: 317496 - DNA, 25 bp, Artificial
  Probe
catatcctggtcctgggacagcagt

SEQ ID NO: 317497 - DNA, 25 bp, Artificial
  Probe
ctctgaaaggttaccaaccagacat

SEQ ID NO: 317498 - DNA, 25 bp, Artificial
  Probe
cagacatatcctggtcctgggacag

SEQ ID NO: 317499 - DNA, 25 bp, Artificial
  Probe
caaccagacatatcctggtcctggg

SEQ ID NO: 317500 - DNA, 25 bp, Artificial
  Probe
gaaggtcaaggctctgaaaggttac

SEQ ID NO: 317501 - DNA, 25 bp, Artificial
  Probe
tctaaagtagctttctccagaccag

SEQ ID NO: 317502 - DNA, 25 bp, Artificial
  Probe
aagagtccttactctgttccctgtg

SEQ ID NO: 317503 - DNA, 25 bp, Artificial
  Probe
cctgtgttcagtagaggtctgtttg

SEQ ID NO: 317504 - DNA, 25 bp, Artificial
  Probe
atgtgagtgagcacgtgctctcttt

SEQ ID NO: 317505 - DNA, 25 bp, Artificial
  Probe
gcacgtgctctcttttcctttcaag

SEQ ID NO: 317506 - DNA, 25 bp, Artificial
  Probe
cagactttgacttctttgtatcaag

SEQ ID NO: 317507 - DNA, 25 bp, Artificial
  Probe
gaccagactttgacttctttgtatc

SEQ ID NO: 317508 - DNA, 25 bp, Artificial
  Probe
ccgatgtgagtgagcacgtgctctc

SEQ ID NO: 317509 - DNA, 25 bp, Artificial
  Probe
ccctgcagatgtgatgagttatcct

SEQ ID NO: 317510 - DNA, 25 bp, Artificial
  Probe
gaagaccgatcaatagagcatgtat

SEQ ID NO: 317511 - DNA, 25 bp, Artificial
  Probe
cttcatgaaattcagaggagttcac

SEQ ID NO: 317512 - DNA, 25 bp, Artificial
  Probe
gttatcctgtagtaagacattatct

SEQ ID NO: 317513 - DNA, 25 bp, Artificial
  Probe
tccagaccagactttgacttctttg

SEQ ID NO: 317514 - DNA, 25 bp, Artificial
  Probe
gagcacgtgctctcttttcctttca

SEQ ID NO: 317515 - DNA, 25 bp, Artificial
  Probe
ctttgtctaaccatggacactggta

SEQ ID NO: 317516 - DNA, 25 bp, Artificial
  Probe
ggtgttgagtgattgccctgcagat

SEQ ID NO: 317517 - DNA, 25 bp, Artificial
  Probe
aaattcagaggagttcacttttgct

SEQ ID NO: 317518 - DNA, 25 bp, Artificial
  Probe
ctgacagacaggtgccagatgaggc

SEQ ID NO: 317519 - DNA, 25 bp, Artificial
  Probe
ccttgcccgatgtgagtgagcacgt

SEQ ID NO: 317520 - DNA, 25 bp, Artificial
  Probe
gctttctccagaccagactttgact

SEQ ID NO: 317521 - DNA, 25 bp, Artificial
  Probe
ctaaccatggacactggtacttgat

SEQ ID NO: 317522 - DNA, 25 bp, Artificial
  Probe
tccttactctgttccctgtgttcag

SEQ ID NO: 317523 - DNA, 25 bp, Artificial
  Probe
gaggagttcacttttgctactacac

SEQ ID NO: 317524 - DNA, 25 bp, Artificial
  Probe
ttcagaggagttcacttttgctact

SEQ ID NO: 317525 - DNA, 25 bp, Artificial
  Probe
agttatcctgtagtaagacattatc

SEQ ID NO: 317526 - DNA, 25 bp, Artificial
  Probe
gccctgcagatgtgatgagttatcc

SEQ ID NO: 317527 - DNA, 25 bp, Artificial
  Probe
ttgagaagaccgatcaatagagcat

SEQ ID NO: 317528 - DNA, 25 bp, Artificial
  Probe
gaaagagtccttactctgttccctg

SEQ ID NO: 317529 - DNA, 25 bp, Artificial
  Probe
agtgattgccctgcagatgtgatga

SEQ ID NO: 317530 - DNA, 25 bp, Artificial
  Probe
accttcatgaaattcagaggagttc

SEQ ID NO: 317531 - DNA, 25 bp, Artificial
  Probe
tacactcttaatgactgacagacag

SEQ ID NO: 317532 - DNA, 25 bp, Artificial
  Probe
accgatcaatagagcatgtatgcaa

SEQ ID NO: 317533 - DNA, 25 bp, Artificial
  Probe
gtctaaccatggacactggtacttg

SEQ ID NO: 317534 - DNA, 25 bp, Artificial
  Probe
agaccgatcaatagagcatgtatgc

SEQ ID NO: 317535 - DNA, 25 bp, Artificial
  Probe
tactctgttccctgtgttcagtaga

SEQ ID NO: 317536 - DNA, 25 bp, Artificial
  Probe
gtgttgagtgattgccctgcagatg

SEQ ID NO: 317537 - DNA, 25 bp, Artificial
  Probe
gagtgattgccctgcagatgtgatg

SEQ ID NO: 317538 - DNA, 25 bp, Artificial
  Probe
cagacaggtgccagatgaggcttga

SEQ ID NO: 317539 - DNA, 25 bp, Artificial
  Probe
agtttactgcgattaaaactgaaca

SEQ ID NO: 317540 - DNA, 25 bp, Artificial
  Probe
acaggtgccagatgaggcttgagaa

SEQ ID NO: 317541 - DNA, 25 bp, Artificial
  Probe
tgtgctttgtctaaccatggacact

SEQ ID NO: 317542 - DNA, 25 bp, Artificial
  Probe
aaaccttcatgaaattcagaggagt

SEQ ID NO: 317543 - DNA, 25 bp, Artificial
  Probe
ggagttcacttttgctactacactc

SEQ ID NO: 317544 - DNA, 25 bp, Artificial
  Probe
tggacactggtacttgattcccctc

SEQ ID NO: 317545 - DNA, 25 bp, Artificial
  Probe
ctttgacttctttgtatcaagtgtg

SEQ ID NO: 317546 - DNA, 25 bp, Artificial
  Probe
ctcccttgcccgatgtgagtgagca

SEQ ID NO: 317547 - DNA, 25 bp, Artificial
  Probe
agatgtcctcattgattgagaaggc

SEQ ID NO: 317548 - DNA, 25 bp, Artificial
  Probe
cccagtcacaggagcttcaccaaga

SEQ ID NO: 317549 - DNA, 25 bp, Artificial
  Probe
tcagcaccagccacgggaagataac

SEQ ID NO: 317550 - DNA, 25 bp, Artificial
  Probe
tcgtcttcggacacgtcagcaccag

SEQ ID NO: 317551 - DNA, 25 bp, Artificial
  Probe
ggaagataacctgcttcaacaactt

SEQ ID NO: 317552 - DNA, 25 bp, Artificial
  Probe
aacagacccggtagggtacagcaga

SEQ ID NO: 317553 - DNA, 25 bp, Artificial
  Probe
gaacagacccggtagggtacagcag

SEQ ID NO: 317554 - DNA, 25 bp, Artificial
  Probe
gtgaatgccctgagcgaggacacag

SEQ ID NO: 317555 - DNA, 25 bp, Artificial
  Probe
cctcaccatcgtcttcaagttgcag

SEQ ID NO: 317556 - DNA, 25 bp, Artificial
  Probe
ccgtcttcatcatcacggcctgtta

SEQ ID NO: 317557 - DNA, 25 bp, Artificial
  Probe
gctggagctccaccacacggctgtg

SEQ ID NO: 317558 - DNA, 25 bp, Artificial
  Probe
accagccacgggaagataacctgct

SEQ ID NO: 317559 - DNA, 25 bp, Artificial
  Probe
gcctctgtcttcagcctgggactgc

SEQ ID NO: 317560 - DNA, 25 bp, Artificial
  Probe
tgtacgtcttcatgggccacgactt

SEQ ID NO: 317561 - DNA, 25 bp, Artificial
  Probe
tctgtggcttcctgatccccgtctt

SEQ ID NO: 317562 - DNA, 25 bp, Artificial
  Probe
gtggcttcctgatccccgtcttcat

SEQ ID NO: 317563 - DNA, 25 bp, Artificial
  Probe
cacgacttcaaaaaattcaaggtgg

SEQ ID NO: 317564 - DNA, 25 bp, Artificial
  Probe
ccatcctgtacgtcttcatgggcca

SEQ ID NO: 317565 - DNA, 25 bp, Artificial
  Probe
agcttcaccaagatgtcctcattga

SEQ ID NO: 317566 - DNA, 25 bp, Artificial
  Probe
gtcgccatcgccaacagctgtatga

SEQ ID NO: 317567 - DNA, 25 bp, Artificial
  Probe
gtcttcatcatcacggcctgttacc

SEQ ID NO: 317568 - DNA, 25 bp, Artificial
  Probe
tcttcaagttgcagcgcaaccgcca

SEQ ID NO: 317569 - DNA, 25 bp, Artificial
  Probe
acagcagacatgtggcggtcaccgt

SEQ ID NO: 317570 - DNA, 25 bp, Artificial
  Probe
atgccctgagcgaggacacaggacc

SEQ ID NO: 317571 - DNA, 25 bp, Artificial
  Probe
ggtacagcagacatgtggcggtcac

SEQ ID NO: 317572 - DNA, 25 bp, Artificial
  Probe
ccgcctggtgaatgccctgagcgag

SEQ ID NO: 317573 - DNA, 25 bp, Artificial
  Probe
tgctggagctccaccacacggctgt

SEQ ID NO: 317574 - DNA, 25 bp, Artificial
  Probe
agttgcagcgcaaccgccaggccaa

SEQ ID NO: 317575 - DNA, 25 bp, Artificial
  Probe
acctgcttcaacaacttcagcctgg

SEQ ID NO: 317576 - DNA, 25 bp, Artificial
  Probe
gacccggtagggtacagcagacatg

SEQ ID NO: 317577 - DNA, 25 bp, Artificial
  Probe
aaccgccaggccaagaccaagaagc

SEQ ID NO: 317578 - DNA, 25 bp, Artificial
  Probe
caggccaagaccaagaagcccttca

SEQ ID NO: 317579 - DNA, 25 bp, Artificial
  Probe
tcgccaacagctgtatgaaccccat

SEQ ID NO: 317580 - DNA, 25 bp, Artificial
  Probe
tcttcatgggccacgacttcaaaaa

SEQ ID NO: 317581 - DNA, 25 bp, Artificial
  Probe
ttcaacaacttcagcctggcggcgc

SEQ ID NO: 317582 - DNA, 25 bp, Artificial
  Probe
gccctgagcgaggacacaggaccct

SEQ ID NO: 317583 - DNA, 25 bp, Artificial
  Probe
cacgtcagcaccagccacgggaaga

SEQ ID NO: 317584 - DNA, 25 bp, Artificial
  Probe
tgtgccagcctctgtcttcagcctg

SEQ ID NO: 317585 - DNA, 25 bp, Artificial
  Probe
ggacacgtcagcaccagccacggga

SEQ ID NO: 317586 - DNA, 25 bp, Artificial
  Probe
tcccgcctggtgaatgccctgagcg

SEQ ID NO: 317587 - DNA, 25 bp, Artificial
  Probe
agccacgggaagataacctgcttca

SEQ ID NO: 317588 - DNA, 25 bp, Artificial
  Probe
acccggtagggtacagcagacatgt

SEQ ID NO: 317589 - DNA, 25 bp, Artificial
  Probe
aagttgcagcgcaaccgccaggcca

SEQ ID NO: 317590 - DNA, 25 bp, Artificial
  Probe
ttcaccaagatgtcctcattgattg

SEQ ID NO: 317591 - DNA, 25 bp, Artificial
  Probe
ccaagaccaagaagcccttcaagat

SEQ ID NO: 317592 - DNA, 25 bp, Artificial
  Probe
gacatgtggcggtcaccgtcacccg

SEQ ID NO: 317593 - DNA, 25 bp, Artificial
  Probe
agactttgatagagacctagttttc

SEQ ID NO: 317594 - DNA, 25 bp, Artificial
  Probe
gcttgcccgagacagggaagccaga

SEQ ID NO: 317595 - DNA, 25 bp, Artificial
  Probe
gtcactagagttgcaagaagcaatt

SEQ ID NO: 317596 - DNA, 25 bp, Artificial
  Probe
ccataccccacagatgtcaaaggct

SEQ ID NO: 317597 - DNA, 25 bp, Artificial
  Probe
caatggaatccttgcccatgccttt

SEQ ID NO: 317598 - DNA, 25 bp, Artificial
  Probe
agtgtgccatcaaccctgaccttca

SEQ ID NO: 317599 - DNA, 25 bp, Artificial
  Probe
ccccagctgagaacagttgacctca

SEQ ID NO: 317600 - DNA, 25 bp, Artificial
  Probe
ccagatgcagctacaatagagataa

SEQ ID NO: 317601 - DNA, 25 bp, Artificial
  Probe
aatggaaaagcctcgctgtggagtg

SEQ ID NO: 317602 - DNA, 25 bp, Artificial
  Probe
tttaaaatctggagtgtgccatcaa

SEQ ID NO: 317603 - DNA, 25 bp, Artificial
  Probe
cactacctcaagatgatatcaatgg

SEQ ID NO: 317604 - DNA, 25 bp, Artificial
  Probe
ccacttaccaagcaatcagttccgg

SEQ ID NO: 317605 - DNA, 25 bp, Artificial
  Probe
ccaatgctggagatacgacaatcaa

SEQ ID NO: 317606 - DNA, 25 bp, Artificial
  Probe
ttcttcagtggaccacaatattttg

SEQ ID NO: 317607 - DNA, 25 bp, Artificial
  Probe
gacacacactaacctgacctacagg

SEQ ID NO: 317608 - DNA, 25 bp, Artificial
  Probe
tctcgtggctgctcatgaatttgga

SEQ ID NO: 317609 - DNA, 25 bp, Artificial
  Probe
tgcagcgcttcttcggcttgcccga

SEQ ID NO: 317610 - DNA, 25 bp, Artificial
  Probe
accttagagggagaagcagacatca

SEQ ID NO: 317611 - DNA, 25 bp, Artificial
  Probe
ttaaggagatgcagcgcttcttcgg

SEQ ID NO: 317612 - DNA, 25 bp, Artificial
  Probe
ttgatgctgccaccacactccgtgg

SEQ ID NO: 317613 - DNA, 25 bp, Artificial
  Probe
ggactcaagactccaagaattacaa

SEQ ID NO: 317614 - DNA, 25 bp, Artificial
  Probe
ggaattcagacaatctatggacctt

SEQ ID NO: 317615 - DNA, 25 bp, Artificial
  Probe
ttcccaggaataaactgtagaattg

SEQ ID NO: 317616 - DNA, 25 bp, Artificial
  Probe
acctcaagatgatatcaatggaatt

SEQ ID NO: 317617 - DNA, 25 bp, Artificial
  Probe
gttttccagcaggattccttcttcc

SEQ ID NO: 317618 - DNA, 25 bp, Artificial
  Probe
tcaggctgcttatgaagactttgat

SEQ ID NO: 317619 - DNA, 25 bp, Artificial
  Probe
aaactgctgagaattacctacgaaa

SEQ ID NO: 317620 - DNA, 25 bp, Artificial
  Probe
gctaactccgggaagccccaagtgg

SEQ ID NO: 317621 - DNA, 25 bp, Artificial
  Probe
tgcttacagagaacccagcacctat

SEQ ID NO: 317622 - DNA, 25 bp, Artificial
  Probe
ctccagaacacctggaagagaaaaa

SEQ ID NO: 317623 - DNA, 25 bp, Artificial
  Probe
gtggaccacaatattttgcatttaa

SEQ ID NO: 317624 - DNA, 25 bp, Artificial
  Probe
agaattgatgcagttttccagcagg

SEQ ID NO: 317625 - DNA, 25 bp, Artificial
  Probe
tcctataacgggaagacatacttct

SEQ ID NO: 317626 - DNA, 25 bp, Artificial
  Probe
gaaacgtggactcaagactccaaga

SEQ ID NO: 317627 - DNA, 25 bp, Artificial
  Probe
actttgatagagacctagttttctt

SEQ ID NO: 317628 - DNA, 25 bp, Artificial
  Probe
ccacagatgtcaaaggctgaagtga

SEQ ID NO: 317629 - DNA, 25 bp, Artificial
  Probe
tttaaaggcagacagtactgggctc

SEQ ID NO: 317630 - DNA, 25 bp, Artificial
  Probe
acaatcaaagaagatccatggatcc

SEQ ID NO: 317631 - DNA, 25 bp, Artificial
  Probe
cccacctgagatttgatgctgccac

SEQ ID NO: 317632 - DNA, 25 bp, Artificial
  Probe
tgaatttggacattccttgggactc

SEQ ID NO: 317633 - DNA, 25 bp, Artificial
  Probe
agaattacaacctgtttctcgtggc

SEQ ID NO: 317634 - DNA, 25 bp, Artificial
  Probe
ctgttctggcccttcctacctaatg

SEQ ID NO: 317635 - DNA, 25 bp, Artificial
  Probe
tgctgagaattacctacgaaaattc

SEQ ID NO: 317636 - DNA, 25 bp, Artificial
  Probe
atggaccttcagacaaccctgtcca

SEQ ID NO: 317637 - DNA, 25 bp, Artificial
  Probe
gcaatttatggcttaactgtccata

SEQ ID NO: 317638 - DNA, 25 bp, Artificial
  Probe
tttaaagacaagtacttctggagac

SEQ ID NO: 317639 - DNA, 25 bp, Artificial
  Probe
tgtcactggacttggccaactcagc

SEQ ID NO: 317640 - DNA, 25 bp, Artificial
  Probe
caaccccgagggatgtcactggact

SEQ ID NO: 317641 - DNA, 25 bp, Artificial
  Probe
gcactccatggagacaagaacccct

SEQ ID NO: 317642 - DNA, 25 bp, Artificial
  Probe
actccatggagacaagaacccctga

SEQ ID NO: 317643 - DNA, 25 bp, Artificial
  Probe
gtgcttgctgctgctaagcttggtc

SEQ ID NO: 317644 - DNA, 25 bp, Artificial
  Probe
ctgtgcttgctgctgctaagcttgg

SEQ ID NO: 317645 - DNA, 25 bp, Artificial
  Probe
tggacgcaccaagttctctcagcgt

SEQ ID NO: 317646 - DNA, 25 bp, Artificial
  Probe
ccccgagggatgtcactggacttgg

SEQ ID NO: 317647 - DNA, 25 bp, Artificial
  Probe
gcttctgtgcttgctgctgctaagc

SEQ ID NO: 317648 - DNA, 25 bp, Artificial
  Probe
atcctgcctggtacacgggccgcgg

SEQ ID NO: 317649 - DNA, 25 bp, Artificial
  Probe
ccctgatatcaatcctgcctggtac

SEQ ID NO: 317650 - DNA, 25 bp, Artificial
  Probe
cccactggatggacgcaccaagttc

SEQ ID NO: 317651 - DNA, 25 bp, Artificial
  Probe
agggcaaccccgagggatgtcactg

SEQ ID NO: 317652 - DNA, 25 bp, Artificial
  Probe
atggagacaagaacccctgatatca

SEQ ID NO: 317653 - DNA, 25 bp, Artificial
  Probe
taagcttggtcctcccaggggcttc

SEQ ID NO: 317654 - DNA, 25 bp, Artificial
  Probe
acccctgatatcaatcctgcctggt

SEQ ID NO: 317655 - DNA, 25 bp, Artificial
  Probe
accccgagggatgtcactggacttg

SEQ ID NO: 317656 - DNA, 25 bp, Artificial
  Probe
agcactccatggagacaagaacccc

SEQ ID NO: 317657 - DNA, 25 bp, Artificial
  Probe
tgatatcaatcctgcctggtacacg

SEQ ID NO: 317658 - DNA, 25 bp, Artificial
  Probe
tgtgcttgctgctgctaagcttggt

SEQ ID NO: 317659 - DNA, 25 bp, Artificial
  Probe
catggagacaagaacccctgatatc

SEQ ID NO: 317660 - DNA, 25 bp, Artificial
  Probe
ccagcactccatggagacaagaacc

SEQ ID NO: 317661 - DNA, 25 bp, Artificial
  Probe
gcttgctgctgctaagcttggtcct

SEQ ID NO: 317662 - DNA, 25 bp, Artificial
  Probe
aaccccgagggatgtcactggactt

SEQ ID NO: 317663 - DNA, 25 bp, Artificial
  Probe
tgctaagcttggtcctcccaggggc

SEQ ID NO: 317664 - DNA, 25 bp, Artificial
  Probe
ctggatggacgcaccaagttctctc

SEQ ID NO: 317665 - DNA, 25 bp, Artificial
  Probe
ccgcttcggcaggagaagggcaacc

SEQ ID NO: 317666 - DNA, 25 bp, Artificial
  Probe
tcaatcctgcctggtacacgggccg

SEQ ID NO: 317667 - DNA, 25 bp, Artificial
  Probe
gtggcttctgtgcttgctgctgcta

SEQ ID NO: 317668 - DNA, 25 bp, Artificial
  Probe
ccaccagcactccatggagacaaga

SEQ ID NO: 317669 - DNA, 25 bp, Artificial
  Probe
caccagcactccatggagacaagaa

SEQ ID NO: 317670 - DNA, 25 bp, Artificial
  Probe
tcccactggatggacgcaccaagtt

SEQ ID NO: 317671 - DNA, 25 bp, Artificial
  Probe
aatcctgcctggtacacgggccgcg

SEQ ID NO: 317672 - DNA, 25 bp, Artificial
  Probe
cttcggcaggagaagggcaaccccg

SEQ ID NO: 317673 - DNA, 25 bp, Artificial
  Probe
ggatggacgcaccaagttctctcag

SEQ ID NO: 317674 - DNA, 25 bp, Artificial
  Probe
ccgagggatgtcactggacttggcc

SEQ ID NO: 317675 - DNA, 25 bp, Artificial
  Probe
tgctgctaagcttggtcctcccagg

SEQ ID NO: 317676 - DNA, 25 bp, Artificial
  Probe
gagggatgtcactggacttggccaa

SEQ ID NO: 317677 - DNA, 25 bp, Artificial
  Probe
ctgctgctaagcttggtcctcccag

SEQ ID NO: 317678 - DNA, 25 bp, Artificial
  Probe
atcaatcctgcctggtacacgggcc

SEQ ID NO: 317679 - DNA, 25 bp, Artificial
  Probe
gcaccaagttctctcagcgtggata

SEQ ID NO: 317680 - DNA, 25 bp, Artificial
  Probe
atgtcactggacttggccaactcag

SEQ ID NO: 317681 - DNA, 25 bp, Artificial
  Probe
gcttcggcaggagaagggcaacccc

SEQ ID NO: 317682 - DNA, 25 bp, Artificial
  Probe
gaacccctgatatcaatcctgcctg

SEQ ID NO: 317683 - DNA, 25 bp, Artificial
  Probe
ctcccactggatggacgcaccaagt

SEQ ID NO: 317684 - DNA, 25 bp, Artificial
  Probe
gccctgaagacgtggcttctgtgct

SEQ ID NO: 317685 - DNA, 25 bp, Artificial
  Probe
acaccaagcaaaagtacaagtgcat

SEQ ID NO: 317686 - DNA, 25 bp, Artificial
  Probe
tggaggcaaaccagtcaacaagtgc

SEQ ID NO: 317687 - DNA, 25 bp, Artificial
  Probe
catctttgcatgatgttggtgaaac

SEQ ID NO: 317688 - DNA, 25 bp, Artificial
  Probe
ccatccagggagtgaagacagggtt

SEQ ID NO: 317689 - DNA, 25 bp, Artificial
  Probe
tttactcctgaatgcaagtttaaag

SEQ ID NO: 317690 - DNA, 25 bp, Artificial
  Probe
caagggcatagtgaccaggttatat

SEQ ID NO: 317691 - DNA, 25 bp, Artificial
  Probe
ttggtgaaacagtcccgaaagctgg

SEQ ID NO: 317692 - DNA, 25 bp, Artificial
  Probe
atattgcaggcaaggttactacttg

SEQ ID NO: 317693 - DNA, 25 bp, Artificial
  Probe
gcagtgtctttgtggcaagagtctt

SEQ ID NO: 317694 - DNA, 25 bp, Artificial
  Probe
tgttggtgaaacagtcccgaaagct

SEQ ID NO: 317695 - DNA, 25 bp, Artificial
  Probe
cagctcaagggcatagtgaccaggt

SEQ ID NO: 317696 - DNA, 25 bp, Artificial
  Probe
agaactttttactcctgaatgcaag

SEQ ID NO: 317697 - DNA, 25 bp, Artificial
  Probe
actaaggatgacagcaccaattcca

SEQ ID NO: 317698 - DNA, 25 bp, Artificial
  Probe
ctggcagagcctggtttttgggatt

SEQ ID NO: 317699 - DNA, 25 bp, Artificial
  Probe
aggagtctggcagagcctggttttt

SEQ ID NO: 317700 - DNA, 25 bp, Artificial
  Probe
gccattggaagttgccatgtaccga

SEQ ID NO: 317701 - DNA, 25 bp, Artificial
  Probe
ctcctgaatgcaagtttaaagagtc

SEQ ID NO: 317702 - DNA, 25 bp, Artificial
  Probe
gaaacagtcccgaaagctggggtga

SEQ ID NO: 317703 - DNA, 25 bp, Artificial
  Probe
gcatctgcaataatgaatggaggca

SEQ ID NO: 317704 - DNA, 25 bp, Artificial
  Probe
catcccagtgggactgcgtgttgtt

SEQ ID NO: 317705 - DNA, 25 bp, Artificial
  Probe
agatgcaccccgatggagctctcga

SEQ ID NO: 317706 - DNA, 25 bp, Artificial
  Probe
aatctactcatccatgctgtacagg

SEQ ID NO: 317707 - DNA, 25 bp, Artificial
  Probe
acttgcagatgcaccccgatggagc

SEQ ID NO: 317708 - DNA, 25 bp, Artificial
  Probe
tctggcagagcctggtttttgggat

SEQ ID NO: 317709 - DNA, 25 bp, Artificial
  Probe
ttgttgccatccagggagtgaagac

SEQ ID NO: 317710 - DNA, 25 bp, Artificial
  Probe
caactgatccccagctcaagggcat

SEQ ID NO: 317711 - DNA, 25 bp, Artificial
  Probe
atccccagctcaagggcatagtgac

SEQ ID NO: 317712 - DNA, 25 bp, Artificial
  Probe
tgttgttgccatccagggagtgaag

SEQ ID NO: 317713 - DNA, 25 bp, Artificial
  Probe
aaagtacaagtgcatctgcaataat

SEQ ID NO: 317714 - DNA, 25 bp, Artificial
  Probe
agtcccgaaagctggggtgacacca

SEQ ID NO: 317715 - DNA, 25 bp, Artificial
  Probe
cgaaagctggggtgacaccaagcaa

SEQ ID NO: 317716 - DNA, 25 bp, Artificial
  Probe
cattttctacccaagccattggaag

SEQ ID NO: 317717 - DNA, 25 bp, Artificial
  Probe
caagtgcatctgcaataatgaatgg

SEQ ID NO: 317718 - DNA, 25 bp, Artificial
  Probe
tgctgtacaggcaacaggagtctgg

SEQ ID NO: 317719 - DNA, 25 bp, Artificial
  Probe
tgccatgtaccgagaaccatctttg

SEQ ID NO: 317720 - DNA, 25 bp, Artificial
  Probe
ggttactacttgcagatgcaccccg

SEQ ID NO: 317721 - DNA, 25 bp, Artificial
  Probe
gagaaggttacctctacccatcaga

SEQ ID NO: 317722 - DNA, 25 bp, Artificial
  Probe
ctgttcaacctcatcccagtgggac

SEQ ID NO: 317723 - DNA, 25 bp, Artificial
  Probe
gatgacagcaccaattccactctgt

SEQ ID NO: 317724 - DNA, 25 bp, Artificial
  Probe
gaactttttactcctgaatgcaagt

SEQ ID NO: 317725 - DNA, 25 bp, Artificial
  Probe
caggagtctggcagagcctggtttt

SEQ ID NO: 317726 - DNA, 25 bp, Artificial
  Probe
aggcaacaggagtctggcagagcct

SEQ ID NO: 317727 - DNA, 25 bp, Artificial
  Probe
tatattgcaggcaaggttactactt

SEQ ID NO: 317728 - DNA, 25 bp, Artificial
  Probe
tgaccaggttatattgcaggcaagg

SEQ ID NO: 317729 - DNA, 25 bp, Artificial
  Probe
gaaggttacctctacccatcagaac

SEQ ID NO: 317730 - DNA, 25 bp, Artificial
  Probe
ctctcgatggaactaaggatgacag

SEQ ID NO: 317731 - DNA, 25 bp, Artificial
  Probe
gctttaagtgcacaggttgacttgt

SEQ ID NO: 317732 - DNA, 25 bp, Artificial
  Probe
tctcaactgggcaagggcagtggat

SEQ ID NO: 317733 - DNA, 25 bp, Artificial
  Probe
gctctgagagagcactctggaatgt

SEQ ID NO: 317734 - DNA, 25 bp, Artificial
  Probe
ttcacaggtaggtcaaatcttcttt

SEQ ID NO: 317735 - DNA, 25 bp, Artificial
  Probe
tcctcagaggccagggcagaagcct

SEQ ID NO: 317736 - DNA, 25 bp, Artificial
  Probe
caggttgacttgtcaatggcattgg

SEQ ID NO: 317737 - DNA, 25 bp, Artificial
  Probe
actctggaatgtgaactgaagcaaa

SEQ ID NO: 317738 - DNA, 25 bp, Artificial
  Probe
cagaagcctggctgctctgagagag

SEQ ID NO: 317739 - DNA, 25 bp, Artificial
  Probe
tgtcaatggcattggggtcgcctaa

SEQ ID NO: 317740 - DNA, 25 bp, Artificial
  Probe
tacgctttaagtgcacaggttgact

SEQ ID NO: 317741 - DNA, 25 bp, Artificial
  Probe
agcaaggctctctcaactgggcaag

SEQ ID NO: 317742 - DNA, 25 bp, Artificial
  Probe
ggtcaaatcttctttgcctgttact

SEQ ID NO: 317743 - DNA, 25 bp, Artificial
  Probe
gggtcttttcacaggtaggtcaaat

SEQ ID NO: 317744 - DNA, 25 bp, Artificial
  Probe
cctggctgctctgagagagcactct

SEQ ID NO: 317745 - DNA, 25 bp, Artificial
  Probe
agagagcactctggaatgtgaactg

SEQ ID NO: 317746 - DNA, 25 bp, Artificial
  Probe
taagtgcacaggttgacttgtcaat

SEQ ID NO: 317747 - DNA, 25 bp, Artificial
  Probe
tcaaatcttctttgcctgttactgg

SEQ ID NO: 317748 - DNA, 25 bp, Artificial
  Probe
ttactgggtggaagcaaggctctct

SEQ ID NO: 317749 - DNA, 25 bp, Artificial
  Probe
tttaagtgcacaggttgacttgtca

SEQ ID NO: 317750 - DNA, 25 bp, Artificial
  Probe
ccaagttgggtcttttcacaggtag

SEQ ID NO: 317751 - DNA, 25 bp, Artificial
  Probe
agagcactctggaatgtgaactgaa

SEQ ID NO: 317752 - DNA, 25 bp, Artificial
  Probe
ggctctctcaactgggcaagggcag

SEQ ID NO: 317753 - DNA, 25 bp, Artificial
  Probe
tggaagcaaggctctctcaactggg

SEQ ID NO: 317754 - DNA, 25 bp, Artificial
  Probe
gttgggtcttttcacaggtaggtca

SEQ ID NO: 317755 - DNA, 25 bp, Artificial
  Probe
ctcaactgggcaagggcagtggatc

SEQ ID NO: 317756 - DNA, 25 bp, Artificial
  Probe
cttgtcaatggcattggggtcgcct

SEQ ID NO: 317757 - DNA, 25 bp, Artificial
  Probe
tttgcctgttactgggtggaagcaa

SEQ ID NO: 317758 - DNA, 25 bp, Artificial
  Probe
tctttgcctgttactgggtggaagc

SEQ ID NO: 317759 - DNA, 25 bp, Artificial
  Probe
tcttctttgcctgttactgggtgga

SEQ ID NO: 317760 - DNA, 25 bp, Artificial
  Probe
gctgctctgagagagcactctggaa

SEQ ID NO: 317761 - DNA, 25 bp, Artificial
  Probe
tggctgctctgagagagcactctgg

SEQ ID NO: 317762 - DNA, 25 bp, Artificial
  Probe
aactgaagcaaactattgtaaagct

SEQ ID NO: 317763 - DNA, 25 bp, Artificial
  Probe
cagtggatcctcagaggccagggca

SEQ ID NO: 317764 - DNA, 25 bp, Artificial
  Probe
aagggcagtggatcctcagaggcca

SEQ ID NO: 317765 - DNA, 25 bp, Artificial
  Probe
aaggctctctcaactgggcaagggc

SEQ ID NO: 317766 - DNA, 25 bp, Artificial
  Probe
gcacaggttgacttgtcaatggcat

SEQ ID NO: 317767 - DNA, 25 bp, Artificial
  Probe
aagcctggctgctctgagagagcac

SEQ ID NO: 317768 - DNA, 25 bp, Artificial
  Probe
ttgtcaatggcattggggtcgccta

SEQ ID NO: 317769 - DNA, 25 bp, Artificial
  Probe
gtgcacaggttgacttgtcaatggc

SEQ ID NO: 317770 - DNA, 25 bp, Artificial
  Probe
ggtaggtcaaatcttctttgcctgt

SEQ ID NO: 317771 - DNA, 25 bp, Artificial
  Probe
ttgacttgtcaatggcattggggtc

SEQ ID NO: 317772 - DNA, 25 bp, Artificial
  Probe
gcctggctgctctgagagagcactc

SEQ ID NO: 317773 - DNA, 25 bp, Artificial
  Probe
tgttactgggtggaagcaaggctct

SEQ ID NO: 317774 - DNA, 25 bp, Artificial
  Probe
caagttgggtcttttcacaggtagg

SEQ ID NO: 317775 - DNA, 25 bp, Artificial
  Probe
gaccaagttgggtcttttcacaggt

SEQ ID NO: 317776 - DNA, 25 bp, Artificial
  Probe
cctgttactgggtggaagcaaggct

SEQ ID NO: 317777 - DNA, 25 bp, Artificial
  Probe
ggagtcagaggcagcacctaagccc

SEQ ID NO: 317778 - DNA, 25 bp, Artificial
  Probe
caaccggagtgaaccaagcggagac

SEQ ID NO: 317779 - DNA, 25 bp, Artificial
  Probe
tgcttactaagaagccagtttgggt

SEQ ID NO: 317780 - DNA, 25 bp, Artificial
  Probe
tgcttctagaagagtgagcacagta

SEQ ID NO: 317781 - DNA, 25 bp, Artificial
  Probe
agcaagtccctactggagaattatt

SEQ ID NO: 317782 - DNA, 25 bp, Artificial
  Probe
agccagtgaaggaaccggagaaatt

SEQ ID NO: 317783 - DNA, 25 bp, Artificial
  Probe
gaaccaaccggagtgaaccaagcgg

SEQ ID NO: 317784 - DNA, 25 bp, Artificial
  Probe
accggagtgaaccaagcggagaccg

SEQ ID NO: 317785 - DNA, 25 bp, Artificial
  Probe
tacctgcttactaagaagccagttt

SEQ ID NO: 317786 - DNA, 25 bp, Artificial
  Probe
ttcccagtgcttctagaagagtgag

SEQ ID NO: 317787 - DNA, 25 bp, Artificial
  Probe
gagaaattctcgaagctgaaacctc

SEQ ID NO: 317788 - DNA, 25 bp, Artificial
  Probe
gaatgtgaaccaaccggagtgaacc

SEQ ID NO: 317789 - DNA, 25 bp, Artificial
  Probe
catatccgattgacaggataaagat

SEQ ID NO: 317790 - DNA, 25 bp, Artificial
  Probe
accaaccggagtgaaccaagcggag

SEQ ID NO: 317791 - DNA, 25 bp, Artificial
  Probe
tacgtgctggccaacctctgtgaga

SEQ ID NO: 317792 - DNA, 25 bp, Artificial
  Probe
agctctcttcccagtgcttctagaa

SEQ ID NO: 317793 - DNA, 25 bp, Artificial
  Probe
agtcagaggcagcacctaagccccg

SEQ ID NO: 317794 - DNA, 25 bp, Artificial
  Probe
atttgtacgtgctggccaacctctg

SEQ ID NO: 317795 - DNA, 25 bp, Artificial
  Probe
tctgtagccagtgaaggaaccggag

SEQ ID NO: 317796 - DNA, 25 bp, Artificial
  Probe
tactaagaagccagtttgggtctgg

SEQ ID NO: 317797 - DNA, 25 bp, Artificial
  Probe
agagtgagcacagtacactggaatg

SEQ ID NO: 317798 - DNA, 25 bp, Artificial
  Probe
aaccggagaaattctcgaagctgaa

SEQ ID NO: 317799 - DNA, 25 bp, Artificial
  Probe
tgaaacctcttgtcgccttcacagt

SEQ ID NO: 317800 - DNA, 25 bp, Artificial
  Probe
tcacagtgattttaccgaagagggc

SEQ ID NO: 317801 - DNA, 25 bp, Artificial
  Probe
ctaagaagccagtttgggtctggag

SEQ ID NO: 317802 - DNA, 25 bp, Artificial
  Probe
gattctgtagccagtgaaggaaccg

SEQ ID NO: 317803 - DNA, 25 bp, Artificial
  Probe
acctctgtgagaagccatatccgat

SEQ ID NO: 317804 - DNA, 25 bp, Artificial
  Probe
gaacagctctcttcccagtgcttct

SEQ ID NO: 317805 - DNA, 25 bp, Artificial
  Probe
ctttctgaggatacctgcttactaa

SEQ ID NO: 317806 - DNA, 25 bp, Artificial
  Probe
gagcagattcactgcggattctgta

SEQ ID NO: 317807 - DNA, 25 bp, Artificial
  Probe
tgcggattctgtagccagtgaagga

SEQ ID NO: 317808 - DNA, 25 bp, Artificial
  Probe
ctgaggatacctgcttactaagaag

SEQ ID NO: 317809 - DNA, 25 bp, Artificial
  Probe
aagccatatccgattgacaggataa

SEQ ID NO: 317810 - DNA, 25 bp, Artificial
  Probe
tactgaacagctctcttcccagtgc

SEQ ID NO: 317811 - DNA, 25 bp, Artificial
  Probe
gttttgttgtccattagctttcaag

SEQ ID NO: 317812 - DNA, 25 bp, Artificial
  Probe
atccgattgacaggataaagatggc

SEQ ID NO: 317813 - DNA, 25 bp, Artificial
  Probe
gattcactgcggattctgtagccag

SEQ ID NO: 317814 - DNA, 25 bp, Artificial
  Probe
gatacctgcttactaagaagccagt

SEQ ID NO: 317815 - DNA, 25 bp, Artificial
  Probe
cctcttgtcgccttcacagtgattt

SEQ ID NO: 317816 - DNA, 25 bp, Artificial
  Probe
cgaagctgaaacctcttgtcgcctt

SEQ ID NO: 317817 - DNA, 25 bp, Artificial
  Probe
caccccagggcttgctttctgagga

SEQ ID NO: 317818 - DNA, 25 bp, Artificial
  Probe
gaaattctcgaagctgaaacctctt

SEQ ID NO: 317819 - DNA, 25 bp, Artificial
  Probe
tgaaccaaccggagtgaaccaagcg

SEQ ID NO: 317820 - DNA, 25 bp, Artificial
  Probe
aagctgaaacctcttgtcgccttca

SEQ ID NO: 317821 - DNA, 25 bp, Artificial
  Probe
acagtacactggaatgtgaaccaac

SEQ ID NO: 317822 - DNA, 25 bp, Artificial
  Probe
ctggaatgtgaaccaaccggagtga

SEQ ID NO: 317823 - DNA, 25 bp, Artificial
  Probe
ggacaaccaacaagtaggagaggaa

SEQ ID NO: 317824 - DNA, 25 bp, Artificial
  Probe
aaagtatggacaaccaacaagtagg

SEQ ID NO: 317825 - DNA, 25 bp, Artificial
  Probe
caaccaacaagtaggagaggaagct

SEQ ID NO: 317826 - DNA, 25 bp, Artificial
  Probe
ggatcatcgggctagccttcccggc

SEQ ID NO: 317827 - DNA, 25 bp, Artificial
  Probe
cggccgtaatgacaactcctacatg

SEQ ID NO: 317828 - DNA, 25 bp, Artificial
  Probe
tttttctagacacagatgcgcatta

SEQ ID NO: 317829 - DNA, 25 bp, Artificial
  Probe
tcacgcaaagtggacaaacgtagtg

SEQ ID NO: 317830 - DNA, 25 bp, Artificial
  Probe
tgtctatgatctgatgtgaggtgcc

SEQ ID NO: 317831 - DNA, 25 bp, Artificial
  Probe
ttctagacacagatgcgcattataa

SEQ ID NO: 317832 - DNA, 25 bp, Artificial
  Probe
ccggccgtaatgacaactcctacat

SEQ ID NO: 317833 - DNA, 25 bp, Artificial
  Probe
ttcccggccgtaatgacaactccta

SEQ ID NO: 317834 - DNA, 25 bp, Artificial
  Probe
ttaggtcatcactgggaccagagaa

SEQ ID NO: 317835 - DNA, 25 bp, Artificial
  Probe
atgtgtacatcaaaaaccgtgtgtc

SEQ ID NO: 317836 - DNA, 25 bp, Artificial
  Probe
aacagaggatcatcgggctagcctt

SEQ ID NO: 317837 - DNA, 25 bp, Artificial
  Probe
atggacaaccaacaagtaggagagg

SEQ ID NO: 317838 - DNA, 25 bp, Artificial
  Probe
catcaaaaaccgtgtgtctatgatc

SEQ ID NO: 317839 - DNA, 25 bp, Artificial
  Probe
tgcgcattataaactcagagcccgt

SEQ ID NO: 317840 - DNA, 25 bp, Artificial
  Probe
tgagacatttttctagacacagatg

SEQ ID NO: 317841 - DNA, 25 bp, Artificial
  Probe
tcaaaaaccgtgtgtctatgatctg

SEQ ID NO: 317842 - DNA, 25 bp, Artificial
  Probe
cgttcacgcaaagtggacaaacgta

SEQ ID NO: 317843 - DNA, 25 bp, Artificial
  Probe
gggatatacccgttcacgcaaagtg

SEQ ID NO: 317844 - DNA, 25 bp, Artificial
  Probe
tgagcacacatataaaagtatggac

SEQ ID NO: 317845 - DNA, 25 bp, Artificial
  Probe
cacagatgcgcattataaactcaga

SEQ ID NO: 317846 - DNA, 25 bp, Artificial
  Probe
atgcgcattataaactcagagcccg

SEQ ID NO: 317847 - DNA, 25 bp, Artificial
  Probe
cgtgagcacacatataaaagtatgg

SEQ ID NO: 317848 - DNA, 25 bp, Artificial
  Probe
aaaccgtgtgtctatgatctgatgt

SEQ ID NO: 317849 - DNA, 25 bp, Artificial
  Probe
ctatgatctgatgtgaggtgcctga

SEQ ID NO: 317850 - DNA, 25 bp, Artificial
  Probe
tttctagacacagatgcgcattata

SEQ ID NO: 317851 - DNA, 25 bp, Artificial
  Probe
catgtgtacatcaaaaaccgtgtgt

SEQ ID NO: 317852 - DNA, 25 bp, Artificial
  Probe
agatgcgcattataaactcagagcc

SEQ ID NO: 317853 - DNA, 25 bp, Artificial
  Probe
tgtacatcaaaaaccgtgtgtctat

SEQ ID NO: 317854 - DNA, 25 bp, Artificial
  Probe
gagagttaggtcatcactgggacca

SEQ ID NO: 317855 - DNA, 25 bp, Artificial
  Probe
acacagatgcgcattataaactcag

SEQ ID NO: 317856 - DNA, 25 bp, Artificial
  Probe
cccgttcacgcaaagtggacaaacg

SEQ ID NO: 317857 - DNA, 25 bp, Artificial
  Probe
gccgtaatgacaactcctacatgta

SEQ ID NO: 317858 - DNA, 25 bp, Artificial
  Probe
ccgtgtgtctatgatctgatgtgag

SEQ ID NO: 317859 - DNA, 25 bp, Artificial
  Probe
gttaggtcatcactgggaccagaga

SEQ ID NO: 317860 - DNA, 25 bp, Artificial
  Probe
acaaccaacaagtaggagaggaagc

SEQ ID NO: 317861 - DNA, 25 bp, Artificial
  Probe
agtatggacaaccaacaagtaggag

SEQ ID NO: 317862 - DNA, 25 bp, Artificial
  Probe
tctagacacagatgcgcattataaa

SEQ ID NO: 317863 - DNA, 25 bp, Artificial
  Probe
atatacccgttcacgcaaagtggac

SEQ ID NO: 317864 - DNA, 25 bp, Artificial
  Probe
ttataaactcagagcccgtgagcac

SEQ ID NO: 317865 - DNA, 25 bp, Artificial
  Probe
cgcattataaactcagagcccgtga

SEQ ID NO: 317866 - DNA, 25 bp, Artificial
  Probe
gtcatcactgggaccagagaagagg

SEQ ID NO: 317867 - DNA, 25 bp, Artificial
  Probe
agagcccgtgagcacacatataaaa

SEQ ID NO: 317868 - DNA, 25 bp, Artificial
  Probe
actcagagcccgtgagcacacatat

SEQ ID NO: 317869 - DNA, 25 bp, Artificial
  Probe
agtccacaggtgatagagaaattca

SEQ ID NO: 317870 - DNA, 25 bp, Artificial
  Probe
gtgagtcagctccacgaggaaggaa

SEQ ID NO: 317871 - DNA, 25 bp, Artificial
  Probe
ccttcttgtaggtaacttgagttcg

SEQ ID NO: 317872 - DNA, 25 bp, Artificial
  Probe
acacagggtacatcccaggcatcag

SEQ ID NO: 317873 - DNA, 25 bp, Artificial
  Probe
ggaagcatacctctgccctcatcaa

SEQ ID NO: 317874 - DNA, 25 bp, Artificial
  Probe
cttacctgcatccttccatgagggt

SEQ ID NO: 317875 - DNA, 25 bp, Artificial
  Probe
tacagtccacaggtgatagagaaat

SEQ ID NO: 317876 - DNA, 25 bp, Artificial
  Probe
agggtacatcccaggcatcagagaa

SEQ ID NO: 317877 - DNA, 25 bp, Artificial
  Probe
gaggggttcttacctgcatccttcc

SEQ ID NO: 317878 - DNA, 25 bp, Artificial
  Probe
acctgcatccttccatgagggtgtg

SEQ ID NO: 317879 - DNA, 25 bp, Artificial
  Probe
caagctgtaagttacaggtgcacta

SEQ ID NO: 317880 - DNA, 25 bp, Artificial
  Probe
ggttacagtccacaggtgatagaga

SEQ ID NO: 317881 - DNA, 25 bp, Artificial
  Probe
cttcttgtaggtaacttgagttcgt

SEQ ID NO: 317882 - DNA, 25 bp, Artificial
  Probe
gggacacagggtacatcccaggcat

SEQ ID NO: 317883 - DNA, 25 bp, Artificial
  Probe
cccctgtcgtgaagtttacatgtga

SEQ ID NO: 317884 - DNA, 25 bp, Artificial
  Probe
aagtgtgttcattcagtttacctgg

SEQ ID NO: 317885 - DNA, 25 bp, Artificial
  Probe
ctcatcaaggggacacagggtacat

SEQ ID NO: 317886 - DNA, 25 bp, Artificial
  Probe
tacatcccaggcatcagagaactgc

SEQ ID NO: 317887 - DNA, 25 bp, Artificial
  Probe
ctcactgtagcctttggcaacttcg

SEQ ID NO: 317888 - DNA, 25 bp, Artificial
  Probe
gcatcagagaactgcagctcacctc

SEQ ID NO: 317889 - DNA, 25 bp, Artificial
  Probe
ccgaatgccatttgctaccaggcca

SEQ ID NO: 317890 - DNA, 25 bp, Artificial
  Probe
gagaactgcagctcacctcaaacca

SEQ ID NO: 317891 - DNA, 25 bp, Artificial
  Probe
gacgtcggctattccatggctccgc

SEQ ID NO: 317892 - DNA, 25 bp, Artificial
  Probe
gaaggaagcatacctctgccctcat

SEQ ID NO: 317893 - DNA, 25 bp, Artificial
  Probe
gaactgcagctcacctcaaaccatg

SEQ ID NO: 317894 - DNA, 25 bp, Artificial
  Probe
aattcaagctgtaagttacaggtgc

SEQ ID NO: 317895 - DNA, 25 bp, Artificial
  Probe
cactgtagcctttggcaacttcgcc

SEQ ID NO: 317896 - DNA, 25 bp, Artificial
  Probe
ttcattcagtttacctgggggcatg

SEQ ID NO: 317897 - DNA, 25 bp, Artificial
  Probe
gtcggctattccatggctccgcctg

SEQ ID NO: 317898 - DNA, 25 bp, Artificial
  Probe
ccatttgctaccaggccagaactgc

SEQ ID NO: 317899 - DNA, 25 bp, Artificial
  Probe
ttgtaggtaacttgagttcgtagcc

SEQ ID NO: 317900 - DNA, 25 bp, Artificial
  Probe
tgctaccaggccagaactgcgctgg

SEQ ID NO: 317901 - DNA, 25 bp, Artificial
  Probe
tcggctattccatggctccgcctga

SEQ ID NO: 317902 - DNA, 25 bp, Artificial
  Probe
gaccttcttgtaggtaacttgagtt

SEQ ID NO: 317903 - DNA, 25 bp, Artificial
  Probe
ctctgccctcatcaaggggacacag

SEQ ID NO: 317904 - DNA, 25 bp, Artificial
  Probe
attcagtttacctgggggcatggag

SEQ ID NO: 317905 - DNA, 25 bp, Artificial
  Probe
agctccacgaggaaggaagcatacc

SEQ ID NO: 317906 - DNA, 25 bp, Artificial
  Probe
ctccacgaggaaggaagcatacctc

SEQ ID NO: 317907 - DNA, 25 bp, Artificial
  Probe
ctgccctcatcaaggggacacaggg

SEQ ID NO: 317908 - DNA, 25 bp, Artificial
  Probe
gtagcctttggcaacttcgccaaac

SEQ ID NO: 317909 - DNA, 25 bp, Artificial
  Probe
atgaaggttacagtccacaggtgat

SEQ ID NO: 317910 - DNA, 25 bp, Artificial
  Probe
catcaaggggacacagggtacatcc

SEQ ID NO: 317911 - DNA, 25 bp, Artificial
  Probe
aggcatcagagaactgcagctcacc

SEQ ID NO: 317912 - DNA, 25 bp, Artificial
  Probe
ttcttacctgcatccttccatgagg

SEQ ID NO: 317913 - DNA, 25 bp, Artificial
  Probe
ctgtcgtgaagtttacatgtgacct

SEQ ID NO: 317914 - DNA, 25 bp, Artificial
  Probe
tgaagtttacatgtgaccttcttgt

SEQ ID NO: 317915 - DNA, 25 bp, Artificial
  Probe
aaggagccacccagcaacactgaac

SEQ ID NO: 317916 - DNA, 25 bp, Artificial
  Probe
ctcctccaggcctgccaaggtagaa

SEQ ID NO: 317917 - DNA, 25 bp, Artificial
  Probe
ggacacaagggttggccttccatcc

SEQ ID NO: 317918 - DNA, 25 bp, Artificial
  Probe
tgccctggacgcagagagtgaatac

SEQ ID NO: 317919 - DNA, 25 bp, Artificial
  Probe
agcaccccttggactacacggctgg

SEQ ID NO: 317920 - DNA, 25 bp, Artificial
  Probe
cacctttttgggactggcagtgagc

SEQ ID NO: 317921 - DNA, 25 bp, Artificial
  Probe
tgtgctcatcctggacgaagccacc

SEQ ID NO: 317922 - DNA, 25 bp, Artificial
  Probe
agatgctggggctcgagcacccctt

SEQ ID NO: 317923 - DNA, 25 bp, Artificial
  Probe
gagagaactaagcactaccctttgc

SEQ ID NO: 317924 - DNA, 25 bp, Artificial
  Probe
taagcactaccctttgcctctggga

SEQ ID NO: 317925 - DNA, 25 bp, Artificial
  Probe
gtggccatggcacgtgcactagtgc

SEQ ID NO: 317926 - DNA, 25 bp, Artificial
  Probe
caaggcctgacagtggccccgggct

SEQ ID NO: 317927 - DNA, 25 bp, Artificial
  Probe
aagcagcttccctgtccctaggggg

SEQ ID NO: 317928 - DNA, 25 bp, Artificial
  Probe
accaccagaacctcagcagaggagg

SEQ ID NO: 317929 - DNA, 25 bp, Artificial
  Probe
cactagtgcggaaccctcctgtgct

SEQ ID NO: 317930 - DNA, 25 bp, Artificial
  Probe
gggacacaagggttggccttccatc

SEQ ID NO: 317931 - DNA, 25 bp, Artificial
  Probe
cctaccgtgcccttcgagatggtgg

SEQ ID NO: 317932 - DNA, 25 bp, Artificial
  Probe
actgctcagttcaacgcactccagt

SEQ ID NO: 317933 - DNA, 25 bp, Artificial
  Probe
ggactacacggctggccacaaggag

SEQ ID NO: 317934 - DNA, 25 bp, Artificial
  Probe
agagtgaatacctgattcagcaggc

SEQ ID NO: 317935 - DNA, 25 bp, Artificial
  Probe
tagagcgggcgcacctcatcgtggt

SEQ ID NO: 317936 - DNA, 25 bp, Artificial
  Probe
taccgtgcccttcgagatggtggtg

SEQ ID NO: 317937 - DNA, 25 bp, Artificial
  Probe
tgtgaaccaccagaacctcagcaga

SEQ ID NO: 317938 - DNA, 25 bp, Artificial
  Probe
atccacggcaacctgcagagacaca

SEQ ID NO: 317939 - DNA, 25 bp, Artificial
  Probe
gctggaggcgacctgccgagtccca

SEQ ID NO: 317940 - DNA, 25 bp, Artificial
  Probe
tacagcacagagaccggggaaaagg

SEQ ID NO: 317941 - DNA, 25 bp, Artificial
  Probe
ccaggagtgcacgaccctttctaac

SEQ ID NO: 317942 - DNA, 25 bp, Artificial
  Probe
ccagcaacactgaacacaaggcctg

SEQ ID NO: 317943 - DNA, 25 bp, Artificial
  Probe
ccaagctggtgcagcgtcagatgct

SEQ ID NO: 317944 - DNA, 25 bp, Artificial
  Probe
ttccctgtccctagggggacacaag

SEQ ID NO: 317945 - DNA, 25 bp, Artificial
  Probe
ccagggtctggctttgtcctggttt

SEQ ID NO: 317946 - DNA, 25 bp, Artificial
  Probe
cctcctgtgctcatcctggacgaag

SEQ ID NO: 317947 - DNA, 25 bp, Artificial
  Probe
cactggtaagccaggagcctgtgct

SEQ ID NO: 317948 - DNA, 25 bp, Artificial
  Probe
aaccttgtttgtaagatgtattctc

SEQ ID NO: 317949 - DNA, 25 bp, Artificial
  Probe
ccctggacgcagagagtgaatacct

SEQ ID NO: 317950 - DNA, 25 bp, Artificial
  Probe
ggaggctgcacagaaggccaatgct

SEQ ID NO: 317951 - DNA, 25 bp, Artificial
  Probe
tcactaggatgttttcaagacttct

SEQ ID NO: 317952 - DNA, 25 bp, Artificial
  Probe
acctgattcagcaggccatccacgg

SEQ ID NO: 317953 - DNA, 25 bp, Artificial
  Probe
catcgtggtgctagacaagggccgt

SEQ ID NO: 317954 - DNA, 25 bp, Artificial
  Probe
gccgtgtggtacagcagggtacaca

SEQ ID NO: 317955 - DNA, 25 bp, Artificial
  Probe
agtgcggaaccctcctgtgctcatc

SEQ ID NO: 317956 - DNA, 25 bp, Artificial
  Probe
gcccagctgtcaggtggccagaagc

SEQ ID NO: 317957 - DNA, 25 bp, Artificial
  Probe
ccttctactgtgtcccatcttggct

SEQ ID NO: 317958 - DNA, 25 bp, Artificial
  Probe
gagcccagctgtcaggtggccagaa

SEQ ID NO: 317959 - DNA, 25 bp, Artificial
  Probe
cctggaagatgtctgggagagaact

SEQ ID NO: 317960 - DNA, 25 bp, Artificial
  Probe
tgtgtcccatcttggctcctccagg

SEQ ID NO: 317961 - DNA, 25 bp, Artificial
  Probe
aacattctctgccatggttgagatt

SEQ ID NO: 317962 - DNA, 25 bp, Artificial
  Probe
tctctgccatggttgagattatgaa

SEQ ID NO: 317963 - DNA, 25 bp, Artificial
  Probe
aaatgtagtctgttgcaaacccctg

SEQ ID NO: 317964 - DNA, 25 bp, Artificial
  Probe
atgtagtctgttgcaaacccctgta

SEQ ID NO: 317965 - DNA, 25 bp, Artificial
  Probe
gaaaataaaacagcatcttgaaatg

SEQ ID NO: 317966 - DNA, 25 bp, Artificial
  Probe
gttgcaaacccctgtattgtaacat

SEQ ID NO: 317967 - DNA, 25 bp, Artificial
  Probe
tgtagtctgttgcaaacccctgtat

SEQ ID NO: 317968 - DNA, 25 bp, Artificial
  Probe
cattctctgccatggttgagattat

SEQ ID NO: 317969 - DNA, 25 bp, Artificial
  Probe
tgatccctccgaaatgtagtctgtt

SEQ ID NO: 317970 - DNA, 25 bp, Artificial
  Probe
gtctgttgcaaacccctgtattgta

SEQ ID NO: 317971 - DNA, 25 bp, Artificial
  Probe
ttgcaaacccctgtattgtaacatt

SEQ ID NO: 317972 - DNA, 25 bp, Artificial
  Probe
tgttgcaaacccctgtattgtaaca

SEQ ID NO: 317973 - DNA, 25 bp, Artificial
  Probe
atgatccctccgaaatgtagtctgt

SEQ ID NO: 317974 - DNA, 25 bp, Artificial
  Probe
caaacccctgtattgtaacattctc

SEQ ID NO: 317975 - DNA, 25 bp, Artificial
  Probe
atccctccgaaatgtagtctgttgc

SEQ ID NO: 317976 - DNA, 25 bp, Artificial
  Probe
aatgatccctccgaaatgtagtctg

SEQ ID NO: 317977 - DNA, 25 bp, Artificial
  Probe
tctgccatggttgagattatgaatg

SEQ ID NO: 317978 - DNA, 25 bp, Artificial
  Probe
attctctgccatggttgagattatg

SEQ ID NO: 317979 - DNA, 25 bp, Artificial
  Probe
ctctgccatggttgagattatgaat

SEQ ID NO: 317980 - DNA, 25 bp, Artificial
  Probe
cccctgtattgtaacattctctgcc

SEQ ID NO: 317981 - DNA, 25 bp, Artificial
  Probe
aaaaaatgatccctccgaaatgtag

SEQ ID NO: 317982 - DNA, 25 bp, Artificial
  Probe
gtaacattctctgccatggttgaga

SEQ ID NO: 317983 - DNA, 25 bp, Artificial
  Probe
cctgtattgtaacattctctgccat

SEQ ID NO: 317984 - DNA, 25 bp, Artificial
  Probe
ctccgaaatgtagtctgttgcaaac

SEQ ID NO: 317985 - DNA, 25 bp, Artificial
  Probe
tgtactcacattttgttctcaaaaa

SEQ ID NO: 317986 - DNA, 25 bp, Artificial
  Probe
tccctccgaaatgtagtctgttgca

SEQ ID NO: 317987 - DNA, 25 bp, Artificial
  Probe
attgtaacattctctgccatggttg

SEQ ID NO: 317988 - DNA, 25 bp, Artificial
  Probe
ttgtaacattctctgccatggttga

SEQ ID NO: 317989 - DNA, 25 bp, Artificial
  Probe
tagtctgttgcaaacccctgtattg

SEQ ID NO: 317990 - DNA, 25 bp, Artificial
  Probe
cctccgaaatgtagtctgttgcaaa

SEQ ID NO: 317991 - DNA, 25 bp, Artificial
  Probe
aatgtagtctgttgcaaacccctgt

SEQ ID NO: 317992 - DNA, 25 bp, Artificial
  Probe
tactcacattttgttctcaaaaaaa

SEQ ID NO: 317993 - DNA, 25 bp, Artificial
  Probe
gatccctccgaaatgtagtctgttg

SEQ ID NO: 317994 - DNA, 25 bp, Artificial
  Probe
tattgtaacattctctgccatggtt

SEQ ID NO: 317995 - DNA, 25 bp, Artificial
  Probe
agtctgttgcaaacccctgtattgt

SEQ ID NO: 317996 - DNA, 25 bp, Artificial
  Probe
ctgtattgtaacattctctgccatg

SEQ ID NO: 317997 - DNA, 25 bp, Artificial
  Probe
ctgccatggttgagattatgaatgt

SEQ ID NO: 317998 - DNA, 25 bp, Artificial
  Probe
ccctccgaaatgtagtctgttgcaa

SEQ ID NO: 317999 - DNA, 25 bp, Artificial
  Probe
tgtattgtaacattctctgccatgg

SEQ ID NO: 318000 - DNA, 25 bp, Artificial
  Probe
gtattgtaacattctctgccatggt

SEQ ID NO: 318001 - DNA, 25 bp, Artificial
  Probe
tgtaacattctctgccatggttgag

SEQ ID NO: 318002 - DNA, 25 bp, Artificial
  Probe
gaaatgtagtctgttgcaaacccct

SEQ ID NO: 318003 - DNA, 25 bp, Artificial
  Probe
acattctctgccatggttgagatta

SEQ ID NO: 318004 - DNA, 25 bp, Artificial
  Probe
ttctctgccatggttgagattatga

SEQ ID NO: 318005 - DNA, 25 bp, Artificial
  Probe
tgaaaataaaacagcatcttgaaat

SEQ ID NO: 318006 - DNA, 25 bp, Artificial
  Probe
gtagtctgttgcaaacccctgtatt

SEQ ID NO: 318007 - DNA, 25 bp, Artificial
  Probe
cctgtgcagtggatggagtctgctt

SEQ ID NO: 318008 - DNA, 25 bp, Artificial
  Probe
gcttctttgcccaaaatgcagtgcc

SEQ ID NO: 318009 - DNA, 25 bp, Artificial
  Probe
ccacaagaacagagtggatgaagtg

SEQ ID NO: 318010 - DNA, 25 bp, Artificial
  Probe
aaggcgcttctccattggcatcttt

SEQ ID NO: 318011 - DNA, 25 bp, Artificial
  Probe
tggcatctttcatggcgatgtcaaa

SEQ ID NO: 318012 - DNA, 25 bp, Artificial
  Probe
aacagtgctcgtgtggccgatggat

SEQ ID NO: 318013 - DNA, 25 bp, Artificial
  Probe
ttatggatggacagcttctttgccc

SEQ ID NO: 318014 - DNA, 25 bp, Artificial
  Probe
gaacaggactgtcttccgtacttac

SEQ ID NO: 318015 - DNA, 25 bp, Artificial
  Probe
cagttggatgtccaaggataattac

SEQ ID NO: 318016 - DNA, 25 bp, Artificial
  Probe
ttactgactgtaacagctgtggggt

SEQ ID NO: 318017 - DNA, 25 bp, Artificial
  Probe
gtcttccgtacttaccacagggaat

SEQ ID NO: 318018 - DNA, 25 bp, Artificial
  Probe
ctccattggcatctttcatggcgat

SEQ ID NO: 318019 - DNA, 25 bp, Artificial
  Probe
acagtgctcgtgtggccgatggata

SEQ ID NO: 318020 - DNA, 25 bp, Artificial
  Probe
ggccgatggataacccctgctttcc

SEQ ID NO: 318021 - DNA, 25 bp, Artificial
  Probe
aagtgaaaacattgccagcgctggg

SEQ ID NO: 318022 - DNA, 25 bp, Artificial
  Probe
ggacagcttctttgcccaaaatgca

SEQ ID NO: 318023 - DNA, 25 bp, Artificial
  Probe
ttgctcacaagagaacaggactgtc

SEQ ID NO: 318024 - DNA, 25 bp, Artificial
  Probe
gctttccaaatccacaagaacagag

SEQ ID NO: 318025 - DNA, 25 bp, Artificial
  Probe
cattgccagcgctgggatcacaaac

SEQ ID NO: 318026 - DNA, 25 bp, Artificial
  Probe
ctcgtgtggccgatggataacccct

SEQ ID NO: 318027 - DNA, 25 bp, Artificial
  Probe
atggaccctgggaaaggcgcttctc

SEQ ID NO: 318028 - DNA, 25 bp, Artificial
  Probe
tctttcatggcgatgtcaaatttca

SEQ ID NO: 318029 - DNA, 25 bp, Artificial
  Probe
cgatgtcaaatttcagttggatgtc

SEQ ID NO: 318030 - DNA, 25 bp, Artificial
  Probe
tgggaaaggcgcttctccattggca

SEQ ID NO: 318031 - DNA, 25 bp, Artificial
  Probe
tcagcttgggatggaccctgggaaa

SEQ ID NO: 318032 - DNA, 25 bp, Artificial
  Probe
tgcccaaaatgcagtgccaagttgg

SEQ ID NO: 318033 - DNA, 25 bp, Artificial
  Probe
gtggcttattatgtcacacacacac

SEQ ID NO: 318034 - DNA, 25 bp, Artificial
  Probe
aactggtatggtgaacagtgctcgt

SEQ ID NO: 318035 - DNA, 25 bp, Artificial
  Probe
acacacacacggtactctgcttggc

SEQ ID NO: 318036 - DNA, 25 bp, Artificial
  Probe
atgtccaaggataattactgactgt

SEQ ID NO: 318037 - DNA, 25 bp, Artificial
  Probe
agggaatcaggctcagtgtacatct

SEQ ID NO: 318038 - DNA, 25 bp, Artificial
  Probe
tatggtgaacagtgctcgtgtggcc

SEQ ID NO: 318039 - DNA, 25 bp, Artificial
  Probe
ctctgcttggccatccagactgtta

SEQ ID NO: 318040 - DNA, 25 bp, Artificial
  Probe
gctcagtgtacatcttacttcatcg

SEQ ID NO: 318041 - DNA, 25 bp, Artificial
  Probe
cggtactctgcttggccatccagac

SEQ ID NO: 318042 - DNA, 25 bp, Artificial
  Probe
gataattactgactgtaacagctgt

SEQ ID NO: 318043 - DNA, 25 bp, Artificial
  Probe
caaagaaaccatgaacttaggactc

SEQ ID NO: 318044 - DNA, 25 bp, Artificial
  Probe
gttcctttaactggtatggtgaaca

SEQ ID NO: 318045 - DNA, 25 bp, Artificial
  Probe
ttcatggcgatgtcaaatttcagtt

SEQ ID NO: 318046 - DNA, 25 bp, Artificial
  Probe
cgctgggatcacaaacaaagaaacc

SEQ ID NO: 318047 - DNA, 25 bp, Artificial
  Probe
aaatgcagtgccaagttgggttcct

SEQ ID NO: 318048 - DNA, 25 bp, Artificial
  Probe
tcttacttcatcgaacctgtgcagt

SEQ ID NO: 318049 - DNA, 25 bp, Artificial
  Probe
caaatttcagttggatgtccaagga

SEQ ID NO: 318050 - DNA, 25 bp, Artificial
  Probe
acaggactgtcttccgtacttacca

SEQ ID NO: 318051 - DNA, 25 bp, Artificial
  Probe
tgccaagttgggttcctttaactgg

SEQ ID NO: 318052 - DNA, 25 bp, Artificial
  Probe
ggaccctgggaaaggcgcttctcca

SEQ ID NO: 318053 - DNA, 25 bp, Artificial
  Probe
tttgtttgaattcctggccgccaca

SEQ ID NO: 318054 - DNA, 25 bp, Artificial
  Probe
cgttacagctctggatggttattat

SEQ ID NO: 318055 - DNA, 25 bp, Artificial
  Probe
gtccctactcagtatatactaggaa

SEQ ID NO: 318056 - DNA, 25 bp, Artificial
  Probe
gcgctttggctagtggatcccctca

SEQ ID NO: 318057 - DNA, 25 bp, Artificial
  Probe
ctcatcagcaagtacacggcaggtc

SEQ ID NO: 318058 - DNA, 25 bp, Artificial
  Probe
tggtggttctttcttggtccaaaat

SEQ ID NO: 318059 - DNA, 25 bp, Artificial
  Probe
gccctccttgtttggtggactccta

SEQ ID NO: 318060 - DNA, 25 bp, Artificial
  Probe
cggtgacaggcctgaaactggtaga

SEQ ID NO: 318061 - DNA, 25 bp, Artificial
  Probe
aatattggcggtttcagcctcaacc

SEQ ID NO: 318062 - DNA, 25 bp, Artificial
  Probe
accagagaagcgtcagtagtaaaag

SEQ ID NO: 318063 - DNA, 25 bp, Artificial
  Probe
gtttcagcctcaacccaggggaatc

SEQ ID NO: 318064 - DNA, 25 bp, Artificial
  Probe
agagaccagagaagcgtcagtagta

SEQ ID NO: 318065 - DNA, 25 bp, Artificial
  Probe
gctgtggacggttgggcattaacta

SEQ ID NO: 318066 - DNA, 25 bp, Artificial
  Probe
ctgctgacttttgtaacaaatattg

SEQ ID NO: 318067 - DNA, 25 bp, Artificial
  Probe
atattactacatcatagtgctgctg

SEQ ID NO: 318068 - DNA, 25 bp, Artificial
  Probe
atcagcaagtacacggcaggtcccc

SEQ ID NO: 318069 - DNA, 25 bp, Artificial
  Probe
ccgtttgcttggaaatattgatggc

SEQ ID NO: 318070 - DNA, 25 bp, Artificial
  Probe
agttgctctcactgtgactttcttt

SEQ ID NO: 318071 - DNA, 25 bp, Artificial
  Probe
gagtgcctaaggagcacctggcctt

SEQ ID NO: 318072 - DNA, 25 bp, Artificial
  Probe
gccttactggctgtcccaatggtcc

SEQ ID NO: 318073 - DNA, 25 bp, Artificial
  Probe
catcaaggaggattccctatatatt

SEQ ID NO: 318074 - DNA, 25 bp, Artificial
  Probe
gtcaataatggctttcaatgccaag

SEQ ID NO: 318075 - DNA, 25 bp, Artificial
  Probe
ttgttgcttggattagagtacgccc

SEQ ID NO: 318076 - DNA, 25 bp, Artificial
  Probe
gcattaactatgttatcccgggaaa

SEQ ID NO: 318077 - DNA, 25 bp, Artificial
  Probe
atattgatggcagaacaccggatgt

SEQ ID NO: 318078 - DNA, 25 bp, Artificial
  Probe
cctcacagtgaaggagtgtgtagga

SEQ ID NO: 318079 - DNA, 25 bp, Artificial
  Probe
gatgaaggaccgtcctcatggaagt

SEQ ID NO: 318080 - DNA, 25 bp, Artificial
  Probe
atgttagctatacagatcaagcttt

SEQ ID NO: 318081 - DNA, 25 bp, Artificial
  Probe
aatgccagcagttctggcgttttgc

SEQ ID NO: 318082 - DNA, 25 bp, Artificial
  Probe
acatcgctgtggacggttgggcatt

SEQ ID NO: 318083 - DNA, 25 bp, Artificial
  Probe
ccattgtctgtgttctcattggatt

SEQ ID NO: 318084 - DNA, 25 bp, Artificial
  Probe
ccctcacagtgaaggagtgtgtagg

SEQ ID NO: 318085 - DNA, 25 bp, Artificial
  Probe
gatcacagacacatacaagctgctc

SEQ ID NO: 318086 - DNA, 25 bp, Artificial
  Probe
tttaaatactgtgtccaatctggga

SEQ ID NO: 318087 - DNA, 25 bp, Artificial
  Probe
gagacacaagggatcacagacacat

SEQ ID NO: 318088 - DNA, 25 bp, Artificial
  Probe
ctgtacagcatgtatgtgtcaataa

SEQ ID NO: 318089 - DNA, 25 bp, Artificial
  Probe
caggctactttttgggcaatgtttt

SEQ ID NO: 318090 - DNA, 25 bp, Artificial
  Probe
tatgtggaatccattgtctgtgttc

SEQ ID NO: 318091 - DNA, 25 bp, Artificial
  Probe
tggttggtggttctttcttggtcca

SEQ ID NO: 318092 - DNA, 25 bp, Artificial
  Probe
aaagccatgccctacagattgttgc

SEQ ID NO: 318093 - DNA, 25 bp, Artificial
  Probe
ttatttatccactcaagtggaccgt

SEQ ID NO: 318094 - DNA, 25 bp, Artificial
  Probe
gaggaacatacatgacccttttaaa

SEQ ID NO: 318095 - DNA, 25 bp, Artificial
  Probe
tgtaggagcttcaaaccagaactgt

SEQ ID NO: 318096 - DNA, 25 bp, Artificial
  Probe
tgtttttggctcttgaatctgctga

SEQ ID NO: 318097 - DNA, 25 bp, Artificial
  Probe
caggggaatcgttaccctttcagat

SEQ ID NO: 318098 - DNA, 25 bp, Artificial
  Probe
cattttgcagagcaaaaatgttagc

SEQ ID NO: 318099 - DNA, 25 bp, Artificial
  Probe
caaggcagggatgtcaccaggctct

SEQ ID NO: 318100 - DNA, 25 bp, Artificial
  Probe
tccagtgacctggatgaggaaaccc

SEQ ID NO: 318101 - DNA, 25 bp, Artificial
  Probe
aacagcatcagcatgctgccaccag

SEQ ID NO: 318102 - DNA, 25 bp, Artificial
  Probe
gactatgaagccatacagactctaa

SEQ ID NO: 318103 - DNA, 25 bp, Artificial
  Probe
aactcccaacagcatcagcatgctg

SEQ ID NO: 318104 - DNA, 25 bp, Artificial
  Probe
cactgtgaaagacttcgagaaaact

SEQ ID NO: 318105 - DNA, 25 bp, Artificial
  Probe
aatctacctgccagtgcccgcaggg

SEQ ID NO: 318106 - DNA, 25 bp, Artificial
  Probe
actctaaacagagaggacgacaagg

SEQ ID NO: 318107 - DNA, 25 bp, Artificial
  Probe
tgccaccagcaaggaggcccggtga

SEQ ID NO: 318108 - DNA, 25 bp, Artificial
  Probe
cagagagcattctgggaacgtccag

SEQ ID NO: 318109 - DNA, 25 bp, Artificial
  Probe
agaagaagacccaactcttacagaa

SEQ ID NO: 318110 - DNA, 25 bp, Artificial
  Probe
agagatttagttccttgtcatacaa

SEQ ID NO: 318111 - DNA, 25 bp, Artificial
  Probe
ggtcatcatcttcctgtaacgacct

SEQ ID NO: 318112 - DNA, 25 bp, Artificial
  Probe
tgaataagcctggacaatcggcaca

SEQ ID NO: 318113 - DNA, 25 bp, Artificial
  Probe
cttctggatgagaatgccaaccttc

SEQ ID NO: 318114 - DNA, 25 bp, Artificial
  Probe
tacaagtctcgagaagaagacccaa

SEQ ID NO: 318115 - DNA, 25 bp, Artificial
  Probe
caccttgtccccaaggagaatgact

SEQ ID NO: 318116 - DNA, 25 bp, Artificial
  Probe
atctacctgccagtgcccgcagggt

SEQ ID NO: 318117 - DNA, 25 bp, Artificial
  Probe
gtccccaaggagaatgactatgaga

SEQ ID NO: 318118 - DNA, 25 bp, Artificial
  Probe
gggccggaatctacctgccagtgcc

SEQ ID NO: 318119 - DNA, 25 bp, Artificial
  Probe
gagaaaactcccaacagcatcagca

SEQ ID NO: 318120 - DNA, 25 bp, Artificial
  Probe
acaaggtccctctggggaccaatgg

SEQ ID NO: 318121 - DNA, 25 bp, Artificial
  Probe
accgcctgtcccagttaaacttctg

SEQ ID NO: 318122 - DNA, 25 bp, Artificial
  Probe
tctggggaccaatggccaccttgtc

SEQ ID NO: 318123 - DNA, 25 bp, Artificial
  Probe
agcaagctccagaagcacccagtgg

SEQ ID NO: 318124 - DNA, 25 bp, Artificial
  Probe
caatggccaccttgtccccaaggag

SEQ ID NO: 318125 - DNA, 25 bp, Artificial
  Probe
ccagtggacacagcaagagatttag

SEQ ID NO: 318126 - DNA, 25 bp, Artificial
  Probe
cggtgaggaaccagagcctgactat

SEQ ID NO: 318127 - DNA, 25 bp, Artificial
  Probe
cctctggggaccaatggccaccttg

SEQ ID NO: 318128 - DNA, 25 bp, Artificial
  Probe
tcctgtaacgacctctatgccactg

SEQ ID NO: 318129 - DNA, 25 bp, Artificial
  Probe
aggagatctcagcaatgtattcttc

SEQ ID NO: 318130 - DNA, 25 bp, Artificial
  Probe
agcattggggacttgcagcaaggca

SEQ ID NO: 318131 - DNA, 25 bp, Artificial
  Probe
accttccagagaagggagagcacgg

SEQ ID NO: 318132 - DNA, 25 bp, Artificial
  Probe
cttcagtgaataagcctggacaatc

SEQ ID NO: 318133 - DNA, 25 bp, Artificial
  Probe
gactatgagagcattggggacttgc

SEQ ID NO: 318134 - DNA, 25 bp, Artificial
  Probe
gacttcgagaaaactcccaacagca

SEQ ID NO: 318135 - DNA, 25 bp, Artificial
  Probe
aacctgggccggaatctacctgcca

SEQ ID NO: 318136 - DNA, 25 bp, Artificial
  Probe
gcacggggcagaagagcaagctcca

SEQ ID NO: 318137 - DNA, 25 bp, Artificial
  Probe
aagacttcgagaaaactcccaacag

SEQ ID NO: 318138 - DNA, 25 bp, Artificial
  Probe
gatgagaatgccaaccttccagaga

SEQ ID NO: 318139 - DNA, 25 bp, Artificial
  Probe
ggcacacaaacctgggccggaatct

SEQ ID NO: 318140 - DNA, 25 bp, Artificial
  Probe
actcttacagaagaggagatctcag

SEQ ID NO: 318141 - DNA, 25 bp, Artificial
  Probe
cgacaaggtccctctggggaccaat

SEQ ID NO: 318142 - DNA, 25 bp, Artificial
  Probe
ctatgagagcattggggacttgcag

SEQ ID NO: 318143 - DNA, 25 bp, Artificial
  Probe
ttgcagcaaggcagggatgtcacca

SEQ ID NO: 318144 - DNA, 25 bp, Artificial
  Probe
ccctcagaggtcatcatcttcctgt

SEQ ID NO: 318145 - DNA, 25 bp, Artificial
  Probe
tgctcctggcccttgtcctgggtct

SEQ ID NO: 318146 - DNA, 25 bp, Artificial
  Probe
aagcattactgcatccatgggagat

SEQ ID NO: 318147 - DNA, 25 bp, Artificial
  Probe
aatcgaaaacccacttctctcggtg

SEQ ID NO: 318148 - DNA, 25 bp, Artificial
  Probe
gatggactcgactgccccaggcagc

SEQ ID NO: 318149 - DNA, 25 bp, Artificial
  Probe
cattttagtcattggcgtctgcacc

SEQ ID NO: 318150 - DNA, 25 bp, Artificial
  Probe
atcgaaaacccacttctctcggtgc

SEQ ID NO: 318151 - DNA, 25 bp, Artificial
  Probe
accagaacccctgaaaccaatggct

SEQ ID NO: 318152 - DNA, 25 bp, Artificial
  Probe
gccccaagcaatacaagcattactg

SEQ ID NO: 318153 - DNA, 25 bp, Artificial
  Probe
tctcggtgccccaagcaatacaagc

SEQ ID NO: 318154 - DNA, 25 bp, Artificial
  Probe
gtaaagataaaactcccataagtga

SEQ ID NO: 318155 - DNA, 25 bp, Artificial
  Probe
gaaaccaatggctctctttgtggag

SEQ ID NO: 318156 - DNA, 25 bp, Artificial
  Probe
tcctcttcggaaacatcgcaaaaag

SEQ ID NO: 318157 - DNA, 25 bp, Artificial
  Probe
ctcctggggaaaactgcacaggtac

SEQ ID NO: 318158 - DNA, 25 bp, Artificial
  Probe
gtcattggcgtctgcacctgctgtc

SEQ ID NO: 318159 - DNA, 25 bp, Artificial
  Probe
gggtcttgtgattctccagtgcgtg

SEQ ID NO: 318160 - DNA, 25 bp, Artificial
  Probe
ttactgcatccatgggagatgccgc

SEQ ID NO: 318161 - DNA, 25 bp, Artificial
  Probe
actcccataagtgaagatattcaag

SEQ ID NO: 318162 - DNA, 25 bp, Artificial
  Probe
gcttgataggcgtcatggtgctgtt

SEQ ID NO: 318163 - DNA, 25 bp, Artificial
  Probe
agtaaagataaaactcccataagtg

SEQ ID NO: 318164 - DNA, 25 bp, Artificial
  Probe
gataaaactcccataagtgaagata

SEQ ID NO: 318165 - DNA, 25 bp, Artificial
  Probe
gagaccaatattgcttaacttaatg

SEQ ID NO: 318166 - DNA, 25 bp, Artificial
  Probe
ttgtggagctcctggggaaaactgc

SEQ ID NO: 318167 - DNA, 25 bp, Artificial
  Probe
tccctcctgcatctgtgagaaaggc

SEQ ID NO: 318168 - DNA, 25 bp, Artificial
  Probe
tggtctgcttgataggcgtcatggt

SEQ ID NO: 318169 - DNA, 25 bp, Artificial
  Probe
atgggaacacaaccagaacccctga

SEQ ID NO: 318170 - DNA, 25 bp, Artificial
  Probe
tgcatctgtgagaaaggctactttg

SEQ ID NO: 318171 - DNA, 25 bp, Artificial
  Probe
aggcagcggtgtcagctccctgccg

SEQ ID NO: 318172 - DNA, 25 bp, Artificial
  Probe
tgggaacacaaccagaacccctgaa

SEQ ID NO: 318173 - DNA, 25 bp, Artificial
  Probe
cctcttcggaaacatcgcaaaaaga

SEQ ID NO: 318174 - DNA, 25 bp, Artificial
  Probe
agatattcaagagaccaatattgct

SEQ ID NO: 318175 - DNA, 25 bp, Artificial
  Probe
tgcatccatgggagatgccgcttcg

SEQ ID NO: 318176 - DNA, 25 bp, Artificial
  Probe
ctgtcatcctcttcggaaacatcgc

SEQ ID NO: 318177 - DNA, 25 bp, Artificial
  Probe
tggcgtctgcacctgctgtcatcct

SEQ ID NO: 318178 - DNA, 25 bp, Artificial
  Probe
cttcgtgatggacgaacaaactccc

SEQ ID NO: 318179 - DNA, 25 bp, Artificial
  Probe
ccttgtcctgggtcttgtgattctc

SEQ ID NO: 318180 - DNA, 25 bp, Artificial
  Probe
gagctcctggggaaaactgcacagg

SEQ ID NO: 318181 - DNA, 25 bp, Artificial
  Probe
ggcagatcctggtggtctgcttgat

SEQ ID NO: 318182 - DNA, 25 bp, Artificial
  Probe
actgccccaggcagcggtgtcagct

SEQ ID NO: 318183 - DNA, 25 bp, Artificial
  Probe
tggcccttgtcctgggtcttgtgat

SEQ ID NO: 318184 - DNA, 25 bp, Artificial
  Probe
tgtgagcaggtggacctgttttatc

SEQ ID NO: 318185 - DNA, 25 bp, Artificial
  Probe
ctggcccttgtcctgggtcttgtga

SEQ ID NO: 318186 - DNA, 25 bp, Artificial
  Probe
ccctgaaaccaatggctctctttgt

SEQ ID NO: 318187 - DNA, 25 bp, Artificial
  Probe
atccatgggagatgccgcttcgtga

SEQ ID NO: 318188 - DNA, 25 bp, Artificial
  Probe
tttatctccagcaggacagggggca

SEQ ID NO: 318189 - DNA, 25 bp, Artificial
  Probe
tgcacctgctgtcatcctcttcgga

SEQ ID NO: 318190 - DNA, 25 bp, Artificial
  Probe
gagatgccgcttcgtgatggacgaa

SEQ ID NO: 318191 - DNA, 25 bp, Artificial
  Probe
acttcgagtcccagtctgatgaccc

SEQ ID NO: 318192 - DNA, 25 bp, Artificial
  Probe
tcattttaggggagaccgatgcaaa

SEQ ID NO: 318193 - DNA, 25 bp, Artificial
  Probe
ggagaccgatgcaaaaccctgctag

SEQ ID NO: 318194 - DNA, 25 bp, Artificial
  Probe
aaggacctggagatcatgcagatcc

SEQ ID NO: 318195 - DNA, 25 bp, Artificial
  Probe
gtcattcactgatgaatccagcttt

SEQ ID NO: 318196 - DNA, 25 bp, Artificial
  Probe
ctcaaaatatccagaaatgttaagg

SEQ ID NO: 318197 - DNA, 25 bp, Artificial
  Probe
gacaccgataaaggatctgacagct

SEQ ID NO: 318198 - DNA, 25 bp, Artificial
  Probe
ggtgtccatgctcaccaaagagctc

SEQ ID NO: 318199 - DNA, 25 bp, Artificial
  Probe
gactttctctttgcttactccacgg

SEQ ID NO: 318200 - DNA, 25 bp, Artificial
  Probe
cattttaggggagaccgatgcaaaa

SEQ ID NO: 318201 - DNA, 25 bp, Artificial
  Probe
gcagattccatgtatggtgtccatg

SEQ ID NO: 318202 - DNA, 25 bp, Artificial
  Probe
tattcgtggaggaacccaggaaagg

SEQ ID NO: 318203 - DNA, 25 bp, Artificial
  Probe
gcctatcaacgacaccgacgctaat

SEQ ID NO: 318204 - DNA, 25 bp, Artificial
  Probe
gacctggagatcatgcagatcctga

SEQ ID NO: 318205 - DNA, 25 bp, Artificial
  Probe
taatccccgctacaagatcccggtg

SEQ ID NO: 318206 - DNA, 25 bp, Artificial
  Probe
tgactcggggcctatcaacgacacc

SEQ ID NO: 318207 - DNA, 25 bp, Artificial
  Probe
tgctcaccaaagagctctactttgg

SEQ ID NO: 318208 - DNA, 25 bp, Artificial
  Probe
ggagatcatgcagatcctgaccagg

SEQ ID NO: 318209 - DNA, 25 bp, Artificial
  Probe
taaaggatctgacagctcattttag

SEQ ID NO: 318210 - DNA, 25 bp, Artificial
  Probe
agagctctactttggccgttgacca

SEQ ID NO: 318211 - DNA, 25 bp, Artificial
  Probe
atccaggctgactcggggcctatca

SEQ ID NO: 318212 - DNA, 25 bp, Artificial
  Probe
tactttggccgttgaccagcctcca

SEQ ID NO: 318213 - DNA, 25 bp, Artificial
  Probe
ccaggaaagggctcctggtttgtgc

SEQ ID NO: 318214 - DNA, 25 bp, Artificial
  Probe
tggaggaacccaggaaagggctcct

SEQ ID NO: 318215 - DNA, 25 bp, Artificial
  Probe
tgaacgacagggtggccagacactt

SEQ ID NO: 318216 - DNA, 25 bp, Artificial
  Probe
ggatccaggctgactcggggcctat

SEQ ID NO: 318217 - DNA, 25 bp, Artificial
  Probe
acaagatcccggtggaagctgactt

SEQ ID NO: 318218 - DNA, 25 bp, Artificial
  Probe
ctctttgcttactccacggttccag

SEQ ID NO: 318219 - DNA, 25 bp, Artificial
  Probe
gctccatcctgaatgagcatggcaa

SEQ ID NO: 318220 - DNA, 25 bp, Artificial
  Probe
gttttgatgctctcaaaatatccag

SEQ ID NO: 318221 - DNA, 25 bp, Artificial
  Probe
cctggtttgtgcaggccctctgctc

SEQ ID NO: 318222 - DNA, 25 bp, Artificial
  Probe
gaagctgactttctctttgcttact

SEQ ID NO: 318223 - DNA, 25 bp, Artificial
  Probe
tcccggtggaagctgactttctctt

SEQ ID NO: 318224 - DNA, 25 bp, Artificial
  Probe
cctgctagagaaacccaagctcttc

SEQ ID NO: 318225 - DNA, 25 bp, Artificial
  Probe
tcctgaccagggtgaacgacagggt

SEQ ID NO: 318226 - DNA, 25 bp, Artificial
  Probe
cccgctacaagatcccggtggaagc

SEQ ID NO: 318227 - DNA, 25 bp, Artificial
  Probe
ccaagctcttcttcatccaggcgtg

SEQ ID NO: 318228 - DNA, 25 bp, Artificial
  Probe
tgagcatggcaaggacctggagatc

SEQ ID NO: 318229 - DNA, 25 bp, Artificial
  Probe
gaagcagattccatgtatggtgtcc

SEQ ID NO: 318230 - DNA, 25 bp, Artificial
  Probe
cctgaatgagcatggcaaggacctg

SEQ ID NO: 318231 - DNA, 25 bp, Artificial
  Probe
tccatgtatggtgtccatgctcacc

SEQ ID NO: 318232 - DNA, 25 bp, Artificial
  Probe
cctctgctccatcctgaatgagcat

SEQ ID NO: 318233 - DNA, 25 bp, Artificial
  Probe
tggatgacgggatccaggctgactc

SEQ ID NO: 318234 - DNA, 25 bp, Artificial
  Probe
caagctcttcttcatccaggcgtgc

SEQ ID NO: 318235 - DNA, 25 bp, Artificial
  Probe
gatgctctcaaaatatccagaaatg

SEQ ID NO: 318236 - DNA, 25 bp, Artificial
  Probe
ctggatgacgggatccaggctgact

SEQ ID NO: 318237 - DNA, 25 bp, Artificial
  Probe
ttaggtctgctgtgtgtaagaatag

SEQ ID NO: 318238 - DNA, 25 bp, Artificial
  Probe
acgttgtatgcgttcatactttgga

SEQ ID NO: 318239 - DNA, 25 bp, Artificial
  Probe
tagtttctgtgtacaaccctgggat

SEQ ID NO: 318240 - DNA, 25 bp, Artificial
  Probe
ttgtatgcgttcatactttggagcg

SEQ ID NO: 318241 - DNA, 25 bp, Artificial
  Probe
ggattaggtctgctgtgtgtaagaa

SEQ ID NO: 318242 - DNA, 25 bp, Artificial
  Probe
ctgggattaggtctgctgtgtgtaa

SEQ ID NO: 318243 - DNA, 25 bp, Artificial
  Probe
cgttgtatgcgttcatactttggag

SEQ ID NO: 318244 - DNA, 25 bp, Artificial
  Probe
ctgtacgttgtatgcgttcatactt

SEQ ID NO: 318245 - DNA, 25 bp, Artificial
  Probe
atgcgttcatactttggagcggggg

SEQ ID NO: 318246 - DNA, 25 bp, Artificial
  Probe
gttgtatgcgttcatactttggagc

SEQ ID NO: 318247 - DNA, 25 bp, Artificial
  Probe
tgtatgcgttcatactttggagcgg

SEQ ID NO: 318248 - DNA, 25 bp, Artificial
  Probe
tttagtttctgtgtacaaccctggg

SEQ ID NO: 318249 - DNA, 25 bp, Artificial
  Probe
tcatactttggagcgggggatcccc

SEQ ID NO: 318250 - DNA, 25 bp, Artificial
  Probe
ttctgtgtacaaccctgggattagg

SEQ ID NO: 318251 - DNA, 25 bp, Artificial
  Probe
cccccacaagctttagtttctgtgt

SEQ ID NO: 318252 - DNA, 25 bp, Artificial
  Probe
agtttctgtgtacaaccctgggatt

SEQ ID NO: 318253 - DNA, 25 bp, Artificial
  Probe
actgtacgttgtatgcgttcatact

SEQ ID NO: 318254 - DNA, 25 bp, Artificial
  Probe
ctttagtttctgtgtacaaccctgg

SEQ ID NO: 318255 - DNA, 25 bp, Artificial
  Probe
agctttagtttctgtgtacaaccct

SEQ ID NO: 318256 - DNA, 25 bp, Artificial
  Probe
gggattaggtctgctgtgtgtaaga

SEQ ID NO: 318257 - DNA, 25 bp, Artificial
  Probe
tctgtgtacaaccctgggattaggt

SEQ ID NO: 318258 - DNA, 25 bp, Artificial
  Probe
ccccacaagctttagtttctgtgta

SEQ ID NO: 318259 - DNA, 25 bp, Artificial
  Probe
gtatgcgttcatactttggagcggg

SEQ ID NO: 318260 - DNA, 25 bp, Artificial
  Probe
cctgggattaggtctgctgtgtgta

SEQ ID NO: 318261 - DNA, 25 bp, Artificial
  Probe
gtgtacaaccctgggattaggtctg

SEQ ID NO: 318262 - DNA, 25 bp, Artificial
  Probe
ccacaagctttagtttctgtgtaca

SEQ ID NO: 318263 - DNA, 25 bp, Artificial
  Probe
acaagctttagtttctgtgtacaac

SEQ ID NO: 318264 - DNA, 25 bp, Artificial
  Probe
atccccccacaagctttagtttctg

SEQ ID NO: 318265 - DNA, 25 bp, Artificial
  Probe
cgttcatactttggagcgggggatc

SEQ ID NO: 318266 - DNA, 25 bp, Artificial
  Probe
ctgtgtacaaccctgggattaggtc

SEQ ID NO: 318267 - DNA, 25 bp, Artificial
  Probe
ttcatactttggagcgggggatccc

SEQ ID NO: 318268 - DNA, 25 bp, Artificial
  Probe
cccacaagctttagtttctgtgtac

SEQ ID NO: 318269 - DNA, 25 bp, Artificial
  Probe
aggtctgctgtgtgtaagaatagat

SEQ ID NO: 318270 - DNA, 25 bp, Artificial
  Probe
tccccccacaagctttagtttctgt

SEQ ID NO: 318271 - DNA, 25 bp, Artificial
  Probe
tgtgtacaaccctgggattaggtct

SEQ ID NO: 318272 - DNA, 25 bp, Artificial
  Probe
tacgttgtatgcgttcatactttgg

SEQ ID NO: 318273 - DNA, 25 bp, Artificial
  Probe
gattaggtctgctgtgtgtaagaat

SEQ ID NO: 318274 - DNA, 25 bp, Artificial
  Probe
tgcgttcatactttggagcggggga

SEQ ID NO: 318275 - DNA, 25 bp, Artificial
  Probe
gctttagtttctgtgtacaaccctg

SEQ ID NO: 318276 - DNA, 25 bp, Artificial
  Probe
ccctgggattaggtctgctgtgtgt

SEQ ID NO: 318277 - DNA, 25 bp, Artificial
  Probe
gttcatactttggagcgggggatcc

SEQ ID NO: 318278 - DNA, 25 bp, Artificial
  Probe
ttagtttctgtgtacaaccctggga

SEQ ID NO: 318279 - DNA, 25 bp, Artificial
  Probe
cacaagctttagtttctgtgtacaa

SEQ ID NO: 318280 - DNA, 25 bp, Artificial
  Probe
gtttctgtgtacaaccctgggatta

SEQ ID NO: 318281 - DNA, 25 bp, Artificial
  Probe
tttctgtgtacaaccctgggattag

SEQ ID NO: 318282 - DNA, 25 bp, Artificial
  Probe
caagctttagtttctgtgtacaacc

SEQ ID NO: 318283 - DNA, 25 bp, Artificial
  Probe
tggactagcagctggggtctttacc

SEQ ID NO: 318284 - DNA, 25 bp, Artificial
  Probe
ctggagcgagtcctcgggtttgtca

SEQ ID NO: 318285 - DNA, 25 bp, Artificial
  Probe
tttgtcaggtctgcaaaggagcagg

SEQ ID NO: 318286 - DNA, 25 bp, Artificial
  Probe
taacaactataacgtcagcccggtg

SEQ ID NO: 318287 - DNA, 25 bp, Artificial
  Probe
gctgcaggccggaacgtgctacatt

SEQ ID NO: 318288 - DNA, 25 bp, Artificial
  Probe
tgcacagatgacatgacttgtgtaa

SEQ ID NO: 318289 - DNA, 25 bp, Artificial
  Probe
agttatgtccattctaacatttgag

SEQ ID NO: 318290 - DNA, 25 bp, Artificial
  Probe
atttgagactgaagccgaggttctg

SEQ ID NO: 318291 - DNA, 25 bp, Artificial
  Probe
tggatattacatgacaccttgcatt

SEQ ID NO: 318292 - DNA, 25 bp, Artificial
  Probe
cgagtcctcgggtttgtcaggtctg

SEQ ID NO: 318293 - DNA, 25 bp, Artificial
  Probe
aacatttgagactgaagccgaggtt

SEQ ID NO: 318294 - DNA, 25 bp, Artificial
  Probe
gcacctggagcgagtcctcgggttt

SEQ ID NO: 318295 - DNA, 25 bp, Artificial
  Probe
tatgccccggaggatcctaagttaa

SEQ ID NO: 318296 - DNA, 25 bp, Artificial
  Probe
atgtccattctaacatttgagactg

SEQ ID NO: 318297 - DNA, 25 bp, Artificial
  Probe
gattggggacccacttctggaagat

SEQ ID NO: 318298 - DNA, 25 bp, Artificial
  Probe
gtctgcaaaggagcagggtgccact

SEQ ID NO: 318299 - DNA, 25 bp, Artificial
  Probe
gagttgccctttggtggatacaaga

SEQ ID NO: 318300 - DNA, 25 bp, Artificial
  Probe
tttaactaattgcacagatgacatg

SEQ ID NO: 318301 - DNA, 25 bp, Artificial
  Probe
ggaacgtgctacattaacaactata

SEQ ID NO: 318302 - DNA, 25 bp, Artificial
  Probe
gtggagttgccctttggtggataca

SEQ ID NO: 318303 - DNA, 25 bp, Artificial
  Probe
tagcagctggggtctttaccaggga

SEQ ID NO: 318304 - DNA, 25 bp, Artificial
  Probe
gagcgggccaatgacaccacgtttg

SEQ ID NO: 318305 - DNA, 25 bp, Artificial
  Probe
ggtttgtcaggtctgcaaaggagca

SEQ ID NO: 318306 - DNA, 25 bp, Artificial
  Probe
ctgacgcatttacaaaggaagttgt

SEQ ID NO: 318307 - DNA, 25 bp, Artificial
  Probe
gtactattcacagctgaagacggtg

SEQ ID NO: 318308 - DNA, 25 bp, Artificial
  Probe
ctcgggtttgtcaggtctgcaaagg

SEQ ID NO: 318309 - DNA, 25 bp, Artificial
  Probe
ccagggacattcagagggcgcacag

SEQ ID NO: 318310 - DNA, 25 bp, Artificial
  Probe
cagcccggtggagttgccctttggt

SEQ ID NO: 318311 - DNA, 25 bp, Artificial
  Probe
ttggggacccacttctggaagatac

SEQ ID NO: 318312 - DNA, 25 bp, Artificial
  Probe
attaacaactataacgtcagcccgg

SEQ ID NO: 318313 - DNA, 25 bp, Artificial
  Probe
ctttgggccagttatgtccattcta

SEQ ID NO: 318314 - DNA, 25 bp, Artificial
  Probe
aggatgggcccactcatcaatgccc

SEQ ID NO: 318315 - DNA, 25 bp, Artificial
  Probe
gcattttaactaattgcacagatga

SEQ ID NO: 318316 - DNA, 25 bp, Artificial
  Probe
gttatgtccattctaacatttgaga

SEQ ID NO: 318317 - DNA, 25 bp, Artificial
  Probe
acttctggaagatacaaggatgggc

SEQ ID NO: 318318 - DNA, 25 bp, Artificial
  Probe
aaggatgggcccactcatcaatgcc

SEQ ID NO: 318319 - DNA, 25 bp, Artificial
  Probe
tctgcaaaggagcagggtgccactg

SEQ ID NO: 318320 - DNA, 25 bp, Artificial
  Probe
acgtcagcccggtggagttgccctt

SEQ ID NO: 318321 - DNA, 25 bp, Artificial
  Probe
aactataacgtcagcccggtggagt

SEQ ID NO: 318322 - DNA, 25 bp, Artificial
  Probe
ctaacatttgagactgaagccgagg

SEQ ID NO: 318323 - DNA, 25 bp, Artificial
  Probe
ggatattacatgacaccttgcattt

SEQ ID NO: 318324 - DNA, 25 bp, Artificial
  Probe
ggggtctttaccagggacattcaga

SEQ ID NO: 318325 - DNA, 25 bp, Artificial
  Probe
tctttaccagggacattcagagggc

SEQ ID NO: 318326 - DNA, 25 bp, Artificial
  Probe
ggccagttatgtccattctaacatt

SEQ ID NO: 318327 - DNA, 25 bp, Artificial
  Probe
cacagatgacatgacttgtgtaaaa

SEQ ID NO: 318328 - DNA, 25 bp, Artificial
  Probe
cgtatgccccggaggatcctaagtt

SEQ ID NO: 318329 - DNA, 25 bp, Artificial
  Probe
gaatgagcctgatttggcccagtgt

SEQ ID NO: 318330 - DNA, 25 bp, Artificial
  Probe
ctggacttaagcactgaggaaggga

SEQ ID NO: 318331 - DNA, 25 bp, Artificial
  Probe
gcgccttccttacagtcaagaagca

SEQ ID NO: 318332 - DNA, 25 bp, Artificial
  Probe
ttgatgtttccatgcctggcagctg

SEQ ID NO: 318333 - DNA, 25 bp, Artificial
  Probe
gggaaccggatgacaaccctataga

SEQ ID NO: 318334 - DNA, 25 bp, Artificial
  Probe
actgccctaccgagaatgagcctga

SEQ ID NO: 318335 - DNA, 25 bp, Artificial
  Probe
tgcctggccgccttggtgtcttaca

SEQ ID NO: 318336 - DNA, 25 bp, Artificial
  Probe
ccacctctctttggttttgtggctt

SEQ ID NO: 318337 - DNA, 25 bp, Artificial
  Probe
gaggctggcttcatccactgcccta

SEQ ID NO: 318338 - DNA, 25 bp, Artificial
  Probe
tgtgctgataattcttcttctgtcc

SEQ ID NO: 318339 - DNA, 25 bp, Artificial
  Probe
agaactgaccgtcagcgagtttttg

SEQ ID NO: 318340 - DNA, 25 bp, Artificial
  Probe
gcctgcgtggccacctctctttggt

SEQ ID NO: 318341 - DNA, 25 bp, Artificial
  Probe
atcatgggtgctacggcgctgcccc

SEQ ID NO: 318342 - DNA, 25 bp, Artificial
  Probe
taccttaaggaccaccggatctaca

SEQ ID NO: 318343 - DNA, 25 bp, Artificial
  Probe
tttctgctttaaggaactggaaggc

SEQ ID NO: 318344 - DNA, 25 bp, Artificial
  Probe
ggctaagccacttgtcccagctttc

SEQ ID NO: 318345 - DNA, 25 bp, Artificial
  Probe
tcttcttctgtccttctgatgagtc

SEQ ID NO: 318346 - DNA, 25 bp, Artificial
  Probe
attctctgacaggatctatgggtgg

SEQ ID NO: 318347 - DNA, 25 bp, Artificial
  Probe
tttgtggctttgctctattgtgacc

SEQ ID NO: 318348 - DNA, 25 bp, Artificial
  Probe
cgtcagcgagtttttgaaactggac

SEQ ID NO: 318349 - DNA, 25 bp, Artificial
  Probe
agaccgtgacatttcgaaactggac

SEQ ID NO: 318350 - DNA, 25 bp, Artificial
  Probe
ttaaaggggctcagcctgcgtggcc

SEQ ID NO: 318351 - DNA, 25 bp, Artificial
  Probe
ccctatagaggagcataggaagcac

SEQ ID NO: 318352 - DNA, 25 bp, Artificial
  Probe
cctgcaccccagagcggatggcgga

SEQ ID NO: 318353 - DNA, 25 bp, Artificial
  Probe
ggcagctgtcgcagcccatgtgtag

SEQ ID NO: 318354 - DNA, 25 bp, Artificial
  Probe
acggctaagccacttgtcccagctt

SEQ ID NO: 318355 - DNA, 25 bp, Artificial
  Probe
tcctgcaccccagagcggatggcgg

SEQ ID NO: 318356 - DNA, 25 bp, Artificial
  Probe
ggaggctggcttcatccactgccct

SEQ ID NO: 318357 - DNA, 25 bp, Artificial
  Probe
ccccgatctggcagatgtaccttaa

SEQ ID NO: 318358 - DNA, 25 bp, Artificial
  Probe
accttcaagaactggcccttcctgg

SEQ ID NO: 318359 - DNA, 25 bp, Artificial
  Probe
acatgccacggctaagccacttgtc

SEQ ID NO: 318360 - DNA, 25 bp, Artificial
  Probe
gtccattgagcagctggctgcctta

SEQ ID NO: 318361 - DNA, 25 bp, Artificial
  Probe
ctggctgcgccttccttacagtcaa

SEQ ID NO: 318362 - DNA, 25 bp, Artificial
  Probe
aggattgctcctgcaccccagagcg

SEQ ID NO: 318363 - DNA, 25 bp, Artificial
  Probe
gtgctgataattcttcttctgtcct

SEQ ID NO: 318364 - DNA, 25 bp, Artificial
  Probe
gagtgacatgccacggctaagccac

SEQ ID NO: 318365 - DNA, 25 bp, Artificial
  Probe
gttttgctttaaaggggctcagcct

SEQ ID NO: 318366 - DNA, 25 bp, Artificial
  Probe
ctgctttaaggaactggaaggctgg

SEQ ID NO: 318367 - DNA, 25 bp, Artificial
  Probe
gatctacaccttcaagaactggccc

SEQ ID NO: 318368 - DNA, 25 bp, Artificial
  Probe
cagcccatgtgtaggtgttggttta

SEQ ID NO: 318369 - DNA, 25 bp, Artificial
  Probe
ttttgaaactggacaaacaaagagc

SEQ ID NO: 318370 - DNA, 25 bp, Artificial
  Probe
gcccttcctggaggattgctcctgc

SEQ ID NO: 318371 - DNA, 25 bp, Artificial
  Probe
tgagcagctggctgccttacgctga

SEQ ID NO: 318372 - DNA, 25 bp, Artificial
  Probe
ttgtgcaaggcctttctggtcttga

SEQ ID NO: 318373 - DNA, 25 bp, Artificial
  Probe
atgagggacaggattctctgacagg

SEQ ID NO: 318374 - DNA, 25 bp, Artificial
  Probe
atgcctggcagctgtcgcagcccat

SEQ ID NO: 318375 - DNA, 25 bp, Artificial
  Probe
tctataacctcctgtctcggcgctt

SEQ ID NO: 318376 - DNA, 25 bp, Artificial
  Probe
tggctgctgtgttcaacctcatcca

SEQ ID NO: 318377 - DNA, 25 bp, Artificial
  Probe
ttttatctgagctccgcggtcaacc

SEQ ID NO: 318378 - DNA, 25 bp, Artificial
  Probe
gtggtatcaggtgtcttcttttatc

SEQ ID NO: 318379 - DNA, 25 bp, Artificial
  Probe
cctcatccatgtggtatcaggtgtc

SEQ ID NO: 318380 - DNA, 25 bp, Artificial
  Probe
acagggacctccagcccagaagatc

SEQ ID NO: 318381 - DNA, 25 bp, Artificial
  Probe
attcacagaccctctagaaagtcag

SEQ ID NO: 318382 - DNA, 25 bp, Artificial
  Probe
tctactacctcatggggctcaggct

SEQ ID NO: 318383 - DNA, 25 bp, Artificial
  Probe
atgctgtttgtcttggtcctcgtgt

SEQ ID NO: 318384 - DNA, 25 bp, Artificial
  Probe
acctcatggggctcaggctgaagag

SEQ ID NO: 318385 - DNA, 25 bp, Artificial
  Probe
ttatctataacctcctgtctcggcg

SEQ ID NO: 318386 - DNA, 25 bp, Artificial
  Probe
aacccatgtgggtgtataacttgat

SEQ ID NO: 318387 - DNA, 25 bp, Artificial
  Probe
tccagcccagaagatcatcttcttg

SEQ ID NO: 318388 - DNA, 25 bp, Artificial
  Probe
acccatgtgggtgtataacttgatc

SEQ ID NO: 318389 - DNA, 25 bp, Artificial
  Probe
cttcagctttgtggaagagtggaca

SEQ ID NO: 318390 - DNA, 25 bp, Artificial
  Probe
cctcatggggctcaggctgaagaga

SEQ ID NO: 318391 - DNA, 25 bp, Artificial
  Probe
tcccttgaggcgaacaaagtggctg

SEQ ID NO: 318392 - DNA, 25 bp, Artificial
  Probe
tgtctcggcgcttccgggcggcctt

SEQ ID NO: 318393 - DNA, 25 bp, Artificial
  Probe
gagctgacagaggatgcaggccccc

SEQ ID NO: 318394 - DNA, 25 bp, Artificial
  Probe
agagtccctggctgctgtgttcaac

SEQ ID NO: 318395 - DNA, 25 bp, Artificial
  Probe
agagtggacagagtccctggctgct

SEQ ID NO: 318396 - DNA, 25 bp, Artificial
  Probe
gagatgaatcccttgaggcgaacaa

SEQ ID NO: 318397 - DNA, 25 bp, Artificial
  Probe
atgaatcccttgaggcgaacaaagt

SEQ ID NO: 318398 - DNA, 25 bp, Artificial
  Probe
ctcgtgtttgccatctgctggaccc

SEQ ID NO: 318399 - DNA, 25 bp, Artificial
  Probe
tgagctccgcggtcaaccccattat

SEQ ID NO: 318400 - DNA, 25 bp, Artificial
  Probe
tcaacctcatccatgtggtatcagg

SEQ ID NO: 318401 - DNA, 25 bp, Artificial
  Probe
gaatattcacagaccctctagaaag

SEQ ID NO: 318402 - DNA, 25 bp, Artificial
  Probe
cacagggacctccagcccagaagat

SEQ ID NO: 318403 - DNA, 25 bp, Artificial
  Probe
atcagcgtcctctactacctcatgg

SEQ ID NO: 318404 - DNA, 25 bp, Artificial
  Probe
tgtgaatattcacagaccctctaga

SEQ ID NO: 318405 - DNA, 25 bp, Artificial
  Probe
atgtggaccggctcttcttcagctt

SEQ ID NO: 318406 - DNA, 25 bp, Artificial
  Probe
agttccctggtcagtcatccatcca

SEQ ID NO: 318407 - DNA, 25 bp, Artificial
  Probe
agctgacagaggatgcaggccccca

SEQ ID NO: 318408 - DNA, 25 bp, Artificial
  Probe
ggacagagtccctggctgctgtgtt

SEQ ID NO: 318409 - DNA, 25 bp, Artificial
  Probe
gatcatcttcttgacagaatgtcac

SEQ ID NO: 318410 - DNA, 25 bp, Artificial
  Probe
accaaacccatgtgggtgtataact

SEQ ID NO: 318411 - DNA, 25 bp, Artificial
  Probe
ccttccatgtggaccggctcttctt

SEQ ID NO: 318412 - DNA, 25 bp, Artificial
  Probe
ccttgaggcgaacaaagtggctgtg

SEQ ID NO: 318413 - DNA, 25 bp, Artificial
  Probe
aagagtggacagagtccctggctgc

SEQ ID NO: 318414 - DNA, 25 bp, Artificial
  Probe
gtgtataacttgatcatccaagcta

SEQ ID NO: 318415 - DNA, 25 bp, Artificial
  Probe
gacctccagcccagaagatcatctt

SEQ ID NO: 318416 - DNA, 25 bp, Artificial
  Probe
gcctttcgaaatgttgtctccccta

SEQ ID NO: 318417 - DNA, 25 bp, Artificial
  Probe
ttccgggcggcctttcgaaatgttg

SEQ ID NO: 318418 - DNA, 25 bp, Artificial
  Probe
tgctgtgttcaacctcatccatgtg

SEQ ID NO: 318419 - DNA, 25 bp, Artificial
  Probe
gtgttcaacctcatccatgtggtat

SEQ ID NO: 318420 - DNA, 25 bp, Artificial
  Probe
ggctcaggctgaagagagatgaatc

SEQ ID NO: 318421 - DNA, 25 bp, Artificial
  Probe
ggttatctgtgcacttttgtgtgtc

SEQ ID NO: 318422 - DNA, 25 bp, Artificial
  Probe
atgaggcagactttctgctggggat

SEQ ID NO: 318423 - DNA, 25 bp, Artificial
  Probe
agacaacccgaggaacatgggaaag

SEQ ID NO: 318424 - DNA, 25 bp, Artificial
  Probe
aactgtgtttcctaccgagatccca

SEQ ID NO: 318425 - DNA, 25 bp, Artificial
  Probe
gcaataaagacaacccgaggaacat

SEQ ID NO: 318426 - DNA, 25 bp, Artificial
  Probe
ggaagaagctcttcttccctcctaa

SEQ ID NO: 318427 - DNA, 25 bp, Artificial
  Probe
acagcccatcttcacactacggaag

SEQ ID NO: 318428 - DNA, 25 bp, Artificial
  Probe
cagcatcctgactggcgtgaactat

SEQ ID NO: 318429 - DNA, 25 bp, Artificial
  Probe
aagcggtgcctgtgcctgatgagac

SEQ ID NO: 318430 - DNA, 25 bp, Artificial
  Probe
tcctcgaggtgaggatattctcagc

SEQ ID NO: 318431 - DNA, 25 bp, Artificial
  Probe
gaggattcatcatcttacaagaact

SEQ ID NO: 318432 - DNA, 25 bp, Artificial
  Probe
ttcttccctcctaactgatgtgtgc

SEQ ID NO: 318433 - DNA, 25 bp, Artificial
  Probe
gaggatattctcagcatcctgactg

SEQ ID NO: 318434 - DNA, 25 bp, Artificial
  Probe
tcacatgggttatctgtgcactttt

SEQ ID NO: 318435 - DNA, 25 bp, Artificial
  Probe
tccagaaagcggtgcctgtgcctga

SEQ ID NO: 318436 - DNA, 25 bp, Artificial
  Probe
agatcccacgcgtgggacctggtat

SEQ ID NO: 318437 - DNA, 25 bp, Artificial
  Probe
tgggacctggtatatccagtcactt

SEQ ID NO: 318438 - DNA, 25 bp, Artificial
  Probe
agaggattcatcatcttacaagaac

SEQ ID NO: 318439 - DNA, 25 bp, Artificial
  Probe
atatcccagatgaggcagactttct

SEQ ID NO: 318440 - DNA, 25 bp, Artificial
  Probe
ctctacagttcacatgggttatctg

SEQ ID NO: 318441 - DNA, 25 bp, Artificial
  Probe
acctggtatatccagtcactttgcc

SEQ ID NO: 318442 - DNA, 25 bp, Artificial
  Probe
tgagcaataaagacaacccgaggaa

SEQ ID NO: 318443 - DNA, 25 bp, Artificial
  Probe
tgagacaggcttagaacaggagcac

SEQ ID NO: 318444 - DNA, 25 bp, Artificial
  Probe
aaagcagatgccacagcccatcttc

SEQ ID NO: 318445 - DNA, 25 bp, Artificial
  Probe
ctggcgtgaactatgatgtgagcaa

SEQ ID NO: 318446 - DNA, 25 bp, Artificial
  Probe
agacaggcttagaacaggagcacgt

SEQ ID NO: 318447 - DNA, 25 bp, Artificial
  Probe
cttagaacaggagcacgttttagaa

SEQ ID NO: 318448 - DNA, 25 bp, Artificial
  Probe
aaagcggtgcctgtgcctgatgaga

SEQ ID NO: 318449 - DNA, 25 bp, Artificial
  Probe
tgccagagcctgagggaaagatgtc

SEQ ID NO: 318450 - DNA, 25 bp, Artificial
  Probe
ttacaagaactatatcccagatgag

SEQ ID NO: 318451 - DNA, 25 bp, Artificial
  Probe
ctgatgtgtgctctctacagttcac

SEQ ID NO: 318452 - DNA, 25 bp, Artificial
  Probe
cactacggaagaagctcttcttccc

SEQ ID NO: 318453 - DNA, 25 bp, Artificial
  Probe
gtgcctgtgcctgatgagacaggct

SEQ ID NO: 318454 - DNA, 25 bp, Artificial
  Probe
cagatgaggcagactttctgctggg

SEQ ID NO: 318455 - DNA, 25 bp, Artificial
  Probe
gcctgatgagacaggcttagaacag

SEQ ID NO: 318456 - DNA, 25 bp, Artificial
  Probe
tcctgactggcgtgaactatgatgt

SEQ ID NO: 318457 - DNA, 25 bp, Artificial
  Probe
tgaaaaactgtgtttcctaccgaga

SEQ ID NO: 318458 - DNA, 25 bp, Artificial
  Probe
ttcctaccgagatcccacgcgtggg

SEQ ID NO: 318459 - DNA, 25 bp, Artificial
  Probe
atgtcctcgaggtgaggatattctc

SEQ ID NO: 318460 - DNA, 25 bp, Artificial
  Probe
taacttccagaaagcggtgcctgtg

SEQ ID NO: 318461 - DNA, 25 bp, Artificial
  Probe
aggcttagaacaggagcacgtttta

SEQ ID NO: 318462 - DNA, 25 bp, Artificial
  Probe
gctctctacagttcacatgggttat

SEQ ID NO: 318463 - DNA, 25 bp, Artificial
  Probe
aagcagatgccacagcccatcttca

SEQ ID NO: 318464 - DNA, 25 bp, Artificial
  Probe
cggaagaagctcttcttccctccta

SEQ ID NO: 318465 - DNA, 25 bp, Artificial
  Probe
ctaactgatgtgtgctctctacagt

SEQ ID NO: 318466 - DNA, 25 bp, Artificial
  Probe
caacccgaggaacatgggaaagcag

SEQ ID NO: 318467 - DNA, 25 bp, Artificial
  Probe
agtcaatgtgaatccttatgaatgt

SEQ ID NO: 318468 - DNA, 25 bp, Artificial
  Probe
ttgcatttatgtttttgcagtcaat

SEQ ID NO: 318469 - DNA, 25 bp, Artificial
  Probe
tgcagtcaatgtgaatccttatgaa

SEQ ID NO: 318470 - DNA, 25 bp, Artificial
  Probe
cttttatgtttttgttgcatttatg

SEQ ID NO: 318471 - DNA, 25 bp, Artificial
  Probe
tgtttttgttgcatttatgtttttg

SEQ ID NO: 318472 - DNA, 25 bp, Artificial
  Probe
caacacaaactgtgtgaagccatga

SEQ ID NO: 318473 - DNA, 25 bp, Artificial
  Probe
ttatgtttttgcagtcaatgtgaat

SEQ ID NO: 318474 - DNA, 25 bp, Artificial
  Probe
tttttgttgcatttatgtttttgca

SEQ ID NO: 318475 - DNA, 25 bp, Artificial
  Probe
tgaatgtacaacacaaactgtgtga

SEQ ID NO: 318476 - DNA, 25 bp, Artificial
  Probe
tgttgcatttatgtttttgcagtca

SEQ ID NO: 318477 - DNA, 25 bp, Artificial
  Probe
tttgcagtcaatgtgaatccttatg

SEQ ID NO: 318478 - DNA, 25 bp, Artificial
  Probe
tgtacaacacaaactgtgtgaagcc

SEQ ID NO: 318479 - DNA, 25 bp, Artificial
  Probe
tatgtttttgttgcatttatgtttt

SEQ ID NO: 318480 - DNA, 25 bp, Artificial
  Probe
atgtgaatccttatgaatgtacaac

SEQ ID NO: 318481 - DNA, 25 bp, Artificial
  Probe
taacacttggaggcttttatgtttt

SEQ ID NO: 318482 - DNA, 25 bp, Artificial
  Probe
acaacacaaactgtgtgaagccatg

SEQ ID NO: 318483 - DNA, 25 bp, Artificial
  Probe
aggcttttatgtttttgttgcattt

SEQ ID NO: 318484 - DNA, 25 bp, Artificial
  Probe
actgtgtgaagccatgaagaaacag

SEQ ID NO: 318485 - DNA, 25 bp, Artificial
  Probe
gcagtcaatgtgaatccttatgaat

SEQ ID NO: 318486 - DNA, 25 bp, Artificial
  Probe
aacacaaactgtgtgaagccatgaa

SEQ ID NO: 318487 - DNA, 25 bp, Artificial
  Probe
tacaacacaaactgtgtgaagccat

SEQ ID NO: 318488 - DNA, 25 bp, Artificial
  Probe
atgtttttgcagtcaatgtgaatcc

SEQ ID NO: 318489 - DNA, 25 bp, Artificial
  Probe
caaactgtgtgaagccatgaagaaa

SEQ ID NO: 318490 - DNA, 25 bp, Artificial
  Probe
tgaatccttatgaatgtacaacaca

SEQ ID NO: 318491 - DNA, 25 bp, Artificial
  Probe
tttatgtttttgttgcatttatgtt

SEQ ID NO: 318492 - DNA, 25 bp, Artificial
  Probe
aatccttatgaatgtacaacacaaa

SEQ ID NO: 318493 - DNA, 25 bp, Artificial
  Probe
atttatgtttttgcagtcaatgtga

SEQ ID NO: 318494 - DNA, 25 bp, Artificial
  Probe
aatgtacaacacaaactgtgtgaag

SEQ ID NO: 318495 - DNA, 25 bp, Artificial
  Probe
ggcttttatgtttttgttgcattta

SEQ ID NO: 318496 - DNA, 25 bp, Artificial
  Probe
tttttgcagtcaatgtgaatcctta

SEQ ID NO: 318497 - DNA, 25 bp, Artificial
  Probe
ttttgcagtcaatgtgaatccttat

SEQ ID NO: 318498 - DNA, 25 bp, Artificial
  Probe
atccttatgaatgtacaacacaaac

SEQ ID NO: 318499 - DNA, 25 bp, Artificial
  Probe
gaatgtacaacacaaactgtgtgaa

SEQ ID NO: 318500 - DNA, 25 bp, Artificial
  Probe
gtacaacacaaactgtgtgaagcca

SEQ ID NO: 318501 - DNA, 25 bp, Artificial
  Probe
tttgttgcatttatgtttttgcagt

SEQ ID NO: 318502 - DNA, 25 bp, Artificial
  Probe
gcatttatgtttttgcagtcaatgt

SEQ ID NO: 318503 - DNA, 25 bp, Artificial
  Probe
cacttggaggcttttatgtttttgt

SEQ ID NO: 318504 - DNA, 25 bp, Artificial
  Probe
tgtgaatccttatgaatgtacaaca

SEQ ID NO: 318505 - DNA, 25 bp, Artificial
  Probe
tgtttttgcagtcaatgtgaatcct

SEQ ID NO: 318506 - DNA, 25 bp, Artificial
  Probe
atgtacaacacaaactgtgtgaagc

SEQ ID NO: 318507 - DNA, 25 bp, Artificial
  Probe
tatgtttttgcagtcaatgtgaatc

SEQ ID NO: 318508 - DNA, 25 bp, Artificial
  Probe
tcaatgtgaatccttatgaatgtac

SEQ ID NO: 318509 - DNA, 25 bp, Artificial
  Probe
acacttggaggcttttatgtttttg

SEQ ID NO: 318510 - DNA, 25 bp, Artificial
  Probe
gtcaatgtgaatccttatgaatgta

SEQ ID NO: 318511 - DNA, 25 bp, Artificial
  Probe
gtttttgcagtcaatgtgaatcctt

SEQ ID NO: 318512 - DNA, 25 bp, Artificial
  Probe
aaactgtgtgaagccatgaagaaac

SEQ ID NO: 318513 - DNA, 25 bp, Artificial
  Probe
aggagcggctgcacaacaagacaag

SEQ ID NO: 318514 - DNA, 25 bp, Artificial
  Probe
tttataaacagctcggcagtgcagg

SEQ ID NO: 318515 - DNA, 25 bp, Artificial
  Probe
aatatgtagccattaaactggaacc

SEQ ID NO: 318516 - DNA, 25 bp, Artificial
  Probe
ataccaaaaggagtactcccatcga

SEQ ID NO: 318517 - DNA, 25 bp, Artificial
  Probe
tacacattatagattttggactggc

SEQ ID NO: 318518 - DNA, 25 bp, Artificial
  Probe
ttctcgaatggagtatgtacactca

SEQ ID NO: 318519 - DNA, 25 bp, Artificial
  Probe
tccagcacccacataagcaggagtc

SEQ ID NO: 318520 - DNA, 25 bp, Artificial
  Probe
ggatgatttggaagccctgggccat

SEQ ID NO: 318521 - DNA, 25 bp, Artificial
  Probe
acaacttcatttagagtacaggttt

SEQ ID NO: 318522 - DNA, 25 bp, Artificial
  Probe
ggagacagagccttcattgacagtt

SEQ ID NO: 318523 - DNA, 25 bp, Artificial
  Probe
aaccatggcacaaaggaatacacac

SEQ ID NO: 318524 - DNA, 25 bp, Artificial
  Probe
ggatcgaccatcacaacaacagcct

SEQ ID NO: 318525 - DNA, 25 bp, Artificial
  Probe
ctttggaccatgtgggaagtacaat

SEQ ID NO: 318526 - DNA, 25 bp, Artificial
  Probe
tagacaacggacaactaaaaccatg

SEQ ID NO: 318527 - DNA, 25 bp, Artificial
  Probe
ctggaaccaataaaatcacgtgctc

SEQ ID NO: 318528 - DNA, 25 bp, Artificial
  Probe
cacactaaccagatgacaggagtgg

SEQ ID NO: 318529 - DNA, 25 bp, Artificial
  Probe
atgtagccattaaactggaaccaat

SEQ ID NO: 318530 - DNA, 25 bp, Artificial
  Probe
cttcggagagctcagattaggtaaa

SEQ ID NO: 318531 - DNA, 25 bp, Artificial
  Probe
gagtatttacggaacctcttcacag

SEQ ID NO: 318532 - DNA, 25 bp, Artificial
  Probe
catggaccattctaatagagaaaag

SEQ ID NO: 318533 - DNA, 25 bp, Artificial
  Probe
caacttcatttagagtacaggtttt

SEQ ID NO: 318534 - DNA, 25 bp, Artificial
  Probe
tgggaacttcggagagctcagatta

SEQ ID NO: 318535 - DNA, 25 bp, Artificial
  Probe
agattagacttctttgaaaaacctg

SEQ ID NO: 318536 - DNA, 25 bp, Artificial
  Probe
cttctttgaaaaacctgattatgag

SEQ ID NO: 318537 - DNA, 25 bp, Artificial
  Probe
acatggaccattctaatagagaaaa

SEQ ID NO: 318538 - DNA, 25 bp, Artificial
  Probe
cctatgattgggttggaaggcctat

SEQ ID NO: 318539 - DNA, 25 bp, Artificial
  Probe
tcaaagaatctcatttaccgagatg

SEQ ID NO: 318540 - DNA, 25 bp, Artificial
  Probe
acataccttacagagagcacaaaag

SEQ ID NO: 318541 - DNA, 25 bp, Artificial
  Probe
agtggtttgtgctggctcccctttc

SEQ ID NO: 318542 - DNA, 25 bp, Artificial
  Probe
tcatgtgctggcagtgaaagcaggt

SEQ ID NO: 318543 - DNA, 25 bp, Artificial
  Probe
actcaaggctgatacattaaaagag

SEQ ID NO: 318544 - DNA, 25 bp, Artificial
  Probe
ctgtttgaacggaaaggctatactt

SEQ ID NO: 318545 - DNA, 25 bp, Artificial
  Probe
cttcgatatgtcaggagattagact

SEQ ID NO: 318546 - DNA, 25 bp, Artificial
  Probe
ggaatacattgatcctgaaaccaaa

SEQ ID NO: 318547 - DNA, 25 bp, Artificial
  Probe
acatctaggcaaagagcaaagccgg

SEQ ID NO: 318548 - DNA, 25 bp, Artificial
  Probe
tgttcccgaccatctggcacttcaa

SEQ ID NO: 318549 - DNA, 25 bp, Artificial
  Probe
caacttcagggttggcaagaagata

SEQ ID NO: 318550 - DNA, 25 bp, Artificial
  Probe
gagactgtcgtgtaggaacatggac

SEQ ID NO: 318551 - DNA, 25 bp, Artificial
  Probe
aagtacaatgccatggtgctggaac

SEQ ID NO: 318552 - DNA, 25 bp, Artificial
  Probe
ttaatgatagccatccagttgcttt

SEQ ID NO: 318553 - DNA, 25 bp, Artificial
  Probe
tgaccgaacgtttactttgaagacg

SEQ ID NO: 318554 - DNA, 25 bp, Artificial
  Probe
aattggccgacaaggcaataagaaa

SEQ ID NO: 318555 - DNA, 25 bp, Artificial
  Probe
aacagcctcttagaaatcagccaag

SEQ ID NO: 318556 - DNA, 25 bp, Artificial
  Probe
tttggactggccaaggaatacattg

SEQ ID NO: 318557 - DNA, 25 bp, Artificial
  Probe
gcgcgatacatgtctatcaacacac

SEQ ID NO: 318558 - DNA, 25 bp, Artificial
  Probe
ggaaccaataaaatcacgtgctcca

SEQ ID NO: 318559 - DNA, 25 bp, Artificial
  Probe
tacttcgtgggcaccgtggtgtcga

SEQ ID NO: 318560 - DNA, 25 bp, Artificial
  Probe
gagctcatctcaatgcgcgacctca

SEQ ID NO: 318561 - DNA, 25 bp, Artificial
  Probe
ctgttcgccgtgctgctggcctgct

SEQ ID NO: 318562 - DNA, 25 bp, Artificial
  Probe
tggatgctgcgcaagctgagctgcc

SEQ ID NO: 318563 - DNA, 25 bp, Artificial
  Probe
ttggcctctacctggtggccggcgc

SEQ ID NO: 318564 - DNA, 25 bp, Artificial
  Probe
tatcacgtgctgctcatcctgggcc

SEQ ID NO: 318565 - DNA, 25 bp, Artificial
  Probe
gcactgctgcagaagcagctttccg

SEQ ID NO: 318566 - DNA, 25 bp, Artificial
  Probe
ggaaggccttcctcatcgcctacgg

SEQ ID NO: 318567 - DNA, 25 bp, Artificial
  Probe
atcatgcgcgcctgccgggagcgtc

SEQ ID NO: 318568 - DNA, 25 bp, Artificial
  Probe
gcttcgtgctgctggccgcgctcat

SEQ ID NO: 318569 - DNA, 25 bp, Artificial
  Probe
tgagctgccgctgctgcacgcgctg

SEQ ID NO: 318570 - DNA, 25 bp, Artificial
  Probe
gactcgctctacttctgcttcgtca

SEQ ID NO: 318571 - DNA, 25 bp, Artificial
  Probe
ccttttcatcctgctcggcgtgtgc

SEQ ID NO: 318572 - DNA, 25 bp, Artificial
  Probe
gtgctgcatctactcgctcttcaac

SEQ ID NO: 318573 - DNA, 25 bp, Artificial
  Probe
gtcgctggcactgctgcagaagcag

SEQ ID NO: 318574 - DNA, 25 bp, Artificial
  Probe
tcgcctacggactgttcggctgcgc

SEQ ID NO: 318575 - DNA, 25 bp, Artificial
  Probe
gcatcatgaacaaccggctggcaga

SEQ ID NO: 318576 - DNA, 25 bp, Artificial
  Probe
ggcgcgctgggcatcatgaacaacc

SEQ ID NO: 318577 - DNA, 25 bp, Artificial
  Probe
gaaccaggggctctaccgtctgggc

SEQ ID NO: 318578 - DNA, 25 bp, Artificial
  Probe
gtgtgcgtcaacacgcgccagaacg

SEQ ID NO: 318579 - DNA, 25 bp, Artificial
  Probe
acaaggtgtcgctggcactgctgca

SEQ ID NO: 318580 - DNA, 25 bp, Artificial
  Probe
gttcttcaacctctttctggagcgc

SEQ ID NO: 318581 - DNA, 25 bp, Artificial
  Probe
cagctttccgagacggccaacggct

SEQ ID NO: 318582 - DNA, 25 bp, Artificial
  Probe
ggctgggactacgtggactcgctct

SEQ ID NO: 318583 - DNA, 25 bp, Artificial
  Probe
tctccatcctcatcaagcaggtgct

SEQ ID NO: 318584 - DNA, 25 bp, Artificial
  Probe
ccgcctgtcgggagagctcatctca

SEQ ID NO: 318585 - DNA, 25 bp, Artificial
  Probe
cgcaagctgagctgccgctgctgca

SEQ ID NO: 318586 - DNA, 25 bp, Artificial
  Probe
tcatcctgggcctgttcgccgtgct

SEQ ID NO: 318587 - DNA, 25 bp, Artificial
  Probe
cgcgctgggacttccctggagcctt

SEQ ID NO: 318588 - DNA, 25 bp, Artificial
  Probe
ctcggccatgtacaccagcgtggag

SEQ ID NO: 318589 - DNA, 25 bp, Artificial
  Probe
gggaccatcctgttcttcaacctct

SEQ ID NO: 318590 - DNA, 25 bp, Artificial
  Probe
aacacgcgccagaacggcttctcgg

SEQ ID NO: 318591 - DNA, 25 bp, Artificial
  Probe
tcctgctcggcgtgtgctgcatcta

SEQ ID NO: 318592 - DNA, 25 bp, Artificial
  Probe
ggcgggtttgcttcacttctctccg

SEQ ID NO: 318593 - DNA, 25 bp, Artificial
  Probe
ggctacccgcgcagcgtgtgcgtca

SEQ ID NO: 318594 - DNA, 25 bp, Artificial
  Probe
ttcgccgtgctgctggcctgctgcg

SEQ ID NO: 318595 - DNA, 25 bp, Artificial
  Probe
acacgcgccagaacggcttctcggg

SEQ ID NO: 318596 - DNA, 25 bp, Artificial
  Probe
gcagctttccgagacggccaacggc

SEQ ID NO: 318597 - DNA, 25 bp, Artificial
  Probe
cgctcattggcctctacctggtggc

SEQ ID NO: 318598 - DNA, 25 bp, Artificial
  Probe
gacctcacggcgtccaacaaggtgt

SEQ ID NO: 318599 - DNA, 25 bp, Artificial
  Probe
tcggccatgtacaccagcgtggagg

SEQ ID NO: 318600 - DNA, 25 bp, Artificial
  Probe
cagcgtgtgcgtcaacacgcgccag

SEQ ID NO: 318601 - DNA, 25 bp, Artificial
  Probe
aaccggctggcagagaccagcgcct

SEQ ID NO: 318602 - DNA, 25 bp, Artificial
  Probe
ggctggaagccctcggtgtatcacg

SEQ ID NO: 318603 - DNA, 25 bp, Artificial
  Probe
tcatctcgctgctggccttcatcat

SEQ ID NO: 318604 - DNA, 25 bp, Artificial
  Probe
cgcggggaccatcctgttcttcaac

SEQ ID NO: 318605 - DNA, 25 bp, Artificial
  Probe
gaaagtgacactgatgggcgacgtc

SEQ ID NO: 318606 - DNA, 25 bp, Artificial
  Probe
tggatctcagatgataaggaaacca

SEQ ID NO: 318607 - DNA, 25 bp, Artificial
  Probe
ggttccactaatagggaaaacatct

SEQ ID NO: 318608 - DNA, 25 bp, Artificial
  Probe
caacatctccatagagacggacggg

SEQ ID NO: 318609 - DNA, 25 bp, Artificial
  Probe
caatttcgcgtttggaattgtctgg

SEQ ID NO: 318610 - DNA, 25 bp, Artificial
  Probe
ggctctaccgctttgtcaatttctt

SEQ ID NO: 318611 - DNA, 25 bp, Artificial
  Probe
cgagatggccaatggtggaccccac

SEQ ID NO: 318612 - DNA, 25 bp, Artificial
  Probe
ccttgaattcccaatttcgcgtttg

SEQ ID NO: 318613 - DNA, 25 bp, Artificial
  Probe
ggaaagccccgaaaagcctgactct

SEQ ID NO: 318614 - DNA, 25 bp, Artificial
  Probe
aggacaccaacaaggtctccctggc

SEQ ID NO: 318615 - DNA, 25 bp, Artificial
  Probe
actcctgcggtccaggaggaacgtg

SEQ ID NO: 318616 - DNA, 25 bp, Artificial
  Probe
ctccatcctgatcaaacagacagtg

SEQ ID NO: 318617 - DNA, 25 bp, Artificial
  Probe
gatgggtttccgtccagctttgatc

SEQ ID NO: 318618 - DNA, 25 bp, Artificial
  Probe
ggaccagaagtagctgccacatgaa

SEQ ID NO: 318619 - DNA, 25 bp, Artificial
  Probe
gtttccgtccagctttgatccccta

SEQ ID NO: 318620 - DNA, 25 bp, Artificial
  Probe
tccctggccatcctgcagaagcagt

SEQ ID NO: 318621 - DNA, 25 bp, Artificial
  Probe
gtaactaaagcctaccgcttactgt

SEQ ID NO: 318622 - DNA, 25 bp, Artificial
  Probe
cagcccctcaagaaaaggcagcgaa

SEQ ID NO: 318623 - DNA, 25 bp, Artificial
  Probe
cctatctgactagtgtatctttttg

SEQ ID NO: 318624 - DNA, 25 bp, Artificial
  Probe
ctcccgggatgatgagttctcaggg

SEQ ID NO: 318625 - DNA, 25 bp, Artificial
  Probe
ttggttccactaatagggaaaacat

SEQ ID NO: 318626 - DNA, 25 bp, Artificial
  Probe
gaaagctcccatcttgtaactaaag

SEQ ID NO: 318627 - DNA, 25 bp, Artificial
  Probe
agaccagcacatcctcccgggatga

SEQ ID NO: 318628 - DNA, 25 bp, Artificial
  Probe
aatggcggctgaacttcacccagcc

SEQ ID NO: 318629 - DNA, 25 bp, Artificial
  Probe
ctctaagttgtagcaagatgaaggc

SEQ ID NO: 318630 - DNA, 25 bp, Artificial
  Probe
aagtgacactgatgggcgacgtctc

SEQ ID NO: 318631 - DNA, 25 bp, Artificial
  Probe
ggcagcgaacattcccgaatgcctc

SEQ ID NO: 318632 - DNA, 25 bp, Artificial
  Probe
ctggagccatcttccctgactctta

SEQ ID NO: 318633 - DNA, 25 bp, Artificial
  Probe
tggcttcaagcaccattggcttcgg

SEQ ID NO: 318634 - DNA, 25 bp, Artificial
  Probe
gtgatgccgggcaacatccggaaca

SEQ ID NO: 318635 - DNA, 25 bp, Artificial
  Probe
ggagatgatctccatgaaggacacc

SEQ ID NO: 318636 - DNA, 25 bp, Artificial
  Probe
agcctttgcagtaatgaataacagg

SEQ ID NO: 318637 - DNA, 25 bp, Artificial
  Probe
cggtcatgatccatccctagggagg

SEQ ID NO: 318638 - DNA, 25 bp, Artificial
  Probe
cctcagctgtgtctctggctgttgg

SEQ ID NO: 318639 - DNA, 25 bp, Artificial
  Probe
gtctgctgcatctactccatgttta

SEQ ID NO: 318640 - DNA, 25 bp, Artificial
  Probe
gcagttgtccgagatggccaatggt

SEQ ID NO: 318641 - DNA, 25 bp, Artificial
  Probe
aggaaagctcccatcttgtaactaa

SEQ ID NO: 318642 - DNA, 25 bp, Artificial
  Probe
ccacatgaagaaacccagggcaagt

SEQ ID NO: 318643 - DNA, 25 bp, Artificial
  Probe
aacccggtcatgatccatccctagg

SEQ ID NO: 318644 - DNA, 25 bp, Artificial
  Probe
ggccttgttctattattggttccac

SEQ ID NO: 318645 - DNA, 25 bp, Artificial
  Probe
aatttcttcttcatcctcatgggtg

SEQ ID NO: 318646 - DNA, 25 bp, Artificial
  Probe
gcgtgggagcctttgcagtaatgaa

SEQ ID NO: 318647 - DNA, 25 bp, Artificial
  Probe
ctctgtttgggagtcttggtttcgt

SEQ ID NO: 318648 - DNA, 25 bp, Artificial
  Probe
ttcaaacctctaagttgtagcaaga

SEQ ID NO: 318649 - DNA, 25 bp, Artificial
  Probe
ttatatctgcttctctgtttgggag

SEQ ID NO: 318650 - DNA, 25 bp, Artificial
  Probe
tggtgagcagccagaacgctcagta

SEQ ID NO: 318651 - DNA, 25 bp, Artificial
  Probe
gatcacgggaatacgacaggcagcg

SEQ ID NO: 318652 - DNA, 25 bp, Artificial
  Probe
agctttcaggacaaagataagctgc

SEQ ID NO: 318653 - DNA, 25 bp, Artificial
  Probe
gttcaggacctgacggcccttctga

SEQ ID NO: 318654 - DNA, 25 bp, Artificial
  Probe
agtgcctggccttgcgcaaggatgc

SEQ ID NO: 318655 - DNA, 25 bp, Artificial
  Probe
tttactgtacgctacacatacgttg

SEQ ID NO: 318656 - DNA, 25 bp, Artificial
  Probe
ctcagacaaaggtgtcctggcagac

SEQ ID NO: 318657 - DNA, 25 bp, Artificial
  Probe
aagcgctgcaaggatgagaactacg

SEQ ID NO: 318658 - DNA, 25 bp, Artificial
  Probe
gacacggtgcccagcagcagcgagc

SEQ ID NO: 318659 - DNA, 25 bp, Artificial
  Probe
aggaccacgccgaggctgagcgtct

SEQ ID NO: 318660 - DNA, 25 bp, Artificial
  Probe
agagcccagagcagcccttcgtggt

SEQ ID NO: 318661 - DNA, 25 bp, Artificial
  Probe
ggtaagctacacaggaatagcccat

SEQ ID NO: 318662 - DNA, 25 bp, Artificial
  Probe
agctgaagcgctgcaaggatgagaa

SEQ ID NO: 318663 - DNA, 25 bp, Artificial
  Probe
gtctccgtgcaggagggtaagctac

SEQ ID NO: 318664 - DNA, 25 bp, Artificial
  Probe
cgaggctgagcgtctgtgtaattgt

SEQ ID NO: 318665 - DNA, 25 bp, Artificial
  Probe
atcctgagctctgacttggaagaca

SEQ ID NO: 318666 - DNA, 25 bp, Artificial
  Probe
cgagagccgattactggccgctgag

SEQ ID NO: 318667 - DNA, 25 bp, Artificial
  Probe
ttgcagctgcagctgttccagaccg

SEQ ID NO: 318668 - DNA, 25 bp, Artificial
  Probe
gatgagaactacgacctggccatgc

SEQ ID NO: 318669 - DNA, 25 bp, Artificial
  Probe
agataagctgcgaaagcaggttcga

SEQ ID NO: 318670 - DNA, 25 bp, Artificial
  Probe
agaactacgacctggccatgcgcct

SEQ ID NO: 318671 - DNA, 25 bp, Artificial
  Probe
tccggacccggtgcatggaggaaaa

SEQ ID NO: 318672 - DNA, 25 bp, Artificial
  Probe
gcaagatgcagaacagctggcgaca

SEQ ID NO: 318673 - DNA, 25 bp, Artificial
  Probe
ttggaagacagttcccccaggaact

SEQ ID NO: 318674 - DNA, 25 bp, Artificial
  Probe
tgtcctggcagacagggagagccca

SEQ ID NO: 318675 - DNA, 25 bp, Artificial
  Probe
agctgcgaaagcaggttcgagaact

SEQ ID NO: 318676 - DNA, 25 bp, Artificial
  Probe
tttcgcagacccatgacacggtgcc

SEQ ID NO: 318677 - DNA, 25 bp, Artificial
  Probe
tctccgtgcaggagggtaagctaca

SEQ ID NO: 318678 - DNA, 25 bp, Artificial
  Probe
cgggcgctccgcaagatgcagaaca

SEQ ID NO: 318679 - DNA, 25 bp, Artificial
  Probe
agcagtgccgagctgaagcgctgca

SEQ ID NO: 318680 - DNA, 25 bp, Artificial
  Probe
gcgggaccaggctatgacctcaagg

SEQ ID NO: 318681 - DNA, 25 bp, Artificial
  Probe
agaaggttcaggacctgacggccct

SEQ ID NO: 318682 - DNA, 25 bp, Artificial
  Probe
gacaccgagggctcctagaggacca

SEQ ID NO: 318683 - DNA, 25 bp, Artificial
  Probe
atgagaaggccgacgagttgcagct

SEQ ID NO: 318684 - DNA, 25 bp, Artificial
  Probe
gctacacaggaatagcccatacatc

SEQ ID NO: 318685 - DNA, 25 bp, Artificial
  Probe
agacaaaggtgtcctggcagacagg

SEQ ID NO: 318686 - DNA, 25 bp, Artificial
  Probe
ctccggacccggtgcatggaggaaa

SEQ ID NO: 318687 - DNA, 25 bp, Artificial
  Probe
tcacctgagtgaagagaagggagca

SEQ ID NO: 318688 - DNA, 25 bp, Artificial
  Probe
cacgggaatacgacaggcagcgaca

SEQ ID NO: 318689 - DNA, 25 bp, Artificial
  Probe
gccttgcgcaaggatgccaagatgt

SEQ ID NO: 318690 - DNA, 25 bp, Artificial
  Probe
ctgacggcccttctgagctccaagg

SEQ ID NO: 318691 - DNA, 25 bp, Artificial
  Probe
tggccatgcgcctggctcacctgag

SEQ ID NO: 318692 - DNA, 25 bp, Artificial
  Probe
tcatgaagctgcagaagaaggttca

SEQ ID NO: 318693 - DNA, 25 bp, Artificial
  Probe
cagggagagcccagagcagcccttc

SEQ ID NO: 318694 - DNA, 25 bp, Artificial
  Probe
catcaaggagctgagggtaaaggac

SEQ ID NO: 318695 - DNA, 25 bp, Artificial
  Probe
attactggccgctgagggcagactc

SEQ ID NO: 318696 - DNA, 25 bp, Artificial
  Probe
cagtgccgagctgaagcgctgcaag

SEQ ID NO: 318697 - DNA, 25 bp, Artificial
  Probe
atttcgatctggaagacacgatgga

SEQ ID NO: 318698 - DNA, 25 bp, Artificial
  Probe
tactacacaccagtcccgtgtgagc

SEQ ID NO: 318699 - DNA, 25 bp, Artificial
  Probe
atggggatttcgatctggaagacac

SEQ ID NO: 318700 - DNA, 25 bp, Artificial
  Probe
ccgatggggatttcgatctggaaga

SEQ ID NO: 318701 - DNA, 25 bp, Artificial
  Probe
tcctcgataccgatggggatttcga

SEQ ID NO: 318702 - DNA, 25 bp, Artificial
  Probe
atgaatcgcttctctttggaaacaa

SEQ ID NO: 318703 - DNA, 25 bp, Artificial
  Probe
agaatcccgactctgtcctcgatac

SEQ ID NO: 318704 - DNA, 25 bp, Artificial
  Probe
ctgcagcttcactgtcctcctggag

SEQ ID NO: 318705 - DNA, 25 bp, Artificial
  Probe
gcgaaagcagctgacggatacgtga

SEQ ID NO: 318706 - DNA, 25 bp, Artificial
  Probe
tctggaagacacgatggacgtggca

SEQ ID NO: 318707 - DNA, 25 bp, Artificial
  Probe
aagtactacacaccagtcccgtgtg

SEQ ID NO: 318708 - DNA, 25 bp, Artificial
  Probe
ttccccagtggtgtgccctcaggct

SEQ ID NO: 318709 - DNA, 25 bp, Artificial
  Probe
agcttcactgtcctcctggaggacc

SEQ ID NO: 318710 - DNA, 25 bp, Artificial
  Probe
acgtgaagccgcagatcaagcaagt

SEQ ID NO: 318711 - DNA, 25 bp, Artificial
  Probe
gcccatggacagtcagtggatccct

SEQ ID NO: 318712 - DNA, 25 bp, Artificial
  Probe
taccgatggggatttcgatctggaa

SEQ ID NO: 318713 - DNA, 25 bp, Artificial
  Probe
agctgacggatacgtgaagccgcag

SEQ ID NO: 318714 - DNA, 25 bp, Artificial
  Probe
ggggatttcgatctggaagacacga

SEQ ID NO: 318715 - DNA, 25 bp, Artificial
  Probe
agccgcagatcaagcaagtggtccc

SEQ ID NO: 318716 - DNA, 25 bp, Artificial
  Probe
ttcactgtcctcctggaggaccctt

SEQ ID NO: 318717 - DNA, 25 bp, Artificial
  Probe
cgcttctctttggaaacaatattcg

SEQ ID NO: 318718 - DNA, 25 bp, Artificial
  Probe
cagcttcactgtcctcctggaggac

SEQ ID NO: 318719 - DNA, 25 bp, Artificial
  Probe
agcagctgacggatacgtgaagccg

SEQ ID NO: 318720 - DNA, 25 bp, Artificial
  Probe
gtcctcctggaggacccttcctgtg

SEQ ID NO: 318721 - DNA, 25 bp, Artificial
  Probe
tgacggatacgtgaagccgcagatc

SEQ ID NO: 318722 - DNA, 25 bp, Artificial
  Probe
ctggaagacacgatggacgtggcac

SEQ ID NO: 318723 - DNA, 25 bp, Artificial
  Probe
tgaagccgcagatcaagcaagtggt

SEQ ID NO: 318724 - DNA, 25 bp, Artificial
  Probe
cgaaagcagctgacggatacgtgaa

SEQ ID NO: 318725 - DNA, 25 bp, Artificial
  Probe
tggggatttcgatctggaagacacg

SEQ ID NO: 318726 - DNA, 25 bp, Artificial
  Probe
gaatcgcttctctttggaaacaata

SEQ ID NO: 318727 - DNA, 25 bp, Artificial
  Probe
agtactacacaccagtcccgtgtga

SEQ ID NO: 318728 - DNA, 25 bp, Artificial
  Probe
tgtcctcctggaggacccttcctgt

SEQ ID NO: 318729 - DNA, 25 bp, Artificial
  Probe
ggatttcgatctggaagacacgatg

SEQ ID NO: 318730 - DNA, 25 bp, Artificial
  Probe
ttcgatctggaagacacgatggacg

SEQ ID NO: 318731 - DNA, 25 bp, Artificial
  Probe
tccatgaatcgcttctctttggaaa

SEQ ID NO: 318732 - DNA, 25 bp, Artificial
  Probe
acagaatcccgactctgtcctcgat

SEQ ID NO: 318733 - DNA, 25 bp, Artificial
  Probe
cctcgataccgatggggatttcgat

SEQ ID NO: 318734 - DNA, 25 bp, Artificial
  Probe
gtactacacaccagtcccgtgtgag

SEQ ID NO: 318735 - DNA, 25 bp, Artificial
  Probe
tctgtcctcgataccgatggggatt

SEQ ID NO: 318736 - DNA, 25 bp, Artificial
  Probe
aagccgcagatcaagcaagtggtcc

SEQ ID NO: 318737 - DNA, 25 bp, Artificial
  Probe
ctgacggatacgtgaagccgcagat

SEQ ID NO: 318738 - DNA, 25 bp, Artificial
  Probe
ataccgatggggatttcgatctgga

SEQ ID NO: 318739 - DNA, 25 bp, Artificial
  Probe
cgatctggaagacacgatggacgtg

SEQ ID NO: 318740 - DNA, 25 bp, Artificial
  Probe
ccgactctgtcctcgataccgatgg

SEQ ID NO: 318741 - DNA, 25 bp, Artificial
  Probe
cgatggggatttcgatctggaagac

SEQ ID NO: 318742 - DNA, 25 bp, Artificial
  Probe
agtggtgtgccctcaggctcactat

SEQ ID NO: 318743 - DNA, 25 bp, Artificial
  Probe
gctcccaagatcgaagatgaagaag

SEQ ID NO: 318744 - DNA, 25 bp, Artificial
  Probe
gtctgcagatgtaccccttgttgta

SEQ ID NO: 318745 - DNA, 25 bp, Artificial
  Probe
gctgtgtccatagagatgaatgagc

SEQ ID NO: 318746 - DNA, 25 bp, Artificial
  Probe
gaatgagccagttcagctaactttt

SEQ ID NO: 318747 - DNA, 25 bp, Artificial
  Probe
atgtctgcagatgtaccccttgttg

SEQ ID NO: 318748 - DNA, 25 bp, Artificial
  Probe
actcagtatgtctgcagatgtaccc

SEQ ID NO: 318749 - DNA, 25 bp, Artificial
  Probe
aatgagccagttcagctaacttttg

SEQ ID NO: 318750 - DNA, 25 bp, Artificial
  Probe
tgaatgagccagttcagctaacttt

SEQ ID NO: 318751 - DNA, 25 bp, Artificial
  Probe
ctcccaagatcgaagatgaagaagg

SEQ ID NO: 318752 - DNA, 25 bp, Artificial
  Probe
gtctcctacagtaacactcagtatg

SEQ ID NO: 318753 - DNA, 25 bp, Artificial
  Probe
gtaacactcagtatgtctgcagatg

SEQ ID NO: 318754 - DNA, 25 bp, Artificial
  Probe
aaattgctgacatgggacacttaaa

SEQ ID NO: 318755 - DNA, 25 bp, Artificial
  Probe
tttggctcccaagatcgaagatgaa

SEQ ID NO: 318756 - DNA, 25 bp, Artificial
  Probe
ttgtcccagacaagcaatgttgata

SEQ ID NO: 318757 - DNA, 25 bp, Artificial
  Probe
cccagacaagcaatgttgataaaga

SEQ ID NO: 318758 - DNA, 25 bp, Artificial
  Probe
tgtaccccttgttgtagagtataaa

SEQ ID NO: 318759 - DNA, 25 bp, Artificial
  Probe
cactcagtatgtctgcagatgtacc

SEQ ID NO: 318760 - DNA, 25 bp, Artificial
  Probe
gtattatttggctcccaagatcgaa

SEQ ID NO: 318761 - DNA, 25 bp, Artificial
  Probe
tgaggtacctgaactttttcacaaa

SEQ ID NO: 318762 - DNA, 25 bp, Artificial
  Probe
tgtgtccatagagatgaatgagcca

SEQ ID NO: 318763 - DNA, 25 bp, Artificial
  Probe
ttggctcccaagatcgaagatgaag

SEQ ID NO: 318764 - DNA, 25 bp, Artificial
  Probe
ctgacatgggacacttaaagtatta

SEQ ID NO: 318765 - DNA, 25 bp, Artificial
  Probe
tggctcccaagatcgaagatgaaga

SEQ ID NO: 318766 - DNA, 25 bp, Artificial
  Probe
agtatgtctgcagatgtaccccttg

SEQ ID NO: 318767 - DNA, 25 bp, Artificial
  Probe
cagatgtaccccttgttgtagagta

SEQ ID NO: 318768 - DNA, 25 bp, Artificial
  Probe
tatttggctcccaagatcgaagatg

SEQ ID NO: 318769 - DNA, 25 bp, Artificial
  Probe
tatgtctgcagatgtaccccttgtt

SEQ ID NO: 318770 - DNA, 25 bp, Artificial
  Probe
aagttgtcccagacaagcaatgttg

SEQ ID NO: 318771 - DNA, 25 bp, Artificial
  Probe
tgagccagttcagctaacttttgct

SEQ ID NO: 318772 - DNA, 25 bp, Artificial
  Probe
cctacagtaacactcagtatgtctg

SEQ ID NO: 318773 - DNA, 25 bp, Artificial
  Probe
gtatgtctgcagatgtaccccttgt

SEQ ID NO: 318774 - DNA, 25 bp, Artificial
  Probe
atgagccagttcagctaacttttgc

SEQ ID NO: 318775 - DNA, 25 bp, Artificial
  Probe
atttggctcccaagatcgaagatga

SEQ ID NO: 318776 - DNA, 25 bp, Artificial
  Probe
cagtaacactcagtatgtctgcaga

SEQ ID NO: 318777 - DNA, 25 bp, Artificial
  Probe
gatgtaccccttgttgtagagtata

SEQ ID NO: 318778 - DNA, 25 bp, Artificial
  Probe
agttgtcccagacaagcaatgttga

SEQ ID NO: 318779 - DNA, 25 bp, Artificial
  Probe
taagttgtcccagacaagcaatgtt

SEQ ID NO: 318780 - DNA, 25 bp, Artificial
  Probe
gttgtcccagacaagcaatgttgat

SEQ ID NO: 318781 - DNA, 25 bp, Artificial
  Probe
tgctgacatgggacacttaaagtat

SEQ ID NO: 318782 - DNA, 25 bp, Artificial
  Probe
tcccagacaagcaatgttgataaag

SEQ ID NO: 318783 - DNA, 25 bp, Artificial
  Probe
acagtaacactcagtatgtctgcag

SEQ ID NO: 318784 - DNA, 25 bp, Artificial
  Probe
taccccttgttgtagagtataaaat

SEQ ID NO: 318785 - DNA, 25 bp, Artificial
  Probe
atgaatgagccagttcagctaactt

SEQ ID NO: 318786 - DNA, 25 bp, Artificial
  Probe
tgtctgcagatgtaccccttgttgt

SEQ ID NO: 318787 - DNA, 25 bp, Artificial
  Probe
tcagtatgtctgcagatgtacccct

SEQ ID NO: 318788 - DNA, 25 bp, Artificial
  Probe
agatgtaccccttgttgtagagtat

SEQ ID NO: 318789 - DNA, 25 bp, Artificial
  Probe
gactttaccaactggttctgagggg

SEQ ID NO: 318790 - DNA, 25 bp, Artificial
  Probe
acttgaactctatggcgggttctcc

SEQ ID NO: 318791 - DNA, 25 bp, Artificial
  Probe
atcctgtgtcttcagtgtttcttga

SEQ ID NO: 318792 - DNA, 25 bp, Artificial
  Probe
actcctccgacgagggatcctacga

SEQ ID NO: 318793 - DNA, 25 bp, Artificial
  Probe
ccaactggttctgaggggctgacag

SEQ ID NO: 318794 - DNA, 25 bp, Artificial
  Probe
tctgaggggctgacaggccctactg

SEQ ID NO: 318795 - DNA, 25 bp, Artificial
  Probe
tctatggcgggttctccggtttcgt

SEQ ID NO: 318796 - DNA, 25 bp, Artificial
  Probe
acaagagctgctggactttaccaac

SEQ ID NO: 318797 - DNA, 25 bp, Artificial
  Probe
tcaagttggttaacctgggctttgc

SEQ ID NO: 318798 - DNA, 25 bp, Artificial
  Probe
tactccaacgacttgaactctatgg

SEQ ID NO: 318799 - DNA, 25 bp, Artificial
  Probe
ctttaccaactggttctgaggggct

SEQ ID NO: 318800 - DNA, 25 bp, Artificial
  Probe
ggagatcctgtgtcttcagtgtttc

SEQ ID NO: 318801 - DNA, 25 bp, Artificial
  Probe
gctgacaggccctactgggaatgga

SEQ ID NO: 318802 - DNA, 25 bp, Artificial
  Probe
gaacaagagctgctggactttacca

SEQ ID NO: 318803 - DNA, 25 bp, Artificial
  Probe
ctactgggaatggactttggaagca

SEQ ID NO: 318804 - DNA, 25 bp, Artificial
  Probe
ttagattcaatgttctcagcaacag

SEQ ID NO: 318805 - DNA, 25 bp, Artificial
  Probe
ttcagtgtttcttgacaacgacgtc

SEQ ID NO: 318806 - DNA, 25 bp, Artificial
  Probe
gacccccttagtccagaggaacaag

SEQ ID NO: 318807 - DNA, 25 bp, Artificial
  Probe
agctgctggactttaccaactggtt

SEQ ID NO: 318808 - DNA, 25 bp, Artificial
  Probe
agaggaacaagagctgctggacttt

SEQ ID NO: 318809 - DNA, 25 bp, Artificial
  Probe
cggtcgaatacatccgcgcgctgca

SEQ ID NO: 318810 - DNA, 25 bp, Artificial
  Probe
ggccctactgggaatggactttgga

SEQ ID NO: 318811 - DNA, 25 bp, Artificial
  Probe
gtttcgtcctactcctccgacgagg

SEQ ID NO: 318812 - DNA, 25 bp, Artificial
  Probe
ggaacaagagctgctggactttacc

SEQ ID NO: 318813 - DNA, 25 bp, Artificial
  Probe
gacaggccctactgggaatggactt

SEQ ID NO: 318814 - DNA, 25 bp, Artificial
  Probe
tggcaggagatcctgtgtcttcagt

SEQ ID NO: 318815 - DNA, 25 bp, Artificial
  Probe
ttagtccagaggaacaagagctgct

SEQ ID NO: 318816 - DNA, 25 bp, Artificial
  Probe
tcccacgggcaccaggacttagatt

SEQ ID NO: 318817 - DNA, 25 bp, Artificial
  Probe
tactcctccgacgagggatcctacg

SEQ ID NO: 318818 - DNA, 25 bp, Artificial
  Probe
gtcaagttggttaacctgggctttg

SEQ ID NO: 318819 - DNA, 25 bp, Artificial
  Probe
tcttgacaacgacgtcaaaaggggg

SEQ ID NO: 318820 - DNA, 25 bp, Artificial
  Probe
gccctactgggaatggactttggaa

SEQ ID NO: 318821 - DNA, 25 bp, Artificial
  Probe
acgacttgaactctatggcgggttc

SEQ ID NO: 318822 - DNA, 25 bp, Artificial
  Probe
tgcgttcggcggtcgaatacatccg

SEQ ID NO: 318823 - DNA, 25 bp, Artificial
  Probe
cccccttagtccagaggaacaagag

SEQ ID NO: 318824 - DNA, 25 bp, Artificial
  Probe
ggtttcgtcctactcctccgacgag

SEQ ID NO: 318825 - DNA, 25 bp, Artificial
  Probe
gcaccaggacttagattcaatgttc

SEQ ID NO: 318826 - DNA, 25 bp, Artificial
  Probe
ctgcagcagctgctggacgagcacg

SEQ ID NO: 318827 - DNA, 25 bp, Artificial
  Probe
ctctatggcgggttctccggtttcg

SEQ ID NO: 318828 - DNA, 25 bp, Artificial
  Probe
ctcccacgggcaccaggacttagat

SEQ ID NO: 318829 - DNA, 25 bp, Artificial
  Probe
agcgcgagcgcaaccgggtcaagtt

SEQ ID NO: 318830 - DNA, 25 bp, Artificial
  Probe
agattcaatgttctcagcaacaggg

SEQ ID NO: 318831 - DNA, 25 bp, Artificial
  Probe
accaggacttagattcaatgttctc

SEQ ID NO: 318832 - DNA, 25 bp, Artificial
  Probe
ttcggcggtcgaatacatccgcgcg

SEQ ID NO: 318833 - DNA, 25 bp, Artificial
  Probe
gttctgaggggctgacaggccctac

SEQ ID NO: 318834 - DNA, 25 bp, Artificial
  Probe
cagtgtttcttgacaacgacgtcaa

SEQ ID NO: 318835 - DNA, 25 bp, Artificial
  Probe
caaatggctgtttgaggagttcacc

SEQ ID NO: 318836 - DNA, 25 bp, Artificial
  Probe
cagaaggatcccaaatggctgtttg

SEQ ID NO: 318837 - DNA, 25 bp, Artificial
  Probe
ccaaatggctgtttgaggagttcac

SEQ ID NO: 318838 - DNA, 25 bp, Artificial
  Probe
ttgaggagttcaccacacaatacaa

SEQ ID NO: 318839 - DNA, 25 bp, Artificial
  Probe
ttcatgctcaagttgttacggatat

SEQ ID NO: 318840 - DNA, 25 bp, Artificial
  Probe
tcgtcatttgcttagcagactcact

SEQ ID NO: 318841 - DNA, 25 bp, Artificial
  Probe
tatggtcgtcatttgcttagcagac

SEQ ID NO: 318842 - DNA, 25 bp, Artificial
  Probe
atggctgtttgaggagttcaccaca

SEQ ID NO: 318843 - DNA, 25 bp, Artificial
  Probe
gatacagaaggatcccaaatggctg

SEQ ID NO: 318844 - DNA, 25 bp, Artificial
  Probe
ggtcgtcatttgcttagcagactca

SEQ ID NO: 318845 - DNA, 25 bp, Artificial
  Probe
catcagaagcgttttctgtattgac

SEQ ID NO: 318846 - DNA, 25 bp, Artificial
  Probe
tttgcttagcagactcactttactg

SEQ ID NO: 318847 - DNA, 25 bp, Artificial
  Probe
tgctcaagttgttacggatattcaa

SEQ ID NO: 318848 - DNA, 25 bp, Artificial
  Probe
gaaggatcccaaatggctgtttgag

SEQ ID NO: 318849 - DNA, 25 bp, Artificial
  Probe
catgctcaagttgttacggatattc

SEQ ID NO: 318850 - DNA, 25 bp, Artificial
  Probe
tcccaaatggctgtttgaggagttc

SEQ ID NO: 318851 - DNA, 25 bp, Artificial
  Probe
gaggagttcaccacacaatacaaaa

SEQ ID NO: 318852 - DNA, 25 bp, Artificial
  Probe
tttgaggagttcaccacacaataca

SEQ ID NO: 318853 - DNA, 25 bp, Artificial
  Probe
cgtcatttgcttagcagactcactt

SEQ ID NO: 318854 - DNA, 25 bp, Artificial
  Probe
gtcatttgcttagcagactcacttt

SEQ ID NO: 318855 - DNA, 25 bp, Artificial
  Probe
tcatgctcaagttgttacggatatt

SEQ ID NO: 318856 - DNA, 25 bp, Artificial
  Probe
gtcgtcatttgcttagcagactcac

SEQ ID NO: 318857 - DNA, 25 bp, Artificial
  Probe
atggtcgtcatttgcttagcagact

SEQ ID NO: 318858 - DNA, 25 bp, Artificial
  Probe
tgtttgaggagttcaccacacaata

SEQ ID NO: 318859 - DNA, 25 bp, Artificial
  Probe
tggtcgtcatttgcttagcagactc

SEQ ID NO: 318860 - DNA, 25 bp, Artificial
  Probe
tgaggagttcaccacacaatacaaa

SEQ ID NO: 318861 - DNA, 25 bp, Artificial
  Probe
attcatgctcaagttgttacggata

SEQ ID NO: 318862 - DNA, 25 bp, Artificial
  Probe
atgctcaagttgttacggatattca

SEQ ID NO: 318863 - DNA, 25 bp, Artificial
  Probe
aaatggctgtttgaggagttcacca

SEQ ID NO: 318864 - DNA, 25 bp, Artificial
  Probe
agaaggatcccaaatggctgtttga

SEQ ID NO: 318865 - DNA, 25 bp, Artificial
  Probe
atcccaaatggctgtttgaggagtt

SEQ ID NO: 318866 - DNA, 25 bp, Artificial
  Probe
aaggatcccaaatggctgtttgagg

SEQ ID NO: 318867 - DNA, 25 bp, Artificial
  Probe
cccaaatggctgtttgaggagttca

SEQ ID NO: 318868 - DNA, 25 bp, Artificial
  Probe
gtatggtcgtcatttgcttagcaga

SEQ ID NO: 318869 - DNA, 25 bp, Artificial
  Probe
tgatacagaaggatcccaaatggct

SEQ ID NO: 318870 - DNA, 25 bp, Artificial
  Probe
cttggaagggctgtatgtgaaacca

SEQ ID NO: 318871 - DNA, 25 bp, Artificial
  Probe
ctttccactctgcataccctggaag

SEQ ID NO: 318872 - DNA, 25 bp, Artificial
  Probe
tagagactcgggagccgacttgctc

SEQ ID NO: 318873 - DNA, 25 bp, Artificial
  Probe
aggacatcggaggttgatgcctgta

SEQ ID NO: 318874 - DNA, 25 bp, Artificial
  Probe
aggtactggccttcctgccctcttt

SEQ ID NO: 318875 - DNA, 25 bp, Artificial
  Probe
cagcccctgtagcagggtttggtct

SEQ ID NO: 318876 - DNA, 25 bp, Artificial
  Probe
atgtgaaaccaagaagccctccagc

SEQ ID NO: 318877 - DNA, 25 bp, Artificial
  Probe
agcttcttcagacaacctggcccgg

SEQ ID NO: 318878 - DNA, 25 bp, Artificial
  Probe
cctgggactttctccgtgcccagat

SEQ ID NO: 318879 - DNA, 25 bp, Artificial
  Probe
cttcgggcttagagactcgggagcc

SEQ ID NO: 318880 - DNA, 25 bp, Artificial
  Probe
ccccttgagggctgcactgggcaac

SEQ ID NO: 318881 - DNA, 25 bp, Artificial
  Probe
aatctggaggacatccaacttctcc

SEQ ID NO: 318882 - DNA, 25 bp, Artificial
  Probe
cctcttggccaacctagactttttg

SEQ ID NO: 318883 - DNA, 25 bp, Artificial
  Probe
agtatatcgtcacagcttcttcaga

SEQ ID NO: 318884 - DNA, 25 bp, Artificial
  Probe
taggtcttggccagggtgacttttg

SEQ ID NO: 318885 - DNA, 25 bp, Artificial
  Probe
tgtctcctcctatggcatccctgag

SEQ ID NO: 318886 - DNA, 25 bp, Artificial
  Probe
cctgctgacaatgcactgattgtct

SEQ ID NO: 318887 - DNA, 25 bp, Artificial
  Probe
tttcttggtgtgttacctctgactc

SEQ ID NO: 318888 - DNA, 25 bp, Artificial
  Probe
ccccacttgtgattgctggttacca

SEQ ID NO: 318889 - DNA, 25 bp, Artificial
  Probe
accagacgtgtaaaatctggaggac

SEQ ID NO: 318890 - DNA, 25 bp, Artificial
  Probe
tccttcccagccagtatctgatagc

SEQ ID NO: 318891 - DNA, 25 bp, Artificial
  Probe
acctggcccggctctggtgtgtaga

SEQ ID NO: 318892 - DNA, 25 bp, Artificial
  Probe
cctttgatgaatcgaactgtatcct

SEQ ID NO: 318893 - DNA, 25 bp, Artificial
  Probe
aagaggtgcttaccttggaagggct

SEQ ID NO: 318894 - DNA, 25 bp, Artificial
  Probe
tgaggctctcagtgaggatgtgccc

SEQ ID NO: 318895 - DNA, 25 bp, Artificial
  Probe
cctgtgcagaacatgggattttgga

SEQ ID NO: 318896 - DNA, 25 bp, Artificial
  Probe
agtcagccagggaaacctcaggatg

SEQ ID NO: 318897 - DNA, 25 bp, Artificial
  Probe
tgcagcccctgctgacaatgcactg

SEQ ID NO: 318898 - DNA, 25 bp, Artificial
  Probe
gtggccatcagaaagctgtcgtctg

SEQ ID NO: 318899 - DNA, 25 bp, Artificial
  Probe
gcttggaactgttgaggacatcgga

SEQ ID NO: 318900 - DNA, 25 bp, Artificial
  Probe
gccacggcccctgcagtgagcagtg

SEQ ID NO: 318901 - DNA, 25 bp, Artificial
  Probe
acgacagcgtgctgggctagcccct

SEQ ID NO: 318902 - DNA, 25 bp, Artificial
  Probe
cacagtactagctgtggggcttcgg

SEQ ID NO: 318903 - DNA, 25 bp, Artificial
  Probe
tcgggagccgacttgctcagggaaa

SEQ ID NO: 318904 - DNA, 25 bp, Artificial
  Probe
gctgcgccttctcaggggattccca

SEQ ID NO: 318905 - DNA, 25 bp, Artificial
  Probe
gagagaccagacctagagtgcttgg

SEQ ID NO: 318906 - DNA, 25 bp, Artificial
  Probe
tgcagtgagcagtgtcagcatcagc

SEQ ID NO: 318907 - DNA, 25 bp, Artificial
  Probe
atggtaggtggtgactcctgtctcc

SEQ ID NO: 318908 - DNA, 25 bp, Artificial
  Probe
atccctgagttcttgtcttgggggt

SEQ ID NO: 318909 - DNA, 25 bp, Artificial
  Probe
ggccagtgggacctgacccgactac

SEQ ID NO: 318910 - DNA, 25 bp, Artificial
  Probe
cccggagagtcatcccgtggctgga

SEQ ID NO: 318911 - DNA, 25 bp, Artificial
  Probe
gtgaaaccaagaagccctccagcca

SEQ ID NO: 318912 - DNA, 25 bp, Artificial
  Probe
tggccagggtgacttttgtctggtt

SEQ ID NO: 318913 - DNA, 25 bp, Artificial
  Probe
tttggctactctaccctgggacttt

SEQ ID NO: 318914 - DNA, 25 bp, Artificial
  Probe
tggtagagacttacctcaacaggct

SEQ ID NO: 318915 - DNA, 25 bp, Artificial
  Probe
acttctccctgatgacagaactcag

SEQ ID NO: 318916 - DNA, 25 bp, Artificial
  Probe
tatgatcttgtcagcccagtgcccc

SEQ ID NO: 318917 - DNA, 25 bp, Artificial
  Probe
cttatcccagaataaaaggatagat

SEQ ID NO: 318918 - DNA, 25 bp, Artificial
  Probe
ctgcgtcgcggcatcccggattttc

SEQ ID NO: 318919 - DNA, 25 bp, Artificial
  Probe
tctagaaagccatgcctgcttatca

SEQ ID NO: 318920 - DNA, 25 bp, Artificial
  Probe
ttctagaaagccatgcctgcttatc

SEQ ID NO: 318921 - DNA, 25 bp, Artificial
  Probe
agaactcctaagaagcagagtgaag

SEQ ID NO: 318922 - DNA, 25 bp, Artificial
  Probe
tgttttctagaaagccatgcctgct

SEQ ID NO: 318923 - DNA, 25 bp, Artificial
  Probe
gaagaactcctaagaagcagagtga

SEQ ID NO: 318924 - DNA, 25 bp, Artificial
  Probe
caccatggagtcttctaccatcaag

SEQ ID NO: 318925 - DNA, 25 bp, Artificial
  Probe
tggagtcttctaccatcaaggccaa

SEQ ID NO: 318926 - DNA, 25 bp, Artificial
  Probe
aatgttttctagaaagccatgcctg

SEQ ID NO: 318927 - DNA, 25 bp, Artificial
  Probe
accatcaaggccaatgctgcgtcgc

SEQ ID NO: 318928 - DNA, 25 bp, Artificial
  Probe
actcctaagaagcagagtgaagaga

SEQ ID NO: 318929 - DNA, 25 bp, Artificial
  Probe
gtgactccagtccttatcccagaat

SEQ ID NO: 318930 - DNA, 25 bp, Artificial
  Probe
ggcatcccggattttcgttgaggag

SEQ ID NO: 318931 - DNA, 25 bp, Artificial
  Probe
gtcatgataggtgctttctgtcgta

SEQ ID NO: 318932 - DNA, 25 bp, Artificial
  Probe
gccttcacgggatcaacccaggttg

SEQ ID NO: 318933 - DNA, 25 bp, Artificial
  Probe
gttactcatagaaaacatgtagctt

SEQ ID NO: 318934 - DNA, 25 bp, Artificial
  Probe
gttaactgctatatgatcttgtcag

SEQ ID NO: 318935 - DNA, 25 bp, Artificial
  Probe
cgtgatttaagctctgtccctctgt

SEQ ID NO: 318936 - DNA, 25 bp, Artificial
  Probe
ctgacccaaggaataaatcagggcc

SEQ ID NO: 318937 - DNA, 25 bp, Artificial
  Probe
cgtcaccagcaaagtgttgttttac

SEQ ID NO: 318938 - DNA, 25 bp, Artificial
  Probe
gctatatgatcttgtcagcccagtg

SEQ ID NO: 318939 - DNA, 25 bp, Artificial
  Probe
tcgtgatttaagctctgtccctctg

SEQ ID NO: 318940 - DNA, 25 bp, Artificial
  Probe
agctgtggctacacgtctcctatcg

SEQ ID NO: 318941 - DNA, 25 bp, Artificial
  Probe
cctctgacccaaggaataaatcagg

SEQ ID NO: 318942 - DNA, 25 bp, Artificial
  Probe
tgtgactccagtccttatcccagaa

SEQ ID NO: 318943 - DNA, 25 bp, Artificial
  Probe
cttctaccatcaaggccaatgctgc

SEQ ID NO: 318944 - DNA, 25 bp, Artificial
  Probe
ctgttactcatagaaaacatgtagc

SEQ ID NO: 318945 - DNA, 25 bp, Artificial
  Probe
acgtctcctatcgtcaccagcaaag

SEQ ID NO: 318946 - DNA, 25 bp, Artificial
  Probe
ttatggcaataaactctgctggtca

SEQ ID NO: 318947 - DNA, 25 bp, Artificial
  Probe
gtccttatcccagaataaaaggata

SEQ ID NO: 318948 - DNA, 25 bp, Artificial
  Probe
tgcgtcgcggcatcccggattttcg

SEQ ID NO: 318949 - DNA, 25 bp, Artificial
  Probe
ctcctaagaagcagagtgaagagaa

SEQ ID NO: 318950 - DNA, 25 bp, Artificial
  Probe
agcgatctcctctcacatggatgtg

SEQ ID NO: 318951 - DNA, 25 bp, Artificial
  Probe
atcccggattttcgttgaggagtca

SEQ ID NO: 318952 - DNA, 25 bp, Artificial
  Probe
cgatctcctctcacatggatgtgga

SEQ ID NO: 318953 - DNA, 25 bp, Artificial
  Probe
ggccttcacgggatcaacccaggtt

SEQ ID NO: 318954 - DNA, 25 bp, Artificial
  Probe
taactctgtcatgataggtgctttc

SEQ ID NO: 318955 - DNA, 25 bp, Artificial
  Probe
caaggccaatgctgcgtcgcggcat

SEQ ID NO: 318956 - DNA, 25 bp, Artificial
  Probe
ctgtggctacacgtctcctatcgtc

SEQ ID NO: 318957 - DNA, 25 bp, Artificial
  Probe
gtggctacacgtctcctatcgtcac

SEQ ID NO: 318958 - DNA, 25 bp, Artificial
  Probe
gcggcatcccggattttcgttgagg

SEQ ID NO: 318959 - DNA, 25 bp, Artificial
  Probe
tatgtgactccagtccttatcccag

SEQ ID NO: 318960 - DNA, 25 bp, Artificial
  Probe
ccggattttcgttgaggagtcagtt

SEQ ID NO: 318961 - DNA, 25 bp, Artificial
  Probe
ttgtcagcccagtgccccttcggtg

SEQ ID NO: 318962 - DNA, 25 bp, Artificial
  Probe
cccgtgacaggcacatagtaggtcc

SEQ ID NO: 318963 - DNA, 25 bp, Artificial
  Probe
acaacggagacagttcatcctgctc

SEQ ID NO: 318964 - DNA, 25 bp, Artificial
  Probe
ctaacgcaggtgtgcaagtggaacc

SEQ ID NO: 318965 - DNA, 25 bp, Artificial
  Probe
agacagttcatcctgctctgcacac

SEQ ID NO: 318966 - DNA, 25 bp, Artificial
  Probe
gggactttttcagaccagtggggca

SEQ ID NO: 318967 - DNA, 25 bp, Artificial
  Probe
tcaagactacctttcagcagtgtgc

SEQ ID NO: 318968 - DNA, 25 bp, Artificial
  Probe
gactttttcagaccagtggggcaaa

SEQ ID NO: 318969 - DNA, 25 bp, Artificial
  Probe
caacggagacagttcatcctgctct

SEQ ID NO: 318970 - DNA, 25 bp, Artificial
  Probe
gcacttagcccgtgacaggcacata

SEQ ID NO: 318971 - DNA, 25 bp, Artificial
  Probe
accgaccgcttgagttcctccggtg

SEQ ID NO: 318972 - DNA, 25 bp, Artificial
  Probe
aggtcctcaataaaccatgtttgac

SEQ ID NO: 318973 - DNA, 25 bp, Artificial
  Probe
caagactacctttcagcagtgtgca

SEQ ID NO: 318974 - DNA, 25 bp, Artificial
  Probe
gttcctccggtgtgtgctcccagct

SEQ ID NO: 318975 - DNA, 25 bp, Artificial
  Probe
gacagttcatcctgctctgcacacg

SEQ ID NO: 318976 - DNA, 25 bp, Artificial
  Probe
cgcttgagttcctccggtgtgtgct

SEQ ID NO: 318977 - DNA, 25 bp, Artificial
  Probe
ccgcttgagttcctccggtgtgtgc

SEQ ID NO: 318978 - DNA, 25 bp, Artificial
  Probe
ccaaatgcttcctaacgcaggtgtg

SEQ ID NO: 318979 - DNA, 25 bp, Artificial
  Probe
cttcctaacgcaggtgtgcaagtgg

SEQ ID NO: 318980 - DNA, 25 bp, Artificial
  Probe
ttttcagaccagtggggcaaagtct

SEQ ID NO: 318981 - DNA, 25 bp, Artificial
  Probe
ctcaagactacctttcagcagtgtg

SEQ ID NO: 318982 - DNA, 25 bp, Artificial
  Probe
actacctttcagcagtgtgcaagga

SEQ ID NO: 318983 - DNA, 25 bp, Artificial
  Probe
acagttcatcctgctctgcacacgt

SEQ ID NO: 318984 - DNA, 25 bp, Artificial
  Probe
acctttcagcagtgtgcaaggacca

SEQ ID NO: 318985 - DNA, 25 bp, Artificial
  Probe
caaatgcttcctaacgcaggtgtgc

SEQ ID NO: 318986 - DNA, 25 bp, Artificial
  Probe
ggtcctcaataaaccatgtttgacc

SEQ ID NO: 318987 - DNA, 25 bp, Artificial
  Probe
gactacctttcagcagtgtgcaagg

SEQ ID NO: 318988 - DNA, 25 bp, Artificial
  Probe
agttcatcctgctctgcacacgtgc

SEQ ID NO: 318989 - DNA, 25 bp, Artificial
  Probe
cgaccgcttgagttcctccggtgtg

SEQ ID NO: 318990 - DNA, 25 bp, Artificial
  Probe
gaccgaccgcttgagttcctccggt

SEQ ID NO: 318991 - DNA, 25 bp, Artificial
  Probe
tacctttcagcagtgtgcaaggacc

SEQ ID NO: 318992 - DNA, 25 bp, Artificial
  Probe
ttagcccgtgacaggcacatagtag

SEQ ID NO: 318993 - DNA, 25 bp, Artificial
  Probe
cgtgacaggcacatagtaggtcctc

SEQ ID NO: 318994 - DNA, 25 bp, Artificial
  Probe
gcttcctaacgcaggtgtgcaagtg

SEQ ID NO: 318995 - DNA, 25 bp, Artificial
  Probe
gtcactggagccagggaatcgcttt

SEQ ID NO: 318996 - DNA, 25 bp, Artificial
  Probe
cctaacgcaggtgtgcaagtggaac

SEQ ID NO: 318997 - DNA, 25 bp, Artificial
  Probe
acgcaggtgtgcaagtggaaccaca

SEQ ID NO: 318998 - DNA, 25 bp, Artificial
  Probe
taaacgggactttttcagaccagtg

SEQ ID NO: 318999 - DNA, 25 bp, Artificial
  Probe
gagacagttcatcctgctctgcaca

SEQ ID NO: 319000 - DNA, 25 bp, Artificial
  Probe
agactacctttcagcagtgtgcaag

SEQ ID NO: 319001 - DNA, 25 bp, Artificial
  Probe
ttcctaacgcaggtgtgcaagtgga

SEQ ID NO: 319002 - DNA, 25 bp, Artificial
  Probe
aaatgcttcctaacgcaggtgtgca

SEQ ID NO: 319003 - DNA, 25 bp, Artificial
  Probe
acttagcccgtgacaggcacatagt

SEQ ID NO: 319004 - DNA, 25 bp, Artificial
  Probe
aacgcaggtgtgcaagtggaaccac

SEQ ID NO: 319005 - DNA, 25 bp, Artificial
  Probe
ctttttcagaccagtggggcaaagt

SEQ ID NO: 319006 - DNA, 25 bp, Artificial
  Probe
cggagacagttcatcctgctctgca

SEQ ID NO: 319007 - DNA, 25 bp, Artificial
  Probe
gagttcctccggtgtgtgctcccag

SEQ ID NO: 319008 - DNA, 25 bp, Artificial
  Probe
gtgccctcgatgcaacaagagagtg

SEQ ID NO: 319009 - DNA, 25 bp, Artificial
  Probe
tatggaatactctttggacccaaag

SEQ ID NO: 319010 - DNA, 25 bp, Artificial
  Probe
ggtacgaactgaagagcggaagacc

SEQ ID NO: 319011 - DNA, 25 bp, Artificial
  Probe
ccgagaaggtgagctccctgggcaa

SEQ ID NO: 319012 - DNA, 25 bp, Artificial
  Probe
ggaatactctttggacccaaaggag

SEQ ID NO: 319013 - DNA, 25 bp, Artificial
  Probe
agtgtgagcgctgcaacaagacact

SEQ ID NO: 319014 - DNA, 25 bp, Artificial
  Probe
ctggggagcccaacatgtgccctcg

SEQ ID NO: 319015 - DNA, 25 bp, Artificial
  Probe
gatgggaaacccttctgccacaagc

SEQ ID NO: 319016 - DNA, 25 bp, Artificial
  Probe
ctggcacaagttctgcctcaagtgt

SEQ ID NO: 319017 - DNA, 25 bp, Artificial
  Probe
acaaggacccggaaggcacagttca

SEQ ID NO: 319018 - DNA, 25 bp, Artificial
  Probe
agaccgtgtacttcgccgagaaggt

SEQ ID NO: 319019 - DNA, 25 bp, Artificial
  Probe
atcgaggtccctgtggtacgaactg

SEQ ID NO: 319020 - DNA, 25 bp, Artificial
  Probe
ctcgatgcaacaagagagtgtactt

SEQ ID NO: 319021 - DNA, 25 bp, Artificial
  Probe
cgttcactggggagcccaacatgtg

SEQ ID NO: 319022 - DNA, 25 bp, Artificial
  Probe
aagaccgtgtacttcgccgagaagg

SEQ ID NO: 319023 - DNA, 25 bp, Artificial
  Probe
aagtgtgacaagaccgtgtacttcg

SEQ ID NO: 319024 - DNA, 25 bp, Artificial
  Probe
tggtacgaactgaagagcggaagac

SEQ ID NO: 319025 - DNA, 25 bp, Artificial
  Probe
ggcctccaagtgtcccaagtgtgac

SEQ ID NO: 319026 - DNA, 25 bp, Artificial
  Probe
gccccatcgaggtccctgtggtacg

SEQ ID NO: 319027 - DNA, 25 bp, Artificial
  Probe
tccaagtgtcccaagtgtgacaaga

SEQ ID NO: 319028 - DNA, 25 bp, Artificial
  Probe
ccaagggtcccagcaaagcctctag

SEQ ID NO: 319029 - DNA, 25 bp, Artificial
  Probe
cctgggcaaggactggcacaagttc

SEQ ID NO: 319030 - DNA, 25 bp, Artificial
  Probe
gagcccaacatgtgccctcgatgca

SEQ ID NO: 319031 - DNA, 25 bp, Artificial
  Probe
tgtacttcgccgagaaggtgagctc

SEQ ID NO: 319032 - DNA, 25 bp, Artificial
  Probe
aagtgtgagcgctgcaacaagacac

SEQ ID NO: 319033 - DNA, 25 bp, Artificial
  Probe
catcgaggtccctgtggtacgaact

SEQ ID NO: 319034 - DNA, 25 bp, Artificial
  Probe
caacatgtgccctcgatgcaacaag

SEQ ID NO: 319035 - DNA, 25 bp, Artificial
  Probe
ctgtggtacgaactgaagagcggaa

SEQ ID NO: 319036 - DNA, 25 bp, Artificial
  Probe
ggttcctacatctacgagaagcctc

SEQ ID NO: 319037 - DNA, 25 bp, Artificial
  Probe
gactggcacaagttctgcctcaagt

SEQ ID NO: 319038 - DNA, 25 bp, Artificial
  Probe
gggtcccagcaaagcctctagtgtc

SEQ ID NO: 319039 - DNA, 25 bp, Artificial
  Probe
aagttctgcctcaagtgtgagcgct

SEQ ID NO: 319040 - DNA, 25 bp, Artificial
  Probe
ggactggcacaagttctgcctcaag

SEQ ID NO: 319041 - DNA, 25 bp, Artificial
  Probe
actggccccatcgaggtccctgtgg

SEQ ID NO: 319042 - DNA, 25 bp, Artificial
  Probe
agctccctgggcaaggactggcaca

SEQ ID NO: 319043 - DNA, 25 bp, Artificial
  Probe
cagcaaagcctctagtgtcaccacg

SEQ ID NO: 319044 - DNA, 25 bp, Artificial
  Probe
gtgacaagaccgtgtacttcgccga

SEQ ID NO: 319045 - DNA, 25 bp, Artificial
  Probe
gggcgctggttcctacatctacgag

SEQ ID NO: 319046 - DNA, 25 bp, Artificial
  Probe
gcctcaagtgtgagcgctgcaacaa

SEQ ID NO: 319047 - DNA, 25 bp, Artificial
  Probe
tcaccacgttcactggggagcccaa

SEQ ID NO: 319048 - DNA, 25 bp, Artificial
  Probe
ggtccctgtggtacgaactgaagag

SEQ ID NO: 319049 - DNA, 25 bp, Artificial
  Probe
atgggaaacccttctgccacaagcc

SEQ ID NO: 319050 - DNA, 25 bp, Artificial
  Probe
acaagttctgcctcaagtgtgagcg

SEQ ID NO: 319051 - DNA, 25 bp, Artificial
  Probe
cctcgatgcaacaagagagtgtact

SEQ ID NO: 319052 - DNA, 25 bp, Artificial
  Probe
tacttcgccgagaaggtgagctccc

SEQ ID NO: 319053 - DNA, 25 bp, Artificial
  Probe
gtcccaagtgtgacaagaccgtgta

SEQ ID NO: 319054 - DNA, 25 bp, Artificial
  Probe
tctaaatcccggtaagttctgttgt

SEQ ID NO: 319055 - DNA, 25 bp, Artificial
  Probe
attttcatacctagggcagctaacc

SEQ ID NO: 319056 - DNA, 25 bp, Artificial
  Probe
aggagctgcgctttccaagcaggca

SEQ ID NO: 319057 - DNA, 25 bp, Artificial
  Probe
agctaaccgtggtaggctgaagccg

SEQ ID NO: 319058 - DNA, 25 bp, Artificial
  Probe
cgggcacccaagtgcctgcagggat

SEQ ID NO: 319059 - DNA, 25 bp, Artificial
  Probe
attggatcacggagattctaaaaca

SEQ ID NO: 319060 - DNA, 25 bp, Artificial
  Probe
tgatgtcgaagcttcctctgatgcc

SEQ ID NO: 319061 - DNA, 25 bp, Artificial
  Probe
actgatgatgtcgaagcttcctctg

SEQ ID NO: 319062 - DNA, 25 bp, Artificial
  Probe
tgctgcaacaagaattgttacagat

SEQ ID NO: 319063 - DNA, 25 bp, Artificial
  Probe
tcccggtaagttctgttgttaatat

SEQ ID NO: 319064 - DNA, 25 bp, Artificial
  Probe
ttaacaagtattttcatacctaggg

SEQ ID NO: 319065 - DNA, 25 bp, Artificial
  Probe
gtgtactgatgatgtcgaagcttcc

SEQ ID NO: 319066 - DNA, 25 bp, Artificial
  Probe
atgtcgaagcttcctctgatgcctt

SEQ ID NO: 319067 - DNA, 25 bp, Artificial
  Probe
cagctaaccgtggtaggctgaagcc

SEQ ID NO: 319068 - DNA, 25 bp, Artificial
  Probe
tccaagcaggcagaacgtaggcagg

SEQ ID NO: 319069 - DNA, 25 bp, Artificial
  Probe
tacagattcggaacgttttctaaat

SEQ ID NO: 319070 - DNA, 25 bp, Artificial
  Probe
gaagcttcctctgatgccttttttc

SEQ ID NO: 319071 - DNA, 25 bp, Artificial
  Probe
tactgatgatgtcgaagcttcctct

SEQ ID NO: 319072 - DNA, 25 bp, Artificial
  Probe
agctgcgctttccaagcaggcagaa

SEQ ID NO: 319073 - DNA, 25 bp, Artificial
  Probe
gaggagctgcgctttccaagcaggc

SEQ ID NO: 319074 - DNA, 25 bp, Artificial
  Probe
tgatgatgtcgaagcttcctctgat

SEQ ID NO: 319075 - DNA, 25 bp, Artificial
  Probe
tgcctgcagggatgttgtgctgcaa

SEQ ID NO: 319076 - DNA, 25 bp, Artificial
  Probe
acgggcacccaagtgcctgcaggga

SEQ ID NO: 319077 - DNA, 25 bp, Artificial
  Probe
acgaggaggagctgcgctttccaag

SEQ ID NO: 319078 - DNA, 25 bp, Artificial
  Probe
tcgaagcttcctctgatgccttttt

SEQ ID NO: 319079 - DNA, 25 bp, Artificial
  Probe
gttgtgctgcaacaagaattgttac

SEQ ID NO: 319080 - DNA, 25 bp, Artificial
  Probe
aagtattttcatacctagggcagct

SEQ ID NO: 319081 - DNA, 25 bp, Artificial
  Probe
acacgaggaggagctgcgctttcca

SEQ ID NO: 319082 - DNA, 25 bp, Artificial
  Probe
tacctagggcagctaaccgtggtag

SEQ ID NO: 319083 - DNA, 25 bp, Artificial
  Probe
acaagtattttcatacctagggcag

SEQ ID NO: 319084 - DNA, 25 bp, Artificial
  Probe
ttccaagcaggcagaacgtaggcag

SEQ ID NO: 319085 - DNA, 25 bp, Artificial
  Probe
aggctgaagccgaagggacaccccg

SEQ ID NO: 319086 - DNA, 25 bp, Artificial
  Probe
ctgcagggatgttgtgctgcaacaa

SEQ ID NO: 319087 - DNA, 25 bp, Artificial
  Probe
ccacacgaggaggagctgcgctttc

SEQ ID NO: 319088 - DNA, 25 bp, Artificial
  Probe
ctgcgctttccaagcaggcagaacg

SEQ ID NO: 319089 - DNA, 25 bp, Artificial
  Probe
cctagggcagctaaccgtggtaggc

SEQ ID NO: 319090 - DNA, 25 bp, Artificial
  Probe
ctagggcagctaaccgtggtaggct

SEQ ID NO: 319091 - DNA, 25 bp, Artificial
  Probe
tgtgctgcaacaagaattgttacag

SEQ ID NO: 319092 - DNA, 25 bp, Artificial
  Probe
cgctttccaagcaggcagaacgtag

SEQ ID NO: 319093 - DNA, 25 bp, Artificial
  Probe
cccacacgaggaggagctgcgcttt

SEQ ID NO: 319094 - DNA, 25 bp, Artificial
  Probe
gtattttcatacctagggcagctaa

SEQ ID NO: 319095 - DNA, 25 bp, Artificial
  Probe
tgcagggatgttgtgctgcaacaag

SEQ ID NO: 319096 - DNA, 25 bp, Artificial
  Probe
tgcgctttccaagcaggcagaacgt

SEQ ID NO: 319097 - DNA, 25 bp, Artificial
  Probe
tgtactgatgatgtcgaagcttcct

SEQ ID NO: 319098 - DNA, 25 bp, Artificial
  Probe
catacctagggcagctaaccgtggt

SEQ ID NO: 319099 - DNA, 25 bp, Artificial
  Probe
gctaaccgtggtaggctgaagccga

SEQ ID NO: 319100 - DNA, 25 bp, Artificial
  Probe
cttggatgaacataccttggaaagg

SEQ ID NO: 319101 - DNA, 25 bp, Artificial
  Probe
tgatgaaggataaccccctggtcaa

SEQ ID NO: 319102 - DNA, 25 bp, Artificial
  Probe
agcaagtccccattcatgagaaaag

SEQ ID NO: 319103 - DNA, 25 bp, Artificial
  Probe
gaacaacacttgagttctgcacaga

SEQ ID NO: 319104 - DNA, 25 bp, Artificial
  Probe
aaattgtctggaacaacacttgagt

SEQ ID NO: 319105 - DNA, 25 bp, Artificial
  Probe
agtccccattcatgagaaaaggtgt

SEQ ID NO: 319106 - DNA, 25 bp, Artificial
  Probe
tgccaactttctagacaagaccttg

SEQ ID NO: 319107 - DNA, 25 bp, Artificial
  Probe
gaaaggatcgtccatcacacctcct

SEQ ID NO: 319108 - DNA, 25 bp, Artificial
  Probe
ttacttcacaatgacccaaagtgag

SEQ ID NO: 319109 - DNA, 25 bp, Artificial
  Probe
cagcaagtccccattcatgagaaaa

SEQ ID NO: 319110 - DNA, 25 bp, Artificial
  Probe
accttggatgaacataccttggaaa

SEQ ID NO: 319111 - DNA, 25 bp, Artificial
  Probe
acctcctttgaagtgatgaaggata

SEQ ID NO: 319112 - DNA, 25 bp, Artificial
  Probe
gatcacagcaagtccccattcatga

SEQ ID NO: 319113 - DNA, 25 bp, Artificial
  Probe
caagaccttggatgaacataccttg

SEQ ID NO: 319114 - DNA, 25 bp, Artificial
  Probe
aggatcgtccatcacacctcctttg

SEQ ID NO: 319115 - DNA, 25 bp, Artificial
  Probe
attgtctggaacaacacttgagttc

SEQ ID NO: 319116 - DNA, 25 bp, Artificial
  Probe
tgagttctgcacagatattcagagt

SEQ ID NO: 319117 - DNA, 25 bp, Artificial
  Probe
tgcccacagaaataatggatcacag

SEQ ID NO: 319118 - DNA, 25 bp, Artificial
  Probe
aagtccccattcatgagaaaaggtg

SEQ ID NO: 319119 - DNA, 25 bp, Artificial
  Probe
accttggaaaggatcgtccatcaca

SEQ ID NO: 319120 - DNA, 25 bp, Artificial
  Probe
acaacacttgagttctgcacagata

SEQ ID NO: 319121 - DNA, 25 bp, Artificial
  Probe
ataatggatcacagcaagtccccat

SEQ ID NO: 319122 - DNA, 25 bp, Artificial
  Probe
tcctttgaagtgatgaaggataacc

SEQ ID NO: 319123 - DNA, 25 bp, Artificial
  Probe
aacataccttggaaaggatcgtcca

SEQ ID NO: 319124 - DNA, 25 bp, Artificial
  Probe
tcacaatgacccaaagtgagaaatt

SEQ ID NO: 319125 - DNA, 25 bp, Artificial
  Probe
agatattcagagtgcctaaacttca

SEQ ID NO: 319126 - DNA, 25 bp, Artificial
  Probe
ctgcacagatattcagagtgcctaa

SEQ ID NO: 319127 - DNA, 25 bp, Artificial
  Probe
catcacacctcctttgaagtgatga

SEQ ID NO: 319128 - DNA, 25 bp, Artificial
  Probe
gcacatccctcagcaggaattatta

SEQ ID NO: 319129 - DNA, 25 bp, Artificial
  Probe
cacttgagttctgcacagatattca

SEQ ID NO: 319130 - DNA, 25 bp, Artificial
  Probe
gagtgcctaaacttcaacttgaata

SEQ ID NO: 319131 - DNA, 25 bp, Artificial
  Probe
taatggatcacagcaagtccccatt

SEQ ID NO: 319132 - DNA, 25 bp, Artificial
  Probe
ggaaaggatcgtccatcacacctcc

SEQ ID NO: 319133 - DNA, 25 bp, Artificial
  Probe
caatgacccaaagtgagaaatttga

SEQ ID NO: 319134 - DNA, 25 bp, Artificial
  Probe
atgaacataccttggaaaggatcgt

SEQ ID NO: 319135 - DNA, 25 bp, Artificial
  Probe
ttcaaagggtatgtcttcagattcc

SEQ ID NO: 319136 - DNA, 25 bp, Artificial
  Probe
ggatgaacataccttggaaaggatc

SEQ ID NO: 319137 - DNA, 25 bp, Artificial
  Probe
ttcagagtgcctaaacttcaacttg

SEQ ID NO: 319138 - DNA, 25 bp, Artificial
  Probe
cccatctgcccacagaaataatgga

SEQ ID NO: 319139 - DNA, 25 bp, Artificial
  Probe
caactttctagacaagaccttggat

SEQ ID NO: 319140 - DNA, 25 bp, Artificial
  Probe
gattgccaactttctagacaagacc

SEQ ID NO: 319141 - DNA, 25 bp, Artificial
  Probe
tacttcacaatgacccaaagtgaga

SEQ ID NO: 319142 - DNA, 25 bp, Artificial
  Probe
caacacttgagttctgcacagatat

SEQ ID NO: 319143 - DNA, 25 bp, Artificial
  Probe
cagatattcagagtgcctaaacttc

SEQ ID NO: 319144 - DNA, 25 bp, Artificial
  Probe
aactttctagacaagaccttggatg

SEQ ID NO: 319145 - DNA, 25 bp, Artificial
  Probe
ataccttggaaaggatcgtccatca

SEQ ID NO: 319146 - DNA, 25 bp, Artificial
  Probe
taaatctagcccactttgccgtggc

SEQ ID NO: 319147 - DNA, 25 bp, Artificial
  Probe
gaccttgtattctattccgtggggt

SEQ ID NO: 319148 - DNA, 25 bp, Artificial
  Probe
aagtccaccatctaggtgcctgtgg

SEQ ID NO: 319149 - DNA, 25 bp, Artificial
  Probe
tgtgggcctgcgaagcttccgccat

SEQ ID NO: 319150 - DNA, 25 bp, Artificial
  Probe
ttaaaaagcagctgaagtgacctta

SEQ ID NO: 319151 - DNA, 25 bp, Artificial
  Probe
tattccgtggggtcacagacacctg

SEQ ID NO: 319152 - DNA, 25 bp, Artificial
  Probe
cagcgccgagccttgtgtgaccttg

SEQ ID NO: 319153 - DNA, 25 bp, Artificial
  Probe
cacagacacctgtgcctagcaatct

SEQ ID NO: 319154 - DNA, 25 bp, Artificial
  Probe
gcccagcaaccatgccttgaggggc

SEQ ID NO: 319155 - DNA, 25 bp, Artificial
  Probe
tattctattccgtggggtcacagac

SEQ ID NO: 319156 - DNA, 25 bp, Artificial
  Probe
tgcctgtgggcctgcgaagcttccg

SEQ ID NO: 319157 - DNA, 25 bp, Artificial
  Probe
catctaggtgcctgtgggcctgcga

SEQ ID NO: 319158 - DNA, 25 bp, Artificial
  Probe
gacacctgtgcctagcaatctttcc

SEQ ID NO: 319159 - DNA, 25 bp, Artificial
  Probe
atctaggtgcctgtgggcctgcgaa

SEQ ID NO: 319160 - DNA, 25 bp, Artificial
  Probe
agctgaagtgaccttacagaccaga

SEQ ID NO: 319161 - DNA, 25 bp, Artificial
  Probe
agcaaccatgccttgaggggcttag

SEQ ID NO: 319162 - DNA, 25 bp, Artificial
  Probe
aaccatgccttgaggggcttaggcg

SEQ ID NO: 319163 - DNA, 25 bp, Artificial
  Probe
aaagccactttaaaaagcagctgaa

SEQ ID NO: 319164 - DNA, 25 bp, Artificial
  Probe
cagtgaccaacttgcaggtgggccc

SEQ ID NO: 319165 - DNA, 25 bp, Artificial
  Probe
ctttgccgtggcaggaaatggcttg

SEQ ID NO: 319166 - DNA, 25 bp, Artificial
  Probe
ccaccatctaggtgcctgtgggcct

SEQ ID NO: 319167 - DNA, 25 bp, Artificial
  Probe
agcttccgccattccagaaaagcca

SEQ ID NO: 319168 - DNA, 25 bp, Artificial
  Probe
cgagtcttttccatttatatgcaag

SEQ ID NO: 319169 - DNA, 25 bp, Artificial
  Probe
ccaacttgcaggtgggcccaggcca

SEQ ID NO: 319170 - DNA, 25 bp, Artificial
  Probe
gtactctaagcttctctgtcccctg

SEQ ID NO: 319171 - DNA, 25 bp, Artificial
  Probe
ccagaaaagccactttaaaaagcag

SEQ ID NO: 319172 - DNA, 25 bp, Artificial
  Probe
gtcttttccatttatatgcaagaga

SEQ ID NO: 319173 - DNA, 25 bp, Artificial
  Probe
tcctcagcgccgagccttgtgtgac

SEQ ID NO: 319174 - DNA, 25 bp, Artificial
  Probe
gaagcttccgccattccagaaaagc

SEQ ID NO: 319175 - DNA, 25 bp, Artificial
  Probe
cagaaaagccactttaaaaagcagc

SEQ ID NO: 319176 - DNA, 25 bp, Artificial
  Probe
tgaccaacttgcaggtgggcccagg

SEQ ID NO: 319177 - DNA, 25 bp, Artificial
  Probe
aagcagctgaagtgaccttacagac

SEQ ID NO: 319178 - DNA, 25 bp, Artificial
  Probe
gaccttacagaccagagatttattt

SEQ ID NO: 319179 - DNA, 25 bp, Artificial
  Probe
tgggcctgcgaagcttccgccattc

SEQ ID NO: 319180 - DNA, 25 bp, Artificial
  Probe
gtgtactctaagcttctctgtcccc

SEQ ID NO: 319181 - DNA, 25 bp, Artificial
  Probe
caattgtatgtgtgtactctaagct

SEQ ID NO: 319182 - DNA, 25 bp, Artificial
  Probe
cagctgaagtgaccttacagaccag

SEQ ID NO: 319183 - DNA, 25 bp, Artificial
  Probe
ccaagtccaccatctaggtgcctgt

SEQ ID NO: 319184 - DNA, 25 bp, Artificial
  Probe
cttccttccagtgaccaacttgcag

SEQ ID NO: 319185 - DNA, 25 bp, Artificial
  Probe
aaagcagctgaagtgaccttacaga

SEQ ID NO: 319186 - DNA, 25 bp, Artificial
  Probe
cttgtattctattccgtggggtcac

SEQ ID NO: 319187 - DNA, 25 bp, Artificial
  Probe
tctagcccactttgccgtggcagga

SEQ ID NO: 319188 - DNA, 25 bp, Artificial
  Probe
ctgaagtgaccttacagaccagaga

SEQ ID NO: 319189 - DNA, 25 bp, Artificial
  Probe
ctgtgcctagcaatctttccacttg

SEQ ID NO: 319190 - DNA, 25 bp, Artificial
  Probe
gtgcctagcaatctttccacttgac

SEQ ID NO: 319191 - DNA, 25 bp, Artificial
  Probe
caggcccagcaaccatgccttgagg

SEQ ID NO: 319192 - DNA, 25 bp, Artificial
  Probe
aagctgtctccatgggttggtcaca

SEQ ID NO: 319193 - DNA, 25 bp, Artificial
  Probe
gtcacagtgtgcatcgcaccgtgct

SEQ ID NO: 319194 - DNA, 25 bp, Artificial
  Probe
atcaactcactgtcagtacctgaga

SEQ ID NO: 319195 - DNA, 25 bp, Artificial
  Probe
actggtacattcaggctacctgtgc

SEQ ID NO: 319196 - DNA, 25 bp, Artificial
  Probe
ggaactggtacattcaggctacctg

SEQ ID NO: 319197 - DNA, 25 bp, Artificial
  Probe
agctggggctgcactctctacgcca

SEQ ID NO: 319198 - DNA, 25 bp, Artificial
  Probe
agttttcatttcgacaagcactgta

SEQ ID NO: 319199 - DNA, 25 bp, Artificial
  Probe
tccatgggttggtcacagtgtgcat

SEQ ID NO: 319200 - DNA, 25 bp, Artificial
  Probe
tcactgtcagtacctgagaagggat

SEQ ID NO: 319201 - DNA, 25 bp, Artificial
  Probe
agaatcaactcactgtcagtacctg

SEQ ID NO: 319202 - DNA, 25 bp, Artificial
  Probe
ccatgggttggtcacagtgtgcatc

SEQ ID NO: 319203 - DNA, 25 bp, Artificial
  Probe
tgccagaagctgtctccatgggttg

SEQ ID NO: 319204 - DNA, 25 bp, Artificial
  Probe
tggggctgcactctctacgccacag

SEQ ID NO: 319205 - DNA, 25 bp, Artificial
  Probe
acgccacaggaactggtacattcag

SEQ ID NO: 319206 - DNA, 25 bp, Artificial
  Probe
ttcgacaagcactgtaattatagct

SEQ ID NO: 319207 - DNA, 25 bp, Artificial
  Probe
gtctccatgggttggtcacagtgtg

SEQ ID NO: 319208 - DNA, 25 bp, Artificial
  Probe
tgcatcgcaccgtgctgtacatgtg

SEQ ID NO: 319209 - DNA, 25 bp, Artificial
  Probe
gtacattcaggctacctgtgccacc

SEQ ID NO: 319210 - DNA, 25 bp, Artificial
  Probe
agtgccagaagctgtctccatgggt

SEQ ID NO: 319211 - DNA, 25 bp, Artificial
  Probe
ctcactgtcagtacctgagaaggga

SEQ ID NO: 319212 - DNA, 25 bp, Artificial
  Probe
tcacagtgtgcatcgcaccgtgctg

SEQ ID NO: 319213 - DNA, 25 bp, Artificial
  Probe
gtcctgagtgccagaagctgtctcc

SEQ ID NO: 319214 - DNA, 25 bp, Artificial
  Probe
gttggtcacagtgtgcatcgcaccg

SEQ ID NO: 319215 - DNA, 25 bp, Artificial
  Probe
agccattgggctgtagactggtgtc

SEQ ID NO: 319216 - DNA, 25 bp, Artificial
  Probe
gataaacactgaagaagctggagct

SEQ ID NO: 319217 - DNA, 25 bp, Artificial
  Probe
gcccgtgaagagcttatgaggatgc

SEQ ID NO: 319218 - DNA, 25 bp, Artificial
  Probe
gaactggtacattcaggctacctgt

SEQ ID NO: 319219 - DNA, 25 bp, Artificial
  Probe
ggctgcactctctacgccacaggaa

SEQ ID NO: 319220 - DNA, 25 bp, Artificial
  Probe
acaggaactggtacattcaggctac

SEQ ID NO: 319221 - DNA, 25 bp, Artificial
  Probe
tacattcaggctacctgtgccacca

SEQ ID NO: 319222 - DNA, 25 bp, Artificial
  Probe
atttcgacaagcactgtaattatag

SEQ ID NO: 319223 - DNA, 25 bp, Artificial
  Probe
atgggttggtcacagtgtgcatcgc

SEQ ID NO: 319224 - DNA, 25 bp, Artificial
  Probe
gagaatcaactcactgtcagtacct

SEQ ID NO: 319225 - DNA, 25 bp, Artificial
  Probe
ctgagtgccagaagctgtctccatg

SEQ ID NO: 319226 - DNA, 25 bp, Artificial
  Probe
ctacgccacaggaactggtacattc

SEQ ID NO: 319227 - DNA, 25 bp, Artificial
  Probe
gccagaagctgtctccatgggttgg

SEQ ID NO: 319228 - DNA, 25 bp, Artificial
  Probe
caggaactggtacattcaggctacc

SEQ ID NO: 319229 - DNA, 25 bp, Artificial
  Probe
aagagaatcaactcactgtcagtac

SEQ ID NO: 319230 - DNA, 25 bp, Artificial
  Probe
tttcctctcatgtggcaaacgtgcg

SEQ ID NO: 319231 - DNA, 25 bp, Artificial
  Probe
tctacgccacaggaactggtacatt

SEQ ID NO: 319232 - DNA, 25 bp, Artificial
  Probe
actctctacgccacaggaactggta

SEQ ID NO: 319233 - DNA, 25 bp, Artificial
  Probe
gttttcatttcgacaagcactgtaa

SEQ ID NO: 319234 - DNA, 25 bp, Artificial
  Probe
gcatcgcaccgtgctgtacatgtgc

SEQ ID NO: 319235 - DNA, 25 bp, Artificial
  Probe
agtgtgcatcgcaccgtgctgtaca

SEQ ID NO: 319236 - DNA, 25 bp, Artificial
  Probe
tgtctccatgggttggtcacagtgt

SEQ ID NO: 319237 - DNA, 25 bp, Artificial
  Probe
cccgtgaagagcttatgaggatgct

SEQ ID NO: 319238 - DNA, 25 bp, Artificial
  Probe
catgtcgtggaggtgctattggatc

SEQ ID NO: 319239 - DNA, 25 bp, Artificial
  Probe
ctattggatcccttgggcccctcct

SEQ ID NO: 319240 - DNA, 25 bp, Artificial
  Probe
ctgttcactgctgccaccgcctctc

SEQ ID NO: 319241 - DNA, 25 bp, Artificial
  Probe
ccttctgttcactgctgccaccgcc

SEQ ID NO: 319242 - DNA, 25 bp, Artificial
  Probe
tgtcgtggaggtgctattggatccc

SEQ ID NO: 319243 - DNA, 25 bp, Artificial
  Probe
aagcatgtcgtggaggtgctattgg

SEQ ID NO: 319244 - DNA, 25 bp, Artificial
  Probe
aggtgctattggatcccttgggccc

SEQ ID NO: 319245 - DNA, 25 bp, Artificial
  Probe
atgtcgtggaggtgctattggatcc

SEQ ID NO: 319246 - DNA, 25 bp, Artificial
  Probe
gatcccttgggcccctccttctgtt

SEQ ID NO: 319247 - DNA, 25 bp, Artificial
  Probe
ttgctctatgagacagatagagggg

SEQ ID NO: 319248 - DNA, 25 bp, Artificial
  Probe
tgttcactgctgccaccgcctctct

SEQ ID NO: 319249 - DNA, 25 bp, Artificial
  Probe
ggatcccttgggcccctccttctgt

SEQ ID NO: 319250 - DNA, 25 bp, Artificial
  Probe
tggatcccttgggcccctccttctg

SEQ ID NO: 319251 - DNA, 25 bp, Artificial
  Probe
ttggatcccttgggcccctccttct

SEQ ID NO: 319252 - DNA, 25 bp, Artificial
  Probe
ttctgttcactgctgccaccgcctc

SEQ ID NO: 319253 - DNA, 25 bp, Artificial
  Probe
agcatgtcgtggaggtgctattgga

SEQ ID NO: 319254 - DNA, 25 bp, Artificial
  Probe
tctcttgctctatgagacagataga

SEQ ID NO: 319255 - DNA, 25 bp, Artificial
  Probe
ctcttgctctatgagacagatagag

SEQ ID NO: 319256 - DNA, 25 bp, Artificial
  Probe
gtcgtggaggtgctattggatccct

SEQ ID NO: 319257 - DNA, 25 bp, Artificial
  Probe
gcctctcttgctctatgagacagat

SEQ ID NO: 319258 - DNA, 25 bp, Artificial
  Probe
tctgttcactgctgccaccgcctct

SEQ ID NO: 319259 - DNA, 25 bp, Artificial
  Probe
gcatgtcgtggaggtgctattggat

SEQ ID NO: 319260 - DNA, 25 bp, Artificial
  Probe
gtgctattggatcccttgggcccct

SEQ ID NO: 319261 - DNA, 25 bp, Artificial
  Probe
cttgctctatgagacagatagaggg

SEQ ID NO: 319262 - DNA, 25 bp, Artificial
  Probe
cgcctctcttgctctatgagacaga

SEQ ID NO: 319263 - DNA, 25 bp, Artificial
  Probe
tgctattggatcccttgggcccctc

SEQ ID NO: 319264 - DNA, 25 bp, Artificial
  Probe
gctattggatcccttgggcccctcc

SEQ ID NO: 319265 - DNA, 25 bp, Artificial
  Probe
tcgtggaggtgctattggatccctt

SEQ ID NO: 319266 - DNA, 25 bp, Artificial
  Probe
ccgcctctcttgctctatgagacag

SEQ ID NO: 319267 - DNA, 25 bp, Artificial
  Probe
accgcctctcttgctctatgagaca

SEQ ID NO: 319268 - DNA, 25 bp, Artificial
  Probe
gaggtgctattggatcccttgggcc

SEQ ID NO: 319269 - DNA, 25 bp, Artificial
  Probe
tcttgctctatgagacagatagagg

SEQ ID NO: 319270 - DNA, 25 bp, Artificial
  Probe
tattggatcccttgggcccctcctt

SEQ ID NO: 319271 - DNA, 25 bp, Artificial
  Probe
cccctccttctgttcactgctgcca

SEQ ID NO: 319272 - DNA, 25 bp, Artificial
  Probe
cctccttctgttcactgctgccacc

SEQ ID NO: 319273 - DNA, 25 bp, Artificial
  Probe
caagcatgtcgtggaggtgctattg

SEQ ID NO: 319274 - DNA, 25 bp, Artificial
  Probe
ccaagcatgtcgtggaggtgctatt

SEQ ID NO: 319275 - DNA, 25 bp, Artificial
  Probe
ggtgctattggatcccttgggcccc

SEQ ID NO: 319276 - DNA, 25 bp, Artificial
  Probe
gcccctccttctgttcactgctgcc

SEQ ID NO: 319277 - DNA, 25 bp, Artificial
  Probe
cctctcttgctctatgagacagata

SEQ ID NO: 319278 - DNA, 25 bp, Artificial
  Probe
ctctcttgctctatgagacagatag

SEQ ID NO: 319279 - DNA, 25 bp, Artificial
  Probe
cttctgttcactgctgccaccgcct

SEQ ID NO: 319280 - DNA, 25 bp, Artificial
  Probe
gttcactgctgccaccgcctctctt

SEQ ID NO: 319281 - DNA, 25 bp, Artificial
  Probe
tgagccctggctattggcaactgtc

SEQ ID NO: 319282 - DNA, 25 bp, Artificial
  Probe
attggcaactgtcaagcctggctct

SEQ ID NO: 319283 - DNA, 25 bp, Artificial
  Probe
ttggcaactgtcaagcctggctctt

SEQ ID NO: 319284 - DNA, 25 bp, Artificial
  Probe
cttttccctgccatctttgtgacct

SEQ ID NO: 319285 - DNA, 25 bp, Artificial
  Probe
aactgtcaagcctggctcttaagag

SEQ ID NO: 319286 - DNA, 25 bp, Artificial
  Probe
tagctcaaggcctgacccttttccc

SEQ ID NO: 319287 - DNA, 25 bp, Artificial
  Probe
gagaacctagctcaaggcctgaccc

SEQ ID NO: 319288 - DNA, 25 bp, Artificial
  Probe
cctggctattggcaactgtcaagcc

SEQ ID NO: 319289 - DNA, 25 bp, Artificial
  Probe
catgagccctggctattggcaactg

SEQ ID NO: 319290 - DNA, 25 bp, Artificial
  Probe
gagccctggctattggcaactgtca

SEQ ID NO: 319291 - DNA, 25 bp, Artificial
  Probe
gaacctagctcaaggcctgaccctt

SEQ ID NO: 319292 - DNA, 25 bp, Artificial
  Probe
agcctggctcttaagagagaaccta

SEQ ID NO: 319293 - DNA, 25 bp, Artificial
  Probe
ttccctgccatctttgtgacctctg

SEQ ID NO: 319294 - DNA, 25 bp, Artificial
  Probe
actgtcaagcctggctcttaagaga

SEQ ID NO: 319295 - DNA, 25 bp, Artificial
  Probe
aacctagctcaaggcctgacccttt

SEQ ID NO: 319296 - DNA, 25 bp, Artificial
  Probe
caactgtcaagcctggctcttaaga

SEQ ID NO: 319297 - DNA, 25 bp, Artificial
  Probe
tcccatgagccctggctattggcaa

SEQ ID NO: 319298 - DNA, 25 bp, Artificial
  Probe
agccctggctattggcaactgtcaa

SEQ ID NO: 319299 - DNA, 25 bp, Artificial
  Probe
tcaagcctggctcttaagagagaac

SEQ ID NO: 319300 - DNA, 25 bp, Artificial
  Probe
agagaacctagctcaaggcctgacc

SEQ ID NO: 319301 - DNA, 25 bp, Artificial
  Probe
agaacctagctcaaggcctgaccct

SEQ ID NO: 319302 - DNA, 25 bp, Artificial
  Probe
gagagaacctagctcaaggcctgac

SEQ ID NO: 319303 - DNA, 25 bp, Artificial
  Probe
ggcctgacccttttccctgccatct

SEQ ID NO: 319304 - DNA, 25 bp, Artificial
  Probe
gcctggctcttaagagagaacctag

SEQ ID NO: 319305 - DNA, 25 bp, Artificial
  Probe
ctattggcaactgtcaagcctggct

SEQ ID NO: 319306 - DNA, 25 bp, Artificial
  Probe
tggcaactgtcaagcctggctctta

SEQ ID NO: 319307 - DNA, 25 bp, Artificial
  Probe
tccctgccatctttgtgacctctgg

SEQ ID NO: 319308 - DNA, 25 bp, Artificial
  Probe
tgtcaagcctggctcttaagagaga

SEQ ID NO: 319309 - DNA, 25 bp, Artificial
  Probe
aagcctggctcttaagagagaacct

SEQ ID NO: 319310 - DNA, 25 bp, Artificial
  Probe
agagagaacctagctcaaggcctga

SEQ ID NO: 319311 - DNA, 25 bp, Artificial
  Probe
cctgacccttttccctgccatcttt

SEQ ID NO: 319312 - DNA, 25 bp, Artificial
  Probe
ggcaactgtcaagcctggctcttaa

SEQ ID NO: 319313 - DNA, 25 bp, Artificial
  Probe
cccatgagccctggctattggcaac

SEQ ID NO: 319314 - DNA, 25 bp, Artificial
  Probe
atgagccctggctattggcaactgt

SEQ ID NO: 319315 - DNA, 25 bp, Artificial
  Probe
ctggctattggcaactgtcaagcct

SEQ ID NO: 319316 - DNA, 25 bp, Artificial
  Probe
ccctgccatctttgtgacctctggc

SEQ ID NO: 319317 - DNA, 25 bp, Artificial
  Probe
caagcctggctcttaagagagaacc

SEQ ID NO: 319318 - DNA, 25 bp, Artificial
  Probe
tttccctgccatctttgtgacctct

SEQ ID NO: 319319 - DNA, 25 bp, Artificial
  Probe
tattggcaactgtcaagcctggctc

SEQ ID NO: 319320 - DNA, 25 bp, Artificial
  Probe
ctcccatgagccctggctattggca

SEQ ID NO: 319321 - DNA, 25 bp, Artificial
  Probe
gccctggctattggcaactgtcaag

SEQ ID NO: 319322 - DNA, 25 bp, Artificial
  Probe
gctattggcaactgtcaagcctggc

SEQ ID NO: 319323 - DNA, 25 bp, Artificial
  Probe
ggctattggcaactgtcaagcctgg

SEQ ID NO: 319324 - DNA, 25 bp, Artificial
  Probe
tggctattggcaactgtcaagcctg

SEQ ID NO: 319325 - DNA, 25 bp, Artificial
  Probe
aagagagaacctagctcaaggcctg

SEQ ID NO: 319326 - DNA, 25 bp, Artificial
  Probe
gtcaagcctggctcttaagagagaa

SEQ ID NO: 319327 - DNA, 25 bp, Artificial
  Probe
gattgagcggagtgcctccgaaccc

SEQ ID NO: 319328 - DNA, 25 bp, Artificial
  Probe
tctcctcttggctttggggatagtt

SEQ ID NO: 319329 - DNA, 25 bp, Artificial
  Probe
ctaatttggagagctgttttacctc

SEQ ID NO: 319330 - DNA, 25 bp, Artificial
  Probe
atttggagagctgttttacctccaa

SEQ ID NO: 319331 - DNA, 25 bp, Artificial
  Probe
cctgatactgcctcaggattcccta

SEQ ID NO: 319332 - DNA, 25 bp, Artificial
  Probe
gtctgtgccctgatactgcctcagg

SEQ ID NO: 319333 - DNA, 25 bp, Artificial
  Probe
aaggactctcctctttaccaagaag

SEQ ID NO: 319334 - DNA, 25 bp, Artificial
  Probe
accagccaatcattgttctgtctgt

SEQ ID NO: 319335 - DNA, 25 bp, Artificial
  Probe
ttggtctcctcttggctttggggat

SEQ ID NO: 319336 - DNA, 25 bp, Artificial
  Probe
gagagctgttttacctccaatggct

SEQ ID NO: 319337 - DNA, 25 bp, Artificial
  Probe
acctccaatggctgggattcagtgc

SEQ ID NO: 319338 - DNA, 25 bp, Artificial
  Probe
ttccccagattctggccacgatcga

SEQ ID NO: 319339 - DNA, 25 bp, Artificial
  Probe
cattgttctgtctgtgccctgatac

SEQ ID NO: 319340 - DNA, 25 bp, Artificial
  Probe
ctccccaagattgagcggagtgcct

SEQ ID NO: 319341 - DNA, 25 bp, Artificial
  Probe
tgttttacctccaatggctgggatt

SEQ ID NO: 319342 - DNA, 25 bp, Artificial
  Probe
tccaaaaactgaggtcccctgcttc

SEQ ID NO: 319343 - DNA, 25 bp, Artificial
  Probe
tccccaagattgagcggagtgcctc

SEQ ID NO: 319344 - DNA, 25 bp, Artificial
  Probe
caatggctgggattcagtgcaaaga

SEQ ID NO: 319345 - DNA, 25 bp, Artificial
  Probe
ccataatttggtctcctcttggctt

SEQ ID NO: 319346 - DNA, 25 bp, Artificial
  Probe
cagtgcaaagattccactcggaacc

SEQ ID NO: 319347 - DNA, 25 bp, Artificial
  Probe
gtgccctgatactgcctcaggattc

SEQ ID NO: 319348 - DNA, 25 bp, Artificial
  Probe
taatttggagagctgttttacctcc

SEQ ID NO: 319349 - DNA, 25 bp, Artificial
  Probe
gatactgcctcaggattccctatcc

SEQ ID NO: 319350 - DNA, 25 bp, Artificial
  Probe
ccaatggctgggattcagtgcaaag

SEQ ID NO: 319351 - DNA, 25 bp, Artificial
  Probe
atcattgttctgtctgtgccctgat

SEQ ID NO: 319352 - DNA, 25 bp, Artificial
  Probe
gccattttcagcttaccatgccaag

SEQ ID NO: 319353 - DNA, 25 bp, Artificial
  Probe
taatttggtctcctcttggctttgg

SEQ ID NO: 319354 - DNA, 25 bp, Artificial
  Probe
gagccattttcagcttaccatgcca

SEQ ID NO: 319355 - DNA, 25 bp, Artificial
  Probe
tcagtgcaaagattccactcggaac

SEQ ID NO: 319356 - DNA, 25 bp, Artificial
  Probe
ggagccattttcagcttaccatgcc

SEQ ID NO: 319357 - DNA, 25 bp, Artificial
  Probe
ttctaatttggagagctgttttacc

SEQ ID NO: 319358 - DNA, 25 bp, Artificial
  Probe
tagggagccattttcagcttaccat

SEQ ID NO: 319359 - DNA, 25 bp, Artificial
  Probe
attcagtgcaaagattccactcgga

SEQ ID NO: 319360 - DNA, 25 bp, Artificial
  Probe
tttcagcttaccatgccaaggcacc

SEQ ID NO: 319361 - DNA, 25 bp, Artificial
  Probe
aagattgagcggagtgcctccgaac

SEQ ID NO: 319362 - DNA, 25 bp, Artificial
  Probe
ggctgggattcagtgcaaagattcc

SEQ ID NO: 319363 - DNA, 25 bp, Artificial
  Probe
tggctgggattcagtgcaaagattc

SEQ ID NO: 319364 - DNA, 25 bp, Artificial
  Probe
atggggttcccagcaccccatgcgg

SEQ ID NO: 319365 - DNA, 25 bp, Artificial
  Probe
ggactccaaaaactgaggtcccctg

SEQ ID NO: 319366 - DNA, 25 bp, Artificial
  Probe
gcaaagattccactcggaacctctt

SEQ ID NO: 319367 - DNA, 25 bp, Artificial
  Probe
taccagccaatcattgttctgtctg

SEQ ID NO: 319368 - DNA, 25 bp, Artificial
  Probe
gctgttttacctccaatggctggga

SEQ ID NO: 319369 - DNA, 25 bp, Artificial
  Probe
ttttacctccaatggctgggattca

SEQ ID NO: 319370 - DNA, 25 bp, Artificial
  Probe
tcctcttggctttggggatagttct

SEQ ID NO: 319371 - DNA, 25 bp, Artificial
  Probe
tggggttcccagcaccccatgcgga

SEQ ID NO: 319372 - DNA, 25 bp, Artificial
  Probe
ctgtctgtgccctgatactgcctca

SEQ ID NO: 319373 - DNA, 25 bp, Artificial
  Probe
gtctcgagtttctgattacaaacac

SEQ ID NO: 319374 - DNA, 25 bp, Artificial
  Probe
tgggcttgttgctttatccatatat

SEQ ID NO: 319375 - DNA, 25 bp, Artificial
  Probe
gctttatccatatatgtgggcctgt

SEQ ID NO: 319376 - DNA, 25 bp, Artificial
  Probe
gggcctgtctcgagtttctgattac

SEQ ID NO: 319377 - DNA, 25 bp, Artificial
  Probe
gtgggcctgtctcgagtttctgatt

SEQ ID NO: 319378 - DNA, 25 bp, Artificial
  Probe
cgaaaccaccaacagacagagctac

SEQ ID NO: 319379 - DNA, 25 bp, Artificial
  Probe
tacagtttgggcttgttgctttatc

SEQ ID NO: 319380 - DNA, 25 bp, Artificial
  Probe
tatccatatatgtgggcctgtctcg

SEQ ID NO: 319381 - DNA, 25 bp, Artificial
  Probe
atgttacatgccttctcagaatgat

SEQ ID NO: 319382 - DNA, 25 bp, Artificial
  Probe
gttacatgccttctcagaatgatat

SEQ ID NO: 319383 - DNA, 25 bp, Artificial
  Probe
agtttgggcttgttgctttatccat

SEQ ID NO: 319384 - DNA, 25 bp, Artificial
  Probe
acagacagagctacgcaaggaatca

SEQ ID NO: 319385 - DNA, 25 bp, Artificial
  Probe
tacacgaaaccaccaacagacagag

SEQ ID NO: 319386 - DNA, 25 bp, Artificial
  Probe
gccttctcagaatgatatttgattt

SEQ ID NO: 319387 - DNA, 25 bp, Artificial
  Probe
gttgctttatccatatatgtgggcc

SEQ ID NO: 319388 - DNA, 25 bp, Artificial
  Probe
acacgaaaccaccaacagacagagc

SEQ ID NO: 319389 - DNA, 25 bp, Artificial
  Probe
acgaaaccaccaacagacagagcta

SEQ ID NO: 319390 - DNA, 25 bp, Artificial
  Probe
aacagacagagctacgcaaggaatc

SEQ ID NO: 319391 - DNA, 25 bp, Artificial
  Probe
aaaccaccaacagacagagctacgc

SEQ ID NO: 319392 - DNA, 25 bp, Artificial
  Probe
cagtttgggcttgttgctttatcca

SEQ ID NO: 319393 - DNA, 25 bp, Artificial
  Probe
atgtgggcctgtctcgagtttctga

SEQ ID NO: 319394 - DNA, 25 bp, Artificial
  Probe
acatgccttctcagaatgatatttg

SEQ ID NO: 319395 - DNA, 25 bp, Artificial
  Probe
accaccaacagacagagctacgcaa

SEQ ID NO: 319396 - DNA, 25 bp, Artificial
  Probe
tatatgtgggcctgtctcgagtttc

SEQ ID NO: 319397 - DNA, 25 bp, Artificial
  Probe
gtgtatgttacatgccttctcagaa

SEQ ID NO: 319398 - DNA, 25 bp, Artificial
  Probe
acagtttgggcttgttgctttatcc

SEQ ID NO: 319399 - DNA, 25 bp, Artificial
  Probe
cttgttgctttatccatatatgtgg

SEQ ID NO: 319400 - DNA, 25 bp, Artificial
  Probe
aaccaccaacagacagagctacgca

SEQ ID NO: 319401 - DNA, 25 bp, Artificial
  Probe
ttgggcttgttgctttatccatata

SEQ ID NO: 319402 - DNA, 25 bp, Artificial
  Probe
cctgtctcgagtttctgattacaaa

SEQ ID NO: 319403 - DNA, 25 bp, Artificial
  Probe
tgtgtatgttacatgccttctcaga

SEQ ID NO: 319404 - DNA, 25 bp, Artificial
  Probe
caccaacagacagagctacgcaagg

SEQ ID NO: 319405 - DNA, 25 bp, Artificial
  Probe
catgccttctcagaatgatatttga

SEQ ID NO: 319406 - DNA, 25 bp, Artificial
  Probe
tgctttatccatatatgtgggcctg

SEQ ID NO: 319407 - DNA, 25 bp, Artificial
  Probe
tgttgctttatccatatatgtgggc

SEQ ID NO: 319408 - DNA, 25 bp, Artificial
  Probe
tatgtgggcctgtctcgagtttctg

SEQ ID NO: 319409 - DNA, 25 bp, Artificial
  Probe
gcttgttgctttatccatatatgtg

SEQ ID NO: 319410 - DNA, 25 bp, Artificial
  Probe
tgggcctgtctcgagtttctgatta

SEQ ID NO: 319411 - DNA, 25 bp, Artificial
  Probe
tttatccatatatgtgggcctgtct

SEQ ID NO: 319412 - DNA, 25 bp, Artificial
  Probe
gtttgggcttgttgctttatccata

SEQ ID NO: 319413 - DNA, 25 bp, Artificial
  Probe
gggcttgttgctttatccatatatg

SEQ ID NO: 319414 - DNA, 25 bp, Artificial
  Probe
gcctgtctcgagtttctgattacaa

SEQ ID NO: 319415 - DNA, 25 bp, Artificial
  Probe
tgtctcgagtttctgattacaaaca

SEQ ID NO: 319416 - DNA, 25 bp, Artificial
  Probe
ccaacagacagagctacgcaaggaa

SEQ ID NO: 319417 - DNA, 25 bp, Artificial
  Probe
atgccttctcagaatgatatttgat

SEQ ID NO: 319418 - DNA, 25 bp, Artificial
  Probe
caacagacagagctacgcaaggaat

SEQ ID NO: 319419 - DNA, 25 bp, Artificial
  Probe
tgtttgacacccagtgcacttgtca

SEQ ID NO: 319420 - DNA, 25 bp, Artificial
  Probe
gtggtacttctactaaattgtctat

SEQ ID NO: 319421 - DNA, 25 bp, Artificial
  Probe
cattctctgtgcagagcaaagcttc

SEQ ID NO: 319422 - DNA, 25 bp, Artificial
  Probe
cagtgcacttgtcatttgcataagg

SEQ ID NO: 319423 - DNA, 25 bp, Artificial
  Probe
agtggtacttctactaaattgtcta

SEQ ID NO: 319424 - DNA, 25 bp, Artificial
  Probe
cccattgtttgacacccagtgcact

SEQ ID NO: 319425 - DNA, 25 bp, Artificial
  Probe
acccagtgcacttgtcatttgcata

SEQ ID NO: 319426 - DNA, 25 bp, Artificial
  Probe
ccagtggtacttctactaaattgtc

SEQ ID NO: 319427 - DNA, 25 bp, Artificial
  Probe
gtcccattgtttgacacccagtgca

SEQ ID NO: 319428 - DNA, 25 bp, Artificial
  Probe
acacccagtgcacttgtcatttgca

SEQ ID NO: 319429 - DNA, 25 bp, Artificial
  Probe
caagacaagtctcttcatctatgtg

SEQ ID NO: 319430 - DNA, 25 bp, Artificial
  Probe
tttgacacccagtgcacttgtcatt

SEQ ID NO: 319431 - DNA, 25 bp, Artificial
  Probe
tgacacccagtgcacttgtcatttg

SEQ ID NO: 319432 - DNA, 25 bp, Artificial
  Probe
ttgtcccattgtttgacacccagtg

SEQ ID NO: 319433 - DNA, 25 bp, Artificial
  Probe
cacccagtgcacttgtcatttgcat

SEQ ID NO: 319434 - DNA, 25 bp, Artificial
  Probe
agacaagtctcttcatctatgtgaa

SEQ ID NO: 319435 - DNA, 25 bp, Artificial
  Probe
gacacccagtgcacttgtcatttgc

SEQ ID NO: 319436 - DNA, 25 bp, Artificial
  Probe
ccagcccagtggtacttctactaaa

SEQ ID NO: 319437 - DNA, 25 bp, Artificial
  Probe
cagtggtacttctactaaattgtct

SEQ ID NO: 319438 - DNA, 25 bp, Artificial
  Probe
aattgtcccattgtttgacacccag

SEQ ID NO: 319439 - DNA, 25 bp, Artificial
  Probe
gacaagtctcttcatctatgtgaaa

SEQ ID NO: 319440 - DNA, 25 bp, Artificial
  Probe
ggtacttctactaaattgtctattg

SEQ ID NO: 319441 - DNA, 25 bp, Artificial
  Probe
gtttgacacccagtgcacttgtcat

SEQ ID NO: 319442 - DNA, 25 bp, Artificial
  Probe
cagcccagtggtacttctactaaat

SEQ ID NO: 319443 - DNA, 25 bp, Artificial
  Probe
gcccagtggtacttctactaaattg

SEQ ID NO: 319444 - DNA, 25 bp, Artificial
  Probe
tcccattgtttgacacccagtgcac

SEQ ID NO: 319445 - DNA, 25 bp, Artificial
  Probe
ccagtgcacttgtcatttgcataag

SEQ ID NO: 319446 - DNA, 25 bp, Artificial
  Probe
agtgcacttgtcatttgcataaggc

SEQ ID NO: 319447 - DNA, 25 bp, Artificial
  Probe
cccagtgcacttgtcatttgcataa

SEQ ID NO: 319448 - DNA, 25 bp, Artificial
  Probe
ctttgcacaattgtcccattgtttg

SEQ ID NO: 319449 - DNA, 25 bp, Artificial
  Probe
ttgacacccagtgcacttgtcattt

SEQ ID NO: 319450 - DNA, 25 bp, Artificial
  Probe
ccattgtttgacacccagtgcactt

SEQ ID NO: 319451 - DNA, 25 bp, Artificial
  Probe
cccagtggtacttctactaaattgt

SEQ ID NO: 319452 - DNA, 25 bp, Artificial
  Probe
tttgcacaattgtcccattgtttga

SEQ ID NO: 319453 - DNA, 25 bp, Artificial
  Probe
tgtcccattgtttgacacccagtgc

SEQ ID NO: 319454 - DNA, 25 bp, Artificial
  Probe
aagacaagtctcttcatctatgtga

SEQ ID NO: 319455 - DNA, 25 bp, Artificial
  Probe
agcccagtggtacttctactaaatt

SEQ ID NO: 319456 - DNA, 25 bp, Artificial
  Probe
attgtcccattgtttgacacccagt

SEQ ID NO: 319457 - DNA, 25 bp, Artificial
  Probe
cagcggcttattttgggggaaccat

SEQ ID NO: 319458 - DNA, 25 bp, Artificial
  Probe
gagctgcttccgaagacaggagtgc

SEQ ID NO: 319459 - DNA, 25 bp, Artificial
  Probe
ggtttcgcagataaatgctgtgcta

SEQ ID NO: 319460 - DNA, 25 bp, Artificial
  Probe
aagagcaaagtcctatgacagagtt

SEQ ID NO: 319461 - DNA, 25 bp, Artificial
  Probe
gagatgtacaaactgccgtagaaac

SEQ ID NO: 319462 - DNA, 25 bp, Artificial
  Probe
tccgaagacaggagtgcattcatac

SEQ ID NO: 319463 - DNA, 25 bp, Artificial
  Probe
aggagctggccgtcgcatgccttcc

SEQ ID NO: 319464 - DNA, 25 bp, Artificial
  Probe
gccctatagtggagcccagggatga

SEQ ID NO: 319465 - DNA, 25 bp, Artificial
  Probe
ctcctcctggggaagattcacaaac

SEQ ID NO: 319466 - DNA, 25 bp, Artificial
  Probe
agaagaaagcaacacacacttggga

SEQ ID NO: 319467 - DNA, 25 bp, Artificial
  Probe
caagccctatgtgaagagtgtaaaa

SEQ ID NO: 319468 - DNA, 25 bp, Artificial
  Probe
cgccgggccctatagtggagcccag

SEQ ID NO: 319469 - DNA, 25 bp, Artificial
  Probe
aggagtgcattcataccacggtggc

SEQ ID NO: 319470 - DNA, 25 bp, Artificial
  Probe
ttggactcctactggctcctttctc

SEQ ID NO: 319471 - DNA, 25 bp, Artificial
  Probe
aacgattaaacaaacatcactggtg

SEQ ID NO: 319472 - DNA, 25 bp, Artificial
  Probe
cagccccacgaagttgtgcggcagg

SEQ ID NO: 319473 - DNA, 25 bp, Artificial
  Probe
aggaagcgcagaggtttcgcagata

SEQ ID NO: 319474 - DNA, 25 bp, Artificial
  Probe
ccaaaatgactggagccggttctcg

SEQ ID NO: 319475 - DNA, 25 bp, Artificial
  Probe
catccccagaggaagcgcagaggtt

SEQ ID NO: 319476 - DNA, 25 bp, Artificial
  Probe
agttataaaactctgtggccaaaat

SEQ ID NO: 319477 - DNA, 25 bp, Artificial
  Probe
ttctcgatggaagagcaaagtccta

SEQ ID NO: 319478 - DNA, 25 bp, Artificial
  Probe
ctatcagcttaaaaaggaggagctg

SEQ ID NO: 319479 - DNA, 25 bp, Artificial
  Probe
gggatgaagcagctgtgctgttctt

SEQ ID NO: 319480 - DNA, 25 bp, Artificial
  Probe
caaacccaggcgtctcccagaagaa

SEQ ID NO: 319481 - DNA, 25 bp, Artificial
  Probe
tttcgcagataaatgctgtgctata

SEQ ID NO: 319482 - DNA, 25 bp, Artificial
  Probe
cgtcgcatgccttccgtttgttgat

SEQ ID NO: 319483 - DNA, 25 bp, Artificial
  Probe
ctcccaggaacaagaagaggtcacc

SEQ ID NO: 319484 - DNA, 25 bp, Artificial
  Probe
atccccagaggaagcgcagaggttt

SEQ ID NO: 319485 - DNA, 25 bp, Artificial
  Probe
tcctcctggggaagattcacaaacc

SEQ ID NO: 319486 - DNA, 25 bp, Artificial
  Probe
agcgcagaggtttcgcagataaatg

SEQ ID NO: 319487 - DNA, 25 bp, Artificial
  Probe
actggagccggttctcgatggaaga

SEQ ID NO: 319488 - DNA, 25 bp, Artificial
  Probe
ctgcccaactatcagcttaaaaagg

SEQ ID NO: 319489 - DNA, 25 bp, Artificial
  Probe
gacaaaatgagtaccttcagcggct

SEQ ID NO: 319490 - DNA, 25 bp, Artificial
  Probe
gggaagattcacaaacccaggcgtc

SEQ ID NO: 319491 - DNA, 25 bp, Artificial
  Probe
agagcaaagtcctatgacagagttg

SEQ ID NO: 319492 - DNA, 25 bp, Artificial
  Probe
tcactggtgacagagatgtacaaac

SEQ ID NO: 319493 - DNA, 25 bp, Artificial
  Probe
tcagcggcttattttgggggaacca

SEQ ID NO: 319494 - DNA, 25 bp, Artificial
  Probe
aaaggaggagctgcttccgaagaca

SEQ ID NO: 319495 - DNA, 25 bp, Artificial
  Probe
ggaatctcagtcactgcccaactat

SEQ ID NO: 319496 - DNA, 25 bp, Artificial
  Probe
taaatgctgtgctatagggtgctcc

SEQ ID NO: 319497 - DNA, 25 bp, Artificial
  Probe
gaagattcacaaacccaggcgtctc

SEQ ID NO: 319498 - DNA, 25 bp, Artificial
  Probe
cccacgaagttgtgcggcagggacc

SEQ ID NO: 319499 - DNA, 25 bp, Artificial
  Probe
gtctcccagaagaaagcaacacaca

SEQ ID NO: 319500 - DNA, 25 bp, Artificial
  Probe
atgagtaccttcagcggcttatttt

SEQ ID NO: 319501 - DNA, 25 bp, Artificial
  Probe
tactggctcctttctcccaggaaca

SEQ ID NO: 319502 - DNA, 25 bp, Artificial
  Probe
ttcataccacggtggcaagccctat

SEQ ID NO: 319503 - DNA, 25 bp, Artificial
  Probe
caggccatggagagacctagaagga

SEQ ID NO: 319504 - DNA, 25 bp, Artificial
  Probe
taagtccccaggctagagagttctg

SEQ ID NO: 319505 - DNA, 25 bp, Artificial
  Probe
agcatggattccaagtgggctgctg

SEQ ID NO: 319506 - DNA, 25 bp, Artificial
  Probe
tccaagtgggctgctgtgctgctgc

SEQ ID NO: 319507 - DNA, 25 bp, Artificial
  Probe
tcagccccagaggtttggcagaaat

SEQ ID NO: 319508 - DNA, 25 bp, Artificial
  Probe
ccccacccatcacagtatgcccaca

SEQ ID NO: 319509 - DNA, 25 bp, Artificial
  Probe
gctccaggccatggagagacctaga

SEQ ID NO: 319510 - DNA, 25 bp, Artificial
  Probe
tggcagcatggattccaagtgggct

SEQ ID NO: 319511 - DNA, 25 bp, Artificial
  Probe
cccaggctagagagttctggagcct

SEQ ID NO: 319512 - DNA, 25 bp, Artificial
  Probe
tgctccaggccatggagagacctag

SEQ ID NO: 319513 - DNA, 25 bp, Artificial
  Probe
ccccagaggtttggcagaaatgctt

SEQ ID NO: 319514 - DNA, 25 bp, Artificial
  Probe
agccccagaggtttggcagaaatgc

SEQ ID NO: 319515 - DNA, 25 bp, Artificial
  Probe
aggccatggagagacctagaaggaa

SEQ ID NO: 319516 - DNA, 25 bp, Artificial
  Probe
ccaggccatggagagacctagaagg

SEQ ID NO: 319517 - DNA, 25 bp, Artificial
  Probe
ctccaggccatggagagacctagaa

SEQ ID NO: 319518 - DNA, 25 bp, Artificial
  Probe
gtttcagccccagaggtttggcaga

SEQ ID NO: 319519 - DNA, 25 bp, Artificial
  Probe
tccccaggctagagagttctggagc

SEQ ID NO: 319520 - DNA, 25 bp, Artificial
  Probe
ccccaggctagagagttctggagcc

SEQ ID NO: 319521 - DNA, 25 bp, Artificial
  Probe
gactcctgggtccctcatgcgtgtt

SEQ ID NO: 319522 - DNA, 25 bp, Artificial
  Probe
tttcagccccagaggtttggcagaa

SEQ ID NO: 319523 - DNA, 25 bp, Artificial
  Probe
atggcagcatggattccaagtgggc

SEQ ID NO: 319524 - DNA, 25 bp, Artificial
  Probe
gaagtaacatcatctgctgtgatat

SEQ ID NO: 319525 - DNA, 25 bp, Artificial
  Probe
aagtgggctgctgtgctgctgctac

SEQ ID NO: 319526 - DNA, 25 bp, Artificial
  Probe
tccaggccatggagagacctagaag

SEQ ID NO: 319527 - DNA, 25 bp, Artificial
  Probe
ccaggctagagagttctggagcctg

SEQ ID NO: 319528 - DNA, 25 bp, Artificial
  Probe
gccccagaggtttggcagaaatgct

SEQ ID NO: 319529 - DNA, 25 bp, Artificial
  Probe
ttccaagtgggctgctgtgctgctg

SEQ ID NO: 319530 - DNA, 25 bp, Artificial
  Probe
cagcatggattccaagtgggctgct

SEQ ID NO: 319531 - DNA, 25 bp, Artificial
  Probe
ccagactcctgggtccctcatgcgt

SEQ ID NO: 319532 - DNA, 25 bp, Artificial
  Probe
atggattccaagtgggctgctgtgc

SEQ ID NO: 319533 - DNA, 25 bp, Artificial
  Probe
tgtttcagccccagaggtttggcag

SEQ ID NO: 319534 - DNA, 25 bp, Artificial
  Probe
agaagtaacatcatctgctgtgata

SEQ ID NO: 319535 - DNA, 25 bp, Artificial
  Probe
agatggcagcatggattccaagtgg

SEQ ID NO: 319536 - DNA, 25 bp, Artificial
  Probe
aagataagggaccccacccatcaca

SEQ ID NO: 319537 - DNA, 25 bp, Artificial
  Probe
agtccccaggctagagagttctgga

SEQ ID NO: 319538 - DNA, 25 bp, Artificial
  Probe
ttgtttcagccccagaggtttggca

SEQ ID NO: 319539 - DNA, 25 bp, Artificial
  Probe
caagtgggctgctgtgctgctgcta

SEQ ID NO: 319540 - DNA, 25 bp, Artificial
  Probe
catggattccaagtgggctgctgtg

SEQ ID NO: 319541 - DNA, 25 bp, Artificial
  Probe
aagtccccaggctagagagttctgg

SEQ ID NO: 319542 - DNA, 25 bp, Artificial
  Probe
attccaagtgggctgctgtgctgct

SEQ ID NO: 319543 - DNA, 25 bp, Artificial
  Probe
cagccccagaggtttggcagaaatg

SEQ ID NO: 319544 - DNA, 25 bp, Artificial
  Probe
tctgcatgcaaaatcacttccccac

SEQ ID NO: 319545 - DNA, 25 bp, Artificial
  Probe
ttcagccccagaggtttggcagaaa

SEQ ID NO: 319546 - DNA, 25 bp, Artificial
  Probe
cagactcctgggtccctcatgcgtg

SEQ ID NO: 319547 - DNA, 25 bp, Artificial
  Probe
gcatggattccaagtgggctgctgt

SEQ ID NO: 319548 - DNA, 25 bp, Artificial
  Probe
gtccccaggctagagagttctggag

SEQ ID NO: 319549 - DNA, 25 bp, Artificial
  Probe
ctcccggagcctgtgcctcgaaagg

SEQ ID NO: 319550 - DNA, 25 bp, Artificial
  Probe
agctgctgtgggagttgatgacaac

SEQ ID NO: 319551 - DNA, 25 bp, Artificial
  Probe
tgctgtttttagaattcgggccctg

SEQ ID NO: 319552 - DNA, 25 bp, Artificial
  Probe
atgcaggacagcatttcatacgtaa

SEQ ID NO: 319553 - DNA, 25 bp, Artificial
  Probe
tcgaaaggtccgtccgatgaagcct

SEQ ID NO: 319554 - DNA, 25 bp, Artificial
  Probe
caaccagcccagatcatctgggtgc

SEQ ID NO: 319555 - DNA, 25 bp, Artificial
  Probe
gcccagatcatctgggtgctcactc

SEQ ID NO: 319556 - DNA, 25 bp, Artificial
  Probe
agttgatgacaaccagcccagatca

SEQ ID NO: 319557 - DNA, 25 bp, Artificial
  Probe
gctgctgtgggagttgatgacaacc

SEQ ID NO: 319558 - DNA, 25 bp, Artificial
  Probe
atctgggtgctcactcagaggggct

SEQ ID NO: 319559 - DNA, 25 bp, Artificial
  Probe
tcatcttggcacagaaattgttcag

SEQ ID NO: 319560 - DNA, 25 bp, Artificial
  Probe
ctggggcctcctcttcatcttggca

SEQ ID NO: 319561 - DNA, 25 bp, Artificial
  Probe
aaggagattccatttgtccagtaga

SEQ ID NO: 319562 - DNA, 25 bp, Artificial
  Probe
actcagaggggctctcccggagcct

SEQ ID NO: 319563 - DNA, 25 bp, Artificial
  Probe
agatgcaggacagcatttcatacgt

SEQ ID NO: 319564 - DNA, 25 bp, Artificial
  Probe
tacgtaaccatttgaatgtttttgc

SEQ ID NO: 319565 - DNA, 25 bp, Artificial
  Probe
ggacagcatttcatacgtaaccatt

SEQ ID NO: 319566 - DNA, 25 bp, Artificial
  Probe
agcccagatcatctgggtgctcact

SEQ ID NO: 319567 - DNA, 25 bp, Artificial
  Probe
gcctcctcttcatcttggcacagaa

SEQ ID NO: 319568 - DNA, 25 bp, Artificial
  Probe
tctcccggagcctgtgcctcgaaag

SEQ ID NO: 319569 - DNA, 25 bp, Artificial
  Probe
agatcatctgggtgctcactcagag

SEQ ID NO: 319570 - DNA, 25 bp, Artificial
  Probe
tcccggagcctgtgcctcgaaaggt

SEQ ID NO: 319571 - DNA, 25 bp, Artificial
  Probe
gagcctgtgcctcgaaaggtccgtc

SEQ ID NO: 319572 - DNA, 25 bp, Artificial
  Probe
gcctggggcctcctcttcatcttgg

SEQ ID NO: 319573 - DNA, 25 bp, Artificial
  Probe
tcttggcacagaaattgttcagggg

SEQ ID NO: 319574 - DNA, 25 bp, Artificial
  Probe
cttcatcttggcacagaaattgttc

SEQ ID NO: 319575 - DNA, 25 bp, Artificial
  Probe
ggagattccatttgtccagtagatt

SEQ ID NO: 319576 - DNA, 25 bp, Artificial
  Probe
ttgctgtttttagaattcgggccct

SEQ ID NO: 319577 - DNA, 25 bp, Artificial
  Probe
ttgatgacaaccagcccagatcatc

SEQ ID NO: 319578 - DNA, 25 bp, Artificial
  Probe
catttgtccagtagattgcacgtta

SEQ ID NO: 319579 - DNA, 25 bp, Artificial
  Probe
aggagattccatttgtccagtagat

SEQ ID NO: 319580 - DNA, 25 bp, Artificial
  Probe
ggagcctgtgcctcgaaaggtccgt

SEQ ID NO: 319581 - DNA, 25 bp, Artificial
  Probe
accagcccagatcatctgggtgctc

SEQ ID NO: 319582 - DNA, 25 bp, Artificial
  Probe
tttgtccagtagattgcacgttagt

SEQ ID NO: 319583 - DNA, 25 bp, Artificial
  Probe
tgtttttagaattcgggccctggtg

SEQ ID NO: 319584 - DNA, 25 bp, Artificial
  Probe
cagcccagatcatctgggtgctcac

SEQ ID NO: 319585 - DNA, 25 bp, Artificial
  Probe
attccatttgtccagtagattgcac

SEQ ID NO: 319586 - DNA, 25 bp, Artificial
  Probe
cctgtgcctcgaaaggtccgtccga

SEQ ID NO: 319587 - DNA, 25 bp, Artificial
  Probe
gacaaccagcccagatcatctgggt

SEQ ID NO: 319588 - DNA, 25 bp, Artificial
  Probe
gtgctcactcagaggggctctcccg

SEQ ID NO: 319589 - DNA, 25 bp, Artificial
  Probe
catctgggtgctcactcagaggggc

SEQ ID NO: 319590 - DNA, 25 bp, Artificial
  Probe
cgtaaccatttgaatgtttttgctg

SEQ ID NO: 319591 - DNA, 25 bp, Artificial
  Probe
ctcagaggggctctcccggagcctg

SEQ ID NO: 319592 - DNA, 25 bp, Artificial
  Probe
gggcctcctcttcatcttggcacag

SEQ ID NO: 319593 - DNA, 25 bp, Artificial
  Probe
tgcctcgaaaggtccgtccgatgaa

SEQ ID NO: 319594 - DNA, 25 bp, Artificial
  Probe
atcttggcacagaaattgttcaggg

SEQ ID NO: 319595 - DNA, 25 bp, Artificial
  Probe
tcgtggctggaatcccacgcactca

SEQ ID NO: 319596 - DNA, 25 bp, Artificial
  Probe
ggctggaatcccacgcactcagcag

SEQ ID NO: 319597 - DNA, 25 bp, Artificial
  Probe
aagctttcagcaaggtttgggtgac

SEQ ID NO: 319598 - DNA, 25 bp, Artificial
  Probe
ggaagattctaatctgctgggactt

SEQ ID NO: 319599 - DNA, 25 bp, Artificial
  Probe
cctggtttctggtggagtatacaat

SEQ ID NO: 319600 - DNA, 25 bp, Artificial
  Probe
ggagtctttgattctttgagttcac

SEQ ID NO: 319601 - DNA, 25 bp, Artificial
  Probe
gagtatacaattctcatataggctg

SEQ ID NO: 319602 - DNA, 25 bp, Artificial
  Probe
atacaagcatgaagccggtgatgtg

SEQ ID NO: 319603 - DNA, 25 bp, Artificial
  Probe
tgggtgactggaccagagctgcccc

SEQ ID NO: 319604 - DNA, 25 bp, Artificial
  Probe
aatcccacgcactcagcagtactgg

SEQ ID NO: 319605 - DNA, 25 bp, Artificial
  Probe
caaatcaggcgtatacaagcatgaa

SEQ ID NO: 319606 - DNA, 25 bp, Artificial
  Probe
aatggagtaccctactggctggtag

SEQ ID NO: 319607 - DNA, 25 bp, Artificial
  Probe
accctactggctggtagcaaactcc

SEQ ID NO: 319608 - DNA, 25 bp, Artificial
  Probe
ggagtaccctactggctggtagcaa

SEQ ID NO: 319609 - DNA, 25 bp, Artificial
  Probe
tgtgaggctggctactccacatcct

SEQ ID NO: 319610 - DNA, 25 bp, Artificial
  Probe
gaaatcgtggctggaatcccacgca

SEQ ID NO: 319611 - DNA, 25 bp, Artificial
  Probe
agattctaatctgctgggacttgat

SEQ ID NO: 319612 - DNA, 25 bp, Artificial
  Probe
tagactagtgctgtgtgtagcgcct

SEQ ID NO: 319613 - DNA, 25 bp, Artificial
  Probe
acagtgtgtctgacagcgagaagga

SEQ ID NO: 319614 - DNA, 25 bp, Artificial
  Probe
agatcatggcggaaatctacaaaaa

SEQ ID NO: 319615 - DNA, 25 bp, Artificial
  Probe
cgtatacaagcatgaagccggtgat

SEQ ID NO: 319616 - DNA, 25 bp, Artificial
  Probe
gaggctggctactccacatcctaca

SEQ ID NO: 319617 - DNA, 25 bp, Artificial
  Probe
tttgggtgactggaccagagctgcc

SEQ ID NO: 319618 - DNA, 25 bp, Artificial
  Probe
atggtttctttaaaatcctcagagg

SEQ ID NO: 319619 - DNA, 25 bp, Artificial
  Probe
gcatgaagctttcagcaaggtttgg

SEQ ID NO: 319620 - DNA, 25 bp, Artificial
  Probe
tgtctgacagcgagaaggagatcat

SEQ ID NO: 319621 - DNA, 25 bp, Artificial
  Probe
gtttctggtggagtatacaattctc

SEQ ID NO: 319622 - DNA, 25 bp, Artificial
  Probe
actcagcagtactggggaagattct

SEQ ID NO: 319623 - DNA, 25 bp, Artificial
  Probe
ccctgtgaacaccatgtcaatggct

SEQ ID NO: 319624 - DNA, 25 bp, Artificial
  Probe
gtctttgattctttgagttcaccta

SEQ ID NO: 319625 - DNA, 25 bp, Artificial
  Probe
tagcgcctgctgctgtggctctgtc

SEQ ID NO: 319626 - DNA, 25 bp, Artificial
  Probe
catgaagctttcagcaaggtttggg

SEQ ID NO: 319627 - DNA, 25 bp, Artificial
  Probe
gtatacaattctcatataggctgct

SEQ ID NO: 319628 - DNA, 25 bp, Artificial
  Probe
atcctcagaggagagaaccactgtg

SEQ ID NO: 319629 - DNA, 25 bp, Artificial
  Probe
cctggaacgttgactggggtgataa

SEQ ID NO: 319630 - DNA, 25 bp, Artificial
  Probe
ccaaaatttagcaatgcaggcaggg

SEQ ID NO: 319631 - DNA, 25 bp, Artificial
  Probe
tttttccaaaatttagcaatgcagg

SEQ ID NO: 319632 - DNA, 25 bp, Artificial
  Probe
tatagtccttaggagactttttcca

SEQ ID NO: 319633 - DNA, 25 bp, Artificial
  Probe
atcaggcgtatacaagcatgaagcc

SEQ ID NO: 319634 - DNA, 25 bp, Artificial
  Probe
gcgcctgctgctgtggctctgtctg

SEQ ID NO: 319635 - DNA, 25 bp, Artificial
  Probe
agtgctgtgtgtagcgcctgctgct

SEQ ID NO: 319636 - DNA, 25 bp, Artificial
  Probe
aaggaatgaacaccaactacatgat

SEQ ID NO: 319637 - DNA, 25 bp, Artificial
  Probe
ttcagcaaggtttgggtgactggac

SEQ ID NO: 319638 - DNA, 25 bp, Artificial
  Probe
ctacagtgtgtctgacagcgagaag

SEQ ID NO: 319639 - DNA, 25 bp, Artificial
  Probe
gtctgacagcgagaaggagatcatg

SEQ ID NO: 319640 - DNA, 25 bp, Artificial
  Probe
cctccctgtgaacaccatgtcaatg

SEQ ID NO: 319641 - DNA, 25 bp, Artificial
  Probe
aactgttaccgctgtggcgagtcag

SEQ ID NO: 319642 - DNA, 25 bp, Artificial
  Probe
ccaaggactgcaaggagcccaagag

SEQ ID NO: 319643 - DNA, 25 bp, Artificial
  Probe
gcctgctataactgcggtagaggtg

SEQ ID NO: 319644 - DNA, 25 bp, Artificial
  Probe
actgttaccgctgtggcgagtcagg

SEQ ID NO: 319645 - DNA, 25 bp, Artificial
  Probe
aatgctgctacaactgtggcaagcc

SEQ ID NO: 319646 - DNA, 25 bp, Artificial
  Probe
cttcactggccaaaggttggcagat

SEQ ID NO: 319647 - DNA, 25 bp, Artificial
  Probe
agcagaagtgctattcctgtgggga

SEQ ID NO: 319648 - DNA, 25 bp, Artificial
  Probe
ctgcggtagaggtggccacattgcc

SEQ ID NO: 319649 - DNA, 25 bp, Artificial
  Probe
cagaagtgctattcctgtggggaat

SEQ ID NO: 319650 - DNA, 25 bp, Artificial
  Probe
agcccaagagagagcgagagcaatg

SEQ ID NO: 319651 - DNA, 25 bp, Artificial
  Probe
cattgccaaggactgcaaggagccc

SEQ ID NO: 319652 - DNA, 25 bp, Artificial
  Probe
cgagtcagggcatcttgcacgggaa

SEQ ID NO: 319653 - DNA, 25 bp, Artificial
  Probe
gaggatgcctgctataactgcggta

SEQ ID NO: 319654 - DNA, 25 bp, Artificial
  Probe
gagcccaagagagagcgagagcaat

SEQ ID NO: 319655 - DNA, 25 bp, Artificial
  Probe
tggtgaaactggtcatgtagccatc

SEQ ID NO: 319656 - DNA, 25 bp, Artificial
  Probe
cgagagcaatgctgctacaactgtg

SEQ ID NO: 319657 - DNA, 25 bp, Artificial
  Probe
accgctgtggcgagtcagggcatct

SEQ ID NO: 319658 - DNA, 25 bp, Artificial
  Probe
ctataactgcggtagaggtggccac

SEQ ID NO: 319659 - DNA, 25 bp, Artificial
  Probe
ggtcatcttgccaaggattgtgatc

SEQ ID NO: 319660 - DNA, 25 bp, Artificial
  Probe
cagtttgtttcctcgtctcttcctg

SEQ ID NO: 319661 - DNA, 25 bp, Artificial
  Probe
cgtctcttcctgacatctgttatcg

SEQ ID NO: 319662 - DNA, 25 bp, Artificial
  Probe
tcttcactggccaaaggttggcaga

SEQ ID NO: 319663 - DNA, 25 bp, Artificial
  Probe
gtgactgtgaccacgcggacgagca

SEQ ID NO: 319664 - DNA, 25 bp, Artificial
  Probe
agtgaagtcaactgttaccgctgtg

SEQ ID NO: 319665 - DNA, 25 bp, Artificial
  Probe
cagtgagctttacttgcagtgtaaa

SEQ ID NO: 319666 - DNA, 25 bp, Artificial
  Probe
acgcggacgagcagaagtgctattc

SEQ ID NO: 319667 - DNA, 25 bp, Artificial
  Probe
tagaggtggccacattgccaaggac

SEQ ID NO: 319668 - DNA, 25 bp, Artificial
  Probe
aactggtcatgtagccatcaattgc

SEQ ID NO: 319669 - DNA, 25 bp, Artificial
  Probe
tgaccacgcggacgagcagaagtgc

SEQ ID NO: 319670 - DNA, 25 bp, Artificial
  Probe
tgtataatgctttgttaaagaaccc

SEQ ID NO: 319671 - DNA, 25 bp, Artificial
  Probe
attgcagcaagacaagtgaagtcaa

SEQ ID NO: 319672 - DNA, 25 bp, Artificial
  Probe
gtttgtttcctcgtctcttcctgac

SEQ ID NO: 319673 - DNA, 25 bp, Artificial
  Probe
tgacatctgttatcgctgtggtgag

SEQ ID NO: 319674 - DNA, 25 bp, Artificial
  Probe
gactgcaccaaggtgaagtgctata

SEQ ID NO: 319675 - DNA, 25 bp, Artificial
  Probe
gccatctggctcgtgactgtgacca

SEQ ID NO: 319676 - DNA, 25 bp, Artificial
  Probe
aggactgcaaggagcccaagagaga

SEQ ID NO: 319677 - DNA, 25 bp, Artificial
  Probe
agggcatcttgcacgggaatgcaca

SEQ ID NO: 319678 - DNA, 25 bp, Artificial
  Probe
aggtggccacattgccaaggactgc

SEQ ID NO: 319679 - DNA, 25 bp, Artificial
  Probe
tagagggttccagtttgtttcctcg

SEQ ID NO: 319680 - DNA, 25 bp, Artificial
  Probe
caggccagtgagctttacttgcagt

SEQ ID NO: 319681 - DNA, 25 bp, Artificial
  Probe
ctgtggcgagtcagggcatcttgca

SEQ ID NO: 319682 - DNA, 25 bp, Artificial
  Probe
gtctggtcatcttgccaaggattgt

SEQ ID NO: 319683 - DNA, 25 bp, Artificial
  Probe
aagtcaactgttaccgctgtggcga

SEQ ID NO: 319684 - DNA, 25 bp, Artificial
  Probe
atcttgccaaggattgtgatcttca

SEQ ID NO: 319685 - DNA, 25 bp, Artificial
  Probe
tgcaccaaggtgaagtgctataggt

SEQ ID NO: 319686 - DNA, 25 bp, Artificial
  Probe
ggttccagtttgtttcctcgtctct

SEQ ID NO: 319687 - DNA, 25 bp, Artificial
  Probe
ggagctccttctgcacattcttcct

SEQ ID NO: 319688 - DNA, 25 bp, Artificial
  Probe
tgctaacgaagtcagagagagagca

SEQ ID NO: 319689 - DNA, 25 bp, Artificial
  Probe
agttctgtggggaatcttggagctc

SEQ ID NO: 319690 - DNA, 25 bp, Artificial
  Probe
gccacatgcagatgggctgtgactg

SEQ ID NO: 319691 - DNA, 25 bp, Artificial
  Probe
tcacccagaggaagaccgccctgga

SEQ ID NO: 319692 - DNA, 25 bp, Artificial
  Probe
gggttcccactaagacacaaacatt

SEQ ID NO: 319693 - DNA, 25 bp, Artificial
  Probe
cttgaagaccagagtgtgcagaaag

SEQ ID NO: 319694 - DNA, 25 bp, Artificial
  Probe
ttgtgttttcgctggtgatccaacc

SEQ ID NO: 319695 - DNA, 25 bp, Artificial
  Probe
tctgtggggaatcttggagctcctt

SEQ ID NO: 319696 - DNA, 25 bp, Artificial
  Probe
aggagctgggcatcaacctgaaggt

SEQ ID NO: 319697 - DNA, 25 bp, Artificial
  Probe
cacccagaggaagaccgccctggag

SEQ ID NO: 319698 - DNA, 25 bp, Artificial
  Probe
gatccaaccggctgccttaaatacg

SEQ ID NO: 319699 - DNA, 25 bp, Artificial
  Probe
accgccctggagttctgtggggaat

SEQ ID NO: 319700 - DNA, 25 bp, Artificial
  Probe
ataataaagttctgggcattctcag

SEQ ID NO: 319701 - DNA, 25 bp, Artificial
  Probe
aaccccaggaaggagaaagcagagg

SEQ ID NO: 319702 - DNA, 25 bp, Artificial
  Probe
gtaaaccccaggaaggagaaagcag

SEQ ID NO: 319703 - DNA, 25 bp, Artificial
  Probe
aatgtccatgcaaggaattgttggc

SEQ ID NO: 319704 - DNA, 25 bp, Artificial
  Probe
gagcaggacatccaaatctatgacc

SEQ ID NO: 319705 - DNA, 25 bp, Artificial
  Probe
tcaacatgttacaggccacatcatg

SEQ ID NO: 319706 - DNA, 25 bp, Artificial
  Probe
acattcttagatgtgcttttcagag

SEQ ID NO: 319707 - DNA, 25 bp, Artificial
  Probe
actctcggaaaaggtcagaaagaca

SEQ ID NO: 319708 - DNA, 25 bp, Artificial
  Probe
tgtaccagacagcacaacggaggag

SEQ ID NO: 319709 - DNA, 25 bp, Artificial
  Probe
gaccgtggctgtcaaagattcagag

SEQ ID NO: 319710 - DNA, 25 bp, Artificial
  Probe
gacacaaacatttccaatacgggaa

SEQ ID NO: 319711 - DNA, 25 bp, Artificial
  Probe
cgggttcccactaagacacaaacat

SEQ ID NO: 319712 - DNA, 25 bp, Artificial
  Probe
cgcacactgcgcaaacagaagaata

SEQ ID NO: 319713 - DNA, 25 bp, Artificial
  Probe
gaaagcagaggtctccccaagggag

SEQ ID NO: 319714 - DNA, 25 bp, Artificial
  Probe
aatatctgtgagaactccaagagtg

SEQ ID NO: 319715 - DNA, 25 bp, Artificial
  Probe
caggagttttcttgtgttttcgctg

SEQ ID NO: 319716 - DNA, 25 bp, Artificial
  Probe
aggaggatatgtctccctctttggg

SEQ ID NO: 319717 - DNA, 25 bp, Artificial
  Probe
gctggtgatccaaccggctgcctta

SEQ ID NO: 319718 - DNA, 25 bp, Artificial
  Probe
tccatgcaaggaattgttggctgta

SEQ ID NO: 319719 - DNA, 25 bp, Artificial
  Probe
acctaggttcatataagcagtggat

SEQ ID NO: 319720 - DNA, 25 bp, Artificial
  Probe
tcgccatgagaatccacggcctcat

SEQ ID NO: 319721 - DNA, 25 bp, Artificial
  Probe
tactggaaacaagtcgcccgcacac

SEQ ID NO: 319722 - DNA, 25 bp, Artificial
  Probe
atgtggtatcagagccccactgttt

SEQ ID NO: 319723 - DNA, 25 bp, Artificial
  Probe
tgtctttccttctcctggctgctca

SEQ ID NO: 319724 - DNA, 25 bp, Artificial
  Probe
acatccaagtgataatgtccatgca

SEQ ID NO: 319725 - DNA, 25 bp, Artificial
  Probe
cactgtttgctggaaactccccggg

SEQ ID NO: 319726 - DNA, 25 bp, Artificial
  Probe
ggaggatatgtctccctctttgggg

SEQ ID NO: 319727 - DNA, 25 bp, Artificial
  Probe
atacatccaagtgataatgtccatg

SEQ ID NO: 319728 - DNA, 25 bp, Artificial
  Probe
cagcctaagacatgtggtatcagag

SEQ ID NO: 319729 - DNA, 25 bp, Artificial
  Probe
gaaagacagccaagaatgtaccaga

SEQ ID NO: 319730 - DNA, 25 bp, Artificial
  Probe
actgcgcaaacagaagaatatctgt

SEQ ID NO: 319731 - DNA, 25 bp, Artificial
  Probe
gctgtctccatggagccaaacaagg

SEQ ID NO: 319732 - DNA, 25 bp, Artificial
  Probe
aagacacaaacatttccaatacggg

SEQ ID NO: 319733 - DNA, 25 bp, Artificial
  Probe
cagtacaagcgttgcggggtcacat

SEQ ID NO: 319734 - DNA, 25 bp, Artificial
  Probe
tgactcaggatctgggggaccttta

SEQ ID NO: 319735 - DNA, 25 bp, Artificial
  Probe
tcccaggtggtgaagaacgaaggaa

SEQ ID NO: 319736 - DNA, 25 bp, Artificial
  Probe
ccatggacctattcggggacttgcc

SEQ ID NO: 319737 - DNA, 25 bp, Artificial
  Probe
tcttgccacatcaggctcccaggtg

SEQ ID NO: 319738 - DNA, 25 bp, Artificial
  Probe
gcagtacaagcgttgcggggtcaca

SEQ ID NO: 319739 - DNA, 25 bp, Artificial
  Probe
cctgtgtcgatataacgaggaaagt

SEQ ID NO: 319740 - DNA, 25 bp, Artificial
  Probe
caatgtcagagatggccgtgtcttg

SEQ ID NO: 319741 - DNA, 25 bp, Artificial
  Probe
acatcctgtatatcgccaaccttgg

SEQ ID NO: 319742 - DNA, 25 bp, Artificial
  Probe
agactgtgaagaggtgcctgctaga

SEQ ID NO: 319743 - DNA, 25 bp, Artificial
  Probe
actcgggtttcatactttgctgttt

SEQ ID NO: 319744 - DNA, 25 bp, Artificial
  Probe
cccgaccagcagtactgactcagga

SEQ ID NO: 319745 - DNA, 25 bp, Artificial
  Probe
agcgttgcggggtcacatccgtgcc

SEQ ID NO: 319746 - DNA, 25 bp, Artificial
  Probe
agatagtcgggcaatcctgtgtcga

SEQ ID NO: 319747 - DNA, 25 bp, Artificial
  Probe
accttggagatagtcgggcaatcct

SEQ ID NO: 319748 - DNA, 25 bp, Artificial
  Probe
ggcaatgtcagagatggccgtgtct

SEQ ID NO: 319749 - DNA, 25 bp, Artificial
  Probe
gctgcacagaatttgcaccagaact

SEQ ID NO: 319750 - DNA, 25 bp, Artificial
  Probe
gccacatcaggctcccaggtggtga

SEQ ID NO: 319751 - DNA, 25 bp, Artificial
  Probe
cagcaaagagcacaatccaactcag

SEQ ID NO: 319752 - DNA, 25 bp, Artificial
  Probe
ctgaaacaggcttcaagccagaagc

SEQ ID NO: 319753 - DNA, 25 bp, Artificial
  Probe
ggatctgggggacctttactctttg

SEQ ID NO: 319754 - DNA, 25 bp, Artificial
  Probe
tgcaggacgcccatgtcatcctgaa

SEQ ID NO: 319755 - DNA, 25 bp, Artificial
  Probe
ccacctgctggcagcggcaattcag

SEQ ID NO: 319756 - DNA, 25 bp, Artificial
  Probe
tcattactcgggtttcatactttgc

SEQ ID NO: 319757 - DNA, 25 bp, Artificial
  Probe
aagccagaagcctgcctggaaagac

SEQ ID NO: 319758 - DNA, 25 bp, Artificial
  Probe
ttcaggttctcttgccacatcaggc

SEQ ID NO: 319759 - DNA, 25 bp, Artificial
  Probe
tggaggaattcgagcctcgaaattt

SEQ ID NO: 319760 - DNA, 25 bp, Artificial
  Probe
aactcagtatgaagagcgcatgagg

SEQ ID NO: 319761 - DNA, 25 bp, Artificial
  Probe
agagcgcatgaggatacagaaggct

SEQ ID NO: 319762 - DNA, 25 bp, Artificial
  Probe
ggacccgtgctcttcgaggacctgc

SEQ ID NO: 319763 - DNA, 25 bp, Artificial
  Probe
atatcactcaggagtgtaatcctcc

SEQ ID NO: 319764 - DNA, 25 bp, Artificial
  Probe
ctcttcggtgatctttggtttgaaa

SEQ ID NO: 319765 - DNA, 25 bp, Artificial
  Probe
aagtcaaaagcatgcagccttaagc

SEQ ID NO: 319766 - DNA, 25 bp, Artificial
  Probe
cgtctgccgggaaagaagcacagga

SEQ ID NO: 319767 - DNA, 25 bp, Artificial
  Probe
gtggacaacatcctgtatatcgcca

SEQ ID NO: 319768 - DNA, 25 bp, Artificial
  Probe
aagcctcttcggtgatctttggttt

SEQ ID NO: 319769 - DNA, 25 bp, Artificial
  Probe
ggagtgtaatcctccatcatctctc

SEQ ID NO: 319770 - DNA, 25 bp, Artificial
  Probe
tattcggggacttgccggagcccga

SEQ ID NO: 319771 - DNA, 25 bp, Artificial
  Probe
agcacaggaaggacccgtgctcttc

SEQ ID NO: 319772 - DNA, 25 bp, Artificial
  Probe
ccgtctgccgggaaagaagcacagg

SEQ ID NO: 319773 - DNA, 25 bp, Artificial
  Probe
aggagatgcaggacgcccatgtcat

SEQ ID NO: 319774 - DNA, 25 bp, Artificial
  Probe
acagaaggctggaggcaatgtcaga

SEQ ID NO: 319775 - DNA, 25 bp, Artificial
  Probe
ctgaatgatatcactcaggagtgta

SEQ ID NO: 319776 - DNA, 25 bp, Artificial
  Probe
agtcaaaagcatgcagccttaagcc

SEQ ID NO: 319777 - DNA, 25 bp, Artificial
  Probe
ctattcggggacttgccggagcccg

SEQ ID NO: 319778 - DNA, 25 bp, Artificial
  Probe
gatacagaaggctggaggcaatgtc

SEQ ID NO: 319779 - DNA, 25 bp, Artificial
  Probe
tccccatgagcctggaacagtactc

SEQ ID NO: 319780 - DNA, 25 bp, Artificial
  Probe
ctgctttggtctttaggatctagga

SEQ ID NO: 319781 - DNA, 25 bp, Artificial
  Probe
tgggtggctgccagactacagccgt

SEQ ID NO: 319782 - DNA, 25 bp, Artificial
  Probe
tacagaggggccaagacagagttcc

SEQ ID NO: 319783 - DNA, 25 bp, Artificial
  Probe
ccgaaaactgcagtttctgtgggtg

SEQ ID NO: 319784 - DNA, 25 bp, Artificial
  Probe
gcagagcaaccctcggttaatgggc

SEQ ID NO: 319785 - DNA, 25 bp, Artificial
  Probe
agcctggaagtcagccctggcactt

SEQ ID NO: 319786 - DNA, 25 bp, Artificial
  Probe
agactacagccgtgctttgctctgg

SEQ ID NO: 319787 - DNA, 25 bp, Artificial
  Probe
agccttctttagaacatgagttagt

SEQ ID NO: 319788 - DNA, 25 bp, Artificial
  Probe
tatgcatcatattaaagttgcaagc

SEQ ID NO: 319789 - DNA, 25 bp, Artificial
  Probe
gcaaccctcggttaatgggcaaaca

SEQ ID NO: 319790 - DNA, 25 bp, Artificial
  Probe
ctgccagactacagccgtgctttgc

SEQ ID NO: 319791 - DNA, 25 bp, Artificial
  Probe
gagctggaccattttctccacttcc

SEQ ID NO: 319792 - DNA, 25 bp, Artificial
  Probe
caaccctcggttaatgggcaaacat

SEQ ID NO: 319793 - DNA, 25 bp, Artificial
  Probe
cacttccctgtctgcatgcctaaga

SEQ ID NO: 319794 - DNA, 25 bp, Artificial
  Probe
tggctttgacaggttgaaatagtcc

SEQ ID NO: 319795 - DNA, 25 bp, Artificial
  Probe
tctcctggggtagaatgaattgtct

SEQ ID NO: 319796 - DNA, 25 bp, Artificial
  Probe
gaaatagtccccatgagcctggaac

SEQ ID NO: 319797 - DNA, 25 bp, Artificial
  Probe
ttaaagttgcaagcaagcagagcaa

SEQ ID NO: 319798 - DNA, 25 bp, Artificial
  Probe
ttgcggtggtgtttttctaccatta

SEQ ID NO: 319799 - DNA, 25 bp, Artificial
  Probe
tgaattgtctatttagcccgaaaac

SEQ ID NO: 319800 - DNA, 25 bp, Artificial
  Probe
aggttgaaatagtccccatgagcct

SEQ ID NO: 319801 - DNA, 25 bp, Artificial
  Probe
actccagactgtgctggagtcccaa

SEQ ID NO: 319802 - DNA, 25 bp, Artificial
  Probe
ggtgtttttctaccattatcttggg

SEQ ID NO: 319803 - DNA, 25 bp, Artificial
  Probe
actgtgcagcctggaagtcagccct

SEQ ID NO: 319804 - DNA, 25 bp, Artificial
  Probe
tggagtcccaaagttaggagggcca

SEQ ID NO: 319805 - DNA, 25 bp, Artificial
  Probe
caaacattctcctggggtagaatga

SEQ ID NO: 319806 - DNA, 25 bp, Artificial
  Probe
tctaccattatcttgggtttccatg

SEQ ID NO: 319807 - DNA, 25 bp, Artificial
  Probe
ctatttagcccgaaaactgcagttt

SEQ ID NO: 319808 - DNA, 25 bp, Artificial
  Probe
ggaagtcagccctggcactttaaga

SEQ ID NO: 319809 - DNA, 25 bp, Artificial
  Probe
acagaggggccaagacagagttccc

SEQ ID NO: 319810 - DNA, 25 bp, Artificial
  Probe
ttctcctggggtagaatgaattgtc

SEQ ID NO: 319811 - DNA, 25 bp, Artificial
  Probe
cccaaagttaggagggccatggagc

SEQ ID NO: 319812 - DNA, 25 bp, Artificial
  Probe
gtgtaaacagcctatgttgctcgga

SEQ ID NO: 319813 - DNA, 25 bp, Artificial
  Probe
ggtagtattctgacgtgtaaacagc

SEQ ID NO: 319814 - DNA, 25 bp, Artificial
  Probe
gtgctattactcacaagtttagcta

SEQ ID NO: 319815 - DNA, 25 bp, Artificial
  Probe
acagtactccagactgtgctggagt

SEQ ID NO: 319816 - DNA, 25 bp, Artificial
  Probe
cctgggacaggctgctgctttggtc

SEQ ID NO: 319817 - DNA, 25 bp, Artificial
  Probe
ttaagatagccttctttagaacatg

SEQ ID NO: 319818 - DNA, 25 bp, Artificial
  Probe
ctcccctagaaactgtgcagcctgg

SEQ ID NO: 319819 - DNA, 25 bp, Artificial
  Probe
cggtggtgtttttctaccattatct

SEQ ID NO: 319820 - DNA, 25 bp, Artificial
  Probe
taatgggcaaacattctcctggggt

SEQ ID NO: 319821 - DNA, 25 bp, Artificial
  Probe
aattgtctatttagcccgaaaactg

SEQ ID NO: 319822 - DNA, 25 bp, Artificial
  Probe
actgtgctggagtcccaaagttagg

SEQ ID NO: 319823 - DNA, 25 bp, Artificial
  Probe
tagaaactgtgcagcctggaagtca

SEQ ID NO: 319824 - DNA, 25 bp, Artificial
  Probe
gcactttaagatagccttctttaga

SEQ ID NO: 319825 - DNA, 25 bp, Artificial
  Probe
ccgcaggggctcatgctgcgtgcct

SEQ ID NO: 319826 - DNA, 25 bp, Artificial
  Probe
ggtacgccggcgaggtatcaactgc

SEQ ID NO: 319827 - DNA, 25 bp, Artificial
  Probe
tcaagctgcttgcagtcaggggcac

SEQ ID NO: 319828 - DNA, 25 bp, Artificial
  Probe
tggggtttcccacaggccttttgtg

SEQ ID NO: 319829 - DNA, 25 bp, Artificial
  Probe
ctcactctggagctggtgccagaaa

SEQ ID NO: 319830 - DNA, 25 bp, Artificial
  Probe
tgtgctgtcggcaagagttctttgt

SEQ ID NO: 319831 - DNA, 25 bp, Artificial
  Probe
ggcactgcccgcaggggctcatgct

SEQ ID NO: 319832 - DNA, 25 bp, Artificial
  Probe
gtatcaactgccaggggctgtccag

SEQ ID NO: 319833 - DNA, 25 bp, Artificial
  Probe
atgctgcgtgcctacgtctcggcgc

SEQ ID NO: 319834 - DNA, 25 bp, Artificial
  Probe
gctaaggccatatgacaccaacctc

SEQ ID NO: 319835 - DNA, 25 bp, Artificial
  Probe
ttctttgtggacttccgtgagattg

SEQ ID NO: 319836 - DNA, 25 bp, Artificial
  Probe
gaaggctatgccatgaacttctgca

SEQ ID NO: 319837 - DNA, 25 bp, Artificial
  Probe
actatgacagggacagcaacattgt

SEQ ID NO: 319838 - DNA, 25 bp, Artificial
  Probe
gcttctcctaggacccgaagctcaa

SEQ ID NO: 319839 - DNA, 25 bp, Artificial
  Probe
actacatgtggcaggcatgcctggc

SEQ ID NO: 319840 - DNA, 25 bp, Artificial
  Probe
gatgccagtggctggtaccagcttc

SEQ ID NO: 319841 - DNA, 25 bp, Artificial
  Probe
ctgcttgcagtcaggggcacctcac

SEQ ID NO: 319842 - DNA, 25 bp, Artificial
  Probe
cctcaccttgacaagccagtacatg

SEQ ID NO: 319843 - DNA, 25 bp, Artificial
  Probe
cgccggcgaggtatcaactgccagg

SEQ ID NO: 319844 - DNA, 25 bp, Artificial
  Probe
gctcatgctgcgtgcctacgtctcg

SEQ ID NO: 319845 - DNA, 25 bp, Artificial
  Probe
tgggcagtgcccactacatgtggca

SEQ ID NO: 319846 - DNA, 25 bp, Artificial
  Probe
ttgtggcagcccaggtaagagttga

SEQ ID NO: 319847 - DNA, 25 bp, Artificial
  Probe
gcagtcaggggcacctcactctgga

SEQ ID NO: 319848 - DNA, 25 bp, Artificial
  Probe
atgtggcaggcatgcctggcatctc

SEQ ID NO: 319849 - DNA, 25 bp, Artificial
  Probe
ggcatgcctggcatctctgcgtcct

SEQ ID NO: 319850 - DNA, 25 bp, Artificial
  Probe
tggacttccgtgagattggctggca

SEQ ID NO: 319851 - DNA, 25 bp, Artificial
  Probe
ggcatctctgcgtcctttcacactg

SEQ ID NO: 319852 - DNA, 25 bp, Artificial
  Probe
agctggtgccagaaagtcagctggc

SEQ ID NO: 319853 - DNA, 25 bp, Artificial
  Probe
agccaacacagatgctggcactgcc

SEQ ID NO: 319854 - DNA, 25 bp, Artificial
  Probe
gtcagctggcccacagttccttgat

SEQ ID NO: 319855 - DNA, 25 bp, Artificial
  Probe
acttccgtgagattggctggcatga

SEQ ID NO: 319856 - DNA, 25 bp, Artificial
  Probe
ccagtacatgctgcaggtggatgcc

SEQ ID NO: 319857 - DNA, 25 bp, Artificial
  Probe
cgaggtatcaactgccaggggctgt

SEQ ID NO: 319858 - DNA, 25 bp, Artificial
  Probe
ccacagttccttgatcctggatggg

SEQ ID NO: 319859 - DNA, 25 bp, Artificial
  Probe
cagaaagtcagctggcccacagttc

SEQ ID NO: 319860 - DNA, 25 bp, Artificial
  Probe
ggcgccctctgtctttgctctacta

SEQ ID NO: 319861 - DNA, 25 bp, Artificial
  Probe
gccatgaacttctgcactgggcagt

SEQ ID NO: 319862 - DNA, 25 bp, Artificial
  Probe
cgaagctcaagctgcttgcagtcag

SEQ ID NO: 319863 - DNA, 25 bp, Artificial
  Probe
tgtcaagacggatatacctgacatg

SEQ ID NO: 319864 - DNA, 25 bp, Artificial
  Probe
cagcccaggtaagagttgagggcaa

SEQ ID NO: 319865 - DNA, 25 bp, Artificial
  Probe
ttcccacaggccttttgtggcagcc

SEQ ID NO: 319866 - DNA, 25 bp, Artificial
  Probe
acagatgctggcactgcccgcaggg

SEQ ID NO: 319867 - DNA, 25 bp, Artificial
  Probe
tcatccagcccgaaggctatgccat

SEQ ID NO: 319868 - DNA, 25 bp, Artificial
  Probe
gccttttgtggcagcccaggtaaga

SEQ ID NO: 319869 - DNA, 25 bp, Artificial
  Probe
gaacttctgcactgggcagtgccca

SEQ ID NO: 319870 - DNA, 25 bp, Artificial
  Probe
gctgtccaggatgtgctgtcggcaa

SEQ ID NO: 319871 - DNA, 25 bp, Artificial
  Probe
gccttttcagaaaacatcaatgtag

SEQ ID NO: 319872 - DNA, 25 bp, Artificial
  Probe
tctggatggcgcttggctttctgat

SEQ ID NO: 319873 - DNA, 25 bp, Artificial
  Probe
tggagcctggctcttctcgccctgt

SEQ ID NO: 319874 - DNA, 25 bp, Artificial
  Probe
ggaggcagccacagaatcagcaaaa

SEQ ID NO: 319875 - DNA, 25 bp, Artificial
  Probe
aaagtccgtcatgcaagcaaatgac

SEQ ID NO: 319876 - DNA, 25 bp, Artificial
  Probe
ccccagggacgaagaagacgatgag

SEQ ID NO: 319877 - DNA, 25 bp, Artificial
  Probe
tttctgccggccttcagcatcctgg

SEQ ID NO: 319878 - DNA, 25 bp, Artificial
  Probe
cctgggcttgagtattctaaccacg

SEQ ID NO: 319879 - DNA, 25 bp, Artificial
  Probe
ggtttcagcctacgaaccctcttca

SEQ ID NO: 319880 - DNA, 25 bp, Artificial
  Probe
tgtcctctgcgctgccgtcattctg

SEQ ID NO: 319881 - DNA, 25 bp, Artificial
  Probe
agagcgagtcccaggtcaccatgct

SEQ ID NO: 319882 - DNA, 25 bp, Artificial
  Probe
cgtccaggccattgccagactggaa

SEQ ID NO: 319883 - DNA, 25 bp, Artificial
  Probe
gtttcagcctacgaaccctcttcag

SEQ ID NO: 319884 - DNA, 25 bp, Artificial
  Probe
tgccagactggaagcctggagcctg

SEQ ID NO: 319885 - DNA, 25 bp, Artificial
  Probe
ggcgtccaggccattgccagactgg

SEQ ID NO: 319886 - DNA, 25 bp, Artificial
  Probe
gcaagcaaatgaccatcaccaaaga

SEQ ID NO: 319887 - DNA, 25 bp, Artificial
  Probe
gacacagcttggagggtaaccccag

SEQ ID NO: 319888 - DNA, 25 bp, Artificial
  Probe
gccacagaatcagcaaaaagtagcc

SEQ ID NO: 319889 - DNA, 25 bp, Artificial
  Probe
tctgcgctgccgtcattctgaccat

SEQ ID NO: 319890 - DNA, 25 bp, Artificial
  Probe
gatgaggatgccttttcagaaaaca

SEQ ID NO: 319891 - DNA, 25 bp, Artificial
  Probe
taaccccagggacgaagaagacgat

SEQ ID NO: 319892 - DNA, 25 bp, Artificial
  Probe
tgttccttgtcctctgcgctgccgt

SEQ ID NO: 319893 - DNA, 25 bp, Artificial
  Probe
ttctgatctatttcgcctatggcat

SEQ ID NO: 319894 - DNA, 25 bp, Artificial
  Probe
ctcatcctgggcttgagtattctaa

SEQ ID NO: 319895 - DNA, 25 bp, Artificial
  Probe
agttaagtgcggacacttggatcag

SEQ ID NO: 319896 - DNA, 25 bp, Artificial
  Probe
catggtcccgttcttaccgtttctg

SEQ ID NO: 319897 - DNA, 25 bp, Artificial
  Probe
aaagtagccttcatggtcccgttct

SEQ ID NO: 319898 - DNA, 25 bp, Artificial
  Probe
tgagctttctggtgggattcctggc

SEQ ID NO: 319899 - DNA, 25 bp, Artificial
  Probe
tgctgcaaggacagggtttcagcct

SEQ ID NO: 319900 - DNA, 25 bp, Artificial
  Probe
tcagcatctggatggcgcttggctt

SEQ ID NO: 319901 - DNA, 25 bp, Artificial
  Probe
cagcatcctggtcaacatttacttg

SEQ ID NO: 319902 - DNA, 25 bp, Artificial
  Probe
tagccttcatggtcccgttcttacc

SEQ ID NO: 319903 - DNA, 25 bp, Artificial
  Probe
tcagcaaaaagtagccttcatggtc

SEQ ID NO: 319904 - DNA, 25 bp, Artificial
  Probe
tcatggtcccgttcttaccgtttct

SEQ ID NO: 319905 - DNA, 25 bp, Artificial
  Probe
acgacagtcggcttcccttgtgagc

SEQ ID NO: 319906 - DNA, 25 bp, Artificial
  Probe
ttcatacttcatgaaaagacaagtg

SEQ ID NO: 319907 - DNA, 25 bp, Artificial
  Probe
ctttcctcatcctgggcttgagtat

SEQ ID NO: 319908 - DNA, 25 bp, Artificial
  Probe
ttcttaccgtttctgccggccttca

SEQ ID NO: 319909 - DNA, 25 bp, Artificial
  Probe
aagcctggagcctggctcttctcgc

SEQ ID NO: 319910 - DNA, 25 bp, Artificial
  Probe
gtcccaggtcaccatgctgcaagga

SEQ ID NO: 319911 - DNA, 25 bp, Artificial
  Probe
cgtatggcgtccaggccattgccag

SEQ ID NO: 319912 - DNA, 25 bp, Artificial
  Probe
gactggaagcctggagcctggctct

SEQ ID NO: 319913 - DNA, 25 bp, Artificial
  Probe
gcttgagtattctaaccacgtatgg

SEQ ID NO: 319914 - DNA, 25 bp, Artificial
  Probe
ccatttggaggcagccacagaatca

SEQ ID NO: 319915 - DNA, 25 bp, Artificial
  Probe
tcttaccgtttctgccggccttcag

SEQ ID NO: 319916 - DNA, 25 bp, Artificial
  Probe
ggccattgccagactggaagcctgg

SEQ ID NO: 319917 - DNA, 25 bp, Artificial
  Probe
ggactagctagcttccactttcctc

SEQ ID NO: 319918 - DNA, 25 bp, Artificial
  Probe
ctcaaacatggcagttgaaatgttg

SEQ ID NO: 319919 - DNA, 25 bp, Artificial
  Probe
tcacacgtggcaaaaatgttctaac

SEQ ID NO: 319920 - DNA, 25 bp, Artificial
  Probe
ctcaaactgggcactctttcggtat

SEQ ID NO: 319921 - DNA, 25 bp, Artificial
  Probe
tgctatgtcgggaaccaaagcctag

SEQ ID NO: 319922 - DNA, 25 bp, Artificial
  Probe
taatggtcaagatcggggtcttctc

SEQ ID NO: 319923 - DNA, 25 bp, Artificial
  Probe
ttggtctgccaaaactcttcacacg

SEQ ID NO: 319924 - DNA, 25 bp, Artificial
  Probe
tgattggaactctattcattgctgc

SEQ ID NO: 319925 - DNA, 25 bp, Artificial
  Probe
attcggtcaaatcttcaaaaagatg

SEQ ID NO: 319926 - DNA, 25 bp, Artificial
  Probe
gacctgtgtgattgcctgttatttc

SEQ ID NO: 319927 - DNA, 25 bp, Artificial
  Probe
tgagactagtggatgccgatgagct

SEQ ID NO: 319928 - DNA, 25 bp, Artificial
  Probe
ttgctcgtgggcatcacttcaggca

SEQ ID NO: 319929 - DNA, 25 bp, Artificial
  Probe
gcttggtggccctcttcaaaattcg

SEQ ID NO: 319930 - DNA, 25 bp, Artificial
  Probe
agctgactggcctgtgctatgtcgg

SEQ ID NO: 319931 - DNA, 25 bp, Artificial
  Probe
atgcagtgaatctcagtttgaacaa

SEQ ID NO: 319932 - DNA, 25 bp, Artificial
  Probe
gtggatttggtctgccaaaactctt

SEQ ID NO: 319933 - DNA, 25 bp, Artificial
  Probe
tgctgcaggcttggtggccctcttc

SEQ ID NO: 319934 - DNA, 25 bp, Artificial
  Probe
gaaatctcaaactgggcactctttc

SEQ ID NO: 319935 - DNA, 25 bp, Artificial
  Probe
atgtctttgctcgtgggcatcactt

SEQ ID NO: 319936 - DNA, 25 bp, Artificial
  Probe
tcaagatcggggtcttctcggtcct

SEQ ID NO: 319937 - DNA, 25 bp, Artificial
  Probe
aggcaacgaaactgtggtgtaggac

SEQ ID NO: 319938 - DNA, 25 bp, Artificial
  Probe
cacttcaggcatgtggatttggtct

SEQ ID NO: 319939 - DNA, 25 bp, Artificial
  Probe
tgtaggactagctagcttccacttt

SEQ ID NO: 319940 - DNA, 25 bp, Artificial
  Probe
acctatttggtgattggaactctat

SEQ ID NO: 319941 - DNA, 25 bp, Artificial
  Probe
atgttctaaccgattggtgaattct

SEQ ID NO: 319942 - DNA, 25 bp, Artificial
  Probe
gcaaaaatgttctaaccgattggtg

SEQ ID NO: 319943 - DNA, 25 bp, Artificial
  Probe
tgtggtgtaggactagctagcttcc

SEQ ID NO: 319944 - DNA, 25 bp, Artificial
  Probe
ttttatgtctttgctcgtgggcatc

SEQ ID NO: 319945 - DNA, 25 bp, Artificial
  Probe
gcactctttcggtattctgcagatg

SEQ ID NO: 319946 - DNA, 25 bp, Artificial
  Probe
ttcctcattttgaaggaaaggatgc

SEQ ID NO: 319947 - DNA, 25 bp, Artificial
  Probe
cctcaccggctttgtggtggcacct

SEQ ID NO: 319948 - DNA, 25 bp, Artificial
  Probe
gaccaagacagacaagttggaaagg

SEQ ID NO: 319949 - DNA, 25 bp, Artificial
  Probe
gcctgtgctatgtcgggaaccaaag

SEQ ID NO: 319950 - DNA, 25 bp, Artificial
  Probe
ctaaccgattggtgaattctgggaa

SEQ ID NO: 319951 - DNA, 25 bp, Artificial
  Probe
cctcattttgaaggaaaggatgcag

SEQ ID NO: 319952 - DNA, 25 bp, Artificial
  Probe
gatgccgatgagctgactggcctgt

SEQ ID NO: 319953 - DNA, 25 bp, Artificial
  Probe
ctcgtgggcatcacttcaggcatgt

SEQ ID NO: 319954 - DNA, 25 bp, Artificial
  Probe
ggccctcttcaaaattcggtcaaat

SEQ ID NO: 319955 - DNA, 25 bp, Artificial
  Probe
gcttccactttcctcattttgaagg

SEQ ID NO: 319956 - DNA, 25 bp, Artificial
  Probe
aaatcttcaaaaagatgggaccaag

SEQ ID NO: 319957 - DNA, 25 bp, Artificial
  Probe
gccgatgagctgactggcctgtgct

SEQ ID NO: 319958 - DNA, 25 bp, Artificial
  Probe
aggctaatggtcaagatcggggtct

SEQ ID NO: 319959 - DNA, 25 bp, Artificial
  Probe
ggaaccaaagcctagatgccctcac

SEQ ID NO: 319960 - DNA, 25 bp, Artificial
  Probe
atgggaccaagacagacaagttgga

SEQ ID NO: 319961 - DNA, 25 bp, Artificial
  Probe
tatttctatgaaatctcaaactggg

SEQ ID NO: 319962 - DNA, 25 bp, Artificial
  Probe
gggtcttctcggtcctgtacacggt

SEQ ID NO: 319963 - DNA, 25 bp, Artificial
  Probe
cgttctcaccatgctggcagatatt

SEQ ID NO: 319964 - DNA, 25 bp, Artificial
  Probe
tcctgaaccgtgtgcctcagccaga

SEQ ID NO: 319965 - DNA, 25 bp, Artificial
  Probe
tgtgcctcagccagagtaccgtcag

SEQ ID NO: 319966 - DNA, 25 bp, Artificial
  Probe
cagctgccacctacgtgcaggagtt

SEQ ID NO: 319967 - DNA, 25 bp, Artificial
  Probe
gtcctgaaccgtgtgcctcagccag

SEQ ID NO: 319968 - DNA, 25 bp, Artificial
  Probe
tcggcgcagatgatatcatgttggc

SEQ ID NO: 319969 - DNA, 25 bp, Artificial
  Probe
catgttggcaaaggatcctgcatct

SEQ ID NO: 319970 - DNA, 25 bp, Artificial
  Probe
ggatcctgcatctggcatctgtact

SEQ ID NO: 319971 - DNA, 25 bp, Artificial
  Probe
cctgcatctggcatctgtactcttc

SEQ ID NO: 319972 - DNA, 25 bp, Artificial
  Probe
aatagttcatattgccaatgacttg

SEQ ID NO: 319973 - DNA, 25 bp, Artificial
  Probe
gaaccgtgtgcctcagccagagtac

SEQ ID NO: 319974 - DNA, 25 bp, Artificial
  Probe
gtatgacagtgcacccagtggcaga

SEQ ID NO: 319975 - DNA, 25 bp, Artificial
  Probe
gcttctggttgaagccatcctcgtt

SEQ ID NO: 319976 - DNA, 25 bp, Artificial
  Probe
ctgtactcttctgtatgacagtgca

SEQ ID NO: 319977 - DNA, 25 bp, Artificial
  Probe
ctgccacctacgtgcaggagtttct

SEQ ID NO: 319978 - DNA, 25 bp, Artificial
  Probe
gatttggcaccatgacctacctctc

SEQ ID NO: 319979 - DNA, 25 bp, Artificial
  Probe
agtccgtcctgaaccgtgtgcctca

SEQ ID NO: 319980 - DNA, 25 bp, Artificial
  Probe
tactcttctgtatgacagtgcaccc

SEQ ID NO: 319981 - DNA, 25 bp, Artificial
  Probe
cattgggagcatcattgctgtggaa

SEQ ID NO: 319982 - DNA, 25 bp, Artificial
  Probe
accgtgtgcctcagccagagtaccg

SEQ ID NO: 319983 - DNA, 25 bp, Artificial
  Probe
cagtgcacccagtggcagatttggc

SEQ ID NO: 319984 - DNA, 25 bp, Artificial
  Probe
tgaagccatcctcgttctcaccatg

SEQ ID NO: 319985 - DNA, 25 bp, Artificial
  Probe
tcctcgttctcaccatgctggcaga

SEQ ID NO: 319986 - DNA, 25 bp, Artificial
  Probe
catagcattgggagcatcattgctg

SEQ ID NO: 319987 - DNA, 25 bp, Artificial
  Probe
gttcatattgccaatgacttgttcc

SEQ ID NO: 319988 - DNA, 25 bp, Artificial
  Probe
gcacccagtggcagatttggcacca

SEQ ID NO: 319989 - DNA, 25 bp, Artificial
  Probe
ccagtggcagatttggcaccatgac

SEQ ID NO: 319990 - DNA, 25 bp, Artificial
  Probe
agtttctgccacacagcctctgtgc

SEQ ID NO: 319991 - DNA, 25 bp, Artificial
  Probe
atgatatcatgttggcaaaggatcc

SEQ ID NO: 319992 - DNA, 25 bp, Artificial
  Probe
caatgacttgttccttcaggaaaag

SEQ ID NO: 319993 - DNA, 25 bp, Artificial
  Probe
caccatgctggcagatattgaaatc

SEQ ID NO: 319994 - DNA, 25 bp, Artificial
  Probe
ggagtttctgccacacagcctctgt

SEQ ID NO: 319995 - DNA, 25 bp, Artificial
  Probe
ctcagccagagtaccgtcagcttct

SEQ ID NO: 319996 - DNA, 25 bp, Artificial
  Probe
tatcatgttggcaaaggatcctgca

SEQ ID NO: 319997 - DNA, 25 bp, Artificial
  Probe
ccatgctggcagatattgaaatcca

SEQ ID NO: 319998 - DNA, 25 bp, Artificial
  Probe
cacacagcctctgtgccgtgcagtg

SEQ ID NO: 319999 - DNA, 25 bp, Artificial
  Probe
aatccatagcattgggagcatcatt

SEQ ID NO: 320000 - DNA, 25 bp, Artificial
  Probe
ggcagatttggcaccatgacctacc

SEQ ID NO: 320001 - DNA, 25 bp, Artificial
  Probe
ctggttgaagccatcctcgttctca

SEQ ID NO: 320002 - DNA, 25 bp, Artificial
  Probe
tgcaggagtttctgccacacagcct

SEQ ID NO: 320003 - DNA, 25 bp, Artificial
  Probe
ggcaaaggatcctgcatctggcatc

SEQ ID NO: 320004 - DNA, 25 bp, Artificial
  Probe
attgccaatgacttgttccttcagg

SEQ ID NO: 320005 - DNA, 25 bp, Artificial
  Probe
gacagtgcacccagtggcagatttg

SEQ ID NO: 320006 - DNA, 25 bp, Artificial
  Probe
tattgaaatccatagcattgggagc

SEQ ID NO: 320007 - DNA, 25 bp, Artificial
  Probe
aaccctcggcgcagatgatatcatg

SEQ ID NO: 320008 - DNA, 25 bp, Artificial
  Probe
gccagagtaccgtcagcttctggtt

SEQ ID NO: 320009 - DNA, 25 bp, Artificial
  Probe
tcagagtgtgccaggccactgccct

SEQ ID NO: 320010 - DNA, 25 bp, Artificial
  Probe
ttttagctcagtgaaggcctaaccc

SEQ ID NO: 320011 - DNA, 25 bp, Artificial
  Probe
aaatgcacaccgttgtgtctcggtt

SEQ ID NO: 320012 - DNA, 25 bp, Artificial
  Probe
attctgtatcccacactgtgtgaca

SEQ ID NO: 320013 - DNA, 25 bp, Artificial
  Probe
gtgggatgagcctcaccttagagcc

SEQ ID NO: 320014 - DNA, 25 bp, Artificial
  Probe
cctcctcattttatgtaccctgtgg

SEQ ID NO: 320015 - DNA, 25 bp, Artificial
  Probe
taccctgtggaatgacttccctcag

SEQ ID NO: 320016 - DNA, 25 bp, Artificial
  Probe
tttctttatcagagcactcagcttg

SEQ ID NO: 320017 - DNA, 25 bp, Artificial
  Probe
accgtggtttatatggcactagttg

SEQ ID NO: 320018 - DNA, 25 bp, Artificial
  Probe
tgtggaatgacttccctcagatctc

SEQ ID NO: 320019 - DNA, 25 bp, Artificial
  Probe
tgcatgggttgattctgtatcccac

SEQ ID NO: 320020 - DNA, 25 bp, Artificial
  Probe
tccttgcatgggttgattctgtatc

SEQ ID NO: 320021 - DNA, 25 bp, Artificial
  Probe
gggttgattctgtatcccacactgt

SEQ ID NO: 320022 - DNA, 25 bp, Artificial
  Probe
gcctcaccttagagcctgaggtgcc

SEQ ID NO: 320023 - DNA, 25 bp, Artificial
  Probe
gcactagttgctccacaagaaccct

SEQ ID NO: 320024 - DNA, 25 bp, Artificial
  Probe
aagggtcagagtgtgccaggccact

SEQ ID NO: 320025 - DNA, 25 bp, Artificial
  Probe
tcggttggtcctgtgtattggctgt

SEQ ID NO: 320026 - DNA, 25 bp, Artificial
  Probe
tgacccagtaatgcaaaactcactg

SEQ ID NO: 320027 - DNA, 25 bp, Artificial
  Probe
cagcttgtaggcaggcttgcactta

SEQ ID NO: 320028 - DNA, 25 bp, Artificial
  Probe
agtttgtgggatgagcctcacctta

SEQ ID NO: 320029 - DNA, 25 bp, Artificial
  Probe
ggtggctttccttgcatgggttgat

SEQ ID NO: 320030 - DNA, 25 bp, Artificial
  Probe
gtattggctgtgtgggcctgtctcc

SEQ ID NO: 320031 - DNA, 25 bp, Artificial
  Probe
gtgtgccaggccactgccctactta

SEQ ID NO: 320032 - DNA, 25 bp, Artificial
  Probe
tgcagtttactttaacatctagaga

SEQ ID NO: 320033 - DNA, 25 bp, Artificial
  Probe
agtaatgcaaaactcactgggcgag

SEQ ID NO: 320034 - DNA, 25 bp, Artificial
  Probe
cacactgtgtgacacaatccaccgt

SEQ ID NO: 320035 - DNA, 25 bp, Artificial
  Probe
cactggtgtccaagggtcagagtgt

SEQ ID NO: 320036 - DNA, 25 bp, Artificial
  Probe
gtgccaggccactgccctacttaga

SEQ ID NO: 320037 - DNA, 25 bp, Artificial
  Probe
tgtattggctgtgtgggcctgtctc

SEQ ID NO: 320038 - DNA, 25 bp, Artificial
  Probe
ctcattttatgtaccctgtggaatg

SEQ ID NO: 320039 - DNA, 25 bp, Artificial
  Probe
agatctcatacatgacccagtaatg

SEQ ID NO: 320040 - DNA, 25 bp, Artificial
  Probe
gcagtttactttaacatctagagaa

SEQ ID NO: 320041 - DNA, 25 bp, Artificial
  Probe
cctacttagagctgcctcgtgcggg

SEQ ID NO: 320042 - DNA, 25 bp, Artificial
  Probe
gaggtgccagggtctcctttttagc

SEQ ID NO: 320043 - DNA, 25 bp, Artificial
  Probe
gtatcccacactgtgtgacacaatc

SEQ ID NO: 320044 - DNA, 25 bp, Artificial
  Probe
tccaagggtcagagtgtgccaggcc

SEQ ID NO: 320045 - DNA, 25 bp, Artificial
  Probe
gcgaggaacccttttgaagagtttg

SEQ ID NO: 320046 - DNA, 25 bp, Artificial
  Probe
actgccctacttagagctgcctcgt

SEQ ID NO: 320047 - DNA, 25 bp, Artificial
  Probe
ggtttatatggcactagttgctcca

SEQ ID NO: 320048 - DNA, 25 bp, Artificial
  Probe
aggccactgccctacttagagctgc

SEQ ID NO: 320049 - DNA, 25 bp, Artificial
  Probe
gctgtgtgggcctgtctccggtttt

SEQ ID NO: 320050 - DNA, 25 bp, Artificial
  Probe
gatctcatacatgacccagtaatgc

SEQ ID NO: 320051 - DNA, 25 bp, Artificial
  Probe
cactcagcttgtaggcaggcttgca

SEQ ID NO: 320052 - DNA, 25 bp, Artificial
  Probe
gtgtgggcctgtctccggttttctt

SEQ ID NO: 320053 - DNA, 25 bp, Artificial
  Probe
gcctgaggtgccagggtctcctttt

SEQ ID NO: 320054 - DNA, 25 bp, Artificial
  Probe
ggctattaaagaaccttgggccttg

SEQ ID NO: 320055 - DNA, 25 bp, Artificial
  Probe
tggtacagacccatgagtgactcag

SEQ ID NO: 320056 - DNA, 25 bp, Artificial
  Probe
ataacacgtattcgaacttagctgt

SEQ ID NO: 320057 - DNA, 25 bp, Artificial
  Probe
ccaagaattgcagctggaaccatgt

SEQ ID NO: 320058 - DNA, 25 bp, Artificial
  Probe
agactttcacatcctcataagcagg

SEQ ID NO: 320059 - DNA, 25 bp, Artificial
  Probe
gaattgcagctggaaccatgttttt

SEQ ID NO: 320060 - DNA, 25 bp, Artificial
  Probe
ttaccatctaagaactctgtggttt

SEQ ID NO: 320061 - DNA, 25 bp, Artificial
  Probe
tgccaaaatacagaatacgagacac

SEQ ID NO: 320062 - DNA, 25 bp, Artificial
  Probe
cttctgatgctacaggataaagggg

SEQ ID NO: 320063 - DNA, 25 bp, Artificial
  Probe
cccagtgaccaaatgaattgcaggt

SEQ ID NO: 320064 - DNA, 25 bp, Artificial
  Probe
tcccccaagaattgcagctggaacc

SEQ ID NO: 320065 - DNA, 25 bp, Artificial
  Probe
tgcagttggggttcacatctagaag

SEQ ID NO: 320066 - DNA, 25 bp, Artificial
  Probe
gtgaccaaatgaattgcaggtgctc

SEQ ID NO: 320067 - DNA, 25 bp, Artificial
  Probe
ttcttctcaaacagagtcctatgag

SEQ ID NO: 320068 - DNA, 25 bp, Artificial
  Probe
tctttgcaaagttagtacgaaactt

SEQ ID NO: 320069 - DNA, 25 bp, Artificial
  Probe
atctttgcaaagttagtacgaaact

SEQ ID NO: 320070 - DNA, 25 bp, Artificial
  Probe
ttcacatctagaaggcataagaact

SEQ ID NO: 320071 - DNA, 25 bp, Artificial
  Probe
gtgcagttggggttcacatctagaa

SEQ ID NO: 320072 - DNA, 25 bp, Artificial
  Probe
ggaaataacacgtattcgaacttag

SEQ ID NO: 320073 - DNA, 25 bp, Artificial
  Probe
catctaagaactctgtggtttatta

SEQ ID NO: 320074 - DNA, 25 bp, Artificial
  Probe
tctgttaccatctaagaactctgtg

SEQ ID NO: 320075 - DNA, 25 bp, Artificial
  Probe
atacagaatacgagacactctgtgt

SEQ ID NO: 320076 - DNA, 25 bp, Artificial
  Probe
tcttttagaaggtacgagctagact

SEQ ID NO: 320077 - DNA, 25 bp, Artificial
  Probe
gactttcacatcctcataagcaggc

SEQ ID NO: 320078 - DNA, 25 bp, Artificial
  Probe
cgatcttttagaaggtacgagctag

SEQ ID NO: 320079 - DNA, 25 bp, Artificial
  Probe
tgactcagtcccagtgaccaaatga

SEQ ID NO: 320080 - DNA, 25 bp, Artificial
  Probe
caaacagagtcctatgagatgggtg

SEQ ID NO: 320081 - DNA, 25 bp, Artificial
  Probe
agaattgcagctggaaccatgtttt

SEQ ID NO: 320082 - DNA, 25 bp, Artificial
  Probe
aaagtacagtgcttctggttctttt

SEQ ID NO: 320083 - DNA, 25 bp, Artificial
  Probe
gtacgagctagactttcacatcctc

SEQ ID NO: 320084 - DNA, 25 bp, Artificial
  Probe
agaggtggtacagacccatgagtga

SEQ ID NO: 320085 - DNA, 25 bp, Artificial
  Probe
agtacgaaacttctttcttctgatg

SEQ ID NO: 320086 - DNA, 25 bp, Artificial
  Probe
aggtacgagctagactttcacatcc

SEQ ID NO: 320087 - DNA, 25 bp, Artificial
  Probe
aacttctttcttctgatgctacagg

SEQ ID NO: 320088 - DNA, 25 bp, Artificial
  Probe
agtcctatgagatgggtggtatcct

SEQ ID NO: 320089 - DNA, 25 bp, Artificial
  Probe
aggtgctctggtataagacaaatca

SEQ ID NO: 320090 - DNA, 25 bp, Artificial
  Probe
tttcacatcctcataagcaggcatg

SEQ ID NO: 320091 - DNA, 25 bp, Artificial
  Probe
cagttggggttcacatctagaaggc

SEQ ID NO: 320092 - DNA, 25 bp, Artificial
  Probe
gtacgaaacttctttcttctgatgc

SEQ ID NO: 320093 - DNA, 25 bp, Artificial
  Probe
gttagtacgaaacttctttcttctg

SEQ ID NO: 320094 - DNA, 25 bp, Artificial
  Probe
agaatacgagacactctgtgttttt

SEQ ID NO: 320095 - DNA, 25 bp, Artificial
  Probe
atcttttagaaggtacgagctagac

SEQ ID NO: 320096 - DNA, 25 bp, Artificial
  Probe
tgagtgactcagtcccagtgaccaa

SEQ ID NO: 320097 - DNA, 25 bp, Artificial
  Probe
tagctgtgcagttggggttcacatc

SEQ ID NO: 320098 - DNA, 25 bp, Artificial
  Probe
gaaataacacgtattcgaacttagc

SEQ ID NO: 320099 - DNA, 25 bp, Artificial
  Probe
gagtcctatgagatgggtggtatcc

SEQ ID NO: 320100 - DNA, 25 bp, Artificial
  Probe
aattgcaggtgctctggtataagac

SEQ ID NO: 320101 - DNA, 25 bp, Artificial
  Probe
ttataaaacacctgtactagatgag

SEQ ID NO: 320102 - DNA, 25 bp, Artificial
  Probe
ctgttagagcaggactgcccctata

SEQ ID NO: 320103 - DNA, 25 bp, Artificial
  Probe
gtatacacttcagaaaatttggaca

SEQ ID NO: 320104 - DNA, 25 bp, Artificial
  Probe
tggaggcaagctcaggggtaacaca

SEQ ID NO: 320105 - DNA, 25 bp, Artificial
  Probe
tacacttcagaaaatttggacatga

SEQ ID NO: 320106 - DNA, 25 bp, Artificial
  Probe
cagttccctccgatgaggactggtg

SEQ ID NO: 320107 - DNA, 25 bp, Artificial
  Probe
atttggctgttagagcaggactgcc

SEQ ID NO: 320108 - DNA, 25 bp, Artificial
  Probe
ttggctgttagagcaggactgcccc

SEQ ID NO: 320109 - DNA, 25 bp, Artificial
  Probe
gttagagcaggactgcccctatata

SEQ ID NO: 320110 - DNA, 25 bp, Artificial
  Probe
ctcccgagaccaggtagaagtcgac

SEQ ID NO: 320111 - DNA, 25 bp, Artificial
  Probe
ttagaacctggttcatggaaagatc

SEQ ID NO: 320112 - DNA, 25 bp, Artificial
  Probe
aacacctgtactagatgagagtata

SEQ ID NO: 320113 - DNA, 25 bp, Artificial
  Probe
cccgagaccaggtagaagtcgacat

SEQ ID NO: 320114 - DNA, 25 bp, Artificial
  Probe
gtagaagtcgacatcttcctggaat

SEQ ID NO: 320115 - DNA, 25 bp, Artificial
  Probe
actcccgagaccaggtagaagtcga

SEQ ID NO: 320116 - DNA, 25 bp, Artificial
  Probe
tataaaacacctgtactagatgaga

SEQ ID NO: 320117 - DNA, 25 bp, Artificial
  Probe
tcccgagaccaggtagaagtcgaca

SEQ ID NO: 320118 - DNA, 25 bp, Artificial
  Probe
ccgagaccaggtagaagtcgacatc

SEQ ID NO: 320119 - DNA, 25 bp, Artificial
  Probe
tggctgttagagcaggactgcccct

SEQ ID NO: 320120 - DNA, 25 bp, Artificial
  Probe
gaggaactcccgagaccaggtagaa

SEQ ID NO: 320121 - DNA, 25 bp, Artificial
  Probe
gaactcccgagaccaggtagaagtc

SEQ ID NO: 320122 - DNA, 25 bp, Artificial
  Probe
gacaagaggaactcccgagaccagg

SEQ ID NO: 320123 - DNA, 25 bp, Artificial
  Probe
tttggctgttagagcaggactgccc

SEQ ID NO: 320124 - DNA, 25 bp, Artificial
  Probe
aaggcagttccctccgatgaggact

SEQ ID NO: 320125 - DNA, 25 bp, Artificial
  Probe
aggaactcccgagaccaggtagaag

SEQ ID NO: 320126 - DNA, 25 bp, Artificial
  Probe
agaagtcgacatcttcctggaattc

SEQ ID NO: 320127 - DNA, 25 bp, Artificial
  Probe
ttagagcaggactgcccctatatat

SEQ ID NO: 320128 - DNA, 25 bp, Artificial
  Probe
agtatacacttcagaaaatttggac

SEQ ID NO: 320129 - DNA, 25 bp, Artificial
  Probe
ggacaagaggaactcccgagaccag

SEQ ID NO: 320130 - DNA, 25 bp, Artificial
  Probe
tagaacctggttcatggaaagatct

SEQ ID NO: 320131 - DNA, 25 bp, Artificial
  Probe
aacctggttcatggaaagatctttt

SEQ ID NO: 320132 - DNA, 25 bp, Artificial
  Probe
ttccctccgatgaggactggtggag

SEQ ID NO: 320133 - DNA, 25 bp, Artificial
  Probe
ggaggcaagctcaggggtaacacat

SEQ ID NO: 320134 - DNA, 25 bp, Artificial
  Probe
aatttggctgttagagcaggactgc

SEQ ID NO: 320135 - DNA, 25 bp, Artificial
  Probe
agaacctggttcatggaaagatctt

SEQ ID NO: 320136 - DNA, 25 bp, Artificial
  Probe
atacacttcagaaaatttggacatg

SEQ ID NO: 320137 - DNA, 25 bp, Artificial
  Probe
aagctcaggggtaacacatttgaag

SEQ ID NO: 320138 - DNA, 25 bp, Artificial
  Probe
caagctcaggggtaacacatttgaa

SEQ ID NO: 320139 - DNA, 25 bp, Artificial
  Probe
agttccctccgatgaggactggtgg

SEQ ID NO: 320140 - DNA, 25 bp, Artificial
  Probe
cacctgtactagatgagagtatata

SEQ ID NO: 320141 - DNA, 25 bp, Artificial
  Probe
gaacctggttcatggaaagatcttt

SEQ ID NO: 320142 - DNA, 25 bp, Artificial
  Probe
gttccctccgatgaggactggtgga

SEQ ID NO: 320143 - DNA, 25 bp, Artificial
  Probe
acacctgtactagatgagagtatat

SEQ ID NO: 320144 - DNA, 25 bp, Artificial
  Probe
aggacaagaggaactcccgagacca

SEQ ID NO: 320145 - DNA, 25 bp, Artificial
  Probe
tgttagagcaggactgcccctatat

SEQ ID NO: 320146 - DNA, 25 bp, Artificial
  Probe
aactcccgagaccaggtagaagtcg

SEQ ID NO: 320147 - DNA, 25 bp, Artificial
  Probe
cctccaacgttctgcgacttctgga

SEQ ID NO: 320148 - DNA, 25 bp, Artificial
  Probe
cagagacctggaaaagcgggcatcc

SEQ ID NO: 320149 - DNA, 25 bp, Artificial
  Probe
gagatggagttccagcgctgccagt

SEQ ID NO: 320150 - DNA, 25 bp, Artificial
  Probe
ccagctacaaactggggtcctcggc

SEQ ID NO: 320151 - DNA, 25 bp, Artificial
  Probe
gtacctccttcacagcagaacagct

SEQ ID NO: 320152 - DNA, 25 bp, Artificial
  Probe
cagaacagctgtatcgtttggagat

SEQ ID NO: 320153 - DNA, 25 bp, Artificial
  Probe
cgccagctacaaactggggtcctcg

SEQ ID NO: 320154 - DNA, 25 bp, Artificial
  Probe
gggtcctcggcttttgagccctaca

SEQ ID NO: 320155 - DNA, 25 bp, Artificial
  Probe
ccagagcagagacctggaaaagcgg

SEQ ID NO: 320156 - DNA, 25 bp, Artificial
  Probe
ctgaacctctctgagactcaggtga

SEQ ID NO: 320157 - DNA, 25 bp, Artificial
  Probe
tatcgtttggagatggagttccagc

SEQ ID NO: 320158 - DNA, 25 bp, Artificial
  Probe
agcagagacctggaaaagcgggcat

SEQ ID NO: 320159 - DNA, 25 bp, Artificial
  Probe
cagaaagtaggcagccctggccaaa

SEQ ID NO: 320160 - DNA, 25 bp, Artificial
  Probe
tggcctgccaggtctaaccgctggc

SEQ ID NO: 320161 - DNA, 25 bp, Artificial
  Probe
aagaggacccgtacctccttcacag

SEQ ID NO: 320162 - DNA, 25 bp, Artificial
  Probe
tttggagatggagttccagcgctgc

SEQ ID NO: 320163 - DNA, 25 bp, Artificial
  Probe
gagttccagcgctgccagtatgtgg

SEQ ID NO: 320164 - DNA, 25 bp, Artificial
  Probe
cctcggcttttgagccctacagcag

SEQ ID NO: 320165 - DNA, 25 bp, Artificial
  Probe
aggtctaaccgctggccacaggggc

SEQ ID NO: 320166 - DNA, 25 bp, Artificial
  Probe
cgacttctggaacagggccggctgc

SEQ ID NO: 320167 - DNA, 25 bp, Artificial
  Probe
ctggcctgccaggtctaaccgctgg

SEQ ID NO: 320168 - DNA, 25 bp, Artificial
  Probe
gccacaggggcacctccttgggtga

SEQ ID NO: 320169 - DNA, 25 bp, Artificial
  Probe
ctgtatcgtttggagatggagttcc

SEQ ID NO: 320170 - DNA, 25 bp, Artificial
  Probe
agcactgagccctggcctgccaggt

SEQ ID NO: 320171 - DNA, 25 bp, Artificial
  Probe
gagagcgcacagagctggcccgcca

SEQ ID NO: 320172 - DNA, 25 bp, Artificial
  Probe
cacaggggcacctccttgggtgacc

SEQ ID NO: 320173 - DNA, 25 bp, Artificial
  Probe
accgccgcaccaagcagaagaagga

SEQ ID NO: 320174 - DNA, 25 bp, Artificial
  Probe
agatggagttccagcgctgccagta

SEQ ID NO: 320175 - DNA, 25 bp, Artificial
  Probe
gcagccctggccaaagtgacaagaa

SEQ ID NO: 320176 - DNA, 25 bp, Artificial
  Probe
tacaaactggggtcctcggcttttg

SEQ ID NO: 320177 - DNA, 25 bp, Artificial
  Probe
caacgttctgcgacttctggaacag

SEQ ID NO: 320178 - DNA, 25 bp, Artificial
  Probe
tgcccgccagctacaaactggggtc

SEQ ID NO: 320179 - DNA, 25 bp, Artificial
  Probe
agagcgcacagagctggcccgccag

SEQ ID NO: 320180 - DNA, 25 bp, Artificial
  Probe
acctccaacgttctgcgacttctgg

SEQ ID NO: 320181 - DNA, 25 bp, Artificial
  Probe
gcttttgagccctacagcagactag

SEQ ID NO: 320182 - DNA, 25 bp, Artificial
  Probe
cctacagcagactagaacaacagaa

SEQ ID NO: 320183 - DNA, 25 bp, Artificial
  Probe
acttgcccgccagctacaaactggg

SEQ ID NO: 320184 - DNA, 25 bp, Artificial
  Probe
cagctgaacctctctgagactcagg

SEQ ID NO: 320185 - DNA, 25 bp, Artificial
  Probe
ccgcaccaagcagaagaaggaccag

SEQ ID NO: 320186 - DNA, 25 bp, Artificial
  Probe
ggaccagagcagagacctggaaaag

SEQ ID NO: 320187 - DNA, 25 bp, Artificial
  Probe
gacttctggaacagggccggctgct

SEQ ID NO: 320188 - DNA, 25 bp, Artificial
  Probe
aaggaccagagcagagacctggaaa

SEQ ID NO: 320189 - DNA, 25 bp, Artificial
  Probe
tgcgacttctggaacagggccggct

SEQ ID NO: 320190 - DNA, 25 bp, Artificial
  Probe
caaactggggtcctcggcttttgag

SEQ ID NO: 320191 - DNA, 25 bp, Artificial
  Probe
gccagctgaacctctctgagactca

SEQ ID NO: 320192 - DNA, 25 bp, Artificial
  Probe
agtaggcagccctggccaaagtgac

SEQ ID NO: 320193 - DNA, 25 bp, Artificial
  Probe
gaccatggtcacattctccacagca

SEQ ID NO: 320194 - DNA, 25 bp, Artificial
  Probe
taatgcacatccagtgcccgcctgg

SEQ ID NO: 320195 - DNA, 25 bp, Artificial
  Probe
tcccggaagggagttcacggtctag

SEQ ID NO: 320196 - DNA, 25 bp, Artificial
  Probe
gaagcgtctggctagagtaatggac

SEQ ID NO: 320197 - DNA, 25 bp, Artificial
  Probe
agttctgtagcctgaggcataaaaa

SEQ ID NO: 320198 - DNA, 25 bp, Artificial
  Probe
aggaccagtgcttctgacctcacaa

SEQ ID NO: 320199 - DNA, 25 bp, Artificial
  Probe
cctggctagagtgtaggttactaat

SEQ ID NO: 320200 - DNA, 25 bp, Artificial
  Probe
ctctccaaacacaggtgccactatg

SEQ ID NO: 320201 - DNA, 25 bp, Artificial
  Probe
tccagcacatggaggctgagacagg

SEQ ID NO: 320202 - DNA, 25 bp, Artificial
  Probe
cttggaatcatagctattggctggg

SEQ ID NO: 320203 - DNA, 25 bp, Artificial
  Probe
cacctgcctgctgactctggggaga

SEQ ID NO: 320204 - DNA, 25 bp, Artificial
  Probe
ccagcgccgccacgaagattggaag

SEQ ID NO: 320205 - DNA, 25 bp, Artificial
  Probe
ctcatcatgaatctgcactactgtg

SEQ ID NO: 320206 - DNA, 25 bp, Artificial
  Probe
cgccacgaagattggaagcgtctgg

SEQ ID NO: 320207 - DNA, 25 bp, Artificial
  Probe
tgtctctgggcgtcaccgtgctcct

SEQ ID NO: 320208 - DNA, 25 bp, Artificial
  Probe
ggacacctagccaaaggcctgtgtg

SEQ ID NO: 320209 - DNA, 25 bp, Artificial
  Probe
ttctgcatggctctggtcatgagcc

SEQ ID NO: 320210 - DNA, 25 bp, Artificial
  Probe
ggaagcccttctacatcatatagct

SEQ ID NO: 320211 - DNA, 25 bp, Artificial
  Probe
tagcttccattgctagtaccttccg

SEQ ID NO: 320212 - DNA, 25 bp, Artificial
  Probe
cttccagctgatcctggccgagagc

SEQ ID NO: 320213 - DNA, 25 bp, Artificial
  Probe
tgggcgtcaccgtgctcctggcgct

SEQ ID NO: 320214 - DNA, 25 bp, Artificial
  Probe
aggataagactcaatgccagatgag

SEQ ID NO: 320215 - DNA, 25 bp, Artificial
  Probe
accaccaggcaggaatggcaaagcc

SEQ ID NO: 320216 - DNA, 25 bp, Artificial
  Probe
ttccattgctagtaccttccgcagc

SEQ ID NO: 320217 - DNA, 25 bp, Artificial
  Probe
caggttatttctgtctattgagaca

SEQ ID NO: 320218 - DNA, 25 bp, Artificial
  Probe
gctgccctgtgtgttcatctccctg

SEQ ID NO: 320219 - DNA, 25 bp, Artificial
  Probe
aattccaacatgattaaggtcaaag

SEQ ID NO: 320220 - DNA, 25 bp, Artificial
  Probe
tgtgtgttcatctccctgctggcgc

SEQ ID NO: 320221 - DNA, 25 bp, Artificial
  Probe
tctccccaaagtgctgctaacagtc

SEQ ID NO: 320222 - DNA, 25 bp, Artificial
  Probe
ttccaacatgattaaggtcaaagta

SEQ ID NO: 320223 - DNA, 25 bp, Artificial
  Probe
tggcgctcaccgtcttccagctgat

SEQ ID NO: 320224 - DNA, 25 bp, Artificial
  Probe
cagcgggcccttgtcatgagccacg

SEQ ID NO: 320225 - DNA, 25 bp, Artificial
  Probe
gcagtccaagccactagagtcagcc

SEQ ID NO: 320226 - DNA, 25 bp, Artificial
  Probe
agccctgtgggcagtccaagccact

SEQ ID NO: 320227 - DNA, 25 bp, Artificial
  Probe
acagcctttgcgatctacatgccct

SEQ ID NO: 320228 - DNA, 25 bp, Artificial
  Probe
agggacaaagccacactttgcttgt

SEQ ID NO: 320229 - DNA, 25 bp, Artificial
  Probe
ttgcgatctacatgccctcatggag

SEQ ID NO: 320230 - DNA, 25 bp, Artificial
  Probe
tactatatggccactatgaccatgg

SEQ ID NO: 320231 - DNA, 25 bp, Artificial
  Probe
gtgtgcaacctcctgctgccctgtg

SEQ ID NO: 320232 - DNA, 25 bp, Artificial
  Probe
gcaaagcccaggtggttgttggtac

SEQ ID NO: 320233 - DNA, 25 bp, Artificial
  Probe
ttccacctgcctgctgactctgggg

SEQ ID NO: 320234 - DNA, 25 bp, Artificial
  Probe
tagtcaccccattgtctatacttgg

SEQ ID NO: 320235 - DNA, 25 bp, Artificial
  Probe
gggaatccaggttatttctgtctat

SEQ ID NO: 320236 - DNA, 25 bp, Artificial
  Probe
gtactcagatgtactagccagtctc

SEQ ID NO: 320237 - DNA, 25 bp, Artificial
  Probe
ggctcgggttctcctgctgggacac

SEQ ID NO: 320238 - DNA, 25 bp, Artificial
  Probe
gaggattaccttaagttctgtagcc

SEQ ID NO: 320239 - DNA, 25 bp, Artificial
  Probe
tggtgctgaggacagtagagacccc

SEQ ID NO: 320240 - DNA, 25 bp, Artificial
  Probe
aagggcaacttcaggcccaatgggg

SEQ ID NO: 320241 - DNA, 25 bp, Artificial
  Probe
ccaacaagttcacacagaagggcaa

SEQ ID NO: 320242 - DNA, 25 bp, Artificial
  Probe
gagaacctggagaccccagcgctgg

SEQ ID NO: 320243 - DNA, 25 bp, Artificial
  Probe
cttggtgctgaggacagtagagacc

SEQ ID NO: 320244 - DNA, 25 bp, Artificial
  Probe
ctgtttgggccctctgcttccatat

SEQ ID NO: 320245 - DNA, 25 bp, Artificial
  Probe
agttccaggttatgccacacacagg

SEQ ID NO: 320246 - DNA, 25 bp, Artificial
  Probe
gtgcccaagcgcaagcgcagtctca

SEQ ID NO: 320247 - DNA, 25 bp, Artificial
  Probe
gccccaaagcacaggggctcggtct

SEQ ID NO: 320248 - DNA, 25 bp, Artificial
  Probe
agccaagcaggctaaggagccacaa

SEQ ID NO: 320249 - DNA, 25 bp, Artificial
  Probe
aagcacaggggctcggtctccagag

SEQ ID NO: 320250 - DNA, 25 bp, Artificial
  Probe
gctggggcagttccaggttatgcca

SEQ ID NO: 320251 - DNA, 25 bp, Artificial
  Probe
cttcaggcccaatggggaagccaaa

SEQ ID NO: 320252 - DNA, 25 bp, Artificial
  Probe
gtctttgctctgcatgtgttgtctg

SEQ ID NO: 320253 - DNA, 25 bp, Artificial
  Probe
cagcgctggctaccaaacagaccta

SEQ ID NO: 320254 - DNA, 25 bp, Artificial
  Probe
cggagcagaacgtgcccaagcgcaa

SEQ ID NO: 320255 - DNA, 25 bp, Artificial
  Probe
gtttctcttccgtctttgctctgca

SEQ ID NO: 320256 - DNA, 25 bp, Artificial
  Probe
aacttcaggcccaatggggaagcca

SEQ ID NO: 320257 - DNA, 25 bp, Artificial
  Probe
acacagaagggcaacttcaggccca

SEQ ID NO: 320258 - DNA, 25 bp, Artificial
  Probe
acacacaggtcttccttctggacca

SEQ ID NO: 320259 - DNA, 25 bp, Artificial
  Probe
tgctctgcatgtgttgtctgtttgg

SEQ ID NO: 320260 - DNA, 25 bp, Artificial
  Probe
gtgttgtctgtttgggccctctgct

SEQ ID NO: 320261 - DNA, 25 bp, Artificial
  Probe
gctgtgtgagaacctggagacccca

SEQ ID NO: 320262 - DNA, 25 bp, Artificial
  Probe
ttctggaccactgttgggcccagcc

SEQ ID NO: 320263 - DNA, 25 bp, Artificial
  Probe
agcaggctaaggagccacaacctct

SEQ ID NO: 320264 - DNA, 25 bp, Artificial
  Probe
cagaacgtgcccaagcgcaagcgca

SEQ ID NO: 320265 - DNA, 25 bp, Artificial
  Probe
cctgcctccgtctgtcctgtgggtg

SEQ ID NO: 320266 - DNA, 25 bp, Artificial
  Probe
catccacgaatgtggcttggtgctg

SEQ ID NO: 320267 - DNA, 25 bp, Artificial
  Probe
aacctctgaggatggcacattgggc

SEQ ID NO: 320268 - DNA, 25 bp, Artificial
  Probe
tggctaccaaacagacctacgtcac

SEQ ID NO: 320269 - DNA, 25 bp, Artificial
  Probe
tgtgagaacctggagaccccagcgc

SEQ ID NO: 320270 - DNA, 25 bp, Artificial
  Probe
aagcgcaagcgcagtctcaaagccg

SEQ ID NO: 320271 - DNA, 25 bp, Artificial
  Probe
agaacgtgcccaagcgcaagcgcag

SEQ ID NO: 320272 - DNA, 25 bp, Artificial
  Probe
ggagccacaacctctgaggatggca

SEQ ID NO: 320273 - DNA, 25 bp, Artificial
  Probe
tcctgcctccgtctgtcctgtgggt

SEQ ID NO: 320274 - DNA, 25 bp, Artificial
  Probe
gcacattgggccagggccgttcccg

SEQ ID NO: 320275 - DNA, 25 bp, Artificial
  Probe
ggcccaatggggaagccaaatcaga

SEQ ID NO: 320276 - DNA, 25 bp, Artificial
  Probe
caagttcacacagaagggcaacttc

SEQ ID NO: 320277 - DNA, 25 bp, Artificial
  Probe
cggccatcactgctgggcaagccgt

SEQ ID NO: 320278 - DNA, 25 bp, Artificial
  Probe
gcctcccgggcatccacgaatgtgg

SEQ ID NO: 320279 - DNA, 25 bp, Artificial
  Probe
ggccatcactgctgggcaagccgtg

SEQ ID NO: 320280 - DNA, 25 bp, Artificial
  Probe
catgtccaacaagttcacacagaag

SEQ ID NO: 320281 - DNA, 25 bp, Artificial
  Probe
tgcccaagcgcaagcgcagtctcaa

SEQ ID NO: 320282 - DNA, 25 bp, Artificial
  Probe
gcgcagtctcaaagccgtggtcacc

SEQ ID NO: 320283 - DNA, 25 bp, Artificial
  Probe
ggaagccaaatcagagctgtgtgag

SEQ ID NO: 320284 - DNA, 25 bp, Artificial
  Probe
cagccccaaagcacaggggctcggt

SEQ ID NO: 320285 - DNA, 25 bp, Artificial
  Probe
agccaagcagatgacccaggatttc

SEQ ID NO: 320286 - DNA, 25 bp, Artificial
  Probe
cttgctcaagcctcctgatgccaga

SEQ ID NO: 320287 - DNA, 25 bp, Artificial
  Probe
ggggtctcagggttcaaaaactcag

SEQ ID NO: 320288 - DNA, 25 bp, Artificial
  Probe
ctcaagcctcctgatgccagaggtc

SEQ ID NO: 320289 - DNA, 25 bp, Artificial
  Probe
tgtttcagaactatcactgcttatg

SEQ ID NO: 320290 - DNA, 25 bp, Artificial
  Probe
tttcccagcatttactgagcctgat

SEQ ID NO: 320291 - DNA, 25 bp, Artificial
  Probe
ggttcaaaaactcaggagaggtcag

SEQ ID NO: 320292 - DNA, 25 bp, Artificial
  Probe
agggttcacgatgatagccaagcag

SEQ ID NO: 320293 - DNA, 25 bp, Artificial
  Probe
gctcaagcctcctgatgccagaggt

SEQ ID NO: 320294 - DNA, 25 bp, Artificial
  Probe
cagcatttactgagcctgattggtc

SEQ ID NO: 320295 - DNA, 25 bp, Artificial
  Probe
tcagaactatcactgcttatgcgtt

SEQ ID NO: 320296 - DNA, 25 bp, Artificial
  Probe
gggttcacgatgatagccaagcaga

SEQ ID NO: 320297 - DNA, 25 bp, Artificial
  Probe
cagatgacccaggatttcccagcat

SEQ ID NO: 320298 - DNA, 25 bp, Artificial
  Probe
atgcgtttccgtcttctcttcctgg

SEQ ID NO: 320299 - DNA, 25 bp, Artificial
  Probe
agatgacccaggatttcccagcatt

SEQ ID NO: 320300 - DNA, 25 bp, Artificial
  Probe
ctgcttatgcgtttccgtcttctct

SEQ ID NO: 320301 - DNA, 25 bp, Artificial
  Probe
tatcactgcttatgcgtttccgtct

SEQ ID NO: 320302 - DNA, 25 bp, Artificial
  Probe
gccttctgtttcagaactatcactg

SEQ ID NO: 320303 - DNA, 25 bp, Artificial
  Probe
ttcaaaaactcaggagaggtcagag

SEQ ID NO: 320304 - DNA, 25 bp, Artificial
  Probe
ttcccagcatttactgagcctgatt

SEQ ID NO: 320305 - DNA, 25 bp, Artificial
  Probe
gcgtttccgtcttctcttcctggat

SEQ ID NO: 320306 - DNA, 25 bp, Artificial
  Probe
ttctccttgctcaagcctcctgatg

SEQ ID NO: 320307 - DNA, 25 bp, Artificial
  Probe
agcagatgacccaggatttcccagc

SEQ ID NO: 320308 - DNA, 25 bp, Artificial
  Probe
tcgtgcacgggcatgtgtgaagcca

SEQ ID NO: 320309 - DNA, 25 bp, Artificial
  Probe
atttactgagcctgattggtcttcg

SEQ ID NO: 320310 - DNA, 25 bp, Artificial
  Probe
ccaggatttcccagcatttactgag

SEQ ID NO: 320311 - DNA, 25 bp, Artificial
  Probe
gttcacgatgatagccaagcagatg

SEQ ID NO: 320312 - DNA, 25 bp, Artificial
  Probe
aactatcactgcttatgcgtttccg

SEQ ID NO: 320313 - DNA, 25 bp, Artificial
  Probe
gccaagcagatgacccaggatttcc

SEQ ID NO: 320314 - DNA, 25 bp, Artificial
  Probe
tgctcaagcctcctgatgccagagg

SEQ ID NO: 320315 - DNA, 25 bp, Artificial
  Probe
atttcccaagggttcacgatgatag

SEQ ID NO: 320316 - DNA, 25 bp, Artificial
  Probe
acgggccttctgtttcagaactatc

SEQ ID NO: 320317 - DNA, 25 bp, Artificial
  Probe
gatgatagccaagcagatgacccag

SEQ ID NO: 320318 - DNA, 25 bp, Artificial
  Probe
actgcttatgcgtttccgtcttctc

SEQ ID NO: 320319 - DNA, 25 bp, Artificial
  Probe
cgatgatagccaagcagatgaccca

SEQ ID NO: 320320 - DNA, 25 bp, Artificial
  Probe
caagggttcacgatgatagccaagc

SEQ ID NO: 320321 - DNA, 25 bp, Artificial
  Probe
tgacccaggatttcccagcatttac

SEQ ID NO: 320322 - DNA, 25 bp, Artificial
  Probe
gtttccgtcttctcttcctggattc

SEQ ID NO: 320323 - DNA, 25 bp, Artificial
  Probe
gatttcccagcatttactgagcctg

SEQ ID NO: 320324 - DNA, 25 bp, Artificial
  Probe
tatgcgtttccgtcttctcttcctg

SEQ ID NO: 320325 - DNA, 25 bp, Artificial
  Probe
cccagacgggccttctgtttcagaa

SEQ ID NO: 320326 - DNA, 25 bp, Artificial
  Probe
ccagacgggccttctgtttcagaac

SEQ ID NO: 320327 - DNA, 25 bp, Artificial
  Probe
acgatgatagccaagcagatgaccc

SEQ ID NO: 320328 - DNA, 25 bp, Artificial
  Probe
tactgagcctgattggtcttcggga

SEQ ID NO: 320329 - DNA, 25 bp, Artificial
  Probe
cgtttccgtcttctcttcctggatt

SEQ ID NO: 320330 - DNA, 25 bp, Artificial
  Probe
actatcactgcttatgcgtttccgt

SEQ ID NO: 320331 - DNA, 25 bp, Artificial
  Probe
gaagggaacatcttgccaaacgggc

SEQ ID NO: 320332 - DNA, 25 bp, Artificial
  Probe
gatatgctcctgaaagtgctagagt

SEQ ID NO: 320333 - DNA, 25 bp, Artificial
  Probe
gttgactaatgtatccaatggtcat

SEQ ID NO: 320334 - DNA, 25 bp, Artificial
  Probe
gtgtgttaatctctatcctgttaac

SEQ ID NO: 320335 - DNA, 25 bp, Artificial
  Probe
ccaatggtcatggtattgacaatgc

SEQ ID NO: 320336 - DNA, 25 bp, Artificial
  Probe
gataccccaaatagacagtacctgg

SEQ ID NO: 320337 - DNA, 25 bp, Artificial
  Probe
caagcagatgactccagatagtttt

SEQ ID NO: 320338 - DNA, 25 bp, Artificial
  Probe
actccagatagttttggggatctgc

SEQ ID NO: 320339 - DNA, 25 bp, Artificial
  Probe
tggtattgacaatgctcacatatga

SEQ ID NO: 320340 - DNA, 25 bp, Artificial
  Probe
ttggggatctgctttacttattctg

SEQ ID NO: 320341 - DNA, 25 bp, Artificial
  Probe
caaacgggccatggaaaacatgtaa

SEQ ID NO: 320342 - DNA, 25 bp, Artificial
  Probe
tgctcacatatgatgaagagtatcc

SEQ ID NO: 320343 - DNA, 25 bp, Artificial
  Probe
ctccagatagttttggggatctgct

SEQ ID NO: 320344 - DNA, 25 bp, Artificial
  Probe
caaatagacagtacctggatgaaga

SEQ ID NO: 320345 - DNA, 25 bp, Artificial
  Probe
atgactccagatagttttggggatc

SEQ ID NO: 320346 - DNA, 25 bp, Artificial
  Probe
tccaatggtcatggtattgacaatg

SEQ ID NO: 320347 - DNA, 25 bp, Artificial
  Probe
tatccaatggtcatggtattgacaa

SEQ ID NO: 320348 - DNA, 25 bp, Artificial
  Probe
tatgctcctgaaagtgctagagtat

SEQ ID NO: 320349 - DNA, 25 bp, Artificial
  Probe
gctttacttattctgagctgttatg

SEQ ID NO: 320350 - DNA, 25 bp, Artificial
  Probe
ccccaaatagacagtacctggatga

SEQ ID NO: 320351 - DNA, 25 bp, Artificial
  Probe
agtgtgttaatctctatcctgttaa

SEQ ID NO: 320352 - DNA, 25 bp, Artificial
  Probe
atgaagatatgctcctgaaagtgct

SEQ ID NO: 320353 - DNA, 25 bp, Artificial
  Probe
agacagtacctggatgaagatatgc

SEQ ID NO: 320354 - DNA, 25 bp, Artificial
  Probe
ggataccccaaatagacagtacctg

SEQ ID NO: 320355 - DNA, 25 bp, Artificial
  Probe
gatctgctttacttattctgagctg

SEQ ID NO: 320356 - DNA, 25 bp, Artificial
  Probe
atgctcacatatgatgaagagtatc

SEQ ID NO: 320357 - DNA, 25 bp, Artificial
  Probe
tgactccagatagttttggggatct

SEQ ID NO: 320358 - DNA, 25 bp, Artificial
  Probe
ctgctttacttattctgagctgtta

SEQ ID NO: 320359 - DNA, 25 bp, Artificial
  Probe
gtattgacaatgctcacatatgatg

SEQ ID NO: 320360 - DNA, 25 bp, Artificial
  Probe
tgtacaagcagatgactccagatag

SEQ ID NO: 320361 - DNA, 25 bp, Artificial
  Probe
gacaatgctcacatatgatgaagag

SEQ ID NO: 320362 - DNA, 25 bp, Artificial
  Probe
cagatgactccagatagttttgggg

SEQ ID NO: 320363 - DNA, 25 bp, Artificial
  Probe
gccaaacgggccatggaaaacatgt

SEQ ID NO: 320364 - DNA, 25 bp, Artificial
  Probe
aacatcttgccaaacgggccatgga

SEQ ID NO: 320365 - DNA, 25 bp, Artificial
  Probe
ctcctgaaagtgctagagtatctca

SEQ ID NO: 320366 - DNA, 25 bp, Artificial
  Probe
tgactaatgtatccaatggtcatgg

SEQ ID NO: 320367 - DNA, 25 bp, Artificial
  Probe
gaagatatgctcctgaaagtgctag

SEQ ID NO: 320368 - DNA, 25 bp, Artificial
  Probe
ctaatgtatccaatggtcatggtat

SEQ ID NO: 320369 - DNA, 25 bp, Artificial
  Probe
acatcttgccaaacgggccatggaa

SEQ ID NO: 320370 - DNA, 25 bp, Artificial
  Probe
gaacatcttgccaaacgggccatgg

SEQ ID NO: 320371 - DNA, 25 bp, Artificial
  Probe
atctgctttacttattctgagctgt

SEQ ID NO: 320372 - DNA, 25 bp, Artificial
  Probe
gactccagatagttttggggatctg

SEQ ID NO: 320373 - DNA, 25 bp, Artificial
  Probe
ttgactaatgtatccaatggtcatg

SEQ ID NO: 320374 - DNA, 25 bp, Artificial
  Probe
acagtacctggatgaagatatgctc

SEQ ID NO: 320375 - DNA, 25 bp, Artificial
  Probe
caatgctcacatatgatgaagagta

SEQ ID NO: 320376 - DNA, 25 bp, Artificial
  Probe
aggataccccaaatagacagtacct

SEQ ID NO: 320377 - DNA, 25 bp, Artificial
  Probe
ttgtctcttctccttatgggtaggg

SEQ ID NO: 320378 - DNA, 25 bp, Artificial
  Probe
tctcttctccttatgggtagggctc

SEQ ID NO: 320379 - DNA, 25 bp, Artificial
  Probe
gtctcttctccttatgggtagggct

SEQ ID NO: 320380 - DNA, 25 bp, Artificial
  Probe
aggcagctgttgtctcttctcctta

SEQ ID NO: 320381 - DNA, 25 bp, Artificial
  Probe
agggctctgacaaagcttcccgatt

SEQ ID NO: 320382 - DNA, 25 bp, Artificial
  Probe
acaaagcttcccgattaactgaaat

SEQ ID NO: 320383 - DNA, 25 bp, Artificial
  Probe
tgacaaagcttcccgattaactgaa

SEQ ID NO: 320384 - DNA, 25 bp, Artificial
  Probe
ataaaggcagctgttgtctcttctc

SEQ ID NO: 320385 - DNA, 25 bp, Artificial
  Probe
ccttatgggtagggctctgacaaag

SEQ ID NO: 320386 - DNA, 25 bp, Artificial
  Probe
atgggtagggctctgacaaagcttc

SEQ ID NO: 320387 - DNA, 25 bp, Artificial
  Probe
tgtctcttctccttatgggtagggc

SEQ ID NO: 320388 - DNA, 25 bp, Artificial
  Probe
tccttatgggtagggctctgacaaa

SEQ ID NO: 320389 - DNA, 25 bp, Artificial
  Probe
tctgacaaagcttcccgattaactg

SEQ ID NO: 320390 - DNA, 25 bp, Artificial
  Probe
gtagggctctgacaaagcttcccga

SEQ ID NO: 320391 - DNA, 25 bp, Artificial
  Probe
gacaaagcttcccgattaactgaaa

SEQ ID NO: 320392 - DNA, 25 bp, Artificial
  Probe
aaggcagctgttgtctcttctcctt

SEQ ID NO: 320393 - DNA, 25 bp, Artificial
  Probe
gggctctgacaaagcttcccgatta

SEQ ID NO: 320394 - DNA, 25 bp, Artificial
  Probe
ctgttgtctcttctccttatgggta

SEQ ID NO: 320395 - DNA, 25 bp, Artificial
  Probe
tctccttatgggtagggctctgaca

SEQ ID NO: 320396 - DNA, 25 bp, Artificial
  Probe
gctgttgtctcttctccttatgggt

SEQ ID NO: 320397 - DNA, 25 bp, Artificial
  Probe
ttctccttatgggtagggctctgac

SEQ ID NO: 320398 - DNA, 25 bp, Artificial
  Probe
taaaggcagctgttgtctcttctcc

SEQ ID NO: 320399 - DNA, 25 bp, Artificial
  Probe
agctgttgtctcttctccttatggg

SEQ ID NO: 320400 - DNA, 25 bp, Artificial
  Probe
ctgacaaagcttcccgattaactga

SEQ ID NO: 320401 - DNA, 25 bp, Artificial
  Probe
tagggctctgacaaagcttcccgat

SEQ ID NO: 320402 - DNA, 25 bp, Artificial
  Probe
caaagcttcccgattaactgaaata

SEQ ID NO: 320403 - DNA, 25 bp, Artificial
  Probe
ggtagggctctgacaaagcttcccg

SEQ ID NO: 320404 - DNA, 25 bp, Artificial
  Probe
ctccttatgggtagggctctgacaa

SEQ ID NO: 320405 - DNA, 25 bp, Artificial
  Probe
cttatgggtagggctctgacaaagc

SEQ ID NO: 320406 - DNA, 25 bp, Artificial
  Probe
aaaggcagctgttgtctcttctcct

SEQ ID NO: 320407 - DNA, 25 bp, Artificial
  Probe
ggctctgacaaagcttcccgattaa

SEQ ID NO: 320408 - DNA, 25 bp, Artificial
  Probe
ttatgggtagggctctgacaaagct

SEQ ID NO: 320409 - DNA, 25 bp, Artificial
  Probe
tcttctccttatgggtagggctctg

SEQ ID NO: 320410 - DNA, 25 bp, Artificial
  Probe
aataaaggcagctgttgtctcttct

SEQ ID NO: 320411 - DNA, 25 bp, Artificial
  Probe
ggcagctgttgtctcttctccttat

SEQ ID NO: 320412 - DNA, 25 bp, Artificial
  Probe
agaataaaggcagctgttgtctctt

SEQ ID NO: 320413 - DNA, 25 bp, Artificial
  Probe
cttctccttatgggtagggctctga

SEQ ID NO: 320414 - DNA, 25 bp, Artificial
  Probe
ctcttctccttatgggtagggctct

SEQ ID NO: 320415 - DNA, 25 bp, Artificial
  Probe
tgttgtctcttctccttatgggtag

SEQ ID NO: 320416 - DNA, 25 bp, Artificial
  Probe
ctctgacaaagcttcccgattaact

SEQ ID NO: 320417 - DNA, 25 bp, Artificial
  Probe
gttgtctcttctccttatgggtagg

SEQ ID NO: 320418 - DNA, 25 bp, Artificial
  Probe
tgggtagggctctgacaaagcttcc

SEQ ID NO: 320419 - DNA, 25 bp, Artificial
  Probe
tatgggtagggctctgacaaagctt

SEQ ID NO: 320420 - DNA, 25 bp, Artificial
  Probe
gcagctgttgtctcttctccttatg

SEQ ID NO: 320421 - DNA, 25 bp, Artificial
  Probe
gctctgacaaagcttcccgattaac

SEQ ID NO: 320422 - DNA, 25 bp, Artificial
  Probe
cagctgttgtctcttctccttatgg

SEQ ID NO: 320423 - DNA, 25 bp, Artificial
  Probe
gacactggatgtttcttaatctctt

SEQ ID NO: 320424 - DNA, 25 bp, Artificial
  Probe
ggagcctcacctggacccggaggca

SEQ ID NO: 320425 - DNA, 25 bp, Artificial
  Probe
tcatggacactggatgtttcttaat

SEQ ID NO: 320426 - DNA, 25 bp, Artificial
  Probe
ctggattcccaaggagccagcttgg

SEQ ID NO: 320427 - DNA, 25 bp, Artificial
  Probe
tgacatccggggatcgccagtgagt

SEQ ID NO: 320428 - DNA, 25 bp, Artificial
  Probe
tgccacacttgtgctgaccagcgac

SEQ ID NO: 320429 - DNA, 25 bp, Artificial
  Probe
gatcgccagtgagtgtggaagttca

SEQ ID NO: 320430 - DNA, 25 bp, Artificial
  Probe
ctggagcctcacctggacccggagg

SEQ ID NO: 320431 - DNA, 25 bp, Artificial
  Probe
ggacactggatgtttcttaatctct

SEQ ID NO: 320432 - DNA, 25 bp, Artificial
  Probe
ctgccacacttgtgctgaccagcga

SEQ ID NO: 320433 - DNA, 25 bp, Artificial
  Probe
tggagcctcacctggacccggaggc

SEQ ID NO: 320434 - DNA, 25 bp, Artificial
  Probe
agttcatggacactggatgtttctt

SEQ ID NO: 320435 - DNA, 25 bp, Artificial
  Probe
gctggagcctcacctggacccggag

SEQ ID NO: 320436 - DNA, 25 bp, Artificial
  Probe
acactggatgtttcttaatctcttg

SEQ ID NO: 320437 - DNA, 25 bp, Artificial
  Probe
tgctggagcctcacctggacccgga

SEQ ID NO: 320438 - DNA, 25 bp, Artificial
  Probe
atcgccagtgagtgtggaagttcat

SEQ ID NO: 320439 - DNA, 25 bp, Artificial
  Probe
ttcatggacactggatgtttcttaa

SEQ ID NO: 320440 - DNA, 25 bp, Artificial
  Probe
aagttcatggacactggatgtttct

SEQ ID NO: 320441 - DNA, 25 bp, Artificial
  Probe
gttcatggacactggatgtttctta

SEQ ID NO: 320442 - DNA, 25 bp, Artificial
  Probe
atggacactggatgtttcttaatct

SEQ ID NO: 320443 - DNA, 25 bp, Artificial
  Probe
tcgccagtgagtgtggaagttcatg

SEQ ID NO: 320444 - DNA, 25 bp, Artificial
  Probe
gaagttcatggacactggatgtttc

SEQ ID NO: 320445 - DNA, 25 bp, Artificial
  Probe
catggacactggatgtttcttaatc

SEQ ID NO: 320446 - DNA, 25 bp, Artificial
  Probe
ttccgctgctggagcctcacctgga

SEQ ID NO: 320447 - DNA, 25 bp, Artificial
  Probe
tggacactggatgtttcttaatctc

SEQ ID NO: 320448 - DNA, 25 bp, Artificial
  Probe
tggattcccaaggagccagcttggt

SEQ ID NO: 320449 - DNA, 25 bp, Artificial
  Probe
agaagcccttcaagtgcgagttcga

SEQ ID NO: 320450 - DNA, 25 bp, Artificial
  Probe
gagtcctcttctcagggctcacagc

SEQ ID NO: 320451 - DNA, 25 bp, Artificial
  Probe
cctttgcaagatgtgcgataagtcc

SEQ ID NO: 320452 - DNA, 25 bp, Artificial
  Probe
aagcccttcaagtgcgagttcgagg

SEQ ID NO: 320453 - DNA, 25 bp, Artificial
  Probe
cctggctgcggcaaggttttcgcac

SEQ ID NO: 320454 - DNA, 25 bp, Artificial
  Probe
caaacacatgaaggtccatgagtcc

SEQ ID NO: 320455 - DNA, 25 bp, Artificial
  Probe
atgtgcgataagtcctacacgcacc

SEQ ID NO: 320456 - DNA, 25 bp, Artificial
  Probe
tcttccaattttaacgaatggtacg

SEQ ID NO: 320457 - DNA, 25 bp, Artificial
  Probe
gatccacaaaaggacgcacacaggg

SEQ ID NO: 320458 - DNA, 25 bp, Artificial
  Probe
ggttttcgcacgttcagagaacctc

SEQ ID NO: 320459 - DNA, 25 bp, Artificial
  Probe
ccaacagcagcgaccgcaagaagca

SEQ ID NO: 320460 - DNA, 25 bp, Artificial
  Probe
tacaaactggtcaaccacatccgcg

SEQ ID NO: 320461 - DNA, 25 bp, Artificial
  Probe
aagatccacaaaaggacgcacacag

SEQ ID NO: 320462 - DNA, 25 bp, Artificial
  Probe
agcagcgaccgcaagaagcacatgc

SEQ ID NO: 320463 - DNA, 25 bp, Artificial
  Probe
agctctctgcgcaaacacatgaagg

SEQ ID NO: 320464 - DNA, 25 bp, Artificial
  Probe
ttcgccaacagcagcgaccgcaaga

SEQ ID NO: 320465 - DNA, 25 bp, Artificial
  Probe
tgcatacgggcgaaaagccttttcc

SEQ ID NO: 320466 - DNA, 25 bp, Artificial
  Probe
gcaagaagcacatgcacgtgcacac

SEQ ID NO: 320467 - DNA, 25 bp, Artificial
  Probe
agcgcgctctcttccaattttaacg

SEQ ID NO: 320468 - DNA, 25 bp, Artificial
  Probe
gctctcttccaattttaacgaatgg

SEQ ID NO: 320469 - DNA, 25 bp, Artificial
  Probe
gttcagagaacctcaagatccacaa

SEQ ID NO: 320470 - DNA, 25 bp, Artificial
  Probe
cttcaagtgcgagttcgagggctgc

SEQ ID NO: 320471 - DNA, 25 bp, Artificial
  Probe
caaactggtcaaccacatccgcgtg

SEQ ID NO: 320472 - DNA, 25 bp, Artificial
  Probe
cgcaaacacatgaaggtccatgagt

SEQ ID NO: 320473 - DNA, 25 bp, Artificial
  Probe
cagagaacctcaagatccacaaaag

SEQ ID NO: 320474 - DNA, 25 bp, Artificial
  Probe
gccagctcggggtatgaatcgtcca

SEQ ID NO: 320475 - DNA, 25 bp, Artificial
  Probe
accacatccgcgtgcatacgggcga

SEQ ID NO: 320476 - DNA, 25 bp, Artificial
  Probe
tgcacgtgcacactagcgacaagcc

SEQ ID NO: 320477 - DNA, 25 bp, Artificial
  Probe
agcgacaagccctacctttgcaaga

SEQ ID NO: 320478 - DNA, 25 bp, Artificial
  Probe
ccttcaagtgcgagttcgagggctg

SEQ ID NO: 320479 - DNA, 25 bp, Artificial
  Probe
ccgtttcctggctgcggcaaggttt

SEQ ID NO: 320480 - DNA, 25 bp, Artificial
  Probe
agctcggggtatgaatcgtccacgc

SEQ ID NO: 320481 - DNA, 25 bp, Artificial
  Probe
agaagcacatgcacgtgcacactag

SEQ ID NO: 320482 - DNA, 25 bp, Artificial
  Probe
atccacaaaaggacgcacacagggg

SEQ ID NO: 320483 - DNA, 25 bp, Artificial
  Probe
gcggcaaggttttcgcacgttcaga

SEQ ID NO: 320484 - DNA, 25 bp, Artificial
  Probe
ctgcccgtttcctggctgcggcaag

SEQ ID NO: 320485 - DNA, 25 bp, Artificial
  Probe
tggtcaaccacatccgcgtgcatac

SEQ ID NO: 320486 - DNA, 25 bp, Artificial
  Probe
gcgcgctctcttccaattttaacga

SEQ ID NO: 320487 - DNA, 25 bp, Artificial
  Probe
ctttgcaagatgtgcgataagtcct

SEQ ID NO: 320488 - DNA, 25 bp, Artificial
  Probe
ctacctttgcaagatgtgcgataag

SEQ ID NO: 320489 - DNA, 25 bp, Artificial
  Probe
caaggttttcgcacgttcagagaac

SEQ ID NO: 320490 - DNA, 25 bp, Artificial
  Probe
tgcgcaaacacatgaaggtccatga

SEQ ID NO: 320491 - DNA, 25 bp, Artificial
  Probe
tgtgcgataagtcctacacgcaccc

SEQ ID NO: 320492 - DNA, 25 bp, Artificial
  Probe
atccgcgtgcatacgggcgaaaagc

SEQ ID NO: 320493 - DNA, 25 bp, Artificial
  Probe
aacacatgaaggtccatgagtcctc

SEQ ID NO: 320494 - DNA, 25 bp, Artificial
  Probe
acactagcgacaagccctacctttg

SEQ ID NO: 320495 - DNA, 25 bp, Artificial
  Probe
ccagcgacgatgagatgatgacccc

SEQ ID NO: 320496 - DNA, 25 bp, Artificial
  Probe
gatggcatccgcagcaagcctgccg

SEQ ID NO: 320497 - DNA, 25 bp, Artificial
  Probe
tgcagatccacctgagcacgcactt

SEQ ID NO: 320498 - DNA, 25 bp, Artificial
  Probe
gtgagaagccccatgcctgcaagtg

SEQ ID NO: 320499 - DNA, 25 bp, Artificial
  Probe
agcctgccgccgatgtcaatgtgcc

SEQ ID NO: 320500 - DNA, 25 bp, Artificial
  Probe
cttgtcggtcaaaagtgaagcactg

SEQ ID NO: 320501 - DNA, 25 bp, Artificial
  Probe
cgagcgcaggttcacgcagtccgga

SEQ ID NO: 320502 - DNA, 25 bp, Artificial
  Probe
ggtgcacacccgtgagaagccccat

SEQ ID NO: 320503 - DNA, 25 bp, Artificial
  Probe
ctcaagcgccacgagaggactcact

SEQ ID NO: 320504 - DNA, 25 bp, Artificial
  Probe
tgagttggtgaactccttgtcggtc

SEQ ID NO: 320505 - DNA, 25 bp, Artificial
  Probe
catgcctgcaagtggtgcgagcgca

SEQ ID NO: 320506 - DNA, 25 bp, Artificial
  Probe
aggttcacgcagtccggagacctgt

SEQ ID NO: 320507 - DNA, 25 bp, Artificial
  Probe
tatgtctccaatatcctgagccccg

SEQ ID NO: 320508 - DNA, 25 bp, Artificial
  Probe
tctctgtgtgggaagactttctcct

SEQ ID NO: 320509 - DNA, 25 bp, Artificial
  Probe
cgcacttccgcgagcaggatggcat

SEQ ID NO: 320510 - DNA, 25 bp, Artificial
  Probe
tgtgccccctgtgcaacaaagtctt

SEQ ID NO: 320511 - DNA, 25 bp, Artificial
  Probe
tgagcacgcacttccgcgagcagga

SEQ ID NO: 320512 - DNA, 25 bp, Artificial
  Probe
aaagtgaagcactgagcttgcccac

SEQ ID NO: 320513 - DNA, 25 bp, Artificial
  Probe
acacgtgcacccagtgcggcaagag

SEQ ID NO: 320514 - DNA, 25 bp, Artificial
  Probe
cacgcagtccggagacctgtacaga

SEQ ID NO: 320515 - DNA, 25 bp, Artificial
  Probe
cacgccgtggtgcacacccgtgaga

SEQ ID NO: 320516 - DNA, 25 bp, Artificial
  Probe
agagactggaccttagaagatagct

SEQ ID NO: 320517 - DNA, 25 bp, Artificial
  Probe
ccactgtgagttggtgaactccttg

SEQ ID NO: 320518 - DNA, 25 bp, Artificial
  Probe
gcatggagagcagtctgcttcccta

SEQ ID NO: 320519 - DNA, 25 bp, Artificial
  Probe
acgtgcacccagtgcggcaagagtt

SEQ ID NO: 320520 - DNA, 25 bp, Artificial
  Probe
gactggaccttagaagatagctctc

SEQ ID NO: 320521 - DNA, 25 bp, Artificial
  Probe
gtttccagtactcacacaacctgag

SEQ ID NO: 320522 - DNA, 25 bp, Artificial
  Probe
acccagtgcggcaagagtttccagt

SEQ ID NO: 320523 - DNA, 25 bp, Artificial
  Probe
gcaagagtttccagtactcacacaa

SEQ ID NO: 320524 - DNA, 25 bp, Artificial
  Probe
cagatcttcatgtgccccctgtgca

SEQ ID NO: 320525 - DNA, 25 bp, Artificial
  Probe
gccagatcttcatgtgccccctgtg

SEQ ID NO: 320526 - DNA, 25 bp, Artificial
  Probe
gcgccacgagaggactcactcaggg

SEQ ID NO: 320527 - DNA, 25 bp, Artificial
  Probe
gccccgcgggccagatcttcatgtg

SEQ ID NO: 320528 - DNA, 25 bp, Artificial
  Probe
ttgcccactgtcagagactggacct

SEQ ID NO: 320529 - DNA, 25 bp, Artificial
  Probe
aagcactgagcttgcccactgtcag

SEQ ID NO: 320530 - DNA, 25 bp, Artificial
  Probe
gtgcgagcgcaggttcacgcagtcc

SEQ ID NO: 320531 - DNA, 25 bp, Artificial
  Probe
gagcagtctgcttccctatgtctcc

SEQ ID NO: 320532 - DNA, 25 bp, Artificial
  Probe
tgtacagacacatccgcaagttcca

SEQ ID NO: 320533 - DNA, 25 bp, Artificial
  Probe
catgtgccccctgtgcaacaaagtc

SEQ ID NO: 320534 - DNA, 25 bp, Artificial
  Probe
gcaggttcacgcagtccggagacct

SEQ ID NO: 320535 - DNA, 25 bp, Artificial
  Probe
gaggacaaagccagcgacgatgaga

SEQ ID NO: 320536 - DNA, 25 bp, Artificial
  Probe
gaagactttctcctgcatgtacacc

SEQ ID NO: 320537 - DNA, 25 bp, Artificial
  Probe
tgtgggaagactttctcctgcatgt

SEQ ID NO: 320538 - DNA, 25 bp, Artificial
  Probe
accttagaagatagctctcaagaac

SEQ ID NO: 320539 - DNA, 25 bp, Artificial
  Probe
gtgcacacccgtgagaagccccatg

SEQ ID NO: 320540 - DNA, 25 bp, Artificial
  Probe
ctgagcacgcacttccgcgagcagg

SEQ ID NO: 320541 - DNA, 25 bp, Artificial
  Probe
ccctcgcagcgaggagaatcgctgc

SEQ ID NO: 320542 - DNA, 25 bp, Artificial
  Probe
tcttagtgaagatgggagggaacgg

SEQ ID NO: 320543 - DNA, 25 bp, Artificial
  Probe
gtgaattcacccattccagccccac

SEQ ID NO: 320544 - DNA, 25 bp, Artificial
  Probe
gtctgcacgtctaggtgaattcacc

SEQ ID NO: 320545 - DNA, 25 bp, Artificial
  Probe
acggagccatttgctgaaggggtct

SEQ ID NO: 320546 - DNA, 25 bp, Artificial
  Probe
gggtctgcacgtctaggtgaattca

SEQ ID NO: 320547 - DNA, 25 bp, Artificial
  Probe
gctatcggagcagagcggacccctc

SEQ ID NO: 320548 - DNA, 25 bp, Artificial
  Probe
gcacgtctaggtgaattcacccatt

SEQ ID NO: 320549 - DNA, 25 bp, Artificial
  Probe
gagccatttgctgaaggggtctgca

SEQ ID NO: 320550 - DNA, 25 bp, Artificial
  Probe
cctttcaccgctgcgtcacggtggg

SEQ ID NO: 320551 - DNA, 25 bp, Artificial
  Probe
ggtctgcacgtctaggtgaattcac

SEQ ID NO: 320552 - DNA, 25 bp, Artificial
  Probe
gggtgagctgtacccctttcccagg

SEQ ID NO: 320553 - DNA, 25 bp, Artificial
  Probe
ggggtctgcacgtctaggtgaattc

SEQ ID NO: 320554 - DNA, 25 bp, Artificial
  Probe
cgggtgagctgtacccctttcccag

SEQ ID NO: 320555 - DNA, 25 bp, Artificial
  Probe
acacggagccatttgctgaaggggt

SEQ ID NO: 320556 - DNA, 25 bp, Artificial
  Probe
cctcccgttcttagtgaagatggga

SEQ ID NO: 320557 - DNA, 25 bp, Artificial
  Probe
tctaggtgaattcacccattccagc

SEQ ID NO: 320558 - DNA, 25 bp, Artificial
  Probe
ttgctatcggagcagagcggacccc

SEQ ID NO: 320559 - DNA, 25 bp, Artificial
  Probe
gaaggggtctgcacgtctaggtgaa

SEQ ID NO: 320560 - DNA, 25 bp, Artificial
  Probe
tgcacgtctaggtgaattcacccat

SEQ ID NO: 320561 - DNA, 25 bp, Artificial
  Probe
aaggggtctgcacgtctaggtgaat

SEQ ID NO: 320562 - DNA, 25 bp, Artificial
  Probe
acctcccgttcttagtgaagatggg

SEQ ID NO: 320563 - DNA, 25 bp, Artificial
  Probe
ctctccagccaaaccaacttttcac

SEQ ID NO: 320564 - DNA, 25 bp, Artificial
  Probe
gttgctatcggagcagagcggaccc

SEQ ID NO: 320565 - DNA, 25 bp, Artificial
  Probe
ctatcggagcagagcggacccctcg

SEQ ID NO: 320566 - DNA, 25 bp, Artificial
  Probe
tgctatcggagcagagcggacccct

SEQ ID NO: 320567 - DNA, 25 bp, Artificial
  Probe
ctgcacgtctaggtgaattcaccca

SEQ ID NO: 320568 - DNA, 25 bp, Artificial
  Probe
agccatttgctgaaggggtctgcac

SEQ ID NO: 320569 - DNA, 25 bp, Artificial
  Probe
tacacggagccatttgctgaagggg

SEQ ID NO: 320570 - DNA, 25 bp, Artificial
  Probe
taggtgaattcacccattccagccc

SEQ ID NO: 320571 - DNA, 25 bp, Artificial
  Probe
tccagccaaaccaacttttcacctc

SEQ ID NO: 320572 - DNA, 25 bp, Artificial
  Probe
aggggtctgcacgtctaggtgaatt

SEQ ID NO: 320573 - DNA, 25 bp, Artificial
  Probe
tcgcagcgaggagaatcgctgcccc

SEQ ID NO: 320574 - DNA, 25 bp, Artificial
  Probe
cacggagccatttgctgaaggggtc

SEQ ID NO: 320575 - DNA, 25 bp, Artificial
  Probe
tctgcacgtctaggtgaattcaccc

SEQ ID NO: 320576 - DNA, 25 bp, Artificial
  Probe
cacgtctaggtgaattcacccattc

SEQ ID NO: 320577 - DNA, 25 bp, Artificial
  Probe
gtctaggtgaattcacccattccag

SEQ ID NO: 320578 - DNA, 25 bp, Artificial
  Probe
ttgctgaaggggtctgcacgtctag

SEQ ID NO: 320579 - DNA, 25 bp, Artificial
  Probe
cgaggagaatcgctgccccgccctg

SEQ ID NO: 320580 - DNA, 25 bp, Artificial
  Probe
tcccgttcttagtgaagatgggagg

SEQ ID NO: 320581 - DNA, 25 bp, Artificial
  Probe
cgtctaggtgaattcacccattcca

SEQ ID NO: 320582 - DNA, 25 bp, Artificial
  Probe
cagggacccggggctggcagtccgc

SEQ ID NO: 320583 - DNA, 25 bp, Artificial
  Probe
gccatttgctgaaggggtctgcacg

SEQ ID NO: 320584 - DNA, 25 bp, Artificial
  Probe
atacacggagccatttgctgaaggg

SEQ ID NO: 320585 - DNA, 25 bp, Artificial
  Probe
ctcccgttcttagtgaagatgggag

SEQ ID NO: 320586 - DNA, 25 bp, Artificial
  Probe
ctaggtgaattcacccattccagcc

SEQ ID NO: 320587 - DNA, 25 bp, Artificial
  Probe
gaaccacaaaatccaggcgcaaact

SEQ ID NO: 320588 - DNA, 25 bp, Artificial
  Probe
gcacaagccgccatagttgtgtatg

SEQ ID NO: 320589 - DNA, 25 bp, Artificial
  Probe
gaacgaaccacaaaatccaggcgca

SEQ ID NO: 320590 - DNA, 25 bp, Artificial
  Probe
atagctaaaaagctgccaaagaacg

SEQ ID NO: 320591 - DNA, 25 bp, Artificial
  Probe
aaatccaggcgcaaactcagccaga

SEQ ID NO: 320592 - DNA, 25 bp, Artificial
  Probe
tttcatgagtttcaagagagtacca

SEQ ID NO: 320593 - DNA, 25 bp, Artificial
  Probe
ttactgagcctgcacagccagccag

SEQ ID NO: 320594 - DNA, 25 bp, Artificial
  Probe
gctgccaaagaacgaaccacaaaat

SEQ ID NO: 320595 - DNA, 25 bp, Artificial
  Probe
gtatcatagcctagcaccaatgtac

SEQ ID NO: 320596 - DNA, 25 bp, Artificial
  Probe
aggagtagaccttactgagcctgca

SEQ ID NO: 320597 - DNA, 25 bp, Artificial
  Probe
ttacaaatgaggagtccttttcgag

SEQ ID NO: 320598 - DNA, 25 bp, Artificial
  Probe
taccattggggctgcctttctaacc

SEQ ID NO: 320599 - DNA, 25 bp, Artificial
  Probe
agagagtaccattggggctgccttt

SEQ ID NO: 320600 - DNA, 25 bp, Artificial
  Probe
gtttcaagagagtaccattggggct

SEQ ID NO: 320601 - DNA, 25 bp, Artificial
  Probe
gaaaggccaatttcatgagtttcaa

SEQ ID NO: 320602 - DNA, 25 bp, Artificial
  Probe
gcaacaagacccaacgggccaaata

SEQ ID NO: 320603 - DNA, 25 bp, Artificial
  Probe
ccgaggagcacaagccgccatagtt

SEQ ID NO: 320604 - DNA, 25 bp, Artificial
  Probe
tggggctgcctttctaacccaaact

SEQ ID NO: 320605 - DNA, 25 bp, Artificial
  Probe
aacttcaaaggcaagcaagtcctaa

SEQ ID NO: 320606 - DNA, 25 bp, Artificial
  Probe
gaaacaaggctgacttagcaaataa

SEQ ID NO: 320607 - DNA, 25 bp, Artificial
  Probe
gacatcagctaagacatcaatgaat

SEQ ID NO: 320608 - DNA, 25 bp, Artificial
  Probe
tccttttcgagagcaaaaaactggg

SEQ ID NO: 320609 - DNA, 25 bp, Artificial
  Probe
gctgcctttctaacccaaactgtgt

SEQ ID NO: 320610 - DNA, 25 bp, Artificial
  Probe
gcctgcacagccagccaggagtcag

SEQ ID NO: 320611 - DNA, 25 bp, Artificial
  Probe
aagagctgttgacttccaggaagca

SEQ ID NO: 320612 - DNA, 25 bp, Artificial
  Probe
tagaccttactgagcctgcacagcc

SEQ ID NO: 320613 - DNA, 25 bp, Artificial
  Probe
tttgtcaggaaacaaggctgactta

SEQ ID NO: 320614 - DNA, 25 bp, Artificial
  Probe
tcgctttgtgaaaggccaatttcat

SEQ ID NO: 320615 - DNA, 25 bp, Artificial
  Probe
tgtgtcttgatgacacaacagtaaa

SEQ ID NO: 320616 - DNA, 25 bp, Artificial
  Probe
caagtcctaatattgtgatagcttt

SEQ ID NO: 320617 - DNA, 25 bp, Artificial
  Probe
tttctaacccaaactgtgtgtcttg

SEQ ID NO: 320618 - DNA, 25 bp, Artificial
  Probe
cgccatagttgtgtatgatattaca

SEQ ID NO: 320619 - DNA, 25 bp, Artificial
  Probe
agaacggtatcatagcctagcacca

SEQ ID NO: 320620 - DNA, 25 bp, Artificial
  Probe
ggaagcacagtcctatgcagatgac

SEQ ID NO: 320621 - DNA, 25 bp, Artificial
  Probe
taaagaacttcaaaggcaagcaagt

SEQ ID NO: 320622 - DNA, 25 bp, Artificial
  Probe
tcagccagaggaagaggagtagacc

SEQ ID NO: 320623 - DNA, 25 bp, Artificial
  Probe
tagctaaaaagctgccaaagaacga

SEQ ID NO: 320624 - DNA, 25 bp, Artificial
  Probe
cttgatgacacaacagtaaaatttg

SEQ ID NO: 320625 - DNA, 25 bp, Artificial
  Probe
tcagctaagacatcaatgaatgtaa

SEQ ID NO: 320626 - DNA, 25 bp, Artificial
  Probe
tgatagctttgtcaggaaacaaggc

SEQ ID NO: 320627 - DNA, 25 bp, Artificial
  Probe
gttcaaactggttcttctaggagag

SEQ ID NO: 320628 - DNA, 25 bp, Artificial
  Probe
cgaggagcaacaagacccaacgggc

SEQ ID NO: 320629 - DNA, 25 bp, Artificial
  Probe
ttaaagaacttcaaaggcaagcaag
